(19) United States
(12) Patent Application Publication
(10) Pub. No.: US 2006/0257851 A1
(43) Pub. Date: Nov. 16, 2006

(54) Bioinformatically detectable group of novel viral regulatory genes and uses thereof

(76) Inventor: Itzhak Bentwich, Rehovot (IL)

Correspondence Address: HOWREY LLP, C/O IP DOCKETING DEPARTMENT, 2941 FAIRVIEW PARK DR, SUITE 200, FALLS CHURCH, VA, 22042-2924, US

(21) Appl. No.: 10/536,560

(22) PCT Filed: Nov. 26, 2003
(86) PCT No.: PCT/IL03/00998

§ 371 Date: Dec. 20, 2005

Related U.S. Application Data
(63) Continuation-in-part of application No. 10/308,778, filed on Dec. 3, 2002.
Application No. 10/308,778 is a division of application No. 09/522,872, filed on Mar. 10, 2000, now Pat. No. 6,599,723.
Application No. PCT/IL03/00998 is a continuation-in-part of application No. 10/310,188, filed on Dec. 5, 2002, now abandoned.
Application No. 10/310,188 is a continuation-in-part of application No. 10/303,778, filed on Nov. 26, 2002, now abandoned.
Application No. 10/310,188 is a continuation-in-part of application No. 10/604,945, filed on Aug. 27, 2003.
Application No. 10/604,945 is a continuation of application No. 10/303,778, filed on Nov. 26, 2002, now abandoned.
Application No. PCT/IL03/00998 is a continuation-in-part of application No. 10/604,942, filed on Aug. 28, 2003.
Application No. 10/604,942 is a continuation of application No. 10/310,188, filed on Dec. 5, 2002, now abandoned.
Application No. PCT/IL03/00998 is a continuation-in-part of application No. 10/604,943, filed on Aug. 28, 2003.
Application No. PCT/IL03/00998 is a continuation-in-part of application No. 10/604,944, filed on Aug. 28, 2003.
Application No. PCT/IL03/00998 is a continuation-in-part of application No. 10/604,984, filed on Aug. 29, 2003.
Application No. PCT/IL03/00998 is a continuation-in-part of application No. 10/605,838, filed on Oct. 30, 2003.
Application No. 10/605,838 is a continuation of application No. 10/604,944, filed on Aug. 28, 2003.
Application No. 10/605,838 is a continuation-in-part of application No. 10/303,778, filed on Nov. 26, 2002, now abandoned.
Application No. 10/605,838 is a continuation-in-part of application No. 10/310,188, filed on Dec. 5, 2002, now abandoned.
Application No. 10/605,838 is a continuation-in-part of application No. 10/604,945, filed on Aug. 27, 2003.
Application No. 10/605,838 is a continuation-in-part of application No. 10/604,942, filed on Aug. 28, 2003.
Application No. 10/605,838 is a continuation-in-part of application No. 10/604,943, filed on Aug. 28, 2003.
Application No. 10/605,838 is a continuation-in-part of application No. 10/604,984, filed on Aug. 29, 2003.
Application No. PCT/IL03/00998 is a continuation-in-part of application No. 10/605,840, filed on Oct. 30, 2003.
(60) Provisional application No. 60/123,833, filed on Mar. 11, 1999.
(60) Provisional application No. 60/441,241, filed on Jan. 17, 2003.
(60) Provisional application No. 60/411,230, filed on Sep. 17, 2002.
(60) Provisional application No. 60/457,788, filed on Mar. 27, 2003.
(60) Provisional application No. 60/441,241, filed on Jan. 17, 2003.
(60) Provisional application No. 60/411,230, filed on Sep. 17, 2002.
(60) Provisional application No. 60/457,788, filed on Mar. 27, 2003.
(60) Provisional application No. 60/411,230, filed on Sep. 17, 2002.
(60) Provisional application No. 60/441,241, filed on Jan. 17, 2003.
(60) Provisional application No. 60/457,788, filed on Mar. 27, 2003.

(51) Int. Cl. C12Q 1/70; C07H 21/04

(52) U.S. Cl. 435/5; 536/23.72

(57) ABSTRACT

The present invention relates to a first group of novel genes, here identified as genomic address messenger or VGAM genes, and a second group of novel operon-like genes, here identified as viral genomic record or VGR genes. VGAM genes selectively inhibit translation of known ‘target’ genes, many of which are known to be involved in various diseases. Nucleic acid molecules are provided respectively encoding 1560 VGAM genes, and 205 VGR genes, as are vectors and probes both comprising the nucleic acid molecules, and methods and systems for detecting VGAM and VGR genes and specific functions and utilities thereof, for detecting expression of VGAM and VGR genes, and for selectively enhancing and selectively inhibiting translation of the respective target genes thereof.

### BACKGROUND OF THE INVENTION

[0001] 1. Field of the Invention

[0002] The present invention relates to a group of bioinformatically detectable novel viral genes, here identified as Viral Genomic Address Messenger or VGAM genes, which are believed to be related to the micro RNA (miRNA) group of genes.

[0003] 2. Description of Prior Art

[0004] MIR genes are regulatory genes encoding MicroRNA's (miRNA), short ˜22 nt non-coding RNA's, found in a wide range of species, believed to function as specific gene translation repressors, sometimes involved in cell-differentiation. Some 110 human MIR genes have been detected by laboratory means. Over the past 6 months, the need for computerized detection of MIR genes has been recognized, and several informatic detection engines have been reported (Lim, 2003; Grad, 2003; Lai, 2003). Collectively these informatic detection engines found 38 more human MIR genes which were later confirmed in zebrafish, 14 human MIR genes which were confirmed in human, and 55 postulated human MIR genes which could not be confirmed by laboratory (Lim, 2003). Extensive efforts to identify novel MIR genes using conventional biological detection techniques such as massive cloning and sequencing efforts, and several bioinformatic detection attempts, have led leading researchers in the field to the conclusion that the total number of human MIR genes is between 200 to 255 (Lau, 2003; Lim 2003 Science; Lim, 2003 Genes Dev). Recent studies postulate that the number of MIR genes may be higher (Grad, 2003; Krichevsky, 2003).

[0005] The ability to detect novel MIR genes is limited by the methodologies used to detect such genes. All MIR genes identified so far either present a visibly discernable whole body phenotype, as do Lin-4 and Let-7 (Wightman, 1993; Reinhart, 2000), or produce sufficient quantities of RNA so as to be detected by the standard molecular biological techniques.

[0006] Initial studies reporting MIR genes (Bartel, 2001; Tuschl, 2001) discovered 93 MIR genes in several species, by sequencing a limited number of clones (300 by Bartel and 100 by Tuschl) of small segments (i.e. size fractionated) RNA. MiRNA encoded by MIR genes detected in these studies therefore, represent the more prevalent among the miRNA gene family, and can not be much rarer than 1% of all small ˜20 nt-long RNA segments.

[0007] Current methodology has therefore been unable to detect micro RNA genes (MIR genes) which either do not present a visually discernable whole body phenotype, or are rare (e.g. rarer than 0.1% of all size fractionated ˜20 nt-long RNA segments expressed in the tissues examined), and therefore do not produce significant enough quantities of RNA so as to be detected by standard biological techniques. To date, miRNA have not been detected in viruses.

### BRIEF DESCRIPTION OF SEQUENCE LISTING, LARGE TABLES AND COMPUTER PROGRAM LISTING

[0008] Sequence listing, large tables related to sequence listing, and computer program listing are filed under section 801 (a)(i) on an electronic medium in computer readable form, attached to the present invention, and are hereby incorporated by reference. Said sequence listing, large tables related to sequence listing, and computer program listing are submitted on a CD-ROM (Operating system: MS-Windows), entitled SEQUENCE LISTING AND LARGE TABLES, containing files the names and sizes of which are as follows:

[0009] Sequence listing comprising 424,595 genomic sequences, is filed under section 801 (a)(i) on an electronic medium in computer readable form, attached to the present invention, and is hereby incorporated by reference. Said sequence listing is contained in a self extracting compressed file named SEQ_LIST.EXE (8,389 KB). Compressed file contains 1 file named SEQ_LIST.TXT (63,778 KB).

[0010] Large tables relating to genomic sequences are stored in 7 self extracting files, each comprising a respective one of the following table files: TABLE1.TXT (229 KB); TABLE2.TXT (878 KB); TABLE3.TXT (147 KB); TABLE4.TXT (353,556 KB); TABLE5.TXT (868,334 KB); TABLE6.TXT (208,163 KB); and TABLE7.TXT (52 KB).

[0011] It is appreciated that the nucleotide ‘U’ is represented as ‘T’ in the sequences incorporated in the enclosed large tables.

[0012] Computer program listing of a computer program constructed and operative in accordance with a preferred embodiment of the present invention is enclosed on an electronic medium in computer readable form, and is hereby incorporated by reference. The computer program listing is contained in a self extracting compressed file named COMPUTER PROGRAM LISTING.EXE (100 KB). Compressed file contains 7 files, the name and sizes of which are as follows: AUXILARY_FILES.TXT (117 KB); BINDING_SITE_SCORING.TXT (17 KB); EDIT_DISTANCE.TXT (104 KB); FIRST-K.TXT (48K); HAIRPIN_PREDICTIO.TXT (47 KB); TWO_PHASED_PREDICTOR.TXT (74 KB); and TWO_PHASED_SIDE_SELECTOR.TXT (4 KB).

### SUMMARY OF THE INVENTION

[0013] The present invention relates to a novel group of bioinformatically detectable, viral regulatory RNA genes, which repress expression of host target host genes, by means of complementary hybridization to binding sites in untranslated regions of these host target host genes. It is believed that this novel group of viral genes represent a pervasive viral mechanism of attacking hosts, and that therefore knowledge of this novel group of viral genes may be useful in preventing and treating viral diseases.

[0014] In various preferred embodiments, the present invention seeks to provide improved method and system for detection and prevention of viral disease, which is mediated by this group of novel viral genes.

[0015] Accordingly, the invention provides several substantially pure nucleic acids (e.g., genomic nucleic acid, cDNA or synthetic nucleic acid) each encoding a novel viral gene of the VGAM group of gene, vectors comprising the nucleic acids, probes comprising the nucleic acids, a method and system for selectively modulating translation of known “target” genes utilizing the vectors, an1d a method and system for detecting expression of known “target” genes utilizing the probe.

[0016] By “substantially pure nucleic acid” is meant nucleic acid that is free of the genes which, in the naturally-occurring genome of the organism from which the nucleic acid of the invention is derived, flank the genes discovered and isolated by the present invention. The term therefore includes, for example, a recombinant nucleic acid which is incorporated into a vector, into an autonomously replicating plasmid or virus, or into the genomic nucleic acid of a prokaryote or eukaryote at a site other than its natural site; or which exists as a separate molecule (e.g., a cDNA or a genomic or cDNA fragment produced by PCR or restriction endonuclease digestion) independent of other sequences. It also includes a recombinant nucleic acid which is part of a hybrid gene encoding additional polypeptide sequence.

[0017] “Inhibiting translation” is defined as the ability to prevent synthesis of a specific protein encoded by a respective gene, by means of inhibiting the translation of the mRNA of this gene. “Translation inhibiter site” is defined as the minimal nucleic acid sequence sufficient to inhibit translation.

[0018] There is thus provided in accordance with a preferred embodiment of the present invention a bioinformatically detectable novel viral gene encoding substantially pure nucleic acid wherein: RNA encoded by the bioinformatically detectable novel viral gene is about 18 to about 24 nucleotides in length, and originates from an RNA precursor, which RNA precursor is about 50 to about 120 nucleotides in length, a nucleotide sequence of a first half of the RNA precursor is a partial inversed-reversed sequence of a nucleotide sequence of a second half thereof, a nucleotide sequence of the RNA encoded by the novel viral gene is a partial inversed-reversed sequence of a nucleotide sequence of a binding site associated with at least one host target gene, and a function of the novel viral gene is bioinformatically deducible.

[0019] There is further provided in accordance with another preferred embodiment of the present invention a method for anti-viral treatment comprising neutralizing said RNA.

[0020] Further in accordance with a preferred embodiment of the present invention the neutralizing comprises: synthesizing a complementary nucleic acid molecule, a nucleic sequence of which complementary nucleic acid molecule is a partial inversed-reversed sequence of said RNA, and transfecting host cells with the complementary nucleic acid molecule, thereby complementarily binding said RNA.

[0021] Further in accordance with a preferred embodiment of the present invention the neutralizing comprises immunologically neutralizing.

[0022] There is still further provided in accordance with another preferred embodiment of the present invention a bioinformatically detectable novel viral gene encoding substantially pure nucleic acid wherein: RNA encoded by the bioinformatically detectable novel viral gene includes a plurality of RNA sections, each of the RNA sections being about 50 to about 120 nucleotides in length, and including an RNA segment, which RNA segment is about 18 to about 24 nucleotides in length, a nucleotide sequence of a first half of each of the RNA sections encoded by the novel viral gene is a partial inversed-reversed sequence of nucleotide sequence of a second half thereof, a nucleotide sequence of each of the RNA segments encoded by the novel viral gene is a partial inversed-reversed sequence of the nucleotide sequence of a binding site associated with at least one target host gene, and a function of the novel viral gene is bioinformatically deducible from the following data elements: the nucleotide sequence of the RNA encoded by the novel viral gene, a nucleotide sequence of the at least one target host gene, and function of the at least one target host gene.

[0023] Further in accordance with a preferred embodiment of the present invention the function of the novel viral gene is bioinformatically deducible from the following data elements: the nucleotide sequence of the RNA encoded by the bioinformatically detectable novel viral gene, a nucleotide sequence of the at least one target host gene, and a function of the at least one target host gene.

[0024] Still further in accordance with a preferred embodiment of the present invention the RNA encoded by the novel viral gene complementarily binds the binding site associated with the at least one target host gene, thereby modulating expression of the at least one target host gene.

[0025] Additionally in accordance with a preferred embodiment of the present invention the binding site associated with at least one target host gene is located in an untranslated region of RNA encoded by the at least one target host gene.

[0026] Moreover in accordance with a preferred embodiment of the present invention the function of the novel viral gene is selective inhibition of translation of the at least one target host gene, which selective inhibition includes complementary hybridization of the RNA encoded by the novel viral gene to the binding site.

[0027] Further in accordance with a preferred embodiment of the present invention the invention includes a vector including the DNA.

[0028] Still further in accordance with a preferred embodiment of the present invention the invention includes a method of selectively inhibiting translation of at least one gene, including introducing the vector.

[0029] Moreover in accordance with a preferred embodiment of the present invention the introducing includes utilizing RNAi pathway.

[0030] Additionally in accordance with a preferred embodiment of the present invention the invention includes a gene expression inhibition system including: the vector, and a vector inserter, functional to insert the vector into a cell, thereby selectively inhibiting translation of at least one gene.

[0031] Further in accordance with a preferred embodiment of the present invention the invention includes a probe including the DNA.

[0032] Still further in accordance with a preferred embodiment of the present invention the invention includes a method of selectively detecting expression of at least one gene, including using the probe.

[0033] Additionally in accordance with a preferred embodiment of the present invention the invention includes a gene expression detection system including: the probe, and a gene expression detector functional to selectively detect expression of at least one gene.

[0034] Further in accordance with a preferred embodiment of the present invention the invention includes an anti-viral substance capable of neutralizing the RNA.

[0035] Still further in accordance with a preferred embodiment of the present invention the neutralizing includes complementarily binding the RNA.

[0036] Additionally in accordance with a preferred embodiment of the present invention the neutralizing includes immunologically neutralizing.

[0037] Moreover in accordance with a preferred embodiment of the present invention the invention includes a method for anti-viral treatment including neutralizing the RNA.

[0038] Further in accordance with a preferred embodiment of the present invention the neutralizing includes: synthesizing a complementary nucleic acid molecule, a nucleic sequence of which complementary nucleic acid molecule is a partial inversed-reversed sequence of the RNA, and transfecting host cells with the complementary nucleic acid molecule, thereby complementarily binding the RNA.

[0039] Still further in accordance with a preferred embodiment of the present invention the neutralizing includes immunologically neutralizing.

### BRIEF DESCRIPTION OF DRAWINGS

[0040] FIG. 1 is a simplified diagram illustrating a mode by which viral genes of a novel group of viral genes of the present invention, modulate expression of known host target genes;

[0041] FIG. 2 is a simplified block diagram illustrating a bioinformatic gene detection system capable of detecting genes of the novel group of viral genes of the present invention, which system is constructed and operative in accordance with a preferred embodiment of the present invention;

[0042] FIG. 3 is a simplified flowchart illustrating operation of a mechanism for training of a computer system to recognize the novel viral genes of the present invention, which mechanism is constructed and operative in accordance with a preferred embodiment of the present invention;

[0043] FIG. 4A is a simplified block diagram of a non-coding genomic sequence detector constructed and operative in accordance with a preferred embodiment of the present invention;

[0044] FIG. 4B is a simplified flowchart illustrating operation of a non-coding genomic sequence detector constructed and operative in accordance with a preferred embodiment of the present invention;

[0045] FIG. 5A is a simplified block diagram of a hairpin detector constructed and operative in accordance with a preferred embodiment of the present invention;

[0046] FIG. 5B is a simplified flowchart illustrating operation of a hairpin detector constructed and operative in accordance with a preferred embodiment of the present invention;

[0047] FIG. 6A is a simplified block diagram of a dicer-cut location detector constructed and operative in accordance with a preferred embodiment of the present invention;

[0048] FIG. 6B is a simplified flowchart illustrating training of a dicer-cut location detector constructed and operative in accordance with a preferred embodiment of the present invention;

[0049] FIG. 6C is a simplified flowchart illustrating operation of a dicer-cut location detector constructed and operative in accordance with a preferred embodiment of the present invention;

[0050] FIG. 7A is a simplified block diagram of a target-gene binding-site detector constructed and operative in accordance with a preferred embodiment of the present invention;

[0051] FIG. 7B is a simplified flowchart illustrating operation of a target-gene binding-site detector constructed and operative in accordance with a preferred embodiment of the present invention;

[0052] FIG. 8 is a simplified flowchart illustrating operation of a function & utility analyzer constructed and operative in accordance with a preferred embodiment of the present invention;

[0053] FIG. 9 is a simplified diagram describing a novel bioinformatically detected group of viral regulatory genes, referred to here as Viral Genomic Record (VGR) genes, each of which encodes an ‘operon-like’ cluster of novel miRNA-like viral genes, which in turn modulate expression of one or more host target genes;

[0054] FIG. 10 is a block diagram illustrating different utilities of novel viral genes and novel operon-like viral genes, both of the present invention;

[0055] FIGS. 11A and 11B are simplified diagrams, which when taken together illustrate a mode of gene therapy applicable to novel viral genes of the present invention;

[0056] FIG. 12 is a table summarizing laboratory validation results which validate efficacy of a bioinformatic gene detection system constructed and operative in accordance with a preferred embodiment of the present invention;

[0057] FIG. 13 is a picture of laboratory results validating the expression of 37 novel human genes detected by a bioinformatic gene detection engine constructed and operative in accordance with a preferred embodiment of the present invention, thereby validating the efficacy of the gene detection engine of the present invention;

[0058] FIG. 14A is a schematic representation of an ‘operon like’ cluster of novel human gene hairpin sequences detected bioinformatically by a bioinformatic gene detection engine constructed and operative in accordance with a preferred embodiment of the present invention, and non-GAM hairpin useful as negative controls thereto;

[0059] FIG. 14B is a schematic representation of secondary folding of hairpins of the operon-like cluster of FIG. 14A;

[0060] FIG. 14C is a picture of laboratory results demonstrating expression of novel human genes of FIGS. 14A and 14B, and lack of expression of the negative controls, thereby validating efficacy of bioinformatic detection of GAM genes and GR genes of the present invention, by a bioinformatic gene detection engine constructed and operative in accordance with a preferred embodiment of the present invention;

[0061] FIG. 15A is an annotated sequence of EST72223 comprising known human miRNA gene MIR98 and novel human gene GAM25, both detected by the gene detection system of the present invention; and

[0062] FIGS. 15B, 15C and 15D are pictures of laboratory results demonstrating laboratory confirmation of expression of known human gene MIR98 and of novel bioinformatically detected human gene GAM25 respectively, both of FIG. 15A, thus validating the bioinformatic gene detection system of the present invention.

[0063] FIG. 16 presents pictures of laboratory results demonstrating laboratory confirmation of ‘dicing’ of four novel bioinformatically detected HIV1 VGAMs into their corresponding mature genes, herein designated VGAM2032.2 (FIG. 16B), VGAM3249.1 (FIG. 16C), VGAM507.2 (FIG. 16D) and VGAM1016.2 (FIG. 16E).

[0064] FIG. 17 presents pictures of laboratory results demonstrating laboratory confirmation of expression of two novel bioinformatically detected Vaccinia VGAM precursors, herein designated VGAM224, and VGAM3184.

### DETAILED DESCRIPTION OF DRAWINGS

[0065] Reference is now made to FIG. 1, which is a simplified diagram describing each of a plurality of novel bioinformatically detected viral genes of the present invention, referred to here as Viral Genomic Address Messenger (VGAM) genes, which modulates expression of respective target genes thereof, the function and utility of which host target genes is known in the art.

[0066] VGAM is a novel bioinformatically detected regulatory, non protein coding, micro RNA (miRNA) viral gene. The method by which VGAM is detected is described hereinabove with reference to FIGS. 1-8.

[0067] VGAM GENE is gene contained in the virus genome and TARGET GENE is a human gene contained in the human genome.

[0068] VGAM GENE encodes a VGAM PRECURSOR RNA. Similar to other miRNA genes, and unlike most ordinary genes, VGAM PRECURSOR RNA does not encode a protein.

[0069] VGAM PRECURSOR RNA folds onto itself, forming VGAM FOLDED PRECURSOR RNA, which has a two-dimensional ‘hairpin structure’. As is well known in the art, this ‘hairpin structure’, is typical of RNA encoded by miRNA genes, and is due to the fact that the nucleotide sequence of the first half of the RNA encoded by a miRNA gene is an accurately or partially inversed reversed sequence of the nucleotide sequence of the second half thereof. By inversed reversed is meant a sequence which is reversed and wherein each nucleotide is replaced by a complementary nucleotide, as is well known in the art (e.g. ATGGC is the reverse complementary sequence of GCCAT).

[0070] An enzyme complex designated DICER COMPLEX, ‘dices’ the VGAM FOLDED PRECURSOR RNA into VGAM RNA, a single stranded ˜22 nt long RNA segment. As is known in the art, ‘dicing’ of a hairpin structured RNA precursor product into a short ˜22 nt RNA segment is catalyzed by an enzyme complex comprising an enzyme called Dicer together with other necessary proteins.

[0071] TARGET GENE encodes a corresponding messenger RNA, VGAM TARGET RNA. VGAM TARGET RNA comprises three regions, as is typical of mRNA of a protein coding gene: a 5′ untranslated region, a protein coding region and a 3′ untranslated region, designated 5′UTR, PROTEIN CODING and 3′UTR respectively.

[0072] VGAM RNA binds complementarily to one or more target binding sites located in untranslated regions of VGAM TARGET RNA. This complementary binding is due to the fact that the nucleotide sequence of VGAM RNA is a partial or accurate inversed reversed sequence of the nucleotide sequence of each of the host target binding sites. As an illustration, FIG. 1 shows three such target binding sites, designated BINDING SITE I, BINDING SITE II and BINDING SITE III respectively. It is appreciated that the number of host target binding sites shown in FIG. 1 is meant as an illustration only, and is not meant to be limiting VGAM RNA may have a different number of host target binding sites in untranslated regions of a VGAM TARGET RNA. It is further appreciated that while FIG. 1 depicts host target binding sites in the 3′UTR region, this is meant as an example only, these target binding sites may be located in the 3′UTR region, the 5′UTR region, or in both 3′UTR and 5′UTR regions.

[0073] The complementary binding of VGAM RNA to target binding sites on VGAM TARGET RNA, such as BINDING SITE I, BINDING SITE II and BINDING SITE III, inhibits translation of VGAM TARGET RNA into VGAM TARGET PROTEIN. VGAM TARGET PROTEIN is therefore outlined by a broken line.

[0074] It is appreciated that TARGET GENE in fact represents a plurality of VGAM target genes. The mRNA of each one of this plurality of VGAM target genes comprises one or more target binding sites, each having a nucleotide sequence which is at least partly complementary to VGAM RNA, and which when bound by VGAM RNA causes inhibition of translation of respective one or more VGAM host target proteins.

[0075] It is further appreciated by one skilled in the art that the mode of translational inhibition illustrated by FIG. 1 with specific reference to translational inhibition exerted by VGAM GENE on one or more TARGET GENE, is in fact common to other known miRNA genes, as is well known in the art.

[0076] Nucleotide sequences of each of a plurality of VGAM GENEs described by FIG. 1 and their respective genomic source and chromosomal location are further described hereinbelow with reference to Table 1, hereby incorporated by reference.

[0077] Nucleotide sequences of VGAM PRECURSOR RNA, and a schematic representation of a predicted secondary folding of VGAM FOLDED PRECURSOR RNA, of each of a plurality of VGAM GENEs described by FIG. 1 are further described hereinbelow with reference to Table 2, hereby incorporated by reference.

[0078] Nucleotide sequences of a ‘diced’ VGAM RNA of each of a plurality of VGAM GENEs described by FIG. 1 are further described hereinbelow with reference to Table 3, hereby incorporated by reference.

[0079] Nucleotide sequences of host target binding sites, such as BINDING SITE-I, BINDING SITE-II and BINDING SITE-III of FIG. 1, found on VGAM TARGET RNA, of each of a plurality of VGAM GENEs described by FIG. 1, and schematic representation of the complementarity of each of these host target binding sites to each of a plurality of VGAM RNA described by FIG. 1 are described hereinbelow with reference to Table 4, hereby incorporated by reference.

[0080] It is appreciated that specific functions and accordingly utilities of each of a plurality of VGAM GENEs described by FIG. 1 correlate with, and may be deduced from, the identity of the TARGET GENEs that each of said plurality of VGAM GENEs binds and inhibits, and the function of each of said TARGET GENEs, as elaborated hereinbelow with reference to Table 5, hereby incorporated by reference.

[0081] Studies establishing known functions of each of a plurality of TARGET GENEs of VGAM GENEs of FIG. 1, and correlation of said each of a plurality of TARGET GENEs to known diseases are listed in Table 6, and are hereby incorporated by reference.

[0082] The present invention discloses a novel group of genes, the VGAM genes, belonging to the miRNA genes group, and for which a specific complementary binding has been determined.

[0083] Reference is now made to FIG. 2 which is a simplified block diagram illustrating a bioinformatic gene detection system capable of detecting genes of the novel group of genes of the present invention, which system is constructed and operative in accordance with a preferred embodiment of the present invention.

[0084] A centerpiece of the present invention is a bioinformatic gene detection engine 100, which is a preferred implementation of a mechanism capable of bioinformatically detecting genes of the novel group of genes of the present invention.

[0085] The function of the bioinformatic gene detection engine 100 is as follows: it receives three types of input, expressed RNA data 102, sequenced DNA data 104, and protein function data 106, performs a complex process of analysis of this data as elaborated below, and based on this analysis produces output of a bioinformatically detected group of novel genes designated 108.

[0086] Expressed RNA data 102 comprises published expressed sequence tags (EST) data, published mRNA data, as well as other sources of published RNA data. Sequenced DNA data 104 comprises alphanumeric data describing sequenced genomic data, which preferably includes annotation data such as location of known protein coding regions relative to the sequenced data. Protein function data 106 comprises scientific publications reporting studies which elucidated physiological function known proteins, and their connection, involvement and possible utility in treatment and diagnosis of various diseases. Expressed RNA data 102 and sequenced DNA data 104 may preferably be obtained from data published by the National Center for Bioinformatics (NCBI) at the National Institute of Health (NIH) (Jenuth, 2000), as well as from various other published data sources. Protein function data 106 may preferably be obtained from any one of numerous relevant published data sources, such as the Online Mendelian Inherited Disease In Man (OMIM(™)) database developed by John Hopkins University, and also published by NCBI (2000).

[0087] Prior to actual detection of bioinformatically detected novel genes 108 by the bioinformatic gene detection engine 100, a process of bioinformatic gene detection engine training & validation designated 110 takes place. This process uses the known miRNA genes as a training set (some 200 such genes have been found to date using biological laboratory means), to train the bioinformatic gene detection engine 100 to bioinformatically recognize miRNA-like genes, and their respective potential host target binding sites. Bioinformatic gene detection engine training & validation 110 is further described hereinbelow with reference to FIG. 3.

[0088] The bioinformatic gene detection engine 100 comprises several modules which are preferably activated sequentially, and are described as follows:

[0089] A non-coding genomic sequence detector 112 operative to bioinformatically detect non-protein coding genomic sequences. The non-coding genomic sequence detector 112 is further described herein below with reference to FIGS. 4A and 4B.

[0090] A hairpin detector 114 operative to bioinformatically detect genomic ‘hairpin-shaped’ sequences, similar to VGAM FOLDED PRECURSOR of FIG. 1. The hairpin detector 114 is further described herein below with reference to FIGS. 5A and 5B.

[0091] A dicer-cut cation detector 116 operative to bioinformatically detect the location on a hairpin shaped sequence which is enzymatically cut by DICER COMPLEX of FIG. 1. The dicer-cut location detector 116 is further described herein below with reference to FIG. 6A.

[0092] A target-gene binding-site detector 118 operative to bioinformatically detect host target genes having binding sites, the nucleotide sequence of which is partially complementary to that of a given genomic sequence, such as a sequence cut by DICER COMPLEX of FIG. 1. The target-gene binding-site detector 118 is further described hereinbelow with reference to FIGS. 7A and 7B.

[0093] A function & utility analyzer 120 operative to analyze function and utility of target genes, in order to identify host target genes which have a significant clinical function and utility. The function & utility analyzer 120 is further described hereinbelow with reference to FIG. 8.

[0094] Hardware implementation of the bioinformatic gene detection engine 100 is important, since significant computing power is preferably required in order to perform the computation of bioinformatic gene detection engine 100 in reasonable time and cost. For example, it is estimated that a using a powerful 8-processor server (e.g. DELL POWEREDGE(™) 8450, 8 XEON(™) 550 MHz processors, 8 GB RAM), over 6 years (!) of computing time are required to detect all MIR genes in the human EST data, together with their respective binding sites. Various computer hardware and software configurations may be utilized in order to address this computation challenge, as is known in the art. A preferred embodiment of the present invention may preferably comprise a hardware configuration, comprising a cluster of one hundred PCs (PENTIUM(™) IV, 1.7 GHz, with 40 GB storage each), connected by Ethernet to 12 servers (2-CPU, XEON(™) 1.2-2.2 GHz, with ˜200 GB storage each), combined with an 8-processor server (8-CPU, Xeon 550 Mhz w/8 GB RAM) connected via 2 HBA fiber-channels to an EMC CLARIION(™) 100-disks, 3.6 Terabyte storage device. A preferred embodiment of the present invention may also preferably comprise a software configuration which utilizes a commercial database software program, such as MICROSOFT(™) SQL Server 2000. Using such preferred hardware and software configuration, may reduce computing time required to detect all MIR genes in the human EST data, and their respective binding sites, from 6 years to 45 days. It is appreciated that the above mentioned hardware configuration is not meant to be limiting, and is given as an illustration only. The present invention may be implemented in a wide variety of hardware and software configurations.

[0095] The present invention discloses 1560 novel genes of the VGAM group of genes, which have been detected bioinformatically, as described hereinbelow with reference to Table 1 through Table 6, and 205 novel genes of the GR group of genes, which have been detected bioinformatically, as described hereinbelow with reference to Table 7. Laboratory confirmation of 37 bioinformatically predicted genes of the human GAM and GR group of genes, and several bioinformatically predicted genes of the VGAM and VGR group of genes, is described hereinbelow with reference to FIGS. 13 through 17.

[0096] Reference is now made to FIG. 3 which is a simplified flowchart illustrating operation of a mechanism for training a computer system to recognize the novel genes of the present invention. This mechanism is a preferred implementation of the bioinformatic gene detection engine training & validation 110 described hereinabove with reference to FIG. 9.

[0097] BIOINFORMATIC GENE DETECTION ENGINE TRAINING & VALIDATION 110 of FIG. 2 begins by training the bioinformatic gene detection engine to recognize known miRNA genes, as designated by numeral 122. This training step comprises HAIRPIN DETECTOR TRAINING & VALIDATION 124, further described hereinbelow with reference to FIG. 5A, DICER-CUT LOCATION DETECTOR TRAINING & VALIDATION 126, further described hereinbelow with reference to FIGS. 6A and 6B, and TARGET-GENE BINDING-SITE DETECTOR TRAINING & VALIDATION 128, further described hereinbelow with reference to FIG. 7A.

[0098] Next, the BIOINFORMATIC GENE DETECTION ENGINE 100 is used to bioinformatically detect sample novel genes, as designated by numeral 130. Examples of sample novel genes thus detected are described hereinbelow with reference to FIG. 12.

[0099] Finally, wet lab experiments are preferably conducted in order to validate expression and preferably function of the sample novel genes detected by the BIOINFORMATIC GENE DETECTION ENGINE 100 in the previous step. An example of wet-lab validation of the above mentioned sample novel gene bioinformatically detected by the system is described hereinbelow with reference to FIGS. 13 through 17.

[0100] Reference is now made to FIG. 4A which is a simplified block diagram of a preferred implementation of the NON-CODING GENOMIC SEQUENCE DETECTOR 112 described hereinabove with reference to FIG. 2. The NON-PROTEIN CODING GENOMIC SEQUENCE DETECTOR 112 of FIG. 2 preferably receives as input at least two types of published genomic data: EXPRESSED RNA DATA 102 and SEQUENCED DNA DATA 104. The EXPRESSED RNA DATA can include, among others, EST data, EST clusters data, EST genome alignment data and mRNA data. Sources for EXPRESSED RNA DATA 102 include NCBI dbEST, NCBI UniGene clusters and mapping data, and TIGR gene indices. SEQUENCED DNA DATA 104 includes both sequence data (FASTA format files), and features annotation (GenBank file format) mainly from NCBI database. After its initial training, indicated by numeral 134, and based on the above mentioned input data, the NON-PROTEIN CODING GENOMIC SEQUENCE DETECTOR 112 produces as output a plurality of NON-PROTEIN CODING GENOMIC SEQUENCES 136. Preferred operation of the NON-PROTEIN CODING GENOMIC SEQUENCE DETECTOR 112 is described hereinbelow with reference to FIG. 4B.

[0101] Reference is now made to FIG. 4B which is a simplified flowchart illustrating a preferred operation of the NON-CODING GENOMIC SEQUENCE DETECTOR 112 of FIG. 2. Detection of NON-PROTEIN CODING GENOMIC SEQUENCES 136, generally preferably progresses in one of the following two paths:

[0102] A first path for detecting NON-PROTEIN CODING GENOMIC SEQUENCES 136 begins by receiving a plurality of known RNA sequences, such as EST data. Each RNA sequence is first compared to all known protein-coding sequences, in order to select only those RNA sequences which are non-protein coding, i.e. intergenic or intronic. This can preferably be performed by sequence comparison of the RNA sequence to known protein coding sequences, using one of many alignment algorithms known in the art, such as BLAST. This sequence comparison to the DNA preferably also provides the localization of the RNA sequence on the DNA.

[0103] Alternatively, selection of non-protein coding RNA sequences and their localization to the DNA can be performed by using publicly available EST clusters data and genomic mapping databases, such as UNIGENE database published by NCBI or TIGR database, in order map expressed RNA sequences to DNA sequences encoding them, to find the right orientation of EST sequences, and to exclude ESTs which map to protein coding DNA regions, as is well known in the art. Public databases, such as TIGR, may also be used to map an EST to a cluster of ESTs, assumed to be expressed as one piece, and is known in the art as Tentative Human Consensus. Publicly available genome annotation databases, such as NCBI's GENBANK, may also be used to deduce expressed intronic sequences.

[0104] Optionally, an attempt may be made to ‘expand’ the non-protein RNA sequences thus found, by searching for transcription start and end signals, upstream and downstream of location of the RNA on the DNA respectively, as is well known in the art.

[0105] A second path for detecting non-protein coding genomic sequences starts by receiving DNA sequences. The DNA sequences are parsed into non protein coding sequences, based on published DNA annotation data, by extracting those DNA sequences which are between known protein coding sequences. Next, transcription start and end signals are sought. If such signals are found, and depending on their ‘strength’, probable expressed non-protein coding genomic sequences are yielded. Such approach is especially useful for identifying novel GAM genes which are found in proximity to other known miRNA genes, or other wet-lab validated GAM genes. Since, as described hereinbelow with reference to FIG. 9, VGAM genes are frequently found in clusters, therefore sequences near a known mRNA are more likely to contain novel genes. Optionally, sequence orthology, i.e. sequences conservation in an evolutionary related species, may be used to select genomic sequences having higher probability of containing expressed novel VGAM genes.

[0106] It is appreciated that in the present invention the bioinformatics gene detection engine 100 utilize the input genomic sequences, without filtering protein coding regions detected by the non-coding genomic sequence detector 112.

[0107] Reference is now made to FIG. 5A which is a simplified block diagram of a preferred implementation of the HAIRPIN DETECTOR 114 described hereinabove with reference to FIG. 2.

[0108] The goal of the HAIRPIN DETECTOR 114 is to detect ‘hairpin’ shaped genomic sequences, similar to those of known miRNA genes. As mentioned hereinabove with reference to FIG. 1, a ‘hairpin’ genomic sequence refers to a genomic sequence which ‘folds onto itself’ forming a hairpin like shape, due to the fact that nucleotide sequence of the first half of the nucleotide sequence is an accurate or partial complementary sequence of the nucleotide sequence of its second half.

[0109] The HAIRPIN DETECTOR 114 of FIG. 2 receives as input a plurality of NON-PROTEIN CODING GENOMIC SEQUENCES 136 of FIG. 4A. After a phase of HAIRPIN DETECTOR TRAINING & VALIDATION 124 of FIG. 3, the HAIRPIN DETECTOR 114 is operative to detect and output ‘hairpin shaped’ sequences, which are found in the input NON-PROTEIN CODING GENOMIC SEQUENCES 138. The hairpin shaped sequences detected by the HAIRPIN DETECTOR 114 are designated HAIRPINS ON GENOMIC SEQUENCES 138. Preferred operation of the HAIRPIN DETECTOR 114 is described hereinbelow with reference to FIG. 5B.

[0110] The phase of HAIRPIN DETECTOR TRAINING & VALIDATION 124 is an iterative process of applying the HAIRPIN DETECTOR 114 to known hairpin shaped miRNA genes, calibrating the HAIRPIN DETECTOR 114 such that it identifies the training set of known hairpins, as well as sequences which are similar thereto. In a preferred embodiment of the present invention, THE HAIRPIN DETECTOR TRAINING & VALIDATION 124 trains and validates each of the steps of operation of the HAIRPIN DETECTOR 114, which steps are described hereinbelow with reference to FIG. 5B.

[0111] The hairpin detector training and validation 124 preferably uses two sets of data: a training set of known miRNA genes, such as 440 miRNA genes of H. sapiens, M. musculus, C. elegans, C. Brigssae and D. Melanogaster, annotated in RFAM database (Griffiths-Jones 2003), and a large ‘background set’ of hairpins found in expressed non-protein coding genomic sequences, such as a set of 21,985 hairpins found in Tentative Human Concensus (THC) sequences in TIGR database. The ‘background set’ is expected to comprise some valid, previously undetected miRNA hairpins, and many hairpins which are not miRNA hairpins.

[0112] In order to validate the performance of the HAIRPIN DETECTOR 114, a validation method is preferably used, which validation method is a variation on the k-fold cross validation method (Mitchell, 1997). This preferred validation method is devised to better cope with the nature of the training set, which includes large families of similar and even identical miRNAs. The training set is preferably first divided into clusters of miRNAs such that any two miRNAs that belong to different clusters have an Edit Distance score (see Algorithms and Strings, Dan Gusfield, Cambridge University Press, 1997) of at least D=3, i.e. they differ by at least 3 editing operations. Next, the group of clusters is preferably divided into k sets. Then standard k-fold cross validation is preferably performed on this group of clusters, preferably using k=5, such that the members of each cluster are all in the training set or in the test set. It is appreciated that without the prior clustering, standard cross validation methods results in much higher performance of the predictors due to the redundancy of training examples, within the genome of a species and across genomes of different species.

[0113] In a preferred embodiment of the present invention, using the abovementioned validation method, the efficacy of the HAIRPIN DETECTOR 114 is indeed validated: for example, when a similarity threshold is chosen such that 90% of the published miRNA-precursor hairpins are successfully predicted, only 7.6% of the 21,985 background hairpins are predicted to be miRNA-precursors, some of which may indeed be previously unknown miRNA precursors.

[0114] Reference is now made to FIG. 5B which is a simplified flowchart illustrating a preferred operation of the HAIRPIN DETECTOR 114 of FIG. 2.

[0115] A hairpin structure is a secondary structure, resulting from the nucleotide sequence pattern: the nucleotide sequence of the first half of the hairpin is a partial or accurate inversed reversed sequence of the nucleotide sequence of the second half thereof. Various methodologies are known in the art for prediction of secondary and tertiary hairpin structures, based on given nucleotide sequences.

[0116] In a preferred embodiment of the present invention, the HAIRPIN DETECTOR 114 initially calculates possible secondary structure folding patterns of a given one of the non-protein coding genomic sequences 136 and the respective energy of each of these possible secondary folding patterns, preferably using a secondary structure folding algorithm based on free-energy minimization, such as the MFOLD algorithm (Mathews et al., 1999), as is well known in the art.

[0117] Next, the HAIRPIN DETECTOR 114 analyzes the results of the secondary structure folding, in order to determine the presence, and location of hairpin folding structures. A secondary structure folding algorithm, such as MFOLD algorithm, typically provides as output a listing of the base-pairing of the folded shape, i.e. a listing of each pair of connected nucleotides in the sequence. The goal of this second step is to asses this base-pairing listing, in order to determine if it describes a hairpin type bonding pattern. Preferably, each of the sequences that is determined to describe a hairpin structure is folded separately in order to determine its exact folding pattern and free-energy.

[0118] The HAIRPIN DETECTOR 114 then assess those hairpin structures found by the previous step, comparing them to hairpins of known miRNA genes, using various characteristic hairpin features such as length of the hairpin and of its loop, free-energy and thermodynamic stability, amount and type of mismatched nucleotides, existence of sequence repeat-elements. Only hairpins that bear statistically significant resemblance to the training set of known miRNA hairpins, according to the abovementioned parameters are accepted.

[0119] In a preferred embodiment of the present invention, similarity to the training set of known miRNA hairpins is determined using a ‘similarity score’ which is calculated using a weighted sum of terms, where each term is a function of one of the abovementioned hairpin features, and the parameters of each function are learned from the set of known hairpins, as described hereinabove with reference to hairpin detector training & validation 124. The weight of each term in the similarity score is optimized so as to achieve maximal separation between the distribution of similarity scores of hairpins which have been validated as miRNA-precursor hairpins, and the distribution of similarity scores of hairpins detected in the ‘background set’ mentioned hereinabove with reference to FIG. 5B, many of which are expected not to be miRNA-precursor hairpins.

[0120] In another preferred embodiment of the present invention, the abovementioned DETERMINE IF SIMILAR TO KNOWN HAIRPIN-GENES step may may preferably be split into two stages. The first stage is a permissive filter that implements a simplified scoring method, based on a subset of the hairpin features described hereinabove, such as minimal length and maximal free energy. The second stage is more stringent, and a full calculation of the weighted sum of terms described hereinabove is performed. This second stage may preferably be performed only on the subset of hairpins that survived prior filtering stages of the hairpin-detector 114.

[0121] Lastly, the HAIRPIN DETECTOR 114 attempts to select those hairpin structures which are as thermodynamically stable as the hairpins of known miRNA genes. This may preferably be achieved in various manners. A preferred embodiment of the present invention utilizes the following methodology preferably comprising three logical steps:

[0122] First, the HAIRPIN DETECTOR 114 attempts to group potential hairpins into ‘families’ of closely related hairpins. As is known in the art, a free-energy calculation algorithm, typically provides multiple ‘versions’ each describing a different possible secondary structure folding pattern for the given genomic sequence, and the free energy of such possible folding. The HAIRPIN DETECTOR 114 therefore preferably assesses all hairpins found in each of the ‘versions’, grouping hairpins which appear in different versions, but which share near identical locations into a common ‘family’ of hairpins. For example, all hairpins in different versions, the center of which hairpins is within 7 nucleotides of each other may preferably be grouped to a single ‘family’. Hairpins may also be grouped to a single ‘family’ if the sequences of one or more hairpins are identical to, or are subsequences of, the sequence of another hairpin.

[0123] Next, hairpin ‘families’ are assessed, in order to select only those families which represent hairpins that are as stable as those of known miRNA hairpins. Preferably only families which are represented in a majority of the secondary structure folding versions, such as at least in 65% or 80% or 100% of the secondary structure folding versions, are considered stable.

[0124] Finally, an attempt is made to select the most suitable hairpin from each selected family. For example, a hairpin which appears in more versions than other hairpins, and in versions the free-energy of which is lower, may be preferred.

[0125] In another preferred embodiment of the present invention, hairpins with homology to other species, and clusters of thermodynamically stable hairpin are further favored.

[0126] Reference is now made to FIG. 6A which is a simplified block diagram of a preferred implementation of the DICER-CUT LOCATION DETECTOR 116 described hereinabove with reference to FIG. 2.

[0127] The goal of the DICER-CUT LOCATION DETECTOR 116 is to detect the location in which DICER COMPLEX of FIG. 1, comprising the enzyme Dicer, would ‘dice’ the given hairpin sequence, similar to VGAM FOLDED PRECURSOR RNA, yielding VGAM RNA both of FIG. 1.

[0128] The DICER-CUT LOCATION DETECTOR 116 of FIG. 2 therefore receives as input a plurality of HAIRPINS ON GENOMIC SEQUENCES 138 of FIG. 5A, which were calculated by the previous step, and after a phase of DICER-CUT LOCATION DETECTOR TRAINING & VALIDATION 126, is operative to detect a respective plurality of DICER-CUT SEQUENCES FROM HAIRPINS 140, one for each hairpin.

[0129] In a preferred embodiment of the present invention, the DICER-CUT LOCATION DETECTOR 116 preferably uses standard machine learning techniques such as K nearest-neighbors, Bayesian networks and Support Vector Machines (SVM), trained on known dicer-cut locations of known miRNA genes in order to predict dicer-cut locations of novel VGAM genes. The DICER-CUT LOCATION DETECTOR TRAINING & VALIDATION 126 is further described hereinbelow with reference to FIG. 6B.

[0130] Reference is now made to FIG. 6B which is a simplified flowchart illustrating a preferred implementation of DICER-CUT LOCATION DETECTOR TRAINING & VALIDATION 126 of FIG. 3.

[0131] The general goal of the DICER-CUT LOCATION DETECTOR TRAINING & VALIDATION 126 is to analyze known hairpin shaped miRNA-precursors and their respective dicer-cut miRNA, in order to determine a common pattern to the dicer-cut location of known miRNA genes. Once such a common pattern is deduced, it may preferably be used by the DICER-CUT LOCATION DETECTOR 116, in detecting the predicted DICER-CUT SEQUENCES FROM HAIRPINS 140, from the respective HAIRPINS ON GENOMIC SEQUENCES 138, all of FIG. 6A.

[0132] First, the dicer-cut location of all known miRNA genes is obtained and studied, so as to train the DICER-CUT LOCATION DETECTOR 116: for each of the known miRNA, the location of the miRNA relative to its hairpin-shaped miRNA-precursor is noted.

[0133] The 5′ and 3′ ends of the dicer-cut location of each of the known miRNA genes is represented relative to the respective miRNA precursor hairpin, as well as to the nucleotides in each location along the hairpin. Frequency and identity of nucleotides and of nucleotide-pairing, and position of nucleotides and nucleotide pairing relative to the dicer-cut location in the known miRNA precursor hairpins is analyzed and modeled. In a preferred embodiment of the present invention, features learned from published miRNAs include: distance from hairpin's loop, nucleotide content, positional distribution of nucleotides and mismatched-nucleotides, and symmetry of mismatched-nucleotides.

[0134] Different techniques are well known in the art of machine learning for analysis of existing pattern from a given ‘training set’ of examples, which techniques are then capable, to a certain degree, to detect similar patterns in other, previously unseen examples. Such machine learning techniques include, but are not limited to neural networks, Bayesian networks, Support Vector Machines (SVM), Genetic Algorithms, Markovian modeling, Maximum Liklyhood modeling, Nearest Neighbor algorithms, Decision trees and other techniques, as is well known in the art.

[0135] The DICER-CUT LOCATION DETECTOR 116 preferably uses such standard machine learning techniques to predict either the 5′ end or both the 5′ and 3′ ends of the miRNA excised, or ‘diced’ by the Dicer enzyme from the miRNA hairpin shaped precursor, based on known pairs of miRNA-precursors and their respective resulting miRNAs. The nucleotide sequences of 440 published miRNA and their corresponding hairpin precursors are preferably used for training and evaluation of the dicer-cut location detector module.

[0136] Using the abovementioned training set, machine learning predictors, such as a Support Vector Machine (SVM) predictor, are implemented, which predictors test every possible nucleotide on a hairpin as a candidate for being the 5′ end or the 3′ end of a miRNA. Other machine learning predictors include predictors based on Nearest Neighbor, Bayesian modeling, and K-nearest-neighbor algorithms. The training set of the published miRNA precursor sequences is preferably used for training multiple separate classifiers or predictors, each of which produces a model for the 5′ or 3′ end of a miRNA relative to its hairpin precursor. The models take into account various miRNA properties such as the distance of the respective (3′ or 5′) end of the miRNA from the hairpin's loop, the nucleotides at its vicinity and the local ‘bulge’ (i.e. base-pair mismatch) structure.

[0137] Performance of the resulting predictors, evaluated on the abovementioned validation set of 440 published miRNAs using k-fold cross validation (Mitchell, 1997) with k=3, is found to be as follows: in 70% of known miRNAs 5′-end location is correctly determined by an SVM predictor within up to 2 nucleotides; a Nearest Neighbor (EDIT DISTANCE) predictor achieves 53% accuracy ( 233/440); a Two-Phased predictor that uses Baysian modeling (TWO PHASED) achieves 79% accuracy ( 348/440), when only the first phase is used, and 63% ( 277/440) when both phases are used; a K-nearest-neighbor predictor (FIRST-K) achieves 61% accuracy ( 268/440). The accuracies of all predictors are considerably higher on top scoring subsets of published miRNA.

[0138] Finally, in order to validate the efficacy and accuracy of the dicer-cut location detector 116, a sample of novel genes detected thereby is preferably selected, and validated by wet lab. Laboratory results validating the efficacy of the dicer-cut location detector 116 are described hereinbelow with reference to FIGS. 12 through 15D.

[0139] Reference is now made to FIG. 6C which is a simplified flowchart illustrating operation of DICER-CUT LOCATION DETECTOR 116 of FIG. 2, constructed and operative in accordance with a preferred embodiment of the present invention.

[0140] The DICER CUT LOCATION DETECTOR 116 is a machine learning computer program module, which is trained on recognizing dicer-cut location of known miRNA genes, and based on this training, is operable to detect dicer cut location of novel VGAM FOLDED PRECURSOR RNA. In a preferred embodiment of the present invention, the dicer-cut location module preferably utilizes machine learning algorithms, such as Support Vector Machine (SVM), Bayesian modeling, Nearest Neighbors, and K-nearest-neighbor, as is well known in the art.

[0141] When assessing a novel VGAM precursor, all 19-24 nucleotide long segments comprised in the VGAM precursor are initially considered as ‘potential VGAMs’, since the dicer-cut location is initially unknown.

[0142] For each such potential VGAM, its 5′ end, or its 5′ and 3′ ends are scored by two or more recognition classifiers or predictors.

[0143] In a preferred embodiment of the present invention, the DICER-CUT LOCATION DETECTOR 116 preferably uses a Support Vector Machine predictor trained on features such as distance from hairpin's loop, nucleotide content, positional distribution of nucleotides and mismatched-nucleotides, and symmetry of mismatched-nucleotides.

[0144] In another preferred embodiment of the present invention, the DICER-CUT LOCATION DETECTOR 116 preferably uses an ‘EDIT DISTANCE’ predictor, which seeks sequences that are similar to those of published miRNAs, utilizing the Nearest Neighbor algorithm, where the similarity metric between two sequences is a variant of the edit distance algorithm (Algorithms and Strings, Dan Gusfield, Cambridge University Press, 1997). This predictor is based on the observation that miRNAs tend to form clusters (Dostie, 2003), the members of which show marked sequence similarity to each other.

[0145] In yet another preferred embodiment of the present invention, the DICER-CUT LOCATION DETECTOR 116 preferably uses a ‘TWO PHASED’ predictor, which predicts the dicer-cut location in two distinct phases: (a) selecting the double-stranded segment of the hairpin comprising the miRNA by naïve Bayesian modeling (Mitchell, 1997), and (b) detecting which strand contains the miRNA by either naïve or by K-nearest-neighbor modeling. The latter is a variant of the ‘FIRST-K’ predictor described herein below, with parameters optimized for this specific task. The ‘TWO PHASED’ predictor may be operated in two modes: either utilizing only the first phase and thereby producing two alternative dicer-cut location predictions, or utilizing both phases and thereby producing only one final dicer-cut location.

[0146] In still another preferred embodiment of the present invention, the DICER-CUT LOCATION DETECTOR 116 preferably uses a ‘FIRST-K’ predictor, which utilizes the K-nearest-neighbor algorithm. The similarity metric between any two sequences is 1−E/L, where L is a parameter, preferably 8-10 and E is the edit distance between the two sequences, taking into account only the first L nucleotides of each sequence. If the K-nearest-neighbor scores of two or more locations on the hairpin are not significantly different, these locations are further ranked by a Bayesian model, similar to the one described hereinabove.

[0147] Scores of two or more of the abovementioned classifiers or predictors are integrated, yielding an integrated score for each ‘potential VGAM’. As an example, FIG. 13C illustrates integration of scores from two classifiers, a 3′ end recognition classifier and a 5′ end recognition classifier, the scores of which are integrated to yield an integrated score. In a preferred embodiment of the present invention, INTEGRATED SCORE of 13C preferably implements a ‘best-of-breed’ approach, accepting only ‘potential VGAMs’ that score highly on one of the above mentioned EDIT DISTANCE’, or ‘TWO-PHASED’ predictors. In this context, ‘high scores’ means scores which have been demonstrated to have low false positive value when scoring known miRNAs.

[0148] The INTEGRATED SCORE is then evaluated as follows: (a) the ‘potential VGAM’ having the highest score is taken to be the most probable VGAM, and (b) if the integrated score of this ‘potential VGAM’ is higher than a pre-defined threshold, then the potential VGAM is accepted as the PREDICTED VGAM.

[0149] Reference is now made to FIG. 7A which is a simplified block diagram of a preferred implementation of the TARGET-GENE BINDING-SITE DETECTOR 118 described hereinabove with reference to FIG. 2. The goal of the TARGET-GENE BINDING-SITE DETECTOR 118 is to detect a BINDING SITE of FIG. 1, including binding sites located in untranslated regions of the RNA of a known gene, the nucleotide sequence of which BINDING SITE is a partial or accurate inversed reversed sequence to that of a VGAM RNA of FIG. 1, thereby determining that the above mentioned known gene is a host target gene of VGAM of FIG. 1.

[0150] The TARGET-GENE BINDING-SITE DETECTOR 118 of FIG. 2 therefore receives as input a plurality of DICER-CUT SEQUENCES FROM HAIRPINS 140 of FIG. 6A which were calculated by the previous step, and a plurality of POTENTIAL HOST TARGET GENE SEQUENCES 142 which derive from SEQUENCED DNA DATA 104 of FIG. 2, and after a phase of TARGET-GENE BINDING-SITE DETECTOR TRAINING & VALIDATION 128 is operative to detect a plurality of POTENTIAL NOVEL TARGET-GENES HAVING BINDING SITE/S 144 the nucleotide sequence of which is a partial or accurate inversed reversed sequence to that of each of the plurality of DICER-CUT SEQUENCES FROM HAIRPINS 140. Preferred operation of the TARGET-GENE BINDING-SITE DETECTOR 118 is further described hereinbelow with reference to FIG. 7B.

[0151] Reference is now made to FIG. 7B which is a simplified flowchart illustrating a preferred operation of the target-gene binding-site detector 118 of FIG. 2.

[0152] In a preferred embodiment of the present invention, the target-gene binding-site detector 118 first uses a sequence comparison algorithm such as BLAST in order to compare the nucleotide sequence of each of the plurality of dicer-cut sequences from hairpins 140, to the potential host target gene sequences 142, such a untranslated regions of known mRNAs, in order to find crude potential matches. Alternatively, the sequence comparison may preferably be performed using a sequence match search tool that is essentially a variant of the EDIT DISTANCE algorithm described hereinabove with reference to FIG. 6C, and the Nearest Neighbor algorithm (Mitchell, 1997).

[0153] Results of the sequence comparison, performed by BLAST or other algorithms such as EDIT DISTANCE, are then filtered, preferably utilizing BLAST or EDIT DISTANCE score, to results which are similar to those of known binding sites (e.g. binding sites of miRNA genes Lin-4 and Let-7 to target genes Lin-14, Lin-41, Lin 28 etc.). Next the binding site is expanded, checking if nucleotide sequenced immediately adjacent to the binding site found by the sequence comparison algorithm (e.g. BLAST or EDIT DISTANCE), may improve the match. Suitable binding sites, then are computed for free-energy and spatial structure. The results are analyzed, accepting only those binding sites, which have free-energy and spatial structure similar to that of known binding sites. Since known binding sites of known miRNA genes frequently have multiple adjacent binding sites on the same target RNA, accordingly binding sites which are clustered are strongly preferred. Binding sites found in evolutionarily conserved sequences may preferably also be preferred.

[0154] For each candidate binding site a score, Binding Site Prediction Accuracy, is calculated which estimates their similarity of its binding to that of known binding sites. This score is based on VGAM-binding site folding features including, but not limited to the free-energy, the total number and distribution of base pairs, the total number and distribution of unpaired nucleotides.

[0155] In another preferred embodiment of the present invention binding sites are searched by a reversed process: sequences of K (preferably 22) nucleotides of the untranslated regions of the target gene are assessed as potential binding sites. A sequence comparison algorithm, such as BLAST or EDIT DISTANCE, is then used to search for partially or accurately complementary sequences elsewhere in the genome, which complementary sequences are found in known miRNA genes or computationally predicted VGAM genes. Only complementary sequences, the complementarity of which withstands the spatial structure and free energy analysis requirements described above are accepted. Clustered binding sites are strongly favored, as are potential binding sites and potential VGAM genes which occur in evolutionarily conserved genomic sequences.

[0156] Host target binding sites, identified by the TARGET-GENE BINDING-SITE DETECTOR 118, are divided into 4 groups: p) comprises binding sites that are exactly complementary to the predicted VGAM. a) b) and c) comprise binding sites that are not exactly complementary to the predicted VGAM: a) has binding sites with 0.9<Binding Site Prediction Accuracy<=1; b) has binding sites with 0.8<Binding Site Prediction Accuracy<=0.9; c) has binding sites with 0.7<Binding Site Prediction Accuracy<=0.8. The average number of mismatching nucleotides in the alignment of predicted VGAM and target binding site is smallest in category p) and largest in category c).

[0157] In a preferred embodiment of the current invention a ranking of VGAM to host target gene binding is performed by calculating a score, Target Accuracy. This score is the dominant group identifier of all binding sites of a specific VGAM to a specific host target gene UTR, where ‘a’ dominates ‘b’ and ‘b’ dominates ‘c’.

[0158] In yet another preferred embodiment of the current invention a ranking of VGAM to host target gene binding is performed directly from the set of Binding Site Prediction Accuracies corresponding to all the binding sites of a specific VGAM to a specific host target gene UTR. This set of Accuracies is sorted in descending order. The final Target Accuracy is a sum of two terms: the first is a weighted sum of the sorted Accuracies where the weights are exponentially decreasing as a function of the rank. The second term is a monotonously increasing function of the density of binding sites at the host target gene UTR.

[0159] Host target binding genes, identified by the TARGET-GENE BINDING-SITE DETECTOR 118, are divided into 4 groups according to their target binding genes: A) 0.75<Target Accuracy<=1; B) 0.65<Target Accuracy<=0.75; C) 0.5<Target Accuracy<=0.65; D) 0.3<Target Accuracy<=0.5

[0160] Reference is now made to FIG. 8 which is a simplified flowchart illustrating a preferred operation of the function & utility analyzer 120 described hereinabove with reference to FIG. 2. The goal of the function & utility analyzer 120 is to determine if a potential host target gene is in fact a valid clinically useful target gene. Since a potential novel VGAM gene binding a binding site in the UTR of a host target gene is understood to inhibit expression of that target gene, and if that host target gene is shown to have a valid clinical utility, then in such a case it follows that the potential novel viral gene itself also has a valid useful function—which is the opposite of that of the host target gene.

[0161] The function & utility analyzer 120 preferably receives as input a plurality of potential novel host target genes having binding-site/s 144, generated by the target-gene binding-site detector 118, both of FIG. 7A. Each potential viral gene, is evaluated as follows:

[0162] First, the system checks to see if the function of the potential host target gene is scientifically well established. Preferably, this can be achieved bioinformatically by searching various published data sources presenting information on known function of proteins. Many such data sources exist and are published as is well known in the art.

[0163] Next, for those host target genes the function of which is scientifically known and is well documented, the system then checks if scientific research data exists which links them to known diseases. For example, a preferred embodiment of the present invention utilizes the OMIM(™) database published by NCBI, which summarizes research publications relating to genes which have been shown to be associated with diseases.

[0164] Finally, the specific possible utility of the host target gene is evaluated. While this process too may be facilitated by bioinformatic means, it might require manual evaluation of published scientific research regarding the host target gene, in order to determine the utility of the host target gene to the diagnosis and or treatment of specific disease. Only potential novel viral genes, the host target-genes of which have passed all three examinations, are accepted as novel viral genes.

[0165] Reference is now made to FIG. 9, which is a simplified diagram describing each of a plurality of novel bioinformatically detected regulatory genes, referred to here as Viral Genomic Record (VGR) genes, which encodes an ‘operon-like’ cluster of novel micro RNA-like viral genes, each of which in turn modulates expression of at least one host target gene, the function and utility of which at least one host target gene is known in the art.

[0166] VGR GENE is a novel bioinformatically detected regulatory, non protein coding, RNA viral gene. The method by which VGR GENE was detected is described hereinabove with reference to FIGS. 1-9.

[0167] VGR GENE encodes VGR PRECURSOR RNA, an RNA molecule, typically several hundred nucleotides long.

[0168] VGR PRECURSOR RNA folds spatially, forming VGR FOLDED PRECURSOR RNA. It is appreciated that VGR FOLDED PRECURSOR RNA comprises a plurality of what is known in the art as ‘hairpin’ structures. These ‘hairpin’ structures are due to the fact that the nucleotide sequence of VGR PRECURSOR RNA comprises a plurality of segments, the first half of each such segment having a nucleotide sequence which is at least a partial or accurate inversed reversed sequence of the second half thereof, as is well known in the art.

[0169] VGR FOLDED PRECURSOR RNA is naturally processed by cellular enzymatic activity into separate VGAM precursor RNAs, herein schematically represented by VGAM1 FOLDED PRECURSOR RNA through VGAM3 FOLDED PRECURSOR RNA, each of which VGAM precursor RNAs being a hairpin shaped RNA segment, corresponding to VGAM FOLDED PRECURSOR RNA of FIG. 1.

[0170] The above mentioned VGAM precursor RNAs are diced by DICER COMPLEX of FIG. 1, yielding respective short RNA segments of about 22 nucleotides in length, schematically represented by VGAM1 RNA through VGAM3 RNA, each of which VGAM RNAs corresponding to VGAM RNA of FIG. 1.

[0171] VGAM1 RNA, VGAM2 RNA and VGAM3 RNA, each bind complementarily to binding sites located in untranslated regions of respective target genes, designated VGAM1-TARGET RNA, VGAM2-TARGET RNA and VGAM3-TARGET RNA, respectively, which target binding site corresponds to a target binding site such as BINDING SITE I, BINDING SITE II or BINDING SITE III of FIG. 1. This binding inhibits translation of the respective target proteins designated VGAM1-TARGET PROTEIN, VGAM2-TARGET PROTEIN and VGAM3-TARGET PROTEIN respectively.

[0172] It is appreciated that specific functions, and accordingly utilities, of each VGR GENE of the present invention, correlates with, and may be deduced from, the identity of the target genes, which are inhibited by VGAM RNAs comprised in the ‘operon-like’ cluster of said VGR GENE, schematically represented by VGAM1 TARGET PROTEIN through VGAM3 TARGET PROTEIN.

[0173] A listing of VGAM GENEs comprised in each of a plurality of VGR GENEs of FIG. 9 is provided in Table 7, hereby incorporated by reference. Nucleotide sequences of each said GAM GENEs and their respective genomic source and chromosomal location are further described hereinbelow with reference to Table 1, hereby incorporated by reference. TARGET GENEs of each of said GAM GENEs are elaborated hereinbelow with reference to Table 4, hereby incorporated by reference. The functions of each of said TARGET GENEs and their association with various diseases, and accordingly the utilities of said each of GAM GENEs, and hence the functions and utilities of each of said VGR GENEs of FIG. 9 is elaborated hereinbelow with reference to Table 5, hereby incorporated by reference. Studies establishing known functions of each of said TARGET GENEs, and correlation of each of said TARGET GENEs to known diseases are listed in Table 6, and are hereby incorporated by reference.

[0174] The present invention discloses 205 novel genes of the VGR group of genes, which have been detected bioinformatically, as elaborated hereinbelow with reference to Table 7. Laboratory confirmation of 2 genes of the GR group of genes is described hereinbelow with reference to FIGS. 14 through 17.

[0175] In summary, the current invention discloses a very large number of novel VGR genes, each of which encodes a plurality of VGAM genes, which in turn may modulate expression of a plurality of host target proteins.

[0176] Reference is now made to FIG. 10 which is a block diagram illustrating different utilities of genes of the novel group of genes of the present invention referred to here as VGAM genes and VGR genes.

[0177] The present invention discloses a first plurality of novel viral genes referred to here as VGAM genes, and a second plurality of operon-like genes referred to here as VGR genes, each of the VGR genes encoding a plurality of VGAM genes. The present invention further discloses a very large number of known host target-genes, which are bound by, and the expression of which is modulated by each of the novel viral genes of the present invention. Published scientific data referenced by the present invention provides specific, substantial, and credible evidence that the above mentioned host target genes modulated by novel viral genes of the present invention, are associated with various diseases. Specific novel genes of the present invention, host target genes thereof and diseases associated therewith, are described hereinbelow with reference to Tables 1 through 7. It is therefore appreciated that a function of VGAM genes and VGR genes of the present invention is modulation of expression of host target genes related to known diseases, and that therefore utilities of novel genes of the present invention include diagnosis and treatment of the above mentioned diseases. FIG. 10 describes various types of diagnostic and therapeutic utilities of novel genes of the present invention.

[0178] A utility of novel genes of the present invention is detection of VGAM genes and of VGR genes. It is appreciated that since VGAM genes and VGR genes modulate expression of disease related host target genes, that detection of expression of VGAM genes in clinical scenarios associated with said diseases is a specific, substantial and credible utility. Diagnosis of novel viral genes of the present invention may preferably be implemented by RNA expression detection techniques, including but not limited to biochips, as is well known in the art. Diagnosis of expression of genes of the present invention may be useful for research purposes, in order to further understand the connection between the novel genes of the present invention and the above mentioned related diseases, for disease diagnosis and prevention purposes, and for monitoring disease progress.

[0179] Another utility of novel viral genes of the present invention is anti-VGAM gene therapy, a mode of therapy which allows up regulation of a disease related host target-gene of a novel VGAM gene of the present invention, by lowering levels of the novel VGAM gene which naturally inhibits expression of that host target gene. This mode of therapy is particularly useful with respect to target genes which have been shown to be under-expressed in association with a specific disease. Anti-VGAM gene therapy is further discussed hereinbelow with reference to FIGS. 11A and 11B.

[0180] Reference is now made to FIGS. 11A and 11B, simplified diagrams which when taken together illustrate anti-VGAM gene therapy mentioned hereinabove with reference to FIG. 10. A utility of novel genes of the present invention is anti-VGAM gene therapy, a mode of therapy which allows up regulation of a disease related host target-gene of a novel VGAM gene of the present invention, by lowering levels of the novel VGAM gene which naturally inhibits expression of that host target gene. FIG. 11A shows a normal VGAM gene, inhibiting translation of a host target gene of VGAM gene, by binding to a BINDING SITE found in an untranslated region of VGAM TARGET RNA, as described hereinabove with reference to FIG. 1.

[0181] FIG. 11B shows an example of anti-VGAM gene therapy. ANTI-VGAM RNA is short artificial RNA molecule the sequence of which is an anti-sense of VGAM RNA. Anti-VGAM treatment comprises transfecting diseased cells with ANTI-VGAM RNA, or with a DNA encoding thereof. The ANTI-VGAM RNA binds the natural VGAM RNA, thereby preventing binding of natural VGAM RNA to its BINDING SITE. This prevents natural translation inhibition of VGAM TARGET RNA by VGAM RNA, thereby up regulating expression of VGAM TARGET PROTEIN.

[0182] It is appreciated that anti-VGAM gene therapy is particularly useful with respect to host target genes which have been shown to be under-expressed in association with a specific disease.

[0183] Furthermore, anti-VGAM therapy is particularly useful, since it may be used in situations in which technologies known in the art as RNAi and siRNA can not be utilized. As in known in the art, RNAi and siRNA are technologies which offer means for artificially inhibiting expression of a target protein, by artificially designed short RNA segments which bind complementarily to mRNA of said target protein. However, RNAi and siRNA can not be used to directly upregulate translation of target proteins.

[0184] Reference is now made to FIG. 12, which is a table summarizing laboratory validation results that validate efficacy of the bioinformatic gene detection engine 100 of FIG. 2. In order to assess efficacy of the bioinformatic gene detection engine 100, novel genes predicted thereby are preferably divided into 4 DETECTION ACCURACY GROUPS (first column), designated A through D, ranking VGAMS from the most probable VGAMs to the least probable VGAMs, using the scores of HAIRPIN DETECTOR 114 and DICER-CUT LOCATION DETECTOR 116 as follows:

[0185] Group A: score of the HAIRPIN-DETECTOR is above 0.7, the overall score of the two-phased predictor is above 0.55, and the score of the second phase of the two-phased predictor is above 0.75, or the score of the EDIT-DISTANCE predictor is equal or above 17. In this group, one miRNA is predicted for each hairpin. Group B: The score of the HAIRPIN-DETECTOR is above 0.5, the overall score of the two-phased predictor is above 0.55, and the hairpin is not in group A. Group C: The score of the HAIRPIN-DETECTOR is between 0.4 and 0.5, and the overall score of the two-phased predictor is above 0.55. Group D: The score of the HAIRPIN-DETECTOR is between 0.3 and 0.4, and the overall score of the two-phased predictor is above 0.55. In groups B, C and D, if the score of the second phase of the two-phased predictor is above 0.75, one miRNA is predicted for each hairpin, otherwise both sides of the double stranded window are given as output, and are examined in the lab or used for binding site search. The groups are mutually exclusive, i.e. in groups A, C and D all hairpins score less than 17 in the EDIT-DISTANCE predictor.

[0186] It is appreciated that the division into groups is not exhaustive: 410 of the 440 published hairpins (second column), and 896 of the 1560 novel VGAMs, belong to one of the groups. An indication of the real performance of the two phased predictor in the presence of background hairpins is given by the column ‘precision on hairpin mixture’ (third column). The precision on hairpin mixture is computed by mixing the published hairpins with background hairpins in a ratio of 1:4 and taking as a working assumption that they are hairpins not carrying a miRNA. This is a strict assumption, since some of these background hairpins may indeed contain miRNAs, while in this column they are all counted as failures

[0187] Sample novel bioinformatically predicted human genes, of each of these groups are sent to the laboratory for validation (fourth column), and the number (fifth column) and percent (sixth column) of successful validation of predicted human GAM genes is noted for each of the groups, as well as overall (bottom line). The number of novel VGAM genes explicitly specified by present invention belonging to each of the four groups is noted (seventh column).

[0188] It is appreciated that the present invention comprises 896 novel VGAM genes, which fall into one of these four detection accuracy groups, and that the bioinformatic gene detection engine 100 of FIG. 2 is substantiated by a group of 52 novel human GAM genes validated by laboratory means, out of 168 human GAM genes which were tested in the lab, resulting in validation of an overall 31% accuracy. The top group demonstrated 37% accuracy. Pictures of test-results of specific human genes in the abovementioned four groups, as well as the methodology used for validating the expression of predicted genes is elaborated hereinbelow with reference to FIG. 13.

[0189] It is further appreciated that failure to detect a gene in the lab does not necessarily indicate a mistaken bioinformatic prediction. Rather, it may be due to technical sensitivity limitation of the lab test, or because the gene is not expressed in the tissue examined, or at the development phase tested.

[0190] It is still further appreciated that in general these findings are in agreement with the expected bioinformatic accuracy, as describe hereinabove with reference to FIG. 6B: assuming 80% accuracy of the hairpin detector 114 and 80% accuracy of the dicer-cut location detector 116 and 80% accuracy of the lab validation, this would result in 50% overall accuracy of the genes validated in the lab.

[0191] Reference is now made to FIG. 13 which is a picture of laboratory results validating the expression of 37 novel human genes detected by the bioinformatic gene detection engine 100, in the four detection accuracy groups A through D described hereinabove with reference to FIG. 12.

[0192] Each row in FIG. 13, designated A through D, correlates to a corresponding one of the four detection accuracy groups A-D, described hereinabove with reference to FIG. 12. In each row, pictures of several genes validated by hybridization of PCR-product southern-blots, are provided, each corresponding to a specific GAM gene, as elaborated hereinbelow. These PCR-product hybridization pictures are designated 1 through 22 in the A group, 1 through 13 in the B group, 1 in the C group, and 1 in the D group. In each PCR hybridization picture, 2 lanes are seen: the test lane, designated ‘+’ and the control lane, designated ‘−’. For convenience of viewing the results, all PCR-product hybridization pictures of FIG. 13 have been shrunk ×4 vertically. It is appreciated that for each of the tested genes, a clear hybridization band appears in the test (‘+’) lane, but not in the control (‘−’) lane.

[0193] Specifically, FIG. 13 shows pictures of PCR-product hybridization validation by southern-blot, the methodology of which is described hereinbelow, to the following novel human GAM genes (RosettaGenomics Ltd. Gene Nomenclature):

[0194] DETECTION ACCURACY GROUP A: (1) GAM8297.1; (2) GAM5346.1; (3) GAM281.1; (4) GAM8554.1; (5) GAM2071.1; (6) GAM7553.1; (7) GAM5385.1; (8) GAM5227.1; (9) GAM7809.1; (10) GAM1032.1; (11) GAM3431.1; (12) GAM7933.1; (13) GAM3298.1;(14) GAM116.1; (15) GAM3418.1 (later published by other researchers as MIR23); (16) GAM3499.1; (17) GAM3027.1; (18) GAM7080.1; (19) GAM895.1; and (20) GAM2608.1, (21) GAM20, and (22) GAM21.

[0195] DETECTION ACCURACY GROUP B: (1) GAM3770.1; (2) GAM1338.1; (3) GAM7957.1; (4) GAM391.1; (5) GAM 8678.1; (6) GAM2033.1; (7)GAM7776.1; (8) GAM8145.1; (9) GAM 633.1; (10) GAM19; (11) GAM8358.1; (12) GAM3229.1; and (13) GAM7052.1.

[0196] DETECTION ACCURACY GROUP C: GAM25.

[0197] DETECTION ACCURACY GROUP D: GAM7352.1.

[0198] In addition to the PCR detection, the following GAMs were cloned and sequenced: GAM1338.1, GAM7809.1, GAM116.1, GAM3418.1 (later published by other researchers as MIR23), GAM3499.1, GAM3027.1, GAM7080.1, and GAM21.

[0199] The PCR-product hybridization validation methodology used is briefly described as follows. In order to validate the expression of predicted novel GAM/VGAM genes, and assuming that these novel genes are probably expressed at low concentrations, a PCR product cloning approach was set up through the following strategy: two types of cDNA libraries designated “One tailed” and “Ligation” were prepared from frozen HeLa S100 extract (4c Biotech, Belgium) size fractionated RNA. Essentially, Total S100 RNA was prepared through an SDS-Proteinase K incubation followed by an acid Phenol-Chloroform purification and Isopropanol precipitation. Alternatively, total HeLa RNA was also used as starting material for these libraries.

[0200] Fractionation was done by loading up to 500 μg per YM100 Amicon Microcon column (Millipore) followed by a 500 g centrifugation for 40 minutes at 4° C. Flowthrough “YM100” RNA consisting of about ¼ of the total RNA was used for library preparation or fractionated further by loading onto a YM30 Amicon Microcon column (Millipore) followed by a 13,500 g centrifugation for 25 minutes at 4° C. Flowthrough “YM30” was used for library preparation as is and consists of less than 0.5% of total RNA. For the both the “ligation” and the “One-tailed” libraries RNA was dephosphorilated and ligated to an RNA (lowercase)-DNA (UPPERCASE) hybrid 5′-phosphorilated, 3′ idT blocked 3′-adapter (5′-P-uuuAACCGCATTCTC-idT-3′ Dharmacon # P-002045-01-05) (as elaborated in Elbashir et al 2001) resulting in ligation only of RNase III type cleavage products. 3′-Ligated RNA was excised and purified from a half 6%, half 13% polyacrylamide gel to remove excess adapter with a Nanosep 0.2 μM centrifugal device (Pall) according to instructions, and precipitated with glycogen and 3 volumes of Ethanol. Pellet was resuspended in a minimal volume of water. For the “ligation” library a DNA (UPPERCASE)-RNA (lowercase) hybrid 5′-adapter (5′-TACTAATACGACTCACTaaa-3′ Dharmacon # P-002046-01-05) was ligated to the 3′-adapted RNA, reverse transcribed with “EcoRI-RT”: (5′-GACTAGCTGGAATTCAAGGATGCGGTTAAA-3′), PCR amplified with two external primers essentially as in Elbashir et al 2001 except that primers were “EcoRI-RT” and “PstI Fwd” (5′-CAGCCAACGCTGCAGATACGACTCACTAAA-3′). This PCR product was used as a template for a second round of PCR with one hemispecific and one external primer or with two hemispecific primers.

[0201] For the “One tailed” library the 3′-Adapted RNA was annealed to 20 pmol primer “EcoRI RT” by heating to 70° C. and cooling 0.1° C./sec to 30° C. and then reverse transcribed with Superscript II RT (According to instructions, Invitrogen) in a 20 μl volume for 10 alternating 5 minute cycles of 37° C. and 45° C. Subsequently, RNA was digested with 1 μl 2M NaOH, 2 mM EDTA at 65° C. for 10 minutes. cDNA was loaded on a polyacrylamide gel, excised and gel-purified from excess primer as above (invisible, judged by primer run alongside) and resuspended in 13 μl of water. Purified cDNA was then oligo-dC tailed with 400 U of recombinant terminal transferase (Roche molecular biochemicals), 1 μl 100 μM dCTP, 1 μl 15 mM CoCl₂, and 4 μl reaction buffer, to a final volume of 20 μl for 15 minutes at 37° C. Reaction was stopped with 2 μl 0.2M EDTA and 15 μl 3M NaOAc pH 5.2. Volume was adjusted to 150 μl with water, Phenol:Bromochloropropane 10:1 extracted and subsequently precipitated with glycogen and 3 volumes of Ethanol. C-tailed cDNA was used as a template for PCR with the external primers “T3-PstBsg(G/I)₁₈” (5′-AATTAACCCTCACTAAAGGCTGCAGGTGCAGGIGGGIIGGGIIGGGIIGN-3′ where I stands for Inosine and N for any of the 4 possible deoxynucleotides), and with “EcoRI Nested” (5′-GGAATTCAAGGATGCGGTTA-3′). This PCR product was used as a template for a second round of PCR with one hemispecific and one external primer or with two hemispecific primers.

[0202] Hemispecific primers were constructed for each predicted GAM/VGAM by an in-house program designed to choose about half of the 5′ or 3′ sequence of the GAM/VGAM corresponding to a TM° of about 30°-34° C. constrained by an optimized 3′ clamp, appended to the cloning adapter sequence (for “One-tailed” libraries 5′-GGNNGGGNNG on the 5′ end of the GAM/VGAM, or TTTAACCGCATC-3′ on the 3′ end of the GAM/VGAM. For “Ligation” libraries the same 3′ adapter and 5′-CGACTCACTAAA on the 5′ end). Consequently, a fully complementary primer of a TM° higher than 60° C. was created covering only one half of the GAM/VGAM sequence permitting the unbiased elucidation by sequencing of the other half.

Confirmation of GAM/VGAM Sequence Authenticity of PCR Products:

[0203] SOUTHERN BLOT: PCR-product sequences were confirmed by southern blot (Southern EM. Biotechnology. 1992; 24:122-39. (1975)) and hybridization with DNA oligonucleotide probes synthesized against predicted GAMs/VGAMs. Gels were transferred onto a Biodyne PLUS 0.45 μm, (Pall) positively charged nylon membrane and UV cross-linked. Hybridization was performed overnight with DIG-labeled probes at 42° C. in DIG Easy-Hyb buffer (Roche). Membranes were washed twice with 2×SSC and 0.1% SDS for 10 min. at 42° C. and then washed twice with 0.5×SSC and 0.1% SDS for 5 min at 42° C. The membrane was then developed by using a DIG luminescent detection kit (Roche) using anti-DIG and CSPD reaction, according to the manufacturer's protocol. All probes were prepared according to the manufacturers (Roche Molecular Biochemicals) protocols: Digoxigenin (DIG) labeled antisense transcripts was prepared from purified PCR products using a DIG RNA labeling kit with T3 RNA polymerase. DIG labeled PCR was prepared by using a DIG PCR labeling kit. 3′-DIG-tailed oligo ssDNA antisense probes, containing DIG-dUTP and dATP at an average tail length of 50 nucleotides were prepared from 100 pmole oligonucleotides with the DIG Oligonucleotide Labeling Kit.

[0204] CLONING: PCR products were inserted into pGEM-T (Promega) or pTZ57 (MBI Fermentas), transformed into competent JM109 E. coli (Promega) and sown on LB-Amp plates with IPTG/Xgal. White and light-blue colonies were transferred to duplicate gridded plates, one of which was blotted onto a membrane (Biodyne Plus, Pall) for hybridization with DIG tailed oligo probes (according to instructions, Roche) corresponding to the expected GAM. Plasmid DNA from positive colonies was sequenced.

[0205] Reference is now made to FIG. 14A, which is a schematic representation of a novel human GR gene, herein designated GR12731 (RosettaGenomics Ltd. Gene Nomenclature), located on chromosome 9, comprising 2 known MIR genes—MIR23 MIR24, and 2 novel GAM genes, herein designated GAM22 and GAM116, all marked by solid black boxes. FIG. 14A also schematically illustrates 6 non-GAM hairpin sequences, and one non-hairpin sequence, all marked by white boxes, and serving as negative controls. By ‘non-GAM hairpin sequences’ is meant sequences of a similar length to known MIR PRECURSOR sequences, which form hairpin secondary folding pattern similar to MIR PRECURSOR hairpins, and yet which are assessed by the bioinformatic gene detection engine 100 not to be valid GAM PRECURSOR hairpins. It is appreciated that FIG. 14A is a simplified schematic representation, reflecting only the order in which the segments of interest appear relative to one another, and not a proportional distance between the segments.

[0206] Reference is now made to FIG. 14B, which is a schematic representation of secondary folding of each of the MIRs and GAMs of GR GR12731—MIR24, MIR23, GAM22 and GAM116, and of the negative control non-GAM hairpins, herein designated N2, N3, N116, N4, N6 and N7. N0 is a non-hairpin control, of a similar length to that of known MIR PRECURSOR hairpins. It is appreciated that the negative controls are situated adjacent to and in between real MIR and GAM genes, and demonstrates similar secondary folding patterns to that of known MIRs and GAMs.

[0207] Reference is now made to FIG. 14C, which is a picture of laboratory results of a PCR test upon a YM100 “ligation”-library, utilizing specific primer sets directly inside the boundaries of the hairpins. Due to the nature of the library the only PCR amplifiable products can result from RNaseIII type enzyme cleaved RNA, as expected for legitimate hairpin precursors presumed to be produced by DROSHA (Lee et al, Nature 425 415-419, 2003). FIG. 14C demonstrates expression of hairpin precursors of known MIR genes—MIR23 and MIR24, and of novel bioinformatically detected GAM22 and GAM116 genes predicted bioinformatically by a system constructed and operative in accordance with a preferred embodiment of the present invention. FIG. 14C also shows that none of the 7 controls (6 hairpins designated N2, N3, N23, N4, N6 and N7 and 1 non-hairpin sequence designated N0) were expressed. N116 is a negative control sequence partially overlapping GAM116.

[0208] In the picture, test lanes including template are designated ‘+’ and the control lane is designated ‘−’. It is appreciated that for each of the tested hairpins, a clear PCR band appears in the test (‘+’) lane, but not in the control (‘−’) lane.

[0209] FIGS. 14A through 14C, when taken together validate the efficacy of the bioinformatic gene detection engine in: (a) detecting known MIR genes; (b) detecting novel GAM genes which are found adjacent to these MIR genes, and which despite exhaustive prior biological efforts and bioinformatic detection efforts, went undetected; (c) discerning between GAM (or MIR) PRECURSOR hairpins, and non-GAM hairpins.

[0210] It is appreciated that the ability to discern GAM-hairpins from non-GAM-hairpins is very significant in detecting GAM genes, since hairpins in general are highly abundant in the genome. Other MIR prediction programs have not been able to address this challenge successfully.

[0211] Reference is now made to FIG. 15A which is an annotated sequence of human EST comprising a novel gene detected by the gene detection system of the present invention. FIG. 15A shows the nucleotide sequence of a known human non-protein coding EST (Expressed Sequence Tag), identified as EST72223. The EST72223 clone obtained from TIGR database (Kirkness and Kerlavage, 1997) was sequenced to yield the above 705 bp transcript with a polyadenyl tail. It is appreciated that the sequence of this EST comprises sequences of one known miRNA gene, identified as MIR98, and of one novel human GAM gene, referred to here as GAM25, detected by the bioinformatic gene detection system of the present invention and described hereinabove with reference to FIG. 2.

[0212] The sequences of the precursors of the known MIR98 and of the predicted GAM25 are in bold, the sequences of the established miRNA 98 and of the predicted miRNA GAM25 are underlined.

[0213] Reference is now made to FIGS. 15B, 15C and 15D that are pictures of laboratory results, which when taken together demonstrate laboratory confirmation of expression of the bioinformatically detected novel gene of FIG. 15A.

[0214] In two parallel experiments, an enzymatically synthesized capped, EST72223 RNA transcript, was incubated with Hela S100 lysate for 0 minutes, 4 hours and 24 hours. RNA was subsequently harvested, run on a denaturing polyacrylamide gel, and reacted with a 102 nt and a 145 nt antisense MIR98 and GAM25 precursor transcript probes respectively. The Northern blot results of these experiments demonstrated processing of EST72223 RNA by Hela lysate (lanes 2-4, in 15B and 15C), into ˜80 bp and ˜22 bp segments, which reacted with the MIR98 precursor probe (15B), and into ˜100 bp and ˜24 bp segments, which reacted with the GAM25 precursor probe (15C). These results demonstrate the processing of EST72223 by Hela lysate into MIR98 precursor and GAM25 precursor. It is also appreciated from FIG. 15C (lane 1) that Hela lysate itself reacted with the GAM25 precursor probe, in a number of bands, including a ˜100 bp band, indicating that GAM25-precursor is endogenously expressed in Hela cells. The presence of additional bands, higher than 100 bp in lanes 5-9 probably corresponds to the presence of nucleotide sequences in Hela lysate, which contain the GAM25 sequence.

[0215] In addition, in order to demonstrate the kinetics and specificity of the processing of MIR98 and GAM25 miRNA precursors into their respective miRNA's, transcripts of MIR98 and of the bioinformatically predicted GAM25, were similarly incubated with Hela S100 lysate, for 0 minutes, 30 minutes, 1 hour and 24 hours, and for 24 hours with the addition of EDTA, added to inhibit Dicer activity, following which RNA was harvested, run on a polyacrylamide gel and reacted with MIR98 and GAM25 precursor probes. Capped transcripts were prepared for in-vitro RNA cleavage assays with T7 RNA polymerase including a m⁷G(5′)ppp(5′)G-capping reaction using the mMessage mMachine kit (Ambion). Purified PCR products were used as template for the reaction. These were amplified for each assay with specific primers containing a T7 promoter at the 5′ end and a T3 RNA polymerase promoter at the 3′end. Capped RNA transcripts were incubated at 30° C. in supplemented, dialysis concentrated, Hela S100 cytoplasmic extract (4C Biotech, Seneffe, Belgium). The Hela S100 was supplemented by dialysis to a final concentration of 20 mM Hepes, 100 mM KCl, 2.5 mM MgCl₂, 0.5 mM DTT, 20% glycerol and protease inhibitor cocktail tablets (Complete mini Roche Molecular Biochemicals). After addition of all components, final concentrations were 100 mM capped target RNA, 2 mM ATP, 0.2 mM GTP, 500 U/ml RNasin, 25 μg/ml creatine kinase, 25 mM creatine phosphate, 2.5 mM DTT and 50% S100 extract. Proteinase K, used to enhance Dicer activity (Zhang H, Kolb F A, Brondani V, Billy E, Filipowicz W. Human Dicer preferentially cleaves dsRNAs at their termini without a requirement for ATP. EMBO J. 2002 Nov. 1; 21(21):5875-85) was dissolved in 50 mM Tris-HCl pH 8, ≡l mM CaCl₂, and 50% glycerol, was added to a final concentration of 0.6 mg/ml. Cleavage reactions were stopped by the addition of 8 volumes of proteinase K buffer (200 Mm Tris-Hcl, pH 7.5, 25 mM EDTA, 300 mM NaCl, and 2% SDS) and incubated at 65° C. for 15 min at different time points (0, 0.5, 1, 4, 24 h) and subjected to phenol/chloroform extraction. Pellets were dissolved in water and kept frozen. Samples were analyzed on a segmented half 6%, half 13% polyacrylamide 1XTBE-7M Urea gel.

[0216] The Northern blot results of these experiments demonstrated an accumulation of a ˜22 bp segment which reacted with the MIR98 precursor probe, and of a ˜24 bp segment which reacted with the GAM25 precursor probe, over time (lanes 5-8). Absence of these segments when incubated with EDTA (lane 9), which is known to inhibit Dicer enzyme (Zhang et al., 2002), supports the notion that the processing of MIR98 and GAM25 miRNA's from their precursors is mediated by Dicer enzyme, found in Hela lysate. The molecular sizes of EST72223, MIR-98 and GAM25 and their corresponding precursors are indicated by arrows.

[0217] FIG. 15D present Northern blot results of same above experiments with GAM25 probe (24 nt). The results clearly demonstrated the accumulation of mature GAM25 gene after 24 h.

[0218] To validate the identity of the band shown by the lower arrow in FIGS. 15C and 15D, a RNA band parallel to a marker of 24 base was excised from the gel and cloned as in Elbashir et al (2001) and sequenced. 90 clones corresponded to the sequence of mature GAM25 gene, three corresponded to GAM25* (the opposite arm of the hairpin with a 1-3 nucleotide 3′ overhang) and two to the hairpin-loop.

[0219] GAM25 was also validated endogenously by sequencing from both sides from HeLa YM100 total-RNA “ligation” libraries, utilizing hemispecific primers as detailed in FIG. 13.

[0220] Taken together, these results validate the presence and processing of a novel MIR gene product, GAM25, which was predicted bioinformatically. The processing of this novel gene product, by Hela lysate from EST72223, through its precursor, to its final form was similar to that observed for known gene, MIR98.

[0221] Transcript products were 705 nt (EST72223), 102 nt (98 precursor), 125 nt (GAM25 precursor) long. EST72223 was PCR amplified with T7-EST 72223 forward primer:

5′-TAATACGACTCACTATAGGCCCTTATTAGAGGATTCTGCT-3′

[0222] and T3-EST72223 reverse primer:

5′-AATTAACCCTCACTAAAGGTTTTTTTTTCCTGAGACAGAGT-3′.

[0223] MIR98 was PCR amplified using EST72223 as a template with T7MIR98 forward primer:

5-′TAATACGACTCACTATAGGGTGAGGTAGTAAGTTGTATTGTT-3′

[0224] and T3MIR98 reverse primer:

5′-AATTAACCCTCACTAAAGGGAAAGTAGTAAGTTGTATAGTT-3′.

[0225] GAM25 was PCR amp using EST72223 as a template with GAM25 forward primer: 5′-GAGGCAGGAGAATTGCTTGA-3′ and T3-EST72223 reverse primer:

5′-AATTAACCCTCACTAAAGGCCTGAGACAGACTCTTGCTC-3′.

[0226] It is appreciated that the data presented in FIGS. 15A, 15B, 15C and 15D when taken together validate the function of the bioinformatic gene detection engine 100 of FIG. 2. FIG. 15A shows a novel GAM gene bioinformatically detected by the bioinformatic gene detection engine 100, and FIGS. 15C and 15D show laboratory confirmation of the expression of this novel gene. This is in accord with the engine training and validation methodology described hereinabove with reference to FIG. 3.

[0227] It is appreciated by persons skilled in the art that the present invention is not limited by what has been particularly shown and described hereinabove. Rather the scope of the present invention includes both combinations and subcombinations of the various features described hereinabove as well as variations and modifications which would occur to persons skilled in the art upon reading the specifications and which are not in the prior art.

[0228] Reference is now made to FIG. 16, which presents pictures of laboratory results, which demonstrate laboratory confirmation of excision (“dicing”) of the bioinformatically detected novel VGAM HIV1 genes, herein designated VGAM2032.2, VGAM3249.1, VGAM 507.2 and VGAM1016.2 from their predicted precursors by their incubation in HeLa S-100 lysate as described in FIG. 15.

[0229] FIG. 16A presents the entire 5′-UTR of HIV1 (U5R) containing two predicted VGAM precursor genes, in bold; VGAM 2032 and VGAM3249. The bioinformatically predicted mature VGAMs are depicted with underscore, the 5′-most is VGAM 2032.2 and the second is VGAM 3249.1. VGAM 2032.2 matches the known HIV1 RNA structure named TAR to which the TAT protein binds (Nature 1987. 330:489-93).

[0230] FIG. 16B and FIG. 16C depict Northern blot analysis of VGAMs in U5R, hybridized with predicted mature VGAM oligonucleotide probes VGAM 2032.2, and VGAM 3249.1, respectivley. The molecular size of the entire U5R transcript, 355 nt, is indicated by arrow. The predicted molecular sizes of VGAM 2032.2, and VGAM 3249.1 are 22 nt and 17 nt respectively. The 22 nt molecular marker is indicated by arrow. Lanes: 1-Hela lysate; 2-U5R transcript in HeLa Lysate without incubation. 3-U5R transcript incubated overnight with Hela lysate.

[0231] FIGS. 16D and 16E present partial transcripts of HIV1 RNA reacted with predicted mature HIV1-VGAM oligonucleotide probes. In each figure, the experimental transcript sequence is shown, annotated in bold is the predicted VGAM precursor, and in underscore the predicted mature VGAM. Northern blot analysis of VGAM precursors for VGAM507.2 (FIG. 16D), and VGAM1016.2 (FIG. 16E). The transcript sizes are 163 nt for VGAM507.2 transcript and 200 nt for VGAM1016.2 transcript. The predicted molecular sizes of VGAM507.2 and VGAM1016.2 are both 24 nt. The 22 nt molecular marker is indicated by arrow. Lanes: 1—Transcript in HeLa Lysate without incubation. 2—Transcript incubated overnight with HeLa lysate.

[0232] It is appreciated that the sequence of the reacting bands in the foreseen sizes comprise sequences of novel VGAM genes, referred to here as VGAM 2032.2, VGAM 3249.1, VGAM 507.2, VGAM 1016.2, detected by the bioinformatic gene detection engine 100 of the present invention, described hereinabove with reference to FIG. 2.

[0233] Reference is now made to FIG. 17 which presents pictures of laboratory results, which demonstrate laboratory confirmation of expression of the bioinformatically detected novel Vaccinia VGAM genes VGAM224 (FIGS. 17A and 17C) and VGAM3184 (FIG. 17B). HeLa cells were infected with 50 PFU Vaccinia Virus and total RNA was harvested after 3 days. Northern blot analysis of VGAM precursors in total RNA extracted from HeLa cells infected with Vaccinia Virus, lane 1, or HeLa uninfected cells, lane 2, and hybridized with predicted precursor DIG-labled RNA probes of 53 nt for VGAM224 (FIG. 17A), or of 73 nt for VGAM3184 (FIG. 17B) or with a 22 nt γ³²P-ATP-labled DNA oligo probe for predicted mature VGAM224.2 (FIG. 17C). A transcript of predicted sequence and size was run alongside as a size marker and as a hybridization control, lane 3 (except FIG. 17C). Arrow in FIG. 17C marks band of expected precursor size, 53 nt, reacting with mature 22 nt VGAM224.2 probe.

[0234] It is appreciated that the sequence of the reacting bands appear only in infected cells in-vivo and comprise sequences of novel VGAM gene precursors, referred to here as VGAM224 and VGAM3184, detected by the bioinformatic gene detection engine 100 of the present invention, as described hereinabove with reference to FIG. 2.

### DETAILED DESCRIPTION OF LARGE TABLES

[0235] Table 1 comprises data relating to the source and location of novel VGAM genes of the present invention, and contains the following fields:
[0236] GENE NAME Rosetta Genomics Ltd. gene nomenclature (see below)
[0237] VGAM SEQ-ID VGAM Seq-ID, as in the Sequence Listing
[0238] PRECUR SEQ-ID VGAM precursor Seq-ID, as in the Sequence Listing
[0239] ORGANISM Virus name
[0240] GENOME TYPE Genome type of the virus; dsRNA, dsDNA, ssRNA negative-strand, ssRNA positive-strand, Deltavirus or Retroid, as taken from ORGANISM definition by GenBank, NCBI.
[0241] GENOME STRUCTURE genome organization: circular or linear.
[0242] SOURCE_REF-ID Accession number of virus source sequence
[0243] SOURCE_OFFSET Offset of VGAM precursor sequence on source sequence
[0244] STRAND (+) positive strand, (−) negative strand
[0245] SRC Source-type of VGAM precursor sequence (see below)
[0246] VGAM ACC VGAM Prediction Accuracy Group (see below);

[0247] Table 2 comprises data relating to VGAM precursors of novel VGAM genes of the present invention, and contains the following fields:
[0248] GENE NAME Rosetta Genomics Ltd. gene nomenclature (see below)
[0249] PRECUR SEQ-ID VGAM precursor Seq-ID, as in the Sequence Listing
[0250] PRECURSOR SEQUENCE VGAM precursor nucleotide sequence (5′ to 3′)
[0251] FOLDED-PRECURSOR Schematic representation of the VGAM folded precursor, beginning 5′ end (beginning of upper row) to 3′ end (beginning of lower row), where the hairpin loop is positioned at the right part of the draw.
[0252] SRC Source-type of VGAM precursor sequence (see below)
[0253] VGAM ACC VGAM Prediction Accuracy Group (see below);

[0254] Table 3 comprises data relating to VGAM genes of the present invention, and contains the following fields:
[0255] GENE NAME Rosetta Genomics Ltd. gene nomenclature (see below)
[0256] VGAM SEQ-ID; VGAM Seq-ID, as in the Sequence Listing
[0257] GENE_SEQUENCE Sequence (5′ to 3′) of the mature, ‘diced’ VGAM gene
[0258] PRECUR SEQ-ID VGAM precursor Seq-ID, as in the Sequence Listing
[0259] SOURCE_REF-ID Accession number of the source sequence
[0260] SRC Source-type of VGAM precursor sequence (see below)
[0261] VGAM ACC VGAM Prediction Accuracy Group (see below);

[0262] Table 4 comprises data relating to host target-genes and binding sites of VGAM genes of the present invention, and contains the following fields:
[0263] GENE NAME Rosetta Genomics Ltd. gene nomenclature (see below)
[0264] VGAM SEQ-ID; VGAM Seq-ID, as in the Sequence Listing
[0265] TARGET VGAM target protein name
[0266] #BS Number of unique binding sites of VGAM onto Target
[0267] TARGET SEQ-ID Target binding site Seq-ID, as in the Sequence Listing
[0268] TARGET REF-ID Target accession number (GenBank)
[0269] UTR Untranslated region of binding site/s (3′ or 5′)
[0270] UTR OFFSET Offset of VGAM binding site relative to UTR
[0271] TAR-BS-SEQ Nucleotide sequence (5′ to 3′) of the host target binding site
[0272] BINDING-SITE-DRAW Schematic representation of the binding site, upper row present 5′ to 3′ sequence of the VGAM, lower row present 3′ to 5′ sequence of the target.
[0273] SRC Source-type of VGAM precursor sequence (see below)
[0274] VGAM ACC VGAM Prediction Accuracy Group (see below);
[0275] BS ACC Binding-Site Accuracy Group (see below)
[0276] TAR ACC Target Accuracy Group (see below);

[0277] Table 5 comprises data relating to functions and utilities of novel VGAM genes of the present invention, and contains the following fields:
[0278] GENE NAME Rosetta Genomics Ltd. gene nomenclature (see below)
[0279] TARGET VGAM target protein name
[0280] GENE_SEQUENCE Sequence (5′ to 3′) of the mature, ‘diced’ VGAM gene
[0281] GENE-FUNCTION Description of the VGAM functions and utilities
[0282] SRC Source-type of VGAM precursor sequence (see below)
[0283] VGAM ACC VGAM Prediction Accuracy Group (see below)
[0284] TAR ACC Target Accuracy Group (see below)
[0285] TAR DIS Target Disease Relation Group (see below)

[0286] Table 6 comprises a bibliography of references supporting the functions and utilities of novel VGAM genes of the present invention, and contains the following fields:
[0287] GENE NAME Rosetta Genomics Ltd. gene nomenclature (see below)
[0288] TARGET VGAM target protein name
[0289] REFERENCES list of references relating to the host target gene,
[0290] SRC Source-type of VGAM precursor sequence (see below)
[0291] VGAM ACC VGAM Prediction Accuracy Group (see below)
[0292] TAR ACC Target Accuracy Group (see below); and

[0293] Table 7 comprises data relating to novel VGR genes of the present invention, and contains the following fields:
[0294] GENE NAME Rosetta Genomics Ltd. VGR gene nomenclature
[0295] SOURCE START OFFSET Start-offset of VGR gene relative to source sequence
[0296] SOURCE END OFFSET End-offset of VGR gene relative to source sequence
[0297] SOURCE_REF-ID Accession number of the source sequence
[0298] STRAND (+) positive strand, (−) negative strand
[0299] VGAMS_ID'S_IN_VGR List of the VGAM genes in the VGR cluster
[0300] SRC Source-type of VGAM precursor sequence (see below)
[0301] VGR ACC VGR Prediction Accuracy Group (see below).
   The following conventions and abbreviations are used in the tables:

[0302] GENE NAME is a RosettaGenomics Ltd. gene nomenclature. All VGAMs are designated by VGAMx.1 or VGAMx.2 where x is the unique SEQ-ID. If the VGAM precursor has a single prediction for VGAM, it is designated by VGAMx.1. Otherwise, the higher accuracy VGAM prediction is designated by VGAMx.1 and the second is designated by VGAMx.2.

[0303] SRC is a field indicating the type of source in which novel genes were detected, as one of the following options: (100) DNA sequence, (101) RNA sequence. Sequences are based on NCBI Build33 of the viral genome annotation.

[0304] VGAM ACC (VGAM Prediction Accuracy Group) of gene prediction system: A—very high accuracy, B—high accuracy, C—moderate accuracy, D—low accuracy, as described hereinbelow with reference to FIG. 12.

[0305] BS ACC (Binding-Site Accuracy Group) indicates accuracy of target binding site prediction, A—very high accuracy, B—high accuracy, C—moderate accuracy, as described hereinbelow with reference to FIG. 14B.

[0306] TAR ACC (Target Accuracy Group) indicates accuracy of total GAM-target binding prediction, considering the number of binding sites a GAM has on the target's UTR; A—very high accuracy, B—high accuracy, C—moderate accuracy, as described hereinbelow with reference to FIG. 14B.

[0307] TAR DIS (Target Disease Relation Group) ‘A’ indicates if the target gene is known to have a specific causative relation to a specific known disease, based on the OMIM database. It is appreciated that this is a partial classification emphasizing genes which are associated with ‘single gene’ diseases etc. All genes of the present invention ARE associated with various diseases, although not all are in ‘A’ status.

[0308] VGR ACC (GR Prediction Accuracy Group) indicates the maximum gene prediction accuracy among VGAM genes of the cluster, A—very high accuracy, B—high accuracy, C—moderate accuracy, as described hereinbelow with reference to FIG. 14B.

1. An isolated viral DNA encoding:
RNA comprising about 50 to about 120 nucleotides,
wherein about 18 to about 24 nucleotides at the 5′ of the RNA are a partial inversed-reversed sequence of a sequence at the 3′ of the RNA, and wherein
a portion of the RNA is a partial inversed-reversed sequence of a portion of a binding site associated with at least one host target gene.

2. (canceled)

3. The DNA of claim 1 wherein the RNA is capable of modulating expression of the target gene.

4. (canceled)

5. (canceled)

6. The DNA of claim 1 wherein the untranslated region of an mRNA encoded by the target gene comprises the binding site.

7. (canceled)

8. A vector capable of expressing the DNA of claim 1.

9. A method of inhibiting translation of a host target gene comprising introducing the vector of claim 8 into the host.

10. (canceled)

11. (canceled)

12. A probe comprising a sequence complementary to a portion of the RNA encoded by the DNA of claim 1.

13. A method of detecting expression of a viral miRNA, comprising detecting hybridization by a probe of claim 12, wherein the probe comprises a sequence complementary to a portion of the miRNA.

14. (canceled)

15. (canceled)

16. (canceled)

17. (canceled)

18. A method for treating infection by a virus in a host comprising introducing to a host in need thereof a RNA comprising a sequence characterized by the following:
(a) the sequence is complementary to a portion of the miRNA expressed by the virus;
(b) the sequence is complementary to a portion of a binding site of a miRNA expressed by the virus;
(c) the sequence is complementary to a portion of a host miRNA characterized by increased expression with infection by the virus; or
(d) the sequence is complementary to a portion of a binding site in a host miRNA encoding a protein characterized by increased expression with infection by the virus.

19. (canceled)

20. (canceled)

The application's sequence listing, which the Patent Office published only in electronic form, follows.

SEQUENCE LISTING (424571 sequences)

SEQ ID NO: 1 - RNA, 76 nt, Human herpesvirus 5
ggccgccaagauccaggagcgcuacgcggagcugcagaagcgcaagagccaccccaccuccugcaucuccacggcc

SEQ ID NO: 2 - RNA, 112 nt, Human Herpesvirus 2
ggccgccgcgcgcccccgcccggccgccgcgcgcccccgcccggccgccgcgcgcccccgcccggccgccgcgcgcccccgcccggccgccgcgcgcccccgcccggccgcc

SEQ ID NO: 3 - RNA, 64 nt, Human herpesvirus 3
ggccguuauucccggaauuggaacgcuucacaacuguugugaauauauuccacuguucucggcu

SEQ ID NO: 4 - RNA, 61 nt, Human Herpesvirus 1
ggccuuauagaucuccggaucgaugcggacggggguaaugaucagggcgaucggaacggcc

SEQ ID NO: 5 - RNA, 90 nt, Rat cytomegalovirus
ggcgaaccccgcccggucgcaggcgucggugacgaccuuggagagguaguucuccagggcgcgcacgacgcgguagacgcggggggagcc

SEQ ID NO: 6 - RNA, 92 nt, Human Herpesvirus 4
ggcgacacuugggugcacagguggccguaggugucacgugaccuuuuccgccggcaccuuuaagcugccgcgauguacccccggggaucgcc

SEQ ID NO: 7 - RNA, 94 nt, Human herpesvirus 1
ggcgaccccggucccuguauauauagggucaggggguuccgcacccccuaacauggcgcccccggucccuguauauauagugucacgggguucc

SEQ ID NO: 8 - RNA, 76 nt, Rat Cytomegalovirus
ggcgagcggcgagggcgacacugcuggcgcgaggggacccgccgggcucccgcgguccgcccgguccccgcucccc

SEQ ID NO: 9 - RNA, 102 nt, Human herpesvirus 4
ggcgcacccccaguaccgggccauccugcaaaagaggaacgagcuguacacgcggcucaaccgagccaugcagcgguugggccgaggcgaggaggaggcguc

SEQ ID NO: 10 - RNA, 99 nt, Molluscum contagiosum virus
ggcgcgccgacgccgccggggcgcgccgacgucaccgggcgcgccaacgccgccgggcgcgccgacgucaccgggcgcgccaacgcugccgggcgcgcc

SEQ ID NO: 11 - RNA, 74 nt, Human Herpesvirus 5
ggcgcucgcacgaggagcugguucuuuguccgcccgagauggaggagcgucuagcgccgcuguugcagagugcc

SEQ ID NO: 12 - RNA, 62 nt, Human Herpesvirus 5
ggcgguggcgaucaaaaggcgcguaugagaaaccguuuauagaguguaauagaaucaccguc

SEQ ID NO: 13 - RNA, 60 nt, Human Herpesvirus 5
ggcggugggucucgggccaaacgccgucguagacgacgcgcuccgaaaaacgacgccgcc

SEQ ID NO: 14 - RNA, 80 nt, Human herpesvirus 1
ggcggugucguuguuggugccgguggggcguaccgcguaaauacaucggugcagcggacuggcaccgaagacgguguacc

SEQ ID NO: 15 - RNA, 63 nt, Human Herpesvirus 5
ggcguccgcgugucuaaaccgcgugcucgcugacgcggguuugcuuccuauauaguggacguc

SEQ ID NO: 16 - RNA, 65 nt, Human Herpesvirus 5
ggcguucaggccuuaauacuagccgcaucuuaccugucggcagcauguaucggggcuccgacgcc

SEQ ID NO: 17 - RNA, 130 nt, Hepatitis GB virus B
ggcguugacaccaccaaacugccagcccccuccaucgaagagguagugguaagaaagcgccaguuccgggcaagaacugguucgcuuaccuugccucccccuccgagauccgucccaggagugucauguc

SEQ ID NO: 18 - RNA, 63 nt, Human Herpesvirus 6
ggcugacaggaucguccccuuggcucgugauccuacaagggcagggggggucucuguucugcc

SEQ ID NO: 19 - RNA, 81 nt, Human herpesvirus 4
ggcugugacacugacgaugaaucuucggugguuucaacaucaaucaccucuaugacaucaucgucguacacaacacacgcu

SEQ ID NO: 20 - RNA, 60 nt, Human Herpesvirus 5
ggcuucguugcguauggccaccaccacguuaaagagagacgguggcaccagcucgaagcc

SEQ ID NO: 21 - RNA, 92 nt, Measles virus
ggcuucuugagaacuucggccagugcucggccugaaucucugccuaugauggguuucaggucgggauugaguucgacaucugcagugggguc

SEQ ID NO: 22 - RNA, 78 nt, Hepatitis GB virus B
gggaaaaaaccuugugggguucuguggcgcuuggacggcgcugacgccuguccuggcccagagcccagcgaggugacc

SEQ ID NO: 23 - RNA, 63 nt, Human Herpesvirus 5
gggagacggcgcagccaguguuuuuaaagauaaaacaaggcacguggucugugcggcucuccc

SEQ ID NO: 24 - RNA, 64 nt, Human herpesvirus 2
gggaggggagaggagaagggcgcgccggugcgcggagcagccuuccuucuccggagucccucuc

SEQ ID NO: 25 - RNA, 98 nt, Human herpesvirus 1
gggccgccacggccccgucgaucgugggggccucgaacccggggugguggcgcgccagucguucuagguucaccaugcaggcgugguacgugcgggcc

SEQ ID NO: 26 - RNA, 63 nt, Human Herpesvirus 2
gggccgcgggccagcagacgggccgcggcgccagcggcccacgccucccgccgcauuaggccc

SEQ ID NO: 27 - RNA, 79 nt, Human Adenovirus D
gggcguugcgggccgagaccgugagcucgucuuccaggagccugaugagcucggcgaugguggcgcgcaccucgcgcuc

SEQ ID NO: 28 - RNA, 123 nt, Human Herpesvirus 1
gggcuggggccggggagggcuggggccggggagggcuggggccggggagggcuggggccggggagggcuggggccggggagggcuggggccggggagggcuggggcuggggagggcuggggcu

SEQ ID NO: 29 - RNA, 79 nt, Murray Valley encephalitis virus
gggcuucaucuccauuguuggcagggacuccucuuccgagacgguucugggaggcuuuccaaccguggagaaucagcuu

SEQ ID NO: 30 - RNA, 107 nt, Human Herpesvirus 2
ggggagggggguggcggcuggggaaagggaaggaacgcccgaaaccagagaaaaggaccaaaagggaaacgcguccaaccgauaaaucaagcgccgaccagaacccc

SEQ ID NO: 31 - RNA, 116 nt, Human Herpesvirus 1
ggggcagucggggaaguggcugucgagcacguagcccugcaccaagaucugcuuaaaguucgggugacggggguucgcgaagacgggcucgcggcggaccagauccccggagcucc

SEQ ID NO: 32 - RNA, 106 nt, Human adenovirus C
gggggcgguuaggcuguccuccuucucgacugacuccaugaucuuuuucugccuauaggagaaggaaauggccagucgggaagaggagcagcgcgaaaccaccccc

SEQ ID NO: 33 - RNA, 66 nt, Human Herpesvirus 4
ggggggcagugauaagucaugacaauuuuagaugagguagaaauuuugcauauuuucagacccacc

SEQ ID NO: 34 - RNA, 68 nt, Human Herpesvirus 2
gggggggugggccucguccccacgcagacccgcgggcaaaugcgagaacgggacccgcgcgccugccu

SEQ ID NO: 35 - RNA, 75 nt, Human herpesvirus 8
gggguacucaggugguauuuccggaagcauuaccaaauaaggcaaccucagcugggaauaccagcggacuacccc

SEQ ID NO: 36 - RNA, 106 nt, Molluscum Contagiosum Virus
ggguacgcgcgagcgagcgccggggcucugcgcagcgugcuggcguucguucgcgccagugcguagccguucugcgucaguguccggguucgccaccggcguauuc

SEQ ID NO: 37 - RNA, 59 nt, Human immunodeficiency virus 1
gggucucucugguuagaccagaucugagccugggagcucucuggcuaacuagggaaccc

SEQ ID NO: 38 - RNA, 95 nt, Variola Virus
gggugagaacguuccagagugucuauccagggaaaucaaagaagaaguuaauauagacaauucuuuuguauucauagacacucgguuuuuuauuc

SEQ ID NO: 39 - RNA, 67 nt, Human Herpesvirus 4
ggguggcuaucuauccauaggcaggcauccggcgucuuuggugcauuggagauaguagcuuucaccc

SEQ ID NO: 40 - RNA, 84 nt, Marburg virus
gguaaaguggauuaauuugucugaggauuuaagggaacaauuuaauaugucuucagaaucagaaucaacuauaaauuuauugcc

SEQ ID NO: 41 - RNA, 102 nt, Vaccinia Virus
gguagcaauuuauggaacuuauauuggucauuauuuuugucacaggaacaaacuaauacuauaacggagauuaaaaauaugacgcccauaauuguuaacgcc

SEQ ID NO: 42 - RNA, 68 nt, Molluscum contagiosum virus
gguaggccgcgaugugcuccagguugguguuguugaccaugagcgugagcacgucguucgccuugucc

SEQ ID NO: 43 - RNA, 107 nt, Variola virus
gguagguuuaguaucucaauugucugucuuaaguuccauuacaaauauacuaacgucugaguauuuggauuuggaaaagaaaauuugugaguauaucagaucauauu

SEQ ID NO: 44 - RNA, 94 nt, Human Herpesvirus 5
gguauucguaaccagcauuugaguauacgguuaauguauccuggggaaaaaaauacacaacagcuguuggauucugauuucaguugcgaacguc

SEQ ID NO: 45 - RNA, 101 nt, Human Herpesvirus 1
gguccguuuugucacgggaaaggaaagaggaaacaggccgcggacacccgggggaguuuguguucccuuuucuuucuucccacacacacaaaaggcguacc

SEQ ID NO: 46 - RNA, 72 nt, Hepatitis GB virus C
ggucggucgggccgcuacuacuacgcuggggucgguaaggcucccgcggggguggugcggucugguccgguc

SEQ ID NO: 47 - RNA, 89 nt, Reston Ebola Virus
ggucugaggaagauuaagaaaaaggccucguguucacuugguugccgucaaguauccugugguuuuuuucuaccuaacuuccucaugcc

SEQ ID NO: 48 - RNA, 127 nt, Human adenovirus C
ggugaagaauuccaaccugcugauacuccuuguauuuaguaucgucaaccacuugccggcucaugggcuggaaguuucugaagaacgaguacaugcgguccuuguagcuuucuggaauguagaagcc

SEQ ID NO: 49 - RNA, 103 nt, Rat cytomegalovirus
ggugagcggagaacguacuuucgaagccccgaaacuccgucgaacgcgcuaucgaucgaaacgccguuccacguuguuucgaggccucuaaauacgguucgcc

SEQ ID NO: 50 - RNA, 57 nt, Human herpesvirus 6
ggugauuaaaucucucggaaagaggcugaacuguuuccagagcauacauaaaucgcc

SEQ ID NO: 51 - RNA, 59 nt, Human Adenovirus D
ggugccuccaggugugucaaagaaagccaaaucuaugucauaaucuuuagguugcugcc

SEQ ID NO: 52 - RNA, 92 nt, Influenza A virus
ggugccuuacugaaugacaggcauucaaaugggacuguuaaggacagaagcccuuauagggccuuaaugagcugcccugucggugaagcucc

SEQ ID NO: 53 - RNA, 87 nt, Human coronavirus 229E
gguggcauuucugguagcuacuauggauuucagacauuucugaugaaacugucuuguagucauaguagcuaauaaagagacgccacc

SEQ ID NO: 54 - RNA, 68 nt, Human Herpesvirus 4
gguggccggcaaggugcaauguuuagugaguuaccugucuaacaucuccccuuuaaagccaaggcacc

SEQ ID NO: 55 - RNA, 98 nt, Rat Cytomegalovirus
ggugucgucaugaccacccugugggcuccccccaaaugucuagaaccggccacggccggucuccguucucggagacccgaagugucgucaugaucacc

SEQ ID NO: 56 - RNA, 60 nt, Human adenovirus B
ggugucucugaccaugacuuugagaaauugguauuugaagucgaugucgucacaggcucc

SEQ ID NO: 57 - RNA, 73 nt, Human Immunodeficiency Virus 1
ggugugaauaucaagcaggacauaacaagguaggaucucuacaauacuuggcacuagcagcauuaauaacacc

SEQ ID NO: 58 - RNA, 100 nt, Vaccinia Virus
gguguuaauccacuauauguuucuguagcggcugauaacacagcauccaacugagcauccgcguccgcagagcacauauuuuuaacagugagguuacauc

SEQ ID NO: 59 - RNA, 79 nt, Variola virus
gguguuacaaaauccauuuaggcaagaagggacauauaagcaacuguuuaccuuuagcaaauacgauuuuaacgacacc

SEQ ID NO: 60 - RNA, 80 nt, Human Herpesvirus 6
gguuuacguauuuuuggagguaguugguauacgcguuuaguagaaugcuuacgagaagguuugucuccggggaguagauc

SEQ ID NO: 61 - RNA, 98 nt, Variola Virus
gguuuaguaucucaauugucugucuuaaguuccauuacaaauauacuaacgucugaguauuuggauuuggaaaagaaaauuugugaguauaucagauc

SEQ ID NO: 62 - RNA, 87 nt, Human Papillomavirus Type 6
gguuugugguuguuaugugccuuuauuguagggguguugggguuauuauuaaugcacuauagagcuguacaaggcgauaaacacacc

SEQ ID NO: 63 - RNA, 80 nt, Human adenovirus A
guaaaaaaggacuuuuuugccugguaaaacaagcuacccuucgcuaugaaucuuuaccaggcaaagaacaucaacugugc

SEQ ID NO: 64 - RNA, 67 nt, Human Adenovirus A
guaaaaagcguucaauaguugccacgcuuugaccggucaggcgugcgcagucuugaaugcucuggac

SEQ ID NO: 65 - RNA, 68 nt, Transmissible Gastroenteritis Virus
guaacauugacagggauagaacaagagaagaaauucucaauaguuugccucuccuggucaguguauac

SEQ ID NO: 66 - RNA, 108 nt, Variola virus
guaauuagguucuaaugccgaucuuugaauggauacuaguuuucuaaguucuaaugugauucucugaaaauguaaauccaauuccuccggcauuauagauguguauac

SEQ ID NO: 67 - RNA, 94 nt, Variola Virus
guacgguuuaauuaccaauguugcugcuaaaccacaugucaaucuaauaacuggauguuuggauaguagcguugccauucugauaaacuuguau

SEQ ID NO: 68 - RNA, 64 nt, Variola virus
guagauuguuggaugaucuaguuauuguuagugauggcccaccaacugguuauccggagucugc

SEQ ID NO: 69 - RNA, 71 nt, Human herpesvirus 5
guagcuguuguuuuuuggugaauauaguuugguaaguccuuagcggguaaguucuaagaaacauuaguuac

SEQ ID NO: 70 - RNA, 93 nt, Human Herpesvirus 7
guauaaaaaacuuaagguuuauuuaaaaguccauauuuuauaaaaguuaaugaaaaagaaacugaauagaaauagauugauaaguccauaugc

SEQ ID NO: 71 - RNA, 60 nt, Measles virus
guauagaguuaagcaauccaucuugcccugaggcaacaucaugguggauuaauucuuugc

SEQ ID NO: 72 - RNA, 90 nt, Vaccinia Virus
guaucauaauuuucaaagauggucguuuagacaauaguacuuccauuauuauuuuguuguuguuugcgacugcuuccgaaauacauguac

SEQ ID NO: 73 - RNA, 66 nt, Human Herpesvirus 7
guauucagcaauugacacauuuuacggugccuguguagguuuucguguuuauucaauucugaguau

SEQ ID NO: 74 - RNA, 61 nt, Human adenovirus C
guauuuaguaucgucaaccacuugccggcucaugggcuggaaguuucugaagaacgaguac

SEQ ID NO: 75 - RNA, 93 nt, Human Herpesvirus 5
gucaaaagaggccgccagcuagacaccccagaaaagaagcagagaaagagacuucuuugugcgacacguuuuauucugcguccuccgcucgac

SEQ ID NO: 76 - RNA, 79 nt, Human herpesvirus 5
gucacuggacucgguuucgcuguagcugugguucaaccugaacauggcucccagagcugcuaggaaccgguccagucac

SEQ ID NO: 77 - RNA, 88 nt, Vaccinia virus
gucauacguaaugaaguuaaugauacacacuacacugucgaauuugauagggacaaaguaguugacacguuuauuucauauaauagac

SEQ ID NO: 78 - RNA, 77 nt, Respiratory syncytial virus
guccaacggcaauuaaugauaacaauauuacuauaaucacuauaauuauaguaguuaucaugauauuuaugguggau

SEQ ID NO: 79 - RNA, 84 nt, Human herpesvirus 2
guccagcugcugcgcgagcgccgcgucgagggcgucgaagcgcugcaguucggccagccccgagcugcgccgcgccugcugguc

SEQ ID NO: 80 - RNA, 89 nt, Human herpesvirus 6
guccagugauaacgaugcuuuuauuuugggauacauaauaucuaucuuauuaauuuccugaucacagagcagagagauuaacuccggau

SEQ ID NO: 81 - RNA, 100 nt, Vaccinia Virus
guccgcuguuuccguuaauaauacuauuuucguaacuggcggauuauucauaaauaacucuaauagcacgaucgugguuaacaauauggaaaaacuugac

SEQ ID NO: 82 - RNA, 60 nt, Vaccinia Virus
guccguauccagucaacacuauguuagcauuucugucgauauagcuuucacucauaugac

SEQ ID NO: 83 - RNA, 90 nt, Human herpesvirus 2
guccucacggccaacgaggaccacgugcacagccuggccgugcccccccucguucugcugcaccggcucuccuuguuucgccccacggac

SEQ ID NO: 84 - RNA, 60 nt, Rat Cytomegalovirus
guccuucucugcuucuuuucuguguucucuugccuuuuuucacgggggcugaagaaggac

SEQ ID NO: 85 - RNA, 68 nt, Human Herpesvirus 6
gucgcucaugcggacagucaaacauucauuaacacgcaggauguugcauucucucacagcaugaugac

SEQ ID NO: 86 - RNA, 68 nt, Rat Cytomegalovirus
gucggcccggcgccgggacgcgagucgccgcucgaggggagcgcggcggccgcggacgccgggccgau

SEQ ID NO: 87 - RNA, 103 nt, Sindbis Virus
gucguacacugugcaaggaauuuuuuuaccgugaacgggagguagaucauauuuuucccgucccacgaauuuugguuuuaucuugcgggccaguguacaugac

SEQ ID NO: 88 - RNA, 97 nt, Molluscum contagiosum virus
gucucugcgcgagcagcugcugcgcuucgccgcgcgcgccagcuaugcgcccgcgcacgaacuggcgcacgcccuaggcgcgcucucgcugccagac

SEQ ID NO: 89 - RNA, 117 nt, Human Coronavirus 229E
gucuuuaauauauuucaggcuguaaguucuaacauuaauugcguuuugagcguuaacucgucaaauugcaauaauuuuaauguuaagaaguuacagagacaacuuuaugauaauugc

SEQ ID NO: 90 - RNA, 56 nt, Human herpesvirus 7
gucuuuguauuauguugguguguugcccacuacacacugaaacauaguacaagggc

SEQ ID NO: 91 - RNA, 126 nt, Human Adenovirus A
gugaaauugcugucagacugcggucccugcauuucgaagguaccaaugacuugacuuucacuuaauaguucaguauugcaaaccaaagaacgguggggggugcaaagauugcagcggcagugacac

SEQ ID NO: 92 - RNA, 84 nt, Rat Cytomegalovirus
gugagcccggccggcggagccuccgacccuuuauagcguuugugacgcacccggaaaggagaaccgcggccgcuggguccucac

SEQ ID NO: 93 - RNA, 64 nt, Human Herpesvirus 8
gugauguugcgauaacauccucugggaugccaagcagaucaaagaggucuucaucgcacaucgc

SEQ ID NO: 94 - RNA, 104 nt, Human Herpesvirus 8
gugcagagaaacgacucgcgaguagcguguuugaccuggagacgauguucagggaguacaacuacuacacacaucgucucgcggguuugcgcgaggaucuggac

SEQ ID NO: 95 - RNA, 65 nt, Rat Cytomegalovirus
gugccguuuagauggucucagaccgggaucgaggugcaagguugggucuaaggcgggaaggggau

SEQ ID NO: 96 - RNA, 85 nt, Human Herpesvirus 7
gugcucagcuaaaacuuugcaacaagcaucuuuauauucuaaaggguauuugauuggauucaaaguacaagcuucauuugaguac

SEQ ID NO: 97 - RNA, 96 nt, Western equine encephalomyelitis virus
guggacagagacgugaugaucaggccugccaguaugaucucguaucuggauucuacggccuucacuaacucguccguaauuccaauucuguuccau

SEQ ID NO: 98 - RNA, 59 nt, Molluscum contagiosum virus
guggcugcgugacgcugccgcgcgagcgcacgcugcgcgcggacggagagcgcaggcac

SEQ ID NO: 99 - RNA, 125 nt, Human Herpesvirus 5
gugggaguuugcggggacaacggucgaucgacggaccgcguagcagcaggaacaggcagccgacgggcacgacgaggcugagaugagaaagcggcggugggucgucgucccguccccgcucgcau

SEQ ID NO: 100 - RNA, 61 nt, Rat Cytomegalovirus
gugggcgcccuacgucggacuaugggaccucugacgcggucucgcugcgugaucgccccac

SEQ ID NO: 101 - RNA, 94 nt, Human Herpesvirus 8
gugggcgccgcgcgcgugcucucucagucgcgccuagcugcuuccaacagacaaaagcggggcguuagugagggagugcgcgcgcugcgcugac

SEQ ID NO: 102 - RNA, 64 nt, Human Coronavirus 229E
gugguaagaguuugccggcuauuaaauugaauuuuggaaugcuuaaugguaaugcaauugcuac

SEQ ID NO: 103 - RNA, 106 nt, Human adenovirus E
gugguagugcgugugccugagguugcugugguggugugucagguucaggcgggagauagagcgccucuggcgaguuccaaccaaagucaaagcagggguaaaucac

SEQ ID NO: 104 - RNA, 62 nt, Human herpesvirus 5
guggucacgucggcucgaagagguuggugugaaaacgucaucucgccgacguggugaaccgc

SEQ ID NO: 105 - RNA, 62 nt, Human Adenovirus F
guggucacucucagcugcuaaccugugcagauggaaacugucaggcucugagaguguuucac

SEQ ID NO: 106 - RNA, 71 nt, Japanese encephalitis virus
guggugaagcucaugagcaaaccuugggacgccauugccaacgucaccaccauggccaugacugacaccac

SEQ ID NO: 107 - RNA, 85 nt, Yellow Fever Virus
gugguucucugcuuuuccuccagaggucugugagcacaguuugcucaagaauaagcagaccuuuggaugacaaacacaaaaccac

SEQ ID NO: 108 - RNA, 73 nt, Borna disease virus
gugguuguaggucauuaggcagcuugucgugucuaugguggcaauaacgagagauuggaugaauugcaaugac

SEQ ID NO: 109 - RNA, 126 nt, Eastern equine encephalitis virus
guguacuggaggguaucugauuucaugcauuguggcacaucaccauacucaaggucauauaugcuggccuucuucagcuugauggcggccaguugcucauugucuauucugccuucuacgugcagc

SEQ ID NO: 110 - RNA, 83 nt, Human herpesvirus 7
guguauccggaagagacugucauaaucugauugauacauucgcaaggaauaugaagaguucuuguuuggaaaacaacauacau

SEQ ID NO: 111 - RNA, 87 nt, Variola virus
gugucguaugaugaagaugacgaugaaaaugaugguacauauauauuuuguaucauuauuguuauugcuauuccacaguuacgccau

SEQ ID NO: 112 - RNA, 73 nt, Zaire Ebola Virus
gugugacuuggauuggaaauguggagaaaaaaucgggacccauuucuagguuguucacaauccaaguacagac

SEQ ID NO: 113 - RNA, 64 nt, Molluscum contagiosum virus
gugugugugugugugcaccaggcagcgagcagccgucgucgugugcgugcggacacacgagcac

SEQ ID NO: 114 - RNA, 64 nt, Human Herpesvirus 8
guguuuuugauuguagcggaaaaauguaauaaauuuuacagacaguuuugccuacugagaacau

SEQ ID NO: 115 - RNA, 71 nt, Human herpesvirus 6B
guuaaauucuauuuuguagauagaaaugccggguucggaaaucauguugacucugcagaguggaaucauac

SEQ ID NO: 116 - RNA, 110 nt, Transmissible gastroenteritis virus
guuacaaaacaauuaaagagagauuauagaaaaacugucauucuaaauuccaugcgaaaaugauugguggacuuuuucuuaguacucugaguuuuguaauuguuaguaac

SEQ ID NO: 117 - RNA, 90 nt, Human herpesvirus 6
guuacccugucguauuuucgcggcaacuccauuuugucgauauauuacaucguuaaauaucuccaccgcgagauuaucaaauaggauggc

SEQ ID NO: 118 - RNA, 81 nt, Human metapneumovirus
guuagcuuuccuuuagcauaauuugaacuagugucauaauuuuuuagccuuucaaauguuaucuuagggaaauaagcuaau

SEQ ID NO: 119 - RNA, 78 nt, Vaccinia Virus
guuaggcaauguauauuuauccaucgucaaauuuaaaacauauuugaacuuaacuucagaugauggugcauccauagc

SEQ ID NO: 120 - RNA, 83 nt, Variola virus
guuauagcuuucugcuauuauacccgcuauuucaaauagacuuauacgucuaguauagcgucguuuaagagcagauauaugau

SEQ ID NO: 121 - RNA, 91 nt, Human herpesvirus 3
guucauggaccauaguaugcguuuaaggagagaccgcugguuggcgauguacgcccggugucuauuuccgcauaccuuacaacaucauaac

SEQ ID NO: 122 - RNA, 94 nt, Human Adenovirus E
guucgugcgccaggccugcaagaucuccaacguggagcugaccaaccuggucucguacaugggcaucuugcacgagaaccgccuggggcagaac

SEQ ID NO: 123 - RNA, 73 nt, Human Adenovirus F
guucguugucgccccugugaguguggagcuaaucauauuagguuauauccagcaacucugaacgugaccgagc

SEQ ID NO: 124 - RNA, 101 nt, Vaccinia Virus
guucuaguacaauuagacguaaguucugcuugggaauuuuuuaacgcuaaagaguuaacguuaaucgugcacccaacguauuuacaucuaguucuuugaac

SEQ ID NO: 125 - RNA, 64 nt, Rat Cytomegalovirus
guugaaguaguucuuguacagggcguacaccgggaucaggugucucgugcaauugugguucgac

SEQ ID NO: 126 - RNA, 61 nt, Human herpesvirus 7
guuggauucuaguuuggcaaccgaugucaucacauugaugauuguuaaauuggucuccgac

SEQ ID NO: 127 - RNA, 107 nt, Human Herpesvirus 5
guuguaggugcagaugcugccgacgaaacgcagcggcucggggcagcagagguagcuggccagacgcugugcaucccguccuucgucgcgcaccaagcgccagcgac

SEQ ID NO: 128 - RNA, 73 nt, Rat Cytomegalovirus
guugucauguaucguuguguuuggcugauauugugacgggcgaacugucaaaaaaaaacacauauuagacaac

SEQ ID NO: 129 - RNA, 125 nt, Molluscum Contagiosum Virus
guugugggcacuuucacguugaguaguagauaacuuuuguccgagguucuuccgugcagcguggagcgcagagaacucggaggaaaguucccagugauccgaagcugagcguccuggcccgcggc

SEQ ID NO: 130 - RNA, 75 nt, Transmissible gastroenteritis virus
guuuaagauuuuaucaaugacacuuuuaggaccuaugcuuauagcauaugguuacuacauugauggcauuguuac

SEQ ID NO: 131 - RNA, 60 nt, Human Herpesvirus 6
guuuccgcuuuucagcgagcauguacccuaaugggaaugcgauggcuguuagugcgggac

SEQ ID NO: 132 - RNA, 88 nt, Rat cytomegalovirus
guuuccguucaugggauccgguucguaaucgcgcuaucgucuucguaaagguugucguuacgaacauaucccgauguacuccgggcgc

SEQ ID NO: 133 - RNA, 70 nt, Human Herpesvirus 5
guuucggggauugugaaccguggcugaggguguagaugggacaggaaaaagcgugugaucugaccgaggc

SEQ ID NO: 134 - RNA, 98 nt, Equine Rhinovirus 3
guuugagugugguagcgcugugugaguuggcgguggaacccccucguggugacacgagcccccguggccaaaagcccaguguuuacagcaccucucac

SEQ ID NO: 135 - RNA, 86 nt, Human herpesvirus 3
guuugccccccgacgaacguccagggacgcgagguguuauaccccgggcaucauguuuccuugggcggguaucaucggucucaaac

SEQ ID NO: 136 - RNA, 100 nt, Variola virus
guuugcgcgauuguugugggaaacgggcauggaggaugaauuaucguuauuauuauuuaaagccucccauucggauucacaaauaugacgcgcguucaac

SEQ ID NO: 137 - RNA, 76 nt, Human Herpesvirus 6
guuuguuggaagguaucuuucauaaguuuggcggguugccauagcugggugucgauacauauauuucucauuaaau

SEQ ID NO: 138 - RNA, 62 nt, Human adenovirus B
guuuuccuugcgcccaaguuguaugcgcugaaaugccuauacugcccgguaugcaagaaaac

SEQ ID NO: 139 - RNA, 87 nt, Variola virus
uaaacggucacuucuuuguaucgaauaaaguauuugauaaaucucuuuuauacaaauacgaaaacgauauuauuacaguaccguuua

SEQ ID NO: 140 - RNA, 75 nt, Human Parainfluenza Virus 1 Strain Washington/1964
uaaauaguauuuuaggguuaaaguaauacuuuaaagggacaagucacagacauuugaucuuaguauaaauuuuua

SEQ ID NO: 141 - RNA, 60 nt, Vaccinia Virus
uaacaauauauuauuaguuuauauuacugaauuaauaauauaaaauucccaaucuuguua

SEQ ID NO: 142 - RNA, 62 nt, Human adenovirus C
uaagcaggcggucguugcccggccagcuaacagaagagucaaagguaauggccaccuucuua

SEQ ID NO: 143 - RNA, 89 nt, Vaccinia Virus
uaauaaauuucuuuucacgaugcaucuuauugaaugacguuuucucauaaguggacauauagaugcagaaguaaugaagaaaaguauua

SEQ ID NO: 144 - RNA, 71 nt, Vaccinia Virus
uaaucccuuuuucagaugccucuuuuaguuuaucaaaaauaagcgcuccccuagucguacucagaggauua

SEQ ID NO: 145 - RNA, 83 nt, Vaccinia Virus
uaaugacgcauauucuacucuuggaauuaauaguuuugauauuaguaaaaaauuuauuucuaaaauuuugaucaucguaauua

SEQ ID NO: 146 - RNA, 83 nt, Variola virus
uaaugccgaucuuugaauggauacuaguuuucuaaguucuaaugugauucucugaaaauguaaauccaauuccuccggcauua

SEQ ID NO: 147 - RNA, 83 nt, Variola virus
uaaugccggaggaauuggauuuacauuuucagagaaucacauuagaacuuagaaaacuaguauccauucaaagaucggcauua

SEQ ID NO: 148 - RNA, 83 nt, Vaccinia virus
uaaugccggaggaauuggauuuacauuuucagagaaucacauuagaacuuagaaaacuaguauccauucagagaucggcguua

SEQ ID NO: 149 - RNA, 76 nt, Human Adenovirus A
uaauuccauaaacccagccuauguaguuuguuucuuuaguauaacaaucuaaaaaauuccaugguuuauguaguug

SEQ ID NO: 150 - RNA, 60 nt, Sindbis virus
uaauugaguucacuucgcccgguucaaaugauccaaacaggacggguucggacucaguua

SEQ ID NO: 151 - RNA, 54 nt, Human Immunodeficiency Virus 1
uaauuggaagaaaucuguugacucagauugguugcacuuuaaauuuucccauua

SEQ ID NO: 152 - RNA, 102 nt, Variola Virus
uacaaaggagaugauuuaucgacgguauuaagaauucguuuuucaacauccgucaaaaccaauuccuuuuugccuguaucauccaguuugccauucuuugua

SEQ ID NO: 153 - RNA, 66 nt, Rat Cytomegalovirus
uacagcuacgaagagaauauauguuaugugagaauguuagacauuuuucuuuuaaauuugcuugua

SEQ ID NO: 154 - RNA, 89 nt, Vaccinia Virus
uacaugcugacaucuaaugccuguauaaccaugagagcaucuacaauacauaccgucgauaucucuagcguggauacagucaccgugua

SEQ ID NO: 155 - RNA, 70 nt, Human Herpesvirus 6B
uacauuaaggcaguguugauuuuuuuucauuguacccacuuacgaauaacgaaucaaaagccaugaagua

SEQ ID NO: 156 - RNA, 84 nt, Human Herpesvirus 8
uacccagccggguuuacgcagcugcguauacccagcuguguuuacgcagcgggguuuacgcagcuggguagacccagcugggua

SEQ ID NO: 157 - RNA, 82 nt, Variola Virus
uaccgauauacaguauaaugauuuaguuacuuuaauaaccguuagacauaaaauugauucuaugaaaacuguguuucaggua

SEQ ID NO: 158 - RNA, 72 nt, Vaccinia Virus
uaccuuaucaaaugauccuguugggcauuuucuacauugaugacauccauuagaauaauugggauuguggua

SEQ ID NO: 159 - RNA, 72 nt, Simian picornavirus 1
uaccuuguugaggccguuggcgugaaacaaguguggauugauucauuucgcgacaucgcuuucaucaaggua

SEQ ID NO: 160 - RNA, 117 nt, Human adenovirus B
uacucaugucgaggaugauguaauucccgccuuuuuugaauaagcgcggucgcugccuacucuuuaagagucagcgcgcaguacuuguugaagagagccucggcguccucgagagug

SEQ ID NO: 161 - RNA, 91 nt, Human coronavirus 229E
uacuccagauuguuuuaugguuugaagaugcuuguacuguggcuucuuuggccacucguacuugcuuugucaaucuuugacaccugggcua

SEQ ID NO: 162 - RNA, 76 nt, Human Herpesvirus 6B
uacugaucucuuuguuuuuuuuuuucuguguauugugauagggaagguuuguaaggacaaaggacaaaguucagua

SEQ ID NO: 163 - RNA, 79 nt, Variola Virus
uacuuccuuagccuucaaaucuaaaauagauucacacucaugaucggaucuauuuacagauuuaaauguauaguuggua

SEQ ID NO: 164 - RNA, 83 nt, Vaccinia Virus
uacuuuuucuuuaccuugagaauauccaucguuugcuuggucaauagcgauaugugauuuuuuaucaaccacucgaaaaagua

SEQ ID NO: 165 - RNA, 130 nt, Rat Cytomegalovirus
uagacuauauauucuaagaaauuguacgaggccgugucugacgacgaugaagacgacgaucagaaucucauguauucuacgccguucucugucagaucucucgcucuccugacauuucuuucuccgucua

SEQ ID NO: 166 - RNA, 84 nt, Vaccinia Virus
uagaguuaagagagauuagaguuuguacauuaagcaacaugucucuaaauguggcuacaaacuuuuccuuuuccacaucaucua

SEQ ID NO: 167 - RNA, 101 nt, Vaccinia Virus
uagcggauaucauuugaucggugaaucuaaaucguauugugaauuaggaucuacuggaucuaugguauggaaucccgaggcaccuauuugugaaucuguua

SEQ ID NO: 168 - RNA, 79 nt, Molluscum Contagiosum Virus
uagcuacgggcagaacuaccagugcgagucagugcucgucccgcugacaagcgagugcugcaauguccuguccgagcua

SEQ ID NO: 169 - RNA, 83 nt, Human herpesvirus 1
uagcuugucugguaggaacgaggggccguuugucguuauugaucuggacacccccacggacccaccuccaccguacucugcug

SEQ ID NO: 170 - RNA, 126 nt, Vaccinia Virus
uagcuuucauaguuagauacauggucucagaaguaggauuauguaacaucagcuucgauaaaaugacuggguuauuuagucuuacacauucgcucauacauguaugaccguuaacuacagagucua

SEQ ID NO: 171 - RNA, 77 nt, Variola Virus
uaggauuugauauuuuacacaacuguuuaauagagucuacauuuauauguucucuaucggugagauacaaauaccua

SEQ ID NO: 172 - RNA, 81 nt, Norwalk virus
uagggacaucgacggauguggccuuuggcgcugggaccuguccaaucagccccagagccauaucuugguugguuaucuuua

SEQ ID NO: 173 - RNA, 98 nt, Marburg Virus
uagguuaucguugagauuaaaaagacuacguuacguuuucucugaugacaagugacaaaauuucguaguuaaauuucuagaaugucaaugugaaugua

SEQ ID NO: 174 - RNA, 79 nt, Barmah Forest virus
uaguaugugcaagacacuagcagaauaguauguaugauaguauauuuauaagauuaguuuguuauguaaguauguagua

SEQ ID NO: 175 - RNA, 75 nt, Human coronavirus OC43
uagucaagacuggucauuauacaggacaggcuggugaaaugccuugugccauuauaaaugauaaaguuguggcua

SEQ ID NO: 176 - RNA, 92 nt, Ovine adenovirus 7
uagugucauugcaagacaaucuuacuuuaaguuaugcucaaccauuaacuguaagcgauaauucuuuaagauugucucuaaauucuccacua

SEQ ID NO: 177 - RNA, 97 nt, Human Adenovirus A
uaguucuuuucuuuauguuaaucccaguuugggcuaguucuugucaacuacauaaaccauggaauuuuuuagauuguuauacuaaagaaacaaacua

SEQ ID NO: 178 - RNA, 64 nt, Vaccinia Virus
uauaaggugauuggaaugggauaaauacaacaauuauauuuuuuaucauauccuucacgcuaua

SEQ ID NO: 179 - RNA, 85 nt, Human Coronavirus 229E
uauacacuaaugagccucuuuguuguguauuuugcuuuauuuaaagcaagaucacaccguggcagagcugcucuuauaguguuua

SEQ ID NO: 180 - RNA, 117 nt, Vaccinia Virus
uauauccuaccgcuuuuuaucaacuauguaaugaguuuuuauguuaugucuuuuaguuagguuaauauucuaauaagaugcuaauacaucagguuaaaguauuagaaugggauuaua

SEQ ID NO: 181 - RNA, 123 nt, Human Herpesvirus 6
uaucgcagcguugcgacaucgucuccuacauucucguugaauaauaagccuaagaaauuuugcaugcauugcgagauuguaauauucaagcgaagugaagaauuuauguucagccuugcggua

SEQ ID NO: 182 - RNA, 91 nt, Vaccinia virus
uaucuaagauaacacagcaauagaucggaugauuuacuaaagucaucaaugguguccguuaguauaucaaagaucuuguuaucgauugaua

SEQ ID NO: 183 - RNA, 84 nt, Vaccinia virus
uaucuaguuuuuugcguuucacaaacacaggcucgucucucgcgaugagaucuguauaguaacuauguaaaugauaacuagaua

SEQ ID NO: 184 - RNA, 65 nt, Vaccinia Virus
uaucuuuuaagaauuguggauauuaggauauuauuacguaaacuauuacacaauucuaaaauaua

SEQ ID NO: 185 - RNA, 77 nt, Zaire Ebola Virus
uaugguguaagaucaauuuauauacagcuucguacaauuucgaucuguuuauauucucuguugucucugcauccaug

SEQ ID NO: 186 - RNA, 79 nt, Human Herpesvirus 1
uauguucuuuuuuuauugggaggcgcggguaggcggguagcuuuacaaugcaaaagccuucgacguggaggaaggcgug

SEQ ID NO: 187 - RNA, 83 nt, Human herpesvirus 5
uauuccuuuccuguuuuguacucguaaacuguugauguuguuuuuacauccaaaagggcaaguaagaaacaggaugaggcaug

SEQ ID NO: 188 - RNA, 107 nt, Variola virus and Vaccinia virus
uauuuuuuauacguguaucauucuaugagggacuugagaggcgcauuuguggaaaauccaucguuuaaaagacagaucauagaaaaauauguuauugauaagaauua

SEQ ID NO: 189 - RNA, 103 nt, Human adenovirus D
ucaccauugaagguuuaguaauuggaacugaugaaaaagcugaggauggcaaaaaagauauuuuugcaaauaaacuuuaucagccagaaccucaaguagguga

SEQ ID NO: 190 - RNA, 107 nt, Vaccinia Virus
ucaccuuaucaaagucguuuauaucacauuguauauaguuuauaaccuuaacuuucgagguuauugguuguggaucuucuacaauaucuaugacucugauuucuuga

SEQ ID NO: 191 - RNA, 107 nt, Simian picornavirus 1
ucacucaaaccccaaggauucuauuguuuucaaaggugagaguguuaaaauagucgacucuaugcuucuugaaucuaguagagguaauuuggaauuaguuguuguga

SEQ ID NO: 192 - RNA, 70 nt, Marburg Virus
ucacuuucaguuuuuaguuucaacucuuauugcgagacuugaacacaauucuacuaacuucaauaaguga

SEQ ID NO: 193 - RNA, 91 nt, Vaccinia virus
ucaucaugaguuaaauauuuguguaauggaugucaugaacauuaaacguauucaugacauacuccuuuaauagguuuuuuaaaacagauga

SEQ ID NO: 194 - RNA, 99 nt, Human Herpesvirus 5
ucauuaagcaagacagcgucagacgcacgcuggaaaagagcugcuccaaccggugcggcaacaccagccagcaaaaggcgcagacgcucauaaggauga

SEQ ID NO: 195 - RNA, 100 nt, Human rhinovirus B
ucauuaggacuuugauauuagaugcauauaaaggaauagauuuagacaaacuuaaaaucuuagcuuacggugaugauuugauuguuucuuauccuuauga

SEQ ID NO: 196 - RNA, 65 nt, Human herpesvirus 6B
uccaacauggaucugugcagcguuaauaagccagcggaguuaauuaaauugucuuccauguuaga

SEQ ID NO: 197 - RNA, 89 nt, Human Herpesvirus 8
uccaguguaagcaagucgauuugaaugacauaggcgacaaagugagguggcauuugucagaaguuucaaagucguguaagaacauugga

SEQ ID NO: 198 - RNA, 61 nt, Human Herpesvirus 5
uccauacguuuuugggaaaguugggcucggcccaacgcaacagaccuaggcacacgaugga

SEQ ID NO: 199 - RNA, 80 nt, Human Herpesvirus 8
uccauauuuccugacuugugucuugacuugcgucgauugggaugggggugugggaugggggugugggauggggguguggg

SEQ ID NO: 200 - RNA, 58 nt, Influenza B virus
uccauuuuccacauggcagcuuggagcggguccgcaugccaugaugguagagaaugga

SEQ ID NO: 201 - RNA, 129 nt, Hepatitis GB Virus C
ucccaccggaacguuuggguucuucccaggaguccccccccuuaacaacugcaugcuucucggcacugaggugucagagguauuggguggggcgggccucacugggggguuuuacgaaccucuggugcg

SEQ ID NO: 202 - RNA, 60 nt, Vaccinia Virus
uccgcacuaucgauuugauacuuucuuuucagaguaaagcuaucgucauugaucaucgga

SEQ ID NO: 203 - RNA, 65 nt, Human Herpesvirus 2
uccggcaacaucaccgcggccgugcggaugcuccaaagccuguccacguaugccgugccgccgga

SEQ ID NO: 204 - RNA, 60 nt, Human astrovirus
uccuaguaaaagugacaacugguuuucaggugaacaacuaccugaguuacuuuuacaggg

SEQ ID NO: 205 - RNA, 120 nt, Vaccinia Virus
uccuuuaccauuucuaaaauagucguugccauguaagcucuuuuugaaauugauggaguaugaccuaccacuucagcaguuuguuugauaguuaacgcuauuaacuuuuuuggugacgga

SEQ ID NO: 206 - RNA, 105 nt, Zaire Ebola Virus
ucgaaaaucacuauagggcguaaugcuuuuagcaccguagcauguuuuuuaacuuuuuggauugcuguuucacuauguagcacaggaugcccccaguguuuuuga

SEQ ID NO: 207 - RNA, 64 nt, Vaccinia Virus
ucgcuacuugguuaguguauuauucaguaugaagaccuauuaauaauuacuuaucuuuugacga

SEQ ID NO: 208 - RNA, 71 nt, Molluscum Contagiosum Virus
ucggaacgcgugaggaggcggcacugcuagcgacgcggacacauugcgaggcaccgcccgcccgcgcucga

SEQ ID NO: 209 - RNA, 70 nt, Vaccinia Virus
ucggaugaccauauauuuauuuucaguuuuauuauacgcauaaauuguaaaaaauauguuagguuuacga

SEQ ID NO: 210 - RNA, 77 nt, Human herpesvirus 1
ucggccgcgucguugccgucgucguccucguccucgucggacgacgaggacgaagaggaugcggacgacgaggacga

SEQ ID NO: 211 - RNA, 64 nt, Vaccinia Virus
ucgucauaucccguauagucagagauaggaaucuugaauuuacuaaucuugcccuuguuggcgg

SEQ ID NO: 212 - RNA, 75 nt, Human Herpesvirus 6
ucgucguccaccucagguacaauaguauauuauauauauauuauuuuaauaaacuuauugaggacgggagaacga

SEQ ID NO: 213 - RNA, 110 nt, Variola virus
ucguguuuuauuaaucaaucauuagaggauuuaucacauacuaguauuuacaauguagaaauuagaaagauuaaaucauuaaaugauuguauuaacgaugauaaauacga

SEQ ID NO: 214 - RNA, 64 nt, Salmon Pancreas Disease Virus
ucguugauguguaugacgcucugccgauuucuguagagauuagcaccgucguaacaugcagcga

SEQ ID NO: 215 - RNA, 62 nt, Human Herpesvirus 7
ucuaauauguaugaaauaauagaugucugcauagacaguaaugcgguuuuguacaugccaga

SEQ ID NO: 216 - RNA, 71 nt, Simian picornavirus 1
ucuaauuggcuauaauaugguguuuaacuugaauuugguugaauugguucuuguuaauuuggcuaauugga

SEQ ID NO: 217 - RNA, 79 nt, Human herpesvirus 7
ucuacggagcauuuuacaacagucauuuuaaaaaagguuuuuugaauaugaaaacuguaaaaauagccucaaauguaga

SEQ ID NO: 218 - RNA, 68 nt, Vaccinia Virus
ucucaauaagaagauuaacgauuuccaugucuacauuauaugggguuacucuaaaucgcuuguuuaga

SEQ ID NO: 219 - RNA, 72 nt, Human Herpesvirus 5
ucucgacgguucucucgcucgucaugccguucugagcuccgacauggcggacgagagaaaauggcgucgaga

SEQ ID NO: 220 - RNA, 69 nt, Rat Cytomegalovirus
ucucgcgaucgaaggucggcgcgugggccugcgacgcaggagucggcggcgacgauggagauggcgaga

SEQ ID NO: 221 - RNA, 95 nt, Human Herpesvirus 6B
ucucguuagccuggguaggaaagacccaaccgcgauacccacugaucuuuaacuuuaugagaaaaacaggaauugcgguuucccccauuagcaga

SEQ ID NO: 222 - RNA, 87 nt, Respiratory syncytial virus
ucugacagaucuugaaguuuaucuuuuaaaucaugguuuguauaauaacuaaguaugaacacagagugaacuauagccucugugagg

SEQ ID NO: 223 - RNA, 90 nt, Human herpesvirus 7
ucuguaacaucuucugcauuuacaugggggaaaauuguuguuagauaaaauuucccaguucucuuuccaaaaaugcuuucugaguuuaga

SEQ ID NO: 224 - RNA, 74 nt, Western equine encephalomyelitis virus
ucuguacauugaugaggcauuugccugccaugcagggacgcugcuggcacugauugccaucgucaaaccuaaga

SEQ ID NO: 225 - RNA, 77 nt, Reston Ebola virus
ucuguuccagaacccaaauucgguuauucaaucucccaucugggcuuugaggguaauuuuggcagccggauugcagg

SEQ ID NO: 226 - RNA, 93 nt, Human herpesvirus 7
ucuuccugauagucucuaucuuuuaugucuuuuauuggauaguaauucaauuaaaguucacaucgauggagacgucuuuccuauagcuaaaga

SEQ ID NO: 227 - RNA, 64 nt, Yellow fever virus
ucuugaguuugaggcccugggauuccugaaugaggaccauugggcuuccagggaaaacucagga

SEQ ID NO: 228 - RNA, 87 nt, Human herpesvirus 7
ucuuugaaaaccaaacucaacaugcugaucuaaagacaaacauuauucaacugagugauaaaacaguugucuuagaucauuuaaaga

SEQ ID NO: 229 - RNA, 84 nt, Reston Ebola Virus
ucuuugcuugauuuacaauaugauauuucucuuaauaaugauuaauauauuaagaaaaacuuaugacgaagauuaaaggagagg

SEQ ID NO: 230 - RNA, 68 nt, Bovine kobuvirus
ugacggcuucucaaacaugcuccaggauuuugcccgaaacuuccguggacgcguggaugauguugucg

SEQ ID NO: 231 - RNA, 106 nt, Variola virus
ugacguuguaguguuugguuuuucugaacguugauagucuacuaauacuacaugcugacaucuaaugccuguauaaccaugagagcaucuacaauacauaccguca

SEQ ID NO: 232 - RNA, 88 nt, Human herpesvirus 6
ugagaauauauaggaucuugaugcguauuaucacucaacgguugugugugugugauguccgcaucacaguauaguccggauaauuuca

SEQ ID NO: 233 - RNA, 126 nt, Variola Virus
ugagaauauugaugauuuuuuuuaagaugauauuuacuuuuuauaugcuugcauuacagaauaauauucacagguauuauuaaaaugaguaucggagcuacauuaccauaucaucauccaugcuca

SEQ ID NO: 234 - RNA, 104 nt, Human herpesvirus 4
ugaggacccccuugucgauggccaggcuccuaaaguuggugcacagcgucugguagugacccuuuagccacucuggggggcucuggccaagcccgggguuguca

SEQ ID NO: 235 - RNA, 75 nt, Human coronavirus 229E
ugagucauaguagggagaauauuacgcuuuguuaaugaaaaaauagcaucuuguuccucauaacuaauagacuca

SEQ ID NO: 236 - RNA, 63 nt, Vaccinia virus
ugauacuguuacguguccuaaugcggaaugucaaccucuucaauuagaacacggaucguguca

SEQ ID NO: 237 - RNA, 80 nt, Human Herpesvirus 6
ugaucucacgucacaguuuuuuuuuucauaugucucgcguugauacaucccguaugaaauauuuaaggugguugaaauca

SEQ ID NO: 238 - RNA, 62 nt, Vaccinia Virus
ugauguaguacuuugaugauuuuuccauggcccauucuauuaagucuuccaaguuggcauca

SEQ ID NO: 239 - RNA, 93 nt, Influenza A virus
ugauuggaauauugccugacaugacccccagcacggaaaugucacuaagaggagugagaguuagcaaaauggggguggaugaauauucuagca

SEQ ID NO: 240 - RNA, 63 nt, Human Adenovirus F
ugcagcgguaucugcguggauuccugggguagggugucugccagaggguguacguuuguugca

SEQ ID NO: 241 - RNA, 110 nt, Vaccinia virus
ugcauuggagcuccuaauggagauuuucuauucucguccauuuuaggauaugcuuucauaaagucccuaauaacuucgugaauaauguuucuauguuuucuacugaugca

SEQ ID NO: 242 - RNA, 102 nt, Molluscum contagiosum virus
ugccagugcgcgcguugcgcggaguugcggacgcugcgcgcgcacgacgcucccgcgcugcgcagccgcaucuucgcaggcgcgcccguggacgcacuagca

SEQ ID NO: 243 - RNA, 65 nt, Poliovirus
ugccauguguagucgucccauuucucgggcacuggagcgccuggugguacguacauaauuuggua

SEQ ID NO: 244 - RNA, 70 nt, SARS coronavirus
ugccuuaagaagcuggauguccucaccugcauuuagguuagguccaacaacaugcagacacuucuuagca

SEQ ID NO: 245 - RNA, 68 nt, Human Herpesvirus 6B
ugcgcaugaaaauaucauuaaauuguuuuaaacauucuuaaauucaauuuaaaauaauuuuuguagca

SEQ ID NO: 246 - RNA, 67 nt, Human Herpesvirus 5
ugcgccuccagccgcuccgagcgcaccuucuugaagacgcguaccucgggcgcguuggcuacgcgca

SEQ ID NO: 247 - RNA, 66 nt, Human herpesvirus 4
ugcguggcuggacggaggacgauagcccaggcacaucuggcaccuguccuugucugcugccaugca

SEQ ID NO: 248 - RNA, 131 nt, Human Adenovirus C
ugcgugugugguuaacgccuuuguuugcugaaugaguugauguaaguuuaauaaagggugagauaauguuuaacuugcauggcguguuaaauggggcggggcuuaaaggguauauaaugcgccgugggcua

SEQ ID NO: 249 - RNA, 98 nt, Zaire Ebola Virus
ugcuaaaaggagaugaagaaugccucuuggggccuaaucugaauaauaagguuuauucuuaucagaccuccgcauuaaucuucaucauuaguuuagca

SEQ ID NO: 250 - RNA, 100 nt, Vaccinia Virus
ugcuaaauaugcgauguaucuauguuauuuguauuuaucuaaacaauaccucuaccucuagauauuauacaaaaauuuuuuauuucagcauauuaaagua

SEQ ID NO: 251 - RNA, 130 nt, Human papillomavirus type 7
ugcuaggccgccuguugugguggauacugucgcccccacugauccauccauuguaucuuuaauugaggaaaguaguauuauucagucuggggcuccuucgccaguaauucccacagaggguggguuuuca

SEQ ID NO: 252 - RNA, 69 nt, Molluscum contagiosum virus
ugcugcagcagcagcgcuuucagguuuuugauucccauuaaaugaaagacgugcugcugcugcugggca

SEQ ID NO: 253 - RNA, 99 nt, Variola virus
ugcuuguugagacuaucaacagaggaacgccauauauuuuuggauuacaagaaauauggauccucuauccgacuagaauuaguuaaucuuauucaagca

SEQ ID NO: 254 - RNA, 82 nt, Human Adenovirus E
uggaacagccaggugagguacuucuuguggggcuuacacuggagcuggagcucggucucguucccggugaagaacaaagacu

SEQ ID NO: 255 - RNA, 61 nt, Respiratory syncytial virus
uggaacuuacagaaagagauuugauuguuuuaucaggacuacguuucuaucgugaguuucg

SEQ ID NO: 256 - RNA, 73 nt, Human herpesvirus 7
uggaagagaguauuaucaaaggaaggguugcauuuuaaacugucuugcaauaugucucugauggucucuucca

SEQ ID NO: 257 - RNA, 86 nt, Influenza A virus
uggaauauugccugacaugacccccagcacggaaaugucacuaagaggagugagaguuagcaaaauggggguggaugaauauucua

SEQ ID NO: 258 - RNA, 59 nt, Human adenovirus B
uggaauggguuacuauggaagcaucauggcuaauuccacuuccucuaauaacccuucua

SEQ ID NO: 259 - RNA, 75 nt, Transmissible Gastroenteritis Virus
uggacauaucaaguuucuuaagcauaccaaaaaguaggcuaugcauagcagaaacaaucuuugacuuucugucca

SEQ ID NO: 260 - RNA, 90 nt, Ovine adenovirus 7
uggagaagacuaguaaguugcagcuaucagaauuuuucauaaugcuuuucagauuuuagagugguuuuaaucuuauaauguucuucuuua

SEQ ID NO: 261 - RNA, 131 nt, Human coronavirus 229E
uggcagauuuuguucaaauugaaaauugcaaugucacauuuguuaacauuucucgcucugaguugcaaaccauugugccagaguauauugauguuaauaagacgcugcaagaauuaaguuacaaauugcca

SEQ ID NO: 262 - RNA, 71 nt, Human herpesvirus 4
uggccagagccccccagaguggcuaaagggucacuaccagacgcugugcaccaacuuuaggagccuggcca

SEQ ID NO: 263 - RNA, 116 nt, Human Herpesvirus 1
uggggaugcgugaguggcccucugugggcggugggggagagucuuauaggaagugcauauaaccacaacccaugggucuaaccaauccccaggggccaagaaacagacacgcccca

SEQ ID NO: 264 - RNA, 117 nt, Human Herpesvirus 4
ugggggcuucaugaucccaccgccuuucccgaugaugaugacaaccgcggcugucugaagcggcugacgaaaucgguugagauucugaugagaggcuugggggggucuuugcccuca

SEQ ID NO: 265 - RNA, 112 nt, Human Herpesvirus 1
uggguguuuuugggguguggcggacgcggggcggucauuggacggggugcaguuaaauacaugcccgggacccaugaagcaugcgcgacuuccgggccucagaacccacccg

SEQ ID NO: 266 - RNA, 60 nt, Vaccinia Virus
uggucguguagcgcgauagagauagucuaauauuaauauuagauauccguaacacuacca

SEQ ID NO: 267 - RNA, 61 nt, Marburg Virus
uggugauagauuaauccuugaaguaacuuuuuuauauauuauagaggaacuaauauuacua

SEQ ID NO: 268 - RNA, 69 nt, Human Herpesvirus 5
uggugugugucuauauauauuggucacugauuuuuuuuacaauaaagagauagacaucacaguucacca

SEQ ID NO: 269 - RNA, 55 nt, Encephalomyocarditis virus
ugguguucauggcaccagaguauccaaccuuagaugcuuuugccauggacaaccg

SEQ ID NO: 270 - RNA, 98 nt, Ovine adenovirus 7
ugguugcggugucaacugcaguaacuccacugacccugucaucuguagcaguaguguuuagauagacuuuaguuaugggugcaguugaaauguuacca

SEQ ID NO: 271 - RNA, 64 nt, Molluscum Contagiosum Virus
uguaaucgucacgugaacuccaaggucgagcugacucggacacuggaggugagucacgcuugca

SEQ ID NO: 272 - RNA, 60 nt, Vaccinia Virus
uguacgauuguauugcguuacuaaacgauaaauaauucuuagucaaugcuuuaacguaca

SEQ ID NO: 273 - RNA, 126 nt, Human Herpesvirus 5
uguaggcgcugcugcacuucggguagcugcaggccgccuagcgcuuccagcugagcuagcugcuccuguaccaaggccagugucagcgccgagccgcggcugcccgggucgcgcaccagcgucucg

SEQ ID NO: 274 - RNA, 77 nt, Human Herpesvirus 7
uguaguccuacaaucaagcgagguuguagacguuaccuacaaugaacuacaccucuaagcauaaccugucgggcaca

SEQ ID NO: 275 - RNA, 99 nt, Variola Virus
uguccaagauagagagcuccuuuggugaauccaucucuauguuucaguuuaaccaagaaacagucagcuggucuaaaauuuccaucucuaucuaauaca

SEQ ID NO: 276 - RNA, 61 nt, Vaccinia virus
uguccaagucuugaacucgcugaaugaucuuuuuuaacccaguuaguuuuagauugguacg

SEQ ID NO: 277 - RNA, 64 nt, Human Herpesvirus 8
uguccaccggacgaguggcgcggcgaagacgucgccagcaccagcuucugucggugucaugaca

SEQ ID NO: 278 - RNA, 67 nt, Human Herpesvirus 1
uguccuuacuccgucuugguggguggguggcuguguauggcgucccaucugugcggggaggggggca

SEQ ID NO: 279 - RNA, 97 nt, Influenza B virus
ugucucccuugaaacaagcuuuggucaugucauauccuuguauugaugauucuugcucaacaauugcuuccauuuguugcauugacugaagcagaca

SEQ ID NO: 280 - RNA, 131 nt, Human herpesvirus 4
ugucuguuauuucauggucuuuuuacaaacucauauauuugcugagguuuugaaggaugcgauuaaggaccuuguuaugacaaagcccgcuccuaccugcaauaucagggugacugugugcagcuuugacg

SEQ ID NO: 281 - RNA, 83 nt, Human parainfluenza virus 3
ugucuguuuguucggugucguuucuuuguuggaucauuggcaauuauugacaucuucauugaacauguccauuaauucagaua

SEQ ID NO: 282 - RNA, 70 nt, Hepatitis GB virus B
ugucuugccuaaugauuuugccucgaaacuaccauugcaagagccauuuuucccuuuugaaggcaaggca

SEQ ID NO: 283 - RNA, 55 nt, Human herpesvirus 1
ugugauauuguguuggauauuagcgccugcuacauucccacgaucaacugucgcg

SEQ ID NO: 284 - RNA, 65 nt, Hepatitis GB virus C
uguuccccccccuggacuuccggauagcugaaaagcucauucugggagacccggggcggguugca

SEQ ID NO: 285 - RNA, 60 nt, Vaccinia Virus
uguucucuauaguuacauuaauuaaaauuuuauaugugacacccauucaucuggagaaua

SEQ ID NO: 286 - RNA, 92 nt, Human herpesvirus 6B
uguuuucugauugugucaggucgguaccugugugugagauuaaaccguuuaucgacaugcgaguauuugaaacugaaacaacgcagaacgca

SEQ ID NO: 287 - RNA, 72 nt, Tick-borne encephalitis virus
uguuuuuccgagucacacaucaccuccuugucagacuaccugugucugggugaugguggcucagggagaaca

SEQ ID NO: 288 - RNA, 130 nt, Vaccinia Virus
uuaaaccucuuucugauggagucguaaaaaaguuuuaucucuuucuccuucgauggucucacaaaaauauuaaaccucuuucugauggagucguaaaaaaguuuuaucucuuucuccuuucucacaaaaa

SEQ ID NO: 289 - RNA, 58 nt, Human Herpesvirus 6
uuaagcagccgcgaacucguuaauaguuacuuugauguuaacucaggugguggcuugg

SEQ ID NO: 290 - RNA, 97 nt, Human herpesvirus 7
uuaaggaaaguaagguguguaguugauuaggauuauuauacaguagguaaaauguuucuaaaaaaucuucaucaauuaaaacuugaucucuccuuga

SEQ ID NO: 291 - RNA, 83 nt, Human enterovirus D
uuaauggguucggugcuaauaucaaggggcucuaaacaaccuacauagugguccacugccuccuccauguacucauccauuag

SEQ ID NO: 292 - RNA, 89 nt, Human coronavirus OC43
uuacaguuuacuacauugaccuuagauaaagugccacaggccgucgaaacuaaaguucaauguaguacuaauuuauuuaaagauuguag

SEQ ID NO: 293 - RNA, 106 nt, Respiratory Syncytial Virus
uuacaugcuugcuccacucuauuauaauuuuacuccaguugacuguuacaggcaauucagcaucacagacaaaaagacugauagguucagcaaacuuuauauguaa

SEQ ID NO: 294 - RNA, 77 nt, Human Immunodeficiency Virus 1
uuacccuauagugcagaacauccaggggcaaaugguacaucaggccauaucaccuagaacuuuaaaugcauggguaa

SEQ ID NO: 295 - RNA, 74 nt, Simian picornavirus 1
uuaccuuguugaggccguuggcgugaaacaaguguggauugauucauuucgcgacaucgcuuucaucaagguaa

SEQ ID NO: 296 - RNA, 71 nt, Rat Cytomegalovirus
uuacguaauaaugaccggauguaauucgaacaaaucauaaaacaccgaucccguuccgaaaauauacguga

SEQ ID NO: 297 - RNA, 75 nt, Vaccinia virus
uuagugacagaccagaccuaggagcuauucuaccauagcaaaucuuaggcauggacauacuaauaucugucuuaa

SEQ ID NO: 298 - RNA, 76 nt, Human Herpesvirus 3
uuauccacccuaucuuuauaaguaugcagggggccgguaccgucuauacgcacacuuaguggaugggagucaauaa

SEQ ID NO: 299 - RNA, 94 nt, Human adenovirus B
uucagaacccuacuagcaaaccucugaccgcccagcuguuucugguggugcaacacagcagagacaaugaggcuuucagagaggcgcugcugaa

SEQ ID NO: 300 - RNA, 106 nt, Human coronavirus OC43
uucaggaguuuguuucauaugacuccagcauacacucuuauuuuaucacugacgagaagaguggugguaguaagaguguuugcacuguuauagauauuuuguugga

SEQ ID NO: 301 - RNA, 62 nt, Vaccinia Virus
uucauccgauaaacuccaauaaaaagaugauauaucuaguguuuuugugguauuggauagaa

SEQ ID NO: 302 - RNA, 73 nt, Ovine adenovirus 7
uucauuugaguggaaucaguauuuuucaaaccuaccugaaaugccgcccaaagauuccaaagacacaaaugaa

SEQ ID NO: 303 - RNA, 99 nt, Hepatitis A virus
uucauuuuucaaaaauccucacaaugauauguugaauguuaauuuagcuaaaacaaaugaugcaaucaaagauaugucuuguguugauuugauaaugga

SEQ ID NO: 304 - RNA, 84 nt, Human herpesvirus 7
uuccauaugauccgcuuccuaaaauccgugccauguuuuuuucuggcucgcaaaacugagaacaggaacuuuccuuauguggaa

SEQ ID NO: 305 - RNA, 83 nt, Bovine kobuvirus
uuccauugacggcuucucaaacaugcuccaggauuuugcccgaaacuuccguggacgcguggaugauguugucggcucuggaa

SEQ ID NO: 306 - RNA, 65 nt, Human coronavirus OC43
uucccaauuuaauggagagggcaccgacuuaucauuaagccaagcuucuauauugcaauugggaa

SEQ ID NO: 307 - RNA, 98 nt, B19 Virus
uucccgccuuaugcaaaugggcagccauuuuaaguguuucacuauaauuuuauuggucaguuuuguaacgguuaaaaugggcggagcguaggcgggga

SEQ ID NO: 308 - RNA, 125 nt, Human Herpesvirus 8
uucccggggaggagggcaccagguucccggggaggagggcaccagguucccggggaggagggcaccagguucccggggaggagggcaccagguucccggggaggagggcaccagguucccgggga

SEQ ID NO: 309 - RNA, 130 nt, B19 Virus
uuccggaauuaggguuggcucugggccagcgcuugggguugacgugccacuaagacaagcggcgcgccgcuugucuuagugucaaggcaaccccaagcaagcuggcccagagccaacccuaauuccggaa

SEQ ID NO: 310 - RNA, 130 nt, B19 Virus
uuccggaauuaggguuggcucugggccagcuugcuugggguugccuugacacuaagacaagcggcgcgccgcuugucuuaguggcacgucaaccccaagcgcuggcccagagccaacccuaauuccggaa

SEQ ID NO: 311 - RNA, 125 nt, Vaccinia Virus
uucuagaguaguaguccuaaucauucucuuaaauuuuauguauccuaguuucaaugucucguaaugaguuugugcugcucuuauugucugauuuauuucuuuuaccauuuuggcucuauucugaa

SEQ ID NO: 312 - RNA, 62 nt, Molluscum contagiosum virus
uucucgcagcuggaccugcgcgccgacgaccugagucggcgcggcgugcacgcuggcgagaa

SEQ ID NO: 313 - RNA, 65 nt, Vaccinia Virus
uucugaaagagaugagaagccuguagagagacccugcgcuuucucuauggguccaucuaugagaa

SEQ ID NO: 314 - RNA, 90 nt, Salmon pancreas disease virus
uucuugucgaauuucacugugguaccagguggcacccucacugugcacuggcugucgcugcauguuacgacggugcuaaucucuacagaa

SEQ ID NO: 315 - RNA, 79 nt, Human herpesvirus 7
uugaaaaaauccuguguggcugcugcuucggaaagccccgucucauuuuuuauagcauucacuucagaauuuuucucaa

SEQ ID NO: 316 - RNA, 84 nt, Encephalomyocarditis virus
uugaaagccgggggugggagauccggauugccagucugcucgauaucgcaggcuggguccgugacuacccacucccccuuucaa

SEQ ID NO: 317 - RNA, 73 nt, Vaccinia virus
uugaacaacggaccuagugguauaucuuguucuauguaucuaaaauaaugucugacuagauccguuaguuuaa

SEQ ID NO: 318 - RNA, 107 nt, Molluscum contagiosum virus
uugaacccggggcgucuggcgcuugcucucugcaaggugcgccgcaggggcaacuugcagauacccuuccucuuuuccaagcgagaccccgacgcgcuggccuuuga

SEQ ID NO: 319 - RNA, 62 nt, Influenza B virus
uugaagggaggaggagaaaauuucaucgaaguaaggaaagggucuccucuauucucuuacaa

SEQ ID NO: 320 - RNA, 80 nt, Variola virus
uugaauagauccauaaacgggggcuccaugaauaucguguuugaguaacguugucggauacauaagaauacucuguucaa

SEQ ID NO: 321 - RNA, 72 nt, Human Herpesvirus 8
uugaccggcaaguuccaggcauccuaagugcuugauguagacccuuagggcaccagggacuaccuaggucaa

SEQ ID NO: 322 - RNA, 99 nt, Equine rhinovirus 3
uugauagguuuuucuuuacugguuucgccaaugugugugacguuucaaacaacacaacacacacacacagcggcgacaccccucugaacaucuuuucaa

SEQ ID NO: 323 - RNA, 69 nt, Respiratory Syncytial Virus
uugaugaugugguaagcauuaggauugaguguuaugacacuaauauauauauuguguauauaucaucag

SEQ ID NO: 324 - RNA, 130 nt, Reston Ebola Virus
uugauuugaacauagucauaaggggauaaauaauacuuuauauuucugauuguggauugacccauucugcuuaaaaugcuucgcccauugaaaaugugaucuaauagauagcccugacuagacaaauuaa

SEQ ID NO: 325 - RNA, 129 nt, Influenza A virus
uugccaguugcaugggucucauauacaaccggaugggaacagugaccacagaaguggcucuuggccuaguaugugccacuugugaacagauugcugaugcccaacaucggucccacaggcagauggcga

SEQ ID NO: 326 - RNA, 66 nt, Human herpesvirus 3
uugccuacccucuuauuggaaauauagauauuacguuuaucaugccaaugggaguguuucaggcaa

SEQ ID NO: 327 - RNA, 74 nt, Human adenovirus D
uugcgcagguacgcggaaguccacaaccccggcgugaguuucagcggagcgguggacuccugcggaccuugcag

SEQ ID NO: 328 - RNA, 74 nt, Molluscum contagiosum virus
uugcgcuucgagaugggaaugccgauguugcggcacagauacgcgaacuccagguacuucuucgagaagcgcag

SEQ ID NO: 329 - RNA, 93 nt, Human Adenovirus C
uugcucccaaaccucagcgccucccaaaagacauauuuccugcagauucacucaaauauggaacauucccagcugcuacaacaaacagagcga

SEQ ID NO: 330 - RNA, 69 nt, Human Herpesvirus 2
uugggaggcaaaaagaaagaaaacacccagacguaggcccgaggaccggccggcguccucuguccccga

SEQ ID NO: 331 - RNA, 61 nt, Equine rhinovirus 3
uuguggaaguuggguacugcguucgccccuucggggaugcgcgcagggccuggcuccgcaa

SEQ ID NO: 332 - RNA, 68 nt, Rat Cytomegalovirus
uuguuagccgcuuccuuuuccaugaaauacaaauaauaagaucacggaggaaacgaagaaugcaacaa

SEQ ID NO: 333 - RNA, 91 nt, Sleeping disease virus
uuguugguagacccgcgaaugaggaacuggccaccucguaccaccgugauggagugguggugaccaaguucucagacacgaucaaccacga

SEQ ID NO: 334 - RNA, 105 nt, Human Herpesvirus 8
uuguuuuugaacauguggcacacgcugcaauguacugccaugaaaggugguucuauauccaccacuuggcgucugccgaagucagugccacaauuucauuaacaa

SEQ ID NO: 335 - RNA, 73 nt, Vaccinia Virus
uuuaugauauggguagaguuuuuguccccgcuccuuuuggaggaucgcaagaauuuauuucuaaaucuaugag

SEQ ID NO: 336 - RNA, 91 nt, Vaccinia Virus
uuucaggagaugaucucgccguagcuaccaugauaguagaugccucugcuacaguuccuuguucgucgacaucuaucuuugcauucugaaa

SEQ ID NO: 337 - RNA, 81 nt, Human Coronavirus 229E
uuucauuuucugaugacguugaaguaaaagacauugaaccuguuuacagagucaagcuuugcuuugaguuugaagaugaaa

SEQ ID NO: 338 - RNA, 62 nt, Rat Cytomegalovirus
uuuccgucgaucuggaagcuuguguucuaaaugaauauauccuucaccaaauaucgcagaag

SEQ ID NO: 339 - RNA, 75 nt, Vaccinia Virus
uuucuuuucacgaugcaucuuauugaaugacguuuucucauaaguggacauauagaugcagaaguaaugaagaaa

SEQ ID NO: 340 - RNA, 92 nt, Human Herpesvirus 6
uuugaucgguguagauuuuguuguauuugguugaauucuggugucgaauagaauuuaucuguaugguccgcaaagucuauggcggguucagg

SEQ ID NO: 341 - RNA, 94 nt, Molluscum Contagiosum Virus
uuugccccccccccgacgcgagaaagaccuugucagugggcguuacagcaccuugccucuucacgaucaagacauuucuccuccggggcgcaag

SEQ ID NO: 342 - RNA, 74 nt, Human Adenovirus D
uuugcgcagguacgcggaaguccacaaccccggcgugaguuucagcggagcgguggacuccugcggaccuugca

SEQ ID NO: 343 - RNA, 81 nt, Human Herpesvirus 3
uuugcuacagcuuauauaaauuuaugugcgauacaucuuaagugcauccguacguuauuuauacauugccugucacgugaa

SEQ ID NO: 344 - RNA, 78 nt, Vaccinia Virus
uuuggucgauguaaaauuuuugucgauaaaaauuaaaaaauaacuuaauuuauuauugaucucguguguacaaccgaa

SEQ ID NO: 345 - RNA, 101 nt, Human herpesvirus 3
uuuguugaugaaacaaaaauaauuuuacaauugguuugauuuaaaaauccgacuauaguuuguacagcaucaggucgaauaaaauuagcuucauccacaaa

SEQ ID NO: 346 - RNA, 73 nt, Vaccinia Virus
uuuuaucguuuuaucuauugaugguguaugaacuaauuuacguucuacaacuuuuaauagugucgcuguaaaa

SEQ ID NO: 347 - RNA, 70 nt, Transmissible Gastroenteritis Virus
uuuuauuuguuugucaguauaccaguagugcauaaauuaacauguaacggugcuguacaggcauauaaaa

SEQ ID NO: 348 - RNA, 74 nt, SARS coronavirus
uuuucaucacguauguauuguuccuuuuacccuccagaugaggaagaagaggacgaugcagagugugaggaaga

SEQ ID NO: 349 - RNA, 131 nt, Vaccinia virus
uuuuccagaucagguucuauaucuaugauggcaucauugugaaaacuacacaaacacgauuuuaccuuggacacaggaagauuaaacacaauguuuucggcuccucgguagaacacugaugcacugagagg

SEQ ID NO: 350 - RNA, 85 nt, Vaccinia virus
uuuugauuacgauguuauaagaauguaguuaauugauguaugauguuaauguguccucuuuccucuuauaacaucguaaucaaaa

SEQ ID NO: 351 - RNA, 91 nt, Human herpesvirus 7
uuuuguauuaaguuaguuagccauguguuuacaagcguguaguguuuuucaugcaccggacugacaauggcgcuaaacuucguuaauaaaa

SEQ ID NO: 352 - RNA, 74 nt, Human herpesvirus 7
uuuuuaaacaugguguguaaaaucaaccauugugauauuucacuagcaaauauuuugauacaccacaaggaagg

SEQ ID NO: 353 - RNA, 60 nt, Rat Cytomegalovirus
uuuuuacguugggaugcucgucgaugucugugacauaacaauugcaguaaaauguaggag

SEQ ID NO: 354 - RNA, 86 nt, Human Herpesvirus 7
uuuuuccucuguuuuugcuugacguucaaauuuugggucgucuuuaaccugcucuugacuuaaauaagcuucuacggucagaaaaa

SEQ ID NO: 355 - RNA, 131 nt, Vaccinia Virus
uuuuugguccauuuuuccauacguuuauauucuuuuaauccugcguuauccguuuccguuauauccagugauagaucgugcagguuaaauagaaugcucuuaaauaaugucauuuuuuuauccgcuaaaaa

SEQ ID NO: 356 - RNA, 65 nt, Human adenovirus B
uuuuuugaauaagcgcggucgcugccuacucuuuaagagucagcgcgcaguacuuguugaagaga

SEQ ID NO: 357 - RNA, 63 nt, Human Herpesvirus 7
uuuuuugguuauuggaaaugagauuucugaaaaucuccuugauaagauuuccauuucaaaaga

SEQ ID NO: 358 - RNA, 60 nt, Rat Cytomegalovirus
ccguaaucgugguguucgucgucacuuguuaacuuuaacguucgagaauagcgagcaugg

SEQ ID NO: 359 - RNA, 113 nt, Human adenovirus B
ccguagccagcggcucauguugcgcuucgugcccguugaccgggaggacaauacauacucuuacaaagugcgguacacccuggccgugggcgacaacagagugcuggauaugg

SEQ ID NO: 360 - RNA, 116 nt, Rat Cytomegalovirus
ccgucccccgccccgccgcccuccccgucgccgccuccccgcccucucuaccuguccgcggguaccgaggaggccggggacgcccccggggaagaccgagccgacggaggagacgg

SEQ ID NO: 361 - RNA, 130 nt, Equine rhinovirus 3
ccgugaaacaaaucaguuuggaggaucuccugccaagcauugagguaguacuuaauacccgaggugguugggacaacuuuagugacgugauuggaaacaucggccagaguguaaaagugguucaaugcgg

SEQ ID NO: 362 - RNA, 83 nt, Human Herpesvirus 4
ccuacgcgaggcugaaccuccugaaucacugcaucuuucuugaggcguuuaaagaagagaauaguggccagggccucgguggg

SEQ ID NO: 363 - RNA, 94 nt, Human T-lymphotropic Virus 2
ccuagcgcugaaaaacaaggcucugacgauuacccccugcccauaaaauuugccuagucaaaauaaaagaugccgagucuauaaaagcgcaagg

SEQ ID NO: 364 - RNA, 58 nt, Human astrovirus
ccuaguaaaagugacaacugguuuucaggugaacaacuaccugaguuacuuuuacagg

SEQ ID NO: 365 - RNA, 65 nt, Human Herpesvirus 8
ccuccaguacgucguggucaacgguacagacguguuuuuggaccagccuugccauaugcugcagg

SEQ ID NO: 366 - RNA, 63 nt, Human Herpesvirus 4
ccuccccucccucucccucguccuggucggaaaagucugaggaggagaaggagaauggggagg

SEQ ID NO: 367 - RNA, 106 nt, Human Adenovirus D
ccucguagaggcgggugagggcgugcuugagaugcagaugguacuugauuucuacgggugaguugguggccguguccacgcauugcaugagcccguagcugcgcgg

SEQ ID NO: 368 - RNA, 60 nt, Rat Cytomegalovirus
ccucuuucgauuucuacacgagaaaaguuauaaaauacaucaguuagacgaucauugagg

SEQ ID NO: 369 - RNA, 67 nt, Human Adenovirus E
ccugcgucgccggcggcgcacgggcagacggucgaugaagcgcucgauggucucgccgcgccggcgu

SEQ ID NO: 370 - RNA, 106 nt, Human adenovirus B
ccuguaacaaguccucaaguuuuuccacugcuggacguuucccaggcuuaagcuucacaggaaugggcuugcgcacguccacaggaacaggugcuugaaucucagg

SEQ ID NO: 371 - RNA, 71 nt, Molluscum contagiosum virus
cgacgacgaagaugcagugguugugcgcgguuaacggaguuccgccuacuuuuacuucaaucuuugcgucg

SEQ ID NO: 372 - RNA, 101 nt, Rat Cytomegalovirus
cgauauaaaaacgauaauaccacggagccucggauucuauaacgcauacaacugugucauucugaauguauaaaucauaggcauugguauuguuauuaucg

SEQ ID NO: 373 - RNA, 70 nt, Tick-borne encephalitis virus
cgcacccugguggugccgugccgagaccaagaugaacucguugggagggcgcgcaucucaccggggugcg

SEQ ID NO: 374 - RNA, 87 nt, Human adenovirus A
cgccaacuaucccuacccucuuauaggccaaacagcuguggaaagcaucacacagaaaaaguuucuaugcgaucguguuauguggcg

SEQ ID NO: 375 - RNA, 100 nt, Human Herpesvirus 1
cgccacccugcgggcgacccggggggugcucugauagucucgcgugcccaaggcccgugaucgggguacuucgccgccgcgacccgccacccggugugcg

SEQ ID NO: 376 - RNA, 72 nt, Human Herpesvirus 5
cgccgaaaaaugcuugucuggcugagguuggugucgcuaaugccacuuuuuugucucgcuucaaugucggug

SEQ ID NO: 377 - RNA, 78 nt, Human Herpesvirus 5
cgccgacaagaccucagcauggcucggaggcuauggaucuugagcuuacuagccgugaccuugacgguggcuuuggcg

SEQ ID NO: 378 - RNA, 105 nt, Molluscum Contagiosum Virus
cgccgcguucacuagcucggacaggacauugcagcacucgcuugucagcgggacgagcacugacucgcacugguaguucugcccguagcuacacauacgcgcgcg

SEQ ID NO: 379 - RNA, 71 nt, Human herpesvirus 5
cgcgaguaucgggccgucgcuugccguucgacgaucuuuaguccggaggacgacagcucguguaucuuaug

SEQ ID NO: 380 - RNA, 77 nt, Molluscum contagiosum virus
cgcgcggggcacgugccggguagacacgcgcucgggcguuuuccgaggcggacgugcccggagacgcgcucagugcg

SEQ ID NO: 381 - RNA, 80 nt, Yellow fever virus
cgcgguaucuugaguuugaggcccugggauuccugaaugaggaccauugggcuuccagggaaaacucaggaggaggagug

SEQ ID NO: 382 - RNA, 69 nt, Human Herpesvirus 5
cgcgguuucuuacgcgggcugagcucgggaguagcggaugccccggggagaggaguguuaguaaccgcg

SEQ ID NO: 383 - RNA, 80 nt, Rubella virus
cgcucgagccacagguugacauaggcgcggucauuggugacgcgcguguaccggcagaguucgcaccccuggcauccgcg

SEQ ID NO: 384 - RNA, 80 nt, Human Herpesvirus 5
cgcucggcuuggucuucacguccagcagcgguaccagucccaccguuacgcaccaauccacguagagaccauagucgucg

SEQ ID NO: 385 - RNA, 99 nt, Rat cytomegalovirus
cgcugcuccgcagcauccggggagaggauuggaugaguuaccuggccggauacaacgagugcggccaccccaacuccaacaucuuuacgugcgugcacg

SEQ ID NO: 386 - RNA, 85 nt, Human herpesvirus 5
cgcugcucugagauuccucuucguacaggaugauugacagguuauggcuacacagguccugggcgggaggacgcgugggagcgcg

SEQ ID NO: 387 - RNA, 65 nt, Rat Cytomegalovirus
cgcuguuuucgcggucccgcucgggcugucggcguccgugcgcggcgcgggcccgcguuccggcg

SEQ ID NO: 388 - RNA, 89 nt, Human Coronavirus 229E
cgcuuagcaaugcgaaaguuagugcugaaguuucacgacagguuauccaagacgugaaagauggcacuguuaccuucaacuugcuagcg

SEQ ID NO: 389 - RNA, 61 nt, Human Herpesvirus 8
cgcuuauguguacaguuuccuuaguacccugcuauauaaugccauguacucauuuuacgcg

SEQ ID NO: 390 - RNA, 125 nt, Vaccinia Virus
cgcuucuaucuuguuuagauuuauuuuuauaaaguuuagucucuccuuccaacauaauaaaaguggaagucauuugacuagauaaacuaucaguaaguuuuauagagauagacgaacaauuagcg

SEQ ID NO: 391 - RNA, 71 nt, Human herpesvirus 5
cggaggaacacggcaguuagagacuggagugguggaaucauucuccuccuccgacugcgguggugccuccg

SEQ ID NO: 392 - RNA, 70 nt, Human herpesvirus 2
cggaggauggaagggcagaagauggggagucccgauccuccuccugcauccccucgccuuccauucuccg

SEQ ID NO: 393 - RNA, 55 nt, Rat cytomegalovirus
cgggaacggaguaugugagaguugucgaaaaaaauuucaaugacccguucucccg

SEQ ID NO: 394 - RNA, 85 nt, Molluscum contagiosum virus
cgggcacgggcgcgcgguuguccacgucguagucgggcuugcggcgcgagcgcuggauggagaugagccugcgcagcucggcgcg

SEQ ID NO: 395 - RNA, 111 nt, Human herpesvirus 5
cgggcugaagaccgugcggggaggauugacgugugcggugcuuguggaacacgguguuuuaauauguauccgcguguaaugcacgcggugugcuuucuggcacucagcuug

SEQ ID NO: 396 - RNA, 71 nt, Human herpesvirus 3
cgggggaauuaucgggguucuggaucgcggcagggaaaaugauuucugucucuggcgccccgguucccccg

SEQ ID NO: 397 - RNA, 67 nt, Human Adenovirus E
cgggggggucccccguugggcagggagagggcgcugacgaugcaucuuaucaauugccccguaggga

SEQ ID NO: 398 - RNA, 95 nt, Ovine adenovirus 7
cggggguaauuggucuagaaauaauaauguuauuguuaacuguagaugugcuuaucugcauguuggagauaacaugugguaugaaggccauuccg

SEQ ID NO: 399 - RNA, 88 nt, Human herpesvirus 1
cggggucaacgggcgggcggucgggcgauugauauauuuuucaauaaaaggcauuagucccgaagaccgccggugugugaugauuucg

SEQ ID NO: 400 - RNA, 63 nt, Human Herpesvirus 1
cggucggcgccgauuuccggcccggcgcguccccgcggggccgguccagaucgcggucgcccg

SEQ ID NO: 401 - RNA, 130 nt, Western equine encephalomyelitis virus
cguaggugacguucuugccagaaggugguuuaauguacacuucgccugacgcuuccuccagauaggacuuauacgcgugugggccuggccugugcaugguuauguacccggcagacgucuccuucaagug

SEQ ID NO: 402 - RNA, 89 nt, Salmon pancreas disease virus
cgucaacuccauggauaacucgcugauucccguauucgcucgcgcauuaugcagcugggcggacgaaguucggcgggacauggaggacg

SEQ ID NO: 403 - RNA, 75 nt, Human Herpesvirus 1
cgucucuccggagagcggcuuggugcggagcucccgggagcuccgcggaagacccaggccgccucggguguaacg

SEQ ID NO: 404 - RNA, 82 nt, Human herpesvirus 5
cgucuuguccuucagcgugcucauuaccugucuagccgucucgcauuuccacgaagcggcccuggcuguacgcuacgagacg

SEQ ID NO: 405 - RNA, 69 nt, Molluscum contagiosum virus
cgugaucucggccagugccuugacaagcgagcuaacgcggcgcgcgucgaagagcucuccggggucgcg

SEQ ID NO: 406 - RNA, 81 nt, Sindbis Virus
cguggugccaguuauagaauccuucgggguguucacugguguaggugaaugccucacuucucauguugacuggcaacugug

SEQ ID NO: 407 - RNA, 107 nt, Vaccinia virus
cguuacggauuggcaaaucuuaucauuggucgguguuuggucuugcuuugugacuuugauaauaacaucgauucccauaugauguuuguuuucuucuuccguacacg

SEQ ID NO: 408 - RNA, 85 nt, Variola virus
cguuauugguuccgcauacuaauguaucacauccucuacuuuuauagauguugugauauaauuaguauuagcuaaaccaguuuug

SEQ ID NO: 409 - RNA, 81 nt, Human adenovirus F
cuaaaacucccgggggguuuuccuguaacccgucggaagaaacgaagggcggagcuacauagggaaugcugggaguugagg

SEQ ID NO: 410 - RNA, 121 nt, Reston Ebola Virus
cuaaauagucuaucggcaguguugcuacagguguaucacuuaggaauuuggauacuauugugucgaacuuaagucgauauauauguuuugguaauuuacauugccuuaguugaggauuuag

SEQ ID NO: 411 - RNA, 107 nt, Human Herpesvirus 5
cuacguggaaagcaagcccacuaacgaacugucucaacgacugcaacguuucguaaccaagcgaccgaugcccguuagcgacagcuucgucugccugcgacccguag

SEQ ID NO: 412 - RNA, 115 nt, Barmah Forest Virus
cuaggcagagccggcggguacauuuuuucgucagacacggguccaggccaccuacagcagagauccguuuuacaaaauugcacggcagaauguaucuacgaaccggcaaaacuag

SEQ ID NO: 413 - RNA, 62 nt, Vaccinia Virus
cuaucgguuuacuauuuauugauaacgcagauguuugaguugucauccaugguaauccauag

SEQ ID NO: 414 - RNA, 78 nt, Human Herpesvirus 7
cuauuugaaaaugacuauuaaauuuuuguggaagaugucuauucugaauuuccauguuaguaguaauacaucgaaaag

SEQ ID NO: 415 - RNA, 64 nt, Human Herpesvirus 7
cucaccugacugucucauguauccagcugaaacaaauccuggaaugaguacugaagaaagugag

SEQ ID NO: 416 - RNA, 73 nt, Respiratory Syncytial Virus
cuccauaguucaaauggagccugaaaauuauaguaauuuaaaauuaaggagagacauaagaugaaagaugggg

SEQ ID NO: 417 - RNA, 78 nt, Hepatitis GB virus B
cuccaucgaagagguagugguaagaaagcgccaguuccgggcaagaacugguucgcuuaccuugccucccccuccgag

SEQ ID NO: 418 - RNA, 83 nt, Vaccinia virus
cucccugaucuauguaucuagcgguguuauuauaaacucucaacauuggaauaauaccguuugauauaccauugguaccggag

SEQ ID NO: 419 - RNA, 84 nt, Variola virus and Vaccinia virus
cuccuggauuuggauuuuguugugcuguuguacauacuguaccaccaguagguguaggaguacauacaguggccacaauaggag

SEQ ID NO: 420 - RNA, 64 nt, Human herpesvirus 2
cucggaggaggagaccgaggugggaaucucugacgacgaccuucaccgcgacuccaccuccgag

SEQ ID NO: 421 - RNA, 75 nt, Human Herpesvirus 5
cucguaaauaaagacgcacagaccucacgcauauaguaccaucacaccguguggcguguacuuuauuacaacgag

SEQ ID NO: 422 - RNA, 78 nt, Human herpesvirus 5
cucuauauauacaaaccggcgacgccaaguacgguauucguaaccagcauuugaguauacgguuaauguauccugggg

SEQ ID NO: 423 - RNA, 103 nt, Human adenovirus B
cucuccccacgcacagcuuuaaacauuuggauaccauuagauauagacaugguuuuagauuccacauuccaaacaguuucagagcgagccaaucuggggucag

SEQ ID NO: 424 - RNA, 67 nt, Human herpesvirus 8
cucucccgacgguugcgugggcgccauuacucgaaugacgggugcggcccgcuuuucugcggggggg

SEQ ID NO: 425 - RNA, 100 nt, Borna disease virus
cucuucgagaagguugucauucuaagaauugcugaccuagauauggaucccgacuucaacgauauuguuagcgauaaggcgauaaucagcucaagaaggg

SEQ ID NO: 426 - RNA, 77 nt, Human adenovirus D
cugagggcgcugauggagaggcacagacccauccuguuuuccgaguaugaaucugugcguucuucucguuccaccag

SEQ ID NO: 427 - RNA, 92 nt, Human herpesvirus 6B
cugcugauaaucuuguagcucaguguuugccaaccaaaugccucgugggacauugguaauccaugaacuacagugaauaucgaguuuagcag

SEQ ID NO: 428 - RNA, 75 nt, Ovine adenovirus 7
cuggaaggcuuuuaggaauuaauagcuuaggagaucuuuuuccggcuuauggaucuuauuguagaccucaaucag

SEQ ID NO: 429 - RNA, 71 nt, Human herpesvirus 5
cuggacucgguuucgcuguagcugugguucaaccugaacauggcucccagagcugcuaggaaccgguccag

SEQ ID NO: 430 - RNA, 65 nt, Human herpesvirus 4
cuggcggguggagauagggaccagaggacuaauguucucuaacugugucccacuccaccugccgg

SEQ ID NO: 431 - RNA, 105 nt, Zaire Ebola virus
cugguccggaaggguuuuaucaacaaaaucaugaauaaucugaucaauuuugucuguuauguucuugguccaaucaugugguucgauacagcaguccggucccag

SEQ ID NO: 432 - RNA, 72 nt, Murray Valley encephalitis virus
cugguccuggucccuaugagacuuccgcaccagaugucuucucucuucccuacauaugggacuuccguccag

SEQ ID NO: 433 - RNA, 120 nt, Influenza B virus
cuggugccgucucuguauugauaacauuacugguugauaaccugauguuuucauauccucugagaagauuagguaguugucugauuuuuguucugucgugcauuauaggaaagcauccag

SEQ ID NO: 434 - RNA, 113 nt, Poliovirus
cugguucaauacgguguuugcucuugaacuguauguaguuguuaauaguaugcucuaguuucuguauucuuuuggcuuccacugcguaaagaggggcaaaccucuuagacugg

SEQ ID NO: 435 - RNA, 92 nt, Human astrovirus
cugucugguccauuaaaauaagcaaacucaaaagccuguaaccaaaaguuaaccauguuguuauccauuguuguugaaaacugaccagaugg

SEQ ID NO: 436 - RNA, 128 nt, Human Herpesvirus 3
cugucuuuguuuuugcaacacaacauccaacgccguuuuacguuccuguugcuuuuuuuggagacgguuuuucguuuccacaggcaauaaaaaaaauucggguucggaacaaagcaugucaaccacag

SEQ ID NO: 437 - RNA, 72 nt, Human herpesvirus 5
cugugaaccgcucaguggcucggaccgccggcuguuucugcgcaccgguccgaacgcuaggucgguucucag

SEQ ID NO: 438 - RNA, 99 nt, Reston Ebola virus
cuuacgaacugaugaagauucggacgaggccuuaaggaacuaaaguugaauuccugauuccuccgcaauuaaucuucauccugcauuacugguuuuagg

SEQ ID NO: 439 - RNA, 56 nt, Human adenovirus B
cuuauucuacccacuucgcugcuacguacacuguguagagaaaaggguagacuagg

SEQ ID NO: 440 - RNA, 74 nt, Molluscum contagiosum virus
cuucguccugcaugacgauguagcucuugagguaggguaccuugagcaggagcacguuccugccggugaugaag

SEQ ID NO: 441 - RNA, 81 nt, Marburg virus
cuugauccugguacauuuaagccuaauggauucaugacgaaaucugaggcaucugcuaaaccagguuuuuuagcaaucaag

SEQ ID NO: 442 - RNA, 90 nt, Human herpesvirus 4
cuuggaagcuuuccgaaauucggauaaucacuuuuaucucccgacgacagggccuuuaaacaccuuccaauuucccgaagagcuucuggg

SEQ ID NO: 443 - RNA, 99 nt, Human herpesvirus 6B
cuuggagaaguauauaagagagacauaccaaugguuagacagaaugaaaacggaucgucaaccguuagugugagcuuuacuuucaaaagacgaaccaag

SEQ ID NO: 444 - RNA, 77 nt, Vaccinia Virus
cuugguauaauuaucaaaauacaagacgucgcuuuuagcagcuaaaagaauaauggaauugggcuccuuauaccaag

SEQ ID NO: 445 - RNA, 116 nt, SARS coronavirus
cuugugcuggucccuuugaagguguuagaccuuugacugaaccuucuguuauuaaaacaccauuacgggcguuucuaaaaaggucuaccuguccuuccacucuaccaucaaacaag

SEQ ID NO: 446 - RNA, 65 nt, Variola Virus
cuuuaucuauucugaaucauggagcagcugguucuacagcugaacaacuaucaaaauauauagag

SEQ ID NO: 447 - RNA, 130 nt, Vaccinia Virus
cuuuggcuuauaaaauacaaaugacauucccuuauguuuaaucuuaaucuuuucuuuaguuauugaaucguuacaauuauaaaaugauguuuuuuccaaaaaccuaaguguauuuaaaauagaugccaug

SEQ ID NO: 448 - RNA, 67 nt, Rat Cytomegalovirus
gaaaaaagaugacugggaagcuauccguauuguguuugauacauagauucuucucgguccuuguuuu

SEQ ID NO: 449 - RNA, 104 nt, SARS coronavirus
gaaaaagacugaugaagcucagccuuugccgcagagacaaaagaagcagcccacugugacucuucuuccugcggcugacauggaugauuucuccagacaacuuc

SEQ ID NO: 450 - RNA, 87 nt, Vaccinia Virus
gaaaagacguggguacuaaaguuggcugucaucuuaccaauugcaauuggaagaacaacgaccugcacuaauaccacauguuuuuuc

SEQ ID NO: 451 - RNA, 62 nt, Rat Cytomegalovirus
gaaaauaaaugacggauaugaugugaaugauauaucgucaucgauauacgugguuucuuauc

SEQ ID NO: 452 - RNA, 74 nt, Human herpesvirus 8
gaaagacuuguccagcagcaccuaauccaucggcggucgggcugaugguuuucgggcuguugagcgagucuuuu

SEQ ID NO: 453 - RNA, 62 nt, Variola Virus
gaaauuagaguuuguacauuaagcaacaugucuuuaaauguggcuacaaacuuuuccuuuuc

SEQ ID NO: 454 - RNA, 90 nt, Rat cytomegalovirus
gaaccguauuuagaggccucgaaacaacguggaacggcguuucgaucgauagcgcguucgacggaguuucggggcuucgaaaguacguuc

SEQ ID NO: 455 - RNA, 56 nt, Human Herpesvirus 6
gaacgauuggauuuucaaaguuuccauuucuacaauggcucgaguucgauauguuc

SEQ ID NO: 456 - RNA, 97 nt, Human Herpesvirus 6B
gaacgucucucucuccugugucgaucgcagagcguuuucggaacuguccucgguucagcauaaguuuauuuuggucuauuauagagggggugauuuc

SEQ ID NO: 457 - RNA, 81 nt, Human herpesvirus 1
gaagaggggggagaaaggggucugcaaccaaagguggucuggguccguccuuuggaucccgaccccucuucuucccucuuc

SEQ ID NO: 458 - RNA, 102 nt, Human herpesvirus 6
gaagccauggugcaacuuuuacucagauguuuaucagaguuuuugccacaaguucgguuaggaucuuuagauucauuuuugguggaauugcaguuagguuuc

SEQ ID NO: 459 - RNA, 84 nt, Variola virus
gaaggagaauacacauucaggacauuaauucccgcauauuuagauauuaaagccuuguugucuccgauagguguauacucaguc

SEQ ID NO: 460 - RNA, 116 nt, Human Herpesvirus 8
gaaggaggguugaauacaguuggggguaguccgcugguauucccagcugagguugccuuauuugguaaugcuuccggaaauaccaccugaguaccccauugguuuauaccuuguuu

SEQ ID NO: 461 - RNA, 66 nt, Vaccinia Virus
gaagguaguaauguuaguagacaauuuuuaucugugaaaacaggaaauaguuuaucauauaccuuu

SEQ ID NO: 462 - RNA, 80 nt, SARS coronavirus
gaagguguuagaccuuugacugaaccuucuguuauuaaaacaccauuacgggcguuucuaaaaaggucuaccuguccuuc

SEQ ID NO: 463 - RNA, 82 nt, Human Adenovirus A
gaagugcgguuccagaaggaguaauaaaaccugugccucagcgggugacugggaggcguagaugugcuguggaaagcauuuu

SEQ ID NO: 464 - RNA, 99 nt, Transmissible Gastroenteritis Virus
gaaucugcugaaggcuaugacuacaugguuauuaagaauggaauuguucaaccuuuugacgauaccauuucauguguucauaacacuuauaaaggauuc

SEQ ID NO: 465 - RNA, 72 nt, Vaccinia Virus
gaaugacucgucccuuaauaggcaguaggcuaguaucuuuuuuacguaguaaucgucguagggagagaauuc

SEQ ID NO: 466 - RNA, 91 nt, Human herpesvirus 7
gaauuuccucauacaaccuuuuccaggagagauaaaaaaacagauaaccaagcuggaauacucauggaaaggucaguaacugaggaaauuu

SEQ ID NO: 467 - RNA, 63 nt, Vaccinia Virus
gacacuuugccggcgguuguagauuuaucauauuucuccacuacauauccguuacaauuuguu

SEQ ID NO: 468 - RNA, 113 nt, Variola virus
gacauacauaucaucuggaaaaugauaaaauagaagaucuuauuaaucaguugguuaaggacgaguccauucaacuggaugaaaagaguucuauuaaagauaguauguauguc

SEQ ID NO: 469 - RNA, 64 nt, Vaccinia Virus
gacaugguaagauuacuggcucguuuucuaacuccaugaaugaugcaaaauauuacccuuuguc

SEQ ID NO: 470 - RNA, 60 nt, Human Herpesvirus 6
gacauuaauucuuacgcucauggguacuucggugacgacccuuaugcguuaaaauguguu

SEQ ID NO: 471 - RNA, 71 nt, Human Herpesvirus 6B
gacauuuaccagagauacgugauacucggucuacuguguauuguguaccuuguaaucucuagguaaacuuc

SEQ ID NO: 472 - RNA, 92 nt, Human Herpesvirus 6B
gaccccuuuauaagauuuacagacgauuuuagaggagaaaugaucaauacuuuuuucaauaaugcucagauguggaauuuuacguucggguc

SEQ ID NO: 473 - RNA, 75 nt, Human Adenovirus E
gaccgcaugaaucaagacauguaaaccguguguguauguuaaaugucuuuaauaaacagcacuuucauguuacac

SEQ ID NO: 474 - RNA, 108 nt, Dengue virus
gacgcauuuccaaagaguccugauauucauccuacugacagccaucgcuccuucaaugacaaugcgcugcauaggaauaucaaauagggacuuuguggaaggaguguc

SEQ ID NO: 475 - RNA, 84 nt, Human Herpesvirus 4
gacugaauuuucgcagucucuuuucccucuucccuuguuauucccauagaauuacagugagguuacacagguggagauucaguu

SEQ ID NO: 476 - RNA, 104 nt, Vaccinia Virus
gacuugacuagaucgucaguaguaauuugugcaucgucuauucugcauccgcuucgucgaauaauguauagcaucgcuuugagauucuccauagcuaucaaguc

SEQ ID NO: 477 - RNA, 66 nt, Human coronavirus OC43
gagaaugaaccuuaugucggcaucuggugguaaccccucgcagaaaagucgagauaaggcacucuc

SEQ ID NO: 478 - RNA, 81 nt, Human Herpesvirus 7
gagacaagcuuucaauaucugaaucuaaaguaaagucauguuuagaaguuucggauaaauuuauuaaugaaugcaugucuu

SEQ ID NO: 479 - RNA, 67 nt, Vaccinia Virus
gagacuugauagauauuagugaugaauugaaaauuauuuuuaucaccacguguguuucaggaucauc

SEQ ID NO: 480 - RNA, 106 nt, Rat Cytomegalovirus
gagagagaaagagacagagagacgcgagacgaaagagaccacgggacgccacacgaccacguuuuuaucuuuuuuuauucugcguuuuuuauccgcuuucuuuuuu

SEQ ID NO: 481 - RNA, 112 nt, Vaccinia virus
gagagaguuaauguaucgagagugguugaauguuugacugugccuaauauuacuauaucaaguaaugcugaauaaaaauauuuauaaauaugcucgucguaauuauguuuuu

SEQ ID NO: 482 - RNA, 79 nt, Vaccinia Virus
gagauuguaucaguuucguagucuugaguauugguauuacuauauaguauauagaugucgacgcuagauauacagucuc

SEQ ID NO: 483 - RNA, 90 nt, Molluscum contagiosum virus
gagcuaucuuuucaucuuuugcgggggcgcgcgaaugcgcucgccgccuagaagccggcgcguucccgcagcgccugcggaagcaaguuc

SEQ ID NO: 484 - RNA, 74 nt, Human parainfluenza virus 3
gagguugcuacucccagagcaaugguuccaauuaccccuccaaagaaucguuuuguucugggauuaguguuuuc

SEQ ID NO: 485 - RNA, 65 nt, Barmah Forest virus
gaguauauaggcaccggguacguuauucgguagcauucaacuggaugcucggugcccagauacuc

SEQ ID NO: 486 - RNA, 60 nt, Colorado tick fever virus
gaguaucacacuaucugguuuccagaaggagauuucgagaccaugaugggugcaaugcuu

SEQ ID NO: 487 - RNA, 102 nt, Human Herpesvirus 6
gaguggacgcugacauucuaguaugcuuuaccucuuuagugacuucagugauugaguaugaugaauuacuagaugguaaagcguuguuaguuauguguacuu

SEQ ID NO: 488 - RNA, 76 nt, Vaccinia virus
gauaacacagcaauagaucggaugauuuacuaaagucaucaaugguguccguuaguauaucaaagaucuuguuauc

SEQ ID NO: 489 - RNA, 89 nt, Ovine adenovirus 7
gauacuuuuuguugaacuuguuuuaaaucuugaucacaguuuacauguuguaguuuuucuagaguuauugcagguucguaauuuuuguc

SEQ ID NO: 490 - RNA, 111 nt, Human herpesvirus 7
gauauaacagagguaaauguacugaauugcauuuugucuugguucccagucagguuccaauaauaaaucuuucaauaugaccaauccauauauauuuuccuuucuuacguc

SEQ ID NO: 491 - RNA, 67 nt, Rat Cytomegalovirus
gaucauguucgccaccaacccgacgugccaccuggcguggccgcugggcgagagcgaacacgagauc

SEQ ID NO: 492 - RNA, 77 nt, West Nile virus
gaucuucugcucugcacaaccagccacacggcacagugcgccgacauagguggcugguggugcuagaacacaggauc

SEQ ID NO: 493 - RNA, 70 nt, Reston Ebola Virus
gaugaagauuaauugcggaggaaucaggaauucaacuuuaguuccuuaaggccucguccgaaucuucauc

SEQ ID NO: 494 - RNA, 78 nt, Colorado tick fever virus
gaugaggcgcguucucuuaacuaauuuguuagaugagauguuaguuuuugauauugggggacggaauggcgaguuguc

SEQ ID NO: 495 - RNA, 86 nt, Measles virus
gaugcaaggcuuguuucagagauugcaaugcauacuacugaggacaggaucaguagagcggucggacccagacaagcccaaguguc

SEQ ID NO: 496 - RNA, 72 nt, Japanese encephalitis virus
gauggaaguauaggaguagccacaucugugcauaugcuuuggccagacaagcuguguccuucacauuccauc

SEQ ID NO: 497 - RNA, 56 nt, Human adenovirus D
gauggagaggcacagacccauccuguuuuccgaguaugaaucugugcguucuucuc

SEQ ID NO: 498 - RNA, 101 nt, Vaccinia Virus
gauggagucguaaaaaaguuuuaucucuuucucucuucgauggucucacaaaaauauuaaaccucuuucugauggagucguaaaaaaguuuuaucucuuuc

SEQ ID NO: 499 - RNA, 115 nt, Vaccinia Virus
gauggucucauaaaaaaaguuuuacaaaaauauuuuuauucucuuucucucuuugauggucucauaaaaaaaguuuuacaaaaauauuuuuauucucuuucucucuuugaugguc

SEQ ID NO: 500 - RNA, 56 nt, Sindbis Virus
gaugguguacacaggauggcgaugguaguaaugcuguacuauuucguguggccauc

SEQ ID NO: 501 - RNA, 124 nt, Human Coronavirus 229E
gauguacuacguaauagcuuugguaaagaucuuaaugcuaauaugucuuuagccgagugcaagagagcuuuaggccugucuauuagugaucaugaauuuacuagugcuauuucuaaugcacauc

SEQ ID NO: 502 - RNA, 131 nt, Human herpesvirus 6
gauguucugugcuuuuuuuauacggucagagaccacagacaaaaauaaggcaacgcccaccauaacguuuaugguuucuuguuguuuuguuuggguuaaacgccucuucuaucgugucggccggauccauc

SEQ ID NO: 503 - RNA, 60 nt, Human herpesvirus 8
gauguugcgauaacauccucugggaugccaagcagaucaaagaggucuucaucgcacauc

SEQ ID NO: 504 - RNA, 130 nt, Respiratory syncytial virus
gauuauuugccccauguggauauuuuuauuaacuuauuugaguacuagaucugaugaacaaugacuugggaugaucugaggcuccagauggguuuuguuugauuaguugaaccacagaggguuggugauu

SEQ ID NO: 505 - RNA, 82 nt, SARS coronavirus
gauucauuugaguuauaguagggaugacauuacgcuuaguauacgcgaaaagugcaucuugauccucauaacucauugaguc

SEQ ID NO: 506 - RNA, 60 nt, Hepatitis A Virus
gauuucucugcuuuugaugcuagucuuaguccauuuaugauuagagaagcagguagaauc

SEQ ID NO: 507 - RNA, 63 nt, Vaccinia Virus
gauuuugugauuuuucuuccuaaacuguuuacguaaauaguuagauagaauauucauuaguuc

SEQ ID NO: 508 - RNA, 77 nt, Vaccinia virus
gcaaaucuuaucauuggucgguguuuggucuugcuuugugacuuugauaauaacaucgauucccauaugauguuugu

SEQ ID NO: 509 - RNA, 73 nt, Human Adenovirus F
gcaagcccauucugccaguuggggauuggcggcuagaaaaccgcgccauagcuggagggcaaaaugggcuugc

SEQ ID NO: 510 - RNA, 61 nt, Human Herpesvirus 4
gcaauuugccuaacauggaggauugaggacccaccuuuuaauucucuucuguuugcauugc

SEQ ID NO: 511 - RNA, 81 nt, Human Herpesvirus 2
gcaccgaugccgugccgcuggcguugcgccgagagaacgacacggagucgcggugccacgucagcuggcaggugaaggugc

SEQ ID NO: 512 - RNA, 94 nt, Molluscum Contagiosum Virus
gcacgacccucuucgacuuacggacgcccuccucgaccugcacgacccucuucucgagugcacguaaagacggcgauucgugcucguguugugc

SEQ ID NO: 513 - RNA, 71 nt, Molluscum contagiosum virus
gcacggagacauacacgcaccucuucgugcggaugacucuguuccagcacgaaagcgcgaguguguuuugc

SEQ ID NO: 514 - RNA, 58 nt, Rat Cytomegalovirus
gcacgucugucuguguacagucuugugaaaccacugacacaugacacaagaacgucgc

SEQ ID NO: 515 - RNA, 64 nt, Human Coronavirus 229E
gcagaggauguuuguacuuguuacgauaauaguauacaagguucauacgaacguuuuacucugu

SEQ ID NO: 516 - RNA, 102 nt, Molluscum Contagiosum Virus
gcaggucgcacggcugguagagguaguccaggcccucgccguaggugcccagcagcgccucgcacaggaagcucuuggccgccucgaugccgaagaucucgu

SEQ ID NO: 517 - RNA, 89 nt, Human herpesvirus 8
gcauauuggcguugagcgccaccggacggggauuuaugcuguaucuuacuaccaugaucccauguugcuggcgcucacggcccgugugc

SEQ ID NO: 518 - RNA, 76 nt, Human Herpesvirus 4
gcaucuccaauaaguagauccagauaccuaagacugcguugaaaaaagaguguuaggguuggaaaagugggggugu

SEQ ID NO: 519 - RNA, 109 nt, Influenza B virus
gcauuagaaggacaaggaaaagagcaaaauuugagaccacaguaugaagugauugagggaaugccaagaaacauagcauggaugguucaaagauccuuagcccaagagc

SEQ ID NO: 520 - RNA, 88 nt, Reston Ebola Virus
gcauugagcacugcuaauagguuuguaucacguuaaagauuuagaguguaugaauugugcagauuuaaacuuggguuuugccuuaugc

SEQ ID NO: 521 - RNA, 69 nt, Human Herpesvirus 5
gccaaaaguugcgugucugaguggacguggguuuuuauagagucguccuaagcgcgugcggcggguggc

SEQ ID NO: 522 - RNA, 73 nt, Rat Cytomegalovirus
gccacacguccaacugcuucccgaacgucucguuauauagugcgacggacaaaaccaguucccggacgugggc

SEQ ID NO: 523 - RNA, 91 nt, Molluscum Contagiosum Virus
gccacagggugucgcucacguagucgccgcgcgccagcagcagcguuccgcggcgcgcgcguggcgccucgucggcgcgcgccugcacggc

SEQ ID NO: 524 - RNA, 67 nt, Human Immunodeficiency Virus 1
gccacauaccuagaagaauaagacagggcuuggaaaggauuuugcuauaagauggguggcaaguggu

SEQ ID NO: 525 - RNA, 60 nt, Human Herpesvirus 8
gccagguuuccauugccacccgggcgaaaacaagccggguaguuucaggggucaucuggc

SEQ ID NO: 526 - RNA, 53 nt, Human Herpesvirus 5
gccaucguuuuucauaccacagccuguagcugucguacaugaaugaggacggu

SEQ ID NO: 527 - RNA, 81 nt, Human Herpesvirus 1
gccccccgcgggcgcgcgcgcgcgcaaaaaaggcgggcggcgguccgggcggcgugcgcgcgcgcggcgggcguggggggc

SEQ ID NO: 528 - RNA, 60 nt, Human Herpesvirus 1
gccccucgcccccucccgccccucgcccccucccgccccucgcccccucccgccccucgc

SEQ ID NO: 529 - RNA, 90 nt, Human herpesvirus 2
gcccgcccgcgacgagggucucauuagcaucgcgggcggaagcggaagccgcccgcgccgggcgcuaaugagaugccgcgcgggcggagc

SEQ ID NO: 530 - RNA, 96 nt, Zaire Ebola Virus
gcccuucuaauuaagaaaaaaucggcgaugaagauuaagccgacagugagcguaaucuucaucucucuuagauuauuuguuuuccagaguaggggu

SEQ ID NO: 531 - RNA, 79 nt, Hepatitis GB virus C
gccucauuguguuccccccccuggacuuccggauagcugaaaagcucauucugggagacccggggcggguugcaaaggc

SEQ ID NO: 532 - RNA, 77 nt, Molluscum Contagiosum Virus
gccucgugcuccucgaacuuggcagccgcggucagcaugcgcgcgauguccacggaaacaagagaguucacgagcgc

SEQ ID NO: 533 - RNA, 104 nt, Vaccinia Virus
gccuugggcggaucuguaaacauuugggccauuauaccucucagugcaucaguguucuaccgaggagccgaaaacauuguguuuaaucuuccuguguccaaggu

SEQ ID NO: 534 - RNA, 104 nt, Human herpesvirus 5
gccuuuaagaugcggaaaagccagcaccaggcccagacagagcaagaaggugcaggugcccugcacggccacggugcuguagacccgcauacaaaguaaaaagc

SEQ ID NO: 535 - RNA, 91 nt, Human Herpesvirus 6
gcgaaauguauucagauucguuuucagguccgaacgccacaaacucaacaacguaagugucgucucgauuacgccugauuauacauuucgu

SEQ ID NO: 536 - RNA, 61 nt, Human Herpesvirus 6B
gcgagacagaucagcauuuggcagccuaaacggagacugcacagaaucgagaucguuuugc

SEQ ID NO: 537 - RNA, 66 nt, Rat Cytomegalovirus
gcgaggcacgucucacgguguuuuucaccccgagcuuuaauauauauagaaacacguuuauuucgc

SEQ ID NO: 538 - RNA, 103 nt, Human adenovirus B
gcgauuagcgagucaguggacggcuacgauugaugucuggugacgcggcugagcuaucucggcugcgacaucuagaccacugccgccgcuuucgcugcuuugc

SEQ ID NO: 539 - RNA, 63 nt, Vaccinia Virus
gcgcacuaauugccaauauaauaacaaagaauauaaguguugauguuuuggcugcuuguacgc

SEQ ID NO: 540 - RNA, 69 nt, Molluscum contagiosum virus
gcgcgcgcgcuacacugugcucacguacucgggggccacacccgugcgcgugcacguguacgcgggcgc

SEQ ID NO: 541 - RNA, 72 nt, Human herpesvirus 8
gcgcgugcucucucagucgcgccuagcugcuuccaacagacaaaagcggggcguuagugagggagugcgcgc

SEQ ID NO: 542 - RNA, 93 nt, Human Herpesvirus 5
gcgcguuugcgcacguucaccucgcgagugacguuguggaugcgggagcgcgcguccaccaagucgagagccucguguucgucgcaguugcgc

SEQ ID NO: 543 - RNA, 68 nt, Human Herpesvirus 6B
gcgcuguggauuugucuucuacgcuagauuuuuuuuaagcaguggauugucacaaucuaaagaagcgc

SEQ ID NO: 544 - RNA, 88 nt, Human herpesvirus 2
gcggaaaaacggaggauggaagggcagaagauggggagucccgauccuccuccugcauccccucgccuuccauucuccggcccuccgc

SEQ ID NO: 545 - RNA, 79 nt, Human Herpesvirus 4
gcggagucuggcaacgcccggguccuugcuaccugugugguguguuaagggcuggguaaaggugucugccaauucucgc

SEQ ID NO: 546 - RNA, 65 nt, Rat Cytomegalovirus
gcggccggucauucgagugaauucauuuuccagggcggagaagaucucgucggcggacgggucgu

SEQ ID NO: 547 - RNA, 65 nt, Human Herpesvirus 7
gcggcucaaauaugccuguuuugugcauuauauagacaaaauaggcucuguauggaauaugccgc

SEQ ID NO: 548 - RNA, 92 nt, Molluscum Contagiosum Virus
gcgggguucaggugcgugaggaagacguacucgaugaagucgauguccgagacgccgaagaaguaguucucgcgcacguccucuaccaccgc

SEQ ID NO: 549 - RNA, 70 nt, Vaccinia Virus
gcgguauaauuaguuuuuuucucucaauuucuauuuuuagaugugauggaaaaaugacuaauuuuguagc

SEQ ID NO: 550 - RNA, 68 nt, Vaccinia Virus
gcguaucuacuacuccaaauugcaguuucugguauccauccauacgcguaauuaucaaauagauaugu

SEQ ID NO: 551 - RNA, 114 nt, Molluscum contagiosum virus
gcgugcuaggagagacgcucagaacguggucaagauccaagcgcaacacggccuucuccucgcucugcucuugaugcugaacgaucucugacccgcgccuacuccuuucgacgc

SEQ ID NO: 552 - RNA, 74 nt, Vaccinia virus
gcuaacauggauuggagaucacuaacucaggucaaagaauuggguauugcgaucuucaauaauaggaacuuggc

SEQ ID NO: 553 - RNA, 81 nt, Human herpesvirus 8
gcuaaccugcccaggacguccaaauaugccaaaugguaccuuagugucuacuuugcauauuuggaacccguguauccaugu

SEQ ID NO: 554 - RNA, 78 nt, Human herpesvirus 6
gcuaaugaggccaaaauugggaaauaauguuccaaucuucauacacgaucaacauuauuuacggucuggcuugguugc

SEQ ID NO: 555 - RNA, 131 nt, Variola virus
gcuacaugggaucaguuuagaaacagauggguguuacaaaauccauuuaggcaagaagggacauauaagcaacuguuuaccuuuagcaaauacgauuuuaacgacaccauaauagauccuaaugguguggc

SEQ ID NO: 556 - RNA, 89 nt, Vaccinia Virus
gcuaccaaggcgaacaacaaagcgauuauuguuuuaccugaucccauaauauggaacaauaacacgcuucuguucucaucuaugauagu

SEQ ID NO: 557 - RNA, 68 nt, Human adenovirus B
gcuauaauguguuggaagacaaaaucaacacagccuaucgcaguugguaucuuucguacaauuauggc

SEQ ID NO: 558 - RNA, 96 nt, Human herpesvirus 7
gcuauuaaaucuuccugauagucucuaucuuuuaugucuuuuauuggauaguaauucaauuaaaguucacaucgauggagacgucuuuccuauagc

SEQ ID NO: 559 - RNA, 74 nt, Rat cytomegalovirus
gcucuauucaucaauuuguacgaaccuaagauugaacgaacuauauguuauucguacggguugaauacccgagc

SEQ ID NO: 560 - RNA, 72 nt, Human herpesvirus 2
gcugcaucggaccccgcucggucgugguuuacgaccgagacguuuuuuccauccucuacucgguccugcagc

SEQ ID NO: 561 - RNA, 89 nt, Hepatitis E virus
gcugcggccggggcuggaccucguguucgccaacccgcccgaccacucggcuccgcuuggcgugaccaggcccagcgccccgccgcugc

SEQ ID NO: 562 - RNA, 96 nt, Sindbis virus
gcugcguaaaugccuguagauagcaguggaauggcgacagacuugauguuauguucauuuacuaagucugccacugcaugguaggcguuuuguagc

SEQ ID NO: 563 - RNA, 131 nt, Human herpesvirus 4
gcugcuccggagccagcuucucuccuauagugacuuuauucaaguuuuggccacguuuaccgcagacccgggggacaccauagucuggaugaaguuaaacguggaggagaacaugcgccgccugaagaagc

SEQ ID NO: 564 - RNA, 76 nt, Human Adenovirus E
gcugggcucgagcaugacggcgacuaccuccaccugagcgggggggaggacgcgcucaucaagcaucuggcccggc

SEQ ID NO: 565 - RNA, 61 nt, Human Herpesvirus 8
gcuguugcguugguugggaguuuggggaccaaauuucuauaauuggugucaccgcggcagc

SEQ ID NO: 566 - RNA, 77 nt, Molluscum contagiosum virus
gcuuagcgcacagcgcgcggaaaaugaaaagauaucgcgcgccuacgagagcgucgcgcgcgcgcuuugagcagggc

SEQ ID NO: 567 - RNA, 60 nt, Human Herpesvirus 5
gcuuuucgucucuccaaggaacacuggguccgcugaaagggaccguguaccgaccaaagc

SEQ ID NO: 568 - RNA, 96 nt, Human enterovirus E
ggaaacaccagccccaucugcaaucucugaucuucucuguagcguugacucaggggagguccgagauuauugcagacgaaggggcuggauaguucc

SEQ ID NO: 569 - RNA, 99 nt, Human herpesvirus 2
ggaaagcggaaaaacggaggauggaagggcagaagauggggagucccgauccuccuccugcauccccucgccuuccauucuccggcccuccgcgagucc

SEQ ID NO: 570 - RNA, 82 nt, Human herpesvirus 5
ggaacacguguuaggcuucgagcuggugccaccgucucucuuuaacguggugguggccauacgcaacgaagccacgcguacc

SEQ ID NO: 571 - RNA, 94 nt, Murray Valley encephalitis virus
ggaauagagcagaagaucuccuagucuuuucccaggugucaauaugcuguuguuugaugcuuuugagaguggggucuccucuaaccucuagucc

SEQ ID NO: 572 - RNA, 105 nt, Rat cytomegalovirus
ggaauuacucuucgugagauggagauagaauugaacuuuacaacgcaacagaaaccucuuuuacgggaacuucauaaauuuuauccaaacuccaugaagauaucc

SEQ ID NO: 573 - RNA, 93 nt, Influenza B virus
ggacaaggaaaagagcaaaauuugagaccacaguaugaagugauugagggaaugccaagaaacauagcauggaugguucaaagauccuuagcc

SEQ ID NO: 574 - RNA, 66 nt, Rat cytomegalovirus
ggacaagggaggaaaaacgaggauggaaaaggaaggugagacuuuuccguuuuuccucugcuuucc

SEQ ID NO: 575 - RNA, 80 nt, Human herpesvirus 2
ggacagggggggagacgaggggucggaauccaaaggacgcagaccaccuuugguuacggaccccuuucucccccccuucc

SEQ ID NO: 576 - RNA, 63 nt, Variola Virus
ggacauguaaacuugacaaaaauugugacuuuguuauuggucaaccuuuguuguacaaauucc

SEQ ID NO: 577 - RNA, 98 nt, Molluscum contagiosum virus
ggacgaggcucagcgcuucgacuuccagcgagucaucggcgaguuucaucgcguugucgagaauagcuggggcaaagaguugcgcgagaacucgugcc

SEQ ID NO: 578 - RNA, 77 nt, Human Papillomavirus Type 6
ggacggacaagauucacaaccuuuaaaacaacauuaccaaauagugaccuguugcuguggaugugacagcaacguuc

SEQ ID NO: 579 - RNA, 117 nt, Human herpesvirus 7
ggacuggcacgcugugauuguauuuacgagaaaaggucuguaccauauggaauugucauggaaggaaaauuaagacaguuuauggacaauuuuggcucacugcaaagugugcuagcc

SEQ ID NO: 580 - RNA, 120 nt, Vaccinia Virus
ggagaaagaauuacauucucuggagaagccauaaauauaugacgugauagagucgucaauuccuuuauuaguucaucauauggaacuuuuucauugucucuaggugugaauucuauuucc

SEQ ID NO: 581 - RNA, 52 nt, Human Immunodeficiency Virus 1
ggagacagcgacgaagagcucaucagaacagucagacucaucaagcuucucu

SEQ ID NO: 582 - RNA, 90 nt, Human herpesvirus 5
ggagacucggccgccaagauccaggagcgcuacgcggagcugcagaagcgcaagagccaccccaccuccugcaucuccacggccuucacc

SEQ ID NO: 583 - RNA, 79 nt, Molluscum Contagiosum Virus
ggagcacgugaacagacccaguggcguuugccgugacaagacacuguccuuccuccggcgaaaagccgcucgcgucuuc

SEQ ID NO: 584 - RNA, 72 nt, Molluscum Contagiosum Virus
ggagcacuucuccgaugggucggucgugacuccacgugcggagcacuucuccgaugggucggucgugacucc

SEQ ID NO: 585 - RNA, 60 nt, Rat Cytomegalovirus
ggagcgggggggaucucgacgcgcgcgacggacagaucgagacggaccaggcccggcuuc

SEQ ID NO: 586 - RNA, 80 nt, Human herpesvirus 2
ggagggggugggcgggguccaggcaaggcagggccugggccacagaccacugcuuggccucgagcccguccaucgcgucc

SEQ ID NO: 587 - RNA, 97 nt, Human adenovirus C
ggaggugaugcugaauaagcuggacaaagauuugcugacugauuuuaaguaaguaauuuauuguguguuuauguuaguugaauggaauaagaucucu

SEQ ID NO: 588 - RNA, 76 nt, Influenza B virus
ggauaaagcacuauaucuuuuccuuuuaacuacuuuaacgggcuuuccuugauaaaguaagauguuugcuuucucc

SEQ ID NO: 589 - RNA, 89 nt, Tick-borne Encephalitis Virus
ggauggacgcacccugguggugccgugccgagaccaagaugaacucguugggagggcgcgcaucucaccggggugcggcuggagugucc

SEQ ID NO: 590 - RNA, 78 nt, Vaccinia Virus
ggauguaaaauguugaugauaucuacaucguuuggauuuuuauguauccacuuuaauaauaucauagcuguaacaucc

SEQ ID NO: 591 - RNA, 58 nt, Human Herpesvirus 5
ggauuacagaguauaacauagaguauaauauagaguauacaauagugacgugggaucc

SEQ ID NO: 592 - RNA, 79 nt, Vaccinia virus
ggcaaaucuuaucauuggucgguguuuggucuugcuuugugacuuugauaauaacaucgauucccauaugauguuuguu

SEQ ID NO: 593 - RNA, 92 nt, Molluscum Contagiosum Virus
ggcagcgcuuguuucgcaugcacagccgcuuucugggcgcgugcgagcggcgcgcgcugagcgcggagcuggcguugccgagcgagcacgcc

SEQ ID NO: 594 - RNA, 61 nt, Human Herpesvirus 4
ggcagguggagugggacacaguuagagaacauuaguccucuggucccuaucuccacccgcc

SEQ ID NO: 595 - RNA, 94 nt, Marburg Virus
ggcauacuauggugaugcgagggcauuauucagugcuacaaauucuuuuuucaauugcuauaaugauacaacuacgaaccuccauacauuugcc

SEQ ID NO: 596 - RNA, 71 nt, Human Herpesvirus 8
ggccacaggauguagaucgcagacacugaaacgcugaaacacagcauuaagcugcaauaccgccgauggcc

SEQ ID NO: 597 - RNA, 60 nt, Hepatitis GB Virus C
ggcccgaauccugucccacuacugcugagguggggcaaugauuugccaucaaaaguggcc

SEQ ID NO: 598 - RNA, 80 nt, Human Herpesvirus 2
ggcccggcgcuccacgccgggguucccggcggcggaaaagcgcgaccgccgccgggucuugucgcggccgggcccgggcc

SEQ ID NO: 599 - RNA, 97 nt, Rat Cytomegalovirus
ggccgccgccucgagguggcucgcgucgccauggagaccgagacccgucaaucagcggucaccauggcgacgcgagcccgccuccgaguccgcggcc

SEQ ID NO: 600 - RNA, 89 nt, Molluscum Contagiosum Virus
ggccgucuccucucgcgaucugcgugacccucuucgacuuacggacgcccuccucgaccugcacgacccucuucgacuuacggacgccc

SEQ ID NO: 601 - RNA, 64 nt, Human Herpesvirus 1
ggccgucugguucgaggauaugacccccgccgagcuggagguugucuucccgacuacggacgcc

SEQ ID NO: 602 - RNA, 107 nt, Variola virus
ggccguuuguuuccucccugaucuauguaucuagcgguguuauuauaaacucucaacauuggaauaauaccauuggaugcaccauuggucccggagauauagcuucc

SEQ ID NO: 603 - RNA, 68 nt, Human herpesvirus 4
ggccuacacagaccuccgugaaggcaggguccccaugggggagcucugcuuuucaacggagcucagcc

SEQ ID NO: 604 - RNA, 66 nt, Human Herpesvirus 4
ggccuagagaaggagagggagcucuaucuaaagaagauccgcuccauggagucucagcugcaggcc

SEQ ID NO: 605 - RNA, 70 nt, Human Herpesvirus 6
ggcgacacauuucuagacaggcuguugaaaauggacuacuguuuuacauauuacccuucuucaaaucgcc

SEQ ID NO: 606 - RNA, 67 nt, Sindbis Virus
ggcgaugagauccuugcuagucaaggagguagcuugaaugucuccaaacgcuccugguuucaucgcu

SEQ ID NO: 607 - RNA, 71 nt, Molluscum contagiosum virus
ggcgccaggaguaugagaagcgcuucgccgccgagaucaagcgcggcaucuucuuccugcgccuggccgcc

SEQ ID NO: 608 - RNA, 75 nt, Molluscum Contagiosum Virus
ggcgccggcggccggcaccggaagcaagcauuucuaacugcgcgagcugguagcggcgccggcggcacgggcgcc

SEQ ID NO: 609 - RNA, 67 nt, Human adenovirus D
ggcgcugauggagaggcacagacccauccuguuuuccgaguaugaaucugugcguucuucucguucc

SEQ ID NO: 610 - RNA, 74 nt, Rubella virus
ggcgcuggcaagacuacccgcauccucgcugccuucacgcgcgaagaccuuuacgucugccccaccaaugcgcu

SEQ ID NO: 611 - RNA, 69 nt, Molluscum Contagiosum Virus
ggcggcaagcgagaucccuccgagacgucuggcucguacugcugcaggcaaagcggggcgcgcgccgcu

SEQ ID NO: 612 - RNA, 70 nt, Human Herpesvirus 1
ggcggccgggggcccgcggcgcgucaggcgccauaggugccgaccgaguccgcgguccaccauacccgcc

SEQ ID NO: 613 - RNA, 72 nt, Rat Cytomegalovirus
ggcggcgggucccucuugucucggagacggcgggucacggguauuucacgacgucucacgguacucgacgcc

SEQ ID NO: 614 - RNA, 75 nt, Human herpesvirus 3
ggcggugucgucaauuuguaaaauucccuguaauaguugccguuuuaagguugcuguuguuaccaacacaccguc

SEQ ID NO: 615 - RNA, 61 nt, SARS coronavirus
ggcugcagguacagacacaaccauaacauuaaauguuuuggcauggcuguaugcugcuguu

SEQ ID NO: 616 - RNA, 61 nt, Human herpesvirus 4
ggcuguggacuggggugcgggugcgggugaugguacggaugaucaccccgaguccaaggcc

SEQ ID NO: 617 - RNA, 73 nt, Hepatitis C virus
ggcuucuguccagaggaggcagggcugccauauguggcaaguaccucuucaacugggcaguaagaacaaagcu

SEQ ID NO: 618 - RNA, 86 nt, Influenza B virus
ggcuuguauugaagggaggaggagaaaauuucaucgaaguaaggaaagggucuccucuauucucuuacaauccacaaacagaaguc

SEQ ID NO: 619 - RNA, 63 nt, Rat Cytomegalovirus
gggaaacgaaaacaaggaagauguagcaauguaugaaaagcaagggucuugagaucguaccuc

SEQ ID NO: 620 - RNA, 64 nt, Simian Immunodeficiency Virus
gggaauacagacaucauuggcaggugcaauggcaguuuuggaccuacagccaguucauuauccc

SEQ ID NO: 621 - RNA, 71 nt, Human Herpesvirus 2
gggagacgggguugguuugggguugguuugggguugguuuucccguuagcacaugucugcauuuguuuuuc

SEQ ID NO: 622 - RNA, 79 nt, Human Herpesvirus 2
gggagcucgggcaggcucgcguuccgaggccggccgagcagauaggucuuugggauguaaagcagcugcccgggguccc

SEQ ID NO: 623 - RNA, 120 nt, Human Herpesvirus 8
aaacaagguagaaaccaacgggguccucaggugguauuuccggaagcauuaccaaauaaggcaaccucagcugggaauaccagcggacuacccccaacuguauucaacccuccuuuguuu

SEQ ID NO: 624 - RNA, 120 nt, Human herpesvirus 8
aaacaagguauaaaccaaugggguacucaggugguauuuccggaagcauuaccaaauaaggcaaccucagcugggaauaccagcggacuacccccaacuguauucaacccuccuucguuu

SEQ ID NO: 625 - RNA, 79 nt, Human Herpesvirus 1
aaacgcgggcguauuggucccaauggggucucggugggguaucgacagagugccagcccugggaccgaaccccgcguuu

SEQ ID NO: 626 - RNA, 79 nt, Human herpesvirus 3
aaacuugacaccacgguucgcauugaccuguagcaugauaucuuguuuguacuucaaccuugaagcguuguccggguuu

SEQ ID NO: 627 - RNA, 130 nt, Molluscum contagiosum virus
aaaggcauguugacgaacaggcaagauucacucugcaagacgugugaaguagcgaacgcucacgcgaagagcuauuuuuucaguuuuuguucuuucucucguggaucgcuccuccguguuucagaccgcu

SEQ ID NO: 628 - RNA, 79 nt, Human herpesvirus 6B
aaauaguugugaaaauggcugaauaauauuagaguccucuauuucuguuuuauuuguauuuucauuggaaaaacuguuu

SEQ ID NO: 629 - RNA, 60 nt, Vaccinia Virus
aaauuauucuuaucaugcguccauagucccguuccguaucuauuaucguuagaauauuuu

SEQ ID NO: 630 - RNA, 107 nt, Transmissible Gastroenteritis Virus
aacagccguuauuaguuaauugcuuauggccagucccuagcuuugaagaagcagcuucuacauuuuguuuugagggugcuggcuuugaucaauguaauggugcuguu

SEQ ID NO: 631 - RNA, 130 nt, Zaire Ebola virus
aaccaucucaguuguaaacagguaauacuuacggcauugcaacugcaaauucaacgaagcccauacuggcuaagucauuuaacucaguaugcugacugugaguuacauuuaaguuauauccgccuugguu

SEQ ID NO: 632 - RNA, 104 nt, Human coronavirus OC43
aagacauccauucugauagagagugccuuaucucgacuuuucugcgagggguuaccaccagaugccgacauaagguucauucucuuauauuucugaggugucuu

SEQ ID NO: 633 - RNA, 83 nt, Variola virus and Vaccinia virus
aagagaugucugaaacguauucucuuccaccacauccaucaauuguaaaaguuuuauugggagaauuggucagacaauuuuuu

SEQ ID NO: 634 - RNA, 73 nt, Variola Virus
aagaugauaaaaacacguuuauuuuauaugucaaccauuacuaaaaaauauauuguucuguuuuuguuuucuu

SEQ ID NO: 635 - RNA, 66 nt, Human herpesvirus 5
aaguaugaaaguuggcugcgcccguuggugaauguuaccagacgcgauggcccgcuaucgcaacuu

SEQ ID NO: 636 - RNA, 64 nt, Human adenovirus E
aagucuuuguugucugcuguguacugaguauaauaaaagcugagacagcgacuacuccggacuu

SEQ ID NO: 637 - RNA, 75 nt, Vaccinia virus
aauaaagaacuuuuagacugggcaccggauccuagaaaauauuuuagcuuaaagucuaucguaaaguuuuuuguu

SEQ ID NO: 638 - RNA, 99 nt, Human Herpesvirus 6
aauaccucaaugucuucuaugggcgucgaauucguaugcguauaaucgguauacacgugcgcaugauuuccagauaaaaagaucuuuguacuagguauu

SEQ ID NO: 639 - RNA, 126 nt, Human adenovirus E
aauagaagagcugcugucaucugugccugcuuuguauacaauauggguaucuggaguuuccaaauccacauuuucaguauacaaaacaauuucuggagcuaggccagcagcagccgcacuucuguu

SEQ ID NO: 640 - RNA, 62 nt, Vaccinia Virus
aauaucgggccaauaguagcuauuaccgucgacacguguagugggaacuauggccaaauguu

SEQ ID NO: 641 - RNA, 101 nt, Respiratory syncytial virus
aaucugaacuucaucgaaacucucaucuauaaaccaucucacuuacauuauuuaaguagauuccuaguuuauaguuauauaaaacaauugaauaccagauu

SEQ ID NO: 642 - RNA, 81 nt, Variola virus
aaugccgaucuuugaauggauacuaguuuucuaaguucuaaugugauucucugaaaauguaaauccaauuccuccggcauu

SEQ ID NO: 643 - RNA, 65 nt, Vaccinia Virus
aauggugcuauuagaauuuacaaaacugguaauccacauaguuguaaaguuaaaauuguuccguu

SEQ ID NO: 644 - RNA, 131 nt, SARS coronavirus
aaugucaaccgcuucaauguggcuaucacaagggcaaaaauuggcauuuugugcauaaugucugauagagaucuuuaugacaaacugcaauuuacaagucuagaaauaccacgucgcaauguggcuacauu

SEQ ID NO: 645 - RNA, 63 nt, Vaccinia virus
aaugucgagcuuuguuaccaauggauaccuuuccguuacauuggaaccucaugagcugacguu

SEQ ID NO: 646 - RNA, 76 nt, Variola virus
aauguuuaugacaauaauaaucacguuaguaacgauaauuuuucguuuucuacuuucgugauauuguuuaaucguu

SEQ ID NO: 647 - RNA, 110 nt, Vaccinia virus
aauucauuaagaaauagagaguuuucuaaauccgcauuagauaccuuuaaaaagggagaacuauugaaaggggaugcuagugcggcugauaucucucuauuuacugaauu

SEQ ID NO: 648 - RNA, 92 nt, Measles virus
aauugguuccaaaacuguucucaguagucuccuguauucugcgaucucuacccucgugcaguuauugaggagaguuauauugggcauuaauu

SEQ ID NO: 649 - RNA, 131 nt, Equine rhinovirus 3
aauuuccggugcaaaguugaaaagauguucagaggggugucgccgcuguguguguguguuguguuguuugaaacgucacacacauuggcgaaaccaguaaagaaaaaccuaucaaagagaaacucuagguu

SEQ ID NO: 650 - RNA, 91 nt, Human herpesvirus 4
acaaacccguggggggucuuaguggaagugacgugcugugaauacagguccauagcaccgcuauccacuaugucucgcccgggcuauaugu

SEQ ID NO: 651 - RNA, 71 nt, Human herpesvirus 6B
acaaguuuaucugauagucucuuucugcucugcagucuguuaugugagaauucuauuaagguggacauugu

SEQ ID NO: 652 - RNA, 69 nt, Vaccinia Virus
acacgacugugguagauuuguucuauagagccgguugccgcaaauagauagaacuaccaauaugucugu

SEQ ID NO: 653 - RNA, 79 nt, Human coronavirus 229E
acacuaaugagccucuuuguuguguauuuugcuuuauuuaaagcaagaucacaccguggcagagcugcucuuauagugu

SEQ ID NO: 654 - RNA, 67 nt, Human Herpesvirus 6B
acaguaguuuucacgguauuuuugaaauuaauaaauuuuaaaucggguaaaugguaaagcaugcugu

SEQ ID NO: 655 - RNA, 131 nt, Human Herpesvirus 7
acaguuaaaaguuuagcuucgucauaacuaacaauugaacaaguaucauaaauuagauuuggcguaauaggucgcacauucagcacauguucacuauuguauuuuggaaugaaauguaaauccguuaccgu

SEQ ID NO: 656 - RNA, 78 nt, Vaccinia Virus
acaguuugaaaaauaacaguaucauuuaaacauuuaacuugcgggguuaauuucacaacuuuacuguuuuuaagcugu

SEQ ID NO: 657 - RNA, 75 nt, Rat Cytomegalovirus
acauauccgucaccgggagggucguuguucucauaucguggucgaggguccuucuguuagggggugacggugugu

SEQ ID NO: 658 - RNA, 66 nt, Marburg virus
accaguaaggaauugcuugucuuuggcgcgacauugcuuuacaaaucagaaaaauuccuaccuggu

SEQ ID NO: 659 - RNA, 123 nt, Vaccinia Virus
accucuuucugauggagucguaaaaaaguuuuaucucuuucucucuucgauggucucacaaaaauauuaaaccucuuucugauggagucguaaaaaaguuuuaucucuuucuccuucgauggu

SEQ ID NO: 660 - RNA, 124 nt, Vaccinia Virus
accucuuucugauggagucguaaaaaaguuuuaucucuuucucucuucgauggucucacaaaaauauuaaaccucuuucugauggagucguaaaaaaguuuuaucucuuucucucuucgauggu

SEQ ID NO: 661 - RNA, 122 nt, Vaccinia Virus
accucuuucugauggagucguaaaaaaguuuuaucucuuucucucuucgauggucucacaaaaauauuaaaccucuuucugauggagucguaaaaaaguuuuaucuuucucucuucgauggu

SEQ ID NO: 662 - RNA, 122 nt, Vaccinia Virus
accucuuucugauggagucguaaaaaaguuuuaucuuucucucuucgauggucucacaaaaauauuaaaccucuuucugauggagucguaaaaaaguuuuaucucuuucucucuucgauggu

SEQ ID NO: 663 - RNA, 78 nt, Molluscum contagiosum virus
acgagaacaagugugugugugugcucacacggaacgagaacaaguuugugugugcgcucacacggaacgagaacaagu

SEQ ID NO: 664 - RNA, 90 nt, Human Herpesvirus 2
acgagcggggccuguuuaugggccgggcgucccgaugaguacuguuguuuccgccgcccgaacccccccgcccaucaaccgccuguucgu

SEQ ID NO: 665 - RNA, 130 nt, Rat cytomegalovirus
acgcggucguagagauauacuguugguggcgggguaacaaacgaggucguuauauccguguuucguaaaaaacagaguaacggccuauguacuuauucuuuaguaaacgauauacaauuuugcacaucgu

SEQ ID NO: 666 - RNA, 71 nt, Human Enterovirus C
acggaucaaucacuuuugaccguggguacagucuauaugauuucaccggggaaacagaagugcuuguucgu

SEQ ID NO: 667 - RNA, 67 nt, Human papillomavirus type 18
acgucuggguuugauauaacaucugcggguacaacuacaccugcgguuuuggauaucacaccuucgu

SEQ ID NO: 668 - RNA, 74 nt, Human herpesvirus 5
acguguuaggcuucgagcuggugccaccgucucucuuuaacguggugguggccauacgcaacgaagccacgcgu

SEQ ID NO: 669 - RNA, 125 nt, Vaccinia Virus
acuacuauuuaauuuuaccauaucuucgaaaacaaaaauagauauuauuuuugcaguacaaacuauuguuuuuauaugguuuauauuccacuuuguucauucggcgauuuaaaauuuuuauuagu

SEQ ID NO: 670 - RNA, 79 nt, Barmah Forest virus
acuaguugaguauauaggcaccggguacguuauucgguagcauucaacuggaugcucggugcccagauacucccccagu

SEQ ID NO: 671 - RNA, 78 nt, Human Parainfluenza Virus 3
acucaggauagaguaugucagauacagugccauuguuagauucaguguccauuuuccgagcacgcuuugcuccuaagu

SEQ ID NO: 672 - RNA, 129 nt, Colorado tick fever virus
acugauuugcguuuguuagaacugaugaugccuguagugaauguaccaccugaaggaguugauaaggaccuguuggcgguguacaaagcaacagugauggauauuuuaaccgguuaggcguggaugagu

SEQ ID NO: 673 - RNA, 96 nt, Borna Disease Virus
acugccaugcuuuaccacguuuauuauucaagacagguucaacccgcccuauucccucaguggugagcccguugaagacggaguuacaugcgcggu

SEQ ID NO: 674 - RNA, 82 nt, Bovine kobuvirus
acuggagcugccucaaccacacgagucaggccggcggugacuuugggagucggccugagcucgucuuugaggaagguugagu

SEQ ID NO: 675 - RNA, 104 nt, Human herpesvirus 7
acuguagcaagucgaaauuuuucugagaagaugucauuaguucacauaauaagcauacgcuacugguggcguucuuagugauggagaucgguauuugagauagu

SEQ ID NO: 676 - RNA, 78 nt, Variola Virus
acuuagaguuaugauaaagauauuuauccuuagggugcagguaauggggauuaaucuuuguuggaucagucucuaagu

SEQ ID NO: 677 - RNA, 102 nt, Human Herpesvirus 2
agaaacacgaggcgggggucccagaaagggcaggcaggucagccgcaccgcccgcgagccaacccguauccuuuuuuucuagguguuuuuguuuuuguuucu

SEQ ID NO: 678 - RNA, 99 nt, Human Herpesvirus 8
agaacaaaaagugugugucugacauucacauuuauuuuuacaagacaauuuugugcaguagaguugugccuuccgacaccccgcgccguucgcuguucu

SEQ ID NO: 679 - RNA, 79 nt, Dengue Virus
agaaccuguugauucaacagcaccauuccauuuucuggcguccugugccuggaaugaugcugaggagacagcaggaucu

SEQ ID NO: 680 - RNA, 128 nt, Simian picornavirus 1
agaaggggugcaauuuguguaaggguaaacaauuguaacagaauuauuuguucucagguuuaagaauugaugugggaagagggucaacuguucuguuggauauucaguuccacaaaauuccuuagucu

SEQ ID NO: 681 - RNA, 120 nt, Human adenovirus E
agaagugcggcugcugcuggccuagcuccagaaauuguuuuguauacugaaaauguggauuuggaaacuccagauacccauauuguauacaaagcaggcacagaugacagcagcucuucu

SEQ ID NO: 682 - RNA, 64 nt, Rat Cytomegalovirus
agacauacgagccaguguacagcguauugucucuccauuucaaaguacuguuguucguaucucu

SEQ ID NO: 683 - RNA, 68 nt, Human coronavirus OC43
agagagugccuuaucucgacuuuucugcgagggguuaccaccagaugccgacauaagguucauucucu

SEQ ID NO: 684 - RNA, 96 nt, Vaccinia Virus
agagauaaaacuuuuuuacgacuccaucagaaagagguuuaauauuuuugugagaccaucgaaggagacuccaucagaaagagguuuaauauuuuu

SEQ ID NO: 685 - RNA, 64 nt, Human Parainfluenza Virus 1 Strain Washington/1964
agagcuaaugggugucauuauugaggaguguagacuuauauccuccugauuuucccgaugcuuu

SEQ ID NO: 686 - RNA, 59 nt, Human coronavirus OC43
agaguaguucauuguguuuuaaggucuauuauaagggcguuacaacacaugaaaguucu

SEQ ID NO: 687 - RNA, 79 nt, Dengue Virus Type 2
agauccugcugucuccucagcaucauuccaggcacaggacgccagaaaauggaauggugcuguugaaucaacagguucu

SEQ ID NO: 688 - RNA, 103 nt, Human herpesvirus 7
agauuuagagauauagaugucauaaauuuuaguugccgugaugcaauuuuuucgcauagcgugccagaguggauuuguugacuguccucuugucucucguucu

SEQ ID NO: 689 - RNA, 102 nt, Variola virus
agcaacaauuuauggaacuuauauuggucauuauuuuuguuacaggaacaaacuaauacuauaacggagauuaaaaauaugacgcccauaauugucaacgcu

SEQ ID NO: 690 - RNA, 114 nt, Human herpesvirus 7
agcaaucuguaaugaaccaaaucugauauuuuuaacacaauggcaauuagggugccgaaauaagaugccauugaaugcguuggaaauauuagcaugcaucuacagacuauggcu

SEQ ID NO: 691 - RNA, 85 nt, Dengue Virus
agcccugauagcuggaguuugguaucuuauuggaaguccucuaagggcuuccuccauuucagcugccacgacucuagugggggcu

SEQ ID NO: 692 - RNA, 91 nt, Human Adenovirus E
agccugaggcgcucggggaaaaugaggucggccagguccgaggcgguggugcgcucgucgaacccgguccacagacccuugaguucuucug

SEQ ID NO: 693 - RNA, 83 nt, Human Herpesvirus 4
agcggggucucggagcuccuaggucagaccacgaaaggucagccugcaagguggauggcguguuuucugagguuauccccgcu

SEQ ID NO: 694 - RNA, 61 nt, Human herpesvirus 6
agcuugcgauacauguuuguugugaucuuuacaaaagacacaaucuucggauucgcaagcu

SEQ ID NO: 695 - RNA, 89 nt, Influenza B virus
aggacuucuguuuguggauuguaagagaauagaggagacccuuuccuuacuucgaugaaauuuucuccuccucccuucaauacaagccu

SEQ ID NO: 696 - RNA, 68 nt, Vaccinia Virus
aggagauggagaauuuuuuucaguuguuugaugauauuccucuauaacuacuucuucuuccacuuccu

SEQ ID NO: 697 - RNA, 68 nt, Transmissible Gastroenteritis Virus
aggagauugcuauuaguaaguggggccauuuuuauauuaaugguuacaauuucuuuagcacauuuccu

SEQ ID NO: 698 - RNA, 56 nt, Human herpesvirus 6B
aggguggcgcgucgcgaagucccgccucauagguggggcauucgaggccgcccucu

SEQ ID NO: 699 - RNA, 105 nt, Vaccinia virus
agugauauagaucccaaaucuucuuauaagauuguagaaucagcauccacucauauagaagaugcgcauuccaaucuuaaacauauagggaaucauauaucugcu

SEQ ID NO: 700 - RNA, 66 nt, Reston Ebola Virus
agugaugaagauuaagaaaaaccagucgguauuuuccagacuuggcauuucuuaucuucaucuucu

SEQ ID NO: 701 - RNA, 55 nt, Human herpesvirus 1
agugcucgcacuucgcccuaauaauauauauauauugggacgaagugcgaacgcu

SEQ ID NO: 702 - RNA, 104 nt, Human herpesvirus 6B
aaaaucggcucguuguuuucggggugcguuuggguuaaauuauacacuucugagaucugauuuagcucucggacguauacgagucuuaaauaaugcuugauuuu

SEQ ID NO: 703 - RNA, 84 nt, Human coronavirus OC43
aaacaauuacaaucuaaauuuugacaagccuuacggaaaugaaaacuuuuccuguagacaugucggaagaaccaagaauuguuu

SEQ ID NO: 704 - RNA, 71 nt, Vaccinia Virus
aaagaauuauacuuuucuauagccgcagaaucugaaaaucucaaacuuuuguacagacuaaguaauucuuu

SEQ ID NO: 705 - RNA, 102 nt, Vaccinia Virus
aaaguauugguaaucgugucauauuaguauaaaaagugauuuauuuuuacaaaauuauguauuuuguucuaucaacuaccuauaaaacuuuccaaauacuuu

SEQ ID NO: 706 - RNA, 78 nt, Hepatitis A Virus
aaauccucacaaugauauguugaauguuaauuuagcuaaaacaaaugaugcaaucaaagauaugucuuguguugauuu

SEQ ID NO: 707 - RNA, 83 nt, Human Herpesvirus 7
aacgcuuaauagaaauuauuguacauuuuucuauuaguaugagugcuaugaaaauuuccuacaaaaguucuguuuugaguguu

SEQ ID NO: 708 - RNA, 74 nt, Human Herpesvirus 3
aacuagcacuacgauuacaaugugggcauaacaucuguauauuuucaucaacuuuaucguuuucggagcuaguu

SEQ ID NO: 709 - RNA, 104 nt, Human coronavirus OC43
aagacaccucagaaauauaagagaaugaaccuuaugucggcaucuggugguaaccccucgcagaaaagucgagauaaggcacucucuaucagaauggaugucuu

SEQ ID NO: 710 - RNA, 95 nt, Variola virus
aagaggauuaucaagauguguauauuugugaaaauuguggagacauagcagcacaaaucaaaaguauuaauacaugucuuagauguucaaaacuu

SEQ ID NO: 711 - RNA, 66 nt, Tick-borne encephalitis virus
aagaugccggagguggccggucacuuucgacucacugaagagaaaagaaagcacuuccgacaucuu

SEQ ID NO: 712 - RNA, 129 nt, Hepatitis GB Virus C
aagguucugagcgaccucaagcucccuggucuagccguccaccgcaagaaggccggggcauugcgaacacgcaugcuccggucgcgcgguugggcggaguuggcuaggggccuguuguggcauccagga

SEQ ID NO: 713 - RNA, 113 nt, Sindbis Virus
aaguauccuuuguagcuaagccuucuacacgguccugaggugcuaaucuugaugucauccauggugccuucuuuaacggugugauccugcuuaagcgacauguagcgguacuu

SEQ ID NO: 714 - RNA, 92 nt, Human metapneumovirus
aaguuuguucauugaguauggcaaagcauuaggcucaucaucuacaggcagcaaagcagaaagucuauuuguuaauauauucaugcaagcuu

SEQ ID NO: 715 - RNA, 70 nt, Vaccinia Virus
aaugcucgcaacauuaacaucuugaaccguugguacaauuccguuccauaaauuuauaauguucgccauu

SEQ ID NO: 716 - RNA, 83 nt, Human rhinovirus 89
aaugguacuugaucauucgugcaguauugguaccacucaauaagauguuaccauaagauacugcaucaccaacacuuauuauu

SEQ ID NO: 717 - RNA, 99 nt, Japanese encephalitis virus
aauggugaaaugguugacccuuuucagcugggccuucuggugauguuucuggccacccaggagguccuucgcaagagguggacggccagauugaccauu

SEQ ID NO: 718 - RNA, 63 nt, Variola virus
aaugucgagcuuuguuaccaauggauaccuuccaguuacauuggaaccacaugagcugacguu

SEQ ID NO: 719 - RNA, 110 nt, Vaccinia Virus
aauucaguaaauagagagauaucagccgcacuagcauccccuuucaauaguucucccuuuuuaaagguaucuaaugcggauuuagaaaacucucuauuucuuaaugaauu

SEQ ID NO: 720 - RNA, 63 nt, Human adenovirus D
aauuggcggacauauggaauuucuuagacugcuaucaggagaaaauugauaugcccuccuauu

SEQ ID NO: 721 - RNA, 92 nt, Vaccinia Virus
aauuguucggcuauacucgaugcgugagucuugcauucaucuccagauaucggagugagggucagauccaaauauugagaagccuuauaauu

SEQ ID NO: 722 - RNA, 98 nt, Vaccinia Virus
acaacuaugccuuuuagauuaucuccuaauuuauaacacggccguauacacuuggaauacuuguacaaucuaagauaaacuaaaucucgcaaaguugu

SEQ ID NO: 723 - RNA, 94 nt, Molluscum contagiosum virus
acaagugugugugugugugugugugugcucacacggaacgagaacaagugugugugugugugugcgcgcgcucacacggaacgagaacaagugu

SEQ ID NO: 724 - RNA, 80 nt, Human herpesvirus 7
acaauucggauucaucggauguggacacugauauccuugcagacaacccauuagugauaugugaaaaugaacugauuugu

SEQ ID NO: 725 - RNA, 65 nt, Human Herpesvirus 1
acacuuucccgcgugucgcgugugguucaugugugugccuggcgcccccacccucggguucgugu

SEQ ID NO: 726 - RNA, 106 nt, Measles Virus
acagaugauucaauuaucugcugcuugaucuuuucaggauucauuagccgguuagcuuugagaucugucauaacuaaauaagauucaguagauaugaaguugcugu

SEQ ID NO: 727 - RNA, 76 nt, Hepatitis C virus
acagcagaggcggccgggagaagguuggcgagagggucacccccuucuauggccagcuccucggccagccagcugu

SEQ ID NO: 728 - RNA, 62 nt, Human Herpesvirus 7
acaggaaacauuagagugauuaaaaccauaagccugguguuaucggauuaaaaaccucuugu

SEQ ID NO: 729 - RNA, 65 nt, Human Herpesvirus 6
acaguaguuuucacgguauuuuuugaaauuaaauuuuaaaucggguacaugauaaagcaugcugu

SEQ ID NO: 730 - RNA, 74 nt, Human Herpesvirus 3
acaucugggacaguucugccgcuugacccauauacguauuuaauggugcagggguuccauucuguucugaucgu

SEQ ID NO: 731 - RNA, 77 nt, Human enterovirus E
acaugccagaggcagcaaggccaugugaugaggagugcuacccuuguaauuuuaagagauguuguccacugguaugu

SEQ ID NO: 732 - RNA, 102 nt, Human Herpesvirus 1
accacagcgcaugcgccgggccguuguggggccccgggccggggccccuuggguccgccggggccccgggccgggccgccacgggggccggccguuggcggu

SEQ ID NO: 733 - RNA, 106 nt, Human parainfluenza virus 2
accgcaucauugacaauugauacuguuucaucuaacccaauuauugaguuuaucauuuguuuugcaguuaaaugugcuaauaggucaauuuuaucagugagugagu

SEQ ID NO: 734 - RNA, 130 nt, Human herpesvirus 5
accgccgccgccaucauguugcgcggagacucggccgccaagauccaggagcgcuacgcggagcugcagaagcgcaagagccaccccaccuccugcaucuccacggccuucaccaauguggcgacgcugu

SEQ ID NO: 735 - RNA, 123 nt, Variola Virus
accucuuucugauggagucguaaaaaguuuuaucucuuucucucuucgauggucucacaaaaaauauuaaaccucuuucugauggagucguaaaaaguuuuaucucuuucucucuucgauggu

SEQ ID NO: 736 - RNA, 89 nt, Human Herpesvirus 7
accuuaguguauuuuuuggguuauugcaaauuuauguguucucuuuguauagagauuuuagugucgaaaauucaaauuuacagcaaggu

SEQ ID NO: 737 - RNA, 79 nt, Molluscum contagiosum virus
acgaggaggagcgccgcaaugugucggccgcgcucagcgcucaccgcccgcgcgcugggcgcugcggcauccucuucgu

SEQ ID NO: 738 - RNA, 77 nt, Human herpesvirus 6
acgauagaagaggcguuuaacccaaacaaaacaacaagaaaccauaaacguuauggugggcguugccuuauuuuugu

SEQ ID NO: 739 - RNA, 76 nt, Rat Cytomegalovirus
acgcgacaacuucgagaaccucggggucuccgcggccgaccuggccgagauagaccgcgacucggaggucguccgu

SEQ ID NO: 740 - RNA, 76 nt, Hepatitis GB Virus C
acgucaugguuuuggggacggcuaccucgcgcagcaugggaacgugcuuaaacggguugcuguucacgacauucca

SEQ ID NO: 741 - RNA, 65 nt, Human Herpesvirus 4
acuaacccuaauucgauagcauaugcuucccguuggguaacauaugcuauugaauuaggguuagu

SEQ ID NO: 742 - RNA, 78 nt, Vaccinia Virus
acugauucuggacauagcuuuccgacuggcgcauuuggugugaugguucccauaaguuuggcagcuagcagauucagu

SEQ ID NO: 743 - RNA, 58 nt, Human Herpesvirus 3
acuguaaaaacugucguugccccgguuugaauauaagcaucuguaauuacuuuacggu

SEQ ID NO: 744 - RNA, 73 nt, Vaccinia Virus
acuguaugcuccuagcggaguuaauccuucguuguuucuacaaagucucucgacuccgcgagagaguaacagu

SEQ ID NO: 745 - RNA, 64 nt, Vaccinia Virus
acuuuuuaugaagagccgcguuuaacaaugcuuuauugucuccgaacguagcucucuuaagagu

SEQ ID NO: 746 - RNA, 102 nt, Rat cytomegalovirus
agaaaaaaaguauggauaauaaagaggucguggaguacgguugauuucuuuuucuuaaaagaaguaaacugauucgauuuccuuaaaaaaugaguuuuuucu

SEQ ID NO: 747 - RNA, 79 nt, Human Herpesvirus 1
agaacacgcgguccccugugguguuuuugguuauuuuuauuaaaucucgucgacaaacagggggaaaggggcguggucu

SEQ ID NO: 748 - RNA, 65 nt, Human Adenovirus E
agaagaaucgccaggguugcguugcggugugccccgguucgaggccggccggauuccgcggcuaa

SEQ ID NO: 749 - RNA, 102 nt, Human herpesvirus 7
agacaucuuccacaaaaauuuaauagucauuuucaaauagaguuuaauuguacucacuuaauuucugguauggaauuggcgagggauuuuuggauuuugucu

SEQ ID NO: 750 - RNA, 55 nt, Respiratory syncytial virus
agacccuaaagcuugaggaucucucaucaauguuacgaauucagcauuaggguuu

SEQ ID NO: 751 - RNA, 110 nt, Human adenovirus A
agaccgccguaagcaagcaagggauuauagucuaaauauucaguauugaucacaaagggcgacacuggugggggacaguaaguuaaauuccaaugcuguugacaggggcu

SEQ ID NO: 752 - RNA, 77 nt, Rat Cytomegalovirus
agacggcucgaccuucugggucucggauucgagagaaacuuaaccucucuccagacacgguauuuuugaaccgaucu

SEQ ID NO: 753 - RNA, 62 nt, Vaccinia Virus
agacuucuggcgguugccauagaauauacgucguucuuaucccaauuaccaacuagaagucu

SEQ ID NO: 754 - RNA, 53 nt, Vaccinia Virus
agagaaaacaaaacgaggauaguugauuuauuacuuagcuaccaucccacucu

SEQ ID NO: 755 - RNA, 67 nt, Vaccinia Virus
agauacuauaccguugugucuacaaccgcuacauaaucguagauucauguuaacacucuacguaucu

SEQ ID NO: 756 - RNA, 91 nt, Variola virus
agauagagaguuuucuaaauccgcauuagauaccuuuaaaaagggagaacuauugggaggggacgcuagugcggcugauaucucucuauuu

SEQ ID NO: 757 - RNA, 60 nt, Human herpesvirus 5
agaucagcggcgugaugguaagcacggccaacguuaugcagaucaucaugucgcugcucu

SEQ ID NO: 758 - RNA, 87 nt, Rat Cytomegalovirus
agaucugcggcacgcacugcaucaccggccucucggucacgucgaagaacagguacagggaggugcagaucaugcgcacgcagcucu

SEQ ID NO: 759 - RNA, 81 nt, Human herpesvirus 6
agaugggauuguugaguggacauuggucuuugccgcgagauuuuugcgcaauucuucucuacaucgaugauuuuucuaucu

SEQ ID NO: 760 - RNA, 64 nt, Vaccinia Virus
agcagcgaacaacaacaucagauauuucaucgacauuuuugauggauucuguguuuaugcuguu

SEQ ID NO: 761 - RNA, 88 nt, Rat cytomegalovirus
agcaguacuuuucgguggauacgauacagcgaaaucaaaaagaugaguuuuuugcaucucgcauauugugugugcugguacgucuguu

SEQ ID NO: 762 - RNA, 63 nt, Vaccinia Virus
agccgcugagugguaaacaacagaacagauaguuuauuaucuuuaccaacacccucagccgcu

SEQ ID NO: 763 - RNA, 113 nt, Rat Cytomegalovirus
agccggucacuaauacuuuuucuggacgaauaagguccgguacauacgugucugggaccgagaucgucacggcacccgagaccguauuuacccagaaacacgcuaacaccgcu

SEQ ID NO: 764 - RNA, 62 nt, Vaccinia Virus
agcgaagcuaucaucguccaauaucucauuccuagaaauauuaucuacgucauuguuuuguu

SEQ ID NO: 765 - RNA, 76 nt, Zaire Ebola Virus
agcgauuuaucuaaauuaaauuacauuaugcuuuuauaacuuaccuacuagccugcccaacauuuacacgaucguu

SEQ ID NO: 766 - RNA, 94 nt, Molluscum contagiosum virus
agcgccaacgugcgaagucauggccccuugucuaguuggagauauauuuucauuuugaacucuugcgagcggcaaccagcaaguacguggcacu

SEQ ID NO: 767 - RNA, 59 nt, Vaccinia virus
agcggggcuaugauuuuggcauaucuaaugucuaaaaauaaggagucaucgccuaugcu

SEQ ID NO: 768 - RNA, 94 nt, Human coronavirus 229E
agcuaucucuagcucuauucaggcuaucuaugacagacuugacacuauucaggcugaucaacaaguagauaggcugauuacugguagauuggcu

SEQ ID NO: 769 - RNA, 63 nt, Human Herpesvirus 5
agcuggguacuauaaaaaucaaaccacagauagguuauacuauaauucugaauggggcccgcu

SEQ ID NO: 770 - RNA, 73 nt, Human coronavirus 229E
aggacauuuuuauauuaauggcuaucgcuauuucacuuuagguaauguagaagccguuaauuucaaugucacu

SEQ ID NO: 771 - RNA, 84 nt, Rat Cytomegalovirus
aggacgcggccccgacggccaccccgacgaagaaacggacgacgccggccgcggcccgggaguaggcgucgggauagcgguccu

SEQ ID NO: 772 - RNA, 128 nt, Eastern equine encephalitis virus
aggacguguuuuuaaacucucguacgcaaauucguggaauggcgggucaacuaguucgccgaccaggcacauugguccggcauccccuuucuucacgcacuucuuugcgucgaugucaaauacguacu

SEQ ID NO: 773 - RNA, 95 nt, Molluscum Contagiosum Virus
aggcaagauucacucugcaagacgugugaaguagcgaacgcucacgcgaagagcuauuuuuucaguuuuuguucuuucucucguggaucgcuccu

SEQ ID NO: 774 - RNA, 58 nt, Human herpesvirus 4
aggcauagagagugaugagcccgcuucgacagagccgguucaugaucagcuacugccu

SEQ ID NO: 775 - RNA, 101 nt, Human Herpesvirus 4
aggcauuguuaaccuuugguggaaccuaguguuaguguugugcuguaaauaaguguccagcgcaccacuagucaccaggugucaccggaggcuacuugccu

SEQ ID NO: 776 - RNA, 62 nt, Human Herpesvirus 2
agggacuccggagaaggaaggcugcuccgcgcaccggcgcgcccuucuccucuccccucccu

SEQ ID NO: 777 - RNA, 67 nt, Vaccinia Virus
agguaucggucucuacugaaucuacuaacaugucucguauguuagcuucuacagucuuucguuuccu

SEQ ID NO: 778 - RNA, 105 nt, Human astrovirus
aggucucugucugguccauuaaaauaagcaaacucaaaagccuguaaccaaaaguuaaccauguuguuauccauuguuguugaaaacugaccagauggauuaccu

SEQ ID NO: 779 - RNA, 98 nt, Human Adenovirus A
agguggaaaaauuuguacuacucuuaaaucauaguaaauauuuguuucagaagcauugacuguauuuuuaacguuguaaauagccgaauuuuccaccu

SEQ ID NO: 780 - RNA, 107 nt, Vaccinia Virus
aguagcauacggaugcucgauguacaaauugauauggucgucguauucagucaauguuacagucggugguccaauuuuuacuucgacgcauagucccguacaauacu

SEQ ID NO: 781 - RNA, 129 nt, Hepatitis GB Virus C
aguccgccgcccaguuggugggggaacucgguagucucuacgggcccuugucggucucggcuuauguggccgggauccuggggcuuggggaggucuacucggggguccucaccgucgggguggcguuga

SEQ ID NO: 782 - RNA, 60 nt, Vaccinia virus
agucuucgaagcaugugucacuaugauaaacacguuagaguuuauacacucucgaggauu

SEQ ID NO: 783 - RNA, 98 nt, Variola virus
agugaaguuacaaggccuuuugguaauugcauaguagaagguauuauuuuaucccauaccucuaauuuuacaauucugguuacguuauaugcuuuacu

SEQ ID NO: 784 - RNA, 121 nt, Variola Virus
agugacauuaguagggauagaauguugagcuaauuuuuguaaauaacuaucuauaaaaagauuauacaaaguuuuaaacucuuuaguuucugccauuuauccagucugagaaaaugucccu

SEQ ID NO: 785 - RNA, 70 nt, Marburg Virus
aguggacucuccacuucucuucucgaguauucccuauaagugauuuacuugauagaaugucaaguccacu

SEQ ID NO: 786 - RNA, 71 nt, West Nile virus
aguucgccugugugagcugacaaacuuaguaguguuugugaggauuaacaacaauuaacacagugcgagcu

SEQ ID NO: 787 - RNA, 104 nt, Marburg virus
aguuguaacgcguugauaauucugccauguuuggaagucuuuucacaaucaccuagauuguauugaaagguaacgcuacuaaaaugguuauuauguguaugauu

SEQ ID NO: 788 - RNA, 91 nt, Vaccinia virus
auaauaguggccggagaaucaucaucuggaaauagaucuucauuaaguugugaggauauuuccucuggagaugacacuacggcggcauuau

SEQ ID NO: 789 - RNA, 126 nt, Vaccinia Virus
auaauuagaacuagaaacauguuuagaaagaaacgauuauuucugaauuauuccaauuauuuguccaaacaggaaagaaguauacuaucgucauuuuuuucucuauauccagcuacugcugauaau

SEQ ID NO: 790 - RNA, 70 nt, Rat Cytomegalovirus
auagaaaaagauaagaggaucgauuaagcaaaauaaaacuauggugcucuuggucaauuucgguuucuau

SEQ ID NO: 791 - RNA, 66 nt, Vaccinia Virus
auagaugccauguuaaaaauguccgccgucgacuuuuuggaacgauugauaaaagcugguguuuau

SEQ ID NO: 792 - RNA, 130 nt, Human Herpesvirus 6
auagcgaagaaaaauacaucugaucgccaaauggcgaucaguacucugacgcucaucuuuuccguaaccggcguguguguagacugucguuuugguggucagauauuaagucugcguaauucuuuccucu

SEQ ID NO: 793 - RNA, 76 nt, Human herpesvirus 7
auaucaacgauaugcaaagacaaauguggaauuuuaucagggaauuaguuuugucuguugcacuauauaaugaugu

SEQ ID NO: 794 - RNA, 60 nt, Vaccinia Virus
auaucuucaguacaucguuuguaaaguaauuauuauacaaauagcaguguagugcaguau

SEQ ID NO: 795 - RNA, 70 nt, Human coronavirus 229E
aucaucagaagccuuuguugucggaauuaacuaucuuggugauuucgcacaaggaccuuuuauagauggu

SEQ ID NO: 796 - RNA, 103 nt, Zaire Ebola virus
auccaucucaaucauucggagauaaguuuuuaacuggaauaagccugagguaacuggaucuccuagauuccgguagaaacauuucucaggauucaagaaggau

SEQ ID NO: 797 - RNA, 76 nt, Hepatitis GB virus B
aucgaagagguagugguaagaaagcgccaguuccgggcaagaacugguucgcuuaccuugccucccccuccgagau

SEQ ID NO: 798 - RNA, 71 nt, Human Herpesvirus 6
aucgccgauaucuucgagaagacaaaaauacacacgcacgucaaaaaucuuuccgacuacagcaaggcgau

SEQ ID NO: 799 - RNA, 72 nt, Hepatitis GB virus C
aucuaaggugucggucaaggacuuggccaccccugcggggaagauggcuguucaugaccggcuucaggagau

SEQ ID NO: 800 - RNA, 71 nt, Human herpesvirus 6B
aucugggaucccgcucggagcucucucaccccguguuggagugggagagaacagagcugguccugacggau

SEQ ID NO: 801 - RNA, 80 nt, Influenza B virus
augagaagaugugugagcuuucaugaagcauuugaaauagcagaaggccaugaaagcucagcgcuacuauauugucucau

SEQ ID NO: 802 - RNA, 97 nt, Human Herpesvirus 7
augauacuuuuauuaauucuucguucucuaauuggauuuaacaacgaucuuuggucgcaaucacaacuagcuuuuacuugucugaauaaaaguuuau

SEQ ID NO: 803 - RNA, 64 nt, Respiratory Syncytial Virus
augauagaguaacuuugcugucuaacuauuugaacauuguuggacauuaacuuuuucugaucau

SEQ ID NO: 804 - RNA, 91 nt, Variola Virus
augaugcugguuauuacacauguguuuuaauauauauauauauauauauauauauauaugggaguaaagcauauaacguaaccagaauugu

SEQ ID NO: 805 - RNA, 79 nt, Variola virus
augccggaggaauuggauuuacauuuucagagaaucacauuagaacuuagaaaacuaguauccauucaaagaucggcau

SEQ ID NO: 806 - RNA, 78 nt, Vaccinia virus
auggagauuuucuauucucguccauuuuaggauaugcuuucauaaagucccuaauaacuucgugaauaauguuucuau

SEQ ID NO: 807 - RNA, 94 nt, Variola Virus
auguaucguaaguucucuaaguguacuauaguugacaguaugauaauagggcauauaggucaucauuauauuuggauuaaaaauuuagaaacau

SEQ ID NO: 808 - RNA, 69 nt, SARS coronavirus
augucugaggcaaaauguuggacugagacugaccuuacuaaaggaccucacgaauuuugcucacagcau

SEQ ID NO: 809 - RNA, 70 nt, Human Parainfluenza Virus 3
auguucuaucugcuuuaaguaauaauucagucacuuuacuguuaauaccagguauauauaauuugaacau

SEQ ID NO: 810 - RNA, 82 nt, Variola Virus
auguuuuuuaucucuuucaguaugugaauagauagguauuuuaucucuauucaucaucgaauuuaagagauccgauaaacau

SEQ ID NO: 811 - RNA, 79 nt, Human Herpesvirus 7
auuaaguagagaauaguguaagccuguaguuacugacaagacuucagacagcccuuuacucauaauuuuuucucuuaau

SEQ ID NO: 812 - RNA, 78 nt, Vaccinia Virus
auuaauuauaaaauuauguauaugauuuacuaacuuuaguuagauaaguuaguaauacauaaauuuuaguauauuaau

SEQ ID NO: 813 - RNA, 101 nt, Human herpesvirus 6
auuagcgauuuaaacaacuguuuugcgauacaggauguguuggcuacgguguagccagggcccauaccuucucggaucagagacauuagaacgucgcuggu

SEQ ID NO: 814 - RNA, 74 nt, Human Herpesvirus 7
auuaucaccuuaaucucuucaggcgaacauaaauaacuccagcuguguacauucugaggaucgggguagauaau

SEQ ID NO: 815 - RNA, 63 nt, Variola Virus
auuauuagacgaguuacaaacuauuuggauagacacauaugcgaucagauauuugcuaauaau

SEQ ID NO: 816 - RNA, 72 nt, Vaccinia Virus
auucgcgaagcgacgucauuuaauaaaaaaaguauuuuuuuuuaauauuuuucacaaauaucguucgcggau

SEQ ID NO: 817 - RNA, 61 nt, Human herpesvirus 6
auucuauuuuguagauagagaugccggguucggaaaucauguugacucugcagagugggau

SEQ ID NO: 818 - RNA, 130 nt, Vaccinia Virus
auugcacgaaguucuucggcgguuuucauggagucauuucugaugaaacauuuaaugaucuccacgcaauugucgauauugucccacggaagugaauccuucaacucaccaccaaagagcuccguugcau

SEQ ID NO: 819 - RNA, 81 nt, Vaccinia Virus
auuggaauuauaauauagguguauuugcgcacucgcgacgguugaugcaucgguaaauauagcuguaucuaauguucuagu

SEQ ID NO: 820 - RNA, 60 nt, Vaccinia Virus
auuuagacugauguauggguaauaguguuugaagagcucguucucaucaucagaauaaau

SEQ ID NO: 821 - RNA, 104 nt, Variola virus
caaauucggaucguaaaucuguuucuaaagaacggagaauaucuauacauaccugauuagaauucauccguccuucagacaacaucucagacagucuggucuug

SEQ ID NO: 822 - RNA, 106 nt, Hepatitis GB Virus C
caaggucucggcaaucgugcgccgccugagccuuacucgcaccgugguggcccuggucaacagggagccuaagguggaugagguccaggugggguacgucugggau

SEQ ID NO: 823 - RNA, 59 nt, Transmissible Gastroenteritis Virus
caaucaauuuagcacuaagaaucauagcgucauaugcguucuuaggugcagaaagguug

SEQ ID NO: 824 - RNA, 98 nt, Human coronavirus 229E
caaucagaguuugcaauuuuugaacaguguaauuaagcuccgcagauuuauuuucaagggugcuaauuucacuggucaaauucaaaauagucugguug

SEQ ID NO: 825 - RNA, 130 nt, Human Herpesvirus 6
cacaaaaugauuagaugcuuaacuuacuuaauaacuauacuuaacuauacuuauagacuaaacuuaacuuaucaacuauacuuaauuuuuagguccuuauaaugugaacuaaauaaucaacuguuuugug

SEQ ID NO: 826 - RNA, 65 nt, Human Coronavirus 229E
cacaaugguaagccagugguaguaaagguauaagaaauuugcuacuauguuacugaaccuaggug

SEQ ID NO: 827 - RNA, 60 nt, Human Herpesvirus 6
cacacccaagaacaacgauauggaugaucacgacaacaauaauaucguuuuuucuuugug

SEQ ID NO: 828 - RNA, 97 nt, Dengue Virus
cacacuuuguuccaaacugucaacaugucuuccgucgucauccauucauggcuggcguguauggaccagguuguccggcuuguuggaacccagugug

SEQ ID NO: 829 - RNA, 80 nt, Variola virus
cacaguuuuuaauuucuuugguaauaaaauuauucacuauaucaguaucuucuuuaucuaccagagauuuuacuaacuug

SEQ ID NO: 830 - RNA, 84 nt, Rat Cytomegalovirus
cacccguaguuaacgcaucuacagauccauuacugaaguacacauuaacguugcuuaucugaagaguagaaauaauuacgggug

SEQ ID NO: 831 - RNA, 98 nt, Vaccinia Virus
caccgccucuagauaucgccuuuauuuccacauuagaugguaaauccaauagugaaacuaucuuuuuaggaauguauggacucgcguuuagaggagug

SEQ ID NO: 832 - RNA, 61 nt, Human Immunodeficiency Virus 2
cacgcuugcuugcuuaaagaccucuucaauaaagcugccaguuagaagcaaguuaagugug

SEQ ID NO: 833 - RNA, 67 nt, Molluscum Contagiosum Virus
cacggugugcaggcggcggccggagauaugcgugacaaagucuaucccgugcacgcuggcgcaugug

SEQ ID NO: 834 - RNA, 129 nt, Human Herpesvirus 6
cacuaugucguggauuaguuuagaugacacuuguuguaggagauuguauaaguucggggccguaugggugguucucaugaacggaacgauuccuacaguacagauccagucuacauaucuguuauagug

SEQ ID NO: 835 - RNA, 114 nt, Human metapneumovirus
cagacauugcugcaccuugggcugaugcauucacuuugaguauuggaccauuuugugaugcagcauacagagugguuauugucaggguuuuuagcugaucgagcagcacugcug

SEQ ID NO: 836 - RNA, 75 nt, Human herpesvirus 6B
cagccucuccaacauggaucugugcagcguuaauaagccagcggaguuaauuaaauugucuuccauguuagacug

SEQ ID NO: 837 - RNA, 130 nt, Vaccinia Virus
cagcuacuucuacccaaucaccaggcaauaaauguauuuuauuuuuaauaaacuuuccuuggcguauucuuguuaauugguuuaaucguuuauuaaaguaaaauuuaacuugguuugacgcuaauaguug

SEQ ID NO: 838 - RNA, 88 nt, Variola virus
cagcucgcgaacaucgaugaacacugauuccgcaucaucucuaaaagagaggaguguggaauacaacuguccagcgcauugccuguug

SEQ ID NO: 839 - RNA, 131 nt, Human parechovirus 2
cagguccuagccuauugccaugauucaccugaucucguuaugcaacuacacaaaccagugauugacucugaucacguggucuuuaacgagagguggcugauacauggugguaugccuucaggaucucccug

SEQ ID NO: 840 - RNA, 62 nt, Human Enterovirus A
caggucgaugagucacugcgauccccacgggcgaccguggcaguggcugcguuggcggccug

SEQ ID NO: 841 - RNA, 130 nt, Rat Cytomegalovirus
cagguuuuuugggugggacauccgguacugcaggggcggagucaaggauaccccauuggcgagcguagcgagccaaugggguauccgaugacguagcugcugcaguaccggugucccacccaaaaaaccg

SEQ ID NO: 842 - RNA, 60 nt, Molluscum contagiosum virus
caguuggccguggcggugcuggcgggcguggcaugcccgcgcgcggccaugcgcuuccug

SEQ ID NO: 843 - RNA, 97 nt, Human herpesvirus 7
cauaaauauucuaagccaaauauuuuucucgugauuagucugcguuacuucugucaccacacucauauuuuucaugguauuuguuagaauaucugug

SEQ ID NO: 844 - RNA, 52 nt, Human Immunodeficiency Virus 1
cauauguauguuucagggaaagcuaggggaugguuuuauagacaucacuaug

SEQ ID NO: 845 - RNA, 91 nt, Human herpesvirus 2
caucagcagcgcguacagcugucugugcguccggcaggcgcuguggucgaugcggugggcguccagcagcuccacgauggcucgcuuggug

SEQ ID NO: 846 - RNA, 86 nt, Rat cytomegalovirus
caucugucccaaaacagcaaauucucguuuuaccguguccugguccguagacggccgauggauagcuaagauggauggggcggaug

SEQ ID NO: 847 - RNA, 111 nt, Vaccinia Virus
caucuuuuaccaacacaaaggguggauauuuguucauuggaguugauaauaauacacacaaaguauuuggauucacgguggguuacgacuaccucagacugguagagaaug

SEQ ID NO: 848 - RNA, 61 nt, Human Herpesvirus 5
caugcgcaacagguccagcuuaaaggcgcacuugucauuaaacaggcuggacaugcgcgug

SEQ ID NO: 849 - RNA, 112 nt, Simian picornavirus 1
caugguaucugacuauuugagugguggccauauuucucucuacaccauaggagucagcuaacuucuuuaaugucacuaugaauucacacacuucaagcacaucagcaucaug

SEQ ID NO: 850 - RNA, 62 nt, Vaccinia Virus
cauguaguaagugucgauuguaauaaggaacugaugccuauuaggacagauacuacuauuug

SEQ ID NO: 851 - RNA, 100 nt, Hepatitis C virus
cauguucgacucguccguccucugugagugcuaugacgcgggcugugcuugguaugagcucacgcccgccgagacuacaguuaggcuacgagcguacaug

SEQ ID NO: 852 - RNA, 66 nt, Human Papillomavirus Type 7
cauguuugucagcauauuugcauugcauguuucaaauugcuaggucaaaguucccugccaaaaaug

SEQ ID NO: 853 - RNA, 92 nt, Human Adenovirus A
cauuaugcuggaaccugaaguguuuucuagaguguguuuaaaugggguauuugauuuaucuguggaauuauguaagguuauaagauauaaug

SEQ ID NO: 854 - RNA, 98 nt, Human Herpesvirus 8
cauugcucuguuguaaacuauauauaaguuaaaccaaaauucgcagggagacaaggugacgguggugagaacucaguugagagucagagaauacagug

SEQ ID NO: 855 - RNA, 84 nt, Variola Virus
cauuguaaaagaaauauaugugguguuacaguuaggugaacaagagauauauuggagcauugcugcauauguuugagugcaaug

SEQ ID NO: 856 - RNA, 83 nt, Human Adenovirus E
cauugucggugugcuuucgggauuagcagucauaaucaucugcauguucauuuuugcuugcugcuauagaaggcuuuaccgac

SEQ ID NO: 857 - RNA, 96 nt, Vaccinia virus
ccaaugucuuuuuugcaaguuucuguuucugagaguaaacgaaucccuguuuuauuuuauuccacagagcacuaauuuccaaauaccaagucaugg

SEQ ID NO: 858 - RNA, 78 nt, Zaire Ebola virus
ccaauuuagcuuagagacacuuuuguggcguaucucaggggcgacugauauacagcuaaaagacgugccacuaauugg

SEQ ID NO: 859 - RNA, 72 nt, Human Herpesvirus 8
ccacacccccaggaucuuccucuaaggcccccaccaaaccuggugaggaagcaucugguccuaagagugugg

SEQ ID NO: 860 - RNA, 73 nt, Vaccinia Virus
ccacauccuuuauuaauaauaauuuaacaaucucuauaucuaugguugagaaagaccaguaguauuggauggg

SEQ ID NO: 861 - RNA, 65 nt, Rubella Virus
ccacugaugucucgugcgagggcuugggggccuggguacccgcagccccuugcgcgcgcaucugg

SEQ ID NO: 862 - RNA, 94 nt, Vaccinia virus
ccagaaccauauucuuuaggaaagccuuuaucguugcuaaauuucuuauacucuacaaagauagacgauucuccaaagauaauugguucacugg

SEQ ID NO: 863 - RNA, 60 nt, Human Astrovirus
ccaggguggaugguauuuguugacaaauacaucuauuguugauggggcuaugccaccugg

SEQ ID NO: 864 - RNA, 83 nt, Human herpesvirus 4
ccaguaccgggccauccugcaaaagaggaacgagcuguacacgcggcucaaccgagccaugcagcgguugggccgaggcgagg

SEQ ID NO: 865 - RNA, 91 nt, Zaire Ebola virus
ccaguugaagagucucuugccaaguauuuucgguugcuguuucugugucugcuccuccaguacgccaaugaugcauggaagaaauugcugg

SEQ ID NO: 866 - RNA, 81 nt, Reston Ebola Virus
ccauguuguauagguaauuuggggagguaagaaauagcagcuuacaaucccugauuugaauguguccuuguaugacuuugg

SEQ ID NO: 867 - RNA, 60 nt, Vaccinia Virus
ccauuaauaucucuauuauagcuucuggacauaauucaucuauuauaccagaauuaaugg

SEQ ID NO: 868 - RNA, 91 nt, Human herpesvirus 4
ccccgggcuuggccagagccccccagaguggcuaaagggucacuaccagacgcugugcaccaacuuuaggagccuggccaucgacaagggg

SEQ ID NO: 869 - RNA, 99 nt, Influenza A virus
ccccucauggcucggguccucaaugcuuaauuucagagcauccaucagcaagaauuucgaccgcugggagcagggagguccaucaggcaaucugagggg

SEQ ID NO: 870 - RNA, 80 nt, Human Parainfluenza Virus 3
aguuaauaaagggagucugacuuggagggugauugaguaaucauucaaaucaacaucuauaacucucaccuuuauugauu

SEQ ID NO: 871 - RNA, 85 nt, Vaccinia virus
aguuauagcuuucugcuauuauacccgcuauuucaaauagacuuauacgucuaguauagcgucguuuaagagcagauauaugauu

SEQ ID NO: 872 - RNA, 63 nt, Human Adenovirus C
aguugcauguggaaaaaucaaaauaaaaagucuggagucucacgcucgcuugguccuguaacu

SEQ ID NO: 873 - RNA, 104 nt, Variola Virus
aguuggaugaauaguaugucuuaauaauuguuauuauuucacuaauuaauauuuaguaauuagugcacucuauaaaaacgagaaugacauaacuaaucauaacu

SEQ ID NO: 874 - RNA, 65 nt, Human herpesvirus 5
aguuuuaugucuacgacggcuauucgggucacggacccgucucggccgaagugugcgugcggacu

SEQ ID NO: 875 - RNA, 70 nt, Vaccinia Virus
auaaaaauauuuuuguaaaacuuuuuuuaugagaccaucaaagagagaaagagaauaaaaauauuuuugu

SEQ ID NO: 876 - RNA, 62 nt, Vaccinia Virus
auaaagucuugguaugacuccuuucuaauauaguacggacuaccuuugucacccaacuuuau

SEQ ID NO: 877 - RNA, 91 nt, Variola virus
auaaugccgccguagugucaucuccagaggaaauaucaucacaacuuaaugaagauuuauuuccagacgaugauucuccggccacuauuau

SEQ ID NO: 878 - RNA, 126 nt, Variola Virus
auaauuagaacuagaaacaugucuagaaagaaacgauuauuucuaaauuauuccaauuauuugaacaaacaggaaagaaguauacuaucgucauuuuuuucucuagauccagcuacgauugauaau

SEQ ID NO: 879 - RNA, 64 nt, Vaccinia Virus
auagcaucaucuuuagaucauuaauuguuaccuuccccaauacaaccaaaucaucaugauauau

SEQ ID NO: 880 - RNA, 110 nt, Human herpesvirus 7
aucaaaagaauccaauucuuggaagagaguauuaucaaaggaaggguugcauuuuaaacugucuugcaauaugucucugauggucucuuccacggugguaucugggugau

SEQ ID NO: 881 - RNA, 97 nt, Vaccinia virus
aucaauagauaaaacgauaaaagaugcauauauuagagaagauuguccuacugacuggauaagcuauaauaauaaauguauccauuuaucuacugau

SEQ ID NO: 882 - RNA, 89 nt, Respiratory syncytial virus
aucgaaguuucuauagaagaacuccugauuuccucacagaggcuauaguucacucuguguucauacuuaguuauuauacaaaccaugau

SEQ ID NO: 883 - RNA, 55 nt, Rat Cytomegalovirus
aucguaauugucuucgauaaauuacuagggcuguuauuauaagcgcaauuacgau

SEQ ID NO: 884 - RNA, 84 nt, Yellow Fever Virus
aucuccucucccaacgauaauguagcugucuccaaaagguggguucaccucaaucagcacuucaucaucauugguugaggcgau

SEQ ID NO: 885 - RNA, 108 nt, Variola virus
aucuggaagcuaucaaggcgaacaacaaagcgauuauuguuuuaccugaucccauaauauggaacaauaacacgcuucuguucucaucuaugauaguucugacuagau

SEQ ID NO: 886 - RNA, 91 nt, Vaccinia virus
augaauggauuuaucaucaucguuuuuauguuggacaugagcuuaguccguuuguccacaucuauagacgacgauuucugaauuauuucau

SEQ ID NO: 887 - RNA, 72 nt, Human Herpesvirus 7
augacaaauuucaggaaaaacgguguuguaauaauucauuuguuuaagacauuauuugcugaacucugucau

SEQ ID NO: 888 - RNA, 86 nt, Variola virus
augcacuguuuccuuguacgauuguauugcguuacuaaacgauaaauaauucuuagucaaugcuuuaacguacaacgugggugcau

SEQ ID NO: 889 - RNA, 109 nt, Variola virus
auggauuauuaaaguuauauccuccagcuauuauuauuucauuaucuacaaucgcggauguguaauuaauuaugugauuaggaaugguggaaauaacacuauauuccau

SEQ ID NO: 890 - RNA, 90 nt, Human Herpesvirus 8
auggcacgcgccgccagcaaauuuaaguccugguggcucaccugccagguaaacaagguuaaaguggguuugcuggccuugcguugccau

SEQ ID NO: 891 - RNA, 80 nt, Human Herpesvirus 7
auggcgguuguacuguaauuucucaaaucaaaguuuuaaaguaugcuuugucacggagauacucuacacuacgaaguuau

SEQ ID NO: 892 - RNA, 88 nt, Vaccinia Virus
auggucgaaguauagcaggacauugaugcucuagaccguguauaacaaaaucuacaaauuuuucauccgcuauauuuuguuucacuau

SEQ ID NO: 893 - RNA, 86 nt, Variola Virus
auuauaugauuauaguuucuauuuuuacaguaccuugacuaaagucuuuagucacacaauacuaccaaccuacacuauuauaugau

SEQ ID NO: 894 - RNA, 85 nt, Human Coronavirus 229E
auuauguugcauugcagacugauguuuuacaagaaaaucagaaaauucuugcugcaucuuuuaacaaagcaaugaccaacauagu

SEQ ID NO: 895 - RNA, 100 nt, Rat cytomegalovirus
auucuaucauaucauauucagacauacgagccaguguacagcguauugucucuccauuucaaaguacuguuguucguaucucuguacaauccgauccaau

SEQ ID NO: 896 - RNA, 81 nt, Variola virus
auugaugaugugagagagaaauacuucuuuacgguaucuaauauagauuuuauggaguauauauucuugacgcaucuuaau

SEQ ID NO: 897 - RNA, 70 nt, Encephalomyocarditis virus
auuguagagcagagcauuuugggcauuccucaaaagugagagagugcgcgcaagucucuuguuccauggu

SEQ ID NO: 898 - RNA, 102 nt, Vaccinia virus
auuuauaucuaagauaacacagcaauagaucggaugauuuacuaaagucaucaaugguguccguuaguauaucaaagaucuuguuaucgauugauagugaau

SEQ ID NO: 899 - RNA, 61 nt, Transmissible Gastroenteritis Virus
auuugacccccagaacuauguaucagccuagaguugcaacuaguucugacuuuguucaaau

SEQ ID NO: 900 - RNA, 68 nt, Human herpesvirus 6
auuugcucgcacgaaaugauugcaaccaauaaauggcauccuugcagacuucacuuugggcgauggau

SEQ ID NO: 901 - RNA, 77 nt, Variola Virus
auuuuuaucauaacacuacuuugguuagauguuuuagaaaaaaaauaucgccguaccguucuuguuuuuauaaaaau

SEQ ID NO: 902 - RNA, 65 nt, Variola Virus
caaacggaguaaaauaaauaucauuaauauaugcucuagauauuaguauuuuuauuaauccuuug

SEQ ID NO: 903 - RNA, 88 nt, Human Adenovirus F
caaagagaaagauggaaaacgagggggaggacuuuuuaaaggaguuaaccuugaguuuaaugucucgucgccaucaugagucuguuug

SEQ ID NO: 904 - RNA, 79 nt, Human adenovirus F
caacagcacgguggaguccaaagcagagcucugcaaaaacaaauacagucaagcucuccacggguucucgccucuguug

SEQ ID NO: 905 - RNA, 112 nt, Human Coronavirus 229E
caaccauggacgguuuuugucaguacaaaggcaaguggguacaagugccuauagguacaaaugacccuauaagauuuugucuugaaaauacuguuuguaaaguuugugguug

SEQ ID NO: 906 - RNA, 85 nt, Variola virus
caaggcauuuggucuauacaaauccauuaauacggaauauagauucuugguaauuaauagauuggguguagaucuagaugcggug

SEQ ID NO: 907 - RNA, 80 nt, Variola virus
caaguuuacauguccuuuuuguagaaacgcacuggauauucuaaauaaguuuaguuucaaaagaggagcguaugaaauug

SEQ ID NO: 908 - RNA, 77 nt, Human parainfluenza virus 1 strain Washington/1964
caauaguagcacaucaagauaccugacuccauguuuuggaggaucuccuaccuugacuauucugaugugagggauug

SEQ ID NO: 909 - RNA, 51 nt, Human immunodeficiency virus 1
caaugaguccgagaucuucagaccuggaggaggagauaugagggacaauug

SEQ ID NO: 910 - RNA, 131 nt, Human Herpesvirus 8
caccccaggagccccggcagcaccccaggagccccggcagcaccccaggagccccggcagcaccccaggagccccggcagcaccccaggagccccggcagcaccccaggagccccggcagcaccccaggag

SEQ ID NO: 911 - RNA, 62 nt, Human Herpesvirus 2
caccggaacccaccagaggcggaagccgccuucgcccgugagggugcguguguuuucuggug

SEQ ID NO: 912 - RNA, 87 nt, Human Adenovirus C
cagagcuguccuaucaacucuugcuugauuccauaggugauagaaccagauauuuuucuauguggaaucaggcuguagacagcuaug

SEQ ID NO: 913 - RNA, 84 nt, Respiratory Syncytial Virus
cagauuggugaaugcuauguauugacucgagcucuugguagcucaaagguuuuguuauggaauacguuauauucacagaguuug

SEQ ID NO: 914 - RNA, 62 nt, Vaccinia Virus
cagcauccggcuuauccgccuccguugucauaaaccaacgaggaggaauaucgucggagcug

SEQ ID NO: 915 - RNA, 130 nt, Human Herpesvirus 5
cagcuucgagguauaaccuacaacacggaggggaaggggggguacaaaacgugaaauuagacuuuuuuuuuaaugauguuuugucccucugucuuacuuucccauaggcuguaaggcccucgaggaagag

SEQ ID NO: 916 - RNA, 87 nt, Human herpesvirus 7
cagcuuuuggaauuuuaacacuguuuucaguuaugaugauuauuauaacuuguaauuuuuggcuaacugagaaaaaugacaaaacug

SEQ ID NO: 917 - RNA, 63 nt, Rat Cytomegalovirus
caggacgagacgcgguuccacacggccaugaccgucuggcgaccggacgccccgcugcgccug

SEQ ID NO: 918 - RNA, 96 nt, Molluscum contagiosum virus
caggcggcgcagcacguugcgcagguggaugagcuuguuggagacguggaaguuggagcgcuuggccaccuuggcgcagugcuggaagaccgccug

SEQ ID NO: 919 - RNA, 123 nt, Human Adenovirus F
caggcuaaaacaaaggaggcgauuugggagggauaacgguuguuuuccaccagggggucgaccuuuucuagggugugaaggcaaaggucaucuucuucugcauccauaaagguaauugguuug

SEQ ID NO: 920 - RNA, 61 nt, Human Herpesvirus 8
cagguccaaagaggcuaacgagacggcgucccaucuucuguucggucucccggauucacug

SEQ ID NO: 921 - RNA, 90 nt, Human Coronavirus 229E
caggugaacuugugagauuuguuaagucuauuugcaauucagcuguugcugucgugggugguacuauacaaauucucgcuagugugccug

SEQ ID NO: 922 - RNA, 65 nt, Human Herpesvirus 7
cagucuuuuguccaauagugucgaauaagcguucuauuucuaguagugcuauuggaaaaagacug

SEQ ID NO: 923 - RNA, 71 nt, Human Herpesvirus 5
cagugcuccagcggcguuucgguccacguguccuggagcaguugacugagauugagaucccgggagcguug

SEQ ID NO: 924 - RNA, 131 nt, Human herpesvirus 5
caguuccacaucgguguaauuggaugucugguacuuaucacuggcgucguuauaacauuguaaaacaaguuuucgaaacauaacgacagcugcaaaagaaaaccaguuuauugagcauuguaaugguagug

SEQ ID NO: 925 - RNA, 104 nt, Vaccinia virus
caucaaagagagaaagagaauaaaaauauuuuuguaaaacuuuuuuuaugagaccaucaaagagagaaagagaauaaaaauauuuuuguaaaacuuuuuuugug

SEQ ID NO: 926 - RNA, 66 nt, Human coronavirus 229E
caucagaagccuuuguugucggaauuaacuaucuuggugauuucgcacaaggaccuuuuauagaug

SEQ ID NO: 927 - RNA, 87 nt, Molluscum contagiosum virus
caucgcgcggggcacgcacuucacgccgcgcgcccacggcagcguccgagggcgggcgcugccgugggcgcgcggcgcccccagaug

SEQ ID NO: 928 - RNA, 82 nt, Human herpesvirus 7
caucucuggucaguuggagucguucuauguaugaaaaaaacauuaucgcguuuucaugcucaucgucuccaagccucagaug

SEQ ID NO: 929 - RNA, 73 nt, Vaccinia virus
cauggagauacuuuauuacuccauuaaauaauuuaucauggagugauaauguccuguuucauuuguuuccaug

SEQ ID NO: 930 - RNA, 98 nt, Transmissible Gastroenteritis Virus
cauuguugacagccauuucaaauguagaaaaugaaacauuaagauugcaagcccuguaacauucgucaagauuuuugcauucugagacaucaacauug

SEQ ID NO: 931 - RNA, 70 nt, Human Herpesvirus 6B
cauuugugcuagaugagcggcaaagaacucaucuuucugagauuuuucugggauuauucugguaaaaaug

SEQ ID NO: 932 - RNA, 59 nt, Human Immunodeficiency Virus 1
ccacucuauuuugugcaucagaugcuaaagcauaugauacagagguacauaauguuugg

SEQ ID NO: 933 - RNA, 82 nt, Human Enterovirus C
ccacugagguacaaagaucugaagauugaugugaagacaguuccccccccugagugcaucagugauuuauuacaagcagugg

SEQ ID NO: 934 - RNA, 64 nt, Marburg virus
ccaguaaggaauugcuugucuuuggcgcgacauugcuuuacaaaucagaaaaauuccuaccugg

SEQ ID NO: 935 - RNA, 104 nt, Human Herpesvirus 5
ccaugagcagcuuaaagcguuucaaccauuggaagagcugcuguucggccaccagcgcguggcugcgauggagcggcacgauggugaccgucggcgacucaugg

SEQ ID NO: 936 - RNA, 110 nt, Human adenovirus D
ccaugccagggacauacuaacccaguccgaugugauuuuugccggaagaagacaggaacuuacugugcugcuuuuuaaucacacggaccgauuuuuguauguccgcaagg

SEQ ID NO: 937 - RNA, 52 nt, Human Immunodeficiency Virus 1
ccauugacagaagaaaaaauaaaagcauuaguagaaauuuguacagagaugg

SEQ ID NO: 938 - RNA, 78 nt, Japanese encephalitis virus
cccacgacuggagaagcucacaacgagaagcgagcugauaguagcuaugugugcaaacaaggcuucacugaucguggg

SEQ ID NO: 939 - RNA, 92 nt, Bovine kobuvirus
cccagagugguguuucucucagugaaauaggugcgaagcuguggugccagauccgcacagauuaucaccaagaguccagcaacggacauggg

SEQ ID NO: 940 - RNA, 84 nt, Human herpesvirus 2
ccccccggcggccgucgggccggucuggacggcgcgguuuuguuucuccgggcuccaggcccagcuccuggccgcccucgcggg

SEQ ID NO: 941 - RNA, 82 nt, Human Herpesvirus 5
ccccccucccccuguggucccccgagacgagagccacccaucguguacucucgcaccacccacgaccacagagggagacggg

SEQ ID NO: 942 - RNA, 78 nt, Molluscum contagiosum virus
ccccgacgcgagaaagaccuugucagugggcguuacagcaccuugccucuucacgaucaagacauuucuccuccgggg

SEQ ID NO: 943 - RNA, 111 nt, Human herpesvirus 4
ccccgggggcccggcccggccaagagcgaagacgaggagucugagcgucgagacgccccuccacccccgcucgauuccagcuuccaagcuucccgguuggugcccgugggg

SEQ ID NO: 944 - RNA, 82 nt, Human Herpesvirus 5
cccgucucccucuguggucguggguggugcgagaguacacgauggguggcucucgucucgggggaccacagggggagggggg

SEQ ID NO: 945 - RNA, 78 nt, Murray Valley encephalitis virus
cccugguccuggucccuaugagacuuccgcaccagaugucuucucucuucccuacauaugggacuuccguccagucgg

SEQ ID NO: 946 - RNA, 96 nt, Human Herpesvirus 4
ccgagacgaaggcccgucuguagaggaagugguugcgcaugcgggccagcucccaguagaccacguccccccagacgcgcaggcacagggucucgg

SEQ ID NO: 947 - RNA, 88 nt, Rat cytomegalovirus
ccgaguuggacguauuccgaacggagaucacgaggaagaugagagacagaccgugguuuuuguucggaguagucggucuccgaaucgg

SEQ ID NO: 948 - RNA, 71 nt, Human herpesvirus 5
ccgcaagacuguaagcuuacggaaaauacgacagagaagacgaguccugucacuuuagccauggucugcgg

SEQ ID NO: 949 - RNA, 85 nt, Human Herpesvirus 2
ccgcccgcgcggcaucucauuagcgcccggcgcgggcggcuuccgcuuccgcccgcgaugcuaaugagacccucgucgcgggcgg

SEQ ID NO: 950 - RNA, 75 nt, Human herpesvirus 2
ccgcgggaggaaggcguacuuacguucguguuguggcuggaggcaaacacgaucgugcugcgcgagccguccggg

SEQ ID NO: 951 - RNA, 76 nt, Vaccinia Virus
ccgcuucuauuuacucccgcagcacaaugaaccaacacgggcucguuucguugaucacauuuagauaaaaaggcgg

SEQ ID NO: 952 - RNA, 72 nt, Human herpesvirus 8
ccggagugugucugggugacguuguccagucgaaccuuggcacgacggcgcugcaccagaccuaccuucugg

SEQ ID NO: 953 - RNA, 66 nt, Rat cytomegalovirus
ccgguuaaugaccacgaucgcgaucuugcuuucucuuuauuugguauuuccuuguggucaaaccgg

SEQ ID NO: 954 - RNA, 80 nt, Human Herpesvirus 5
cccggacagcgugcaagucucgacuaaggagcgggcgcgagcgagcgaaaguuuuauagagagcacacacgacgaccggg

SEQ ID NO: 955 - RNA, 78 nt, Human Herpesvirus 4
cccguggggggucuuaguggaagugacgugcugugaauacagguccauagcaccgcuauccacuaugucucgcccggg

SEQ ID NO: 956 - RNA, 98 nt, Vaccinia Virus
cccuauuuucaauccccauguuuccucuucagucuucucacaucgucuaauagacauggaguagaugauagaggggaacagaaggacuauaaucaggg

SEQ ID NO: 957 - RNA, 62 nt, Human Herpesvirus 5
cccugucuagacucaaaagcuguaaggcugucuuauagcauguagucuugcacgucacgggg

SEQ ID NO: 958 - RNA, 85 nt, Vaccinia virus
ccgacuccaggagauggagaauuuuuuucaguuguuugaugauauuccucuauaacuacuucuucuuccacuuccuccuuuuugg

SEQ ID NO: 959 - RNA, 101 nt, Rat Cytomegalovirus
ccgagaaggaccguagaauugaucaucgaguaguuucguacgagaauguaacccgcguacuuguuacaucuacaucgguuuugcguaaaaccuuucucagg

SEQ ID NO: 960 - RNA, 78 nt, Rat Cytomegalovirus
ccgagacuccggcggacgagagccuccgucucccucgcgaggugguggcccgggcgcuccgucggcgggaacccucgg

SEQ ID NO: 961 - RNA, 85 nt, Human herpesvirus 2
ccgcccgcgacgagggucucauuagcaucgcgggcggaagcggaagccgcccgcgccgggcgcuaaugagaugccgcgcgggcgg

SEQ ID NO: 962 - RNA, 70 nt, Human herpesvirus 2
ccgcgcuuacggcaacaaagggccuccgauagccuccgaggugcggagccucuuugggccguggguacgg

SEQ ID NO: 963 - RNA, 72 nt, Human herpesvirus 2
ccgcggcgcugcagcggugcgagggucgaguggucuuucugccgaccauccgccgccagcuggcgcucgcgg

SEQ ID NO: 964 - RNA, 60 nt, Rat Cytomegalovirus
ccgcucgaucucggcucugucggucgccguccuucgcgaucgcgguccguucgggagcgg

SEQ ID NO: 965 - RNA, 131 nt, Rat Cytomegalovirus
ccggcggacgcaccucgagagggccccgggcccgacggccgcggcgacgaugaggucgcagaucucgaccccggaggcgccguagggcgacucggaccgggccgcccgaucgaagaugccguuccucccgg

SEQ ID NO: 966 - RNA, 70 nt, Rat Cytomegalovirus
ccggcugagucaucgcccgaggacgcgcccacgaccaaaaaaggugccuccucgagggcgggacguccgg

SEQ ID NO: 967 - RNA, 129 nt, Human Herpesvirus 4
ccgggugggggguggccccgcugggcaccgcugcgccgccgccagguccuggggcagccgggguuccuggcgcuccgggggcagccgggcggccgccgguggguccgcugggccgcugccccgcuccgg

SEQ ID NO: 968 - RNA, 69 nt, Human Herpesvirus 4
ccgguggaacucgugacagaugucuacgccacccuaggcaucguggagaucaucgacgagcucuaccgg

SEQ ID NO: 969 - RNA, 74 nt, Vaccinia Virus
ccguuuuuagaccgagacuccauccguaaaaaugcauacucguuaguuuggaauaacucggaucugcuauaugg

SEQ ID NO: 970 - RNA, 60 nt, Human herpesvirus 3
ccuacccucuuauuggaaauauagauauuacguuuaucaugccaaugggaguguuucagg

SEQ ID NO: 971 - RNA, 129 nt, Encephalomyocarditis virus
ccuccaguccuuccaaagccugcuuuacagucagacggccauugucuuuucccagcaaggugaaaacucuauuggcauacucuuuggcuaccauucuaaacacuggugggaggcuuuccugguuggagg

SEQ ID NO: 972 - RNA, 102 nt, Rat Cytomegalovirus
ccucguggcgcgcguccgcgccggggucgcgaggucccggaccgaggucucccgcccgcgaccccggcgcggcgccgcggaaaaacagacgacgacacgagg

SEQ ID NO: 973 - RNA, 73 nt, Human Herpesvirus 6
ccucugccaccgaugacgcccgucgacgacgagccguccguccgcccucgguguccgccaggucccgcggagg

SEQ ID NO: 974 - RNA, 92 nt, Human herpesvirus 6B
ccugcuccugcucucagggcuccggcuuccucuccgucccccgagcgggagcggcgaggcggcgagaaagccgggguacgagaaggaagagg

SEQ ID NO: 975 - RNA, 60 nt, Human Adenovirus E
ccuggagaugaugcugacaguaugauuuuuuacaaaguaacuguuguugaucccauacuc

SEQ ID NO: 976 - RNA, 57 nt, Hepatitis GB virus A
ccuugaggguggagcggucacagcaacaugauugcuugauccggaccacccucuugg

SEQ ID NO: 977 - RNA, 119 nt, Variola virus
cgaagauauuuggaaaagcgacuggccugacuaugauccauguaagucauauauuuauauagaguauagagacauauggauagaaucuaaaguguugcagcaaccuccuuauacauucg

SEQ ID NO: 978 - RNA, 59 nt, Rat cytomegalovirus
cgaccauaaauggcguauuuguuccuaucuacacgauggaacugacggucauuuguucg

SEQ ID NO: 979 - RNA, 86 nt, Human Herpesvirus 1
cgaggggaacgggggauggaaggacgggaaguggaaguccugauacccauccuacaccccccugccuuccacccuccggccccccg

SEQ ID NO: 980 - RNA, 68 nt, Variola Virus
cgaugaugaauauuacaagauuagaaguuauaggauuaacuacucauugcacaaaauuaagaucaucg

SEQ ID NO: 981 - RNA, 83 nt, Vaccinia virus
cgauuaugagacauuagcuaauauuaguacuauauuguacuuuaccaaguaugauccgguauuaauguuuuuauuguuuuacg

SEQ ID NO: 982 - RNA, 70 nt, Zaire Ebola Virus
cgauucuccagugugagguuaugugguggauuauaauaaucacugacaugcauauaacacugugggauug

SEQ ID NO: 983 - RNA, 73 nt, Molluscum Contagiosum Virus
cgcacacgggcaggcagaaggcgcagucgaucucgcacuggggucgcaagcagcccuuucccagcccgcggcg

SEQ ID NO: 984 - RNA, 80 nt, Equine rhinovirus 3
cgcagcguaugaugucuucaccaacuacgaggaaggugaccucgccuucuugacguacggugaugacguacuacucugug

SEQ ID NO: 985 - RNA, 84 nt, Human herpesvirus 2
cgcagucccacacgaggggcggcagcagcgccgggucgcgcaucaggugauucagcucggccugagccugcccgcccagcuccg

SEQ ID NO: 986 - RNA, 96 nt, Molluscum Contagiosum Virus
cgcaguucggcgacacgcccgcgucccgacagcagagguaaucccgagcuucuaaaucgcgcgcgggcucaagucgcccuuuuugucucgaacucg

SEQ ID NO: 987 - RNA, 81 nt, Rat Cytomegalovirus
cgccacgguggcggacaacggccuguucacgcucaacuucguggacgaggacgcggugaaggucuuccagcugccgcggug

SEQ ID NO: 988 - RNA, 91 nt, Molluscum contagiosum virus
cgccagcaugaaggccagcagcucgugcgccgaggacaugagcuugucggccucggcacggcugcagcuggccuugagcagcaugcuggcg

SEQ ID NO: 989 - RNA, 72 nt, Molluscum Contagiosum Virus
cgcccgcgcccgacucgcagcucacgagauggcugcucucggcagcgucgcggagcgcgcacggcagcggcg

SEQ ID NO: 990 - RNA, 109 nt, Human Herpesvirus 5
cgccgcugucgaacaugguaaagugcagacgcgccgccucgcccauguguacgcagccuccguugcguuccagccuggccgcgcgccguagaccguguucguagcggcg

SEQ ID NO: 991 - RNA, 108 nt, Molluscum contagiosum virus
cgccugcucaucccgcggcugcagaaccgcgcgcuguacagcuaccuguuccuguccaguuaccaccugugcgaccuguuccuggagcugcgcgagcugggcucggcg

SEQ ID NO: 992 - RNA, 87 nt, Human enterovirus A
cgccuugaaguggacuuugagcaggcuuuauucuccaaguauguagggaacacacugcaugagccugacgaguacaucaaagaggcg

SEQ ID NO: 993 - RNA, 74 nt, Human Herpesvirus 2
cgcgcacaucugccgucugcgcaacaccgcguccgucaaggugcuguuggggcgcaagagcgacagcgagcgcg

SEQ ID NO: 994 - RNA, 82 nt, Molluscum Contagiosum Virus
cgcgggcagggauccuucacgcgcgggcccgugguagccgcgggcccuuccuucugcucgggcccgaccuuuccugcgcgcg

SEQ ID NO: 995 - RNA, 76 nt, Human Herpesvirus 1
cgcguaucggcgucccggcgcggcgagcgucugacggucugucucuggcggucccgcgucgggucguggauccgug

SEQ ID NO: 996 - RNA, 58 nt, Bovine kobuvirus
cgcucucuucuauuggcuggcaaccaagcuugguuuguuagucacuccagaggaggcg

SEQ ID NO: 997 - RNA, 60 nt, Human Herpesvirus 5
cgcugucgcagcucuuucccggccuggcucuguuggccgugaccgagagcgugcgcagcg

SEQ ID NO: 998 - RNA, 101 nt, Barmah Forest virus
cgcuuuucccaaacauccacacuuuguuugauauguccgcagaggauuucgaugcaaucauagcggaacauuuuaagcacggugaccauguguuggaaacg

SEQ ID NO: 999 - RNA, 100 nt, Human Herpesvirus 5
cggcaguuaccuguuguaucgcaaggcucacguggagcugucacucuccagcaacaaggugcaacacguggaagccgugcugcgacagguguacacgccg

SEQ ID NO: 1000 - RNA, 60 nt, Human Herpesvirus 1
cggccugggugggcggagggaacuaacccaacguauaaauccguccccguuccaaggccg

SEQ ID NO: 1001 - RNA, 93 nt, Human Herpesvirus 5
cggcguuguuuuuccucuuucugauacuggaucgucugucggccauaucuuacggccgugaucucuggcaucaugagacgcgcgaaaacgccg

SEQ ID NO: 1002 - RNA, 86 nt, Human Herpesvirus 5
cggcuccuccgccucgggcgacgggggcucggagaugaccggcugugucugacacuccuccccuuccucaggcggcccgggcgccg

SEQ ID NO: 1003 - RNA, 62 nt, Vaccinia Virus
cgggauuguccggcauaucauguagauaguuaccgucuacaucguauacucgaccaucuacg

SEQ ID NO: 1004 - RNA, 65 nt, Rat Cytomegalovirus
cgggucucggccacgguggcgaccaggggcaccucccggaccucgccggagugggcgacgacccg

SEQ ID NO: 1005 - RNA, 118 nt, Human Herpesvirus 3
cgguuagcugccuuaacccuggaguuauugucuggaacaaacaaagcccccuuacacgaagcagcgguuaauggggcgggugccgggauugacugugauggugcagcuacuucugccg

SEQ ID NO: 1006 - RNA, 104 nt, Human Herpesvirus 6
cguagucuuaaaaauuugauaacuaccauucaugcuauauguaucauuauaaucugacauauagacuucauuaauuauuuuuucaaauucauucuuaauacacg

SEQ ID NO: 1007 - RNA, 60 nt, Vaccinia Virus
cguauuauacgcauuauaacugacagcgucguaaauagauguuucguuguauauaguacg

SEQ ID NO: 1008 - RNA, 89 nt, Sleeping disease virus
cgucaacuccauggauaacucgcugauucccguauuugcucgcgcauugugcagcugggcagacgaagcucggcgggacauggaggacg

SEQ ID NO: 1009 - RNA, 114 nt, Rat cytomegalovirus
cgucagcagcauucauaucguuuuuaacaagucccgcucagcacguuccaguccacucugcuccccugucugcugagauacucguuggccagcacgaagugguuguugccuaug

SEQ ID NO: 1010 - RNA, 65 nt, Vaccinia Virus
cgucauuauuuucagcagccucucuaccagaagguugagaaaaguguguucugaaucgcacgacg

SEQ ID NO: 1011 - RNA, 58 nt, Human herpesvirus 6
cgucccaucuucucuauugaauccggaucaccaagauuggaugaggaugacugguacg

SEQ ID NO: 1012 - RNA, 67 nt, Human herpesvirus 2
cgucgguucgucgggcgcgggaacguacaggccguggcgcuggauguaccgaccgacgagccgcacg

SEQ ID NO: 1013 - RNA, 106 nt, Human Herpesvirus 1
cgucuccccgggggaaaacaggauagcuuccggagucuccauacgcacggucaccccacgcacaugugagacuucgggggcgcugggccaagaccucgggggggcg

SEQ ID NO: 1014 - RNA, 72 nt, Human Herpesvirus 3
cgucuggcauaaccaagggccuuguuacccaaaugggaacauuuguaugaccgguaauaacaguauccaacg

SEQ ID NO: 1015 - RNA, 73 nt, Molluscum contagiosum virus
cgugaggggggcuugccgugccuagcguuucgcgaagacguaaacaacguaguacugcagcagcuccuccacg

SEQ ID NO: 1016 - RNA, 69 nt, Human Herpesvirus 6
cgugccgggaccccgacaaggccuucuugccgacauuacuggcgagaagcgcccgacgcggccuggccg

SEQ ID NO: 1017 - RNA, 130 nt, Human Herpesvirus 5
cguguguauauuauuuuuuuuuuuuguguguguuugcgcccccgugugucuaaugugcuguuugaaacacguaaaguagcugguggaagaacagauaaaccuuuaauaaaaaaaaaaguaugugcucccg

SEQ ID NO: 1018 - RNA, 75 nt, Human Herpesvirus 1
cguuacacccgaggcggccugggucuuccgcggagcucccgggagcuccgcaccaagccgcucuccggagagacg

SEQ ID NO: 1019 - RNA, 82 nt, Human Herpesvirus 3
cguuauuuuaacauuaucauguaaaaacguugcauuuacauucucccauguuccuauauuacauugugaaguuaaaaccgcg

SEQ ID NO: 1020 - RNA, 50 nt, Human Herpesvirus 5
cguugagguagaagacaaacucgcguaaccguuguccguuauacgucacg

SEQ ID NO: 1021 - RNA, 75 nt, Human Herpesvirus 6
cguuguggauugucugaccuuugaaaaaauuuuuguguccguguagcauuucaauaaaagucauuaucugcuccg

SEQ ID NO: 1022 - RNA, 87 nt, Measles virus
cuaacaaagauacuauagagaagcuagaggaauuggcagccaucuuaucgauggcucuacuccuuggcaaaauaggaucaauacugg

SEQ ID NO: 1023 - RNA, 70 nt, Transmissible Gastroenteritis Virus
cuaacaaccuuucugcaccuaagaacgcauaugacgcuaugauucuuagugcuaaauugauugguguugg

SEQ ID NO: 1024 - RNA, 93 nt, Influenza B virus
cuaacguugcuaaugggaacggcuucuucaacacaauggcuuggguuaucccaaaagacaacaacaagacagcaauaaauccaguaacaguag

SEQ ID NO: 1025 - RNA, 127 nt, Vaccinia Virus
cuaauauaguuaauaguguacuacaaacaggcgaugguaaaaagacucuucgucuucccaaaauguuagagacggaaauaguugucaagauucucuaucgcccuaauauaccauuaaaaauuguuag

SEQ ID NO: 1026 - RNA, 55 nt, Human herpesvirus 2
cuaccgccggcaucuugggccuccagguccccgggggcccccgggccggcggaag

SEQ ID NO: 1027 - RNA, 58 nt, Hepatitis GB virus A
cuacucggugguggacgaggcccugaagaaggccagggccacgaaaucaccggguugg

SEQ ID NO: 1028 - RNA, 103 nt, Human Herpesvirus 5
cuagggaaaacauaagaauaggaagaaaccgagguuugggagaaaagcugagauaaaauagcgcauuuuccauacagagguuguuguuuuuguggauccuaag

SEQ ID NO: 1029 - RNA, 99 nt, Transmissible Gastroenteritis Virus
cuaucauuauguguacaacaaccaacaugcuuagaaccuaauaucauggcagaagccauucuaaucauauuagguaaagcacggucacacuuaggauag

SEQ ID NO: 1030 - RNA, 79 nt, Human Adenovirus A
cuaucuaauaauauaccuuauacuggacuagugccaauauuaaaaugaagugggcguaguguguaauuugauugggugg

SEQ ID NO: 1031 - RNA, 71 nt, Adeno-associated virus 4
cucacgaguuuuacgucagaaaggguggagcuagaaagaggcccgcccccaaugacgcagauauaagugag

SEQ ID NO: 1032 - RNA, 67 nt, Human Herpesvirus 8
cucagacaagguauuuuuuagcauccuaucgcacagacacgagcuaggaguggacuuucuccgugag

SEQ ID NO: 1033 - RNA, 106 nt, Marburg virus
cucccaacccaacaauugacaaaggaugggucuguguuuauucaucugagcaaggugagacacgggcccugaaaaucuaauucucauuguuaacaguugcaggggg

SEQ ID NO: 1034 - RNA, 83 nt, Variola virus
cucccugaucuauguaucuagcgguguuauuauaaacucucaacauuggaauaauaccauuggaugcaccauuggucccggag

SEQ ID NO: 1035 - RNA, 76 nt, Rat cytomegalovirus
cuccgaggaggacgacgacgagcgaggggauuuugcucaccgcucguuucuacccucgccguuuucccucccggag

SEQ ID NO: 1036 - RNA, 58 nt, Hepatitis GB virus B
cuccggucuuaguguaacguuccaaaaccaauucucccaacguugccaaagauaggag

SEQ ID NO: 1037 - RNA, 112 nt, Human immunodeficiency virus 1
cuccuacaguauuggagucaggaacuaaagaauagugcuguuagcuugcucaaugccacagccauagcaguagcugaggggacagauaggguuauagaaguaguacaaggag

SEQ ID NO: 1038 - RNA, 74 nt, Human rhinovirus 89
cuccuuccacuucauaauacuuagauuuguauauauguuuagaguuacagaucugguuaauaaguugagaggag

SEQ ID NO: 1039 - RNA, 60 nt, Human Adenovirus D
cucgucgcuugacagcaccgccgcagccgcggcagccgcagccgccaugacagcgacgag

SEQ ID NO: 1040 - RNA, 71 nt, Human Herpesvirus 8
cugaacacuuuuaucgcccugaaucuauccuuuauucaaaacauagacuucaaggccaucgagcuguacag

SEQ ID NO: 1041 - RNA, 78 nt, Human herpesvirus 6B
cugcaucugggaucccgcucggagcucucucaccccguguuggagugggagagaacagagcugguccugacggaucgg

SEQ ID NO: 1042 - RNA, 80 nt, Human Herpesvirus 6
cugcaucugggaucgcgcucggagcucucccaccccguguuggagugggagagcacagagcugguccugacggacuggag

SEQ ID NO: 1043 - RNA, 82 nt, Molluscum contagiosum virus
cugcgggacgcgucucaacgugggagucacagcccuggucgcaggcgaggacccccaucuugacacacgucccccgacgcag

SEQ ID NO: 1044 - RNA, 61 nt, Tick-borne Encephalitis Virus
cugcugaguuaauggcaagcccgagcguccucaggucucgucgguggaaguagcucagcag

SEQ ID NO: 1045 - RNA, 80 nt, Human Adenovirus B
cugcugccgaggaacugcuugauauggacggccgcaccucagaacagcgacucgcccaacuacgcauacgccagcagcag

SEQ ID NO: 1046 - RNA, 106 nt, Human Herpesvirus 8
cugcuggacggagguaguauaaucagcuaggccucaguauucuauguaacaaaugaaugcccuagaguacugcgguuuagcuaguuauacugcccgguuccaccag

SEQ ID NO: 1047 - RNA, 105 nt, Reston Ebola virus
cuggagacuauguaauaucuauucuuggcucagaggguuauaagauaauaaaguaccuugaaccacuuuguuuggccaaaauccaacuuugcucuaaauucacag

SEQ ID NO: 1048 - RNA, 129 nt, Molluscum Contagiosum Virus
cuggccgggcucgggcucgaggugugccuguuugccacggccgcgcgcgacuuuguccugagccuuuuggcggcgcaaggacaccgcgggcgugcccggcguuggcuuucugugcgcgacgccugcuag

SEQ ID NO: 1049 - RNA, 88 nt, Variola virus
cugguaaaugaugauguuagaggugauguaaucguuaguuauaaaaauagcgacuuaguuucaucauuuaaugcggaauuagaaccag

SEQ ID NO: 1050 - RNA, 67 nt, Transmissible Gastroenteritis Virus
cuguagaacuugccauucucauugacaacauuaacaauacauuagucaaucuugaauggcucaauag

SEQ ID NO: 1051 - RNA, 92 nt, Sleeping disease virus
cuguugcaucuucuuucuugacgcacugcuuggaggacaauucguaaacguauucauccuucgccuuagcggcgucaacaagcuuguaguag

SEQ ID NO: 1052 - RNA, 107 nt, Transmissible gastroenteritis virus
cuuacaaauugacaccagguaugauuuuuguguugacuucucauaaugugaguccucuuaaagcuccaauuuuagucaaccaagaaaaguacaauaccauaucuaag

SEQ ID NO: 1053 - RNA, 78 nt, Human coronavirus OC43
cuuacguucccaauuuaauggagagggcaccgacuuaucauuaagccaagcuucuauauugcaauugggaagauuaag

SEQ ID NO: 1054 - RNA, 67 nt, Molluscum Contagiosum Virus
cuucuggcgggcagcucugcuggcaggcauccuuggcucggcuugccggcguccucuucccgcggag

SEQ ID NO: 1055 - RNA, 60 nt, Vaccinia Virus
cuugauaguuguuccuagauauguaaaauaauccaacguacuagguagcaaauugucuag

SEQ ID NO: 1056 - RNA, 66 nt, Human Immunodeficiency Virus 1
cuuguagagcuauucgccacauaccuagaagaauaagacagggcuuggaaaggauuuugcuauaag

SEQ ID NO: 1057 - RNA, 74 nt, Variola virus
cuuuagauuuucccucggugacuagaucagauaguguuguaauagauuuagucauagaaguaaauugucuagag

SEQ ID NO: 1058 - RNA, 64 nt, Human Herpesvirus 4
cuuuagugggaacuagugggagugcugugccucggguaccccuauccuauagguccuaccggag

SEQ ID NO: 1059 - RNA, 74 nt, Human Herpesvirus 6
cuuugacuuuuccuuuuguuccuugucggauauuuauuaucugacuggaccuggcauucuagagaaaaucacag

SEQ ID NO: 1060 - RNA, 116 nt, Human coronavirus 229E
gaaaaagggcaauuucccguguuaauacuagcacuccaccuaccaacauuggcauaaacagcaacguauuugguagugaagugugaugugucaacacacaaaggcccuuuaguuuc

SEQ ID NO: 1061 - RNA, 72 nt, Zaire Ebola Virus
gaaagaucauaacuaauaacauuacaaauaauccuacuauaaucaauacggugauucaaauguuaaucuuuc

SEQ ID NO: 1062 - RNA, 68 nt, Vaccinia Virus
gaaauuguugcucccauggaaugacccaauaaguagauuuaauaguuaccacgugcuguaccaaaguc

SEQ ID NO: 1063 - RNA, 63 nt, Vaccinia Virus
gaacguaaacguaguagccauacgucucagaauucuaaaugaugauauaccuguuuuuauuuc

SEQ ID NO: 1064 - RNA, 68 nt, Human herpesvirus 6
gaaguccacgguuccuaaggccuuuuuaccauguuuugaugaaaacgccacggaaaucgaucugcuuu

SEQ ID NO: 1065 - RNA, 67 nt, Human Adenovirus E
gaagucguuggagaugcggcccaugagcugcgagaaggcguucaugcccgccucguuccagacgcgg

SEQ ID NO: 1066 - RNA, 96 nt, Human herpesvirus 7
gaaguuuuacuccuugcgaacuuuuaggaccugaacgagaccauuuaggaaugcuuauguucagacuugaaacagacgcggagaguccaaaauuuu

SEQ ID NO: 1067 - RNA, 120 nt, Vaccinia Virus
gaauaguuacauuugauucaucuucgauguuuaauguuccucugacuauauccccaacgugauaauacgcguagguuauuacacacggaacguuuauaacuacagaauuauuaacuauuu

SEQ ID NO: 1068 - RNA, 52 nt, Human Immunodeficiency Virus 1
gaauaguuuuugcuguacuuucuauagugaauagaguuaggcagggauauuc

SEQ ID NO: 1069 - RNA, 106 nt, Human enterovirus B
gaauggucaucaaggcuucucagcggcacuucuuaaacacuacuucaaugaugaacaaggagaaaucgaguucauugaaagcucaaaggaagcaggguucccaguc

SEQ ID NO: 1070 - RNA, 89 nt, Vaccinia virus
gaauguuccagaguguuuauccagggaaauuaaagaagaaguuaauauagacaauucuuuuguauucauagacacucgguuuuuuauuc

SEQ ID NO: 1071 - RNA, 97 nt, Human Herpesvirus 4
gacaaagagcugcucgcucaggcuguucugugaauaguacacugggguguaggagagggcccuggugagacacgugucugggaggcggcaguugguc

SEQ ID NO: 1072 - RNA, 129 nt, Rat cytomegalovirus
gacaccaggauggcagcauccgcuuuagaaucguacgcauagacgcgccccagcguaccgagacauaagaaagcggccgucuucucguacagacccugcucacggaccaccaguucuccaaccgguguc

SEQ ID NO: 1073 - RNA, 67 nt, Human herpesvirus 5
gacagccuccggaucacaugguuacucagcgucugccagccuaagugacggugagauccaggcuguc

SEQ ID NO: 1074 - RNA, 85 nt, Human Herpesvirus 1
gacaggcccgcagacgcggcuaacacacacgccggcaacccagaccccaguggguugguugcgcggucccgucuccuggcuaguu

SEQ ID NO: 1075 - RNA, 91 nt, Human Adenovirus A
gacagugugagugugguagcagucaucuagaacuucgucccauugugcuaaauguaacugaggagcugagaagugaccaccuuacccuguc

SEQ ID NO: 1076 - RNA, 93 nt, Human herpesvirus 4
gacauauagcccgggcgagacauaguggauagcggugcuauggaccuguauucacagcacgucacuuccacuaagaccccccacggguuuguu

SEQ ID NO: 1077 - RNA, 108 nt, Human Coronavirus 229E
gacaucuuguacacaccuccgacugucaguuaugguucuacauuacaggcugguuugcgcaaaauggcacaaccaucuggcuuuguggagaaauguguuguccguguc

SEQ ID NO: 1078 - RNA, 82 nt, Rat cytomegalovirus
gaccacaucugcauaucaacuuccucucacccugacccucguaggucagcccccucccauacaugaccccacagacuagguc

SEQ ID NO: 1079 - RNA, 73 nt, Human Herpesvirus 1
gacccacguacuccaagaaggcaugugucccaccccgccuguguuuuugugccuggcucucuaugcuuggguc

SEQ ID NO: 1080 - RNA, 102 nt, Molluscum Contagiosum Virus
gaccuuucguccggugucggacgccucaagcaugccaggcgcaggcgccgcccugcuagcgcuccgcgugcgagaagauccgacacuacucggagagacguu

SEQ ID NO: 1081 - RNA, 65 nt, Human Herpesvirus 5
gacgacgugguuuuugcuuccgagcuguguuuuuauugcagcggucguuuuaaccgcaggucguc

SEQ ID NO: 1082 - RNA, 66 nt, Bovine kobuvirus
gacggcuucucaaacaugcuccaggauuuugcccgaaacuuccguggacgcguggaugauguuguc

SEQ ID NO: 1083 - RNA, 63 nt, Human echovirus 1
uggaugaccugugccagaauccagaugggaaggaugugucacuauucugucaaaugguaucca

SEQ ID NO: 1084 - RNA, 121 nt, Human Herpesvirus 8
uggcaguugacggguuugugauagcuggagugcugaccacggcacaggacccauuaacuuuccuauguguuuauuuuuagcaauggucuccagaauucaaggaucucaaaagggccugcca

SEQ ID NO: 1085 - RNA, 60 nt, Human Coronavirus 229E
ugggaauacccuacugcacgucauacuauucuuauaugaugccuguuauggguaugacua

SEQ ID NO: 1086 - RNA, 83 nt, Human Herpesvirus 1
uggggcacuugcagauuuguaaggccacgcacggcggggagacaggccgacgcgggggcugcucuaaaaauuuaagggcccua

SEQ ID NO: 1087 - RNA, 70 nt, Human Herpesvirus 3
ugggggcguguauacgaauaccugaagcguuggaagcauuugacguauuucaaaaaauauacacgcacua

SEQ ID NO: 1088 - RNA, 61 nt, Human immunodeficiency virus 1
ugggucucucugguuagaccagaucugagccugggagcucucuggcuaacuagggaaccca

SEQ ID NO: 1089 - RNA, 65 nt, Molluscum contagiosum virus
uggucucugccacgcucacgcgcguuccaguauccagguuuggaaacgugggcgugugccggcca

SEQ ID NO: 1090 - RNA, 60 nt, Vaccinia Virus
uggugaguuaauauucauguugaacauaaaacuaauauuuuauuucaaaauuauuuacca

SEQ ID NO: 1091 - RNA, 66 nt, SARS coronavirus
ugguucuauagcuguaaagauaacagagcauucuuggaaugcugaccuuuacaagcuuaugggcca

SEQ ID NO: 1092 - RNA, 73 nt, Vaccinia Virus
uguauccucaacauaaucaaugagccagguaaucaagacaucggauuuauuggguaguguugaugauuccgca

SEQ ID NO: 1093 - RNA, 66 nt, Human herpesvirus 3
uguauguuggagauagagcguacuccgcguucgagugugcgguauuauguuuauauuuaauguaua

SEQ ID NO: 1094 - RNA, 70 nt, Influenza B virus
uguauugaagggaggaggagaaaauuucaucgaaguaaggaaagggucuccucuauucucuuacaaucca

SEQ ID NO: 1095 - RNA, 63 nt, Human adenovirus C
uguauuuaguaucgucaaccacuugccggcucaugggcuggaaguuucugaagaacgaguaca

SEQ ID NO: 1096 - RNA, 66 nt, Vaccinia Virus
ugucacuuuguuauuggccaaccuuuguuguacaaauuccucggccauuuuaauauuuaagugaua

SEQ ID NO: 1097 - RNA, 131 nt, Human Herpesvirus 4
ugucaucaguguugucaggguccugugggccauugucaucaguguugucaggguccugaggcagcgggucaugugggccauugucaucaguguugucaggguccugugggccauugucaucaguguuguca

SEQ ID NO: 1098 - RNA, 59 nt, Human herpesvirus 7
ugucaucguaauaauggaaacugugcuaguggcaggcuuccuauguguguaugaugaua

SEQ ID NO: 1099 - RNA, 68 nt, Human Adenovirus B
ugucuugcauuacuaccgucaccuccacagccccuauuacagcccgcaagucucggcagaaaaagaca

SEQ ID NO: 1100 - RNA, 87 nt, Human Herpesvirus 1
ugugacguucuucucgccguccagguggcgaaucaggcgcuugaaaaacaggucuggcauccagagggcgcugaagauauugucgca

SEQ ID NO: 1101 - RNA, 126 nt, Respiratory syncytial virus
ugugauaacggagcugcuuacaucuguuuuugaagucauaauuuugcaaucauauuugggguugaauaugucaauguugcagagauuuacuucacuugguaauguuaaacuguucauugugucaca

SEQ ID NO: 1102 - RNA, 64 nt, Vaccinia Virus
ugugauugauucccacuaaugaagaugccacauauccaucucuaaauucggcaggaaagucaca

SEQ ID NO: 1103 - RNA, 78 nt, Human Herpesvirus 4
ugugccgcuuggagggaaacaugaccaccugaagucuguuaaccaggucagugguuuuguuuccuugauagagacaca

SEQ ID NO: 1104 - RNA, 55 nt, Molluscum contagiosum virus
ugugugugugcgcucacacggaacgagaacaagugugugugugcgcgcucacacg

SEQ ID NO: 1105 - RNA, 70 nt, Vaccinia Virus
uguuaauuuuacuagaucgucaugggucauagaauuuauagguuccguaguccauggauccaaacuagca

SEQ ID NO: 1106 - RNA, 73 nt, Human coronavirus OC43
uguuauauuuuaugguggauaauguuacuaggcugcaugaugcuuagaccauaaucuaaacauguuuuugaua

SEQ ID NO: 1107 - RNA, 73 nt, Human Parainfluenza Virus 3
uguugaauugggauucccauugaacaguacuuuaacccuguuaagaaucugugucacauuuccuaauuuuuua

SEQ ID NO: 1108 - RNA, 71 nt, Reston Ebola virus
uguugguggaguauuguuuugaaaguagucacccucuguuagaacaguuccccuuugacucuccauuaaca

SEQ ID NO: 1109 - RNA, 92 nt, Vaccinia virus
uguuuccucccugaucuauguaucuagcgguguuauuauaaacucucaacauuggaauaauaccguuugauauaccauugguaccggagaua

SEQ ID NO: 1110 - RNA, 98 nt, Transmissible gastroenteritis virus
uuacaaaacaauuaaagagagauuauagaaaaacugucauucuaaauuccaugcgaaaaugauugguggacuuuuucuuaguacucugaguuuuguaa

SEQ ID NO: 1111 - RNA, 80 nt, Human Herpesvirus 7
uuacuauuggacuguuuauacuuaucuucaaauguucacucacagcagcgaaggggacacuagaaaacacucccaaguag

SEQ ID NO: 1112 - RNA, 58 nt, Transmissible gastroenteritis virus
uuagacccuauuuacaaagaauggccuaauauaggugguucuuggcuagaaggucuaa

SEQ ID NO: 1113 - RNA, 100 nt, Reston Ebola Virus
uuagcuucuaaggugauuauauuuuaguauuaaauuuugcuaauugcuugcuauaaaguugaaaugucuaaugcuuaaaugaacacuuuuuugaagcuga

SEQ ID NO: 1114 - RNA, 104 nt, Variola virus
uuaucuuuugcuauuaccaagauuguguuuagacgcuuauuauuaauaugagugauaaaauccacaccgccucuagauauagcuuuuauuuccacauuagaugg

SEQ ID NO: 1115 - RNA, 60 nt, Human herpesvirus 4
uuauuuucuccaaaucgcuccuugcaacaauggacacgcaagggcgaaugcagaaaauag

SEQ ID NO: 1116 - RNA, 72 nt, Vaccinia virus
uucaccguuugcauguuaccacuaucaaccgcauaauacaaugcgguguuuccuuugucaucaaauugugaa

SEQ ID NO: 1117 - RNA, 55 nt, Human Immunodeficiency Virus 1
uucauugccaaguuuguuucauaacaaaagccuuaggcaucuccuauggcaggaa

SEQ ID NO: 1118 - RNA, 100 nt, Human enterovirus E
uuccagcaccaggacucccauggauuaauaaacauacggguucaauccuugauuugcucuugaacuguauguaguuauucaucuucuuuuccaucuggaa

SEQ ID NO: 1119 - RNA, 87 nt, Human Herpesvirus 5
uucccauagccugucuaacuagccuucccgugagaguuuaugaacauguaucucaccagaaugcuaguuuguagaggcuaugcggga

SEQ ID NO: 1120 - RNA, 73 nt, Human Herpesvirus 8
uuccguaauaucuguuuuauauagugaggguucacgcaugcgcgagucccgacuaaugaggacaauuacugaa

SEQ ID NO: 1121 - RNA, 60 nt, Vaccinia Virus
uuccuuuucguugaucucucauagauuuagaaauaaauucuugcgauccuccaaaaggag

SEQ ID NO: 1122 - RNA, 62 nt, Ovine Adenovirus 7
uucguuuuucagaaaacucaaguguucagucauaucaaguucacuugccucugaaacacgaa

SEQ ID NO: 1123 - RNA, 90 nt, Human herpesvirus 4
uucuaaucugugccgcuuggagggaaacaugaccaccugaagucuguuaaccaggucagugguuuuguuuccuugauagagacacaagga

SEQ ID NO: 1124 - RNA, 75 nt, Human herpesvirus 7
uucuagguguguuauucccauaucuugcagaguucccagaggguguagugcuuccuggucuggauauauuuagaa

SEQ ID NO: 1125 - RNA, 110 nt, Human Parainfluenza Virus 1 Strain Washington/1964
uucuuaucugcgucuuuuauccgaguccacucaaagauuguaucucuuaauacucuaucaaaugugauaauacaauuuuuugugucuacuauauuuaguguagauaagaa

SEQ ID NO: 1126 - RNA, 63 nt, SARS coronavirus
uugaguguugucaaugcuagacuucgugcaaaacacuacgucuauauuggcgauccugcucaa

SEQ ID NO: 1127 - RNA, 88 nt, Vaccinia Virus
uugauauuacuuauaauaacgauuuguuuaauuuuuaguuuauacuauuaauuguaaaugauauuauuauuuuuuuaaguauuaucag

SEQ ID NO: 1128 - RNA, 58 nt, Western equine encephalomyelitis virus
uugaugaggcauuugccugccaugcagggacgcugcuggcacugauugccaucgucaa

SEQ ID NO: 1129 - RNA, 122 nt, Human Adenovirus B
uugauuuugcaugguuguagcuuuuuugguuuuaauaauauauguguggaagcuugggggcaggucaguguaagaggcuguaguuucuaugcaugcuggauugcaacaucaggcaggaccaa

SEQ ID NO: 1130 - RNA, 64 nt, Vaccinia Virus
uugcuagacaccuuuucaauguuuaauuuuuuugaaauaagcuuugauaaagccuuccucgcaa

SEQ ID NO: 1131 - RNA, 69 nt, Vaccinia Virus
uugcuucgcguuuagccucuggcuuuuuaucagccuuuguagaaaaaaauucaguugcuggaauugcaa

SEQ ID NO: 1132 - RNA, 131 nt, Human Parainfluenza Virus 3
uuggcauaagccauugauaauaaggacaccaggaacccugcccuuugugcauguuguuucucauuauccagugaaugagauaaaaaaagaagagcuaaugucauuuucucauuaucaucaguuauugucgg

SEQ ID NO: 1133 - RNA, 86 nt, Human adenovirus B
uuggcggguuggacgggucuuccauccacaguagaucccauaacauucugacgaacuccugcccaggaugggagacgcccugucag

SEQ ID NO: 1134 - RNA, 55 nt, Reston Ebola virus
uuggcucagaggguuauaagauaauaaaguaccuugaaccacuuuguuuggccaa

SEQ ID NO: 1135 - RNA, 81 nt, Influenza A virus
uuggcuggaccaugugcuggcaucaucacugcauuguucauugauucaauuucuuuauggcugacaaauggguucaguggg

SEQ ID NO: 1136 - RNA, 80 nt, Human herpesvirus 7
uuggguuuuucaaugccaacgugaugccuaacccaacuauuuacaguaggguugguguaugcgugcauuggaaagaccga

SEQ ID NO: 1137 - RNA, 89 nt, Influenza A virus
uugguacuaaagauugaaaugguucaaacuccaucuuauuguauagcaugguggguucuugggaccauuggaucuuuacagucucccaa

SEQ ID NO: 1138 - RNA, 101 nt, Molluscum contagiosum virus
uuggucaacaacacguggaacacggcccugacuaguacgauuuguuugcaccggcaacagcgcgacgccaucaggaauguuuugcguggguacauguccaa

SEQ ID NO: 1139 - RNA, 54 nt, Variola Virus
uuggugauggagucacuuuuaguucuucaguaguacuaacagugcuauuaucga

SEQ ID NO: 1140 - RNA, 57 nt, SARS coronavirus
uuguagauacaugugcuggggcuucucuuuuguagucccagauuacaguauuagcag

SEQ ID NO: 1141 - RNA, 88 nt, Variola virus
uugucaaguuuacauguccuuuuuguagaaacgcacuggauauucuaaauaaguuuaguuucaaaagaggagcguaugaaauugucga

SEQ ID NO: 1142 - RNA, 131 nt, Human Parainfluenza Virus 1 Strain Washington/1964
uugucugauuaauucugugauugucucuuugauuauuuuggcacuuucguucauggaggauacugucaugauguuugucuucauacaagugucuuguuuuauaauuaggucaaugcauaggaucaugauaa

SEQ ID NO: 1143 - RNA, 63 nt, Vaccinia Virus
uuuaaacuuuggcauauacaagucuauacuuuuaguagauaacauaccacaccauuuuuuaaa

SEQ ID NO: 1144 - RNA, 70 nt, Human Herpesvirus 3
uuuaagccuuguuuccaaucgucuuuuaaucgaagguuguaaaccggauuggaucauuggaucacuuaaa

SEQ ID NO: 1145 - RNA, 106 nt, Human parainfluenza virus 2
uuuaaguguuaagaaaaauccucccauuccgcuguguucaauguacuugccaaugucucccaccauagcauaguagcgguuugcuagcaaagaucuugauugugaa

SEQ ID NO: 1146 - RNA, 76 nt, Transmissible Gastroenteritis Virus
uuuagagaaguuuaaagauccgcuacgacgagccaacaauggaagagcuaacgucuggaucuagugauuguuuaaa

SEQ ID NO: 1147 - RNA, 72 nt, Human respiratory syncytial virus
uuuauaugucauaaguaaugacuggaaauaaguugguucuucuaauuucaguucaccuuuaugauaucuaga

SEQ ID NO: 1148 - RNA, 101 nt, Human metapneumovirus
uuucagggacagaaaacucuuguucaaacuguauugcagcaagcucuaaaaaaucuuguucgcuuaauucaaguugacugggguaacuuuuugcuuugaag

SEQ ID NO: 1149 - RNA, 91 nt, Vaccinia Virus
uuuccuguuuggacaaauaauuggaauaauucagaaauaaucguuucuuucuaaacauguuucuaguucuaauuauuucagaauagagaaa

SEQ ID NO: 1150 - RNA, 63 nt, Human Herpesvirus 5
uuugagccccaagcgguacggacuacauauuuuccauaaaucuacacugaacuugagcacaaa

SEQ ID NO: 1151 - RNA, 80 nt, Variola virus
uuugauuacgauguuauaagaauguuaauugauguaugauguuaauguguccuuuuuccucuuauaacaucguaaucaaa

SEQ ID NO: 1152 - RNA, 67 nt, Rat Cytomegalovirus
uuugcuuaacaguggcaugugacaauucuacgucgaucguuacauaccacacaaggaucaaagcaga

SEQ ID NO: 1153 - RNA, 78 nt, Human herpesvirus 7
uuuguaagcaucugugguuugguuauuuaauuuuuuuugacaagaucaaaauuucucacggugcuuuuagucaacaga

SEQ ID NO: 1154 - RNA, 85 nt, Rat Cytomegalovirus
uuugucgugugcuuuucgugucucggggcgguuuccgcgaccgaacccgucgccgcggacgcgagcagccggaucaacguacaag

SEQ ID NO: 1155 - RNA, 74 nt, Human Herpesvirus 7
uuuuaaagauccgugggcuggagcuuuaaaauucucuauuguucuuucaaguucugcaaaaaugguuuuuaaag

SEQ ID NO: 1156 - RNA, 131 nt, Vaccinia Virus
uuuuaugagaccaucaaagagagaaagagaauaaaaauauuuuuguaaaacuuuuuuugugagaccaucgaagagagaaagagaauaaaaauauuuuuguaaaacuuuuuuuaugagaccaucaaagagag

SEQ ID NO: 1157 - RNA, 125 nt, Hepatitis GB Virus C
uuuuaugggcaugguaucccccucgagcguaugaggacuggucgccaccuuguauucugccauuccaaggcggagugcgagagauuggccggccaguucuccgcgcgggggguuaaugccaucgc

SEQ ID NO: 1158 - RNA, 99 nt, Human Herpesvirus 5
uuuucuccguacaagaaauggacgucacuugagcagacacaguuucaucgaccacgacagucucaugaucugacuaccucugacccgccaacgagaaaa

SEQ ID NO: 1159 - RNA, 78 nt, Human Herpesvirus 4
uuuucugaucucaaucaaaucuuuagagauuacagacaccauguuugacaucuuucaaagugcuuucggauuggaaga

SEQ ID NO: 1160 - RNA, 61 nt, Human adenovirus B
uuuugaauaagcgcggucgcugccuacucuuuaagagucagcgcgcaguacuuguugaaga

SEQ ID NO: 1161 - RNA, 77 nt, Zaire Ebola Virus
uuuugauauaagaauuaagacccgguguuagauuccuaucugaaguaacacuguaccaagauccuugacuaucaaaa

SEQ ID NO: 1162 - RNA, 64 nt, Human Herpesvirus 6B
uuuugaucgaggcaccaagauucugccaaauuccccaaggcaucguugauauaaucuuucaaag

SEQ ID NO: 1163 - RNA, 71 nt, Vaccinia Virus
uuuugguaaucuauuauuauuggcucugaucaccgcaucuagaucuacaccuaaucuauuaauuaccaaga

SEQ ID NO: 1164 - RNA, 102 nt, Vaccinia Virus
uuuuuauaaacaugaaaccacugucuaaauguaauuaugaucuugauuuauagaugaagaucagccuuuagaggauuuuaaccaguauguuuaauaugaaaa

SEQ ID NO: 1165 - RNA, 106 nt, Variola virus
uuuuuuauaaacaugaaaccacugucuaaauguaauuaugaucuugauuuauagaugaaaaucagcugcuuuagaugauuuugguuaguauguauaauauaaaaaa

SEQ ID NO: 1166 - RNA, 86 nt, Vaccinia Virus
uuuuuuuauagcgugaaggauaugauaaaaaauauaauuguuguauuuaucccauuccaaucaccuuauaugauucuguaaaaaaa

SEQ ID NO: 1167 - RNA, 128 nt, Rat Cytomegalovirus
gggaggagcaguacggaauauccggucaggaggguggaguugaggguaucccauuggcgagcguagcgagccaaugggauauccguaaacggaacucuccugaccggauauuccguacugcuccgacc

SEQ ID NO: 1168 - RNA, 65 nt, Molluscum contagiosum virus
gggcacgugccggguagacacgcgcucgggcguuuuccgaggcggacgugcccggagacgcgcuc

SEQ ID NO: 1169 - RNA, 106 nt, Hepatitis C virus
gggccggaacgaggaccaucgcaucacccaaggguccugucauccagauguauaccaauguggaccaagaccuugugggcuggcccgcuccucaagguucccgcuc

SEQ ID NO: 1170 - RNA, 62 nt, Human herpesvirus 2
gggcgggguccaggcaaggcagggccugggccacagaccacugcuuggccucgagcccgucc

SEQ ID NO: 1171 - RNA, 60 nt, Hepatitis GB Virus A
ggggccuccggugugaauaagcccucgucuggagcaucagacguuaaacugagacguccc

SEQ ID NO: 1172 - RNA, 102 nt, Human Herpesvirus 4
ggggcucuguaacauuuggugggaccugaugcugcuggugugcuguaaauaagugccuagcacaucacguaggcaccaggugucaccagggcuacuugccuc

SEQ ID NO: 1173 - RNA, 61 nt, Human Herpesvirus 2
ggggcuuggccgccgaggugcgccccggccggaggggcccccgcaccucggcggccgcccc

SEQ ID NO: 1174 - RNA, 76 nt, Human Herpesvirus 1
ggggggaggagcggggggaggagcggggggaggagcggggggaggagcggccagacgccgaaaacgggcccccccc

SEQ ID NO: 1175 - RNA, 69 nt, Norwalk virus
ggggguccuugccccccagguaugcuggcucauauacuccggggggcagugguucuggggaggaccucc

SEQ ID NO: 1176 - RNA, 56 nt, Human Herpesvirus 5
ggguccaugaggcgggugaugcgcccgagugaacgggugagcgucucgguggaguc

SEQ ID NO: 1177 - RNA, 62 nt, Human Herpesvirus 6B
gggucugcaaaacccucugagaauacacagcauuaaaauucucguucuuccucaaaugaccc

SEQ ID NO: 1178 - RNA, 64 nt, Human Herpesvirus 4
ggguggugucugcagcaaaagaggaacuugcccaggcagucaguuauuuugcaugccaccuccc

SEQ ID NO: 1179 - RNA, 111 nt, Vaccinia Virus
ggguguaggauauaguuucauaauaggaacaugauauuuuuuguaccauuucaccaacaaguauagaaaugcaaaucuauaucuauuauuuuguauuuuaccaucuaaccc

SEQ ID NO: 1180 - RNA, 81 nt, Human Herpesvirus 6
gggugugauguacaggaaaaugacgaagaugaaggaaccaaucgcugcauaacguuaaaccgcaagugcagaaauacaccc

SEQ ID NO: 1181 - RNA, 62 nt, Human Herpesvirus 3
ggguguguacggguaaaagguucuaauauuguuauaagagcagauaguuuugugcgauaucc

SEQ ID NO: 1182 - RNA, 95 nt, Human adenovirus D
gguacaaauuugcgcagguacgcggaaguccacaaccccggcgugaguuucagcggagcgguggacuccugcggaccuugcagcucgaagguacc

SEQ ID NO: 1183 - RNA, 126 nt, Vaccinia virus
gguaccuauaaauugggcucaaggguuuauuuauuaaugcuuuagugaaauuuuaacuuguguucuaaauggaugcggcuauuagagguaaugauguuaucuuuguccuuaagacuauaggugucc

SEQ ID NO: 1184 - RNA, 79 nt, Variola Virus
gguacgacgagaaucuuuauaccuuuccuggaauaucauuaacuguugccaaugauguuaggaaauauucuguuguguc

SEQ ID NO: 1185 - RNA, 87 nt, Human Herpesvirus 7
gguacuuucuuugccaaaaaaaaaguugauugaagucauuuucacaagaauugaucagaaaguuuuuagcgugugucaaagugugcc

SEQ ID NO: 1186 - RNA, 77 nt, Human parainfluenza virus 1 strain Washington/1964
gguaucuugaugugcuacuauugggauucuuugaaacaccuaagcaaggaccucuaucuggcagcauaucugaucuc

SEQ ID NO: 1187 - RNA, 92 nt, Human Herpesvirus 8
ggucaugucggccgaaucaucuauagcaucauggaucgcaaugagaauuuuuuagaaaacaagaccauuagcuaucugccggccaaaauacc

SEQ ID NO: 1188 - RNA, 51 nt, Human Immunodeficiency Virus 1
gguccaaaaugcgaacccagauuguaagacuauuuuaaaagcauugggacc

SEQ ID NO: 1189 - RNA, 71 nt, Rat Cytomegalovirus
gguccaggaccuguuccagaucuucccgaugcacguguaccgcaacgaggagaucgacgcguggguccgcc

SEQ ID NO: 1190 - RNA, 86 nt, Hepatitis GB virus A
gguccuccaugugcuaguugugucguggaccagagaccacggaaauguggugacuguguccgcgacugcuucgagacugguggacc

SEQ ID NO: 1191 - RNA, 93 nt, Variola Virus
ggucuaugucucuuauuagagauuucagcuucuggaauaggauaauaauuaauaucuauaauuuuauugagguuucugacaauuacuuugacc

SEQ ID NO: 1192 - RNA, 57 nt, Human immunodeficiency virus 1
ggucucucugguuagaccagaucugagccugggagcucucuggcuaacuagggaacc

SEQ ID NO: 1193 - RNA, 61 nt, Molluscum Contagiosum Virus
ggugcuccaagauuacuaguauuaccuuggcguagaggugguagguguggaagggcgcgcc

SEQ ID NO: 1194 - RNA, 69 nt, Human herpesvirus 4
gguggaaccuaguguuaguguugugcuguaaauaaguguccagcgcaccacuagucaccaggugucacc

SEQ ID NO: 1195 - RNA, 62 nt, Hepatitis GB Virus C
ggugguggaugggugaugacaggguugguaggucguaaaucccggucauccugguagccacu

SEQ ID NO: 1196 - RNA, 60 nt, Human Herpesvirus 7
ggugucugaaagcucgccaaggucucgcguaaaagaacagaugugaacuucagauguacc

SEQ ID NO: 1197 - RNA, 61 nt, Human Herpesvirus 6B
ggugugaaacuaugaggaacugaugagaaaugacuuacggccaugauuuuguuucgucgcu

SEQ ID NO: 1198 - RNA, 55 nt, Human adenovirus F
gguuacuucuucagcucuaagacugucaacauugcuuagagcgaaagggguggcu

SEQ ID NO: 1199 - RNA, 64 nt, SARS coronavirus
gguucuauagcuguaaagauaacagagcauucuuggaaugcugaccuuuacaagcuuaugggcc

SEQ ID NO: 1200 - RNA, 78 nt, Human herpesvirus 8
gguugcgugucgggagggcgccggccuucgcccucaguccgggggggcuggagcgccguccucucauaucgcgugauc

SEQ ID NO: 1201 - RNA, 55 nt, Human herpesvirus 4
gguuugcccaacucuuauucuucccguuaacaggaagaaugauggugggggaacc

SEQ ID NO: 1202 - RNA, 63 nt, Human Herpesvirus 8
gguuugggcaacaaaacucuuaacccuuugcgcgaaugcaagcaagaguggcuaaugucugcc

SEQ ID NO: 1203 - RNA, 77 nt, Human herpesvirus 3
gguuuuuguaaagggguuguuaucaacgacauacauuagaguguuuaacaaccauaaaacucccucauauaaaaacc

SEQ ID NO: 1204 - RNA, 62 nt, Human Herpesvirus 7
guaagcuaccguacaucucuuucacaaacccagggcucacauagagacaagcacaagcucgc

SEQ ID NO: 1205 - RNA, 70 nt, Vaccinia Virus
guaauacuaucuauaaacauaaguauauaauaaauacuuuuuauuuacgguacucuuguaguggugauac

SEQ ID NO: 1206 - RNA, 64 nt, Vaccinia Virus
guacgcgugucgauucaucaagguauauaaaccuggggaugaggcuaccucgacauacgugugc

SEQ ID NO: 1207 - RNA, 69 nt, Human Herpesvirus 3
guacggcccaugggagggaacauuuccacguguuccaauacaggggguguuccuuaauagggacugugc

SEQ ID NO: 1208 - RNA, 92 nt, Transmissible gastroenteritis virus
guacucaacaacaaauucuucaucaaugcugcuacuacgauaacaauuaucguaaauuuuacguuguauggauuuuacuguaacguuguuac

SEQ ID NO: 1209 - RNA, 69 nt, Human Immunodeficiency Virus 1
guacugggucucucugguuagaccagaucugagccugggagcucucuggcuaacuagggaacccacugc

SEQ ID NO: 1210 - RNA, 62 nt, Human Herpesvirus 7
guagaaguuguauuuuuagaagucgaaucugagucaagaucuauagaaaauauaaacuuuau

SEQ ID NO: 1211 - RNA, 69 nt, Human adenovirus F
guagccaauauuguagugacugagcauuuguaugaggaaccaguccuuggucauguuacauugagccac

SEQ ID NO: 1212 - RNA, 92 nt, Human Herpesvirus 5
guagcgagcgugaggaaacaaaauagcgucacuguggccaccauggcauaaaugacugaacgaugacuaaaguggaagccugacgccgugac

SEQ ID NO: 1213 - RNA, 62 nt, Vaccinia Virus
guagucaccguaaauuuaucaccagaaauacuaauaucuaucuuuauguccauggugaucac

SEQ ID NO: 1214 - RNA, 115 nt, Human Herpesvirus 6
guagucgaugucgaaugugcgugcucugaggacagauuggaagucuuuaucguggaguacguuuuccaggugucucaugcaaagcagguauguuuuuucgaugauaucgauguac

SEQ ID NO: 1215 - RNA, 61 nt, Human Herpesvirus 5
guauuuuauugggaauauuggcggggauaaaccuguuucggauguuuacccuuaaucuuac

SEQ ID NO: 1216 - RNA, 73 nt, Human herpesvirus 5
gucaagguguuucucagucugguuuucacucugcugauggugcugagaaucaugacccugcgcaccuuuuugc

SEQ ID NO: 1217 - RNA, 79 nt, Variola Virus
gucaauauuaucagauucuauauauucgaauauaucaaagucauugauauuuuuauaauugguagaagacaauaaugac

SEQ ID NO: 1218 - RNA, 69 nt, Variola virus
gucauagcauccggcuuauccgccucaguugucauaaaccaacgaggaggaauaucgucggagcuguac

SEQ ID NO: 1219 - RNA, 72 nt, Rat cytomegalovirus
gucauauauguacggugccucuuuauaaagauuaucuucguacgcucuuguaucaggcaccguguacucgau

SEQ ID NO: 1220 - RNA, 79 nt, Tick-borne encephalitis virus
gucaucccgaaggucugaccugguuuucucuggacaggggggucgagagcguggugacagaccuuucgagguuaaggac

SEQ ID NO: 1221 - RNA, 65 nt, Transmissible Gastroenteritis Virus
gucaugaugcuuauaaauuugaaguuguuacacauagcaauuucauugugcauaagcagacugac

SEQ ID NO: 1222 - RNA, 85 nt, Rat Cytomegalovirus
guccgagguccuggucgcauuaucguggguguguucuucguccagcauccaggccgcucgagacccgcuggcgagggccucggau

SEQ ID NO: 1223 - RNA, 64 nt, Rat cytomegalovirus
guccgaguuauaucccguuacgacguaccggaccguacgugguaaugagggcgaaaauucggac

SEQ ID NO: 1224 - RNA, 75 nt, Molluscum Contagiosum Virus
gucgacgacgaagaugcagugguugugcgcgguuaacggaguuccgccuacuuuuacuucaaucuuugcgucggc

SEQ ID NO: 1225 - RNA, 82 nt, Human Herpesvirus 2
gucggggcgggagaguucacucggcacgcaugcacguguaaccgccaguccgugcuugccuagcgaacucacccgucccggc

SEQ ID NO: 1226 - RNA, 106 nt, Human herpesvirus 7
gucguguuugcgguuaaacucgcggaaguaaaccguuauuuuuucucgaacgguaaaauacaaaaacgguuuaugcgaaacaauuucaggcaaauaucauugcgac

SEQ ID NO: 1227 - RNA, 76 nt, Human Herpesvirus 5
gucguuuuguucaccgucgcugugcaacgcgugaaacaagagcgugaugcgcaccuucggcgguaugaagaacgau

SEQ ID NO: 1228 - RNA, 81 nt, Human Herpesvirus 8
gucuauuucccacgacauacuuccgcggaaaaauacccacgcuccuuaauuuccgugggaagacgaugggggaaauguggc

SEQ ID NO: 1229 - RNA, 76 nt, Reston Ebola virus
gucucacuguuguuguuuaugauuuuggaggccaauagaguccuggucccuucaagauaaccuaauauuuggagac

SEQ ID NO: 1230 - RNA, 92 nt, Human herpesvirus 8
gucucgcgcguuagcgccaaaaauccgucgugaucgcuuguauacagaaaucgaucaacugaauccauuggccucacccggcuugcagagac

SEQ ID NO: 1231 - RNA, 102 nt, Human herpesvirus 6
gucugaggcuauuauugaaguccacgguuccuaaggccuuuuuaccauguuuugaugaaaacgccacggaaaucgaucugcuuuuaaaauuuaugucaaggc

SEQ ID NO: 1232 - RNA, 89 nt, Human herpesvirus 2
gucugcggucuaguggucggcguggggaccggcuguguggugggugggggaggcacguuggacuacgaccgaccacacgacaugcaggc

SEQ ID NO: 1233 - RNA, 104 nt, Reston Ebola Virus
gucuggcugagguuccaucuaagguuguggcuugccuuguuaaauaaaucuugauucuuagaucuuaaguccaagcguuuuaccaucuugcaucuuaaacaaac

SEQ ID NO: 1234 - RNA, 59 nt, Rat Cytomegalovirus
gucuuccuuccgcaaggacgccauaucccugcuccgauucguucuucgguugguaagau

SEQ ID NO: 1235 - RNA, 80 nt, Human herpesvirus 5
gucuuguccuucagcgugcucauuaccugucuagccgucucgcauuuccacgaagcggcccuggcuguacgcuacgagac

SEQ ID NO: 1236 - RNA, 89 nt, Transmissible Gastroenteritis Virus
gugaagucucacacuagacauuucauuuucauaguugauaacacgugugguaucacuagcaauaacaugucuagggcaaaugacuucau

SEQ ID NO: 1237 - RNA, 80 nt, Human herpesvirus 5
gugacaaguaugaaaguuggcugcgcccguuggugaauguuaccagacgcgauggcccgcuaucgcaacuuauucguuac

SEQ ID NO: 1238 - RNA, 79 nt, Human Herpesvirus 1
gugaguuuguggacccaaagcccucagagacaacgcgacaggccaguauggaccgugauacuuuuauuuauuaacucac

SEQ ID NO: 1239 - RNA, 104 nt, Human herpesvirus 7
gugauuuuucucuccuuuuuccucuguuuuugcuugacguucaaauuuugggucgucuuuaaccugcucuugacuuaaauaagcuucuacggucagaaaaacau

SEQ ID NO: 1240 - RNA, 66 nt, Barmah Forest virus
gugcaauuuuguaaaacggaucucugcuguagguggccuggacccgugucugacgaaaaaauguac

SEQ ID NO: 1241 - RNA, 93 nt, Human adenovirus A
gugcaucaguguaaaaaaggacuuuuuugccugguaaaacaagcuacccuucgcuaugaaucuuuaccaggcaaagaacaucaacugugcuac

SEQ ID NO: 1242 - RNA, 90 nt, Human coronavirus 229E
gugccaagcuguauggaaaaaucuuccaagcaaaauuacagcaaucaaaguugcguaaauauaugcuugagaccaauacagcaauggcac

SEQ ID NO: 1243 - RNA, 80 nt, Human Adenovirus D
gugcgagggguagcggucguuguccaccaggggguccaccuuuuccaccgugugcagacacauguccccuuccuccgcau

SEQ ID NO: 1244 - RNA, 63 nt, Human Herpesvirus 1
gugcugccgccgcgggaggauguguuuucguggacucguuauugcacccccgacgaggugcgc

SEQ ID NO: 1245 - RNA, 96 nt, Human Herpesvirus 4
guggcccaaccucugcuccccucuauucuccucuugcguuaucuccaauagaauuugcuugaggucauacguuuuagggugcucgaccugggccgc

SEQ ID NO: 1246 - RNA, 107 nt, Human Herpesvirus 4
guggguccauucuuaaugguggagagcagcuuggaagaggaaauuaugccauuucgcaauaugucccacaucagguucucagacugcccccuggucauggacuccac

SEQ ID NO: 1247 - RNA, 60 nt, Human Herpesvirus 8
gugguagcggcacagaaucuuuccagggcuuuaaaguccuacugucccacuauauaccac

SEQ ID NO: 1248 - RNA, 123 nt, Human Herpesvirus 6
gugguccuaaaaguuuuugccagucagacaguuguuucggauacaguaagacgggauauaaugccgcguuuccaaaucuauugccuccguaucuguacgaaugcggccaaaauaauggacugu

SEQ ID NO: 1249 - RNA, 96 nt, Human coronavirus 229E
gugguucaaacauuaugcgagaugugauucuauaauaauugccuucuuuguaaagagcaagauuagguugucgcaacacauaaccguuuguaccau

SEQ ID NO: 1250 - RNA, 66 nt, Rat Cytomegalovirus
gugucccagccgcucuuugcuccgcgcguuguacaucacgucgcccagggagccccgcugggacgc

SEQ ID NO: 1251 - RNA, 116 nt, Human herpesvirus 5
gugugacgugagucugauccaacacugaacgcuuucgucguguuuuucaugcagcuuuuacagaccaugacaagccugacgagagcguucaucggggcaugaaguacgcauuacac

SEQ ID NO: 1252 - RNA, 71 nt, Vaccinia Virus
gugugccugaaucguucgauuaacccuacucauccaauuucagaugaauagaguuaucgauucagacacac

SEQ ID NO: 1253 - RNA, 93 nt, Human Herpesvirus 6
guguggagucuguugagaaugccaugcuauagucauaggauucaaaauugaacuuguuuguuaguuguguaaaaucuuuauaguuauucauac

SEQ ID NO: 1254 - RNA, 127 nt, Molluscum Contagiosum Virus
gugugugugugugcgcucacacggaacgagaacaagugugugugugcgcucacacggaacgagaacaagugugugugugugugcgcucacacggaacgagaacaagugugugugugcgcgcucacac

SEQ ID NO: 1255 - RNA, 92 nt, Human herpesvirus 7
guguuaccagcugugauuauugcauuugcuucauuuuuuggaagacuguuuagaaauggagggaauagacgauuaucaaacaaagcguucac

SEQ ID NO: 1256 - RNA, 60 nt, Human Herpesvirus 7
guguuuauauaauuguuuaggggcaagucagauuacaguagauuuuaaaaauauuuacac

SEQ ID NO: 1257 - RNA, 74 nt, Variola virus and Vaccinia virus
guuaauacgucuugcacguaaucuauuauagaugccaagauaucuauauaauuauuuuguaagaugauguuaac

SEQ ID NO: 1258 - RNA, 64 nt, Variola Virus
guuaaucucacaacuuuacuguuuuugaacuguucaaaauauagcauagauccgugagaaauac

SEQ ID NO: 1259 - RNA, 119 nt, Human Coronavirus 229E
guuaccaagaguuaagucaauuuagccauuuggauguuguguggaagcauauaacagacccuuuguuuaguaauaugcaaccuuucauugucaugguuuugcugcuuauauuuggugac

SEQ ID NO: 1260 - RNA, 61 nt, Vaccinia Virus
guuaucuauagcaucuacuaacuguacauuuuuuacaucuagaccauguaccuuagauaau

SEQ ID NO: 1261 - RNA, 79 nt, Transmissible Gastroenteritis Virus
guucaagaacaccaguuacaauuucauugucaaauucgaauucaaguuuaacacguguaacaggugcaauuucuugaac

SEQ ID NO: 1262 - RNA, 66 nt, Murray Valley Encephalitis Virus
guucaucugcgugagcuuccgaucucaguauuguuuggaaggaucauugauuaacgcgguuugaac

SEQ ID NO: 1263 - RNA, 131 nt, Human Herpesvirus 7
guucugaucuuucuuguacauguucaaguuuucggcgguuaagaugcuuuagagauaguucaagauuuuagauucaaaacaucacuuaucuccacagaucauuuccaagcaauuguacagaaagauagaau

SEQ ID NO: 1264 - RNA, 97 nt, Human Herpesvirus 7
guugacaucauugagaaagauuuggauuuuuccacaaaacaauauggucuuguaaaagaguauauggcgaaaaucacaaauauuuuucaacagcaac

SEQ ID NO: 1265 - RNA, 68 nt, Human Herpesvirus 8
guugacauguggagccacuggcgcguugccgacaacggcgacgacaauaacccgcuccgccacgcagc

SEQ ID NO: 1266 - RNA, 83 nt, Influenza B virus
guugcuaaugggaacggcuucuucaacacaauggcuuggguuaucccaaaagacaacaacaagacagcaauaaauccaguaac

SEQ ID NO: 1267 - RNA, 68 nt, Human Herpesvirus 8
guugcuauggcugcuguucaacggacccgccucuuuuugucgggccgacuguugccuguacaagcagc

SEQ ID NO: 1268 - RNA, 111 nt, Rat cytomegalovirus
guuguucgaaucgacauacgcgucuguggucguauaccaugagggauacacgugaaugcguuaaaacugauguucuuuuuccauacgacuacgauugucccgaugaauaau

SEQ ID NO: 1269 - RNA, 79 nt, Zaire Ebola Virus
guuguuuauugagauuagaucaauaugauguaugagagcaauuuaugaguuuuuuauaaucuguauguuaauaaccaac

SEQ ID NO: 1270 - RNA, 81 nt, Human adenovirus C
guuucagaccguccaaucuaugaauuuuuucauuguguggguugagcacaaugauaggccuauagauggggggucuggcgc

SEQ ID NO: 1271 - RNA, 78 nt, Human Herpesvirus 5
guuucaucugacgugauaguuacggugauuguuguguuauaagaugauguagcguuugcuguuacguugguaaaagau

SEQ ID NO: 1272 - RNA, 111 nt, Hepatitis A virus
guuugggugacaagacagauucuacauuuggauugguuucuauucagauugcaaauuacaaucauucugaugaauacuugucuuuuaguuguuauuugucugucacagaac

SEQ ID NO: 1273 - RNA, 91 nt, Adeno-associated virus 1
guuuucagcuacaaaguuugcuucauucaucacccaauacuccacaggacaagugaguguggaaauugaaugggagcugcagaaagaaaac

SEQ ID NO: 1274 - RNA, 103 nt, Vaccinia Virus
guuuucuaaagaugucauuaaacccucgaucaugaauggauuuaucaucaucguuuuuauguuggacaugagcuuaguccguuuguccacaucuauagacgac

SEQ ID NO: 1275 - RNA, 98 nt, Vaccinia Virus
uaaaauuaaauuaauuauaaaauuauguauaugauuuacuaacuuuaguuagauaaguuaguaauacauaaauuuuaguauauuaauauuauauuuua

SEQ ID NO: 1276 - RNA, 109 nt, Vaccinia virus
uaaauaaauaguaaaauuaaauuaauuauaaaauuauguauaugauuuacuaacuuuaguuagauaaguuaguaauacauaaauuuuaguauauuaauauuauauuuua

SEQ ID NO: 1277 - RNA, 60 nt, Vaccinia Virus
uaacaagauugggaauuuuauauuauuaauucaguaauauaaacuaauaauauauuguua

SEQ ID NO: 1278 - RNA, 68 nt, Human Herpesvirus 7
uaaccuuagcucuaacucugacccuaggccuaacccuaagccuaacccuaaccguagcucuaaguuua

SEQ ID NO: 1279 - RNA, 102 nt, Zaire Ebola virus
uaacgcuugcauguuugaauguuggcuuaaguauucgcaaugagcgaugugguagauuaugaauuugaguaguuaaguaauauaaaaaauugucaaguguua

SEQ ID NO: 1280 - RNA, 118 nt, Human Herpesvirus 8
uaagauaaucuaaauauucucuauaacauaauuguaauguguuuuauguuuauagcuacaaauguuuuaugcaaaauacauuuuaugaggucggauacuuauuaaaagcauugucuua

SEQ ID NO: 1281 - RNA, 84 nt, Respiratory syncytial virus
uaagcuuagguauaagaauaauucuguuaggacauacauuaguaaauuguucuacuacugacauuaagcuaaggccaaagcuua

SEQ ID NO: 1282 - RNA, 97 nt, Human parainfluenza virus 1 strain Washington/1964
uaauaacuuggccaucucaucgaccgauguguugcugguuuccucuucauuugcgguugcgucguguucgggaguugguggacuuuuuguguuguug

SEQ ID NO: 1283 - RNA, 93 nt, Variola Virus
uaauacuugacugacuuaaaacuugauaauuaauaauauaauucguuuuuauaugugacuauuuuaacgucuaaauguauuaguuaaauauua

SEQ ID NO: 1284 - RNA, 102 nt, Vaccinia virus
uacaaaggagaugauuuaucuaugguauuaagaauucguuuuucgacauccgucaaaaccaauuccuuuuugccuguaucauccaguuuuccauccuuugua

SEQ ID NO: 1285 - RNA, 69 nt, Human Parainfluenza Virus 3
uacaauaaagauauaucuuaaccuuuaucuuugagcccaaggauagacaaaaaguaagaaaaacaugua

SEQ ID NO: 1286 - RNA, 130 nt, Vaccinia virus
uacaccaccuccuauaucaaugccuuuuagugacagaccagaccuaggagcuauucuaccauagcaaaucuuaggcauggacauacuaauaucugucuuaauuaacugucuuucuccuggagggauagua

SEQ ID NO: 1287 - RNA, 111 nt, Vaccinia virus
uacauguccagugaaccaauuaucuuuggagaaucgucuaucuuuguagaguauaagaaauuuagcaacgauaaaggcuuuccuaaagaauaugguucugguaagauugug

SEQ ID NO: 1288 - RNA, 81 nt, Human herpesvirus 3
uaccaacuguauguaaauuaugaucauuaaacgugcauuuuaaaaauaccugaguguugcuauuggucguaaggguuggua

SEQ ID NO: 1289 - RNA, 93 nt, Vaccinia Virus
uaccaauauuggaauuauaauauagguguauuugcgcacucgcgacgguugaugcaucgguaaauauagcuguaucuaauguucuagucggua

SEQ ID NO: 1290 - RNA, 75 nt, Vaccinia Virus
uacgacacugauaaaccgcauuaucuguggacauuuuaauguugguaucuagauaacaauguuuaucguauugua

SEQ ID NO: 1291 - RNA, 77 nt, Human adenovirus C
uacgcugauucaggaauggguuguucccugggauaugguucugacgcgggaggagcuuguaauccugaggaagugua

SEQ ID NO: 1292 - RNA, 93 nt, Vaccinia virus
uacggaugcucgauguacaaauugauauggucgucguauucagucaauguuacagucggugguccaauuuuuacuucgacgcauagucccgua

SEQ ID NO: 1293 - RNA, 67 nt, Human Herpesvirus 8
uacuauaacaggaaacauagaaguugcggauagagccugguuucuaacggcaaugauauuuauagug

SEQ ID NO: 1294 - RNA, 73 nt, Vaccinia virus
uagauauugaacauuuggccauaguucccacuacacgugucgacgguaauagcuacuauuggcccgauauuua

SEQ ID NO: 1295 - RNA, 76 nt, Human coronavirus OC43
uagcuacaguguuauuuuaaguacuugugauggacaaaaguucacugaugaguccuuuuacaagaacauguauuua

SEQ ID NO: 1296 - RNA, 105 nt, Human herpesvirus 6B
uagcugcuaaaugugauacggaaguugaaaaaaaacugccgcuuaaaucaaaaaaaugauagacgacgcagauuuacgacacgcucguauuuuauuuuguggcua

SEQ ID NO: 1297 - RNA, 96 nt, Variola virus
uaggagaauuaaaauuuucuauuucaacagguguagcaaaauauuuaaaacgcuacacuucgaaauggauaagacauccaaacuuaauuacuccua

SEQ ID NO: 1298 - RNA, 114 nt, SARS coronavirus
uaguaauuauuuguggagaaaagaaguuccucuguguaauaaaccaagaagugccauuaaacacaaaaacaccuucacgagggaaguaugcuuugccuucaugacaaauugcug

SEQ ID NO: 1299 - RNA, 88 nt, Vaccinia Virus
uaguggcuucuaaucagauguucuaauaaauauuuuaaaaaugaaucuugauuaaaaaucauaucauugaccauuugucuggcuacug

SEQ ID NO: 1300 - RNA, 81 nt, Vaccinia Virus
uaguguuagaaauagaagacuuuaauaucaagcauuuauuuauggcaggugagauguuuguuagaagucagucuaguacua

SEQ ID NO: 1301 - RNA, 80 nt, Influenza A virus
uaguuguaaggcuugcauaaagguuauuugcucaaagcuauucucuguaauucuuaaccuaugucgcauuucuucaauua

SEQ ID NO: 1302 - RNA, 84 nt, Variola Virus
uauaauguacuagauaauauuauaaagccuuuauuuaaccaaccuaucuucaaaggaccgucugauguuaaaugguucgauaua

SEQ ID NO: 1303 - RNA, 103 nt, Vaccinia virus
uauaggaaaggguggaaugcgauacauugaucuauguaguuuuaaaacacacgcaaacuuugaagaauuuauauaaaucauuccaucgauacauccuucuaug

SEQ ID NO: 1304 - RNA, 99 nt, Variola Virus
uauaucaacggacacaaaguagcuaacauaaaccauuguauaauuuuuauguuuuauguuuauuagcguacacauuuuggaaguuccgguugccaugua

SEQ ID NO: 1305 - RNA, 102 nt, Vaccinia virus
uauauuauuaauucaguaauauaaacuaauaauauauuguuaauuguguaaauaauauaaaaauaacaauacaauauugaauguguugcuguuaaaaaugua

SEQ ID NO: 1306 - RNA, 55 nt, Variola Virus
uauauuugacuauuggaauaugaaccaucucauuaaccuaugguacauacauaug

SEQ ID NO: 1307 - RNA, 105 nt, Reston Ebola virus
uaucaaguacaggugucucacuguuguuguuuaugauuuuggaggccaauagaguccuggucccuucaagauaaccuaauauuuggagacguuuaccacucggug

SEQ ID NO: 1308 - RNA, 105 nt, Vaccinia Virus
uaucuaucagauuauuauguguuauaagguacuuuuucucauaauaaacuagaguaugaguaagauaguguuuuucaaaacauauaaaucuaaaauugauggaug

SEQ ID NO: 1309 - RNA, 90 nt, Vaccinia Virus
uaucuuggcaauaacuaauugagauauugaugcgaguucgguaugcauaucggacacguauccgaguacugauuccaaguugccagagua

SEQ ID NO: 1310 - RNA, 79 nt, Variola Virus
uaucuuggcugcuggaucuaaauauuuuagaacacuguuuacaacaccuaugauaauaagagaucuaguaacuagagua

SEQ ID NO: 1311 - RNA, 77 nt, Vaccinia virus
uaugaacauuagaaugggaauuuuuuauuguaacgaugaugaugcgguagauccccaucuaaugaagauuauucaua

SEQ ID NO: 1312 - RNA, 90 nt, Human herpesvirus 6
uaugauaaacugauuacgucaggcguuaaaacuugauuuucuguggauguuucguuauccuuaguagccucauguuuuuuaguuuuugua

SEQ ID NO: 1313 - RNA, 130 nt, Human Coronavirus 229E
uaugcuuacuuuggaugaccgugguuuagcucuagacaaugcacuuaguggugugcuuagugcugcuauuaaggauuguguugacauaaauaaagcuauaccuucugguaaucuuauuaaguuugauaua

SEQ ID NO: 1314 - RNA, 89 nt, Human Herpesvirus 6
uaugggaauauucugguaaaagugcauguaucaauuuuagucguuuuuggauuucuguaauguuacgauuugcuauguguauuuucaug

SEQ ID NO: 1315 - RNA, 77 nt, Human Herpesvirus 6
uaugguccaguugaaauuagauuucauuauaggaaaagauuugagaucgugaaauaaagauugaaauugugaucgua

SEQ ID NO: 1316 - RNA, 83 nt, Vaccinia Virus
uauuaacguaucgcauuaauacuguuuucuuagcgaaugaugcagacccuucuacgucaucaaaaauagaaaacucguuauua

SEQ ID NO: 1317 - RNA, 108 nt, Human respiratory syncytial virus
uauugaauccacaucucagcccuaagcuuuuauuuaauguauucaaacaauuacuuauccaaguaauuaagcaaacauuuaaucugcuaaggcugaugucuuuccaug

SEQ ID NO: 1318 - RNA, 84 nt, Vaccinia Virus
uauuggauuguauauuuuauuuuauauuuuauauuuuauauuuuguaauaagaauaaaaugcuaaugucaaguuuauuccaaua

SEQ ID NO: 1319 - RNA, 102 nt, Zaire Ebola virus
ucaaaccuguagagaccauccggaaauaaacucagaagcccugucagccuuucgauaagcuuaacuucagaauccugcauucuauguaaauauaagguuuga

SEQ ID NO: 1320 - RNA, 61 nt, Vaccinia Virus
ucaaagacuagacauuuaccaugggaugcuaauauucccaaacauacaucuauaaauuuga

SEQ ID NO: 1321 - RNA, 100 nt, Rat cytomegalovirus
ucaaagcaaucugauuuaauaagaaugauaauguacguauucuucaugauauccgucauaagcauaagucauaaucgucauauagaccuagaugguuuga

SEQ ID NO: 1322 - RNA, 88 nt, Marburg Virus
ucaaguuuaagauagcuuaagaauauuuuaaucgaguaauuuacaaugaauuggugauuauuaucgucguagucuucaguaaacuuga

SEQ ID NO: 1323 - RNA, 84 nt, Human adenovirus B
ucaaguuuuuccacugcuggacguuucccaggcuuaagcuucacaggaaugggcuugcgcacguccacaggaacaggugcuuga

SEQ ID NO: 1324 - RNA, 126 nt, Human enterovirus E
ucaauauaagaaggagggcagaauaaacaugccagaggcagcaaggccaugugaugaggagugcuacccuuguaauuuuaagagauguuguccacugguaugugguaaggcaauacaauugguuga

SEQ ID NO: 1325 - RNA, 70 nt, Variola Virus
ucacugacuaaccauauaauagauuauguucuuacagacaauaaaaauauuauuuggcaaagucaaauga

SEQ ID NO: 1326 - RNA, 60 nt, Variola Virus
ucagagauuauugucuuauauucuuucuuguuauccgauauaaauuuaauaagacuuuga

SEQ ID NO: 1327 - RNA, 81 nt, Vaccinia virus
ucaggcauuucguaauaugauauucuuccuuuaagcaaauccuuaaguacauucacaccucguucguuaagaagugucuga

SEQ ID NO: 1328 - RNA, 89 nt, Vaccinia Virus
ucauaauauuagaauauauuuuaaaggacuuaucguuauuauauuuuuuuaacucggugagguaucuucuuaacuuucucgaauuauga

SEQ ID NO: 1329 - RNA, 73 nt, Vaccinia Virus
ucaucuaaugccguagccguaaguacgugguuuacaacauuagcuacuucuuuaaaguacucguuuuggauga

SEQ ID NO: 1330 - RNA, 110 nt, Human respiratory syncytial virus
ucaugcauuauguaacaauaagcuauauuuagauauauugaaaguauuaaaacacuuaaaaacuuuuuuuaaucuugauaguaucgauauggcguuaucauuguauauga

SEQ ID NO: 1331 - RNA, 97 nt, Vaccinia virus
ucaugcucucucacuacacuuuuuaucaucuuaugaggaaugauugccuucaucauuuuucgugaaauaggaauaauuagcaccagaauagcuaugg

SEQ ID NO: 1332 - RNA, 63 nt, Respiratory Syncytial Virus
uccaaguaauucagauaauugauucauauaauuggucauuguugaaucacuuaguuuuuugga

SEQ ID NO: 1333 - RNA, 70 nt, Tick-borne encephalitis virus
uccaccuugagcuggggccagagaucguggccuugaugcuacuccaggcuguguuugagcugaggguggg

SEQ ID NO: 1334 - RNA, 97 nt, Vaccinia virus
uccacugucacuggaaagaugauagaugacuaucuaacucguaaaaaaaccuauaaugaucauauaguuaaucuauuauuuugugcaaauagauggg

SEQ ID NO: 1335 - RNA, 90 nt, Human Herpesvirus 8
uccaggaggacagcgccucagcgaggaccugcgcagaaagaugcccuccauaguuguccaggacucaucgggguucauugccugccugga

SEQ ID NO: 1336 - RNA, 130 nt, Human adenovirus B
uccauccugacauugucuuacugccuggcugcggaguggauuuuaccgagagucguuugagcaaccuucuugguaucagaaaaaaacagccauuucaagaggguuuuaagauuuuguaugaagauuuaga

SEQ ID NO: 1337 - RNA, 73 nt, Human Herpesvirus 5
uccauuuuuauccucgcacuucuucgcucucaaagccgccuuuaaaguugaaaugaaaggauggaaacaugga

SEQ ID NO: 1338 - RNA, 84 nt, Human adenovirus B
ucccaggcuccuacacuuaugaguggaacuuuaggaaggaugugaacaugguucuacagaguucccucgguaacgaccugcggg

SEQ ID NO: 1339 - RNA, 71 nt, Human Herpesvirus 4
ucccggcacacauccuggaugcccuccacgacgcucuuuagcgucuggagguccguggaguaguggcgggg

SEQ ID NO: 1340 - RNA, 95 nt, Human herpesvirus 2
uccgaguccgagaaacgcagggagucugcgucggaguguucaucaucggaggagaugugcagcgucugaagcagcgaugcgggugggggcgcgga

SEQ ID NO: 1341 - RNA, 73 nt, Human Herpesvirus 6
uccggccgggucacuuguucucauaaaagcggucuaucuccacuccgcucagccggaccguacccggaccgga

SEQ ID NO: 1342 - RNA, 81 nt, Vaccinia Virus
uccguuuuuaucaguauguauaucuauauuaacgucgucguuguagugaauaguaguuauugaucuauuauaugaaacgga

SEQ ID NO: 1343 - RNA, 85 nt, Human Adenovirus D
uccucgguaauucggaacggggaugcgcaggcggcaagugagagccaucucucugcaacaguaucacagcacacggauuaaagga

SEQ ID NO: 1344 - RNA, 79 nt, Human Herpesvirus 6B
uccugaaaucugagugaucugauucgacaaaucaucaccacguauggucgucauuucaaauacaccucacguuuuggga

SEQ ID NO: 1345 - RNA, 61 nt, Human Enterovirus C
uccuggugcauccagugaugccaaugaaagaaauucacgaaucaaucagauggaccaagga

SEQ ID NO: 1346 - RNA, 123 nt, Influenza B virus
uccuggugccuuuucugcguugauaacguuuuggguugauaaucugauuuuuucauauccucugagaagauuggguagcugucugauuuuuguucugucgugcauuauaggaaagcauccgga

SEQ ID NO: 1347 - RNA, 73 nt, Transmissible Gastroenteritis Virus
ucgaacuaaacgaaauauuugucuuucuaugaaaucauagaggacaagcguugauuauuuccauucaguuugg

SEQ ID NO: 1348 - RNA, 79 nt, Hepatitis D virus
ucgacuagaggcgacgguccucaguacucuuacucuuuucuguaaagaggagacugcuggcccugucgcccaaguucga

SEQ ID NO: 1349 - RNA, 62 nt, Vaccinia Virus
ucgaugauacauguauuaaaauacuuuccgaauaagucuuuuaaauauuguauuaauuauga

SEQ ID NO: 1350 - RNA, 89 nt, Molluscum contagiosum virus
ucgcguagucagggccuuuucacuggccguguaagucucuugucaaacugaaagauuacuugguaccugugagggcauggaucucgcga

SEQ ID NO: 1351 - RNA, 88 nt, Molluscum Contagiosum Virus
ucgcguucuugcuagcucgccgcggguaugcagccaagugcaugggaaaguacucgccgcugaaggcgcagcaaaagcaagugcgcga

SEQ ID NO: 1352 - RNA, 63 nt, Influenza A Virus
ucgcuuuaaauacggacugaaaggagggccuucuacggaaggagugccaaagucuaugaggga

SEQ ID NO: 1353 - RNA, 70 nt, Vaccinia Virus
ucggccauacguuuacuuuuugcguauacauguccuggugauauaucauaaaggguaugcucauggccga

SEQ ID NO: 1354 - RNA, 111 nt, Human herpesvirus 6
ucggcuguguauguuuuaaugucauugaaaauauuuagaggugcuucgaucuuagguaaaauuucggucgccugccaauuuuccauguuucggcguuaugcagcacaccgg

SEQ ID NO: 1355 - RNA, 64 nt, Rat Cytomegalovirus
ucggggggaggagaggaaaccggggacucaccggcggccucggaccgagccucgcucccgccgg

SEQ ID NO: 1356 - RNA, 67 nt, Human herpesvirus 1
ucguuguuggugccgguggggcguaccgcguaaauacaucggugcagcggacuggcaccgaagacgg

SEQ ID NO: 1357 - RNA, 119 nt, Human herpesvirus 6B
ucuaauggaaaugcgauggcuguuagugagggacuuacacguguuuuauuuaaccugugacgguaaagauucacauguugucaugccuuuacugcaaacggccguugaaaacuguuggg

SEQ ID NO: 1358 - RNA, 108 nt, Vaccinia Virus
ucuaucuuguuuagauuuauuuuuauaaaguuuagucucuccuuccaacauaauaaaaguggaagucauuugacuagauaaacuaucaguaaguuuuauagagauaga

SEQ ID NO: 1359 - RNA, 90 nt, Poliovirus
ucuauucaauaaugucagaugguuauccauccagucuaagagguuugccccucuuuacgcaguggaagccaaaagaauacagaaacuaga

SEQ ID NO: 1360 - RNA, 118 nt, Respiratory Syncytial Virus
ucuauugaguugacagauaugauacuaucuuuuuucuugggaucuuuaggugaugugaauuugcccuuuauugauucuaggaauuugguagcucuguuguuugcaucuucuccaugga

SEQ ID NO: 1361 - RNA, 71 nt, Human Herpesvirus 3
ucucaaauuaucgcgauggaugcuacaguaaacucgcaguuuauugauuuaaucuccggauugcguggaga

SEQ ID NO: 1362 - RNA, 83 nt, Rat cytomegalovirus
ucucagaaacgugaaaaaagaugacugggaagcuauccguauuguguuugauacauagauucuucucgguccuuguuuugaga

SEQ ID NO: 1363 - RNA, 63 nt, Murray Valley encephalitis virus
ucuccauuguuggcagggacuccucuuccgagacgguucugggaggcuuuccaaccguggaga

SEQ ID NO: 1364 - RNA, 105 nt, Human herpesvirus 6
ucuccuuagaaauugaaccgugguuuaaaucuaauauucaucggcugaauacuuauucucaguucgcggaucaggauuuaucgaaaacgguucaauuggaggaga

SEQ ID NO: 1365 - RNA, 81 nt, Molluscum Contagiosum Virus
ucucgguccacgagggaagcgucacccugacacuggucucagggcuugucucgucggugaaucccuuugucccuuccgaga

SEQ ID NO: 1366 - RNA, 106 nt, Human herpesvirus 6B
ucucguuucgccuucguugccgcggcagggucggcgccagcccaucgcgaacucgggggacggggguguggcgccgacucugccgcguugcgguuucggggcgagg

SEQ ID NO: 1367 - RNA, 131 nt, Human Herpesvirus 1
ucugccucugccgcuugugagugcgcgcgccggcucugcggugucggcggcggcugcggcggcugcggcggccgccguguucggucucgguagccggccggcggguggacucgcggggggccggagggugg

SEQ ID NO: 1368 - RNA, 111 nt, Human parainfluenza virus 3
ucuggagaaucgauuagggaauuucugaguguagauuacauugauaaaaucuuagauauuuuuaaugaaucuacaauagaugaaauagcagagauuuucucuuuuuuuaga

SEQ ID NO: 1369 - RNA, 65 nt, Human Herpesvirus 5
ucugguauacacccgucucgugguacgaaguagagcgcggcaccaccggacggaugcaguccaga

SEQ ID NO: 1370 - RNA, 94 nt, Human astrovirus
ucugucugguccauuaaaauaagcaaacucaaaagccuguaaccaaaaguuaaccauguuguuauccauuguuguugaaaacugaccagaugga

SEQ ID NO: 1371 - RNA, 131 nt, Human Herpesvirus 1
ucuucccccccaucaccccgcaauuugcacccagccuuuaacuacauuaaauuggguucgauuggcaauguugucucccgguugauuuuuggguggguggggaguggguggguggggaguggguggguggg

SEQ ID NO: 1372 - RNA, 92 nt, Rat cytomegalovirus
ucuucgugagauggagauagaauugaacuuuacaacgcaacagaaaccucuuuuacgggaacuucauaaauuuuauccaaacuccaugaaga

SEQ ID NO: 1373 - RNA, 107 nt, Human Herpesvirus 5
ucuugcucgacgugccgcgucuggagaacuauuuucuuugucaagucugucuuuacgagcuggacgaggacgagaugggcgaggagaugcugggcauguuggccgga

SEQ ID NO: 1374 - RNA, 76 nt, Human parainfluenza virus 3
ucuuucauuuguuuguuguuuagcagaaauugcaucuuuuggaccuaaccuguuaaacuuaacauacuuagagaga

SEQ ID NO: 1375 - RNA, 69 nt, Rat cytomegalovirus
ugaaaaaagaugacugggaagcuauccguauuguguuugauacauagauucuucucgguccuuguuuug

SEQ ID NO: 1376 - RNA, 98 nt, Influenza B virus
ugaaaugucauuggauaaagcacuauaucuuuuccuuuuaacuacuuuaacgggcuuuccuugauaaaguaagauguuugcuuucucccccgguuuua

SEQ ID NO: 1377 - RNA, 66 nt, Human Herpesvirus 5
ugaacgcuuucgucguguuuuucaugcagcuuuuacagaccaugacaagccugacgagagcguuca

SEQ ID NO: 1378 - RNA, 67 nt, Human Papillomavirus Type 6
ugaaucuaauuguuuaaaguguuuuagauauaggcuaaaugacaaacacagacauuuauuugauuua

SEQ ID NO: 1379 - RNA, 74 nt, Human Herpesvirus 5
ugacguggauacuaguaaaaaaagugcgucaaagcucuuagcgugugacguggauacuaguaaaagggacguca

SEQ ID NO: 1380 - RNA, 106 nt, Hepatitis GB virus C
ugacugcuuaauugugugcgagaggccuguaugcgacccuugcgaggcccugggccgaacccuggcuucguacggguacgcgugugagcccucguaucacgcuuca

SEQ ID NO: 1381 - RNA, 75 nt, Ovine Adenovirus 7
ugacuuucuggaaauggauuucugcaaauagaaggaucuaucuuuacaacaucauuuuuccaauuuaauguguca

SEQ ID NO: 1382 - RNA, 75 nt, Variola virus
ugagacauuagcuaauauuaguacuauauuguacuuuaccaaguaugauccgguauuaauguuuuuauuguuuua

SEQ ID NO: 1383 - RNA, 108 nt, Human Parainfluenza Virus 3
ugagacuaucuaguguaaaauuugcacguguuugugcuaucugugaggcuuccauccaagauaucucaucauuaccaaaugcccauguauauaucauugcuauucuua

SEQ ID NO: 1384 - RNA, 75 nt, Vaccinia virus
ugagagaguacugguuucauguuucuacuaaagaaggcaaacucguuauuauuuuuaugaacuuguacucuuuca

SEQ ID NO: 1385 - RNA, 89 nt, Transmissible Gastroenteritis Virus
ugauauuauaccuauugaacuugaagcuccauugcguuucuauguugacggcgcuaaugguccugaagucaaguauuuguauuuuguca

SEQ ID NO: 1386 - RNA, 63 nt, Human Herpesvirus 4
ugaucuugugacgcaugcggcgcaggcaggccguuaggcccaugagcuucugcagcacagaca

SEQ ID NO: 1387 - RNA, 56 nt, Human adenovirus C
ugcaaaauuuccaacguggagcucugcaaccuggucuccuaccuuggaauuuugca

SEQ ID NO: 1388 - RNA, 61 nt, Tick-borne Encephalitis Virus
ugcagccuugggagcuuggucagaugagcaaaacagaugggcaagugcaagagaggcugua

SEQ ID NO: 1389 - RNA, 66 nt, Human Adenovirus F
ugcaucggugccguaaccuucgcugcuuuacuuaaaaagccugugauuucauuuaccaccccagca

SEQ ID NO: 1390 - RNA, 65 nt, Human Herpesvirus 6
ugcaugaaaauaucauuaaauuguuuuacaaauuuuaaaugcaauuuaaaagaauuuuuguagca

SEQ ID NO: 1391 - RNA, 74 nt, Human Adenovirus D
ugcccagcagcagcaguagccccucugugcccaguuccaucaucgccgaggagaacugcuggcccugcuggccg

SEQ ID NO: 1392 - RNA, 64 nt, Human herpesvirus 3
ugccuacccucuuauuggaaauauagauauuacguuuaucaugccaaugggaguguuucaggca

SEQ ID NO: 1393 - RNA, 98 nt, Zaire Ebola Virus
ugcuaaacuaaugaugaagauuaaugcggaggucugauaagaauaaaccuuauuauucagauuaggccccaagaggcauucuucaucuccuuuuagca

SEQ ID NO: 1394 - RNA, 66 nt, Eastern equine encephalitis virus
ugcuguguguucguacgcugcggcgcccaaggcgccgcagacaaguaaaaaagccggcccacagca

SEQ ID NO: 1395 - RNA, 77 nt, Molluscum Contagiosum Virus
ugcuuguuuugugccccgggacaacaacgguuugccccgcgaagaacuguucgugccugcacgcacgagacaaagca

SEQ ID NO: 1396 - RNA, 73 nt, Human herpesvirus 7
uggaagagaccaucagagacauauugcaagacaguuuaaaaugcaacccuuccuuugauaauacucucuucca

SEQ ID NO: 1397 - RNA, 98 nt, Vaccinia virus
uggaagcuaccaaggcgaacaacaaagcgauuauuguuuuaccugaucccauaauauggaacaauaacacgcuucuguucucaucuaugauaguucua

SEQ ID NO: 1398 - RNA, 78 nt, Human herpesvirus 2
uggaaggcgaggggaugcaggaggaggaucgggacuccccaucuucugcccuuccauccuccguuuuuccgcuuucca

SEQ ID NO: 1399 - RNA, 98 nt, Vaccinia virus
gacgucagccauagcaucagcauccggcuuauccgccuccguugucauaaaccaacgaggaggaauaucgucggagcuguacaccauagcacuacguu

SEQ ID NO: 1400 - RNA, 82 nt, Vaccinia Virus
gacuagauccguuaguuuaauauccucagucaucuugucuagaauggcaaaucuaacugcggguuuaggcuuuaguuuaguu

SEQ ID NO: 1401 - RNA, 87 nt, Human herpesvirus 6B
gacuaguuugauuauguuucugaugugauagcgcccuccgcuguugagguaaauuauaugauauugaaaguuuugaguagacuaguu

SEQ ID NO: 1402 - RNA, 72 nt, Human herpesvirus 6B
gagacagaggcacgguaaggaucuagcguuuuauuuuauuucaucuuguuucuuuaccacgcgcucauucuc

SEQ ID NO: 1403 - RNA, 87 nt, Transmissible gastroenteritis virus
gagacgagcaaaucaaacuugucuucgauguaaagacuaguacaaucaccuguaacacugaagucugcgucggaaacguaaucucuc

SEQ ID NO: 1404 - RNA, 73 nt, Variola virus
gagagaguacaaguucauaaaaauaauaacgaguuugccuuuuuuaguagaaacaugaaaccaguacucucuu

SEQ ID NO: 1405 - RNA, 64 nt, Rat Cytomegalovirus
gagagguguaaaagauauauggcucgaucagcugauacaccgccaccguaaaaccacgccucuc

SEQ ID NO: 1406 - RNA, 58 nt, Zaire Ebola Virus
gagcaucuugcauuguguacuuaaugauuucaucuaagaacuguuggcaccgcggcuc

SEQ ID NO: 1407 - RNA, 69 nt, Human Herpesvirus 5
gagcggacacgguuaucguuccuggcggauauaaguauauaaacgcgaguuagccuuucccguccguuu

SEQ ID NO: 1408 - RNA, 68 nt, Human Herpesvirus 4
gaggagcugccgguugccauuuuucaagcugcuaaaccacgaguggcagcaggccuaagaagcuccuc

SEQ ID NO: 1409 - RNA, 67 nt, Human Herpesvirus 8
gaggcagaaggcggaugaucugaaaaaaaguacacccucgguguuucagcguaccgcaaacggccuu

SEQ ID NO: 1410 - RNA, 75 nt, Human herpesvirus 4
gaggcccggagcuccggccguguggccgaggaugacuaugacuucucgagccuggcuuuggagcucuugccccuc

SEQ ID NO: 1411 - RNA, 62 nt, Human Herpesvirus 5
gaggcgcugaucugcagcugcacggccguggagucgugcagccgcaugagacgugauaccuc

SEQ ID NO: 1412 - RNA, 60 nt, Rat Cytomegalovirus
gagggccggguguccgaagccgaccuccagcgguaccgggaggccgucgacaccgcccuc

SEQ ID NO: 1413 - RNA, 69 nt, Human herpesvirus 2
gaggggcggcagcagcgccgggucgcgcaucaggugauucagcucggccugagccugcccgcccagcuc

SEQ ID NO: 1414 - RNA, 61 nt, Rat Cytomegalovirus
gaggucguggaguacgguugauuucuuuuucuuaaaagaaguaaacugauucgauuuccuu

SEQ ID NO: 1415 - RNA, 99 nt, Human herpesvirus 6B
gaguuucucgaauccuuuaagauucuauaucgugaaccgcuauucuugcaaauagaugguuuuaucaaagauuucagaaaauggaucaaaggagaauuc

SEQ ID NO: 1416 - RNA, 113 nt, Human coronavirus 229E
gaguuuguuauuucacgcacaggacauuuuuauauuaauggcuaucgcuauuucacuuuagguaauguagaagccguuaauuucaaugucacuacugcagaaaccacugauuu

SEQ ID NO: 1417 - RNA, 62 nt, Human Herpesvirus 6B
gauaacuaccguucaugcuguaugcaucauuauaaucugacauauagacaucuguaauuauc

SEQ ID NO: 1418 - RNA, 71 nt, Measles virus
gauacuauagagaagcuagaggaauuggcagccaucuuaucgauggcucuacuccuuggcaaaauaggauc

SEQ ID NO: 1419 - RNA, 110 nt, Vaccinia virus
gauaguauacuucuuuccuguuuggacaaauaauuggaauaauucagaaauaaucguuucuuucuaaacauguuucuaguucuaauuauuucagaauagagaaaacuauc

SEQ ID NO: 1420 - RNA, 74 nt, Marburg Virus
gauauauguuaguaaaucaaaguaaaacuaagcaagaauuguuuauaaaacauuacuauuucuuuuauauaauc

SEQ ID NO: 1421 - RNA, 67 nt, Rat Cytomegalovirus
gaucauggacgaguaccgggacccggacaucgacgcccaagaugcgauccugccgccgccgaagauc

SEQ ID NO: 1422 - RNA, 93 nt, Variola virus
gaucguaaaucuguuucuaaagaacggagaauaucuauacauaccugauuagaauucauccguccuucagacaacaucucagacagucugguc

SEQ ID NO: 1423 - RNA, 83 nt, Rat Cytomegalovirus
gaucuagauucuauuguuaaaaggaaaaauguaucgauaauaaaccauuuuuacagaguucagcaucgguggaaucuuaaauc

SEQ ID NO: 1424 - RNA, 95 nt, Vaccinia Virus
gaucuauagucuucguaucuguuacgaaaaucaauauauucaggauuauuuucugaaucacuugauucgucacuaauauacauaacuauaugauc

SEQ ID NO: 1425 - RNA, 82 nt, Japanese Encephalitis Virus
gaucuucugcucuaucucaacaucagcuacuaggcacagagcgccgaaguauguagcugguggugaggaagaacacaggauc

SEQ ID NO: 1426 - RNA, 70 nt, Reston Ebola virus
gaugaagauucggacgaggccuuaaggaacuaaaguugaauuccugauuccuccgcaauuaaucuucauc

SEQ ID NO: 1427 - RNA, 93 nt, Rat Cytomegalovirus
gaugacggccgauaagacaaugaugacuacgacgaggaguaugauuaucacauaacaacaguacacucucgaagucaaaucggucgauucauu

SEQ ID NO: 1428 - RNA, 81 nt, Vaccinia Virus
gaugaugauuuaugaauugauuccggaagaucgcuaucguauuuugugguuccacaauucauuuccauacauguuauuguc

SEQ ID NO: 1429 - RNA, 98 nt, Human herpesvirus 8
gaugcgcggcacauugugucaaccagggcacccucccccaccgagugcuuuaaugcggagaggaaugguggccugguugacaccgcgugccggccauc

SEQ ID NO: 1430 - RNA, 91 nt, Human Adenovirus D
gauggacggccaggccuccgagcagcgcauccugcaacugcgcguccgucagcagcaggagcgugccgccaaggagcuccucgaugccauc

SEQ ID NO: 1431 - RNA, 62 nt, Human herpesvirus 7
gauggagaauucgucaaugaaaaaacucggucuccgaguaucuguugauguuguucucuauu

SEQ ID NO: 1432 - RNA, 72 nt, Vaccinia Virus
gauggcggcgucgucguuuuuugaucuuuauuaaauuuagagauaauauccugaacagcauugcucggcguc

SEQ ID NO: 1433 - RNA, 81 nt, Human Herpesvirus 6
gauggguuagugaaaaagguggcaucagaauccagaaacuugcuccuggauuugagagcuaauaugaacaaugacauuauu

SEQ ID NO: 1434 - RNA, 75 nt, Rat cytomegalovirus
gaugguaacgauaguggguauuuucgucguucucggggucguagaguguugauaucauccuuaucguuaaucauc

SEQ ID NO: 1435 - RNA, 96 nt, Vaccinia Virus
gaugucggauucuuugcguaucucagucuguggcguuugcuucguuuaaauaauauaucaaacauggagacgccugauauguaggcauucuucauu

SEQ ID NO: 1436 - RNA, 72 nt, Human Coronavirus 229E
gauguuucaaaaacuacucuaggcgguuuacacuuguugauuucacaaguacgucugaguaaaaugggcauc

SEQ ID NO: 1437 - RNA, 62 nt, Human herpesvirus 8
gauuagcguuguccguagcgggccccgugccuggacggggucugcccggaacaccgcagauc

SEQ ID NO: 1438 - RNA, 130 nt, Human parainfluenza virus 3
gauuuuggcaacucuaaugugggguacugcuuuucucuguucauugacuuugagugguaaugguucuauaugaccauuuucaaagaaugaugauucugggaauguguauauugcagaguuaguuauacuc

SEQ ID NO: 1439 - RNA, 92 nt, Marburg virus
gcaauuuaagguaaaguggauuaauuugucugaggauuuaagggaacaauuuaauaugucuucagaaucagaaucaacuauaaauuuauugc

SEQ ID NO: 1440 - RNA, 76 nt, Molluscum contagiosum virus
gcacggagacauacacgcaccucuucgugcggaugacucuguuccagcacgaaagcgcgaguguguuuugccuugc

SEQ ID NO: 1441 - RNA, 87 nt, Molluscum Contagiosum Virus
gcacguccgcgggcgcguaggccagcaccugagccagcaggucaaagugcucgccggccagcagcgugcgcgccagcgcgggcaugu

SEQ ID NO: 1442 - RNA, 94 nt, Human enterovirus E
gcagaauaaacaugccagaggcagcaaggccaugugaugaggagugcuacccuuguaauuuuaagagauguuguccacugguaugugguaaggc

SEQ ID NO: 1443 - RNA, 60 nt, Human Herpesvirus 4
gcagaugcucuugccuagauacaggaugucguccaugcugaggggagguggggugucugc

SEQ ID NO: 1444 - RNA, 59 nt, Molluscum contagiosum virus
gcagcagcagcgcuuucagguuuuugauucccauuaaaugaaagacgugcugcugcugc

SEQ ID NO: 1445 - RNA, 77 nt, Human herpesvirus 2
gcagcgacucggaggaggagaccgaggugggaaucucugacgacgaccuucaccgcgacuccaccuccgaggcgggc

SEQ ID NO: 1446 - RNA, 85 nt, Human Herpesvirus 8
gcagcugggguggaagucugaaaaagggaaaggggaggugagcagagugcccaguuagucuccgacccgccguccgcccuacugu

SEQ ID NO: 1447 - RNA, 86 nt, Rat Cytomegalovirus
gcaguacuuuucgguggauacgauacagcgaaaucaaaaagaugaguuuuuugcaucucgcauauugugugugcugguacgucugu

SEQ ID NO: 1448 - RNA, 75 nt, Human adenovirus E
gcaugaaucaagacauguaaaccguguguguauguuaaaugucuuuaauaaacagcacuuucauguuacacaugc

SEQ ID NO: 1449 - RNA, 81 nt, Variola virus
gcauuauuguguguugucuauuauuuguuuauagguucacucgaagaacuaauaaauuaccuuuacaagauaugguugugc

SEQ ID NO: 1450 - RNA, 77 nt, Vaccinia virus
gcauuuggucuauacaaauccauuaauguggaauauagauucuugguaauuaauagauuagguguagaucuagaugc

SEQ ID NO: 1451 - RNA, 88 nt, Molluscum contagiosum virus
gccaacgugcgaagucauggccccuugucuaguuggagauauauuuucauuuugaacucuugcgagcggcaaccagcaaguacguggc

SEQ ID NO: 1452 - RNA, 70 nt, Human Herpesvirus 8
gccacagaggucucugcuaguuugggccagcgaaacgggcuaucccgguccgguggaggcagucugucgc

SEQ ID NO: 1453 - RNA, 71 nt, Hepatitis GB virus A
gccagaugcugcgugcugguggcgaugcacuucgcaagaggugcgcugccccuagucaugcuaguguuggc

SEQ ID NO: 1454 - RNA, 83 nt, Variola virus
gccauagucauagcauccggcuuauccgccucaguugucauaaaccaacgaggaggaauaucgucggagcuguacaccauagc

SEQ ID NO: 1455 - RNA, 102 nt, Human Adenovirus E
gccauccugaauccccacuggcucccgccgccgggguucuacacgggcgaguacgacaugcccgaccccaaugacggguuccugugggacgauguggacagc

SEQ ID NO: 1456 - RNA, 70 nt, Molluscum contagiosum virus
gccauuuaaaaagcggaaaaaugcacgcccgggcauggcucugcgucuggcuuuucguuuuuugcguggc

SEQ ID NO: 1457 - RNA, 62 nt, Human Herpesvirus 2
gcccccgucugucgccucucccuuuuuucccccccucaaagaacgugguguugggcgccggc

SEQ ID NO: 1458 - RNA, 90 nt, Human herpesvirus 3
gccccuucuuguuuuuguauuugggcgauaaauuggauguuuuuuaauucuacgucgcuuaacgcuuauuacaauaacaauaaccauggc

SEQ ID NO: 1459 - RNA, 61 nt, Human Herpesvirus 4
gcccgacccccgggcgcccccaaacuuuguccagauguccagggguccccgagggugaggc

SEQ ID NO: 1460 - RNA, 85 nt, SARS coronavirus
gcccugggugguucuauagcuguaaagauaacagagcauucuuggaaugcugaccuuuacaagcuuaugggccauuucucauggu

SEQ ID NO: 1461 - RNA, 75 nt, Vaccinia virus
gccgaucucugaauggauacuaguuuucuaaguucuaaugugauucucugaaaauguaaauccaauuccuccggc

SEQ ID NO: 1462 - RNA, 92 nt, Human herpesvirus 3
gccgcauggcuccauccauugugaugaaaaccggcuuauuuaauacauaacacgaacaagcugugacaucgcuaugugcuaaaacacgcggc

SEQ ID NO: 1463 - RNA, 65 nt, Human Herpesvirus 1
gccgcccugcgacacaaucacccguccgugguuucgaaucuacacgacaggcccgcagacgcggc

SEQ ID NO: 1464 - RNA, 73 nt, Human Herpesvirus 1
gccgccucccccgagucuucggaaugucuuggcggccgucaagaacuguuaucccgaggcacggaugagcggc

SEQ ID NO: 1465 - RNA, 82 nt, Rat Cytomegalovirus
gccgcggcgcuccaugaggagccagagcccgccggggaaggcggccccgugccgcuccuccuccuccuggaggcgccgccgc

SEQ ID NO: 1466 - RNA, 105 nt, Human herpesvirus 8
gccggcgugggcgccgcgcgcgugcucucucagucgcgccuagcugcuuccaacagacaaaagcggggcguuagugagggagugcgcgcgcugcgcugacuuggc

SEQ ID NO: 1467 - RNA, 87 nt, Human herpesvirus 5
gccggggcugugaaccgcucaguggcucggaccgccggcuguuucugcgcaccgguccgaacgcuaggucgguucucagaccgaggc

SEQ ID NO: 1468 - RNA, 111 nt, Rat cytomegalovirus
gccgguacugacaucuaacgugacaccguuucucgguccgauagugguuccauuuaucgcguggagcaaauguggacccgagggaccugucucgccaaccaagcugccggc

SEQ ID NO: 1469 - RNA, 74 nt, Variola virus
gccguagugucaucuccagaggaaauaucaucacaacuuaaugaagauuuauuuccagacgaugauucuccggc

SEQ ID NO: 1470 - RNA, 69 nt, Rat Cytomegalovirus
gccgucaccgugucgcagcucuuccccggccuccuccugcuggccuacugcgagagccaccgcgccggc

SEQ ID NO: 1471 - RNA, 63 nt, Human herpesvirus 1
gccgucgagugccuggccgccugccgcgggauccuggaggcgcuggccgagggcuucgacggc

SEQ ID NO: 1472 - RNA, 75 nt, Human Herpesvirus 5
gccgucgauaucggaacugacgaaagagcucaugugccgcacgcuguucuugacguaguuuugaaacuccacggc

SEQ ID NO: 1473 - RNA, 109 nt, Human herpesvirus 6B
gccguguauguuuuaaugucauugaaaauauuuagaggugcuucgauuuuagguaaaauuucggucgccugccaauuuuccauguuucggcguuaugcagcacaccggu

SEQ ID NO: 1474 - RNA, 88 nt, Human Herpesvirus 5
gccugcgucgccuaugcuucgcgcgucaccacgacaccuuccuugaagugguagacgucuucggcaugcggcaaaucgucacgcaggc

SEQ ID NO: 1475 - RNA, 65 nt, Human Herpesvirus 5
gccugcugcgucucauggaucagaaguugcggacccaaaauuugguccaagugguuuagcgaggc

SEQ ID NO: 1476 - RNA, 85 nt, Human enterovirus A
gccuugaaguggacuuugagcaggcuuuauucuccaaguauguagggaacacacugcaugagccugacgaguacaucaaagaggc

SEQ ID NO: 1477 - RNA, 63 nt, Human Herpesvirus 5
gcgccuggacguugcacgcggcggguaccgaaagcggcgcuaacgcggcaacggccacggcgc

SEQ ID NO: 1478 - RNA, 113 nt, Molluscum contagiosum virus
gcgcgacgcgcgcgcauacgacgaggaggagcgccgcaaugugucggccgcgcucagcgcucaccgcccgcgcgcugggcgcugcggcauccucuucguagcgucggucgcgc

SEQ ID NO: 1479 - RNA, 65 nt, Molluscum contagiosum virus
gcgcgagggugcuggcgagaagucguacuccgacuucaucucgcgcaacaagagcaucuucgugu

SEQ ID NO: 1480 - RNA, 131 nt, Human herpesvirus 6
gcgcgauuagguuagauucggaaaccauagcuguccaugagauuuucaauccggaguuaaguaaacugcuuaacuugcacucgaaaacagucuacauguccgaccuaugcgcuuuuauuucugguuguguu

SEQ ID NO: 1481 - RNA, 65 nt, Human Herpesvirus 4
gcgcgcauaauggcggaccuaggccuaaaacccccaggaagcgggucuaugguuggcugcgcugc

SEQ ID NO: 1482 - RNA, 76 nt, Molluscum contagiosum virus
gcgcgcgcgcgcuacacugugcucacguacucgggggccacacccgugcgcgugcacguguacgcgggcgcugcgc

SEQ ID NO: 1483 - RNA, 79 nt, Molluscum contagiosum virus
gcgcgggcaugucgcgcgcguagcgcucggcgaagcggcagauguucugcaggcgcucgcgugugagcgugugcugcgc

SEQ ID NO: 1484 - RNA, 87 nt, Molluscum Contagiosum Virus
gcgcguauuuuuucuucacuguugucggcguccucuagcgagcgcacgaagauugccgcccaccgaccuguucgaaagagugcgcgc

SEQ ID NO: 1485 - RNA, 72 nt, Molluscum contagiosum virus
gcgcgugugcucacgacggagagcgcgcacaggccggaaccggcgcgugcguucaagacggagcgcgcgugc

SEQ ID NO: 1486 - RNA, 104 nt, Human herpesvirus 2
gcggagggccggagaauggaaggcgaggggaugcaggaggaggaucgggacuccccaucuucugcccuuccauccuccguuuuuccgcuuuccaccgccgccgc

SEQ ID NO: 1487 - RNA, 96 nt, Hepatitis GB Virus C
gcggccugccucguguggcaccugugugagggacugcuggcccgagaccgggucgguacguuucccauuccacagguguggcgcgggaccgaggcu

SEQ ID NO: 1488 - RNA, 83 nt, Molluscum Contagiosum Virus
gcggcgagacgaaguccagcacgcgcgcgugcgggaagcgcaugaccagcgucaggcacgcgcgcgugucuuccagccgcugc

SEQ ID NO: 1489 - RNA, 94 nt, Hepatitis GB Virus A
gcggcgccgugcuacaggcggcaaggggaaaaauccuucgggugaccccggguggcauucccucccuuagcagcaugaguguggugguagcugc

SEQ ID NO: 1490 - RNA, 59 nt, Molluscum contagiosum virus
gcggcgggcguggaucguaacgccgcgcguagucggcguuguagcgccgcgcccugcgc

SEQ ID NO: 1491 - RNA, 85 nt, Human herpesvirus 3
gcggguuuuuguaaagggguuguuaucaacgacauacauuagaguguuuaacaaccauaaaacucccucauauaaaaaccgacgc

SEQ ID NO: 1492 - RNA, 131 nt, Human Adenovirus A
gcggugagagcggcuuguucuagcaguauuugguuacgccgggcucguaccccauucacccuggaaaucaugugggguccggcgcuuaaccaauucauuuugcuagaauagucuugagccgcgccggccgc

SEQ ID NO: 1493 - RNA, 97 nt, Molluscum contagiosum virus
gcgguugagcuccucggcgcgcgcaccgccgcgcgcguaaaucuucgcguacucuaccaugcgcagguagcgcgugcuggccagcucgaaaagccgc

SEQ ID NO: 1494 - RNA, 129 nt, Variola Virus
gcguaucaaauguaaaugacgcggaacacauaucucagauaacuaaugauguaucuacacaaacaugggaaaagaaaucagaguuagauagauacauggaaauguauccucgucauagauauaguaagc

SEQ ID NO: 1495 - RNA, 81 nt, Vaccinia Virus
gcgucaaauauuucccguuuaauaucgcauuugucaagauaauaauagagugugguauguucacgauaaguauaauaacgc

SEQ ID NO: 1496 - RNA, 65 nt, Human Adenovirus D
gcgucugcagcauugucugccuggucaucaccuuccugcagcucaucgacuggugcugcgcgcgc

SEQ ID NO: 1497 - RNA, 78 nt, Human Herpesvirus 5
gcgugaugaugacauucaucauguauuuccauucacacauaccuuuugugcauacgguuuauauaugaccauccacgc

SEQ ID NO: 1498 - RNA, 58 nt, Human adenovirus F
gcguguuugucagagguaggcauuuuauauauauucgccugcuguaugaugggcacgc

SEQ ID NO: 1499 - RNA, 87 nt, Adeno-associated virus 1
gcuacaaaguuugcuucauucaucacccaauacuccacaggacaagugaguguggaaauugaaugggagcugcagaaagaaaacagc

SEQ ID NO: 1500 - RNA, 85 nt, Molluscum contagiosum virus
gcuagcgcgugugugcgaggacgauugcuggcucagcgggcacuggacuccgcgguugcaaacugucuugcaaacgaacguuagc

SEQ ID NO: 1501 - RNA, 89 nt, Zaire Ebola virus
gcucaacguuuacaagaugaagguuaaugaaaaaacacucucucagccgagguagguuuuucuuaaucuucaucacuuuugguuugggu

SEQ ID NO: 1502 - RNA, 71 nt, Molluscum Contagiosum Virus
gcucgcggugcagcugccgcagagccgcgaaagcgucgugcuccacgcgcagcuucucugcgaucgcgggc

SEQ ID NO: 1503 - RNA, 85 nt, Human parainfluenza virus 1 strain Washington/1964
gcucucaucuuauaugucaucuuggcaaagagucgacccucuuguuuaauuucuuuuucuuugagacuguaagauauguugaagc

SEQ ID NO: 1504 - RNA, 65 nt, Vaccinia Virus
gcucuugaaaccaagguuuuccaaccggacucauugucgaucggugagaagucuuuuucauuagc

SEQ ID NO: 1505 - RNA, 127 nt, Colorado tick fever virus
gcugaacguccaggauguaagaucgaucaggcgcuguuugagguccgacgagucgggauggaggauguuagagaacuugagaaagugcuugaugagcuaacacgcuugaaccaccuggagcggaagu

SEQ ID NO: 1506 - RNA, 96 nt, Rat Cytomegalovirus
gcugaggaggccggagucgucggccugcucgugcggcacgccgaagacgaaggugaagcccucgggccaggccaggcgacagcggaacuccucggc

SEQ ID NO: 1507 - RNA, 62 nt, Human Herpesvirus 5
gcugagggagcucacccaacaccgucgccacggaguccggcggaucgcggcccucccaaagc

SEQ ID NO: 1508 - RNA, 72 nt, West Nile Virus
gcugcgaggugauccacguaagcccucagaaccgucucggaaggaggaccccacgugcuuuagccucaaagc

SEQ ID NO: 1509 - RNA, 100 nt, Rat Cytomegalovirus
gcugcguuccgucccaauagauaugugcacuggauuuaacgucgucguugauaucauagacaacuugacauuuucugagacacgggacgaaauggcacgc

SEQ ID NO: 1510 - RNA, 75 nt, Human Herpesvirus 1
gcugcucuaaaaauuuaagggcccuacgguccacagacccgccuucccgggggggcccuuggagcgaccggcagc

SEQ ID NO: 1511 - RNA, 93 nt, Vaccinia virus
gcuggauuauguagcaauauagauguaucuaaauuuuuaacaaauuguaacggauauguaguggagaaauaugauaaaucuacaaccgccggc

SEQ ID NO: 1512 - RNA, 64 nt, Molluscum Contagiosum Virus
gcuggcacggccggcgccgcgcaagaugacgacgggagagguugcgcggggcaggcagugccgc

SEQ ID NO: 1513 - RNA, 97 nt, Hepatitis A Virus
gcugguaauguuguuauucaaucuuuggaugugggauuccaggauguuguucugaugaagguuccuacaauuccuaaguuuagagauauuacucagc

SEQ ID NO: 1514 - RNA, 60 nt, Human Herpesvirus 6B
gcuggucccauucucuuggcacagauuccauuuuccaucaccaaaaacaaaacaaccagc

SEQ ID NO: 1515 - RNA, 62 nt, Human herpesvirus 2
gcuuacggcaacaaagggccuccgauagccuccgaggugcggagccucuuugggccgugggu

SEQ ID NO: 1516 - RNA, 58 nt, Adeno-associated virus 1
gcuucauucaucacccaauacuccacaggacaagugaguguggaaauugaaugggagc

SEQ ID NO: 1517 - RNA, 61 nt, Japanese encephalitis virus
gcuucgauguuaaucaugcggacguccaauguugguuugucguuugccaugauugucaagc

SEQ ID NO: 1518 - RNA, 96 nt, Measles virus
gcuucucuauaguaucuuuguuagguaaggucucuauaucugaauggauaaaccccacacuagagguagggauauuacugacuaugaaauugaagc

SEQ ID NO: 1519 - RNA, 105 nt, Transmissible Gastroenteritis Virus
gcuugaagucuuuaaauauuugcugguuuuauuuaugugucuuagaaguacuaagaugccuaaaguuaaagucaaaccaccucuugcauuuaaagauuuuggugc

SEQ ID NO: 1520 - RNA, 79 nt, Human herpesvirus 4
gcuuucaccgguggaacucgugacagaugucuacgccacccuaggcaucguggagaucaucgacgagcucuaccggagc

SEQ ID NO: 1521 - RNA, 98 nt, Vaccinia Virus
gcuuugcaaauuguauauuauugacaucgaccgcguaauauaguagaguuuuauucucauuaucgaucauaucuauaucauccauguacuugcuuagu

SEQ ID NO: 1522 - RNA, 67 nt, Human herpesvirus 5
gcuuuuuacagacacugcuacgcaaggcgccgccguacuuuguggugcagacgcugguagaaaacgc

SEQ ID NO: 1523 - RNA, 67 nt, Rat Cytomegalovirus
ggaaacgggacacaauggacuuugcaacguauaugucuuugauuuacugcauauccgucuuuuaucc

SEQ ID NO: 1524 - RNA, 95 nt, Variola virus
ggaaauuagugcucuguggaauaaaauaaaacaaggauucguuuacucucagaaacagaaacuugcaaagaagacauuggcgccguuuaauuucc

SEQ ID NO: 1525 - RNA, 95 nt, Vaccinia virus
ggaaauuagugcucuguggaauaaaauaaaacagggauucguuuacucucagaaacagaaacuugcaaaaaagacauuggcgccguuuaauuucc

SEQ ID NO: 1526 - RNA, 54 nt, Human Adenovirus A
ggaacaggacaaaugcaauauaaaguuaauauaguauuuccuugaucuuuuucc

SEQ ID NO: 1527 - RNA, 111 nt, Human herpesvirus 6B
ggaacguaugcaaaaguaaguaugauuaguccuuauuagaucuaucuuauuuaaaacuauaugggaguuuuucuaaguacuaagaaauauucauacuuacagcuaccaucc

SEQ ID NO: 1528 - RNA, 66 nt, Variola Virus
ggaagacacauuauuugacgacgaguuauacucuauuauagaacgcucuuucgaugauaauuuucc

SEQ ID NO: 1529 - RNA, 89 nt, Vaccinia virus
ggaagcgcuaacauggauuggagaucacuaacucaggucaaagaauuggguauugcgaucuucaauaauaggaacuuggcagcggaucu

SEQ ID NO: 1530 - RNA, 103 nt, Respiratory syncytial virus
ggaaggauaaguguuuaguuuauaguaaguuaaccaucuuaaggguaaaacaauagcauuccuuaaaguaggccaucuguuguaauuauuuacaaauccuuuu

SEQ ID NO: 1531 - RNA, 81 nt, Human herpesvirus 5
ggaaugguaaagacaucgucacaccuaucauaaagaaugcaacgcuuucaggauagguguggcgaaagccuccuccguucc

SEQ ID NO: 1532 - RNA, 122 nt, Hepatitis A Virus
ggaauuuugcuuuauguaauacaacaauugaaucaggaugaacauucucacauaauugguuuguugagagucaugaauuaugcagauauugguuguucaguuauuucauguggcaaaguuuu

SEQ ID NO: 1533 - RNA, 64 nt, Human Astrovirus
ggacagguuugacaucauagacacuucugaugaagaagaugaaaaugagacagaccguguaacc

SEQ ID NO: 1534 - RNA, 62 nt, Human Herpesvirus 4
ggaccccagccccgccgaucccucccccagggcguacccggcuugccugguucuggggcucc

SEQ ID NO: 1535 - RNA, 76 nt, Tick-borne encephalitis virus
ggacgcacccugguggugccgugccgagaccaagaugaacucguugggagggcgcgcaucucaccggggugcggcu

SEQ ID NO: 1536 - RNA, 75 nt, Barmah Forest virus
ggacugugccgugccucugucgauacgccaugacaccagagagaguguaccgacuuaaaugcacgaacacuaccc

SEQ ID NO: 1537 - RNA, 130 nt, Molluscum Contagiosum Virus
ggacuugcgcagauccucggguccgaucucagucucgucgagagagcgcccgcugcgcuugacaauguagagcagcgccuugauguguuccagcgcgaugagguccgcguagagcgacuuggacaggucc

SEQ ID NO: 1538 - RNA, 72 nt, Vaccinia virus
ggagaaguugauaaugccuuuauagcggggagacgaucauguacuaacuuccaugcaccaucauacuuuucc

SEQ ID NO: 1539 - RNA, 83 nt, Human herpesvirus 2
ggagaauggaaggcgaggggaugcaggaggaggaucgggacuccccaucuucugcccuuccauccuccguuuuuccgcuuucc

SEQ ID NO: 1540 - RNA, 77 nt, Human Herpesvirus 7
ggagcaagccauuuuaaaaucuccguuacaguugaaugguccaagucuauucgaagugcagauuuuccgcuuucucu

SEQ ID NO: 1541 - RNA, 59 nt, Vaccinia virus
ggaggacacuuugcacugaauggcucuccuagaguggccauaucauucauugugccucc

SEQ ID NO: 1542 - RNA, 79 nt, Human herpesvirus 4
ggagggggaccugaccugcaugcucuccaggccaucagagaaggccacuacagcauccagguccuggcggaucuccucc

SEQ ID NO: 1543 - RNA, 96 nt, Vaccinia Virus
ggagucauaaaauauuuuuauucucuuucucucuucgauggucucacaaaaauauuaaaccucuuucugauggagucguaaaaaaguuuuaucucu

SEQ ID NO: 1544 - RNA, 76 nt, Japanese encephalitis virus
ggaguggugaagcucaugagcaaaccuugggacgccauugccaacgucaccaccauggccaugacugacaccaccc

SEQ ID NO: 1545 - RNA, 60 nt, Hepatitis GB virus B
ggaguuguuauacucuagagugauaggccugguccacuuuggacuguaacaaaugacuuc

SEQ ID NO: 1546 - RNA, 131 nt, Human Coronavirus 229E
ggaguuucugaaauuguuaauacugucgcuggcauuccaucuaauguguaucuuguugguaaaacuuuaauuuuuacacuacaagcugcuuuugguaaugcugguguuuguuaugacauuuuuggagucac

SEQ ID NO: 1547 - RNA, 69 nt, Human Herpesvirus 7
ggauauccuguaguuuuugaugguuuuuugguugaugacuuacacaagaucaaaaguuacugguaaucc

SEQ ID NO: 1548 - RNA, 105 nt, Vaccinia Virus
ggauauucuugauacauucuuuuuauacagugaauugcauacauccgauacagcauuauccauauauggcaaaucugcaaucacuguauuguuuuuagauugucc

SEQ ID NO: 1549 - RNA, 128 nt, Measles virus
ggaucuccaauauguuuuggcaaccuacgauacuuccaggguugaacaugcugugguuuauuauguuuacagcccaagccgcucauuuucuuacuuuuauccuuuuagguugccuauaaagggggucc

SEQ ID NO: 1550 - RNA, 79 nt, Variola virus
ggcaaaucuuaucauuggucgguguuuggucuugcuuugugacuuugauaauaacaucgauucccauauaauguuuguu

SEQ ID NO: 1551 - RNA, 69 nt, Human Herpesvirus 5
ggcaugucggccgacaaaucgcagcugucuucgccgccgcagcuguagcaguuaacgucgccggccucc

SEQ ID NO: 1552 - RNA, 64 nt, Human Adenovirus A
ggcauuaccucuguacucaacgugucaguuucuauaaacgaugaggauuugauguuuaaucgcc

SEQ ID NO: 1553 - RNA, 71 nt, Human herpesvirus 5
ggccaagaucagcggcgugaugguaagcacggccaacguuaugcagaucaucaugucgcugcucucaagcc

SEQ ID NO: 1554 - RNA, 64 nt, Human Herpesvirus 8
ggccacaugugcgguaugggggucgacuaucaaaacguggcccugacgcugacuuacaacggcc

SEQ ID NO: 1555 - RNA, 69 nt, Human herpesvirus 4
ggcccggagcuccggccguguggccgaggaugacuaugacuucucgagccuggcuuuggagcucuugcc

SEQ ID NO: 1556 - RNA, 97 nt, Human herpesvirus 8
ggcccugcuaucugacuaauuugcaugcgcuaauccuuuuaugugcauaaauuauguagaugaggagucgcgcaugcgcagaaaaauucagagcgcc

SEQ ID NO: 1557 - RNA, 20 nt, Vaccinia Virus
uacucuuguaguggugauac

SEQ ID NO: 1558 - RNA, 22 nt, Human respiratory syncytial virus
uuagauauauugaaaguauuaa

SEQ ID NO: 1559 - RNA, 22 nt, Yellow Fever Virus
ucugcuuuuccuccagaggucu

SEQ ID NO: 1560 - RNA, 22 nt, Human herpesvirus 6B
ggggugcguuuggguuaaauua

SEQ ID NO: 1561 - RNA, 22 nt, Human herpesvirus 7
uguacugaauugcauuuugucu

SEQ ID NO: 1562 - RNA, 22 nt, Human Adenovirus E
ucgccggcggcgcacgggcaga

SEQ ID NO: 1563 - RNA, 18 nt, Hepatitis GB Virus C
gucauccugguagccacu

SEQ ID NO: 1564 - RNA, 22 nt, Human herpesvirus 5
cucgguuucgcuguagcugugg

SEQ ID NO: 1565 - RNA, 22 nt, Human Immunodeficiency Virus 1
caaugaguccgagaucuucaga

SEQ ID NO: 1566 - RNA, 22 nt, Rat Cytomegalovirus
uccgucaccgggagggucguug

SEQ ID NO: 1567 - RNA, 22 nt, Human Herpesvirus 5
ucaucauguauuuccauucaca

SEQ ID NO: 1568 - RNA, 22 nt, Human coronavirus 229E
gcugaucaacaaguagauaggc

SEQ ID NO: 1569 - RNA, 22 nt, Vaccinia Virus
cgaggaggaauaucgucggagc

SEQ ID NO: 1570 - RNA, 22 nt, Vaccinia Virus
agagaaagagaauaaaaauauu

SEQ ID NO: 1571 - RNA, 22 nt, Human Herpesvirus 5
gcgcugaucugcagcugcacgg

SEQ ID NO: 1572 - RNA, 22 nt, Human herpesvirus 7
uuagugauaugugaaaaugaac

SEQ ID NO: 1573 - RNA, 22 nt, Transmissible gastroenteritis virus
agauuauagaaaaacugucauu

SEQ ID NO: 1574 - RNA, 22 nt, Vaccinia Virus
auccgcguccgcagagcacaua

SEQ ID NO: 1575 - RNA, 22 nt, Molluscum contagiosum virus
uggcgcacgcccuaggcgcgcu

SEQ ID NO: 1576 - RNA, 22 nt, Human Adenovirus B
cgaggaacugcuugauauggac

SEQ ID NO: 1577 - RNA, 22 nt, Human herpesvirus 6
ugaaaacgccacggaaaucgau

SEQ ID NO: 1578 - RNA, 21 nt, Vaccinia Virus
cuaaucuauuaauuaccaaga

SEQ ID NO: 1579 - RNA, 21 nt, Molluscum Contagiosum Virus
gcgcggggcaggcagugccgc

SEQ ID NO: 1580 - RNA, 22 nt, Human Immunodeficiency Virus 1
acaauacuuggcacuagcagca

SEQ ID NO: 1581 - RNA, 22 nt, Human coronavirus OC43
agagagugccuuaucucgacuu

SEQ ID NO: 1582 - RNA, 20 nt, Human Herpesvirus 4
gagcuucugcagcacagaca

SEQ ID NO: 1583 - RNA, 22 nt, Vaccinia Virus
uuauguguuauaagguacuuuu

SEQ ID NO: 1584 - RNA, 22 nt, Dengue Virus
uggcguguauggaccagguugu

SEQ ID NO: 1585 - RNA, 22 nt, Human Adenovirus D
uugcgggccgagaccgugagcu

SEQ ID NO: 1586 - RNA, 22 nt, Rat Cytomegalovirus
ggcgcccuacgucggacuaugg

SEQ ID NO: 1587 - RNA, 22 nt, Human Adenovirus D
gagcagcgcauccugcaacugc

SEQ ID NO: 1588 - RNA, 22 nt, Human Herpesvirus 5
cucaugaucugacuaccucuga

SEQ ID NO: 1589 - RNA, 22 nt, Human Herpesvirus 7
ucuuuuguccaauagugucgaa

SEQ ID NO: 1590 - RNA, 22 nt, Vaccinia virus
ugcuuuagugaaauuuuaacuu

SEQ ID NO: 1591 - RNA, 22 nt, Marburg Virus
acuauggugaugcgagggcauu

SEQ ID NO: 1592 - RNA, 20 nt, Human Herpesvirus 6B
cgguuucccccauuagcaga

SEQ ID NO: 1593 - RNA, 22 nt, Human herpesvirus 8
uugcaugcgcuaauccuuuuau

SEQ ID NO: 1594 - RNA, 22 nt, Vaccinia virus
uuuguguaauggaugucaugaa

SEQ ID NO: 1595 - RNA, 22 nt, Human Herpesvirus 3
uuggaucauuggaucacuuaaa

SEQ ID NO: 1596 - RNA, 22 nt, Vaccinia virus
uuuugcguuucacaaacacagg

SEQ ID NO: 1597 - RNA, 22 nt, Human Herpesvirus 2
caucucauuagcgcccggcgcg

SEQ ID NO: 1598 - RNA, 22 nt, Human herpesvirus 6B
ugggagagaacagagcuggucc

SEQ ID NO: 1599 - RNA, 20 nt, Human adenovirus E
acagcgacuacuccggacuu

SEQ ID NO: 1600 - RNA, 22 nt, Variola Virus
ucuauucugaaucauggagcag

SEQ ID NO: 1601 - RNA, 22 nt, Human Herpesvirus 4
aggcuguucugugaauaguaca

SEQ ID NO: 1602 - RNA, 22 nt, Human herpesvirus 8
ugaugguuuucgggcuguugag

SEQ ID NO: 1603 - RNA, 22 nt, Human Herpesvirus 8
uggaagucugaaaaagggaaag

SEQ ID NO: 1604 - RNA, 22 nt, Barmah Forest virus
ugugccgugccucugucgauac

SEQ ID NO: 1605 - RNA, 22 nt, Human herpesvirus 4
aagcccgcuccuaccugcaaua

SEQ ID NO: 1606 - RNA, 22 nt, Human herpesvirus 7
acacugaaacauaguacaaggg

SEQ ID NO: 1607 - RNA, 22 nt, Human Herpesvirus 5
ucgucucuccaaggaacacugg

SEQ ID NO: 1608 - RNA, 22 nt, Variola Virus
uauacaguauaaugauuuaguu

SEQ ID NO: 1609 - RNA, 22 nt, Human adenovirus B
uuacaaagugcgguacacccug

SEQ ID NO: 1610 - RNA, 22 nt, Human Herpesvirus 5
uacuaguaaaaaaagugcguca

SEQ ID NO: 1611 - RNA, 22 nt, Human herpesvirus 5
uugaaaugaaaggauggaaaca

SEQ ID NO: 1612 - RNA, 22 nt, Human Herpesvirus 5
uguggucccccgagacgagagc

SEQ ID NO: 1613 - RNA, 22 nt, Human Herpesvirus 8
uuuuugauuguagcggaaaaau

SEQ ID NO: 1614 - RNA, 22 nt, Human Herpesvirus 5
cuccagcaacaaggugcaacac

SEQ ID NO: 1615 - RNA, 22 nt, Vaccinia Virus
uuccuuuucguugaucucucau

SEQ ID NO: 1616 - RNA, 22 nt, Zaire Ebola virus
gguuuuaucaacaaaaucauga

SEQ ID NO: 1617 - RNA, 22 nt, Human Herpesvirus 5
uuuccauacagagguuguuguu

SEQ ID NO: 1618 - RNA, 22 nt, Vaccinia Virus
agauaacauaccacaccauuuu

SEQ ID NO: 1619 - RNA, 22 nt, Human Herpesvirus 3
ugaccgguaauaacaguaucca

SEQ ID NO: 1620 - RNA, 22 nt, Human Herpesvirus 2
gggggggugggccucgucccca

SEQ ID NO: 1621 - RNA, 22 nt, Vaccinia Virus
ugaauagaguuaucgauucaga

SEQ ID NO: 1622 - RNA, 22 nt, SARS coronavirus
ugugacucuucuuccugcggcu

SEQ ID NO: 1623 - RNA, 22 nt, Human herpesvirus 1
ucugguaggaacgaggggccgu

SEQ ID NO: 1624 - RNA, 22 nt, Rat cytomegalovirus
aacgaggucguuauauccgugu

SEQ ID NO: 1625 - RNA, 22 nt, Molluscum contagiosum virus
ugaucucggccagugccuugac

SEQ ID NO: 1626 - RNA, 22 nt, Human Herpesvirus 2
ccuucgcccgugagggugcgug

SEQ ID NO: 1627 - RNA, 22 nt, Vaccinia Virus
ucgaaaacaaaaauagauauua

SEQ ID NO: 1628 - RNA, 19 nt, Hepatitis GB Virus A
cguuaaacugagacguccc

SEQ ID NO: 1629 - RNA, 22 nt, Human herpesvirus 8
ugcucucucagucgcgccuagc

SEQ ID NO: 1630 - RNA, 22 nt, Human herpesvirus 4
acugacgaugaaucuucggugg

SEQ ID NO: 1631 - RNA, 22 nt, Zaire Ebola virus
uugcaacugcaaauucaacgaa

SEQ ID NO: 1632 - RNA, 22 nt, Human Herpesvirus 5
ucucgggccaaacgccgucgua

SEQ ID NO: 1633 - RNA, 22 nt, Equine rhinovirus 3
uucuugacguacggugaugacg

SEQ ID NO: 1634 - RNA, 22 nt, Variola virus
uuuagauuuucccucggugacu

SEQ ID NO: 1635 - RNA, 22 nt, Vaccinia Virus
cguaauuaucaaauagauaugu

SEQ ID NO: 1636 - RNA, 22 nt, Human Papillomavirus Type 6
ugcacuauagagcuguacaagg

SEQ ID NO: 1637 - RNA, 22 nt, Human Herpesvirus 5
gcguuucgguccacguguccug

SEQ ID NO: 1638 - RNA, 22 nt, Measles virus
uuguuagguaaggucucuauau

SEQ ID NO: 1639 - RNA, 21 nt, Human Herpesvirus 4
cuugccugguucuggggcucc

SEQ ID NO: 1640 - RNA, 22 nt, Human enterovirus A
agcaggcuuuauucuccaagua

SEQ ID NO: 1641 - RNA, 22 nt, Barmah Forest virus
auaagauuaguuuguuauguaa

SEQ ID NO: 1642 - RNA, 22 nt, Human Herpesvirus 5
ugagguagaagacaaacucgcg

SEQ ID NO: 1643 - RNA, 22 nt, Human Herpesvirus 5
uaacgaacugucucaacgacug

SEQ ID NO: 1644 - RNA, 22 nt, Human astrovirus
aguaaaagugacaacugguuuu

SEQ ID NO: 1645 - RNA, 20 nt, Human adenovirus F
uuagagcgaaagggguggcu

SEQ ID NO: 1646 - RNA, 22 nt, Human Herpesvirus 6
ucuuacgcucauggguacuucg

SEQ ID NO: 1647 - RNA, 22 nt, Molluscum contagiosum virus
ggcugcagaaccgcgcgcugua

SEQ ID NO: 1648 - RNA, 22 nt, Human Herpesvirus 1
ccgguccagaucgcggucgccc

SEQ ID NO: 1649 - RNA, 22 nt, Rat Cytomegalovirus
uggcgaccggacgccccgcugc

SEQ ID NO: 1650 - RNA, 22 nt, Reston Ebola Virus
uaaggugauuauauuuuaguau

SEQ ID NO: 1651 - RNA, 22 nt, Human adenovirus B
ucuugguaucagaaaaaaacag

SEQ ID NO: 1652 - RNA, 22 nt, Tick-borne encephalitis virus
agagcguggugacagaccuuuc

SEQ ID NO: 1653 - RNA, 22 nt, Vaccinia Virus
aauuucuuuucacgaugcaucu

SEQ ID NO: 1654 - RNA, 22 nt, Vaccinia Virus
gaugaccauauauuuauuuuca

SEQ ID NO: 1655 - RNA, 22 nt, Human herpesvirus 7
aauuaguuuugucuguugcacu

SEQ ID NO: 1656 - RNA, 22 nt, Variola Virus
gacgaguuacaaacuauuugga

SEQ ID NO: 1657 - RNA, 22 nt, Human Herpesvirus 2
uccaaccgauaaaucaagcgcc

SEQ ID NO: 1658 - RNA, 22 nt, Rat Cytomegalovirus
gccgcugggcgagagcgaacac

SEQ ID NO: 1659 - RNA, 22 nt, Human Herpesvirus 6
caccgaugacgcccgucgacga

SEQ ID NO: 1660 - RNA, 22 nt, Human herpesvirus 1
ggcgggcggucgggcgauugau

SEQ ID NO: 1661 - RNA, 22 nt, Rat Cytomegalovirus
ugagucaucgcccgaggacgcg

SEQ ID NO: 1662 - RNA, 22 nt, Vaccinia Virus
uaaagcuaucgucauugaucau

SEQ ID NO: 1663 - RNA, 21 nt, Rat Cytomegalovirus
cgucucacgguacucgacgcc

SEQ ID NO: 1664 - RNA, 22 nt, Hepatitis GB Virus C
uacgggcccuugucggucucgg

SEQ ID NO: 1665 - RNA, 22 nt, Vaccinia Virus
uaauuggaauaauucagaaaua

SEQ ID NO: 1666 - RNA, 22 nt, Human Adenovirus E
ccuggagaugaugcugacagua

SEQ ID NO: 1667 - RNA, 22 nt, Rat Cytomegalovirus
uuugcuuaacaguggcauguga

SEQ ID NO: 1668 - RNA, 21 nt, Human adenovirus C
aaguuucugaagaacgaguac

SEQ ID NO: 1669 - RNA, 22 nt, Rat Cytomegalovirus
ugucauguaucguuguguuugg

SEQ ID NO: 1670 - RNA, 22 nt, Vaccinia Virus
cguuuagccucuggcuuuuuau

SEQ ID NO: 1671 - RNA, 22 nt, Human herpesvirus 7
gcgugccagaguggauuuguug

SEQ ID NO: 1672 - RNA, 22 nt, Human Herpesvirus 8
uuuuaugcaaaauacauuuuau

SEQ ID NO: 1673 - RNA, 22 nt, Human parainfluenza virus 3
aaccuguuaaacuuaacauacu

SEQ ID NO: 1674 - RNA, 22 nt, Vaccinia Virus
aacaguaucauuuaaacauuua

SEQ ID NO: 1675 - RNA, 22 nt, Human Herpesvirus 7
uuagcucuaacucugacccuag

SEQ ID NO: 1676 - RNA, 22 nt, Human adenovirus A
uuuaccaggcaaagaacaucaa

SEQ ID NO: 1677 - RNA, 22 nt, Human Herpesvirus 7
aaugaguacugaagaaagugag

SEQ ID NO: 1678 - RNA, 22 nt, Rat cytomegalovirus
uuguaucaggcaccguguacuc

SEQ ID NO: 1679 - RNA, 22 nt, Molluscum Contagiosum Virus
uucuugcuagcucgccgcgggu

SEQ ID NO: 1680 - RNA, 22 nt, Zaire Ebola Virus
gcaucuugcauuguguacuuaa

SEQ ID NO: 1681 - RNA, 22 nt, Variola Virus
ugaugaauauuacaagauuaga

SEQ ID NO: 1682 - RNA, 22 nt, Human Herpesvirus 1
caagaacuguuaucccgaggca

SEQ ID NO: 1683 - RNA, 22 nt, Zaire Ebola Virus
cuguuucacuauguagcacagg

SEQ ID NO: 1684 - RNA, 22 nt, Human parainfluenza virus 3
ugucuguuuguucggugucguu

SEQ ID NO: 1685 - RNA, 22 nt, Vaccinia Virus
aauauuuuuguaaaacuuuuuu

SEQ ID NO: 1686 - RNA, 22 nt, Human Coronavirus 229E
ugcuauuaaggauuguguugac

SEQ ID NO: 1687 - RNA, 22 nt, Vaccinia virus
agcggggcuaugauuuuggcau

SEQ ID NO: 1688 - RNA, 22 nt, Human herpesvirus 7
uuucugagaagaugucauuagu

SEQ ID NO: 1689 - RNA, 22 nt, Vaccinia Virus
uaggauauaguuucauaauagg

SEQ ID NO: 1690 - RNA, 22 nt, Human Herpesvirus 7
uuuaagacauuauuugcugaac

SEQ ID NO: 1691 - RNA, 22 nt, Respiratory Syncytial Virus
uagaguaacuuugcugucuaac

SEQ ID NO: 1692 - RNA, 22 nt, Human Herpesvirus 4
uuuugcauauuuucagacccac

SEQ ID NO: 1693 - RNA, 22 nt, Variola Virus
uaaaacuugauaauuaauaaua

SEQ ID NO: 1694 - RNA, 22 nt, Transmissible Gastroenteritis Virus
cuggaucuagugauuguuuaaa

SEQ ID NO: 1695 - RNA, 22 nt, Human Herpesvirus 8
cagcaccccaggagccccggca

SEQ ID NO: 1696 - RNA, 22 nt, Reston Ebola virus
ucuuggcucagaggguuauaag

SEQ ID NO: 1697 - RNA, 22 nt, Human Herpesvirus 4
ggagggaaacaugaccaccuga

SEQ ID NO: 1698 - RNA, 22 nt, Zaire Ebola Virus
uagguuguucacaauccaagua

SEQ ID NO: 1699 - RNA, 22 nt, Human Immunodeficiency Virus 1
uccaaaaugcgaacccagauug

SEQ ID NO: 1700 - RNA, 22 nt, Rat Cytomegalovirus
ucagaucucucgcucuccugac

SEQ ID NO: 1701 - RNA, 22 nt, Marburg virus
uugacaaaggaugggucugugu

SEQ ID NO: 1702 - RNA, 22 nt, Human Herpesvirus 7
uggacuguuuauacuuaucuuc

SEQ ID NO: 1703 - RNA, 22 nt, Human Herpesvirus 8
gccagguuuccauugccacccg

SEQ ID NO: 1704 - RNA, 21 nt, Encephalomyocarditis virus
ugcuuuugccauggacaaccg

SEQ ID NO: 1705 - RNA, 22 nt, Variola virus
uuguguuuagacgcuuauuauu

SEQ ID NO: 1706 - RNA, 22 nt, Human Herpesvirus 6
uuuacauauuacccuucuucaa

SEQ ID NO: 1707 - RNA, 22 nt, Molluscum contagiosum virus
ugcaggcgcucgcgugugagcg

SEQ ID NO: 1708 - RNA, 22 nt, Human herpesvirus 6B
uguggcgccgacucugccgcgu

SEQ ID NO: 1709 - RNA, 22 nt, Human Herpesvirus 2
ccgccgcgcgcccccgcccggc

SEQ ID NO: 1710 - RNA, 22 nt, Zaire Ebola virus
ggagauaaguuuuuaacuggaa

SEQ ID NO: 1711 - RNA, 22 nt, Vaccinia Virus
ggagucguaaaaaaguuuuauc

SEQ ID NO: 1712 - RNA, 19 nt, Human Herpesvirus 7
uagaaaauauaaacuuuau

SEQ ID NO: 1713 - RNA, 22 nt, Human Herpesvirus 5
cauuaaacaggcuggacaugcg

SEQ ID NO: 1714 - RNA, 22 nt, Human Herpesvirus 4
ggguggugucugcagcaaaaga

SEQ ID NO: 1715 - RNA, 22 nt, Rat Cytomegalovirus
guccuucucugcuucuuuucug

SEQ ID NO: 1716 - RNA, 22 nt, SARS coronavirus
aaaauuggcauuuugugcauaa

SEQ ID NO: 1717 - RNA, 22 nt, Rat Cytomegalovirus
ccaaugggauauccguaaacgg

SEQ ID NO: 1718 - RNA, 19 nt, Human Immunodeficiency Virus 1
uuuuauagacaucacuaug

SEQ ID NO: 1719 - RNA, 22 nt, Human herpesvirus 8
agcgccaaaaauccgucgugau

SEQ ID NO: 1720 - RNA, 22 nt, Human adenovirus D
ugugauuuuugccggaagaaga

SEQ ID NO: 1721 - RNA, 22 nt, Reston Ebola virus
aacuuaagucgauauauauguu

SEQ ID NO: 1722 - RNA, 22 nt, Human Herpesvirus 5
cuucguugcguauggccaccac

SEQ ID NO: 1723 - RNA, 22 nt, Human Herpesvirus 6
uuguuucggauacaguaagacg

SEQ ID NO: 1724 - RNA, 22 nt, Human herpesvirus 3
uuaacgcuuauuacaauaacaa

SEQ ID NO: 1725 - RNA, 22 nt, Molluscum contagiosum virus
agugugugugugugcucacacg

SEQ ID NO: 1726 - RNA, 22 nt, Eastern equine encephalitis virus
ugcuguguguucguacgcugcg

SEQ ID NO: 1727 - RNA, 22 nt, Measles virus
aacaucaugguggauuaauucu

SEQ ID NO: 1728 - RNA, 22 nt, Human herpesvirus 5
aguuuuaugucuacgacggcua

SEQ ID NO: 1729 - RNA, 22 nt, Variola virus
ugguaauugcauaguagaaggu

SEQ ID NO: 1730 - RNA, 21 nt, Rat Cytomegalovirus
ucaguuagacgaucauugagg

SEQ ID NO: 1731 - RNA, 22 nt, Japanese Encephalitis Virus
uagcugguggugaggaagaaca

SEQ ID NO: 1732 - RNA, 22 nt, Variola virus
ugaugugagagagaaauacuuc

SEQ ID NO: 1733 - RNA, 22 nt, Human Herpesvirus 1
acgcgggggcugcucuaaaaau

SEQ ID NO: 1734 - RNA, 22 nt, Vaccinia Virus
gagucguaaaaaaguuuuaucu

SEQ ID NO: 1735 - RNA, 22 nt, Human Herpesvirus 6
gauuuuguuguauuugguugaa

SEQ ID NO: 1736 - RNA, 19 nt, Human coronavirus OC43
uuacaagaacauguauuua

SEQ ID NO: 1737 - RNA, 22 nt, Sindbis Virus
caaggaauuuuuuuaccgugaa

SEQ ID NO: 1738 - RNA, 22 nt, Human herpesvirus 2
uucaccgcgacuccaccuccga

SEQ ID NO: 1739 - RNA, 22 nt, Human Herpesvirus 6B
ugcuagaugagcggcaaagaac

SEQ ID NO: 1740 - RNA, 22 nt, Human immunodeficiency virus 1
gggucucucugguuagaccaga

SEQ ID NO: 1741 - RNA, 22 nt, Human Herpesvirus 6B
gccuggguaggaaagacccaac

SEQ ID NO: 1742 - RNA, 19 nt, Variola Virus
ccuaugguacauacauaug

SEQ ID NO: 1743 - RNA, 22 nt, Human Herpesvirus 5
uggccagacgcugugcaucccg

SEQ ID NO: 1744 - RNA, 22 nt, Human Herpesvirus 7
uaauauguaugaaauaauagau

SEQ ID NO: 1745 - RNA, 22 nt, Variola Virus
uggggauuaaucuuuguuggau

SEQ ID NO: 1746 - RNA, 22 nt, Human herpesvirus 6
uguuuugcgauacaggaugugu

SEQ ID NO: 1747 - RNA, 22 nt, Human Herpesvirus 8
ucagaaguuucaaagucgugua

SEQ ID NO: 1748 - RNA, 22 nt, Human Parainfluenza Virus 1 Strain Washington/1964
uugaucuuaguauaaauuuuua

SEQ ID NO: 1749 - RNA, 22 nt, Human Herpesvirus 2
agaacgugguguugggcgccgg

SEQ ID NO: 1750 - RNA, 22 nt, Human herpesvirus 4
gcucaaccgagccaugcagcgg

SEQ ID NO: 1751 - RNA, 22 nt, Rat Cytomegalovirus
ccgccuccccgcccucucuacc

SEQ ID NO: 1752 - RNA, 22 nt, Human Herpesvirus 1
aacacacacgccggcaacccag

SEQ ID NO: 1753 - RNA, 22 nt, Eastern equine encephalitis virus
uggcacaucaccauacucaagg

SEQ ID NO: 1754 - RNA, 22 nt, Vaccinia Virus
uaaggugauuggaaugggauaa

SEQ ID NO: 1755 - RNA, 22 nt, SARS coronavirus
uuguagauacaugugcuggggc

SEQ ID NO: 1756 - RNA, 22 nt, Zaire Ebola virus
uugccaaguauuuucgguugcu

SEQ ID NO: 1757 - RNA, 22 nt, Human herpesvirus 3
uuuaucaugccaaugggagugu

SEQ ID NO: 1758 - RNA, 22 nt, Human Herpesvirus 6B
uaaugcucagauguggaauuuu

SEQ ID NO: 1759 - RNA, 22 nt, Human Herpesvirus 8
gaccuggagacgauguucaggg

SEQ ID NO: 1760 - RNA, 22 nt, Human Coronavirus 229E
uggcagagcugcucuuauagug

SEQ ID NO: 1761 - RNA, 22 nt, Rat Cytomegalovirus
ucccagccgcucuuugcuccgc

SEQ ID NO: 1762 - RNA, 22 nt, Human herpesvirus 2
gggggcccccgggccggcggaa

SEQ ID NO: 1763 - RNA, 22 nt, Human Herpesvirus 5
ugagaugagaaagcggcggugg

SEQ ID NO: 1764 - RNA, 22 nt, Human Herpesvirus 1
uugcagauuuguaaggccacgc

SEQ ID NO: 1765 - RNA, 22 nt, Vaccinia Virus
uaaaaagugauuuauuuuuaca

SEQ ID NO: 1766 - RNA, 22 nt, Human Herpesvirus 6
cgagaagcgcccgacgcggccu

SEQ ID NO: 1767 - RNA, 22 nt, Human Herpesvirus 6
uaugaaauauuuaaggugguug

SEQ ID NO: 1768 - RNA, 22 nt, Rat Cytomegalovirus
acggaggaaacgaagaaugcaa

SEQ ID NO: 1769 - RNA, 22 nt, Variola Virus
caagauagagagcuccuuuggu

SEQ ID NO: 1770 - RNA, 22 nt, Human Adenovirus A
uagcagucaucuagaacuucgu

SEQ ID NO: 1771 - RNA, 22 nt, Vaccinia Virus
uuccucggccauuuuaauauuu

SEQ ID NO: 1772 - RNA, 22 nt, Vaccinia Virus
acuguuuucuuagcgaaugaug

SEQ ID NO: 1773 - RNA, 22 nt, Human herpesvirus 7
aaauauuuuucucgugauuagu

SEQ ID NO: 1774 - RNA, 22 nt, Murray Valley encephalitis virus
uucucucuucccuacauauggg

SEQ ID NO: 1775 - RNA, 22 nt, Human Adenovirus B
ccgcaagucucggcagaaaaag

SEQ ID NO: 1776 - RNA, 22 nt, Human Herpesvirus 1
caccccccugccuuccacccuc

SEQ ID NO: 1777 - RNA, 22 nt, Vaccinia Virus
gcgauaugugauuuuuuaucaa

SEQ ID NO: 1778 - RNA, 22 nt, Human Herpesvirus 1
ugucgagcacguagcccugcac

SEQ ID NO: 1779 - RNA, 22 nt, Human Herpesvirus 4
ugaggaggagaaggagaauggg

SEQ ID NO: 1780 - RNA, 22 nt, Human Papillomavirus Type 6
ugacaaacacagacauuuauuu

SEQ ID NO: 1781 - RNA, 22 nt, Human herpesvirus 1
cacaugugagacuucgggggcg

SEQ ID NO: 1782 - RNA, 22 nt, Molluscum Contagiosum Virus
aguggcguuugccgugacaaga

SEQ ID NO: 1783 - RNA, 22 nt, Human adenovirus B
uguagagaaaaggguagacuag

SEQ ID NO: 1784 - RNA, 22 nt, Vaccinia Virus
auauucuuuuaauccugcguua

SEQ ID NO: 1785 - RNA, 19 nt, Japanese encephalitis virus
uuugccaugauugucaagc

SEQ ID NO: 1786 - RNA, 20 nt, Human Immunodeficiency Virus 1
agaguuaggcagggauauuc

SEQ ID NO: 1787 - RNA, 22 nt, Vaccinia Virus
uacuaucuauaaacauaaguau

SEQ ID NO: 1788 - RNA, 22 nt, Rat Cytomegalovirus
cauaacaauugcaguaaaaugu

SEQ ID NO: 1789 - RNA, 22 nt, Rat Cytomegalovirus
agaaguaaacugauucgauuuc

SEQ ID NO: 1790 - RNA, 22 nt, Rat Cytomegalovirus
ucgcgaucgaaggucggcgcgu

SEQ ID NO: 1791 - RNA, 22 nt, Vaccinia Virus
cugaaucacuugauucgucacu

SEQ ID NO: 1792 - RNA, 22 nt, Hepatitis GB virus B
gggguucuguggcgcuuggacg

SEQ ID NO: 1793 - RNA, 22 nt, Molluscum Contagiosum Virus
cgagaaagaccuugucaguggg

SEQ ID NO: 1794 - RNA, 22 nt, Human Herpesvirus 5
gguagacgucuucggcaugcgg

SEQ ID NO: 1795 - RNA, 22 nt, Human Herpesvirus 8
agcgggguuuacgcagcugggu

SEQ ID NO: 1796 - RNA, 22 nt, Human respiratory syncytial virus
uucaguucaccuuuaugauauc

SEQ ID NO: 1797 - RNA, 22 nt, Human Herpesvirus 1
gcguauuggucccaaugggguc

SEQ ID NO: 1798 - RNA, 22 nt, Molluscum contagiosum virus
ugugugugugcgcucacacgga

SEQ ID NO: 1799 - RNA, 22 nt, Rat Cytomegalovirus
uggcggacaacggccuguucac

SEQ ID NO: 1800 - RNA, 22 nt, Human Parainfluenza Virus 3
uagaguaugucagauacagugc

SEQ ID NO: 1801 - RNA, 22 nt, Japanese encephalitis virus
ugugugcaaacaaggcuucacu

SEQ ID NO: 1802 - RNA, 22 nt, Human Immunodeficiency Virus 1
uugguugcacuuuaaauuuucc

SEQ ID NO: 1803 - RNA, 22 nt, Human Herpesvirus 1
gcgcgcgcgcaaaaaaggcggg

SEQ ID NO: 1804 - RNA, 22 nt, Molluscum contagiosum virus
uggccguggcggugcuggcggg

SEQ ID NO: 1805 - RNA, 22 nt, Human Adenovirus A
ggcguagaugugcuguggaaag

SEQ ID NO: 1806 - RNA, 22 nt, Zaire Ebola Virus
uaagaacuguuggcaccgcggc

SEQ ID NO: 1807 - RNA, 22 nt, Vaccinia Virus
ugguaagauuacuggcucguuu

SEQ ID NO: 1808 - RNA, 22 nt, Vaccinia virus
uaugguauuaagaauucguuuu

SEQ ID NO: 1809 - RNA, 21 nt, Human herpesvirus 6
uggaugaggaugacugguacg

SEQ ID NO: 1810 - RNA, 22 nt, Human Herpesvirus 7
guagaaguuguauuuuuagaag

SEQ ID NO: 1811 - RNA, 22 nt, Human enterovirus D
uucggugcuaauaucaaggggc

SEQ ID NO: 1812 - RNA, 22 nt, Molluscum Contagiosum Virus
aggcagaaggcgcagucgaucu

SEQ ID NO: 1813 - RNA, 22 nt, Ovine Adenovirus 7
aauggauuucugcaaauagaag

SEQ ID NO: 1814 - RNA, 22 nt, Transmissible gastroenteritis virus
ugucuucgauguaaagacuagu

SEQ ID NO: 1815 - RNA, 22 nt, Hepatitis A virus
uuuggauugguuucuauucaga

SEQ ID NO: 1816 - RNA, 22 nt, Vaccinia Virus
agcaucaucuuuagaucauuaa

SEQ ID NO: 1817 - RNA, 22 nt, Variola virus and Vaccinia virus
aacaauaacacgcuucuguucu

SEQ ID NO: 1818 - RNA, 22 nt, Molluscum Contagiosum Virus
cggccgcgcgcgacuuuguccu

SEQ ID NO: 1819 - RNA, 21 nt, Human Adenovirus E
aacagcacuuucauguuacac

SEQ ID NO: 1820 - RNA, 22 nt, Molluscum Contagiosum Virus
acgcccgcgucccgacagcaga

SEQ ID NO: 1821 - RNA, 22 nt, Human Herpesvirus 4
gaccugaugcugcuggugugcu

SEQ ID NO: 1822 - RNA, 22 nt, Respiratory syncytial virus
uuaaugauaacaauauuacuau

SEQ ID NO: 1823 - RNA, 22 nt, Human Herpesvirus 4
ugagacacgugucugggaggcg

SEQ ID NO: 1824 - RNA, 22 nt, Human herpesvirus 1
uguauauauagggucagggggu

SEQ ID NO: 1825 - RNA, 22 nt, Zaire Ebola Virus
gagauuagaucaauaugaugua

SEQ ID NO: 1826 - RNA, 22 nt, Human herpesvirus 5
agagccaccccaccuccugcau

SEQ ID NO: 1827 - RNA, 22 nt, Variola Virus
ugauauuuacuuuuuauaugcu

SEQ ID NO: 1828 - RNA, 22 nt, Human Herpesvirus 7
ccguacaucucuuucacaaacc

SEQ ID NO: 1829 - RNA, 22 nt, Rat Cytomegalovirus
uuagacauuuuucuuuuaaauu

SEQ ID NO: 1830 - RNA, 22 nt, Respiratory syncytial virus
uguguucauacuuaguuauuau

SEQ ID NO: 1831 - RNA, 22 nt, Human herpesvirus 7
agguguguaguugauuaggauu

SEQ ID NO: 1832 - RNA, 22 nt, Human rhinovirus 89
uucgugcaguauugguaccacu

SEQ ID NO: 1833 - RNA, 22 nt, Variola virus
acaaaauccauuuaggcaagaa

SEQ ID NO: 1834 - RNA, 22 nt, Human Astrovirus
guggaugguauuuguugacaaa

SEQ ID NO: 1835 - RNA, 22 nt, Vaccinia Virus
ucgucaaauuuaaaacauauuu

SEQ ID NO: 1836 - RNA, 22 nt, Human Parainfluenza Virus 1 Strain Washington/1964
uaaauaguauuuuaggguuaaa

SEQ ID NO: 1837 - RNA, 21 nt, Variola virus
aacugguuauccggagucugc

SEQ ID NO: 1838 - RNA, 22 nt, Human Herpesvirus 2
agccuguccacguaugccgugc

SEQ ID NO: 1839 - RNA, 22 nt, Human Herpesvirus 5
gagaacuauuuucuuugucaag

SEQ ID NO: 1840 - RNA, 22 nt, Human coronavirus 229E
aagaucacaccguggcagagcu

SEQ ID NO: 1841 - RNA, 22 nt, Human Coronavirus 229E
ugaaguaaaagacauugaaccu

SEQ ID NO: 1842 - RNA, 22 nt, Human herpesvirus 8
gggucugcccggaacaccgcag

SEQ ID NO: 1843 - RNA, 22 nt, Molluscum Contagiosum Virus
gaucccuccgagacgucuggcu

SEQ ID NO: 1844 - RNA, 22 nt, Human Herpesvirus 1
gggggcccgcggcgcgucaggc

SEQ ID NO: 1845 - RNA, 22 nt, Rat Cytomegalovirus
uccguucucggagacccgaagu

SEQ ID NO: 1846 - RNA, 20 nt, Human Immunodeficiency Virus 1
uaagauggguggcaaguggu

SEQ ID NO: 1847 - RNA, 22 nt, Tick-borne encephalitis virus
ggugaugguggcucagggagaa

SEQ ID NO: 1848 - RNA, 22 nt, Reston Ebola virus
aaugucuaaugcuuaaaugaac

SEQ ID NO: 1849 - RNA, 22 nt, Norwalk virus
agccccagagccauaucuuggu

SEQ ID NO: 1850 - RNA, 22 nt, Human herpesvirus 3
uugacaccacgguucgcauuga

SEQ ID NO: 1851 - RNA, 22 nt, Vaccinia virus
acauugaucuauguaguuuuaa

SEQ ID NO: 1852 - RNA, 22 nt, Human herpesvirus 8
ugaucccauguugcuggcgcuc

SEQ ID NO: 1853 - RNA, 22 nt, Rat Cytomegalovirus
uacagaguucagcaucggugga

SEQ ID NO: 1854 - RNA, 22 nt, Human Herpesvirus 5
uguggucguggguggugcgaga

SEQ ID NO: 1855 - RNA, 22 nt, Rat Cytomegalovirus
ccaaugggguauccgaugacgu

SEQ ID NO: 1856 - RNA, 22 nt, Human coronavirus 229E
ugagucauaguagggagaauau

SEQ ID NO: 1857 - RNA, 22 nt, Vaccinia virus
ugagagaguacugguuucaugu

SEQ ID NO: 1858 - RNA, 22 nt, Rat Cytomegalovirus
cgcucgaucucggcucugucgg

SEQ ID NO: 1859 - RNA, 22 nt, Hepatitis GB Virus C
ggccgggauccuggggcuuggg

SEQ ID NO: 1860 - RNA, 22 nt, Human parainfluenza virus 1 strain Washington/1964
gcgucguguucgggaguuggug

SEQ ID NO: 1861 - RNA, 22 nt, Hepatitis GB Virus A
ccuccggugugaauaagcccuc

SEQ ID NO: 1862 - RNA, 22 nt, Human Herpesvirus 6
auuguaauauucaagcgaagug

SEQ ID NO: 1863 - RNA, 22 nt, Barmah Forest virus
gcucggugcccagauacucccc

SEQ ID NO: 1864 - RNA, 22 nt, Vaccinia Virus
uacaaaaauauuuuuauucucu

SEQ ID NO: 1865 - RNA, 22 nt, Human Herpesvirus 6
ugcgauggcuguuagugcggga

SEQ ID NO: 1866 - RNA, 22 nt, Vaccinia virus
uggauuggagaucacuaacuca

SEQ ID NO: 1867 - RNA, 22 nt, Vaccinia virus
uggaaagaugauagaugacuau

SEQ ID NO: 1868 - RNA, 22 nt, Human Herpesvirus 5
cugcugcgucucauggaucaga

SEQ ID NO: 1869 - RNA, 22 nt, Rat Cytomegalovirus
cucuuggucaauuucgguuucu

SEQ ID NO: 1870 - RNA, 22 nt, Vaccinia Virus
uaauauagguguauuugcgcac

SEQ ID NO: 1871 - RNA, 22 nt, Ovine adenovirus 7
uuuagagugguuuuaaucuuau

SEQ ID NO: 1872 - RNA, 22 nt, Human Herpesvirus 4
gaggagcugccgguugccauuu

SEQ ID NO: 1873 - RNA, 22 nt, Ovine adenovirus 7
uucauuugaguggaaucaguau

SEQ ID NO: 1874 - RNA, 22 nt, Reston Ebola Virus
uugugcagauuuaaacuugggu

SEQ ID NO: 1875 - RNA, 22 nt, Human herpesvirus 6
aggccaaaauugggaaauaaug

SEQ ID NO: 1876 - RNA, 22 nt, Human herpesvirus 5
aaucaugacccugcgcaccuuu

SEQ ID NO: 1877 - RNA, 22 nt, Human Herpesvirus 6B
cauauagacaucuguaauuauc

SEQ ID NO: 1878 - RNA, 22 nt, Molluscum Contagiosum Virus
ucccgugcacgcuggcgcaugu

SEQ ID NO: 1879 - RNA, 22 nt, Colorado tick fever virus
uucgagaccaugaugggugcaa

SEQ ID NO: 1880 - RNA, 22 nt, Human herpesvirus 5
uuuuuacagacacugcuacgca

SEQ ID NO: 1881 - RNA, 22 nt, Human Adenovirus C
uggaaucaggcuguagacagcu

SEQ ID NO: 1882 - RNA, 22 nt, Vaccinia virus
uggagucauuucugaugaaaca

SEQ ID NO: 1883 - RNA, 22 nt, Vaccinia Virus
acgucauuuaauaaaaaaagua

SEQ ID NO: 1884 - RNA, 22 nt, Human Herpesvirus 5
gcgccuggacguugcacgcggc

SEQ ID NO: 1885 - RNA, 22 nt, Vaccinia Virus
guuccucugacuauauccccaa

SEQ ID NO: 1886 - RNA, 22 nt, Variola Virus
agauacauggaaauguauccuc

SEQ ID NO: 1887 - RNA, 22 nt, Human Herpesvirus 6B
uucagcauaaguuuauuuuggu

SEQ ID NO: 1888 - RNA, 22 nt, Human Papillomavirus Type 6
aaucuaauuguuuaaaguguuu

SEQ ID NO: 1889 - RNA, 22 nt, Human Herpesvirus 1
uuuuuauugggaggcgcgggua

SEQ ID NO: 1890 - RNA, 22 nt, Human Coronavirus 229E
uaauaugcaaccuuucauuguc

SEQ ID NO: 1891 - RNA, 22 nt, Respiratory Syncytial Virus
uucaaauggagccugaaaauua

SEQ ID NO: 1892 - RNA, 22 nt, Transmissible gastroenteritis virus
aucaaugacacuuuuaggaccu

SEQ ID NO: 1893 - RNA, 22 nt, Human papillomavirus type 7
acugucgcccccacugauccau

SEQ ID NO: 1894 - RNA, 22 nt, Human parainfluenza virus 1 strain Washington/1964
agauaccugacuccauguuuug

SEQ ID NO: 1895 - RNA, 22 nt, Human Herpesvirus 1
uggcggucccgcgucgggucgu

SEQ ID NO: 1896 - RNA, 22 nt, Reston Ebola virus
uugaggguaauuuuggcagccg

SEQ ID NO: 1897 - RNA, 21 nt, Human Herpesvirus 6
uggcucgaguucgauauguuc

SEQ ID NO: 1898 - RNA, 22 nt, Zaire Ebola virus
ugauauacagcuaaaagacgug

SEQ ID NO: 1899 - RNA, 22 nt, Human Herpesvirus 1
gcugcucuaaaaauuuaagggc

SEQ ID NO: 1900 - RNA, 22 nt, Barmah Forest Virus
guacauuuuuucgucagacacg

SEQ ID NO: 1901 - RNA, 22 nt, Human Herpesvirus 8
uauuucccacgacauacuuccg

SEQ ID NO: 1902 - RNA, 22 nt, Human Adenovirus B
uguaguuucuaugcaugcugga

SEQ ID NO: 1903 - RNA, 20 nt, Molluscum Contagiosum Virus
gcgccggcggcacgggcgcc

SEQ ID NO: 1904 - RNA, 22 nt, Human herpesvirus 8
gcggggcguuagugagggagug

SEQ ID NO: 1905 - RNA, 22 nt, Molluscum Contagiosum Virus
ucuccgaugggucggucgugac

SEQ ID NO: 1906 - RNA, 22 nt, Molluscum Contagiosum Virus
cgcgugaggaggcggcacugcu

SEQ ID NO: 1907 - RNA, 22 nt, Tick-borne encephalitis virus
aaggucugaccugguuuucucu

SEQ ID NO: 1908 - RNA, 22 nt, Human Herpesvirus 5
cugucuagacucaaaagcugua

SEQ ID NO: 1909 - RNA, 22 nt, Human Herpesvirus 6
aagcagccgcgaacucguuaau

SEQ ID NO: 1910 - RNA, 22 nt, Transmissible Gastroenteritis Virus
ugcauagcagaaacaaucuuug

SEQ ID NO: 1911 - RNA, 22 nt, Colorado tick fever virus
ugauauugggggacggaauggc

SEQ ID NO: 1912 - RNA, 22 nt, Vaccinia Virus
ugagaaagaccaguaguauugg

SEQ ID NO: 1913 - RNA, 22 nt, Human Herpesvirus 1
cacgacaggcccgcagacgcgg

SEQ ID NO: 1914 - RNA, 22 nt, Human Herpesvirus 8
acaugugcgguaugggggucga

SEQ ID NO: 1915 - RNA, 22 nt, Human Herpesvirus 6
gucgcucaugcggacagucaaa

SEQ ID NO: 1916 - RNA, 22 nt, Influenza B virus
uuguauugaagggaggaggaga

SEQ ID NO: 1917 - RNA, 22 nt, Human herpesvirus 7
aauaugaagaguucuuguuugg

SEQ ID NO: 1918 - RNA, 22 nt, Human adenovirus B
agacaaugaggcuuucagagag

SEQ ID NO: 1919 - RNA, 22 nt, Human Herpesvirus 8
uucccggggaggagggcaccag

SEQ ID NO: 1920 - RNA, 22 nt, Human Herpesvirus 8
uguccaggacucaucgggguuc

SEQ ID NO: 1921 - RNA, 22 nt, Human Herpesvirus 6B
cauuuaccagagauacgugaua

SEQ ID NO: 1922 - RNA, 22 nt, Human Herpesvirus 1
uugguugcgcggucccgucucc

SEQ ID NO: 1923 - RNA, 22 nt, Rat cytomegalovirus
ggccucgaaacaacguggaacg

SEQ ID NO: 1924 - RNA, 20 nt, Human Herpesvirus 5
ccggacggaugcaguccaga

SEQ ID NO: 1925 - RNA, 22 nt, Human Herpesvirus 5
uacgcaccaauccacguagaga

SEQ ID NO: 1926 - RNA, 22 nt, Human Papillomavirus Type 7
gucaaaguucccugccaaaaau

SEQ ID NO: 1927 - RNA, 22 nt, Human Herpesvirus 5
uugguccaagugguuuagcgag

SEQ ID NO: 1928 - RNA, 22 nt, Respiratory syncytial virus
aagaacuccugauuuccucaca

SEQ ID NO: 1929 - RNA, 22 nt, Influenza B virus
aaguaagauguuugcuuucucc

SEQ ID NO: 1930 - RNA, 22 nt, Human Herpesvirus 2
gcgcgcccuucuccucuccccu

SEQ ID NO: 1931 - RNA, 22 nt, Borna Disease Virus
gugagcccguugaagacggagu

SEQ ID NO: 1932 - RNA, 22 nt, Vaccinia virus
aaaacuacacaaacacgauuuu

SEQ ID NO: 1933 - RNA, 22 nt, Variola virus and Vaccinia virus
uggcuacaaacuuuuccuuuuc

SEQ ID NO: 1934 - RNA, 22 nt, Human Herpesvirus 2
ggggcuuggccgccgaggugcg

SEQ ID NO: 1935 - RNA, 22 nt, Rat Cytomegalovirus
cggguguccgaagccgaccucc

SEQ ID NO: 1936 - RNA, 22 nt, Measles virus
gcggucggacccagacaagccc

SEQ ID NO: 1937 - RNA, 22 nt, Zaire Ebola Virus
ugaagaaugccucuuggggccu

SEQ ID NO: 1938 - RNA, 22 nt, Reston Ebola Virus
acuuggcauuucuuaucuucau

SEQ ID NO: 1939 - RNA, 22 nt, Transmissible Gastroenteritis Virus
cuagacauuucauuuucauagu

SEQ ID NO: 1940 - RNA, 22 nt, Respiratory Syncytial Virus
cuaggaauuugguagcucuguu

SEQ ID NO: 1941 - RNA, 22 nt, Simian Immunodeficiency Virus
uuggaccuacagccaguucauu

SEQ ID NO: 1942 - RNA, 22 nt, Influenza B virus
ugccaugaugguagagaaugga

SEQ ID NO: 1943 - RNA, 22 nt, Molluscum Contagiosum Virus
agcacuucuccgaugggucggu

SEQ ID NO: 1944 - RNA, 22 nt, Human Herpesvirus 5
cagcggucguuuuaaccgcagg

SEQ ID NO: 1945 - RNA, 22 nt, Transmissible Gastroenteritis Virus
auauuagguaaagcacggucac

SEQ ID NO: 1946 - RNA, 22 nt, Bovine kobuvirus
gcucucuucuauuggcuggcaa

SEQ ID NO: 1947 - RNA, 22 nt, Molluscum contagiosum virus
acuuuuacuucaaucuuugcgu

SEQ ID NO: 1948 - RNA, 22 nt, Human Herpesvirus 1
ggcgucccggcgcggcgagcgu

SEQ ID NO: 1949 - RNA, 22 nt, Hepatitis A Virus
uugagagucaugaauuaugcag

SEQ ID NO: 1950 - RNA, 22 nt, Zaire Ebola Virus
ugacaugcauauaacacugugg

SEQ ID NO: 1951 - RNA, 22 nt, Human Parainfluenza Virus 3
cugcccuuugugcauguuguuu

SEQ ID NO: 1952 - RNA, 22 nt, Colorado tick fever virus
gguguacaaagcaacagugaug

SEQ ID NO: 1953 - RNA, 22 nt, Human herpesvirus 7
gguugguguaugcgugcauugg

SEQ ID NO: 1954 - RNA, 22 nt, Human herpesvirus 7
ugauaaaacaguugucuuagau

SEQ ID NO: 1955 - RNA, 22 nt, Human Herpesvirus 2
ggccgcgggccagcagacgggc

SEQ ID NO: 1956 - RNA, 22 nt, Molluscum Contagiosum Virus
cgugcuccacgcgcagcuucuc

SEQ ID NO: 1957 - RNA, 22 nt, Molluscum Contagiosum Virus
uaacuuuuguccgagguucuuc

SEQ ID NO: 1958 - RNA, 22 nt, Human Herpesvirus 6
uguguagacugucguuuuggug

SEQ ID NO: 1959 - RNA, 22 nt, Vaccinia Virus
guuuacuauuuauugauaacgc

SEQ ID NO: 1960 - RNA, 22 nt, Salmon Pancreas Disease Virus
ugauguguaugacgcucugccg

SEQ ID NO: 1961 - RNA, 22 nt, Reston Ebola Virus
uagguuuguaucacguuaaaga

SEQ ID NO: 1962 - RNA, 22 nt, Molluscum contagiosum virus
aaugaaagacgugcugcugcug

SEQ ID NO: 1963 - RNA, 22 nt, Human Adenovirus A
uaccuuauacuggacuagugcc

SEQ ID NO: 1964 - RNA, 22 nt, Simian picornavirus 1
gggaagagggucaacuguucug

SEQ ID NO: 1965 - RNA, 22 nt, Human Herpesvirus 4
uggagguccguggaguaguggc

SEQ ID NO: 1966 - RNA, 22 nt, Human herpesvirus 6
ugugugugauguccgcaucaca

SEQ ID NO: 1967 - RNA, 22 nt, Human rhinovirus 89
agaucugguuaauaaguugaga

SEQ ID NO: 1968 - RNA, 22 nt, Human Herpesvirus 5
aaugcuugucuggcugagguug

SEQ ID NO: 1969 - RNA, 22 nt, Molluscum contagiosum virus
ugugugugugugugcucacacg

SEQ ID NO: 1970 - RNA, 22 nt, Transmissible Gastroenteritis Virus
gcgcuaaugguccugaagucaa

SEQ ID NO: 1971 - RNA, 22 nt, Vaccinia Virus
guuaucuauagcaucuacuaac

SEQ ID NO: 1972 - RNA, 22 nt, Human Herpesvirus 1
ggccgucugguucgaggauaug

SEQ ID NO: 1973 - RNA, 22 nt, Human Parainfluenza Virus 1 Strain Washington/1964
uuuggcacuuucguucauggag

SEQ ID NO: 1974 - RNA, 22 nt, Human adenovirus D
uugcaaauaaacuuuaucagcc

SEQ ID NO: 1975 - RNA, 22 nt, Human parainfluenza virus 1 strain Washington/1964
uggccaucucaucgaccgaugu

SEQ ID NO: 1976 - RNA, 22 nt, Human Herpesvirus 4
uaguggaagugacgugcuguga

SEQ ID NO: 1977 - RNA, 22 nt, Human Adenovirus D
gcgucugcagcauugucugccu

SEQ ID NO: 1978 - RNA, 22 nt, Molluscum contagiosum virus
ggacgcgucucaacgugggagu

SEQ ID NO: 1979 - RNA, 22 nt, Rat cytomegalovirus
uucaugggauccgguucguaau

SEQ ID NO: 1980 - RNA, 22 nt, Human herpesvirus 7
ucuguugauguuguucucuauu

SEQ ID NO: 1981 - RNA, 22 nt, Human herpesvirus 2
ucugcgucggaguguucaucau

SEQ ID NO: 1982 - RNA, 22 nt, Human Coronavirus 229E
auacaagguucauacgaacguu

SEQ ID NO: 1983 - RNA, 22 nt, SARS coronavirus
aagaggacgaugcagaguguga

SEQ ID NO: 1984 - RNA, 22 nt, Human Herpesvirus 1
uucccuuuucuuucuucccaca

SEQ ID NO: 1985 - RNA, 22 nt, Molluscum contagiosum virus
ggcgcugcggcauccucuucgu

SEQ ID NO: 1986 - RNA, 22 nt, Human adenovirus F
uuggucauguuacauugagcca

SEQ ID NO: 1987 - RNA, 22 nt, Rat Cytomegalovirus
ucguggguguguucuucgucca

SEQ ID NO: 1988 - RNA, 22 nt, Human Adenovirus D
cgucgcuugacagcaccgccgc

SEQ ID NO: 1989 - RNA, 22 nt, Human Herpesvirus 5
uguuucggauguuuacccuuaa

SEQ ID NO: 1990 - RNA, 22 nt, Human adenovirus F
aacucccgggggguuuuccugu

SEQ ID NO: 1991 - RNA, 22 nt, Vaccinia Virus
uuucagaugccucuuuuaguuu

SEQ ID NO: 1992 - RNA, 22 nt, Human Herpesvirus 3
uacggcccaugggagggaacau

SEQ ID NO: 1993 - RNA, 22 nt, Hepatitis GB Virus C
ugcuccggucgcgcgguugggc

SEQ ID NO: 1994 - RNA, 22 nt, Human Immunodeficiency Virus 1
cuuggaaaggauuuugcuauaa

SEQ ID NO: 1995 - RNA, 22 nt, Respiratory syncytial virus
uggugaaugcuauguauugacu

SEQ ID NO: 1996 - RNA, 22 nt, Human adenovirus C
aaugauaggccuauagaugggg

SEQ ID NO: 1997 - RNA, 22 nt, Rat Cytomegalovirus
gucauucgagugaauucauuuu

SEQ ID NO: 1998 - RNA, 22 nt, Variola Virus
ugauguuaaaugguucgauaua

SEQ ID NO: 1999 - RNA, 22 nt, Human Herpesvirus 7
aaguuucggauaaauuuauuaa

SEQ ID NO: 2000 - RNA, 22 nt, Human Herpesvirus 6B
uuaaaucggguaaaugguaaag

SEQ ID NO: 2001 - RNA, 22 nt, West Nile Virus
aaggaggaccccacgugcuuua

SEQ ID NO: 2002 - RNA, 22 nt, Human Herpesvirus 3
uuauugauuuaaucuccggauu

SEQ ID NO: 2003 - RNA, 22 nt, Vaccinia Virus
guccaaacaggaaagaaguaua

SEQ ID NO: 2004 - RNA, 22 nt, Respiratory Syncytial Virus
uuggugaaugcuauguauugac

SEQ ID NO: 2005 - RNA, 22 nt, Variola virus
ugggaggggacgcuagugcggc

SEQ ID NO: 2006 - RNA, 22 nt, Human herpesvirus 2
ugcggugggcguccagcagcuc

SEQ ID NO: 2007 - RNA, 22 nt, Vaccinia Virus
cuuaaauuuuauguauccuagu

SEQ ID NO: 2008 - RNA, 22 nt, Molluscum Contagiosum Virus
aggcacgcgcgcgugucuucca

SEQ ID NO: 2009 - RNA, 22 nt, Human Herpesvirus 8
gcaaguuccaggcauccuaagu

SEQ ID NO: 2010 - RNA, 22 nt, SARS coronavirus
ugaggcaaaauguuggacugag

SEQ ID NO: 2011 - RNA, 22 nt, Human Herpesvirus 5
ucgcgagugacguuguggaugc

SEQ ID NO: 2012 - RNA, 22 nt, Human coronavirus OC43
uuccuguagacaugucggaaga

SEQ ID NO: 2013 - RNA, 22 nt, Human Coronavirus 229E
acuacucuaggcgguuuacacu

SEQ ID NO: 2014 - RNA, 22 nt, Vaccinia Virus
uauaauuaguuuuuuucucuca

SEQ ID NO: 2015 - RNA, 22 nt, Vaccinia virus
uuuaaagguaucuaaugcggau

SEQ ID NO: 2016 - RNA, 22 nt, Human Herpesvirus 8
uguggagccacuggcgcguugc

SEQ ID NO: 2017 - RNA, 22 nt, Human Herpesvirus 1
ggccuuauagaucuccggaucg

SEQ ID NO: 2018 - RNA, 22 nt, Vaccinia virus
auaaagaacuuuuagacugggc

SEQ ID NO: 2019 - RNA, 18 nt, Human Adenovirus C
ucgcuugguccuguaacu

SEQ ID NO: 2020 - RNA, 22 nt, Molluscum Contagiosum Virus
ccagcagcgugcgcgccagcgc

SEQ ID NO: 2021 - RNA, 22 nt, Vaccinia Virus
uguaagcucuuuuugaaauuga

SEQ ID NO: 2022 - RNA, 22 nt, Molluscum contagiosum virus
uggaaacgugggcgugugccgg

SEQ ID NO: 2023 - RNA, 22 nt, Vaccinia virus
ugauaauguccuguuucauuug

SEQ ID NO: 2024 - RNA, 22 nt, Human herpesvirus 2
gcggcgcugcagcggugcgagg

SEQ ID NO: 2025 - RNA, 22 nt, Molluscum Contagiosum Virus
gcgcguggcgccucgucggcgc

SEQ ID NO: 2026 - RNA, 22 nt, Rat Cytomegalovirus
gcccggcgccgggacgcgaguc

SEQ ID NO: 2027 - RNA, 22 nt, Influenza B virus
uuugagaccacaguaugaagug

SEQ ID NO: 2028 - RNA, 22 nt, Vaccinia virus
uucuuuuguauucauagacacu

SEQ ID NO: 2029 - RNA, 22 nt, Human metapneumovirus
uugaguauggcaaagcauuagg

SEQ ID NO: 2030 - RNA, 22 nt, Human Herpesvirus 4
cuugaggucauacguuuuaggg

SEQ ID NO: 2031 - RNA, 22 nt, Simian picornavirus 1
ugcuucuugaaucuaguagagg

SEQ ID NO: 2032 - RNA, 22 nt, Dengue virus
aaugaugcugaggagacagcag

SEQ ID NO: 2033 - RNA, 22 nt, Vaccinia virus
acuguaugcuccuagcggaguu

SEQ ID NO: 2034 - RNA, 22 nt, Rat Cytomegalovirus
uacauagauucuucucgguccu

SEQ ID NO: 2035 - RNA, 22 nt, Human herpesvirus 7
uggaagagaguauuaucaaagg

SEQ ID NO: 2036 - RNA, 22 nt, Vaccinia virus
aguuuauacacucucgaggauu

SEQ ID NO: 2037 - RNA, 22 nt, SARS coronavirus
ucuguguaauaaaccaagaagu

SEQ ID NO: 2038 - RNA, 22 nt, Human Herpesvirus 5
caagaccucagcauggcucgga

SEQ ID NO: 2039 - RNA, 22 nt, Bovine kobuvirus
ugccucaaccacacgagucagg

SEQ ID NO: 2040 - RNA, 22 nt, Human echovirus 1
uggaugaccugugccagaaucc

SEQ ID NO: 2041 - RNA, 22 nt, Human coronavirus 229E
ugucuuguagucauaguagcua

SEQ ID NO: 2042 - RNA, 22 nt, Human adenovirus C
gggaggagcuuguaauccugag

SEQ ID NO: 2043 - RNA, 22 nt, Human Coronavirus 229E
uaugaugccuguuauggguaug

SEQ ID NO: 2044 - RNA, 22 nt, Human herpesvirus 7
uuuugcuugacguucaaauuuu

SEQ ID NO: 2045 - RNA, 22 nt, Variola virus and Vaccinia virus
auauaauuauuuuguaagauga

SEQ ID NO: 2046 - RNA, 22 nt, Vaccinia Virus
ucgucauaucccguauagucag

SEQ ID NO: 2047 - RNA, 22 nt, Human Enterovirus C
gugcauccagugaugccaauga

SEQ ID NO: 2048 - RNA, 21 nt, Transmissible Gastroenteritis Virus
caaucuugaauggcucaauag

SEQ ID NO: 2049 - RNA, 22 nt, Rat Cytomegalovirus
aagcaagggucuugagaucgua

SEQ ID NO: 2050 - RNA, 22 nt, Vaccinia Virus
uaggauuauguaacaucagcuu

SEQ ID NO: 2051 - RNA, 22 nt, Vaccinia virus
uuacgauguuauaagaauguag

SEQ ID NO: 2052 - RNA, 22 nt, Human herpesvirus 6B
uggggcauucgaggccgcccuc

SEQ ID NO: 2053 - RNA, 22 nt, Molluscum Contagiosum Virus
auugccgcccaccgaccuguuc

SEQ ID NO: 2054 - RNA, 22 nt, Vaccinia Virus
uuggaagaacaacgaccugcac

SEQ ID NO: 2055 - RNA, 22 nt, Human Herpesvirus 7
aguauauggcgaaaaucacaaa

SEQ ID NO: 2056 - RNA, 22 nt, Human Herpesvirus 2
cggugccacgucagcuggcagg

SEQ ID NO: 2057 - RNA, 22 nt, Human Herpesvirus 1
augggucuaaccaauccccagg

SEQ ID NO: 2058 - RNA, 22 nt, Hepatitis A Virus
cugaugaagguuccuacaauuc

SEQ ID NO: 2059 - RNA, 22 nt, Rat Cytomegalovirus
gcgaggcacgucucacgguguu

SEQ ID NO: 2060 - RNA, 22 nt, Variola Virus
uuuacagauuuaaauguauagu

SEQ ID NO: 2061 - RNA, 18 nt, Vaccinia Virus
uuuauaauguucgccauu

SEQ ID NO: 2062 - RNA, 22 nt, Human Herpesvirus 4
guagauccagauaccuaagacu

SEQ ID NO: 2063 - RNA, 22 nt, Vaccinia virus
ggagaaguugauaaugccuuua

SEQ ID NO: 2064 - RNA, 22 nt, Human Herpesvirus 4
cacacauccuggaugcccucca

SEQ ID NO: 2065 - RNA, 22 nt, Rat Cytomegalovirus
uccaacugcuucccgaacgucu

SEQ ID NO: 2066 - RNA, 22 nt, Hepatitis E virus
uuggcgugaccaggcccagcgc

SEQ ID NO: 2067 - RNA, 22 nt, Human adenovirus B
uuagauuccacauuccaaacag

SEQ ID NO: 2068 - RNA, 22 nt, Human Herpesvirus 3
uccacaggcaauaaaaaaaauu

SEQ ID NO: 2069 - RNA, 22 nt, Molluscum contagiosum virus
gcgcugcggcauccucuucgua

SEQ ID NO: 2070 - RNA, 22 nt, Hepatitis GB virus B
agguagugguaagaaagcgcca

SEQ ID NO: 2071 - RNA, 22 nt, Rat Cytomegalovirus
ucuauuguuaaaaggaaaaaug

SEQ ID NO: 2072 - RNA, 22 nt, Human Herpesvirus 6B
gaucgaggcaccaagauucugc

SEQ ID NO: 2073 - RNA, 22 nt, Vaccinia Virus
uguaaaauuuuugucgauaaaa

SEQ ID NO: 2074 - RNA, 22 nt, Vaccinia Virus
ugagggucagauccaaauauug

SEQ ID NO: 2075 - RNA, 22 nt, Human herpesvirus 2
uuacggcaacaaagggccuccg

SEQ ID NO: 2076 - RNA, 22 nt, Human Herpesvirus 8
ucucucagucgcgccuagcugc

SEQ ID NO: 2077 - RNA, 22 nt, Human Herpesvirus 1
acccacguacuccaagaaggca

SEQ ID NO: 2078 - RNA, 22 nt, Human herpesvirus 2
gcggccgucgggccggucugga

SEQ ID NO: 2079 - RNA, 22 nt, Human Herpesvirus 1
uggaaggacgggaaguggaagu

SEQ ID NO: 2080 - RNA, 22 nt, Vaccinia Virus
uaugauauggguagaguuuuug

SEQ ID NO: 2081 - RNA, 22 nt, Human herpesvirus 6
aaacaaaacaacaagaaaccau

SEQ ID NO: 2082 - RNA, 22 nt, Human herpesvirus 4
uuauuuucuccaaaucgcuccu

SEQ ID NO: 2083 - RNA, 22 nt, Hepatitis C virus
ugugagugcuaugacgcgggcu

SEQ ID NO: 2084 - RNA, 22 nt, Vaccinia virus
uuauuccacagagcacuaauuu

SEQ ID NO: 2085 - RNA, 22 nt, Vaccinia Virus
caguuucguagucuugaguauu

SEQ ID NO: 2086 - RNA, 22 nt, Respiratory Syncytial Virus
uugaaucacuuaguuuuuugga

SEQ ID NO: 2087 - RNA, 22 nt, Molluscum Contagiosum Virus
cuagcgcuccgcgugcgagaag

SEQ ID NO: 2088 - RNA, 22 nt, Human Herpesvirus 1
gagggcuggggccggggagggc

SEQ ID NO: 2089 - RNA, 22 nt, Human Herpesvirus 4
ggccuagagaaggagagggagc

SEQ ID NO: 2090 - RNA, 22 nt, Human Herpesvirus 1
ccccugugguguuuuugguuau

SEQ ID NO: 2091 - RNA, 22 nt, Human Herpesvirus 5
ggccgccuagcgcuuccagcug

SEQ ID NO: 2092 - RNA, 22 nt, Molluscum Contagiosum Virus
ugguagguguggaagggcgcgc

SEQ ID NO: 2093 - RNA, 22 nt, Human herpesvirus 1
uuggugccgguggggcguaccg

SEQ ID NO: 2094 - RNA, 22 nt, Human Herpesvirus 8
uacacacaucgucucgcggguu

SEQ ID NO: 2095 - RNA, 22 nt, Rat Cytomegalovirus
ugaaguaguucuuguacagggc

SEQ ID NO: 2096 - RNA, 22 nt, Human Herpesvirus 4
gcuaucuauccauaggcaggca

SEQ ID NO: 2097 - RNA, 22 nt, Dengue Virus Type 2
uggaauggugcuguugaaucaa

SEQ ID NO: 2098 - RNA, 22 nt, Vaccinia Virus
uaucauaaaggguaugcucaug

SEQ ID NO: 2099 - RNA, 22 nt, Molluscum Contagiosum Virus
uucgugccugcacgcacgagac

SEQ ID NO: 2100 - RNA, 20 nt, Human Adenovirus D
ucgacuggugcugcgcgcgc

SEQ ID NO: 2101 - RNA, 21 nt, Human Herpesvirus 4
gucuaugguuggcugcgcugc

SEQ ID NO: 2102 - RNA, 22 nt, Human Herpesvirus 7
gcaauugacacauuuuacggug

SEQ ID NO: 2103 - RNA, 22 nt, Equine rhinovirus 3
ggggugucgccgcugugugugu

SEQ ID NO: 2104 - RNA, 22 nt, Human herpesvirus 4
ugaaggaugcgauuaaggaccu

SEQ ID NO: 2105 - RNA, 22 nt, Variola virus
agugucaucuccagaggaaaua

SEQ ID NO: 2106 - RNA, 22 nt, Variola virus
auagcauccggcuuauccgccu

SEQ ID NO: 2107 - RNA, 22 nt, Rat Cytomegalovirus
ugccuccucgagggcgggacgu

SEQ ID NO: 2108 - RNA, 22 nt, Vaccinia Virus
uuaauugguuuaaucguuuauu

SEQ ID NO: 2109 - RNA, 22 nt, Variola virus
ucuguggaauaaaauaaaacaa

SEQ ID NO: 2110 - RNA, 22 nt, Vaccinia Virus
ugugauuuuucuuccuaaacug

SEQ ID NO: 2111 - RNA, 22 nt, Vaccinia Virus
uuaauaauauaaaauucccaau

SEQ ID NO: 2112 - RNA, 21 nt, Human immunodeficiency virus 1
ucuggcuaacuagggaaccca

SEQ ID NO: 2113 - RNA, 22 nt, Vaccinia Virus
acaagauugggaauuuuauauu

SEQ ID NO: 2114 - RNA, 22 nt, Respiratory Syncytial Virus
ucacagacaaaaagacugauag

SEQ ID NO: 2115 - RNA, 22 nt, Human herpesvirus 4
ggagcuccggccguguggccga

SEQ ID NO: 2116 - RNA, 22 nt, Human adenovirus E
aaacagcacuuucauguuacac

SEQ ID NO: 2117 - RNA, 22 nt, Human herpesvirus 5
aaaguuggcugcgcccguuggu

SEQ ID NO: 2118 - RNA, 22 nt, Transmissible Gastroenteritis Virus
uuagugcuaaauugauuggugu

SEQ ID NO: 2119 - RNA, 22 nt, Zaire Ebola Virus
ucuaaauuaaauuacauuaugc

SEQ ID NO: 2120 - RNA, 22 nt, Rat cytomegalovirus
ugguuuuuguucggaguagucg

SEQ ID NO: 2121 - RNA, 22 nt, Vaccinia Virus
guauuauacgcauuauaacuga

SEQ ID NO: 2122 - RNA, 22 nt, Human herpesvirus 6
ggugauuaaaucucucggaaag

SEQ ID NO: 2123 - RNA, 22 nt, Vaccinia Virus
uaaguuaguaauacauaaauuu

SEQ ID NO: 2124 - RNA, 22 nt, Rat cytomegalovirus
auaucaacuuccucucacccug

SEQ ID NO: 2125 - RNA, 22 nt, Rat Cytomegalovirus
cauguucgccaccaacccgacg

SEQ ID NO: 2126 - RNA, 22 nt, Human herpesvirus 7
uuggagucguucuauguaugaa

SEQ ID NO: 2127 - RNA, 22 nt, Human Immunodeficiency Virus 1
ccauugacagaagaaaaaauaa

SEQ ID NO: 2128 - RNA, 22 nt, Vaccinia Virus
aguuuaauauccucagucaucu

SEQ ID NO: 2129 - RNA, 22 nt, Rat Cytomegalovirus
agcgggggggaucucgacgcgc

SEQ ID NO: 2130 - RNA, 22 nt, Human Herpesvirus 2
cccgucugucgccucucccuuu

SEQ ID NO: 2131 - RNA, 22 nt, Human Herpesvirus 1
uggcauccagagggcgcugaag

SEQ ID NO: 2132 - RNA, 22 nt, Zaire Ebola Virus
aacacuguaccaagauccuuga

SEQ ID NO: 2133 - RNA, 22 nt, Marburg Virus
gauuuacuugauagaaugucaa

SEQ ID NO: 2134 - RNA, 22 nt, Vaccinia Virus
uaagaagauuaacgauuuccau

SEQ ID NO: 2135 - RNA, 22 nt, Human Herpesvirus 1
uacaaugcaaaagccuucgacg

SEQ ID NO: 2136 - RNA, 22 nt, Molluscum contagiosum virus
agacauacacgcaccucuucgu

SEQ ID NO: 2137 - RNA, 22 nt, Hepatitis C virus
uggaccaagaccuugugggcug

SEQ ID NO: 2138 - RNA, 21 nt, Vaccinia Virus
acauauccguuacaauuuguu

SEQ ID NO: 2139 - RNA, 22 nt, Vaccinia Virus
ugugacacccauucaucuggag

SEQ ID NO: 2140 - RNA, 22 nt, Human herpesvirus 5
acacggcaguuagagacuggag

SEQ ID NO: 2141 - RNA, 22 nt, Human Herpesvirus 5
augauguuuugucccucugucu

SEQ ID NO: 2142 - RNA, 22 nt, Vaccinia Virus
uuuuaucaguauguauaucuau

SEQ ID NO: 2143 - RNA, 22 nt, Vaccinia virus
gauaucucuagcguggauacag

SEQ ID NO: 2144 - RNA, 21 nt, Human Herpesvirus 8
ggaguggacuuucuccgugag

SEQ ID NO: 2145 - RNA, 22 nt, Vaccinia Virus
auguuagcuucuacagucuuuc

SEQ ID NO: 2146 - RNA, 22 nt, Human Adenovirus C
aaguuuaauaaagggugagaua

SEQ ID NO: 2147 - RNA, 22 nt, Vaccinia Virus
acacugauaaaccgcauuaucu

SEQ ID NO: 2148 - RNA, 22 nt, Vaccinia virus
aauguuugacugugccuaauau

SEQ ID NO: 2149 - RNA, 22 nt, Human parainfluenza virus 1 strain Washington/1964
uuauaugucaucuuggcaaaga

SEQ ID NO: 2150 - RNA, 22 nt, Hepatitis GB virus A
uugaggguggagcggucacagc

SEQ ID NO: 2151 - RNA, 22 nt, Human Herpesvirus 6B
cauuaaggcaguguugauuuuu

SEQ ID NO: 2152 - RNA, 22 nt, Human Herpesvirus 8
ccacacccccaggaucuuccuc

SEQ ID NO: 2153 - RNA, 22 nt, Transmissible Gastroenteritis Virus
acggugcuguacaggcauauaa

SEQ ID NO: 2154 - RNA, 22 nt, Vaccinia Virus
uauaaaauuauguauaugauuu

SEQ ID NO: 2155 - RNA, 22 nt, B19 Virus
uuaguggcacgucaaccccaag

SEQ ID NO: 2156 - RNA, 22 nt, Influenza B virus
aauugcuuccauuuguugcauu

SEQ ID NO: 2157 - RNA, 22 nt, Yellow Fever Virus
ucaaucagcacuucaucaucau

SEQ ID NO: 2158 - RNA, 22 nt, Human Herpesvirus 6
uucguuuucagguccgaacgcc

SEQ ID NO: 2159 - RNA, 22 nt, Rubella Virus
acugaugucucgugcgagggcu

SEQ ID NO: 2160 - RNA, 22 nt, Human Coronavirus 229E
uguacacaccuccgacugucag

SEQ ID NO: 2161 - RNA, 22 nt, Vaccinia Virus
aaauaagcuuugauaaagccuu

SEQ ID NO: 2162 - RNA, 22 nt, Yellow Fever Virus
uaauguagcugucuccaaaagg

SEQ ID NO: 2163 - RNA, 22 nt, Molluscum contagiosum virus
ugugcucacgacggagagcgcg

SEQ ID NO: 2164 - RNA, 22 nt, Human Herpesvirus 7
ucgcaaucacaacuagcuuuua

SEQ ID NO: 2165 - RNA, 20 nt, Rat Cytomegalovirus
ugcauauccgucuuuuaucc

SEQ ID NO: 2166 - RNA, 22 nt, Human Herpesvirus 5
gauggagcggcacgauggugac

SEQ ID NO: 2167 - RNA, 22 nt, Human Herpesvirus 6
gagcuaauaugaacaaugacau

SEQ ID NO: 2168 - RNA, 22 nt, Molluscum contagiosum virus
uuacuugguaccugugagggca

SEQ ID NO: 2169 - RNA, 22 nt, Vaccinia virus
ggcuauuagagguaaugauguu

SEQ ID NO: 2170 - RNA, 22 nt, Human herpesvirus 4
uggccaggcuccuaaaguuggu

SEQ ID NO: 2171 - RNA, 22 nt, Vaccinia Virus
uuaauuguaaaugauauuauua

SEQ ID NO: 2172 - RNA, 22 nt, Human Herpesvirus 4
ucuggcaacgcccggguccuug

SEQ ID NO: 2173 - RNA, 22 nt, Reston Ebola Virus
aauaugauauuucucuuaauaa

SEQ ID NO: 2174 - RNA, 22 nt, Human herpesvirus 5
ugacgugugcggugcuugugga

SEQ ID NO: 2175 - RNA, 22 nt, Human enterovirus E
ggggagguccgagauuauugca

SEQ ID NO: 2176 - RNA, 22 nt, Dengue virus
auauucauccuacugacagcca

SEQ ID NO: 2177 - RNA, 22 nt, Hepatitis GB virus C
ggccgcuacuacuacgcugggg

SEQ ID NO: 2178 - RNA, 22 nt, Vaccinia Virus
uacuagguagcaaauugucuag

SEQ ID NO: 2179 - RNA, 22 nt, Vaccinia Virus
cuugauaguuguuccuagauau

SEQ ID NO: 2180 - RNA, 22 nt, Vaccinia virus
aauagaucggaugauuuacuaa

SEQ ID NO: 2181 - RNA, 22 nt, Human Adenovirus E
ugcaagaucuccaacguggagc

SEQ ID NO: 2182 - RNA, 22 nt, Human Herpesvirus 2
acgggguugguuugggguuggu

SEQ ID NO: 2183 - RNA, 22 nt, Human Herpesvirus 7
uaugaaaauuuccuacaaaagu

SEQ ID NO: 2184 - RNA, 21 nt, Vaccinia Virus
uaucauauccuucacgcuaua

SEQ ID NO: 2185 - RNA, 22 nt, Reston Ebola Virus
uacaaucccugauuugaaugug

SEQ ID NO: 2186 - RNA, 22 nt, Human Herpesvirus 2
uagcacaugucugcauuuguuu

SEQ ID NO: 2187 - RNA, 22 nt, Human Herpesvirus 1
caacguauaaauccguccccgu

SEQ ID NO: 2188 - RNA, 22 nt, Influenza A virus
aaccuaugucgcauuucuucaa

SEQ ID NO: 2189 - RNA, 22 nt, Simian picornavirus 1
uuuaaugucacuaugaauucac

SEQ ID NO: 2190 - RNA, 22 nt, Human Herpesvirus 2
gaggauggaagggcagaagaug

SEQ ID NO: 2191 - RNA, 22 nt, Variola virus
uuuucuauuucaacagguguag

SEQ ID NO: 2192 - RNA, 22 nt, Rat Cytomegalovirus
guaauaaugaccggauguaauu

SEQ ID NO: 2193 - RNA, 22 nt, Human T-lymphotropic Virus 2
aaggcucugacgauuacccccu

SEQ ID NO: 2194 - RNA, 22 nt, Human Adenovirus E
ugcccgaccccaaugacggguu

SEQ ID NO: 2195 - RNA, 22 nt, Rat cytomegalovirus
uuggaugaguuaccuggccgga

SEQ ID NO: 2196 - RNA, 20 nt, Hepatitis GB virus B
aacguugccaaagauaggag

SEQ ID NO: 2197 - RNA, 22 nt, Human adenovirus B
uuuuccuugcgcccaaguugua

SEQ ID NO: 2198 - RNA, 22 nt, Vaccinia Virus
augguuuauauuccacuuuguu

SEQ ID NO: 2199 - RNA, 22 nt, Vaccinia Virus
acuagacauuuaccaugggaug

SEQ ID NO: 2200 - RNA, 22 nt, Human Herpesvirus 1
gcggggcggucauuggacgggg

SEQ ID NO: 2201 - RNA, 22 nt, Molluscum Contagiosum Virus
aucgucacgugaacuccaaggu

SEQ ID NO: 2202 - RNA, 22 nt, B19 Virus
ggcagccauuuuaaguguuuca

SEQ ID NO: 2203 - RNA, 22 nt, Rat cytomegalovirus
uucucguuuuaccguguccugg

SEQ ID NO: 2204 - RNA, 22 nt, Vaccinia Virus
ugagaaaaguguguucugaauc

SEQ ID NO: 2205 - RNA, 22 nt, Human Herpesvirus 4
caccacuagucaccagguguca

SEQ ID NO: 2206 - RNA, 22 nt, Molluscum contagiosum virus
ggcacggcugcagcuggccuug

SEQ ID NO: 2207 - RNA, 21 nt, Human Herpesvirus 6
uuaacucaggugguggcuugg

SEQ ID NO: 2208 - RNA, 22 nt, Vaccinia virus
uuggccauaguucccacuacac

SEQ ID NO: 2209 - RNA, 22 nt, Human herpesvirus 6B
aaguugaaaaaaaacugccgcu

SEQ ID NO: 2210 - RNA, 22 nt, Ovine adenovirus 7
auaauucuuuaagauugucucu

SEQ ID NO: 2211 - RNA, 22 nt, Rat Cytomegalovirus
uaucauagacaacuugacauuu

SEQ ID NO: 2212 - RNA, 22 nt, Human Herpesvirus 5
ccgcgugucuaaaccgcgugcu

SEQ ID NO: 2213 - RNA, 22 nt, Vaccinia virus
uuaguauaucaaagaucuuguu

SEQ ID NO: 2214 - RNA, 22 nt, Human Herpesvirus 5
ucuuacgcgggcugagcucggg

SEQ ID NO: 2215 - RNA, 22 nt, Variola Virus
uauaaauuuaauaagacuuuga

SEQ ID NO: 2216 - RNA, 22 nt, Influenza A Virus
gagugccaaagucuaugaggga

SEQ ID NO: 2217 - RNA, 22 nt, Human herpesvirus 7
aaaaaauccuguguggcugcug

SEQ ID NO: 2218 - RNA, 22 nt, Human Adenovirus A
uucuuuauguuaaucccaguuu

SEQ ID NO: 2219 - RNA, 22 nt, Vaccinia Virus
uaacaauauauuauuaguuuau

SEQ ID NO: 2220 - RNA, 22 nt, Vaccinia Virus
uauuuuauuuuauauuuuauau

SEQ ID NO: 2221 - RNA, 22 nt, Rat Cytomegalovirus
ucuuuuuuuauucugcguuuuu

SEQ ID NO: 2222 - RNA, 22 nt, Vaccinia virus
ucuuuaggaaagccuuuaucgu

SEQ ID NO: 2223 - RNA, 22 nt, Vaccinia Virus
uaaaauacaaaugacauucccu

SEQ ID NO: 2224 - RNA, 22 nt, Rat Cytomegalovirus
cggacgacgccggccgcggccc

SEQ ID NO: 2225 - RNA, 22 nt, Variola virus and Vaccinia virus
uggucuauacaaauccauuaau

SEQ ID NO: 2226 - RNA, 22 nt, Molluscum contagiosum virus
uuugaacucuugcgagcggcaa

SEQ ID NO: 2227 - RNA, 22 nt, Human Papillomavirus Type 6
uugcuguggaugugacagcaac

SEQ ID NO: 2228 - RNA, 22 nt, Variola virus
uuuguaucgaauaaaguauuug

SEQ ID NO: 2229 - RNA, 22 nt, Sindbis Virus
ugagauccuugcuagucaagga

SEQ ID NO: 2230 - RNA, 22 nt, Vaccinia Virus
agaugcagaaguaaugaagaaa

SEQ ID NO: 2231 - RNA, 22 nt, Human Herpesvirus 6
ugacaggaucguccccuuggcu

SEQ ID NO: 2232 - RNA, 22 nt, Human Parainfluenza Virus 3
ugagauaaaaaaagaagagcua

SEQ ID NO: 2233 - RNA, 22 nt, Molluscum Contagiosum Virus
ucgucggugaaucccuuugucc

SEQ ID NO: 2234 - RNA, 22 nt, Vaccinia Virus
aucgaucauaucuauaucaucc

SEQ ID NO: 2235 - RNA, 22 nt, Human Herpesvirus 6B
aucgcagagcguuuucggaacu

SEQ ID NO: 2236 - RNA, 22 nt, Human Herpesvirus 8
uggcugcuguucaacggacccg

SEQ ID NO: 2237 - RNA, 22 nt, Human parainfluenza virus 2
uuccgcuguguucaauguacuu

SEQ ID NO: 2238 - RNA, 22 nt, Molluscum Contagiosum Virus
cgcaugcacagccgcuuucugg

SEQ ID NO: 2239 - RNA, 22 nt, Human Enterovirus C
ccggggaaacagaagugcuugu

SEQ ID NO: 2240 - RNA, 22 nt, Human Adenovirus E
gggauuagcagucauaaucauc

SEQ ID NO: 2241 - RNA, 22 nt, Human Herpesvirus 7
aaaaaguugauugaagucauuu

SEQ ID NO: 2242 - RNA, 22 nt, Human herpesvirus 5
ugcacggccacggugcuguaga

SEQ ID NO: 2243 - RNA, 22 nt, Human herpesvirus 7
uggaagagaccaucagagacau

SEQ ID NO: 2244 - RNA, 22 nt, Rat Cytomegalovirus
acggacagaucgagacggacca

SEQ ID NO: 2245 - RNA, 22 nt, Variola Virus
uaggucaucauuauauuuggau

SEQ ID NO: 2246 - RNA, 22 nt, Variola virus and Vaccinia virus
aaguaugauccgguauuaaugu

SEQ ID NO: 2247 - RNA, 22 nt, Human herpesvirus 5
uucagcgugcucauuaccuguc

SEQ ID NO: 2248 - RNA, 22 nt, Human Herpesvirus 5
ucuagcgccgcuguugcagagu

SEQ ID NO: 2249 - RNA, 22 nt, Rat cytomegalovirus
guaaugagggcgaaaauucgga

SEQ ID NO: 2250 - RNA, 22 nt, Zaire Ebola virus
gguuuuucuuaaucuucaucac

SEQ ID NO: 2251 - RNA, 22 nt, Human Herpesvirus 1
gugcucugauagucucgcgugc

SEQ ID NO: 2252 - RNA, 22 nt, Variola Virus
auguuuggauaguagcguugcc

SEQ ID NO: 2253 - RNA, 22 nt, Human Herpesvirus 4
uguuaggguuggaaaagugggg

SEQ ID NO: 2254 - RNA, 22 nt, Vaccinia Virus
uaauauaaacuaauaauauauu

SEQ ID NO: 2255 - RNA, 22 nt, Human metapneumovirus
uuaauucaaguugacuggggua

SEQ ID NO: 2256 - RNA, 22 nt, Vaccinia virus
uuaucuauugaugguguaugaa

SEQ ID NO: 2257 - RNA, 22 nt, Human Herpesvirus 5
cauggcggacgagagaaaaugg

SEQ ID NO: 2258 - RNA, 22 nt, Rat Cytomegalovirus
gugggcuccccccaaaugucua

SEQ ID NO: 2259 - RNA, 22 nt, Rat Cytomegalovirus
ggauacgauacagcgaaaucaa

SEQ ID NO: 2260 - RNA, 22 nt, Human herpesvirus 5
ugucacuuuagccauggucugc

SEQ ID NO: 2261 - RNA, 22 nt, Reston Ebola virus
uuauauuuuaguauuaaauuuu

SEQ ID NO: 2262 - RNA, 22 nt, Human adenovirus B
ggcugcgacaucuagaccacug

SEQ ID NO: 2263 - RNA, 22 nt, Rat cytomegalovirus
ugcugagauacucguuggccag

SEQ ID NO: 2264 - RNA, 22 nt, Human Coronavirus 229E
ugaaagauggcacuguuaccuu

SEQ ID NO: 2265 - RNA, 22 nt, Tick-borne Encephalitis Virus
cagccuugggagcuuggucaga

SEQ ID NO: 2266 - RNA, 22 nt, Variola Virus
ucuauccagggaaaucaaagaa

SEQ ID NO: 2267 - RNA, 22 nt, Human Herpesvirus 8
uuagggcaccagggacuaccua

SEQ ID NO: 2268 - RNA, 22 nt, Molluscum Contagiosum Virus
gcgggcccgugguagccgcggg

SEQ ID NO: 2269 - RNA, 22 nt, Human Herpesvirus 6B
uauuguguaccuuguaaucucu

SEQ ID NO: 2270 - RNA, 22 nt, Measles virus
auagaguuaagcaauccaucuu

SEQ ID NO: 2271 - RNA, 22 nt, Human herpesvirus 5
uuccucuucguacaggaugauu

SEQ ID NO: 2272 - RNA, 22 nt, Molluscum contagiosum virus
acgacgaagaugcagugguugu

SEQ ID NO: 2273 - RNA, 22 nt, Colorado tick fever virus
ugccuguagugaauguaccacc

SEQ ID NO: 2274 - RNA, 22 nt, Human herpesvirus 5
ggaggacgacagcucguguauc

SEQ ID NO: 2275 - RNA, 22 nt, Marburg Virus
uggugauagauuaauccuugaa

SEQ ID NO: 2276 - RNA, 22 nt, Human Herpesvirus 6B
ugugaaacuaugaggaacugau

SEQ ID NO: 2277 - RNA, 22 nt, Vaccinia Virus
auauuaucuacgucauuguuuu

SEQ ID NO: 2278 - RNA, 22 nt, Human adenovirus B
gggucuuccauccacaguagau

SEQ ID NO: 2279 - RNA, 22 nt, B19 Virus
aggcaaccccaagcaagcuggc

SEQ ID NO: 2280 - RNA, 22 nt, Human Herpesvirus 1
ugacggggguucgcgaagacgg

SEQ ID NO: 2281 - RNA, 22 nt, Vaccinia Virus
gagguaucuucuuaacuuucuc

SEQ ID NO: 2282 - RNA, 22 nt, Human Adenovirus F
cagcgguaucugcguggauucc

SEQ ID NO: 2283 - RNA, 22 nt, Rat Cytomegalovirus
ggagaucgacgcguggguccgc

SEQ ID NO: 2284 - RNA, 20 nt, Human herpesvirus 8
agaggucuucaucgcacauc

SEQ ID NO: 2285 - RNA, 22 nt, Human Enterovirus C
ugagguacaaagaucugaagau

SEQ ID NO: 2286 - RNA, 22 nt, Vaccinia Virus
acuauuuucguaacuggcggau

SEQ ID NO: 2287 - RNA, 22 nt, Human Herpesvirus 8
caagcaagaguggcuaaugucu

SEQ ID NO: 2288 - RNA, 22 nt, Variola virus
aagaaauauggauccucuaucc

SEQ ID NO: 2289 - RNA, 22 nt, Human Parainfluenza Virus 1 Strain Washington/1964
uuguaucucuuaauacucuauc

SEQ ID NO: 2290 - RNA, 22 nt, Vaccinia Virus
uucguugaucacauuuagauaa

SEQ ID NO: 2291 - RNA, 22 nt, Human Adenovirus D
cagccgcagccgccaugacagc

SEQ ID NO: 2292 - RNA, 22 nt, Human Herpesvirus 5
uagacaccccagaaaagaagca

SEQ ID NO: 2293 - RNA, 22 nt, Influenza A virus
uggguucuugggaccauuggau

SEQ ID NO: 2294 - RNA, 22 nt, Measles virus
acuguucucaguagucuccugu

SEQ ID NO: 2295 - RNA, 22 nt, Rat cytomegalovirus
aggaggacgacgacgagcgagg

SEQ ID NO: 2296 - RNA, 22 nt, Human herpesvirus 6B
ucuuuaccacgcgcucauucuc

SEQ ID NO: 2297 - RNA, 22 nt, Human Herpesvirus 5
ugggacaggaaaaagcguguga

SEQ ID NO: 2298 - RNA, 22 nt, Zaire Ebola virus
uuccgguagaaacauuucucag

SEQ ID NO: 2299 - RNA, 22 nt, Vaccinia virus
ggauauuuccucuggagaugac

SEQ ID NO: 2300 - RNA, 22 nt, Variola Virus
aaucucacaacuuuacuguuuu

SEQ ID NO: 2301 - RNA, 22 nt, Measles virus
agccgcucauuuucuuacuuuu

SEQ ID NO: 2302 - RNA, 22 nt, Human Herpesvirus 8
aucagcuaggccucaguauucu

SEQ ID NO: 2303 - RNA, 22 nt, Human Herpesvirus 1
uccccgggggaaaacaggauag

SEQ ID NO: 2304 - RNA, 22 nt, Human Herpesvirus 3
cacccuaucuuuauaaguaugc

SEQ ID NO: 2305 - RNA, 22 nt, Rat Cytomegalovirus
uacguugggaugcucgucgaug

SEQ ID NO: 2306 - RNA, 22 nt, Vaccinia Virus
gucccuuaauaggcaguaggcu

SEQ ID NO: 2307 - RNA, 22 nt, Human herpesvirus 4
agcucugcuuuucaacggagcu

SEQ ID NO: 2308 - RNA, 22 nt, Human Adenovirus A
aagcguucaauaguugccacgc

SEQ ID NO: 2309 - RNA, 22 nt, Vaccinia virus
uguccacaucuauagacgacga

SEQ ID NO: 2310 - RNA, 20 nt, Human immunodeficiency virus 1
ucuggcuaacuagggaaccc

SEQ ID NO: 2311 - RNA, 22 nt, Vaccinia Virus
gaguugucauccaugguaaucc

SEQ ID NO: 2312 - RNA, 22 nt, Human Adenovirus E
augcaucuuaucaauugccccg

SEQ ID NO: 2313 - RNA, 22 nt, Human herpesvirus 4
ggaaccuaguguuaguguugug

SEQ ID NO: 2314 - RNA, 22 nt, Human Herpesvirus 8
aagcugcaauaccgccgauggc

SEQ ID NO: 2315 - RNA, 22 nt, Influenza A virus
ugggaacagugaccacagaagu

SEQ ID NO: 2316 - RNA, 22 nt, Human Herpesvirus 6
uaucuucgagaagacaaaaaua

SEQ ID NO: 2317 - RNA, 22 nt, Human herpesvirus 4
agagcgaagacgaggagucuga

SEQ ID NO: 2318 - RNA, 22 nt, Vaccinia virus
augaaguuaaugauacacacua

SEQ ID NO: 2319 - RNA, 22 nt, SARS coronavirus
uuaugacaaacugcaauuuaca

SEQ ID NO: 2320 - RNA, 22 nt, Rat Cytomegalovirus
uaccacacaaggaucaaagcag

SEQ ID NO: 2321 - RNA, 22 nt, Human herpesvirus 8
ugucuacuuugcauauuuggaa

SEQ ID NO: 2322 - RNA, 22 nt, Human herpesvirus 6B
aguuugauuauguuucugaugu

SEQ ID NO: 2323 - RNA, 22 nt, Human Herpesvirus 5
uacacaacagcuguuggauucu

SEQ ID NO: 2324 - RNA, 22 nt, Tick-borne encephalitis virus
ugccggagguggccggucacuu

SEQ ID NO: 2325 - RNA, 22 nt, Tick-borne encephalitis virus
ggcgcgcaucucaccggggugc

SEQ ID NO: 2326 - RNA, 22 nt, Rat Cytomegalovirus
aucgcgguccguucgggagcgg

SEQ ID NO: 2327 - RNA, 22 nt, Human Herpesvirus 6B
uucaauuuaaaauaauuuuugu

SEQ ID NO: 2328 - RNA, 22 nt, Variola virus and Vaccinia virus
uuuguugugcuguuguacauac

SEQ ID NO: 2329 - RNA, 22 nt, Human Herpesvirus 4
ugaggggagguggggugucugc

SEQ ID NO: 2330 - RNA, 22 nt, Vaccinia Virus
uuaugaauugauuccggaagau

SEQ ID NO: 2331 - RNA, 22 nt, Molluscum Contagiosum Virus
gaccugcacgacccucuucgac

SEQ ID NO: 2332 - RNA, 22 nt, Variola Virus
uuagagauuucagcuucuggaa

SEQ ID NO: 2333 - RNA, 22 nt, Hepatitis GB Virus C
ugaggacuggucgccaccuugu

SEQ ID NO: 2334 - RNA, 22 nt, Vaccinia Virus
aaguacauucacaccucguucg

SEQ ID NO: 2335 - RNA, 22 nt, Molluscum contagiosum virus
uugcgcuucgagaugggaaugc

SEQ ID NO: 2336 - RNA, 22 nt, Human Herpesvirus 2
cccacgccucccgccgcauuag

SEQ ID NO: 2337 - RNA, 19 nt, Ovine Adenovirus 7
cuugccucugaaacacgaa

SEQ ID NO: 2338 - RNA, 22 nt, Human Herpesvirus 1
agacgccgaaaacgggcccccc

SEQ ID NO: 2339 - RNA, 22 nt, Zaire Ebola virus
uguuggcuuaaguauucgcaau

SEQ ID NO: 2340 - RNA, 22 nt, Human herpesvirus 3
ugugaauauauuccacuguucu

SEQ ID NO: 2341 - RNA, 22 nt, Human herpesvirus 5
uuguuuuuuggugaauauaguu

SEQ ID NO: 2342 - RNA, 22 nt, Molluscum Contagiosum Virus
cacgagggaagcgucacccuga

SEQ ID NO: 2343 - RNA, 22 nt, Equine rhinovirus 3
agcauugagguaguacuuaaua

SEQ ID NO: 2344 - RNA, 22 nt, Variola virus and Vaccinia virus
aaugucgagcuuuguuaccaau

SEQ ID NO: 2345 - RNA, 22 nt, Human Adenovirus A
cuaaaaaauuccaugguuuaug

SEQ ID NO: 2346 - RNA, 22 nt, Human adenovirus B
gguuuuagauuccacauuccaa

SEQ ID NO: 2347 - RNA, 22 nt, Vaccinia Virus
uuagauauccguaacacuacca

SEQ ID NO: 2348 - RNA, 22 nt, Human enterovirus E
aggcagcaaggccaugugauga

SEQ ID NO: 2349 - RNA, 22 nt, Human herpesvirus 4
aggcauagagagugaugagccc

SEQ ID NO: 2350 - RNA, 22 nt, Human Adenovirus F
gcaagcccauucugccaguugg

SEQ ID NO: 2351 - RNA, 22 nt, Rat Cytomegalovirus
uuucaaaguacuguuguucgua

SEQ ID NO: 2352 - RNA, 22 nt, Rat Cytomegalovirus
acggccgcggcgacgaugaggu

SEQ ID NO: 2353 - RNA, 22 nt, Human Herpesvirus 4
cgcuccgggggcagccgggcgg

SEQ ID NO: 2354 - RNA, 22 nt, Human herpesvirus 7
uuuccucauacaaccuuuucca

SEQ ID NO: 2355 - RNA, 22 nt, Hepatitis GB Virus C
ucagagguauuggguggggcgg

SEQ ID NO: 2356 - RNA, 22 nt, Reston Ebola virus
cagguguaucacuuaggaauuu

SEQ ID NO: 2357 - RNA, 22 nt, Human Herpesvirus 4
accccagccccgccgaucccuc

SEQ ID NO: 2358 - RNA, 22 nt, Vaccinia virus
uucuauucucguccauuuuagg

SEQ ID NO: 2359 - RNA, 22 nt, Vaccinia Virus
guuuuuauguuaugucuuuuag

SEQ ID NO: 2360 - RNA, 22 nt, Vaccinia Virus
ccuguauaaccaugagagcauc

SEQ ID NO: 2361 - RNA, 22 nt, Human Herpesvirus 5
guguguguuugcgcccccgugu

SEQ ID NO: 2362 - RNA, 22 nt, Bovine kobuvirus
uucucucagugaaauaggugcg

SEQ ID NO: 2363 - RNA, 22 nt, Human Herpesvirus 2
gcggcuggggaaagggaaggaa

SEQ ID NO: 2364 - RNA, 22 nt, Human Astrovirus
cagguuugacaucauagacacu

SEQ ID NO: 2365 - RNA, 22 nt, Human Herpesvirus 5
cauacguuuuugggaaaguugg

SEQ ID NO: 2366 - RNA, 22 nt, Human herpesvirus 5
uggcgucguuauaacauuguaa

SEQ ID NO: 2367 - RNA, 19 nt, Human herpesvirus 5
ggcuguacgcuacgagacg

SEQ ID NO: 2368 - RNA, 22 nt, Vaccinia Virus
uccauuagaauaauugggauug

SEQ ID NO: 2369 - RNA, 22 nt, SARS coronavirus
uuagaccuuugacugaaccuuc

SEQ ID NO: 2370 - RNA, 22 nt, Human herpesvirus 6
ugagauuuucaauccggaguua

SEQ ID NO: 2371 - RNA, 22 nt, Human Herpesvirus 6B
aagcaguggauugucacaaucu

SEQ ID NO: 2372 - RNA, 22 nt, Human adenovirus E
ugugguggugugucagguucag

SEQ ID NO: 2373 - RNA, 22 nt, Human Adenovirus A
aguguuuucuagaguguguuua

SEQ ID NO: 2374 - RNA, 22 nt, Human Herpesvirus 1
cccccgagucuucggaaugucu

SEQ ID NO: 2375 - RNA, 22 nt, Japanese encephalitis virus
gcuguguccuucacauuccauc

SEQ ID NO: 2376 - RNA, 22 nt, Rat Cytomegalovirus
agucgucggccugcucgugcgg

SEQ ID NO: 2377 - RNA, 22 nt, Human Herpesvirus 1
cugcgacacaaucacccguccg

SEQ ID NO: 2378 - RNA, 22 nt, Human Herpesvirus 1
uccgcggaagacccaggccgcc

SEQ ID NO: 2379 - RNA, 22 nt, Vaccinia Virus
uguaaaguuaaaauuguuccgu

SEQ ID NO: 2380 - RNA, 22 nt, Variola virus and Vaccinia virus
ugaauggauacuaguuuucuaa

SEQ ID NO: 2381 - RNA, 22 nt, Human Immunodeficiency Virus 2
cgcuugcuugcuuaaagaccuc

SEQ ID NO: 2382 - RNA, 18 nt, Zaire Ebola Virus
uucaaauguuaaucuuuc

SEQ ID NO: 2383 - RNA, 22 nt, Human Herpesvirus 7
ucagacagcccuuuacucauaa

SEQ ID NO: 2384 - RNA, 22 nt, Human herpesvirus 3
ggugucuauuuccgcauaccuu

SEQ ID NO: 2385 - RNA, 22 nt, Human Herpesvirus 5
uacagaguauaacauagaguau

SEQ ID NO: 2386 - RNA, 22 nt, Sleeping disease virus
ggcagacgaagcucggcgggac

SEQ ID NO: 2387 - RNA, 22 nt, Eastern equine encephalitis virus
ggcauccccuuucuucacgcac

SEQ ID NO: 2388 - RNA, 22 nt, Molluscum contagiosum virus
gcgcggcgugcacgcuggcgag

SEQ ID NO: 2389 - RNA, 20 nt, Human Herpesvirus 1
ucagggcgaucggaacggcc

SEQ ID NO: 2390 - RNA, 22 nt, Molluscum Contagiosum Virus
gugcuccaagauuacuaguauu

SEQ ID NO: 2391 - RNA, 22 nt, Murray Valley Encephalitis Virus
guucaucugcgugagcuuccga

SEQ ID NO: 2392 - RNA, 22 nt, Human herpesvirus 4
uggcggguggagauagggacca

SEQ ID NO: 2393 - RNA, 22 nt, Human Herpesvirus 2
gagaguucacucggcacgcaug

SEQ ID NO: 2394 - RNA, 20 nt, Rat Cytomegalovirus
uucgagaauagcgagcaugg

SEQ ID NO: 2395 - RNA, 22 nt, Human Herpesvirus 8
ugaggaagcaucugguccuaag

SEQ ID NO: 2396 - RNA, 22 nt, Vaccinia Virus
cagcauccggcuuauccgccuc

SEQ ID NO: 2397 - RNA, 22 nt, Rat Cytomegalovirus
aguguugauaucauccuuaucg

SEQ ID NO: 2398 - RNA, 22 nt, Vaccinia Virus
uaguuuggaauaacucggaucu

SEQ ID NO: 2399 - RNA, 22 nt, Reston Ebola Virus
ucgcccauugaaaaugugaucu

SEQ ID NO: 2400 - RNA, 22 nt, Human Herpesvirus 1
ugccuggcgcccccacccucgg

SEQ ID NO: 2401 - RNA, 22 nt, Vaccinia Virus
guuguggaucuucuacaauauc

SEQ ID NO: 2402 - RNA, 22 nt, Reston Ebola Virus
aaguauccugugguuuuuuucu

SEQ ID NO: 2403 - RNA, 22 nt, Variola Virus
gauucuauauauucgaauauau

SEQ ID NO: 2404 - RNA, 22 nt, Vaccinia Virus
cguaaaaaaguuuuaucuuucu

SEQ ID NO: 2405 - RNA, 22 nt, Human herpesvirus 6B
uuagugagggacuuacacgugu

SEQ ID NO: 2406 - RNA, 22 nt, Human Herpesvirus 6B
ugagugaucugauucgacaaau

SEQ ID NO: 2407 - RNA, 22 nt, Rat Cytomegalovirus
gcccucgggccaggccaggcga

SEQ ID NO: 2408 - RNA, 22 nt, Human Herpesvirus 2
aacccguauccuuuuuuucuag

SEQ ID NO: 2409 - RNA, 22 nt, Vaccinia Virus
agauaauauccugaacagcauu

SEQ ID NO: 2410 - RNA, 22 nt, Ovine adenovirus 7
auaauguuauuguuaacuguag

SEQ ID NO: 2411 - RNA, 22 nt, Marburg Virus
ugauuauuaucgucguagucuu

SEQ ID NO: 2412 - RNA, 22 nt, Human Herpesvirus 2
caucugccgucugcgcaacacc

SEQ ID NO: 2413 - RNA, 22 nt, Human adenovirus C
auaagcuggacaaagauuugcu

SEQ ID NO: 2414 - RNA, 19 nt, Vaccinia Virus
uuugugguauuggauagaa

SEQ ID NO: 2415 - RNA, 22 nt, Molluscum Contagiosum Virus
cacgaucaagacauuucuccuc

SEQ ID NO: 2416 - RNA, 22 nt, Human herpesvirus 4
acagcacgucacuuccacuaag

SEQ ID NO: 2417 - RNA, 22 nt, Variola virus
uuuacauguccuuuuuguagaa

SEQ ID NO: 2418 - RNA, 22 nt, Marburg virus
aguaaggaauugcuugucuuug

SEQ ID NO: 2419 - RNA, 22 nt, Human herpesvirus 8
ggaaugguggccugguugacac

SEQ ID NO: 2420 - RNA, 22 nt, Marburg Virus
aaagacuacguuacguuuucuc

SEQ ID NO: 2421 - RNA, 22 nt, Vaccinia Virus
cauggaguagaugauagagggg

SEQ ID NO: 2422 - RNA, 21 nt, Human Herpesvirus 6
uaauaucguuuuuucuuugug

SEQ ID NO: 2423 - RNA, 22 nt, Human coronavirus OC43
agaaaagucgagauaaggcacu

SEQ ID NO: 2424 - RNA, 22 nt, Molluscum contagiosum virus
ugcagcagcagcgcuuucaggu

SEQ ID NO: 2425 - RNA, 22 nt, Human Herpesvirus 2
cgccgggucuugucgcggccgg

SEQ ID NO: 2426 - RNA, 22 nt, Vaccinia Virus
uagaguuuguacauuaagcaac

SEQ ID NO: 2427 - RNA, 22 nt, Colorado tick fever virus
aucaggcgcuguuugagguccg

SEQ ID NO: 2428 - RNA, 22 nt, Human Herpesvirus 6B
uaacgaaucaaaagccaugaag

SEQ ID NO: 2429 - RNA, 22 nt, Human Immunodeficiency Virus 1
uauagugcagaacauccagggg

SEQ ID NO: 2430 - RNA, 19 nt, Human herpesvirus 7
ggucuggauauauuuagaa

SEQ ID NO: 2431 - RNA, 22 nt, Measles virus
uucaggucgggauugaguucga

SEQ ID NO: 2432 - RNA, 22 nt, Rat cytomegalovirus
uggaacugacggucauuuguuc

SEQ ID NO: 2433 - RNA, 22 nt, Human herpesvirus 1
agucguucuagguucaccaugc

SEQ ID NO: 2434 - RNA, 22 nt, Human herpesvirus 6B
auaugggaguuuuucuaaguac

SEQ ID NO: 2435 - RNA, 22 nt, Human Herpesvirus 7
acaguaaugcgguuuuguacau

SEQ ID NO: 2436 - RNA, 22 nt, Human Herpesvirus 1
gagcggggggaggagcgggggg

SEQ ID NO: 2437 - RNA, 22 nt, Marburg virus
aguggauuaauuugucugagga

SEQ ID NO: 2438 - RNA, 22 nt, Ovine adenovirus 7
acuccacugacccugucaucug

SEQ ID NO: 2439 - RNA, 22 nt, Molluscum Contagiosum Virus
uuuuacuucaaucuuugcgucg

SEQ ID NO: 2440 - RNA, 22 nt, Respiratory syncytial virus
uuugaagucauaauuuugcaau

SEQ ID NO: 2441 - RNA, 22 nt, Human herpesvirus 6
uucuauuuuguagauagagaug

SEQ ID NO: 2442 - RNA, 22 nt, Variola virus
aaaucagcugcuuuagaugauu

SEQ ID NO: 2443 - RNA, 22 nt, Human herpesvirus 2
gggcggcagcagcgccgggucg

SEQ ID NO: 2444 - RNA, 22 nt, Human Herpesvirus 8
gaccagccuugccauaugcugc

SEQ ID NO: 2445 - RNA, 22 nt, Vaccinia Virus
uguaguaagugucgauuguaau

SEQ ID NO: 2446 - RNA, 22 nt, Influenza A virus
auagggccuuaaugagcugccc

SEQ ID NO: 2447 - RNA, 22 nt, Molluscum Contagiosum Virus
uggcgggcagcucugcuggcag

SEQ ID NO: 2448 - RNA, 22 nt, Japanese encephalitis virus
aggagguccuucgcaagaggug

SEQ ID NO: 2449 - RNA, 22 nt, Variola Virus
cauguguuuuaauauauauaua

SEQ ID NO: 2450 - RNA, 22 nt, Influenza B virus
uuacugguugauaaccugaugu

SEQ ID NO: 2451 - RNA, 22 nt, Molluscum contagiosum virus
guacucuaccaugcgcagguag

SEQ ID NO: 2452 - RNA, 22 nt, Molluscum Contagiosum Virus
uccacggaaacaagagaguuca

SEQ ID NO: 2453 - RNA, 22 nt, Human Herpesvirus 2
ccgccgcccgaacccccccgcc

SEQ ID NO: 2454 - RNA, 22 nt, Poliovirus
aacuguauguaguuguuaauag

SEQ ID NO: 2455 - RNA, 22 nt, Molluscum Contagiosum Virus
ggcgccggcggccggcaccgga

SEQ ID NO: 2456 - RNA, 22 nt, Human parechovirus 2
ugcaacuacacaaaccagugau

SEQ ID NO: 2457 - RNA, 22 nt, Human adenovirus D
uuggcggacauauggaauuucu

SEQ ID NO: 2458 - RNA, 17 nt, Rat Cytomegalovirus
gggggcugaagaaggac

SEQ ID NO: 2459 - RNA, 22 nt, Human Herpesvirus 5
cgaguuagccuuucccguccgu

SEQ ID NO: 2460 - RNA, 22 nt, Human Adenovirus E
agucguuggagaugcggcccau

SEQ ID NO: 2461 - RNA, 22 nt, Human Adenovirus F
uugucgccccugugagugugga

SEQ ID NO: 2462 - RNA, 22 nt, Human metapneumovirus
acuuugaguauuggaccauuuu

SEQ ID NO: 2463 - RNA, 22 nt, Respiratory Syncytial Virus
aaaauuaaggagagacauaaga

SEQ ID NO: 2464 - RNA, 22 nt, Human herpesvirus 3
auaauuuuacaauugguuugau

SEQ ID NO: 2465 - RNA, 22 nt, Human adenovirus B
aagucgaugucgucacaggcuc

SEQ ID NO: 2466 - RNA, 22 nt, Influenza B virus
aaagacaacaacaagacagcaa

SEQ ID NO: 2467 - RNA, 22 nt, Variola virus and Vaccinia virus
aaaaccaauuccuuuuugccug

SEQ ID NO: 2468 - RNA, 22 nt, Vaccinia virus
ugaaaggggaugcuagugcggc

SEQ ID NO: 2469 - RNA, 21 nt, Vaccinia Virus
ugauauaccuguuuuuauuuc

SEQ ID NO: 2470 - RNA, 22 nt, Simian picornavirus 1
uugaauugguucuuguuaauuu

SEQ ID NO: 2471 - RNA, 22 nt, Molluscum Contagiosum Virus
ugugugugugugcgcucacacg

SEQ ID NO: 2472 - RNA, 22 nt, Vaccinia Virus
gaugccauguuaaaaauguccg

SEQ ID NO: 2473 - RNA, 22 nt, Transmissible Gastroenteritis Virus
uaccauuucauguguucauaac

SEQ ID NO: 2474 - RNA, 22 nt, Human herpesvirus 5
uuccuuuccuguuuuguacucg

SEQ ID NO: 2475 - RNA, 22 nt, Molluscum contagiosum virus
gggggcuugccgugccuagcgu

SEQ ID NO: 2476 - RNA, 22 nt, Rat Cytomegalovirus
agucaaggauaccccauuggcg

SEQ ID NO: 2477 - RNA, 22 nt, Encephalomyocarditis virus
gcuggguccgugacuacccacu

SEQ ID NO: 2478 - RNA, 22 nt, Hepatitis GB virus B
agagccauuuuucccuuuugaa

SEQ ID NO: 2479 - RNA, 22 nt, Human Herpesvirus 1
uuucccgcgugucgcguguggu

SEQ ID NO: 2480 - RNA, 22 nt, Molluscum Contagiosum Virus
cuaaaucgcgcgcgggcucaag

SEQ ID NO: 2481 - RNA, 22 nt, Human Herpesvirus 4
acccccgggcgcccccaaacuu

SEQ ID NO: 2482 - RNA, 22 nt, Human Herpesvirus 7
uuuaaaaucuccguuacaguug

SEQ ID NO: 2483 - RNA, 22 nt, Human Coronavirus 229E
uugcauugcagacugauguuuu

SEQ ID NO: 2484 - RNA, 22 nt, Hepatitis GB Virus C
ugguggaugggugaugacaggg

SEQ ID NO: 2485 - RNA, 22 nt, Human Herpesvirus 6
uaggagauuguauaaguucggg

SEQ ID NO: 2486 - RNA, 22 nt, Human herpesvirus 5
auacaaaccggcgacgccaagu

SEQ ID NO: 2487 - RNA, 22 nt, Human coronavirus OC43
uuacaguuuacuacauugaccu

SEQ ID NO: 2488 - RNA, 22 nt, Human Herpesvirus 2
uccgugcuugccuagcgaacuc

SEQ ID NO: 2489 - RNA, 22 nt, Human herpesvirus 6
acaaucuucggauucgcaagcu

SEQ ID NO: 2490 - RNA, 22 nt, Human Herpesvirus 8
uagaaaacaagaccauuagcua

SEQ ID NO: 2491 - RNA, 22 nt, Reston Ebola Virus
ugaagauuaagaaaaaccaguc

SEQ ID NO: 2492 - RNA, 22 nt, Human Herpesvirus 2
ugcuguuggggcgcaagagcga

SEQ ID NO: 2493 - RNA, 22 nt, Human Herpesvirus 1
agagugccagcccugggaccga

SEQ ID NO: 2494 - RNA, 22 nt, Vaccinia Virus
ugauacauguauuaaaauacuu

SEQ ID NO: 2495 - RNA, 22 nt, Vaccinia Virus
aaguuggcugucaucuuaccaa

SEQ ID NO: 2496 - RNA, 22 nt, Molluscum contagiosum virus
ugccggguagacacgcgcucgg

SEQ ID NO: 2497 - RNA, 22 nt, Human Coronavirus 229E
uuccaucuaauguguaucuugu

SEQ ID NO: 2498 - RNA, 22 nt, Vaccinia Virus
gacacguauccgaguacugauu

SEQ ID NO: 2499 - RNA, 22 nt, SARS coronavirus
acaaaaacaccuucacgaggga

SEQ ID NO: 2500 - RNA, 22 nt, Human coronavirus 229E
gagccucuuuguuguguauuuu

SEQ ID NO: 2501 - RNA, 22 nt, Vaccinia virus
uuggaaccucaugagcugacgu

SEQ ID NO: 2502 - RNA, 22 nt, Human Herpesvirus 5
aaguugcgugucugaguggacg

SEQ ID NO: 2503 - RNA, 22 nt, Variola virus
uuucuaaagaacggagaauauc

SEQ ID NO: 2504 - RNA, 22 nt, Variola Virus
uguaaacuugacaaaaauugug

SEQ ID NO: 2505 - RNA, 22 nt, Human adenovirus C
ugcaaaauuuccaacguggagc

SEQ ID NO: 2506 - RNA, 22 nt, Molluscum contagiosum virus
uuuugcgggggcgcgcgaaugc

SEQ ID NO: 2507 - RNA, 22 nt, Variola virus
uugaauagauccauaaacgggg

SEQ ID NO: 2508 - RNA, 22 nt, Vaccinia Virus
auuauucuuaucaugcguccau

SEQ ID NO: 2509 - RNA, 22 nt, Vaccinia Virus
ccgcugagugguaaacaacaga

SEQ ID NO: 2510 - RNA, 22 nt, Human Herpesvirus 1
uguggggccccgggccggggcc

SEQ ID NO: 2511 - RNA, 22 nt, Human Herpesvirus 7
aagaaacugaauagaaauagau

SEQ ID NO: 2512 - RNA, 22 nt, Human Herpesvirus 8
acgcagcugcguauacccagcu

SEQ ID NO: 2513 - RNA, 22 nt, Hepatitis GB Virus A
gcggcaaggggaaaaauccuuc

SEQ ID NO: 2514 - RNA, 22 nt, Rubella virus
uggcaagacuacccgcauccuc

SEQ ID NO: 2515 - RNA, 22 nt, Ovine adenovirus 7
uugaacuuguuuuaaaucuuga

SEQ ID NO: 2516 - RNA, 22 nt, Human herpesvirus 6B and Human herpesvirus 6
uugaaaauauuuagaggugcuu

SEQ ID NO: 2517 - RNA, 22 nt, Vaccinia Virus
cucgccguagcuaccaugauag

SEQ ID NO: 2518 - RNA, 22 nt, Rat cytomegalovirus
uuuccguuuuuccucugcuuuc

SEQ ID NO: 2519 - RNA, 22 nt, Human herpesvirus 6B
ugauuuagcucucggacguaua

SEQ ID NO: 2520 - RNA, 22 nt, Rat Cytomegalovirus
aagacaaugaugacuacgacga

SEQ ID NO: 2521 - RNA, 22 nt, Rat Cytomegalovirus
agccuccgacccuuuauagcgu

SEQ ID NO: 2522 - RNA, 22 nt, Rat Cytomegalovirus
guguaaaagauauauggcucga

SEQ ID NO: 2523 - RNA, 22 nt, Vaccinia Virus
gcuacaguuccuuguucgucga

SEQ ID NO: 2524 - RNA, 21 nt, Human Adenovirus D
uggacuccugcggaccuugca

SEQ ID NO: 2525 - RNA, 22 nt, Human Herpesvirus 7
uucguguuuauucaauucugag

SEQ ID NO: 2526 - RNA, 22 nt, Vaccinia Virus
auugaccauuugucuggcuacu

SEQ ID NO: 2527 - RNA, 22 nt, Human Herpesvirus 6B
acugcacagaaucgagaucguu

SEQ ID NO: 2528 - RNA, 22 nt, Human Herpesvirus 8
ugugcaguagaguugugccuuc

SEQ ID NO: 2529 - RNA, 22 nt, Human Herpesvirus 6B
gauaacuaccguucaugcugua

SEQ ID NO: 2530 - RNA, 22 nt, Tick-borne encephalitis virus
cgcacccugguggugccgugcc

SEQ ID NO: 2531 - RNA, 22 nt, Rat Cytomegalovirus
cgccggagugggcgacgacccg

SEQ ID NO: 2532 - RNA, 22 nt, Molluscum Contagiosum Virus
acucgcagcucacgagauggcu

SEQ ID NO: 2533 - RNA, 22 nt, Human herpesvirus 6B
aguuaauuaaauugucuuccau

SEQ ID NO: 2534 - RNA, 22 nt, Human herpesvirus 6
ugcagacuucacuuugggcgau

SEQ ID NO: 2535 - RNA, 22 nt, Rat Cytomegalovirus
cggacgagagccuccgucuccc

SEQ ID NO: 2536 - RNA, 22 nt, Vaccinia Virus
acgcauauucuacucuuggaau

SEQ ID NO: 2537 - RNA, 22 nt, Human Adenovirus F
gagggauaacgguuguuuucca

SEQ ID NO: 2538 - RNA, 22 nt, Hepatitis C virus
aguaccucuucaacugggcagu

SEQ ID NO: 2539 - RNA, 22 nt, Human Herpesvirus 8
uccaguacgucguggucaacgg

SEQ ID NO: 2540 - RNA, 22 nt, Human Herpesvirus 2
cuguuuaugggccgggcguccc

SEQ ID NO: 2541 - RNA, 22 nt, Human adenovirus C
aaggaaauggccagucgggaag

SEQ ID NO: 2542 - RNA, 22 nt, Vaccinia Virus
ucaccacguguguuucaggauc

SEQ ID NO: 2543 - RNA, 22 nt, Molluscum Contagiosum Virus
ccggggcucugcgcagcgugcu

SEQ ID NO: 2544 - RNA, 22 nt, Vaccinia Virus
augccguagccguaaguacgug

SEQ ID NO: 2545 - RNA, 22 nt, Vaccinia Virus
uuuugugguuccacaauucauu

SEQ ID NO: 2546 - RNA, 22 nt, Human Herpesvirus 6
uccaggugucucaugcaaagca

SEQ ID NO: 2547 - RNA, 22 nt, Molluscum Contagiosum Virus
cuuccuccggcgaaaagccgcu

SEQ ID NO: 2548 - RNA, 22 nt, Vaccinia virus
aggacacuuugcacugaauggc

SEQ ID NO: 2549 - RNA, 21 nt, Human herpesvirus 4
aagaaugauggugggggaacc

SEQ ID NO: 2550 - RNA, 22 nt, Rat Cytomegalovirus
cgucgaucuggaagcuuguguu

SEQ ID NO: 2551 - RNA, 19 nt, Human herpesvirus 7
uguuaaauuggucuccgac

SEQ ID NO: 2552 - RNA, 22 nt, Human herpesvirus 6B
gguggcgcgucgcgaagucccg

SEQ ID NO: 2553 - RNA, 22 nt, Molluscum contagiosum virus
gcgcgcuacacugugcucacgu

SEQ ID NO: 2554 - RNA, 22 nt, Vaccinia Virus
uguaugcuccuagcggaguuaa

SEQ ID NO: 2555 - RNA, 22 nt, Human Herpesvirus 1
ugccuggcucucuaugcuuggg

SEQ ID NO: 2556 - RNA, 22 nt, Variola Virus
cauaacacuacuuugguuagau

SEQ ID NO: 2557 - RNA, 22 nt, Variola virus
uuggaaccacaugagcugacgu

SEQ ID NO: 2558 - RNA, 22 nt, Rat Cytomegalovirus
ugaagaguagaaauaauuacgg

SEQ ID NO: 2559 - RNA, 22 nt, Molluscum contagiosum virus
ggcgccaggaguaugagaagcg

SEQ ID NO: 2560 - RNA, 22 nt, Human Herpesvirus 8
uagaguacugcgguuuagcuag

SEQ ID NO: 2561 - RNA, 22 nt, Human adenovirus E
uuuguauacaauauggguaucu

SEQ ID NO: 2562 - RNA, 22 nt, Molluscum Contagiosum Virus
cuucugcucgggcccgaccuuu

SEQ ID NO: 2563 - RNA, 22 nt, Dengue Virus
uggaaugaugcugaggagacag

SEQ ID NO: 2564 - RNA, 22 nt, Influenza A virus
gcugggagcagggagguccauc

SEQ ID NO: 2565 - RNA, 22 nt, Rat Cytomegalovirus
aucauaggcauugguauuguua

SEQ ID NO: 2566 - RNA, 20 nt, Rat Cytomegalovirus
ucgcugcgugaucgccccac

SEQ ID NO: 2567 - RNA, 22 nt, SARS coronavirus
uugaguguugucaaugcuagac

SEQ ID NO: 2568 - RNA, 22 nt, Vaccinia virus
uuaggcauggacauacuaauau

SEQ ID NO: 2569 - RNA, 22 nt, Hepatitis GB virus B
aacugguucgcuuaccuugccu

SEQ ID NO: 2570 - RNA, 22 nt, Vaccinia Virus
aucgugcagguuaaauagaaug

SEQ ID NO: 2571 - RNA, 22 nt, Human Coronavirus 229E
agaggauguuuguacuuguuac

SEQ ID NO: 2572 - RNA, 22 nt, Human herpesvirus 5
aacgcuuucgucguguuuuuca

SEQ ID NO: 2573 - RNA, 22 nt, Molluscum contagiosum virus
uggcugcgugacgcugccgcgc

SEQ ID NO: 2574 - RNA, 22 nt, Vaccinia Virus
acgauuauuucugaauuauucc

SEQ ID NO: 2575 - RNA, 22 nt, Human Herpesvirus 8
ugggaugggggugugggauggg

SEQ ID NO: 2576 - RNA, 22 nt, Human Herpesvirus 8
agcggcacagaaucuuuccagg

SEQ ID NO: 2577 - RNA, 22 nt, SARS coronavirus
uuuggcauggcuguaugcugcu

SEQ ID NO: 2578 - RNA, 22 nt, Human Herpesvirus 6
uuacuagaugguaaagcguugu

SEQ ID NO: 2579 - RNA, 22 nt, Human Herpesvirus 4
acccuaauucgauagcauaugc

SEQ ID NO: 2580 - RNA, 22 nt, Salmon pancreas disease virus
uucacugugguaccagguggca

SEQ ID NO: 2581 - RNA, 22 nt, Human papillomavirus type 18
uggguuugauauaacaucugcg

SEQ ID NO: 2582 - RNA, 22 nt, Human herpesvirus 6
uugaguggacauuggucuuugc

SEQ ID NO: 2583 - RNA, 22 nt, Vaccinia virus
auaagauuguagaaucagcauc

SEQ ID NO: 2584 - RNA, 22 nt, Hepatitis GB Virus C
ggcccgaauccugucccacuac

SEQ ID NO: 2585 - RNA, 22 nt, Respiratory syncytial virus
uggaacuuacagaaagagauuu

SEQ ID NO: 2586 - RNA, 21 nt, Human Herpesvirus 7
aucggauuaaaaaccucuugu

SEQ ID NO: 2587 - RNA, 22 nt, Human Herpesvirus 4
ucccucucccucguccuggucg

SEQ ID NO: 2588 - RNA, 19 nt, Human Herpesvirus 2
cggcguccucuguccccga

SEQ ID NO: 2589 - RNA, 22 nt, Human coronavirus OC43
gcuucuauauugcaauugggaa

SEQ ID NO: 2590 - RNA, 22 nt, Human herpesvirus 5
uucaggauagguguggcgaaag

SEQ ID NO: 2591 - RNA, 22 nt, Human Herpesvirus 7
agauuacaguagauuuuaaaaa

SEQ ID NO: 2592 - RNA, 22 nt, Molluscum Contagiosum Virus
uugccggcguccucuucccgcg

SEQ ID NO: 2593 - RNA, 22 nt, Rat Cytomegalovirus
aucguaauugucuucgauaaau

SEQ ID NO: 2594 - RNA, 22 nt, Molluscum Contagiosum Virus
uauuuuuucaguuuuuguucuu

SEQ ID NO: 2595 - RNA, 22 nt, Marburg Virus
cuugaacacaauucuacuaacu

SEQ ID NO: 2596 - RNA, 22 nt, Human herpesvirus 7
uuauguucagacuugaaacaga

SEQ ID NO: 2597 - RNA, 22 nt, Human Herpesvirus 8
cgccagcaaauuuaaguccugg

SEQ ID NO: 2598 - RNA, 22 nt, Zaire Ebola Virus
gaaaaaaucggcgaugaagauu

SEQ ID NO: 2599 - RNA, 22 nt, Rat Cytomegalovirus
caccauggcgacgcgagcccgc

SEQ ID NO: 2600 - RNA, 22 nt, Variola virus and Vaccinia virus
uuagaaaacuaguauccauuca

SEQ ID NO: 2601 - RNA, 22 nt, Human Herpesvirus 7
gugucugaaagcucgccaaggu

SEQ ID NO: 2602 - RNA, 22 nt, Hepatitis GB virus A
ugcgugcugguggcgaugcacu

SEQ ID NO: 2603 - RNA, 22 nt, Human Herpesvirus 5
ugacuaaaguggaagccugacg

SEQ ID NO: 2604 - RNA, 22 nt, Variola virus
uuugguuuuucugaacguugau

SEQ ID NO: 2605 - RNA, 20 nt, Rat cytomegalovirus
uucaaugacccguucucccg

SEQ ID NO: 2606 - RNA, 22 nt, Human Parainfluenza Virus 3
gauauaucuuaaccuuuaucuu

SEQ ID NO: 2607 - RNA, 22 nt, Molluscum contagiosum virus
gcuauuuuuucaguuuuuguuc

SEQ ID NO: 2608 - RNA, 22 nt, Vaccinia Virus
ugauggagucguaaaaaaguuu

SEQ ID NO: 2609 - RNA, 22 nt, Human herpesvirus 6
uuacucagauguuuaucagagu

SEQ ID NO: 2610 - RNA, 22 nt, Rat cytomegalovirus
aucaauuuguacgaaccuaaga

SEQ ID NO: 2611 - RNA, 20 nt, Rat Cytomegalovirus
uccugccgccgccgaagauc

SEQ ID NO: 2612 - RNA, 22 nt, Reston Ebola Virus
caagcguuuuaccaucuugcau

SEQ ID NO: 2613 - RNA, 22 nt, Vaccinia virus
caauuuuuacuucgacgcauag

SEQ ID NO: 2614 - RNA, 22 nt, Human Enterovirus A
caggucgaugagucacugcgau

SEQ ID NO: 2615 - RNA, 22 nt, Human Adenovirus A
uauugcaaaccaaagaacggug

SEQ ID NO: 2616 - RNA, 19 nt, Human Herpesvirus 6
ggaccguacccggaccgga

SEQ ID NO: 2617 - RNA, 22 nt, Human herpesvirus 6B
ugguuuuaucaaagauuucaga

SEQ ID NO: 2618 - RNA, 22 nt, Human Herpesvirus 4
cuagcacaucacguaggcacca

SEQ ID NO: 2619 - RNA, 22 nt, Human Herpesvirus 5
ucuaacuagccuucccgugaga

SEQ ID NO: 2620 - RNA, 22 nt, Rat Cytomegalovirus
uucgauuucuacacgagaaaag

SEQ ID NO: 2621 - RNA, 22 nt, Human coronavirus OC43
aaugaaccuuaugucggcaucu

SEQ ID NO: 2622 - RNA, 22 nt, Transmissible Gastroenteritis Virus
gauugcuauuaguaaguggggc

SEQ ID NO: 2623 - RNA, 22 nt, Barmah Forest virus
acacuagcagaauaguauguau

SEQ ID NO: 2624 - RNA, 22 nt, Human Herpesvirus 1
cgggcggcgugcgcgcgcgcgg

SEQ ID NO: 2625 - RNA, 22 nt, Human herpesvirus 7
agucauuuucaaauagaguuua

SEQ ID NO: 2626 - RNA, 22 nt, Vaccinia Virus
auugacaucgaccgcguaauau

SEQ ID NO: 2627 - RNA, 22 nt, Human Herpesvirus 8
acauucacauuuauuuuuacaa

SEQ ID NO: 2628 - RNA, 22 nt, Adeno-associated virus 1
gcuucauucaucacccaauacu

SEQ ID NO: 2629 - RNA, 22 nt, Human Herpesvirus 8
cuucaaggccaucgagcuguac

SEQ ID NO: 2630 - RNA, 22 nt, Tick-borne Encephalitis Virus
ucaccggggugcggcuggagug

SEQ ID NO: 2631 - RNA, 22 nt, Human Coronavirus 229E
uggaaugcuuaaugguaaugca

SEQ ID NO: 2632 - RNA, 22 nt, Human herpesvirus 7
guaauuuuuggcuaacugagaa

SEQ ID NO: 2633 - RNA, 22 nt, Human Parainfluenza Virus 3
auaccagguauauauaauuuga

SEQ ID NO: 2634 - RNA, 22 nt, Human Parainfluenza Virus 3
uaucucaucauuaccaaaugcc

SEQ ID NO: 2635 - RNA, 22 nt, Hepatitis GB virus A
ggugcgcugccccuagucaugc

SEQ ID NO: 2636 - RNA, 22 nt, Transmissible Gastroenteritis Virus
uagaacuugccauucucauuga

SEQ ID NO: 2637 - RNA, 22 nt, SARS coronavirus
ugccuuaagaagcuggaugucc

SEQ ID NO: 2638 - RNA, 22 nt, Molluscum Contagiosum Virus
acgagcacugacucgcacuggu

SEQ ID NO: 2639 - RNA, 22 nt, Vaccinia Virus
auaaagucuugguaugacuccu

SEQ ID NO: 2640 - RNA, 22 nt, Molluscum contagiosum virus
cgcugccgugggcgcgcggcgc

SEQ ID NO: 2641 - RNA, 22 nt, Molluscum Contagiosum Virus
cagugcguagccguucugcguc

SEQ ID NO: 2642 - RNA, 22 nt, Vaccinia Virus
ugaugguucccauaaguuuggc

SEQ ID NO: 2643 - RNA, 22 nt, Molluscum Contagiosum Virus
cucaagcaugccaggcgcaggc

SEQ ID NO: 2644 - RNA, 22 nt, Bovine kobuvirus
uggacgcguggaugauguuguc

SEQ ID NO: 2645 - RNA, 22 nt, Reston Ebola virus
uucaagauaaccuaauauuugg

SEQ ID NO: 2646 - RNA, 22 nt, Marburg virus
acacgggcccugaaaaucuaau

SEQ ID NO: 2647 - RNA, 22 nt, Human Parainfluenza Virus 1 Strain Washington/1964
uaaugggugucauuauugagga

SEQ ID NO: 2648 - RNA, 22 nt, Human Herpesvirus 8
cccggcagcaccccaggagccc

SEQ ID NO: 2649 - RNA, 22 nt, Human Herpesvirus 6B
uuucugggauuauucugguaaa

SEQ ID NO: 2650 - RNA, 22 nt, Barmah Forest virus
gcggaacauuuuaagcacggug

SEQ ID NO: 2651 - RNA, 22 nt, Human Herpesvirus 7
uuuucggcgguuaagaugcuuu

SEQ ID NO: 2652 - RNA, 22 nt, Rat Cytomegalovirus
ccaggaccuguuccagaucuuc

SEQ ID NO: 2653 - RNA, 22 nt, Human Herpesvirus 7
auccuguaguuuuugaugguuu

SEQ ID NO: 2654 - RNA, 22 nt, Encephalomyocarditis virus
uuggcauacucuuuggcuacca

SEQ ID NO: 2655 - RNA, 22 nt, Human Herpesvirus 8
uaaugccauguacucauuuuac

SEQ ID NO: 2656 - RNA, 22 nt, Human adenovirus B
ugcuggacguuucccaggcuua

SEQ ID NO: 2657 - RNA, 22 nt, Rat Cytomegalovirus
uacaccgccaccguaaaaccac

SEQ ID NO: 2658 - RNA, 22 nt, Poliovirus
ugccauguguagucgucccauu

SEQ ID NO: 2659 - RNA, 22 nt, Human Herpesvirus 6B
gggaagguuuguaaggacaaag

SEQ ID NO: 2660 - RNA, 22 nt, Human immunodeficiency virus 1
ucuggcuaacuagggaacccac

SEQ ID NO: 2661 - RNA, 22 nt, Human herpesvirus 7
ugauauuuuuaacacaauggca

SEQ ID NO: 2662 - RNA, 22 nt, Human Adenovirus D
ucagcagcaggagcgugccgcc

SEQ ID NO: 2663 - RNA, 22 nt, Vaccinia Virus
acucuaauagcacgaucguggu

SEQ ID NO: 2664 - RNA, 22 nt, Human Herpesvirus 7
uauuguacauuuuucuauuagu

SEQ ID NO: 2665 - RNA, 22 nt, Transmissible Gastroenteritis Virus
uuucauugugcauaagcagacu

SEQ ID NO: 2666 - RNA, 22 nt, Human Herpesvirus 8
aggaaacauagaaguugcggau

SEQ ID NO: 2667 - RNA, 22 nt, Rat Cytomegalovirus
ugacacaugacacaagaacguc

SEQ ID NO: 2668 - RNA, 22 nt, Dengue Virus
ugucaacaugucuuccgucguc

SEQ ID NO: 2669 - RNA, 22 nt, Marburg Virus
uagcuuaagaauauuuuaaucg

SEQ ID NO: 2670 - RNA, 22 nt, Rat cytomegalovirus
aggcgucggugacgaccuugga

SEQ ID NO: 2671 - RNA, 21 nt, Rat Cytomegalovirus
uauuauaagcgcaauuacgau

SEQ ID NO: 2672 - RNA, 22 nt, Rat cytomegalovirus
uggagcaaauguggacccgagg

SEQ ID NO: 2673 - RNA, 22 nt, Rat Cytomegalovirus
aaagauaagaggaucgauuaag

SEQ ID NO: 2674 - RNA, 22 nt, Human Herpesvirus 5
cgugaccgagagcgugcgcagc

SEQ ID NO: 2675 - RNA, 22 nt, Human herpesvirus 7
aaauacaaaaacgguuuaugcg

SEQ ID NO: 2676 - RNA, 22 nt, Rat cytomegalovirus
uguucuuuuuccauacgacuac

SEQ ID NO: 2677 - RNA, 22 nt, Human Herpesvirus 4
cuggucccuaucuccacccgcc

SEQ ID NO: 2678 - RNA, 22 nt, Vaccinia Virus
auaacuacuucuucuuccacuu

SEQ ID NO: 2679 - RNA, 22 nt, Human herpesvirus 5
uuaggcuucgagcuggugccac

SEQ ID NO: 2680 - RNA, 19 nt, Human adenovirus B
ucuuucguacaauuauggc

SEQ ID NO: 2681 - RNA, 22 nt, Human Herpesvirus 4
aggaagugguugcgcaugcggg

SEQ ID NO: 2682 - RNA, 22 nt, Barmah Forest virus
ugcaauuuuguaaaacggaucu

SEQ ID NO: 2683 - RNA, 22 nt, Vaccinia Virus
uaacggagauuaaaaauaugac

SEQ ID NO: 2684 - RNA, 22 nt, Human Herpesvirus 7
gcucaaauaugccuguuuugug

SEQ ID NO: 2685 - RNA, 22 nt, Human herpesvirus 6B
gggcuccggcuuccucuccguc

SEQ ID NO: 2686 - RNA, 22 nt, Human coronavirus 229E
uguuaacauuucucgcucugag

SEQ ID NO: 2687 - RNA, 22 nt, Variola virus
aacuggaugaaaagaguucuau

SEQ ID NO: 2688 - RNA, 22 nt, Ovine adenovirus 7
uuaggaauuaauagcuuaggag

SEQ ID NO: 2689 - RNA, 22 nt, Human Herpesvirus 2
ccggaacccaccagaggcggaa

SEQ ID NO: 2690 - RNA, 22 nt, Vaccinia Virus
gcaaauagauagaacuaccaau

SEQ ID NO: 2691 - RNA, 22 nt, Vaccinia Virus
uuuaucuauugaugguguauga

SEQ ID NO: 2692 - RNA, 22 nt, SARS coronavirus
ggcguuucuaaaaaggucuacc

SEQ ID NO: 2693 - RNA, 22 nt, Vaccinia Virus
ugguauguucacgauaaguaua

SEQ ID NO: 2694 - RNA, 22 nt, Vaccinia Virus
uugguuaguguauuauucagua

SEQ ID NO: 2695 - RNA, 22 nt, Vaccinia virus
aagauagacgauucuccaaaga

SEQ ID NO: 2696 - RNA, 22 nt, Human adenovirus C
aaguuucugaagaacgaguaca

SEQ ID NO: 2697 - RNA, 22 nt, Simian picornavirus 1
uuguugaggccguuggcgugaa

SEQ ID NO: 2698 - RNA, 22 nt, Human herpesvirus 7
ggucuguaccauauggaauugu

SEQ ID NO: 2699 - RNA, 22 nt, Vaccinia Virus
uagcgcgauagagauagucuaa

SEQ ID NO: 2700 - RNA, 22 nt, Equine Rhinovirus 3
ccguggccaaaagcccaguguu

SEQ ID NO: 2701 - RNA, 22 nt, Encephalomyocarditis virus
agagcagagcauuuugggcauu

SEQ ID NO: 2702 - RNA, 22 nt, Vaccinia virus
uugcaaaaaagacauuggcgcc

SEQ ID NO: 2703 - RNA, 22 nt, Human Herpesvirus 8
uaacggcaaugauauuuauagu

SEQ ID NO: 2704 - RNA, 22 nt, Variola virus and Vaccinia virus
aggaggaauaucgucggagcug

SEQ ID NO: 2705 - RNA, 22 nt, Variola virus
uuugauuacgauguuauaagaa

SEQ ID NO: 2706 - RNA, 22 nt, B19 Virus
cuugggguugccuugacacuaa

SEQ ID NO: 2707 - RNA, 21 nt, Human Herpesvirus 1
gcccuuggagcgaccggcagc

SEQ ID NO: 2708 - RNA, 22 nt, Human Herpesvirus 7
uuccauguuaguaguaauacau

SEQ ID NO: 2709 - RNA, 22 nt, Human Herpesvirus 6
ugacuggaccuggcauucuaga

SEQ ID NO: 2710 - RNA, 22 nt, Human Herpesvirus 4
agucucuuuucccucuucccuu

SEQ ID NO: 2711 - RNA, 22 nt, Vaccinia Virus
aaauauuucccguuuaauaucg

SEQ ID NO: 2712 - RNA, 22 nt, Hepatitis A virus
cucacaaugauauguugaaugu

SEQ ID NO: 2713 - RNA, 22 nt, Human adenovirus E
uuuguauacugaaaauguggau

SEQ ID NO: 2714 - RNA, 22 nt, Vaccinia Virus
gaucgucaugggucauagaauu

SEQ ID NO: 2715 - RNA, 22 nt, Human herpesvirus 3
uuaugaucauuaaacgugcauu

SEQ ID NO: 2716 - RNA, 22 nt, Human Herpesvirus 7
uuaaauaagcuucuacggucag

SEQ ID NO: 2717 - RNA, 22 nt, Respiratory Syncytial Virus
ugugguaagcauuaggauugag

SEQ ID NO: 2718 - RNA, 22 nt, Variola virus
agaggugauguaaucguuaguu

SEQ ID NO: 2719 - RNA, 22 nt, Human Herpesvirus 1
gccgaccgaguccgcgguccac

SEQ ID NO: 2720 - RNA, 22 nt, Rat cytomegalovirus
aauuuuauccaaacuccaugaa

SEQ ID NO: 2721 - RNA, 22 nt, Barmah Forest virus
guaccgacuuaaaugcacgaac

SEQ ID NO: 2722 - RNA, 22 nt, Molluscum Contagiosum Virus
ugcaagacgugugaaguagcga

SEQ ID NO: 2723 - RNA, 22 nt, Human Herpesvirus 1
gaguuuguggacccaaagcccu

SEQ ID NO: 2724 - RNA, 22 nt, Human coronavirus OC43
uggugguaguaagaguguuugc

SEQ ID NO: 2725 - RNA, 22 nt, Western equine encephalomyelitis virus
agacgugaugaucaggccugcc

SEQ ID NO: 2726 - RNA, 22 nt, Molluscum Contagiosum Virus
ucucgcgaucugcgugacccuc

SEQ ID NO: 2727 - RNA, 22 nt, Human Herpesvirus 5
caccgucgcugugcaacgcgug

SEQ ID NO: 2728 - RNA, 22 nt, Rat Cytomegalovirus
ccgugcgcggcgcgggcccgcg

SEQ ID NO: 2729 - RNA, 22 nt, Human Herpesvirus 8
ccgguccgguggaggcagucug

SEQ ID NO: 2730 - RNA, 22 nt, Rat Cytomegalovirus
cuacugcgagagccaccgcgcc

SEQ ID NO: 2731 - RNA, 22 nt, Human Herpesvirus 6B
uacggccaugauuuuguuucgu

SEQ ID NO: 2732 - RNA, 22 nt, Human herpesvirus 2
ugcaccggcucuccuuguuucg

SEQ ID NO: 2733 - RNA, 22 nt, Human herpesvirus 7
uuaaguuaguuagccauguguu

SEQ ID NO: 2734 - RNA, 22 nt, Human Herpesvirus 5
uggcguguacuuuauuacaacg

SEQ ID NO: 2735 - RNA, 22 nt, Human herpesvirus 5
uggucacgucggcucgaagagg

SEQ ID NO: 2736 - RNA, 22 nt, Human adenovirus B
ugaguggaacuuuaggaaggau

SEQ ID NO: 2737 - RNA, 22 nt, Human herpesvirus 7
ugucauaaauuuuaguugccgu

SEQ ID NO: 2738 - RNA, 22 nt, Human Herpesvirus 2
uccccucgccuuccauucuccg

SEQ ID NO: 2739 - RNA, 22 nt, Human Herpesvirus 5
uccaugaggcgggugaugcgcc

SEQ ID NO: 2740 - RNA, 22 nt, Human Herpesvirus 2
ucccagaaagggcaggcagguc

SEQ ID NO: 2741 - RNA, 22 nt, Zaire Ebola Virus
uauaagaauuaagacccggugu

SEQ ID NO: 2742 - RNA, 22 nt, Respiratory syncytial virus
uguucuacuacugacauuaagc

SEQ ID NO: 2743 - RNA, 21 nt, Variola Virus
uuauuuggcaaagucaaauga

SEQ ID NO: 2744 - RNA, 22 nt, Transmissible gastroenteritis virus
uucaucaaugcugcuacuacga

SEQ ID NO: 2745 - RNA, 22 nt, Vaccinia virus
uguccaagucuugaacucgcug

SEQ ID NO: 2746 - RNA, 22 nt, Human herpesvirus 7
uugaauaugaaaacuguaaaaa

SEQ ID NO: 2747 - RNA, 22 nt, Human Immunodeficiency Virus 1
uaguuuuugcuguacuuucuau

SEQ ID NO: 2748 - RNA, 22 nt, Human Herpesvirus 1
agccuuuaacuacauuaaauug

SEQ ID NO: 2749 - RNA, 22 nt, Human Herpesvirus 8
agguaaacaagguuaaaguggg

SEQ ID NO: 2750 - RNA, 22 nt, Variola virus
aggauuuaucacauacuaguau

SEQ ID NO: 2751 - RNA, 22 nt, Rat Cytomegalovirus
aacagguacagggaggugcaga

SEQ ID NO: 2752 - RNA, 22 nt, Molluscum Contagiosum Virus
gcagcgucgcggagcgcgcacg

SEQ ID NO: 2753 - RNA, 22 nt, Human herpesvirus 7
ugucaucguaauaauggaaacu

SEQ ID NO: 2754 - RNA, 22 nt, Human Herpesvirus 8
ugggaagacgaugggggaaaug

SEQ ID NO: 2755 - RNA, 22 nt, Variola virus
ggaguauauauucuugacgcau

SEQ ID NO: 2756 - RNA, 22 nt, Human Herpesvirus 6
caguugaaauuagauuucauua

SEQ ID NO: 2757 - RNA, 22 nt, Human Herpesvirus 5
ugcaagucucgacuaaggagcg

SEQ ID NO: 2758 - RNA, 22 nt, Human Adenovirus D
uaucacagcacacggauuaaag

SEQ ID NO: 2759 - RNA, 22 nt, Variola Virus
uucaucaucgaauuuaagagau

SEQ ID NO: 2760 - RNA, 22 nt, Vaccinia Virus
ugugguagauuuguucuauaga

SEQ ID NO: 2761 - RNA, 22 nt, Variola virus
uauuuggauuuggaaaagaaaa

SEQ ID NO: 2762 - RNA, 22 nt, Human Herpesvirus 6B
uauaagauuuacagacgauuuu

SEQ ID NO: 2763 - RNA, 22 nt, Hepatitis GB virus A
acucggugguggacgaggcccu

SEQ ID NO: 2764 - RNA, 22 nt, Human Herpesvirus 2
uccacgccgggguucccggcgg

SEQ ID NO: 2765 - RNA, 22 nt, Human adenovirus A
acacuggugggggacaguaagu

SEQ ID NO: 2766 - RNA, 22 nt, Vaccinia Virus
caucguauacucgaccaucuac

SEQ ID NO: 2767 - RNA, 22 nt, Human Herpesvirus 1
cuccgcaccaagccgcucuccg

SEQ ID NO: 2768 - RNA, 22 nt, Transmissible Gastroenteritis Virus
auggccagucccuagcuuugaa

SEQ ID NO: 2769 - RNA, 22 nt, Human herpesvirus 6B
uucuauuuuguagauagaaaug

SEQ ID NO: 2770 - RNA, 22 nt, Human herpesvirus 7
uuucccaguucucuuuccaaaa

SEQ ID NO: 2771 - RNA, 22 nt, Ovine Adenovirus 7
uuacaacaucauuuuuccaauu

SEQ ID NO: 2772 - RNA, 22 nt, Human Herpesvirus 8
cgggguccucaggugguauuuc

SEQ ID NO: 2773 - RNA, 22 nt, Human Herpesvirus 7
uuuuuugguuauuggaaaugag

SEQ ID NO: 2774 - RNA, 22 nt, Human Herpesvirus 3
ggggcgggugccgggauugacu

SEQ ID NO: 2775 - RNA, 22 nt, Human Herpesvirus 7
ucuaauuggauuuaacaacgau

SEQ ID NO: 2776 - RNA, 22 nt, Human metapneumovirus
uucaaauguuaucuuagggaaa

SEQ ID NO: 2777 - RNA, 22 nt, Salmon pancreas disease virus
ggcggacgaaguucggcgggac

SEQ ID NO: 2778 - RNA, 22 nt, Respiratory Syncytial Virus
uaauuuuacuccaguugacugu

SEQ ID NO: 2779 - RNA, 22 nt, SARS coronavirus
uugaguuauaguagggaugaca

SEQ ID NO: 2780 - RNA, 22 nt, Human Herpesvirus 2
cccgcgaugcuaaugagacccu

SEQ ID NO: 2781 - RNA, 22 nt, Human Herpesvirus 6B
aguaguuuucacgguauuuuug

SEQ ID NO: 2782 - RNA, 22 nt, Human Herpesvirus 8
ugguauucccagcugagguugc

SEQ ID NO: 2783 - RNA, 22 nt, Molluscum contagiosum virus
ugugcgaggacgauugcuggcu

SEQ ID NO: 2784 - RNA, 22 nt, Variola virus
uugugggaaacgggcauggagg

SEQ ID NO: 2785 - RNA, 22 nt, Transmissible Gastroenteritis Virus
ucacuagcaauaacaugucuag

SEQ ID NO: 2786 - RNA, 22 nt, Human herpesvirus 3
uuuguaaaauucccuguaauag

SEQ ID NO: 2787 - RNA, 22 nt, Human coronavirus OC43
uucccaauuuaauggagagggc

SEQ ID NO: 2788 - RNA, 22 nt, Human herpesvirus 6B
ugucaggucgguaccugugugu

SEQ ID NO: 2789 - RNA, 22 nt, Variola virus
uguguugucuauuauuuguuua

SEQ ID NO: 2790 - RNA, 22 nt, Human Herpesvirus 8
caggauguagaucgcagacacu

SEQ ID NO: 2791 - RNA, 22 nt, Variola Virus
gagucguaaaaaguuuuaucuc

SEQ ID NO: 2792 - RNA, 22 nt, Human Herpesvirus 1
ccgcgggaggauguguuuucgu

SEQ ID NO: 2793 - RNA, 22 nt, Transmissible gastroenteritis virus
agagauuauagaaaaacuguca

SEQ ID NO: 2794 - RNA, 22 nt, Vaccinia Virus
uaacaucgauucccauaugaug

SEQ ID NO: 2795 - RNA, 22 nt, Variola virus and Vaccinia virus
auagcgucguuuaagagcagau

SEQ ID NO: 2796 - RNA, 21 nt, Tick-borne encephalitis virus
uguguuugagcugaggguggg

SEQ ID NO: 2797 - RNA, 19 nt, Human adenovirus C
gguaauggccaccuucuua

SEQ ID NO: 2798 - RNA, 22 nt, Transmissible Gastroenteritis Virus
auuugcugguuuuauuuaugug

SEQ ID NO: 2799 - RNA, 22 nt, Variola virus
gcugcuggaucuaaauauuuua

SEQ ID NO: 2800 - RNA, 22 nt, Human Herpesvirus 6B
uguggauuugucuucuacgcua

SEQ ID NO: 2801 - RNA, 22 nt, Human herpesvirus 2
gcugcaucggaccccgcucggu

SEQ ID NO: 2802 - RNA, 22 nt, Vaccinia Virus
uguuacgaaaaucaauauauuc

SEQ ID NO: 2803 - RNA, 22 nt, Human Herpesvirus 8
aaagaggucuucaucgcacauc

SEQ ID NO: 2804 - RNA, 22 nt, Human herpesvirus 3
aguaugcguuuaaggagagacc

SEQ ID NO: 2805 - RNA, 22 nt, Human Adenovirus E
uucgaggccggccggauuccgc

SEQ ID NO: 2806 - RNA, 22 nt, Simian picornavirus 1
uguaacagaauuauuuguucuc

SEQ ID NO: 2807 - RNA, 22 nt, Human herpesvirus 7
aaucuucaucaauuaaaacuug

SEQ ID NO: 2808 - RNA, 22 nt, Hepatitis GB virus C
ucugggagacccggggcggguu

SEQ ID NO: 2809 - RNA, 22 nt, Rat Cytomegalovirus
ucccucuugucucggagacggc

SEQ ID NO: 2810 - RNA, 22 nt, Human immunodeficiency virus 1
ugaggggacagauaggguuaua

SEQ ID NO: 2811 - RNA, 22 nt, Human Herpesvirus 8
agguccaaagaggcuaacgaga

SEQ ID NO: 2812 - RNA, 22 nt, Vaccinia Virus
cgccuuuauuuccacauuagau

SEQ ID NO: 2813 - RNA, 22 nt, Sindbis Virus
cuucuacacgguccugaggugc

SEQ ID NO: 2814 - RNA, 22 nt, Human Herpesvirus 3
uauuacauugugaaguuaaaac

SEQ ID NO: 2815 - RNA, 22 nt, Human Adenovirus A
ggaacaggacaaaugcaauaua

SEQ ID NO: 2816 - RNA, 22 nt, Vaccinia Virus
uugaugauaucuacaucguuug

SEQ ID NO: 2817 - RNA, 22 nt, Rat Cytomegalovirus
ucgaagucaaaucggucgauuc

SEQ ID NO: 2818 - RNA, 22 nt, Molluscum Contagiosum Virus
uagcuacgggcagaacuaccag

SEQ ID NO: 2819 - RNA, 22 nt, Molluscum contagiosum virus
ugcgcagguggaugagcuuguu

SEQ ID NO: 2820 - RNA, 19 nt, Reston Ebola Virus
ccucguccgaaucuucauc

SEQ ID NO: 2821 - RNA, 22 nt, Influenza B virus
ugugagcuuucaugaagcauuu

SEQ ID NO: 2822 - RNA, 22 nt, Human Astrovirus
ugaaaaugagacagaccgugua

SEQ ID NO: 2823 - RNA, 22 nt, Molluscum contagiosum virus
ugagcgugagcacgucguucgc

SEQ ID NO: 2824 - RNA, 22 nt, Human herpesvirus 7
gcugaucuaaagacaaacauua

SEQ ID NO: 2825 - RNA, 22 nt, Vaccinia Virus
uauggcaaaucugcaaucacug

SEQ ID NO: 2826 - RNA, 22 nt, Variola virus
ugauccauguaagucauauauu

SEQ ID NO: 2827 - RNA, 22 nt, Variola Virus
cauuguaaaagaaauauaugug

SEQ ID NO: 2828 - RNA, 21 nt, Human Herpesvirus 5
uacacugaacuugagcacaaa

SEQ ID NO: 2829 - RNA, 22 nt, Variola virus and Vaccinia virus
uguacgauuguauugcguuacu

SEQ ID NO: 2830 - RNA, 22 nt, Human Herpesvirus 7
uauuugauuggauucaaaguac

SEQ ID NO: 2831 - RNA, 22 nt, Human Herpesvirus 6
gaagguaucuuucauaaguuug

SEQ ID NO: 2832 - RNA, 22 nt, Human Herpesvirus 8
ucuauagcaucauggaucgcaa

SEQ ID NO: 2833 - RNA, 19 nt, Vaccinia Virus
uagcuuucacucauaugac

SEQ ID NO: 2834 - RNA, 22 nt, Variola virus and Vaccinia virus
ugucuaaauguaauuaugaucu

SEQ ID NO: 2835 - RNA, 22 nt, Influenza A virus
agaguuagcaaaaugggggugg

SEQ ID NO: 2836 - RNA, 22 nt, Molluscum Contagiosum Virus
gggucgcaagcagcccuuuccc

SEQ ID NO: 2837 - RNA, 22 nt, Human Parainfluenza Virus 3
aagaaucugugucacauuuccu

SEQ ID NO: 2838 - RNA, 22 nt, Sindbis virus
agauagcaguggaauggcgaca

SEQ ID NO: 2839 - RNA, 22 nt, Variola virus
uguggaauacaacuguccagcg

SEQ ID NO: 2840 - RNA, 22 nt, Variola Virus
uaaguguacuauaguugacagu

SEQ ID NO: 2841 - RNA, 22 nt, Human Herpesvirus 8
uggcgucugccgaagucagugc

SEQ ID NO: 2842 - RNA, 22 nt, Human Herpesvirus 1
cuccggagagcggcuuggugcg

SEQ ID NO: 2843 - RNA, 22 nt, Hepatitis GB Virus C
ugagguccaggugggguacguc

SEQ ID NO: 2844 - RNA, 22 nt, Molluscum Contagiosum Virus
acgaaguccagcacgcgcgcgu

SEQ ID NO: 2845 - RNA, 22 nt, Human Herpesvirus 2
aagaaagaaaacacccagacgu

SEQ ID NO: 2846 - RNA, 22 nt, Human coronavirus 229E
aggacauuuuuauauuaauggc

SEQ ID NO: 2847 - RNA, 22 nt, Hepatitis GB virus B
uuguuauacucuagagugauag

SEQ ID NO: 2848 - RNA, 22 nt, Rat Cytomegalovirus
ucuccagacacgguauuuuuga

SEQ ID NO: 2849 - RNA, 22 nt, SARS coronavirus
agcuguaaagauaacagagcau

SEQ ID NO: 2850 - RNA, 22 nt, Human Herpesvirus 1
ucgcccccucccgccccucgcc

SEQ ID NO: 2851 - RNA, 22 nt, Variola virus
agaugacgaugaaaaugauggu

SEQ ID NO: 2852 - RNA, 22 nt, Human herpesvirus 4
agugacuuuauucaaguuuugg

SEQ ID NO: 2853 - RNA, 22 nt, Human adenovirus B
uuuugaauaagcgcggucgcug

SEQ ID NO: 2854 - RNA, 22 nt, Human enterovirus B
uugaaagcucaaaggaagcagg

SEQ ID NO: 2855 - RNA, 22 nt, Human Adenovirus C
auggaacauucccagcugcuac

SEQ ID NO: 2856 - RNA, 22 nt, Human Herpesvirus 5
ugucguacaugaaugaggacgg

SEQ ID NO: 2857 - RNA, 22 nt, Variola virus and Vaccinia virus
uuauauuggucauuauuuuugu

SEQ ID NO: 2858 - RNA, 22 nt, Vaccinia Virus
uuaucccaauuaccaacuagaa

SEQ ID NO: 2859 - RNA, 22 nt, Human Herpesvirus 8
cuacugucccacuauauaccac

SEQ ID NO: 2860 - RNA, 22 nt, Rat Cytomegalovirus
acggacaaaaccaguucccgga

SEQ ID NO: 2861 - RNA, 22 nt, Transmissible Gastroenteritis Virus
uuuagagaaguuuaaagauccg

SEQ ID NO: 2862 - RNA, 22 nt, Vaccinia Virus
ugacuagauaaacuaucaguaa

SEQ ID NO: 2863 - RNA, 22 nt, Human Herpesvirus 5
uggcaucaugagacgcgcgaaa

SEQ ID NO: 2864 - RNA, 22 nt, Molluscum contagiosum virus
aaagcggaaaaaugcacgcccg

SEQ ID NO: 2865 - RNA, 22 nt, Human Herpesvirus 6
ggagguaguugguauacgcguu

SEQ ID NO: 2866 - RNA, 22 nt, Human Herpesvirus 6B
cucguucuuccucaaaugaccc

SEQ ID NO: 2867 - RNA, 22 nt, Rat Cytomegalovirus
cgagauagaccgcgacucggag

SEQ ID NO: 2868 - RNA, 22 nt, Molluscum contagiosum virus
gcggaguugcggacgcugcgcg

SEQ ID NO: 2869 - RNA, 22 nt, Vaccinia Virus
auguauagcaucgcuuugagau

SEQ ID NO: 2870 - RNA, 22 nt, Vaccinia Virus
cgauguaucuauguuauuugua

SEQ ID NO: 2871 - RNA, 22 nt, Rat cytomegalovirus
ggccgucuucucguacagaccc

SEQ ID NO: 2872 - RNA, 22 nt, Human Herpesvirus 3
ugggacaguucugccgcuugac

SEQ ID NO: 2873 - RNA, 22 nt, Human coronavirus OC43
agacuggucauuauacaggaca

SEQ ID NO: 2874 - RNA, 22 nt, Molluscum Contagiosum Virus
gugcgugaggaagacguacucg

SEQ ID NO: 2875 - RNA, 22 nt, Murray Valley encephalitis virus
gggaggcuuuccaaccguggag

SEQ ID NO: 2876 - RNA, 22 nt, Vaccinia Virus
uuauugaucucguguguacaac

SEQ ID NO: 2877 - RNA, 22 nt, Hepatitis E virus
ggcuggaccucguguucgccaa

SEQ ID NO: 2878 - RNA, 22 nt, Human Adenovirus D
gccguguccacgcauugcauga

SEQ ID NO: 2879 - RNA, 22 nt, Human Coronavirus 229E
guucuaacauuaauugcguuuu

SEQ ID NO: 2880 - RNA, 22 nt, Molluscum contagiosum virus
ggccuuuucacuggccguguaa

SEQ ID NO: 2881 - RNA, 22 nt, Variola virus
uuaucaagauguguauauuugu

SEQ ID NO: 2882 - RNA, 22 nt, Norwalk virus
ggggguccuugccccccaggua

SEQ ID NO: 2883 - RNA, 22 nt, Rat cytomegalovirus
gcauuaucguggguguguucuu

SEQ ID NO: 2884 - RNA, 22 nt, Molluscum contagiosum virus
ggcccugacuaguacgauuugu

SEQ ID NO: 2885 - RNA, 22 nt, Human herpesvirus 6
aauuuccugaucacagagcaga

SEQ ID NO: 2886 - RNA, 22 nt, Vaccinia Virus
agagaugagaagccuguagaga

SEQ ID NO: 2887 - RNA, 22 nt, Human herpesvirus 4
aaggccacuacagcauccaggu

SEQ ID NO: 2888 - RNA, 22 nt, Human herpesvirus 7
aaaguucacaucgauggagacg

SEQ ID NO: 2889 - RNA, 22 nt, Human parainfluenza virus 1 strain Washington/1964
aggaccucuaucuggcagcaua

SEQ ID NO: 2890 - RNA, 22 nt, Variola Virus
ucaacggacacaaaguagcuaa

SEQ ID NO: 2891 - RNA, 22 nt, Adeno-associated virus 4
uuuuacgucagaaaggguggag

SEQ ID NO: 2892 - RNA, 22 nt, Human Herpesvirus 3
ggcauaaccaagggccuuguua

SEQ ID NO: 2893 - RNA, 22 nt, Human parainfluenza virus 3
uguuuguuguuuagcagaaauu

SEQ ID NO: 2894 - RNA, 22 nt, Human Herpesvirus 2
uccggagaaggaaggcugcucc

SEQ ID NO: 2895 - RNA, 22 nt, Human herpesvirus 2
acagggggggagacgagggguc

SEQ ID NO: 2896 - RNA, 21 nt, Rat Cytomegalovirus
gaggccgucgacaccgcccuc

SEQ ID NO: 2897 - RNA, 22 nt, Variola virus
acuuucgugauauuguuuaauc

SEQ ID NO: 2898 - RNA, 22 nt, Human Herpesvirus 6
uauacuuaacuauacuuauaga

SEQ ID NO: 2899 - RNA, 22 nt, Vaccinia Virus
caccguaaauuuaucaccagaa

SEQ ID NO: 2900 - RNA, 22 nt, Human herpesvirus 6B
gcggaguuaauuaaauugucuu

SEQ ID NO: 2901 - RNA, 22 nt, Human Herpesvirus 6
acuuguuuguuaguuguguaaa

SEQ ID NO: 2902 - RNA, 22 nt, Human herpesvirus 7
uuguaagcaucugugguuuggu

SEQ ID NO: 2903 - RNA, 22 nt, Human herpesvirus 4
ugcguggcuggacggaggacga

SEQ ID NO: 2904 - RNA, 22 nt, Variola virus and Vaccinia virus
auauuaguacuauauuguacuu

SEQ ID NO: 2905 - RNA, 22 nt, Human Herpesvirus 4
gaugaugaugacaaccgcggcu

SEQ ID NO: 2906 - RNA, 22 nt, Variola Virus
ugagcuaauuuuuguaaauaac

SEQ ID NO: 2907 - RNA, 22 nt, Human herpesvirus 4
uuggccagagccccccagagug

SEQ ID NO: 2908 - RNA, 22 nt, Human herpesvirus 5
ugcagaucaucaugucgcugcu

SEQ ID NO: 2909 - RNA, 22 nt, Human Herpesvirus 1
aggccaguauggaccgugauac

SEQ ID NO: 2910 - RNA, 22 nt, Hepatitis GB virus C
gcuucguacggguacgcgugug

SEQ ID NO: 2911 - RNA, 22 nt, Human Herpesvirus 1
gccccgggccgggccgccacgg

SEQ ID NO: 2912 - RNA, 22 nt, Human Herpesvirus 4
gaucucaaucaaaucuuuagag

SEQ ID NO: 2913 - RNA, 22 nt, Human herpesvirus 8
ugugucaaccagggcacccucc

SEQ ID NO: 2914 - RNA, 22 nt, Bovine kobuvirus
uuguuagucacuccagaggagg

SEQ ID NO: 2915 - RNA, 22 nt, Human Herpesvirus 1
gcggccugggucuuccgcggag

SEQ ID NO: 2916 - RNA, 22 nt, Rat cytomegalovirus
uugcaucucgcauauugugugu

SEQ ID NO: 2917 - RNA, 22 nt, Rat Cytomegalovirus
gggggaggagaggaaaccgggg

SEQ ID NO: 2918 - RNA, 22 nt, Human adenovirus F
gcguguuugucagagguaggca

SEQ ID NO: 2919 - RNA, 22 nt, Human Parainfluenza Virus 3
uaaagggagucugacuuggagg

SEQ ID NO: 2920 - RNA, 22 nt, Human herpesvirus 3
acaagcugugacaucgcuaugu

SEQ ID NO: 2921 - RNA, 18 nt, Rat Cytomegalovirus
aaacacauauuagacaac

SEQ ID NO: 2922 - RNA, 22 nt, Molluscum Contagiosum Virus
acuuacggacgcccuccucgac

SEQ ID NO: 2923 - RNA, 22 nt, Vaccinia Virus
augcaucgguaaauauagcugu

SEQ ID NO: 2924 - RNA, 22 nt, Western equine encephalomyelitis virus
uugaugaggcauuugccugcca

SEQ ID NO: 2925 - RNA, 22 nt, Human Adenovirus B
cauuacuaccgucaccuccaca

SEQ ID NO: 2926 - RNA, 22 nt, B19 Virus
uuguaacgguuaaaaugggcgg

SEQ ID NO: 2927 - RNA, 22 nt, Human Herpesvirus 4
gugcauuggagauaguagcuuu

SEQ ID NO: 2928 - RNA, 22 nt, Human coronavirus 229E
ucuuccaagcaaaauuacagca

SEQ ID NO: 2929 - RNA, 22 nt, Zaire Ebola Virus
uguaagaucaauuuauauacag

SEQ ID NO: 2930 - RNA, 22 nt, Vaccinia Virus
uagcgugaaggauaugauaaaa

SEQ ID NO: 2931 - RNA, 22 nt, Human Herpesvirus 4
uaagggcuggguaaaggugucu

SEQ ID NO: 2932 - RNA, 22 nt, Ovine Adenovirus 7
uucguuuuucagaaaacucaag

SEQ ID NO: 2933 - RNA, 22 nt, Human herpesvirus 5
agugacggugagauccaggcug

SEQ ID NO: 2934 - RNA, 22 nt, Vaccinia virus
uugaacaacggaccuaguggua

SEQ ID NO: 2935 - RNA, 22 nt, Human herpesvirus 8
gggguacucaggugguauuucc

SEQ ID NO: 2936 - RNA, 22 nt, Vaccinia Virus
uaauaguuaccacgugcuguac

SEQ ID NO: 2937 - RNA, 22 nt, Molluscum Contagiosum Virus
caaggacaccgcgggcgugccc

SEQ ID NO: 2938 - RNA, 22 nt, Borna disease virus
uguaggucauuaggcagcuugu

SEQ ID NO: 2939 - RNA, 21 nt, Molluscum contagiosum virus
guacuucuucgagaagcgcag

SEQ ID NO: 2940 - RNA, 22 nt, Yellow fever virus
ucuugaguuugaggcccuggga

SEQ ID NO: 2941 - RNA, 22 nt, Vaccinia Virus
acaggaaauaguuuaucauaua

SEQ ID NO: 2942 - RNA, 22 nt, Transmissible Gastroenteritis Virus
caacuaguucugacuuuguuca

SEQ ID NO: 2943 - RNA, 22 nt, Vaccinia Virus
uuguacaaucuaagauaaacua

SEQ ID NO: 2944 - RNA, 22 nt, Reston Ebola Virus
ugaagauuaauugcggaggaau

SEQ ID NO: 2945 - RNA, 22 nt, Human Immunodeficiency Virus 1
aagcaggacauaacaagguagg

SEQ ID NO: 2946 - RNA, 22 nt, Hepatitis GB Virus C
gggucgguacguuucccauucc

SEQ ID NO: 2947 - RNA, 22 nt, West Nile virus
guggcugguggugcuagaacac

SEQ ID NO: 2948 - RNA, 22 nt, Murray Valley encephalitis virus
ugaugcuuuugagagugggguc

SEQ ID NO: 2949 - RNA, 22 nt, Human Herpesvirus 3
uauuuucaucaacuuuaucguu

SEQ ID NO: 2950 - RNA, 22 nt, Human herpesvirus 2
aggggaugcaggaggaggaucg

SEQ ID NO: 2951 - RNA, 22 nt, Vaccinia Virus
auggugcuauuagaauuuacaa

SEQ ID NO: 2952 - RNA, 22 nt, Human Herpesvirus 3
uauuucaaaaaauauacacgca

SEQ ID NO: 2953 - RNA, 22 nt, Hepatitis GB Virus A
guggcauucccucccuuagcag

SEQ ID NO: 2954 - RNA, 22 nt, Human Herpesvirus 8
uggcccugacgcugacuuacaa

SEQ ID NO: 2955 - RNA, 22 nt, Respiratory syncytial virus
aaguaugaacacagagugaacu

SEQ ID NO: 2956 - RNA, 22 nt, Rat Cytomegalovirus
gaaaauaaaugacggauaugau

SEQ ID NO: 2957 - RNA, 20 nt, Human Herpesvirus 4
uccuauagguccuaccggag

SEQ ID NO: 2958 - RNA, 22 nt, Poliovirus
ugguuauccauccagucuaaga

SEQ ID NO: 2959 - RNA, 22 nt, Vaccinia Virus
uacaaauagcaguguagugcag

SEQ ID NO: 2960 - RNA, 22 nt, Western equine encephalomyelitis virus
ggauucuacggccuucacuaac

SEQ ID NO: 2961 - RNA, 22 nt, Human Herpesvirus 4
ucggagcuccuaggucagacca

SEQ ID NO: 2962 - RNA, 22 nt, Human herpesvirus 1
aggacgaagaggaugcggacga

SEQ ID NO: 2963 - RNA, 22 nt, Vaccinia Virus
ugaggcuaccucgacauacgug

SEQ ID NO: 2964 - RNA, 22 nt, Western equine encephalomyelitis virus
uuaauguacacuucgccugacg

SEQ ID NO: 2965 - RNA, 22 nt, Molluscum contagiosum virus
ggcgggcguggaucguaacgcc

SEQ ID NO: 2966 - RNA, 15 nt, Rat cytomegalovirus
uuguggucaaaccgg

SEQ ID NO: 2967 - RNA, 22 nt, Human Adenovirus A
gggguccggcgcuuaaccaauu

SEQ ID NO: 2968 - RNA, 22 nt, Rat Cytomegalovirus
gcggccgcggacgccgggccga

SEQ ID NO: 2969 - RNA, 22 nt, Human Herpesvirus 6
cguuaaaccgcaagugcagaaa

SEQ ID NO: 2970 - RNA, 22 nt, Human Adenovirus E
gagcaugacggcgacuaccucc

SEQ ID NO: 2971 - RNA, 22 nt, Human Herpesvirus 5
cagcauguaucggggcuccgac

SEQ ID NO: 2972 - RNA, 22 nt, Rat Cytomegalovirus
ggacgagacgcgguuccacacg

SEQ ID NO: 2973 - RNA, 22 nt, Vaccinia Virus
uuuaccaacacccucagccgcu

SEQ ID NO: 2974 - RNA, 22 nt, Human parainfluenza virus 2
aauugauacuguuucaucuaac

SEQ ID NO: 2975 - RNA, 22 nt, Variola Virus
uaugauaauaagagaucuagua

SEQ ID NO: 2976 - RNA, 22 nt, Rat Cytomegalovirus
acgauaguggguauuuucgucg

SEQ ID NO: 2977 - RNA, 22 nt, Human coronavirus 229E
uugguagugaagugugaugugu

SEQ ID NO: 2978 - RNA, 22 nt, Reston Ebola virus
uuagaacaguuccccuuugacu

SEQ ID NO: 2979 - RNA, 18 nt, Tick-borne encephalitis virus
aagcacuuccgacaucuu

SEQ ID NO: 2980 - RNA, 22 nt, Vaccinia Virus
gaagagagaaagagaauaaaaa

SEQ ID NO: 2981 - RNA, 22 nt, Human Immunodeficiency Virus 1
uaauuggaagaaaucuguugac

SEQ ID NO: 2982 - RNA, 22 nt, Variola virus
ugucuccgauagguguauacuc

SEQ ID NO: 2983 - RNA, 22 nt, Vaccinia Virus
auaguuagauagaauauucauu

SEQ ID NO: 2984 - RNA, 22 nt, Vaccinia Virus
uuucacaacuuuacuguuuuua

SEQ ID NO: 2985 - RNA, 22 nt, Respiratory syncytial virus
uuaguuuauaguaaguuaacca

SEQ ID NO: 2986 - RNA, 22 nt, Human Herpesvirus 1
ucucgucgacaaacagggggaa

SEQ ID NO: 2987 - RNA, 22 nt, Human Adenovirus F
uggaaaacgagggggaggacuu

SEQ ID NO: 2988 - RNA, 22 nt, Borna disease virus
uugucauucuaagaauugcuga

SEQ ID NO: 2989 - RNA, 22 nt, Human Coronavirus 229E
uuugguaaagaucuuaaugcua

SEQ ID NO: 2990 - RNA, 22 nt, Rat Cytomegalovirus
gaaacgaaaacaaggaagaugu

SEQ ID NO: 2991 - RNA, 22 nt, Reston Ebola virus
uuccuccgcaauuaaucuucau

SEQ ID NO: 2992 - RNA, 22 nt, Human Herpesvirus 4
uuaauucucuucuguuugcauu

SEQ ID NO: 2993 - RNA, 22 nt, Human Adenovirus F
ucggugccguaaccuucgcugc

SEQ ID NO: 2994 - RNA, 22 nt, Human herpesvirus 2
gggaggggagaggagaagggcg

SEQ ID NO: 2995 - RNA, 22 nt, Human herpesvirus 6B
uguuuuauuuguauuuucauug

SEQ ID NO: 2996 - RNA, 22 nt, Human Herpesvirus 7
gagauacucuacacuacgaagu

SEQ ID NO: 2997 - RNA, 22 nt, Human coronavirus OC43
uuagaccauaaucuaaacaugu

SEQ ID NO: 2998 - RNA, 22 nt, Human Immunodeficiency Virus 1
uaugauacagagguacauaaug

SEQ ID NO: 2999 - RNA, 22 nt, Vaccinia Virus
uacaauuagacguaaguucugc

SEQ ID NO: 3000 - RNA, 22 nt, Vaccinia Virus
uauacuuuucuauagccgcaga

SEQ ID NO: 3001 - RNA, 22 nt, Zaire Ebola virus
uccagugugagguuauguggug

SEQ ID NO: 3002 - RNA, 22 nt, Marburg virus
ugccauguuuggaagucuuuuc

SEQ ID NO: 3003 - RNA, 22 nt, Human herpesvirus 4
uggaagcuuuccgaaauucgga

SEQ ID NO: 3004 - RNA, 22 nt, Human Adenovirus E
ugagguacuucuuguggggcuu

SEQ ID NO: 3005 - RNA, 22 nt, Variola virus and Vaccinia virus
uuaaaagacagaucauagaaaa

SEQ ID NO: 3006 - RNA, 18 nt, Vaccinia virus
ggagucaucgccuaugcu

SEQ ID NO: 3007 - RNA, 22 nt, Human Herpesvirus 8
cggguaguuucaggggucaucu

SEQ ID NO: 3008 - RNA, 22 nt, Rat Cytomegalovirus
gcgacacugcuggcgcgagggg

SEQ ID NO: 3009 - RNA, 22 nt, Molluscum Contagiosum Virus
ccucgcacaggaagcucuuggc

SEQ ID NO: 3010 - RNA, 22 nt, Molluscum contagiosum virus
acgccgcgcgcccacggcagcg

SEQ ID NO: 3011 - RNA, 22 nt, Molluscum Contagiosum Virus
cucgccgcugaaggcgcagcaa

SEQ ID NO: 3012 - RNA, 22 nt, Influenza A virus
uggcuggaccaugugcuggcau

SEQ ID NO: 3013 - RNA, 22 nt, Variola virus
aauaauaccauuggaugcacca

SEQ ID NO: 3014 - RNA, 22 nt, Human Herpesvirus 5
ugacgugauaguuacggugauu

SEQ ID NO: 3015 - RNA, 22 nt, Molluscum Contagiosum Virus
acguaaagacggcgauucgugc

SEQ ID NO: 3016 - RNA, 22 nt, Human Herpesvirus 5
uuugugcgacacguuuuauucu

SEQ ID NO: 3017 - RNA, 22 nt, Variola virus
aaauuagaaagauuaaaucauu

SEQ ID NO: 3018 - RNA, 22 nt, Vaccinia Virus
uuuaucccauuccaaucaccuu

SEQ ID NO: 3019 - RNA, 22 nt, Human Herpesvirus 7
agguuuauuuaaaaguccauau

SEQ ID NO: 3020 - RNA, 22 nt, Human parainfluenza virus 3
uugcuacucccagagcaauggu

SEQ ID NO: 3021 - RNA, 22 nt, Human herpesvirus 1
ugugauauuguguuggauauua

SEQ ID NO: 3022 - RNA, 22 nt, Human Herpesvirus 1
gggccggggagggcuggggccg

SEQ ID NO: 3023 - RNA, 22 nt, Human adenovirus A
uuauagucuaaauauucaguau

SEQ ID NO: 3024 - RNA, 22 nt, Human Herpesvirus 1
gccugggugggcggagggaacu

SEQ ID NO: 3025 - RNA, 22 nt, Rat Cytomegalovirus
uaccgaggaggccggggacgcc

SEQ ID NO: 3026 - RNA, 22 nt, Vaccinia Virus
ugaagagccgcguuuaacaaug

SEQ ID NO: 3027 - RNA, 22 nt, Vaccinia Virus
aaaguuuuacaaaaauauuuuu

SEQ ID NO: 3028 - RNA, 22 nt, Human Herpesvirus 4
ucuaacaucuccccuuuaaagc

SEQ ID NO: 3029 - RNA, 22 nt, Vaccinia virus
auaaacuaauaauauauuguua

SEQ ID NO: 3030 - RNA, 22 nt, Reston Ebola Virus
uauuaagaaaaacuuaugacga

SEQ ID NO: 3031 - RNA, 22 nt, Variola virus
uuuuuaguagaaacaugaaacc

SEQ ID NO: 3032 - RNA, 22 nt, West Nile virus
ugugaggauuaacaacaauuaa

SEQ ID NO: 3033 - RNA, 22 nt, Human herpesvirus 8
agugugucugggugacguuguc

SEQ ID NO: 3034 - RNA, 22 nt, Influenza B virus
uuuggguugauaaucugauuuu

SEQ ID NO: 3035 - RNA, 22 nt, Human Herpesvirus 8
uuucuauaauuggugucaccgc

SEQ ID NO: 3036 - RNA, 22 nt, Variola Virus
cauuauuugacgacgaguuaua

SEQ ID NO: 3037 - RNA, 22 nt, Reston Ebola Virus
gaaaaaggccucguguucacuu

SEQ ID NO: 3038 - RNA, 22 nt, Human herpesvirus 6
uuuaaaucuaauauucaucggc

SEQ ID NO: 3039 - RNA, 22 nt, Equine rhinovirus 3
acugguuucgccaaugugugug

SEQ ID NO: 3040 - RNA, 22 nt, Transmissible Gastroenteritis Virus
ucuacauuuuguuuugagggug

SEQ ID NO: 3041 - RNA, 22 nt, Human enterovirus E
acuguauguaguuauucaucuu

SEQ ID NO: 3042 - RNA, 22 nt, Human rhinovirus B
agaugcauauaaaggaauagau

SEQ ID NO: 3043 - RNA, 22 nt, Transmissible gastroenteritis virus
uuagacccuauuuacaaagaau

SEQ ID NO: 3044 - RNA, 21 nt, Human herpesvirus 1
uugggacgaagugcgaacgcu

SEQ ID NO: 3045 - RNA, 22 nt, Barmah Forest Virus
cguuuuacaaaauugcacggca

SEQ ID NO: 3046 - RNA, 22 nt, Human Herpesvirus 5
uguagcaguuaacgucgccggc

SEQ ID NO: 3047 - RNA, 22 nt, Human Herpesvirus 7
uuaaagauccgugggcuggagc

SEQ ID NO: 3048 - RNA, 22 nt, Human Adenovirus D
gugcagacacauguccccuucc

SEQ ID NO: 3049 - RNA, 22 nt, Human Herpesvirus 7
cgcacauucagcacauguucac

SEQ ID NO: 3050 - RNA, 22 nt, Variola Virus
uucucuaucggugagauacaaa

SEQ ID NO: 3051 - RNA, 19 nt, Vaccinia Virus
auucggcaggaaagucaca

SEQ ID NO: 3052 - RNA, 22 nt, Human Herpesvirus 7
ucgaaaauucaaauuuacagca

SEQ ID NO: 3053 - RNA, 22 nt, Molluscum Contagiosum Virus
cagcgccuugauguguuccagc

SEQ ID NO: 3054 - RNA, 22 nt, Human Immunodeficiency Virus 1
acaaaagccuuaggcaucuccu

SEQ ID NO: 3055 - RNA, 22 nt, Vaccinia Virus
ugaaaccaagguuuuccaaccg

SEQ ID NO: 3056 - RNA, 22 nt, Human adenovirus D
ucugugcguucuucucguucca

SEQ ID NO: 3057 - RNA, 22 nt, Human herpesvirus 6B
uuaucugauagucucuuucugc

SEQ ID NO: 3058 - RNA, 22 nt, Zaire Ebola Virus
uuaggccccaagaggcauucuu

SEQ ID NO: 3059 - RNA, 17 nt, Vaccinia Virus
uauaccagaauuaaugg

SEQ ID NO: 3060 - RNA, 22 nt, Rat Cytomegalovirus
uacuuguuacaucuacaucggu

SEQ ID NO: 3061 - RNA, 22 nt, Vaccinia virus
ugauacuguuacguguccuaau

SEQ ID NO: 3062 - RNA, 22 nt, Molluscum contagiosum virus
gcgcggacggagagcgcaggca

SEQ ID NO: 3063 - RNA, 22 nt, Rat cytomegalovirus
agacccgcuggcgagggccucg

SEQ ID NO: 3064 - RNA, 22 nt, Human Adenovirus A
uaguauuuccuugaucuuuuuc

SEQ ID NO: 3065 - RNA, 22 nt, Human Herpesvirus 4
aauuugccuaacauggaggauu

SEQ ID NO: 3066 - RNA, 22 nt, Vaccinia virus
auaaaauauuuuuauucucuuu

SEQ ID NO: 3067 - RNA, 22 nt, Human herpesvirus 6B
agagacauaccaaugguuagac

SEQ ID NO: 3068 - RNA, 22 nt, Human herpesvirus 6B
agacgacgcagauuuacgacac

SEQ ID NO: 3069 - RNA, 22 nt, Vaccinia Virus
guauuuggauucacgguggguu

SEQ ID NO: 3070 - RNA, 22 nt, Marburg virus
aggcaucugcuaaaccagguuu

SEQ ID NO: 3071 - RNA, 22 nt, Human Herpesvirus 4
agguggagugggacacaguuag

SEQ ID NO: 3072 - RNA, 22 nt, Human herpesvirus 5
aaccgcucaguggcucggaccg

SEQ ID NO: 3073 - RNA, 22 nt, Vaccinia Virus
ugugauggaaaaaugacuaauu

SEQ ID NO: 3074 - RNA, 22 nt, Rubella virus
acagguugacauaggcgcgguc

SEQ ID NO: 3075 - RNA, 22 nt, Human Herpesvirus 6
gggcagggggggucucuguucu

SEQ ID NO: 3076 - RNA, 22 nt, Rat Cytomegalovirus
uaagguccgguacauacguguc

SEQ ID NO: 3077 - RNA, 22 nt, Norwalk virus
acuccggggggcagugguucug

SEQ ID NO: 3078 - RNA, 22 nt, Molluscum Contagiosum Virus
uguuuugugccccgggacaaca

SEQ ID NO: 3079 - RNA, 22 nt, Human Herpesvirus 8
uguugcguugguugggaguuug

SEQ ID NO: 3080 - RNA, 22 nt, Human Herpesvirus 4
gcgcgcauaauggcggaccuag

SEQ ID NO: 3081 - RNA, 22 nt, Tick-borne Encephalitis Virus
ugaguuaauggcaagcccgagc

SEQ ID NO: 3082 - RNA, 22 nt, Rat Cytomegalovirus
ugaggagccagagcccgccggg

SEQ ID NO: 3083 - RNA, 22 nt, Rat Cytomegalovirus
gugcuuuucgugucucggggcg

SEQ ID NO: 3084 - RNA, 22 nt, Human Adenovirus E
uccacagacccuugaguucuuc

SEQ ID NO: 3085 - RNA, 22 nt, Human Adenovirus D
ugucauaaucuuuagguugcug

SEQ ID NO: 3086 - RNA, 22 nt, Adeno-associated virus 1
aguguggaaauugaaugggagc

SEQ ID NO: 3087 - RNA, 22 nt, Molluscum Contagiosum Virus
ugagcgcggagcuggcguugcc

SEQ ID NO: 3088 - RNA, 22 nt, Molluscum contagiosum virus
ugugcgugcggacacacgagca

SEQ ID NO: 3089 - RNA, 22 nt, Human Herpesvirus 6
cugaccuuugaaaaaauuuuug

SEQ ID NO: 3090 - RNA, 22 nt, Sleeping disease virus
ucuugacgcacugcuuggagga

SEQ ID NO: 3091 - RNA, 20 nt, Human Immunodeficiency Virus 1
cagacucaucaagcuucucu

SEQ ID NO: 3092 - RNA, 22 nt, Molluscum Contagiosum Virus
ggacacuggaggugagucacgc

SEQ ID NO: 3093 - RNA, 22 nt, Influenza B virus
uguggauuguaagagaauagag

SEQ ID NO: 3094 - RNA, 22 nt, Japanese encephalitis virus
gcuucgauguuaaucaugcgga

SEQ ID NO: 3095 - RNA, 22 nt, Human parainfluenza virus 3
uucauugacuuugagugguaau

SEQ ID NO: 3096 - RNA, 22 nt, Measles virus
agcuagaggaauuggcagccau

SEQ ID NO: 3097 - RNA, 22 nt, Respiratory syncytial virus
uuaacuuauuugaguacuagau

SEQ ID NO: 3098 - RNA, 22 nt, Influenza A virus
acaggcauucaaaugggacugu

SEQ ID NO: 3099 - RNA, 22 nt, Human Herpesvirus 5
ucgaacaugguaaagugcagac

SEQ ID NO: 3100 - RNA, 22 nt, Human Herpesvirus 8
ugggaauaccagcggacuaccc

SEQ ID NO: 3101 - RNA, 22 nt, Rat cytomegalovirus
agccccgaaacuccgucgaacg

SEQ ID NO: 3102 - RNA, 22 nt, Vaccinia Virus
uagcaggacauugaugcucuag

SEQ ID NO: 3103 - RNA, 22 nt, Human Herpesvirus 6B
caucguugauauaaucuuucaa

SEQ ID NO: 3104 - RNA, 22 nt, Rat Cytomegalovirus
ucguggaguacgguugauuucu

SEQ ID NO: 3105 - RNA, 22 nt, Human Immunodeficiency Virus 1
uguagagcuauucgccacauac

SEQ ID NO: 3106 - RNA, 22 nt, Human parainfluenza virus 3
aguguagauuacauugauaaaa

SEQ ID NO: 3107 - RNA, 22 nt, Human Herpesvirus 8
ugauguugcgauaacauccucu

SEQ ID NO: 3108 - RNA, 22 nt, Molluscum contagiosum virus
uugaugcugaacgaucucugac

SEQ ID NO: 3109 - RNA, 22 nt, Transmissible Gastroenteritis Virus
ugcguucuuaggugcagaaagg

SEQ ID NO: 3110 - RNA, 22 nt, Vaccinia virus
uuggagaaucgucuaucuuugu

SEQ ID NO: 3111 - RNA, 22 nt, Influenza B virus
uguauugaagggaggaggagaa

SEQ ID NO: 3112 - RNA, 22 nt, Molluscum contagiosum virus
gggcgcgccgacgucaccgggc

SEQ ID NO: 3113 - RNA, 22 nt, Human Herpesvirus 1
ucccgguugauuuuuggguggg

SEQ ID NO: 3114 - RNA, 22 nt, Human herpesvirus 7
ugugauuauugcauuugcuuca

SEQ ID NO: 3115 - RNA, 22 nt, Human herpesvirus 7
agucucuaucuuuuaugucuuu

SEQ ID NO: 3116 - RNA, 22 nt, Human herpesvirus 6
ugguuucuuguuguuuuguuug

SEQ ID NO: 3117 - RNA, 22 nt, Human Herpesvirus 7
acucauauuuuucaugguauuu

SEQ ID NO: 3118 - RNA, 22 nt, Transmissible Gastroenteritis Virus
accaguuacaauuucauuguca

SEQ ID NO: 3119 - RNA, 22 nt, Human Immunodeficiency Virus 1
ccacucuauuuugugcaucaga

SEQ ID NO: 3120 - RNA, 22 nt, Human herpesvirus 7
gacaagcuuucaauaucugaau

SEQ ID NO: 3121 - RNA, 22 nt, Human Herpesvirus 5
gacgcacgcuggaaaagagcug

SEQ ID NO: 3122 - RNA, 22 nt, Human herpesvirus 1
aaaggggucugcaaccaaaggu

SEQ ID NO: 3123 - RNA, 22 nt, Vaccinia Virus
ugagauguuuguuagaagucag

SEQ ID NO: 3124 - RNA, 22 nt, Vaccinia Virus
uaucuucaguacaucguuugua

SEQ ID NO: 3125 - RNA, 22 nt, Vaccinia virus
gguagauccccaucuaaugaag

SEQ ID NO: 3126 - RNA, 22 nt, Human Herpesvirus 4
uggcguguuuucugagguuauc

SEQ ID NO: 3127 - RNA, 22 nt, Human herpesvirus 8
ggcuggagcgccguccucucau

SEQ ID NO: 3128 - RNA, 22 nt, Molluscum Contagiosum Virus
uggcacggccggcgccgcgcaa

SEQ ID NO: 3129 - RNA, 22 nt, Human Herpesvirus 4
ggcugacgaaaucgguugagau

SEQ ID NO: 3130 - RNA, 22 nt, Molluscum contagiosum virus
uucaucucgcgcaacaagagca

SEQ ID NO: 3131 - RNA, 19 nt, Barmah Forest virus
gcucggugcccagauacuc

SEQ ID NO: 3132 - RNA, 22 nt, Influenza B virus
uugaagggaggaggagaaaauu

SEQ ID NO: 3133 - RNA, 21 nt, Human herpesvirus 7
aggaacuuuccuuauguggaa

SEQ ID NO: 3134 - RNA, 22 nt, Human Adenovirus D
cagcagcagcaguagccccucu

SEQ ID NO: 3135 - RNA, 22 nt, Human Herpesvirus 5
ugacaagccugacgagagcguu

SEQ ID NO: 3136 - RNA, 22 nt, Molluscum Contagiosum Virus
cugcaggcaaagcggggcgcgc

SEQ ID NO: 3137 - RNA, 22 nt, Variola virus and Vaccinia virus
aaaucuuaucauuggucggugu

SEQ ID NO: 3138 - RNA, 22 nt, Human Herpesvirus 8
ccagcaccagcuucugucggug

SEQ ID NO: 3139 - RNA, 22 nt, Human Herpesvirus 6
aaagugcauguaucaauuuuag

SEQ ID NO: 3140 - RNA, 22 nt, Rat Cytomegalovirus
acgcacugcaucaccggccucu

SEQ ID NO: 3141 - RNA, 22 nt, Variola Virus
cuuuauaccuuuccuggaauau

SEQ ID NO: 3142 - RNA, 22 nt, Human Adenovirus A
cuacucuuaaaucauaguaaau

SEQ ID NO: 3143 - RNA, 22 nt, Human Herpesvirus 4
ccgcuccauggagucucagcug

SEQ ID NO: 3144 - RNA, 21 nt, Human Adenovirus F
caggcucugagaguguuucac

SEQ ID NO: 3145 - RNA, 22 nt, Human Herpesvirus 6B
agacagaucagcauuuggcagc

SEQ ID NO: 3146 - RNA, 22 nt, Human Herpesvirus 4
cagcaggccuaagaagcuccuc

SEQ ID NO: 3147 - RNA, 22 nt, Vaccinia Virus
acgcgugucgauucaucaaggu

SEQ ID NO: 3148 - RNA, 22 nt, Molluscum Contagiosum Virus
aggcaccgcccgcccgcgcucg

SEQ ID NO: 3149 - RNA, 22 nt, Human herpesvirus 3
aacguccagggacgcgaggugu

SEQ ID NO: 3150 - RNA, 22 nt, Human Herpesvirus 7
guguauuuuuuggguuauugca

SEQ ID NO: 3151 - RNA, 22 nt, Variola Virus
gaaagaaguauacuaucgucau

SEQ ID NO: 3152 - RNA, 22 nt, Human herpesvirus 2
agggucucauuagcaucgcggg

SEQ ID NO: 3153 - RNA, 22 nt, Vaccinia Virus
ucuuuuaagaauuguggauauu

SEQ ID NO: 3154 - RNA, 22 nt, Variola Virus
uagaacgcucuuucgaugauaa

SEQ ID NO: 3155 - RNA, 22 nt, Human Herpesvirus 6
ugaaaauaucauuaaauuguuu

SEQ ID NO: 3156 - RNA, 22 nt, Human herpesvirus 6
aguagccucauguuuuuuaguu

SEQ ID NO: 3157 - RNA, 22 nt, Hepatitis GB virus C
uggcuguucaugaccggcuuca

SEQ ID NO: 3158 - RNA, 22 nt, Dengue virus
cuguugauucaacagcaccauu

SEQ ID NO: 3159 - RNA, 22 nt, Human adenovirus F
auagggaaugcugggaguugag

SEQ ID NO: 3160 - RNA, 22 nt, Human Herpesvirus 1
ggccgccguguucggucucggu

SEQ ID NO: 3161 - RNA, 22 nt, Human Adenovirus B
auguguggaagcuugggggcag

SEQ ID NO: 3162 - RNA, 22 nt, Rat Cytomegalovirus
uggcucgcgucgccauggagac

SEQ ID NO: 3163 - RNA, 22 nt, Human Coronavirus 229E
acccuauaagauuuugucuuga

SEQ ID NO: 3164 - RNA, 22 nt, Human herpesvirus 7
aacuuuuaggaccugaacgaga

SEQ ID NO: 3165 - RNA, 22 nt, Rat cytomegalovirus
uucgugagauggagauagaauu

SEQ ID NO: 3166 - RNA, 22 nt, Human Herpesvirus 6
ggagagcacagagcugguccug

SEQ ID NO: 3167 - RNA, 22 nt, Human Papillomavirus Type 6
aagauucacaaccuuuaaaaca

SEQ ID NO: 3168 - RNA, 22 nt, Human Herpesvirus 5
gugugugucuauauauauuggu

SEQ ID NO: 3169 - RNA, 22 nt, Human coronavirus 229E
agaugugauucuauaauaauug

SEQ ID NO: 3170 - RNA, 22 nt, Human adenovirus B
gcuauaauguguuggaagacaa

SEQ ID NO: 3171 - RNA, 22 nt, Human Herpesvirus 8
gaugaucugaaaaaaaguacac

SEQ ID NO: 3172 - RNA, 22 nt, Rat cytomegalovirus
uucagacauacgagccagugua

SEQ ID NO: 3173 - RNA, 22 nt, Vaccinia Virus
guguagugggaacuauggccaa

SEQ ID NO: 3174 - RNA, 22 nt, Yellow Fever Virus
cagaccuuuggaugacaaacac

SEQ ID NO: 3175 - RNA, 22 nt, Hepatitis D virus
agacugcuggcccugucgccca

SEQ ID NO: 3176 - RNA, 22 nt, Vaccinia Virus
uccaucagaaagagguuuaaua

SEQ ID NO: 3177 - RNA, 22 nt, Human Parainfluenza Virus 3
aggauagacaaaaaguaagaaa

SEQ ID NO: 3178 - RNA, 22 nt, Transmissible Gastroenteritis Virus
ugguuacaauuucuuuagcaca

SEQ ID NO: 3179 - RNA, 22 nt, Rat Cytomegalovirus
guccgcgccggggucgcgaggu

SEQ ID NO: 3180 - RNA, 22 nt, Vaccinia Virus
caggcgaugguaaaaagacucu

SEQ ID NO: 3181 - RNA, 22 nt, Human Parainfluenza Virus 3
cguguuugugcuaucugugagg

SEQ ID NO: 3182 - RNA, 22 nt, Human Coronavirus 229E
uaagucuauuugcaauucagcu

SEQ ID NO: 3183 - RNA, 22 nt, Human Herpesvirus 5
acgcguaccucgggcgcguugg

SEQ ID NO: 3184 - RNA, 22 nt, Human Herpesvirus 5
uagaguguaauagaaucaccgu

SEQ ID NO: 3185 - RNA, 22 nt, Human herpesvirus 4
ggcuguggacuggggugcgggu

SEQ ID NO: 3186 - RNA, 22 nt, Human Herpesvirus 4
uagcaccgcuauccacuauguc

SEQ ID NO: 3187 - RNA, 22 nt, Human Herpesvirus 6B
gcaugaaaauaucauuaaauug

SEQ ID NO: 3188 - RNA, 22 nt, Human Herpesvirus 1
cccaucugugcggggagggggg

SEQ ID NO: 3189 - RNA, 21 nt, Human adenovirus D
ucugugcguucuucucguucc

SEQ ID NO: 3190 - RNA, 22 nt, Human Herpesvirus 1
ugcccgggacccaugaagcaug

SEQ ID NO: 3191 - RNA, 22 nt, Rat cytomegalovirus
augacugggaagcuauccguau

SEQ ID NO: 3192 - RNA, 18 nt, Human Herpesvirus 2
caccucggcggccgcccc

SEQ ID NO: 3193 - RNA, 22 nt, Hepatitis A Virus
ugauuagagaagcagguagaau

SEQ ID NO: 3194 - RNA, 22 nt, Hepatitis GB virus A
ugugucguggaccagagaccac

SEQ ID NO: 3195 - RNA, 22 nt, Human herpesvirus 2
uuggacuacgaccgaccacacg

SEQ ID NO: 3196 - RNA, 22 nt, Sindbis Virus
ugguguacacaggauggcgaug

SEQ ID NO: 3197 - RNA, 22 nt, Human Herpesvirus 3
gcauccguacguuauuuauaca

SEQ ID NO: 3198 - RNA, 22 nt, Human Coronavirus 229E
uugcuacuauguuacugaaccu

SEQ ID NO: 3199 - RNA, 22 nt, Human Papillomavirus Type 6
uaugugccuuuauuguaggggu

SEQ ID NO: 3200 - RNA, 22 nt, Variola virus and Vaccinia virus
gggagaauuggucagacaauuu

SEQ ID NO: 3201 - RNA, 22 nt, Human Herpesvirus 5
ugugucugacacuccuccccuu

SEQ ID NO: 3202 - RNA, 22 nt, Human herpesvirus 3
uguauguuggagauagagcgua

SEQ ID NO: 3203 - RNA, 22 nt, Molluscum contagiosum virus
gcgcgguuguccacgucguagu

SEQ ID NO: 3204 - RNA, 22 nt, Vaccinia Virus
uaacacgcuucuguucucaucu

SEQ ID NO: 3205 - RNA, 22 nt, Human herpesvirus 3
ggguuuuuguaaagggguuguu

SEQ ID NO: 3206 - RNA, 22 nt, Vaccinia Virus
gaucggugaaucuaaaucguau

SEQ ID NO: 3207 - RNA, 22 nt, Human herpesvirus 2
agcgccgcgucgagggcgucga

SEQ ID NO: 3208 - RNA, 22 nt, Human immunodeficiency virus 1
ucucugguuagaccagaucuga

SEQ ID NO: 3209 - RNA, 22 nt, Tick-borne encephalitis virus
uuuuuccgagucacacaucacc

SEQ ID NO: 3210 - RNA, 22 nt, Rat Cytomegalovirus
agagagacgcgagacgaaagag

SEQ ID NO: 3211 - RNA, 22 nt, Respiratory syncytial virus
agacccuaaagcuugaggaucu

SEQ ID NO: 3212 - RNA, 22 nt, Sindbis Virus
ugccucacuucucauguugacu

SEQ ID NO: 3213 - RNA, 22 nt, Rat Cytomegalovirus
uggcccgggcgcuccgucggcg

SEQ ID NO: 3214 - RNA, 22 nt, Human Adenovirus D
cgaggagaacugcuggcccugc

SEQ ID NO: 3215 - RNA, 22 nt, Human Herpesvirus 8
agcuggagugcugaccacggca

SEQ ID NO: 3216 - RNA, 22 nt, Vaccinia virus
aauaauaccguuugauauacca

SEQ ID NO: 3217 - RNA, 22 nt, Human herpesvirus 6
uuuucgcggcaacuccauuuug

SEQ ID NO: 3218 - RNA, 22 nt, Human Herpesvirus 5
ugaaaugaaaggauggaaacau

SEQ ID NO: 3219 - RNA, 22 nt, Human Herpesvirus 6
augggcgucgaauucguaugcg

SEQ ID NO: 3220 - RNA, 22 nt, Human Herpesvirus 4
uguccagggguccccgagggug

SEQ ID NO: 3221 - RNA, 22 nt, Human coronavirus OC43
ugauagagagugccuuaucucg

SEQ ID NO: 3222 - RNA, 22 nt, Human herpesvirus 2
gguucgucgggcgcgggaacgu

SEQ ID NO: 3223 - RNA, 22 nt, Vaccinia Virus
uguaaacauuugggccauuaua

SEQ ID NO: 3224 - RNA, 22 nt, Human adenovirus D
ugcgcagguacgcggaagucca

SEQ ID NO: 3225 - RNA, 22 nt, Human Immunodeficiency Virus 2
ucaauaaagcugccaguuagaa

SEQ ID NO: 3226 - RNA, 22 nt, Sindbis virus
acuucgcccgguucaaaugauc

SEQ ID NO: 3227 - RNA, 22 nt, Human Herpesvirus 7
cucacauagagacaagcacaag

SEQ ID NO: 3228 - RNA, 22 nt, Vaccinia Virus
gaaaacaaaacgaggauaguug

SEQ ID NO: 3229 - RNA, 21 nt, Human Herpesvirus 5
uaauucugaauggggcccgcu

SEQ ID NO: 3230 - RNA, 20 nt, Human adenovirus D
ugaaucugugcguucuucuc

SEQ ID NO: 3231 - RNA, 22 nt, Human coronavirus OC43
agaguaguucauuguguuuuaa

SEQ ID NO: 3232 - RNA, 22 nt, Variola Virus
gacgguauuaagaauucguuuu

SEQ ID NO: 3233 - RNA, 22 nt, Variola virus
uuagugcacucuauaaaaacga

SEQ ID NO: 3234 - RNA, 22 nt, Human Herpesvirus 4
gccauugucaucaguguuguca

SEQ ID NO: 3235 - RNA, 22 nt, Human Herpesvirus 8
aagcaagucgauuugaaugaca

SEQ ID NO: 3236 - RNA, 22 nt, Human Herpesvirus 4
ucagugguuuuguuuccuugau

SEQ ID NO: 3237 - RNA, 22 nt, Molluscum Contagiosum Virus
gcgcguaggccagcaccugagc

SEQ ID NO: 3238 - RNA, 22 nt, Variola virus
ugugauauaauuaguauuagcu

SEQ ID NO: 3239 - RNA, 22 nt, Human Herpesvirus 6B
ucuuuguuuuuuuuuuucugug

SEQ ID NO: 3240 - RNA, 22 nt, Vaccinia Virus
uaaaauauuuuuauucucuuuc

SEQ ID NO: 3241 - RNA, 22 nt, Vaccinia Virus
ugaguuaauauucauguugaac

SEQ ID NO: 3242 - RNA, 22 nt, Human Herpesvirus 8
ucuguuuuauauagugaggguu

SEQ ID NO: 3243 - RNA, 22 nt, Molluscum contagiosum virus
uugucgagaauagcuggggcaa

SEQ ID NO: 3244 - RNA, 22 nt, Human coronavirus 229E
guacuugcuuugucaaucuuug

SEQ ID NO: 3245 - RNA, 22 nt, Dengue Virus
uuugguaucuuauuggaagucc

SEQ ID NO: 3246 - RNA, 22 nt, Transmissible Gastroenteritis Virus
agaggacaagcguugauuauuu

SEQ ID NO: 3247 - RNA, 22 nt, Rat Cytomegalovirus
caucgauauacgugguuucuua

SEQ ID NO: 3248 - RNA, 22 nt, Vaccinia Virus
uuaguucaucauauggaacuuu

SEQ ID NO: 3249 - RNA, 22 nt, Human herpesvirus 8
ggaauaccagcggacuaccccc

SEQ ID NO: 3250 - RNA, 22 nt, Rat Cytomegalovirus
uagauggucucagaccgggauc

SEQ ID NO: 3251 - RNA, 20 nt, Human Herpesvirus 2
cgggacccgcgcgccugccu

SEQ ID NO: 3252 - RNA, 22 nt, Transmissible gastroenteritis virus
agguaugauuuuuguguugacu

SEQ ID NO: 3253 - RNA, 22 nt, Equine rhinovirus 3
uuguggaaguuggguacugcgu

SEQ ID NO: 3254 - RNA, 22 nt, Vaccinia Virus
aacaacaucagauauuucaucg

SEQ ID NO: 3255 - RNA, 22 nt, Variola Virus
uauauuguucuguuuuuguuuu

SEQ ID NO: 3256 - RNA, 22 nt, Vaccinia Virus
aagaauaauggaauugggcucc

SEQ ID NO: 3257 - RNA, 20 nt, Molluscum contagiosum virus
gcgcgcgcuuugagcagggc

SEQ ID NO: 3258 - RNA, 22 nt, Vaccinia Virus
ugaauggauuuaucaucaucgu

SEQ ID NO: 3259 - RNA, 22 nt, Human Herpesvirus 2
ucgggcaggcucgcguuccgag

SEQ ID NO: 3260 - RNA, 22 nt, Human Herpesvirus 4
ucuuucaaagugcuuucggauu

SEQ ID NO: 3261 - RNA, 22 nt, Molluscum contagiosum virus
gguugcaaacugucuugcaaac

SEQ ID NO: 3262 - RNA, 22 nt, Human herpesvirus 6
ugggagagcacagagcuggucc

SEQ ID NO: 3263 - RNA, 22 nt, Marburg Virus
uauguuaguaaaucaaaguaaa

SEQ ID NO: 3264 - RNA, 22 nt, Human Coronavirus 229E
ugguaagccagugguaguaaag

SEQ ID NO: 3265 - RNA, 22 nt, Variola Virus
ugauggagucacuuuuaguucu

SEQ ID NO: 3266 - RNA, 22 nt, Human adenovirus F
gcucuccacggguucucgccuc

SEQ ID NO: 3267 - RNA, 22 nt, Human herpesvirus 8
gcggcccgcuuuucugcggggg

SEQ ID NO: 3268 - RNA, 22 nt, Molluscum Contagiosum Virus
gcggugcagcugccgcagagcc

SEQ ID NO: 3269 - RNA, 22 nt, Transmissible Gastroenteritis Virus
aaauguagaaaaugaaacauua

SEQ ID NO: 3270 - RNA, 22 nt, Rat Cytomegalovirus
uucguucuucgguugguaagau

SEQ ID NO: 3271 - RNA, 22 nt, Rat Cytomegalovirus
cacccggaaaggagaaccgcgg

SEQ ID NO: 3272 - RNA, 22 nt, Hepatitis A Virus
ugauauguugaauguuaauuua

SEQ ID NO: 3273 - RNA, 22 nt, Sleeping disease virus
ugguggugaccaaguucucaga

SEQ ID NO: 3274 - RNA, 22 nt, Human respiratory syncytial virus
aauuaagcaaacauuuaaucug

SEQ ID NO: 3275 - RNA, 22 nt, Human Herpesvirus 5
ugagggagcucacccaacaccg

SEQ ID NO: 3276 - RNA, 22 nt, Human herpesvirus 5
ggccgaagugugcgugcggacu

SEQ ID NO: 3277 - RNA, 22 nt, Variola Virus
uauaguuucuauuuuuacagua

SEQ ID NO: 3278 - RNA, 22 nt, Human Herpesvirus 4
aagcugccgcgauguacccccg

SEQ ID NO: 3279 - RNA, 22 nt, Human Herpesvirus 3
uguaaaaacugucguugccccg

SEQ ID NO: 3280 - RNA, 22 nt, Respiratory syncytial virus
uaaguagauuccuaguuuauag

SEQ ID NO: 3281 - RNA, 22 nt, Vaccinia virus
uuuuucgugaaauaggaauaau

SEQ ID NO: 3282 - RNA, 22 nt, Human herpesvirus 1
ggcgcuggccgagggcuucgac

SEQ ID NO: 3283 - RNA, 22 nt, Human Herpesvirus 4
aagaagagaauaguggccaggg

SEQ ID NO: 3284 - RNA, 22 nt, Vaccinia virus
uggaguagaugauagaggggaa

SEQ ID NO: 3285 - RNA, 22 nt, Variola virus
uuuuaauuucuuugguaauaaa

SEQ ID NO: 3286 - RNA, 22 nt, Human Herpesvirus 5
cacguggucugugcggcucucc

SEQ ID NO: 3287 - RNA, 22 nt, Variola Virus
uuaguauuuuuauuaauccuuu

SEQ ID NO: 3288 - RNA, 22 nt, Human herpesvirus 2
gggcgggguccaggcaaggcag

SEQ ID NO: 3289 - RNA, 22 nt, Vaccinia Virus
ugauguaguacuuugaugauuu

SEQ ID NO: 3290 - RNA, 22 nt, Murray Valley Encephalitis Virus
aaggaucauugauuaacgcggu

SEQ ID NO: 3291 - RNA, 18 nt, Human herpesvirus 5
ggcuguacgcuacgagac

SEQ ID NO: 3292 - RNA, 22 nt, Vaccinia virus
ugcauauauuagagaagauugu

SEQ ID NO: 3293 - RNA, 22 nt, Molluscum contagiosum virus
ucuggcgcuugcucucugcaag

SEQ ID NO: 3294 - RNA, 22 nt, Human Herpesvirus 6
uccaccucagguacaauaguau

SEQ ID NO: 3295 - RNA, 22 nt, Human herpesvirus 7
uguguaaaaucaaccauuguga

SEQ ID NO: 3296 - RNA, 22 nt, Human Herpesvirus 8
uguuucagcguaccgcaaacgg

SEQ ID NO: 3297 - RNA, 22 nt, Rat Cytomegalovirus
cgugccgcuccuccuccuccug

SEQ ID NO: 3298 - RNA, 22 nt, Human Herpesvirus 3
uaagagcagauaguuuugugcg

SEQ ID NO: 3299 - RNA, 22 nt, Human Herpesvirus 8
acgguggugagaacucaguuga

SEQ ID NO: 3300 - RNA, 22 nt, Variola virus
uguaauuaauuaugugauuagg

SEQ ID NO: 3301 - RNA, 22 nt, Human Herpesvirus 6
uucauuaauuauuuuuucaaau

SEQ ID NO: 3302 - RNA, 22 nt, Human Herpesvirus 1
uacuccgucuuggugggugggu

SEQ ID NO: 3303 - RNA, 22 nt, Human herpesvirus 4
uggccagagccccccagagugg

SEQ ID NO: 3304 - RNA, 22 nt, Human herpesvirus 2
aaggcguacuuacguucguguu

SEQ ID NO: 3305 - RNA, 22 nt, Vaccinia Virus
uauccucaacauaaucaaugag

SEQ ID NO: 3306 - RNA, 22 nt, Vaccinia Virus
auaauauagguguauuugcgca

SEQ ID NO: 3307 - RNA, 22 nt, Human herpesvirus 3
ugucucuggcgccccgguuccc

SEQ ID NO: 3308 - RNA, 22 nt, Hepatitis C virus
ggccgggagaagguuggcgaga

SEQ ID NO: 3309 - RNA, 22 nt, Vaccinia virus
agauguaucuaaauuuuuaaca

SEQ ID NO: 3310 - RNA, 22 nt, Human coronavirus 229E
uuugaacaguguaauuaagcuc

SEQ ID NO: 3311 - RNA, 22 nt, Human Adenovirus E
aaucgccaggguugcguugcgg

SEQ ID NO: 3312 - RNA, 22 nt, Reston Ebola Virus
cggcaguguugcuacaggugua

SEQ ID NO: 3313 - RNA, 22 nt, Transmissible Gastroenteritis Virus
aacauugacagggauagaacaa

SEQ ID NO: 3314 - RNA, 20 nt, Human Herpesvirus 4
uauuuugcaugccaccuccc

SEQ ID NO: 3315 - RNA, 22 nt, Japanese encephalitis virus
aagcucaugagcaaaccuuggg

SEQ ID NO: 3316 - RNA, 22 nt, Rat cytomegalovirus
aagcauaagucauaaucgucau

SEQ ID NO: 3317 - RNA, 22 nt, Vaccinia Virus
cguugugucuacaaccgcuaca

SEQ ID NO: 3318 - RNA, 22 nt, Human adenovirus A
acagaaaaaguuucuaugcgau

SEQ ID NO: 3319 - RNA, 22 nt, Borna Disease Virus
uauucaagacagguucaacccg

SEQ ID NO: 3320 - RNA, 22 nt, Human herpesvirus 6B
ugguaauccaugaacuacagug

SEQ ID NO: 3321 - RNA, 22 nt, Human Adenovirus A
cauuaccucuguacucaacgug

SEQ ID NO: 3322 - RNA, 22 nt, Human Herpesvirus 4
ggccggcaaggugcaauguuua

SEQ ID NO: 3323 - RNA, 22 nt, Vaccinia Virus
guuguuguuugcgacugcuucc

SEQ ID NO: 3324 - RNA, 22 nt, Human Herpesvirus 4
gcagcuuggaagaggaaauuau

SEQ ID NO: 3325 - RNA, 22 nt, Human herpesvirus 3
gguuuuuguaaagggguuguua

SEQ ID NO: 3326 - RNA, 22 nt, Human Herpesvirus 7
ccuacaaucaagcgagguugua

SEQ ID NO: 3327 - RNA, 22 nt, Zaire Ebola virus
gcuuaacuucagaauccugcau

SEQ ID NO: 3328 - RNA, 22 nt, Vaccinia Virus
uugauguuuuggcugcuuguac

SEQ ID NO: 3329 - RNA, 22 nt, Reston Ebola virus
uuggcucagaggguuauaagau

SEQ ID NO: 3330 - RNA, 22 nt, Human adenovirus A
acuuuuuugccugguaaaacaa

SEQ ID NO: 3331 - RNA, 22 nt, Influenza A virus
uuguaaggcuugcauaaagguu

SEQ ID NO: 3332 - RNA, 22 nt, Vaccinia Virus
auuuagacugauguauggguaa

SEQ ID NO: 3333 - RNA, 22 nt, Human Herpesvirus 5
uaucggaacugacgaaagagcu

SEQ ID NO: 3334 - RNA, 22 nt, Measles Virus
ugagaucugucauaacuaaaua

SEQ ID NO: 3335 - RNA, 22 nt, Influenza A Virus
aauacggacugaaaggagggcc

SEQ ID NO: 3336 - RNA, 22 nt, Rat Cytomegalovirus
ccguaaucgugguguucgucgu

SEQ ID NO: 3337 - RNA, 22 nt, Human herpesvirus 4
uuaguggaagugacgugcugug

SEQ ID NO: 3338 - RNA, 22 nt, Human coronavirus 229E
ugauuucgcacaaggaccuuuu

SEQ ID NO: 3339 - RNA, 22 nt, Human adenovirus B
uggaauggguuacuauggaagc

SEQ ID NO: 3340 - RNA, 22 nt, Human astrovirus
aaauaagcaaacucaaaagccu

SEQ ID NO: 3341 - RNA, 22 nt, Human Herpesvirus 6
aguaguuuucacgguauuuuuu

SEQ ID NO: 3342 - RNA, 22 nt, Human herpesvirus 4
ggagaucaucgacgagcucuac

SEQ ID NO: 3343 - RNA, 22 nt, Transmissible Gastroenteritis Virus
ugccuaaaguuaaagucaaacc

SEQ ID NO: 3344 - RNA, 22 nt, Vaccinia Virus
cguaaaaaaguuuuaucucuuu

SEQ ID NO: 3345 - RNA, 22 nt, Hepatitis GB Virus C
uuggggacggcuaccucgcgca

SEQ ID NO: 3346 - RNA, 22 nt, Human Herpesvirus 6B
ucccauucucuuggcacagauu

SEQ ID NO: 3347 - RNA, 22 nt, Molluscum contagiosum virus
aggagcacguuccugccgguga

SEQ ID NO: 3348 - RNA, 22 nt, Vaccinia Virus
cauggagacgccugauauguag

SEQ ID NO: 3349 - RNA, 22 nt, Vaccinia virus
uuugcauguuaccacuaucaac

SEQ ID NO: 3350 - RNA, 22 nt, Human Herpesvirus 4
uaugucccacaucagguucuca

SEQ ID NO: 3351 - RNA, 22 nt, Human herpesvirus 8
ugggguacucaggugguauuuc

SEQ ID NO: 3352 - RNA, 22 nt, Human adenovirus D
ggcgcugauggagaggcacaga

SEQ ID NO: 3353 - RNA, 22 nt, Human Herpesvirus 7
uaucaccuuaaucucuucaggc

SEQ ID NO: 3354 - RNA, 32 nt, Homo Sapiens
uuaggucaccugugcacagccauggcuggaau

SEQ ID NO: 3355 - RNA, 32 nt, Homo Sapiens
uuauuuguaaaauaaacauuuaguuugaguug

SEQ ID NO: 3356 - RNA, 32 nt, Homo Sapiens
auuuugcugaaaugaguugaucuuucaccagc

SEQ ID NO: 3357 - RNA, 32 nt, Homo Sapiens
cacuaagcagugcuguccuuuuguucucucca

SEQ ID NO: 3358 - RNA, 32 nt, Homo Sapiens
cccaacuguacaacucuucaaggaaaauucgu

SEQ ID NO: 3359 - RNA, 32 nt, Homo Sapiens
uuggcauggauuucugucuucucuaacaccuu

SEQ ID NO: 3360 - RNA, 32 nt, Homo Sapiens
cgcgcccggccgcgcuaggugagccggcaccg

SEQ ID NO: 3361 - RNA, 32 nt, Homo Sapiens
cggggugcugucuaccuguuucacggagccuc

SEQ ID NO: 3362 - RNA, 32 nt, Homo Sapiens
auaucccagugguggggguucccagcauugug

SEQ ID NO: 3363 - RNA, 32 nt, Homo Sapiens
cuaagccuuucuggacuaaguaaaagaugcag

SEQ ID NO: 3364 - RNA, 32 nt, Homo Sapiens
aggucaagguucacaagaacaucugcucaaau

SEQ ID NO: 3365 - RNA, 32 nt, Homo Sapiens
agagacuuuggggacuuuuuuauuuuuauuuu

SEQ ID NO: 3366 - RNA, 32 nt, Homo Sapiens
uguuuuugaauucuuauuauuuauauuuugcu

SEQ ID NO: 3367 - RNA, 32 nt, Homo Sapiens
guagcaaaggggcaccugagguucacgcugcu

SEQ ID NO: 3368 - RNA, 32 nt, Homo Sapiens
cucauaaacaaggcaccucugugccagcagug

SEQ ID NO: 3369 - RNA, 32 nt, Homo Sapiens
cgacaauuccagcuggagcgaccgcuacggag

SEQ ID NO: 3370 - RNA, 32 nt, Homo Sapiens
acaguauguguggaauaaaaaagggaaacugu

SEQ ID NO: 3371 - RNA, 32 nt, Homo Sapiens
accauauggaaauaaaguucuuucuuacaucu

SEQ ID NO: 3372 - RNA, 32 nt, Homo Sapiens
augaauaugagaaaacucuuaguucucaucag

SEQ ID NO: 3373 - RNA, 32 nt, Homo Sapiens
ugaugucugcaccauccuucagaucuauugcc

SEQ ID NO: 3374 - RNA, 32 nt, Homo Sapiens
ucugauaugacagugauguggggcugccccag

SEQ ID NO: 3375 - RNA, 32 nt, Homo Sapiens
gggggccuaaagagacccccguccugccuccu

SEQ ID NO: 3376 - RNA, 32 nt, Homo Sapiens
ugccgccgccgccgccgccgccgcccuacuca

SEQ ID NO: 3377 - RNA, 28 nt, Homo Sapiens
aaucucuugucuaauguaugugugucac

SEQ ID NO: 3378 - RNA, 28 nt, Homo Sapiens
aagccuguggcuacgggguggugauguu

SEQ ID NO: 3379 - RNA, 32 nt, Homo Sapiens
uacacuaaaucaauacuauaucuuauacaguu

SEQ ID NO: 3380 - RNA, 32 nt, Homo Sapiens
aguuaggauaccacaauucuuggcacguuugg

SEQ ID NO: 3381 - RNA, 32 nt, Homo Sapiens
aauguauuucuuaaauguauuugauugaugcc

SEQ ID NO: 3382 - RNA, 32 nt, Homo Sapiens
uuuucaggaguguuaagcaacauccuguucag

SEQ ID NO: 3383 - RNA, 27 nt, Homo Sapiens
cgucacuccauucucagccccuagcag

SEQ ID NO: 3384 - RNA, 32 nt, Homo Sapiens
agucgggggccagagggagcucccucaacuag

SEQ ID NO: 3385 - RNA, 27 nt, Homo Sapiens
caauucucccacuucagccuccccaag

SEQ ID NO: 3386 - RNA, 32 nt, Homo Sapiens
uuuaugucuuaccacaugguggagggaugggg

SEQ ID NO: 3387 - RNA, 32 nt, Homo Sapiens
aauuauuuccuccucccuccaggcagaugcag

SEQ ID NO: 3388 - RNA, 32 nt, Homo Sapiens
ggaagagaggaccggccaccuguccagcaugg

SEQ ID NO: 3389 - RNA, 32 nt, Homo Sapiens
agcaucuuugacugaugacaggucuugaggug

SEQ ID NO: 3390 - RNA, 27 nt, Homo Sapiens
uggaaccccaucuucagcccagccugu

SEQ ID NO: 3391 - RNA, 32 nt, Homo Sapiens
aguggucuucuuuuuucuugcuuuaucauaaa

SEQ ID NO: 3392 - RNA, 32 nt, Homo Sapiens
gacaaugacaaugagauaaauguuaggaaggg

SEQ ID NO: 3393 - RNA, 32 nt, Homo Sapiens
agcaagcggaugccccccagccugcagcagaa

SEQ ID NO: 3394 - RNA, 32 nt, Homo Sapiens
agaagcugaugccucauuucuacauucuguca

SEQ ID NO: 3395 - RNA, 32 nt, Homo Sapiens
gagucagagucuuuuuauuuaggccaguuguc

SEQ ID NO: 3396 - RNA, 31 nt, Homo Sapiens
cuccuccugcuccugaaccaggaggcuucau

SEQ ID NO: 3397 - RNA, 32 nt, Homo Sapiens
cuacugaaaaauacaacaaaaauuagacaggc

SEQ ID NO: 3398 - RNA, 32 nt, Homo Sapiens
aacacuccccuauguaaauaugcugacaauaa

SEQ ID NO: 3399 - RNA, 32 nt, Homo Sapiens
aguuaaaaaaauuuaacugcuuaaaaguaaaa

SEQ ID NO: 3400 - RNA, 31 nt, Homo Sapiens
uaaauuuuugguaaucucaaguuuggguuuu

SEQ ID NO: 3401 - RNA, 32 nt, Homo Sapiens
guguacacauauauaaguuuauuauaaauuuu

SEQ ID NO: 3402 - RNA, 32 nt, Homo Sapiens
uccaguaccaccaagagcugcccauccacucc

SEQ ID NO: 3403 - RNA, 32 nt, Homo Sapiens
caccccuccuucccugguccagauuguagcuc

SEQ ID NO: 3404 - RNA, 32 nt, Homo Sapiens
uuuucuugucauuguaucaugcuuguuaaauu

SEQ ID NO: 3405 - RNA, 32 nt, Homo Sapiens
guggucccuggcccccuccuccuucucucagg

SEQ ID NO: 3406 - RNA, 32 nt, Homo Sapiens
gucgauuucucauugucuucaccaaucuucug

SEQ ID NO: 3407 - RNA, 32 nt, Homo Sapiens
ugaaaaacagagcauuaaagacuaaucaauug

SEQ ID NO: 3408 - RNA, 32 nt, Homo Sapiens
cagaaacuuaggaagcaugaaauaaaucaaau

SEQ ID NO: 3409 - RNA, 32 nt, Homo Sapiens
cuuuccaacauuuuuguuguuugcaagggcaa

SEQ ID NO: 3410 - RNA, 32 nt, Homo Sapiens
ugucccugacacccuccccagcccccacagau

SEQ ID NO: 3411 - RNA, 32 nt, Homo Sapiens
uauugggagauggggccuaaugaggugauuag

SEQ ID NO: 3412 - RNA, 32 nt, Homo Sapiens
cccacccucacccaccugccauggacgggccc

SEQ ID NO: 3413 - RNA, 32 nt, Homo Sapiens
aaauuuuaaaacugaaaacuaccugggaucau

SEQ ID NO: 3414 - RNA, 32 nt, Homo Sapiens
ucaccacauccccacaccccauugccacuuau

SEQ ID NO: 3415 - RNA, 32 nt, Homo Sapiens
ggauucaggacccuccaugacuggccuauuua

SEQ ID NO: 3416 - RNA, 32 nt, Homo Sapiens
gauucaaugcuguauuaugauauugcuguaaa

SEQ ID NO: 3417 - RNA, 32 nt, Homo Sapiens
acaugguuuucuuuuucuuaguaugggagugu

SEQ ID NO: 3418 - RNA, 32 nt, Homo Sapiens
ucacuuaaaaagacaugaacagacucauaaug

SEQ ID NO: 3419 - RNA, 32 nt, Homo Sapiens
ugccuaauauuuuuacauuucuguaaacauau

SEQ ID NO: 3420 - RNA, 32 nt, Homo Sapiens
auaccuuggaaaguacaaaggagugagagcug

SEQ ID NO: 3421 - RNA, 32 nt, Homo Sapiens
aauauaauauauauguuauauaaacugcacau

SEQ ID NO: 3422 - RNA, 32 nt, Homo Sapiens
uggcgcugcgggcggcgggccauggugguuug

SEQ ID NO: 3423 - RNA, 32 nt, Homo Sapiens
gcuggaauaaugaacugaaagcagacagggac

SEQ ID NO: 3424 - RNA, 32 nt, Homo Sapiens
aggccguguuguuugucuaccugggacuagug

SEQ ID NO: 3425 - RNA, 29 nt, Homo Sapiens
guaaacauauguagguaagguuguuuuuu

SEQ ID NO: 3426 - RNA, 32 nt, Homo Sapiens
uaucccucgguccggcggcggcggcggcggcg

SEQ ID NO: 3427 - RNA, 32 nt, Homo Sapiens
cgccucugccccaagagccaagagggguggaa

SEQ ID NO: 3428 - RNA, 32 nt, Homo Sapiens
ccccgaggccaucacccccuccagcagugaac

SEQ ID NO: 3429 - RNA, 32 nt, Homo Sapiens
acugcaaccuccaccuugcgugucucagccuc

SEQ ID NO: 3430 - RNA, 32 nt, Homo Sapiens
aauguuuuucuuuaaaugaccagaugguaaau

SEQ ID NO: 3431 - RNA, 32 nt, Homo Sapiens
ccuguacagcagagacccaaacccucuuagca

SEQ ID NO: 3432 - RNA, 32 nt, Homo Sapiens
uugaaggucaggaggcccgaguugcuggcggu

SEQ ID NO: 3433 - RNA, 32 nt, Homo Sapiens
uguggucugggcaucccuccagugugaccaag

SEQ ID NO: 3434 - RNA, 32 nt, Homo Sapiens
agcagggugcgcgcugcuguaguugccuucca

SEQ ID NO: 3435 - RNA, 32 nt, Homo Sapiens
ccccccagacacgaguaacauggcaucuugca

SEQ ID NO: 3436 - RNA, 32 nt, Homo Sapiens
uuugagguccugaaagugaagugacuugcugg

SEQ ID NO: 3437 - RNA, 32 nt, Homo Sapiens
gaaccuaagcuuucuucauuuuauuuauuuau

SEQ ID NO: 3438 - RNA, 32 nt, Homo Sapiens
aagccccccacuuuuuuuuuucugccugagau

SEQ ID NO: 3439 - RNA, 32 nt, Homo Sapiens
uaacaacacuuugaaguaauucuuauuguccu

SEQ ID NO: 3440 - RNA, 32 nt, Homo Sapiens
uuauuggauacuccucuuauuuauuauuuuuc

SEQ ID NO: 3441 - RNA, 32 nt, Homo Sapiens
cuguucccugucaucaguaugcagcgauugcu

SEQ ID NO: 3442 - RNA, 32 nt, Homo Sapiens
ugccccccaagcccugggcccccugcgggaau

SEQ ID NO: 3443 - RNA, 32 nt, Homo Sapiens
guuaaaucuauucccaugccagaaucuuauca

SEQ ID NO: 3444 - RNA, 32 nt, Homo Sapiens
ugguggggagacaaaaauauacaugugaaaua

SEQ ID NO: 3445 - RNA, 32 nt, Homo Sapiens
cugauuuccagaaguaaguaguuuccccuuuc

SEQ ID NO: 3446 - RNA, 32 nt, Homo Sapiens
cugcaccaccugcucgggcagccccggcgggc

SEQ ID NO: 3447 - RNA, 32 nt, Homo Sapiens
aggcagauuucaugccuauugagggccugcuu

SEQ ID NO: 3448 - RNA, 32 nt, Homo Sapiens
aauacucaaacacagacugauauuaaccagcc

SEQ ID NO: 3449 - RNA, 32 nt, Homo Sapiens
gaagcugagcagcuccaagggccucguuucag

SEQ ID NO: 3450 - RNA, 32 nt, Homo Sapiens
cacugaaaucuaaaauguuuaauuguuguaaa

SEQ ID NO: 3451 - RNA, 32 nt, Homo Sapiens
ucugaaaguaaggcccuagaugccucagggaa

SEQ ID NO: 3452 - RNA, 32 nt, Homo Sapiens
uuuguugugaaugaagacuuguccuauaguac

SEQ ID NO: 3453 - RNA, 32 nt, Homo Sapiens
ucaaaaacaaacaaacaaaaaccuuucccuuu

SEQ ID NO: 3454 - RNA, 32 nt, Homo Sapiens
uuguuggugauaaccucugcugggagguuacu

SEQ ID NO: 3455 - RNA, 32 nt, Homo Sapiens
acguuuacaagcuguccagaaacaaguagcgc

SEQ ID NO: 3456 - RNA, 32 nt, Homo Sapiens
ggggaacaaguagcauuuauggagcggcacag

SEQ ID NO: 3457 - RNA, 32 nt, Homo Sapiens
uugauguuuuaacucuaucugucauacauccu

SEQ ID NO: 3458 - RNA, 32 nt, Homo Sapiens
cgagcuccccgacuccuccccgcgcuccacgg

SEQ ID NO: 3459 - RNA, 32 nt, Homo Sapiens
cuagcaggcaggaaguccugugcggugucacc

SEQ ID NO: 3460 - RNA, 32 nt, Homo Sapiens
guugagcuaaaaauauaauuuuuuaaaaauug

SEQ ID NO: 3461 - RNA, 30 nt, Homo Sapiens
agugaauauauugccaccaucuuggagcuc

SEQ ID NO: 3462 - RNA, 32 nt, Homo Sapiens
aggagauucccaaccugcugagcauccgcaca

SEQ ID NO: 3463 - RNA, 32 nt, Homo Sapiens
ccgcagcgcgcccgcucccacgcccgcguagc

SEQ ID NO: 3464 - RNA, 32 nt, Homo Sapiens
uguauauggcauaaagaguaaauaaguuuuag

SEQ ID NO: 3465 - RNA, 32 nt, Homo Sapiens
ggugcggagggagaggggcgggcaggaaccgg

SEQ ID NO: 3466 - RNA, 32 nt, Homo Sapiens
aggaagucacuacuccuagccuuuguuaagau

SEQ ID NO: 3467 - RNA, 32 nt, Homo Sapiens
uggugccaaacacagugccuucuacauugcag

SEQ ID NO: 3468 - RNA, 29 nt, Homo Sapiens
auuuuuuccccauuuuaguuuucuauucc

SEQ ID NO: 3469 - RNA, 32 nt, Homo Sapiens
cugaagagcuuuaauauauacucuauguaguu

SEQ ID NO: 3470 - RNA, 32 nt, Homo Sapiens
cgggcccgcgcgccgagauguugcugcugcug

SEQ ID NO: 3471 - RNA, 32 nt, Homo Sapiens
cuuuuguuuuagaacacacauccuucagcagc

SEQ ID NO: 3472 - RNA, 32 nt, Homo Sapiens
cagcaaggacgccuuacaagucucagugcaac

SEQ ID NO: 3473 - RNA, 32 nt, Homo Sapiens
guucggacaggcucugcgugccaggcaacagu

SEQ ID NO: 3474 - RNA, 32 nt, Homo Sapiens
gaugauacucaaaaguuuuucacugaagagaa

SEQ ID NO: 3475 - RNA, 32 nt, Homo Sapiens
ccgggugccggggcccaaggugcggccucgcu

SEQ ID NO: 3476 - RNA, 32 nt, Homo Sapiens
aguuuuugugagucaaauacauuuuggaaacu

SEQ ID NO: 3477 - RNA, 32 nt, Homo Sapiens
cuucagguaauuuuugucacuguuucauggag

SEQ ID NO: 3478 - RNA, 32 nt, Homo Sapiens
aguuuuaggaacuuaaauugauuuaugggcac

SEQ ID NO: 3479 - RNA, 32 nt, Homo Sapiens
gauuucugugaaugccagugcugucagaugcu

SEQ ID NO: 3480 - RNA, 32 nt, Homo Sapiens
ggcaggcagacacccaccugcagcucaggaac

SEQ ID NO: 3481 - RNA, 32 nt, Homo Sapiens
cacugcugauuauugagaaaaauauccuuucu

SEQ ID NO: 3482 - RNA, 32 nt, Homo Sapiens
uucuuucuucuuucuuuuuuuuaaauuuuagc

SEQ ID NO: 3483 - RNA, 31 nt, Homo Sapiens
cccaaggcccccugccugcccugucaggagg

SEQ ID NO: 3484 - RNA, 32 nt, Homo Sapiens
caucaucuuuuuucuuaauauuucauguuuua

SEQ ID NO: 3485 - RNA, 32 nt, Homo Sapiens
cuguggcugcggcugcggcugcggcugagauu

SEQ ID NO: 3486 - RNA, 32 nt, Homo Sapiens
cugccaagaagcggaaaacuaccuagguccaa

SEQ ID NO: 3487 - RNA, 32 nt, Homo Sapiens
aaauuagagaacaaacggugauaauauaugcu

SEQ ID NO: 3488 - RNA, 32 nt, Homo Sapiens
uaucugauauuuuuacagucugaucuuuugac

SEQ ID NO: 3489 - RNA, 32 nt, Homo Sapiens
gucuggucuccagccgccacuaggccggcugg

SEQ ID NO: 3490 - RNA, 31 nt, Homo Sapiens
uggacaggacacacucucagggccucucggc

SEQ ID NO: 3491 - RNA, 32 nt, Homo Sapiens
guuccggccccggcuggggcuugggagcagcu

SEQ ID NO: 3492 - RNA, 32 nt, Homo Sapiens
ucugcaucuguccccaggaccuaugcucccug

SEQ ID NO: 3493 - RNA, 32 nt, Homo Sapiens
gaggaauuucccuucuauuucuaauuugcuga

SEQ ID NO: 3494 - RNA, 32 nt, Homo Sapiens
auccaaagcuucuccuuuucagacagauuaau

SEQ ID NO: 3495 - RNA, 32 nt, Homo Sapiens
caccccacugcaauccugucuuucugagcaca

SEQ ID NO: 3496 - RNA, 32 nt, Homo Sapiens
ccggagcuccgggaagacccgcccaucccagg

SEQ ID NO: 3497 - RNA, 32 nt, Homo Sapiens
uaagcucgggaucauuuccauaagucugcuuu

SEQ ID NO: 3498 - RNA, 32 nt, Homo Sapiens
uugauugaaaauagaaacaucuacagcucaga

SEQ ID NO: 3499 - RNA, 30 nt, Homo Sapiens
augcgggcgcccgggacuccgcguuccgcg

SEQ ID NO: 3500 - RNA, 32 nt, Homo Sapiens
acgaauuuuauuucuuuuuuaucugaucauua

SEQ ID NO: 3501 - RNA, 32 nt, Homo Sapiens
gcaaaguaugacagcuaaaaacaaaggaaauu

SEQ ID NO: 3502 - RNA, 32 nt, Homo Sapiens
gcaggacacccugguccccucuccacuggcau

SEQ ID NO: 3503 - RNA, 28 nt, Homo Sapiens
gcaaaauugucuaaaaugucaguguuug

SEQ ID NO: 3504 - RNA, 32 nt, Homo Sapiens
ccguugcuaccaugcuggccacccgccucucc

SEQ ID NO: 3505 - RNA, 32 nt, Homo Sapiens
uuguacucagaauugaccaauucaggaggugu

SEQ ID NO: 3506 - RNA, 32 nt, Homo Sapiens
agucauccagucccaacaccugcucuugccug

SEQ ID NO: 3507 - RNA, 32 nt, Homo Sapiens
ugcugaagggaagaaggaauagaaucuggaga

SEQ ID NO: 3508 - RNA, 32 nt, Homo Sapiens
aguuuauauggacaucuaaaaacuugaaugau

SEQ ID NO: 3509 - RNA, 32 nt, Homo Sapiens
auguauugauuguguccccaguuguuacauaa

SEQ ID NO: 3510 - RNA, 32 nt, Homo Sapiens
gcuaagagagccagacggacuccaucgugacu

SEQ ID NO: 3511 - RNA, 32 nt, Homo Sapiens
aacuuagcugggugguucuggcugagguuucu

SEQ ID NO: 3512 - RNA, 32 nt, Homo Sapiens
ucagagccggggugggguggcugcagccucag

SEQ ID NO: 3513 - RNA, 32 nt, Homo Sapiens
ggcugggaaggcagcccucucccauccacagg

SEQ ID NO: 3514 - RNA, 32 nt, Homo Sapiens
ugucaguguugcaagcuggcuggauccaacca

SEQ ID NO: 3515 - RNA, 32 nt, Homo Sapiens
agaaucugccuguggccuugcccgccagccuc

SEQ ID NO: 3516 - RNA, 32 nt, Homo Sapiens
uuuuuccugcuuccuggucacuuucaaagaac

SEQ ID NO: 3517 - RNA, 32 nt, Homo Sapiens
ucaccucccuacccuggcccagcccccugcag

SEQ ID NO: 3518 - RNA, 32 nt, Homo Sapiens
augguuugacugugucccaacccaaaucucau

SEQ ID NO: 3519 - RNA, 32 nt, Homo Sapiens
ggaaaaaacugggagaagauccggaauauuau

SEQ ID NO: 3520 - RNA, 32 nt, Homo Sapiens
uucgugcaggugucguuguuuagucggcuuua

SEQ ID NO: 3521 - RNA, 32 nt, Homo Sapiens
uaacaaguuauaauaaagcaugacaaccaaag

SEQ ID NO: 3522 - RNA, 32 nt, Homo Sapiens
augccugaccucuguggggugaggcagugcau

SEQ ID NO: 3523 - RNA, 32 nt, Homo Sapiens
gauaaauuuuugcaccuuuccauccuccaggu

SEQ ID NO: 3524 - RNA, 32 nt, Homo Sapiens
uggaaaccaaauuuauaguuaguuuagguaaa

SEQ ID NO: 3525 - RNA, 32 nt, Homo Sapiens
ugugaggccuuccuaucuccaagucuauguau

SEQ ID NO: 3526 - RNA, 32 nt, Homo Sapiens
gggcagcugaagcucacggugacucagcagug

SEQ ID NO: 3527 - RNA, 32 nt, Homo Sapiens
cucggggccauacuucuguuuccaucugcugg

SEQ ID NO: 3528 - RNA, 32 nt, Homo Sapiens
acugcggccucacagcugggccugucccagca

SEQ ID NO: 3529 - RNA, 30 nt, Homo Sapiens
gcgcaggccguuccaucugccucccagguc

SEQ ID NO: 3530 - RNA, 32 nt, Homo Sapiens
gcgcaugguggcggcuccuuucggagcgcagc

SEQ ID NO: 3531 - RNA, 32 nt, Homo Sapiens
cuguauucauaaaacucgugucuuaaaacaag

SEQ ID NO: 3532 - RNA, 32 nt, Homo Sapiens
aaacaaaagcuacucuuagcacguguuagagu

SEQ ID NO: 3533 - RNA, 32 nt, Homo Sapiens
aagcacggggagcaauggaaucagauggcuca

SEQ ID NO: 3534 - RNA, 32 nt, Homo Sapiens
aguuuagacuaacuuuacaacuucuauaacuu

SEQ ID NO: 3535 - RNA, 32 nt, Homo Sapiens
gugauccgccugccucggccucccagagugcu

SEQ ID NO: 3536 - RNA, 32 nt, Homo Sapiens
cgucugccugacggggagggcgcggucucuga

SEQ ID NO: 3537 - RNA, 32 nt, Homo Sapiens
caaguccaccugucuucauccuccccugcacu

SEQ ID NO: 3538 - RNA, 32 nt, Homo Sapiens
ugcaggaacuucuggaggaaagcacucauuga

SEQ ID NO: 3539 - RNA, 32 nt, Homo Sapiens
auucuagcaccuuguucuuagagcagauucua

SEQ ID NO: 3540 - RNA, 32 nt, Homo Sapiens
auccgagguauugauuacauuguggacuuuga

SEQ ID NO: 3541 - RNA, 32 nt, Homo Sapiens
gggggcggagcggggcggggcugagugggugg

SEQ ID NO: 3542 - RNA, 32 nt, Homo Sapiens
gggaguuggugccccgccccccaggccuuggc

SEQ ID NO: 3543 - RNA, 32 nt, Homo Sapiens
aggcuuucacauguuugacauggcaucuguuu

SEQ ID NO: 3544 - RNA, 32 nt, Homo Sapiens
agagagguggcgaguucguguccgccgggaau

SEQ ID NO: 3545 - RNA, 30 nt, Homo Sapiens
ucuuagcaugcucguuguaccucuuggaaa

SEQ ID NO: 3546 - RNA, 32 nt, Homo Sapiens
augguauaaaagacauacagaggaaaugccag

SEQ ID NO: 3547 - RNA, 32 nt, Homo Sapiens
cauuacacuccagccugggcaacagugacacu

SEQ ID NO: 3548 - RNA, 32 nt, Homo Sapiens
guacagauugccuacuugaggaccuuggccgc

SEQ ID NO: 3549 - RNA, 32 nt, Homo Sapiens
ugccuuuaggguuugggggagauuuuacuccu

SEQ ID NO: 3550 - RNA, 32 nt, Homo Sapiens
cucuaguuccccaccucaaucccggcauccag

SEQ ID NO: 3551 - RNA, 32 nt, Homo Sapiens
uaauacuugcuuuugucuuuuuaaucacagga

SEQ ID NO: 3552 - RNA, 32 nt, Homo Sapiens
gccggccgcccggcuccacuacagcuccagcc

SEQ ID NO: 3553 - RNA, 32 nt, Homo Sapiens
auucuaucugacaaagaugaaaccagcuauag

SEQ ID NO: 3554 - RNA, 32 nt, Homo Sapiens
uucuauucuaucguuggaguuuugugggaggg

SEQ ID NO: 3555 - RNA, 32 nt, Homo Sapiens
acccccgcccccugcccuccccucucugcacc

SEQ ID NO: 3556 - RNA, 32 nt, Homo Sapiens
gaaggaaguggcgggggaaggagugugguggu

SEQ ID NO: 3557 - RNA, 32 nt, Homo Sapiens
ugcccagaccucuucuagguagagacgauaca

SEQ ID NO: 3558 - RNA, 32 nt, Homo Sapiens
aucaguaucaccugggaacuaguuagaaaugu

SEQ ID NO: 3559 - RNA, 32 nt, Homo Sapiens
accuucugaacagagaauuucuggagaaagag

SEQ ID NO: 3560 - RNA, 32 nt, Homo Sapiens
cuucguguggggcaucccggggagggggugcc

SEQ ID NO: 3561 - RNA, 31 nt, Homo Sapiens
cugaacaccugcugggcuccaagcccugggc

SEQ ID NO: 3562 - RNA, 32 nt, Homo Sapiens
aagauguacugauuguacguaaaugaaaaaug

SEQ ID NO: 3563 - RNA, 32 nt, Homo Sapiens
uagauuuuuuaaaauucuguagauuaaagcaa

SEQ ID NO: 3564 - RNA, 32 nt, Homo Sapiens
cucugucagcacacccaccuccauccccucuc

SEQ ID NO: 3565 - RNA, 31 nt, Homo Sapiens
auuacguguaacaugcgaacacugcucacac

SEQ ID NO: 3566 - RNA, 32 nt, Homo Sapiens
cugcaaaugagaagaagauagaaggacgcccg

SEQ ID NO: 3567 - RNA, 32 nt, Homo Sapiens
accccacugucaacauuagacacaccaacgag

SEQ ID NO: 3568 - RNA, 32 nt, Homo Sapiens
aaggcaugggagaggggaggugucacacaacu

SEQ ID NO: 3569 - RNA, 32 nt, Homo Sapiens
auuuucccccagcaccguguggcaccuucccc

SEQ ID NO: 3570 - RNA, 32 nt, Homo Sapiens
ucugggggcuuuuucuucuccucccccuaccc

SEQ ID NO: 3571 - RNA, 32 nt, Homo Sapiens
uccaagcaguggacugcccacccacucccaca

SEQ ID NO: 3572 - RNA, 32 nt, Homo Sapiens
caauugaaaagagcccagcauauuuuaucaca

SEQ ID NO: 3573 - RNA, 32 nt, Homo Sapiens
acuuuugaaacacuaauguaguaugcuccgua

SEQ ID NO: 3574 - RNA, 32 nt, Homo Sapiens
uugcuauaaauacuuuuuuauacucuacuuuu

SEQ ID NO: 3575 - RNA, 32 nt, Homo Sapiens
guguaaaguggacgugguaugaaaugucugac

SEQ ID NO: 3576 - RNA, 30 nt, Homo Sapiens
aaggcccuagagcggcgccagucgacccgc

SEQ ID NO: 3577 - RNA, 32 nt, Homo Sapiens
ugcugaacgcugguccccugggcccccuuuau

SEQ ID NO: 3578 - RNA, 32 nt, Homo Sapiens
agccguggcgugcaggacucggguggcucuga

SEQ ID NO: 3579 - RNA, 32 nt, Homo Sapiens
uuggaugugagacccuauuuugaaauagaguc

SEQ ID NO: 3580 - RNA, 32 nt, Homo Sapiens
cuagaaaacuaauuuuaaauauuguuaguuuu

SEQ ID NO: 3581 - RNA, 32 nt, Homo Sapiens
ugaauuguucccucccccgcaaugugggcacu

SEQ ID NO: 3582 - RNA, 32 nt, Homo Sapiens
guauggugaagauaagugacaagcacacauuu

SEQ ID NO: 3583 - RNA, 32 nt, Homo Sapiens
caggggcccccuccccaccaaaggguucaccu

SEQ ID NO: 3584 - RNA, 32 nt, Homo Sapiens
agggauagagcaugcauacugguuuuuuuuuc

SEQ ID NO: 3585 - RNA, 32 nt, Homo Sapiens
uccagccauuugacacccuuuaugaugucaca

SEQ ID NO: 3586 - RNA, 32 nt, Homo Sapiens
aagccgcaggaugcgcuaugccugcagcuccu

SEQ ID NO: 3587 - RNA, 32 nt, Homo Sapiens
gcuccuggccuaccccucccccagcuccccgc

SEQ ID NO: 3588 - RNA, 32 nt, Homo Sapiens
aguuuauacagaauagaccuuuccaaucuccu

SEQ ID NO: 3589 - RNA, 32 nt, Homo Sapiens
augggugucuacagaacuuaugauggaguugu

SEQ ID NO: 3590 - RNA, 32 nt, Homo Sapiens
gucuacaccguccccuaagggaccucagacug

SEQ ID NO: 3591 - RNA, 30 nt, Homo Sapiens
agcagaaugggaaugggggaaacacagcag

SEQ ID NO: 3592 - RNA, 32 nt, Homo Sapiens
cccccgccgcaccagcaccggagcuucacacc

SEQ ID NO: 3593 - RNA, 32 nt, Homo Sapiens
gaaggguagcaucagagaagugggcauugguc

SEQ ID NO: 3594 - RNA, 32 nt, Homo Sapiens
ccacucugaacuuguuuuuuuaucuguuaaau

SEQ ID NO: 3595 - RNA, 32 nt, Homo Sapiens
ucaguacaucugcggcaacuggcugccuucga

SEQ ID NO: 3596 - RNA, 32 nt, Homo Sapiens
gguucccugcgcgcagccggcgcguguguggc

SEQ ID NO: 3597 - RNA, 32 nt, Homo Sapiens
ugccugccggucccgcgccgcgcguccgcacu

SEQ ID NO: 3598 - RNA, 32 nt, Homo Sapiens
auagauuucuucacuuacaaaugcauauuggg

SEQ ID NO: 3599 - RNA, 32 nt, Homo Sapiens
uagaaucuucccuuuuuuacuccauucaagag

SEQ ID NO: 3600 - RNA, 32 nt, Homo Sapiens
ccccuggccugugccaagggggaggggaggcg

SEQ ID NO: 3601 - RNA, 32 nt, Homo Sapiens
ucuuuuuugagguggggggagggaggagguau

SEQ ID NO: 3602 - RNA, 32 nt, Homo Sapiens
acugugcuuuuguaaauuuucacaaacaguca

SEQ ID NO: 3603 - RNA, 32 nt, Homo Sapiens
aagauguuuuguuuaaauuugcuaauguaaac

SEQ ID NO: 3604 - RNA, 32 nt, Homo Sapiens
guugcaaucaaaccccacaaugcugaaaacag

SEQ ID NO: 3605 - RNA, 32 nt, Homo Sapiens
agcacaaaaauaaaaacuuaucacuguauacc

SEQ ID NO: 3606 - RNA, 32 nt, Homo Sapiens
gcacuguugagggcagccucuccagcucucuu

SEQ ID NO: 3607 - RNA, 29 nt, Homo Sapiens
uuaacuccgggacagagauggcuggcgga

SEQ ID NO: 3608 - RNA, 32 nt, Homo Sapiens
uggucagcccgccuuaucccagccccgagacc

SEQ ID NO: 3609 - RNA, 32 nt, Homo Sapiens
ugcacucugcugcuuugaaaucugguugaaau

SEQ ID NO: 3610 - RNA, 32 nt, Homo Sapiens
aacaggagggaagauugaaaagaagaguccag

SEQ ID NO: 3611 - RNA, 32 nt, Homo Sapiens
gauuugcccugagacucugagaagaagcugug

SEQ ID NO: 3612 - RNA, 32 nt, Homo Sapiens
ggagcucaagacgggcgagcugcccgagaucu

SEQ ID NO: 3613 - RNA, 28 nt, Homo Sapiens
uuauuauguauguguauguguuuuacuu

SEQ ID NO: 3614 - RNA, 32 nt, Homo Sapiens
guccaagcgggauugugagcuguggugugaga

SEQ ID NO: 3615 - RNA, 32 nt, Homo Sapiens
gagucaguuaaaccucuuuucuuuauaaauca

SEQ ID NO: 3616 - RNA, 32 nt, Homo Sapiens
aaauaauggaauugucaauuggucaucuggcu

SEQ ID NO: 3617 - RNA, 30 nt, Homo Sapiens
gcacggcgcgcgcagcuucuaagugccaga

SEQ ID NO: 3618 - RNA, 32 nt, Homo Sapiens
uggcuuucugucaucuuccuuuuucuccagug

SEQ ID NO: 3619 - RNA, 32 nt, Homo Sapiens
gagucugcaggaacuggccuuguucuccuuag

SEQ ID NO: 3620 - RNA, 32 nt, Homo Sapiens
acagcguugcuaauaaagcuaaaugucucaug

SEQ ID NO: 3621 - RNA, 32 nt, Homo Sapiens
gccagaagcugccuuuuuuuuauuauuauuau

SEQ ID NO: 3622 - RNA, 32 nt, Homo Sapiens
ccugguugauucagcccaccucucugcauccc

SEQ ID NO: 3623 - RNA, 32 nt, Homo Sapiens
cuggcuuuccccggccaccccagccgcccugg

SEQ ID NO: 3624 - RNA, 32 nt, Homo Sapiens
agcuccauacucagagugcucccuuuggacug

SEQ ID NO: 3625 - RNA, 32 nt, Homo Sapiens
gcccacuggguugcugugcuguagggugaucg

SEQ ID NO: 3626 - RNA, 32 nt, Homo Sapiens
caaccccgcggcccagacccagcccgcggccu

SEQ ID NO: 3627 - RNA, 32 nt, Homo Sapiens
gagcucaucgccaaguucuugauccacuugca

SEQ ID NO: 3628 - RNA, 32 nt, Homo Sapiens
uuccagcacuguccucuccaccccaagcuuug

SEQ ID NO: 3629 - RNA, 32 nt, Homo Sapiens
gauuggggagcaugcacuugugacugcagggu

SEQ ID NO: 3630 - RNA, 32 nt, Homo Sapiens
agucgcccaagcagacagcccuggcaaaugcc

SEQ ID NO: 3631 - RNA, 32 nt, Homo Sapiens
ugggggaggggauauuguggagaacaugacag

SEQ ID NO: 3632 - RNA, 32 nt, Homo Sapiens
cagugcauuggugaaggcaacguuagguguga

SEQ ID NO: 3633 - RNA, 32 nt, Homo Sapiens
aggaugaccgcuccaguucucaucaucuccca

SEQ ID NO: 3634 - RNA, 32 nt, Homo Sapiens
uaccuaaggggaggguauuaugcaccuaccag

SEQ ID NO: 3635 - RNA, 32 nt, Homo Sapiens
ucagccuuccagcuccuccuccugacugaccg

SEQ ID NO: 3636 - RNA, 32 nt, Homo Sapiens
aucccuccaaguagaaugggugcaccuaaauc

SEQ ID NO: 3637 - RNA, 31 nt, Homo Sapiens
uggugccaggcugucauucagaacacagcca

SEQ ID NO: 3638 - RNA, 32 nt, Homo Sapiens
ccuggcuguguuccugagcccccgucgugccu

SEQ ID NO: 3639 - RNA, 32 nt, Homo Sapiens
agaagcagccagaggaccgucaguacucaacu

SEQ ID NO: 3640 - RNA, 32 nt, Homo Sapiens
gaauuguuuccuaaagaaaaccacucuuugau

SEQ ID NO: 3641 - RNA, 32 nt, Homo Sapiens
ccgcccccacccagggauggggaggaggagca

SEQ ID NO: 3642 - RNA, 32 nt, Homo Sapiens
aaaugaagaaaagaaggaaacuggcuagggac

SEQ ID NO: 3643 - RNA, 32 nt, Homo Sapiens
cacugaguugugaauuuuuucuuaaagcagua

SEQ ID NO: 3644 - RNA, 32 nt, Homo Sapiens
ccuacauaaguuguuguugugaagauuaaaug

SEQ ID NO: 3645 - RNA, 32 nt, Homo Sapiens
ggagcucaacauaacagggaaaaggagcacag

SEQ ID NO: 3646 - RNA, 31 nt, Homo Sapiens
gauaacacaaagaaaacagugucaacgagua

SEQ ID NO: 3647 - RNA, 32 nt, Homo Sapiens
uaccucugauucuggaaacagaauagcagcca

SEQ ID NO: 3648 - RNA, 32 nt, Homo Sapiens
auucaugaugaaaucugcuuuuuguuuugcag

SEQ ID NO: 3649 - RNA, 32 nt, Homo Sapiens
uuccucuccugggaagagccugccggcuugcg

SEQ ID NO: 3650 - RNA, 32 nt, Homo Sapiens
uuagccaaaauaagguuggguuuucuaaaaaa

SEQ ID NO: 3651 - RNA, 30 nt, Homo Sapiens
agaagcgucugugcuuggagagccaucugg

SEQ ID NO: 3652 - RNA, 32 nt, Homo Sapiens
uagcaagauguccuauguuaccaagagacuau

SEQ ID NO: 3653 - RNA, 32 nt, Homo Sapiens
cccagcuacucaggagguugaggugggaagau

SEQ ID NO: 3654 - RNA, 32 nt, Homo Sapiens
gauaacuuuaaaaauuagauacauuuucuuaa

SEQ ID NO: 3655 - RNA, 32 nt, Homo Sapiens
cuggcccccuccuccuucucucaggauuucuc

SEQ ID NO: 3656 - RNA, 32 nt, Homo Sapiens
gcaggugcauucucuugguuucguuuuuauuc

SEQ ID NO: 3657 - RNA, 32 nt, Homo Sapiens
ucuucaaaaaauuuaaaaauuagccaagugug

SEQ ID NO: 3658 - RNA, 32 nt, Homo Sapiens
aacuauuacacaugggcauauucugauguuuc

SEQ ID NO: 3659 - RNA, 32 nt, Homo Sapiens
cuuccagaugagaaugagggagcgaccacucc

SEQ ID NO: 3660 - RNA, 32 nt, Homo Sapiens
ucucacccuaaaauauaccuuaagagacuuuu

SEQ ID NO: 3661 - RNA, 32 nt, Homo Sapiens
acaguggaugacccuuuugaauauaccuaaug

SEQ ID NO: 3662 - RNA, 32 nt, Homo Sapiens
aaguauagugaacaagacaccauauuaaguac

SEQ ID NO: 3663 - RNA, 32 nt, Homo Sapiens
ccaaggcagcgaaggaggccaaggauggcaug

SEQ ID NO: 3664 - RNA, 32 nt, Homo Sapiens
ggcucaggauaggucuuaaauuuuaaauacaa

SEQ ID NO: 3665 - RNA, 32 nt, Homo Sapiens
uaaucaagcugaucuuaauguauauaaucauu

SEQ ID NO: 3666 - RNA, 32 nt, Homo Sapiens
gaaaggauuucuggucucggugcuguagguca

SEQ ID NO: 3667 - RNA, 32 nt, Homo Sapiens
ugucaugcuguagcauuuguaagauuuguaaa

SEQ ID NO: 3668 - RNA, 32 nt, Homo Sapiens
uaaaauagaauauugugugaaaaaaugcacug

SEQ ID NO: 3669 - RNA, 32 nt, Homo Sapiens
gacuaggauccuagcaacuucucuaaguuaac

SEQ ID NO: 3670 - RNA, 32 nt, Homo Sapiens
guugucuguaguuucuuuauuaagcucugaaa

SEQ ID NO: 3671 - RNA, 32 nt, Homo Sapiens
gaugaagaaagaugauacgaugugauggacaa

SEQ ID NO: 3672 - RNA, 32 nt, Homo Sapiens
aacacuugugguuccaagcauuuuggauaagg

SEQ ID NO: 3673 - RNA, 32 nt, Homo Sapiens
cgacaggagcacugcaugucagagcacuuuaa

SEQ ID NO: 3674 - RNA, 32 nt, Homo Sapiens
cauauuggauaaaauaaaugcaauugugcucu

SEQ ID NO: 3675 - RNA, 32 nt, Homo Sapiens
ccgcaacccuccccuucagcuuuacggcggcc

SEQ ID NO: 3676 - RNA, 32 nt, Homo Sapiens
caggacuuacacaaaaaaggacuaaagcacag

SEQ ID NO: 3677 - RNA, 32 nt, Homo Sapiens
gugaggggccccagagcucuccaccgcagcuc

SEQ ID NO: 3678 - RNA, 32 nt, Homo Sapiens
aagagguaauuuuucuccuccucccagucauc

SEQ ID NO: 3679 - RNA, 32 nt, Homo Sapiens
aaaacccagggugagguucagccugugagggc

SEQ ID NO: 3680 - RNA, 32 nt, Homo Sapiens
cuucaagaugaccacugaagcugcaaaaaauc

SEQ ID NO: 3681 - RNA, 32 nt, Homo Sapiens
auuuauuuuuucacaauucuguaaaagauuga

SEQ ID NO: 3682 - RNA, 32 nt, Homo Sapiens
gggcaucucuccagcccucccagcucugacau

SEQ ID NO: 3683 - RNA, 32 nt, Homo Sapiens
cuagccugucccccaaagcaguguccaacacc

SEQ ID NO: 3684 - RNA, 32 nt, Homo Sapiens
guucacggaaaacagaucuucuucucucuugu

SEQ ID NO: 3685 - RNA, 32 nt, Homo Sapiens
cucaggaucaaaaaccaaaggaugguuuuaaa

SEQ ID NO: 3686 - RNA, 32 nt, Homo Sapiens
aaucuguaaaauguuaguuuugguaauuuuuu

SEQ ID NO: 3687 - RNA, 32 nt, Homo Sapiens
agcccccauccugcugggccagcccugaccug

SEQ ID NO: 3688 - RNA, 32 nt, Homo Sapiens
uuuuguuccugcacucacucauuuuuccagag

SEQ ID NO: 3689 - RNA, 32 nt, Homo Sapiens
ucccgcucuccuccccggcacaggcagggggu

SEQ ID NO: 3690 - RNA, 32 nt, Homo Sapiens
agaggagcccgaaguccaagggcccccugauc

SEQ ID NO: 3691 - RNA, 32 nt, Homo Sapiens
agguuauaacuguggcuaauucacauaacuuc

SEQ ID NO: 3692 - RNA, 32 nt, Homo Sapiens
caagccgggcuaaggcgggcggagcgggccgg

SEQ ID NO: 3693 - RNA, 32 nt, Homo Sapiens
caggaaagacgaggcaccuuggccgcggggcc

SEQ ID NO: 3694 - RNA, 32 nt, Homo Sapiens
augcuauauaaaauguuaaagucugaugcugu

SEQ ID NO: 3695 - RNA, 32 nt, Homo Sapiens
ggccuguguauccccuucucccggccccagcc

SEQ ID NO: 3696 - RNA, 31 nt, Homo Sapiens
uucccagcugccugccugcccuagccagcuc

SEQ ID NO: 3697 - RNA, 32 nt, Homo Sapiens
cuucuugaauuuucuucccuggacuggaauac

SEQ ID NO: 3698 - RNA, 32 nt, Homo Sapiens
uucccuccugcucucuggugcuccucacgcca

SEQ ID NO: 3699 - RNA, 32 nt, Homo Sapiens
uugcuuagagaaaacguguugccaucccauca

SEQ ID NO: 3700 - RNA, 32 nt, Homo Sapiens
ccuacugcauuucagacacggcuguccaagaa

SEQ ID NO: 3701 - RNA, 27 nt, Homo Sapiens
ccaugcgccucaacagcuccgcgccgg

SEQ ID NO: 3702 - RNA, 32 nt, Homo Sapiens
acuuuauauuuucucuuccauagugagaugua

SEQ ID NO: 3703 - RNA, 32 nt, Homo Sapiens
ggcgcgcaugcucaguccgcgcggcggcugcg

SEQ ID NO: 3704 - RNA, 32 nt, Homo Sapiens
gucgcggcccgagucccggcgccagcagccag

SEQ ID NO: 3705 - RNA, 32 nt, Homo Sapiens
ccauuauuuuugguguauugcuuuuucuaauu

SEQ ID NO: 3706 - RNA, 32 nt, Homo Sapiens
aggagaaccagcugcccaagcucuuggcugcu

SEQ ID NO: 3707 - RNA, 32 nt, Homo Sapiens
uaguacaucccucaaucccacccagcaagaga

SEQ ID NO: 3708 - RNA, 32 nt, Homo Sapiens
uccccucccucaugcucaggaguuggcaguug

SEQ ID NO: 3709 - RNA, 32 nt, Homo Sapiens
cccuuucccuucucccaagacggggugggggg

SEQ ID NO: 3710 - RNA, 32 nt, Homo Sapiens
aacuguuuuaggggccacucuuguuugaggcc

SEQ ID NO: 3711 - RNA, 32 nt, Homo Sapiens
uacuguaaauaccacaugugaguuuaccugaa

SEQ ID NO: 3712 - RNA, 30 nt, Homo Sapiens
ccgcaaugaugaugauggcgcugagcaaga

SEQ ID NO: 3713 - RNA, 32 nt, Homo Sapiens
gcucaggagagagcuuccuguuucuaaguggc

SEQ ID NO: 3714 - RNA, 32 nt, Homo Sapiens
gcccugcccggggcuccccugugcugccuagc

SEQ ID NO: 3715 - RNA, 32 nt, Homo Sapiens
gcccaaaaauaauuuuuguagaauuagcauuu

SEQ ID NO: 3716 - RNA, 32 nt, Homo Sapiens
cuccuccagcccacccaaccgccuugggucaa

SEQ ID NO: 3717 - RNA, 32 nt, Homo Sapiens
caaauguguuuauguaguggcuuaauaaaaau

SEQ ID NO: 3718 - RNA, 32 nt, Homo Sapiens
uuugaucacuaaguccugacucugccauggaa

SEQ ID NO: 3719 - RNA, 32 nt, Homo Sapiens
ugagguuggugcccacuggcugggacccuuug

SEQ ID NO: 3720 - RNA, 32 nt, Homo Sapiens
uuuaucccagcacccugggggaugccagccuu

SEQ ID NO: 3721 - RNA, 32 nt, Homo Sapiens
acccucugcuccgugcgcugcagagggggccg

SEQ ID NO: 3722 - RNA, 32 nt, Homo Sapiens
uuuuucuuaagccccagaaagccaaaaagaac

SEQ ID NO: 3723 - RNA, 32 nt, Homo Sapiens
agcauugauaauguucuaucuaaauuuguaca

SEQ ID NO: 3724 - RNA, 32 nt, Homo Sapiens
gccgccuuuccacgguaaccgcgcgccggcgg

SEQ ID NO: 3725 - RNA, 32 nt, Homo Sapiens
ggcuuguugacaggacagugucugcgccucuc

SEQ ID NO: 3726 - RNA, 32 nt, Homo Sapiens
ugcuuuaugggaagaauagggagucuauacca

SEQ ID NO: 3727 - RNA, 32 nt, Homo Sapiens
ggccaggcgugguggcucaugccuguaaucug

SEQ ID NO: 3728 - RNA, 32 nt, Homo Sapiens
gcgguggagcgaggccgcgcgcgccgaagaug

SEQ ID NO: 3729 - RNA, 32 nt, Homo Sapiens
augcaaaaguagauuagcacaaugcacaauuu

SEQ ID NO: 3730 - RNA, 32 nt, Homo Sapiens
ucacuuacuagauuauacuaaugagcuaaugg

SEQ ID NO: 3731 - RNA, 32 nt, Homo Sapiens
uccccuacaucuuuugagccacagucgcccau

SEQ ID NO: 3732 - RNA, 32 nt, Homo Sapiens
ggaaaccaggacuuggcaacaugauguuugac

SEQ ID NO: 3733 - RNA, 32 nt, Homo Sapiens
auuaguuauggccagcaguguucuuuggagag

SEQ ID NO: 3734 - RNA, 32 nt, Homo Sapiens
agugcaauaugaagacguagaaauguaaaaua

SEQ ID NO: 3735 - RNA, 32 nt, Homo Sapiens
accauuaggcgccugggccggaggagggguuu

SEQ ID NO: 3736 - RNA, 32 nt, Homo Sapiens
aaaccggaaugggaagccucagcacccuggcc

SEQ ID NO: 3737 - RNA, 30 nt, Homo Sapiens
auuguaauaaaaagguagauaaaccauugu

SEQ ID NO: 3738 - RNA, 32 nt, Homo Sapiens
uuuaaaacugagcacugagaucaauagaaaag

SEQ ID NO: 3739 - RNA, 32 nt, Homo Sapiens
uuaaaguuucaaaaaucugaagauuguuuauc

SEQ ID NO: 3740 - RNA, 32 nt, Homo Sapiens
augugauuuuuggcuuggcuguuugaauaaug

SEQ ID NO: 3741 - RNA, 32 nt, Homo Sapiens
gcgugcagaauaacuucuuaacuauuaacuau

SEQ ID NO: 3742 - RNA, 32 nt, Homo Sapiens
ucuggaaaccaaguacagauggacugaguaug

SEQ ID NO: 3743 - RNA, 32 nt, Homo Sapiens
gguacuucaacucccgcccccaccuguguccc

SEQ ID NO: 3744 - RNA, 32 nt, Homo Sapiens
ucagccuggucucucccaugaagaugucgugu

SEQ ID NO: 3745 - RNA, 32 nt, Homo Sapiens
gcugacaucugagugcacacaccacaguguaa

SEQ ID NO: 3746 - RNA, 32 nt, Homo Sapiens
uauggcuacaguucaugguauaaggucauuua

SEQ ID NO: 3747 - RNA, 32 nt, Homo Sapiens
cgcggucgcgccgggcuccgccugcagugugg

SEQ ID NO: 3748 - RNA, 32 nt, Homo Sapiens
acugcccuccccaccccaccccaccccaggag

SEQ ID NO: 3749 - RNA, 32 nt, Homo Sapiens
uuauucagguuuauuggcacgaagauacuugu

SEQ ID NO: 3750 - RNA, 32 nt, Homo Sapiens
gaccuugagugucaaggcuggacagcuacugc

SEQ ID NO: 3751 - RNA, 32 nt, Homo Sapiens
cuggacccacugacacagcauuacauuucuga

SEQ ID NO: 3752 - RNA, 32 nt, Homo Sapiens
gcuugcuuauuuuuucuggaugagucugggac

SEQ ID NO: 3753 - RNA, 32 nt, Homo Sapiens
ucuguccugccuuguuauuguaagugccuuca

SEQ ID NO: 3754 - RNA, 32 nt, Homo Sapiens
acuauugugaauggugaauguucauguaugac

SEQ ID NO: 3755 - RNA, 32 nt, Homo Sapiens
uuggccaggcagaucucaaacuucugaccucg

SEQ ID NO: 3756 - RNA, 32 nt, Homo Sapiens
agccgggcugagaggagaguggcugucuacuc

SEQ ID NO: 3757 - RNA, 32 nt, Homo Sapiens
cuaaaagagacuucccacaguuuuccaaaaau

SEQ ID NO: 3758 - RNA, 32 nt, Homo Sapiens
uguguaguuauuucuaaguaguaauucuuccc

SEQ ID NO: 3759 - RNA, 32 nt, Homo Sapiens
aagaucuguuuugaaggcaaaauugcaaaucu

SEQ ID NO: 3760 - RNA, 32 nt, Homo Sapiens
uccacuucuaacuccacuggcuccaugauucu

SEQ ID NO: 3761 - RNA, 32 nt, Homo Sapiens
aaauagucauauuuuuaaaggaguuggaggag

SEQ ID NO: 3762 - RNA, 32 nt, Homo Sapiens
caaacugucaggcuuggguucuuguuauagaa

SEQ ID NO: 3763 - RNA, 32 nt, Homo Sapiens
auggccaaagggagagaggccuuuuaaaauau

SEQ ID NO: 3764 - RNA, 32 nt, Homo Sapiens
ggcgcggaggucgcccggggugcccuggcugg

SEQ ID NO: 3765 - RNA, 32 nt, Homo Sapiens
uguacugcugaauaaagaccaaugaagagguu

SEQ ID NO: 3766 - RNA, 32 nt, Homo Sapiens
ccagcagguguggggggugcugcagcccucgg

SEQ ID NO: 3767 - RNA, 32 nt, Homo Sapiens
ugcggccccgucuguggcuuucagccucuggg

SEQ ID NO: 3768 - RNA, 32 nt, Homo Sapiens
cgcgccgcgccggggcccauguggggaggagu

SEQ ID NO: 3769 - RNA, 32 nt, Homo Sapiens
caggaagaauacugagugccuucauuuaacua

SEQ ID NO: 3770 - RNA, 32 nt, Homo Sapiens
ucuaaacugcaaacagaaaucagguguuuuaa

SEQ ID NO: 3771 - RNA, 32 nt, Homo Sapiens
gucaucagugauucuaaagggauuguauuugu

SEQ ID NO: 3772 - RNA, 32 nt, Homo Sapiens
cucuuaaccaguuguaacaucuuaccauuucc

SEQ ID NO: 3773 - RNA, 32 nt, Homo Sapiens
aauaggaugauuaugagcucugaguccauuaa

SEQ ID NO: 3774 - RNA, 32 nt, Homo Sapiens
cugggcguggcgggugggcaggcggcccgggc

SEQ ID NO: 3775 - RNA, 32 nt, Homo Sapiens
aagaccucugucugcccuuuggcccggccucu

SEQ ID NO: 3776 - RNA, 32 nt, Homo Sapiens
ccuggcucugcugguccagaucuugcgcucag

SEQ ID NO: 3777 - RNA, 32 nt, Homo Sapiens
cucugguucucccacacucccacccacugaca

SEQ ID NO: 3778 - RNA, 32 nt, Homo Sapiens
gcagaacuucccuccauccaccccucuggcac

SEQ ID NO: 3779 - RNA, 30 nt, Homo Sapiens
ucuguuugugcugcagugaaaacugcacga

SEQ ID NO: 3780 - RNA, 32 nt, Homo Sapiens
uagucaggcuccuggaucuucuaggcccaucu

SEQ ID NO: 3781 - RNA, 32 nt, Homo Sapiens
cggccggcgcagaacccccaggagcacagguc

SEQ ID NO: 3782 - RNA, 32 nt, Homo Sapiens
ggaaguccgugguggggguggagcagggguac

SEQ ID NO: 3783 - RNA, 32 nt, Homo Sapiens
ggagucauuccccuccugugugugaaccagug

SEQ ID NO: 3784 - RNA, 32 nt, Homo Sapiens
cggaaacugugcauaguucuaauuguaaguca

SEQ ID NO: 3785 - RNA, 32 nt, Homo Sapiens
aaguuuguuuaguggauccauacucaaaggaa

SEQ ID NO: 3786 - RNA, 32 nt, Homo Sapiens
uagaaugaauaagaucugggucgggcauggug

SEQ ID NO: 3787 - RNA, 32 nt, Homo Sapiens
uaaaacaugcuucagaagaacuggcaccccuu

SEQ ID NO: 3788 - RNA, 31 nt, Homo Sapiens
acccgcgagcgcaccgcuccccgcgccccuu

SEQ ID NO: 3789 - RNA, 32 nt, Homo Sapiens
gauugagggacaucaaggaacuacugccccca

SEQ ID NO: 3790 - RNA, 32 nt, Homo Sapiens
cagugcgggccuggcgggaggugggggagguc

SEQ ID NO: 3791 - RNA, 31 nt, Homo Sapiens
cuagggugggcggugguggcaggaggccuug

SEQ ID NO: 3792 - RNA, 32 nt, Homo Sapiens
ugugccauuaaaccucuuuuucuuuauaaauu

SEQ ID NO: 3793 - RNA, 32 nt, Homo Sapiens
cauuuucaacuauauuuacuuuuuaaaugcau

SEQ ID NO: 3794 - RNA, 32 nt, Homo Sapiens
gagcugguggaugucuuuguggagcacaguug

SEQ ID NO: 3795 - RNA, 32 nt, Homo Sapiens
ugcgcaguacggccgccgggaccgcagcaugg

SEQ ID NO: 3796 - RNA, 32 nt, Homo Sapiens
augucaugaaacaaaaacacugauuuuagaga

SEQ ID NO: 3797 - RNA, 32 nt, Homo Sapiens
ucagagaaauuugauagacucaaacagauagu

SEQ ID NO: 3798 - RNA, 32 nt, Homo Sapiens
acaagugauuaaauuuagucugcacagugagc

SEQ ID NO: 3799 - RNA, 32 nt, Homo Sapiens
gcuugaagcuggaagcacacaguggguagcag

SEQ ID NO: 3800 - RNA, 32 nt, Homo Sapiens
uccccaggcuccugggggugggcagcgcugua

SEQ ID NO: 3801 - RNA, 32 nt, Homo Sapiens
cuguccuccacuuugaggcucuggucaggcgu

SEQ ID NO: 3802 - RNA, 32 nt, Homo Sapiens
uaguucccauucucuguucaaccucaguguuu

SEQ ID NO: 3803 - RNA, 32 nt, Homo Sapiens
uuuuuuaaauuaagaacugcacuuuauugacu

SEQ ID NO: 3804 - RNA, 32 nt, Homo Sapiens
gaccucaucuauaaauugaaauuauauuuuua

SEQ ID NO: 3805 - RNA, 32 nt, Homo Sapiens
ggguuggcagggugugcuggggccuggaggag

SEQ ID NO: 3806 - RNA, 27 nt, Homo Sapiens
aaaauuauuguuuucagcccccguguu

SEQ ID NO: 3807 - RNA, 32 nt, Homo Sapiens
uguauuaacugcuuuaauuuuaccaaaacccu

SEQ ID NO: 3808 - RNA, 32 nt, Homo Sapiens
gaggccauaaacagaaacaaugugcuagcaga

SEQ ID NO: 3809 - RNA, 32 nt, Homo Sapiens
guugaaaaauaaauuucauccucacuuaugag

SEQ ID NO: 3810 - RNA, 32 nt, Homo Sapiens
uggagaaacugaggcccagaaauuguguccag

SEQ ID NO: 3811 - RNA, 32 nt, Homo Sapiens
aaggacccuuuccaggcccacccccucuguga

SEQ ID NO: 3812 - RNA, 32 nt, Homo Sapiens
cccccgaccugaccacgccggccuaggguucc

SEQ ID NO: 3813 - RNA, 32 nt, Homo Sapiens
cgcagggcaggauguacacgcugcugucgggc

SEQ ID NO: 3814 - RNA, 32 nt, Homo Sapiens
cugcugcccuccccggugucugcccugaagcc

SEQ ID NO: 3815 - RNA, 32 nt, Homo Sapiens
uuuacagaacuccccuugaaaacugcugcuga

SEQ ID NO: 3816 - RNA, 32 nt, Homo Sapiens
cgcuccugcccccggggugacgcgcagccccc

SEQ ID NO: 3817 - RNA, 32 nt, Homo Sapiens
aaggcacaaaaauagguuuuggaucaaagaag

SEQ ID NO: 3818 - RNA, 32 nt, Homo Sapiens
cugggaaagaagagaguuauuuuuguaaccgg

SEQ ID NO: 3819 - RNA, 32 nt, Homo Sapiens
uuuaugacuguaaacauagauagugcuuuauu

SEQ ID NO: 3820 - RNA, 32 nt, Homo Sapiens
gaugacagcccugauagggugauucagcuggc

SEQ ID NO: 3821 - RNA, 32 nt, Homo Sapiens
agauuuauuuaaaauacugaaucuuucuucua

SEQ ID NO: 3822 - RNA, 32 nt, Homo Sapiens
cagccaaauggacagcucuauaagacucaagc

SEQ ID NO: 3823 - RNA, 32 nt, Homo Sapiens
aucuuuuauuuuuccuucauguuugauuuuug

SEQ ID NO: 3824 - RNA, 32 nt, Homo Sapiens
guuaacagucagugggaauuugaaagaagaaa

SEQ ID NO: 3825 - RNA, 32 nt, Homo Sapiens
cugcugcccccucgcuaggacccggcggacgc

SEQ ID NO: 3826 - RNA, 32 nt, Homo Sapiens
caucacagcugugccagacagugaaugggaag

SEQ ID NO: 3827 - RNA, 32 nt, Homo Sapiens
gcacucuacucuaugcucugugaauugugaaa

SEQ ID NO: 3828 - RNA, 32 nt, Homo Sapiens
gagaauuucuugugaauuacacagcaauaggg

SEQ ID NO: 3829 - RNA, 32 nt, Homo Sapiens
cugccuuucuucacuuugcauuucuucuugaa

SEQ ID NO: 3830 - RNA, 32 nt, Homo Sapiens
ggggaagcaaggaaauaagucaucuguaugcu

SEQ ID NO: 3831 - RNA, 32 nt, Homo Sapiens
guggccccgccagcuggccuccccuuuggccc

SEQ ID NO: 3832 - RNA, 32 nt, Homo Sapiens
ugauguauacccauaaagaaugcucauauuaa

SEQ ID NO: 3833 - RNA, 31 nt, Homo Sapiens
uauguguagcuuguugcaggagucacaggaa

SEQ ID NO: 3834 - RNA, 32 nt, Homo Sapiens
ucacugccggaugugaaauccaggcgucagcu

SEQ ID NO: 3835 - RNA, 32 nt, Homo Sapiens
ggcaaccguugucaaggcuaugcucacgggag

SEQ ID NO: 3836 - RNA, 32 nt, Homo Sapiens
acgaacccggccagcccugacgccccacuguc

SEQ ID NO: 3837 - RNA, 32 nt, Homo Sapiens
caugaccuugaucggcaguuuacuucgcaucu

SEQ ID NO: 3838 - RNA, 31 nt, Homo Sapiens
ggaggagagccccagagagaggagcugggag

SEQ ID NO: 3839 - RNA, 32 nt, Homo Sapiens
ggauuuuucuauuucugcaaaauagaauuuuu

SEQ ID NO: 3840 - RNA, 32 nt, Homo Sapiens
aguagaauacauuauuagaaacuguuaagguc

SEQ ID NO: 3841 - RNA, 32 nt, Homo Sapiens
aaaauguuuuauauagaacauaaaaagcacac

SEQ ID NO: 3842 - RNA, 32 nt, Homo Sapiens
guggcagugagaccagcccacccaccaccacc

SEQ ID NO: 3843 - RNA, 32 nt, Homo Sapiens
acuuuaaucuggaggaaaaauauccuacaaac

SEQ ID NO: 3844 - RNA, 32 nt, Homo Sapiens
cugguugcacgcuggggaucccggaccucgau

SEQ ID NO: 3845 - RNA, 32 nt, Homo Sapiens
cugcccagaugccuuccuuguacuggaaacug

SEQ ID NO: 3846 - RNA, 32 nt, Homo Sapiens
gucucuggaagggcugguucaaggcuguuugg

SEQ ID NO: 3847 - RNA, 32 nt, Homo Sapiens
agggaaauguuaaaaacugcaagagaaagcaa

SEQ ID NO: 3848 - RNA, 32 nt, Homo Sapiens
uuuccgagcgaagcugcccccaggaugaccac

SEQ ID NO: 3849 - RNA, 32 nt, Homo Sapiens
gacccgccgcccgugccgccgccauggugaug

SEQ ID NO: 3850 - RNA, 32 nt, Homo Sapiens
uuuaagcacugccuauggauaaagacucacac

SEQ ID NO: 3851 - RNA, 32 nt, Homo Sapiens
auuccaccuccagcagcagugugccguaauaa

SEQ ID NO: 3852 - RNA, 32 nt, Homo Sapiens
gcagggccgcgggcugccccagcccugggggu

SEQ ID NO: 3853 - RNA, 32 nt, Homo Sapiens
ggauaauuuuugguuuugaauuuugauuuuuc

SEQ ID NO: 3854 - RNA, 32 nt, Homo Sapiens
gggcacaacagguggagaaggaaagggagcua

SEQ ID NO: 3855 - RNA, 32 nt, Homo Sapiens
gagucucccagcugccagccgaccccgaaccc

SEQ ID NO: 3856 - RNA, 32 nt, Homo Sapiens
uaugucuggaguauuucaaacuuuacauugaa

SEQ ID NO: 3857 - RNA, 32 nt, Homo Sapiens
ucucuagaccucugcccaaaccagagcaaucc

SEQ ID NO: 3858 - RNA, 30 nt, Homo Sapiens
gugcuaugacaggggagggaaacgcgggug

SEQ ID NO: 3859 - RNA, 32 nt, Homo Sapiens
cugcuggccacgaggaagccacuuccucagag

SEQ ID NO: 3860 - RNA, 32 nt, Homo Sapiens
aaacucauaaaacagguaaacaguggggugau

SEQ ID NO: 3861 - RNA, 32 nt, Homo Sapiens
agggagaugcuggagauggcggaggcuccuca

SEQ ID NO: 3862 - RNA, 32 nt, Homo Sapiens
gagagcugcuccagagugggauuagaacccgu

SEQ ID NO: 3863 - RNA, 32 nt, Homo Sapiens
uagagucauauuaucauacuuaucauaauguu

SEQ ID NO: 3864 - RNA, 32 nt, Homo Sapiens
acaugggagagccgcaugaggccgcccaccac

SEQ ID NO: 3865 - RNA, 32 nt, Homo Sapiens
cauaccggccugguacucggagggagucccug

SEQ ID NO: 3866 - RNA, 32 nt, Homo Sapiens
caaauggaugagcauggaugaauuucaaaaug

SEQ ID NO: 3867 - RNA, 32 nt, Homo Sapiens
cucucguggucacccugagggcacucugcauc

SEQ ID NO: 3868 - RNA, 31 nt, Homo Sapiens
cagugugcacccagcgcuccauagacgccuu

SEQ ID NO: 3869 - RNA, 32 nt, Homo Sapiens
gcggagccgggcggagcuggcuugcggcuccc

SEQ ID NO: 3870 - RNA, 32 nt, Homo Sapiens
gcgcccagagcggcgccgucgcgagccacagc

SEQ ID NO: 3871 - RNA, 32 nt, Homo Sapiens
acaucuuugagcaccugguacagauguuuaug

SEQ ID NO: 3872 - RNA, 32 nt, Homo Sapiens
ugcuccccgaacucgccgucuuccugucggcg

SEQ ID NO: 3873 - RNA, 32 nt, Homo Sapiens
gccuaguuuccacagcacgauaacaccaugac

SEQ ID NO: 3874 - RNA, 32 nt, Homo Sapiens
auggaaaguuaccaaauguagcacuagaggca

SEQ ID NO: 3875 - RNA, 32 nt, Homo Sapiens
cucccacuucgucuucauggauucccagccca

SEQ ID NO: 3876 - RNA, 32 nt, Homo Sapiens
uugguauuaaggcagaucuuugauggagggac

SEQ ID NO: 3877 - RNA, 32 nt, Homo Sapiens
cugagaaaaaaauaaauucucuauggugguuu

SEQ ID NO: 3878 - RNA, 32 nt, Homo Sapiens
agagacgcaugugacucaccccugcccuuggu

SEQ ID NO: 3879 - RNA, 32 nt, Homo Sapiens
ugccuucgcagacuuuugccagcaaauguuau

SEQ ID NO: 3880 - RNA, 32 nt, Homo Sapiens
caaaagccgcuuucuccgcgccgcccgcccag

SEQ ID NO: 3881 - RNA, 32 nt, Homo Sapiens
ccaccacaaacacagcccuggaaacauacagu

SEQ ID NO: 3882 - RNA, 32 nt, Homo Sapiens
ccaguuccucccucaguaucacauuauuuuuu

SEQ ID NO: 3883 - RNA, 32 nt, Homo Sapiens
gcuagagaagauggcccaggcuggggaagucg

SEQ ID NO: 3884 - RNA, 32 nt, Homo Sapiens
agaggcaccgugggguuuuggccagcacagag

SEQ ID NO: 3885 - RNA, 32 nt, Homo Sapiens
ccugggacuguuugacaugacuccaggaccac

SEQ ID NO: 3886 - RNA, 32 nt, Homo Sapiens
cuggugcguggccggcagcucgcgaacagcag

SEQ ID NO: 3887 - RNA, 32 nt, Homo Sapiens
caccuuugccaacaccucccaaggauggagga

SEQ ID NO: 3888 - RNA, 32 nt, Homo Sapiens
aguuugugguauaaaaaggaaguggggacaga

SEQ ID NO: 3889 - RNA, 32 nt, Homo Sapiens
aagagaacacugggguauagggccggggccac

SEQ ID NO: 3890 - RNA, 32 nt, Homo Sapiens
gucuacauuaaucuuccaguacuccuugcuga

SEQ ID NO: 3891 - RNA, 32 nt, Homo Sapiens
uaauuuauuauuaauuauagcccauaguucac

SEQ ID NO: 3892 - RNA, 32 nt, Homo Sapiens
gucagguuaucccagcugggccccacuucugg

SEQ ID NO: 3893 - RNA, 32 nt, Homo Sapiens
uugucaaagcaucaacaaugaaaauucgauua

SEQ ID NO: 3894 - RNA, 32 nt, Homo Sapiens
uccuugaggagaagugaaguuucacuguggua

SEQ ID NO: 3895 - RNA, 32 nt, Homo Sapiens
gugccuaguugacuuacugacaaaaggcucua

SEQ ID NO: 3896 - RNA, 32 nt, Homo Sapiens
agacgcggggacgggccgugggcccccggaac

SEQ ID NO: 3897 - RNA, 29 nt, Homo Sapiens
uauucaguguaguguucuauaaaaucauu

SEQ ID NO: 3898 - RNA, 32 nt, Homo Sapiens
acucccacgcugcccuccugccugcagccaug

SEQ ID NO: 3899 - RNA, 32 nt, Homo Sapiens
aagcaggcagaaaaaugugaaaaggagagauu

SEQ ID NO: 3900 - RNA, 32 nt, Homo Sapiens
ugauuuucuccacaacacugugucacaucacg

SEQ ID NO: 3901 - RNA, 32 nt, Homo Sapiens
ccaggacucugcgaccccgggauggauauugc

SEQ ID NO: 3902 - RNA, 32 nt, Homo Sapiens
cgggagccucagagaccgccuguguccuuuaa

SEQ ID NO: 3903 - RNA, 32 nt, Homo Sapiens
cucgcucgcucgccggcgcgcgcacacccccc

SEQ ID NO: 3904 - RNA, 32 nt, Homo Sapiens
gaucaguauuuuuuccugugauggguuuuuug

SEQ ID NO: 3905 - RNA, 32 nt, Homo Sapiens
ccuggggguaagggcugacuguggccgugaug

SEQ ID NO: 3906 - RNA, 32 nt, Homo Sapiens
cacacauguacacacggauacacacacacaca

SEQ ID NO: 3907 - RNA, 32 nt, Homo Sapiens
ggcuuuuauuuuuucuuuuguaauuguguaaa

SEQ ID NO: 3908 - RNA, 32 nt, Homo Sapiens
gauggaacagagagacccucgcagcugacuag

SEQ ID NO: 3909 - RNA, 32 nt, Homo Sapiens
agauuaaugaacugcuggucagguacugucua

SEQ ID NO: 3910 - RNA, 32 nt, Homo Sapiens
auugaaauaugaaauaguacaauauaaagaua

SEQ ID NO: 3911 - RNA, 32 nt, Homo Sapiens
cagcggggcuccugccucccggccuggucccc

SEQ ID NO: 3912 - RNA, 32 nt, Homo Sapiens
caguuuuuacaaaauacacuuacacaccgucu

SEQ ID NO: 3913 - RNA, 32 nt, Homo Sapiens
uuuaacuucucuuuuuacucaucagcugcaag

SEQ ID NO: 3914 - RNA, 32 nt, Homo Sapiens
aauguuaguguguugauuucauaacacucaau

SEQ ID NO: 3915 - RNA, 32 nt, Homo Sapiens
agcuaucaagggcugcauuguauuuuauauac

SEQ ID NO: 3916 - RNA, 32 nt, Homo Sapiens
auggagauuugguguuggggucaugagggggu

SEQ ID NO: 3917 - RNA, 32 nt, Homo Sapiens
caaaggguagagaaggcaggacgguagaaauu

SEQ ID NO: 3918 - RNA, 32 nt, Homo Sapiens
auugauuucuucaucuuauucugccuauuggg

SEQ ID NO: 3919 - RNA, 32 nt, Homo Sapiens
cggccauucagggccuggcgccccacacuacc

SEQ ID NO: 3920 - RNA, 32 nt, Homo Sapiens
caggucuuuguggagaucuaaaggcagugauu

SEQ ID NO: 3921 - RNA, 32 nt, Homo Sapiens
gcacacccgcggugguucccaggcccgccccc

SEQ ID NO: 3922 - RNA, 30 nt, Homo Sapiens
ggaaucgcggcuggcggcggggggacggac

SEQ ID NO: 3923 - RNA, 32 nt, Homo Sapiens
cgggggaugaggaauccccagcccuugaggca

SEQ ID NO: 3924 - RNA, 32 nt, Homo Sapiens
aauuuuauuuaguggcagacucuagcucuguu

SEQ ID NO: 3925 - RNA, 32 nt, Homo Sapiens
uaaaaguggugaugauauuucuuucaaucugu

SEQ ID NO: 3926 - RNA, 32 nt, Homo Sapiens
agguuuucucccugagaggcaugacccaggcc

SEQ ID NO: 3927 - RNA, 32 nt, Homo Sapiens
cccuuauauuguguauccuguuucagauuguu

SEQ ID NO: 3928 - RNA, 32 nt, Homo Sapiens
gcaauuccuuuuauuucuuucaccuuucauaa

SEQ ID NO: 3929 - RNA, 30 nt, Homo Sapiens
uggugauuguugcugccgccgccacccccc

SEQ ID NO: 3930 - RNA, 32 nt, Homo Sapiens
uaaggcaagggauaucuuaaacaucauauuac

SEQ ID NO: 3931 - RNA, 32 nt, Homo Sapiens
acgcgaggucgcggcgcguccgugacgucacu

SEQ ID NO: 3932 - RNA, 32 nt, Homo Sapiens
gcugacgcagaauggaguugaggugggggcag

SEQ ID NO: 3933 - RNA, 32 nt, Homo Sapiens
cgugucacgugaccgcgccggguagagggaga

SEQ ID NO: 3934 - RNA, 32 nt, Homo Sapiens
ugcuggccccguggccacacuccagcacucag

SEQ ID NO: 3935 - RNA, 32 nt, Homo Sapiens
auucuuaucucuauuucacagaugaagaaaca

SEQ ID NO: 3936 - RNA, 32 nt, Homo Sapiens
ucgcagagcagaggagacccaggcagugucag

SEQ ID NO: 3937 - RNA, 32 nt, Homo Sapiens
accgggcaagcacuggccuccccuggcuccug

SEQ ID NO: 3938 - RNA, 32 nt, Homo Sapiens
acaccaccacugugucccagugucuggcccag

SEQ ID NO: 3939 - RNA, 32 nt, Homo Sapiens
uucuguaaaagcuaguuccuuaccugcuugga

SEQ ID NO: 3940 - RNA, 25 nt, Homo Sapiens
ccuggcugguaugaccacaguucau

SEQ ID NO: 3941 - RNA, 30 nt, Homo Sapiens
gguucucccucgcagcaccucgaagugcgc

SEQ ID NO: 3942 - RNA, 32 nt, Homo Sapiens
gggucagauuuuauccccacuccagcucugca

SEQ ID NO: 3943 - RNA, 32 nt, Homo Sapiens
uaaagggcugaauuuaggagacuuuuuaccca

SEQ ID NO: 3944 - RNA, 32 nt, Homo Sapiens
uagaaaugcugccuuccaacuaccacucuccc

SEQ ID NO: 3945 - RNA, 32 nt, Homo Sapiens
uugucaugaucucaauucucuucuuuccacca

SEQ ID NO: 3946 - RNA, 32 nt, Homo Sapiens
cagacuagccuaggucucucuauuucuugaag

SEQ ID NO: 3947 - RNA, 32 nt, Homo Sapiens
ugugcuuauuuuuauuucuuuaagaaucuauu

SEQ ID NO: 3948 - RNA, 32 nt, Homo Sapiens
augugaguucccucuucccuugcccacuauau

SEQ ID NO: 3949 - RNA, 32 nt, Homo Sapiens
ccagggcagggcccagcaggacccuaaggacu

SEQ ID NO: 3950 - RNA, 32 nt, Homo Sapiens
aauccagugagcuccagauucuuccaaggcaa

SEQ ID NO: 3951 - RNA, 32 nt, Homo Sapiens
ugugugauugguaguaaaaugaaacagacauc

SEQ ID NO: 3952 - RNA, 32 nt, Homo Sapiens
auauccccagugccauuguucuuccaaaugcu

SEQ ID NO: 3953 - RNA, 32 nt, Homo Sapiens
cugucaguuccaugagcuauuccucuuugguu

SEQ ID NO: 3954 - RNA, 32 nt, Homo Sapiens
aggguaaauaugucugagaagaaacggugcaa

SEQ ID NO: 3955 - RNA, 32 nt, Homo Sapiens
gggccagggcagggaccggggaggccgggccu

SEQ ID NO: 3956 - RNA, 32 nt, Homo Sapiens
cccggcucuggagcaccgcggacggccagugc

SEQ ID NO: 3957 - RNA, 32 nt, Homo Sapiens
uucuguauuuggcuauggaucugauuuuuaau

SEQ ID NO: 3958 - RNA, 32 nt, Homo Sapiens
uucagauaaacuaaaccaauugucaaccagaa

SEQ ID NO: 3959 - RNA, 32 nt, Homo Sapiens
ggcaggccaagcccgcagcagaguccugggca

SEQ ID NO: 3960 - RNA, 32 nt, Homo Sapiens
uuggacucaccaucggcugagcccuccuggcc

SEQ ID NO: 3961 - RNA, 32 nt, Homo Sapiens
gcugccuuugagcccacguauauuuagacucc

SEQ ID NO: 3962 - RNA, 31 nt, Homo Sapiens
ccccaagcacgcagccacccauuuccggagc

SEQ ID NO: 3963 - RNA, 32 nt, Homo Sapiens
agcagguccaaacccaggaucucaggguccuu

SEQ ID NO: 3964 - RNA, 32 nt, Homo Sapiens
auuguuugugggcaaagggcugcuuuagcacu

SEQ ID NO: 3965 - RNA, 32 nt, Homo Sapiens
aaagcuacaaaaaacugcaguuugaucaaauu

SEQ ID NO: 3966 - RNA, 32 nt, Homo Sapiens
guuaagcagacuugggagagccaggcaagucu

SEQ ID NO: 3967 - RNA, 32 nt, Homo Sapiens
gcaggacugugcaacaguagcccagagcaucc

SEQ ID NO: 3968 - RNA, 31 nt, Homo Sapiens
gcggagcgcagcucccugccccgccccuccc

SEQ ID NO: 3969 - RNA, 32 nt, Homo Sapiens
acaaaccuccacagcccaugcgagccacacug

SEQ ID NO: 3970 - RNA, 32 nt, Homo Sapiens
gauccugggccagcugccggcacacagcuagg

SEQ ID NO: 3971 - RNA, 32 nt, Homo Sapiens
aucccugcccccguuuucccaccggggagucu

SEQ ID NO: 3972 - RNA, 32 nt, Homo Sapiens
ucugaguacagcugauguucuuuggguauuac

SEQ ID NO: 3973 - RNA, 32 nt, Homo Sapiens
ggaaagacaacgaccuuaaaaauacuaucaaa

SEQ ID NO: 3974 - RNA, 32 nt, Homo Sapiens
cuuuguuuaacaaaagauuaaucuuuaaacca

SEQ ID NO: 3975 - RNA, 32 nt, Homo Sapiens
auugauugguuuuauaguucauugaaaauccu

SEQ ID NO: 3976 - RNA, 32 nt, Homo Sapiens
auucucacccccaccacccccacggccccgcc

SEQ ID NO: 3977 - RNA, 32 nt, Homo Sapiens
auguaauuuaggaugauuugaucuuccaucuc

SEQ ID NO: 3978 - RNA, 32 nt, Homo Sapiens
cagugcacuccagccugggugacagagcaaga

SEQ ID NO: 3979 - RNA, 30 nt, Homo Sapiens
gaccaagcgcccgugucccgcuccggcagg

SEQ ID NO: 3980 - RNA, 32 nt, Homo Sapiens
auacaaaaugaaauaaaaaggaugcaaaucaa

SEQ ID NO: 3981 - RNA, 32 nt, Homo Sapiens
gguggguucugaaugcagccaaggcugucccc

SEQ ID NO: 3982 - RNA, 32 nt, Homo Sapiens
caggugucugcuggcuuccugcucucccugcu

SEQ ID NO: 3983 - RNA, 32 nt, Homo Sapiens
ggcagggcgggggaggcagggacauggcugua

SEQ ID NO: 3984 - RNA, 32 nt, Homo Sapiens
cgccucccauccucgcgccggguccugcucgg

SEQ ID NO: 3985 - RNA, 32 nt, Homo Sapiens
gaauauagagauucauaaaauaauccccaucu

SEQ ID NO: 3986 - RNA, 32 nt, Homo Sapiens
ucucaacaagcuuuuacccagcaccuguccag

SEQ ID NO: 3987 - RNA, 32 nt, Homo Sapiens
aaucuugcaaugccaaugucauuuaaagaaaa

SEQ ID NO: 3988 - RNA, 32 nt, Homo Sapiens
caucuggguggagauuaagagcuccaaccgug

SEQ ID NO: 3989 - RNA, 32 nt, Homo Sapiens
auuggacacuuuuuggggguacacaggucuuc

SEQ ID NO: 3990 - RNA, 32 nt, Homo Sapiens
cagcugugcucacacaaaauacuggguggcuu

SEQ ID NO: 3991 - RNA, 32 nt, Homo Sapiens
cgaggggcaggggcuggagcugcgaguccacc

SEQ ID NO: 3992 - RNA, 32 nt, Homo Sapiens
acuucucagucccagggccaucucuuggagug

SEQ ID NO: 3993 - RNA, 32 nt, Homo Sapiens
ucggagugggccgcccuccccccgaaaccugg

SEQ ID NO: 3994 - RNA, 32 nt, Homo Sapiens
aggaguuuuuucuaagugacgugacuagaagu

SEQ ID NO: 3995 - RNA, 32 nt, Homo Sapiens
acguucccuuuccuccucucccuccuguggau

SEQ ID NO: 3996 - RNA, 32 nt, Homo Sapiens
uggccuggaaaacaguaggaguucaucaagag

SEQ ID NO: 3997 - RNA, 32 nt, Homo Sapiens
accgcuggcaaggacuggguugguuuuuggag

SEQ ID NO: 3998 - RNA, 32 nt, Homo Sapiens
ucaccugacccacagcauauaugcuuaugacu

SEQ ID NO: 3999 - RNA, 32 nt, Homo Sapiens
uauuuuuaaugauacauuagguacgaugugua

SEQ ID NO: 4000 - RNA, 31 nt, Homo Sapiens
ggcuaugggcauugccugccugaugccagca

SEQ ID NO: 4001 - RNA, 32 nt, Homo Sapiens
guggaggucgagguggggagggggaggcgggc

SEQ ID NO: 4002 - RNA, 32 nt, Homo Sapiens
aucaccccaaccccccaaaauuaguuuguguu

SEQ ID NO: 4003 - RNA, 32 nt, Homo Sapiens
ggaggggggaggggcugcugcggcagcugcag

SEQ ID NO: 4004 - RNA, 32 nt, Homo Sapiens
cuaaggaacacuguaauugucuacacaauuuu

SEQ ID NO: 4005 - RNA, 32 nt, Homo Sapiens
cagauuucugugggacuguggaucucacugga

SEQ ID NO: 4006 - RNA, 32 nt, Homo Sapiens
gacacuuuaagugcuucuucguacccagcucc

SEQ ID NO: 4007 - RNA, 32 nt, Homo Sapiens
cauagaagaauauuuuugugaccuuggguuaa

SEQ ID NO: 4008 - RNA, 32 nt, Homo Sapiens
cuauaaagauuccacaguuugacauuauggcu

SEQ ID NO: 4009 - RNA, 32 nt, Homo Sapiens
cugucuuugucuuugccugccauccacguaag

SEQ ID NO: 4010 - RNA, 32 nt, Homo Sapiens
gugaaugcaggagcagcaguggcugcccuucc

SEQ ID NO: 4011 - RNA, 32 nt, Homo Sapiens
uuuucuggcucauguggugcugccugguguca

SEQ ID NO: 4012 - RNA, 32 nt, Homo Sapiens
guggugugcuaaaauacuguaauuaucuguga

SEQ ID NO: 4013 - RNA, 32 nt, Homo Sapiens
cuguuagacagcuacagggaaugauuggucau

SEQ ID NO: 4014 - RNA, 31 nt, Homo Sapiens
ucucagaaauaaaucacacuuuuguuaugau

SEQ ID NO: 4015 - RNA, 32 nt, Homo Sapiens
uucugccagcuggccuggggauucugaguggu

SEQ ID NO: 4016 - RNA, 32 nt, Homo Sapiens
ggaggucagguggucaauguccuggugauuuu

SEQ ID NO: 4017 - RNA, 32 nt, Homo Sapiens
aaauagacccacaagaggcaguuccauuucau

SEQ ID NO: 4018 - RNA, 32 nt, Homo Sapiens
aaaccugcgcagcagagcagggaggcuugaaa

SEQ ID NO: 4019 - RNA, 32 nt, Homo Sapiens
cuauuuuugugugaaaucaaaauaucauuggg

SEQ ID NO: 4020 - RNA, 32 nt, Homo Sapiens
uguuugcuccugguuggaaagaaaccaaagau

SEQ ID NO: 4021 - RNA, 32 nt, Homo Sapiens
cccacuugaauggauccauuaguucucauacc

SEQ ID NO: 4022 - RNA, 32 nt, Homo Sapiens
agaacauagauauauuucugaggaaaauggac

SEQ ID NO: 4023 - RNA, 32 nt, Homo Sapiens
agccauaguaaggcccuugccugaggcagagc

SEQ ID NO: 4024 - RNA, 32 nt, Homo Sapiens
gggauauucgcaaauaucuguauuauacacua

SEQ ID NO: 4025 - RNA, 32 nt, Homo Sapiens
agagugggacgugggguaaucuuuaccacuuu

SEQ ID NO: 4026 - RNA, 32 nt, Homo Sapiens
ggugguuguuuagagacuggugaauguuaguu

SEQ ID NO: 4027 - RNA, 32 nt, Homo Sapiens
cuucuaagacaauugcauuagccuccugcuag

SEQ ID NO: 4028 - RNA, 32 nt, Homo Sapiens
ccuuagcagcucugccacggacuccgggaggc

SEQ ID NO: 4029 - RNA, 32 nt, Homo Sapiens
uuguaaucccaauacccauaauccccacgugu

SEQ ID NO: 4030 - RNA, 32 nt, Homo Sapiens
cuggcaggguggcaguucgaucugucguuacg

SEQ ID NO: 4031 - RNA, 27 nt, Homo Sapiens
aaccuccacuucuucagcaccacacac

SEQ ID NO: 4032 - RNA, 32 nt, Homo Sapiens
guaacugggauuacaggcacccgccaccaugc

SEQ ID NO: 4033 - RNA, 32 nt, Homo Sapiens
gacccagacuccgccaggauccccuagauccu

SEQ ID NO: 4034 - RNA, 32 nt, Homo Sapiens
agaauccgccccagcccuccgggccugggacc

SEQ ID NO: 4035 - RNA, 32 nt, Homo Sapiens
ugcucucccuccccuuuccugcaauuuaauuc

SEQ ID NO: 4036 - RNA, 32 nt, Homo Sapiens
acauggacugguucuguuuuauuaaaacuaau

SEQ ID NO: 4037 - RNA, 32 nt, Homo Sapiens
gccagcccgguggcugcccucaggucccguca

SEQ ID NO: 4038 - RNA, 32 nt, Homo Sapiens
agacacugcuuugacuuucuguaaucuugguu

SEQ ID NO: 4039 - RNA, 32 nt, Homo Sapiens
augggagggucggagggugcugcccgcccuug

SEQ ID NO: 4040 - RNA, 32 nt, Homo Sapiens
aggaccugacuucaaaccugagucuggaaguc

SEQ ID NO: 4041 - RNA, 32 nt, Homo Sapiens
aggggucgagugcgucagcccgaggggacugg

SEQ ID NO: 4042 - RNA, 32 nt, Homo Sapiens
ccaacuucauuuccauacuucagggaacagca

SEQ ID NO: 4043 - RNA, 30 nt, Homo Sapiens
cccaggcuggacugcagcagcgcagucuca

SEQ ID NO: 4044 - RNA, 29 nt, Homo Sapiens
uuuuccuuuguauaauaccacggauuuua

SEQ ID NO: 4045 - RNA, 32 nt, Homo Sapiens
cagauggagcagcugcugcucggggagcaaag

SEQ ID NO: 4046 - RNA, 32 nt, Homo Sapiens
gugcugcccgucuucagccuagccgaccucag

SEQ ID NO: 4047 - RNA, 32 nt, Homo Sapiens
uguggucugacugaagugacaaugaaauuaau

SEQ ID NO: 4048 - RNA, 32 nt, Homo Sapiens
gaaucuggcuaguucugugucuggcugaggau

SEQ ID NO: 4049 - RNA, 32 nt, Homo Sapiens
caaguccacucugggggagcucuggcggggac

SEQ ID NO: 4050 - RNA, 32 nt, Homo Sapiens
augcuucaaagagcuuaguuugcgguuuccug

SEQ ID NO: 4051 - RNA, 32 nt, Homo Sapiens
ugaaaccuaucagaauaauguuaaacagguca

SEQ ID NO: 4052 - RNA, 32 nt, Homo Sapiens
ucuuccaaaaggaaaaggugaccagucgagaa

SEQ ID NO: 4053 - RNA, 32 nt, Homo Sapiens
caggaugccugccuucuaauauauuuggguga

SEQ ID NO: 4054 - RNA, 29 nt, Homo Sapiens
cauggcugucaccuccugccgaguccaau

SEQ ID NO: 4055 - RNA, 32 nt, Homo Sapiens
ggacgcuuggcgggcuucgcucucgccuuacg

SEQ ID NO: 4056 - RNA, 32 nt, Homo Sapiens
cacaguaaaaggcugggaguaaaauuucccau

SEQ ID NO: 4057 - RNA, 32 nt, Homo Sapiens
cuggcccacagccccagagagccugucugugc

SEQ ID NO: 4058 - RNA, 32 nt, Homo Sapiens
uaaaguuaucaggccucccaugaaauugcguu

SEQ ID NO: 4059 - RNA, 32 nt, Homo Sapiens
cugagggccucaccccacuuccuuuccagagc

SEQ ID NO: 4060 - RNA, 32 nt, Homo Sapiens
ucuaaugcuuugcauuaucaguuacaaccuag

SEQ ID NO: 4061 - RNA, 32 nt, Homo Sapiens
ugugugagugugcccaugagugucugcaugug

SEQ ID NO: 4062 - RNA, 32 nt, Homo Sapiens
gguggggcucacggccuagggaggcgcggagg

SEQ ID NO: 4063 - RNA, 32 nt, Homo Sapiens
ccccuuauauuccccgagaguauaaagagauc

SEQ ID NO: 4064 - RNA, 32 nt, Homo Sapiens
gcugcucagcaggaaagguucuccucccugau

SEQ ID NO: 4065 - RNA, 32 nt, Homo Sapiens
cuauguucuuuuuuaagcaccaaaaagaagau

SEQ ID NO: 4066 - RNA, 32 nt, Homo Sapiens
caggagcaguggugcugucagcgcggccgucg

SEQ ID NO: 4067 - RNA, 32 nt, Homo Sapiens
gggccgugcugggaacccugcugcaggaguac

SEQ ID NO: 4068 - RNA, 32 nt, Homo Sapiens
cgaggggcuccuggggacccaggacaccuggc

SEQ ID NO: 4069 - RNA, 32 nt, Homo Sapiens
gcgggaggugccggggguggggugcccuagcg

SEQ ID NO: 4070 - RNA, 32 nt, Homo Sapiens
acugagauaaagacaucgugcagagauaaaug

SEQ ID NO: 4071 - RNA, 32 nt, Homo Sapiens
uguucuuuguggugagggcuuuccugugcauu

SEQ ID NO: 4072 - RNA, 32 nt, Homo Sapiens
ucaagggcuuuuguuagaauuuucaaugagau

SEQ ID NO: 4073 - RNA, 32 nt, Homo Sapiens
ccuguucugcugucgccgcccggacaggggcu

SEQ ID NO: 4074 - RNA, 31 nt, Homo Sapiens
gccacaauggugcgcaugaauguccuggcag

SEQ ID NO: 4075 - RNA, 32 nt, Homo Sapiens
cuguuggggugugagugagcucuccagaaugg

SEQ ID NO: 4076 - RNA, 32 nt, Homo Sapiens
guaguagucaauccugguguuucucuguaucu

SEQ ID NO: 4077 - RNA, 32 nt, Homo Sapiens
gggagauaggccaagcgagaggucaugggcca

SEQ ID NO: 4078 - RNA, 32 nt, Homo Sapiens
aauugccccugggccugcccccggccccauuu

SEQ ID NO: 4079 - RNA, 32 nt, Homo Sapiens
uuaguguuuauuucaggcaucauuacaaaaug

SEQ ID NO: 4080 - RNA, 32 nt, Homo Sapiens
ccccgggggacacguagaggagagaaaagcga

SEQ ID NO: 4081 - RNA, 32 nt, Homo Sapiens
ccgaacuccccccacaccuucccuucccugga

SEQ ID NO: 4082 - RNA, 32 nt, Homo Sapiens
ggguacugaaaacaccauccauuugggaaaga

SEQ ID NO: 4083 - RNA, 30 nt, Homo Sapiens
agguugaauugcccugccugggcucauagg

SEQ ID NO: 4084 - RNA, 32 nt, Homo Sapiens
uuauacauuuauuuuccgaauguaucauugaa

SEQ ID NO: 4085 - RNA, 32 nt, Homo Sapiens
agcucucgauacguuuggucuuucaugcugaa

SEQ ID NO: 4086 - RNA, 32 nt, Homo Sapiens
uugucuuuuugugaaguaugugccaggacaug

SEQ ID NO: 4087 - RNA, 32 nt, Homo Sapiens
cuauagaccauuugucagaaaucagaucagcc

SEQ ID NO: 4088 - RNA, 32 nt, Homo Sapiens
gaauaguacugucaagggaagccauacacuuu

SEQ ID NO: 4089 - RNA, 32 nt, Homo Sapiens
ugggaggagagcgugugcgcuccagcccagcc

SEQ ID NO: 4090 - RNA, 32 nt, Homo Sapiens
uggaacagugucagcaccuuguuggauugugc

SEQ ID NO: 4091 - RNA, 32 nt, Homo Sapiens
cagagcagggggcggcuugcucgcugggggcg

SEQ ID NO: 4092 - RNA, 32 nt, Homo Sapiens
aggccaggacuugucucugugcugaaagcaaa

SEQ ID NO: 4093 - RNA, 32 nt, Homo Sapiens
uggcucuuguucuuugguugggcuugugccua

SEQ ID NO: 4094 - RNA, 32 nt, Homo Sapiens
gaaaaagcagcuguccugugugugguaucagu

SEQ ID NO: 4095 - RNA, 32 nt, Homo Sapiens
gagucaagccuugugucuucaagcauugacca

SEQ ID NO: 4096 - RNA, 32 nt, Homo Sapiens
gagaaaauucagaauaccaucuguuucauagc

SEQ ID NO: 4097 - RNA, 32 nt, Homo Sapiens
aaacuguuucauuuuucuuauuuauuuuaugc

SEQ ID NO: 4098 - RNA, 32 nt, Homo Sapiens
agugacacauuuuauuauaccuaauauucacu

SEQ ID NO: 4099 - RNA, 32 nt, Homo Sapiens
aacuaugaugcacuuaaauugaagcuaugcca

SEQ ID NO: 4100 - RNA, 32 nt, Homo Sapiens
uuuuuuauggggaaccugucuugcugcguuca

SEQ ID NO: 4101 - RNA, 32 nt, Homo Sapiens
gagcuggcgcaaacagggcgagaggucgcugg

SEQ ID NO: 4102 - RNA, 32 nt, Homo Sapiens
uuuuuccuuucuggcgcaugaauccauacauc

SEQ ID NO: 4103 - RNA, 32 nt, Homo Sapiens
cggcgaggagagcggugccuugcagggaugcu

SEQ ID NO: 4104 - RNA, 32 nt, Homo Sapiens
caguguuuacuucaauuuuuuauuacucucuc

SEQ ID NO: 4105 - RNA, 32 nt, Homo Sapiens
uagccacggccccugcccuggcaggaagcuuc

SEQ ID NO: 4106 - RNA, 32 nt, Homo Sapiens
ucacagggauaugcuuuuuuuuuuaaagacug

SEQ ID NO: 4107 - RNA, 32 nt, Homo Sapiens
caggagaggagaaauaucucauacaagugaaa

SEQ ID NO: 4108 - RNA, 32 nt, Homo Sapiens
gaugggguuuugccguguuacccaggcuaguc

SEQ ID NO: 4109 - RNA, 32 nt, Homo Sapiens
gucaacucuuaauuaaugcuuauuguaccaaa

SEQ ID NO: 4110 - RNA, 32 nt, Homo Sapiens
cuuacaggauacagauaggcuuccucggguau

SEQ ID NO: 4111 - RNA, 32 nt, Homo Sapiens
ggcagccagugugugcagaaaucaaaugacag

SEQ ID NO: 4112 - RNA, 29 nt, Homo Sapiens
agcuaaauauuugcauucuuguaaucuuc

SEQ ID NO: 4113 - RNA, 29 nt, Homo Sapiens
acugcugugacuuuguaccgcaugaucaa

SEQ ID NO: 4114 - RNA, 32 nt, Homo Sapiens
gacucucucacagagguggcucacagagaagg

SEQ ID NO: 4115 - RNA, 32 nt, Homo Sapiens
ggagaguaacuuuggucagggauucucacuag

SEQ ID NO: 4116 - RNA, 32 nt, Homo Sapiens
uaccuguacuuuugcauccauuagccaaccuu

SEQ ID NO: 4117 - RNA, 32 nt, Homo Sapiens
ugugacucuccugaaauuguaaacuugugcuu

SEQ ID NO: 4118 - RNA, 32 nt, Homo Sapiens
uuuaccaucauuccauuuuguaccaguuaaag

SEQ ID NO: 4119 - RNA, 32 nt, Homo Sapiens
agcaaacaaagauagguuccucaggugaccaa

SEQ ID NO: 4120 - RNA, 32 nt, Homo Sapiens
guaucauccaaauaauggggccuaugacuuga

SEQ ID NO: 4121 - RNA, 32 nt, Homo Sapiens
ccgucugccuugcuccucucuucccaaaucau

SEQ ID NO: 4122 - RNA, 29 nt, Homo Sapiens
cugcuuuuucuuuuccugcugaguacugc

SEQ ID NO: 4123 - RNA, 32 nt, Homo Sapiens
aucagagggcaagaagucgagaaggacacguc

SEQ ID NO: 4124 - RNA, 32 nt, Homo Sapiens
agccgcagaagcugcggguguccugugaggcg

SEQ ID NO: 4125 - RNA, 32 nt, Homo Sapiens
cacuuuuguauuaaggauauuaugacagacua

SEQ ID NO: 4126 - RNA, 32 nt, Homo Sapiens
agcguccuguuuggagagagccagagagcacc

SEQ ID NO: 4127 - RNA, 32 nt, Homo Sapiens
cccagauauggcggccccggcgggaggggcgg

SEQ ID NO: 4128 - RNA, 32 nt, Homo Sapiens
cucucuuuuucagugaauaaauggaacaccau

SEQ ID NO: 4129 - RNA, 32 nt, Homo Sapiens
ccaggccugccagccccucggcucugccgcgg

SEQ ID NO: 4130 - RNA, 32 nt, Homo Sapiens
gaauagcuccauuuccccuccuccucucuacc

SEQ ID NO: 4131 - RNA, 32 nt, Homo Sapiens
ccacccgguccccaacuuuguuuacccgauaa

SEQ ID NO: 4132 - RNA, 32 nt, Homo Sapiens
cugggugugguggcgggcgugugucgucccag

SEQ ID NO: 4133 - RNA, 32 nt, Homo Sapiens
ugucuccaaauuguguaggacucuguaaucuu

SEQ ID NO: 4134 - RNA, 32 nt, Homo Sapiens
uuccagacuccuggcucuggcucccuggaugu

SEQ ID NO: 4135 - RNA, 32 nt, Homo Sapiens
cucggggagccuucucuguuucuggggccucc

SEQ ID NO: 4136 - RNA, 32 nt, Homo Sapiens
ggcccagugugguuaccacggggccucgccca

SEQ ID NO: 4137 - RNA, 32 nt, Homo Sapiens
aguuuguacagaagucagaacuuuggguuggg

SEQ ID NO: 4138 - RNA, 32 nt, Homo Sapiens
uuucuguaaaauuuaaauaaaaccaauacaaa

SEQ ID NO: 4139 - RNA, 32 nt, Homo Sapiens
gccauauacaaacaggcuguugggggagugag

SEQ ID NO: 4140 - RNA, 32 nt, Homo Sapiens
uagcaugauucgauaccaacaagcccucuccc

SEQ ID NO: 4141 - RNA, 32 nt, Homo Sapiens
cgccccccaguaccucccuccccuccccucca

SEQ ID NO: 4142 - RNA, 32 nt, Homo Sapiens
ugcaugguuuguggcggaagacggggcccagc

SEQ ID NO: 4143 - RNA, 32 nt, Homo Sapiens
uauuuuaguuuauuuuauuguuaucuuccagg

SEQ ID NO: 4144 - RNA, 32 nt, Homo Sapiens
cugggcaaauauaaaagacaacauauuauuua

SEQ ID NO: 4145 - RNA, 32 nt, Homo Sapiens
caguagaaguaaaguggaaauaaaaugucuuu

SEQ ID NO: 4146 - RNA, 32 nt, Homo Sapiens
gggcggaggcgucagagccgcgcaccgcggac

SEQ ID NO: 4147 - RNA, 27 nt, Homo Sapiens
uuauggaagagaaauguauuucugaaa

SEQ ID NO: 4148 - RNA, 30 nt, Homo Sapiens
ccuuuggauaucccugagcucugcuguggg

SEQ ID NO: 4149 - RNA, 32 nt, Homo Sapiens
cccaccucagccucccaaaauggugggauuac

SEQ ID NO: 4150 - RNA, 32 nt, Homo Sapiens
cccucccccucccccagcucagaccacagagg

SEQ ID NO: 4151 - RNA, 29 nt, Homo Sapiens
cauagaaaaaugaugucuuuaaguggaga

SEQ ID NO: 4152 - RNA, 32 nt, Homo Sapiens
cagagugaggcccgucccccgccccgccccgc

SEQ ID NO: 4153 - RNA, 32 nt, Homo Sapiens
ccucuccuccaaccucccacuccuucucaaug

SEQ ID NO: 4154 - RNA, 32 nt, Homo Sapiens
aaaauaugcacuaacuaacauccaggcggcca

SEQ ID NO: 4155 - RNA, 32 nt, Homo Sapiens
gaagaugcagucccccaccuguguccucccug

SEQ ID NO: 4156 - RNA, 32 nt, Homo Sapiens
ucaauuaaaaauuacuauaaauccaggaggca

SEQ ID NO: 4157 - RNA, 32 nt, Homo Sapiens
aucauggagaagaaguaaaagaauaaugugug

SEQ ID NO: 4158 - RNA, 32 nt, Homo Sapiens
gauaaaauauauuuacuauauauuaaguggaa

SEQ ID NO: 4159 - RNA, 30 nt, Homo Sapiens
uggcaaugaaccccaacaacacaguuuuug

SEQ ID NO: 4160 - RNA, 32 nt, Homo Sapiens
gcucugagaaguccugaagaaaaggaagcugg

SEQ ID NO: 4161 - RNA, 30 nt, Homo Sapiens
gaauuucuggacuuuagcccaccaguuugu

SEQ ID NO: 4162 - RNA, 32 nt, Homo Sapiens
cccagacgcuggcgcuccaccgugcucggcau

SEQ ID NO: 4163 - RNA, 32 nt, Homo Sapiens
cauuccaggggcugcagcccccugcuucuccc

SEQ ID NO: 4164 - RNA, 32 nt, Homo Sapiens
ugcccaauagaguuuaaauaacuguauaaaug

SEQ ID NO: 4165 - RNA, 31 nt, Homo Sapiens
ugggugcagcgcaccagcacggcacauguau

SEQ ID NO: 4166 - RNA, 32 nt, Homo Sapiens
accagagaggggcaggggcugguugaggguca

SEQ ID NO: 4167 - RNA, 32 nt, Homo Sapiens
uauaaugcaauaacagguagaguagaacugcu

SEQ ID NO: 4168 - RNA, 32 nt, Homo Sapiens
uaugaauggaauuauauaauauguagacuuuu

SEQ ID NO: 4169 - RNA, 31 nt, Homo Sapiens
ggcacucccaggccccugcccccaugcccuc

SEQ ID NO: 4170 - RNA, 32 nt, Homo Sapiens
uggggcugagguugggggaggggugggcggca

SEQ ID NO: 4171 - RNA, 32 nt, Homo Sapiens
aagaagacucuuuuuauuaauauuuuggcguu

SEQ ID NO: 4172 - RNA, 32 nt, Homo Sapiens
uacucuugauaaaagcuguugcaggccuuugc

SEQ ID NO: 4173 - RNA, 32 nt, Homo Sapiens
ggaugcuuuauguccccaccuccaccugagcc

SEQ ID NO: 4174 - RNA, 32 nt, Homo Sapiens
ggcgggcggacucggagcgggcggcggaguga

SEQ ID NO: 4175 - RNA, 32 nt, Homo Sapiens
guccuuguuaaaaauucagauuauuuaagggu

SEQ ID NO: 4176 - RNA, 32 nt, Homo Sapiens
ucauuuucugaccuaugcacaagaaaguauuu

SEQ ID NO: 4177 - RNA, 32 nt, Homo Sapiens
aggaaaaguggaagauauuaagcaaaauguuu

SEQ ID NO: 4178 - RNA, 32 nt, Homo Sapiens
uugaaaaguauuuugucuggaugucuuucaaa

SEQ ID NO: 4179 - RNA, 32 nt, Homo Sapiens
gaucggagccccccguccccgccccgggagcu

SEQ ID NO: 4180 - RNA, 32 nt, Homo Sapiens
uuauccuugggguuugagagcgcuguauuugg

SEQ ID NO: 4181 - RNA, 32 nt, Homo Sapiens
gaguccccaucccauuuucauccugagcccaa

SEQ ID NO: 4182 - RNA, 32 nt, Homo Sapiens
ggugugagccaccgugaccagccaaugugccu

SEQ ID NO: 4183 - RNA, 32 nt, Homo Sapiens
uguuuuucacuuccaaaaccagaaaaugagaa

SEQ ID NO: 4184 - RNA, 32 nt, Homo Sapiens
cuuuaguagauauaauuucauuaaaaacaaaa

SEQ ID NO: 4185 - RNA, 32 nt, Homo Sapiens
aggagcuggggguggggccuggcuguggggcc

SEQ ID NO: 4186 - RNA, 32 nt, Homo Sapiens
ugacauguuaguuuuucuuacuugcauuuauu

SEQ ID NO: 4187 - RNA, 32 nt, Homo Sapiens
aaauguuuguuguuuaucaaauuuuaugguag

SEQ ID NO: 4188 - RNA, 32 nt, Homo Sapiens
acaggagcgugguggaggagcugcaggugggg

SEQ ID NO: 4189 - RNA, 32 nt, Homo Sapiens
acacuuucacucagcacccuccccucagcagc

SEQ ID NO: 4190 - RNA, 32 nt, Homo Sapiens
aagcaguguggcaacuccucauagugcuaaaa

SEQ ID NO: 4191 - RNA, 32 nt, Homo Sapiens
gggacaugcgcggccuguggacagccagcccc

SEQ ID NO: 4192 - RNA, 32 nt, Homo Sapiens
gcgggggcgggugaggagggggugacgccgga

SEQ ID NO: 4193 - RNA, 32 nt, Homo Sapiens
ucuuauacucuuccuuuuuuuuagauauuaca

SEQ ID NO: 4194 - RNA, 32 nt, Homo Sapiens
uagauagauauauuuuuuuuuauuuuuaaaua

SEQ ID NO: 4195 - RNA, 32 nt, Homo Sapiens
ugaucuuuuuccauccagcaguggaguuuagu

SEQ ID NO: 4196 - RNA, 32 nt, Homo Sapiens
gguacagcaggcagggacuaugcugaagugga

SEQ ID NO: 4197 - RNA, 32 nt, Homo Sapiens
cuggccagcgccagcccucgggccggcccgga

SEQ ID NO: 4198 - RNA, 32 nt, Homo Sapiens
gcaucuuuuuuuuuuuuuuuuaaauggaaucu

SEQ ID NO: 4199 - RNA, 32 nt, Homo Sapiens
ugauugggagaauaauggaaucugaaaauaug

SEQ ID NO: 4200 - RNA, 32 nt, Homo Sapiens
ggagauuuacugcacugauggaccucaucaau

SEQ ID NO: 4201 - RNA, 32 nt, Homo Sapiens
aacaccaauuagucacaugauuuuaaaaagca

SEQ ID NO: 4202 - RNA, 32 nt, Homo Sapiens
gcugggcccucccccucccacuccccuaccau

SEQ ID NO: 4203 - RNA, 32 nt, Homo Sapiens
uugcuuugugucccacuguuauuaaagcaaaa

SEQ ID NO: 4204 - RNA, 32 nt, Homo Sapiens
ugaaaacuaugaaaaaauguauuuucuucuau

SEQ ID NO: 4205 - RNA, 32 nt, Homo Sapiens
cgcgaccccucccgggaccccggagacagccg

SEQ ID NO: 4206 - RNA, 32 nt, Homo Sapiens
uuauuccguguaccugauauauauacaauuaa

SEQ ID NO: 4207 - RNA, 32 nt, Homo Sapiens
cuacugccgccggcgccgcggccgucaugggg

SEQ ID NO: 4208 - RNA, 32 nt, Homo Sapiens
agaauaggaaacugaggcccugagaauugacu

SEQ ID NO: 4209 - RNA, 32 nt, Homo Sapiens
aguugaaaaagguggggaaaagaaguccuucu

SEQ ID NO: 4210 - RNA, 32 nt, Homo Sapiens
auauucuacuauuggaggaaaagagauagcac

SEQ ID NO: 4211 - RNA, 32 nt, Homo Sapiens
ccuggggaacuuuuaaacaauucgacauugau

SEQ ID NO: 4212 - RNA, 32 nt, Homo Sapiens
agugcaauacucagugcgguacucaguaacac

SEQ ID NO: 4213 - RNA, 31 nt, Homo Sapiens
gcaaauguguaaugguucagagccuggaaga

SEQ ID NO: 4214 - RNA, 32 nt, Homo Sapiens
aacugaggcaaggggagauuaacuuacugcca

SEQ ID NO: 4215 - RNA, 32 nt, Homo Sapiens
cacuagaugauuacgaagaucacaucccacuc

SEQ ID NO: 4216 - RNA, 32 nt, Homo Sapiens
caguuguccuuaaauuuguauaacgguuuaau

SEQ ID NO: 4217 - RNA, 32 nt, Homo Sapiens
guggcuccgugcagcuacagccaggccggcug

SEQ ID NO: 4218 - RNA, 32 nt, Homo Sapiens
ugaaaucuuccacuagccucacuuuucaacag

SEQ ID NO: 4219 - RNA, 32 nt, Homo Sapiens
ugauaaaacaacaugguauguagaagccuagg

SEQ ID NO: 4220 - RNA, 26 nt, Homo Sapiens
caugccggccugcugcagcugcagug

SEQ ID NO: 4221 - RNA, 32 nt, Homo Sapiens
gaggcaggauugcagaggcauuuucagacaac

SEQ ID NO: 4222 - RNA, 32 nt, Homo Sapiens
guauguuuggaaagagaacuuugugacugcag

SEQ ID NO: 4223 - RNA, 32 nt, Homo Sapiens
caucuuccaccaccuuugaggaccucgugucc

SEQ ID NO: 4224 - RNA, 32 nt, Homo Sapiens
agcuacucucuggcucuuuccaaacuagaaaa

SEQ ID NO: 4225 - RNA, 32 nt, Homo Sapiens
cccacccugucucuuucaucaaaccugauggu

SEQ ID NO: 4226 - RNA, 32 nt, Homo Sapiens
aggagcuugccuggucucggucugagcgucgc

SEQ ID NO: 4227 - RNA, 28 nt, Homo Sapiens
gcccaggcgcggccgccgaaucacgggc

SEQ ID NO: 4228 - RNA, 32 nt, Homo Sapiens
caguaggaagggggcuuggcuuuggcucaccc

SEQ ID NO: 4229 - RNA, 32 nt, Homo Sapiens
gccaagaaaaaguuaaaagaauauuggcggaa

SEQ ID NO: 4230 - RNA, 32 nt, Homo Sapiens
gagucggcuguggucagcagcccagaccccau

SEQ ID NO: 4231 - RNA, 32 nt, Homo Sapiens
ucucccacgcggggcaggccggggcugugagg

SEQ ID NO: 4232 - RNA, 32 nt, Homo Sapiens
cgugccaccuucugccuagccccauucucugg

SEQ ID NO: 4233 - RNA, 32 nt, Homo Sapiens
uuuccagcggccuccgcgcgcgcacgaugccc

SEQ ID NO: 4234 - RNA, 32 nt, Homo Sapiens
cccacuccaucagcacuaacgcccugcuccau

SEQ ID NO: 4235 - RNA, 32 nt, Homo Sapiens
ugccuccucccucuucuaagccuuggccugaa

SEQ ID NO: 4236 - RNA, 32 nt, Homo Sapiens
ccaucuuacuaaaagcgucuuaaaaugaccaa

SEQ ID NO: 4237 - RNA, 32 nt, Homo Sapiens
auugggguuauuucuacaauuauucuuagacg

SEQ ID NO: 4238 - RNA, 32 nt, Homo Sapiens
uuuuaaaaauugcucuuaauuuuuaaacucuc

SEQ ID NO: 4239 - RNA, 32 nt, Homo Sapiens
ccucguuauccggcugccuccuccucccaaag

SEQ ID NO: 4240 - RNA, 32 nt, Homo Sapiens
cugucccacguccaaucaugggccacaaggca

SEQ ID NO: 4241 - RNA, 32 nt, Homo Sapiens
ucuacagaaaucagcaaaagguccugggguau

SEQ ID NO: 4242 - RNA, 32 nt, Homo Sapiens
gugcuuccuuguaguuuguaaugugaguucaa

SEQ ID NO: 4243 - RNA, 32 nt, Homo Sapiens
gagcggcccuggcgcggcugucggcuggcacc

SEQ ID NO: 4244 - RNA, 32 nt, Homo Sapiens
ucacaagggcaggagagcccuccaucacugac

SEQ ID NO: 4245 - RNA, 32 nt, Homo Sapiens
gagaggagccaaaagcacuuguuacauaguga

SEQ ID NO: 4246 - RNA, 32 nt, Homo Sapiens
aaggcuuccuuccguguuuaucccuguagcca

SEQ ID NO: 4247 - RNA, 32 nt, Homo Sapiens
ugugggccugacagaaguugauauuugggucu

SEQ ID NO: 4248 - RNA, 32 nt, Homo Sapiens
gacgcuuccgccggcucgcgcccuccgggccc

SEQ ID NO: 4249 - RNA, 32 nt, Homo Sapiens
uugcgaggaguuguggauugacugcugucugc

SEQ ID NO: 4250 - RNA, 32 nt, Homo Sapiens
uggccugaaagcucucucggcccugagccucc

SEQ ID NO: 4251 - RNA, 32 nt, Homo Sapiens
uuuccacuugcaccauaacauaagaaagcgua

SEQ ID NO: 4252 - RNA, 32 nt, Homo Sapiens
uauuaaaagccaugcauacaagcaaugucuuc

SEQ ID NO: 4253 - RNA, 32 nt, Homo Sapiens
cuucaggagggaggcuucgggcacaggcacgg

SEQ ID NO: 4254 - RNA, 32 nt, Homo Sapiens
uaaguuauuuagucaaguuauucucaaagaug

SEQ ID NO: 4255 - RNA, 32 nt, Homo Sapiens
accuuuuguagucaguccccucauggaauguu

SEQ ID NO: 4256 - RNA, 32 nt, Homo Sapiens
aagggacuggugccucgcuggugcugggucuc

SEQ ID NO: 4257 - RNA, 32 nt, Homo Sapiens
ggggguggggauggcaaguccauggugugugu

SEQ ID NO: 4258 - RNA, 32 nt, Homo Sapiens
agcauuuuuaugacuuuuuuugcuuuauauaa

SEQ ID NO: 4259 - RNA, 32 nt, Homo Sapiens
uuccacuguuguaaaaaguauaucaaauuauu

SEQ ID NO: 4260 - RNA, 28 nt, Homo Sapiens
gucaugagcugcagacaguucuccucgu

SEQ ID NO: 4261 - RNA, 32 nt, Homo Sapiens
ugccagcuacagaguugagcuggccauguuuc

SEQ ID NO: 4262 - RNA, 32 nt, Homo Sapiens
uuuuugaacaauauugugaaaaugauugcauu

SEQ ID NO: 4263 - RNA, 32 nt, Homo Sapiens
cagguacgcgccgccgccacaguugcgcugcu

SEQ ID NO: 4264 - RNA, 32 nt, Homo Sapiens
cuuggggaccucuggggcaaggagcugagaag

SEQ ID NO: 4265 - RNA, 32 nt, Homo Sapiens
cgccgccuccaagcgggcccccuccugcacca

SEQ ID NO: 4266 - RNA, 32 nt, Homo Sapiens
ucuguccccucugcagugcacccaggugggcc

SEQ ID NO: 4267 - RNA, 32 nt, Homo Sapiens
aaugaaguauuaucuguaaaaauuguuauaau

SEQ ID NO: 4268 - RNA, 32 nt, Homo Sapiens
uaccaagaagagagggcugggcggggaggagc

SEQ ID NO: 4269 - RNA, 32 nt, Homo Sapiens
uuuuauuuuuacaggcuuaucagucucacugu

SEQ ID NO: 4270 - RNA, 32 nt, Homo Sapiens
uguauauucuaccuugcacuacagucauuugu

SEQ ID NO: 4271 - RNA, 32 nt, Homo Sapiens
cuguugcugcauugcuuaguguuuccuuguug

SEQ ID NO: 4272 - RNA, 30 nt, Homo Sapiens
gugacggcgcccgccgcagguggggcgagg

SEQ ID NO: 4273 - RNA, 32 nt, Homo Sapiens
gauuuuuaaaaauaacuaguguagcuuaucuu

SEQ ID NO: 4274 - RNA, 32 nt, Homo Sapiens
ccuguaagggaagaauccugggaaagaggcaa

SEQ ID NO: 4275 - RNA, 29 nt, Homo Sapiens
agguaacuggcuuuccugcugguccgugc

SEQ ID NO: 4276 - RNA, 32 nt, Homo Sapiens
ccauaagauaugacaacagcugucugagucau

SEQ ID NO: 4277 - RNA, 32 nt, Homo Sapiens
uacguaaaacaaaaguagacaggcuagucuaa

SEQ ID NO: 4278 - RNA, 32 nt, Homo Sapiens
agucacaggguugccugggugguguuugaagg

SEQ ID NO: 4279 - RNA, 32 nt, Homo Sapiens
ugaggccaccuuuuuagccaaaaaccuagggu

SEQ ID NO: 4280 - RNA, 30 nt, Homo Sapiens
agggagcgcccguagccagcgcccccguaa

SEQ ID NO: 4281 - RNA, 32 nt, Homo Sapiens
gggggcucaggaugggggcguuuccgggugag

SEQ ID NO: 4282 - RNA, 32 nt, Homo Sapiens
cggggugcgcgagguccucucgggacccggcc

SEQ ID NO: 4283 - RNA, 32 nt, Homo Sapiens
uaggaaaaccaaucagguuauugcauugacuu

SEQ ID NO: 4284 - RNA, 32 nt, Homo Sapiens
ucagcccaggacuugaaguuaggagaucuuuu

SEQ ID NO: 4285 - RNA, 32 nt, Homo Sapiens
cucucugagcacccucuaaguggaggacagaa

SEQ ID NO: 4286 - RNA, 32 nt, Homo Sapiens
cacacuggcucauuuuaaagcucucaccuucc

SEQ ID NO: 4287 - RNA, 32 nt, Homo Sapiens
ggcgggaccgcagcaaccaccggagcgugagc

SEQ ID NO: 4288 - RNA, 32 nt, Homo Sapiens
acauucauccaguugcaauaaaauaguauuga

SEQ ID NO: 4289 - RNA, 32 nt, Homo Sapiens
uggaggccaccgaugcccaucuguacagggcc

SEQ ID NO: 4290 - RNA, 32 nt, Homo Sapiens
uacccaaacaagugggagagccaggagccaaa

SEQ ID NO: 4291 - RNA, 32 nt, Homo Sapiens
uucaggagaaaagaagccugggcggagagcag

SEQ ID NO: 4292 - RNA, 32 nt, Homo Sapiens
cuggacgggcugccggccgugcgccgccccac

SEQ ID NO: 4293 - RNA, 32 nt, Homo Sapiens
aagucauccaugaaaugcuaaaucuagugggu

SEQ ID NO: 4294 - RNA, 32 nt, Homo Sapiens
cgcggggagacgcgcgcauccaccagccccgg

SEQ ID NO: 4295 - RNA, 32 nt, Homo Sapiens
ggcuaacaggauccaugaaauuccuaggucag

SEQ ID NO: 4296 - RNA, 29 nt, Homo Sapiens
agcuugaugaagauuuacaaaguaaacau

SEQ ID NO: 4297 - RNA, 32 nt, Homo Sapiens
aggaagagcggaagaggcgucgccagccaccg

SEQ ID NO: 4298 - RNA, 32 nt, Homo Sapiens
cccuuccccucccccgccgcguccuugcgagg

SEQ ID NO: 4299 - RNA, 32 nt, Homo Sapiens
acauugcagccaacacauauggucaaugaaua

SEQ ID NO: 4300 - RNA, 32 nt, Homo Sapiens
uuguuacuauacaauuaugaaauguaauguaa

SEQ ID NO: 4301 - RNA, 32 nt, Homo Sapiens
ccccaccucacagccagagucaaugccuucau

SEQ ID NO: 4302 - RNA, 30 nt, Homo Sapiens
cuccaggccguucuccuccccugagcaucc

SEQ ID NO: 4303 - RNA, 32 nt, Homo Sapiens
cuucuuuguaccuauuuuuuuauuacaaauau

SEQ ID NO: 4304 - RNA, 32 nt, Homo Sapiens
uuccuguaaccugguuaguauuaaugucagug

SEQ ID NO: 4305 - RNA, 32 nt, Homo Sapiens
auuucuuaaauguauuugauugaugccucauu

SEQ ID NO: 4306 - RNA, 32 nt, Homo Sapiens
cacagaauaaaauaaagcaaaacgagggagga

SEQ ID NO: 4307 - RNA, 32 nt, Homo Sapiens
cuucuguuuuaaaggagguauuuuggaaauug

SEQ ID NO: 4308 - RNA, 32 nt, Homo Sapiens
auguuucaauaaaauuacugucuuguaauaua

SEQ ID NO: 4309 - RNA, 32 nt, Homo Sapiens
acuucccuaggauauccuguguuugaguguga

SEQ ID NO: 4310 - RNA, 32 nt, Homo Sapiens
ccugagaagggagaagacagaggagaaugcca

SEQ ID NO: 4311 - RNA, 32 nt, Homo Sapiens
agccgggcguugagcacagcgcgggccaggcc

SEQ ID NO: 4312 - RNA, 32 nt, Homo Sapiens
gaucucggcucacugaaacuucugccucccgg

SEQ ID NO: 4313 - RNA, 32 nt, Homo Sapiens
gucugugacuuaaugauuucauguaagucugu

SEQ ID NO: 4314 - RNA, 32 nt, Homo Sapiens
cggcggcgaagcagcagcugcggccgcgcccu

SEQ ID NO: 4315 - RNA, 32 nt, Homo Sapiens
caggugcgcgccccugcuccccuggguggccu

SEQ ID NO: 4316 - RNA, 32 nt, Homo Sapiens
gacagagucuugcucucucacccaggccugaa

SEQ ID NO: 4317 - RNA, 32 nt, Homo Sapiens
ccgcaagagcuggccuggggugcggacagucu

SEQ ID NO: 4318 - RNA, 32 nt, Homo Sapiens
auuuuugucaucccugcccuuggccaaucccu

SEQ ID NO: 4319 - RNA, 32 nt, Homo Sapiens
uugaagacacuggguuuagacauuggauauuu

SEQ ID NO: 4320 - RNA, 32 nt, Homo Sapiens
gcauggaggcgcugcgggaagcgcaccaggag

SEQ ID NO: 4321 - RNA, 32 nt, Homo Sapiens
cccguccgagccccggccccaaguaacgccgc

SEQ ID NO: 4322 - RNA, 32 nt, Homo Sapiens
guuguuuagcuugguuuguuucccuaacuucu

SEQ ID NO: 4323 - RNA, 32 nt, Homo Sapiens
uugggcucuguuccaggcccccggcccacgug

SEQ ID NO: 4324 - RNA, 32 nt, Homo Sapiens
cagguuauucuuuucuaggccaaguacuucac

SEQ ID NO: 4325 - RNA, 32 nt, Homo Sapiens
uuacaugaauaaaauuaagaaaauagccauau

SEQ ID NO: 4326 - RNA, 32 nt, Homo Sapiens
uuucaaaagcaaaugggagaaauaucacugaa

SEQ ID NO: 4327 - RNA, 32 nt, Homo Sapiens
ucccgagaacuuccuaucagguccuggcugca

SEQ ID NO: 4328 - RNA, 32 nt, Homo Sapiens
ccauguaucuccauccuccccugcuccagcca

SEQ ID NO: 4329 - RNA, 32 nt, Homo Sapiens
guugguaaaacaacuuuuuaaacucuuauuca

SEQ ID NO: 4330 - RNA, 32 nt, Homo Sapiens
gcaccuacauuuaauaggaguacaauaaaacu

SEQ ID NO: 4331 - RNA, 32 nt, Homo Sapiens
auaucaguacaaaacuccuuuauuuuauuaaa

SEQ ID NO: 4332 - RNA, 32 nt, Homo Sapiens
gccgccugcccccugcccuagcugggccaccu

SEQ ID NO: 4333 - RNA, 32 nt, Homo Sapiens
uucgguguacuauugauaggacacagaaaggg

SEQ ID NO: 4334 - RNA, 32 nt, Homo Sapiens
cauguuuacccaucaaaucugacuuaaaaggu

SEQ ID NO: 4335 - RNA, 32 nt, Homo Sapiens
accuccuauaucauuauuuagcaccguuugug

SEQ ID NO: 4336 - RNA, 32 nt, Homo Sapiens
aaauauuuaaguguuacggcagauuuaaaauc

SEQ ID NO: 4337 - RNA, 32 nt, Homo Sapiens
acaucuuccagugugauucagaagagaggagc

SEQ ID NO: 4338 - RNA, 32 nt, Homo Sapiens
caacuuguaggguugguggcugaacaggccga

SEQ ID NO: 4339 - RNA, 32 nt, Homo Sapiens
ucuucugaaagauaacuaauaacugguacuua

SEQ ID NO: 4340 - RNA, 32 nt, Homo Sapiens
cgccaggcccggccccgccgcgccaugucgga

SEQ ID NO: 4341 - RNA, 32 nt, Homo Sapiens
aggagcuuucucaaugucuucccacaaauggu

SEQ ID NO: 4342 - RNA, 32 nt, Homo Sapiens
uuuuuuuuuuuuuuuuuuuuuaaaugcuaggu

SEQ ID NO: 4343 - RNA, 32 nt, Homo Sapiens
ggucccagagccugcucugugcacugacccca

SEQ ID NO: 4344 - RNA, 32 nt, Homo Sapiens
gaagcuuugaagcucaggaaagaagagaaauc

SEQ ID NO: 4345 - RNA, 32 nt, Homo Sapiens
uacucggaccccugggaccagcccuucagcca

SEQ ID NO: 4346 - RNA, 32 nt, Homo Sapiens
uucuggaagacuggggcagcaguuggggaagu

SEQ ID NO: 4347 - RNA, 32 nt, Homo Sapiens
caaaccagggcagcugcaggacgggccacugg

SEQ ID NO: 4348 - RNA, 32 nt, Homo Sapiens
ccugggagcucaguggcugggaugcugcuuua

SEQ ID NO: 4349 - RNA, 32 nt, Homo Sapiens
augugcauaugaaaauguaguuuggggaugac

SEQ ID NO: 4350 - RNA, 32 nt, Homo Sapiens
ugcagauugcuaaguagcuguuggugguacaa

SEQ ID NO: 4351 - RNA, 32 nt, Homo Sapiens
cuugauggccuggccacaggggcagcucccca

SEQ ID NO: 4352 - RNA, 32 nt, Homo Sapiens
ucggguucaagcgguucuacugccucagccuc

SEQ ID NO: 4353 - RNA, 32 nt, Homo Sapiens
acagaagggucuccuuggucauguggcauuuu

SEQ ID NO: 4354 - RNA, 32 nt, Homo Sapiens
acucuccauauauuuauuuguuuggaaucacu

SEQ ID NO: 4355 - RNA, 32 nt, Homo Sapiens
ugugcuggaaaagaugaaauggggaaaauggu

SEQ ID NO: 4356 - RNA, 32 nt, Homo Sapiens
auuccuuuuuuuuuuuuuuuuaauuuuuuaua

SEQ ID NO: 4357 - RNA, 32 nt, Homo Sapiens
cagccggcugguggagagggaggccggccuca

SEQ ID NO: 4358 - RNA, 32 nt, Homo Sapiens
uggaagccaagagcucucggcucaugauaccu

SEQ ID NO: 4359 - RNA, 25 nt, Homo Sapiens
auggacacagaaaguaauaggagag

SEQ ID NO: 4360 - RNA, 32 nt, Homo Sapiens
ccccccagggccuuggggaaaagcccccacug

SEQ ID NO: 4361 - RNA, 32 nt, Homo Sapiens
ugcaguggugcgaucucagaucaguguaccau

SEQ ID NO: 4362 - RNA, 32 nt, Homo Sapiens
agggugacagggagggcgggcgcugcaggggc

SEQ ID NO: 4363 - RNA, 32 nt, Homo Sapiens
uucuauuggaauuuguuuuuuaugauuuuuag

SEQ ID NO: 4364 - RNA, 32 nt, Homo Sapiens
aagcuauucuacaagaaaaaauguacuuguau

SEQ ID NO: 4365 - RNA, 32 nt, Homo Sapiens
ucuucugagaggugccugcugcugcuguauac

SEQ ID NO: 4366 - RNA, 32 nt, Homo Sapiens
aaacuaaaaacaaaaaguaaaaauuaguuccc

SEQ ID NO: 4367 - RNA, 32 nt, Homo Sapiens
ugaagauaguucuguaaaguuguuucaguuaa

SEQ ID NO: 4368 - RNA, 32 nt, Homo Sapiens
ggaaagcuuccugggaaacguaugcuagcaga

SEQ ID NO: 4369 - RNA, 32 nt, Homo Sapiens
aagcuguauauacuaaacauuuuuuagcagag

SEQ ID NO: 4370 - RNA, 32 nt, Homo Sapiens
uaaauuggaccugguacaguaguaaugggagu

SEQ ID NO: 4371 - RNA, 32 nt, Homo Sapiens
uugucaagggaaucguuaccguuuuauaccaa

SEQ ID NO: 4372 - RNA, 32 nt, Homo Sapiens
aaugugaggagaauucugguuguaauagauga

SEQ ID NO: 4373 - RNA, 32 nt, Homo Sapiens
agauggcuuuugcugcucuguucucccucuac

SEQ ID NO: 4374 - RNA, 32 nt, Homo Sapiens
ccgcugacccgcagcgccgccggcucccgucg

SEQ ID NO: 4375 - RNA, 32 nt, Homo Sapiens
ggaauucgccugaccuacugcucagggaucuu

SEQ ID NO: 4376 - RNA, 32 nt, Homo Sapiens
cuuauuuaauauaucauauauagcaucucugc

SEQ ID NO: 4377 - RNA, 32 nt, Homo Sapiens
uuuuuaauuuucacacuguauccuaacaugaa

SEQ ID NO: 4378 - RNA, 32 nt, Homo Sapiens
gguccugcugcccuggccuccuccccuuuagu

SEQ ID NO: 4379 - RNA, 32 nt, Homo Sapiens
gaggcgguggcuggcguccgcugcgccgcccc

SEQ ID NO: 4380 - RNA, 32 nt, Homo Sapiens
aaugcaaaauaagacuguggggccuaaggcau

SEQ ID NO: 4381 - RNA, 32 nt, Homo Sapiens
uccauacagaaaccaguguguccaugugcucu

SEQ ID NO: 4382 - RNA, 32 nt, Homo Sapiens
ccgcuucccgguuucacuccuucucagccugg

SEQ ID NO: 4383 - RNA, 32 nt, Homo Sapiens
uacaauccagagacagaaaacaaaaucuagau

SEQ ID NO: 4384 - RNA, 32 nt, Homo Sapiens
aaagccggaccccaggccgccgcgcugccgcc

SEQ ID NO: 4385 - RNA, 32 nt, Homo Sapiens
gggagcgagcggcgcgucgccaugccggcgug

SEQ ID NO: 4386 - RNA, 32 nt, Homo Sapiens
ugcugugucagaaagcacuucugaaagcagau

SEQ ID NO: 4387 - RNA, 29 nt, Homo Sapiens
ccaguuugaaaaucucauggcagagagcc

SEQ ID NO: 4388 - RNA, 32 nt, Homo Sapiens
auuuuaccauaauaaagauauuugagauguac

SEQ ID NO: 4389 - RNA, 32 nt, Homo Sapiens
ugguggugcaggucugcagucccagcuacucu

SEQ ID NO: 4390 - RNA, 32 nt, Homo Sapiens
ugaacuacaaauaccuuucaucaacauuaaag

SEQ ID NO: 4391 - RNA, 32 nt, Homo Sapiens
uacauaaggggauauaggaagacaggacucua

SEQ ID NO: 4392 - RNA, 32 nt, Homo Sapiens
uaacgggaccagcucugcggaaaccaacuugg

SEQ ID NO: 4393 - RNA, 32 nt, Homo Sapiens
gaacaggagacccaccugaggcucagcccuag

SEQ ID NO: 4394 - RNA, 32 nt, Homo Sapiens
uauguauaguuuuauguuuguuuucuuagaaa

SEQ ID NO: 4395 - RNA, 32 nt, Homo Sapiens
accucgagaaaguucugaaggccaugacaccu

SEQ ID NO: 4396 - RNA, 32 nt, Homo Sapiens
aaacuuaagaauaaagugacugcugugguuuu

SEQ ID NO: 4397 - RNA, 32 nt, Homo Sapiens
cacccuccgcagccgcuggcccgggugcuaag

SEQ ID NO: 4398 - RNA, 32 nt, Homo Sapiens
gacaggggucugugugaacagaagacccaagg

SEQ ID NO: 4399 - RNA, 32 nt, Homo Sapiens
accguuggccccagcugugccuugacuacgua

SEQ ID NO: 4400 - RNA, 32 nt, Homo Sapiens
cuucuccuccucccacuucccagccgcagcag

SEQ ID NO: 4401 - RNA, 32 nt, Homo Sapiens
aagaggacuggggaagggaggggagacuaugu

SEQ ID NO: 4402 - RNA, 32 nt, Homo Sapiens
gacagacagacaccacagccuccccuucccag

SEQ ID NO: 4403 - RNA, 32 nt, Homo Sapiens
gugaaaaauauuaacacagugcucaagugaau

SEQ ID NO: 4404 - RNA, 32 nt, Homo Sapiens
cccucauugucuucccucucaagccccuuccu

SEQ ID NO: 4405 - RNA, 32 nt, Homo Sapiens
guuuggcugcgcgggggccgcgcgucggaguu

SEQ ID NO: 4406 - RNA, 32 nt, Homo Sapiens
uuugcuaaaaacauguuugugaauguaugcac

SEQ ID NO: 4407 - RNA, 32 nt, Homo Sapiens
aaugauacugucuaagaauaaugacguauugu

SEQ ID NO: 4408 - RNA, 32 nt, Homo Sapiens
ggcggggcgaggcccuggacggcggcggcagu

SEQ ID NO: 4409 - RNA, 32 nt, Homo Sapiens
ucagcaguuccccuccuucuucgacugcuccu

SEQ ID NO: 4410 - RNA, 32 nt, Homo Sapiens
cauuaaaaugcuuuuuauaagcuuauauuauu

SEQ ID NO: 4411 - RNA, 32 nt, Homo Sapiens
ugccaaaugaauugccuaauugcugcaaagua

SEQ ID NO: 4412 - RNA, 32 nt, Homo Sapiens
augcuccuccagcaucuguuucucccuuggga

SEQ ID NO: 4413 - RNA, 32 nt, Homo Sapiens
cggguucucuugaccuccauccaggucagucc

SEQ ID NO: 4414 - RNA, 32 nt, Homo Sapiens
aagggucuugccuugucucagaugagacuacg

SEQ ID NO: 4415 - RNA, 32 nt, Homo Sapiens
ggcagggaccaguaauucagugcuuccccugg

SEQ ID NO: 4416 - RNA, 32 nt, Homo Sapiens
uuuacucucauacccuucuccuuaguccuuca

SEQ ID NO: 4417 - RNA, 30 nt, Homo Sapiens
uuuggaacgcccgugccgcgucuccgcguu

SEQ ID NO: 4418 - RNA, 32 nt, Homo Sapiens
uggcacauggaugugcaguucuacacagaagu

SEQ ID NO: 4419 - RNA, 32 nt, Homo Sapiens
ugugugugaugggaaaauccggacccacgcgu

SEQ ID NO: 4420 - RNA, 32 nt, Homo Sapiens
acggugccuuccccggcgggggacggugcggu

SEQ ID NO: 4421 - RNA, 32 nt, Homo Sapiens
ucuaauuaagacaaagcagaugcuugugggcu

SEQ ID NO: 4422 - RNA, 32 nt, Homo Sapiens
uaaaaauaaaauguacagaagaaagcauagca

SEQ ID NO: 4423 - RNA, 32 nt, Homo Sapiens
gcgccgggccccggacgccgcgcggaaaagau

SEQ ID NO: 4424 - RNA, 32 nt, Homo Sapiens
auccuuuucuauuucccuagaaccuuaauggu

SEQ ID NO: 4425 - RNA, 32 nt, Homo Sapiens
cacagccaugaagagaccagugggguggugca

SEQ ID NO: 4426 - RNA, 32 nt, Homo Sapiens
gugauauaaaguacucauuuuccacuaaggcc

SEQ ID NO: 4427 - RNA, 31 nt, Homo Sapiens
agccggcagcgcaggcgggcggagcggagcu

SEQ ID NO: 4428 - RNA, 32 nt, Homo Sapiens
ccccggggugggcagcccaggggggugagcgg

SEQ ID NO: 4429 - RNA, 32 nt, Homo Sapiens
ggcagagagacucggaguaaucgccugcauug

SEQ ID NO: 4430 - RNA, 32 nt, Homo Sapiens
guggaauaaauauucuaagugauuuaaugcac

SEQ ID NO: 4431 - RNA, 32 nt, Homo Sapiens
cuucagcucauggguuccacccuaacuugggg

SEQ ID NO: 4432 - RNA, 32 nt, Homo Sapiens
gaaaauguuguccuuugguggcaagaauuaga

SEQ ID NO: 4433 - RNA, 32 nt, Homo Sapiens
uauuaagaugaccuuuauguuaaacuuucaaa

SEQ ID NO: 4434 - RNA, 32 nt, Homo Sapiens
cccccgcgcgucgcggacaccguguuccucgu

SEQ ID NO: 4435 - RNA, 32 nt, Homo Sapiens
cuaaaacaacuuaugaugauuuuuccaagagg

SEQ ID NO: 4436 - RNA, 32 nt, Homo Sapiens
ucccggcaccgccgccgucgucucccggcccc

SEQ ID NO: 4437 - RNA, 32 nt, Homo Sapiens
uuuuucuacagugaauauaaucaaauaguaaa

SEQ ID NO: 4438 - RNA, 32 nt, Homo Sapiens
acaugccacuccccggccucguggcagugaug

SEQ ID NO: 4439 - RNA, 32 nt, Homo Sapiens
ucucaaccugaccugaaccuuuauugaauccu

SEQ ID NO: 4440 - RNA, 32 nt, Homo Sapiens
uacacagagaagccuuauaaauguaagagaug

SEQ ID NO: 4441 - RNA, 32 nt, Homo Sapiens
uuucagaauuguaaaaaguacaucuagaugug

SEQ ID NO: 4442 - RNA, 32 nt, Homo Sapiens
uugugucuuuugcaugaugauccggauuuaau

SEQ ID NO: 4443 - RNA, 32 nt, Homo Sapiens
gcacgaggcggcuucugcgcgccggggccgcc

SEQ ID NO: 4444 - RNA, 32 nt, Homo Sapiens
gaccccgagacacccucccuccacucgggagc

SEQ ID NO: 4445 - RNA, 32 nt, Homo Sapiens
aaaaagcuuugaaaauggaugguuuggguauu

SEQ ID NO: 4446 - RNA, 32 nt, Homo Sapiens
ucugcucaggaauugaagauguaaggaauuga

SEQ ID NO: 4447 - RNA, 32 nt, Homo Sapiens
uccucgcugcucaugcccacagcccucccaga

SEQ ID NO: 4448 - RNA, 32 nt, Homo Sapiens
uacucuaaauguuagauaauaguagucuuguu

SEQ ID NO: 4449 - RNA, 32 nt, Homo Sapiens
ugggugguuccuggagccuccucugggcagug

SEQ ID NO: 4450 - RNA, 32 nt, Homo Sapiens
ugaaagaucugauggaugaaaauugcauuuug

SEQ ID NO: 4451 - RNA, 32 nt, Homo Sapiens
gucuauaaaaauuguuauuaugggauuggaag

SEQ ID NO: 4452 - RNA, 32 nt, Homo Sapiens
cgccaagcaucuguccccuccucccccggccg

SEQ ID NO: 4453 - RNA, 32 nt, Homo Sapiens
uucuggucuacauuuagaaccuugcuuuugag

SEQ ID NO: 4454 - RNA, 32 nt, Homo Sapiens
caaaacuggcuagccugagcugcugguucacu

SEQ ID NO: 4455 - RNA, 32 nt, Homo Sapiens
uauuuuuuacuuuuggguucaccuagaucaua

SEQ ID NO: 4456 - RNA, 32 nt, Homo Sapiens
gcaccccucccagauuucuuuuacauuaacua

SEQ ID NO: 4457 - RNA, 32 nt, Homo Sapiens
ucaguguaauaaucaugguaaauauucucaau

SEQ ID NO: 4458 - RNA, 31 nt, Homo Sapiens
ccaucauuucugacuuugaccagcuguaaga

SEQ ID NO: 4459 - RNA, 28 nt, Homo Sapiens
ccugcuccaucggcacuaacgcccugcu

SEQ ID NO: 4460 - RNA, 25 nt, Homo Sapiens
augagcugcagcggcuccggcgcgg

SEQ ID NO: 4461 - RNA, 32 nt, Homo Sapiens
uuuugcuguaauuguucaugaguaguuuagaa

SEQ ID NO: 4462 - RNA, 32 nt, Homo Sapiens
uggauuauauugcauauugugaauucauuuuu

SEQ ID NO: 4463 - RNA, 32 nt, Homo Sapiens
ugguauugcugggcuccuggcuagaugcaagc

SEQ ID NO: 4464 - RNA, 32 nt, Homo Sapiens
auccccacccacccggcucccaggauccucau

SEQ ID NO: 4465 - RNA, 32 nt, Homo Sapiens
aaggacugagagauaaauaggaggagcauaag

SEQ ID NO: 4466 - RNA, 32 nt, Homo Sapiens
cccuggcccccucccgcugcaggagacucggg

SEQ ID NO: 4467 - RNA, 32 nt, Homo Sapiens
agccugggcaacaagagcgaaacuccgucuca

SEQ ID NO: 4468 - RNA, 32 nt, Homo Sapiens
gcguagcucgggcuucuaugaagaucccagcu

SEQ ID NO: 4469 - RNA, 32 nt, Homo Sapiens
aagacuuguauauaaacugcuuuuuccaaacu

SEQ ID NO: 4470 - RNA, 32 nt, Homo Sapiens
ucugacccagcuagccagaucccggacccaaa

SEQ ID NO: 4471 - RNA, 32 nt, Homo Sapiens
cccugccaauaaaaagauuaucuccagaugcu

SEQ ID NO: 4472 - RNA, 32 nt, Homo Sapiens
uccuuuuccaaggagacagcuaagguggaugg

SEQ ID NO: 4473 - RNA, 32 nt, Homo Sapiens
ucacagucaaggaagaguaaguuugaauaauu

SEQ ID NO: 4474 - RNA, 32 nt, Homo Sapiens
uggguccugccagcuggaucgcugcacauggc

SEQ ID NO: 4475 - RNA, 32 nt, Homo Sapiens
uccugcuacuuaaauuugaaucugagugaauu

SEQ ID NO: 4476 - RNA, 29 nt, Homo Sapiens
uuucuuauucugguauaccacaaaugauu

SEQ ID NO: 4477 - RNA, 32 nt, Homo Sapiens
cucagucuccagcaggcccaccccuccaccug

SEQ ID NO: 4478 - RNA, 32 nt, Homo Sapiens
uuacaaggagaugcuuauagaugauaguugua

SEQ ID NO: 4479 - RNA, 32 nt, Homo Sapiens
cuauaauuuuuccuaugcuauaaacuaaagau

SEQ ID NO: 4480 - RNA, 32 nt, Homo Sapiens
uuuaagagaacaaaagacagcagaaauaccuu

SEQ ID NO: 4481 - RNA, 32 nt, Homo Sapiens
aagacccagggccagggucccguugauguaac

SEQ ID NO: 4482 - RNA, 32 nt, Homo Sapiens
ucaguguaucucuucucccccagccccuauug

SEQ ID NO: 4483 - RNA, 32 nt, Homo Sapiens
auuacauguaaagcuguuaaaauacauaacuu

SEQ ID NO: 4484 - RNA, 32 nt, Homo Sapiens
cacauacacagcucuuuuuuuauugcccuuuu

SEQ ID NO: 4485 - RNA, 30 nt, Homo Sapiens
gcccaggauggagaggcgggucccaggccc

SEQ ID NO: 4486 - RNA, 32 nt, Homo Sapiens
caaaagucucaacccauuauaucaauccuaag

SEQ ID NO: 4487 - RNA, 32 nt, Homo Sapiens
cccugcccgagcuccccccgucccagggcccu

SEQ ID NO: 4488 - RNA, 32 nt, Homo Sapiens
ccccauccaacuggucccagagcuggagcuuc

SEQ ID NO: 4489 - RNA, 32 nt, Homo Sapiens
aucaaugccucacagaaacaagagguggaaca

SEQ ID NO: 4490 - RNA, 32 nt, Homo Sapiens
accggccagaggccaugcugcugcugcucacg

SEQ ID NO: 4491 - RNA, 32 nt, Homo Sapiens
acaaaaaguaaaguaaugcauuugagcauggc

SEQ ID NO: 4492 - RNA, 32 nt, Homo Sapiens
ugaccgguuuugaaauuauccaaagcaucacu

SEQ ID NO: 4493 - RNA, 32 nt, Homo Sapiens
cacagcaucucggggggcccaggccgauggca

SEQ ID NO: 4494 - RNA, 32 nt, Homo Sapiens
cacaguccaaagauacccucuuucucaaggua

SEQ ID NO: 4495 - RNA, 32 nt, Homo Sapiens
gcauccuccuucccgcauccgcaacacuccaa

SEQ ID NO: 4496 - RNA, 32 nt, Homo Sapiens
acccucagccccaccccagguccugcagucug

SEQ ID NO: 4497 - RNA, 32 nt, Homo Sapiens
cgacugccuuggagcaugugcguuauggaaau

SEQ ID NO: 4498 - RNA, 32 nt, Homo Sapiens
ccgagaaaugggagcgccuggcugcuuggauu

SEQ ID NO: 4499 - RNA, 32 nt, Homo Sapiens
ugcuccaucuggcuuaccacucuccagggccu

SEQ ID NO: 4500 - RNA, 32 nt, Homo Sapiens
gaggcucacagggugucauggagcacgaggaa

SEQ ID NO: 4501 - RNA, 32 nt, Homo Sapiens
cuacuguauaaaauaaacucucucuuuucccu

SEQ ID NO: 4502 - RNA, 32 nt, Homo Sapiens
uaaacuauuucugaauuuggacuuaguuccau

SEQ ID NO: 4503 - RNA, 32 nt, Homo Sapiens
ucuugcguuucuuuuuaccuuuuuuggcacuc

SEQ ID NO: 4504 - RNA, 32 nt, Homo Sapiens
cgcugagcuccgcggcuccgcgagccgguucc

SEQ ID NO: 4505 - RNA, 32 nt, Homo Sapiens
auugaauacuauuuuacacuguauuggauuuu

SEQ ID NO: 4506 - RNA, 32 nt, Homo Sapiens
accauucuuuugcaugugauuaacauuuguga

SEQ ID NO: 4507 - RNA, 32 nt, Homo Sapiens
cgcucccacccggcugccaacgaucccucggc

SEQ ID NO: 4508 - RNA, 32 nt, Homo Sapiens
gauguaaaauuguaaugcguauauguacaaau

SEQ ID NO: 4509 - RNA, 32 nt, Homo Sapiens
agcauaaaagucaauacauauuugaggaauaa

SEQ ID NO: 4510 - RNA, 32 nt, Homo Sapiens
cgugugucccaggccgucgaccccgcugucgc

SEQ ID NO: 4511 - RNA, 32 nt, Homo Sapiens
uuugugcaagaaauuugaaacuuauugggaaa

SEQ ID NO: 4512 - RNA, 32 nt, Homo Sapiens
gcugcgcuccgaggucccgcgccgggucgcgc

SEQ ID NO: 4513 - RNA, 32 nt, Homo Sapiens
acacugaaacaguagaguaggagucaaaaagc

SEQ ID NO: 4514 - RNA, 32 nt, Homo Sapiens
aggcggcaucacggucuuucugcccuuuccug

SEQ ID NO: 4515 - RNA, 32 nt, Homo Sapiens
ugcuaggccugcucaccucugaggccucuggg

SEQ ID NO: 4516 - RNA, 32 nt, Homo Sapiens
augagucagaugaagauacuuucuacugguac

SEQ ID NO: 4517 - RNA, 32 nt, Homo Sapiens
cuggggcgccuuucagcuccgcgcucagauuu

SEQ ID NO: 4518 - RNA, 32 nt, Homo Sapiens
caacagcgaguccggauuuaggaggcagccuu

SEQ ID NO: 4519 - RNA, 32 nt, Homo Sapiens
ccuuucugcccguggacgccgccgaagaagca

SEQ ID NO: 4520 - RNA, 32 nt, Homo Sapiens
gcaggacuccccaggcuugugcucucucagcu

SEQ ID NO: 4521 - RNA, 32 nt, Homo Sapiens
ugggcggcugcuggcagcgccauggagacggu

SEQ ID NO: 4522 - RNA, 32 nt, Homo Sapiens
gggagaaagagcaggugaaauauuuucucagc

SEQ ID NO: 4523 - RNA, 32 nt, Homo Sapiens
auauaaguuauauugcaaaagggauuuguauu

SEQ ID NO: 4524 - RNA, 32 nt, Homo Sapiens
aaguuuccagcaugugcaccguuauagccguu

SEQ ID NO: 4525 - RNA, 32 nt, Homo Sapiens
aggaggugcagguuggggauucuuucucucuu

SEQ ID NO: 4526 - RNA, 32 nt, Homo Sapiens
gaaugcuaguuaaauuugaauuccuuggaauu

SEQ ID NO: 4527 - RNA, 32 nt, Homo Sapiens
cacugaaucccaagcccuuaaucccugguuuc

SEQ ID NO: 4528 - RNA, 32 nt, Homo Sapiens
cccaccaguucuccacugucucuucuggacca

SEQ ID NO: 4529 - RNA, 32 nt, Homo Sapiens
cggccuaacaaggccauccuuaugcuuugcaa

SEQ ID NO: 4530 - RNA, 32 nt, Homo Sapiens
uuuucccaaagcguuuuauuugaaaggauaac

SEQ ID NO: 4531 - RNA, 32 nt, Homo Sapiens
guuaagaguaauccucuuucuugcugguguuu

SEQ ID NO: 4532 - RNA, 31 nt, Homo Sapiens
gacuggcagcgcacguucagcgugggcgccg

SEQ ID NO: 4533 - RNA, 32 nt, Homo Sapiens
uaaccgguccccaaaacuuacugcacauaagg

SEQ ID NO: 4534 - RNA, 32 nt, Homo Sapiens
cggacccccucccccggcuccccccaucagug

SEQ ID NO: 4535 - RNA, 32 nt, Homo Sapiens
gcccguucuugaaauguaggcaucaugcaugu

SEQ ID NO: 4536 - RNA, 32 nt, Homo Sapiens
aaccagcccgucuucucucucugcucccaccc

SEQ ID NO: 4537 - RNA, 32 nt, Homo Sapiens
acuuuucuacugaguguuugcacuauacuuuc

SEQ ID NO: 4538 - RNA, 32 nt, Homo Sapiens
gaagcugaucccauccugcuaccaucaaacau

SEQ ID NO: 4539 - RNA, 32 nt, Homo Sapiens
cauccuccgggcguccucuccgggcccagcuc

SEQ ID NO: 4540 - RNA, 32 nt, Homo Sapiens
ugcacggcugucuauaacgugcugccgggucu

SEQ ID NO: 4541 - RNA, 32 nt, Homo Sapiens
cccagcacuuuggggggcggaggugggcagau

SEQ ID NO: 4542 - RNA, 32 nt, Homo Sapiens
gucccuugggguuuggugaaaaacaacuuccu

SEQ ID NO: 4543 - RNA, 32 nt, Homo Sapiens
aauguauuuuagacuuccuguagggggcgaua

SEQ ID NO: 4544 - RNA, 32 nt, Homo Sapiens
agaaggcaaaaauaguuuggauauguaaaaca

SEQ ID NO: 4545 - RNA, 32 nt, Homo Sapiens
uuuuacacauguaucugaacucuccugcauca

SEQ ID NO: 4546 - RNA, 32 nt, Homo Sapiens
cugcaugugggaagggagcaggagggccuggc

SEQ ID NO: 4547 - RNA, 31 nt, Homo Sapiens
caggugugagccaccaugccuggccuaaacu

SEQ ID NO: 4548 - RNA, 32 nt, Homo Sapiens
cuguacuuauauuugcagaagcaaaugaagua

SEQ ID NO: 4549 - RNA, 32 nt, Homo Sapiens
aauauaacucaacaguauauuaaccauugaca

SEQ ID NO: 4550 - RNA, 32 nt, Homo Sapiens
uguccugaccccacaguuucugucccaugaca

SEQ ID NO: 4551 - RNA, 32 nt, Homo Sapiens
aggcggaggccgugagcgcccaggccgacagg

SEQ ID NO: 4552 - RNA, 32 nt, Homo Sapiens
gaugaggagucuuugugucccuguacaguagu

SEQ ID NO: 4553 - RNA, 31 nt, Homo Sapiens
gugcuuuaagccacccugagauguacagacc

SEQ ID NO: 4554 - RNA, 29 nt, Homo Sapiens
ccaggucaucaccagugaaaguucugaca

SEQ ID NO: 4555 - RNA, 32 nt, Homo Sapiens
gcaauaaaagcacuuccuaacucuggaugccu

SEQ ID NO: 4556 - RNA, 32 nt, Homo Sapiens
aaaguauagagcuaaauugauuuaauuacacu

SEQ ID NO: 4557 - RNA, 32 nt, Homo Sapiens
cggcuggucccggccgaggccggcgcagggag

SEQ ID NO: 4558 - RNA, 32 nt, Homo Sapiens
gccaauaacaauacagugucugaguaucucca

SEQ ID NO: 4559 - RNA, 32 nt, Homo Sapiens
ugugaaaucaguaucagaauacuugcacucuu

SEQ ID NO: 4560 - RNA, 32 nt, Homo Sapiens
acguucagaugaugauaaaggagagauaaugg

SEQ ID NO: 4561 - RNA, 32 nt, Homo Sapiens
ccaguucccuccccaggccuccugggccaccu

SEQ ID NO: 4562 - RNA, 32 nt, Homo Sapiens
uguccaucauuugcugaaguggaccaacuagu

SEQ ID NO: 4563 - RNA, 32 nt, Homo Sapiens
uuuauuuuuauguuuuugauaauuuuuauuuu

SEQ ID NO: 4564 - RNA, 32 nt, Homo Sapiens
ugauuuacugguuuuuauuuugcugauuauaa

SEQ ID NO: 4565 - RNA, 32 nt, Homo Sapiens
cuuuuugcuucuuuucaauugcuuaguguuuc

SEQ ID NO: 4566 - RNA, 32 nt, Homo Sapiens
auuugccucuccccggagacagccguucuucu

SEQ ID NO: 4567 - RNA, 32 nt, Homo Sapiens
uaguuacuaaaauuauguuacuguauuuuuca

SEQ ID NO: 4568 - RNA, 32 nt, Homo Sapiens
uucuucgccucccucucuugggugacaucaaa

SEQ ID NO: 4569 - RNA, 32 nt, Homo Sapiens
aguggcauagucuaguggaaucaauaaucccu

SEQ ID NO: 4570 - RNA, 32 nt, Homo Sapiens
cucuagaccugccugcuuuaucuaauguaauc

SEQ ID NO: 4571 - RNA, 32 nt, Homo Sapiens
gcucgcggccgcggguaggcucccucagaucc

SEQ ID NO: 4572 - RNA, 32 nt, Homo Sapiens
ccucagcuggcaaucuggaaaccuggcccagg

SEQ ID NO: 4573 - RNA, 32 nt, Homo Sapiens
auguggaaaggcuuuuaaaauauuuuaaaacu

SEQ ID NO: 4574 - RNA, 32 nt, Homo Sapiens
aaagggcaugauuaugaauguuagaaucaauu

SEQ ID NO: 4575 - RNA, 32 nt, Homo Sapiens
cagaugaaaaggaagaguaucugucacugcua

SEQ ID NO: 4576 - RNA, 32 nt, Homo Sapiens
cgaucugggcugccuccagcccgggccugugu

SEQ ID NO: 4577 - RNA, 32 nt, Homo Sapiens
uuaacgacagcuuucucuggacaagggacuga

SEQ ID NO: 4578 - RNA, 32 nt, Homo Sapiens
gccgccuccugggaagauggcgcugcacuucc

SEQ ID NO: 4579 - RNA, 32 nt, Homo Sapiens
cccaguguuuuaacuuuguuuuauuuucaaaa

SEQ ID NO: 4580 - RNA, 32 nt, Homo Sapiens
acggacgucgcgccgcgcucccggggcgcuuu

SEQ ID NO: 4581 - RNA, 32 nt, Homo Sapiens
agggagaggcugugucccugcuggggucucag

SEQ ID NO: 4582 - RNA, 32 nt, Homo Sapiens
caguccuucugccugcccucugaggagagcga

SEQ ID NO: 4583 - RNA, 32 nt, Homo Sapiens
cagagcaagacucugucucaaaaaauaaaaau

SEQ ID NO: 4584 - RNA, 32 nt, Homo Sapiens
aaguuuuguaauauuuaacauaaggcuuaaug

SEQ ID NO: 4585 - RNA, 32 nt, Homo Sapiens
gcacguggacgcccgggugagcgugugugcau

SEQ ID NO: 4586 - RNA, 32 nt, Homo Sapiens
ugcgcucggccugcucgcccacuuccucccgg

SEQ ID NO: 4587 - RNA, 32 nt, Homo Sapiens
guuuggaugugccacuuuuggcaccaaacgug

SEQ ID NO: 4588 - RNA, 32 nt, Homo Sapiens
cagaaagcucuuuugaaaagacagacuccuca

SEQ ID NO: 4589 - RNA, 32 nt, Homo Sapiens
auucagaagaauaaaacugaaaauguuuccaa

SEQ ID NO: 4590 - RNA, 32 nt, Homo Sapiens
cucagcuacuuaggagaaugaggugggaggau

SEQ ID NO: 4591 - RNA, 32 nt, Homo Sapiens
uccucucugcaccuuccccaucagcucagcca

SEQ ID NO: 4592 - RNA, 28 nt, Homo Sapiens
uucuugacgucagggccaagcgagggga

SEQ ID NO: 4593 - RNA, 32 nt, Homo Sapiens
ggggaaugcacagauguugaccaaaggguaga

SEQ ID NO: 4594 - RNA, 32 nt, Homo Sapiens
acugagagucauauacauuaguuuuaaucucu

SEQ ID NO: 4595 - RNA, 32 nt, Homo Sapiens
auaaagacauuuuuuucuuuuguuaacguuau

SEQ ID NO: 4596 - RNA, 32 nt, Homo Sapiens
aauacccuuuauuuccuucuccugcuugauug

SEQ ID NO: 4597 - RNA, 32 nt, Homo Sapiens
auauauuaacagucacaucaacugaaggucaa

SEQ ID NO: 4598 - RNA, 32 nt, Homo Sapiens
cuuauuguauugucagguaauacucuaugguu

SEQ ID NO: 4599 - RNA, 32 nt, Homo Sapiens
aauuggcccuguaggcaaauucacuuuuuuca

SEQ ID NO: 4600 - RNA, 32 nt, Homo Sapiens
ccggggccggguagcugcuccaggcgcgcgag

SEQ ID NO: 4601 - RNA, 32 nt, Homo Sapiens
guagcuuccugaugccucauucaccaggaugg

SEQ ID NO: 4602 - RNA, 32 nt, Homo Sapiens
cugaaauaggaucaggcuuuuacuacaacagc

SEQ ID NO: 4603 - RNA, 32 nt, Homo Sapiens
cagaaagagcuauuuuaacagaagcaacucaa

SEQ ID NO: 4604 - RNA, 31 nt, Homo Sapiens
cuggggguuccccaucagcccucauuucuua

SEQ ID NO: 4605 - RNA, 32 nt, Homo Sapiens
ggcugucuguuguauucauuguggucauagca

SEQ ID NO: 4606 - RNA, 32 nt, Homo Sapiens
cuagauuuaaauaaucacuaaaaugauuugug

SEQ ID NO: 4607 - RNA, 32 nt, Homo Sapiens
ucugugcggcuauacauauacauacauaaaau

SEQ ID NO: 4608 - RNA, 26 nt, Homo Sapiens
uguauuaaauuaaaguuacagauguc

SEQ ID NO: 4609 - RNA, 32 nt, Homo Sapiens
uggguauuaauauauaguccagacacuuaacu

SEQ ID NO: 4610 - RNA, 32 nt, Homo Sapiens
uuuaucuugcuggugcugaacauucuuugugc

SEQ ID NO: 4611 - RNA, 32 nt, Homo Sapiens
ccuucugggcccagcccugccaccugggccca

SEQ ID NO: 4612 - RNA, 32 nt, Homo Sapiens
gcuggaaauaaucucacgcuugguucccuaaa

SEQ ID NO: 4613 - RNA, 32 nt, Homo Sapiens
acaccuuaccuagcaugagagaauucacacug

SEQ ID NO: 4614 - RNA, 32 nt, Homo Sapiens
cugggugcucuccagcagcugcuccugccuga

SEQ ID NO: 4615 - RNA, 32 nt, Homo Sapiens
ugcauuucuccucuguuuucuuuuuaauauac

SEQ ID NO: 4616 - RNA, 30 nt, Homo Sapiens
ucaucuucauguaggaccuaugaaaauugu

SEQ ID NO: 4617 - RNA, 30 nt, Homo Sapiens
aagagaccacuugcccacccuccugcccac

SEQ ID NO: 4618 - RNA, 32 nt, Homo Sapiens
uacucaccugccucugguggcugggauucaga

SEQ ID NO: 4619 - RNA, 32 nt, Homo Sapiens
aagucaugagagacagcacagagagguuauag

SEQ ID NO: 4620 - RNA, 32 nt, Homo Sapiens
aaaaucugauuguuuucauacauuguucagau

SEQ ID NO: 4621 - RNA, 32 nt, Homo Sapiens
agguagagggggcggcggcggcggcggcggug

SEQ ID NO: 4622 - RNA, 32 nt, Homo Sapiens
aguggucaccuuccucagcucagcugggccac

SEQ ID NO: 4623 - RNA, 32 nt, Homo Sapiens
uuucagaaauuugaauccacaugaaaacaaug

SEQ ID NO: 4624 - RNA, 32 nt, Homo Sapiens
aaauagcauaucuaauaucuagguuacuugag

SEQ ID NO: 4625 - RNA, 32 nt, Homo Sapiens
auccuuuccaaaugugccagcccggggcagcc

SEQ ID NO: 4626 - RNA, 32 nt, Homo Sapiens
cggccgccccuccucaccgaaaagcagaaagc

SEQ ID NO: 4627 - RNA, 29 nt, Homo Sapiens
uuuauuucuauccgguagucacaaauucc

SEQ ID NO: 4628 - RNA, 32 nt, Homo Sapiens
guaaagugaucugcuuaaggucgggcagcaug

SEQ ID NO: 4629 - RNA, 32 nt, Homo Sapiens
uuuuuaggaaaugugcauaccacucaucaaau

SEQ ID NO: 4630 - RNA, 32 nt, Homo Sapiens
uuaaagcaaaaauacuuuugggggaguaaaau

SEQ ID NO: 4631 - RNA, 32 nt, Homo Sapiens
cucccagguuugagggcggucaggcgggguca

SEQ ID NO: 4632 - RNA, 32 nt, Homo Sapiens
auuuuuuggccauugucaguguacaagucuuc

SEQ ID NO: 4633 - RNA, 32 nt, Homo Sapiens
gcauugcgcuggcaucugcuuggcuucuaggg

SEQ ID NO: 4634 - RNA, 32 nt, Homo Sapiens
uccaggcguggggacacgagccaggcgccgcc

SEQ ID NO: 4635 - RNA, 32 nt, Homo Sapiens
cauugguagauccugcugguauuaagccaagu

SEQ ID NO: 4636 - RNA, 32 nt, Homo Sapiens
aacaaagugucuaucugggugugggccccugg

SEQ ID NO: 4637 - RNA, 32 nt, Homo Sapiens
gggcuggcuuccugcggcugcugcuggucuga

SEQ ID NO: 4638 - RNA, 32 nt, Homo Sapiens
gguuucuguuuuucuuacuaggauauauaaaa

SEQ ID NO: 4639 - RNA, 32 nt, Homo Sapiens
agcaaaaccaggaugccuggagcuguggccug

SEQ ID NO: 4640 - RNA, 32 nt, Homo Sapiens
auacacgguaucuauuuggagcaacgguuuuu

SEQ ID NO: 4641 - RNA, 32 nt, Homo Sapiens
uccuucaguuccccaggcuccuccuccaaaug

SEQ ID NO: 4642 - RNA, 32 nt, Homo Sapiens
aacuggagugcuggaaauacaacgacuuugga

SEQ ID NO: 4643 - RNA, 32 nt, Homo Sapiens
uaugguuuggcuauguucccacccaaaucuca

SEQ ID NO: 4644 - RNA, 32 nt, Homo Sapiens
cccacgagaaugccacaggggccgugcacugg

SEQ ID NO: 4645 - RNA, 32 nt, Homo Sapiens
uuuuauuaauuguacucaacccucgcagaaca

SEQ ID NO: 4646 - RNA, 32 nt, Homo Sapiens
uacgaauguauuaaaugugggaagaccuucag

SEQ ID NO: 4647 - RNA, 32 nt, Homo Sapiens
cggccgcggcgguagcgcggaaaacaaugggg

SEQ ID NO: 4648 - RNA, 32 nt, Homo Sapiens
ugggguucuucagccgaaacugagagacguug

SEQ ID NO: 4649 - RNA, 32 nt, Homo Sapiens
ucuccaguacccuccgcaucccccaagugaug

SEQ ID NO: 4650 - RNA, 32 nt, Homo Sapiens
agguuaggguggcaaggcugccucugggucca

SEQ ID NO: 4651 - RNA, 32 nt, Homo Sapiens
uuguuucaaggauuuugagucauaggucugua

SEQ ID NO: 4652 - RNA, 32 nt, Homo Sapiens
aaccuuugucuuuacaugcaagagggauccga

SEQ ID NO: 4653 - RNA, 32 nt, Homo Sapiens
gccuggcugugucuuccccacccagcucuccc

SEQ ID NO: 4654 - RNA, 32 nt, Homo Sapiens
gcccagaccccacuccauuuauaggcacaucu

SEQ ID NO: 4655 - RNA, 32 nt, Homo Sapiens
acagcugcuugagagacaucaccuggagaaga

SEQ ID NO: 4656 - RNA, 32 nt, Homo Sapiens
auuaacuuuuucuuuugauaaguaugauauuc

SEQ ID NO: 4657 - RNA, 32 nt, Homo Sapiens
gucugucucuucccuggaaaccuucugcaaag

SEQ ID NO: 4658 - RNA, 32 nt, Homo Sapiens
gaaacuccagcauggugagggguugggcaggg

SEQ ID NO: 4659 - RNA, 32 nt, Homo Sapiens
cuucuagaaucucguuucuccucuuuccuccu

SEQ ID NO: 4660 - RNA, 32 nt, Homo Sapiens
uaaaaauuaagugaucaugguucuugguaacc

SEQ ID NO: 4661 - RNA, 32 nt, Homo Sapiens
ccagccuuuaucauuccucuuacuuuauccuu

SEQ ID NO: 4662 - RNA, 32 nt, Homo Sapiens
ucccuaccuguguuuaaauuauggauaacucg

SEQ ID NO: 4663 - RNA, 32 nt, Homo Sapiens
gaggggaagagcggcccggcccgagccaugac

SEQ ID NO: 4664 - RNA, 32 nt, Homo Sapiens
guucaggccauguguuugcuucugggaacaau

SEQ ID NO: 4665 - RNA, 32 nt, Homo Sapiens
cagcucugccagcucgaggaggccugcuaggc

SEQ ID NO: 4666 - RNA, 32 nt, Homo Sapiens
caggggagaggagaggccugauggggcagagc

SEQ ID NO: 4667 - RNA, 32 nt, Homo Sapiens
gggaccugcuugcuguggugguugccuagccc

SEQ ID NO: 4668 - RNA, 31 nt, Homo Sapiens
ggauuuguuuauguuauucaagaauguguga

SEQ ID NO: 4669 - RNA, 32 nt, Homo Sapiens
uaauaucucacagauugaauaucuuauggaac

SEQ ID NO: 4670 - RNA, 32 nt, Homo Sapiens
cccaaacccuaucccuucuccuuuucguuugu

SEQ ID NO: 4671 - RNA, 32 nt, Homo Sapiens
caguucuguacacugaaaguuaccacauguaa

SEQ ID NO: 4672 - RNA, 32 nt, Homo Sapiens
gcgccccaguccagcccuaucccaggcucucc

SEQ ID NO: 4673 - RNA, 32 nt, Homo Sapiens
uuuguuuguuuuuauuuuuuuauuuuuuugag

SEQ ID NO: 4674 - RNA, 32 nt, Homo Sapiens
cugcuuccuuuucuccuuccaccaugguugua

SEQ ID NO: 4675 - RNA, 30 nt, Homo Sapiens
cucaaggcaccgcggccgccgggccucgcc

SEQ ID NO: 4676 - RNA, 32 nt, Homo Sapiens
uggugccucacagccagcaugggggauggcuu

SEQ ID NO: 4677 - RNA, 32 nt, Homo Sapiens
ccuagaccacgauuauuuggauuggggggagg

SEQ ID NO: 4678 - RNA, 32 nt, Homo Sapiens
ugcuuuuuaaauaguuuguccuaagguguuua

SEQ ID NO: 4679 - RNA, 30 nt, Homo Sapiens
auacauugacauuaaacaaguagaaaacaa

SEQ ID NO: 4680 - RNA, 32 nt, Homo Sapiens
cgccgccacugcguccguccccggugagcgcc

SEQ ID NO: 4681 - RNA, 32 nt, Homo Sapiens
uauuauuuucuuuuuggucugaguaggcuugu

SEQ ID NO: 4682 - RNA, 32 nt, Homo Sapiens
ggcccagccccgcucaccgcugcaccccccuc

SEQ ID NO: 4683 - RNA, 32 nt, Homo Sapiens
ucugugucuacaagagcagccucuccggcuac

SEQ ID NO: 4684 - RNA, 32 nt, Homo Sapiens
gcgagcccuaugucaggcacuccaccuggggg

SEQ ID NO: 4685 - RNA, 32 nt, Homo Sapiens
uguaucucuccaugucacgcgcuccugggcca

SEQ ID NO: 4686 - RNA, 32 nt, Homo Sapiens
gguauugacuuuucguaucuuuuaucuucaca

SEQ ID NO: 4687 - RNA, 29 nt, Homo Sapiens
guugaaucuucauucagaggaaaauauuc

SEQ ID NO: 4688 - RNA, 31 nt, Homo Sapiens
uugacuccacccucaucacccacacucccua

SEQ ID NO: 4689 - RNA, 32 nt, Homo Sapiens
ucuuguuuccaugaauuauaucaguauucuaa

SEQ ID NO: 4690 - RNA, 32 nt, Homo Sapiens
gaaaauaauaaaugucaauauuuacagaugcu

SEQ ID NO: 4691 - RNA, 32 nt, Homo Sapiens
gcuuguuacaacaaaauuaguuuguaucuugg

SEQ ID NO: 4692 - RNA, 32 nt, Homo Sapiens
uagagugcccagcagagguuugcugacaggug

SEQ ID NO: 4693 - RNA, 32 nt, Homo Sapiens
cccgggugucucccggguacagauggagucgu

SEQ ID NO: 4694 - RNA, 30 nt, Homo Sapiens
gaucaaugcaacaaaaucaaggugcgaaaa

SEQ ID NO: 4695 - RNA, 32 nt, Homo Sapiens
ggccucaguuuaggaacaggggccacaacagg

SEQ ID NO: 4696 - RNA, 32 nt, Homo Sapiens
cagguguucucuucuauauuccgggugccauu

SEQ ID NO: 4697 - RNA, 32 nt, Homo Sapiens
aauuuucugucauggauaaugugcuugagucc

SEQ ID NO: 4698 - RNA, 32 nt, Homo Sapiens
ggucccuguuuucucuccuaacaugcugagau

SEQ ID NO: 4699 - RNA, 32 nt, Homo Sapiens
cucagcagcucuucuggcuguguugucagcac

SEQ ID NO: 4700 - RNA, 32 nt, Homo Sapiens
ucgccucacuccugggccugcugggcuugugg

SEQ ID NO: 4701 - RNA, 32 nt, Homo Sapiens
cucauuuggguucagaauaaacaugcccugaa

SEQ ID NO: 4702 - RNA, 32 nt, Homo Sapiens
ucccuguccuuccccagugccugccuccuucc

SEQ ID NO: 4703 - RNA, 32 nt, Homo Sapiens
aacggagagcugaccagccccggagcggccua

SEQ ID NO: 4704 - RNA, 32 nt, Homo Sapiens
ucaaaacuuuuguuucauuucaugccuuacuu

SEQ ID NO: 4705 - RNA, 32 nt, Homo Sapiens
gaaggccuugccccaaacuaccagcguuucug

SEQ ID NO: 4706 - RNA, 32 nt, Homo Sapiens
cugccuggggaacugauuaagggugagcagag

SEQ ID NO: 4707 - RNA, 32 nt, Homo Sapiens
aaguugugaaucaagauucaacauacugagaa

SEQ ID NO: 4708 - RNA, 32 nt, Homo Sapiens
auuaccucagcuauuccaaccgcaccaaccac

SEQ ID NO: 4709 - RNA, 32 nt, Homo Sapiens
gcgaugcccucccuucggggccccggcggccc

SEQ ID NO: 4710 - RNA, 32 nt, Homo Sapiens
ugcccaaauguuuucccaugggauauguaccg

SEQ ID NO: 4711 - RNA, 32 nt, Homo Sapiens
guguagaugcuuuuuucuuuguuguuuaaaua

SEQ ID NO: 4712 - RNA, 32 nt, Homo Sapiens
acauguauuuccuuugaguaggacauuagcuu

SEQ ID NO: 4713 - RNA, 32 nt, Homo Sapiens
caauggucacagucccugguaccugaaaaggu

SEQ ID NO: 4714 - RNA, 32 nt, Homo Sapiens
caguuuaaauuaaugucucaaagcugugcagu

SEQ ID NO: 4715 - RNA, 32 nt, Homo Sapiens
ugaagagucugcuuuaaaugggaaaacaacgu

SEQ ID NO: 4716 - RNA, 32 nt, Homo Sapiens
acuacaucgcacucgucaguugucaguucugg

SEQ ID NO: 4717 - RNA, 32 nt, Homo Sapiens
gcgccagccuccccgcccgcucucuuuucucc

SEQ ID NO: 4718 - RNA, 32 nt, Homo Sapiens
agcucuauguuuuaauuuuuuauauacaauua

SEQ ID NO: 4719 - RNA, 32 nt, Homo Sapiens
cugaaauuaaccaaucaguuuauuuaaaucaa

SEQ ID NO: 4720 - RNA, 32 nt, Homo Sapiens
cauacacccuccauugcuuggugcugggguug

SEQ ID NO: 4721 - RNA, 32 nt, Homo Sapiens
guugcggacccugacgccggcgcggggcgcgc

SEQ ID NO: 4722 - RNA, 32 nt, Homo Sapiens
gccugucuaaaaaacuacugccccacuucaaa

SEQ ID NO: 4723 - RNA, 32 nt, Homo Sapiens
gaccaggcgcgguggcucuugccuguaguccc

SEQ ID NO: 4724 - RNA, 32 nt, Homo Sapiens
cuuuauguucaauaaaaagagaauaagcagga

SEQ ID NO: 4725 - RNA, 32 nt, Homo Sapiens
cccuuggaagauacuuugaggaccccagugau

SEQ ID NO: 4726 - RNA, 32 nt, Homo Sapiens
uuacgcagcugauguuuacaucgccuagucaa

SEQ ID NO: 4727 - RNA, 32 nt, Homo Sapiens
aaucucccauuuuuguaagaaaauauauauug

SEQ ID NO: 4728 - RNA, 29 nt, Homo Sapiens
guggcuaggccuuuccugccgagugcucu

SEQ ID NO: 4729 - RNA, 32 nt, Homo Sapiens
cuauauaauaauaucaaacaaucccuuuaaga

SEQ ID NO: 4730 - RNA, 32 nt, Homo Sapiens
aagcuccauugaccgaagccacagggcagcau

SEQ ID NO: 4731 - RNA, 32 nt, Homo Sapiens
auugcauuuuaaaaauauuguuugauuuuucu

SEQ ID NO: 4732 - RNA, 32 nt, Homo Sapiens
auggagagcuggagccuggugcccuaaccucu

SEQ ID NO: 4733 - RNA, 32 nt, Homo Sapiens
aaacuggcuucuaauuuuuuuaaguacaguau

SEQ ID NO: 4734 - RNA, 32 nt, Homo Sapiens
gagccagagccugguccugcagccuuucucgc

SEQ ID NO: 4735 - RNA, 32 nt, Homo Sapiens
ccgucucuacuaaaaauacaaacaaauuagcc

SEQ ID NO: 4736 - RNA, 32 nt, Homo Sapiens
ggccggugggagagggaggcgagccgaccgcu

SEQ ID NO: 4737 - RNA, 32 nt, Homo Sapiens
ggcugcccggcggcgccgcgaccgccuuccuu

SEQ ID NO: 4738 - RNA, 30 nt, Homo Sapiens
acacggggcaggcggguuucucuuccgggg

SEQ ID NO: 4739 - RNA, 32 nt, Homo Sapiens
cuucaacugaaaaauacaaucuguggauuaug

SEQ ID NO: 4740 - RNA, 32 nt, Homo Sapiens
aucggagugggaagagacacagggaaauugag

SEQ ID NO: 4741 - RNA, 32 nt, Homo Sapiens
gguaguugcccauuuacaaguuccaguuaugu

SEQ ID NO: 4742 - RNA, 32 nt, Homo Sapiens
gaagaccccagugaucugaucccgggaucccg

SEQ ID NO: 4743 - RNA, 32 nt, Homo Sapiens
augugccuggugcaugagaaacucuuguuuca

SEQ ID NO: 4744 - RNA, 32 nt, Homo Sapiens
aucaaucgacgaagccauggcugugacaaacc

SEQ ID NO: 4745 - RNA, 32 nt, Homo Sapiens
aaccucaaaaauuguaguucaugucagucagu

SEQ ID NO: 4746 - RNA, 32 nt, Homo Sapiens
cccccuggagggcauggugucgggggguggca

SEQ ID NO: 4747 - RNA, 32 nt, Homo Sapiens
uuguuauuggacuugaaacucccuuugaccuc

SEQ ID NO: 4748 - RNA, 32 nt, Homo Sapiens
ccagcggcugcacguggacagagggcggaaug

SEQ ID NO: 4749 - RNA, 31 nt, Homo Sapiens
gacuggugcuccaggaaccagguggugacga

SEQ ID NO: 4750 - RNA, 32 nt, Homo Sapiens
ucugcaaacaaauggcgugucuuucucacaaa

SEQ ID NO: 4751 - RNA, 29 nt, Homo Sapiens
gaccagccugggcaacauggcaaaaaccc

SEQ ID NO: 4752 - RNA, 32 nt, Homo Sapiens
ugagagaagauaccuucaguggcugccaggcu

SEQ ID NO: 4753 - RNA, 32 nt, Homo Sapiens
uccuuauaaaaagcaaauaccuggauuuacaa

SEQ ID NO: 4754 - RNA, 32 nt, Homo Sapiens
uuuccccuggcuucaucaacuacaucaguggu

SEQ ID NO: 4755 - RNA, 32 nt, Homo Sapiens
gggaaggcccccagcccucagccccuucccug

SEQ ID NO: 4756 - RNA, 32 nt, Homo Sapiens
uugccuuccaccccagcuuccagcacaaccgc

SEQ ID NO: 4757 - RNA, 30 nt, Homo Sapiens
gggagguguuagugcaugcaaggguugaac

SEQ ID NO: 4758 - RNA, 32 nt, Homo Sapiens
augggaagaagccccacguuguccuugaauuc

SEQ ID NO: 4759 - RNA, 32 nt, Homo Sapiens
gcuccuaccugcagcacccccagcuccgacuc

SEQ ID NO: 4760 - RNA, 32 nt, Homo Sapiens
uugaggcaggggcuugcccuuuagcccaggag

SEQ ID NO: 4761 - RNA, 32 nt, Homo Sapiens
aagggauggcauugaaaaaauauauuuaguuu

SEQ ID NO: 4762 - RNA, 32 nt, Homo Sapiens
caggauuucuaaaauucugugauucagauuug

SEQ ID NO: 4763 - RNA, 32 nt, Homo Sapiens
gacaaggccugggaaaccugcccucgcugaga

SEQ ID NO: 4764 - RNA, 32 nt, Homo Sapiens
aaccccuuuccacgagcuauauuuauuucucc

SEQ ID NO: 4765 - RNA, 32 nt, Homo Sapiens
aagcuguccaacaaaaaguuuuccaaguaaua

SEQ ID NO: 4766 - RNA, 32 nt, Homo Sapiens
agcuguggaaagggcaaccugugguuucucug

SEQ ID NO: 4767 - RNA, 32 nt, Homo Sapiens
agauaaggaaaugugauaauagcuguuucauc

SEQ ID NO: 4768 - RNA, 32 nt, Homo Sapiens
guccccugacagugaguuguguggugggggca

SEQ ID NO: 4769 - RNA, 32 nt, Homo Sapiens
uuucuuaaaggcuuauaaaaauuuugcugaaa

SEQ ID NO: 4770 - RNA, 32 nt, Homo Sapiens
uuauaaauauauauuuuaucagacaucaugaa

SEQ ID NO: 4771 - RNA, 32 nt, Homo Sapiens
agauuaagacauuuuuugaaaagcaguagagu

SEQ ID NO: 4772 - RNA, 32 nt, Homo Sapiens
ugaauuuuucccuuuauauaauuuucaccuuu

SEQ ID NO: 4773 - RNA, 32 nt, Homo Sapiens
cuugcaaagacccuaaacaaaaaguuaaguuu

SEQ ID NO: 4774 - RNA, 32 nt, Homo Sapiens
aggcuacaauuuaugaaaaaauuucuucaaua

SEQ ID NO: 4775 - RNA, 32 nt, Homo Sapiens
ggagggccagggagguugggggugggagugaa

SEQ ID NO: 4776 - RNA, 32 nt, Homo Sapiens
aauauuuaucauauugauacaaacugugaccu

SEQ ID NO: 4777 - RNA, 32 nt, Homo Sapiens
uuuuuuaaagagaauucuagaauucuauuuug

SEQ ID NO: 4778 - RNA, 32 nt, Homo Sapiens
ucuguuacugucaaaaacguuuucaaaaauga

SEQ ID NO: 4779 - RNA, 31 nt, Homo Sapiens
ccuggcauugguaaugaaagguugguuuuug

SEQ ID NO: 4780 - RNA, 32 nt, Homo Sapiens
accugggaugagaaacgacagguggaagguug

SEQ ID NO: 4781 - RNA, 32 nt, Homo Sapiens
auuuuuaaaaauuaccauuaaaaaaaaaaaag

SEQ ID NO: 4782 - RNA, 32 nt, Homo Sapiens
aaugaaccaaauucacaaucaaaauuuccaau

SEQ ID NO: 4783 - RNA, 32 nt, Homo Sapiens
gugaauaguguuucucucuucuucccaaaaug

SEQ ID NO: 4784 - RNA, 32 nt, Homo Sapiens
gacaaggauugggucccacauaaagcagucag

SEQ ID NO: 4785 - RNA, 32 nt, Homo Sapiens
ccgcgccccuccccucacgggcucuggccuua

SEQ ID NO: 4786 - RNA, 32 nt, Homo Sapiens
gugugccuucgcguccggguugggagcuugcu

SEQ ID NO: 4787 - RNA, 32 nt, Homo Sapiens
ccgugaaaggggaucaagggauggcugaacag

SEQ ID NO: 4788 - RNA, 32 nt, Homo Sapiens
cccagcccuggccuguggccuuucuugugacc

SEQ ID NO: 4789 - RNA, 32 nt, Homo Sapiens
ugcaucagaaaaaugaaaaaacagaggaaaau

SEQ ID NO: 4790 - RNA, 32 nt, Homo Sapiens
aagagcaaaauuaugaaaccucuagagauuug

SEQ ID NO: 4791 - RNA, 32 nt, Homo Sapiens
acgugccagguccgcccggugccggcuuccuc

SEQ ID NO: 4792 - RNA, 32 nt, Homo Sapiens
agugaggagccgcccugaccgcccggccccgc

SEQ ID NO: 4793 - RNA, 32 nt, Homo Sapiens
agaacugggaaaacagugaaucuuauggugga

SEQ ID NO: 4794 - RNA, 32 nt, Homo Sapiens
caggggucaaaggcaggcagggacugugaaau

SEQ ID NO: 4795 - RNA, 32 nt, Homo Sapiens
ggggaguaaaauguugcuggaggcauuaggca

SEQ ID NO: 4796 - RNA, 32 nt, Homo Sapiens
ccuccgggacaggcaugaaggaucugaguucu

SEQ ID NO: 4797 - RNA, 32 nt, Homo Sapiens
cagcuaaugggacacuaauggggcggugagag

SEQ ID NO: 4798 - RNA, 32 nt, Homo Sapiens
uacuguuuuacaacagcaugucuuagaauucu

SEQ ID NO: 4799 - RNA, 32 nt, Homo Sapiens
uuucuguaaaaugggauaguaguggcaaucuc

SEQ ID NO: 4800 - RNA, 32 nt, Homo Sapiens
augcugugcggaacugcgucagggcaaauguc

SEQ ID NO: 4801 - RNA, 32 nt, Homo Sapiens
cauugggaagcaguauaagaaaaacuucagca

SEQ ID NO: 4802 - RNA, 32 nt, Homo Sapiens
gcuuucugacccggaauggaggaggcggagga

SEQ ID NO: 4803 - RNA, 32 nt, Homo Sapiens
gggaagugggaaucguuagguucguucuggac

SEQ ID NO: 4804 - RNA, 31 nt, Homo Sapiens
accaguggcaacugccugcacagcagagaua

SEQ ID NO: 4805 - RNA, 32 nt, Homo Sapiens
ugcagcgcuggucgcagcccucagcugcgccg

SEQ ID NO: 4806 - RNA, 31 nt, Homo Sapiens
uaugugcccaucacucucagagaccacguuu

SEQ ID NO: 4807 - RNA, 32 nt, Homo Sapiens
augugucuuuccuggugacuaggaugucgucg

SEQ ID NO: 4808 - RNA, 32 nt, Homo Sapiens
aguggggcagggggcugcuuauucacucuggg

SEQ ID NO: 4809 - RNA, 32 nt, Homo Sapiens
uaugcuguauuuucuuuuuauuuuuaaauuag

SEQ ID NO: 4810 - RNA, 32 nt, Homo Sapiens
gcaggucucggggcuccuggguugcuucugga

SEQ ID NO: 4811 - RNA, 32 nt, Homo Sapiens
ugucgcuggaccugugucugcacuguuuaauu

SEQ ID NO: 4812 - RNA, 32 nt, Homo Sapiens
uuuaugaucuuuuaaguuucuauacauguauu

SEQ ID NO: 4813 - RNA, 32 nt, Homo Sapiens
uuuucuguccacaaauuuugugaagaugaaaa

SEQ ID NO: 4814 - RNA, 32 nt, Homo Sapiens
uccgcgcgcucgcggcagcuccccguggaggu

SEQ ID NO: 4815 - RNA, 32 nt, Homo Sapiens
aaaaaaugaugaugaugauaaaaaccacgacc

SEQ ID NO: 4816 - RNA, 32 nt, Homo Sapiens
ucagugauuaacuuaagauuugcucauguggg

SEQ ID NO: 4817 - RNA, 32 nt, Homo Sapiens
gccgcaugccacccgcgccgcgcccagcauuc

SEQ ID NO: 4818 - RNA, 32 nt, Homo Sapiens
cacccccgugcagaggcagcugguggacaucc

SEQ ID NO: 4819 - RNA, 28 nt, Homo Sapiens
agggcagcaugggcgaugaggaaugcca

SEQ ID NO: 4820 - RNA, 32 nt, Homo Sapiens
caguugggaauuaaccacucaauucaauagua

SEQ ID NO: 4821 - RNA, 32 nt, Homo Sapiens
cugcaggccguggucagggacggcaccaucuc

SEQ ID NO: 4822 - RNA, 32 nt, Homo Sapiens
caucacagccccucacugggaccagggggccu

SEQ ID NO: 4823 - RNA, 32 nt, Homo Sapiens
agccugaagugguccaacuugggguuccccag

SEQ ID NO: 4824 - RNA, 31 nt, Homo Sapiens
aauaugacaaauugucauggguguuccacuu

SEQ ID NO: 4825 - RNA, 32 nt, Homo Sapiens
auccugggguuucaccugagccuucuguuugg

SEQ ID NO: 4826 - RNA, 32 nt, Homo Sapiens
uccuccacccucagccuccaguagcaucccua

SEQ ID NO: 4827 - RNA, 32 nt, Homo Sapiens
aaggaugagcagagcccggagcuccggccugc

SEQ ID NO: 4828 - RNA, 32 nt, Homo Sapiens
auacuucuuaugucuuaauuaguaaaauauaa

SEQ ID NO: 4829 - RNA, 32 nt, Homo Sapiens
uugcggggggcuggggaugcaguguuuuuugg

SEQ ID NO: 4830 - RNA, 32 nt, Homo Sapiens
ccugcccacaucugcugguuuggggcuucagu

SEQ ID NO: 4831 - RNA, 31 nt, Homo Sapiens
gcggggcggcgcugccugcaugacccuccgg

SEQ ID NO: 4832 - RNA, 32 nt, Homo Sapiens
uuccccccaucccuggaucccaagaguggugc

SEQ ID NO: 4833 - RNA, 32 nt, Homo Sapiens
uaggaaaugggaagaggagucaacuagaggca

SEQ ID NO: 4834 - RNA, 32 nt, Homo Sapiens
acugagccaagcccccuaacuuugggccuaga

SEQ ID NO: 4835 - RNA, 32 nt, Homo Sapiens
uugaaauuuacuuuuuuauaguuuacaggaau

SEQ ID NO: 4836 - RNA, 32 nt, Homo Sapiens
gggguagauuguggcaaagaaugcucuggcug

SEQ ID NO: 4837 - RNA, 32 nt, Homo Sapiens
ucacaucauuugcugcccacuaguucaaucgc

SEQ ID NO: 4838 - RNA, 32 nt, Homo Sapiens
cugaccaaucuggucuucguguggucauuagc

SEQ ID NO: 4839 - RNA, 32 nt, Homo Sapiens
aacaucagagaauuuauaucaaagaaaaaccc

SEQ ID NO: 4840 - RNA, 32 nt, Homo Sapiens
uucuuauugcuaaaaauacuaaaugucauggg

SEQ ID NO: 4841 - RNA, 32 nt, Homo Sapiens
guaguuucugugucugaugaguaucucucugc

SEQ ID NO: 4842 - RNA, 32 nt, Homo Sapiens
aagcaaacccugcucuuaggggcucaccuagg

SEQ ID NO: 4843 - RNA, 32 nt, Homo Sapiens
cugggcugugcugauagugcugagggagauag

SEQ ID NO: 4844 - RNA, 32 nt, Homo Sapiens
agccucagaaaagagagaacagggagagccuc

SEQ ID NO: 4845 - RNA, 32 nt, Homo Sapiens
augagcagcugagcucuuugguguggacaccg

SEQ ID NO: 4846 - RNA, 30 nt, Homo Sapiens
ggcgcguguccuugcaugcaaaauucuacu

SEQ ID NO: 4847 - RNA, 32 nt, Homo Sapiens
uucagaggcagacaccuauuacagagccagga

SEQ ID NO: 4848 - RNA, 32 nt, Homo Sapiens
ucugaggugcaaaacauagauauagaacugaa

SEQ ID NO: 4849 - RNA, 32 nt, Homo Sapiens
caucugggaaagcagagcugccagccuguugc

SEQ ID NO: 4850 - RNA, 32 nt, Homo Sapiens
ucaagauccuuuaaaauuuucccuuuaauuuc

SEQ ID NO: 4851 - RNA, 32 nt, Homo Sapiens
gacaagacuuauuuuucucuucugggacuuga

SEQ ID NO: 4852 - RNA, 32 nt, Homo Sapiens
uacaagugugagccaccacaccuggcuccaga

SEQ ID NO: 4853 - RNA, 32 nt, Homo Sapiens
caucgucuaccuaccucugccauccucuacca

SEQ ID NO: 4854 - RNA, 32 nt, Homo Sapiens
uugcccuugacaaagaaauguaccaaucucca

SEQ ID NO: 4855 - RNA, 32 nt, Homo Sapiens
acaacugccuggggggcaggguuaggaaucuc

SEQ ID NO: 4856 - RNA, 32 nt, Homo Sapiens
uuacaggugugagccacugcacccagcccacu

SEQ ID NO: 4857 - RNA, 32 nt, Homo Sapiens
ucgggguggggguauguugggaggcguggcgg

SEQ ID NO: 4858 - RNA, 32 nt, Homo Sapiens
agggauuuaauaccuuuuuuaugcuuauuuuu

SEQ ID NO: 4859 - RNA, 32 nt, Homo Sapiens
aaacaugcuuugcuuuaugaauuuugucucuu

SEQ ID NO: 4860 - RNA, 32 nt, Homo Sapiens
caggcccugcccaccuggggccccacauccag

SEQ ID NO: 4861 - RNA, 32 nt, Homo Sapiens
agguugggugggcugaugaacacacacugguu

SEQ ID NO: 4862 - RNA, 32 nt, Homo Sapiens
cuggacccagcauggaugguggaaccacagua

SEQ ID NO: 4863 - RNA, 32 nt, Homo Sapiens
ucuccacuucuguggacaccccaaauaggaag

SEQ ID NO: 4864 - RNA, 32 nt, Homo Sapiens
acacucauauugcuuaaauauuacauauuagg

SEQ ID NO: 4865 - RNA, 32 nt, Homo Sapiens
acgucuguagcuaugucuauguugcauacaug

SEQ ID NO: 4866 - RNA, 32 nt, Homo Sapiens
gauugaucuuuacccaagagacuuguggaauu

SEQ ID NO: 4867 - RNA, 32 nt, Homo Sapiens
agcaggcgcaggcuccgugaggaggcaaggua

SEQ ID NO: 4868 - RNA, 32 nt, Homo Sapiens
uuuuccuauaaaaucuuaaaauaaaauuagga

SEQ ID NO: 4869 - RNA, 32 nt, Homo Sapiens
ccacccuccuccaaucacacagaugcccaaga

SEQ ID NO: 4870 - RNA, 32 nt, Homo Sapiens
caggugcugauagccuucaggggaggaccugc

SEQ ID NO: 4871 - RNA, 32 nt, Homo Sapiens
uugacacgauaagccucaucugauggaagaga

SEQ ID NO: 4872 - RNA, 32 nt, Homo Sapiens
guuauguuugcacuuuguauauugguugaaac

SEQ ID NO: 4873 - RNA, 32 nt, Homo Sapiens
uuccagcaguccgcgagcugccgucggcuccg

SEQ ID NO: 4874 - RNA, 32 nt, Homo Sapiens
caaaacuccaaacaaguuccccgguggaauga

SEQ ID NO: 4875 - RNA, 32 nt, Homo Sapiens
uccuuucccacuuuuucuugcagaucggccug

SEQ ID NO: 4876 - RNA, 32 nt, Homo Sapiens
ggccgugguggcggcggcgcccggcauguuuc

SEQ ID NO: 4877 - RNA, 32 nt, Homo Sapiens
uuauuccugucuccucuuucuuuuucccugug

SEQ ID NO: 4878 - RNA, 32 nt, Homo Sapiens
aaugucauuucccucuacugccucuuccugcc

SEQ ID NO: 4879 - RNA, 32 nt, Homo Sapiens
cagugagacgcccugcacacacagaaagccaa

SEQ ID NO: 4880 - RNA, 32 nt, Homo Sapiens
cauagagagagacaguuuuccaaacuguguca

SEQ ID NO: 4881 - RNA, 32 nt, Homo Sapiens
cagcucuaacauuaaugucuccaggauuccau

SEQ ID NO: 4882 - RNA, 32 nt, Homo Sapiens
agaggggagcuuggggggcgccugcugccaag

SEQ ID NO: 4883 - RNA, 32 nt, Homo Sapiens
uaggggcagggagaagacaggucucaagaaaa

SEQ ID NO: 4884 - RNA, 32 nt, Homo Sapiens
gaacuucugauccaagggauuuuauagagauu

SEQ ID NO: 4885 - RNA, 32 nt, Homo Sapiens
uugaguaugaauuuaaaguaaccagacugccu

SEQ ID NO: 4886 - RNA, 32 nt, Homo Sapiens
gauuauuucuucauguguguuuaguaucugaa

SEQ ID NO: 4887 - RNA, 32 nt, Homo Sapiens
aagggcaaggagccuuccucauucaggaaauc

SEQ ID NO: 4888 - RNA, 32 nt, Homo Sapiens
ucccgugggugggggcgggccuggcuucccau

SEQ ID NO: 4889 - RNA, 32 nt, Homo Sapiens
cugcgaacgggcaggcgcgcgcggggcucggc

SEQ ID NO: 4890 - RNA, 29 nt, Homo Sapiens
acgucagggugucucaguuugaaaccagu

SEQ ID NO: 4891 - RNA, 32 nt, Homo Sapiens
auuuggaguauuuuaaugcuaucuuugggagu

SEQ ID NO: 4892 - RNA, 30 nt, Homo Sapiens
cccagcugugugucaccagaagcuuucccg

SEQ ID NO: 4893 - RNA, 32 nt, Homo Sapiens
ggacggagaaaccucggcaaagacaaaggccc

SEQ ID NO: 4894 - RNA, 32 nt, Homo Sapiens
uguuguuuauauauuuuuaaaaguuacuuuua

SEQ ID NO: 4895 - RNA, 31 nt, Homo Sapiens
aggagaccggccuguuccugaguuugaguag

SEQ ID NO: 4896 - RNA, 32 nt, Homo Sapiens
guauugcaaaaaggggaggaaauacacaacaa

SEQ ID NO: 4897 - RNA, 32 nt, Homo Sapiens
ugugaggacacagagggaaggcucugucuaug

SEQ ID NO: 4898 - RNA, 32 nt, Homo Sapiens
gcgccugcccucugcuggcuaggaccgggccc

SEQ ID NO: 4899 - RNA, 32 nt, Homo Sapiens
ucagcaucaccucaucacuuaagcaaaaagga

SEQ ID NO: 4900 - RNA, 32 nt, Homo Sapiens
cgcaggagggucauagaggaagggagggcgca

SEQ ID NO: 4901 - RNA, 32 nt, Homo Sapiens
uccaaguuacuauuuuuucagaacaucaccga

SEQ ID NO: 4902 - RNA, 32 nt, Homo Sapiens
uccgcccguagcugucgggucccggccccgcu

SEQ ID NO: 4903 - RNA, 32 nt, Homo Sapiens
uagggucugggggcuuagaggcugggauggcu

SEQ ID NO: 4904 - RNA, 32 nt, Homo Sapiens
ucugaauucauaaaaauaaccaaaaaauguga

SEQ ID NO: 4905 - RNA, 31 nt, Homo Sapiens
gagcuuuggacacagaaccaguuuggaaaag

SEQ ID NO: 4906 - RNA, 32 nt, Homo Sapiens
agauccggccugccaacccugcgguuaaaugu

SEQ ID NO: 4907 - RNA, 32 nt, Homo Sapiens
cugccucuuuugcuuacuugcugccuguucaa

SEQ ID NO: 4908 - RNA, 32 nt, Homo Sapiens
caagaacaaaagacaacugaaagacguuucca

SEQ ID NO: 4909 - RNA, 32 nt, Homo Sapiens
ucuaccaaaaauacaaaaauuaaccaugcgug

SEQ ID NO: 4910 - RNA, 32 nt, Homo Sapiens
cggaggugguagcggcgccgggcgcgcuccgc

SEQ ID NO: 4911 - RNA, 32 nt, Homo Sapiens
aaaacaacauucaauaauagucuuuguguuua

SEQ ID NO: 4912 - RNA, 32 nt, Homo Sapiens
gcuucuagugaaaucuagaggaaggcucaaag

SEQ ID NO: 4913 - RNA, 32 nt, Homo Sapiens
aucaggucagcuugcaagguugaugcaauauc

SEQ ID NO: 4914 - RNA, 32 nt, Homo Sapiens
gaccguuugacuguuuguggcuugggccucug

SEQ ID NO: 4915 - RNA, 32 nt, Homo Sapiens
cuccaaacacugggcucugaggaguggaguuc

SEQ ID NO: 4916 - RNA, 32 nt, Homo Sapiens
ugacuuuuuacuuauuugauaaaaauuaaaga

SEQ ID NO: 4917 - RNA, 32 nt, Homo Sapiens
uccugcacugaggagauuaacugaagugacag

SEQ ID NO: 4918 - RNA, 32 nt, Homo Sapiens
aguggcaugaucucagcuccgccuccuggguu

SEQ ID NO: 4919 - RNA, 32 nt, Homo Sapiens
aagcaaaacuugacagcaaacaucuaaaauga

SEQ ID NO: 4920 - RNA, 32 nt, Homo Sapiens
uagagauuagacguucuuguucugggauguua

SEQ ID NO: 4921 - RNA, 32 nt, Homo Sapiens
ccauuccgcucccaccccagccggcugcguuc

SEQ ID NO: 4922 - RNA, 32 nt, Homo Sapiens
ugaagggccuugagcaucuggauucugccuaa

SEQ ID NO: 4923 - RNA, 32 nt, Homo Sapiens
ugguugaccugggcugguuuucccugucucug

SEQ ID NO: 4924 - RNA, 32 nt, Homo Sapiens
cccuuggaggccgggaggaagugggguuggaa

SEQ ID NO: 4925 - RNA, 32 nt, Homo Sapiens
uuguguugggcagugucaucuugcuuacaaac

SEQ ID NO: 4926 - RNA, 32 nt, Homo Sapiens
auagaucaucaugguggcaccaaagagucaca

SEQ ID NO: 4927 - RNA, 32 nt, Homo Sapiens
auguccucaucucccaauaaacaugacuuuag

SEQ ID NO: 4928 - RNA, 32 nt, Homo Sapiens
gaaggggauuaccuuguaagaccaucuggcgc

SEQ ID NO: 4929 - RNA, 32 nt, Homo Sapiens
cugugcugcccuccuggagaaccgggacacgg

SEQ ID NO: 4930 - RNA, 32 nt, Homo Sapiens
uaagccaaaaggaaacaaaauaaaaaugaccc

SEQ ID NO: 4931 - RNA, 32 nt, Homo Sapiens
aaggacuauauaauucauagugccaaaagugg

SEQ ID NO: 4932 - RNA, 32 nt, Homo Sapiens
ggcggccccaaccggccggaccucagcaauaa

SEQ ID NO: 4933 - RNA, 32 nt, Homo Sapiens
aacaaaauguacaaaaagaacaauauaauuuu

SEQ ID NO: 4934 - RNA, 32 nt, Homo Sapiens
gucugggccaucucuuaggugagacaguugcc

SEQ ID NO: 4935 - RNA, 32 nt, Homo Sapiens
gagacuggccccaggccccagccacggcugca

SEQ ID NO: 4936 - RNA, 32 nt, Homo Sapiens
gugagggcgagggcgagggcgaggcggugcuc

SEQ ID NO: 4937 - RNA, 32 nt, Homo Sapiens
auaauacagaauuuuaaaaugcacuuuguacc

SEQ ID NO: 4938 - RNA, 32 nt, Homo Sapiens
aacuguuccuuccaccucuucagccccggcag

SEQ ID NO: 4939 - RNA, 28 nt, Homo Sapiens
aaagggguuacaggguccaugcaagucu

SEQ ID NO: 4940 - RNA, 32 nt, Homo Sapiens
auuucacugaaauuuauaauacacuuauccau

SEQ ID NO: 4941 - RNA, 31 nt, Homo Sapiens
ccugugaaauaaaacucaauauuuuaauaaa

SEQ ID NO: 4942 - RNA, 32 nt, Homo Sapiens
gccaacaucaccaccccuccccagaggcccug

SEQ ID NO: 4943 - RNA, 32 nt, Homo Sapiens
ugauccuagaaaagaggcuguucaggaugggg

SEQ ID NO: 4944 - RNA, 32 nt, Homo Sapiens
ccugcucauuugcugccaaagaccacuugggg

SEQ ID NO: 4945 - RNA, 32 nt, Homo Sapiens
caugcaggaugaugacagaauugaucugaugu

SEQ ID NO: 4946 - RNA, 32 nt, Homo Sapiens
uguggcaccuuuucuuuuucucccuaaacugu

SEQ ID NO: 4947 - RNA, 32 nt, Homo Sapiens
ugaaacuucucaguccagcaguuuccaguccu

SEQ ID NO: 4948 - RNA, 32 nt, Homo Sapiens
cauuugaaguuccacagugaacccaucagaga

SEQ ID NO: 4949 - RNA, 32 nt, Homo Sapiens
ggggcagcguccuuccuucucucggccccuug

SEQ ID NO: 4950 - RNA, 32 nt, Homo Sapiens
uggcaaaacuaaauaaacguaaaagaaauaca

SEQ ID NO: 4951 - RNA, 32 nt, Homo Sapiens
ggacuggggcugauagcccaccccgcccccac

SEQ ID NO: 4952 - RNA, 32 nt, Homo Sapiens
accccagaacagagcagagccaccuccuauag

SEQ ID NO: 4953 - RNA, 32 nt, Homo Sapiens
auacugcauuuuuaaaauagugucucagcuaa

SEQ ID NO: 4954 - RNA, 32 nt, Homo Sapiens
gccacuacccagagagcagcugcuguucuuua

SEQ ID NO: 4955 - RNA, 32 nt, Homo Sapiens
uccuggccuugacuuccccaucugcaaaucag

SEQ ID NO: 4956 - RNA, 32 nt, Homo Sapiens
ccacaguggucuuuuuaaaccaccugcccacu

SEQ ID NO: 4957 - RNA, 32 nt, Homo Sapiens
uaaugggagaaaucauggaaagaaauucucaa

SEQ ID NO: 4958 - RNA, 32 nt, Homo Sapiens
cuuauguggaaccaccgcguccugccuuggag

SEQ ID NO: 4959 - RNA, 32 nt, Homo Sapiens
gccagggagaggagggcggguggggaccacuc

SEQ ID NO: 4960 - RNA, 32 nt, Homo Sapiens
uuuuugaaguuuuuaaauuuccugauaagauu

SEQ ID NO: 4961 - RNA, 32 nt, Homo Sapiens
gugcccagucugguccccaaacaucaauuucu

SEQ ID NO: 4962 - RNA, 32 nt, Homo Sapiens
gacucaggucuccgccaugcacgcguggacuc

SEQ ID NO: 4963 - RNA, 32 nt, Homo Sapiens
guggggagucugccucccagacuggcuacugu

SEQ ID NO: 4964 - RNA, 32 nt, Homo Sapiens
gagucaguauuuucuuuuuaaagucguguaau

SEQ ID NO: 4965 - RNA, 32 nt, Homo Sapiens
ggauaaagagcaguuucaugcugcugaacuug

SEQ ID NO: 4966 - RNA, 32 nt, Homo Sapiens
cuaguuaaggauuguuuuaaaucuguuauuuu

SEQ ID NO: 4967 - RNA, 32 nt, Homo Sapiens
uccgccucccccagccccauucccccacuccu

SEQ ID NO: 4968 - RNA, 30 nt, Homo Sapiens
uggcuuuguuugcagcaccauuugaaguuu

SEQ ID NO: 4969 - RNA, 32 nt, Homo Sapiens
ggcaacaugggggucacagcucugcccccagg

SEQ ID NO: 4970 - RNA, 32 nt, Homo Sapiens
ggggugagcccccagagcuggaccugagcuau

SEQ ID NO: 4971 - RNA, 32 nt, Homo Sapiens
ccacccaagauggccuggucuguggggugugg

SEQ ID NO: 4972 - RNA, 32 nt, Homo Sapiens
ggugugauugguuggcucuucuuccaauugca

SEQ ID NO: 4973 - RNA, 32 nt, Homo Sapiens
uaucugugaacauguuaagaguaauuuggaug

SEQ ID NO: 4974 - RNA, 32 nt, Homo Sapiens
ugcuauuuuuaaucuucguuggcacuuuccag

SEQ ID NO: 4975 - RNA, 32 nt, Homo Sapiens
aaagcuuuagacagcaauagccuaaaaaacca

SEQ ID NO: 4976 - RNA, 32 nt, Homo Sapiens
guuaugaagauaauauuaucuauuuguaaauu

SEQ ID NO: 4977 - RNA, 32 nt, Homo Sapiens
cagguaggcugggcugugaacagcacugcucc

SEQ ID NO: 4978 - RNA, 32 nt, Homo Sapiens
gugcaaaguauuuaucauuucuaccagaaaua

SEQ ID NO: 4979 - RNA, 32 nt, Homo Sapiens
gcggccggccuggacuggcccgagagggaucc

SEQ ID NO: 4980 - RNA, 32 nt, Homo Sapiens
cugcgcgggcugcgcgucgccauggagcccga

SEQ ID NO: 4981 - RNA, 32 nt, Homo Sapiens
cucagggauucugggcuugggguguggggugg

SEQ ID NO: 4982 - RNA, 32 nt, Homo Sapiens
uaaaaaguguuaguauaaaaaugauaauuuac

SEQ ID NO: 4983 - RNA, 32 nt, Homo Sapiens
gaaaauaauuuuucauuuuugcucauuuaauu

SEQ ID NO: 4984 - RNA, 32 nt, Homo Sapiens
ucccugccccccacccaaacuugaacuauacc

SEQ ID NO: 4985 - RNA, 32 nt, Homo Sapiens
cuaauguuuaagcagaaaaaccacuuucuugu

SEQ ID NO: 4986 - RNA, 32 nt, Homo Sapiens
aagucuaagaaacucagugugugauguugggc

SEQ ID NO: 4987 - RNA, 32 nt, Homo Sapiens
ggcgccuccuccucccccuccuccucaccugg

SEQ ID NO: 4988 - RNA, 32 nt, Homo Sapiens
uucugggaaagagacccggggaggccaggagu

SEQ ID NO: 4989 - RNA, 32 nt, Homo Sapiens
ugucugccgccacugcugcugcugcugcugcu

SEQ ID NO: 4990 - RNA, 32 nt, Homo Sapiens
gagcagucuucguucuuccuccccucaguggc

SEQ ID NO: 4991 - RNA, 32 nt, Homo Sapiens
ccaguggggagugggaggaagagccugggaca

SEQ ID NO: 4992 - RNA, 32 nt, Homo Sapiens
uagcacagcgacccgggccagcgcagggcgag

SEQ ID NO: 4993 - RNA, 32 nt, Homo Sapiens
ccgggacaggccgucccccaccccauccugua

SEQ ID NO: 4994 - RNA, 32 nt, Homo Sapiens
aagaaggaacacauauuauacacauaaugaug

SEQ ID NO: 4995 - RNA, 32 nt, Homo Sapiens
ucgcucacaccuguaaacccaacacuuuggga

SEQ ID NO: 4996 - RNA, 32 nt, Homo Sapiens
agguccccggggaccuggcauucuggggagac

SEQ ID NO: 4997 - RNA, 32 nt, Homo Sapiens
ggugacggccgggaagggucaguuggaggcag

SEQ ID NO: 4998 - RNA, 32 nt, Homo Sapiens
auauuauuugauacuguacaaacuuuauuaaa

SEQ ID NO: 4999 - RNA, 32 nt, Homo Sapiens
guuguguauguggcugauauggaagacauaca

SEQ ID NO: 5000 - RNA, 32 nt, Homo Sapiens
ccaaugauaauuauuacuuuuauauuucaaag

SEQ ID NO: 5001 - RNA, 32 nt, Homo Sapiens
agagggagguaacagaaagacucuuuuagggc

SEQ ID NO: 5002 - RNA, 32 nt, Homo Sapiens
agaugguucauccuuuuccccaguugaggauc

SEQ ID NO: 5003 - RNA, 32 nt, Homo Sapiens
ccccaggccccggcaugaggccuuuccucagu

SEQ ID NO: 5004 - RNA, 32 nt, Homo Sapiens
cugccccggcccgugcuguccgcugggugagg

SEQ ID NO: 5005 - RNA, 27 nt, Homo Sapiens
uucacuaacuucuucagcccuccagca

SEQ ID NO: 5006 - RNA, 32 nt, Homo Sapiens
gccaucgggucgucuccgaagauuuggcaggg

SEQ ID NO: 5007 - RNA, 32 nt, Homo Sapiens
aagauguguauacauuguucuuuacguuguuc

SEQ ID NO: 5008 - RNA, 32 nt, Homo Sapiens
ccugcgaccaguggugcagcugauugacauca

SEQ ID NO: 5009 - RNA, 32 nt, Homo Sapiens
guuaaaauggauucagaagagguccuagaaaa

SEQ ID NO: 5010 - RNA, 32 nt, Homo Sapiens
aaaaauguggaggcuccauauuaaugcauuau

SEQ ID NO: 5011 - RNA, 32 nt, Homo Sapiens
guauugauuucugaauauucauaauuguguua

SEQ ID NO: 5012 - RNA, 32 nt, Homo Sapiens
aaugccugaggguggagagagcuguggcugag

SEQ ID NO: 5013 - RNA, 32 nt, Homo Sapiens
gcccgagaagcuggggagcauggaccagaccc

SEQ ID NO: 5014 - RNA, 32 nt, Homo Sapiens
gggagucgaaggggcgggaggcgugaugguga

SEQ ID NO: 5015 - RNA, 32 nt, Homo Sapiens
cccugguggaggcggcuuggcggagauucgga

SEQ ID NO: 5016 - RNA, 32 nt, Homo Sapiens
cugugugcgucccucgcgggcugcuggaggcg

SEQ ID NO: 5017 - RNA, 32 nt, Homo Sapiens
gaacguuaaagugugaaggaaccaucaggaca

SEQ ID NO: 5018 - RNA, 32 nt, Homo Sapiens
aaaauacaaaaauuagacgagcgugguggugg

SEQ ID NO: 5019 - RNA, 32 nt, Homo Sapiens
accaccgcccggcgcgagccugcccccagcuc

SEQ ID NO: 5020 - RNA, 32 nt, Homo Sapiens
auaugguuauuuaaucaaauaucacuagcuuc

SEQ ID NO: 5021 - RNA, 32 nt, Homo Sapiens
ugagcagagaucauuaaaaauuaaacuuacaa

SEQ ID NO: 5022 - RNA, 32 nt, Homo Sapiens
gggauguuacuccuaaugucacagugggugua

SEQ ID NO: 5023 - RNA, 32 nt, Homo Sapiens
uucguucuuaaauacuacaacuucuuauugug

SEQ ID NO: 5024 - RNA, 30 nt, Homo Sapiens
ggcggaaucugugcugucuagguuugugcu

SEQ ID NO: 5025 - RNA, 32 nt, Homo Sapiens
agccggcucccgcuccuacccugcaaacagac

SEQ ID NO: 5026 - RNA, 32 nt, Homo Sapiens
ucuuacggcauugguggaagcuggggucagaa

SEQ ID NO: 5027 - RNA, 31 nt, Homo Sapiens
caucaccaggacugccugggccuguguucau

SEQ ID NO: 5028 - RNA, 32 nt, Homo Sapiens
accccagugcggacccuucccagcccucaucc

SEQ ID NO: 5029 - RNA, 32 nt, Homo Sapiens
uguagacaaagcaccugcgggguguggggaca

SEQ ID NO: 5030 - RNA, 32 nt, Homo Sapiens
ggauaaaaaguguauuuuaacucuguauauau

SEQ ID NO: 5031 - RNA, 32 nt, Homo Sapiens
auucauuguaauuauuauaaucgucagccucu

SEQ ID NO: 5032 - RNA, 32 nt, Homo Sapiens
ucaugacucagauaauuuuuacuaguguaaug

SEQ ID NO: 5033 - RNA, 32 nt, Homo Sapiens
cugccaccgccucucuugcucuauggacugau

SEQ ID NO: 5034 - RNA, 32 nt, Homo Sapiens
uagacgauacccaggacggucccuuuagcaau

SEQ ID NO: 5035 - RNA, 32 nt, Homo Sapiens
cuaccauaaaaugcuaaaaauaugcacuguuu

SEQ ID NO: 5036 - RNA, 32 nt, Homo Sapiens
uguuacaguuuaguaauuuauauucaccaguc

SEQ ID NO: 5037 - RNA, 32 nt, Homo Sapiens
cagcagauuucagaucauauuucacaauccug

SEQ ID NO: 5038 - RNA, 32 nt, Homo Sapiens
uccuuuuccacuuuaaauuuguuuuuguuuuu

SEQ ID NO: 5039 - RNA, 28 nt, Homo Sapiens
cgaccauggccuccuccgagguggcgcg

SEQ ID NO: 5040 - RNA, 30 nt, Homo Sapiens
gugcguggaaaaagacgauguuuauguucu

SEQ ID NO: 5041 - RNA, 31 nt, Homo Sapiens
acagcagcgggccaucaugcagaggugguug

SEQ ID NO: 5042 - RNA, 32 nt, Homo Sapiens
caguugcuccucaggaaucuucugguacaggu

SEQ ID NO: 5043 - RNA, 32 nt, Homo Sapiens
auuagaaaauggcagaguuggugcuggaucca

SEQ ID NO: 5044 - RNA, 32 nt, Homo Sapiens
aacagguuuuucuccgugaaucuuaugcugag

SEQ ID NO: 5045 - RNA, 32 nt, Homo Sapiens
gaaauaucuuggaucuuaauuaucaucugcaa

SEQ ID NO: 5046 - RNA, 32 nt, Homo Sapiens
ucccuucuggagccacucugcacugcgggcua

SEQ ID NO: 5047 - RNA, 32 nt, Homo Sapiens
gggccuagagggugggggccagggguauuugc

SEQ ID NO: 5048 - RNA, 32 nt, Homo Sapiens
agagcugccgccgcggccggccggcgacgcug

SEQ ID NO: 5049 - RNA, 30 nt, Homo Sapiens
gcagggcccgcgccgccgccgguaucucca

SEQ ID NO: 5050 - RNA, 32 nt, Homo Sapiens
gggcgccggggccguccgccucacuggaggaa

SEQ ID NO: 5051 - RNA, 32 nt, Homo Sapiens
uugucagacugaauuucuuuugguaagcaguu

SEQ ID NO: 5052 - RNA, 32 nt, Homo Sapiens
auaaggcgugggcuuccacagugucugccaga

SEQ ID NO: 5053 - RNA, 32 nt, Homo Sapiens
uauuugucucccucacuagauuauacgcuccu

SEQ ID NO: 5054 - RNA, 32 nt, Homo Sapiens
caaagagcauauauuuuacugucaguugucuc

SEQ ID NO: 5055 - RNA, 32 nt, Homo Sapiens
uuccugaggcuccucuuguucuuuuaaagggu

SEQ ID NO: 5056 - RNA, 32 nt, Homo Sapiens
gcugcugccgggcgguuccuccugucaacugc

SEQ ID NO: 5057 - RNA, 32 nt, Homo Sapiens
aaggccuccugaagcggccuguguguauggaa

SEQ ID NO: 5058 - RNA, 32 nt, Homo Sapiens
augugcccugaguccuuggggugguucugcuu

SEQ ID NO: 5059 - RNA, 32 nt, Homo Sapiens
guccuuugauucaagucaaauguucucuccca

SEQ ID NO: 5060 - RNA, 32 nt, Homo Sapiens
aguccuuggaguugcuggccaagcuccacuag

SEQ ID NO: 5061 - RNA, 32 nt, Homo Sapiens
ggaagcacaccugugccauuucugggacucug

SEQ ID NO: 5062 - RNA, 32 nt, Homo Sapiens
agauuuguaagugacaaaacuccagcugaugc

SEQ ID NO: 5063 - RNA, 30 nt, Homo Sapiens
cuuugugucagugcugcagcacuggggagc

SEQ ID NO: 5064 - RNA, 32 nt, Homo Sapiens
uaaacugguucugugugccucucuaaaaaaua

SEQ ID NO: 5065 - RNA, 32 nt, Homo Sapiens
aaagaaaguauuuuaguauguguaaauuguac

SEQ ID NO: 5066 - RNA, 32 nt, Homo Sapiens
uaggcggcagugccugucccuggccugccuug

SEQ ID NO: 5067 - RNA, 32 nt, Homo Sapiens
cuuaagcaguaugugguuucagagcaucuugg

SEQ ID NO: 5068 - RNA, 32 nt, Homo Sapiens
gcggacccucccagcccugcuucaaccaaugg

SEQ ID NO: 5069 - RNA, 32 nt, Homo Sapiens
aaugcuccauccugccagcccuggacacaaca

SEQ ID NO: 5070 - RNA, 32 nt, Homo Sapiens
augcuguaagauuuauaccauugaucuuuuuu

SEQ ID NO: 5071 - RNA, 32 nt, Homo Sapiens
accuucucucucugcccucaccucucccccga

SEQ ID NO: 5072 - RNA, 32 nt, Homo Sapiens
ggguggucauuuccaaucagacaccuaagaac

SEQ ID NO: 5073 - RNA, 32 nt, Homo Sapiens
ggaucgacaaaucccggaacccggaauuaaga

SEQ ID NO: 5074 - RNA, 32 nt, Homo Sapiens
cacucucuggagaagaggaaaaggaagaagcu

SEQ ID NO: 5075 - RNA, 32 nt, Homo Sapiens
cucagagguaacaacuaacaaacacccaaacu

SEQ ID NO: 5076 - RNA, 32 nt, Homo Sapiens
ccucccacaagaagcugguggagcagaguguu

SEQ ID NO: 5077 - RNA, 32 nt, Homo Sapiens
aauucacuguuucacugaaauguuuggauucu

SEQ ID NO: 5078 - RNA, 32 nt, Homo Sapiens
auccccacaauaucaccccuuaccacaagacc

SEQ ID NO: 5079 - RNA, 32 nt, Homo Sapiens
gguaagucaaggaauggggguggcuucuagaa

SEQ ID NO: 5080 - RNA, 32 nt, Homo Sapiens
ccgccccggcugcgcacgcgacgcccccucca

SEQ ID NO: 5081 - RNA, 31 nt, Homo Sapiens
ggacuuuuugguaauagauuuaauuaugaau

SEQ ID NO: 5082 - RNA, 31 nt, Homo Sapiens
accagccugggcagcaucgugagacccccgu

SEQ ID NO: 5083 - RNA, 32 nt, Homo Sapiens
uguauuuaccaccugagaaacucuguacuguc

SEQ ID NO: 5084 - RNA, 32 nt, Homo Sapiens
cgucuccaaggggacauacgaugcauuugcuu

SEQ ID NO: 5085 - RNA, 32 nt, Homo Sapiens
uaaauauuuuguuuauacuaagggacaauuau

SEQ ID NO: 5086 - RNA, 26 nt, Homo Sapiens
gaugccggugcagcugacgacagccc

SEQ ID NO: 5087 - RNA, 32 nt, Homo Sapiens
ucuuugugaaauuccaccauggcauacagugg

SEQ ID NO: 5088 - RNA, 32 nt, Homo Sapiens
guuugguuucuuuuaccaaauuaagugucuag

SEQ ID NO: 5089 - RNA, 32 nt, Homo Sapiens
cuguuuauaauguugaauuucuguaaaauaaa

SEQ ID NO: 5090 - RNA, 32 nt, Homo Sapiens
ccaggacaaguuggcgaccuuacuccuccaaa

SEQ ID NO: 5091 - RNA, 32 nt, Homo Sapiens
cacuuaccaagaaagcacuuuguaggggaacu

SEQ ID NO: 5092 - RNA, 32 nt, Homo Sapiens
cagguuggggagaggacggaggguggccgcag

SEQ ID NO: 5093 - RNA, 32 nt, Homo Sapiens
cuucucccuugguuaccuguuaucuuuugcac

SEQ ID NO: 5094 - RNA, 32 nt, Homo Sapiens
ggcuaggugcacuacagccucuuuccccgugu

SEQ ID NO: 5095 - RNA, 32 nt, Homo Sapiens
ccuguggcauuugaugaugucuccaucuacuu

SEQ ID NO: 5096 - RNA, 32 nt, Homo Sapiens
uaaaagcccucauauccacuggcaguccccgu

SEQ ID NO: 5097 - RNA, 32 nt, Homo Sapiens
aaaaccuaauugcuaaugcuucacaacuagga

SEQ ID NO: 5098 - RNA, 32 nt, Homo Sapiens
uccguuugguacauccccuccucccccacgcc

SEQ ID NO: 5099 - RNA, 32 nt, Homo Sapiens
caagaaaauaucuauugugauuaaagguagca

SEQ ID NO: 5100 - RNA, 32 nt, Homo Sapiens
uaguuguaaguacacagaggugguauauuuaa

SEQ ID NO: 5101 - RNA, 32 nt, Homo Sapiens
ggaacacaucccagccacagccaggcaggagg

SEQ ID NO: 5102 - RNA, 32 nt, Homo Sapiens
gggaccacuguuggggaccccucugcgugcac

SEQ ID NO: 5103 - RNA, 32 nt, Homo Sapiens
ucuggcuuuuucugccacugaggagacagaaa

SEQ ID NO: 5104 - RNA, 32 nt, Homo Sapiens
gcccuugagucucuccucuucuccaucuucac

SEQ ID NO: 5105 - RNA, 32 nt, Homo Sapiens
ggauuaaaaauccaaaaagugauucucuucua

SEQ ID NO: 5106 - RNA, 32 nt, Homo Sapiens
ggggcguccccauggcgacuguggcccggccc

SEQ ID NO: 5107 - RNA, 32 nt, Homo Sapiens
cuugcuugcucgccgccugcugacuuccuuac

SEQ ID NO: 5108 - RNA, 32 nt, Homo Sapiens
ccacgucgccggcucuccacgacccaacccua

SEQ ID NO: 5109 - RNA, 32 nt, Homo Sapiens
gaaccacuucauuugaaaagaaaugaguaugc

SEQ ID NO: 5110 - RNA, 32 nt, Homo Sapiens
uucggugaaauauuuauaugcauaaauggcaa

SEQ ID NO: 5111 - RNA, 32 nt, Homo Sapiens
uccagugcuccacaacguggacuugccuccug

SEQ ID NO: 5112 - RNA, 32 nt, Homo Sapiens
uugaguuuuaccaauuaaugugucucaugaag

SEQ ID NO: 5113 - RNA, 32 nt, Homo Sapiens
ccgggaaagguguccgugggggugaggagccc

SEQ ID NO: 5114 - RNA, 32 nt, Homo Sapiens
uagaagaaaaagaaucauaacaauacaaacac

SEQ ID NO: 5115 - RNA, 32 nt, Homo Sapiens
gagauguagccuggcccuggaacuagaaacag

SEQ ID NO: 5116 - RNA, 32 nt, Homo Sapiens
aagugccucccucugcuugacggggcugaggg

SEQ ID NO: 5117 - RNA, 32 nt, Homo Sapiens
cuuggucugcccagcccucgguuagcccugcc

SEQ ID NO: 5118 - RNA, 32 nt, Homo Sapiens
uuuuucugauuuuuaaacuccugaaaaauauc

SEQ ID NO: 5119 - RNA, 32 nt, Homo Sapiens
auagcgacucagugaaauaaacaagagccccc

SEQ ID NO: 5120 - RNA, 32 nt, Homo Sapiens
cuaagaaucccccgaaccccagccccgcgauc

SEQ ID NO: 5121 - RNA, 32 nt, Homo Sapiens
uuuuugcauauaaaccaaaaaauaacuuguua

SEQ ID NO: 5122 - RNA, 32 nt, Homo Sapiens
cccgcaggcagacagugaagagaaucagaaaa

SEQ ID NO: 5123 - RNA, 32 nt, Homo Sapiens
auauuauuugguuacauaguggacuaacauuu

SEQ ID NO: 5124 - RNA, 32 nt, Homo Sapiens
uguucuucuguucugcagacacgccuuccccu

SEQ ID NO: 5125 - RNA, 32 nt, Homo Sapiens
gacugccgagagcucagaggcuaagcccgagg

SEQ ID NO: 5126 - RNA, 32 nt, Homo Sapiens
auggugaaggauuuugcuucugaggaagcaau

SEQ ID NO: 5127 - RNA, 32 nt, Homo Sapiens
gaaaucuuaaaauuauuuccuaauaaaaaauu

SEQ ID NO: 5128 - RNA, 32 nt, Homo Sapiens
acccaaggaaaugggcuuuauaugcuuggaug

SEQ ID NO: 5129 - RNA, 32 nt, Homo Sapiens
cagacugugguguuaaauuuuuugcugcaaaa

SEQ ID NO: 5130 - RNA, 32 nt, Homo Sapiens
caagcagcacaccggcugcagaugggacagcc

SEQ ID NO: 5131 - RNA, 29 nt, Homo Sapiens
ucagcgugaagcaguuauuuucuacgcua

SEQ ID NO: 5132 - RNA, 32 nt, Homo Sapiens
uccagaggguccguccaccacagcagccccag

SEQ ID NO: 5133 - RNA, 32 nt, Homo Sapiens
cugggcuggccucuccaccuccccuaguagag

SEQ ID NO: 5134 - RNA, 32 nt, Homo Sapiens
agauauaacaaugguaaaacaagcauucaagc

SEQ ID NO: 5135 - RNA, 30 nt, Homo Sapiens
uagcgguuauucggcggcccgcggcggacc

SEQ ID NO: 5136 - RNA, 32 nt, Homo Sapiens
uggccaugccggcggcagcacccgcggcagca

SEQ ID NO: 5137 - RNA, 32 nt, Homo Sapiens
caggagcagggccccugucccucucuucuggc

SEQ ID NO: 5138 - RNA, 29 nt, Homo Sapiens
aguguuucuauccaauuucaguacccaca

SEQ ID NO: 5139 - RNA, 32 nt, Homo Sapiens
uuuuauugguguuuuuuuuuuaagacagagau

SEQ ID NO: 5140 - RNA, 32 nt, Homo Sapiens
uauaaauauauuaaaaaggaaaauguuucaga

SEQ ID NO: 5141 - RNA, 32 nt, Homo Sapiens
cacugccucccucuccuucuuccucccgcaau

SEQ ID NO: 5142 - RNA, 32 nt, Homo Sapiens
guucucuuucccuucuugucuuuaaaaauauu

SEQ ID NO: 5143 - RNA, 32 nt, Homo Sapiens
ccucccggccccaagcugccuuccucgaugug

SEQ ID NO: 5144 - RNA, 32 nt, Homo Sapiens
agaauugaaaacugauucaaguaaguuugagu

SEQ ID NO: 5145 - RNA, 30 nt, Homo Sapiens
aacgcggugggcggcggcggcgaaagggga

SEQ ID NO: 5146 - RNA, 32 nt, Homo Sapiens
cuggccaguccggcugcucgggccccgccccc

SEQ ID NO: 5147 - RNA, 32 nt, Homo Sapiens
uucaugugauaaaaugaaacaauugcucaacu

SEQ ID NO: 5148 - RNA, 32 nt, Homo Sapiens
acaugaaaacaaacuggaauuuguauauauaa

SEQ ID NO: 5149 - RNA, 32 nt, Homo Sapiens
gauauugaugacaucuaauugaacucaacauu

SEQ ID NO: 5150 - RNA, 32 nt, Homo Sapiens
cccgcgucccaggcgccggcgccuggagccca

SEQ ID NO: 5151 - RNA, 32 nt, Homo Sapiens
guuauuuagguuaacaauauuaauucagguuu

SEQ ID NO: 5152 - RNA, 32 nt, Homo Sapiens
agacaaggcucuauguuucuguacaaagcugu

SEQ ID NO: 5153 - RNA, 32 nt, Homo Sapiens
gagggcgaccccucugcccuguccuugggggg

SEQ ID NO: 5154 - RNA, 32 nt, Homo Sapiens
aaguugaaaaagaaucagaauuuauauuuuac

SEQ ID NO: 5155 - RNA, 32 nt, Homo Sapiens
aaugauguugccacuuugcugaagauguuucu

SEQ ID NO: 5156 - RNA, 32 nt, Homo Sapiens
aaaguuuuccauuuuuacccugucccccuucc

SEQ ID NO: 5157 - RNA, 29 nt, Homo Sapiens
gcgcccugaggcaaggggacgccggcggg

SEQ ID NO: 5158 - RNA, 32 nt, Homo Sapiens
agagugguggccaguggcuacacaauagcgau

SEQ ID NO: 5159 - RNA, 32 nt, Homo Sapiens
ggacgcgcuucuccucugcgcgccggggccuc

SEQ ID NO: 5160 - RNA, 32 nt, Homo Sapiens
ugucaggggugacaccaggagagagggacagg

SEQ ID NO: 5161 - RNA, 32 nt, Homo Sapiens
guucauuucaaaugauaaaugucagugguggu

SEQ ID NO: 5162 - RNA, 32 nt, Homo Sapiens
aacaaaaauugucaaugaccaaacauucuaaa

SEQ ID NO: 5163 - RNA, 29 nt, Homo Sapiens
caccaucggggaccgaggaccagcuuuau

SEQ ID NO: 5164 - RNA, 32 nt, Homo Sapiens
guuguagaaaucaaauuacuaucauuuuuugu

SEQ ID NO: 5165 - RNA, 31 nt, Homo Sapiens
agguucagucagauccaaccauggauucgag

SEQ ID NO: 5166 - RNA, 32 nt, Homo Sapiens
uguugcaacugggucugacaugaacacuuuuu

SEQ ID NO: 5167 - RNA, 32 nt, Homo Sapiens
ggccacagccccgaugauucuuaacacagccu

SEQ ID NO: 5168 - RNA, 32 nt, Homo Sapiens
caacuuccuggagaagcagaaaggcacuguua

SEQ ID NO: 5169 - RNA, 32 nt, Homo Sapiens
gggccgggaaaggcugccccaggccccgcgcc

SEQ ID NO: 5170 - RNA, 32 nt, Homo Sapiens
aauaauccaauauagcacuuuugaugauuuuu

SEQ ID NO: 5171 - RNA, 32 nt, Homo Sapiens
uucaacuucuaaauagguaacucgacugcaaa

SEQ ID NO: 5172 - RNA, 32 nt, Homo Sapiens
gauaccuuuuucuuuccgaguaacuuuagaau

SEQ ID NO: 5173 - RNA, 32 nt, Homo Sapiens
ggcacgagguggcggcgggggcgaggugaggu

SEQ ID NO: 5174 - RNA, 32 nt, Homo Sapiens
aaagccgggcccagcccuuccucacccuuccc

SEQ ID NO: 5175 - RNA, 32 nt, Homo Sapiens
uugcccugcaaacuuccuuuccacguguacgc

SEQ ID NO: 5176 - RNA, 32 nt, Homo Sapiens
cuagagcccuccaucaccuucacgcuguccca

SEQ ID NO: 5177 - RNA, 32 nt, Homo Sapiens
caggggcuaggcggggagggagcggcgcccag

SEQ ID NO: 5178 - RNA, 32 nt, Homo Sapiens
aagauugcaugacugaauuugcuuaagaaaaa

SEQ ID NO: 5179 - RNA, 32 nt, Homo Sapiens
aggaguucaaagcuguagugagcugucauugu

SEQ ID NO: 5180 - RNA, 32 nt, Homo Sapiens
acugacagaaacaaaagauggcucaggacuag

SEQ ID NO: 5181 - RNA, 32 nt, Homo Sapiens
agcaagaaaucagagcuucaaaccuaaaacuu

SEQ ID NO: 5182 - RNA, 32 nt, Homo Sapiens
ccagggaggggaggggccuuugucuagggaag

SEQ ID NO: 5183 - RNA, 32 nt, Homo Sapiens
acccagccagcaugcgucgugacagcuugggg

SEQ ID NO: 5184 - RNA, 32 nt, Homo Sapiens
gaucaaauucgaggucaugaugaccuucagga

SEQ ID NO: 5185 - RNA, 32 nt, Homo Sapiens
aguugcuuucccuuaguauuagauuuguugag

SEQ ID NO: 5186 - RNA, 32 nt, Homo Sapiens
aaaacaauacccauagcaguucuguagcucau

SEQ ID NO: 5187 - RNA, 32 nt, Homo Sapiens
uuucuuuucuuuucuuuuuuuuugagacagag

SEQ ID NO: 5188 - RNA, 32 nt, Homo Sapiens
caugacuucuucccuuacccuguccccagcug

SEQ ID NO: 5189 - RNA, 32 nt, Homo Sapiens
cagcgcagcagggcuacagugcuuacaacacc

SEQ ID NO: 5190 - RNA, 32 nt, Homo Sapiens
aucaacgugucuguccacgauuuguuguguuu

SEQ ID NO: 5191 - RNA, 32 nt, Homo Sapiens
cguuaugcugauagaagcuggcagcacugccc

SEQ ID NO: 5192 - RNA, 32 nt, Homo Sapiens
uugcacaugcacccuccugaguuugggauucu

SEQ ID NO: 5193 - RNA, 32 nt, Homo Sapiens
cuagacuacugagggacagcgacagcaugaag

SEQ ID NO: 5194 - RNA, 32 nt, Homo Sapiens
gugugacagagagguguggggaggcgaaggcc

SEQ ID NO: 5195 - RNA, 31 nt, Homo Sapiens
gaccuugcaaggucaagcugaggagacuaag

SEQ ID NO: 5196 - RNA, 32 nt, Homo Sapiens
ggucacagaggagaggcaaagcaacgggaggu

SEQ ID NO: 5197 - RNA, 32 nt, Homo Sapiens
aaauagaugaauaaaaugugauaguaacauag

SEQ ID NO: 5198 - RNA, 32 nt, Homo Sapiens
auuucuauuuuggacauggaaacuacagauga

SEQ ID NO: 5199 - RNA, 32 nt, Homo Sapiens
auguucaggaaacaggcuagaccucagcucca

SEQ ID NO: 5200 - RNA, 32 nt, Homo Sapiens
acgcacacgcgcgcuccccggcucacgcgcgc

SEQ ID NO: 5201 - RNA, 32 nt, Homo Sapiens
cgcacgccccgagguccgagaccgccacgcac

SEQ ID NO: 5202 - RNA, 32 nt, Homo Sapiens
cccccaucaauauaucucaguauuucaugucu

SEQ ID NO: 5203 - RNA, 32 nt, Homo Sapiens
augcugaauuugucaaauaccccuuccaaaau

SEQ ID NO: 5204 - RNA, 32 nt, Homo Sapiens
uguuuuuuucuuuuuucuuuuuuuuugcaaua

SEQ ID NO: 5205 - RNA, 32 nt, Homo Sapiens
ggaguaauugguucaugcucugagccucugcc

SEQ ID NO: 5206 - RNA, 32 nt, Homo Sapiens
cggauucccucaaagacuuugggagacaagac

SEQ ID NO: 5207 - RNA, 32 nt, Homo Sapiens
gagugaagggaagauugcaccagagaugaaga

SEQ ID NO: 5208 - RNA, 32 nt, Homo Sapiens
uucugagguuaacgugcuaaaguauaauuauu

SEQ ID NO: 5209 - RNA, 32 nt, Homo Sapiens
ugcugcacuccagccugggugaaaaagacagg

SEQ ID NO: 5210 - RNA, 32 nt, Homo Sapiens
uucacugucucaaccuuaucugcacaguccga

SEQ ID NO: 5211 - RNA, 32 nt, Homo Sapiens
cugagauggugccacugcacuccagcuuaggu

SEQ ID NO: 5212 - RNA, 32 nt, Homo Sapiens
ccacaauaaaaagcauaacuucuaaaggaagc

SEQ ID NO: 5213 - RNA, 32 nt, Homo Sapiens
uguuucuuuuuauuuugaaccaaaaauguggu

SEQ ID NO: 5214 - RNA, 32 nt, Homo Sapiens
ggggggauaucgaagagcaggggguugugaau

SEQ ID NO: 5215 - RNA, 32 nt, Homo Sapiens
ugagacuucuaccugcucacucagaaucauuu

SEQ ID NO: 5216 - RNA, 32 nt, Homo Sapiens
cccuaaugggcugucuccagccugcugacggg

SEQ ID NO: 5217 - RNA, 32 nt, Homo Sapiens
gacuuuuugggucuagcucuccaggccaggaa

SEQ ID NO: 5218 - RNA, 32 nt, Homo Sapiens
ucagccgcccggagccgcucccggagcccggc

SEQ ID NO: 5219 - RNA, 32 nt, Homo Sapiens
acauuuaugucuccgagaucuaaguguggauc

SEQ ID NO: 5220 - RNA, 32 nt, Homo Sapiens
aguguuuuaauugugaugucaaaaaguuguau

SEQ ID NO: 5221 - RNA, 32 nt, Homo Sapiens
gcugucaugcuuaacuuuuucuucuuaaaauu

SEQ ID NO: 5222 - RNA, 32 nt, Homo Sapiens
gacagugggcuggcagacguuugcuuugaguu

SEQ ID NO: 5223 - RNA, 32 nt, Homo Sapiens
guacccuugggguggugcugggucauuacuuc

SEQ ID NO: 5224 - RNA, 32 nt, Homo Sapiens
auggagaagacagggagauggugcuggaagca

SEQ ID NO: 5225 - RNA, 32 nt, Homo Sapiens
ucacugcccuccccagucucucuuaaaguugg

SEQ ID NO: 5226 - RNA, 32 nt, Homo Sapiens
uuacuggagacggguuucaccguguuggccag

SEQ ID NO: 5227 - RNA, 32 nt, Homo Sapiens
uuucuucugcacccacuucuaaauuuaauguu

SEQ ID NO: 5228 - RNA, 32 nt, Homo Sapiens
caggccccuucuccugccccagccccagcccc

SEQ ID NO: 5229 - RNA, 32 nt, Homo Sapiens
gagggagagcggccuccuccucccuggugggg

SEQ ID NO: 5230 - RNA, 31 nt, Homo Sapiens
agcgacacaggggacgaaggaguccgggauu

SEQ ID NO: 5231 - RNA, 30 nt, Homo Sapiens
ggugcuucauggugcuguucucgaagaggc

SEQ ID NO: 5232 - RNA, 32 nt, Homo Sapiens
cacagugguccuccgccggcuacggcgcugcg

SEQ ID NO: 5233 - RNA, 32 nt, Homo Sapiens
ucagucucagauggaagcugggccuggguggg

SEQ ID NO: 5234 - RNA, 32 nt, Homo Sapiens
cgucucgcuccaucaccgccucaaugugauga

SEQ ID NO: 5235 - RNA, 32 nt, Homo Sapiens
caaagagaaagaagagagcaaaaagcugcagc

SEQ ID NO: 5236 - RNA, 32 nt, Homo Sapiens
uccucaaauuggcaucugguaauguacauugu

SEQ ID NO: 5237 - RNA, 32 nt, Homo Sapiens
ccccugcuguggcuucggcaguaaagacagga

SEQ ID NO: 5238 - RNA, 32 nt, Homo Sapiens
aguuuucauauuaaguuuuuauuuccuuucca

SEQ ID NO: 5239 - RNA, 32 nt, Homo Sapiens
gaagagcaggaagagguugcugagauuguugg

SEQ ID NO: 5240 - RNA, 32 nt, Homo Sapiens
uugaacagcugagaaguggucuggagaggcag

SEQ ID NO: 5241 - RNA, 32 nt, Homo Sapiens
gaucaaaucugugcugugggucugagucauuu

SEQ ID NO: 5242 - RNA, 32 nt, Homo Sapiens
ggacugcuucaucgucuuggcugagaaaggga

SEQ ID NO: 5243 - RNA, 32 nt, Homo Sapiens
cauuuggcauuugggauaaggauuucuaugug

SEQ ID NO: 5244 - RNA, 32 nt, Homo Sapiens
gcacgaggcgcgcgcaccuaccgaggcgcggg

SEQ ID NO: 5245 - RNA, 32 nt, Homo Sapiens
ugagauaagggagaccucuuugaaaggacaua

SEQ ID NO: 5246 - RNA, 32 nt, Homo Sapiens
uggccgggaggaugggggcgaggaggcagccc

SEQ ID NO: 5247 - RNA, 31 nt, Homo Sapiens
cauacucauuugacuggauaaacuuuacaua

SEQ ID NO: 5248 - RNA, 32 nt, Homo Sapiens
ugaugaguuccuaauaaauuaauugcaagugu

SEQ ID NO: 5249 - RNA, 32 nt, Homo Sapiens
cagccacauccacagcacaacugccccgcugg

SEQ ID NO: 5250 - RNA, 32 nt, Homo Sapiens
gccacagcugucggagcgcaugcuagagacca

SEQ ID NO: 5251 - RNA, 32 nt, Homo Sapiens
accaccacuuuuuuuuuuuuuaaaccagggau

SEQ ID NO: 5252 - RNA, 32 nt, Homo Sapiens
uugagauugcuggguugggggcgugggaggca

SEQ ID NO: 5253 - RNA, 30 nt, Homo Sapiens
ugucuggaauccugcggcggcggcggcggc

SEQ ID NO: 5254 - RNA, 32 nt, Homo Sapiens
agcgcuacccgguugcugcugcccaaggaccg

SEQ ID NO: 5255 - RNA, 32 nt, Homo Sapiens
aaccacuguauguaaccaacccuuaucuggca

SEQ ID NO: 5256 - RNA, 28 nt, Homo Sapiens
auuuugaaagauugauguuugcauuuua

SEQ ID NO: 5257 - RNA, 32 nt, Homo Sapiens
aguugggauucccacaucuucuaguuggacaa

SEQ ID NO: 5258 - RNA, 32 nt, Homo Sapiens
ccaaagagaggcagcauuauuuagacagccgg

SEQ ID NO: 5259 - RNA, 32 nt, Homo Sapiens
gaaguuuuauuucaaagauuggcuuacaaucu

SEQ ID NO: 5260 - RNA, 32 nt, Homo Sapiens
agcaucgaagacaggaggaacuggagccucau

SEQ ID NO: 5261 - RNA, 32 nt, Homo Sapiens
gucuugcaaggucuuccacuucagcacaaugc

SEQ ID NO: 5262 - RNA, 32 nt, Homo Sapiens
ccacucaggcugguccuggggguggggcugua

SEQ ID NO: 5263 - RNA, 32 nt, Homo Sapiens
augcagccaggauugccuccagugcuguuagc

SEQ ID NO: 5264 - RNA, 32 nt, Homo Sapiens
gagugaaagggagccagaagacugauuggagg

SEQ ID NO: 5265 - RNA, 32 nt, Homo Sapiens
ucaccuacccucaaaguagguauacaaaagac

SEQ ID NO: 5266 - RNA, 32 nt, Homo Sapiens
cgaggcugcggugcuacgggcuuagcccucgc

SEQ ID NO: 5267 - RNA, 32 nt, Homo Sapiens
gagucagcggcgacugggaggggcagcggcag

SEQ ID NO: 5268 - RNA, 32 nt, Homo Sapiens
gccgcuuuuuaaaacuagugucacagucucuc

SEQ ID NO: 5269 - RNA, 32 nt, Homo Sapiens
ccuugagcccagugaguucaauaaaaaccaaa

SEQ ID NO: 5270 - RNA, 32 nt, Homo Sapiens
gcccuagugucugccguacagagugaaguccu

SEQ ID NO: 5271 - RNA, 32 nt, Homo Sapiens
ccugccccacugacaccaccuacuugcuaagg

SEQ ID NO: 5272 - RNA, 32 nt, Homo Sapiens
gcaauguaggucuccuuccugugcaguguaac

SEQ ID NO: 5273 - RNA, 32 nt, Homo Sapiens
agucaaccaaccccaucgccaacuaagcgagg

SEQ ID NO: 5274 - RNA, 32 nt, Homo Sapiens
caaaacagcaaccuaaaccgaagaccaagaau

SEQ ID NO: 5275 - RNA, 32 nt, Homo Sapiens
ccauuaugaagaugaacuguuaacuaaauugc

SEQ ID NO: 5276 - RNA, 32 nt, Homo Sapiens
cuucaggugcuugauuuugugcaggauccgug

SEQ ID NO: 5277 - RNA, 32 nt, Homo Sapiens
guuugccccuguucuuuuuucuuuugaaagaa

SEQ ID NO: 5278 - RNA, 30 nt, Homo Sapiens
uuuaaccucacuagcuucaagaguagacau

SEQ ID NO: 5279 - RNA, 32 nt, Homo Sapiens
uauuuuugucuauucuuuauuaucuuaguuuc

SEQ ID NO: 5280 - RNA, 32 nt, Homo Sapiens
cuggcagaggucgggccccucgggccgcgugg

SEQ ID NO: 5281 - RNA, 32 nt, Homo Sapiens
uaccccaaacaaucucugucauuuucaaagau

SEQ ID NO: 5282 - RNA, 32 nt, Homo Sapiens
aaauggacaaacuuccuguagguucugagccu

SEQ ID NO: 5283 - RNA, 32 nt, Homo Sapiens
agugggaccugggggugguuggaccccuggga

SEQ ID NO: 5284 - RNA, 31 nt, Homo Sapiens
agagccccacccucagaugcacaugagcugg

SEQ ID NO: 5285 - RNA, 32 nt, Homo Sapiens
aggggcugagcugcccgccgccgcccggaugg

SEQ ID NO: 5286 - RNA, 32 nt, Homo Sapiens
gaccugcagccccagacucugcucucccagca

SEQ ID NO: 5287 - RNA, 32 nt, Homo Sapiens
cagaugcugaagacuuccuguaagagaaaugg

SEQ ID NO: 5288 - RNA, 32 nt, Homo Sapiens
gagguggagaggauuuuagaccucuuugagca

SEQ ID NO: 5289 - RNA, 32 nt, Homo Sapiens
uucacccagacacgugguagggauggaaaagg

SEQ ID NO: 5290 - RNA, 32 nt, Homo Sapiens
agcauauaugcaugcauauauauauauacaca

SEQ ID NO: 5291 - RNA, 32 nt, Homo Sapiens
cugcaaauauaaaaccuaaaguuuguuuaaaa

SEQ ID NO: 5292 - RNA, 32 nt, Homo Sapiens
cgacugcugcggguccaguguccgccaucuuc

SEQ ID NO: 5293 - RNA, 32 nt, Homo Sapiens
uugguggauccucaggcuuaccaguggcuauu

SEQ ID NO: 5294 - RNA, 32 nt, Homo Sapiens
ugcuugggcccugcugcccccagcggacacaa

SEQ ID NO: 5295 - RNA, 32 nt, Homo Sapiens
gcaucucuguuguguaauacagauggaaucug

SEQ ID NO: 5296 - RNA, 32 nt, Homo Sapiens
cucaguauggauuauuaauguauuuuaauauu

SEQ ID NO: 5297 - RNA, 32 nt, Homo Sapiens
acugccaugcuggcagaaaaugcuggaagcug

SEQ ID NO: 5298 - RNA, 32 nt, Homo Sapiens
ggcgcucggaagccgggcucauggacggguga

SEQ ID NO: 5299 - RNA, 32 nt, Homo Sapiens
uuauugagauauaauuaacauaaaauaaacug

SEQ ID NO: 5300 - RNA, 32 nt, Homo Sapiens
gucuaucuaugucugucucaccacuguauuuu

SEQ ID NO: 5301 - RNA, 32 nt, Homo Sapiens
gcuucauugggcugauuuuguaaaauguaaug

SEQ ID NO: 5302 - RNA, 32 nt, Homo Sapiens
cagggcuguggaagggugggggugggucauua

SEQ ID NO: 5303 - RNA, 32 nt, Homo Sapiens
cugugccucacagcucuccaaacuggacuaca

SEQ ID NO: 5304 - RNA, 32 nt, Homo Sapiens
gguuccuuaggacucacucaggugcugguacu

SEQ ID NO: 5305 - RNA, 32 nt, Homo Sapiens
uaaugacuuccaccgugccauccugcggacac

SEQ ID NO: 5306 - RNA, 31 nt, Homo Sapiens
cuugaucacaccauccgcugaguuaaggauc

SEQ ID NO: 5307 - RNA, 32 nt, Homo Sapiens
accucugccucccaggucaagugauucuccug

SEQ ID NO: 5308 - RNA, 32 nt, Homo Sapiens
ggaccagcacucuucucccagcccuuaggguc

SEQ ID NO: 5309 - RNA, 30 nt, Homo Sapiens
ucuggaggagguagcgcgggucuggaggca

SEQ ID NO: 5310 - RNA, 32 nt, Homo Sapiens
ccggugagggcgggcaaggggccccagccgcu

SEQ ID NO: 5311 - RNA, 32 nt, Homo Sapiens
gaccgccuccgucucucgcugggcucgcuagg

SEQ ID NO: 5312 - RNA, 32 nt, Homo Sapiens
gaggcccaguguucccaggguggaagaaguag

SEQ ID NO: 5313 - RNA, 32 nt, Homo Sapiens
uccagucuuucaggaagaacaaacugacacgg

SEQ ID NO: 5314 - RNA, 32 nt, Homo Sapiens
aguuuggauaguaaagaaaacaacaauacaau

SEQ ID NO: 5315 - RNA, 32 nt, Homo Sapiens
guuacaucauguuugcagaaaccuugucuuau

SEQ ID NO: 5316 - RNA, 32 nt, Homo Sapiens
cgagggaggucucaucggcggugaggaagccc

SEQ ID NO: 5317 - RNA, 32 nt, Homo Sapiens
guauugcaaugacaccauuacauaaggaacau

SEQ ID NO: 5318 - RNA, 32 nt, Homo Sapiens
ggaggcccuggccuccagugccuucccccgug

SEQ ID NO: 5319 - RNA, 32 nt, Homo Sapiens
caggcgaagggcaggaggagcugcuuggcaga

SEQ ID NO: 5320 - RNA, 32 nt, Homo Sapiens
uguccgcgaccuggcccggcccaacgggucag

SEQ ID NO: 5321 - RNA, 32 nt, Homo Sapiens
uaaggcauguacuaguuguuaagggaggauac

SEQ ID NO: 5322 - RNA, 32 nt, Homo Sapiens
cugcccauuguuucuuacuaguuucuugaauu

SEQ ID NO: 5323 - RNA, 32 nt, Homo Sapiens
gugacccgauggcacauagauguuguagaaua

SEQ ID NO: 5324 - RNA, 32 nt, Homo Sapiens
agggcaaggaggagcugcaggggggcuuggcu

SEQ ID NO: 5325 - RNA, 32 nt, Homo Sapiens
gguaacugucuccagaacagcaaccacauuga

SEQ ID NO: 5326 - RNA, 32 nt, Homo Sapiens
ggguuugggggcccagcccacccgccacugcc

SEQ ID NO: 5327 - RNA, 32 nt, Homo Sapiens
cccgaggaagaucggcgugguggugugcuuuu

SEQ ID NO: 5328 - RNA, 32 nt, Homo Sapiens
ggguguaucucacauuaaacaaaacaccuuuu

SEQ ID NO: 5329 - RNA, 32 nt, Homo Sapiens
uggaggaggugugggcugacuaccucccagaa

SEQ ID NO: 5330 - RNA, 32 nt, Homo Sapiens
ggcccccgggcccagucaucagcccucuuuuc

SEQ ID NO: 5331 - RNA, 32 nt, Homo Sapiens
auaauccuuuugcaaacaucucaacgcuggcu

SEQ ID NO: 5332 - RNA, 32 nt, Homo Sapiens
aaaucucucuauaaaaugaauaaaauguuuaa

SEQ ID NO: 5333 - RNA, 32 nt, Homo Sapiens
gaauuguagagcugcuuguguucccuuuugau

SEQ ID NO: 5334 - RNA, 32 nt, Homo Sapiens
ugagccuauccugugucccuggacuugcccgu

SEQ ID NO: 5335 - RNA, 32 nt, Homo Sapiens
gacucauacuaucuuaacuguugagaacguau

SEQ ID NO: 5336 - RNA, 32 nt, Homo Sapiens
uuguuuuauuuuuucuaguuuguccaucucca

SEQ ID NO: 5337 - RNA, 32 nt, Homo Sapiens
gggugucccucuauuaaauauuuuaacuauaa

SEQ ID NO: 5338 - RNA, 32 nt, Homo Sapiens
uuuuaaggaguguuguguugacuuuauauuua

SEQ ID NO: 5339 - RNA, 32 nt, Homo Sapiens
gagcucugcuaagggacagacggccuccucaa

SEQ ID NO: 5340 - RNA, 32 nt, Homo Sapiens
gcaggcaugugacuggugcugcggcggggcgu

SEQ ID NO: 5341 - RNA, 32 nt, Homo Sapiens
aggugcagccucaggaugcugagaaaggaaac

SEQ ID NO: 5342 - RNA, 32 nt, Homo Sapiens
acuuaacagggaagggcuggggugugaaaaag

SEQ ID NO: 5343 - RNA, 32 nt, Homo Sapiens
ucgggcgggaggggagagcggguguggauuug

SEQ ID NO: 5344 - RNA, 32 nt, Homo Sapiens
gggaaucugcaccuucuuggucacugcacuuc

SEQ ID NO: 5345 - RNA, 29 nt, Homo Sapiens
uuaauugaaaguuuauaugcuucuaagag

SEQ ID NO: 5346 - RNA, 32 nt, Homo Sapiens
cuuaaaauucaauaugaaaagaacccauaauc

SEQ ID NO: 5347 - RNA, 32 nt, Homo Sapiens
uucaacacuauaaagcauuuguauugugauuu

SEQ ID NO: 5348 - RNA, 32 nt, Homo Sapiens
uuugcucuguaauaaaaaucuacuuucaaaaa

SEQ ID NO: 5349 - RNA, 30 nt, Homo Sapiens
ccgcagagcugcaaaggcggcagggcuugg

SEQ ID NO: 5350 - RNA, 32 nt, Homo Sapiens
ucccagcaaccucugcaggcccaaaucauccu

SEQ ID NO: 5351 - RNA, 32 nt, Homo Sapiens
gugauuucaggagagagcagcuuugaggaaug

SEQ ID NO: 5352 - RNA, 32 nt, Homo Sapiens
uagccagaaaagggggcgggaagggcuguagg

SEQ ID NO: 5353 - RNA, 30 nt, Homo Sapiens
uuugcacgcugugcugcagacauucuggcc

SEQ ID NO: 5354 - RNA, 30 nt, Homo Sapiens
ugggugggagguggggcaugugcaaagcaa

SEQ ID NO: 5355 - RNA, 32 nt, Homo Sapiens
uggaacugggaagagacagcugagaugacugc

SEQ ID NO: 5356 - RNA, 32 nt, Homo Sapiens
gauuucucagugauuuccuacaguguuguucc

SEQ ID NO: 5357 - RNA, 32 nt, Homo Sapiens
uaucauguuuuccucccaucuucuagaagcug

SEQ ID NO: 5358 - RNA, 32 nt, Homo Sapiens
uucucuggggacuguuugguguccuugguuuc

SEQ ID NO: 5359 - RNA, 32 nt, Homo Sapiens
agccccagacugagggaagcauggauggaugg

SEQ ID NO: 5360 - RNA, 32 nt, Homo Sapiens
acauguuacaacaugauugaaccuuaaaaaca

SEQ ID NO: 5361 - RNA, 32 nt, Homo Sapiens
acagaaauaauguuuuaccaucucuucaccag

SEQ ID NO: 5362 - RNA, 32 nt, Homo Sapiens
cagaagaaaaugaaagugaaaaccuaugcagu

SEQ ID NO: 5363 - RNA, 32 nt, Homo Sapiens
agcuguuuucuuuucuagguuacugauaaccc

SEQ ID NO: 5364 - RNA, 32 nt, Homo Sapiens
ggacaggcgucugaagacauggacgugggccc

SEQ ID NO: 5365 - RNA, 32 nt, Homo Sapiens
uuuccccccaaauauggucuagaugaguuauu

SEQ ID NO: 5366 - RNA, 32 nt, Homo Sapiens
gugaauuuuguuuucaugugcuugucagccac

SEQ ID NO: 5367 - RNA, 29 nt, Homo Sapiens
caagaauaguguuucagcuguaggccauu

SEQ ID NO: 5368 - RNA, 32 nt, Homo Sapiens
gaagaaggcuggaagggacagggggugauggc

SEQ ID NO: 5369 - RNA, 32 nt, Homo Sapiens
guuuacauaaauuuauaaugaaaauaaacaug

SEQ ID NO: 5370 - RNA, 32 nt, Homo Sapiens
ugauagaucuguaucagcaucauuuuaauggc

SEQ ID NO: 5371 - RNA, 32 nt, Homo Sapiens
ccaggcugguguccucuguccaggccaucaug

SEQ ID NO: 5372 - RNA, 32 nt, Homo Sapiens
auuggcauuuccccugguuugucucauucuuc

SEQ ID NO: 5373 - RNA, 29 nt, Homo Sapiens
cuaucaugcuguauguaucacucauucca

SEQ ID NO: 5374 - RNA, 32 nt, Homo Sapiens
uucagagccagcagugcuguuuucucaagcac

SEQ ID NO: 5375 - RNA, 32 nt, Homo Sapiens
ccauuccgagaccccaguaccgcggcgacccc

SEQ ID NO: 5376 - RNA, 32 nt, Homo Sapiens
auuucuaacuucagccagaccugcguugugug

SEQ ID NO: 5377 - RNA, 32 nt, Homo Sapiens
gcaggccaggccacgggcuugcagcuccucug

SEQ ID NO: 5378 - RNA, 32 nt, Homo Sapiens
uucacugauagaaaaaaacaaacaaacaaaca

SEQ ID NO: 5379 - RNA, 32 nt, Homo Sapiens
uagagggggcggcggcggcggcggcgguggug

SEQ ID NO: 5380 - RNA, 32 nt, Homo Sapiens
ugggugccuccgagugugcgcgcgcucucgcu

SEQ ID NO: 5381 - RNA, 30 nt, Homo Sapiens
ugugucgcgcccgugccgguagcgcccgug

SEQ ID NO: 5382 - RNA, 32 nt, Homo Sapiens
ggccgccuccucgaaguagaccucaaaaaugg

SEQ ID NO: 5383 - RNA, 32 nt, Homo Sapiens
ucagaguccaggccccaaaaccacagcccugu

SEQ ID NO: 5384 - RNA, 32 nt, Homo Sapiens
guuucgcugucgggucucuaguucuugcacgc

SEQ ID NO: 5385 - RNA, 32 nt, Homo Sapiens
acggggagcuuccugggcaagcaacaucuaga

SEQ ID NO: 5386 - RNA, 32 nt, Homo Sapiens
ggacuuugcaagguggcaacacugguucaaag

SEQ ID NO: 5387 - RNA, 32 nt, Homo Sapiens
aucucuucauguucaguuuuuacuucacucuu

SEQ ID NO: 5388 - RNA, 32 nt, Homo Sapiens
ccgccgugguggcgucugggaaccgaaggcag

SEQ ID NO: 5389 - RNA, 32 nt, Homo Sapiens
uugcuguuuaucgaugcugguuuucagaauuc

SEQ ID NO: 5390 - RNA, 32 nt, Homo Sapiens
aauauacucuuuuuuauggacacguuauaugu

SEQ ID NO: 5391 - RNA, 32 nt, Homo Sapiens
cagaauuucuaaaaguuuaaguucuaugaggg

SEQ ID NO: 5392 - RNA, 32 nt, Homo Sapiens
aggggacggggcggccccagucggaggucgca

SEQ ID NO: 5393 - RNA, 31 nt, Homo Sapiens
uauauguauaaaaccaaagugcuguuuuuaa

SEQ ID NO: 5394 - RNA, 32 nt, Homo Sapiens
uuuggaaacaacauuuaagggaaugugagcac

SEQ ID NO: 5395 - RNA, 32 nt, Homo Sapiens
uccagaacugcucacccugccuuuuucugggg

SEQ ID NO: 5396 - RNA, 32 nt, Homo Sapiens
cuagcagugcgcgccccgccuguguuugcccu

SEQ ID NO: 5397 - RNA, 32 nt, Homo Sapiens
acuggggcgguggggacgauacuucucauuug

SEQ ID NO: 5398 - RNA, 32 nt, Homo Sapiens
aucucucuucucgagaccccagccccuccgcu

SEQ ID NO: 5399 - RNA, 32 nt, Homo Sapiens
agaaauggucagaaaugcugcagagccaggag

SEQ ID NO: 5400 - RNA, 32 nt, Homo Sapiens
acuucugucagaugcucccauccacuauuaau

SEQ ID NO: 5401 - RNA, 29 nt, Homo Sapiens
caaagguuuuauucaaaccacaaauuaua

SEQ ID NO: 5402 - RNA, 32 nt, Homo Sapiens
gcuauaacauguagucaucuguuuucugauaa

SEQ ID NO: 5403 - RNA, 32 nt, Homo Sapiens
ggguuuaacuccuggguuggcuguuggguaga

SEQ ID NO: 5404 - RNA, 32 nt, Homo Sapiens
agcaaagacagagcaguuacucuucauauugc

SEQ ID NO: 5405 - RNA, 32 nt, Homo Sapiens
cuggggucacagcuggccacugagagacccau

SEQ ID NO: 5406 - RNA, 32 nt, Homo Sapiens
gauacuuccagaaccuucucugggucugcaga

SEQ ID NO: 5407 - RNA, 32 nt, Homo Sapiens
ugcaaaugacccugggccccaaggcuccgaac

SEQ ID NO: 5408 - RNA, 32 nt, Homo Sapiens
uggacccucccuccccaaguggacacauggcu

SEQ ID NO: 5409 - RNA, 32 nt, Homo Sapiens
cagaaauccucacccugcgucuucccaaguua

SEQ ID NO: 5410 - RNA, 32 nt, Homo Sapiens
ccaaagucaacagaaugucuguuauuguuuua

SEQ ID NO: 5411 - RNA, 32 nt, Homo Sapiens
ccuccagggccaccugcccccaucugcacugc

SEQ ID NO: 5412 - RNA, 32 nt, Homo Sapiens
acaugcucaaugacucucuggugagcgaggac

SEQ ID NO: 5413 - RNA, 32 nt, Homo Sapiens
uggcaagagaguggcagacauaaaggagagca

SEQ ID NO: 5414 - RNA, 32 nt, Homo Sapiens
aagacaguugauaaugcagaaauaucaggagg

SEQ ID NO: 5415 - RNA, 32 nt, Homo Sapiens
gcggaggagggcggcaugcagcuccgcguugc

SEQ ID NO: 5416 - RNA, 32 nt, Homo Sapiens
cucugaccagccuuuaccaugcgcugagugag

SEQ ID NO: 5417 - RNA, 32 nt, Homo Sapiens
gaacccaagaaauuccucucuuucucucucug

SEQ ID NO: 5418 - RNA, 32 nt, Homo Sapiens
gcugauacgcgauauugauucucauuguuaga

SEQ ID NO: 5419 - RNA, 32 nt, Homo Sapiens
uugggugcagaucuuugaaaacaaaggugcca

SEQ ID NO: 5420 - RNA, 32 nt, Homo Sapiens
cgcguccacugcgguuccgccgugccaagggg

SEQ ID NO: 5421 - RNA, 32 nt, Homo Sapiens
gauacuugcauucuucccuuuuccuuucuauu

SEQ ID NO: 5422 - RNA, 32 nt, Homo Sapiens
ccuccgccggcgccaacaccugucaacucugc

SEQ ID NO: 5423 - RNA, 32 nt, Homo Sapiens
uaaaauaugucuuuuaccuguucacauugcau

SEQ ID NO: 5424 - RNA, 32 nt, Homo Sapiens
gaaucaacuuuccuaccaaacaauagauucau

SEQ ID NO: 5425 - RNA, 32 nt, Homo Sapiens
ccugccggguguuguggccuagcugugugcua

SEQ ID NO: 5426 - RNA, 32 nt, Homo Sapiens
cuauuucauuaagugugauauaaaccuccuca

SEQ ID NO: 5427 - RNA, 31 nt, Homo Sapiens
cguuguuccccgucuucuccaagguguugag

SEQ ID NO: 5428 - RNA, 32 nt, Homo Sapiens
uacuuauacauaucuaaacaugucuucauggu

SEQ ID NO: 5429 - RNA, 32 nt, Homo Sapiens
caucaggacggacccaucauggcugucuuuuu

SEQ ID NO: 5430 - RNA, 32 nt, Homo Sapiens
uuuuucacaacacugauuuguuuucuugcaaa

SEQ ID NO: 5431 - RNA, 32 nt, Homo Sapiens
ucuccuuggggaucugggagcugagcacuugu

SEQ ID NO: 5432 - RNA, 32 nt, Homo Sapiens
aauguuaauuuaaugggaaaaaagcuaauaca

SEQ ID NO: 5433 - RNA, 32 nt, Homo Sapiens
agggugggcuccuggguguuugcuucccaagu

SEQ ID NO: 5434 - RNA, 31 nt, Homo Sapiens
gugaaauaaacuaaacagguuacagaauauc

SEQ ID NO: 5435 - RNA, 32 nt, Homo Sapiens
cacgagaauguggagggguggggggugucagu

SEQ ID NO: 5436 - RNA, 32 nt, Homo Sapiens
cucggcuccgcgggcagccgcgccguccugcc

SEQ ID NO: 5437 - RNA, 32 nt, Homo Sapiens
aaaauaagguuuucuuuuuuccccuuucuugu

SEQ ID NO: 5438 - RNA, 32 nt, Homo Sapiens
gaagauauucagcagcuuucugacguggacau

SEQ ID NO: 5439 - RNA, 32 nt, Homo Sapiens
aacuacuacuacuacuguucaguuuuuuaaaa

SEQ ID NO: 5440 - RNA, 32 nt, Homo Sapiens
agucgugcggcugcagguacggugccuuuccc

SEQ ID NO: 5441 - RNA, 32 nt, Homo Sapiens
caguguucccagccccaaggccaggcacagug

SEQ ID NO: 5442 - RNA, 32 nt, Homo Sapiens
cgggaggcgggggucggcagccggcugagugg

SEQ ID NO: 5443 - RNA, 32 nt, Homo Sapiens
ucauauagaaaguuuuaaaguauuauguuuaa

SEQ ID NO: 5444 - RNA, 32 nt, Homo Sapiens
ggauuaggggcuggauagggccccacagguga

SEQ ID NO: 5445 - RNA, 32 nt, Homo Sapiens
cucagugggagguaauggaaaguagcaaguua

SEQ ID NO: 5446 - RNA, 32 nt, Homo Sapiens
uuuggccggccgccgggcgacaccacgaguua

SEQ ID NO: 5447 - RNA, 32 nt, Homo Sapiens
auccugggaaggggguauauggucucacaagu

SEQ ID NO: 5448 - RNA, 32 nt, Homo Sapiens
ucaaucacauucaauuccagaguaguuucaag

SEQ ID NO: 5449 - RNA, 32 nt, Homo Sapiens
gcaccucucuccccaugguguuuuccacauuu

SEQ ID NO: 5450 - RNA, 32 nt, Homo Sapiens
agccaggucuugccgguuuauagugucuuuca

SEQ ID NO: 5451 - RNA, 32 nt, Homo Sapiens
ucauccuauuuucuccucuccaagucucagau

SEQ ID NO: 5452 - RNA, 32 nt, Homo Sapiens
gugguauugugcuuguuuugugaaagaauguu

SEQ ID NO: 5453 - RNA, 32 nt, Homo Sapiens
aggccaaggaugcccaccugucccccaagaga

SEQ ID NO: 5454 - RNA, 32 nt, Homo Sapiens
cgggagcgcaggugcucgggcacccgagcugg

SEQ ID NO: 5455 - RNA, 32 nt, Homo Sapiens
cccacacacacacguggacaggcaggcgggug

SEQ ID NO: 5456 - RNA, 32 nt, Homo Sapiens
aauaaagaaaucagcaccccuucccggugucc

SEQ ID NO: 5457 - RNA, 32 nt, Homo Sapiens
ucugcuuuauuuauuguaagcauucccacguu

SEQ ID NO: 5458 - RNA, 32 nt, Homo Sapiens
ucuacagcucauuuccccguccuccaaccaau

SEQ ID NO: 5459 - RNA, 30 nt, Homo Sapiens
uucccugucugugugcagaggggauucaac

SEQ ID NO: 5460 - RNA, 32 nt, Homo Sapiens
caguauaguuacugguaccacagugaggugaa

SEQ ID NO: 5461 - RNA, 32 nt, Homo Sapiens
ccggacggcggugucccggcguggcgggaagc

SEQ ID NO: 5462 - RNA, 32 nt, Homo Sapiens
guauucuccgccgcccccacgcccucgagguc

SEQ ID NO: 5463 - RNA, 32 nt, Homo Sapiens
ggguacuaaaauuuaaaauuuaaagauaauug

SEQ ID NO: 5464 - RNA, 32 nt, Homo Sapiens
cacacauugguaguuauuuugcaccagcagug

SEQ ID NO: 5465 - RNA, 32 nt, Homo Sapiens
ggucuugaguaauuaacagcauccucuuccac

SEQ ID NO: 5466 - RNA, 32 nt, Homo Sapiens
ucauuauugguuuguucagguacucuauuucu

SEQ ID NO: 5467 - RNA, 32 nt, Homo Sapiens
cggagcuggaggaggcggcgggcgcgagaccc

SEQ ID NO: 5468 - RNA, 32 nt, Homo Sapiens
gguggggguagaaaugucuuuuucuauugugu

SEQ ID NO: 5469 - RNA, 32 nt, Homo Sapiens
cugucgccauccccggcucccugcccagagca

SEQ ID NO: 5470 - RNA, 31 nt, Homo Sapiens
gaaaaaauggaguuuggaguauucccaaugg

SEQ ID NO: 5471 - RNA, 32 nt, Homo Sapiens
uuuguuuaauaaaaauaaugggacuuuuuucu

SEQ ID NO: 5472 - RNA, 32 nt, Homo Sapiens
caagagcuggccuggggugcggacagucugau

SEQ ID NO: 5473 - RNA, 32 nt, Homo Sapiens
gaccagccuuggagcuagagaagugaugggac

SEQ ID NO: 5474 - RNA, 32 nt, Homo Sapiens
gggcccaaacccagccccuccuguccaccucu

SEQ ID NO: 5475 - RNA, 32 nt, Homo Sapiens
guacauaaauagaguguaaauaaaauaguguu

SEQ ID NO: 5476 - RNA, 32 nt, Homo Sapiens
guccgccaaaauccgggcuggcguucucgcgc

SEQ ID NO: 5477 - RNA, 32 nt, Homo Sapiens
cgccgccgagcccgagguggccucgagcgcgg

SEQ ID NO: 5478 - RNA, 32 nt, Homo Sapiens
uugaauaaugucauacaaaaaauguauuuguu

SEQ ID NO: 5479 - RNA, 32 nt, Homo Sapiens
uccuucuugugcugcucuggaagagaggcagu

SEQ ID NO: 5480 - RNA, 32 nt, Homo Sapiens
uuugugacagggcggggguggcggcggccccu

SEQ ID NO: 5481 - RNA, 32 nt, Homo Sapiens
aagauucuauaucgcacaugagcauuaaguuc

SEQ ID NO: 5482 - RNA, 32 nt, Homo Sapiens
gguccacagacaccccaccaccuaugcagggg

SEQ ID NO: 5483 - RNA, 32 nt, Homo Sapiens
cccccagcccgucucgccgccgccauggcgga

SEQ ID NO: 5484 - RNA, 32 nt, Homo Sapiens
accgccccgaggcgcccggcccggcuccauug

SEQ ID NO: 5485 - RNA, 30 nt, Homo Sapiens
uuaaaggcgcccgaguguaggcgacaggcc

SEQ ID NO: 5486 - RNA, 32 nt, Homo Sapiens
agccaccgggagccugcggcccgggccagccc

SEQ ID NO: 5487 - RNA, 32 nt, Homo Sapiens
cugggucuuucagauagcaaagcaaucuauaa

SEQ ID NO: 5488 - RNA, 32 nt, Homo Sapiens
agggcauauggugaaugcagggggcuggcagg

SEQ ID NO: 5489 - RNA, 32 nt, Homo Sapiens
gggugacuuggcguggauuuagggcgugccca

SEQ ID NO: 5490 - RNA, 32 nt, Homo Sapiens
caaagggaagaacuuuuuaugaacuccacagg

SEQ ID NO: 5491 - RNA, 32 nt, Homo Sapiens
uacaaucugauuuuauacuuagaauucuaucu

SEQ ID NO: 5492 - RNA, 32 nt, Homo Sapiens
caccuggcccacgcgugcugcagaugugggga

SEQ ID NO: 5493 - RNA, 32 nt, Homo Sapiens
uuuguaccaaaauauuuauuaugauaagaaau

SEQ ID NO: 5494 - RNA, 32 nt, Homo Sapiens
gcagcucucuacagcgugugugccuucuguac

SEQ ID NO: 5495 - RNA, 32 nt, Homo Sapiens
uggauguucaacaugugccuucaaaugugacc

SEQ ID NO: 5496 - RNA, 32 nt, Homo Sapiens
caaguggagcauggcccucccuggcucccugu

SEQ ID NO: 5497 - RNA, 32 nt, Homo Sapiens
gguggggagcuugggugagucuguuuuccucu

SEQ ID NO: 5498 - RNA, 32 nt, Homo Sapiens
uagagggacacccgccgcgccuggacagcccc

SEQ ID NO: 5499 - RNA, 32 nt, Homo Sapiens
cugccaggacugggacgcugcugcuggcgccu

SEQ ID NO: 5500 - RNA, 32 nt, Homo Sapiens
uccguggggagcaggagagggaggcggcggac

SEQ ID NO: 5501 - RNA, 32 nt, Homo Sapiens
uguucccauauuuggcgucucucaggagcuca

SEQ ID NO: 5502 - RNA, 32 nt, Homo Sapiens
uaaagagcuggguccuucccccugcuccaucu

SEQ ID NO: 5503 - RNA, 32 nt, Homo Sapiens
ucagcaccuucagaucauucuuagucuaaggu

SEQ ID NO: 5504 - RNA, 32 nt, Homo Sapiens
ggaguuccucaaugacuacccaccuuuacgau

SEQ ID NO: 5505 - RNA, 32 nt, Homo Sapiens
uaauugauuuauuuuucuucaauaaaguuaaa

SEQ ID NO: 5506 - RNA, 32 nt, Homo Sapiens
cagaaaagaugcagaugcaagaauaaugaaag

SEQ ID NO: 5507 - RNA, 32 nt, Homo Sapiens
aacaggcacggaacuccaccccugccggucag

SEQ ID NO: 5508 - RNA, 32 nt, Homo Sapiens
cccccgcaaaccaaauacuuugagaucaauua

SEQ ID NO: 5509 - RNA, 32 nt, Homo Sapiens
aaauaugagaaccaagagugugacugccaaaa

SEQ ID NO: 5510 - RNA, 32 nt, Homo Sapiens
uugcccggcugugauugcugccaggcacuguu

SEQ ID NO: 5511 - RNA, 32 nt, Homo Sapiens
uuauuugaauguucuguuuucucuuuuuaaau

SEQ ID NO: 5512 - RNA, 32 nt, Homo Sapiens
cucccuucucuuguuucuuuuauuuauaaguu

SEQ ID NO: 5513 - RNA, 32 nt, Homo Sapiens
ggccaucugaucccaugggaagccaucagaga

SEQ ID NO: 5514 - RNA, 32 nt, Homo Sapiens
auguuauuuuagguucugugaacuugcgaguc

SEQ ID NO: 5515 - RNA, 32 nt, Homo Sapiens
cucagcugggcguggcggcucaugccuguaau

SEQ ID NO: 5516 - RNA, 30 nt, Homo Sapiens
gaguaggcgcccguccgaccccacgucgca

SEQ ID NO: 5517 - RNA, 32 nt, Homo Sapiens
uauuuuuaaacuaaugaccuguguuauacuuc

SEQ ID NO: 5518 - RNA, 32 nt, Homo Sapiens
ggaggggaggagaggaggccgcacucucccug

SEQ ID NO: 5519 - RNA, 32 nt, Homo Sapiens
uaggccgagagcucagaccgggaaagagaaag

SEQ ID NO: 5520 - RNA, 32 nt, Homo Sapiens
uuugaaaacacuuuauaguaaaacaguggugc

SEQ ID NO: 5521 - RNA, 32 nt, Homo Sapiens
aucagaguggugccgccgcacaugcgggaggc

SEQ ID NO: 5522 - RNA, 32 nt, Homo Sapiens
cauggcagauagccuggaaauaaaacuccccu

SEQ ID NO: 5523 - RNA, 32 nt, Homo Sapiens
ggaaaaaacaacagaaaaggucaaaacccacg

SEQ ID NO: 5524 - RNA, 32 nt, Homo Sapiens
guuacuguuuuaaagggugcccauuugugauc

SEQ ID NO: 5525 - RNA, 32 nt, Homo Sapiens
uuuugugcugcucuaacaaaauaucacagacu

SEQ ID NO: 5526 - RNA, 32 nt, Homo Sapiens
cgugugcuuugcuguuuuuuuaugcuuccugg

SEQ ID NO: 5527 - RNA, 32 nt, Homo Sapiens
caagagugaacauguacacaaagugcaauugg

SEQ ID NO: 5528 - RNA, 32 nt, Homo Sapiens
uccuccgccucccugucuccuguuccauucgc

SEQ ID NO: 5529 - RNA, 32 nt, Homo Sapiens
ucgucacgggccugcgcgugcggcgcgcgcag

SEQ ID NO: 5530 - RNA, 32 nt, Homo Sapiens
gggaccuggggucuggugugccaggcaccagg

SEQ ID NO: 5531 - RNA, 32 nt, Homo Sapiens
gagagaaaaaugaggcggaacacacaagauga

SEQ ID NO: 5532 - RNA, 32 nt, Homo Sapiens
guggggugggguccaggucggguguggacugu

SEQ ID NO: 5533 - RNA, 32 nt, Homo Sapiens
uguaaucgaggaugcuggcccugcggcugcuc

SEQ ID NO: 5534 - RNA, 32 nt, Homo Sapiens
aguggccccagcguccucgcgcggcuguugcc

SEQ ID NO: 5535 - RNA, 31 nt, Homo Sapiens
auggcugcuggguaccugccccgcugguccc

SEQ ID NO: 5536 - RNA, 32 nt, Homo Sapiens
guaguuauuucacaucuauuguuuccugcagu

SEQ ID NO: 5537 - RNA, 32 nt, Homo Sapiens
uggauuccugucuacccucugguuuccacuga

SEQ ID NO: 5538 - RNA, 32 nt, Homo Sapiens
aaauauuagauggaauaacuguauagcuggcc

SEQ ID NO: 5539 - RNA, 32 nt, Homo Sapiens
guacuuuagugucacuucauuuuuauugcuau

SEQ ID NO: 5540 - RNA, 32 nt, Homo Sapiens
caaugagccuacucugguuaagauguucuuuu

SEQ ID NO: 5541 - RNA, 32 nt, Homo Sapiens
cuccuggcggugccggauccugacggcggccu

SEQ ID NO: 5542 - RNA, 32 nt, Homo Sapiens
agcccagcuugccagagguccaaauauuggga

SEQ ID NO: 5543 - RNA, 31 nt, Homo Sapiens
caaagcggcugggucaccagagccugaccau

SEQ ID NO: 5544 - RNA, 32 nt, Homo Sapiens
ccgucccggcgcccgaccgcccacccaucggc

SEQ ID NO: 5545 - RNA, 32 nt, Homo Sapiens
gaacuggcaagagggaaggcgagacagcagug

SEQ ID NO: 5546 - RNA, 32 nt, Homo Sapiens
cuucaccccacuuccucugggcccuggcugug

SEQ ID NO: 5547 - RNA, 32 nt, Homo Sapiens
ugguucucuuccucuggucccuucuggggacu

SEQ ID NO: 5548 - RNA, 32 nt, Homo Sapiens
ggaaaaaauauuacauuuuaagggggaaaaaa

SEQ ID NO: 5549 - RNA, 32 nt, Homo Sapiens
uuuuucauuauauauuugauaacauucucuaa

SEQ ID NO: 5550 - RNA, 32 nt, Homo Sapiens
aaacccaaguuaugcauccccauccccaugcc

SEQ ID NO: 5551 - RNA, 32 nt, Homo Sapiens
uaacugcuugagacugaugaugagauaauuug

SEQ ID NO: 5552 - RNA, 32 nt, Homo Sapiens
cccagagccugcccaggccuagccccacagac

SEQ ID NO: 5553 - RNA, 28 nt, Homo Sapiens
gcugggguuacaggcacgggccaccagc

SEQ ID NO: 5554 - RNA, 32 nt, Homo Sapiens
cgucgcucucggagguccuaacucguccugac

SEQ ID NO: 5555 - RNA, 32 nt, Homo Sapiens
gggucccggcgccccuccggccgcgaguccca

SEQ ID NO: 5556 - RNA, 31 nt, Homo Sapiens
ccucccuugugcucaguauauuggugugaac

SEQ ID NO: 5557 - RNA, 32 nt, Homo Sapiens
uuaacgacuggauucuaucuucauuuuagacu

SEQ ID NO: 5558 - RNA, 32 nt, Homo Sapiens
uuccugcuucuggucuucuccugggcuccacu

SEQ ID NO: 5559 - RNA, 32 nt, Homo Sapiens
aaaaacaaacucccccaugugguauuaauaua

SEQ ID NO: 5560 - RNA, 32 nt, Homo Sapiens
cugugacaaccuggaggacauguuaaguaaaa

SEQ ID NO: 5561 - RNA, 32 nt, Homo Sapiens
gaauuugaagaauuucagaaccacugguaucc

SEQ ID NO: 5562 - RNA, 32 nt, Homo Sapiens
ccacugggguuaagggcagcuacauuacuaua

SEQ ID NO: 5563 - RNA, 32 nt, Homo Sapiens
ugcagcccgagacuuccaaccugaguggcgga

SEQ ID NO: 5564 - RNA, 32 nt, Homo Sapiens
acaccagcuggguugcacacuguugauaugga

SEQ ID NO: 5565 - RNA, 32 nt, Homo Sapiens
ugaaugcuaccagagugugagagacgauuguc

SEQ ID NO: 5566 - RNA, 32 nt, Homo Sapiens
aacuuaaauuuauuuuauggcuugagguuucu

SEQ ID NO: 5567 - RNA, 32 nt, Homo Sapiens
gucugaaucuccucuacaauguuuccuuucuc

SEQ ID NO: 5568 - RNA, 32 nt, Homo Sapiens
ccuacaucuauuagcauagaugaugaaaagcu

SEQ ID NO: 5569 - RNA, 32 nt, Homo Sapiens
agagcaagaauauauuggaugaacugaaaaaa

SEQ ID NO: 5570 - RNA, 32 nt, Homo Sapiens
gugcuucugaagauuuuugcuuugugguuacc

SEQ ID NO: 5571 - RNA, 32 nt, Homo Sapiens
cgguaaucagaaauaugaaacaaaaucucugc

SEQ ID NO: 5572 - RNA, 29 nt, Homo Sapiens
caggauggcaaaacagaagagaaaaguuc

SEQ ID NO: 5573 - RNA, 32 nt, Homo Sapiens
cuagcaaagacaauuuaucucaguaaccuuaa

SEQ ID NO: 5574 - RNA, 31 nt, Homo Sapiens
caagagacaaagaaaugauuuugccuccugg

SEQ ID NO: 5575 - RNA, 32 nt, Homo Sapiens
aaaguagauccgauaacuuaaaaacguagcuc

SEQ ID NO: 5576 - RNA, 30 nt, Homo Sapiens
gauugagucugugcuguuuaaggaggacua

SEQ ID NO: 5577 - RNA, 32 nt, Homo Sapiens
aacagauguugcagacuuccacagcacccggg

SEQ ID NO: 5578 - RNA, 32 nt, Homo Sapiens
uggaccgggauguggguauccugggcuccugg

SEQ ID NO: 5579 - RNA, 32 nt, Homo Sapiens
ccacccagguuugguuccucccggggccccca

SEQ ID NO: 5580 - RNA, 32 nt, Homo Sapiens
ccuuuucuuuguucuuuuuuuuacauuucgca

SEQ ID NO: 5581 - RNA, 32 nt, Homo Sapiens
gguggugugggcccuccucccccagaaccccc

SEQ ID NO: 5582 - RNA, 32 nt, Homo Sapiens
aggccucugcugucgggagggcuggaagaagg

SEQ ID NO: 5583 - RNA, 32 nt, Homo Sapiens
cgagguugggucagguaaggacacggugguag

SEQ ID NO: 5584 - RNA, 32 nt, Homo Sapiens
cuccagggacaaagaggagcugcugugggccu

SEQ ID NO: 5585 - RNA, 32 nt, Homo Sapiens
uccgagggcacugcgugccgcgcaggcgcaaa

SEQ ID NO: 5586 - RNA, 32 nt, Homo Sapiens
uccggggcccucucugcaccggacagucggaa

SEQ ID NO: 5587 - RNA, 32 nt, Homo Sapiens
uggcgggaaggggugggggugugcagucugcc

SEQ ID NO: 5588 - RNA, 32 nt, Homo Sapiens
guuguguacuuuguacaaaggaauacuaguca

SEQ ID NO: 5589 - RNA, 32 nt, Homo Sapiens
uaugaagaaagauaaauauauuuaaccuucca

SEQ ID NO: 5590 - RNA, 32 nt, Homo Sapiens
uccgccuggacggggcgcgcgcggccuuagag

SEQ ID NO: 5591 - RNA, 32 nt, Homo Sapiens
cgcuaggacaccuucccccgcccgcggaccca

SEQ ID NO: 5592 - RNA, 32 nt, Homo Sapiens
cugcacccacccaggaguguggccacgugggc

SEQ ID NO: 5593 - RNA, 32 nt, Homo Sapiens
augaggaaaaagaaucaagaaucugacucaca

SEQ ID NO: 5594 - RNA, 32 nt, Homo Sapiens
cugggaaccccaggaauugacccugaguuuua

SEQ ID NO: 5595 - RNA, 32 nt, Homo Sapiens
uacgcgcccuucgucggggggaccgggccggg

SEQ ID NO: 5596 - RNA, 28 nt, Homo Sapiens
cuuucucaaauaaaguuuuuuuuaaaag

SEQ ID NO: 5597 - RNA, 32 nt, Homo Sapiens
acucuuaaguuuuuuuuuuuuaauacaaaaac

SEQ ID NO: 5598 - RNA, 32 nt, Homo Sapiens
uauaucuaauucaaauugaagacucuacguag

SEQ ID NO: 5599 - RNA, 32 nt, Homo Sapiens
uguacuuuuuaaagauucuuaagugauuccag

SEQ ID NO: 5600 - RNA, 32 nt, Homo Sapiens
caagucugugucccaucagacuugcagccuuu

SEQ ID NO: 5601 - RNA, 32 nt, Homo Sapiens
aaccugaaggucggugccccuauggggcugac

SEQ ID NO: 5602 - RNA, 32 nt, Homo Sapiens
cagccugugugcccucccuggggcugaggagg

SEQ ID NO: 5603 - RNA, 32 nt, Homo Sapiens
uaaauuucccaauuuuuacuuaaaagacauca

SEQ ID NO: 5604 - RNA, 32 nt, Homo Sapiens
ccaucuaugcugucaagggcugcugguuggug

SEQ ID NO: 5605 - RNA, 32 nt, Homo Sapiens
ggcagggaggccgguggcaguuccgccccugg

SEQ ID NO: 5606 - RNA, 31 nt, Homo Sapiens
guaaauuugugcuuugaacuguaguuuaaua

SEQ ID NO: 5607 - RNA, 32 nt, Homo Sapiens
agacaaugaagauuuguuguccaaauagguca

SEQ ID NO: 5608 - RNA, 32 nt, Homo Sapiens
uaaacccgcccggagaccacgcgggcccagcg

SEQ ID NO: 5609 - RNA, 32 nt, Homo Sapiens
augauuugcagaaagaaagaaaaacuauggug

SEQ ID NO: 5610 - RNA, 32 nt, Homo Sapiens
uugcuaccuuaguuuaaaaaacaaucucaaac

SEQ ID NO: 5611 - RNA, 32 nt, Homo Sapiens
aaaaagaagacuuuuccaacugcugcauuaag

SEQ ID NO: 5612 - RNA, 32 nt, Homo Sapiens
cccuaaccugcgccucuggaugcuucugaccc

SEQ ID NO: 5613 - RNA, 32 nt, Homo Sapiens
caaauaaaggaacuucuagacuuuacaugacu

SEQ ID NO: 5614 - RNA, 32 nt, Homo Sapiens
uuuguauauggacaucuuuucuguaaacuucu

SEQ ID NO: 5615 - RNA, 32 nt, Homo Sapiens
acacacccugucaccaucacaucuccaaugaa

SEQ ID NO: 5616 - RNA, 32 nt, Homo Sapiens
accagcggcagccgcacggccacuugagccgc

SEQ ID NO: 5617 - RNA, 32 nt, Homo Sapiens
cguuuuggcuccuggugcugacaugggcuggg

SEQ ID NO: 5618 - RNA, 31 nt, Homo Sapiens
uuuuauucacagagaaaguuggcuuugaugu

SEQ ID NO: 5619 - RNA, 32 nt, Homo Sapiens
auggcuggacaggcgcaggggaggcugccuga

SEQ ID NO: 5620 - RNA, 32 nt, Homo Sapiens
cucuacugcacaagggccaguccccaagucua

SEQ ID NO: 5621 - RNA, 32 nt, Homo Sapiens
ccagagacguacccguuggauaccaaaauuag

SEQ ID NO: 5622 - RNA, 32 nt, Homo Sapiens
uuaccagagacgcccagccccaucccuguccu

SEQ ID NO: 5623 - RNA, 32 nt, Homo Sapiens
caggguggggacggguguuccuucuggguggg

SEQ ID NO: 5624 - RNA, 29 nt, Homo Sapiens
auuaaguagaugugauauuuucuuccaag

SEQ ID NO: 5625 - RNA, 32 nt, Homo Sapiens
ggccauggugccuuuuuuccuuguuaguauuu

SEQ ID NO: 5626 - RNA, 32 nt, Homo Sapiens
uggcucugaaccuugagcauaguaccacggac

SEQ ID NO: 5627 - RNA, 32 nt, Homo Sapiens
agaggacggggagguuacuucucuaaguuucu

SEQ ID NO: 5628 - RNA, 32 nt, Homo Sapiens
aguugcagcucuucuucugcuagcucauagca

SEQ ID NO: 5629 - RNA, 32 nt, Homo Sapiens
aaggcgcgggccccggcgcggcggggagggcu

SEQ ID NO: 5630 - RNA, 29 nt, Homo Sapiens
guuggucggggacaggagguaauucccag

SEQ ID NO: 5631 - RNA, 32 nt, Homo Sapiens
uuguuccuuaccagcaugccacuuccugccag

SEQ ID NO: 5632 - RNA, 32 nt, Homo Sapiens
cgcugcggacggugcuggccguggccgcugcg

SEQ ID NO: 5633 - RNA, 31 nt, Homo Sapiens
ugucacggcaagcuacugcagaauuagaagg

SEQ ID NO: 5634 - RNA, 32 nt, Homo Sapiens
uuuugcauugcuuuugaagacaagaaaagugc

SEQ ID NO: 5635 - RNA, 32 nt, Homo Sapiens
gauugggugaagaucauugauuaggugaagga

SEQ ID NO: 5636 - RNA, 32 nt, Homo Sapiens
uucugggugugagguguacagcagucuaggug

SEQ ID NO: 5637 - RNA, 32 nt, Homo Sapiens
ggagcggcacggcagccacugcuugggguagc

SEQ ID NO: 5638 - RNA, 32 nt, Homo Sapiens
ggagaggagaucuggacccgaggacgccaggg

SEQ ID NO: 5639 - RNA, 32 nt, Homo Sapiens
cuauuuugcagguccucauuucuccaagaaag

SEQ ID NO: 5640 - RNA, 32 nt, Homo Sapiens
acuuuaauucaaaagcacuuugugcuguguuc

SEQ ID NO: 5641 - RNA, 32 nt, Homo Sapiens
aaguacuuuuauacauaagauaaacaaaaacc

SEQ ID NO: 5642 - RNA, 32 nt, Homo Sapiens
ucugcccuccccagccccagcucacacaccca

SEQ ID NO: 5643 - RNA, 32 nt, Homo Sapiens
acagguuccuaccagcagcacuggugugaaug

SEQ ID NO: 5644 - RNA, 32 nt, Homo Sapiens
auaugaaauaucuauuccauauuaaacauuau

SEQ ID NO: 5645 - RNA, 32 nt, Homo Sapiens
ugggaacccugccuguaccugggguucagucc

SEQ ID NO: 5646 - RNA, 32 nt, Homo Sapiens
uuuuuaagaagcguaaauuauuuucaguuguu

SEQ ID NO: 5647 - RNA, 31 nt, Homo Sapiens
uccggucugccgguggccuccagcagcacca

SEQ ID NO: 5648 - RNA, 32 nt, Homo Sapiens
aagugcaguauuuuucuacaucaugucgagaa

SEQ ID NO: 5649 - RNA, 32 nt, Homo Sapiens
ggcccuucaucaugcuaagaacaagaacugcg

SEQ ID NO: 5650 - RNA, 32 nt, Homo Sapiens
uagacaggucugagugccugaacuugccuuuu

SEQ ID NO: 5651 - RNA, 32 nt, Homo Sapiens
gcaacagugcaucccgacagcagcaaccugau

SEQ ID NO: 5652 - RNA, 32 nt, Homo Sapiens
cuucuaccugcugcugcugggcgugggagacc

SEQ ID NO: 5653 - RNA, 30 nt, Homo Sapiens
aagguuuugggggagggggaaauacaggga

SEQ ID NO: 5654 - RNA, 32 nt, Homo Sapiens
uugaaggggagagagggaaaaucaagugguau

SEQ ID NO: 5655 - RNA, 32 nt, Homo Sapiens
ccccaggcccagcccuucggaccucuagacag

SEQ ID NO: 5656 - RNA, 32 nt, Homo Sapiens
ccuaguuaguaauaacauuugcucuuaauaca

SEQ ID NO: 5657 - RNA, 32 nt, Homo Sapiens
uuuuuuguuucauggacuauggacucuuucaa

SEQ ID NO: 5658 - RNA, 32 nt, Homo Sapiens
aguuggugguuuucaguuguugggcagcggug

SEQ ID NO: 5659 - RNA, 32 nt, Homo Sapiens
agucuggcucugucgcccaggcgggaaugcag

SEQ ID NO: 5660 - RNA, 32 nt, Homo Sapiens
gcuugcugaggguggggguugggagagggacu

SEQ ID NO: 5661 - RNA, 26 nt, Homo Sapiens
gauguucaguuaugaucgugugaacc

SEQ ID NO: 5662 - RNA, 32 nt, Homo Sapiens
augguuuuucccuuuugccuaaaucagaacuc

SEQ ID NO: 5663 - RNA, 32 nt, Homo Sapiens
gaggaugcaccaaguugcucacaguggaucuu

SEQ ID NO: 5664 - RNA, 32 nt, Homo Sapiens
auguguguauaaauaaaaggacucugcuggaa

SEQ ID NO: 5665 - RNA, 32 nt, Homo Sapiens
gcauguuaaauagcacuuuuaauagcaaaaaa

SEQ ID NO: 5666 - RNA, 32 nt, Homo Sapiens
auuuguauuuccucuguacugugagacugugg

SEQ ID NO: 5667 - RNA, 32 nt, Homo Sapiens
cucacuccucucucccucccaagggugcuggc

SEQ ID NO: 5668 - RNA, 32 nt, Homo Sapiens
uuugaaauaagcuauuugauguaauacuucuu

SEQ ID NO: 5669 - RNA, 32 nt, Homo Sapiens
auguucucagaggacgacuuccagucaacaga

SEQ ID NO: 5670 - RNA, 32 nt, Homo Sapiens
uacaguuguguaaaguuguucuguuaacuuuu

SEQ ID NO: 5671 - RNA, 32 nt, Homo Sapiens
gaggaagugagccgcacucucaacgcggagac

SEQ ID NO: 5672 - RNA, 32 nt, Homo Sapiens
cagaagcugccgccaccuccaaugcacaaggu

SEQ ID NO: 5673 - RNA, 32 nt, Homo Sapiens
ccugccuggugcccacacugccucgcaagcgc

SEQ ID NO: 5674 - RNA, 32 nt, Homo Sapiens
uaugugggcuuucuaaaauaugccaauuuuuu

SEQ ID NO: 5675 - RNA, 32 nt, Homo Sapiens
gcucugccucccacccaguugccugaaucauc

SEQ ID NO: 5676 - RNA, 32 nt, Homo Sapiens
guguuugccugccccugagcaggcacacagug

SEQ ID NO: 5677 - RNA, 32 nt, Homo Sapiens
gaaagaggcagacguuucccagggcguucagg

SEQ ID NO: 5678 - RNA, 32 nt, Homo Sapiens
caucaugcugguuuuucucugagcacaaaguu

SEQ ID NO: 5679 - RNA, 32 nt, Homo Sapiens
uccucugagagcuaaaauucuguugucauacc

SEQ ID NO: 5680 - RNA, 32 nt, Homo Sapiens
caugcagugauuccagccaccagccaucucau

SEQ ID NO: 5681 - RNA, 32 nt, Homo Sapiens
ccacauucucccagggacccagggcgggccgu

SEQ ID NO: 5682 - RNA, 31 nt, Homo Sapiens
ccgaccucuaacgcuuguagagccugggggg

SEQ ID NO: 5683 - RNA, 32 nt, Homo Sapiens
cauggcaacugacuuaccuuccccucaugccg

SEQ ID NO: 5684 - RNA, 32 nt, Homo Sapiens
auauucuuucccuaggguuucuucccaacacc

SEQ ID NO: 5685 - RNA, 32 nt, Homo Sapiens
aauccugacagcgcucuuuaggaggcagacuu

SEQ ID NO: 5686 - RNA, 27 nt, Homo Sapiens
cuccugacccuucccagcccccuccag

SEQ ID NO: 5687 - RNA, 32 nt, Homo Sapiens
ugucuaccaucagcccagaacucuguaacuuu

SEQ ID NO: 5688 - RNA, 32 nt, Homo Sapiens
gggauggggcucccacaccucccucagguccc

SEQ ID NO: 5689 - RNA, 32 nt, Homo Sapiens
aacuuccccuccacccaagccccugcuggccu

SEQ ID NO: 5690 - RNA, 32 nt, Homo Sapiens
ugguggucuuugggauaaccuuuggccuuaug

SEQ ID NO: 5691 - RNA, 32 nt, Homo Sapiens
auuugaguagugauuagcauuuagauaaugua

SEQ ID NO: 5692 - RNA, 32 nt, Homo Sapiens
ugcagucggaagcuccagaagaacaaagagcc

SEQ ID NO: 5693 - RNA, 32 nt, Homo Sapiens
augaaaauauccaaaagaugagaagagacaau

SEQ ID NO: 5694 - RNA, 32 nt, Homo Sapiens
aaguuaccagcaugccaacaucaacugcuggu

SEQ ID NO: 5695 - RNA, 32 nt, Homo Sapiens
aagcugcccccuccuugcccccaaggaugagg

SEQ ID NO: 5696 - RNA, 32 nt, Homo Sapiens
uacauuuucuuauuuuaacuacaguaaucuac

SEQ ID NO: 5697 - RNA, 32 nt, Homo Sapiens
gucaccagcaucucccucuccucccaaucucc

SEQ ID NO: 5698 - RNA, 32 nt, Homo Sapiens
aaugaaaagugaaggggaaacacacacacaca

SEQ ID NO: 5699 - RNA, 32 nt, Homo Sapiens
aggcucuccagucccaggaugcgcugagccgc

SEQ ID NO: 5700 - RNA, 32 nt, Homo Sapiens
gcauaaaggggucuuggagggaccacagagga

SEQ ID NO: 5701 - RNA, 32 nt, Homo Sapiens
agggcccuggccuggggcgucgauggggaagc

SEQ ID NO: 5702 - RNA, 32 nt, Homo Sapiens
cucccugcuugcaucucguugcuggcagaguc

SEQ ID NO: 5703 - RNA, 32 nt, Homo Sapiens
agcccccgcgcccucccuccgccucccauccc

SEQ ID NO: 5704 - RNA, 32 nt, Homo Sapiens
cccccgcagcgcuagucccgggcccgcgagca

SEQ ID NO: 5705 - RNA, 32 nt, Homo Sapiens
uuguaguugucauggcuacuacagugugggug

SEQ ID NO: 5706 - RNA, 32 nt, Homo Sapiens
acauaagauaauuuauacuggagaggaacucu

SEQ ID NO: 5707 - RNA, 32 nt, Homo Sapiens
ucuacuaaaaauacaaaaauucaccaggcaug

SEQ ID NO: 5708 - RNA, 32 nt, Homo Sapiens
ugcugauugggaaaaguucaugauuaggaaau

SEQ ID NO: 5709 - RNA, 32 nt, Homo Sapiens
gcugcucugcacccccagggccuggcucaccc

SEQ ID NO: 5710 - RNA, 32 nt, Homo Sapiens
ggccugcccuugucucgcagccaggcaggguc

SEQ ID NO: 5711 - RNA, 32 nt, Homo Sapiens
uuugaggauaauguuacuagacuuuaugccau

SEQ ID NO: 5712 - RNA, 30 nt, Homo Sapiens
gcaguuccacuugcacucuuuuguuuauug

SEQ ID NO: 5713 - RNA, 32 nt, Homo Sapiens
cucauuuugaggacuuuuucucucuccuguau

SEQ ID NO: 5714 - RNA, 32 nt, Homo Sapiens
ccuggaaaaugcauuuaaauaauaguaaauuc

SEQ ID NO: 5715 - RNA, 32 nt, Homo Sapiens
uuagauguguugcaguuuugcauguaaucggu

SEQ ID NO: 5716 - RNA, 32 nt, Homo Sapiens
ccacgccuauugcugcaggaugacgcgcaccu

SEQ ID NO: 5717 - RNA, 32 nt, Homo Sapiens
ccaugucccgggacccggggucgggcggcugg

SEQ ID NO: 5718 - RNA, 32 nt, Homo Sapiens
ucggcgacaaugccgggcguucccggaccggg

SEQ ID NO: 5719 - RNA, 32 nt, Homo Sapiens
uguagacuuauagauuauuccauauuauuaaa

SEQ ID NO: 5720 - RNA, 32 nt, Homo Sapiens
uuagaggaagaaggucuuggggacuacgggcg

SEQ ID NO: 5721 - RNA, 32 nt, Homo Sapiens
acugaaggaaauguuaaagguuuuuuaauggu

SEQ ID NO: 5722 - RNA, 31 nt, Homo Sapiens
agaaccaugugugccgagcggcugggccagu

SEQ ID NO: 5723 - RNA, 32 nt, Homo Sapiens
cugcaaucaccuuucaguugcuccaucauaaa

SEQ ID NO: 5724 - RNA, 32 nt, Homo Sapiens
cuucccacaauugacaauauauaugcaugugu

SEQ ID NO: 5725 - RNA, 32 nt, Homo Sapiens
cugaggcaacagcagcaagggcuggucuggac

SEQ ID NO: 5726 - RNA, 32 nt, Homo Sapiens
ggcuccgcggccgcagcccgcguggacgcucc

SEQ ID NO: 5727 - RNA, 32 nt, Homo Sapiens
ccuggcgccaagggguucgugcgcuguggaga

SEQ ID NO: 5728 - RNA, 32 nt, Homo Sapiens
uacaguauuagauucacaauugccauauauac

SEQ ID NO: 5729 - RNA, 32 nt, Homo Sapiens
ugcacuuucuacaggaauaccucuggccugcc

SEQ ID NO: 5730 - RNA, 32 nt, Homo Sapiens
cccagaucucaggucugaggacccccacuccc

SEQ ID NO: 5731 - RNA, 32 nt, Homo Sapiens
ggacucgccucucuccucuccuccccccagga

SEQ ID NO: 5732 - RNA, 32 nt, Homo Sapiens
uuucucccugcggcuccuggguuguugagacu

SEQ ID NO: 5733 - RNA, 32 nt, Homo Sapiens
cacggcagaaugguucccgucuggccaguacu

SEQ ID NO: 5734 - RNA, 32 nt, Homo Sapiens
cuugagaaggauuaugaggagguuggugugga

SEQ ID NO: 5735 - RNA, 32 nt, Homo Sapiens
cgccucgcccgccgguaccccggcgccaaccc

SEQ ID NO: 5736 - RNA, 32 nt, Homo Sapiens
ugaauuggucacugcucuuucucuauaacugg

SEQ ID NO: 5737 - RNA, 32 nt, Homo Sapiens
uggcugcugagagcuuccuauagagccccuga

SEQ ID NO: 5738 - RNA, 32 nt, Homo Sapiens
caguuuuuuggaagaguuugaggagaauugau

SEQ ID NO: 5739 - RNA, 32 nt, Homo Sapiens
aaaaauccuugaagaauaauuaagaaugggca

SEQ ID NO: 5740 - RNA, 32 nt, Homo Sapiens
uacauauugaaguuucucugguauucaaaggu

SEQ ID NO: 5741 - RNA, 32 nt, Homo Sapiens
cauccaggggaagagaagguggacuuugagaa

SEQ ID NO: 5742 - RNA, 32 nt, Homo Sapiens
gccaaccccccuccuccucaccagacuuccag

SEQ ID NO: 5743 - RNA, 32 nt, Homo Sapiens
gagcauuucuuugcugauucauaacaguauuu

SEQ ID NO: 5744 - RNA, 32 nt, Homo Sapiens
ugagcccaggucugaccccccuacccagcccc

SEQ ID NO: 5745 - RNA, 32 nt, Homo Sapiens
acuuggcgcaugggagacaugugcugggucug

SEQ ID NO: 5746 - RNA, 32 nt, Homo Sapiens
ugguccccaagagcuuuggaggcuuggauucc

SEQ ID NO: 5747 - RNA, 32 nt, Homo Sapiens
uccuuccuggaaaaauuccgcucuggaauaau

SEQ ID NO: 5748 - RNA, 32 nt, Homo Sapiens
uaagugguggcccuguagggugacggagagcu

SEQ ID NO: 5749 - RNA, 32 nt, Homo Sapiens
agccuggucaacauggcaaaacauaugaaaau

SEQ ID NO: 5750 - RNA, 32 nt, Homo Sapiens
gaaaggaauaggauuuuuaccuguggaauuuc

SEQ ID NO: 5751 - RNA, 32 nt, Homo Sapiens
cuacggcgauuugucugugucuggcccccacc

SEQ ID NO: 5752 - RNA, 32 nt, Homo Sapiens
gaggcagcugucuggucagagggguucucuuu

SEQ ID NO: 5753 - RNA, 32 nt, Homo Sapiens
cuacuuagccccacaaaaaugccccagcucag

SEQ ID NO: 5754 - RNA, 32 nt, Homo Sapiens
gaggccucauuucaacaauaaaacccagcuug

SEQ ID NO: 5755 - RNA, 28 nt, Homo Sapiens
gcaauggcggccucgcuguccgagcggc

SEQ ID NO: 5756 - RNA, 32 nt, Homo Sapiens
ggcaucacuguggaccaggcguggugaugggg

SEQ ID NO: 5757 - RNA, 32 nt, Homo Sapiens
cuucuguuuuuagaauucguagucacuguucu

SEQ ID NO: 5758 - RNA, 32 nt, Homo Sapiens
agaccauauuccauagguuuagggcuuuaccu

SEQ ID NO: 5759 - RNA, 32 nt, Homo Sapiens
auuguaagaaaauaaacuucugucuuuuaagc

SEQ ID NO: 5760 - RNA, 32 nt, Homo Sapiens
cgcuggcagggccgcauccucuucagucugga

SEQ ID NO: 5761 - RNA, 32 nt, Homo Sapiens
cagucuaaugucaagaggcacuucuuuauuaa

SEQ ID NO: 5762 - RNA, 32 nt, Homo Sapiens
ccacuccacuccuugugcggcgcuaggccccc

SEQ ID NO: 5763 - RNA, 32 nt, Homo Sapiens
agaucuaucugccgugggccugucgugccagu

SEQ ID NO: 5764 - RNA, 32 nt, Homo Sapiens
auuaaccuuuaaaaauauaauuacugcuaaaa

SEQ ID NO: 5765 - RNA, 32 nt, Homo Sapiens
uauggagaaaucaacugcuauuuuauacugau

SEQ ID NO: 5766 - RNA, 32 nt, Homo Sapiens
gcagucucggugccugagccugcucccuccgc

SEQ ID NO: 5767 - RNA, 26 nt, Homo Sapiens
uauguguguaccuggcuucagaucca

SEQ ID NO: 5768 - RNA, 32 nt, Homo Sapiens
aguggccuucccgguuggcgcgcgcccggggc

SEQ ID NO: 5769 - RNA, 32 nt, Homo Sapiens
agagucaggcagagguuaaguguguugcaccu

SEQ ID NO: 5770 - RNA, 32 nt, Homo Sapiens
uauaucaaacaauguuuauaauguguauauag

SEQ ID NO: 5771 - RNA, 32 nt, Homo Sapiens
aauuaacuuaguucuagccaugauuucuauuu

SEQ ID NO: 5772 - RNA, 32 nt, Homo Sapiens
ucuuugcuuguacauucuauggguuuugucaa

SEQ ID NO: 5773 - RNA, 32 nt, Homo Sapiens
gcccguagccucagcggggugcucucagcugg

SEQ ID NO: 5774 - RNA, 32 nt, Homo Sapiens
gaggguaaaaauuuaagagcaggccaggcgug

SEQ ID NO: 5775 - RNA, 32 nt, Homo Sapiens
ucauaaaaauuugagacacugguuuaaaugaa

SEQ ID NO: 5776 - RNA, 32 nt, Homo Sapiens
ggcaagugauggagaacuaaacaaagaacagu

SEQ ID NO: 5777 - RNA, 32 nt, Homo Sapiens
cggcccagcgcuguugcccccggagcggacgu

SEQ ID NO: 5778 - RNA, 32 nt, Homo Sapiens
cucuuaggacauuuuuauaaagucaccuguuu

SEQ ID NO: 5779 - RNA, 32 nt, Homo Sapiens
cucuccaucccagcuauuaauguccuaguccu

SEQ ID NO: 5780 - RNA, 32 nt, Homo Sapiens
gcgagcaagcaaggcgggagggguggccggag

SEQ ID NO: 5781 - RNA, 32 nt, Homo Sapiens
cacccuccggcgggugacagcuccgggaucag

SEQ ID NO: 5782 - RNA, 32 nt, Homo Sapiens
auaacuaugcagccuucccucucuuucuggga

SEQ ID NO: 5783 - RNA, 32 nt, Homo Sapiens
uggaagcauccacucucuccugaggcgagcca

SEQ ID NO: 5784 - RNA, 32 nt, Homo Sapiens
agagaggcuuuuccgaggaaaacugcaagaag

SEQ ID NO: 5785 - RNA, 32 nt, Homo Sapiens
gugccccauggguccccuccccucucagcauu

SEQ ID NO: 5786 - RNA, 26 nt, Homo Sapiens
gaugucccaagcuuggguccccggcc

SEQ ID NO: 5787 - RNA, 32 nt, Homo Sapiens
cacgccauccucggagccccagccuuucaccc

SEQ ID NO: 5788 - RNA, 32 nt, Homo Sapiens
gcugcucggacaggcccccucccggccgaagc

SEQ ID NO: 5789 - RNA, 32 nt, Homo Sapiens
acaaauacauuaucagaaacuggcccaaacca

SEQ ID NO: 5790 - RNA, 32 nt, Homo Sapiens
guuuucaagaugaaguuuuuauugacaacugc

SEQ ID NO: 5791 - RNA, 32 nt, Homo Sapiens
caguagacagaaagugaagaaaacaucaacgu

SEQ ID NO: 5792 - RNA, 32 nt, Homo Sapiens
ggaccuauuuuccucuuuuuuauguuuuagac

SEQ ID NO: 5793 - RNA, 32 nt, Homo Sapiens
aggaggaugaugaggucaaggugugggggcug

SEQ ID NO: 5794 - RNA, 31 nt, Homo Sapiens
cuugcugccggguuugguccaagggcugcga

SEQ ID NO: 5795 - RNA, 32 nt, Homo Sapiens
cccagucagccgcgggaaacgggccgcgacag

SEQ ID NO: 5796 - RNA, 32 nt, Homo Sapiens
cugcggcuggaacucaucuggugcuccccaug

SEQ ID NO: 5797 - RNA, 32 nt, Homo Sapiens
ccccacuucuccccacagagaauggggaagga

SEQ ID NO: 5798 - RNA, 32 nt, Homo Sapiens
uuuuguuuuuuacuuuuuuacacugaguuucu

SEQ ID NO: 5799 - RNA, 32 nt, Homo Sapiens
uauggagacauguggaaacaaaaguuagagcu

SEQ ID NO: 5800 - RNA, 32 nt, Homo Sapiens
ugggauuaaaagacacgugaaaugauacuuuu

SEQ ID NO: 5801 - RNA, 32 nt, Homo Sapiens
accagaaguccagccgcagccucccggcggcc

SEQ ID NO: 5802 - RNA, 32 nt, Homo Sapiens
agcauagaaaaggcacagcaaaaacaugauau

SEQ ID NO: 5803 - RNA, 32 nt, Homo Sapiens
uguugucuuuugccgaccaggagcacuacaga

SEQ ID NO: 5804 - RNA, 32 nt, Homo Sapiens
cgccucacuucaucccagucccgggcgagcag

SEQ ID NO: 5805 - RNA, 32 nt, Homo Sapiens
aggagguuccggugucuggaaaagcacuuuac

SEQ ID NO: 5806 - RNA, 32 nt, Homo Sapiens
acagggcagggccucauuauuuuucacugccc

SEQ ID NO: 5807 - RNA, 32 nt, Homo Sapiens
gauugaugaauagucuuccauuuuggaaacgu

SEQ ID NO: 5808 - RNA, 32 nt, Homo Sapiens
auguuaucuacuuauucauacauuuacaaguu

SEQ ID NO: 5809 - RNA, 32 nt, Homo Sapiens
ccaaaggaacugucuguaagacaaaaaacaaa

SEQ ID NO: 5810 - RNA, 32 nt, Homo Sapiens
gagaggggacugaaaugcugcagcugaggcug

SEQ ID NO: 5811 - RNA, 32 nt, Homo Sapiens
uuauuauacuuguuuucuuuuacaaaauuaaa

SEQ ID NO: 5812 - RNA, 32 nt, Homo Sapiens
agcugaaaagagagggucagggggaggcuggc

SEQ ID NO: 5813 - RNA, 32 nt, Homo Sapiens
gauuuccucuggcuuccaacccaaucagccug

SEQ ID NO: 5814 - RNA, 32 nt, Homo Sapiens
ucugccucagccucugguguagcuggaauuac

SEQ ID NO: 5815 - RNA, 32 nt, Homo Sapiens
agguagcccucucaucgucuuuuaguuccaac

SEQ ID NO: 5816 - RNA, 32 nt, Homo Sapiens
ugguugauauauauguuuaucauaugaaugac

SEQ ID NO: 5817 - RNA, 32 nt, Homo Sapiens
cccuuuaauaccucgcuuggcuuacuugcaaa

SEQ ID NO: 5818 - RNA, 32 nt, Homo Sapiens
uuaauugcaugaaaaugcauguuuagggaugg

SEQ ID NO: 5819 - RNA, 32 nt, Homo Sapiens
gccucaucuuguauuccaacccgacaucccua

SEQ ID NO: 5820 - RNA, 32 nt, Homo Sapiens
uugacacugugcuaauaguuauauucaguaca

SEQ ID NO: 5821 - RNA, 32 nt, Homo Sapiens
ucacgagcugcccacguccucuccaggaaggg

SEQ ID NO: 5822 - RNA, 32 nt, Homo Sapiens
cucuguaaacacacccugggccagcgcucgca

SEQ ID NO: 5823 - RNA, 32 nt, Homo Sapiens
ucuacuuguucccuucuggaaucuguaacuuu

SEQ ID NO: 5824 - RNA, 32 nt, Homo Sapiens
ugacgucuccaugcuguauugucacaagcaca

SEQ ID NO: 5825 - RNA, 32 nt, Homo Sapiens
ggcuuacugugcuaaugugugaagagaaaaaa

SEQ ID NO: 5826 - RNA, 32 nt, Homo Sapiens
ggccccugccccaccagccccuucucugguag

SEQ ID NO: 5827 - RNA, 32 nt, Homo Sapiens
gcuuacaaauagauuuccaugaagauauuugu

SEQ ID NO: 5828 - RNA, 32 nt, Homo Sapiens
cagacauguacaagggcuuucugugagcaaug

SEQ ID NO: 5829 - RNA, 32 nt, Homo Sapiens
cuacaaguuuucugccaagccacucaggugca

SEQ ID NO: 5830 - RNA, 32 nt, Homo Sapiens
caucccauucuauucuguacugugacuuuagu

SEQ ID NO: 5831 - RNA, 32 nt, Homo Sapiens
cgcagcacccucaaguggacauuucuagaaac

SEQ ID NO: 5832 - RNA, 32 nt, Homo Sapiens
uggaggcuccagugacugaggggccuggcucc

SEQ ID NO: 5833 - RNA, 32 nt, Homo Sapiens
ccagagguggccugggaccgccaguugcacgc

SEQ ID NO: 5834 - RNA, 32 nt, Homo Sapiens
gucccuguggccucggucuccuccccaugaag

SEQ ID NO: 5835 - RNA, 32 nt, Homo Sapiens
gacuacagugauuuguauuuuucuaugcacug

SEQ ID NO: 5836 - RNA, 30 nt, Homo Sapiens
uacugugucuguguagaaagaaguagacau

SEQ ID NO: 5837 - RNA, 32 nt, Homo Sapiens
gaaaacuuacagaagaggcaacaauuugguuc

SEQ ID NO: 5838 - RNA, 32 nt, Homo Sapiens
ucuugcccuccgcagcaugcgccccgccugcu

SEQ ID NO: 5839 - RNA, 32 nt, Homo Sapiens
uagaaaaagcaucugagccacuggagggaagg

SEQ ID NO: 5840 - RNA, 32 nt, Homo Sapiens
ggguugcugugauuuuccauuaacucuaaucg

SEQ ID NO: 5841 - RNA, 32 nt, Homo Sapiens
agaccacaggcauuugagccacuuccucaugu

SEQ ID NO: 5842 - RNA, 32 nt, Homo Sapiens
uuuuaggcugggcgcaguggcuuacgccugua

SEQ ID NO: 5843 - RNA, 32 nt, Homo Sapiens
gagcaagaagacuaugcaaaucuuagggcgcu

SEQ ID NO: 5844 - RNA, 29 nt, Homo Sapiens
caguccucagggaagaggacgccaggacu

SEQ ID NO: 5845 - RNA, 32 nt, Homo Sapiens
ccgugagcuggcccagcccgcguccgugcuga

SEQ ID NO: 5846 - RNA, 30 nt, Homo Sapiens
uggauagagaagcaggaagagcacuggacu

SEQ ID NO: 5847 - RNA, 32 nt, Homo Sapiens
agacccugacagagaccccccucggccucaag

SEQ ID NO: 5848 - RNA, 32 nt, Homo Sapiens
agcugggggcauggcguccggagcggcucgcu

SEQ ID NO: 5849 - RNA, 32 nt, Homo Sapiens
cuacaaagaacaacugaauagguggaaaacau

SEQ ID NO: 5850 - RNA, 32 nt, Homo Sapiens
ccuuguuagguagugugcugggacgccuccgu

SEQ ID NO: 5851 - RNA, 32 nt, Homo Sapiens
acaggcgguggcggcgggaccauggaggcggc

SEQ ID NO: 5852 - RNA, 32 nt, Homo Sapiens
ccugggccggcggcgagcggcgaguacgagug

SEQ ID NO: 5853 - RNA, 32 nt, Homo Sapiens
gugcggcgguggacaggcgccagcacauuucu

SEQ ID NO: 5854 - RNA, 32 nt, Homo Sapiens
ggcggugggauccggcgggcggugcuagcucc

SEQ ID NO: 5855 - RNA, 32 nt, Homo Sapiens
uggaggagcaggccauucuggaugccauggcc

SEQ ID NO: 5856 - RNA, 32 nt, Homo Sapiens
uaagccagaaaauuauuuacaauguauguguc

SEQ ID NO: 5857 - RNA, 32 nt, Homo Sapiens
agaugucugcugcagagcugggcugagaguuc

SEQ ID NO: 5858 - RNA, 32 nt, Homo Sapiens
agguaucugaagauguugaagaccauuuccug

SEQ ID NO: 5859 - RNA, 32 nt, Homo Sapiens
ucaaguacauuuccucuugcaagcggcugagg

SEQ ID NO: 5860 - RNA, 32 nt, Homo Sapiens
ucucgcucaccccggcccacuccagcggcgac

SEQ ID NO: 5861 - RNA, 32 nt, Homo Sapiens
ugagagaagaggcagcagcagcggcggcagca

SEQ ID NO: 5862 - RNA, 32 nt, Homo Sapiens
uuuuccucauuucuuccuucuagaacacagaa

SEQ ID NO: 5863 - RNA, 32 nt, Homo Sapiens
cuuagcuaaaauuguuaaaauaaacuuuaaua

SEQ ID NO: 5864 - RNA, 32 nt, Homo Sapiens
gagagagauuaugcagcgggcuuuugauugau

SEQ ID NO: 5865 - RNA, 32 nt, Homo Sapiens
acgagacccagcggcccggguuggagcgucca

SEQ ID NO: 5866 - RNA, 32 nt, Homo Sapiens
uuacaggugugagccaccaugcccaacaccca

SEQ ID NO: 5867 - RNA, 32 nt, Homo Sapiens
auaaaugaagcaugcacagcuacaggcuuucu

SEQ ID NO: 5868 - RNA, 32 nt, Homo Sapiens
guugaauagaguugauaacuauuuucaguuuu

SEQ ID NO: 5869 - RNA, 32 nt, Homo Sapiens
gcgcgcccgcaggguggagaucgcugcauccc

SEQ ID NO: 5870 - RNA, 32 nt, Homo Sapiens
cuucaucuccugggaccacgggcauccaggcu

SEQ ID NO: 5871 - RNA, 32 nt, Homo Sapiens
guugagauauugugugccacaacccccacagu

SEQ ID NO: 5872 - RNA, 32 nt, Homo Sapiens
gaugaaugugugggggcgacaauggcaaggag

SEQ ID NO: 5873 - RNA, 28 nt, Homo Sapiens
gggcaggggcggcccucguugucagggc

SEQ ID NO: 5874 - RNA, 32 nt, Homo Sapiens
ucccucggcgggccgagccuccccucucuccc

SEQ ID NO: 5875 - RNA, 32 nt, Homo Sapiens
ggagacggaagacgugugaauguauuacauua

SEQ ID NO: 5876 - RNA, 29 nt, Homo Sapiens
aaaggauaaaguuuucuuuuuuguuuucc

SEQ ID NO: 5877 - RNA, 32 nt, Homo Sapiens
aauguaaacuaaauccgcgucugugaauacgu

SEQ ID NO: 5878 - RNA, 32 nt, Homo Sapiens
ggggcugcgggguggggaccccaaggcuuucu

SEQ ID NO: 5879 - RNA, 32 nt, Homo Sapiens
acuugaucccaguagacugaggucuucccuuu

SEQ ID NO: 5880 - RNA, 32 nt, Homo Sapiens
uucuggugagacggagaccccgguggcagugg

SEQ ID NO: 5881 - RNA, 32 nt, Homo Sapiens
gggggaugggagaggggucccagacuuuacca

SEQ ID NO: 5882 - RNA, 32 nt, Homo Sapiens
gauaagacaauucugaaacaaaaacuccaagc

SEQ ID NO: 5883 - RNA, 32 nt, Homo Sapiens
gggccggcauuuguauugggguugcaaugacu

SEQ ID NO: 5884 - RNA, 32 nt, Homo Sapiens
cucucauccaaauggcauaugacccuguuuac

SEQ ID NO: 5885 - RNA, 32 nt, Homo Sapiens
uguuaggaaugggaggccccuuccugccugcc

SEQ ID NO: 5886 - RNA, 32 nt, Homo Sapiens
aggcggugaagagcuucaucgagacgcagaag

SEQ ID NO: 5887 - RNA, 32 nt, Homo Sapiens
cugcuagaggggcugcuugcgccaggcgccgg

SEQ ID NO: 5888 - RNA, 32 nt, Homo Sapiens
cguggaggcccuggacugcugcucguucuuua

SEQ ID NO: 5889 - RNA, 32 nt, Homo Sapiens
ccuuaguguuuagauuuuuuuaugauagggaa

SEQ ID NO: 5890 - RNA, 32 nt, Homo Sapiens
agcucccucccuucuucccagcccuuugaccu

SEQ ID NO: 5891 - RNA, 32 nt, Homo Sapiens
gucacaagaugaugauugcguagauguugccu

SEQ ID NO: 5892 - RNA, 32 nt, Homo Sapiens
ugcccugcuggaaaucgugaaaagcaagagag

SEQ ID NO: 5893 - RNA, 32 nt, Homo Sapiens
ucucuucacucuuuuuacugucuugcaaaaaa

SEQ ID NO: 5894 - RNA, 32 nt, Homo Sapiens
gugugucugugucauguaaaaauguuuucacc

SEQ ID NO: 5895 - RNA, 32 nt, Homo Sapiens
ucagccugaagaaguacuugugaaugugguug

SEQ ID NO: 5896 - RNA, 32 nt, Homo Sapiens
caagcaauaaaguggaagacgaaccaagauuu

SEQ ID NO: 5897 - RNA, 32 nt, Homo Sapiens
aguugcguguguuuuucuuaauugaaagacuu

SEQ ID NO: 5898 - RNA, 32 nt, Homo Sapiens
gcguucaauuugaagagcaguuccuaacuuca

SEQ ID NO: 5899 - RNA, 32 nt, Homo Sapiens
ccugcaacagagcuccugcugcuucuggguga

SEQ ID NO: 5900 - RNA, 32 nt, Homo Sapiens
agccaccaauacuggauuuguuuguuuuucau

SEQ ID NO: 5901 - RNA, 32 nt, Homo Sapiens
ugagccggcguacgcacuuucccgcggacuuu

SEQ ID NO: 5902 - RNA, 32 nt, Homo Sapiens
auuagccaggcgugcuggcacgcgucuguagu

SEQ ID NO: 5903 - RNA, 32 nt, Homo Sapiens
ucccgggaccgcgaccccggccgcccagagau

SEQ ID NO: 5904 - RNA, 32 nt, Homo Sapiens
aggggaaucugcuucuuaggaguggguugagc

SEQ ID NO: 5905 - RNA, 32 nt, Homo Sapiens
uguggccccggaagcuggcccugcgugccaug

SEQ ID NO: 5906 - RNA, 32 nt, Homo Sapiens
aggcgcccggugccccggccggcgaagaccau

SEQ ID NO: 5907 - RNA, 32 nt, Homo Sapiens
cuccgucugcuccaaugacugagcagcaucca

SEQ ID NO: 5908 - RNA, 32 nt, Homo Sapiens
ugguggccaaaauaaaaccuauuuagaaauuu

SEQ ID NO: 5909 - RNA, 32 nt, Homo Sapiens
gguggcccgggcggccucacaucggcggcgcc

SEQ ID NO: 5910 - RNA, 32 nt, Homo Sapiens
guauuaucuucagauuuccagagcucugucuc

SEQ ID NO: 5911 - RNA, 32 nt, Homo Sapiens
aaauuuguauggcacuggaacuuuggcaaagc

SEQ ID NO: 5912 - RNA, 32 nt, Homo Sapiens
gcaacuacuggagccuggaccccgccucccag

SEQ ID NO: 5913 - RNA, 32 nt, Homo Sapiens
auuuucuccagaugaguggcgauacuauuaug

SEQ ID NO: 5914 - RNA, 32 nt, Homo Sapiens
uaauuucuuuaacuuauuucaaaaucaucuca

SEQ ID NO: 5915 - RNA, 32 nt, Homo Sapiens
uuuuuaaaauaccacuuuuagugucagugaac

SEQ ID NO: 5916 - RNA, 32 nt, Homo Sapiens
uuugggaaaugaugaagugcacauuguuuggu

SEQ ID NO: 5917 - RNA, 32 nt, Homo Sapiens
cagggcuguggguggggaaggaaggcgugucc

SEQ ID NO: 5918 - RNA, 32 nt, Homo Sapiens
aaauccuuaagggaugagaggcugcuuguuau

SEQ ID NO: 5919 - RNA, 32 nt, Homo Sapiens
ucuuagccccaacggccgcgggcuucagcgcu

SEQ ID NO: 5920 - RNA, 32 nt, Homo Sapiens
ugguuugagucuuuuuuuucccuccucuuauu

SEQ ID NO: 5921 - RNA, 32 nt, Homo Sapiens
uguaaacugaagaugaccagcucgugggacca

SEQ ID NO: 5922 - RNA, 29 nt, Homo Sapiens
gaccaugguaguguucaauggccuucuua

SEQ ID NO: 5923 - RNA, 32 nt, Homo Sapiens
gaugggugggucucugaaaggacagagauuug

SEQ ID NO: 5924 - RNA, 32 nt, Homo Sapiens
cgcagacucugcaaccuucaugcugcccgcug

SEQ ID NO: 5925 - RNA, 32 nt, Homo Sapiens
cacugauaaguuagagaaaacacccaaauuau

SEQ ID NO: 5926 - RNA, 32 nt, Homo Sapiens
ugcccgcgcaaggcgccgcggggccaccagca

SEQ ID NO: 5927 - RNA, 32 nt, Homo Sapiens
cccagugcggccgcccggggagccgcgggaga

SEQ ID NO: 5928 - RNA, 32 nt, Homo Sapiens
ccgggccugccucucucagcauccccucuagc

SEQ ID NO: 5929 - RNA, 32 nt, Homo Sapiens
acuagggguaaggucagggaaugcuuaagcuc

SEQ ID NO: 5930 - RNA, 32 nt, Homo Sapiens
uccaaggauucaccguauuccaaaccagagau

SEQ ID NO: 5931 - RNA, 32 nt, Homo Sapiens
gagaaucugggaagagaaauggagaauaagca

SEQ ID NO: 5932 - RNA, 32 nt, Homo Sapiens
accagccugggcaacauggagagaccccuucu

SEQ ID NO: 5933 - RNA, 32 nt, Homo Sapiens
cccacucugucuccugcccccgggggccugug

SEQ ID NO: 5934 - RNA, 32 nt, Homo Sapiens
ccaggguuacuuugcaagcuaacugacauauc

SEQ ID NO: 5935 - RNA, 32 nt, Homo Sapiens
uuuuuuucaaaauaaaguuuuaggaaauuugc

SEQ ID NO: 5936 - RNA, 32 nt, Homo Sapiens
gagguugggggaggagcuuacauauaaagcca

SEQ ID NO: 5937 - RNA, 32 nt, Homo Sapiens
accucccugaccagcucuggcuucugcuccug

SEQ ID NO: 5938 - RNA, 32 nt, Homo Sapiens
ggcacgagggucacggcggaucuuauugucua

SEQ ID NO: 5939 - RNA, 32 nt, Homo Sapiens
cgcuccccuggccacacccuccgccuggacgc

SEQ ID NO: 5940 - RNA, 30 nt, Homo Sapiens
ggagguggugggcgcgcgggcagcggugcc

SEQ ID NO: 5941 - RNA, 32 nt, Homo Sapiens
guuagcaggaacgaaacugaccaagacaauau

SEQ ID NO: 5942 - RNA, 32 nt, Homo Sapiens
acaaaacaggaguucgucugagcaaucaggga

SEQ ID NO: 5943 - RNA, 32 nt, Homo Sapiens
accaagggcauccagcagcauuacaagcaugc

SEQ ID NO: 5944 - RNA, 32 nt, Homo Sapiens
auacauauucuuaauauuugagcauugaggca

SEQ ID NO: 5945 - RNA, 32 nt, Homo Sapiens
ccucccugaccuccccgccagcuggacuccag

SEQ ID NO: 5946 - RNA, 32 nt, Homo Sapiens
cucacgaagacagaguuauuaaaccauucaaa

SEQ ID NO: 5947 - RNA, 32 nt, Homo Sapiens
accuauugguguauuuuucagaauacaucccc

SEQ ID NO: 5948 - RNA, 32 nt, Homo Sapiens
ucuacuaaaaauacaaaaauuacccaggcaua

SEQ ID NO: 5949 - RNA, 32 nt, Homo Sapiens
agcccacaagcugccacuggccggcgacacug

SEQ ID NO: 5950 - RNA, 32 nt, Homo Sapiens
cauguugccaaggcagagagccagcagagagg

SEQ ID NO: 5951 - RNA, 32 nt, Homo Sapiens
gagugcgggcgcccggccccacucuccggauc

SEQ ID NO: 5952 - RNA, 32 nt, Homo Sapiens
aucaagaaacugcaggaagagaaaacuagaaa

SEQ ID NO: 5953 - RNA, 32 nt, Homo Sapiens
ccugugcuuccugauccaauggugccaaaccc

SEQ ID NO: 5954 - RNA, 32 nt, Homo Sapiens
aaauggaaauuccacugggucugcagcucaca

SEQ ID NO: 5955 - RNA, 32 nt, Homo Sapiens
aauaucuauaucuauauauauaaauauacuuu

SEQ ID NO: 5956 - RNA, 32 nt, Homo Sapiens
gggauuacaagcaugagcuacugcaccugccc

SEQ ID NO: 5957 - RNA, 32 nt, Homo Sapiens
gacuuuuuaugcguccggguuaauuuuucacu

SEQ ID NO: 5958 - RNA, 32 nt, Homo Sapiens
auuacacagaugcacagcuggacgugggaucc

SEQ ID NO: 5959 - RNA, 32 nt, Homo Sapiens
uuucuuuucacacaaucucuuuacagcagaau

SEQ ID NO: 5960 - RNA, 32 nt, Homo Sapiens
gauaucagcuuagaagagauugagagcauuga

SEQ ID NO: 5961 - RNA, 31 nt, Homo Sapiens
ggcugguucugaguucuggugagacggagac

SEQ ID NO: 5962 - RNA, 32 nt, Homo Sapiens
uucuuggaggaucaacaaaacugcccugggaa

SEQ ID NO: 5963 - RNA, 32 nt, Homo Sapiens
uuuugagaguguuuaagcaauguauaguggcc

SEQ ID NO: 5964 - RNA, 31 nt, Homo Sapiens
ggagggaugacggagcugccaagggcucucc

SEQ ID NO: 5965 - RNA, 32 nt, Homo Sapiens
uagcugacuggaagugcuuaaucuggaucguc

SEQ ID NO: 5966 - RNA, 32 nt, Homo Sapiens
ugcaauuuggguuaaaaacauuuuggaaaaua

SEQ ID NO: 5967 - RNA, 32 nt, Homo Sapiens
ggucccuaaaccaguacccauccaccacagcc

SEQ ID NO: 5968 - RNA, 32 nt, Homo Sapiens
gccagagugaugggggcgcuuggcgaggccaa

SEQ ID NO: 5969 - RNA, 32 nt, Homo Sapiens
cucacugaacacacuggaauggcugaguuuaa

SEQ ID NO: 5970 - RNA, 32 nt, Homo Sapiens
aucuuuaaaaacaggaaguugaacccaagcug

SEQ ID NO: 5971 - RNA, 32 nt, Homo Sapiens
cuccauagguuaugacuggugaaacaggggcc

SEQ ID NO: 5972 - RNA, 32 nt, Homo Sapiens
cugucugcuucccuggaauccaagaugcugag

SEQ ID NO: 5973 - RNA, 32 nt, Homo Sapiens
uauucagaaaaccaaaaauaaaaaauacggaa

SEQ ID NO: 5974 - RNA, 32 nt, Homo Sapiens
auagaagcaggguuuuuuuuuaucuuuuuucu

SEQ ID NO: 5975 - RNA, 32 nt, Homo Sapiens
caggagccuccugacccugugaugccugacac

SEQ ID NO: 5976 - RNA, 32 nt, Homo Sapiens
cuguuucgaaaagaaggaaaaggacggacaca

SEQ ID NO: 5977 - RNA, 32 nt, Homo Sapiens
cccccggccccgggaccccggagcggagauug

SEQ ID NO: 5978 - RNA, 32 nt, Homo Sapiens
ggucaucgucuuccuuuuauagcuguuuuacu

SEQ ID NO: 5979 - RNA, 32 nt, Homo Sapiens
gugcugugucauuguugcucugcuuccuuuca

SEQ ID NO: 5980 - RNA, 32 nt, Homo Sapiens
cuacuuacagaaaaguaaugagacauagauaa

SEQ ID NO: 5981 - RNA, 32 nt, Homo Sapiens
aaaaaaaaaaaacuuuacuaagaugacauugc

SEQ ID NO: 5982 - RNA, 32 nt, Homo Sapiens
gguggcugcugggacuccaugcaaggcuccuc

SEQ ID NO: 5983 - RNA, 32 nt, Homo Sapiens
ggguuauuuuugguuagugcaauuuuguuuuu

SEQ ID NO: 5984 - RNA, 32 nt, Homo Sapiens
gcacaauaugaaccugaagauuaaacugaaga

SEQ ID NO: 5985 - RNA, 32 nt, Homo Sapiens
ggagguugaggaggaguggccaggaaacaaga

SEQ ID NO: 5986 - RNA, 32 nt, Homo Sapiens
ugugaaccugaccugcagacaguccaccugaa

SEQ ID NO: 5987 - RNA, 32 nt, Homo Sapiens
cacaagcguccaccaaacagugucucaggccu

SEQ ID NO: 5988 - RNA, 32 nt, Homo Sapiens
cucauggcagagccgccuccuaggucuuggca

SEQ ID NO: 5989 - RNA, 32 nt, Homo Sapiens
uugacucuauauauuuagauuucgguuuucuc

SEQ ID NO: 5990 - RNA, 32 nt, Homo Sapiens
aauuuuguguuccaaggcaacuguaucauagg

SEQ ID NO: 5991 - RNA, 32 nt, Homo Sapiens
ggcucggguuuccgccgagacgacagggacug

SEQ ID NO: 5992 - RNA, 32 nt, Homo Sapiens
aaaucuucccugaguucugaacccagcaccau

SEQ ID NO: 5993 - RNA, 32 nt, Homo Sapiens
aggucaggcuccuggggcccuagaagccgggg

SEQ ID NO: 5994 - RNA, 32 nt, Homo Sapiens
cguguccagaagcagcacuuugacugcucugg

SEQ ID NO: 5995 - RNA, 31 nt, Homo Sapiens
agaaggcaaaaauaguuuggauauguaaaac

SEQ ID NO: 5996 - RNA, 32 nt, Homo Sapiens
ugccgcgcucggauucugaguuucacaagaau

SEQ ID NO: 5997 - RNA, 32 nt, Homo Sapiens
aaccuccguaaagcugccccugguguggggaa

SEQ ID NO: 5998 - RNA, 32 nt, Homo Sapiens
cggcgaggaggaggccgcggcgcgggacgcau

SEQ ID NO: 5999 - RNA, 32 nt, Homo Sapiens
accgacugcgcgcgcggcugcgggcaaacauc

SEQ ID NO: 6000 - RNA, 32 nt, Homo Sapiens
ucagaagcgaccuuugaccuccccaucagccu

SEQ ID NO: 6001 - RNA, 32 nt, Homo Sapiens
uccugggauaugggggcgggggcggggcaggg

SEQ ID NO: 6002 - RNA, 32 nt, Homo Sapiens
uucuauuuuuauuuuuaauugguuuaguucuu

SEQ ID NO: 6003 - RNA, 32 nt, Homo Sapiens
gugcagaagggggcuguaucaacaucaauuag

SEQ ID NO: 6004 - RNA, 32 nt, Homo Sapiens
ugucugacccaccagcagugcaaugggcaggu

SEQ ID NO: 6005 - RNA, 32 nt, Homo Sapiens
auugggaccauggcagagaaaagcaggagagg

SEQ ID NO: 6006 - RNA, 32 nt, Homo Sapiens
augaccccacggcuccuccuuaugacuccauu

SEQ ID NO: 6007 - RNA, 32 nt, Homo Sapiens
aagggaacuguaauuacuuguauuuuuguaag

SEQ ID NO: 6008 - RNA, 32 nt, Homo Sapiens
ucagaucaguucuaucacuggcacuacagaau

SEQ ID NO: 6009 - RNA, 32 nt, Homo Sapiens
gccugcugcugaggcccggccugcccaucggc

SEQ ID NO: 6010 - RNA, 32 nt, Homo Sapiens
uggaggaaaaagaaaaagaaauaagaaauucu

SEQ ID NO: 6011 - RNA, 32 nt, Homo Sapiens
uucagccugcgcugguuggugaaacagagaug

SEQ ID NO: 6012 - RNA, 32 nt, Homo Sapiens
accggggagacggagguugcagugagccgagu

SEQ ID NO: 6013 - RNA, 32 nt, Homo Sapiens
gguucuaaaaauugugaucagaccauaauguu

SEQ ID NO: 6014 - RNA, 32 nt, Homo Sapiens
ugcaauauuuggauugucauucuuacaaaaca

SEQ ID NO: 6015 - RNA, 28 nt, Homo Sapiens
gaaagggggcggccagcugagucggauc

SEQ ID NO: 6016 - RNA, 32 nt, Homo Sapiens
auuucuguggaauuccaaauaaguaaaacuga

SEQ ID NO: 6017 - RNA, 32 nt, Homo Sapiens
gaagugucuucuuccaacuucauuucaaccca

SEQ ID NO: 6018 - RNA, 32 nt, Homo Sapiens
gacucggacaccggacucggacaccggcuucc

SEQ ID NO: 6019 - RNA, 32 nt, Homo Sapiens
ugcaauguuuuaaggucuaucuuaagaagccc

SEQ ID NO: 6020 - RNA, 32 nt, Homo Sapiens
aaggggagaaaguuaaagaaaucgcccacaug

SEQ ID NO: 6021 - RNA, 32 nt, Homo Sapiens
cuaaaugagucaaaguucaaaaauauucauuu

SEQ ID NO: 6022 - RNA, 32 nt, Homo Sapiens
aauuccggaagcucuuuccaggaugacggacg

SEQ ID NO: 6023 - RNA, 32 nt, Homo Sapiens
cuuggccccaucucaugggcgucauccucagc

SEQ ID NO: 6024 - RNA, 32 nt, Homo Sapiens
uccgugggcagagcccgcgucugguccagagu

SEQ ID NO: 6025 - RNA, 32 nt, Homo Sapiens
gcuccggugauucacccgccucagcuucccaa

SEQ ID NO: 6026 - RNA, 32 nt, Homo Sapiens
uucaguaaauauuauugguuguuguauugauc

SEQ ID NO: 6027 - RNA, 32 nt, Homo Sapiens
gugugaguuaaaccucuuuccuuugcaaauua

SEQ ID NO: 6028 - RNA, 32 nt, Homo Sapiens
guggggcacggggggcaguggguacuuguaaa

SEQ ID NO: 6029 - RNA, 32 nt, Homo Sapiens
gagaacaaagaugaccauaaccacugaaggga

SEQ ID NO: 6030 - RNA, 32 nt, Homo Sapiens
gcaggacuccgucagugauucuuucagcucuu

SEQ ID NO: 6031 - RNA, 32 nt, Homo Sapiens
acaccugccccgagugcggcaaggccuucagc

SEQ ID NO: 6032 - RNA, 32 nt, Homo Sapiens
uuuauuugcuguaucaucaucaucaguaucau

SEQ ID NO: 6033 - RNA, 32 nt, Homo Sapiens
auuggcaugaagaguacagauguaaucacaag

SEQ ID NO: 6034 - RNA, 32 nt, Homo Sapiens
acuuucguuaugggccaauauuagcucuuaug

SEQ ID NO: 6035 - RNA, 32 nt, Homo Sapiens
uaguuuuguaaauauuuaauauuccgcuaauu

SEQ ID NO: 6036 - RNA, 32 nt, Homo Sapiens
acuauuuuaaaauuauauuagaccuuaagcug

SEQ ID NO: 6037 - RNA, 32 nt, Homo Sapiens
ccauacugcuacugccucauguaggauccggc

SEQ ID NO: 6038 - RNA, 32 nt, Homo Sapiens
ccgccuccugaccagcccucgucagccacucg

SEQ ID NO: 6039 - RNA, 32 nt, Homo Sapiens
gggcuaagauuauaaacaaauuuuauguuucu

SEQ ID NO: 6040 - RNA, 32 nt, Homo Sapiens
ggugcuggucuggccuggccguguggugauga

SEQ ID NO: 6041 - RNA, 32 nt, Homo Sapiens
ccagccucgccaacauggugagacccugucuc

SEQ ID NO: 6042 - RNA, 32 nt, Homo Sapiens
cagcccagucucggcccuccccccagcccucu

SEQ ID NO: 6043 - RNA, 32 nt, Homo Sapiens
ggccucggcguccggacuguggcaccgcgcgg

SEQ ID NO: 6044 - RNA, 32 nt, Homo Sapiens
ucaguauuaauauauacgguauuauauaacag

SEQ ID NO: 6045 - RNA, 32 nt, Homo Sapiens
caaagucacuuccucgucuccuccuccuuccc

SEQ ID NO: 6046 - RNA, 32 nt, Homo Sapiens
cgucccacgggccggacccgcggccgcguucg

SEQ ID NO: 6047 - RNA, 32 nt, Homo Sapiens
ccagcugcccguuuccucccauggcccaguau

SEQ ID NO: 6048 - RNA, 32 nt, Homo Sapiens
aaggaggcgccugcuggccuccccuuacagug

SEQ ID NO: 6049 - RNA, 32 nt, Homo Sapiens
ccagugcguuuuuaguuaaccuuuaaauaugc

SEQ ID NO: 6050 - RNA, 32 nt, Homo Sapiens
aaauuuuuaaauuuauuauagagugggaggca

SEQ ID NO: 6051 - RNA, 32 nt, Homo Sapiens
accagccugggaaauauagugaaacuccuguc

SEQ ID NO: 6052 - RNA, 32 nt, Homo Sapiens
acccuagcgggccccgccggcggucggccucc

SEQ ID NO: 6053 - RNA, 32 nt, Homo Sapiens
gacgcgccucgccguggggcggugccugcgcc

SEQ ID NO: 6054 - RNA, 32 nt, Homo Sapiens
gccgcccgcgccagcaaccgggcccgaucacc

SEQ ID NO: 6055 - RNA, 32 nt, Homo Sapiens
cacuucugggcuucagcacacaucaguguggu

SEQ ID NO: 6056 - RNA, 32 nt, Homo Sapiens
cccuuguaaucccagcacuuugggaggcugag

SEQ ID NO: 6057 - RNA, 32 nt, Homo Sapiens
cauacucccucuuccuucucgauggaguuaag

SEQ ID NO: 6058 - RNA, 32 nt, Homo Sapiens
cccuuguaauccuagcacuuugggaggccgag

SEQ ID NO: 6059 - RNA, 32 nt, Homo Sapiens
uauaaggugguacauuccuaaggguauuuaua

SEQ ID NO: 6060 - RNA, 32 nt, Homo Sapiens
cagaccugcguugugugucuguguguugagug

SEQ ID NO: 6061 - RNA, 32 nt, Homo Sapiens
cuugcagcugcagcugacaacaggcaggaugg

SEQ ID NO: 6062 - RNA, 32 nt, Homo Sapiens
uucauuuuaaacacacaagauuuaauugaaag

SEQ ID NO: 6063 - RNA, 32 nt, Homo Sapiens
aucugcuccagauggaaaauggguaaggaaca

SEQ ID NO: 6064 - RNA, 32 nt, Homo Sapiens
uuuaacacagcuuuucuaggaaggggauggga

SEQ ID NO: 6065 - RNA, 32 nt, Homo Sapiens
gccagacaguacaugggggagaaggacuuuca

SEQ ID NO: 6066 - RNA, 32 nt, Homo Sapiens
aaugagcagcagcugacugaauuuucauaaga

SEQ ID NO: 6067 - RNA, 32 nt, Homo Sapiens
gucgucgccugcccgcgccugcgcagcguccc

SEQ ID NO: 6068 - RNA, 32 nt, Homo Sapiens
uugcgcuguuucagccuccugauucaacuccu

SEQ ID NO: 6069 - RNA, 32 nt, Homo Sapiens
ccagcccgcgcgcuagcuccuucucucgcccg

SEQ ID NO: 6070 - RNA, 32 nt, Homo Sapiens
uuucuuuuuucuuuuucuuuuuuuuuagaugg

SEQ ID NO: 6071 - RNA, 32 nt, Homo Sapiens
uagagauuccuccccugcuaaaguucuucaug

SEQ ID NO: 6072 - RNA, 32 nt, Homo Sapiens
aggcggcggagaggaugacugccgcugccauu

SEQ ID NO: 6073 - RNA, 32 nt, Homo Sapiens
gacugugaucaaugcuuuacuaauguuccaac

SEQ ID NO: 6074 - RNA, 32 nt, Homo Sapiens
aggagccagccuccccgcacugcuucagaugg

SEQ ID NO: 6075 - RNA, 32 nt, Homo Sapiens
ucagcccgguaagcugcagcucugcucaacug

SEQ ID NO: 6076 - RNA, 31 nt, Homo Sapiens
acuugcaaauaaaaauacaauauuaaacaga

SEQ ID NO: 6077 - RNA, 32 nt, Homo Sapiens
ucucuggagcugcccgcccaccaggggcaaug

SEQ ID NO: 6078 - RNA, 32 nt, Homo Sapiens
ccggaccacagugggcauggacggcacccucu

SEQ ID NO: 6079 - RNA, 32 nt, Homo Sapiens
cauugccuugaguuuguaggugccacuacuac

SEQ ID NO: 6080 - RNA, 32 nt, Homo Sapiens
agauccuucaaucaggggcugcugcugagcuu

SEQ ID NO: 6081 - RNA, 32 nt, Homo Sapiens
gaaguucugauccccaaagccacagcagggga

SEQ ID NO: 6082 - RNA, 32 nt, Homo Sapiens
ugguuaucgguguccggcgguauuauuuuuac

SEQ ID NO: 6083 - RNA, 32 nt, Homo Sapiens
auaccuacauugacucaagaaauauuuacgca

SEQ ID NO: 6084 - RNA, 32 nt, Homo Sapiens
ucuuuuaaguaguugauguggaaaacauuuua

SEQ ID NO: 6085 - RNA, 32 nt, Homo Sapiens
gcuauuauuucugguucuaaugaagaauaaua

SEQ ID NO: 6086 - RNA, 32 nt, Homo Sapiens
cggcuucccccgcuccccggugcugaggagag

SEQ ID NO: 6087 - RNA, 32 nt, Homo Sapiens
ggaggaggccaccagauucagaauucagaauu

SEQ ID NO: 6088 - RNA, 32 nt, Homo Sapiens
caaaauaagagaaaaaauuaaauugcagaugg

SEQ ID NO: 6089 - RNA, 32 nt, Homo Sapiens
gcugcagaucugggacacggccggccaggagc

SEQ ID NO: 6090 - RNA, 32 nt, Homo Sapiens
uggcaguauguauauauuguguuaaguuccuc

SEQ ID NO: 6091 - RNA, 32 nt, Homo Sapiens
aggacccuccccacccugaacaaaucuugggu

SEQ ID NO: 6092 - RNA, 32 nt, Homo Sapiens
uuuccuuaauaaaaucggaagcaagguuaggc

SEQ ID NO: 6093 - RNA, 32 nt, Homo Sapiens
cacucccaggccagcccaccccggcggaccgg

SEQ ID NO: 6094 - RNA, 32 nt, Homo Sapiens
gugaugauauauuauuuugugaaacuuugugu

SEQ ID NO: 6095 - RNA, 32 nt, Homo Sapiens
uugccccuaucccacacuaugacaucagaacu

SEQ ID NO: 6096 - RNA, 32 nt, Homo Sapiens
uuuuuucaugcuuugcucuuuggauuuauaac

SEQ ID NO: 6097 - RNA, 32 nt, Homo Sapiens
gcaagcagcucuuccagccccaguugagccuu

SEQ ID NO: 6098 - RNA, 32 nt, Homo Sapiens
gcugcuagcauggcagaaggucuaugggggca

SEQ ID NO: 6099 - RNA, 32 nt, Homo Sapiens
uuuguaggagcuuaccugugauuguggugggc

SEQ ID NO: 6100 - RNA, 32 nt, Homo Sapiens
cucuccuggcauccccgcauggggccauggug

SEQ ID NO: 6101 - RNA, 32 nt, Homo Sapiens
gcuuguaaaaaguugccugguuauauuaugcc

SEQ ID NO: 6102 - RNA, 32 nt, Homo Sapiens
uguuagcccaaguugaauagcauagauguggu

SEQ ID NO: 6103 - RNA, 32 nt, Homo Sapiens
aaaacugaacaaacagaagugauuuuaucuaa

SEQ ID NO: 6104 - RNA, 32 nt, Homo Sapiens
gacccggcucccagcccucgaacucgguaacc

SEQ ID NO: 6105 - RNA, 32 nt, Homo Sapiens
uaauauaaauuaacugaugcauucauaagauu

SEQ ID NO: 6106 - RNA, 32 nt, Homo Sapiens
cuaagaaggugauuagucaguagggugugaaa

SEQ ID NO: 6107 - RNA, 32 nt, Homo Sapiens
acaacugccuguuuccuccaccuccaccccca

SEQ ID NO: 6108 - RNA, 32 nt, Homo Sapiens
ccccuccccguccgcccccagugcugcguucu

SEQ ID NO: 6109 - RNA, 32 nt, Homo Sapiens
uauugaugaaagaaaccgucuuugcguuacac

SEQ ID NO: 6110 - RNA, 32 nt, Homo Sapiens
uaugcuuuuuaaagagucugugguuaugagag

SEQ ID NO: 6111 - RNA, 32 nt, Homo Sapiens
gcucaaaaauuuguuuuaggucagagauuuua

SEQ ID NO: 6112 - RNA, 32 nt, Homo Sapiens
ucuucucucgggaccaggccuacgccaucaac

SEQ ID NO: 6113 - RNA, 32 nt, Homo Sapiens
gcucucugcccccaguguugaaaaucacaugu

SEQ ID NO: 6114 - RNA, 32 nt, Homo Sapiens
uuggaaagguuuucuccugauuuuuuggaaaa

SEQ ID NO: 6115 - RNA, 32 nt, Homo Sapiens
ccuugguuuccccuacucuccuccugccccaa

SEQ ID NO: 6116 - RNA, 32 nt, Homo Sapiens
gcauuccugcugucuuggccuccaccuagacc

SEQ ID NO: 6117 - RNA, 32 nt, Homo Sapiens
aucguuuucauuagauguacauuuccugguuc

SEQ ID NO: 6118 - RNA, 32 nt, Homo Sapiens
ucccaggcguaaagggggauguucuaugccgg

SEQ ID NO: 6119 - RNA, 32 nt, Homo Sapiens
uguggcagcucuuuucccuguucaccucccgc

SEQ ID NO: 6120 - RNA, 32 nt, Homo Sapiens
aacugacugccccgcaucaccggagcguccca

SEQ ID NO: 6121 - RNA, 32 nt, Homo Sapiens
gaucugcccguuguguuugugaaacagagaaa

SEQ ID NO: 6122 - RNA, 32 nt, Homo Sapiens
ggagauaagaaggauccuggaacuuuaaagag

SEQ ID NO: 6123 - RNA, 32 nt, Homo Sapiens
gcccagagacugggcugcucucccggaggcca

SEQ ID NO: 6124 - RNA, 32 nt, Homo Sapiens
ucuuugagaugaacgauaaugauccacgcaaa

SEQ ID NO: 6125 - RNA, 32 nt, Homo Sapiens
ccccccgccuccccgucugucugcuuucccca

SEQ ID NO: 6126 - RNA, 32 nt, Homo Sapiens
augauuuaaaauugcacuugcacuucaagaac

SEQ ID NO: 6127 - RNA, 31 nt, Homo Sapiens
ugaagaaguggagauugucagaauuauccaa

SEQ ID NO: 6128 - RNA, 32 nt, Homo Sapiens
aagggagcgguaggcugccaucuuugcuguuu

SEQ ID NO: 6129 - RNA, 32 nt, Homo Sapiens
ugccuugcauuacacauaguaaacuuucuuua

SEQ ID NO: 6130 - RNA, 32 nt, Homo Sapiens
caaugaagaacagaaguaaucugauuagucaa

SEQ ID NO: 6131 - RNA, 32 nt, Homo Sapiens
agaagaagaugaugaugaugaauaguugguuc

SEQ ID NO: 6132 - RNA, 32 nt, Homo Sapiens
cuguccccagucgagcccuccucccuuccccu

SEQ ID NO: 6133 - RNA, 32 nt, Homo Sapiens
ucuguccugccagucccaaggcccugugggag

SEQ ID NO: 6134 - RNA, 32 nt, Homo Sapiens
ugcaagcaaaauguaauuuaauguauagauga

SEQ ID NO: 6135 - RNA, 32 nt, Homo Sapiens
caaauaggcugggauucaauguggaguggugg

SEQ ID NO: 6136 - RNA, 32 nt, Homo Sapiens
gauaaggguucaauuucauucuucuucauaug

SEQ ID NO: 6137 - RNA, 32 nt, Homo Sapiens
gcagccucugcccggcggccaccccgucuggg

SEQ ID NO: 6138 - RNA, 32 nt, Homo Sapiens
gggcuacccucccccaggaggucgaccccaaa

SEQ ID NO: 6139 - RNA, 32 nt, Homo Sapiens
ugccugcaagcuucuuuuuucucauuaaauau

SEQ ID NO: 6140 - RNA, 32 nt, Homo Sapiens
uaggacccaagcacugggaggggcuguuggcu

SEQ ID NO: 6141 - RNA, 30 nt, Homo Sapiens
ugauaauucaccccuuuuguuuugaagagu

SEQ ID NO: 6142 - RNA, 32 nt, Homo Sapiens
uccccuucuccuaagagcacuccaucaauaaa

SEQ ID NO: 6143 - RNA, 32 nt, Homo Sapiens
aagguuuuaugaagcugaguuucacgauaagu

SEQ ID NO: 6144 - RNA, 32 nt, Homo Sapiens
uaauuugauuugacugcaaaacuuuuuccucc

SEQ ID NO: 6145 - RNA, 32 nt, Homo Sapiens
uuuuccauuaugaugaguaugugcagugauac

SEQ ID NO: 6146 - RNA, 32 nt, Homo Sapiens
uauggagugaaauuauuuuuugcaucauuuaa

SEQ ID NO: 6147 - RNA, 32 nt, Homo Sapiens
auuugacuugguuuccuuucagauauucuugg

SEQ ID NO: 6148 - RNA, 32 nt, Homo Sapiens
aaggacaacgaaaggcuuuucauguaaagaua

SEQ ID NO: 6149 - RNA, 32 nt, Homo Sapiens
guugucaucguaagacccuugcuguuuggagg

SEQ ID NO: 6150 - RNA, 32 nt, Homo Sapiens
cgcccagagacccacuggucuuccaccuuccc

SEQ ID NO: 6151 - RNA, 28 nt, Homo Sapiens
uacagacaagauuugcauuugaacuggg

SEQ ID NO: 6152 - RNA, 32 nt, Homo Sapiens
gugaacuuuaaucggggugguuggaugcggag

SEQ ID NO: 6153 - RNA, 32 nt, Homo Sapiens
ccgcgccccuccagcccucgccgcccucgcca

SEQ ID NO: 6154 - RNA, 32 nt, Homo Sapiens
aauucccucccccccgccccccgccccggcuu

SEQ ID NO: 6155 - RNA, 32 nt, Homo Sapiens
ccuuuagaguuuaguagcacaaauccaugcaa

SEQ ID NO: 6156 - RNA, 32 nt, Homo Sapiens
gggagcccuggcagcuggcccucaguccuggc

SEQ ID NO: 6157 - RNA, 32 nt, Homo Sapiens
aaauauuucuaguuuguucacucauugaguca

SEQ ID NO: 6158 - RNA, 32 nt, Homo Sapiens
gcugaauccaccugcuucuccuuugcaaccga

SEQ ID NO: 6159 - RNA, 32 nt, Homo Sapiens
ugagccgccgacggggcgggugggcuuugcug

SEQ ID NO: 6160 - RNA, 32 nt, Homo Sapiens
guaaaauuuuacauuuaagcauuuguaaaguu

SEQ ID NO: 6161 - RNA, 32 nt, Homo Sapiens
agcaugucuuaccaaaaacagagagaacgagc

SEQ ID NO: 6162 - RNA, 32 nt, Homo Sapiens
gcgcgagcgcgaggcugcagcccccgaguuuc

SEQ ID NO: 6163 - RNA, 32 nt, Homo Sapiens
uguuuuuccaugaaugaauauaccgugguuca

SEQ ID NO: 6164 - RNA, 32 nt, Homo Sapiens
ccauaggggcacugcgccugcugcccuuuccu

SEQ ID NO: 6165 - RNA, 32 nt, Homo Sapiens
agugccaguuacuuagugauguguuacccagg

SEQ ID NO: 6166 - RNA, 32 nt, Homo Sapiens
uccucuuccuucucuacucaugccagauuuug

SEQ ID NO: 6167 - RNA, 32 nt, Homo Sapiens
ugucuggugguaccuccacucugggcagggag

SEQ ID NO: 6168 - RNA, 32 nt, Homo Sapiens
agauaguugcaaccucaccucccucacucaac

SEQ ID NO: 6169 - RNA, 32 nt, Homo Sapiens
auucacuugccagcacagauggccaacccacc

SEQ ID NO: 6170 - RNA, 32 nt, Homo Sapiens
cggaagugucccgugaggcauugccucaugaa

SEQ ID NO: 6171 - RNA, 32 nt, Homo Sapiens
guugucuggguuggacaugcgugugggcuuca

SEQ ID NO: 6172 - RNA, 32 nt, Homo Sapiens
uguggggauauuuaauaguauguaucuuguuu

SEQ ID NO: 6173 - RNA, 32 nt, Homo Sapiens
cuuauacugcuccaucuuccccggccacaugc

SEQ ID NO: 6174 - RNA, 28 nt, Homo Sapiens
uccuguugggauuaacaguugagggcca

SEQ ID NO: 6175 - RNA, 32 nt, Homo Sapiens
gagugcaguggagcaaucuugggucacugcaa

SEQ ID NO: 6176 - RNA, 32 nt, Homo Sapiens
cuggagguugaagagagcaaggugauucgaau

SEQ ID NO: 6177 - RNA, 32 nt, Homo Sapiens
uuaaucauuaaaccuuuuuggugguggcucgc

SEQ ID NO: 6178 - RNA, 32 nt, Homo Sapiens
gaggcgcuccugugaugggaacucucaucauc

SEQ ID NO: 6179 - RNA, 32 nt, Homo Sapiens
uuaggaaggaucuggaauaaucuugaagggaa

SEQ ID NO: 6180 - RNA, 32 nt, Homo Sapiens
gcccuuguuuugggggcggggggagaguugga

SEQ ID NO: 6181 - RNA, 32 nt, Homo Sapiens
aaaguagaaauuuuacgucucacaggugaagg

SEQ ID NO: 6182 - RNA, 32 nt, Homo Sapiens
gacagacagaaucaccugaggcguucaaaaga

SEQ ID NO: 6183 - RNA, 32 nt, Homo Sapiens
ggccaccaccuacuccagcucucuccaccccc

SEQ ID NO: 6184 - RNA, 32 nt, Homo Sapiens
cgcacuucgccgccggccgacgggcgccauug

SEQ ID NO: 6185 - RNA, 32 nt, Homo Sapiens
cuugugcauagcaggggacuguaaccaaaaau

SEQ ID NO: 6186 - RNA, 32 nt, Homo Sapiens
uuuuuuacuauaguuuuuuguuuucuaccugc

SEQ ID NO: 6187 - RNA, 32 nt, Homo Sapiens
aauuaaaauuuaugcuuuaacuggaauauuuu

SEQ ID NO: 6188 - RNA, 32 nt, Homo Sapiens
gcguugugaaugugucccaugcauaacacacu

SEQ ID NO: 6189 - RNA, 31 nt, Homo Sapiens
aaugaugccaagaaaaagaauguugcuuagc

SEQ ID NO: 6190 - RNA, 32 nt, Homo Sapiens
agucccagccccugcaacccaggcugcugcuu

SEQ ID NO: 6191 - RNA, 32 nt, Homo Sapiens
aagacaaaaaauuuaacucaaaaguuaccugu

SEQ ID NO: 6192 - RNA, 32 nt, Homo Sapiens
ugcagggaaagagggacacuggcauuccauuu

SEQ ID NO: 6193 - RNA, 32 nt, Homo Sapiens
uuuggccuucucgggacuguccugucaccccu

SEQ ID NO: 6194 - RNA, 32 nt, Homo Sapiens
ggcuggggcuggccggggaggggcucacacuc

SEQ ID NO: 6195 - RNA, 32 nt, Homo Sapiens
ccugguuacugauuuccccuggccacccucuc

SEQ ID NO: 6196 - RNA, 32 nt, Homo Sapiens
aaacaaaaacaucagaagcugcugccauaaug

SEQ ID NO: 6197 - RNA, 32 nt, Homo Sapiens
gccaggacucgcgugcaaagcccaggcccggg

SEQ ID NO: 6198 - RNA, 32 nt, Homo Sapiens
ggcaaauguuucaagcacuuuagaaacaguac

SEQ ID NO: 6199 - RNA, 32 nt, Homo Sapiens
guagacauuuucucaugucuaccaggaauuga

SEQ ID NO: 6200 - RNA, 31 nt, Homo Sapiens
aacauacagaagaaaaagaauuuguugagaa

SEQ ID NO: 6201 - RNA, 32 nt, Homo Sapiens
uggaaggacgcaaaggauggcaggaugaaaga

SEQ ID NO: 6202 - RNA, 32 nt, Homo Sapiens
agccuuggcaaggcccauggacugucacagcc

SEQ ID NO: 6203 - RNA, 32 nt, Homo Sapiens
accaggcccagcgcccucuuugguccagccag

SEQ ID NO: 6204 - RNA, 32 nt, Homo Sapiens
ucacugcuacccauaucccagcccugcgaguc

SEQ ID NO: 6205 - RNA, 32 nt, Homo Sapiens
acaaauguaaucgaugugggaagugcuuuagu

SEQ ID NO: 6206 - RNA, 32 nt, Homo Sapiens
agauauugagaguugacucagcccuuuuagcc

SEQ ID NO: 6207 - RNA, 32 nt, Homo Sapiens
gcgaguugcauucugguuccgucgugugucug

SEQ ID NO: 6208 - RNA, 32 nt, Homo Sapiens
aaacagguauauauuuccgauucagugaacaa

SEQ ID NO: 6209 - RNA, 32 nt, Homo Sapiens
gcgagcgggcuggccgaggaggaggcggcggc

SEQ ID NO: 6210 - RNA, 32 nt, Homo Sapiens
ggggaggugccugcaaauauuuucgugccugc

SEQ ID NO: 6211 - RNA, 32 nt, Homo Sapiens
ugcaaccaggacuuguggugcagcugcagaca

SEQ ID NO: 6212 - RNA, 32 nt, Homo Sapiens
caaaguggguggauugcuugagucuaugaguu

SEQ ID NO: 6213 - RNA, 29 nt, Homo Sapiens
aaaaaauaaaguuuauaggcugggcgagg

SEQ ID NO: 6214 - RNA, 32 nt, Homo Sapiens
ccuggagcugucuaucuguccuuccagccacc

SEQ ID NO: 6215 - RNA, 32 nt, Homo Sapiens
agcacgacccccaggccagccuggacacauca

SEQ ID NO: 6216 - RNA, 32 nt, Homo Sapiens
gguuagcucagccccagcccagcccagcugcu

SEQ ID NO: 6217 - RNA, 29 nt, Homo Sapiens
ggucuuuccauacaaugaaagcuauaacu

SEQ ID NO: 6218 - RNA, 32 nt, Homo Sapiens
gaauuaccccuaccaauugggagaaauaucuu

SEQ ID NO: 6219 - RNA, 32 nt, Homo Sapiens
uugucagucuucaaaucagagaaaaucaggau

SEQ ID NO: 6220 - RNA, 32 nt, Homo Sapiens
cccccuaccacacacaccccuguccuccagca

SEQ ID NO: 6221 - RNA, 32 nt, Homo Sapiens
uaggacuuguuguuaaacgccaaaagacauuu

SEQ ID NO: 6222 - RNA, 32 nt, Homo Sapiens
aauuaauguuauuauuugauuguuauaccaua

SEQ ID NO: 6223 - RNA, 32 nt, Homo Sapiens
auauggaaaaguuaaccauuauagaaaagcaa

SEQ ID NO: 6224 - RNA, 32 nt, Homo Sapiens
auuguucagugggauuuggagaggacgccuua

SEQ ID NO: 6225 - RNA, 32 nt, Homo Sapiens
ugcagcccgcggcgcuuuccccuccgcgguuc

SEQ ID NO: 6226 - RNA, 31 nt, Homo Sapiens
aguggguuuaauguuuagucaguguacucug

SEQ ID NO: 6227 - RNA, 32 nt, Homo Sapiens
cagggcugcaccugccauccccggcucugcca

SEQ ID NO: 6228 - RNA, 32 nt, Homo Sapiens
aagcaguuuagagacugggggaggccggaucu

SEQ ID NO: 6229 - RNA, 32 nt, Homo Sapiens
acacgcucgcgcucgcgguccgcgggucgccg

SEQ ID NO: 6230 - RNA, 32 nt, Homo Sapiens
uguguaucuauuucauaggguaaguuuguugu

SEQ ID NO: 6231 - RNA, 32 nt, Homo Sapiens
agagacgugaacuggcauauaucaccaggacc

SEQ ID NO: 6232 - RNA, 32 nt, Homo Sapiens
cucccuguguggcugcugacucagcggucauu

SEQ ID NO: 6233 - RNA, 32 nt, Homo Sapiens
aaauacauuuuucuuaauaaacugaagagucu

SEQ ID NO: 6234 - RNA, 32 nt, Homo Sapiens
gugcaggauucuguuacccagcugugcucaaa

SEQ ID NO: 6235 - RNA, 32 nt, Homo Sapiens
aaaguaacuugggccaguuugguuucaagaua

SEQ ID NO: 6236 - RNA, 32 nt, Homo Sapiens
cuagaaaugcuuaaacuauugaaaauaaauca

SEQ ID NO: 6237 - RNA, 32 nt, Homo Sapiens
cucuuuuccuaauugaauaaccuggaucccuu

SEQ ID NO: 6238 - RNA, 32 nt, Homo Sapiens
uccuaaaauacacuggugaaaacauuacuugu

SEQ ID NO: 6239 - RNA, 32 nt, Homo Sapiens
uuaaauuaaaauugguugcauuauuuucugaa

SEQ ID NO: 6240 - RNA, 32 nt, Homo Sapiens
ccgagcaagcgggcccggggcuucuccgcagc

SEQ ID NO: 6241 - RNA, 32 nt, Homo Sapiens
auuacuuccuuccuuacucuuauuacagccac

SEQ ID NO: 6242 - RNA, 32 nt, Homo Sapiens
ggaguccgcccugccccucccccggcccccca

SEQ ID NO: 6243 - RNA, 32 nt, Homo Sapiens
auagcacuuaggacaagaaugugcauugaugg

SEQ ID NO: 6244 - RNA, 30 nt, Homo Sapiens
uugcuuuucuucauugcauuuugugaauuc

SEQ ID NO: 6245 - RNA, 32 nt, Homo Sapiens
uugaauuuugaguggauagugaugagccagcu

SEQ ID NO: 6246 - RNA, 32 nt, Homo Sapiens
aauuuuaaaaaguuggccuaaaaauguuccau

SEQ ID NO: 6247 - RNA, 30 nt, Homo Sapiens
cuguaugauaaaagauguggcauucuuaag

SEQ ID NO: 6248 - RNA, 32 nt, Homo Sapiens
gugucuccccuggccucgccuucugcaaacca

SEQ ID NO: 6249 - RNA, 32 nt, Homo Sapiens
guauggcuuuaacugaauauuugauccucaga

SEQ ID NO: 6250 - RNA, 32 nt, Homo Sapiens
acagaccagggaccgaacacgcagccaggggu

SEQ ID NO: 6251 - RNA, 26 nt, Homo Sapiens
auaaacaaaugcuuuauguuucccug

SEQ ID NO: 6252 - RNA, 32 nt, Homo Sapiens
uugggccaaagccaagagaucuaugugccuuc

SEQ ID NO: 6253 - RNA, 32 nt, Homo Sapiens
cccacuggagauuccucaccccgggaccgucc

SEQ ID NO: 6254 - RNA, 32 nt, Homo Sapiens
ugacauacuuuauauauguuuauauuagcaag

SEQ ID NO: 6255 - RNA, 32 nt, Homo Sapiens
acaacagcacaccaggcagaugcaguuauguc

SEQ ID NO: 6256 - RNA, 32 nt, Homo Sapiens
uuugggcaagauacgacaccgagggaaaaggg

SEQ ID NO: 6257 - RNA, 32 nt, Homo Sapiens
agggcuacagcgcccgacugcugcaggccggc

SEQ ID NO: 6258 - RNA, 32 nt, Homo Sapiens
auuaacauucgcugacucgaauguagagaacu

SEQ ID NO: 6259 - RNA, 32 nt, Homo Sapiens
caggcgggcgcgugggugcagcugcaucuguu

SEQ ID NO: 6260 - RNA, 32 nt, Homo Sapiens
ccugucaggaccagggcugggccugccaaccc

SEQ ID NO: 6261 - RNA, 32 nt, Homo Sapiens
aggcuaugcucgccgguuuccggcguuccgcu

SEQ ID NO: 6262 - RNA, 32 nt, Homo Sapiens
gggcggcgacggcggcucucguaggcgguucc

SEQ ID NO: 6263 - RNA, 32 nt, Homo Sapiens
ggucgggcacgguggcucacgccuguaauccc

SEQ ID NO: 6264 - RNA, 32 nt, Homo Sapiens
ggaggcccccaggcaagaaguuuggcagguuu

SEQ ID NO: 6265 - RNA, 32 nt, Homo Sapiens
cugcugcugccauuuuaaucuugcucauuaac

SEQ ID NO: 6266 - RNA, 32 nt, Homo Sapiens
cggcuaauuuuuguauuuuugguggagauggg

SEQ ID NO: 6267 - RNA, 32 nt, Homo Sapiens
gcaguuacaaaguuuccaaccagcacaaauuc

SEQ ID NO: 6268 - RNA, 32 nt, Homo Sapiens
ggaagucacacucuguauucugguauucuuac

SEQ ID NO: 6269 - RNA, 32 nt, Homo Sapiens
uaaaguguauuguugcagcaucuggcagugag

SEQ ID NO: 6270 - RNA, 32 nt, Homo Sapiens
aauuaaaugugaaauguuucugaugacuuaug

SEQ ID NO: 6271 - RNA, 32 nt, Homo Sapiens
cgugcucccucccauccuccagcccugcccac

SEQ ID NO: 6272 - RNA, 32 nt, Homo Sapiens
ggcagccuuccacugcauuuucuuuguuuggg

SEQ ID NO: 6273 - RNA, 32 nt, Homo Sapiens
cccccaaacacacacacacacacacacacaca

SEQ ID NO: 6274 - RNA, 32 nt, Homo Sapiens
ccuugaauuuggauugaaaaguuuccuaucuu

SEQ ID NO: 6275 - RNA, 32 nt, Homo Sapiens
ggaucgcggagcacagagcacggaguggacuc

SEQ ID NO: 6276 - RNA, 32 nt, Homo Sapiens
ugggaaaaggagccucccuuuccccgggggag

SEQ ID NO: 6277 - RNA, 32 nt, Homo Sapiens
gccuuugucagaccuucggaggaggcacucca

SEQ ID NO: 6278 - RNA, 32 nt, Homo Sapiens
auuauaaaaacaaaaaauaauuuuaugccuag

SEQ ID NO: 6279 - RNA, 32 nt, Homo Sapiens
aagucacccuugccccgauuccuccuguuugc

SEQ ID NO: 6280 - RNA, 32 nt, Homo Sapiens
ccacugagaggaagccggggcuggcccggccg

SEQ ID NO: 6281 - RNA, 32 nt, Homo Sapiens
gggcuucucaggauccucaacuucuugccugg

SEQ ID NO: 6282 - RNA, 32 nt, Homo Sapiens
caggcccuggggacucaagaccccugguuacc

SEQ ID NO: 6283 - RNA, 32 nt, Homo Sapiens
gaggcaucgcgcaaaagcuggugcgaugcuuc

SEQ ID NO: 6284 - RNA, 32 nt, Homo Sapiens
cccgaagaggccgguuuccugucuguaugugg

SEQ ID NO: 6285 - RNA, 32 nt, Homo Sapiens
ucuguuguccagcagauugcccgggccccacc

SEQ ID NO: 6286 - RNA, 32 nt, Homo Sapiens
caacaggcugggcgcaguggcucacaccugua

SEQ ID NO: 6287 - RNA, 32 nt, Homo Sapiens
augugcaccaaaaccugucuugacucuuggga

SEQ ID NO: 6288 - RNA, 32 nt, Homo Sapiens
gugugucugggggaaugaacgcacagaucugu

SEQ ID NO: 6289 - RNA, 32 nt, Homo Sapiens
agcgguuacccacaaggcaauacuuaguaucc

SEQ ID NO: 6290 - RNA, 32 nt, Homo Sapiens
ccccucaccuccaccggccccaucccccacac

SEQ ID NO: 6291 - RNA, 32 nt, Homo Sapiens
acucggggacgccagagcuccugagaagaugu

SEQ ID NO: 6292 - RNA, 32 nt, Homo Sapiens
aaaaaacaauaaaacgagaccacagaaauguc

SEQ ID NO: 6293 - RNA, 32 nt, Homo Sapiens
aucaucacuauaauauuucauauuugccaaca

SEQ ID NO: 6294 - RNA, 32 nt, Homo Sapiens
acuccugccaaguggucuucuacccauugcuu

SEQ ID NO: 6295 - RNA, 32 nt, Homo Sapiens
uugauuuacaagcaucauggaucaaccaaguu

SEQ ID NO: 6296 - RNA, 32 nt, Homo Sapiens
uucaguguucuucccccuccauguugccugcc

SEQ ID NO: 6297 - RNA, 32 nt, Homo Sapiens
uccaccucacaccuguugguccugcuuugugg

SEQ ID NO: 6298 - RNA, 32 nt, Homo Sapiens
cuggcuaugcucacagucucacaucugguggg

SEQ ID NO: 6299 - RNA, 32 nt, Homo Sapiens
uuugaacuuuagguccuuccucuucuuugggg

SEQ ID NO: 6300 - RNA, 32 nt, Homo Sapiens
agaagccaugguuuuuuguauuggucauaacu

SEQ ID NO: 6301 - RNA, 32 nt, Homo Sapiens
agcaacuuuaguuucaaagauacuuuuaagcu

SEQ ID NO: 6302 - RNA, 32 nt, Homo Sapiens
ugucuaauauccagaauuuacaagaaacuuaa

SEQ ID NO: 6303 - RNA, 32 nt, Homo Sapiens
gcuacaaacuucucugucucauucagucguau

SEQ ID NO: 6304 - RNA, 32 nt, Homo Sapiens
gccacugugcuuggccacacacauauacauuu

SEQ ID NO: 6305 - RNA, 32 nt, Homo Sapiens
ucacccuucccccaaguuggaauauauccucc

SEQ ID NO: 6306 - RNA, 32 nt, Homo Sapiens
cagcuccuuucuggagaaucuaaggugaacga

SEQ ID NO: 6307 - RNA, 32 nt, Homo Sapiens
caggugaaugagggaccagcccugcccugggc

SEQ ID NO: 6308 - RNA, 32 nt, Homo Sapiens
agaauuuauuugguugccuuguguguuaauug

SEQ ID NO: 6309 - RNA, 32 nt, Homo Sapiens
uuacugcaguuuuacaguauuccucacaaagg

SEQ ID NO: 6310 - RNA, 32 nt, Homo Sapiens
ucuucuugauuucagcaugugucggguuccua

SEQ ID NO: 6311 - RNA, 32 nt, Homo Sapiens
aauuaaaaaacaaaacagaagagaugucagga

SEQ ID NO: 6312 - RNA, 31 nt, Homo Sapiens
gaccucgugaucugccugccuuggccuccca

SEQ ID NO: 6313 - RNA, 31 nt, Homo Sapiens
gaccuugugaucugccugccucggccuccca

SEQ ID NO: 6314 - RNA, 31 nt, Homo Sapiens
gaccuugugaucugccugccuuggccuccua

SEQ ID NO: 6315 - RNA, 32 nt, Homo Sapiens
uuuguagaaauaaaaauugaccuuagaauuua

SEQ ID NO: 6316 - RNA, 32 nt, Homo Sapiens
augugugcgcagagugcaucauuuucagacuc

SEQ ID NO: 6317 - RNA, 32 nt, Homo Sapiens
uuggccacagccccaaacaagcgccaccgugg

SEQ ID NO: 6318 - RNA, 32 nt, Homo Sapiens
ccgggccggcccccaagaugccggcgaucgcg

SEQ ID NO: 6319 - RNA, 32 nt, Homo Sapiens
cguuuuuucaaauauagauagauuuaagcugc

SEQ ID NO: 6320 - RNA, 32 nt, Homo Sapiens
cuacauaguggaguaauuuaagaacucucuug

SEQ ID NO: 6321 - RNA, 32 nt, Homo Sapiens
cgccuggacagcgccugcugcccgccucccga

SEQ ID NO: 6322 - RNA, 31 nt, Homo Sapiens
gccauucauuugauuuucaaaaucaaagcga

SEQ ID NO: 6323 - RNA, 32 nt, Homo Sapiens
ggacagauuuaugcagcuauuuucauacauuc

SEQ ID NO: 6324 - RNA, 32 nt, Homo Sapiens
uuacauuugauccaacccuaucaaauaaugaa

SEQ ID NO: 6325 - RNA, 32 nt, Homo Sapiens
uucgccuucucgcccgauggccggcaccuggc

SEQ ID NO: 6326 - RNA, 32 nt, Homo Sapiens
auuuaguagagacugucccuucugccuucggg

SEQ ID NO: 6327 - RNA, 32 nt, Homo Sapiens
aguggcccgagcuaagggugcggagaccuaag

SEQ ID NO: 6328 - RNA, 31 nt, Homo Sapiens
aagcuccauugagccaaauaaguuggccacg

SEQ ID NO: 6329 - RNA, 32 nt, Homo Sapiens
caaaaaauaacuuguuaucaauaaaaacuugc

SEQ ID NO: 6330 - RNA, 32 nt, Homo Sapiens
gacucucuucaagccagcacaagcauuuagau

SEQ ID NO: 6331 - RNA, 32 nt, Homo Sapiens
caccacuguguaaaaucgcagcuccucaaauu

SEQ ID NO: 6332 - RNA, 32 nt, Homo Sapiens
uuuacuucuguguaacuuccacagcuuuugac

SEQ ID NO: 6333 - RNA, 32 nt, Homo Sapiens
ccugggggaucuuugggucaauaaaacauucu

SEQ ID NO: 6334 - RNA, 32 nt, Homo Sapiens
gacugccucuuauuuccaaccccaucccaugu

SEQ ID NO: 6335 - RNA, 32 nt, Homo Sapiens
uauuuuaucucacuuguucuagaauuuucugu

SEQ ID NO: 6336 - RNA, 32 nt, Homo Sapiens
cuaaauacauuuuuauucuuucuacugagggc

SEQ ID NO: 6337 - RNA, 32 nt, Homo Sapiens
cacccuccacugugccuuuuggaccaguacca

SEQ ID NO: 6338 - RNA, 32 nt, Homo Sapiens
agugguugauucacucauucauccacucgucu

SEQ ID NO: 6339 - RNA, 32 nt, Homo Sapiens
ugcaucccaggaaaaggaaacgguucucauac

SEQ ID NO: 6340 - RNA, 32 nt, Homo Sapiens
gucggcuuuccccgggaccccuggccggaaac

SEQ ID NO: 6341 - RNA, 32 nt, Homo Sapiens
cuuugcugccccaccaucuugcugacaacuuc

SEQ ID NO: 6342 - RNA, 32 nt, Homo Sapiens
uacaagcaaaaaauccaaaaaauccaccuaaa

SEQ ID NO: 6343 - RNA, 32 nt, Homo Sapiens
cagccaccaaaauaguuauguuggcacugugu

SEQ ID NO: 6344 - RNA, 32 nt, Homo Sapiens
gagugggggagguggguccaagucuccccuca

SEQ ID NO: 6345 - RNA, 32 nt, Homo Sapiens
ugagguuccgagugcggccgcugcugggcugg

SEQ ID NO: 6346 - RNA, 32 nt, Homo Sapiens
ccugugcaacuuucccaauguggccuaaaaau

SEQ ID NO: 6347 - RNA, 32 nt, Homo Sapiens
aaauuuauauugguuucuuuucaagcuggugu

SEQ ID NO: 6348 - RNA, 32 nt, Homo Sapiens
gaggugcaaaggaccguggaagcaauuuuugu

SEQ ID NO: 6349 - RNA, 32 nt, Homo Sapiens
cuagcuggccccagcacugcacccucccagga

SEQ ID NO: 6350 - RNA, 32 nt, Homo Sapiens
uucagagcaugagaugaagacuucuuuggguu

SEQ ID NO: 6351 - RNA, 32 nt, Homo Sapiens
gcaccugcuacagugagcugccauuccacacc

SEQ ID NO: 6352 - RNA, 32 nt, Homo Sapiens
guuucccucagacagcucuguuacaggaggau

SEQ ID NO: 6353 - RNA, 32 nt, Homo Sapiens
guacuggggagaaauaauuguugauuaauuug

SEQ ID NO: 6354 - RNA, 32 nt, Homo Sapiens
aaauucacaacacuuaauguucauauuuugag

SEQ ID NO: 6355 - RNA, 31 nt, Homo Sapiens
uugaagugaaacaguuuuaaaacuugcuuug

SEQ ID NO: 6356 - RNA, 32 nt, Homo Sapiens
gggagugucuuugagggccuuaaaaggaccau

SEQ ID NO: 6357 - RNA, 32 nt, Homo Sapiens
ccauguggaaaagaauggagaggggacaauga

SEQ ID NO: 6358 - RNA, 32 nt, Homo Sapiens
ugggcuccggcgacuggugcuacgcaucccgc

SEQ ID NO: 6359 - RNA, 32 nt, Homo Sapiens
uaccagucaaaauuauuucuuggugauauaaa

SEQ ID NO: 6360 - RNA, 32 nt, Homo Sapiens
ugguuucuuccauccuccuccuccccuuaaug

SEQ ID NO: 6361 - RNA, 32 nt, Homo Sapiens
ggaagauacuuauguguggaagauuauugcuc

SEQ ID NO: 6362 - RNA, 32 nt, Homo Sapiens
uucaaagauaaaaauauuugcucuucugucuu

SEQ ID NO: 6363 - RNA, 32 nt, Homo Sapiens
cucggcuccuucccuuccccgaugcugggggc

SEQ ID NO: 6364 - RNA, 32 nt, Homo Sapiens
uauuggauuuugcugaacaggccuaucuugaa

SEQ ID NO: 6365 - RNA, 32 nt, Homo Sapiens
uauacauaaaaauaaauuauacuaaugugaaa

SEQ ID NO: 6366 - RNA, 30 nt, Homo Sapiens
gccagggcugagccggcggguccuccugag

SEQ ID NO: 6367 - RNA, 32 nt, Homo Sapiens
gcuuucccugucaggauaccuuccacagggga

SEQ ID NO: 6368 - RNA, 32 nt, Homo Sapiens
aacaauucaggaccaaauuuuuucucagugug

SEQ ID NO: 6369 - RNA, 32 nt, Homo Sapiens
ccuuucuguugcuagauucagaguagaggcca

SEQ ID NO: 6370 - RNA, 32 nt, Homo Sapiens
ugggcuccaaugccagcucugccacuugcuag

SEQ ID NO: 6371 - RNA, 32 nt, Homo Sapiens
uccacauagugccagcagcagugccacgcagu

SEQ ID NO: 6372 - RNA, 32 nt, Homo Sapiens
uaccugggccuggccagcaggcagggcugccu

SEQ ID NO: 6373 - RNA, 32 nt, Homo Sapiens
cuguuccguaaccaggucaucauuccucuggu

SEQ ID NO: 6374 - RNA, 32 nt, Homo Sapiens
aacuacauuauacgcagugcugauagaaccaa

SEQ ID NO: 6375 - RNA, 32 nt, Homo Sapiens
auuguagagaauagucauuuuuaaucuaaauu

SEQ ID NO: 6376 - RNA, 29 nt, Homo Sapiens
gcagggacagggcagaggacucugaagcg

SEQ ID NO: 6377 - RNA, 32 nt, Homo Sapiens
ugucucauucuccucaaauauuccauuugcag

SEQ ID NO: 6378 - RNA, 32 nt, Homo Sapiens
ugcuagcucccucccuccuccugggugcugag

SEQ ID NO: 6379 - RNA, 32 nt, Homo Sapiens
aggguggcgaccagcuguucuccauaugcacu

SEQ ID NO: 6380 - RNA, 32 nt, Homo Sapiens
uuacccguucuauuugacugacuucuucaggc

SEQ ID NO: 6381 - RNA, 32 nt, Homo Sapiens
cccgaguccgacgcgccgcuggccucagccug

SEQ ID NO: 6382 - RNA, 32 nt, Homo Sapiens
cccugcaggugcucacccugcugcugaacaaa

SEQ ID NO: 6383 - RNA, 32 nt, Homo Sapiens
cagcucgacccgccgcagccccggccccgacc

SEQ ID NO: 6384 - RNA, 32 nt, Homo Sapiens
ccaagcggcgggggcgaacgcuuuguuuccuu

SEQ ID NO: 6385 - RNA, 32 nt, Homo Sapiens
uuaacauuugguucuggauacauguugaacuu

SEQ ID NO: 6386 - RNA, 32 nt, Homo Sapiens
aagaaucccagugaguucugcauuuguaucuu

SEQ ID NO: 6387 - RNA, 32 nt, Homo Sapiens
cuagauguuuuaauggguucagaauccaguuu

SEQ ID NO: 6388 - RNA, 32 nt, Homo Sapiens
cuggguuucuaaaaugcugccuuccugccucu

SEQ ID NO: 6389 - RNA, 32 nt, Homo Sapiens
gagaaguagauuguuacccaguaaugaaauaa

SEQ ID NO: 6390 - RNA, 32 nt, Homo Sapiens
cggugcccaagccagaggcuggguucauuugu

SEQ ID NO: 6391 - RNA, 32 nt, Homo Sapiens
uaaaaugcagaaaaagcaucaagaauucugcc

SEQ ID NO: 6392 - RNA, 32 nt, Homo Sapiens
gcaggcgccgccgcgccgccgucgcucuccaa

SEQ ID NO: 6393 - RNA, 32 nt, Homo Sapiens
gguuuuaggaaugaccggaaaacuaccccuaa

SEQ ID NO: 6394 - RNA, 32 nt, Homo Sapiens
aacuauuucuucagaguuugucauauacugcu

SEQ ID NO: 6395 - RNA, 32 nt, Homo Sapiens
ccuggacgcccccagacaagucucggccccuc

SEQ ID NO: 6396 - RNA, 32 nt, Homo Sapiens
uuucugaagucugaauucaauuacaauuuuuu

SEQ ID NO: 6397 - RNA, 32 nt, Homo Sapiens
accugccaccaugcgcagcuaauuuuuuguau

SEQ ID NO: 6398 - RNA, 32 nt, Homo Sapiens
cagcucaguuauacacugcuuuucucaauucc

SEQ ID NO: 6399 - RNA, 32 nt, Homo Sapiens
uugaacccggugcaugccuugguuuuggugcu

SEQ ID NO: 6400 - RNA, 32 nt, Homo Sapiens
aauacuauuuuuccuacuuugcuuuugagaaa

SEQ ID NO: 6401 - RNA, 32 nt, Homo Sapiens
ggagucggcucucagcuggagcuuccauaccu

SEQ ID NO: 6402 - RNA, 32 nt, Homo Sapiens
ucuguggugaauggcgacgggauggagcgcga

SEQ ID NO: 6403 - RNA, 32 nt, Homo Sapiens
caaugugugaauguagaaagcuuaugauaagg

SEQ ID NO: 6404 - RNA, 32 nt, Homo Sapiens
ucuacuuuuggaaaaaugaacaugugagguca

SEQ ID NO: 6405 - RNA, 32 nt, Homo Sapiens
cacccuuagugucaguguggagcuccuuccua

SEQ ID NO: 6406 - RNA, 32 nt, Homo Sapiens
gaaaguuuuaaacugcagaaauuggaguggau

SEQ ID NO: 6407 - RNA, 32 nt, Homo Sapiens
ggggcuauugggauggaauggauguauuuugc

SEQ ID NO: 6408 - RNA, 32 nt, Homo Sapiens
cuuccuggggacgaauuccacucguccaaggg

SEQ ID NO: 6409 - RNA, 32 nt, Homo Sapiens
ccccauccuagccccagaagcuccaagcuuca

SEQ ID NO: 6410 - RNA, 32 nt, Homo Sapiens
agugggcagucuuuuuccaucucuaccgaagu

SEQ ID NO: 6411 - RNA, 32 nt, Homo Sapiens
ccaaggcccauguguguguuguguguaauugu

SEQ ID NO: 6412 - RNA, 32 nt, Homo Sapiens
gcugucccggcaaggccugccgagggcaguuu

SEQ ID NO: 6413 - RNA, 32 nt, Homo Sapiens
auagaaaaucauaguucuuuuaugacucuaua

SEQ ID NO: 6414 - RNA, 32 nt, Homo Sapiens
gcagcuaucuccgcggcccacccggcggcgcc

SEQ ID NO: 6415 - RNA, 32 nt, Homo Sapiens
auuaugacaugugacaggugaacucugggaau

SEQ ID NO: 6416 - RNA, 32 nt, Homo Sapiens
caaguucuaaucucuaugauccucaguuucuu

SEQ ID NO: 6417 - RNA, 32 nt, Homo Sapiens
cugucuuccccaaguuugcauuuucgacauua

SEQ ID NO: 6418 - RNA, 32 nt, Homo Sapiens
uuuuccuggucccagcagcaucugcccuguga

SEQ ID NO: 6419 - RNA, 32 nt, Homo Sapiens
accugggagagccagcaugcacccacugacaa

SEQ ID NO: 6420 - RNA, 32 nt, Homo Sapiens
auuaugccaaacuugggaugggauuuucgaag

SEQ ID NO: 6421 - RNA, 32 nt, Homo Sapiens
uccaguuccuucccacucagugcccacguuuc

SEQ ID NO: 6422 - RNA, 32 nt, Homo Sapiens
uuacccauaacuuuuccaaauuugguucaaau

SEQ ID NO: 6423 - RNA, 32 nt, Homo Sapiens
ggcgggcccagggccuuggaggggccuggaug

SEQ ID NO: 6424 - RNA, 32 nt, Homo Sapiens
cugagggccgugaggagaaggugggcugcgcc

SEQ ID NO: 6425 - RNA, 31 nt, Homo Sapiens
cccuaguuguacugccugaguguugucagau

SEQ ID NO: 6426 - RNA, 32 nt, Homo Sapiens
ugaguugguaguagauucauguucaaggaaca

SEQ ID NO: 6427 - RNA, 32 nt, Homo Sapiens
aagccgugcgcucccgggcugcgaggucuggc

SEQ ID NO: 6428 - RNA, 32 nt, Homo Sapiens
uagcauuuuaccauuccugaaauggauguaau

SEQ ID NO: 6429 - RNA, 32 nt, Homo Sapiens
aggugguaggaucaccugaggucaggaguuca

SEQ ID NO: 6430 - RNA, 32 nt, Homo Sapiens
ucccccaaauucugcuuucucuauuuucuuuu

SEQ ID NO: 6431 - RNA, 32 nt, Homo Sapiens
ccuguuugcacuauuucuuuuuguaacauugg

SEQ ID NO: 6432 - RNA, 32 nt, Homo Sapiens
caggcugaagaaggugggaggggagggcggaa

SEQ ID NO: 6433 - RNA, 32 nt, Homo Sapiens
caccccugucucuuggagugcucaggguggcg

SEQ ID NO: 6434 - RNA, 32 nt, Homo Sapiens
auuaguauccuguuaggggaaaauaguagcag

SEQ ID NO: 6435 - RNA, 32 nt, Homo Sapiens
gcauuuucugcuuuauuuacauguaaagugaa

SEQ ID NO: 6436 - RNA, 32 nt, Homo Sapiens
ugccuauaaucccagcacuuugggagaccaag

SEQ ID NO: 6437 - RNA, 32 nt, Homo Sapiens
gcaagcauggguguuuucaucaucggcugucu

SEQ ID NO: 6438 - RNA, 32 nt, Homo Sapiens
gucacucuuuggggccccuuucuggggguucc

SEQ ID NO: 6439 - RNA, 32 nt, Homo Sapiens
gccacugcacuccagccugggcgacaagagcg

SEQ ID NO: 6440 - RNA, 32 nt, Homo Sapiens
cuagaagagcaaaaacaaucacuacaguuugg

SEQ ID NO: 6441 - RNA, 32 nt, Homo Sapiens
gcagccaagaaaaaguuaaaagaauauuggca

SEQ ID NO: 6442 - RNA, 30 nt, Homo Sapiens
aacccgggagguggagguugcagugagcca

SEQ ID NO: 6443 - RNA, 32 nt, Homo Sapiens
gaauaguuuuaauauaguaaauguaggaagcc

SEQ ID NO: 6444 - RNA, 32 nt, Homo Sapiens
cugguuauaguugauauguaacaguuggugau

SEQ ID NO: 6445 - RNA, 31 nt, Homo Sapiens
uuuggccucauaagaugguccacucuguaca

SEQ ID NO: 6446 - RNA, 32 nt, Homo Sapiens
ucucuugucguuuuuuaaucuguccugugacu

SEQ ID NO: 6447 - RNA, 32 nt, Homo Sapiens
cuccaggaaagggggaggagggaccaggaccu

SEQ ID NO: 6448 - RNA, 32 nt, Homo Sapiens
guccuguggaggaggugguggugguaugguga

SEQ ID NO: 6449 - RNA, 32 nt, Homo Sapiens
agcaggcaagaugccuagaucuucuguuaucu

SEQ ID NO: 6450 - RNA, 32 nt, Homo Sapiens
ugagggcggcggugccccuaagcggcucaaga

SEQ ID NO: 6451 - RNA, 31 nt, Homo Sapiens
uagugaacaaauucuguugguuauguaccgu

SEQ ID NO: 6452 - RNA, 32 nt, Homo Sapiens
aggguggggucuggcagcugcugcuggggcag

SEQ ID NO: 6453 - RNA, 32 nt, Homo Sapiens
caguugugcgugagagagaggcaagcgcccga

SEQ ID NO: 6454 - RNA, 32 nt, Homo Sapiens
cccagggaagcagagugcaagagcagaagagc

SEQ ID NO: 6455 - RNA, 32 nt, Homo Sapiens
uagacauucccucuccuggucucugggucugg

SEQ ID NO: 6456 - RNA, 32 nt, Homo Sapiens
agcugggcgugguggcgggcgccuauaauccc

SEQ ID NO: 6457 - RNA, 28 nt, Homo Sapiens
uccaaagacauaaugcauuugaaacugu

SEQ ID NO: 6458 - RNA, 32 nt, Homo Sapiens
guccaaaaggauuaagcgauuaaagaacguaa

SEQ ID NO: 6459 - RNA, 32 nt, Homo Sapiens
uucuuagaaauauuuuccagcaaauuaaaagu

SEQ ID NO: 6460 - RNA, 32 nt, Homo Sapiens
ggugucuggcaaacaguccauaauuagcagau

SEQ ID NO: 6461 - RNA, 32 nt, Homo Sapiens
cauaucaguaaguuucuauauguaucaaaacu

SEQ ID NO: 6462 - RNA, 32 nt, Homo Sapiens
auaccuuugacaaauaacuaauguuuuuacaa

SEQ ID NO: 6463 - RNA, 32 nt, Homo Sapiens
ggcaaggcacagaggagaugggagccugccug

SEQ ID NO: 6464 - RNA, 32 nt, Homo Sapiens
uccaaaguuauuuucucuaacauaucacauua

SEQ ID NO: 6465 - RNA, 32 nt, Homo Sapiens
ucuuuucccuccccgccagcccgcccgccugc

SEQ ID NO: 6466 - RNA, 32 nt, Homo Sapiens
acuccaaaaucacaacagcauuacuguucuua

SEQ ID NO: 6467 - RNA, 32 nt, Homo Sapiens
uaccaauauuuguucuuaauucuccaguuauu

SEQ ID NO: 6468 - RNA, 32 nt, Homo Sapiens
cggcgcaggaggaugggcugcggcgggagccg

SEQ ID NO: 6469 - RNA, 32 nt, Homo Sapiens
uucuagcacuuaaaauacaaagucuauauuau

SEQ ID NO: 6470 - RNA, 32 nt, Homo Sapiens
ucuccuuucauaccagucacuaucuuggguaa

SEQ ID NO: 6471 - RNA, 32 nt, Homo Sapiens
gaacuaaguauagaaaucaugucucaaaacag

SEQ ID NO: 6472 - RNA, 32 nt, Homo Sapiens
ccccgccaacgcugccgccgggaugcuccaga

SEQ ID NO: 6473 - RNA, 32 nt, Homo Sapiens
aaaagcaggugauauucucaguggagaccagg

SEQ ID NO: 6474 - RNA, 32 nt, Homo Sapiens
uguucuuagguuuggaacagucuggucuccug

SEQ ID NO: 6475 - RNA, 32 nt, Homo Sapiens
uguguuacugaauguggcauuucaggguuaac

SEQ ID NO: 6476 - RNA, 32 nt, Homo Sapiens
cagugucuuauucauccuuguuucccuugugg

SEQ ID NO: 6477 - RNA, 32 nt, Homo Sapiens
gccaucuguggggcaggcacacacaccucccg

SEQ ID NO: 6478 - RNA, 32 nt, Homo Sapiens
guaguucaucuaggauccuuuuauuaaggaca

SEQ ID NO: 6479 - RNA, 32 nt, Homo Sapiens
ggugaagaccuauugcuucaauaaucaagaau

SEQ ID NO: 6480 - RNA, 32 nt, Homo Sapiens
gcagcgccuuccagcccuggcccgcccagagg

SEQ ID NO: 6481 - RNA, 32 nt, Homo Sapiens
gggaauccugucauguuguuuaucuuuccagc

SEQ ID NO: 6482 - RNA, 32 nt, Homo Sapiens
aucccugcugccuuggugaucccgggcugaca

SEQ ID NO: 6483 - RNA, 32 nt, Homo Sapiens
gcugcaggcucgcuccucaccucuccgccgcc

SEQ ID NO: 6484 - RNA, 32 nt, Homo Sapiens
ccugaaauggguggaauagcgguaaggcuuga

SEQ ID NO: 6485 - RNA, 32 nt, Homo Sapiens
ugaaaggacaaaagccagacacauuucaacau

SEQ ID NO: 6486 - RNA, 32 nt, Homo Sapiens
aguagauagaaagcaauaaaaauacuaugaaa

SEQ ID NO: 6487 - RNA, 32 nt, Homo Sapiens
uggccacuuuuguguuuuuaugaaggccaugg

SEQ ID NO: 6488 - RNA, 32 nt, Homo Sapiens
uagcagaugaaagcggcuggcuguggcccgcg

SEQ ID NO: 6489 - RNA, 32 nt, Homo Sapiens
accgggccgcgcacgccgccucaggaaccauc

SEQ ID NO: 6490 - RNA, 32 nt, Homo Sapiens
uucuuuccugucagcagcaguucugugaaugc

SEQ ID NO: 6491 - RNA, 32 nt, Homo Sapiens
uccugccccugacgcuggcccuuggggccuuc

SEQ ID NO: 6492 - RNA, 32 nt, Homo Sapiens
ucacagagggaagagauagaaagacaacggaa

SEQ ID NO: 6493 - RNA, 32 nt, Homo Sapiens
gggaccgagccggagagccccggagcccccgu

SEQ ID NO: 6494 - RNA, 32 nt, Homo Sapiens
gccucaggggagagauuguguccucgccuuuu

SEQ ID NO: 6495 - RNA, 32 nt, Homo Sapiens
aggccucugcccucugcccacccagcgucagc

SEQ ID NO: 6496 - RNA, 32 nt, Homo Sapiens
uuuuauuauuuuugaauucauggagccaucau

SEQ ID NO: 6497 - RNA, 32 nt, Homo Sapiens
ggccugcgccucggcguccccgaggaggccgc

SEQ ID NO: 6498 - RNA, 32 nt, Homo Sapiens
cacacacacacacacacacacacacacgaagg

SEQ ID NO: 6499 - RNA, 32 nt, Homo Sapiens
uuugauagaaauauuucuccaauauacuugca

SEQ ID NO: 6500 - RNA, 32 nt, Homo Sapiens
cucccgacaccuucagaaaacacgacaccuuu

SEQ ID NO: 6501 - RNA, 32 nt, Homo Sapiens
cucccgcuccagccaugcucuccgcccucgcc

SEQ ID NO: 6502 - RNA, 31 nt, Homo Sapiens
gcuccugggcccccaccauucacuuuuuguc

SEQ ID NO: 6503 - RNA, 32 nt, Homo Sapiens
auauaccaguauuuuucuuuuuuuuuuuuuug

SEQ ID NO: 6504 - RNA, 32 nt, Homo Sapiens
guagagaugguuuguuaccauccuuuaaucau

SEQ ID NO: 6505 - RNA, 32 nt, Homo Sapiens
guaguuggaaacaaaauugacgcauguuaauc

SEQ ID NO: 6506 - RNA, 32 nt, Homo Sapiens
cuuaaggggaggaggacggauugauuccacau

SEQ ID NO: 6507 - RNA, 32 nt, Homo Sapiens
cuaacuucaaggacauuauaucacuuacugua

SEQ ID NO: 6508 - RNA, 32 nt, Homo Sapiens
uauucugcacgguaagaauuccuuuuacagac

SEQ ID NO: 6509 - RNA, 32 nt, Homo Sapiens
ugcaggugcagagugagcugccagacacaccc

SEQ ID NO: 6510 - RNA, 32 nt, Homo Sapiens
cuuugccaaugcuuucggacuccaccaugcuu

SEQ ID NO: 6511 - RNA, 32 nt, Homo Sapiens
ggucaggcuucaguaacuguagucuugugagc

SEQ ID NO: 6512 - RNA, 32 nt, Homo Sapiens
aggggaggccauuuuccguuucugggaggagu

SEQ ID NO: 6513 - RNA, 32 nt, Homo Sapiens
auacugcguuccaucccgacccggggccacgg

SEQ ID NO: 6514 - RNA, 32 nt, Homo Sapiens
aaaaaauaaucaucaaccaggcaaauuacuuu

SEQ ID NO: 6515 - RNA, 32 nt, Homo Sapiens
cgcugcgcugcuggggggcgcgggcgaggaug

SEQ ID NO: 6516 - RNA, 32 nt, Homo Sapiens
uacuucugcuccauaauaaagugggagaaaaa

SEQ ID NO: 6517 - RNA, 32 nt, Homo Sapiens
uuggugcaaaauucaacagguauaagggggua

SEQ ID NO: 6518 - RNA, 32 nt, Homo Sapiens
aaaagguucauuuugguggcuguccguuugac

SEQ ID NO: 6519 - RNA, 32 nt, Homo Sapiens
ggucuugggaagcuccacccccauggcuuugc

SEQ ID NO: 6520 - RNA, 32 nt, Homo Sapiens
ggcgcagcgcuccgauucggcgcggcucaugg

SEQ ID NO: 6521 - RNA, 32 nt, Homo Sapiens
cagaugguugggguugaacaguaagcacauug

SEQ ID NO: 6522 - RNA, 32 nt, Homo Sapiens
ggggccgcggcuccaggugggaggaaggcggg

SEQ ID NO: 6523 - RNA, 32 nt, Homo Sapiens
aggcagcugggggcgggcugcggccgcugauu

SEQ ID NO: 6524 - RNA, 32 nt, Homo Sapiens
cuagcuccuucuugaaaguugauucaaucaug

SEQ ID NO: 6525 - RNA, 32 nt, Homo Sapiens
auuggaggcuacaagguccguuaugccaccug

SEQ ID NO: 6526 - RNA, 31 nt, Homo Sapiens
aagaccagggugguugggacggccuccucuc

SEQ ID NO: 6527 - RNA, 32 nt, Homo Sapiens
caacguucgguuccucaaaaggucuugcugcu

SEQ ID NO: 6528 - RNA, 32 nt, Homo Sapiens
ugcuaaaaacaauuugcacagcacuaaagcau

SEQ ID NO: 6529 - RNA, 32 nt, Homo Sapiens
gccgccgcgagucugguauccugagcuucgug

SEQ ID NO: 6530 - RNA, 32 nt, Homo Sapiens
uuaagaggacaugcuaauauuuuguaaagcug

SEQ ID NO: 6531 - RNA, 32 nt, Homo Sapiens
aauguuugauaaauuaaaggaaaauaucuuca

SEQ ID NO: 6532 - RNA, 32 nt, Homo Sapiens
uuauggaaaauauuuaaaauuuguuuuuacag

SEQ ID NO: 6533 - RNA, 32 nt, Homo Sapiens
cgacccggugcugacuuggcgccggggcucuu

SEQ ID NO: 6534 - RNA, 32 nt, Homo Sapiens
gaucccggccccacuuccaggccaguguccgg

SEQ ID NO: 6535 - RNA, 32 nt, Homo Sapiens
uccccugccccagcugacgggucaaagccuca

SEQ ID NO: 6536 - RNA, 32 nt, Homo Sapiens
uggauauggcuggggagcgaaguaaaauccuc

SEQ ID NO: 6537 - RNA, 32 nt, Homo Sapiens
agcugcaggagcgggagaaggcccugcggcug

SEQ ID NO: 6538 - RNA, 32 nt, Homo Sapiens
ccaggccuggcuuccagcaccauccagcugug

SEQ ID NO: 6539 - RNA, 32 nt, Homo Sapiens
ggaagggaauggguucuggaaggccccaggug

SEQ ID NO: 6540 - RNA, 32 nt, Homo Sapiens
ucuuccauucuaaucuaacugcacgauuucua

SEQ ID NO: 6541 - RNA, 32 nt, Homo Sapiens
uaauaaauauuuuuaaaucuugcuuuucagaa

SEQ ID NO: 6542 - RNA, 32 nt, Homo Sapiens
agcaugacaagccccaggcaggcugugcgcug

SEQ ID NO: 6543 - RNA, 32 nt, Homo Sapiens
ccucucagaaaagcugcuguggugggcagggg

SEQ ID NO: 6544 - RNA, 32 nt, Homo Sapiens
gcgccuccaagguuucacggcuuccucagcag

SEQ ID NO: 6545 - RNA, 32 nt, Homo Sapiens
gaagacucagaaucacaaaaaggaaaaggaau

SEQ ID NO: 6546 - RNA, 32 nt, Homo Sapiens
uugcucaaaggcuggugacuugugggccauuc

SEQ ID NO: 6547 - RNA, 32 nt, Homo Sapiens
aagacagacccagccuuugugcucucacccuc

SEQ ID NO: 6548 - RNA, 32 nt, Homo Sapiens
aaaauuaagugagaggaaaauuaaacuuucuu

SEQ ID NO: 6549 - RNA, 32 nt, Homo Sapiens
gugguccugucuggauaaucccauuuagucug

SEQ ID NO: 6550 - RNA, 32 nt, Homo Sapiens
uuugaaaacuguacauucggugagauuaaauu

SEQ ID NO: 6551 - RNA, 25 nt, Homo Sapiens
auguggacucucgggcgccgcgcag

SEQ ID NO: 6552 - RNA, 32 nt, Homo Sapiens
guauuuuggauagauaugugucuguaguauau

SEQ ID NO: 6553 - RNA, 32 nt, Homo Sapiens
gagucaaaagucuauugaaaaagcagagagag

SEQ ID NO: 6554 - RNA, 32 nt, Homo Sapiens
auaaugauccauacauacuauaaggcacuuuu

SEQ ID NO: 6555 - RNA, 32 nt, Homo Sapiens
ggauuccggcagaguuccucuaucucgucuug

SEQ ID NO: 6556 - RNA, 32 nt, Homo Sapiens
cuuggcuacuguuuuucuuuuacuucaguuuu

SEQ ID NO: 6557 - RNA, 32 nt, Homo Sapiens
ucuuucuguuaaguccugaguuugucauuggc

SEQ ID NO: 6558 - RNA, 32 nt, Homo Sapiens
cagugaggagcgguggaggcgaggccggcgcc

SEQ ID NO: 6559 - RNA, 32 nt, Homo Sapiens
ccagagauugcccuaggggaucuuuagauucu

SEQ ID NO: 6560 - RNA, 32 nt, Homo Sapiens
uugcugcccuccccaccccugccccagccuca

SEQ ID NO: 6561 - RNA, 32 nt, Homo Sapiens
uaaccuucaugaugaauuacuucuucagggug

SEQ ID NO: 6562 - RNA, 32 nt, Homo Sapiens
gcugggcccaucugcugggccuccucugccuc

SEQ ID NO: 6563 - RNA, 32 nt, Homo Sapiens
cccaggugguggccugggcuauaaagcuggcc

SEQ ID NO: 6564 - RNA, 32 nt, Homo Sapiens
cagugagucuuagguauguuuauuuuauucuc

SEQ ID NO: 6565 - RNA, 32 nt, Homo Sapiens
uuguuaaauauguuuuauucagguguagauga

SEQ ID NO: 6566 - RNA, 32 nt, Homo Sapiens
uauuuguucccaguuuuuaagauaguauaaaa

SEQ ID NO: 6567 - RNA, 32 nt, Homo Sapiens
uguccuggcagacucagcuggugggcuggggu

SEQ ID NO: 6568 - RNA, 32 nt, Homo Sapiens
uugccaggaaaauauaaggaaauacuguuaau

SEQ ID NO: 6569 - RNA, 32 nt, Homo Sapiens
gcgggggugauguauguggagaagggucgggg

SEQ ID NO: 6570 - RNA, 32 nt, Homo Sapiens
uugggaucauaguuuauaugcaucugauuuga

SEQ ID NO: 6571 - RNA, 32 nt, Homo Sapiens
gcucuuggaagacguuccgugcugugaccucc

SEQ ID NO: 6572 - RNA, 32 nt, Homo Sapiens
acuuggucggagccugugcauuuguugacacu

SEQ ID NO: 6573 - RNA, 32 nt, Homo Sapiens
acagauuccuucuauuaagggauuggcucgcu

SEQ ID NO: 6574 - RNA, 32 nt, Homo Sapiens
gagcugcuauacaugugaaaaguaaaguggug

SEQ ID NO: 6575 - RNA, 30 nt, Homo Sapiens
uaugcaugcauuuuugccuaaccuagagaa

SEQ ID NO: 6576 - RNA, 31 nt, Homo Sapiens
uguggcccuuugacuuugugaaugagcacaa

SEQ ID NO: 6577 - RNA, 32 nt, Homo Sapiens
cuuccuguucuuccaguugucacuauccuuga

SEQ ID NO: 6578 - RNA, 32 nt, Homo Sapiens
ucccuccagcagucgccuccucccacccugag

SEQ ID NO: 6579 - RNA, 32 nt, Homo Sapiens
uuucuuucaaaguuguaaguuuucauaucaug

SEQ ID NO: 6580 - RNA, 32 nt, Homo Sapiens
uuggcccucaucaucaccaccaucucccacug

SEQ ID NO: 6581 - RNA, 32 nt, Homo Sapiens
ugagcugaaccuggggaccccugguuggggaa

SEQ ID NO: 6582 - RNA, 32 nt, Homo Sapiens
caacccaaaugcccaucaauugauagacugga

SEQ ID NO: 6583 - RNA, 32 nt, Homo Sapiens
ccaauggggaguaucauuguuuuuguacaaaa

SEQ ID NO: 6584 - RNA, 30 nt, Homo Sapiens
gagccccgcgggcgcgcguccucgggagug

SEQ ID NO: 6585 - RNA, 32 nt, Homo Sapiens
cuagcgagggaccuccgcugcaucucagcaaa

SEQ ID NO: 6586 - RNA, 32 nt, Homo Sapiens
cagaggaggcagcagaaaaccaaacauuucac

SEQ ID NO: 6587 - RNA, 32 nt, Homo Sapiens
guuauguuacuucuguauccaguguccuaaag

SEQ ID NO: 6588 - RNA, 32 nt, Homo Sapiens
cuuaaagaacagacaguuuacuuggccuaaaa

SEQ ID NO: 6589 - RNA, 30 nt, Homo Sapiens
ucaauggcggaaaagccgccggugcucuga

SEQ ID NO: 6590 - RNA, 32 nt, Homo Sapiens
ucgcccagacgucggaggagccgggucacgag

SEQ ID NO: 6591 - RNA, 32 nt, Homo Sapiens
caggucucccucuguuguccaaggcuggagug

SEQ ID NO: 6592 - RNA, 32 nt, Homo Sapiens
uaucuguauguggguauauagagauauaugug

SEQ ID NO: 6593 - RNA, 32 nt, Homo Sapiens
auggcaaagaaaaauauucugaacuaaucaaa

SEQ ID NO: 6594 - RNA, 32 nt, Homo Sapiens
acaaagaggcccuggaggaggguggggcuggc

SEQ ID NO: 6595 - RNA, 32 nt, Homo Sapiens
ccgucaccggaucccagaccgcccugcuccuc

SEQ ID NO: 6596 - RNA, 32 nt, Homo Sapiens
auuguaaauaaauaauguuauguaucagugug

SEQ ID NO: 6597 - RNA, 32 nt, Homo Sapiens
uuguauugaccuuguaacuauauguuaaucuc

SEQ ID NO: 6598 - RNA, 32 nt, Homo Sapiens
cuuuugaauuuaugaaaaauuauuaacaauga

SEQ ID NO: 6599 - RNA, 32 nt, Homo Sapiens
aaggcuuaauaaaaaugcucuguacuuuauaa

SEQ ID NO: 6600 - RNA, 32 nt, Homo Sapiens
ccaugcaagggcacagaugggcugggagggag

SEQ ID NO: 6601 - RNA, 32 nt, Homo Sapiens
agaguagaugccugaggccacaucugaacaga

SEQ ID NO: 6602 - RNA, 32 nt, Homo Sapiens
cacuaugagaucugggaggcuucgugggcuuu

SEQ ID NO: 6603 - RNA, 32 nt, Homo Sapiens
uagccgugcacagccccauacacuucagggga

SEQ ID NO: 6604 - RNA, 32 nt, Homo Sapiens
gucaauuuuaaucuuguggauaccuuuauacu

SEQ ID NO: 6605 - RNA, 32 nt, Homo Sapiens
uguggugaucguacugaugaagucaacugugc

SEQ ID NO: 6606 - RNA, 32 nt, Homo Sapiens
auagacuggauaaagaaaauguggcacauaua

SEQ ID NO: 6607 - RNA, 32 nt, Homo Sapiens
caccagggccuggucagcacccagaugguuca

SEQ ID NO: 6608 - RNA, 32 nt, Homo Sapiens
ugagggagggauggggaaguguagccacaguu

SEQ ID NO: 6609 - RNA, 32 nt, Homo Sapiens
aauguuuuauaaauguacauuuuuuaaguccu

SEQ ID NO: 6610 - RNA, 32 nt, Homo Sapiens
ucagaggaaggccuguccugcuggaacuggag

SEQ ID NO: 6611 - RNA, 32 nt, Homo Sapiens
ggccuuuucuuucuuuuuguucauucuuuacc

SEQ ID NO: 6612 - RNA, 32 nt, Homo Sapiens
aauaaaccaaaauacuuaacagaaaauuguca

SEQ ID NO: 6613 - RNA, 32 nt, Homo Sapiens
gacucauuuuuggcacagaggacucuucugau

SEQ ID NO: 6614 - RNA, 32 nt, Homo Sapiens
ucuguagagagaccuuauaaauguaagauaug

SEQ ID NO: 6615 - RNA, 32 nt, Homo Sapiens
agaacuugggauguuauuuugccaacagauca

SEQ ID NO: 6616 - RNA, 32 nt, Homo Sapiens
aagguuaaaaggggauuaguaaaauuaaugcg

SEQ ID NO: 6617 - RNA, 32 nt, Homo Sapiens
acuucuaaaaauuaguauugaguuuaauggug

SEQ ID NO: 6618 - RNA, 32 nt, Homo Sapiens
cuuggagacaccugaccccugcccugcaaaga

SEQ ID NO: 6619 - RNA, 27 nt, Homo Sapiens
uccuuuccccgcuucagcccucaacug

SEQ ID NO: 6620 - RNA, 32 nt, Homo Sapiens
cccgucgccgcuuccggguccaggccccucgg

SEQ ID NO: 6621 - RNA, 32 nt, Homo Sapiens
ggccccgagccgggcgggacuagggugguggu

SEQ ID NO: 6622 - RNA, 32 nt, Homo Sapiens
uugagucucuguacaauuacuucagugccuuu

SEQ ID NO: 6623 - RNA, 32 nt, Homo Sapiens
cucagucggucccaguucccacguguugagug

SEQ ID NO: 6624 - RNA, 32 nt, Homo Sapiens
gauuucuuauaccagcagugugggaggcagug

SEQ ID NO: 6625 - RNA, 32 nt, Homo Sapiens
uccggaagcccacugugugacaauggcguggg

SEQ ID NO: 6626 - RNA, 32 nt, Homo Sapiens
caaaggucuucagauuucuugcauaauuucuu

SEQ ID NO: 6627 - RNA, 32 nt, Homo Sapiens
ugauccuccagguuaaaacuccuccuugagca

SEQ ID NO: 6628 - RNA, 32 nt, Homo Sapiens
gccuguggccuuccggccgguuuccagacgcc

SEQ ID NO: 6629 - RNA, 32 nt, Homo Sapiens
ccaacgccagcgccgccucucgcucgccgagc

SEQ ID NO: 6630 - RNA, 32 nt, Homo Sapiens
aaucagggacaguuuccaaagaauuauauauu

SEQ ID NO: 6631 - RNA, 32 nt, Homo Sapiens
ugccgcccugacgcccgccagccugagccacc

SEQ ID NO: 6632 - RNA, 32 nt, Homo Sapiens
acaugaaaauaaaauucauuuuuguauauuga

SEQ ID NO: 6633 - RNA, 32 nt, Homo Sapiens
ugauuuugaaagaugguauaagcuagggguua

SEQ ID NO: 6634 - RNA, 32 nt, Homo Sapiens
cgccgucucccccacaccccguaaccauguuc

SEQ ID NO: 6635 - RNA, 32 nt, Homo Sapiens
aguucggaggagaacuagcugcugccuugccu

SEQ ID NO: 6636 - RNA, 32 nt, Homo Sapiens
auuuugugaugaugaauuuuuuuuuuaacuuu

SEQ ID NO: 6637 - RNA, 32 nt, Homo Sapiens
uuuuguauuuuuuguagagacgugggucucac

SEQ ID NO: 6638 - RNA, 32 nt, Homo Sapiens
ugccagcccuccccuuucccaaugaaagccau

SEQ ID NO: 6639 - RNA, 30 nt, Homo Sapiens
uggggagagaagcaagagcaggcuggaguc

SEQ ID NO: 6640 - RNA, 32 nt, Homo Sapiens
ccgcccgcccccaccccacacccacauccucu

SEQ ID NO: 6641 - RNA, 32 nt, Homo Sapiens
cuuuuagaauaaaaggaaguguugaaaagaaa

SEQ ID NO: 6642 - RNA, 32 nt, Homo Sapiens
aaggucgggaggaggaggggcaaaggccgcgc

SEQ ID NO: 6643 - RNA, 32 nt, Homo Sapiens
guuagguugggucuaugcagcaccggagcuau

SEQ ID NO: 6644 - RNA, 32 nt, Homo Sapiens
cucagugaggcacuagugccacugccguggcc

SEQ ID NO: 6645 - RNA, 32 nt, Homo Sapiens
guuuccuuaauuuaugaaggcaucaugucacu

SEQ ID NO: 6646 - RNA, 32 nt, Homo Sapiens
aagccauuaaguacacagaaaucuguuuuauu

SEQ ID NO: 6647 - RNA, 32 nt, Homo Sapiens
gcauugggugugcacagcgguacccagaaucu

SEQ ID NO: 6648 - RNA, 32 nt, Homo Sapiens
ccuggaggggaagagggcaaucuccgcuggua

SEQ ID NO: 6649 - RNA, 32 nt, Homo Sapiens
agauggccgcggcgcgcacggcuccugcggcg

SEQ ID NO: 6650 - RNA, 30 nt, Homo Sapiens
ucggggcgcgcgcaguuggcgucugccagu

SEQ ID NO: 6651 - RNA, 32 nt, Homo Sapiens
auuuccagacuauuggaagugauuuacuguau

SEQ ID NO: 6652 - RNA, 32 nt, Homo Sapiens
gggucgguagcaagggccgggaggcgccaggg

SEQ ID NO: 6653 - RNA, 32 nt, Homo Sapiens
ccgaccuugugcucuggccguggguggagacc

SEQ ID NO: 6654 - RNA, 32 nt, Homo Sapiens
ugaaaagagaauugugaucacaggagaugcug

SEQ ID NO: 6655 - RNA, 32 nt, Homo Sapiens
gugagcagccccagccagcucuucaaggccuu

SEQ ID NO: 6656 - RNA, 32 nt, Homo Sapiens
agccucagcuaugcccucugggucaaccagaa

SEQ ID NO: 6657 - RNA, 32 nt, Homo Sapiens
ggcuggaccgcgcugcgcuccgcggccacugc

SEQ ID NO: 6658 - RNA, 32 nt, Homo Sapiens
cucggucgccgccgcuuuagccgccuccgggg

SEQ ID NO: 6659 - RNA, 32 nt, Homo Sapiens
cugcauaaggugugggaaacugagaggggaga

SEQ ID NO: 6660 - RNA, 32 nt, Homo Sapiens
cagaaauuugugcauagauugaugccaaaaaa

SEQ ID NO: 6661 - RNA, 32 nt, Homo Sapiens
augaggucaggagaucgagaccauccugccca

SEQ ID NO: 6662 - RNA, 32 nt, Homo Sapiens
acgggcacaaaacagcauggcuuauuugggga

SEQ ID NO: 6663 - RNA, 32 nt, Homo Sapiens
auucuagauuacuuuucuuacucugaaacaug

SEQ ID NO: 6664 - RNA, 32 nt, Homo Sapiens
ccggcggggcgagaaggaggagugcuuugagc

SEQ ID NO: 6665 - RNA, 32 nt, Homo Sapiens
gcugcagacugcacccucggcccacgacuguc

SEQ ID NO: 6666 - RNA, 32 nt, Homo Sapiens
guuuggaaaaucaaguacuucuuugaaugaug

SEQ ID NO: 6667 - RNA, 32 nt, Homo Sapiens
ugcucaauguuuucauuuuugaaaauacauuu

SEQ ID NO: 6668 - RNA, 32 nt, Homo Sapiens
aggaggccccgugugggccgcggcccggcccu

SEQ ID NO: 6669 - RNA, 31 nt, Homo Sapiens
cccugguagcauuugcucagagccuacgcuu

SEQ ID NO: 6670 - RNA, 32 nt, Homo Sapiens
acaucuggaagacacaaggugcugcugccacc

SEQ ID NO: 6671 - RNA, 32 nt, Homo Sapiens
aauaucuuugaauaguucuauaguugaugagu

SEQ ID NO: 6672 - RNA, 32 nt, Homo Sapiens
agcuccggccacagcucuggcuccugcuccgc

SEQ ID NO: 6673 - RNA, 32 nt, Homo Sapiens
ccucugaaguugagaaucauggcugccucacc

SEQ ID NO: 6674 - RNA, 32 nt, Homo Sapiens
caauggggcuauugucugaggaccccaagagc

SEQ ID NO: 6675 - RNA, 32 nt, Homo Sapiens
gcggcccgcgguggcgacggcggccgcugcaa

SEQ ID NO: 6676 - RNA, 32 nt, Homo Sapiens
gccaaugauauguuuugauugacaucaagugg

SEQ ID NO: 6677 - RNA, 32 nt, Homo Sapiens
gaggcugauuuuucuuuuuuuuaaguucuauu

SEQ ID NO: 6678 - RNA, 32 nt, Homo Sapiens
uacaaaauuuuuguuuuuaacauuuagauguu

SEQ ID NO: 6679 - RNA, 32 nt, Homo Sapiens
aagcuauuuuuaggcaucuucaccuugcuuua

SEQ ID NO: 6680 - RNA, 30 nt, Homo Sapiens
gcuccggcgcccgcggagcucgcaccaggc

SEQ ID NO: 6681 - RNA, 32 nt, Homo Sapiens
auuguaccuuuuuuuucuuuugaaguuuauau

SEQ ID NO: 6682 - RNA, 32 nt, Homo Sapiens
acaaaucaccacugcccuuucuccuuuuccau

SEQ ID NO: 6683 - RNA, 32 nt, Homo Sapiens
accugauggagaaauguuuuguguguaugaua

SEQ ID NO: 6684 - RNA, 32 nt, Homo Sapiens
gcaccaaagggccagauuucuaucuucagaag

SEQ ID NO: 6685 - RNA, 32 nt, Homo Sapiens
guaacagaguauguauuaaaagcaaaaauucc

SEQ ID NO: 6686 - RNA, 30 nt, Homo Sapiens
uucuccgcgccccagccgccggcugccagc

SEQ ID NO: 6687 - RNA, 32 nt, Homo Sapiens
acaggcaaaacaccaggcugcagagcuaugau

SEQ ID NO: 6688 - RNA, 32 nt, Homo Sapiens
cugccacagacacuacaugaacacgaaugagu

SEQ ID NO: 6689 - RNA, 32 nt, Homo Sapiens
ucacaaauuauguauuuauuuguuuucauagu

SEQ ID NO: 6690 - RNA, 32 nt, Homo Sapiens
agauuccuugguccccacuggaugugacaagg

SEQ ID NO: 6691 - RNA, 32 nt, Homo Sapiens
ccggacccugaggagccagcgggccgcaagca

SEQ ID NO: 6692 - RNA, 32 nt, Homo Sapiens
cguggggcaauuuaaccuuuuucaugaaaguu

SEQ ID NO: 6693 - RNA, 32 nt, Homo Sapiens
ccagaaacauauauuucauuuccacacccuca

SEQ ID NO: 6694 - RNA, 29 nt, Homo Sapiens
cgcgaugucaagcgaggaaagcuaccggg

SEQ ID NO: 6695 - RNA, 32 nt, Homo Sapiens
cauggagggggaggaggaggcggcggcggcga

SEQ ID NO: 6696 - RNA, 32 nt, Homo Sapiens
gcgguccggggcugcgcgaccauggcggacaa

SEQ ID NO: 6697 - RNA, 32 nt, Homo Sapiens
auuccaguucccuggacuaccuucaggaggca

SEQ ID NO: 6698 - RNA, 32 nt, Homo Sapiens
gguuauguaauugugccucauuuuaaaaguga

SEQ ID NO: 6699 - RNA, 32 nt, Homo Sapiens
aguuggcuuccgaguuccagacuauaugucca

SEQ ID NO: 6700 - RNA, 32 nt, Homo Sapiens
uuuuguuaucuaaaagaucacaugauggagga

SEQ ID NO: 6701 - RNA, 32 nt, Homo Sapiens
uggagacggugaucuugucuuuaaaacaugau

SEQ ID NO: 6702 - RNA, 32 nt, Homo Sapiens
ucaggagaucauaaauaggcaucuuacauuug

SEQ ID NO: 6703 - RNA, 32 nt, Homo Sapiens
cuuccuugcuccacuuuccccagaguacacag

SEQ ID NO: 6704 - RNA, 32 nt, Homo Sapiens
cuucucucaacaaaaauggaagggcagaugcu

SEQ ID NO: 6705 - RNA, 32 nt, Homo Sapiens
uacagggaaaucccggcccagcuuuccacagg

SEQ ID NO: 6706 - RNA, 32 nt, Homo Sapiens
cacgcggaggggcccggcgucuguggcgggca

SEQ ID NO: 6707 - RNA, 32 nt, Homo Sapiens
acuugagaagaaacaugagaaaaguuauuuuu

SEQ ID NO: 6708 - RNA, 32 nt, Homo Sapiens
cuuccuggggcacuuuucucuugguuaguguu

SEQ ID NO: 6709 - RNA, 32 nt, Homo Sapiens
cuuuuuguuaaauaaacuuuuguaauagucaa

SEQ ID NO: 6710 - RNA, 32 nt, Homo Sapiens
uaugacuaacuggaagaggacacgccagagcu

SEQ ID NO: 6711 - RNA, 32 nt, Homo Sapiens
cgccaggucugcagcgcagaccaccugggcgg

SEQ ID NO: 6712 - RNA, 32 nt, Homo Sapiens
gauguucaaaaguaguugugaaauuugagaau

SEQ ID NO: 6713 - RNA, 32 nt, Homo Sapiens
gaacugccauucaguagagaauuauuugccua

SEQ ID NO: 6714 - RNA, 30 nt, Homo Sapiens
gccugaugugguggagagauuugacgagac

SEQ ID NO: 6715 - RNA, 32 nt, Homo Sapiens
agaaaagucucaaaaagaaguauugcaugucu

SEQ ID NO: 6716 - RNA, 32 nt, Homo Sapiens
ugucaccgagacccccaggcuucagguccugu

SEQ ID NO: 6717 - RNA, 32 nt, Homo Sapiens
cugaccauuauaaauuugauaaagauuucaug

SEQ ID NO: 6718 - RNA, 32 nt, Homo Sapiens
uggccuucccugcugcguggacgcaggcucug

SEQ ID NO: 6719 - RNA, 32 nt, Homo Sapiens
cuaauuaauguuuuuuauauucuuaaauuugc

SEQ ID NO: 6720 - RNA, 32 nt, Homo Sapiens
uucccgaggcuggggcuggggguggcugggag

SEQ ID NO: 6721 - RNA, 32 nt, Homo Sapiens
guauaucuucuagccuuuauucuguacuuuua

SEQ ID NO: 6722 - RNA, 32 nt, Homo Sapiens
uuugaaggagcacaaaaagacacacacggcug

SEQ ID NO: 6723 - RNA, 32 nt, Homo Sapiens
ggcaccaaggccacguuuccgugccaccuccu

SEQ ID NO: 6724 - RNA, 32 nt, Homo Sapiens
cccuguagggccggccggcgagucccagugag

SEQ ID NO: 6725 - RNA, 32 nt, Homo Sapiens
gguaagccacaacaucuagaaaucacucauag

SEQ ID NO: 6726 - RNA, 32 nt, Homo Sapiens
gccaaauauuccagcccuggccgaaagaugau

SEQ ID NO: 6727 - RNA, 32 nt, Homo Sapiens
gcuccccucacggcagcaccacguuuccaguc

SEQ ID NO: 6728 - RNA, 32 nt, Homo Sapiens
uucuccaaguucuccuuuucucuccagaguga

SEQ ID NO: 6729 - RNA, 32 nt, Homo Sapiens
gggcgccguggcguugccucggagcucgcugc

SEQ ID NO: 6730 - RNA, 32 nt, Homo Sapiens
ucugcuggucaguggcggcuguccccucccca

SEQ ID NO: 6731 - RNA, 32 nt, Homo Sapiens
gcauggcagaagaaugggaauauuuuauacug

SEQ ID NO: 6732 - RNA, 32 nt, Homo Sapiens
cagaaguaagccuguauaaacagguacacacu

SEQ ID NO: 6733 - RNA, 32 nt, Homo Sapiens
caaaggugcagaaagcacucugacaauuccaa

SEQ ID NO: 6734 - RNA, 32 nt, Homo Sapiens
cagugcucccuccccaggaguggggccccaac

SEQ ID NO: 6735 - RNA, 32 nt, Homo Sapiens
acugaauuauaggaauccaauuacaauauauu

SEQ ID NO: 6736 - RNA, 32 nt, Homo Sapiens
aaagccuuauuauuuuuuaucuauguggaaaa

SEQ ID NO: 6737 - RNA, 32 nt, Homo Sapiens
caguguaaauuaauuacauacauauuuuucua

SEQ ID NO: 6738 - RNA, 32 nt, Homo Sapiens
ugggaugagagaacauuauaaaaccacuuugu

SEQ ID NO: 6739 - RNA, 32 nt, Homo Sapiens
ugcugacuucugugguccaccauuguuuuucu

SEQ ID NO: 6740 - RNA, 32 nt, Homo Sapiens
cuggcuuuuauaagagcagcagccaacacguu

SEQ ID NO: 6741 - RNA, 32 nt, Homo Sapiens
acaggcuggaggaacagugcagacacacacca

SEQ ID NO: 6742 - RNA, 32 nt, Homo Sapiens
ugaauagaggacaaagguugugucuugcuuuu

SEQ ID NO: 6743 - RNA, 32 nt, Homo Sapiens
gccccuauuucugaaagcuucuuccagucccu

SEQ ID NO: 6744 - RNA, 32 nt, Homo Sapiens
cgagcccugugcuuuugguguaaauaauguac

SEQ ID NO: 6745 - RNA, 32 nt, Homo Sapiens
accugcucccaaauggcaaggauuuuugcuac

SEQ ID NO: 6746 - RNA, 32 nt, Homo Sapiens
ucuucugccucauaguggucacucaaggccuc

SEQ ID NO: 6747 - RNA, 32 nt, Homo Sapiens
auugguaaaugggaaagaagugagcaacuuaa

SEQ ID NO: 6748 - RNA, 32 nt, Homo Sapiens
gcacaggucgggcgcaggauucagccggaggg

SEQ ID NO: 6749 - RNA, 32 nt, Homo Sapiens
gagugaaugggggcugaaugugcgaguccaua

SEQ ID NO: 6750 - RNA, 30 nt, Homo Sapiens
acggaccaugcuccggagucucagcaggcu

SEQ ID NO: 6751 - RNA, 32 nt, Homo Sapiens
ugggacugagggggccagggcugggucaggau

SEQ ID NO: 6752 - RNA, 32 nt, Homo Sapiens
aguguuugcauuuguauguuugaaaugcucca

SEQ ID NO: 6753 - RNA, 32 nt, Homo Sapiens
aaaugggaauaauuuguauguaucugugcaaa

SEQ ID NO: 6754 - RNA, 32 nt, Homo Sapiens
gaggcgagaggaaggggagaacuuggagaaua

SEQ ID NO: 6755 - RNA, 32 nt, Homo Sapiens
gcugccuccagccccagcaacccggccgcccu

SEQ ID NO: 6756 - RNA, 32 nt, Homo Sapiens
auauauccucaauaugcaugucugcccaucac

SEQ ID NO: 6757 - RNA, 32 nt, Homo Sapiens
agcuguuuucucauuucauguacacuugcccc

SEQ ID NO: 6758 - RNA, 32 nt, Homo Sapiens
ucugggcaggggcagcagcaucucagacauca

SEQ ID NO: 6759 - RNA, 31 nt, Homo Sapiens
guucuggagaaagacgaccacugugggccuu

SEQ ID NO: 6760 - RNA, 32 nt, Homo Sapiens
ccugcccugucacucaccucaaaccugccaug

SEQ ID NO: 6761 - RNA, 30 nt, Homo Sapiens
ugucgcaagcccgugcuggggcugcccuuu

SEQ ID NO: 6762 - RNA, 32 nt, Homo Sapiens
aaagagaaaauguuuguugaaaaaauagucuu

SEQ ID NO: 6763 - RNA, 32 nt, Homo Sapiens
ggauccggggcugagggcaggggucggguggg

SEQ ID NO: 6764 - RNA, 32 nt, Homo Sapiens
ugcagcuguacucggggagcugcggcggcucc

SEQ ID NO: 6765 - RNA, 32 nt, Homo Sapiens
cagcaaagugaggcucccauggaggcucagug

SEQ ID NO: 6766 - RNA, 32 nt, Homo Sapiens
guucauucuaguuuuguuugguguaaguaggu

SEQ ID NO: 6767 - RNA, 32 nt, Homo Sapiens
aauuuaaaacaaaucauaguagcagcauauua

SEQ ID NO: 6768 - RNA, 32 nt, Homo Sapiens
cucagcacucccuuccccacccccauagccca

SEQ ID NO: 6769 - RNA, 32 nt, Homo Sapiens
gcacauaggcggccagcuccccagcccggcuu

SEQ ID NO: 6770 - RNA, 32 nt, Homo Sapiens
ucaacaaacacagauaacaggaaaugauccau

SEQ ID NO: 6771 - RNA, 32 nt, Homo Sapiens
cugggcuuccuggccugaguggguagacgcag

SEQ ID NO: 6772 - RNA, 32 nt, Homo Sapiens
acgugcuguaagauuuccugagcauuacaguu

SEQ ID NO: 6773 - RNA, 32 nt, Homo Sapiens
uuauauaaaaaccauggauuuagaaagguaua

SEQ ID NO: 6774 - RNA, 32 nt, Homo Sapiens
cucugccacuucgucucgcucccuacucuccu

SEQ ID NO: 6775 - RNA, 32 nt, Homo Sapiens
aacacagucugcugcuauauagugggggaagc

SEQ ID NO: 6776 - RNA, 32 nt, Homo Sapiens
agaggcagcuggagccagugcugccuguccgu

SEQ ID NO: 6777 - RNA, 32 nt, Homo Sapiens
acugaacgaaaaccuuucugcuuucuguccgu

SEQ ID NO: 6778 - RNA, 32 nt, Homo Sapiens
uaauauucauauuggaaaaauuuccuacaagu

SEQ ID NO: 6779 - RNA, 32 nt, Homo Sapiens
uacagagaugacuuggaggcuugaagcaaaug

SEQ ID NO: 6780 - RNA, 32 nt, Homo Sapiens
ucaggccccaucucaagguuggcacuccugcc

SEQ ID NO: 6781 - RNA, 32 nt, Homo Sapiens
cgccguguucuucagccucagcuggaagggga

SEQ ID NO: 6782 - RNA, 32 nt, Homo Sapiens
aauuagccgggcgugguugcgggcaccuguag

SEQ ID NO: 6783 - RNA, 32 nt, Homo Sapiens
uuuguuaaccguucccuugguauuuguuuaau

SEQ ID NO: 6784 - RNA, 32 nt, Homo Sapiens
cccaaagacuccacaagaaaacucagcacuga

SEQ ID NO: 6785 - RNA, 32 nt, Homo Sapiens
ccgacgacuuguuucccuuguuuacuucuucu

SEQ ID NO: 6786 - RNA, 32 nt, Homo Sapiens
uauuagaguuuuacaaaaaggcuuacuuuuga

SEQ ID NO: 6787 - RNA, 32 nt, Homo Sapiens
gugacuacaguacaugagacaacaagguuacu

SEQ ID NO: 6788 - RNA, 32 nt, Homo Sapiens
aggaaacauagauuauuuuauauuauuauuuc

SEQ ID NO: 6789 - RNA, 32 nt, Homo Sapiens
aucaagaccacacaauuauuaagggauagagu

SEQ ID NO: 6790 - RNA, 32 nt, Homo Sapiens
aaacuaggccuaugaauuuaauguggaaaaau

SEQ ID NO: 6791 - RNA, 32 nt, Homo Sapiens
cagcccccaucccguagcccuuccuggaucug

SEQ ID NO: 6792 - RNA, 32 nt, Homo Sapiens
aguucugaacuugugaggcaucugggccuccc

SEQ ID NO: 6793 - RNA, 32 nt, Homo Sapiens
cuaacgcccccgcucagcgcucugcgcuccag

SEQ ID NO: 6794 - RNA, 32 nt, Homo Sapiens
acacagacagacggggacaggcggcgggucuu

SEQ ID NO: 6795 - RNA, 32 nt, Homo Sapiens
aucagaccauuucuaucguccgcugccucugg

SEQ ID NO: 6796 - RNA, 32 nt, Homo Sapiens
uuacucccgggacagaacuuccccucaggagg

SEQ ID NO: 6797 - RNA, 32 nt, Homo Sapiens
cagacagauacugugaacuuggagcucucuaa

SEQ ID NO: 6798 - RNA, 32 nt, Homo Sapiens
guuuagccugaagaaacguggggcagaugcug

SEQ ID NO: 6799 - RNA, 32 nt, Homo Sapiens
uugccuggcucccagggcuaggguuagggcuc

SEQ ID NO: 6800 - RNA, 32 nt, Homo Sapiens
uugcugaggauaaugucuucuagcuucauuca

SEQ ID NO: 6801 - RNA, 32 nt, Homo Sapiens
ggagggaggcauuuccuggggaugguuaaucc

SEQ ID NO: 6802 - RNA, 32 nt, Homo Sapiens
ugcaggaccacuuuuccagaaaucucaggggg

SEQ ID NO: 6803 - RNA, 32 nt, Homo Sapiens
augagcaagagcuucugccuguucagaagcau

SEQ ID NO: 6804 - RNA, 32 nt, Homo Sapiens
ccaccccugcaccagagccugcucuuagcucc

SEQ ID NO: 6805 - RNA, 32 nt, Homo Sapiens
ccuaguaaagauuguuucuaauagaugagaac

SEQ ID NO: 6806 - RNA, 32 nt, Homo Sapiens
aucauuuaaugauggaaaucaauugcuuccau

SEQ ID NO: 6807 - RNA, 32 nt, Homo Sapiens
uuucacuaauauauuuuuuacugcuaucaucu

SEQ ID NO: 6808 - RNA, 32 nt, Homo Sapiens
cgaagaggggagagggagcugcccgcgcaguc

SEQ ID NO: 6809 - RNA, 32 nt, Homo Sapiens
cgggcggaggggaggggcagggggcggugcca

SEQ ID NO: 6810 - RNA, 32 nt, Homo Sapiens
augggagcagugccgugucugcauggucuccu

SEQ ID NO: 6811 - RNA, 32 nt, Homo Sapiens
auaauuugauucaggucacaaguccaaggugc

SEQ ID NO: 6812 - RNA, 32 nt, Homo Sapiens
gagagccucccaccuuuccccugcugcggaug

SEQ ID NO: 6813 - RNA, 32 nt, Homo Sapiens
gacugucucacagaacucagagaaacaauuua

SEQ ID NO: 6814 - RNA, 32 nt, Homo Sapiens
ccucacugaagcaacagcaucccaaggugcuc

SEQ ID NO: 6815 - RNA, 32 nt, Homo Sapiens
auccuggugcggauaaccaguguugggaguua

SEQ ID NO: 6816 - RNA, 32 nt, Homo Sapiens
ccaucuuguggcggcggcgcgggcggcuguua

SEQ ID NO: 6817 - RNA, 32 nt, Homo Sapiens
acgugggcggugggccccagccccacagacca

SEQ ID NO: 6818 - RNA, 32 nt, Homo Sapiens
guuuuuaaucauuaguaauauuucaguugggu

SEQ ID NO: 6819 - RNA, 32 nt, Homo Sapiens
cagugaggggcaacgaggcggcugggaugccg

SEQ ID NO: 6820 - RNA, 32 nt, Homo Sapiens
ccaggcauuggcucagcccgcugagugggggg

SEQ ID NO: 6821 - RNA, 32 nt, Homo Sapiens
caggcagggucgcgcgcauggccugggcgggc

SEQ ID NO: 6822 - RNA, 32 nt, Homo Sapiens
cauguaucaggauuuccgcauuauaaaaauga

SEQ ID NO: 6823 - RNA, 32 nt, Homo Sapiens
ucagaaguuacaagaugaucaauucaaccucc

SEQ ID NO: 6824 - RNA, 32 nt, Homo Sapiens
caucagggaagaggcuuccggaggaggggaug

SEQ ID NO: 6825 - RNA, 32 nt, Homo Sapiens
ucccuucugaccagccuuggaggcucagcauc

SEQ ID NO: 6826 - RNA, 32 nt, Homo Sapiens
uccacugucuccuggggcaguugugggucacu

SEQ ID NO: 6827 - RNA, 32 nt, Homo Sapiens
cugcagaccccgagcuggcccugggccagccg

SEQ ID NO: 6828 - RNA, 32 nt, Homo Sapiens
acgcacccaagccccucaguccagcuucccaa

SEQ ID NO: 6829 - RNA, 32 nt, Homo Sapiens
auuuccuuggauuucugaauggcugcagugac

SEQ ID NO: 6830 - RNA, 30 nt, Homo Sapiens
ugauggaagaagcuuugagacugugggccg

SEQ ID NO: 6831 - RNA, 32 nt, Homo Sapiens
gcgaggaggcgcggaaccauggccgauggggg

SEQ ID NO: 6832 - RNA, 32 nt, Homo Sapiens
aaucugagagcagggcgagaaaaggaagauca

SEQ ID NO: 6833 - RNA, 32 nt, Homo Sapiens
ugccucguacccuuuccuuguuuuucuccaga

SEQ ID NO: 6834 - RNA, 32 nt, Homo Sapiens
uuuuguguagguuuguuuuuuauuuuugauga

SEQ ID NO: 6835 - RNA, 32 nt, Homo Sapiens
aagagcguccuuccuuucccuagucacaggau

SEQ ID NO: 6836 - RNA, 32 nt, Homo Sapiens
gcccccaacccugccccacgggcccggcgcca

SEQ ID NO: 6837 - RNA, 32 nt, Homo Sapiens
guguggcuucccgaggcccggccuccccacug

SEQ ID NO: 6838 - RNA, 32 nt, Homo Sapiens
auuguuuuucuuuuuuaaccaacucauuguuu

SEQ ID NO: 6839 - RNA, 32 nt, Homo Sapiens
agaggcugauugcucagcauuaugcaugccug

SEQ ID NO: 6840 - RNA, 32 nt, Homo Sapiens
uuuggaagauaaauuuauguguagacuuuuuu

SEQ ID NO: 6841 - RNA, 32 nt, Homo Sapiens
gauuaauacuuugucucccaauaucacagaaa

SEQ ID NO: 6842 - RNA, 32 nt, Homo Sapiens
uuugcuauuuuucccuuuugggaaaacaauga

SEQ ID NO: 6843 - RNA, 32 nt, Homo Sapiens
ucucucggaguaucugggaacugugccuuuga

SEQ ID NO: 6844 - RNA, 32 nt, Homo Sapiens
cgguuuaguccucuccucucucugggccucac

SEQ ID NO: 6845 - RNA, 32 nt, Homo Sapiens
gggcaggugggcaggcguguccuccuuuuccu

SEQ ID NO: 6846 - RNA, 32 nt, Homo Sapiens
gcccagcguggccccucaauuugaaaauggac

SEQ ID NO: 6847 - RNA, 32 nt, Homo Sapiens
gggaaaccaaaaugagcccaccuuguguucuu

SEQ ID NO: 6848 - RNA, 32 nt, Homo Sapiens
caagucuugaagaucuuggucauuuuaugaca

SEQ ID NO: 6849 - RNA, 32 nt, Homo Sapiens
uacuuucaauauuauuuuuuuauuuauucauu

SEQ ID NO: 6850 - RNA, 32 nt, Homo Sapiens
aucaggaaagacuuccuggccaacaugagguu

SEQ ID NO: 6851 - RNA, 32 nt, Homo Sapiens
auuguaauuuuguuccuguuuauuuuuggguu

SEQ ID NO: 6852 - RNA, 32 nt, Homo Sapiens
aggugguagagcuggauuuagauuuggaugua

SEQ ID NO: 6853 - RNA, 32 nt, Homo Sapiens
ugccuucccucccuccuccccaccgggccgga

SEQ ID NO: 6854 - RNA, 32 nt, Homo Sapiens
cucauuggucagcuuagagacuugcagaccug

SEQ ID NO: 6855 - RNA, 32 nt, Homo Sapiens
uaagaucugcacgagucugacuggccuuuggg

SEQ ID NO: 6856 - RNA, 32 nt, Homo Sapiens
uguuuuguuugccacuuuuuuaucuccuauuc

SEQ ID NO: 6857 - RNA, 32 nt, Homo Sapiens
uaaaacagaaagcaugugaaaacauacugugc

SEQ ID NO: 6858 - RNA, 32 nt, Homo Sapiens
uuuauagugucuaccauuuacaaccugcauaa

SEQ ID NO: 6859 - RNA, 32 nt, Homo Sapiens
ucagccccacuuagccaagaccucaaguauaa

SEQ ID NO: 6860 - RNA, 32 nt, Homo Sapiens
ugguaauaaauagaguuggaacaaagaggaga

SEQ ID NO: 6861 - RNA, 32 nt, Homo Sapiens
uggacaaccaucagggagccaggacacagagg

SEQ ID NO: 6862 - RNA, 32 nt, Homo Sapiens
ucgcaggucgcuguggccccagccucgccuga

SEQ ID NO: 6863 - RNA, 32 nt, Homo Sapiens
auauucuaaaacuauauuugagcgaaaccugu

SEQ ID NO: 6864 - RNA, 32 nt, Homo Sapiens
ggcagugggcauuuacugcugcucuuuaacag

SEQ ID NO: 6865 - RNA, 32 nt, Homo Sapiens
uuuuuacacaguucuuuuuguuuuugugugug

SEQ ID NO: 6866 - RNA, 32 nt, Homo Sapiens
ucaaaaaacuuuauuuagauugucaaaagaca

SEQ ID NO: 6867 - RNA, 32 nt, Homo Sapiens
cugacccugucuuuguccccagcccuggagcc

SEQ ID NO: 6868 - RNA, 32 nt, Homo Sapiens
uaaauauguuugucaugagucagggguuugua

SEQ ID NO: 6869 - RNA, 32 nt, Homo Sapiens
aauugccuucuaugaaacuggucccugaugcc

SEQ ID NO: 6870 - RNA, 32 nt, Homo Sapiens
cgaucaucgucuuuuuccuaguucuuuuguca

SEQ ID NO: 6871 - RNA, 32 nt, Homo Sapiens
cacagggcucugcugugccucagagcaaaagu

SEQ ID NO: 6872 - RNA, 32 nt, Homo Sapiens
gggcagggacauuuccauuagaauggugcucu

SEQ ID NO: 6873 - RNA, 32 nt, Homo Sapiens
cucuucugacuucucaaaggacaaucggauac

SEQ ID NO: 6874 - RNA, 30 nt, Homo Sapiens
uccgccaugcuugccaccucuugcuucuga

SEQ ID NO: 6875 - RNA, 32 nt, Homo Sapiens
gagaguaaagcuucuaggcaucugaaacuugc

SEQ ID NO: 6876 - RNA, 32 nt, Homo Sapiens
gcuacaccuggacgugacguggggcugggagc

SEQ ID NO: 6877 - RNA, 32 nt, Homo Sapiens
caagcugcccaagccgcccgccgccgccgccg

SEQ ID NO: 6878 - RNA, 32 nt, Homo Sapiens
uggaccugaaauuuaaacugcaaugccagucc

SEQ ID NO: 6879 - RNA, 31 nt, Homo Sapiens
uccgggcagcgcaccgcagccgugagcagca

SEQ ID NO: 6880 - RNA, 32 nt, Homo Sapiens
cuuuucucagaauccuugaucaaaaagagcca

SEQ ID NO: 6881 - RNA, 32 nt, Homo Sapiens
gcagcuauccagugacuuguucugaguaagug

SEQ ID NO: 6882 - RNA, 32 nt, Homo Sapiens
uaguccaauuuuuuaucuuaaucauaaaaugu

SEQ ID NO: 6883 - RNA, 30 nt, Homo Sapiens
gacuaaugggccgcaccaucacugccgucc

SEQ ID NO: 6884 - RNA, 32 nt, Homo Sapiens
aauguuuaaaauugaagagccuuuucauguau

SEQ ID NO: 6885 - RNA, 32 nt, Homo Sapiens
uucuagggccuauggcaguucucccaggaugu

SEQ ID NO: 6886 - RNA, 30 nt, Homo Sapiens
cgguccuggccugugccgccgccgccccca

SEQ ID NO: 6887 - RNA, 32 nt, Homo Sapiens
uugugaugaugaugagcaugguggagcugggc

SEQ ID NO: 6888 - RNA, 32 nt, Homo Sapiens
aacguuggcaaugaaaauuggcauuuuuucug

SEQ ID NO: 6889 - RNA, 32 nt, Homo Sapiens
cguucucucuuccucugcuccgccaugaugag

SEQ ID NO: 6890 - RNA, 32 nt, Homo Sapiens
gcgccugcagacgcuccgcucgcugccuucuc

SEQ ID NO: 6891 - RNA, 32 nt, Homo Sapiens
gcagcuccgcgaagcugaggugauugagacga

SEQ ID NO: 6892 - RNA, 32 nt, Homo Sapiens
ucuccccgcccggcccucccucagcgcgcggc

SEQ ID NO: 6893 - RNA, 32 nt, Homo Sapiens
cucucaucauuugcucuguuaagggaacaaau

SEQ ID NO: 6894 - RNA, 32 nt, Homo Sapiens
uucaauggcugauaguuuuguuuucucacccu

SEQ ID NO: 6895 - RNA, 32 nt, Homo Sapiens
cuuggcugugcucuccuuagccuggcucaccu

SEQ ID NO: 6896 - RNA, 32 nt, Homo Sapiens
cccuaugaaaauuugacuuaaacuaaugacug

SEQ ID NO: 6897 - RNA, 32 nt, Homo Sapiens
acucuacauuucccuuguuuuuuaacucaugc

SEQ ID NO: 6898 - RNA, 32 nt, Homo Sapiens
cgcuauugcgcggcgauuuguuguaagaacug

SEQ ID NO: 6899 - RNA, 32 nt, Homo Sapiens
cauuuucugccaagugauacagaaccuucguu

SEQ ID NO: 6900 - RNA, 32 nt, Homo Sapiens
uaaaaggauaaacacaauaugguccauccaua

SEQ ID NO: 6901 - RNA, 32 nt, Homo Sapiens
uaugguacugcugugacgcggcacauacaccc

SEQ ID NO: 6902 - RNA, 32 nt, Homo Sapiens
gaagucaccagcuccgggaggcgacaauauga

SEQ ID NO: 6903 - RNA, 32 nt, Homo Sapiens
aagcuugugggagucauuuacauccuacugcu

SEQ ID NO: 6904 - RNA, 32 nt, Homo Sapiens
guguacucaguugaaugacacacauuauguca

SEQ ID NO: 6905 - RNA, 32 nt, Homo Sapiens
guuguagacagaggcacuugucucgugcagag

SEQ ID NO: 6906 - RNA, 32 nt, Homo Sapiens
cccuugucugucaaugguggguaguccuggcu

SEQ ID NO: 6907 - RNA, 32 nt, Homo Sapiens
uuguugcguuuccacgucucggaggccugcgc

SEQ ID NO: 6908 - RNA, 32 nt, Homo Sapiens
aaucuauugaagugaucccuggucauccuaau

SEQ ID NO: 6909 - RNA, 32 nt, Homo Sapiens
uaugaaaaaaauauauacuaacucuacaguaa

SEQ ID NO: 6910 - RNA, 32 nt, Homo Sapiens
gagaggcccccuccucuccccagaccacaggg

SEQ ID NO: 6911 - RNA, 32 nt, Homo Sapiens
agagcaggagucaccacaggcugaaugcccac

SEQ ID NO: 6912 - RNA, 32 nt, Homo Sapiens
auaugaagauuacucuugauucugccugacug

SEQ ID NO: 6913 - RNA, 32 nt, Homo Sapiens
agaggcgccccucccucccggauggggcggcu

SEQ ID NO: 6914 - RNA, 32 nt, Homo Sapiens
ugacauucguaucaucacugugcaccauuggc

SEQ ID NO: 6915 - RNA, 32 nt, Homo Sapiens
uuguaaauuaauauuucuuuggggaugaugcu

SEQ ID NO: 6916 - RNA, 32 nt, Homo Sapiens
cauugcuggaaucuugguauugaugaguuaca

SEQ ID NO: 6917 - RNA, 32 nt, Homo Sapiens
guccguaggagucggaugugucugugcuuuau

SEQ ID NO: 6918 - RNA, 32 nt, Homo Sapiens
gccaggauggagcagaggagcgccacacaugg

SEQ ID NO: 6919 - RNA, 32 nt, Homo Sapiens
cgagccggaaccgacgaguccugggagagaac

SEQ ID NO: 6920 - RNA, 32 nt, Homo Sapiens
agucagguccggcggcagcgcuuccucuggca

SEQ ID NO: 6921 - RNA, 32 nt, Homo Sapiens
uguuagaaaggucuuccuuagauggaguugaa

SEQ ID NO: 6922 - RNA, 32 nt, Homo Sapiens
agcaaaauggggauugaagggacuuauaauuu

SEQ ID NO: 6923 - RNA, 32 nt, Homo Sapiens
caauaacgacgacaguguggcaugucauauug

SEQ ID NO: 6924 - RNA, 32 nt, Homo Sapiens
gagaggaagcccuggcuuccaaggcugggagc

SEQ ID NO: 6925 - RNA, 32 nt, Homo Sapiens
ccccaggcggcgaggagagcggugccuugcag

SEQ ID NO: 6926 - RNA, 32 nt, Homo Sapiens
ucgugguggucggcgcucaccauccaccagcg

SEQ ID NO: 6927 - RNA, 32 nt, Homo Sapiens
ugagaagugggguguggucucucagcuguucu

SEQ ID NO: 6928 - RNA, 32 nt, Homo Sapiens
ccagagacccacuguuagggucggggauguca

SEQ ID NO: 6929 - RNA, 32 nt, Homo Sapiens
uggauuuguaaaaaucacauuguugaguuaua

SEQ ID NO: 6930 - RNA, 32 nt, Homo Sapiens
gugccagcuccgccggcgaccggugugccaaa

SEQ ID NO: 6931 - RNA, 32 nt, Homo Sapiens
cuaaccaggaggacaggagccccaagaggccc

SEQ ID NO: 6932 - RNA, 32 nt, Homo Sapiens
acugcuaaaaggaaaagcauccggcgcagaca

SEQ ID NO: 6933 - RNA, 32 nt, Homo Sapiens
cagcuucagaacuugagcuaaguaaaugcuuu

SEQ ID NO: 6934 - RNA, 32 nt, Homo Sapiens
caccuccccccgccuccuucccgcuuuuugag

SEQ ID NO: 6935 - RNA, 32 nt, Homo Sapiens
cacaugaagaaauaugcugauguucuugaaag

SEQ ID NO: 6936 - RNA, 32 nt, Homo Sapiens
aauccaaaugagcucuagacauuaucacagac

SEQ ID NO: 6937 - RNA, 32 nt, Homo Sapiens
cuaccugaggaacgcaaggagaauaauacuca

SEQ ID NO: 6938 - RNA, 32 nt, Homo Sapiens
agacugguugguuuuuuucccucuuucccaac

SEQ ID NO: 6939 - RNA, 32 nt, Homo Sapiens
gcuaaaauggcaaauugucuguuaucucuuuu

SEQ ID NO: 6940 - RNA, 32 nt, Homo Sapiens
aacaaaaguacaaaagcaguugcuguaagaaa

SEQ ID NO: 6941 - RNA, 32 nt, Homo Sapiens
ucccucuccucuccucucugguagguuuaauu

SEQ ID NO: 6942 - RNA, 32 nt, Homo Sapiens
uuauugauucgcugugucaucacaucagcucc

SEQ ID NO: 6943 - RNA, 32 nt, Homo Sapiens
aauccaaggcucuucccaggccugcuggcugc

SEQ ID NO: 6944 - RNA, 32 nt, Homo Sapiens
ggucuuggauacucaaagaaucuuucauuucu

SEQ ID NO: 6945 - RNA, 28 nt, Homo Sapiens
acaaugaaaaggaaaucuugcacccagu

SEQ ID NO: 6946 - RNA, 32 nt, Homo Sapiens
ccagugacggacaugcacguggcagaucauga

SEQ ID NO: 6947 - RNA, 30 nt, Homo Sapiens
ugcauucagaucccugccucucugccuuaa

SEQ ID NO: 6948 - RNA, 32 nt, Homo Sapiens
auuccgcuuguuugccggcugcgugagugcuu

SEQ ID NO: 6949 - RNA, 32 nt, Homo Sapiens
agcaugcucugcaacgaagagcuagguccaag

SEQ ID NO: 6950 - RNA, 32 nt, Homo Sapiens
agacacgcggggcuggccccccugcucacccu

SEQ ID NO: 6951 - RNA, 32 nt, Homo Sapiens
uccuccaaggugccggcggcccggagcagcgc

SEQ ID NO: 6952 - RNA, 31 nt, Homo Sapiens
accgcuguccccuuagccccaagggcccugg

SEQ ID NO: 6953 - RNA, 32 nt, Homo Sapiens
uucaagagcugccugcacacugucuuggagca

SEQ ID NO: 6954 - RNA, 32 nt, Homo Sapiens
guugguuuuguguucaggcuaguugaggauuc

SEQ ID NO: 6955 - RNA, 32 nt, Homo Sapiens
acucaaaaaaccuaaagacauuucauaugaua

SEQ ID NO: 6956 - RNA, 32 nt, Homo Sapiens
acaaagaagggaaaagguauuuuuguuuuugu

SEQ ID NO: 6957 - RNA, 32 nt, Homo Sapiens
uaugauauuucugcagacugcuucuuauaauu

SEQ ID NO: 6958 - RNA, 32 nt, Homo Sapiens
auucagucaccaugaagcugcugcugcugcac

SEQ ID NO: 6959 - RNA, 32 nt, Homo Sapiens
gacuccagaugguaagacaaauccacaggaac

SEQ ID NO: 6960 - RNA, 32 nt, Homo Sapiens
cucagaguuuuuucuuuuuguugucacuuacu

SEQ ID NO: 6961 - RNA, 32 nt, Homo Sapiens
cugcagauuuuccgccgugcggacaaaaauga

SEQ ID NO: 6962 - RNA, 32 nt, Homo Sapiens
gaauaacauaucuauaccaugauauuuauacu

SEQ ID NO: 6963 - RNA, 32 nt, Homo Sapiens
auuaucuagggucuauccuagugauaauacau

SEQ ID NO: 6964 - RNA, 32 nt, Homo Sapiens
gagaaugacuggcuugccuaauaaaaaacgua

SEQ ID NO: 6965 - RNA, 32 nt, Homo Sapiens
auuucaguucuuucuuuuucucacuaucugaa

SEQ ID NO: 6966 - RNA, 32 nt, Homo Sapiens
accuccugcugcuucggggacccggcuacgac

SEQ ID NO: 6967 - RNA, 32 nt, Homo Sapiens
cuuuuaaacuuaugucuguuaaguagguuguc

SEQ ID NO: 6968 - RNA, 32 nt, Homo Sapiens
ugaagauuggaauucuucauauguaaaaagag

SEQ ID NO: 6969 - RNA, 32 nt, Homo Sapiens
accuuccaaagcacuuuuuauuuucauuuucu

SEQ ID NO: 6970 - RNA, 32 nt, Homo Sapiens
auagcugguaguguuucuuuugcaagaaugca

SEQ ID NO: 6971 - RNA, 32 nt, Homo Sapiens
gauuuggggggccuguucccagcacauuuucc

SEQ ID NO: 6972 - RNA, 32 nt, Homo Sapiens
agccuggcgggugggagaugcggcggccaccu

SEQ ID NO: 6973 - RNA, 32 nt, Homo Sapiens
uagccuaacagauuggcuuguuuuaaagcaaa

SEQ ID NO: 6974 - RNA, 32 nt, Homo Sapiens
cucauuuacugauaggcugcuacuaguuacca

SEQ ID NO: 6975 - RNA, 32 nt, Homo Sapiens
cauaccgccucgugccagcagccucgcacagg

SEQ ID NO: 6976 - RNA, 32 nt, Homo Sapiens
gcagaggauacagcuuuccauguggcucaggg

SEQ ID NO: 6977 - RNA, 32 nt, Homo Sapiens
caggggccggccagcuccccagcccugcccgg

SEQ ID NO: 6978 - RNA, 32 nt, Homo Sapiens
caagguuccguaugacccaucauuugaugaaa

SEQ ID NO: 6979 - RNA, 32 nt, Homo Sapiens
agauguucaaacuaugcuuucauuuuuucacu

SEQ ID NO: 6980 - RNA, 32 nt, Homo Sapiens
gugcgcgagccgcccuccgggaggaaggcgcc

SEQ ID NO: 6981 - RNA, 32 nt, Homo Sapiens
gugccauaccaaucaguuacacucaaagcuuu

SEQ ID NO: 6982 - RNA, 32 nt, Homo Sapiens
gcaggagaccaucaaggcuacgggaggcccgg

SEQ ID NO: 6983 - RNA, 32 nt, Homo Sapiens
uauuccccgaaugcgcaacauaccccccauca

SEQ ID NO: 6984 - RNA, 32 nt, Homo Sapiens
cucuggaaucacccggaccccuggccuuggag

SEQ ID NO: 6985 - RNA, 32 nt, Homo Sapiens
cggcucggguccggacagccaguaaccucgca

SEQ ID NO: 6986 - RNA, 32 nt, Homo Sapiens
cuggugccuucagaagcccacccgaggccugc

SEQ ID NO: 6987 - RNA, 32 nt, Homo Sapiens
cuuaugcauuuauguguucacuuaaaaauguu

SEQ ID NO: 6988 - RNA, 32 nt, Homo Sapiens
gauugauuugcacagcucaucuggccagaaga

SEQ ID NO: 6989 - RNA, 32 nt, Homo Sapiens
gcaacgagcugauggcauuugaucuugcccca

SEQ ID NO: 6990 - RNA, 32 nt, Homo Sapiens
uauaagcaguuuuuaaugaucaauuuuuauau

SEQ ID NO: 6991 - RNA, 32 nt, Homo Sapiens
cuguguuuuaucaucugaaauguuaaguaaag

SEQ ID NO: 6992 - RNA, 32 nt, Homo Sapiens
gagccauccaaauaagaaaccuaaaauaauug

SEQ ID NO: 6993 - RNA, 32 nt, Homo Sapiens
caaaccuuggcugcaccuagcacacaauuaaa

SEQ ID NO: 6994 - RNA, 32 nt, Homo Sapiens
cuagaguugguaguguuaaauccaucugcuau

SEQ ID NO: 6995 - RNA, 32 nt, Homo Sapiens
gagaugcaguuaauggcuucuguuacauggag

SEQ ID NO: 6996 - RNA, 28 nt, Homo Sapiens
acuaguggcaagggcaggaugaggcugc

SEQ ID NO: 6997 - RNA, 32 nt, Homo Sapiens
uuugccccaucauugguuaaggugguauucuc

SEQ ID NO: 6998 - RNA, 32 nt, Homo Sapiens
uccucgacagaccucggacgagguuguaagug

SEQ ID NO: 6999 - RNA, 32 nt, Homo Sapiens
cccccugaugaaagauuuggcucugauuugcu

SEQ ID NO: 7000 - RNA, 32 nt, Homo Sapiens
ggucgcguuggcgggagggagguuaccuuucc

SEQ ID NO: 7001 - RNA, 32 nt, Homo Sapiens
aaaaauucucaauaagcuagguauugaggaac

SEQ ID NO: 7002 - RNA, 32 nt, Homo Sapiens
uucauaaaccuugucuaugaaaugacuucuua

SEQ ID NO: 7003 - RNA, 32 nt, Homo Sapiens
gucugcaggcugccucccugcagggcccucgg

SEQ ID NO: 7004 - RNA, 32 nt, Homo Sapiens
aaaaguugacuguucagauauuuuucuacugu

SEQ ID NO: 7005 - RNA, 32 nt, Homo Sapiens
gaccucguguauauaaaauaugcagaacuugu

SEQ ID NO: 7006 - RNA, 32 nt, Homo Sapiens
ccccucugcagaccccuccagacgccagaacu

SEQ ID NO: 7007 - RNA, 32 nt, Homo Sapiens
gagaaccugggcugagacauggccgcuuacca

SEQ ID NO: 7008 - RNA, 32 nt, Homo Sapiens
uuuuuggagacggagucucgcccugucgccag

SEQ ID NO: 7009 - RNA, 31 nt, Homo Sapiens
ugucgccgccucugccugcguagccccggcc

SEQ ID NO: 7010 - RNA, 32 nt, Homo Sapiens
cagccguguggcugcuggcucuguggagccag

SEQ ID NO: 7011 - RNA, 32 nt, Homo Sapiens
ugaagucucccucuuguuacccaggcuggagu

SEQ ID NO: 7012 - RNA, 32 nt, Homo Sapiens
aagcauuacauguaguuuauuucagcauccuu

SEQ ID NO: 7013 - RNA, 32 nt, Homo Sapiens
agggucccacacucgcagcgcugcgacggcgc

SEQ ID NO: 7014 - RNA, 32 nt, Homo Sapiens
cagaaagaaaucaaacagcucccagaucugcc

SEQ ID NO: 7015 - RNA, 32 nt, Homo Sapiens
aguucauggcuaucaugguuguguuaaucgau

SEQ ID NO: 7016 - RNA, 32 nt, Homo Sapiens
uagguaucugcacucccauguucauuucagca

SEQ ID NO: 7017 - RNA, 32 nt, Homo Sapiens
uaaggagccaaggagaauucccugcccacuuu

SEQ ID NO: 7018 - RNA, 32 nt, Homo Sapiens
cuuugaacuaauuuuuagcaguguugcugauu

SEQ ID NO: 7019 - RNA, 32 nt, Homo Sapiens
ucuaucuauuugcccacccauccauccacccu

SEQ ID NO: 7020 - RNA, 32 nt, Homo Sapiens
gccccgcgccauggccggggccaucgcuuccc

SEQ ID NO: 7021 - RNA, 30 nt, Homo Sapiens
gccuugcgcgcgcaguggggauggaacguu

SEQ ID NO: 7022 - RNA, 32 nt, Homo Sapiens
gacagcuuuggggguuugcugcuggcucugac

SEQ ID NO: 7023 - RNA, 32 nt, Homo Sapiens
cuuuuucagaucuagaauucgagagugucaug

SEQ ID NO: 7024 - RNA, 32 nt, Homo Sapiens
gggcuuaucaucaacacugauuuuauaaucug

SEQ ID NO: 7025 - RNA, 32 nt, Homo Sapiens
ugccgggugucauggcggccugcagguacugc

SEQ ID NO: 7026 - RNA, 32 nt, Homo Sapiens
aaaguauuucugaagcugaaucaaauuaagau

SEQ ID NO: 7027 - RNA, 32 nt, Homo Sapiens
uccucauccagcugccaacucggccaaaggcu

SEQ ID NO: 7028 - RNA, 32 nt, Homo Sapiens
aagcgcggaucucccggccgccggcgcccagc

SEQ ID NO: 7029 - RNA, 32 nt, Homo Sapiens
aucagaguauucaaaucagaauuuaaaucuag

SEQ ID NO: 7030 - RNA, 32 nt, Homo Sapiens
uggagccuuuuuuccucccccauccccugcag

SEQ ID NO: 7031 - RNA, 32 nt, Homo Sapiens
acacucauaaauauuucuccuuacuggacucc

SEQ ID NO: 7032 - RNA, 32 nt, Homo Sapiens
agcccucugcagcggagcccccugcccauuug

SEQ ID NO: 7033 - RNA, 32 nt, Homo Sapiens
aggauaccaaauggaaacacaugaugaugccu

SEQ ID NO: 7034 - RNA, 32 nt, Homo Sapiens
augcucaaagauugugaagcagaagaccucca

SEQ ID NO: 7035 - RNA, 32 nt, Homo Sapiens
cuguguaaacacagucaaaauaauucuaaauc

SEQ ID NO: 7036 - RNA, 32 nt, Homo Sapiens
gcccgguuugaacaucguucuuucagaagugc

SEQ ID NO: 7037 - RNA, 32 nt, Homo Sapiens
agaacuuuguuaacgcacuuggaguaauuuuu

SEQ ID NO: 7038 - RNA, 32 nt, Homo Sapiens
gcggccuggcacuggagcuggugcugacaggg

SEQ ID NO: 7039 - RNA, 28 nt, Homo Sapiens
gggugcaggagcuggccgaggugcugag

SEQ ID NO: 7040 - RNA, 32 nt, Homo Sapiens
gcggcgggggguggaggaagagggcaggcgag

SEQ ID NO: 7041 - RNA, 32 nt, Homo Sapiens
gcaccgacacgaugcuggucuuccacgcauuc

SEQ ID NO: 7042 - RNA, 32 nt, Homo Sapiens
ucuuuaaggcuacuauuaauaugcagacuuac

SEQ ID NO: 7043 - RNA, 31 nt, Homo Sapiens
ugacuguaauaaaauaaaauaugauguaaac

SEQ ID NO: 7044 - RNA, 32 nt, Homo Sapiens
ccgccgggcuagcacugacgugucucucggcg

SEQ ID NO: 7045 - RNA, 32 nt, Homo Sapiens
uugggugacuuugagugagugauuccagcucu

SEQ ID NO: 7046 - RNA, 32 nt, Homo Sapiens
gccuucccacuggcaguguuaguuagaagagg

SEQ ID NO: 7047 - RNA, 32 nt, Homo Sapiens
auuacuacauaaaacuugauucuguuucucua

SEQ ID NO: 7048 - RNA, 32 nt, Homo Sapiens
caggaguuaguaaugagaaauuuuauaaaugu

SEQ ID NO: 7049 - RNA, 32 nt, Homo Sapiens
ggcagaggcccuggccggcccucccccugcuc

SEQ ID NO: 7050 - RNA, 30 nt, Homo Sapiens
cccauuugaauuaaaguauaaguaaaaugg

SEQ ID NO: 7051 - RNA, 31 nt, Homo Sapiens
cuuuggcgguccggcuccccccgcgcgugac

SEQ ID NO: 7052 - RNA, 32 nt, Homo Sapiens
cguggcgcauggcuuggggauuaaacuacccu

SEQ ID NO: 7053 - RNA, 32 nt, Homo Sapiens
cuauguugauuugcuuuugucuauuuccucau

SEQ ID NO: 7054 - RNA, 32 nt, Homo Sapiens
gccucgcucgggccguugccgucugcacccag

SEQ ID NO: 7055 - RNA, 32 nt, Homo Sapiens
auaaccuggcgaaaagauacuuugaaauguaa

SEQ ID NO: 7056 - RNA, 32 nt, Homo Sapiens
gggauagaggaagggugagcuccucauucagg

SEQ ID NO: 7057 - RNA, 32 nt, Homo Sapiens
ggggcuagcgggagccgagagcagggugcuga

SEQ ID NO: 7058 - RNA, 32 nt, Homo Sapiens
ccccucgcucgacgcagcccgcgcuccccgga

SEQ ID NO: 7059 - RNA, 32 nt, Homo Sapiens
ucaguccuuuuggguuugguuuauuuaccuuu

SEQ ID NO: 7060 - RNA, 32 nt, Homo Sapiens
gccaggguguggcccugccaucuucccagcag

SEQ ID NO: 7061 - RNA, 32 nt, Homo Sapiens
aaagaacucauccauguaaccaaaaaccacuu

SEQ ID NO: 7062 - RNA, 32 nt, Homo Sapiens
ccgagggugugugcgcgcucgcggcgggugcg

SEQ ID NO: 7063 - RNA, 32 nt, Homo Sapiens
ccuggcaggcagggcucugacucuagggccuc

SEQ ID NO: 7064 - RNA, 32 nt, Homo Sapiens
gaccuggccucggccccucccccaagucucuu

SEQ ID NO: 7065 - RNA, 32 nt, Homo Sapiens
agggguucuuugcuccugcugcuucagguaca

SEQ ID NO: 7066 - RNA, 32 nt, Homo Sapiens
auagacuugaaaucauuuagugaacuguaaug

SEQ ID NO: 7067 - RNA, 32 nt, Homo Sapiens
ggccacacugcuucgcuccccccuccccaccu

SEQ ID NO: 7068 - RNA, 32 nt, Homo Sapiens
ugucaaucaaaauuauucuguauugcaacuuu

SEQ ID NO: 7069 - RNA, 32 nt, Homo Sapiens
ccaucuggccuggccuggcccugcccugagga

SEQ ID NO: 7070 - RNA, 32 nt, Homo Sapiens
ucugaguagugcuuuaccauuuuguggagcuu

SEQ ID NO: 7071 - RNA, 32 nt, Homo Sapiens
cuguuacguuacuaacaguggugcugguuugu

SEQ ID NO: 7072 - RNA, 32 nt, Homo Sapiens
agcaaugaaccuuuucuagaaauuauuauucc

SEQ ID NO: 7073 - RNA, 32 nt, Homo Sapiens
gacucacugcacagcacccccagacuagcaug

SEQ ID NO: 7074 - RNA, 32 nt, Homo Sapiens
ggugguucuauuccuuuaacacuaugcauuuu

SEQ ID NO: 7075 - RNA, 29 nt, Homo Sapiens
auugcuucauguuucaguaaacaaaagga

SEQ ID NO: 7076 - RNA, 32 nt, Homo Sapiens
cugggcccugcucgcaugccgccccgcccucc

SEQ ID NO: 7077 - RNA, 28 nt, Homo Sapiens
agaggaggcgugcggccgagguucugca

SEQ ID NO: 7078 - RNA, 32 nt, Homo Sapiens
gcacaggaagguccuagagcuuccucagugca

SEQ ID NO: 7079 - RNA, 32 nt, Homo Sapiens
caggccccgaagccaagcuggugccugguucc

SEQ ID NO: 7080 - RNA, 32 nt, Homo Sapiens
uagcagucccuggccucucccccuggcugauc

SEQ ID NO: 7081 - RNA, 32 nt, Homo Sapiens
ggccccggcagaggucuuccuucaugugguua

SEQ ID NO: 7082 - RNA, 32 nt, Homo Sapiens
gcccuuaaugauacgacgaaccccaaguguuu

SEQ ID NO: 7083 - RNA, 32 nt, Homo Sapiens
cuaccagggaacauacucuacugcauauguuc

SEQ ID NO: 7084 - RNA, 32 nt, Homo Sapiens
uaaguuacuuuuucuuuaugacuucuguggga

SEQ ID NO: 7085 - RNA, 30 nt, Homo Sapiens
agcgccuuuucuggcggcgguagauuugaa

SEQ ID NO: 7086 - RNA, 32 nt, Homo Sapiens
cacccccaaccucaauuucagcuggcaaugcc

SEQ ID NO: 7087 - RNA, 32 nt, Homo Sapiens
agaaaguggccauggcggauacagcgacuaca

SEQ ID NO: 7088 - RNA, 32 nt, Homo Sapiens
uaccugcagacacuccuuuugcuaccacucaa

SEQ ID NO: 7089 - RNA, 32 nt, Homo Sapiens
cuugguaccacuuuucccagccaaguggugcu

SEQ ID NO: 7090 - RNA, 32 nt, Homo Sapiens
guaucucuaaucugauguccauuuuuauauuu

SEQ ID NO: 7091 - RNA, 32 nt, Homo Sapiens
ucaggagauuguggcaguuacuggauaguuau

SEQ ID NO: 7092 - RNA, 32 nt, Homo Sapiens
acacccccauccuaccccggcgccgggcgcgg

SEQ ID NO: 7093 - RNA, 32 nt, Homo Sapiens
auggacuguggccaggcuuccacauuccugaa

SEQ ID NO: 7094 - RNA, 32 nt, Homo Sapiens
agagucaauuggaauuuuuagagcauaaucuu

SEQ ID NO: 7095 - RNA, 32 nt, Homo Sapiens
uuagaaugucauuuuauaaauggccguuuuug

SEQ ID NO: 7096 - RNA, 32 nt, Homo Sapiens
ucacagccaagagugaugauagcuuuagucag

SEQ ID NO: 7097 - RNA, 32 nt, Homo Sapiens
ucuacuaaaaauacaaaaaacuagccgggcgu

SEQ ID NO: 7098 - RNA, 32 nt, Homo Sapiens
caugggggcgggggcgggggcggccgcuuccu

SEQ ID NO: 7099 - RNA, 32 nt, Homo Sapiens
ccuggggaacagagcaagauucugucuaaaaa

SEQ ID NO: 7100 - RNA, 32 nt, Homo Sapiens
uccacugcauuguuucacugggcucaccugcu

SEQ ID NO: 7101 - RNA, 32 nt, Homo Sapiens
ccuaggugacagagugagacuccaccucggaa

SEQ ID NO: 7102 - RNA, 32 nt, Homo Sapiens
uuugaccaaaacuucuccuaaggcauuugacu

SEQ ID NO: 7103 - RNA, 32 nt, Homo Sapiens
agagcaccucgcgucccgaaccggugccuuca

SEQ ID NO: 7104 - RNA, 32 nt, Homo Sapiens
ucaucuccgaaugaaagggcuggcuggcuucg

SEQ ID NO: 7105 - RNA, 32 nt, Homo Sapiens
ugccuuuuuuaaaagaaaaguauguguaauau

SEQ ID NO: 7106 - RNA, 32 nt, Homo Sapiens
ggaucacaggcuggugaaccccggugggaaca

SEQ ID NO: 7107 - RNA, 32 nt, Homo Sapiens
aaguaaccaaaggguuugcuaacucugcuuca

SEQ ID NO: 7108 - RNA, 32 nt, Homo Sapiens
cauuaagccuaaguccucaauucauaaguuau

SEQ ID NO: 7109 - RNA, 32 nt, Homo Sapiens
ugguggggauggggaggccuauuccugcuggc

SEQ ID NO: 7110 - RNA, 32 nt, Homo Sapiens
aagcugaggaaauaauacagauauaucuaaaa

SEQ ID NO: 7111 - RNA, 32 nt, Homo Sapiens
ugaucaaacccagcaagcugucuuaaguauca

SEQ ID NO: 7112 - RNA, 32 nt, Homo Sapiens
ccaccuccuggggccgacgggcggcaggaagg

SEQ ID NO: 7113 - RNA, 32 nt, Homo Sapiens
auugggauuacaucauguauuuugccucaugu

SEQ ID NO: 7114 - RNA, 32 nt, Homo Sapiens
ugaucuugagaagagugaccaauauaaugagg

SEQ ID NO: 7115 - RNA, 32 nt, Homo Sapiens
ugcauuguugccauuccccagauugcaucuuu

SEQ ID NO: 7116 - RNA, 27 nt, Homo Sapiens
ucugcuccccgauucugguguaguucu

SEQ ID NO: 7117 - RNA, 32 nt, Homo Sapiens
cuugaguuucauuguucuuuuaguuuguauuc

SEQ ID NO: 7118 - RNA, 32 nt, Homo Sapiens
agauuguuuacuauuuaagauguacuuuuaca

SEQ ID NO: 7119 - RNA, 32 nt, Homo Sapiens
cccucccuaaacugcuucuaagaucagugcuu

SEQ ID NO: 7120 - RNA, 32 nt, Homo Sapiens
ggccccggccagcccuucuccuccaccaguuc

SEQ ID NO: 7121 - RNA, 32 nt, Homo Sapiens
agcugcgucugcggccagcccgugccagugga

SEQ ID NO: 7122 - RNA, 32 nt, Homo Sapiens
acauagaugaaccaccaacacaaaaucaguca

SEQ ID NO: 7123 - RNA, 32 nt, Homo Sapiens
uaguucgggucucgcgggccucuuguuuuggu

SEQ ID NO: 7124 - RNA, 32 nt, Homo Sapiens
cuagaagccacuuuuuacccuauggaaggggg

SEQ ID NO: 7125 - RNA, 32 nt, Homo Sapiens
augcguguguguagacacacacgcauacacac

SEQ ID NO: 7126 - RNA, 32 nt, Homo Sapiens
ugcgccagccccaccugugccugggcuguggc

SEQ ID NO: 7127 - RNA, 32 nt, Homo Sapiens
agggcagcggggagacaagacccggcgaccuc

SEQ ID NO: 7128 - RNA, 32 nt, Homo Sapiens
ggacccgccgcggcgcugucgccggagaggga

SEQ ID NO: 7129 - RNA, 32 nt, Homo Sapiens
uggcuggggggccugcuuugaaaugcuugucu

SEQ ID NO: 7130 - RNA, 32 nt, Homo Sapiens
ucuaaagccccuuccuccccagccccugcuuu

SEQ ID NO: 7131 - RNA, 32 nt, Homo Sapiens
auaguuuagacaauauuguucagugcuguuug

SEQ ID NO: 7132 - RNA, 32 nt, Homo Sapiens
uaaguuguuccacagggcugguucuucgacgc

SEQ ID NO: 7133 - RNA, 32 nt, Homo Sapiens
cuccccacgucugaacguggacaggacugagg

SEQ ID NO: 7134 - RNA, 32 nt, Homo Sapiens
aaaauacauuuuauauuagaaguguuaacuua

SEQ ID NO: 7135 - RNA, 32 nt, Homo Sapiens
gagauuuuuuauucauguagaccucuuaauuu

SEQ ID NO: 7136 - RNA, 32 nt, Homo Sapiens
ugauuguccagaagacauuuuuaacaacaaaa

SEQ ID NO: 7137 - RNA, 32 nt, Homo Sapiens
ggcuuaugauuucuucucggguuugaaacaug

SEQ ID NO: 7138 - RNA, 29 nt, Homo Sapiens
gcccuucuccuccaauacauaaaggacac

SEQ ID NO: 7139 - RNA, 32 nt, Homo Sapiens
ccacucagacugccccaaaacagccguuguuu

SEQ ID NO: 7140 - RNA, 32 nt, Homo Sapiens
ccaaggacggaaaaugcuuaaaaaauaauaca

SEQ ID NO: 7141 - RNA, 32 nt, Homo Sapiens
cuccuuguggggucccagguccugcugccaag

SEQ ID NO: 7142 - RNA, 32 nt, Homo Sapiens
ugacccacucccucucagccuccgccuggucu

SEQ ID NO: 7143 - RNA, 32 nt, Homo Sapiens
aaaauguuacaauuauacuagauggaagacuu

SEQ ID NO: 7144 - RNA, 32 nt, Homo Sapiens
aauaaauaaaaaggagaggcagacaaugucug

SEQ ID NO: 7145 - RNA, 32 nt, Homo Sapiens
cggccgcgggcacccuggaacccggcggcauu

SEQ ID NO: 7146 - RNA, 32 nt, Homo Sapiens
gagcaggguuucuacagcugcuccccacuuuc

SEQ ID NO: 7147 - RNA, 32 nt, Homo Sapiens
cacaguuggaggaggacggcagagacaguuuc

SEQ ID NO: 7148 - RNA, 32 nt, Homo Sapiens
cggaacaguguggaagcagaaggcuuuuuuaa

SEQ ID NO: 7149 - RNA, 32 nt, Homo Sapiens
acccaggguggggacaggggcuggcccagggc

SEQ ID NO: 7150 - RNA, 32 nt, Homo Sapiens
agggagauuaggaugccgucagcugauacaaa

SEQ ID NO: 7151 - RNA, 32 nt, Homo Sapiens
cgaggagguagugggugaggcuaccugacuca

SEQ ID NO: 7152 - RNA, 32 nt, Homo Sapiens
acagagcacaggcagccaaaaggaucaagcaa

SEQ ID NO: 7153 - RNA, 32 nt, Homo Sapiens
acuuggugucugccucccauggcaccgggaag

SEQ ID NO: 7154 - RNA, 32 nt, Homo Sapiens
ucgcggccuaccuuuacccgcccgccugcucg

SEQ ID NO: 7155 - RNA, 32 nt, Homo Sapiens
uaauuuuuaaagaacaaaucacacauuuaaaa

SEQ ID NO: 7156 - RNA, 32 nt, Homo Sapiens
ugcccacucugauaugccugggugagccuagg

SEQ ID NO: 7157 - RNA, 32 nt, Homo Sapiens
cagccgguuccccugcagaccaucaccaguga

SEQ ID NO: 7158 - RNA, 32 nt, Homo Sapiens
gaagcagaaaggcggaggaaauccaggaggca

SEQ ID NO: 7159 - RNA, 32 nt, Homo Sapiens
auuguuguacuaugcugggcaaacacuaagug

SEQ ID NO: 7160 - RNA, 32 nt, Homo Sapiens
uacagcccccuacaccaagaguguaucuguga

SEQ ID NO: 7161 - RNA, 32 nt, Homo Sapiens
gcgggcagaguucagcgcuuguccacccuccc

SEQ ID NO: 7162 - RNA, 32 nt, Homo Sapiens
ugugugccugucagcaguucuccaagcagggg

SEQ ID NO: 7163 - RNA, 32 nt, Homo Sapiens
guggguggaaagggcauuuggagcucauuaga

SEQ ID NO: 7164 - RNA, 32 nt, Homo Sapiens
gcucgacacagucugcaguccaggcgugugga

SEQ ID NO: 7165 - RNA, 32 nt, Homo Sapiens
guuagauaugugggaaaggccuuuauucugcc

SEQ ID NO: 7166 - RNA, 32 nt, Homo Sapiens
uuuuaaaaaauaugucguagaauuccuucgaa

SEQ ID NO: 7167 - RNA, 32 nt, Homo Sapiens
cagugcuuaggggccuuggaaugccugcuguc

SEQ ID NO: 7168 - RNA, 32 nt, Homo Sapiens
caggcuacugagguauuuuagagcaacaagcu

SEQ ID NO: 7169 - RNA, 32 nt, Homo Sapiens
agugauugcacuuuucucaaauugaaguuuaa

SEQ ID NO: 7170 - RNA, 32 nt, Homo Sapiens
agaaauacaaaucugguuuauuuuauagugau

SEQ ID NO: 7171 - RNA, 32 nt, Homo Sapiens
cgcugggccgagcuuacgacuccagcugaccc

SEQ ID NO: 7172 - RNA, 32 nt, Homo Sapiens
aaaauacuaggcuaaacuuaagugguaaagau

SEQ ID NO: 7173 - RNA, 32 nt, Homo Sapiens
auucccagguuggccugguggccaugucgccu

SEQ ID NO: 7174 - RNA, 32 nt, Homo Sapiens
guguuaagugguuuuuuauuuauuguuguugu

SEQ ID NO: 7175 - RNA, 31 nt, Homo Sapiens
gucuggcucaaugaucuacauucugaaguug

SEQ ID NO: 7176 - RNA, 32 nt, Homo Sapiens
cuuugcugaaaaaaaaucaucuugcccacagg

SEQ ID NO: 7177 - RNA, 32 nt, Homo Sapiens
gaaaacacugaaaauugaauucuuaucuucca

SEQ ID NO: 7178 - RNA, 32 nt, Homo Sapiens
uuguauguacauuauucauauuccucucuguu

SEQ ID NO: 7179 - RNA, 32 nt, Homo Sapiens
uuucugcccuccccacccugcauccuguggcc

SEQ ID NO: 7180 - RNA, 32 nt, Homo Sapiens
gagguucugcuguugaguccuggguggcugau

SEQ ID NO: 7181 - RNA, 32 nt, Homo Sapiens
uauccagcgagcccuccccacccacccacggu

SEQ ID NO: 7182 - RNA, 27 nt, Homo Sapiens
cuguuguccuucucaguuucuccccaa

SEQ ID NO: 7183 - RNA, 32 nt, Homo Sapiens
cuucucuggugcccagcucccuuccuggucug

SEQ ID NO: 7184 - RNA, 30 nt, Homo Sapiens
gagguaaagcuguugggggaagaagaguuu

SEQ ID NO: 7185 - RNA, 32 nt, Homo Sapiens
gaaaggcauuccaggaaaggauauaaggauac

SEQ ID NO: 7186 - RNA, 32 nt, Homo Sapiens
gcaauccuagguaggguuuaauccccaguaaa

SEQ ID NO: 7187 - RNA, 32 nt, Homo Sapiens
uugaaauagacugugaaguaaacuauaacuug

SEQ ID NO: 7188 - RNA, 32 nt, Homo Sapiens
ucagcaugggagggaggcucgcagacccaggg

SEQ ID NO: 7189 - RNA, 32 nt, Homo Sapiens
ucgccucugucaguucaggaccucaaggggcu

SEQ ID NO: 7190 - RNA, 32 nt, Homo Sapiens
ccugccucagccuccugaguagcugauacuac

SEQ ID NO: 7191 - RNA, 32 nt, Homo Sapiens
aggugcggaaguauggagagcagaagacguug

SEQ ID NO: 7192 - RNA, 32 nt, Homo Sapiens
gcgaggacggagaaucgaggcggagacccagc

SEQ ID NO: 7193 - RNA, 30 nt, Homo Sapiens
ccgggauggggcgagaggcugcggcggacg

SEQ ID NO: 7194 - RNA, 32 nt, Homo Sapiens
ucagauccaauuguuagcacaaaaugacuaua

SEQ ID NO: 7195 - RNA, 32 nt, Homo Sapiens
aauaauuaucuaaauaaugguauuggagaacu

SEQ ID NO: 7196 - RNA, 32 nt, Homo Sapiens
caagaugccaaugaaggaagccaggcacggga

SEQ ID NO: 7197 - RNA, 32 nt, Homo Sapiens
cccagaugcaguauucggcagccagccgggga

SEQ ID NO: 7198 - RNA, 32 nt, Homo Sapiens
gcagugggacgggcugcccugugaguguccac

SEQ ID NO: 7199 - RNA, 32 nt, Homo Sapiens
uacuaaaaauacacacaaaaaauuacugggua

SEQ ID NO: 7200 - RNA, 32 nt, Homo Sapiens
ggccggacgcgguggcucaugccuguaauccc

SEQ ID NO: 7201 - RNA, 32 nt, Homo Sapiens
cgcgcuccacaccgcccuccccgccgacccau

SEQ ID NO: 7202 - RNA, 32 nt, Homo Sapiens
auaugugaaguguaugagauuaugacaaggau

SEQ ID NO: 7203 - RNA, 32 nt, Homo Sapiens
auaauuguugguaucagcuuuagcucaaaacc

SEQ ID NO: 7204 - RNA, 32 nt, Homo Sapiens
uuguucuugagauggaguuucgcgcuuguugc

SEQ ID NO: 7205 - RNA, 32 nt, Homo Sapiens
aguaguuguauauuuuaacauucaaaauuggg

SEQ ID NO: 7206 - RNA, 32 nt, Homo Sapiens
ggcuggagggugcccaaggcgaggccggugag

SEQ ID NO: 7207 - RNA, 32 nt, Homo Sapiens
cuucuugaauucauguacaugguauuaacacu

SEQ ID NO: 7208 - RNA, 28 nt, Homo Sapiens
gaaaguggagcucccaggaugaccaagg

SEQ ID NO: 7209 - RNA, 32 nt, Homo Sapiens
gcucucugucccugcacccccaccaucuuggg

SEQ ID NO: 7210 - RNA, 32 nt, Homo Sapiens
aguguuugaacaacuauaugcacuuacgguug

SEQ ID NO: 7211 - RNA, 32 nt, Homo Sapiens
uauccaggaagaacuuagaggaccccaucuga

SEQ ID NO: 7212 - RNA, 32 nt, Homo Sapiens
ccccaccaugaagcccagucccagccagaacc

SEQ ID NO: 7213 - RNA, 32 nt, Homo Sapiens
agcuccggugcgcggcggccgacgacccgcgc

SEQ ID NO: 7214 - RNA, 32 nt, Homo Sapiens
acucaucgugaucuuggaaaucaauaaaguca

SEQ ID NO: 7215 - RNA, 32 nt, Homo Sapiens
gcuauacccagcuuagccccuuuucugaggau

SEQ ID NO: 7216 - RNA, 32 nt, Homo Sapiens
ccugccgaggaagccgagugcccgccgccgcg

SEQ ID NO: 7217 - RNA, 32 nt, Homo Sapiens
aagagagggggacaccucgagcagaggucaga

SEQ ID NO: 7218 - RNA, 32 nt, Homo Sapiens
cucuuccccucgccugcuagggcugcggcuuc

SEQ ID NO: 7219 - RNA, 32 nt, Homo Sapiens
uccccgucagacccugguuuccccucauugcu

SEQ ID NO: 7220 - RNA, 31 nt, Homo Sapiens
cucggcaugaggcuggcgcggcugcuucgcg

SEQ ID NO: 7221 - RNA, 32 nt, Homo Sapiens
cuccugggaugccaugccacgcagcagccagc

SEQ ID NO: 7222 - RNA, 32 nt, Homo Sapiens
cuugaccuugagacaaggucacacuugacccu

SEQ ID NO: 7223 - RNA, 32 nt, Homo Sapiens
gaaggaaaauuccauuuucuugggugagcaug

SEQ ID NO: 7224 - RNA, 32 nt, Homo Sapiens
ggcccggcaugaggaccugacgcugagagaga

SEQ ID NO: 7225 - RNA, 32 nt, Homo Sapiens
cccuagccgagcggggccggcagagcgcgcgg

SEQ ID NO: 7226 - RNA, 32 nt, Homo Sapiens
cacucuugaucauaguuagaaacuguagaaac

SEQ ID NO: 7227 - RNA, 32 nt, Homo Sapiens
uaccuagggcgggaggcgacauggagacaggg

SEQ ID NO: 7228 - RNA, 32 nt, Homo Sapiens
auauaaugcagccucuuaauucuuugaagaac

SEQ ID NO: 7229 - RNA, 32 nt, Homo Sapiens
uuuggcgagacggcucugggggugcaaggcag

SEQ ID NO: 7230 - RNA, 32 nt, Homo Sapiens
gcagaaugagcugcccaccucuuuuuccauuc

SEQ ID NO: 7231 - RNA, 32 nt, Homo Sapiens
cauagaggacucuggaggcagagcuggggccu

SEQ ID NO: 7232 - RNA, 32 nt, Homo Sapiens
aggcagacauagacaugcaccaauuaauuugg

SEQ ID NO: 7233 - RNA, 28 nt, Homo Sapiens
aaccaaaaugggaacauuaaacaaacau

SEQ ID NO: 7234 - RNA, 32 nt, Homo Sapiens
uucuaggaaggggaugggacuagauucuaaaa

SEQ ID NO: 7235 - RNA, 32 nt, Homo Sapiens
ugccuaaaaugaauuuucuagaugauugaaua

SEQ ID NO: 7236 - RNA, 32 nt, Homo Sapiens
ucuuaaaggaagcucugcugcaggggagcuuc

SEQ ID NO: 7237 - RNA, 32 nt, Homo Sapiens
ccccuuggaucugccuuuguccugcuugugua

SEQ ID NO: 7238 - RNA, 32 nt, Homo Sapiens
uguuuccuuucucuuuuuguuuggcuucuaac

SEQ ID NO: 7239 - RNA, 32 nt, Homo Sapiens
gcucgccauggcggccaccgaccuggagcgcu

SEQ ID NO: 7240 - RNA, 32 nt, Homo Sapiens
ccacaccacccccauucucagcuccuccuucg

SEQ ID NO: 7241 - RNA, 32 nt, Homo Sapiens
agauuuugagucucaaccaacuagcagaaacu

SEQ ID NO: 7242 - RNA, 32 nt, Homo Sapiens
ucugagucgcguggcaggccgcgcugcgucca

SEQ ID NO: 7243 - RNA, 32 nt, Homo Sapiens
gccauauugugcggcggcgccggcguccgcgg

SEQ ID NO: 7244 - RNA, 32 nt, Homo Sapiens
ugggaugcaggcggcgugugcugcuguugauu

SEQ ID NO: 7245 - RNA, 32 nt, Homo Sapiens
ggcgggugggcgccggccggccuggaagagcg

SEQ ID NO: 7246 - RNA, 32 nt, Homo Sapiens
guuuguuuucuuuuucugucuuguagguaagu

SEQ ID NO: 7247 - RNA, 32 nt, Homo Sapiens
guagugucugagacucugcucugcagggccua

SEQ ID NO: 7248 - RNA, 32 nt, Homo Sapiens
ugaauuuuuuuuucuuuuuugagauggagucu

SEQ ID NO: 7249 - RNA, 32 nt, Homo Sapiens
gucggagaagcgggaccgcgaggccggcgcgc

SEQ ID NO: 7250 - RNA, 32 nt, Homo Sapiens
caguaucauacuuguuuauauuacauuguaug

SEQ ID NO: 7251 - RNA, 32 nt, Homo Sapiens
cuugccugucuugcuuugguccguauuuccca

SEQ ID NO: 7252 - RNA, 32 nt, Homo Sapiens
guguuuccccauaaguuuuuuuaaauuguaua

SEQ ID NO: 7253 - RNA, 32 nt, Homo Sapiens
gccacugcacuccgggcugggcgacagagcga

SEQ ID NO: 7254 - RNA, 32 nt, Homo Sapiens
uagcugacauuaaagaaaaaaguucaucacgu

SEQ ID NO: 7255 - RNA, 32 nt, Homo Sapiens
acuaacaaggaccuguccgcagccgcgagguc

SEQ ID NO: 7256 - RNA, 31 nt, Homo Sapiens
acaaaacaauucaaaagacaggcaagcucac

SEQ ID NO: 7257 - RNA, 32 nt, Homo Sapiens
aggcgcgagcuggccucugagccccggccucg

SEQ ID NO: 7258 - RNA, 32 nt, Homo Sapiens
gugagcaucccggcugccuguggaugaguggg

SEQ ID NO: 7259 - RNA, 32 nt, Homo Sapiens
accgcaccccucagccagcagcgccucugccc

SEQ ID NO: 7260 - RNA, 32 nt, Homo Sapiens
uuuuucugaucuucucccuccucccaaccuac

SEQ ID NO: 7261 - RNA, 28 nt, Homo Sapiens
aaaucaucgguccccaggaugacaccac

SEQ ID NO: 7262 - RNA, 32 nt, Homo Sapiens
ucucaagacgcgagaggaugguagcggagcgc

SEQ ID NO: 7263 - RNA, 32 nt, Homo Sapiens
gauuuuguuugccauguacaaauuacugcuug

SEQ ID NO: 7264 - RNA, 32 nt, Homo Sapiens
aacaaacggaacaaguucucuuccaacaaaga

SEQ ID NO: 7265 - RNA, 32 nt, Homo Sapiens
gugccccagaacaccagagaccucaaauuacu

SEQ ID NO: 7266 - RNA, 32 nt, Homo Sapiens
uugcgggccggggcugcgccuccggggcugag

SEQ ID NO: 7267 - RNA, 32 nt, Homo Sapiens
cgagaccccccuccccaucccagcgcaucgcg

SEQ ID NO: 7268 - RNA, 32 nt, Homo Sapiens
agccucggggagagggcgcgggggcgcugggg

SEQ ID NO: 7269 - RNA, 32 nt, Homo Sapiens
ggggagaaggaggaggagcagcaggccuccgg

SEQ ID NO: 7270 - RNA, 32 nt, Homo Sapiens
ggggcuccaggacagugggcccggggccuggc

SEQ ID NO: 7271 - RNA, 32 nt, Homo Sapiens
cccgucugcugguucauuuucuuuucuucucu

SEQ ID NO: 7272 - RNA, 32 nt, Homo Sapiens
ucuuugcugaaguauuuaaaucuuauccuugu

SEQ ID NO: 7273 - RNA, 32 nt, Homo Sapiens
acucagcaacuggcauggagggcccaggcaac

SEQ ID NO: 7274 - RNA, 32 nt, Homo Sapiens
ggggaggccggcgggggcugcgccagcaugag

SEQ ID NO: 7275 - RNA, 32 nt, Homo Sapiens
ucuguguuauuuaaauucuaauauaugaauua

SEQ ID NO: 7276 - RNA, 32 nt, Homo Sapiens
gcgggcccaagccuuuggaucucaggugaccg

SEQ ID NO: 7277 - RNA, 32 nt, Homo Sapiens
ccuucccacggacgccuggcccggcccgggcg

SEQ ID NO: 7278 - RNA, 32 nt, Homo Sapiens
uuccuugagcuccccaggagucgguuuccaca

SEQ ID NO: 7279 - RNA, 32 nt, Homo Sapiens
cacucagcagugcggucagagaagggcuuuug

SEQ ID NO: 7280 - RNA, 32 nt, Homo Sapiens
ccauucuguacuggggggcuggcuaggaccug

SEQ ID NO: 7281 - RNA, 32 nt, Homo Sapiens
agucuccauucucccuccuacccaggccuccu

SEQ ID NO: 7282 - RNA, 32 nt, Homo Sapiens
cagcagugaggggaagcaaggcugagucucca

SEQ ID NO: 7283 - RNA, 32 nt, Homo Sapiens
cucuggccggaccaugcugguccugaccagcu

SEQ ID NO: 7284 - RNA, 32 nt, Homo Sapiens
ucauuucacagcuguuugcuuccacuucccag

SEQ ID NO: 7285 - RNA, 32 nt, Homo Sapiens
agcacugugauucuguuucuacuggaaagauu

SEQ ID NO: 7286 - RNA, 32 nt, Homo Sapiens
aucaugccacugcacugcacuccagccugggu

SEQ ID NO: 7287 - RNA, 32 nt, Homo Sapiens
uaauaacuuugcuggaaaaucuguaaaaaaga

SEQ ID NO: 7288 - RNA, 32 nt, Homo Sapiens
ucucgaaacucggaagacgcggaagucgcagc

SEQ ID NO: 7289 - RNA, 32 nt, Homo Sapiens
cucgagccaggcaggcugcugcccacgcuuac

SEQ ID NO: 7290 - RNA, 32 nt, Homo Sapiens
acugaagaugaacuggguccaugaugaagugu

SEQ ID NO: 7291 - RNA, 32 nt, Homo Sapiens
agaacaugcuguguuccauacagccuuggacu

SEQ ID NO: 7292 - RNA, 32 nt, Homo Sapiens
cccagggaagcagggcugcugcugcacaccgg

SEQ ID NO: 7293 - RNA, 32 nt, Homo Sapiens
gacccauuuucuacccguggucuaaaucggcu

SEQ ID NO: 7294 - RNA, 32 nt, Homo Sapiens
ugagcugguucguaccaagacccuggugaaga

SEQ ID NO: 7295 - RNA, 32 nt, Homo Sapiens
ccagggcugacccaccagccucucacggaggc

SEQ ID NO: 7296 - RNA, 32 nt, Homo Sapiens
acgguaaacugggauguuuucaaaagugccuu

SEQ ID NO: 7297 - RNA, 32 nt, Homo Sapiens
guuauacuuuuauucuuaauucugaauuuuga

SEQ ID NO: 7298 - RNA, 32 nt, Homo Sapiens
cacagugcccagcuaauuuuuguuuuguuuuc

SEQ ID NO: 7299 - RNA, 32 nt, Homo Sapiens
ggguauuuuaggaugccagaaucuuuggguca

SEQ ID NO: 7300 - RNA, 32 nt, Homo Sapiens
agaauauuugaaaacucaaugaaauaauucuc

SEQ ID NO: 7301 - RNA, 32 nt, Homo Sapiens
gccagagagcccuagcaaaaccacugucaucc

SEQ ID NO: 7302 - RNA, 29 nt, Homo Sapiens
acuugaugugugaaaacuauaaaaacaau

SEQ ID NO: 7303 - RNA, 32 nt, Homo Sapiens
cccccagaagacuguaggcugguuacaucccc

SEQ ID NO: 7304 - RNA, 32 nt, Homo Sapiens
uagagagcaaggaaacucucauauugauauaa

SEQ ID NO: 7305 - RNA, 32 nt, Homo Sapiens
uaaagcugccagccgagauagccaaggccaaa

SEQ ID NO: 7306 - RNA, 32 nt, Homo Sapiens
uuaguaaggauacaagauaauguucuaagacu

SEQ ID NO: 7307 - RNA, 32 nt, Homo Sapiens
uguguguuggcuuugcagcugcugucugagua

SEQ ID NO: 7308 - RNA, 32 nt, Homo Sapiens
uuuccuuguucccucccaugccuagcuggauu

SEQ ID NO: 7309 - RNA, 32 nt, Homo Sapiens
gaguuccccucuacuuuuagccuuccacccaa

SEQ ID NO: 7310 - RNA, 32 nt, Homo Sapiens
agcaaaaguuuccaguucaaaaucacacuuug

SEQ ID NO: 7311 - RNA, 32 nt, Homo Sapiens
uggggggcuccauggcagaaggguuccaagaa

SEQ ID NO: 7312 - RNA, 32 nt, Homo Sapiens
auuugaguuaguauugacuuugucuaaaagag

SEQ ID NO: 7313 - RNA, 32 nt, Homo Sapiens
aaccucaauuuaagucuuuaaaagguuguauu

SEQ ID NO: 7314 - RNA, 32 nt, Homo Sapiens
caggaagcugaauucaccacaguguccgagaa

SEQ ID NO: 7315 - RNA, 32 nt, Homo Sapiens
ucuguccaugcgucacuccccccaguuuuauu

SEQ ID NO: 7316 - RNA, 32 nt, Homo Sapiens
ccgcgccccagccccaggcgccuccuccgcag

SEQ ID NO: 7317 - RNA, 32 nt, Homo Sapiens
auacuggacuuucugacgcagaugaacaauua

SEQ ID NO: 7318 - RNA, 32 nt, Homo Sapiens
gaaagcccccucucucccuccuccccucgccc

SEQ ID NO: 7319 - RNA, 32 nt, Homo Sapiens
cucuucgccuuuucuuuuuuuuuccuuuuuuc

SEQ ID NO: 7320 - RNA, 32 nt, Homo Sapiens
aauaaguuauuuagucaaguuauucucaaaga

SEQ ID NO: 7321 - RNA, 32 nt, Homo Sapiens
auuuauauauauauuuuguuuugccaauauga

SEQ ID NO: 7322 - RNA, 32 nt, Homo Sapiens
acgguuuccagcugcaacggcuccacuuugca

SEQ ID NO: 7323 - RNA, 32 nt, Homo Sapiens
cacccauaaccaagagaacucagguagcugca

SEQ ID NO: 7324 - RNA, 32 nt, Homo Sapiens
cgcgguggucucggcccggcugcgccagaguc

SEQ ID NO: 7325 - RNA, 32 nt, Homo Sapiens
cguggccacccccgcugcccagugucugcccu

SEQ ID NO: 7326 - RNA, 32 nt, Homo Sapiens
agcucaucuuucugcccggcuacaucagccuu

SEQ ID NO: 7327 - RNA, 32 nt, Homo Sapiens
ugcgcggccccggcuccucagcucccucagug

SEQ ID NO: 7328 - RNA, 32 nt, Homo Sapiens
gaaauguguauuaccaaugggguuguuagcuu

SEQ ID NO: 7329 - RNA, 32 nt, Homo Sapiens
augcagaaaugauuggaagguagaucuuaucu

SEQ ID NO: 7330 - RNA, 32 nt, Homo Sapiens
uauuuugugcuaauaaaagaguaauuaauucc

SEQ ID NO: 7331 - RNA, 32 nt, Homo Sapiens
gaaacagacaucccacaacaaaaacccaaguu

SEQ ID NO: 7332 - RNA, 32 nt, Homo Sapiens
ucaggggcucccagcccuccuucccaggcuga

SEQ ID NO: 7333 - RNA, 32 nt, Homo Sapiens
cggcccggugccagcuccgccggcgaccggug

SEQ ID NO: 7334 - RNA, 31 nt, Homo Sapiens
agccugccugccugccugccugcccgcccag

SEQ ID NO: 7335 - RNA, 32 nt, Homo Sapiens
cuuuaauacacaauaaacaggauucugcaaac

SEQ ID NO: 7336 - RNA, 32 nt, Homo Sapiens
uuuuuauaauuuaaauuuugguaaauauguac

SEQ ID NO: 7337 - RNA, 32 nt, Homo Sapiens
uguucucagggugaucugcugaccuuguucac

SEQ ID NO: 7338 - RNA, 32 nt, Homo Sapiens
cggcgggaggggcuacaaaugcuugacucagu

SEQ ID NO: 7339 - RNA, 32 nt, Homo Sapiens
uguucucuuggacuuuauauaaaucuguaaua

SEQ ID NO: 7340 - RNA, 32 nt, Homo Sapiens
aaugaacauuuuuugcauauaaaccaaaaaau

SEQ ID NO: 7341 - RNA, 32 nt, Homo Sapiens
aggccacuggcaugugcugaguagcgcagagc

SEQ ID NO: 7342 - RNA, 32 nt, Homo Sapiens
uggaucuuugauaagaaaauaaaauucaaaau

SEQ ID NO: 7343 - RNA, 32 nt, Homo Sapiens
acuucuuggccauaauaaacucacucgauagu

SEQ ID NO: 7344 - RNA, 32 nt, Homo Sapiens
caccucucaaggaaauguuuuuacugucuuuu

SEQ ID NO: 7345 - RNA, 31 nt, Homo Sapiens
gugcaggcaggcagccaaaugagugggaauu

SEQ ID NO: 7346 - RNA, 32 nt, Homo Sapiens
cgucccuguggggcugcccugcggagcggugg

SEQ ID NO: 7347 - RNA, 32 nt, Homo Sapiens
gcuacuuuucccuuauuacuuuagcucgauac

SEQ ID NO: 7348 - RNA, 32 nt, Homo Sapiens
uacuuuucucguccuuuccccagggugcacgu

SEQ ID NO: 7349 - RNA, 32 nt, Homo Sapiens
cuuuugccacuuucuuccuugccuuugcuaua

SEQ ID NO: 7350 - RNA, 32 nt, Homo Sapiens
gaggcuggacaguggugaccugcuacagcagg

SEQ ID NO: 7351 - RNA, 32 nt, Homo Sapiens
uuagaucugacuccucucuggucaguagaaaa

SEQ ID NO: 7352 - RNA, 31 nt, Homo Sapiens
ccugaugaauaaaaaguguguuaaagaccaa

SEQ ID NO: 7353 - RNA, 32 nt, Homo Sapiens
aaugguccugacauaauaaggaucuuugauua

SEQ ID NO: 7354 - RNA, 32 nt, Homo Sapiens
agaggaagcucuucuucugaaaccuguaauuu

SEQ ID NO: 7355 - RNA, 32 nt, Homo Sapiens
uuauguuuacuuugauuugauuauauguuggu

SEQ ID NO: 7356 - RNA, 32 nt, Homo Sapiens
cgaagacggauuucacauccacaggacggucu

SEQ ID NO: 7357 - RNA, 32 nt, Homo Sapiens
cguauaagaacuggaaauaugaugacguaaaa

SEQ ID NO: 7358 - RNA, 32 nt, Homo Sapiens
guauacucagaauggugagcccugaauuuugc

SEQ ID NO: 7359 - RNA, 32 nt, Homo Sapiens
cccucgugcccaccccugugccugcagggcac

SEQ ID NO: 7360 - RNA, 32 nt, Homo Sapiens
gauuuggugcaaacaaacaugauugauagcug

SEQ ID NO: 7361 - RNA, 32 nt, Homo Sapiens
aaaucacuucuguuuguucaguuuuucaaaaa

SEQ ID NO: 7362 - RNA, 32 nt, Homo Sapiens
uuucugucucuuaagugaugugugaguggaug

SEQ ID NO: 7363 - RNA, 32 nt, Homo Sapiens
cauauacucugcagcuguuagaaugugcaagc

SEQ ID NO: 7364 - RNA, 32 nt, Homo Sapiens
uauuuauuuaaaugucuaauguauuuuauugu

SEQ ID NO: 7365 - RNA, 31 nt, Homo Sapiens
aagaguuugugcuauagcuagguguggauag

SEQ ID NO: 7366 - RNA, 32 nt, Homo Sapiens
gaaaugacagguuugaaaucugcagaagcucg

SEQ ID NO: 7367 - RNA, 32 nt, Homo Sapiens
auguguguguaaacugcuguccuggugacuug

SEQ ID NO: 7368 - RNA, 32 nt, Homo Sapiens
aaugacauuaauaagcuugguuaugagggguu

SEQ ID NO: 7369 - RNA, 32 nt, Homo Sapiens
uggguccggccgcucugcgggacucugaggaa

SEQ ID NO: 7370 - RNA, 32 nt, Homo Sapiens
cgcucagcugcucuggcaccccgcugcaggga

SEQ ID NO: 7371 - RNA, 32 nt, Homo Sapiens
ccugucacuauuugucuuucuaaucuccuucu

SEQ ID NO: 7372 - RNA, 32 nt, Homo Sapiens
gugggugucuguuuugagcuuauuuagagucc

SEQ ID NO: 7373 - RNA, 32 nt, Homo Sapiens
uuauuuaauauuugacugauuucaauaacugu

SEQ ID NO: 7374 - RNA, 32 nt, Homo Sapiens
acaaccucuuaaaauauuuuuacaauuuaaug

SEQ ID NO: 7375 - RNA, 32 nt, Homo Sapiens
gggucccgcaugagccccggcgguggcggcag

SEQ ID NO: 7376 - RNA, 32 nt, Homo Sapiens
cgcgggggcagacaaagccgcgguaaugaaug

SEQ ID NO: 7377 - RNA, 32 nt, Homo Sapiens
auacaaagaugaaugagauacaguugcuaccc

SEQ ID NO: 7378 - RNA, 32 nt, Homo Sapiens
cccaggucuugccuucccccagccucccgagg

SEQ ID NO: 7379 - RNA, 32 nt, Homo Sapiens
agcucuaccgcccacaccccuccuucccaguc

SEQ ID NO: 7380 - RNA, 32 nt, Homo Sapiens
ucuuuucuucuuguuucccugauuaugaugag

SEQ ID NO: 7381 - RNA, 32 nt, Homo Sapiens
uuaccagucacaauuuaacuagguuuuguguu

SEQ ID NO: 7382 - RNA, 32 nt, Homo Sapiens
cuuucacucagcaaaauuauuuugagauucau

SEQ ID NO: 7383 - RNA, 32 nt, Homo Sapiens
aggagcagaaaagaagggcugggcaaggcaua

SEQ ID NO: 7384 - RNA, 32 nt, Homo Sapiens
cccugccgcccauugugacgccugccagccgc

SEQ ID NO: 7385 - RNA, 32 nt, Homo Sapiens
ccugcucugaagauguggauacagaauuaguc

SEQ ID NO: 7386 - RNA, 32 nt, Homo Sapiens
gugccaugauacagucugcaucuuauagcagu

SEQ ID NO: 7387 - RNA, 32 nt, Homo Sapiens
acugcccagagaccagacgugccugggcccug

SEQ ID NO: 7388 - RNA, 32 nt, Homo Sapiens
aaugguguuucauuggaauuaccaagugcuua

SEQ ID NO: 7389 - RNA, 32 nt, Homo Sapiens
uggaaguugagauuauuuuaaaacuucaagcu

SEQ ID NO: 7390 - RNA, 32 nt, Homo Sapiens
cuucccacaguccccuuucucauucauuuagu

SEQ ID NO: 7391 - RNA, 32 nt, Homo Sapiens
guguguguggauugucagccuccagcuaugaa

SEQ ID NO: 7392 - RNA, 32 nt, Homo Sapiens
uagcaugcucguuguaccucuuggaaaaccuc

SEQ ID NO: 7393 - RNA, 32 nt, Homo Sapiens
aauuuguuuuuaaauuuauguauacuagccug

SEQ ID NO: 7394 - RNA, 32 nt, Homo Sapiens
gccgcuuccgcccggcgcccacuuccaagaug

SEQ ID NO: 7395 - RNA, 30 nt, Homo Sapiens
caugugcugugggcccugccggcgccugag

SEQ ID NO: 7396 - RNA, 32 nt, Homo Sapiens
cacuuucaaauuauauuguguucuugauauau

SEQ ID NO: 7397 - RNA, 31 nt, Homo Sapiens
caguggugugaucucagaucaguguaccauu

SEQ ID NO: 7398 - RNA, 32 nt, Homo Sapiens
augccagcuguacugccggcucugccggcacc

SEQ ID NO: 7399 - RNA, 32 nt, Homo Sapiens
aucuucccugguuuccuagaacucacuuccuu

SEQ ID NO: 7400 - RNA, 32 nt, Homo Sapiens
cccugccccccgcuucagucucuaccauaucu

SEQ ID NO: 7401 - RNA, 32 nt, Homo Sapiens
ccgaguucagcuucccaaacaccaguguugga

SEQ ID NO: 7402 - RNA, 32 nt, Homo Sapiens
uuuuauuuucuuuuagagaggggaaaguguga

SEQ ID NO: 7403 - RNA, 32 nt, Homo Sapiens
aguucccgccuuuugcccuccuccucccaguu

SEQ ID NO: 7404 - RNA, 32 nt, Homo Sapiens
cgggcuaggaggaggggguaggugauggggga

SEQ ID NO: 7405 - RNA, 32 nt, Homo Sapiens
ggcagcgccguggucgucacucagucgcucug

SEQ ID NO: 7406 - RNA, 32 nt, Homo Sapiens
uauuucacuauaaaguuuugcuuuauuaaaaa

SEQ ID NO: 7407 - RNA, 32 nt, Homo Sapiens
gacugggugcggugacucaugccuguaauccc

SEQ ID NO: 7408 - RNA, 32 nt, Homo Sapiens
acacagcccgcgcguccccgcggccgguggcg

SEQ ID NO: 7409 - RNA, 32 nt, Homo Sapiens
cacauauuuacauauauaucaagugugcuuag

SEQ ID NO: 7410 - RNA, 32 nt, Homo Sapiens
gaauguguuggccucuuaauaccuguuacuag

SEQ ID NO: 7411 - RNA, 32 nt, Homo Sapiens
aacaaaaaaaacaaaauucauguuacuaaaag

SEQ ID NO: 7412 - RNA, 32 nt, Homo Sapiens
gaguguaagcggcuaagcuguaccucauuccc

SEQ ID NO: 7413 - RNA, 32 nt, Homo Sapiens
uugugacuuggaaagguacgcugcuggccagc

SEQ ID NO: 7414 - RNA, 32 nt, Homo Sapiens
cagaaggcuacggggaggacugagaggacagg

SEQ ID NO: 7415 - RNA, 32 nt, Homo Sapiens
uuuucuacuuuugugguagaaauugagaagug

SEQ ID NO: 7416 - RNA, 32 nt, Homo Sapiens
auagaaaagcuacaaaguaaauugagcaaugc

SEQ ID NO: 7417 - RNA, 32 nt, Homo Sapiens
cggcagugggagaggcaggggaugcgucagug

SEQ ID NO: 7418 - RNA, 32 nt, Homo Sapiens
uuugcaaaacaucaucuaaaauuuaaauuugu

SEQ ID NO: 7419 - RNA, 32 nt, Homo Sapiens
ugcuagcucgagggugugggugucacagggag

SEQ ID NO: 7420 - RNA, 31 nt, Homo Sapiens
auuguguccucuccucucagagccccaucag

SEQ ID NO: 7421 - RNA, 32 nt, Homo Sapiens
cucgggggcuccuagcaacgggccggggcggg

SEQ ID NO: 7422 - RNA, 31 nt, Homo Sapiens
uucgucgggguagugucgaccugucuuacgg

SEQ ID NO: 7423 - RNA, 32 nt, Homo Sapiens
gaaugaaugaauaauaaaaauguuuucauaag

SEQ ID NO: 7424 - RNA, 32 nt, Homo Sapiens
auguguuuucuuuaauaaauaguaauauauca

SEQ ID NO: 7425 - RNA, 32 nt, Homo Sapiens
aggagacauuuuauuaagugugcuauguuuua

SEQ ID NO: 7426 - RNA, 32 nt, Homo Sapiens
cagagauguuaagagggucauguggcaugauu

SEQ ID NO: 7427 - RNA, 32 nt, Homo Sapiens
acagcccguaggcuaccaagggacaccugccu

SEQ ID NO: 7428 - RNA, 32 nt, Homo Sapiens
uugucccgggcagcggcccgggcccgcugcag

SEQ ID NO: 7429 - RNA, 32 nt, Homo Sapiens
aaauaaaaagagaaacaaguauuuugcuauau

SEQ ID NO: 7430 - RNA, 32 nt, Homo Sapiens
uugcuggggcucugggguggacccugugugau

SEQ ID NO: 7431 - RNA, 32 nt, Homo Sapiens
ucaugaaauagugacaauucacuaaggccacc

SEQ ID NO: 7432 - RNA, 30 nt, Homo Sapiens
aagggaggaggugggcacagguggugagcu

SEQ ID NO: 7433 - RNA, 32 nt, Homo Sapiens
cauucccggcuucccuccuccuccccugcagc

SEQ ID NO: 7434 - RNA, 32 nt, Homo Sapiens
cauuuuguucacaaaaggauagagugugugca

SEQ ID NO: 7435 - RNA, 32 nt, Homo Sapiens
aaaacucuuaugucaagauguugauuugaagc

SEQ ID NO: 7436 - RNA, 32 nt, Homo Sapiens
aguagaccuaaugacauuuguauuuuaugauc

SEQ ID NO: 7437 - RNA, 32 nt, Homo Sapiens
auaucugcaguuccucauuuuuauaaaacuuu

SEQ ID NO: 7438 - RNA, 32 nt, Homo Sapiens
uuagucauuuuuccuuuauguuuuuagaguau

SEQ ID NO: 7439 - RNA, 32 nt, Homo Sapiens
acguugucacggguuuggggucggggacagag

SEQ ID NO: 7440 - RNA, 32 nt, Homo Sapiens
auuugcgggagggagggaaaaggacgaggaga

SEQ ID NO: 7441 - RNA, 32 nt, Homo Sapiens
auaauauaaaaagcagauagauggcgcuaugu

SEQ ID NO: 7442 - RNA, 32 nt, Homo Sapiens
cccgcccccuccccuucuccgucugucccaag

SEQ ID NO: 7443 - RNA, 32 nt, Homo Sapiens
guacacacgcguauacguguacauuccacgca

SEQ ID NO: 7444 - RNA, 32 nt, Homo Sapiens
uuaauagauaaaacguuuaggcaauaauugaa

SEQ ID NO: 7445 - RNA, 32 nt, Homo Sapiens
auuuugcuccuucugacuuuguuuccucauuu

SEQ ID NO: 7446 - RNA, 32 nt, Homo Sapiens
aucaauaugauacaagucuacuuuggaauauc

SEQ ID NO: 7447 - RNA, 29 nt, Homo Sapiens
gcaggaguuaucuggguaucaagcaaauc

SEQ ID NO: 7448 - RNA, 32 nt, Homo Sapiens
agagccgggagggucggcgucuggggucaggg

SEQ ID NO: 7449 - RNA, 32 nt, Homo Sapiens
uggugaucauaauuucucuuuauuuucuaguu

SEQ ID NO: 7450 - RNA, 32 nt, Homo Sapiens
cggccgggggcggagcgggaucgagcccucgc

SEQ ID NO: 7451 - RNA, 32 nt, Homo Sapiens
ggagggaaaggggacaggcauccuagcuaagg

SEQ ID NO: 7452 - RNA, 32 nt, Homo Sapiens
uaucuaucuauuauuucauuugauugucacac

SEQ ID NO: 7453 - RNA, 32 nt, Homo Sapiens
ggccaucccccucccugagcaggccccaggaa

SEQ ID NO: 7454 - RNA, 32 nt, Homo Sapiens
aacccucuguagcuauagaaugagugcagguu

SEQ ID NO: 7455 - RNA, 32 nt, Homo Sapiens
guacuggggacugcucggaugaucuuucuuag

SEQ ID NO: 7456 - RNA, 32 nt, Homo Sapiens
cuuggggcccuucauugggcccaugucagggg

SEQ ID NO: 7457 - RNA, 31 nt, Homo Sapiens
gccacucagaugggaaagucccuuacucggc

SEQ ID NO: 7458 - RNA, 32 nt, Homo Sapiens
ucaguaguagaaacauaagaaaacaucuuugc

SEQ ID NO: 7459 - RNA, 32 nt, Homo Sapiens
ggacugggccuggccuggggcguccccgcgaa

SEQ ID NO: 7460 - RNA, 32 nt, Homo Sapiens
uuugggaauauguuaauuucaggcagcauucc

SEQ ID NO: 7461 - RNA, 32 nt, Homo Sapiens
auguggagaagcucugugugagcggugagggg

SEQ ID NO: 7462 - RNA, 32 nt, Homo Sapiens
ugugccauggacucagccgcccggugauauug

SEQ ID NO: 7463 - RNA, 32 nt, Homo Sapiens
cauuuccaauaaagcugaagucucaucccacc

SEQ ID NO: 7464 - RNA, 32 nt, Homo Sapiens
cccuccugugcccccucccauccauagugcau

SEQ ID NO: 7465 - RNA, 32 nt, Homo Sapiens
aaaacaaggaaauaaaggcuuacuucuuuaaa

SEQ ID NO: 7466 - RNA, 29 nt, Homo Sapiens
acuuuaaaaaauauauguguguauacuuu

SEQ ID NO: 7467 - RNA, 32 nt, Homo Sapiens
agauaagucaggauuaacuguuaucaccucuc

SEQ ID NO: 7468 - RNA, 32 nt, Homo Sapiens
uucucuugaguaauaaaucuuaucuuuucaag

SEQ ID NO: 7469 - RNA, 32 nt, Homo Sapiens
cccuccagccacuggaccccagccuuggcucu

SEQ ID NO: 7470 - RNA, 32 nt, Homo Sapiens
aagagcugcagcccacgggcccggcccggccu

SEQ ID NO: 7471 - RNA, 32 nt, Homo Sapiens
auuuuuagcauuauguugaagauaaaaugaau

SEQ ID NO: 7472 - RNA, 32 nt, Homo Sapiens
uucgcaguuguuuauaucuacucuucgcacac

SEQ ID NO: 7473 - RNA, 32 nt, Homo Sapiens
ugucugggcguguuguauguccugcugccgau

SEQ ID NO: 7474 - RNA, 32 nt, Homo Sapiens
ucucagccucccaaaaagcugggauuacuagc

SEQ ID NO: 7475 - RNA, 32 nt, Homo Sapiens
aagggcccgucccgccuuccccggcgcgccau

SEQ ID NO: 7476 - RNA, 32 nt, Homo Sapiens
cccucccccuucucgcaccccuggcagucugu

SEQ ID NO: 7477 - RNA, 32 nt, Homo Sapiens
aucauccccccgccccccgacguccagcccgu

SEQ ID NO: 7478 - RNA, 32 nt, Homo Sapiens
cuucagauuauaaggcuauaauaaucaaaaca

SEQ ID NO: 7479 - RNA, 32 nt, Homo Sapiens
acauccagcucuuuaagugauccucguucugg

SEQ ID NO: 7480 - RNA, 32 nt, Homo Sapiens
gaguacucaggaaaacauaacacaugaauauc

SEQ ID NO: 7481 - RNA, 32 nt, Homo Sapiens
auauuauauguucguuauuccuuguauuauug

SEQ ID NO: 7482 - RNA, 32 nt, Homo Sapiens
uaauuugaucaaauuuauucaaaaagcucuca

SEQ ID NO: 7483 - RNA, 30 nt, Homo Sapiens
ccgcuguggggcgcugcugcagccgcucuu

SEQ ID NO: 7484 - RNA, 32 nt, Homo Sapiens
agagcuuagaugagagcauaucaucaggaaag

SEQ ID NO: 7485 - RNA, 28 nt, Homo Sapiens
cggccgucugguggcccgagguggcggc

SEQ ID NO: 7486 - RNA, 32 nt, Homo Sapiens
ggggagaacgugauuuuuguuaucucagccca

SEQ ID NO: 7487 - RNA, 32 nt, Homo Sapiens
uaggggagccccacgauuuguuuucaaaggau

SEQ ID NO: 7488 - RNA, 32 nt, Homo Sapiens
aaaaggcccacuuuuuaaaaagugaaacaagu

SEQ ID NO: 7489 - RNA, 32 nt, Homo Sapiens
cuggcuggcaagaguucucucuucuguuggua

SEQ ID NO: 7490 - RNA, 32 nt, Homo Sapiens
guaucuuaaugaugcuaugauaauugcuugug

SEQ ID NO: 7491 - RNA, 32 nt, Homo Sapiens
uagcuuccaggucuuaacuucucugacuacuc

SEQ ID NO: 7492 - RNA, 32 nt, Homo Sapiens
gccggcggacgcucgcgccggcucaccaugca

SEQ ID NO: 7493 - RNA, 32 nt, Homo Sapiens
aagaagcuucauauuuuuuuuauaagcauaga

SEQ ID NO: 7494 - RNA, 32 nt, Homo Sapiens
aagauguauauuuuagugauaauugugauuaa

SEQ ID NO: 7495 - RNA, 32 nt, Homo Sapiens
aaaauacaaaaauuagcugggguugguggcac

SEQ ID NO: 7496 - RNA, 32 nt, Homo Sapiens
guggcuacaagcccucaguccacaccugugga

SEQ ID NO: 7497 - RNA, 32 nt, Homo Sapiens
uguccccaucauucagucaccuccccccaggc

SEQ ID NO: 7498 - RNA, 32 nt, Homo Sapiens
caaccuggccuucggcggcccggaggucugag

SEQ ID NO: 7499 - RNA, 32 nt, Homo Sapiens
ggaacgagccggccgagcugccgucgggagaa

SEQ ID NO: 7500 - RNA, 32 nt, Homo Sapiens
gggacaggugggcgugguacugagagucccag

SEQ ID NO: 7501 - RNA, 32 nt, Homo Sapiens
uuguccccaaaauauccuuuauagcuguuuau

SEQ ID NO: 7502 - RNA, 32 nt, Homo Sapiens
aggccccacaacccccucuccuuucuuucagu

SEQ ID NO: 7503 - RNA, 30 nt, Homo Sapiens
aucuucuguuuguaaccagaagcuuuaaac

SEQ ID NO: 7504 - RNA, 32 nt, Homo Sapiens
ucguccgcucaggcugcccccuugggcucuug

SEQ ID NO: 7505 - RNA, 32 nt, Homo Sapiens
gccuugcucuuggacuucccagcccccagaac

SEQ ID NO: 7506 - RNA, 32 nt, Homo Sapiens
ggcauggggggcaggaagagggggcucagcuc

SEQ ID NO: 7507 - RNA, 32 nt, Homo Sapiens
uacacagcagugcugguuuauguagaguucag

SEQ ID NO: 7508 - RNA, 32 nt, Homo Sapiens
ccauugauuaagugaaaaaacaucuuagaaga

SEQ ID NO: 7509 - RNA, 32 nt, Homo Sapiens
gugggcgaagggggcgggagggcgugggggga

SEQ ID NO: 7510 - RNA, 32 nt, Homo Sapiens
uucuuaaaaugguuuuaaaucuugaccuuaag

SEQ ID NO: 7511 - RNA, 32 nt, Homo Sapiens
gagaaggggcuuugggcuuuuugagucuccca

SEQ ID NO: 7512 - RNA, 32 nt, Homo Sapiens
ugcauuuguaaauaaacuugcugaugcauuua

SEQ ID NO: 7513 - RNA, 32 nt, Homo Sapiens
uaugccgccuugaacuugacuccagcgugaca

SEQ ID NO: 7514 - RNA, 32 nt, Homo Sapiens
uggugacauuugggugggaggggaggggauga

SEQ ID NO: 7515 - RNA, 32 nt, Homo Sapiens
gcaaaugucuugccuccaggaccugggaaggg

SEQ ID NO: 7516 - RNA, 32 nt, Homo Sapiens
agggucugcaagugcagacagcagcuggggcc

SEQ ID NO: 7517 - RNA, 32 nt, Homo Sapiens
gagagcccgcggcuuaaagcgcgucgccuggc

SEQ ID NO: 7518 - RNA, 32 nt, Homo Sapiens
aacaugcugaccaagccuaggcaugugccaug

SEQ ID NO: 7519 - RNA, 32 nt, Homo Sapiens
ggagcucucccggcugcaccggcuggagacgc

SEQ ID NO: 7520 - RNA, 32 nt, Homo Sapiens
gaggcaaaacaaaggcagcaggagauaaugug

SEQ ID NO: 7521 - RNA, 32 nt, Homo Sapiens
ugcuacucaagauauuaagagauaacaagauc

SEQ ID NO: 7522 - RNA, 32 nt, Homo Sapiens
agcggacgccccgaggugcccgggcaggcagu

SEQ ID NO: 7523 - RNA, 32 nt, Homo Sapiens
gucgcgugggagugcuggccugaagccuccau

SEQ ID NO: 7524 - RNA, 32 nt, Homo Sapiens
gauccugggugugcguaacgccgccuggggcu

SEQ ID NO: 7525 - RNA, 32 nt, Homo Sapiens
aucagucucaaauccaucaucaucaacugacu

SEQ ID NO: 7526 - RNA, 32 nt, Homo Sapiens
ccuucugcuucccccauucccuuccacagcuc

SEQ ID NO: 7527 - RNA, 32 nt, Homo Sapiens
ggcggagugcagcggaggccccugccgcugcc

SEQ ID NO: 7528 - RNA, 32 nt, Homo Sapiens
uggauagaagcagucagugcaaaccagcaugg

SEQ ID NO: 7529 - RNA, 32 nt, Homo Sapiens
augauaaagagaugauagcucuaaaaugguaa

SEQ ID NO: 7530 - RNA, 32 nt, Homo Sapiens
uauauauuuuucugagauuuuugauaucucaa

SEQ ID NO: 7531 - RNA, 32 nt, Homo Sapiens
cuccaucaaccaugcauagaaugucuuugaau

SEQ ID NO: 7532 - RNA, 32 nt, Homo Sapiens
aucaaagaugcauaacagcuauuaucuagggg

SEQ ID NO: 7533 - RNA, 32 nt, Homo Sapiens
acgcgggggcgggcuacugggccugcgcugcc

SEQ ID NO: 7534 - RNA, 32 nt, Homo Sapiens
cacuccuaauucucaaguacuauucaaauugu

SEQ ID NO: 7535 - RNA, 32 nt, Homo Sapiens
aauaguaugucuuauucauucuuucuuugugu

SEQ ID NO: 7536 - RNA, 32 nt, Homo Sapiens
gcggccuggcaggcaaccaaccaaaaaacaaa

SEQ ID NO: 7537 - RNA, 32 nt, Homo Sapiens
aguucugaguuuagaaaauaauccaaaacuaa

SEQ ID NO: 7538 - RNA, 32 nt, Homo Sapiens
caccuggugggccucccugcccgcuuccuugg

SEQ ID NO: 7539 - RNA, 32 nt, Homo Sapiens
ccgacaauuuaaaaaagaguuuaauuauagag

SEQ ID NO: 7540 - RNA, 32 nt, Homo Sapiens
ugcuggcccuguacaggagcgugcaccgagcc

SEQ ID NO: 7541 - RNA, 32 nt, Homo Sapiens
ucaaggcagacaccuacugcgcguagccgccc

SEQ ID NO: 7542 - RNA, 32 nt, Homo Sapiens
gaggacauugcaccuuugcugcugcugcuauc

SEQ ID NO: 7543 - RNA, 32 nt, Homo Sapiens
uucuuggccaugagaaugcuuauuuaaguguu

SEQ ID NO: 7544 - RNA, 32 nt, Homo Sapiens
ccccccaaagaggccccgccccggcccuggcc

SEQ ID NO: 7545 - RNA, 32 nt, Homo Sapiens
cuugaguuccagcugagcugccuucuggcuau

SEQ ID NO: 7546 - RNA, 32 nt, Homo Sapiens
gggccaaguuacacacagagauaaugcagacu

SEQ ID NO: 7547 - RNA, 32 nt, Homo Sapiens
auuugcaugucugcugugaauuuucaucuagu

SEQ ID NO: 7548 - RNA, 32 nt, Homo Sapiens
ucccuggcgucccugguuugaucccaggguac

SEQ ID NO: 7549 - RNA, 32 nt, Homo Sapiens
gcccgccgcucccggccccgcuccgcucacaa

SEQ ID NO: 7550 - RNA, 32 nt, Homo Sapiens
gagagggaagugggcgggagccgcgaucugag

SEQ ID NO: 7551 - RNA, 32 nt, Homo Sapiens
cacaucagagcuggcuggcccggggcugcagc

SEQ ID NO: 7552 - RNA, 32 nt, Homo Sapiens
ccucugcccaggugcugugccuauucaagugg

SEQ ID NO: 7553 - RNA, 32 nt, Homo Sapiens
augaaugugcuaauuacuuuaaaucaaauuga

SEQ ID NO: 7554 - RNA, 32 nt, Homo Sapiens
uacagaaaguuccaugugaccaggagcagagg

SEQ ID NO: 7555 - RNA, 32 nt, Homo Sapiens
uugugcaaaggaccuucucaccacagaucagc

SEQ ID NO: 7556 - RNA, 32 nt, Homo Sapiens
caaauaugaaccacugggaugccaaguaccug

SEQ ID NO: 7557 - RNA, 32 nt, Homo Sapiens
caaguauugggaauuuucuauuagcaguggug

SEQ ID NO: 7558 - RNA, 32 nt, Homo Sapiens
agaacacuaagaccgaaaggcuggacucuugu

SEQ ID NO: 7559 - RNA, 32 nt, Homo Sapiens
cuguuucauauuuuuccuuucacuuucgguuu

SEQ ID NO: 7560 - RNA, 32 nt, Homo Sapiens
uauuuuuguaaauuauacuuucuauacuguag

SEQ ID NO: 7561 - RNA, 32 nt, Homo Sapiens
aaagcaccugcccucuguuuccccucagaaca

SEQ ID NO: 7562 - RNA, 32 nt, Homo Sapiens
agccgguagcgagguugggagagacggagcgg

SEQ ID NO: 7563 - RNA, 32 nt, Homo Sapiens
gacuuuucucauaaguuuugacugguacuguu

SEQ ID NO: 7564 - RNA, 32 nt, Homo Sapiens
ucgccgccgcgugcauuaggagcucgacgagu

SEQ ID NO: 7565 - RNA, 32 nt, Homo Sapiens
agccaggagacagcagggucugagagaggagc

SEQ ID NO: 7566 - RNA, 32 nt, Homo Sapiens
gauaguccagcauguggggagcucggcugcag

SEQ ID NO: 7567 - RNA, 32 nt, Homo Sapiens
uaagauaaugaaguucuaaugaacuauuucuc

SEQ ID NO: 7568 - RNA, 32 nt, Homo Sapiens
ugugccaggucuuugccagccugcgucuccuu

SEQ ID NO: 7569 - RNA, 32 nt, Homo Sapiens
caucuagacugguguuugaccaaacuacuggg

SEQ ID NO: 7570 - RNA, 32 nt, Homo Sapiens
guuuuuaauacucagaugugggagcgacauca

SEQ ID NO: 7571 - RNA, 32 nt, Homo Sapiens
gcagcucugcugaguucacagaugaccacuaa

SEQ ID NO: 7572 - RNA, 32 nt, Homo Sapiens
guugcccuccccggacgugguguuaugugguc

SEQ ID NO: 7573 - RNA, 32 nt, Homo Sapiens
gcaaaacuaccccacaccccuauuucaugucu

SEQ ID NO: 7574 - RNA, 32 nt, Homo Sapiens
accgcaggcccgagacaugagggcggcccgug

SEQ ID NO: 7575 - RNA, 32 nt, Homo Sapiens
cacagccccucccagacaccccgccucaucug

SEQ ID NO: 7576 - RNA, 31 nt, Homo Sapiens
aacgucaucuugggagugccaaaugaauagg

SEQ ID NO: 7577 - RNA, 32 nt, Homo Sapiens
uauuggaggggaggugguguagcugcaaagag

SEQ ID NO: 7578 - RNA, 29 nt, Homo Sapiens
ggcgcgacgugaagccggacgaggaccug

SEQ ID NO: 7579 - RNA, 32 nt, Homo Sapiens
ggcuggggugaccuggcaucccggggcucccc

SEQ ID NO: 7580 - RNA, 32 nt, Homo Sapiens
aaccuggggcacccuuuuguguagaagauagu

SEQ ID NO: 7581 - RNA, 32 nt, Homo Sapiens
gcuugccuugaucuccucuccuuccucuggcc

SEQ ID NO: 7582 - RNA, 32 nt, Homo Sapiens
uauugggauugcuguaaauauuuuaaaguacu

SEQ ID NO: 7583 - RNA, 32 nt, Homo Sapiens
aggacugcagggacccaggucuguggggucca

SEQ ID NO: 7584 - RNA, 32 nt, Homo Sapiens
agagugauggguuuugaguuagacaguccugg

SEQ ID NO: 7585 - RNA, 32 nt, Homo Sapiens
uuaaagggggaauucauggauuauuaaggucc

SEQ ID NO: 7586 - RNA, 32 nt, Homo Sapiens
aaguaaagggauaggcucauggcccuucacaa

SEQ ID NO: 7587 - RNA, 32 nt, Homo Sapiens
ucugauuggccaugggccagaccugcacucug

SEQ ID NO: 7588 - RNA, 32 nt, Homo Sapiens
ccacccccacccaaaggcagugaggagugugg

SEQ ID NO: 7589 - RNA, 32 nt, Homo Sapiens
cggggacagagggagguuuggugcuggaguuu

SEQ ID NO: 7590 - RNA, 32 nt, Homo Sapiens
acauucccuugccagcagcaccagccauucug

SEQ ID NO: 7591 - RNA, 32 nt, Homo Sapiens
gccccuuggcuggcagauguguuaacaugccc

SEQ ID NO: 7592 - RNA, 32 nt, Homo Sapiens
uuggaguucuuuucuucagacuuaaagcagaa

SEQ ID NO: 7593 - RNA, 32 nt, Homo Sapiens
ugugcccacccuccacucuccucuuccagggc

SEQ ID NO: 7594 - RNA, 32 nt, Homo Sapiens
agaacggaauccaggcaaucuguuuagagacc

SEQ ID NO: 7595 - RNA, 32 nt, Homo Sapiens
uggcucacaccuguaaucccaacacuuugaga

SEQ ID NO: 7596 - RNA, 32 nt, Homo Sapiens
uggcucacaccuguaaucucagcacucuggga

SEQ ID NO: 7597 - RNA, 32 nt, Homo Sapiens
cggcucacaccuguaaccccagcacuuuggga

SEQ ID NO: 7598 - RNA, 32 nt, Homo Sapiens
uggcucacaccuguaaucccagcacuuuggga

SEQ ID NO: 7599 - RNA, 32 nt, Homo Sapiens
acugcugacucuuuuucuuguuuugucugcca

SEQ ID NO: 7600 - RNA, 32 nt, Homo Sapiens
ugaaaacaugcuuaaccacuagcaaucaagcc

SEQ ID NO: 7601 - RNA, 32 nt, Homo Sapiens
cucuguacucgacccggcacuggguaccggaa

SEQ ID NO: 7602 - RNA, 32 nt, Homo Sapiens
ggucucaaacuccugagcucaggcaaucugcc

SEQ ID NO: 7603 - RNA, 32 nt, Homo Sapiens
ccagugggugcccacgccugcugccuugcuuu

SEQ ID NO: 7604 - RNA, 32 nt, Homo Sapiens
ucaaagcauuuucuuauuaaaaauauaucuuu

SEQ ID NO: 7605 - RNA, 32 nt, Homo Sapiens
ugacccuucccuucuuuuuuuaugcucguuuu

SEQ ID NO: 7606 - RNA, 32 nt, Homo Sapiens
cuucaccuuaaggguuaauaauguagagagga

SEQ ID NO: 7607 - RNA, 32 nt, Homo Sapiens
uuuaauuagacuaugucauugugaggccacca

SEQ ID NO: 7608 - RNA, 32 nt, Homo Sapiens
cugauugguuuacuguuuuucuaaucauaugu

SEQ ID NO: 7609 - RNA, 32 nt, Homo Sapiens
gaguaagcaacgccagggcucgcuuauucagg

SEQ ID NO: 7610 - RNA, 32 nt, Homo Sapiens
ugaacuggguuuuucugacaugccuagacucc

SEQ ID NO: 7611 - RNA, 32 nt, Homo Sapiens
augcagcagcuaauuucaaaccuaccacugca

SEQ ID NO: 7612 - RNA, 32 nt, Homo Sapiens
ucaucugccuggucaucucagacccaugaaau

SEQ ID NO: 7613 - RNA, 32 nt, Homo Sapiens
acuaugcacaauuuaaucacuuucaucccuau

SEQ ID NO: 7614 - RNA, 32 nt, Homo Sapiens
gccgguugccgcugcggagcgcggcgggucca

SEQ ID NO: 7615 - RNA, 32 nt, Homo Sapiens
uggcuugaguucugaggauauaaauucauaua

SEQ ID NO: 7616 - RNA, 32 nt, Homo Sapiens
cugauuuagucagggcaaaaccauuuacuuua

SEQ ID NO: 7617 - RNA, 32 nt, Homo Sapiens
uuuuguagucccauucaaauuuuaggauuguu

SEQ ID NO: 7618 - RNA, 32 nt, Homo Sapiens
acugcacuacaagacacuuuguagaagaggag

SEQ ID NO: 7619 - RNA, 32 nt, Homo Sapiens
uucaacuucauaauucaguucaucagcuuuug

SEQ ID NO: 7620 - RNA, 32 nt, Homo Sapiens
uucacaaccucuuuuaaaucuaacaacuccug

SEQ ID NO: 7621 - RNA, 32 nt, Homo Sapiens
ccuucccgucuuccugucacucguucugcuga

SEQ ID NO: 7622 - RNA, 32 nt, Homo Sapiens
ccuucagaguacguccugccuggcacuuacug

SEQ ID NO: 7623 - RNA, 32 nt, Homo Sapiens
ggcuaugcacaagcugagcaggucgugauacu

SEQ ID NO: 7624 - RNA, 32 nt, Homo Sapiens
augaaggggcgcccaggcccgcggcggccccg

SEQ ID NO: 7625 - RNA, 32 nt, Homo Sapiens
agaaggagguagagggggcggcggcggcggcg

SEQ ID NO: 7626 - RNA, 32 nt, Homo Sapiens
acgagccgggcgugguggcgggccccuguagu

SEQ ID NO: 7627 - RNA, 32 nt, Homo Sapiens
ugaacuggacagaggaggaaaacagagcauca

SEQ ID NO: 7628 - RNA, 30 nt, Homo Sapiens
ugcucaucaaaauaaaaguauaauaagcug

SEQ ID NO: 7629 - RNA, 32 nt, Homo Sapiens
ccagccugagcagggcagcuggacugcugcug

SEQ ID NO: 7630 - RNA, 32 nt, Homo Sapiens
agcaccggguggcaggccaaacuccuugccag

SEQ ID NO: 7631 - RNA, 32 nt, Homo Sapiens
agggugaaagagaaaccacguauuuuguuauu

SEQ ID NO: 7632 - RNA, 32 nt, Homo Sapiens
cccugcggagaacgaucuuaugcuggaauggg

SEQ ID NO: 7633 - RNA, 32 nt, Homo Sapiens
aucugagaugguuuuugcaucuuuccaggaga

SEQ ID NO: 7634 - RNA, 32 nt, Homo Sapiens
aacuucuacuuugaauucggcacaugucuggu

SEQ ID NO: 7635 - RNA, 32 nt, Homo Sapiens
gccccgccccuuucuuuccccggagucccucc

SEQ ID NO: 7636 - RNA, 32 nt, Homo Sapiens
gucagcaucaacaugguugauggucaaaugca

SEQ ID NO: 7637 - RNA, 32 nt, Homo Sapiens
agcagggcgcggggcgggacccagguccgagg

SEQ ID NO: 7638 - RNA, 32 nt, Homo Sapiens
ugaucccagcucaccgcaacgucuaccuccca

SEQ ID NO: 7639 - RNA, 32 nt, Homo Sapiens
cgcuccuucccagcuccuccccgugcccgcua

SEQ ID NO: 7640 - RNA, 32 nt, Homo Sapiens
cucgcggcgaucccggcccagcggcugggcgu

SEQ ID NO: 7641 - RNA, 32 nt, Homo Sapiens
cauccuagucccugcuggcuggcagggggcug

SEQ ID NO: 7642 - RNA, 32 nt, Homo Sapiens
ccaccucccagaaggaagcaacaaagacagca

SEQ ID NO: 7643 - RNA, 32 nt, Homo Sapiens
ucccagucaggagagugagcucucagaagcca

SEQ ID NO: 7644 - RNA, 32 nt, Homo Sapiens
cccggccaccacugcuggcuucagccccuuga

SEQ ID NO: 7645 - RNA, 32 nt, Homo Sapiens
ucccagccagcuuccuuggauggccacacagg

SEQ ID NO: 7646 - RNA, 32 nt, Homo Sapiens
agccucagccagcccaggauccguccucauuu

SEQ ID NO: 7647 - RNA, 32 nt, Homo Sapiens
uucuuaccauucucuugauuucuucagaaacc

SEQ ID NO: 7648 - RNA, 32 nt, Homo Sapiens
ccgucgcugcccuucacaccuuuuggugcuac

SEQ ID NO: 7649 - RNA, 32 nt, Homo Sapiens
auguauauauauauuuaauuuccugucauccu

SEQ ID NO: 7650 - RNA, 28 nt, Homo Sapiens
uacuauagcauuguacauuugaaaguag

SEQ ID NO: 7651 - RNA, 32 nt, Homo Sapiens
aaaggucgggguagguucgugcagagaugggg

SEQ ID NO: 7652 - RNA, 27 nt, Homo Sapiens
ccaccagcccucaccagcccccgcgga

SEQ ID NO: 7653 - RNA, 32 nt, Homo Sapiens
uaucucuuuguggacagggcugucaucuacaa

SEQ ID NO: 7654 - RNA, 32 nt, Homo Sapiens
uggccucuucugccacccacgcccccaccccu

SEQ ID NO: 7655 - RNA, 32 nt, Homo Sapiens
uaggguuguccugccuggggccccacuuugaa

SEQ ID NO: 7656 - RNA, 32 nt, Homo Sapiens
agaacgauggccuuucugcggugucugcgacc

SEQ ID NO: 7657 - RNA, 32 nt, Homo Sapiens
cuaacucugcuguuuuauugugguugugguuc

SEQ ID NO: 7658 - RNA, 32 nt, Homo Sapiens
uagaauccgcgguggggguccuaagccagcgg

SEQ ID NO: 7659 - RNA, 32 nt, Homo Sapiens
ucagggagagugcguucccagcccuuucauuc

SEQ ID NO: 7660 - RNA, 29 nt, Homo Sapiens
uaacccuaaaguuuaaaaauuucugccuc

SEQ ID NO: 7661 - RNA, 32 nt, Homo Sapiens
ccagggggccgcggaccugaacggagguugcg

SEQ ID NO: 7662 - RNA, 32 nt, Homo Sapiens
gugcauggaggcccuccugugcugggggaaug

SEQ ID NO: 7663 - RNA, 32 nt, Homo Sapiens
gggcccugaccuccccgcggggagggugggug

SEQ ID NO: 7664 - RNA, 32 nt, Homo Sapiens
cggcgccgcggccauuggcccgaggcacgugu

SEQ ID NO: 7665 - RNA, 32 nt, Homo Sapiens
caggccuugggucuccccuaguccuggccaga

SEQ ID NO: 7666 - RNA, 32 nt, Homo Sapiens
cuccuuuccuuccucauccccaccugguccca

SEQ ID NO: 7667 - RNA, 30 nt, Homo Sapiens
augcugucugugaagcugaaucugugagaa

SEQ ID NO: 7668 - RNA, 32 nt, Homo Sapiens
gggcuccuggaaauuguguaugccauauaaua

SEQ ID NO: 7669 - RNA, 32 nt, Homo Sapiens
gaacgcuggcauuucugccgggacggccgggu

SEQ ID NO: 7670 - RNA, 32 nt, Homo Sapiens
uguucaguauugcaauaaaaaauauauuuuua

SEQ ID NO: 7671 - RNA, 32 nt, Homo Sapiens
ccccugggaacauguguuuuguggugaauaaa

SEQ ID NO: 7672 - RNA, 32 nt, Homo Sapiens
uuauuuugacuuccucacuaaagaugcaagua

SEQ ID NO: 7673 - RNA, 32 nt, Homo Sapiens
gugugcuugugaugauacacacacaugcacag

SEQ ID NO: 7674 - RNA, 32 nt, Homo Sapiens
ugggauuguuuuuucuuuaaagaagaauguua

SEQ ID NO: 7675 - RNA, 32 nt, Homo Sapiens
gucccggguguggcuuugauucccuccuccgg

SEQ ID NO: 7676 - RNA, 32 nt, Homo Sapiens
ccaggucauaaauaaugacauuauaaugggcu

SEQ ID NO: 7677 - RNA, 32 nt, Homo Sapiens
cuugggugguuccuaagggaaagggaagcaca

SEQ ID NO: 7678 - RNA, 32 nt, Homo Sapiens
gguuucaccaugcuggccaggcuggucucgaa

SEQ ID NO: 7679 - RNA, 32 nt, Homo Sapiens
gguuucaccauguuggccaggcuggucuugaa

SEQ ID NO: 7680 - RNA, 32 nt, Homo Sapiens
gguuucacuaugcuggucaggcuggucucgaa

SEQ ID NO: 7681 - RNA, 32 nt, Homo Sapiens
ggcccgaacucgccagccccagcuuucagugg

SEQ ID NO: 7682 - RNA, 32 nt, Homo Sapiens
gaccucaggugauccgcccaccuuggccuccc

SEQ ID NO: 7683 - RNA, 32 nt, Homo Sapiens
agaaaguauugaaauuuuguucugccuugcag

SEQ ID NO: 7684 - RNA, 30 nt, Homo Sapiens
auagcagaagugguugaugaguucaucuga

SEQ ID NO: 7685 - RNA, 32 nt, Homo Sapiens
caaggccuugggcuaccagcugcuccgccaga

SEQ ID NO: 7686 - RNA, 32 nt, Homo Sapiens
gggacaccggaccgagugcacacuggaggucc

SEQ ID NO: 7687 - RNA, 32 nt, Homo Sapiens
auuaucaguagguacauggauacaucaaguuc

SEQ ID NO: 7688 - RNA, 32 nt, Homo Sapiens
aagggaggccccaaaacagucuacacagcagg

SEQ ID NO: 7689 - RNA, 31 nt, Homo Sapiens
cccagccauguuaaacuuugaguuaauuaaa

SEQ ID NO: 7690 - RNA, 32 nt, Homo Sapiens
gcccguggccggagagccccaggcccgagcca

SEQ ID NO: 7691 - RNA, 32 nt, Homo Sapiens
uaccuaguccagcacugccaucaauaaccugc

SEQ ID NO: 7692 - RNA, 32 nt, Homo Sapiens
ucucugucugauucucuagaggucuugucuuc

SEQ ID NO: 7693 - RNA, 28 nt, Homo Sapiens
ccugcgggacagagugagacuccauauc

SEQ ID NO: 7694 - RNA, 32 nt, Homo Sapiens
caaagcgggcuuugccgucaacuuuuucaaag

SEQ ID NO: 7695 - RNA, 32 nt, Homo Sapiens
cccaugagaaccuguggccagcccuuuucauu

SEQ ID NO: 7696 - RNA, 32 nt, Homo Sapiens
uagcguuuuguuucugcgagaacauaacgauc

SEQ ID NO: 7697 - RNA, 32 nt, Homo Sapiens
agcccccggccggcugccagaagaucccggcg

SEQ ID NO: 7698 - RNA, 32 nt, Homo Sapiens
cucauuuaguuauaaugacaucuuuaccaauu

SEQ ID NO: 7699 - RNA, 32 nt, Homo Sapiens
cuguggucgcugccggccuaggugucccaggu

SEQ ID NO: 7700 - RNA, 32 nt, Homo Sapiens
gugggaaggaaacaaccaugucauuucagaag

SEQ ID NO: 7701 - RNA, 32 nt, Homo Sapiens
ugccguuaaaacuguuuuuagaaaguauuuuu

SEQ ID NO: 7702 - RNA, 32 nt, Homo Sapiens
aguucaccaaagguauuucaucuguuuguucu

SEQ ID NO: 7703 - RNA, 32 nt, Homo Sapiens
gaaagaaauauuaaaacuucacuguugaggau

SEQ ID NO: 7704 - RNA, 32 nt, Homo Sapiens
aucaucuguccauuuuagaaccauuaaucucu

SEQ ID NO: 7705 - RNA, 32 nt, Homo Sapiens
aaaauaguuguacagguuauauguggcauagc

SEQ ID NO: 7706 - RNA, 32 nt, Homo Sapiens
aucugguaauauuaaaaccauuuuagaaauac

SEQ ID NO: 7707 - RNA, 32 nt, Homo Sapiens
uaagccagcccauauacagaaacuaucacuau

SEQ ID NO: 7708 - RNA, 32 nt, Homo Sapiens
accuacccccgccacaccccgucuuuuuagag

SEQ ID NO: 7709 - RNA, 32 nt, Homo Sapiens
aguaaacucugcagugcagcuucugcucuugg

SEQ ID NO: 7710 - RNA, 32 nt, Homo Sapiens
guuugguuccugaccuaggcuugggaagacaa

SEQ ID NO: 7711 - RNA, 32 nt, Homo Sapiens
gccaagaccccggcccguguacacacucaagg

SEQ ID NO: 7712 - RNA, 32 nt, Homo Sapiens
auaauaauuaguugcugcaguacucauaauga

SEQ ID NO: 7713 - RNA, 32 nt, Homo Sapiens
ucucuauucaucuauuuauuuaaauauuuauu

SEQ ID NO: 7714 - RNA, 32 nt, Homo Sapiens
ugaguccaaggcuggcagcuuuguaugacuuc

SEQ ID NO: 7715 - RNA, 32 nt, Homo Sapiens
cgcgacuuccggggcgacgggcggcggcggag

SEQ ID NO: 7716 - RNA, 32 nt, Homo Sapiens
gaggaggcagugacggccggugagauuggaag

SEQ ID NO: 7717 - RNA, 32 nt, Homo Sapiens
gccuucuggggucagagucuguccccgcuccu

SEQ ID NO: 7718 - RNA, 32 nt, Homo Sapiens
caccuccucgccccggcccggggauccguugg

SEQ ID NO: 7719 - RNA, 32 nt, Homo Sapiens
cuucagugguggcuggagaggucgagaaacuu

SEQ ID NO: 7720 - RNA, 32 nt, Homo Sapiens
acuccaugaagaaagaccauagguuagaaaaa

SEQ ID NO: 7721 - RNA, 32 nt, Homo Sapiens
aaugucccuuuauauauaacaugcaucuuguu

SEQ ID NO: 7722 - RNA, 32 nt, Homo Sapiens
caccucagccucccaacaugcugcaauuacag

SEQ ID NO: 7723 - RNA, 32 nt, Homo Sapiens
cugcgcuaacagcaaggacugcagcuucgccu

SEQ ID NO: 7724 - RNA, 32 nt, Homo Sapiens
ucucaguacuaguuaauaaaucuuaaugaaac

SEQ ID NO: 7725 - RNA, 32 nt, Homo Sapiens
uggggucgcgccccacugcgcugcugaccuuc

SEQ ID NO: 7726 - RNA, 32 nt, Homo Sapiens
ggccgggacuccuggggccuggcccccccagu

SEQ ID NO: 7727 - RNA, 32 nt, Homo Sapiens
uuauagaauuaugcuguuaaaacuacuuuagg

SEQ ID NO: 7728 - RNA, 32 nt, Homo Sapiens
ccggcgcggccgcggcgggucggucuccuaga

SEQ ID NO: 7729 - RNA, 32 nt, Homo Sapiens
ccagcuuccagaacuguaagaaauaaauguuu

SEQ ID NO: 7730 - RNA, 32 nt, Homo Sapiens
ugcugacacugccaaccuccaguauccucacc

SEQ ID NO: 7731 - RNA, 30 nt, Homo Sapiens
acgggguuucacuguguuagccaggaaagu

SEQ ID NO: 7732 - RNA, 32 nt, Homo Sapiens
uggcucucucuuccuacccuccuuccacaugu

SEQ ID NO: 7733 - RNA, 32 nt, Homo Sapiens
aagaaaucucuuaaaaugaaaugaaacuucaa

SEQ ID NO: 7734 - RNA, 32 nt, Homo Sapiens
uccuucuggcgguauaaaauagauguuaaguu

SEQ ID NO: 7735 - RNA, 32 nt, Homo Sapiens
augcuuagcugaugucauuuuaguucuaaauc

SEQ ID NO: 7736 - RNA, 32 nt, Homo Sapiens
uuugguuaauaaauauuaaucugaacauuuuc

SEQ ID NO: 7737 - RNA, 32 nt, Homo Sapiens
uauaaaaaugaaauauuuuaacauuuuauggg

SEQ ID NO: 7738 - RNA, 32 nt, Homo Sapiens
gcuaggguuuucaauuccaauucuuguauuaa

SEQ ID NO: 7739 - RNA, 32 nt, Homo Sapiens
uuuugauaacuguguacuucuggugcuguaca

SEQ ID NO: 7740 - RNA, 32 nt, Homo Sapiens
ccacuucagggcugcugugagauggaauucca

SEQ ID NO: 7741 - RNA, 32 nt, Homo Sapiens
gucauuguaauauaaauacagauuuuuauauc

SEQ ID NO: 7742 - RNA, 32 nt, Homo Sapiens
uuaaaaagaaauaaaugauauguuauuauccc

SEQ ID NO: 7743 - RNA, 32 nt, Homo Sapiens
ucaccaauuccacuuccugccccaacugcagg

SEQ ID NO: 7744 - RNA, 32 nt, Homo Sapiens
uaugcaaggaggaagagggcgagggauaacuu

SEQ ID NO: 7745 - RNA, 32 nt, Homo Sapiens
ucccacccaugacgaugcuccuggacggaggc

SEQ ID NO: 7746 - RNA, 32 nt, Homo Sapiens
uucucugauccacuucucugcuuccuccacgu

SEQ ID NO: 7747 - RNA, 32 nt, Homo Sapiens
auuggcuuuacuaugugaacuaacauggccuc

SEQ ID NO: 7748 - RNA, 32 nt, Homo Sapiens
ugauaguauucaauaaaguaaaaucaaauugu

SEQ ID NO: 7749 - RNA, 32 nt, Homo Sapiens
cgguuuaguuuacagaucuccuccccuuggac

SEQ ID NO: 7750 - RNA, 32 nt, Homo Sapiens
aauauucaaagcaauggagaaacaaguuauau

SEQ ID NO: 7751 - RNA, 32 nt, Homo Sapiens
aacugucuguuaaaaucagggguugcuguuag

SEQ ID NO: 7752 - RNA, 32 nt, Homo Sapiens
uuucaggcaaaacuacauuuauuguuaauaac

SEQ ID NO: 7753 - RNA, 29 nt, Homo Sapiens
agagugauauguauuuagccauagaugga

SEQ ID NO: 7754 - RNA, 31 nt, Homo Sapiens
gaagccauggaucccgggcagcagccgccgc

SEQ ID NO: 7755 - RNA, 27 nt, Homo Sapiens
aaauaaaacugaacucuugaaauggug

SEQ ID NO: 7756 - RNA, 32 nt, Homo Sapiens
cggugguggucgagggaaaaccacugccggac

SEQ ID NO: 7757 - RNA, 32 nt, Homo Sapiens
ggccuggucgccaagagggacaucagaaaggg

SEQ ID NO: 7758 - RNA, 32 nt, Homo Sapiens
gugaucucaacagggaaauugucauuuucuuu

SEQ ID NO: 7759 - RNA, 32 nt, Homo Sapiens
uaaguuuuauugcacaaaguagauaaaugaga

SEQ ID NO: 7760 - RNA, 32 nt, Homo Sapiens
gauggauguacaacuagccccauauugagcau

SEQ ID NO: 7761 - RNA, 32 nt, Homo Sapiens
acguuggugcugcccacaggcauuaucgccgc

SEQ ID NO: 7762 - RNA, 32 nt, Homo Sapiens
caccuucaggcacgcuccucagcuggucaccu

SEQ ID NO: 7763 - RNA, 32 nt, Homo Sapiens
gcccugagccccagcccccagccuccucccuc

SEQ ID NO: 7764 - RNA, 32 nt, Homo Sapiens
cccgccuuccccgaggcgcccggcuccgagcc

SEQ ID NO: 7765 - RNA, 32 nt, Homo Sapiens
caagaauguuuugaguuuuuugaaagacccca

SEQ ID NO: 7766 - RNA, 32 nt, Homo Sapiens
acaugcggggcccucguccgcggugguguuug

SEQ ID NO: 7767 - RNA, 32 nt, Homo Sapiens
guggggggccgcggagcgcuggggagcagcgg

SEQ ID NO: 7768 - RNA, 32 nt, Homo Sapiens
gccuacuguccucauuuuuauuauauuucggc

SEQ ID NO: 7769 - RNA, 32 nt, Homo Sapiens
gcccccugaccuagcgcgacccagcgcccccg

SEQ ID NO: 7770 - RNA, 32 nt, Homo Sapiens
cccaguugucuccuugugacauucucuguucu

SEQ ID NO: 7771 - RNA, 32 nt, Homo Sapiens
ccccuugccucuguggcagcugcgaguguguc

SEQ ID NO: 7772 - RNA, 32 nt, Homo Sapiens
uuuguauuuuguaggauugaucuuauuuugag

SEQ ID NO: 7773 - RNA, 32 nt, Homo Sapiens
uucacguggucuucuugcucauccccuuauaa

SEQ ID NO: 7774 - RNA, 32 nt, Homo Sapiens
aguugcaacaaaugcugcaaaagugcuagaag

SEQ ID NO: 7775 - RNA, 32 nt, Homo Sapiens
ccuaucugacuucauacaucccucaguuucuu

SEQ ID NO: 7776 - RNA, 32 nt, Homo Sapiens
caguuccaugugccucccaaauaaaaaacaga

SEQ ID NO: 7777 - RNA, 32 nt, Homo Sapiens
acaggcugcccauuuucaacagcauaaaauca

SEQ ID NO: 7778 - RNA, 30 nt, Homo Sapiens
ucagcaggcaggcagcagccucccgcaccc

SEQ ID NO: 7779 - RNA, 32 nt, Homo Sapiens
uuuguuuuguuaccaaaauguuggaaaaauuu

SEQ ID NO: 7780 - RNA, 32 nt, Homo Sapiens
uggguucccguccaaggugugggcagagcuuc

SEQ ID NO: 7781 - RNA, 32 nt, Homo Sapiens
gugugcacagggcagagcugccgccaggccuc

SEQ ID NO: 7782 - RNA, 32 nt, Homo Sapiens
agccacaggaccaccuccucugccagcaggaa

SEQ ID NO: 7783 - RNA, 32 nt, Homo Sapiens
gaucagaucaauacaaucuuggagucaaaagg

SEQ ID NO: 7784 - RNA, 32 nt, Homo Sapiens
uagauacaccaauuuggaggagcacugucaga

SEQ ID NO: 7785 - RNA, 32 nt, Homo Sapiens
uucuuuacucagacucuuucuugguuccuuca

SEQ ID NO: 7786 - RNA, 32 nt, Homo Sapiens
cuccuuagcucagaacaccaaauaucaccaga

SEQ ID NO: 7787 - RNA, 29 nt, Homo Sapiens
uuaaagccauaaugguaaaagauggcaua

SEQ ID NO: 7788 - RNA, 32 nt, Homo Sapiens
gaagccaacaagcagucaugcaugaaauaguc

SEQ ID NO: 7789 - RNA, 32 nt, Homo Sapiens
caggaggaggagccuuccccaggaggaacgag

SEQ ID NO: 7790 - RNA, 28 nt, Homo Sapiens
uugugggggcggccauggagcugggcag

SEQ ID NO: 7791 - RNA, 32 nt, Homo Sapiens
aguucagcgagggguggggggaggggggagau

SEQ ID NO: 7792 - RNA, 32 nt, Homo Sapiens
cuaagcaaaaauaacaaagcuagaggcaucau

SEQ ID NO: 7793 - RNA, 32 nt, Homo Sapiens
gcgugccggccgcaggagcuccggguugccgc

SEQ ID NO: 7794 - RNA, 32 nt, Homo Sapiens
ggaugccagcaaagagaauggggcugggcaga

SEQ ID NO: 7795 - RNA, 32 nt, Homo Sapiens
uaaaucaaaaacuuaccucuugcacuaucaug

SEQ ID NO: 7796 - RNA, 32 nt, Homo Sapiens
uaaagaugcuggaagccaucguggcccccuug

SEQ ID NO: 7797 - RNA, 32 nt, Homo Sapiens
uccuggaggccauggucagcuugcuuggaauc

SEQ ID NO: 7798 - RNA, 32 nt, Homo Sapiens
ccucaccccacuucuuugcuaccuagcagugg

SEQ ID NO: 7799 - RNA, 32 nt, Homo Sapiens
uaccuggaaugggguggucuuugaccuugaag

SEQ ID NO: 7800 - RNA, 32 nt, Homo Sapiens
uauuaucugcgcacucuucacuuuggucacag

SEQ ID NO: 7801 - RNA, 32 nt, Homo Sapiens
gaaacaguuucauccgaaaacauuccacccac

SEQ ID NO: 7802 - RNA, 32 nt, Homo Sapiens
gaggcugaggacuuaaaauauuccugcauuug

SEQ ID NO: 7803 - RNA, 32 nt, Homo Sapiens
uacacaguaccauuuuaaucuucugaaaauau

SEQ ID NO: 7804 - RNA, 32 nt, Homo Sapiens
cuggccggcagcggcaaaggcuucucgcucac

SEQ ID NO: 7805 - RNA, 32 nt, Homo Sapiens
agaagagccaaccagguccugauuauggcaag

SEQ ID NO: 7806 - RNA, 32 nt, Homo Sapiens
ccgggaagugaauugcugaugcaaaucggacu

SEQ ID NO: 7807 - RNA, 32 nt, Homo Sapiens
ugucuaccuucugcccucugcgacuccagugc

SEQ ID NO: 7808 - RNA, 32 nt, Homo Sapiens
ccuucccgcccuggcccuuggguuaccgccuc

SEQ ID NO: 7809 - RNA, 32 nt, Homo Sapiens
ccaucucuugcauauuugaucagauagugaca

SEQ ID NO: 7810 - RNA, 32 nt, Homo Sapiens
uggacauuccaaguucauaugcgugaacaaaa

SEQ ID NO: 7811 - RNA, 32 nt, Homo Sapiens
cgcuacaauucugcagaaaaagaaugugucuu

SEQ ID NO: 7812 - RNA, 32 nt, Homo Sapiens
gcccuugcccuuggagcugccgugccuguguc

SEQ ID NO: 7813 - RNA, 32 nt, Homo Sapiens
accucuggguggcaaagggaagcauguuccug

SEQ ID NO: 7814 - RNA, 32 nt, Homo Sapiens
acgcugucugagccccggcugugaugggaucc

SEQ ID NO: 7815 - RNA, 32 nt, Homo Sapiens
cacagccgggucacguggccggcggcccccca

SEQ ID NO: 7816 - RNA, 30 nt, Homo Sapiens
aggggguggggcgggucuauggggagaaag

SEQ ID NO: 7817 - RNA, 32 nt, Homo Sapiens
ugcugaauuuaaagagaaguucugcaucuuuu

SEQ ID NO: 7818 - RNA, 32 nt, Homo Sapiens
ucacugccggguggaauagcacuggcuucagc

SEQ ID NO: 7819 - RNA, 32 nt, Homo Sapiens
acgaagucaggagaucgagaccauccuggcua

SEQ ID NO: 7820 - RNA, 31 nt, Homo Sapiens
caagacaugcaggggcccugggugcugcugc

SEQ ID NO: 7821 - RNA, 32 nt, Homo Sapiens
uucauauuauacauuuaaguucuuucuguucu

SEQ ID NO: 7822 - RNA, 32 nt, Homo Sapiens
ucaccgaaauaaacaagcacguggugagagga

SEQ ID NO: 7823 - RNA, 32 nt, Homo Sapiens
gggaaagaaaaugugaagauuucauuuggaau

SEQ ID NO: 7824 - RNA, 32 nt, Homo Sapiens
cauuuuauuaccauuucaaacuauuuuuuaaa

SEQ ID NO: 7825 - RNA, 32 nt, Homo Sapiens
ggccuggaacagagccuuccugcacagccuca

SEQ ID NO: 7826 - RNA, 32 nt, Homo Sapiens
auuugggaagucauuuugauaauuuugcuuaa

SEQ ID NO: 7827 - RNA, 32 nt, Homo Sapiens
agcagcggucuuagcugacaaacaaguugugc

SEQ ID NO: 7828 - RNA, 32 nt, Homo Sapiens
ccaaauugcacugaaguuuuugaaauaccuuu

SEQ ID NO: 7829 - RNA, 32 nt, Homo Sapiens
gauuugcuucccuccccugggaaggcagaggg

SEQ ID NO: 7830 - RNA, 32 nt, Homo Sapiens
uguuuauagaaaggacauuacuaaugacauuu

SEQ ID NO: 7831 - RNA, 32 nt, Homo Sapiens
gaguugauggucagccucgaggagcagcaaua

SEQ ID NO: 7832 - RNA, 32 nt, Homo Sapiens
ugucuuuauuuucuccuaucccagugcauuug

SEQ ID NO: 7833 - RNA, 32 nt, Homo Sapiens
uagcugccccagcccagucuuucuccccggca

SEQ ID NO: 7834 - RNA, 32 nt, Homo Sapiens
cugcuguuuauugcuuccugucaggugggaac

SEQ ID NO: 7835 - RNA, 32 nt, Homo Sapiens
cacacugcgucaacccaaaggagcugccgcac

SEQ ID NO: 7836 - RNA, 32 nt, Homo Sapiens
ucccccuauuuucucucuccaaaaugauaaaa

SEQ ID NO: 7837 - RNA, 32 nt, Homo Sapiens
gccccgccagcgccgagcccagcccugaaguc

SEQ ID NO: 7838 - RNA, 32 nt, Homo Sapiens
cagcaccccuucccuggcaccagggucugccu

SEQ ID NO: 7839 - RNA, 32 nt, Homo Sapiens
ggagcggcuauuccaggagcugcggccacucu

SEQ ID NO: 7840 - RNA, 32 nt, Homo Sapiens
gaaugaucuccaugaagacgcggucacgcagc

SEQ ID NO: 7841 - RNA, 32 nt, Homo Sapiens
acuccucccucuccuugcuccuccuccugcaa

SEQ ID NO: 7842 - RNA, 32 nt, Homo Sapiens
aaaauggaaaauuagaaccugaacuaguaucu

SEQ ID NO: 7843 - RNA, 31 nt, Homo Sapiens
gcuaagauggcgucggccuccuccgggccgu

SEQ ID NO: 7844 - RNA, 32 nt, Homo Sapiens
uuaaggguauuuuuaucucugugcuuucuuuu

SEQ ID NO: 7845 - RNA, 32 nt, Homo Sapiens
cauuuuaguccagauuuuuagucuggcugcac

SEQ ID NO: 7846 - RNA, 32 nt, Homo Sapiens
cacugcaggacccacuuugagaaggaccgagg

SEQ ID NO: 7847 - RNA, 32 nt, Homo Sapiens
aggccgagggacugcccagagccccagagcac

SEQ ID NO: 7848 - RNA, 32 nt, Homo Sapiens
aggagggucuccacacugcugcuaggggcugu

SEQ ID NO: 7849 - RNA, 32 nt, Homo Sapiens
uacuugcuguuguuucuucaguguaaaauguc

SEQ ID NO: 7850 - RNA, 32 nt, Homo Sapiens
auguccccaucccccacuggauucccuacaag

SEQ ID NO: 7851 - RNA, 32 nt, Homo Sapiens
cccaggcccagccccaggggugcucccggugc

SEQ ID NO: 7852 - RNA, 30 nt, Homo Sapiens
uggagcuaacuugccaggaauuuuaagaaa

SEQ ID NO: 7853 - RNA, 32 nt, Homo Sapiens
ugcauccagggugggcaguggcagcuugucac

SEQ ID NO: 7854 - RNA, 32 nt, Homo Sapiens
gcugauauauuagaauaauuuuaaaaugucau

SEQ ID NO: 7855 - RNA, 32 nt, Homo Sapiens
uggaugccaaagggaggacggcuggguccucu

SEQ ID NO: 7856 - RNA, 32 nt, Homo Sapiens
uaucuuuggggauguuuucaagaagggauaua

SEQ ID NO: 7857 - RNA, 32 nt, Homo Sapiens
ccaauaucuccagccgcgcagucccgaagagu

SEQ ID NO: 7858 - RNA, 29 nt, Homo Sapiens
aggcaguuggagaccagucugggcaacau

SEQ ID NO: 7859 - RNA, 32 nt, Homo Sapiens
gaagauggguucaaguguuuguguguucccca

SEQ ID NO: 7860 - RNA, 32 nt, Homo Sapiens
guacacacaggccauggcagacaccccauguc

SEQ ID NO: 7861 - RNA, 32 nt, Homo Sapiens
uccugggcaaugcuccuggggagucugugggg

SEQ ID NO: 7862 - RNA, 32 nt, Homo Sapiens
uccacacacgggguccuagagcccuucugagc

SEQ ID NO: 7863 - RNA, 32 nt, Homo Sapiens
ccucgcugccccaccucccgcuccuuggccug

SEQ ID NO: 7864 - RNA, 32 nt, Homo Sapiens
cucagcagaagaguggcagcugagagagaggc

SEQ ID NO: 7865 - RNA, 32 nt, Homo Sapiens
aaaaccaaggaccuaggaaaauaccagauaca

SEQ ID NO: 7866 - RNA, 32 nt, Homo Sapiens
gcucuaggggaagagggagauggagacugguc

SEQ ID NO: 7867 - RNA, 32 nt, Homo Sapiens
uguugggccaccugaaacacacacaaacacac

SEQ ID NO: 7868 - RNA, 32 nt, Homo Sapiens
caaggagaggaugugaaugacagugucagcaa

SEQ ID NO: 7869 - RNA, 32 nt, Homo Sapiens
ugcauuuacuuugaaugucaagucagauuggu

SEQ ID NO: 7870 - RNA, 32 nt, Homo Sapiens
agcucucuggaagguggcccugcccggacccu

SEQ ID NO: 7871 - RNA, 32 nt, Homo Sapiens
auugguauuucugugauucuuuuugcuucuug

SEQ ID NO: 7872 - RNA, 32 nt, Homo Sapiens
guuguugcaguauguuuaaaacacuggagcca

SEQ ID NO: 7873 - RNA, 32 nt, Homo Sapiens
uugcuugguaguguuuuaugacucugcugcag

SEQ ID NO: 7874 - RNA, 32 nt, Homo Sapiens
cugaagaaccuuuuuuggaauuagauuuuagu

SEQ ID NO: 7875 - RNA, 32 nt, Homo Sapiens
cgcugugcucgcgaccccggcuccgggccucu

SEQ ID NO: 7876 - RNA, 32 nt, Homo Sapiens
ccauuuuguggugcggccgccgccauuucgcg

SEQ ID NO: 7877 - RNA, 32 nt, Homo Sapiens
ccgguccggaagaagagguagggcgccgccgu

SEQ ID NO: 7878 - RNA, 32 nt, Homo Sapiens
cccaaucuuugauaacucuuccagaaccuucg

SEQ ID NO: 7879 - RNA, 32 nt, Homo Sapiens
ucuugaaacaaaucaaacucuguuacuaauug

SEQ ID NO: 7880 - RNA, 32 nt, Homo Sapiens
ucuuucuaacuguagcuaucauuacuggcugu

SEQ ID NO: 7881 - RNA, 32 nt, Homo Sapiens
aacaaggagcccaggcacuaguauuuuccucu

SEQ ID NO: 7882 - RNA, 32 nt, Homo Sapiens
acuuacacagguaacagacauucuucaccuuu

SEQ ID NO: 7883 - RNA, 32 nt, Homo Sapiens
guugugacaaccuccagugcaugugggaacag

SEQ ID NO: 7884 - RNA, 32 nt, Homo Sapiens
ggcgagggaagcagcuggaaagagacagaugg

SEQ ID NO: 7885 - RNA, 32 nt, Homo Sapiens
ccucacaaucauggugaaaggcaaggaggagc

SEQ ID NO: 7886 - RNA, 32 nt, Homo Sapiens
cuccggaggcccggcccggccggaggauguuc

SEQ ID NO: 7887 - RNA, 32 nt, Homo Sapiens
agguaggcuuaaacagaagagucuuuagaacu

SEQ ID NO: 7888 - RNA, 32 nt, Homo Sapiens
agauuauuugaaagacaaaauucauagaaaau

SEQ ID NO: 7889 - RNA, 32 nt, Homo Sapiens
uuuauuucuauacuuuuucuguuuuuuaaaca

SEQ ID NO: 7890 - RNA, 32 nt, Homo Sapiens
auauagcaacaucuuuugauaauugugcuuua

SEQ ID NO: 7891 - RNA, 32 nt, Homo Sapiens
caagucuugaaucaguccucagggccccagau

SEQ ID NO: 7892 - RNA, 32 nt, Homo Sapiens
aaagacaugauuucauccuuuuuuauggcuga

SEQ ID NO: 7893 - RNA, 32 nt, Homo Sapiens
cuucuuuacugauaaugucaaguucagguuau

SEQ ID NO: 7894 - RNA, 32 nt, Homo Sapiens
cuguaaauuaccauuuacuagauuagccaaau

SEQ ID NO: 7895 - RNA, 32 nt, Homo Sapiens
uauagugggaaugaaaugggggacugggugau

SEQ ID NO: 7896 - RNA, 32 nt, Homo Sapiens
cuccccggccguggcgccuccgggccagacgc

SEQ ID NO: 7897 - RNA, 32 nt, Homo Sapiens
ccaugggaaugggagugggcacucacacugag

SEQ ID NO: 7898 - RNA, 32 nt, Homo Sapiens
ggcgugggaaaggaggugugagucccgggcgc

SEQ ID NO: 7899 - RNA, 31 nt, Homo Sapiens
cuccagcggcacuaaugacccgcuccuuuga

SEQ ID NO: 7900 - RNA, 32 nt, Homo Sapiens
gaguggcugcggcuggggagucaggagugugc

SEQ ID NO: 7901 - RNA, 32 nt, Homo Sapiens
cuucccccgaccaugcugggaauccagaaaca

SEQ ID NO: 7902 - RNA, 32 nt, Homo Sapiens
cugcucgaggccugggugcuuuggugucggag

SEQ ID NO: 7903 - RNA, 31 nt, Homo Sapiens
uuacccagcagcagguuaccaagggcugucu

SEQ ID NO: 7904 - RNA, 32 nt, Homo Sapiens
aaggggaggagcugagcccuacucuugcaaga

SEQ ID NO: 7905 - RNA, 32 nt, Homo Sapiens
gaaggccuccagcuccuccgcucugcccuggu

SEQ ID NO: 7906 - RNA, 32 nt, Homo Sapiens
uuuuagguaacaagacuccaccacugaguggc

SEQ ID NO: 7907 - RNA, 32 nt, Homo Sapiens
uccaagcgcccuccccacccugacguuguggg

SEQ ID NO: 7908 - RNA, 32 nt, Homo Sapiens
ggcagguggggccgccgcggaacuccaggucc

SEQ ID NO: 7909 - RNA, 32 nt, Homo Sapiens
caaauguucccucccccgacauauaucauggc

SEQ ID NO: 7910 - RNA, 32 nt, Homo Sapiens
uugcggcgaccucgccuuccccggccgcgagc

SEQ ID NO: 7911 - RNA, 32 nt, Homo Sapiens
agaugcccaagccagggcccugaccaucuucu

SEQ ID NO: 7912 - RNA, 32 nt, Homo Sapiens
gcaggacugacuucccccuuucuguuguuugc

SEQ ID NO: 7913 - RNA, 32 nt, Homo Sapiens
accuuggagcccacucaccugguccuguuguu

SEQ ID NO: 7914 - RNA, 32 nt, Homo Sapiens
ccagccucaucccacagccagcugacccucag

SEQ ID NO: 7915 - RNA, 32 nt, Homo Sapiens
augcucugacuccugugaaggcacagccagcg

SEQ ID NO: 7916 - RNA, 32 nt, Homo Sapiens
ggaaggaccaucuggggguucagacacuggca

SEQ ID NO: 7917 - RNA, 32 nt, Homo Sapiens
aucucggcuuuggauauuggagcccacguggg

SEQ ID NO: 7918 - RNA, 32 nt, Homo Sapiens
uauuugcggcgucagucuuuuucuguuguaac

SEQ ID NO: 7919 - RNA, 32 nt, Homo Sapiens
gcaacuuugggguugaacuuacuugaauggau

SEQ ID NO: 7920 - RNA, 32 nt, Homo Sapiens
uggugcugcucggggauggacuccaugcacag

SEQ ID NO: 7921 - RNA, 32 nt, Homo Sapiens
uuaacguuggugccggcucccucccggcuccu

SEQ ID NO: 7922 - RNA, 32 nt, Homo Sapiens
caagggcccaaccgugugcauacaucgucugc

SEQ ID NO: 7923 - RNA, 32 nt, Homo Sapiens
uuugcuucuuccuuugaauucucuaaaauagg

SEQ ID NO: 7924 - RNA, 32 nt, Homo Sapiens
guuuguaaagcaauaaaucuugacuugaaauc

SEQ ID NO: 7925 - RNA, 32 nt, Homo Sapiens
ugucuggaaacuucuguaaaucuuauguuuua

SEQ ID NO: 7926 - RNA, 32 nt, Homo Sapiens
gaacuccccacuuccaaccugguauggcuccu

SEQ ID NO: 7927 - RNA, 32 nt, Homo Sapiens
uuucaggccccggacaggaggcagugccgcuu

SEQ ID NO: 7928 - RNA, 30 nt, Homo Sapiens
gugugcuggggcgagcgggagcgggcgagg

SEQ ID NO: 7929 - RNA, 32 nt, Homo Sapiens
ggcgacuguacgcgccuccgccgcccccgaga

SEQ ID NO: 7930 - RNA, 32 nt, Homo Sapiens
agcuccgucaucugcggggcuucuggguggcu

SEQ ID NO: 7931 - RNA, 31 nt, Homo Sapiens
ugccacggggcggcuagcugaguuaauguua

SEQ ID NO: 7932 - RNA, 32 nt, Homo Sapiens
gcgcauccugcagggcuucuccuccucugucu

SEQ ID NO: 7933 - RNA, 32 nt, Homo Sapiens
gucaaugauugaugggcaaaaauguacaacac

SEQ ID NO: 7934 - RNA, 32 nt, Homo Sapiens
agacugaaacaaugcauuuauauaauauguau

SEQ ID NO: 7935 - RNA, 32 nt, Homo Sapiens
caucugaugccuucccaaccacugccgaguuu

SEQ ID NO: 7936 - RNA, 32 nt, Homo Sapiens
cagcccugacaguguugggggaugugaaugag

SEQ ID NO: 7937 - RNA, 32 nt, Homo Sapiens
aaaauauuauuagaacucugguaaaaaaaaaa

SEQ ID NO: 7938 - RNA, 32 nt, Homo Sapiens
guccugugcagggcaccugcguggcugacagc

SEQ ID NO: 7939 - RNA, 32 nt, Homo Sapiens
uuuguagaaagcaaacaaaauuguucuuggga

SEQ ID NO: 7940 - RNA, 32 nt, Homo Sapiens
agccuuaaaaacaauaggccugggaguguuug

SEQ ID NO: 7941 - RNA, 32 nt, Homo Sapiens
acugaauuacaauauuugcuuaacaguagauu

SEQ ID NO: 7942 - RNA, 32 nt, Homo Sapiens
agccuuuguaaauaucaauauaauguaccaau

SEQ ID NO: 7943 - RNA, 32 nt, Homo Sapiens
gagcuugcagugagccgagaucgugccacugc

SEQ ID NO: 7944 - RNA, 32 nt, Homo Sapiens
uguacaugggauguaaaacaaacaaguguauc

SEQ ID NO: 7945 - RNA, 32 nt, Homo Sapiens
aacccuuuuuucugcuaaaacuacucuuuuua

SEQ ID NO: 7946 - RNA, 32 nt, Homo Sapiens
uaagcuuugcaucucuuacaagaggggagcua

SEQ ID NO: 7947 - RNA, 32 nt, Homo Sapiens
auguggggaaaacaccuuuuccuucugguuuu

SEQ ID NO: 7948 - RNA, 32 nt, Homo Sapiens
ggagccagccccacccaccccugagaacagag

SEQ ID NO: 7949 - RNA, 32 nt, Homo Sapiens
cuagagucagagguuccgguugagaucaaguu

SEQ ID NO: 7950 - RNA, 32 nt, Homo Sapiens
agguguaccccaaacagaaggcacauggaucu

SEQ ID NO: 7951 - RNA, 32 nt, Homo Sapiens
auugugugugauguucaaauaaagugguaucu

SEQ ID NO: 7952 - RNA, 32 nt, Homo Sapiens
cuauuauuuaaagaaguauuugugaaaugaaa

SEQ ID NO: 7953 - RNA, 32 nt, Homo Sapiens
acucuggaagcagcgugugaaacagcggggga

SEQ ID NO: 7954 - RNA, 32 nt, Homo Sapiens
cuugcaucccugacccagcaucagaaaacaca

SEQ ID NO: 7955 - RNA, 32 nt, Homo Sapiens
gugucauauacagauagcuccgaugacaucug

SEQ ID NO: 7956 - RNA, 30 nt, Homo Sapiens
cuaaguggggagaugggggaaauccaugga

SEQ ID NO: 7957 - RNA, 32 nt, Homo Sapiens
ucucuccucuucccuuuccgggugcacggcga

SEQ ID NO: 7958 - RNA, 32 nt, Homo Sapiens
cucccaccaggccagcucuccucccacaacag

SEQ ID NO: 7959 - RNA, 32 nt, Homo Sapiens
acaacauucuaccaguaugcacuguuuucuaa

SEQ ID NO: 7960 - RNA, 32 nt, Homo Sapiens
gcucugcgcgcccuuccaacgaauaauagaaa

SEQ ID NO: 7961 - RNA, 32 nt, Homo Sapiens
ugaaggggaaaauuugugcugcuguuagugca

SEQ ID NO: 7962 - RNA, 32 nt, Homo Sapiens
ucggccugcaguggcgcgacuguguacgccgc

SEQ ID NO: 7963 - RNA, 32 nt, Homo Sapiens
accugcuccuucccugggcccagcuaaaggca

SEQ ID NO: 7964 - RNA, 32 nt, Homo Sapiens
gggaaggaacuaaagguguuugcacuucaugu

SEQ ID NO: 7965 - RNA, 32 nt, Homo Sapiens
ccugacugcccggacccugggguguggagcuc

SEQ ID NO: 7966 - RNA, 32 nt, Homo Sapiens
accauuuuguucacugauacaaaaaaaaaaaa

SEQ ID NO: 7967 - RNA, 32 nt, Homo Sapiens
gcauggaugucuguaauauacacacacauaua

SEQ ID NO: 7968 - RNA, 32 nt, Homo Sapiens
acacuucaugcugcugccccagccuucccgca

SEQ ID NO: 7969 - RNA, 32 nt, Homo Sapiens
uccaaggaggguucuuccuuccugugggguca

SEQ ID NO: 7970 - RNA, 32 nt, Homo Sapiens
gaauaaguuauugcaguuuaucauucaagugu

SEQ ID NO: 7971 - RNA, 31 nt, Homo Sapiens
cguggucugagguccgcggcagggucccgca

SEQ ID NO: 7972 - RNA, 32 nt, Homo Sapiens
gacaggcgccgccucgcccccgggcccuuucg

SEQ ID NO: 7973 - RNA, 32 nt, Homo Sapiens
ggcagggagaaaggaacauccggaacagccaa

SEQ ID NO: 7974 - RNA, 32 nt, Homo Sapiens
aaccugcggggcuggggcgcgcgccaugggcc

SEQ ID NO: 7975 - RNA, 32 nt, Homo Sapiens
ucuuccucuuggcgccagcuucuucugcuccu

SEQ ID NO: 7976 - RNA, 32 nt, Homo Sapiens
gccgaggaggcacguggagggccuccuuccug

SEQ ID NO: 7977 - RNA, 32 nt, Homo Sapiens
uugcauugacuucacucccaagagguagaugc

SEQ ID NO: 7978 - RNA, 29 nt, Homo Sapiens
guggggacagagggcaggacgcccaggcu

SEQ ID NO: 7979 - RNA, 32 nt, Homo Sapiens
aacucgcagagggaagggaggggcugagcugu

SEQ ID NO: 7980 - RNA, 32 nt, Homo Sapiens
cuugaagagcugaugaagcccuugaagguagu

SEQ ID NO: 7981 - RNA, 32 nt, Homo Sapiens
cuuucacuucgggacauuuaauaauggaccaa

SEQ ID NO: 7982 - RNA, 32 nt, Homo Sapiens
cccagucugaccagcaagucccggggucaccc

SEQ ID NO: 7983 - RNA, 32 nt, Homo Sapiens
accucacccagcaaaacaaaagcuguguggcu

SEQ ID NO: 7984 - RNA, 32 nt, Homo Sapiens
aggugccugccagcacgcccagcuaauuuuug

SEQ ID NO: 7985 - RNA, 32 nt, Homo Sapiens
aagcggcguccguggccgcccgaggcccuccc

SEQ ID NO: 7986 - RNA, 30 nt, Homo Sapiens
gcccucauauugccugccuaaaucuugggu

SEQ ID NO: 7987 - RNA, 32 nt, Homo Sapiens
aaagaccuuuugagcaggcagaaacugugcgu

SEQ ID NO: 7988 - RNA, 32 nt, Homo Sapiens
cauuucauacccaugguauuuuauaccuucug

SEQ ID NO: 7989 - RNA, 32 nt, Homo Sapiens
acaaacauuuuaaugugguuuuguuguuuucc

SEQ ID NO: 7990 - RNA, 32 nt, Homo Sapiens
uucuuaagauaaaaaggcaacuauauccauug

SEQ ID NO: 7991 - RNA, 31 nt, Homo Sapiens
uuucgggagcccccaaaacagccugagcaaa

SEQ ID NO: 7992 - RNA, 32 nt, Homo Sapiens
ggaagucaccuggcuggaccaagcccucuccg

SEQ ID NO: 7993 - RNA, 32 nt, Homo Sapiens
ucauuacaaaauuuagaaauagauaacugaag

SEQ ID NO: 7994 - RNA, 32 nt, Homo Sapiens
agccccagacugcuccacugaggcccaugcua

SEQ ID NO: 7995 - RNA, 32 nt, Homo Sapiens
ggccuggucaggcucuccagguggucagaggg

SEQ ID NO: 7996 - RNA, 32 nt, Homo Sapiens
cagucccucccagcugcaguaccagugccaug

SEQ ID NO: 7997 - RNA, 32 nt, Homo Sapiens
uuguauuuguuguuaaaugccuaagaaguuuu

SEQ ID NO: 7998 - RNA, 32 nt, Homo Sapiens
gcauuccuaacacaauucagugguacuuggaa

SEQ ID NO: 7999 - RNA, 32 nt, Homo Sapiens
ggaauccaaacaccugauacggaaugaugacu

SEQ ID NO: 8000 - RNA, 32 nt, Homo Sapiens
cagacaucaguuccaugguguuaauuugaaau

SEQ ID NO: 8001 - RNA, 32 nt, Homo Sapiens
ccggucucccccacccgacugcugaucugcau

SEQ ID NO: 8002 - RNA, 32 nt, Homo Sapiens
cucacaugauuauggaggcugccaagucccaa

SEQ ID NO: 8003 - RNA, 32 nt, Homo Sapiens
ggugauuaaaauuuauucuuuagguggcuagg

SEQ ID NO: 8004 - RNA, 32 nt, Homo Sapiens
ucuuguaacacugcacaugcaagaugugagca

SEQ ID NO: 8005 - RNA, 32 nt, Homo Sapiens
gugggcaggaggagcugaggggcuggggcugg

SEQ ID NO: 8006 - RNA, 32 nt, Homo Sapiens
guugcagacauuuaagcaguuagaaacucugc

SEQ ID NO: 8007 - RNA, 32 nt, Homo Sapiens
gaugcuuuuuaaaaauguuucuggucugaaca

SEQ ID NO: 8008 - RNA, 32 nt, Homo Sapiens
uuugauaaauuaaaggaaaauaucuucauaaa

SEQ ID NO: 8009 - RNA, 32 nt, Homo Sapiens
guaaauagaauuggguuauauuugaaauugcu

SEQ ID NO: 8010 - RNA, 32 nt, Homo Sapiens
guacccgaccuucccuucucccuugagugcuu

SEQ ID NO: 8011 - RNA, 32 nt, Homo Sapiens
uccgcccgcccggcguccgaccccuucagcgg

SEQ ID NO: 8012 - RNA, 32 nt, Homo Sapiens
gcugcugucccucccccuugucuuucccuuca

SEQ ID NO: 8013 - RNA, 32 nt, Homo Sapiens
cuuccuucggugugguaucuuuugccacaucc

SEQ ID NO: 8014 - RNA, 32 nt, Homo Sapiens
uugugcuccccucccccagagcgggugggcgg

SEQ ID NO: 8015 - RNA, 29 nt, Homo Sapiens
ccaggccggggacacaggagccggugugu

SEQ ID NO: 8016 - RNA, 32 nt, Homo Sapiens
guggucucucagcuguucugcccucauacccu

SEQ ID NO: 8017 - RNA, 31 nt, Homo Sapiens
cuggccucacggagcucccaguccaugucac

SEQ ID NO: 8018 - RNA, 32 nt, Homo Sapiens
ucuccccgccccaucuucaaggcucagcgacu

SEQ ID NO: 8019 - RNA, 32 nt, Homo Sapiens
ggaggagaugaggauggagggcugggaggaua

SEQ ID NO: 8020 - RNA, 32 nt, Homo Sapiens
aucuguuuggacuauguuuucuuuucuucucc

SEQ ID NO: 8021 - RNA, 32 nt, Homo Sapiens
uuauggcguuuuucucgucccccucccugccc

SEQ ID NO: 8022 - RNA, 32 nt, Homo Sapiens
agaagccaaucacgucgccgcgguccugguuc

SEQ ID NO: 8023 - RNA, 32 nt, Homo Sapiens
uuacaggugugagccauggcacccagcccuag

SEQ ID NO: 8024 - RNA, 31 nt, Homo Sapiens
ccagcuggucccuccauucagggucccugac

SEQ ID NO: 8025 - RNA, 32 nt, Homo Sapiens
auguaggacaaagaaaucaucuuagaacuguc

SEQ ID NO: 8026 - RNA, 32 nt, Homo Sapiens
gacgaagcaggagccgcggggcugggaggauu

SEQ ID NO: 8027 - RNA, 32 nt, Homo Sapiens
gcugagacuuaccaccuggaaagccaccaggc

SEQ ID NO: 8028 - RNA, 32 nt, Homo Sapiens
gagggccgcgggugcaggccgcagugacaggg

SEQ ID NO: 8029 - RNA, 32 nt, Homo Sapiens
aaccugagacuggaccugaggagaccucagcc

SEQ ID NO: 8030 - RNA, 32 nt, Homo Sapiens
uuaauagaaauuauauagcagauucuuuguug

SEQ ID NO: 8031 - RNA, 32 nt, Homo Sapiens
uuaugucucaaaaguauaaaaaacuuuaauac

SEQ ID NO: 8032 - RNA, 32 nt, Homo Sapiens
cucccacagccuggucccugauacugggcucu

SEQ ID NO: 8033 - RNA, 32 nt, Homo Sapiens
cgucgcccaggcuggaaugcaguggugcgauc

SEQ ID NO: 8034 - RNA, 32 nt, Homo Sapiens
uuuauaaacuggaggugacaaacaaggaagga

SEQ ID NO: 8035 - RNA, 32 nt, Homo Sapiens
gggcuguuauaaauaaagcuguuaugaacauu

SEQ ID NO: 8036 - RNA, 32 nt, Homo Sapiens
uaccuauuuuuccugccucguuuccgaaaugg

SEQ ID NO: 8037 - RNA, 32 nt, Homo Sapiens
guccccaggucgccggggcggcgugggaaccc

SEQ ID NO: 8038 - RNA, 32 nt, Homo Sapiens
uuggauggacgaaugcugcuucaugcgacucc

SEQ ID NO: 8039 - RNA, 31 nt, Homo Sapiens
ccuaagcugccggcugcaggagccagagaag

SEQ ID NO: 8040 - RNA, 32 nt, Homo Sapiens
uggcgaauauuuugagugucugcucuuuucca

SEQ ID NO: 8041 - RNA, 32 nt, Homo Sapiens
uuggcccauuacaauacugcuuucucagguuc

SEQ ID NO: 8042 - RNA, 32 nt, Homo Sapiens
caugaaccaacccaccaugaaaccagccaacc

SEQ ID NO: 8043 - RNA, 32 nt, Homo Sapiens
ugcagcuccacggggacuggccucucugcacg

SEQ ID NO: 8044 - RNA, 32 nt, Homo Sapiens
auauuuuggcauucuauagacacaucuccuau

SEQ ID NO: 8045 - RNA, 31 nt, Homo Sapiens
ccgucuaaaugccagaaccagcggguggccu

SEQ ID NO: 8046 - RNA, 32 nt, Homo Sapiens
auaaaauaguauguaccaaaaaauauugcuuc

SEQ ID NO: 8047 - RNA, 32 nt, Homo Sapiens
aagguuaaaaaauaaaucaugacugaaucugc

SEQ ID NO: 8048 - RNA, 32 nt, Homo Sapiens
caucugcaagaggcaaguuugugucaccauca

SEQ ID NO: 8049 - RNA, 32 nt, Homo Sapiens
ccacaccuacccacccagugggcccugaagca

SEQ ID NO: 8050 - RNA, 32 nt, Homo Sapiens
aacaaaauacucaccaggacgaggaagaggac

SEQ ID NO: 8051 - RNA, 32 nt, Homo Sapiens
gaacuaggaucucacaggaaaagcuggguaac

SEQ ID NO: 8052 - RNA, 32 nt, Homo Sapiens
uaauacuaauguuuacagauauguuucuguuu

SEQ ID NO: 8053 - RNA, 32 nt, Homo Sapiens
auaaaaucacuggauuauauugcagcauauuu

SEQ ID NO: 8054 - RNA, 32 nt, Homo Sapiens
ggccgcgccccuggcccgcccgggcuccaagu

SEQ ID NO: 8055 - RNA, 27 nt, Homo Sapiens
aauaauaaacguguucugauauuuuua

SEQ ID NO: 8056 - RNA, 32 nt, Homo Sapiens
cagagcucuaaagauauuugaaugcucagccu

SEQ ID NO: 8057 - RNA, 32 nt, Homo Sapiens
auugcuuccuucccugugcuuccuggccacuu

SEQ ID NO: 8058 - RNA, 32 nt, Homo Sapiens
auggaguccuaaaguauaucugauggauagaa

SEQ ID NO: 8059 - RNA, 32 nt, Homo Sapiens
cucaguuuuuugauuuuuuauuuggguagguu

SEQ ID NO: 8060 - RNA, 32 nt, Homo Sapiens
guauuucuuugcuuuguagaguauuuuuauug

SEQ ID NO: 8061 - RNA, 32 nt, Homo Sapiens
gccgacacuuuccuuuggucuuucugaaucgu

SEQ ID NO: 8062 - RNA, 32 nt, Homo Sapiens
gcaaaauuguguccuauaagcauuccuuuuau

SEQ ID NO: 8063 - RNA, 32 nt, Homo Sapiens
aggcugccuuuccucagcauagcugacuuguc

SEQ ID NO: 8064 - RNA, 32 nt, Homo Sapiens
aauaagaugacaugcauaagauaacaaagcuu

SEQ ID NO: 8065 - RNA, 32 nt, Homo Sapiens
uguggaaaagaauggagaggggacaaugacac

SEQ ID NO: 8066 - RNA, 32 nt, Homo Sapiens
gugggcugcacagauauuuuaggaauuucaga

SEQ ID NO: 8067 - RNA, 32 nt, Homo Sapiens
gauguuggugccugcguuacugaauuugcaca

SEQ ID NO: 8068 - RNA, 32 nt, Homo Sapiens
cuuucacugacauuuuaaucauuauuuuaaaa

SEQ ID NO: 8069 - RNA, 29 nt, Homo Sapiens
uguagaauagugaugucuaaaaauuaaag

SEQ ID NO: 8070 - RNA, 32 nt, Homo Sapiens
ucccagauuggaucucuuuuucauauggaucu

SEQ ID NO: 8071 - RNA, 32 nt, Homo Sapiens
uuuaaagccuauuugccuuugccguuacccag

SEQ ID NO: 8072 - RNA, 32 nt, Homo Sapiens
auaucuguauauauauuggguauguuuuaagg

SEQ ID NO: 8073 - RNA, 32 nt, Homo Sapiens
uucuugcuuaauaaguuuuuuaaaaccacgau

SEQ ID NO: 8074 - RNA, 32 nt, Homo Sapiens
aggaaaugcccggcuccccauggcuguggcca

SEQ ID NO: 8075 - RNA, 32 nt, Homo Sapiens
ggacgcaugcagacaguucgggacgccuuugc

SEQ ID NO: 8076 - RNA, 32 nt, Homo Sapiens
ucagccuacacagacacacacacacacacaga

SEQ ID NO: 8077 - RNA, 32 nt, Homo Sapiens
uucuuauuucccuuuacaguucugcaguucca

SEQ ID NO: 8078 - RNA, 32 nt, Homo Sapiens
ggguggugccuggccugggaggucaguggaua

SEQ ID NO: 8079 - RNA, 30 nt, Homo Sapiens
cgcacucggaagcuugugggcucugaggag

SEQ ID NO: 8080 - RNA, 32 nt, Homo Sapiens
uucucuugaacagccucuucugauguuucuag

SEQ ID NO: 8081 - RNA, 32 nt, Homo Sapiens
aaccuauuugauguucaaauaaagaauuaaac

SEQ ID NO: 8082 - RNA, 32 nt, Homo Sapiens
aauugcaugcauguugaaauuuuuuagcagua

SEQ ID NO: 8083 - RNA, 32 nt, Homo Sapiens
gggcggaaguuccacgccaagauacuggauuc

SEQ ID NO: 8084 - RNA, 32 nt, Homo Sapiens
aucaacacucccagcccuugcugggggcuccu

SEQ ID NO: 8085 - RNA, 32 nt, Homo Sapiens
cucccgacaucccgccuugaggaggcugaggc

SEQ ID NO: 8086 - RNA, 32 nt, Homo Sapiens
agcagaugccagcagugccugcccgugucccc

SEQ ID NO: 8087 - RNA, 32 nt, Homo Sapiens
aguguagugaauguggcaagguuuuuaauaga

SEQ ID NO: 8088 - RNA, 32 nt, Homo Sapiens
agcgacuguggcggccgcagguugcacgccag

SEQ ID NO: 8089 - RNA, 32 nt, Homo Sapiens
gagccaagaauguggggugcggucaggaccug

SEQ ID NO: 8090 - RNA, 32 nt, Homo Sapiens
uccaccguuacccccaggagauccuggacugc

SEQ ID NO: 8091 - RNA, 32 nt, Homo Sapiens
ugcaacuugaggcucugcuagcaagccaccag

SEQ ID NO: 8092 - RNA, 32 nt, Homo Sapiens
uuguugagaaaauuaucucuaacuguucuagu

SEQ ID NO: 8093 - RNA, 32 nt, Homo Sapiens
cuugcugcagggugcuucggauccugaucgug

SEQ ID NO: 8094 - RNA, 27 nt, Homo Sapiens
ucacgguuucucgucagccccgucacu

SEQ ID NO: 8095 - RNA, 32 nt, Homo Sapiens
acaauaacuucucccccucucuuuuuacucug

SEQ ID NO: 8096 - RNA, 32 nt, Homo Sapiens
uauuaaaaauuccauuugguuaaugacauuaa

SEQ ID NO: 8097 - RNA, 32 nt, Homo Sapiens
cauccugggugggacgauggcuccugccuuga

SEQ ID NO: 8098 - RNA, 32 nt, Homo Sapiens
uucuucccauccccccuccuccugacaaacca

SEQ ID NO: 8099 - RNA, 32 nt, Homo Sapiens
agcugggcgugguggcgggcgccugugguccc

SEQ ID NO: 8100 - RNA, 32 nt, Homo Sapiens
aaaaaagcagcauuagagugccagaauuagca

SEQ ID NO: 8101 - RNA, 32 nt, Homo Sapiens
uaaagucugaccacguucccagggccuucacu

SEQ ID NO: 8102 - RNA, 32 nt, Homo Sapiens
uggaaagagaaauucuugaggacccuggcaag

SEQ ID NO: 8103 - RNA, 32 nt, Homo Sapiens
cucuugcuguagagagcagcugcuucugccag

SEQ ID NO: 8104 - RNA, 32 nt, Homo Sapiens
ugguuccuuuucugcucuguuuuguuuucccu

SEQ ID NO: 8105 - RNA, 32 nt, Homo Sapiens
ucggugggcgcgggggaauccgaaacggcuca

SEQ ID NO: 8106 - RNA, 32 nt, Homo Sapiens
aaagccgcgggaaggguacuccaggcgagagg

SEQ ID NO: 8107 - RNA, 32 nt, Homo Sapiens
gguaaacauuccuccagccuccccuccccugg

SEQ ID NO: 8108 - RNA, 30 nt, Homo Sapiens
uggccucuggacugaggagggcuggaccag

SEQ ID NO: 8109 - RNA, 32 nt, Homo Sapiens
cccagagaggagaggaggcuguugguaggaaa

SEQ ID NO: 8110 - RNA, 32 nt, Homo Sapiens
cuuugggaggcugaggaggguggaucacuuga

SEQ ID NO: 8111 - RNA, 32 nt, Homo Sapiens
gauuggacuuauuuuccaaccagauaacauuu

SEQ ID NO: 8112 - RNA, 32 nt, Homo Sapiens
cuaaagaaaaagacacaggaaagcugucuguc

SEQ ID NO: 8113 - RNA, 32 nt, Homo Sapiens
uuuuugaaaaucgauaauaaaaagcgguuggu

SEQ ID NO: 8114 - RNA, 32 nt, Homo Sapiens
uaaaugcuucaaagcugaagaaucuaaauguc

SEQ ID NO: 8115 - RNA, 32 nt, Homo Sapiens
gaaggagcacugggcuaggggucaggggucag

SEQ ID NO: 8116 - RNA, 32 nt, Homo Sapiens
ccuagugaagccgccacccccagccugucccc

SEQ ID NO: 8117 - RNA, 32 nt, Homo Sapiens
cuguaauucauaaauagaauuuuuucauacau

SEQ ID NO: 8118 - RNA, 32 nt, Homo Sapiens
caaccccaauuaccaauuuaguugaggcugga

SEQ ID NO: 8119 - RNA, 32 nt, Homo Sapiens
ccgcgguccgcgcugaucuccaggcgcucagu

SEQ ID NO: 8120 - RNA, 32 nt, Homo Sapiens
aaauguccuaauaaucuacucuauuuauaucu

SEQ ID NO: 8121 - RNA, 32 nt, Homo Sapiens
cgcccccggccgcgaggggccugcccaagcug

SEQ ID NO: 8122 - RNA, 32 nt, Homo Sapiens
uuuugaaaauuugaucuucacaagaguugccu

SEQ ID NO: 8123 - RNA, 32 nt, Homo Sapiens
ggacgacagucaacuggagcuagguguugacc

SEQ ID NO: 8124 - RNA, 32 nt, Homo Sapiens
gaauguuggugaugaagcugaguucaggacuc

SEQ ID NO: 8125 - RNA, 31 nt, Homo Sapiens
gaccugaaaguggcacaagugcuguuucuau

SEQ ID NO: 8126 - RNA, 32 nt, Homo Sapiens
aaacuguauagaguuuauaaaaugacuaugga

SEQ ID NO: 8127 - RNA, 32 nt, Homo Sapiens
cuuggcagaugacugccuccucacuuagcaga

SEQ ID NO: 8128 - RNA, 32 nt, Homo Sapiens
gauucagugggugugauacugauguguaggca

SEQ ID NO: 8129 - RNA, 30 nt, Homo Sapiens
gcccuucucggcugcauccuaugccggccg

SEQ ID NO: 8130 - RNA, 32 nt, Homo Sapiens
gcagaauaccauauggccaccuggacauuggg

SEQ ID NO: 8131 - RNA, 32 nt, Homo Sapiens
caggccccauacugagccuggacugaaaguau

SEQ ID NO: 8132 - RNA, 32 nt, Homo Sapiens
gguaucuuucuguugugugacuucuacaaaug

SEQ ID NO: 8133 - RNA, 30 nt, Homo Sapiens
agaaguacugauaggaccuuuaucuggaua

SEQ ID NO: 8134 - RNA, 32 nt, Homo Sapiens
auaaaguguucuacagucagccagcacuaaac

SEQ ID NO: 8135 - RNA, 32 nt, Homo Sapiens
acaggagccaaggagguccugcugcuggcccg

SEQ ID NO: 8136 - RNA, 32 nt, Homo Sapiens
agcaggcggcgaggccucgaggggcaggggcg

SEQ ID NO: 8137 - RNA, 32 nt, Homo Sapiens
uguaccccuaaaagaagagcuggaguaaggac

SEQ ID NO: 8138 - RNA, 32 nt, Homo Sapiens
cucugacgcaguuuccucauuucaucagaccu

SEQ ID NO: 8139 - RNA, 27 nt, Homo Sapiens
guuuuuguaaauaaguuuuauuggagc

SEQ ID NO: 8140 - RNA, 32 nt, Homo Sapiens
caaccucacggucccuccuccagccgcccccg

SEQ ID NO: 8141 - RNA, 32 nt, Homo Sapiens
ugcggugcagaaaaagaacaaccaaaaagaaa

SEQ ID NO: 8142 - RNA, 32 nt, Homo Sapiens
gacagagucuugcuuugucacccaggcuggag

SEQ ID NO: 8143 - RNA, 32 nt, Homo Sapiens
gagagagcagagccccuuugccugggcacauc

SEQ ID NO: 8144 - RNA, 32 nt, Homo Sapiens
acaaacgccuggccccgccgggaccagcucug

SEQ ID NO: 8145 - RNA, 32 nt, Homo Sapiens
gauagaugccugcauggguccuggcgauuauu

SEQ ID NO: 8146 - RNA, 32 nt, Homo Sapiens
uucuguuugccccauuuccccaguccagugga

SEQ ID NO: 8147 - RNA, 32 nt, Homo Sapiens
agucugggacgcgccgccgccaugaucauccc

SEQ ID NO: 8148 - RNA, 32 nt, Homo Sapiens
cauggccaguuuccagcgccgcgcucuucguu

SEQ ID NO: 8149 - RNA, 32 nt, Homo Sapiens
accagggaccaggcugagacucggggcgccag

SEQ ID NO: 8150 - RNA, 32 nt, Homo Sapiens
aacaaacuccaggcccuugguugcgggucgcu

SEQ ID NO: 8151 - RNA, 32 nt, Homo Sapiens
uucagaaugaauuuguaccuauaaagcauaag

SEQ ID NO: 8152 - RNA, 32 nt, Homo Sapiens
acuuagauacauccccucccccugcuggggcc

SEQ ID NO: 8153 - RNA, 32 nt, Homo Sapiens
aaacugugaccucagcuucagagugucagggc

SEQ ID NO: 8154 - RNA, 32 nt, Homo Sapiens
cagcugauaaccucguagggagcaaccccagg

SEQ ID NO: 8155 - RNA, 32 nt, Homo Sapiens
uucuuuuuauaaguauucauuuugaaugugca

SEQ ID NO: 8156 - RNA, 31 nt, Homo Sapiens
ucucugugaaacacucuaccuuguuuuuggu

SEQ ID NO: 8157 - RNA, 32 nt, Homo Sapiens
uggcacccaagcagagcuaggagguccagguc

SEQ ID NO: 8158 - RNA, 32 nt, Homo Sapiens
acauauauacacaaccaaggugugaucugaau

SEQ ID NO: 8159 - RNA, 32 nt, Homo Sapiens
aguuguggucugcguggcuuguguguugggaa

SEQ ID NO: 8160 - RNA, 32 nt, Homo Sapiens
auggugaaauucugucucuacuaaaaauacaa

SEQ ID NO: 8161 - RNA, 32 nt, Homo Sapiens
cuucuauaucauuaggaaaacaucuuaguuga

SEQ ID NO: 8162 - RNA, 32 nt, Homo Sapiens
uauuaaugaaaugaaaugauaauuuggcuuca

SEQ ID NO: 8163 - RNA, 32 nt, Homo Sapiens
aauagaauaauaauaauauaauacaauagcuc

SEQ ID NO: 8164 - RNA, 32 nt, Homo Sapiens
guuuucugccauucuuaaccaaggcugccucu

SEQ ID NO: 8165 - RNA, 32 nt, Homo Sapiens
cggccucccaggccaugcugcagagcggcugg

SEQ ID NO: 8166 - RNA, 32 nt, Homo Sapiens
ucuguuguuuuaaaggaaguggguccgugaca

SEQ ID NO: 8167 - RNA, 32 nt, Homo Sapiens
auuagguauuuucuccaaauguucacugguac

SEQ ID NO: 8168 - RNA, 32 nt, Homo Sapiens
ccuccguggcuggccuggccacggccugcccu

SEQ ID NO: 8169 - RNA, 32 nt, Homo Sapiens
uucaagcaccaccuccacccagccccucccac

SEQ ID NO: 8170 - RNA, 32 nt, Homo Sapiens
gccggcgccucguccagcaguccuaccguuca

SEQ ID NO: 8171 - RNA, 32 nt, Homo Sapiens
cuugccugccuucagagcucuagacagaggcc

SEQ ID NO: 8172 - RNA, 32 nt, Homo Sapiens
uuucauguuuggaguaucaucucugucugggc

SEQ ID NO: 8173 - RNA, 32 nt, Homo Sapiens
ugagggccuacauguccaccacguggucugag

SEQ ID NO: 8174 - RNA, 32 nt, Homo Sapiens
cauccucagaagcuucaacucuggaggcaaug

SEQ ID NO: 8175 - RNA, 32 nt, Homo Sapiens
gucaaagccaaacucaugcacacacacgcaga

SEQ ID NO: 8176 - RNA, 32 nt, Homo Sapiens
uuggcgcauccacaagggcauacacucugcgc

SEQ ID NO: 8177 - RNA, 32 nt, Homo Sapiens
uccauauucuagaucauuuuuuauugaagagc

SEQ ID NO: 8178 - RNA, 32 nt, Homo Sapiens
ccccuucaggguggcagccacccuucagugag

SEQ ID NO: 8179 - RNA, 32 nt, Homo Sapiens
ucucugcagaaaccaaggcuaauugguggugg

SEQ ID NO: 8180 - RNA, 32 nt, Homo Sapiens
aaugaggacuuccauuaaaaugcuaaacauca

SEQ ID NO: 8181 - RNA, 32 nt, Homo Sapiens
ccaaaaagaguccuuccuggggugugggaggc

SEQ ID NO: 8182 - RNA, 32 nt, Homo Sapiens
cacuuccugcaugcgcccccggcaccugacuc

SEQ ID NO: 8183 - RNA, 32 nt, Homo Sapiens
gcaaauuucuauuuagaacuuagugucuuuau

SEQ ID NO: 8184 - RNA, 32 nt, Homo Sapiens
ucguccuucgcguuuugugaaaacaguuggcg

SEQ ID NO: 8185 - RNA, 32 nt, Homo Sapiens
agccagagaaugaaauauauaugaggucucug

SEQ ID NO: 8186 - RNA, 32 nt, Homo Sapiens
uaugucccuguggcuauguuuccaguguccuc

SEQ ID NO: 8187 - RNA, 32 nt, Homo Sapiens
uuuauucuggaaagguuuuguuucugccucaa

SEQ ID NO: 8188 - RNA, 32 nt, Homo Sapiens
ccucacagggcuguugugaggacccagggagu

SEQ ID NO: 8189 - RNA, 32 nt, Homo Sapiens
acugauauuaaacaugcaugcuggauguuuuc

SEQ ID NO: 8190 - RNA, 32 nt, Homo Sapiens
ggaacccgaggggacaccagcucugcacaagu

SEQ ID NO: 8191 - RNA, 32 nt, Homo Sapiens
gggguguuuuaaaaauauauuuuuacaaguau

SEQ ID NO: 8192 - RNA, 32 nt, Homo Sapiens
gccgcaggacgcccgccgugcccgggccauga

SEQ ID NO: 8193 - RNA, 32 nt, Homo Sapiens
acuccuuauaagaaacaaagucucuccuuuuc

SEQ ID NO: 8194 - RNA, 30 nt, Homo Sapiens
ugccaggucugugcuggccacucucauaua

SEQ ID NO: 8195 - RNA, 32 nt, Homo Sapiens
gcuugagcugucugaacuauuuuacauuuuau

SEQ ID NO: 8196 - RNA, 32 nt, Homo Sapiens
ucuugugaggcaaggagauugguucacuaugg

SEQ ID NO: 8197 - RNA, 32 nt, Homo Sapiens
aggaugugcagggcuuccucucagagccgccc

SEQ ID NO: 8198 - RNA, 32 nt, Homo Sapiens
gugaccaggaggaggcugaggggccccgggcu

SEQ ID NO: 8199 - RNA, 32 nt, Homo Sapiens
ggccagcaagcacuguggucuccuuggcugaa

SEQ ID NO: 8200 - RNA, 32 nt, Homo Sapiens
aggcucucggcgcgccgcggcccgcaggcacc

SEQ ID NO: 8201 - RNA, 32 nt, Homo Sapiens
gagcaggugucugagaguacagugcagcccug

SEQ ID NO: 8202 - RNA, 32 nt, Homo Sapiens
cccaggguguuccucccugugacccagccgcc

SEQ ID NO: 8203 - RNA, 29 nt, Homo Sapiens
uagaacugauuuuucagagggaaaaauca

SEQ ID NO: 8204 - RNA, 32 nt, Homo Sapiens
cugccgcguugaccacuggcgucucgcuggug

SEQ ID NO: 8205 - RNA, 32 nt, Homo Sapiens
accagaaaaguaaaaaucuuuuuuaaaagugu

SEQ ID NO: 8206 - RNA, 32 nt, Homo Sapiens
aagacgccguaccuuucuacccucccaccuuu

SEQ ID NO: 8207 - RNA, 32 nt, Homo Sapiens
aagaggaguuugggggguucaggauagggaau

SEQ ID NO: 8208 - RNA, 32 nt, Homo Sapiens
caucgucaagcaugcauacaaccuuuacaagg

SEQ ID NO: 8209 - RNA, 32 nt, Homo Sapiens
cugcaguaggcggcccggggccacaccgcggc

SEQ ID NO: 8210 - RNA, 32 nt, Homo Sapiens
uucucgucaggcuccugcaaccccaggcauga

SEQ ID NO: 8211 - RNA, 32 nt, Homo Sapiens
ucuuaagucagcccucucuauuucaugugcca

SEQ ID NO: 8212 - RNA, 32 nt, Homo Sapiens
aggaucaccgguuucuccugcuucauggacag

SEQ ID NO: 8213 - RNA, 32 nt, Homo Sapiens
cugggggaucggcggcggggggcggcacaggg

SEQ ID NO: 8214 - RNA, 32 nt, Homo Sapiens
uccagaaaugugcaugcagaucagcuguugcc

SEQ ID NO: 8215 - RNA, 32 nt, Homo Sapiens
ggggguggccuucagugcguggcacggagggg

SEQ ID NO: 8216 - RNA, 32 nt, Homo Sapiens
ugcuguguuaaaauaaucacauaugcucuuuu

SEQ ID NO: 8217 - RNA, 32 nt, Homo Sapiens
uuagcuauuucugggugacccagucuauuaaa

SEQ ID NO: 8218 - RNA, 32 nt, Homo Sapiens
accaggcugggaggacagagccagcagcugcc

SEQ ID NO: 8219 - RNA, 32 nt, Homo Sapiens
caaguauuuuuccaugcauucucaggggaucu

SEQ ID NO: 8220 - RNA, 32 nt, Homo Sapiens
gcaccgacucugggggagccugcuggauggcu

SEQ ID NO: 8221 - RNA, 32 nt, Homo Sapiens
gggcuggggcaggagacagaucagggcccacc

SEQ ID NO: 8222 - RNA, 32 nt, Homo Sapiens
ugaacagaggauguuguacacugauuacauuu

SEQ ID NO: 8223 - RNA, 32 nt, Homo Sapiens
gcaccguaucuugcuggacacuggccucggga

SEQ ID NO: 8224 - RNA, 32 nt, Homo Sapiens
cccccggcugggaggucagacccgguguuggu

SEQ ID NO: 8225 - RNA, 32 nt, Homo Sapiens
agaacuaucaaauccaaaauuauuuucaaauc

SEQ ID NO: 8226 - RNA, 32 nt, Homo Sapiens
cauaaaauuuaaagugagaggcaugguuagug

SEQ ID NO: 8227 - RNA, 32 nt, Homo Sapiens
auggagguaauacauacauaguaucaauauug

SEQ ID NO: 8228 - RNA, 32 nt, Homo Sapiens
augagguccuguauggaagaaacuacugaugu

SEQ ID NO: 8229 - RNA, 32 nt, Homo Sapiens
acauucccacuuuuuggaucuuuaccaagcuu

SEQ ID NO: 8230 - RNA, 32 nt, Homo Sapiens
ccccauggcucccagacucugucugugccgag

SEQ ID NO: 8231 - RNA, 32 nt, Homo Sapiens
acuacaggucuccucugagcucuucuaacacu

SEQ ID NO: 8232 - RNA, 32 nt, Homo Sapiens
gggcacaggccgccauucaucauccucucucu

SEQ ID NO: 8233 - RNA, 32 nt, Homo Sapiens
gccgaggccaugcagcgccggggcgcccuguu

SEQ ID NO: 8234 - RNA, 32 nt, Homo Sapiens
cugcccucuucucaucccccagccacaguggc

SEQ ID NO: 8235 - RNA, 32 nt, Homo Sapiens
cacugcacuccagccuggcaacagagugagac

SEQ ID NO: 8236 - RNA, 32 nt, Homo Sapiens
auucuguagaaaguggaacuguuguugcguug

SEQ ID NO: 8237 - RNA, 31 nt, Homo Sapiens
ccccaccugagccagaaccaggcaccauggu

SEQ ID NO: 8238 - RNA, 32 nt, Homo Sapiens
aauugucagccucuggcugugcauuggugcag

SEQ ID NO: 8239 - RNA, 32 nt, Homo Sapiens
uggucgucaccugggcggccagaggcugggau

SEQ ID NO: 8240 - RNA, 32 nt, Homo Sapiens
cagcuacuuaggaggcugaggcaugagaauca

SEQ ID NO: 8241 - RNA, 32 nt, Homo Sapiens
cugagccugguucugcaggggaggaaggcugc

SEQ ID NO: 8242 - RNA, 32 nt, Homo Sapiens
accauuauaauaauauacuaaaauauguacga

SEQ ID NO: 8243 - RNA, 32 nt, Homo Sapiens
agggacacgagcaucacucugcuggacggacc

SEQ ID NO: 8244 - RNA, 32 nt, Homo Sapiens
auccauguaacaaaaccgcacuuguacucccu

SEQ ID NO: 8245 - RNA, 32 nt, Homo Sapiens
cuccccuccccuccagcccaccccugcacagc

SEQ ID NO: 8246 - RNA, 30 nt, Homo Sapiens
ggagagcgcccccagcaccacggaaacuac

SEQ ID NO: 8247 - RNA, 29 nt, Homo Sapiens
uaauugucauauguguaauuguugcauuu

SEQ ID NO: 8248 - RNA, 32 nt, Homo Sapiens
gcaccuuggacacguggacaaggcccaggcgc

SEQ ID NO: 8249 - RNA, 32 nt, Homo Sapiens
aaggcccagaaagucuuugggcauugccaaga

SEQ ID NO: 8250 - RNA, 31 nt, Homo Sapiens
ggagcgagucacugccuccucugagcagaga

SEQ ID NO: 8251 - RNA, 32 nt, Homo Sapiens
gccugacgcacgcgugcugucgggggagggau

SEQ ID NO: 8252 - RNA, 32 nt, Homo Sapiens
uucuacacauauauauauauguauaucuauau

SEQ ID NO: 8253 - RNA, 32 nt, Homo Sapiens
cgccagggccaggaggggagcggcaccuggaa

SEQ ID NO: 8254 - RNA, 32 nt, Homo Sapiens
uuacuacugugugauuuuuguuuggacaucug

SEQ ID NO: 8255 - RNA, 32 nt, Homo Sapiens
aucauguuuguggccgaacgggccccugcacc

SEQ ID NO: 8256 - RNA, 32 nt, Homo Sapiens
cucccuuuucuuuugcccuucccagugccagg

SEQ ID NO: 8257 - RNA, 32 nt, Homo Sapiens
caguggacagauugaggaaauuccuagaucac

SEQ ID NO: 8258 - RNA, 32 nt, Homo Sapiens
auaacucauuauguuucagauaagguaacucc

SEQ ID NO: 8259 - RNA, 32 nt, Homo Sapiens
gaggucaggaggagaagcagacggccugguuc

SEQ ID NO: 8260 - RNA, 32 nt, Homo Sapiens
caccauuaaaacacuuggcugcucugggugcc

SEQ ID NO: 8261 - RNA, 32 nt, Homo Sapiens
uuauguggcuauuuuuaaaagcuguccuccag

SEQ ID NO: 8262 - RNA, 32 nt, Homo Sapiens
aaagcccaguuuccugugugcaugucauggac

SEQ ID NO: 8263 - RNA, 32 nt, Homo Sapiens
ggcccccgcaccgccccauagcgccgcggcgu

SEQ ID NO: 8264 - RNA, 32 nt, Homo Sapiens
ucacggcaaccugggauggccgccgguugcca

SEQ ID NO: 8265 - RNA, 32 nt, Homo Sapiens
cccuguguauaaauauuuacaugugaugucug

SEQ ID NO: 8266 - RNA, 32 nt, Homo Sapiens
gcgcuccacgcgcgugcacacagcuucccugg

SEQ ID NO: 8267 - RNA, 30 nt, Homo Sapiens
gguuuuggagguggcugggcaguggcgggc

SEQ ID NO: 8268 - RNA, 32 nt, Homo Sapiens
acauguaugauugaaugggugccaagugccag

SEQ ID NO: 8269 - RNA, 32 nt, Homo Sapiens
agaccggcacgcccucgccgcgugcugcgcuc

SEQ ID NO: 8270 - RNA, 32 nt, Homo Sapiens
gauuucuccagaaaacacuuugagauacuuaa

SEQ ID NO: 8271 - RNA, 32 nt, Homo Sapiens
gcauuuguggagggagcgcccgcaggccuggu

SEQ ID NO: 8272 - RNA, 32 nt, Homo Sapiens
uggcccuuggcuucucucaccccucccaaauu

SEQ ID NO: 8273 - RNA, 32 nt, Homo Sapiens
cucauuuacaucuguuuuccuguuguauauau

SEQ ID NO: 8274 - RNA, 32 nt, Homo Sapiens
aacucucagaugcuuuuucuuuggauacaaca

SEQ ID NO: 8275 - RNA, 32 nt, Homo Sapiens
cgcccccgagaccgcugacugugaaugacaaa

SEQ ID NO: 8276 - RNA, 32 nt, Homo Sapiens
aaacuucgagggcauuaaggcaauaugguguu

SEQ ID NO: 8277 - RNA, 32 nt, Homo Sapiens
uucaggaagauucuagagagcacgggcagguc

SEQ ID NO: 8278 - RNA, 32 nt, Homo Sapiens
uuauucaaagcaucaauaauuaaaagaauuau

SEQ ID NO: 8279 - RNA, 32 nt, Homo Sapiens
gagauuuagaguauaacagaaacaagugugcu

SEQ ID NO: 8280 - RNA, 32 nt, Homo Sapiens
aacaaaucacacauuuaaaaaaucuguagaau

SEQ ID NO: 8281 - RNA, 32 nt, Homo Sapiens
gguuugaaagagauuuguauuuuaccuaauaa

SEQ ID NO: 8282 - RNA, 32 nt, Homo Sapiens
gagcauuugagauggaagcuuacuuuggaauu

SEQ ID NO: 8283 - RNA, 32 nt, Homo Sapiens
uuccuuuccuuccuuuuucucuaccaggccau

SEQ ID NO: 8284 - RNA, 32 nt, Homo Sapiens
gaaacgaaaguacaaccugcuuugaaauaaau

SEQ ID NO: 8285 - RNA, 32 nt, Homo Sapiens
guuucuccaaaggagcauuuugggaacauucu

SEQ ID NO: 8286 - RNA, 32 nt, Homo Sapiens
ugagacagaaucuggcuguuucccaggcugaa

SEQ ID NO: 8287 - RNA, 32 nt, Homo Sapiens
ccccuucccuucccuaaagugaugggcuuucu

SEQ ID NO: 8288 - RNA, 32 nt, Homo Sapiens
gcaaccgccucaaaauguguaagcaggagaga

SEQ ID NO: 8289 - RNA, 30 nt, Homo Sapiens
gcaguguggggcggucguguccacgcccga

SEQ ID NO: 8290 - RNA, 32 nt, Homo Sapiens
uuccugccucgggcucccaacaugcuggcauu

SEQ ID NO: 8291 - RNA, 30 nt, Homo Sapiens
ucuaaggagggauagggugagucugggaug

SEQ ID NO: 8292 - RNA, 32 nt, Homo Sapiens
agugaguugagaucgugccauugugcuccagc

SEQ ID NO: 8293 - RNA, 32 nt, Homo Sapiens
uuauuuuuauauauuuuuucugacuccuauuu

SEQ ID NO: 8294 - RNA, 32 nt, Homo Sapiens
aacauuguaaaugaaacaccuauauuaacuuu

SEQ ID NO: 8295 - RNA, 32 nt, Homo Sapiens
aaaaauuuagaagaguggcaaauacuauuuua

SEQ ID NO: 8296 - RNA, 32 nt, Homo Sapiens
gagcuaccaaaacuaaauucuuucucugcuau

SEQ ID NO: 8297 - RNA, 29 nt, Homo Sapiens
uaugagcuugacaguuggugaaaacuuuu

SEQ ID NO: 8298 - RNA, 32 nt, Homo Sapiens
ggagguaggggcgcggcuccgcgugccaguug

SEQ ID NO: 8299 - RNA, 32 nt, Homo Sapiens
ucccaaaugcaaaagccagagaaaggcagaug

SEQ ID NO: 8300 - RNA, 32 nt, Homo Sapiens
guggccacuuccuccugccccagcccaaccuc

SEQ ID NO: 8301 - RNA, 32 nt, Homo Sapiens
auaucuggcugccauuuuucugaugcauuuau

SEQ ID NO: 8302 - RNA, 32 nt, Homo Sapiens
gguaacuggaaagcgggcacugugcacgcagc

SEQ ID NO: 8303 - RNA, 32 nt, Homo Sapiens
agauauuugccaugcauacaauuaguaaagga

SEQ ID NO: 8304 - RNA, 32 nt, Homo Sapiens
cauaacucagaauagacugcaugaaauggaau

SEQ ID NO: 8305 - RNA, 32 nt, Homo Sapiens
aagaauccgagcccugcugcccuugccucagc

SEQ ID NO: 8306 - RNA, 32 nt, Homo Sapiens
uugcauugcauucagaguaaccugugugcaua

SEQ ID NO: 8307 - RNA, 32 nt, Homo Sapiens
gauccuccucaacaugagggugucaggguccc

SEQ ID NO: 8308 - RNA, 32 nt, Homo Sapiens
gagcugccgcacugacccagccccccaggaaa

SEQ ID NO: 8309 - RNA, 32 nt, Homo Sapiens
aaaaucuagaaaagacuuguugguuuauaugc

SEQ ID NO: 8310 - RNA, 32 nt, Homo Sapiens
gauuucuuuguauguauuucugauguguucuc

SEQ ID NO: 8311 - RNA, 32 nt, Homo Sapiens
ucuacucuuucugcuagcaaagaccagcgacu

SEQ ID NO: 8312 - RNA, 32 nt, Homo Sapiens
gguuuuuaaguacuuggaaaaggagguaaucg

SEQ ID NO: 8313 - RNA, 32 nt, Homo Sapiens
uuugacccaaaauaugccauuuugaaauaaaa

SEQ ID NO: 8314 - RNA, 32 nt, Homo Sapiens
gcucaacuccugcuccuccucuucgcaaugag

SEQ ID NO: 8315 - RNA, 32 nt, Homo Sapiens
acucugucuaaccacuugccuugucugcuacc

SEQ ID NO: 8316 - RNA, 32 nt, Homo Sapiens
ucaccccucugccugcucccaaucugggggcu

SEQ ID NO: 8317 - RNA, 32 nt, Homo Sapiens
auggagacaccucuggggguccucucugaguc

SEQ ID NO: 8318 - RNA, 32 nt, Homo Sapiens
ccccccaauuuugggucauccauccucaaaua

SEQ ID NO: 8319 - RNA, 32 nt, Homo Sapiens
aguuacuagaugaacaaauccacagaaugggu

SEQ ID NO: 8320 - RNA, 32 nt, Homo Sapiens
uaauaguuuuuuucuuuuuuggugccuauaau

SEQ ID NO: 8321 - RNA, 32 nt, Homo Sapiens
gcauguagucuggguucugccuggcagaggga

SEQ ID NO: 8322 - RNA, 32 nt, Homo Sapiens
uggauugagccgggcccggccggggcgccgag

SEQ ID NO: 8323 - RNA, 32 nt, Homo Sapiens
aacuuuaacuuuguguaaaaucuuauaguauu

SEQ ID NO: 8324 - RNA, 32 nt, Homo Sapiens
uuucccaggcucaaggccucccugcccaccag

SEQ ID NO: 8325 - RNA, 32 nt, Homo Sapiens
acaagagucucgcucugucacccaggccggag

SEQ ID NO: 8326 - RNA, 32 nt, Homo Sapiens
gaguuaaucuggauguuuaggacacuaugauc

SEQ ID NO: 8327 - RNA, 32 nt, Homo Sapiens
cgccugauucgcggcgggagcggcaggaggga

SEQ ID NO: 8328 - RNA, 32 nt, Homo Sapiens
caugggucccaguguuuggugaaacacagcag

SEQ ID NO: 8329 - RNA, 32 nt, Homo Sapiens
uggaagcugcacaucacgcagaaggacaacua

SEQ ID NO: 8330 - RNA, 32 nt, Homo Sapiens
ggggaaguugguuaaccacccguguccacccu

SEQ ID NO: 8331 - RNA, 32 nt, Homo Sapiens
cggcaguccugacuuccugggcgccccggggc

SEQ ID NO: 8332 - RNA, 32 nt, Homo Sapiens
guuucauuuuuaagggggaaaagcagcucccc

SEQ ID NO: 8333 - RNA, 32 nt, Homo Sapiens
auauccuggacugugagaggaaugggacucug

SEQ ID NO: 8334 - RNA, 32 nt, Homo Sapiens
uauagcauguauucuguaaauauuaucuguaa

SEQ ID NO: 8335 - RNA, 32 nt, Homo Sapiens
aaggccacaaaacucaacaauaaaaacaaaca

SEQ ID NO: 8336 - RNA, 32 nt, Homo Sapiens
agacagcgcucgccgcccgggccgaggcccag

SEQ ID NO: 8337 - RNA, 32 nt, Homo Sapiens
aaaaaagguucaguauuuucuuuuuaguauaa

SEQ ID NO: 8338 - RNA, 32 nt, Homo Sapiens
uaaacccauuuucucccauauuugccugaaaa

SEQ ID NO: 8339 - RNA, 32 nt, Homo Sapiens
auuuuaaagacauucuuauauuucauaucagu

SEQ ID NO: 8340 - RNA, 32 nt, Homo Sapiens
cgagcgaggcgcgucgcaaaaggucgcggcgg

SEQ ID NO: 8341 - RNA, 32 nt, Homo Sapiens
gcuuaggaugccaacagcgcugcugagaaacg

SEQ ID NO: 8342 - RNA, 32 nt, Homo Sapiens
cuucuggauagaguaaagaaaagggaaacaaa

SEQ ID NO: 8343 - RNA, 32 nt, Homo Sapiens
uuuuucccuuguaaaugccccucccccagcug

SEQ ID NO: 8344 - RNA, 32 nt, Homo Sapiens
aaagguaauauuguauuaaaaucauguuuaag

SEQ ID NO: 8345 - RNA, 32 nt, Homo Sapiens
guuugcuucccucuccucuccgaacucccugg

SEQ ID NO: 8346 - RNA, 32 nt, Homo Sapiens
aauuuuggaaaacaacauguauuuucaacaca

SEQ ID NO: 8347 - RNA, 30 nt, Homo Sapiens
caggagggcaggcguugggacaggagggca

SEQ ID NO: 8348 - RNA, 32 nt, Homo Sapiens
uagcucuuucccuccucccauuuccuuuagua

SEQ ID NO: 8349 - RNA, 32 nt, Homo Sapiens
ugcuuccacugcuucuaccuccccucccagga

SEQ ID NO: 8350 - RNA, 32 nt, Homo Sapiens
cuccugcuuuugcuguugacaugccugcuccc

SEQ ID NO: 8351 - RNA, 32 nt, Homo Sapiens
gggcgaugggccgcccucugggcaccgagcag

SEQ ID NO: 8352 - RNA, 32 nt, Homo Sapiens
cucagcagcgccuccuucagcuccacagccag

SEQ ID NO: 8353 - RNA, 32 nt, Homo Sapiens
ugcuggggagguggagacgggugccgggagag

SEQ ID NO: 8354 - RNA, 32 nt, Homo Sapiens
gcuuuuuccuucccuuuuagaaacacuugugg

SEQ ID NO: 8355 - RNA, 32 nt, Homo Sapiens
ccuccguuuugcaccaguugccugcagguugg

SEQ ID NO: 8356 - RNA, 30 nt, Homo Sapiens
aaacaggucuuuuggcuuaucuaguaagua

SEQ ID NO: 8357 - RNA, 32 nt, Homo Sapiens
cuugacucuaguuuucugagucgauugugauc

SEQ ID NO: 8358 - RNA, 32 nt, Homo Sapiens
aaaugccaugucuauuugauuagucuuauuuu

SEQ ID NO: 8359 - RNA, 32 nt, Homo Sapiens
uuucugauggacccuguaguuuccaguuaagu

SEQ ID NO: 8360 - RNA, 32 nt, Homo Sapiens
gcuaaaggauacacaaaggaagaggcuaugug

SEQ ID NO: 8361 - RNA, 32 nt, Homo Sapiens
guuuucuggggauguuaacaugggauucaggc

SEQ ID NO: 8362 - RNA, 32 nt, Homo Sapiens
aucuguccgcggcugccgccacccaagacaga

SEQ ID NO: 8363 - RNA, 32 nt, Homo Sapiens
acuaugauauagccucuauacauggaaagaaa

SEQ ID NO: 8364 - RNA, 32 nt, Homo Sapiens
aauuaguggcugaguucuuucuuagcugcuuu

SEQ ID NO: 8365 - RNA, 32 nt, Homo Sapiens
accccucccccggggcuugcgcggcggcuccc

SEQ ID NO: 8366 - RNA, 32 nt, Homo Sapiens
agaggccgccggggucacggacaggaaccuca

SEQ ID NO: 8367 - RNA, 32 nt, Homo Sapiens
gcgcccuggaggaagaggaagaggaacccaag

SEQ ID NO: 8368 - RNA, 32 nt, Homo Sapiens
gcugcguggaggagggggccacgugugagaga

SEQ ID NO: 8369 - RNA, 32 nt, Homo Sapiens
auaccagguuacaccggaugacaucaauugaa

SEQ ID NO: 8370 - RNA, 32 nt, Homo Sapiens
aaaauacaaaaauuagcuggaugugguggcag

SEQ ID NO: 8371 - RNA, 32 nt, Homo Sapiens
agagggccgugcugggggcucuggggccaggg

SEQ ID NO: 8372 - RNA, 32 nt, Homo Sapiens
ccuuaauauuuuuucuuuaagucaguucauuu

SEQ ID NO: 8373 - RNA, 31 nt, Homo Sapiens
uucaaggaauguuagaaccaggaaacuagcu

SEQ ID NO: 8374 - RNA, 32 nt, Homo Sapiens
ccggcugcgcuggagccgcccggagcuagggg

SEQ ID NO: 8375 - RNA, 32 nt, Homo Sapiens
aaaaguaacaauaguccacaugucccugguau

SEQ ID NO: 8376 - RNA, 32 nt, Homo Sapiens
acuucucugaaucagaaaagcuauuaaaguuu

SEQ ID NO: 8377 - RNA, 32 nt, Homo Sapiens
ggggcucgagucccggcccgagcgcggcgucg

SEQ ID NO: 8378 - RNA, 32 nt, Homo Sapiens
agggaggggguggccugguccguggagggcag

SEQ ID NO: 8379 - RNA, 32 nt, Homo Sapiens
uaaauuuaaaauuuaacagcaaucagcuaaca

SEQ ID NO: 8380 - RNA, 32 nt, Homo Sapiens
aggccagggcagccacagcggcguggaccgag

SEQ ID NO: 8381 - RNA, 32 nt, Homo Sapiens
ccuuuuguauaaaaauguauuggcucuuuuau

SEQ ID NO: 8382 - RNA, 32 nt, Homo Sapiens
gcgggaggggaaagggugucagaaacguucac

SEQ ID NO: 8383 - RNA, 32 nt, Homo Sapiens
auauuauccuucaaaucugagaauuuggacua

SEQ ID NO: 8384 - RNA, 32 nt, Homo Sapiens
uuaacuuuaaacauguuuuagaauucaccuaa

SEQ ID NO: 8385 - RNA, 32 nt, Homo Sapiens
gggggcgugggaagagcucuuggcaaaggcug

SEQ ID NO: 8386 - RNA, 32 nt, Homo Sapiens
gcgaggggagggccuggccuggaccgcagagg

SEQ ID NO: 8387 - RNA, 32 nt, Homo Sapiens
uaaauguuauuuaaugcaggugauuuauucaa

SEQ ID NO: 8388 - RNA, 32 nt, Homo Sapiens
cuuuaugucuuucuccucuuccuauucuguca

SEQ ID NO: 8389 - RNA, 32 nt, Homo Sapiens
gacaugauccugggcuccugcuucugaaagau

SEQ ID NO: 8390 - RNA, 32 nt, Homo Sapiens
gccggcaccuuccaggagaugcgggcccuggc

SEQ ID NO: 8391 - RNA, 31 nt, Homo Sapiens
auaguagaauggugguugccaagggcuggag

SEQ ID NO: 8392 - RNA, 32 nt, Homo Sapiens
gcucagaaauccaauuuggauaccaaagguuu

SEQ ID NO: 8393 - RNA, 32 nt, Homo Sapiens
gagugggaggagagggcagagguccccugagg

SEQ ID NO: 8394 - RNA, 32 nt, Homo Sapiens
ggcuagaauuugaugauauuaaccauguauua

SEQ ID NO: 8395 - RNA, 32 nt, Homo Sapiens
cuacagcuuacacacacacacacacacacaca

SEQ ID NO: 8396 - RNA, 30 nt, Homo Sapiens
cagcaguggggcggggauggaggcggccgu

SEQ ID NO: 8397 - RNA, 32 nt, Homo Sapiens
agacugguuuuaaaguuaccugaagcucuuaa

SEQ ID NO: 8398 - RNA, 32 nt, Homo Sapiens
ugauuuagaauuacugguagcuuauuuuaaag

SEQ ID NO: 8399 - RNA, 32 nt, Homo Sapiens
caacugccuucccggcgccauguucggcucca

SEQ ID NO: 8400 - RNA, 32 nt, Homo Sapiens
acauuuugugguguaaaauauguaauugaaga

SEQ ID NO: 8401 - RNA, 32 nt, Homo Sapiens
uggguggcuguugguguggggaggcaucugug

SEQ ID NO: 8402 - RNA, 32 nt, Homo Sapiens
aguuggaguucaauguaacauuuuaaaugcaa

SEQ ID NO: 8403 - RNA, 32 nt, Homo Sapiens
uuaaagaaacuuuauaguugugacauugaaag

SEQ ID NO: 8404 - RNA, 32 nt, Homo Sapiens
cucaggccucuuguccucuccccaguggcucc

SEQ ID NO: 8405 - RNA, 32 nt, Homo Sapiens
cccuagggcuacacaagaauaguucagccuuc

SEQ ID NO: 8406 - RNA, 32 nt, Homo Sapiens
ucuggggaacauaugagaccccugccaucuca

SEQ ID NO: 8407 - RNA, 32 nt, Homo Sapiens
auggcuggaggcccaaaauauaccaaauaacc

SEQ ID NO: 8408 - RNA, 32 nt, Homo Sapiens
augugacuccuacuucccggagcuccaagucu

SEQ ID NO: 8409 - RNA, 32 nt, Homo Sapiens
auuaccgccaugcuccaagacccgcacugaca

SEQ ID NO: 8410 - RNA, 29 nt, Homo Sapiens
gcaagcaugugugagugaagauuagaggg

SEQ ID NO: 8411 - RNA, 32 nt, Homo Sapiens
gcauccugagacuccuuccucaugcuggcgcc

SEQ ID NO: 8412 - RNA, 32 nt, Homo Sapiens
uuuuuccaaaagauuauuagaaaugagggcug

SEQ ID NO: 8413 - RNA, 32 nt, Homo Sapiens
gucaguuguuucugacccuuucugucggagug

SEQ ID NO: 8414 - RNA, 32 nt, Homo Sapiens
acacucugcuguugccagcagucgcagaccgc

SEQ ID NO: 8415 - RNA, 32 nt, Homo Sapiens
gggcacaggguccucagcccccgggaaaugag

SEQ ID NO: 8416 - RNA, 32 nt, Homo Sapiens
ucucaaaagggaggggaggagaccucagaucc

SEQ ID NO: 8417 - RNA, 31 nt, Homo Sapiens
aucaagauguugaccaacuugaggauauuug

SEQ ID NO: 8418 - RNA, 32 nt, Homo Sapiens
aucggacagauggacgcagagaaccagagggc

SEQ ID NO: 8419 - RNA, 32 nt, Homo Sapiens
uggaaguuuauucuuaagagacugcuacccag

SEQ ID NO: 8420 - RNA, 32 nt, Homo Sapiens
acgagaagucauaccuuuuucuuaaaaacaaa

SEQ ID NO: 8421 - RNA, 32 nt, Homo Sapiens
ucaguguuaagucuaggauuuauuuuuuguca

SEQ ID NO: 8422 - RNA, 29 nt, Homo Sapiens
auggcagugacuuucagcugagaccuguu

SEQ ID NO: 8423 - RNA, 32 nt, Homo Sapiens
ucugauggccaaaauaccaaaugccuguugua

SEQ ID NO: 8424 - RNA, 32 nt, Homo Sapiens
aguuccugacccagccgagaacaaaccgcgaa

SEQ ID NO: 8425 - RNA, 32 nt, Homo Sapiens
uucccugucuucugcauaaucaugccuucuug

SEQ ID NO: 8426 - RNA, 32 nt, Homo Sapiens
uacuugcuuuuuccuuugacuucuaaccaacu

SEQ ID NO: 8427 - RNA, 32 nt, Homo Sapiens
uugagcaaauacugagguucauguuguaccaa

SEQ ID NO: 8428 - RNA, 32 nt, Homo Sapiens
gagacuggugaauaaugggcauuuaauuaauu

SEQ ID NO: 8429 - RNA, 32 nt, Homo Sapiens
guaaagguauauucugucacucagcuguauuc

SEQ ID NO: 8430 - RNA, 32 nt, Homo Sapiens
ggaacacuauuaugaccuaauuuaugagccau

SEQ ID NO: 8431 - RNA, 32 nt, Homo Sapiens
ccguaguagagcuauuucuuguacuucuaagu

SEQ ID NO: 8432 - RNA, 32 nt, Homo Sapiens
ugcucucugaauccauugauacagucaugcca

SEQ ID NO: 8433 - RNA, 32 nt, Homo Sapiens
ugcuuguuuugugaaagaauguuuugacaggg

SEQ ID NO: 8434 - RNA, 30 nt, Homo Sapiens
cagagcuucuccagcggcggcgcagcgagc

SEQ ID NO: 8435 - RNA, 32 nt, Homo Sapiens
gaugggaauggggcguggggcuggggcagagc

SEQ ID NO: 8436 - RNA, 32 nt, Homo Sapiens
acuuugggagggugggggcagggcgggaucaa

SEQ ID NO: 8437 - RNA, 32 nt, Homo Sapiens
cugccacuugcccacccacuccccucagaucu

SEQ ID NO: 8438 - RNA, 32 nt, Homo Sapiens
agguacuagauaucauuauauguauuucaucu

SEQ ID NO: 8439 - RNA, 32 nt, Homo Sapiens
ucggggaguggaaggagauguggggugggggu

SEQ ID NO: 8440 - RNA, 32 nt, Homo Sapiens
uacugaaggaacugaggccugggugauuuauu

SEQ ID NO: 8441 - RNA, 32 nt, Homo Sapiens
uccuucugcccccuaguaagucuacgugugga

SEQ ID NO: 8442 - RNA, 32 nt, Homo Sapiens
cgcaugugggguggaguagggagaugcgggga

SEQ ID NO: 8443 - RNA, 32 nt, Homo Sapiens
aggaggaggaggagagaaaggcggcucuuccc

SEQ ID NO: 8444 - RNA, 32 nt, Homo Sapiens
ucgcuugagccugggagauggagguugcagug

SEQ ID NO: 8445 - RNA, 32 nt, Homo Sapiens
gccaacaauauggaugauuugaagauaaacac

SEQ ID NO: 8446 - RNA, 32 nt, Homo Sapiens
cacauaagccccagguuuaccucagaaccuca

SEQ ID NO: 8447 - RNA, 32 nt, Homo Sapiens
uauucccugugcuauccugugggaagguagga

SEQ ID NO: 8448 - RNA, 32 nt, Homo Sapiens
cugguggaccucuggugggcaggagcuuggac

SEQ ID NO: 8449 - RNA, 32 nt, Homo Sapiens
cuuauugcacuccagcccgggcgacagagcga

SEQ ID NO: 8450 - RNA, 32 nt, Homo Sapiens
agauucuaaguacacucugaagaugauacugg

SEQ ID NO: 8451 - RNA, 32 nt, Homo Sapiens
guuacucuggugcuguccuguuuuacuggacc

SEQ ID NO: 8452 - RNA, 32 nt, Homo Sapiens
agggccaccuggaggcuggggugcuggggcuu

SEQ ID NO: 8453 - RNA, 32 nt, Homo Sapiens
gugcccaagcccagcccugugcccccgcugaa

SEQ ID NO: 8454 - RNA, 32 nt, Homo Sapiens
gaaauacuuggauucauuuacuccaugcuggu

SEQ ID NO: 8455 - RNA, 32 nt, Homo Sapiens
uccaacacauaaaaagaaaguucagcaaaugc

SEQ ID NO: 8456 - RNA, 32 nt, Homo Sapiens
gaccccgggcgcgcccgccgcgcgacgaugag

SEQ ID NO: 8457 - RNA, 32 nt, Homo Sapiens
uuucucauucgcagccaagacgggagugccac

SEQ ID NO: 8458 - RNA, 32 nt, Homo Sapiens
caccuucguccccccaggccccggccccacuc

SEQ ID NO: 8459 - RNA, 32 nt, Homo Sapiens
guaucagguguuucagaaauauuucaagacgg

SEQ ID NO: 8460 - RNA, 32 nt, Homo Sapiens
aaaauugauuccauauguaugaggauauugga

SEQ ID NO: 8461 - RNA, 32 nt, Homo Sapiens
ccaccugcccccagcccugccccucgcccuga

SEQ ID NO: 8462 - RNA, 32 nt, Homo Sapiens
ucccugccgcucggccagcagcccgcucgcga

SEQ ID NO: 8463 - RNA, 32 nt, Homo Sapiens
aggcuguaaccucagagggcaccaaggagggu

SEQ ID NO: 8464 - RNA, 32 nt, Homo Sapiens
uagggugggucuucuuuuuuucuuucccucuc

SEQ ID NO: 8465 - RNA, 32 nt, Homo Sapiens
ucuggaguguaaacauaaacgaguauucuuuu

SEQ ID NO: 8466 - RNA, 32 nt, Homo Sapiens
acuguuggaugcuguaaaucuguccgugugaa

SEQ ID NO: 8467 - RNA, 32 nt, Homo Sapiens
ggcgcaggcaccggcccggggagaggcaccau

SEQ ID NO: 8468 - RNA, 32 nt, Homo Sapiens
cccucucugcugcuccuccauuccuaacgcuu

SEQ ID NO: 8469 - RNA, 32 nt, Homo Sapiens
gcaguuggggcuccuccuggguugaucuaagg

SEQ ID NO: 8470 - RNA, 31 nt, Homo Sapiens
auuaccauaaauuguaguuaauauguagaaa

SEQ ID NO: 8471 - RNA, 32 nt, Homo Sapiens
ggccaguauguggaggauggggccugcguguu

SEQ ID NO: 8472 - RNA, 32 nt, Homo Sapiens
gggcucggcgggggagcgacucauggagcugc

SEQ ID NO: 8473 - RNA, 32 nt, Homo Sapiens
ccaggugauggccaguucccaaaucauuuggu

SEQ ID NO: 8474 - RNA, 32 nt, Homo Sapiens
cugugugcugcuaacuguauuuauugugaugc

SEQ ID NO: 8475 - RNA, 32 nt, Homo Sapiens
caaauaaucuucagugagaucuuuuuauaaaa

SEQ ID NO: 8476 - RNA, 32 nt, Homo Sapiens
ccagccugcccccaagggaauacacagccuuu

SEQ ID NO: 8477 - RNA, 32 nt, Homo Sapiens
uguacuguacuauauuguaaaagggauuuuag

SEQ ID NO: 8478 - RNA, 32 nt, Homo Sapiens
cacugccggaagagcagcugcccuccgacccc

SEQ ID NO: 8479 - RNA, 32 nt, Homo Sapiens
agccugagguguguccugggcuccucagagcc

SEQ ID NO: 8480 - RNA, 32 nt, Homo Sapiens
gaccugaaauccucuuuuaggcaauaggccga

SEQ ID NO: 8481 - RNA, 32 nt, Homo Sapiens
ccauucauacacaacguaaucaaauauguggu

SEQ ID NO: 8482 - RNA, 32 nt, Homo Sapiens
auuaauggauacugaauaagccuggcaccugc

SEQ ID NO: 8483 - RNA, 32 nt, Homo Sapiens
uggaaagggcugucacccggcuuggccccuuc

SEQ ID NO: 8484 - RNA, 32 nt, Homo Sapiens
cuuugcccccucaggagugcugagggccagug

SEQ ID NO: 8485 - RNA, 32 nt, Homo Sapiens
cuuggucauguacagcacugaaaggaaugaag

SEQ ID NO: 8486 - RNA, 32 nt, Homo Sapiens
guuauggagcugggcuuggccagggagucugg

SEQ ID NO: 8487 - RNA, 32 nt, Homo Sapiens
acgggcggcgaccgagaacgcggucggcccgg

SEQ ID NO: 8488 - RNA, 30 nt, Homo Sapiens
caguaguacuauuauacccaucuucagugu

SEQ ID NO: 8489 - RNA, 32 nt, Homo Sapiens
ugagcuccuuuguuccucccccuccagccuuu

SEQ ID NO: 8490 - RNA, 32 nt, Homo Sapiens
uaccugcggcgcggcccgaggggcggacgcga

SEQ ID NO: 8491 - RNA, 32 nt, Homo Sapiens
aguaaccuguuuccuacggaauguagaaugua

SEQ ID NO: 8492 - RNA, 32 nt, Homo Sapiens
uaauccccaagcccagcccgggccugucuggg

SEQ ID NO: 8493 - RNA, 30 nt, Homo Sapiens
aauaaggccaggcgcgguggcucacgccug

SEQ ID NO: 8494 - RNA, 32 nt, Homo Sapiens
ucugccaggaggaggagcucaggcgguaaugc

SEQ ID NO: 8495 - RNA, 32 nt, Homo Sapiens
uuuaucucaacuuugguuccugugauacauuu

SEQ ID NO: 8496 - RNA, 32 nt, Homo Sapiens
gccagcucugucuuuccagcugucugucgcua

SEQ ID NO: 8497 - RNA, 32 nt, Homo Sapiens
cuggugggacggggucccgguggcaggggcag

SEQ ID NO: 8498 - RNA, 32 nt, Homo Sapiens
uggggacccggcggcggcggcgcggugagccu

SEQ ID NO: 8499 - RNA, 32 nt, Homo Sapiens
ggcacuaucuucuuuucaguacuacaaaaaca

SEQ ID NO: 8500 - RNA, 32 nt, Homo Sapiens
gguucccucgcacuggaggaggcagcggccgc

SEQ ID NO: 8501 - RNA, 32 nt, Homo Sapiens
guggagcggguguggggcgcguguggaacgug

SEQ ID NO: 8502 - RNA, 32 nt, Homo Sapiens
uugaaguccaacaaauuuuaaacgaauccaaa

SEQ ID NO: 8503 - RNA, 32 nt, Homo Sapiens
ugcuuaguguaaacauucugugaaugaaguag

SEQ ID NO: 8504 - RNA, 32 nt, Homo Sapiens
auacauauaucgaaacaucacauuguacccug

SEQ ID NO: 8505 - RNA, 32 nt, Homo Sapiens
ggccugggaggaagagaggccuucugggacug

SEQ ID NO: 8506 - RNA, 32 nt, Homo Sapiens
cuauuuuucaguaucucuguaccuguuaaagg

SEQ ID NO: 8507 - RNA, 32 nt, Homo Sapiens
ccaggguuuagugagaucuaaggccgugaagu

SEQ ID NO: 8508 - RNA, 32 nt, Homo Sapiens
uugaaaaaguuccagcgcgggaaacugaaccc

SEQ ID NO: 8509 - RNA, 32 nt, Homo Sapiens
caggaacagagcucggcagaaaacgaagcuga

SEQ ID NO: 8510 - RNA, 32 nt, Homo Sapiens
ggauuuauuauuauuauucuauuuuaccucua

SEQ ID NO: 8511 - RNA, 27 nt, Homo Sapiens
agccguccauucuucagugucucuguu

SEQ ID NO: 8512 - RNA, 32 nt, Homo Sapiens
uuuuuacccccaaaggaacugaagauggaaaa

SEQ ID NO: 8513 - RNA, 32 nt, Homo Sapiens
ccugggacaucucggcauuuccagguccguuu

SEQ ID NO: 8514 - RNA, 32 nt, Homo Sapiens
agagcucuccaccgcagcucagcccuccgcag

SEQ ID NO: 8515 - RNA, 32 nt, Homo Sapiens
gcgcuucggauccucgcgggaccccacccucu

SEQ ID NO: 8516 - RNA, 32 nt, Homo Sapiens
gcgugugcuggaacccaaagaguacuccuuug

SEQ ID NO: 8517 - RNA, 32 nt, Homo Sapiens
acagcgacagcaugaaggcuccgggucggcuc

SEQ ID NO: 8518 - RNA, 32 nt, Homo Sapiens
ggcaaacucacuuagaaggagcaagaagcaac

SEQ ID NO: 8519 - RNA, 32 nt, Homo Sapiens
cuccaggcugguuuuuuguuuuuuguuguuaa

SEQ ID NO: 8520 - RNA, 32 nt, Homo Sapiens
caucaagaugcauguaaagucgauuguauguu

SEQ ID NO: 8521 - RNA, 32 nt, Homo Sapiens
aguccacccacugacauccccuggaacccaga

SEQ ID NO: 8522 - RNA, 32 nt, Homo Sapiens
ucggauguugguacuccucccagggagcucuc

SEQ ID NO: 8523 - RNA, 32 nt, Homo Sapiens
uacaccaucuucuguuauucauugcuuuugaa

SEQ ID NO: 8524 - RNA, 32 nt, Homo Sapiens
cccaaaggauaagaaagaaaagagagcucagg

SEQ ID NO: 8525 - RNA, 32 nt, Homo Sapiens
aaacaaaaaugaugaaucaagagugauuuguu

SEQ ID NO: 8526 - RNA, 30 nt, Homo Sapiens
ccgaauuggggagcggcgggucccgucucg

SEQ ID NO: 8527 - RNA, 32 nt, Homo Sapiens
ucuauugggcacuauagucaguugggaguggu

SEQ ID NO: 8528 - RNA, 32 nt, Homo Sapiens
gagacccagagggcagcgucagacacccagag

SEQ ID NO: 8529 - RNA, 32 nt, Homo Sapiens
cuccugaugcccccuuccacauguggccagga

SEQ ID NO: 8530 - RNA, 32 nt, Homo Sapiens
gccacaaaaaaguaguuugaguguuaugaaua

SEQ ID NO: 8531 - RNA, 32 nt, Homo Sapiens
aagcaugucccaucagaaacacucucgggggg

SEQ ID NO: 8532 - RNA, 32 nt, Homo Sapiens
gcucugauuagauaaucuuuuacauugaaccu

SEQ ID NO: 8533 - RNA, 32 nt, Homo Sapiens
caagaaaaacaccagcagcugguccuggccuu

SEQ ID NO: 8534 - RNA, 32 nt, Homo Sapiens
gaccaaaguggaagaggaagugaaaaccagaa

SEQ ID NO: 8535 - RNA, 32 nt, Homo Sapiens
acagggagguaagcuggugucaugcugagcau

SEQ ID NO: 8536 - RNA, 32 nt, Homo Sapiens
ugauucagaacagauuuaucacuaauuaacag

SEQ ID NO: 8537 - RNA, 32 nt, Homo Sapiens
ugcugucaguuauuguauggucaguaccccag

SEQ ID NO: 8538 - RNA, 32 nt, Homo Sapiens
uugcuuagcacacugucuggaacuuaaaugag

SEQ ID NO: 8539 - RNA, 32 nt, Homo Sapiens
aaacaggauuaagugaacaucaccuuuuuaua

SEQ ID NO: 8540 - RNA, 32 nt, Homo Sapiens
agccccuuucccuccccugaaccugguucugc

SEQ ID NO: 8541 - RNA, 32 nt, Homo Sapiens
ggccgggcgcggugacucacaccuguaauccc

SEQ ID NO: 8542 - RNA, 32 nt, Homo Sapiens
gucucccgggcgcacguaggcuccuccuccug

SEQ ID NO: 8543 - RNA, 32 nt, Homo Sapiens
gugggcggggagagcucgaggggaggcccagc

SEQ ID NO: 8544 - RNA, 32 nt, Homo Sapiens
ugcaaucuguuguuucgcugauucaugaagaa

SEQ ID NO: 8545 - RNA, 32 nt, Homo Sapiens
ucuacuaaaaauacaaaaaauuagcuggacau

SEQ ID NO: 8546 - RNA, 32 nt, Homo Sapiens
gcugcuuccugccugcaccugcggugacugug

SEQ ID NO: 8547 - RNA, 32 nt, Homo Sapiens
uugugugggagguccccggccucuggaugcag

SEQ ID NO: 8548 - RNA, 32 nt, Homo Sapiens
uccagcuccgucugcccugugccuauauauac

SEQ ID NO: 8549 - RNA, 32 nt, Homo Sapiens
gacgcgcgcgucgggguuuaacgcguuucugg

SEQ ID NO: 8550 - RNA, 32 nt, Homo Sapiens
augcacauuuucuacuuucucuaauaaaucug

SEQ ID NO: 8551 - RNA, 32 nt, Homo Sapiens
cgucucaacagccccaggccuaugggggcucu

SEQ ID NO: 8552 - RNA, 32 nt, Homo Sapiens
gguggugggaggagauaagagauacaaacuga

SEQ ID NO: 8553 - RNA, 32 nt, Homo Sapiens
agcaucugucuccugcagaccucaucauucca

SEQ ID NO: 8554 - RNA, 32 nt, Homo Sapiens
cucuggaagcagggauugugucuggcucuuuu

SEQ ID NO: 8555 - RNA, 32 nt, Homo Sapiens
ccgcgcugcgcgccgcgcuccucggacggcuc

SEQ ID NO: 8556 - RNA, 32 nt, Homo Sapiens
gcccuguccgcgccgcgccucggcagccggaa

SEQ ID NO: 8557 - RNA, 32 nt, Homo Sapiens
uaugugcagaccaugucgagaaguggcugggu

SEQ ID NO: 8558 - RNA, 32 nt, Homo Sapiens
auaauugguuaguuuccuuuuauuuuccugca

SEQ ID NO: 8559 - RNA, 29 nt, Homo Sapiens
ugcguugucagacuaggaaagcuaaacga

SEQ ID NO: 8560 - RNA, 32 nt, Homo Sapiens
cagcccauccaugaccaugggcgacaagaaga

SEQ ID NO: 8561 - RNA, 32 nt, Homo Sapiens
gaagccgguuggagugugugagguuuucucgc

SEQ ID NO: 8562 - RNA, 32 nt, Homo Sapiens
gggagugcacuacuccuuugucuugcagggag

SEQ ID NO: 8563 - RNA, 32 nt, Homo Sapiens
cugggugcgggaagagggcucggagcugccuu

SEQ ID NO: 8564 - RNA, 31 nt, Homo Sapiens
cacccagcgucgaggucacugugaacgcggg

SEQ ID NO: 8565 - RNA, 32 nt, Homo Sapiens
augcuggauguaaauuguucuuuucuugguaa

SEQ ID NO: 8566 - RNA, 32 nt, Homo Sapiens
gcagcuguacaccaccugugcccccaggcuca

SEQ ID NO: 8567 - RNA, 32 nt, Homo Sapiens
ucauauaaaaauuauauuuagaauuuuuaaac

SEQ ID NO: 8568 - RNA, 31 nt, Homo Sapiens
cacuucccacccucaggcaugaguacagacu

SEQ ID NO: 8569 - RNA, 32 nt, Homo Sapiens
uggauaucaaguaaaacucuucuauuuuugug

SEQ ID NO: 8570 - RNA, 32 nt, Homo Sapiens
uuuauaauuauuauuucuuaaagugauuaaau

SEQ ID NO: 8571 - RNA, 32 nt, Homo Sapiens
ugggcucagauaaguagacuuaaguucaaauu

SEQ ID NO: 8572 - RNA, 32 nt, Homo Sapiens
uacagccuccaagcgggcuuuccccuggacaa

SEQ ID NO: 8573 - RNA, 32 nt, Homo Sapiens
ugugacccgccuccuacgcaggaggcaacaga

SEQ ID NO: 8574 - RNA, 32 nt, Homo Sapiens
cccuuucccccucccccaauaagaccauuuaa

SEQ ID NO: 8575 - RNA, 32 nt, Homo Sapiens
agccugcucaggucuuugugcucuguuccuua

SEQ ID NO: 8576 - RNA, 32 nt, Homo Sapiens
cccuuuugcuaagggagcuugggagccacaug

SEQ ID NO: 8577 - RNA, 32 nt, Homo Sapiens
uagaaauguacaaaugcauuuccaaacugccu

SEQ ID NO: 8578 - RNA, 32 nt, Homo Sapiens
uaauucaaaagcaucucgcuuuucucaggaac

SEQ ID NO: 8579 - RNA, 32 nt, Homo Sapiens
gcagggagaaagggcugaugucugcauucugg

SEQ ID NO: 8580 - RNA, 32 nt, Homo Sapiens
uuuauuuaaagagaaaaaauauguguauauca

SEQ ID NO: 8581 - RNA, 32 nt, Homo Sapiens
ugcugcccaggcuggaaugcaguggugccauc

SEQ ID NO: 8582 - RNA, 32 nt, Homo Sapiens
ucuuccuguauauaguacauuauaucaauuuc

SEQ ID NO: 8583 - RNA, 32 nt, Homo Sapiens
gcucagagaagcuccgugggccuguuucccaa

SEQ ID NO: 8584 - RNA, 32 nt, Homo Sapiens
guaauaucaaccaaauugcagacaucucaaca

SEQ ID NO: 8585 - RNA, 32 nt, Homo Sapiens
agccagccuagucauuauuugcugucggguuu

SEQ ID NO: 8586 - RNA, 32 nt, Homo Sapiens
ucagagaaggcacauugacuagcaaacagcac

SEQ ID NO: 8587 - RNA, 32 nt, Homo Sapiens
acuucagaaccugagcacuuugggaggcccag

SEQ ID NO: 8588 - RNA, 32 nt, Homo Sapiens
uuaauggaaaaguuuaauuugaagauguaaca

SEQ ID NO: 8589 - RNA, 32 nt, Homo Sapiens
cuuuuaaaaaaauaaacuuguuaugcaaaaua

SEQ ID NO: 8590 - RNA, 32 nt, Homo Sapiens
caacacugucccacccagauggcuccaaggcc

SEQ ID NO: 8591 - RNA, 32 nt, Homo Sapiens
ucauucuucuuuugugguccaauuaggcuguu

SEQ ID NO: 8592 - RNA, 32 nt, Homo Sapiens
aauuaaacagaaaagagaguucaguggaagau

SEQ ID NO: 8593 - RNA, 32 nt, Homo Sapiens
gucccaugaaacaaagaugcagucgggcacuc

SEQ ID NO: 8594 - RNA, 32 nt, Homo Sapiens
aagggccuaaaauggcaggauucuuaguaaau

SEQ ID NO: 8595 - RNA, 32 nt, Homo Sapiens
uaaaaaauuguuugauauuucuuaaugucugc

SEQ ID NO: 8596 - RNA, 32 nt, Homo Sapiens
aagcauaugcuaaauguacauuuuaauuuuag

SEQ ID NO: 8597 - RNA, 32 nt, Homo Sapiens
gugaacugcagacaaggcaacccggacgccau

SEQ ID NO: 8598 - RNA, 32 nt, Homo Sapiens
uuauuuuugugggagauaaauuuuauaggacu

SEQ ID NO: 8599 - RNA, 32 nt, Homo Sapiens
cgggccgagcgcgcaggacgugcgccgcagcu

SEQ ID NO: 8600 - RNA, 32 nt, Homo Sapiens
ccccuccucccucucacagguucugggcggcc

SEQ ID NO: 8601 - RNA, 32 nt, Homo Sapiens
uagaguccuuugcaugaaauuuagcaaaucua

SEQ ID NO: 8602 - RNA, 32 nt, Homo Sapiens
gagacugacuguaucuggggauucuggcaagg

SEQ ID NO: 8603 - RNA, 32 nt, Homo Sapiens
aaaaacaaaaaauuauuuaacuauuuugauug

SEQ ID NO: 8604 - RNA, 32 nt, Homo Sapiens
aaugggacuuaacuccuuccaguguccuuaga

SEQ ID NO: 8605 - RNA, 32 nt, Homo Sapiens
cuccuaacaccugugagaugguccugucgaga

SEQ ID NO: 8606 - RNA, 32 nt, Homo Sapiens
cacagaaccacuuuuauucaacauagauaaaa

SEQ ID NO: 8607 - RNA, 32 nt, Homo Sapiens
gggcucgggcagcucacggaaauacagcuuca

SEQ ID NO: 8608 - RNA, 32 nt, Homo Sapiens
ucccaccacagugaaaacuuauguuaggggag

SEQ ID NO: 8609 - RNA, 32 nt, Homo Sapiens
ccuccuauaacccuccucucacccaccccgcu

SEQ ID NO: 8610 - RNA, 32 nt, Homo Sapiens
uacagcuguauguuuuagcaugaugauggaug

SEQ ID NO: 8611 - RNA, 32 nt, Homo Sapiens
cugaacgggagccguacucaggaggcagaauu

SEQ ID NO: 8612 - RNA, 32 nt, Homo Sapiens
ccccgccccgacgcgccgcccacucacggcaa

SEQ ID NO: 8613 - RNA, 32 nt, Homo Sapiens
cuuuuaaaauuugauuuucuguaagaagaggc

SEQ ID NO: 8614 - RNA, 32 nt, Homo Sapiens
aucuuucuauagaaaguuggguacaguaugua

SEQ ID NO: 8615 - RNA, 32 nt, Homo Sapiens
uucuuauuaccagaaagagcuugcaaauaguu

SEQ ID NO: 8616 - RNA, 30 nt, Homo Sapiens
aggccuccugucccugccugcucugggugc

SEQ ID NO: 8617 - RNA, 30 nt, Homo Sapiens
uucuuucuuuauuugggggaaguccaggag

SEQ ID NO: 8618 - RNA, 32 nt, Homo Sapiens
uaggccccggggauuguggcgugacccggcag

SEQ ID NO: 8619 - RNA, 32 nt, Homo Sapiens
gcagagccgcggcuccucugccugcgcccgca

SEQ ID NO: 8620 - RNA, 32 nt, Homo Sapiens
aaaaauauauuuaaaaucuuugaaagaagacc

SEQ ID NO: 8621 - RNA, 32 nt, Homo Sapiens
aguuaccccuggggacgccauuuuggaaaccu

SEQ ID NO: 8622 - RNA, 32 nt, Homo Sapiens
uagcuguaguacugagguuugaggaaaaauaa

SEQ ID NO: 8623 - RNA, 32 nt, Homo Sapiens
aguucacaaagcaucggaguagguuccuuugg

SEQ ID NO: 8624 - RNA, 32 nt, Homo Sapiens
caguaaaugugggauaaaauccauuuagaaaa

SEQ ID NO: 8625 - RNA, 32 nt, Homo Sapiens
guguaauuguaaacuaaagauaccguguuuuc

SEQ ID NO: 8626 - RNA, 32 nt, Homo Sapiens
ugauugaaagcagaacaauggagaugaaauaa

SEQ ID NO: 8627 - RNA, 32 nt, Homo Sapiens
ugggccuccugcccgcgcgggaggggagggcg

SEQ ID NO: 8628 - RNA, 32 nt, Homo Sapiens
uguguauguauauauaugcuuuugcauuaaaa

SEQ ID NO: 8629 - RNA, 32 nt, Homo Sapiens
ggcucccgagggucuuggcgcgcuggccgcca

SEQ ID NO: 8630 - RNA, 32 nt, Homo Sapiens
cggggggcgcgcggggaagcagcggaacuugc

SEQ ID NO: 8631 - RNA, 32 nt, Homo Sapiens
agaacacuggggaugaauuuagagacaucgaa

SEQ ID NO: 8632 - RNA, 32 nt, Homo Sapiens
uauuuucugagcacagaagaaaaugaucaaga

SEQ ID NO: 8633 - RNA, 32 nt, Homo Sapiens
aacucuccaaaauaagauuucuucucuguagc

SEQ ID NO: 8634 - RNA, 32 nt, Homo Sapiens
cauggcuggcaggggcagcugcuguggcaaac

SEQ ID NO: 8635 - RNA, 32 nt, Homo Sapiens
uaauggcucacagauuggccuuagaugcaucc

SEQ ID NO: 8636 - RNA, 32 nt, Homo Sapiens
ccuacgaccggggcugggauguuggaggaaga

SEQ ID NO: 8637 - RNA, 32 nt, Homo Sapiens
caugauaccaccuuuacugugcuuauuuuuuu

SEQ ID NO: 8638 - RNA, 32 nt, Homo Sapiens
acgucgguggcgagugggcccgggcgcucggg

SEQ ID NO: 8639 - RNA, 32 nt, Homo Sapiens
ggcccucauuucucagcuucugcauuuccuuc

SEQ ID NO: 8640 - RNA, 32 nt, Homo Sapiens
acgggcacuuggaggaggagcugacugugugu

SEQ ID NO: 8641 - RNA, 32 nt, Homo Sapiens
augugaaguuguggacucuacccaggcaggug

SEQ ID NO: 8642 - RNA, 32 nt, Homo Sapiens
ucacccuucccccaaguuggaauauauccuuc

SEQ ID NO: 8643 - RNA, 32 nt, Homo Sapiens
cugccuuugagcccccgucacguugggcacug

SEQ ID NO: 8644 - RNA, 32 nt, Homo Sapiens
cuugaaacacacuguucuuuuacuagggacuu

SEQ ID NO: 8645 - RNA, 30 nt, Homo Sapiens
cuugggaagauacacaugcaaaaugggaac

SEQ ID NO: 8646 - RNA, 32 nt, Homo Sapiens
gggaggcgccgggagcccguucgguugcgggu

SEQ ID NO: 8647 - RNA, 32 nt, Homo Sapiens
gcuggugggacaugcugugaauuuagauuaca

SEQ ID NO: 8648 - RNA, 32 nt, Homo Sapiens
uucuggugaccuuaacucugaauaccaagcaa

SEQ ID NO: 8649 - RNA, 32 nt, Homo Sapiens
gcagagcuggauauaagcaacaacaagauuuc

SEQ ID NO: 8650 - RNA, 32 nt, Homo Sapiens
ccucugcucacacccgccccagcuucugccac

SEQ ID NO: 8651 - RNA, 32 nt, Homo Sapiens
gacaggucuugcuuucuuuguacaucagcaua

SEQ ID NO: 8652 - RNA, 32 nt, Homo Sapiens
gauuauuccucgaugcuguuucuguuggugcu

SEQ ID NO: 8653 - RNA, 32 nt, Homo Sapiens
gaacauauuuugauaaagacaccaguaaccuu

SEQ ID NO: 8654 - RNA, 32 nt, Homo Sapiens
aguucggaaaccguccuguguacacaugggag

SEQ ID NO: 8655 - RNA, 32 nt, Homo Sapiens
cuugcuaggaccaagcucccagcucccaggac

SEQ ID NO: 8656 - RNA, 32 nt, Homo Sapiens
aaggugguucuguggccuuuucccucuuugcu

SEQ ID NO: 8657 - RNA, 32 nt, Homo Sapiens
cuccauguguuugauuucuccucaggcuggua

SEQ ID NO: 8658 - RNA, 32 nt, Homo Sapiens
gcagcagccaucuuggcugccaacacccugca

SEQ ID NO: 8659 - RNA, 32 nt, Homo Sapiens
aaucaaaaacaaagaagcccuauaagaccauu

SEQ ID NO: 8660 - RNA, 32 nt, Homo Sapiens
agccaggugggaccagugugucugucaugaaa

SEQ ID NO: 8661 - RNA, 32 nt, Homo Sapiens
gcggaggacccgcgguugaaggaggcagcggg

SEQ ID NO: 8662 - RNA, 32 nt, Homo Sapiens
caacaaaaugcuucaacaaguuccagaaaaca

SEQ ID NO: 8663 - RNA, 28 nt, Homo Sapiens
accaugauaaggacgcugcugcugucca

SEQ ID NO: 8664 - RNA, 32 nt, Homo Sapiens
uuuuaaaugugcagauuuucuauauuuuaaaa

SEQ ID NO: 8665 - RNA, 32 nt, Homo Sapiens
uauccagcggcuggaugugguacagccaggau

SEQ ID NO: 8666 - RNA, 32 nt, Homo Sapiens
gcuccacgagcugccugaccgccgcagcugcc

SEQ ID NO: 8667 - RNA, 31 nt, Homo Sapiens
cuuugguagaacaccuucagagccuuggcaa

SEQ ID NO: 8668 - RNA, 32 nt, Homo Sapiens
ggucuuuagagauuuuuuuuuaagguucaggc

SEQ ID NO: 8669 - RNA, 32 nt, Homo Sapiens
uguaucucccaaugcuaucccuccccccuccc

SEQ ID NO: 8670 - RNA, 32 nt, Homo Sapiens
uccuaggccagcgggcgguugucuguggcucc

SEQ ID NO: 8671 - RNA, 29 nt, Homo Sapiens
uugagaagcgaauggugaaagcuacugaa

SEQ ID NO: 8672 - RNA, 32 nt, Homo Sapiens
uuuuuuaauuuucaggucaaguuuuuuauacu

SEQ ID NO: 8673 - RNA, 32 nt, Homo Sapiens
guuaaugccagaaugagcaaccucaaggaauu

SEQ ID NO: 8674 - RNA, 32 nt, Homo Sapiens
uauaauuugaaagcuaugagaauagaugugug

SEQ ID NO: 8675 - RNA, 32 nt, Homo Sapiens
uuacaggugugagccaccgcgcccagccaccu

SEQ ID NO: 8676 - RNA, 32 nt, Homo Sapiens
aauucauuuagcaaauaaauauuaagccccua

SEQ ID NO: 8677 - RNA, 32 nt, Homo Sapiens
ccuagcagccggccuucgggucgggcgucucc

SEQ ID NO: 8678 - RNA, 32 nt, Homo Sapiens
caagugccaucccacauucggacccugcccau

SEQ ID NO: 8679 - RNA, 32 nt, Homo Sapiens
ucuggagcacgcucggccguccuggcaggagc

SEQ ID NO: 8680 - RNA, 32 nt, Homo Sapiens
uuggaccugugcuguccugggaggugguguug

SEQ ID NO: 8681 - RNA, 28 nt, Homo Sapiens
uguaugccgggcaaagaggcugaggcgg

SEQ ID NO: 8682 - RNA, 32 nt, Homo Sapiens
aucuaucggaagaacaugaaucucuaacagcu

SEQ ID NO: 8683 - RNA, 32 nt, Homo Sapiens
aguguuuucuuuggcugcaacauggagauuag

SEQ ID NO: 8684 - RNA, 32 nt, Homo Sapiens
auuagagguucagaaagagaaauggauggcuc

SEQ ID NO: 8685 - RNA, 32 nt, Homo Sapiens
ugagcucuguuacagcucugccguaaucucag

SEQ ID NO: 8686 - RNA, 32 nt, Homo Sapiens
agucuggcaaagacuaucccaagguuauuuua

SEQ ID NO: 8687 - RNA, 32 nt, Homo Sapiens
accagccugggcaacauagugagaccugcccc

SEQ ID NO: 8688 - RNA, 32 nt, Homo Sapiens
gagaacacgcagggagcagagaccauggggcc

SEQ ID NO: 8689 - RNA, 32 nt, Homo Sapiens
cccauguucauuaauucauauugccccgcgcc

SEQ ID NO: 8690 - RNA, 32 nt, Homo Sapiens
gugaaauugaggucacaucuucaguacuucau

SEQ ID NO: 8691 - RNA, 32 nt, Homo Sapiens
auacccaguuuacggcauucuguuauagaagu

SEQ ID NO: 8692 - RNA, 32 nt, Homo Sapiens
gccaugccagcuuaucucaggggugugcggcc

SEQ ID NO: 8693 - RNA, 30 nt, Homo Sapiens
gcagagaaauuaugugaugagucaaauuga

SEQ ID NO: 8694 - RNA, 32 nt, Homo Sapiens
cacaguagugggcaagagugaucugcauguuu

SEQ ID NO: 8695 - RNA, 31 nt, Homo Sapiens
cucuugggcuggaguaccguggugagggagu

SEQ ID NO: 8696 - RNA, 32 nt, Homo Sapiens
uaaaauguaaacaaucccuacaauccagauaa

SEQ ID NO: 8697 - RNA, 32 nt, Homo Sapiens
cauugauacuaaauuacccagcuuaaucaaca

SEQ ID NO: 8698 - RNA, 32 nt, Homo Sapiens
auaaacuugaucuuauacaaaucuucuauugu

SEQ ID NO: 8699 - RNA, 32 nt, Homo Sapiens
aaccaaccagaaacacaaaaccaggaacccga

SEQ ID NO: 8700 - RNA, 32 nt, Homo Sapiens
acuccccgcgcgcgcccgguggagacuucgau

SEQ ID NO: 8701 - RNA, 32 nt, Homo Sapiens
aguaaccaggugguggagaccccauccuuggc

SEQ ID NO: 8702 - RNA, 32 nt, Homo Sapiens
cggggccugcggugagcucgcgcugggcgggc

SEQ ID NO: 8703 - RNA, 32 nt, Homo Sapiens
gaaggggcgcaucccaccccgcucugcaggcc

SEQ ID NO: 8704 - RNA, 32 nt, Homo Sapiens
uaucugcuaaggaaaacugugcucuucgaagg

SEQ ID NO: 8705 - RNA, 32 nt, Homo Sapiens
cgagcuaugcacgggggcggcggcgucuccuc

SEQ ID NO: 8706 - RNA, 32 nt, Homo Sapiens
gucagugguagccuagagaggccgcuaacaga

SEQ ID NO: 8707 - RNA, 32 nt, Homo Sapiens
gguggcugacuucgggcuggcgcgucucaugg

SEQ ID NO: 8708 - RNA, 32 nt, Homo Sapiens
ucacugacucuaaaucaggugauucaagaugc

SEQ ID NO: 8709 - RNA, 32 nt, Homo Sapiens
cugacugcacuugcuucaguacucucuugccu

SEQ ID NO: 8710 - RNA, 32 nt, Homo Sapiens
cccugcggcccugccagugguagcacaguguc

SEQ ID NO: 8711 - RNA, 29 nt, Homo Sapiens
ugagccuggggacaguggagccucugagc

SEQ ID NO: 8712 - RNA, 32 nt, Homo Sapiens
uauuuuacuguaauuuauguucuuauauuuau

SEQ ID NO: 8713 - RNA, 32 nt, Homo Sapiens
guguagggggagaggggaaaggggucuggccc

SEQ ID NO: 8714 - RNA, 32 nt, Homo Sapiens
cacacacagcuauuuauaguagcagacacagg

SEQ ID NO: 8715 - RNA, 32 nt, Homo Sapiens
aaaaucauuuuucagcuugcaaaaugggacug

SEQ ID NO: 8716 - RNA, 32 nt, Homo Sapiens
guuggggugcugauuuucuuguacuuuugaaa

SEQ ID NO: 8717 - RNA, 32 nt, Homo Sapiens
ggccgccggccgcgaagcgcugagucacggug

SEQ ID NO: 8718 - RNA, 31 nt, Homo Sapiens
aagccucauuugacaccuaaauaggacuccu

SEQ ID NO: 8719 - RNA, 32 nt, Homo Sapiens
uaucaaggaugagaauggcacuggcuguccca

SEQ ID NO: 8720 - RNA, 32 nt, Homo Sapiens
uuaaaucuuggaaaaauguuguuuuagcucag

SEQ ID NO: 8721 - RNA, 32 nt, Homo Sapiens
uuuaguuuuaggucauuuauuaauuuucuuac

SEQ ID NO: 8722 - RNA, 32 nt, Homo Sapiens
ggaaugucuauacacacugaaaccagugugau

SEQ ID NO: 8723 - RNA, 27 nt, Homo Sapiens
ccaugaagguaacaggcaucuuucuuc

SEQ ID NO: 8724 - RNA, 32 nt, Homo Sapiens
ucauucaggggcuccaggauccuucuccuuga

SEQ ID NO: 8725 - RNA, 32 nt, Homo Sapiens
ucuuaucuguguuuguguuggcaugcaagauu

SEQ ID NO: 8726 - RNA, 32 nt, Homo Sapiens
acauaaugccaaauacacaauguauuuauagc

SEQ ID NO: 8727 - RNA, 32 nt, Homo Sapiens
uauugcauucuccaaauugcuaaucucuaucc

SEQ ID NO: 8728 - RNA, 32 nt, Homo Sapiens
gagaggaggcaugaagcugcagugccaccacu

SEQ ID NO: 8729 - RNA, 32 nt, Homo Sapiens
uagcaagaccucuagagacccuagagacucga

SEQ ID NO: 8730 - RNA, 32 nt, Homo Sapiens
gaguacguaacauugaaaaaugaggcauaaaa

SEQ ID NO: 8731 - RNA, 32 nt, Homo Sapiens
ugaugguaggguauaaugugucuguguugcuu

SEQ ID NO: 8732 - RNA, 27 nt, Homo Sapiens
cuaggcccugucuucagccucagacug

SEQ ID NO: 8733 - RNA, 32 nt, Homo Sapiens
ugugcuacugucauuugcaaagcaaggaaaua

SEQ ID NO: 8734 - RNA, 32 nt, Homo Sapiens
ccccuuucuccucucccuguuuuguacauaaa

SEQ ID NO: 8735 - RNA, 32 nt, Homo Sapiens
agaugagaauuguggcuauuaagagaauucac

SEQ ID NO: 8736 - RNA, 32 nt, Homo Sapiens
acuuucauaagguaacugaacugcacaauauc

SEQ ID NO: 8737 - RNA, 30 nt, Homo Sapiens
gugggagguguuggcggcggcggcgcgggc

SEQ ID NO: 8738 - RNA, 32 nt, Homo Sapiens
ugcccagguagccccuccccagcccuuggcac

SEQ ID NO: 8739 - RNA, 32 nt, Homo Sapiens
gggucccgcucgggcucugacucugacgucgg

SEQ ID NO: 8740 - RNA, 32 nt, Homo Sapiens
ggggaaagcgggaagcgcucgcucccuuuccc

SEQ ID NO: 8741 - RNA, 32 nt, Homo Sapiens
ggcagcggccccacaccuccuccaacccggac

SEQ ID NO: 8742 - RNA, 32 nt, Homo Sapiens
agcgggaauugacuuucuuaagcuuuguuuug

SEQ ID NO: 8743 - RNA, 30 nt, Homo Sapiens
gccacagcagcucagccgccggugcccccu

SEQ ID NO: 8744 - RNA, 32 nt, Homo Sapiens
caucuccccguccacguuaccgcauucagagc

SEQ ID NO: 8745 - RNA, 31 nt, Homo Sapiens
augucuuccgagaccaccuggggccauccag

SEQ ID NO: 8746 - RNA, 32 nt, Homo Sapiens
cuuuagaaauuguuuaaaauuaguucugggaa

SEQ ID NO: 8747 - RNA, 32 nt, Homo Sapiens
cugagaucaggaguuugagaccaccuggccaa

SEQ ID NO: 8748 - RNA, 32 nt, Homo Sapiens
uuuugugugcuuauuuaccaucuggugucuua

SEQ ID NO: 8749 - RNA, 30 nt, Homo Sapiens
uguaagcaaacuuggaugcaaaauauuuga

SEQ ID NO: 8750 - RNA, 32 nt, Homo Sapiens
agaauuuaauucaaauuuggauuuuucucacu

SEQ ID NO: 8751 - RNA, 32 nt, Homo Sapiens
acacaggugagugaaagaaaacauuggcggca

SEQ ID NO: 8752 - RNA, 30 nt, Homo Sapiens
cugcgaggagugcgacgugagucugagucu

SEQ ID NO: 8753 - RNA, 32 nt, Homo Sapiens
cuggcacccccgcuccccaacccuucuugccu

SEQ ID NO: 8754 - RNA, 32 nt, Homo Sapiens
auugcauggggguuauuuuaucuuucaugauu

SEQ ID NO: 8755 - RNA, 32 nt, Homo Sapiens
cgccagggagcccccucugugcuccucagagu

SEQ ID NO: 8756 - RNA, 32 nt, Homo Sapiens
gauucugaugaaagauuuucuugucccucucu

SEQ ID NO: 8757 - RNA, 32 nt, Homo Sapiens
caaaagaguaugccucuuucuaaaugagaaaa

SEQ ID NO: 8758 - RNA, 32 nt, Homo Sapiens
uaaaucaucacagauuuugaagucacaccuga

SEQ ID NO: 8759 - RNA, 32 nt, Homo Sapiens
uuacaguauaucuauauauacuuaacacugua

SEQ ID NO: 8760 - RNA, 32 nt, Homo Sapiens
guuccuccaccugcuggccccuggacaccucu

SEQ ID NO: 8761 - RNA, 32 nt, Homo Sapiens
ugcgggccucguccacccacagaccccgggga

SEQ ID NO: 8762 - RNA, 32 nt, Homo Sapiens
cuggagauaaaacuugucuccucuaccaccac

SEQ ID NO: 8763 - RNA, 32 nt, Homo Sapiens
gggacguaugacgguccaucagcgcucugccu

SEQ ID NO: 8764 - RNA, 32 nt, Homo Sapiens
gacucuuucccccugggaccaacagcagccag

SEQ ID NO: 8765 - RNA, 32 nt, Homo Sapiens
uuccauucugugucacagacaccaacacacca

SEQ ID NO: 8766 - RNA, 32 nt, Homo Sapiens
acagagagagggcuacuguuguuucuggaguc

SEQ ID NO: 8767 - RNA, 32 nt, Homo Sapiens
gccggcuccaggccagacccaggagccaagag

SEQ ID NO: 8768 - RNA, 28 nt, Homo Sapiens
cggacggggcggcuggccgggcagagga

SEQ ID NO: 8769 - RNA, 32 nt, Homo Sapiens
uucguuuucguuuugaagacguggacuccucu

SEQ ID NO: 8770 - RNA, 32 nt, Homo Sapiens
uuuuuaauaccuuuccugucuuucucucccug

SEQ ID NO: 8771 - RNA, 32 nt, Homo Sapiens
ccgggccccucuagcccucuguucccuccccu

SEQ ID NO: 8772 - RNA, 32 nt, Homo Sapiens
ugcuguucuacagauagaaaaaaaguccaaau

SEQ ID NO: 8773 - RNA, 32 nt, Homo Sapiens
uucugcuuucugucucucugguuuugacuauu

SEQ ID NO: 8774 - RNA, 32 nt, Homo Sapiens
cggugggcucccuggggugugugagcccggug

SEQ ID NO: 8775 - RNA, 32 nt, Homo Sapiens
gagaguuaaggaucuuggggagguggccgggu

SEQ ID NO: 8776 - RNA, 32 nt, Homo Sapiens
ugauauuuaauggaaaucaugcccaugaauau

SEQ ID NO: 8777 - RNA, 32 nt, Homo Sapiens
ccuaaaagcacuccugcuuaaucuucaaagcc

SEQ ID NO: 8778 - RNA, 32 nt, Homo Sapiens
ccccgggcaaagggucuuuugcagcuuuugca

SEQ ID NO: 8779 - RNA, 32 nt, Homo Sapiens
gcauuuaaaaauacuggauuaacugcagugua

SEQ ID NO: 8780 - RNA, 32 nt, Homo Sapiens
ccuccucccagcccaggcgccacgacccggac

SEQ ID NO: 8781 - RNA, 32 nt, Homo Sapiens
guguuuaaauuugagaucaaggagaagauagu

SEQ ID NO: 8782 - RNA, 32 nt, Homo Sapiens
ugucgcccacugagcaaagauucccucguaaa

SEQ ID NO: 8783 - RNA, 32 nt, Homo Sapiens
agucccugaagaagauucuguggcuacaggcu

SEQ ID NO: 8784 - RNA, 32 nt, Homo Sapiens
gguucuuuuuuauugcagaauaauguuccagg

SEQ ID NO: 8785 - RNA, 31 nt, Homo Sapiens
aagguugcaagguaaucaaguccauaaccac

SEQ ID NO: 8786 - RNA, 32 nt, Homo Sapiens
ugaacuguuucaugcugcuguguuuucaaaag

SEQ ID NO: 8787 - RNA, 32 nt, Homo Sapiens
gguuuaauauccaaacuauauaaggaacucac

SEQ ID NO: 8788 - RNA, 32 nt, Homo Sapiens
uuaggcccacugugccucuccuuuuuucucuu

SEQ ID NO: 8789 - RNA, 32 nt, Homo Sapiens
ggaaguacuguaaaagaauuacaauaaaauaa

SEQ ID NO: 8790 - RNA, 31 nt, Homo Sapiens
ggagagaugaaacauggaccgagggcggcag

SEQ ID NO: 8791 - RNA, 32 nt, Homo Sapiens
uaucaugcaauggaaaugaugcuuuuuguaag

SEQ ID NO: 8792 - RNA, 32 nt, Homo Sapiens
uaccuucagauacuuuuuccugccucagcucu

SEQ ID NO: 8793 - RNA, 32 nt, Homo Sapiens
ggcgcugcauguuuuucuuugagugcaaaugu

SEQ ID NO: 8794 - RNA, 32 nt, Homo Sapiens
cacagagacccgcggccuccccgcccccggcc

SEQ ID NO: 8795 - RNA, 32 nt, Homo Sapiens
cccaugccuucaagucagcaucaggcuuaggg

SEQ ID NO: 8796 - RNA, 30 nt, Homo Sapiens
cccuacuuuacagauggggaaacugaggcu

SEQ ID NO: 8797 - RNA, 32 nt, Homo Sapiens
gcaacacuaggauugguggguuucugguucuc

SEQ ID NO: 8798 - RNA, 32 nt, Homo Sapiens
gugggacuggcucucccuccccagccacgagu

SEQ ID NO: 8799 - RNA, 32 nt, Homo Sapiens
uuuuagcaaaaauugucuuauaauacuagcua

SEQ ID NO: 8800 - RNA, 32 nt, Homo Sapiens
cgccuagcaacaugucgcuuggcugccaccca

SEQ ID NO: 8801 - RNA, 32 nt, Homo Sapiens
gcagcgggaaaggcugacugggaaauccauuu

SEQ ID NO: 8802 - RNA, 32 nt, Homo Sapiens
acgugcccagcauguagauucuggacuaacag

SEQ ID NO: 8803 - RNA, 32 nt, Homo Sapiens
ucugcugucucuucagucugcuccauccauca

SEQ ID NO: 8804 - RNA, 32 nt, Homo Sapiens
ugcccggggaucccccgccccauccuccugcc

SEQ ID NO: 8805 - RNA, 32 nt, Homo Sapiens
caucuucauuggcugcaacuugaugagcuaca

SEQ ID NO: 8806 - RNA, 27 nt, Homo Sapiens
cgccuccucagcuucagccuccgcgcc

SEQ ID NO: 8807 - RNA, 32 nt, Homo Sapiens
aucuguggaagcuggaguaagaauaaacccca

SEQ ID NO: 8808 - RNA, 32 nt, Homo Sapiens
cauuucccacuuugguuguguggcauuacuuu

SEQ ID NO: 8809 - RNA, 32 nt, Homo Sapiens
cuuggguagaucaucagggacacaucacauuc

SEQ ID NO: 8810 - RNA, 32 nt, Homo Sapiens
cacugugggcauguggucaagaugcauaccuc

SEQ ID NO: 8811 - RNA, 32 nt, Homo Sapiens
cagcuccccacucaggacgcuuccucauuucu

SEQ ID NO: 8812 - RNA, 32 nt, Homo Sapiens
gagcgcgacacgugcggcccagagcaccgggg

SEQ ID NO: 8813 - RNA, 32 nt, Homo Sapiens
gggguggaagggggcaaaugccuuaccuaaaa

SEQ ID NO: 8814 - RNA, 32 nt, Homo Sapiens
gugguugauggccacugcaaaccuggcaccau

SEQ ID NO: 8815 - RNA, 32 nt, Homo Sapiens
ucauuggcuaacaaguugcuuauuuagcagaa

SEQ ID NO: 8816 - RNA, 32 nt, Homo Sapiens
ucuucaguacuauugaaggagacauugaucuu

SEQ ID NO: 8817 - RNA, 32 nt, Homo Sapiens
accccugcagccuccuggcccgcucaccuucc

SEQ ID NO: 8818 - RNA, 32 nt, Homo Sapiens
auuuauaacugaucauauuacuguauuuguau

SEQ ID NO: 8819 - RNA, 32 nt, Homo Sapiens
uauuuuuuaaaagcgcuacaaaauauuguuuu

SEQ ID NO: 8820 - RNA, 32 nt, Homo Sapiens
uauauauuuauuguguacaauguaaugacuua

SEQ ID NO: 8821 - RNA, 32 nt, Homo Sapiens
acauaguuuuaucaguguauuuagacacuauc

SEQ ID NO: 8822 - RNA, 32 nt, Homo Sapiens
uaaaauagguguugccuauugcugugcuuaua

SEQ ID NO: 8823 - RNA, 32 nt, Homo Sapiens
gccuuucugucaucaucuccacagcccaccca

SEQ ID NO: 8824 - RNA, 32 nt, Homo Sapiens
gaauggcuuaguccugagaaucugcaaagucu

SEQ ID NO: 8825 - RNA, 32 nt, Homo Sapiens
ucauugugguauaaauggaauagcagguguug

SEQ ID NO: 8826 - RNA, 32 nt, Homo Sapiens
auacaaaugggauuauacuaaaauaaguaaug

SEQ ID NO: 8827 - RNA, 32 nt, Homo Sapiens
ccuccaccuuguuuucuuuucucuacagcuug

SEQ ID NO: 8828 - RNA, 32 nt, Homo Sapiens
gcauucacugggcaccuucccggagcggacac

SEQ ID NO: 8829 - RNA, 32 nt, Homo Sapiens
ucugggguggguggaguggcgacaggauagag

SEQ ID NO: 8830 - RNA, 32 nt, Homo Sapiens
gguguaaugcacaauuuagaaaacauucaucc

SEQ ID NO: 8831 - RNA, 32 nt, Homo Sapiens
agucucaaaaucaacucucuuaugguauuaua

SEQ ID NO: 8832 - RNA, 32 nt, Homo Sapiens
gagacugggauguucacgcagcacuccauuac

SEQ ID NO: 8833 - RNA, 32 nt, Homo Sapiens
uuuuccuuccuucuccuucuuggaguuacaac

SEQ ID NO: 8834 - RNA, 32 nt, Homo Sapiens
acugccuuuucucugguaauuguaaauauuua

SEQ ID NO: 8835 - RNA, 32 nt, Homo Sapiens
caggcacacacacacacacacacacacacacu

SEQ ID NO: 8836 - RNA, 32 nt, Homo Sapiens
uuauguuacccaucaucuuuaaaaacauuaua

SEQ ID NO: 8837 - RNA, 32 nt, Homo Sapiens
ggucucaaacuccuaaccucgugauccgccug

SEQ ID NO: 8838 - RNA, 32 nt, Homo Sapiens
aacgcaagccagcagaguugucuuaaauuagu

SEQ ID NO: 8839 - RNA, 31 nt, Homo Sapiens
cggcgugcagggcgggcuccaagcgcuuugc

SEQ ID NO: 8840 - RNA, 32 nt, Homo Sapiens
agccuccugugcugcguguccaucaucagcug

SEQ ID NO: 8841 - RNA, 32 nt, Homo Sapiens
gguauauaucuaggaguggaacugcuggguca

SEQ ID NO: 8842 - RNA, 32 nt, Homo Sapiens
cuuaugcucuucuaugagagagaugaauuggg

SEQ ID NO: 8843 - RNA, 31 nt, Homo Sapiens
auccuuccacccuccaguuaagcagcagcug

SEQ ID NO: 8844 - RNA, 32 nt, Homo Sapiens
ugcaccagccucuggauagcaggcugagucac

SEQ ID NO: 8845 - RNA, 32 nt, Homo Sapiens
ggguugcaaccuggggaagccacaucccacug

SEQ ID NO: 8846 - RNA, 32 nt, Homo Sapiens
ucgccacccgcggucgcccagcacgccgggac

SEQ ID NO: 8847 - RNA, 32 nt, Homo Sapiens
aaccucauacccagaaacccaucaucgccacu

SEQ ID NO: 8848 - RNA, 32 nt, Homo Sapiens
uagaagagugcacuuuuguauuucauaguaag

SEQ ID NO: 8849 - RNA, 32 nt, Homo Sapiens
uauuauauuucuggaauuucacacuuuaccua

SEQ ID NO: 8850 - RNA, 32 nt, Homo Sapiens
cuucagugguggcuacuguucucuagcuguuc

SEQ ID NO: 8851 - RNA, 32 nt, Homo Sapiens
gguacagauggagucgucccgcggccgccggc

SEQ ID NO: 8852 - RNA, 32 nt, Homo Sapiens
gcaauuugcauucuggggauuguuuggccucu

SEQ ID NO: 8853 - RNA, 32 nt, Homo Sapiens
cccuggcucccugacccuuacaaacacuaaaa

SEQ ID NO: 8854 - RNA, 32 nt, Homo Sapiens
gggguccgcucccucaguggggccgguggaga

SEQ ID NO: 8855 - RNA, 32 nt, Homo Sapiens
gcugaccccagcuaaggcauggcaccgcuucu

SEQ ID NO: 8856 - RNA, 32 nt, Homo Sapiens
gugggggcaaauguguagauauuuuuaaacau

SEQ ID NO: 8857 - RNA, 32 nt, Homo Sapiens
gcaucuguggaggguggugcugacagggcuag

SEQ ID NO: 8858 - RNA, 32 nt, Homo Sapiens
uuggccuugugcuuccacaucuguaaaaugag

SEQ ID NO: 8859 - RNA, 32 nt, Homo Sapiens
auugucggaagugcagcccggcgugagcauug

SEQ ID NO: 8860 - RNA, 32 nt, Homo Sapiens
cuggggcuuccagggaggggccccccaacucc

SEQ ID NO: 8861 - RNA, 32 nt, Homo Sapiens
ggagcggaggucgggcccacagccgcuccgcc

SEQ ID NO: 8862 - RNA, 32 nt, Homo Sapiens
aaaugcugacugaguuccugcuguguguugga

SEQ ID NO: 8863 - RNA, 32 nt, Homo Sapiens
uuuuaauuacaauggaaguuuaaacauuucuu

SEQ ID NO: 8864 - RNA, 32 nt, Homo Sapiens
aagccccaaacacaggugcauugagcaaagaa

SEQ ID NO: 8865 - RNA, 32 nt, Homo Sapiens
cuucugcagauuuugguggggaggcgguaaua

SEQ ID NO: 8866 - RNA, 32 nt, Homo Sapiens
caguguuuuuggcagauaguguuccauaaccu

SEQ ID NO: 8867 - RNA, 32 nt, Homo Sapiens
uguuagcuguagauuuuuuuuauaaccuuaau

SEQ ID NO: 8868 - RNA, 32 nt, Homo Sapiens
cacaaccagaagcaccaauuuaaaagagaagu

SEQ ID NO: 8869 - RNA, 32 nt, Homo Sapiens
cuuguguugugugaagugaugaaaguauaacu

SEQ ID NO: 8870 - RNA, 32 nt, Homo Sapiens
ggcucguggcacccuuggggugugggcugugc

SEQ ID NO: 8871 - RNA, 32 nt, Homo Sapiens
cuagauacagaaaacacuuaaggcagauuaaa

SEQ ID NO: 8872 - RNA, 32 nt, Homo Sapiens
ugucccucucucagcccuccauggccuggcac

SEQ ID NO: 8873 - RNA, 32 nt, Homo Sapiens
uaagguagagagugaaauauggucaggacaaa

SEQ ID NO: 8874 - RNA, 32 nt, Homo Sapiens
uggaauauuuguauuacuuacaauuaauuaau

SEQ ID NO: 8875 - RNA, 32 nt, Homo Sapiens
cucccacuuggcugucccugcugcugggcagg

SEQ ID NO: 8876 - RNA, 32 nt, Homo Sapiens
gauucgggccugggacugugucugucgcccau

SEQ ID NO: 8877 - RNA, 31 nt, Homo Sapiens
agccauggcgugaguaccggggcgggucguc

SEQ ID NO: 8878 - RNA, 32 nt, Homo Sapiens
acccaguccucccagcugccauguuucaaaga

SEQ ID NO: 8879 - RNA, 32 nt, Homo Sapiens
aggucaucucugcuccuccuaguuucaccaug

SEQ ID NO: 8880 - RNA, 32 nt, Homo Sapiens
cugcccaagugggcugcagacugagugcugcc

SEQ ID NO: 8881 - RNA, 32 nt, Homo Sapiens
uuucaugagucuuuauuuuuuguuaccugcaa

SEQ ID NO: 8882 - RNA, 32 nt, Homo Sapiens
acaccgucugcccuggccaccauccugggccu

SEQ ID NO: 8883 - RNA, 32 nt, Homo Sapiens
ggcccuuucuuauucuuuggcuccucauccac

SEQ ID NO: 8884 - RNA, 32 nt, Homo Sapiens
ucuggaagggaagacagggcagggaccauguc

SEQ ID NO: 8885 - RNA, 32 nt, Homo Sapiens
aacgcagugaccagcugggugcuguggcucac

SEQ ID NO: 8886 - RNA, 32 nt, Homo Sapiens
cgccagcgccgcgccccgugggugaauccccg

SEQ ID NO: 8887 - RNA, 32 nt, Homo Sapiens
gaauaaaaacaauaugaguaguguaaucuugu

SEQ ID NO: 8888 - RNA, 32 nt, Homo Sapiens
caggaggaucauuugagcucaugagggcccag

SEQ ID NO: 8889 - RNA, 32 nt, Homo Sapiens
gcauuuauuuauauuucucuguaggguguucc

SEQ ID NO: 8890 - RNA, 32 nt, Homo Sapiens
uuggggguggggcgugguguuuagacacagau

SEQ ID NO: 8891 - RNA, 32 nt, Homo Sapiens
cccucacauccuguuucugacuuuggaaugga

SEQ ID NO: 8892 - RNA, 32 nt, Homo Sapiens
cuucaacucugccacuuccugcuuacuugcug

SEQ ID NO: 8893 - RNA, 31 nt, Homo Sapiens
agggaacagccccaggguuggggggugccgg

SEQ ID NO: 8894 - RNA, 32 nt, Homo Sapiens
cugaagcaaccucuuauguauacuagaugcuu

SEQ ID NO: 8895 - RNA, 32 nt, Homo Sapiens
aauauucaaagacuuuuguagcauacaaagug

SEQ ID NO: 8896 - RNA, 32 nt, Homo Sapiens
cagcagcguggccagcgucuaugcaggcaagg

SEQ ID NO: 8897 - RNA, 32 nt, Homo Sapiens
cggcucgcaagccccagcucaccgcgccgcgg

SEQ ID NO: 8898 - RNA, 32 nt, Homo Sapiens
caggaggagcugcacagccugcgggccaugca

SEQ ID NO: 8899 - RNA, 32 nt, Homo Sapiens
augaaugaugcuuuucugaaaaugaaauauaa

SEQ ID NO: 8900 - RNA, 32 nt, Homo Sapiens
ggaagaaagauaaaauuauuggucaucauuug

SEQ ID NO: 8901 - RNA, 32 nt, Homo Sapiens
ccucugccccucacugcucugugcagauccug

SEQ ID NO: 8902 - RNA, 32 nt, Homo Sapiens
gagccaaagcccaccuucuccucagccugagc

SEQ ID NO: 8903 - RNA, 32 nt, Homo Sapiens
accccaacucuccgagugcuaguuaggugcuc

SEQ ID NO: 8904 - RNA, 32 nt, Homo Sapiens
gccggcuccgcggaaaguuugcggccgccccu

SEQ ID NO: 8905 - RNA, 32 nt, Homo Sapiens
cuaacuuauuguggcuugaucuucuuaggaca

SEQ ID NO: 8906 - RNA, 32 nt, Homo Sapiens
uccaggguucccucccugugccucgguuuccc

SEQ ID NO: 8907 - RNA, 32 nt, Homo Sapiens
ugcuguuuagugaacagguucuccaggugauu

SEQ ID NO: 8908 - RNA, 32 nt, Homo Sapiens
ucuuacgccucauuuuaauuuauaaugaaggu

SEQ ID NO: 8909 - RNA, 32 nt, Homo Sapiens
gaugagccugaagagaacugugcuccuccucg

SEQ ID NO: 8910 - RNA, 32 nt, Homo Sapiens
acggggaucggugaccccgguggggaaggggg

SEQ ID NO: 8911 - RNA, 32 nt, Homo Sapiens
cagaggcaggccuggguuuauugcagguggac

SEQ ID NO: 8912 - RNA, 32 nt, Homo Sapiens
augcggcagagcuggcauuucuccucagagaa

SEQ ID NO: 8913 - RNA, 30 nt, Homo Sapiens
gaggagcgcgcguagccgccggagcccgcc

SEQ ID NO: 8914 - RNA, 32 nt, Homo Sapiens
ccagcagcguggccagcgucuaugcaggcaag

SEQ ID NO: 8915 - RNA, 32 nt, Homo Sapiens
ggccugccucgcggaccuggacucgggacucc

SEQ ID NO: 8916 - RNA, 32 nt, Homo Sapiens
gggagccugcgccuuuccuccucccaacgugg

SEQ ID NO: 8917 - RNA, 32 nt, Homo Sapiens
aagcuaguauucaauguagaguauuuucauau

SEQ ID NO: 8918 - RNA, 32 nt, Homo Sapiens
caaguaaaaaucacacuuauugaugaauguaa

SEQ ID NO: 8919 - RNA, 32 nt, Homo Sapiens
caauugguggaacgggcccuucaucagaugcu

SEQ ID NO: 8920 - RNA, 32 nt, Homo Sapiens
ugggaggggaagggcuggguccgucugagugg

SEQ ID NO: 8921 - RNA, 32 nt, Homo Sapiens
aaaugaacaaagugggagaucacugucauggc

SEQ ID NO: 8922 - RNA, 32 nt, Homo Sapiens
acgauccuggcucacugcaaucuccaucuccc

SEQ ID NO: 8923 - RNA, 32 nt, Homo Sapiens
aaagugcuuuuuccuucaggaaguggagaugc

SEQ ID NO: 8924 - RNA, 32 nt, Homo Sapiens
gacaaggugauauggggagagauggaagagga

SEQ ID NO: 8925 - RNA, 32 nt, Homo Sapiens
uaagaaaugcaaacgaccgcagagcagguuga

SEQ ID NO: 8926 - RNA, 32 nt, Homo Sapiens
gcugcugccugccugugauguccacucugcuu

SEQ ID NO: 8927 - RNA, 32 nt, Homo Sapiens
ucagcuccccgcgcuuccagcccuggcuuccg

SEQ ID NO: 8928 - RNA, 32 nt, Homo Sapiens
aucucaccaacccaaagcccaacucacuccac

SEQ ID NO: 8929 - RNA, 32 nt, Homo Sapiens
uucuuccugaugccaguucuucugggaagcgc

SEQ ID NO: 8930 - RNA, 32 nt, Homo Sapiens
aagggaaggucaagcaaagaacuguaaccgaa

SEQ ID NO: 8931 - RNA, 32 nt, Homo Sapiens
guggcccuccugcgagucagugagugucuccc

SEQ ID NO: 8932 - RNA, 32 nt, Homo Sapiens
aggcccaacaaauucacguggccaugucuggu

SEQ ID NO: 8933 - RNA, 32 nt, Homo Sapiens
gcggggccgggaagccaccuccaccuugccgu

SEQ ID NO: 8934 - RNA, 32 nt, Homo Sapiens
ucuuccugcccccacaccccauccccagcuag

SEQ ID NO: 8935 - RNA, 32 nt, Homo Sapiens
cacuucaacuucacuacuucuguagucucauc

SEQ ID NO: 8936 - RNA, 32 nt, Homo Sapiens
acccugagcaggucgggggacacagggccgag

SEQ ID NO: 8937 - RNA, 32 nt, Homo Sapiens
gauagcuucaaggaauacaacugacuuuauga

SEQ ID NO: 8938 - RNA, 32 nt, Homo Sapiens
aaacuguccagggccucacagggaggcauuca

SEQ ID NO: 8939 - RNA, 32 nt, Homo Sapiens
uaugcauuuaaguggaauauuuggugccauuu

SEQ ID NO: 8940 - RNA, 32 nt, Homo Sapiens
uugcacuccccuccccucucgcuuuggcuuag

SEQ ID NO: 8941 - RNA, 32 nt, Homo Sapiens
uccagcaucuguccccaccuccccuccugacc

SEQ ID NO: 8942 - RNA, 31 nt, Homo Sapiens
uuuugcugcgcuucaucauggagucauagaa

SEQ ID NO: 8943 - RNA, 32 nt, Homo Sapiens
uggguggucacuuuucuuccuaggacuugccu

SEQ ID NO: 8944 - RNA, 32 nt, Homo Sapiens
caggggagggggcaaugguggagguggcgggg

SEQ ID NO: 8945 - RNA, 32 nt, Homo Sapiens
ggaccaaugcccagaaucucugagcuuuuuau

SEQ ID NO: 8946 - RNA, 32 nt, Homo Sapiens
ggcacgaggggagggagcagucggucgcugcg

SEQ ID NO: 8947 - RNA, 32 nt, Homo Sapiens
uuacuuuuuuucugugacauuuaugucucaug

SEQ ID NO: 8948 - RNA, 32 nt, Homo Sapiens
gugaggugagcaggcccggggagggugguuac

SEQ ID NO: 8949 - RNA, 32 nt, Homo Sapiens
cccucuuccagagcuuccacggugcuggcaaa

SEQ ID NO: 8950 - RNA, 32 nt, Homo Sapiens
agcguucccaggcuacaguuuguagccgacga

SEQ ID NO: 8951 - RNA, 32 nt, Homo Sapiens
agucugugucuuccucacugaacccugcacgu

SEQ ID NO: 8952 - RNA, 32 nt, Homo Sapiens
ucugcuccagggggacagccccucguguccag

SEQ ID NO: 8953 - RNA, 32 nt, Homo Sapiens
uccuaaagauauuaauaaggacacugaggguc

SEQ ID NO: 8954 - RNA, 32 nt, Homo Sapiens
agacacacacuuuaauuuuauguuaacuuguu

SEQ ID NO: 8955 - RNA, 32 nt, Homo Sapiens
aacuuguugaaguccuuucgugccgcugccuu

SEQ ID NO: 8956 - RNA, 32 nt, Homo Sapiens
aacugagccagacgcggcgguggcggcggcuc

SEQ ID NO: 8957 - RNA, 32 nt, Homo Sapiens
uuuugagaaagauguuaauguuuugccauggu

SEQ ID NO: 8958 - RNA, 32 nt, Homo Sapiens
uucuuucugaagagcugcacacagucauuccu

SEQ ID NO: 8959 - RNA, 28 nt, Homo Sapiens
uauaugaggccccgcuccggccccacgc

SEQ ID NO: 8960 - RNA, 32 nt, Homo Sapiens
acuucuagaacaaaaucuuuagaauauguccu

SEQ ID NO: 8961 - RNA, 32 nt, Homo Sapiens
ccaccuuucaguccguguuuaaguguucuccc

SEQ ID NO: 8962 - RNA, 32 nt, Homo Sapiens
guagugaggugauucagguaggcugaaaaucc

SEQ ID NO: 8963 - RNA, 32 nt, Homo Sapiens
caacauaggaguucuuuuuaugcccccaaaca

SEQ ID NO: 8964 - RNA, 32 nt, Homo Sapiens
aggaguuggggcccagcucccaguuuacuugg

SEQ ID NO: 8965 - RNA, 32 nt, Homo Sapiens
aaacauaguuuauguagcuuuguaacauuccu

SEQ ID NO: 8966 - RNA, 32 nt, Homo Sapiens
aacgaucugugaaaaugcacuggaagcuucug

SEQ ID NO: 8967 - RNA, 32 nt, Homo Sapiens
acugguuguuuccaucuucaucauugucauca

SEQ ID NO: 8968 - RNA, 32 nt, Homo Sapiens
uuugaaauguggaacuuguguguucugcuuua

SEQ ID NO: 8969 - RNA, 32 nt, Homo Sapiens
ccugcgcccagaagcccacgccgccgccgucu

SEQ ID NO: 8970 - RNA, 32 nt, Homo Sapiens
gaucuacacgagagggcugggacgguggaaga

SEQ ID NO: 8971 - RNA, 32 nt, Homo Sapiens
uugccaugggguucugagaggcugggaguuca

SEQ ID NO: 8972 - RNA, 32 nt, Homo Sapiens
ucagaacucagguguuuuuuauuuacgcguca

SEQ ID NO: 8973 - RNA, 32 nt, Homo Sapiens
ccagccuggccccaagcauggaaacgcacaac

SEQ ID NO: 8974 - RNA, 32 nt, Homo Sapiens
aaaaauaggugccuccuuuauaaacaguaaua

SEQ ID NO: 8975 - RNA, 32 nt, Homo Sapiens
aguauuuauuuuacugcucuuuuuugugcaua

SEQ ID NO: 8976 - RNA, 32 nt, Homo Sapiens
aguaccgacaaugacgaagauaccagaucccu

SEQ ID NO: 8977 - RNA, 32 nt, Homo Sapiens
auacugggcccuauucaguggcagcuucuugu

SEQ ID NO: 8978 - RNA, 27 nt, Homo Sapiens
aauuuucaacuguucugguaugaucua

SEQ ID NO: 8979 - RNA, 32 nt, Homo Sapiens
agcagguguuuguuuacccauaguguucugug

SEQ ID NO: 8980 - RNA, 32 nt, Homo Sapiens
acauaaauguauuaguucaucuccauguagua

SEQ ID NO: 8981 - RNA, 32 nt, Homo Sapiens
agggaaggugauugcugcuauucuggaaugug

SEQ ID NO: 8982 - RNA, 32 nt, Homo Sapiens
uccccggcgggggacggugcggugaccggcug

SEQ ID NO: 8983 - RNA, 32 nt, Homo Sapiens
agguugcgcuggcuuggcugcucgcugggucu

SEQ ID NO: 8984 - RNA, 32 nt, Homo Sapiens
cggaaguuacacaaacgccagcacaaauucaa

SEQ ID NO: 8985 - RNA, 32 nt, Homo Sapiens
gcaaaauggaaaucuagaccuccuucuucauc

SEQ ID NO: 8986 - RNA, 32 nt, Homo Sapiens
gggcacccgcggccuugcugcgcaugcucgcg

SEQ ID NO: 8987 - RNA, 32 nt, Homo Sapiens
ugcacuauugaaucaggaaaauuuaagaaaaa

SEQ ID NO: 8988 - RNA, 32 nt, Homo Sapiens
ccuggggcagaauggaacagccugggcccagg

SEQ ID NO: 8989 - RNA, 32 nt, Homo Sapiens
uccgaccgccggaccgagccacguuccuccgu

SEQ ID NO: 8990 - RNA, 32 nt, Homo Sapiens
uaaaaauaguaaaagaaacugauaaagaaaag

SEQ ID NO: 8991 - RNA, 32 nt, Homo Sapiens
guccaacuggaaacagaaaaauauuuaaagaa

SEQ ID NO: 8992 - RNA, 32 nt, Homo Sapiens
gauccagccccagggggaugggcuucacuggc

SEQ ID NO: 8993 - RNA, 32 nt, Homo Sapiens
uuuuaaugagaggcuuggcgcaugcggcaccc

SEQ ID NO: 8994 - RNA, 32 nt, Homo Sapiens
agccccuuauauaaaaagaaguaaugucaaag

SEQ ID NO: 8995 - RNA, 32 nt, Homo Sapiens
caaguuuuguauuuuuugcuuuuguguuuugg

SEQ ID NO: 8996 - RNA, 32 nt, Homo Sapiens
uacuuaugaugaugaaggggguggggaagaag

SEQ ID NO: 8997 - RNA, 32 nt, Homo Sapiens
gacacaaagagacaagacuauuugaggacaau

SEQ ID NO: 8998 - RNA, 32 nt, Homo Sapiens
cggaccgcggggcggagcugccgcccgugagu

SEQ ID NO: 8999 - RNA, 32 nt, Homo Sapiens
uugaucucucucuucucgcgcgcgcacucucu

SEQ ID NO: 9000 - RNA, 32 nt, Homo Sapiens
auuggcuggggauaugguauaacgagccugag

SEQ ID NO: 9001 - RNA, 32 nt, Homo Sapiens
uuuguguauguggaaaugugcugggcaaguca

SEQ ID NO: 9002 - RNA, 32 nt, Homo Sapiens
aauaucauuuuaaaauguucauguucuguucu

SEQ ID NO: 9003 - RNA, 32 nt, Homo Sapiens
uccucucugaccaguuuggagggcacugaaga

SEQ ID NO: 9004 - RNA, 32 nt, Homo Sapiens
aaaugucugacuuuggggcagaugacacggug

SEQ ID NO: 9005 - RNA, 31 nt, Homo Sapiens
uuaauacgagauaaaaagguauaucacaaaa

SEQ ID NO: 9006 - RNA, 32 nt, Homo Sapiens
acaccauucuuccccaucgccccagaggacca

SEQ ID NO: 9007 - RNA, 32 nt, Homo Sapiens
cauguguaauuugaauccauuuggaugaaauu

SEQ ID NO: 9008 - RNA, 32 nt, Homo Sapiens
gcgaccuggagcaacgguaccauuccucgggc

SEQ ID NO: 9009 - RNA, 32 nt, Homo Sapiens
aaaaagaaagaaauuugaaaaaacuuucucuu

SEQ ID NO: 9010 - RNA, 32 nt, Homo Sapiens
uccuucuggccaagagugucuugcuuguggcg

SEQ ID NO: 9011 - RNA, 32 nt, Homo Sapiens
ccucugaacaacaugaucuuugagagggaaca

SEQ ID NO: 9012 - RNA, 32 nt, Homo Sapiens
uuccacccugcccauuuuuguaaaacugcagu

SEQ ID NO: 9013 - RNA, 32 nt, Homo Sapiens
uuugccaaagcaacacucuacuuagaagcaca

SEQ ID NO: 9014 - RNA, 32 nt, Homo Sapiens
ugcauagauuuuaauuuauacauaucaagaaa

SEQ ID NO: 9015 - RNA, 32 nt, Homo Sapiens
cucgcuccgcgcagcugagcgccccgcaucuc

SEQ ID NO: 9016 - RNA, 32 nt, Homo Sapiens
cagcuuuuguuguuuauauacaguacacagau

SEQ ID NO: 9017 - RNA, 32 nt, Homo Sapiens
ugauuauucugaagauaaaugucuggcuacag

SEQ ID NO: 9018 - RNA, 32 nt, Homo Sapiens
gcgcgugguuccccucccggugggcggauucc

SEQ ID NO: 9019 - RNA, 32 nt, Homo Sapiens
acaugugcaccaaguccccuccaaggagagac

SEQ ID NO: 9020 - RNA, 32 nt, Homo Sapiens
cagagaguggcagggcugaggacccaaaguca

SEQ ID NO: 9021 - RNA, 29 nt, Homo Sapiens
uuuuauaaaaauuaauuaaaaucuccaaa

SEQ ID NO: 9022 - RNA, 29 nt, Homo Sapiens
gcaaugauauguauucacccuauuaggaa

SEQ ID NO: 9023 - RNA, 32 nt, Homo Sapiens
aagaauuuaggaccacugcauccugucuuaau

SEQ ID NO: 9024 - RNA, 32 nt, Homo Sapiens
guggaacaagcacagauguucuucaacuguuu

SEQ ID NO: 9025 - RNA, 32 nt, Homo Sapiens
gggcuuuuagagagggggaagaguggucugag

SEQ ID NO: 9026 - RNA, 32 nt, Homo Sapiens
ggugccgugugccgaggcgcccugucaggcga

SEQ ID NO: 9027 - RNA, 32 nt, Homo Sapiens
aggagccgcucgccgguuuugccgccuccgcc

SEQ ID NO: 9028 - RNA, 32 nt, Homo Sapiens
guacauaucagucuauuuuuuauuauaaacaa

SEQ ID NO: 9029 - RNA, 32 nt, Homo Sapiens
uugcuguguucccugcagccccuggcccccca

SEQ ID NO: 9030 - RNA, 32 nt, Homo Sapiens
aaaaucugaaacaaaaaaagggacaaauugcu

SEQ ID NO: 9031 - RNA, 32 nt, Homo Sapiens
uuuaucaguuuauguaucucacuaggcuugac

SEQ ID NO: 9032 - RNA, 32 nt, Homo Sapiens
uugcugcaggacccggcuuccacguguguccc

SEQ ID NO: 9033 - RNA, 32 nt, Homo Sapiens
cgaacuucuccauggaaaugugucacagaacc

SEQ ID NO: 9034 - RNA, 32 nt, Homo Sapiens
acaugguggcgggcgccuguauucccagcuac

SEQ ID NO: 9035 - RNA, 32 nt, Homo Sapiens
cucucccugcggcgcuuucucuuccggcugaa

SEQ ID NO: 9036 - RNA, 31 nt, Homo Sapiens
gccgggcugccggugcggggagugcggcaag

SEQ ID NO: 9037 - RNA, 32 nt, Homo Sapiens
gugccccagaaaggcuggggcaugaguccugc

SEQ ID NO: 9038 - RNA, 32 nt, Homo Sapiens
ugccccgaccccuucccgccgccccgccccca

SEQ ID NO: 9039 - RNA, 32 nt, Homo Sapiens
ugcucacguggccaucaguggugcuggcugcu

SEQ ID NO: 9040 - RNA, 32 nt, Homo Sapiens
augcuaaaaaccaaauuauccaaaauuauuuu

SEQ ID NO: 9041 - RNA, 32 nt, Homo Sapiens
cuuuaaacauuauaggacaauuuuaugccaca

SEQ ID NO: 9042 - RNA, 32 nt, Homo Sapiens
augaagcaaaauacuaaucuaauuguguaaag

SEQ ID NO: 9043 - RNA, 32 nt, Homo Sapiens
auuuggacaaacaguucuuuuacagugguuau

SEQ ID NO: 9044 - RNA, 32 nt, Homo Sapiens
uuuagagauaauguauuuuccugaugugucac

SEQ ID NO: 9045 - RNA, 32 nt, Homo Sapiens
ucuacugcuuuaguuuuuuuuaaguucuccag

SEQ ID NO: 9046 - RNA, 32 nt, Homo Sapiens
caagaucuauaaagcgauauacagaugaaaau

SEQ ID NO: 9047 - RNA, 32 nt, Homo Sapiens
cccagguccugaaguuugagccaggcaagugg

SEQ ID NO: 9048 - RNA, 32 nt, Homo Sapiens
aauuuucuucaaacaaaacugcucuugugcaa

SEQ ID NO: 9049 - RNA, 32 nt, Homo Sapiens
gaacaaacccucacugagcaccucugauguug

SEQ ID NO: 9050 - RNA, 32 nt, Homo Sapiens
cuggagcccgggaaacaaggccucuggcucag

SEQ ID NO: 9051 - RNA, 32 nt, Homo Sapiens
gaaaggcagcccugucccaccauaccacaggc

SEQ ID NO: 9052 - RNA, 32 nt, Homo Sapiens
acccuguuuccccuccucuccccugugacuuc

SEQ ID NO: 9053 - RNA, 32 nt, Homo Sapiens
cagaagcagaucuuaccuguccugcuuagaac

SEQ ID NO: 9054 - RNA, 32 nt, Homo Sapiens
gagccggccgggggcggggagaugaguugcgg

SEQ ID NO: 9055 - RNA, 32 nt, Homo Sapiens
ucagguacugaauuuuauugcuugcuaauugu

SEQ ID NO: 9056 - RNA, 32 nt, Homo Sapiens
ggacgguuuugcuuuauggcuagacaggaacc

SEQ ID NO: 9057 - RNA, 32 nt, Homo Sapiens
gaaauccucaggugaggucugccuacgggcca

SEQ ID NO: 9058 - RNA, 32 nt, Homo Sapiens
uuuucugagccauaguccagcuguacuacagc

SEQ ID NO: 9059 - RNA, 32 nt, Homo Sapiens
accccugccucccaugccuggucccaagacag

SEQ ID NO: 9060 - RNA, 32 nt, Homo Sapiens
uacucagccaccaaaauauauuucacucaagg

SEQ ID NO: 9061 - RNA, 32 nt, Homo Sapiens
ucucagcacaaaauaaaaagcaucuguauuaa

SEQ ID NO: 9062 - RNA, 32 nt, Homo Sapiens
ugccucugcaggccuggcagcuaugagugucc

SEQ ID NO: 9063 - RNA, 32 nt, Homo Sapiens
aaaaacaaaaauguagauuguaaugaaauaca

SEQ ID NO: 9064 - RNA, 32 nt, Homo Sapiens
aaaaugaaauaccaauguaaagaucuaauuuc

SEQ ID NO: 9065 - RNA, 32 nt, Homo Sapiens
aagguaacuccauagcugggagccaagucucg

SEQ ID NO: 9066 - RNA, 32 nt, Homo Sapiens
uuauuauacucuauauuaaacaacuuuguuca

SEQ ID NO: 9067 - RNA, 32 nt, Homo Sapiens
cguguuccucuccggcggaacacacacacccg

SEQ ID NO: 9068 - RNA, 32 nt, Homo Sapiens
ccuacauuuaaaaauaaaaaauagaauguuga

SEQ ID NO: 9069 - RNA, 32 nt, Homo Sapiens
gcaaccuccuucugccagcagcucacacugcu

SEQ ID NO: 9070 - RNA, 32 nt, Homo Sapiens
ggacuaauucuggcaccccuuuccagggguuc

SEQ ID NO: 9071 - RNA, 32 nt, Homo Sapiens
auauuuaagaaucuaaaaauaaagggcaacuc

SEQ ID NO: 9072 - RNA, 32 nt, Homo Sapiens
uuagaaaaaaauuucaauuguggauguaauag

SEQ ID NO: 9073 - RNA, 32 nt, Homo Sapiens
ccagggagaggccaccuaucuggggagacagc

SEQ ID NO: 9074 - RNA, 30 nt, Homo Sapiens
caggguggagguggaaauuaaauuuaggga

SEQ ID NO: 9075 - RNA, 32 nt, Homo Sapiens
cucacagggaggaggaggcggcagcggcggag

SEQ ID NO: 9076 - RNA, 32 nt, Homo Sapiens
gguugcuguauauauauuccgggcaauauaug

SEQ ID NO: 9077 - RNA, 32 nt, Homo Sapiens
acuggcaauuuaugcuuuaaauuuaaaaauaa

SEQ ID NO: 9078 - RNA, 32 nt, Homo Sapiens
aagaagguccucuggggugcccugagaucuug

SEQ ID NO: 9079 - RNA, 32 nt, Homo Sapiens
ucacagccaccuccccaccuccccgcaagcug

SEQ ID NO: 9080 - RNA, 32 nt, Homo Sapiens
cccccaacccgcccccuuuucucugggaaccg

SEQ ID NO: 9081 - RNA, 32 nt, Homo Sapiens
agcaaaacccucaucucacaaaagaaaagaaa

SEQ ID NO: 9082 - RNA, 32 nt, Homo Sapiens
cugcaggcgcgcgccggggccgugcugauggg

SEQ ID NO: 9083 - RNA, 32 nt, Homo Sapiens
aauaauauauaguaaaacuaagauuuaagguu

SEQ ID NO: 9084 - RNA, 32 nt, Homo Sapiens
caaaaagguuuuuucuuuuaggugagugggaa

SEQ ID NO: 9085 - RNA, 32 nt, Homo Sapiens
uccuguacaccucggggccagcauccucaccu

SEQ ID NO: 9086 - RNA, 29 nt, Homo Sapiens
gccggaauagugaucuucaaaaaacccuu

SEQ ID NO: 9087 - RNA, 32 nt, Homo Sapiens
aggcaccuggccagguaagcuuaucacagcau

SEQ ID NO: 9088 - RNA, 32 nt, Homo Sapiens
ggcgaugcggacagcgcgggacagccagggga

SEQ ID NO: 9089 - RNA, 32 nt, Homo Sapiens
agagugaagaaccgccucuaaguuaaaaagug

SEQ ID NO: 9090 - RNA, 32 nt, Homo Sapiens
gugcagcgcucgccgccgggcccgagagcugc

SEQ ID NO: 9091 - RNA, 32 nt, Homo Sapiens
caccaucacccggcugcugcugggccuggaca

SEQ ID NO: 9092 - RNA, 32 nt, Homo Sapiens
gcagcuggagggcgagcgcgccgcccgcacac

SEQ ID NO: 9093 - RNA, 32 nt, Homo Sapiens
aggcucauaguuuguggaaaaaucccaauaug

SEQ ID NO: 9094 - RNA, 32 nt, Homo Sapiens
aaauacaacugagauuuaagauauaaaauaac

SEQ ID NO: 9095 - RNA, 32 nt, Homo Sapiens
gagguacgauuccggagaaucgcgaggcagag

SEQ ID NO: 9096 - RNA, 30 nt, Homo Sapiens
cugccugagaagcuucauaaaguauguuuu

SEQ ID NO: 9097 - RNA, 32 nt, Homo Sapiens
auuacggcacuauuuauaauagcaaagacuug

SEQ ID NO: 9098 - RNA, 32 nt, Homo Sapiens
caaggccccccucagcccgccagcugaggggu

SEQ ID NO: 9099 - RNA, 32 nt, Homo Sapiens
cccccaccuccacgcaggaucccggggauucu

SEQ ID NO: 9100 - RNA, 32 nt, Homo Sapiens
uguuucagccucagcccacgccaggugaaagg

SEQ ID NO: 9101 - RNA, 32 nt, Homo Sapiens
cgagaucugaaauaaaugagaagccaagcucu

SEQ ID NO: 9102 - RNA, 32 nt, Homo Sapiens
ccugcagccgccgccguccccggagcacgggg

SEQ ID NO: 9103 - RNA, 32 nt, Homo Sapiens
ggggagagaaggauucuagggguguggaguug

SEQ ID NO: 9104 - RNA, 32 nt, Homo Sapiens
gccgaggccaagggagacucugucaugucuga

SEQ ID NO: 9105 - RNA, 32 nt, Homo Sapiens
uuugugaaaacuuuuccaucccuuaaaacucc

SEQ ID NO: 9106 - RNA, 32 nt, Homo Sapiens
cauucuggauauuaacuccuuaccaaauauau

SEQ ID NO: 9107 - RNA, 32 nt, Homo Sapiens
uugggaugucauuguuuucacagcacuuuuuu

SEQ ID NO: 9108 - RNA, 32 nt, Homo Sapiens
gccucacuucugcuuuaaaucuagugaaaccc

SEQ ID NO: 9109 - RNA, 32 nt, Homo Sapiens
gaagacauuugucucuauuaaucuucuuaccc

SEQ ID NO: 9110 - RNA, 32 nt, Homo Sapiens
guuguggggaugaacuuuuuguuuuguuucuu

SEQ ID NO: 9111 - RNA, 32 nt, Homo Sapiens
gucucgccccauaagacuccgccccgccccac

SEQ ID NO: 9112 - RNA, 32 nt, Homo Sapiens
ucucuugcuacauugccuaaauccauuuguuu

SEQ ID NO: 9113 - RNA, 32 nt, Homo Sapiens
agaauauugauggauuuuaaaccagaguuuuu

SEQ ID NO: 9114 - RNA, 32 nt, Homo Sapiens
acggagcuccaggcuuacuaucuacagccccc

SEQ ID NO: 9115 - RNA, 30 nt, Homo Sapiens
ucucucggcaggcgcccgggugccgcgggg

SEQ ID NO: 9116 - RNA, 32 nt, Homo Sapiens
gcccuggguggcuuccuauacauccuggcaga

SEQ ID NO: 9117 - RNA, 32 nt, Homo Sapiens
gagagaacucuaacacaaaacaucuuauuaaa

SEQ ID NO: 9118 - RNA, 32 nt, Homo Sapiens
cuggccucggugggcucugacugcggggcuca

SEQ ID NO: 9119 - RNA, 32 nt, Homo Sapiens
gggccccaaauccaaugacuggcauccuuagg

SEQ ID NO: 9120 - RNA, 32 nt, Homo Sapiens
ccgccugggggugccggcguuggugacugcgg

SEQ ID NO: 9121 - RNA, 32 nt, Homo Sapiens
gccuuuggucaccacggccggaugcuggccau

SEQ ID NO: 9122 - RNA, 32 nt, Homo Sapiens
guggaagauuguggcguucacggcaaccagug

SEQ ID NO: 9123 - RNA, 32 nt, Homo Sapiens
ccucgacugagcuucacaccucuggaugccac

SEQ ID NO: 9124 - RNA, 32 nt, Homo Sapiens
cagagcugccccggccggcccccgucucuuuc

SEQ ID NO: 9125 - RNA, 32 nt, Homo Sapiens
accucuacugucaguuuucauuucuagcugcu

SEQ ID NO: 9126 - RNA, 32 nt, Homo Sapiens
uuuccuucugguggguucauggucucgcugac

SEQ ID NO: 9127 - RNA, 32 nt, Homo Sapiens
gagcccugacugugucaaauagcaugcccugu

SEQ ID NO: 9128 - RNA, 30 nt, Homo Sapiens
cucagccuggacuguggcagccacggcaga

SEQ ID NO: 9129 - RNA, 32 nt, Homo Sapiens
guuucuuuuauuuucauuucuaacauaaguaa

SEQ ID NO: 9130 - RNA, 32 nt, Homo Sapiens
cucuauuuuuacauuuauguucagaaaguuau

SEQ ID NO: 9131 - RNA, 32 nt, Homo Sapiens
caccccccauucucaccaccuguuucuuuguu

SEQ ID NO: 9132 - RNA, 32 nt, Homo Sapiens
ugcuugguuuuuggguggcagcagccagagga

SEQ ID NO: 9133 - RNA, 32 nt, Homo Sapiens
ccccucgcugucuuuagcaagcagguuucacu

SEQ ID NO: 9134 - RNA, 32 nt, Homo Sapiens
auuaaaagugaacauuuggugcugauacucaa

SEQ ID NO: 9135 - RNA, 32 nt, Homo Sapiens
ucgaggaauacaaagguagacaauauagauuu

SEQ ID NO: 9136 - RNA, 32 nt, Homo Sapiens
gaccccugugccagcgggccuggugauucgga

SEQ ID NO: 9137 - RNA, 32 nt, Homo Sapiens
ggacgacgcccccuccugcggcguggacuccg

SEQ ID NO: 9138 - RNA, 32 nt, Homo Sapiens
ucugacccucggcuacccuuuccugccccacu

SEQ ID NO: 9139 - RNA, 32 nt, Homo Sapiens
aagaacuuugucaucaagcccauugacaaaag

SEQ ID NO: 9140 - RNA, 32 nt, Homo Sapiens
uacucugcaacacuacgguccuaguuaagacc

SEQ ID NO: 9141 - RNA, 32 nt, Homo Sapiens
gauuccauggcuguugugcugauuccaaugcu

SEQ ID NO: 9142 - RNA, 32 nt, Homo Sapiens
gcggcucgggugacagcgucgcggccgccgga

SEQ ID NO: 9143 - RNA, 32 nt, Homo Sapiens
aaaggacaugaacucaucauuuuuuauggcug

SEQ ID NO: 9144 - RNA, 32 nt, Homo Sapiens
acccgagcucuuucgucugccugccaguuucc

SEQ ID NO: 9145 - RNA, 32 nt, Homo Sapiens
gcuggcuggaggagugaggggcagcuuaaguu

SEQ ID NO: 9146 - RNA, 32 nt, Homo Sapiens
gaaggaggcagacaugagcuguacuacucagu

SEQ ID NO: 9147 - RNA, 30 nt, Homo Sapiens
ucucaaggcaggcccugcaguuccacagag

SEQ ID NO: 9148 - RNA, 32 nt, Homo Sapiens
ugccagagggcuuucuuaaacggagaauaagu

SEQ ID NO: 9149 - RNA, 32 nt, Homo Sapiens
ggccacuccuucagggccccaggucgcuugcu

SEQ ID NO: 9150 - RNA, 32 nt, Homo Sapiens
acuccugcuguaaauuuggcuucuguugucac

SEQ ID NO: 9151 - RNA, 32 nt, Homo Sapiens
gacagggucuugcuuugucacccaggguggug

SEQ ID NO: 9152 - RNA, 32 nt, Homo Sapiens
cggggaggggauguuaguaggacugaucaugg

SEQ ID NO: 9153 - RNA, 32 nt, Homo Sapiens
ucccgcagugucugcguccgcacagcauaccc

SEQ ID NO: 9154 - RNA, 32 nt, Homo Sapiens
gugcaggagaacagcucugugauaccauuuaa

SEQ ID NO: 9155 - RNA, 32 nt, Homo Sapiens
cugggggcgaccuuuaccauaggaugaaguaa

SEQ ID NO: 9156 - RNA, 32 nt, Homo Sapiens
ugagcugcaccugccccuguaccuguugguaa

SEQ ID NO: 9157 - RNA, 32 nt, Homo Sapiens
uguggauacccggaaacacacacacacacaca

SEQ ID NO: 9158 - RNA, 32 nt, Homo Sapiens
caauuauuuuuccuuuaggucaaaauaauguc

SEQ ID NO: 9159 - RNA, 32 nt, Homo Sapiens
uguggugcuguaaaauuuauacuaaaaugugg

SEQ ID NO: 9160 - RNA, 32 nt, Homo Sapiens
guccgcucagggugggauggcagacauggcag

SEQ ID NO: 9161 - RNA, 29 nt, Homo Sapiens
uuuguagaaggguuauauuuuacuacugu

SEQ ID NO: 9162 - RNA, 32 nt, Homo Sapiens
ugauguucacucugaaauaaaucuucaaaaac

SEQ ID NO: 9163 - RNA, 32 nt, Homo Sapiens
gccucacagcuauaaaagaggauguuagaaau

SEQ ID NO: 9164 - RNA, 32 nt, Homo Sapiens
gugggaccgacccggggggauggagggggcac

SEQ ID NO: 9165 - RNA, 32 nt, Homo Sapiens
cccaaggcgugaaaaggaaaaauaucaagcug

SEQ ID NO: 9166 - RNA, 32 nt, Homo Sapiens
uugucccuuuuggggauuaugaaucagugcgu

SEQ ID NO: 9167 - RNA, 32 nt, Homo Sapiens
ugugcuugauaaagcuguuaagaauugucuuu

SEQ ID NO: 9168 - RNA, 32 nt, Homo Sapiens
gugugaggcugcccccugcugcuugggcuggc

SEQ ID NO: 9169 - RNA, 32 nt, Homo Sapiens
uuuccaaaaucacaugccuucaucucauuuua

SEQ ID NO: 9170 - RNA, 32 nt, Homo Sapiens
uauaaguugcugugugucuguccugauuucua

SEQ ID NO: 9171 - RNA, 32 nt, Homo Sapiens
uuuauucauuuuauuuuauuuauguauuuauu

SEQ ID NO: 9172 - RNA, 32 nt, Homo Sapiens
gggaggaggggcaggugcugcaggcucccccc

SEQ ID NO: 9173 - RNA, 32 nt, Homo Sapiens
cugauaaauauuaacaucacagaggaagacca

SEQ ID NO: 9174 - RNA, 32 nt, Homo Sapiens
ugcuucuguauauuuuuaagacuuuuuuauuu

SEQ ID NO: 9175 - RNA, 32 nt, Homo Sapiens
gggguggggcacugacaggggcgcugcgggca

SEQ ID NO: 9176 - RNA, 32 nt, Homo Sapiens
gacccggaggcucccacccccaccucucagga

SEQ ID NO: 9177 - RNA, 32 nt, Homo Sapiens
gccagaggcauggaagucaguguuugugggaa

SEQ ID NO: 9178 - RNA, 32 nt, Homo Sapiens
uuuuucauuuccccuguuuuguuuguuaguuu

SEQ ID NO: 9179 - RNA, 32 nt, Homo Sapiens
caggggcauggacuuuauagcacuuuuucaac

SEQ ID NO: 9180 - RNA, 32 nt, Homo Sapiens
uuuccuuucaaaaaacagagacuagccauaug

SEQ ID NO: 9181 - RNA, 32 nt, Homo Sapiens
cacaacugaagaaggggagcugugagaacgug

SEQ ID NO: 9182 - RNA, 32 nt, Homo Sapiens
ccaaucuggacacgugcccugaaggcaccauc

SEQ ID NO: 9183 - RNA, 32 nt, Homo Sapiens
caggcagcacuucuaagaaacacucuuaaaag

SEQ ID NO: 9184 - RNA, 32 nt, Homo Sapiens
guggcccgucgcgcugcugcugcggcgcucca

SEQ ID NO: 9185 - RNA, 32 nt, Homo Sapiens
ugcgugcaugcggccugcaaagggcagcacau

SEQ ID NO: 9186 - RNA, 32 nt, Homo Sapiens
aucuguucguggccucagagcggcgagagccc

SEQ ID NO: 9187 - RNA, 32 nt, Homo Sapiens
gggagcaguuugggggcggccggcagcaggag

SEQ ID NO: 9188 - RNA, 32 nt, Homo Sapiens
cucuccccauccccaaccacugcuagaaaauu

SEQ ID NO: 9189 - RNA, 32 nt, Homo Sapiens
uugagcuauaucuauuaugcuaguaccauaca

SEQ ID NO: 9190 - RNA, 32 nt, Homo Sapiens
cucuggcaacugcggcagcaggcuugugugug

SEQ ID NO: 9191 - RNA, 32 nt, Homo Sapiens
cuacuguauucccacaaggaauccccagauau

SEQ ID NO: 9192 - RNA, 32 nt, Homo Sapiens
aagggaugcaaucccugaaaccaggugcuucc

SEQ ID NO: 9193 - RNA, 32 nt, Homo Sapiens
gugacucugcugcggcggcugggcccgguggu

SEQ ID NO: 9194 - RNA, 32 nt, Homo Sapiens
acuuguccuuuuauucccuucccacagaccau

SEQ ID NO: 9195 - RNA, 32 nt, Homo Sapiens
aggcaggcucugaauuugauucagguauauuu

SEQ ID NO: 9196 - RNA, 32 nt, Homo Sapiens
aggaauuuugguaauaaugauguguuuugcuu

SEQ ID NO: 9197 - RNA, 32 nt, Homo Sapiens
gagugcaggcaccaccugaaggguauuugggg

SEQ ID NO: 9198 - RNA, 32 nt, Homo Sapiens
uacugucaugcaaagcgacuagaugguucagc

SEQ ID NO: 9199 - RNA, 32 nt, Homo Sapiens
uuuuggaaaccaauuaaaaugugccuuuggug

SEQ ID NO: 9200 - RNA, 32 nt, Homo Sapiens
gccccacaucccgcggccccagcacaaggugc

SEQ ID NO: 9201 - RNA, 31 nt, Homo Sapiens
gaggagcucaggagaaagggcuuccacauua

SEQ ID NO: 9202 - RNA, 32 nt, Homo Sapiens
ggcccagcuccaugguucuccucgccucacuc

SEQ ID NO: 9203 - RNA, 32 nt, Homo Sapiens
caaagcuaacaaauggcuaguuuucuaugauu

SEQ ID NO: 9204 - RNA, 32 nt, Homo Sapiens
cuguagccuaaacuccaaacauccucuuccau

SEQ ID NO: 9205 - RNA, 32 nt, Homo Sapiens
cauccauccuuuccuagcuccauccuuccguc

SEQ ID NO: 9206 - RNA, 32 nt, Homo Sapiens
auuccugugaacccccaguccuggcuucuuug

SEQ ID NO: 9207 - RNA, 32 nt, Homo Sapiens
uuaggaaauauguuuccuuggccaggugcaau

SEQ ID NO: 9208 - RNA, 32 nt, Homo Sapiens
uuuguuguuacuguuguuguuguuuuuuaaag

SEQ ID NO: 9209 - RNA, 32 nt, Homo Sapiens
cccagggacaagagacccugagagcccuggga

SEQ ID NO: 9210 - RNA, 32 nt, Homo Sapiens
ccugauuacuugagaucagggauuggugauga

SEQ ID NO: 9211 - RNA, 32 nt, Homo Sapiens
cagggcauguuugcuuuuuuuguuuauguguu

SEQ ID NO: 9212 - RNA, 32 nt, Homo Sapiens
guuaauaaaugaauucauggacuccuggacua

SEQ ID NO: 9213 - RNA, 32 nt, Homo Sapiens
cguucagaacagauaccaucauccugccuuug

SEQ ID NO: 9214 - RNA, 32 nt, Homo Sapiens
auugaauuugaaaaucaaauugauuauccucc

SEQ ID NO: 9215 - RNA, 32 nt, Homo Sapiens
aaauguucccugagugcuucgucugugccgca

SEQ ID NO: 9216 - RNA, 32 nt, Homo Sapiens
gggagagcgggaugcuggccggccgcgccugg

SEQ ID NO: 9217 - RNA, 32 nt, Homo Sapiens
uuauaaaaucaucagguugaacucuucaccuu

SEQ ID NO: 9218 - RNA, 32 nt, Homo Sapiens
cacacauuaugagcuugaauucuuaauucauc

SEQ ID NO: 9219 - RNA, 32 nt, Homo Sapiens
gccucacugugccaacacuccauccacacagg

SEQ ID NO: 9220 - RNA, 32 nt, Homo Sapiens
cgauccgcggggagccugggggcgggcgagug

SEQ ID NO: 9221 - RNA, 28 nt, Homo Sapiens
aguggagguucaggaccaaggggcuucu

SEQ ID NO: 9222 - RNA, 32 nt, Homo Sapiens
aaugaucuaagacacagcaaacaaaggggucc

SEQ ID NO: 9223 - RNA, 32 nt, Homo Sapiens
gaugaggccugccuguguuaauacaccuagug

SEQ ID NO: 9224 - RNA, 32 nt, Homo Sapiens
ucugucaccuccugucauuuuauuuuuuauuc

SEQ ID NO: 9225 - RNA, 32 nt, Homo Sapiens
guuauugcaaggauuaaaugaguuacuacaaa

SEQ ID NO: 9226 - RNA, 32 nt, Homo Sapiens
ccagaagaaaagaucaagggagaauuaucaag

SEQ ID NO: 9227 - RNA, 32 nt, Homo Sapiens
aacauuaaagauccacaaagcaguauuucuaa

SEQ ID NO: 9228 - RNA, 32 nt, Homo Sapiens
aggcagaagggagagugaugcacgaugggcga

SEQ ID NO: 9229 - RNA, 32 nt, Homo Sapiens
ccgcagaggagcuugccuggucucggucugag

SEQ ID NO: 9230 - RNA, 32 nt, Homo Sapiens
cggcugucacacucacaugugccugcaauaaa

SEQ ID NO: 9231 - RNA, 32 nt, Homo Sapiens
gccugggagccagaucggcgucgccucggccu

SEQ ID NO: 9232 - RNA, 32 nt, Homo Sapiens
cccgcgcgcucgccaugucccggccaccgcca

SEQ ID NO: 9233 - RNA, 32 nt, Homo Sapiens
gcagggcagcuggcgguggccuuggccauuug

SEQ ID NO: 9234 - RNA, 30 nt, Homo Sapiens
ucacuccaugcucccggaaaucgagaggaa

SEQ ID NO: 9235 - RNA, 32 nt, Homo Sapiens
agagcugucacaacuuuuccugucuacaggca

SEQ ID NO: 9236 - RNA, 32 nt, Homo Sapiens
acuucagccagggugugcaucaucauugguuc

SEQ ID NO: 9237 - RNA, 32 nt, Homo Sapiens
uccaaacuagaaaagagggagcgagagaaugg

SEQ ID NO: 9238 - RNA, 32 nt, Homo Sapiens
gucuuuguuucugcacuaauuaaugcacauug

SEQ ID NO: 9239 - RNA, 32 nt, Homo Sapiens
acguguccaaaaagaaaaaagacccaaucagu

SEQ ID NO: 9240 - RNA, 32 nt, Homo Sapiens
accucaggcgcgcgccaccacgcccggcuaau

SEQ ID NO: 9241 - RNA, 32 nt, Homo Sapiens
gaggauaagcuaacgaugcugcuguggccucu

SEQ ID NO: 9242 - RNA, 32 nt, Homo Sapiens
augucaagguucccucccacucuauuuuuuua

SEQ ID NO: 9243 - RNA, 32 nt, Homo Sapiens
aaaugacuuucaucaaaugacuuucaaaauaa

SEQ ID NO: 9244 - RNA, 32 nt, Homo Sapiens
ucauaucagagacguggaccucacuguagccu

SEQ ID NO: 9245 - RNA, 32 nt, Homo Sapiens
uaacuuucauagauuauaacaaauuacuauuu

SEQ ID NO: 9246 - RNA, 32 nt, Homo Sapiens
agaaaggaccucaaccacacuccacgccggca

SEQ ID NO: 9247 - RNA, 29 nt, Homo Sapiens
gacuuuccuuuuuucagagguguagguuu

SEQ ID NO: 9248 - RNA, 32 nt, Homo Sapiens
agcaggcgaggaguggguagcagcgccuaugu

SEQ ID NO: 9249 - RNA, 32 nt, Homo Sapiens
gcucggguagagagggcuggcggagcggcgca

SEQ ID NO: 9250 - RNA, 32 nt, Homo Sapiens
ugugccgacagaagcaccgcccugccccuagg

SEQ ID NO: 9251 - RNA, 32 nt, Homo Sapiens
gggagggcaggagagccugaggaguggcgggg

SEQ ID NO: 9252 - RNA, 32 nt, Homo Sapiens
ggcagcgaggggcggcggggaccuggcaccgg

SEQ ID NO: 9253 - RNA, 32 nt, Homo Sapiens
uuuuauaggaugaaguuauuuauuuucuauuu

SEQ ID NO: 9254 - RNA, 32 nt, Homo Sapiens
ccagggggccaucaaaagcaucgggauuuggc

SEQ ID NO: 9255 - RNA, 32 nt, Homo Sapiens
caucucucccacacuuuccccagugcuuucuu

SEQ ID NO: 9256 - RNA, 32 nt, Homo Sapiens
auaugucauuaugcauacuuauauuaucuuaa

SEQ ID NO: 9257 - RNA, 32 nt, Homo Sapiens
uuucccuggugccucucacuucguuggugacc

SEQ ID NO: 9258 - RNA, 32 nt, Homo Sapiens
cuuguuugcaagaagccaaaaccacaucaaag

SEQ ID NO: 9259 - RNA, 32 nt, Homo Sapiens
ccaauucauuuucagacuuuguacuucagaag

SEQ ID NO: 9260 - RNA, 31 nt, Homo Sapiens
uccuauaugcaaucaaguucagguaauuuau

SEQ ID NO: 9261 - RNA, 32 nt, Homo Sapiens
aauaguuuaaacauuuuuggauaaagguugaa

SEQ ID NO: 9262 - RNA, 32 nt, Homo Sapiens
caguguuuuguauauuuaaaaggucuaugcaa

SEQ ID NO: 9263 - RNA, 32 nt, Homo Sapiens
uuuucuacugaucaucauaacucuguaucuga

SEQ ID NO: 9264 - RNA, 32 nt, Homo Sapiens
ggcggggcccucgggagcccaggugcagagcg

SEQ ID NO: 9265 - RNA, 32 nt, Homo Sapiens
aacaaaucugcaccccacuucagaccucggug

SEQ ID NO: 9266 - RNA, 32 nt, Homo Sapiens
uagauuccuugacaaggauauccuagcggcga

SEQ ID NO: 9267 - RNA, 32 nt, Homo Sapiens
ccccacgcagcuccccgcacuccgugggccaa

SEQ ID NO: 9268 - RNA, 32 nt, Homo Sapiens
cucagaccacagggcggcgccacgagcccggc

SEQ ID NO: 9269 - RNA, 32 nt, Homo Sapiens
ccccgcgugacgcuccucucucaguccaaaag

SEQ ID NO: 9270 - RNA, 32 nt, Homo Sapiens
cauaccauauaaaacuuguuagguuuuuaaac

SEQ ID NO: 9271 - RNA, 32 nt, Homo Sapiens
acggucuggggaagaggaugagcagagggagg

SEQ ID NO: 9272 - RNA, 25 nt, Homo Sapiens
augaagcugguuuccgucgcccuga

SEQ ID NO: 9273 - RNA, 32 nt, Homo Sapiens
agcaccccucgugcaacgacgauuccagcugc

SEQ ID NO: 9274 - RNA, 32 nt, Homo Sapiens
uuuuuaaccccauuugcauuaauauugcaguc

SEQ ID NO: 9275 - RNA, 32 nt, Homo Sapiens
cgcuccagcccggcucauuccgcacauuccgg

SEQ ID NO: 9276 - RNA, 32 nt, Homo Sapiens
ccgcggcccccucggcuuugccagcgccgccu

SEQ ID NO: 9277 - RNA, 32 nt, Homo Sapiens
gauacacuaugaagauguuucaaaaaaucuga

SEQ ID NO: 9278 - RNA, 32 nt, Homo Sapiens
cauugaagauaaagcuacuguauauaagauug

SEQ ID NO: 9279 - RNA, 32 nt, Homo Sapiens
gccgcgagcgaggcucaccguccccggcgugc

SEQ ID NO: 9280 - RNA, 32 nt, Homo Sapiens
ccgcggcugcccgugcccccucugacagccau

SEQ ID NO: 9281 - RNA, 32 nt, Homo Sapiens
ugcggcggcagggccuggucacugaccaaguc

SEQ ID NO: 9282 - RNA, 29 nt, Homo Sapiens
caugaguuauaugagucaagauccugccu

SEQ ID NO: 9283 - RNA, 32 nt, Homo Sapiens
cggucacaugcgcugcggcgguggacgugccu

SEQ ID NO: 9284 - RNA, 32 nt, Homo Sapiens
ucuccacccagcuguuggagccaucugucuga

SEQ ID NO: 9285 - RNA, 32 nt, Homo Sapiens
ucuagcagccgggcgccgcgggccgggggccu

SEQ ID NO: 9286 - RNA, 32 nt, Homo Sapiens
uaaugacugccauucaccaaauaaagcagcuu

SEQ ID NO: 9287 - RNA, 32 nt, Homo Sapiens
auucaggcaacgccucgcguguguuucaggcu

SEQ ID NO: 9288 - RNA, 32 nt, Homo Sapiens
aauauauguuucuuuuccugugaaaagcuguu

SEQ ID NO: 9289 - RNA, 32 nt, Homo Sapiens
uuuuucuauuuuuuauuuuugagauggaguuu

SEQ ID NO: 9290 - RNA, 32 nt, Homo Sapiens
uagguauaugaaguuuucuaaaauauuuuauu

SEQ ID NO: 9291 - RNA, 32 nt, Homo Sapiens
aguuaggaagcagaggaucagagaugggaaag

SEQ ID NO: 9292 - RNA, 32 nt, Homo Sapiens
cacuugccugccaugauuuagauaagauuuuu

SEQ ID NO: 9293 - RNA, 32 nt, Homo Sapiens
cuuugccaacuuucucugcaacuaugcccccg

SEQ ID NO: 9294 - RNA, 32 nt, Homo Sapiens
ggaacgaggccgcgaccccgccuucggcgcuc

SEQ ID NO: 9295 - RNA, 32 nt, Homo Sapiens
gggggcgaagccccggccuaggccucgcggag

SEQ ID NO: 9296 - RNA, 32 nt, Homo Sapiens
caaggcccugucccagcagaagagggaggcuu

SEQ ID NO: 9297 - RNA, 32 nt, Homo Sapiens
ugaggccccguccuucucacugccuggucaca

SEQ ID NO: 9298 - RNA, 32 nt, Homo Sapiens
aaagggacugaggucagaaaaaaggaauuccu

SEQ ID NO: 9299 - RNA, 32 nt, Homo Sapiens
auacugugacaaguacuuuauauauuuucuuu

SEQ ID NO: 9300 - RNA, 32 nt, Homo Sapiens
uugaaucaucaauucuuucucauucuccauuu

SEQ ID NO: 9301 - RNA, 32 nt, Homo Sapiens
uccccaucuauuuauuuaagccuuucuuugcu

SEQ ID NO: 9302 - RNA, 32 nt, Homo Sapiens
aaaaaacuagcugggcguggcggcgagcgccu

SEQ ID NO: 9303 - RNA, 32 nt, Homo Sapiens
augacaguauaaaaugcuuucauguuugugau

SEQ ID NO: 9304 - RNA, 32 nt, Homo Sapiens
cggagagagaauaaaucuuucuuguuuuaagg

SEQ ID NO: 9305 - RNA, 32 nt, Homo Sapiens
ucuucucguuuuuaaaguuauuaaaauuuuaa

SEQ ID NO: 9306 - RNA, 32 nt, Homo Sapiens
ugucaagugucugcuccacgucaggcacugug

SEQ ID NO: 9307 - RNA, 32 nt, Homo Sapiens
caguuuuuaauaagaaaguuuaucuuuacucu

SEQ ID NO: 9308 - RNA, 32 nt, Homo Sapiens
uguuugugaagauagagugaaauucaguacca

SEQ ID NO: 9309 - RNA, 32 nt, Homo Sapiens
cugucucacaccaguucagaaaacacuagacc

SEQ ID NO: 9310 - RNA, 32 nt, Homo Sapiens
aauguaauauuguaaaguaacagcagcagcag

SEQ ID NO: 9311 - RNA, 32 nt, Homo Sapiens
uccccggccccggggugcaccccgcaaggcuc

SEQ ID NO: 9312 - RNA, 32 nt, Homo Sapiens
cagccaaacaacccccagucccgccccccagg

SEQ ID NO: 9313 - RNA, 32 nt, Homo Sapiens
acuuugucaaggggcuguuuccaggucucccg

SEQ ID NO: 9314 - RNA, 32 nt, Homo Sapiens
gccgugagccguagccggcguccccgcccagc

SEQ ID NO: 9315 - RNA, 32 nt, Homo Sapiens
ucacagccccuucaccccggccugugacacac

SEQ ID NO: 9316 - RNA, 32 nt, Homo Sapiens
ccaucuacuggugcuuccuggucgagauacaa

SEQ ID NO: 9317 - RNA, 32 nt, Homo Sapiens
augcuuauggaaagccaguuaguuagaauugg

SEQ ID NO: 9318 - RNA, 32 nt, Homo Sapiens
gcccgagauucgcuccucccccucaugccaac

SEQ ID NO: 9319 - RNA, 32 nt, Homo Sapiens
acugugaagauaaaauuauggauucuguuuaa

SEQ ID NO: 9320 - RNA, 32 nt, Homo Sapiens
gacccucaccccagcauagacacacacccccu

SEQ ID NO: 9321 - RNA, 32 nt, Homo Sapiens
uauuuuuggaaguccuaaauuauucuuguuag

SEQ ID NO: 9322 - RNA, 32 nt, Homo Sapiens
caggcuugugccacugcgcccaaacauaacug

SEQ ID NO: 9323 - RNA, 32 nt, Homo Sapiens
cguggcgggaacggcugcuucuccucugccca

SEQ ID NO: 9324 - RNA, 32 nt, Homo Sapiens
uuguaaguagccagaucccucuccagugacau

SEQ ID NO: 9325 - RNA, 32 nt, Homo Sapiens
uccuuaauuuugcuuacuuuuucaugcagcug

SEQ ID NO: 9326 - RNA, 32 nt, Homo Sapiens
aggaccgcagcagcugcacgcucaccgucuau

SEQ ID NO: 9327 - RNA, 31 nt, Homo Sapiens
gagaaggcgggccccgucugaggucuggcag

SEQ ID NO: 9328 - RNA, 32 nt, Homo Sapiens
ggugguugaaggugggggcgggacagggucuc

SEQ ID NO: 9329 - RNA, 32 nt, Homo Sapiens
ggcugccccaggaagccgcgggcucuuuugcg

SEQ ID NO: 9330 - RNA, 30 nt, Homo Sapiens
uugcccaaaucuuccacccaucuuuuuucu

SEQ ID NO: 9331 - RNA, 32 nt, Homo Sapiens
uggcgcccggugagggcgggccccacaggcca

SEQ ID NO: 9332 - RNA, 32 nt, Homo Sapiens
uuuguaacuaugucuguuuucuuuuuuguaau

SEQ ID NO: 9333 - RNA, 32 nt, Homo Sapiens
agcaaaggaaaagaaucagugaaaggaccagu

SEQ ID NO: 9334 - RNA, 32 nt, Homo Sapiens
ccggggccccggggcgggaggggguuuuuccc

SEQ ID NO: 9335 - RNA, 31 nt, Homo Sapiens
gguccggguccuguggguccaagggccgcug

SEQ ID NO: 9336 - RNA, 31 nt, Homo Sapiens
uguaccuuacggagaauaauucucccaauga

SEQ ID NO: 9337 - RNA, 29 nt, Homo Sapiens
cguaacauuauuuauuaccacaaaacagc

SEQ ID NO: 9338 - RNA, 32 nt, Homo Sapiens
auugccagaacacauuauauacaggaugucag

SEQ ID NO: 9339 - RNA, 32 nt, Homo Sapiens
uuggccaggaacugccaacagcuuuuguucug

SEQ ID NO: 9340 - RNA, 32 nt, Homo Sapiens
ccgccacaccgccgcugccucagucaugccga

SEQ ID NO: 9341 - RNA, 32 nt, Homo Sapiens
aggugagagaauguauuuucauagauguguua

SEQ ID NO: 9342 - RNA, 32 nt, Homo Sapiens
aauuaccugcagguggaauauuucauggacaa

SEQ ID NO: 9343 - RNA, 32 nt, Homo Sapiens
gacuaggggacugggagcgggcggcgcggcca

SEQ ID NO: 9344 - RNA, 32 nt, Homo Sapiens
ccugaaaacaacauauuaggagagccagaagu

SEQ ID NO: 9345 - RNA, 32 nt, Homo Sapiens
gaugcaauuaaaaauaauagggaaugugguag

SEQ ID NO: 9346 - RNA, 32 nt, Homo Sapiens
ggggcgggaaacucuuugggacacccgggguc

SEQ ID NO: 9347 - RNA, 32 nt, Homo Sapiens
acccgcgcgacgggcgggaagauggcggacgu

SEQ ID NO: 9348 - RNA, 32 nt, Homo Sapiens
acucagaggagaaagccugagugaguaacacc

SEQ ID NO: 9349 - RNA, 32 nt, Homo Sapiens
agaagcuacagugagucgagauugcaccacug

SEQ ID NO: 9350 - RNA, 32 nt, Homo Sapiens
uuguuguguuucugaaaagugaaauuuaaaaa

SEQ ID NO: 9351 - RNA, 32 nt, Homo Sapiens
aaaccugccugccugguugggccuucagcugu

SEQ ID NO: 9352 - RNA, 32 nt, Homo Sapiens
ugauggaacagcuugcaaggcuugugagcagu

SEQ ID NO: 9353 - RNA, 32 nt, Homo Sapiens
agacauuccucccacacuuuucccuuccuggc

SEQ ID NO: 9354 - RNA, 32 nt, Homo Sapiens
cugcacccagcccaaggucuugccaugguaua

SEQ ID NO: 9355 - RNA, 32 nt, Homo Sapiens
uugguuucuagacaucuggcuugaauauuggg

SEQ ID NO: 9356 - RNA, 32 nt, Homo Sapiens
ggguauaaaaacaaauuuguggcauuuuuagu

SEQ ID NO: 9357 - RNA, 32 nt, Homo Sapiens
uaguaagcagaagaguugccaugaaaguaaaa

SEQ ID NO: 9358 - RNA, 32 nt, Homo Sapiens
cuuaauuuuuaaaaacccauuuuuauuguggu

SEQ ID NO: 9359 - RNA, 28 nt, Homo Sapiens
gaaaagaaagauuuuuggacugcagccu

SEQ ID NO: 9360 - RNA, 32 nt, Homo Sapiens
ucgugcgcgcgggcggcgagggggcgcugugg

SEQ ID NO: 9361 - RNA, 32 nt, Homo Sapiens
gccccgcuugcccacuccccacuucccgagcc

SEQ ID NO: 9362 - RNA, 32 nt, Homo Sapiens
auaggagaugaccucuaacugauagaacguua

SEQ ID NO: 9363 - RNA, 32 nt, Homo Sapiens
auacaggaaaauuaaaccauuugccaauucaa

SEQ ID NO: 9364 - RNA, 32 nt, Homo Sapiens
aagcauuuucuuucuccuaaggaaaagugaau

SEQ ID NO: 9365 - RNA, 32 nt, Homo Sapiens
gugugggcggcacucucucugcuucccccucc

SEQ ID NO: 9366 - RNA, 32 nt, Homo Sapiens
gaguaccaauuugcuucuuguuuacuuuuuua

SEQ ID NO: 9367 - RNA, 32 nt, Homo Sapiens
gccggggguggugacaugugccuguaauccca

SEQ ID NO: 9368 - RNA, 32 nt, Homo Sapiens
cugccugggcgggcugggaggcgcggguugaa

SEQ ID NO: 9369 - RNA, 32 nt, Homo Sapiens
uucacuaugcauucaguggaucuuuauaaaau

SEQ ID NO: 9370 - RNA, 32 nt, Homo Sapiens
aaaagaauuuaaaauaaaguguuccauagaug

SEQ ID NO: 9371 - RNA, 31 nt, Homo Sapiens
ggucccucacggaggaaauugucuucuccuu

SEQ ID NO: 9372 - RNA, 30 nt, Homo Sapiens
auaaaaugaaaacacucccccuucauaguc

SEQ ID NO: 9373 - RNA, 32 nt, Homo Sapiens
gguauuuaacugaguuaacucugucagauugc

SEQ ID NO: 9374 - RNA, 32 nt, Homo Sapiens
gauuaaagaacaaaaaauugugguggaugaac

SEQ ID NO: 9375 - RNA, 32 nt, Homo Sapiens
uauuaaguuuguaaacaaaaccuuuggguggu

SEQ ID NO: 9376 - RNA, 31 nt, Homo Sapiens
cccaccgcagccugcaugccccgcgcugcgc

SEQ ID NO: 9377 - RNA, 32 nt, Homo Sapiens
auuguuggauguauuuuuuuuaaaacagcaau

SEQ ID NO: 9378 - RNA, 32 nt, Homo Sapiens
uauauaucuuauaucuccacaaacacaaauua

SEQ ID NO: 9379 - RNA, 32 nt, Homo Sapiens
aaaaugugcuucuugaaucaacugcagucucu

SEQ ID NO: 9380 - RNA, 32 nt, Homo Sapiens
cuagguuguaaggugcuaaggcugguccccac

SEQ ID NO: 9381 - RNA, 32 nt, Homo Sapiens
ggaagaggcuuucucucuccaauaaaccuuuu

SEQ ID NO: 9382 - RNA, 30 nt, Homo Sapiens
ccaaaauaaaagaaaaaugaauuaugaacu

SEQ ID NO: 9383 - RNA, 32 nt, Homo Sapiens
gaauauuuucccuugguagaauccauauacaa

SEQ ID NO: 9384 - RNA, 32 nt, Homo Sapiens
cccauuccuuagcuuuagucuaauggagccaa

SEQ ID NO: 9385 - RNA, 32 nt, Homo Sapiens
gucucgagccgccggccggccgugccgguguc

SEQ ID NO: 9386 - RNA, 30 nt, Homo Sapiens
aacccgggcaggcgcccacaggccgggcuc

SEQ ID NO: 9387 - RNA, 32 nt, Homo Sapiens
uacacaauguugggcuuuugcaguaugugucc

SEQ ID NO: 9388 - RNA, 32 nt, Homo Sapiens
auaccauuucccuugcagauuugcagaaacau

SEQ ID NO: 9389 - RNA, 32 nt, Homo Sapiens
aacauaauuauacaagcauauuuaaugcugag

SEQ ID NO: 9390 - RNA, 32 nt, Homo Sapiens
uuuucuacuguaauaauguaauuuaaggccuu

SEQ ID NO: 9391 - RNA, 32 nt, Homo Sapiens
gcaucuggaaccaaaaucacuucccggaauug

SEQ ID NO: 9392 - RNA, 32 nt, Homo Sapiens
uccagugcuggcugcuggcccacagcucugcu

SEQ ID NO: 9393 - RNA, 29 nt, Homo Sapiens
gggugucggggaccugggcgcagauucau

SEQ ID NO: 9394 - RNA, 32 nt, Homo Sapiens
caaaucauaaagacauuuaaaagaauuguuuu

SEQ ID NO: 9395 - RNA, 32 nt, Homo Sapiens
uguauucauaucuauuugcauuugauuucuag

SEQ ID NO: 9396 - RNA, 32 nt, Homo Sapiens
caaauauucuccaugggccugucuaguagauu

SEQ ID NO: 9397 - RNA, 32 nt, Homo Sapiens
gcugacucaaguucuucaguucacgaucuucu

SEQ ID NO: 9398 - RNA, 32 nt, Homo Sapiens
gcugggaggccgagaagaacuugcgugugcug

SEQ ID NO: 9399 - RNA, 32 nt, Homo Sapiens
uuuucuucauugucagauuuuauuuuuuacug

SEQ ID NO: 9400 - RNA, 32 nt, Homo Sapiens
gcuccacucacgcucaggcccuggacggacag

SEQ ID NO: 9401 - RNA, 32 nt, Homo Sapiens
agagguauucacaacagcaagcagggauuugg

SEQ ID NO: 9402 - RNA, 32 nt, Homo Sapiens
cgaguauaugaguucuagucagcaaauggccu

SEQ ID NO: 9403 - RNA, 32 nt, Homo Sapiens
aguuugugagccagcccggcccuguacaggug

SEQ ID NO: 9404 - RNA, 32 nt, Homo Sapiens
ugcucagcagguugaauggguucucagugguc

SEQ ID NO: 9405 - RNA, 32 nt, Homo Sapiens
augauguuagguauuuaaauucuuaaagaugu

SEQ ID NO: 9406 - RNA, 32 nt, Homo Sapiens
uccuuaaauguguuaguuuagauucuuuaugu

SEQ ID NO: 9407 - RNA, 32 nt, Homo Sapiens
guucagcaauggugugguuggagaguugugcu

SEQ ID NO: 9408 - RNA, 32 nt, Homo Sapiens
agggacugcuaaggaagaggcugcauggcgcg

SEQ ID NO: 9409 - RNA, 32 nt, Homo Sapiens
uuucggcaugaccucucccuccccuggccacg

SEQ ID NO: 9410 - RNA, 32 nt, Homo Sapiens
auguaguaugucauaaguacuuuguaaagauu

SEQ ID NO: 9411 - RNA, 32 nt, Homo Sapiens
agcggaccuucaggcccgggccgcgggguugg

SEQ ID NO: 9412 - RNA, 32 nt, Homo Sapiens
cucugccuaugcugcgccccagagcacccaga

SEQ ID NO: 9413 - RNA, 32 nt, Homo Sapiens
uaucaacauucgcuucuaguaaaauuaaaguc

SEQ ID NO: 9414 - RNA, 32 nt, Homo Sapiens
agcucauaaaaagugauagagcugggauucaa

SEQ ID NO: 9415 - RNA, 32 nt, Homo Sapiens
gugugcuggaugucucuauaauuuuauucaga

SEQ ID NO: 9416 - RNA, 32 nt, Homo Sapiens
ccacugagcaucugggcagcucugugcuuggg

SEQ ID NO: 9417 - RNA, 32 nt, Homo Sapiens
gagaaacggugaugaaaggaaauacaugaguu

SEQ ID NO: 9418 - RNA, 32 nt, Homo Sapiens
gcugggcuucaguggcagcugcuuuugucuau

SEQ ID NO: 9419 - RNA, 32 nt, Homo Sapiens
gcacuagcccucgcgccgcacgggacacgagg

SEQ ID NO: 9420 - RNA, 32 nt, Homo Sapiens
aagccgccaacucagcugagagcuaaagagac

SEQ ID NO: 9421 - RNA, 32 nt, Homo Sapiens
ccagccucgguuggcugagcaacgaagggcca

SEQ ID NO: 9422 - RNA, 32 nt, Homo Sapiens
caaaguauuauucaacuucaaguuucagcaac

SEQ ID NO: 9423 - RNA, 32 nt, Homo Sapiens
aauaauagaaaugccauuuaugcuguagaauu

SEQ ID NO: 9424 - RNA, 32 nt, Homo Sapiens
uuccauuucuaaaaguucaaauauacuuguua

SEQ ID NO: 9425 - RNA, 32 nt, Homo Sapiens
gucuuaaaaugaacauucuuuaaaguuggaca

SEQ ID NO: 9426 - RNA, 32 nt, Homo Sapiens
uccuuugcuuguccucuuugccuucgguaaua

SEQ ID NO: 9427 - RNA, 32 nt, Homo Sapiens
aaucagaggaagaccugggacuaggacccagg

SEQ ID NO: 9428 - RNA, 32 nt, Homo Sapiens
caaguaugacaaccucuuugagacguccuuuc

SEQ ID NO: 9429 - RNA, 30 nt, Homo Sapiens
agcacggcgcccgcaccuccccgcaccgcc

SEQ ID NO: 9430 - RNA, 32 nt, Homo Sapiens
augcagaaaaggaaaugcaugggguuacaagg

SEQ ID NO: 9431 - RNA, 32 nt, Homo Sapiens
uaggcucccaauggggugaggauggcuucaag

SEQ ID NO: 9432 - RNA, 32 nt, Homo Sapiens
cacagaacaaaguuguaaaaguagcauggaua

SEQ ID NO: 9433 - RNA, 32 nt, Homo Sapiens
auguuuccuagguauuucuaaauuuuaggagg

SEQ ID NO: 9434 - RNA, 32 nt, Homo Sapiens
uguucccuuuuuaucuccuucacugcacuugg

SEQ ID NO: 9435 - RNA, 32 nt, Homo Sapiens
uccaugaugauuuuaaugucuuucucaaaacu

SEQ ID NO: 9436 - RNA, 32 nt, Homo Sapiens
gaaggaaaggccagguaugugcucugcugccc

SEQ ID NO: 9437 - RNA, 32 nt, Homo Sapiens
gauagcagcugagauguuccugaaaccucugc

SEQ ID NO: 9438 - RNA, 32 nt, Homo Sapiens
aggcuuuggaccuggugacagagugaucagau

SEQ ID NO: 9439 - RNA, 32 nt, Homo Sapiens
cuauuguuugaaaacugauuguaagaauaacc

SEQ ID NO: 9440 - RNA, 32 nt, Homo Sapiens
cucucuugcucuugcuccugccauguaagaau

SEQ ID NO: 9441 - RNA, 32 nt, Homo Sapiens
uugguuuuuggacaaguacaaacaauuucaac

SEQ ID NO: 9442 - RNA, 32 nt, Homo Sapiens
gagugagcuuugccgcggcagacgccugagga

SEQ ID NO: 9443 - RNA, 32 nt, Homo Sapiens
uugacauagaaaguaagaaggaaugucuacuu

SEQ ID NO: 9444 - RNA, 32 nt, Homo Sapiens
aucuaccuuucauauaaugcuacauugaaggc

SEQ ID NO: 9445 - RNA, 32 nt, Homo Sapiens
uaaaugaauauguucaguuuuugauuuuaaua

SEQ ID NO: 9446 - RNA, 32 nt, Homo Sapiens
uucaaagauaauugauuugaucuuauauuuau

SEQ ID NO: 9447 - RNA, 32 nt, Homo Sapiens
cagcuggaaguucuguuuggagcccauuucug

SEQ ID NO: 9448 - RNA, 32 nt, Homo Sapiens
cuccgaugcugcaauauguugcugggguccug

SEQ ID NO: 9449 - RNA, 32 nt, Homo Sapiens
gcaggugcugccggccccaggaccccucuuca

SEQ ID NO: 9450 - RNA, 30 nt, Homo Sapiens
aaaaaaccacuugggcucccuguuuggagu

SEQ ID NO: 9451 - RNA, 32 nt, Homo Sapiens
ggaguggcagauuccacccacccagcucugcc

SEQ ID NO: 9452 - RNA, 32 nt, Homo Sapiens
aacugguaccugagcuagcugcacagccaagg

SEQ ID NO: 9453 - RNA, 32 nt, Homo Sapiens
ggcgccguccucggggccacugcccggccacc

SEQ ID NO: 9454 - RNA, 32 nt, Homo Sapiens
cuuaaaacccuaaagaacauuguaaucagcgc

SEQ ID NO: 9455 - RNA, 32 nt, Homo Sapiens
agaaauuccagugauuucuacugcacagcucu

SEQ ID NO: 9456 - RNA, 32 nt, Homo Sapiens
uaucuaucugcuauuaaaugguaaaugaacca

SEQ ID NO: 9457 - RNA, 32 nt, Homo Sapiens
acugcugaguuguauuggagaagugaaaugac

SEQ ID NO: 9458 - RNA, 32 nt, Homo Sapiens
uaggaucaguuccuacggacuggcugugacgg

SEQ ID NO: 9459 - RNA, 31 nt, Homo Sapiens
cgggugcagcgcacaggagaccauguccggg

SEQ ID NO: 9460 - RNA, 32 nt, Homo Sapiens
uacggugugugcaagaaggcgagucagggugc

SEQ ID NO: 9461 - RNA, 32 nt, Homo Sapiens
aagugccuuucaccacccccacacccugccau

SEQ ID NO: 9462 - RNA, 32 nt, Homo Sapiens
cccaucucuuucuagguguuugcaauguacaa

SEQ ID NO: 9463 - RNA, 32 nt, Homo Sapiens
uuuacaggcagacaaugaaauugaucuuuuga

SEQ ID NO: 9464 - RNA, 32 nt, Homo Sapiens
aguccccauuucuccuucuaucacuuuucaua

SEQ ID NO: 9465 - RNA, 32 nt, Homo Sapiens
cuaccuuccuucccaucgcccugccucgcagc

SEQ ID NO: 9466 - RNA, 32 nt, Homo Sapiens
caugauuuuggagcaauuguaagugguguagu

SEQ ID NO: 9467 - RNA, 32 nt, Homo Sapiens
uaacugaaaugaauucacaccagugugcucuc

SEQ ID NO: 9468 - RNA, 32 nt, Homo Sapiens
gagaccaggauuuuauggcuccccucacugau

SEQ ID NO: 9469 - RNA, 32 nt, Homo Sapiens
uggucucgggcgcagccucagcgccgcaucag

SEQ ID NO: 9470 - RNA, 32 nt, Homo Sapiens
ugggcugaagugagauuuucuugaauggcagc

SEQ ID NO: 9471 - RNA, 32 nt, Homo Sapiens
guugucaggaaucugagguccuggagaggcag

SEQ ID NO: 9472 - RNA, 32 nt, Homo Sapiens
gggggcuccgggagcggcgggaccacgcagcc

SEQ ID NO: 9473 - RNA, 32 nt, Homo Sapiens
gauucuagacauuuugcauggcccucauucag

SEQ ID NO: 9474 - RNA, 32 nt, Homo Sapiens
uguuuuucuuaaagcugaacuaaauugcaaaa

SEQ ID NO: 9475 - RNA, 32 nt, Homo Sapiens
gugaggaaugaaauugcagcggcugugugaug

SEQ ID NO: 9476 - RNA, 32 nt, Homo Sapiens
ccgccgccaccucggcugggagcccacgaggc

SEQ ID NO: 9477 - RNA, 32 nt, Homo Sapiens
caucaugucccaaaccagacaccuggaugucu

SEQ ID NO: 9478 - RNA, 32 nt, Homo Sapiens
gccuuuauaaauuuuuuuuucuuuauucuaaa

SEQ ID NO: 9479 - RNA, 32 nt, Homo Sapiens
gaggccccugcccuccucuccccacccaagau

SEQ ID NO: 9480 - RNA, 29 nt, Homo Sapiens
gaagaugccugccuucaauagauuguuuc

SEQ ID NO: 9481 - RNA, 32 nt, Homo Sapiens
ggggcugugauccuggaucuggaaggggcuga

SEQ ID NO: 9482 - RNA, 32 nt, Homo Sapiens
ugagauugaucugccaguguccugcugucccu

SEQ ID NO: 9483 - RNA, 32 nt, Homo Sapiens
acaaaagcaauauauacccagacuacacuagu

SEQ ID NO: 9484 - RNA, 32 nt, Homo Sapiens
cgcagccggccgcgucaugccaggcgcugcuc

SEQ ID NO: 9485 - RNA, 32 nt, Homo Sapiens
ugaagaagaaaguuaugguauuuccauuuaua

SEQ ID NO: 9486 - RNA, 32 nt, Homo Sapiens
accaggacaacgggcgucgccggcgccgugug

SEQ ID NO: 9487 - RNA, 32 nt, Homo Sapiens
ucuucaccaagccccauccuccccccgcauac

SEQ ID NO: 9488 - RNA, 32 nt, Homo Sapiens
aggagguuuggcacagaaaacauagccaccau

SEQ ID NO: 9489 - RNA, 32 nt, Homo Sapiens
auucauugaaagaauuguaaucaucaaucuuu

SEQ ID NO: 9490 - RNA, 32 nt, Homo Sapiens
agauuauguuuuuauuaagguauaaacagaau

SEQ ID NO: 9491 - RNA, 32 nt, Homo Sapiens
acuggcuucuccaugaugguuuauggacuaag

SEQ ID NO: 9492 - RNA, 32 nt, Homo Sapiens
uguuuuguuucaucuugacuuucuuaauuucc

SEQ ID NO: 9493 - RNA, 32 nt, Homo Sapiens
cuccugauucaacuccucuccaaggaaagagg

SEQ ID NO: 9494 - RNA, 32 nt, Homo Sapiens
uuggagaaagaaauuaacaauaaagaauuuuc

SEQ ID NO: 9495 - RNA, 32 nt, Homo Sapiens
ccacagaaggggaugggaaauaaagaaaauuc

SEQ ID NO: 9496 - RNA, 32 nt, Homo Sapiens
ucauguacaucuuuuucuuaaguguucuuugc

SEQ ID NO: 9497 - RNA, 32 nt, Homo Sapiens
aaacuguguacaaaaggauugcuuguaaauau

SEQ ID NO: 9498 - RNA, 32 nt, Homo Sapiens
gagggucugcacauguaggugugugugcaugc

SEQ ID NO: 9499 - RNA, 32 nt, Homo Sapiens
gcuuaaagaaaagaauuuuaaauugugggaau

SEQ ID NO: 9500 - RNA, 32 nt, Homo Sapiens
gcgcugaggcccagccccuccagcaccacuuu

SEQ ID NO: 9501 - RNA, 32 nt, Homo Sapiens
aggcccgaagcuguucccaugcuugagcuucc

SEQ ID NO: 9502 - RNA, 32 nt, Homo Sapiens
cuucagcaccucagucugggaagaaucuaguc

SEQ ID NO: 9503 - RNA, 32 nt, Homo Sapiens
cccggagaaguguagauuuuggcacugguaga

SEQ ID NO: 9504 - RNA, 32 nt, Homo Sapiens
gacaccccauccccucccaucccccggcgcgu

SEQ ID NO: 9505 - RNA, 32 nt, Homo Sapiens
ccucagagaagacuagcagccuuaaugugucu

SEQ ID NO: 9506 - RNA, 32 nt, Homo Sapiens
aguggcaaaaauagaaaacaaucuucauuuga

SEQ ID NO: 9507 - RNA, 32 nt, Homo Sapiens
guuauuucucauggcagccuuccacugcauuu

SEQ ID NO: 9508 - RNA, 32 nt, Homo Sapiens
uuuauagagguuaggaauuccaaacuacagaa

SEQ ID NO: 9509 - RNA, 32 nt, Homo Sapiens
ucacgcuguaguuugucucuuucuuaucuuuu

SEQ ID NO: 9510 - RNA, 32 nt, Homo Sapiens
uuuguuuuuagagacaggguccugcuauuucc

SEQ ID NO: 9511 - RNA, 32 nt, Homo Sapiens
acaacaugggugaaccuagaaaauacugaucu

SEQ ID NO: 9512 - RNA, 32 nt, Homo Sapiens
uauuggagcaaaacauagaacaaaaucacuau

SEQ ID NO: 9513 - RNA, 32 nt, Homo Sapiens
uaauagugguggucuuauuuucaacuaugcuu

SEQ ID NO: 9514 - RNA, 32 nt, Homo Sapiens
cauccccaucuuaaguuuuacaaggugaugua

SEQ ID NO: 9515 - RNA, 32 nt, Homo Sapiens
ggaaaggaggcgccggcuguggcggcggcggg

SEQ ID NO: 9516 - RNA, 32 nt, Homo Sapiens
aggaaugcaaaauaagcauggauuaagugaga

SEQ ID NO: 9517 - RNA, 32 nt, Homo Sapiens
augucugccgggggcccaggcugugcuguccc

SEQ ID NO: 9518 - RNA, 32 nt, Homo Sapiens
ugugggggaauuaagaaaaugccauuuaccua

SEQ ID NO: 9519 - RNA, 32 nt, Homo Sapiens
gcuuaauugcuuaaauaaguucuagaaaauuu

SEQ ID NO: 9520 - RNA, 32 nt, Homo Sapiens
cuucaagccaggcgcaguggcucacaccugua

SEQ ID NO: 9521 - RNA, 32 nt, Homo Sapiens
ugggaaagcggauaaaacuuucauuguacugg

SEQ ID NO: 9522 - RNA, 32 nt, Homo Sapiens
cuggcuggguggcaccagcagccuggacccug

SEQ ID NO: 9523 - RNA, 32 nt, Homo Sapiens
uagcuuuuguuuguauucagguaaaugaaguu

SEQ ID NO: 9524 - RNA, 32 nt, Homo Sapiens
uaugacaucccaucugaguuguccugucacuu

SEQ ID NO: 9525 - RNA, 32 nt, Homo Sapiens
agaugcccaagccuuugaccacgguuuuguag

SEQ ID NO: 9526 - RNA, 32 nt, Homo Sapiens
cauuggcuuucucuccuuggccuuuccuggaa

SEQ ID NO: 9527 - RNA, 32 nt, Homo Sapiens
gagccaauauaaauguuuaacuguuugugaug

SEQ ID NO: 9528 - RNA, 32 nt, Homo Sapiens
cucuuggacuccggcugcagcgucagccuccc

SEQ ID NO: 9529 - RNA, 32 nt, Homo Sapiens
agauagucaggaggcugaggcaggaaaaucgc

SEQ ID NO: 9530 - RNA, 32 nt, Homo Sapiens
aaaagagaaaauaauguccauccugucgugau

SEQ ID NO: 9531 - RNA, 32 nt, Homo Sapiens
ccugcccccaagccggcccccaccugagccag

SEQ ID NO: 9532 - RNA, 32 nt, Homo Sapiens
cugccuggggcacgcucuuacaguggagcccg

SEQ ID NO: 9533 - RNA, 32 nt, Homo Sapiens
ugcgcucgucccagcccacccgcccggugcgg

SEQ ID NO: 9534 - RNA, 30 nt, Homo Sapiens
auuggguaucaccacuggagaucaccagug

SEQ ID NO: 9535 - RNA, 32 nt, Homo Sapiens
cuguuccuacuggcuggucccagccgacaguu

SEQ ID NO: 9536 - RNA, 32 nt, Homo Sapiens
auguaacuuagcacuuuuuuuuuuuuuuuuug

SEQ ID NO: 9537 - RNA, 32 nt, Homo Sapiens
ggcaggccagagcuacccgcagaguucucaga

SEQ ID NO: 9538 - RNA, 32 nt, Homo Sapiens
acuugacuuuggaauagcacaagggcaucacg

SEQ ID NO: 9539 - RNA, 32 nt, Homo Sapiens
aaaccagaaugccucuucuccuccaaaggauc

SEQ ID NO: 9540 - RNA, 32 nt, Homo Sapiens
uggcuguggggcgggagccgcugcugaaagga

SEQ ID NO: 9541 - RNA, 32 nt, Homo Sapiens
gggcagccccugggcguaucucuucuuccucu

SEQ ID NO: 9542 - RNA, 32 nt, Homo Sapiens
cagagauagucuucuuuuuguccuuucuggcc

SEQ ID NO: 9543 - RNA, 32 nt, Homo Sapiens
ggugguggccggcaccucugcuccucacgugg

SEQ ID NO: 9544 - RNA, 32 nt, Homo Sapiens
uagaacaaaaaauguauuuguauuuuauugaa

SEQ ID NO: 9545 - RNA, 32 nt, Homo Sapiens
auaaugagagaauaaacuuauuauauuuaaag

SEQ ID NO: 9546 - RNA, 32 nt, Homo Sapiens
uugaaaagggcuauagguccccugcccugccc

SEQ ID NO: 9547 - RNA, 32 nt, Homo Sapiens
uccacugccuguauuggaaaucuugcaauuca

SEQ ID NO: 9548 - RNA, 32 nt, Homo Sapiens
cgggggcccggugcuggccgagagucccugua

SEQ ID NO: 9549 - RNA, 32 nt, Homo Sapiens
gccuaacucaguaagaauauuaaaacuuacua

SEQ ID NO: 9550 - RNA, 32 nt, Homo Sapiens
cgggggucaccauggccgaggcgccucaggug

SEQ ID NO: 9551 - RNA, 32 nt, Homo Sapiens
ugaaaaugauagccuggcucgaaugugacauu

SEQ ID NO: 9552 - RNA, 32 nt, Homo Sapiens
gaccgggcgcgguggcucaucccuguaauccc

SEQ ID NO: 9553 - RNA, 32 nt, Homo Sapiens
ugaugaccuguccuuauucagaaugagagacu

SEQ ID NO: 9554 - RNA, 32 nt, Homo Sapiens
gcuucacucaggaguucaugcugagaugauca

SEQ ID NO: 9555 - RNA, 32 nt, Homo Sapiens
uccuuaucucaaccacauaagacagacacucc

SEQ ID NO: 9556 - RNA, 32 nt, Homo Sapiens
augucuaaaaauuuaucugauagaaacacuag

SEQ ID NO: 9557 - RNA, 32 nt, Homo Sapiens
gccgccccaagccggagccccgcagcgcuucu

SEQ ID NO: 9558 - RNA, 32 nt, Homo Sapiens
auugacaccucuaugugccaggcucuguguug

SEQ ID NO: 9559 - RNA, 32 nt, Homo Sapiens
ccuaggcuagccccaaacuccugggcucaagu

SEQ ID NO: 9560 - RNA, 32 nt, Homo Sapiens
aucucugugccaaauacauuauaucaggauua

SEQ ID NO: 9561 - RNA, 32 nt, Homo Sapiens
uuuccuuuucaaaaauacuuuaauguacaagu

SEQ ID NO: 9562 - RNA, 32 nt, Homo Sapiens
cuaugugaagggugauuggagaaggacaagac

SEQ ID NO: 9563 - RNA, 32 nt, Homo Sapiens
uauggaaaaaagugcacugaauuuauuagaca

SEQ ID NO: 9564 - RNA, 32 nt, Homo Sapiens
uuagaguaaaauuguuuucauuauuuucuaaa

SEQ ID NO: 9565 - RNA, 32 nt, Homo Sapiens
uuacugguauaaauauaacugaauauuggggu

SEQ ID NO: 9566 - RNA, 32 nt, Homo Sapiens
acugcuugaagaagaauauguauguuucuauc

SEQ ID NO: 9567 - RNA, 32 nt, Homo Sapiens
cucacaccauucuccugccucagccuccucag

SEQ ID NO: 9568 - RNA, 32 nt, Homo Sapiens
cuuaccguguuuguuuuuaaucaaauauuacc

SEQ ID NO: 9569 - RNA, 32 nt, Homo Sapiens
uacuacaaguugaguaaugguaugaguauaua

SEQ ID NO: 9570 - RNA, 32 nt, Homo Sapiens
aguacauuuucacuucuguauucgagggacuc

SEQ ID NO: 9571 - RNA, 32 nt, Homo Sapiens
gaccucacauucaggacuggccuagugaacgu

SEQ ID NO: 9572 - RNA, 32 nt, Homo Sapiens
aagauauuuuucugauauaauuagauugaaaa

SEQ ID NO: 9573 - RNA, 32 nt, Homo Sapiens
gcacuaaugcccucuuauuuucauagcagaga

SEQ ID NO: 9574 - RNA, 32 nt, Homo Sapiens
aaccccacaaagauuauaaaaauaugucaguu

SEQ ID NO: 9575 - RNA, 27 nt, Homo Sapiens
gaauggccgcgguguggcagcaagucu

SEQ ID NO: 9576 - RNA, 32 nt, Homo Sapiens
guauggcaguuuuuacuuuuuaucgcucguuu

SEQ ID NO: 9577 - RNA, 32 nt, Homo Sapiens
gagagauuucgugacaauguacgccuuucccu

SEQ ID NO: 9578 - RNA, 32 nt, Homo Sapiens
cccgaagcugggcgcgcgugggcgcggcggug

SEQ ID NO: 9579 - RNA, 32 nt, Homo Sapiens
uuuuauuuuuauucuuuuuucuuuugagacag

SEQ ID NO: 9580 - RNA, 32 nt, Homo Sapiens
gugggaagcggggcugcccuggaaguguguac

SEQ ID NO: 9581 - RNA, 32 nt, Homo Sapiens
uacuagguuucuucuuuuuuuuuguucugcaa

SEQ ID NO: 9582 - RNA, 32 nt, Homo Sapiens
agggguggccgugucacagucuggccaaggaa

SEQ ID NO: 9583 - RNA, 32 nt, Homo Sapiens
ggaucaaauguuuauugggguucagcuuuguu

SEQ ID NO: 9584 - RNA, 32 nt, Homo Sapiens
augacgaauauuaugaaaugugccuuuucuga

SEQ ID NO: 9585 - RNA, 32 nt, Homo Sapiens
uuucugaaguggugugauauaaaccaucucua

SEQ ID NO: 9586 - RNA, 32 nt, Homo Sapiens
gggggacgcccggccucugggccgcugccuuc

SEQ ID NO: 9587 - RNA, 32 nt, Homo Sapiens
uuuauuuuuaucauugucccacucauuuccac

SEQ ID NO: 9588 - RNA, 32 nt, Homo Sapiens
gcuccacagcccugcuggcuggucaccugccu

SEQ ID NO: 9589 - RNA, 32 nt, Homo Sapiens
uagaguguauaaaauucugucuuucauuucca

SEQ ID NO: 9590 - RNA, 32 nt, Homo Sapiens
gcagagcccgcggcgccgggaggacuuuguuc

SEQ ID NO: 9591 - RNA, 32 nt, Homo Sapiens
agauuaccucucuuaacccccauuuuaauuac

SEQ ID NO: 9592 - RNA, 32 nt, Homo Sapiens
ccccaccugccagugcgugccgccuccgagcg

SEQ ID NO: 9593 - RNA, 32 nt, Homo Sapiens
gaauaguuugguuuuuuuuuuaaaaaaaaaaa

SEQ ID NO: 9594 - RNA, 32 nt, Homo Sapiens
gaagcggccgcgcggcagcugcggggcguggg

SEQ ID NO: 9595 - RNA, 27 nt, Homo Sapiens
aaaugcuuugucuucagccucuccagg

SEQ ID NO: 9596 - RNA, 32 nt, Homo Sapiens
gccucaaaacaaaggccuaauucuaugccugu

SEQ ID NO: 9597 - RNA, 32 nt, Homo Sapiens
cucccgcgcgcacgcuccgcgccugauggcag

SEQ ID NO: 9598 - RNA, 32 nt, Homo Sapiens
ggcggugcgggugggggcgggaggcgcaaggu

SEQ ID NO: 9599 - RNA, 32 nt, Homo Sapiens
aaucauagugauugggaguaugucagcaugau

SEQ ID NO: 9600 - RNA, 32 nt, Homo Sapiens
caggaaugaguaucuaauagcuuuuguagaac

SEQ ID NO: 9601 - RNA, 32 nt, Homo Sapiens
ugacagggccauuuaggcccagcccugucuga

SEQ ID NO: 9602 - RNA, 32 nt, Homo Sapiens
uucaagggacucucagaucaucaaacccaccc

SEQ ID NO: 9603 - RNA, 32 nt, Homo Sapiens
ccucccccaaccccuguauccccaccccguac

SEQ ID NO: 9604 - RNA, 32 nt, Homo Sapiens
cucgccccuccgcgcucgcaacuucggccucc

SEQ ID NO: 9605 - RNA, 32 nt, Homo Sapiens
gaagugagcauggcugggcagcgagugcuucu

SEQ ID NO: 9606 - RNA, 32 nt, Homo Sapiens
uuggaccgggaccgcgacugggaccgggagcg

SEQ ID NO: 9607 - RNA, 32 nt, Homo Sapiens
aauuuuaacaaaucauugucuuuuaguaacau

SEQ ID NO: 9608 - RNA, 32 nt, Homo Sapiens
cuccugccaccagcauccacacugccggcagg

SEQ ID NO: 9609 - RNA, 32 nt, Homo Sapiens
gagggcaaggguuuccuuuuggcgcuucccuu

SEQ ID NO: 9610 - RNA, 32 nt, Homo Sapiens
ccuuauuaggaaaccggcuuauaauacuauau

SEQ ID NO: 9611 - RNA, 32 nt, Homo Sapiens
gccuuuuuuguuuccgugccccggggccucua

SEQ ID NO: 9612 - RNA, 32 nt, Homo Sapiens
uacggagcccagcaggcgugccaggcaauggg

SEQ ID NO: 9613 - RNA, 32 nt, Homo Sapiens
ugaagccaggggauugcugggcccagguguuc

SEQ ID NO: 9614 - RNA, 31 nt, Homo Sapiens
caguuuaaauaaaaucucuauauuaguaaaa

SEQ ID NO: 9615 - RNA, 32 nt, Homo Sapiens
gaagagggaaaggugcccauggcguccgagcg

SEQ ID NO: 9616 - RNA, 32 nt, Homo Sapiens
cuuuccuggucgugugcugagguugggacaau

SEQ ID NO: 9617 - RNA, 32 nt, Homo Sapiens
aaugcuccuccgaaguuuuucaggggguaaaa

SEQ ID NO: 9618 - RNA, 32 nt, Homo Sapiens
gaacgagaucaggagcgagaacgagaucggga

SEQ ID NO: 9619 - RNA, 32 nt, Homo Sapiens
cuuggcauuugugcuuuuuuucuugagggauu

SEQ ID NO: 9620 - RNA, 32 nt, Homo Sapiens
aggcgggugcucucacacccacagcagcacag

SEQ ID NO: 9621 - RNA, 29 nt, Homo Sapiens
uguuauggggaagggaggcccagcccacc

SEQ ID NO: 9622 - RNA, 32 nt, Homo Sapiens
ugguccuuucuuuucuaaacuauuugcauuaa

SEQ ID NO: 9623 - RNA, 32 nt, Homo Sapiens
cauguauaguugaguucucaaauuuguaaguu

SEQ ID NO: 9624 - RNA, 32 nt, Homo Sapiens
gaagucucaugcaaguugucugauagagaacu

SEQ ID NO: 9625 - RNA, 32 nt, Homo Sapiens
acuuaauuugaaaagaacaaugguaggaaagg

SEQ ID NO: 9626 - RNA, 32 nt, Homo Sapiens
auaguccaauuauuuucauguuaucuacugac

SEQ ID NO: 9627 - RNA, 32 nt, Homo Sapiens
cauagguuaccacccccaccccggcccgggau

SEQ ID NO: 9628 - RNA, 32 nt, Homo Sapiens
cuccuuuuuaaaccuuuucuuauggauggcug

SEQ ID NO: 9629 - RNA, 32 nt, Homo Sapiens
guaacugcacacgcggcgcugucagagauggg

SEQ ID NO: 9630 - RNA, 32 nt, Homo Sapiens
ggugccauuuucuauaagaucuucccaaaaga

SEQ ID NO: 9631 - RNA, 32 nt, Homo Sapiens
guccugaucuacuccuucuccuucucauacau

SEQ ID NO: 9632 - RNA, 32 nt, Homo Sapiens
cuacuuuuuuaaauacuguaucauaaguucag

SEQ ID NO: 9633 - RNA, 32 nt, Homo Sapiens
gagggucgcccggcggcagcugagccagcgcg

SEQ ID NO: 9634 - RNA, 26 nt, Homo Sapiens
uaugugcaggggaggaggagcuaugu

SEQ ID NO: 9635 - RNA, 32 nt, Homo Sapiens
uugugugucaacgauuaagccaacuaauucuc

SEQ ID NO: 9636 - RNA, 32 nt, Homo Sapiens
gcucccucugucauccucaggaaccaacaauu

SEQ ID NO: 9637 - RNA, 32 nt, Homo Sapiens
gccuagauuucagaagguguauggaaaugccu

SEQ ID NO: 9638 - RNA, 32 nt, Homo Sapiens
aagcaauucagauuaaauuuguuuuuguucug

SEQ ID NO: 9639 - RNA, 32 nt, Homo Sapiens
cagggagaggggccagcucacccugcugagag

SEQ ID NO: 9640 - RNA, 32 nt, Homo Sapiens
ccuucucuguaaccagacuuugaaaaauuguu

SEQ ID NO: 9641 - RNA, 32 nt, Homo Sapiens
cucaccuucagcgccucagcccuggacuguua

SEQ ID NO: 9642 - RNA, 32 nt, Homo Sapiens
gcugaccuggagaggagaugggggacagugcu

SEQ ID NO: 9643 - RNA, 32 nt, Homo Sapiens
uugauggcuuguguacagacaagcauuuaucc

SEQ ID NO: 9644 - RNA, 32 nt, Homo Sapiens
uauguauuuaggaugucugcaccuucugcagc

SEQ ID NO: 9645 - RNA, 32 nt, Homo Sapiens
uugaaagucuaacuuuuuuuuacuuauauauu

SEQ ID NO: 9646 - RNA, 32 nt, Homo Sapiens
aauguugugaccauuuaaccguguaaauauaa

SEQ ID NO: 9647 - RNA, 32 nt, Homo Sapiens
uuuuaaagaagucucuuaauucugaugcuagg

SEQ ID NO: 9648 - RNA, 32 nt, Homo Sapiens
ggaagaccuggaccgcaucguggccuugaccu

SEQ ID NO: 9649 - RNA, 32 nt, Homo Sapiens
auucacaccccuccccuucucccacagccaag

SEQ ID NO: 9650 - RNA, 32 nt, Homo Sapiens
uucuuuuuuuucugauauaucuaaggaagaau

SEQ ID NO: 9651 - RNA, 32 nt, Homo Sapiens
gcugaagaaggggacagccucuguaccugcgg

SEQ ID NO: 9652 - RNA, 32 nt, Homo Sapiens
ggcggggacaggucccaccuccuggcucccag

SEQ ID NO: 9653 - RNA, 32 nt, Homo Sapiens
cuauugcugcgcacugcuuuuucuacaggcau

SEQ ID NO: 9654 - RNA, 32 nt, Homo Sapiens
ggccugccagcagccuuggagaaaccacgagc

SEQ ID NO: 9655 - RNA, 32 nt, Homo Sapiens
augcuaguuacuggggguguugggggagacag

SEQ ID NO: 9656 - RNA, 32 nt, Homo Sapiens
acaacaaugcaaaccuuucagcauuguuuggc

SEQ ID NO: 9657 - RNA, 32 nt, Homo Sapiens
cagccugggugacagggcaagacucugucuca

SEQ ID NO: 9658 - RNA, 32 nt, Homo Sapiens
caaccugggcgacagggcgagacuccgucuca

SEQ ID NO: 9659 - RNA, 32 nt, Homo Sapiens
cccccgacaacacuacucuggguucaguauuu

SEQ ID NO: 9660 - RNA, 32 nt, Homo Sapiens
gcuccucacggggguggagggagccggagccu

SEQ ID NO: 9661 - RNA, 32 nt, Homo Sapiens
ugacccucaguuccucaaacacagacccaggg

SEQ ID NO: 9662 - RNA, 32 nt, Homo Sapiens
aaacauugauucuauggaugaucauuuguauc

SEQ ID NO: 9663 - RNA, 32 nt, Homo Sapiens
uguaucuuucaugcaccuagcauagugcuuug

SEQ ID NO: 9664 - RNA, 32 nt, Homo Sapiens
acaggauuauaaaauaauauuuuguguauaaa

SEQ ID NO: 9665 - RNA, 32 nt, Homo Sapiens
augucagaacuaaaagggaacuuuuuuaugua

SEQ ID NO: 9666 - RNA, 32 nt, Homo Sapiens
uauuuuugcugucuucucuuggcuuauuuuug

SEQ ID NO: 9667 - RNA, 32 nt, Homo Sapiens
ccccaccucugcuguccuuuccagucacuucu

SEQ ID NO: 9668 - RNA, 32 nt, Homo Sapiens
agauagcagacaccuuccccgauuugugucuc

SEQ ID NO: 9669 - RNA, 32 nt, Homo Sapiens
auuggggagaagcuagaugaaagggaagcugg

SEQ ID NO: 9670 - RNA, 32 nt, Homo Sapiens
aacugcccauucuuguucucuaucuaagaagg

SEQ ID NO: 9671 - RNA, 32 nt, Homo Sapiens
gauuugaagcuguguuuuuguaaaauaaaauc

SEQ ID NO: 9672 - RNA, 32 nt, Homo Sapiens
uuacagugcaggucuuaguuuuucuuuuuucu

SEQ ID NO: 9673 - RNA, 32 nt, Homo Sapiens
uggcuccaaaugucugacuaucuugagggaga

SEQ ID NO: 9674 - RNA, 32 nt, Homo Sapiens
accccauuuggugaagugaaaaacagaaaaau

SEQ ID NO: 9675 - RNA, 32 nt, Homo Sapiens
gcagcugugggaaugcggacaggaagcagggg

SEQ ID NO: 9676 - RNA, 32 nt, Homo Sapiens
uacagcagauacacaaauuagaugcaaguaaa

SEQ ID NO: 9677 - RNA, 32 nt, Homo Sapiens
aucuaagauguggauuauuguuagaaucugug

SEQ ID NO: 9678 - RNA, 32 nt, Homo Sapiens
cagaggcgucucacauuuuuacuugguguaau

SEQ ID NO: 9679 - RNA, 32 nt, Homo Sapiens
ugcgcuucagaaugcauaagugccauccuuua

SEQ ID NO: 9680 - RNA, 32 nt, Homo Sapiens
ucccccucaggauuacaacaccugcuaucaaa

SEQ ID NO: 9681 - RNA, 32 nt, Homo Sapiens
uccagcgucuuccccaucgucacucuccaugg

SEQ ID NO: 9682 - RNA, 32 nt, Homo Sapiens
ucgggagaggagagaccccaguccccugggcu

SEQ ID NO: 9683 - RNA, 32 nt, Homo Sapiens
guaaugagcagaucucuguggguguggagcuu

SEQ ID NO: 9684 - RNA, 32 nt, Homo Sapiens
uuuuguuugaauuguuaauucacagaauagca

SEQ ID NO: 9685 - RNA, 30 nt, Homo Sapiens
cagggcggcaggcguagcuggucccagggc

SEQ ID NO: 9686 - RNA, 32 nt, Homo Sapiens
agggucucacucugucacccaggcugcagugc

SEQ ID NO: 9687 - RNA, 32 nt, Homo Sapiens
uuacccgauaaggaaggucagcauucaaaguc

SEQ ID NO: 9688 - RNA, 32 nt, Homo Sapiens
cucaucuguggagaagggaagagaggauggca

SEQ ID NO: 9689 - RNA, 32 nt, Homo Sapiens
auuuuggauuuuuuuucuuugaauuauugggc

SEQ ID NO: 9690 - RNA, 32 nt, Homo Sapiens
aauuauuguuaacauggauguuacagcucaaa

SEQ ID NO: 9691 - RNA, 32 nt, Homo Sapiens
gugcuguuauauuauguuugauuuauuacaga

SEQ ID NO: 9692 - RNA, 32 nt, Homo Sapiens
auggggagucagccuuccagcugguguguagg

SEQ ID NO: 9693 - RNA, 32 nt, Homo Sapiens
uaugguuggcauuaaauuuagcauuucauuau

SEQ ID NO: 9694 - RNA, 32 nt, Homo Sapiens
gugggcuagaccuaccuuucugaugagcugcc

SEQ ID NO: 9695 - RNA, 32 nt, Homo Sapiens
gaggaguucaagcagcugcuugucaggaugca

SEQ ID NO: 9696 - RNA, 32 nt, Homo Sapiens
aagggcaggugcuucaggauaccauauacagc

SEQ ID NO: 9697 - RNA, 32 nt, Homo Sapiens
gugcaagcaucugaagagcugccgggaugcag

SEQ ID NO: 9698 - RNA, 32 nt, Homo Sapiens
gaaauaccacuacucugaucguuuuuucacug

SEQ ID NO: 9699 - RNA, 31 nt, Homo Sapiens
cagugaggagggggcgcgacggccaggaggc

SEQ ID NO: 9700 - RNA, 32 nt, Homo Sapiens
gugggagaacuaaaugugauagucauuauuua

SEQ ID NO: 9701 - RNA, 32 nt, Homo Sapiens
ccccucccagcaccccacagcccucacauccc

SEQ ID NO: 9702 - RNA, 32 nt, Homo Sapiens
acugcggcacuguugaauaaagggcaguccua

SEQ ID NO: 9703 - RNA, 32 nt, Homo Sapiens
gugcauugaaagaagagaugagaaaugaugaa

SEQ ID NO: 9704 - RNA, 32 nt, Homo Sapiens
guucccaugccaccucugggguuucuguuauc

SEQ ID NO: 9705 - RNA, 32 nt, Homo Sapiens
gagaaggccaccucuaauggggccugcaggca

SEQ ID NO: 9706 - RNA, 32 nt, Homo Sapiens
ggagacaaaggacgaggacucuguggagguga

SEQ ID NO: 9707 - RNA, 32 nt, Homo Sapiens
ucccucucaaaaaaacaaaacaaacaaaaaag

SEQ ID NO: 9708 - RNA, 32 nt, Homo Sapiens
acauuaaaauuauaacuuuuugaaagguaaua

SEQ ID NO: 9709 - RNA, 32 nt, Homo Sapiens
ugcggaugagagacugucagcauaaggaaugu

SEQ ID NO: 9710 - RNA, 32 nt, Homo Sapiens
ugcauagcuggguugcagcugcgaaccucauu

SEQ ID NO: 9711 - RNA, 32 nt, Homo Sapiens
cauuacucagguugguggggucgguuugagaa

SEQ ID NO: 9712 - RNA, 32 nt, Homo Sapiens
ucaucaggcacacaacuucuguuuccuucucu

SEQ ID NO: 9713 - RNA, 32 nt, Homo Sapiens
uugaauuauugggcagggaauguacuuaggua

SEQ ID NO: 9714 - RNA, 32 nt, Homo Sapiens
gccaaaaugcaacuggauccaguuaauccucu

SEQ ID NO: 9715 - RNA, 32 nt, Homo Sapiens
aaauaguguacaaaggcauaugucuuugaaua

SEQ ID NO: 9716 - RNA, 32 nt, Homo Sapiens
cccuccauauccuguucagccagggcuuccuc

SEQ ID NO: 9717 - RNA, 32 nt, Homo Sapiens
aagaagauagaaucauaugucugcuaaauaag

SEQ ID NO: 9718 - RNA, 32 nt, Homo Sapiens
aaugguguaaagaacccaaaauccacaagcac

SEQ ID NO: 9719 - RNA, 32 nt, Homo Sapiens
cucugaugcagggcacuugcuccacacucugg

SEQ ID NO: 9720 - RNA, 32 nt, Homo Sapiens
cugggcaaaugguauuuguuuuuguuuuaauu

SEQ ID NO: 9721 - RNA, 32 nt, Homo Sapiens
agaucccuacccaggcuucugucuuucucagu

SEQ ID NO: 9722 - RNA, 32 nt, Homo Sapiens
agcucuuuucucgaacucaucucuaaccugca

SEQ ID NO: 9723 - RNA, 32 nt, Homo Sapiens
ugaaaguuaaauuuauauaaaauauuuuguuc

SEQ ID NO: 9724 - RNA, 32 nt, Homo Sapiens
uggccccuguccugggucagcuguaggaaggg

SEQ ID NO: 9725 - RNA, 32 nt, Homo Sapiens
aaaauacaaaaauuagccagguaugguggugc

SEQ ID NO: 9726 - RNA, 32 nt, Homo Sapiens
uacuuguugaaggaauaaauuaaugaaugaau

SEQ ID NO: 9727 - RNA, 32 nt, Homo Sapiens
ccaguguugcuuaauaccaucucuuuguguaa

SEQ ID NO: 9728 - RNA, 32 nt, Homo Sapiens
gccuaauggaggaugagagaccacguggagga

SEQ ID NO: 9729 - RNA, 32 nt, Homo Sapiens
uuugcugacuuuauauggauauuauuuuuucc

SEQ ID NO: 9730 - RNA, 32 nt, Homo Sapiens
auugaaaggggagcaaguucggcagugggaga

SEQ ID NO: 9731 - RNA, 32 nt, Homo Sapiens
gcuaguaucuauuuuacaaaaugcagagccag

SEQ ID NO: 9732 - RNA, 32 nt, Homo Sapiens
cccaggacacugccucuucugggcagaaggcc

SEQ ID NO: 9733 - RNA, 32 nt, Homo Sapiens
aaguaccugaaaacagcugugcauggcaggcc

SEQ ID NO: 9734 - RNA, 32 nt, Homo Sapiens
auggggcaggccugggucuggagaggauuuug

SEQ ID NO: 9735 - RNA, 32 nt, Homo Sapiens
cauagcuugugcuaucuguaaauaugagacuu

SEQ ID NO: 9736 - RNA, 32 nt, Homo Sapiens
uucauuauuuuuggaauuuuaaagaugacaua

SEQ ID NO: 9737 - RNA, 32 nt, Homo Sapiens
ccucaggcuuggaaaugaaaggauucuauaga

SEQ ID NO: 9738 - RNA, 32 nt, Homo Sapiens
cggcucggccagaccucgccccccgcuucucc

SEQ ID NO: 9739 - RNA, 32 nt, Homo Sapiens
caggcaccgggcagaagcugggccuuccgccu

SEQ ID NO: 9740 - RNA, 32 nt, Homo Sapiens
augccuagcuaauuuuuguauuuuuuguagag

SEQ ID NO: 9741 - RNA, 32 nt, Homo Sapiens
gccuuucucucugcaccuaagucccugccgcc

SEQ ID NO: 9742 - RNA, 32 nt, Homo Sapiens
uuauucccuucuuuccucuuccagcugagcag

SEQ ID NO: 9743 - RNA, 32 nt, Homo Sapiens
uaauacagcagaacuccuaaaaaguuacagcc

SEQ ID NO: 9744 - RNA, 32 nt, Homo Sapiens
ugagaaagaggagaggcgcgaacgccacucca

SEQ ID NO: 9745 - RNA, 32 nt, Homo Sapiens
ggcucauuccuccuuggucuccugcuuccccu

SEQ ID NO: 9746 - RNA, 32 nt, Homo Sapiens
uggauugcaauaaauuuaugauuuaacuuuua

SEQ ID NO: 9747 - RNA, 32 nt, Homo Sapiens
ccaggaggguccuggggugggccagaugccug

SEQ ID NO: 9748 - RNA, 32 nt, Homo Sapiens
cucagcacagaaagaggaaggacagcacagcu

SEQ ID NO: 9749 - RNA, 32 nt, Homo Sapiens
ccugcauguaaaauaaagccauucuuuaccau

SEQ ID NO: 9750 - RNA, 32 nt, Homo Sapiens
cguucgucagcuugcuccuuucugcccgugga

SEQ ID NO: 9751 - RNA, 32 nt, Homo Sapiens
gacgagaugcugcgcaugcaccacgugcugaa

SEQ ID NO: 9752 - RNA, 29 nt, Homo Sapiens
uaugguuggggacagagugaggucguugc

SEQ ID NO: 9753 - RNA, 32 nt, Homo Sapiens
uucuuguuuagagaaguuuacuucuacaagaa

SEQ ID NO: 9754 - RNA, 32 nt, Homo Sapiens
uaucagguaauuacuuuuuugaagucaaaaag

SEQ ID NO: 9755 - RNA, 32 nt, Homo Sapiens
uguauguauggacugguuaaagugaguuuggg

SEQ ID NO: 9756 - RNA, 32 nt, Homo Sapiens
guaauucuguauuucuacuaagauaaucugcu

SEQ ID NO: 9757 - RNA, 32 nt, Homo Sapiens
aaucuuuacagccuauggauagacccuccuuu

SEQ ID NO: 9758 - RNA, 32 nt, Homo Sapiens
cgaauagaggccugcgcagagugcccggggug

SEQ ID NO: 9759 - RNA, 30 nt, Homo Sapiens
ccuuuccuuuaguggugggaaacccuuauc

SEQ ID NO: 9760 - RNA, 32 nt, Homo Sapiens
gcgcccuggugccucucguccaugcuccuggg

SEQ ID NO: 9761 - RNA, 32 nt, Homo Sapiens
ccuggcagcaaccugggaauggcuggaggugg

SEQ ID NO: 9762 - RNA, 32 nt, Homo Sapiens
ccccgggccuuggcugcccaggagugaauuau

SEQ ID NO: 9763 - RNA, 32 nt, Homo Sapiens
auaaaggaaaucaaaaucaauccagaaaaacu

SEQ ID NO: 9764 - RNA, 32 nt, Homo Sapiens
accugcccugugacccagcaguuccacuuuuc

SEQ ID NO: 9765 - RNA, 32 nt, Homo Sapiens
aagacucugggauaaucacaccagagaaggaa

SEQ ID NO: 9766 - RNA, 32 nt, Homo Sapiens
ccgucuagguggggcgggcgacgcgguagacg

SEQ ID NO: 9767 - RNA, 32 nt, Homo Sapiens
auuuuucucugggcucaggacucauuguaugu

SEQ ID NO: 9768 - RNA, 32 nt, Homo Sapiens
agggccuaggggcccaggaucaagucacucau

SEQ ID NO: 9769 - RNA, 32 nt, Homo Sapiens
ugaagaaacgagccagugacugaaacacccug

SEQ ID NO: 9770 - RNA, 32 nt, Homo Sapiens
uggccacacugagaagccuuugaaaauggcaa

SEQ ID NO: 9771 - RNA, 32 nt, Homo Sapiens
acccgacccgccgaccuucagcuuugugggac

SEQ ID NO: 9772 - RNA, 32 nt, Homo Sapiens
ugagcuugaggggaaggcagcgaugggacaaa

SEQ ID NO: 9773 - RNA, 32 nt, Homo Sapiens
aggaucccuuugcccucugguuuaccugggac

SEQ ID NO: 9774 - RNA, 32 nt, Homo Sapiens
cuugccaucccugucuccuccauccuggcugu

SEQ ID NO: 9775 - RNA, 32 nt, Homo Sapiens
aauauacaaaaauuagcugggugugguggcgg

SEQ ID NO: 9776 - RNA, 32 nt, Homo Sapiens
cugauuguacauucuauuuacugagauaggag

SEQ ID NO: 9777 - RNA, 32 nt, Homo Sapiens
ucaucagcuggguugauucugcagguuagaua

SEQ ID NO: 9778 - RNA, 32 nt, Homo Sapiens
uggaaaccuggaacacaaaaccauuaauauaa

SEQ ID NO: 9779 - RNA, 32 nt, Homo Sapiens
uuauguaaacuuaugacucuucauuuauauag

SEQ ID NO: 9780 - RNA, 27 nt, Homo Sapiens
cggccucuucucuucagcucccuuagc

SEQ ID NO: 9781 - RNA, 31 nt, Homo Sapiens
auuuaagcgaaauaaacaguuacucuuuggc

SEQ ID NO: 9782 - RNA, 32 nt, Homo Sapiens
cucuggcuuugugggcagccugccuggcccgc

SEQ ID NO: 9783 - RNA, 32 nt, Homo Sapiens
uggaaaagccacuuucuccacccgccgagaug

SEQ ID NO: 9784 - RNA, 32 nt, Homo Sapiens
augggccagccgucuccuacuccaccuuggau

SEQ ID NO: 9785 - RNA, 32 nt, Homo Sapiens
uuuuuacaucuccuuuuuccuuccuugaagaa

SEQ ID NO: 9786 - RNA, 32 nt, Homo Sapiens
cuguuuuuaaccauauguucugucccauagca

SEQ ID NO: 9787 - RNA, 32 nt, Homo Sapiens
ugucaauguugggacuuagauacauuuuuugc

SEQ ID NO: 9788 - RNA, 32 nt, Homo Sapiens
gccauaagcuaauugcaaaggacagagcuaaa

SEQ ID NO: 9789 - RNA, 32 nt, Homo Sapiens
guuguauuuuugguagagacaggguuuugcca

SEQ ID NO: 9790 - RNA, 31 nt, Homo Sapiens
guccugaaauaaaaaguggcaugcaguuuuu

SEQ ID NO: 9791 - RNA, 32 nt, Homo Sapiens
ucgucacccuccuggguguucugugggaauuu

SEQ ID NO: 9792 - RNA, 32 nt, Homo Sapiens
cugggcccugugauucucccagcccuugcagu

SEQ ID NO: 9793 - RNA, 32 nt, Homo Sapiens
accauugcacuccagccugggcgacaagagug

SEQ ID NO: 9794 - RNA, 32 nt, Homo Sapiens
ugguaaucgaucacauaggccuuuuuaaauuu

SEQ ID NO: 9795 - RNA, 32 nt, Homo Sapiens
uucuaaucaaggaaagauacggugaaacuuca

SEQ ID NO: 9796 - RNA, 32 nt, Homo Sapiens
gacgaggugccgcccucgcccgggcccucuga

SEQ ID NO: 9797 - RNA, 32 nt, Homo Sapiens
caauggugcgcggaagccaggcgggcgauuac

SEQ ID NO: 9798 - RNA, 32 nt, Homo Sapiens
ugguuggcagugcccuccuauugcucaugcuc

SEQ ID NO: 9799 - RNA, 32 nt, Homo Sapiens
ccauccccggcccuuaaaaaccuucccaucac

SEQ ID NO: 9800 - RNA, 32 nt, Homo Sapiens
aaaagaaauuuaagucacuaccuaguauacau

SEQ ID NO: 9801 - RNA, 32 nt, Homo Sapiens
gcagcugacugcgccuucacgauccgcuggga

SEQ ID NO: 9802 - RNA, 32 nt, Homo Sapiens
uucccuccaucccaggccugccagcaucccug

SEQ ID NO: 9803 - RNA, 32 nt, Homo Sapiens
cagcuucccuucccuucuggggcugccacagc

SEQ ID NO: 9804 - RNA, 32 nt, Homo Sapiens
uguagaaaaaagacauaaaaccuuagagaaag

SEQ ID NO: 9805 - RNA, 32 nt, Homo Sapiens
cagcacccuccacagcacaggccuuccaagug

SEQ ID NO: 9806 - RNA, 32 nt, Homo Sapiens
guuguuaccacauaggcacugguacgaauucu

SEQ ID NO: 9807 - RNA, 32 nt, Homo Sapiens
cugaaauaaaaauuauaauaaagcaaauuuau

SEQ ID NO: 9808 - RNA, 32 nt, Homo Sapiens
cugauuuccuuuauuucuuuuuuaaauuaugu

SEQ ID NO: 9809 - RNA, 32 nt, Homo Sapiens
ucuguuggugccugacuugauggccucauuug

SEQ ID NO: 9810 - RNA, 32 nt, Homo Sapiens
ucgccgcgcuccccaccuugccugcgcccgcc

SEQ ID NO: 9811 - RNA, 32 nt, Homo Sapiens
aaagacaaaacuucucuuucugauguuaagca

SEQ ID NO: 9812 - RNA, 32 nt, Homo Sapiens
ucgugccaccgccgccgcguccacccucagcg

SEQ ID NO: 9813 - RNA, 32 nt, Homo Sapiens
gaucagaagagaagauagaaacaucagaaugg

SEQ ID NO: 9814 - RNA, 32 nt, Homo Sapiens
accacuccaaaaaucagugcauuuugcauauu

SEQ ID NO: 9815 - RNA, 32 nt, Homo Sapiens
cccggcagcucuuugcaaagcugcuugaaacu

SEQ ID NO: 9816 - RNA, 32 nt, Homo Sapiens
ccagucccauucuuccuuuucaauaccuaccc

SEQ ID NO: 9817 - RNA, 32 nt, Homo Sapiens
cagcuaugaaacaaauuucagcuguuugaagu

SEQ ID NO: 9818 - RNA, 32 nt, Homo Sapiens
cgucgcccacccacacccuggcugcggcccgc

SEQ ID NO: 9819 - RNA, 32 nt, Homo Sapiens
ggacaaggcgggagguucgggggccuuccggc

SEQ ID NO: 9820 - RNA, 32 nt, Homo Sapiens
gccgcacccucuggggucuucuguccagcucc

SEQ ID NO: 9821 - RNA, 32 nt, Homo Sapiens
gggaaucugacaaagcacuugcauguauaaag

SEQ ID NO: 9822 - RNA, 32 nt, Homo Sapiens
gugaaaagggagccaguugacucuugaccuuc

SEQ ID NO: 9823 - RNA, 32 nt, Homo Sapiens
aggcggggccgcguccuccuggcgucaccggc

SEQ ID NO: 9824 - RNA, 32 nt, Homo Sapiens
acaggggugccucuuuuagugcucucccaaua

SEQ ID NO: 9825 - RNA, 32 nt, Homo Sapiens
aggaugugggugucccuggcucugugagucuu

SEQ ID NO: 9826 - RNA, 32 nt, Homo Sapiens
ggggagggagacggagcaguacuggccgcggc

SEQ ID NO: 9827 - RNA, 31 nt, Homo Sapiens
ggcgugauggagcggcagcagcagcagcaac

SEQ ID NO: 9828 - RNA, 32 nt, Homo Sapiens
ccccgaggccucucgccccgggccccuagacc

SEQ ID NO: 9829 - RNA, 32 nt, Homo Sapiens
uuagaguucuaauaaacuuuggugaaaagcug

SEQ ID NO: 9830 - RNA, 32 nt, Homo Sapiens
auggagcccucccagccaccagccugccucca

SEQ ID NO: 9831 - RNA, 32 nt, Homo Sapiens
aggcuaucccaucacccuuuauuuggagaagg

SEQ ID NO: 9832 - RNA, 32 nt, Homo Sapiens
ccuggggcugcuagugccaucguggugugugg

SEQ ID NO: 9833 - RNA, 32 nt, Homo Sapiens
ucuaugaauacauguguaagugccagacagcu

SEQ ID NO: 9834 - RNA, 32 nt, Homo Sapiens
auacucccgucacuccuccccacugccgcccc

SEQ ID NO: 9835 - RNA, 32 nt, Homo Sapiens
cagcccuccccuccccacaacaugaacaagau

SEQ ID NO: 9836 - RNA, 32 nt, Homo Sapiens
cacauuuuacuuugcauuugcuuggaagugag

SEQ ID NO: 9837 - RNA, 32 nt, Homo Sapiens
cgacuuguucccucaccuauucauggcucucu

SEQ ID NO: 9838 - RNA, 32 nt, Homo Sapiens
uguccuuccccuccccgaucuuaagguguguu

SEQ ID NO: 9839 - RNA, 32 nt, Homo Sapiens
cccuuauaaaauugauguugucuuuaccagaa

SEQ ID NO: 9840 - RNA, 32 nt, Homo Sapiens
aaaugcuggauaaauagacugauaaaaccucu

SEQ ID NO: 9841 - RNA, 32 nt, Homo Sapiens
ugcgaggggaagcucacguaccuggcugacag

SEQ ID NO: 9842 - RNA, 32 nt, Homo Sapiens
caguacagaucguuucucaucucuagugccuc

SEQ ID NO: 9843 - RNA, 32 nt, Homo Sapiens
ugaauuuuucuuuuccaucacaauguaagaua

SEQ ID NO: 9844 - RNA, 29 nt, Homo Sapiens
acauggcuauguauguacuugguggugga

SEQ ID NO: 9845 - RNA, 32 nt, Homo Sapiens
ugaugaugaugaugaugaugauaauaauaaua

SEQ ID NO: 9846 - RNA, 32 nt, Homo Sapiens
cuggcucuacgccugcgacgccgccgcgaggu

SEQ ID NO: 9847 - RNA, 32 nt, Homo Sapiens
aucauccuggcuaacacagugaaaccccaucu

SEQ ID NO: 9848 - RNA, 32 nt, Homo Sapiens
guaaucuccgccuccuggguucaagggauucu

SEQ ID NO: 9849 - RNA, 30 nt, Homo Sapiens
gcugacgcuguccuacagccggcgcggaga

SEQ ID NO: 9850 - RNA, 32 nt, Homo Sapiens
guuaauaacaaaugaauccagacuugucuaac

SEQ ID NO: 9851 - RNA, 32 nt, Homo Sapiens
acaaccagggaagagugggacaagggagauaa

SEQ ID NO: 9852 - RNA, 32 nt, Homo Sapiens
cguuaacaccaaaacugaauucuuaugcagaa

SEQ ID NO: 9853 - RNA, 32 nt, Homo Sapiens
uuccacauguguuauucuuaauuuuugcuucu

SEQ ID NO: 9854 - RNA, 32 nt, Homo Sapiens
cagcuccaugcuuguuauuaccucugaagacc

SEQ ID NO: 9855 - RNA, 32 nt, Homo Sapiens
uggugggcuugccccugaagccuggcuugggu

SEQ ID NO: 9856 - RNA, 32 nt, Homo Sapiens
auaugcucuugacagcucuuuggcuggcuuuu

SEQ ID NO: 9857 - RNA, 32 nt, Homo Sapiens
ucugcauuggagagacuucucauacuuucuuu

SEQ ID NO: 9858 - RNA, 32 nt, Homo Sapiens
gcuguagcuucggggagugcaagccccaagcc

SEQ ID NO: 9859 - RNA, 32 nt, Homo Sapiens
uugcuuacagaaaaacggggggagaauuaagc

SEQ ID NO: 9860 - RNA, 31 nt, Homo Sapiens
cuuccugugacuuuugcgccccgcgccuggg

SEQ ID NO: 9861 - RNA, 32 nt, Homo Sapiens
uaugugcuuuaugccacgaagaacugaaguau

SEQ ID NO: 9862 - RNA, 32 nt, Homo Sapiens
gaaccacacgagcgugcugcucagugcugacu

SEQ ID NO: 9863 - RNA, 32 nt, Homo Sapiens
agugccggcgccauggggucggagcugaucgg

SEQ ID NO: 9864 - RNA, 32 nt, Homo Sapiens
uauaugucacuuugcuacagggcucacagaau

SEQ ID NO: 9865 - RNA, 32 nt, Homo Sapiens
cuucuagugcuaguaaucauuggaugcaugau

SEQ ID NO: 9866 - RNA, 32 nt, Homo Sapiens
agaguuugauuuaauguuuuuacaauauuuuu

SEQ ID NO: 9867 - RNA, 32 nt, Homo Sapiens
aauuuuuuguauccuuccuagagacaggauuu

SEQ ID NO: 9868 - RNA, 32 nt, Homo Sapiens
uuugugggggagaggggaggggacgggcaggg

SEQ ID NO: 9869 - RNA, 32 nt, Homo Sapiens
caccagcccugagggcgucuccauccuggcca

SEQ ID NO: 9870 - RNA, 32 nt, Homo Sapiens
acucugguugcaaucccucccccucccacacu

SEQ ID NO: 9871 - RNA, 32 nt, Homo Sapiens
ugcagccucccagcguccucuccgggcccagc

SEQ ID NO: 9872 - RNA, 32 nt, Homo Sapiens
uagucuggaauauauuugaugacucugcagaa

SEQ ID NO: 9873 - RNA, 32 nt, Homo Sapiens
agagggagaaggaucauucaaaaguuacccaa

SEQ ID NO: 9874 - RNA, 32 nt, Homo Sapiens
auguauuaaaugcugcuagaaaagccucauua

SEQ ID NO: 9875 - RNA, 32 nt, Homo Sapiens
cucucuguacucucaaccaacaugaagcaucu

SEQ ID NO: 9876 - RNA, 32 nt, Homo Sapiens
uaguaaugucauuguuggaaugaguuuaugau

SEQ ID NO: 9877 - RNA, 32 nt, Homo Sapiens
uuauuuuuacuuuuuuuuuuuaauucagaaga

SEQ ID NO: 9878 - RNA, 32 nt, Homo Sapiens
uguuuuaauugucuggcuucucucuggacugg

SEQ ID NO: 9879 - RNA, 32 nt, Homo Sapiens
caucauagguagagaccccacccucccaucgg

SEQ ID NO: 9880 - RNA, 32 nt, Homo Sapiens
gauggcuugagcucaggauguaaggcugcaga

SEQ ID NO: 9881 - RNA, 32 nt, Homo Sapiens
acaguagaugcucaacacauauuguugaauga

SEQ ID NO: 9882 - RNA, 32 nt, Homo Sapiens
cccagcugugccgacagcaccuccaccuuggg

SEQ ID NO: 9883 - RNA, 32 nt, Homo Sapiens
uucuugaacaccugaggccuuccuguggccca

SEQ ID NO: 9884 - RNA, 31 nt, Homo Sapiens
gaauuuucucggagaaagacaggccggccac

SEQ ID NO: 9885 - RNA, 32 nt, Homo Sapiens
agccgugauccagagcugcugcugcucacugc

SEQ ID NO: 9886 - RNA, 32 nt, Homo Sapiens
aggggcugacagcugugcuggugcugauaagg

SEQ ID NO: 9887 - RNA, 32 nt, Homo Sapiens
uaacaaaugcaaaugaagagaaaucagggguc

SEQ ID NO: 9888 - RNA, 32 nt, Homo Sapiens
uuacccggggaggacgcggggagccggaaccc

SEQ ID NO: 9889 - RNA, 32 nt, Homo Sapiens
aggaaauguuacuuuuguuaaucuuuaaaaaa

SEQ ID NO: 9890 - RNA, 32 nt, Homo Sapiens
gggcgaggcgguccgggcuggccuuuaucgcu

SEQ ID NO: 9891 - RNA, 32 nt, Homo Sapiens
ccucuuagaaucucuuaugaaaaaaugaucag

SEQ ID NO: 9892 - RNA, 32 nt, Homo Sapiens
gccugaauauccugucuuuucuuuuuuauaag

SEQ ID NO: 9893 - RNA, 32 nt, Homo Sapiens
ucuauuucuguuacauuuuauuacuguauggc

SEQ ID NO: 9894 - RNA, 32 nt, Homo Sapiens
aaaggugacaccuggagaccaaaugcagggua

SEQ ID NO: 9895 - RNA, 32 nt, Homo Sapiens
gggagaggcagcuggagaagggccuggucuuu

SEQ ID NO: 9896 - RNA, 32 nt, Homo Sapiens
caaccccgaagggguccaguugccagagccac

SEQ ID NO: 9897 - RNA, 32 nt, Homo Sapiens
cguggcucgaguuuccucugcucuccgcucuc

SEQ ID NO: 9898 - RNA, 32 nt, Homo Sapiens
ugcuuuucugugaacgaaucucuaaaacuuuu

SEQ ID NO: 9899 - RNA, 32 nt, Homo Sapiens
gaggguggaugcuggggugcugagugagcauc

SEQ ID NO: 9900 - RNA, 32 nt, Homo Sapiens
aaaaacaacucccuuaaauuuggguaaaugug

SEQ ID NO: 9901 - RNA, 32 nt, Homo Sapiens
acacucagcagcccucacggucuuagugacgu

SEQ ID NO: 9902 - RNA, 32 nt, Homo Sapiens
acacacacacacacacauuagucauaucaccu

SEQ ID NO: 9903 - RNA, 32 nt, Homo Sapiens
cgucauugaaacuacacuuuuuuggucuguuu

SEQ ID NO: 9904 - RNA, 32 nt, Homo Sapiens
cacgugaacacacaacucuccuauauuccuca

SEQ ID NO: 9905 - RNA, 32 nt, Homo Sapiens
aagugucuguuguuuagggcacccuguccaug

SEQ ID NO: 9906 - RNA, 32 nt, Homo Sapiens
agugucauuuuuccuuccuuccuuccauuggc

SEQ ID NO: 9907 - RNA, 32 nt, Homo Sapiens
ugaggcagcaaacccugcaaagggcugggacu

SEQ ID NO: 9908 - RNA, 32 nt, Homo Sapiens
uuccuuuaaaaauuauuuuaaaacaccuuuau

SEQ ID NO: 9909 - RNA, 32 nt, Homo Sapiens
uguggagaacagagccaugucauaucacuuug

SEQ ID NO: 9910 - RNA, 32 nt, Homo Sapiens
auugcugagagaaauauggaacuuacauuguu

SEQ ID NO: 9911 - RNA, 32 nt, Homo Sapiens
aguaggaagaaggaucuaaguaguugagcugc

SEQ ID NO: 9912 - RNA, 32 nt, Homo Sapiens
cugcacugccagcagagagggugugucugggg

SEQ ID NO: 9913 - RNA, 32 nt, Homo Sapiens
caaaauaguuuauaaagacucuauaguuucua

SEQ ID NO: 9914 - RNA, 32 nt, Homo Sapiens
aaaugccuccuccaauuuuguaagaaugcuag

SEQ ID NO: 9915 - RNA, 32 nt, Homo Sapiens
ucuuggagaaugauugcguugaguggagaugu

SEQ ID NO: 9916 - RNA, 30 nt, Homo Sapiens
gucggaggcaggcggucaaggccggcaggg

SEQ ID NO: 9917 - RNA, 32 nt, Homo Sapiens
gaagcaggaggauguccagaagaaauuucauc

SEQ ID NO: 9918 - RNA, 32 nt, Homo Sapiens
ugucagugucacuggaugucaaacaguaauaa

SEQ ID NO: 9919 - RNA, 32 nt, Homo Sapiens
uagccugcugugaugccuggaauuucauccuu

SEQ ID NO: 9920 - RNA, 32 nt, Homo Sapiens
ugguugauuuugauuugacagcauacauuaug

SEQ ID NO: 9921 - RNA, 32 nt, Homo Sapiens
gacaaguaaaaugagguugaacgaggcauccu

SEQ ID NO: 9922 - RNA, 32 nt, Homo Sapiens
guuuucagcaugacacuguuaacaagugugua

SEQ ID NO: 9923 - RNA, 32 nt, Homo Sapiens
auauaaaggugauuguaugcauaaaacaggug

SEQ ID NO: 9924 - RNA, 28 nt, Homo Sapiens
cuaaauaaaaauuuauauuuuacuuuuu

SEQ ID NO: 9925 - RNA, 32 nt, Homo Sapiens
ccgcuccccucgcgucggauccccgcgcccag

SEQ ID NO: 9926 - RNA, 32 nt, Homo Sapiens
cucuguaaauuaacucaauuagacaaagccug

SEQ ID NO: 9927 - RNA, 32 nt, Homo Sapiens
agagaaaugauaccuuuuuuuuuuuuuugaga

SEQ ID NO: 9928 - RNA, 32 nt, Homo Sapiens
cggagagccgcgcagggcgcgggccgcgcggg

SEQ ID NO: 9929 - RNA, 32 nt, Homo Sapiens
cugugagagagauaugaaauauuuuauaguua

SEQ ID NO: 9930 - RNA, 32 nt, Homo Sapiens
cagcugugcagagcugcaggcgcgcgucaugg

SEQ ID NO: 9931 - RNA, 32 nt, Homo Sapiens
agaaggugacaaguacuggcucuuuauucauu

SEQ ID NO: 9932 - RNA, 32 nt, Homo Sapiens
ggccgcugcuccauucuacacaggacagcauu

SEQ ID NO: 9933 - RNA, 32 nt, Homo Sapiens
uggucccaggcuucccaaaaguguuuguuggc

SEQ ID NO: 9934 - RNA, 32 nt, Homo Sapiens
aaugaaaacagagcuucccgugcaaaaagggu

SEQ ID NO: 9935 - RNA, 32 nt, Homo Sapiens
uauuauaaggaaauuuuacagauucuaaaaau

SEQ ID NO: 9936 - RNA, 32 nt, Homo Sapiens
caccucccacuuuccaucauggccugaacccu

SEQ ID NO: 9937 - RNA, 32 nt, Homo Sapiens
uacuagccauuuuuugugaauuucauaagaaa

SEQ ID NO: 9938 - RNA, 32 nt, Homo Sapiens
aucucuauuucccccaaauacugacccauucu

SEQ ID NO: 9939 - RNA, 32 nt, Homo Sapiens
uucaauauauuuuuugucuuuguuugcauugu

SEQ ID NO: 9940 - RNA, 31 nt, Homo Sapiens
guggaccaagccauccugagggcauggacau

SEQ ID NO: 9941 - RNA, 32 nt, Homo Sapiens
gucuacuggacaugaccccccuuccuguaccc

SEQ ID NO: 9942 - RNA, 32 nt, Homo Sapiens
gugaagaagauaguaggaaacagucuggaugc

SEQ ID NO: 9943 - RNA, 32 nt, Homo Sapiens
caguuuuuucuucuuaguucugcauuagaaau

SEQ ID NO: 9944 - RNA, 32 nt, Homo Sapiens
ccaguggggguggaagaaggccugguaaaugu

SEQ ID NO: 9945 - RNA, 32 nt, Homo Sapiens
cucacuuuuuauuguauuuuaucuuccgcaga

SEQ ID NO: 9946 - RNA, 32 nt, Homo Sapiens
ugucuuuggugacacuaauguucuacuauagc

SEQ ID NO: 9947 - RNA, 32 nt, Homo Sapiens
acagcagguugucugaccuucaaccacugggc

SEQ ID NO: 9948 - RNA, 32 nt, Homo Sapiens
ugcuggaguugucugaaccgauauuucuuuuu

SEQ ID NO: 9949 - RNA, 32 nt, Homo Sapiens
cuuacucggccccucccuccccagcagcccca

SEQ ID NO: 9950 - RNA, 32 nt, Homo Sapiens
guugagguuucugcaaagagggcgcaggcccu

SEQ ID NO: 9951 - RNA, 32 nt, Homo Sapiens
guguagaaggcacuucaaaaugcauaaaccug

SEQ ID NO: 9952 - RNA, 32 nt, Homo Sapiens
aaacgaaaaucguguguguuugaaaagaagaa

SEQ ID NO: 9953 - RNA, 32 nt, Homo Sapiens
caugcuaauauugcuuuuuuuguucuuuacca

SEQ ID NO: 9954 - RNA, 32 nt, Homo Sapiens
cuguuagaaagauuguagcguuuuacucuccc

SEQ ID NO: 9955 - RNA, 32 nt, Homo Sapiens
cuagguaaacacauuuuauccuaauaucggua

SEQ ID NO: 9956 - RNA, 32 nt, Homo Sapiens
gauuuggaagggggguuggguugggcuggaua

SEQ ID NO: 9957 - RNA, 30 nt, Homo Sapiens
aauuuucuggacuuuaaaucuccugguuaa

SEQ ID NO: 9958 - RNA, 32 nt, Homo Sapiens
agcaggcggggaccgaacgggugccucagugu

SEQ ID NO: 9959 - RNA, 32 nt, Homo Sapiens
cucuccuuccguuucugaaaucucuuacucag

SEQ ID NO: 9960 - RNA, 31 nt, Homo Sapiens
uccuagaaauaaaaaccagauguccaccucc

SEQ ID NO: 9961 - RNA, 32 nt, Homo Sapiens
aauuuuuaaaacuuggguaacacuuccaaaua

SEQ ID NO: 9962 - RNA, 32 nt, Homo Sapiens
ggggcucggggcagaggggcggugucucguag

SEQ ID NO: 9963 - RNA, 32 nt, Homo Sapiens
auuuauuccuaaaauauuaccuugaggccaaa

SEQ ID NO: 9964 - RNA, 32 nt, Homo Sapiens
cgugguggggguggagcagggguacccagguc

SEQ ID NO: 9965 - RNA, 32 nt, Homo Sapiens
ggacauguaccacggcggccaaagcggaauua

SEQ ID NO: 9966 - RNA, 32 nt, Homo Sapiens
gacugagugggcaaagagaaccugggcugaga

SEQ ID NO: 9967 - RNA, 32 nt, Homo Sapiens
cugucagucuuacuuuugaaagaagauguccg

SEQ ID NO: 9968 - RNA, 32 nt, Homo Sapiens
acaucuggaucuggaucugcggcggccucggg

SEQ ID NO: 9969 - RNA, 32 nt, Homo Sapiens
cggccacgccuuccgcggccaagucauuaugg

SEQ ID NO: 9970 - RNA, 32 nt, Homo Sapiens
gacuggcggcgggcgccgcggucgggcuggcu

SEQ ID NO: 9971 - RNA, 32 nt, Homo Sapiens
uaaacuucuuccccuaguuccauccucacuag

SEQ ID NO: 9972 - RNA, 32 nt, Homo Sapiens
gcucgcgggaguccaggggcagacgggauggg

SEQ ID NO: 9973 - RNA, 32 nt, Homo Sapiens
auuagaaggaaugguuuugucuaauuuucuuc

SEQ ID NO: 9974 - RNA, 32 nt, Homo Sapiens
ugaggaacccagggcucacagaugaaccaugc

SEQ ID NO: 9975 - RNA, 32 nt, Homo Sapiens
cuucccaccuggacagugguguguguagaaag

SEQ ID NO: 9976 - RNA, 30 nt, Homo Sapiens
ggcagggccaguuccucccaucuucaggcc

SEQ ID NO: 9977 - RNA, 32 nt, Homo Sapiens
acuuaagcauauaggauuuguuuaucauccca

SEQ ID NO: 9978 - RNA, 31 nt, Homo Sapiens
cucaggcggggcugccugcaggcucccguuu

SEQ ID NO: 9979 - RNA, 32 nt, Homo Sapiens
uaauuuuuuuuuucuuuuuuuucuuuuuggua

SEQ ID NO: 9980 - RNA, 32 nt, Homo Sapiens
ccagguccgccagcagccgguucagccagaau

SEQ ID NO: 9981 - RNA, 32 nt, Homo Sapiens
aaagcaaaacaaaauggaaaguaggggaggug

SEQ ID NO: 9982 - RNA, 32 nt, Homo Sapiens
uugauuuuuacuuuagaaaagaucaucuucaa

SEQ ID NO: 9983 - RNA, 32 nt, Homo Sapiens
aaacuccccgucccauauccugccucagcccg

SEQ ID NO: 9984 - RNA, 31 nt, Homo Sapiens
gaaauggaggaggguaccgugaacagaguaa

SEQ ID NO: 9985 - RNA, 32 nt, Homo Sapiens
gcugcuacguugggaacccuggugacaucaua

SEQ ID NO: 9986 - RNA, 32 nt, Homo Sapiens
guaguucgagggugcgccguguccuuuugcgu

SEQ ID NO: 9987 - RNA, 32 nt, Homo Sapiens
cagguuuaauuuuggaggaacuuuacagguuu

SEQ ID NO: 9988 - RNA, 32 nt, Homo Sapiens
agaggggccccggccugcucucccucccuccc

SEQ ID NO: 9989 - RNA, 32 nt, Homo Sapiens
ggccccuuugaugugggcccagcccugaagcu

SEQ ID NO: 9990 - RNA, 32 nt, Homo Sapiens
ugcaggcaugugacuaacuuugaaagaacacc

SEQ ID NO: 9991 - RNA, 32 nt, Homo Sapiens
caccggggaaaguuuuguaacuggauguuguu

SEQ ID NO: 9992 - RNA, 32 nt, Homo Sapiens
agaaaucauauauauaauguuuuccuaggaaa

SEQ ID NO: 9993 - RNA, 32 nt, Homo Sapiens
ucacuucuggccauauaacauuuacacaggga

SEQ ID NO: 9994 - RNA, 32 nt, Homo Sapiens
agggagcgcgcccgcguuauccucguaccuuu

SEQ ID NO: 9995 - RNA, 30 nt, Homo Sapiens
gaagguggagguggcaggcggauggccagg

SEQ ID NO: 9996 - RNA, 32 nt, Homo Sapiens
acacuucccugggccucaacaaggaucaggcu

SEQ ID NO: 9997 - RNA, 32 nt, Homo Sapiens
uguugacaggaagaggggucagacuuucccuu

SEQ ID NO: 9998 - RNA, 32 nt, Homo Sapiens
gcuggacgcggccacgccggcgcggcgggaua

SEQ ID NO: 9999 - RNA, 32 nt, Homo Sapiens
ggaaggcccucccuuuggccugaguacuuuuc

SEQ ID NO: 10000 - RNA, 30 nt, Homo Sapiens
cagucgucgccccugccgccgcugccaccg

SEQ ID NO: 10001 - RNA, 32 nt, Homo Sapiens
uuucugaagaucugugaacaaaguacugugca

SEQ ID NO: 10002 - RNA, 32 nt, Homo Sapiens
ggauagagcuggcuuuccuucugggcugucuc

SEQ ID NO: 10003 - RNA, 32 nt, Homo Sapiens
ucauuauuauacuucuuauguuuggaccugcu

SEQ ID NO: 10004 - RNA, 28 nt, Homo Sapiens
aaaauauuuggcuaaaggaugacauugc

SEQ ID NO: 10005 - RNA, 32 nt, Homo Sapiens
caugucugcccuuuuuuguggugucuagcauu

SEQ ID NO: 10006 - RNA, 32 nt, Homo Sapiens
gcgugcauuguuaaccagaguauuuuuaaaau

SEQ ID NO: 10007 - RNA, 32 nt, Homo Sapiens
gaugggaggggcauauuuuuuacuucauuacu

SEQ ID NO: 10008 - RNA, 32 nt, Homo Sapiens
aaauaaucucaaaggaguuaaauguauucuug

SEQ ID NO: 10009 - RNA, 32 nt, Homo Sapiens
cacucaaaacauccuucaccaugcaauuaaug

SEQ ID NO: 10010 - RNA, 32 nt, Homo Sapiens
ucuacgucccagggagggaggggcggcccaca

SEQ ID NO: 10011 - RNA, 32 nt, Homo Sapiens
uggagaagaagcugcugagcauggcuuucugu

SEQ ID NO: 10012 - RNA, 32 nt, Homo Sapiens
ccuggccgggcucgccgucgcuguccagggcc

SEQ ID NO: 10013 - RNA, 32 nt, Homo Sapiens
cuaaugauauugagaagccuagcuucacuugg

SEQ ID NO: 10014 - RNA, 32 nt, Homo Sapiens
aaagaccacaacaacuguccuuucucaauuac

SEQ ID NO: 10015 - RNA, 32 nt, Homo Sapiens
ccuguguuccaucgaagauuguaacucagccu

SEQ ID NO: 10016 - RNA, 32 nt, Homo Sapiens
cacugcaugaauaaaauuauuccuuuguauuu

SEQ ID NO: 10017 - RNA, 32 nt, Homo Sapiens
ugcugcaggcagcagaguaugucugaacucgg

SEQ ID NO: 10018 - RNA, 32 nt, Homo Sapiens
cacuccugccccaccccacccuugucccuggc

SEQ ID NO: 10019 - RNA, 32 nt, Homo Sapiens
augaguaaaaauuagaauuaugcugccuaccu

SEQ ID NO: 10020 - RNA, 32 nt, Homo Sapiens
aucugagcaauauggaauauuuugugccacac

SEQ ID NO: 10021 - RNA, 32 nt, Homo Sapiens
gcacccucugucuccuuccuucucgggccuca

SEQ ID NO: 10022 - RNA, 32 nt, Homo Sapiens
acgcggagggucgaggcggcgcggccugagug

SEQ ID NO: 10023 - RNA, 32 nt, Homo Sapiens
cccugcucgccuuggucauguacagcacugaa

SEQ ID NO: 10024 - RNA, 32 nt, Homo Sapiens
ccccaggaauggggagcgcuggcuuuuccgug

SEQ ID NO: 10025 - RNA, 32 nt, Homo Sapiens
cuugccuguuggugaucaugcuccucaccagg

SEQ ID NO: 10026 - RNA, 32 nt, Homo Sapiens
cccccugcugcugcugccccagcgucuugacg

SEQ ID NO: 10027 - RNA, 32 nt, Homo Sapiens
ccacgcguccggcagcggccucggggguuggg

SEQ ID NO: 10028 - RNA, 31 nt, Homo Sapiens
augcuuacaaagaaagcacuucuuauugaaa

SEQ ID NO: 10029 - RNA, 32 nt, Homo Sapiens
aaggacaggagaaaaggucuucaaucguggaa

SEQ ID NO: 10030 - RNA, 32 nt, Homo Sapiens
auuugagguauuacugcuuuuggaaaaguuau

SEQ ID NO: 10031 - RNA, 32 nt, Homo Sapiens
cugggguucccgggcgacgccggcgcugggcg

SEQ ID NO: 10032 - RNA, 32 nt, Homo Sapiens
aacacauacuuuuaagguauuaucucagacuu

SEQ ID NO: 10033 - RNA, 32 nt, Homo Sapiens
cuaagauaauuagggacaaaugauguuacaaa

SEQ ID NO: 10034 - RNA, 32 nt, Homo Sapiens
uugcccuuugucaucaccaacacaacagauag

SEQ ID NO: 10035 - RNA, 32 nt, Homo Sapiens
agugagcgcggggcgcccagggcgcguugcgu

SEQ ID NO: 10036 - RNA, 32 nt, Homo Sapiens
ugauuuugaaagacaugggaaaaagcauuccu

SEQ ID NO: 10037 - RNA, 32 nt, Homo Sapiens
acaaugcauuuguguaauuuauagaaguaaaa

SEQ ID NO: 10038 - RNA, 32 nt, Homo Sapiens
gcggcgggaggggaaacgugcgcggccgaagg

SEQ ID NO: 10039 - RNA, 32 nt, Homo Sapiens
ugggaccccuagaaauggaaaccaggcucccc

SEQ ID NO: 10040 - RNA, 32 nt, Homo Sapiens
ggaggguagugggugcuggucaaggccgcuuu

SEQ ID NO: 10041 - RNA, 32 nt, Homo Sapiens
uaaauuaaauccaggaacauauauaaaggagc

SEQ ID NO: 10042 - RNA, 32 nt, Homo Sapiens
gcucaugggcccugguguuugcaccgcacuuu

SEQ ID NO: 10043 - RNA, 32 nt, Homo Sapiens
gcaugauucuagugugcagucaauguugagga

SEQ ID NO: 10044 - RNA, 32 nt, Homo Sapiens
ccaaacuggauaaguaccacagucuaaaugag

SEQ ID NO: 10045 - RNA, 32 nt, Homo Sapiens
aaggauacuauugccagagcucugcccuuucu

SEQ ID NO: 10046 - RNA, 32 nt, Homo Sapiens
gucauuaaauucuaguuguuuccacuauucca

SEQ ID NO: 10047 - RNA, 32 nt, Homo Sapiens
caugacaugcugucuguaagcccuuugucuug

SEQ ID NO: 10048 - RNA, 32 nt, Homo Sapiens
uucauguucaacaggaaagacaaaguguacgu

SEQ ID NO: 10049 - RNA, 32 nt, Homo Sapiens
gacggcugcagagcgagcugcccucggaggcc

SEQ ID NO: 10050 - RNA, 30 nt, Homo Sapiens
acuuuaugucucaccacccccacucacuuc

SEQ ID NO: 10051 - RNA, 32 nt, Homo Sapiens
ccagagcagaaaagcugaaaauucuaaacauc

SEQ ID NO: 10052 - RNA, 32 nt, Homo Sapiens
ugugcaaguuuaucuuccuguccagucugcua

SEQ ID NO: 10053 - RNA, 32 nt, Homo Sapiens
uuaaugggccggucggggagggggaggcggga

SEQ ID NO: 10054 - RNA, 32 nt, Homo Sapiens
gugagcugagaucgucccacugcacuccagcc

SEQ ID NO: 10055 - RNA, 32 nt, Homo Sapiens
caccacugcauuccagccugggugacagagug

SEQ ID NO: 10056 - RNA, 32 nt, Homo Sapiens
aacucgugaacagccgugccugccuugggcgc

SEQ ID NO: 10057 - RNA, 32 nt, Homo Sapiens
cccgaagcucugagggcuucccggcccccacu

SEQ ID NO: 10058 - RNA, 32 nt, Homo Sapiens
uguugaaagggagaggcagaguuccagauaga

SEQ ID NO: 10059 - RNA, 32 nt, Homo Sapiens
auaauuuuacugaguuuaacuucacagaauua

SEQ ID NO: 10060 - RNA, 32 nt, Homo Sapiens
cucuacaaaaauacaaaaauuaauugggcgug

SEQ ID NO: 10061 - RNA, 32 nt, Homo Sapiens
ucacccugcccgcucccaaccccccuccugcu

SEQ ID NO: 10062 - RNA, 32 nt, Homo Sapiens
cccuuaggcaaaucaagaaugauucagaaaag

SEQ ID NO: 10063 - RNA, 32 nt, Homo Sapiens
cucauuucuggugauuggcuuccgaguguuau

SEQ ID NO: 10064 - RNA, 32 nt, Homo Sapiens
gaggccagaaaagcugcccagugacacagcca

SEQ ID NO: 10065 - RNA, 32 nt, Homo Sapiens
aggaugcuauaaauaaagcuagaaauaaauau

SEQ ID NO: 10066 - RNA, 32 nt, Homo Sapiens
gcugauuuuuaaaauauguauaaucugaagug

SEQ ID NO: 10067 - RNA, 32 nt, Homo Sapiens
gaauuacucugcacuuuccaauaaacacuauu

SEQ ID NO: 10068 - RNA, 32 nt, Homo Sapiens
aggccuccaccuguaucuacacucugagggcc

SEQ ID NO: 10069 - RNA, 32 nt, Homo Sapiens
uggucauggagaagggugggauugggugggaa

SEQ ID NO: 10070 - RNA, 32 nt, Homo Sapiens
accacaaaacugcagcaucaccaagucaugau

SEQ ID NO: 10071 - RNA, 32 nt, Homo Sapiens
gccccgcugguguucgcccaccccgggccgcg

SEQ ID NO: 10072 - RNA, 32 nt, Homo Sapiens
cuagaaacagagcuaucuguuccucauagugc

SEQ ID NO: 10073 - RNA, 32 nt, Homo Sapiens
ggcaauuguuucuuaggccuagcagauguuug

SEQ ID NO: 10074 - RNA, 32 nt, Homo Sapiens
uguagguauaaaccucuguaugaagagaagau

SEQ ID NO: 10075 - RNA, 32 nt, Homo Sapiens
ucaucuggaaaacauuaucuuaauuccgucuc

SEQ ID NO: 10076 - RNA, 32 nt, Homo Sapiens
uggacuugauacuuucuucagauccucuuugu

SEQ ID NO: 10077 - RNA, 32 nt, Homo Sapiens
uuuccauagauagcuuuuuuuguuuguuucca

SEQ ID NO: 10078 - RNA, 32 nt, Homo Sapiens
agucggccgggcugcugcugcugcugcuccag

SEQ ID NO: 10079 - RNA, 32 nt, Homo Sapiens
cucuugaaggcacacacauacacauauuuuca

SEQ ID NO: 10080 - RNA, 32 nt, Homo Sapiens
cuuguaauuuaaaaguaaaguguuuccaugcu

SEQ ID NO: 10081 - RNA, 32 nt, Homo Sapiens
accaggggacgccggacgcccucuggacaauc

SEQ ID NO: 10082 - RNA, 32 nt, Homo Sapiens
ugaguuaaacgucucuuccugugcaguuucau

SEQ ID NO: 10083 - RNA, 32 nt, Homo Sapiens
gccucuuugaucuuguauucagaagguaugag

SEQ ID NO: 10084 - RNA, 32 nt, Homo Sapiens
cugggucgccgggaccacccugagccggcccc

SEQ ID NO: 10085 - RNA, 32 nt, Homo Sapiens
uaaaauuagaauuuauuuuaagguuuuuauua

SEQ ID NO: 10086 - RNA, 32 nt, Homo Sapiens
gcaacucugucucaaaaacaaacaaacaaaca

SEQ ID NO: 10087 - RNA, 32 nt, Homo Sapiens
cgucugaaaaauaaaauauucaucauuuuuac

SEQ ID NO: 10088 - RNA, 32 nt, Homo Sapiens
gccucgagacgggugcugucguggugauggag

SEQ ID NO: 10089 - RNA, 32 nt, Homo Sapiens
cgccacugccacccggccccgugcgcucauug

SEQ ID NO: 10090 - RNA, 32 nt, Homo Sapiens
guccucuccuuccccugaccagcccagcaucc

SEQ ID NO: 10091 - RNA, 32 nt, Homo Sapiens
cuuuggcugugacugcuuuaucacagggagug

SEQ ID NO: 10092 - RNA, 32 nt, Homo Sapiens
gaccagugcagggcugucuuacgacacuuaga

SEQ ID NO: 10093 - RNA, 32 nt, Homo Sapiens
gcucccugugugccggccguccagggucacca

SEQ ID NO: 10094 - RNA, 32 nt, Homo Sapiens
uucuauuuuuaaaaaauguaucucuuuagccu

SEQ ID NO: 10095 - RNA, 32 nt, Homo Sapiens
gcaaagauucagauccaaaauaauuucauacc

SEQ ID NO: 10096 - RNA, 31 nt, Homo Sapiens
auuguauauaaaaguaauaaaguacaaauga

SEQ ID NO: 10097 - RNA, 32 nt, Homo Sapiens
auccucccagcaugcucuagagaggcggcucu

SEQ ID NO: 10098 - RNA, 32 nt, Homo Sapiens
auccuauguuuuguaauuuucauuuuaggagc

SEQ ID NO: 10099 - RNA, 32 nt, Homo Sapiens
ggugaaaguagcaggaacaacaacaaaagcca

SEQ ID NO: 10100 - RNA, 32 nt, Homo Sapiens
agguuauuucagugucccagucaaauuccuau

SEQ ID NO: 10101 - RNA, 32 nt, Homo Sapiens
ccagugaaaguguuuggacaaaaacuacauga

SEQ ID NO: 10102 - RNA, 32 nt, Homo Sapiens
uggauugcaccaaggaagcuuuuggggaggaa

SEQ ID NO: 10103 - RNA, 32 nt, Homo Sapiens
cugccuguuaugaaucuacagagcagcaauua

SEQ ID NO: 10104 - RNA, 32 nt, Homo Sapiens
cuaauagggaucuggagguagaaucaagacga

SEQ ID NO: 10105 - RNA, 32 nt, Homo Sapiens
acugucuuaaaaaauaaacauaaaauaaauaa

SEQ ID NO: 10106 - RNA, 32 nt, Homo Sapiens
gucuuacagucgccauccuccaggcguguggu

SEQ ID NO: 10107 - RNA, 32 nt, Homo Sapiens
uuuucaguagggcuacaaaaccugauguuaaa

SEQ ID NO: 10108 - RNA, 27 nt, Homo Sapiens
uguauggguuucuucagcccuuuuucu

SEQ ID NO: 10109 - RNA, 32 nt, Homo Sapiens
cagcacacuccagcucugccacugggccggcu

SEQ ID NO: 10110 - RNA, 32 nt, Homo Sapiens
cgcauuuugugcuugaauuacgugccccacac

SEQ ID NO: 10111 - RNA, 26 nt, Homo Sapiens
aauaaacuguauucauuuugcauagc

SEQ ID NO: 10112 - RNA, 32 nt, Homo Sapiens
aacacauauauaugucuguaucuuauauucaa

SEQ ID NO: 10113 - RNA, 32 nt, Homo Sapiens
ccgccgccagcaugccgugggacgcgcggcgg

SEQ ID NO: 10114 - RNA, 32 nt, Homo Sapiens
guaaaggggcagcugacaguuuguggcaucuu

SEQ ID NO: 10115 - RNA, 32 nt, Homo Sapiens
guuuggggggacaucccgccucaggcauccuu

SEQ ID NO: 10116 - RNA, 31 nt, Homo Sapiens
cagguucugugaacucucaggccuuggccag

SEQ ID NO: 10117 - RNA, 32 nt, Homo Sapiens
ccucauagaaagugaaugggagcuacggacac

SEQ ID NO: 10118 - RNA, 32 nt, Homo Sapiens
ucccaggcagugcccacgcucugggaggcaac

SEQ ID NO: 10119 - RNA, 32 nt, Homo Sapiens
uccgagccaggacaggcauguuguugggacug

SEQ ID NO: 10120 - RNA, 32 nt, Homo Sapiens
cauacuuauuacucaauaacccaagaaacaau

SEQ ID NO: 10121 - RNA, 32 nt, Homo Sapiens
agaugccacguuuuggguggguuuggccgguc

SEQ ID NO: 10122 - RNA, 32 nt, Homo Sapiens
gcaggugagaggaggaaggaagcggcggcgcg

SEQ ID NO: 10123 - RNA, 32 nt, Homo Sapiens
auguagccauuuaaaaaguaacauguuuuucu

SEQ ID NO: 10124 - RNA, 32 nt, Homo Sapiens
acuguagaaaaauaaagagaugcuuguucuga

SEQ ID NO: 10125 - RNA, 32 nt, Homo Sapiens
ggcucucuggucuaccugagaucuauauggag

SEQ ID NO: 10126 - RNA, 32 nt, Homo Sapiens
gaaauauggaggggugugugucugcaaucaag

SEQ ID NO: 10127 - RNA, 32 nt, Homo Sapiens
uuuuauaaugaaauaacugcaacuagagaaaa

SEQ ID NO: 10128 - RNA, 32 nt, Homo Sapiens
uaauaugaaaucuauuugcaaauuaugggggg

SEQ ID NO: 10129 - RNA, 32 nt, Homo Sapiens
auucugguuuuagagcccacuguguuuaaccu

SEQ ID NO: 10130 - RNA, 32 nt, Homo Sapiens
gcccugcaguucuccuugacugauucagcccu

SEQ ID NO: 10131 - RNA, 32 nt, Homo Sapiens
guggcuguuuugcaggaggagcuccuaaaaaa

SEQ ID NO: 10132 - RNA, 31 nt, Homo Sapiens
gucccggggcagcaccugccccgccuugcgg

SEQ ID NO: 10133 - RNA, 32 nt, Homo Sapiens
caucacccagcaccccagaucaccgccaggcc

SEQ ID NO: 10134 - RNA, 32 nt, Homo Sapiens
gcagaaggaaauguguuuuuuguuguucauuu

SEQ ID NO: 10135 - RNA, 32 nt, Homo Sapiens
cuuucauuuguacaucccuuugaaaaaauaua

SEQ ID NO: 10136 - RNA, 32 nt, Homo Sapiens
cgugcgggcugguggcucuguggcagcggcgg

SEQ ID NO: 10137 - RNA, 32 nt, Homo Sapiens
ugcaccugggagcgcugcuuggcucuaucucu

SEQ ID NO: 10138 - RNA, 29 nt, Homo Sapiens
caguuauugaagauuaggaucaaggauag

SEQ ID NO: 10139 - RNA, 32 nt, Homo Sapiens
ugacacagaauagguugaaaucuuaacugggg

SEQ ID NO: 10140 - RNA, 32 nt, Homo Sapiens
uugacaaaauaaauuuacuaaacuuggccuaa

SEQ ID NO: 10141 - RNA, 32 nt, Homo Sapiens
acacagccugagggcccuccccagcccagacu

SEQ ID NO: 10142 - RNA, 32 nt, Homo Sapiens
ucucccuccaacuccccauaccucugucucuc

SEQ ID NO: 10143 - RNA, 32 nt, Homo Sapiens
auauuuguaaaauuauauuuaauggaauucuu

SEQ ID NO: 10144 - RNA, 32 nt, Homo Sapiens
agugcugguguggccaccuacccagguguccc

SEQ ID NO: 10145 - RNA, 32 nt, Homo Sapiens
uucuaaaccuuucuuaagaaaaucgaauuucc

SEQ ID NO: 10146 - RNA, 32 nt, Homo Sapiens
aaccagcacuuggccaaaaacaaaauuguaaa

SEQ ID NO: 10147 - RNA, 32 nt, Homo Sapiens
auguuguuaauaugcauagaacgagagauuug

SEQ ID NO: 10148 - RNA, 32 nt, Homo Sapiens
gcggcugcgacggcgagacugagauccuggug

SEQ ID NO: 10149 - RNA, 32 nt, Homo Sapiens
gaccuacugucaagguauugcaguacuuaugu

SEQ ID NO: 10150 - RNA, 32 nt, Homo Sapiens
cggcgcguccugcugaccccagccggcgccga

SEQ ID NO: 10151 - RNA, 32 nt, Homo Sapiens
gcccgcuuccggacccgcuccggcgccgcuuc

SEQ ID NO: 10152 - RNA, 32 nt, Homo Sapiens
uguuguguccugagacacgcggugcggacccu

SEQ ID NO: 10153 - RNA, 32 nt, Homo Sapiens
agcaggauuuuugaauaauccuagggcagacu

SEQ ID NO: 10154 - RNA, 32 nt, Homo Sapiens
ccagugaccaugaaggcugugcugcuugcccu

SEQ ID NO: 10155 - RNA, 32 nt, Homo Sapiens
ugauggagaugaauuacuacacaguccuguuu

SEQ ID NO: 10156 - RNA, 32 nt, Homo Sapiens
acccagcuguuguuuacccuccaggacagcaa

SEQ ID NO: 10157 - RNA, 32 nt, Homo Sapiens
ccucuguuuuccuugcucuauacagcagcaca

SEQ ID NO: 10158 - RNA, 32 nt, Homo Sapiens
cacaugucuuuugagaggcaucuucaccucuu

SEQ ID NO: 10159 - RNA, 32 nt, Homo Sapiens
acagcuagaaaacacaaaaucuuguaggucau

SEQ ID NO: 10160 - RNA, 32 nt, Homo Sapiens
ucuaccaaagcuguaguaaacacacacauuuu

SEQ ID NO: 10161 - RNA, 32 nt, Homo Sapiens
caguguuuucuuuucuaaaacaucaaaaugcc

SEQ ID NO: 10162 - RNA, 32 nt, Homo Sapiens
ggccagcacaguaccuggggaccuccacgggg

SEQ ID NO: 10163 - RNA, 32 nt, Homo Sapiens
uggaugaugcaugcuggcguuuucuaaaguuu

SEQ ID NO: 10164 - RNA, 32 nt, Homo Sapiens
agagcagaagucgaaugagguccuguauggaa

SEQ ID NO: 10165 - RNA, 29 nt, Homo Sapiens
uuuauuguagugauguuuuuauaaaagca

SEQ ID NO: 10166 - RNA, 32 nt, Homo Sapiens
gcuugcucuuucgguccgcaccaccguuaaga

SEQ ID NO: 10167 - RNA, 32 nt, Homo Sapiens
ccuuaggaagcaggagaggcaacaccucuggc

SEQ ID NO: 10168 - RNA, 32 nt, Homo Sapiens
cuaggggaaggggguuguuugccuucuucagg

SEQ ID NO: 10169 - RNA, 32 nt, Homo Sapiens
ccugacuuuuuaaugaucaccauucuaacugg

SEQ ID NO: 10170 - RNA, 32 nt, Homo Sapiens
guaguggggcuggagcagagccugccgcgaac

SEQ ID NO: 10171 - RNA, 32 nt, Homo Sapiens
aucgccuucgcgccuggcuggcgggggcgcug

SEQ ID NO: 10172 - RNA, 32 nt, Homo Sapiens
guuauccuguguuaggucacuccggagagggg

SEQ ID NO: 10173 - RNA, 32 nt, Homo Sapiens
ucuguguuuuccucuuuuuugguccacuuugc

SEQ ID NO: 10174 - RNA, 32 nt, Homo Sapiens
caucuaaaucaucuuaggguggcucagcgagg

SEQ ID NO: 10175 - RNA, 32 nt, Homo Sapiens
guuuuguaucgguauuugauuuuuagugggca

SEQ ID NO: 10176 - RNA, 32 nt, Homo Sapiens
augcugaggagcaguccaucccugcccgagca

SEQ ID NO: 10177 - RNA, 32 nt, Homo Sapiens
uggaccuccuuccccgucuccagcugggacug

SEQ ID NO: 10178 - RNA, 32 nt, Homo Sapiens
aaauaauacuauucaaaauggaggaggagaug

SEQ ID NO: 10179 - RNA, 32 nt, Homo Sapiens
gaaaauguuuuaaaauguaagaauuccauuua

SEQ ID NO: 10180 - RNA, 32 nt, Homo Sapiens
gcuuuaucagaauuaaaugugagauuucuucu

SEQ ID NO: 10181 - RNA, 32 nt, Homo Sapiens
uaaaucacaaaguauguuaaaggucacaaaag

SEQ ID NO: 10182 - RNA, 32 nt, Homo Sapiens
ugccgggcgggcccgagcgggugucgagccgg

SEQ ID NO: 10183 - RNA, 30 nt, Homo Sapiens
aggccaugggcgcgcgcggggcgcugcugc

SEQ ID NO: 10184 - RNA, 32 nt, Homo Sapiens
cugcccaggugugagcacgugcucucgcuccc

SEQ ID NO: 10185 - RNA, 32 nt, Homo Sapiens
caaaggaugguuucuugaaauaauuuguauug

SEQ ID NO: 10186 - RNA, 32 nt, Homo Sapiens
cuuguacuugaauaauaaccacgauuccaacc

SEQ ID NO: 10187 - RNA, 32 nt, Homo Sapiens
uggauuugacuucuguucuguuucuuaauaag

SEQ ID NO: 10188 - RNA, 27 nt, Homo Sapiens
ugccaacauucagucugguaugugagg

SEQ ID NO: 10189 - RNA, 32 nt, Homo Sapiens
ugauuaugcuuaacagcuguuuccuguuucuc

SEQ ID NO: 10190 - RNA, 32 nt, Homo Sapiens
cuuucagggcaggcagcugugcauguucucuc

SEQ ID NO: 10191 - RNA, 32 nt, Homo Sapiens
gugcugagcccugcccugggccccacggacag

SEQ ID NO: 10192 - RNA, 32 nt, Homo Sapiens
ccuuaaauaaaacacaccucucugcuguggga

SEQ ID NO: 10193 - RNA, 32 nt, Homo Sapiens
uggcaggcgggcgggcggccgcagccauggag

SEQ ID NO: 10194 - RNA, 32 nt, Homo Sapiens
uuugauuuauuuuuccucucccaaccauaaga

SEQ ID NO: 10195 - RNA, 32 nt, Homo Sapiens
cuuucagaccucacuagcacaagcccgguugc

SEQ ID NO: 10196 - RNA, 32 nt, Homo Sapiens
uguguuuugagcagcaauguguaaccaggugu

SEQ ID NO: 10197 - RNA, 32 nt, Homo Sapiens
cugggauuggaucagcagaaauccaacccucu

SEQ ID NO: 10198 - RNA, 32 nt, Homo Sapiens
cuacguggagggccuggaugaugaggaggagg

SEQ ID NO: 10199 - RNA, 32 nt, Homo Sapiens
uaucaguugcuccucaggaaucuucugguaca

SEQ ID NO: 10200 - RNA, 32 nt, Homo Sapiens
cacugaauggguaggagcaaccacugaauggu

SEQ ID NO: 10201 - RNA, 32 nt, Homo Sapiens
caaguuacaccugugcagcuugggucugaguu

SEQ ID NO: 10202 - RNA, 32 nt, Homo Sapiens
gccucugcccgcuccccgggcgcggagccgcg

SEQ ID NO: 10203 - RNA, 32 nt, Homo Sapiens
caaacucugcaacugcacaaaguugcaggcuu

SEQ ID NO: 10204 - RNA, 32 nt, Homo Sapiens
ugucugucacacucacaccugacgggaugguu

SEQ ID NO: 10205 - RNA, 32 nt, Homo Sapiens
cacgcccacugacuggcaucugccggcuuugu

SEQ ID NO: 10206 - RNA, 32 nt, Homo Sapiens
uguggcccugaacacugagcucacauugucaa

SEQ ID NO: 10207 - RNA, 32 nt, Homo Sapiens
guacccacagaaaggcaggcggaaaaacaagu

SEQ ID NO: 10208 - RNA, 32 nt, Homo Sapiens
agcagacucccucucucccuuucuggugucuu

SEQ ID NO: 10209 - RNA, 32 nt, Homo Sapiens
uucugucccugucacacccccaaccccaggga

SEQ ID NO: 10210 - RNA, 32 nt, Homo Sapiens
cccucccucagcuccggugcgcggcggccgac

SEQ ID NO: 10211 - RNA, 32 nt, Homo Sapiens
uguauguccgcgcgugcguguccgcgcaugca

SEQ ID NO: 10212 - RNA, 32 nt, Homo Sapiens
caguccagcucguuuccagcaccaugucggug

SEQ ID NO: 10213 - RNA, 32 nt, Homo Sapiens
gaggcuccaucccagcacacaggccuggggcu

SEQ ID NO: 10214 - RNA, 29 nt, Homo Sapiens
cucgauguuccagcugcccaucuugaauu

SEQ ID NO: 10215 - RNA, 32 nt, Homo Sapiens
agaaguucuucugugcucuccucuggcucccc

SEQ ID NO: 10216 - RNA, 32 nt, Homo Sapiens
acucccgggacgugugcugacgcguugcuccu

SEQ ID NO: 10217 - RNA, 32 nt, Homo Sapiens
cauugccagugguguccaagggcccccguugg

SEQ ID NO: 10218 - RNA, 32 nt, Homo Sapiens
uaucguaggacucaguggggacuugcaugcac

SEQ ID NO: 10219 - RNA, 32 nt, Homo Sapiens
agacuggaagcaggugaggcacacagaggggg

SEQ ID NO: 10220 - RNA, 32 nt, Homo Sapiens
uggcagauauucucuguuguuguuguuuuaga

SEQ ID NO: 10221 - RNA, 28 nt, Homo Sapiens
caaaguaaagauuaagugaugaggaggu

SEQ ID NO: 10222 - RNA, 32 nt, Homo Sapiens
uuguugcuucugguaucuggggugucccaccg

SEQ ID NO: 10223 - RNA, 32 nt, Homo Sapiens
gacgacccugaaagauucagccucuucauccu

SEQ ID NO: 10224 - RNA, 32 nt, Homo Sapiens
ccccuuaaccccucagucuccuccccaucacc

SEQ ID NO: 10225 - RNA, 32 nt, Homo Sapiens
aaaacucuucccuccccacccgcucuucccau

SEQ ID NO: 10226 - RNA, 28 nt, Homo Sapiens
agcuuguggagaauaaaucugguuuaau

SEQ ID NO: 10227 - RNA, 32 nt, Homo Sapiens
ggagugagggauggaaaaggggauaaaaggcc

SEQ ID NO: 10228 - RNA, 32 nt, Homo Sapiens
ugggauuuggggggcgcuggugggcaccccug

SEQ ID NO: 10229 - RNA, 32 nt, Homo Sapiens
accuuagcugucuauggaccaugcagugauuc

SEQ ID NO: 10230 - RNA, 32 nt, Homo Sapiens
cuccccgccugacccggcccagcccgcugcgg

SEQ ID NO: 10231 - RNA, 32 nt, Homo Sapiens
caucuacgacccgcccuggaggcacggaaggc

SEQ ID NO: 10232 - RNA, 32 nt, Homo Sapiens
cgagucuugaacuuuggugccaucaucugcaa

SEQ ID NO: 10233 - RNA, 32 nt, Homo Sapiens
cuuuaagccaaguuuaaaacauuauaauaaaa

SEQ ID NO: 10234 - RNA, 32 nt, Homo Sapiens
accaucugcaaccaucuuucuguuugucgucu

SEQ ID NO: 10235 - RNA, 32 nt, Homo Sapiens
ccaccagacugucccggcaccuacagagaaug

SEQ ID NO: 10236 - RNA, 32 nt, Homo Sapiens
ggucucugcuggaagagacugggagagugggg

SEQ ID NO: 10237 - RNA, 32 nt, Homo Sapiens
auuuuuuacugauugugugcucuguguaguca

SEQ ID NO: 10238 - RNA, 32 nt, Homo Sapiens
ggacaggacagagggaggucauuguuacacac

SEQ ID NO: 10239 - RNA, 32 nt, Homo Sapiens
ccgcuccuucagcuccuccagcucccguucua

SEQ ID NO: 10240 - RNA, 32 nt, Homo Sapiens
aaauaaucuguacaacaaaaccccgugacacg

SEQ ID NO: 10241 - RNA, 32 nt, Homo Sapiens
agcgacaccuacccuaggggaccuccggaggg

SEQ ID NO: 10242 - RNA, 32 nt, Homo Sapiens
ucaucugcuccuuuccuccccugccucaucag

SEQ ID NO: 10243 - RNA, 32 nt, Homo Sapiens
aguucucuguggugaugaccgcucuccccugc

SEQ ID NO: 10244 - RNA, 32 nt, Homo Sapiens
gagcuagagccgcucccugcccugcccggagc

SEQ ID NO: 10245 - RNA, 32 nt, Homo Sapiens
auauacuuaagaauacacaggauauuuugggg

SEQ ID NO: 10246 - RNA, 32 nt, Homo Sapiens
gccugugugaagucacuuuugcuggaaaacug

SEQ ID NO: 10247 - RNA, 32 nt, Homo Sapiens
uaucuuguaaaaacacuuuuuugguuuaauau

SEQ ID NO: 10248 - RNA, 28 nt, Homo Sapiens
cggcggcggcggccgccagaaguagcag

SEQ ID NO: 10249 - RNA, 32 nt, Homo Sapiens
uuauguacuguuuuuggucagaauagauaacc

SEQ ID NO: 10250 - RNA, 32 nt, Homo Sapiens
ccugggccgggcugguucucuccgggccaccu

SEQ ID NO: 10251 - RNA, 32 nt, Homo Sapiens
uuggaguugcuguagacugaacuguagcuugu

SEQ ID NO: 10252 - RNA, 32 nt, Homo Sapiens
ucugcccagggcuccaggaucagggauauuac

SEQ ID NO: 10253 - RNA, 32 nt, Homo Sapiens
ugugguauuugacaagauuuuagcucaaagcc

SEQ ID NO: 10254 - RNA, 32 nt, Homo Sapiens
cuccgaagcuccccggcuguggcccuucugug

SEQ ID NO: 10255 - RNA, 32 nt, Homo Sapiens
uuacaaauauauuuauuuuguauagcuucuuc

SEQ ID NO: 10256 - RNA, 32 nt, Homo Sapiens
agcugugagcaaacagaggaggccagccucac

SEQ ID NO: 10257 - RNA, 32 nt, Homo Sapiens
uucucuuccagaaucuucucuuuccaguuuuc

SEQ ID NO: 10258 - RNA, 32 nt, Homo Sapiens
augauuauguucucuguaaaacucuucaagac

SEQ ID NO: 10259 - RNA, 32 nt, Homo Sapiens
ucagacuggauggagggugaaguaaaauagua

SEQ ID NO: 10260 - RNA, 32 nt, Homo Sapiens
auauuuacauauauaucaagugugcuuagaaa

SEQ ID NO: 10261 - RNA, 32 nt, Homo Sapiens
cugcucaguguagccaaagauuccuugccuac

SEQ ID NO: 10262 - RNA, 32 nt, Homo Sapiens
ugagacaauggcaauccugacaccuuccucca

SEQ ID NO: 10263 - RNA, 32 nt, Homo Sapiens
cuucccccaagguuggcgcccgggagccgugc

SEQ ID NO: 10264 - RNA, 32 nt, Homo Sapiens
acuucagacaccagcuccccucuuucuagguc

SEQ ID NO: 10265 - RNA, 32 nt, Homo Sapiens
augaacuuuuuuucuucagcaauugguaaagu

SEQ ID NO: 10266 - RNA, 32 nt, Homo Sapiens
augugucuacacaacugucuacauagcaugac

SEQ ID NO: 10267 - RNA, 32 nt, Homo Sapiens
guuggaugucccucacugcagccuguccgugg

SEQ ID NO: 10268 - RNA, 32 nt, Homo Sapiens
cacccugaccucuaccuucucuaccuugugcu

SEQ ID NO: 10269 - RNA, 32 nt, Homo Sapiens
ggaucccagagcucagcgcgcuggaggacguc

SEQ ID NO: 10270 - RNA, 32 nt, Homo Sapiens
cgcgugcgcggcagagucacaauggcagccag

SEQ ID NO: 10271 - RNA, 29 nt, Homo Sapiens
cacacccauuugacagauggcaaaacuga

SEQ ID NO: 10272 - RNA, 32 nt, Homo Sapiens
uuaaaaacaaaguuagcuuuguaccaguaagu

SEQ ID NO: 10273 - RNA, 32 nt, Homo Sapiens
auacggacucuuaagucacaccuaccacugag

SEQ ID NO: 10274 - RNA, 32 nt, Homo Sapiens
ugacugagccgugguggggcggugggccgagg

SEQ ID NO: 10275 - RNA, 32 nt, Homo Sapiens
uggccgcgaugauggagauccagauggacgag

SEQ ID NO: 10276 - RNA, 32 nt, Homo Sapiens
uccccauucaggcugccuggaggaaggacggg

SEQ ID NO: 10277 - RNA, 32 nt, Homo Sapiens
ggagaggggaccggcggcggcggcaaugcugg

SEQ ID NO: 10278 - RNA, 32 nt, Homo Sapiens
ucccgccaaagauggagggaaugucaccgucu

SEQ ID NO: 10279 - RNA, 30 nt, Homo Sapiens
uugggauuuaauuggaccuauagaugaaua

SEQ ID NO: 10280 - RNA, 32 nt, Homo Sapiens
gaggccugcuccuggggcccgugggggcccug

SEQ ID NO: 10281 - RNA, 32 nt, Homo Sapiens
cagcagugauggcgaugcccuccaccucuuuc

SEQ ID NO: 10282 - RNA, 32 nt, Homo Sapiens
cauuuuuuaaggaaacaauauaaccacaaagc

SEQ ID NO: 10283 - RNA, 32 nt, Homo Sapiens
gcaagcuccgccuccucccggguucacgccau

SEQ ID NO: 10284 - RNA, 32 nt, Homo Sapiens
uugguuccggugcugaccccuaggccccagcg

SEQ ID NO: 10285 - RNA, 32 nt, Homo Sapiens
agaagaugaacuguauuuugcauuuugucuac

SEQ ID NO: 10286 - RNA, 32 nt, Homo Sapiens
aaaaauacugaauagacuugcuaaauggcaca

SEQ ID NO: 10287 - RNA, 32 nt, Homo Sapiens
aaucaaagcgaagagacgaucuguggauguug

SEQ ID NO: 10288 - RNA, 32 nt, Homo Sapiens
cuguugcuaggcaacagcgugcgagcucagau

SEQ ID NO: 10289 - RNA, 32 nt, Homo Sapiens
cguuuuucuuuuucuuuuuuuuuuuugagacg

SEQ ID NO: 10290 - RNA, 32 nt, Homo Sapiens
ggagggagaaaacugaugucuucuaugcaucc

SEQ ID NO: 10291 - RNA, 32 nt, Homo Sapiens
ugucauuucuuuuuuuuuuuuaauaaaaaggu

SEQ ID NO: 10292 - RNA, 30 nt, Homo Sapiens
aaguggcccaccccuuucucugggacagug

SEQ ID NO: 10293 - RNA, 32 nt, Homo Sapiens
uccguggccauggcaacguccagggcccagaa

SEQ ID NO: 10294 - RNA, 32 nt, Homo Sapiens
cccuucuccgugggaaccccaggccucuugcc

SEQ ID NO: 10295 - RNA, 32 nt, Homo Sapiens
uccagccugcuugcaacccugggguccucuug

SEQ ID NO: 10296 - RNA, 32 nt, Homo Sapiens
agaugcccacaccacacccuggggccacccau

SEQ ID NO: 10297 - RNA, 32 nt, Homo Sapiens
guauaagucuuagauguauauauuuccuauau

SEQ ID NO: 10298 - RNA, 32 nt, Homo Sapiens
ucuuauuuaaaaucagaauggaguuugccacg

SEQ ID NO: 10299 - RNA, 32 nt, Homo Sapiens
ugggcaguuucugcacguagcgcgaggccggg

SEQ ID NO: 10300 - RNA, 32 nt, Homo Sapiens
gaugucccucaccuggcagccaucugcuuuac

SEQ ID NO: 10301 - RNA, 32 nt, Homo Sapiens
gcgauugauugcgcugguugccugcggcgucc

SEQ ID NO: 10302 - RNA, 32 nt, Homo Sapiens
gcaaacaacuuuaugaaaguguggucaucuug

SEQ ID NO: 10303 - RNA, 32 nt, Homo Sapiens
uaauuuaguacugcuuuuaucuaucaucuguc

SEQ ID NO: 10304 - RNA, 32 nt, Homo Sapiens
uggccuuccgcacuaagccaaaguguuugcuc

SEQ ID NO: 10305 - RNA, 32 nt, Homo Sapiens
cuaaaauagaaaguuuggaguauuuucuuaaa

SEQ ID NO: 10306 - RNA, 32 nt, Homo Sapiens
uucucuguuccacuuuccauacugucauuucc

SEQ ID NO: 10307 - RNA, 32 nt, Homo Sapiens
uggugugcagagccuggccugcucuugugggc

SEQ ID NO: 10308 - RNA, 32 nt, Homo Sapiens
agugggccaagcccagguaaauuccugcuggc

SEQ ID NO: 10309 - RNA, 32 nt, Homo Sapiens
caccaaguugccagggucgugcagaucaacaa

SEQ ID NO: 10310 - RNA, 32 nt, Homo Sapiens
gaggccucgcgaccgccgagccugcagccugc

SEQ ID NO: 10311 - RNA, 32 nt, Homo Sapiens
cagugcacagaguuaaggcauaaaaauguauc

SEQ ID NO: 10312 - RNA, 32 nt, Homo Sapiens
agccaggcucaaagauauaaacacgaggcugc

SEQ ID NO: 10313 - RNA, 31 nt, Homo Sapiens
uuuuuuaaauaaaaauacuauuaacuggacu

SEQ ID NO: 10314 - RNA, 32 nt, Homo Sapiens
gaggggagccgggccaggaacaauauguuagc

SEQ ID NO: 10315 - RNA, 32 nt, Homo Sapiens
ggugccuuccucggggguagggggacggccca

SEQ ID NO: 10316 - RNA, 32 nt, Homo Sapiens
gcacguccuccucccccacucccacuuccagg

SEQ ID NO: 10317 - RNA, 32 nt, Homo Sapiens
cacggggcgggaaggggaggggaagaagaguc

SEQ ID NO: 10318 - RNA, 32 nt, Homo Sapiens
gagccccccguccccgccccgggagcuaagag

SEQ ID NO: 10319 - RNA, 32 nt, Homo Sapiens
uauacagucuuuaugaauuucuuaauguucaa

SEQ ID NO: 10320 - RNA, 32 nt, Homo Sapiens
uggaagcccugcgguagcuagcacugaagacu

SEQ ID NO: 10321 - RNA, 32 nt, Homo Sapiens
uucccgcgcgcccucaccaaaaggacccuaca

SEQ ID NO: 10322 - RNA, 32 nt, Homo Sapiens
uaugugaaagggcuuuggaaauaaucacgcac

SEQ ID NO: 10323 - RNA, 32 nt, Homo Sapiens
cagucaguucccucuauuuucacccauuuugc

SEQ ID NO: 10324 - RNA, 32 nt, Homo Sapiens
cccaggaaaagaaucucugugcucuaaaucuc

SEQ ID NO: 10325 - RNA, 32 nt, Homo Sapiens
cucugauauuccaugaauguaucaggaaauau

SEQ ID NO: 10326 - RNA, 32 nt, Homo Sapiens
gggagugcgccgggagcggagauauggaggga

SEQ ID NO: 10327 - RNA, 32 nt, Homo Sapiens
aagaacauuuuuccuuuucaggaaaacggagg

SEQ ID NO: 10328 - RNA, 32 nt, Homo Sapiens
caguaucuauuaugaacccacaauguguuuug

SEQ ID NO: 10329 - RNA, 32 nt, Homo Sapiens
ucagaguacaagcucucaucauaugcaaauuc

SEQ ID NO: 10330 - RNA, 32 nt, Homo Sapiens
gguccaggucccagccccuccucccucagacc

SEQ ID NO: 10331 - RNA, 32 nt, Homo Sapiens
ggcgcauagugagcucacugcugcuggagccg

SEQ ID NO: 10332 - RNA, 32 nt, Homo Sapiens
agaaacggcagaacagaccaggcgcugugguu

SEQ ID NO: 10333 - RNA, 32 nt, Homo Sapiens
ucauuucccucacuccacggacagcuacagga

SEQ ID NO: 10334 - RNA, 32 nt, Homo Sapiens
guuggcugacuuccacaccuagcaucucauga

SEQ ID NO: 10335 - RNA, 32 nt, Homo Sapiens
gagcggccguccgaccccggggaacacccuca

SEQ ID NO: 10336 - RNA, 32 nt, Homo Sapiens
ggagcuuuagaacacaaggauguuagaaaugu

SEQ ID NO: 10337 - RNA, 32 nt, Homo Sapiens
ucuagaagaugaugaagacaugacaaaagaug

SEQ ID NO: 10338 - RNA, 32 nt, Homo Sapiens
uucauaauauauauuuguauauucaaauuucu

SEQ ID NO: 10339 - RNA, 32 nt, Homo Sapiens
acagggcuuuugcgcacagcugccggcuggcu

SEQ ID NO: 10340 - RNA, 32 nt, Homo Sapiens
auacagcagaagcucagcagauacuggacaac

SEQ ID NO: 10341 - RNA, 32 nt, Homo Sapiens
ugguccaaccucagucuggccccauagugacu

SEQ ID NO: 10342 - RNA, 32 nt, Homo Sapiens
gucccgcucccuccgcggcucauggcgacgac

SEQ ID NO: 10343 - RNA, 30 nt, Homo Sapiens
cuaacugccgguaggcgucugugugcgccg

SEQ ID NO: 10344 - RNA, 32 nt, Homo Sapiens
gugauuagcgugucaaccuuuaccacugaggc

SEQ ID NO: 10345 - RNA, 32 nt, Homo Sapiens
ucagugaaggcacaaccaacagcugcuccccg

SEQ ID NO: 10346 - RNA, 32 nt, Homo Sapiens
agacccaccuccccgccuggugccuuccaugg

SEQ ID NO: 10347 - RNA, 32 nt, Homo Sapiens
gccacaaaggcacaucaucuacccuguuauuu

SEQ ID NO: 10348 - RNA, 32 nt, Homo Sapiens
ugaugccaucuccauuuugggugaccuguuuc

SEQ ID NO: 10349 - RNA, 32 nt, Homo Sapiens
agccaagcugcagcugcagacucggcggcccu

SEQ ID NO: 10350 - RNA, 32 nt, Homo Sapiens
uccugacuuaggacuugggguuggguccaagg

SEQ ID NO: 10351 - RNA, 32 nt, Homo Sapiens
aucaaaccccacaaugcugaaaacagagauug

SEQ ID NO: 10352 - RNA, 32 nt, Homo Sapiens
gcucgaaugcccggcggccgaggcggcuagag

SEQ ID NO: 10353 - RNA, 32 nt, Homo Sapiens
ggagcaccgagacuccuggggcugugggcagg

SEQ ID NO: 10354 - RNA, 32 nt, Homo Sapiens
cccagccaauuuuuuguauuuucaguagagac

SEQ ID NO: 10355 - RNA, 32 nt, Homo Sapiens
ucccaguuacucuggaggcugaggcagaagaa

SEQ ID NO: 10356 - RNA, 32 nt, Homo Sapiens
gugacuuguggcaguguaccccggggccuccc

SEQ ID NO: 10357 - RNA, 32 nt, Homo Sapiens
ccaccccgacuucguaaguccuggagaacucc

SEQ ID NO: 10358 - RNA, 32 nt, Homo Sapiens
ggcugcagagggugggccuugggcuggccggg

SEQ ID NO: 10359 - RNA, 32 nt, Homo Sapiens
ucacaaaaacaaagaaucacaauguagaguaa

SEQ ID NO: 10360 - RNA, 32 nt, Homo Sapiens
ucuugaggaaacugaggcaaagaggagggcag

SEQ ID NO: 10361 - RNA, 32 nt, Homo Sapiens
caccuugcaccuucuucaggauuuuauaugug

SEQ ID NO: 10362 - RNA, 32 nt, Homo Sapiens
uaauaguggggccauuuucauuuuaucuuuuc

SEQ ID NO: 10363 - RNA, 32 nt, Homo Sapiens
uaccuauccuaagcuuaugaugaugaguuaug

SEQ ID NO: 10364 - RNA, 32 nt, Homo Sapiens
gccuggaacuccugggaucaagccuggaguuc

SEQ ID NO: 10365 - RNA, 32 nt, Homo Sapiens
cacuuccgcucgccgcgccaccggucccaccu

SEQ ID NO: 10366 - RNA, 32 nt, Homo Sapiens
cugccccugcccucccucuccuaucugaaccc

SEQ ID NO: 10367 - RNA, 32 nt, Homo Sapiens
cauccuugccuuugagguuuuauuuaacguuu

SEQ ID NO: 10368 - RNA, 32 nt, Homo Sapiens
uagggaacauaagaaaaauguauaauaaaaau

SEQ ID NO: 10369 - RNA, 32 nt, Homo Sapiens
gaacaauuaaagaaacaaaugacuuuuuggaa

SEQ ID NO: 10370 - RNA, 32 nt, Homo Sapiens
guucagucccucuccuucucaauaaaagcauc

SEQ ID NO: 10371 - RNA, 32 nt, Homo Sapiens
guggggcccacccauucccagaaggagcuucu

SEQ ID NO: 10372 - RNA, 27 nt, Homo Sapiens
gugugugucucucucagccccugccca

SEQ ID NO: 10373 - RNA, 32 nt, Homo Sapiens
cucggccacuccuggguuggagcccgauuuua

SEQ ID NO: 10374 - RNA, 32 nt, Homo Sapiens
uuaaaaaccagggacgggagggcgaguguuca

SEQ ID NO: 10375 - RNA, 32 nt, Homo Sapiens
cuggggcuccagcuuauggacuacccugcaga

SEQ ID NO: 10376 - RNA, 32 nt, Homo Sapiens
caaauguuuaaagcacaguaaauacaaauaua

SEQ ID NO: 10377 - RNA, 32 nt, Homo Sapiens
aaauacuugggguuguuuauauuaacaauuug

SEQ ID NO: 10378 - RNA, 32 nt, Homo Sapiens
ucaggcgaguuuugcccaggccugcugucuug

SEQ ID NO: 10379 - RNA, 32 nt, Homo Sapiens
uuguuucaguuaaacugggcugagagagcuug

SEQ ID NO: 10380 - RNA, 32 nt, Homo Sapiens
agaacccgaaacaaaaggagcugaaggcaggu

SEQ ID NO: 10381 - RNA, 32 nt, Homo Sapiens
cuuaugcuuucauacauaaauuauguaagaac

SEQ ID NO: 10382 - RNA, 32 nt, Homo Sapiens
caccaguuagacauaauuacuucuaccgaugu

SEQ ID NO: 10383 - RNA, 29 nt, Homo Sapiens
guguauguauguaugugauuaugguacua

SEQ ID NO: 10384 - RNA, 32 nt, Homo Sapiens
agggucucacccaaauuuauggggagaaaucu

SEQ ID NO: 10385 - RNA, 32 nt, Homo Sapiens
agggguguucacaggcuuucacagcaagggua

SEQ ID NO: 10386 - RNA, 32 nt, Homo Sapiens
aagaugcagacaccccagccccauuauuaaau

SEQ ID NO: 10387 - RNA, 32 nt, Homo Sapiens
gccaggacuacaggggugugccacuagaagug

SEQ ID NO: 10388 - RNA, 32 nt, Homo Sapiens
uaaaguugugccaaacuauaucaauaaauucc

SEQ ID NO: 10389 - RNA, 32 nt, Homo Sapiens
ucuagaggaaaggggcaucuggucucaggccc

SEQ ID NO: 10390 - RNA, 32 nt, Homo Sapiens
gauugugauguacagcucaggacuggucagac

SEQ ID NO: 10391 - RNA, 32 nt, Homo Sapiens
agaggggacaccuuugaugugggcgugcuggc

SEQ ID NO: 10392 - RNA, 32 nt, Homo Sapiens
cgucguggcgaagccgacucuccgggggaugc

SEQ ID NO: 10393 - RNA, 32 nt, Homo Sapiens
gguaguuuucuuuucccuccagaggcagccuu

SEQ ID NO: 10394 - RNA, 32 nt, Homo Sapiens
auauuucgggucgggggcaggugcuggagcac

SEQ ID NO: 10395 - RNA, 32 nt, Homo Sapiens
ggcucccuccccuaaccuuggugccugaucca

SEQ ID NO: 10396 - RNA, 32 nt, Homo Sapiens
gggucccgcacgaccuccucgggggcuccggg

SEQ ID NO: 10397 - RNA, 32 nt, Homo Sapiens
uuugcuuuugguuuccuuuccugugaaaaggu

SEQ ID NO: 10398 - RNA, 32 nt, Homo Sapiens
gacaugugcugcuaguuuauaaacuggcauug

SEQ ID NO: 10399 - RNA, 32 nt, Homo Sapiens
aguggggcuggagcagagccugccgcgaaccc

SEQ ID NO: 10400 - RNA, 32 nt, Homo Sapiens
uaggacucucccuguuuaggcugggaaaaaca

SEQ ID NO: 10401 - RNA, 32 nt, Homo Sapiens
ggccccagccagcagcucccacgcugccccua

SEQ ID NO: 10402 - RNA, 32 nt, Homo Sapiens
cgugggaggccagccaaggccggagcagugcc

SEQ ID NO: 10403 - RNA, 32 nt, Homo Sapiens
gacuuuguucaggcuguucucaucucaguauu

SEQ ID NO: 10404 - RNA, 32 nt, Homo Sapiens
cacagcuggacccugcuucacccucacccccu

SEQ ID NO: 10405 - RNA, 31 nt, Homo Sapiens
ugaggugggcggaugacuggaguccaggagu

SEQ ID NO: 10406 - RNA, 32 nt, Homo Sapiens
agaggcugagguagaagaaucucaugaaccca

SEQ ID NO: 10407 - RNA, 32 nt, Homo Sapiens
ugagcagcugcucugagacaagucuggugaag

SEQ ID NO: 10408 - RNA, 32 nt, Homo Sapiens
ucucauccaaaauaaauaccuuguugcaagau

SEQ ID NO: 10409 - RNA, 32 nt, Homo Sapiens
ggguaguaugugguagauuucuagaugguccc

SEQ ID NO: 10410 - RNA, 32 nt, Homo Sapiens
aggaaugugggaaaaccuaaaggugucccugu

SEQ ID NO: 10411 - RNA, 32 nt, Homo Sapiens
aggcgaaggaggagggagaaccccgugcaacg

SEQ ID NO: 10412 - RNA, 32 nt, Homo Sapiens
ggcaguggcaggcaccacuagcgagggcguuu

SEQ ID NO: 10413 - RNA, 32 nt, Homo Sapiens
ugccacuuuuccuguccguccuccuccccauu

SEQ ID NO: 10414 - RNA, 32 nt, Homo Sapiens
cgagccugcggcgccuuccccugcgggugggg

SEQ ID NO: 10415 - RNA, 32 nt, Homo Sapiens
aguugggcaaagggcucaacugacucccgagu

SEQ ID NO: 10416 - RNA, 32 nt, Homo Sapiens
gaagcgggugagaaacaaaacuucuuuccauu

SEQ ID NO: 10417 - RNA, 32 nt, Homo Sapiens
agcggcggguggcagcaggggacuccugacac

SEQ ID NO: 10418 - RNA, 32 nt, Homo Sapiens
ggaggucggaaagugggaagauaccgagauga

SEQ ID NO: 10419 - RNA, 32 nt, Homo Sapiens
ugugaaccauggugaagugcuuggaacauacu

SEQ ID NO: 10420 - RNA, 32 nt, Homo Sapiens
ccugaaucucugcugcugcugcugcugcugcu

SEQ ID NO: 10421 - RNA, 32 nt, Homo Sapiens
ugugcagcucuuucuccaggugggauguagca

SEQ ID NO: 10422 - RNA, 27 nt, Homo Sapiens
agaugucaguguuccguggagaggacu

SEQ ID NO: 10423 - RNA, 32 nt, Homo Sapiens
gcaggugcacaccaccacgcccagcuaauuuu

SEQ ID NO: 10424 - RNA, 32 nt, Homo Sapiens
aaacagcugccagcucgaaacgcacgggcagg

SEQ ID NO: 10425 - RNA, 32 nt, Homo Sapiens
acaauaccugggaaauaauaaaacagaagguu

SEQ ID NO: 10426 - RNA, 31 nt, Homo Sapiens
gcgccccaagccaguucaucucagaguccag

SEQ ID NO: 10427 - RNA, 32 nt, Homo Sapiens
uuacauuuaaguguucuugcuuucagcaacuc

SEQ ID NO: 10428 - RNA, 32 nt, Homo Sapiens
caaaggaauucaaugucaauuccuuuacgaga

SEQ ID NO: 10429 - RNA, 32 nt, Homo Sapiens
gcacugcugcgcaugcggucucagcgcccggc

SEQ ID NO: 10430 - RNA, 32 nt, Homo Sapiens
aauaacugugugaugccugaagaugugaagaa

SEQ ID NO: 10431 - RNA, 32 nt, Homo Sapiens
ugcgcugcgagccacccucuccccucccuccu

SEQ ID NO: 10432 - RNA, 32 nt, Homo Sapiens
cucugugucauugucuguucucuucauauagg

SEQ ID NO: 10433 - RNA, 32 nt, Homo Sapiens
cgcagcggagaugccucuuuuugccaccaauc

SEQ ID NO: 10434 - RNA, 32 nt, Homo Sapiens
cuuccaggugggugugggacaccugggagaag

SEQ ID NO: 10435 - RNA, 32 nt, Homo Sapiens
gacauuccaccauuuuaauuuuuguaacugcu

SEQ ID NO: 10436 - RNA, 32 nt, Homo Sapiens
accacugaacagaaauuucuccagggagccac

SEQ ID NO: 10437 - RNA, 32 nt, Homo Sapiens
aaauugcucccaugaaauuccaagcacuccuc

SEQ ID NO: 10438 - RNA, 32 nt, Homo Sapiens
caugugggcugggguggaaccacagagaggag

SEQ ID NO: 10439 - RNA, 32 nt, Homo Sapiens
guaaugauuuguuuuaugaaauuuagaacuug

SEQ ID NO: 10440 - RNA, 32 nt, Homo Sapiens
ccaaugauaaccuuauaagaggccaugucgaa

SEQ ID NO: 10441 - RNA, 32 nt, Homo Sapiens
ugcauucagaaagcaugcugugugggggcugc

SEQ ID NO: 10442 - RNA, 32 nt, Homo Sapiens
uggaauuuagggaagugaguagcugaucaaca

SEQ ID NO: 10443 - RNA, 31 nt, Homo Sapiens
agacucacguguagggccagagccuggcugg

SEQ ID NO: 10444 - RNA, 31 nt, Homo Sapiens
caaguuauggaauuccucagagcccugggcc

SEQ ID NO: 10445 - RNA, 32 nt, Homo Sapiens
cacugcggccacucagcagcuauguucccgcc

SEQ ID NO: 10446 - RNA, 32 nt, Homo Sapiens
ucagaaauuguaguaaugaaaauacauaauua

SEQ ID NO: 10447 - RNA, 32 nt, Homo Sapiens
cugcccccaaggucuacucccuccucacccca

SEQ ID NO: 10448 - RNA, 32 nt, Homo Sapiens
uaagaucccacucuuagcugguaaaugaauuu

SEQ ID NO: 10449 - RNA, 32 nt, Homo Sapiens
ccugugcauuguaggaucuuuagcaguacccu

SEQ ID NO: 10450 - RNA, 32 nt, Homo Sapiens
uguaucauuauguaucaccucaugcauauauu

SEQ ID NO: 10451 - RNA, 32 nt, Homo Sapiens
cagcccggccccaggggugcccugggcuccgc

SEQ ID NO: 10452 - RNA, 32 nt, Homo Sapiens
aaccucugaauguggaggcgccagaagcugcu

SEQ ID NO: 10453 - RNA, 32 nt, Homo Sapiens
cuuacgucuguuccucauccacauaaaaauga

SEQ ID NO: 10454 - RNA, 32 nt, Homo Sapiens
gcaagccucucugcaccugcguguccagccuc

SEQ ID NO: 10455 - RNA, 31 nt, Homo Sapiens
cugucgaguccccagaaccagcugcagaugg

SEQ ID NO: 10456 - RNA, 32 nt, Homo Sapiens
gcagcccgccccauggucuggcccuggguggc

SEQ ID NO: 10457 - RNA, 27 nt, Homo Sapiens
ugauccuuccacuucagccucccaagu

SEQ ID NO: 10458 - RNA, 32 nt, Homo Sapiens
gaauaaaauaaucaggaggcuggguuugugcu

SEQ ID NO: 10459 - RNA, 32 nt, Homo Sapiens
gcagagcagcgcugcuggccuggcagccagga

SEQ ID NO: 10460 - RNA, 32 nt, Homo Sapiens
uggccgcccagggcucuguccuugacccuguu

SEQ ID NO: 10461 - RNA, 32 nt, Homo Sapiens
uucuucaaauauuuuuucaccccccagucuug

SEQ ID NO: 10462 - RNA, 28 nt, Homo Sapiens
cgcugggggcggccuggggcugagcaug

SEQ ID NO: 10463 - RNA, 32 nt, Homo Sapiens
gaggggaaaaggaaaagaaagaugaagcuuug

SEQ ID NO: 10464 - RNA, 32 nt, Homo Sapiens
gcugaugucagcuucauguggauuuuaagcac

SEQ ID NO: 10465 - RNA, 32 nt, Homo Sapiens
aaaagugucaccaaacuguauucuucauggaa

SEQ ID NO: 10466 - RNA, 32 nt, Homo Sapiens
aucgcgcucugaucugguggcaucuggcugug

SEQ ID NO: 10467 - RNA, 32 nt, Homo Sapiens
ccguugccugacgcgaggcccagcucuacuuu

SEQ ID NO: 10468 - RNA, 32 nt, Homo Sapiens
ccacccgugagccccagggcuugggaagccug

SEQ ID NO: 10469 - RNA, 32 nt, Homo Sapiens
aaguccuuuccacacacaccugugagcuccug

SEQ ID NO: 10470 - RNA, 32 nt, Homo Sapiens
cuugggaacaacaugcuaaaugguauccaggg

SEQ ID NO: 10471 - RNA, 30 nt, Homo Sapiens
gggucagagaagcugcagguuugcagccag

SEQ ID NO: 10472 - RNA, 32 nt, Homo Sapiens
gagaagggguucuauaacugcuuuuguuuugu

SEQ ID NO: 10473 - RNA, 32 nt, Homo Sapiens
gcaaggcgcgaccggcggccaugcagccccgg

SEQ ID NO: 10474 - RNA, 32 nt, Homo Sapiens
acggggaagcagugcugcuuggaaaauagcaa

SEQ ID NO: 10475 - RNA, 32 nt, Homo Sapiens
acagacaaaacagauaaacaaacaagcccccu

SEQ ID NO: 10476 - RNA, 32 nt, Homo Sapiens
uauguauguacuuuagcauuaucauaaaguaa

SEQ ID NO: 10477 - RNA, 32 nt, Homo Sapiens
guccuuuuucuuucuuuuuaaaaauuagcaga

SEQ ID NO: 10478 - RNA, 32 nt, Homo Sapiens
ggaaagcccuguaccaggcagccucugcucca

SEQ ID NO: 10479 - RNA, 32 nt, Homo Sapiens
ggcugggggugggaaacuucauccacuucccu

SEQ ID NO: 10480 - RNA, 32 nt, Homo Sapiens
uuucugcuuucaaauccgcuguuuccugaggc

SEQ ID NO: 10481 - RNA, 32 nt, Homo Sapiens
caucauuaucccacaaugcaccccuuagcauu

SEQ ID NO: 10482 - RNA, 32 nt, Homo Sapiens
ccagaaaggugauuccaggaggagcuagccaa

SEQ ID NO: 10483 - RNA, 32 nt, Homo Sapiens
uucaugggucaucaaaauccagacauacaguc

SEQ ID NO: 10484 - RNA, 32 nt, Homo Sapiens
ugaggacuaacggggaaacauccuccgagaag

SEQ ID NO: 10485 - RNA, 32 nt, Homo Sapiens
gagacaggaacggcucugggggugggaagugg

SEQ ID NO: 10486 - RNA, 32 nt, Homo Sapiens
ugccgaacccgcgccuccccugggugaggagg

SEQ ID NO: 10487 - RNA, 30 nt, Homo Sapiens
ccgucaugucggcugcgauugcagcucugg

SEQ ID NO: 10488 - RNA, 32 nt, Homo Sapiens
uuguuuugaagaagguagcucuuguggaggac

SEQ ID NO: 10489 - RNA, 32 nt, Homo Sapiens
agaauuaugagacacaaugugauguuuaguua

SEQ ID NO: 10490 - RNA, 32 nt, Homo Sapiens
cccagcaccuggcccaggaugcaggcugcucu

SEQ ID NO: 10491 - RNA, 32 nt, Homo Sapiens
cgugguuaucccauuguggaaauucaucuuga

SEQ ID NO: 10492 - RNA, 32 nt, Homo Sapiens
ccuggcaaucccauguggacuucugguagaau

SEQ ID NO: 10493 - RNA, 32 nt, Homo Sapiens
aggaaucugcuuuggagggaaaugucuauuuu

SEQ ID NO: 10494 - RNA, 32 nt, Homo Sapiens
agcagcacuguaaagaugaagcuggcuaacug

SEQ ID NO: 10495 - RNA, 32 nt, Homo Sapiens
aggcaggagcagccgccauggccgagagcauc

SEQ ID NO: 10496 - RNA, 32 nt, Homo Sapiens
uccacggaauaguucugcccuguagcaucucc

SEQ ID NO: 10497 - RNA, 32 nt, Homo Sapiens
uucugucugcuuuuuucuuaugucucuuguug

SEQ ID NO: 10498 - RNA, 32 nt, Homo Sapiens
ggcauggguaaaacuuaugaaaauuuccucau

SEQ ID NO: 10499 - RNA, 32 nt, Homo Sapiens
uaugucacaaggucuuuuuuuuuaaagcacuu

SEQ ID NO: 10500 - RNA, 32 nt, Homo Sapiens
gcgcgggagccgggaccggguagccgcgcgcu

SEQ ID NO: 10501 - RNA, 32 nt, Homo Sapiens
aggucgccgcacccucgcggcggaugucucuu

SEQ ID NO: 10502 - RNA, 32 nt, Homo Sapiens
ggggagcaggacuugagcaggcacgcgggguc

SEQ ID NO: 10503 - RNA, 32 nt, Homo Sapiens
gcuucaacccucagccuugaaaaacaagucuu

SEQ ID NO: 10504 - RNA, 32 nt, Homo Sapiens
cgaugcccuccacgccgcucuuaagguaguac

SEQ ID NO: 10505 - RNA, 32 nt, Homo Sapiens
aaugucagucauuguuaguucuugucuaguuu

SEQ ID NO: 10506 - RNA, 32 nt, Homo Sapiens
auauggggcaacaggaggcauugaucgcgcug

SEQ ID NO: 10507 - RNA, 32 nt, Homo Sapiens
cauugcgcuccagccuaggugacagagcaaga

SEQ ID NO: 10508 - RNA, 32 nt, Homo Sapiens
cgguggcuggucuuuacugcagggcagcacug

SEQ ID NO: 10509 - RNA, 32 nt, Homo Sapiens
gauguuucgguucuuugaggccugcuggggaa

SEQ ID NO: 10510 - RNA, 32 nt, Homo Sapiens
uugggggugcgcgccgggagccugcagcggga

SEQ ID NO: 10511 - RNA, 32 nt, Homo Sapiens
uccgaaagcugcgccacuggagggauccggga

SEQ ID NO: 10512 - RNA, 32 nt, Homo Sapiens
uuuuuaaaguucucuuuuuaagaucacaguga

SEQ ID NO: 10513 - RNA, 32 nt, Homo Sapiens
agguagagaguggaaggaaugaaggggugggc

SEQ ID NO: 10514 - RNA, 32 nt, Homo Sapiens
ggaagcaagugcagacccccacccccggcccu

SEQ ID NO: 10515 - RNA, 32 nt, Homo Sapiens
gcaggccagggaacugggacugcccguggugu

SEQ ID NO: 10516 - RNA, 32 nt, Homo Sapiens
ucagcguggagggguaggggcugggaacagug

SEQ ID NO: 10517 - RNA, 32 nt, Homo Sapiens
ggggucccuggccgcugugugaccuugggcca

SEQ ID NO: 10518 - RNA, 32 nt, Homo Sapiens
gccaccgcgccgggcccaauagugauguuuuu

SEQ ID NO: 10519 - RNA, 32 nt, Homo Sapiens
gucccaagaagauaaaaaauauuguuaagugu

SEQ ID NO: 10520 - RNA, 32 nt, Homo Sapiens
auauacauaugugcuuuuuuucuauaucucac

SEQ ID NO: 10521 - RNA, 32 nt, Homo Sapiens
ccccggcccagcuggcgaacccugggccaucc

SEQ ID NO: 10522 - RNA, 32 nt, Homo Sapiens
gaccggcgccaaugcgcgcccggguucuuggg

SEQ ID NO: 10523 - RNA, 32 nt, Homo Sapiens
uucccuuguaucuauuuguggugaauguguuu

SEQ ID NO: 10524 - RNA, 32 nt, Homo Sapiens
uguuuuuuuuuuuuuucuuuuuauucuacuug

SEQ ID NO: 10525 - RNA, 32 nt, Homo Sapiens
cuguuccuggaaacaugaaugcccuucaugug

SEQ ID NO: 10526 - RNA, 32 nt, Homo Sapiens
caagugucacaugcgaucuacauuaauaucaa

SEQ ID NO: 10527 - RNA, 32 nt, Homo Sapiens
gcugcuggaaggagaaagaagagggugaggag

SEQ ID NO: 10528 - RNA, 30 nt, Homo Sapiens
cugugggcuaccgggccgccggcgccucag

SEQ ID NO: 10529 - RNA, 32 nt, Homo Sapiens
acaggaaggcugggagcagcuuuguuaaauug

SEQ ID NO: 10530 - RNA, 32 nt, Homo Sapiens
ucuaauucaggauacugucuauagaaaggcau

SEQ ID NO: 10531 - RNA, 32 nt, Homo Sapiens
agucaaaccaaccgagcccgugacggacuaua

SEQ ID NO: 10532 - RNA, 32 nt, Homo Sapiens
aaccuaaaccugugucccagguugcuaggaca

SEQ ID NO: 10533 - RNA, 32 nt, Homo Sapiens
uuuguucaguuuucuuuuuuuauuuguuuguu

SEQ ID NO: 10534 - RNA, 29 nt, Homo Sapiens
uuacuuucauaugaugaaaaugcuguguu

SEQ ID NO: 10535 - RNA, 32 nt, Homo Sapiens
cccaggauacauggagcagagaagcucgguuu

SEQ ID NO: 10536 - RNA, 32 nt, Homo Sapiens
ugcgguuaaaaaauauaaguaggauaacuugu

SEQ ID NO: 10537 - RNA, 32 nt, Homo Sapiens
ccgccagacaccuccccagaggccuuggaccu

SEQ ID NO: 10538 - RNA, 32 nt, Homo Sapiens
gccccuuuccuccuccuugaaaauacaucacu

SEQ ID NO: 10539 - RNA, 32 nt, Homo Sapiens
uccuggauuuccccacucgccucucacagccc

SEQ ID NO: 10540 - RNA, 32 nt, Homo Sapiens
gagaagcacuaauucuuagcugugauaggucu

SEQ ID NO: 10541 - RNA, 32 nt, Homo Sapiens
gcucugcccucccuggccucacgcccagccuc

SEQ ID NO: 10542 - RNA, 32 nt, Homo Sapiens
caaccacggcccagcccugccacaccccccgc

SEQ ID NO: 10543 - RNA, 32 nt, Homo Sapiens
uggaguuccuucccuuccagaguccuuauuga

SEQ ID NO: 10544 - RNA, 32 nt, Homo Sapiens
ccuugccuggaaagauaccgcggucccuccag

SEQ ID NO: 10545 - RNA, 32 nt, Homo Sapiens
guggucuacauauaauuuauuuucauuaguau

SEQ ID NO: 10546 - RNA, 32 nt, Homo Sapiens
auugagucuugcucuuguuucccaggcuggag

SEQ ID NO: 10547 - RNA, 32 nt, Homo Sapiens
cucccuccuugcgcccucuuggguggccagcg

SEQ ID NO: 10548 - RNA, 32 nt, Homo Sapiens
aacucggguugaaacuuuuggcuuucagggga

SEQ ID NO: 10549 - RNA, 32 nt, Homo Sapiens
ggaacccgcccggcucccggcagugucucuug

SEQ ID NO: 10550 - RNA, 32 nt, Homo Sapiens
ccagaaaagaauaauuacaauauuuucaaaau

SEQ ID NO: 10551 - RNA, 32 nt, Homo Sapiens
ugaaccccaccccuucuuacagauggggaccc

SEQ ID NO: 10552 - RNA, 32 nt, Homo Sapiens
ugaggugcuuugauuucuucugcagacucucg

SEQ ID NO: 10553 - RNA, 32 nt, Homo Sapiens
aaucaauauaaaauauuuaugaggucuccccc

SEQ ID NO: 10554 - RNA, 32 nt, Homo Sapiens
aggcccacccucuuuggaguccugcugucugg

SEQ ID NO: 10555 - RNA, 32 nt, Homo Sapiens
gaugaaaugaauugucucaacaaagcaauauu

SEQ ID NO: 10556 - RNA, 32 nt, Homo Sapiens
cauugcucugcuccuggcauagagucaccugu

SEQ ID NO: 10557 - RNA, 32 nt, Homo Sapiens
uaacgcugcugucuucccuguuugggacagcc

SEQ ID NO: 10558 - RNA, 32 nt, Homo Sapiens
ucucagcaauccaaaucagggaaauucaucua

SEQ ID NO: 10559 - RNA, 32 nt, Homo Sapiens
guccagccccauggggggcgcccuaggccucc

SEQ ID NO: 10560 - RNA, 32 nt, Homo Sapiens
uucauuauacuucugaccuuugggcuuucuuu

SEQ ID NO: 10561 - RNA, 32 nt, Homo Sapiens
ugaaaguguuccagcugaaauuucagaucgga

SEQ ID NO: 10562 - RNA, 32 nt, Homo Sapiens
caccgccgaggggagggugaggcggccggggg

SEQ ID NO: 10563 - RNA, 32 nt, Homo Sapiens
ucagaagagggagaggaggggcugggggugag

SEQ ID NO: 10564 - RNA, 32 nt, Homo Sapiens
guuuuucauaauuuguucuguuugucaguuca

SEQ ID NO: 10565 - RNA, 32 nt, Homo Sapiens
agucuggaaaauuugucaaauguaccgagcaa

SEQ ID NO: 10566 - RNA, 32 nt, Homo Sapiens
uuuggagagcagucuguuuucuguaugucuga

SEQ ID NO: 10567 - RNA, 32 nt, Homo Sapiens
acgcaugccgcucugccguccggagcacuuaa

SEQ ID NO: 10568 - RNA, 32 nt, Homo Sapiens
aauuaucuuguucuaguaaucaccuaaaauau

SEQ ID NO: 10569 - RNA, 32 nt, Homo Sapiens
ccaggaaaaaauuuaacaagaugaagaaacuc

SEQ ID NO: 10570 - RNA, 32 nt, Homo Sapiens
aaagaauuuggaauaaacuuugaaguuuugga

SEQ ID NO: 10571 - RNA, 27 nt, Homo Sapiens
ccauguccgacucgugggucccgaacu

SEQ ID NO: 10572 - RNA, 32 nt, Homo Sapiens
cgccuguaaucccagcacuuuggggggccaag

SEQ ID NO: 10573 - RNA, 32 nt, Homo Sapiens
cacgccuggaccgcggagacgcccaggccgag

SEQ ID NO: 10574 - RNA, 32 nt, Homo Sapiens
gccucuguuagcugggugggugucaucagccc

SEQ ID NO: 10575 - RNA, 32 nt, Homo Sapiens
gaucagaaugcuacuauuauguuaucaaagga

SEQ ID NO: 10576 - RNA, 32 nt, Homo Sapiens
ucuccccccucgcgcccacagcguuugguguu

SEQ ID NO: 10577 - RNA, 32 nt, Homo Sapiens
gagccgcggggcccgcuccagcccggccauga

SEQ ID NO: 10578 - RNA, 27 nt, Homo Sapiens
ggcccugccuuaggcagccccccucuu

SEQ ID NO: 10579 - RNA, 32 nt, Homo Sapiens
ccccagacgccgggcuuggggguuccccccgc

SEQ ID NO: 10580 - RNA, 32 nt, Homo Sapiens
agaaagagaagcugaacaggagaaagacaaac

SEQ ID NO: 10581 - RNA, 32 nt, Homo Sapiens
aauauagggaauauuuuuaacuucacagcagu

SEQ ID NO: 10582 - RNA, 32 nt, Homo Sapiens
ggcggccgcgugguaucucccgagggcugcuu

SEQ ID NO: 10583 - RNA, 32 nt, Homo Sapiens
ucuccucccagcagacggagccaggacgggca

SEQ ID NO: 10584 - RNA, 32 nt, Homo Sapiens
gggcuucgagcgcgaucuacucggccccgccg

SEQ ID NO: 10585 - RNA, 32 nt, Homo Sapiens
ggaaggugaacagcuccuggcugcugccgaga

SEQ ID NO: 10586 - RNA, 32 nt, Homo Sapiens
uggggggaggggcuauaacccugcuauuuuuc

SEQ ID NO: 10587 - RNA, 32 nt, Homo Sapiens
ggcuggagcuagaaagcagagccccggagggg

SEQ ID NO: 10588 - RNA, 32 nt, Homo Sapiens
gaauuccuucuggcagaaugcuggagccuuug

SEQ ID NO: 10589 - RNA, 32 nt, Homo Sapiens
uuccuaaaggugcucaggaggaugguugugua

SEQ ID NO: 10590 - RNA, 32 nt, Homo Sapiens
aguugcccagggugggggugccuagccaggug

SEQ ID NO: 10591 - RNA, 32 nt, Homo Sapiens
accuguaggucuaugauguccaaacuuaacag

SEQ ID NO: 10592 - RNA, 29 nt, Homo Sapiens
ucaucugugacuuagucuguuguaguggu

SEQ ID NO: 10593 - RNA, 32 nt, Homo Sapiens
uuaggaugaagaucagaaaauucucuccaugu

SEQ ID NO: 10594 - RNA, 32 nt, Homo Sapiens
cuuuuuacuuuaccuuuuuuuauguguauauu

SEQ ID NO: 10595 - RNA, 32 nt, Homo Sapiens
ggcuucuucaaucccgucuccuucccaagcuc

SEQ ID NO: 10596 - RNA, 32 nt, Homo Sapiens
gcucaggaguuggcaaauaagaauuaaauguc

SEQ ID NO: 10597 - RNA, 32 nt, Homo Sapiens
cucagccagaccacccugcgggccccagcggc

SEQ ID NO: 10598 - RNA, 32 nt, Homo Sapiens
cuagaccauuuucccagcuugaccaugagcuu

SEQ ID NO: 10599 - RNA, 32 nt, Homo Sapiens
acuuugguaucuuuaaaauuuucuuuaacuuu

SEQ ID NO: 10600 - RNA, 32 nt, Homo Sapiens
cgugcagcccacaaccgcaggaccccgccccu

SEQ ID NO: 10601 - RNA, 32 nt, Homo Sapiens
cuaagcaugaaaaaaaucauaguggaaugaua

SEQ ID NO: 10602 - RNA, 32 nt, Homo Sapiens
acaaccaacccuuuccuucucuaugccugggc

SEQ ID NO: 10603 - RNA, 32 nt, Homo Sapiens
uugcuuaugacacuaacacuaggaaugacaga

SEQ ID NO: 10604 - RNA, 32 nt, Homo Sapiens
cccuacgagggccugguccacacgcuggccau

SEQ ID NO: 10605 - RNA, 32 nt, Homo Sapiens
uucccagguggguggggguggccuucagugcg

SEQ ID NO: 10606 - RNA, 32 nt, Homo Sapiens
gccugcccccugggcacccauccacaagcugg

SEQ ID NO: 10607 - RNA, 32 nt, Homo Sapiens
caagugugggagaggaagcggcggcggcggcg

SEQ ID NO: 10608 - RNA, 32 nt, Homo Sapiens
auaauguuuuauaucuuaauucuaguaucugu

SEQ ID NO: 10609 - RNA, 32 nt, Homo Sapiens
uaaggcaaggcaugcauaagagucauuugaga

SEQ ID NO: 10610 - RNA, 32 nt, Homo Sapiens
ugauguuccagaacuggauucugaaauugaac

SEQ ID NO: 10611 - RNA, 32 nt, Homo Sapiens
ccagcacuucgggaggccgaggcggguggauc

SEQ ID NO: 10612 - RNA, 32 nt, Homo Sapiens
cccaagguuauuuuaaugaauucagacauuuu

SEQ ID NO: 10613 - RNA, 32 nt, Homo Sapiens
cuagggcaggucgggagagaggcggcccccgc

SEQ ID NO: 10614 - RNA, 32 nt, Homo Sapiens
acaccaccgcccaaucgcugcggccgccuagu

SEQ ID NO: 10615 - RNA, 32 nt, Homo Sapiens
cgggagcccagcugcccacccucuggacauuc

SEQ ID NO: 10616 - RNA, 32 nt, Homo Sapiens
aauuucggcucacugcaaccuccaccuccugg

SEQ ID NO: 10617 - RNA, 32 nt, Homo Sapiens
agcaccccaagcccgaugcagccacccccaga

SEQ ID NO: 10618 - RNA, 32 nt, Homo Sapiens
gucccaccuuggagcauuuauguagacauugu

SEQ ID NO: 10619 - RNA, 32 nt, Homo Sapiens
uugugcucauuucagaaaauaaaacacaaccu

SEQ ID NO: 10620 - RNA, 32 nt, Homo Sapiens
ccggcugcucggagugaacaggcggccaggaa

SEQ ID NO: 10621 - RNA, 32 nt, Homo Sapiens
uuagaguaugccugcuccccagcccccugccu

SEQ ID NO: 10622 - RNA, 32 nt, Homo Sapiens
cauaucccaagcccuuuagggcuacagucucu

SEQ ID NO: 10623 - RNA, 32 nt, Homo Sapiens
agaaagaaaaggaagacagauugugguacagg

SEQ ID NO: 10624 - RNA, 32 nt, Homo Sapiens
cccaccccgccaggcugcacucggucgggccu

SEQ ID NO: 10625 - RNA, 32 nt, Homo Sapiens
uggagacggcggugugccaggcggugcuggcg

SEQ ID NO: 10626 - RNA, 32 nt, Homo Sapiens
uguauauaaaguguugcacauguauuaugucg

SEQ ID NO: 10627 - RNA, 32 nt, Homo Sapiens
ucccuuccaugccccaggaucacucucugcug

SEQ ID NO: 10628 - RNA, 32 nt, Homo Sapiens
uccucccccagcggugguagggggacccgggg

SEQ ID NO: 10629 - RNA, 32 nt, Homo Sapiens
gagaaucaguuauaaaaguauuagccauuugu

SEQ ID NO: 10630 - RNA, 32 nt, Homo Sapiens
uuuuggaugcacugaggaguuaucaauacuuc

SEQ ID NO: 10631 - RNA, 32 nt, Homo Sapiens
augcagcagacacagagaaagcccucaguguu

SEQ ID NO: 10632 - RNA, 32 nt, Homo Sapiens
cccucugagcuggccuguggggcacgggaagc

SEQ ID NO: 10633 - RNA, 32 nt, Homo Sapiens
cucuguuuuuuguucauuuccccucccuuagc

SEQ ID NO: 10634 - RNA, 32 nt, Homo Sapiens
cccaugguuuccuuugcucccagcgguugcgc

SEQ ID NO: 10635 - RNA, 32 nt, Homo Sapiens
cugcauguguggaacacgugcucaucgaugug

SEQ ID NO: 10636 - RNA, 32 nt, Homo Sapiens
aaagaacaucaaaaguuuuaaaaaagaaaaug

SEQ ID NO: 10637 - RNA, 32 nt, Homo Sapiens
agacgacuugggagcaaaauggcugcuugagc

SEQ ID NO: 10638 - RNA, 32 nt, Homo Sapiens
uuucaauaacugugcacugagcuccaauuuug

SEQ ID NO: 10639 - RNA, 32 nt, Homo Sapiens
agccaugcgaaaaucugcacgacuggucaugg

SEQ ID NO: 10640 - RNA, 32 nt, Homo Sapiens
ucaugaaauuguucaucgcugcuggagaauga

SEQ ID NO: 10641 - RNA, 32 nt, Homo Sapiens
auccgacauaaaauuccugcucugccacagcu

SEQ ID NO: 10642 - RNA, 32 nt, Homo Sapiens
uucaguuuauacucuuaauuuaauuuucuuuc

SEQ ID NO: 10643 - RNA, 32 nt, Homo Sapiens
cuggaacccaaguucaggaucugcugacagca

SEQ ID NO: 10644 - RNA, 32 nt, Homo Sapiens
ccgugucucugaggacgucaucggaggcuggg

SEQ ID NO: 10645 - RNA, 32 nt, Homo Sapiens
gucagacuguuguuugccauuagcuugcagac

SEQ ID NO: 10646 - RNA, 32 nt, Homo Sapiens
gcccugccaaccccaccagcucccggcuucuc

SEQ ID NO: 10647 - RNA, 32 nt, Homo Sapiens
uuuauaugauguaugcauauguguacaugggu

SEQ ID NO: 10648 - RNA, 32 nt, Homo Sapiens
ucauggucggugaaacaaagacagucauagaa

SEQ ID NO: 10649 - RNA, 32 nt, Homo Sapiens
aaaacuggucugaucggacuucucguccuggg

SEQ ID NO: 10650 - RNA, 32 nt, Homo Sapiens
auuuugccuucugugauaauagauagacuuug

SEQ ID NO: 10651 - RNA, 32 nt, Homo Sapiens
caaaagggccucauccccuuuauuuucccugu

SEQ ID NO: 10652 - RNA, 32 nt, Homo Sapiens
ccgcccgcgggcccaugugagcgccaugcggc

SEQ ID NO: 10653 - RNA, 32 nt, Homo Sapiens
ccaggccugccagcaucccugaugccgacuuu

SEQ ID NO: 10654 - RNA, 32 nt, Homo Sapiens
uaggcuugaacauguguugagugcaugaaaaa

SEQ ID NO: 10655 - RNA, 32 nt, Homo Sapiens
caaaaagaaccugguccuugaugucacagcca

SEQ ID NO: 10656 - RNA, 32 nt, Homo Sapiens
gggcggggcgagcagagccgcguaaggugcgc

SEQ ID NO: 10657 - RNA, 32 nt, Homo Sapiens
uuuccuguaggauguuccugcacuauaacaag

SEQ ID NO: 10658 - RNA, 32 nt, Homo Sapiens
cuuggcuagcgcgcggcggccguggcuaaggc

SEQ ID NO: 10659 - RNA, 32 nt, Homo Sapiens
auggggcacuuacaggggccggaggcuggccc

SEQ ID NO: 10660 - RNA, 32 nt, Homo Sapiens
gaaugguuaaguggaaucacauauugcaaacu

SEQ ID NO: 10661 - RNA, 32 nt, Homo Sapiens
gucuguagggaagaggagccauggggcuucgg

SEQ ID NO: 10662 - RNA, 32 nt, Homo Sapiens
ucccauuuagugaaacaaaagguuaagaaaug

SEQ ID NO: 10663 - RNA, 32 nt, Homo Sapiens
caugcagcagcacccaaguauucuucauucuu

SEQ ID NO: 10664 - RNA, 32 nt, Homo Sapiens
aggcugcccuccccucacaguuccugcaccuc

SEQ ID NO: 10665 - RNA, 32 nt, Homo Sapiens
cuaguaaauguaaacguguauguauaaaauaa

SEQ ID NO: 10666 - RNA, 32 nt, Homo Sapiens
acaaucucgggcuuauagaauaccaaacugaa

SEQ ID NO: 10667 - RNA, 32 nt, Homo Sapiens
gauuauuuuuauuucuuauacucuguuuucuu

SEQ ID NO: 10668 - RNA, 32 nt, Homo Sapiens
ugggagguggagguuucagugagccaagauca

SEQ ID NO: 10669 - RNA, 32 nt, Homo Sapiens
uuugguacgaacaaaauucaucaccacagggu

SEQ ID NO: 10670 - RNA, 32 nt, Homo Sapiens
ucugcccucuucucaucccccagccacagugg

SEQ ID NO: 10671 - RNA, 32 nt, Homo Sapiens
gccucgcuucuccgguccagccgccaucuucc

SEQ ID NO: 10672 - RNA, 32 nt, Homo Sapiens
uuauuguagguccccaugagcuggugggggcu

SEQ ID NO: 10673 - RNA, 32 nt, Homo Sapiens
ucugcgccgcggggcggccgccaucuggagca

SEQ ID NO: 10674 - RNA, 32 nt, Homo Sapiens
cagcuucguggcggccggguccucugugcccu

SEQ ID NO: 10675 - RNA, 32 nt, Homo Sapiens
cggaaccuggguggcuggagccgcccgcugcg

SEQ ID NO: 10676 - RNA, 32 nt, Homo Sapiens
augguaacagagccacuuuaucauuuggucaa

SEQ ID NO: 10677 - RNA, 32 nt, Homo Sapiens
gguguggcggggcaggaugagcaacuccguuc

SEQ ID NO: 10678 - RNA, 31 nt, Homo Sapiens
guccucaugccucuccuccucuugcugcucc

SEQ ID NO: 10679 - RNA, 32 nt, Homo Sapiens
cugcccucaaggccugacggggugcugcaugu

SEQ ID NO: 10680 - RNA, 32 nt, Homo Sapiens
gccugaggacgccgcggcccccgcccccgcca

SEQ ID NO: 10681 - RNA, 32 nt, Homo Sapiens
ggcagcaguggugguaguggcgguggcagcau

SEQ ID NO: 10682 - RNA, 32 nt, Homo Sapiens
cuggguugaagaaggagguguggaagcugcuc

SEQ ID NO: 10683 - RNA, 32 nt, Homo Sapiens
ucgugcgugcgcacgcgcgcugucccccggag

SEQ ID NO: 10684 - RNA, 32 nt, Homo Sapiens
auuugccaauacucuuauucuuuguucuaaau

SEQ ID NO: 10685 - RNA, 32 nt, Homo Sapiens
uguuuuacggcaacaaaauuuauugcauuuaa

SEQ ID NO: 10686 - RNA, 32 nt, Homo Sapiens
ccucugcacagacuucggagauacagcgaagg

SEQ ID NO: 10687 - RNA, 32 nt, Homo Sapiens
aauaauucaaaaucaguagcaaugcaaaaaua

SEQ ID NO: 10688 - RNA, 32 nt, Homo Sapiens
aaguauccagaauugccagaagucacuuagag

SEQ ID NO: 10689 - RNA, 32 nt, Homo Sapiens
cggccuccucuucaccccggcaggcccugcag

SEQ ID NO: 10690 - RNA, 32 nt, Homo Sapiens
uccccaccaccgcaacaagcgggccgccccag

SEQ ID NO: 10691 - RNA, 32 nt, Homo Sapiens
caggaccuuuuguucacagcgugcagcagcga

SEQ ID NO: 10692 - RNA, 32 nt, Homo Sapiens
auugcaauauguuaguaacaaucuugcagccu

SEQ ID NO: 10693 - RNA, 32 nt, Homo Sapiens
aguccacgccggccgugcccggcggccuuaag

SEQ ID NO: 10694 - RNA, 32 nt, Homo Sapiens
cuccagcgcgcgcgaagaagcuugggagucgu

SEQ ID NO: 10695 - RNA, 32 nt, Homo Sapiens
cccuccgccucccgagcaccagcgcgcucuga

SEQ ID NO: 10696 - RNA, 32 nt, Homo Sapiens
uuguuacagggugaccuguucucuagcuguga

SEQ ID NO: 10697 - RNA, 32 nt, Homo Sapiens
cucuucuagggauaugaaaaucucuuaacacc

SEQ ID NO: 10698 - RNA, 32 nt, Homo Sapiens
gaacaauauggguaaacuucaucccagagaca

SEQ ID NO: 10699 - RNA, 32 nt, Homo Sapiens
auuacuuaaaauuuguuucuuuagaaaauaaa

SEQ ID NO: 10700 - RNA, 32 nt, Homo Sapiens
gacccaugcaaauuaaaccaaccugguaguag

SEQ ID NO: 10701 - RNA, 32 nt, Homo Sapiens
guuuuucccacuuuccaauguacucaagaaaa

SEQ ID NO: 10702 - RNA, 32 nt, Homo Sapiens
uucccugcuaaaaaucuguuuaucauacauuu

SEQ ID NO: 10703 - RNA, 32 nt, Homo Sapiens
cgcgacuucgccccgcccggcgcgggcccagg

SEQ ID NO: 10704 - RNA, 32 nt, Homo Sapiens
gagccugcuccaugggacccagccccccagga

SEQ ID NO: 10705 - RNA, 31 nt, Homo Sapiens
acucagguaaucugccugccucggccucccc

SEQ ID NO: 10706 - RNA, 32 nt, Homo Sapiens
uuuuuaaauggcacuauguaguaauuaagagc

SEQ ID NO: 10707 - RNA, 32 nt, Homo Sapiens
cauguuccugaauucuauuugcugggcuuuuu

SEQ ID NO: 10708 - RNA, 32 nt, Homo Sapiens
ggacgcgagcgcggggcggguggagagcgucu

SEQ ID NO: 10709 - RNA, 32 nt, Homo Sapiens
agaaguuugucaaugccccccaccccgaaacc

SEQ ID NO: 10710 - RNA, 32 nt, Homo Sapiens
auaagagagagaccgaauucuguggcucagca

SEQ ID NO: 10711 - RNA, 32 nt, Homo Sapiens
acucccugagggcugggcaugcugagggauuu

SEQ ID NO: 10712 - RNA, 32 nt, Homo Sapiens
aguggagugguggggcuugguuauccucuugu

SEQ ID NO: 10713 - RNA, 32 nt, Homo Sapiens
gaacuacuagaguuuaaaauucugccaaacua

SEQ ID NO: 10714 - RNA, 32 nt, Homo Sapiens
cagguucuggggauccccuccauccagaagaa

SEQ ID NO: 10715 - RNA, 32 nt, Homo Sapiens
gagucaccaacccuucauuuaacaaguaagaa

SEQ ID NO: 10716 - RNA, 32 nt, Homo Sapiens
aaugauggacauuuuugugauaucacuauucg

SEQ ID NO: 10717 - RNA, 32 nt, Homo Sapiens
gccuuuuuucuuuuaaaagcuaaaaaacaagu

SEQ ID NO: 10718 - RNA, 32 nt, Homo Sapiens
guacacugccagcaaccucugcucucuggaga

SEQ ID NO: 10719 - RNA, 32 nt, Homo Sapiens
gguccguguguggccuagcucauuccauguca

SEQ ID NO: 10720 - RNA, 32 nt, Homo Sapiens
gcucaugggauugcuuuugauucggagguccg

SEQ ID NO: 10721 - RNA, 32 nt, Homo Sapiens
ugucaauuucuacaacaacaacaacaaaaacc

SEQ ID NO: 10722 - RNA, 32 nt, Homo Sapiens
ccgcucugccuggccagcccucgggccacacc

SEQ ID NO: 10723 - RNA, 32 nt, Homo Sapiens
cauauagagaauaaucauguugacuuugugaa

SEQ ID NO: 10724 - RNA, 32 nt, Homo Sapiens
gccucuccacacuccagguucccucaggcuug

SEQ ID NO: 10725 - RNA, 32 nt, Homo Sapiens
uggagcuaacuucucaaauguuuuccauaaua

SEQ ID NO: 10726 - RNA, 32 nt, Homo Sapiens
guugcgccggaaaggggagguggcgggugguc

SEQ ID NO: 10727 - RNA, 31 nt, Homo Sapiens
uuaauucaggccugcugcugaguuaugcaca

SEQ ID NO: 10728 - RNA, 32 nt, Homo Sapiens
uaaaaaccaaaggaucuggaggcauugcuauc

SEQ ID NO: 10729 - RNA, 31 nt, Homo Sapiens
ugccugcuuaugggaaaguccccucuucucc

SEQ ID NO: 10730 - RNA, 32 nt, Homo Sapiens
ggaaaugggacuucucacgugcucuccacagu

SEQ ID NO: 10731 - RNA, 32 nt, Homo Sapiens
aaauccagaaccaccugccuuaugugagugug

SEQ ID NO: 10732 - RNA, 32 nt, Homo Sapiens
ccuuagcuuggaaaaauguuuaugugguucac

SEQ ID NO: 10733 - RNA, 32 nt, Homo Sapiens
gcucaccgcccgccauggcccgcgcacccccg

SEQ ID NO: 10734 - RNA, 32 nt, Homo Sapiens
uuguauaggcuuuauuguuuauugcugguuua

SEQ ID NO: 10735 - RNA, 32 nt, Homo Sapiens
ccuuaauuugggguggggugggggguggagaa

SEQ ID NO: 10736 - RNA, 32 nt, Homo Sapiens
agccaagggugacuuggcaggggucugcaagu

SEQ ID NO: 10737 - RNA, 32 nt, Homo Sapiens
cacccaccucaccucuggcaccucugagcauc

SEQ ID NO: 10738 - RNA, 32 nt, Homo Sapiens
gauaugauauguauaccaaacuccagccaacu

SEQ ID NO: 10739 - RNA, 32 nt, Homo Sapiens
ggaaccccaagcccauugucaccuggcucaag

SEQ ID NO: 10740 - RNA, 32 nt, Homo Sapiens
ggucucuccuccccggccccuaugugcccacc

SEQ ID NO: 10741 - RNA, 32 nt, Homo Sapiens
gggccucgggggaagagaaggggccacuucgc

SEQ ID NO: 10742 - RNA, 32 nt, Homo Sapiens
gaugcggggccaccccgcgcccgccccagucc

SEQ ID NO: 10743 - RNA, 32 nt, Homo Sapiens
uguccacccacuuuuuuauugcacuggcuuga

SEQ ID NO: 10744 - RNA, 32 nt, Homo Sapiens
aaccuguggggccagccccacccccagccagg

SEQ ID NO: 10745 - RNA, 32 nt, Homo Sapiens
ucacuggcuggggcucggggacgcugcucaca

SEQ ID NO: 10746 - RNA, 32 nt, Homo Sapiens
uaguuucuuuugcugugcagaagcucuuuagu

SEQ ID NO: 10747 - RNA, 32 nt, Homo Sapiens
ccacugucauauuuuguuaauaaaauuuuauu

SEQ ID NO: 10748 - RNA, 31 nt, Homo Sapiens
uuuacaaaaaagaaaaauuauuacuaagccc

SEQ ID NO: 10749 - RNA, 32 nt, Homo Sapiens
aaucuguuucugauugcacaguuucuaauuuu

SEQ ID NO: 10750 - RNA, 32 nt, Homo Sapiens
agacccaaugucucuguuuucuuuuccuuuug

SEQ ID NO: 10751 - RNA, 32 nt, Homo Sapiens
uuaauuuuuuaaaaacugaacacugugauuau

SEQ ID NO: 10752 - RNA, 32 nt, Homo Sapiens
gguguucugaugcauaaucagagcugagauca

SEQ ID NO: 10753 - RNA, 32 nt, Homo Sapiens
uccuaacagucuuuuguugucguuguuuuuaa

SEQ ID NO: 10754 - RNA, 32 nt, Homo Sapiens
uuuaaaauuuauuugcaaauauacuuuuucca

SEQ ID NO: 10755 - RNA, 32 nt, Homo Sapiens
ucccugucggccugguguucugugggaucccu

SEQ ID NO: 10756 - RNA, 32 nt, Homo Sapiens
gcaagcacucccaggccagcucugucacuggu

SEQ ID NO: 10757 - RNA, 32 nt, Homo Sapiens
cccuccgcaggcccgcgcccggucccacacug

SEQ ID NO: 10758 - RNA, 32 nt, Homo Sapiens
gcacagacaguggcugacagugcggagggcag

SEQ ID NO: 10759 - RNA, 32 nt, Homo Sapiens
uugagaaaugguuucaaaauguuuugacaugu

SEQ ID NO: 10760 - RNA, 32 nt, Homo Sapiens
agugcacacgcacacacacacacacacacaca

SEQ ID NO: 10761 - RNA, 32 nt, Homo Sapiens
aaauaaagaaagauuagcugggacauggugac

SEQ ID NO: 10762 - RNA, 32 nt, Homo Sapiens
augggcucugagcacaccccugcccggcccag

SEQ ID NO: 10763 - RNA, 32 nt, Homo Sapiens
aaaaugcccccaaagcacuaugcuggucauga

SEQ ID NO: 10764 - RNA, 32 nt, Homo Sapiens
uuaaauagcaaaguaccacuaccaccaccacc

SEQ ID NO: 10765 - RNA, 32 nt, Homo Sapiens
gccugaguauugcaauacaugcaguaguacau

SEQ ID NO: 10766 - RNA, 32 nt, Homo Sapiens
uauuggaaagcagucaguaaccaaagccaagu

SEQ ID NO: 10767 - RNA, 32 nt, Homo Sapiens
gagaggcauuggcgagguucgcagcgccccag

SEQ ID NO: 10768 - RNA, 32 nt, Homo Sapiens
gcccgaagcaggggcauagccggugccccgcg

SEQ ID NO: 10769 - RNA, 32 nt, Homo Sapiens
acaacuuguuuucccagcaucauguagugcau

SEQ ID NO: 10770 - RNA, 29 nt, Homo Sapiens
gugggaaaacuuuugucuauaaggcagcc

SEQ ID NO: 10771 - RNA, 32 nt, Homo Sapiens
cauauuucuuuuuucuuuguuugagauggagu

SEQ ID NO: 10772 - RNA, 32 nt, Homo Sapiens
aauaaauuugaauaaucagauuucuuacaaaa

SEQ ID NO: 10773 - RNA, 32 nt, Homo Sapiens
cagguguugacuccagcuccagcuucagcucc

SEQ ID NO: 10774 - RNA, 32 nt, Homo Sapiens
uaagcagagagaaacauuauaaagguaguaag

SEQ ID NO: 10775 - RNA, 32 nt, Homo Sapiens
auauuaggaucuuccuuggagacucugaaaau

SEQ ID NO: 10776 - RNA, 31 nt, Homo Sapiens
uaaguccaaagucucaccugagacuuaaguc

SEQ ID NO: 10777 - RNA, 32 nt, Homo Sapiens
gcuuucaccauaauggccaggcuggucuugaa

SEQ ID NO: 10778 - RNA, 32 nt, Homo Sapiens
guuucuggaaagauccaaaggaguaauugcga

SEQ ID NO: 10779 - RNA, 32 nt, Homo Sapiens
caccaggaggaaauaauucacaaguuggccau

SEQ ID NO: 10780 - RNA, 32 nt, Homo Sapiens
cuucccuucucccuccucccaucugaaaaucc

SEQ ID NO: 10781 - RNA, 32 nt, Homo Sapiens
gggaggggggaagagacgugugugcaggaaac

SEQ ID NO: 10782 - RNA, 32 nt, Homo Sapiens
ggguggccgcacccucccggcugcgguggcug

SEQ ID NO: 10783 - RNA, 32 nt, Homo Sapiens
aggggagaaggagaggcgucugcagggggcag

SEQ ID NO: 10784 - RNA, 32 nt, Homo Sapiens
gggagcauuuuuguugauaauuuuacugaucu

SEQ ID NO: 10785 - RNA, 32 nt, Homo Sapiens
cccgcgcucuggccaccccggcgggaaaagga

SEQ ID NO: 10786 - RNA, 32 nt, Homo Sapiens
uuugucaaccugcaggucugcccgccugccaa

SEQ ID NO: 10787 - RNA, 32 nt, Homo Sapiens
uaaugguuuuggagcuggguccaguuuacaga

SEQ ID NO: 10788 - RNA, 32 nt, Homo Sapiens
ucaaauacaauacugguccuuaccacaaguaa

SEQ ID NO: 10789 - RNA, 32 nt, Homo Sapiens
cuuccagcugucucagccucagggccagcacu

SEQ ID NO: 10790 - RNA, 32 nt, Homo Sapiens
cacacgcuagcucuccuucgccuucugccaug

SEQ ID NO: 10791 - RNA, 32 nt, Homo Sapiens
ugaugacauaaauguugauugugucuuugcaa

SEQ ID NO: 10792 - RNA, 32 nt, Homo Sapiens
ggcggcggcagcugaggccuuggccgaagccg

SEQ ID NO: 10793 - RNA, 32 nt, Homo Sapiens
gcacagguggagggcugcuuccaccccaggug

SEQ ID NO: 10794 - RNA, 32 nt, Homo Sapiens
acuuuaagcccauuuuaaacccucaggcuaga

SEQ ID NO: 10795 - RNA, 32 nt, Homo Sapiens
gcagagagggaccccgggcgccugcugagcuc

SEQ ID NO: 10796 - RNA, 32 nt, Homo Sapiens
ccaggguuauuuaguaaaguuuguugaaaaca

SEQ ID NO: 10797 - RNA, 32 nt, Homo Sapiens
aucgugcggccgcggccggccgagcugccugg

SEQ ID NO: 10798 - RNA, 32 nt, Homo Sapiens
ggagcaagaaacaaaccuuaauggcuuuaagc

SEQ ID NO: 10799 - RNA, 32 nt, Homo Sapiens
guccccacccagugucccaggccacaggagcu

SEQ ID NO: 10800 - RNA, 32 nt, Homo Sapiens
accccaaaauauauuuccuugccauaccuuga

SEQ ID NO: 10801 - RNA, 32 nt, Homo Sapiens
uaaacccauaucagauacaacaaaauuggggu

SEQ ID NO: 10802 - RNA, 32 nt, Homo Sapiens
gcugggucugacucacccacaauccaucagcc

SEQ ID NO: 10803 - RNA, 32 nt, Homo Sapiens
ggcgugagggaucaggcucgccagggccacag

SEQ ID NO: 10804 - RNA, 32 nt, Homo Sapiens
ccacuccucagcugccaauacccggcgcacuc

SEQ ID NO: 10805 - RNA, 32 nt, Homo Sapiens
ggagaaagaaacaagauuaaaaaggaacaagu

SEQ ID NO: 10806 - RNA, 32 nt, Homo Sapiens
aguaacaggguuuuguuaauucuuuucagaau

SEQ ID NO: 10807 - RNA, 32 nt, Homo Sapiens
gcggccgcacucagcgccacgcgucgaaagcg

SEQ ID NO: 10808 - RNA, 30 nt, Homo Sapiens
ucugggauggacugcgugccuguguggggc

SEQ ID NO: 10809 - RNA, 32 nt, Homo Sapiens
ugaguuuuauggagagaggccuuuuuaugcau

SEQ ID NO: 10810 - RNA, 32 nt, Homo Sapiens
uguggcccuggccacuaaagcuucagacucaa

SEQ ID NO: 10811 - RNA, 32 nt, Homo Sapiens
auuguuaguguucugaaguaaauacagaagag

SEQ ID NO: 10812 - RNA, 32 nt, Homo Sapiens
uugcugauuuccccucuucccuucaacaugaa

SEQ ID NO: 10813 - RNA, 32 nt, Homo Sapiens
uuaacagugcaucucccaguggacgcgagcag

SEQ ID NO: 10814 - RNA, 32 nt, Homo Sapiens
aauuuuucuugccugccccgccuuggggaaug

SEQ ID NO: 10815 - RNA, 31 nt, Homo Sapiens
cgccggcugccggguggcaugggccgucacc

SEQ ID NO: 10816 - RNA, 32 nt, Homo Sapiens
ggauauaacaagggagaaaaagagaaacuuug

SEQ ID NO: 10817 - RNA, 32 nt, Homo Sapiens
cugauacauuuuauuauauaagguauguaaag

SEQ ID NO: 10818 - RNA, 32 nt, Homo Sapiens
cagagucucgugccgcugcugcugcgccugca

SEQ ID NO: 10819 - RNA, 32 nt, Homo Sapiens
cccuggcugucuuccuggaugugcuguggcca

SEQ ID NO: 10820 - RNA, 32 nt, Homo Sapiens
aaucggggcgcuucgccccgggccccccagca

SEQ ID NO: 10821 - RNA, 32 nt, Homo Sapiens
ccgccgccgccgcucucucccgggccaggagg

SEQ ID NO: 10822 - RNA, 32 nt, Homo Sapiens
ucgcguuauggccgcugccgcggcuguggagg

SEQ ID NO: 10823 - RNA, 32 nt, Homo Sapiens
uugaguugguguuccuuccccggcgcccccau

SEQ ID NO: 10824 - RNA, 32 nt, Homo Sapiens
gugauucugaugcaggugagcugggggcauac

SEQ ID NO: 10825 - RNA, 32 nt, Homo Sapiens
ugaccaaaaaaauuaaaaguucacaauuuuuu

SEQ ID NO: 10826 - RNA, 32 nt, Homo Sapiens
cuaagacagguagaaaaauguaauguagcuuu

SEQ ID NO: 10827 - RNA, 32 nt, Homo Sapiens
gcuccucccagaucgcucuacaugacauucag

SEQ ID NO: 10828 - RNA, 32 nt, Homo Sapiens
ggcccagguucagggaaguaugggcaugcagg

SEQ ID NO: 10829 - RNA, 32 nt, Homo Sapiens
aaaacuuauuccagguauuaaagguuaaauug

SEQ ID NO: 10830 - RNA, 32 nt, Homo Sapiens
uucucuguccagcagucacuucggccagagcu

SEQ ID NO: 10831 - RNA, 32 nt, Homo Sapiens
ugcugaaagggaggcuggcaguggucauuugg

SEQ ID NO: 10832 - RNA, 32 nt, Homo Sapiens
cgcggcacugugccgccacccgcggccacacc

SEQ ID NO: 10833 - RNA, 32 nt, Homo Sapiens
acuggcugugugccuggcacuguuaggagcca

SEQ ID NO: 10834 - RNA, 32 nt, Homo Sapiens
uauaagacuuauuugcaguacuguguucuuca

SEQ ID NO: 10835 - RNA, 32 nt, Homo Sapiens
gcccggccaauuuuuguguuuucaguagagac

SEQ ID NO: 10836 - RNA, 32 nt, Homo Sapiens
aagcuggcccaccagagcugccauuugucucc

SEQ ID NO: 10837 - RNA, 32 nt, Homo Sapiens
gaagggcggaaagcgcaggaggaggcaguguu

SEQ ID NO: 10838 - RNA, 32 nt, Homo Sapiens
gugaggcauucggggaagcugcacaugugcca

SEQ ID NO: 10839 - RNA, 32 nt, Homo Sapiens
cccccuccagggaaugcugaguuccaguuuug

SEQ ID NO: 10840 - RNA, 32 nt, Homo Sapiens
gggagaccugccgccccucgggcccgccacgc

SEQ ID NO: 10841 - RNA, 32 nt, Homo Sapiens
gauugugguaauaucauuucuuaucuacaaug

SEQ ID NO: 10842 - RNA, 32 nt, Homo Sapiens
aauaguuuaugaguugaacaaaaggaaaacuc

SEQ ID NO: 10843 - RNA, 32 nt, Homo Sapiens
gugaccagagaagagggaagcccgagggggcu

SEQ ID NO: 10844 - RNA, 32 nt, Homo Sapiens
gcauccaguccacuuuaccaucaguguuuaag

SEQ ID NO: 10845 - RNA, 32 nt, Homo Sapiens
ccaaaggaaaggaaaucaguguaucaaaggga

SEQ ID NO: 10846 - RNA, 32 nt, Homo Sapiens
auccuuaaccaccgcauaugcaugccaggcug

SEQ ID NO: 10847 - RNA, 32 nt, Homo Sapiens
ccauugagcagcccauucccagcccugaggcc

SEQ ID NO: 10848 - RNA, 32 nt, Homo Sapiens
cuuguuuggggauuggagagggaagugcgucu

SEQ ID NO: 10849 - RNA, 32 nt, Homo Sapiens
cgccgccccuccccgccccgcgugccuaucca

SEQ ID NO: 10850 - RNA, 32 nt, Homo Sapiens
ugcucuuaacugugaccuuccucagccucagc

SEQ ID NO: 10851 - RNA, 32 nt, Homo Sapiens
uaguaagcggcgggcucgccagccucgagcga

SEQ ID NO: 10852 - RNA, 32 nt, Homo Sapiens
cagccuggaagaggggcacuaggugacucccu

SEQ ID NO: 10853 - RNA, 32 nt, Homo Sapiens
agaccacaaccucagcgaagaccacgaugaag

SEQ ID NO: 10854 - RNA, 32 nt, Homo Sapiens
ccgaguuccuuccccucccccgagccucugca

SEQ ID NO: 10855 - RNA, 32 nt, Homo Sapiens
ggagagcggcggugcugggaggcccggccagc

SEQ ID NO: 10856 - RNA, 32 nt, Homo Sapiens
gagggcuauguuuggguccagagucacuucaa

SEQ ID NO: 10857 - RNA, 32 nt, Homo Sapiens
guugccccacuuuagagcccugugugccaccc

SEQ ID NO: 10858 - RNA, 32 nt, Homo Sapiens
aggaucagaaaaguuugagaaaagcaucugca

SEQ ID NO: 10859 - RNA, 32 nt, Homo Sapiens
ucccaaaucugugcuggacaagcugugggaag

SEQ ID NO: 10860 - RNA, 32 nt, Homo Sapiens
uauuuuguuuuuugcauuuuuaucaaaugcag

SEQ ID NO: 10861 - RNA, 32 nt, Homo Sapiens
cauaaggguucuucagugaaaagcaggagaag

SEQ ID NO: 10862 - RNA, 32 nt, Homo Sapiens
agggacaggugggccuggcggccuguggguuu

SEQ ID NO: 10863 - RNA, 32 nt, Homo Sapiens
ccgggucucccgcuccagcuccagccccaccc

SEQ ID NO: 10864 - RNA, 32 nt, Homo Sapiens
acugcuggccacaaguguccccucucaguccc

SEQ ID NO: 10865 - RNA, 32 nt, Homo Sapiens
guggguaaaagggagagggagaauuaccaccu

SEQ ID NO: 10866 - RNA, 32 nt, Homo Sapiens
gcccugcuuggccagcacugccugcagccuca

SEQ ID NO: 10867 - RNA, 32 nt, Homo Sapiens
auggaacacacgcucgccugcgucccaaaggg

SEQ ID NO: 10868 - RNA, 32 nt, Homo Sapiens
aauaauauuucugguauuuucuucauuauaac

SEQ ID NO: 10869 - RNA, 32 nt, Homo Sapiens
gccauggaggcacacagcugcagagacagaga

SEQ ID NO: 10870 - RNA, 32 nt, Homo Sapiens
uugaaaaagaucgcgaauaaaaaucaacaaag

SEQ ID NO: 10871 - RNA, 32 nt, Homo Sapiens
ucuugcuguaaguccucaccaggaucuacauu

SEQ ID NO: 10872 - RNA, 30 nt, Homo Sapiens
gguucaagugucuugccgccggccuucgga

SEQ ID NO: 10873 - RNA, 32 nt, Homo Sapiens
gaucuuguaccaagccaacggcguuccuggcu

SEQ ID NO: 10874 - RNA, 32 nt, Homo Sapiens
cccacucuuuuugucuugcucugaggaugcca

SEQ ID NO: 10875 - RNA, 32 nt, Homo Sapiens
cacccccggcccgguuccgggggcguggcuug

SEQ ID NO: 10876 - RNA, 32 nt, Homo Sapiens
auacaaguauauauuuuuguuugacgcggacu

SEQ ID NO: 10877 - RNA, 32 nt, Homo Sapiens
acaggagauggcaaaagagaaauacuaguuuc

SEQ ID NO: 10878 - RNA, 32 nt, Homo Sapiens
uuuuaacaaucccaggugaugugugugcaugu

SEQ ID NO: 10879 - RNA, 32 nt, Homo Sapiens
gcgugcucugcgcuugccaugagacuccuggg

SEQ ID NO: 10880 - RNA, 32 nt, Homo Sapiens
acaagccccaggcaagcuggaacuuggguggg

SEQ ID NO: 10881 - RNA, 32 nt, Homo Sapiens
cagcggugugggaggcaucaccaccgucccgg

SEQ ID NO: 10882 - RNA, 32 nt, Homo Sapiens
cugcauucuccacuucuuguuccccacugaca

SEQ ID NO: 10883 - RNA, 32 nt, Homo Sapiens
ggaggucugaugcucgggcagggaggagcugu

SEQ ID NO: 10884 - RNA, 32 nt, Homo Sapiens
ucccuccauaccucgaacaucaguugggaucc

SEQ ID NO: 10885 - RNA, 32 nt, Homo Sapiens
ccuaaggaaccucugcugccagcccuuccuca

SEQ ID NO: 10886 - RNA, 32 nt, Homo Sapiens
aaaaaaaaaaagacuguaaauugugcaacaaa

SEQ ID NO: 10887 - RNA, 32 nt, Homo Sapiens
accccccugaccaagcuuuccuuucugccccc

SEQ ID NO: 10888 - RNA, 32 nt, Homo Sapiens
cgugguugugcagcugguugggcagagcuggc

SEQ ID NO: 10889 - RNA, 32 nt, Homo Sapiens
ucgguguaaggcagcagacggcggcugcgacg

SEQ ID NO: 10890 - RNA, 32 nt, Homo Sapiens
ugugauuuaugaucuucauuuauuuuaaugau

SEQ ID NO: 10891 - RNA, 32 nt, Homo Sapiens
ucagccccgcggccgcgcgcucgcccugcccu

SEQ ID NO: 10892 - RNA, 32 nt, Homo Sapiens
ucuccucccuucuuggguguccugcagguuuc

SEQ ID NO: 10893 - RNA, 32 nt, Homo Sapiens
guauuuacugucaauucauagguuucaguuua

SEQ ID NO: 10894 - RNA, 27 nt, Homo Sapiens
caauucucaugcuucagccucccaagu

SEQ ID NO: 10895 - RNA, 32 nt, Homo Sapiens
accagccugagugacauagugagacuuugucu

SEQ ID NO: 10896 - RNA, 32 nt, Homo Sapiens
gcugggacauggggguguggguaaagacaggg

SEQ ID NO: 10897 - RNA, 32 nt, Homo Sapiens
gcugagcaguugcagggaaaucuggaaauccu

SEQ ID NO: 10898 - RNA, 32 nt, Homo Sapiens
acugcagggaggaggaaauggggggugggguu

SEQ ID NO: 10899 - RNA, 32 nt, Homo Sapiens
cagcccagccccagccuuccuccgccuccgcc

SEQ ID NO: 10900 - RNA, 32 nt, Homo Sapiens
ugcauagcaucuaaugucaaaauagaaccaac

SEQ ID NO: 10901 - RNA, 30 nt, Homo Sapiens
gccguggcgcugucugcgccggcgauccgc

SEQ ID NO: 10902 - RNA, 32 nt, Homo Sapiens
accuggggccccuauaggcagcagccaauuac

SEQ ID NO: 10903 - RNA, 32 nt, Homo Sapiens
cagaugaugaacuucuuaaugcuugcugaagu

SEQ ID NO: 10904 - RNA, 32 nt, Homo Sapiens
ggguuguucuggauuuuccccugaagacuuac

SEQ ID NO: 10905 - RNA, 32 nt, Homo Sapiens
aucaacuguauauuaagguacucauauccauu

SEQ ID NO: 10906 - RNA, 27 nt, Homo Sapiens
cuuguucuuugauucagcccuuucaaa

SEQ ID NO: 10907 - RNA, 32 nt, Homo Sapiens
caggaagguaggagaaggcaucugagucuccu

SEQ ID NO: 10908 - RNA, 32 nt, Homo Sapiens
ggcuagaccucccugcccuuggauagaccgcu

SEQ ID NO: 10909 - RNA, 32 nt, Homo Sapiens
ccuguuaguccagaaaggauacggauagauag

SEQ ID NO: 10910 - RNA, 32 nt, Homo Sapiens
uagugccauauauuuuuaagacuuuucuuucc

SEQ ID NO: 10911 - RNA, 32 nt, Homo Sapiens
uggagcccuaaacaauaaaaauaaacauguuu

SEQ ID NO: 10912 - RNA, 29 nt, Homo Sapiens
agaagucacugucacagaggcaagcggug

SEQ ID NO: 10913 - RNA, 32 nt, Homo Sapiens
cuggcuucggagccgcuggacacgcugcgcgc

SEQ ID NO: 10914 - RNA, 32 nt, Homo Sapiens
guugggggcuaagaagcaaagggcguggaagg

SEQ ID NO: 10915 - RNA, 32 nt, Homo Sapiens
uguggcacucaucuguauccagaaauaauaug

SEQ ID NO: 10916 - RNA, 32 nt, Homo Sapiens
gaggcugccguccucuccuccucgcgccccac

SEQ ID NO: 10917 - RNA, 32 nt, Homo Sapiens
ugugaggaaggggcccugccacucuccccaag

SEQ ID NO: 10918 - RNA, 32 nt, Homo Sapiens
uuaaauguuuuuauauucucuuguuguaauac

SEQ ID NO: 10919 - RNA, 32 nt, Homo Sapiens
caguagaacuagaaacaaaacccuaacuugug

SEQ ID NO: 10920 - RNA, 32 nt, Homo Sapiens
aaauaugguauauaaaaguaacauguuuauau

SEQ ID NO: 10921 - RNA, 32 nt, Homo Sapiens
aaaaacuuggccccagaugcuugucccuucug

SEQ ID NO: 10922 - RNA, 32 nt, Homo Sapiens
cuucgcuccgguccucggaucccgagcgcggg

SEQ ID NO: 10923 - RNA, 32 nt, Homo Sapiens
caacuggaauaauauaguaauccuguaacugg

SEQ ID NO: 10924 - RNA, 32 nt, Homo Sapiens
gggcugaggaggcaaugggaaccucccuggcc

SEQ ID NO: 10925 - RNA, 32 nt, Homo Sapiens
uuuaauaaaauaugguggucuuucuuaaaaaa

SEQ ID NO: 10926 - RNA, 32 nt, Homo Sapiens
uaugcuuugcacuuacugcugcguucccuuca

SEQ ID NO: 10927 - RNA, 32 nt, Homo Sapiens
cacuaauauaaauuauuccaagucuuuaagga

SEQ ID NO: 10928 - RNA, 28 nt, Homo Sapiens
guggggcgggugccgccgagguagccac

SEQ ID NO: 10929 - RNA, 32 nt, Homo Sapiens
gcaugggccccgagccuuggaggagcacuggc

SEQ ID NO: 10930 - RNA, 32 nt, Homo Sapiens
uagguuucauacucuaauuuuacuuuaaguaa

SEQ ID NO: 10931 - RNA, 32 nt, Homo Sapiens
uguuucucugcacuauggauuuugagcauuua

SEQ ID NO: 10932 - RNA, 32 nt, Homo Sapiens
gcccccucguuccuuccccagcccuuuagaga

SEQ ID NO: 10933 - RNA, 32 nt, Homo Sapiens
gccagccucucccgcgcacguugccuggccuc

SEQ ID NO: 10934 - RNA, 32 nt, Homo Sapiens
ccaugauugcacugucgcacuccagccuggau

SEQ ID NO: 10935 - RNA, 32 nt, Homo Sapiens
ccgcaggccgacuucacagccaggcgcgcgcg

SEQ ID NO: 10936 - RNA, 32 nt, Homo Sapiens
uucuccacacuuguaugccaauguagagaaga

SEQ ID NO: 10937 - RNA, 32 nt, Homo Sapiens
ugaugaucuguggcagaagugauccuuauuuu

SEQ ID NO: 10938 - RNA, 32 nt, Homo Sapiens
aaaaguaagcagcugaggaauuacuaucacuc

SEQ ID NO: 10939 - RNA, 32 nt, Homo Sapiens
cgcgagugaagggacaggauggcuuagguacc

SEQ ID NO: 10940 - RNA, 32 nt, Homo Sapiens
cuaacaggccccaguguguguuguuccccucc

SEQ ID NO: 10941 - RNA, 32 nt, Homo Sapiens
aaaccagguguuucugucucuuucugagucac

SEQ ID NO: 10942 - RNA, 32 nt, Homo Sapiens
ccagugcucccuccuuucauguacuuggccug

SEQ ID NO: 10943 - RNA, 32 nt, Homo Sapiens
cccuccugccugugucccagugagaacugacc

SEQ ID NO: 10944 - RNA, 32 nt, Homo Sapiens
accucuguuuuaaaaguguguaauguuugauu

SEQ ID NO: 10945 - RNA, 32 nt, Homo Sapiens
ggcaaugccuugcuuuccugcuguugaacaug

SEQ ID NO: 10946 - RNA, 32 nt, Homo Sapiens
aaccuuucaagcggccagaaccccugcaaauc

SEQ ID NO: 10947 - RNA, 32 nt, Homo Sapiens
gcugagggaggguggagggucucaaggcaacg

SEQ ID NO: 10948 - RNA, 32 nt, Homo Sapiens
ucugggauccugaguguccuguggguucaucu

SEQ ID NO: 10949 - RNA, 26 nt, Homo Sapiens
cauggccuggacugcgcgggaccgcg

SEQ ID NO: 10950 - RNA, 32 nt, Homo Sapiens
cuucgcugcaggaaaucagggauuaucccuua

SEQ ID NO: 10951 - RNA, 32 nt, Homo Sapiens
gagccucgcgcggcgcuggagagagacaagau

SEQ ID NO: 10952 - RNA, 32 nt, Homo Sapiens
uaggagcucagaauggaaugcauaaagcuuca

SEQ ID NO: 10953 - RNA, 32 nt, Homo Sapiens
agccagcccuccccgcggccggcucggcuccu

SEQ ID NO: 10954 - RNA, 32 nt, Homo Sapiens
gugcccagaaaggcggcgacgcggcggaugac

SEQ ID NO: 10955 - RNA, 32 nt, Homo Sapiens
gggcagcagcggggcugucuaucccggcugag

SEQ ID NO: 10956 - RNA, 31 nt, Homo Sapiens
guaaugaguucaugaaaugugcuguuauuuu

SEQ ID NO: 10957 - RNA, 32 nt, Homo Sapiens
ugaauguauaaaauaagaguaaaugcccuaca

SEQ ID NO: 10958 - RNA, 32 nt, Homo Sapiens
ccuccucccucuauuacuguuucaccagagcu

SEQ ID NO: 10959 - RNA, 32 nt, Homo Sapiens
aggaagcagcucaggacagggaagacaaagua

SEQ ID NO: 10960 - RNA, 32 nt, Homo Sapiens
ggccuggaagaccaccugccccggccccucuc

SEQ ID NO: 10961 - RNA, 32 nt, Homo Sapiens
cagccacaucuuucuuauuaguuuacagugaa

SEQ ID NO: 10962 - RNA, 32 nt, Homo Sapiens
uuaugaagaaaacaguuuuauuugagugcuuu

SEQ ID NO: 10963 - RNA, 32 nt, Homo Sapiens
uaauuuccucuucugcauaaaaguauaguaaa

SEQ ID NO: 10964 - RNA, 32 nt, Homo Sapiens
gaaucaagugaacagaaaguguugauggggau

SEQ ID NO: 10965 - RNA, 32 nt, Homo Sapiens
uugguggacuuuccccaccuacucccaagagc

SEQ ID NO: 10966 - RNA, 32 nt, Homo Sapiens
ccacccaggaccaggucuguguggggaugugc

SEQ ID NO: 10967 - RNA, 32 nt, Homo Sapiens
caaagaauacuagaaugguagcacuacccggc

SEQ ID NO: 10968 - RNA, 32 nt, Homo Sapiens
agaacagaaaaauuauuaugucuguguucccu

SEQ ID NO: 10969 - RNA, 32 nt, Homo Sapiens
caugagccacuguguccuucccugccuuuuuu

SEQ ID NO: 10970 - RNA, 32 nt, Homo Sapiens
ugccuguaauccuagcacuuugggggaccaag

SEQ ID NO: 10971 - RNA, 32 nt, Homo Sapiens
acaguuuguuuauucuucuguugauggacguu

SEQ ID NO: 10972 - RNA, 32 nt, Homo Sapiens
cuuuguuuuuguuuuucuuuuguaccuagucu

SEQ ID NO: 10973 - RNA, 32 nt, Homo Sapiens
cuccuucaaaaauggaggauggaaagcccguu

SEQ ID NO: 10974 - RNA, 32 nt, Homo Sapiens
ccacugcagauggaguuuuagaguaguaauga

SEQ ID NO: 10975 - RNA, 32 nt, Homo Sapiens
agcagcauuucccuuucuuauucccagaagag

SEQ ID NO: 10976 - RNA, 32 nt, Homo Sapiens
aguugguaaaauguaauaauauggcagaauuu

SEQ ID NO: 10977 - RNA, 32 nt, Homo Sapiens
guuguuagagcgucucgugugugcuagacgca

SEQ ID NO: 10978 - RNA, 30 nt, Homo Sapiens
agcgcgcuccggcgcgcggaaccaggcucc

SEQ ID NO: 10979 - RNA, 32 nt, Homo Sapiens
guggggcugggccuggguggccccaccagccc

SEQ ID NO: 10980 - RNA, 32 nt, Homo Sapiens
gagcaguuucucauuacugucuguggcuaagu

SEQ ID NO: 10981 - RNA, 32 nt, Homo Sapiens
gucauagaauacuuaguucugcuagauauucu

SEQ ID NO: 10982 - RNA, 32 nt, Homo Sapiens
aucauuccaucucaauguuuuacaauaaaaua

SEQ ID NO: 10983 - RNA, 32 nt, Homo Sapiens
uuagacugcacuuuucuguuccguuuacucug

SEQ ID NO: 10984 - RNA, 32 nt, Homo Sapiens
agaaccucaaaauaaaauugcuaaguuuaaaa

SEQ ID NO: 10985 - RNA, 32 nt, Homo Sapiens
gaucugagcaaauaagauuaaguaaaacaaau

SEQ ID NO: 10986 - RNA, 32 nt, Homo Sapiens
cagcucuuuccaccacacuccaacauucucaa

SEQ ID NO: 10987 - RNA, 32 nt, Homo Sapiens
aaucuguaccuuuaauauguccuacuuuuggc

SEQ ID NO: 10988 - RNA, 32 nt, Homo Sapiens
ucagauacugucaacuccauccuucugucagg

SEQ ID NO: 10989 - RNA, 32 nt, Homo Sapiens
uagccuaugauaguaauuuaauguagaaugaa

SEQ ID NO: 10990 - RNA, 32 nt, Homo Sapiens
ccgagcguccccuccccccacccgucgggcuc

SEQ ID NO: 10991 - RNA, 32 nt, Homo Sapiens
ccugucucccccuucccuccccaccggcccgg

SEQ ID NO: 10992 - RNA, 32 nt, Homo Sapiens
uuuguggaaauggaauaaaaacaaggauguug

SEQ ID NO: 10993 - RNA, 32 nt, Homo Sapiens
gacaaaccaaacaaaaauauauguuuuuacuu

SEQ ID NO: 10994 - RNA, 32 nt, Homo Sapiens
aggaugaggaagaggagcuuguggcuauuguu

SEQ ID NO: 10995 - RNA, 32 nt, Homo Sapiens
ugccuugcuugcccucuggccccgccccaacu

SEQ ID NO: 10996 - RNA, 32 nt, Homo Sapiens
gacccaccccugugcuccgugccuccaccacc

SEQ ID NO: 10997 - RNA, 32 nt, Homo Sapiens
ccguuguggcgagcgcuacacgaggcaaacga

SEQ ID NO: 10998 - RNA, 25 nt, Homo Sapiens
auggcggagcugcagaugcugcugg

SEQ ID NO: 10999 - RNA, 32 nt, Homo Sapiens
cagaauacaaauaaaaugagauacaugcaaaa

SEQ ID NO: 11000 - RNA, 32 nt, Homo Sapiens
ucuauuuguaaauucuuaagcaaauagaagcc

SEQ ID NO: 11001 - RNA, 32 nt, Homo Sapiens
cauuguacauucaaagaaaauguaaguuugga

SEQ ID NO: 11002 - RNA, 32 nt, Homo Sapiens
cacacagcuggcuccaggaaaauacaccuguu

SEQ ID NO: 11003 - RNA, 32 nt, Homo Sapiens
uaaaugguugucacacuucauuguagguaaga

SEQ ID NO: 11004 - RNA, 32 nt, Homo Sapiens
auggacuuauugugguuuaucugagagguucu

SEQ ID NO: 11005 - RNA, 32 nt, Homo Sapiens
cagggggcacagugaagugcugaagggcuucu

SEQ ID NO: 11006 - RNA, 32 nt, Homo Sapiens
cuaacuuaucugggaaggcuggggaaguaggc

SEQ ID NO: 11007 - RNA, 32 nt, Homo Sapiens
gagcugucacgcugguaccacagucugacuug

SEQ ID NO: 11008 - RNA, 32 nt, Homo Sapiens
ggucgccuugcuugccagcaguugcucccuua

SEQ ID NO: 11009 - RNA, 32 nt, Homo Sapiens
ggcuggaggcggagugggaggagcuggagcca

SEQ ID NO: 11010 - RNA, 32 nt, Homo Sapiens
auacauguauggaaacauauucagauugggaa

SEQ ID NO: 11011 - RNA, 32 nt, Homo Sapiens
ccugcccgugaaauggcugugcucccggucug

SEQ ID NO: 11012 - RNA, 32 nt, Homo Sapiens
auguggagauggaagguagagaaggauacagu

SEQ ID NO: 11013 - RNA, 30 nt, Homo Sapiens
ccccgccuucagaaacaccagucggugcuu

SEQ ID NO: 11014 - RNA, 30 nt, Homo Sapiens
ccagcggcgcccgggccagcagcgauugga

SEQ ID NO: 11015 - RNA, 32 nt, Homo Sapiens
guaaccagacugccuuuuguccaguggcuguc

SEQ ID NO: 11016 - RNA, 32 nt, Homo Sapiens
uagcucagaccuaagcuaauuauuuaaaauaa

SEQ ID NO: 11017 - RNA, 32 nt, Homo Sapiens
uuguucauuaauuuugucaguauuacaccaaa

SEQ ID NO: 11018 - RNA, 32 nt, Homo Sapiens
caacaguuuauauggauauuuuccugcuuuaa

SEQ ID NO: 11019 - RNA, 32 nt, Homo Sapiens
caagaacucuucuauuuauuaaggaaaauguc

SEQ ID NO: 11020 - RNA, 32 nt, Homo Sapiens
ugcucagaugggcaucacuugacauagcaugc

SEQ ID NO: 11021 - RNA, 32 nt, Homo Sapiens
aaugaauagugggauauuuugggccauuuuaa

SEQ ID NO: 11022 - RNA, 32 nt, Homo Sapiens
uagguuuuauuacaacuguuaaggagguuuug

SEQ ID NO: 11023 - RNA, 32 nt, Homo Sapiens
cuaacagucaagaaacaaaaaaaaaaaaaaaa

SEQ ID NO: 11024 - RNA, 32 nt, Homo Sapiens
agcaggauuauuacagaaccuugugaagccaa

SEQ ID NO: 11025 - RNA, 32 nt, Homo Sapiens
acacacacauauauauaucauauagcuuaagc

SEQ ID NO: 11026 - RNA, 32 nt, Homo Sapiens
cucccaggaggagggauucccugacuuugaca

SEQ ID NO: 11027 - RNA, 32 nt, Homo Sapiens
uaguaauuacagacauaacagcagaaaguccu

SEQ ID NO: 11028 - RNA, 32 nt, Homo Sapiens
uguuuugacuaacagagcuggaggucaagucc

SEQ ID NO: 11029 - RNA, 32 nt, Homo Sapiens
gaucacaaaaaacuucuguucauccccaccuu

SEQ ID NO: 11030 - RNA, 32 nt, Homo Sapiens
cugcggaugggggcugcccccggggccugagc

SEQ ID NO: 11031 - RNA, 32 nt, Homo Sapiens
uuuggaauauauuuuaaaaugauuggccuguc

SEQ ID NO: 11032 - RNA, 32 nt, Homo Sapiens
guuuuaaugauguauuugaugaauuuaaacuu

SEQ ID NO: 11033 - RNA, 32 nt, Homo Sapiens
gagaugaaggcacacucauaccacauacaagg

SEQ ID NO: 11034 - RNA, 32 nt, Homo Sapiens
ggcugguggugcucgcugcugcugcugagagg

SEQ ID NO: 11035 - RNA, 32 nt, Homo Sapiens
accguauucgugcauuuuuggaugcauuuuua

SEQ ID NO: 11036 - RNA, 32 nt, Homo Sapiens
ucgucccgaagucggccucuccaggcccagcu

SEQ ID NO: 11037 - RNA, 32 nt, Homo Sapiens
uaagucaaucuccaguuccuuuugccuccugg

SEQ ID NO: 11038 - RNA, 32 nt, Homo Sapiens
uguguugugggaagaaacuaaugggagguaau

SEQ ID NO: 11039 - RNA, 32 nt, Homo Sapiens
cccuucuaagacaaaaccaggguccauacugc

SEQ ID NO: 11040 - RNA, 32 nt, Homo Sapiens
aucauaagcaaaugcaguuucuggcuaugguu

SEQ ID NO: 11041 - RNA, 32 nt, Homo Sapiens
aaauuguugcuaguguaucaguucuuaagaug

SEQ ID NO: 11042 - RNA, 32 nt, Homo Sapiens
cuuuguaaaaauuguauauaaagaacuguaua

SEQ ID NO: 11043 - RNA, 32 nt, Homo Sapiens
auuugccaaacauugcagcaaacaagugugcg

SEQ ID NO: 11044 - RNA, 32 nt, Homo Sapiens
gcucucaagcaucuuggucucugcuaagaaga

SEQ ID NO: 11045 - RNA, 32 nt, Homo Sapiens
ccagaaggugggguuggcagggggaggguagg

SEQ ID NO: 11046 - RNA, 32 nt, Homo Sapiens
uuuagggauauuuuaaucuauguauuugguaa

SEQ ID NO: 11047 - RNA, 32 nt, Homo Sapiens
cauuaaggcaacaaaaucccugccuucaccau

SEQ ID NO: 11048 - RNA, 32 nt, Homo Sapiens
cugugguaaagaauugcuauaggaacagccag

SEQ ID NO: 11049 - RNA, 32 nt, Homo Sapiens
ugggcuuggacccagggccugagaccuuugug

SEQ ID NO: 11050 - RNA, 32 nt, Homo Sapiens
uaguauuuauuuuacacccccucucccacgaa

SEQ ID NO: 11051 - RNA, 32 nt, Homo Sapiens
cagaagagaaacugaggcccagaggcggaggg

SEQ ID NO: 11052 - RNA, 32 nt, Homo Sapiens
aaagcuggaaaacuugacuuuucuuuuuggua

SEQ ID NO: 11053 - RNA, 32 nt, Homo Sapiens
ggccagcccuucccucccagucggccuccuuc

SEQ ID NO: 11054 - RNA, 32 nt, Homo Sapiens
aggaaguggcggcgggcgucgcgagcggugac

SEQ ID NO: 11055 - RNA, 32 nt, Homo Sapiens
gccugcgugcugccgaagcagggcgccgaguc

SEQ ID NO: 11056 - RNA, 32 nt, Homo Sapiens
auuugauauccacaacuuauuuuugguaggaa

SEQ ID NO: 11057 - RNA, 32 nt, Homo Sapiens
agacccauuaggcugcugcugcugcuuccaaa

SEQ ID NO: 11058 - RNA, 32 nt, Homo Sapiens
gacugcagaucagaucaguucucuuuguggau

SEQ ID NO: 11059 - RNA, 32 nt, Homo Sapiens
ggaggccgagaccggagcgccgcucgccgcag

SEQ ID NO: 11060 - RNA, 32 nt, Homo Sapiens
uuccaccagagacacauugagaaggaggaaac

SEQ ID NO: 11061 - RNA, 32 nt, Homo Sapiens
uaugcaggaaaaaaaaucauuccugaacuuag

SEQ ID NO: 11062 - RNA, 32 nt, Homo Sapiens
cugauguguggccuuauaugccagucacaccc

SEQ ID NO: 11063 - RNA, 32 nt, Homo Sapiens
cuguauuuaaaaaacuaacacccagucuguuc

SEQ ID NO: 11064 - RNA, 32 nt, Homo Sapiens
agguggcccuggucuugccccauccaucccac

SEQ ID NO: 11065 - RNA, 32 nt, Homo Sapiens
cucccccaccgccgccucggagcucagcacac

SEQ ID NO: 11066 - RNA, 32 nt, Homo Sapiens
gugagccuuuuggggugaacugcaaguauuug

SEQ ID NO: 11067 - RNA, 32 nt, Homo Sapiens
ucugcaggacuuuaaagcuuugaaaggccaau

SEQ ID NO: 11068 - RNA, 32 nt, Homo Sapiens
cuggaaggcagacaaaaaugagaaccugaagc

SEQ ID NO: 11069 - RNA, 32 nt, Homo Sapiens
aucuuuuuaaaagauagaagauacuuuuaaga

SEQ ID NO: 11070 - RNA, 32 nt, Homo Sapiens
accuccccaagccacaccccuagcuucccucc

SEQ ID NO: 11071 - RNA, 32 nt, Homo Sapiens
ugcugucuuacuggcugucuacauggggcuac

SEQ ID NO: 11072 - RNA, 32 nt, Homo Sapiens
gaagccgcagucgccuucgaaaccgcuaugcc

SEQ ID NO: 11073 - RNA, 32 nt, Homo Sapiens
cauaaccuagcuucuuuuuacucuugccucug

SEQ ID NO: 11074 - RNA, 32 nt, Homo Sapiens
cacauuucuuagaacaaauucugcccuuuuuu

SEQ ID NO: 11075 - RNA, 32 nt, Homo Sapiens
uaacacgguaacacggugaaaccuggcuaaca

SEQ ID NO: 11076 - RNA, 32 nt, Homo Sapiens
ucugucccccgcauuaaugacucucaggaagg

SEQ ID NO: 11077 - RNA, 32 nt, Homo Sapiens
auuccuaaaaauuuuuagggacaaguuuuguu

SEQ ID NO: 11078 - RNA, 32 nt, Homo Sapiens
gcuccaggcccaugcacugaggaggcggaaac

SEQ ID NO: 11079 - RNA, 32 nt, Homo Sapiens
agagauuggccauuccgcuacugcgcaaagau

SEQ ID NO: 11080 - RNA, 32 nt, Homo Sapiens
gcagugguucuucuguuggggaccagugagua

SEQ ID NO: 11081 - RNA, 32 nt, Homo Sapiens
ucauucuuuacuaacuuuuaguuacuaaauua

SEQ ID NO: 11082 - RNA, 32 nt, Homo Sapiens
aaccgccacagcacucaaagcccacugcggaa

SEQ ID NO: 11083 - RNA, 32 nt, Homo Sapiens
cagauagaagacacuuuuuucuccaaaaugau

SEQ ID NO: 11084 - RNA, 32 nt, Homo Sapiens
uggagccuguccagcuggcccgggcccuggcc

SEQ ID NO: 11085 - RNA, 32 nt, Homo Sapiens
cuaccagcagauucugcagaucagcgcauuuu

SEQ ID NO: 11086 - RNA, 32 nt, Homo Sapiens
ggauaauuucuuaaauauugaugaacuuugga

SEQ ID NO: 11087 - RNA, 32 nt, Homo Sapiens
uacacuacauaaauuguaaguaauuguggguc

SEQ ID NO: 11088 - RNA, 32 nt, Homo Sapiens
aucaugucugguggcuccauggauuauaacag

SEQ ID NO: 11089 - RNA, 32 nt, Homo Sapiens
agcagcaucccucccccgacccauagccaugu

SEQ ID NO: 11090 - RNA, 32 nt, Homo Sapiens
uugucggcugcggguauauuccaauuccccgu

SEQ ID NO: 11091 - RNA, 32 nt, Homo Sapiens
gcccccugccagccggggcucgcccacucauc

SEQ ID NO: 11092 - RNA, 32 nt, Homo Sapiens
gcccugcucauucccacucaccagcugagguc

SEQ ID NO: 11093 - RNA, 32 nt, Homo Sapiens
uggaacucaagccccaagacauccccuuagau

SEQ ID NO: 11094 - RNA, 32 nt, Homo Sapiens
auccugauuccauucucuucaacuaaaucaua

SEQ ID NO: 11095 - RNA, 32 nt, Homo Sapiens
gugugagguggcggccuggugcccgguggagg

SEQ ID NO: 11096 - RNA, 32 nt, Homo Sapiens
cggaggccucagcagccaccccggccaccucc

SEQ ID NO: 11097 - RNA, 32 nt, Homo Sapiens
agcugaugaagaggacgccgccagcgagucca

SEQ ID NO: 11098 - RNA, 32 nt, Homo Sapiens
ccccaccccucccccggcucccccgguguccg

SEQ ID NO: 11099 - RNA, 32 nt, Homo Sapiens
agagggcuuccagauagcugaagacguggagg

SEQ ID NO: 11100 - RNA, 32 nt, Homo Sapiens
gagccaauuauaccucuuuucuuauaaauuac

SEQ ID NO: 11101 - RNA, 32 nt, Homo Sapiens
gucuuaugugcaaagaucguaaaaggacaaaa

SEQ ID NO: 11102 - RNA, 32 nt, Homo Sapiens
aaacugccgggcccgccucgccgccgggaccc

SEQ ID NO: 11103 - RNA, 32 nt, Homo Sapiens
cccagcacucagagacacaacacacaugugua

SEQ ID NO: 11104 - RNA, 32 nt, Homo Sapiens
gacguguguauacacacacacacacacacaca

SEQ ID NO: 11105 - RNA, 32 nt, Homo Sapiens
ucagugaggaccagcuaggcucucccaggugc

SEQ ID NO: 11106 - RNA, 32 nt, Homo Sapiens
acacauuuaugaaaaucuacuuguuuaggcuu

SEQ ID NO: 11107 - RNA, 32 nt, Homo Sapiens
aauaaagucuuacugugcuuuaauagguagca

SEQ ID NO: 11108 - RNA, 32 nt, Homo Sapiens
gcgucauggggucuuucauccagacugcguuu

SEQ ID NO: 11109 - RNA, 31 nt, Homo Sapiens
uccaaagcugaggucgcuccuacggccuggg

SEQ ID NO: 11110 - RNA, 32 nt, Homo Sapiens
cuucaaguugcuuugucuuuuccauccucauc

SEQ ID NO: 11111 - RNA, 32 nt, Homo Sapiens
cagaccuguuucucagggauaugacgaggcug

SEQ ID NO: 11112 - RNA, 32 nt, Homo Sapiens
uuuaucucagaaucugaaagcggaaggccagg

SEQ ID NO: 11113 - RNA, 32 nt, Homo Sapiens
aaggguauauucuaauaauaugacucaauaaa

SEQ ID NO: 11114 - RNA, 32 nt, Homo Sapiens
gagaugcuuuuucauucuuucauucaaaaagu

SEQ ID NO: 11115 - RNA, 32 nt, Homo Sapiens
ggccacccacgggcccucccccaaccucucuc

SEQ ID NO: 11116 - RNA, 32 nt, Homo Sapiens
accugggcucugcuuccuccgccugcugccug

SEQ ID NO: 11117 - RNA, 32 nt, Homo Sapiens
auuugaugcgggagguggguggugugcuugcu

SEQ ID NO: 11118 - RNA, 32 nt, Homo Sapiens
cugcgggcucugcggcgcccggugcucugcaa

SEQ ID NO: 11119 - RNA, 32 nt, Homo Sapiens
gaagccuuccaccugcgucacccaggccggga

SEQ ID NO: 11120 - RNA, 32 nt, Homo Sapiens
agagugaaaaggaggggcagauuccauccaag

SEQ ID NO: 11121 - RNA, 29 nt, Homo Sapiens
uauuacauauguauguauuauauauccac

SEQ ID NO: 11122 - RNA, 32 nt, Homo Sapiens
cuggccaucucagggaggggccaccagguucc

SEQ ID NO: 11123 - RNA, 32 nt, Homo Sapiens
auuccaaaggauuuuuaagaauuuaaacugca

SEQ ID NO: 11124 - RNA, 32 nt, Homo Sapiens
uggggaaccccucccauuaaagauccgggcag

SEQ ID NO: 11125 - RNA, 32 nt, Homo Sapiens
cagccugugcuuguucuugggguuugagggaa

SEQ ID NO: 11126 - RNA, 32 nt, Homo Sapiens
cuagucgcggcuacggcgucaugggugagauc

SEQ ID NO: 11127 - RNA, 32 nt, Homo Sapiens
gcauccggaaagggcagaaauccaccuguagc

SEQ ID NO: 11128 - RNA, 32 nt, Homo Sapiens
ugagcugccuucuggcuauucccuggggaagc

SEQ ID NO: 11129 - RNA, 32 nt, Homo Sapiens
aguuaauuuuaguagcugaagaacgucuaguu

SEQ ID NO: 11130 - RNA, 32 nt, Homo Sapiens
cgggggauccugaggcccgaagugaugccacc

SEQ ID NO: 11131 - RNA, 32 nt, Homo Sapiens
aacauucuucagaaaugcaacuucuucuauuu

SEQ ID NO: 11132 - RNA, 32 nt, Homo Sapiens
cguggcgauggcggccugcgcgccgcgccucg

SEQ ID NO: 11133 - RNA, 32 nt, Homo Sapiens
auuguuuucuauuuuacucagaucauuucuag

SEQ ID NO: 11134 - RNA, 32 nt, Homo Sapiens
ccgucaccgccuccgcgccgccccugcgggcu

SEQ ID NO: 11135 - RNA, 32 nt, Homo Sapiens
aaguuccacucuccagaggaagcuauuguuaa

SEQ ID NO: 11136 - RNA, 32 nt, Homo Sapiens
aaaagcaaagugauugaguagguaauguucaa

SEQ ID NO: 11137 - RNA, 32 nt, Homo Sapiens
gguaagggggcuucacucucuagaucagccug

SEQ ID NO: 11138 - RNA, 32 nt, Homo Sapiens
ccuuagagcaaaguuuccuuuaugguaucugu

SEQ ID NO: 11139 - RNA, 32 nt, Homo Sapiens
uccgccgccucucugccuaaugagcugcacca

SEQ ID NO: 11140 - RNA, 30 nt, Homo Sapiens
aaugccuuuuauuugggggaacacaaaacc

SEQ ID NO: 11141 - RNA, 32 nt, Homo Sapiens
aucuuccugaugcaagcuuagauggaagucaa

SEQ ID NO: 11142 - RNA, 32 nt, Homo Sapiens
ggucuuccugcccgcgcgaucgcuggggcagg

SEQ ID NO: 11143 - RNA, 32 nt, Homo Sapiens
agcugagaacagugguaaaaacucguuuacag

SEQ ID NO: 11144 - RNA, 32 nt, Homo Sapiens
aggaaggcaucugucuccugcucgucccuggg

SEQ ID NO: 11145 - RNA, 32 nt, Homo Sapiens
uuuuugucuuagauuuuuuucuuaaucaaguu

SEQ ID NO: 11146 - RNA, 32 nt, Homo Sapiens
gagcgaagugucugcggguccugaagggugag

SEQ ID NO: 11147 - RNA, 32 nt, Homo Sapiens
ccaggaaucguguuucaauuguaaccaagaaa

SEQ ID NO: 11148 - RNA, 32 nt, Homo Sapiens
uuagaguauuuuuguauaaaauccauagauuu

SEQ ID NO: 11149 - RNA, 32 nt, Homo Sapiens
uagaaaauaaucccuuuuuuuuuuuuuuuuuu

SEQ ID NO: 11150 - RNA, 32 nt, Homo Sapiens
cgcccccuuggcccgcgcgcccguggucacag

SEQ ID NO: 11151 - RNA, 32 nt, Homo Sapiens
ggagggccuaguggcugaaacugcccugcuug

SEQ ID NO: 11152 - RNA, 32 nt, Homo Sapiens
aauugaagaaauuuaagcugcaaaaccaaauc

SEQ ID NO: 11153 - RNA, 32 nt, Homo Sapiens
ugggcggcgagggggcccggggaggggacaga

SEQ ID NO: 11154 - RNA, 32 nt, Homo Sapiens
agccuucccgucccuuucucaucggccuugua

SEQ ID NO: 11155 - RNA, 32 nt, Homo Sapiens
gcaguaagaugguaacaaaaccucauauuguc

SEQ ID NO: 11156 - RNA, 32 nt, Homo Sapiens
uccgcggacgcgugggcgagaagugcuuccaa

SEQ ID NO: 11157 - RNA, 32 nt, Homo Sapiens
auguuaaguccucccugacuuuucuguggaug

SEQ ID NO: 11158 - RNA, 32 nt, Homo Sapiens
gguauaaauaaagaauuauuuguuuuguuuuc

SEQ ID NO: 11159 - RNA, 28 nt, Homo Sapiens
aggauguacagcucuggguggccugcag

SEQ ID NO: 11160 - RNA, 30 nt, Homo Sapiens
cagcgaugccucgcucagcgccugcagaug

SEQ ID NO: 11161 - RNA, 32 nt, Homo Sapiens
aaguaugagaucugguuccauccaguaagaca

SEQ ID NO: 11162 - RNA, 32 nt, Homo Sapiens
ggcucgcuuucuggcuccuuccgcgcggcgag

SEQ ID NO: 11163 - RNA, 32 nt, Homo Sapiens
uuuacugaauaagaugacacguggugauugug

SEQ ID NO: 11164 - RNA, 32 nt, Homo Sapiens
agaaguggugauaucauugaccaagggccugg

SEQ ID NO: 11165 - RNA, 31 nt, Homo Sapiens
aggaggcugccggaacucaagaggcagaaaa

SEQ ID NO: 11166 - RNA, 32 nt, Homo Sapiens
cugguuucuuguuuuacuucucauuaaagcua

SEQ ID NO: 11167 - RNA, 32 nt, Homo Sapiens
caccugagagagugacacaccauguacauggc

SEQ ID NO: 11168 - RNA, 32 nt, Homo Sapiens
gggcccuccgagguggaacagcagcuacaagc

SEQ ID NO: 11169 - RNA, 32 nt, Homo Sapiens
agggguuaauauccaaaauauguaaaauauuc

SEQ ID NO: 11170 - RNA, 32 nt, Homo Sapiens
acuguuuuucuuuuacuucaguuuuuuaaaaa

SEQ ID NO: 11171 - RNA, 32 nt, Homo Sapiens
gacaguguuaacuuuuuuuuuauuguggguuu

SEQ ID NO: 11172 - RNA, 32 nt, Homo Sapiens
aucugaaaucaguaagauaccuugagaaaaac

SEQ ID NO: 11173 - RNA, 32 nt, Homo Sapiens
cacgacgcucugccccgccccgcggccccuga

SEQ ID NO: 11174 - RNA, 32 nt, Homo Sapiens
cgcugucgccgccgcuaccucucccuguugcc

SEQ ID NO: 11175 - RNA, 32 nt, Homo Sapiens
uuuucuauaucauauugaucauuucaagugga

SEQ ID NO: 11176 - RNA, 32 nt, Homo Sapiens
cacgcggcggccggcgcgcuggaccgagaggu

SEQ ID NO: 11177 - RNA, 32 nt, Homo Sapiens
cauguccaaaaauaaagaccagaaugacauuu

SEQ ID NO: 11178 - RNA, 32 nt, Homo Sapiens
accgccccggcggcuucucccagcccucgagg

SEQ ID NO: 11179 - RNA, 32 nt, Homo Sapiens
agcguccccgucccguggagucgcuaaagcca

SEQ ID NO: 11180 - RNA, 32 nt, Homo Sapiens
ggguucccuuugccgauuucucucaccucacc

SEQ ID NO: 11181 - RNA, 32 nt, Homo Sapiens
guuuacaggaccacaguuguuucccuucuuga

SEQ ID NO: 11182 - RNA, 32 nt, Homo Sapiens
caggugcagcagagccgagccggccgcgcucc

SEQ ID NO: 11183 - RNA, 32 nt, Homo Sapiens
gaguauucuugacuaguguuuacuaucuauac

SEQ ID NO: 11184 - RNA, 32 nt, Homo Sapiens
gaaauggaguguucaauagauaccacgaauug

SEQ ID NO: 11185 - RNA, 32 nt, Homo Sapiens
gaugauggcuugagucagcugcagggcagugg

SEQ ID NO: 11186 - RNA, 32 nt, Homo Sapiens
gugaaaaaaaugcacuuuuuuauuuauuggaa

SEQ ID NO: 11187 - RNA, 32 nt, Homo Sapiens
ccgggaaagccagggugugccgggccaagaua

SEQ ID NO: 11188 - RNA, 32 nt, Homo Sapiens
uuaauaaauguaauaucccaauaaaaauagca

SEQ ID NO: 11189 - RNA, 32 nt, Homo Sapiens
uagaugucucgcuccaccugggucugggaccu

SEQ ID NO: 11190 - RNA, 29 nt, Homo Sapiens
gguguccauuaaagagcagacucagcguu

SEQ ID NO: 11191 - RNA, 32 nt, Homo Sapiens
uaagauuugucaaggcugacuacucacuucuc

SEQ ID NO: 11192 - RNA, 32 nt, Homo Sapiens
gaagcugcuaggggaaggacuggccguggcuc

SEQ ID NO: 11193 - RNA, 32 nt, Homo Sapiens
gcagcaauguaguaucaaacuaccacagaugc

SEQ ID NO: 11194 - RNA, 32 nt, Homo Sapiens
aaauaagaaaaauuauauaaauuuuagaaguu

SEQ ID NO: 11195 - RNA, 32 nt, Homo Sapiens
aagugcaaagugugcgugaaaacuuuugaaac

SEQ ID NO: 11196 - RNA, 32 nt, Homo Sapiens
gcuagagugucgccuuguggguuccuguugcu

SEQ ID NO: 11197 - RNA, 32 nt, Homo Sapiens
gaggaggccuggcccacccaccccacucucug

SEQ ID NO: 11198 - RNA, 32 nt, Homo Sapiens
gcaugaaaaauauugcugaacuacuuuuggug

SEQ ID NO: 11199 - RNA, 32 nt, Homo Sapiens
gagacagagucuugcuuuguugccaggcugga

SEQ ID NO: 11200 - RNA, 32 nt, Homo Sapiens
agaucaaauaucuauguaaugaaaagagacuu

SEQ ID NO: 11201 - RNA, 32 nt, Homo Sapiens
guucuuugucauucuuuuuuuaacuuuuacuu

SEQ ID NO: 11202 - RNA, 32 nt, Homo Sapiens
uuuuuuaaaaauuuuccaaagcucggcagugu

SEQ ID NO: 11203 - RNA, 32 nt, Homo Sapiens
cucuuggaucacaaacaccgguaaaugagcag

SEQ ID NO: 11204 - RNA, 32 nt, Homo Sapiens
gccuucuccguccuguccccagcccacgugcu

SEQ ID NO: 11205 - RNA, 32 nt, Homo Sapiens
aaccgguuagucaauuuugucuuaauauuguu

SEQ ID NO: 11206 - RNA, 32 nt, Homo Sapiens
ucguccugaagucggccucuccaggcccagcu

SEQ ID NO: 11207 - RNA, 32 nt, Homo Sapiens
cgauggcaccagcauggaacacugcucgcugc

SEQ ID NO: 11208 - RNA, 32 nt, Homo Sapiens
guuucaguuucaucuggcauuccaacauguca

SEQ ID NO: 11209 - RNA, 32 nt, Homo Sapiens
ugugguuguauauauauguaaauuauauuucu

SEQ ID NO: 11210 - RNA, 32 nt, Homo Sapiens
aggcugggagggugaggcgccgcgcucugccg

SEQ ID NO: 11211 - RNA, 32 nt, Homo Sapiens
acuuuuuaaaaauuaucuuuuuauuugcuucg

SEQ ID NO: 11212 - RNA, 32 nt, Homo Sapiens
gccgcggucaccccggccucugccucuguccc

SEQ ID NO: 11213 - RNA, 32 nt, Homo Sapiens
cuaagaagaaugcaguuuggccucuuccuuaa

SEQ ID NO: 11214 - RNA, 32 nt, Homo Sapiens
caauuccccacuuuccauccaaggccaaagag

SEQ ID NO: 11215 - RNA, 32 nt, Homo Sapiens
ggagccaaaggucagcucucugcagcgcggga

SEQ ID NO: 11216 - RNA, 32 nt, Homo Sapiens
cauaauuugucaauaaagcugaaaacuuuugu

SEQ ID NO: 11217 - RNA, 32 nt, Homo Sapiens
gcaagagccuucagcaacucucuuccacccau

SEQ ID NO: 11218 - RNA, 32 nt, Homo Sapiens
uuggaaucgagugcauuuucugacauuugagu

SEQ ID NO: 11219 - RNA, 32 nt, Homo Sapiens
ggaggaggagcagggggugcugcguggaaggu

SEQ ID NO: 11220 - RNA, 32 nt, Homo Sapiens
aaucucagcucacugcaagcuccaccucccgg

SEQ ID NO: 11221 - RNA, 32 nt, Homo Sapiens
aaagaaccgaagagcaaacaaaaguucugcgu

SEQ ID NO: 11222 - RNA, 32 nt, Homo Sapiens
agauuauauugugaugcuggaacuuggaguga

SEQ ID NO: 11223 - RNA, 32 nt, Homo Sapiens
caucccacucacucugugucguacuuucauag

SEQ ID NO: 11224 - RNA, 32 nt, Homo Sapiens
uuugccaggcuguuuuccugugguuggacagu

SEQ ID NO: 11225 - RNA, 32 nt, Homo Sapiens
acuccuagccuuggggcagcugccgggcgagu

SEQ ID NO: 11226 - RNA, 32 nt, Homo Sapiens
ccucaugggaagaugucucagagccuuccaug

SEQ ID NO: 11227 - RNA, 32 nt, Homo Sapiens
acccccacccucccuuucccggucugcuaagu

SEQ ID NO: 11228 - RNA, 32 nt, Homo Sapiens
cggccucggccaccggcaggggaaccgagacc

SEQ ID NO: 11229 - RNA, 30 nt, Homo Sapiens
gagcagccauuguugagggaaaccuugcaa

SEQ ID NO: 11230 - RNA, 32 nt, Homo Sapiens
caacucgacgagcgcgcacccaccgcgccgga

SEQ ID NO: 11231 - RNA, 32 nt, Homo Sapiens
aaucuuuucagcuuauuaaguagcucuuuggu

SEQ ID NO: 11232 - RNA, 32 nt, Homo Sapiens
gacuguaaauuagugaagagugaauguaacuu

SEQ ID NO: 11233 - RNA, 32 nt, Homo Sapiens
cugccugaggugcugccuccucccagguggug

SEQ ID NO: 11234 - RNA, 32 nt, Homo Sapiens
cagcagagacagagccaggagcaguccagugg

SEQ ID NO: 11235 - RNA, 32 nt, Homo Sapiens
gcgcccugcccccggggcagcuuucaggacug

SEQ ID NO: 11236 - RNA, 32 nt, Homo Sapiens
acaugaauagcagaacugacuuugaaggaagg

SEQ ID NO: 11237 - RNA, 32 nt, Homo Sapiens
uuuucuuuuuaaauauggauuggaguuuccuc

SEQ ID NO: 11238 - RNA, 32 nt, Homo Sapiens
cuuugauuacaaucccccucuacacaagaauc

SEQ ID NO: 11239 - RNA, 32 nt, Homo Sapiens
aagacucgcucuucgggagcucgaauggcuuc

SEQ ID NO: 11240 - RNA, 32 nt, Homo Sapiens
cguucuguaaaaaguaauacugcuuuaaggua

SEQ ID NO: 11241 - RNA, 32 nt, Homo Sapiens
ugcacaaggaauguacugacaugaugaaccug

SEQ ID NO: 11242 - RNA, 32 nt, Homo Sapiens
uuaccccgcccgcgccagcgcugcaucccugg

SEQ ID NO: 11243 - RNA, 32 nt, Homo Sapiens
uggaguaaauuaauuaagaaugcggauauuaa

SEQ ID NO: 11244 - RNA, 32 nt, Homo Sapiens
aucauuuugugguaggcauggcugggaaugug

SEQ ID NO: 11245 - RNA, 32 nt, Homo Sapiens
aaugcugugaaugcggagggaagugauguuug

SEQ ID NO: 11246 - RNA, 32 nt, Homo Sapiens
cucuuaccccuugccucccagugguauuugaa

SEQ ID NO: 11247 - RNA, 32 nt, Homo Sapiens
ugaucgcacaaccugcaucuuuagugcuuucu

SEQ ID NO: 11248 - RNA, 32 nt, Homo Sapiens
gccccgaagccaggcucugugcuucugccuuu

SEQ ID NO: 11249 - RNA, 32 nt, Homo Sapiens
gcugggggucuggccuguccccggaggcauuc

SEQ ID NO: 11250 - RNA, 32 nt, Homo Sapiens
augacccaggacugauagauaugccuuacgga

SEQ ID NO: 11251 - RNA, 32 nt, Homo Sapiens
gcugaacuucgggugccggggaggagaaauug

SEQ ID NO: 11252 - RNA, 28 nt, Homo Sapiens
gggucaguggcuacgcaggcagagcuua

SEQ ID NO: 11253 - RNA, 32 nt, Homo Sapiens
aauaggccugaucaucugaaucuccuucagac

SEQ ID NO: 11254 - RNA, 32 nt, Homo Sapiens
agguuuugucugcggcucacccugcuacauuu

SEQ ID NO: 11255 - RNA, 32 nt, Homo Sapiens
auacacuggauaaagaaaauguggcacauaug

SEQ ID NO: 11256 - RNA, 32 nt, Homo Sapiens
cugaccugaggguggagaguggcaggaagcaa

SEQ ID NO: 11257 - RNA, 32 nt, Homo Sapiens
aaccuguauaucuauuuuggaacucuuugaau

SEQ ID NO: 11258 - RNA, 32 nt, Homo Sapiens
auucauaucuauuugcauuugauuucuagguc

SEQ ID NO: 11259 - RNA, 32 nt, Homo Sapiens
cuugauccaagagcucugucugaugccacuga

SEQ ID NO: 11260 - RNA, 32 nt, Homo Sapiens
cccacucagugccacucugugccacuccgugc

SEQ ID NO: 11261 - RNA, 32 nt, Homo Sapiens
aauacuuugccagcacugccuuugccagcauc

SEQ ID NO: 11262 - RNA, 32 nt, Homo Sapiens
guagauuaauaaaucuggcagcugauuucugc

SEQ ID NO: 11263 - RNA, 32 nt, Homo Sapiens
aacuuuuauuuuuuaauguacagauguacugu

SEQ ID NO: 11264 - RNA, 32 nt, Homo Sapiens
uucugcauaugcugcuuucucacucagcauca

SEQ ID NO: 11265 - RNA, 32 nt, Homo Sapiens
ggcgccgggggaggagggggcgcaccgggacu

SEQ ID NO: 11266 - RNA, 32 nt, Homo Sapiens
gcugacaggaggaugaguguguggcaggagga

SEQ ID NO: 11267 - RNA, 32 nt, Homo Sapiens
cuucaaauucuuaauaauuuuaucuuugucac

SEQ ID NO: 11268 - RNA, 32 nt, Homo Sapiens
uccuugcugcugucuggacauggguguugugg

SEQ ID NO: 11269 - RNA, 31 nt, Homo Sapiens
aagaugaaauaaaaaggccauauucagaguu

SEQ ID NO: 11270 - RNA, 32 nt, Homo Sapiens
cccacugcacuccagccugggcgacagagcca

SEQ ID NO: 11271 - RNA, 32 nt, Homo Sapiens
cccaaccgucaaccgaacacugcgcucuucga

SEQ ID NO: 11272 - RNA, 32 nt, Homo Sapiens
caacucggagagggcugcgagcauuucccucc

SEQ ID NO: 11273 - RNA, 32 nt, Homo Sapiens
ugucccuucugcugguagcaguguuguuagua

SEQ ID NO: 11274 - RNA, 32 nt, Homo Sapiens
gccucuucccgacuggcuucccguaguaccag

SEQ ID NO: 11275 - RNA, 32 nt, Homo Sapiens
ccagccggccccaccccugcucgccccuaucg

SEQ ID NO: 11276 - RNA, 32 nt, Homo Sapiens
agccuggguuacagagggaaaccuugucucua

SEQ ID NO: 11277 - RNA, 32 nt, Homo Sapiens
aaucgagacauuccucuugggcuuuuuguaac

SEQ ID NO: 11278 - RNA, 32 nt, Homo Sapiens
uugugagcaaaauaaguugaaaacacuaauaa

SEQ ID NO: 11279 - RNA, 32 nt, Homo Sapiens
acgaggucaggaguucgagaccagcugggcaa

SEQ ID NO: 11280 - RNA, 32 nt, Homo Sapiens
cggcggcagcggggcggcggggaagcguauac

SEQ ID NO: 11281 - RNA, 32 nt, Homo Sapiens
cccgcccgccgcggcccgaacucaugcagcuc

SEQ ID NO: 11282 - RNA, 32 nt, Homo Sapiens
cccagcacauaaagaacugcagccuugguacu

SEQ ID NO: 11283 - RNA, 32 nt, Homo Sapiens
aaaagcagggcuggggagaaugagauggacgc

SEQ ID NO: 11284 - RNA, 32 nt, Homo Sapiens
agcccccguggcuccgccucccggcccugggc

SEQ ID NO: 11285 - RNA, 32 nt, Homo Sapiens
aaaauacaaaaauuagccgagugugguggcuc

SEQ ID NO: 11286 - RNA, 32 nt, Homo Sapiens
uuguugaaagagauuagagaagaucaaaauaa

SEQ ID NO: 11287 - RNA, 32 nt, Homo Sapiens
uucucuugccucagccucccaaguagcugaga

SEQ ID NO: 11288 - RNA, 32 nt, Homo Sapiens
uuugauugacgaagaagucaccaugaaaauca

SEQ ID NO: 11289 - RNA, 32 nt, Homo Sapiens
gucuuuugcuuguacagaaucuguagugauuu

SEQ ID NO: 11290 - RNA, 31 nt, Homo Sapiens
gugcccgccccgcgccugccccgcgccucau

SEQ ID NO: 11291 - RNA, 32 nt, Homo Sapiens
cagccccaucuccucagcaccccaggaccuga

SEQ ID NO: 11292 - RNA, 32 nt, Homo Sapiens
ggccggcauuuucucuuguuacugagauguau

SEQ ID NO: 11293 - RNA, 32 nt, Homo Sapiens
uuaggugugggaaaaacuugaucugaaagaaa

SEQ ID NO: 11294 - RNA, 32 nt, Homo Sapiens
ccaccggcaccagugccucgcuccauuggcac

SEQ ID NO: 11295 - RNA, 32 nt, Homo Sapiens
uucccugaggcugaggcgcccggccucccgcc

SEQ ID NO: 11296 - RNA, 32 nt, Homo Sapiens
uuuaaccugcuuaauggcuacaguuuuuacau

SEQ ID NO: 11297 - RNA, 32 nt, Homo Sapiens
uccuguuagccccauggggcugccgggcuggc

SEQ ID NO: 11298 - RNA, 32 nt, Homo Sapiens
ucgacagcaugcuggccaacguggugaaaccc

SEQ ID NO: 11299 - RNA, 32 nt, Homo Sapiens
uuucuggccacacgcaguuucuggccacgcgc

SEQ ID NO: 11300 - RNA, 32 nt, Homo Sapiens
cggacggaaaagaaaaguugauuacaaacggg

SEQ ID NO: 11301 - RNA, 32 nt, Homo Sapiens
cgccagccgcaaccgaacuuggaccaaguacg

SEQ ID NO: 11302 - RNA, 32 nt, Homo Sapiens
agauugcuggguugggggcgugggaggcagaa

SEQ ID NO: 11303 - RNA, 32 nt, Homo Sapiens
uagacacggccuuuccucucugccucuggcuu

SEQ ID NO: 11304 - RNA, 32 nt, Homo Sapiens
guucagcugccucugcacccccucccaccccc

SEQ ID NO: 11305 - RNA, 32 nt, Homo Sapiens
uuucaaaguauuuuaauagugauauaaaaucc

SEQ ID NO: 11306 - RNA, 32 nt, Homo Sapiens
uuaauuuaacaaguagauucuucuccaaagaa

SEQ ID NO: 11307 - RNA, 32 nt, Homo Sapiens
uuccuugaaguagauguggaugacugucagga

SEQ ID NO: 11308 - RNA, 32 nt, Homo Sapiens
ccuuccaaacccaaaaagcugggauuuuuuga

SEQ ID NO: 11309 - RNA, 32 nt, Homo Sapiens
acaauacaagacauuuuuccuguuuuagaaaa

SEQ ID NO: 11310 - RNA, 32 nt, Homo Sapiens
gacuucagcuccgaccccuccuccaaccucuc

SEQ ID NO: 11311 - RNA, 32 nt, Homo Sapiens
uuacagugcauuacuacagccagaagaacaua

SEQ ID NO: 11312 - RNA, 32 nt, Homo Sapiens
uugcauuacuauuugcagucaaacuuugaucc

SEQ ID NO: 11313 - RNA, 32 nt, Homo Sapiens
ugccugugggucugaggaagggagaaggcaga

SEQ ID NO: 11314 - RNA, 32 nt, Homo Sapiens
ggaguuuuguuuccucuguucaaagcugccug

SEQ ID NO: 11315 - RNA, 32 nt, Homo Sapiens
guccuccagcggcggcagcggcgcucgcagcg

SEQ ID NO: 11316 - RNA, 32 nt, Homo Sapiens
guucucuggggucuccucuccucugagcagcc

SEQ ID NO: 11317 - RNA, 32 nt, Homo Sapiens
ucguugcucagucagucaaguuccucggagau

SEQ ID NO: 11318 - RNA, 30 nt, Homo Sapiens
uaggcggccguuccgcggagcccggccgag

SEQ ID NO: 11319 - RNA, 32 nt, Homo Sapiens
caggaucaaaaauacugggacaugggcaggau

SEQ ID NO: 11320 - RNA, 32 nt, Homo Sapiens
cacugaagcccgagccgagccgagcccgagcc

SEQ ID NO: 11321 - RNA, 32 nt, Homo Sapiens
uauuacucaauaacccaagaaacaauuuuggg

SEQ ID NO: 11322 - RNA, 32 nt, Homo Sapiens
cggagcaccugcacgcugugcucgacaccgag

SEQ ID NO: 11323 - RNA, 32 nt, Homo Sapiens
uggccuggccuucagcaguucuuuuugugaag

SEQ ID NO: 11324 - RNA, 32 nt, Homo Sapiens
cccguuucuccuggugguuggugcguuguagc

SEQ ID NO: 11325 - RNA, 32 nt, Homo Sapiens
guggguagggagugguauccaguguucaagug

SEQ ID NO: 11326 - RNA, 32 nt, Homo Sapiens
caggauggcggaagcucaccaggccguggccu

SEQ ID NO: 11327 - RNA, 32 nt, Homo Sapiens
accaagaagauaaucuccaaagguccacgaug

SEQ ID NO: 11328 - RNA, 32 nt, Homo Sapiens
ucccgauccaaaucauaauuuguucuuaagua

SEQ ID NO: 11329 - RNA, 32 nt, Homo Sapiens
gggcgggguggguggggagggaugcugcauuu

SEQ ID NO: 11330 - RNA, 32 nt, Homo Sapiens
gaaaugagagauucucuuuuuaucagaacuuc

SEQ ID NO: 11331 - RNA, 29 nt, Homo Sapiens
ccaugcauuguagagucuauaaaauguug

SEQ ID NO: 11332 - RNA, 32 nt, Homo Sapiens
aaagaaccccuacagguggagaggaguguggg

SEQ ID NO: 11333 - RNA, 32 nt, Homo Sapiens
caguggggaaggcaugacacaccugggggaaa

SEQ ID NO: 11334 - RNA, 32 nt, Homo Sapiens
guaaaggcaaaggaagcagaggaugagaccag

SEQ ID NO: 11335 - RNA, 32 nt, Homo Sapiens
accuggauuuaaaagauaugagucuuauuaau

SEQ ID NO: 11336 - RNA, 32 nt, Homo Sapiens
uugcuuggggcguuccaggggaugcuguuggu

SEQ ID NO: 11337 - RNA, 32 nt, Homo Sapiens
agggcauagaaugucaaauuauuuuaaauggu

SEQ ID NO: 11338 - RNA, 31 nt, Homo Sapiens
ugaccccaagccacccuucaccuggacagga

SEQ ID NO: 11339 - RNA, 32 nt, Homo Sapiens
ucagugcuucuuaccauuaggcaaauuaggga

SEQ ID NO: 11340 - RNA, 32 nt, Homo Sapiens
ccuaccuuucugaugagcugcccgcccccagc

SEQ ID NO: 11341 - RNA, 32 nt, Homo Sapiens
ccucucccaagcccaaggacuaaguuuucucc

SEQ ID NO: 11342 - RNA, 32 nt, Homo Sapiens
cacugcugcuccagacucaccuagagaugcug

SEQ ID NO: 11343 - RNA, 32 nt, Homo Sapiens
acauuaaggcuuuguccuugugucacgcucua

SEQ ID NO: 11344 - RNA, 32 nt, Homo Sapiens
gagccuggcuuuugaccuaagaacccuagcag

SEQ ID NO: 11345 - RNA, 31 nt, Homo Sapiens
augagggcugauuugaaggugcuguugcagg

SEQ ID NO: 11346 - RNA, 32 nt, Homo Sapiens
acugacucugccagaggcccagccccagaacu

SEQ ID NO: 11347 - RNA, 32 nt, Homo Sapiens
agcgggcacucuuguugcaucaucagcgugca

SEQ ID NO: 11348 - RNA, 32 nt, Homo Sapiens
uuuuacacaaaacaagggcuuagaguauacug

SEQ ID NO: 11349 - RNA, 32 nt, Homo Sapiens
ccuagaucuauuucucuauguacuuccucucu

SEQ ID NO: 11350 - RNA, 32 nt, Homo Sapiens
uuuuaucaaaacaaaaugauguacagauuuuu

SEQ ID NO: 11351 - RNA, 32 nt, Homo Sapiens
acucugacgggcccgcgcgcacgauggccggc

SEQ ID NO: 11352 - RNA, 32 nt, Homo Sapiens
uucauuccuugguucugaaacucuguggagga

SEQ ID NO: 11353 - RNA, 32 nt, Homo Sapiens
agcauuuagcuaguuguaaccaaauacaaaua

SEQ ID NO: 11354 - RNA, 32 nt, Homo Sapiens
uugccgaggcccgggcgggcgggagcaacggc

SEQ ID NO: 11355 - RNA, 32 nt, Homo Sapiens
cgccgucaccaucuccaccucccaccaaacca

SEQ ID NO: 11356 - RNA, 32 nt, Homo Sapiens
uucaauaaaacgcaguugcaaacaauaaaaaa

SEQ ID NO: 11357 - RNA, 32 nt, Homo Sapiens
cgccuucucccacagggcccagccccucuccc

SEQ ID NO: 11358 - RNA, 32 nt, Homo Sapiens
gccauuucaaguuggugguugggauaucugcu

SEQ ID NO: 11359 - RNA, 32 nt, Homo Sapiens
ucucugcucgcgccuggcgcccggagccugcc

SEQ ID NO: 11360 - RNA, 32 nt, Homo Sapiens
uauaauuuacuuuugacuuaauggggcauaaa

SEQ ID NO: 11361 - RNA, 28 nt, Homo Sapiens
gaauuuuuaaaguaccauuugaaugauc

SEQ ID NO: 11362 - RNA, 32 nt, Homo Sapiens
gccaaaacaacauuccucacccggcccugugc

SEQ ID NO: 11363 - RNA, 32 nt, Homo Sapiens
aaugucauguucuccaucgucuccccguucca

SEQ ID NO: 11364 - RNA, 32 nt, Homo Sapiens
guuuaggaguaagagucuuguuuuuuauucag

SEQ ID NO: 11365 - RNA, 32 nt, Homo Sapiens
cucucagcgccgcucccagccacagccucccg

SEQ ID NO: 11366 - RNA, 32 nt, Homo Sapiens
ccccgaaacaauuuccuguuucaugaaacaaa

SEQ ID NO: 11367 - RNA, 32 nt, Homo Sapiens
cacauagcugucuggugccagagccagccuau

SEQ ID NO: 11368 - RNA, 32 nt, Homo Sapiens
gcccaguugucugcgacuacagcuggaucaag

SEQ ID NO: 11369 - RNA, 32 nt, Homo Sapiens
ugaacugggaagucccuggcuggcccccgggg

SEQ ID NO: 11370 - RNA, 32 nt, Homo Sapiens
ucugguuuuuugcuggccccaaccacuggccu

SEQ ID NO: 11371 - RNA, 32 nt, Homo Sapiens
uuuaucagugaguauuucauucuuauaugugu

SEQ ID NO: 11372 - RNA, 32 nt, Homo Sapiens
uucaguucagaccaccuggaaacccuccccau

SEQ ID NO: 11373 - RNA, 32 nt, Homo Sapiens
acaaggucugcgcccaccgccggcccgcccac

SEQ ID NO: 11374 - RNA, 32 nt, Homo Sapiens
uguaggaaaaagacaguuggaaauugguaagg

SEQ ID NO: 11375 - RNA, 32 nt, Homo Sapiens
ggcacgaggggcgccggcucccggggcacgga

SEQ ID NO: 11376 - RNA, 32 nt, Homo Sapiens
ucucaccaagcacugccugugcaugcagagaa

SEQ ID NO: 11377 - RNA, 32 nt, Homo Sapiens
acugccugccccagccccucccgcccaacuau

SEQ ID NO: 11378 - RNA, 32 nt, Homo Sapiens
cccacacccagcuggccauauccaccccucga

SEQ ID NO: 11379 - RNA, 32 nt, Homo Sapiens
acuuguccaugaaaauauuuuaugauauuaaa

SEQ ID NO: 11380 - RNA, 32 nt, Homo Sapiens
cucguggcuucuuuuuaaucuuuuguugggga

SEQ ID NO: 11381 - RNA, 32 nt, Homo Sapiens
ugggcgcgcgugggcgcggcggugcuggagcg

SEQ ID NO: 11382 - RNA, 32 nt, Homo Sapiens
accgcuugcuccgagccgcgggguccgccugc

SEQ ID NO: 11383 - RNA, 32 nt, Homo Sapiens
aauauuagugaaaauugcccaauauaauaagu

SEQ ID NO: 11384 - RNA, 32 nt, Homo Sapiens
auuaugagguaaagagaaaacaucgccauugu

SEQ ID NO: 11385 - RNA, 32 nt, Homo Sapiens
uagcuuuucaagacacuuccugcaucucugac

SEQ ID NO: 11386 - RNA, 32 nt, Homo Sapiens
uucccuaugguccaaagucuuuccaacugaga

SEQ ID NO: 11387 - RNA, 32 nt, Homo Sapiens
agcaugcccagccccagccagcugucccugcc

SEQ ID NO: 11388 - RNA, 32 nt, Homo Sapiens
agcugucagaaaacacauuuaagcaaacuaaa

SEQ ID NO: 11389 - RNA, 32 nt, Homo Sapiens
acccuuugguuuuuuucuucuguauuuuuuuu

SEQ ID NO: 11390 - RNA, 32 nt, Homo Sapiens
gugcguuggugaagaacacacaucgauucugc

SEQ ID NO: 11391 - RNA, 32 nt, Homo Sapiens
uaaauucauuucuggugacaacugaaguucuu

SEQ ID NO: 11392 - RNA, 32 nt, Homo Sapiens
auuauuggaaguucucuggugccuuaaggugg

SEQ ID NO: 11393 - RNA, 29 nt, Homo Sapiens
cuggucuuguggaagugaaagagcugcag

SEQ ID NO: 11394 - RNA, 32 nt, Homo Sapiens
uauauagaauuucaaaaccauauuuauaccac

SEQ ID NO: 11395 - RNA, 32 nt, Homo Sapiens
ccuguggcugcccucuccccagccuggcgugg

SEQ ID NO: 11396 - RNA, 32 nt, Homo Sapiens
cuuuacacauaaauauuuucagcaaagugcuc

SEQ ID NO: 11397 - RNA, 32 nt, Homo Sapiens
ccccuggccgcacguggacccaaggugaggaa

SEQ ID NO: 11398 - RNA, 32 nt, Homo Sapiens
acaugugacuacugagggcaguucugaguguu

SEQ ID NO: 11399 - RNA, 32 nt, Homo Sapiens
aggcuuuaaaauguuuucuugcauaaaauuca

SEQ ID NO: 11400 - RNA, 32 nt, Homo Sapiens
uaacaauguuuaaaaauagaaaagcaugagug

SEQ ID NO: 11401 - RNA, 32 nt, Homo Sapiens
ccagcuggccucggcccggggcaccuucggcu

SEQ ID NO: 11402 - RNA, 32 nt, Homo Sapiens
cccggacucuuccuccucuccaagaacacgcu

SEQ ID NO: 11403 - RNA, 30 nt, Homo Sapiens
gcggcucuggacugcagccucccaaggcuc

SEQ ID NO: 11404 - RNA, 31 nt, Homo Sapiens
gaggggcagcgcagccucccaccaagggccc

SEQ ID NO: 11405 - RNA, 32 nt, Homo Sapiens
caguuuaguuggaaaacuuugccucaggagaa

SEQ ID NO: 11406 - RNA, 32 nt, Homo Sapiens
gccaaccucguugccucucuucguccuuccuu

SEQ ID NO: 11407 - RNA, 31 nt, Homo Sapiens
ggaaaauuaaaucauagcugaguuaaaugcc

SEQ ID NO: 11408 - RNA, 32 nt, Homo Sapiens
ucuggucagaaaaccuguguguuuccuacugc

SEQ ID NO: 11409 - RNA, 32 nt, Homo Sapiens
acuuuaucaucugcuuccuuucuggauguuua

SEQ ID NO: 11410 - RNA, 32 nt, Homo Sapiens
cuuccggcgggggcgcggcuuggacugaggag

SEQ ID NO: 11411 - RNA, 32 nt, Homo Sapiens
accacccccuacucagacaaaacuugagaaga

SEQ ID NO: 11412 - RNA, 32 nt, Homo Sapiens
aaugaacuucaguaagcuuucaauuuugauac

SEQ ID NO: 11413 - RNA, 28 nt, Homo Sapiens
uuuuuaguuacagaagcaguuguguuaa

SEQ ID NO: 11414 - RNA, 32 nt, Homo Sapiens
uguaauauuaugucagcuuuaacauauaauau

SEQ ID NO: 11415 - RNA, 32 nt, Homo Sapiens
cggaugcggcggccaggcuucuccgggccagg

SEQ ID NO: 11416 - RNA, 32 nt, Homo Sapiens
ccuuuuauucuauuuacaagcucagaugucuc

SEQ ID NO: 11417 - RNA, 28 nt, Homo Sapiens
gaaaugguuggaaaaaacaugaguaaaa

SEQ ID NO: 11418 - RNA, 32 nt, Homo Sapiens
gagaaccugugcucuaagugaauacuuggaag

SEQ ID NO: 11419 - RNA, 32 nt, Homo Sapiens
auucccuggcaguaccaccaugccaggcguca

SEQ ID NO: 11420 - RNA, 32 nt, Homo Sapiens
aguacucaaaaauauuuguugagugaauaagu

SEQ ID NO: 11421 - RNA, 32 nt, Homo Sapiens
ucuuucuucuuuuaacuugaugaugaugugca

SEQ ID NO: 11422 - RNA, 32 nt, Homo Sapiens
gcuuauccgacgcuccucccucugucucugua

SEQ ID NO: 11423 - RNA, 32 nt, Homo Sapiens
gaaaacagcucuuuugaggaaugucaauuagu

SEQ ID NO: 11424 - RNA, 32 nt, Homo Sapiens
gacagugagagcucgugcccaucuccgaaacc

SEQ ID NO: 11425 - RNA, 32 nt, Homo Sapiens
gaggcucccuucccuuccccagccgcacucau

SEQ ID NO: 11426 - RNA, 32 nt, Homo Sapiens
agccaugcuguaagcauuguuuuuauuuucag

SEQ ID NO: 11427 - RNA, 32 nt, Homo Sapiens
ccgacagcacagugaggccuggaaacuucccu

SEQ ID NO: 11428 - RNA, 32 nt, Homo Sapiens
uggagcaauauuuugugcugaagaccucuuuu

SEQ ID NO: 11429 - RNA, 32 nt, Homo Sapiens
ggugcaggugcaggagggaggcggcucugggc

SEQ ID NO: 11430 - RNA, 32 nt, Homo Sapiens
guagaguuuugcugguuuuguaaaauggaugg

SEQ ID NO: 11431 - RNA, 32 nt, Homo Sapiens
cuggggaccccauuccugucaguagcaacccu

SEQ ID NO: 11432 - RNA, 32 nt, Homo Sapiens
gacugguuugugggcagaaacacacacacucg

SEQ ID NO: 11433 - RNA, 32 nt, Homo Sapiens
ugugauagaggucacugggaaauacuagggag

SEQ ID NO: 11434 - RNA, 32 nt, Homo Sapiens
aguagcacggccucagggcagacguuccucuc

SEQ ID NO: 11435 - RNA, 32 nt, Homo Sapiens
ucuucaaggagaacuacaaaccacugcucaau

SEQ ID NO: 11436 - RNA, 32 nt, Homo Sapiens
ucuauauagugucaagaugcuacauaauggga

SEQ ID NO: 11437 - RNA, 27 nt, Homo Sapiens
gggugguccuucuugaauucauguaca

SEQ ID NO: 11438 - RNA, 32 nt, Homo Sapiens
guuccuccugaauuccucuccugguuacuuca

SEQ ID NO: 11439 - RNA, 32 nt, Homo Sapiens
aauaccaguuucuugcagaaaugcggugcuuu

SEQ ID NO: 11440 - RNA, 32 nt, Homo Sapiens
cuuucuuuaccuugugucuucucuuguaaaaa

SEQ ID NO: 11441 - RNA, 32 nt, Homo Sapiens
agucccgaaaauggcacagaaaugguaugaag

SEQ ID NO: 11442 - RNA, 32 nt, Homo Sapiens
gaaaaacaccucagcauggcguggggaagcaa

SEQ ID NO: 11443 - RNA, 32 nt, Homo Sapiens
aacaagagucuauaggcaaacaauauagggug

SEQ ID NO: 11444 - RNA, 32 nt, Homo Sapiens
cggaaggagggcaaugagcuguucaaaugugg

SEQ ID NO: 11445 - RNA, 32 nt, Homo Sapiens
uguggccagggcggggccguggacagggaggu

SEQ ID NO: 11446 - RNA, 30 nt, Homo Sapiens
uuguuguucggcggcggcggcggcgguaag

SEQ ID NO: 11447 - RNA, 32 nt, Homo Sapiens
cggggcuggggcggggagcgggcgggaaaugg

SEQ ID NO: 11448 - RNA, 32 nt, Homo Sapiens
cuugaaaaaggccauuguggagcccauuauac

SEQ ID NO: 11449 - RNA, 32 nt, Homo Sapiens
caggacuccgcaccacuccccuacacccagag

SEQ ID NO: 11450 - RNA, 32 nt, Homo Sapiens
uugaacucauagaaggagagaauagaauggug

SEQ ID NO: 11451 - RNA, 32 nt, Homo Sapiens
gcauuuaaaguuguauaaaaacacgaguuauu

SEQ ID NO: 11452 - RNA, 32 nt, Homo Sapiens
ggggggaggaggaguaaaagcccgauuauaau

SEQ ID NO: 11453 - RNA, 32 nt, Homo Sapiens
gcuuccucccuggggggugcuggggacccucc

SEQ ID NO: 11454 - RNA, 32 nt, Homo Sapiens
cacaucaguaaguuauaguuuauauuaaaggu

SEQ ID NO: 11455 - RNA, 32 nt, Homo Sapiens
ucagccgucucaacaacaggcaucaccugaau

SEQ ID NO: 11456 - RNA, 32 nt, Homo Sapiens
auaguacacuuuaacucuuucagacaacuugc

SEQ ID NO: 11457 - RNA, 32 nt, Homo Sapiens
uuugauaguuaauagaaauugaaccagaguuu

SEQ ID NO: 11458 - RNA, 32 nt, Homo Sapiens
accucacugaaguacucgcauguuguuuggua

SEQ ID NO: 11459 - RNA, 32 nt, Homo Sapiens
agcccggcgggucaggcauuucuggggaccaa

SEQ ID NO: 11460 - RNA, 32 nt, Homo Sapiens
ucagaauggcaguguuuaauucucuugaaaga

SEQ ID NO: 11461 - RNA, 32 nt, Homo Sapiens
cucagagcagucuucuuagccuauggucguac

SEQ ID NO: 11462 - RNA, 32 nt, Homo Sapiens
caugacuaaaaugaaaucaugguaucuguuaa

SEQ ID NO: 11463 - RNA, 32 nt, Homo Sapiens
agcaggaguauuuuauacagaaaucuugugaa

SEQ ID NO: 11464 - RNA, 32 nt, Homo Sapiens
uaaugugcauaaauagaguguaaauaaaauag

SEQ ID NO: 11465 - RNA, 32 nt, Homo Sapiens
gggacuaggacagugucacuucugcuaaguuc

SEQ ID NO: 11466 - RNA, 27 nt, Homo Sapiens
agccuguccuucuggcuuccucugucc

SEQ ID NO: 11467 - RNA, 32 nt, Homo Sapiens
uuggccuucuuaaauuguggccagugucuuuu

SEQ ID NO: 11468 - RNA, 32 nt, Homo Sapiens
gccguggacagaggggcacaguuucggcaggc

SEQ ID NO: 11469 - RNA, 32 nt, Homo Sapiens
augacauguaguaaaaaauggauacuuuuaaa

SEQ ID NO: 11470 - RNA, 32 nt, Homo Sapiens
uaaaaugaaaauaaauuucuaaucccccugac

SEQ ID NO: 11471 - RNA, 32 nt, Homo Sapiens
cguccggaagaugaagcagaugaugaugauga

SEQ ID NO: 11472 - RNA, 32 nt, Homo Sapiens
cgggagcgcgcccgcuuuuccuaggccagcgg

SEQ ID NO: 11473 - RNA, 32 nt, Homo Sapiens
gcgagguggcgggcgccuguauucccagcuuc

SEQ ID NO: 11474 - RNA, 32 nt, Homo Sapiens
cuuuccauugaccauuaugacuuuaaaaucaa

SEQ ID NO: 11475 - RNA, 32 nt, Homo Sapiens
guugauugucgagaauaauucaaaguuaaaau

SEQ ID NO: 11476 - RNA, 32 nt, Homo Sapiens
augcacucagaauuacuuagacaaagcggaua

SEQ ID NO: 11477 - RNA, 32 nt, Homo Sapiens
gugacagcuugguuuaaauuuagcacagaacu

SEQ ID NO: 11478 - RNA, 32 nt, Homo Sapiens
gcugaccucccuccccuugugcagacuggaaa

SEQ ID NO: 11479 - RNA, 32 nt, Homo Sapiens
guucauaucaaguccaaagcuaauggagccuu

SEQ ID NO: 11480 - RNA, 32 nt, Homo Sapiens
agcuaauguggacuuuucuuuuuccaugaaau

SEQ ID NO: 11481 - RNA, 32 nt, Homo Sapiens
agagccaguaagcagacagaugcugaaagcca

SEQ ID NO: 11482 - RNA, 32 nt, Homo Sapiens
agaaacccaagcccugcacuccaaggcuccug

SEQ ID NO: 11483 - RNA, 32 nt, Homo Sapiens
cugccucagcccacuccucaccacccaccuuc

SEQ ID NO: 11484 - RNA, 32 nt, Homo Sapiens
ucuggccugcuuucguuaacuguguauguaca

SEQ ID NO: 11485 - RNA, 32 nt, Homo Sapiens
cuuggccccgcuccccgcccgcaaagggccgg

SEQ ID NO: 11486 - RNA, 32 nt, Homo Sapiens
cuaaucacuuagggauguaauuuuauaguaua

SEQ ID NO: 11487 - RNA, 32 nt, Homo Sapiens
uuuaagauauccacugauaaugagaguauuug

SEQ ID NO: 11488 - RNA, 32 nt, Homo Sapiens
uguuauaaaauggacacaaaucugcaaaacaa

SEQ ID NO: 11489 - RNA, 32 nt, Homo Sapiens
uaauaauaaaauacuacuuauuugaguuacug

SEQ ID NO: 11490 - RNA, 32 nt, Homo Sapiens
uccaggaacaauuuacuauuuuuaaaauauuu

SEQ ID NO: 11491 - RNA, 32 nt, Homo Sapiens
gaaugauuauuccugucuuuaacgaggagggg

SEQ ID NO: 11492 - RNA, 32 nt, Homo Sapiens
uauugaauaaaaaauagacauguaguuggaaa

SEQ ID NO: 11493 - RNA, 32 nt, Homo Sapiens
caggcaccuucagaagacccacguagacugca

SEQ ID NO: 11494 - RNA, 32 nt, Homo Sapiens
acagauggagggcaugggauaggacaggagag

SEQ ID NO: 11495 - RNA, 32 nt, Homo Sapiens
uuuccacaucccuaacagcagcucccgaaucc

SEQ ID NO: 11496 - RNA, 32 nt, Homo Sapiens
caaccugcaggugggagggaugugccagugcc

SEQ ID NO: 11497 - RNA, 32 nt, Homo Sapiens
aaaacuggaccuguaauuuggccaugggaaga

SEQ ID NO: 11498 - RNA, 32 nt, Homo Sapiens
agaagcugggcagaagcaggaggaucauuuga

SEQ ID NO: 11499 - RNA, 32 nt, Homo Sapiens
acuccaaugauuagcucuguccucauuguccu

SEQ ID NO: 11500 - RNA, 32 nt, Homo Sapiens
cuccugaaacccuccccagguuuuccaaguac

SEQ ID NO: 11501 - RNA, 32 nt, Homo Sapiens
gcacuuuugaccaaguccugcuacugcggccc

SEQ ID NO: 11502 - RNA, 32 nt, Homo Sapiens
gacccaccacacucaacuccccggccccuggc

SEQ ID NO: 11503 - RNA, 32 nt, Homo Sapiens
acccaugcucuguguccaggcuugcuccuggc

SEQ ID NO: 11504 - RNA, 32 nt, Homo Sapiens
cccagccucuccccaacccugccgcauugucu

SEQ ID NO: 11505 - RNA, 32 nt, Homo Sapiens
aacccagucuuaggcugguauucccuuuuuau

SEQ ID NO: 11506 - RNA, 32 nt, Homo Sapiens
gguuccuggggaggagucaugacacuaucaau

SEQ ID NO: 11507 - RNA, 27 nt, Homo Sapiens
acugagaaauaaacaaauaugccaauu

SEQ ID NO: 11508 - RNA, 32 nt, Homo Sapiens
aagcgcacucccccugcccgggcccccugccc

SEQ ID NO: 11509 - RNA, 32 nt, Homo Sapiens
gguggggaggugcgcagacggauggacaagcg

SEQ ID NO: 11510 - RNA, 32 nt, Homo Sapiens
aaaccagaaugagaauucagguucuaaggacu

SEQ ID NO: 11511 - RNA, 32 nt, Homo Sapiens
cgugcccaaggugacgcaacucgugaacagcc

SEQ ID NO: 11512 - RNA, 32 nt, Homo Sapiens
gaggacaggggcggggggcgggaggcuugcca

SEQ ID NO: 11513 - RNA, 30 nt, Homo Sapiens
ggccggagcagcggcggcggcgcucggacu

SEQ ID NO: 11514 - RNA, 32 nt, Homo Sapiens
cugacaaugaacuacugcaggaauccagaugc

SEQ ID NO: 11515 - RNA, 32 nt, Homo Sapiens
uugguguaaaauguauauugacuguauuggug

SEQ ID NO: 11516 - RNA, 32 nt, Homo Sapiens
ggccucuugcuaagccuucuccucacugcccu

SEQ ID NO: 11517 - RNA, 32 nt, Homo Sapiens
cgccucccuugggucgcacgcugcuggacugu

SEQ ID NO: 11518 - RNA, 32 nt, Homo Sapiens
uuagccgggcguaguggcgcgcgccuauaauc

SEQ ID NO: 11519 - RNA, 32 nt, Homo Sapiens
ggggaggcgauggcgccggccgcguccaggcu

SEQ ID NO: 11520 - RNA, 32 nt, Homo Sapiens
cacccccuuccagcugaggagaccaggcccag

SEQ ID NO: 11521 - RNA, 32 nt, Homo Sapiens
gguuucaccguguuggucaggcuggucucgaa

SEQ ID NO: 11522 - RNA, 32 nt, Homo Sapiens
gguuucacuguguuggccaggcuggucucgaa

SEQ ID NO: 11523 - RNA, 32 nt, Homo Sapiens
gauuucaccauguuggucaggcuggucucgaa

SEQ ID NO: 11524 - RNA, 32 nt, Homo Sapiens
uaauguuaguaaauccaugguguuauuuucug

SEQ ID NO: 11525 - RNA, 32 nt, Homo Sapiens
aagugcggagagcagccgcgggcccuuuaagg

SEQ ID NO: 11526 - RNA, 32 nt, Homo Sapiens
aauuuaaagcaaagucaggauuccuuggcaga

SEQ ID NO: 11527 - RNA, 32 nt, Homo Sapiens
uaaauccacauggacaggauguguguuuucca

SEQ ID NO: 11528 - RNA, 32 nt, Homo Sapiens
aggcggccuucguggcagcuguagacgccggg

SEQ ID NO: 11529 - RNA, 32 nt, Homo Sapiens
auaugaaugggcacauuuuacugcacacuuca

SEQ ID NO: 11530 - RNA, 32 nt, Homo Sapiens
ucaaaggcacgcuguguuuuguuuugagggcg

SEQ ID NO: 11531 - RNA, 32 nt, Homo Sapiens
agcagggggacgggaccgaagcucccucaauc

SEQ ID NO: 11532 - RNA, 32 nt, Homo Sapiens
guucuuucguccgagaccgaaaagcgcaaaug

SEQ ID NO: 11533 - RNA, 32 nt, Homo Sapiens
cacacgagagucggcgaccagccucggcggug

SEQ ID NO: 11534 - RNA, 32 nt, Homo Sapiens
cagggugccgcgguucaauucgauauccggac

SEQ ID NO: 11535 - RNA, 32 nt, Homo Sapiens
gggccccgcuugucucggggguaccccgggug

SEQ ID NO: 11536 - RNA, 32 nt, Homo Sapiens
uuaccccggccgcggcucuuggcggcgggaga

SEQ ID NO: 11537 - RNA, 32 nt, Homo Sapiens
caugagcagcguggcccuggccccacacuccc

SEQ ID NO: 11538 - RNA, 32 nt, Homo Sapiens
gggcgggguugugagacgccgcgcucagcuuc

SEQ ID NO: 11539 - RNA, 32 nt, Homo Sapiens
gccgggccaacgccaaacucgugccaaagacu

SEQ ID NO: 11540 - RNA, 32 nt, Homo Sapiens
uauucccagaagagcucagagaagcuuauuuu

SEQ ID NO: 11541 - RNA, 30 nt, Homo Sapiens
aggcguccugcucgcucuuccgcaccgucc

SEQ ID NO: 11542 - RNA, 32 nt, Homo Sapiens
ggacucugccugugaugggguggccuuccugc

SEQ ID NO: 11543 - RNA, 32 nt, Homo Sapiens
acgccgagggcuugccguuuucccggaggacg

SEQ ID NO: 11544 - RNA, 32 nt, Homo Sapiens
uaacauacagugcuugaauauacagccuuaac

SEQ ID NO: 11545 - RNA, 32 nt, Homo Sapiens
ugaggagccuccuggggaauuggaggauuaag

SEQ ID NO: 11546 - RNA, 32 nt, Homo Sapiens
gggccaggucugcggcagugcugggguggcac

SEQ ID NO: 11547 - RNA, 32 nt, Homo Sapiens
guagcuucuggugauaucuuuucaugauuuua

SEQ ID NO: 11548 - RNA, 32 nt, Homo Sapiens
aagcguguaacaaggguguaaauauuuauaau

SEQ ID NO: 11549 - RNA, 32 nt, Homo Sapiens
aauuaaugcugcgcuucgcuuggugagugcgu

SEQ ID NO: 11550 - RNA, 32 nt, Homo Sapiens
augggaugucuaggaaggggcuggaaggaagu

SEQ ID NO: 11551 - RNA, 32 nt, Homo Sapiens
ggacugacugguuuggcugggaguccaugagg

SEQ ID NO: 11552 - RNA, 32 nt, Homo Sapiens
cgcagccaccuccaccaccuccgcagcaaaac

SEQ ID NO: 11553 - RNA, 32 nt, Homo Sapiens
gcgcagcgcuccacucggccggcagcggagcc

SEQ ID NO: 11554 - RNA, 31 nt, Homo Sapiens
uuuaccugcugcuccugaagaagucgucaug

SEQ ID NO: 11555 - RNA, 32 nt, Homo Sapiens
gggagcucacggucuucucagguucaucugug

SEQ ID NO: 11556 - RNA, 32 nt, Homo Sapiens
uguuaaaaucuguguuuggaaaauagcgaauu

SEQ ID NO: 11557 - RNA, 32 nt, Homo Sapiens
cuucaagcuaaggagcuuccuaggugaaaggg

SEQ ID NO: 11558 - RNA, 32 nt, Homo Sapiens
uguagucagggaugcuccugcagacacacagg

SEQ ID NO: 11559 - RNA, 32 nt, Homo Sapiens
gucccuagcaauaccauucccugugggaaaag

SEQ ID NO: 11560 - RNA, 32 nt, Homo Sapiens
uauuucuuuauuuuaaugauguaucauuguua

SEQ ID NO: 11561 - RNA, 32 nt, Homo Sapiens
gagagugacaccuggucuuaggcuuagaagag

SEQ ID NO: 11562 - RNA, 32 nt, Homo Sapiens
ccguuguaguggaaccucuacauguuuuaguu

SEQ ID NO: 11563 - RNA, 32 nt, Homo Sapiens
uuggaagucaccuuuacuugccuuugcagaaa

SEQ ID NO: 11564 - RNA, 32 nt, Homo Sapiens
ucagggugcagagagggacuguucuggucucc

SEQ ID NO: 11565 - RNA, 31 nt, Homo Sapiens
auggcuuuguucucaaguuuccuccacagug

SEQ ID NO: 11566 - RNA, 32 nt, Homo Sapiens
uggauucauaaccacaggcuccccucauuagg

SEQ ID NO: 11567 - RNA, 32 nt, Homo Sapiens
cacauggagguagguggcugcacauucaucca

SEQ ID NO: 11568 - RNA, 32 nt, Homo Sapiens
gcugauucucugaaagcucacugcugccaagg

SEQ ID NO: 11569 - RNA, 32 nt, Homo Sapiens
gaccaggcgcgguggcuaaaaauacaaaaagu

SEQ ID NO: 11570 - RNA, 31 nt, Homo Sapiens
gauguaucuguggcccuuccaaauaagcggc

SEQ ID NO: 11571 - RNA, 32 nt, Homo Sapiens
aguguuguucccucccucaaggcugggaggag

SEQ ID NO: 11572 - RNA, 32 nt, Homo Sapiens
uuaaaggaaaggaaagagggagccaaaguagg

SEQ ID NO: 11573 - RNA, 32 nt, Homo Sapiens
uuccuuguuuaaaagaaaaugaugcucuaagc

SEQ ID NO: 11574 - RNA, 32 nt, Homo Sapiens
gauagagaggccccagugcugcugaguaacug

SEQ ID NO: 11575 - RNA, 32 nt, Homo Sapiens
acguagaauauuagggaugagauggaagagga

SEQ ID NO: 11576 - RNA, 32 nt, Homo Sapiens
ccuggucgccuggaggaagccggaggccugcg

SEQ ID NO: 11577 - RNA, 32 nt, Homo Sapiens
aagcagcugcagccgccuccucguuccucucc

SEQ ID NO: 11578 - RNA, 32 nt, Homo Sapiens
guuaauuuaaguggauucacugcuauucaguu

SEQ ID NO: 11579 - RNA, 32 nt, Homo Sapiens
gcggcggaacucuggagagugcggaaccuagg

SEQ ID NO: 11580 - RNA, 32 nt, Homo Sapiens
ugcgggaggggaggagagcagagaacgucccc

SEQ ID NO: 11581 - RNA, 32 nt, Homo Sapiens
cucccagcccuggccugcagggugggcagggu

SEQ ID NO: 11582 - RNA, 32 nt, Homo Sapiens
uacaggucuucuuuucucucaccucuauaagc

SEQ ID NO: 11583 - RNA, 32 nt, Homo Sapiens
cgaggucgggccgggggcggugggggagcgca

SEQ ID NO: 11584 - RNA, 32 nt, Homo Sapiens
ggcccacuccucaugcagcagugugcuggggc

SEQ ID NO: 11585 - RNA, 32 nt, Homo Sapiens
ugacggcccaggugcugacccugccucggguu

SEQ ID NO: 11586 - RNA, 32 nt, Homo Sapiens
ccagcggcggcgaaguuuggcugcugagcggc

SEQ ID NO: 11587 - RNA, 32 nt, Homo Sapiens
cccucccggacgggguggcuggccgggcugag

SEQ ID NO: 11588 - RNA, 32 nt, Homo Sapiens
gcaugugugaagauuauaaaagccaaauaguu

SEQ ID NO: 11589 - RNA, 32 nt, Homo Sapiens
auucaggagaauaaauaacuguuuuguguugg

SEQ ID NO: 11590 - RNA, 32 nt, Homo Sapiens
guagccgucugaacuggaguggaguaggagaa

SEQ ID NO: 11591 - RNA, 32 nt, Homo Sapiens
agaccuuuucccuagccuuuggcaaccuacaa

SEQ ID NO: 11592 - RNA, 32 nt, Homo Sapiens
aggcccauguucugccagcaaccgggaugcgu

SEQ ID NO: 11593 - RNA, 32 nt, Homo Sapiens
uucucugccuucuuccaggaucagggguuagg

SEQ ID NO: 11594 - RNA, 32 nt, Homo Sapiens
uuuggcucuaauuugaauaagcugaguaaaac

SEQ ID NO: 11595 - RNA, 32 nt, Homo Sapiens
acucccgcgggccucgcguuugcaaacuucuc

SEQ ID NO: 11596 - RNA, 32 nt, Homo Sapiens
cuuugaaaaaauacuugacucuacuuuuguua

SEQ ID NO: 11597 - RNA, 32 nt, Homo Sapiens
acuaagagaaguaauauaauuuucuuacaaag

SEQ ID NO: 11598 - RNA, 32 nt, Homo Sapiens
acaccuguaggacacacacacacacacaaaca

SEQ ID NO: 11599 - RNA, 32 nt, Homo Sapiens
aggaaucaaauuaugucaauaaauguuauaaa

SEQ ID NO: 11600 - RNA, 32 nt, Homo Sapiens
gacgagaggauacuuccaaacaagcacugauu

SEQ ID NO: 11601 - RNA, 32 nt, Homo Sapiens
aaaacuggagcagcauauagccgaaaaggagc

SEQ ID NO: 11602 - RNA, 32 nt, Homo Sapiens
cagccuccugggcgcccgcgggcccggcgaga

SEQ ID NO: 11603 - RNA, 32 nt, Homo Sapiens
ugagugucuuacuguguuauuaaaucuuaucu

SEQ ID NO: 11604 - RNA, 32 nt, Homo Sapiens
accaucucuucuucuuuuuacagauagggaaa

SEQ ID NO: 11605 - RNA, 32 nt, Homo Sapiens
gagcagggugggaccagaggauaccucuggag

SEQ ID NO: 11606 - RNA, 32 nt, Homo Sapiens
aguuauuuggggauuaaugaaauccagggucu

SEQ ID NO: 11607 - RNA, 32 nt, Homo Sapiens
ugucacccuuguccacguuguuucacaucugg

SEQ ID NO: 11608 - RNA, 32 nt, Homo Sapiens
cccgcucgcuccccggcgcucacaccugagcu

SEQ ID NO: 11609 - RNA, 32 nt, Homo Sapiens
ugugaaagguuuuccccuucagcccucaggua

SEQ ID NO: 11610 - RNA, 32 nt, Homo Sapiens
ccguuagcugucuccuugccaagccccaggaa

SEQ ID NO: 11611 - RNA, 32 nt, Homo Sapiens
cauggcgggaggaggggcaguaguuauugaua

SEQ ID NO: 11612 - RNA, 32 nt, Homo Sapiens
uuguaaaauauguuugugugaguagcgauauu

SEQ ID NO: 11613 - RNA, 32 nt, Homo Sapiens
cggugcacaccuguagucccagcugcucagga

SEQ ID NO: 11614 - RNA, 32 nt, Homo Sapiens
ucuuuagggugucaauucugugcugcuuugca

SEQ ID NO: 11615 - RNA, 32 nt, Homo Sapiens
acagagaaaagacuuccauaaaggacgacaaa

SEQ ID NO: 11616 - RNA, 32 nt, Homo Sapiens
aagcgacgacuggccuggccagaggacucgcg

SEQ ID NO: 11617 - RNA, 32 nt, Homo Sapiens
uuccucuucuauuccuauauucuuuucuggau

SEQ ID NO: 11618 - RNA, 32 nt, Homo Sapiens
gcaguaucucucugccuauuuauuggggugcc

SEQ ID NO: 11619 - RNA, 32 nt, Homo Sapiens
ucccugcccgccugcgucaccgcggccgccau

SEQ ID NO: 11620 - RNA, 32 nt, Homo Sapiens
ccucacuuuccaccaagugucuagagucaugu

SEQ ID NO: 11621 - RNA, 32 nt, Homo Sapiens
gucgucgcgccgccgcgccaagcaugcaguaa

SEQ ID NO: 11622 - RNA, 32 nt, Homo Sapiens
gauacagcccuacaaauguauaugcccucccc

SEQ ID NO: 11623 - RNA, 32 nt, Homo Sapiens
auguuuccccaccucuguuccuccucagagcc

SEQ ID NO: 11624 - RNA, 32 nt, Homo Sapiens
cccaaacuucuuuucuuuucuacuguuuaaca

SEQ ID NO: 11625 - RNA, 32 nt, Homo Sapiens
gggccguguggaguaggucuggaccuggacuc

SEQ ID NO: 11626 - RNA, 32 nt, Homo Sapiens
gacaguugauuuccucuugaacugccggugaa

SEQ ID NO: 11627 - RNA, 32 nt, Homo Sapiens
aaccugcauaucacaaaauaaaacauuuuucu

SEQ ID NO: 11628 - RNA, 32 nt, Homo Sapiens
uguuucggauuuucuuuuuuucuuuucuuuua

SEQ ID NO: 11629 - RNA, 32 nt, Homo Sapiens
guggcauuuauuuggauaaaauucucaauuca

SEQ ID NO: 11630 - RNA, 32 nt, Homo Sapiens
uucccaaaaccaggucaagcaagaugccaugu

SEQ ID NO: 11631 - RNA, 32 nt, Homo Sapiens
ugacaaccuggauguaaauaggagccuuucua

SEQ ID NO: 11632 - RNA, 32 nt, Homo Sapiens
ggaguuucgcucuugucgcccaggcuguagug

SEQ ID NO: 11633 - RNA, 32 nt, Homo Sapiens
gcaaaagcagcauucaggagccgaaagauagu

SEQ ID NO: 11634 - RNA, 32 nt, Homo Sapiens
uggcugccuugccugccuggggcacucaggau

SEQ ID NO: 11635 - RNA, 32 nt, Homo Sapiens
ccaguuccuuuacagaaucaacccuggggugg

SEQ ID NO: 11636 - RNA, 32 nt, Homo Sapiens
uggcacuggugguccuccuccuccucacucuu

SEQ ID NO: 11637 - RNA, 32 nt, Homo Sapiens
uaacaagauguuucauuuuacuguauauuuug

SEQ ID NO: 11638 - RNA, 32 nt, Homo Sapiens
cacugcacuccagccugggugacagagagacu

SEQ ID NO: 11639 - RNA, 32 nt, Homo Sapiens
ugugcgccagaugaccaggagcuccucaaggg

SEQ ID NO: 11640 - RNA, 32 nt, Homo Sapiens
caccagaguccugcagcagagacgggcugggc

SEQ ID NO: 11641 - RNA, 32 nt, Homo Sapiens
cugaguuuccugcccuuucucuagugcccaac

SEQ ID NO: 11642 - RNA, 32 nt, Homo Sapiens
uuuccaaagcuacauugacgagacacuuacug

SEQ ID NO: 11643 - RNA, 32 nt, Homo Sapiens
auacauauauauauuuuuacucugucuuacuc

SEQ ID NO: 11644 - RNA, 32 nt, Homo Sapiens
ugagcagccccggcgugccccgcgggcuggaa

SEQ ID NO: 11645 - RNA, 32 nt, Homo Sapiens
ggcugaagauuugaugugguuccuccuuaagc

SEQ ID NO: 11646 - RNA, 32 nt, Homo Sapiens
ugggagcugcuggugcugcugcugcugcugcu

SEQ ID NO: 11647 - RNA, 32 nt, Homo Sapiens
gaggaagaaaaaauaauauuguuacuuuaaaa

SEQ ID NO: 11648 - RNA, 32 nt, Homo Sapiens
ccauguacuaaggauucacauaaaagcaacaa

SEQ ID NO: 11649 - RNA, 32 nt, Homo Sapiens
uugaaacauugauggaauaacucuguggcauu

SEQ ID NO: 11650 - RNA, 32 nt, Homo Sapiens
aucugugcagucaucaacaaaagggagaacau

SEQ ID NO: 11651 - RNA, 32 nt, Homo Sapiens
agaacauacauggauguacugaacgaagaaua

SEQ ID NO: 11652 - RNA, 32 nt, Homo Sapiens
uuuuccuuuguccaucgagguguuucauaagu

SEQ ID NO: 11653 - RNA, 32 nt, Homo Sapiens
uccagguccauccauguuguugcaaaagauaa

SEQ ID NO: 11654 - RNA, 32 nt, Homo Sapiens
ccacuucuuuugccucaugaagaacucuuggg

SEQ ID NO: 11655 - RNA, 32 nt, Homo Sapiens
auuucuuccuuccuuuuuauaaagagaggcag

SEQ ID NO: 11656 - RNA, 32 nt, Homo Sapiens
gugcuaacugcacugaaauaaaacacuaacua

SEQ ID NO: 11657 - RNA, 32 nt, Homo Sapiens
uggacugggccguacguaaaucuugggguuau

SEQ ID NO: 11658 - RNA, 30 nt, Homo Sapiens
cuucuguaugcagcuggcggcaggaauucg

SEQ ID NO: 11659 - RNA, 32 nt, Homo Sapiens
gaaaugcacagucaugcagagcccaggaggca

SEQ ID NO: 11660 - RNA, 32 nt, Homo Sapiens
auuggagaaucuuaagaaaugcaagcuuguuc

SEQ ID NO: 11661 - RNA, 32 nt, Homo Sapiens
cugcucuucccuucuguaaauuuuaaaacauu

SEQ ID NO: 11662 - RNA, 29 nt, Homo Sapiens
aauugcauauauuucagaggaaaguacca

SEQ ID NO: 11663 - RNA, 32 nt, Homo Sapiens
cgcccgggcugagcugcagacucgcgccugcc

SEQ ID NO: 11664 - RNA, 32 nt, Homo Sapiens
caaacacaccacggucugcccugcaaaaacac

SEQ ID NO: 11665 - RNA, 30 nt, Homo Sapiens
uggggccaccccgugccagcggugcccuuc

SEQ ID NO: 11666 - RNA, 32 nt, Homo Sapiens
gagaacacucugaaugaccccuggaggccgag

SEQ ID NO: 11667 - RNA, 32 nt, Homo Sapiens
ucuuuugcuguaagcuuugaccuuuugcagau

SEQ ID NO: 11668 - RNA, 32 nt, Homo Sapiens
gcccaccggccuccccucuccuucugggccgc

SEQ ID NO: 11669 - RNA, 32 nt, Homo Sapiens
aauaaaauaaaauaaaauaauuaauaaaaugg

SEQ ID NO: 11670 - RNA, 32 nt, Homo Sapiens
gagugauugguauuggagguguucaagaaacu

SEQ ID NO: 11671 - RNA, 32 nt, Homo Sapiens
uuucuaaaaauguguuugauuguagaagcuuc

SEQ ID NO: 11672 - RNA, 32 nt, Homo Sapiens
uuaaagugacucagagauaucuauguaugcga

SEQ ID NO: 11673 - RNA, 32 nt, Homo Sapiens
cugcagaggccagcccggggcuggggaggcgc

SEQ ID NO: 11674 - RNA, 32 nt, Homo Sapiens
gugagggggcuccugcugugcugcugagccgc

SEQ ID NO: 11675 - RNA, 32 nt, Homo Sapiens
gggauccagacgccuccuggggcugcuggcgg

SEQ ID NO: 11676 - RNA, 32 nt, Homo Sapiens
uaauuagaaaaguuugucaguuauucaaaaau

SEQ ID NO: 11677 - RNA, 32 nt, Homo Sapiens
aaugcugccacccacacagagaauaaggagua

SEQ ID NO: 11678 - RNA, 32 nt, Homo Sapiens
aagaugaccugguggcacacacaggggugggc

SEQ ID NO: 11679 - RNA, 32 nt, Homo Sapiens
gggguggcgggggaagcgucuccagcugccag

SEQ ID NO: 11680 - RNA, 32 nt, Homo Sapiens
gugcuugugaugauacacacacaugcacaggu

SEQ ID NO: 11681 - RNA, 32 nt, Homo Sapiens
aauuagccgggcgggcgugguggcgggugccu

SEQ ID NO: 11682 - RNA, 32 nt, Homo Sapiens
uguucucagcugucacauccuucccugaggcu

SEQ ID NO: 11683 - RNA, 32 nt, Homo Sapiens
caugaaagcuggaagcgcuucuuuccgacugc

SEQ ID NO: 11684 - RNA, 32 nt, Homo Sapiens
uggcuucauuguuucuuucucaguauuagaaa

SEQ ID NO: 11685 - RNA, 32 nt, Homo Sapiens
caagagccauucucccuucugacuuuccuucc

SEQ ID NO: 11686 - RNA, 32 nt, Homo Sapiens
ugcuuugagaggaagaagauggucaucacaga

SEQ ID NO: 11687 - RNA, 32 nt, Homo Sapiens
ucucccccaagcccacuccaggcccugggaau

SEQ ID NO: 11688 - RNA, 32 nt, Homo Sapiens
aagcauuauguuuguuaauacauauuuauuag

SEQ ID NO: 11689 - RNA, 32 nt, Homo Sapiens
cuagcaaauuaaaauaugcuuugauucauacu

SEQ ID NO: 11690 - RNA, 32 nt, Homo Sapiens
uguuuuaaaaacuacauugcuucauuacuuuc

SEQ ID NO: 11691 - RNA, 32 nt, Homo Sapiens
cuuuggagaagcugagcaguguuguggccgcc

SEQ ID NO: 11692 - RNA, 32 nt, Homo Sapiens
auuugugaucaguagucucucuggagagauaa

SEQ ID NO: 11693 - RNA, 32 nt, Homo Sapiens
ccccagcuuuaaaagcuagagaucucagagaa

SEQ ID NO: 11694 - RNA, 32 nt, Homo Sapiens
gagcagacugugcggcacccaggcccaguggc

SEQ ID NO: 11695 - RNA, 32 nt, Homo Sapiens
agacugguucuuuagaacaaauccacagacuu

SEQ ID NO: 11696 - RNA, 32 nt, Homo Sapiens
ucagguuugcuggugucuggcuuaguccaagg

SEQ ID NO: 11697 - RNA, 32 nt, Homo Sapiens
agacacuaucauauaaaacuuuguacugcauu

SEQ ID NO: 11698 - RNA, 32 nt, Homo Sapiens
cauuuauugagcagucauuaugcauccauuau

SEQ ID NO: 11699 - RNA, 32 nt, Homo Sapiens
cuuuuuugcuaaacucagauuuuuuagccuaa

SEQ ID NO: 11700 - RNA, 32 nt, Homo Sapiens
ccuccuacugucaucuccauucagccuagcac

SEQ ID NO: 11701 - RNA, 32 nt, Homo Sapiens
uuucuuugaacuccuuuuuuuaaaacagccuc

SEQ ID NO: 11702 - RNA, 31 nt, Homo Sapiens
cuuccagagucaucuaccugagucccaaagc

SEQ ID NO: 11703 - RNA, 32 nt, Homo Sapiens
agagcuucaaggaaaacccgaacugccuacca

SEQ ID NO: 11704 - RNA, 32 nt, Homo Sapiens
auauaucucuaaguccagagccaggagaguug

SEQ ID NO: 11705 - RNA, 32 nt, Homo Sapiens
accugucaucuccacaaguuuccuccugcccc

SEQ ID NO: 11706 - RNA, 32 nt, Homo Sapiens
auggaacagguguuggaggguaccucaguuca

SEQ ID NO: 11707 - RNA, 32 nt, Homo Sapiens
uugagaccaagcccggcgaccuggcaaggugg

SEQ ID NO: 11708 - RNA, 32 nt, Homo Sapiens
aagaaguaauauauguaacauaaaauauaugu

SEQ ID NO: 11709 - RNA, 32 nt, Homo Sapiens
aguacauguuuacgggaggcgcuugguuacgg

SEQ ID NO: 11710 - RNA, 32 nt, Homo Sapiens
uuggugcucacuuucuccugcuuuugagcuuu

SEQ ID NO: 11711 - RNA, 32 nt, Homo Sapiens
ggcugcuucuccucuucaguauggacucuaga

SEQ ID NO: 11712 - RNA, 32 nt, Homo Sapiens
cgguggagauaaaaguugauuugcucuaaaaa

SEQ ID NO: 11713 - RNA, 32 nt, Homo Sapiens
gguuguucuggcugguuugaaaagcacaaaua

SEQ ID NO: 11714 - RNA, 32 nt, Homo Sapiens
ugaggacuggcgcugaggaggcggcgguggcu

SEQ ID NO: 11715 - RNA, 32 nt, Homo Sapiens
uuccccuguuuuucuuucugcuuuccaagacu

SEQ ID NO: 11716 - RNA, 32 nt, Homo Sapiens
cuugccugauggguucauauuccucuucaauu

SEQ ID NO: 11717 - RNA, 32 nt, Homo Sapiens
acagcagcugucuggcccucaauccccaagcu

SEQ ID NO: 11718 - RNA, 32 nt, Homo Sapiens
augcugggaggcaggaggcucaugcuccuguc

SEQ ID NO: 11719 - RNA, 28 nt, Homo Sapiens
ccugagggcugugccaggaugacugucu

SEQ ID NO: 11720 - RNA, 32 nt, Homo Sapiens
gcagaggaacaucaguuuucaaaccaacacug

SEQ ID NO: 11721 - RNA, 32 nt, Homo Sapiens
uagguaaaaguacguaauuaaauaauguuuuu

SEQ ID NO: 11722 - RNA, 32 nt, Homo Sapiens
auuguuaaacaucauucuuaucaauguaaaau

SEQ ID NO: 11723 - RNA, 32 nt, Homo Sapiens
gacacccagagccccaggcuuucucggcaccc

SEQ ID NO: 11724 - RNA, 32 nt, Homo Sapiens
uccuguuccugcagccucuccuccugucuccu

SEQ ID NO: 11725 - RNA, 32 nt, Homo Sapiens
auuuuccccccacuccucccuugaucuuuuug

SEQ ID NO: 11726 - RNA, 32 nt, Homo Sapiens
ggugggcaccagcucaggggcuuccauuugca

SEQ ID NO: 11727 - RNA, 32 nt, Homo Sapiens
uauaggugcugggcacugugucugggacacag

SEQ ID NO: 11728 - RNA, 32 nt, Homo Sapiens
uguuuuuuaaacaaauucugauacaggcgaca

SEQ ID NO: 11729 - RNA, 32 nt, Homo Sapiens
guaaugucauauuugcaaacuuuuuuaguuuu

SEQ ID NO: 11730 - RNA, 32 nt, Homo Sapiens
acccaggcggggguguuguggguacaggccau

SEQ ID NO: 11731 - RNA, 32 nt, Homo Sapiens
agacuauauuuauauucuuagauaguuuguuc

SEQ ID NO: 11732 - RNA, 32 nt, Homo Sapiens
cugcagccauggggucugaggaccacggcgcc

SEQ ID NO: 11733 - RNA, 32 nt, Homo Sapiens
cucaaaaaccacaguccucaccacaguuuauu

SEQ ID NO: 11734 - RNA, 32 nt, Homo Sapiens
aagaaccccagaugauuuguguacaaaugaaa

SEQ ID NO: 11735 - RNA, 32 nt, Homo Sapiens
uuuguaucaaaauaaauauccaguuucuuuua

SEQ ID NO: 11736 - RNA, 32 nt, Homo Sapiens
cggguaggggaagaggguggcuggacuuaagg

SEQ ID NO: 11737 - RNA, 32 nt, Homo Sapiens
gaacagugguggccagcuuggaggauggacau

SEQ ID NO: 11738 - RNA, 32 nt, Homo Sapiens
guuuuuaggagauggucuugcucugucacuca

SEQ ID NO: 11739 - RNA, 31 nt, Homo Sapiens
gcugcgagggcggccgauggcggccgggagg

SEQ ID NO: 11740 - RNA, 32 nt, Homo Sapiens
gcuaccagccgcccccuguguacugguggcgg

SEQ ID NO: 11741 - RNA, 32 nt, Homo Sapiens
uccuagggggauguuacuuucagugucaccgg

SEQ ID NO: 11742 - RNA, 32 nt, Homo Sapiens
uuaaccuuuaccauuuaaugucaucuaccuga

SEQ ID NO: 11743 - RNA, 29 nt, Homo Sapiens
uggcagcaggagucauauuuucugugugu

SEQ ID NO: 11744 - RNA, 32 nt, Homo Sapiens
cugccucuuugauuacuaaugauugucaguga

SEQ ID NO: 11745 - RNA, 32 nt, Homo Sapiens
gccucagccggggccaccagcacugcugccac

SEQ ID NO: 11746 - RNA, 32 nt, Homo Sapiens
cacaaaagaacaggcuguccucaccugaccac

SEQ ID NO: 11747 - RNA, 29 nt, Homo Sapiens
gggucaugauaugaguggaauuuacauuu

SEQ ID NO: 11748 - RNA, 32 nt, Homo Sapiens
gcgcaggcaaagagaagauggugcugucauga

SEQ ID NO: 11749 - RNA, 32 nt, Homo Sapiens
ccuguuugcagacguuggcgggccccgaggcu

SEQ ID NO: 11750 - RNA, 30 nt, Homo Sapiens
auuucccuggacugguucccuggauuaugg

SEQ ID NO: 11751 - RNA, 32 nt, Homo Sapiens
cagacuccccgaaguuggccugcccggccuuu

SEQ ID NO: 11752 - RNA, 30 nt, Homo Sapiens
agugagauuaucacguacaagagugagauu

SEQ ID NO: 11753 - RNA, 32 nt, Homo Sapiens
uauuucacuccaguccugaagcaggugggaua

SEQ ID NO: 11754 - RNA, 32 nt, Homo Sapiens
caaaaacaugauuacagggacaucucaggcug

SEQ ID NO: 11755 - RNA, 32 nt, Homo Sapiens
ggugaagauacccuggccuaggaggcaagagc

SEQ ID NO: 11756 - RNA, 32 nt, Homo Sapiens
ggcugaucuugaacuccugaccucaagugauc

SEQ ID NO: 11757 - RNA, 32 nt, Homo Sapiens
ggcuggucuugaacuccugaccucaagugguc

SEQ ID NO: 11758 - RNA, 32 nt, Homo Sapiens
aauauucaagauuauaaagguaucaggucucc

SEQ ID NO: 11759 - RNA, 32 nt, Homo Sapiens
cuugaagcccccagcccuaaucucacccucuc

SEQ ID NO: 11760 - RNA, 32 nt, Homo Sapiens
caguugccuuuguaggccaagaucaugccgca

SEQ ID NO: 11761 - RNA, 32 nt, Homo Sapiens
gaaagggguauuaacaacgacaacaaaaagau

SEQ ID NO: 11762 - RNA, 32 nt, Homo Sapiens
guuccugcgcgcggcccgccauggagguggag

SEQ ID NO: 11763 - RNA, 32 nt, Homo Sapiens
ccuccugggucaccucugauggcugcugucca

SEQ ID NO: 11764 - RNA, 32 nt, Homo Sapiens
gcucucccugggcuucucucucuucuaguucu

SEQ ID NO: 11765 - RNA, 32 nt, Homo Sapiens
ggagguggggcauccgggucucuugguggcug

SEQ ID NO: 11766 - RNA, 32 nt, Homo Sapiens
ggaaauccuaguuuccucuccuucguaucccg

SEQ ID NO: 11767 - RNA, 32 nt, Homo Sapiens
uuucucugggggugggggugggggccgggagc

SEQ ID NO: 11768 - RNA, 32 nt, Homo Sapiens
ugcugcugcugggccgccggcgcguggacuuc

SEQ ID NO: 11769 - RNA, 32 nt, Homo Sapiens
uugaugagcccugaaauacuguugacauuaac

SEQ ID NO: 11770 - RNA, 32 nt, Homo Sapiens
gacugcuggugcccugcgucccgggaucccga

SEQ ID NO: 11771 - RNA, 32 nt, Homo Sapiens
ucguccugcugaagcaggccacagcugugcgc

SEQ ID NO: 11772 - RNA, 32 nt, Homo Sapiens
ccccgagcuggagggccuggcucccaccaugc

SEQ ID NO: 11773 - RNA, 32 nt, Homo Sapiens
cgggccggacgaaggaugcuuucuuccuagag

SEQ ID NO: 11774 - RNA, 32 nt, Homo Sapiens
uuuugauuagaccccuggagcuauccggguac

SEQ ID NO: 11775 - RNA, 32 nt, Homo Sapiens
ugccaggaaagggacauggacccacgugcuug

SEQ ID NO: 11776 - RNA, 32 nt, Homo Sapiens
auuuucauuguauauuugauauauuuuuaauu

SEQ ID NO: 11777 - RNA, 32 nt, Homo Sapiens
uaggaggggguggaacacagggggcccauccu

SEQ ID NO: 11778 - RNA, 32 nt, Homo Sapiens
gcccucuguccuuccaacccagcccucggcug

SEQ ID NO: 11779 - RNA, 32 nt, Homo Sapiens
gcgcgccccuucccuccugccgcagccugcga

SEQ ID NO: 11780 - RNA, 27 nt, Homo Sapiens
agggucuguuaauucuuauauuuuucu

SEQ ID NO: 11781 - RNA, 32 nt, Homo Sapiens
gggggaaugcaaacuggaagggaauacggcaa

SEQ ID NO: 11782 - RNA, 32 nt, Homo Sapiens
ggaugaaaaaaguagaaaaguaggucauucuu

SEQ ID NO: 11783 - RNA, 32 nt, Homo Sapiens
gguucuugccguggcucuuccuccucccucag

SEQ ID NO: 11784 - RNA, 32 nt, Homo Sapiens
cuccacgcugcgcccgcugucccggccucuaa

SEQ ID NO: 11785 - RNA, 32 nt, Homo Sapiens
agcauuaauguuucuuuuguauaaauuccugu

SEQ ID NO: 11786 - RNA, 32 nt, Homo Sapiens
caaugugggugcagaggcucucugugugcaga

SEQ ID NO: 11787 - RNA, 32 nt, Homo Sapiens
aggcugaggaguggagaugaccagaauauaag

SEQ ID NO: 11788 - RNA, 32 nt, Homo Sapiens
augguuugauaaauuuguuguauuccaaaacu

SEQ ID NO: 11789 - RNA, 32 nt, Homo Sapiens
cucaccaggccugcccagggccugcagccuuc

SEQ ID NO: 11790 - RNA, 32 nt, Homo Sapiens
agcuacccacuuccgguauccuugacucuuca

SEQ ID NO: 11791 - RNA, 32 nt, Homo Sapiens
ugguugguccacuuacuucaguagucugaaaa

SEQ ID NO: 11792 - RNA, 32 nt, Homo Sapiens
guaggcagacccuggacccagccucagaucca

SEQ ID NO: 11793 - RNA, 32 nt, Homo Sapiens
cagcuuuauggagauauaauucuuaugccaua

SEQ ID NO: 11794 - RNA, 32 nt, Homo Sapiens
gcuggagugcagugacucaugucucggcucac

SEQ ID NO: 11795 - RNA, 32 nt, Homo Sapiens
gaaagcauacuuuuaugcuaagaucuuacuuu

SEQ ID NO: 11796 - RNA, 32 nt, Homo Sapiens
uccguuuucuccgucagacuucucucccuucu

SEQ ID NO: 11797 - RNA, 32 nt, Homo Sapiens
agcuguacugagucuagaugacucugaccccc

SEQ ID NO: 11798 - RNA, 32 nt, Homo Sapiens
cauccccuuuuuccugugcaguggaaccccuc

SEQ ID NO: 11799 - RNA, 31 nt, Homo Sapiens
cuuccauggugugaucgucugacugguguua

SEQ ID NO: 11800 - RNA, 32 nt, Homo Sapiens
cacguugcugcccaggucuggaccucagcggg

SEQ ID NO: 11801 - RNA, 32 nt, Homo Sapiens
cugagcuuucugggggcgccuggcaucgccgg

SEQ ID NO: 11802 - RNA, 32 nt, Homo Sapiens
caauaaaguguugucuuuuucuuaaaaaaaaa

SEQ ID NO: 11803 - RNA, 32 nt, Homo Sapiens
gguccccucggcuccuaaucucuucucaaaac

SEQ ID NO: 11804 - RNA, 32 nt, Homo Sapiens
gguggaaaauggaugcaagugauucuaaguuu

SEQ ID NO: 11805 - RNA, 32 nt, Homo Sapiens
gggugggccagccccagggccaggguccccuu

SEQ ID NO: 11806 - RNA, 32 nt, Homo Sapiens
cuguaagaaugagaagucugccaagucuaagg

SEQ ID NO: 11807 - RNA, 32 nt, Homo Sapiens
aagcaugauaaauguuuaaauguagucaacau

SEQ ID NO: 11808 - RNA, 32 nt, Homo Sapiens
ugcaguuucuucauacuucugucacuuuuucc

SEQ ID NO: 11809 - RNA, 32 nt, Homo Sapiens
gccgugcggcagccacgcuuguccuugaaccc

SEQ ID NO: 11810 - RNA, 32 nt, Homo Sapiens
cccacucugaacucaagucaccguggagcucc

SEQ ID NO: 11811 - RNA, 32 nt, Homo Sapiens
agucgucccgcacucggugcccgccccccgag

SEQ ID NO: 11812 - RNA, 32 nt, Homo Sapiens
aucucaccugggaugccugcagccagcccucc

SEQ ID NO: 11813 - RNA, 32 nt, Homo Sapiens
cuccuggaaauuccuagacucugcucucaugu

SEQ ID NO: 11814 - RNA, 32 nt, Homo Sapiens
aguaugucauauaucacaaaagaaauugccuu

SEQ ID NO: 11815 - RNA, 32 nt, Homo Sapiens
uugggcuucccucucuguucuaguauucaggg

SEQ ID NO: 11816 - RNA, 32 nt, Homo Sapiens
ugucucuuaaaaaaacaaaaagacauauucag

SEQ ID NO: 11817 - RNA, 29 nt, Homo Sapiens
ugcuguucagaauuaauccagacccuuuu

SEQ ID NO: 11818 - RNA, 32 nt, Homo Sapiens
ugugugagacauuaaaaaauggcccagggguu

SEQ ID NO: 11819 - RNA, 30 nt, Homo Sapiens
ccgccauggacgagcaggcgggucccggcg

SEQ ID NO: 11820 - RNA, 32 nt, Homo Sapiens
aaaaagaaaagaaaagaaaaccacccacauuu

SEQ ID NO: 11821 - RNA, 32 nt, Homo Sapiens
uaaauguuuauacuguauuucaaagaaguugu

SEQ ID NO: 11822 - RNA, 32 nt, Homo Sapiens
agcagcuuuucucugaagagaagaagagagag

SEQ ID NO: 11823 - RNA, 32 nt, Homo Sapiens
cgugcacgccauuccuacagcauuccaaagau

SEQ ID NO: 11824 - RNA, 32 nt, Homo Sapiens
uggaaucuuuuccaauaaccagcuaaagauuu

SEQ ID NO: 11825 - RNA, 32 nt, Homo Sapiens
ucagagaggucccagcacuggcuguggcuuuc

SEQ ID NO: 11826 - RNA, 32 nt, Homo Sapiens
cuguuaagggguggauaacauaauaugcagcu

SEQ ID NO: 11827 - RNA, 32 nt, Homo Sapiens
cccucggguuccucccaggagcucuggaggua

SEQ ID NO: 11828 - RNA, 31 nt, Homo Sapiens
acccacccacccuucagcuuaagccacuccc

SEQ ID NO: 11829 - RNA, 32 nt, Homo Sapiens
gucucaggcagacagcccuuuauagguguuug

SEQ ID NO: 11830 - RNA, 32 nt, Homo Sapiens
ggguggguaguaggagagcaaaaaguaugaau

SEQ ID NO: 11831 - RNA, 32 nt, Homo Sapiens
acccugucuaaaaacaaacaaacaaaaaaaaa

SEQ ID NO: 11832 - RNA, 32 nt, Homo Sapiens
caacgauuuaaauuuuuuuuuauuuuucaaag

SEQ ID NO: 11833 - RNA, 32 nt, Homo Sapiens
gaagagagcugauggcaagucuuguagucauu

SEQ ID NO: 11834 - RNA, 32 nt, Homo Sapiens
ugaauuuucuaaaaauguauuuuauaccggcu

SEQ ID NO: 11835 - RNA, 32 nt, Homo Sapiens
cuucaggucaccagcugagcugcgauaggaaa

SEQ ID NO: 11836 - RNA, 32 nt, Homo Sapiens
gaggggcauggccagcagcuugcguuagaaug

SEQ ID NO: 11837 - RNA, 32 nt, Homo Sapiens
cagcugccagccgaggaggcgcggcggagagg

SEQ ID NO: 11838 - RNA, 32 nt, Homo Sapiens
gcugcgccugccgccgccccaacagcggaggc

SEQ ID NO: 11839 - RNA, 32 nt, Homo Sapiens
auggaagggagggggagaaggugggugggcuc

SEQ ID NO: 11840 - RNA, 32 nt, Homo Sapiens
gagcccagacccuggaggaaauccuaccuuug

SEQ ID NO: 11841 - RNA, 32 nt, Homo Sapiens
aagccucugagccccaggcccggcccagcccg

SEQ ID NO: 11842 - RNA, 32 nt, Homo Sapiens
gcagacugugccugauuaucagagaacuccag

SEQ ID NO: 11843 - RNA, 32 nt, Homo Sapiens
uaaguggcuguucugggagucauuccaaagag

SEQ ID NO: 11844 - RNA, 32 nt, Homo Sapiens
cuuugaccugaaccagaagacacacauuugcu

SEQ ID NO: 11845 - RNA, 32 nt, Homo Sapiens
uugaggcagaccuuuagauauuuucaguuuuc

SEQ ID NO: 11846 - RNA, 32 nt, Homo Sapiens
acaauguguguaucuuuugcacagcaaaaacu

SEQ ID NO: 11847 - RNA, 32 nt, Homo Sapiens
gcuggggaggagccuuccuuucaggggugacc

SEQ ID NO: 11848 - RNA, 32 nt, Homo Sapiens
accgaaccuucggggggccgcggcuggagcgc

SEQ ID NO: 11849 - RNA, 30 nt, Homo Sapiens
auuccugcaggcaggaccuauaggcacgug

SEQ ID NO: 11850 - RNA, 32 nt, Homo Sapiens
uuuuagagcuggaaguguaguggcuuucauua

SEQ ID NO: 11851 - RNA, 32 nt, Homo Sapiens
ccuuuaugguuucccccuucuacauuucuuag

SEQ ID NO: 11852 - RNA, 32 nt, Homo Sapiens
agcaaguucauaguaagacaaacaaguccuau

SEQ ID NO: 11853 - RNA, 32 nt, Homo Sapiens
uaauuaggaaaucaacgucuuuggucaggaac

SEQ ID NO: 11854 - RNA, 32 nt, Homo Sapiens
ucgggcucacagugcuggccaccugguguugg

SEQ ID NO: 11855 - RNA, 32 nt, Homo Sapiens
uggaauuucugagaucccauggagguuagauu

SEQ ID NO: 11856 - RNA, 32 nt, Homo Sapiens
gcugcccccuccccagcccccaguucucuccc

SEQ ID NO: 11857 - RNA, 32 nt, Homo Sapiens
aucauggaaaauuucaaacauacaaaagauga

SEQ ID NO: 11858 - RNA, 32 nt, Homo Sapiens
uguucugucugacuuucuuuuuugauauagaa

SEQ ID NO: 11859 - RNA, 32 nt, Homo Sapiens
uagaauuuggaaaacuaagcgugguuggaauu

SEQ ID NO: 11860 - RNA, 30 nt, Homo Sapiens
ggucgaacugaaagcggcggcgggagacca

SEQ ID NO: 11861 - RNA, 32 nt, Homo Sapiens
accaaauccaaauucuugauaauuuagaucuc

SEQ ID NO: 11862 - RNA, 32 nt, Homo Sapiens
uuugagguaguuuguuuguauacuguuucucc

SEQ ID NO: 11863 - RNA, 32 nt, Homo Sapiens
ucagagagcugggaagcagacaggaaggagag

SEQ ID NO: 11864 - RNA, 32 nt, Homo Sapiens
auuugacacauaaaaguaauuaauugcuggag

SEQ ID NO: 11865 - RNA, 32 nt, Homo Sapiens
agaggcuucuaaaaagguauuuuuauauguuc

SEQ ID NO: 11866 - RNA, 32 nt, Homo Sapiens
ugcuucugguccuuaaauuuggguuauuuuug

SEQ ID NO: 11867 - RNA, 32 nt, Homo Sapiens
cacagcagguuuauccagaugaacugagaagg

SEQ ID NO: 11868 - RNA, 32 nt, Homo Sapiens
uuuuaccguggcaaccgucaagcuauucucug

SEQ ID NO: 11869 - RNA, 32 nt, Homo Sapiens
ucccuucauuuacuuuuucuugcuauaagccu

SEQ ID NO: 11870 - RNA, 32 nt, Homo Sapiens
ggacgagcgggccccgcggcgucaucggcggc

SEQ ID NO: 11871 - RNA, 32 nt, Homo Sapiens
gccauuugaugcauauauccucauaacaccua

SEQ ID NO: 11872 - RNA, 32 nt, Homo Sapiens
ugcaaccucacuggcuuucucacagcaagagu

SEQ ID NO: 11873 - RNA, 31 nt, Homo Sapiens
aauggauuugguaauuaaaauuagaagaaac

SEQ ID NO: 11874 - RNA, 32 nt, Homo Sapiens
ugguugaauacuuugaaaaaugcucaguucua

SEQ ID NO: 11875 - RNA, 32 nt, Homo Sapiens
agaacugccaccuggucaucagcaguggagaa

SEQ ID NO: 11876 - RNA, 32 nt, Homo Sapiens
uugguacuuaauuuuacaaaugcuguaauaua

SEQ ID NO: 11877 - RNA, 32 nt, Homo Sapiens
uuuuccucuacagauagccaauuaucccagca

SEQ ID NO: 11878 - RNA, 32 nt, Homo Sapiens
agauccaagagaagaacaucuguuacaacuuu

SEQ ID NO: 11879 - RNA, 32 nt, Homo Sapiens
uucuccaggcccagcucuuccucuuggcugag

SEQ ID NO: 11880 - RNA, 32 nt, Homo Sapiens
ugucagugggcccuuccauuuuauggagugga

SEQ ID NO: 11881 - RNA, 32 nt, Homo Sapiens
uuuacugcuaaguggggagaugggggaaaucc

SEQ ID NO: 11882 - RNA, 32 nt, Homo Sapiens
uacauuaaagugaaguuauuugaaagaaagaa

SEQ ID NO: 11883 - RNA, 32 nt, Homo Sapiens
uuauaaaucuucaugguuuuucuauuucugau

SEQ ID NO: 11884 - RNA, 32 nt, Homo Sapiens
agcagcucccgucuccuucccucuugacuccu

SEQ ID NO: 11885 - RNA, 32 nt, Homo Sapiens
cuguuucucccuugggacugugucucauguuu

SEQ ID NO: 11886 - RNA, 32 nt, Homo Sapiens
uucgcuugcccccagcucccacccucagcccu

SEQ ID NO: 11887 - RNA, 32 nt, Homo Sapiens
cggaggucgggaguuugagaccagccugacca

SEQ ID NO: 11888 - RNA, 32 nt, Homo Sapiens
ggugagcgcugccgccccggggcccccagcca

SEQ ID NO: 11889 - RNA, 32 nt, Homo Sapiens
ggguuucgcguguuggucaggcuggucuugau

SEQ ID NO: 11890 - RNA, 32 nt, Homo Sapiens
cuucauccccccacccaggaccuagugcaugc

SEQ ID NO: 11891 - RNA, 32 nt, Homo Sapiens
gugugaagaaggggugcgggggugugcggugc

SEQ ID NO: 11892 - RNA, 32 nt, Homo Sapiens
gcccacacucuaugcccuucuccuccacaaag

SEQ ID NO: 11893 - RNA, 32 nt, Homo Sapiens
ugagugcuccaguaaacagugauucucuuuau

SEQ ID NO: 11894 - RNA, 32 nt, Homo Sapiens
ccucgcccgccgugagcgcccggagcgguccg

SEQ ID NO: 11895 - RNA, 32 nt, Homo Sapiens
accuggggcccgcuccuccccccuccaggcca

SEQ ID NO: 11896 - RNA, 32 nt, Homo Sapiens
ugccagcuuggaguccuauuaaaugaaagcca

SEQ ID NO: 11897 - RNA, 32 nt, Homo Sapiens
guuuccuuuuaucuccuuccacgggccaggcg

SEQ ID NO: 11898 - RNA, 32 nt, Homo Sapiens
aaugcuuaaaagacauaugcaaauuguccaca

SEQ ID NO: 11899 - RNA, 32 nt, Homo Sapiens
acuuuaaguuuuucuuauaaaaauauuggagc

SEQ ID NO: 11900 - RNA, 32 nt, Homo Sapiens
ucaaaugcuguaauauauuuuuaugauagaau

SEQ ID NO: 11901 - RNA, 32 nt, Homo Sapiens
cccggcagcgugagcgcagagccggccucgac

SEQ ID NO: 11902 - RNA, 32 nt, Homo Sapiens
aguucaucuuccucccuguguacuuuccauuu

SEQ ID NO: 11903 - RNA, 32 nt, Homo Sapiens
agaaggccugcugagggcuguugggagugaga

SEQ ID NO: 11904 - RNA, 32 nt, Homo Sapiens
aaucuuugauuucauuuuauucuuuguaauuc

SEQ ID NO: 11905 - RNA, 32 nt, Homo Sapiens
uagguaguacaacugaagccaaaccugccuga

SEQ ID NO: 11906 - RNA, 32 nt, Homo Sapiens
ccucgccgccgggacccgggugccugggcucg

SEQ ID NO: 11907 - RNA, 32 nt, Homo Sapiens
cuugguuccacaaucaucuauugaguguacau

SEQ ID NO: 11908 - RNA, 32 nt, Homo Sapiens
acccagaucuacuauuuuuucaccuuaaaaca

SEQ ID NO: 11909 - RNA, 32 nt, Homo Sapiens
guaaaauacuaaaacauucaucuguaaaaugg

SEQ ID NO: 11910 - RNA, 32 nt, Homo Sapiens
gcugucccuucccccaucgguccucuuagggg

SEQ ID NO: 11911 - RNA, 32 nt, Homo Sapiens
accuugauaauauauaaugauauauauaacuc

SEQ ID NO: 11912 - RNA, 32 nt, Homo Sapiens
ggcccugucaaggggacuggugccuuguuuuc

SEQ ID NO: 11913 - RNA, 32 nt, Homo Sapiens
cggggggcggccuuugagcuucccggauaccg

SEQ ID NO: 11914 - RNA, 32 nt, Homo Sapiens
ccacagcagccacagcuggggcuuugcaccag

SEQ ID NO: 11915 - RNA, 32 nt, Homo Sapiens
agaaaauaaggguaaaaucaggcugaacugca

SEQ ID NO: 11916 - RNA, 32 nt, Homo Sapiens
ggagagccaggccugcccugcccugcuggcuu

SEQ ID NO: 11917 - RNA, 32 nt, Homo Sapiens
aucaagguaaaauuauugucaaaguuuaaaua

SEQ ID NO: 11918 - RNA, 32 nt, Homo Sapiens
aacuggggaccagcccccuucucccacaaaua

SEQ ID NO: 11919 - RNA, 32 nt, Homo Sapiens
auucagcaguuccauauugacagagcacaauu

SEQ ID NO: 11920 - RNA, 32 nt, Homo Sapiens
gaaauggaaaucugacagcuuuuuagaaaggu

SEQ ID NO: 11921 - RNA, 32 nt, Homo Sapiens
auuuggcaauaccuaucuguaugagaagacau

SEQ ID NO: 11922 - RNA, 32 nt, Homo Sapiens
agacuguaaaauugccaggaugcaguuuuccc

SEQ ID NO: 11923 - RNA, 32 nt, Homo Sapiens
uaaauuuuaagugguucuucaguuucagugcu

SEQ ID NO: 11924 - RNA, 32 nt, Homo Sapiens
agaacuugggauguuauuuugcaaacagauca

SEQ ID NO: 11925 - RNA, 32 nt, Homo Sapiens
gcggcggagccucuggcagagccccccgaccc

SEQ ID NO: 11926 - RNA, 32 nt, Homo Sapiens
aaaccaccacuuugagcuguccugccuuucug

SEQ ID NO: 11927 - RNA, 29 nt, Homo Sapiens
uuggugucauauggaucagaggcacaagu

SEQ ID NO: 11928 - RNA, 32 nt, Homo Sapiens
auugauuuugauguuaagaacaaaagaaguau

SEQ ID NO: 11929 - RNA, 32 nt, Homo Sapiens
uguaguaaugaaaauaccaaguugcaacauua

SEQ ID NO: 11930 - RNA, 32 nt, Homo Sapiens
aaguuucuccgggaacuggugggagacacagg

SEQ ID NO: 11931 - RNA, 32 nt, Homo Sapiens
ucuguauuaauuauugcuuuuacauucauuga

SEQ ID NO: 11932 - RNA, 32 nt, Homo Sapiens
aauucauaugcaguugcagagaugcaaaagag

SEQ ID NO: 11933 - RNA, 32 nt, Homo Sapiens
accagccccagccccagcucccuccggccgca

SEQ ID NO: 11934 - RNA, 32 nt, Homo Sapiens
ccaccagcagguaccggccuccccugagcccu

SEQ ID NO: 11935 - RNA, 32 nt, Homo Sapiens
uacaaacaccuccaugugcucagcaaauuugc

SEQ ID NO: 11936 - RNA, 31 nt, Homo Sapiens
uacuuauggaaaagaaagucagccuuuuuau

SEQ ID NO: 11937 - RNA, 32 nt, Homo Sapiens
uuugugaggaguugggaguuaaguauacauuu

SEQ ID NO: 11938 - RNA, 32 nt, Homo Sapiens
ucaccugcgggagaagucugcccgcugcccuc

SEQ ID NO: 11939 - RNA, 32 nt, Homo Sapiens
cacaccaguuuaucuuccagcuucugucagaa

SEQ ID NO: 11940 - RNA, 32 nt, Homo Sapiens
cuaaguaauguggaaacauccgauauaaaucu

SEQ ID NO: 11941 - RNA, 32 nt, Homo Sapiens
gaauuuguuuaaauaacauuaugggauugcaa

SEQ ID NO: 11942 - RNA, 32 nt, Homo Sapiens
aaauacaaaaucagccaggcgugguggcacau

SEQ ID NO: 11943 - RNA, 32 nt, Homo Sapiens
uguuuugggacaauuuuagauaccugagugca

SEQ ID NO: 11944 - RNA, 32 nt, Homo Sapiens
aggcagugauuaggaugaaauaauuguacaua

SEQ ID NO: 11945 - RNA, 32 nt, Homo Sapiens
ggacgucucaggugcaggcucccggccccagc

SEQ ID NO: 11946 - RNA, 32 nt, Homo Sapiens
gugauaaaaaucuauuucuuccuuauacagcu

SEQ ID NO: 11947 - RNA, 32 nt, Homo Sapiens
ugaguuuuacuuugccuuucaugagauuacga

SEQ ID NO: 11948 - RNA, 32 nt, Homo Sapiens
gucaagaagaucuccacaggcuucuggaugaa

SEQ ID NO: 11949 - RNA, 32 nt, Homo Sapiens
guaguucuagaggauaucgcaacaagugcguu

SEQ ID NO: 11950 - RNA, 32 nt, Homo Sapiens
uaaauacauuuguaccucucuuguauucuaaa

SEQ ID NO: 11951 - RNA, 32 nt, Homo Sapiens
accggggagcccccgccccgccccacauuccg

SEQ ID NO: 11952 - RNA, 32 nt, Homo Sapiens
agggaagggauccuauauguccuguuggcucu

SEQ ID NO: 11953 - RNA, 32 nt, Homo Sapiens
uaggugugcauucuuuuucuucuuagcaauuc

SEQ ID NO: 11954 - RNA, 32 nt, Homo Sapiens
gcacuuaauuuucaguaguagucuugacuuuu

SEQ ID NO: 11955 - RNA, 32 nt, Homo Sapiens
uuauucacguaugugauuugccuucuucaugc

SEQ ID NO: 11956 - RNA, 32 nt, Homo Sapiens
cuuucccaagacauuuucagacuuaaaaauaa

SEQ ID NO: 11957 - RNA, 30 nt, Homo Sapiens
cuggcgcugaacugcaucugcccggcgacc

SEQ ID NO: 11958 - RNA, 32 nt, Homo Sapiens
cccuggcccccucccuggaugacauuaaagaa

SEQ ID NO: 11959 - RNA, 32 nt, Homo Sapiens
gccugcuagaggagcucuguguucccaaggag

SEQ ID NO: 11960 - RNA, 31 nt, Homo Sapiens
aaauccaguacuguacacugaguuaauauga

SEQ ID NO: 11961 - RNA, 32 nt, Homo Sapiens
aaaacagggaaugcagguguguuuauagcguu

SEQ ID NO: 11962 - RNA, 29 nt, Homo Sapiens
ggcgucuggggacagugaugccaacucaa

SEQ ID NO: 11963 - RNA, 32 nt, Homo Sapiens
uucggguucacaggaugcugcaggcggaguuc

SEQ ID NO: 11964 - RNA, 32 nt, Homo Sapiens
uaucaauguaaucugcugaggaccuuuugucu

SEQ ID NO: 11965 - RNA, 32 nt, Homo Sapiens
ugaucuguuucccccaauaaagucucaaaucu

SEQ ID NO: 11966 - RNA, 32 nt, Homo Sapiens
aaaagagcugcuaggcagguauuuuauucuca

SEQ ID NO: 11967 - RNA, 32 nt, Homo Sapiens
cacagggcaagaacccggggccucccgccucc

SEQ ID NO: 11968 - RNA, 30 nt, Homo Sapiens
ccauguuggucaggcuauucucgaacuccu

SEQ ID NO: 11969 - RNA, 32 nt, Homo Sapiens
cuacacaaugcguugccuggcuccacgcccug

SEQ ID NO: 11970 - RNA, 32 nt, Homo Sapiens
augauccucaagguguagcagaggaauuugua

SEQ ID NO: 11971 - RNA, 32 nt, Homo Sapiens
ccguguuucccucuggaccagacgccgccugc

SEQ ID NO: 11972 - RNA, 32 nt, Homo Sapiens
gcucuggguccuuaauggcagcagccgccgcu

SEQ ID NO: 11973 - RNA, 32 nt, Homo Sapiens
agacuucauggacuuuucaguaacuuuguuuc

SEQ ID NO: 11974 - RNA, 32 nt, Homo Sapiens
ugagcgacaugggcccagcaucaggcgugacc

SEQ ID NO: 11975 - RNA, 32 nt, Homo Sapiens
uuucucuucuaaaauauucuaguugcauauaa

SEQ ID NO: 11976 - RNA, 32 nt, Homo Sapiens
ggccauaccuucccugcagaucuccagcccag

SEQ ID NO: 11977 - RNA, 32 nt, Homo Sapiens
gcauucucucccaccuacguccugcuucuugg

SEQ ID NO: 11978 - RNA, 32 nt, Homo Sapiens
uacacgcaaaacauuuuuaacuauugcaguuu

SEQ ID NO: 11979 - RNA, 32 nt, Homo Sapiens
caguacacauucaaagggguauuccuagcuca

SEQ ID NO: 11980 - RNA, 32 nt, Homo Sapiens
acucaggcagcuggcucuguguuggcugcugu

SEQ ID NO: 11981 - RNA, 32 nt, Homo Sapiens
aggaccugacagagcccaugcagggcuuuaga

SEQ ID NO: 11982 - RNA, 32 nt, Homo Sapiens
aucucugcacuucugcccuccauccugcucca

SEQ ID NO: 11983 - RNA, 32 nt, Homo Sapiens
gggauuacaggcaugagcuacugcacccggcc

SEQ ID NO: 11984 - RNA, 32 nt, Homo Sapiens
acguuagacgggugaauccagcccucgcaggg

SEQ ID NO: 11985 - RNA, 32 nt, Homo Sapiens
gccauugagucccucccucccccgccucuacc

SEQ ID NO: 11986 - RNA, 32 nt, Homo Sapiens
gucuugucuccucuccucaggccccuggaccu

SEQ ID NO: 11987 - RNA, 32 nt, Homo Sapiens
cccagguuaggaccacgugggugguucccuca

SEQ ID NO: 11988 - RNA, 32 nt, Homo Sapiens
aguuuggguguguauauauaguagcauuucaa

SEQ ID NO: 11989 - RNA, 32 nt, Homo Sapiens
agcaacacggcccauccaaacacacagggagg

SEQ ID NO: 11990 - RNA, 32 nt, Homo Sapiens
acggcuggacugccugccggcuuagggagggu

SEQ ID NO: 11991 - RNA, 32 nt, Homo Sapiens
aaaugauccaaugaaaacugguuuaacuagca

SEQ ID NO: 11992 - RNA, 32 nt, Homo Sapiens
cuccacauucucauaacagaagaaaaugcauu

SEQ ID NO: 11993 - RNA, 32 nt, Homo Sapiens
gugugaucucacagccagacauguauuauguu

SEQ ID NO: 11994 - RNA, 32 nt, Homo Sapiens
gcuccaccucacacccaccccugggcaucuua

SEQ ID NO: 11995 - RNA, 32 nt, Homo Sapiens
ugcacuggagucugaggccugggacccccccc

SEQ ID NO: 11996 - RNA, 32 nt, Homo Sapiens
ucacgauauaaaauaaaaaugaaaguauccuc

SEQ ID NO: 11997 - RNA, 32 nt, Homo Sapiens
agaaucaagaugacuguggaaaaaauaggcuu

SEQ ID NO: 11998 - RNA, 32 nt, Homo Sapiens
ggagaucaggaccauccuggcuaacaugguga

SEQ ID NO: 11999 - RNA, 32 nt, Homo Sapiens
aucagauggccgugugcugugcaugcaggagc

SEQ ID NO: 12000 - RNA, 32 nt, Homo Sapiens
gucuuuccagggcagcaugugauucauuuggg

SEQ ID NO: 12001 - RNA, 32 nt, Homo Sapiens
agaugguucugacucugucacccaggcuggag

SEQ ID NO: 12002 - RNA, 32 nt, Homo Sapiens
caguaggaaggggugaggcagcuguccugagc

SEQ ID NO: 12003 - RNA, 32 nt, Homo Sapiens
uuuuauuccagaugaacauguuuuaaaagugc

SEQ ID NO: 12004 - RNA, 32 nt, Homo Sapiens
ugccugcccucccuugguuccagucucucuuc

SEQ ID NO: 12005 - RNA, 32 nt, Homo Sapiens
uuagaaaggcauccaggaauuguuuuccuacg

SEQ ID NO: 12006 - RNA, 32 nt, Homo Sapiens
cuuuuccuuuuggacacuuuacauauggauuc

SEQ ID NO: 12007 - RNA, 32 nt, Homo Sapiens
auuuuuaaagagccacaaccaauaugaaauaa

SEQ ID NO: 12008 - RNA, 32 nt, Homo Sapiens
uuuccagaauaauuuuaccacccugcuagaug

SEQ ID NO: 12009 - RNA, 32 nt, Homo Sapiens
gcacauuucuucacaaaauuagauaaaguugg

SEQ ID NO: 12010 - RNA, 32 nt, Homo Sapiens
auuagcuugcuugaagugcugauuccauuuca

SEQ ID NO: 12011 - RNA, 32 nt, Homo Sapiens
cccuggccgcccccugccccccagccucuggc

SEQ ID NO: 12012 - RNA, 32 nt, Homo Sapiens
cuggcagggccccugccuccccgacccccgac

SEQ ID NO: 12013 - RNA, 32 nt, Homo Sapiens
ugugggcagggccagugugcccaauugcccga

SEQ ID NO: 12014 - RNA, 32 nt, Homo Sapiens
agucugucuacaggacacacgaaacgcaucgc

SEQ ID NO: 12015 - RNA, 32 nt, Homo Sapiens
uuuggcaguccccagacacugcugucuugaga

SEQ ID NO: 12016 - RNA, 32 nt, Homo Sapiens
gaaggcuaguaaagggcagagaaggcccugag

SEQ ID NO: 12017 - RNA, 32 nt, Homo Sapiens
cucaaaugagagacugguguggggaggagaga

SEQ ID NO: 12018 - RNA, 32 nt, Homo Sapiens
gcagaggaucaucaaaaaagagguaaucuacg

SEQ ID NO: 12019 - RNA, 32 nt, Homo Sapiens
ggggcgugaucgcggcggccccgggcucuggg

SEQ ID NO: 12020 - RNA, 32 nt, Homo Sapiens
uugugguacuggcaauaagauacacagcuccg

SEQ ID NO: 12021 - RNA, 32 nt, Homo Sapiens
cucaucugccagcuccguccugcaugccuggc

SEQ ID NO: 12022 - RNA, 32 nt, Homo Sapiens
cgagcgcggccgcggacgaagauggcgaccgc

SEQ ID NO: 12023 - RNA, 30 nt, Homo Sapiens
aaaaggcggcuguggaucgcccugggcugg

SEQ ID NO: 12024 - RNA, 32 nt, Homo Sapiens
caguauccuagaaucuuugugcucuugcugca

SEQ ID NO: 12025 - RNA, 32 nt, Homo Sapiens
ggacuaaauccaggguaaaaucaauguuacaa

SEQ ID NO: 12026 - RNA, 32 nt, Homo Sapiens
uccuuccaggccccaggcuggaugcuggguuc

SEQ ID NO: 12027 - RNA, 32 nt, Homo Sapiens
uaauaaugcugaaucuuaauuuagaggguaca

SEQ ID NO: 12028 - RNA, 32 nt, Homo Sapiens
uuuuuggaggaaucaaaugaccaagagauggg

SEQ ID NO: 12029 - RNA, 32 nt, Homo Sapiens
acuuucaggaaagggaggagcacaaggacucu

SEQ ID NO: 12030 - RNA, 32 nt, Homo Sapiens
cugacaguauuuuuccuauuaaguggugcagu

SEQ ID NO: 12031 - RNA, 32 nt, Homo Sapiens
uuuggccccucccaggccaucagucugcacuu

SEQ ID NO: 12032 - RNA, 32 nt, Homo Sapiens
caauggaccugauucuaguuuauucuaauuaa

SEQ ID NO: 12033 - RNA, 32 nt, Homo Sapiens
uuuuaaccaugaaaugacaauaaaaugauuuu

SEQ ID NO: 12034 - RNA, 32 nt, Homo Sapiens
ccugggagcgaccagcagccccaccugaaguc

SEQ ID NO: 12035 - RNA, 32 nt, Homo Sapiens
uaaaguuuaccagaacuguaauuuauaugugu

SEQ ID NO: 12036 - RNA, 32 nt, Homo Sapiens
cccaaagcuuugcuuuucuccuccuccccuuc

SEQ ID NO: 12037 - RNA, 32 nt, Homo Sapiens
auuccagcggcggcgccguugccgcugccggg

SEQ ID NO: 12038 - RNA, 32 nt, Homo Sapiens
ucucuccauggguggggucggccagcgccuuc

SEQ ID NO: 12039 - RNA, 32 nt, Homo Sapiens
uguuaaguucaccguaguaacacauaaaguaa

SEQ ID NO: 12040 - RNA, 32 nt, Homo Sapiens
ucacuagauugauuuuuuguuuagacaaacag

SEQ ID NO: 12041 - RNA, 32 nt, Homo Sapiens
augauagugcuuuagaaugagaauuaugccug

SEQ ID NO: 12042 - RNA, 32 nt, Homo Sapiens
cguucacccuccccccagcucaugauccuccu

SEQ ID NO: 12043 - RNA, 32 nt, Homo Sapiens
agccugugaccaccgauguccacacaccccca

SEQ ID NO: 12044 - RNA, 32 nt, Homo Sapiens
uuccuuguggaaaauaaaguguuuuguuuuuu

SEQ ID NO: 12045 - RNA, 32 nt, Homo Sapiens
aaaacucugaagauguaggccauuauacagag

SEQ ID NO: 12046 - RNA, 30 nt, Homo Sapiens
uuuuuggauaaaaagaaagauuguacagga

SEQ ID NO: 12047 - RNA, 32 nt, Homo Sapiens
aggagggggaauaucacacaccggggccuguu

SEQ ID NO: 12048 - RNA, 32 nt, Homo Sapiens
uucccauaauuucacuuuacuuucuguuuagg

SEQ ID NO: 12049 - RNA, 30 nt, Homo Sapiens
guguugucuuuucucaccaagaguauuaac

SEQ ID NO: 12050 - RNA, 26 nt, Homo Sapiens
cguuuauuaaaugaaaauauuuuugu

SEQ ID NO: 12051 - RNA, 32 nt, Homo Sapiens
gcacagucugcagcuuccugaguccuguucug

SEQ ID NO: 12052 - RNA, 32 nt, Homo Sapiens
gcgauccacccgcccaugccucccagagugcu

SEQ ID NO: 12053 - RNA, 32 nt, Homo Sapiens
uuaaaagagguaaauucuuguuuucuauauuu

SEQ ID NO: 12054 - RNA, 32 nt, Homo Sapiens
ggcccagaggauugcagaguuaugagggacca

SEQ ID NO: 12055 - RNA, 32 nt, Homo Sapiens
cggcuggacuuuugcagcuuccuuccaagucu

SEQ ID NO: 12056 - RNA, 32 nt, Homo Sapiens
acaucugguacagcugccaaacaucaaccggg

SEQ ID NO: 12057 - RNA, 32 nt, Homo Sapiens
ugggcacgugcccacacccccacuucucuagc

SEQ ID NO: 12058 - RNA, 32 nt, Homo Sapiens
aggccguucaauggggauccugcauuaggaag

SEQ ID NO: 12059 - RNA, 32 nt, Homo Sapiens
uugcugcugaagcacauccuugcaauguggga

SEQ ID NO: 12060 - RNA, 32 nt, Homo Sapiens
aguaacucuaacuggaacagcuuucuuguaga

SEQ ID NO: 12061 - RNA, 32 nt, Homo Sapiens
cccucacagcucucuccuccccgagggagccg

SEQ ID NO: 12062 - RNA, 32 nt, Homo Sapiens
acuuaauguaaaacccaaaacaguaaaaaucc

SEQ ID NO: 12063 - RNA, 32 nt, Homo Sapiens
ggcgugacaagcgucccggagaaagccaagcc

SEQ ID NO: 12064 - RNA, 30 nt, Homo Sapiens
ucaggcacccuagugggggaaaagggaauu

SEQ ID NO: 12065 - RNA, 32 nt, Homo Sapiens
aucaugacuaaucugacucauuuuggcucaca

SEQ ID NO: 12066 - RNA, 32 nt, Homo Sapiens
cccucccccgcagucggacucccuccccagcc

SEQ ID NO: 12067 - RNA, 32 nt, Homo Sapiens
ucuuuuucucccuggccuccagugcccaccag

SEQ ID NO: 12068 - RNA, 32 nt, Homo Sapiens
uuaaaacaaacaaacaaacaaacaaaaaaagg

SEQ ID NO: 12069 - RNA, 32 nt, Homo Sapiens
gcuauuccggguuuguggcugcuuggcuccac

SEQ ID NO: 12070 - RNA, 31 nt, Homo Sapiens
uuccacucagccaccacaguugccccaccau

SEQ ID NO: 12071 - RNA, 32 nt, Homo Sapiens
agaggaccuuagacaauuaccaaaaaguguuu

SEQ ID NO: 12072 - RNA, 32 nt, Homo Sapiens
aaauauuagcuaaaaacaaagcucuauguaaa

SEQ ID NO: 12073 - RNA, 32 nt, Homo Sapiens
cccccgcuagacagcaggagcacccugcucug

SEQ ID NO: 12074 - RNA, 32 nt, Homo Sapiens
gccccaacccgggaacccuggacugaggcucc

SEQ ID NO: 12075 - RNA, 28 nt, Homo Sapiens
gcaauggcugcaggaagaagccuauauc

SEQ ID NO: 12076 - RNA, 32 nt, Homo Sapiens
uccacauuauacauuugauguauugaccagaa

SEQ ID NO: 12077 - RNA, 32 nt, Homo Sapiens
uguguguccauaucaagcagcauucccagcag

SEQ ID NO: 12078 - RNA, 32 nt, Homo Sapiens
uuaacuuguauuuuuguacaaacaagauugug

SEQ ID NO: 12079 - RNA, 32 nt, Homo Sapiens
aaaccggggacggaaggacauuugacuuuuau

SEQ ID NO: 12080 - RNA, 32 nt, Homo Sapiens
ccgcugagagcagcugcaguagcugagcagug

SEQ ID NO: 12081 - RNA, 32 nt, Homo Sapiens
gcaaucucacccaaaauuaauucauggaaaag

SEQ ID NO: 12082 - RNA, 32 nt, Homo Sapiens
gcugccuccgccgcgccgccggcccggauugu

SEQ ID NO: 12083 - RNA, 32 nt, Homo Sapiens
cucagggcgucuuuuuccagccccugaggaaa

SEQ ID NO: 12084 - RNA, 32 nt, Homo Sapiens
ggcaaucuaagccccauucccugucucuuuac

SEQ ID NO: 12085 - RNA, 32 nt, Homo Sapiens
gcaguggugcaaucaugguucacugcagucuu

SEQ ID NO: 12086 - RNA, 32 nt, Homo Sapiens
uugggcuuuccacugagaucuacuggauaaag

SEQ ID NO: 12087 - RNA, 32 nt, Homo Sapiens
agagaaggugaugcagaaacuucuuuccagug

SEQ ID NO: 12088 - RNA, 32 nt, Homo Sapiens
caagucuuccaagaauaugugucaagauagag

SEQ ID NO: 12089 - RNA, 32 nt, Homo Sapiens
cuccccugcauaaaaggucucucuuggggcag

SEQ ID NO: 12090 - RNA, 32 nt, Homo Sapiens
ugaaaguuacuacuuaaaaucguugcaaauug

SEQ ID NO: 12091 - RNA, 32 nt, Homo Sapiens
gaaccauggggauuuuuuuuuaaugugccuaa

SEQ ID NO: 12092 - RNA, 30 nt, Homo Sapiens
ggcagagccaggcgcgcggaagucugaagg

SEQ ID NO: 12093 - RNA, 32 nt, Homo Sapiens
gcaagcacagaaaggaggagcugcgcagaagg

SEQ ID NO: 12094 - RNA, 32 nt, Homo Sapiens
aaaauuugcauucaaaaggaguggcccuguuu

SEQ ID NO: 12095 - RNA, 32 nt, Homo Sapiens
cccggccuuguacaguguaccucuguguaucu

SEQ ID NO: 12096 - RNA, 32 nt, Homo Sapiens
acuuuacucugaacuuuuuuuguuuuugcauu

SEQ ID NO: 12097 - RNA, 32 nt, Homo Sapiens
agauccccucacccucaccccauccuucccca

SEQ ID NO: 12098 - RNA, 32 nt, Homo Sapiens
aaaucagaaauauuuuauaaaacuucugguug

SEQ ID NO: 12099 - RNA, 32 nt, Homo Sapiens
cgccugcacccucaccucuccccucuccugcu

SEQ ID NO: 12100 - RNA, 32 nt, Homo Sapiens
uaguggggcguggucagcuccaccuccugauc

SEQ ID NO: 12101 - RNA, 32 nt, Homo Sapiens
acaaagaccugcuugggaauaaaccaaaugau

SEQ ID NO: 12102 - RNA, 32 nt, Homo Sapiens
ggaccuguauaaaauguuugagccuguuccau

SEQ ID NO: 12103 - RNA, 32 nt, Homo Sapiens
cucuacacuguguuuauauaaaccagaaguua

SEQ ID NO: 12104 - RNA, 32 nt, Homo Sapiens
cgggcaggggagagacccagcggcacugaucg

SEQ ID NO: 12105 - RNA, 32 nt, Homo Sapiens
auaaugaguauuacauuggccuugggggacag

SEQ ID NO: 12106 - RNA, 32 nt, Homo Sapiens
ggucccugccgagcggcggcggcggccugccu

SEQ ID NO: 12107 - RNA, 32 nt, Homo Sapiens
acaucauuuguugaaaugcccuuuaaaaugua

SEQ ID NO: 12108 - RNA, 32 nt, Homo Sapiens
accccaggacuucggcccacuccggggccucc

SEQ ID NO: 12109 - RNA, 32 nt, Homo Sapiens
uuugaauaauuucuccuguugacuaccaugau

SEQ ID NO: 12110 - RNA, 32 nt, Homo Sapiens
cugcgcaggcgcaguuccccgggugcgcccaa

SEQ ID NO: 12111 - RNA, 32 nt, Homo Sapiens
augguuauaauaauaaaaaugauaaaauugcc

SEQ ID NO: 12112 - RNA, 32 nt, Homo Sapiens
agguaguuuagaaaguuuuucucuguaacagc

SEQ ID NO: 12113 - RNA, 32 nt, Homo Sapiens
acacugcauacuuugcaaagccagugaccucc

SEQ ID NO: 12114 - RNA, 32 nt, Homo Sapiens
acagcuucuuugaggacccaguggguauggag

SEQ ID NO: 12115 - RNA, 32 nt, Homo Sapiens
cugcuggccccugcagccccagcccugcuuuu

SEQ ID NO: 12116 - RNA, 32 nt, Homo Sapiens
cugcgcugccagcuggagccgggcggagccag

SEQ ID NO: 12117 - RNA, 32 nt, Homo Sapiens
guguggccuuugcaucauuuaucuuguggaaa

SEQ ID NO: 12118 - RNA, 32 nt, Homo Sapiens
gcagggguggcugcugcuucccuugugcacuu

SEQ ID NO: 12119 - RNA, 32 nt, Homo Sapiens
ugauguuccuccuucaggaagccucccgugac

SEQ ID NO: 12120 - RNA, 32 nt, Homo Sapiens
agaaaggagcagucagcauucuuccaauuugc

SEQ ID NO: 12121 - RNA, 32 nt, Homo Sapiens
uccuggcucacagaccccacaaaaaagauccc

SEQ ID NO: 12122 - RNA, 32 nt, Homo Sapiens
cauacagugugauugggaauaaagauggagaa

SEQ ID NO: 12123 - RNA, 32 nt, Homo Sapiens
ugacagaugaaaaauuccguauuguaagugau

SEQ ID NO: 12124 - RNA, 32 nt, Homo Sapiens
cucuuggcccauggaccugaaggagaagcacc

SEQ ID NO: 12125 - RNA, 32 nt, Homo Sapiens
gacaguguuguacaguguuuugggcaugcacg

SEQ ID NO: 12126 - RNA, 32 nt, Homo Sapiens
uuuccuguggcauaauguguggucaauuuucu

SEQ ID NO: 12127 - RNA, 32 nt, Homo Sapiens
cccauccccgguugucccacuuuuguucgccu

SEQ ID NO: 12128 - RNA, 32 nt, Homo Sapiens
ggccugugcugaaguucccgggccccuggccc

SEQ ID NO: 12129 - RNA, 32 nt, Homo Sapiens
uauuauuugaaacaggacaccacaaaagguaa

SEQ ID NO: 12130 - RNA, 32 nt, Homo Sapiens
cagcgggaggggcugagcuggggcugugugcu

SEQ ID NO: 12131 - RNA, 32 nt, Homo Sapiens
ucucugcaagauuucaugauugagagaauucc

SEQ ID NO: 12132 - RNA, 32 nt, Homo Sapiens
gucauuaaaaauuuacuugaccaugggcauca

SEQ ID NO: 12133 - RNA, 32 nt, Homo Sapiens
aauguggauauuaaaauggauaggacauaauu

SEQ ID NO: 12134 - RNA, 32 nt, Homo Sapiens
cacgcaggggaagagaaagcaggagccgucca

SEQ ID NO: 12135 - RNA, 32 nt, Homo Sapiens
gccaggaauuggauucaguuuacacuaucauu

SEQ ID NO: 12136 - RNA, 32 nt, Homo Sapiens
agcagugugcuaaaaacguguaagaugugguc

SEQ ID NO: 12137 - RNA, 32 nt, Homo Sapiens
gcagugguaauuauuuuagaaauauuguuccu

SEQ ID NO: 12138 - RNA, 32 nt, Homo Sapiens
auaguuguacccccauguaccaggugggcaca

SEQ ID NO: 12139 - RNA, 32 nt, Homo Sapiens
cauugccugugaccauucagaauagaaaaagg

SEQ ID NO: 12140 - RNA, 32 nt, Homo Sapiens
ggcauuuucuguaggauuuucuuaugcacugc

SEQ ID NO: 12141 - RNA, 32 nt, Homo Sapiens
gggccacaagcaggagccggccucgggcacaa

SEQ ID NO: 12142 - RNA, 32 nt, Homo Sapiens
guacacagaguacccaagugaagagaacguca

SEQ ID NO: 12143 - RNA, 32 nt, Homo Sapiens
ccucaguucaaaaaauggacuggcaaugugau

SEQ ID NO: 12144 - RNA, 32 nt, Homo Sapiens
aaacuaaacaugccauuuaaagguaaacuugg

SEQ ID NO: 12145 - RNA, 32 nt, Homo Sapiens
uuuauggaguauggagauaggguccaguaucu

SEQ ID NO: 12146 - RNA, 32 nt, Homo Sapiens
augugugauuuacccuuuuuuaucuauuacuc

SEQ ID NO: 12147 - RNA, 32 nt, Homo Sapiens
ucucuguguaaauucugcccggugcugugaag

SEQ ID NO: 12148 - RNA, 32 nt, Homo Sapiens
ucucccccaggccccaggaccugcagggccaa

SEQ ID NO: 12149 - RNA, 32 nt, Homo Sapiens
ggacacacccucacuucgggaacaggcuuucu

SEQ ID NO: 12150 - RNA, 32 nt, Homo Sapiens
cuccaaaggaagguggacuuuuuugguggaga

SEQ ID NO: 12151 - RNA, 32 nt, Homo Sapiens
ccccuaagcagaaaacuggcccugcccugccc

SEQ ID NO: 12152 - RNA, 32 nt, Homo Sapiens
auuaauacugugaaacaaaauugauguuguuu

SEQ ID NO: 12153 - RNA, 32 nt, Homo Sapiens
aauagcagaagguugcaccucccccaaccuua

SEQ ID NO: 12154 - RNA, 32 nt, Homo Sapiens
caaaaacauuggcauuacugggaccacugaca

SEQ ID NO: 12155 - RNA, 32 nt, Homo Sapiens
ugucaguaggaaaaaggaauuguuaugaucca

SEQ ID NO: 12156 - RNA, 32 nt, Homo Sapiens
cgggccagcuggacgggcugccggccgugcgc

SEQ ID NO: 12157 - RNA, 32 nt, Homo Sapiens
gcaaggugcuugacaugcaagaggcuccacaa

SEQ ID NO: 12158 - RNA, 32 nt, Homo Sapiens
agacaaguuaauuuuuuggucaguggaaaaag

SEQ ID NO: 12159 - RNA, 32 nt, Homo Sapiens
cuaugauuuuuagacuaggcucuaguguucag

SEQ ID NO: 12160 - RNA, 32 nt, Homo Sapiens
ggucugaagaacuuaaggucuuuucugaagac

SEQ ID NO: 12161 - RNA, 32 nt, Homo Sapiens
cuccucaggaccacucaguccaccuguuccuc

SEQ ID NO: 12162 - RNA, 32 nt, Homo Sapiens
caccauugugaauguacugaaugccauucagu

SEQ ID NO: 12163 - RNA, 32 nt, Homo Sapiens
cuguguaacaccuuuuuuggcccauugggugc

SEQ ID NO: 12164 - RNA, 32 nt, Homo Sapiens
caaguggcgggccuuacucuggaaggaggccu

SEQ ID NO: 12165 - RNA, 32 nt, Homo Sapiens
cuccucaauuuucagacauuuugaaaggauga

SEQ ID NO: 12166 - RNA, 32 nt, Homo Sapiens
agauuuugguauuacacuguauuuguaucucu

SEQ ID NO: 12167 - RNA, 32 nt, Homo Sapiens
gaaccaaaguauuuuuucagcugguuguugaa

SEQ ID NO: 12168 - RNA, 32 nt, Homo Sapiens
ucggucugcggucuuuaccacaucaauaggac

SEQ ID NO: 12169 - RNA, 32 nt, Homo Sapiens
cacgcucgcgcccgccaugccggagcaguuca

SEQ ID NO: 12170 - RNA, 32 nt, Homo Sapiens
ugucacccugucaggcagcccuuuccaugccc

SEQ ID NO: 12171 - RNA, 32 nt, Homo Sapiens
uccagaacgacggaggaaggggcggagaggga

SEQ ID NO: 12172 - RNA, 32 nt, Homo Sapiens
gcgggggccggcgcuucuccaacguggggcug

SEQ ID NO: 12173 - RNA, 32 nt, Homo Sapiens
ugcccccuccccacccugccacucuugacauu

SEQ ID NO: 12174 - RNA, 31 nt, Homo Sapiens
agccugcuguggccagccccaagggcuuccc

SEQ ID NO: 12175 - RNA, 32 nt, Homo Sapiens
ggaguccaccucagaccucuauuggaaggaaa

SEQ ID NO: 12176 - RNA, 32 nt, Homo Sapiens
gagauguuuuuuccuuacaaugugaacucauc

SEQ ID NO: 12177 - RNA, 32 nt, Homo Sapiens
uuccuucaacugagggcucaaaacuccuggac

SEQ ID NO: 12178 - RNA, 28 nt, Homo Sapiens
uuugagggacagagaccaagcuagaucc

SEQ ID NO: 12179 - RNA, 32 nt, Homo Sapiens
gaggcugaggcggguggauugcuugagcccag

SEQ ID NO: 12180 - RNA, 32 nt, Homo Sapiens
uucugcuuguauauuucuaaaaagaggaagga

SEQ ID NO: 12181 - RNA, 32 nt, Homo Sapiens
auaaacacauucaaaaaggaaugagauaaaaa

SEQ ID NO: 12182 - RNA, 32 nt, Homo Sapiens
ugucucucaggauggugcucugagagagggca

SEQ ID NO: 12183 - RNA, 32 nt, Homo Sapiens
gccaucuagucgcaaaauugucuuaagggauu

SEQ ID NO: 12184 - RNA, 32 nt, Homo Sapiens
cucccgcgaccgccucucuccuccucaguggg

SEQ ID NO: 12185 - RNA, 32 nt, Homo Sapiens
ucauguuccauuucgugccgcuuucccccuuc

SEQ ID NO: 12186 - RNA, 32 nt, Homo Sapiens
gaggggaggggcggggccaggcgccugcggga

SEQ ID NO: 12187 - RNA, 32 nt, Homo Sapiens
agugugcagaaucugagagcaaugguuuuuac

SEQ ID NO: 12188 - RNA, 32 nt, Homo Sapiens
agugcggaaccgccgccucggccaugcggcuc

SEQ ID NO: 12189 - RNA, 32 nt, Homo Sapiens
ugucuuauuagagggcacuuugugguuccuga

SEQ ID NO: 12190 - RNA, 32 nt, Homo Sapiens
uggugaguguggcacagcgucuccaaagaacc

SEQ ID NO: 12191 - RNA, 32 nt, Homo Sapiens
cuuccagcaaugcuaugugucugggaguaagc

SEQ ID NO: 12192 - RNA, 32 nt, Homo Sapiens
ccagagagagcaaaucgaagcgugggaggcac

SEQ ID NO: 12193 - RNA, 32 nt, Homo Sapiens
aggauuuuugcugcuuuuggggugcaugggga

SEQ ID NO: 12194 - RNA, 32 nt, Homo Sapiens
acaucuguccuccaaugauccccucaagcucc

SEQ ID NO: 12195 - RNA, 32 nt, Homo Sapiens
uuagagccuuugauuuccuggacuggacugac

SEQ ID NO: 12196 - RNA, 32 nt, Homo Sapiens
gugauucugaugcacacuuuaaaguuuaggaa

SEQ ID NO: 12197 - RNA, 32 nt, Homo Sapiens
cagcggaggcagagccgggaggcugcgugggc

SEQ ID NO: 12198 - RNA, 32 nt, Homo Sapiens
agaagagggcgaggaagaagaugccucggccc

SEQ ID NO: 12199 - RNA, 32 nt, Homo Sapiens
cccagcuaauuuucuuuuuuuguuuuguuuug

SEQ ID NO: 12200 - RNA, 32 nt, Homo Sapiens
cuagcaacucuuauuucuuuccuuuaaaaaua

SEQ ID NO: 12201 - RNA, 32 nt, Homo Sapiens
gacagggucuugcuuugucacccaggcuggag

SEQ ID NO: 12202 - RNA, 32 nt, Homo Sapiens
uaauccuucuauuuucuugacaucugaccccc

SEQ ID NO: 12203 - RNA, 32 nt, Homo Sapiens
guggaaaaucuaugcauuaccuuaaugucucu

SEQ ID NO: 12204 - RNA, 32 nt, Homo Sapiens
gccaccgcauggcgagcgugcgggccaacacc

SEQ ID NO: 12205 - RNA, 32 nt, Homo Sapiens
ccgaucguacagagaccucuggugccugaccg

SEQ ID NO: 12206 - RNA, 32 nt, Homo Sapiens
uuguaaguuuucugaggccucgccagccaugc

SEQ ID NO: 12207 - RNA, 32 nt, Homo Sapiens
gagccggcgcgcgcucccaccuuugccgcaca

SEQ ID NO: 12208 - RNA, 32 nt, Homo Sapiens
gagggcgagcucauaaaacuacagggaagcgu

SEQ ID NO: 12209 - RNA, 32 nt, Homo Sapiens
agucacaucacuguugggcuuucacgucccug

SEQ ID NO: 12210 - RNA, 30 nt, Homo Sapiens
aaacuguaucaccuuugccaaguaagagug

SEQ ID NO: 12211 - RNA, 32 nt, Homo Sapiens
acaacugacagugaacacuaagauacccuuua

SEQ ID NO: 12212 - RNA, 32 nt, Homo Sapiens
guuuuuuuguuuauuucuuuacugaguugauc

SEQ ID NO: 12213 - RNA, 32 nt, Homo Sapiens
aaaggcaugaucccauccuggaccuggugcag

SEQ ID NO: 12214 - RNA, 32 nt, Homo Sapiens
cauagguagagaccccacccucccaucggucc

SEQ ID NO: 12215 - RNA, 32 nt, Homo Sapiens
aaaaacacgggauauauuuuagaggcaauugu

SEQ ID NO: 12216 - RNA, 32 nt, Homo Sapiens
uggagccccaagucagcccccauccuucccgg

SEQ ID NO: 12217 - RNA, 32 nt, Homo Sapiens
aggaggguggugccggccuccgcccgguggug

SEQ ID NO: 12218 - RNA, 32 nt, Homo Sapiens
uccugcaucccaugcuaagcagggucaugguc

SEQ ID NO: 12219 - RNA, 32 nt, Homo Sapiens
auuaggcacuuccaaggcuuuaguagagagag

SEQ ID NO: 12220 - RNA, 32 nt, Homo Sapiens
acugcgaacaaauaaacuucuguguuuuaguc

SEQ ID NO: 12221 - RNA, 32 nt, Homo Sapiens
auguacauauauauuucaaaagaaaaaauggg

SEQ ID NO: 12222 - RNA, 32 nt, Homo Sapiens
ccacccaccgaggaagacaugugguuugacga

SEQ ID NO: 12223 - RNA, 32 nt, Homo Sapiens
cuacagguggagaggagugugggguaugcaga

SEQ ID NO: 12224 - RNA, 32 nt, Homo Sapiens
aagaucaugcuuuuuauuauuaaggaauguua

SEQ ID NO: 12225 - RNA, 32 nt, Homo Sapiens
cuuugauguaacuggcuauaucguuggggcca

SEQ ID NO: 12226 - RNA, 32 nt, Homo Sapiens
gucaaacugggugaggguguuguugaagggag

SEQ ID NO: 12227 - RNA, 32 nt, Homo Sapiens
ucuuuaguuuugauuuuggaaagauguuaagc

SEQ ID NO: 12228 - RNA, 32 nt, Homo Sapiens
aacuaaaauuuuucuuuuucuuuuuaugauga

SEQ ID NO: 12229 - RNA, 32 nt, Homo Sapiens
guacagauguaaauguugaugaaaaugcaauu

SEQ ID NO: 12230 - RNA, 32 nt, Homo Sapiens
guggugugcauacaacagcagcaagacaguug

SEQ ID NO: 12231 - RNA, 32 nt, Homo Sapiens
aauauugaggggccugccauuacucaccuaga

SEQ ID NO: 12232 - RNA, 32 nt, Homo Sapiens
uuuaaggauaguuaaaacuuauuuugcaauua

SEQ ID NO: 12233 - RNA, 32 nt, Homo Sapiens
cacugugccaguagccuaggugucucaggccc

SEQ ID NO: 12234 - RNA, 32 nt, Homo Sapiens
uguauuauuuccccccuucagccccuacuaaa

SEQ ID NO: 12235 - RNA, 32 nt, Homo Sapiens
guggagaggagcugcuugugggcagugaggag

SEQ ID NO: 12236 - RNA, 32 nt, Homo Sapiens
acgacagcgggcccgagggcggugccgcagcc

SEQ ID NO: 12237 - RNA, 30 nt, Homo Sapiens
ucccuaagcggcggcggcggcgagucguga

SEQ ID NO: 12238 - RNA, 32 nt, Homo Sapiens
ugucagaggaagaacauguuuuuuguauucuu

SEQ ID NO: 12239 - RNA, 32 nt, Homo Sapiens
agggcaacauauauuugaauuuaaaagcacuu

SEQ ID NO: 12240 - RNA, 32 nt, Homo Sapiens
uuguaaggugguuuuucuuguuuugguuuggu

SEQ ID NO: 12241 - RNA, 30 nt, Homo Sapiens
cgggaacagacggaucggcagggcggggcg

SEQ ID NO: 12242 - RNA, 32 nt, Homo Sapiens
uuucauuuuguuuuguuuuuuacuuuaaugua

SEQ ID NO: 12243 - RNA, 32 nt, Homo Sapiens
uguauuccugaccuccgccauccaccccguug

SEQ ID NO: 12244 - RNA, 32 nt, Homo Sapiens
auuaggcauccaccuuacagucccgauuuugc

SEQ ID NO: 12245 - RNA, 32 nt, Homo Sapiens
uaaauggaaaaauuaaagugcaauaaaaauau

SEQ ID NO: 12246 - RNA, 32 nt, Homo Sapiens
uuaaagacaaaaaggcaacaugugccucacug

SEQ ID NO: 12247 - RNA, 32 nt, Homo Sapiens
uaaauacaaacacaucacaacgccgcccaaag

SEQ ID NO: 12248 - RNA, 32 nt, Homo Sapiens
uccuuucugcccuuggacgccgccgaagaagc

SEQ ID NO: 12249 - RNA, 32 nt, Homo Sapiens
ucaagggugucugccaccaccaugccugaccc

SEQ ID NO: 12250 - RNA, 32 nt, Homo Sapiens
ggaagaaagcagaauaaacauuuuugcacugc

SEQ ID NO: 12251 - RNA, 32 nt, Homo Sapiens
acugagcagacugacauagauguacuuggaca

SEQ ID NO: 12252 - RNA, 32 nt, Homo Sapiens
gggagguucauuuuccuuuaaacugauccagc

SEQ ID NO: 12253 - RNA, 32 nt, Homo Sapiens
aaauuuuugccauguaugaauuuucgaauaag

SEQ ID NO: 12254 - RNA, 32 nt, Homo Sapiens
ccgugggaacagagaauaccuguuuaguguug

SEQ ID NO: 12255 - RNA, 32 nt, Homo Sapiens
uuuugagucuggcucugucacccaggcuggag

SEQ ID NO: 12256 - RNA, 32 nt, Homo Sapiens
ucugccagcccucacugcugcccgucauuguu

SEQ ID NO: 12257 - RNA, 32 nt, Homo Sapiens
guccgccugccggcagaaugucccuggcugcu

SEQ ID NO: 12258 - RNA, 32 nt, Homo Sapiens
uuuuggcuucacucaugguggugugagucugu

SEQ ID NO: 12259 - RNA, 32 nt, Homo Sapiens
ccagggcagggacugacuccagcccuuggacu

SEQ ID NO: 12260 - RNA, 32 nt, Homo Sapiens
ucgccguggagacgagggcgggcccgcgcgag

SEQ ID NO: 12261 - RNA, 32 nt, Homo Sapiens
aaaagcgauuauuauuuuagagcaucucauuu

SEQ ID NO: 12262 - RNA, 32 nt, Homo Sapiens
agacauaaaaugaauuaauggaaacauaucca

SEQ ID NO: 12263 - RNA, 31 nt, Homo Sapiens
cuaucccucaauguuuuuaacagcucuaauc

SEQ ID NO: 12264 - RNA, 32 nt, Homo Sapiens
cuggauucaagcgguuuuccugccucagccuc

SEQ ID NO: 12265 - RNA, 32 nt, Homo Sapiens
guuacugaggugguaaauuaacuuuuuucugu

SEQ ID NO: 12266 - RNA, 32 nt, Homo Sapiens
acuucccccucuaaaguuauuuauuauugaug

SEQ ID NO: 12267 - RNA, 32 nt, Homo Sapiens
agcuccccuggccccaggugccuccaucagag

SEQ ID NO: 12268 - RNA, 32 nt, Homo Sapiens
aacccccugugcuucacaucugaaaaucucug

SEQ ID NO: 12269 - RNA, 29 nt, Homo Sapiens
uuucuucaugugaugucaugaaacuguac

SEQ ID NO: 12270 - RNA, 32 nt, Homo Sapiens
auuuaggcauauauauuuguacauaugugugu

SEQ ID NO: 12271 - RNA, 32 nt, Homo Sapiens
uuuugaagaguuuuuuccccgacgcucguucg

SEQ ID NO: 12272 - RNA, 32 nt, Homo Sapiens
cagcauggucugaaugaggaugacaaaaggag

SEQ ID NO: 12273 - RNA, 32 nt, Homo Sapiens
ggcacuugagagccacuguaaguaaacucuaa

SEQ ID NO: 12274 - RNA, 32 nt, Homo Sapiens
acucagcccuccccacccuggcucuccuugca

SEQ ID NO: 12275 - RNA, 32 nt, Homo Sapiens
aaccaaucaguuccaggaagaguuuuccagcc

SEQ ID NO: 12276 - RNA, 32 nt, Homo Sapiens
accugaaugggacuuuuuuagacagaucucca

SEQ ID NO: 12277 - RNA, 32 nt, Homo Sapiens
uuuuaugucugcuuuaaggaaaauaaaauaaa

SEQ ID NO: 12278 - RNA, 32 nt, Homo Sapiens
ccuuggggcagggacauguuuuguuuauaauu

SEQ ID NO: 12279 - RNA, 32 nt, Homo Sapiens
ugcaugucaucuucuaggccaagcauuucuag

SEQ ID NO: 12280 - RNA, 32 nt, Homo Sapiens
cuuuucugugguugcagccugaccaaaaguga

SEQ ID NO: 12281 - RNA, 32 nt, Homo Sapiens
gaugcauccauuucaguuuguuuacuuuaucc

SEQ ID NO: 12282 - RNA, 29 nt, Homo Sapiens
ccggauggcggcugcgacgcgcggcugcc

SEQ ID NO: 12283 - RNA, 32 nt, Homo Sapiens
gucccgcagccgccgcgcccgggcaaugggcc

SEQ ID NO: 12284 - RNA, 32 nt, Homo Sapiens
ugacacuugcacagcauggcucugccucacaa

SEQ ID NO: 12285 - RNA, 32 nt, Homo Sapiens
cugcugaggccgcgcccuccccgcccugaggu

SEQ ID NO: 12286 - RNA, 32 nt, Homo Sapiens
caucugcgccccacagccccuuuggagcuuuu

SEQ ID NO: 12287 - RNA, 32 nt, Homo Sapiens
gaugcuuuuauuagaugaucaacuaaaaauag

SEQ ID NO: 12288 - RNA, 32 nt, Homo Sapiens
gccuuucagguuaaauuuuagagugcccuggc

SEQ ID NO: 12289 - RNA, 32 nt, Homo Sapiens
uauauuuugcccaguuacuaaaaugguacauu

SEQ ID NO: 12290 - RNA, 32 nt, Homo Sapiens
cuggauguaauuuucuuuuuacguauuuuucu

SEQ ID NO: 12291 - RNA, 32 nt, Homo Sapiens
cccugaggggagagcggacugugccagugagu

SEQ ID NO: 12292 - RNA, 32 nt, Homo Sapiens
cgcugacucgccggagcgcucuguggcggucg

SEQ ID NO: 12293 - RNA, 32 nt, Homo Sapiens
cugcucuaugcggaucuggaccaucuagcccu

SEQ ID NO: 12294 - RNA, 32 nt, Homo Sapiens
gcagucagaagugauccaaaguucaggcuccc

SEQ ID NO: 12295 - RNA, 32 nt, Homo Sapiens
auugcugaaguaaauuuucaaauguuuuauua

SEQ ID NO: 12296 - RNA, 32 nt, Homo Sapiens
auccugggacauacugaugacuauaaacuggc

SEQ ID NO: 12297 - RNA, 32 nt, Homo Sapiens
guaauaguucccuuuguacuuuuccaagcuca

SEQ ID NO: 12298 - RNA, 32 nt, Homo Sapiens
gaacuaauuuauuguaauauauuucuguuauu

SEQ ID NO: 12299 - RNA, 32 nt, Homo Sapiens
gggaggcuacgaagcgcugcgcggcccccucg

SEQ ID NO: 12300 - RNA, 32 nt, Homo Sapiens
uaaaagcagacaccaaucggaugcucauuaga

SEQ ID NO: 12301 - RNA, 32 nt, Homo Sapiens
ccgccgucauguccgaagacucgagcgcccug

SEQ ID NO: 12302 - RNA, 32 nt, Homo Sapiens
gucccaccccagauccccuccuccucgccauc

SEQ ID NO: 12303 - RNA, 32 nt, Homo Sapiens
gaugcagacugauaccaccuccaccgcugagc

SEQ ID NO: 12304 - RNA, 32 nt, Homo Sapiens
cugggcgccucccucagcacguggugcaugcg

SEQ ID NO: 12305 - RNA, 32 nt, Homo Sapiens
ggaucucguucauuuucauguagacaaugaga

SEQ ID NO: 12306 - RNA, 32 nt, Homo Sapiens
ccaccggugaaaugagggucuccaucacccaa

SEQ ID NO: 12307 - RNA, 32 nt, Homo Sapiens
cugacccccgaaccacccaaccacauccauag

SEQ ID NO: 12308 - RNA, 32 nt, Homo Sapiens
cacuaagaaguuccacuuaacacaugaauuuc

SEQ ID NO: 12309 - RNA, 32 nt, Homo Sapiens
gacucaggaaaggauuucuacaguguucuaua

SEQ ID NO: 12310 - RNA, 32 nt, Homo Sapiens
aacagccugguuaacauggugaaacaccaucu

SEQ ID NO: 12311 - RNA, 32 nt, Homo Sapiens
uuucacaccacccaccaacccucagugaaaca

SEQ ID NO: 12312 - RNA, 32 nt, Homo Sapiens
ugcaaagcaaggaaauacuacuacugguaaua

SEQ ID NO: 12313 - RNA, 32 nt, Homo Sapiens
cugggcccgcggcugcccgugcccccucugac

SEQ ID NO: 12314 - RNA, 32 nt, Homo Sapiens
uuccgcgccggugccuggucuucgucgucaac

SEQ ID NO: 12315 - RNA, 32 nt, Homo Sapiens
uuuuguuauagcagaguuucuuguuuaaaaaa

SEQ ID NO: 12316 - RNA, 32 nt, Homo Sapiens
cucgaucgaaccaagcuacuaaauugcugagc

SEQ ID NO: 12317 - RNA, 32 nt, Homo Sapiens
gccauccgccagcgcgggcgcccgccauccgc

SEQ ID NO: 12318 - RNA, 32 nt, Homo Sapiens
uccgcguggaugacuaggaaaaggggauugga

SEQ ID NO: 12319 - RNA, 32 nt, Homo Sapiens
guucaucugaagauucgaaugaaaagaaaugc

SEQ ID NO: 12320 - RNA, 32 nt, Homo Sapiens
uaaacaaacaaauuaauguuguucuaaaggcu

SEQ ID NO: 12321 - RNA, 32 nt, Homo Sapiens
cuguugcacuguauuucaaucaucuguaauua

SEQ ID NO: 12322 - RNA, 32 nt, Homo Sapiens
agaaaggcacugggcuuuaaagagcgaaauga

SEQ ID NO: 12323 - RNA, 32 nt, Homo Sapiens
aagcuggcacgcugccccgggggagccucucu

SEQ ID NO: 12324 - RNA, 32 nt, Homo Sapiens
gcccgcgguugcaacgggaucccgggcgcugc

SEQ ID NO: 12325 - RNA, 32 nt, Homo Sapiens
aaaauauuucucuacuuuuaaaacaggauacu

SEQ ID NO: 12326 - RNA, 32 nt, Homo Sapiens
ugcaggugucagcuuuucgucuaguaacuuaa

SEQ ID NO: 12327 - RNA, 32 nt, Homo Sapiens
aggccugaagguguccacagccaggcaggugg

SEQ ID NO: 12328 - RNA, 32 nt, Homo Sapiens
ugugaauaucuuccugcuucuagucaaagcuu

SEQ ID NO: 12329 - RNA, 32 nt, Homo Sapiens
gccuggaccccauugucugucugcuucccacc

SEQ ID NO: 12330 - RNA, 32 nt, Homo Sapiens
acauucugcccccggaaugcacgucugaaaga

SEQ ID NO: 12331 - RNA, 32 nt, Homo Sapiens
gcugaggagcagcuguucugaugcacgggaac

SEQ ID NO: 12332 - RNA, 32 nt, Homo Sapiens
cgccaggcgugguggcucacgccuguaauccc

SEQ ID NO: 12333 - RNA, 32 nt, Homo Sapiens
aagugaugaugaugaugaucuggguucaaaca

SEQ ID NO: 12334 - RNA, 32 nt, Homo Sapiens
gugcucgccauggccgacgaaaagcccaagga

SEQ ID NO: 12335 - RNA, 32 nt, Homo Sapiens
uuguauuuuaguaguauuuucuuaguagaaaa

SEQ ID NO: 12336 - RNA, 32 nt, Homo Sapiens
cuauucuacauucuuaauauuguauauuaccu

SEQ ID NO: 12337 - RNA, 32 nt, Homo Sapiens
aguugaccacuacucuucuuacucuaacaagc

SEQ ID NO: 12338 - RNA, 32 nt, Homo Sapiens
uuacuuuuuuuuucuuuuuucuuuuuuuaaag

SEQ ID NO: 12339 - RNA, 32 nt, Homo Sapiens
ggccuucgaccguugcaaauagacuaaaguga

SEQ ID NO: 12340 - RNA, 32 nt, Homo Sapiens
cuauuauuccaagugaaaaucaugcagcugag

SEQ ID NO: 12341 - RNA, 32 nt, Homo Sapiens
uccgaucggcguggagcgccgggcccggagcg

SEQ ID NO: 12342 - RNA, 32 nt, Homo Sapiens
ccgcccgccgucugccgcccuaggcuuccuga

SEQ ID NO: 12343 - RNA, 32 nt, Homo Sapiens
guacugggcuuccaagcuuuggcauucaggcc

SEQ ID NO: 12344 - RNA, 32 nt, Homo Sapiens
cccucugguggccacuccuccuucuccacucc

SEQ ID NO: 12345 - RNA, 32 nt, Homo Sapiens
ugacccaaaccaaaaacauuuuugaggggcac

SEQ ID NO: 12346 - RNA, 32 nt, Homo Sapiens
aggaugguggcaucgggcugcugcugcccaug

SEQ ID NO: 12347 - RNA, 32 nt, Homo Sapiens
gugaagccuccagaggucccagcccuucucca

SEQ ID NO: 12348 - RNA, 32 nt, Homo Sapiens
auuuauauaggaaugugauguuagagaacuac

SEQ ID NO: 12349 - RNA, 32 nt, Homo Sapiens
ccaggcgccaggggcucugaucucccauccau

SEQ ID NO: 12350 - RNA, 32 nt, Homo Sapiens
ggacaccagugagcuuccaccuugguggguuu

SEQ ID NO: 12351 - RNA, 32 nt, Homo Sapiens
cacccucccuccccaccuccucaggccagcuc

SEQ ID NO: 12352 - RNA, 32 nt, Homo Sapiens
aguuagguucuuaaaagugcccaugaugguca

SEQ ID NO: 12353 - RNA, 32 nt, Homo Sapiens
aacuguuuuuuuuuuucuuuuugguauuaagu

SEQ ID NO: 12354 - RNA, 32 nt, Homo Sapiens
cuccugcccagcugcucuugucagcccucugg

SEQ ID NO: 12355 - RNA, 32 nt, Homo Sapiens
uuuuugucccucaucaccccgcccccaccuuu

SEQ ID NO: 12356 - RNA, 32 nt, Homo Sapiens
auuuuguucuuugaauuucuugauauuguaau

SEQ ID NO: 12357 - RNA, 32 nt, Homo Sapiens
uuugcgccgccgcgaccagugcugcgaucccg

SEQ ID NO: 12358 - RNA, 32 nt, Homo Sapiens
uucuuggagcagcugcuuuugaggagaaaaua

SEQ ID NO: 12359 - RNA, 32 nt, Homo Sapiens
guguuuguuucaagcuucugucaaauaguuug

SEQ ID NO: 12360 - RNA, 32 nt, Homo Sapiens
uuaaguuccguucuucguuuucuuccuccgua

SEQ ID NO: 12361 - RNA, 32 nt, Homo Sapiens
gcugcaaaaauuauauauugcaaggugugaug

SEQ ID NO: 12362 - RNA, 32 nt, Homo Sapiens
ucgaaguucaguuuuucuuuuuucuuuauuuu

SEQ ID NO: 12363 - RNA, 32 nt, Homo Sapiens
ucuagaagacuaaggcuggucuguguuugcuu

SEQ ID NO: 12364 - RNA, 32 nt, Homo Sapiens
acuaaagcauuuaaucuagaaacacuuagguc

SEQ ID NO: 12365 - RNA, 32 nt, Homo Sapiens
agauaccguaauuuuauuauuagauucuccaa

SEQ ID NO: 12366 - RNA, 32 nt, Homo Sapiens
gccacugugcccagcccuuuugcucuuuuuau

SEQ ID NO: 12367 - RNA, 32 nt, Homo Sapiens
ggagcgggcgggcggccgaggacccggcuccc

SEQ ID NO: 12368 - RNA, 28 nt, Homo Sapiens
cugggguggcggccgcuguagucacugc

SEQ ID NO: 12369 - RNA, 32 nt, Homo Sapiens
ucugaguauuuuauuuuauuuaauuuucaaaa

SEQ ID NO: 12370 - RNA, 32 nt, Homo Sapiens
ccuaagaugugcggaaaccuguuagaaguagc

SEQ ID NO: 12371 - RNA, 32 nt, Homo Sapiens
uaagaagugucuuuuuagguuaugguauuaaa

SEQ ID NO: 12372 - RNA, 28 nt, Homo Sapiens
gcagcagcggauuccaggaugacggagg

SEQ ID NO: 12373 - RNA, 32 nt, Homo Sapiens
aggcucuggccucuccuuucuuccccagaacu

SEQ ID NO: 12374 - RNA, 32 nt, Homo Sapiens
ugaaccacuccagccugcugcgugcagguggg

SEQ ID NO: 12375 - RNA, 32 nt, Homo Sapiens
cagccugggacccgacaagggccuggcccaga

SEQ ID NO: 12376 - RNA, 32 nt, Homo Sapiens
gauaauugcuuggaccugggagguggagguug

SEQ ID NO: 12377 - RNA, 32 nt, Homo Sapiens
cugcuggcacaccaguggcaaggcccagaaug

SEQ ID NO: 12378 - RNA, 32 nt, Homo Sapiens
uucauauuugaaaaaguuaucucuggguauug

SEQ ID NO: 12379 - RNA, 32 nt, Homo Sapiens
cugaggucaggaguuugagaccagccuggaca

SEQ ID NO: 12380 - RNA, 30 nt, Homo Sapiens
cuugucugagacugcauucguaucugagca

SEQ ID NO: 12381 - RNA, 32 nt, Homo Sapiens
ucaucaacccaguaaugacauaguuuaaauuu

SEQ ID NO: 12382 - RNA, 30 nt, Homo Sapiens
ggcuugcgcugugcugagaagcugaauacc

SEQ ID NO: 12383 - RNA, 32 nt, Homo Sapiens
ccgcaucucggccagcucuccucgccgucccc

SEQ ID NO: 12384 - RNA, 32 nt, Homo Sapiens
ggguuggggaggggcggcaggagggagguuug

SEQ ID NO: 12385 - RNA, 32 nt, Homo Sapiens
ugagcgguagacggaggcgauguucgcugacc

SEQ ID NO: 12386 - RNA, 32 nt, Homo Sapiens
uaaaaaaauucuuuuuauuacuucuaugaucc

SEQ ID NO: 12387 - RNA, 32 nt, Homo Sapiens
ggcucccgcgcgcgaucugccgcggccggcug

SEQ ID NO: 12388 - RNA, 32 nt, Homo Sapiens
guuuauuguuacaaacuucucaucuuuuugcu

SEQ ID NO: 12389 - RNA, 32 nt, Homo Sapiens
uccuaacuauaaauccuauuugugugucgugg

SEQ ID NO: 12390 - RNA, 32 nt, Homo Sapiens
uggugccgcgcgcggcggcggcgacgacgacu

SEQ ID NO: 12391 - RNA, 32 nt, Homo Sapiens
aagucuucaggauaauauaaaauacacugaaa

SEQ ID NO: 12392 - RNA, 32 nt, Homo Sapiens
ucuucaaaauugaaaaaagugauucaagaacu

SEQ ID NO: 12393 - RNA, 32 nt, Homo Sapiens
cggguucugcccggggacgcagcccaguuggu

SEQ ID NO: 12394 - RNA, 32 nt, Homo Sapiens
ugccccaccaggagcucagcucuguggaguuu

SEQ ID NO: 12395 - RNA, 32 nt, Homo Sapiens
ucucugcacuucugcccuccauccugcuccac

SEQ ID NO: 12396 - RNA, 32 nt, Homo Sapiens
cgcgcccucaggugcgugcaggugccaccagg

SEQ ID NO: 12397 - RNA, 32 nt, Homo Sapiens
gcaucguggauccuuuacauuuagcaacaaca

SEQ ID NO: 12398 - RNA, 32 nt, Homo Sapiens
uccugaugacaaacagaguauauuaauuuccu

SEQ ID NO: 12399 - RNA, 32 nt, Homo Sapiens
gaaugaaugaacuuuuaagauacugucuagcu

SEQ ID NO: 12400 - RNA, 32 nt, Homo Sapiens
gagccgccgugcccggcccccuuuucuuuuca

SEQ ID NO: 12401 - RNA, 32 nt, Homo Sapiens
cuuuuaaaacauuguauauuaucuucacuguu

SEQ ID NO: 12402 - RNA, 32 nt, Homo Sapiens
ggccaacuggaccucguuccuguuccaggccc

SEQ ID NO: 12403 - RNA, 32 nt, Homo Sapiens
gugaugggaugggaaauauuuaaauucuaggu

SEQ ID NO: 12404 - RNA, 32 nt, Homo Sapiens
ccccgaugcccagcuccgcgccgcgcggaccc

SEQ ID NO: 12405 - RNA, 32 nt, Homo Sapiens
ucccuuaggcaguuugugcauggcauccuuua

SEQ ID NO: 12406 - RNA, 32 nt, Homo Sapiens
ggccuugauccggauacccagacgcccucuga

SEQ ID NO: 12407 - RNA, 32 nt, Homo Sapiens
aguucaaugaucaaaaucauguuuuuuccuua

SEQ ID NO: 12408 - RNA, 32 nt, Homo Sapiens
cccacuuuuuuuucuuuuuuugaaauaaaaua

SEQ ID NO: 12409 - RNA, 32 nt, Homo Sapiens
uugaaguuguauauuuuugaucaauauauuug

SEQ ID NO: 12410 - RNA, 32 nt, Homo Sapiens
cucggccggccgcagagagaaguggccagaga

SEQ ID NO: 12411 - RNA, 32 nt, Homo Sapiens
uaguuuuuaugugaagauauuuccuuuuccac

SEQ ID NO: 12412 - RNA, 32 nt, Homo Sapiens
ggcugggccagguggcucccaccuguaguccc

SEQ ID NO: 12413 - RNA, 32 nt, Homo Sapiens
acccuccacccauuuuaaggauacaucaagau

SEQ ID NO: 12414 - RNA, 32 nt, Homo Sapiens
uuucauauguaucaauauauauacuccucacu

SEQ ID NO: 12415 - RNA, 32 nt, Homo Sapiens
cagccucagcgucccgggagugaggcgauagc

SEQ ID NO: 12416 - RNA, 32 nt, Homo Sapiens
ggcgagcgcgcgcgaggccccggcuucuguug

SEQ ID NO: 12417 - RNA, 32 nt, Homo Sapiens
agauauuuuccagggugaaaucuguaaugcag

SEQ ID NO: 12418 - RNA, 30 nt, Homo Sapiens
ggacaaugccacuccuccuguacaccuguc

SEQ ID NO: 12419 - RNA, 32 nt, Homo Sapiens
ugauuuuacuuuuugaaaauuuucaugugaau

SEQ ID NO: 12420 - RNA, 32 nt, Homo Sapiens
ggccugggagcuugcugggagccaccucccag

SEQ ID NO: 12421 - RNA, 32 nt, Homo Sapiens
gcggcgcggcggcggcuugguugugaagaggc

SEQ ID NO: 12422 - RNA, 32 nt, Homo Sapiens
cccuuucuggagacccagacaccgccugggcu

SEQ ID NO: 12423 - RNA, 32 nt, Homo Sapiens
ucagcugucaauauguuuguaacucaggugac

SEQ ID NO: 12424 - RNA, 32 nt, Homo Sapiens
gaacguggucugauuuugagguuuagcaauag

SEQ ID NO: 12425 - RNA, 32 nt, Homo Sapiens
uguggagucagcccagucuggaugcacaggag

SEQ ID NO: 12426 - RNA, 32 nt, Homo Sapiens
ccuuacucccuguccccccacccacagggccc

SEQ ID NO: 12427 - RNA, 32 nt, Homo Sapiens
agagccaguuagaucauaauucuuaugaaaua

SEQ ID NO: 12428 - RNA, 32 nt, Homo Sapiens
acagagaaaaggauagaaguuugagagaaaaa

SEQ ID NO: 12429 - RNA, 32 nt, Homo Sapiens
acuagcugcacucauuccacuccagcugaaaa

SEQ ID NO: 12430 - RNA, 32 nt, Homo Sapiens
uuggauuguaauuauaaaugguucuuugauau

SEQ ID NO: 12431 - RNA, 32 nt, Homo Sapiens
caugccuacucccagcucccaaggagacugag

SEQ ID NO: 12432 - RNA, 32 nt, Homo Sapiens
guucucuuuauaggaucucauuacuguuugcu

SEQ ID NO: 12433 - RNA, 32 nt, Homo Sapiens
aagacccccgcuuccauagcgacggcugaugg

SEQ ID NO: 12434 - RNA, 32 nt, Homo Sapiens
cuuugaagacaauuuaauugaagcaaggaaag

SEQ ID NO: 12435 - RNA, 32 nt, Homo Sapiens
accccccacucuccccaccccuggcccacugu

SEQ ID NO: 12436 - RNA, 32 nt, Homo Sapiens
ggggaugacgguggggagguugccagauguga

SEQ ID NO: 12437 - RNA, 32 nt, Homo Sapiens
cugacuaucuucuguaguucuguuuuagucuu

SEQ ID NO: 12438 - RNA, 32 nt, Homo Sapiens
uuuccaggcauauaaugugcugauuuuaacaa

SEQ ID NO: 12439 - RNA, 32 nt, Homo Sapiens
auauacauauauauuuguuaauauauuaaaac

SEQ ID NO: 12440 - RNA, 32 nt, Homo Sapiens
ccaguaucuauuagcagccauauugucaccuc

SEQ ID NO: 12441 - RNA, 32 nt, Homo Sapiens
uuagguuucagcgcccuucucaaccccacacu

SEQ ID NO: 12442 - RNA, 32 nt, Homo Sapiens
gggccagagagugaauaucuuuggcacugcaa

SEQ ID NO: 12443 - RNA, 32 nt, Homo Sapiens
uccuuauaucuuagagcacagcaccugccugg

SEQ ID NO: 12444 - RNA, 30 nt, Homo Sapiens
cccacggccguucaucaucuugucccucgu

SEQ ID NO: 12445 - RNA, 32 nt, Homo Sapiens
ucuggggccugucauugguauuuggccaaggc

SEQ ID NO: 12446 - RNA, 32 nt, Homo Sapiens
guauuggacagaaccaugcuagucuuugagag

SEQ ID NO: 12447 - RNA, 32 nt, Homo Sapiens
uucugcugaggguggggcugguguagggaccc

SEQ ID NO: 12448 - RNA, 32 nt, Homo Sapiens
aauuucaauggauuaaaaucuuugaaaucccg

SEQ ID NO: 12449 - RNA, 32 nt, Homo Sapiens
acagcugacuuuuugugucagugcaauguaua

SEQ ID NO: 12450 - RNA, 32 nt, Homo Sapiens
cuuuucugcgucuugguggcaugcaugugucu

SEQ ID NO: 12451 - RNA, 32 nt, Homo Sapiens
gaggcgcgggggccguuuucaacgcuuaaagg

SEQ ID NO: 12452 - RNA, 32 nt, Homo Sapiens
ggacuuuuccccucuuugcugccgugugaaga

SEQ ID NO: 12453 - RNA, 32 nt, Homo Sapiens
cugcccuguacccaagcuucccucccccucuc

SEQ ID NO: 12454 - RNA, 32 nt, Homo Sapiens
caguaaauauaaacccauuauguuauaaaaaa

SEQ ID NO: 12455 - RNA, 32 nt, Homo Sapiens
cucuagaugauuacugaccuacuauacuccuc

SEQ ID NO: 12456 - RNA, 32 nt, Homo Sapiens
caccacgcaggaagaggucaucaucaugucgg

SEQ ID NO: 12457 - RNA, 32 nt, Homo Sapiens
cacacagccaaggggaugcucugugcagacac

SEQ ID NO: 12458 - RNA, 32 nt, Homo Sapiens
uaaaggugcuccucuuuuuucuugucauugcu

SEQ ID NO: 12459 - RNA, 32 nt, Homo Sapiens
uccuagaagguuuauacugccuucuugcuuua

SEQ ID NO: 12460 - RNA, 32 nt, Homo Sapiens
ugucuuaguggaaaaaaggagaauuagucuga

SEQ ID NO: 12461 - RNA, 32 nt, Homo Sapiens
uggauggaaggggacugggguuucugccgcgc

SEQ ID NO: 12462 - RNA, 32 nt, Homo Sapiens
gaccauccugaccuccuauuaaagaaaaugag

SEQ ID NO: 12463 - RNA, 32 nt, Homo Sapiens
cccuauugacugucagaaaauccacugggaaa

SEQ ID NO: 12464 - RNA, 32 nt, Homo Sapiens
ugaacaauggaauaaacaaauaaagcauguuu

SEQ ID NO: 12465 - RNA, 32 nt, Homo Sapiens
uauguguuguuuucuuuuuuuuuaaauuauga

SEQ ID NO: 12466 - RNA, 32 nt, Homo Sapiens
gaccccuccccucccacccacagccauagacc

SEQ ID NO: 12467 - RNA, 32 nt, Homo Sapiens
aacauccccuuuucauuaccccauuggguggc

SEQ ID NO: 12468 - RNA, 32 nt, Homo Sapiens
uccugagauguuauuucaucuacauuuaguua

SEQ ID NO: 12469 - RNA, 32 nt, Homo Sapiens
ugccccgcaggaacauggagcggcauugcccc

SEQ ID NO: 12470 - RNA, 32 nt, Homo Sapiens
auuauuaaacuugauaggaacgcaacauuaaa

SEQ ID NO: 12471 - RNA, 32 nt, Homo Sapiens
cacccuugugccagggcugaugacucucaguu

SEQ ID NO: 12472 - RNA, 30 nt, Homo Sapiens
gcugggugugguggcaugcgcauguagucc

SEQ ID NO: 12473 - RNA, 32 nt, Homo Sapiens
uaagggaaaaggaaaacucauauguccuucug

SEQ ID NO: 12474 - RNA, 32 nt, Homo Sapiens
cagacaaauaucuaucuuacauugauuaaacc

SEQ ID NO: 12475 - RNA, 32 nt, Homo Sapiens
gaaguggggaucggcgagcgggugggugcgcc

SEQ ID NO: 12476 - RNA, 32 nt, Homo Sapiens
gcaccccugggagggacccauccaucucccuu

SEQ ID NO: 12477 - RNA, 32 nt, Homo Sapiens
cccaccggccccacccaucaagcccuuuuaua

SEQ ID NO: 12478 - RNA, 32 nt, Homo Sapiens
gacccgagcgagggucucggcuugccaggaag

SEQ ID NO: 12479 - RNA, 32 nt, Homo Sapiens
guaaagucaggagugcagggaugacuauaggu

SEQ ID NO: 12480 - RNA, 32 nt, Homo Sapiens
ggccauggggacgggggaaguuuucacuugga

SEQ ID NO: 12481 - RNA, 32 nt, Homo Sapiens
cagauuguauaaaauuaugauuuuguaucaaa

SEQ ID NO: 12482 - RNA, 32 nt, Homo Sapiens
gaaacagaaacaaaaacacuaaaaauaaaaau

SEQ ID NO: 12483 - RNA, 32 nt, Homo Sapiens
cccuagcagccauuuuagauuaugaagaugag

SEQ ID NO: 12484 - RNA, 32 nt, Homo Sapiens
aauccaaugcugugugcugaucuuccuugaaa

SEQ ID NO: 12485 - RNA, 32 nt, Homo Sapiens
caugccccuuggcuugccauucuuucagcagc

SEQ ID NO: 12486 - RNA, 32 nt, Homo Sapiens
uccucuucucagagaccucccuuuccaagccu

SEQ ID NO: 12487 - RNA, 32 nt, Homo Sapiens
ugcgucuugcagauggagcaauggcgagagca

SEQ ID NO: 12488 - RNA, 32 nt, Homo Sapiens
agccauguauaaaugugauaugauuggcaaua

SEQ ID NO: 12489 - RNA, 32 nt, Homo Sapiens
ggacauagccucuauuuguuucccuucuauuu

SEQ ID NO: 12490 - RNA, 32 nt, Homo Sapiens
cuuuucugaaaaauuguaaaucugaucauauc

SEQ ID NO: 12491 - RNA, 32 nt, Homo Sapiens
cguuuguaacuguggucuaauacccaaaugug

SEQ ID NO: 12492 - RNA, 32 nt, Homo Sapiens
guccuugagaaguuaagagacuguuuccugcu

SEQ ID NO: 12493 - RNA, 32 nt, Homo Sapiens
uugaaggaaugaauuuaauaagugcuaccuuc

SEQ ID NO: 12494 - RNA, 30 nt, Homo Sapiens
agcuauuucaaggcgcgcgccucguggugg

SEQ ID NO: 12495 - RNA, 32 nt, Homo Sapiens
aaaaaguucaaaaaaaaacaaacaaacuccug

SEQ ID NO: 12496 - RNA, 32 nt, Homo Sapiens
gcuacagauaaugccuuaaucagaaagagugg

SEQ ID NO: 12497 - RNA, 32 nt, Homo Sapiens
uuuaaugggauuguggaagagaaugacuccaa

SEQ ID NO: 12498 - RNA, 32 nt, Homo Sapiens
cagccugccaaguagcugggacuaccggcgcc

SEQ ID NO: 12499 - RNA, 32 nt, Homo Sapiens
auccugggccaugagugaguugaaagacugcc

SEQ ID NO: 12500 - RNA, 32 nt, Homo Sapiens
accuagaaauaccauuugacccagccauccca

SEQ ID NO: 12501 - RNA, 32 nt, Homo Sapiens
acugggacuggcagagcugccggcgccggacc

SEQ ID NO: 12502 - RNA, 32 nt, Homo Sapiens
gcaccugccagacagagcugguucuaagauuu

SEQ ID NO: 12503 - RNA, 32 nt, Homo Sapiens
cacgucgguggcgagugggcccgggcgcucgg

SEQ ID NO: 12504 - RNA, 32 nt, Homo Sapiens
gucuggggccccagccaggcuggccggagcuc

SEQ ID NO: 12505 - RNA, 32 nt, Homo Sapiens
uugcggccgcucagcccuccaaccaagaccua

SEQ ID NO: 12506 - RNA, 32 nt, Homo Sapiens
gcccuuugcacccacaccucagggacucggug

SEQ ID NO: 12507 - RNA, 32 nt, Homo Sapiens
auagacucaagcauaaaacuuggcaguuuuau

SEQ ID NO: 12508 - RNA, 32 nt, Homo Sapiens
gaacaguucuuugcauuuggcucuacuuacua

SEQ ID NO: 12509 - RNA, 32 nt, Homo Sapiens
guggaauuacaaaaagugaccuucguuuggau

SEQ ID NO: 12510 - RNA, 32 nt, Homo Sapiens
uacuguacugaauggugcaggugauuguaaca

SEQ ID NO: 12511 - RNA, 32 nt, Homo Sapiens
guccacgcgugccguggcaccaggcgcugccc

SEQ ID NO: 12512 - RNA, 32 nt, Homo Sapiens
guucugugguggcuuugucccuugaaggcucc

SEQ ID NO: 12513 - RNA, 32 nt, Homo Sapiens
ccacaucgcucccagauggguguaccaccuca

SEQ ID NO: 12514 - RNA, 32 nt, Homo Sapiens
ggcggcaguggcggcccggccugcaggagccc

SEQ ID NO: 12515 - RNA, 32 nt, Homo Sapiens
cgcagaggcaucuggaggaaacgcaaccaaga

SEQ ID NO: 12516 - RNA, 32 nt, Homo Sapiens
ugauaauuggcuuuuuaaauuuucaaacaaca

SEQ ID NO: 12517 - RNA, 32 nt, Homo Sapiens
auaacuagaaagauuaaacuagacagauaguu

SEQ ID NO: 12518 - RNA, 32 nt, Homo Sapiens
agcagcagggagugcauuugcuggggugucgg

SEQ ID NO: 12519 - RNA, 32 nt, Homo Sapiens
gcgucucugggaaccuggccccgggcaaccag

SEQ ID NO: 12520 - RNA, 32 nt, Homo Sapiens
cgagccugccggaagcgcccuaagggguuuuc

SEQ ID NO: 12521 - RNA, 32 nt, Homo Sapiens
ugcccgcgccucaucucuccucaugggcaguu

SEQ ID NO: 12522 - RNA, 32 nt, Homo Sapiens
uguuaaacauuuugaguuaucuucccagguug

SEQ ID NO: 12523 - RNA, 32 nt, Homo Sapiens
ggucucuauuuauguauuuauuauuuauuuuu

SEQ ID NO: 12524 - RNA, 32 nt, Homo Sapiens
ggggcgguggagcaagucuggaggcgggacgu

SEQ ID NO: 12525 - RNA, 27 nt, Homo Sapiens
augcaccuugucuucagcuuucaagga

SEQ ID NO: 12526 - RNA, 32 nt, Homo Sapiens
aaaaauugacgaagaaaagcucauuucgaacu

SEQ ID NO: 12527 - RNA, 32 nt, Homo Sapiens
cucagguugggucuuuugcugugccuccuaug

SEQ ID NO: 12528 - RNA, 32 nt, Homo Sapiens
agcuuggggggugucucccaucuuuuacaggu

SEQ ID NO: 12529 - RNA, 32 nt, Homo Sapiens
uuuuuuccuuuuuuguaauauugaugacauca

SEQ ID NO: 12530 - RNA, 32 nt, Homo Sapiens
uugagaagggaaguuaggaagaagggugugcu

SEQ ID NO: 12531 - RNA, 32 nt, Homo Sapiens
uuccccugcucaagaugaaaagaaauuaagag

SEQ ID NO: 12532 - RNA, 32 nt, Homo Sapiens
agcagggagccagguugggggugugggaaggc

SEQ ID NO: 12533 - RNA, 32 nt, Homo Sapiens
ugaaggucaggaggcccgaguugcuggcggug

SEQ ID NO: 12534 - RNA, 32 nt, Homo Sapiens
ucccaguaaagccaaugacccccaaggugguc

SEQ ID NO: 12535 - RNA, 32 nt, Homo Sapiens
auccucccugucaugccacauuucacugauug

SEQ ID NO: 12536 - RNA, 32 nt, Homo Sapiens
uuucaggcagguggagaggaugagguuugagg

SEQ ID NO: 12537 - RNA, 32 nt, Homo Sapiens
gacugugcccuucuccucaggacccccuggcu

SEQ ID NO: 12538 - RNA, 32 nt, Homo Sapiens
gauucucauuugugucucugguguuuaguaua

SEQ ID NO: 12539 - RNA, 32 nt, Homo Sapiens
agucucugaugccacuauguucuuugcaggca

SEQ ID NO: 12540 - RNA, 31 nt, Homo Sapiens
aggaauuuugguaauaaugauguguuuugcu

SEQ ID NO: 12541 - RNA, 30 nt, Homo Sapiens
ccaggaggagguggagaucgcagugagcug

SEQ ID NO: 12542 - RNA, 32 nt, Homo Sapiens
ccaacccaauacuggggccuucucaaaaggag

SEQ ID NO: 12543 - RNA, 32 nt, Homo Sapiens
uuauugugaaauuuuaguaugcacuuugugua

SEQ ID NO: 12544 - RNA, 32 nt, Homo Sapiens
accggucggggcgggggucgggcgguagaaaa

SEQ ID NO: 12545 - RNA, 28 nt, Homo Sapiens
uguuggaaagauuaucucuagaguuaua

SEQ ID NO: 12546 - RNA, 26 nt, Homo Sapiens
aaugaagacauuagcaggacuuguuc

SEQ ID NO: 12547 - RNA, 32 nt, Homo Sapiens
gcagggcgacccccuuccuucuggagccuuag

SEQ ID NO: 12548 - RNA, 32 nt, Homo Sapiens
uggucccucugcgcccaagacccggcugccuc

SEQ ID NO: 12549 - RNA, 32 nt, Homo Sapiens
gagccauagggcccccaccuuuacucacaccc

SEQ ID NO: 12550 - RNA, 32 nt, Homo Sapiens
ccacugggcucuugcccacaagagcagucuga

SEQ ID NO: 12551 - RNA, 32 nt, Homo Sapiens
ccucaaccucucacgcucugcacuacagacaa

SEQ ID NO: 12552 - RNA, 32 nt, Homo Sapiens
cauaucaccucuucccucuccuacuuggccca

SEQ ID NO: 12553 - RNA, 32 nt, Homo Sapiens
gcuugugggaggggcggggcuaagaauggggg

SEQ ID NO: 12554 - RNA, 32 nt, Homo Sapiens
caacuguacggaguggcauauuagaauugccc

SEQ ID NO: 12555 - RNA, 32 nt, Homo Sapiens
ccacggaaucagauggauccuccacgauuacg

SEQ ID NO: 12556 - RNA, 32 nt, Homo Sapiens
gggcguggaaagggcucuggcgcuacccgaga

SEQ ID NO: 12557 - RNA, 32 nt, Homo Sapiens
uucuguaugaauuguggaacaucacaauaaaa

SEQ ID NO: 12558 - RNA, 32 nt, Homo Sapiens
guaagucaguuugauuccaaguuuacacguca

SEQ ID NO: 12559 - RNA, 32 nt, Homo Sapiens
gcccggccaaaaagacaaaacacauagacgca

SEQ ID NO: 12560 - RNA, 32 nt, Homo Sapiens
uauuuguuauuaaauugaucugacuucucagc

SEQ ID NO: 12561 - RNA, 32 nt, Homo Sapiens
aaacaacaaauacagcaacaaacagaaaaaac

SEQ ID NO: 12562 - RNA, 32 nt, Homo Sapiens
uaguacauauccucaaauuggagcuaaguuau

SEQ ID NO: 12563 - RNA, 32 nt, Homo Sapiens
uacuccuaacccaguuccuccuccuguguuuu

SEQ ID NO: 12564 - RNA, 32 nt, Homo Sapiens
guccaagaauuugaaguggcaguacuugcgga

SEQ ID NO: 12565 - RNA, 32 nt, Homo Sapiens
aaugaagaggcaugaagaaguauuugaauaaa

SEQ ID NO: 12566 - RNA, 32 nt, Homo Sapiens
aagccccagcugccuuccuuuuggauucccaa

SEQ ID NO: 12567 - RNA, 32 nt, Homo Sapiens
acucugucuuaaaaauacguuuacaguauugg

SEQ ID NO: 12568 - RNA, 32 nt, Homo Sapiens
gcggggcccaagucuuccuucuucguccgaaa

SEQ ID NO: 12569 - RNA, 32 nt, Homo Sapiens
gccccccacccgcgucgccgccauggaggugc

SEQ ID NO: 12570 - RNA, 32 nt, Homo Sapiens
aaauaauaaaaauaaacauguuuccacuauug

SEQ ID NO: 12571 - RNA, 32 nt, Homo Sapiens
gccacccccucccccugucucccucucugaac

SEQ ID NO: 12572 - RNA, 32 nt, Homo Sapiens
agauccugguggccaaacccgagcugaaggau

SEQ ID NO: 12573 - RNA, 32 nt, Homo Sapiens
cacugcuccuuuucuuuuuuuucuuucucucc

SEQ ID NO: 12574 - RNA, 32 nt, Homo Sapiens
gacaacugucuccgucgcaggcuccggcgggg

SEQ ID NO: 12575 - RNA, 28 nt, Homo Sapiens
cucaguuaucuuuccccauaauaaaaaa

SEQ ID NO: 12576 - RNA, 32 nt, Homo Sapiens
gagagacagagagaaagaaauauuuaaauugc

SEQ ID NO: 12577 - RNA, 32 nt, Homo Sapiens
gucggaccuggaguaccggcccggcgaagcgc

SEQ ID NO: 12578 - RNA, 32 nt, Homo Sapiens
cuccccggacggcguuucuccuccgagcggcg

SEQ ID NO: 12579 - RNA, 32 nt, Homo Sapiens
gccgaccgcccggcuuggccgcugcugccgcg

SEQ ID NO: 12580 - RNA, 32 nt, Homo Sapiens
uuccggcuggggcgcacagaccugggcgcggg

SEQ ID NO: 12581 - RNA, 32 nt, Homo Sapiens
acagagaaauguuuaacuguuugacucuuaug

SEQ ID NO: 12582 - RNA, 32 nt, Homo Sapiens
cgguaggggacuuccagggcgagggggcccau

SEQ ID NO: 12583 - RNA, 32 nt, Homo Sapiens
ccuccucuccuuagaauaaccaugaaaauaca

SEQ ID NO: 12584 - RNA, 32 nt, Homo Sapiens
cccuccggaccgcggcagcugcugacccgcca

SEQ ID NO: 12585 - RNA, 32 nt, Homo Sapiens
ccagaaaaucauacauugcuuuuuuauucuac

SEQ ID NO: 12586 - RNA, 32 nt, Homo Sapiens
ucaugguccagggguaggggccccacuggccu

SEQ ID NO: 12587 - RNA, 32 nt, Homo Sapiens
uugaggguuucagccgcagaggggcgggagaa

SEQ ID NO: 12588 - RNA, 32 nt, Homo Sapiens
gccccggcccugaacccgcgccccacauuucu

SEQ ID NO: 12589 - RNA, 32 nt, Homo Sapiens
augagauauugggccaggcucaaugcuguagu

SEQ ID NO: 12590 - RNA, 32 nt, Homo Sapiens
ucuuucaucagcaggagagagaagggugaauu

SEQ ID NO: 12591 - RNA, 32 nt, Homo Sapiens
ccacucuuuuaaaacgcugcugucauuuccca

SEQ ID NO: 12592 - RNA, 32 nt, Homo Sapiens
aggccgcggugcugcguaggccgggccgggcg

SEQ ID NO: 12593 - RNA, 32 nt, Homo Sapiens
caauggaugucaucuucauauuaauaguugga

SEQ ID NO: 12594 - RNA, 32 nt, Homo Sapiens
ggaguuucuccuccaccucucaaugcaaacac

SEQ ID NO: 12595 - RNA, 32 nt, Homo Sapiens
gacccuggaguacacauccagaugccagccca

SEQ ID NO: 12596 - RNA, 32 nt, Homo Sapiens
ucauucugaggucaaaucauggcccgaggaca

SEQ ID NO: 12597 - RNA, 32 nt, Homo Sapiens
gugaaaccaaacaaauacaaaauccuucucca

SEQ ID NO: 12598 - RNA, 32 nt, Homo Sapiens
ugcgagguuucuucucaucaccagcucagcua

SEQ ID NO: 12599 - RNA, 32 nt, Homo Sapiens
cagcucucguucuccuuccccauuuccacugu

SEQ ID NO: 12600 - RNA, 32 nt, Homo Sapiens
ucaccucccugccaugcugggguccuacccag

SEQ ID NO: 12601 - RNA, 32 nt, Homo Sapiens
uucauuuaaaaauaauuuuaaaaaaucagaca

SEQ ID NO: 12602 - RNA, 32 nt, Homo Sapiens
gagagagugcuggagcagauggagcacagaga

SEQ ID NO: 12603 - RNA, 32 nt, Homo Sapiens
aaggugccaccucagcccugaaaaagaaccag

SEQ ID NO: 12604 - RNA, 32 nt, Homo Sapiens
ugaagaaaacauuuauuuuuuauuugauuccu

SEQ ID NO: 12605 - RNA, 32 nt, Homo Sapiens
uccuaaagggaagugggcgcuggauuuauuag

SEQ ID NO: 12606 - RNA, 32 nt, Homo Sapiens
guucucucacugacacaugccuuccuuucauc

SEQ ID NO: 12607 - RNA, 32 nt, Homo Sapiens
ggcugacagggucaagccacccugcccaccac

SEQ ID NO: 12608 - RNA, 32 nt, Homo Sapiens
augagcauaguggggaaagaaaaggaaauggc

SEQ ID NO: 12609 - RNA, 32 nt, Homo Sapiens
uucaaaacggggcacaucuggcugggaaguca

SEQ ID NO: 12610 - RNA, 32 nt, Homo Sapiens
gugcuugugccuuuucugagaagcguugugac

SEQ ID NO: 12611 - RNA, 32 nt, Homo Sapiens
uugggugguuggaauaauuuuauuuuucuuuu

SEQ ID NO: 12612 - RNA, 32 nt, Homo Sapiens
ugcuuugccgacggggccucccggcccugaug

SEQ ID NO: 12613 - RNA, 25 nt, Homo Sapiens
ggaaugagggaagaggagcucuuug

SEQ ID NO: 12614 - RNA, 32 nt, Homo Sapiens
gaacucaaaaaauuauguucaaauuuguacau

SEQ ID NO: 12615 - RNA, 32 nt, Homo Sapiens
uguuccccuaacccuacaugcauguuuuaugu

SEQ ID NO: 12616 - RNA, 32 nt, Homo Sapiens
caggaucaugcacauggauguaacuccuuuua

SEQ ID NO: 12617 - RNA, 32 nt, Homo Sapiens
gcuacuucucggcuccugugugucaucagcau

SEQ ID NO: 12618 - RNA, 32 nt, Homo Sapiens
ccccagacauuuucuuuuuuuuuucacacaua

SEQ ID NO: 12619 - RNA, 32 nt, Homo Sapiens
aucccagaacaucaguuguaagauaaguacaa

SEQ ID NO: 12620 - RNA, 32 nt, Homo Sapiens
ccuaguguuccuccccgauuuuuucagaaaac

SEQ ID NO: 12621 - RNA, 32 nt, Homo Sapiens
uuugcaaauuuaaauaaagauacauaauguuu

SEQ ID NO: 12622 - RNA, 32 nt, Homo Sapiens
gaauaucgccuuaaaaaucaaacugcacggag

SEQ ID NO: 12623 - RNA, 31 nt, Homo Sapiens
gauacagcgccacuccugcccccucuuggcc

SEQ ID NO: 12624 - RNA, 32 nt, Homo Sapiens
uuaucuuauuuuuacucguccguugaaaagau

SEQ ID NO: 12625 - RNA, 32 nt, Homo Sapiens
gagagcugggggcaggcccacccuccucuuug

SEQ ID NO: 12626 - RNA, 32 nt, Homo Sapiens
gacuuaacccgucauguucugguuugagauuu

SEQ ID NO: 12627 - RNA, 32 nt, Homo Sapiens
cccucugccccuggcccucccggcagcccucg

SEQ ID NO: 12628 - RNA, 32 nt, Homo Sapiens
auggagacaaccuuuaccggacaccaaaccua

SEQ ID NO: 12629 - RNA, 30 nt, Homo Sapiens
gcgcgggcgcccgcccugcucugugacgcg

SEQ ID NO: 12630 - RNA, 32 nt, Homo Sapiens
ggcucucugagcuccugcuccucccugccuug

SEQ ID NO: 12631 - RNA, 32 nt, Homo Sapiens
gaccaaccuugaugaauauguggcuuuggugg

SEQ ID NO: 12632 - RNA, 32 nt, Homo Sapiens
auuuucucagaauucucuggacugaggcucca

SEQ ID NO: 12633 - RNA, 32 nt, Homo Sapiens
auuuuagaccuugacuaacaagcuccaggugu

SEQ ID NO: 12634 - RNA, 32 nt, Homo Sapiens
cccgccgcccgcgccgccaugggaguggaggg

SEQ ID NO: 12635 - RNA, 30 nt, Homo Sapiens
uuacagggcaggcgccggggccaaggcagg

SEQ ID NO: 12636 - RNA, 31 nt, Homo Sapiens
gauagauguuugacuuuaaagaugauuguuc

SEQ ID NO: 12637 - RNA, 32 nt, Homo Sapiens
ucuaaguugguuuaauaguuaaaagcugcugu

SEQ ID NO: 12638 - RNA, 28 nt, Homo Sapiens
ccucaggggcggcccgcagagcgagcac

SEQ ID NO: 12639 - RNA, 32 nt, Homo Sapiens
gugcucagccucuggugcgcugaaacucugac

SEQ ID NO: 12640 - RNA, 32 nt, Homo Sapiens
agggcuguccccugcccuccccuccccaacua

SEQ ID NO: 12641 - RNA, 32 nt, Homo Sapiens
gcacugccccucaacagggaugacucagcagg

SEQ ID NO: 12642 - RNA, 32 nt, Homo Sapiens
uacguguacaucauuaauccccauugccaagg

SEQ ID NO: 12643 - RNA, 32 nt, Homo Sapiens
acaaacaaucccaagauggaauguaguccucc

SEQ ID NO: 12644 - RNA, 32 nt, Homo Sapiens
cggauuaugauuaugacauaccaucucugaug

SEQ ID NO: 12645 - RNA, 32 nt, Homo Sapiens
auggucauuuggcaucuccguauaugugcucu

SEQ ID NO: 12646 - RNA, 32 nt, Homo Sapiens
gauguaauguuuucuuuuucuuucucuugcug

SEQ ID NO: 12647 - RNA, 32 nt, Homo Sapiens
aggccagccuuggacauucuccaggaaggccu

SEQ ID NO: 12648 - RNA, 32 nt, Homo Sapiens
cccgggggcucuccuaggauccccuuuccgua

SEQ ID NO: 12649 - RNA, 32 nt, Homo Sapiens
agcgcucagggcgggggugcgcgcggggccga

SEQ ID NO: 12650 - RNA, 31 nt, Homo Sapiens
cuuuuaagggagcgguccacggccuccagcg

SEQ ID NO: 12651 - RNA, 32 nt, Homo Sapiens
uguacuacuguaauauaaaaagucacuguauu

SEQ ID NO: 12652 - RNA, 32 nt, Homo Sapiens
aaaaauuuaaacaaguguuaacuuuaaacagu

SEQ ID NO: 12653 - RNA, 28 nt, Homo Sapiens
guaacagaauaaauuuaguaugaacguu

SEQ ID NO: 12654 - RNA, 32 nt, Homo Sapiens
gccgcggggaggaggagcgggcgagaagcugc

SEQ ID NO: 12655 - RNA, 32 nt, Homo Sapiens
guugaugaucaauuaauaguggcugccaguug

SEQ ID NO: 12656 - RNA, 32 nt, Homo Sapiens
cuucagagguugccccaccugagcccccaccc

SEQ ID NO: 12657 - RNA, 32 nt, Homo Sapiens
acaucggaauaacaaacauuguccucuccaga

SEQ ID NO: 12658 - RNA, 32 nt, Homo Sapiens
ccacacccgcggcugccccguuugucuguaga

SEQ ID NO: 12659 - RNA, 32 nt, Homo Sapiens
caguuguacauucacaggauccacagcuuaag

SEQ ID NO: 12660 - RNA, 32 nt, Homo Sapiens
aggcgaggcucgccagcuccacgaagcgucac

SEQ ID NO: 12661 - RNA, 32 nt, Homo Sapiens
aacuaccaagaaaauacaagagauauccaaug

SEQ ID NO: 12662 - RNA, 32 nt, Homo Sapiens
gcguagcgacggcccguccccugcgcacggac

SEQ ID NO: 12663 - RNA, 32 nt, Homo Sapiens
gcaaccucuuccccuuuccccagggguccugu

SEQ ID NO: 12664 - RNA, 32 nt, Homo Sapiens
uuaaagucuccugggaaacgucugcauuaggu

SEQ ID NO: 12665 - RNA, 32 nt, Homo Sapiens
augggaagaacaaagcaggugagaucauguau

SEQ ID NO: 12666 - RNA, 32 nt, Homo Sapiens
cccagccagcgccuuccacuccaucauuucau

SEQ ID NO: 12667 - RNA, 32 nt, Homo Sapiens
uuugugaguguguagucaauguguguggguug

SEQ ID NO: 12668 - RNA, 32 nt, Homo Sapiens
aacacacgcuccagcccuucaucagccugggc

SEQ ID NO: 12669 - RNA, 32 nt, Homo Sapiens
ucuauucuagucuauuuguugaugcuuguguc

SEQ ID NO: 12670 - RNA, 32 nt, Homo Sapiens
cagaggcaccucaagaagaagaggggcauaaa

SEQ ID NO: 12671 - RNA, 32 nt, Homo Sapiens
guaagaauacucagauuuccauaagcucuucu

SEQ ID NO: 12672 - RNA, 32 nt, Homo Sapiens
gacuuaugaagauaaauaaagucaagggaaaa

SEQ ID NO: 12673 - RNA, 32 nt, Homo Sapiens
cagugccgcgacccaaccccagcccuggguag

SEQ ID NO: 12674 - RNA, 27 nt, Homo Sapiens
gguaaacuauaacaaacuuaugcugcc

SEQ ID NO: 12675 - RNA, 32 nt, Homo Sapiens
gguuuccguggcaacccucagcugccucaucg

SEQ ID NO: 12676 - RNA, 32 nt, Homo Sapiens
auuucugcaaacuuauuggauuauuaguuauu

SEQ ID NO: 12677 - RNA, 31 nt, Homo Sapiens
uucgcgugauccugccugcguccgugucucu

SEQ ID NO: 12678 - RNA, 32 nt, Homo Sapiens
acuuagaaaaagaaaagcugaagugcaugaaa

SEQ ID NO: 12679 - RNA, 32 nt, Homo Sapiens
gcaugguggcacaugucuguaauccuagcacu

SEQ ID NO: 12680 - RNA, 32 nt, Homo Sapiens
cuccauagucaaucagaaaaacaaugaucauu

SEQ ID NO: 12681 - RNA, 32 nt, Homo Sapiens
ugauggagggagcacuggacugcgaguccgga

SEQ ID NO: 12682 - RNA, 32 nt, Homo Sapiens
gugauauacuggcuccccaucaccuuauguca

SEQ ID NO: 12683 - RNA, 32 nt, Homo Sapiens
accagaccagucaccaccuggacacuuucuug

SEQ ID NO: 12684 - RNA, 32 nt, Homo Sapiens
agggaccaucccccaaacucuacucuuauacc

SEQ ID NO: 12685 - RNA, 32 nt, Homo Sapiens
augagagcaauagcuuccuuaaagagauaagu

SEQ ID NO: 12686 - RNA, 32 nt, Homo Sapiens
accugaauuuucauaaaauauuuccuaggcuc

SEQ ID NO: 12687 - RNA, 32 nt, Homo Sapiens
guaguagggacugacagaauacacuuaacaca

SEQ ID NO: 12688 - RNA, 32 nt, Homo Sapiens
agcuuuacauaaauauaccuuguaugcaaacu

SEQ ID NO: 12689 - RNA, 32 nt, Homo Sapiens
agauaaaugucaacuuuugcugacuuauuaug

SEQ ID NO: 12690 - RNA, 32 nt, Homo Sapiens
ccuccacaucacagaagcuaccccuguacagc

SEQ ID NO: 12691 - RNA, 32 nt, Homo Sapiens
cagcaugccuugcugcacguguguguauuuca

SEQ ID NO: 12692 - RNA, 32 nt, Homo Sapiens
cuuaucaucccauuaaauguugucauuuugca

SEQ ID NO: 12693 - RNA, 32 nt, Homo Sapiens
augcacaauugcuuuccagccgucagccugug

SEQ ID NO: 12694 - RNA, 32 nt, Homo Sapiens
ugaacaggagggcaucccuggggauguggcug

SEQ ID NO: 12695 - RNA, 32 nt, Homo Sapiens
aggcuggcggccucgauuccggccgcguuccc

SEQ ID NO: 12696 - RNA, 32 nt, Homo Sapiens
uugggguuuuaaaggggaucuuggaggaugag

SEQ ID NO: 12697 - RNA, 32 nt, Homo Sapiens
uagaaggaugguuacuaguggcugggaaaagg

SEQ ID NO: 12698 - RNA, 28 nt, Homo Sapiens
acuaugcucaucucauguuuguccucag

SEQ ID NO: 12699 - RNA, 32 nt, Homo Sapiens
ugcgcagcuucgcuucuuugccucuccccggg

SEQ ID NO: 12700 - RNA, 32 nt, Homo Sapiens
ucaaguuuugggguaaagacaccuggaucaga

SEQ ID NO: 12701 - RNA, 32 nt, Homo Sapiens
gaaauaacugaacauauuuuuuaggcaaguca

SEQ ID NO: 12702 - RNA, 32 nt, Homo Sapiens
auuuuguuauucacagguauuacaugagugaa

SEQ ID NO: 12703 - RNA, 32 nt, Homo Sapiens
ugacaauaucaaucacauuaggggaaccauug

SEQ ID NO: 12704 - RNA, 32 nt, Homo Sapiens
aauguaaguauuuuuaaauguguguauuucaa

SEQ ID NO: 12705 - RNA, 32 nt, Homo Sapiens
ugcaaucucacagauguucuaaccacccucuc

SEQ ID NO: 12706 - RNA, 32 nt, Homo Sapiens
aaagcuacucgcuaccagcuuggaccugucug

SEQ ID NO: 12707 - RNA, 32 nt, Homo Sapiens
auaaugaagaugaagaaaauuucaguucucag

SEQ ID NO: 12708 - RNA, 32 nt, Homo Sapiens
ccagaggccccggcggccugugcuccucacca

SEQ ID NO: 12709 - RNA, 32 nt, Homo Sapiens
aguauaauuugcuaacuauuaaggacuuucuu

SEQ ID NO: 12710 - RNA, 32 nt, Homo Sapiens
guuaaacuugagaagcugaaaaaggaaggcug

SEQ ID NO: 12711 - RNA, 32 nt, Homo Sapiens
ucauuucucucggcugccucuuggaggguggg

SEQ ID NO: 12712 - RNA, 32 nt, Homo Sapiens
ccgggaguccagugacucagagauccagucug

SEQ ID NO: 12713 - RNA, 32 nt, Homo Sapiens
auguguacucaguugaaugacacacauuaugu

SEQ ID NO: 12714 - RNA, 32 nt, Homo Sapiens
ggcugaagcgccucgggaugccccacacugcc

SEQ ID NO: 12715 - RNA, 32 nt, Homo Sapiens
agcauccagagauggcggaagcuccucagcag

SEQ ID NO: 12716 - RNA, 32 nt, Homo Sapiens
guuggcuggagcaucggccaccccaagauuca

SEQ ID NO: 12717 - RNA, 32 nt, Homo Sapiens
guguuuaaaacacuugauuaggcuccgguuuu

SEQ ID NO: 12718 - RNA, 32 nt, Homo Sapiens
uggucuucuaugcugcagagaaacuaugcauu

SEQ ID NO: 12719 - RNA, 32 nt, Homo Sapiens
auaaacucaauauugaauacuuuuggauguua

SEQ ID NO: 12720 - RNA, 32 nt, Homo Sapiens
accccauacucuaccucauccuucuggccagg

SEQ ID NO: 12721 - RNA, 30 nt, Homo Sapiens
ggcggauggagcugcgcagcgggagcgugg

SEQ ID NO: 12722 - RNA, 32 nt, Homo Sapiens
uuuuaaccaaacugaauuuuugaaagacuauu

SEQ ID NO: 12723 - RNA, 32 nt, Homo Sapiens
aagagcauguugacaggaaugacucagucaag

SEQ ID NO: 12724 - RNA, 32 nt, Homo Sapiens
auacccaauuuugacuugauuucaugcaucau

SEQ ID NO: 12725 - RNA, 32 nt, Homo Sapiens
ugaagccgggagcuggggcgccggaguccacg

SEQ ID NO: 12726 - RNA, 32 nt, Homo Sapiens
uugacuggucgucauuggcaugggguggauau

SEQ ID NO: 12727 - RNA, 32 nt, Homo Sapiens
ggauucuuuuuggagcaauaccuacaaaguca

SEQ ID NO: 12728 - RNA, 32 nt, Homo Sapiens
cagccccgcgccccgcgaaggcgcaggcacug

SEQ ID NO: 12729 - RNA, 32 nt, Homo Sapiens
uaguuuuuuccacagaugcuugugauuuuuga

SEQ ID NO: 12730 - RNA, 32 nt, Homo Sapiens
uguuuauuguuguagcucugguauauaaucca

SEQ ID NO: 12731 - RNA, 32 nt, Homo Sapiens
gaggauuucuucauaucugacguuucugaaac

SEQ ID NO: 12732 - RNA, 32 nt, Homo Sapiens
acucuugccugccucucaaaaaaaaaaaaaaa

SEQ ID NO: 12733 - RNA, 32 nt, Homo Sapiens
ggcacgagggcgggcuggcgugcggcgccguu

SEQ ID NO: 12734 - RNA, 32 nt, Homo Sapiens
uuucaugauauuccuuguuucucagcuuugga

SEQ ID NO: 12735 - RNA, 28 nt, Homo Sapiens
aucaugggagaaacagaagggaagaaag

SEQ ID NO: 12736 - RNA, 32 nt, Homo Sapiens
ugguuuucgcccuuccucucccacauuauuuc

SEQ ID NO: 12737 - RNA, 32 nt, Homo Sapiens
uuucauaaacaaaauagggauuucauaaugua

SEQ ID NO: 12738 - RNA, 32 nt, Homo Sapiens
cuuuguagcuacuuuugcaggauaauaauuuu

SEQ ID NO: 12739 - RNA, 32 nt, Homo Sapiens
gcuaaacguugacauucuaucuguaaaccaug

SEQ ID NO: 12740 - RNA, 32 nt, Homo Sapiens
cccuccccuccccuccccuccccucccccguc

SEQ ID NO: 12741 - RNA, 32 nt, Homo Sapiens
ucaggagagcagucagcagagccccucuguga

SEQ ID NO: 12742 - RNA, 32 nt, Homo Sapiens
gcacuuuccucuaucaggaaauuucaaguguu

SEQ ID NO: 12743 - RNA, 32 nt, Homo Sapiens
cuggagagagggugggucccgggccaggugcu

SEQ ID NO: 12744 - RNA, 32 nt, Homo Sapiens
cagacacauuggugcaugcacacacaccccac

SEQ ID NO: 12745 - RNA, 32 nt, Homo Sapiens
gaccgcaggaggaaauggcggggagguggcau

SEQ ID NO: 12746 - RNA, 32 nt, Homo Sapiens
ucuucugaacuguguccuuuuaauuuuugcuu

SEQ ID NO: 12747 - RNA, 32 nt, Homo Sapiens
cccccuccccauccccagcccagccgagggaa

SEQ ID NO: 12748 - RNA, 32 nt, Homo Sapiens
cgccgcagcucaccggccccagaccgcggacc

SEQ ID NO: 12749 - RNA, 32 nt, Homo Sapiens
agcugcugggacccuccugggcugccaggauu

SEQ ID NO: 12750 - RNA, 32 nt, Homo Sapiens
uaaauguccagaccacuuaaaacuacagcugc

SEQ ID NO: 12751 - RNA, 32 nt, Homo Sapiens
cuggcgugaccuuuguuuagacuuccaguuuu

SEQ ID NO: 12752 - RNA, 32 nt, Homo Sapiens
aguucgggguagcuccucauuaacuauuuguu

SEQ ID NO: 12753 - RNA, 32 nt, Homo Sapiens
aaggagagguagaugcauauuuuuguguggaa

SEQ ID NO: 12754 - RNA, 32 nt, Homo Sapiens
uggaccaguggugccuuggagggauaagccag

SEQ ID NO: 12755 - RNA, 32 nt, Homo Sapiens
guaugugaaaauaaagaaauacaucauuguau

SEQ ID NO: 12756 - RNA, 32 nt, Homo Sapiens
guuccaggaacucucagggauaccaaaaucug

SEQ ID NO: 12757 - RNA, 32 nt, Homo Sapiens
gauaggucaggagaguaacagcgcucaugaau

SEQ ID NO: 12758 - RNA, 32 nt, Homo Sapiens
cccuauguaauaucuuuuauuaugauauuugu

SEQ ID NO: 12759 - RNA, 32 nt, Homo Sapiens
gucuuucaggccgucagcacccgagcugcagg

SEQ ID NO: 12760 - RNA, 32 nt, Homo Sapiens
gcuacgaagcgcugcgcggcccccucggggcu

SEQ ID NO: 12761 - RNA, 32 nt, Homo Sapiens
auagcugugaauguggauuuaaguagagaauc

SEQ ID NO: 12762 - RNA, 32 nt, Homo Sapiens
gugcuccuugucaagcuccccccgucacucca

SEQ ID NO: 12763 - RNA, 32 nt, Homo Sapiens
gcccggugcugggccuggccgaggggcggagg

SEQ ID NO: 12764 - RNA, 32 nt, Homo Sapiens
guuugaggccccacagcaacagaaguccagga

SEQ ID NO: 12765 - RNA, 32 nt, Homo Sapiens
gcauccgcucgcaggagcgccggcggccagca

SEQ ID NO: 12766 - RNA, 32 nt, Homo Sapiens
uuuaguaauuuaauuuaaauggauaggaccaa

SEQ ID NO: 12767 - RNA, 28 nt, Homo Sapiens
cucauguucaacaaugagcucauggccg

SEQ ID NO: 12768 - RNA, 32 nt, Homo Sapiens
guaaugagacauagauaaaauaaaaucacacu

SEQ ID NO: 12769 - RNA, 32 nt, Homo Sapiens
cuaggccggcuggggcagcuggcacucaccag

SEQ ID NO: 12770 - RNA, 32 nt, Homo Sapiens
uggauauuacaauugcacgcugcuuuguaagc

SEQ ID NO: 12771 - RNA, 32 nt, Homo Sapiens
gggcgggaaggggagugguggcggcugcggca

SEQ ID NO: 12772 - RNA, 32 nt, Homo Sapiens
ggccccuccgcggaaggcguggcagggaggca

SEQ ID NO: 12773 - RNA, 32 nt, Homo Sapiens
gcgacagaagcucuucgggggaucaguggcca

SEQ ID NO: 12774 - RNA, 32 nt, Homo Sapiens
uacauauguaaaauauuguuacuagaguuaga

SEQ ID NO: 12775 - RNA, 30 nt, Homo Sapiens
uuggaggucgagagacggauacguaagugc

SEQ ID NO: 12776 - RNA, 32 nt, Homo Sapiens
aguucgagcccagccugaccaauaugaugaaa

SEQ ID NO: 12777 - RNA, 32 nt, Homo Sapiens
uaucuucugcuuccugacagcuucuuuuucaa

SEQ ID NO: 12778 - RNA, 32 nt, Homo Sapiens
uguuugauuuuuguuuugccgaggauuuuggu

SEQ ID NO: 12779 - RNA, 32 nt, Homo Sapiens
cggcagggcuaagacagcggccuugggcggug

SEQ ID NO: 12780 - RNA, 29 nt, Homo Sapiens
acuagaauucaugugagaaagcuaaaaug

SEQ ID NO: 12781 - RNA, 32 nt, Homo Sapiens
cucuugacagcaggauuggauguuguguauug

SEQ ID NO: 12782 - RNA, 32 nt, Homo Sapiens
auuuaaaagcaacaacucuauagaaagcuugu

SEQ ID NO: 12783 - RNA, 32 nt, Homo Sapiens
gacugucggugcccucccaggaacggggaagg

SEQ ID NO: 12784 - RNA, 32 nt, Homo Sapiens
uugagcccccagaugguauugcagcuucacug

SEQ ID NO: 12785 - RNA, 32 nt, Homo Sapiens
cuuuugcagagccgccuccaugugguuucgga

SEQ ID NO: 12786 - RNA, 30 nt, Homo Sapiens
ggcggcgggcggcgcgcgcuuccgaggcuu

SEQ ID NO: 12787 - RNA, 32 nt, Homo Sapiens
aggaguguucugaccuacaaggcuguccaauc

SEQ ID NO: 12788 - RNA, 31 nt, Homo Sapiens
uccuuccaagccacaguguagugaaccucau

SEQ ID NO: 12789 - RNA, 32 nt, Homo Sapiens
uuuuaauauaucuauauaaaauauagugucaa

SEQ ID NO: 12790 - RNA, 32 nt, Homo Sapiens
gaccagcuucagcccuucuugcucuccauggu

SEQ ID NO: 12791 - RNA, 32 nt, Homo Sapiens
cagagcagagaccagccugagccccgggcucc

SEQ ID NO: 12792 - RNA, 32 nt, Homo Sapiens
agagguggaggccccaagaagccguggaaaug

SEQ ID NO: 12793 - RNA, 32 nt, Homo Sapiens
uguguuuugcugucacuuuggcauccucugau

SEQ ID NO: 12794 - RNA, 32 nt, Homo Sapiens
ggaguagaggggcagguagaguuccuggaggg

SEQ ID NO: 12795 - RNA, 32 nt, Homo Sapiens
aaaaucaucuaaguuaugaaauccaacauagg

SEQ ID NO: 12796 - RNA, 32 nt, Homo Sapiens
ucaugaaaaaauaaauugaugaaacuaaugau

SEQ ID NO: 12797 - RNA, 32 nt, Homo Sapiens
cgugccauuugagaggcugcugccccaggcag

SEQ ID NO: 12798 - RNA, 32 nt, Homo Sapiens
gugaagacuaauguauuuuuuauauugcagug

SEQ ID NO: 12799 - RNA, 32 nt, Homo Sapiens
agaauuuaaaggugauaaaaauacuggcauuu

SEQ ID NO: 12800 - RNA, 32 nt, Homo Sapiens
aggucuagugacggagcccgcgcgcggcgcca

SEQ ID NO: 12801 - RNA, 32 nt, Homo Sapiens
gcuccacgcucgcgcccgccaugccggagcag

SEQ ID NO: 12802 - RNA, 32 nt, Homo Sapiens
uuguuuaauuuucacuucauucaauucacgca

SEQ ID NO: 12803 - RNA, 32 nt, Homo Sapiens
uucaaacugggauauuaacauuccaaagccuu

SEQ ID NO: 12804 - RNA, 29 nt, Homo Sapiens
uccaguucaaaauauauaucagauuaaua

SEQ ID NO: 12805 - RNA, 28 nt, Homo Sapiens
cccagagcuuguugacauuugaagaagu

SEQ ID NO: 12806 - RNA, 31 nt, Homo Sapiens
aaugacccacccuuccugauuuuaaguauac

SEQ ID NO: 12807 - RNA, 32 nt, Homo Sapiens
gaaacauuaaacacagugggaauaucacuuuu

SEQ ID NO: 12808 - RNA, 32 nt, Homo Sapiens
uuagcaguucccuccuuucccauccuccaggg

SEQ ID NO: 12809 - RNA, 32 nt, Homo Sapiens
uguacguguccuggcauuuccccucccucucc

SEQ ID NO: 12810 - RNA, 32 nt, Homo Sapiens
uuggagcugucgggcucagccagcggcgcggc

SEQ ID NO: 12811 - RNA, 32 nt, Homo Sapiens
cggggcggggagcggcucggacgcaggacgcc

SEQ ID NO: 12812 - RNA, 32 nt, Homo Sapiens
aacauuguaagaaugaauauuuuuaauguagu

SEQ ID NO: 12813 - RNA, 32 nt, Homo Sapiens
ugccaaguaaagucagcaaacaacaaacaaac

SEQ ID NO: 12814 - RNA, 32 nt, Homo Sapiens
gccaaggguaggggcggggcggggaagugaac

SEQ ID NO: 12815 - RNA, 32 nt, Homo Sapiens
ggagucggggagguagggagagucacggagau

SEQ ID NO: 12816 - RNA, 32 nt, Homo Sapiens
ccucuucuuuaacugggaacacaggcucucac

SEQ ID NO: 12817 - RNA, 32 nt, Homo Sapiens
cgcgcccgcggcccgcggccgccaugcaguuu

SEQ ID NO: 12818 - RNA, 32 nt, Homo Sapiens
gauuucagggcccagcaguguuccuccaucag

SEQ ID NO: 12819 - RNA, 32 nt, Homo Sapiens
ugacguuaaugauaugacuaggaggagcuagg

SEQ ID NO: 12820 - RNA, 32 nt, Homo Sapiens
uguuuuucauccuuugcuaggaugcacucugu

SEQ ID NO: 12821 - RNA, 32 nt, Homo Sapiens
aaucucauuuuucagucuuacagaagauugug

SEQ ID NO: 12822 - RNA, 32 nt, Homo Sapiens
uaacgcuggacucagcugggggcaggaccagg

SEQ ID NO: 12823 - RNA, 32 nt, Homo Sapiens
uuaacagaguacuuaaauuuacuuguucagua

SEQ ID NO: 12824 - RNA, 32 nt, Homo Sapiens
ugcuguaagaauaagauaugugaauuccacaa

SEQ ID NO: 12825 - RNA, 32 nt, Homo Sapiens
ggacccucgcugcaccuaccccucccauugca

SEQ ID NO: 12826 - RNA, 32 nt, Homo Sapiens
gcuggccgaggguccuggcuccugaggggcau

SEQ ID NO: 12827 - RNA, 32 nt, Homo Sapiens
guggggcuacugcagugugcugccaaauggga

SEQ ID NO: 12828 - RNA, 32 nt, Homo Sapiens
aagcacaggaggagguagcuagcgugugaggg

SEQ ID NO: 12829 - RNA, 32 nt, Homo Sapiens
guuuuuggauuuucuccggacucaucaguaaa

SEQ ID NO: 12830 - RNA, 30 nt, Homo Sapiens
uggccaggcaggcagguggacgaguccagg

SEQ ID NO: 12831 - RNA, 32 nt, Homo Sapiens
ggaaacuguuuugccuggcgcugcugccccac

SEQ ID NO: 12832 - RNA, 32 nt, Homo Sapiens
gguguugacugcacuaauaauaaaccuuuuac

SEQ ID NO: 12833 - RNA, 32 nt, Homo Sapiens
ugaaaaugagaaucugccagguccucagucgg

SEQ ID NO: 12834 - RNA, 32 nt, Homo Sapiens
aggcccagcucuuccucccggcggccucugca

SEQ ID NO: 12835 - RNA, 32 nt, Homo Sapiens
gauccacuccccacccaacaccaucgucugca

SEQ ID NO: 12836 - RNA, 32 nt, Homo Sapiens
cagaggcugggugacauguguuggcagccucu

SEQ ID NO: 12837 - RNA, 32 nt, Homo Sapiens
ggaccauucuaccuguguucuuugacccucgg

SEQ ID NO: 12838 - RNA, 31 nt, Homo Sapiens
auggcuuuggcugcccugccccaaagccauu

SEQ ID NO: 12839 - RNA, 32 nt, Homo Sapiens
ucucuguucauccacgcucagaucuccccugc

SEQ ID NO: 12840 - RNA, 32 nt, Homo Sapiens
auuuaagauacucuauuauauuaaauacaguu

SEQ ID NO: 12841 - RNA, 32 nt, Homo Sapiens
cccgaaguuggccugcccggccuuugggacau

SEQ ID NO: 12842 - RNA, 32 nt, Homo Sapiens
gcccccacuauuuaaaauucucuucugagcug

SEQ ID NO: 12843 - RNA, 28 nt, Homo Sapiens
uggcauaugaauaccaggauagcuuuau

SEQ ID NO: 12844 - RNA, 32 nt, Homo Sapiens
ucauuugaaacguagaggccgcagcagucagc

SEQ ID NO: 12845 - RNA, 32 nt, Homo Sapiens
auuacucuguacuuauacuaauguuuacaaga

SEQ ID NO: 12846 - RNA, 32 nt, Homo Sapiens
ggcuauagagucaggcacuggguguggaugga

SEQ ID NO: 12847 - RNA, 32 nt, Homo Sapiens
ucagaaggaaaacagccggugaucuucuacca

SEQ ID NO: 12848 - RNA, 32 nt, Homo Sapiens
ggcuccacaauuuaguaacauuuauauuaaga

SEQ ID NO: 12849 - RNA, 32 nt, Homo Sapiens
caggauauuuuuccucuacaauaaaguaacaa

SEQ ID NO: 12850 - RNA, 32 nt, Homo Sapiens
aguggacacagcuauaagagaugaagggacac

SEQ ID NO: 12851 - RNA, 32 nt, Homo Sapiens
uuaagcugcuaagaugggaugugccgauccuu

SEQ ID NO: 12852 - RNA, 32 nt, Homo Sapiens
cccaaggcugcauuccaguaugguaucaaaau

SEQ ID NO: 12853 - RNA, 32 nt, Homo Sapiens
gcuauguaagagaauaaaugccauuguuuuaa

SEQ ID NO: 12854 - RNA, 32 nt, Homo Sapiens
uuugcagcugaauuuuggcuuggaaucaccaa

SEQ ID NO: 12855 - RNA, 32 nt, Homo Sapiens
acgcuggugcagcucucgcugcagcagcucgu

SEQ ID NO: 12856 - RNA, 32 nt, Homo Sapiens
gauaaacacaaucugcuaggaacuugggaaag

SEQ ID NO: 12857 - RNA, 32 nt, Homo Sapiens
cugaaaaaacauuguccucaaauaauguucuu

SEQ ID NO: 12858 - RNA, 29 nt, Homo Sapiens
ggaucggguaucugggcccggcgcggagc

SEQ ID NO: 12859 - RNA, 32 nt, Homo Sapiens
ugagaagguagauagaagaaugucuagccaau

SEQ ID NO: 12860 - RNA, 32 nt, Homo Sapiens
gaugcccugugcuuccuguacagcugcggaac

SEQ ID NO: 12861 - RNA, 32 nt, Homo Sapiens
cucagccucacaggccaaagcaucagcaccag

SEQ ID NO: 12862 - RNA, 32 nt, Homo Sapiens
uaauagaugugaaaaugcuuugaaaauguuuu

SEQ ID NO: 12863 - RNA, 32 nt, Homo Sapiens
ccagcagccucagcuuuacaaaugccuuggua

SEQ ID NO: 12864 - RNA, 25 nt, Homo Sapiens
augcccgccugugcccgggguccca

SEQ ID NO: 12865 - RNA, 32 nt, Homo Sapiens
agauggaaaaggaauaugaaugagccaucggu

SEQ ID NO: 12866 - RNA, 32 nt, Homo Sapiens
cgcucagugcuguucuccugauauugaguccu

SEQ ID NO: 12867 - RNA, 32 nt, Homo Sapiens
aggauauaaaugucuuuuuuuuuucuuucuuu

SEQ ID NO: 12868 - RNA, 32 nt, Homo Sapiens
uaaagugcuguaaaauaaacuucaaagugguu

SEQ ID NO: 12869 - RNA, 30 nt, Homo Sapiens
gcuggcagucuugguggcggcaggggccgc

SEQ ID NO: 12870 - RNA, 32 nt, Homo Sapiens
cccuccugcuucccuuaccagucgugcaccgc

SEQ ID NO: 12871 - RNA, 32 nt, Homo Sapiens
aaaaugucaauaaccucaaaggaugaaggguu

SEQ ID NO: 12872 - RNA, 32 nt, Homo Sapiens
augccgaauuuaaugaacccuauuugaauugc

SEQ ID NO: 12873 - RNA, 32 nt, Homo Sapiens
caauaggacaaaugaugucauccagaggaccc

SEQ ID NO: 12874 - RNA, 32 nt, Homo Sapiens
ucggcccgccgggcccgcagugugagagcgcc

SEQ ID NO: 12875 - RNA, 32 nt, Homo Sapiens
cucuuuggaguugcauagcagcagccauuuuu

SEQ ID NO: 12876 - RNA, 32 nt, Homo Sapiens
cccaggaggagcuugaaauccugucugggauc

SEQ ID NO: 12877 - RNA, 32 nt, Homo Sapiens
guuuacagccaugucugauauuucagcagcau

SEQ ID NO: 12878 - RNA, 32 nt, Homo Sapiens
augaagugacuaggauaaaauaaaagaugaag

SEQ ID NO: 12879 - RNA, 32 nt, Homo Sapiens
cucccagccugggcccccggcggcgccguggc

SEQ ID NO: 12880 - RNA, 32 nt, Homo Sapiens
uguaguugucauaauuacauuuggaacaaaag

SEQ ID NO: 12881 - RNA, 32 nt, Homo Sapiens
gaugcuuuguuuuuauuuuuuaaguaccaaaa

SEQ ID NO: 12882 - RNA, 32 nt, Homo Sapiens
ggggaucgcucuuccucacaccacaaaucuga

SEQ ID NO: 12883 - RNA, 32 nt, Homo Sapiens
ggcugugagcgaaauagcugccccccacuucu

SEQ ID NO: 12884 - RNA, 32 nt, Homo Sapiens
cuagcagguuucagcuggagcggcggcggcgg

SEQ ID NO: 12885 - RNA, 32 nt, Homo Sapiens
accucuggcuagagccgaggggagagagggac

SEQ ID NO: 12886 - RNA, 32 nt, Homo Sapiens
aaacccaauaucuauuuuuuaacugauuguau

SEQ ID NO: 12887 - RNA, 32 nt, Homo Sapiens
uuucuggguggcuggcucagcugcuggccggu

SEQ ID NO: 12888 - RNA, 32 nt, Homo Sapiens
cgaggcaccgccgcaccacgcgggagaccuac

SEQ ID NO: 12889 - RNA, 32 nt, Homo Sapiens
acucucgacacacguuuuccugucuucgccgg

SEQ ID NO: 12890 - RNA, 32 nt, Homo Sapiens
ccucaugggaagaguuacuuuuuuagaucuaa

SEQ ID NO: 12891 - RNA, 32 nt, Homo Sapiens
uggggcaucucacagggaccaagcccucagga

SEQ ID NO: 12892 - RNA, 32 nt, Homo Sapiens
ugacacagaugugcagugugcacggaucacag

SEQ ID NO: 12893 - RNA, 32 nt, Homo Sapiens
ugcaggcccuccccacccaggacuccaggccu

SEQ ID NO: 12894 - RNA, 32 nt, Homo Sapiens
gugguugucauucagauacuugagaacauuuu

SEQ ID NO: 12895 - RNA, 32 nt, Homo Sapiens
ucaccaugcuggccaggcugggcuugaacucc

SEQ ID NO: 12896 - RNA, 32 nt, Homo Sapiens
ccagcaggggggcuucuaugcugcugggcucc

SEQ ID NO: 12897 - RNA, 32 nt, Homo Sapiens
aggaggacccaggacaggauccaggccggcuu

SEQ ID NO: 12898 - RNA, 32 nt, Homo Sapiens
agauuacaugaacaggcagauugaaaucacca

SEQ ID NO: 12899 - RNA, 32 nt, Homo Sapiens
cgagauccuguccuuacaaaaaauuuaaaaua

SEQ ID NO: 12900 - RNA, 32 nt, Homo Sapiens
cucuuccucauauuucagcagugcagccgggg

SEQ ID NO: 12901 - RNA, 32 nt, Homo Sapiens
ggcccuccugggugggguggugccagagcagc

SEQ ID NO: 12902 - RNA, 32 nt, Homo Sapiens
aaauaggaccagcuuuuaccugcccaguccug

SEQ ID NO: 12903 - RNA, 32 nt, Homo Sapiens
cuccuggaggcggcgggauggaggcggcggcc

SEQ ID NO: 12904 - RNA, 32 nt, Homo Sapiens
cugacaggccucuggagccaggcgacuucuug

SEQ ID NO: 12905 - RNA, 32 nt, Homo Sapiens
cugccaucuacuccacuguucagacaccuccu

SEQ ID NO: 12906 - RNA, 32 nt, Homo Sapiens
gcacuuaacuaugagccaggcaucauacuaaa

SEQ ID NO: 12907 - RNA, 32 nt, Homo Sapiens
uccuuguuaucagagaaauguuaguucaauac

SEQ ID NO: 12908 - RNA, 32 nt, Homo Sapiens
uguugugggcagcagggccagguccuggucug

SEQ ID NO: 12909 - RNA, 32 nt, Homo Sapiens
accacacgguacagcugcaggccguggucagg

SEQ ID NO: 12910 - RNA, 31 nt, Homo Sapiens
ggagccuggcacugcuuccuccaccguuuuc

SEQ ID NO: 12911 - RNA, 32 nt, Homo Sapiens
caccugggaaaugaggcccacagacucaaagu

SEQ ID NO: 12912 - RNA, 32 nt, Homo Sapiens
uuccuacuaggaaaacaaaacaucucaggaca

SEQ ID NO: 12913 - RNA, 32 nt, Homo Sapiens
uguucuaggcagcugggaauagacaugguacu

SEQ ID NO: 12914 - RNA, 32 nt, Homo Sapiens
gggcuggcagugcgggcagagcccggcugaga

SEQ ID NO: 12915 - RNA, 32 nt, Homo Sapiens
uaucuccaggacuggagaggccugcuggccau

SEQ ID NO: 12916 - RNA, 32 nt, Homo Sapiens
gaugguuaauacugagugucaauugauugaau

SEQ ID NO: 12917 - RNA, 28 nt, Homo Sapiens
uacaagagaacauggccaagcgaguugc

SEQ ID NO: 12918 - RNA, 32 nt, Homo Sapiens
uuggaggcugcuuauuccagacuggguugaua

SEQ ID NO: 12919 - RNA, 32 nt, Homo Sapiens
ucccccuacuuccugccaagcauuccauugac

SEQ ID NO: 12920 - RNA, 32 nt, Homo Sapiens
acaccuugucaaccucuuccugucuuaccaaa

SEQ ID NO: 12921 - RNA, 32 nt, Homo Sapiens
auccgguguccgccggcccccggcccugaaac

SEQ ID NO: 12922 - RNA, 32 nt, Homo Sapiens
uagggccccugccugccuccuggggagcccgg

SEQ ID NO: 12923 - RNA, 32 nt, Homo Sapiens
uacagaaauuuaaucaugucugauuaauugcu

SEQ ID NO: 12924 - RNA, 31 nt, Homo Sapiens
acgacaccacugagaaagucaaccacccugc

SEQ ID NO: 12925 - RNA, 32 nt, Homo Sapiens
uuuguacccucuaucauucccuuccauugcag

SEQ ID NO: 12926 - RNA, 32 nt, Homo Sapiens
ccauggggcucgucuucugggguguuccccug

SEQ ID NO: 12927 - RNA, 32 nt, Homo Sapiens
auucgcacaucccaccccauccccugaacuac

SEQ ID NO: 12928 - RNA, 32 nt, Homo Sapiens
aguuccuuguuaggccucuccuuccgaugaaa

SEQ ID NO: 12929 - RNA, 32 nt, Homo Sapiens
agugggcccagcccggcccgcgucucgaaggg

SEQ ID NO: 12930 - RNA, 32 nt, Homo Sapiens
uguggccuggaaaguuuucuaagguguuaggg

SEQ ID NO: 12931 - RNA, 32 nt, Homo Sapiens
agaacccuuuagaaaguauaaaauauugccuc

SEQ ID NO: 12932 - RNA, 32 nt, Homo Sapiens
gccuccccugacccccuccccccgcugcuggg

SEQ ID NO: 12933 - RNA, 32 nt, Homo Sapiens
gacaaggagagccaaagacugaugggaaccac

SEQ ID NO: 12934 - RNA, 32 nt, Homo Sapiens
cugaggguagcagcagcccacccauguucagc

SEQ ID NO: 12935 - RNA, 32 nt, Homo Sapiens
uauccagucugugccaacugaaguaggagacu

SEQ ID NO: 12936 - RNA, 32 nt, Homo Sapiens
ugcagaaaaauuguaggguucuguggaaggag

SEQ ID NO: 12937 - RNA, 32 nt, Homo Sapiens
gcccggcgcggcgacugcucuccgggcuggcg

SEQ ID NO: 12938 - RNA, 32 nt, Homo Sapiens
cccuguacagauguggaaaccgaggcguagga

SEQ ID NO: 12939 - RNA, 32 nt, Homo Sapiens
gacagacgugcagguggaagcggcaccugccg

SEQ ID NO: 12940 - RNA, 32 nt, Homo Sapiens
ugucaucaaaggauauuccagauucuugacag

SEQ ID NO: 12941 - RNA, 32 nt, Homo Sapiens
uuaacaaauggcaacacggcuucaugcgugcc

SEQ ID NO: 12942 - RNA, 31 nt, Homo Sapiens
aacuuuuaaaauuguaauggaggcuguaauc

SEQ ID NO: 12943 - RNA, 29 nt, Homo Sapiens
uggagagggacgcggcggacgccggcagc

SEQ ID NO: 12944 - RNA, 32 nt, Homo Sapiens
gagucacaggacccggauguugucaguucgac

SEQ ID NO: 12945 - RNA, 32 nt, Homo Sapiens
cgcuugccgccagcugacaccgccugcaccca

SEQ ID NO: 12946 - RNA, 32 nt, Homo Sapiens
ucucaaaaaaacaaaacuuggcuguuaauguc

SEQ ID NO: 12947 - RNA, 32 nt, Homo Sapiens
cuucaguguaccuccuuaauccugcuucaacu

SEQ ID NO: 12948 - RNA, 32 nt, Homo Sapiens
aaugcguagggggccugggaagaauauuaaaa

SEQ ID NO: 12949 - RNA, 32 nt, Homo Sapiens
uacuucuucuauuuuuauaauauuuucucauu

SEQ ID NO: 12950 - RNA, 32 nt, Homo Sapiens
gugcaccugccagcguggccgagucacacagu

SEQ ID NO: 12951 - RNA, 32 nt, Homo Sapiens
ccuccgcuuccucuccuaggcgacgagaccca

SEQ ID NO: 12952 - RNA, 32 nt, Homo Sapiens
uucccagacaccuucccaggcgcugccagccu

SEQ ID NO: 12953 - RNA, 32 nt, Homo Sapiens
uaaccuguuuccauucuccauucaaauaaaga

SEQ ID NO: 12954 - RNA, 32 nt, Homo Sapiens
auuuuuaugagaaauugaacuuugaaauauuu

SEQ ID NO: 12955 - RNA, 32 nt, Homo Sapiens
uuuucccaccagccuguugggcgaaguugcug

SEQ ID NO: 12956 - RNA, 31 nt, Homo Sapiens
gcauccccacccugguacucacacagguggu

SEQ ID NO: 12957 - RNA, 32 nt, Homo Sapiens
ucugcugccucccagcugucuugacugaaggc

SEQ ID NO: 12958 - RNA, 32 nt, Homo Sapiens
augacugcuuucagcaucuaacaggacuucug

SEQ ID NO: 12959 - RNA, 29 nt, Homo Sapiens
acuguacaaaauaaaggucucuuuaucug

SEQ ID NO: 12960 - RNA, 32 nt, Homo Sapiens
aaauggcuuugugauucaaucuguaaacugug

SEQ ID NO: 12961 - RNA, 32 nt, Homo Sapiens
uguuucuuguuugcauguuccuguucuucgug

SEQ ID NO: 12962 - RNA, 32 nt, Homo Sapiens
gggaauaaauaauggaaaaagauccagucugu

SEQ ID NO: 12963 - RNA, 32 nt, Homo Sapiens
uucucuagcuggaagagcuguuuauaugcacg

SEQ ID NO: 12964 - RNA, 32 nt, Homo Sapiens
aagguagagucuuacaaucaaaucuccugcug

SEQ ID NO: 12965 - RNA, 32 nt, Homo Sapiens
auuuaccgacauuccuuauacaugacagacac

SEQ ID NO: 12966 - RNA, 32 nt, Homo Sapiens
auguuacccucauauuuucagcacuaauuuua

SEQ ID NO: 12967 - RNA, 32 nt, Homo Sapiens
cuggguaaggggacgaggagcgaacacugcac

SEQ ID NO: 12968 - RNA, 32 nt, Homo Sapiens
gaccugcuggggucuccugggacccgccuguu

SEQ ID NO: 12969 - RNA, 27 nt, Homo Sapiens
uuguucuacuuuuucagcccuuuacuu

SEQ ID NO: 12970 - RNA, 32 nt, Homo Sapiens
uguauuuuauugccucugaguaucauauuaaa

SEQ ID NO: 12971 - RNA, 32 nt, Homo Sapiens
gcagcuccggcgccgcgccgucccgccagaac

SEQ ID NO: 12972 - RNA, 32 nt, Homo Sapiens
aggacucuucccagcccuccuguucucugauc

SEQ ID NO: 12973 - RNA, 32 nt, Homo Sapiens
aaucacuacuguuaccuguuauagaaaauagu

SEQ ID NO: 12974 - RNA, 30 nt, Homo Sapiens
aucugugucuguggcugcauauuuugcaaa

SEQ ID NO: 12975 - RNA, 32 nt, Homo Sapiens
cgucccgcaggccgcugaugccgcccgcggcg

SEQ ID NO: 12976 - RNA, 32 nt, Homo Sapiens
auuccucugcugucccaggagcaggcagggca

SEQ ID NO: 12977 - RNA, 32 nt, Homo Sapiens
aggagguggcuucauguggcacuugggcauuu

SEQ ID NO: 12978 - RNA, 32 nt, Homo Sapiens
agagccaggugcuaagggcaucaggucgacau

SEQ ID NO: 12979 - RNA, 32 nt, Homo Sapiens
acagguuuacuacuccauguucugacauuggg

SEQ ID NO: 12980 - RNA, 32 nt, Homo Sapiens
gcaaguggaaaacggagacuggaauuccgccc

SEQ ID NO: 12981 - RNA, 32 nt, Homo Sapiens
aucuguaguggcggcggcggcggcggcggcgg

SEQ ID NO: 12982 - RNA, 30 nt, Homo Sapiens
gcuuggggcaagcuugaugcaguaggagag

SEQ ID NO: 12983 - RNA, 32 nt, Homo Sapiens
cugccccuggcccucccggcagcccucggcau

SEQ ID NO: 12984 - RNA, 32 nt, Homo Sapiens
gaauaaguauuaguuaauguuaccaaaaucug

SEQ ID NO: 12985 - RNA, 32 nt, Homo Sapiens
ggguaaagaggaaagcacuuucgaggagagca

SEQ ID NO: 12986 - RNA, 32 nt, Homo Sapiens
uccacgaggcugucaccacccugguagcacug

SEQ ID NO: 12987 - RNA, 32 nt, Homo Sapiens
caaagguuucuuuuuucuuagcuucauuucuc

SEQ ID NO: 12988 - RNA, 32 nt, Homo Sapiens
uuccuguggaagagggaaguguaggugaauag

SEQ ID NO: 12989 - RNA, 32 nt, Homo Sapiens
cgccgggggaggagggggcgcaccgggacuga

SEQ ID NO: 12990 - RNA, 32 nt, Homo Sapiens
gcacauugggaccucucucccucccccaucca

SEQ ID NO: 12991 - RNA, 32 nt, Homo Sapiens
auuuaagucucagaucuucuggauaccaaauc

SEQ ID NO: 12992 - RNA, 32 nt, Homo Sapiens
uucagacacuguaucccagaacugcucuagug

SEQ ID NO: 12993 - RNA, 32 nt, Homo Sapiens
ggagcagggacauagcacauuuuugucugucu

SEQ ID NO: 12994 - RNA, 31 nt, Homo Sapiens
gcagagcagggaagccaaccugagcaaacac

SEQ ID NO: 12995 - RNA, 32 nt, Homo Sapiens
gcggugaguguuacaguucuuaaagauggugu

SEQ ID NO: 12996 - RNA, 32 nt, Homo Sapiens
gggugccugccagcagcugaggcgccauggcg

SEQ ID NO: 12997 - RNA, 32 nt, Homo Sapiens
cagcauggacccaguguguucuccugcuccuu

SEQ ID NO: 12998 - RNA, 32 nt, Homo Sapiens
aguggacaucgcggcucuguguuuuugaaguc

SEQ ID NO: 12999 - RNA, 32 nt, Homo Sapiens
gucgccuugggcugggggcgcaccccagggag

SEQ ID NO: 13000 - RNA, 32 nt, Homo Sapiens
ugaauuaaauucaaaucauugauuucugaaau

SEQ ID NO: 13001 - RNA, 32 nt, Homo Sapiens
agauaaguuuaaaagcaauaauuuagagagag

SEQ ID NO: 13002 - RNA, 32 nt, Homo Sapiens
caagaugaaaaauaagacuuggugugaccagc

SEQ ID NO: 13003 - RNA, 32 nt, Homo Sapiens
ggggugcacucgccauuuccucacgugcagga

SEQ ID NO: 13004 - RNA, 32 nt, Homo Sapiens
uuauuuugcaacagacacuuuuucucaggaca

SEQ ID NO: 13005 - RNA, 32 nt, Homo Sapiens
gaguguuugaauaacugggacuguagcccguc

SEQ ID NO: 13006 - RNA, 32 nt, Homo Sapiens
uuuugaggucaaaaacaacagcaaaauaccaa

SEQ ID NO: 13007 - RNA, 32 nt, Homo Sapiens
gggaaccgccgggccggguccucgcgcgggga

SEQ ID NO: 13008 - RNA, 32 nt, Homo Sapiens
aacacuaccgccagccagcgggcucaugcacc

SEQ ID NO: 13009 - RNA, 32 nt, Homo Sapiens
gaaacagcccccagcccccgucugucccccaa

SEQ ID NO: 13010 - RNA, 32 nt, Homo Sapiens
ggggugaggagcugagccugcucaaggagugg

SEQ ID NO: 13011 - RNA, 32 nt, Homo Sapiens
cagccauuaaaauaaaacaagccuuaaucugc

SEQ ID NO: 13012 - RNA, 32 nt, Homo Sapiens
uaggagccugcacaggauguguguguauggac

SEQ ID NO: 13013 - RNA, 32 nt, Homo Sapiens
cacguucagcgcaugcucucggauagggucac

SEQ ID NO: 13014 - RNA, 32 nt, Homo Sapiens
accuagccccugccgaccucuccagcuuuccc

SEQ ID NO: 13015 - RNA, 32 nt, Homo Sapiens
ucuggugauauuaaggugaaauaacaaaacac

SEQ ID NO: 13016 - RNA, 32 nt, Homo Sapiens
gaagaacacagacucauuccucgaaccccagg

SEQ ID NO: 13017 - RNA, 32 nt, Homo Sapiens
accagaccagaccagaccagagggaucggagg

SEQ ID NO: 13018 - RNA, 32 nt, Homo Sapiens
cuccacguguggaucagcagcaccucgcuuuc

SEQ ID NO: 13019 - RNA, 32 nt, Homo Sapiens
ccgcugagauauggcauugcacugcuuauaug

SEQ ID NO: 13020 - RNA, 32 nt, Homo Sapiens
uccuccaguuguuuucugggaaugcuaauaug

SEQ ID NO: 13021 - RNA, 32 nt, Homo Sapiens
gauauaugcugguauaaaaauaaaauuuuggg

SEQ ID NO: 13022 - RNA, 32 nt, Homo Sapiens
augcuggagucacuugcacuuuauaugcauca

SEQ ID NO: 13023 - RNA, 32 nt, Homo Sapiens
uccaagugucaaauaggacacccaucuuaccg

SEQ ID NO: 13024 - RNA, 32 nt, Homo Sapiens
cagagaaaucaucugauguuucuauagucacu

SEQ ID NO: 13025 - RNA, 32 nt, Homo Sapiens
aucugaggggcagaaugcugcuagcacuugaa

SEQ ID NO: 13026 - RNA, 32 nt, Homo Sapiens
uguaccaugugcuacaggggccagaagaugaa

SEQ ID NO: 13027 - RNA, 32 nt, Homo Sapiens
auguaguccaacaaacaccuauucuauauuua

SEQ ID NO: 13028 - RNA, 32 nt, Homo Sapiens
acugaggaugaagagggagaaugucagaacuc

SEQ ID NO: 13029 - RNA, 32 nt, Homo Sapiens
caagaagaagcaguauuaacaucaauugaucg

SEQ ID NO: 13030 - RNA, 32 nt, Homo Sapiens
ggguauugauuugccuuucccccgcccccacc

SEQ ID NO: 13031 - RNA, 32 nt, Homo Sapiens
aagcugucuccauuaugagaaaggccagaaua

SEQ ID NO: 13032 - RNA, 27 nt, Homo Sapiens
guugacaauaaauuauuuuuuuuuauu

SEQ ID NO: 13033 - RNA, 32 nt, Homo Sapiens
uuuaagggaaugccuugugugagaggacuagc

SEQ ID NO: 13034 - RNA, 32 nt, Homo Sapiens
ccagcugggaucugccugaggacagagaacau

SEQ ID NO: 13035 - RNA, 32 nt, Homo Sapiens
uaccuugugucuuuuuauuacuguuuaaucaa

SEQ ID NO: 13036 - RNA, 32 nt, Homo Sapiens
ggccuuggagagaggccggggaggcgagccca

SEQ ID NO: 13037 - RNA, 32 nt, Homo Sapiens
agcaggaguccauuuuaacacuuaccgacuuu

SEQ ID NO: 13038 - RNA, 32 nt, Homo Sapiens
ucuccuuucaucuauuuauuuaaauauuuauu

SEQ ID NO: 13039 - RNA, 27 nt, Homo Sapiens
caguccuuucaccucagccccccacau

SEQ ID NO: 13040 - RNA, 32 nt, Homo Sapiens
gcugauuuaaauuuauaaugaacucuuuugua

SEQ ID NO: 13041 - RNA, 32 nt, Homo Sapiens
cgggcuugguggcgcgcaccuguggucccagc

SEQ ID NO: 13042 - RNA, 32 nt, Homo Sapiens
cucugcacagaaacaaagaagaaauguuauac

SEQ ID NO: 13043 - RNA, 32 nt, Homo Sapiens
ggagccaaugcagauagcacaucagaugcuag

SEQ ID NO: 13044 - RNA, 31 nt, Homo Sapiens
uuuauaucacggagagaccacuucagugauc

SEQ ID NO: 13045 - RNA, 32 nt, Homo Sapiens
ucagcaagaaacaaaaccaaacuggacucucg

SEQ ID NO: 13046 - RNA, 32 nt, Homo Sapiens
gacagcuccuuaaaugcuugaaggcaauuacc

SEQ ID NO: 13047 - RNA, 32 nt, Homo Sapiens
cccccuauauauaaauauauguaaucaauuuc

SEQ ID NO: 13048 - RNA, 32 nt, Homo Sapiens
aggcuccgugcagcccuugggaacagugagag

SEQ ID NO: 13049 - RNA, 32 nt, Homo Sapiens
gggguuauuuugggagcagcuucugagaucca

SEQ ID NO: 13050 - RNA, 32 nt, Homo Sapiens
augaaguuccagaguuuguuguguaaguccgu

SEQ ID NO: 13051 - RNA, 32 nt, Homo Sapiens
ccuucugcucucccagcgcagcgccgccgccc

SEQ ID NO: 13052 - RNA, 32 nt, Homo Sapiens
uugcauaucuggaauuacaccuuuaaagacug

SEQ ID NO: 13053 - RNA, 32 nt, Homo Sapiens
agucaccaucuaaauguccccaaagugaagaa

SEQ ID NO: 13054 - RNA, 32 nt, Homo Sapiens
gagucggccccggggagcuccaggagagaggg

SEQ ID NO: 13055 - RNA, 32 nt, Homo Sapiens
ggcauucacuuaacuggcccagcccucucugc

SEQ ID NO: 13056 - RNA, 32 nt, Homo Sapiens
cucgggcgcccggccgggccuggcagggaagg

SEQ ID NO: 13057 - RNA, 32 nt, Homo Sapiens
auguacauuauuuugguucaguuuuuuaaaaa

SEQ ID NO: 13058 - RNA, 32 nt, Homo Sapiens
ggaggcuuccccaucuuuaguuuuccacucug

SEQ ID NO: 13059 - RNA, 32 nt, Homo Sapiens
gggaggggggagccccagaaaugcgguugcug

SEQ ID NO: 13060 - RNA, 32 nt, Homo Sapiens
ugcagguguggccuuguuucuccuugcccagc

SEQ ID NO: 13061 - RNA, 32 nt, Homo Sapiens
cugugagugggggacagggaguggggcaggca

SEQ ID NO: 13062 - RNA, 31 nt, Homo Sapiens
cuccuggaaaaggaucuguccacuccugguc

SEQ ID NO: 13063 - RNA, 32 nt, Homo Sapiens
gagacgcggagcccgcgcgagcgucggagaca

SEQ ID NO: 13064 - RNA, 32 nt, Homo Sapiens
aagccaggaaggaaucaguauuuuauucuaag

SEQ ID NO: 13065 - RNA, 32 nt, Homo Sapiens
gagaccuccuggaugccagguauuggggucac

SEQ ID NO: 13066 - RNA, 32 nt, Homo Sapiens
aauauacugcauauccuggugucuaguuugca

SEQ ID NO: 13067 - RNA, 32 nt, Homo Sapiens
aaugauugucagugacucagagcuuccuggga

SEQ ID NO: 13068 - RNA, 32 nt, Homo Sapiens
cagguuacauauauauauuuauaaugugucuu

SEQ ID NO: 13069 - RNA, 32 nt, Homo Sapiens
ccagaagguuuggagugacagcuccuuucuuc

SEQ ID NO: 13070 - RNA, 32 nt, Homo Sapiens
gccugcccugcagcuggaagacucggcgcucu

SEQ ID NO: 13071 - RNA, 32 nt, Homo Sapiens
uauccuaauguggaccaccaaucuugagcccc

SEQ ID NO: 13072 - RNA, 32 nt, Homo Sapiens
aaaaaauaguauauucuacauaaaaaauuaaa

SEQ ID NO: 13073 - RNA, 32 nt, Homo Sapiens
ucacuuuccuuccuuuuuccuuuccagucaua

SEQ ID NO: 13074 - RNA, 32 nt, Homo Sapiens
ccgcuuccuggcggccgggucccaggcaguuu

SEQ ID NO: 13075 - RNA, 28 nt, Homo Sapiens
gagauggcgacgcgcuccugucgggaga

SEQ ID NO: 13076 - RNA, 32 nt, Homo Sapiens
gagggcuggccgggacugcugcucucccaagg

SEQ ID NO: 13077 - RNA, 32 nt, Homo Sapiens
agaaguuauuggcugggaaaaucuaagaaaaa

SEQ ID NO: 13078 - RNA, 32 nt, Homo Sapiens
ugccuuuuaauaguguaauauccacagaugca

SEQ ID NO: 13079 - RNA, 32 nt, Homo Sapiens
cagaagccccuuucccagaagaggcuggucuu

SEQ ID NO: 13080 - RNA, 32 nt, Homo Sapiens
aaaguguugagaaccuuuuuaauuguaaaaug

SEQ ID NO: 13081 - RNA, 32 nt, Homo Sapiens
uuuuaaaaaauccaggcaauggcauuaaacau

SEQ ID NO: 13082 - RNA, 30 nt, Homo Sapiens
gcuuccucuggcggaggcggcaggaaccga

SEQ ID NO: 13083 - RNA, 32 nt, Homo Sapiens
cugaaaagccccaggagcacaucagggagcug

SEQ ID NO: 13084 - RNA, 32 nt, Homo Sapiens
ucucacaucuucuaaacccugguccauucuca

SEQ ID NO: 13085 - RNA, 32 nt, Homo Sapiens
aggccaugaugauuacauuugugguuccaaaa

SEQ ID NO: 13086 - RNA, 32 nt, Homo Sapiens
ccugugggccuaccaccuggugcccucaugga

SEQ ID NO: 13087 - RNA, 32 nt, Homo Sapiens
gcgucggggggcugcgcggcgcgacccuggag

SEQ ID NO: 13088 - RNA, 32 nt, Homo Sapiens
uucaagugggucuggccaaaugugacagaugc

SEQ ID NO: 13089 - RNA, 32 nt, Homo Sapiens
ccagccccgccucccacccccaccccgagucc

SEQ ID NO: 13090 - RNA, 32 nt, Homo Sapiens
uauugauccaugugcacgcagauaaaauggcu

SEQ ID NO: 13091 - RNA, 29 nt, Homo Sapiens
gucgcgccauggacucggacgagggcuac

SEQ ID NO: 13092 - RNA, 32 nt, Homo Sapiens
auauacauauguaacagucaaauaucauuuac

SEQ ID NO: 13093 - RNA, 32 nt, Homo Sapiens
aacagagaagaacuccuggacauggcauggga

SEQ ID NO: 13094 - RNA, 32 nt, Homo Sapiens
uuggccaaagcacuucacugcucugggcugca

SEQ ID NO: 13095 - RNA, 32 nt, Homo Sapiens
gcgggauggggguggggguucccucuccaggu

SEQ ID NO: 13096 - RNA, 32 nt, Homo Sapiens
acggcggcgcccgcagcuccucaccgcagcac

SEQ ID NO: 13097 - RNA, 32 nt, Homo Sapiens
cacauuauaagaaagcacucuguggaucaaca

SEQ ID NO: 13098 - RNA, 32 nt, Homo Sapiens
uccuguguggaggugaugguaccugccacacc

SEQ ID NO: 13099 - RNA, 32 nt, Homo Sapiens
gagucauccaggugcugccacaugacaggcac

SEQ ID NO: 13100 - RNA, 32 nt, Homo Sapiens
aaauauucuuaauuuccccuuaauucaguaug

SEQ ID NO: 13101 - RNA, 32 nt, Homo Sapiens
aaccugagaagggggacaaagcagagaacugg

SEQ ID NO: 13102 - RNA, 32 nt, Homo Sapiens
augggccucccugacgugaugauuuggcuggu

SEQ ID NO: 13103 - RNA, 32 nt, Homo Sapiens
uuauguuuuuaaagggccucugcuaauuuaga

SEQ ID NO: 13104 - RNA, 32 nt, Homo Sapiens
gccauucuucaucugcucuggacaucucaguc

SEQ ID NO: 13105 - RNA, 32 nt, Homo Sapiens
agaugaucaggaacaccaggacgagggccguc

SEQ ID NO: 13106 - RNA, 32 nt, Homo Sapiens
gucuccuggugcgggggcgugaguggccgugc

SEQ ID NO: 13107 - RNA, 32 nt, Homo Sapiens
caggggagagauuuuucuuuuaagcccugcuc

SEQ ID NO: 13108 - RNA, 32 nt, Homo Sapiens
ccguucaccccaccccaccccaccucucccca

SEQ ID NO: 13109 - RNA, 32 nt, Homo Sapiens
aaugaccauaucuauuuucgaacguuuucuug

SEQ ID NO: 13110 - RNA, 32 nt, Homo Sapiens
cccaggcuguugauaccucagagccuucucuu

SEQ ID NO: 13111 - RNA, 32 nt, Homo Sapiens
uuccuguccuuuugcccuucuguuaucuguug

SEQ ID NO: 13112 - RNA, 32 nt, Homo Sapiens
auggaucauggccaugacugcaugucaaggag

SEQ ID NO: 13113 - RNA, 32 nt, Homo Sapiens
cgagguaucuaggcugccaugaugccagggcc

SEQ ID NO: 13114 - RNA, 32 nt, Homo Sapiens
uaccucaguguuuccuugggagacuuuauuca

SEQ ID NO: 13115 - RNA, 32 nt, Homo Sapiens
uguagguggucgguccggcagcagcccggccc

SEQ ID NO: 13116 - RNA, 32 nt, Homo Sapiens
ugcaggagaagcuggcaggagcccagcgccag

SEQ ID NO: 13117 - RNA, 32 nt, Homo Sapiens
gcagagaacaaggacagaggccaggcacugag

SEQ ID NO: 13118 - RNA, 32 nt, Homo Sapiens
uguguguguguguguguguguuugugugugug

SEQ ID NO: 13119 - RNA, 32 nt, Homo Sapiens
uuuauuuuucuuuguucacucccuguagaacu

SEQ ID NO: 13120 - RNA, 32 nt, Homo Sapiens
gagaagcggcggggcgagccgggggcucuagu

SEQ ID NO: 13121 - RNA, 32 nt, Homo Sapiens
cuggagagcuggcugcuucagcugcgagccug

SEQ ID NO: 13122 - RNA, 32 nt, Homo Sapiens
gcuccuuguucacagcugcugcucuugccucu

SEQ ID NO: 13123 - RNA, 32 nt, Homo Sapiens
ccccuccgcgcccugccacucccuggccugcc

SEQ ID NO: 13124 - RNA, 32 nt, Homo Sapiens
aauacagcacaccaaaagcuugacugccagug

SEQ ID NO: 13125 - RNA, 32 nt, Homo Sapiens
guacauccaucccaggacacagcccagccccu

SEQ ID NO: 13126 - RNA, 32 nt, Homo Sapiens
gccagaccaaaccggaccucgggggcgaugcg

SEQ ID NO: 13127 - RNA, 32 nt, Homo Sapiens
uggaggaaaagacaguaaacaugacagacuga

SEQ ID NO: 13128 - RNA, 32 nt, Homo Sapiens
ccuccgcucccucggcggcgaguucacgagcu

SEQ ID NO: 13129 - RNA, 32 nt, Homo Sapiens
aaaugugacgacagaagcagggguuggaguga

SEQ ID NO: 13130 - RNA, 32 nt, Homo Sapiens
uucuguguggaggugaguggaguggggcaggu

SEQ ID NO: 13131 - RNA, 32 nt, Homo Sapiens
cuauaauaaaaguuuucaacauauuucuaaau

SEQ ID NO: 13132 - RNA, 32 nt, Homo Sapiens
ugauuacaaaaauuuuauuauccugaguuagc

SEQ ID NO: 13133 - RNA, 32 nt, Homo Sapiens
guagaacccuguacgugcuuccuucggccugu

SEQ ID NO: 13134 - RNA, 32 nt, Homo Sapiens
uugcagaugguguagaagccagccaaagccua

SEQ ID NO: 13135 - RNA, 28 nt, Homo Sapiens
auccgccugcggccgcgccaggugcucu

SEQ ID NO: 13136 - RNA, 32 nt, Homo Sapiens
agcaccuagaaauggacaaggcugguuauuag

SEQ ID NO: 13137 - RNA, 32 nt, Homo Sapiens
ugcugcaucccugcccgucuucugggagugcc

SEQ ID NO: 13138 - RNA, 32 nt, Homo Sapiens
acuucagccuuccagacacugcccuuagaauc

SEQ ID NO: 13139 - RNA, 32 nt, Homo Sapiens
cccaagacacaagcuucagcagcaucggaaau

SEQ ID NO: 13140 - RNA, 32 nt, Homo Sapiens
aauaccuuaaguguauuuuauguacugaaaug

SEQ ID NO: 13141 - RNA, 30 nt, Homo Sapiens
ggcccauggagcugcgucaccugcugcgcc

SEQ ID NO: 13142 - RNA, 32 nt, Homo Sapiens
gugcggccccacuccccucccccgcucccauu

SEQ ID NO: 13143 - RNA, 28 nt, Homo Sapiens
aucaugggcagcacugucccgcgcuccg

SEQ ID NO: 13144 - RNA, 32 nt, Homo Sapiens
aaaguggccccggcuggcagggucuagguggc

SEQ ID NO: 13145 - RNA, 30 nt, Homo Sapiens
uauagaaauguucuguauucucggaucaau

SEQ ID NO: 13146 - RNA, 32 nt, Homo Sapiens
gaggucaaggugugggggcuggggcacggucc

SEQ ID NO: 13147 - RNA, 32 nt, Homo Sapiens
gggaaacgguuccauauaaaacacuaacacuu

SEQ ID NO: 13148 - RNA, 32 nt, Homo Sapiens
aucacuauggccugggcccgccuggaccacaa

SEQ ID NO: 13149 - RNA, 32 nt, Homo Sapiens
ggaugagcaaacugaggcagagugcuggagug

SEQ ID NO: 13150 - RNA, 32 nt, Homo Sapiens
ugcagaguaacaguccugaagggcgccgggaa

SEQ ID NO: 13151 - RNA, 32 nt, Homo Sapiens
ccugggcccucccacccaucagagcccacuca

SEQ ID NO: 13152 - RNA, 32 nt, Homo Sapiens
uuauugggguucagcuuuguuuucucaaaagg

SEQ ID NO: 13153 - RNA, 32 nt, Homo Sapiens
gcaauacuaauuuuuccaaucaguauggauug

SEQ ID NO: 13154 - RNA, 32 nt, Homo Sapiens
acgcguucggaacggccuggacucccgagacu

SEQ ID NO: 13155 - RNA, 32 nt, Homo Sapiens
ggagcccgcgggaggagauccuguaccaccug

SEQ ID NO: 13156 - RNA, 32 nt, Homo Sapiens
cccugcgcggugccgcccacucgcaccgggcg

SEQ ID NO: 13157 - RNA, 30 nt, Homo Sapiens
ggguccuggcucgggucagaagcucacucc

SEQ ID NO: 13158 - RNA, 32 nt, Homo Sapiens
ucucacucugucagcagguccccagggaccug

SEQ ID NO: 13159 - RNA, 32 nt, Homo Sapiens
augcaguguuugucuuucugugccuggcuuau

SEQ ID NO: 13160 - RNA, 32 nt, Homo Sapiens
gagaauaaaguuaugcuguguacaucacuugc

SEQ ID NO: 13161 - RNA, 32 nt, Homo Sapiens
agauggcuaccuuguggcuguguccucagcaa

SEQ ID NO: 13162 - RNA, 32 nt, Homo Sapiens
guuauggcuauguuuuaugaugaugcugggua

SEQ ID NO: 13163 - RNA, 32 nt, Homo Sapiens
uauauuacaauuuucaaggugauaagcuugag

SEQ ID NO: 13164 - RNA, 31 nt, Homo Sapiens
aucaaaaaaaugaauaaagccuuuuuaaacg

SEQ ID NO: 13165 - RNA, 32 nt, Homo Sapiens
augucccucugccuccuccccaugcccccagu

SEQ ID NO: 13166 - RNA, 32 nt, Homo Sapiens
aaauuuaaaagcuugauuggacugauagauac

SEQ ID NO: 13167 - RNA, 32 nt, Homo Sapiens
agggcacgggcgaggaccgccggccuccgccc

SEQ ID NO: 13168 - RNA, 32 nt, Homo Sapiens
uuuguugguaugccuguauugcugggcugugc

SEQ ID NO: 13169 - RNA, 32 nt, Homo Sapiens
ucuggagagugggcauggcugcugcaggcaug

SEQ ID NO: 13170 - RNA, 32 nt, Homo Sapiens
cauuuucguccuguagcacgcugccugccaaa

SEQ ID NO: 13171 - RNA, 32 nt, Homo Sapiens
uggagaauucgagugccuaggaugccagacca

SEQ ID NO: 13172 - RNA, 32 nt, Homo Sapiens
ccacaacccacccuagguugauguaugggagc

SEQ ID NO: 13173 - RNA, 32 nt, Homo Sapiens
uuuaucauauccuugcccuugagugcuuguua

SEQ ID NO: 13174 - RNA, 32 nt, Homo Sapiens
gucgcccuucucccggcccucgcuaagccccg

SEQ ID NO: 13175 - RNA, 32 nt, Homo Sapiens
gcaaaagaggagcggcugggcugggggacucc

SEQ ID NO: 13176 - RNA, 32 nt, Homo Sapiens
aauucagauaaugguaauuuaguguauaugug

SEQ ID NO: 13177 - RNA, 32 nt, Homo Sapiens
cucugcagugcaaagggcguggcacugaccag

SEQ ID NO: 13178 - RNA, 32 nt, Homo Sapiens
gccucacccacucccuucuccuggucucuccu

SEQ ID NO: 13179 - RNA, 32 nt, Homo Sapiens
uuuuuuaaaucuugagaaauuacuucuuuggc

SEQ ID NO: 13180 - RNA, 32 nt, Homo Sapiens
agaggaauaugaacauaacaggaagguaucau

SEQ ID NO: 13181 - RNA, 32 nt, Homo Sapiens
uuggaaccaacccaaauguccaaccaugauag

SEQ ID NO: 13182 - RNA, 32 nt, Homo Sapiens
gcauccagggaacaggcaucaagaagccaggg

SEQ ID NO: 13183 - RNA, 32 nt, Homo Sapiens
agcccugugugaucgugcgucugagucugggc

SEQ ID NO: 13184 - RNA, 32 nt, Homo Sapiens
uuuaaaauaaaauuauuuaaauccaccuagag

SEQ ID NO: 13185 - RNA, 32 nt, Homo Sapiens
ugccucagccccacacgguuccuuagcugccg

SEQ ID NO: 13186 - RNA, 32 nt, Homo Sapiens
gauagaugaagaugaagagcauaccaggcccc

SEQ ID NO: 13187 - RNA, 32 nt, Homo Sapiens
aucauauuuaaucuccaaauaaaggaaauaau

SEQ ID NO: 13188 - RNA, 32 nt, Homo Sapiens
agcucuguuguaauuuugucuucgccagauag

SEQ ID NO: 13189 - RNA, 32 nt, Homo Sapiens
gugaaggcagcaggggccauggccgggagcca

SEQ ID NO: 13190 - RNA, 32 nt, Homo Sapiens
acugccugcuggagagaaaacacacuccuuug

SEQ ID NO: 13191 - RNA, 32 nt, Homo Sapiens
auuuucacauucauaguguuucuauccaauuu

SEQ ID NO: 13192 - RNA, 32 nt, Homo Sapiens
gccgugcugguggcccagguccugcugcucau

SEQ ID NO: 13193 - RNA, 32 nt, Homo Sapiens
cuuagucugaagauaacaaggauacuuuaaua

SEQ ID NO: 13194 - RNA, 32 nt, Homo Sapiens
cgggacugggcaauugagcuguauaggggcca

SEQ ID NO: 13195 - RNA, 32 nt, Homo Sapiens
acaugccgaugguuguuuauuuuguuuuuagg

SEQ ID NO: 13196 - RNA, 32 nt, Homo Sapiens
aguaaacgaaguucucuuacugagaagucuca

SEQ ID NO: 13197 - RNA, 32 nt, Homo Sapiens
cuucccaggcagcucuaacagcccuuucauga

SEQ ID NO: 13198 - RNA, 32 nt, Homo Sapiens
guggccaggugccugccacccucuggaacuca

SEQ ID NO: 13199 - RNA, 32 nt, Homo Sapiens
aggaggguuuuuuuuacccagggcucuggaag

SEQ ID NO: 13200 - RNA, 32 nt, Homo Sapiens
acucagucuagguccagcugcagaugaggagu

SEQ ID NO: 13201 - RNA, 32 nt, Homo Sapiens
aaaugguagaauacacaugaaaacuuuuguuu

SEQ ID NO: 13202 - RNA, 30 nt, Homo Sapiens
gagggugccuacaggcggauaugaaaccgg

SEQ ID NO: 13203 - RNA, 32 nt, Homo Sapiens
aaaaacuguccuaucuuguucuguaaaauauu

SEQ ID NO: 13204 - RNA, 32 nt, Homo Sapiens
gcgucuaucgccugaguccccgggccccucua

SEQ ID NO: 13205 - RNA, 32 nt, Homo Sapiens
ucuuaaaacuggggagggacguagagaugaga

SEQ ID NO: 13206 - RNA, 32 nt, Homo Sapiens
aaauugaugaaaaacuaaauucgaggaauuaa

SEQ ID NO: 13207 - RNA, 32 nt, Homo Sapiens
guuagggccugccaccuuauuccuccucucca

SEQ ID NO: 13208 - RNA, 32 nt, Homo Sapiens
gccuacgcagagcggcggugggggcgggggca

SEQ ID NO: 13209 - RNA, 32 nt, Homo Sapiens
uuaaacgacuuuucaggagauuuagaaagccu

SEQ ID NO: 13210 - RNA, 32 nt, Homo Sapiens
ccagccugcgugacaaagugagacccucucuc

SEQ ID NO: 13211 - RNA, 32 nt, Homo Sapiens
uauggagcgugaccaggguaugacucauucug

SEQ ID NO: 13212 - RNA, 32 nt, Homo Sapiens
aggggaugugguuugcagaagaauuuucuuua

SEQ ID NO: 13213 - RNA, 32 nt, Homo Sapiens
aacagcaguuuagguuaaacaaacauuccugg

SEQ ID NO: 13214 - RNA, 32 nt, Homo Sapiens
uccuugguuuguuuuucuugccccuuuuuguu

SEQ ID NO: 13215 - RNA, 32 nt, Homo Sapiens
aagaaggcaaaacaaccgacugaaaccuuuaa

SEQ ID NO: 13216 - RNA, 32 nt, Homo Sapiens
aauagcucugccgauagcugguguugucacaa

SEQ ID NO: 13217 - RNA, 32 nt, Homo Sapiens
ccucuggcggccucugaguacccuggcgggag

SEQ ID NO: 13218 - RNA, 32 nt, Homo Sapiens
cagucugggcugugucccagccucccauacca

SEQ ID NO: 13219 - RNA, 32 nt, Homo Sapiens
cgugaccugugccccaggcaccagcuuuacuc

SEQ ID NO: 13220 - RNA, 32 nt, Homo Sapiens
aaagcagaacuaagggaucugccguuuuguac

SEQ ID NO: 13221 - RNA, 32 nt, Homo Sapiens
aggcauuguaaaaaggaaauagugauguaaau

SEQ ID NO: 13222 - RNA, 32 nt, Homo Sapiens
uccagucuuccgacaaacuaacaggaacaaaa

SEQ ID NO: 13223 - RNA, 32 nt, Homo Sapiens
cagagaagcugaucuuuguuaaugucuugauu

SEQ ID NO: 13224 - RNA, 32 nt, Homo Sapiens
cucauuguuucccccacgucucccucuauacc

SEQ ID NO: 13225 - RNA, 32 nt, Homo Sapiens
uaaauaguuaaucauuuaaccaaagaagaugu

SEQ ID NO: 13226 - RNA, 32 nt, Homo Sapiens
acucucuuuaugucuguggauuuuuuccuuca

SEQ ID NO: 13227 - RNA, 32 nt, Homo Sapiens
uucccaggcugauguucacugucuccucccag

SEQ ID NO: 13228 - RNA, 32 nt, Homo Sapiens
uaccacuuuuuagaaaaauuacgauagagaug

SEQ ID NO: 13229 - RNA, 32 nt, Homo Sapiens
guaagagaaagccaaaaagcaaugcagagaaa

SEQ ID NO: 13230 - RNA, 32 nt, Homo Sapiens
auaauuugcucacuugguaaaugacgugagua

SEQ ID NO: 13231 - RNA, 32 nt, Homo Sapiens
ggagccaggggaggggcaggagucccagcacc

SEQ ID NO: 13232 - RNA, 32 nt, Homo Sapiens
uuuggaucuauuuauuagucagaguuucagcu

SEQ ID NO: 13233 - RNA, 32 nt, Homo Sapiens
gcugggaccugccugccccugucuuuuccccu

SEQ ID NO: 13234 - RNA, 32 nt, Homo Sapiens
cauuggcccaggagcucuguucuuuccuaauc

SEQ ID NO: 13235 - RNA, 32 nt, Homo Sapiens
uggacaggggccgcgcagauccgggggaggcu

SEQ ID NO: 13236 - RNA, 32 nt, Homo Sapiens
ugcuugcuugcuugcuugcuuacuagacuggc

SEQ ID NO: 13237 - RNA, 32 nt, Homo Sapiens
uaggaagacuguuuuucuuuuaagggggaaac

SEQ ID NO: 13238 - RNA, 32 nt, Homo Sapiens
aagcccagaaaaggacagaaacgaaguagaaa

SEQ ID NO: 13239 - RNA, 32 nt, Homo Sapiens
ggugaaacagagaugucagaaaaggagaacaa

SEQ ID NO: 13240 - RNA, 32 nt, Homo Sapiens
ggggaauggggcgcagugaggcugggagccgg

SEQ ID NO: 13241 - RNA, 32 nt, Homo Sapiens
uggucccagauaggaagauaaagucucaaaaa

SEQ ID NO: 13242 - RNA, 32 nt, Homo Sapiens
agugcugccucccaaaaugguguucagaucua

SEQ ID NO: 13243 - RNA, 32 nt, Homo Sapiens
ccacuggcggccugggaccagcugggugucag

SEQ ID NO: 13244 - RNA, 32 nt, Homo Sapiens
uuccuaaagcuaccauuuucaaccguccuugu

SEQ ID NO: 13245 - RNA, 32 nt, Homo Sapiens
caugaauucacagauaaguacuuaaagaacag

SEQ ID NO: 13246 - RNA, 32 nt, Homo Sapiens
gccaagaauagagaaagcuggugcugugaucg

SEQ ID NO: 13247 - RNA, 32 nt, Homo Sapiens
cuuugagccagggcaggccucagacacccugc

SEQ ID NO: 13248 - RNA, 32 nt, Homo Sapiens
aaggaggggacgggacagacgaaggcaaccau

SEQ ID NO: 13249 - RNA, 32 nt, Homo Sapiens
gagugugaggaugagcagagugccaaauauuc

SEQ ID NO: 13250 - RNA, 32 nt, Homo Sapiens
agcugagauugugccacugcacgcacuccagc

SEQ ID NO: 13251 - RNA, 32 nt, Homo Sapiens
guacagucguaaguaacugucuggaggugccu

SEQ ID NO: 13252 - RNA, 32 nt, Homo Sapiens
cuugagaaauucauaugguuauguuacaaauu

SEQ ID NO: 13253 - RNA, 32 nt, Homo Sapiens
ccucuucucaaaagccugggaaugccagcgcg

SEQ ID NO: 13254 - RNA, 32 nt, Homo Sapiens
gcccgcaggaggaggaggaucggcggacugug

SEQ ID NO: 13255 - RNA, 32 nt, Homo Sapiens
uuccccuuucaaaaauaaaacaaaauauugca

SEQ ID NO: 13256 - RNA, 32 nt, Homo Sapiens
ugggaggaaggaggaggcccaggccgcgucuu

SEQ ID NO: 13257 - RNA, 32 nt, Homo Sapiens
ccaggcacaucccaccuuaccucucacuuggc

SEQ ID NO: 13258 - RNA, 32 nt, Homo Sapiens
gguuucaccauauuggccaggcuggucucaaa

SEQ ID NO: 13259 - RNA, 32 nt, Homo Sapiens
cgugcuucagaccggucuggggugcggcgcac

SEQ ID NO: 13260 - RNA, 32 nt, Homo Sapiens
cacaagcugggauggauuuaucacauugaguu

SEQ ID NO: 13261 - RNA, 31 nt, Homo Sapiens
uauuauuuauggagaaagucucauuucuuug

SEQ ID NO: 13262 - RNA, 29 nt, Homo Sapiens
uuaacugcuaaguguuauuuucuaagagg

SEQ ID NO: 13263 - RNA, 32 nt, Homo Sapiens
gaaagcgcacuugagacagagguaaugauggg

SEQ ID NO: 13264 - RNA, 32 nt, Homo Sapiens
gcgcaggaccgcuggaggacgcagcguccagg

SEQ ID NO: 13265 - RNA, 32 nt, Homo Sapiens
uuuggagugaaaauuaucacuaaaguaacaug

SEQ ID NO: 13266 - RNA, 32 nt, Homo Sapiens
ggccgggcgcgguggcucacgccugcaguccc

SEQ ID NO: 13267 - RNA, 32 nt, Homo Sapiens
uuaguuauuguuaaaggaguaauuucauaaag

SEQ ID NO: 13268 - RNA, 32 nt, Homo Sapiens
ugcaaacaggacuuaaaugaacuuugaucucu

SEQ ID NO: 13269 - RNA, 32 nt, Homo Sapiens
cuuguggcagcgggaaucuggugcugggggca

SEQ ID NO: 13270 - RNA, 32 nt, Homo Sapiens
gagcccagcugggauugguguagggagggccg

SEQ ID NO: 13271 - RNA, 32 nt, Homo Sapiens
aauugucucaaugccucccccucccccauucu

SEQ ID NO: 13272 - RNA, 32 nt, Homo Sapiens
cauaaaagcauuaucuuaauuuuuaagucugu

SEQ ID NO: 13273 - RNA, 32 nt, Homo Sapiens
uaaggccccgacggacgcuugugaggcccgag

SEQ ID NO: 13274 - RNA, 32 nt, Homo Sapiens
cccccgcccccgcuccagcuccagccgggucc

SEQ ID NO: 13275 - RNA, 32 nt, Homo Sapiens
gggaugcagcaggcuggccgcgcaccggggcu

SEQ ID NO: 13276 - RNA, 32 nt, Homo Sapiens
cagcgccuggggaccagacagacgcauguggc

SEQ ID NO: 13277 - RNA, 32 nt, Homo Sapiens
acauaagaaaauuuauacuggagagaaacuac

SEQ ID NO: 13278 - RNA, 32 nt, Homo Sapiens
aaaggacuaagaguggauuugcugacauucca

SEQ ID NO: 13279 - RNA, 32 nt, Homo Sapiens
gucggugggaccuacgguggucggugggaccc

SEQ ID NO: 13280 - RNA, 32 nt, Homo Sapiens
uguccccggcaccagcaggccuuggggcucac

SEQ ID NO: 13281 - RNA, 32 nt, Homo Sapiens
uugaauaucaauuguuuagacacaccuacaau

SEQ ID NO: 13282 - RNA, 32 nt, Homo Sapiens
acuuaccaauaaauuuauuuucaaauuuagaa

SEQ ID NO: 13283 - RNA, 32 nt, Homo Sapiens
guggggaauuuaauaaauuucuggugcucugg

SEQ ID NO: 13284 - RNA, 32 nt, Homo Sapiens
ccuuuuuuuuuuuuuucuuuugagacacaguu

SEQ ID NO: 13285 - RNA, 32 nt, Homo Sapiens
uaguucuagcguuccuugggucccgcuggcga

SEQ ID NO: 13286 - RNA, 32 nt, Homo Sapiens
acagcaucuucagccuguucuucuucagucag

SEQ ID NO: 13287 - RNA, 32 nt, Homo Sapiens
caaauagucuauaccugaacugcuauaagcaa

SEQ ID NO: 13288 - RNA, 32 nt, Homo Sapiens
caaauuuuuacuuuguuuuucuuuuaauaggc

SEQ ID NO: 13289 - RNA, 32 nt, Homo Sapiens
cagaggaaauaucuugccaggauaccuaccca

SEQ ID NO: 13290 - RNA, 32 nt, Homo Sapiens
ccuugggagcagcagugcuaccacgguaaugg

SEQ ID NO: 13291 - RNA, 32 nt, Homo Sapiens
cggucauuccuccgcaaccaggccuccaucaa

SEQ ID NO: 13292 - RNA, 32 nt, Homo Sapiens
cuuuuauuaauaaaacaaaauguuuuggagca

SEQ ID NO: 13293 - RNA, 32 nt, Homo Sapiens
aggauuccaguuccagaguccucgguagcauc

SEQ ID NO: 13294 - RNA, 32 nt, Homo Sapiens
cgcgcuggaaaacaugauuaaugacuuccacc

SEQ ID NO: 13295 - RNA, 32 nt, Homo Sapiens
caccucuucccucuccuacuuggcccagcugc

SEQ ID NO: 13296 - RNA, 32 nt, Homo Sapiens
uauuccauuuaaaaauauguuuaaauuguccu

SEQ ID NO: 13297 - RNA, 32 nt, Homo Sapiens
uagaaugguauugaauuggucuguggaaaauu

SEQ ID NO: 13298 - RNA, 32 nt, Homo Sapiens
uucaauuuuuaaaaaacuggucucugagaguu

SEQ ID NO: 13299 - RNA, 31 nt, Homo Sapiens
cagugaaacccacagaaccauguacacccuc

SEQ ID NO: 13300 - RNA, 32 nt, Homo Sapiens
cugccccggagcuggaggauccccuccaagcc

SEQ ID NO: 13301 - RNA, 32 nt, Homo Sapiens
uacauauauguguguuuauuuacggugcuaau

SEQ ID NO: 13302 - RNA, 32 nt, Homo Sapiens
cuagguuauucucugccauagagcuaacuggg

SEQ ID NO: 13303 - RNA, 31 nt, Homo Sapiens
aauggcagggccaggaaccaggcugcccggg

SEQ ID NO: 13304 - RNA, 32 nt, Homo Sapiens
acugguguacgcgcuccccugcgccugcugcc

SEQ ID NO: 13305 - RNA, 32 nt, Homo Sapiens
acgugccaugggcgcgcagcugccgggcaacg

SEQ ID NO: 13306 - RNA, 32 nt, Homo Sapiens
ccucacccccuucuuuuuccguccuuggaaaa

SEQ ID NO: 13307 - RNA, 32 nt, Homo Sapiens
aggcccagcucuuccucuuggcugagucuaca

SEQ ID NO: 13308 - RNA, 32 nt, Homo Sapiens
ugauucugacuuagagcugaaguaaaagauca

SEQ ID NO: 13309 - RNA, 32 nt, Homo Sapiens
agucaguugcuuacuuauuuugcucuggauga

SEQ ID NO: 13310 - RNA, 32 nt, Homo Sapiens
caggagaccucagagcucccagcccuucuccu

SEQ ID NO: 13311 - RNA, 32 nt, Homo Sapiens
ucuauuucaugcuuucuguuauuaucuuucuu

SEQ ID NO: 13312 - RNA, 32 nt, Homo Sapiens
ugcccugaagggagagacccaggccuggcagc

SEQ ID NO: 13313 - RNA, 32 nt, Homo Sapiens
gccagcacugcucccggcacugcgcaccaggu

SEQ ID NO: 13314 - RNA, 32 nt, Homo Sapiens
gcaguggggaguucuagauugaucucugaaug

SEQ ID NO: 13315 - RNA, 32 nt, Homo Sapiens
acuagcgggccggcccgggccaggacagcggg

SEQ ID NO: 13316 - RNA, 32 nt, Homo Sapiens
agacugcuucagccuuucccugugcugccccu

SEQ ID NO: 13317 - RNA, 32 nt, Homo Sapiens
ggcccaggccuggccucgggguucccccgcug

SEQ ID NO: 13318 - RNA, 32 nt, Homo Sapiens
gggaggccaaggcaggcauaucacuugagccg

SEQ ID NO: 13319 - RNA, 32 nt, Homo Sapiens
ucagccucggugcucgggccgccccgccucug

SEQ ID NO: 13320 - RNA, 32 nt, Homo Sapiens
gcgaguugggccgccccggcugugacuagggc

SEQ ID NO: 13321 - RNA, 32 nt, Homo Sapiens
agcugguccccucuguguaucacucuacugag

SEQ ID NO: 13322 - RNA, 32 nt, Homo Sapiens
aggugugagugccugucuugaacuugcaccga

SEQ ID NO: 13323 - RNA, 32 nt, Homo Sapiens
cccgccgguccgcagacccugcaccgggcuug

SEQ ID NO: 13324 - RNA, 32 nt, Homo Sapiens
ccagcaacacuggccugucugccuguucuggg

SEQ ID NO: 13325 - RNA, 32 nt, Homo Sapiens
uucacagaugcaaagauucaguuaaaccggag

SEQ ID NO: 13326 - RNA, 32 nt, Homo Sapiens
ucuuggugguuuuuggaaaagggugugggggu

SEQ ID NO: 13327 - RNA, 32 nt, Homo Sapiens
uuaaauaaagacagauugaacucuguaccagc

SEQ ID NO: 13328 - RNA, 32 nt, Homo Sapiens
cucggcuuccgcucagcccgguuuugacuggu

SEQ ID NO: 13329 - RNA, 32 nt, Homo Sapiens
ucuaacugcggugaaggugguggcucuggugg

SEQ ID NO: 13330 - RNA, 32 nt, Homo Sapiens
cgagaggaauggggaggagcccuguuugaccc

SEQ ID NO: 13331 - RNA, 32 nt, Homo Sapiens
ggcaaguucuccccagccccagcccuguccgu

SEQ ID NO: 13332 - RNA, 32 nt, Homo Sapiens
aauccaaguauuuauaacucauugucagccaa

SEQ ID NO: 13333 - RNA, 32 nt, Homo Sapiens
uguaaaguuuugucuucucguuuuuaaaguua

SEQ ID NO: 13334 - RNA, 32 nt, Homo Sapiens
cagcuuguggccucccuuaggcaaguuuaaaa

SEQ ID NO: 13335 - RNA, 32 nt, Homo Sapiens
agugguccaguuuuauaaauggucuuuauuuu

SEQ ID NO: 13336 - RNA, 32 nt, Homo Sapiens
cacaaagaggaagagggagaauauuuaccagc

SEQ ID NO: 13337 - RNA, 32 nt, Homo Sapiens
aagaggaaagaccuagaauccaagcauguuac

SEQ ID NO: 13338 - RNA, 32 nt, Homo Sapiens
acuugugucuucuuuacccacccucagauccc

SEQ ID NO: 13339 - RNA, 32 nt, Homo Sapiens
acugugauaaaauaaacuaaauggaggacuuu

SEQ ID NO: 13340 - RNA, 32 nt, Homo Sapiens
aagcucaccucccgcagugcugcccaggaccu

SEQ ID NO: 13341 - RNA, 32 nt, Homo Sapiens
aacucuauuuggaucagaacuacauuauuaca

SEQ ID NO: 13342 - RNA, 32 nt, Homo Sapiens
uuuccaaagcuacuuguuuacauuguacacug

SEQ ID NO: 13343 - RNA, 29 nt, Homo Sapiens
uugaggaugaagauaaguuggagggaaag

SEQ ID NO: 13344 - RNA, 32 nt, Homo Sapiens
uuggggggugcauuuuaaaagaugaaacaugc

SEQ ID NO: 13345 - RNA, 32 nt, Homo Sapiens
cuuuagccagucugcuguccugaaacccagaa

SEQ ID NO: 13346 - RNA, 32 nt, Homo Sapiens
accauguauguaggugugauaguacuuucaaa

SEQ ID NO: 13347 - RNA, 32 nt, Homo Sapiens
cuuggaaaacagugauaucacaugauuaaaau

SEQ ID NO: 13348 - RNA, 32 nt, Homo Sapiens
cacugugcacgcugugaggcugucgucuugga

SEQ ID NO: 13349 - RNA, 32 nt, Homo Sapiens
cugcaagaccacuggaaccaaccucuugcaua

SEQ ID NO: 13350 - RNA, 32 nt, Homo Sapiens
uacauugaaaauauagcuugaaguuauuuuug

SEQ ID NO: 13351 - RNA, 32 nt, Homo Sapiens
acuuggcgggaagagaccaagggugcggcggc

SEQ ID NO: 13352 - RNA, 32 nt, Homo Sapiens
acucauaggaaaugacauuagaggaagacuuc

SEQ ID NO: 13353 - RNA, 32 nt, Homo Sapiens
cugagaugggggacugggccccugccuggggg

SEQ ID NO: 13354 - RNA, 32 nt, Homo Sapiens
ugggaggggguggaacugcagggaacuucucu

SEQ ID NO: 13355 - RNA, 32 nt, Homo Sapiens
agugacaaaaucuauuuaggaacucuguguau

SEQ ID NO: 13356 - RNA, 32 nt, Homo Sapiens
gcucugguuguugggucuuccucagcucccuu

SEQ ID NO: 13357 - RNA, 32 nt, Homo Sapiens
caauuuuaauugugauacauguacuuuacuaa

SEQ ID NO: 13358 - RNA, 32 nt, Homo Sapiens
uaauggcuaucuguggucagacuugcucucua

SEQ ID NO: 13359 - RNA, 32 nt, Homo Sapiens
ggaucaugcagcuggggcgcggcggccgcggc

SEQ ID NO: 13360 - RNA, 32 nt, Homo Sapiens
guagccaaaagucuugauuuuuauauaacugg

SEQ ID NO: 13361 - RNA, 32 nt, Homo Sapiens
cagcacugccacugccuuuggccaccugaggu

SEQ ID NO: 13362 - RNA, 32 nt, Homo Sapiens
aaacaccaggauucuacuugccugcuggaguu

SEQ ID NO: 13363 - RNA, 32 nt, Homo Sapiens
aaggugucaucacaugcccagcccugaccccu

SEQ ID NO: 13364 - RNA, 32 nt, Homo Sapiens
uugagucugugcuaaauaaacaaaggaaguuc

SEQ ID NO: 13365 - RNA, 32 nt, Homo Sapiens
ggcucagaucuugcuuaugugaggauaggcug

SEQ ID NO: 13366 - RNA, 32 nt, Homo Sapiens
ccaacaccaaaggacuuaccaucugucucucu

SEQ ID NO: 13367 - RNA, 32 nt, Homo Sapiens
guucucauuguucaguucccacuuaugaguga

SEQ ID NO: 13368 - RNA, 32 nt, Homo Sapiens
cagaggcugaguuuugcaagacggagaauuuc

SEQ ID NO: 13369 - RNA, 32 nt, Homo Sapiens
ccucugccccucgggggacuggacacacaucc

SEQ ID NO: 13370 - RNA, 32 nt, Homo Sapiens
aucucugcgcuacucaaauaccucauaccaug

SEQ ID NO: 13371 - RNA, 32 nt, Homo Sapiens
cccaggcuacgagcgggagggaggcgggaguc

SEQ ID NO: 13372 - RNA, 32 nt, Homo Sapiens
cucguguccugccccugccacaucagugacug

SEQ ID NO: 13373 - RNA, 32 nt, Homo Sapiens
guuucacaucggaaacaaaacagcggcugguc

SEQ ID NO: 13374 - RNA, 32 nt, Homo Sapiens
cagacugggcuaguccagugucuguauuuaaa

SEQ ID NO: 13375 - RNA, 32 nt, Homo Sapiens
gcaaacaucccuggcgauaccuuggaaaggac

SEQ ID NO: 13376 - RNA, 32 nt, Homo Sapiens
ucagcccggccuuccucggcuccggcgcuccg

SEQ ID NO: 13377 - RNA, 32 nt, Homo Sapiens
aaaacaguguggcaguaacauaaagauauauu

SEQ ID NO: 13378 - RNA, 32 nt, Homo Sapiens
ggccgcacggccccaacacgcggacuucgagc

SEQ ID NO: 13379 - RNA, 32 nt, Homo Sapiens
uggcgggugggcggcggccacgcacugggcca

SEQ ID NO: 13380 - RNA, 32 nt, Homo Sapiens
uauaauucucuuugccagcugcacaaagcuga

SEQ ID NO: 13381 - RNA, 32 nt, Homo Sapiens
aacagcagcagcagccagacaggccucaccuu

SEQ ID NO: 13382 - RNA, 32 nt, Homo Sapiens
aaaggcaugcagauggcugugcauguuggcuu

SEQ ID NO: 13383 - RNA, 32 nt, Homo Sapiens
accagccuuccucagcuaugcuugccgaaacc

SEQ ID NO: 13384 - RNA, 32 nt, Homo Sapiens
gaaauuaggcaccccaggauauaggucauaca

SEQ ID NO: 13385 - RNA, 32 nt, Homo Sapiens
augugcuuagagaaacaaacuaccuuuacauu

SEQ ID NO: 13386 - RNA, 32 nt, Homo Sapiens
guagucugggcaccccacagugcacuuaagug

SEQ ID NO: 13387 - RNA, 32 nt, Homo Sapiens
cuucaugcuuuucucaugguauuaucuaguag

SEQ ID NO: 13388 - RNA, 32 nt, Homo Sapiens
gccccugacaaugacugauuucaaguuugauu

SEQ ID NO: 13389 - RNA, 32 nt, Homo Sapiens
ggcagcuucagucucugcaguguccauuaucu

SEQ ID NO: 13390 - RNA, 31 nt, Homo Sapiens
gguuagagggcggcuguagagcacccucagg

SEQ ID NO: 13391 - RNA, 32 nt, Homo Sapiens
cccucuagguauuauuaauauuagcaggaagg

SEQ ID NO: 13392 - RNA, 32 nt, Homo Sapiens
gacucuuuuucuuguuuugucugccauucuug

SEQ ID NO: 13393 - RNA, 32 nt, Homo Sapiens
aaaauuauuuuuguccuuaaucagugugauau

SEQ ID NO: 13394 - RNA, 30 nt, Homo Sapiens
gcuuucuuacucaggggggaaaacguuuug

SEQ ID NO: 13395 - RNA, 32 nt, Homo Sapiens
uugacauucaaggcauuucuaucacauauuug

SEQ ID NO: 13396 - RNA, 32 nt, Homo Sapiens
uuaaaagaauguucuuucauuaaaagaccaaa

SEQ ID NO: 13397 - RNA, 32 nt, Homo Sapiens
aggguucagggucagagcuagagaccuacagg

SEQ ID NO: 13398 - RNA, 32 nt, Homo Sapiens
gugucauuguucccuuucugaauuagcuguac

SEQ ID NO: 13399 - RNA, 32 nt, Homo Sapiens
uaguggggaaagggacggggugcagacggcag

SEQ ID NO: 13400 - RNA, 32 nt, Homo Sapiens
uucuuuccucuuaacguaaauccaccaccaaa

SEQ ID NO: 13401 - RNA, 32 nt, Homo Sapiens
gccuaaugugcuuggaucugggacugaaucac

SEQ ID NO: 13402 - RNA, 32 nt, Homo Sapiens
gagggccuggaaagcgcagugcaugcugggug

SEQ ID NO: 13403 - RNA, 32 nt, Homo Sapiens
ucuggccggccgccaggaugcaggccccgcac

SEQ ID NO: 13404 - RNA, 32 nt, Homo Sapiens
cccuucccaagccauuggcuuggcugcagagu

SEQ ID NO: 13405 - RNA, 32 nt, Homo Sapiens
cguuaucuagugagcaggcggccgcuuucgau

SEQ ID NO: 13406 - RNA, 32 nt, Homo Sapiens
agaaacaguuugcggugcuuagaggccucuau

SEQ ID NO: 13407 - RNA, 32 nt, Homo Sapiens
guuaacaaggaccuuugggaguuguccggcgu

SEQ ID NO: 13408 - RNA, 32 nt, Homo Sapiens
caugcuuuuaucaagagaucugaugcugagga

SEQ ID NO: 13409 - RNA, 32 nt, Homo Sapiens
uuccgcaccucuuccaaccacccucuuucccu

SEQ ID NO: 13410 - RNA, 32 nt, Homo Sapiens
gaaggccaagcgagacuacagucauccagacc

SEQ ID NO: 13411 - RNA, 32 nt, Homo Sapiens
acuggugauggaucucauuccaaacuuugcca

SEQ ID NO: 13412 - RNA, 32 nt, Homo Sapiens
ucuagccguggcgcuucggcguaguaaggagc

SEQ ID NO: 13413 - RNA, 32 nt, Homo Sapiens
ugggagccgggccccugggagagacgagccau

SEQ ID NO: 13414 - RNA, 32 nt, Homo Sapiens
uaaauuuuuuguagagauagggucuugcuaug

SEQ ID NO: 13415 - RNA, 32 nt, Homo Sapiens
gcaaccccgggcucgucgcuuucuccaucccg

SEQ ID NO: 13416 - RNA, 32 nt, Homo Sapiens
agcgaugcuuggauuuuuguuuccuauuagaa

SEQ ID NO: 13417 - RNA, 32 nt, Homo Sapiens
gcuuuuuuuuuuuuuucuuaaagaauuuucaa

SEQ ID NO: 13418 - RNA, 32 nt, Homo Sapiens
gcguuucuccgggcuacagccggcgccgccgc

SEQ ID NO: 13419 - RNA, 32 nt, Homo Sapiens
ugggauucggccucuggaaaguggugguaguu

SEQ ID NO: 13420 - RNA, 32 nt, Homo Sapiens
gcguuccgcaucgccccgggggccccuacgcg

SEQ ID NO: 13421 - RNA, 32 nt, Homo Sapiens
ugcaggugaacaggaauugcugcugcugcugg

SEQ ID NO: 13422 - RNA, 30 nt, Homo Sapiens
gaaggacgugccgugccgcuggguucugag

SEQ ID NO: 13423 - RNA, 32 nt, Homo Sapiens
gccucccuuuaccuccggccgccccguggcag

SEQ ID NO: 13424 - RNA, 28 nt, Homo Sapiens
ugcauuggguggcccaggaugacaaugc

SEQ ID NO: 13425 - RNA, 32 nt, Homo Sapiens
uguuguuuucauuuuucuucauuaucauuaua

SEQ ID NO: 13426 - RNA, 32 nt, Homo Sapiens
ugacuuuccagaccccagguccagucugcaga

SEQ ID NO: 13427 - RNA, 32 nt, Homo Sapiens
agcggcgcgcgcuagcggccccgguggccgag

SEQ ID NO: 13428 - RNA, 32 nt, Homo Sapiens
agagaagcgcgugagaaauuugaaaugaaggc

SEQ ID NO: 13429 - RNA, 32 nt, Homo Sapiens
uuuaguaauuuaaucuucaugcuucauaacaa

SEQ ID NO: 13430 - RNA, 32 nt, Homo Sapiens
gagcacccuaggggcguccggaccccucggcc

SEQ ID NO: 13431 - RNA, 30 nt, Homo Sapiens
uccagagagaagcuagaagucccccuugaa

SEQ ID NO: 13432 - RNA, 32 nt, Homo Sapiens
aucauggauuuaaauaaaacgcagcagcccca

SEQ ID NO: 13433 - RNA, 32 nt, Homo Sapiens
cuuuacgguaagccgcuccucccgcgcccccg

SEQ ID NO: 13434 - RNA, 32 nt, Homo Sapiens
ucagagucuccagccuacccugaagaguucug

SEQ ID NO: 13435 - RNA, 32 nt, Homo Sapiens
gaguaaggggagaggaagggugagcagcugca

SEQ ID NO: 13436 - RNA, 32 nt, Homo Sapiens
ggccaggcgggggugguggacguggccggaag

SEQ ID NO: 13437 - RNA, 32 nt, Homo Sapiens
guaucuacuccucaauaaagcauguucucugc

SEQ ID NO: 13438 - RNA, 32 nt, Homo Sapiens
ccuaaugcucucccucccccagccccccaccc

SEQ ID NO: 13439 - RNA, 32 nt, Homo Sapiens
aagaugaagauaaggaaaagaaaaggccauag

SEQ ID NO: 13440 - RNA, 32 nt, Homo Sapiens
ucccagcccgucuaccuccccaucccacccag

SEQ ID NO: 13441 - RNA, 32 nt, Homo Sapiens
cgcacaccgacuugcaugcaauuaucauagcc

SEQ ID NO: 13442 - RNA, 32 nt, Homo Sapiens
uaaaugaaaugccuaaauauauuguuacagau

SEQ ID NO: 13443 - RNA, 32 nt, Homo Sapiens
ucccagagcaggccagcccgcgugggccgaug

SEQ ID NO: 13444 - RNA, 32 nt, Homo Sapiens
gauuugcauuuuacuuugcugacuuuguugua

SEQ ID NO: 13445 - RNA, 32 nt, Homo Sapiens
aaacuugaaaauauaugauggcucgugggaug

SEQ ID NO: 13446 - RNA, 32 nt, Homo Sapiens
gcuccugugaugaccuaguggugcugagggag

SEQ ID NO: 13447 - RNA, 32 nt, Homo Sapiens
gauaucccaaucuuuggacugcauccugguug

SEQ ID NO: 13448 - RNA, 32 nt, Homo Sapiens
uacuaucgcugcauggccagcgagcuuguccg

SEQ ID NO: 13449 - RNA, 32 nt, Homo Sapiens
agcacaagcugaucaagauguguaguucugug

SEQ ID NO: 13450 - RNA, 32 nt, Homo Sapiens
cggauacagugcggcccgagcggaggccgcgg

SEQ ID NO: 13451 - RNA, 32 nt, Homo Sapiens
aacacaacaaagugggaccaucucuauuccca

SEQ ID NO: 13452 - RNA, 32 nt, Homo Sapiens
ggaggaggaggucgucgggggcggcgggcgga

SEQ ID NO: 13453 - RNA, 32 nt, Homo Sapiens
ucccaaaaaguaaaacacaaugcugaagaaaa

SEQ ID NO: 13454 - RNA, 32 nt, Homo Sapiens
cuggaucuguguuugcagaagaguucuagguc

SEQ ID NO: 13455 - RNA, 32 nt, Homo Sapiens
augaucaguaaagauuuaaggguugagauuuu

SEQ ID NO: 13456 - RNA, 32 nt, Homo Sapiens
uuaaauauuuaaaaguaaaccuguacuaaucu

SEQ ID NO: 13457 - RNA, 32 nt, Homo Sapiens
ggcggaggcugugccaggggacccggaagcac

SEQ ID NO: 13458 - RNA, 32 nt, Homo Sapiens
gggcaugccuguagucccacuuacuugggagg

SEQ ID NO: 13459 - RNA, 32 nt, Homo Sapiens
ucucuugggcagccuuccccuggauuagguca

SEQ ID NO: 13460 - RNA, 32 nt, Homo Sapiens
ucccuuucucuacuucccucuccaccuugcuc

SEQ ID NO: 13461 - RNA, 32 nt, Homo Sapiens
guuuguaagguggucacuguucuuuuuuaaaa

SEQ ID NO: 13462 - RNA, 32 nt, Homo Sapiens
gaucacucugaauaugaaagugcucaagacaa

SEQ ID NO: 13463 - RNA, 32 nt, Homo Sapiens
acucugugugcaaagccagaccccaaguaugu

SEQ ID NO: 13464 - RNA, 32 nt, Homo Sapiens
aauucauuuuacauagaucugacucuagauuc

SEQ ID NO: 13465 - RNA, 32 nt, Homo Sapiens
uuccuauuuuuguagagaugagguuucaccau

SEQ ID NO: 13466 - RNA, 32 nt, Homo Sapiens
auaauguacagcaaaugucauuaaauauugaa

SEQ ID NO: 13467 - RNA, 32 nt, Homo Sapiens
ugucuaguuugagauauaauuaaugcuugucu

SEQ ID NO: 13468 - RNA, 32 nt, Homo Sapiens
ggggcuaccaugggaccagcucuggccagagg

SEQ ID NO: 13469 - RNA, 32 nt, Homo Sapiens
cuaugagugugcagacagcgcagacgcagccc

SEQ ID NO: 13470 - RNA, 32 nt, Homo Sapiens
caaucagagcuuggcagagcugagagaucagc

SEQ ID NO: 13471 - RNA, 31 nt, Homo Sapiens
gaggggugacagcgaaacgugagaccaucca

SEQ ID NO: 13472 - RNA, 32 nt, Homo Sapiens
gccccggcggccgggcgugcugccugcaagau

SEQ ID NO: 13473 - RNA, 32 nt, Homo Sapiens
guuagcccuaaaaugugacaagagaauugguu

SEQ ID NO: 13474 - RNA, 32 nt, Homo Sapiens
auguguuccagauguauucuaauuguguauga

SEQ ID NO: 13475 - RNA, 29 nt, Homo Sapiens
ucgacaugagugauguggaggaaaacaac

SEQ ID NO: 13476 - RNA, 32 nt, Homo Sapiens
aucuccgugccccaauccuggaccuguucugg

SEQ ID NO: 13477 - RNA, 32 nt, Homo Sapiens
gguuggccuggcaccuggcccagggccuaagg

SEQ ID NO: 13478 - RNA, 32 nt, Homo Sapiens
aggaggucaaggugggcagaucaugaggucag

SEQ ID NO: 13479 - RNA, 32 nt, Homo Sapiens
acagcccucacagcucuucagagcaagcacug

SEQ ID NO: 13480 - RNA, 32 nt, Homo Sapiens
ggggguuaucuaauguagucuugggguggcug

SEQ ID NO: 13481 - RNA, 32 nt, Homo Sapiens
gccaggagaugauacugguccuuagccccauc

SEQ ID NO: 13482 - RNA, 32 nt, Homo Sapiens
ucuaaaggaaauggaauuugacuuuuuagagu

SEQ ID NO: 13483 - RNA, 32 nt, Homo Sapiens
ggugcugccugcgucaucuccgcgcgucccuc

SEQ ID NO: 13484 - RNA, 32 nt, Homo Sapiens
ugucuucucuuguccuaucucauuccagccca

SEQ ID NO: 13485 - RNA, 32 nt, Homo Sapiens
cagcuagcgucucggcccuugccgccccgugc

SEQ ID NO: 13486 - RNA, 30 nt, Homo Sapiens
uccccagcaguguuuacccaucuuggucug

SEQ ID NO: 13487 - RNA, 32 nt, Homo Sapiens
gcuuugggcugcccuggugcugccacacuuca

SEQ ID NO: 13488 - RNA, 32 nt, Homo Sapiens
uuugcuuuauuggguuuauauuacacauucua

SEQ ID NO: 13489 - RNA, 32 nt, Homo Sapiens
gcagggcgugguucuccagucugcccugugca

SEQ ID NO: 13490 - RNA, 32 nt, Homo Sapiens
agaguugggggcuaggggaggggggagccaga

SEQ ID NO: 13491 - RNA, 32 nt, Homo Sapiens
uuuugcuauuggaaaugaaauauuguuucaug

SEQ ID NO: 13492 - RNA, 32 nt, Homo Sapiens
ccccuccgccccaacagcuggugcugaggguc

SEQ ID NO: 13493 - RNA, 32 nt, Homo Sapiens
uuuuaacuuuaauuuuaacugugauauaggca

SEQ ID NO: 13494 - RNA, 32 nt, Homo Sapiens
ggcucucuguugugagaucuucagcuaccuca

SEQ ID NO: 13495 - RNA, 32 nt, Homo Sapiens
cuguggaguuuggggaagccaaggcuguacau

SEQ ID NO: 13496 - RNA, 32 nt, Homo Sapiens
auucuaaugcccaguuguauuuguucuuuuau

SEQ ID NO: 13497 - RNA, 32 nt, Homo Sapiens
uccacaaaucuauauuaaaguguuauacccgg

SEQ ID NO: 13498 - RNA, 32 nt, Homo Sapiens
aguagaaagaucugaaacaguugggauggagg

SEQ ID NO: 13499 - RNA, 32 nt, Homo Sapiens
aucccccuguccccgacccccauccccguccc

SEQ ID NO: 13500 - RNA, 32 nt, Homo Sapiens
cuacaucuuuguugauaaaauuuuacaaguga

SEQ ID NO: 13501 - RNA, 32 nt, Homo Sapiens
gaguaggaauuuagcucugucccauaugcuau

SEQ ID NO: 13502 - RNA, 32 nt, Homo Sapiens
ggcuuuucagucccugggcaguguccuugagu

SEQ ID NO: 13503 - RNA, 32 nt, Homo Sapiens
gcuuccuuuucccugucuucagcccucccugu

SEQ ID NO: 13504 - RNA, 32 nt, Homo Sapiens
ugauuugcuaucuauuugagaacuagaaucac

SEQ ID NO: 13505 - RNA, 32 nt, Homo Sapiens
gauguggucaccuggugccaucugcugcuccc

SEQ ID NO: 13506 - RNA, 32 nt, Homo Sapiens
cugauccucagggucuuaggagguauggucgg

SEQ ID NO: 13507 - RNA, 32 nt, Homo Sapiens
guccccgucugaccccaccccggaggagggag

SEQ ID NO: 13508 - RNA, 32 nt, Homo Sapiens
ccagcacccacccugccagggaggaaggggca

SEQ ID NO: 13509 - RNA, 32 nt, Homo Sapiens
ggggggaaaaagaacaaacaaaauacauuuca

SEQ ID NO: 13510 - RNA, 32 nt, Homo Sapiens
cagucucugccaggggaagauuccuugacuuc

SEQ ID NO: 13511 - RNA, 32 nt, Homo Sapiens
uuaaaagaaaauuuuguaauuaaaugccuuuu

SEQ ID NO: 13512 - RNA, 32 nt, Homo Sapiens
accgugcccuuggccugccacccagagccaag

SEQ ID NO: 13513 - RNA, 32 nt, Homo Sapiens
ucuaucuuacucccuuuccccaguucuuugua

SEQ ID NO: 13514 - RNA, 32 nt, Homo Sapiens
gugccuggcaagggugacguggggcuguuucu

SEQ ID NO: 13515 - RNA, 32 nt, Homo Sapiens
uggcugacaccgugaaaccuugucucuacuaa

SEQ ID NO: 13516 - RNA, 32 nt, Homo Sapiens
agaggcuguugguuaaucuuggcacaaguuua

SEQ ID NO: 13517 - RNA, 32 nt, Homo Sapiens
gccagggucaccaggugagcaaggcuggggaa

SEQ ID NO: 13518 - RNA, 32 nt, Homo Sapiens
aagaggaagggcuaagugacuccuggggcccu

SEQ ID NO: 13519 - RNA, 32 nt, Homo Sapiens
gggcggaccgcggaacccgaggccauguccca

SEQ ID NO: 13520 - RNA, 32 nt, Homo Sapiens
cauugcgcugccccggccgccaguccgcccag

SEQ ID NO: 13521 - RNA, 32 nt, Homo Sapiens
aacaaaaacuaaaggggaagugaggaaacagg

SEQ ID NO: 13522 - RNA, 32 nt, Homo Sapiens
auguuaucagugaaacagaacuguaguaacuc

SEQ ID NO: 13523 - RNA, 32 nt, Homo Sapiens
uucucuuggccauuaucccuauaaacuagcaa

SEQ ID NO: 13524 - RNA, 32 nt, Homo Sapiens
uaagagauagcagaggaaaaagaaaaacauuu

SEQ ID NO: 13525 - RNA, 32 nt, Homo Sapiens
gaagaauguaaugccagugacaaugccuucau

SEQ ID NO: 13526 - RNA, 32 nt, Homo Sapiens
uacuacacaggcacugaugaccaagugcagug

SEQ ID NO: 13527 - RNA, 30 nt, Homo Sapiens
cgccauugcugcugugcagaaggucagucc

SEQ ID NO: 13528 - RNA, 32 nt, Homo Sapiens
uuuuugagucuuuuucuuucucauauacagaa

SEQ ID NO: 13529 - RNA, 32 nt, Homo Sapiens
gccaugcucacuuccuuccccagcucaccugg

SEQ ID NO: 13530 - RNA, 32 nt, Homo Sapiens
cuagucugggguuuccucucccugccccaggc

SEQ ID NO: 13531 - RNA, 32 nt, Homo Sapiens
ggcaucucauugggagauauuccucuuccagg

SEQ ID NO: 13532 - RNA, 32 nt, Homo Sapiens
guguuaaugauauuagagaugaaaaacguuag

SEQ ID NO: 13533 - RNA, 32 nt, Homo Sapiens
ucgagguugcagugagccuugaucgugccacu

SEQ ID NO: 13534 - RNA, 32 nt, Homo Sapiens
acgcuccucccucugucucuguagcuggagaa

SEQ ID NO: 13535 - RNA, 32 nt, Homo Sapiens
auaaauuauauuaaaaggaagcggggaacaug

SEQ ID NO: 13536 - RNA, 32 nt, Homo Sapiens
ccaucugcaccccuucucuccuccccaaauca

SEQ ID NO: 13537 - RNA, 32 nt, Homo Sapiens
uuccccugccugcuccuccaugcugugagcug

SEQ ID NO: 13538 - RNA, 29 nt, Homo Sapiens
accuggaugaagauugagagcaucgucuu

SEQ ID NO: 13539 - RNA, 32 nt, Homo Sapiens
ugacuggguggccuugucuuucuggggaggag

SEQ ID NO: 13540 - RNA, 32 nt, Homo Sapiens
acacaaccauaaguauaguauuucaugccagu

SEQ ID NO: 13541 - RNA, 32 nt, Homo Sapiens
cagauaccugugggggaagaucagcgacugcc

SEQ ID NO: 13542 - RNA, 32 nt, Homo Sapiens
ucuuugcccgucuucucccuuggcugagcaaa

SEQ ID NO: 13543 - RNA, 32 nt, Homo Sapiens
uacugguuauauucuuuuuuuguaaggaagau

SEQ ID NO: 13544 - RNA, 32 nt, Homo Sapiens
acaguugauauuuaaaagauccauuuaaaaca

SEQ ID NO: 13545 - RNA, 32 nt, Homo Sapiens
gccguuugaauuguguuuuucuuucuucccau

SEQ ID NO: 13546 - RNA, 29 nt, Homo Sapiens
agccaugggcuacgcgcgggcuucggggg

SEQ ID NO: 13547 - RNA, 32 nt, Homo Sapiens
gaaagcucuccagcacucaugaugccaccacu

SEQ ID NO: 13548 - RNA, 32 nt, Homo Sapiens
cacuuuugugguccaccugcaggccgccuuuc

SEQ ID NO: 13549 - RNA, 32 nt, Homo Sapiens
aucccuguauuaguuuuuuccuccucugaaaa

SEQ ID NO: 13550 - RNA, 32 nt, Homo Sapiens
cauccagagaccugcccuucuaccuuccucgc

SEQ ID NO: 13551 - RNA, 32 nt, Homo Sapiens
cagggauuuucucauuagcacaggguuccaag

SEQ ID NO: 13552 - RNA, 32 nt, Homo Sapiens
caguuauuugaaacauaaaaaugaauaccaag

SEQ ID NO: 13553 - RNA, 32 nt, Homo Sapiens
gggucugcuuuguuuaccuuucgugcggugga

SEQ ID NO: 13554 - RNA, 32 nt, Homo Sapiens
auacugguguuagcugagaacucuguaagucc

SEQ ID NO: 13555 - RNA, 32 nt, Homo Sapiens
uaacacaaggaaaugccccagauucuccuuua

SEQ ID NO: 13556 - RNA, 32 nt, Homo Sapiens
cauauuccuucugagacuuuguacacuuugac

SEQ ID NO: 13557 - RNA, 32 nt, Homo Sapiens
cuaagcgacccucagcugugugggaccagccc

SEQ ID NO: 13558 - RNA, 32 nt, Homo Sapiens
gacuccggccaguaugagucccgggggcggcg

SEQ ID NO: 13559 - RNA, 32 nt, Homo Sapiens
guaaauauuucugggcuuccagcuuugguuuu

SEQ ID NO: 13560 - RNA, 32 nt, Homo Sapiens
uuucaguguguuggguguugcuccuuccuaug

SEQ ID NO: 13561 - RNA, 32 nt, Homo Sapiens
ccuccguauuggagcccucccugcuuccccuu

SEQ ID NO: 13562 - RNA, 32 nt, Homo Sapiens
ugggugugguggcaugcgcauguagucccaac

SEQ ID NO: 13563 - RNA, 32 nt, Homo Sapiens
uuuguuauuugcuuuucuccuccaccugugug

SEQ ID NO: 13564 - RNA, 32 nt, Homo Sapiens
gacacucacagcaugagagcuuccugaguguu

SEQ ID NO: 13565 - RNA, 32 nt, Homo Sapiens
uuaagaggcucuuaaauuuaaaaaauauacac

SEQ ID NO: 13566 - RNA, 32 nt, Homo Sapiens
cugcauugagaauuauuuuuauuuaguuuuuu

SEQ ID NO: 13567 - RNA, 32 nt, Homo Sapiens
acguguuccuaaaacauguuugaaaggugaau

SEQ ID NO: 13568 - RNA, 32 nt, Homo Sapiens
ugagucauagaacacaaaucuauugacggaag

SEQ ID NO: 13569 - RNA, 32 nt, Homo Sapiens
aggcacgcucagagacacgcaguuacacacac

SEQ ID NO: 13570 - RNA, 32 nt, Homo Sapiens
gaaacuuuuccuccucuauuaaacaugggaaa

SEQ ID NO: 13571 - RNA, 32 nt, Homo Sapiens
uggaagcuguacuaguugugauuuacuuaauu

SEQ ID NO: 13572 - RNA, 32 nt, Homo Sapiens
uauuuuacagaaaaggaaucagagaaucuaca

SEQ ID NO: 13573 - RNA, 32 nt, Homo Sapiens
cuguuuugcacccuccgugguucccuugaaga

SEQ ID NO: 13574 - RNA, 32 nt, Homo Sapiens
auuaacaaccaauuuuaaccgugugucaagau

SEQ ID NO: 13575 - RNA, 32 nt, Homo Sapiens
cgccuguaaucccagcacuuugggaggccaaa

SEQ ID NO: 13576 - RNA, 32 nt, Homo Sapiens
cgccuauaaucccagcacuuugggaggccgaa

SEQ ID NO: 13577 - RNA, 32 nt, Homo Sapiens
gccuugggccugcccacccacccccucaacuu

SEQ ID NO: 13578 - RNA, 32 nt, Homo Sapiens
guguaugugcgugcaaugagaggguguaugaa

SEQ ID NO: 13579 - RNA, 32 nt, Homo Sapiens
agcaguucuccccguccccacccacaucauuu

SEQ ID NO: 13580 - RNA, 32 nt, Homo Sapiens
aaaugucauucauauucauauucauauucauu

SEQ ID NO: 13581 - RNA, 31 nt, Homo Sapiens
ugcauguuugauauuuugccaaauaacaaua

SEQ ID NO: 13582 - RNA, 27 nt, Homo Sapiens
uagaauuccuucuucaguuuuaacgag

SEQ ID NO: 13583 - RNA, 32 nt, Homo Sapiens
acgcuuucuuguagugcuucugcaaaaaacaa

SEQ ID NO: 13584 - RNA, 32 nt, Homo Sapiens
uugugcagaaaagcucagaguagguggguagg

SEQ ID NO: 13585 - RNA, 32 nt, Homo Sapiens
gccgcccguccggggcgccgcgcauggagcgu

SEQ ID NO: 13586 - RNA, 32 nt, Homo Sapiens
ggccacuucuuccgagggccaggccgcccccu

SEQ ID NO: 13587 - RNA, 32 nt, Homo Sapiens
cgccugcugaugagugaugacaaucaggcugu

SEQ ID NO: 13588 - RNA, 32 nt, Homo Sapiens
aaaaucacgcuguguucuuuuaaaaucccuca

SEQ ID NO: 13589 - RNA, 32 nt, Homo Sapiens
agaguuuacagaaaaaauauuuauauacgacu

SEQ ID NO: 13590 - RNA, 32 nt, Homo Sapiens
ucucggugggggguggggaggggggugagaag

SEQ ID NO: 13591 - RNA, 32 nt, Homo Sapiens
gagauaaggacucugaucagguccuuuggaaa

SEQ ID NO: 13592 - RNA, 32 nt, Homo Sapiens
uucuccaccucuucuuuuucucaugcccugcc

SEQ ID NO: 13593 - RNA, 32 nt, Homo Sapiens
uacuugcacuggggagguggcugcuggcuggc

SEQ ID NO: 13594 - RNA, 32 nt, Homo Sapiens
ccccaggcucaggcugcagaacagcguagacc

SEQ ID NO: 13595 - RNA, 32 nt, Homo Sapiens
agcuucucccuuucuucauuuucugugauuua

SEQ ID NO: 13596 - RNA, 32 nt, Homo Sapiens
uuggcuguacauccuggucacuucugacuucu

SEQ ID NO: 13597 - RNA, 32 nt, Homo Sapiens
ccugugagccccaccagacucauuuguaaaua

SEQ ID NO: 13598 - RNA, 32 nt, Homo Sapiens
aguuaguagagcuuguucuuguauugugaccu

SEQ ID NO: 13599 - RNA, 32 nt, Homo Sapiens
ggccuggcagccacgcagcggcugagcucaug

SEQ ID NO: 13600 - RNA, 30 nt, Homo Sapiens
cuugacauucuggugggggaaaccuguguu

SEQ ID NO: 13601 - RNA, 32 nt, Homo Sapiens
ccucacugccuugggacaaaaugaagaaagcc

SEQ ID NO: 13602 - RNA, 32 nt, Homo Sapiens
cagggagcugucugauuccaugaugucugccc

SEQ ID NO: 13603 - RNA, 32 nt, Homo Sapiens
gauggucacauggaaggggagaucuggggccu

SEQ ID NO: 13604 - RNA, 32 nt, Homo Sapiens
caugcugcuuggagcacaauggcuguccuuug

SEQ ID NO: 13605 - RNA, 32 nt, Homo Sapiens
uagacacucucguucugucacccaggcuggag

SEQ ID NO: 13606 - RNA, 32 nt, Homo Sapiens
cauuucccauucuguugcuugccuuuucacuc

SEQ ID NO: 13607 - RNA, 32 nt, Homo Sapiens
uagugacugagauguaaaaauagauuuuagaa

SEQ ID NO: 13608 - RNA, 32 nt, Homo Sapiens
gccaggugacagcuaauggcggcggccgccug

SEQ ID NO: 13609 - RNA, 32 nt, Homo Sapiens
caguucuggggucagaagauuuaaaguuugag

SEQ ID NO: 13610 - RNA, 32 nt, Homo Sapiens
agcugcugggggaggagaaauaccgccaggac

SEQ ID NO: 13611 - RNA, 32 nt, Homo Sapiens
cuuuuuauggcuuaucaaaugcuuguccuggc

SEQ ID NO: 13612 - RNA, 32 nt, Homo Sapiens
uguccugaagucgggcucucccggcccugccu

SEQ ID NO: 13613 - RNA, 32 nt, Homo Sapiens
cauuugucaccucagcauucgcugccgaaaug

SEQ ID NO: 13614 - RNA, 32 nt, Homo Sapiens
cuccucccuuggcuccuccacaggcuggcugu

SEQ ID NO: 13615 - RNA, 32 nt, Homo Sapiens
guuuauuucuucacuauuguaccuguggaaau

SEQ ID NO: 13616 - RNA, 32 nt, Homo Sapiens
aacacguauccuguguucuccggaggcacccc

SEQ ID NO: 13617 - RNA, 32 nt, Homo Sapiens
gccccgccccgcccggccccguagagucccug

SEQ ID NO: 13618 - RNA, 32 nt, Homo Sapiens
cccuaaguguuuacuguuuuuauccagucaag

SEQ ID NO: 13619 - RNA, 32 nt, Homo Sapiens
ccaucuccccucaaaauuuuguagagguucua

SEQ ID NO: 13620 - RNA, 32 nt, Homo Sapiens
ccuauuuauaugcucagugcagagcacugugg

SEQ ID NO: 13621 - RNA, 32 nt, Homo Sapiens
uaugugugggucugggcagggcaguagagguc

SEQ ID NO: 13622 - RNA, 32 nt, Homo Sapiens
gauuagagccacuacauagaauagucucuuac

SEQ ID NO: 13623 - RNA, 32 nt, Homo Sapiens
agucacugauugcaauuucuuuuacacagguu

SEQ ID NO: 13624 - RNA, 32 nt, Homo Sapiens
aggccuggcuccugagugagcuacaugguacu

SEQ ID NO: 13625 - RNA, 32 nt, Homo Sapiens
auuauagccacucuagugggugucaaguggua

SEQ ID NO: 13626 - RNA, 32 nt, Homo Sapiens
aaaaaagggaagauagugcagaugaaauaaag

SEQ ID NO: 13627 - RNA, 32 nt, Homo Sapiens
auauuagguaaauacagagaaaacaauaagcc

SEQ ID NO: 13628 - RNA, 32 nt, Homo Sapiens
auguuccagccgacuuaaugggcuugccuuau

SEQ ID NO: 13629 - RNA, 32 nt, Homo Sapiens
acuugguggcacauggguguugggggaguagc

SEQ ID NO: 13630 - RNA, 32 nt, Homo Sapiens
ugguuauagugggauaggaggcagaaaaugga

SEQ ID NO: 13631 - RNA, 32 nt, Homo Sapiens
gccuggcccacuuuucuuucuuuccuucuuau

SEQ ID NO: 13632 - RNA, 32 nt, Homo Sapiens
aauuaguuuuaaaacaacaacugugacuguuu

SEQ ID NO: 13633 - RNA, 32 nt, Homo Sapiens
ggcugcugcucuugcuucagagccacaagcaa

SEQ ID NO: 13634 - RNA, 32 nt, Homo Sapiens
acucaggggucagaagcagggacuggggcagg

SEQ ID NO: 13635 - RNA, 32 nt, Homo Sapiens
uggccauggggauggaaggggguggaauaaaa

SEQ ID NO: 13636 - RNA, 32 nt, Homo Sapiens
guacauccgugucucucgccucgccgcggaca

SEQ ID NO: 13637 - RNA, 28 nt, Homo Sapiens
gccaugucaggagacggagccacggagc

SEQ ID NO: 13638 - RNA, 32 nt, Homo Sapiens
ggugacaggcggccuggcugcagaaacguugc

SEQ ID NO: 13639 - RNA, 32 nt, Homo Sapiens
ccgucggagacggggcggcccuguagcucugc

SEQ ID NO: 13640 - RNA, 32 nt, Homo Sapiens
aaacagauacauucuauaguauguaaauuaua

SEQ ID NO: 13641 - RNA, 32 nt, Homo Sapiens
cuggcucacuccugagaaugggcuccuguuag

SEQ ID NO: 13642 - RNA, 32 nt, Homo Sapiens
uuccaguuuuauucuuguugaguuuuucccua

SEQ ID NO: 13643 - RNA, 32 nt, Homo Sapiens
gcccugccacccguuguugccgcggccccagc

SEQ ID NO: 13644 - RNA, 29 nt, Homo Sapiens
gaauuucuugcuuauagaggcaaaccaca

SEQ ID NO: 13645 - RNA, 32 nt, Homo Sapiens
ccuuucuggaaauuaagaaggugugcuccaga

SEQ ID NO: 13646 - RNA, 32 nt, Homo Sapiens
cuugagcuccagccuggcuaucucuuucaaga

SEQ ID NO: 13647 - RNA, 32 nt, Homo Sapiens
gccggacgcuagaccgcccucccgcguuccca

SEQ ID NO: 13648 - RNA, 32 nt, Homo Sapiens
acauugcagcccauuccaacacucuuaaaaac

SEQ ID NO: 13649 - RNA, 32 nt, Homo Sapiens
ggcaccgcugggggcgaagccacgcgucuuuu

SEQ ID NO: 13650 - RNA, 31 nt, Homo Sapiens
aagcccacgaagaaaaaagccugguuuuguu

SEQ ID NO: 13651 - RNA, 32 nt, Homo Sapiens
uguuccugaucccacauaagcaugucucaucc

SEQ ID NO: 13652 - RNA, 32 nt, Homo Sapiens
aaugaaaugcaguguaugugguuucagacaga

SEQ ID NO: 13653 - RNA, 32 nt, Homo Sapiens
caggggacaccuguggagggcauuucccgugg

SEQ ID NO: 13654 - RNA, 32 nt, Homo Sapiens
cugcccacccuuccagauccccggccccggcu

SEQ ID NO: 13655 - RNA, 32 nt, Homo Sapiens
ccucagccgcgggugaucguagcucggaaaug

SEQ ID NO: 13656 - RNA, 32 nt, Homo Sapiens
uucuuccugccagcaggggugugauguaccag

SEQ ID NO: 13657 - RNA, 32 nt, Homo Sapiens
cccaacccaucccacagccauccgugacugug

SEQ ID NO: 13658 - RNA, 32 nt, Homo Sapiens
caagcgguucccgcccucgcccagcgcccagg

SEQ ID NO: 13659 - RNA, 32 nt, Homo Sapiens
gaaacggcgcugggauuagggauugccacuuc

SEQ ID NO: 13660 - RNA, 32 nt, Homo Sapiens
cacacgcgcgcgcacacacacacacacacauc

SEQ ID NO: 13661 - RNA, 32 nt, Homo Sapiens
cgccucuggcgcgcucugcagcgcggacccgc

SEQ ID NO: 13662 - RNA, 32 nt, Homo Sapiens
aacucaauuauguauguaugugcauacacaua

SEQ ID NO: 13663 - RNA, 32 nt, Homo Sapiens
cugaacacagaaaccaccagaaccagaugcug

SEQ ID NO: 13664 - RNA, 32 nt, Homo Sapiens
cuuggcuuuaccauauuucauucuuuaaaaag

SEQ ID NO: 13665 - RNA, 32 nt, Homo Sapiens
uguaaaauucuaugaauucgugaagucugcaa

SEQ ID NO: 13666 - RNA, 32 nt, Homo Sapiens
caggaaaucaaccaaugcugcggaaggcggcu

SEQ ID NO: 13667 - RNA, 32 nt, Homo Sapiens
aauggacaacugagaauucucccagcugccug

SEQ ID NO: 13668 - RNA, 32 nt, Homo Sapiens
auuuaacauuuuguuugcaauuuuacuuuuuc

SEQ ID NO: 13669 - RNA, 32 nt, Homo Sapiens
ccgcccccgcuuccagauccccggccccggcu

SEQ ID NO: 13670 - RNA, 32 nt, Homo Sapiens
caccucauacucaaauaagaaacugacuuaaa

SEQ ID NO: 13671 - RNA, 32 nt, Homo Sapiens
cuaaaggcccuccugguucugguugccuaaaa

SEQ ID NO: 13672 - RNA, 32 nt, Homo Sapiens
ugauuuauacuucucuguugcuacgcaaaacc

SEQ ID NO: 13673 - RNA, 32 nt, Homo Sapiens
aacaauuuuauaaacaaaucaaggagcacuag

SEQ ID NO: 13674 - RNA, 32 nt, Homo Sapiens
caaguccggggcccgcgccgcugccuagcgcg

SEQ ID NO: 13675 - RNA, 32 nt, Homo Sapiens
ggcgcugugcgcgccgcgauccgguacguggg

SEQ ID NO: 13676 - RNA, 32 nt, Homo Sapiens
cuucuccuggggcauuuguuuuguuuucauaa

SEQ ID NO: 13677 - RNA, 32 nt, Homo Sapiens
gaaggagaagcuucuugagauaccaaauaaag

SEQ ID NO: 13678 - RNA, 32 nt, Homo Sapiens
caagaccccucccccgcuuccucccuuccuuu

SEQ ID NO: 13679 - RNA, 32 nt, Homo Sapiens
uggaagaggcuauggaacaggguuccgggagu

SEQ ID NO: 13680 - RNA, 32 nt, Homo Sapiens
cucgauuucccgccaaccaacaaagguucauu

SEQ ID NO: 13681 - RNA, 32 nt, Homo Sapiens
guuccaugauauuucuugcccuguucccccug

SEQ ID NO: 13682 - RNA, 32 nt, Homo Sapiens
uauccuaggagggguguuugggaaauaucuag

SEQ ID NO: 13683 - RNA, 32 nt, Homo Sapiens
guaagagagcgggacgcggggugcccggcgcg

SEQ ID NO: 13684 - RNA, 32 nt, Homo Sapiens
ggcauccuggaaagucauagugccuuggguca

SEQ ID NO: 13685 - RNA, 31 nt, Homo Sapiens
auucacuuacggagaauguaagguuaccuuu

SEQ ID NO: 13686 - RNA, 32 nt, Homo Sapiens
agacaggcaacgccaggucugcaggccaggag

SEQ ID NO: 13687 - RNA, 32 nt, Homo Sapiens
agaacucuggucccgggcgcacaacggcggag

SEQ ID NO: 13688 - RNA, 32 nt, Homo Sapiens
ggcggcaggacggcggcaggaugugugaccgg

SEQ ID NO: 13689 - RNA, 32 nt, Homo Sapiens
gacugacaagcauaaaaggcuaacuuguggau

SEQ ID NO: 13690 - RNA, 32 nt, Homo Sapiens
gaccugggggugugucugggggugggguguga

SEQ ID NO: 13691 - RNA, 32 nt, Homo Sapiens
caggauuucucugaagacccggcacaggcuau

SEQ ID NO: 13692 - RNA, 32 nt, Homo Sapiens
agcgcaucuucggcccggguccccgccgccac

SEQ ID NO: 13693 - RNA, 32 nt, Homo Sapiens
uccgccucucugagccucugucucugcuucug

SEQ ID NO: 13694 - RNA, 32 nt, Homo Sapiens
gacucuccgggcgcggggcgaugcagcgcccu

SEQ ID NO: 13695 - RNA, 32 nt, Homo Sapiens
guugacugaacagcgacagaaaacaccagaga

SEQ ID NO: 13696 - RNA, 32 nt, Homo Sapiens
aaaauagaauaaacugaguagagaggaacaca

SEQ ID NO: 13697 - RNA, 32 nt, Homo Sapiens
gcuccuccuccauuuuacccccuacccauccu

SEQ ID NO: 13698 - RNA, 32 nt, Homo Sapiens
ugggcucucccucccccagccuggagcacggg

SEQ ID NO: 13699 - RNA, 32 nt, Homo Sapiens
uguucauggauguagaaauaguaaacggcaga

SEQ ID NO: 13700 - RNA, 32 nt, Homo Sapiens
cccacacugagaggcuuuggggcccaaaauaa

SEQ ID NO: 13701 - RNA, 32 nt, Homo Sapiens
ggcagggcacgguggcucacgccuguaauucc

SEQ ID NO: 13702 - RNA, 32 nt, Homo Sapiens
ccuggcccaucccaugaaacccaggcuguaga

SEQ ID NO: 13703 - RNA, 32 nt, Homo Sapiens
aaccucacaaaacacccagacaucgggagugc

SEQ ID NO: 13704 - RNA, 32 nt, Homo Sapiens
auuccugccugccugaggaagaaauggugagc

SEQ ID NO: 13705 - RNA, 32 nt, Homo Sapiens
aagcaaaaaguacuuuguaaaguguuauacaa

SEQ ID NO: 13706 - RNA, 32 nt, Homo Sapiens
gcagcgcccgucugugcuccgcagcgucuagg

SEQ ID NO: 13707 - RNA, 32 nt, Homo Sapiens
ggauugcaauaaauuuaugauuuaacuuuuaa

SEQ ID NO: 13708 - RNA, 32 nt, Homo Sapiens
acuggcuguaugaguacccggcagaugcgcgu

SEQ ID NO: 13709 - RNA, 32 nt, Homo Sapiens
agaauauuacacaaguuaaugaaacugagaag

SEQ ID NO: 13710 - RNA, 32 nt, Homo Sapiens
gugggaagaaacaaaacaaccuuguaaaucaa

SEQ ID NO: 13711 - RNA, 32 nt, Homo Sapiens
uagaccgguggcggcggcaucuggaguagcac

SEQ ID NO: 13712 - RNA, 29 nt, Homo Sapiens
guaaccaaaaguuuacaguuuuuugucca

SEQ ID NO: 13713 - RNA, 32 nt, Homo Sapiens
ucagauugucuccuuaucccaucccacaaaac

SEQ ID NO: 13714 - RNA, 32 nt, Homo Sapiens
auacuucaggcacaacucugugcaaaucauuu

SEQ ID NO: 13715 - RNA, 32 nt, Homo Sapiens
ccaucgcugucaugagugaugcccuggcccuu

SEQ ID NO: 13716 - RNA, 32 nt, Homo Sapiens
gguugggacccgcuccaacccucgguucuucc

SEQ ID NO: 13717 - RNA, 32 nt, Homo Sapiens
ggagagaagggagagcucgugagaugggaaga

SEQ ID NO: 13718 - RNA, 32 nt, Homo Sapiens
aggaaauuucuuuuuuauuaaaagcgaaugug

SEQ ID NO: 13719 - RNA, 30 nt, Homo Sapiens
gugcccgagcccgugccgccugcugagcgg

SEQ ID NO: 13720 - RNA, 32 nt, Homo Sapiens
cauaacaaccucagucuaagcucuguguccau

SEQ ID NO: 13721 - RNA, 32 nt, Homo Sapiens
cucaguaucugcauuacuuuuaucucugcaaa

SEQ ID NO: 13722 - RNA, 32 nt, Homo Sapiens
cccaagggagcagacuccccagagacaaacug

SEQ ID NO: 13723 - RNA, 29 nt, Homo Sapiens
gccccugugguccgggcuguggcucucca

SEQ ID NO: 13724 - RNA, 32 nt, Homo Sapiens
ccgagcccuugacugccuggauagcagaguau

SEQ ID NO: 13725 - RNA, 32 nt, Homo Sapiens
uucuccuaccucagccucccaaggagcugaga

SEQ ID NO: 13726 - RNA, 32 nt, Homo Sapiens
cuggggcccagggcccgggcacccacaagccc

SEQ ID NO: 13727 - RNA, 32 nt, Homo Sapiens
ggcgacuucccucucugucgccccuccgugaa

SEQ ID NO: 13728 - RNA, 32 nt, Homo Sapiens
cuuugcgaaguacuucagaaagccuagagaga

SEQ ID NO: 13729 - RNA, 27 nt, Homo Sapiens
acaacaaccuucuucgguccuuaccug

SEQ ID NO: 13730 - RNA, 32 nt, Homo Sapiens
cagcaaccccccacccuccccaugccucucuc

SEQ ID NO: 13731 - RNA, 32 nt, Homo Sapiens
ggccaggcucucaccuuuuagagcagcacccc

SEQ ID NO: 13732 - RNA, 32 nt, Homo Sapiens
guuaucuuuucucagaauaaaauuagaaacuu

SEQ ID NO: 13733 - RNA, 32 nt, Homo Sapiens
uuggggacacuggguggugguuacacaguuga

SEQ ID NO: 13734 - RNA, 32 nt, Homo Sapiens
auuaaaaaacaauuugcaagaaaauguguuuc

SEQ ID NO: 13735 - RNA, 32 nt, Homo Sapiens
agguagaaaaagacggaaggaagaccuacuag

SEQ ID NO: 13736 - RNA, 32 nt, Homo Sapiens
cagggccugacacccccuccccgccccugugg

SEQ ID NO: 13737 - RNA, 32 nt, Homo Sapiens
agaggauaauuugccuaaugauacauuaaagu

SEQ ID NO: 13738 - RNA, 32 nt, Homo Sapiens
ugcuacgugacaguuugaaaccuucacaguua

SEQ ID NO: 13739 - RNA, 32 nt, Homo Sapiens
agcuuaaagucuuauguauaaaacugauaugg

SEQ ID NO: 13740 - RNA, 32 nt, Homo Sapiens
agaugaucaaguaguugagaaaacaguucaag

SEQ ID NO: 13741 - RNA, 32 nt, Homo Sapiens
ugcuuagucugcucacugggagaagaagaguu

SEQ ID NO: 13742 - RNA, 32 nt, Homo Sapiens
cagagcgagacccagacucaaaaaauaaaaau

SEQ ID NO: 13743 - RNA, 32 nt, Homo Sapiens
gguggaaaauggcagagcugcagauguuacua

SEQ ID NO: 13744 - RNA, 32 nt, Homo Sapiens
cguuccugugcagagccccauccacugguucu

SEQ ID NO: 13745 - RNA, 32 nt, Homo Sapiens
aaaagaaauuaaaagaguugagacaaacguuu

SEQ ID NO: 13746 - RNA, 32 nt, Homo Sapiens
ucaaugugaaggacuagaaauaaaaacccaca

SEQ ID NO: 13747 - RNA, 32 nt, Homo Sapiens
ccugcgaggagaagucgucacuaguggggaau

SEQ ID NO: 13748 - RNA, 32 nt, Homo Sapiens
acgaggucaggaggucgagaucauccuggcua

SEQ ID NO: 13749 - RNA, 32 nt, Homo Sapiens
gguuggcuuuugcaggagggcagcuuacgugu

SEQ ID NO: 13750 - RNA, 32 nt, Homo Sapiens
uuuugauugucacugaccacucagaaggggcc

SEQ ID NO: 13751 - RNA, 32 nt, Homo Sapiens
gguaguggaggguggggggaugggggccagca

SEQ ID NO: 13752 - RNA, 32 nt, Homo Sapiens
cgcguccggaggaggagaagcggcggcgccgg

SEQ ID NO: 13753 - RNA, 32 nt, Homo Sapiens
agcucagagcccgggacguccggagcgcgggg

SEQ ID NO: 13754 - RNA, 32 nt, Homo Sapiens
aguucccaugguuuccuuugcucccagcgguu

SEQ ID NO: 13755 - RNA, 30 nt, Homo Sapiens
gguccaggcaggcggggaugugcggugacc

SEQ ID NO: 13756 - RNA, 32 nt, Homo Sapiens
cccucgcuggaggccagaggccaagaugaugu

SEQ ID NO: 13757 - RNA, 32 nt, Homo Sapiens
gugauaccaucccagugccaugagcccacacu

SEQ ID NO: 13758 - RNA, 32 nt, Homo Sapiens
aaaucaccacuaaagaacuuauguaaccaaau

SEQ ID NO: 13759 - RNA, 32 nt, Homo Sapiens
uaaaaaaugaauuuggccagacacaggugccu

SEQ ID NO: 13760 - RNA, 32 nt, Homo Sapiens
uccguacuaaacacgucugcaagucaagaugu

SEQ ID NO: 13761 - RNA, 32 nt, Homo Sapiens
ccuggcaauuauuacauauguuagaacaugga

SEQ ID NO: 13762 - RNA, 32 nt, Homo Sapiens
aaaaaaaacccuccuuuuuuuccuuucgucag

SEQ ID NO: 13763 - RNA, 32 nt, Homo Sapiens
ccucaucggcccgcagcuggcuggcccagugc

SEQ ID NO: 13764 - RNA, 32 nt, Homo Sapiens
auauuuuaaaucaacuacuccacguguuuuuc

SEQ ID NO: 13765 - RNA, 32 nt, Homo Sapiens
gcaaccugccagcuacaggagcccccugcguc

SEQ ID NO: 13766 - RNA, 32 nt, Homo Sapiens
gaaaugugcucauagccaaaacauuuuacucu

SEQ ID NO: 13767 - RNA, 32 nt, Homo Sapiens
ccaggcuucggcggccgguggcagcucucgau

SEQ ID NO: 13768 - RNA, 32 nt, Homo Sapiens
guucaaggacugccuucaagaggggcuggccu

SEQ ID NO: 13769 - RNA, 32 nt, Homo Sapiens
acauauuuugauaaaguauuauuuguaaugaa

SEQ ID NO: 13770 - RNA, 32 nt, Homo Sapiens
cugucugggagucaaggcugcaguagcguuuc

SEQ ID NO: 13771 - RNA, 32 nt, Homo Sapiens
aagugcccacuuccucauguuuucacacgaug

SEQ ID NO: 13772 - RNA, 32 nt, Homo Sapiens
gcgcguccugccucugggagguuacugucugg

SEQ ID NO: 13773 - RNA, 32 nt, Homo Sapiens
augggcaacaccaagcauucuaauggaauagg

SEQ ID NO: 13774 - RNA, 32 nt, Homo Sapiens
caaagaauuuugggggguuuuguguguuggca

SEQ ID NO: 13775 - RNA, 32 nt, Homo Sapiens
cucgcccugccagcccagcaccacugggaauc

SEQ ID NO: 13776 - RNA, 32 nt, Homo Sapiens
cuauaccuuuaagacaaacaaacaaacacaca

SEQ ID NO: 13777 - RNA, 32 nt, Homo Sapiens
uguuuaugguaauacacacuuuccaaaaugag

SEQ ID NO: 13778 - RNA, 32 nt, Homo Sapiens
aguccagguucagaaacuugugguaggccagu

SEQ ID NO: 13779 - RNA, 32 nt, Homo Sapiens
uacaguauuauguacucuacugauaucuaaau

SEQ ID NO: 13780 - RNA, 32 nt, Homo Sapiens
uccucccccugucaagauguggcaccucaaac

SEQ ID NO: 13781 - RNA, 32 nt, Homo Sapiens
aauauguucauaucguuuuucuugacaaauga

SEQ ID NO: 13782 - RNA, 32 nt, Homo Sapiens
uuuacuuccucauaggccucaggauuauguag

SEQ ID NO: 13783 - RNA, 32 nt, Homo Sapiens
gcgaacaggaccagauuuuguuuggagccuca

SEQ ID NO: 13784 - RNA, 32 nt, Homo Sapiens
ucuucauucuguuugcagaagcuguuuagaag

SEQ ID NO: 13785 - RNA, 32 nt, Homo Sapiens
aaacuccugagccuggcgagccaggcagcccc

SEQ ID NO: 13786 - RNA, 32 nt, Homo Sapiens
ucccuggagacgggcggggaggccaaacuucc

SEQ ID NO: 13787 - RNA, 32 nt, Homo Sapiens
gaggguaauuuucuaacucuaguuugcagagg

SEQ ID NO: 13788 - RNA, 32 nt, Homo Sapiens
uuuuaccuauuaugaaacauauuacauuuuuu

SEQ ID NO: 13789 - RNA, 32 nt, Homo Sapiens
caacccucagugaaacaaccuccucccuuagc

SEQ ID NO: 13790 - RNA, 32 nt, Homo Sapiens
ccaggaugagagaggagagaggaauccacagg

SEQ ID NO: 13791 - RNA, 32 nt, Homo Sapiens
uaaagcuauacucuaugggaauugcaagcaau

SEQ ID NO: 13792 - RNA, 32 nt, Homo Sapiens
gugggggacuucccgagucugccgggaccaug

SEQ ID NO: 13793 - RNA, 32 nt, Homo Sapiens
cgccuucugcaccugccaccccugagccagcg

SEQ ID NO: 13794 - RNA, 32 nt, Homo Sapiens
ugccgcagccuggccggcuguggggugguuug

SEQ ID NO: 13795 - RNA, 32 nt, Homo Sapiens
aguugcugugcagcucggauguggcauaggaa

SEQ ID NO: 13796 - RNA, 32 nt, Homo Sapiens
uuuuuuuuuuuuuuuuuuuuuaccgaguacac

SEQ ID NO: 13797 - RNA, 31 nt, Homo Sapiens
ucugccauucagccuuugccaaaaaauuugg

SEQ ID NO: 13798 - RNA, 32 nt, Homo Sapiens
gcugcuccuccucuccuaggagaccagagugc

SEQ ID NO: 13799 - RNA, 32 nt, Homo Sapiens
cuuaauaugucccaggaccccugacagggcug

SEQ ID NO: 13800 - RNA, 32 nt, Homo Sapiens
uauguuuuaaacagcugacauuuuaaauuuug

SEQ ID NO: 13801 - RNA, 32 nt, Homo Sapiens
cuauagaggaaaagaagaauucauguaaagca

SEQ ID NO: 13802 - RNA, 32 nt, Homo Sapiens
cggcuccagggcacugcucuccuccuugcacc

SEQ ID NO: 13803 - RNA, 32 nt, Homo Sapiens
gaucuggagcccaccugcuuugaaagaaauga

SEQ ID NO: 13804 - RNA, 32 nt, Homo Sapiens
agaugugacgggguguguggcccgaggaagcu

SEQ ID NO: 13805 - RNA, 32 nt, Homo Sapiens
ccuggcaaaaauuuauggugaaugaauauggc

SEQ ID NO: 13806 - RNA, 32 nt, Homo Sapiens
gacaucgucuacaaagauauggucaccaagau

SEQ ID NO: 13807 - RNA, 32 nt, Homo Sapiens
ccucugucacucagcauccucuuaggcguuuc

SEQ ID NO: 13808 - RNA, 32 nt, Homo Sapiens
gagaguacgucggcggugcucucgggcuuugu

SEQ ID NO: 13809 - RNA, 32 nt, Homo Sapiens
agaaccccagcgucacgaggauuuuuagacuc

SEQ ID NO: 13810 - RNA, 32 nt, Homo Sapiens
ucuggcugcuuuuuguuuuucauuuucuuuca

SEQ ID NO: 13811 - RNA, 32 nt, Homo Sapiens
acggggagggggacaggcagggaguuaggagg

SEQ ID NO: 13812 - RNA, 32 nt, Homo Sapiens
aaacuucaugcaugaaugagcauucccaggga

SEQ ID NO: 13813 - RNA, 32 nt, Homo Sapiens
ggcccuggggagaggagagaaagggcucccac

SEQ ID NO: 13814 - RNA, 28 nt, Homo Sapiens
ucuucugaagauuaaugaaguugaaaau

SEQ ID NO: 13815 - RNA, 32 nt, Homo Sapiens
ccuuggggacccuggacgugccgacauauggc

SEQ ID NO: 13816 - RNA, 32 nt, Homo Sapiens
agaggaaggggagggauguggacugggucuga

SEQ ID NO: 13817 - RNA, 32 nt, Homo Sapiens
gccgggauucgggcgccgcggcagcugcuccg

SEQ ID NO: 13818 - RNA, 32 nt, Homo Sapiens
uaacacaucuuuacaauuaauucauaauaggg

SEQ ID NO: 13819 - RNA, 32 nt, Homo Sapiens
cagugaccccagagacagagccaggacaggag

SEQ ID NO: 13820 - RNA, 32 nt, Homo Sapiens
acaacuaaaaauuuauuuaauaaaaguuuuac

SEQ ID NO: 13821 - RNA, 32 nt, Homo Sapiens
caagugauagucuuuuuuuuuaaguguuucgu

SEQ ID NO: 13822 - RNA, 32 nt, Homo Sapiens
cauagaagucauuugguguuggagguggguuu

SEQ ID NO: 13823 - RNA, 32 nt, Homo Sapiens
aagcuuuuaagaugaauuguuauacaagaggu

SEQ ID NO: 13824 - RNA, 32 nt, Homo Sapiens
gacagcuccuucccuacucauucccugcccaa

SEQ ID NO: 13825 - RNA, 32 nt, Homo Sapiens
aguagugaaaagccgggaucccugcccccgag

SEQ ID NO: 13826 - RNA, 32 nt, Homo Sapiens
uuauuuugauucauccuacuguucuaaccaaa

SEQ ID NO: 13827 - RNA, 32 nt, Homo Sapiens
gagacaaugaugcuaguuugcauauguuuucc

SEQ ID NO: 13828 - RNA, 32 nt, Homo Sapiens
acaggaacaccguggcgcugaccacgcccauc

SEQ ID NO: 13829 - RNA, 32 nt, Homo Sapiens
guaaauauauucaaauuauguauaaauauaua

SEQ ID NO: 13830 - RNA, 32 nt, Homo Sapiens
gagcagcagcagcagcagcagcagcaacaaca

SEQ ID NO: 13831 - RNA, 32 nt, Homo Sapiens
augcccagcuccgcgccgcgcggacccaccga

SEQ ID NO: 13832 - RNA, 32 nt, Homo Sapiens
cggggcuucucacucugacgggcccgcgcgca

SEQ ID NO: 13833 - RNA, 31 nt, Homo Sapiens
gaaguauuguuuagguagcaagauugggaaa

SEQ ID NO: 13834 - RNA, 32 nt, Homo Sapiens
acuccaugguguucucugugucucucuuugug

SEQ ID NO: 13835 - RNA, 32 nt, Homo Sapiens
agucaccacgggggcucgagauagcuuccugg

SEQ ID NO: 13836 - RNA, 32 nt, Homo Sapiens
accgggccggacuguacagagcccugcugcgg

SEQ ID NO: 13837 - RNA, 32 nt, Homo Sapiens
ugggggaggaggaggcaggcagcaccagcagg

SEQ ID NO: 13838 - RNA, 32 nt, Homo Sapiens
agguugagggcuuauucagugggggaggugca

SEQ ID NO: 13839 - RNA, 32 nt, Homo Sapiens
gcagggauucacgggcgcacacacacacacuc

SEQ ID NO: 13840 - RNA, 32 nt, Homo Sapiens
uuagcacccgggcgccggggcccucgcccuuc

SEQ ID NO: 13841 - RNA, 32 nt, Homo Sapiens
aggaugaugacaucuuggauugcuaaagagaa

SEQ ID NO: 13842 - RNA, 32 nt, Homo Sapiens
auguuguuuauagccuaacaguuauuugauuu

SEQ ID NO: 13843 - RNA, 32 nt, Homo Sapiens
gcccagcuggcccggccaugcugcuggagaca

SEQ ID NO: 13844 - RNA, 32 nt, Homo Sapiens
guagaggaguccuugaaggauucuucauuguu

SEQ ID NO: 13845 - RNA, 32 nt, Homo Sapiens
gacuggccccacuugguccuaaaaaucccaag

SEQ ID NO: 13846 - RNA, 32 nt, Homo Sapiens
aggcuuggaauguauuuauuuauauuuauuuu

SEQ ID NO: 13847 - RNA, 32 nt, Homo Sapiens
auauuauaugguaacuuuuguaaaauguuacu

SEQ ID NO: 13848 - RNA, 32 nt, Homo Sapiens
uuaccuuaaggggcuccucuuaucuccccuuc

SEQ ID NO: 13849 - RNA, 32 nt, Homo Sapiens
cuugccuucauuucucuuuuuaucucccccuu

SEQ ID NO: 13850 - RNA, 32 nt, Homo Sapiens
guguuucuagccuccgccuccaggcgggugag

SEQ ID NO: 13851 - RNA, 32 nt, Homo Sapiens
uuuuuucuguucuuuccagcuguccuucuacu

SEQ ID NO: 13852 - RNA, 32 nt, Homo Sapiens
gaauguaauaaaauaaaagaaaaguaacuauu

SEQ ID NO: 13853 - RNA, 32 nt, Homo Sapiens
cuggccuuuggaaccucuccauauacuuucua

SEQ ID NO: 13854 - RNA, 32 nt, Homo Sapiens
uguacauuuuuaaaguuugaguuuuuagcuca

SEQ ID NO: 13855 - RNA, 32 nt, Homo Sapiens
uuguuuccuaaaacuuuuauuuugaggagcag

SEQ ID NO: 13856 - RNA, 32 nt, Homo Sapiens
uugaaaguucccuucuccacccaggggcagug

SEQ ID NO: 13857 - RNA, 32 nt, Homo Sapiens
uggggaggggagaaagggagauggguaguauc

SEQ ID NO: 13858 - RNA, 32 nt, Homo Sapiens
cugucucaaagagauauuaaauuuuauacauu

SEQ ID NO: 13859 - RNA, 32 nt, Homo Sapiens
cuguggaucagcauuuuagaaacuacaaauau

SEQ ID NO: 13860 - RNA, 32 nt, Homo Sapiens
gagcgucgccuggagcccuggcacugaggggc

SEQ ID NO: 13861 - RNA, 32 nt, Homo Sapiens
acccuggauuguaggaaaguuaagcaggcacc

SEQ ID NO: 13862 - RNA, 32 nt, Homo Sapiens
uauguguaaaugaucacaaaaauguauuuuau

SEQ ID NO: 13863 - RNA, 32 nt, Homo Sapiens
agccugggccucggggaaggaagggcaugagg

SEQ ID NO: 13864 - RNA, 32 nt, Homo Sapiens
agaccaguagcugacuguguccgccgagccca

SEQ ID NO: 13865 - RNA, 32 nt, Homo Sapiens
uacucuggaagcccggcccacugcagagugac

SEQ ID NO: 13866 - RNA, 30 nt, Homo Sapiens
ggccaaggcaggcagcaguggggcugugac

SEQ ID NO: 13867 - RNA, 32 nt, Homo Sapiens
uaaaauuacaguggauugcucaucucaguccu

SEQ ID NO: 13868 - RNA, 32 nt, Homo Sapiens
guauugcuuauugugacuuuggcaugcauuuu

SEQ ID NO: 13869 - RNA, 32 nt, Homo Sapiens
ccuccaggcacccccaggauucccagagagac

SEQ ID NO: 13870 - RNA, 32 nt, Homo Sapiens
agccagcgugagcucagcuuggaccaagacaa

SEQ ID NO: 13871 - RNA, 32 nt, Homo Sapiens
auuuauuggauguuaugacagauuuuacuaaa

SEQ ID NO: 13872 - RNA, 32 nt, Homo Sapiens
gugucuccaagcccccaccauccuggagacag

SEQ ID NO: 13873 - RNA, 32 nt, Homo Sapiens
aucauuuaacaucaguguaagaugcaauuaaa

SEQ ID NO: 13874 - RNA, 32 nt, Homo Sapiens
aaaccuguuuuaaaauuuuagggaucuuuacu

SEQ ID NO: 13875 - RNA, 32 nt, Homo Sapiens
cuaguaagaggaucuuacacuguuggguuucu

SEQ ID NO: 13876 - RNA, 32 nt, Homo Sapiens
ccacugugugaaugaaggacuacuucaggguu

SEQ ID NO: 13877 - RNA, 32 nt, Homo Sapiens
gccgugcagguugaagguagcauuguaacauu

SEQ ID NO: 13878 - RNA, 32 nt, Homo Sapiens
uacauugcauauugacaacuagguucuauaau

SEQ ID NO: 13879 - RNA, 32 nt, Homo Sapiens
auggcaaaucugaguggcuucucuaagcaucu

SEQ ID NO: 13880 - RNA, 32 nt, Homo Sapiens
aucauugacacucugaguugugagauuucugg

SEQ ID NO: 13881 - RNA, 32 nt, Homo Sapiens
ccggaccccgcccaauaaagagugcguggcaa

SEQ ID NO: 13882 - RNA, 32 nt, Homo Sapiens
cucugaaggcuuuuuacccagcaauguccuca

SEQ ID NO: 13883 - RNA, 32 nt, Homo Sapiens
guuuagagauaaaauguacauuauuuugguuc

SEQ ID NO: 13884 - RNA, 32 nt, Homo Sapiens
aaaucuaaauacuuuauauagggauggcagag

SEQ ID NO: 13885 - RNA, 32 nt, Homo Sapiens
guuacaaggggcugcugcugcugcugggaauc

SEQ ID NO: 13886 - RNA, 32 nt, Homo Sapiens
acgaggucaggagaucgagaacagccuggcua

SEQ ID NO: 13887 - RNA, 32 nt, Homo Sapiens
gggagaugugaacuccaauuaagggacuggag

SEQ ID NO: 13888 - RNA, 32 nt, Homo Sapiens
uaugacagcaacaaauaagauacauaaaacua

SEQ ID NO: 13889 - RNA, 32 nt, Homo Sapiens
gcucugggccagggcucugugccggccccuca

SEQ ID NO: 13890 - RNA, 32 nt, Homo Sapiens
aaucagauggaaaauuaaaccggguaaucuac

SEQ ID NO: 13891 - RNA, 31 nt, Homo Sapiens
aggaggaggaggucaucgacggcuucgccau

SEQ ID NO: 13892 - RNA, 30 nt, Homo Sapiens
gagaccggagcgacccgcgcagcgagcaua

SEQ ID NO: 13893 - RNA, 32 nt, Homo Sapiens
uauaaaugaaagauuauuuagucaccuuucuc

SEQ ID NO: 13894 - RNA, 32 nt, Homo Sapiens
uagaaugggaucacgaggaaaagagaaggaaa

SEQ ID NO: 13895 - RNA, 32 nt, Homo Sapiens
cuccuccccguccccgcccagccccaggucuc

SEQ ID NO: 13896 - RNA, 32 nt, Homo Sapiens
cuaauaugcaacaaaguugaaaaccacugauc

SEQ ID NO: 13897 - RNA, 32 nt, Homo Sapiens
agaaauuguucauuaaaucccauuugagguau

SEQ ID NO: 13898 - RNA, 32 nt, Homo Sapiens
uauacaucguuaugaaaauauugcuaugagau

SEQ ID NO: 13899 - RNA, 32 nt, Homo Sapiens
cguaauuuguuguuuauuucuucagugaacau

SEQ ID NO: 13900 - RNA, 32 nt, Homo Sapiens
gcccggucgacccgccgccgccgagcauggac

SEQ ID NO: 13901 - RNA, 32 nt, Homo Sapiens
aauaacugguagaagggaaauuuuaaacauaa

SEQ ID NO: 13902 - RNA, 32 nt, Homo Sapiens
gaagcaauguaacaguguaaucuaguucaauu

SEQ ID NO: 13903 - RNA, 32 nt, Homo Sapiens
cacaugaugauuauguuuuuguuuaacaauuc

SEQ ID NO: 13904 - RNA, 32 nt, Homo Sapiens
ccacuuggaaagccaacguuauccuagaaaag

SEQ ID NO: 13905 - RNA, 32 nt, Homo Sapiens
aguucuccccaccgccccuguacgcgucaucc

SEQ ID NO: 13906 - RNA, 32 nt, Homo Sapiens
ucuguucugccccccuuucguuuuccggagac

SEQ ID NO: 13907 - RNA, 32 nt, Homo Sapiens
uguuauuucuauuuauaauauucagcaaaagu

SEQ ID NO: 13908 - RNA, 32 nt, Homo Sapiens
ggguagaaggcggagccggagccccggaaccc

SEQ ID NO: 13909 - RNA, 32 nt, Homo Sapiens
augugggcauccugggguucuuagggucccag

SEQ ID NO: 13910 - RNA, 31 nt, Homo Sapiens
ugcucugccgcgcggugaccccgcgccccgg

SEQ ID NO: 13911 - RNA, 32 nt, Homo Sapiens
uggaggccccgggaucucucgcagugugggga

SEQ ID NO: 13912 - RNA, 32 nt, Homo Sapiens
uauacuuucuucauauuuugguuuuuagcuga

SEQ ID NO: 13913 - RNA, 32 nt, Homo Sapiens
gcuucucaaaaaaacaaacaaacaaacaaaca

SEQ ID NO: 13914 - RNA, 32 nt, Homo Sapiens
ucagcaaucggacaucucuggggaaaggaagg

SEQ ID NO: 13915 - RNA, 32 nt, Homo Sapiens
uucuucaaacaaaacugcucuugugcaauauu

SEQ ID NO: 13916 - RNA, 31 nt, Homo Sapiens
gguggugcaagguccugcagcaucuuacauc

SEQ ID NO: 13917 - RNA, 32 nt, Homo Sapiens
gguguucguguuagugccaagauugcuucguu

SEQ ID NO: 13918 - RNA, 32 nt, Homo Sapiens
acugcauuucuaauaaaaauuuauugagugaa

SEQ ID NO: 13919 - RNA, 32 nt, Homo Sapiens
acaccccagccggcuuccuggccagggcauuu

SEQ ID NO: 13920 - RNA, 32 nt, Homo Sapiens
auuaauuuuuuuuuccuuaaaaucacuuuucu

SEQ ID NO: 13921 - RNA, 32 nt, Homo Sapiens
gggacgccgcacgcggccccagacucagggag

SEQ ID NO: 13922 - RNA, 32 nt, Homo Sapiens
ucucaugccugcccuugcccagaugcccaggg

SEQ ID NO: 13923 - RNA, 32 nt, Homo Sapiens
ccccagcucccgcuccgggcuccgacuugugc

SEQ ID NO: 13924 - RNA, 32 nt, Homo Sapiens
ucccacucaccagcccuagcugucccaugggg

SEQ ID NO: 13925 - RNA, 31 nt, Homo Sapiens
ugcugucccugcacugugccccgcgggcuuu

SEQ ID NO: 13926 - RNA, 32 nt, Homo Sapiens
gauauuuaugugaacuuaaaccucuuuguaaa

SEQ ID NO: 13927 - RNA, 32 nt, Homo Sapiens
gcagaggcggggccggcagagaaggggccucc

SEQ ID NO: 13928 - RNA, 32 nt, Homo Sapiens
augcugggccccagcccaggucugcacucgcc

SEQ ID NO: 13929 - RNA, 32 nt, Homo Sapiens
cuucauuacuucuuggguauuggugggugggu

SEQ ID NO: 13930 - RNA, 31 nt, Homo Sapiens
caacuuugggauaauuaauauauaguauugu

SEQ ID NO: 13931 - RNA, 32 nt, Homo Sapiens
gggcuggagcugucgggagggcggagcuacag

SEQ ID NO: 13932 - RNA, 32 nt, Homo Sapiens
ggacaccacaguggaagcugguggccuggaag

SEQ ID NO: 13933 - RNA, 32 nt, Homo Sapiens
ccaagcugcaggcgagcugccgggcgcuuuuc

SEQ ID NO: 13934 - RNA, 32 nt, Homo Sapiens
uuuuuaauuuuuguuuuuguuuuugagacgga

SEQ ID NO: 13935 - RNA, 32 nt, Homo Sapiens
gguuuaggagucacgcagcuggaggcuacaag

SEQ ID NO: 13936 - RNA, 32 nt, Homo Sapiens
uuauuuagaauguuuaagauuguacagucaga

SEQ ID NO: 13937 - RNA, 32 nt, Homo Sapiens
gcuaacacuuaucacuuauacuaccaauaacu

SEQ ID NO: 13938 - RNA, 32 nt, Homo Sapiens
uugauaaaaaauuuauuauguccauuauucaa

SEQ ID NO: 13939 - RNA, 32 nt, Homo Sapiens
auuauccaacauauuucuuuaauuuuaauaca

SEQ ID NO: 13940 - RNA, 32 nt, Homo Sapiens
ucuuuuuucuuuucuuuuuuuuuuuuuuuuuu

SEQ ID NO: 13941 - RNA, 32 nt, Homo Sapiens
ugauuguuuuuagagacacggcagcugcaaag

SEQ ID NO: 13942 - RNA, 32 nt, Homo Sapiens
cuuagucuauagaaaugaucauugcauggagg

SEQ ID NO: 13943 - RNA, 32 nt, Homo Sapiens
aggacauucauuucuucagcagcccauuagca

SEQ ID NO: 13944 - RNA, 32 nt, Homo Sapiens
agagcuuuuuucucauggugcugcuguguuag

SEQ ID NO: 13945 - RNA, 32 nt, Homo Sapiens
cauugauauaucuggagaaaucaaugcuacag

SEQ ID NO: 13946 - RNA, 32 nt, Homo Sapiens
gaagauggagaacgggggugggacagaguugu

SEQ ID NO: 13947 - RNA, 32 nt, Homo Sapiens
ggagggggguggcaguggagggagcgagaggu

SEQ ID NO: 13948 - RNA, 32 nt, Homo Sapiens
cccugaacauugcuguuauccuguucuuuuuu

SEQ ID NO: 13949 - RNA, 32 nt, Homo Sapiens
ucagaaugggauuaaaaauuuuagaagcagaa

SEQ ID NO: 13950 - RNA, 32 nt, Homo Sapiens
ucccaggaccagagccucucccggccccagcg

SEQ ID NO: 13951 - RNA, 32 nt, Homo Sapiens
gugugggggauacguaaucuggacuucucaaa

SEQ ID NO: 13952 - RNA, 32 nt, Homo Sapiens
auauguucugaggguuguuuugucucguguuc

SEQ ID NO: 13953 - RNA, 32 nt, Homo Sapiens
gcgcaggcucugcaggaaggcgcacggcagcc

SEQ ID NO: 13954 - RNA, 32 nt, Homo Sapiens
ugagcucuggugucacucaucuccaugaucau

SEQ ID NO: 13955 - RNA, 32 nt, Homo Sapiens
aauguaaaugaaucuagaugauuuugaagaaa

SEQ ID NO: 13956 - RNA, 32 nt, Homo Sapiens
cauccaggugggaggugucagagcccagcuca

SEQ ID NO: 13957 - RNA, 32 nt, Homo Sapiens
gccagugugcacccgguucgggccccugcgcc

SEQ ID NO: 13958 - RNA, 32 nt, Homo Sapiens
gaaaauccgcgggccggagccacgcgccugug

SEQ ID NO: 13959 - RNA, 32 nt, Homo Sapiens
cggagcccgcggccaccgccgccugaucagcg

SEQ ID NO: 13960 - RNA, 32 nt, Homo Sapiens
cucuucuuuccuucuuuuuuuuuuuuuuuuuu

SEQ ID NO: 13961 - RNA, 30 nt, Homo Sapiens
cauacugucugugcugauggcuuggcuuaa

SEQ ID NO: 13962 - RNA, 32 nt, Homo Sapiens
aagacaaagcuacugccuucuagagacaaccg

SEQ ID NO: 13963 - RNA, 32 nt, Homo Sapiens
cugagagucucacucugucacccaggcuggag

SEQ ID NO: 13964 - RNA, 32 nt, Homo Sapiens
ggcacccggagcucgguagcgcggcgggcaag

SEQ ID NO: 13965 - RNA, 32 nt, Homo Sapiens
uacaucccacacaccauccuccaggucuggga

SEQ ID NO: 13966 - RNA, 32 nt, Homo Sapiens
ugcguugugugcgguuaccugcuugagugauc

SEQ ID NO: 13967 - RNA, 32 nt, Homo Sapiens
ggucaaugaaggaaacagugccuguccaccca

SEQ ID NO: 13968 - RNA, 32 nt, Homo Sapiens
ggccgggcaugguggcucacaccuguggucuc

SEQ ID NO: 13969 - RNA, 31 nt, Homo Sapiens
ugguugucuucuugccugcccuguguuguaa

SEQ ID NO: 13970 - RNA, 32 nt, Homo Sapiens
augauggagcaggggcauagcgugccuugccc

SEQ ID NO: 13971 - RNA, 32 nt, Homo Sapiens
ggcgguacacagcgcgcagagccgccgagcag

SEQ ID NO: 13972 - RNA, 32 nt, Homo Sapiens
guuauuacucugucuugaaauaggaagguggg

SEQ ID NO: 13973 - RNA, 32 nt, Homo Sapiens
agcguccccgcgggcucugaggcgcucagccg

SEQ ID NO: 13974 - RNA, 32 nt, Homo Sapiens
ucacauuuucugaaaacaauuguucuugguuu

SEQ ID NO: 13975 - RNA, 32 nt, Homo Sapiens
cuugaaaaugucagugugauaucuauuaugua

SEQ ID NO: 13976 - RNA, 32 nt, Homo Sapiens
auacagaggaagaacagggugaugaggguacu

SEQ ID NO: 13977 - RNA, 32 nt, Homo Sapiens
cugcugcccucccauucucccccuccaguagu

SEQ ID NO: 13978 - RNA, 32 nt, Homo Sapiens
aacaguuuuuuacauauuaaauauguucuacu

SEQ ID NO: 13979 - RNA, 32 nt, Homo Sapiens
cgccaugcagggcucgcgugcgggaaaacuaa

SEQ ID NO: 13980 - RNA, 32 nt, Homo Sapiens
ucacaaaaaaagacauagauauuuaggcugau

SEQ ID NO: 13981 - RNA, 32 nt, Homo Sapiens
aaacaaguccuaucuuuuuuuuuuuggcuggg

SEQ ID NO: 13982 - RNA, 32 nt, Homo Sapiens
ucuggcccgcggagcggucccgcggccgagua

SEQ ID NO: 13983 - RNA, 32 nt, Homo Sapiens
ucuuuuccccgugggcuccggcgugaggcgcu

SEQ ID NO: 13984 - RNA, 32 nt, Homo Sapiens
agggaauaccgacgagacgagcugcacugucu

SEQ ID NO: 13985 - RNA, 32 nt, Homo Sapiens
ccccgagcccccagccagccugggccccccag

SEQ ID NO: 13986 - RNA, 32 nt, Homo Sapiens
aaguuuuguaaaagaaaucauguccauacacu

SEQ ID NO: 13987 - RNA, 32 nt, Homo Sapiens
uccaugucauggguuauugugaggauaaaaca

SEQ ID NO: 13988 - RNA, 32 nt, Homo Sapiens
ucacuggccccggccuuugccccaaucuugug

SEQ ID NO: 13989 - RNA, 32 nt, Homo Sapiens
ccagcuuuucccuugugguggccucuccaggc

SEQ ID NO: 13990 - RNA, 30 nt, Homo Sapiens
ugggcuaucaccccuuucauuuagaccuac

SEQ ID NO: 13991 - RNA, 31 nt, Homo Sapiens
agugggagggcggagggcgggggccuucggg

SEQ ID NO: 13992 - RNA, 32 nt, Homo Sapiens
caaaauuccaguuauuuauuuccaaaauguuu

SEQ ID NO: 13993 - RNA, 32 nt, Homo Sapiens
ccacggugguccaugacugcggaacugcccag

SEQ ID NO: 13994 - RNA, 30 nt, Homo Sapiens
uccagccaugcucuccgcccucgcccggcc

SEQ ID NO: 13995 - RNA, 32 nt, Homo Sapiens
aagugcucaaagacauggcaaccguucagugg

SEQ ID NO: 13996 - RNA, 32 nt, Homo Sapiens
cuugugucugugggcaggccgauuacuggaag

SEQ ID NO: 13997 - RNA, 32 nt, Homo Sapiens
ugcuuuuuuaaaaacaaacaaacaaacaaaaa

SEQ ID NO: 13998 - RNA, 32 nt, Homo Sapiens
caggauuaggaggugugagauauuuuagcuuu

SEQ ID NO: 13999 - RNA, 32 nt, Homo Sapiens
agagcauuuuccauagccuucccacaggcaga

SEQ ID NO: 14000 - RNA, 32 nt, Homo Sapiens
gcgggcgggaggaggugagcaccaggcccacu

SEQ ID NO: 14001 - RNA, 32 nt, Homo Sapiens
gccggacccgcggccgcguucggaaaucagcc

SEQ ID NO: 14002 - RNA, 32 nt, Homo Sapiens
gccuaggcgcgcggaccugcgagcggacccga

SEQ ID NO: 14003 - RNA, 32 nt, Homo Sapiens
augagaaucuuguuuuaaaauguaauuucuaa

SEQ ID NO: 14004 - RNA, 32 nt, Homo Sapiens
gcaguaaaugucugaaaaaauaucaaaaacag

SEQ ID NO: 14005 - RNA, 32 nt, Homo Sapiens
guuuaaauaauuuacaauauaaacuguaaaac

SEQ ID NO: 14006 - RNA, 32 nt, Homo Sapiens
gaccacucaucacauuaaaaaauauuuugaaa

SEQ ID NO: 14007 - RNA, 32 nt, Homo Sapiens
uuagccaaauuucucucuguuuuauauauguc

SEQ ID NO: 14008 - RNA, 32 nt, Homo Sapiens
guugcuggugcuacauggcggcagcuuugaca

SEQ ID NO: 14009 - RNA, 32 nt, Homo Sapiens
ccagccccgcucggcgauccccggcgccgucg

SEQ ID NO: 14010 - RNA, 32 nt, Homo Sapiens
gagcggcucgggcgggcucuugacgcucagcc

SEQ ID NO: 14011 - RNA, 32 nt, Homo Sapiens
ugcugugagcaagaagucaaaguaaaacuugc

SEQ ID NO: 14012 - RNA, 32 nt, Homo Sapiens
agccgccugcagagccggaagccacccaaccu

SEQ ID NO: 14013 - RNA, 32 nt, Homo Sapiens
uaucuuucaaccaaguaucuggaguguucacu

SEQ ID NO: 14014 - RNA, 32 nt, Homo Sapiens
uaggucauuagcccucgucucccguucccuuu

SEQ ID NO: 14015 - RNA, 32 nt, Homo Sapiens
gacgaccacauacggccacgcggggugcccuc

SEQ ID NO: 14016 - RNA, 32 nt, Homo Sapiens
aacuggcuuguacauuuuuaaauucuuacucu

SEQ ID NO: 14017 - RNA, 32 nt, Homo Sapiens
uuacuauaaaauguauguaaugauuuguuuua

SEQ ID NO: 14018 - RNA, 32 nt, Homo Sapiens
gccugcugugugcggagccguccagcgaccac

SEQ ID NO: 14019 - RNA, 32 nt, Homo Sapiens
cugcugcugccucuaccgcugcggcuaccgcg

SEQ ID NO: 14020 - RNA, 32 nt, Homo Sapiens
gaggaaugggccgggcccggcugggaaggcag

SEQ ID NO: 14021 - RNA, 32 nt, Homo Sapiens
aaugucuacuuuuucagcaguucugugaauua

SEQ ID NO: 14022 - RNA, 32 nt, Homo Sapiens
augugugccuuuauacauuucaucucuguuuu

SEQ ID NO: 14023 - RNA, 32 nt, Homo Sapiens
gugcauauguauacauacacacacauauaugg

SEQ ID NO: 14024 - RNA, 32 nt, Homo Sapiens
cagagggugugcucuguggaggagaacacuua

SEQ ID NO: 14025 - RNA, 32 nt, Homo Sapiens
agcaccucaguccagccaaaauguuuagaaac

SEQ ID NO: 14026 - RNA, 32 nt, Homo Sapiens
cauacuuucuuacauguuuccauuuuuaaaua

SEQ ID NO: 14027 - RNA, 32 nt, Homo Sapiens
ccagagacagcaucucagauaccgaugcugaa

SEQ ID NO: 14028 - RNA, 30 nt, Homo Sapiens
ccaugucuggacugcaaguaugggaagcag

SEQ ID NO: 14029 - RNA, 32 nt, Homo Sapiens
ccucaagaucuuuguuuccacaaacuaugcag

SEQ ID NO: 14030 - RNA, 32 nt, Homo Sapiens
agcacucccuauccuuucccugaccccagacc

SEQ ID NO: 14031 - RNA, 32 nt, Homo Sapiens
gaaggaagaaccuguagaagaugaccucguuc

SEQ ID NO: 14032 - RNA, 32 nt, Homo Sapiens
augacgauuuuacuguauuuuucugagcaaac

SEQ ID NO: 14033 - RNA, 32 nt, Homo Sapiens
acaggaugagcagauuuugaaguagaaauaaa

SEQ ID NO: 14034 - RNA, 32 nt, Homo Sapiens
uuaaauucuuugagauccaaagauggccucuu

SEQ ID NO: 14035 - RNA, 32 nt, Homo Sapiens
ggagagagcauauccaucuccuccucacugcc

SEQ ID NO: 14036 - RNA, 32 nt, Homo Sapiens
gccgggcacggcaucgggggccuggacugcac

SEQ ID NO: 14037 - RNA, 32 nt, Homo Sapiens
ccacucaccaggccucuccuccccucugcccc

SEQ ID NO: 14038 - RNA, 32 nt, Homo Sapiens
gccucucgcucacuccucccagcccaguaaug

SEQ ID NO: 14039 - RNA, 32 nt, Homo Sapiens
cagggagggugaugaaggacugacccacaugg

SEQ ID NO: 14040 - RNA, 32 nt, Homo Sapiens
aguaguuccuuccucuuucuccucuccaauuu

SEQ ID NO: 14041 - RNA, 32 nt, Homo Sapiens
ugugagaugaggcaacuuccaaugcuucucua

SEQ ID NO: 14042 - RNA, 32 nt, Homo Sapiens
ccggcgacauggccagcuccggagaggacaua

SEQ ID NO: 14043 - RNA, 32 nt, Homo Sapiens
cugaccugagggugggggcuacuaugcuggga

SEQ ID NO: 14044 - RNA, 32 nt, Homo Sapiens
caacuuuuaaggaagugcuaagaucagucacc

SEQ ID NO: 14045 - RNA, 32 nt, Homo Sapiens
cuuacuuacuagacauaacugaauguaaaaag

SEQ ID NO: 14046 - RNA, 32 nt, Homo Sapiens
cuucagaugauuauaaucuaacccaaacuagc

SEQ ID NO: 14047 - RNA, 32 nt, Homo Sapiens
cugcugggccccaaaguugggcauuuuucucu

SEQ ID NO: 14048 - RNA, 32 nt, Homo Sapiens
gaagaguuuguccaaugucauagccccguaau

SEQ ID NO: 14049 - RNA, 32 nt, Homo Sapiens
uuuaaaggaaggcaauagggccaggcauggug

SEQ ID NO: 14050 - RNA, 32 nt, Homo Sapiens
aguuaaugacucccucuccccagcuguccucc

SEQ ID NO: 14051 - RNA, 32 nt, Homo Sapiens
aggacuugaacaaaaaugacagauacaaacua

SEQ ID NO: 14052 - RNA, 32 nt, Homo Sapiens
cagggaugugaaugugaauggagcaaggcguu

SEQ ID NO: 14053 - RNA, 32 nt, Homo Sapiens
ccaaguuuuaacucaggaagacuuccagaaaa

SEQ ID NO: 14054 - RNA, 32 nt, Homo Sapiens
gcgccgcggccccgugcggugucccugagcuc

SEQ ID NO: 14055 - RNA, 32 nt, Homo Sapiens
cauuauagauaccaccucagaggccuauuuuc

SEQ ID NO: 14056 - RNA, 32 nt, Homo Sapiens
ccacuuagccacugcuacuuaagcaaggaagc

SEQ ID NO: 14057 - RNA, 32 nt, Homo Sapiens
gggcagcacgggggggcagaucggggcugcgg

SEQ ID NO: 14058 - RNA, 32 nt, Homo Sapiens
uaguuaaaugaaauuuuagcuacacacugccu

SEQ ID NO: 14059 - RNA, 32 nt, Homo Sapiens
gaugggcuuccuaagagacaagggugggugga

SEQ ID NO: 14060 - RNA, 32 nt, Homo Sapiens
agacuggcggggggcccauuggggggaagggg

SEQ ID NO: 14061 - RNA, 32 nt, Homo Sapiens
uuuaaagaucacauuuuccaugaacgccucua

SEQ ID NO: 14062 - RNA, 32 nt, Homo Sapiens
aucuguaaauguuuaauaaauaucugagcaug

SEQ ID NO: 14063 - RNA, 32 nt, Homo Sapiens
uuuugcuuccccacugcccccugcccuccagc

SEQ ID NO: 14064 - RNA, 29 nt, Homo Sapiens
cggguccggggacagcgggcgaggggcag

SEQ ID NO: 14065 - RNA, 32 nt, Homo Sapiens
gcugccgcgaugcugguggcggcggccgcgga

SEQ ID NO: 14066 - RNA, 32 nt, Homo Sapiens
aauagaauacuguuaccaaauucuucauaaga

SEQ ID NO: 14067 - RNA, 32 nt, Homo Sapiens
agccucauuucccgcuggaucguccucugccc

SEQ ID NO: 14068 - RNA, 32 nt, Homo Sapiens
agggcgcccggcucagccuucccggaggccuc

SEQ ID NO: 14069 - RNA, 32 nt, Homo Sapiens
caacauaugcauuugggggaggggacaccauu

SEQ ID NO: 14070 - RNA, 32 nt, Homo Sapiens
ugcugguggaugagaauguucuggccacuggg

SEQ ID NO: 14071 - RNA, 32 nt, Homo Sapiens
augaaacaacggugaccucuccaggucggcac

SEQ ID NO: 14072 - RNA, 27 nt, Homo Sapiens
caggguucugcuuucagccccaccugg

SEQ ID NO: 14073 - RNA, 32 nt, Homo Sapiens
ggggcagugggccaugcugggggcaguggaag

SEQ ID NO: 14074 - RNA, 32 nt, Homo Sapiens
cuuaaugcuucuuucauuuucuguuuguuuua

SEQ ID NO: 14075 - RNA, 32 nt, Homo Sapiens
ugaucagaacacugaggcucagagaaguuaac

SEQ ID NO: 14076 - RNA, 32 nt, Homo Sapiens
ggaugcucucaauaauggaacugacauugacu

SEQ ID NO: 14077 - RNA, 32 nt, Homo Sapiens
cucugaccccgcgaugaguguuuugguggcag

SEQ ID NO: 14078 - RNA, 32 nt, Homo Sapiens
caauguucauaaauauuuaagcaaauuaaaga

SEQ ID NO: 14079 - RNA, 32 nt, Homo Sapiens
ucuucuuguaaauaguauuuaccaguuagcaa

SEQ ID NO: 14080 - RNA, 32 nt, Homo Sapiens
ggguacccgccagagccccgacgccgcgccgg

SEQ ID NO: 14081 - RNA, 32 nt, Homo Sapiens
aacuucccccacggaggcgccauggacacgca

SEQ ID NO: 14082 - RNA, 32 nt, Homo Sapiens
cuccaugcugugugcugcaggcugguccugaa

SEQ ID NO: 14083 - RNA, 32 nt, Homo Sapiens
cuauauccauucuuuauaucaauguauaguuu

SEQ ID NO: 14084 - RNA, 32 nt, Homo Sapiens
uauuuaaaacaaagugcaguuccaacaauauu

SEQ ID NO: 14085 - RNA, 32 nt, Homo Sapiens
auuaaagauaaaaauuuuggcuggaugcaaug

SEQ ID NO: 14086 - RNA, 32 nt, Homo Sapiens
uccuugcgucccgccucccugggagcuccgca

SEQ ID NO: 14087 - RNA, 32 nt, Homo Sapiens
ccggacacccgaaggcaauaaaacaggagccg

SEQ ID NO: 14088 - RNA, 32 nt, Homo Sapiens
guauuccacuuacuccaccuuccauuccucgc

SEQ ID NO: 14089 - RNA, 32 nt, Homo Sapiens
auauuaugacuucuuauauuaacacguuuuac

SEQ ID NO: 14090 - RNA, 32 nt, Homo Sapiens
cuacccaaccucaccggaauguaagcaucucc

SEQ ID NO: 14091 - RNA, 32 nt, Homo Sapiens
cugacaccaacccaggcagcucugcuguggcu

SEQ ID NO: 14092 - RNA, 32 nt, Homo Sapiens
ggcugggacucuggaggcuccuccccuucuuu

SEQ ID NO: 14093 - RNA, 32 nt, Homo Sapiens
ccacuuuccugccagcacauguuucugggucu

SEQ ID NO: 14094 - RNA, 32 nt, Homo Sapiens
acccuuccaagccccacagguucugagggagu

SEQ ID NO: 14095 - RNA, 32 nt, Homo Sapiens
cagagcucugagcagcagcaggcaacuucgag

SEQ ID NO: 14096 - RNA, 32 nt, Homo Sapiens
caccuagaaauucgugucaccgccaaggucac

SEQ ID NO: 14097 - RNA, 32 nt, Homo Sapiens
acagcgccgggcggcggcggggagaugcggcu

SEQ ID NO: 14098 - RNA, 32 nt, Homo Sapiens
cggugguggcggugcaagagagcugagggagg

SEQ ID NO: 14099 - RNA, 32 nt, Homo Sapiens
cagccggucccuccggccgccgccauguccuc

SEQ ID NO: 14100 - RNA, 32 nt, Homo Sapiens
agcgucugacaugugguggcagcaaauucguc

SEQ ID NO: 14101 - RNA, 29 nt, Homo Sapiens
gggguuucuauccuuccagaaaaauuggg

SEQ ID NO: 14102 - RNA, 32 nt, Homo Sapiens
gauacuaagaaacuaagaagcuuaaugaaaag

SEQ ID NO: 14103 - RNA, 32 nt, Homo Sapiens
ccggcucucauggauuccacagcaaauaaaac

SEQ ID NO: 14104 - RNA, 32 nt, Homo Sapiens
gccggccggcgccucaacagagcgcgccaggg

SEQ ID NO: 14105 - RNA, 32 nt, Homo Sapiens
uuggacaaugguguauggugggaaagugcuca

SEQ ID NO: 14106 - RNA, 32 nt, Homo Sapiens
cugguaaaucauaacuaaauauuauaucaaua

SEQ ID NO: 14107 - RNA, 32 nt, Homo Sapiens
aaagcaauugcaaagaucuaggagguaagaga

SEQ ID NO: 14108 - RNA, 32 nt, Homo Sapiens
gacaccagucauaguggauuaaggguccacuc

SEQ ID NO: 14109 - RNA, 32 nt, Homo Sapiens
accuagggacacggcgacgugggaucagacaa

SEQ ID NO: 14110 - RNA, 32 nt, Homo Sapiens
gguacugccgcuacugcugccggcgcgucugc

SEQ ID NO: 14111 - RNA, 32 nt, Homo Sapiens
ugugaagaauacugcuuaucucagagugaaga

SEQ ID NO: 14112 - RNA, 32 nt, Homo Sapiens
cucugcuucuuagcccacauuccuccgggccu

SEQ ID NO: 14113 - RNA, 32 nt, Homo Sapiens
ucaaaucacuuccacuuuccugugcccccacc

SEQ ID NO: 14114 - RNA, 32 nt, Homo Sapiens
ugauuugaaauagaugauaugauaaaacaugc

SEQ ID NO: 14115 - RNA, 32 nt, Homo Sapiens
ucaauacuuuuuuuuucuuaauugcauuuguu

SEQ ID NO: 14116 - RNA, 32 nt, Homo Sapiens
ucaaagauuuuuuuuucuuuuucucauauaag

SEQ ID NO: 14117 - RNA, 32 nt, Homo Sapiens
uuaugauugauguauuuuaucuauaguuauuu

SEQ ID NO: 14118 - RNA, 32 nt, Homo Sapiens
cugcggacugccugcgggcuugcuugcugacu

SEQ ID NO: 14119 - RNA, 27 nt, Homo Sapiens
uccugucccagcuucagccccacacuc

SEQ ID NO: 14120 - RNA, 32 nt, Homo Sapiens
guuuuucuugguuuuuuaaucucauucuagug

SEQ ID NO: 14121 - RNA, 32 nt, Homo Sapiens
cguccagccccugggggcccagcccuagagag

SEQ ID NO: 14122 - RNA, 32 nt, Homo Sapiens
gaacauaaugaaaaauauguaaaauacccauu

SEQ ID NO: 14123 - RNA, 32 nt, Homo Sapiens
ggguguggaugccucuuccuccacaagggcac

SEQ ID NO: 14124 - RNA, 32 nt, Homo Sapiens
ugccuguaauuccagcacuuugggaggauccc

SEQ ID NO: 14125 - RNA, 32 nt, Homo Sapiens
gguaguuccgccgggucuggcuuccgccugcc

SEQ ID NO: 14126 - RNA, 32 nt, Homo Sapiens
cuuccaaauauuuggaacacucuuagaauucc

SEQ ID NO: 14127 - RNA, 32 nt, Homo Sapiens
cgagccucgagcgggcgggccccagccugagg

SEQ ID NO: 14128 - RNA, 32 nt, Homo Sapiens
ugaauuuccauuucgauucagaugggacugga

SEQ ID NO: 14129 - RNA, 32 nt, Homo Sapiens
uuguuuaggauuucuaugaugacuggauuuug

SEQ ID NO: 14130 - RNA, 32 nt, Homo Sapiens
ugcuuugugggaaaucacuaaugagaaggcua

SEQ ID NO: 14131 - RNA, 32 nt, Homo Sapiens
ggaugugaugguugguuuuauuugucaguuug

SEQ ID NO: 14132 - RNA, 32 nt, Homo Sapiens
gaauaaugaaucuccauguacauaucacccaa

SEQ ID NO: 14133 - RNA, 32 nt, Homo Sapiens
uuugucauuggaucuuuuuuugguucaacaau

SEQ ID NO: 14134 - RNA, 32 nt, Homo Sapiens
gcggugucaccaugagcaccuccagcuguacu

SEQ ID NO: 14135 - RNA, 31 nt, Homo Sapiens
uuucuaaagcguccuugaggaguccaguucc

SEQ ID NO: 14136 - RNA, 32 nt, Homo Sapiens
ggaacuugcggugugaggggccggcggggccc

SEQ ID NO: 14137 - RNA, 30 nt, Homo Sapiens
gcacacgggagaaugucaugugaagacaga

SEQ ID NO: 14138 - RNA, 32 nt, Homo Sapiens
uucaaaacugcuaaauuuuucuuaaucaagaa

SEQ ID NO: 14139 - RNA, 32 nt, Homo Sapiens
ggggacaggggcgggggcaggagcgugggggg

SEQ ID NO: 14140 - RNA, 32 nt, Homo Sapiens
agauccugagaaagauuuauugugcauuauuu

SEQ ID NO: 14141 - RNA, 32 nt, Homo Sapiens
uagcagguggcugcagccauggagaggcucuc

SEQ ID NO: 14142 - RNA, 32 nt, Homo Sapiens
ucgcccucaacaggucucuggccaucacccuc

SEQ ID NO: 14143 - RNA, 32 nt, Homo Sapiens
gucucccaauaucacagaaaaauacaugccag

SEQ ID NO: 14144 - RNA, 32 nt, Homo Sapiens
uuggguuuguaucugguaggggagaaagcagc

SEQ ID NO: 14145 - RNA, 32 nt, Homo Sapiens
aggcucuccauuuugauucagaaaguuagcau

SEQ ID NO: 14146 - RNA, 32 nt, Homo Sapiens
augcaacuuacaaaacuagcaauuguaacaau

SEQ ID NO: 14147 - RNA, 32 nt, Homo Sapiens
gucauccaccugccucggccucccagagugcu

SEQ ID NO: 14148 - RNA, 32 nt, Homo Sapiens
ccugcagcugucugcaggcccccugggucccc

SEQ ID NO: 14149 - RNA, 32 nt, Homo Sapiens
aggcugggaggagaagggaggggcuggggguu

SEQ ID NO: 14150 - RNA, 32 nt, Homo Sapiens
cauggaaacuaagcccacaggagcucaggcca

SEQ ID NO: 14151 - RNA, 32 nt, Homo Sapiens
uagccgggggagcgcgcgugggggcuccgcga

SEQ ID NO: 14152 - RNA, 32 nt, Homo Sapiens
caagucugugggccucaggucuggccagccag

SEQ ID NO: 14153 - RNA, 32 nt, Homo Sapiens
ggucacugucuacacuggguacacuuuguacc

SEQ ID NO: 14154 - RNA, 32 nt, Homo Sapiens
augggccucggccucggcggcuccucacccuc

SEQ ID NO: 14155 - RNA, 32 nt, Homo Sapiens
cuaauuggggcauugaggaaaugaagacuaga

SEQ ID NO: 14156 - RNA, 32 nt, Homo Sapiens
ggcuauggcuggugccucuucuagucacaagu

SEQ ID NO: 14157 - RNA, 32 nt, Homo Sapiens
ucuagcggcacagaagcagccgggggcgcuga

SEQ ID NO: 14158 - RNA, 32 nt, Homo Sapiens
cuucgggcucgcgucgucgacccgcagccgcg

SEQ ID NO: 14159 - RNA, 32 nt, Homo Sapiens
cagagcacccagaucagacucuccuucagggu

SEQ ID NO: 14160 - RNA, 32 nt, Homo Sapiens
ugugcacacucuggaaauguguugacaggaac

SEQ ID NO: 14161 - RNA, 32 nt, Homo Sapiens
aacagucccgcgugcaaaggaaaggggcaaaa

SEQ ID NO: 14162 - RNA, 27 nt, Homo Sapiens
agauggcagggccagaacuguugcucg

SEQ ID NO: 14163 - RNA, 32 nt, Homo Sapiens
agcggguggaggaggcccaagcgugcugggcg

SEQ ID NO: 14164 - RNA, 32 nt, Homo Sapiens
gucggguuuuuagcacaguucauuucacuggg

SEQ ID NO: 14165 - RNA, 32 nt, Homo Sapiens
ugugcaucccucuggagacgaagaggaggggg

SEQ ID NO: 14166 - RNA, 32 nt, Homo Sapiens
acccugggccccaagcaugacucauccagguu

SEQ ID NO: 14167 - RNA, 32 nt, Homo Sapiens
caauugaaaaauuuaucagacagcugcuggaa

SEQ ID NO: 14168 - RNA, 32 nt, Homo Sapiens
acaccucugcccguugugcuuugcaggucuuu

SEQ ID NO: 14169 - RNA, 32 nt, Homo Sapiens
uguaaaccaaaguggagcuggugcuucuuggg

SEQ ID NO: 14170 - RNA, 32 nt, Homo Sapiens
auugguauuucauuuuaauuuucaugacuacu

SEQ ID NO: 14171 - RNA, 32 nt, Homo Sapiens
aggaaauggaggaggggcaggucccugcagua

SEQ ID NO: 14172 - RNA, 32 nt, Homo Sapiens
guuugggucaccucagagcacccagcaggaga

SEQ ID NO: 14173 - RNA, 32 nt, Homo Sapiens
gacccagcacugggcuggguugggaguagggu

SEQ ID NO: 14174 - RNA, 32 nt, Homo Sapiens
auaauuuuauucugcuuuguccaauuaaauua

SEQ ID NO: 14175 - RNA, 32 nt, Homo Sapiens
gacgcugcuggcaaccguagcaggccccuuaa

SEQ ID NO: 14176 - RNA, 32 nt, Homo Sapiens
gcucaguuccagccccuuggaucaacgaaaau

SEQ ID NO: 14177 - RNA, 32 nt, Homo Sapiens
cauaagccgauucacaaccaaccagcucgaga

SEQ ID NO: 14178 - RNA, 32 nt, Homo Sapiens
agcucccggccucuggaccgcgcgcggcgcuc

SEQ ID NO: 14179 - RNA, 32 nt, Homo Sapiens
uuuguuuuguuuucagcaucuuucucugaugu

SEQ ID NO: 14180 - RNA, 32 nt, Homo Sapiens
aacuauaaguucaauuaaaccuuuuucuuccc

SEQ ID NO: 14181 - RNA, 32 nt, Homo Sapiens
ggcccucgcgccaaccuggaccgguccccgcc

SEQ ID NO: 14182 - RNA, 28 nt, Homo Sapiens
acaaauagaggcgaacauuugaacuccg

SEQ ID NO: 14183 - RNA, 32 nt, Homo Sapiens
ucuagagcccgcgaggugcgugcgccauggag

SEQ ID NO: 14184 - RNA, 32 nt, Homo Sapiens
ucuuaccagccagcuguccucagcgcacucgg

SEQ ID NO: 14185 - RNA, 32 nt, Homo Sapiens
gcagugagcggcggcagaggcuacggggcucg

SEQ ID NO: 14186 - RNA, 32 nt, Homo Sapiens
caguuuguaauugacuaaagcauuccaguguc

SEQ ID NO: 14187 - RNA, 32 nt, Homo Sapiens
ucucgguguggccuucuacagaggugcagacu

SEQ ID NO: 14188 - RNA, 32 nt, Homo Sapiens
augagcuacgccugggucuucugcagacucau

SEQ ID NO: 14189 - RNA, 32 nt, Homo Sapiens
gaguguaaacugugugccuuauuuacacuuua

SEQ ID NO: 14190 - RNA, 32 nt, Homo Sapiens
agacagcugacuagcagcugcccagcugucaa

SEQ ID NO: 14191 - RNA, 32 nt, Homo Sapiens
cuacacagaaaauuauauuuuuuaaaaauagg

SEQ ID NO: 14192 - RNA, 32 nt, Homo Sapiens
ccagguuccuucccgcucacgccggagucacu

SEQ ID NO: 14193 - RNA, 32 nt, Homo Sapiens
aaucaccuugugcugcuccauccacuguggau

SEQ ID NO: 14194 - RNA, 32 nt, Homo Sapiens
ccaauagacuccugggauggggcagccaaccc

SEQ ID NO: 14195 - RNA, 32 nt, Homo Sapiens
ggaggccgagacaggcagaucgcgaggucagg

SEQ ID NO: 14196 - RNA, 32 nt, Homo Sapiens
uuuucugugccauuuuaaauuuaacuuugaca

SEQ ID NO: 14197 - RNA, 32 nt, Homo Sapiens
acucuuuggccauuucccauggcucagacuaa

SEQ ID NO: 14198 - RNA, 32 nt, Homo Sapiens
cuggaccugaucaagcaucuggacuggcuuau

SEQ ID NO: 14199 - RNA, 32 nt, Homo Sapiens
ugacugcaguuauaaagcuggguguaugcuuc

SEQ ID NO: 14200 - RNA, 32 nt, Homo Sapiens
aagcuggagcccaaagccagguguucugacuc

SEQ ID NO: 14201 - RNA, 32 nt, Homo Sapiens
uauccuagcucuuugucaaagauggucuguag

SEQ ID NO: 14202 - RNA, 32 nt, Homo Sapiens
aaacaauaauuggcccaaaugcagacaucaag

SEQ ID NO: 14203 - RNA, 32 nt, Homo Sapiens
auuguugauguuuauagaaagccugagaauaa

SEQ ID NO: 14204 - RNA, 32 nt, Homo Sapiens
ccccauucugccuccuucuggggaaauaaaug

SEQ ID NO: 14205 - RNA, 32 nt, Homo Sapiens
ccucagaugggaagaagucagaggaaccagaa

SEQ ID NO: 14206 - RNA, 31 nt, Homo Sapiens
auacgugcaaggucgcugaggcagugcugug

SEQ ID NO: 14207 - RNA, 32 nt, Homo Sapiens
ucuuguuccagucucagcuggcugcuccgugg

SEQ ID NO: 14208 - RNA, 30 nt, Homo Sapiens
ccugggcaacagagaacccugucucuauuu

SEQ ID NO: 14209 - RNA, 32 nt, Homo Sapiens
caaugcugacugugucuccaucacuggguggg

SEQ ID NO: 14210 - RNA, 32 nt, Homo Sapiens
uggauuuuaacugaccuauuaaggguuucuuu

SEQ ID NO: 14211 - RNA, 32 nt, Homo Sapiens
gcugaugugguucggcggcugaacauuacuga

SEQ ID NO: 14212 - RNA, 32 nt, Homo Sapiens
gggggaaauaccaaagugugaaauacugugcu

SEQ ID NO: 14213 - RNA, 32 nt, Homo Sapiens
gaggacaggaggaaagugaggacagguggggu

SEQ ID NO: 14214 - RNA, 31 nt, Homo Sapiens
gcuuugaaacaacugaugagagccugaagag

SEQ ID NO: 14215 - RNA, 32 nt, Homo Sapiens
uuagauucagagguuacuuaugcuuguuuguu

SEQ ID NO: 14216 - RNA, 32 nt, Homo Sapiens
augugagacagagauaagaaauuaggcugaac

SEQ ID NO: 14217 - RNA, 32 nt, Homo Sapiens
aguaucccacugaucagucucucagcgccugc

SEQ ID NO: 14218 - RNA, 32 nt, Homo Sapiens
gcucucucaguuccuucccuuccacaaaaugc

SEQ ID NO: 14219 - RNA, 32 nt, Homo Sapiens
caugcagccaucuuggugugugcaugaguauu

SEQ ID NO: 14220 - RNA, 32 nt, Homo Sapiens
cacuguacuccagccuggcaacagagugagac

SEQ ID NO: 14221 - RNA, 32 nt, Homo Sapiens
agcccgcgcucagacgccccagcuccgccgag

SEQ ID NO: 14222 - RNA, 32 nt, Homo Sapiens
cccgggccccagcgcuuuuguguauauaaaug

SEQ ID NO: 14223 - RNA, 32 nt, Homo Sapiens
ugaaaaagaacaacacugacacgugagaaaua

SEQ ID NO: 14224 - RNA, 32 nt, Homo Sapiens
gccugcucacagcccaucugggcccgccucug

SEQ ID NO: 14225 - RNA, 32 nt, Homo Sapiens
cuaacuuccagacuaugggaaaauaaauuaug

SEQ ID NO: 14226 - RNA, 32 nt, Homo Sapiens
gauaacagugugcucauagaaacugcuuugac

SEQ ID NO: 14227 - RNA, 32 nt, Homo Sapiens
cucuuucgguaauagaaaaaucucugaaagac

SEQ ID NO: 14228 - RNA, 32 nt, Homo Sapiens
cugcuuuuuuucugaucccgagcugcguucgg

SEQ ID NO: 14229 - RNA, 32 nt, Homo Sapiens
aagacagccgucugcaggcccggaagagagcc

SEQ ID NO: 14230 - RNA, 32 nt, Homo Sapiens
agcuacagccuguuccucuaguucuuagaaca

SEQ ID NO: 14231 - RNA, 32 nt, Homo Sapiens
caauuaauauuuugccacuuugucuauauuua

SEQ ID NO: 14232 - RNA, 32 nt, Homo Sapiens
uauuaggagguaaaaaucaauaaaauggccca

SEQ ID NO: 14233 - RNA, 32 nt, Homo Sapiens
uauaguaguaugcaguauuuauauuauuccug

SEQ ID NO: 14234 - RNA, 32 nt, Homo Sapiens
uguaacauuaucuuuucuuucucuaagaaaaa

SEQ ID NO: 14235 - RNA, 32 nt, Homo Sapiens
auuagcuuaucuugcauagaacauaauaagua

SEQ ID NO: 14236 - RNA, 32 nt, Homo Sapiens
gccgcggcggugggguuggcagggugugcugg

SEQ ID NO: 14237 - RNA, 29 nt, Homo Sapiens
agccaugcugggcgcgcgggccugguugg

SEQ ID NO: 14238 - RNA, 32 nt, Homo Sapiens
ggggcugccaggggcguccgguuacauccccg

SEQ ID NO: 14239 - RNA, 31 nt, Homo Sapiens
uaugcuuuugguaauuaggaacucuugagaa

SEQ ID NO: 14240 - RNA, 32 nt, Homo Sapiens
aagugugacuuuuucucggagcauauauguag

SEQ ID NO: 14241 - RNA, 32 nt, Homo Sapiens
ccuacgggcagugggaggagccgcgcgguucc

SEQ ID NO: 14242 - RNA, 31 nt, Homo Sapiens
agcuucccgcuccgccuuccccgcgcagcug

SEQ ID NO: 14243 - RNA, 32 nt, Homo Sapiens
uuuccgggaaagugcugaaaucugcagugagu

SEQ ID NO: 14244 - RNA, 32 nt, Homo Sapiens
cuuuuauacagacuuugagacuugccaucagc

SEQ ID NO: 14245 - RNA, 32 nt, Homo Sapiens
uucaguaauuuaauuuuguaaaugccaaauga

SEQ ID NO: 14246 - RNA, 32 nt, Homo Sapiens
acucuuaagcucucuucagucucuguaauguu

SEQ ID NO: 14247 - RNA, 32 nt, Homo Sapiens
cgcucgcgccucucccuccacaccucucugca

SEQ ID NO: 14248 - RNA, 32 nt, Homo Sapiens
gagauuucaggagagaacagguugaacauuaa

SEQ ID NO: 14249 - RNA, 32 nt, Homo Sapiens
ggcuggggcgaggggaggagggggaucagcuu

SEQ ID NO: 14250 - RNA, 31 nt, Homo Sapiens
gacaagccacccuccccagacacacccacug

SEQ ID NO: 14251 - RNA, 30 nt, Homo Sapiens
cucuguggcuuacgcgggggucccgggagu

SEQ ID NO: 14252 - RNA, 32 nt, Homo Sapiens
gcaugaaauauguugaucagugaugaguuggg

SEQ ID NO: 14253 - RNA, 32 nt, Homo Sapiens
caaguggaauauugguuuuggccaaagaugcu

SEQ ID NO: 14254 - RNA, 32 nt, Homo Sapiens
gaaaaagacaagcauugagaagaaauuaggag

SEQ ID NO: 14255 - RNA, 32 nt, Homo Sapiens
gagaacccacccagagacugggagugguggcu

SEQ ID NO: 14256 - RNA, 32 nt, Homo Sapiens
agguuucaagauuaaaauuugauguucaaacc

SEQ ID NO: 14257 - RNA, 32 nt, Homo Sapiens
gcggucccaagcccuggggcccuaggcuucuc

SEQ ID NO: 14258 - RNA, 32 nt, Homo Sapiens
gagaggccaagccccuugccuugggucacaca

SEQ ID NO: 14259 - RNA, 32 nt, Homo Sapiens
uacgcucacuguucccugaucauuccaaaggc

SEQ ID NO: 14260 - RNA, 32 nt, Homo Sapiens
acgcccugcccccagggugguucauuucccag

SEQ ID NO: 14261 - RNA, 32 nt, Homo Sapiens
ccgagucaucaucucuguuugcugccuuccug

SEQ ID NO: 14262 - RNA, 32 nt, Homo Sapiens
agguguuuaguugcuuagccaagcugccugag

SEQ ID NO: 14263 - RNA, 32 nt, Homo Sapiens
gucuguaggaaaugguugaaaacugaagguag

SEQ ID NO: 14264 - RNA, 32 nt, Homo Sapiens
auaggccuaaauuuaaaggccaaauuauacac

SEQ ID NO: 14265 - RNA, 32 nt, Homo Sapiens
uuguacauauccuuugguccuggugcugccga

SEQ ID NO: 14266 - RNA, 32 nt, Homo Sapiens
gcggcugcagccgccgccgccgggaaggagag

SEQ ID NO: 14267 - RNA, 32 nt, Homo Sapiens
accugccucacccaccaaugcagccggggcug

SEQ ID NO: 14268 - RNA, 32 nt, Homo Sapiens
cucacugugguuggugguggcggugacagagu

SEQ ID NO: 14269 - RNA, 32 nt, Homo Sapiens
ggccuccuaccuuuccaguuucuguuggcagc

SEQ ID NO: 14270 - RNA, 32 nt, Homo Sapiens
ggaacauaaaaagcuuuuagaugaaaacaaaa

SEQ ID NO: 14271 - RNA, 32 nt, Homo Sapiens
gcgcgcagcgacggagcuggggccggccuggg

SEQ ID NO: 14272 - RNA, 32 nt, Homo Sapiens
cacuugaauguugguacucuauguuuggugaa

SEQ ID NO: 14273 - RNA, 32 nt, Homo Sapiens
ucuggcagcccggcuggcccaggcccugcagc

SEQ ID NO: 14274 - RNA, 32 nt, Homo Sapiens
aaggcaagaggggguggagggguguggcagug

SEQ ID NO: 14275 - RNA, 32 nt, Homo Sapiens
uuaaauuagauaacaaaauuuuauagucugaa

SEQ ID NO: 14276 - RNA, 32 nt, Homo Sapiens
auaauaggagucauagccagacacagugacuc

SEQ ID NO: 14277 - RNA, 32 nt, Homo Sapiens
auguauuaugaaauguguuuuauuuucaaaug

SEQ ID NO: 14278 - RNA, 32 nt, Homo Sapiens
cagcaggagagccgggaccuaccuggugugag

SEQ ID NO: 14279 - RNA, 32 nt, Homo Sapiens
gauuuuauuaggaaacaaagcuuagcaggagc

SEQ ID NO: 14280 - RNA, 32 nt, Homo Sapiens
aaucauauuucuguacauuuucagugguagaa

SEQ ID NO: 14281 - RNA, 32 nt, Homo Sapiens
ggucugugucucugaagacaguucuuucugua

SEQ ID NO: 14282 - RNA, 32 nt, Homo Sapiens
uuucacuuuugaaaugaaauuuuuauaauugu

SEQ ID NO: 14283 - RNA, 32 nt, Homo Sapiens
cucucccgcgcgcagauacacgcccccgccuc

SEQ ID NO: 14284 - RNA, 32 nt, Homo Sapiens
uuugauccauucucucuuucucugcauacucu

SEQ ID NO: 14285 - RNA, 32 nt, Homo Sapiens
ugguggcauaaugaguauuuugaaagaagaaa

SEQ ID NO: 14286 - RNA, 32 nt, Homo Sapiens
guaucucugaaauaaugaaauauauugauggg

SEQ ID NO: 14287 - RNA, 32 nt, Homo Sapiens
ugcuaagacaacaucccacaucuuucaacagc

SEQ ID NO: 14288 - RNA, 32 nt, Homo Sapiens
acggcgcuccuagccgcaccugcgccuggcag

SEQ ID NO: 14289 - RNA, 32 nt, Homo Sapiens
uucugucuuuauaaguuuuucuuucuacaucu

SEQ ID NO: 14290 - RNA, 29 nt, Homo Sapiens
uuuacaguaguguuuucuauaaaacauuc

SEQ ID NO: 14291 - RNA, 32 nt, Homo Sapiens
acugcuuggugaucucugaggaccuucuaauu

SEQ ID NO: 14292 - RNA, 32 nt, Homo Sapiens
ugauguguuuuaaaaguugcacuaucuuaaug

SEQ ID NO: 14293 - RNA, 32 nt, Homo Sapiens
acuuuuuccaauuugacugaucucuaaacugg

SEQ ID NO: 14294 - RNA, 32 nt, Homo Sapiens
aggggcaagaggaggaggagagccugccguuc

SEQ ID NO: 14295 - RNA, 32 nt, Homo Sapiens
acaagccuuaauaaacaauacuauuuagcaaa

SEQ ID NO: 14296 - RNA, 32 nt, Homo Sapiens
aaguauuuuuucugaacagaaguuuacuuaga

SEQ ID NO: 14297 - RNA, 32 nt, Homo Sapiens
gucccuuccuucccauugcaaguugcacccag

SEQ ID NO: 14298 - RNA, 32 nt, Homo Sapiens
gcacucccaggccccaggcagugcugcaggcg

SEQ ID NO: 14299 - RNA, 32 nt, Homo Sapiens
uggcuugugugagcuugcccaguccucacagc

SEQ ID NO: 14300 - RNA, 32 nt, Homo Sapiens
ggaaggugguggucguacgcugcgaaggcauc

SEQ ID NO: 14301 - RNA, 32 nt, Homo Sapiens
aaaacugcuuugcauggguuuucugggaaauu

SEQ ID NO: 14302 - RNA, 32 nt, Homo Sapiens
gaaggaaauguuuccaauuuuauauuuaaggg

SEQ ID NO: 14303 - RNA, 32 nt, Homo Sapiens
accuggagaagcugcgggcgucgggcgcgggc

SEQ ID NO: 14304 - RNA, 32 nt, Homo Sapiens
uagaugaaacuggucagaaucuguaaauuacu

SEQ ID NO: 14305 - RNA, 32 nt, Homo Sapiens
uuuucuguuuuauuuuucucaagcugcuuuca

SEQ ID NO: 14306 - RNA, 32 nt, Homo Sapiens
ucaugcuuguaauccuagcacuuuuugaggcc

SEQ ID NO: 14307 - RNA, 32 nt, Homo Sapiens
uacccugcaauaaugcccagggaggagcguuc

SEQ ID NO: 14308 - RNA, 32 nt, Homo Sapiens
auagagaauauuaauuuugcagaaaugaagga

SEQ ID NO: 14309 - RNA, 32 nt, Homo Sapiens
acugcgcccagccccagaaaucucagugcugu

SEQ ID NO: 14310 - RNA, 30 nt, Homo Sapiens
cacccgccugccagagcggaaaccgggggu

SEQ ID NO: 14311 - RNA, 32 nt, Homo Sapiens
gcccgggcggcacggccagcuuccugauuucu

SEQ ID NO: 14312 - RNA, 32 nt, Homo Sapiens
uuaacaaacaacaguuccagagaaaagccagg

SEQ ID NO: 14313 - RNA, 32 nt, Homo Sapiens
gugcaaaaccauguaaauauauuguuaccauu

SEQ ID NO: 14314 - RNA, 32 nt, Homo Sapiens
cuugcuucuguuuucuaccucuccaggccugc

SEQ ID NO: 14315 - RNA, 32 nt, Homo Sapiens
cccaccguccccacccccuccccuuggucucc

SEQ ID NO: 14316 - RNA, 32 nt, Homo Sapiens
cagauuugauaaaagaaugugauguauaugua

SEQ ID NO: 14317 - RNA, 32 nt, Homo Sapiens
ccagggaaacagccuuccuggagcguugucug

SEQ ID NO: 14318 - RNA, 32 nt, Homo Sapiens
uccaaaggaucuuuguuccucugagccaagac

SEQ ID NO: 14319 - RNA, 32 nt, Homo Sapiens
uccucacuccuguuauaacaaaacagaaguuu

SEQ ID NO: 14320 - RNA, 32 nt, Homo Sapiens
uucaugcugugaugcgauuucaccuuauagua

SEQ ID NO: 14321 - RNA, 32 nt, Homo Sapiens
caucggagcagaagcucgggguugcugggcgg

SEQ ID NO: 14322 - RNA, 32 nt, Homo Sapiens
aagaggcuaugugagcacaaagguagcuuuuc

SEQ ID NO: 14323 - RNA, 32 nt, Homo Sapiens
aaacauguggucuggucugacuugagagaaaa

SEQ ID NO: 14324 - RNA, 32 nt, Homo Sapiens
uuucugugguuugcuuuuuuugagguauaugu

SEQ ID NO: 14325 - RNA, 32 nt, Homo Sapiens
uccgcuggagaauggaaauuggcaaagagaga

SEQ ID NO: 14326 - RNA, 32 nt, Homo Sapiens
cugagauccuguuggaaaccacagcaaccugu

SEQ ID NO: 14327 - RNA, 31 nt, Homo Sapiens
ugcacgcugccggucgggcugggcugagagg

SEQ ID NO: 14328 - RNA, 32 nt, Homo Sapiens
agcagugggggucgguggcugugcuaggauga

SEQ ID NO: 14329 - RNA, 32 nt, Homo Sapiens
aaaacaggaggcagccaugggcugggagauca

SEQ ID NO: 14330 - RNA, 32 nt, Homo Sapiens
auugcguggaauugugcugaguugguguugac

SEQ ID NO: 14331 - RNA, 32 nt, Homo Sapiens
auaugcaaaacaaacauccucaggaggauggu

SEQ ID NO: 14332 - RNA, 32 nt, Homo Sapiens
aacuucaucauggugaacuaauuuagagcauc

SEQ ID NO: 14333 - RNA, 32 nt, Homo Sapiens
gaaaauucagaauuugguaugugauaugauug

SEQ ID NO: 14334 - RNA, 32 nt, Homo Sapiens
ccccaugcacauauuucuccuaauuguggaaa

SEQ ID NO: 14335 - RNA, 32 nt, Homo Sapiens
uucuguuguauucucaccacucaauuuguuuu

SEQ ID NO: 14336 - RNA, 32 nt, Homo Sapiens
gcucauucugucaucacuaaggcaauaaaccu

SEQ ID NO: 14337 - RNA, 32 nt, Homo Sapiens
uggaacaaaauguuauauagauaauauuuuuc

SEQ ID NO: 14338 - RNA, 32 nt, Homo Sapiens
cuucgggaaggggaagagcguguugugaauca

SEQ ID NO: 14339 - RNA, 32 nt, Homo Sapiens
uagucaguuaauucuuuuuuucauccuuccuc

SEQ ID NO: 14340 - RNA, 32 nt, Homo Sapiens
ucguugggcagaaauugccaaacuacuuccag

SEQ ID NO: 14341 - RNA, 32 nt, Homo Sapiens
gaggaggaccccgucucaaaaaacugucaaaa

SEQ ID NO: 14342 - RNA, 32 nt, Homo Sapiens
ccccagccaggcccugcagggcuggucagggu

SEQ ID NO: 14343 - RNA, 32 nt, Homo Sapiens
ccaugaugagcuccucuuccuggcuucuuacu

SEQ ID NO: 14344 - RNA, 32 nt, Homo Sapiens
cuagcugccccgcucuuccccacugccuccgc

SEQ ID NO: 14345 - RNA, 32 nt, Homo Sapiens
ugcugccaccgccgccaccaccgccucugcuc

SEQ ID NO: 14346 - RNA, 30 nt, Homo Sapiens
gcgauauggagccaggggccggcggccgaa

SEQ ID NO: 14347 - RNA, 32 nt, Homo Sapiens
aaucagagcgcucccccucacaucaguggcau

SEQ ID NO: 14348 - RNA, 32 nt, Homo Sapiens
gggccucgagggugcgcgugaggccggcgcag

SEQ ID NO: 14349 - RNA, 32 nt, Homo Sapiens
gaugggggugguuguggaagcccagggugauu

SEQ ID NO: 14350 - RNA, 32 nt, Homo Sapiens
caaauccgccccacugaaguguucccuaagga

SEQ ID NO: 14351 - RNA, 32 nt, Homo Sapiens
cccuuuccucuccucuacccagcuagcccuuc

SEQ ID NO: 14352 - RNA, 32 nt, Homo Sapiens
aucucuucuuugagguuccaucaagagaugac

SEQ ID NO: 14353 - RNA, 32 nt, Homo Sapiens
aagcuccaaggaggccuggggguugggugggg

SEQ ID NO: 14354 - RNA, 32 nt, Homo Sapiens
gccucccugccugaggcguccgcggccgggau

SEQ ID NO: 14355 - RNA, 32 nt, Homo Sapiens
uuauguaauguuucuguuaucagcaaugugca

SEQ ID NO: 14356 - RNA, 32 nt, Homo Sapiens
agaggcuggggguggggagccguguggguguu

SEQ ID NO: 14357 - RNA, 32 nt, Homo Sapiens
ucgcagauguuggcaaagcagugucgcuucuc

SEQ ID NO: 14358 - RNA, 32 nt, Homo Sapiens
cauugacugauguagauaauuuaggauuuuca

SEQ ID NO: 14359 - RNA, 32 nt, Homo Sapiens
cagacauggugcguggggcccggggccccgag

SEQ ID NO: 14360 - RNA, 32 nt, Homo Sapiens
cccucaagauuguggacuuuggcagugcccag

SEQ ID NO: 14361 - RNA, 32 nt, Homo Sapiens
aauaugcccuucaaaucuauaauuuuacuuug

SEQ ID NO: 14362 - RNA, 32 nt, Homo Sapiens
cugaucuuuaagacuuuuuuuuuuuuuuuuuu

SEQ ID NO: 14363 - RNA, 32 nt, Homo Sapiens
uagccucugauccaguagccugggguggggca

SEQ ID NO: 14364 - RNA, 32 nt, Homo Sapiens
guaagaaagaaucuugguggauuugugucuca

SEQ ID NO: 14365 - RNA, 32 nt, Homo Sapiens
ggcgcgccacgaugcggccgcggcuguggcuc

SEQ ID NO: 14366 - RNA, 32 nt, Homo Sapiens
ggggcagucaggugcuccggacacccgaaggc

SEQ ID NO: 14367 - RNA, 32 nt, Homo Sapiens
accaagggcaccuggaggacagcuggaccgcg

SEQ ID NO: 14368 - RNA, 32 nt, Homo Sapiens
ucuaaaucacauuaugauuauuuuauacuagu

SEQ ID NO: 14369 - RNA, 32 nt, Homo Sapiens
uuuucucucaggaaacaauucuggugaaaugu

SEQ ID NO: 14370 - RNA, 27 nt, Homo Sapiens
ccuccgguuuucuucagcacucccugu

SEQ ID NO: 14371 - RNA, 32 nt, Homo Sapiens
ggcagcccggcgggucccagcaucucgagacc

SEQ ID NO: 14372 - RNA, 32 nt, Homo Sapiens
uagugcauccuuaaccugaggacuucaccagu

SEQ ID NO: 14373 - RNA, 32 nt, Homo Sapiens
aggcaggccaaggccuucuccuccccacccgc

SEQ ID NO: 14374 - RNA, 32 nt, Homo Sapiens
ggaccuggagggcucuggggaugaugacuccu

SEQ ID NO: 14375 - RNA, 32 nt, Homo Sapiens
gcccagaugcagagggucgcgcggcugugugu

SEQ ID NO: 14376 - RNA, 32 nt, Homo Sapiens
ucaguaucuggagagggaagggaagucaggcu

SEQ ID NO: 14377 - RNA, 32 nt, Homo Sapiens
aacaugaaugcagugguaaaaauuuguuaguu

SEQ ID NO: 14378 - RNA, 32 nt, Homo Sapiens
gaguuucgcucuuguugcccgggcuggagugc

SEQ ID NO: 14379 - RNA, 32 nt, Homo Sapiens
uauuuuuagguggucuugaacuccugauguca

SEQ ID NO: 14380 - RNA, 32 nt, Homo Sapiens
acaacaacaacaaaaaccccuguugggcaccu

SEQ ID NO: 14381 - RNA, 32 nt, Homo Sapiens
cucuccugcccccacccccaggcaccagcaca

SEQ ID NO: 14382 - RNA, 31 nt, Homo Sapiens
cugguggcggggccacugccccgcuuggggg

SEQ ID NO: 14383 - RNA, 32 nt, Homo Sapiens
acgaggucaggagaucgagaucauccuggcua

SEQ ID NO: 14384 - RNA, 32 nt, Homo Sapiens
cuacugucuaagcaguuuuguaaauguacugg

SEQ ID NO: 14385 - RNA, 32 nt, Homo Sapiens
cucacuauggaaauaaaaugcaguagaaagag

SEQ ID NO: 14386 - RNA, 32 nt, Homo Sapiens
uugcuugguaccugcagcacguuuccaugccu

SEQ ID NO: 14387 - RNA, 32 nt, Homo Sapiens
acaucugcguccucaagaccuguuucauccau

SEQ ID NO: 14388 - RNA, 32 nt, Homo Sapiens
ugccccagggucugcugcuccacgagcugccu

SEQ ID NO: 14389 - RNA, 32 nt, Homo Sapiens
uacucuccuagaacuucuguccuuccuccccc

SEQ ID NO: 14390 - RNA, 32 nt, Homo Sapiens
uguauacaaauuuuuguccugcaugaauaaau

SEQ ID NO: 14391 - RNA, 32 nt, Homo Sapiens
cgcuccugcgccccguuugccucccgcacccg

SEQ ID NO: 14392 - RNA, 32 nt, Homo Sapiens
uuagaugagcccagguaagaccucucugaaga

SEQ ID NO: 14393 - RNA, 32 nt, Homo Sapiens
auuuuugucaagagcgagacuccaucagccca

SEQ ID NO: 14394 - RNA, 32 nt, Homo Sapiens
ggaccuacaauuuuugccuaugcugcagccac

SEQ ID NO: 14395 - RNA, 32 nt, Homo Sapiens
ugaugauggaaauguucuauaucuuaacugua

SEQ ID NO: 14396 - RNA, 32 nt, Homo Sapiens
gcgggaaagcggugcgcgugcagcgggguggg

SEQ ID NO: 14397 - RNA, 32 nt, Homo Sapiens
gccacuccccuccagccugggcgacagaguga

SEQ ID NO: 14398 - RNA, 32 nt, Homo Sapiens
uccaucucuauaauaaaauauucaucgucgca

SEQ ID NO: 14399 - RNA, 32 nt, Homo Sapiens
ucagauuaaaauguuuacaacaaaauguuaau

SEQ ID NO: 14400 - RNA, 32 nt, Homo Sapiens
cugccccuagugcuccucccugaugcugaucg

SEQ ID NO: 14401 - RNA, 32 nt, Homo Sapiens
uuuaagcuacaguuccuucucuccauccuucg

SEQ ID NO: 14402 - RNA, 32 nt, Homo Sapiens
aggaggaugcgccuccucucccccaucccagc

SEQ ID NO: 14403 - RNA, 32 nt, Homo Sapiens
augggucuugaguccugugcuguuggcaaagu

SEQ ID NO: 14404 - RNA, 32 nt, Homo Sapiens
gguuagugcauaccguggaagggcgccagggu

SEQ ID NO: 14405 - RNA, 32 nt, Homo Sapiens
ucauuaaaaaagacauacgauuggagcggagu

SEQ ID NO: 14406 - RNA, 32 nt, Homo Sapiens
gucaagcuggccagaagcuggaggaagauggc

SEQ ID NO: 14407 - RNA, 32 nt, Homo Sapiens
uacauugcugccaaaucauuucaacugaaaag

SEQ ID NO: 14408 - RNA, 32 nt, Homo Sapiens
agaucauuaccugguuccaguuucacagcuac

SEQ ID NO: 14409 - RNA, 32 nt, Homo Sapiens
aaaaagucaaacuuauagaauuacaguguaga

SEQ ID NO: 14410 - RNA, 32 nt, Homo Sapiens
cgccucgcugagccggccgggggcggggagau

SEQ ID NO: 14411 - RNA, 32 nt, Homo Sapiens
ccagugucuggcuggcuccguccgugugacag

SEQ ID NO: 14412 - RNA, 32 nt, Homo Sapiens
ggcucaccugaaguccuaucacugccgcucug

SEQ ID NO: 14413 - RNA, 32 nt, Homo Sapiens
gcggugcgugugggcccggccuggccacagcg

SEQ ID NO: 14414 - RNA, 32 nt, Homo Sapiens
auucugccaucccaccugucccucccacuccu

SEQ ID NO: 14415 - RNA, 32 nt, Homo Sapiens
cuagugggagcugccuucccccugccccaccu

SEQ ID NO: 14416 - RNA, 31 nt, Homo Sapiens
cuagacagcgcagggccauggcugaggcggc

SEQ ID NO: 14417 - RNA, 32 nt, Homo Sapiens
uaaugaaugaauuauaaaauguauaugucuau

SEQ ID NO: 14418 - RNA, 32 nt, Homo Sapiens
aagcaggaauccaacauauguugcugaaugcg

SEQ ID NO: 14419 - RNA, 32 nt, Homo Sapiens
agucaggcgcgguggugucgcuuguaaucuca

SEQ ID NO: 14420 - RNA, 32 nt, Homo Sapiens
aaaaacuaaaugaagggaaccacauuagggcc

SEQ ID NO: 14421 - RNA, 31 nt, Homo Sapiens
gccuggaggcacugcuguccuuccugcagaa

SEQ ID NO: 14422 - RNA, 32 nt, Homo Sapiens
uuuggaggcagcugaggaaggaugcuggggaa

SEQ ID NO: 14423 - RNA, 32 nt, Homo Sapiens
gaaauauaagaagccagauuagacucuaaaau

SEQ ID NO: 14424 - RNA, 32 nt, Homo Sapiens
augccauuugaacagugccaucugucauggaa

SEQ ID NO: 14425 - RNA, 32 nt, Homo Sapiens
gaggccccgggcggcgggugguggcugccagg

SEQ ID NO: 14426 - RNA, 32 nt, Homo Sapiens
auuuuaaaauuuaugaaaucuauauuccaggu

SEQ ID NO: 14427 - RNA, 32 nt, Homo Sapiens
aagggaaacacuggcuuuuguuacgggcugaa

SEQ ID NO: 14428 - RNA, 32 nt, Homo Sapiens
uucagauggaaaugaggaaagaauaauauuaa

SEQ ID NO: 14429 - RNA, 32 nt, Homo Sapiens
uuuccugcacugauaaacgaaaagcaauccac

SEQ ID NO: 14430 - RNA, 32 nt, Homo Sapiens
ggcaugaugcugagugacacucuuguguauau

SEQ ID NO: 14431 - RNA, 30 nt, Homo Sapiens
ucgccaugggccgugugauccguggacaga

SEQ ID NO: 14432 - RNA, 32 nt, Homo Sapiens
gaccgucccaaguccuucuccauucucccaac

SEQ ID NO: 14433 - RNA, 32 nt, Homo Sapiens
uccucugccagggggcagcugcccgcgugacc

SEQ ID NO: 14434 - RNA, 31 nt, Homo Sapiens
uucucacauuuuccauuuccaaauaacuguu

SEQ ID NO: 14435 - RNA, 32 nt, Homo Sapiens
gauaaauagaugaucccagaaaaggaaagagg

SEQ ID NO: 14436 - RNA, 32 nt, Homo Sapiens
auacauauuauguaugguuguaaauucauaca

SEQ ID NO: 14437 - RNA, 32 nt, Homo Sapiens
cucuggaguugauacaagccugccugagcccu

SEQ ID NO: 14438 - RNA, 32 nt, Homo Sapiens
ugauuggaacauuuggggagcacccagaggga

SEQ ID NO: 14439 - RNA, 32 nt, Homo Sapiens
uugagugauccucccgccccagccuccugagu

SEQ ID NO: 14440 - RNA, 32 nt, Homo Sapiens
agcugggggcgcgggcgggcggcauguaccgg

SEQ ID NO: 14441 - RNA, 32 nt, Homo Sapiens
uagcaaguacccauaaaucagauuuaugaaac

SEQ ID NO: 14442 - RNA, 32 nt, Homo Sapiens
guguuguaggaaguguccuguauuuuacuaau

SEQ ID NO: 14443 - RNA, 32 nt, Homo Sapiens
cuuguggauuaaacagaauaaauuucuaaauu

SEQ ID NO: 14444 - RNA, 32 nt, Homo Sapiens
cacaauuuucuuuuguuaaaaaucaaauucaa

SEQ ID NO: 14445 - RNA, 32 nt, Homo Sapiens
ucaguucuuccucuccuuuguuugauggagcu

SEQ ID NO: 14446 - RNA, 32 nt, Homo Sapiens
gcuaauucccccucggccuccuccaaggggug

SEQ ID NO: 14447 - RNA, 32 nt, Homo Sapiens
cuucuuggcuuggugaggaaaagcggacauca

SEQ ID NO: 14448 - RNA, 32 nt, Homo Sapiens
ccugccucaaggugcugagcccccgccuugca

SEQ ID NO: 14449 - RNA, 32 nt, Homo Sapiens
ucgcaccaccaguuacacuugaauuaagaucu

SEQ ID NO: 14450 - RNA, 32 nt, Homo Sapiens
acacggccugugccggccggcgcggaccugcc

SEQ ID NO: 14451 - RNA, 32 nt, Homo Sapiens
uaacuuggugugcaauuugaaaggaugugaau

SEQ ID NO: 14452 - RNA, 32 nt, Homo Sapiens
cuuacacaucuuaaaauuuagauccagcacac

SEQ ID NO: 14453 - RNA, 32 nt, Homo Sapiens
aguuguauugucuuauuguauugucuuuucaa

SEQ ID NO: 14454 - RNA, 32 nt, Homo Sapiens
aacgcuuacguguugaucccaguguccuuuuc

SEQ ID NO: 14455 - RNA, 32 nt, Homo Sapiens
accaccucaucagagaugcuuacugcagcccu

SEQ ID NO: 14456 - RNA, 32 nt, Homo Sapiens
ccacuugaacucuuuucuuguuuaucuagcau

SEQ ID NO: 14457 - RNA, 32 nt, Homo Sapiens
uuauuuguuuguuuuugguuuucuguaaugac

SEQ ID NO: 14458 - RNA, 32 nt, Homo Sapiens
auuucagagagcaaauggcaaagacuggaucc

SEQ ID NO: 14459 - RNA, 32 nt, Homo Sapiens
uuaaauccuugacauaagaucucauuugcaga

SEQ ID NO: 14460 - RNA, 32 nt, Homo Sapiens
auauuauuucucaggugagaaaacaggcuaau

SEQ ID NO: 14461 - RNA, 32 nt, Homo Sapiens
cagcaacuuuccuuuuuauaaaacaacaaaug

SEQ ID NO: 14462 - RNA, 31 nt, Homo Sapiens
gccuccagcagcagccaagauacacaggaga

SEQ ID NO: 14463 - RNA, 32 nt, Homo Sapiens
ggaaggaaaauauuucauuuagcuuuuuuauu

SEQ ID NO: 14464 - RNA, 32 nt, Homo Sapiens
cuguguugucucaaguuuuuauaaauacauuu

SEQ ID NO: 14465 - RNA, 32 nt, Homo Sapiens
auuagcucugauuagcuuucacuuccuguaga

SEQ ID NO: 14466 - RNA, 32 nt, Homo Sapiens
cauggcauguuuugucaacaaaacaguaguug

SEQ ID NO: 14467 - RNA, 32 nt, Homo Sapiens
ccugacgggagguccggaucagacacacauaa

SEQ ID NO: 14468 - RNA, 32 nt, Homo Sapiens
cccucauccugccuccauuucccggccacgcc

SEQ ID NO: 14469 - RNA, 32 nt, Homo Sapiens
gaguccuccagagcuuccuggccgggcccucc

SEQ ID NO: 14470 - RNA, 32 nt, Homo Sapiens
ugucucacacaagcuuucaagauggguagcgg

SEQ ID NO: 14471 - RNA, 32 nt, Homo Sapiens
uuggacaucacuguugccuucacucagcagcc

SEQ ID NO: 14472 - RNA, 32 nt, Homo Sapiens
gucugcacugcaacuucuguauccuuccuucc

SEQ ID NO: 14473 - RNA, 32 nt, Homo Sapiens
aauccuaccaagugguucuagcaagaaccccc

SEQ ID NO: 14474 - RNA, 32 nt, Homo Sapiens
cggcgcggucagccccggcugcggcuccagcu

SEQ ID NO: 14475 - RNA, 32 nt, Homo Sapiens
aggccuccauuaccucuuccugucccaccccu

SEQ ID NO: 14476 - RNA, 32 nt, Homo Sapiens
auccagaaguauuguuuacauuaaacucccuu

SEQ ID NO: 14477 - RNA, 32 nt, Homo Sapiens
cugcaccucacagaaauguuacugugucacuu

SEQ ID NO: 14478 - RNA, 32 nt, Homo Sapiens
cccguguguugcaccaggcacugcugcacaac

SEQ ID NO: 14479 - RNA, 32 nt, Homo Sapiens
aauagaagaacaaacacuagggaagauacaag

SEQ ID NO: 14480 - RNA, 32 nt, Homo Sapiens
gcggcggccgacgguuccugggacaccugcuu

SEQ ID NO: 14481 - RNA, 32 nt, Homo Sapiens
acauccucggcggcuccugggguuugaagagc

SEQ ID NO: 14482 - RNA, 32 nt, Homo Sapiens
uggggccuuugccagcagagccagggcagggc

SEQ ID NO: 14483 - RNA, 32 nt, Homo Sapiens
guccuaugaugauguaaacuugguacuacaua

SEQ ID NO: 14484 - RNA, 32 nt, Homo Sapiens
ccuucucaucuccacccaagaagugcuggcac

SEQ ID NO: 14485 - RNA, 32 nt, Homo Sapiens
ugcuuuuguaaauuauauucuaauuuauugcc

SEQ ID NO: 14486 - RNA, 32 nt, Homo Sapiens
cccuccuggcgcccagcaucugagcuucuaca

SEQ ID NO: 14487 - RNA, 32 nt, Homo Sapiens
cuuauucaagcuauauauaaaaguaugauuac

SEQ ID NO: 14488 - RNA, 30 nt, Homo Sapiens
gaccacagagguggcaagagaagggcugaa

SEQ ID NO: 14489 - RNA, 29 nt, Homo Sapiens
auugucucgauguacaguuuaacggggau

SEQ ID NO: 14490 - RNA, 32 nt, Homo Sapiens
uuaacuaguuuugucauuccauuuguuaaaga

SEQ ID NO: 14491 - RNA, 32 nt, Homo Sapiens
gaucaaaaguguuuaaaauuaauauguuguca

SEQ ID NO: 14492 - RNA, 32 nt, Homo Sapiens
uggagagccggggcuggcggugccugaggacc

SEQ ID NO: 14493 - RNA, 32 nt, Homo Sapiens
cgggcuccuuuuucuccaccggcuucagggca

SEQ ID NO: 14494 - RNA, 32 nt, Homo Sapiens
ccagccccaucccuguccucaugaccccucgu

SEQ ID NO: 14495 - RNA, 32 nt, Homo Sapiens
cccugugccucgggggugguuguucuucaagc

SEQ ID NO: 14496 - RNA, 32 nt, Homo Sapiens
gggaauuggggaggggucguggcaggcagggu

SEQ ID NO: 14497 - RNA, 32 nt, Homo Sapiens
ggccgggggcaguucucuccucacuuguaaac

SEQ ID NO: 14498 - RNA, 32 nt, Homo Sapiens
acauagugaaucuguaagagaauuuagucuga

SEQ ID NO: 14499 - RNA, 32 nt, Homo Sapiens
ccaggagcucucacggccccaucuguuguacc

SEQ ID NO: 14500 - RNA, 32 nt, Homo Sapiens
uccaugacguucgaccugaggaccaaggcacu

SEQ ID NO: 14501 - RNA, 32 nt, Homo Sapiens
accaagaauaagguucuuucuggagccugcaa

SEQ ID NO: 14502 - RNA, 32 nt, Homo Sapiens
cccuaggccagaggaagaagagcgcaggccug

SEQ ID NO: 14503 - RNA, 32 nt, Homo Sapiens
caaaagagaaaacugcaauguaucugguaaau

SEQ ID NO: 14504 - RNA, 32 nt, Homo Sapiens
ucacauguagucaucuucaaaaaggaaagauu

SEQ ID NO: 14505 - RNA, 32 nt, Homo Sapiens
ugguuuuuccuguguccaggucccauccuaaa

SEQ ID NO: 14506 - RNA, 32 nt, Homo Sapiens
uuauauaaaguuuaaaacccagcaaaauucau

SEQ ID NO: 14507 - RNA, 32 nt, Homo Sapiens
caugcaugaucaccagcauuuauuuucauuau

SEQ ID NO: 14508 - RNA, 29 nt, Homo Sapiens
cuuucuauuauuuguugaaagcuaggccu

SEQ ID NO: 14509 - RNA, 32 nt, Homo Sapiens
agcccgagcaggucggggagcugugcuucucu

SEQ ID NO: 14510 - RNA, 32 nt, Homo Sapiens
uauauccauauucauaugcauuuuauaaaaca

SEQ ID NO: 14511 - RNA, 32 nt, Homo Sapiens
aacccaggcagacaggcaguuggacacacuga

SEQ ID NO: 14512 - RNA, 32 nt, Homo Sapiens
gaguuuagucgucuccuaaaucuuuucucuug

SEQ ID NO: 14513 - RNA, 32 nt, Homo Sapiens
ggggcugcagguggcggcgcagucucgguagg

SEQ ID NO: 14514 - RNA, 32 nt, Homo Sapiens
cugucucuccagccaguauauuuaaagguaau

SEQ ID NO: 14515 - RNA, 32 nt, Homo Sapiens
ccgggcguguguauauggaaauaguggggugc

SEQ ID NO: 14516 - RNA, 32 nt, Homo Sapiens
ggccuccgccccaccacuuucauccuaaaccu

SEQ ID NO: 14517 - RNA, 32 nt, Homo Sapiens
ggaccccaauugcaggaguauguguugcuugg

SEQ ID NO: 14518 - RNA, 32 nt, Homo Sapiens
cugcuuugacuucaggcucuuccuucugccca

SEQ ID NO: 14519 - RNA, 32 nt, Homo Sapiens
gcggggcgcaccaccgaucuggggugcggggc

SEQ ID NO: 14520 - RNA, 32 nt, Homo Sapiens
acugggaggggagaggggggcgggcgacggag

SEQ ID NO: 14521 - RNA, 32 nt, Homo Sapiens
gccccuugcauuccaaaucuccuguguccucc

SEQ ID NO: 14522 - RNA, 32 nt, Homo Sapiens
uguuuacuagacggauguuaauaaaaacuaug

SEQ ID NO: 14523 - RNA, 32 nt, Homo Sapiens
ccuagaaaauuuggauucuagaccaaaaauca

SEQ ID NO: 14524 - RNA, 32 nt, Homo Sapiens
cuccccgccucuuuuuacacucugcuuguugc

SEQ ID NO: 14525 - RNA, 32 nt, Homo Sapiens
uagccacgucuggccuguguccuugggcaguc

SEQ ID NO: 14526 - RNA, 32 nt, Homo Sapiens
cucucacugagcaagggcucggucggcccacc

SEQ ID NO: 14527 - RNA, 32 nt, Homo Sapiens
gugaccagaggccugugugaaugugugcaccu

SEQ ID NO: 14528 - RNA, 32 nt, Homo Sapiens
gauugccugagcucaggaguucaagaucaguc

SEQ ID NO: 14529 - RNA, 32 nt, Homo Sapiens
gaguuggggcagaggagaacuugcugccucgg

SEQ ID NO: 14530 - RNA, 32 nt, Homo Sapiens
ugccacaccccacaacccccuauauuauuuug

SEQ ID NO: 14531 - RNA, 32 nt, Homo Sapiens
uuugguuugcuggccugcgggcuccuagaagg

SEQ ID NO: 14532 - RNA, 32 nt, Homo Sapiens
uccccagcacacccugcuguauguggccacag

SEQ ID NO: 14533 - RNA, 32 nt, Homo Sapiens
gcgggccugccagcugggggccuuugcggcgc

SEQ ID NO: 14534 - RNA, 32 nt, Homo Sapiens
aagaggcagcggggcgcggguggauuggggcu

SEQ ID NO: 14535 - RNA, 32 nt, Homo Sapiens
ccacaugcaccucgagcaacacuugugagcca

SEQ ID NO: 14536 - RNA, 32 nt, Homo Sapiens
ucaaacggucccacccaagccugucaccucug

SEQ ID NO: 14537 - RNA, 32 nt, Homo Sapiens
cccaaacuagguuccccgaggcacucuacgga

SEQ ID NO: 14538 - RNA, 32 nt, Homo Sapiens
caaaauguauuguucaggaugugagcguggca

SEQ ID NO: 14539 - RNA, 32 nt, Homo Sapiens
ugguuuucaugacuuugaaugauauauuuuug

SEQ ID NO: 14540 - RNA, 32 nt, Homo Sapiens
aaggggcucguucauucauucauucacuauaa

SEQ ID NO: 14541 - RNA, 32 nt, Homo Sapiens
uacuuaguguuuucuuacaaucguggaaauca

SEQ ID NO: 14542 - RNA, 32 nt, Homo Sapiens
acuguggccccggugcucugcccccacgcccc

SEQ ID NO: 14543 - RNA, 32 nt, Homo Sapiens
ggccuucagucuccagaguggagaaucugccu

SEQ ID NO: 14544 - RNA, 32 nt, Homo Sapiens
uacugcagaaaagaagacgagaaugcaaccau

SEQ ID NO: 14545 - RNA, 32 nt, Homo Sapiens
ggccgcuugugaugaaacuguaacuuacaaga

SEQ ID NO: 14546 - RNA, 32 nt, Homo Sapiens
cguggcccuggucuucgccaccuaccugcuca

SEQ ID NO: 14547 - RNA, 32 nt, Homo Sapiens
auuuucuuguaaagggauaaacacggacgugu

SEQ ID NO: 14548 - RNA, 32 nt, Homo Sapiens
aaggaagccauagugucacuuccacacaauua

SEQ ID NO: 14549 - RNA, 30 nt, Homo Sapiens
gugguguggagcgcgccgggucccggagcc

SEQ ID NO: 14550 - RNA, 32 nt, Homo Sapiens
ugguaguggcggaggagaaaggggucggcgca

SEQ ID NO: 14551 - RNA, 32 nt, Homo Sapiens
uaaugugaauacugaggaauuuuggucccuca

SEQ ID NO: 14552 - RNA, 32 nt, Homo Sapiens
uucauuaguuugcuauagaaauccaguacuua

SEQ ID NO: 14553 - RNA, 32 nt, Homo Sapiens
ggagaaaagcagcugaagaugucuguugagug

SEQ ID NO: 14554 - RNA, 32 nt, Homo Sapiens
cccccucuccuuucccaccaggcguguguaac

SEQ ID NO: 14555 - RNA, 32 nt, Homo Sapiens
cgccggcacagagaggcggccgugggcagggg

SEQ ID NO: 14556 - RNA, 32 nt, Homo Sapiens
uguuuugacaagcuaccacacgucuuaaguaa

SEQ ID NO: 14557 - RNA, 32 nt, Homo Sapiens
cuuucaacagagcauuccauuuuguccuguua

SEQ ID NO: 14558 - RNA, 32 nt, Homo Sapiens
ugaauugcuauguucaggauguucuagggggu

SEQ ID NO: 14559 - RNA, 32 nt, Homo Sapiens
gggcuccagcccagcccgguggauccucuggg

SEQ ID NO: 14560 - RNA, 32 nt, Homo Sapiens
aagcuuuucuaaaaauucuguuugugugaaaa

SEQ ID NO: 14561 - RNA, 32 nt, Homo Sapiens
caccauucaaagccaggcagucuggccccagc

SEQ ID NO: 14562 - RNA, 32 nt, Homo Sapiens
cagaauuccagccaaggcaaauucaguuggau

SEQ ID NO: 14563 - RNA, 32 nt, Homo Sapiens
aguaaaucagaauaaacugcacccagacuuuc

SEQ ID NO: 14564 - RNA, 32 nt, Homo Sapiens
aggggaggguacugaggggcagauggcuccag

SEQ ID NO: 14565 - RNA, 32 nt, Homo Sapiens
ggugggcagggguagaggagggggccgcuguc

SEQ ID NO: 14566 - RNA, 32 nt, Homo Sapiens
cuagcacgccgcauacguggagaacgugcuua

SEQ ID NO: 14567 - RNA, 32 nt, Homo Sapiens
ugcuguaguguuucuuuuuauuuuaguuccuu

SEQ ID NO: 14568 - RNA, 32 nt, Homo Sapiens
uccuggguuuuagcgauucuucugccucagcc

SEQ ID NO: 14569 - RNA, 32 nt, Homo Sapiens
auaaaauucaauuuauaaagaucauauaccca

SEQ ID NO: 14570 - RNA, 32 nt, Homo Sapiens
ugcuaauaaacauuugccaaagggcaguugua

SEQ ID NO: 14571 - RNA, 32 nt, Homo Sapiens
cuggcucgcucgcccguccggcgcacgcuccg

SEQ ID NO: 14572 - RNA, 32 nt, Homo Sapiens
uagaugcugauaaauuugauucucuggcuuau

SEQ ID NO: 14573 - RNA, 32 nt, Homo Sapiens
caguccggccgcgccucccgggccccgcguua

SEQ ID NO: 14574 - RNA, 32 nt, Homo Sapiens
cgugccuacgugagcccgcgggcgcccuucua

SEQ ID NO: 14575 - RNA, 32 nt, Homo Sapiens
agcucuuacaggauauaaaacaguccauacuu

SEQ ID NO: 14576 - RNA, 32 nt, Homo Sapiens
guaauggacaagcagcaggccaucaggaacuc

SEQ ID NO: 14577 - RNA, 32 nt, Homo Sapiens
ucuuauauuuaguccuagauuucugugagucu

SEQ ID NO: 14578 - RNA, 32 nt, Homo Sapiens
ccggccuccccuccccgcaggaagccccgccc

SEQ ID NO: 14579 - RNA, 29 nt, Homo Sapiens
acacacauauguauauaaaauucauaaug

SEQ ID NO: 14580 - RNA, 32 nt, Homo Sapiens
ugggaaaaugucuauggaugaagcucuggaga

SEQ ID NO: 14581 - RNA, 32 nt, Homo Sapiens
ccaaauguggguuuuucuaauucaaucauuuc

SEQ ID NO: 14582 - RNA, 32 nt, Homo Sapiens
ggcugacuccagcuucugguggaccuggauau

SEQ ID NO: 14583 - RNA, 32 nt, Homo Sapiens
gcaaugcuggaaagagcaaaagaauaucauug

SEQ ID NO: 14584 - RNA, 32 nt, Homo Sapiens
cucagagaggggcugccuggucuggggccuga

SEQ ID NO: 14585 - RNA, 32 nt, Homo Sapiens
agcauaaacaauuuauuuguggcuuauuuuac

SEQ ID NO: 14586 - RNA, 32 nt, Homo Sapiens
gggcuuugggugagauaucuuugcacagauaa

SEQ ID NO: 14587 - RNA, 32 nt, Homo Sapiens
uuaucugcugaauaaaugaguccaccaaaagc

SEQ ID NO: 14588 - RNA, 32 nt, Homo Sapiens
cugucagacagaggaggcugaggcucagagag

SEQ ID NO: 14589 - RNA, 32 nt, Homo Sapiens
uguacuaaauuaaguguaaucuauuaaggcaa

SEQ ID NO: 14590 - RNA, 27 nt, Homo Sapiens
ccuuccccacucuucagccccgaguca

SEQ ID NO: 14591 - RNA, 32 nt, Homo Sapiens
aacacugacaacauuuagcuuaaagguuuucc

SEQ ID NO: 14592 - RNA, 32 nt, Homo Sapiens
ugugguuuuucucgugguuuuuauuguaaaaa

SEQ ID NO: 14593 - RNA, 32 nt, Homo Sapiens
gagggggcucugcgcgcucaaccccgucccug

SEQ ID NO: 14594 - RNA, 32 nt, Homo Sapiens
auuaaaggacagaccaagagggcgcgggagcu

SEQ ID NO: 14595 - RNA, 32 nt, Homo Sapiens
guaaauuuauucaacuaacgaugggaaaugua

SEQ ID NO: 14596 - RNA, 32 nt, Homo Sapiens
cugcccgcguguccagcccuguugcucuccug

SEQ ID NO: 14597 - RNA, 32 nt, Homo Sapiens
aaucugaucaacuguagcuuuauuuaaagcaa

SEQ ID NO: 14598 - RNA, 32 nt, Homo Sapiens
cugugauucuaccuuuuuguuuuguucaggcc

SEQ ID NO: 14599 - RNA, 32 nt, Homo Sapiens
ucaaagucugaagagugacacauggugaucau

SEQ ID NO: 14600 - RNA, 32 nt, Homo Sapiens
cccucuuguauauaaccaucgcacaacauaca

SEQ ID NO: 14601 - RNA, 32 nt, Homo Sapiens
ucuucaaaacaaauuuaccuucauauagcauu

SEQ ID NO: 14602 - RNA, 32 nt, Homo Sapiens
gggcgaugcagcgcccuuuggcuugccgggcc

SEQ ID NO: 14603 - RNA, 32 nt, Homo Sapiens
ccgcccugcccccgcucgcccgccuuaagaag

SEQ ID NO: 14604 - RNA, 32 nt, Homo Sapiens
gccugcuucccucgaccucguccuccuccccg

SEQ ID NO: 14605 - RNA, 32 nt, Homo Sapiens
cagcuucuauagaccaccaccacccacucaca

SEQ ID NO: 14606 - RNA, 31 nt, Homo Sapiens
gaugcgguguguccgcugccccguugccuau

SEQ ID NO: 14607 - RNA, 32 nt, Homo Sapiens
uggacuaguccucauuagcauguuugcauagc

SEQ ID NO: 14608 - RNA, 32 nt, Homo Sapiens
uccuuucugcccguggacgccgccgaagaagc

SEQ ID NO: 14609 - RNA, 32 nt, Homo Sapiens
gccacugcgcccagccaauaccaugaguuuua

SEQ ID NO: 14610 - RNA, 32 nt, Homo Sapiens
ggagcugcaucguccacuccggucggcggugg

SEQ ID NO: 14611 - RNA, 32 nt, Homo Sapiens
aauugcuccacccacaccuccaugaccaaggg

SEQ ID NO: 14612 - RNA, 32 nt, Homo Sapiens
uucuucccuucugcaccacugcccguacccuu

SEQ ID NO: 14613 - RNA, 32 nt, Homo Sapiens
cacgcccgggcuugccggggccuggacagcug

SEQ ID NO: 14614 - RNA, 30 nt, Homo Sapiens
ccacggcgaggcgcugcgccggcgguggag

SEQ ID NO: 14615 - RNA, 32 nt, Homo Sapiens
cgcgacucucccgacgcggggaggcuauucug

SEQ ID NO: 14616 - RNA, 32 nt, Homo Sapiens
cucgcaggagccgccccccgggccccccucag

SEQ ID NO: 14617 - RNA, 32 nt, Homo Sapiens
uggagccaauauguaacauacucuaaagucca

SEQ ID NO: 14618 - RNA, 32 nt, Homo Sapiens
agucugagggcuugagucugggggagccuggc

SEQ ID NO: 14619 - RNA, 32 nt, Homo Sapiens
guauguaaaucaucaugguuauguauaacuua

SEQ ID NO: 14620 - RNA, 32 nt, Homo Sapiens
caagucuagucuuuucacauuuuucugccugc

SEQ ID NO: 14621 - RNA, 32 nt, Homo Sapiens
ugauagcugaggaggagcggggauuuggacga

SEQ ID NO: 14622 - RNA, 32 nt, Homo Sapiens
ggucccucggugcagacaccaggccgggcgcg

SEQ ID NO: 14623 - RNA, 32 nt, Homo Sapiens
cagaaguuaauagaagaaugaaauaaugcaug

SEQ ID NO: 14624 - RNA, 32 nt, Homo Sapiens
uuccagaugaggaaacagaggcuaagaaagga

SEQ ID NO: 14625 - RNA, 32 nt, Homo Sapiens
gcagcgcugcaccagcucccacggcuguguca

SEQ ID NO: 14626 - RNA, 27 nt, Homo Sapiens
aguggccagaaauucuggugguggaua

SEQ ID NO: 14627 - RNA, 32 nt, Homo Sapiens
uucgugauucacuuuaaccugaugguuugcau

SEQ ID NO: 14628 - RNA, 32 nt, Homo Sapiens
acguguauaauggaaaugauuacaauaaacag

SEQ ID NO: 14629 - RNA, 32 nt, Homo Sapiens
cggucggccuccccgccccaggcgucacucag

SEQ ID NO: 14630 - RNA, 32 nt, Homo Sapiens
uugcuugagccugggagauggagguugcagug

SEQ ID NO: 14631 - RNA, 32 nt, Homo Sapiens
aguuauaaauuguaagguaauuuuaaauuguc

SEQ ID NO: 14632 - RNA, 32 nt, Homo Sapiens
aauauuuuauccaugaaaaugacuuccagaaa

SEQ ID NO: 14633 - RNA, 32 nt, Homo Sapiens
uuaaaacaauaacaaaaaccagagaugugccu

SEQ ID NO: 14634 - RNA, 32 nt, Homo Sapiens
acaacuuccacuuuuuuuuaaacugcacuuuu

SEQ ID NO: 14635 - RNA, 32 nt, Homo Sapiens
uauaccgccaucuuacacgaaagccacagagu

SEQ ID NO: 14636 - RNA, 32 nt, Homo Sapiens
ccccaugucccuccccacaccggcccugggca

SEQ ID NO: 14637 - RNA, 32 nt, Homo Sapiens
uaaccaagaagagaggcagagaaggugugcuc

SEQ ID NO: 14638 - RNA, 32 nt, Homo Sapiens
augaucccauuucagccugugcucugccucga

SEQ ID NO: 14639 - RNA, 32 nt, Homo Sapiens
ccucaggcaauuccuuuugauucuuuuuucuu

SEQ ID NO: 14640 - RNA, 32 nt, Homo Sapiens
gcucuggaucuggccagucuccaggccacggc

SEQ ID NO: 14641 - RNA, 32 nt, Homo Sapiens
acauuuucuuuauccauucauccaccgaugga

SEQ ID NO: 14642 - RNA, 32 nt, Homo Sapiens
ugaaauggagaugaaaucauggaggcauuucu

SEQ ID NO: 14643 - RNA, 32 nt, Homo Sapiens
cugauaucucaaagucuuuuguacauaacaua

SEQ ID NO: 14644 - RNA, 32 nt, Homo Sapiens
cagacgggcuugucuggauccuuguuugcugu

SEQ ID NO: 14645 - RNA, 32 nt, Homo Sapiens
aucaagagguacugaggcuagacaaugggagg

SEQ ID NO: 14646 - RNA, 32 nt, Homo Sapiens
ucuuuguuuaccauucaaauggcuuacuucau

SEQ ID NO: 14647 - RNA, 32 nt, Homo Sapiens
auagauuuggaaacugguuuuccucuguuuug

SEQ ID NO: 14648 - RNA, 32 nt, Homo Sapiens
aaggaagcauaagcuucccauuucacaaaggg

SEQ ID NO: 14649 - RNA, 32 nt, Homo Sapiens
gauauauaggaucaugauauuccuucuaucca

SEQ ID NO: 14650 - RNA, 32 nt, Homo Sapiens
uggacuuuggcucagcggugccacugaggacc

SEQ ID NO: 14651 - RNA, 32 nt, Homo Sapiens
cgcccccggccccgggaccccggagcggagau

SEQ ID NO: 14652 - RNA, 32 nt, Homo Sapiens
ccaccucccccuccccggccacaugccgcguc

SEQ ID NO: 14653 - RNA, 32 nt, Homo Sapiens
agaccuuaaaaauacaagguuaagagggaccc

SEQ ID NO: 14654 - RNA, 32 nt, Homo Sapiens
uaaaaugucuauuuuuaauguuuguacacaac

SEQ ID NO: 14655 - RNA, 32 nt, Homo Sapiens
ugauagaaauuauuuccccaacuuuuauaaau

SEQ ID NO: 14656 - RNA, 32 nt, Homo Sapiens
ggugggauggacuggcugccggaccgagugcc

SEQ ID NO: 14657 - RNA, 32 nt, Homo Sapiens
ggguggagugacaaaccgcauuguccugugcc

SEQ ID NO: 14658 - RNA, 32 nt, Homo Sapiens
uccugccucacccucugcccagcccugaucca

SEQ ID NO: 14659 - RNA, 32 nt, Homo Sapiens
auugacuugacaaagcaugaagauauucccag

SEQ ID NO: 14660 - RNA, 32 nt, Homo Sapiens
acuagugcccucugcugggcauguguccaguc

SEQ ID NO: 14661 - RNA, 32 nt, Homo Sapiens
ucccugcaugcaagauugaacuguaaaaccaa

SEQ ID NO: 14662 - RNA, 32 nt, Homo Sapiens
acugucacagaaaaaugaaacugugacugguu

SEQ ID NO: 14663 - RNA, 32 nt, Homo Sapiens
ccuucuaggagcucaagggcuguuugaaacuc

SEQ ID NO: 14664 - RNA, 32 nt, Homo Sapiens
aaccuccuuccacagccgcaucuucucaugac

SEQ ID NO: 14665 - RNA, 32 nt, Homo Sapiens
gucaucaaguaguaguacuuaauaguacccaa

SEQ ID NO: 14666 - RNA, 32 nt, Homo Sapiens
ugacccugacuauaugaaggugauucugggga

SEQ ID NO: 14667 - RNA, 32 nt, Homo Sapiens
gagauguagauggcagugugggguacaggaga

SEQ ID NO: 14668 - RNA, 32 nt, Homo Sapiens
cgccuuuuggcgcgugguggguuuuugguagu

SEQ ID NO: 14669 - RNA, 32 nt, Homo Sapiens
cauuuccccauccuuucugcgugaagauauuu

SEQ ID NO: 14670 - RNA, 32 nt, Homo Sapiens
cggucucuccccagccucuuccuucccccugg

SEQ ID NO: 14671 - RNA, 32 nt, Homo Sapiens
gcauccagagcuaacaaucauucuucagauca

SEQ ID NO: 14672 - RNA, 32 nt, Homo Sapiens
caaauguaaauacuuuuuguuuguucuagugg

SEQ ID NO: 14673 - RNA, 32 nt, Homo Sapiens
gccaccauggucaucaccacccuuccagggcc

SEQ ID NO: 14674 - RNA, 32 nt, Homo Sapiens
gugcgggcgggaaggggcacgggcacccccgc

SEQ ID NO: 14675 - RNA, 32 nt, Homo Sapiens
agcuacaaugucucgugaaucuuggguuucca

SEQ ID NO: 14676 - RNA, 30 nt, Homo Sapiens
uccgccccugcggugggggaaguuccuggg

SEQ ID NO: 14677 - RNA, 32 nt, Homo Sapiens
ucugcuaaauuaauguuuauuuugugagaagu

SEQ ID NO: 14678 - RNA, 32 nt, Homo Sapiens
agcauacuaacaucacuaaaucuuaggauuua

SEQ ID NO: 14679 - RNA, 32 nt, Homo Sapiens
ccucauuucuuaaaauuagagaauuaaggucc

SEQ ID NO: 14680 - RNA, 32 nt, Homo Sapiens
gcacacccgagcucgggcucugaccgcggcuc

SEQ ID NO: 14681 - RNA, 32 nt, Homo Sapiens
ugcugcugucccgcccucuguggggcaggagg

SEQ ID NO: 14682 - RNA, 32 nt, Homo Sapiens
uaaacaaauuuauaaacauuacuaauuucuga

SEQ ID NO: 14683 - RNA, 32 nt, Homo Sapiens
uguaugaccuugcacaagucacuuccuucuga

SEQ ID NO: 14684 - RNA, 32 nt, Homo Sapiens
aaaacaagacugccucccucucuuccgggagc

SEQ ID NO: 14685 - RNA, 32 nt, Homo Sapiens
guaaagggaacuggaccgccucaggggaagac

SEQ ID NO: 14686 - RNA, 32 nt, Homo Sapiens
gacggcuggggcgggggcaggaggaggggcug

SEQ ID NO: 14687 - RNA, 32 nt, Homo Sapiens
gcgccuucgguagggggcgcccggggcccagc

SEQ ID NO: 14688 - RNA, 32 nt, Homo Sapiens
cgcugaagcuccagcccuuccuggugcccuga

SEQ ID NO: 14689 - RNA, 32 nt, Homo Sapiens
uuuuggguaugccuuuuaaaaaugcuuauaga

SEQ ID NO: 14690 - RNA, 32 nt, Homo Sapiens
guuacuuugucaaagaguaugggcacuugaua

SEQ ID NO: 14691 - RNA, 32 nt, Homo Sapiens
aagcuuucagacacaauucagcccuucaaaga

SEQ ID NO: 14692 - RNA, 32 nt, Homo Sapiens
uccuccgccgccgcggacuccggcagcuuuau

SEQ ID NO: 14693 - RNA, 32 nt, Homo Sapiens
ggcggagugaggaggaagcggaggcgagaccg

SEQ ID NO: 14694 - RNA, 32 nt, Homo Sapiens
ucuuaggcuuggcgguggcggcggcggcagcu

SEQ ID NO: 14695 - RNA, 32 nt, Homo Sapiens
cugagccagccucggcgggaccgaggucccgg

SEQ ID NO: 14696 - RNA, 32 nt, Homo Sapiens
aucauggggaaaggauaguaaccuggccgggu

SEQ ID NO: 14697 - RNA, 32 nt, Homo Sapiens
ucauuagguucaaauuguaacugacuuacauu

SEQ ID NO: 14698 - RNA, 32 nt, Homo Sapiens
ccaccguccaacaauuacauucaucugcaucu

SEQ ID NO: 14699 - RNA, 32 nt, Homo Sapiens
aagccauuuuuagagcaucugggccacuuggg

SEQ ID NO: 14700 - RNA, 32 nt, Homo Sapiens
ucccuccccuccccaguccugccggcugccuc

SEQ ID NO: 14701 - RNA, 32 nt, Homo Sapiens
cagcugggcaguugcuggcccagguucagucu

SEQ ID NO: 14702 - RNA, 32 nt, Homo Sapiens
ucugauuugaaauuguaccuuuucucaggccu

SEQ ID NO: 14703 - RNA, 32 nt, Homo Sapiens
cugaaaagccccauagugauuggucuucaaaa

SEQ ID NO: 14704 - RNA, 32 nt, Homo Sapiens
gacucugccugcauggcuuaguaguagaagga

SEQ ID NO: 14705 - RNA, 32 nt, Homo Sapiens
guuuucauagaaaggaaaggcuaaagguuuuc

SEQ ID NO: 14706 - RNA, 32 nt, Homo Sapiens
cagaaaaauuaugagacacauaaagaagaaag

SEQ ID NO: 14707 - RNA, 32 nt, Homo Sapiens
gaaauugguauuuuaauacugucuguauuuau

SEQ ID NO: 14708 - RNA, 32 nt, Homo Sapiens
guuuaaaucugagagugauauucauuuggcag

SEQ ID NO: 14709 - RNA, 32 nt, Homo Sapiens
ucaugcugccagcaucacugaaugcacugaac

SEQ ID NO: 14710 - RNA, 29 nt, Homo Sapiens
uaaccauguaguuuguaccaucacuaaau

SEQ ID NO: 14711 - RNA, 32 nt, Homo Sapiens
aagugaggaggaagaaaggugaacuccuuuuc

SEQ ID NO: 14712 - RNA, 32 nt, Homo Sapiens
uacuguuauucuuuaagaaacaucuacaaaaa

SEQ ID NO: 14713 - RNA, 32 nt, Homo Sapiens
guuuguuuguguuuuuuuuuuaucuugaaccu

SEQ ID NO: 14714 - RNA, 32 nt, Homo Sapiens
aggaauucggaggaaaauauuucaguggucau

SEQ ID NO: 14715 - RNA, 32 nt, Homo Sapiens
gggcggaucuggagguggacaaaccuaggucc

SEQ ID NO: 14716 - RNA, 32 nt, Homo Sapiens
caaggaaugauccauacugaaaaaaugcugag

SEQ ID NO: 14717 - RNA, 32 nt, Homo Sapiens
aagguacuuuguuucuuacaacauaauuuagg

SEQ ID NO: 14718 - RNA, 32 nt, Homo Sapiens
ucgggccgcgcggggaaggcggcggccaagau

SEQ ID NO: 14719 - RNA, 32 nt, Homo Sapiens
uauauaacaaacuugcccuuugaaagacuaag

SEQ ID NO: 14720 - RNA, 32 nt, Homo Sapiens
uaaaugucacuuccucaucaguuucacuucug

SEQ ID NO: 14721 - RNA, 32 nt, Homo Sapiens
aaaaggaggggagggccagaagccacauccuc

SEQ ID NO: 14722 - RNA, 32 nt, Homo Sapiens
cugcaguauuauuugcaaaagccaagaggugu

SEQ ID NO: 14723 - RNA, 32 nt, Homo Sapiens
uauguagacauuuaaaaucaaauaucaaguag

SEQ ID NO: 14724 - RNA, 32 nt, Homo Sapiens
gccgggggaagauaaagguacauuauaaaaca

SEQ ID NO: 14725 - RNA, 32 nt, Homo Sapiens
ggacggguggcugcagcggggcgugggccggg

SEQ ID NO: 14726 - RNA, 32 nt, Homo Sapiens
uaaauacaagauaaauuaucacuggaguuuuu

SEQ ID NO: 14727 - RNA, 32 nt, Homo Sapiens
gaggugcacagcacacguuccacgacagauga

SEQ ID NO: 14728 - RNA, 32 nt, Homo Sapiens
cugggguguucggauuuccaauaaagaaacag

SEQ ID NO: 14729 - RNA, 32 nt, Homo Sapiens
uuguacaucuguugagcaacacuacauaacug

SEQ ID NO: 14730 - RNA, 32 nt, Homo Sapiens
gugaccaccccagcugcagagucagugcccug

SEQ ID NO: 14731 - RNA, 32 nt, Homo Sapiens
uagaaguaguguucacauccauuuagagauac

SEQ ID NO: 14732 - RNA, 32 nt, Homo Sapiens
agcaccucccugcucuucugcacuccuggaca

SEQ ID NO: 14733 - RNA, 32 nt, Homo Sapiens
ccugugucguaugugcuuuucuuucuuucaua

SEQ ID NO: 14734 - RNA, 32 nt, Homo Sapiens
gaggagagaaauguauuugcagagagagcaug

SEQ ID NO: 14735 - RNA, 32 nt, Homo Sapiens
cuuaguauucaauauaaugcauuguuugguuu

SEQ ID NO: 14736 - RNA, 32 nt, Homo Sapiens
aaaagcaaaaaugauuacugauaauaucacaa

SEQ ID NO: 14737 - RNA, 32 nt, Homo Sapiens
aacguccggcucugcgccccgacgcggcuccu

SEQ ID NO: 14738 - RNA, 27 nt, Homo Sapiens
acgacaaacuaaaaaugaacuguguuu

SEQ ID NO: 14739 - RNA, 32 nt, Homo Sapiens
uccagggugucugcgcacauuuuaaguuaauu

SEQ ID NO: 14740 - RNA, 32 nt, Homo Sapiens
gcgcaggcaggcggaggcugagggcgccgcug

SEQ ID NO: 14741 - RNA, 32 nt, Homo Sapiens
uaaugauauggacaaugaaauccaggcugaag

SEQ ID NO: 14742 - RNA, 32 nt, Homo Sapiens
cugguggaugacuguggugaucguacugauga

SEQ ID NO: 14743 - RNA, 32 nt, Homo Sapiens
accugggcguucgcguccugcugcgcuuccag

SEQ ID NO: 14744 - RNA, 32 nt, Homo Sapiens
cgagacccgcccggcccggcggugcgaugagc

SEQ ID NO: 14745 - RNA, 32 nt, Homo Sapiens
aggggucugaaauuugugauggaaucagauuu

SEQ ID NO: 14746 - RNA, 32 nt, Homo Sapiens
uuauauauucaugguaugaauuccuuuaaaaa

SEQ ID NO: 14747 - RNA, 32 nt, Homo Sapiens
caccuuuaucagugccugggaaugcucaaggc

SEQ ID NO: 14748 - RNA, 32 nt, Homo Sapiens
guuuuuguuuuuguuuuuaaucaaauaaguuu

SEQ ID NO: 14749 - RNA, 32 nt, Homo Sapiens
agcuccgggauaugcuccgcggugcuaccggu

SEQ ID NO: 14750 - RNA, 32 nt, Homo Sapiens
cgagaacggcgcccaggggucccuacgucugc

SEQ ID NO: 14751 - RNA, 32 nt, Homo Sapiens
ccugcauucauuccacgguccauuccacagcu

SEQ ID NO: 14752 - RNA, 32 nt, Homo Sapiens
gccuggcagugucaagccugaaaccaagcaau

SEQ ID NO: 14753 - RNA, 32 nt, Homo Sapiens
gccuuuuaugucuuggagacaccugauguaaa

SEQ ID NO: 14754 - RNA, 32 nt, Homo Sapiens
aauuaucugauauuuuguaauggcaucaguua

SEQ ID NO: 14755 - RNA, 32 nt, Homo Sapiens
uaaacuggauacuguacugauacuauucaaug

SEQ ID NO: 14756 - RNA, 32 nt, Homo Sapiens
ucccuggcuuccccagccugcggccgcaagca

SEQ ID NO: 14757 - RNA, 32 nt, Homo Sapiens
ugguaucuuuugccacauccagggcgaggguu

SEQ ID NO: 14758 - RNA, 32 nt, Homo Sapiens
gacgggcucccuccucccccaccuggccccug

SEQ ID NO: 14759 - RNA, 32 nt, Homo Sapiens
uucuauuucuguggaaaacgaccuuggaauuu

SEQ ID NO: 14760 - RNA, 32 nt, Homo Sapiens
cugaagaacaaauggcuguccaguuuauuaaa

SEQ ID NO: 14761 - RNA, 32 nt, Homo Sapiens
uucuugacucgcguugcugccggccuccgccc

SEQ ID NO: 14762 - RNA, 32 nt, Homo Sapiens
uggaaauuggcuuuucccguuggggccgaagg

SEQ ID NO: 14763 - RNA, 32 nt, Homo Sapiens
guaggucuguucagagucugugccccuggacc

SEQ ID NO: 14764 - RNA, 32 nt, Homo Sapiens
uuagucccugaacauuuucuuugguuaaacca

SEQ ID NO: 14765 - RNA, 32 nt, Homo Sapiens
uuuuaaggucacauuuuauuccuggaugcuuu

SEQ ID NO: 14766 - RNA, 32 nt, Homo Sapiens
gaacagugccucccgccagacccaggcggcuu

SEQ ID NO: 14767 - RNA, 32 nt, Homo Sapiens
cagcaguguguggcgagugcguuacuuuucua

SEQ ID NO: 14768 - RNA, 32 nt, Homo Sapiens
gaggccucccggaacgaaagcggagaaggggg

SEQ ID NO: 14769 - RNA, 32 nt, Homo Sapiens
gugaucauggcagauagccuggaaauaaaacu

SEQ ID NO: 14770 - RNA, 32 nt, Homo Sapiens
aaauccggacuuuugcucuccauccucuuaga

SEQ ID NO: 14771 - RNA, 32 nt, Homo Sapiens
uggguuuagaggaaccuaaaacaucauagcuu

SEQ ID NO: 14772 - RNA, 32 nt, Homo Sapiens
guguggcucaauaguucauuuauuuuuguugc

SEQ ID NO: 14773 - RNA, 28 nt, Homo Sapiens
cgcaaggggccgagcaggaugaggaaac

SEQ ID NO: 14774 - RNA, 32 nt, Homo Sapiens
uugacucaaacagugaaugccuauagaaauaa

SEQ ID NO: 14775 - RNA, 32 nt, Homo Sapiens
ggcaaaagggaagggaaggaaacuuagcagag

SEQ ID NO: 14776 - RNA, 28 nt, Homo Sapiens
aaaaaugggcggccgggcgcgguggcuc

SEQ ID NO: 14777 - RNA, 32 nt, Homo Sapiens
cagccagcgguuuuccucucuucucuaucugu

SEQ ID NO: 14778 - RNA, 32 nt, Homo Sapiens
uucaguauuucugaauacuuagucuaauuugg

SEQ ID NO: 14779 - RNA, 32 nt, Homo Sapiens
gcccccacccucaaagcugagcagguugagcc

SEQ ID NO: 14780 - RNA, 31 nt, Homo Sapiens
cccccaaccccuaccaccugagaaaaacgau

SEQ ID NO: 14781 - RNA, 32 nt, Homo Sapiens
cgcagugugaugcggcgucccugcacacgccg

SEQ ID NO: 14782 - RNA, 32 nt, Homo Sapiens
ugggaauguagaaaacguacuccaugaucugc

SEQ ID NO: 14783 - RNA, 32 nt, Homo Sapiens
cacccguaaucccagcacuuugcggggccgag

SEQ ID NO: 14784 - RNA, 32 nt, Homo Sapiens
gagaugucgaaagauuucuugaccucuuaaca

SEQ ID NO: 14785 - RNA, 32 nt, Homo Sapiens
ucugauggccucccaaaccaaugugccuguuu

SEQ ID NO: 14786 - RNA, 32 nt, Homo Sapiens
aagugcuaggauugcaggugugagccacugug

SEQ ID NO: 14787 - RNA, 32 nt, Homo Sapiens
aaacuuucuccauggccuaugauccaaauugu

SEQ ID NO: 14788 - RNA, 32 nt, Homo Sapiens
auaccaaauaacaauauagacaacauuauuau

SEQ ID NO: 14789 - RNA, 32 nt, Homo Sapiens
cugcacaccccugcccuucucuggaugagccc

SEQ ID NO: 14790 - RNA, 32 nt, Homo Sapiens
ccugcuccaguugcggucaucaugacuacgcc

SEQ ID NO: 14791 - RNA, 32 nt, Homo Sapiens
agagggcggaagggcuggcgaucgcuuggagu

SEQ ID NO: 14792 - RNA, 32 nt, Homo Sapiens
ccggagcugagcuggcugugcaccagcaaacc

SEQ ID NO: 14793 - RNA, 32 nt, Homo Sapiens
gcuagcuuguuuucuucacagugcagugaauu

SEQ ID NO: 14794 - RNA, 32 nt, Homo Sapiens
uuucacauuugugaauuagguauggccaccug

SEQ ID NO: 14795 - RNA, 32 nt, Homo Sapiens
aggugcccccgcugcuggccucaugcuccucu

SEQ ID NO: 14796 - RNA, 32 nt, Homo Sapiens
gagauguaccacaguuuguuuauucuucuguu

SEQ ID NO: 14797 - RNA, 32 nt, Homo Sapiens
accaaccugggcaacauagugagauucuguua

SEQ ID NO: 14798 - RNA, 32 nt, Homo Sapiens
uauucuaacagaucucuuagcuugucacugag

SEQ ID NO: 14799 - RNA, 32 nt, Homo Sapiens
agcucgggggucggcucggaaaguagaggggg

SEQ ID NO: 14800 - RNA, 32 nt, Homo Sapiens
ucacuggguccuggugggggucgggcucccuu

SEQ ID NO: 14801 - RNA, 32 nt, Homo Sapiens
ccaggauuuccacagcacacacccacaggccu

SEQ ID NO: 14802 - RNA, 32 nt, Homo Sapiens
caguuuggccccugggucuucgcugcccuuuu

SEQ ID NO: 14803 - RNA, 31 nt, Homo Sapiens
cucaugaggauaucgaacccccaucuacaug

SEQ ID NO: 14804 - RNA, 32 nt, Homo Sapiens
agaaugauugauuuuucuuucaaucagcaugu

SEQ ID NO: 14805 - RNA, 32 nt, Homo Sapiens
ccuuccuucuaaaaaccugauucaugcacagc

SEQ ID NO: 14806 - RNA, 32 nt, Homo Sapiens
gugacuuaagggucaauucaaagcaguauuuu

SEQ ID NO: 14807 - RNA, 32 nt, Homo Sapiens
ccccagcuggccgugcucccccgggaugcaag

SEQ ID NO: 14808 - RNA, 32 nt, Homo Sapiens
cccggcaggcgcucagccugcagacacaggga

SEQ ID NO: 14809 - RNA, 32 nt, Homo Sapiens
gguuuuguuuuauuucguuuccgcgcgucucu

SEQ ID NO: 14810 - RNA, 30 nt, Homo Sapiens
aaguuggggggacacaugcaaaggauucug

SEQ ID NO: 14811 - RNA, 32 nt, Homo Sapiens
guaaaauacuaaaaggcucauuuuuauauuug

SEQ ID NO: 14812 - RNA, 32 nt, Homo Sapiens
aacacccugcgguuggucuccgaugcccuuca

SEQ ID NO: 14813 - RNA, 32 nt, Homo Sapiens
cauuguguuuauuaauagacaugauggguuuu

SEQ ID NO: 14814 - RNA, 32 nt, Homo Sapiens
ugaggacauggacaauaaaguaguauaugauc

SEQ ID NO: 14815 - RNA, 32 nt, Homo Sapiens
aacgcuuccucuugcagugcagaugggaugug

SEQ ID NO: 14816 - RNA, 32 nt, Homo Sapiens
cuugggaggggaggugccaggccagaggcagc

SEQ ID NO: 14817 - RNA, 32 nt, Homo Sapiens
cauuuggcccggaucuaacauggcaccucguc

SEQ ID NO: 14818 - RNA, 32 nt, Homo Sapiens
uuaacucuuucugcuccuugcauuuugacauc

SEQ ID NO: 14819 - RNA, 32 nt, Homo Sapiens
gcaauaauccucacuauguuuccugauucugu

SEQ ID NO: 14820 - RNA, 32 nt, Homo Sapiens
caggaaacaggagauuggaggauacugggcag

SEQ ID NO: 14821 - RNA, 32 nt, Homo Sapiens
acccugcuagccccgcucagccccagaugcgc

SEQ ID NO: 14822 - RNA, 32 nt, Homo Sapiens
cagccgcccucucggcuccgcggcggcgccuc

SEQ ID NO: 14823 - RNA, 32 nt, Homo Sapiens
uaugaaaauuuauaacauaaagcuuaaugcca

SEQ ID NO: 14824 - RNA, 32 nt, Homo Sapiens
ucucauucccuuuuccacggagccccgcgcuu

SEQ ID NO: 14825 - RNA, 32 nt, Homo Sapiens
gugaacuagcuggaauuuuuuauucuugugaa

SEQ ID NO: 14826 - RNA, 30 nt, Homo Sapiens
agugcggggcaggggccggguccccccgga

SEQ ID NO: 14827 - RNA, 27 nt, Homo Sapiens
ucugucgcucuuuucagccccuccugg

SEQ ID NO: 14828 - RNA, 32 nt, Homo Sapiens
ugauauagcaugucucuuuaguuuuguuguuu

SEQ ID NO: 14829 - RNA, 32 nt, Homo Sapiens
gagggggagcgaggggagagggggcugccccc

SEQ ID NO: 14830 - RNA, 32 nt, Homo Sapiens
uccucgccuggcuaauuuuuuauuuuuuguac

SEQ ID NO: 14831 - RNA, 32 nt, Homo Sapiens
auuccugaagcaugagcgcgccaggcggcggc

SEQ ID NO: 14832 - RNA, 32 nt, Homo Sapiens
cugauuccauucucuucaacuaaaucauagag

SEQ ID NO: 14833 - RNA, 32 nt, Homo Sapiens
cgugggugugcagugcccagcacgggacccgg

SEQ ID NO: 14834 - RNA, 32 nt, Homo Sapiens
acaaauagaggcuguagaauggcaaaaauugc

SEQ ID NO: 14835 - RNA, 29 nt, Homo Sapiens
auauuaugaaguuuauucugccuuaugag

SEQ ID NO: 14836 - RNA, 32 nt, Homo Sapiens
augauauucuauuuggggaauguuuuucaaag

SEQ ID NO: 14837 - RNA, 32 nt, Homo Sapiens
ucaucugacucauuuuaauaucugugcuagug

SEQ ID NO: 14838 - RNA, 32 nt, Homo Sapiens
cucuaggagggagaggagcccagggacugacc

SEQ ID NO: 14839 - RNA, 32 nt, Homo Sapiens
cuuccgggacgccgcgcgucacuaagcagcca

SEQ ID NO: 14840 - RNA, 32 nt, Homo Sapiens
cgugaggcuucacuucccucggucugggcuuc

SEQ ID NO: 14841 - RNA, 32 nt, Homo Sapiens
uuugaacuuccacuaucauuguauccauauaa

SEQ ID NO: 14842 - RNA, 32 nt, Homo Sapiens
caccuugacaaugguacuaacuuguuauucua

SEQ ID NO: 14843 - RNA, 32 nt, Homo Sapiens
aacugagagaaaaccuaucagaaggacuaaaa

SEQ ID NO: 14844 - RNA, 32 nt, Homo Sapiens
ccugagcaaccuggcacgggcagccaccaucc

SEQ ID NO: 14845 - RNA, 32 nt, Homo Sapiens
uuuugcuaugugacauaacaaaauacagcugg

SEQ ID NO: 14846 - RNA, 32 nt, Homo Sapiens
cugaagcgcaggacgcgccgccgcccgcgcuc

SEQ ID NO: 14847 - RNA, 32 nt, Homo Sapiens
uacaccucuaggaaaugaaacacuaguucaga

SEQ ID NO: 14848 - RNA, 32 nt, Homo Sapiens
guaggaaagagaagauguucuuauucagauaa

SEQ ID NO: 14849 - RNA, 32 nt, Homo Sapiens
uccccagcccugggcuuggcucuuggcuucca

SEQ ID NO: 14850 - RNA, 32 nt, Homo Sapiens
aauucagguucaggggcuggaugguauguguu

SEQ ID NO: 14851 - RNA, 32 nt, Homo Sapiens
aagaaaaugagggcuuggucaccugaaccaag

SEQ ID NO: 14852 - RNA, 32 nt, Homo Sapiens
ucauuuuguuuuuauuucauugacaaaaucaa

SEQ ID NO: 14853 - RNA, 32 nt, Homo Sapiens
gcaggaagccuugcugccugggacauagagau

SEQ ID NO: 14854 - RNA, 32 nt, Homo Sapiens
cgcugaagggaaggagccagugagccugaccc

SEQ ID NO: 14855 - RNA, 32 nt, Homo Sapiens
gcaauucacaugccucagccaccugaguagca

SEQ ID NO: 14856 - RNA, 32 nt, Homo Sapiens
aaucuauuuuaaaaauuuuauguaauacugca

SEQ ID NO: 14857 - RNA, 32 nt, Homo Sapiens
aggagucuaaucuuggugccuucuguuaaaag

SEQ ID NO: 14858 - RNA, 32 nt, Homo Sapiens
ccccucgggccccagggcuccgaggcacuucc

SEQ ID NO: 14859 - RNA, 32 nt, Homo Sapiens
acacguccaacgccagcaugcagcgcccgggc

SEQ ID NO: 14860 - RNA, 32 nt, Homo Sapiens
uugaauauucuugaacaccaccacugaagagu

SEQ ID NO: 14861 - RNA, 32 nt, Homo Sapiens
uaguauucugguguuuuuauauuuauguaaua

SEQ ID NO: 14862 - RNA, 31 nt, Homo Sapiens
gggaacugugagccgcucagagccgcgcgcc

SEQ ID NO: 14863 - RNA, 31 nt, Homo Sapiens
ugcagugaaguaaaacaggaaucaaucuugc

SEQ ID NO: 14864 - RNA, 32 nt, Homo Sapiens
cccugucucccgcuccccucccagggagcagc

SEQ ID NO: 14865 - RNA, 32 nt, Homo Sapiens
gccaagcaacuggcaggagcugccaccacguu

SEQ ID NO: 14866 - RNA, 32 nt, Homo Sapiens
aggccuccucucuggagucuucacaggggccu

SEQ ID NO: 14867 - RNA, 32 nt, Homo Sapiens
uuuccagacuuugaauugaauauauaaauauu

SEQ ID NO: 14868 - RNA, 32 nt, Homo Sapiens
ucgcuguuguauauuuuaaaguaaauugcacc

SEQ ID NO: 14869 - RNA, 32 nt, Homo Sapiens
ucguccuacccccauguugaguucugcccugg

SEQ ID NO: 14870 - RNA, 32 nt, Homo Sapiens
uggaggcggaggcggcggcagcuccugagcgg

SEQ ID NO: 14871 - RNA, 29 nt, Homo Sapiens
aauggauuuagauugucuauaaagccaca

SEQ ID NO: 14872 - RNA, 32 nt, Homo Sapiens
cuggcucuggaaagccugugcgguccugggca

SEQ ID NO: 14873 - RNA, 32 nt, Homo Sapiens
gucacuaaaaauguaggauacuuuuuauuugg

SEQ ID NO: 14874 - RNA, 32 nt, Homo Sapiens
uccccaugacuuugguuuuguuuacauuuuuc

SEQ ID NO: 14875 - RNA, 32 nt, Homo Sapiens
aaguucugaagauggaucauggccgugacugc

SEQ ID NO: 14876 - RNA, 32 nt, Homo Sapiens
gaucuggggggccucucaccugcuccuaugac

SEQ ID NO: 14877 - RNA, 32 nt, Homo Sapiens
ggugcucucucuccagaagaugaugcuuccag

SEQ ID NO: 14878 - RNA, 32 nt, Homo Sapiens
uuucagugguuggagaaauuggccgaguucaa

SEQ ID NO: 14879 - RNA, 32 nt, Homo Sapiens
aaagaagaaggaagagcauacacagucacccc

SEQ ID NO: 14880 - RNA, 32 nt, Homo Sapiens
ccuccggcuccuuacugucauuugcucauucc

SEQ ID NO: 14881 - RNA, 31 nt, Homo Sapiens
cucuggauucaagucccaggaguccugacca

SEQ ID NO: 14882 - RNA, 29 nt, Homo Sapiens
gggcuucggggacgcggggcgcuucucgg

SEQ ID NO: 14883 - RNA, 32 nt, Homo Sapiens
guaggucccccugccuucucccacuccucaca

SEQ ID NO: 14884 - RNA, 32 nt, Homo Sapiens
uuuaaguggcuaacauccaaacgacuguuuga

SEQ ID NO: 14885 - RNA, 32 nt, Homo Sapiens
cgcaggugcugauucugucaagaaugauggca

SEQ ID NO: 14886 - RNA, 32 nt, Homo Sapiens
aagaugaaugcucuuucauucaucucaguaaa

SEQ ID NO: 14887 - RNA, 32 nt, Homo Sapiens
ugcucccccacuuugcauguucccagaguccc

SEQ ID NO: 14888 - RNA, 32 nt, Homo Sapiens
guuggaguagaaugcaaaauucaugucauuua

SEQ ID NO: 14889 - RNA, 32 nt, Homo Sapiens
ccuagugcccacccccgcccccgcccccgccc

SEQ ID NO: 14890 - RNA, 32 nt, Homo Sapiens
uggggaagcugccgcccacgggcucugccccu

SEQ ID NO: 14891 - RNA, 32 nt, Homo Sapiens
uaccucggccgcggcgcacgcugcaucgcgga

SEQ ID NO: 14892 - RNA, 32 nt, Homo Sapiens
cgccagauacuuuaauauuucaccuuacauua

SEQ ID NO: 14893 - RNA, 32 nt, Homo Sapiens
agcgcccgcgcccuccgcgccuucuccgccgg

SEQ ID NO: 14894 - RNA, 32 nt, Homo Sapiens
agugugucauuuccacaugaaggagaggcaag

SEQ ID NO: 14895 - RNA, 32 nt, Homo Sapiens
cucgccggcucuguuuuccucagagcugggga

SEQ ID NO: 14896 - RNA, 32 nt, Homo Sapiens
cagcgggccuggcagcgggccgggccaugcag

SEQ ID NO: 14897 - RNA, 32 nt, Homo Sapiens
uagcagacaggccucccuccccacaggcccgc

SEQ ID NO: 14898 - RNA, 32 nt, Homo Sapiens
aagugaacguuugcgcagggguccugggcacg

SEQ ID NO: 14899 - RNA, 32 nt, Homo Sapiens
uaauuuuguuuuauuuguauacaauauagagu

SEQ ID NO: 14900 - RNA, 32 nt, Homo Sapiens
ccugagccagcccuucccuggacugccggaau

SEQ ID NO: 14901 - RNA, 27 nt, Homo Sapiens
gaaugucauuaauuuugaaguaauaac

SEQ ID NO: 14902 - RNA, 32 nt, Homo Sapiens
ucuacaaacuauuguaggcaucuguaaauucu

SEQ ID NO: 14903 - RNA, 32 nt, Homo Sapiens
uuggcauagaacauuucuauguuuuuucauua

SEQ ID NO: 14904 - RNA, 32 nt, Homo Sapiens
acacagucuugcauuuuugucuuuccugaacu

SEQ ID NO: 14905 - RNA, 32 nt, Homo Sapiens
gguguauguauuguagagcaacuauuagacca

SEQ ID NO: 14906 - RNA, 32 nt, Homo Sapiens
aauuuuaaacucccguaagagagacauuauug

SEQ ID NO: 14907 - RNA, 32 nt, Homo Sapiens
acuuguuaaugcuacuggucuaacuucauuca

SEQ ID NO: 14908 - RNA, 32 nt, Homo Sapiens
uggcacauaccuguagucccagcuacucugga

SEQ ID NO: 14909 - RNA, 32 nt, Homo Sapiens
accuggcagacaccaccuuaacccagugauca

SEQ ID NO: 14910 - RNA, 32 nt, Homo Sapiens
cacaggauguaaccccaccuucugcuuacccu

SEQ ID NO: 14911 - RNA, 30 nt, Homo Sapiens
ucaccugucuguguguguucaaguaugugu

SEQ ID NO: 14912 - RNA, 32 nt, Homo Sapiens
cucccucugcacccccaccaccuccugcccgu

SEQ ID NO: 14913 - RNA, 32 nt, Homo Sapiens
ugaagaucaccuaugccaagaaauacauuugg

SEQ ID NO: 14914 - RNA, 32 nt, Homo Sapiens
uuacccugcccccuugucuuguaugcaauaaa

SEQ ID NO: 14915 - RNA, 32 nt, Homo Sapiens
uucuaauuaauagccaaagauuucauaucuaa

SEQ ID NO: 14916 - RNA, 32 nt, Homo Sapiens
aaaaguugacuucucuuuugcauggcacagag

SEQ ID NO: 14917 - RNA, 32 nt, Homo Sapiens
gggaggaucauuugagugcaggaguucaagga

SEQ ID NO: 14918 - RNA, 32 nt, Homo Sapiens
uucauuuugauuguuuaaucuuuguuauuaaa

SEQ ID NO: 14919 - RNA, 32 nt, Homo Sapiens
acaucuaaagcuguuggagaagagggacucau

SEQ ID NO: 14920 - RNA, 32 nt, Homo Sapiens
guggggccggcagggggcgccaggcagccgug

SEQ ID NO: 14921 - RNA, 32 nt, Homo Sapiens
gagcuuacacuuaaaagaaaacaaagccccau

SEQ ID NO: 14922 - RNA, 32 nt, Homo Sapiens
uucuuuaaucauauacuugucuuuuguaaaua

SEQ ID NO: 14923 - RNA, 32 nt, Homo Sapiens
acugccacgccaucaaaaagugccggaaaugg

SEQ ID NO: 14924 - RNA, 32 nt, Homo Sapiens
gaagaucggggagcugguuuugaugaaaguau

SEQ ID NO: 14925 - RNA, 32 nt, Homo Sapiens
uaccaaggcagacagaacugcugccuuagccu

SEQ ID NO: 14926 - RNA, 32 nt, Homo Sapiens
ugagcuuaaaaucuuuguuuccaggaauuagc

SEQ ID NO: 14927 - RNA, 32 nt, Homo Sapiens
ugagccuccauuccuuccccagccccuggccc

SEQ ID NO: 14928 - RNA, 32 nt, Homo Sapiens
caaguacccccgcuccaugccucgcggcacug

SEQ ID NO: 14929 - RNA, 32 nt, Homo Sapiens
gaggaaugucaaaaauacauuuuacuuuauuc

SEQ ID NO: 14930 - RNA, 32 nt, Homo Sapiens
gguuuccauuuacuaacagcaacagcaagaaa

SEQ ID NO: 14931 - RNA, 32 nt, Homo Sapiens
cugcagcacacacagugagaauucgcccuaga

SEQ ID NO: 14932 - RNA, 32 nt, Homo Sapiens
ccuaacccagaccaucuccccccgccgggcua

SEQ ID NO: 14933 - RNA, 32 nt, Homo Sapiens
aauuugaugaaaucagaguuuucauguauuuu

SEQ ID NO: 14934 - RNA, 32 nt, Homo Sapiens
gccagaaacuacaugcacagagaagcuuucuc

SEQ ID NO: 14935 - RNA, 32 nt, Homo Sapiens
aguucuguggcuguuuagacuguccguaaugg

SEQ ID NO: 14936 - RNA, 32 nt, Homo Sapiens
accaaguacuuuauuuaucguuuucacaaaac

SEQ ID NO: 14937 - RNA, 32 nt, Homo Sapiens
uucugaagaugcaaaaucuuggguggcuucac

SEQ ID NO: 14938 - RNA, 32 nt, Homo Sapiens
ucggucccugccuugucugucuaggcccauuu

SEQ ID NO: 14939 - RNA, 32 nt, Homo Sapiens
cugccagcuccagccuggccccggggcagcgg

SEQ ID NO: 14940 - RNA, 32 nt, Homo Sapiens
ccgcgcccgggucgcgcacgcgcccugacgga

SEQ ID NO: 14941 - RNA, 32 nt, Homo Sapiens
ccacaucucguuauugcuguuuacauuccuuu

SEQ ID NO: 14942 - RNA, 32 nt, Homo Sapiens
uccucgcacccuucgcaaggaccuucuugggc

SEQ ID NO: 14943 - RNA, 32 nt, Homo Sapiens
gguucaauuuuccccaggauuccuuuccucac

SEQ ID NO: 14944 - RNA, 32 nt, Homo Sapiens
agcuuacaaccugggacaagguguuagaugaa

SEQ ID NO: 14945 - RNA, 30 nt, Homo Sapiens
gacaccuggcuugccacccacagugcacca

SEQ ID NO: 14946 - RNA, 32 nt, Homo Sapiens
ucccggcgcugacuucgaggcccggcuaugga

SEQ ID NO: 14947 - RNA, 32 nt, Homo Sapiens
aaauugcuaauucugagggaauuuaaccagca

SEQ ID NO: 14948 - RNA, 32 nt, Homo Sapiens
ggauugaauuucgaaagaaauaauuggcaaga

SEQ ID NO: 14949 - RNA, 32 nt, Homo Sapiens
gccaggccgugggagagacgcgggaaagugcg

SEQ ID NO: 14950 - RNA, 32 nt, Homo Sapiens
ucaguagaagcccuggcuggccccacuuggua

SEQ ID NO: 14951 - RNA, 32 nt, Homo Sapiens
auccauugcuggcaguggagggcuugccauga

SEQ ID NO: 14952 - RNA, 31 nt, Homo Sapiens
uucgcuggcgccauuaccugaguucuccucc

SEQ ID NO: 14953 - RNA, 32 nt, Homo Sapiens
ccagccccuaggucucuuucuagagcgaucac

SEQ ID NO: 14954 - RNA, 32 nt, Homo Sapiens
aauuaaaagaaaguaauggaagaauugaucga

SEQ ID NO: 14955 - RNA, 32 nt, Homo Sapiens
cuugcaguauuuaugacaguuuuugcggggca

SEQ ID NO: 14956 - RNA, 27 nt, Homo Sapiens
ccuguagcagucuucagccuccucuac

SEQ ID NO: 14957 - RNA, 32 nt, Homo Sapiens
cuccuguucccuguucugccacguucucucug

SEQ ID NO: 14958 - RNA, 32 nt, Homo Sapiens
auucguggagauauggaccaaaacgaacaaga

SEQ ID NO: 14959 - RNA, 32 nt, Homo Sapiens
aguacccuaaaauaaacuagauuguguugcua

SEQ ID NO: 14960 - RNA, 32 nt, Homo Sapiens
aagcacacccggguggcuuggugcugcacggc

SEQ ID NO: 14961 - RNA, 28 nt, Homo Sapiens
uuagaagaaagauaacauuuucaaauac

SEQ ID NO: 14962 - RNA, 32 nt, Homo Sapiens
gagaagggcagcaccucuguguuuaauggaaa

SEQ ID NO: 14963 - RNA, 32 nt, Homo Sapiens
guggguggagggccagaguguguauacccagg

SEQ ID NO: 14964 - RNA, 32 nt, Homo Sapiens
acuacaccuuccucauuggccuuggaguccua

SEQ ID NO: 14965 - RNA, 32 nt, Homo Sapiens
uaauaaauagcaugcaucaaagacguuacuag

SEQ ID NO: 14966 - RNA, 32 nt, Homo Sapiens
uauuuuuaucauugucccacucauuuccacau

SEQ ID NO: 14967 - RNA, 32 nt, Homo Sapiens
ucucugccucgucccaccuugcugucugucuc

SEQ ID NO: 14968 - RNA, 32 nt, Homo Sapiens
uauuugggcagacagaagucaugaggaugcau

SEQ ID NO: 14969 - RNA, 32 nt, Homo Sapiens
agcgucucuggagccgucaucccgcggaaugg

SEQ ID NO: 14970 - RNA, 32 nt, Homo Sapiens
cucucggggucuuuccucagccucgaaaagug

SEQ ID NO: 14971 - RNA, 32 nt, Homo Sapiens
uccugcuggaggugcaagugccugcugcccuu

SEQ ID NO: 14972 - RNA, 32 nt, Homo Sapiens
ggcaccccccacuuuggugcuaauagcucucc

SEQ ID NO: 14973 - RNA, 32 nt, Homo Sapiens
agcaauguuuugggggcaggggguggaucuca

SEQ ID NO: 14974 - RNA, 32 nt, Homo Sapiens
gacugcccggcccucccuccccugccucaccc

SEQ ID NO: 14975 - RNA, 32 nt, Homo Sapiens
ucuccuuguaacaaagaaucuccaugaaauuc

SEQ ID NO: 14976 - RNA, 32 nt, Homo Sapiens
aaggaguggggcgggguggcgggggagaagca

SEQ ID NO: 14977 - RNA, 32 nt, Homo Sapiens
ugguugcaggaggcgguuguguucgaggaugu

SEQ ID NO: 14978 - RNA, 32 nt, Homo Sapiens
uugguacugggggagggagagaucugacaaau

SEQ ID NO: 14979 - RNA, 29 nt, Homo Sapiens
aaaugugaaggauuugauuuucuacauuu

SEQ ID NO: 14980 - RNA, 32 nt, Homo Sapiens
cuaaccaaccuccaccuccuccuuccauuuug

SEQ ID NO: 14981 - RNA, 32 nt, Homo Sapiens
ggccugcuuuugugucccauucacaugcccuc

SEQ ID NO: 14982 - RNA, 32 nt, Homo Sapiens
ccggcgggaugagcgagguggaggcggcagcg

SEQ ID NO: 14983 - RNA, 32 nt, Homo Sapiens
aagagcauaugggagggcagggguuugggugu

SEQ ID NO: 14984 - RNA, 32 nt, Homo Sapiens
gaguguccacagucucaaccacugccucacau

SEQ ID NO: 14985 - RNA, 32 nt, Homo Sapiens
ugaugaugucauugccauguagugucugccug

SEQ ID NO: 14986 - RNA, 32 nt, Homo Sapiens
ggguguucuuagaucagcacaaaccaugucaa

SEQ ID NO: 14987 - RNA, 32 nt, Homo Sapiens
agacacugaacauacugacuccagguauagga

SEQ ID NO: 14988 - RNA, 32 nt, Homo Sapiens
ucuggcugcuguaguguaugcuucucuguguc

SEQ ID NO: 14989 - RNA, 32 nt, Homo Sapiens
cccucccgcacagcccugggccccagcaccuc

SEQ ID NO: 14990 - RNA, 32 nt, Homo Sapiens
ggugaucuugggacaugaaggugcuggaauug

SEQ ID NO: 14991 - RNA, 32 nt, Homo Sapiens
agagggcggagggcggagggaacuugcaccga

SEQ ID NO: 14992 - RNA, 32 nt, Homo Sapiens
uuugagucuacaaagaggaggcgacaagucca

SEQ ID NO: 14993 - RNA, 32 nt, Homo Sapiens
agcgggcaguacagacccccuagaagccccug

SEQ ID NO: 14994 - RNA, 32 nt, Homo Sapiens
cauugugaggcaggucccaaaagggaaggcug

SEQ ID NO: 14995 - RNA, 32 nt, Homo Sapiens
gucaguuuuuaaaaaauugcuuguaggcugag

SEQ ID NO: 14996 - RNA, 32 nt, Homo Sapiens
cuccaccgccggggaauauucaugugggaaau

SEQ ID NO: 14997 - RNA, 32 nt, Homo Sapiens
ggcugggacacuguguggcccuggacaagcca

SEQ ID NO: 14998 - RNA, 32 nt, Homo Sapiens
cacaucugagagaugacagggaaaacugcaaa

SEQ ID NO: 14999 - RNA, 32 nt, Homo Sapiens
gugaucaaauacccggaaaacaauggcguaaa

SEQ ID NO: 15000 - RNA, 28 nt, Homo Sapiens
uuuagucuaggaaccaggaugauaagac

SEQ ID NO: 15001 - RNA, 32 nt, Homo Sapiens
cgugcaaaccccagccucccucuucuuccuca

SEQ ID NO: 15002 - RNA, 32 nt, Homo Sapiens
uaaguuuauuuuuucuacacaguaaaaacuug

SEQ ID NO: 15003 - RNA, 32 nt, Homo Sapiens
gauggcaggauggccuggccagggccuggaag

SEQ ID NO: 15004 - RNA, 32 nt, Homo Sapiens
gcagguuuaggaccagguccccuugagagguc

SEQ ID NO: 15005 - RNA, 32 nt, Homo Sapiens
gagcauuugaguguuuguuuucuuuuucuuuu

SEQ ID NO: 15006 - RNA, 32 nt, Homo Sapiens
uugccucuauagaccacagaugacucaagcca

SEQ ID NO: 15007 - RNA, 32 nt, Homo Sapiens
ucacugaaaauaauucuuaaauugagucucau

SEQ ID NO: 15008 - RNA, 32 nt, Homo Sapiens
cugcauuugcucuuggaggcuuugggagagca

SEQ ID NO: 15009 - RNA, 32 nt, Homo Sapiens
ucgagagccccgcagauccuuccacuacuccc

SEQ ID NO: 15010 - RNA, 30 nt, Homo Sapiens
gcagcugucuguguuucuccuguucucaua

SEQ ID NO: 15011 - RNA, 30 nt, Homo Sapiens
uuaacacugcuaaugaaagaaaaugcccuu

SEQ ID NO: 15012 - RNA, 32 nt, Homo Sapiens
cagaggcuuaauguugccuguggagcagugcc

SEQ ID NO: 15013 - RNA, 32 nt, Homo Sapiens
ugaauagaacagauggagccccucuccucugu

SEQ ID NO: 15014 - RNA, 30 nt, Homo Sapiens
caucacaauaaagagaaccaugugcuacga

SEQ ID NO: 15015 - RNA, 32 nt, Homo Sapiens
agcuugcugugacugcuucuucagggacaacu

SEQ ID NO: 15016 - RNA, 32 nt, Homo Sapiens
cauuucugcgucugcaaguggccugugggacu

SEQ ID NO: 15017 - RNA, 32 nt, Homo Sapiens
gaugcucauuggcauuuuaugauaaaagaugu

SEQ ID NO: 15018 - RNA, 32 nt, Homo Sapiens
ucuccaagguccuuuccaacucuaaaauucug

SEQ ID NO: 15019 - RNA, 32 nt, Homo Sapiens
guguuaauauuuacaggauuuuggcucgauac

SEQ ID NO: 15020 - RNA, 32 nt, Homo Sapiens
uugauguccuuuauugauacaaagugagccug

SEQ ID NO: 15021 - RNA, 32 nt, Homo Sapiens
cuggaaaugcaaauagaauaggaggggaaaaa

SEQ ID NO: 15022 - RNA, 32 nt, Homo Sapiens
accucgccaccacugcuuugucucugagugag

SEQ ID NO: 15023 - RNA, 32 nt, Homo Sapiens
ucacugccguccucagguggguucgggcuuca

SEQ ID NO: 15024 - RNA, 31 nt, Homo Sapiens
ccagacaugcugcugcugcugcugccccugc

SEQ ID NO: 15025 - RNA, 32 nt, Homo Sapiens
uuggcuuccaguugggaaaugaagcuccaagg

SEQ ID NO: 15026 - RNA, 32 nt, Homo Sapiens
gggguggcaacccccaccugaggccuuauuuc

SEQ ID NO: 15027 - RNA, 32 nt, Homo Sapiens
uaaagugaguugaguucucaaauuggaaagaa

SEQ ID NO: 15028 - RNA, 32 nt, Homo Sapiens
gagauuaauguuucaugauuucuaccuccaaa

SEQ ID NO: 15029 - RNA, 32 nt, Homo Sapiens
gacagggaaaauuuuacaugaaccuugaucua

SEQ ID NO: 15030 - RNA, 32 nt, Homo Sapiens
agguagacauugugcuuuauuaauauagucgc

SEQ ID NO: 15031 - RNA, 32 nt, Homo Sapiens
gucuucagaaaagcagcaggagggacuuuggg

SEQ ID NO: 15032 - RNA, 32 nt, Homo Sapiens
cagcgagaccccauccccucagcccucaaccu

SEQ ID NO: 15033 - RNA, 32 nt, Homo Sapiens
gaagccggugguggccacggaccgccccccuc

SEQ ID NO: 15034 - RNA, 32 nt, Homo Sapiens
cuggcccaccccacccacuucugcacuugcgg

SEQ ID NO: 15035 - RNA, 32 nt, Homo Sapiens
ggaguuucauauaaaacggugauaucaugcag

SEQ ID NO: 15036 - RNA, 32 nt, Homo Sapiens
gcaggccgaggaggaagaagaggggcaguggg

SEQ ID NO: 15037 - RNA, 32 nt, Homo Sapiens
gccaggcugaucagaagcugaugacucgugga

SEQ ID NO: 15038 - RNA, 32 nt, Homo Sapiens
gugaccaagauguggaacaguggauucgaaag

SEQ ID NO: 15039 - RNA, 32 nt, Homo Sapiens
gaguggagggucaggugagaucucagagcugc

SEQ ID NO: 15040 - RNA, 32 nt, Homo Sapiens
aaagauuauuuuuucauauuaauagguuguuu

SEQ ID NO: 15041 - RNA, 32 nt, Homo Sapiens
gauucccugggccccagggcuucgcugcuuug

SEQ ID NO: 15042 - RNA, 32 nt, Homo Sapiens
uuuuauauaaaugcccaaauuugagaugcauu

SEQ ID NO: 15043 - RNA, 32 nt, Homo Sapiens
cccuaccugccagugcuggugucagggcacuc

SEQ ID NO: 15044 - RNA, 32 nt, Homo Sapiens
aggcuggaaaauucauauguuaccaggaaaac

SEQ ID NO: 15045 - RNA, 32 nt, Homo Sapiens
ucacuuagaaucugaagggaauuaaaaagaag

SEQ ID NO: 15046 - RNA, 32 nt, Homo Sapiens
cuccuaggaaauggugaagucuauuaggagcc

SEQ ID NO: 15047 - RNA, 32 nt, Homo Sapiens
caaagauaaaaggaagggaaaagcagcagcag

SEQ ID NO: 15048 - RNA, 32 nt, Homo Sapiens
ucaagguucauccauguuguuccaaaugagaa

SEQ ID NO: 15049 - RNA, 32 nt, Homo Sapiens
gugccacagggguuccagaaaagggaagucac

SEQ ID NO: 15050 - RNA, 32 nt, Homo Sapiens
ugcauccuccuuuccuccuccuccucacaauc

SEQ ID NO: 15051 - RNA, 32 nt, Homo Sapiens
caagccucuagcauagagcacugcagacaggc

SEQ ID NO: 15052 - RNA, 32 nt, Homo Sapiens
ccgucaaauuauucucuuguucauuuucuauu

SEQ ID NO: 15053 - RNA, 32 nt, Homo Sapiens
ggccucuaugggugggggcagaaggcagagcc

SEQ ID NO: 15054 - RNA, 32 nt, Homo Sapiens
aaguagagguuuuuuucuucuucuuuuuguuu

SEQ ID NO: 15055 - RNA, 32 nt, Homo Sapiens
uauuuucuuaagucugauguuaauuuuuguuu

SEQ ID NO: 15056 - RNA, 32 nt, Homo Sapiens
guaaccagagagaugcuuauguuauuuuucag

SEQ ID NO: 15057 - RNA, 32 nt, Homo Sapiens
auuugauucugcacuuggggucugucuguaca

SEQ ID NO: 15058 - RNA, 32 nt, Homo Sapiens
auucacugaagaaaaaucauuacucuuuuucu

SEQ ID NO: 15059 - RNA, 32 nt, Homo Sapiens
gccaguggccuggggguguccaggcucccauc

SEQ ID NO: 15060 - RNA, 32 nt, Homo Sapiens
ucagcucgccaugucccggcugcugccgcugc

SEQ ID NO: 15061 - RNA, 32 nt, Homo Sapiens
cgggaacaucagccagcuccaggcucauguug

SEQ ID NO: 15062 - RNA, 32 nt, Homo Sapiens
cagcaauauguauuuauuaaucaaauguguua

SEQ ID NO: 15063 - RNA, 32 nt, Homo Sapiens
aaacuaaauuuauguuauuuggcuaaauguua

SEQ ID NO: 15064 - RNA, 31 nt, Homo Sapiens
gacgccaugagggcucugcugcuccuggggu

SEQ ID NO: 15065 - RNA, 32 nt, Homo Sapiens
acggagaucuuuaugauucaagacgcagacuu

SEQ ID NO: 15066 - RNA, 32 nt, Homo Sapiens
auauuuaagcuucccuuggaaaacacuuuaac

SEQ ID NO: 15067 - RNA, 32 nt, Homo Sapiens
uaguaaacuacuaugaaagugaauucguguuc

SEQ ID NO: 15068 - RNA, 31 nt, Homo Sapiens
aacgaacacaagaaaaagauaagaaauacua

SEQ ID NO: 15069 - RNA, 32 nt, Homo Sapiens
auggauuuggaggugaugguggcaacuauggc

SEQ ID NO: 15070 - RNA, 32 nt, Homo Sapiens
gcccggaaguaauucagcauuaaaauaaaugu

SEQ ID NO: 15071 - RNA, 32 nt, Homo Sapiens
uuaaucuucacacaucucuggguucugagaaa

SEQ ID NO: 15072 - RNA, 32 nt, Homo Sapiens
cgcaggggagcggccuccagccuuauucucca

SEQ ID NO: 15073 - RNA, 32 nt, Homo Sapiens
gacugugccuggucuacacuccaggucugcca

SEQ ID NO: 15074 - RNA, 32 nt, Homo Sapiens
ggaugggccccgaggcgagcagcuucagcaca

SEQ ID NO: 15075 - RNA, 32 nt, Homo Sapiens
cgcuuuguacuauauuugauaguugcagaaua

SEQ ID NO: 15076 - RNA, 32 nt, Homo Sapiens
uccugcaguuccuggggcguaguaggggaucc

SEQ ID NO: 15077 - RNA, 32 nt, Homo Sapiens
auccucguuuuacuuuuuguuaaacuuaugaa

SEQ ID NO: 15078 - RNA, 32 nt, Homo Sapiens
aguugugcugucagcuuucuaaggauuaccuu

SEQ ID NO: 15079 - RNA, 32 nt, Homo Sapiens
ggauucacaaauuauguauuuauuuguuuuca

SEQ ID NO: 15080 - RNA, 32 nt, Homo Sapiens
uggacucuaagacgguaaaggcacuaaaguca

SEQ ID NO: 15081 - RNA, 32 nt, Homo Sapiens
ggggcauugaggcacuaacuagguuccauuuu

SEQ ID NO: 15082 - RNA, 32 nt, Homo Sapiens
ugccuuucccccuucugggggagacuuaacag

SEQ ID NO: 15083 - RNA, 32 nt, Homo Sapiens
gaacggcucgggcagccggcggcccagcaucg

SEQ ID NO: 15084 - RNA, 32 nt, Homo Sapiens
ucaaacuuuguucaauaccaggaaauuuauau

SEQ ID NO: 15085 - RNA, 32 nt, Homo Sapiens
ugcagggagggaggagagaagggcggcagugg

SEQ ID NO: 15086 - RNA, 32 nt, Homo Sapiens
cugugauuuguuuuuaaaaauuuuuacacuuc

SEQ ID NO: 15087 - RNA, 32 nt, Homo Sapiens
uuguguaacauuuauuaugauuuuacauaaau

SEQ ID NO: 15088 - RNA, 32 nt, Homo Sapiens
aaggggagagggauugagaaagagacgcugau

SEQ ID NO: 15089 - RNA, 32 nt, Homo Sapiens
ccccagacgggcgggggcuccuugcggccggc

SEQ ID NO: 15090 - RNA, 31 nt, Homo Sapiens
ccauacacaaagacgguacauaauccuacag

SEQ ID NO: 15091 - RNA, 32 nt, Homo Sapiens
gagccgagaucgugccauugcauuccagccug

SEQ ID NO: 15092 - RNA, 32 nt, Homo Sapiens
ggacugaguguguggaaguuuuucauaaacuu

SEQ ID NO: 15093 - RNA, 32 nt, Homo Sapiens
uggagcugccagccugaggugcccacuccgcc

SEQ ID NO: 15094 - RNA, 32 nt, Homo Sapiens
uuauuucacugaagcugagauuauuagugaua

SEQ ID NO: 15095 - RNA, 32 nt, Homo Sapiens
agccuggcccuccugucaucugcugacuucac

SEQ ID NO: 15096 - RNA, 32 nt, Homo Sapiens
ggcagugagggggccggcgggcgugggccgag

SEQ ID NO: 15097 - RNA, 32 nt, Homo Sapiens
gagaaagacauuccuucgaagcacuggacugu

SEQ ID NO: 15098 - RNA, 31 nt, Homo Sapiens
gggcccugagccugccugcccggccgaguuu

SEQ ID NO: 15099 - RNA, 32 nt, Homo Sapiens
uacagaacaaaauaauauguagcagcuucauu

SEQ ID NO: 15100 - RNA, 32 nt, Homo Sapiens
accuguuucuuacagcuuuucuaugcuaaacu

SEQ ID NO: 15101 - RNA, 32 nt, Homo Sapiens
ggcucuggccuggccugguggcuggcccaggg

SEQ ID NO: 15102 - RNA, 32 nt, Homo Sapiens
acauggccgggcgggguggcucacgccuguaa

SEQ ID NO: 15103 - RNA, 32 nt, Homo Sapiens
guggagaggcccuguuaguuuacuuuucauau

SEQ ID NO: 15104 - RNA, 32 nt, Homo Sapiens
ccacucucagaaucgauaaaugccccuaggug

SEQ ID NO: 15105 - RNA, 32 nt, Homo Sapiens
gcacagaguggacggauucaccguggccgacu

SEQ ID NO: 15106 - RNA, 32 nt, Homo Sapiens
auauugccaucggguauugagacaggaggaag

SEQ ID NO: 15107 - RNA, 32 nt, Homo Sapiens
ggaaccuugacaagcagcauggcugcagguug

SEQ ID NO: 15108 - RNA, 32 nt, Homo Sapiens
ucagaggcuucugggaacccaggcugggccug

SEQ ID NO: 15109 - RNA, 32 nt, Homo Sapiens
accagccugggcaacauggagagaccccuguu

SEQ ID NO: 15110 - RNA, 32 nt, Homo Sapiens
ugugcuaagcaucuagcacagagaaggcaagu

SEQ ID NO: 15111 - RNA, 32 nt, Homo Sapiens
uuuguauuuuuuccuguaagacaauaggccau

SEQ ID NO: 15112 - RNA, 32 nt, Homo Sapiens
uauuuaauauuuuuauucuuugguuuugaaca

SEQ ID NO: 15113 - RNA, 32 nt, Homo Sapiens
uaagcuuuucuuuuacuaagaaauucuuaugc

SEQ ID NO: 15114 - RNA, 32 nt, Homo Sapiens
accacuccccucccaagacccagccgccgccg

SEQ ID NO: 15115 - RNA, 32 nt, Homo Sapiens
ggccuuuguaaauaaauggcguggucuuuguu

SEQ ID NO: 15116 - RNA, 32 nt, Homo Sapiens
aguccucgcucuucgccccccgcagcuaucgg

SEQ ID NO: 15117 - RNA, 32 nt, Homo Sapiens
cacaccagggaucaauaagagccaaaguggga

SEQ ID NO: 15118 - RNA, 32 nt, Homo Sapiens
aagacgcugaggugguggcugcggccuuugaa

SEQ ID NO: 15119 - RNA, 32 nt, Homo Sapiens
ggccccucccgcgccgcccgggcgaugagaag

SEQ ID NO: 15120 - RNA, 32 nt, Homo Sapiens
cugcgaugacgacgaggaggaacaagugggac

SEQ ID NO: 15121 - RNA, 31 nt, Homo Sapiens
gugugccucaaugaaacuugaugugaacuuc

SEQ ID NO: 15122 - RNA, 32 nt, Homo Sapiens
cucugcccaagcccugucuuaaggcccagggg

SEQ ID NO: 15123 - RNA, 32 nt, Homo Sapiens
uauuggucaugacaucccuugcugccucaccc

SEQ ID NO: 15124 - RNA, 32 nt, Homo Sapiens
uaccccuucuaaagauaugauuagacuucguu

SEQ ID NO: 15125 - RNA, 32 nt, Homo Sapiens
ggggacaaggaaaggaucagauaccugcucca

SEQ ID NO: 15126 - RNA, 32 nt, Homo Sapiens
gccggguaguggguugcugggcugggcuugcu

SEQ ID NO: 15127 - RNA, 32 nt, Homo Sapiens
cuuacagcuuugcaccccggcaucagcacagg

SEQ ID NO: 15128 - RNA, 32 nt, Homo Sapiens
gaaggggagggaggagggggacgagggcucug

SEQ ID NO: 15129 - RNA, 32 nt, Homo Sapiens
uuagugugucguuauuuggacaagaggcacau

SEQ ID NO: 15130 - RNA, 30 nt, Homo Sapiens
agugugaucugugcugcaauagaguuuugg

SEQ ID NO: 15131 - RNA, 32 nt, Homo Sapiens
auacuuguacuucuaauaacauuuuucaugaa

SEQ ID NO: 15132 - RNA, 32 nt, Homo Sapiens
ugccuaauacucaagaaauuaaauccugaguu

SEQ ID NO: 15133 - RNA, 32 nt, Homo Sapiens
acauauguauauauuucccaaacuauuauagg

SEQ ID NO: 15134 - RNA, 32 nt, Homo Sapiens
ccacaauucugucaaagauaaguaaaaguuaa

SEQ ID NO: 15135 - RNA, 32 nt, Homo Sapiens
cuuccccguccccuccucccgaagacgccggg

SEQ ID NO: 15136 - RNA, 32 nt, Homo Sapiens
ucagaguguaucgcacugaagaauaauaaucc

SEQ ID NO: 15137 - RNA, 32 nt, Homo Sapiens
auccucagcucguccuccccgccccgcaccgg

SEQ ID NO: 15138 - RNA, 32 nt, Homo Sapiens
cacccucccucccccauccuccccaaaauagc

SEQ ID NO: 15139 - RNA, 32 nt, Homo Sapiens
aaggaucacaugcuucgaagggcaauaaagau

SEQ ID NO: 15140 - RNA, 32 nt, Homo Sapiens
ccuccagcaugggcgucauagccaucacgagc

SEQ ID NO: 15141 - RNA, 32 nt, Homo Sapiens
gggcggggcugggugggagaugggagggccaa

SEQ ID NO: 15142 - RNA, 32 nt, Homo Sapiens
gagcagaguaauuggaaccuuuaagggugggc

SEQ ID NO: 15143 - RNA, 32 nt, Homo Sapiens
gggugauuuugggcucgccgcggccccgggug

SEQ ID NO: 15144 - RNA, 32 nt, Homo Sapiens
ggagcaccgagcucgcggcacgguaggagaag

SEQ ID NO: 15145 - RNA, 32 nt, Homo Sapiens
ugaagcaagucggaaaguacaaugaaaauaaa

SEQ ID NO: 15146 - RNA, 32 nt, Homo Sapiens
ucccguccucuggagcucugucuugucgggga

SEQ ID NO: 15147 - RNA, 32 nt, Homo Sapiens
cuggagaggauauuuuuguagaguguagacug

SEQ ID NO: 15148 - RNA, 29 nt, Homo Sapiens
ggcaccaggggacagcaguaggcugacac

SEQ ID NO: 15149 - RNA, 32 nt, Homo Sapiens
uggagggaagggggcgggcagacggcauagga

SEQ ID NO: 15150 - RNA, 32 nt, Homo Sapiens
gguuggcgcccauucaaccuggucaauaacau

SEQ ID NO: 15151 - RNA, 32 nt, Homo Sapiens
caugaaagaaaagacaagagaagcaccccaga

SEQ ID NO: 15152 - RNA, 32 nt, Homo Sapiens
ggcagugacccgcgaccuccgccccgcccggc

SEQ ID NO: 15153 - RNA, 32 nt, Homo Sapiens
guucaagugucuguauauccuauggucuucuc

SEQ ID NO: 15154 - RNA, 32 nt, Homo Sapiens
agggagcuggggauuggcgacuccugaaguug

SEQ ID NO: 15155 - RNA, 32 nt, Homo Sapiens
cgggggcagggggccggggcggugccuuaacg

SEQ ID NO: 15156 - RNA, 32 nt, Homo Sapiens
cccaucauggaccuccccucccuugcuggagc

SEQ ID NO: 15157 - RNA, 32 nt, Homo Sapiens
ggacagccaguggugcugaggcugggagggag

SEQ ID NO: 15158 - RNA, 32 nt, Homo Sapiens
accaagcaaaagacauauaacaguucucauga

SEQ ID NO: 15159 - RNA, 30 nt, Homo Sapiens
aagagccaucaccaccgggguaaugugauc

SEQ ID NO: 15160 - RNA, 32 nt, Homo Sapiens
ggugcacugacacccccaccuucccauccccu

SEQ ID NO: 15161 - RNA, 32 nt, Homo Sapiens
auaagcccaaucuauaucacagauggguauga

SEQ ID NO: 15162 - RNA, 32 nt, Homo Sapiens
aauacagcccuuuggcagaaauaccuuuuauu

SEQ ID NO: 15163 - RNA, 32 nt, Homo Sapiens
cgccgcagugcagcccggcgccggcgacugcc

SEQ ID NO: 15164 - RNA, 32 nt, Homo Sapiens
uuggcucacaaaauuagcuuacuaguauaauc

SEQ ID NO: 15165 - RNA, 32 nt, Homo Sapiens
ucagguuaaagucuuaaacagggauuugaugc

SEQ ID NO: 15166 - RNA, 32 nt, Homo Sapiens
gcugcuugaugaugagagggagggcugcugcc

SEQ ID NO: 15167 - RNA, 32 nt, Homo Sapiens
cgcugagucaggauccugucaguuccaugagc

SEQ ID NO: 15168 - RNA, 32 nt, Homo Sapiens
ugaguuuauuguggaaucuuugaaaggacaag

SEQ ID NO: 15169 - RNA, 32 nt, Homo Sapiens
caauugcacauuguugaauccaggauacaauc

SEQ ID NO: 15170 - RNA, 32 nt, Homo Sapiens
uuccgcccuaauggaggucuccaguuucggua

SEQ ID NO: 15171 - RNA, 32 nt, Homo Sapiens
aaguaauaagggucaaagacuacaucagagau

SEQ ID NO: 15172 - RNA, 32 nt, Homo Sapiens
agcucaguucccucagcgcccguagcuucggc

SEQ ID NO: 15173 - RNA, 32 nt, Homo Sapiens
uagacagggaacagcuucaggauacuuccagg

SEQ ID NO: 15174 - RNA, 32 nt, Homo Sapiens
agaccaaacagugcuguuucccggggaggaaa

SEQ ID NO: 15175 - RNA, 32 nt, Homo Sapiens
acuauguagguaaauucuuaauguucacauag

SEQ ID NO: 15176 - RNA, 32 nt, Homo Sapiens
cuuugcccaagcaauggcacgggcagcgggcu

SEQ ID NO: 15177 - RNA, 32 nt, Homo Sapiens
ugaagcucaggcaucaggauccgggagaagca

SEQ ID NO: 15178 - RNA, 32 nt, Homo Sapiens
aaaccuauggggaaugauauuuuuugaaagac

SEQ ID NO: 15179 - RNA, 32 nt, Homo Sapiens
aaaacucagaucuaucuuaagagugaccagga

SEQ ID NO: 15180 - RNA, 32 nt, Homo Sapiens
ucauagccuggcgggggcuggcagagccacac

SEQ ID NO: 15181 - RNA, 32 nt, Homo Sapiens
ggccuaguucccucuucuuagauggagauuuc

SEQ ID NO: 15182 - RNA, 32 nt, Homo Sapiens
auacaugcagacuuguuuuuuauuauuguugu

SEQ ID NO: 15183 - RNA, 32 nt, Homo Sapiens
agcaaagguccuggcccucguuccuggaacac

SEQ ID NO: 15184 - RNA, 32 nt, Homo Sapiens
cggggauacugauucagaaauccuguagcgug

SEQ ID NO: 15185 - RNA, 32 nt, Homo Sapiens
cucuagccucgaguccgagguaugcgcggccc

SEQ ID NO: 15186 - RNA, 32 nt, Homo Sapiens
uaauacaaauguuauuuauaguuuacaaugaa

SEQ ID NO: 15187 - RNA, 28 nt, Homo Sapiens
aaaauggagucuaauauauuguuucaaa

SEQ ID NO: 15188 - RNA, 32 nt, Homo Sapiens
aauuauagcuaugugcagcugcacaacacagu

SEQ ID NO: 15189 - RNA, 32 nt, Homo Sapiens
gagaaaaggagagaggaagacacacacaccua

SEQ ID NO: 15190 - RNA, 32 nt, Homo Sapiens
ggccuggugggagaggacggcggagggcagag

SEQ ID NO: 15191 - RNA, 32 nt, Homo Sapiens
gaauaacuuuuacacuuuuuccuuccaacacu

SEQ ID NO: 15192 - RNA, 32 nt, Homo Sapiens
aaaaaacauuuuauaaugaaaguauguaggga

SEQ ID NO: 15193 - RNA, 32 nt, Homo Sapiens
cugauguucguaguguuagaaaauaguuugcu

SEQ ID NO: 15194 - RNA, 32 nt, Homo Sapiens
cuucuuuuaaucugcauucuguuuccucuucu

SEQ ID NO: 15195 - RNA, 32 nt, Homo Sapiens
gguuagcagucuuuucucuguguaccugacac

SEQ ID NO: 15196 - RNA, 32 nt, Homo Sapiens
accaaaggccccaccuuacucugaagcugggg

SEQ ID NO: 15197 - RNA, 32 nt, Homo Sapiens
cguucacaguuauauauaugguauuuugcaaa

SEQ ID NO: 15198 - RNA, 32 nt, Homo Sapiens
guaaauacaccgaugggcacucuguaucuagc

SEQ ID NO: 15199 - RNA, 32 nt, Homo Sapiens
uaaagugaauuaacauuuggugauuaugccua

SEQ ID NO: 15200 - RNA, 32 nt, Homo Sapiens
gcgggcggguggcaggggcugucugugaaauu

SEQ ID NO: 15201 - RNA, 32 nt, Homo Sapiens
uuuuaaucugguuuuuuuuuucuuuuuucuuu

SEQ ID NO: 15202 - RNA, 32 nt, Homo Sapiens
agcugaaacaaauucggggcuaugaaguguuu

SEQ ID NO: 15203 - RNA, 32 nt, Homo Sapiens
augaaugccacauuuuaacguuucaccuguua

SEQ ID NO: 15204 - RNA, 32 nt, Homo Sapiens
uauuuuuauagcagccuuuuaacagaacuagu

SEQ ID NO: 15205 - RNA, 32 nt, Homo Sapiens
cagccuaaaagcuguuugugacaugccaccuu

SEQ ID NO: 15206 - RNA, 32 nt, Homo Sapiens
uuuuugauacuucuuucuugauaaggcacuuu

SEQ ID NO: 15207 - RNA, 32 nt, Homo Sapiens
uauaugggcaaagaagcuaugaagauacauga

SEQ ID NO: 15208 - RNA, 32 nt, Homo Sapiens
aaaagcagaugcuuuuguaugaucuccaaauu

SEQ ID NO: 15209 - RNA, 32 nt, Homo Sapiens
agccaaaguggccuucugcaccagcaucccuc

SEQ ID NO: 15210 - RNA, 32 nt, Homo Sapiens
aucuauguucuucuagauuuuaccuguaguuc

SEQ ID NO: 15211 - RNA, 32 nt, Homo Sapiens
guauuucauguuucagaaaugaugcauacagc

SEQ ID NO: 15212 - RNA, 32 nt, Homo Sapiens
ccuagcucaucuuccuucucccgaggccuuau

SEQ ID NO: 15213 - RNA, 32 nt, Homo Sapiens
gcgccccgggaaggaaguuuguggcggaggag

SEQ ID NO: 15214 - RNA, 32 nt, Homo Sapiens
aguccugcccugugaauuacugcuacaaucaa

SEQ ID NO: 15215 - RNA, 32 nt, Homo Sapiens
agcugggcgggaagggugagccccugcaaggu

SEQ ID NO: 15216 - RNA, 32 nt, Homo Sapiens
uuucucccuaagugcuucuuuggaucucaggc

SEQ ID NO: 15217 - RNA, 32 nt, Homo Sapiens
cuggugggaagaagccgagauggcggcagcca

SEQ ID NO: 15218 - RNA, 32 nt, Homo Sapiens
aguuuaccacauauuauuuuuauauuaauuca

SEQ ID NO: 15219 - RNA, 32 nt, Homo Sapiens
guuucuguuccaguuguagaccuugaugauug

SEQ ID NO: 15220 - RNA, 32 nt, Homo Sapiens
cugaaggcaauuauuucuuuugguggacuugg

SEQ ID NO: 15221 - RNA, 32 nt, Homo Sapiens
cgaacaguagccaaaccagagagcagucaaaa

SEQ ID NO: 15222 - RNA, 32 nt, Homo Sapiens
auuuaaucaucccacacuguauacauaugcca

SEQ ID NO: 15223 - RNA, 28 nt, Homo Sapiens
ccuucaguuacaggacagagugcacagu

SEQ ID NO: 15224 - RNA, 32 nt, Homo Sapiens
aggcucuaaggggacaugaguaaagcaugucu

SEQ ID NO: 15225 - RNA, 32 nt, Homo Sapiens
aaggaggcgucccagaucuucucagcugucuu

SEQ ID NO: 15226 - RNA, 32 nt, Homo Sapiens
caaauguuagcuucauuuuuuaccuuugaaau

SEQ ID NO: 15227 - RNA, 32 nt, Homo Sapiens
auaaucacagaaaagaaugaucugaacaagaa

SEQ ID NO: 15228 - RNA, 32 nt, Homo Sapiens
uccuccuuuggccuggacccaggacuuaauua

SEQ ID NO: 15229 - RNA, 32 nt, Homo Sapiens
cuguccucugucaggcccgagcgaagugccug

SEQ ID NO: 15230 - RNA, 32 nt, Homo Sapiens
gagaccuccagccccggcacccgcaugucucu

SEQ ID NO: 15231 - RNA, 32 nt, Homo Sapiens
ucgcugcgcuguuagucgagggcaguuuucug

SEQ ID NO: 15232 - RNA, 32 nt, Homo Sapiens
uauuccccauucuuccuaguuuucuccuccca

SEQ ID NO: 15233 - RNA, 32 nt, Homo Sapiens
agaaaagagauuuuaaugcuguagugacuuug

SEQ ID NO: 15234 - RNA, 32 nt, Homo Sapiens
cgaacuccuucugcacauccagaggguacuug

SEQ ID NO: 15235 - RNA, 32 nt, Homo Sapiens
aaagcuguuggucugucccaccagcuaggugg

SEQ ID NO: 15236 - RNA, 31 nt, Homo Sapiens
gagguggagccccggcggggggcauggggca

SEQ ID NO: 15237 - RNA, 32 nt, Homo Sapiens
uccucccaggcccccacguugcuggccgccug

SEQ ID NO: 15238 - RNA, 32 nt, Homo Sapiens
uccauacagauuuccuucucauuucucugugu

SEQ ID NO: 15239 - RNA, 32 nt, Homo Sapiens
aaagcacugcugaguucuuaugcuaugccgac

SEQ ID NO: 15240 - RNA, 32 nt, Homo Sapiens
cuugaaaugucuaacuauuaaaaaagacaauu

SEQ ID NO: 15241 - RNA, 29 nt, Homo Sapiens
gaaauuguagugaugaaaugagagcugug

SEQ ID NO: 15242 - RNA, 32 nt, Homo Sapiens
ugagguucggcacccaggucuccggaggagac

SEQ ID NO: 15243 - RNA, 32 nt, Homo Sapiens
ugacucugcucuugcauaguaaauguaguuca

SEQ ID NO: 15244 - RNA, 32 nt, Homo Sapiens
aguaugguaacuauucuugaaaugguauugaa

SEQ ID NO: 15245 - RNA, 32 nt, Homo Sapiens
acugggcucaggucagggcuugguucccuugc

SEQ ID NO: 15246 - RNA, 32 nt, Homo Sapiens
acuuaguucagcaucaaguucuucuuaaaugu

SEQ ID NO: 15247 - RNA, 32 nt, Homo Sapiens
ccgcccacuuggcucccuggcucccgggcccc

SEQ ID NO: 15248 - RNA, 32 nt, Homo Sapiens
cacuguccuugucaaggugggcagaagagcag

SEQ ID NO: 15249 - RNA, 32 nt, Homo Sapiens
auuucauauaucuauaugucuauaaguauaua

SEQ ID NO: 15250 - RNA, 32 nt, Homo Sapiens
ggaggacgaggaggaaaggcggccucgccggg

SEQ ID NO: 15251 - RNA, 32 nt, Homo Sapiens
gacccgcccucccagccagacccucuacgccc

SEQ ID NO: 15252 - RNA, 32 nt, Homo Sapiens
cucccgcuguguggcgucccccucccaccugu

SEQ ID NO: 15253 - RNA, 32 nt, Homo Sapiens
gcguuccaugccucugggaguuuggagacaga

SEQ ID NO: 15254 - RNA, 32 nt, Homo Sapiens
aaacaaagaucaaaggggaaaagcagaagguc

SEQ ID NO: 15255 - RNA, 32 nt, Homo Sapiens
ccgagagcagacgcgcccuggcgcccgcccug

SEQ ID NO: 15256 - RNA, 32 nt, Homo Sapiens
agaaauaagcacaguucucaccacuuuucaau

SEQ ID NO: 15257 - RNA, 32 nt, Homo Sapiens
uuagaggaaagguuaugccaucuuuuuacccu

SEQ ID NO: 15258 - RNA, 32 nt, Homo Sapiens
gcuggccgcgcgcggaaugcggcuucgcgugc

SEQ ID NO: 15259 - RNA, 32 nt, Homo Sapiens
aaggaaucuucuuggcagguccugcuacugaa

SEQ ID NO: 15260 - RNA, 31 nt, Homo Sapiens
aaauagaaauaaaagcagucagauguuuauu

SEQ ID NO: 15261 - RNA, 32 nt, Homo Sapiens
agucuucucugccccaggacugcagggcggcu

SEQ ID NO: 15262 - RNA, 31 nt, Homo Sapiens
cacccgauggccggcccgggguggacgcugc

SEQ ID NO: 15263 - RNA, 32 nt, Homo Sapiens
cgaggccaggggucuggggucgcagcccggcg

SEQ ID NO: 15264 - RNA, 32 nt, Homo Sapiens
ccggaggagcgguggcacauggcggcggaacg

SEQ ID NO: 15265 - RNA, 32 nt, Homo Sapiens
uauaaagucuuaaaugugugcauaaaaaacua

SEQ ID NO: 15266 - RNA, 32 nt, Homo Sapiens
gaaagauaaaugugaagugcugggaaucacuu

SEQ ID NO: 15267 - RNA, 32 nt, Homo Sapiens
gccucuugugcugcuucugcugaaacaaacau

SEQ ID NO: 15268 - RNA, 32 nt, Homo Sapiens
acuguuguccucuccuggcccugggcacaaac

SEQ ID NO: 15269 - RNA, 32 nt, Homo Sapiens
uaccugucugguuuuuuguuugguuuuguuuu

SEQ ID NO: 15270 - RNA, 30 nt, Homo Sapiens
uccaucccggccccagcccagucgagcguc

SEQ ID NO: 15271 - RNA, 32 nt, Homo Sapiens
gagucugugcacguacuuuuagauaaaaugcu

SEQ ID NO: 15272 - RNA, 32 nt, Homo Sapiens
uaacaguuguucuguacagaguaaugagaugu

SEQ ID NO: 15273 - RNA, 32 nt, Homo Sapiens
ccccaaccucguuccuugaagagaagcggcuu

SEQ ID NO: 15274 - RNA, 31 nt, Homo Sapiens
gagcucgggacggcggggacggccucgggcc

SEQ ID NO: 15275 - RNA, 32 nt, Homo Sapiens
gucccuccuccccaucucggcccugaggcaaa

SEQ ID NO: 15276 - RNA, 32 nt, Homo Sapiens
auuucauaacuccuuggaaagcuucuuauaau

SEQ ID NO: 15277 - RNA, 32 nt, Homo Sapiens
cucuccugcuguuguuucaucuccauuaacgc

SEQ ID NO: 15278 - RNA, 32 nt, Homo Sapiens
cauucacugugcuuuccuccccauagugggag

SEQ ID NO: 15279 - RNA, 32 nt, Homo Sapiens
ucgccaccugccagccagcaggguggugggga

SEQ ID NO: 15280 - RNA, 32 nt, Homo Sapiens
gaggcggcccccgccgccgccauggaggcgcu

SEQ ID NO: 15281 - RNA, 32 nt, Homo Sapiens
cuuugcuccuauuucuuucugcucuugggauu

SEQ ID NO: 15282 - RNA, 32 nt, Homo Sapiens
uggugugguccgugcagauacucucuucacua

SEQ ID NO: 15283 - RNA, 32 nt, Homo Sapiens
ccuguguaccucuugccuuuucugggcuugcg

SEQ ID NO: 15284 - RNA, 32 nt, Homo Sapiens
auuuccugguucuguuugugagugagcgaaug

SEQ ID NO: 15285 - RNA, 32 nt, Homo Sapiens
caagggagaaaagagaaaccgggagaaggcau

SEQ ID NO: 15286 - RNA, 32 nt, Homo Sapiens
aggauggguggcuuuaacaguuucacagcagg

SEQ ID NO: 15287 - RNA, 32 nt, Homo Sapiens
gucagcccugccucaccaugccugcaggaggc

SEQ ID NO: 15288 - RNA, 32 nt, Homo Sapiens
cagccgccuugacuggggaagggucugaaucc

SEQ ID NO: 15289 - RNA, 32 nt, Homo Sapiens
ccuuccuuuuguuaacgugaugugccacuaua

SEQ ID NO: 15290 - RNA, 32 nt, Homo Sapiens
cucucuccucuuuuccucucuuacugcagcac

SEQ ID NO: 15291 - RNA, 32 nt, Homo Sapiens
gccgggcgcacuguccguagcugcugguuuuc

SEQ ID NO: 15292 - RNA, 32 nt, Homo Sapiens
ucuguuggucaaaaucugcaaacucuaaaaga

SEQ ID NO: 15293 - RNA, 32 nt, Homo Sapiens
ggcagagaucucuggaguguugcaguuagagg

SEQ ID NO: 15294 - RNA, 32 nt, Homo Sapiens
ccagauuuugguaaaucccaucuuucagaagu

SEQ ID NO: 15295 - RNA, 32 nt, Homo Sapiens
uguguaggcuuuuugcagaagaucuuacuaac

SEQ ID NO: 15296 - RNA, 32 nt, Homo Sapiens
ggugccgucuucauuucuucccaucucuucuu

SEQ ID NO: 15297 - RNA, 32 nt, Homo Sapiens
guuguaaaauuccauuauauuccauugccaaa

SEQ ID NO: 15298 - RNA, 28 nt, Homo Sapiens
uuguuaauuaaauuauuuuaauuaauaa

SEQ ID NO: 15299 - RNA, 32 nt, Homo Sapiens
ccaacgaagaggaaacauugaggauuggaaag

SEQ ID NO: 15300 - RNA, 32 nt, Homo Sapiens
guagaaugaaggauacaaaugauaaaaauuac

SEQ ID NO: 15301 - RNA, 31 nt, Homo Sapiens
gcggugcugccgguggagcuucaggucuuga

SEQ ID NO: 15302 - RNA, 32 nt, Homo Sapiens
gggucuucaaggaagaugaggccauugcccuu

SEQ ID NO: 15303 - RNA, 32 nt, Homo Sapiens
cuucuggagagaaaaaaucuauuuguaaugau

SEQ ID NO: 15304 - RNA, 32 nt, Homo Sapiens
uuggaaccugcgccgugugcucugggggcugu

SEQ ID NO: 15305 - RNA, 32 nt, Homo Sapiens
gcccgcgagcugagccgccggaggaggagccg

SEQ ID NO: 15306 - RNA, 32 nt, Homo Sapiens
aacaaagacaguuuuccaaucugauauaaacu

SEQ ID NO: 15307 - RNA, 32 nt, Homo Sapiens
ggaccagggcagcuagaagcccugcccuuccg

SEQ ID NO: 15308 - RNA, 30 nt, Homo Sapiens
ggaggagguggcggcggcgggaagaugcug

SEQ ID NO: 15309 - RNA, 32 nt, Homo Sapiens
uguuuagcaaugggcuuucuuggggagaggga

SEQ ID NO: 15310 - RNA, 32 nt, Homo Sapiens
auauaaucuucccauguuauuuaacaaauugu

SEQ ID NO: 15311 - RNA, 32 nt, Homo Sapiens
gggggccagagcuaggguggggggcgagggug

SEQ ID NO: 15312 - RNA, 32 nt, Homo Sapiens
agcaggcaaggaccgaacaccuccaccccaac

SEQ ID NO: 15313 - RNA, 32 nt, Homo Sapiens
ggagcagggaagggcugucugugcccaugcuc

SEQ ID NO: 15314 - RNA, 32 nt, Homo Sapiens
agacagaaauaccauuugacccagcagucuua

SEQ ID NO: 15315 - RNA, 32 nt, Homo Sapiens
caaugaagcugcuuaguaaucucugccaagcc

SEQ ID NO: 15316 - RNA, 32 nt, Homo Sapiens
ucaguuuccugaggccuccccagccacgcuuc

SEQ ID NO: 15317 - RNA, 32 nt, Homo Sapiens
gugcgagcaagaaucaaggaugcugugcaagg

SEQ ID NO: 15318 - RNA, 31 nt, Homo Sapiens
ggcaagaugcccaacaacagcacugcucugu

SEQ ID NO: 15319 - RNA, 32 nt, Homo Sapiens
gucugccccacuuccuggcuuuaacucuugag

SEQ ID NO: 15320 - RNA, 32 nt, Homo Sapiens
uuuugauguauuauuauauauguauaucugug

SEQ ID NO: 15321 - RNA, 32 nt, Homo Sapiens
ucugugucuccaucaggcuuaagccagagcua

SEQ ID NO: 15322 - RNA, 28 nt, Homo Sapiens
aacauggcuccacucuguucucuugcca

SEQ ID NO: 15323 - RNA, 32 nt, Homo Sapiens
ccaaaguuuacaaaaggguauagggugacauc

SEQ ID NO: 15324 - RNA, 32 nt, Homo Sapiens
uuggggccagcuugggcccuggggaugagcca

SEQ ID NO: 15325 - RNA, 32 nt, Homo Sapiens
cggggcuggugaccgugcugggcccgcugggu

SEQ ID NO: 15326 - RNA, 32 nt, Homo Sapiens
agccucggccccagccucggccuuugccggaa

SEQ ID NO: 15327 - RNA, 32 nt, Homo Sapiens
ccaaacuuguauauuuaaauucuuuguaauaa

SEQ ID NO: 15328 - RNA, 32 nt, Homo Sapiens
uuugagacguccuuucccuacuccaugggcug

SEQ ID NO: 15329 - RNA, 31 nt, Homo Sapiens
cccgaucucugauugcuccuaacugacguca

SEQ ID NO: 15330 - RNA, 32 nt, Homo Sapiens
uuauuuaugcaaaaguuuuucuuguagagaau

SEQ ID NO: 15331 - RNA, 32 nt, Homo Sapiens
cucaucccaccccacaccccucccagaucugc

SEQ ID NO: 15332 - RNA, 32 nt, Homo Sapiens
gcagggaagugcggcggcuguggggaagcucg

SEQ ID NO: 15333 - RNA, 32 nt, Homo Sapiens
caccggcagccccucgauccuaaccucagaug

SEQ ID NO: 15334 - RNA, 32 nt, Homo Sapiens
guuauauacucuauguuuaaauaucucccuua

SEQ ID NO: 15335 - RNA, 32 nt, Homo Sapiens
gcuugcuuuaguuuuuucagcaacacuuaucc

SEQ ID NO: 15336 - RNA, 28 nt, Homo Sapiens
uaaugagaaagaugaaaggaauacacag

SEQ ID NO: 15337 - RNA, 32 nt, Homo Sapiens
ucagccucccaucuccucuccuucccaggaau

SEQ ID NO: 15338 - RNA, 32 nt, Homo Sapiens
aaagggaaggauugacccucugugaggcaguc

SEQ ID NO: 15339 - RNA, 32 nt, Homo Sapiens
gugggccacuuaagcccuccccacccccaucc

SEQ ID NO: 15340 - RNA, 32 nt, Homo Sapiens
agacuuauguguuugaauauaaaugauauaua

SEQ ID NO: 15341 - RNA, 32 nt, Homo Sapiens
guccgcggcgugcgggaccggcuggucaucac

SEQ ID NO: 15342 - RNA, 32 nt, Homo Sapiens
cuacaucucuacacaagauauucauucuuuug

SEQ ID NO: 15343 - RNA, 32 nt, Homo Sapiens
aacuuguucacauuuccaacaauaucagaauu

SEQ ID NO: 15344 - RNA, 32 nt, Homo Sapiens
ccuuaaagugguacuuguauguuaaugaguug

SEQ ID NO: 15345 - RNA, 32 nt, Homo Sapiens
uucaagagcaaccuucaaagucagaugacaau

SEQ ID NO: 15346 - RNA, 28 nt, Homo Sapiens
gaggggaaagauuacuuaguuugguuau

SEQ ID NO: 15347 - RNA, 32 nt, Homo Sapiens
ccccaaaaaaauuuuuuuuuuaauaaaacaaa

SEQ ID NO: 15348 - RNA, 32 nt, Homo Sapiens
ccccaccccggggcucgcggcagguccugagc

SEQ ID NO: 15349 - RNA, 32 nt, Homo Sapiens
cugugauggccucaccuggcagcccucuggcc

SEQ ID NO: 15350 - RNA, 32 nt, Homo Sapiens
cggaagaucgcagggaacaggugggcacuauc

SEQ ID NO: 15351 - RNA, 32 nt, Homo Sapiens
cucaccgccccacgcaggaucccggccugguc

SEQ ID NO: 15352 - RNA, 32 nt, Homo Sapiens
uauuacuggucacuuagaaaauuaaaagggau

SEQ ID NO: 15353 - RNA, 32 nt, Homo Sapiens
gcugccgccccgacgcccgcgcauccccgcuc

SEQ ID NO: 15354 - RNA, 32 nt, Homo Sapiens
gccggguccaggucgucuucccgugacgccca

SEQ ID NO: 15355 - RNA, 29 nt, Homo Sapiens
cauuaugucugugugccuggaugucugug

SEQ ID NO: 15356 - RNA, 32 nt, Homo Sapiens
aggggggcuagcauacgugguaggguucuaga

SEQ ID NO: 15357 - RNA, 32 nt, Homo Sapiens
augccuccuguacagccuguggaacuaugagc

SEQ ID NO: 15358 - RNA, 32 nt, Homo Sapiens
uaucugaauuguaagaguuguuagcacaaguu

SEQ ID NO: 15359 - RNA, 32 nt, Homo Sapiens
gaggagcggaaguagucagauuugacugagag

SEQ ID NO: 15360 - RNA, 32 nt, Homo Sapiens
ucaggcuaaggguggugacugggguggugaag

SEQ ID NO: 15361 - RNA, 32 nt, Homo Sapiens
acccccggccucagccaccagcacccccauag

SEQ ID NO: 15362 - RNA, 32 nt, Homo Sapiens
cuagggcugggcucucggggccaggcaggcca

SEQ ID NO: 15363 - RNA, 32 nt, Homo Sapiens
cucuggucuuugaugauguugauaaaaugugg

SEQ ID NO: 15364 - RNA, 32 nt, Homo Sapiens
gugcugcugcuccugcagcugccuuuucugcc

SEQ ID NO: 15365 - RNA, 32 nt, Homo Sapiens
uuucuuuaaaagacacaauaggacucgcaaca

SEQ ID NO: 15366 - RNA, 32 nt, Homo Sapiens
gccugcaggggucagagcugcgaagcugagag

SEQ ID NO: 15367 - RNA, 32 nt, Homo Sapiens
aaguacauuuuucucuaauaaaagaagacaau

SEQ ID NO: 15368 - RNA, 32 nt, Homo Sapiens
gauaauucuaucaaaaaucauuggaauucuac

SEQ ID NO: 15369 - RNA, 32 nt, Homo Sapiens
aggcaaacgcucagaaucuacugcagguguua

SEQ ID NO: 15370 - RNA, 32 nt, Homo Sapiens
gcccgagucggucagcgccggaggaccucagc

SEQ ID NO: 15371 - RNA, 32 nt, Homo Sapiens
cccugagugucugucccucuucagccaagccc

SEQ ID NO: 15372 - RNA, 32 nt, Homo Sapiens
uucaauacugucccacuucucaucuuaaaaau

SEQ ID NO: 15373 - RNA, 32 nt, Homo Sapiens
acugaaacuguucaaaaacauggaugcagagg

SEQ ID NO: 15374 - RNA, 32 nt, Homo Sapiens
aggcggcgagauggucgcgcgcgucggccucc

SEQ ID NO: 15375 - RNA, 32 nt, Homo Sapiens
cauaaguuuauaauuuaaugucuuaauuguaa

SEQ ID NO: 15376 - RNA, 32 nt, Homo Sapiens
uccuagcaucuugugaguugcauauuaagauu

SEQ ID NO: 15377 - RNA, 32 nt, Homo Sapiens
aacaaucaagacaguggauuuagggaucucag

SEQ ID NO: 15378 - RNA, 32 nt, Homo Sapiens
agccaccuggcagacugcccguggcccugcug

SEQ ID NO: 15379 - RNA, 32 nt, Homo Sapiens
auucucauggccgauucugcuccaccugggac

SEQ ID NO: 15380 - RNA, 32 nt, Homo Sapiens
cuugcacuguuacucuuaauuuuaaagaccca

SEQ ID NO: 15381 - RNA, 32 nt, Homo Sapiens
cagagcacccucgggcccuccuguccacccuc

SEQ ID NO: 15382 - RNA, 32 nt, Homo Sapiens
ggggcuccuccagccgcccccaugggaagagg

SEQ ID NO: 15383 - RNA, 32 nt, Homo Sapiens
cucccgaaugucuccuucauccccuuccaccc

SEQ ID NO: 15384 - RNA, 32 nt, Homo Sapiens
aacauuucuggacaaaucuuauuuuguauuuc

SEQ ID NO: 15385 - RNA, 32 nt, Homo Sapiens
cauagaauauauucuuuuauguuaaauuauga

SEQ ID NO: 15386 - RNA, 32 nt, Homo Sapiens
cuuaccguuuuaaagaaaauuuguaaaacuaa

SEQ ID NO: 15387 - RNA, 32 nt, Homo Sapiens
uaauacauaaaagagaaaaauaucuuaguuug

SEQ ID NO: 15388 - RNA, 32 nt, Homo Sapiens
acgccuggcuaacuuuuuuuuauauuuugagu

SEQ ID NO: 15389 - RNA, 32 nt, Homo Sapiens
ccacagcucccucucccacuucugaacuaccu

SEQ ID NO: 15390 - RNA, 32 nt, Homo Sapiens
aagaaugagagucccaggauccagauuuagcc

SEQ ID NO: 15391 - RNA, 32 nt, Homo Sapiens
gacagaaggaugucccggguguguacaccaag

SEQ ID NO: 15392 - RNA, 32 nt, Homo Sapiens
gagccccggcuccacacccugccccauccacc

SEQ ID NO: 15393 - RNA, 32 nt, Homo Sapiens
ucuaguuagaaagaaaaaugaggcaaugauuu

SEQ ID NO: 15394 - RNA, 32 nt, Homo Sapiens
uuguggccaagaggcuuccuggcauccacccc

SEQ ID NO: 15395 - RNA, 32 nt, Homo Sapiens
gcaggaggcagacauguguugcuuugcacguc

SEQ ID NO: 15396 - RNA, 32 nt, Homo Sapiens
cucccugcugucagcagugucucuggcaugga

SEQ ID NO: 15397 - RNA, 32 nt, Homo Sapiens
gauauaacuauauuuacagaaaaugauuuuua

SEQ ID NO: 15398 - RNA, 32 nt, Homo Sapiens
cuauuuucagcccaaaaaggugccaaaugcau

SEQ ID NO: 15399 - RNA, 32 nt, Homo Sapiens
guuuuuuguuugucuugagacagggucuggcu

SEQ ID NO: 15400 - RNA, 32 nt, Homo Sapiens
aauccuuaucccagaagguacuauuuagacug

SEQ ID NO: 15401 - RNA, 32 nt, Homo Sapiens
agguggaaugccauaaaucacacuggaaaaua

SEQ ID NO: 15402 - RNA, 32 nt, Homo Sapiens
ccacagcaucacgagccacuuccacuccuggg

SEQ ID NO: 15403 - RNA, 32 nt, Homo Sapiens
ucugcauugacuuaugagauaauuaaugauua

SEQ ID NO: 15404 - RNA, 32 nt, Homo Sapiens
aaauauacauucaacaaauaagugagugauua

SEQ ID NO: 15405 - RNA, 32 nt, Homo Sapiens
auacggggaaaacaucuuucccuucuaguuuu

SEQ ID NO: 15406 - RNA, 32 nt, Homo Sapiens
cagucugcuuuaauucauguccuucugcaguu

SEQ ID NO: 15407 - RNA, 32 nt, Homo Sapiens
aggugcuacauaucauauauuugucccaucua

SEQ ID NO: 15408 - RNA, 32 nt, Homo Sapiens
aauggaaaucuggaaaggauuugacgaaacgu

SEQ ID NO: 15409 - RNA, 27 nt, Homo Sapiens
gaaauggauuucuucagcucuucuuag

SEQ ID NO: 15410 - RNA, 32 nt, Homo Sapiens
gcaauauuuuuuucuucaggauuuuagcugcu

SEQ ID NO: 15411 - RNA, 32 nt, Homo Sapiens
aacauguaaacuaacauaaccaauugucaguu

SEQ ID NO: 15412 - RNA, 32 nt, Homo Sapiens
agugaaguagagaacaauauuaagaagaaagc

SEQ ID NO: 15413 - RNA, 32 nt, Homo Sapiens
agucagaaagacuugguugauugcuaauugcu

SEQ ID NO: 15414 - RNA, 32 nt, Homo Sapiens
agagaaauauggcgcucccgacgcugccgucc

SEQ ID NO: 15415 - RNA, 32 nt, Homo Sapiens
cgaauguuauguuuugcuuuuaucucacagua

SEQ ID NO: 15416 - RNA, 32 nt, Homo Sapiens
gauuccacaaagccucucuccccucccucguc

SEQ ID NO: 15417 - RNA, 32 nt, Homo Sapiens
cuaucagugugcccuccuuuaugggaggauca

SEQ ID NO: 15418 - RNA, 32 nt, Homo Sapiens
uuuccuguucagcauguacuccccuccucuga

SEQ ID NO: 15419 - RNA, 32 nt, Homo Sapiens
gaagagcugaaaaagaaaacauagucucuuaa

SEQ ID NO: 15420 - RNA, 32 nt, Homo Sapiens
cuuucccuaccguguuugauaaauguugucua

SEQ ID NO: 15421 - RNA, 32 nt, Homo Sapiens
uaucugugagcucugacacaucugaaaaagua

SEQ ID NO: 15422 - RNA, 32 nt, Homo Sapiens
uuuaucagcauaauuuucauuaccaaaaugua

SEQ ID NO: 15423 - RNA, 32 nt, Homo Sapiens
gcgcgacgcgcgccugcaggacggcucggugc

SEQ ID NO: 15424 - RNA, 32 nt, Homo Sapiens
aaguaaaucaguauuuugaaugugcuucucuu

SEQ ID NO: 15425 - RNA, 32 nt, Homo Sapiens
accuguggugcacauuucuacccagguuuugc

SEQ ID NO: 15426 - RNA, 32 nt, Homo Sapiens
ccaagcugagcaaccucuucagcugggaaggc

SEQ ID NO: 15427 - RNA, 32 nt, Homo Sapiens
guguaagucuucacauuauauuuuuucuucaa

SEQ ID NO: 15428 - RNA, 32 nt, Homo Sapiens
cucacuaauuuucaugauaaaugaaguuuuua

SEQ ID NO: 15429 - RNA, 32 nt, Homo Sapiens
aaccagguaaaauaaagaaacauuuaugcuug

SEQ ID NO: 15430 - RNA, 32 nt, Homo Sapiens
acccugucucuuaaaaaacgaugaugaugaac

SEQ ID NO: 15431 - RNA, 32 nt, Homo Sapiens
guauguuuaaguggagagugcuuccagcugag

SEQ ID NO: 15432 - RNA, 32 nt, Homo Sapiens
cugcaggggugaggaguggggagaaaccagaa

SEQ ID NO: 15433 - RNA, 32 nt, Homo Sapiens
ccauucguguuuuagaaagguaugugaauaaa

SEQ ID NO: 15434 - RNA, 32 nt, Homo Sapiens
cuggaggacaggaucgcccagcccucgaugac

SEQ ID NO: 15435 - RNA, 32 nt, Homo Sapiens
cucgacgcagcccgcgcuccccggagggccca

SEQ ID NO: 15436 - RNA, 32 nt, Homo Sapiens
aggacagaugcaugauggaaagacaacccagc

SEQ ID NO: 15437 - RNA, 32 nt, Homo Sapiens
acgaggucugcacugagcuccauuugaaugau

SEQ ID NO: 15438 - RNA, 32 nt, Homo Sapiens
guuccuuuuuauuuaucugugggcuuuuguuu

SEQ ID NO: 15439 - RNA, 32 nt, Homo Sapiens
aaggaggaauaaaacucauaaaacaaaagccu

SEQ ID NO: 15440 - RNA, 32 nt, Homo Sapiens
aggacagaacagaagcacaaagacucagccaa

SEQ ID NO: 15441 - RNA, 32 nt, Homo Sapiens
auaccaaucaguacucugugucuagcucaggg

SEQ ID NO: 15442 - RNA, 32 nt, Homo Sapiens
agcuaaaauguucugauucaggaucagaggau

SEQ ID NO: 15443 - RNA, 32 nt, Homo Sapiens
gaguucaggagcaucagaguucucuagaaaug

SEQ ID NO: 15444 - RNA, 32 nt, Homo Sapiens
ugguuuaucauagucuuuuucuuucauugagu

SEQ ID NO: 15445 - RNA, 32 nt, Homo Sapiens
guuaagggggcggugcagacgucuccccgccc

SEQ ID NO: 15446 - RNA, 32 nt, Homo Sapiens
uuuauaacucuagggauauaaaaacagauucu

SEQ ID NO: 15447 - RNA, 32 nt, Homo Sapiens
caauagaaaugaauucauugagucgugggagu

SEQ ID NO: 15448 - RNA, 32 nt, Homo Sapiens
ugcagaggggacucuggggagaggaacauggu

SEQ ID NO: 15449 - RNA, 31 nt, Homo Sapiens
uccgcgcugccggcagggcuugggggcgccu

SEQ ID NO: 15450 - RNA, 32 nt, Homo Sapiens
uuugagucaguauuuucuuuuuaaagucgugu

SEQ ID NO: 15451 - RNA, 32 nt, Homo Sapiens
uggaugucggcacuguguccccggcucuggga

SEQ ID NO: 15452 - RNA, 32 nt, Homo Sapiens
accugugcccaugccccuccagcccugcguuu

SEQ ID NO: 15453 - RNA, 32 nt, Homo Sapiens
uggaaguucaggaugccaccaccuugaacacc

SEQ ID NO: 15454 - RNA, 32 nt, Homo Sapiens
uucaugaggcuuacaagaaguaacuuuaggua

SEQ ID NO: 15455 - RNA, 32 nt, Homo Sapiens
gcgaggaccccgauggcggcgccggguggcgg

SEQ ID NO: 15456 - RNA, 32 nt, Homo Sapiens
ucauccacaggguaacaguguuuacccccgag

SEQ ID NO: 15457 - RNA, 32 nt, Homo Sapiens
gaaugcugcuacuugauuucuuucucauccca

SEQ ID NO: 15458 - RNA, 32 nt, Homo Sapiens
aacgccccggucggcgacccagcccgagacgc

SEQ ID NO: 15459 - RNA, 31 nt, Homo Sapiens
cauacuuuguuaacuccaugaguuaaaugcu

SEQ ID NO: 15460 - RNA, 32 nt, Homo Sapiens
gcagaucagauaaaaagugagcuuacacuuga

SEQ ID NO: 15461 - RNA, 32 nt, Homo Sapiens
cuuuggcccuucuccacccaucccaaccccau

SEQ ID NO: 15462 - RNA, 32 nt, Homo Sapiens
accugcucaacucucaauauugcuuuaucagc

SEQ ID NO: 15463 - RNA, 32 nt, Homo Sapiens
ggcgcuccgcuucagcaccgcgggcguggaca

SEQ ID NO: 15464 - RNA, 32 nt, Homo Sapiens
aaggaggugcuguucccuguuccaucuuuaca

SEQ ID NO: 15465 - RNA, 32 nt, Homo Sapiens
cccagguauauucggcagguauguguguaauc

SEQ ID NO: 15466 - RNA, 32 nt, Homo Sapiens
ggugacacaacacaguguuugucuuccacagg

SEQ ID NO: 15467 - RNA, 32 nt, Homo Sapiens
auaguugcauaaaagcacuguaaaauauuuaa

SEQ ID NO: 15468 - RNA, 32 nt, Homo Sapiens
gcaugugauaucuggucacagagagguagugc

SEQ ID NO: 15469 - RNA, 32 nt, Homo Sapiens
uggggcaauuuaaccuuuuucaugaaaguuau

SEQ ID NO: 15470 - RNA, 32 nt, Homo Sapiens
gugcaucuuccaugguccaagaacucacugug

SEQ ID NO: 15471 - RNA, 32 nt, Homo Sapiens
accuugcccucuaucauuauaaaugguugcca

SEQ ID NO: 15472 - RNA, 32 nt, Homo Sapiens
agcugggcaugguggcucgcaucuguaguccc

SEQ ID NO: 15473 - RNA, 32 nt, Homo Sapiens
ugagaggccccggcaggucccggcccggcggc

SEQ ID NO: 15474 - RNA, 32 nt, Homo Sapiens
uuguauguaggaccaggaguaucuccucaggu

SEQ ID NO: 15475 - RNA, 32 nt, Homo Sapiens
aaccgggugccggcaggcgccagucgcaggug

SEQ ID NO: 15476 - RNA, 32 nt, Homo Sapiens
ccugguggacgcccuuccuucuggucgguugu

SEQ ID NO: 15477 - RNA, 32 nt, Homo Sapiens
uggucauauaugacagucuacugcauaaauau

SEQ ID NO: 15478 - RNA, 32 nt, Homo Sapiens
guucauggucacaaccugagguacucugcuga

SEQ ID NO: 15479 - RNA, 32 nt, Homo Sapiens
auuuuaggauuuuuuucuuaaacauaggaacu

SEQ ID NO: 15480 - RNA, 32 nt, Homo Sapiens
uuaaucacaauuuucuucaauacaaggggaaa

SEQ ID NO: 15481 - RNA, 32 nt, Homo Sapiens
gcauccacccggcgcggucagccccggcugcg

SEQ ID NO: 15482 - RNA, 32 nt, Homo Sapiens
aaccaauaccuuagcucaggcaucauguuugc

SEQ ID NO: 15483 - RNA, 32 nt, Homo Sapiens
uggaaucagcaggccucugugcucccucugcc

SEQ ID NO: 15484 - RNA, 32 nt, Homo Sapiens
cugccacugcugcugcugcugcugggagccug

SEQ ID NO: 15485 - RNA, 32 nt, Homo Sapiens
cuauuacuuucugcccuggggacguccuguuu

SEQ ID NO: 15486 - RNA, 32 nt, Homo Sapiens
cacaucagccuaaaguggcaucuggaauugaa

SEQ ID NO: 15487 - RNA, 32 nt, Homo Sapiens
ugcugcagaaaaggccccagaaugggcuggcu

SEQ ID NO: 15488 - RNA, 32 nt, Homo Sapiens
acaucuguggaaugauucacauccucucaagu

SEQ ID NO: 15489 - RNA, 32 nt, Homo Sapiens
cccgggagggcuuccuggacacgcugguggug

SEQ ID NO: 15490 - RNA, 32 nt, Homo Sapiens
ccgcgaccuuggccggacccagccccgcggug

SEQ ID NO: 15491 - RNA, 32 nt, Homo Sapiens
ucgccuguuguccagauuggcacgaaccuuuu

SEQ ID NO: 15492 - RNA, 32 nt, Homo Sapiens
ugcucccgccccagccuggcccagggugaagg

SEQ ID NO: 15493 - RNA, 32 nt, Homo Sapiens
ugagaaaagacaagaucuauguugacauaaac

SEQ ID NO: 15494 - RNA, 32 nt, Homo Sapiens
caacagagggaagacugaagaagaugugaugg

SEQ ID NO: 15495 - RNA, 32 nt, Homo Sapiens
guacccaccaccuucuucuccuacauaucccu

SEQ ID NO: 15496 - RNA, 32 nt, Homo Sapiens
aaacagaccuaccccaccccaacucagaguua

SEQ ID NO: 15497 - RNA, 32 nt, Homo Sapiens
cugguuuccaacaaggcugccuucucaaggag

SEQ ID NO: 15498 - RNA, 32 nt, Homo Sapiens
caggcucugacuuucagcaucaugcaggggcu

SEQ ID NO: 15499 - RNA, 32 nt, Homo Sapiens
gagcaucauuuauuuaccauuauuuucaauuu

SEQ ID NO: 15500 - RNA, 32 nt, Homo Sapiens
guaaucaaaaaguuugaaaugucugcuuacua

SEQ ID NO: 15501 - RNA, 32 nt, Homo Sapiens
auaugaaaaaggaaacauaacaucuccaaaga

SEQ ID NO: 15502 - RNA, 32 nt, Homo Sapiens
ugcugcuucuccguccagcaguuguuccagag

SEQ ID NO: 15503 - RNA, 32 nt, Homo Sapiens
gcagggagaucgcggcgggcgcagucuugagc

SEQ ID NO: 15504 - RNA, 32 nt, Homo Sapiens
accacagccggcuaauuuuuuauuuaauuuuu

SEQ ID NO: 15505 - RNA, 32 nt, Homo Sapiens
acauugaacaugcgcauagaaacuuaacucaa

SEQ ID NO: 15506 - RNA, 32 nt, Homo Sapiens
agcgcgcucagcugcgcccagagccuucggcc

SEQ ID NO: 15507 - RNA, 32 nt, Homo Sapiens
ucuguucacagagauggaugcauguucugauu

SEQ ID NO: 15508 - RNA, 32 nt, Homo Sapiens
uggcacccacccaaguauuaugggaaaccucc

SEQ ID NO: 15509 - RNA, 28 nt, Homo Sapiens
uccaugcugggcagaaucaaggcgcagg

SEQ ID NO: 15510 - RNA, 32 nt, Homo Sapiens
gggaaaugcagggcaguguggcagguggagag

SEQ ID NO: 15511 - RNA, 32 nt, Homo Sapiens
uauguauucugaggacucugucucucuggcuu

SEQ ID NO: 15512 - RNA, 32 nt, Homo Sapiens
gcgggcgcgauggcggaggccgggccacaggc

SEQ ID NO: 15513 - RNA, 32 nt, Homo Sapiens
uuuaugacuuggaucuauacaaccuugcgugg

SEQ ID NO: 15514 - RNA, 32 nt, Homo Sapiens
gaggcccccuggaacacccccuccaaacccaa

SEQ ID NO: 15515 - RNA, 32 nt, Homo Sapiens
gaguaguucuuugccagugcagguggcaugaa

SEQ ID NO: 15516 - RNA, 32 nt, Homo Sapiens
auauauauuagaaagagagauagaaucaaaga

SEQ ID NO: 15517 - RNA, 32 nt, Homo Sapiens
cugaggccaucgccgcguugagucggucgcug

SEQ ID NO: 15518 - RNA, 32 nt, Homo Sapiens
guuucggacgacccuugcucugaccggaagag

SEQ ID NO: 15519 - RNA, 32 nt, Homo Sapiens
aguuuguuguacagauuauuucaauagccagg

SEQ ID NO: 15520 - RNA, 32 nt, Homo Sapiens
ccggccccaucccucacccccacccucacuuu

SEQ ID NO: 15521 - RNA, 32 nt, Homo Sapiens
uuuuuggaggaaguaacagcuacgaugggaug

SEQ ID NO: 15522 - RNA, 32 nt, Homo Sapiens
guugcccagcggcuccgccggagaggacucga

SEQ ID NO: 15523 - RNA, 32 nt, Homo Sapiens
auaacuaacauguuggccagaauagaaccacu

SEQ ID NO: 15524 - RNA, 32 nt, Homo Sapiens
cuuugguuauuacccuggaaaauugaggguug

SEQ ID NO: 15525 - RNA, 32 nt, Homo Sapiens
augaagauaauuuggaacaggcucaguccugg

SEQ ID NO: 15526 - RNA, 32 nt, Homo Sapiens
uuaugacgaucauguuugauaauuacaaugau

SEQ ID NO: 15527 - RNA, 32 nt, Homo Sapiens
cacaaccucuaccuucccacucaccuucccca

SEQ ID NO: 15528 - RNA, 32 nt, Homo Sapiens
cggucccgcacuggugcagccauguccucuuc

SEQ ID NO: 15529 - RNA, 30 nt, Homo Sapiens
aaaagguaaccugcgccgccggcggggcug

SEQ ID NO: 15530 - RNA, 31 nt, Homo Sapiens
cgagagaugccggcccugggcugggccgugg

SEQ ID NO: 15531 - RNA, 32 nt, Homo Sapiens
caguauaaaagcuacuuugcuccuggugagag

SEQ ID NO: 15532 - RNA, 32 nt, Homo Sapiens
gguccugacaacaggugcccgagguggcuggg

SEQ ID NO: 15533 - RNA, 31 nt, Homo Sapiens
cucaacaugcgugaguguaucucuauccacg

SEQ ID NO: 15534 - RNA, 32 nt, Homo Sapiens
ugccauggguacuucuggggaccuccuggcag

SEQ ID NO: 15535 - RNA, 32 nt, Homo Sapiens
cuuaagauaagguagaagacuuuaacuaaagg

SEQ ID NO: 15536 - RNA, 32 nt, Homo Sapiens
gggagguggagggacaggcucagccuccucau

SEQ ID NO: 15537 - RNA, 32 nt, Homo Sapiens
cccguacaaccuggccaacaaccgccaggugc

SEQ ID NO: 15538 - RNA, 32 nt, Homo Sapiens
ggggagaucugccugcucacccggggccaccg

SEQ ID NO: 15539 - RNA, 32 nt, Homo Sapiens
ugcuuuguuccacagcauugucuccacucuug

SEQ ID NO: 15540 - RNA, 32 nt, Homo Sapiens
acucaggcgggacagugcugcagcucccuggc

SEQ ID NO: 15541 - RNA, 32 nt, Homo Sapiens
uacuuguacaaggggaagugucugcccaccug

SEQ ID NO: 15542 - RNA, 32 nt, Homo Sapiens
cucccucggccgcgcggggacagggcugcuga

SEQ ID NO: 15543 - RNA, 32 nt, Homo Sapiens
ugaaauaagagcucaagggcaguggcaggaca

SEQ ID NO: 15544 - RNA, 32 nt, Homo Sapiens
ggauuacaggcgcccaccaccacagccugcua

SEQ ID NO: 15545 - RNA, 32 nt, Homo Sapiens
uuuccgagugcagcuggagggaucugagcgca

SEQ ID NO: 15546 - RNA, 32 nt, Homo Sapiens
gaaaugcugacucguucagagcgcuagugccc

SEQ ID NO: 15547 - RNA, 32 nt, Homo Sapiens
cgauggcuuccccuucaacgugcugcaggaug

SEQ ID NO: 15548 - RNA, 32 nt, Homo Sapiens
uuauaacugaagauccuggagcccggaagauu

SEQ ID NO: 15549 - RNA, 32 nt, Homo Sapiens
uaguaggaagagaauaauuacauuugcggggg

SEQ ID NO: 15550 - RNA, 32 nt, Homo Sapiens
acgucgugcccuccgcagcaauaaaaacugga

SEQ ID NO: 15551 - RNA, 32 nt, Homo Sapiens
auaaagugcuagaaaaucauguuccuuguccu

SEQ ID NO: 15552 - RNA, 32 nt, Homo Sapiens
uuuucuaaguuuaccuuuaguuuaccuaaacu

SEQ ID NO: 15553 - RNA, 32 nt, Homo Sapiens
agacccagggccauccucagagcagccgggag

SEQ ID NO: 15554 - RNA, 32 nt, Homo Sapiens
agcuucaguggccuagcaagaucuuugggccc

SEQ ID NO: 15555 - RNA, 29 nt, Homo Sapiens
auuugugucauuuuccugccugguugcug

SEQ ID NO: 15556 - RNA, 32 nt, Homo Sapiens
aauauuuuaacccuuuaucuguuuguuuuuau

SEQ ID NO: 15557 - RNA, 32 nt, Homo Sapiens
cucugucugcuguccgccacggcccugcucug

SEQ ID NO: 15558 - RNA, 32 nt, Homo Sapiens
acauccccaagcccaccaggugucaggauagu

SEQ ID NO: 15559 - RNA, 31 nt, Homo Sapiens
ggugccuggaggcagccgccccgcgcugcuc

SEQ ID NO: 15560 - RNA, 32 nt, Homo Sapiens
ccagcggccccggcuccagcccagccagcacu

SEQ ID NO: 15561 - RNA, 32 nt, Homo Sapiens
uugagacaaaaauccaguguagcuggccacuu

SEQ ID NO: 15562 - RNA, 32 nt, Homo Sapiens
ccagcggacaccggcagcgcgcggucgacgcg

SEQ ID NO: 15563 - RNA, 32 nt, Homo Sapiens
uugguuuuauuuugagcccccauuccaccaca

SEQ ID NO: 15564 - RNA, 32 nt, Homo Sapiens
gcgagcccagcccuggugccucaugggauggg

SEQ ID NO: 15565 - RNA, 32 nt, Homo Sapiens
uuuaauuuacuuuuuguuacucuuuacauacu

SEQ ID NO: 15566 - RNA, 32 nt, Homo Sapiens
uacuagaggcggauuucccugacugaagacca

SEQ ID NO: 15567 - RNA, 32 nt, Homo Sapiens
caacuauggaaaugaauuucauuuucuugaau

SEQ ID NO: 15568 - RNA, 32 nt, Homo Sapiens
uuauuuccuauacuaguuucugauggcaguga

SEQ ID NO: 15569 - RNA, 29 nt, Homo Sapiens
gguuuugugacuuuuuguugaggaaauac

SEQ ID NO: 15570 - RNA, 32 nt, Homo Sapiens
agaccccacaccuuuccccacccgagcugcag

SEQ ID NO: 15571 - RNA, 32 nt, Homo Sapiens
auuaugugagguuccaaaauauguaaaaauga

SEQ ID NO: 15572 - RNA, 32 nt, Homo Sapiens
ucuuacuagugcacuuguguuuuuaauggauc

SEQ ID NO: 15573 - RNA, 32 nt, Homo Sapiens
uaguuaaucuucaugucucgauuucuugucug

SEQ ID NO: 15574 - RNA, 32 nt, Homo Sapiens
cguuuucuaaauuuuuaguuaaguauauggau

SEQ ID NO: 15575 - RNA, 32 nt, Homo Sapiens
gcauguuugggaacuggcauuacuggaacuaa

SEQ ID NO: 15576 - RNA, 30 nt, Homo Sapiens
cauauugucugugugagcagaggggagagc

SEQ ID NO: 15577 - RNA, 32 nt, Homo Sapiens
ugagcccaggaguuuaaagcugcagugcccug

SEQ ID NO: 15578 - RNA, 32 nt, Homo Sapiens
gagaaggcggugccgagccccugcugcugcau

SEQ ID NO: 15579 - RNA, 32 nt, Homo Sapiens
ccagucaaaacccaccaaaaccaagauggcga

SEQ ID NO: 15580 - RNA, 32 nt, Homo Sapiens
uuucaaauacucuggaggcccgggccacacug

SEQ ID NO: 15581 - RNA, 32 nt, Homo Sapiens
gagaagagggauucuuuuuuuuuuuuuuucua

SEQ ID NO: 15582 - RNA, 32 nt, Homo Sapiens
gcccugcccaaccgugcgucccauggggcacc

SEQ ID NO: 15583 - RNA, 32 nt, Homo Sapiens
gaagcaaaacagcagcacaagaaaccaguuuc

SEQ ID NO: 15584 - RNA, 32 nt, Homo Sapiens
ugcgaaguaaaucauucuugugaaugugacac

SEQ ID NO: 15585 - RNA, 32 nt, Homo Sapiens
cagaauuguuauugcuucauuuagacauaaaa

SEQ ID NO: 15586 - RNA, 32 nt, Homo Sapiens
accgcagucccgggugucugcggccgcaacgc

SEQ ID NO: 15587 - RNA, 32 nt, Homo Sapiens
ugccucucccacauuccuccccgcgggggagg

SEQ ID NO: 15588 - RNA, 32 nt, Homo Sapiens
acacagcaguuugcaaccgcaagcauucucuu

SEQ ID NO: 15589 - RNA, 32 nt, Homo Sapiens
ccccacaccacuuuugcaaucuuuaaacuuuc

SEQ ID NO: 15590 - RNA, 32 nt, Homo Sapiens
uuaaagaugucccucuccccagcccuccgccu

SEQ ID NO: 15591 - RNA, 32 nt, Homo Sapiens
gcuuuugcagagccgccuccaugugguuucgg

SEQ ID NO: 15592 - RNA, 32 nt, Homo Sapiens
gcuaguuaucuaauguuuuaaaagaaaauaua

SEQ ID NO: 15593 - RNA, 32 nt, Homo Sapiens
gaagaugaaaauuuuacuuuaaagcaaggauu

SEQ ID NO: 15594 - RNA, 32 nt, Homo Sapiens
gggcugguuuuguggcggcugcugcuagagcu

SEQ ID NO: 15595 - RNA, 30 nt, Homo Sapiens
aggcuggugcuguugccgccgcugcucuag

SEQ ID NO: 15596 - RNA, 32 nt, Homo Sapiens
guuucuauaaggaaaaguuuugcuacuaacag

SEQ ID NO: 15597 - RNA, 32 nt, Homo Sapiens
augcugauauaaaaucaauaaaucuuauguca

SEQ ID NO: 15598 - RNA, 32 nt, Homo Sapiens
ugcacgcggggcccgggagccaugguccgcuu

SEQ ID NO: 15599 - RNA, 32 nt, Homo Sapiens
cagggacccggcccugcccugccgcccgcuga

SEQ ID NO: 15600 - RNA, 32 nt, Homo Sapiens
agcccucuggccuaguucccaccacacaugag

SEQ ID NO: 15601 - RNA, 32 nt, Homo Sapiens
aggucccggcccggcggcggcagccauggccg

SEQ ID NO: 15602 - RNA, 32 nt, Homo Sapiens
ggcucgacgauggaggagccgcagcgcgcccg

SEQ ID NO: 15603 - RNA, 32 nt, Homo Sapiens
gaguauaugaacaacaaagaggcuuugcccaa

SEQ ID NO: 15604 - RNA, 32 nt, Homo Sapiens
gcuucauuuuacuuauacauuaacucauguaa

SEQ ID NO: 15605 - RNA, 32 nt, Homo Sapiens
cagagcauggcccggcagcaguguugucacag

SEQ ID NO: 15606 - RNA, 32 nt, Homo Sapiens
ugcugggagcagcucugugacucccccucuuu

SEQ ID NO: 15607 - RNA, 32 nt, Homo Sapiens
ccuuuggcauccugggguuggccugggcaaau

SEQ ID NO: 15608 - RNA, 32 nt, Homo Sapiens
gaaaagaaaaauuuaugcacugauuuaaaaca

SEQ ID NO: 15609 - RNA, 32 nt, Homo Sapiens
gucuacacauaaaugauuaagggcaaguaguu

SEQ ID NO: 15610 - RNA, 32 nt, Homo Sapiens
auguuucuuacaucuuguuuuuacucauuucu

SEQ ID NO: 15611 - RNA, 32 nt, Homo Sapiens
ggaaacaagaacuacaggauguagaagacccu

SEQ ID NO: 15612 - RNA, 32 nt, Homo Sapiens
cauuuuuuuuuuuuuucuuuuuugagauggag

SEQ ID NO: 15613 - RNA, 32 nt, Homo Sapiens
agaaagaauauuuaguuucaaguuuuaaaacu

SEQ ID NO: 15614 - RNA, 29 nt, Homo Sapiens
ugugucaugucaaagugaaagacauuuca

SEQ ID NO: 15615 - RNA, 32 nt, Homo Sapiens
ggggcccccgguugccgcccccucgggagcca

SEQ ID NO: 15616 - RNA, 32 nt, Homo Sapiens
ccuccacacacacacacacacacacacacaca

SEQ ID NO: 15617 - RNA, 32 nt, Homo Sapiens
aaucgcccauuccccucuuccccucccagccc

SEQ ID NO: 15618 - RNA, 31 nt, Homo Sapiens
ugcucucggccaugccugccuugggaagcac

SEQ ID NO: 15619 - RNA, 32 nt, Homo Sapiens
cuacagcagggguaaacauucaucugcagugu

SEQ ID NO: 15620 - RNA, 32 nt, Homo Sapiens
uucagcccaaggaaauaaaauuuuaguugagg

SEQ ID NO: 15621 - RNA, 32 nt, Homo Sapiens
ucuacuaaaaauacaaaaauuagucaggcgug

SEQ ID NO: 15622 - RNA, 32 nt, Homo Sapiens
cgggaucugaugccgcggggugggggcugccu

SEQ ID NO: 15623 - RNA, 32 nt, Homo Sapiens
gugugugccugcgcuggcucagacagugccug

SEQ ID NO: 15624 - RNA, 32 nt, Homo Sapiens
auuuuagacaugggacacacgugugugaaguc

SEQ ID NO: 15625 - RNA, 32 nt, Homo Sapiens
gccccucuuaaccaugcugguguuaugauuca

SEQ ID NO: 15626 - RNA, 32 nt, Homo Sapiens
ccucuacggauguguguuuucugccuugagua

SEQ ID NO: 15627 - RNA, 32 nt, Homo Sapiens
gacagggcguccgcccucgaagggcugaguga

SEQ ID NO: 15628 - RNA, 32 nt, Homo Sapiens
uggggggcggggggcagguggcugggugugau

SEQ ID NO: 15629 - RNA, 32 nt, Homo Sapiens
ugugcuucccgugaggacccaggaccccuucc

SEQ ID NO: 15630 - RNA, 32 nt, Homo Sapiens
ugauuaauuauguacacaaaaauauuuuccuu

SEQ ID NO: 15631 - RNA, 32 nt, Homo Sapiens
aagaucacuauaagagugaagcucaacauuug

SEQ ID NO: 15632 - RNA, 32 nt, Homo Sapiens
cgccuccguguagucuuggccuccucaggcug

SEQ ID NO: 15633 - RNA, 32 nt, Homo Sapiens
guccgagcgcggggcggguugccgaagggccu

SEQ ID NO: 15634 - RNA, 32 nt, Homo Sapiens
agaucacccagcuguguucagaauuuucuuac

SEQ ID NO: 15635 - RNA, 32 nt, Homo Sapiens
ccccgucagaaauuaaauacaaacuuaaaugu

SEQ ID NO: 15636 - RNA, 32 nt, Homo Sapiens
ccaccucagacgggacgcccaguccagagcug

SEQ ID NO: 15637 - RNA, 32 nt, Homo Sapiens
ucugucucggcugaggcagccaucuuucucuu

SEQ ID NO: 15638 - RNA, 32 nt, Homo Sapiens
agcacguggaugugcagacacacgcggacaca

SEQ ID NO: 15639 - RNA, 32 nt, Homo Sapiens
cuguuggguguugggaugggauaucagaggaa

SEQ ID NO: 15640 - RNA, 32 nt, Homo Sapiens
gagggggagaaaaccaaguugaccuucaugau

SEQ ID NO: 15641 - RNA, 32 nt, Homo Sapiens
cugcgguaucggaaagagccugcuggagccaa

SEQ ID NO: 15642 - RNA, 32 nt, Homo Sapiens
gaaacuaugugacucugagccuugcuuuagag

SEQ ID NO: 15643 - RNA, 32 nt, Homo Sapiens
uuacaagaugucuggggguaaaagcacugugc

SEQ ID NO: 15644 - RNA, 32 nt, Homo Sapiens
gagugaaagacauaaaguggagaccaagauga

SEQ ID NO: 15645 - RNA, 32 nt, Homo Sapiens
gcggcggggcgccccccaugcugcugcagccc

SEQ ID NO: 15646 - RNA, 32 nt, Homo Sapiens
uuaccccuuaguuuccucccagucagcaccag

SEQ ID NO: 15647 - RNA, 32 nt, Homo Sapiens
ugccugugcuggggcaggguguguguucugug

SEQ ID NO: 15648 - RNA, 32 nt, Homo Sapiens
cagccccggcgugccccgcgggcuggaagagg

SEQ ID NO: 15649 - RNA, 32 nt, Homo Sapiens
cgccccccuccauccucccccaucccgggggc

SEQ ID NO: 15650 - RNA, 32 nt, Homo Sapiens
cuuacuuaguugauuaucuccuggaucuggaa

SEQ ID NO: 15651 - RNA, 32 nt, Homo Sapiens
uauucguguauauaagaucguuuacuugcaua

SEQ ID NO: 15652 - RNA, 32 nt, Homo Sapiens
ccaauugaaacccuaaauauguuuacauacca

SEQ ID NO: 15653 - RNA, 32 nt, Homo Sapiens
ccuccgacgcugggcuuccgugagcggcgcuc

SEQ ID NO: 15654 - RNA, 32 nt, Homo Sapiens
ccuggucgcugggaaacguauucuuugaucug

SEQ ID NO: 15655 - RNA, 32 nt, Homo Sapiens
agugauuugggggcauaacucuaaccaaaauu

SEQ ID NO: 15656 - RNA, 32 nt, Homo Sapiens
cauugggcggggggcggggcucugcgcugcca

SEQ ID NO: 15657 - RNA, 32 nt, Homo Sapiens
ucauuacaaccuggaaaauaaaucacccuaag

SEQ ID NO: 15658 - RNA, 32 nt, Homo Sapiens
ccccaggaggccugggccgcccagaggcuccu

SEQ ID NO: 15659 - RNA, 32 nt, Homo Sapiens
auuuaaugucaucuaccugaaaacagugagau

SEQ ID NO: 15660 - RNA, 32 nt, Homo Sapiens
aacaagcuaaauaucgauagaauagaagagac

SEQ ID NO: 15661 - RNA, 32 nt, Homo Sapiens
cugcgccgccgacgccgcccucggcccagacc

SEQ ID NO: 15662 - RNA, 30 nt, Homo Sapiens
gagggcucccgacugccgccgagcagcccc

SEQ ID NO: 15663 - RNA, 32 nt, Homo Sapiens
ccccaccuuagauacuaagcuccucuuuuuaa

SEQ ID NO: 15664 - RNA, 32 nt, Homo Sapiens
acuguccuggcuacuaaauauuuuauguacau

SEQ ID NO: 15665 - RNA, 32 nt, Homo Sapiens
uaaauacuuugucuggagcacaaaacaauaaa

SEQ ID NO: 15666 - RNA, 32 nt, Homo Sapiens
aagaguuccuggauggccguauuauucccaau

SEQ ID NO: 15667 - RNA, 30 nt, Homo Sapiens
auuuugauucucaugggggaaauuggagau

SEQ ID NO: 15668 - RNA, 32 nt, Homo Sapiens
auacccccaagccuuugcucuaggccagaucu

SEQ ID NO: 15669 - RNA, 32 nt, Homo Sapiens
ccaagaggcgaugaagacauccuugggaguuc

SEQ ID NO: 15670 - RNA, 32 nt, Homo Sapiens
guuaugaacuugacuauaucuuauauuuuauu

SEQ ID NO: 15671 - RNA, 32 nt, Homo Sapiens
ucugaacuuugaccagauguugacacuuaaua

SEQ ID NO: 15672 - RNA, 32 nt, Homo Sapiens
agggugugaacauguucuccauuuucaagcug

SEQ ID NO: 15673 - RNA, 32 nt, Homo Sapiens
ccauccucugguauuaacgccuuaaugccccu

SEQ ID NO: 15674 - RNA, 32 nt, Homo Sapiens
gaugauggaaaggacaugugccaugcacuauc

SEQ ID NO: 15675 - RNA, 32 nt, Homo Sapiens
guuugaugcagggcucagagauggccugauau

SEQ ID NO: 15676 - RNA, 32 nt, Homo Sapiens
cagcccagcucuucuucccugcugugucucca

SEQ ID NO: 15677 - RNA, 32 nt, Homo Sapiens
caggcuuggacuuccugggagcuccuccaagu

SEQ ID NO: 15678 - RNA, 32 nt, Homo Sapiens
uuucuuucuuugcauguggcaguuuuaaguua

SEQ ID NO: 15679 - RNA, 32 nt, Homo Sapiens
ucccaagucagaaaaauguugaggguauuaga

SEQ ID NO: 15680 - RNA, 32 nt, Homo Sapiens
gguggccuuguugcuggcaucccggccaggug

SEQ ID NO: 15681 - RNA, 32 nt, Homo Sapiens
uccaccgugugaggacacaaugagaugguggc

SEQ ID NO: 15682 - RNA, 32 nt, Homo Sapiens
acuuuaaggaccagaucaugcuccauccagcc

SEQ ID NO: 15683 - RNA, 32 nt, Homo Sapiens
gacccauugggaccagcccacccggaccuaac

SEQ ID NO: 15684 - RNA, 32 nt, Homo Sapiens
cagucccaauccccggcccguccgggaugagg

SEQ ID NO: 15685 - RNA, 32 nt, Homo Sapiens
auguuugcauauaagggaaguaguuaucaugu

SEQ ID NO: 15686 - RNA, 32 nt, Homo Sapiens
ucagugguaacuugugcccagcccugugcuag

SEQ ID NO: 15687 - RNA, 32 nt, Homo Sapiens
cuuaggguuugugagacagaacaucaggaagu

SEQ ID NO: 15688 - RNA, 32 nt, Homo Sapiens
aaacuccuuaucuuuugcagucucucugggau

SEQ ID NO: 15689 - RNA, 32 nt, Homo Sapiens
aaugaagaguaguuuuacagaaaaaagaggac

SEQ ID NO: 15690 - RNA, 31 nt, Homo Sapiens
gaugccugggcacuaccgccccgcgcuggcu

SEQ ID NO: 15691 - RNA, 32 nt, Homo Sapiens
cgggaaucuucaguucuugucugcuuggaaga

SEQ ID NO: 15692 - RNA, 32 nt, Homo Sapiens
cuuuucucucagugacucuggaaccugaaugc

SEQ ID NO: 15693 - RNA, 32 nt, Homo Sapiens
uucuuuuuacacauuagguacuuaguaauuug

SEQ ID NO: 15694 - RNA, 32 nt, Homo Sapiens
augaaucucgcacauucugccaugucuucucu

SEQ ID NO: 15695 - RNA, 32 nt, Homo Sapiens
uucuguuccuuccuccacugcgcuuacuccuc

SEQ ID NO: 15696 - RNA, 32 nt, Homo Sapiens
auguuguguaaaguucuucacuuuuuucucug

SEQ ID NO: 15697 - RNA, 32 nt, Homo Sapiens
cugaaauacacuuuucuaaaacccucuuaacu

SEQ ID NO: 15698 - RNA, 32 nt, Homo Sapiens
uggcgggcagaucaccugaggucaggaguucg

SEQ ID NO: 15699 - RNA, 32 nt, Homo Sapiens
aguauuucaaccauuguuauuaagaaaauuag

SEQ ID NO: 15700 - RNA, 32 nt, Homo Sapiens
gaagcaugaagauuccugggguggggggaaag

SEQ ID NO: 15701 - RNA, 32 nt, Homo Sapiens
agaagugugggaaauucaggaaaacgaguugc

SEQ ID NO: 15702 - RNA, 32 nt, Homo Sapiens
cagaugcuuccaucaucaguacuccuuguuuu

SEQ ID NO: 15703 - RNA, 31 nt, Homo Sapiens
agaaggaaauaaaauguuauaaucagauaag

SEQ ID NO: 15704 - RNA, 32 nt, Homo Sapiens
cccgcaggggcuccggccgccuccucggucag

SEQ ID NO: 15705 - RNA, 32 nt, Homo Sapiens
ccuguuuucuauuugucaugaaacaguguauu

SEQ ID NO: 15706 - RNA, 32 nt, Homo Sapiens
agaagagaggagaggagggcucagcggugggg

SEQ ID NO: 15707 - RNA, 32 nt, Homo Sapiens
agaugagccccgcuagggccgccccgcgcuga

SEQ ID NO: 15708 - RNA, 32 nt, Homo Sapiens
gagccgcacaggagcugccccggagcugaggg

SEQ ID NO: 15709 - RNA, 32 nt, Homo Sapiens
aacauuauuauguaucucccaaauauguucaa

SEQ ID NO: 15710 - RNA, 32 nt, Homo Sapiens
aaaacccagaaaauauaaugaaauaaaaacua

SEQ ID NO: 15711 - RNA, 32 nt, Homo Sapiens
guuagcccauuauauucauuccaauuagaaga

SEQ ID NO: 15712 - RNA, 32 nt, Homo Sapiens
cauguaauuuuauuuuaaaauuucauagcugu

SEQ ID NO: 15713 - RNA, 32 nt, Homo Sapiens
uugcuagaccuagaugagucaggauaacagag

SEQ ID NO: 15714 - RNA, 32 nt, Homo Sapiens
uuggccuugguggggagcacagacacaggaua

SEQ ID NO: 15715 - RNA, 32 nt, Homo Sapiens
auuuggcucuggaagcugcuuggcccccccag

SEQ ID NO: 15716 - RNA, 32 nt, Homo Sapiens
cucgaaauuccuguaaauuguuuacuuuauga

SEQ ID NO: 15717 - RNA, 32 nt, Homo Sapiens
uaaauuuaagcuguaaauaaaaaacaaauaug

SEQ ID NO: 15718 - RNA, 32 nt, Homo Sapiens
guucuuugacauuaaggaagguaaggauuggu

SEQ ID NO: 15719 - RNA, 32 nt, Homo Sapiens
gagcagggccaucauggucagcccuugugagu

SEQ ID NO: 15720 - RNA, 32 nt, Homo Sapiens
ggaaggccaggccuggucaucugucaagcagg

SEQ ID NO: 15721 - RNA, 32 nt, Homo Sapiens
ggaaaaaaaaaauaaauuauuuuuguuaaggc

SEQ ID NO: 15722 - RNA, 32 nt, Homo Sapiens
gacagagugaguuugucaaaaguaucucauac

SEQ ID NO: 15723 - RNA, 32 nt, Homo Sapiens
uggugcaaccucaguacacgcauuugucuuug

SEQ ID NO: 15724 - RNA, 32 nt, Homo Sapiens
cucuauugaucuauuuuuuuuaccuguuuauc

SEQ ID NO: 15725 - RNA, 32 nt, Homo Sapiens
gcauggccaggaugcauagaggagauucuagc

SEQ ID NO: 15726 - RNA, 32 nt, Homo Sapiens
caauaggauuuauguaaaacuuaacuaagcua

SEQ ID NO: 15727 - RNA, 32 nt, Homo Sapiens
cugagugagggcgggcgggcgggcgggaggga

SEQ ID NO: 15728 - RNA, 32 nt, Homo Sapiens
gcccuccucuccuggugacagcuggcugaggc

SEQ ID NO: 15729 - RNA, 32 nt, Homo Sapiens
ugguagaaucaaaaacaagggccagauguauu

SEQ ID NO: 15730 - RNA, 32 nt, Homo Sapiens
ugugcccagcauauaaaauuuuugguuccuca

SEQ ID NO: 15731 - RNA, 29 nt, Homo Sapiens
auuuaauaaaauguacaauguuaaaucuc

SEQ ID NO: 15732 - RNA, 32 nt, Homo Sapiens
ucuauauuuccaccucuuucuauuuaugcaac

SEQ ID NO: 15733 - RNA, 32 nt, Homo Sapiens
ucguagcaagcugccgauggaacacaaccugc

SEQ ID NO: 15734 - RNA, 29 nt, Homo Sapiens
auuucuaaaaguuuaaguucuaugagggc

SEQ ID NO: 15735 - RNA, 32 nt, Homo Sapiens
caguucugcaccgggguggggcugggacccgg

SEQ ID NO: 15736 - RNA, 25 nt, Homo Sapiens
augagggcgcggccgcaggucugcg

SEQ ID NO: 15737 - RNA, 32 nt, Homo Sapiens
uuauccaucauucauauguaaguaaauaugua

SEQ ID NO: 15738 - RNA, 32 nt, Homo Sapiens
uuuaauccugagagauuaaacaguaguagacu

SEQ ID NO: 15739 - RNA, 32 nt, Homo Sapiens
augcuggggucucacuagcuugagggggcaca

SEQ ID NO: 15740 - RNA, 32 nt, Homo Sapiens
uaccuucugaucuuguauuuugaaagauugau

SEQ ID NO: 15741 - RNA, 32 nt, Homo Sapiens
caggaaauggggggaucacuuuccaagugcca

SEQ ID NO: 15742 - RNA, 32 nt, Homo Sapiens
gccucuggcuccuggucuggccuggccgcgcc

SEQ ID NO: 15743 - RNA, 32 nt, Homo Sapiens
cccaccuuccuccuucccacucccuuacacau

SEQ ID NO: 15744 - RNA, 32 nt, Homo Sapiens
cacacucagcuaauuuuuguauuuucaguaga

SEQ ID NO: 15745 - RNA, 32 nt, Homo Sapiens
ucaggggaggccucuuugccccggccccgcuu

SEQ ID NO: 15746 - RNA, 32 nt, Homo Sapiens
ugcagaaaaugaacugcuuugggagauuauca

SEQ ID NO: 15747 - RNA, 32 nt, Homo Sapiens
ucugacgaauaaagacccccgcugccccauaa

SEQ ID NO: 15748 - RNA, 32 nt, Homo Sapiens
ucagcucgcgcgcagccccugcucuuauuuua

SEQ ID NO: 15749 - RNA, 32 nt, Homo Sapiens
gagccccggcgccaccagcugcgcggucuuac

SEQ ID NO: 15750 - RNA, 32 nt, Homo Sapiens
ugcccagcccugccuguccccagccagcacug

SEQ ID NO: 15751 - RNA, 32 nt, Homo Sapiens
ggcaguaauuuaaucaugguggugguuacccu

SEQ ID NO: 15752 - RNA, 32 nt, Homo Sapiens
cuugugcaauacauuuugaggugaaacuuagu

SEQ ID NO: 15753 - RNA, 29 nt, Homo Sapiens
aguacuuugggaggcugaggcaagaggau

SEQ ID NO: 15754 - RNA, 32 nt, Homo Sapiens
cccugcugccucagcccucaggcuccuaacug

SEQ ID NO: 15755 - RNA, 32 nt, Homo Sapiens
cccugccuggcccuggaccccaucccaggacc

SEQ ID NO: 15756 - RNA, 32 nt, Homo Sapiens
guugugaaauaccaaacuuauggauuaucacu

SEQ ID NO: 15757 - RNA, 32 nt, Homo Sapiens
auccgcccgcccggcguccgaccccuucagcg

SEQ ID NO: 15758 - RNA, 32 nt, Homo Sapiens
cucucuagugauuggaaugcugcuguaagccu

SEQ ID NO: 15759 - RNA, 32 nt, Homo Sapiens
aauguuuguccuucacauaccauuccagaaca

SEQ ID NO: 15760 - RNA, 32 nt, Homo Sapiens
uuuuugaugccguauauagugaaggggugagg

SEQ ID NO: 15761 - RNA, 32 nt, Homo Sapiens
gacagcaaacaucaguugucagaugugcaaug

SEQ ID NO: 15762 - RNA, 32 nt, Homo Sapiens
guacgaggcagacggcggcagugcggcuugcu

SEQ ID NO: 15763 - RNA, 32 nt, Homo Sapiens
agccuggcaguggcgaguggcuccagugggga

SEQ ID NO: 15764 - RNA, 32 nt, Homo Sapiens
agcagaaaguauucguguuuccucuguuuucc

SEQ ID NO: 15765 - RNA, 30 nt, Homo Sapiens
cagagguggcggccugggggucccgggagg

SEQ ID NO: 15766 - RNA, 32 nt, Homo Sapiens
gcccuuccugugacuuuugcgccccgcgccug

SEQ ID NO: 15767 - RNA, 32 nt, Homo Sapiens
gggggaaacagguugggaugggauaggacuag

SEQ ID NO: 15768 - RNA, 32 nt, Homo Sapiens
ggcaaaauugcagaauaacaaagaaaugguau

SEQ ID NO: 15769 - RNA, 32 nt, Homo Sapiens
gggaugggcgucgggccggcaguggugcggcu

SEQ ID NO: 15770 - RNA, 32 nt, Homo Sapiens
uucuguuauuacagggcuaucuauaaaaagaa

SEQ ID NO: 15771 - RNA, 32 nt, Homo Sapiens
aggcccgagcugugcucugugguuuccugcag

SEQ ID NO: 15772 - RNA, 32 nt, Homo Sapiens
caccuccccuccccaccucuucucucccagau

SEQ ID NO: 15773 - RNA, 32 nt, Homo Sapiens
gaccacacuuucaaaacaucacucggaaaauu

SEQ ID NO: 15774 - RNA, 32 nt, Homo Sapiens
ccucccaguaccaccagugccacagccugcag

SEQ ID NO: 15775 - RNA, 32 nt, Homo Sapiens
gcauguuccucuguguucugcaucuccuguag

SEQ ID NO: 15776 - RNA, 32 nt, Homo Sapiens
agcuggcuccugcuggggaaucaauaaaggag

SEQ ID NO: 15777 - RNA, 32 nt, Homo Sapiens
ugcggguccggcggcgucggcgcgguccuagc

SEQ ID NO: 15778 - RNA, 32 nt, Homo Sapiens
ucauuuagaugcacuuuuuuguguguucuuua

SEQ ID NO: 15779 - RNA, 32 nt, Homo Sapiens
ggugaugcauucuccugcuguugcuucucagu

SEQ ID NO: 15780 - RNA, 32 nt, Homo Sapiens
uuugagacagaguuucacucuuguugcccacg

SEQ ID NO: 15781 - RNA, 32 nt, Homo Sapiens
acuuugccaucggcggggcagucgcgggaugc

SEQ ID NO: 15782 - RNA, 32 nt, Homo Sapiens
aaaaaagagauagcuuuagaaaacucuacauu

SEQ ID NO: 15783 - RNA, 32 nt, Homo Sapiens
aauuuuuuguauuuuucgccauguuggccaga

SEQ ID NO: 15784 - RNA, 32 nt, Homo Sapiens
aguggcugccucccggccuccucuccgggccc

SEQ ID NO: 15785 - RNA, 32 nt, Homo Sapiens
cgauauugaagauguuauuuaacaucuuucuu

SEQ ID NO: 15786 - RNA, 31 nt, Homo Sapiens
cccuccacccacugccuucccgcugcgggcu

SEQ ID NO: 15787 - RNA, 32 nt, Homo Sapiens
ggaggaaauuggagaccccagcacccccuugc

SEQ ID NO: 15788 - RNA, 32 nt, Homo Sapiens
guggacucaaugaccuuuccaagcugugcgcc

SEQ ID NO: 15789 - RNA, 32 nt, Homo Sapiens
aggggccagaguuuucuaugaaucuauuuuuc

SEQ ID NO: 15790 - RNA, 32 nt, Homo Sapiens
cuggcuggcaggcccuguggcugcuggcugag

SEQ ID NO: 15791 - RNA, 32 nt, Homo Sapiens
aauggauuuuuggagcagggagauggaauagg

SEQ ID NO: 15792 - RNA, 32 nt, Homo Sapiens
uggagccgugggagcccggccagggcaggggg

SEQ ID NO: 15793 - RNA, 32 nt, Homo Sapiens
cagugggaagcagaacaacagaaggaacuuua

SEQ ID NO: 15794 - RNA, 32 nt, Homo Sapiens
gccgggcgagauguaaccggcugcugagcugg

SEQ ID NO: 15795 - RNA, 32 nt, Homo Sapiens
cucaacacucccuggcuucucugcccuaguuu

SEQ ID NO: 15796 - RNA, 32 nt, Homo Sapiens
gugccuuugcuucugcauuuccuccuugagug

SEQ ID NO: 15797 - RNA, 32 nt, Homo Sapiens
accagccugggcaacauagugagacccugccu

SEQ ID NO: 15798 - RNA, 32 nt, Homo Sapiens
gcagcuccggcgagcgaggcggcggccgcacg

SEQ ID NO: 15799 - RNA, 27 nt, Homo Sapiens
uuaguccauuaauuuuagugggaccug

SEQ ID NO: 15800 - RNA, 32 nt, Homo Sapiens
ucagccgccagggggcgccgccgccccgagag

SEQ ID NO: 15801 - RNA, 32 nt, Homo Sapiens
uuucucuacgaugcuacaaaagaaauuccuuu

SEQ ID NO: 15802 - RNA, 32 nt, Homo Sapiens
ggaaucccgcgcccccuccccccgagccucac

SEQ ID NO: 15803 - RNA, 32 nt, Homo Sapiens
ucuuguuggaaacucacagcuacaagggcagg

SEQ ID NO: 15804 - RNA, 32 nt, Homo Sapiens
cccuuccaaccuccuccaccuccaccuucaag

SEQ ID NO: 15805 - RNA, 32 nt, Homo Sapiens
cauauuugauaaccguugcaguaaaucaugag

SEQ ID NO: 15806 - RNA, 32 nt, Homo Sapiens
ccccaccugagccccagcuccuaccucugacc

SEQ ID NO: 15807 - RNA, 25 nt, Homo Sapiens
uagcaauaaagcuguuauuuucugc

SEQ ID NO: 15808 - RNA, 32 nt, Homo Sapiens
cuugaccuccgugguuacuuucuggggcccca

SEQ ID NO: 15809 - RNA, 32 nt, Homo Sapiens
ccgccccccguccaucgaaacaccguuggccg

SEQ ID NO: 15810 - RNA, 32 nt, Homo Sapiens
aucgcagcaggagaggggagugggcugguucu

SEQ ID NO: 15811 - RNA, 32 nt, Homo Sapiens
uccucugucagaguuauaucaacuuauaauuu

SEQ ID NO: 15812 - RNA, 32 nt, Homo Sapiens
ugguucauauuucaggggucccggaagaguug

SEQ ID NO: 15813 - RNA, 32 nt, Homo Sapiens
uaacacuuaugauaaaugacuaacauaguaac

SEQ ID NO: 15814 - RNA, 32 nt, Homo Sapiens
gaagccagcucuggggugccauaggccagacu

SEQ ID NO: 15815 - RNA, 32 nt, Homo Sapiens
ugagaggcucugcuuccugcugccgcucugca

SEQ ID NO: 15816 - RNA, 32 nt, Homo Sapiens
gacacuuuaucuggauuccccagcugucaucc

SEQ ID NO: 15817 - RNA, 32 nt, Homo Sapiens
aguugacauuaaaagaaaaucugguaguuuuu

SEQ ID NO: 15818 - RNA, 32 nt, Homo Sapiens
caccugggcagacacugcaagaugagcuuaga

SEQ ID NO: 15819 - RNA, 32 nt, Homo Sapiens
uaccguuccaugaacucgagggccaggaagaa

SEQ ID NO: 15820 - RNA, 32 nt, Homo Sapiens
gugaccccauccccccauacccuccauccugg

SEQ ID NO: 15821 - RNA, 32 nt, Homo Sapiens
aaguagguauauaauuugauaaaguugcaauu

SEQ ID NO: 15822 - RNA, 32 nt, Homo Sapiens
ucauagucacgagcuuaacaguucuuguuucu

SEQ ID NO: 15823 - RNA, 32 nt, Homo Sapiens
acaaauacagggugcucugugcuuauauccuu

SEQ ID NO: 15824 - RNA, 32 nt, Homo Sapiens
ugucccagacuuugacaaccugcacaagacaa

SEQ ID NO: 15825 - RNA, 32 nt, Homo Sapiens
guccaccuggggacagucugugccuguagccu

SEQ ID NO: 15826 - RNA, 32 nt, Homo Sapiens
accucuuuuccuaguuuuauguuucuugggaa

SEQ ID NO: 15827 - RNA, 32 nt, Homo Sapiens
ucagagaagaacucucauggcugcuggaggua

SEQ ID NO: 15828 - RNA, 32 nt, Homo Sapiens
ggaaagaagacacaggcugagccccgggagga

SEQ ID NO: 15829 - RNA, 32 nt, Homo Sapiens
cuuugauucugaauaaauauuuuuuguggggu

SEQ ID NO: 15830 - RNA, 32 nt, Homo Sapiens
uguagaccaagcccuuggagcugcugguuuag

SEQ ID NO: 15831 - RNA, 32 nt, Homo Sapiens
gugcuccauauuugauuucuaauuguaaguga

SEQ ID NO: 15832 - RNA, 32 nt, Homo Sapiens
cucaagcgaucugcccaccuccgucucucaaa

SEQ ID NO: 15833 - RNA, 32 nt, Homo Sapiens
ccugggcacagugcuuccagguauggagaaag

SEQ ID NO: 15834 - RNA, 32 nt, Homo Sapiens
ggacuuaaaaauuuugcuaauaaauugugugu

SEQ ID NO: 15835 - RNA, 32 nt, Homo Sapiens
ugggauggagaaugggacacacggagcgagaa

SEQ ID NO: 15836 - RNA, 32 nt, Homo Sapiens
gagauguggggcuuuuuuuuuaaauaaaauaa

SEQ ID NO: 15837 - RNA, 32 nt, Homo Sapiens
cagccccacagcaccuugucacugaagcuaca

SEQ ID NO: 15838 - RNA, 32 nt, Homo Sapiens
gagacccagaaagggcugcggcucggggcgac

SEQ ID NO: 15839 - RNA, 32 nt, Homo Sapiens
acuaacaauauuuggggaucccuguaguaaac

SEQ ID NO: 15840 - RNA, 32 nt, Homo Sapiens
uugcagaaaugggaagagcuacccgugguugc

SEQ ID NO: 15841 - RNA, 32 nt, Homo Sapiens
agcugaggcaaggggauuucucaggucauuug

SEQ ID NO: 15842 - RNA, 32 nt, Homo Sapiens
uccuguuccuuccucugcuccuccuuuggaga

SEQ ID NO: 15843 - RNA, 32 nt, Homo Sapiens
guuaaguuuuaaacaaaauacaugaaguagug

SEQ ID NO: 15844 - RNA, 32 nt, Homo Sapiens
ccaggcuucuauuugggauucacaucaguauu

SEQ ID NO: 15845 - RNA, 32 nt, Homo Sapiens
ggaaggggccccagggccuucgcucccucagc

SEQ ID NO: 15846 - RNA, 32 nt, Homo Sapiens
gggaguaacgacccucagaugaugcagaaaac

SEQ ID NO: 15847 - RNA, 32 nt, Homo Sapiens
uuuuauguauuaguccauaagcacuaaguuuu

SEQ ID NO: 15848 - RNA, 32 nt, Homo Sapiens
aaaauacaaaaauuagccaggugugguggcaa

SEQ ID NO: 15849 - RNA, 32 nt, Homo Sapiens
gggagcgccagcugcgugaggaggccgagcgg

SEQ ID NO: 15850 - RNA, 32 nt, Homo Sapiens
agcggccaggaagaaaaccacccccucuuaag

SEQ ID NO: 15851 - RNA, 32 nt, Homo Sapiens
gggcucuccgucugcggucccuugugaaggcu

SEQ ID NO: 15852 - RNA, 32 nt, Homo Sapiens
ccaugaugcacagcgcuacguccgccacuguc

SEQ ID NO: 15853 - RNA, 32 nt, Homo Sapiens
caaacagaauauaguaaguaaaaaauaucaac

SEQ ID NO: 15854 - RNA, 32 nt, Homo Sapiens
gcgcgguagccgccccacuugcgggauuccaa

SEQ ID NO: 15855 - RNA, 31 nt, Homo Sapiens
uccuugaaaagaaaacagguaguuaaccuau

SEQ ID NO: 15856 - RNA, 32 nt, Homo Sapiens
gaggacugugugucuuuuuacccugaaguuag

SEQ ID NO: 15857 - RNA, 32 nt, Homo Sapiens
ccagcgcagcgcgcuccgcggggugcugaucu

SEQ ID NO: 15858 - RNA, 32 nt, Homo Sapiens
gauucucuccacaccacccccaaacagggcuc

SEQ ID NO: 15859 - RNA, 32 nt, Homo Sapiens
ucaugaaaaaagaaacaaaacaaaacuuggga

SEQ ID NO: 15860 - RNA, 32 nt, Homo Sapiens
acaggcuagcaauugcaaagucaggcuuugac

SEQ ID NO: 15861 - RNA, 32 nt, Homo Sapiens
acacauuccagaaccacauuuucuaaccacag

SEQ ID NO: 15862 - RNA, 32 nt, Homo Sapiens
gggagaggagcagagaugcugcugagggugga

SEQ ID NO: 15863 - RNA, 32 nt, Homo Sapiens
ugaacccaggaguucaaaucugcagugcgcaa

SEQ ID NO: 15864 - RNA, 30 nt, Homo Sapiens
ugagacacagggcccauccguccugggaaa

SEQ ID NO: 15865 - RNA, 32 nt, Homo Sapiens
caguacucaggcagugcaguacucaguaagac

SEQ ID NO: 15866 - RNA, 32 nt, Homo Sapiens
aggcuggagugcagugguguaaucacagcuca

SEQ ID NO: 15867 - RNA, 32 nt, Homo Sapiens
cccaggcccagcuggggagaaggcgcuaccug

SEQ ID NO: 15868 - RNA, 32 nt, Homo Sapiens
ugccggaaaugggaaguuuucaggaugaccca

SEQ ID NO: 15869 - RNA, 32 nt, Homo Sapiens
uucucaugcccuuucaagucccgggcuggggg

SEQ ID NO: 15870 - RNA, 32 nt, Homo Sapiens
aguagguggucaugguccaguuccuugcccag

SEQ ID NO: 15871 - RNA, 32 nt, Homo Sapiens
ugcagcugcugcgccugugucgggacagcccu

SEQ ID NO: 15872 - RNA, 32 nt, Homo Sapiens
caaauagauaaaauuuauuuuuauggagaaga

SEQ ID NO: 15873 - RNA, 32 nt, Homo Sapiens
cccauuaucucaccauauggaagugacuaaug

SEQ ID NO: 15874 - RNA, 32 nt, Homo Sapiens
ucuagaaaaaucaacaaaguaagcaugacacu

SEQ ID NO: 15875 - RNA, 32 nt, Homo Sapiens
cuuaaacauuuuauuuguugaaauuaucuuag

SEQ ID NO: 15876 - RNA, 32 nt, Homo Sapiens
gaacuugagggacagaguuaagcugauaaaug

SEQ ID NO: 15877 - RNA, 29 nt, Homo Sapiens
ucuuaauaaaguuuuaaguuuucugcaaa

SEQ ID NO: 15878 - RNA, 32 nt, Homo Sapiens
aaaacuucauuguaagagaaucuugcauacaa

SEQ ID NO: 15879 - RNA, 32 nt, Homo Sapiens
gggggcuggacaauuuggguggcaguguuugg

SEQ ID NO: 15880 - RNA, 32 nt, Homo Sapiens
gcacauccucgagccaggcagggcgcccggcu

SEQ ID NO: 15881 - RNA, 32 nt, Homo Sapiens
uuucuuggaacaccacccaagaacgucaccuc

SEQ ID NO: 15882 - RNA, 32 nt, Homo Sapiens
cugccgagcccggcuccgcgggcaccuugcuu

SEQ ID NO: 15883 - RNA, 32 nt, Homo Sapiens
guccugucgaagacggguggacgcucugucag

SEQ ID NO: 15884 - RNA, 32 nt, Homo Sapiens
aacugugaacucucaauugaugaggaaauauc

SEQ ID NO: 15885 - RNA, 32 nt, Homo Sapiens
cuauggcguggccuuaucgauugcagugggaa

SEQ ID NO: 15886 - RNA, 32 nt, Homo Sapiens
cauucacaaaaauuaauauaauuuuuaaugua

SEQ ID NO: 15887 - RNA, 32 nt, Homo Sapiens
gccuuuccagguuuccuuuacuucccugcuuc

SEQ ID NO: 15888 - RNA, 32 nt, Homo Sapiens
gacgccacaucccacaagcucccgaagucgcg

SEQ ID NO: 15889 - RNA, 32 nt, Homo Sapiens
auauauuugccuuuuuuacuguguugaaauuu

SEQ ID NO: 15890 - RNA, 32 nt, Homo Sapiens
cuuugagcauguaagagaaauaaaaauugaaa

SEQ ID NO: 15891 - RNA, 29 nt, Homo Sapiens
ucuacagugaagauuguggaccagccucu

SEQ ID NO: 15892 - RNA, 32 nt, Homo Sapiens
aaauuugcuuuaaaaauauugugucugugugc

SEQ ID NO: 15893 - RNA, 32 nt, Homo Sapiens
gaugucuggccuuuuuugcacagcugcuguug

SEQ ID NO: 15894 - RNA, 32 nt, Homo Sapiens
cagugaugcugugcuaugaauuuucaaguaau

SEQ ID NO: 15895 - RNA, 32 nt, Homo Sapiens
gccccgcucccuccuccuccuuccccuggagu

SEQ ID NO: 15896 - RNA, 32 nt, Homo Sapiens
uuaaugcagacaaacaaacauaaaacuucuuu

SEQ ID NO: 15897 - RNA, 32 nt, Homo Sapiens
gcuccgggaaaacaccuugguuacacucgcca

SEQ ID NO: 15898 - RNA, 32 nt, Homo Sapiens
ugucuauuguaucuccuuugaggaaaagaaca

SEQ ID NO: 15899 - RNA, 32 nt, Homo Sapiens
caaacucaauuuugcauagaaagguguauuuu

SEQ ID NO: 15900 - RNA, 32 nt, Homo Sapiens
cuaggcuccaggcgccucggaggcuuuggcag

SEQ ID NO: 15901 - RNA, 32 nt, Homo Sapiens
cuuuuugaaaauaaauuggcauuggaguguuu

SEQ ID NO: 15902 - RNA, 32 nt, Homo Sapiens
auuugacagucucaccaauuucagaaaaucau

SEQ ID NO: 15903 - RNA, 28 nt, Homo Sapiens
auaugaaggaacuaaacuauuucacuga

SEQ ID NO: 15904 - RNA, 32 nt, Homo Sapiens
caauugauaaaugacaaggaaauauuuaauua

SEQ ID NO: 15905 - RNA, 32 nt, Homo Sapiens
cacggcggguacacugagcagcugcauuggug

SEQ ID NO: 15906 - RNA, 32 nt, Homo Sapiens
cuuuugcauggcugaggauccuugaaggaacc

SEQ ID NO: 15907 - RNA, 32 nt, Homo Sapiens
ggaacuccuaaauaaacuaguaugaaauaacg

SEQ ID NO: 15908 - RNA, 32 nt, Homo Sapiens
ccuagaccguugguuccaucacugccguccca

SEQ ID NO: 15909 - RNA, 32 nt, Homo Sapiens
gcccugggcuacccuuggguccugcuccucag

SEQ ID NO: 15910 - RNA, 32 nt, Homo Sapiens
agggccaggcaggugccuggacauuugccuug

SEQ ID NO: 15911 - RNA, 32 nt, Homo Sapiens
ccauucuggggaauuuauauuugaauugaggc

SEQ ID NO: 15912 - RNA, 32 nt, Homo Sapiens
cccaguacuuugcaugugagcacagacccagg

SEQ ID NO: 15913 - RNA, 32 nt, Homo Sapiens
aucaucucagugucuuuaauucuuaacuccaa

SEQ ID NO: 15914 - RNA, 32 nt, Homo Sapiens
uuuucuaaagagaaguuugauauuuuguaugc

SEQ ID NO: 15915 - RNA, 31 nt, Homo Sapiens
aaaauaacaaauugcauaggagugugggaug

SEQ ID NO: 15916 - RNA, 32 nt, Homo Sapiens
gccuugcgcgucgucgcuaccuccucggacag

SEQ ID NO: 15917 - RNA, 32 nt, Homo Sapiens
aaaauagacuucaucucguguugugugcacug

SEQ ID NO: 15918 - RNA, 32 nt, Homo Sapiens
uaauaagggcuuacacaauaaaaaauaacuau

SEQ ID NO: 15919 - RNA, 32 nt, Homo Sapiens
aaccaccgcaacgcgggcgcuucggggcgggg

SEQ ID NO: 15920 - RNA, 32 nt, Homo Sapiens
uucaaaaaacaaaagguggcagcagcacaaug

SEQ ID NO: 15921 - RNA, 32 nt, Homo Sapiens
aggaguugcucuugcuguguaaagcacuauug

SEQ ID NO: 15922 - RNA, 32 nt, Homo Sapiens
uugucaguuuacaccaauaguuucuuguuaau

SEQ ID NO: 15923 - RNA, 30 nt, Homo Sapiens
cugggaggaugccuaaccuaacuccagcca

SEQ ID NO: 15924 - RNA, 32 nt, Homo Sapiens
ucagagaaacuguguucucuagucuuucauuc

SEQ ID NO: 15925 - RNA, 32 nt, Homo Sapiens
uucagaaggggaggggagacagguaacgucug

SEQ ID NO: 15926 - RNA, 32 nt, Homo Sapiens
cgacuuggagagagggaagaggggcguuuucg

SEQ ID NO: 15927 - RNA, 32 nt, Homo Sapiens
uuagggagaugaguugcaguuuuuauaauaga

SEQ ID NO: 15928 - RNA, 32 nt, Homo Sapiens
uuugaaagcugauucucaugaauucaaguagc

SEQ ID NO: 15929 - RNA, 32 nt, Homo Sapiens
cuccccucccccaguuucuccuccccuaaaau

SEQ ID NO: 15930 - RNA, 32 nt, Homo Sapiens
uccacgcccuccccaucucccagucucccugc

SEQ ID NO: 15931 - RNA, 32 nt, Homo Sapiens
uaaaauauuuagucuaagaugauucaaaguag

SEQ ID NO: 15932 - RNA, 32 nt, Homo Sapiens
ggggcugggcuucgggucuucaggagugggcc

SEQ ID NO: 15933 - RNA, 32 nt, Homo Sapiens
ugccggcccccgcucugcccugcauaauaaaa

SEQ ID NO: 15934 - RNA, 32 nt, Homo Sapiens
uucauuuauacaccaucagcagacauuggcau

SEQ ID NO: 15935 - RNA, 32 nt, Homo Sapiens
accccaaauuuaucaacauaguggcaacuggc

SEQ ID NO: 15936 - RNA, 32 nt, Homo Sapiens
ccuccuucucaacccaucucccuaaccccaca

SEQ ID NO: 15937 - RNA, 32 nt, Homo Sapiens
cggcgaggcucgccgcgggcgcccucugucgg

SEQ ID NO: 15938 - RNA, 32 nt, Homo Sapiens
uguauuggcuaagaaaaauauaauaaaauuuu

SEQ ID NO: 15939 - RNA, 32 nt, Homo Sapiens
ucuaaggagcugggggcgcgcccuggauagac

SEQ ID NO: 15940 - RNA, 32 nt, Homo Sapiens
cucaagccgagggcagaggccuuuguacgcag

SEQ ID NO: 15941 - RNA, 31 nt, Homo Sapiens
gccuagacggcgguguugcuccggcagcguu

SEQ ID NO: 15942 - RNA, 32 nt, Homo Sapiens
cugacccggcgguuaaccuggugcacuuuugu

SEQ ID NO: 15943 - RNA, 32 nt, Homo Sapiens
ggaagugcaaccacccaaugucucuggaagug

SEQ ID NO: 15944 - RNA, 32 nt, Homo Sapiens
caaugcugcccgagcccucccuucccccuauc

SEQ ID NO: 15945 - RNA, 32 nt, Homo Sapiens
uuuguagugguauuguuugcucccucuucgcg

SEQ ID NO: 15946 - RNA, 32 nt, Homo Sapiens
uuaaacaguuguaaaaaaugugauuucuggua

SEQ ID NO: 15947 - RNA, 32 nt, Homo Sapiens
agaucccuggaaaggaugcuuuuccucuccuu

SEQ ID NO: 15948 - RNA, 32 nt, Homo Sapiens
gcgggcccgggguucagccucccggccucccu

SEQ ID NO: 15949 - RNA, 32 nt, Homo Sapiens
uuggggucauaaacagaggaaguaucaguuau

SEQ ID NO: 15950 - RNA, 32 nt, Homo Sapiens
acuguacauaaaaugucauuuauauuuuccaa

SEQ ID NO: 15951 - RNA, 32 nt, Homo Sapiens
auaaaaacaauauauuugucauaugcuccuag

SEQ ID NO: 15952 - RNA, 32 nt, Homo Sapiens
cugaagucaggaguucgagaccagccuggcca

SEQ ID NO: 15953 - RNA, 32 nt, Homo Sapiens
cugaggucaggaguucgagaccagccugacca

SEQ ID NO: 15954 - RNA, 32 nt, Homo Sapiens
cugagguuaggaguuugagaccagccugacca

SEQ ID NO: 15955 - RNA, 32 nt, Homo Sapiens
uuuccuuugggguuaaggcugugcagcacguu

SEQ ID NO: 15956 - RNA, 32 nt, Homo Sapiens
aaauuuuaauucaaaucaugucuguaaaacuu

SEQ ID NO: 15957 - RNA, 32 nt, Homo Sapiens
ccauuuacagcuugccugaguggccagcgcgg

SEQ ID NO: 15958 - RNA, 32 nt, Homo Sapiens
uagaaauuuauuauuuaauuguguuggagcuu

SEQ ID NO: 15959 - RNA, 32 nt, Homo Sapiens
uuccuauuuuuguagugaccuguuuaugagau

SEQ ID NO: 15960 - RNA, 32 nt, Homo Sapiens
cugccaguuuccugcguccccggagaggaucc

SEQ ID NO: 15961 - RNA, 32 nt, Homo Sapiens
ucaccgccgggcggcccgcgcggagucugagg

SEQ ID NO: 15962 - RNA, 32 nt, Homo Sapiens
ggagcgcgcgcccgugcugggcggcagcuuua

SEQ ID NO: 15963 - RNA, 32 nt, Homo Sapiens
uuuauauuacaauuacuugcaacuaguuguga

SEQ ID NO: 15964 - RNA, 32 nt, Homo Sapiens
ccauguguucccacacauccacaucaugggaa

SEQ ID NO: 15965 - RNA, 32 nt, Homo Sapiens
caucggagcugcugcaacucccgcagguucuu

SEQ ID NO: 15966 - RNA, 32 nt, Homo Sapiens
aaccagaaauaccauuugauccacaaucccau

SEQ ID NO: 15967 - RNA, 32 nt, Homo Sapiens
caagcagauuggaauuucugcucuucaccgau

SEQ ID NO: 15968 - RNA, 27 nt, Homo Sapiens
uuuuggagauaaaaaauuuaucugcca

SEQ ID NO: 15969 - RNA, 32 nt, Homo Sapiens
gagccuuggcaguggggcaugcuuggaagcca

SEQ ID NO: 15970 - RNA, 32 nt, Homo Sapiens
guuugguaacguaacguuuccaaacauuuugu

SEQ ID NO: 15971 - RNA, 32 nt, Homo Sapiens
aggagcucuaggccgacgcccaccgcaggccu

SEQ ID NO: 15972 - RNA, 32 nt, Homo Sapiens
agggccacaauuugcacuguguucauauuaau

SEQ ID NO: 15973 - RNA, 32 nt, Homo Sapiens
aauauagcauugugugauaagcacuaagcagu

SEQ ID NO: 15974 - RNA, 32 nt, Homo Sapiens
aagcgccauacggggaucugggcccgcguucc

SEQ ID NO: 15975 - RNA, 32 nt, Homo Sapiens
ugccuaaaacaguagcuuuguuuuuagggggu

SEQ ID NO: 15976 - RNA, 32 nt, Homo Sapiens
ucacacguaaagaaacaaaaagcuuaucacua

SEQ ID NO: 15977 - RNA, 32 nt, Homo Sapiens
gccgucagggucucagcuaagcagaaggugcu

SEQ ID NO: 15978 - RNA, 32 nt, Homo Sapiens
uagaauagaaacaguauuuauuuuggagauuu

SEQ ID NO: 15979 - RNA, 32 nt, Homo Sapiens
gggaauagggaaggcaccuugcagaaaauaug

SEQ ID NO: 15980 - RNA, 32 nt, Homo Sapiens
ugccccccgcccagcugggaacccccagaacg

SEQ ID NO: 15981 - RNA, 32 nt, Homo Sapiens
agaaacaugugcaggcacuuuggaaggugcua

SEQ ID NO: 15982 - RNA, 32 nt, Homo Sapiens
ugggggagccccacagggagacuggccucccc

SEQ ID NO: 15983 - RNA, 32 nt, Homo Sapiens
cagcagggccugaggagaaggugcugcugggc

SEQ ID NO: 15984 - RNA, 32 nt, Homo Sapiens
gucucacuggugauuugugcugauucaauucc

SEQ ID NO: 15985 - RNA, 32 nt, Homo Sapiens
uggaauggaagaaaugucgauccuguuguaac

SEQ ID NO: 15986 - RNA, 32 nt, Homo Sapiens
auucugaaauaggaucaggcuuuuacuacaac

SEQ ID NO: 15987 - RNA, 32 nt, Homo Sapiens
cgguggcucuauggacucggccccucuguucc

SEQ ID NO: 15988 - RNA, 32 nt, Homo Sapiens
ccaggugcgacggcgggcccuggggccaauga

SEQ ID NO: 15989 - RNA, 32 nt, Homo Sapiens
augaccagguccacuguggagcagccaucuau

SEQ ID NO: 15990 - RNA, 32 nt, Homo Sapiens
acucaggccuuacuaauccauaccaaauuagc

SEQ ID NO: 15991 - RNA, 32 nt, Homo Sapiens
gcagcuuccaugguuggaaugcugagccauug

SEQ ID NO: 15992 - RNA, 32 nt, Homo Sapiens
cacggugucuuccuucgucuccggguucccga

SEQ ID NO: 15993 - RNA, 32 nt, Homo Sapiens
gauacuuuuguuacuguccuuaauuuuccaua

SEQ ID NO: 15994 - RNA, 32 nt, Homo Sapiens
acaguggggacgcugcugguguccuccaggcc

SEQ ID NO: 15995 - RNA, 32 nt, Homo Sapiens
guguaagcugccaucgucaucaugaacuuuga

SEQ ID NO: 15996 - RNA, 32 nt, Homo Sapiens
auaaauacuguaauagguaauaaaauguaugu

SEQ ID NO: 15997 - RNA, 32 nt, Homo Sapiens
uauuuaaaagagaaagccaaauuuuaauuuug

SEQ ID NO: 15998 - RNA, 32 nt, Homo Sapiens
uaggguccaagccccagcucuuccacuuguua

SEQ ID NO: 15999 - RNA, 32 nt, Homo Sapiens
gacuugcucccggcugucccccggccccagcg

SEQ ID NO: 16000 - RNA, 32 nt, Homo Sapiens
guaggugacacaugagcccagccccagcucac

SEQ ID NO: 16001 - RNA, 32 nt, Homo Sapiens
uggcuggagacgggugggcggcuggagaccau

SEQ ID NO: 16002 - RNA, 32 nt, Homo Sapiens
gaggggucuguuugcuuuuuuaucugguucag

SEQ ID NO: 16003 - RNA, 32 nt, Homo Sapiens
agggccuaggcugauagucagagccuguggca

SEQ ID NO: 16004 - RNA, 32 nt, Homo Sapiens
cagccauuuguccuuucaaacuguauugugau

SEQ ID NO: 16005 - RNA, 32 nt, Homo Sapiens
gaagaagaaaucaugauuccaaggugacauga

SEQ ID NO: 16006 - RNA, 32 nt, Homo Sapiens
ugcccggaguuugcaugagauuuuuucucauc

SEQ ID NO: 16007 - RNA, 32 nt, Homo Sapiens
accaauuuauauuuuuaaagccaguuguugcu

SEQ ID NO: 16008 - RNA, 32 nt, Homo Sapiens
acgggagaacuaaggcugaaaccucggaggaa

SEQ ID NO: 16009 - RNA, 32 nt, Homo Sapiens
uuccguuuauaaacagaaguuuaaaauuauag

SEQ ID NO: 16010 - RNA, 32 nt, Homo Sapiens
aucuuaccaccaccccucccccggccccccga

SEQ ID NO: 16011 - RNA, 32 nt, Homo Sapiens
guuugagagagaaugaggaagcaaagagugag

SEQ ID NO: 16012 - RNA, 32 nt, Homo Sapiens
aucuugacaaauugagauuugcugauggaaga

SEQ ID NO: 16013 - RNA, 32 nt, Homo Sapiens
cagguaggcacagcggcggggaagucacagcu

SEQ ID NO: 16014 - RNA, 31 nt, Homo Sapiens
caggacggcgaggauggacgcacagaccugg

SEQ ID NO: 16015 - RNA, 32 nt, Homo Sapiens
auggcugagauucaagccaccauuccaggccu

SEQ ID NO: 16016 - RNA, 32 nt, Homo Sapiens
ccacugcaugcccggcccccagcccaccuugc

SEQ ID NO: 16017 - RNA, 32 nt, Homo Sapiens
aagguuccgguccugcggacaagccccugcca

SEQ ID NO: 16018 - RNA, 32 nt, Homo Sapiens
cauggcuaucagauauauaaauuuaauguauu

SEQ ID NO: 16019 - RNA, 32 nt, Homo Sapiens
uuugccauuuuugcauuguuucguuuuuaacu

SEQ ID NO: 16020 - RNA, 32 nt, Homo Sapiens
guuuguaaacacaccaaucagcacccuguguc

SEQ ID NO: 16021 - RNA, 32 nt, Homo Sapiens
ccuuauucucaaguagcaaggcaucucgacaa

SEQ ID NO: 16022 - RNA, 32 nt, Homo Sapiens
gggcagccuggaccggcugcugcugcacggga

SEQ ID NO: 16023 - RNA, 32 nt, Homo Sapiens
ccuggaaugcuccuuccaccccuaccucucag

SEQ ID NO: 16024 - RNA, 30 nt, Homo Sapiens
gcuucaccacuuguccauugcguuauuuuc

SEQ ID NO: 16025 - RNA, 32 nt, Homo Sapiens
accuaagacacuuuuccacccuccaccacccc

SEQ ID NO: 16026 - RNA, 32 nt, Homo Sapiens
aauaaugacaauuuaugaauuuguguuucaaa

SEQ ID NO: 16027 - RNA, 32 nt, Homo Sapiens
uguccagucugcuauugaacuauagagaagaa

SEQ ID NO: 16028 - RNA, 32 nt, Homo Sapiens
ucuucuuuuuuuuuuuuuuuuagauggaguuu

SEQ ID NO: 16029 - RNA, 32 nt, Homo Sapiens
accuguaccugggguugcaggggcuccugccc

SEQ ID NO: 16030 - RNA, 32 nt, Homo Sapiens
auaggauugcucauaccagcgcguuaugaacu

SEQ ID NO: 16031 - RNA, 32 nt, Homo Sapiens
gacacauuaaacgauuccaguuggaaacaugu

SEQ ID NO: 16032 - RNA, 32 nt, Homo Sapiens
uuuaaacauccacaaauucuuaaaaagauuga

SEQ ID NO: 16033 - RNA, 31 nt, Homo Sapiens
caggcgccugccaccacauccgguuaauuuu

SEQ ID NO: 16034 - RNA, 32 nt, Homo Sapiens
ugcaggaaacaucaggcaccacagugcaugaa

SEQ ID NO: 16035 - RNA, 29 nt, Homo Sapiens
uauuuuucauaugaaucacagcuguugac

SEQ ID NO: 16036 - RNA, 32 nt, Homo Sapiens
gggccggagaggagcucacugucuguccuuuu

SEQ ID NO: 16037 - RNA, 29 nt, Homo Sapiens
ccuucagcguguuucacaagugaggaaag

SEQ ID NO: 16038 - RNA, 32 nt, Homo Sapiens
cagaucaaacaaugcuuagugaugugugucag

SEQ ID NO: 16039 - RNA, 32 nt, Homo Sapiens
augcaucaacacuuacuuggagcaauuuccua

SEQ ID NO: 16040 - RNA, 32 nt, Homo Sapiens
ugcgagcaucagaagaaacaaacuugggacac

SEQ ID NO: 16041 - RNA, 32 nt, Homo Sapiens
ccccucaucuccacccucccccauaucuguuu

SEQ ID NO: 16042 - RNA, 32 nt, Homo Sapiens
augcugcugggguuggccugaggugggggcca

SEQ ID NO: 16043 - RNA, 32 nt, Homo Sapiens
gggucuugcucuugcccaggcaggaguacagu

SEQ ID NO: 16044 - RNA, 32 nt, Homo Sapiens
uuuaagcauuugcuucuguuuucccuaccuag

SEQ ID NO: 16045 - RNA, 32 nt, Homo Sapiens
ccucuaucaagauuuagucaaguucaguuaga

SEQ ID NO: 16046 - RNA, 32 nt, Homo Sapiens
ggugguaaaaucaauuguuuuugauggaauug

SEQ ID NO: 16047 - RNA, 32 nt, Homo Sapiens
cccaaccgccaaggccugaggaccgccgaggg

SEQ ID NO: 16048 - RNA, 32 nt, Homo Sapiens
accuuuuggacugggcugccacugcuugggca

SEQ ID NO: 16049 - RNA, 32 nt, Homo Sapiens
aaauuuggaaagugcaaauaagcaaaaaugaa

SEQ ID NO: 16050 - RNA, 32 nt, Homo Sapiens
acuagguaaaauguauuaugaugcaauaagug

SEQ ID NO: 16051 - RNA, 32 nt, Homo Sapiens
gcccugagugcugugcugcugcuggucuccug

SEQ ID NO: 16052 - RNA, 32 nt, Homo Sapiens
uggcugcucugucugcugcccccuccccccag

SEQ ID NO: 16053 - RNA, 32 nt, Homo Sapiens
cggcaccgcuccccugugacugcaucccgccu

SEQ ID NO: 16054 - RNA, 32 nt, Homo Sapiens
cagcuccgcccggcuccgccccugcagcccac

SEQ ID NO: 16055 - RNA, 32 nt, Homo Sapiens
aucucucccuggggcugcauguagaagucgag

SEQ ID NO: 16056 - RNA, 32 nt, Homo Sapiens
gccuguccugcacggcucugcugcucgggccc

SEQ ID NO: 16057 - RNA, 32 nt, Homo Sapiens
gcugaggcggguggaucacaaggucaggaguu

SEQ ID NO: 16058 - RNA, 32 nt, Homo Sapiens
uggacaugggucugacacguggagaacucaga

SEQ ID NO: 16059 - RNA, 32 nt, Homo Sapiens
cgacaguacaugcugcugcugcccgagcacgu

SEQ ID NO: 16060 - RNA, 32 nt, Homo Sapiens
auauaaccagaaaccaugacggcggcugagaa

SEQ ID NO: 16061 - RNA, 32 nt, Homo Sapiens
cuucaguguggaauguuaaauaacgcuuuuau

SEQ ID NO: 16062 - RNA, 32 nt, Homo Sapiens
cuuuugcaauaaaacugguuaugacuugaucc

SEQ ID NO: 16063 - RNA, 32 nt, Homo Sapiens
gcagcuggccuggccugcuccaggacuccccu

SEQ ID NO: 16064 - RNA, 32 nt, Homo Sapiens
uccaguuuugggcuguugcaaauaaugcuacu

SEQ ID NO: 16065 - RNA, 32 nt, Homo Sapiens
gcucuccaaggaacuggaccuguccagacagu

SEQ ID NO: 16066 - RNA, 32 nt, Homo Sapiens
cugcuucucuggauccuccccacccccuccug

SEQ ID NO: 16067 - RNA, 32 nt, Homo Sapiens
uacuuccgcuugaccuggcccggacgccagaa

SEQ ID NO: 16068 - RNA, 32 nt, Homo Sapiens
caaccugcuuccauggccguguagaagcaugg

SEQ ID NO: 16069 - RNA, 32 nt, Homo Sapiens
uggcuaggacagccaguauuuauugaauagaa

SEQ ID NO: 16070 - RNA, 32 nt, Homo Sapiens
caggugguggggagccugggcuuuuggggaac

SEQ ID NO: 16071 - RNA, 32 nt, Homo Sapiens
acaacuauugaaauaugaaaugccugugaacu

SEQ ID NO: 16072 - RNA, 32 nt, Homo Sapiens
ggcccuaaaacguuguugugaugagguuucuu

SEQ ID NO: 16073 - RNA, 32 nt, Homo Sapiens
uugagaaauugaccaugaauuaauggacucau

SEQ ID NO: 16074 - RNA, 32 nt, Homo Sapiens
ccuaagggggaagaggagaggguauggggcgg

SEQ ID NO: 16075 - RNA, 32 nt, Homo Sapiens
cugcgcugcaggagggcgggggcucugguugu

SEQ ID NO: 16076 - RNA, 32 nt, Homo Sapiens
ggcagggggagccccugucggcagcuuuccug

SEQ ID NO: 16077 - RNA, 32 nt, Homo Sapiens
cccccuuucuugaccuccuccuccuucaagcu

SEQ ID NO: 16078 - RNA, 32 nt, Homo Sapiens
ucaaaacguuugggggcuuccaaguuguuugu

SEQ ID NO: 16079 - RNA, 32 nt, Homo Sapiens
cagagaggcagacgugagcugagggcgcagag

SEQ ID NO: 16080 - RNA, 32 nt, Homo Sapiens
gacaacaaaaauacauacgaagaaaacuucuc

SEQ ID NO: 16081 - RNA, 32 nt, Homo Sapiens
cggccaucuccauggugccaauuaccagcaag

SEQ ID NO: 16082 - RNA, 32 nt, Homo Sapiens
ggagcucgcccaagccgcguccccagagagcg

SEQ ID NO: 16083 - RNA, 32 nt, Homo Sapiens
ugaauaaaacaaacaauguacgcaauguuaau

SEQ ID NO: 16084 - RNA, 32 nt, Homo Sapiens
aaguagcccagccaggcccccaaauacgguca

SEQ ID NO: 16085 - RNA, 32 nt, Homo Sapiens
gguuuugccauauuggccaggcuggucucgaa

SEQ ID NO: 16086 - RNA, 29 nt, Homo Sapiens
ggcgauggacgccccaaaagcaggauacg

SEQ ID NO: 16087 - RNA, 32 nt, Homo Sapiens
cauagucugaauauaccacaauuuaaaaauuc

SEQ ID NO: 16088 - RNA, 32 nt, Homo Sapiens
ggccuacauuuuauuuuuuguuauuuugugag

SEQ ID NO: 16089 - RNA, 32 nt, Homo Sapiens
gaacugugagucaauuaaacuucuuucuuuua

SEQ ID NO: 16090 - RNA, 32 nt, Homo Sapiens
cgggcgguauucgcggacuccggcggcccugg

SEQ ID NO: 16091 - RNA, 32 nt, Homo Sapiens
aacauaaaugaguuaaaacccacaaaaauaag

SEQ ID NO: 16092 - RNA, 32 nt, Homo Sapiens
gcagagugcaggucauuuaucuucaggcuuug

SEQ ID NO: 16093 - RNA, 32 nt, Homo Sapiens
cggaaagcacaccucauucagcaucagaggcc

SEQ ID NO: 16094 - RNA, 32 nt, Homo Sapiens
aggcaggcggugcugaggagggggcaggguug

SEQ ID NO: 16095 - RNA, 32 nt, Homo Sapiens
aaagaggacuccuccucauucccuuuaacaug

SEQ ID NO: 16096 - RNA, 32 nt, Homo Sapiens
cacaagcuggagauaaauuuggugaacauaau

SEQ ID NO: 16097 - RNA, 32 nt, Homo Sapiens
uaggaagagaugucagcucugcucucccugua

SEQ ID NO: 16098 - RNA, 32 nt, Homo Sapiens
aaaucauguacauuacagauauuaucuaaauu

SEQ ID NO: 16099 - RNA, 32 nt, Homo Sapiens
gcuugccacccccuccucucccuucacccaga

SEQ ID NO: 16100 - RNA, 32 nt, Homo Sapiens
agccuuggugccugugagcucaucucccagga

SEQ ID NO: 16101 - RNA, 32 nt, Homo Sapiens
aacagcugagugcggcggggguggugucacug

SEQ ID NO: 16102 - RNA, 32 nt, Homo Sapiens
uuguaauuuuucuguacgauaguuuugauaau

SEQ ID NO: 16103 - RNA, 32 nt, Homo Sapiens
gacaagagggugggguggggaggggcguucuc

SEQ ID NO: 16104 - RNA, 32 nt, Homo Sapiens
ccgucccaaaaaaacaaacaaacaaaacaaaa

SEQ ID NO: 16105 - RNA, 32 nt, Homo Sapiens
ccgcagcuccagggcucuuccuccucaccaga

SEQ ID NO: 16106 - RNA, 32 nt, Homo Sapiens
guaagagacggagaggcgcagagugagggcgg

SEQ ID NO: 16107 - RNA, 32 nt, Homo Sapiens
uggcaaggcuuucuugagccccgccccuuucu

SEQ ID NO: 16108 - RNA, 32 nt, Homo Sapiens
uccagaauucauaugcugaagccucuguccac

SEQ ID NO: 16109 - RNA, 32 nt, Homo Sapiens
cugggccgccgggcaccgagcgucggggggcu

SEQ ID NO: 16110 - RNA, 32 nt, Homo Sapiens
agaugauaaaauggaauuuuugcauuauuaaa

SEQ ID NO: 16111 - RNA, 32 nt, Homo Sapiens
ucucuuaggucauuuuucaauguguguaacca

SEQ ID NO: 16112 - RNA, 32 nt, Homo Sapiens
guacagggcagcaacccagagcccaugggccc

SEQ ID NO: 16113 - RNA, 32 nt, Homo Sapiens
cuugacuauuguuuuuccuuucuggcgcauga

SEQ ID NO: 16114 - RNA, 32 nt, Homo Sapiens
cucaaagaugcucaugaagaagaaauucaaca

SEQ ID NO: 16115 - RNA, 32 nt, Homo Sapiens
gaggggcuugggugcgaguccaggcaaggcag

SEQ ID NO: 16116 - RNA, 32 nt, Homo Sapiens
acuuguaaaaagacauuuaagagauaauuuuu

SEQ ID NO: 16117 - RNA, 32 nt, Homo Sapiens
acuugcaccuuauaguucauagcaauuaacug

SEQ ID NO: 16118 - RNA, 32 nt, Homo Sapiens
aagcgccucacgaagacguccagguguggccc

SEQ ID NO: 16119 - RNA, 32 nt, Homo Sapiens
gauauuugaguugcuuccuuucugggguaaua

SEQ ID NO: 16120 - RNA, 32 nt, Homo Sapiens
aacuuugaacuugagggagaugauuuugggua

SEQ ID NO: 16121 - RNA, 30 nt, Homo Sapiens
aagugugucugugggaggcaggagaugcuc

SEQ ID NO: 16122 - RNA, 32 nt, Homo Sapiens
aauugccaauacuguccuugcaucucugaguc

SEQ ID NO: 16123 - RNA, 32 nt, Homo Sapiens
augcuuacagaaaauauagccaugauugaaau

SEQ ID NO: 16124 - RNA, 32 nt, Homo Sapiens
guuuccucauuugguaaauggggauaauggua

SEQ ID NO: 16125 - RNA, 30 nt, Homo Sapiens
uuggguuuggggaggggggaaaagaggggc

SEQ ID NO: 16126 - RNA, 32 nt, Homo Sapiens
uuuucaguguucuuuuuuuaaauuguagauuu

SEQ ID NO: 16127 - RNA, 32 nt, Homo Sapiens
gacuugccuggagauuugagagaagauuccuu

SEQ ID NO: 16128 - RNA, 32 nt, Homo Sapiens
cauauagcauguauucuguaaauauuaucugu

SEQ ID NO: 16129 - RNA, 32 nt, Homo Sapiens
aucaaagcgggaagaaaaucagagggaagguu

SEQ ID NO: 16130 - RNA, 32 nt, Homo Sapiens
gagauaacagagcugcaaagaaacauugccua

SEQ ID NO: 16131 - RNA, 32 nt, Homo Sapiens
agcagucucuugaucuggcccggcaccccaug

SEQ ID NO: 16132 - RNA, 32 nt, Homo Sapiens
ucuugugagaaauguuuugaaugugugacaau

SEQ ID NO: 16133 - RNA, 32 nt, Homo Sapiens
caagagauuauuaagaucuuugcuagaagagu

SEQ ID NO: 16134 - RNA, 31 nt, Homo Sapiens
gauggggcaaccgagacacaggcaagggaau

SEQ ID NO: 16135 - RNA, 32 nt, Homo Sapiens
uccauuuaccuacuuucuuuuacuugcuuuga

SEQ ID NO: 16136 - RNA, 32 nt, Homo Sapiens
caaacggguaagguaagccaagguuuuaauga

SEQ ID NO: 16137 - RNA, 32 nt, Homo Sapiens
agcuaagggcuuuucauacacaggacaacucc

SEQ ID NO: 16138 - RNA, 32 nt, Homo Sapiens
gaaaugcauugacaccaaaggaaguggugaaa

SEQ ID NO: 16139 - RNA, 32 nt, Homo Sapiens
cuugccaaacaaaaugcugaaaccaaaaaucu

SEQ ID NO: 16140 - RNA, 32 nt, Homo Sapiens
accgugcccagcacccgaagugccaaauucca

SEQ ID NO: 16141 - RNA, 32 nt, Homo Sapiens
uuguuuccccacggucuggcuucugcagggga

SEQ ID NO: 16142 - RNA, 32 nt, Homo Sapiens
uuacuuuagagguaguuagauaucuccauaua

SEQ ID NO: 16143 - RNA, 29 nt, Homo Sapiens
aacaccaauaucuaauaccacagugggaa

SEQ ID NO: 16144 - RNA, 32 nt, Homo Sapiens
acagauuugacccaagcuauuuauauguuaua

SEQ ID NO: 16145 - RNA, 32 nt, Homo Sapiens
gcccgccgcgauggaggccgccgcccaguucu

SEQ ID NO: 16146 - RNA, 32 nt, Homo Sapiens
gacagagucugcuuagaagagauacaaguugu

SEQ ID NO: 16147 - RNA, 32 nt, Homo Sapiens
acugucagucaagcuuguccaaugcaugcagc

SEQ ID NO: 16148 - RNA, 32 nt, Homo Sapiens
caugguuguuaugauuagaaauccgaggccac

SEQ ID NO: 16149 - RNA, 32 nt, Homo Sapiens
ccggcucaggcacucgggaacacacacaugaa

SEQ ID NO: 16150 - RNA, 32 nt, Homo Sapiens
uguagccuguauuaaugugaaauauuuaccag

SEQ ID NO: 16151 - RNA, 32 nt, Homo Sapiens
cgcccggggcugcgcgguuugcaccgccaggc

SEQ ID NO: 16152 - RNA, 32 nt, Homo Sapiens
cggacuccgcaucccgcaccccgaugguagcc

SEQ ID NO: 16153 - RNA, 32 nt, Homo Sapiens
uuaagcugcuggaagccucaugccacccugca

SEQ ID NO: 16154 - RNA, 29 nt, Homo Sapiens
gcaaagaggaaaauggccauuaccaccca

SEQ ID NO: 16155 - RNA, 31 nt, Homo Sapiens
cugcccagcgccugccugcccggggugugca

SEQ ID NO: 16156 - RNA, 32 nt, Homo Sapiens
cacuauaggucauacaauccauucuuaaagua

SEQ ID NO: 16157 - RNA, 32 nt, Homo Sapiens
ggaaagggcuuugaauuccccagauacugaac

SEQ ID NO: 16158 - RNA, 32 nt, Homo Sapiens
gacaggaugcgacgucaacgggagcgcagggc

SEQ ID NO: 16159 - RNA, 32 nt, Homo Sapiens
ucccgcacccagcaugcagcucugccuccgca

SEQ ID NO: 16160 - RNA, 32 nt, Homo Sapiens
aucaucaaggagcucaaacaaaaaagaaguca

SEQ ID NO: 16161 - RNA, 32 nt, Homo Sapiens
uuuugguuaaagaaaaagaaaauaucaauaau

SEQ ID NO: 16162 - RNA, 32 nt, Homo Sapiens
aacccagugaaucuugggggccaggcacugug

SEQ ID NO: 16163 - RNA, 32 nt, Homo Sapiens
gccugagccggggcuccagggggcuucgaagc

SEQ ID NO: 16164 - RNA, 32 nt, Homo Sapiens
gaaacccgacagagggaagaaaagagcuuucu

SEQ ID NO: 16165 - RNA, 32 nt, Homo Sapiens
gcaauauuuaggaugcaacacgcauggucacc

SEQ ID NO: 16166 - RNA, 30 nt, Homo Sapiens
cuguguuuaacugcugcagggucuuuuucu

SEQ ID NO: 16167 - RNA, 32 nt, Homo Sapiens
gugugucgugcuuuuuaccaucgguuugacuu

SEQ ID NO: 16168 - RNA, 32 nt, Homo Sapiens
gaagccuucugagacccuccccaacccaccca

SEQ ID NO: 16169 - RNA, 32 nt, Homo Sapiens
aaauaccuuaaaauagcaaauaaaauaagaua

SEQ ID NO: 16170 - RNA, 32 nt, Homo Sapiens
guuugauauaacaugcauccuugggcagguug

SEQ ID NO: 16171 - RNA, 32 nt, Homo Sapiens
uuaauuugacuggguuaacaugcaaaaaccaa

SEQ ID NO: 16172 - RNA, 32 nt, Homo Sapiens
auaaaaaggcaaucacauaaaaaagaguuuag

SEQ ID NO: 16173 - RNA, 32 nt, Homo Sapiens
ggaaguaaaaacagaaaggaaaagaaauuacc

SEQ ID NO: 16174 - RNA, 32 nt, Homo Sapiens
acucuuuugacuggugccauuagacaucuuga

SEQ ID NO: 16175 - RNA, 32 nt, Homo Sapiens
gugaacuuguaauaaauuggaauuucaaauaa

SEQ ID NO: 16176 - RNA, 32 nt, Homo Sapiens
uccacagaacuaacuggacuucuggcggcaag

SEQ ID NO: 16177 - RNA, 32 nt, Homo Sapiens
ccccauauuccaucaccuuccuccucugcucu

SEQ ID NO: 16178 - RNA, 32 nt, Homo Sapiens
cugugaccccgugaccccggaaguggucuggg

SEQ ID NO: 16179 - RNA, 32 nt, Homo Sapiens
ugcuuguuuuguuuuucuuuuuuaauuagaua

SEQ ID NO: 16180 - RNA, 32 nt, Homo Sapiens
ccggccgcccgcgcgccacugugcaguggagu

SEQ ID NO: 16181 - RNA, 32 nt, Homo Sapiens
gaacccugagcacuuuuuuacaauuggcucug

SEQ ID NO: 16182 - RNA, 32 nt, Homo Sapiens
gugauaggacuaaguucucauuguucaaauag

SEQ ID NO: 16183 - RNA, 32 nt, Homo Sapiens
gagauggaagggcuacugugcagcuuuugaug

SEQ ID NO: 16184 - RNA, 32 nt, Homo Sapiens
gaugaagaaaucaaaaguaggaaacaugaugu

SEQ ID NO: 16185 - RNA, 32 nt, Homo Sapiens
cauuuauaugacagaagcugggcaugauuggg

SEQ ID NO: 16186 - RNA, 32 nt, Homo Sapiens
agacccugccccacccaccgaggaagacaugu

SEQ ID NO: 16187 - RNA, 32 nt, Homo Sapiens
ccccaaacucaggcugccccgagugggcuuca

SEQ ID NO: 16188 - RNA, 32 nt, Homo Sapiens
ucgccccggcccggggauccguuggggccgcg

SEQ ID NO: 16189 - RNA, 32 nt, Homo Sapiens
gcuaggagccccagcuuccuguguuuuuaaua

SEQ ID NO: 16190 - RNA, 32 nt, Homo Sapiens
agggggaggagaaggggcaguugugacagcug

SEQ ID NO: 16191 - RNA, 32 nt, Homo Sapiens
gccgcuggggagagcaagcggcccgcggcguc

SEQ ID NO: 16192 - RNA, 32 nt, Homo Sapiens
aggcuaugccccacccucuuuguauuaaaagc

SEQ ID NO: 16193 - RNA, 32 nt, Homo Sapiens
agagaacaccuuuaucaaaggcaaauugcugu

SEQ ID NO: 16194 - RNA, 32 nt, Homo Sapiens
gaugauaaguucaaaucagcuguaauuuuucu

SEQ ID NO: 16195 - RNA, 32 nt, Homo Sapiens
aguuccauguuucuuuucuaaucuucaaaugg

SEQ ID NO: 16196 - RNA, 32 nt, Homo Sapiens
auauuacaaauuuugggaaaucuuagaauaaa

SEQ ID NO: 16197 - RNA, 32 nt, Homo Sapiens
guuguguguuuaaccuuuauuaacuaacguua

SEQ ID NO: 16198 - RNA, 32 nt, Homo Sapiens
ccccuuuguaaaauugaguuugaguucuuuaa

SEQ ID NO: 16199 - RNA, 32 nt, Homo Sapiens
uugucacuuaugccacuguggaggagguggau

SEQ ID NO: 16200 - RNA, 32 nt, Homo Sapiens
agcugggaggguggaggugugggagcugaugg

SEQ ID NO: 16201 - RNA, 32 nt, Homo Sapiens
auacugugccuggccuggggaccaggugcauu

SEQ ID NO: 16202 - RNA, 32 nt, Homo Sapiens
gaauauuugauagaaccaauuguuguacauaa

SEQ ID NO: 16203 - RNA, 32 nt, Homo Sapiens
aauauucaagaugucaaaacucaaaguauuuc

SEQ ID NO: 16204 - RNA, 30 nt, Homo Sapiens
cggcgcggcaggcgcagggguccucgccaa

SEQ ID NO: 16205 - RNA, 32 nt, Homo Sapiens
ucugugcccagucagcacuuugugagugcuug

SEQ ID NO: 16206 - RNA, 32 nt, Homo Sapiens
uuguagucaccauagugauagcccauaaauaa

SEQ ID NO: 16207 - RNA, 32 nt, Homo Sapiens
guuuaccauggaacccgugaccaaguggagcc

SEQ ID NO: 16208 - RNA, 32 nt, Homo Sapiens
ggcucccugccagccuggccuccuccucuggg

SEQ ID NO: 16209 - RNA, 32 nt, Homo Sapiens
ccccuucccucauucuuugccucuauccuuag

SEQ ID NO: 16210 - RNA, 32 nt, Homo Sapiens
ggggccuacgacgcgccaccccccguacgaca

SEQ ID NO: 16211 - RNA, 32 nt, Homo Sapiens
guagaguuuuauagguagauagauaacuuugg

SEQ ID NO: 16212 - RNA, 32 nt, Homo Sapiens
uggugacuggcaggcccgggccccacgguacc

SEQ ID NO: 16213 - RNA, 32 nt, Homo Sapiens
ccucauauuaaacuauuacuucucaugacguc

SEQ ID NO: 16214 - RNA, 32 nt, Homo Sapiens
ggcagcgggcggcgggcuccgcgcagccgucu

SEQ ID NO: 16215 - RNA, 32 nt, Homo Sapiens
auuuuuuucuuuucuuuuuuucuggaaauauu

SEQ ID NO: 16216 - RNA, 32 nt, Homo Sapiens
ugcgggccucccugcuggcuacugaugccagu

SEQ ID NO: 16217 - RNA, 32 nt, Homo Sapiens
gauacagauaugugaacuucaauauaaaguug

SEQ ID NO: 16218 - RNA, 32 nt, Homo Sapiens
gcacgaggccucgugccggcggcccaggcacg

SEQ ID NO: 16219 - RNA, 32 nt, Homo Sapiens
gguguguguuggcgcgcuaagugccacaugcu

SEQ ID NO: 16220 - RNA, 32 nt, Homo Sapiens
ucgagcccuccgcuccuaugcgcucugcacuc

SEQ ID NO: 16221 - RNA, 32 nt, Homo Sapiens
ugcgcugggggccggggcgcgucgcaggaaag

SEQ ID NO: 16222 - RNA, 32 nt, Homo Sapiens
cagcuaguuggcgggggugcuggacuggacuc

SEQ ID NO: 16223 - RNA, 32 nt, Homo Sapiens
cuaugaucuugccauugcacuccagcugagag

SEQ ID NO: 16224 - RNA, 32 nt, Homo Sapiens
auaggccaguguucuaauaugagaaaaguuua

SEQ ID NO: 16225 - RNA, 32 nt, Homo Sapiens
auuugcccugucacaccaucccauaauguccu

SEQ ID NO: 16226 - RNA, 32 nt, Homo Sapiens
gguacugugccuugccuauuguaggugcccaa

SEQ ID NO: 16227 - RNA, 32 nt, Homo Sapiens
accuauaaauuaauguaauacugugugaauuc

SEQ ID NO: 16228 - RNA, 32 nt, Homo Sapiens
auuauugacaacaccaugacguuaugcugaca

SEQ ID NO: 16229 - RNA, 32 nt, Homo Sapiens
ugaaagacaaggaaaaagcacauuaaagaaau

SEQ ID NO: 16230 - RNA, 32 nt, Homo Sapiens
cuuagagccaccagcccugucccaggccagga

SEQ ID NO: 16231 - RNA, 32 nt, Homo Sapiens
ugcagcuccaagaugcaauuauagaaacagcu

SEQ ID NO: 16232 - RNA, 32 nt, Homo Sapiens
ccaccgagaccacccuuaaacaucaguagacu

SEQ ID NO: 16233 - RNA, 32 nt, Homo Sapiens
auguaagcacuauccagguaaaacacuggccc

SEQ ID NO: 16234 - RNA, 32 nt, Homo Sapiens
caauuaugaaaauuauauuaaaucugggauua

SEQ ID NO: 16235 - RNA, 32 nt, Homo Sapiens
uuaauuugagauaauuuguuaaaggcaaguau

SEQ ID NO: 16236 - RNA, 32 nt, Homo Sapiens
ucacagggccgcgucgccacggcuccucugau

SEQ ID NO: 16237 - RNA, 32 nt, Homo Sapiens
auugaauguuuccauguaccucacuuuauuuc

SEQ ID NO: 16238 - RNA, 28 nt, Homo Sapiens
gaaauguggggauccaggauggcuuccu

SEQ ID NO: 16239 - RNA, 32 nt, Homo Sapiens
agacacaggccgugggacccaggcucccagcc

SEQ ID NO: 16240 - RNA, 32 nt, Homo Sapiens
cuggaggcacagcugggcgaguuucaucuccg

SEQ ID NO: 16241 - RNA, 32 nt, Homo Sapiens
gccgccuccugccgaucgcccggggcugcgag

SEQ ID NO: 16242 - RNA, 32 nt, Homo Sapiens
uaucuauauaucuauauagcuauauauuugug

SEQ ID NO: 16243 - RNA, 32 nt, Homo Sapiens
acgugacugcguugugugaacaaucugcaauu

SEQ ID NO: 16244 - RNA, 32 nt, Homo Sapiens
uuuucggauucuccgagaagggguggagaaac

SEQ ID NO: 16245 - RNA, 32 nt, Homo Sapiens
augugguagacagaggggggaguacagaaggu

SEQ ID NO: 16246 - RNA, 32 nt, Homo Sapiens
agaggagaccagcagcagcacuugauuuagcu

SEQ ID NO: 16247 - RNA, 32 nt, Homo Sapiens
auuucccacauauauauuacauauacccgcua

SEQ ID NO: 16248 - RNA, 32 nt, Homo Sapiens
ggcccugaaacuuuucaaauguuuauaaaaga

SEQ ID NO: 16249 - RNA, 32 nt, Homo Sapiens
gggucgucaggagguggagguugcagugagcc

SEQ ID NO: 16250 - RNA, 30 nt, Homo Sapiens
acucguuugauguggggggaaaaagaaugg

SEQ ID NO: 16251 - RNA, 32 nt, Homo Sapiens
aguaccuggagauuuacccagcacucugagau

SEQ ID NO: 16252 - RNA, 32 nt, Homo Sapiens
agauuacaggauuaauauauugaacaccuuca

SEQ ID NO: 16253 - RNA, 30 nt, Homo Sapiens
gaaugucaguaaauaaaagagcuuucaucc

SEQ ID NO: 16254 - RNA, 32 nt, Homo Sapiens
ucuucccuccaccuccuccccuccuuagcagc

SEQ ID NO: 16255 - RNA, 32 nt, Homo Sapiens
aaaaaugucuucugcaaauuuucuaguauaac

SEQ ID NO: 16256 - RNA, 32 nt, Homo Sapiens
aaaaacugccuuccccagggugucucauauga

SEQ ID NO: 16257 - RNA, 32 nt, Homo Sapiens
ggccuugccccacgccuucucuguggaccauu

SEQ ID NO: 16258 - RNA, 32 nt, Homo Sapiens
uacuaaguauaaauauuauggacuuuguuaaa

SEQ ID NO: 16259 - RNA, 32 nt, Homo Sapiens
cagugagcccagauugcaccacuacacuccag

SEQ ID NO: 16260 - RNA, 32 nt, Homo Sapiens
augauccccgacagcaaaauguuuccuuucug

SEQ ID NO: 16261 - RNA, 32 nt, Homo Sapiens
gacagccgcccucuccuccaggcccguggggc

SEQ ID NO: 16262 - RNA, 32 nt, Homo Sapiens
ccauauugccagcaagagccccugcauguugg

SEQ ID NO: 16263 - RNA, 32 nt, Homo Sapiens
gcaacaacugucaguucauccugcaugggaaa

SEQ ID NO: 16264 - RNA, 32 nt, Homo Sapiens
ugaguuggggucuuuagucucuucuuauuggg

SEQ ID NO: 16265 - RNA, 32 nt, Homo Sapiens
cccagucggcccggcccgggggccauggagcu

SEQ ID NO: 16266 - RNA, 32 nt, Homo Sapiens
acgugccaggcccggggcuggcggcuacucag

SEQ ID NO: 16267 - RNA, 32 nt, Homo Sapiens
cucuuggcugcaucuccucccugcccccaccc

SEQ ID NO: 16268 - RNA, 32 nt, Homo Sapiens
uggcucuucucagcuuuuuuuguacauauuuu

SEQ ID NO: 16269 - RNA, 32 nt, Homo Sapiens
agaagcacauaauaaugacuuuguaagcuuaa

SEQ ID NO: 16270 - RNA, 32 nt, Homo Sapiens
gggagggaaugggagagaaagcugagauuuca

SEQ ID NO: 16271 - RNA, 32 nt, Homo Sapiens
agcguggagcccacagccugguucugggccag

SEQ ID NO: 16272 - RNA, 32 nt, Homo Sapiens
cuagauggaagacuugcaucaguugcuuaaac

SEQ ID NO: 16273 - RNA, 32 nt, Homo Sapiens
aacaccuccgcggaacacucagcuuucuccag

SEQ ID NO: 16274 - RNA, 32 nt, Homo Sapiens
uguucugggaggugcugggcugggccacagcc

SEQ ID NO: 16275 - RNA, 32 nt, Homo Sapiens
uccuauggcagagcauucagaaugucaaugag

SEQ ID NO: 16276 - RNA, 32 nt, Homo Sapiens
cccgccaguucuuuuccggauucuguagaaaa

SEQ ID NO: 16277 - RNA, 32 nt, Homo Sapiens
uaaaacaaaaauaccgaagccauuuuacugaa

SEQ ID NO: 16278 - RNA, 32 nt, Homo Sapiens
gugccagacugucuccucugcuccucccaccu

SEQ ID NO: 16279 - RNA, 32 nt, Homo Sapiens
cuuguuacaggugcuuccugcugaaagaagcc

SEQ ID NO: 16280 - RNA, 32 nt, Homo Sapiens
caacuauuuuuccaaaauaauuuuaagaaauc

SEQ ID NO: 16281 - RNA, 32 nt, Homo Sapiens
aguuucuaccccacccuuccuaggaacucuac

SEQ ID NO: 16282 - RNA, 32 nt, Homo Sapiens
uuggccaugagcaggguuagugugaaaccaau

SEQ ID NO: 16283 - RNA, 32 nt, Homo Sapiens
agaaaacacuugaaaaucuggaauaauuagaa

SEQ ID NO: 16284 - RNA, 32 nt, Homo Sapiens
uuuggaauucuauuuaaaaaauagaugaucaa

SEQ ID NO: 16285 - RNA, 32 nt, Homo Sapiens
ugagggggugacggguuaagauucggagagag

SEQ ID NO: 16286 - RNA, 32 nt, Homo Sapiens
aaucuggagcaacuuaaaaaaucuuucaguag

SEQ ID NO: 16287 - RNA, 32 nt, Homo Sapiens
uuguacauaucuaguuguaaaacaaguuuuag

SEQ ID NO: 16288 - RNA, 32 nt, Homo Sapiens
cgcccuccggcucugauucugugcagcuggcu

SEQ ID NO: 16289 - RNA, 32 nt, Homo Sapiens
auuaugagcauuuuaauaaauucauuuuuaca

SEQ ID NO: 16290 - RNA, 31 nt, Homo Sapiens
uccccugggccgcugaggccccgcgcaccug

SEQ ID NO: 16291 - RNA, 32 nt, Homo Sapiens
gagaacggcagcggcgagggcuccacgugcag

SEQ ID NO: 16292 - RNA, 32 nt, Homo Sapiens
uccagcccucgcccggcccccaccccagcugc

SEQ ID NO: 16293 - RNA, 32 nt, Homo Sapiens
ccuauaccaaaauauauuuuuaaaagaagcau

SEQ ID NO: 16294 - RNA, 32 nt, Homo Sapiens
ccucucuucgcgcagagcccaggcccaggguc

SEQ ID NO: 16295 - RNA, 32 nt, Homo Sapiens
aaauguuaguggccauuuugcaacaaugaaga

SEQ ID NO: 16296 - RNA, 32 nt, Homo Sapiens
gcaagccaggauggauauuuacgacacucaaa

SEQ ID NO: 16297 - RNA, 32 nt, Homo Sapiens
ccucagcugcccggggcccgggugcuggugga

SEQ ID NO: 16298 - RNA, 32 nt, Homo Sapiens
uccauguuucugcccaggauccuaggccgcug

SEQ ID NO: 16299 - RNA, 32 nt, Homo Sapiens
gcacuuuuguucauauuuuuuggagugaugua

SEQ ID NO: 16300 - RNA, 32 nt, Homo Sapiens
aggauggguuggggagcggggagucgcggcuu

SEQ ID NO: 16301 - RNA, 30 nt, Homo Sapiens
acaggguuucaccguguuagccaggauggu

SEQ ID NO: 16302 - RNA, 32 nt, Homo Sapiens
caggggacggcgcgucgcggcggccgccagga

SEQ ID NO: 16303 - RNA, 32 nt, Homo Sapiens
acaccguguuuguguucuaguguuuugugaaa

SEQ ID NO: 16304 - RNA, 32 nt, Homo Sapiens
uucugaauuacuuugaagaaaaaugugauuga

SEQ ID NO: 16305 - RNA, 32 nt, Homo Sapiens
ucagggcugcgcacuucccuguccacgguccc

SEQ ID NO: 16306 - RNA, 32 nt, Homo Sapiens
guguccauccuccauggcacagcccuccugcu

SEQ ID NO: 16307 - RNA, 32 nt, Homo Sapiens
gucaguggccccaggauacucuggcaagacuu

SEQ ID NO: 16308 - RNA, 32 nt, Homo Sapiens
ugguuuuuuuuuucuuuuuugccaaauugacu

SEQ ID NO: 16309 - RNA, 32 nt, Homo Sapiens
cuaugauacuuauuauagaacacaguggaucc

SEQ ID NO: 16310 - RNA, 32 nt, Homo Sapiens
gcuccuuuuaucgguaaagauucucaauccaa

SEQ ID NO: 16311 - RNA, 32 nt, Homo Sapiens
gggcuggaaagaagggggagccaggcauucau

SEQ ID NO: 16312 - RNA, 32 nt, Homo Sapiens
uguugauccuggaugugucugugaggguguug

SEQ ID NO: 16313 - RNA, 32 nt, Homo Sapiens
aaccaguucagaguggacuacauccugagugu

SEQ ID NO: 16314 - RNA, 32 nt, Homo Sapiens
ggccauuuaagcucuuuguacagugucaauuu

SEQ ID NO: 16315 - RNA, 32 nt, Homo Sapiens
agcacgguuccuccucuccccagccugggaag

SEQ ID NO: 16316 - RNA, 32 nt, Homo Sapiens
gcuacucccgcccugccugcccggccccaccg

SEQ ID NO: 16317 - RNA, 32 nt, Homo Sapiens
agauauuucaaacagaucuuugaaaccucaga

SEQ ID NO: 16318 - RNA, 32 nt, Homo Sapiens
augacuggacacaagaguggagcccaguccca

SEQ ID NO: 16319 - RNA, 32 nt, Homo Sapiens
cagucucagcagccuccugauuucauaaccag

SEQ ID NO: 16320 - RNA, 32 nt, Homo Sapiens
ggagguggggguagggggcacagaacaccaga

SEQ ID NO: 16321 - RNA, 32 nt, Homo Sapiens
cauccucauuacagaugacacacuggagugug

SEQ ID NO: 16322 - RNA, 32 nt, Homo Sapiens
gguccaggucaccagccugacugcacacagcu

SEQ ID NO: 16323 - RNA, 32 nt, Homo Sapiens
gugucccugccuggaggacgcccucagccuag

SEQ ID NO: 16324 - RNA, 32 nt, Homo Sapiens
acuauucaauaagacauuuaaauacacaauca

SEQ ID NO: 16325 - RNA, 32 nt, Homo Sapiens
aaagugccuuuuuauagagacauugacggaaa

SEQ ID NO: 16326 - RNA, 32 nt, Homo Sapiens
cuugcuguuuuuccucuuuaugacaaagaaua

SEQ ID NO: 16327 - RNA, 32 nt, Homo Sapiens
cagccucauuuuacugcaagagagaaugaggc

SEQ ID NO: 16328 - RNA, 32 nt, Homo Sapiens
uuaacaugucauuguucaucuauuaaaucuug

SEQ ID NO: 16329 - RNA, 32 nt, Homo Sapiens
cugugaucucgucuagagaaaauguauucaua

SEQ ID NO: 16330 - RNA, 32 nt, Homo Sapiens
auggaaagaaauuuauaugaaaauuuaucuga

SEQ ID NO: 16331 - RNA, 32 nt, Homo Sapiens
ugcuugauguuguagaaacugggacauauaga

SEQ ID NO: 16332 - RNA, 32 nt, Homo Sapiens
cccagcugccguuaaccuuuucaccaggugcc

SEQ ID NO: 16333 - RNA, 32 nt, Homo Sapiens
ggcaagccagcauguguguccacacauacaua

SEQ ID NO: 16334 - RNA, 32 nt, Homo Sapiens
aaaucuugcauaagcugaacuaaaauaaaaau

SEQ ID NO: 16335 - RNA, 32 nt, Homo Sapiens
guuuauugacuucugaguuauauaguucaugc

SEQ ID NO: 16336 - RNA, 32 nt, Homo Sapiens
caccccugcccccugguucaccagagggagcg

SEQ ID NO: 16337 - RNA, 32 nt, Homo Sapiens
uaaggccaaucuggcccucccugugugacccg

SEQ ID NO: 16338 - RNA, 32 nt, Homo Sapiens
uaaaagagaacaauucguuuacaauuacaaga

SEQ ID NO: 16339 - RNA, 32 nt, Homo Sapiens
guggcggccacacaggguguuguggagauggg

SEQ ID NO: 16340 - RNA, 32 nt, Homo Sapiens
ugcguagccccggccauggcucuguagccucg

SEQ ID NO: 16341 - RNA, 32 nt, Homo Sapiens
ucuuccuuuguugcacaaauagaguuuggaaa

SEQ ID NO: 16342 - RNA, 32 nt, Homo Sapiens
caguguuugaggacagaagaaacuaggacugu

SEQ ID NO: 16343 - RNA, 32 nt, Homo Sapiens
uuggaucauaugaguuauuuugugaaacaaca

SEQ ID NO: 16344 - RNA, 32 nt, Homo Sapiens
cuccuuuugugguauaagcaaacuacauggac

SEQ ID NO: 16345 - RNA, 32 nt, Homo Sapiens
ugaugguugcugugggacccacuggacacaug

SEQ ID NO: 16346 - RNA, 30 nt, Homo Sapiens
ccccgugggggcgaugcggacagcgcggga

SEQ ID NO: 16347 - RNA, 32 nt, Homo Sapiens
cacuguggcguucccagugcccggggaaaggg

SEQ ID NO: 16348 - RNA, 32 nt, Homo Sapiens
ugcagauuuguagggcacuuggauuaggguuc

SEQ ID NO: 16349 - RNA, 32 nt, Homo Sapiens
ucgccucgcacccccagccaguccgucgaucc

SEQ ID NO: 16350 - RNA, 32 nt, Homo Sapiens
ucccugcacggugcguccugcuggucuggcuu

SEQ ID NO: 16351 - RNA, 32 nt, Homo Sapiens
cagaagaggacgccuccacccacaggaaggag

SEQ ID NO: 16352 - RNA, 32 nt, Homo Sapiens
ggggcaacacugggcuucugggcacagcggga

SEQ ID NO: 16353 - RNA, 32 nt, Homo Sapiens
agggccauaaauugcuaauauaaagaaguuag

SEQ ID NO: 16354 - RNA, 32 nt, Homo Sapiens
cggggccaggcagaaccugggcccguccggcu

SEQ ID NO: 16355 - RNA, 32 nt, Homo Sapiens
ugacugucuuuguguuucuguaccucaaggca

SEQ ID NO: 16356 - RNA, 32 nt, Homo Sapiens
gucuuguuuuccaggaauaaaguaccauuuuu

SEQ ID NO: 16357 - RNA, 30 nt, Homo Sapiens
cuagaggagccggugccgccugaaugccga

SEQ ID NO: 16358 - RNA, 31 nt, Homo Sapiens
aaaucucuugguagauuuucagaauaauaga

SEQ ID NO: 16359 - RNA, 32 nt, Homo Sapiens
uugguucggagcgcgaugagccgcccguccuc

SEQ ID NO: 16360 - RNA, 32 nt, Homo Sapiens
guuugagacuguguaugcaacccccaauagac

SEQ ID NO: 16361 - RNA, 32 nt, Homo Sapiens
cuauugcuaucuuuucuggaugaucagaaaaa

SEQ ID NO: 16362 - RNA, 31 nt, Homo Sapiens
uggcuguagguuugaacaggagucugagguc

SEQ ID NO: 16363 - RNA, 32 nt, Homo Sapiens
ucacgacgcaauccguguccugcuggauaacc

SEQ ID NO: 16364 - RNA, 32 nt, Homo Sapiens
ccgggcacuccagcgaccguggggaucagcgu

SEQ ID NO: 16365 - RNA, 32 nt, Homo Sapiens
ggcggaggggagggggcgcccaggaggggugg

SEQ ID NO: 16366 - RNA, 32 nt, Homo Sapiens
cuuuuuaaaaagauggaaaauuauaccauacc

SEQ ID NO: 16367 - RNA, 32 nt, Homo Sapiens
uggcugcagaauucuagcucucacgagcacgc

SEQ ID NO: 16368 - RNA, 32 nt, Homo Sapiens
uggaaauuuugggggaaaaaauccaaaacaca

SEQ ID NO: 16369 - RNA, 32 nt, Homo Sapiens
caugagcucugacuucuuggugccagguuggu

SEQ ID NO: 16370 - RNA, 32 nt, Homo Sapiens
ggggggaggaggaggaguggugcugcgagggg

SEQ ID NO: 16371 - RNA, 32 nt, Homo Sapiens
ccuuaucuguuuucuaccuccuccuuuguuua

SEQ ID NO: 16372 - RNA, 32 nt, Homo Sapiens
ccaguaggagucauguacacgguauaagacuu

SEQ ID NO: 16373 - RNA, 32 nt, Homo Sapiens
ucagggccguccgggggcgcggccggcgaugc

SEQ ID NO: 16374 - RNA, 32 nt, Homo Sapiens
aacgcugccuggcgaacccugguguucaaguu

SEQ ID NO: 16375 - RNA, 32 nt, Homo Sapiens
gugcaauaugugcauucuuucauuuuaguuuu

SEQ ID NO: 16376 - RNA, 32 nt, Homo Sapiens
ggacaggaggggcuugcggccgugucucugac

SEQ ID NO: 16377 - RNA, 32 nt, Homo Sapiens
cuuuuuauuccugucaacuggauggaaacaca

SEQ ID NO: 16378 - RNA, 32 nt, Homo Sapiens
gaaacuuugagccaugcuaggagguaacuagu

SEQ ID NO: 16379 - RNA, 32 nt, Homo Sapiens
uggcuguguucacagccuuguuugcugcuucc

SEQ ID NO: 16380 - RNA, 32 nt, Homo Sapiens
uacggggucuggcucugucacccaggcuggag

SEQ ID NO: 16381 - RNA, 32 nt, Homo Sapiens
cguaaguauguacgcacgcauaucaaacuaug

SEQ ID NO: 16382 - RNA, 32 nt, Homo Sapiens
ccagcaccuccguuuucagucaguguugucca

SEQ ID NO: 16383 - RNA, 32 nt, Homo Sapiens
cuuccagagaaauguacugaaaaagucuacgc

SEQ ID NO: 16384 - RNA, 32 nt, Homo Sapiens
cuuccuccgggagcggcuguugggcuggaucc

SEQ ID NO: 16385 - RNA, 32 nt, Homo Sapiens
cuaggucuugguuuuguugauuuuuucuuaaa

SEQ ID NO: 16386 - RNA, 32 nt, Homo Sapiens
uacacuaaugaaaucauaagaauggucugaac

SEQ ID NO: 16387 - RNA, 32 nt, Homo Sapiens
ccuuuucccuccccggggccccagcgcgcggc

SEQ ID NO: 16388 - RNA, 32 nt, Homo Sapiens
gggugagggagucucacgcaccaugagauuac

SEQ ID NO: 16389 - RNA, 32 nt, Homo Sapiens
ucaugcccggugcccaggcuggggccgccaag

SEQ ID NO: 16390 - RNA, 32 nt, Homo Sapiens
gaucaaaucagaagaaacuuugaaauaacucc

SEQ ID NO: 16391 - RNA, 32 nt, Homo Sapiens
gcagugcuuccucuccugucaauuccaggcuc

SEQ ID NO: 16392 - RNA, 32 nt, Homo Sapiens
cgcaggcgcugggucugcagauggcguccagg

SEQ ID NO: 16393 - RNA, 31 nt, Homo Sapiens
gaaaaauauuuaaagaaaacuuaugcugacc

SEQ ID NO: 16394 - RNA, 32 nt, Homo Sapiens
cuccaccuccagcagacucgccucccgagccu

SEQ ID NO: 16395 - RNA, 32 nt, Homo Sapiens
caggcgugguggcucacgccuguaaucccaac

SEQ ID NO: 16396 - RNA, 32 nt, Homo Sapiens
aacccaugugccauccuacuuguauuacuggu

SEQ ID NO: 16397 - RNA, 32 nt, Homo Sapiens
ucauuaaaaaauaacauggauuccauacugag

SEQ ID NO: 16398 - RNA, 32 nt, Homo Sapiens
cucuuucuugacucuuguuuucaguuucaauu

SEQ ID NO: 16399 - RNA, 32 nt, Homo Sapiens
caaaaagauagugucucuugugagaucagcau

SEQ ID NO: 16400 - RNA, 32 nt, Homo Sapiens
agaggcaugagccacuguccccggccuccugg

SEQ ID NO: 16401 - RNA, 32 nt, Homo Sapiens
cagacuugaugaugaaguaggugguccugaaa

SEQ ID NO: 16402 - RNA, 32 nt, Homo Sapiens
agcagcggcccgagccggggccauggcgaagc

SEQ ID NO: 16403 - RNA, 32 nt, Homo Sapiens
guaaauaaauauguguuauaacaaguaaaccg

SEQ ID NO: 16404 - RNA, 32 nt, Homo Sapiens
aagagagagaucuggggcugggguauggauga

SEQ ID NO: 16405 - RNA, 32 nt, Homo Sapiens
gaugaacaacacacuuaggccacacucaguuu

SEQ ID NO: 16406 - RNA, 32 nt, Homo Sapiens
ugugucuaaauuugaauguuaagcagauggaa

SEQ ID NO: 16407 - RNA, 30 nt, Homo Sapiens
gcaucgguguguggcggcggggcaugccca

SEQ ID NO: 16408 - RNA, 32 nt, Homo Sapiens
ggcugggcgugguggcucacguuuuuaauccc

SEQ ID NO: 16409 - RNA, 32 nt, Homo Sapiens
guggucagaaauggaacagagaagcugucuua

SEQ ID NO: 16410 - RNA, 32 nt, Homo Sapiens
uuucuaccucuggccccuggcucccaucuugg

SEQ ID NO: 16411 - RNA, 32 nt, Homo Sapiens
guugggagggguggcugcuuggaaauaggccc

SEQ ID NO: 16412 - RNA, 27 nt, Homo Sapiens
auauaguacauuaucugguauauguaa

SEQ ID NO: 16413 - RNA, 32 nt, Homo Sapiens
cauaagaaacaaugagaucaugucucaggaac

SEQ ID NO: 16414 - RNA, 32 nt, Homo Sapiens
ugccuuugacucauuggacuagugcagaggcu

SEQ ID NO: 16415 - RNA, 32 nt, Homo Sapiens
caugggaguuaacagugcaucucccaguggac

SEQ ID NO: 16416 - RNA, 32 nt, Homo Sapiens
uuuuuucuuuugcaagacaccuguuuaucauc

SEQ ID NO: 16417 - RNA, 32 nt, Homo Sapiens
uauuaccuuugcuaagugcuauauuauuggcu

SEQ ID NO: 16418 - RNA, 32 nt, Homo Sapiens
ucccucggccccacccacccucugguccuucu

SEQ ID NO: 16419 - RNA, 32 nt, Homo Sapiens
augugccacacgcucgcucuuuuuuacaccca

SEQ ID NO: 16420 - RNA, 32 nt, Homo Sapiens
uaaagaaauaccaugaaauuuauagguagaua

SEQ ID NO: 16421 - RNA, 32 nt, Homo Sapiens
aagauuugucagauaggaaauuuuauaaugca

SEQ ID NO: 16422 - RNA, 32 nt, Homo Sapiens
ugaagugucucugcuaagggcgcuagucccau

SEQ ID NO: 16423 - RNA, 32 nt, Homo Sapiens
auuauuugagcaaaaacuacuguaaauaacuu

SEQ ID NO: 16424 - RNA, 32 nt, Homo Sapiens
agagaaacagagcgaaagagacuuuagaggaa

SEQ ID NO: 16425 - RNA, 32 nt, Homo Sapiens
ccaauuuuacacacauaaaauaauuagcuuca

SEQ ID NO: 16426 - RNA, 32 nt, Homo Sapiens
uuggauauaggugggaagaaaaggugacuugu

SEQ ID NO: 16427 - RNA, 32 nt, Homo Sapiens
aguccagaugaccucacccacccaggacuuca

SEQ ID NO: 16428 - RNA, 32 nt, Homo Sapiens
caggcuccaccucgggaucauagucucaacgc

SEQ ID NO: 16429 - RNA, 32 nt, Homo Sapiens
cacugaccauguucuucaguucuuaauuaugg

SEQ ID NO: 16430 - RNA, 32 nt, Homo Sapiens
gcaagugggaccuugguauacacaucaccugu

SEQ ID NO: 16431 - RNA, 32 nt, Homo Sapiens
ucuuugaggaggcucacaaaauacuaaagcug

SEQ ID NO: 16432 - RNA, 32 nt, Homo Sapiens
aaaguaggcagacaguguugagccagcaaaaa

SEQ ID NO: 16433 - RNA, 32 nt, Homo Sapiens
cagaguccaagcccugguggguagaggccaag

SEQ ID NO: 16434 - RNA, 32 nt, Homo Sapiens
cugcaaaauguauuucuuuuuacaagugaaug

SEQ ID NO: 16435 - RNA, 32 nt, Homo Sapiens
uaacaauucugccauauugacuuuacaauuuu

SEQ ID NO: 16436 - RNA, 32 nt, Homo Sapiens
uuguccuuugaaaugauugaccaggaaaaaga

SEQ ID NO: 16437 - RNA, 32 nt, Homo Sapiens
acaccagucuuguaucucuuaaaaguauggau

SEQ ID NO: 16438 - RNA, 32 nt, Homo Sapiens
caagaggaugagcaccaaugucuuaaagcccu

SEQ ID NO: 16439 - RNA, 32 nt, Homo Sapiens
aagcaucuaauucaaucagggagugcuuccug

SEQ ID NO: 16440 - RNA, 32 nt, Homo Sapiens
aagacuuuucccuuccagacuuugagugucuu

SEQ ID NO: 16441 - RNA, 32 nt, Homo Sapiens
cccagaaguugccuggcuuggcacucucugcg

SEQ ID NO: 16442 - RNA, 32 nt, Homo Sapiens
aaugggaaggacaacagcacccgccucacagg

SEQ ID NO: 16443 - RNA, 32 nt, Homo Sapiens
uuccugagaagcugcgggcuucgguguggagg

SEQ ID NO: 16444 - RNA, 32 nt, Homo Sapiens
ggaaaacuaaauguuaguuuagcugauuguau

SEQ ID NO: 16445 - RNA, 32 nt, Homo Sapiens
uuccagacgcagaacuuuaugccuccauuuuc

SEQ ID NO: 16446 - RNA, 32 nt, Homo Sapiens
guuuaaaaguuccaguuugcaagauggacaua

SEQ ID NO: 16447 - RNA, 32 nt, Homo Sapiens
auuaaauguaaaauauaaugaggaguuaauuc

SEQ ID NO: 16448 - RNA, 32 nt, Homo Sapiens
aaaauaguauuuuuaaguaguuucuaauugug

SEQ ID NO: 16449 - RNA, 32 nt, Homo Sapiens
ugauaucaacaaugaagcaaugauaucuaaga

SEQ ID NO: 16450 - RNA, 32 nt, Homo Sapiens
agguuaagccccagaaaaguucaccuuggaga

SEQ ID NO: 16451 - RNA, 32 nt, Homo Sapiens
uauaauuauuugaacauauagauauguaacau

SEQ ID NO: 16452 - RNA, 32 nt, Homo Sapiens
gugggcugggcgugggggcucaugccuguaau

SEQ ID NO: 16453 - RNA, 32 nt, Homo Sapiens
agcauccccaaaaugaauaaagccuuuuuacu

SEQ ID NO: 16454 - RNA, 32 nt, Homo Sapiens
ccucaguuagaaugaauggaaagcagaucuac

SEQ ID NO: 16455 - RNA, 32 nt, Homo Sapiens
caaauugcuugaaagaaaauaugcaucuaaua

SEQ ID NO: 16456 - RNA, 32 nt, Homo Sapiens
gucacagaggccuucacacgugucugggaggg

SEQ ID NO: 16457 - RNA, 32 nt, Homo Sapiens
gagcaggaagcgccggcguaggcggcccccug

SEQ ID NO: 16458 - RNA, 32 nt, Homo Sapiens
augugagaaacacuguaccaugccugucaugc

SEQ ID NO: 16459 - RNA, 29 nt, Homo Sapiens
ggguagggaggacagagaggcggcguucg

SEQ ID NO: 16460 - RNA, 32 nt, Homo Sapiens
cacugucccagcugccaccuagacucggagcu

SEQ ID NO: 16461 - RNA, 32 nt, Homo Sapiens
cuuuuuucagcccaacauuuagcuuuauggag

SEQ ID NO: 16462 - RNA, 32 nt, Homo Sapiens
ggccaaguggcauauccagagcccuggggcgg

SEQ ID NO: 16463 - RNA, 32 nt, Homo Sapiens
ucccacaacaucagcucugugccaccucccaa

SEQ ID NO: 16464 - RNA, 32 nt, Homo Sapiens
ccaagaggggcgaggccggggaggugcuggag

SEQ ID NO: 16465 - RNA, 32 nt, Homo Sapiens
cucccggcggaagcggcugcacuuccgguccc

SEQ ID NO: 16466 - RNA, 32 nt, Homo Sapiens
acaacuaugaagaucugcagcuauucuuuuac

SEQ ID NO: 16467 - RNA, 32 nt, Homo Sapiens
auuucauuugcuauuuauaacaauagaggaag

SEQ ID NO: 16468 - RNA, 32 nt, Homo Sapiens
cugguaacaauguagcuuugagggaucaguuc

SEQ ID NO: 16469 - RNA, 32 nt, Homo Sapiens
uagaauuuucauuuguuuuucuuuaaauccuu

SEQ ID NO: 16470 - RNA, 32 nt, Homo Sapiens
gcaccugcacgcugugcucgccacggaguaaa

SEQ ID NO: 16471 - RNA, 32 nt, Homo Sapiens
aggaacaggucgcagccaggcuugucaaggag

SEQ ID NO: 16472 - RNA, 32 nt, Homo Sapiens
ugggagguggagguuacagugagccgagauca

SEQ ID NO: 16473 - RNA, 32 nt, Homo Sapiens
ugggagguggagguugcagugagccgagaucg

SEQ ID NO: 16474 - RNA, 32 nt, Homo Sapiens
cccaacaaaaauuuuuaaaaauuugaugaucc

SEQ ID NO: 16475 - RNA, 32 nt, Homo Sapiens
cugccccaugcagcccugagccccacagcaag

SEQ ID NO: 16476 - RNA, 32 nt, Homo Sapiens
ggacaaguucccucccacguggcuggacgagc

SEQ ID NO: 16477 - RNA, 32 nt, Homo Sapiens
ggggccgugggcguccagggcgcuagaagccg

SEQ ID NO: 16478 - RNA, 32 nt, Homo Sapiens
guccccgccggcuuggguccgccccgaagccc

SEQ ID NO: 16479 - RNA, 32 nt, Homo Sapiens
uacccgaagcgcauagaggcugcuggugucaa

SEQ ID NO: 16480 - RNA, 32 nt, Homo Sapiens
uguguaaugauccaaucaggguagugugugug

SEQ ID NO: 16481 - RNA, 32 nt, Homo Sapiens
uuuuuugcaguauauuuauuuugugcauuaua

SEQ ID NO: 16482 - RNA, 32 nt, Homo Sapiens
cuggcucugccagcguccccggccacgucugu

SEQ ID NO: 16483 - RNA, 32 nt, Homo Sapiens
ggcccugacccugugucuccaacugcugcacc

SEQ ID NO: 16484 - RNA, 32 nt, Homo Sapiens
uggggaggggagaaagggagauggguagcauc

SEQ ID NO: 16485 - RNA, 32 nt, Homo Sapiens
uuuuggugguaccaccugguugaauuucuuca

SEQ ID NO: 16486 - RNA, 32 nt, Homo Sapiens
cauccuccuguccccguccccccguccccguc

SEQ ID NO: 16487 - RNA, 32 nt, Homo Sapiens
cagcuaaguuuucugauggaaucuucaucuca

SEQ ID NO: 16488 - RNA, 32 nt, Homo Sapiens
gaugauauuuuauguuuaaucuguaaauaaga

SEQ ID NO: 16489 - RNA, 32 nt, Homo Sapiens
aacuugcaacagacuggccuucuguuuguuac

SEQ ID NO: 16490 - RNA, 32 nt, Homo Sapiens
cagauagcuucagucccagucuaggccuagau

SEQ ID NO: 16491 - RNA, 32 nt, Homo Sapiens
cuccugccucccagccuucucuccaggcccug

SEQ ID NO: 16492 - RNA, 32 nt, Homo Sapiens
uccuaaaccuacugccacuuaggugcaugcaa

SEQ ID NO: 16493 - RNA, 32 nt, Homo Sapiens
uggagcccaagcaccccuggagaggaagggag

SEQ ID NO: 16494 - RNA, 32 nt, Homo Sapiens
gugccccuuccucuccucaggcuccuccuugc

SEQ ID NO: 16495 - RNA, 32 nt, Homo Sapiens
cggcaccuccaagagcugaaucucccuccaac

SEQ ID NO: 16496 - RNA, 32 nt, Homo Sapiens
ggucaggaaugggaaauugcccuguagauugu

SEQ ID NO: 16497 - RNA, 32 nt, Homo Sapiens
ugguauguggguggucccacucgcuuugguca

SEQ ID NO: 16498 - RNA, 32 nt, Homo Sapiens
guagcaccaaaauucucaugucaaacagaugu

SEQ ID NO: 16499 - RNA, 32 nt, Homo Sapiens
ggacagggcacucccugggugcccuagaccug

SEQ ID NO: 16500 - RNA, 32 nt, Homo Sapiens
aaaugauuugaaauauaggugaggauucagga

SEQ ID NO: 16501 - RNA, 32 nt, Homo Sapiens
gggguaugaaaagccacuuaacugcagacuug

SEQ ID NO: 16502 - RNA, 30 nt, Homo Sapiens
guguguuuggacugcaguuugccacccuga

SEQ ID NO: 16503 - RNA, 32 nt, Homo Sapiens
acucggcgggagacagcggggaugcugcagca

SEQ ID NO: 16504 - RNA, 32 nt, Homo Sapiens
uaacucuguauauauuacccuuaagucauuuu

SEQ ID NO: 16505 - RNA, 32 nt, Homo Sapiens
acuagcgagggguagcagaaaccugcaccaag

SEQ ID NO: 16506 - RNA, 32 nt, Homo Sapiens
uuugcaauaaaacugguuaugacuugauccaa

SEQ ID NO: 16507 - RNA, 32 nt, Homo Sapiens
aagcagcugaagaugucuguugagugauuacc

SEQ ID NO: 16508 - RNA, 29 nt, Homo Sapiens
cacuuuguuaaaauaaacaaauuaaaagg

SEQ ID NO: 16509 - RNA, 32 nt, Homo Sapiens
aagggaaguauagcugauuuuaaaagaaccua

SEQ ID NO: 16510 - RNA, 32 nt, Homo Sapiens
aagugucucccaaaaaaggaugcugaagagca

SEQ ID NO: 16511 - RNA, 32 nt, Homo Sapiens
agauauguacuucuugccuuuaaguuuuaaca

SEQ ID NO: 16512 - RNA, 32 nt, Homo Sapiens
uauauauauauacacacacacacacacacaca

SEQ ID NO: 16513 - RNA, 32 nt, Homo Sapiens
agaagguucuuauugcaaauauuauuaggaug

SEQ ID NO: 16514 - RNA, 32 nt, Homo Sapiens
cuaguugucacuuuccucuuccacuuugauac

SEQ ID NO: 16515 - RNA, 32 nt, Homo Sapiens
caaccucaaugagauggagcguuccaagcugg

SEQ ID NO: 16516 - RNA, 32 nt, Homo Sapiens
uggccggcgcguguucuugacaucagucucgg

SEQ ID NO: 16517 - RNA, 29 nt, Homo Sapiens
gagauucuaaaauauauuacagauuuagu

SEQ ID NO: 16518 - RNA, 32 nt, Homo Sapiens
ccaguguuucucuuuggagugccucgccagcu

SEQ ID NO: 16519 - RNA, 32 nt, Homo Sapiens
aguuuccagcuggcagaauuaauuguuauuau

SEQ ID NO: 16520 - RNA, 32 nt, Homo Sapiens
ugcccagaauuccacauaccugagcuuugggg

SEQ ID NO: 16521 - RNA, 32 nt, Homo Sapiens
gauuaugaaucagugcguggagccgcgcggcc

SEQ ID NO: 16522 - RNA, 32 nt, Homo Sapiens
aguggcucaccccuguaaucccagcacuuugg

SEQ ID NO: 16523 - RNA, 32 nt, Homo Sapiens
cauacuuguaaauacaaaccgagcacuaguuu

SEQ ID NO: 16524 - RNA, 32 nt, Homo Sapiens
gaggacuucucgccauuuggcucuggaggugg

SEQ ID NO: 16525 - RNA, 32 nt, Homo Sapiens
uuggguccagaguuucuuucugaagugcucuu

SEQ ID NO: 16526 - RNA, 32 nt, Homo Sapiens
ggccuaauuuccccccucgcuucccccaguag

SEQ ID NO: 16527 - RNA, 32 nt, Homo Sapiens
uaaagcagcaugugcagauuauucauaauaua

SEQ ID NO: 16528 - RNA, 32 nt, Homo Sapiens
uccugccucuuacucuccagcaccgaaccaga

SEQ ID NO: 16529 - RNA, 32 nt, Homo Sapiens
uuaaauaguauuuauuugauaaaugggaguuu

SEQ ID NO: 16530 - RNA, 32 nt, Homo Sapiens
cuggcugugugcuuggacucggcuccaggugg

SEQ ID NO: 16531 - RNA, 32 nt, Homo Sapiens
uuuuuguccauauccagguuagcugguaagag

SEQ ID NO: 16532 - RNA, 32 nt, Homo Sapiens
ugacuuugauuccugcgccuuuuaguuuugaa

SEQ ID NO: 16533 - RNA, 32 nt, Homo Sapiens
ggccacagccccagccuuaggccaggcccugg

SEQ ID NO: 16534 - RNA, 32 nt, Homo Sapiens
gcucagugggcagaauggcaguuagauauggg

SEQ ID NO: 16535 - RNA, 32 nt, Homo Sapiens
aaaagcccuaaaauguuuuaucugaauaaguu

SEQ ID NO: 16536 - RNA, 32 nt, Homo Sapiens
acaaggcggggcuggggacgccggucaguguc

SEQ ID NO: 16537 - RNA, 32 nt, Homo Sapiens
uggcagggauggagguuacgcaugggcucagc

SEQ ID NO: 16538 - RNA, 31 nt, Homo Sapiens
ccaacggcugcgcucccaccaagggcgcggu

SEQ ID NO: 16539 - RNA, 32 nt, Homo Sapiens
aaggcugugggaacccaccucuuccaucagug

SEQ ID NO: 16540 - RNA, 32 nt, Homo Sapiens
auugagcugcgggucgcggccggcgccggccu

SEQ ID NO: 16541 - RNA, 32 nt, Homo Sapiens
gacucccuuaaucucuuccccagcuacagagg

SEQ ID NO: 16542 - RNA, 32 nt, Homo Sapiens
uuucucaucuuuccuuuucuaaccuaaugaga

SEQ ID NO: 16543 - RNA, 32 nt, Homo Sapiens
guccccgaugccgcccggggguccucacgucu

SEQ ID NO: 16544 - RNA, 32 nt, Homo Sapiens
ucagcaggcugucaccuauuacacuuaugaua

SEQ ID NO: 16545 - RNA, 32 nt, Homo Sapiens
gaaugugcuuuccuggaaauuuuucuagauag

SEQ ID NO: 16546 - RNA, 32 nt, Homo Sapiens
aagaaauccaaaacuuccugugugggucaaau

SEQ ID NO: 16547 - RNA, 32 nt, Homo Sapiens
aaagauauuguuaaaaugaggccuccaugcaa

SEQ ID NO: 16548 - RNA, 32 nt, Homo Sapiens
gagagaagauuuuaaccugugucuuacuuccu

SEQ ID NO: 16549 - RNA, 32 nt, Homo Sapiens
caccaccccucuacugcucuccauggagaauc

SEQ ID NO: 16550 - RNA, 32 nt, Homo Sapiens
uuagaugaucuucaugggcccacagguaccag

SEQ ID NO: 16551 - RNA, 32 nt, Homo Sapiens
caggguacugcccaucuguuucuccucgggug

SEQ ID NO: 16552 - RNA, 32 nt, Homo Sapiens
acacagaccccaucagagcaaaacagacaaga

SEQ ID NO: 16553 - RNA, 32 nt, Homo Sapiens
ccagccacuccuccagggccagcccuucccug

SEQ ID NO: 16554 - RNA, 32 nt, Homo Sapiens
auagggggagcagacccugagaucugggcaua

SEQ ID NO: 16555 - RNA, 32 nt, Homo Sapiens
uuucagggcauagucaaaggcaucauccuccc

SEQ ID NO: 16556 - RNA, 32 nt, Homo Sapiens
gggcggcguaggggcggaggucgcgccugagu

SEQ ID NO: 16557 - RNA, 32 nt, Homo Sapiens
uuccuaucaucccacgugucuacccagacccu

SEQ ID NO: 16558 - RNA, 32 nt, Homo Sapiens
ugaggggcgucccgggcggcggugcuccguuu

SEQ ID NO: 16559 - RNA, 32 nt, Homo Sapiens
aguggucaaacagguaaagccuaugaugugug

SEQ ID NO: 16560 - RNA, 32 nt, Homo Sapiens
cagccagugucuguucauugccucugccuugc

SEQ ID NO: 16561 - RNA, 32 nt, Homo Sapiens
accgagguuggaaaagguugugaaaccuuuua

SEQ ID NO: 16562 - RNA, 32 nt, Homo Sapiens
cuuuaucuuucuguuuuugucuguguccuagg

SEQ ID NO: 16563 - RNA, 32 nt, Homo Sapiens
guuucagcacauagaaaaccagcagugaauaa

SEQ ID NO: 16564 - RNA, 32 nt, Homo Sapiens
uauuuaugauacugucaauugcugucauugag

SEQ ID NO: 16565 - RNA, 32 nt, Homo Sapiens
ggcuuccccgguucuuccugccgcccuggaug

SEQ ID NO: 16566 - RNA, 32 nt, Homo Sapiens
ucguacagccagaguugagaaccaucugagua

SEQ ID NO: 16567 - RNA, 32 nt, Homo Sapiens
ccaccugcccucggggggccccugcgagggug

SEQ ID NO: 16568 - RNA, 32 nt, Homo Sapiens
gaggcacaugguccugucucacgucacaggga

SEQ ID NO: 16569 - RNA, 32 nt, Homo Sapiens
ggguuuuguuuucaacuuuucauuuggauguu

SEQ ID NO: 16570 - RNA, 32 nt, Homo Sapiens
ccgagcccggguuuccugccugagccccgcuc

SEQ ID NO: 16571 - RNA, 32 nt, Homo Sapiens
uuaacuugaugaugaaugaagaaugcauggag

SEQ ID NO: 16572 - RNA, 32 nt, Homo Sapiens
uacuacagcaaggagcacacaggccgcaucug

SEQ ID NO: 16573 - RNA, 32 nt, Homo Sapiens
aauaaugaaaauaaauacucuugguuuugcuu

SEQ ID NO: 16574 - RNA, 32 nt, Homo Sapiens
gcauuuagggaaggagaaccccugccaagacc

SEQ ID NO: 16575 - RNA, 32 nt, Homo Sapiens
guaaugugggaaggcuuucacuuguguuucug

SEQ ID NO: 16576 - RNA, 32 nt, Homo Sapiens
cauuucuuaaaauaaaaaugcuaaaggacuag

SEQ ID NO: 16577 - RNA, 32 nt, Homo Sapiens
cagaggcccucccaacgaacagcucucucaga

SEQ ID NO: 16578 - RNA, 32 nt, Homo Sapiens
aggcagagaggaucuugcaagagccuucagca

SEQ ID NO: 16579 - RNA, 32 nt, Homo Sapiens
agccgucauucucuccccacuccacgcucccc

SEQ ID NO: 16580 - RNA, 32 nt, Homo Sapiens
gccccuucauaaauagcaggcaaaugccuagc

SEQ ID NO: 16581 - RNA, 32 nt, Homo Sapiens
ugauguuccagaaccuucucugacaccagccu

SEQ ID NO: 16582 - RNA, 32 nt, Homo Sapiens
uccaggucacaguuugcuuuuuagacaaggua

SEQ ID NO: 16583 - RNA, 32 nt, Homo Sapiens
uccacuucaguguucauuuuuauuuuucugaa

SEQ ID NO: 16584 - RNA, 32 nt, Homo Sapiens
acagagcucaggcuucaacgcuggcccgacac

SEQ ID NO: 16585 - RNA, 32 nt, Homo Sapiens
cagcagacauggaaauagaauuuuaaacaauu

SEQ ID NO: 16586 - RNA, 32 nt, Homo Sapiens
cuuaugcauguuuaguaaagaucauaauuagc

SEQ ID NO: 16587 - RNA, 32 nt, Homo Sapiens
cuaccaaaaggcccuugggacaucagaggagc

SEQ ID NO: 16588 - RNA, 32 nt, Homo Sapiens
cggugcuuauagaacuagucucacaacuugac

SEQ ID NO: 16589 - RNA, 32 nt, Homo Sapiens
auagaaagcugcuuauuuucauuaaugaaaaa

SEQ ID NO: 16590 - RNA, 32 nt, Homo Sapiens
augccucuucuacagcuccauuuuugauaguu

SEQ ID NO: 16591 - RNA, 32 nt, Homo Sapiens
uagaauacagacagcaauauuuuauauucaug

SEQ ID NO: 16592 - RNA, 32 nt, Homo Sapiens
ucacuuuauuuuguagaaccauuugaaauccu

SEQ ID NO: 16593 - RNA, 32 nt, Homo Sapiens
ucugaagcguccccgcagccuggucgguggcu

SEQ ID NO: 16594 - RNA, 32 nt, Homo Sapiens
cucccugucucuucucuucucuaaagaaucau

SEQ ID NO: 16595 - RNA, 32 nt, Homo Sapiens
agugacuuuccaguuuuuacaugaucuggcuc

SEQ ID NO: 16596 - RNA, 32 nt, Homo Sapiens
uuuacacagaccuauuugagggaggcugggua

SEQ ID NO: 16597 - RNA, 32 nt, Homo Sapiens
gaaaacacucucccugauuccuggacuucggg

SEQ ID NO: 16598 - RNA, 32 nt, Homo Sapiens
cugcuggagccgcgacaguacaugcugcugcu

SEQ ID NO: 16599 - RNA, 32 nt, Homo Sapiens
gguuuuggcuucguuuuuucucuucguugacu

SEQ ID NO: 16600 - RNA, 32 nt, Homo Sapiens
aauuggcugggucaccauuuacaucauagaaa

SEQ ID NO: 16601 - RNA, 32 nt, Homo Sapiens
gcauuacaaaaauuuagcuacuuucaaaugag

SEQ ID NO: 16602 - RNA, 32 nt, Homo Sapiens
cagaguagaaaagacaucggagaguugguaga

SEQ ID NO: 16603 - RNA, 32 nt, Homo Sapiens
gaaguuaaggcuccuagcagguccugaaucca

SEQ ID NO: 16604 - RNA, 32 nt, Homo Sapiens
ccgccccgcccggccccguagagucccugucg

SEQ ID NO: 16605 - RNA, 32 nt, Homo Sapiens
gucgugugcacucccaccccagccuuuuggua

SEQ ID NO: 16606 - RNA, 32 nt, Homo Sapiens
uggagcccgagugagcgcggcgcgggcccguc

SEQ ID NO: 16607 - RNA, 32 nt, Homo Sapiens
ucugucuuucuuggccccugucucucuccaug

SEQ ID NO: 16608 - RNA, 32 nt, Homo Sapiens
cuuaaaaugcagccccuuuccuugaagugggc

SEQ ID NO: 16609 - RNA, 32 nt, Homo Sapiens
ucauuuuaagcaugcaugguacauuuacaaaa

SEQ ID NO: 16610 - RNA, 32 nt, Homo Sapiens
aacauccacaccuguggaccgaagucccccac

SEQ ID NO: 16611 - RNA, 32 nt, Homo Sapiens
aggcuaagccagcagacucuucuguugccggg

SEQ ID NO: 16612 - RNA, 32 nt, Homo Sapiens
auauucaaagugugaaacuaaaacuuuauggu

SEQ ID NO: 16613 - RNA, 32 nt, Homo Sapiens
gccugggauauccagaggcaucuuccucagca

SEQ ID NO: 16614 - RNA, 32 nt, Homo Sapiens
cacucagcccuguguugggguccucaaagaag

SEQ ID NO: 16615 - RNA, 32 nt, Homo Sapiens
acauaugaugaaaucaucagaauuguuaaaac

SEQ ID NO: 16616 - RNA, 32 nt, Homo Sapiens
uuuugcucucauagaaauaacuuuuuaauuua

SEQ ID NO: 16617 - RNA, 32 nt, Homo Sapiens
auacucuaagcuucuauuuuccacacuggaca

SEQ ID NO: 16618 - RNA, 32 nt, Homo Sapiens
cccgcacuccgccgccucugcccgcaaccgcu

SEQ ID NO: 16619 - RNA, 32 nt, Homo Sapiens
cugggccccgccugcuggccugagaugcccuc

SEQ ID NO: 16620 - RNA, 32 nt, Homo Sapiens
ucucccccgcuguguguccccaggcgcaucau

SEQ ID NO: 16621 - RNA, 32 nt, Homo Sapiens
gaacggauucugggugucuucucuaaaugucu

SEQ ID NO: 16622 - RNA, 32 nt, Homo Sapiens
aaaguugaacugggcuaccucucuacagcugu

SEQ ID NO: 16623 - RNA, 32 nt, Homo Sapiens
uaugcaccuuacugccuagauuuuugggaaaa

SEQ ID NO: 16624 - RNA, 32 nt, Homo Sapiens
uccagcgccucccagccugugccccuuccuag

SEQ ID NO: 16625 - RNA, 32 nt, Homo Sapiens
gcuccaggaaacaaaauacagagcucagugag

SEQ ID NO: 16626 - RNA, 32 nt, Homo Sapiens
guucauugaagaaaguauguaugcagcagugg

SEQ ID NO: 16627 - RNA, 32 nt, Homo Sapiens
gucauuuaccuguauuugcaauaaaagcauaa

SEQ ID NO: 16628 - RNA, 32 nt, Homo Sapiens
agccaauuaugaaguacaaguaucauacacgu

SEQ ID NO: 16629 - RNA, 32 nt, Homo Sapiens
augguuggccugguccuucuggggcuggggcu

SEQ ID NO: 16630 - RNA, 32 nt, Homo Sapiens
gcuguuuccguuccucugcccgccaugccguu

SEQ ID NO: 16631 - RNA, 32 nt, Homo Sapiens
uuuguaaaucauuauuuucauuucauaaguaa

SEQ ID NO: 16632 - RNA, 32 nt, Homo Sapiens
cugagggcgaggggaggguggcaggugaccuu

SEQ ID NO: 16633 - RNA, 32 nt, Homo Sapiens
ucaaaaccaaaauuauagacuauguagaaaug

SEQ ID NO: 16634 - RNA, 32 nt, Homo Sapiens
cuguagaauggcaaaaauugcuuccugcuccu

SEQ ID NO: 16635 - RNA, 32 nt, Homo Sapiens
uaaugaauggaauucaauuccacacaugguuu

SEQ ID NO: 16636 - RNA, 32 nt, Homo Sapiens
uuucucagucauuuuuaaccucuagagucacu

SEQ ID NO: 16637 - RNA, 31 nt, Homo Sapiens
auaugcaacauaucgaggcccaagacacauu

SEQ ID NO: 16638 - RNA, 32 nt, Homo Sapiens
ugccuuuugugauacuuccugugcucccucag

SEQ ID NO: 16639 - RNA, 32 nt, Homo Sapiens
gucccccgccuccuccuccccauuuccgggcu

SEQ ID NO: 16640 - RNA, 32 nt, Homo Sapiens
uugaggcauacuugugugucuggguuguuuuu

SEQ ID NO: 16641 - RNA, 32 nt, Homo Sapiens
ccgagagccaggguccgccuucugcaggguuc

SEQ ID NO: 16642 - RNA, 32 nt, Homo Sapiens
gaauagauugguuuccuguggcucccuccaaa

SEQ ID NO: 16643 - RNA, 32 nt, Homo Sapiens
uuuaaaccucacgugccuggaagcugcacauu

SEQ ID NO: 16644 - RNA, 32 nt, Homo Sapiens
ucaaaauagaacugcauuuccuuuaaaaugga

SEQ ID NO: 16645 - RNA, 32 nt, Homo Sapiens
uccugucagggaccagauguguccugccucau

SEQ ID NO: 16646 - RNA, 32 nt, Homo Sapiens
aggacauggcauacaauggccuuggaggucca

SEQ ID NO: 16647 - RNA, 32 nt, Homo Sapiens
agcugguucuuugcuguagauuuguacaugga

SEQ ID NO: 16648 - RNA, 32 nt, Homo Sapiens
caccuggccauguguguuuucuuacaucuccu

SEQ ID NO: 16649 - RNA, 32 nt, Homo Sapiens
gggagcuggagccgccaaggccgcccggccgg

SEQ ID NO: 16650 - RNA, 32 nt, Homo Sapiens
cgacccagagccccgugcccagugcgucagug

SEQ ID NO: 16651 - RNA, 29 nt, Homo Sapiens
caggugugucauuuccugcugcuuccagc

SEQ ID NO: 16652 - RNA, 32 nt, Homo Sapiens
aacaaaaggaaauuauuuguuuuugaaauacc

SEQ ID NO: 16653 - RNA, 32 nt, Homo Sapiens
uucaaaccaaaaugucugcggaaucaccaguu

SEQ ID NO: 16654 - RNA, 32 nt, Homo Sapiens
cgugccuuuguucacugguacgugggugaggg

SEQ ID NO: 16655 - RNA, 32 nt, Homo Sapiens
ggccaggcgcuugccuuaggauggggccagga

SEQ ID NO: 16656 - RNA, 32 nt, Homo Sapiens
cucgaucucaccuccauccccauccacccaca

SEQ ID NO: 16657 - RNA, 32 nt, Homo Sapiens
gaucacuugagcucaggagcuugagaccagcc

SEQ ID NO: 16658 - RNA, 32 nt, Homo Sapiens
uaaggagaauggcccaguccucucccaagucc

SEQ ID NO: 16659 - RNA, 32 nt, Homo Sapiens
gaucuagaggaaguacagccacccacugacau

SEQ ID NO: 16660 - RNA, 31 nt, Homo Sapiens
accugacaagaggcauuuaggacuucuguga

SEQ ID NO: 16661 - RNA, 32 nt, Homo Sapiens
auuauacugucaaguccaguaaaugacauuuu

SEQ ID NO: 16662 - RNA, 32 nt, Homo Sapiens
agcauuucugggggcuauucuccuucccccca

SEQ ID NO: 16663 - RNA, 29 nt, Homo Sapiens
gggauucacuguuucagaggacacagaca

SEQ ID NO: 16664 - RNA, 32 nt, Homo Sapiens
gccccacagcucuuuccagcgucucggaccug

SEQ ID NO: 16665 - RNA, 32 nt, Homo Sapiens
aaaaaaaucaacaaaaaucacgaaacuagaaa

SEQ ID NO: 16666 - RNA, 32 nt, Homo Sapiens
agauaauggaggugucuguguauguugucaug

SEQ ID NO: 16667 - RNA, 32 nt, Homo Sapiens
guaaucucagaauguuggccgggcaugguggc

SEQ ID NO: 16668 - RNA, 32 nt, Homo Sapiens
gaaggcaccccgugagggaggggagggguggg

SEQ ID NO: 16669 - RNA, 32 nt, Homo Sapiens
cgucucuaaaaauaaaauguaaaaucacugaa

SEQ ID NO: 16670 - RNA, 32 nt, Homo Sapiens
auugcucagacuuauaaaauaggaggaacaac

SEQ ID NO: 16671 - RNA, 32 nt, Homo Sapiens
ggaucgcagccggcagggaggggccgcggcgg

SEQ ID NO: 16672 - RNA, 28 nt, Homo Sapiens
cuucaaauugcaggaccaagcccuaaag

SEQ ID NO: 16673 - RNA, 29 nt, Homo Sapiens
agaacuucuauccugcaucacuuauaugu

SEQ ID NO: 16674 - RNA, 32 nt, Homo Sapiens
cucacuguagaacaaggcaauuucuggcggag

SEQ ID NO: 16675 - RNA, 32 nt, Homo Sapiens
cgguuacaauuuugaaauauuaacugagccuc

SEQ ID NO: 16676 - RNA, 30 nt, Homo Sapiens
ggacgcuggugggagcuugagucuggucug

SEQ ID NO: 16677 - RNA, 32 nt, Homo Sapiens
gcacugggccuggccccccggguauuuauugc

SEQ ID NO: 16678 - RNA, 32 nt, Homo Sapiens
ucagaucuccuuugcuuugacucucaagagag

SEQ ID NO: 16679 - RNA, 32 nt, Homo Sapiens
accuaugcaggucuuauuuacaguguuacuaa

SEQ ID NO: 16680 - RNA, 32 nt, Homo Sapiens
aggccccacugaugcuguucucuucuucauuc

SEQ ID NO: 16681 - RNA, 32 nt, Homo Sapiens
uuccuuguaucuuuacccauaccuguucucau

SEQ ID NO: 16682 - RNA, 32 nt, Homo Sapiens
gcggacagcagugaccaccuccccuucuuuug

SEQ ID NO: 16683 - RNA, 32 nt, Homo Sapiens
ugacauuuaaccccuaaggaguuguuuuucuc

SEQ ID NO: 16684 - RNA, 32 nt, Homo Sapiens
uguuuuucaaccagcaccuaaaaagacucuuu

SEQ ID NO: 16685 - RNA, 32 nt, Homo Sapiens
uuguauuuucuuuucuuguggaauauuuuaau

SEQ ID NO: 16686 - RNA, 32 nt, Homo Sapiens
cauacguguaaucccaguacuuuggaaggugg

SEQ ID NO: 16687 - RNA, 32 nt, Homo Sapiens
uugcugaggugugcgguuuaucuuugagauga

SEQ ID NO: 16688 - RNA, 32 nt, Homo Sapiens
guguaaaucacaccggcagugccucguuaccc

SEQ ID NO: 16689 - RNA, 32 nt, Homo Sapiens
uguaccgccagccccagcccugccugcaugag

SEQ ID NO: 16690 - RNA, 32 nt, Homo Sapiens
uagcagugggggugggggugggggcaggggca

SEQ ID NO: 16691 - RNA, 32 nt, Homo Sapiens
uugaaaaacaauuuucuguaaucuuuuauuua

SEQ ID NO: 16692 - RNA, 32 nt, Homo Sapiens
caaacucaacacugaggucaccaccuggagga

SEQ ID NO: 16693 - RNA, 32 nt, Homo Sapiens
ggcaggggcugggguggugcugcugcuaugag

SEQ ID NO: 16694 - RNA, 32 nt, Homo Sapiens
auuaauuacacgcuuucuguuucucuccgugc

SEQ ID NO: 16695 - RNA, 32 nt, Homo Sapiens
acauuuuugugauaaaugugauaaacuuugau

SEQ ID NO: 16696 - RNA, 32 nt, Homo Sapiens
uuaucucaguuaugaguauaauacauuacaug

SEQ ID NO: 16697 - RNA, 32 nt, Homo Sapiens
uagcuguaauuuuaucuauauuuuaaacuaga

SEQ ID NO: 16698 - RNA, 32 nt, Homo Sapiens
ugaaggauuuaauugauauuuuuaauggagcu

SEQ ID NO: 16699 - RNA, 32 nt, Homo Sapiens
agggcuuuauuacaccucagaaauugaaagca

SEQ ID NO: 16700 - RNA, 32 nt, Homo Sapiens
caauuuccugacaacgaaagugaagaguauca

SEQ ID NO: 16701 - RNA, 31 nt, Homo Sapiens
ccauggauggaggaggaagagauaaggacgu

SEQ ID NO: 16702 - RNA, 32 nt, Homo Sapiens
gacagccccugcuggcccggcgcgcggcgucg

SEQ ID NO: 16703 - RNA, 32 nt, Homo Sapiens
uuuacuuguaaaaggggccaugagugacacag

SEQ ID NO: 16704 - RNA, 32 nt, Homo Sapiens
ugcggcuugccauuuucuuaguguuuuuaacc

SEQ ID NO: 16705 - RNA, 32 nt, Homo Sapiens
acgugcugcaccucgaugucaagccugagaac

SEQ ID NO: 16706 - RNA, 32 nt, Homo Sapiens
acggcgugugggaccgacgggcccguccugcc

SEQ ID NO: 16707 - RNA, 32 nt, Homo Sapiens
aaacgcaaggagaggagggcgcgcggccugca

SEQ ID NO: 16708 - RNA, 32 nt, Homo Sapiens
accgagacccgcccggcccggcggugcgauga

SEQ ID NO: 16709 - RNA, 32 nt, Homo Sapiens
uaccucuucguccuccucuccugccucaccau

SEQ ID NO: 16710 - RNA, 32 nt, Homo Sapiens
cagcguggagcccacagccugguucugggcca

SEQ ID NO: 16711 - RNA, 32 nt, Homo Sapiens
ccgaggccugcgcccugacaugcuaaccucuc

SEQ ID NO: 16712 - RNA, 32 nt, Homo Sapiens
accacagaaugugugagauuuuccuguuugaa

SEQ ID NO: 16713 - RNA, 32 nt, Homo Sapiens
ucuuauuuucuuuccuuaagauguauauuuuc

SEQ ID NO: 16714 - RNA, 32 nt, Homo Sapiens
aaacuaggaaaugcagauguuuuuaacuacuc

SEQ ID NO: 16715 - RNA, 32 nt, Homo Sapiens
ggggcccuggagggaaaggccgaggccgggag

SEQ ID NO: 16716 - RNA, 29 nt, Homo Sapiens
aaaccuggagaaauuuauuuucuguacuc

SEQ ID NO: 16717 - RNA, 32 nt, Homo Sapiens
ugaacucuggaacagaaaggcccuguaaagcc

SEQ ID NO: 16718 - RNA, 32 nt, Homo Sapiens
ugauuuaaagacaccaaggaaaacuacaacug

SEQ ID NO: 16719 - RNA, 32 nt, Homo Sapiens
caggguaauaauaaugguagguaacaauuaaa

SEQ ID NO: 16720 - RNA, 32 nt, Homo Sapiens
agagagaacaauucuaauaaaaacacuccucu

SEQ ID NO: 16721 - RNA, 32 nt, Homo Sapiens
gagaaauacucuaugaauagaauauacuuugg

SEQ ID NO: 16722 - RNA, 32 nt, Homo Sapiens
aagauuuuuuucugcucaggaaggggugaaau

SEQ ID NO: 16723 - RNA, 32 nt, Homo Sapiens
auuuucuguagaaggugccacagugagaccug

SEQ ID NO: 16724 - RNA, 32 nt, Homo Sapiens
ccacagccaggcucuggcaugccugaaaacag

SEQ ID NO: 16725 - RNA, 32 nt, Homo Sapiens
guuauguggcggagccgagcaguuuagcgugc

SEQ ID NO: 16726 - RNA, 32 nt, Homo Sapiens
uaggauugacauuuuuucugaauucuguauaa

SEQ ID NO: 16727 - RNA, 32 nt, Homo Sapiens
guuucugcucauaagugcuuuuggaagucacc

SEQ ID NO: 16728 - RNA, 32 nt, Homo Sapiens
agccuggcgggaaguggcugcggcccaggcag

SEQ ID NO: 16729 - RNA, 32 nt, Homo Sapiens
uagccucgcggacccucguccuccccacaucg

SEQ ID NO: 16730 - RNA, 32 nt, Homo Sapiens
caccgccuccgccccaggcaaggccggccggc

SEQ ID NO: 16731 - RNA, 32 nt, Homo Sapiens
cccucucccaggccccaugaccuccagcuuuc

SEQ ID NO: 16732 - RNA, 32 nt, Homo Sapiens
ugcaaugggcugacagccuuggaccgggaguc

SEQ ID NO: 16733 - RNA, 32 nt, Homo Sapiens
cagcuuaaaaacauucagugugacuuuaauau

SEQ ID NO: 16734 - RNA, 32 nt, Homo Sapiens
aguauuucaugacaucguuguacaguuuaacu

SEQ ID NO: 16735 - RNA, 32 nt, Homo Sapiens
gcaauugcauauauuuucuugauuaacauauu

SEQ ID NO: 16736 - RNA, 32 nt, Homo Sapiens
ggcuccaucuucccuucucugccagccgcgug

SEQ ID NO: 16737 - RNA, 32 nt, Homo Sapiens
cugacgcagggccaggacccugcccgaugccc

SEQ ID NO: 16738 - RNA, 32 nt, Homo Sapiens
ggggacauagaaaaaaugaaaugcaagcacac

SEQ ID NO: 16739 - RNA, 32 nt, Homo Sapiens
gaauuguccuuuucuaggaagcacgggggagu

SEQ ID NO: 16740 - RNA, 32 nt, Homo Sapiens
uuacuaaguuuuuaaaauuauucauaaaaugc

SEQ ID NO: 16741 - RNA, 32 nt, Homo Sapiens
ccccucaggauaaucuauucucuagcuuaggu

SEQ ID NO: 16742 - RNA, 27 nt, Homo Sapiens
cauuuguccuucuucaaccuccuccac

SEQ ID NO: 16743 - RNA, 29 nt, Homo Sapiens
gaacauguauguauguugcuuagauaaau

SEQ ID NO: 16744 - RNA, 32 nt, Homo Sapiens
agccgggcgugguggcgggcgccuguaauccc

SEQ ID NO: 16745 - RNA, 32 nt, Homo Sapiens
uauuuguuguuuuaacccacucaguuuugcau

SEQ ID NO: 16746 - RNA, 31 nt, Homo Sapiens
ccaggagcccagugucugacggccuccacuu

SEQ ID NO: 16747 - RNA, 32 nt, Homo Sapiens
caaggggcugcgcgaguacaccaagaguggcu

SEQ ID NO: 16748 - RNA, 32 nt, Homo Sapiens
uuggaagcaauauaaugacaguucuguaacug

SEQ ID NO: 16749 - RNA, 32 nt, Homo Sapiens
ugcucucuuggcagggccccagccccucugac

SEQ ID NO: 16750 - RNA, 28 nt, Homo Sapiens
gucaggagugguaccaggaaaccucuuc

SEQ ID NO: 16751 - RNA, 32 nt, Homo Sapiens
aguuaugcuggauuccacagugaaaucauuua

SEQ ID NO: 16752 - RNA, 32 nt, Homo Sapiens
gaccucaggugauccgcccaucucggccuccc

SEQ ID NO: 16753 - RNA, 32 nt, Homo Sapiens
uuuucuuuucuuuaaaaaauguauauucuggg

SEQ ID NO: 16754 - RNA, 32 nt, Homo Sapiens
aggggacaugcgcagccggcccagagcucggg

SEQ ID NO: 16755 - RNA, 32 nt, Homo Sapiens
uucaggugaugauacagaagcuguaaacauac

SEQ ID NO: 16756 - RNA, 32 nt, Homo Sapiens
gggugauuuugacagaaaauauauuuuaaaaa

SEQ ID NO: 16757 - RNA, 32 nt, Homo Sapiens
cggggagcugucuaaggugcugaagcuuccca

SEQ ID NO: 16758 - RNA, 32 nt, Homo Sapiens
aggcucuucaagaauacaacaacuagaaaagg

SEQ ID NO: 16759 - RNA, 32 nt, Homo Sapiens
uuaaaggaagguucuggugugaacuaaacuuu

SEQ ID NO: 16760 - RNA, 32 nt, Homo Sapiens
aagacuuuucuuuuccucuggauuuuuguucc

SEQ ID NO: 16761 - RNA, 32 nt, Homo Sapiens
ucaggcauauuguugaauuccuguucuauccc

SEQ ID NO: 16762 - RNA, 32 nt, Homo Sapiens
cacauugggaagggcugugaaggccuccaggc

SEQ ID NO: 16763 - RNA, 32 nt, Homo Sapiens
ugaauaacuuuuuuauauuuggguuaugaugu

SEQ ID NO: 16764 - RNA, 32 nt, Homo Sapiens
agccgaggccugggcuucugccugcagguguc

SEQ ID NO: 16765 - RNA, 32 nt, Homo Sapiens
ucgccuucgagagauaaagaaagcguuaccuc

SEQ ID NO: 16766 - RNA, 32 nt, Homo Sapiens
uggacuucaaagcaagcugguauuuucauaca

SEQ ID NO: 16767 - RNA, 32 nt, Homo Sapiens
cuaacguuuaauccgcugucugggugcauguc

SEQ ID NO: 16768 - RNA, 32 nt, Homo Sapiens
ugcugcauuuuucaucuuuuuaaugggguuaa

SEQ ID NO: 16769 - RNA, 32 nt, Homo Sapiens
ugcuugaucaguacuaugcugauguuggugca

SEQ ID NO: 16770 - RNA, 32 nt, Homo Sapiens
ucgcucacaccuguaaucucagcacuuuggga

SEQ ID NO: 16771 - RNA, 32 nt, Homo Sapiens
uaaaaguauguggaccugcaguucuuguaacu

SEQ ID NO: 16772 - RNA, 32 nt, Homo Sapiens
uucugaaauggcaccugguacucuugugggac

SEQ ID NO: 16773 - RNA, 32 nt, Homo Sapiens
uuuccugaggauguauuuauaugagauguaug

SEQ ID NO: 16774 - RNA, 32 nt, Homo Sapiens
uaggcacaguuggguguucccuuuuccguguu

SEQ ID NO: 16775 - RNA, 32 nt, Homo Sapiens
guccucauucccaagauugaggaggcaguagu

SEQ ID NO: 16776 - RNA, 32 nt, Homo Sapiens
ucccugccuuugugccaacccauacuugcaca

SEQ ID NO: 16777 - RNA, 32 nt, Homo Sapiens
uggaggacacauaacagacaugcuauccacca

SEQ ID NO: 16778 - RNA, 32 nt, Homo Sapiens
accacacacacacauacacacacacacacaca

SEQ ID NO: 16779 - RNA, 32 nt, Homo Sapiens
aaaugugucuugcugucauuuauauuccuuuu

SEQ ID NO: 16780 - RNA, 32 nt, Homo Sapiens
cccgggcagaggaggaggugcggcggcggcgg

SEQ ID NO: 16781 - RNA, 32 nt, Homo Sapiens
uauuaaaauugcaaacaaaaucaucuuuaaug

SEQ ID NO: 16782 - RNA, 32 nt, Homo Sapiens
gccaugguugguuuuuuugagaccacuuuaua

SEQ ID NO: 16783 - RNA, 32 nt, Homo Sapiens
agaaaaacauaguuuaaauacuguauauaaga

SEQ ID NO: 16784 - RNA, 32 nt, Homo Sapiens
acuacguuauuaaauuuuucugaagcccagag

SEQ ID NO: 16785 - RNA, 32 nt, Homo Sapiens
acaauaugacuaacagcaacuccaucacuuga

SEQ ID NO: 16786 - RNA, 32 nt, Homo Sapiens
augagaaaacaaugguagcauaauucauuacc

SEQ ID NO: 16787 - RNA, 32 nt, Homo Sapiens
uucauuuaacugugguuauuguuacaucuacu

SEQ ID NO: 16788 - RNA, 32 nt, Homo Sapiens
acugcaagcucugccucccgggcucaccccau

SEQ ID NO: 16789 - RNA, 32 nt, Homo Sapiens
ccuguuugaaagauuagcacaaaagucuugau

SEQ ID NO: 16790 - RNA, 32 nt, Homo Sapiens
gugauucugaugcacaugagaguuugagaacc

SEQ ID NO: 16791 - RNA, 32 nt, Homo Sapiens
gcccagugcccugagcgucuccauggccugcc

SEQ ID NO: 16792 - RNA, 32 nt, Homo Sapiens
ccacaguaaagaacaguuuuuauuguuuugua

SEQ ID NO: 16793 - RNA, 32 nt, Homo Sapiens
agccuuagcaacacugcucaccacaguauagc

SEQ ID NO: 16794 - RNA, 32 nt, Homo Sapiens
ucuaagauagaguacaugcaacaaagaucugu

SEQ ID NO: 16795 - RNA, 32 nt, Homo Sapiens
auguacccuaaaacuuaaaguauaauuuaaaa

SEQ ID NO: 16796 - RNA, 32 nt, Homo Sapiens
aaugucacagagcuacaaccauucacagacac

SEQ ID NO: 16797 - RNA, 32 nt, Homo Sapiens
gcaccgcucagguuucuggccaugugacuucg

SEQ ID NO: 16798 - RNA, 32 nt, Homo Sapiens
gauuuccuccaaguauuuucuccuuucugugu

SEQ ID NO: 16799 - RNA, 32 nt, Homo Sapiens
auuccaaaaauacaaacacuaguuguuccagc

SEQ ID NO: 16800 - RNA, 32 nt, Homo Sapiens
cucaguggaaaacuccaguuguaaugcauauu

SEQ ID NO: 16801 - RNA, 32 nt, Homo Sapiens
guggaagccacgacaggggucugugugaacag

SEQ ID NO: 16802 - RNA, 32 nt, Homo Sapiens
cacaccucagugggaagaaaaauaaaauuucc

SEQ ID NO: 16803 - RNA, 32 nt, Homo Sapiens
ucagaaaaccacuuuauugcaaugcggagguu

SEQ ID NO: 16804 - RNA, 32 nt, Homo Sapiens
caagagguuucauggucuuaaaaagauacuuu

SEQ ID NO: 16805 - RNA, 32 nt, Homo Sapiens
cagggaggaaccugggggaggggguggcccgu

SEQ ID NO: 16806 - RNA, 32 nt, Homo Sapiens
gaagggagcugacgggcgcccggccggcugcg

SEQ ID NO: 16807 - RNA, 32 nt, Homo Sapiens
agaauuuccuuccuuuuuaaggcuaaauaaua

SEQ ID NO: 16808 - RNA, 32 nt, Homo Sapiens
gucgcccacagugggcgugucuguaaauauug

SEQ ID NO: 16809 - RNA, 32 nt, Homo Sapiens
auguuacaaauaugcagaccguguuguuugcu

SEQ ID NO: 16810 - RNA, 32 nt, Homo Sapiens
ucucccaaguccacacaggggaggugauagca

SEQ ID NO: 16811 - RNA, 32 nt, Homo Sapiens
gacacccacagaauggucccucuucuccccaa

SEQ ID NO: 16812 - RNA, 32 nt, Homo Sapiens
guucauuuucuuaauggugucuuuugaauauu

SEQ ID NO: 16813 - RNA, 32 nt, Homo Sapiens
caggugaggggcaaaagaagggccaggccccc

SEQ ID NO: 16814 - RNA, 32 nt, Homo Sapiens
agaugcagaaaagguagacuggggccacuggg

SEQ ID NO: 16815 - RNA, 31 nt, Homo Sapiens
aaauuaacaaauucaguggacauuuguucug

SEQ ID NO: 16816 - RNA, 32 nt, Homo Sapiens
cugcugcugccucuaccugggguuugggcugg

SEQ ID NO: 16817 - RNA, 32 nt, Homo Sapiens
ccuuuuuaucccauaucccaaauucuuaugag

SEQ ID NO: 16818 - RNA, 32 nt, Homo Sapiens
ccugaaaauauuugugauccauaacucuacac

SEQ ID NO: 16819 - RNA, 32 nt, Homo Sapiens
cucagcugauguuuccugggaagugcuaauuu

SEQ ID NO: 16820 - RNA, 32 nt, Homo Sapiens
guuucaacucagcuuuuacaauaaaaaggauu

SEQ ID NO: 16821 - RNA, 32 nt, Homo Sapiens
ggaauuuggggauuauugucaguuuggagaau

SEQ ID NO: 16822 - RNA, 32 nt, Homo Sapiens
cagugaucuuggagugaugaugguaacugaug

SEQ ID NO: 16823 - RNA, 32 nt, Homo Sapiens
uugaauguucuucaaucuuauuacuaauccau

SEQ ID NO: 16824 - RNA, 32 nt, Homo Sapiens
uuguuuuuugguuuuuuuuuuuuuuuuuaaga

SEQ ID NO: 16825 - RNA, 31 nt, Homo Sapiens
ggcagccccugaguuaccagagccuggagag

SEQ ID NO: 16826 - RNA, 32 nt, Homo Sapiens
augucugucuguuucaacacaaugaagguaua

SEQ ID NO: 16827 - RNA, 32 nt, Homo Sapiens
accaagaagauaaugaugaauauccucaaaau

SEQ ID NO: 16828 - RNA, 32 nt, Homo Sapiens
auguauuuaaguggauugaauaacugagucua

SEQ ID NO: 16829 - RNA, 32 nt, Homo Sapiens
gauuuuagcaauacccaugucuacacagaugu

SEQ ID NO: 16830 - RNA, 32 nt, Homo Sapiens
uugagucccaugacuguuucucuuccucucuu

SEQ ID NO: 16831 - RNA, 32 nt, Homo Sapiens
aaacugccagcugccacuggcuuaucaggagc

SEQ ID NO: 16832 - RNA, 32 nt, Homo Sapiens
auaaaaagucaugagauccagaucugaccacc

SEQ ID NO: 16833 - RNA, 32 nt, Homo Sapiens
uuuuaacuauaauuuuaacugugauauaggca

SEQ ID NO: 16834 - RNA, 32 nt, Homo Sapiens
ggaggcucccagucccagcccgcggcccuccc

SEQ ID NO: 16835 - RNA, 32 nt, Homo Sapiens
ggaagugucccucuccagcccuggcccccaca

SEQ ID NO: 16836 - RNA, 32 nt, Homo Sapiens
uuaaugaauaaaaacugcuuggaugguuuacc

SEQ ID NO: 16837 - RNA, 32 nt, Homo Sapiens
gcagccugcccagcugaaucuuggcuucugga

SEQ ID NO: 16838 - RNA, 32 nt, Homo Sapiens
uggguuuggggaugaggcgccagccuggucag

SEQ ID NO: 16839 - RNA, 32 nt, Homo Sapiens
cuuguccucucccgcgaggccuggacacuuau

SEQ ID NO: 16840 - RNA, 32 nt, Homo Sapiens
uguaucuacaguguucauuggcuaucacacuu

SEQ ID NO: 16841 - RNA, 32 nt, Homo Sapiens
ugucuuauuuguuauuuuuuuauguuuuuuaa

SEQ ID NO: 16842 - RNA, 32 nt, Homo Sapiens
uucucccauggucauggcuucccggccccaug

SEQ ID NO: 16843 - RNA, 32 nt, Homo Sapiens
accagcgguuaccauggaggggaucaguauau

SEQ ID NO: 16844 - RNA, 32 nt, Homo Sapiens
uguagcuuuaaugauuuuuguuuucuaauagg

SEQ ID NO: 16845 - RNA, 32 nt, Homo Sapiens
uucccgaaaaggaugaagcuccagcugcaguu

SEQ ID NO: 16846 - RNA, 32 nt, Homo Sapiens
ugagaaaacugggcucagaaaaugaagucauu

SEQ ID NO: 16847 - RNA, 32 nt, Homo Sapiens
gcggaguucgcccgcuggcccccgaucaccau

SEQ ID NO: 16848 - RNA, 32 nt, Homo Sapiens
ggguuuuauaguggcuuucagauuuuugguag

SEQ ID NO: 16849 - RNA, 32 nt, Homo Sapiens
ucaacgcuaggcuggcgcagguccucgcggau

SEQ ID NO: 16850 - RNA, 32 nt, Homo Sapiens
aggaagccaagcccgguuccugcuacgcccca

SEQ ID NO: 16851 - RNA, 32 nt, Homo Sapiens
aucgccaccaucaccucuuucaauugccacuu

SEQ ID NO: 16852 - RNA, 32 nt, Homo Sapiens
guguccugguggauugguuucuguaaguucag

SEQ ID NO: 16853 - RNA, 32 nt, Homo Sapiens
cuguuugaaaaauuauuauuuuuuuacagauc

SEQ ID NO: 16854 - RNA, 32 nt, Homo Sapiens
aggggggaggggcugcugcggcagcugcagga

SEQ ID NO: 16855 - RNA, 32 nt, Homo Sapiens
aaguugcccucccucuccuggccuuacaagca

SEQ ID NO: 16856 - RNA, 32 nt, Homo Sapiens
uuuuaaccauugcuacuggaaaguaacagagu

SEQ ID NO: 16857 - RNA, 32 nt, Homo Sapiens
uuuugcugccagcugauuuugauugccagcuu

SEQ ID NO: 16858 - RNA, 32 nt, Homo Sapiens
uuggaagacaauuuaaugauggugaagaaaua

SEQ ID NO: 16859 - RNA, 32 nt, Homo Sapiens
uaaugaauuuaaagagaaagucauagguacuc

SEQ ID NO: 16860 - RNA, 32 nt, Homo Sapiens
uaacugaagaauguacaauaaaaacuagaaug

SEQ ID NO: 16861 - RNA, 32 nt, Homo Sapiens
aaagaugaaaauauuuguaucacaaaucuuaa

SEQ ID NO: 16862 - RNA, 32 nt, Homo Sapiens
uuucacguauuuuugcugaacucguaaaagag

SEQ ID NO: 16863 - RNA, 32 nt, Homo Sapiens
guuccguguagccauuuuauuuuuuaagaaac

SEQ ID NO: 16864 - RNA, 32 nt, Homo Sapiens
auaauaggauuuauauuaguacucauuaccau

SEQ ID NO: 16865 - RNA, 32 nt, Homo Sapiens
ucaauaaauaugugaauuuaugaauauuaggc

SEQ ID NO: 16866 - RNA, 32 nt, Homo Sapiens
gggccacagccugguccugccgcugcgcccgc

SEQ ID NO: 16867 - RNA, 32 nt, Homo Sapiens
ccacugggccuuccaacuuugcuggcaagcuc

SEQ ID NO: 16868 - RNA, 32 nt, Homo Sapiens
acgacagugagagugaaagagaaggugaauga

SEQ ID NO: 16869 - RNA, 32 nt, Homo Sapiens
ugacuuucugucugcugccuggugcuuuuaua

SEQ ID NO: 16870 - RNA, 32 nt, Homo Sapiens
ucaugggaacuaaaacucaaaccaucuuugag

SEQ ID NO: 16871 - RNA, 32 nt, Homo Sapiens
gagaaccaagauacaguucagaaccaaaggaa

SEQ ID NO: 16872 - RNA, 29 nt, Homo Sapiens
guggauccauuugcaggaaagcuauaagc

SEQ ID NO: 16873 - RNA, 32 nt, Homo Sapiens
ugugugccccucggugcucccccucccugaau

SEQ ID NO: 16874 - RNA, 32 nt, Homo Sapiens
agcuguggaggggcuccuggagucacugcaga

SEQ ID NO: 16875 - RNA, 32 nt, Homo Sapiens
uuuuucuugccauuuugagcugcagacaggcg

SEQ ID NO: 16876 - RNA, 32 nt, Homo Sapiens
uuuuccuuuccacaaucagagccauuuuuguu

SEQ ID NO: 16877 - RNA, 32 nt, Homo Sapiens
uccgccgcucgucgccuccccccggccaccag

SEQ ID NO: 16878 - RNA, 32 nt, Homo Sapiens
aucuucuaauguguuggagauuuucauuucaa

SEQ ID NO: 16879 - RNA, 32 nt, Homo Sapiens
aguagcagguugaggcaaguguagaaguuaca

SEQ ID NO: 16880 - RNA, 32 nt, Homo Sapiens
aacuaggcuggccgaggcccaggccccgcccg

SEQ ID NO: 16881 - RNA, 32 nt, Homo Sapiens
ggauucaggagcuuguccauuauuuguaggua

SEQ ID NO: 16882 - RNA, 32 nt, Homo Sapiens
acucaaaaaaauuuauaguagaaacguaauug

SEQ ID NO: 16883 - RNA, 32 nt, Homo Sapiens
cccucuucccuuugcccuucuccuccaauaca

SEQ ID NO: 16884 - RNA, 32 nt, Homo Sapiens
aaaagacuugcuccagucuccuccucaguucu

SEQ ID NO: 16885 - RNA, 32 nt, Homo Sapiens
cugggcugcccuggcaccuagcaaggcacacc

SEQ ID NO: 16886 - RNA, 32 nt, Homo Sapiens
gcccuguaauccuagcacuuugggagggugag

SEQ ID NO: 16887 - RNA, 32 nt, Homo Sapiens
aggcgaacaccgugcgcugcuccgcguccagg

SEQ ID NO: 16888 - RNA, 32 nt, Homo Sapiens
cucuccaggcccagcucuuccugccucccagu

SEQ ID NO: 16889 - RNA, 32 nt, Homo Sapiens
ccccagcccucggcugccucuuaacuuugggu

SEQ ID NO: 16890 - RNA, 32 nt, Homo Sapiens
gguggcggugguacuggaaaaacuacuuuggu

SEQ ID NO: 16891 - RNA, 32 nt, Homo Sapiens
gacggguggugggaaggcaggagccugggucc

SEQ ID NO: 16892 - RNA, 32 nt, Homo Sapiens
aacauguucucaauucauuuauauuauuauau

SEQ ID NO: 16893 - RNA, 32 nt, Homo Sapiens
cggcuggcgggcggggguacagggacggggca

SEQ ID NO: 16894 - RNA, 32 nt, Homo Sapiens
auucacagaaacauuggcagaacccaguuuua

SEQ ID NO: 16895 - RNA, 32 nt, Homo Sapiens
ccggcugccaggggcguccgguuacauccccg

SEQ ID NO: 16896 - RNA, 32 nt, Homo Sapiens
guugugcgcgcccuuagugcgcggaaccagcc

SEQ ID NO: 16897 - RNA, 32 nt, Homo Sapiens
uguaagcacuuuuacggggcggguggggaggg

SEQ ID NO: 16898 - RNA, 32 nt, Homo Sapiens
auauacuggcccucccuucucuucucuuugcu

SEQ ID NO: 16899 - RNA, 32 nt, Homo Sapiens
aucccacucuucugucaaguacacuuuacccu

SEQ ID NO: 16900 - RNA, 32 nt, Homo Sapiens
ccgaggcagacacccccaccccugccuccucc

SEQ ID NO: 16901 - RNA, 32 nt, Homo Sapiens
aagugauugcaaacaggcuggauuuggacaaa

SEQ ID NO: 16902 - RNA, 32 nt, Homo Sapiens
ggccccgacggaagccgagacugcgcuucgug

SEQ ID NO: 16903 - RNA, 32 nt, Homo Sapiens
ugaccucaggugaucugaccgccuuggccucc

SEQ ID NO: 16904 - RNA, 32 nt, Homo Sapiens
ugcaauauccuaacuuuuuuuuuugugauuau

SEQ ID NO: 16905 - RNA, 32 nt, Homo Sapiens
ggcacgugguuccaugaggaugugagcaguga

SEQ ID NO: 16906 - RNA, 32 nt, Homo Sapiens
aauuuuccuugacguccaagaguuugagagcg

SEQ ID NO: 16907 - RNA, 32 nt, Homo Sapiens
guuuucuagugacucauaaaauaagauuuccu

SEQ ID NO: 16908 - RNA, 32 nt, Homo Sapiens
ucuaagaaucauaaguuuuucaaacuuuagaa

SEQ ID NO: 16909 - RNA, 32 nt, Homo Sapiens
uuuaagcuuugugaaagaaugugcuuugauuc

SEQ ID NO: 16910 - RNA, 32 nt, Homo Sapiens
acucagagaagcugcccuuggcugcucguagc

SEQ ID NO: 16911 - RNA, 32 nt, Homo Sapiens
uguuaagcaaggaaaaacaaacaauacauuga

SEQ ID NO: 16912 - RNA, 32 nt, Homo Sapiens
acaugccuuccucccccuauuccacccccaag

SEQ ID NO: 16913 - RNA, 30 nt, Homo Sapiens
aggaaaauuuuuacuuuccaucuuaaugua

SEQ ID NO: 16914 - RNA, 32 nt, Homo Sapiens
uacccagagcauuacgugagccagguaaugag

SEQ ID NO: 16915 - RNA, 32 nt, Homo Sapiens
gccgggccgggcgcgguggcucacgccuguaa

SEQ ID NO: 16916 - RNA, 32 nt, Homo Sapiens
aguccuaauuuucucucccuguuaugagcaau

SEQ ID NO: 16917 - RNA, 32 nt, Homo Sapiens
augccagggcgccgcgaggcccggggcuagcg

SEQ ID NO: 16918 - RNA, 27 nt, Homo Sapiens
auuuuguccuucuaagcuucugaugca

SEQ ID NO: 16919 - RNA, 32 nt, Homo Sapiens
agacagagggauuuggacaagaaugauguggc

SEQ ID NO: 16920 - RNA, 32 nt, Homo Sapiens
caucuggccuucauccuucucccuuuauuguc

SEQ ID NO: 16921 - RNA, 32 nt, Homo Sapiens
gaggcacuguagcagcugcugcuguugcugcg

SEQ ID NO: 16922 - RNA, 32 nt, Homo Sapiens
uuggggaggugauuaggucaugaggguggaau

SEQ ID NO: 16923 - RNA, 32 nt, Homo Sapiens
ucccuaugguugacaaggugucuugcucauaa

SEQ ID NO: 16924 - RNA, 32 nt, Homo Sapiens
cuugcgcgccgacgccgccgcucgcuugugaa

SEQ ID NO: 16925 - RNA, 32 nt, Homo Sapiens
ggaggaggggagaaguaacugcagcggcagcg

SEQ ID NO: 16926 - RNA, 29 nt, Homo Sapiens
uuaaaugguuuguaaccaauguuugauuu

SEQ ID NO: 16927 - RNA, 32 nt, Homo Sapiens
auugcgaagaaucgauaacauuucaagaagug

SEQ ID NO: 16928 - RNA, 32 nt, Homo Sapiens
uuuuauucucaacagguguaaaacaggcagag

SEQ ID NO: 16929 - RNA, 32 nt, Homo Sapiens
cauugacuauacauuugcuacuggugauucag

SEQ ID NO: 16930 - RNA, 32 nt, Homo Sapiens
agagggaaccgcggccggcaggccggaccgcu

SEQ ID NO: 16931 - RNA, 32 nt, Homo Sapiens
cgucgcagcugcgggugaacgcggcguuugcc

SEQ ID NO: 16932 - RNA, 32 nt, Homo Sapiens
gcaagggugcaaagggggaagaacuaggggcu

SEQ ID NO: 16933 - RNA, 32 nt, Homo Sapiens
aguggggaguauuugaacacaguugaauuuuu

SEQ ID NO: 16934 - RNA, 32 nt, Homo Sapiens
uguaccuuguauaaacaaaauaaaacaucuau

SEQ ID NO: 16935 - RNA, 32 nt, Homo Sapiens
acguuauaugauugguuaaacucuguaagccc

SEQ ID NO: 16936 - RNA, 32 nt, Homo Sapiens
gcugggaccaaaguugaguccuggaaagggag

SEQ ID NO: 16937 - RNA, 32 nt, Homo Sapiens
uaaggaauuugaagauugccuccaucauuugu

SEQ ID NO: 16938 - RNA, 32 nt, Homo Sapiens
aggccccaaggucuccuucuuggggucacaaa

SEQ ID NO: 16939 - RNA, 32 nt, Homo Sapiens
gugguuuccuuuuuccacggagguucaauaga

SEQ ID NO: 16940 - RNA, 32 nt, Homo Sapiens
gaucuguuugcaagacggugucauggagccuu

SEQ ID NO: 16941 - RNA, 32 nt, Homo Sapiens
caccaccucuacuauucaggaggccuaaaauu

SEQ ID NO: 16942 - RNA, 32 nt, Homo Sapiens
caauuaacaaaguaggaaguugagcacaaccu

SEQ ID NO: 16943 - RNA, 32 nt, Homo Sapiens
uggcacuauuguaauggaaauaaaauacuugu

SEQ ID NO: 16944 - RNA, 32 nt, Homo Sapiens
acuaagauuuguaauauuucucucuuuuuaga

SEQ ID NO: 16945 - RNA, 32 nt, Homo Sapiens
gucuugagcugagacgcuuugaaagccagggu

SEQ ID NO: 16946 - RNA, 32 nt, Homo Sapiens
gaauguauguaauuuuccuguuuauuguacau

SEQ ID NO: 16947 - RNA, 32 nt, Homo Sapiens
cgcugcucucuccaggucccgccgcgccaguu

SEQ ID NO: 16948 - RNA, 32 nt, Homo Sapiens
ccucacucaccccacccuccccaauuccagcc

SEQ ID NO: 16949 - RNA, 32 nt, Homo Sapiens
aagcuggauccgaguagauucccuagggcuug

SEQ ID NO: 16950 - RNA, 32 nt, Homo Sapiens
uacuaguucuaaaaauaauuuucauuacagaa

SEQ ID NO: 16951 - RNA, 32 nt, Homo Sapiens
uaggccuccuuaaagagaaggaucuaaauuag

SEQ ID NO: 16952 - RNA, 32 nt, Homo Sapiens
gggcuguggacuucggacucgggccuggagac

SEQ ID NO: 16953 - RNA, 32 nt, Homo Sapiens
uaccccggcccgacgcucggcccgcgaccugc

SEQ ID NO: 16954 - RNA, 32 nt, Homo Sapiens
gggcagggagacggagucucgaucugucaccc

SEQ ID NO: 16955 - RNA, 31 nt, Homo Sapiens
aaauauuugugcuguuucuguaugagauuga

SEQ ID NO: 16956 - RNA, 32 nt, Homo Sapiens
cgaccaccuugccgcuuuucaucacaagcuug

SEQ ID NO: 16957 - RNA, 32 nt, Homo Sapiens
ccgugaggagcagccagcgggaggcggcggcg

SEQ ID NO: 16958 - RNA, 32 nt, Homo Sapiens
uggaagaggcgagagggagagcgugcgcgaga

SEQ ID NO: 16959 - RNA, 32 nt, Homo Sapiens
gauauagaggacuuaaaauaugcugcuuuugg

SEQ ID NO: 16960 - RNA, 32 nt, Homo Sapiens
aagcauguuuuaacagguuuuucuuuucuuuu

SEQ ID NO: 16961 - RNA, 32 nt, Homo Sapiens
ggaucguguugguauuuucagagaacaucccg

SEQ ID NO: 16962 - RNA, 32 nt, Homo Sapiens
ucagguacaaggaaaugguagaacuagugauc

SEQ ID NO: 16963 - RNA, 32 nt, Homo Sapiens
gcucagcugagcauagagacagcaguuuccag

SEQ ID NO: 16964 - RNA, 32 nt, Homo Sapiens
gugauucaagaugcccaaaaaugauggauaga

SEQ ID NO: 16965 - RNA, 32 nt, Homo Sapiens
auugguaaugaaagguugguuuuugaaacuug

SEQ ID NO: 16966 - RNA, 32 nt, Homo Sapiens
aauaaaauggcggcgccggcggcgugaccggg

SEQ ID NO: 16967 - RNA, 32 nt, Homo Sapiens
gcggcgaggcggacccgcacaguacuguaaga

SEQ ID NO: 16968 - RNA, 32 nt, Homo Sapiens
aauagucuuuuuguuguuguuguuaugugugu

SEQ ID NO: 16969 - RNA, 32 nt, Homo Sapiens
acaguuguuaaugaguaauugccguuaaaaua

SEQ ID NO: 16970 - RNA, 32 nt, Homo Sapiens
guuaaagcugucuauuuggagaaugcuggaaa

SEQ ID NO: 16971 - RNA, 32 nt, Homo Sapiens
cuugcuuucuucaugcccuccccacugcuccu

SEQ ID NO: 16972 - RNA, 32 nt, Homo Sapiens
aaugaaacuguggcaacgucagcgcuugaggc

SEQ ID NO: 16973 - RNA, 32 nt, Homo Sapiens
uugucuaggaauguaaaagugauucuaaacua

SEQ ID NO: 16974 - RNA, 32 nt, Homo Sapiens
uuccuuguguccucgggcagauugcucagcca

SEQ ID NO: 16975 - RNA, 32 nt, Homo Sapiens
ggaaggaagauaagaacagaugagucagaggu

SEQ ID NO: 16976 - RNA, 32 nt, Homo Sapiens
cacauacaaaaauguaaauauuuaauuuucua

SEQ ID NO: 16977 - RNA, 32 nt, Homo Sapiens
accggggagccggggugcuuggagcgggggac

SEQ ID NO: 16978 - RNA, 32 nt, Homo Sapiens
ggugguuuuaaaucauuaauuuguauaaagaa

SEQ ID NO: 16979 - RNA, 32 nt, Homo Sapiens
gccagcugccagcaccgcuacagaucacagag

SEQ ID NO: 16980 - RNA, 32 nt, Homo Sapiens
cuucacuccagccugggugacggagugagacu

SEQ ID NO: 16981 - RNA, 32 nt, Homo Sapiens
agucuuuuuagugcccucugcucucagucuug

SEQ ID NO: 16982 - RNA, 32 nt, Homo Sapiens
ccgagccgggggugggggcucgaggcgccucc

SEQ ID NO: 16983 - RNA, 32 nt, Homo Sapiens
cuugugcccugcuccaggaucuucacaaggcu

SEQ ID NO: 16984 - RNA, 32 nt, Homo Sapiens
ccuuuguaaccuuuauacuguaaauaaaaaag

SEQ ID NO: 16985 - RNA, 32 nt, Homo Sapiens
ugagauaaaaauuugguucugggaaacugaaa

SEQ ID NO: 16986 - RNA, 32 nt, Homo Sapiens
caggguucuuuucucuacgugucauguuaaaa

SEQ ID NO: 16987 - RNA, 32 nt, Homo Sapiens
cugucuccugugaugagccacccauuguggac

SEQ ID NO: 16988 - RNA, 32 nt, Homo Sapiens
ggugugucugucgggcagccgacggugccugu

SEQ ID NO: 16989 - RNA, 32 nt, Homo Sapiens
caauugcacugcuccacagagcccucauauaa

SEQ ID NO: 16990 - RNA, 32 nt, Homo Sapiens
aguuaaguaucacugauguggguugagaccag

SEQ ID NO: 16991 - RNA, 32 nt, Homo Sapiens
gauuuaauacccuggagaaaaccacaggaaau

SEQ ID NO: 16992 - RNA, 32 nt, Homo Sapiens
gagcagaggcauuuaucuccauguuaacaagc

SEQ ID NO: 16993 - RNA, 32 nt, Homo Sapiens
cccauuuugaaauguaauuauuucauacuuuc

SEQ ID NO: 16994 - RNA, 32 nt, Homo Sapiens
auaaguagugaacacacauguuauuuacuuca

SEQ ID NO: 16995 - RNA, 32 nt, Homo Sapiens
cccucaaauuguagucucugucggcuucugca

SEQ ID NO: 16996 - RNA, 32 nt, Homo Sapiens
cauugcuggagaaugaagugcaaaugccacug

SEQ ID NO: 16997 - RNA, 32 nt, Homo Sapiens
uacagaagccggcaacgcuugcuauuuauuuu

SEQ ID NO: 16998 - RNA, 32 nt, Homo Sapiens
uauacuuccaugaaagggcuaauacgaugcau

SEQ ID NO: 16999 - RNA, 32 nt, Homo Sapiens
gggcagccacgugcucucuggaggaagugaua

SEQ ID NO: 17000 - RNA, 32 nt, Homo Sapiens
aaauuguauuacaaauccaaugaaaugaguuu

SEQ ID NO: 17001 - RNA, 32 nt, Homo Sapiens
agcgacgagcgcggcugcggagggcccugcgc

SEQ ID NO: 17002 - RNA, 32 nt, Homo Sapiens
auaugaucuuucaggaggaaaacccaggcguu

SEQ ID NO: 17003 - RNA, 32 nt, Homo Sapiens
guuugcauauaaauaacaugaucauaggcaag

SEQ ID NO: 17004 - RNA, 32 nt, Homo Sapiens
gccagggggucuaucucauaccucuggggaca

SEQ ID NO: 17005 - RNA, 32 nt, Homo Sapiens
auuuuagauaauguaaauuuagaggaauguac

SEQ ID NO: 17006 - RNA, 32 nt, Homo Sapiens
auuaaaaacaacaaaaaaguggcacaugucca

SEQ ID NO: 17007 - RNA, 32 nt, Homo Sapiens
gggcccggaccauggggugcugcccgggggac

SEQ ID NO: 17008 - RNA, 32 nt, Homo Sapiens
guaucuuuucuccuccucccuaguguuccucc

SEQ ID NO: 17009 - RNA, 32 nt, Homo Sapiens
cccaaagcuuccacccuucuccccucagagag

SEQ ID NO: 17010 - RNA, 32 nt, Homo Sapiens
agccggccggcggaagaaccuagagcgcgcug

SEQ ID NO: 17011 - RNA, 32 nt, Homo Sapiens
gauuuggguugauguauuuuacuauuaguucu

SEQ ID NO: 17012 - RNA, 28 nt, Homo Sapiens
auagugaaagauucaaauuugcuuuuca

SEQ ID NO: 17013 - RNA, 32 nt, Homo Sapiens
aaaugguuuagaguuuuacuguaacuaugaau

SEQ ID NO: 17014 - RNA, 32 nt, Homo Sapiens
ccaggcagaaaagaggcaggcugcagggaagu

SEQ ID NO: 17015 - RNA, 32 nt, Homo Sapiens
aggagacgcucucuccacggcuuccggauggg

SEQ ID NO: 17016 - RNA, 32 nt, Homo Sapiens
agccaccggaggcugcaaggauguggguucuu

SEQ ID NO: 17017 - RNA, 32 nt, Homo Sapiens
caagggaaagugggcugcugagagcauagcca

SEQ ID NO: 17018 - RNA, 32 nt, Homo Sapiens
ccugagcccucccacggcccaucgucccgggu

SEQ ID NO: 17019 - RNA, 32 nt, Homo Sapiens
gacaaaaagaagcagcagcaguaucuuguucu

SEQ ID NO: 17020 - RNA, 32 nt, Homo Sapiens
cucaggcuccagccacugcagucuuuucccau

SEQ ID NO: 17021 - RNA, 31 nt, Homo Sapiens
cgguuccagcgcagugcgcguuagccauguc

SEQ ID NO: 17022 - RNA, 32 nt, Homo Sapiens
cuugguuccagaugggugguccagcuauucug

SEQ ID NO: 17023 - RNA, 32 nt, Homo Sapiens
uuaauuuugauaccucuuuaugacuuaacaau

SEQ ID NO: 17024 - RNA, 29 nt, Homo Sapiens
cuccuuuggggacagaguaggagcguaac

SEQ ID NO: 17025 - RNA, 32 nt, Homo Sapiens
gaggcuuccuaagucagaccucuugucuaaau

SEQ ID NO: 17026 - RNA, 32 nt, Homo Sapiens
acaguccagugugaggggagcggcgcuaagag

SEQ ID NO: 17027 - RNA, 32 nt, Homo Sapiens
uggggaaccugaucaucauccuggacgucagc

SEQ ID NO: 17028 - RNA, 32 nt, Homo Sapiens
gugacuguucuuccagaccagaguuugaugcc

SEQ ID NO: 17029 - RNA, 32 nt, Homo Sapiens
auagaaccaacccaaaugcccaucaauugaua

SEQ ID NO: 17030 - RNA, 32 nt, Homo Sapiens
gccucgcgggguuggauuuaugcugaccugcu

SEQ ID NO: 17031 - RNA, 32 nt, Homo Sapiens
cugaaaccaccuuguuaccuuucauuuuguua

SEQ ID NO: 17032 - RNA, 32 nt, Homo Sapiens
ccugauuuuuaaaauucaguuauuuauuccca

SEQ ID NO: 17033 - RNA, 32 nt, Homo Sapiens
auuucccuagcuaucaucuccugacuuaaugu

SEQ ID NO: 17034 - RNA, 32 nt, Homo Sapiens
cccacauuuuaacuuuuaaacuucugaauaaa

SEQ ID NO: 17035 - RNA, 32 nt, Homo Sapiens
ggcugcagccgcccuccgcgcucgccugccag

SEQ ID NO: 17036 - RNA, 32 nt, Homo Sapiens
uucucgcgcgcgagccacgcgggggacaaguc

SEQ ID NO: 17037 - RNA, 32 nt, Homo Sapiens
acacuaaacucuucuugcuuuugcauuauaag

SEQ ID NO: 17038 - RNA, 32 nt, Homo Sapiens
aaggcaaauccauggaugagaagugcaauggg

SEQ ID NO: 17039 - RNA, 32 nt, Homo Sapiens
cgaccgcucccggcccgcccccuaugggcccc

SEQ ID NO: 17040 - RNA, 32 nt, Homo Sapiens
cggagucgccgggagcugccaggcuguccgcg

SEQ ID NO: 17041 - RNA, 29 nt, Homo Sapiens
aaggcucuuauucaauaccacguuccgag

SEQ ID NO: 17042 - RNA, 32 nt, Homo Sapiens
uauuaagaguuguugggaauuuuuguacaaug

SEQ ID NO: 17043 - RNA, 32 nt, Homo Sapiens
gcaaacccuauuuucagcuacuauuugaauau

SEQ ID NO: 17044 - RNA, 32 nt, Homo Sapiens
acgccgcgcucgcuccucccucccuccucccg

SEQ ID NO: 17045 - RNA, 32 nt, Homo Sapiens
cccagacaccagccagacccaggcugcaggcc

SEQ ID NO: 17046 - RNA, 32 nt, Homo Sapiens
ccugccgccuggagccucggcuccucgcaguc

SEQ ID NO: 17047 - RNA, 32 nt, Homo Sapiens
aaacagucucaguggaauguuucauauuaccc

SEQ ID NO: 17048 - RNA, 32 nt, Homo Sapiens
ggaaauugaagaacuaauguaaauuucacaag

SEQ ID NO: 17049 - RNA, 32 nt, Homo Sapiens
agugaccucccaaaccagccugccuggucacu

SEQ ID NO: 17050 - RNA, 32 nt, Homo Sapiens
aagcaguguguugaacuuucuaaucucauccc

SEQ ID NO: 17051 - RNA, 32 nt, Homo Sapiens
cugcaucugaagauuggcacuggucacccuga

SEQ ID NO: 17052 - RNA, 32 nt, Homo Sapiens
uucccuucuaguuuugagagacuuccucuugg

SEQ ID NO: 17053 - RNA, 29 nt, Homo Sapiens
gucauuuaguguaggugaaagcagcccug

SEQ ID NO: 17054 - RNA, 31 nt, Homo Sapiens
uccgaaacaaguagaaaagugcuguuugagg

SEQ ID NO: 17055 - RNA, 32 nt, Homo Sapiens
cugagaagcuagucuguuuaaaacaggaaguu

SEQ ID NO: 17056 - RNA, 32 nt, Homo Sapiens
ugguggcaugcuggugguggcgggugcuggug

SEQ ID NO: 17057 - RNA, 30 nt, Homo Sapiens
ggacagcgcgcgccgccgcaguagcugggg

SEQ ID NO: 17058 - RNA, 32 nt, Homo Sapiens
ucccaggggcacagcucuaggcugggagggga

SEQ ID NO: 17059 - RNA, 32 nt, Homo Sapiens
cuuucugcucccucauucucuccccaccacuc

SEQ ID NO: 17060 - RNA, 32 nt, Homo Sapiens
cuacuaaaaaauacaaaaaauuagccgggugu

SEQ ID NO: 17061 - RNA, 30 nt, Homo Sapiens
aggcucuggguccaugccuaacucuguacc

SEQ ID NO: 17062 - RNA, 32 nt, Homo Sapiens
ccgcccaccugccucgucucccuggggaggug

SEQ ID NO: 17063 - RNA, 32 nt, Homo Sapiens
acgaucuggauuuuaaaugugugguauucauu

SEQ ID NO: 17064 - RNA, 32 nt, Homo Sapiens
ugcagggaacggggcggggaggcgacaguccc

SEQ ID NO: 17065 - RNA, 32 nt, Homo Sapiens
uauggacagaaagccuguguggcauuucugga

SEQ ID NO: 17066 - RNA, 32 nt, Homo Sapiens
aaggacccaucaaugauggugacuuuagcaga

SEQ ID NO: 17067 - RNA, 32 nt, Homo Sapiens
cugaacuuggguuucaugccugccccccacaa

SEQ ID NO: 17068 - RNA, 32 nt, Homo Sapiens
aaaaauuuacuuuuauugauguguacucuucc

SEQ ID NO: 17069 - RNA, 32 nt, Homo Sapiens
ucaccgagaacucagcagcugccaccgcagcu

SEQ ID NO: 17070 - RNA, 32 nt, Homo Sapiens
ccauguuguaaauaccccuggggccauggugg

SEQ ID NO: 17071 - RNA, 32 nt, Homo Sapiens
aaacccauuuaauuuuuguagcuuacaggugg

SEQ ID NO: 17072 - RNA, 32 nt, Homo Sapiens
gcggacgugagggccacugguccccaacaaug

SEQ ID NO: 17073 - RNA, 32 nt, Homo Sapiens
cuuuuuaguuuagggauaaauauauauuuuuu

SEQ ID NO: 17074 - RNA, 32 nt, Homo Sapiens
cugacaguccagugucgcaauuuuggaaggca

SEQ ID NO: 17075 - RNA, 32 nt, Homo Sapiens
uguagauuuuauuuuuaauuuaucucugugac

SEQ ID NO: 17076 - RNA, 32 nt, Homo Sapiens
ucagacuuucccuuuuccggccagcuuccugg

SEQ ID NO: 17077 - RNA, 32 nt, Homo Sapiens
cuggauugacuauaacuuaagugcugauugug

SEQ ID NO: 17078 - RNA, 32 nt, Homo Sapiens
agucguguugauaaugugaaccacugauaugu

SEQ ID NO: 17079 - RNA, 32 nt, Homo Sapiens
ugcacaugggccgcaaaacacacagucaggcu

SEQ ID NO: 17080 - RNA, 31 nt, Homo Sapiens
aaccaggcuacuucgaaccaggaaagccaga

SEQ ID NO: 17081 - RNA, 32 nt, Homo Sapiens
cucguccgucugucucgaugccugauucggac

SEQ ID NO: 17082 - RNA, 32 nt, Homo Sapiens
caucaagcacuucccaggaucugcuccaacag

SEQ ID NO: 17083 - RNA, 32 nt, Homo Sapiens
aagucagguuucacaagaaaauuuucaaguuu

SEQ ID NO: 17084 - RNA, 32 nt, Homo Sapiens
auggucccuggggugucuggcucauccccauc

SEQ ID NO: 17085 - RNA, 32 nt, Homo Sapiens
aaauaaucuauuuuuguuucuuuucauuugaa

SEQ ID NO: 17086 - RNA, 32 nt, Homo Sapiens
guguuuuccccucccugagccaggguccaggu

SEQ ID NO: 17087 - RNA, 32 nt, Homo Sapiens
agugggaugaacugggggacaggucugcgcug

SEQ ID NO: 17088 - RNA, 32 nt, Homo Sapiens
auuccauguucccugcuucguuaucuacucgu

SEQ ID NO: 17089 - RNA, 32 nt, Homo Sapiens
uuuauacuguuuuuuaucuuuaauguugucac

SEQ ID NO: 17090 - RNA, 32 nt, Homo Sapiens
ugggucucccccagcccucccuccuggcgggu

SEQ ID NO: 17091 - RNA, 32 nt, Homo Sapiens
accuagaaaaauacagugaccuuugagcauac

SEQ ID NO: 17092 - RNA, 32 nt, Homo Sapiens
aucuuugugaaugaagcaaccauucugauguu

SEQ ID NO: 17093 - RNA, 32 nt, Homo Sapiens
aacuuaaauauuugaaaauuaccuuuaaugca

SEQ ID NO: 17094 - RNA, 32 nt, Homo Sapiens
cacugaagcuccagcccuuccuggcgcccugg

SEQ ID NO: 17095 - RNA, 32 nt, Homo Sapiens
gugaaucaguuauauccaauaauagcuucaaa

SEQ ID NO: 17096 - RNA, 32 nt, Homo Sapiens
gccugggacuucccuuaggcaguaaacaaaua

SEQ ID NO: 17097 - RNA, 32 nt, Homo Sapiens
cauuucuccucugugcggccuccagcugagcc

SEQ ID NO: 17098 - RNA, 32 nt, Homo Sapiens
uucugguuucacaggcuucagcucauggguuc

SEQ ID NO: 17099 - RNA, 32 nt, Homo Sapiens
uauagcagcaaccugguucuuaaacacaaagu

SEQ ID NO: 17100 - RNA, 32 nt, Homo Sapiens
ccgccgggugcgcggcuucgccgcccgagguc

SEQ ID NO: 17101 - RNA, 32 nt, Homo Sapiens
cggccuuuaauucuguuuugccugcuauagua

SEQ ID NO: 17102 - RNA, 32 nt, Homo Sapiens
ccccagcucccucugcccugcuggucauuucu

SEQ ID NO: 17103 - RNA, 32 nt, Homo Sapiens
gcggcggcggcagcugcagcagcagcagcccc

SEQ ID NO: 17104 - RNA, 32 nt, Homo Sapiens
auaaagagauuuucaugguuuauaaaaaucuu

SEQ ID NO: 17105 - RNA, 32 nt, Homo Sapiens
uagcagacguucugaugcucaguguaugugcu

SEQ ID NO: 17106 - RNA, 29 nt, Homo Sapiens
cuguuguaaaguuuauuacuuuauguaca

SEQ ID NO: 17107 - RNA, 32 nt, Homo Sapiens
ggagacugagcugggugcacuggccauacccu

SEQ ID NO: 17108 - RNA, 32 nt, Homo Sapiens
cgcggggucucuccugagugcgagcuacggga

SEQ ID NO: 17109 - RNA, 32 nt, Homo Sapiens
aguccccaucacguggcaagccaggcgaggcg

SEQ ID NO: 17110 - RNA, 32 nt, Homo Sapiens
uuacuuugauaugcuuuuacuucuuucuuaug

SEQ ID NO: 17111 - RNA, 27 nt, Homo Sapiens
ugcuuguccuucuuaggucgccauucc

SEQ ID NO: 17112 - RNA, 29 nt, Homo Sapiens
ugaagcauuacaaggucuauaaggauuuc

SEQ ID NO: 17113 - RNA, 32 nt, Homo Sapiens
gagacucaucugccacuaaccaaagacaggca

SEQ ID NO: 17114 - RNA, 32 nt, Homo Sapiens
cuuaaugggaugaaaaccugaauucaugucua

SEQ ID NO: 17115 - RNA, 32 nt, Homo Sapiens
caggggcaccucugguggggcagaaggugauu

SEQ ID NO: 17116 - RNA, 32 nt, Homo Sapiens
auagaacuguauauuuauuuugaaagaaaugu

SEQ ID NO: 17117 - RNA, 32 nt, Homo Sapiens
accuuuuagccaaacaccaacuucuguuucca

SEQ ID NO: 17118 - RNA, 32 nt, Homo Sapiens
cauaagaaagagaaaauauauuuacuauucau

SEQ ID NO: 17119 - RNA, 32 nt, Homo Sapiens
cccccugcuuuggccauggcucuucuuguccu

SEQ ID NO: 17120 - RNA, 32 nt, Homo Sapiens
gauuugugggaugguggcaggggugugggguc

SEQ ID NO: 17121 - RNA, 32 nt, Homo Sapiens
gaaauaaguaugaauauuaauaaaauagcauu

SEQ ID NO: 17122 - RNA, 32 nt, Homo Sapiens
ugcagugcggccugagguuacgggagaaaaaa

SEQ ID NO: 17123 - RNA, 32 nt, Homo Sapiens
aauuaucagggauggcucuuugccaugggucu

SEQ ID NO: 17124 - RNA, 32 nt, Homo Sapiens
agcucugucaucugcggggcuucuggguggcu

SEQ ID NO: 17125 - RNA, 32 nt, Homo Sapiens
gcauaucgaaggaguaagcugcaggucagccu

SEQ ID NO: 17126 - RNA, 32 nt, Homo Sapiens
uaaauuugugucuauuggggugggaaggggag

SEQ ID NO: 17127 - RNA, 32 nt, Homo Sapiens
aauggaacccaaacagaagagaauaaagccuu

SEQ ID NO: 17128 - RNA, 32 nt, Homo Sapiens
ggccggggccgcuggggcgcgcacaguggggu

SEQ ID NO: 17129 - RNA, 32 nt, Homo Sapiens
gucuugggaugaugaagaacuucaggauagag

SEQ ID NO: 17130 - RNA, 32 nt, Homo Sapiens
uaucuccuaguguuuaaauuuggcaguuacuc

SEQ ID NO: 17131 - RNA, 32 nt, Homo Sapiens
acaggucaugugacugggugucgggcacgguu

SEQ ID NO: 17132 - RNA, 32 nt, Homo Sapiens
cuuuugcuuccacuuguuuccuuggagauguu

SEQ ID NO: 17133 - RNA, 32 nt, Homo Sapiens
cccgggggagaugcaacggcucuccuuugccc

SEQ ID NO: 17134 - RNA, 32 nt, Homo Sapiens
cugaccgccggggggugcccccgggacguagc

SEQ ID NO: 17135 - RNA, 32 nt, Homo Sapiens
gccauguguuuccaugacucauuuuucaggac

SEQ ID NO: 17136 - RNA, 32 nt, Homo Sapiens
caagugaucugccugccuuggucucccaauac

SEQ ID NO: 17137 - RNA, 32 nt, Homo Sapiens
aaguaugaguuuuuuguuguuuuuguuuuacu

SEQ ID NO: 17138 - RNA, 32 nt, Homo Sapiens
ucuaccauuucccacuacgggcaccuaaaaga

SEQ ID NO: 17139 - RNA, 32 nt, Homo Sapiens
cccaguccgucaggaauuuuguagaagggcuu

SEQ ID NO: 17140 - RNA, 32 nt, Homo Sapiens
uacaaaauuuguaguuaaauuugacuacaauu

SEQ ID NO: 17141 - RNA, 32 nt, Homo Sapiens
uucuaaaaagacugaggccuccuucaagguug

SEQ ID NO: 17142 - RNA, 32 nt, Homo Sapiens
agggcacuuguaaaaauguuucuauaaauaug

SEQ ID NO: 17143 - RNA, 32 nt, Homo Sapiens
cgcagggccaaggggugcuugcgccacccacg

SEQ ID NO: 17144 - RNA, 32 nt, Homo Sapiens
uuuguugcauuacugauuaaaguucaguauuu

SEQ ID NO: 17145 - RNA, 32 nt, Homo Sapiens
agggcggccgcucgcgaucuagaacuagucgu

SEQ ID NO: 17146 - RNA, 32 nt, Homo Sapiens
acggcaagggccagccuguuuccucccgguca

SEQ ID NO: 17147 - RNA, 32 nt, Homo Sapiens
aucgguggcaugcccaguggcuuugggggcaa

SEQ ID NO: 17148 - RNA, 32 nt, Homo Sapiens
uugugagccaaaauaaaugucuuuucuuuaua

SEQ ID NO: 17149 - RNA, 32 nt, Homo Sapiens
gcaacaaacuauggggaauucuguaaaaacau

SEQ ID NO: 17150 - RNA, 32 nt, Homo Sapiens
gcuuuguuauuuauaauagaaagcuaaauuuu

SEQ ID NO: 17151 - RNA, 32 nt, Homo Sapiens
aaaaaauguggcaggauuuuuaccaaugcuca

SEQ ID NO: 17152 - RNA, 32 nt, Homo Sapiens
agaccaugguccugggguuccugcuggucuuc

SEQ ID NO: 17153 - RNA, 32 nt, Homo Sapiens
agggugcucagguggugggugcucagggcccu

SEQ ID NO: 17154 - RNA, 32 nt, Homo Sapiens
guuaauagaaaauauauuugcauaauaugcau

SEQ ID NO: 17155 - RNA, 32 nt, Homo Sapiens
guucuggaggguggagagagacaccaguguuu

SEQ ID NO: 17156 - RNA, 32 nt, Homo Sapiens
ucagauaguauacucuccuguuuggagacaga

SEQ ID NO: 17157 - RNA, 32 nt, Homo Sapiens
cagacccuccugcugccaccaccacccagguc

SEQ ID NO: 17158 - RNA, 32 nt, Homo Sapiens
cagcagaggugugacgggaggcuggggagaga

SEQ ID NO: 17159 - RNA, 32 nt, Homo Sapiens
gcccauuuauuuccaaccccaacagacacuga

SEQ ID NO: 17160 - RNA, 32 nt, Homo Sapiens
aucaauaacuguucuuguuuuguuuauuuuug

SEQ ID NO: 17161 - RNA, 32 nt, Homo Sapiens
auucuggagaaaaccaauggucagcacuuuug

SEQ ID NO: 17162 - RNA, 32 nt, Homo Sapiens
agggaucacguggcaaaagagcauguacaugg

SEQ ID NO: 17163 - RNA, 28 nt, Homo Sapiens
aucuuacaagauguucauuugaauuucu

SEQ ID NO: 17164 - RNA, 32 nt, Homo Sapiens
agcggcaggagcgggacugggagcacgggcug

SEQ ID NO: 17165 - RNA, 28 nt, Homo Sapiens
guguggugggcuaccagguagggcuaga

SEQ ID NO: 17166 - RNA, 32 nt, Homo Sapiens
uuuugguccacuuuuccaguauuuuaguggac

SEQ ID NO: 17167 - RNA, 32 nt, Homo Sapiens
caguugugcaggagguagccuggugguuuuca

SEQ ID NO: 17168 - RNA, 32 nt, Homo Sapiens
ucucuuaagaaaaugaugcuggucaucccagc

SEQ ID NO: 17169 - RNA, 32 nt, Homo Sapiens
uuuaugauaauaacagagaugaaaauggacuu

SEQ ID NO: 17170 - RNA, 32 nt, Homo Sapiens
aacaaggaaauauuuagaauuuguucacaauu

SEQ ID NO: 17171 - RNA, 32 nt, Homo Sapiens
caggccugcuccagguuaaacuggacggaagg

SEQ ID NO: 17172 - RNA, 32 nt, Homo Sapiens
agcuuggggaugcagccagcuggccugcacug

SEQ ID NO: 17173 - RNA, 32 nt, Homo Sapiens
guuggccugaggguccuuggugccgcgggaac

SEQ ID NO: 17174 - RNA, 32 nt, Homo Sapiens
gaaagaauccaguguagaaguugagaagaacu

SEQ ID NO: 17175 - RNA, 32 nt, Homo Sapiens
gucugcccaccacccugcuuccugcuucguuc

SEQ ID NO: 17176 - RNA, 32 nt, Homo Sapiens
cccgccucuuggcuccucuccucuaggccguc

SEQ ID NO: 17177 - RNA, 32 nt, Homo Sapiens
cucucauguaaauuuccagugauuccaccauu

SEQ ID NO: 17178 - RNA, 32 nt, Homo Sapiens
aguuaggccaucaacaagcauucuuuuuauau

SEQ ID NO: 17179 - RNA, 31 nt, Homo Sapiens
agucaucuugguaauaccggguuggaugcuu

SEQ ID NO: 17180 - RNA, 32 nt, Homo Sapiens
uuucuaacugcccuucucuccuccccaucagu

SEQ ID NO: 17181 - RNA, 32 nt, Homo Sapiens
uuguuccucacagcaaaaaagaaugcaagggc

SEQ ID NO: 17182 - RNA, 32 nt, Homo Sapiens
cagguuuuuacuugaguacaauaaaaagucug

SEQ ID NO: 17183 - RNA, 32 nt, Homo Sapiens
ccugcaauccugucccugcccuccucacccca

SEQ ID NO: 17184 - RNA, 32 nt, Homo Sapiens
uaaccaggaugaugagagcuguggaagcugua

SEQ ID NO: 17185 - RNA, 32 nt, Homo Sapiens
uccauucuaggaucuuguuaagcagugaugcu

SEQ ID NO: 17186 - RNA, 32 nt, Homo Sapiens
gaugcauggacuguauuuugcauguuuaaaau

SEQ ID NO: 17187 - RNA, 32 nt, Homo Sapiens
cuaacaagccccacuggaaucauucgggccca

SEQ ID NO: 17188 - RNA, 32 nt, Homo Sapiens
uaaagaaaucuguauguuuaguuucuuuucuc

SEQ ID NO: 17189 - RNA, 32 nt, Homo Sapiens
cugaaggauaucaacagcucaucugugaccaa

SEQ ID NO: 17190 - RNA, 32 nt, Homo Sapiens
uuucggguuccccagcagcaucucccgacacc

SEQ ID NO: 17191 - RNA, 32 nt, Homo Sapiens
ggcugucugaugcagaugauugcauuuuuugg

SEQ ID NO: 17192 - RNA, 32 nt, Homo Sapiens
ggagccgccgggaguggacgccgccgaggccc

SEQ ID NO: 17193 - RNA, 32 nt, Homo Sapiens
ggagggcggagcaggcggcggugcaggaggcc

SEQ ID NO: 17194 - RNA, 30 nt, Homo Sapiens
gcggcgggcgcgcagcgggagugggagugg

SEQ ID NO: 17195 - RNA, 32 nt, Homo Sapiens
uggugguggugguucuuaauuuuuaauuuagu

SEQ ID NO: 17196 - RNA, 31 nt, Homo Sapiens
uuucgcugcggagggaaguccacucucgggg

SEQ ID NO: 17197 - RNA, 32 nt, Homo Sapiens
cuugcaggaaauuauuugauaagagcaaaacu

SEQ ID NO: 17198 - RNA, 32 nt, Homo Sapiens
guuauagguuuuauguuuuguuuucuggguca

SEQ ID NO: 17199 - RNA, 32 nt, Homo Sapiens
uuacaaggugcugaauguguugguaaccauau

SEQ ID NO: 17200 - RNA, 32 nt, Homo Sapiens
cccuagcacgugagcuccaaaaagcacgaaca

SEQ ID NO: 17201 - RNA, 32 nt, Homo Sapiens
gcuuucaaaaauuuggauugcaaucacagcaa

SEQ ID NO: 17202 - RNA, 32 nt, Homo Sapiens
ugggugcuguggacugauuugcuggaguucag

SEQ ID NO: 17203 - RNA, 32 nt, Homo Sapiens
aucuuuaauguuuagauaguauauuagcagca

SEQ ID NO: 17204 - RNA, 32 nt, Homo Sapiens
ccuucagcuagagaagcagugugggccugaag

SEQ ID NO: 17205 - RNA, 32 nt, Homo Sapiens
gguuuaagaaaagaccugaggcuucugauuug

SEQ ID NO: 17206 - RNA, 32 nt, Homo Sapiens
ugauauuaggaguucaguacuucuggaaaaaa

SEQ ID NO: 17207 - RNA, 27 nt, Homo Sapiens
uugauguucaucuucagcaccagugga

SEQ ID NO: 17208 - RNA, 32 nt, Homo Sapiens
ucuacaaaaaauuuaaaaauuagccaagugug

SEQ ID NO: 17209 - RNA, 32 nt, Homo Sapiens
ggugggggugugggugaugagggaggccaaac

SEQ ID NO: 17210 - RNA, 32 nt, Homo Sapiens
uucucuaaggaccccaggacugugccuucugg

SEQ ID NO: 17211 - RNA, 32 nt, Homo Sapiens
uaauaaaauuuaugucuagaaguuaaaaccca

SEQ ID NO: 17212 - RNA, 32 nt, Homo Sapiens
ucagugccccacuugugacugagugugcagug

SEQ ID NO: 17213 - RNA, 32 nt, Homo Sapiens
guaccugguagcuucuaggagcccaagaaaaa

SEQ ID NO: 17214 - RNA, 32 nt, Homo Sapiens
aguauauuuuaagcuuagcucccuuuauuuuu

SEQ ID NO: 17215 - RNA, 32 nt, Homo Sapiens
uuuccaguggaccauccuccaguggcuguggu

SEQ ID NO: 17216 - RNA, 32 nt, Homo Sapiens
auuuuggaacaaugccaggauccaaacugauu

SEQ ID NO: 17217 - RNA, 32 nt, Homo Sapiens
acugccuuaugacauagccaaauaauucugua

SEQ ID NO: 17218 - RNA, 32 nt, Homo Sapiens
uuucagauggagaacacacaaguccggagaug

SEQ ID NO: 17219 - RNA, 32 nt, Homo Sapiens
ggccugauucucucuugcucuuggggcagaag

SEQ ID NO: 17220 - RNA, 32 nt, Homo Sapiens
uugggaaacaaaugcugucucuugugaaauag

SEQ ID NO: 17221 - RNA, 32 nt, Homo Sapiens
aaaaugccuauguuuucuuuuaguuacaugaa

SEQ ID NO: 17222 - RNA, 32 nt, Homo Sapiens
ugccccgggagccgcagccgcgguguucaugc

SEQ ID NO: 17223 - RNA, 32 nt, Homo Sapiens
acugggaagcggccucccgggagccaggacuu

SEQ ID NO: 17224 - RNA, 32 nt, Homo Sapiens
ggaucugggugaaaauggaauaaucguaucgc

SEQ ID NO: 17225 - RNA, 32 nt, Homo Sapiens
ugaauuccucuuucuuguuuucuuuccugguu

SEQ ID NO: 17226 - RNA, 32 nt, Homo Sapiens
guaauucauauccugcuucuuaagucagucac

SEQ ID NO: 17227 - RNA, 32 nt, Homo Sapiens
auaggacaguuauauguuuaaaugugauaaug

SEQ ID NO: 17228 - RNA, 32 nt, Homo Sapiens
aagggaggaaauguuacaguaauccacugaga

SEQ ID NO: 17229 - RNA, 32 nt, Homo Sapiens
agcauaucugguuucauaucuacauuuaugaa

SEQ ID NO: 17230 - RNA, 32 nt, Homo Sapiens
caaugcuuugagggggucugugccugaagcuc

SEQ ID NO: 17231 - RNA, 32 nt, Homo Sapiens
agacaggcugagaugcggcugcuccugcucgu

SEQ ID NO: 17232 - RNA, 32 nt, Homo Sapiens
gcaaguucuggugacaggacaggguggccuug

SEQ ID NO: 17233 - RNA, 32 nt, Homo Sapiens
ggaaagccaucccacaccccuacaacauaugu

SEQ ID NO: 17234 - RNA, 32 nt, Homo Sapiens
accccagaggguccuguguggguguggagaug

SEQ ID NO: 17235 - RNA, 32 nt, Homo Sapiens
acuguggugauguuuuugggacaguuucuugg

SEQ ID NO: 17236 - RNA, 32 nt, Homo Sapiens
cccuuuuguggaagaaauaaaagaaggagagu

SEQ ID NO: 17237 - RNA, 32 nt, Homo Sapiens
cccagagugaucucagcccugucagaagaacc

SEQ ID NO: 17238 - RNA, 32 nt, Homo Sapiens
caucgggggaaaaauuggugacaacuuuaaga

SEQ ID NO: 17239 - RNA, 32 nt, Homo Sapiens
uuacaggucgcgcugcaaugggcccccacuuc

SEQ ID NO: 17240 - RNA, 32 nt, Homo Sapiens
uuucugaccaaaagaggcuuuuuuagaggaag

SEQ ID NO: 17241 - RNA, 32 nt, Homo Sapiens
ggaaaaugaccguagcauggcuucuuuggcag

SEQ ID NO: 17242 - RNA, 32 nt, Homo Sapiens
guuguuuggucuuuaggccugcggaggggcgu

SEQ ID NO: 17243 - RNA, 32 nt, Homo Sapiens
ucuaguaaagggaaugaggaaagggaacccuu

SEQ ID NO: 17244 - RNA, 32 nt, Homo Sapiens
auuuaaaauuguagggcuugcacgguggcuca

SEQ ID NO: 17245 - RNA, 32 nt, Homo Sapiens
gaaaaggcagagaggccaggaugguggaagag

SEQ ID NO: 17246 - RNA, 32 nt, Homo Sapiens
ugaugaugaugaugaugauaauaauaauaaua

SEQ ID NO: 17247 - RNA, 32 nt, Homo Sapiens
caacacaguacccaccaggacggggcacuccg

SEQ ID NO: 17248 - RNA, 31 nt, Homo Sapiens
ggcagggaaagauaggcaggaguccccucac

SEQ ID NO: 17249 - RNA, 32 nt, Homo Sapiens
uuccccaauuuaaacaaagauucugccaacug

SEQ ID NO: 17250 - RNA, 32 nt, Homo Sapiens
aaauuagagucuuugugaugcuuugugaugug

SEQ ID NO: 17251 - RNA, 32 nt, Homo Sapiens
acagugguagagagguuuuucuugggaaagag

SEQ ID NO: 17252 - RNA, 32 nt, Homo Sapiens
cccaggucucagagagcaagcgguaccagagg

SEQ ID NO: 17253 - RNA, 32 nt, Homo Sapiens
aguguccugauucccacaacaguguccugauu

SEQ ID NO: 17254 - RNA, 32 nt, Homo Sapiens
uaucauccaugggucucuggcuccugagagcc

SEQ ID NO: 17255 - RNA, 32 nt, Homo Sapiens
caagacacagccagacaauguggaccaauuuc

SEQ ID NO: 17256 - RNA, 32 nt, Homo Sapiens
ucuuuuggcccucuucuuucugaggcccacuu

SEQ ID NO: 17257 - RNA, 32 nt, Homo Sapiens
gaugcagaacuguucagugguauuacaugaaa

SEQ ID NO: 17258 - RNA, 29 nt, Homo Sapiens
aauauucuauaguauauccagguucucca

SEQ ID NO: 17259 - RNA, 30 nt, Homo Sapiens
cggggggcgcccgggcaguccgcguucugc

SEQ ID NO: 17260 - RNA, 30 nt, Homo Sapiens
ggcucagagaagcuuguuaacuugccugag

SEQ ID NO: 17261 - RNA, 32 nt, Homo Sapiens
aagauaaaaaguaguaaaauggcauugguaac

SEQ ID NO: 17262 - RNA, 32 nt, Homo Sapiens
accgaugcccuacaaaaagggcgcaucuuuaa

SEQ ID NO: 17263 - RNA, 32 nt, Homo Sapiens
agagccagagagaggagugaggguggcucaac

SEQ ID NO: 17264 - RNA, 31 nt, Homo Sapiens
ccugaguggagacgccugcccccagccccga

SEQ ID NO: 17265 - RNA, 32 nt, Homo Sapiens
ggcugggugugguggcucacgccuguaauccc

SEQ ID NO: 17266 - RNA, 32 nt, Homo Sapiens
accagucuggccaacauagugaaaucccaucu

SEQ ID NO: 17267 - RNA, 32 nt, Homo Sapiens
ucgguacagcccagcccacccucuccuggugc

SEQ ID NO: 17268 - RNA, 32 nt, Homo Sapiens
caaaguccuccuccccuacgcccuuacauucu

SEQ ID NO: 17269 - RNA, 32 nt, Homo Sapiens
uaauggaugaauuguauuuugcaaagauaguu

SEQ ID NO: 17270 - RNA, 32 nt, Homo Sapiens
gugcccaccugugcgcgccgccugcgaagaag

SEQ ID NO: 17271 - RNA, 32 nt, Homo Sapiens
uuagacagcugucuuccugcaguguccucacg

SEQ ID NO: 17272 - RNA, 32 nt, Homo Sapiens
gagacuguggcagcugcuguccggcuggcaga

SEQ ID NO: 17273 - RNA, 32 nt, Homo Sapiens
ucgugagacagugaaaucagauaauaaugaga

SEQ ID NO: 17274 - RNA, 32 nt, Homo Sapiens
uuacuuagagcuuuuucuuaaaucugaacuaa

SEQ ID NO: 17275 - RNA, 32 nt, Homo Sapiens
ggugggagaaagucauucgcguggcucgggac

SEQ ID NO: 17276 - RNA, 32 nt, Homo Sapiens
auugcauaaaggcuccuucuccuuacauagcc

SEQ ID NO: 17277 - RNA, 32 nt, Homo Sapiens
ggauaagagcuccggggggauucuucaugcac

SEQ ID NO: 17278 - RNA, 32 nt, Homo Sapiens
gcucagauccagcaccauguuccuccugaccc

SEQ ID NO: 17279 - RNA, 32 nt, Homo Sapiens
aaaugaauauguauuuuagacacacauuuacc

SEQ ID NO: 17280 - RNA, 32 nt, Homo Sapiens
cgcagcccaggccggggccggcggcggcucau

SEQ ID NO: 17281 - RNA, 32 nt, Homo Sapiens
agguggauggaucaccugaggucaggaguucg

SEQ ID NO: 17282 - RNA, 32 nt, Homo Sapiens
gaggcugagagaaaggaacguuaugugaaacc

SEQ ID NO: 17283 - RNA, 32 nt, Homo Sapiens
cgagaggugcugccgccucccgucgccccugc

SEQ ID NO: 17284 - RNA, 32 nt, Homo Sapiens
ggcacgaggguggagccgagcggugcggagca

SEQ ID NO: 17285 - RNA, 32 nt, Homo Sapiens
auaaaauaaaaagucacaaugaguuugggcau

SEQ ID NO: 17286 - RNA, 32 nt, Homo Sapiens
ucagccugcgccuggcgccuccccucuccagg

SEQ ID NO: 17287 - RNA, 32 nt, Homo Sapiens
ccauaacuaugaaaggcugagaguggagaauu

SEQ ID NO: 17288 - RNA, 32 nt, Homo Sapiens
cgcugacggguggccucucaccccccucuaga

SEQ ID NO: 17289 - RNA, 32 nt, Homo Sapiens
caacagcaacagcagcagcagcagcagcaaca

SEQ ID NO: 17290 - RNA, 32 nt, Homo Sapiens
gcgaggcugcggugucugcugcugcuguccga

SEQ ID NO: 17291 - RNA, 32 nt, Homo Sapiens
gaguuauuuauguaccagauauuauacuuuua

SEQ ID NO: 17292 - RNA, 32 nt, Homo Sapiens
cagcuuccagugcagagcuccacacauagcau

SEQ ID NO: 17293 - RNA, 32 nt, Homo Sapiens
aauaacaaauguucauuauaaacucuaggaaa

SEQ ID NO: 17294 - RNA, 32 nt, Homo Sapiens
uauuugcaaaggaaacauaucuaauccuuccu

SEQ ID NO: 17295 - RNA, 32 nt, Homo Sapiens
gggcagucacaccaccuguuaagcaucaagcu

SEQ ID NO: 17296 - RNA, 32 nt, Homo Sapiens
gccgcggacacugcuaggcagacggcgaguac

SEQ ID NO: 17297 - RNA, 32 nt, Homo Sapiens
uuguuuaaaaauuguacaaaaggaaaaaauua

SEQ ID NO: 17298 - RNA, 32 nt, Homo Sapiens
cuggacuugccagcugauuagcucuguuccca

SEQ ID NO: 17299 - RNA, 32 nt, Homo Sapiens
aaucuauuaucauuauuuuucuuuuuauuccc

SEQ ID NO: 17300 - RNA, 32 nt, Homo Sapiens
uuugauaauucacaaacuaucaugcaaauaac

SEQ ID NO: 17301 - RNA, 32 nt, Homo Sapiens
cugcagacaccuguuccacgugcuggcacaca

SEQ ID NO: 17302 - RNA, 32 nt, Homo Sapiens
acacugauuuuuuuuucuucuuuuuaaaaagc

SEQ ID NO: 17303 - RNA, 32 nt, Homo Sapiens
aaaacagacucaacuuccuacugcaagcuuag

SEQ ID NO: 17304 - RNA, 32 nt, Homo Sapiens
ggugccagaaggcuugcuccaaugccacugag

SEQ ID NO: 17305 - RNA, 30 nt, Homo Sapiens
guaucgggaggugccaucggcacuuccucc

SEQ ID NO: 17306 - RNA, 32 nt, Homo Sapiens
acggugacuuuguauugucaugugugcggcuu

SEQ ID NO: 17307 - RNA, 32 nt, Homo Sapiens
gcagcgaggaggagccacagggcugagcucgg

SEQ ID NO: 17308 - RNA, 32 nt, Homo Sapiens
guuuccugcagggcuggcccuggcucgggcag

SEQ ID NO: 17309 - RNA, 32 nt, Homo Sapiens
cuggggggauuggagggaaaugaccugcccuc

SEQ ID NO: 17310 - RNA, 32 nt, Homo Sapiens
ccccagaagcgccccaggaagggcgccgagug

SEQ ID NO: 17311 - RNA, 32 nt, Homo Sapiens
cggcaaagcaaguaccucuuaagggacucuaa

SEQ ID NO: 17312 - RNA, 32 nt, Homo Sapiens
uuucucuugugagguaucuucauuuaugcacu

SEQ ID NO: 17313 - RNA, 32 nt, Homo Sapiens
auggugcagcgggguucgggaugucgaagacg

SEQ ID NO: 17314 - RNA, 32 nt, Homo Sapiens
uuuaaaaaucaguuguagacaccacccucaga

SEQ ID NO: 17315 - RNA, 32 nt, Homo Sapiens
caaacuggcagacaggccagggauguauguug

SEQ ID NO: 17316 - RNA, 32 nt, Homo Sapiens
aauacuugcaaaguacauaucuguaaagaacu

SEQ ID NO: 17317 - RNA, 32 nt, Homo Sapiens
gaagacucgauccaucggaagcuacccccugc

SEQ ID NO: 17318 - RNA, 32 nt, Homo Sapiens
uauauauggcuuaugacauacucuguaucaau

SEQ ID NO: 17319 - RNA, 32 nt, Homo Sapiens
guacggcggcgaagugcuaaaagggaacggcg

SEQ ID NO: 17320 - RNA, 32 nt, Homo Sapiens
ugcaguuuuuaaaguuuauaacagucuguuug

SEQ ID NO: 17321 - RNA, 32 nt, Homo Sapiens
ggcccugcccucacagaacuuguagucuucug

SEQ ID NO: 17322 - RNA, 32 nt, Homo Sapiens
ccgcagucuguuccaggacgcggcuugucuua

SEQ ID NO: 17323 - RNA, 32 nt, Homo Sapiens
cagcccuccuccccgacccagcgccuaagcuc

SEQ ID NO: 17324 - RNA, 32 nt, Homo Sapiens
gagccggccgcgggcgcgaccggaggcaguuu

SEQ ID NO: 17325 - RNA, 32 nt, Homo Sapiens
accuucccacuuuuccugucccuacccacccu

SEQ ID NO: 17326 - RNA, 31 nt, Homo Sapiens
uagguacaaaagaaaaccaagauuuugauau

SEQ ID NO: 17327 - RNA, 32 nt, Homo Sapiens
cugguaacuuaggcuuuuuuuaucucuucuuu

SEQ ID NO: 17328 - RNA, 32 nt, Homo Sapiens
uauuuuucuuguaucuuuuucuuccuacuaug

SEQ ID NO: 17329 - RNA, 32 nt, Homo Sapiens
aggcugugaacauugggugcccagugcuauca

SEQ ID NO: 17330 - RNA, 32 nt, Homo Sapiens
gccuauuuucuuuuauaaauuaaaacaaguua

SEQ ID NO: 17331 - RNA, 32 nt, Homo Sapiens
ccggccauguagcgcgcacgucagcccgcacg

SEQ ID NO: 17332 - RNA, 32 nt, Homo Sapiens
uuuuugaaucaucaauucuuucucauucucca

SEQ ID NO: 17333 - RNA, 32 nt, Homo Sapiens
agccuacaauaauuuucuuaaacuuuaccuuu

SEQ ID NO: 17334 - RNA, 32 nt, Homo Sapiens
auuucaauauccaacaacuagauagauuagga

SEQ ID NO: 17335 - RNA, 32 nt, Homo Sapiens
uucguugcucaaagccaacuguaugugcugac

SEQ ID NO: 17336 - RNA, 32 nt, Homo Sapiens
acucugcccagcugcagagugcuguucccugg

SEQ ID NO: 17337 - RNA, 32 nt, Homo Sapiens
cacgcucugcuuggccucgccaugccggugga

SEQ ID NO: 17338 - RNA, 32 nt, Homo Sapiens
ugucuuggggagagaggaggaggugacugcuu

SEQ ID NO: 17339 - RNA, 32 nt, Homo Sapiens
cuucuuuguauauaaagauguuuauaucuuug

SEQ ID NO: 17340 - RNA, 32 nt, Homo Sapiens
uauggaucuguggucauugucccucugcagaa

SEQ ID NO: 17341 - RNA, 32 nt, Homo Sapiens
uacuguguaagccuugcaaacaaaaaacaaca

SEQ ID NO: 17342 - RNA, 32 nt, Homo Sapiens
uggcacaccccccucaccccagcccugcgcau

SEQ ID NO: 17343 - RNA, 31 nt, Homo Sapiens
uaaaacacgaagaaaaagaaaugucuuucuu

SEQ ID NO: 17344 - RNA, 32 nt, Homo Sapiens
cauggaaagagcuaauaauuaucccucuguca

SEQ ID NO: 17345 - RNA, 32 nt, Homo Sapiens
uuccuuugucucuuuauccuccugcuuaggcc

SEQ ID NO: 17346 - RNA, 32 nt, Homo Sapiens
ggacucaggaccagauguccgucucucuugcu

SEQ ID NO: 17347 - RNA, 32 nt, Homo Sapiens
uuugaacaugaaagaaauguaccuucuuucac

SEQ ID NO: 17348 - RNA, 32 nt, Homo Sapiens
cccgggagaaaagacggauggcaggauccaag

SEQ ID NO: 17349 - RNA, 32 nt, Homo Sapiens
aacguuggcucgaaccucuccuuuuccccgcc

SEQ ID NO: 17350 - RNA, 32 nt, Homo Sapiens
gggaugagaaauuaucaguuucuucugcuccc

SEQ ID NO: 17351 - RNA, 30 nt, Homo Sapiens
cguagcaccagagucgcggguccugcagug

SEQ ID NO: 17352 - RNA, 32 nt, Homo Sapiens
cguccugguagccaaggcuaauucucccucga

SEQ ID NO: 17353 - RNA, 32 nt, Homo Sapiens
gcaguccucuauuugcauguuucccaugggca

SEQ ID NO: 17354 - RNA, 32 nt, Homo Sapiens
gcugucccucugcggcaggcagagcugguggg

SEQ ID NO: 17355 - RNA, 32 nt, Homo Sapiens
caauuuccaaccuccccuguacuuaccuguuu

SEQ ID NO: 17356 - RNA, 32 nt, Homo Sapiens
auuggagaaaaaauuggccacagggccaagag

SEQ ID NO: 17357 - RNA, 32 nt, Homo Sapiens
aaacacagaacaaaguuguaaaaguagcaugg

SEQ ID NO: 17358 - RNA, 32 nt, Homo Sapiens
cacugacagaaaaaagugaccccauccccaca

SEQ ID NO: 17359 - RNA, 32 nt, Homo Sapiens
augcagguggaagaggguaggagggaugcugg

SEQ ID NO: 17360 - RNA, 32 nt, Homo Sapiens
guagacccccgcccccaccuccaacacugcac

SEQ ID NO: 17361 - RNA, 32 nt, Homo Sapiens
acagacacagccugccucgaggacugcaaggg

SEQ ID NO: 17362 - RNA, 32 nt, Homo Sapiens
caaauuaaaaauuugaacauuuguuugugaag

SEQ ID NO: 17363 - RNA, 32 nt, Homo Sapiens
uuucucccuugugucaguucucuucuggccca

SEQ ID NO: 17364 - RNA, 32 nt, Homo Sapiens
cacagagcggaacaagggacugggcugucuau

SEQ ID NO: 17365 - RNA, 32 nt, Homo Sapiens
caaaauccaucccauaagcaacccccggauuu

SEQ ID NO: 17366 - RNA, 32 nt, Homo Sapiens
ucugucggaaguucuucaguuuuuaagugagg

SEQ ID NO: 17367 - RNA, 32 nt, Homo Sapiens
ucuuaucuuucuucuuuuauauuuuuuggaaa

SEQ ID NO: 17368 - RNA, 32 nt, Homo Sapiens
gaguauuaagauacagauuaauugggaauauc

SEQ ID NO: 17369 - RNA, 32 nt, Homo Sapiens
ucccgccagcccgcccuccuuccuccucagcc

SEQ ID NO: 17370 - RNA, 32 nt, Homo Sapiens
uaccaaacagugggagggaauuccuagcugua

SEQ ID NO: 17371 - RNA, 32 nt, Homo Sapiens
uuuauguucccaauugagugugaauguccaag

SEQ ID NO: 17372 - RNA, 32 nt, Homo Sapiens
guggggaggagccugggcagccugcugggugg

SEQ ID NO: 17373 - RNA, 32 nt, Homo Sapiens
acuuuguacuuugagucuuuuuaaauaugcuc

SEQ ID NO: 17374 - RNA, 32 nt, Homo Sapiens
ugggggcuggcaggugggaggggcgguggaca

SEQ ID NO: 17375 - RNA, 32 nt, Homo Sapiens
cgcccugaggaccagaggcgccaggcagccac

SEQ ID NO: 17376 - RNA, 32 nt, Homo Sapiens
aagauaggcaauaguguauaaauaucauguaa

SEQ ID NO: 17377 - RNA, 32 nt, Homo Sapiens
uuccauuugugauuccaugauacaauucacca

SEQ ID NO: 17378 - RNA, 32 nt, Homo Sapiens
aggcagaaaaagacaagaagguggugagggcc

SEQ ID NO: 17379 - RNA, 32 nt, Homo Sapiens
ccgggccugccagcuccccugagugaugagca

SEQ ID NO: 17380 - RNA, 32 nt, Homo Sapiens
ucuuuguauuuuauaagauacucuguaauguc

SEQ ID NO: 17381 - RNA, 32 nt, Homo Sapiens
agagauaaaaacauuccugugaaagaugcccu

SEQ ID NO: 17382 - RNA, 32 nt, Homo Sapiens
uugguuauaucgaaauaguuacaggcacuaaa

SEQ ID NO: 17383 - RNA, 32 nt, Homo Sapiens
cacucuaucuucauuucugguucuuaccgugu

SEQ ID NO: 17384 - RNA, 32 nt, Homo Sapiens
ugcuuuugcuauucuuuuugcuuaaauacucc

SEQ ID NO: 17385 - RNA, 32 nt, Homo Sapiens
uuuggauacuaaaugacagccuuguuucuccc

SEQ ID NO: 17386 - RNA, 32 nt, Homo Sapiens
acaaacccccaugacacaaguuuaccuaugua

SEQ ID NO: 17387 - RNA, 32 nt, Homo Sapiens
cggacgccuggccucccagcccugcccggcug

SEQ ID NO: 17388 - RNA, 32 nt, Homo Sapiens
cugggcuggggguggggugggagaggucuuuu

SEQ ID NO: 17389 - RNA, 32 nt, Homo Sapiens
ggugaagcggcgcgugcgggggcucaucguca

SEQ ID NO: 17390 - RNA, 32 nt, Homo Sapiens
gccgccugccccagcuuccccgacuccaucug

SEQ ID NO: 17391 - RNA, 32 nt, Homo Sapiens
cuuaaaaaugucauguuuaugucaugucugug

SEQ ID NO: 17392 - RNA, 32 nt, Homo Sapiens
uuaccaauuuccuauuugaugguuuguaagua

SEQ ID NO: 17393 - RNA, 32 nt, Homo Sapiens
gaucacuugagcccaggagauuaagacuguag

SEQ ID NO: 17394 - RNA, 32 nt, Homo Sapiens
aacaugaacucaucauuuuuuauggcugcaua

SEQ ID NO: 17395 - RNA, 32 nt, Homo Sapiens
uugagcaguucaugacccaggauaucugaaaa

SEQ ID NO: 17396 - RNA, 32 nt, Homo Sapiens
cugugggaagagaauagacucuauuuucucug

SEQ ID NO: 17397 - RNA, 32 nt, Homo Sapiens
cuuccuucauguaagacuuuggccgaaauuuc

SEQ ID NO: 17398 - RNA, 32 nt, Homo Sapiens
gaugaaaggcuuugcagaaagcuuugagcucu

SEQ ID NO: 17399 - RNA, 32 nt, Homo Sapiens
ccuuggcacaaugccuggguguccucauccuu

SEQ ID NO: 17400 - RNA, 32 nt, Homo Sapiens
gccacagcccugcuuuaccgggcucaccucua

SEQ ID NO: 17401 - RNA, 32 nt, Homo Sapiens
uuuaaaaaaugcaauuaaaacuagaaauagca

SEQ ID NO: 17402 - RNA, 32 nt, Homo Sapiens
acucaggacaaaggggaaccagcugaacagag

SEQ ID NO: 17403 - RNA, 32 nt, Homo Sapiens
gucucucuugucacauggaaucuacauguguu

SEQ ID NO: 17404 - RNA, 32 nt, Homo Sapiens
gcgcggccuccucggcgcagccauccucuugg

SEQ ID NO: 17405 - RNA, 32 nt, Homo Sapiens
guuccccaugcuguuuccugcacuauucccca

SEQ ID NO: 17406 - RNA, 32 nt, Homo Sapiens
ccaagaaauguaauaaauauuuguaauuuuac

SEQ ID NO: 17407 - RNA, 32 nt, Homo Sapiens
ugaaguggcggcggcuucggcggcugcggcgu

SEQ ID NO: 17408 - RNA, 32 nt, Homo Sapiens
aguaguagaaaagaauaggcaagauggggggu

SEQ ID NO: 17409 - RNA, 32 nt, Homo Sapiens
ccacguccgcccggcggcgcagcugcccagcg

SEQ ID NO: 17410 - RNA, 32 nt, Homo Sapiens
auggggucaggugcuucugugcuugcuguccu

SEQ ID NO: 17411 - RNA, 32 nt, Homo Sapiens
agggggucccuggccugggcggagaggcugag

SEQ ID NO: 17412 - RNA, 32 nt, Homo Sapiens
uggugguaugugccuguaaucccagcuacuug

SEQ ID NO: 17413 - RNA, 32 nt, Homo Sapiens
uauugaguguguuucaauauauuaucuggcuu

SEQ ID NO: 17414 - RNA, 32 nt, Homo Sapiens
gcucugaaauccaaaaucaugccuugauaaca

SEQ ID NO: 17415 - RNA, 32 nt, Homo Sapiens
uggcugggaucauccgcggcggccgggcucgu

SEQ ID NO: 17416 - RNA, 32 nt, Homo Sapiens
ggggccccuuccugagcgccccggccccuccc

SEQ ID NO: 17417 - RNA, 29 nt, Homo Sapiens
uuuacuaugagguuauauuuuauggagua

SEQ ID NO: 17418 - RNA, 32 nt, Homo Sapiens
cuuggcagcaacaugagaagugugauacaugu

SEQ ID NO: 17419 - RNA, 32 nt, Homo Sapiens
cgagacugucggcgggggcgcgggaagggacu

SEQ ID NO: 17420 - RNA, 32 nt, Homo Sapiens
acgaggucaggugaucgagaccaucuuggcua

SEQ ID NO: 17421 - RNA, 32 nt, Homo Sapiens
aacuacagguugggaaaaaauauuuuccaaac

SEQ ID NO: 17422 - RNA, 32 nt, Homo Sapiens
ugucuugaaaauaauaauaggcuggucacggu

SEQ ID NO: 17423 - RNA, 32 nt, Homo Sapiens
cuucugcuggaaccgcugggaguuggaagcuu

SEQ ID NO: 17424 - RNA, 32 nt, Homo Sapiens
agaaugauauuuauauuuuaagugagucuuaa

SEQ ID NO: 17425 - RNA, 32 nt, Homo Sapiens
accccagugucucaauuggagagacaggcccu

SEQ ID NO: 17426 - RNA, 32 nt, Homo Sapiens
ugcagaaugaaaccucuuuuccauccagaagc

SEQ ID NO: 17427 - RNA, 32 nt, Homo Sapiens
aggcggugcaggcaaggccuccccugcagcuu

SEQ ID NO: 17428 - RNA, 32 nt, Homo Sapiens
ucaaacaggaaauugaaagccacugaacuaug

SEQ ID NO: 17429 - RNA, 32 nt, Homo Sapiens
auaaacucuagaucucuucuaacaauuaucaa

SEQ ID NO: 17430 - RNA, 32 nt, Homo Sapiens
uuugcggcugaauuagauugguuuuucuugug

SEQ ID NO: 17431 - RNA, 32 nt, Homo Sapiens
gaaggccagcggggaggauacuguccccagga

SEQ ID NO: 17432 - RNA, 32 nt, Homo Sapiens
cuuuggguuucauccuuccccagcgugggucu

SEQ ID NO: 17433 - RNA, 32 nt, Homo Sapiens
cguuccacuauuucugagucucuucccacuga

SEQ ID NO: 17434 - RNA, 32 nt, Homo Sapiens
auaggccccguccguggccccgccccgccgcg

SEQ ID NO: 17435 - RNA, 32 nt, Homo Sapiens
cugcgaugugaacugccccuccccucgcaucc

SEQ ID NO: 17436 - RNA, 32 nt, Homo Sapiens
auggacaaaaauuucaccuugagauugagcuu

SEQ ID NO: 17437 - RNA, 32 nt, Homo Sapiens
gugacucauuuggacucuuaucugucuuggaa

SEQ ID NO: 17438 - RNA, 32 nt, Homo Sapiens
ucggacacuaauuuauauaggagugaaguuuu

SEQ ID NO: 17439 - RNA, 32 nt, Homo Sapiens
cgucgucugcuuucuuuuuuggguuucuuucu

SEQ ID NO: 17440 - RNA, 32 nt, Homo Sapiens
ggccccugugacugcugccggaugcugugcac

SEQ ID NO: 17441 - RNA, 32 nt, Homo Sapiens
cacuguaaaugccuuuaaugagcauuaauuuu

SEQ ID NO: 17442 - RNA, 32 nt, Homo Sapiens
uuuuaaaaaaauuuuuugaucuuagucacugg

SEQ ID NO: 17443 - RNA, 32 nt, Homo Sapiens
acaaauucauuuuguagaagucuuaaaaucag

SEQ ID NO: 17444 - RNA, 32 nt, Homo Sapiens
acccccacuucacccgccgcuacuagucccac

SEQ ID NO: 17445 - RNA, 32 nt, Homo Sapiens
uaaauuuuucuccucccuccuccuacaagguu

SEQ ID NO: 17446 - RNA, 32 nt, Homo Sapiens
gaggcuucugaugguggagaucuggcaugcca

SEQ ID NO: 17447 - RNA, 32 nt, Homo Sapiens
uccuggcagucuacaagaagucucuuaaugcu

SEQ ID NO: 17448 - RNA, 32 nt, Homo Sapiens
agugccagggccacagcagagaggggcgcagg

SEQ ID NO: 17449 - RNA, 32 nt, Homo Sapiens
ccuuuggccagacgggcucugggaagaccuac

SEQ ID NO: 17450 - RNA, 32 nt, Homo Sapiens
uugggugaaacacauuuuacagcucucaauaa

SEQ ID NO: 17451 - RNA, 32 nt, Homo Sapiens
augugauguggaccaaaggcuagguuguaauc

SEQ ID NO: 17452 - RNA, 30 nt, Homo Sapiens
ucccccaaaugugcugcauugaaguucacg

SEQ ID NO: 17453 - RNA, 32 nt, Homo Sapiens
cauuuuucugucaucccuauaguucacuuugu

SEQ ID NO: 17454 - RNA, 32 nt, Homo Sapiens
ucgcccuccagccccaacccccggcccggcgc

SEQ ID NO: 17455 - RNA, 32 nt, Homo Sapiens
ugacucggaaucauguugugcacuauagucaa

SEQ ID NO: 17456 - RNA, 32 nt, Homo Sapiens
aagaaaaacauggggaaacagaugccucagcc

SEQ ID NO: 17457 - RNA, 32 nt, Homo Sapiens
aauaaagaagugcucugaaaaaauaucagcca

SEQ ID NO: 17458 - RNA, 32 nt, Homo Sapiens
accuggcggggcgggggucugccggccucugg

SEQ ID NO: 17459 - RNA, 32 nt, Homo Sapiens
ccccagagucuggcuuuccgcggcugcccgcc

SEQ ID NO: 17460 - RNA, 32 nt, Homo Sapiens
uuacagcuuuucucuuuuuuuaaaaaguugau

SEQ ID NO: 17461 - RNA, 32 nt, Homo Sapiens
gagacaaggccucgcucuaucgccuaggcuga

SEQ ID NO: 17462 - RNA, 32 nt, Homo Sapiens
cuauggcaucucgagguggagcuuacccugug

SEQ ID NO: 17463 - RNA, 32 nt, Homo Sapiens
gaaugccacuuuuucuuuuauuucauaccaau

SEQ ID NO: 17464 - RNA, 32 nt, Homo Sapiens
uguucaacaaaaggauuguacuguauuaagaa

SEQ ID NO: 17465 - RNA, 32 nt, Homo Sapiens
agguguauuuacagagaaaauauuuuguucuu

SEQ ID NO: 17466 - RNA, 32 nt, Homo Sapiens
gaccuugugaugugaauugaucugaucagacu

SEQ ID NO: 17467 - RNA, 32 nt, Homo Sapiens
uuauaauucaacaaagguuuucacauuuuaua

SEQ ID NO: 17468 - RNA, 32 nt, Homo Sapiens
cuguggcucuggcagcggcagcuacauccagc

SEQ ID NO: 17469 - RNA, 32 nt, Homo Sapiens
cugaguguagugugguaggacccggcgggugu

SEQ ID NO: 17470 - RNA, 32 nt, Homo Sapiens
aggcgcggggaacaccaauggcgggguacuug

SEQ ID NO: 17471 - RNA, 32 nt, Homo Sapiens
cagggcucaguggggaggaagaggaggccagg

SEQ ID NO: 17472 - RNA, 32 nt, Homo Sapiens
cuauuuuguuucugccuuuauuuguaaaaauu

SEQ ID NO: 17473 - RNA, 32 nt, Homo Sapiens
ggagagggcaggcggcugcugcuguugcacgg

SEQ ID NO: 17474 - RNA, 29 nt, Homo Sapiens
gaaagcauauguauauaacaugugucaug

SEQ ID NO: 17475 - RNA, 27 nt, Homo Sapiens
uggcuuacccccuucagccuccaauuu

SEQ ID NO: 17476 - RNA, 32 nt, Homo Sapiens
gagauauugaugccgugugccccgauaaaaau

SEQ ID NO: 17477 - RNA, 32 nt, Homo Sapiens
cagcgaggacccuccgccccggagccgccggc

SEQ ID NO: 17478 - RNA, 32 nt, Homo Sapiens
cuucauccacuacugcagugcacccacccuug

SEQ ID NO: 17479 - RNA, 32 nt, Homo Sapiens
auauggaccauuuauggaugacaacaauuuuu

SEQ ID NO: 17480 - RNA, 32 nt, Homo Sapiens
agccggcucucgggcggcggcgcugaaguuuc

SEQ ID NO: 17481 - RNA, 32 nt, Homo Sapiens
cugucuuaaagcugucuuucugagaucuaauu

SEQ ID NO: 17482 - RNA, 31 nt, Homo Sapiens
uaaacuauugcagguuaucaagauuaaaaaa

SEQ ID NO: 17483 - RNA, 32 nt, Homo Sapiens
gacagcacccagcgccuccuccagguccuccu

SEQ ID NO: 17484 - RNA, 32 nt, Homo Sapiens
auugcucaccaucagaucaaccucugauuuua

SEQ ID NO: 17485 - RNA, 32 nt, Homo Sapiens
gagccacaaaaauaacuaugaaaaugccagua

SEQ ID NO: 17486 - RNA, 32 nt, Homo Sapiens
caaaauaaguuacagacaucaaugcacuucau

SEQ ID NO: 17487 - RNA, 32 nt, Homo Sapiens
gccgccucacuucgcgcacgcgccgcuaggcu

SEQ ID NO: 17488 - RNA, 32 nt, Homo Sapiens
acauuuuugucccuccuccacccagguaucug

SEQ ID NO: 17489 - RNA, 32 nt, Homo Sapiens
uacaggaagggagaagggcaggugggcaggga

SEQ ID NO: 17490 - RNA, 32 nt, Homo Sapiens
augaacccaguuuaagaauuugccaucaguag

SEQ ID NO: 17491 - RNA, 31 nt, Homo Sapiens
aucuuauuggcaaauauucaagauggugaug

SEQ ID NO: 17492 - RNA, 32 nt, Homo Sapiens
cuucauuuuugugauaaacuauaugguccucc

SEQ ID NO: 17493 - RNA, 32 nt, Homo Sapiens
aaggaaaucugugucaguggaugcugcucugu

SEQ ID NO: 17494 - RNA, 32 nt, Homo Sapiens
ccgucuagccuccggaggccaggccgugagug

SEQ ID NO: 17495 - RNA, 32 nt, Homo Sapiens
acaacugugagcauuccacaccuggaccgugg

SEQ ID NO: 17496 - RNA, 32 nt, Homo Sapiens
aucugaaagagauucuaaaauauauuacagau

SEQ ID NO: 17497 - RNA, 32 nt, Homo Sapiens
caugguggaaaacgaagcucauucccaacgug

SEQ ID NO: 17498 - RNA, 29 nt, Homo Sapiens
agccaacugaagauucgcguugaugcaau

SEQ ID NO: 17499 - RNA, 32 nt, Homo Sapiens
ggagggcucucuucuuucuuccucauccuacu

SEQ ID NO: 17500 - RNA, 32 nt, Homo Sapiens
gggcuuccgcggcugcaagccagcggguccug

SEQ ID NO: 17501 - RNA, 32 nt, Homo Sapiens
gacuggacgccucuccccgcccggcccucccu

SEQ ID NO: 17502 - RNA, 32 nt, Homo Sapiens
acacugucugcacaugauugaugcuuaaaauc

SEQ ID NO: 17503 - RNA, 32 nt, Homo Sapiens
ugccuugaaagccuccucuuuggaccuagcca

SEQ ID NO: 17504 - RNA, 32 nt, Homo Sapiens
cuguuuccaaauauuugaacuauuuacucuuu

SEQ ID NO: 17505 - RNA, 32 nt, Homo Sapiens
ucuguuauuuguacuaguguauaacaagagcc

SEQ ID NO: 17506 - RNA, 32 nt, Homo Sapiens
gauugcucgaggaggccuggggucugugaggc

SEQ ID NO: 17507 - RNA, 32 nt, Homo Sapiens
ugaguccagaaaguggcaguugcagugagugg

SEQ ID NO: 17508 - RNA, 32 nt, Homo Sapiens
ggugacuuucccuuuuagauuugcuaagaauu

SEQ ID NO: 17509 - RNA, 32 nt, Homo Sapiens
cugcacggugagagggcacgggcacacgguuc

SEQ ID NO: 17510 - RNA, 32 nt, Homo Sapiens
ggccacgagcugcgaaagggcgggaaaggcag

SEQ ID NO: 17511 - RNA, 32 nt, Homo Sapiens
caguacauuucccaauaaucucuuuuucucau

SEQ ID NO: 17512 - RNA, 32 nt, Homo Sapiens
acuauucuguuguuuuucuucaccuacuagcc

SEQ ID NO: 17513 - RNA, 32 nt, Homo Sapiens
gggacuugcccccaaggccgcacacugaguua

SEQ ID NO: 17514 - RNA, 32 nt, Homo Sapiens
aggcggccuuggcgucacccuuucaggcaucu

SEQ ID NO: 17515 - RNA, 32 nt, Homo Sapiens
uuggguugcauucuucccucuggacuagagua

SEQ ID NO: 17516 - RNA, 32 nt, Homo Sapiens
cagccagcaggugcccggcagcucggcgccac

SEQ ID NO: 17517 - RNA, 32 nt, Homo Sapiens
ugccagcuggaacaggaucaagcaggcccagg

SEQ ID NO: 17518 - RNA, 32 nt, Homo Sapiens
gcugcauggccgggcggggcggugucuccuuu

SEQ ID NO: 17519 - RNA, 32 nt, Homo Sapiens
ugguggcaucugaguuccccauccuaccacuc

SEQ ID NO: 17520 - RNA, 32 nt, Homo Sapiens
caucagcuuggcccgcuccaucagcaaagaca

SEQ ID NO: 17521 - RNA, 32 nt, Homo Sapiens
uaucaauauaaaacaauguaaaugguggaaau

SEQ ID NO: 17522 - RNA, 32 nt, Homo Sapiens
cccucccuccagcccagcuccauucuuuggca

SEQ ID NO: 17523 - RNA, 32 nt, Homo Sapiens
aauuugucacccaaaacaggagggggaugggg

SEQ ID NO: 17524 - RNA, 32 nt, Homo Sapiens
ccuccgcugccgucgccgcagcagccaccaau

SEQ ID NO: 17525 - RNA, 32 nt, Homo Sapiens
agcaagcagggggccaguggcggggcccagcg

SEQ ID NO: 17526 - RNA, 32 nt, Homo Sapiens
ugguuggguuguuuuucuuuuaaguggucaua

SEQ ID NO: 17527 - RNA, 32 nt, Homo Sapiens
accaggaguccaugaagaagauggcuccugcc

SEQ ID NO: 17528 - RNA, 32 nt, Homo Sapiens
caucagauaggaauuuuggacucauuuaaacu

SEQ ID NO: 17529 - RNA, 32 nt, Homo Sapiens
gcuuccgcucccucacagcucccgucccguua

SEQ ID NO: 17530 - RNA, 32 nt, Homo Sapiens
ugacucacaccuguaaucccagcacuuucgga

SEQ ID NO: 17531 - RNA, 30 nt, Homo Sapiens
uacauugucuguguuuagcuuuuccuagua

SEQ ID NO: 17532 - RNA, 32 nt, Homo Sapiens
cgugaccgugccugggcacuucugggaagucc

SEQ ID NO: 17533 - RNA, 32 nt, Homo Sapiens
aaauauuagcuuugauggcagcauacaguguu

SEQ ID NO: 17534 - RNA, 32 nt, Homo Sapiens
gcgugucugcgccugugugcgcagccaguuuu

SEQ ID NO: 17535 - RNA, 32 nt, Homo Sapiens
ugauuucuugcucauuuucagaauaacuuucc

SEQ ID NO: 17536 - RNA, 28 nt, Homo Sapiens
uaugauggguauuuacauuugaacacua

SEQ ID NO: 17537 - RNA, 32 nt, Homo Sapiens
aaccagcucaaacuugcuugaccuccacuuuu

SEQ ID NO: 17538 - RNA, 32 nt, Homo Sapiens
cuuccuguuuucccuuuuccuuuuaagccucg

SEQ ID NO: 17539 - RNA, 32 nt, Homo Sapiens
caucuccagggugacggaacccaguguauuac

SEQ ID NO: 17540 - RNA, 32 nt, Homo Sapiens
gaaagggaggcugggugagcagagacagaaaa

SEQ ID NO: 17541 - RNA, 32 nt, Homo Sapiens
uacauaaguuuuuuuuaaccccuagaauuuaa

SEQ ID NO: 17542 - RNA, 32 nt, Homo Sapiens
augcgcacaauuuugcaauguuuuacagaaag

SEQ ID NO: 17543 - RNA, 31 nt, Homo Sapiens
cacugugcaagguguuggagaaauccaaagc

SEQ ID NO: 17544 - RNA, 32 nt, Homo Sapiens
cugcugcgcgcccgcgccuagagcugccgccc

SEQ ID NO: 17545 - RNA, 32 nt, Homo Sapiens
aaacauguguauauauugcaccuugaguuguc

SEQ ID NO: 17546 - RNA, 32 nt, Homo Sapiens
agaagugagcccugccugggcuccacacccag

SEQ ID NO: 17547 - RNA, 32 nt, Homo Sapiens
cuuucuuacagccauuuuccugcuuuuccaca

SEQ ID NO: 17548 - RNA, 32 nt, Homo Sapiens
gaagcauggagcagcagcugugcgagcucugc

SEQ ID NO: 17549 - RNA, 32 nt, Homo Sapiens
aagccugccacgggcguauccuugcagccuca

SEQ ID NO: 17550 - RNA, 32 nt, Homo Sapiens
ccuuuuggaaaacaccauucuaaauuuauccu

SEQ ID NO: 17551 - RNA, 32 nt, Homo Sapiens
cccauucauacacuguguuacaugagagagcc

SEQ ID NO: 17552 - RNA, 32 nt, Homo Sapiens
ggguugggggcaaugaugagcauaugaauuuu

SEQ ID NO: 17553 - RNA, 32 nt, Homo Sapiens
cuguccgccuccagccgcucuccucugacggg

SEQ ID NO: 17554 - RNA, 32 nt, Homo Sapiens
uaaccugccauagucagacuucagacuuucaa

SEQ ID NO: 17555 - RNA, 28 nt, Homo Sapiens
uucuguagaaaauaaaacugagcuacga

SEQ ID NO: 17556 - RNA, 32 nt, Homo Sapiens
uuauuguuucuugcuuuugucuaaguacauuc

SEQ ID NO: 17557 - RNA, 32 nt, Homo Sapiens
uacuaguaucuaggaaugaacaguaaaagagg

SEQ ID NO: 17558 - RNA, 32 nt, Homo Sapiens
ggaucuuuuuauuuccuauuuuuggcuuccua

SEQ ID NO: 17559 - RNA, 32 nt, Homo Sapiens
agacuggccgcggugcuagucgguagcagcgg

SEQ ID NO: 17560 - RNA, 31 nt, Homo Sapiens
cuggcuggacugccucagccccgcgcgccuc

SEQ ID NO: 17561 - RNA, 32 nt, Homo Sapiens
agagacagcaggguugucacaauauugaaaca

SEQ ID NO: 17562 - RNA, 32 nt, Homo Sapiens
aauaggcucccgugcuuuucuaauguuauugc

SEQ ID NO: 17563 - RNA, 32 nt, Homo Sapiens
ugcuguuugcugugcguggaaugcccuucacu

SEQ ID NO: 17564 - RNA, 32 nt, Homo Sapiens
cuccugucaaggcagcgagagcugaugcacuc

SEQ ID NO: 17565 - RNA, 32 nt, Homo Sapiens
cuuccugcaacggcccaggagcucagagcucc

SEQ ID NO: 17566 - RNA, 32 nt, Homo Sapiens
cagauucuuauuuuguuugaauuuauaaacaa

SEQ ID NO: 17567 - RNA, 32 nt, Homo Sapiens
agaagagagaaaauaugacauguaucuuugcu

SEQ ID NO: 17568 - RNA, 32 nt, Homo Sapiens
gugaagcagcuuugagagaggaggaagaggga

SEQ ID NO: 17569 - RNA, 31 nt, Homo Sapiens
caccuuucacccucaugaaaacacacauaca

SEQ ID NO: 17570 - RNA, 32 nt, Homo Sapiens
uuuauuauucugaucaugauaugaccauuuaa

SEQ ID NO: 17571 - RNA, 32 nt, Homo Sapiens
ugaaguugaugaugauguuuaugaugaagaag

SEQ ID NO: 17572 - RNA, 32 nt, Homo Sapiens
acuuucccggucacuauauaaagcaaauaaac

SEQ ID NO: 17573 - RNA, 32 nt, Homo Sapiens
cgaaacccaagccccuccuuccucugguguuu

SEQ ID NO: 17574 - RNA, 32 nt, Homo Sapiens
ccgguccugagacacgcuguguggcugaaaag

SEQ ID NO: 17575 - RNA, 32 nt, Homo Sapiens
aagacauuauacaaaacaaauuuagaaacugg

SEQ ID NO: 17576 - RNA, 32 nt, Homo Sapiens
gggaccgccgaggcugcccccaaguguaacuc

SEQ ID NO: 17577 - RNA, 32 nt, Homo Sapiens
uuuugggagaggaaacagaauaucagagagag

SEQ ID NO: 17578 - RNA, 32 nt, Homo Sapiens
gcgcuccuuggccuccuucuuggccagccgcc

SEQ ID NO: 17579 - RNA, 32 nt, Homo Sapiens
acauggcguccucgcgcagagcggcggcuccu

SEQ ID NO: 17580 - RNA, 32 nt, Homo Sapiens
gaaugaagagcagcaguaaaagaaauaccgag

SEQ ID NO: 17581 - RNA, 32 nt, Homo Sapiens
agaucagagaaguuaagaaacuugcucaacau

SEQ ID NO: 17582 - RNA, 32 nt, Homo Sapiens
acuguuucucuuaaaugagcagauagaaaucu

SEQ ID NO: 17583 - RNA, 32 nt, Homo Sapiens
uccuggcccucccuccccagacuugacuugaa

SEQ ID NO: 17584 - RNA, 32 nt, Homo Sapiens
gaagugguguugcccugaaccagcagauuuuc

SEQ ID NO: 17585 - RNA, 32 nt, Homo Sapiens
aauagaacuguguuaauauauaagaaaucugg

SEQ ID NO: 17586 - RNA, 32 nt, Homo Sapiens
auguaugugaauguuuaugauaaacgcuuaaa

SEQ ID NO: 17587 - RNA, 32 nt, Homo Sapiens
ggcagcggcggggcucugggcgcgcggcugga

SEQ ID NO: 17588 - RNA, 32 nt, Homo Sapiens
cugugugcuucuucauggcuuguuuacucuuc

SEQ ID NO: 17589 - RNA, 32 nt, Homo Sapiens
auugguaucucacauuaaauuguagggaggca

SEQ ID NO: 17590 - RNA, 32 nt, Homo Sapiens
caggccaacagcgacuccauggugggcuaugu

SEQ ID NO: 17591 - RNA, 32 nt, Homo Sapiens
aaacuuggccccagaugcuugucccuucuggg

SEQ ID NO: 17592 - RNA, 32 nt, Homo Sapiens
aucugggaagugccugguuuugaaaauccgcu

SEQ ID NO: 17593 - RNA, 32 nt, Homo Sapiens
aggauguaaugaaucagaaauaguuguuagua

SEQ ID NO: 17594 - RNA, 32 nt, Homo Sapiens
ugcaguccucgcccggacgcgccgcgcccccu

SEQ ID NO: 17595 - RNA, 32 nt, Homo Sapiens
uaaaacgcaccucugugugcaucauuuacuca

SEQ ID NO: 17596 - RNA, 32 nt, Homo Sapiens
guacaagauacccucauugucguucaugcaag

SEQ ID NO: 17597 - RNA, 32 nt, Homo Sapiens
cuuauuuuaguauacguauaaauaucaguauu

SEQ ID NO: 17598 - RNA, 32 nt, Homo Sapiens
accaaaacuaccuguguuaucuguaaauccca

SEQ ID NO: 17599 - RNA, 32 nt, Homo Sapiens
cgcaccugccccaaagcgggccgcccgagcgu

SEQ ID NO: 17600 - RNA, 32 nt, Homo Sapiens
ccccaggagacugaggucuuccugggcccuca

SEQ ID NO: 17601 - RNA, 32 nt, Homo Sapiens
cccugugguuguuugacugcucauuuuaccuc

SEQ ID NO: 17602 - RNA, 32 nt, Homo Sapiens
ccuauaucaaaauaacaaugugcauggauuaa

SEQ ID NO: 17603 - RNA, 32 nt, Homo Sapiens
cuguguucuucccagcucccaagcccuguggc

SEQ ID NO: 17604 - RNA, 32 nt, Homo Sapiens
gacuucagcucagagagcaccaucccgggggu

SEQ ID NO: 17605 - RNA, 32 nt, Homo Sapiens
cauuaucucagcaaaaggcuagagauaacccg

SEQ ID NO: 17606 - RNA, 32 nt, Homo Sapiens
aauuacagagauuaagaaguggcugccugaac

SEQ ID NO: 17607 - RNA, 32 nt, Homo Sapiens
aacaaaugggaaaaaauacacacacacaaaua

SEQ ID NO: 17608 - RNA, 32 nt, Homo Sapiens
ccuagagcccccggugggagccaggccgggac

SEQ ID NO: 17609 - RNA, 32 nt, Homo Sapiens
ugcucccggccgccccggaccagcgagcgcgg

SEQ ID NO: 17610 - RNA, 32 nt, Homo Sapiens
gggacagcagccccuccaccuggaccagggag

SEQ ID NO: 17611 - RNA, 32 nt, Homo Sapiens
ggccgccggccgcagcuccagguguccuagcc

SEQ ID NO: 17612 - RNA, 32 nt, Homo Sapiens
auccugaagaucuggacccgguuucugaagac

SEQ ID NO: 17613 - RNA, 32 nt, Homo Sapiens
aacgaucuccccgcggccgccgccgcuaccug

SEQ ID NO: 17614 - RNA, 32 nt, Homo Sapiens
ccuucuucccuuucuuccuguuuucuguuuuu

SEQ ID NO: 17615 - RNA, 32 nt, Homo Sapiens
cuugccgucaggugcuacggccacguggcccg

SEQ ID NO: 17616 - RNA, 32 nt, Homo Sapiens
cauccuggcuaacauggugaaccccgucucua

SEQ ID NO: 17617 - RNA, 31 nt, Homo Sapiens
guuuugcauuugacuucauuugacauuaguu

SEQ ID NO: 17618 - RNA, 32 nt, Homo Sapiens
agcccucgugucccgggcucacaguggcacga

SEQ ID NO: 17619 - RNA, 32 nt, Homo Sapiens
ccccggcgggcucugggacuugcugugcgcgc

SEQ ID NO: 17620 - RNA, 32 nt, Homo Sapiens
agauaaguggcucuuacccagcucucagugac

SEQ ID NO: 17621 - RNA, 32 nt, Homo Sapiens
uggcccccaagcuacuggcccgcaucuccaaa

SEQ ID NO: 17622 - RNA, 32 nt, Homo Sapiens
uggagugcaguggugugagcucggcucacugc

SEQ ID NO: 17623 - RNA, 32 nt, Homo Sapiens
ucuggcguguggagcuagugcucccgcuuauu

SEQ ID NO: 17624 - RNA, 32 nt, Homo Sapiens
uugucaacauauuucagcaguucuacuuuccc

SEQ ID NO: 17625 - RNA, 32 nt, Homo Sapiens
aauacauccaacaaggcuucuagcaaaaaugu

SEQ ID NO: 17626 - RNA, 32 nt, Homo Sapiens
ggcuuccuucuuccuuucccuuugguuaaucc

SEQ ID NO: 17627 - RNA, 32 nt, Homo Sapiens
ggauguuuguuguuuuaauuagcugcaauaua

SEQ ID NO: 17628 - RNA, 30 nt, Homo Sapiens
ugccaccaugcucagcuauuuuuuguauuu

SEQ ID NO: 17629 - RNA, 32 nt, Homo Sapiens
uaaaauugaaauggaaaauguuaguggccauu

SEQ ID NO: 17630 - RNA, 32 nt, Homo Sapiens
uauccaggguuuucauccaaagguugggccuc

SEQ ID NO: 17631 - RNA, 32 nt, Homo Sapiens
auuuuggcacuaucuuuauauuauuaaauaua

SEQ ID NO: 17632 - RNA, 32 nt, Homo Sapiens
aauagaggacuugaagcagaaagcaagugaau

SEQ ID NO: 17633 - RNA, 32 nt, Homo Sapiens
agcaccgaaugauugcuugugcucuccagaac

SEQ ID NO: 17634 - RNA, 32 nt, Homo Sapiens
acuugcccacaccuccaccuccccugagcccu

SEQ ID NO: 17635 - RNA, 32 nt, Homo Sapiens
auguugcucgggcuagccucaaacuccugggc

SEQ ID NO: 17636 - RNA, 32 nt, Homo Sapiens
caaagaucacuuugucaccagcccugggaccu

SEQ ID NO: 17637 - RNA, 32 nt, Homo Sapiens
ugaaugggagaagaaccuauuuuuguuguggu

SEQ ID NO: 17638 - RNA, 32 nt, Homo Sapiens
auuuaguaaaauucuuuuuuucucacuaugca

SEQ ID NO: 17639 - RNA, 32 nt, Homo Sapiens
gguggguugguaguuucuacaguugggcagcu

SEQ ID NO: 17640 - RNA, 32 nt, Homo Sapiens
uuauaugaaguuccuagaugauuuaaagcugu

SEQ ID NO: 17641 - RNA, 32 nt, Homo Sapiens
aaauuaaacaauuuauuuuauuuuagcaguuc

SEQ ID NO: 17642 - RNA, 32 nt, Homo Sapiens
ccgcccggucgccgcccgccagcccuucgucc

SEQ ID NO: 17643 - RNA, 32 nt, Homo Sapiens
agaagccggggccaccauugggugcugccaca

SEQ ID NO: 17644 - RNA, 32 nt, Homo Sapiens
auuggugugcagcagccacauugaaggauaga

SEQ ID NO: 17645 - RNA, 32 nt, Homo Sapiens
ccagaccugugcuacaauuuccauuacagaga

SEQ ID NO: 17646 - RNA, 32 nt, Homo Sapiens
caugaauccgcauaccuuggaauacacuguga

SEQ ID NO: 17647 - RNA, 32 nt, Homo Sapiens
aggcuucaauuagaauuauuuuucucaaaaaa

SEQ ID NO: 17648 - RNA, 32 nt, Homo Sapiens
uaucauaguuuuaagaaaaacauuuuaagaag

SEQ ID NO: 17649 - RNA, 32 nt, Homo Sapiens
uuuuggccaaaguccccaaacacaucauugcc

SEQ ID NO: 17650 - RNA, 32 nt, Homo Sapiens
acgccugcccccagccccgaggccucggcccc

SEQ ID NO: 17651 - RNA, 32 nt, Homo Sapiens
ugcgagcauuucccucccgggagaggagauca

SEQ ID NO: 17652 - RNA, 32 nt, Homo Sapiens
gcaaaucaaaacuacaaugagauaucaucuua

SEQ ID NO: 17653 - RNA, 28 nt, Homo Sapiens
ugaugcgggcggccaggcgggggucgac

SEQ ID NO: 17654 - RNA, 32 nt, Homo Sapiens
gcguccuuccuccccgggucccggccauggcg

SEQ ID NO: 17655 - RNA, 32 nt, Homo Sapiens
uguggaggacugugacggcucugacuuuggcu

SEQ ID NO: 17656 - RNA, 32 nt, Homo Sapiens
gaccuuuaauucuagcacuuugaauucgagca

SEQ ID NO: 17657 - RNA, 32 nt, Homo Sapiens
ccaacgcugcauuuggcucgggcccgguccau

SEQ ID NO: 17658 - RNA, 32 nt, Homo Sapiens
cguuuuuacaguuaggguuuugcaauaacuuc

SEQ ID NO: 17659 - RNA, 32 nt, Homo Sapiens
caacuggccccggcuuuauuccuccaccucuu

SEQ ID NO: 17660 - RNA, 32 nt, Homo Sapiens
uauuaauacuacuuauagaaauccauuaaaaa

SEQ ID NO: 17661 - RNA, 32 nt, Homo Sapiens
cuaaacccaucccgggcacauaccacccgugu

SEQ ID NO: 17662 - RNA, 30 nt, Homo Sapiens
agcccagagaagcuggaagccugccgaaaa

SEQ ID NO: 17663 - RNA, 32 nt, Homo Sapiens
guauugauugugucuuuuuuuuuuuuuuugga

SEQ ID NO: 17664 - RNA, 32 nt, Homo Sapiens
aauuuuugaaacaaaaaagaggaaggaaauca

SEQ ID NO: 17665 - RNA, 32 nt, Homo Sapiens
uucagcaaacuaaccagcauucccuauagccu

SEQ ID NO: 17666 - RNA, 32 nt, Homo Sapiens
uccaccucaggguggggcgggcaggaccccgu

SEQ ID NO: 17667 - RNA, 32 nt, Homo Sapiens
ugagaagacuccugggcuucagccucucccac

SEQ ID NO: 17668 - RNA, 32 nt, Homo Sapiens
cuccuucuggcauaaacuugagguggaagaua

SEQ ID NO: 17669 - RNA, 32 nt, Homo Sapiens
uacguuaaauguuuguuacaucaucuuucugu

SEQ ID NO: 17670 - RNA, 32 nt, Homo Sapiens
agcugggucagucccguauuuauuuugcuuug

SEQ ID NO: 17671 - RNA, 32 nt, Homo Sapiens
uugcuauuuuguuauauauauuacagaugaaa

SEQ ID NO: 17672 - RNA, 32 nt, Homo Sapiens
uguguagcauauacaacugaguguugaaagaa

SEQ ID NO: 17673 - RNA, 32 nt, Homo Sapiens
aagggcuauagguccccugcccugcccggguc

SEQ ID NO: 17674 - RNA, 32 nt, Homo Sapiens
augacacuaggauucagauuggugaaguuuuu

SEQ ID NO: 17675 - RNA, 31 nt, Homo Sapiens
gagaaaauggggcuugcagagcucaaaccau

SEQ ID NO: 17676 - RNA, 32 nt, Homo Sapiens
agccugcgcggcgggaagcggcggcggcggcu

SEQ ID NO: 17677 - RNA, 32 nt, Homo Sapiens
uccccgauguggugcgcucaauaaaaaugcug

SEQ ID NO: 17678 - RNA, 32 nt, Homo Sapiens
accccugguauuucuuuuuuuuguuguuuucg

SEQ ID NO: 17679 - RNA, 32 nt, Homo Sapiens
cugacuuugguuuuuccaaccaaggaauuuaa

SEQ ID NO: 17680 - RNA, 32 nt, Homo Sapiens
ccaagcuaaaagacgcuuguuaaaggcuauuu

SEQ ID NO: 17681 - RNA, 32 nt, Homo Sapiens
cucuagcaucacuccugagcugcgggagaggu

SEQ ID NO: 17682 - RNA, 32 nt, Homo Sapiens
aguuuugugaaugaguuaaauaucauugauag

SEQ ID NO: 17683 - RNA, 32 nt, Homo Sapiens
uuuuuucuuuuuucuuuuuuuuuuucuuuuuu

SEQ ID NO: 17684 - RNA, 32 nt, Homo Sapiens
uuuuuuaguauccucagcacucauucuauucu

SEQ ID NO: 17685 - RNA, 32 nt, Homo Sapiens
cacucuuccuuccaagucugagcugugcuggg

SEQ ID NO: 17686 - RNA, 32 nt, Homo Sapiens
ccccuccagaaucugcaggcgccucugguucu

SEQ ID NO: 17687 - RNA, 32 nt, Homo Sapiens
ggugguagagccuuuaccuguagcuugaaagg

SEQ ID NO: 17688 - RNA, 32 nt, Homo Sapiens
aagcgugcgagggggguggggugggguggaaa

SEQ ID NO: 17689 - RNA, 30 nt, Homo Sapiens
cgggaggcucccgugccgagccgaggccag

SEQ ID NO: 17690 - RNA, 32 nt, Homo Sapiens
ggaucaugaggucaggaggaucaugaggauca

SEQ ID NO: 17691 - RNA, 32 nt, Homo Sapiens
guggggcaggcaccccacuggcugcagcuagc

SEQ ID NO: 17692 - RNA, 32 nt, Homo Sapiens
uggggcgugcgcguuauccauguauugccuuu

SEQ ID NO: 17693 - RNA, 32 nt, Homo Sapiens
agagcuggcaccgcgcaagggccccugccucc

SEQ ID NO: 17694 - RNA, 32 nt, Homo Sapiens
ucuagcccaccauuucuuggggccugaacccc

SEQ ID NO: 17695 - RNA, 32 nt, Homo Sapiens
aaguguacagaaaaaagaaaucuagacauccc

SEQ ID NO: 17696 - RNA, 32 nt, Homo Sapiens
aguuugaggagaaaaaucuugaugucauuacu

SEQ ID NO: 17697 - RNA, 32 nt, Homo Sapiens
aguuacaauuuaaucuuuacaauuaaaagggc

SEQ ID NO: 17698 - RNA, 32 nt, Homo Sapiens
gccaggcagguccgccugugcgggugccccug

SEQ ID NO: 17699 - RNA, 32 nt, Homo Sapiens
ugcaguuggcuagguuuuuuuaauauuuguuu

SEQ ID NO: 17700 - RNA, 32 nt, Homo Sapiens
ggcgggggcgagcgcguccgguuugcuggaag

SEQ ID NO: 17701 - RNA, 32 nt, Homo Sapiens
caaccccucagggcugcccaccggcuccugca

SEQ ID NO: 17702 - RNA, 32 nt, Homo Sapiens
cugccgccuuguggcgcgcccggcccagccgg

SEQ ID NO: 17703 - RNA, 32 nt, Homo Sapiens
uaaaagugcgcaaaacacauccuuauuguucc

SEQ ID NO: 17704 - RNA, 32 nt, Homo Sapiens
aauccuuuggaaucuuauggcaaccaaaugug

SEQ ID NO: 17705 - RNA, 32 nt, Homo Sapiens
uggauauauucuuugaaaaaugaguaguaugg

SEQ ID NO: 17706 - RNA, 32 nt, Homo Sapiens
aaaacugagguggucagguucaucucuucaaa

SEQ ID NO: 17707 - RNA, 32 nt, Homo Sapiens
auucuuggccccaccccagaccuccugaauca

SEQ ID NO: 17708 - RNA, 32 nt, Homo Sapiens
aaggaaguuuagcauaaauuauaguaguuuuc

SEQ ID NO: 17709 - RNA, 32 nt, Homo Sapiens
uacacuuguugggagggauguacaaugcauau

SEQ ID NO: 17710 - RNA, 32 nt, Homo Sapiens
gcgggugugacuugcuugguggccucauucca

SEQ ID NO: 17711 - RNA, 32 nt, Homo Sapiens
uucaaugaauuaauucagauguuuuacgcaag

SEQ ID NO: 17712 - RNA, 32 nt, Homo Sapiens
aacauaaauaauaaacaaaauuaccgagaacc

SEQ ID NO: 17713 - RNA, 32 nt, Homo Sapiens
uggggaggggcgggaggcgcgcgcgggagggu

SEQ ID NO: 17714 - RNA, 27 nt, Homo Sapiens
gacaggcccuauuccagcccccuugcu

SEQ ID NO: 17715 - RNA, 32 nt, Homo Sapiens
aagacauccuuccugagucacucuuaaucaug

SEQ ID NO: 17716 - RNA, 32 nt, Homo Sapiens
uacccuguauguuuuucuucuuccacauguac

SEQ ID NO: 17717 - RNA, 32 nt, Homo Sapiens
gauggaaucguaauaaaccacgccaugaggaa

SEQ ID NO: 17718 - RNA, 32 nt, Homo Sapiens
gaggaugucaccaacugaauuaaacuuaaguc

SEQ ID NO: 17719 - RNA, 32 nt, Homo Sapiens
ucuucacugcaaacagaagggguuaaugacag

SEQ ID NO: 17720 - RNA, 32 nt, Homo Sapiens
agucagugccacugaaaauacagaacccauua

SEQ ID NO: 17721 - RNA, 32 nt, Homo Sapiens
gggcucugggcuggcugccugcaccggccaug

SEQ ID NO: 17722 - RNA, 32 nt, Homo Sapiens
guuuuuaauuuaauaagguggcaugcagauac

SEQ ID NO: 17723 - RNA, 32 nt, Homo Sapiens
gccugggcccggcuggggaggggguggcaggg

SEQ ID NO: 17724 - RNA, 32 nt, Homo Sapiens
ccugauacuguaaacauacuguaauaauaaug

SEQ ID NO: 17725 - RNA, 31 nt, Homo Sapiens
cccuugaggcuggggagcuccacuccuuggc

SEQ ID NO: 17726 - RNA, 32 nt, Homo Sapiens
gugguccucaggugcagccccgccgagauguc

SEQ ID NO: 17727 - RNA, 32 nt, Homo Sapiens
cagaguuguuaacugcuauauuucaucuguuc

SEQ ID NO: 17728 - RNA, 32 nt, Homo Sapiens
ugaggcggcggcgcccccggcccgagagcgca

SEQ ID NO: 17729 - RNA, 32 nt, Homo Sapiens
aauuuuuggcaucugguaauauuaaaaccauu

SEQ ID NO: 17730 - RNA, 32 nt, Homo Sapiens
ccccgaaucaugacccacccagugucuuucga

SEQ ID NO: 17731 - RNA, 32 nt, Homo Sapiens
cagcgcagcuggaguguuaggagggcggccug

SEQ ID NO: 17732 - RNA, 32 nt, Homo Sapiens
ccucagugcccuugccccauccccucaucugu

SEQ ID NO: 17733 - RNA, 32 nt, Homo Sapiens
ucagagaggagcugccuuaggagucuuggguc

SEQ ID NO: 17734 - RNA, 32 nt, Homo Sapiens
uucuaccacugcaaagaguuguaaccauuuuc

SEQ ID NO: 17735 - RNA, 32 nt, Homo Sapiens
gaguugcuggugccuccuccuucacccagcgu

SEQ ID NO: 17736 - RNA, 32 nt, Homo Sapiens
guauuuuuguugggcucaauuuucauuauaau

SEQ ID NO: 17737 - RNA, 32 nt, Homo Sapiens
caggugcuggaacagucgggaggggcagcauc

SEQ ID NO: 17738 - RNA, 32 nt, Homo Sapiens
ggagacucggauauaccuucucagaagcugca

SEQ ID NO: 17739 - RNA, 32 nt, Homo Sapiens
gcacauugggacuucucucccucccccaucua

SEQ ID NO: 17740 - RNA, 32 nt, Homo Sapiens
cuucuaguucccuuccccacuuucacuagagc

SEQ ID NO: 17741 - RNA, 32 nt, Homo Sapiens
gagugcacacuggaggucccagagcacgacga

SEQ ID NO: 17742 - RNA, 32 nt, Homo Sapiens
uaauauuguaaaccacuguguacucuauucau

SEQ ID NO: 17743 - RNA, 32 nt, Homo Sapiens
cccaccucacugacagucuuccuuucuccugg

SEQ ID NO: 17744 - RNA, 32 nt, Homo Sapiens
ucuacuaauguuuuaaauuuucucagugaccu

SEQ ID NO: 17745 - RNA, 32 nt, Homo Sapiens
ggcggcuucucgaguccuccccgacgcguccu

SEQ ID NO: 17746 - RNA, 32 nt, Homo Sapiens
ccggcugcgggaagauggcggcucagccgcug

SEQ ID NO: 17747 - RNA, 32 nt, Homo Sapiens
cacgaggccccggccuguggcugagauggcaa

SEQ ID NO: 17748 - RNA, 32 nt, Homo Sapiens
agcgggaaaaaaaacuuaucugagguuggaaa

SEQ ID NO: 17749 - RNA, 32 nt, Homo Sapiens
cagcuuccaagcccccggcaccucugcucagc

SEQ ID NO: 17750 - RNA, 32 nt, Homo Sapiens
cccuugagugaaugccuguuuaugaugacuga

SEQ ID NO: 17751 - RNA, 32 nt, Homo Sapiens
agaccuugggguccccgcgcuuccucuugcuc

SEQ ID NO: 17752 - RNA, 32 nt, Homo Sapiens
uuaucguuaauguuuuuuuucuuuaccuucag

SEQ ID NO: 17753 - RNA, 32 nt, Homo Sapiens
guucauuuagauugaaaacuuuucucagaugg

SEQ ID NO: 17754 - RNA, 32 nt, Homo Sapiens
cauuaaagauaaauuaaaagguaaucauggug

SEQ ID NO: 17755 - RNA, 32 nt, Homo Sapiens
aaauugauacaaacagaaucaggacagaaaau

SEQ ID NO: 17756 - RNA, 32 nt, Homo Sapiens
uuuguagaaaucagucucaagugcuucaagag

SEQ ID NO: 17757 - RNA, 32 nt, Homo Sapiens
cuccggggccagcagccgcccgaccaggggcc

SEQ ID NO: 17758 - RNA, 32 nt, Homo Sapiens
guauaugugaaugaaaugauacgaugucucag

SEQ ID NO: 17759 - RNA, 32 nt, Homo Sapiens
gguauuggggaagagagacugaagucacaacc

SEQ ID NO: 17760 - RNA, 32 nt, Homo Sapiens
ggcgagagccccagcccugacccucgguccug

SEQ ID NO: 17761 - RNA, 32 nt, Homo Sapiens
gugucuuuccaagagagaugugucaccaauua

SEQ ID NO: 17762 - RNA, 32 nt, Homo Sapiens
acaccaacaaauaaaauauugaauauaucggu

SEQ ID NO: 17763 - RNA, 32 nt, Homo Sapiens
cuuuuuauaaaacuucuuguuuuuaggauucc

SEQ ID NO: 17764 - RNA, 32 nt, Homo Sapiens
aggaucucuuagcauuuuaauuagauguaauu

SEQ ID NO: 17765 - RNA, 32 nt, Homo Sapiens
gcuuggagugaggcccccuggcguggagucuu

SEQ ID NO: 17766 - RNA, 32 nt, Homo Sapiens
ugacucugacuucacaugaguauuucuuccca

SEQ ID NO: 17767 - RNA, 32 nt, Homo Sapiens
auuacauuugaaauauaaaccaaaugaaauau

SEQ ID NO: 17768 - RNA, 32 nt, Homo Sapiens
ggaaacuguuuaaccggaucccauuguaccca

SEQ ID NO: 17769 - RNA, 32 nt, Homo Sapiens
cucacuccccacuuugaagccaucucuguucu

SEQ ID NO: 17770 - RNA, 32 nt, Homo Sapiens
guccgccccaaccccgcccccggaggccucca

SEQ ID NO: 17771 - RNA, 32 nt, Homo Sapiens
uguaauuuguauggacuaaauaaaaacuuuau

SEQ ID NO: 17772 - RNA, 32 nt, Homo Sapiens
uugcuuugcacuuuuccguuucagcggaagac

SEQ ID NO: 17773 - RNA, 32 nt, Homo Sapiens
gggcgggggaggggguucuuggugcuacagcc

SEQ ID NO: 17774 - RNA, 32 nt, Homo Sapiens
gaucuccucauuaccucuuuuacaaucaccuc

SEQ ID NO: 17775 - RNA, 32 nt, Homo Sapiens
cauaugcaggggauugguuccagacccccuaa

SEQ ID NO: 17776 - RNA, 32 nt, Homo Sapiens
uuauucuaaagaagcugaaauaauugaagaga

SEQ ID NO: 17777 - RNA, 32 nt, Homo Sapiens
cucucgcacacacagugauucccuccucccgu

SEQ ID NO: 17778 - RNA, 32 nt, Homo Sapiens
cacucggaugucaaguggcuggaugagaccca

SEQ ID NO: 17779 - RNA, 32 nt, Homo Sapiens
cggcugccuggggcuccagacuugugcugcgu

SEQ ID NO: 17780 - RNA, 32 nt, Homo Sapiens
ugcagaaugggcaauuuuaugcauuuauauuc

SEQ ID NO: 17781 - RNA, 32 nt, Homo Sapiens
cccacaucugagugaaggucuugcucuucccu

SEQ ID NO: 17782 - RNA, 32 nt, Homo Sapiens
cuuuccggaagcugcugggggaugucugacua

SEQ ID NO: 17783 - RNA, 32 nt, Homo Sapiens
caugguguggucugaagauugaaaggucacuu

SEQ ID NO: 17784 - RNA, 32 nt, Homo Sapiens
aagccaaaaauauaccaguaaaacagauucug

SEQ ID NO: 17785 - RNA, 32 nt, Homo Sapiens
gaacugugggucugucugugaagagacccagu

SEQ ID NO: 17786 - RNA, 30 nt, Homo Sapiens
uuccuugucugugaaacagaugaugaucau

SEQ ID NO: 17787 - RNA, 32 nt, Homo Sapiens
uggucucugccagcccaagcaucacugcccga

SEQ ID NO: 17788 - RNA, 32 nt, Homo Sapiens
uuuauuaagaaauuauacuaaacauugauguc

SEQ ID NO: 17789 - RNA, 32 nt, Homo Sapiens
uucccuguauucaaaucccagugucuaacauu

SEQ ID NO: 17790 - RNA, 32 nt, Homo Sapiens
gcgcgcggccuggggcaacccgggccacaggg

SEQ ID NO: 17791 - RNA, 32 nt, Homo Sapiens
acccaggcuccccgcccgaggaggaagaugca

SEQ ID NO: 17792 - RNA, 32 nt, Homo Sapiens
gagggcgaugccucagaaugcccacaagcuac

SEQ ID NO: 17793 - RNA, 32 nt, Homo Sapiens
caacagaaguauuucuguggauggcaucaaac

SEQ ID NO: 17794 - RNA, 32 nt, Homo Sapiens
ugaagcuuccuguguccuuuaacacuuuaagu

SEQ ID NO: 17795 - RNA, 32 nt, Homo Sapiens
auauacuuuuccaagacaaaauggaacaucac

SEQ ID NO: 17796 - RNA, 32 nt, Homo Sapiens
uuuccagccaaggcauggacccugacaccugc

SEQ ID NO: 17797 - RNA, 32 nt, Homo Sapiens
agccugggguggggcgggagggggaacaguau

SEQ ID NO: 17798 - RNA, 32 nt, Homo Sapiens
ccaggccgcgucuucaggcagcugcgcgcacc

SEQ ID NO: 17799 - RNA, 32 nt, Homo Sapiens
ccccuuaucugugccaacgacugggggccuaa

SEQ ID NO: 17800 - RNA, 32 nt, Homo Sapiens
ccgcuacgcagguggcugaagcagaagaauca

SEQ ID NO: 17801 - RNA, 32 nt, Homo Sapiens
acccauaaaaaaccucuucuguaaugccaggu

SEQ ID NO: 17802 - RNA, 32 nt, Homo Sapiens
uucagaaugcaaagggcuugacuauuaaaugu

SEQ ID NO: 17803 - RNA, 32 nt, Homo Sapiens
ggaugugggcucugaggccuaaaccauuucca

SEQ ID NO: 17804 - RNA, 32 nt, Homo Sapiens
gaacccagguaguugggcugcagagucacugc

SEQ ID NO: 17805 - RNA, 32 nt, Homo Sapiens
agaucgugggggacccaagcccgggguugcgu

SEQ ID NO: 17806 - RNA, 32 nt, Homo Sapiens
auggagaaacaaguuauauaugcugacaguuc

SEQ ID NO: 17807 - RNA, 30 nt, Homo Sapiens
cuagucggugacccugccuagaauuuucua

SEQ ID NO: 17808 - RNA, 32 nt, Homo Sapiens
cgccuguaaucccagcacuuuagaucacuuga

SEQ ID NO: 17809 - RNA, 32 nt, Homo Sapiens
gggcacaaucugggggcuaagcuuguggggag

SEQ ID NO: 17810 - RNA, 32 nt, Homo Sapiens
ggucggguccgcggccugcgcuguagcggucg

SEQ ID NO: 17811 - RNA, 32 nt, Homo Sapiens
cugaccugucuccuucacacaguccacgucac

SEQ ID NO: 17812 - RNA, 32 nt, Homo Sapiens
ccaccaaaagugaggucuucuacccaggggag

SEQ ID NO: 17813 - RNA, 32 nt, Homo Sapiens
ugugcuuccauggagcugggugucaagagaag

SEQ ID NO: 17814 - RNA, 31 nt, Homo Sapiens
aggcggcagcgcaggccccacuguggccggg

SEQ ID NO: 17815 - RNA, 32 nt, Homo Sapiens
gaagacacaguguauuacauuauauuacauuu

SEQ ID NO: 17816 - RNA, 32 nt, Homo Sapiens
guuccaggggguacagauagugaauguauuga

SEQ ID NO: 17817 - RNA, 32 nt, Homo Sapiens
gucaggcugguuauaagccggaggcagcuuua

SEQ ID NO: 17818 - RNA, 32 nt, Homo Sapiens
aaaggaagguguugccugcugcuucaacucgu

SEQ ID NO: 17819 - RNA, 29 nt, Homo Sapiens
cuuuccauauguauaacguggggauaaua

SEQ ID NO: 17820 - RNA, 32 nt, Homo Sapiens
ccuaggagggaaacagaacuaauuacgagggg

SEQ ID NO: 17821 - RNA, 32 nt, Homo Sapiens
guagucagucugaguucugauggucagagguu

SEQ ID NO: 17822 - RNA, 32 nt, Homo Sapiens
agcacgaagacagaccacacaaacaccacuga

SEQ ID NO: 17823 - RNA, 30 nt, Homo Sapiens
cggaggcgggugggcgcgggucucacccgg

SEQ ID NO: 17824 - RNA, 32 nt, Homo Sapiens
cagcugcggaccgggggcguggcgagggcgca

SEQ ID NO: 17825 - RNA, 32 nt, Homo Sapiens
cacugugucugcgugauggggucugaggcuug

SEQ ID NO: 17826 - RNA, 32 nt, Homo Sapiens
cgaaccggccccaccacccccuccuacccggg

SEQ ID NO: 17827 - RNA, 32 nt, Homo Sapiens
cuuccaaaugcagcugcgcucuuagugcuuga

SEQ ID NO: 17828 - RNA, 32 nt, Homo Sapiens
cggccuccuccucacccuucccggcccccggc

SEQ ID NO: 17829 - RNA, 32 nt, Homo Sapiens
aaugaggacgugcagcagcauuggaaggcugg

SEQ ID NO: 17830 - RNA, 32 nt, Homo Sapiens
cuccuuuuacugugucuuguauuaaguacggg

SEQ ID NO: 17831 - RNA, 32 nt, Homo Sapiens
gccaucuucucgcagagugcucccugcuaacg

SEQ ID NO: 17832 - RNA, 32 nt, Homo Sapiens
cuucacccugaacauuuaguacccugcaggcc

SEQ ID NO: 17833 - RNA, 32 nt, Homo Sapiens
cguggacuggaaagcuguuccgcagagaaaac

SEQ ID NO: 17834 - RNA, 32 nt, Homo Sapiens
ggcggcacagccagcccuucuuggguccccag

SEQ ID NO: 17835 - RNA, 32 nt, Homo Sapiens
aucccuucuuuuucuuuuuuucuuugguuuaa

SEQ ID NO: 17836 - RNA, 32 nt, Homo Sapiens
agugugacuaaucuccuucucuucgcuccaca

SEQ ID NO: 17837 - RNA, 32 nt, Homo Sapiens
cagcugggaaaggaaggaaagugaccccacuu

SEQ ID NO: 17838 - RNA, 32 nt, Homo Sapiens
cucugcucgcgccuggcgcccggagccugccc

SEQ ID NO: 17839 - RNA, 32 nt, Homo Sapiens
acgguuucccugcugcugcagcccccgucggc

SEQ ID NO: 17840 - RNA, 32 nt, Homo Sapiens
cacaaagguggacaaccugaaagagaaaaggc

SEQ ID NO: 17841 - RNA, 32 nt, Homo Sapiens
aagcucgaggagugggggcagcaaaugcggga

SEQ ID NO: 17842 - RNA, 32 nt, Homo Sapiens
uaguaagucuucaucuaugcauguuuuugagu

SEQ ID NO: 17843 - RNA, 32 nt, Homo Sapiens
ucuuucaggaaacaggcuaucaggggcauuua

SEQ ID NO: 17844 - RNA, 32 nt, Homo Sapiens
ucgugggucugagacaaagggcccuguuucuc

SEQ ID NO: 17845 - RNA, 32 nt, Homo Sapiens
gacuguuugaucuuguauuacccacaggaaug

SEQ ID NO: 17846 - RNA, 32 nt, Homo Sapiens
ugcuacugaacagguggugguucuugucaagu

SEQ ID NO: 17847 - RNA, 32 nt, Homo Sapiens
uugugucugcagcacauaguccaauuauuuuc

SEQ ID NO: 17848 - RNA, 32 nt, Homo Sapiens
gucggggugggagaguuaaacaacauuuaaac

SEQ ID NO: 17849 - RNA, 32 nt, Homo Sapiens
aaguggccauguuugcucaaauguccucauca

SEQ ID NO: 17850 - RNA, 32 nt, Homo Sapiens
cacagaaagaagaauuucuaaaauauuggauu

SEQ ID NO: 17851 - RNA, 32 nt, Homo Sapiens
ccaccccgcuguuuuucuuaaauuugcagaac

SEQ ID NO: 17852 - RNA, 32 nt, Homo Sapiens
gauggaaaaaagacaugggguagggacguaag

SEQ ID NO: 17853 - RNA, 32 nt, Homo Sapiens
cuuuccuggggccuccucccauccugccauga

SEQ ID NO: 17854 - RNA, 32 nt, Homo Sapiens
cauguuuauguaaacaaaucuuuccauaucca

SEQ ID NO: 17855 - RNA, 32 nt, Homo Sapiens
guccccuuccccacccucuggcccccaccuuc

SEQ ID NO: 17856 - RNA, 32 nt, Homo Sapiens
uaguuuaaaaauuuuuuaacuuuugugucaaa

SEQ ID NO: 17857 - RNA, 30 nt, Homo Sapiens
aggcaaugauaguaagaaaugcuaaagaua

SEQ ID NO: 17858 - RNA, 32 nt, Homo Sapiens
guuagaagcucauccaggauauuuucaauauu

SEQ ID NO: 17859 - RNA, 32 nt, Homo Sapiens
cuggaaauuuuuccaguuugauuuaauagaug

SEQ ID NO: 17860 - RNA, 32 nt, Homo Sapiens
gccaccucuuucuggaggggcugaggacagau

SEQ ID NO: 17861 - RNA, 32 nt, Homo Sapiens
ccccaaacugagacauugcauuuugugagcuc

SEQ ID NO: 17862 - RNA, 32 nt, Homo Sapiens
aacguuuuucuaugacuuuuagguaggaugag

SEQ ID NO: 17863 - RNA, 31 nt, Homo Sapiens
ugagagcagcgcagaggcuuuggaggcugca

SEQ ID NO: 17864 - RNA, 32 nt, Homo Sapiens
ccuucuuauuuauguaacuggcuuucauuuag

SEQ ID NO: 17865 - RNA, 32 nt, Homo Sapiens
cgcucgccugcgcgcggcccugcgugaggggg

SEQ ID NO: 17866 - RNA, 32 nt, Homo Sapiens
ggcuucggcugagaccuguguaaccugcugcc

SEQ ID NO: 17867 - RNA, 32 nt, Homo Sapiens
caagagguuccaaauugauccaaauacccaag

SEQ ID NO: 17868 - RNA, 32 nt, Homo Sapiens
ucacaguaugcacacacacacacacacaacgc

SEQ ID NO: 17869 - RNA, 32 nt, Homo Sapiens
gaaaugaaggcacuacauugaaauauguuuug

SEQ ID NO: 17870 - RNA, 32 nt, Homo Sapiens
ucagcaugagggagguggggcugggggccugg

SEQ ID NO: 17871 - RNA, 32 nt, Homo Sapiens
ccguacaguuucucgauggaauugugugauca

SEQ ID NO: 17872 - RNA, 32 nt, Homo Sapiens
agaguuaaauacaaaaucauggugacacuucc

SEQ ID NO: 17873 - RNA, 32 nt, Homo Sapiens
auaagaaauaaaauacaagauaugaguaaaaa

SEQ ID NO: 17874 - RNA, 32 nt, Homo Sapiens
aauacagaaaugacccauucccugcccaccag

SEQ ID NO: 17875 - RNA, 32 nt, Homo Sapiens
uguuacagaaaagugauaggaugaaaggucaa

SEQ ID NO: 17876 - RNA, 32 nt, Homo Sapiens
accgucuuccacgugaaagaaacuaggccucc

SEQ ID NO: 17877 - RNA, 32 nt, Homo Sapiens
ccaaaaggacaaagagguggccgagagaguuu

SEQ ID NO: 17878 - RNA, 32 nt, Homo Sapiens
ugacaagaugagagcagaaucguaagagcuuu

SEQ ID NO: 17879 - RNA, 32 nt, Homo Sapiens
uuuagugucuauuugcauauaacccugaaaac

SEQ ID NO: 17880 - RNA, 32 nt, Homo Sapiens
ggacauguauauuugcagagcuccacauacag

SEQ ID NO: 17881 - RNA, 32 nt, Homo Sapiens
gucauaaugcucugcccucccucccccgaagu

SEQ ID NO: 17882 - RNA, 32 nt, Homo Sapiens
acaagucauuucuccaagcucccuuuagugca

SEQ ID NO: 17883 - RNA, 32 nt, Homo Sapiens
gggccaacccgucuuuccuuugggcaggugcu

SEQ ID NO: 17884 - RNA, 32 nt, Homo Sapiens
ccccacccgaucuuccucucccaccccuggaa

SEQ ID NO: 17885 - RNA, 32 nt, Homo Sapiens
cuauuuuggugucaguuuuucaauaaaguuuu

SEQ ID NO: 17886 - RNA, 32 nt, Homo Sapiens
ggugcagucugaggccaccaccccccuuccua

SEQ ID NO: 17887 - RNA, 32 nt, Homo Sapiens
uggcgccucacggcccggguagucuuacgacc

SEQ ID NO: 17888 - RNA, 32 nt, Homo Sapiens
gcuuggcucccucuccagccucuuaaggcacg

SEQ ID NO: 17889 - RNA, 32 nt, Homo Sapiens
ugcccggcugcagcugcagcucaagaaacuga

SEQ ID NO: 17890 - RNA, 32 nt, Homo Sapiens
cuuuggagaggauuguuuauauuuucagccug

SEQ ID NO: 17891 - RNA, 32 nt, Homo Sapiens
cuguguccacuucuccugaccccucggccgcc

SEQ ID NO: 17892 - RNA, 32 nt, Homo Sapiens
cgguagaggggagguugggguuggagcagcgg

SEQ ID NO: 17893 - RNA, 32 nt, Homo Sapiens
auccuuaucucauuuucaguacuucauuaaac

SEQ ID NO: 17894 - RNA, 32 nt, Homo Sapiens
uaccuguagcacgccagugcuguuucccggcc

SEQ ID NO: 17895 - RNA, 32 nt, Homo Sapiens
uaaaaccuugaguaucuuuucagaccuuuuuc

SEQ ID NO: 17896 - RNA, 32 nt, Homo Sapiens
cuucucuugcacuugcggaugaugaacuggaa

SEQ ID NO: 17897 - RNA, 32 nt, Homo Sapiens
uaagagaagauaaguuuauggaacaaacccag

SEQ ID NO: 17898 - RNA, 32 nt, Homo Sapiens
ucuuccaaauuugaucaguuagcaaaacuuaa

SEQ ID NO: 17899 - RNA, 32 nt, Homo Sapiens
ccccggcucccucgcucugcagggucuucccg

SEQ ID NO: 17900 - RNA, 32 nt, Homo Sapiens
uuugcuaccauuuuccuguguacuucaucuau

SEQ ID NO: 17901 - RNA, 32 nt, Homo Sapiens
ucuuucuugggagaagcuagacuuuauucauu

SEQ ID NO: 17902 - RNA, 32 nt, Homo Sapiens
cacaucccggguggcucuggggcucugaacuc

SEQ ID NO: 17903 - RNA, 32 nt, Homo Sapiens
gcgggaggggggugggggcgagaucaggcucc

SEQ ID NO: 17904 - RNA, 32 nt, Homo Sapiens
ugcucuuuuuaaaacauuguuuauuaagugau

SEQ ID NO: 17905 - RNA, 32 nt, Homo Sapiens
uccugugcggccagcgucagagccauggcgac

SEQ ID NO: 17906 - RNA, 32 nt, Homo Sapiens
ucugucauuguuaaauacacauuaucacugaa

SEQ ID NO: 17907 - RNA, 32 nt, Homo Sapiens
ugaggccuggaccuaugcugcaggcaaggguu

SEQ ID NO: 17908 - RNA, 32 nt, Homo Sapiens
ggaaugagcacaaggcccagaucggaaacccc

SEQ ID NO: 17909 - RNA, 32 nt, Homo Sapiens
uguucuuccucuucugaagacaucagucacau

SEQ ID NO: 17910 - RNA, 32 nt, Homo Sapiens
caucugccuggccagggaaggacccccucccc

SEQ ID NO: 17911 - RNA, 32 nt, Homo Sapiens
ucucggaggacuguaagaagaaugcuucgagg

SEQ ID NO: 17912 - RNA, 32 nt, Homo Sapiens
ccuggccugcccgugcccuggugaaucaccug

SEQ ID NO: 17913 - RNA, 32 nt, Homo Sapiens
agucuuauuuaaaaugauucucuaaaauugaa

SEQ ID NO: 17914 - RNA, 32 nt, Homo Sapiens
ucaauuguucauccauuuuuuauuugcuuuua

SEQ ID NO: 17915 - RNA, 32 nt, Homo Sapiens
gcgcuggugcuccuucugccucaugggaccag

SEQ ID NO: 17916 - RNA, 32 nt, Homo Sapiens
guccgagcugggagcgcgacggcggcggccag

SEQ ID NO: 17917 - RNA, 32 nt, Homo Sapiens
cugagcgcaaaccagcagcgacgcgggguccc

SEQ ID NO: 17918 - RNA, 32 nt, Homo Sapiens
cgugucgggcuaguccagcgaggcggacgggc

SEQ ID NO: 17919 - RNA, 32 nt, Homo Sapiens
cauuuuguuaaaauaaacucuuuuccuuuuua

SEQ ID NO: 17920 - RNA, 32 nt, Homo Sapiens
accacccccauucucagcuccuccuucgcggc

SEQ ID NO: 17921 - RNA, 32 nt, Homo Sapiens
uaggaaggaaggaaacaaaagcaauuucagua

SEQ ID NO: 17922 - RNA, 32 nt, Homo Sapiens
uauaaccgccccaccacuccccugcccuugcc

SEQ ID NO: 17923 - RNA, 32 nt, Homo Sapiens
gaguucuggagucugacccaucgcgggguggc

SEQ ID NO: 17924 - RNA, 32 nt, Homo Sapiens
ccuguccgucuucacccauccccaagccuacu

SEQ ID NO: 17925 - RNA, 32 nt, Homo Sapiens
ggugguagcaacaugcucaaggaagaugcagc

SEQ ID NO: 17926 - RNA, 32 nt, Homo Sapiens
ccuguuaauuuaauuuuuaaaugcuuuaucca

SEQ ID NO: 17927 - RNA, 32 nt, Homo Sapiens
cugagccgcccgcuccgugccccucucugcag

SEQ ID NO: 17928 - RNA, 32 nt, Homo Sapiens
ccacguacagagagaaaugugcaugggaagca

SEQ ID NO: 17929 - RNA, 32 nt, Homo Sapiens
ugcucagacaaccuaaacacuuagacaagugu

SEQ ID NO: 17930 - RNA, 32 nt, Homo Sapiens
cacaaaugacaguauuugauaaaaacagguaa

SEQ ID NO: 17931 - RNA, 32 nt, Homo Sapiens
cuccugcugauccagaugcccagaggcuccau

SEQ ID NO: 17932 - RNA, 32 nt, Homo Sapiens
guuuaugaauuuuauucuuuuagaauagaaua

SEQ ID NO: 17933 - RNA, 32 nt, Homo Sapiens
gugagucauaugccacucaucagcuugggaau

SEQ ID NO: 17934 - RNA, 32 nt, Homo Sapiens
cgugugauaagcaaacgggagaaauuuauauc

SEQ ID NO: 17935 - RNA, 32 nt, Homo Sapiens
cacacccuccugaucaccauagcuuuauggua

SEQ ID NO: 17936 - RNA, 32 nt, Homo Sapiens
aaucucauuugguuugauuuucccucuacuaa

SEQ ID NO: 17937 - RNA, 32 nt, Homo Sapiens
uaaaaugagguuaauauuugcauaaaauccua

SEQ ID NO: 17938 - RNA, 32 nt, Homo Sapiens
ucagcccacagcacugucuuuuugcugaucca

SEQ ID NO: 17939 - RNA, 32 nt, Homo Sapiens
cgaggcgccccgagacgcccgugcggcaguga

SEQ ID NO: 17940 - RNA, 32 nt, Homo Sapiens
agcugguugaaaauguuuuucuuguguuuuaa

SEQ ID NO: 17941 - RNA, 32 nt, Homo Sapiens
ggcaauaugugaauaugaugaacucuaaaccu

SEQ ID NO: 17942 - RNA, 32 nt, Homo Sapiens
aauaaguagaaagugguaaagauucaacaugc

SEQ ID NO: 17943 - RNA, 30 nt, Homo Sapiens
uggaguuucugugcuauggugggacugcuc

SEQ ID NO: 17944 - RNA, 32 nt, Homo Sapiens
ccagaggggcucccauguuuccguggcaaugg

SEQ ID NO: 17945 - RNA, 32 nt, Homo Sapiens
ccuguuggaagaggaggcaggggaggguggcc

SEQ ID NO: 17946 - RNA, 32 nt, Homo Sapiens
aagcuguuaugaagugcagaaacuacacagac

SEQ ID NO: 17947 - RNA, 32 nt, Homo Sapiens
gagaucagaaagaaaaacuuuagaacaaaucu

SEQ ID NO: 17948 - RNA, 32 nt, Homo Sapiens
ucuguucuuuugcucaucuuagaccacagacu

SEQ ID NO: 17949 - RNA, 32 nt, Homo Sapiens
acccaccuaaguuuuccaagguggaggauaug

SEQ ID NO: 17950 - RNA, 32 nt, Homo Sapiens
gccuuucggcaacuuguacgggcccagcuccu

SEQ ID NO: 17951 - RNA, 32 nt, Homo Sapiens
ucuauucuuggaaaaauagaaguguaaaaugu

SEQ ID NO: 17952 - RNA, 32 nt, Homo Sapiens
ccaugaaagaugacagaagaaguuauugugau

SEQ ID NO: 17953 - RNA, 32 nt, Homo Sapiens
gggaauauggguuuuuaacaagcgucuuacaa

SEQ ID NO: 17954 - RNA, 32 nt, Homo Sapiens
agaggcgaauuggcugcccggggugcaggagg

SEQ ID NO: 17955 - RNA, 32 nt, Homo Sapiens
cucuguuuuugucauucauguacauuuuccuu

SEQ ID NO: 17956 - RNA, 32 nt, Homo Sapiens
agauuacaggcacaagcugcugcacccagcuc

SEQ ID NO: 17957 - RNA, 32 nt, Homo Sapiens
guggcggccccggacacggcccguccccacag

SEQ ID NO: 17958 - RNA, 32 nt, Homo Sapiens
gcaggaggagucuggaacacagccuucaugcc

SEQ ID NO: 17959 - RNA, 27 nt, Homo Sapiens
guaauuuccaacuucagccuuccugug

SEQ ID NO: 17960 - RNA, 32 nt, Homo Sapiens
aagguuuuuguuucuuuuuucggcuaaaaaga

SEQ ID NO: 17961 - RNA, 32 nt, Homo Sapiens
uccggccacaacccugauggccccaccccucc

SEQ ID NO: 17962 - RNA, 32 nt, Homo Sapiens
ggauuggguucaguggcgggcggcgugggagg

SEQ ID NO: 17963 - RNA, 32 nt, Homo Sapiens
cagauuuaugggaugccuggaucauucagaag

SEQ ID NO: 17964 - RNA, 32 nt, Homo Sapiens
ccaagcucaagagcugcuucuguugcuaucua

SEQ ID NO: 17965 - RNA, 32 nt, Homo Sapiens
ugcaauguauauuuuuuguccuguuauuaacu

SEQ ID NO: 17966 - RNA, 32 nt, Homo Sapiens
ugcugacgaugaugauggaucaaugcaacaaa

SEQ ID NO: 17967 - RNA, 32 nt, Homo Sapiens
uacuccacauugucaguuuucuuagguauauu

SEQ ID NO: 17968 - RNA, 32 nt, Homo Sapiens
cuaucuuuugcuguauucacuucugccagaga

SEQ ID NO: 17969 - RNA, 32 nt, Homo Sapiens
aaaguuccaccaaaaacaaauacaaggggacu

SEQ ID NO: 17970 - RNA, 32 nt, Homo Sapiens
cuucggagccugcuagagccugcagaaugugg

SEQ ID NO: 17971 - RNA, 32 nt, Homo Sapiens
ggauuauuugucuaacaguucauuccaaucag

SEQ ID NO: 17972 - RNA, 32 nt, Homo Sapiens
gaagggcggagagagggaaacggcguccuagu

SEQ ID NO: 17973 - RNA, 32 nt, Homo Sapiens
cuugagaaaaggaaaguucuuugccuuuaaau

SEQ ID NO: 17974 - RNA, 32 nt, Homo Sapiens
cuuuacuugauaugaaacuccuauuaacaguc

SEQ ID NO: 17975 - RNA, 32 nt, Homo Sapiens
gcuugaggcccgcggggagcgcggcgcaauuc

SEQ ID NO: 17976 - RNA, 32 nt, Homo Sapiens
ggucaugcauacgaauuuucagcucuuguucu

SEQ ID NO: 17977 - RNA, 32 nt, Homo Sapiens
ccccaugaggagcugcugcugcucacugaugg

SEQ ID NO: 17978 - RNA, 32 nt, Homo Sapiens
gccuccauugucccgcaggggccaaaaugcag

SEQ ID NO: 17979 - RNA, 32 nt, Homo Sapiens
aaaugggggaaguacagugucuggaagaagaa

SEQ ID NO: 17980 - RNA, 32 nt, Homo Sapiens
aauccuauuuuaaaguugucuaauuuuaaacc

SEQ ID NO: 17981 - RNA, 32 nt, Homo Sapiens
uuucugguuuuaaaaaaacauaaaauuauaga

SEQ ID NO: 17982 - RNA, 32 nt, Homo Sapiens
aucucaccaaaaucaaauaugguaaugcuggc

SEQ ID NO: 17983 - RNA, 32 nt, Homo Sapiens
ucccaggaaggggacauugacacuugaauuuu

SEQ ID NO: 17984 - RNA, 32 nt, Homo Sapiens
uuccuuuauaccaaacaaaacuauggagaacu

SEQ ID NO: 17985 - RNA, 32 nt, Homo Sapiens
ccgcucgccgacgaagccucguccgggccucc

SEQ ID NO: 17986 - RNA, 32 nt, Homo Sapiens
ggcagcggcuuccggccgcggcggacacuucc

SEQ ID NO: 17987 - RNA, 32 nt, Homo Sapiens
uauuuuuauauccuuuccuguuguggauguaa

SEQ ID NO: 17988 - RNA, 32 nt, Homo Sapiens
gggacuugugcacuugaagugaaacacaguuu

SEQ ID NO: 17989 - RNA, 32 nt, Homo Sapiens
guuguugacccuuguuugggguuccucugguu

SEQ ID NO: 17990 - RNA, 32 nt, Homo Sapiens
agagcugacaugcucgggaaagggcagagguc

SEQ ID NO: 17991 - RNA, 32 nt, Homo Sapiens
gaaaaucucauuagugaacuuaucuuugcagc

SEQ ID NO: 17992 - RNA, 32 nt, Homo Sapiens
guaagaacauaguuuagcaaguuuauauuuga

SEQ ID NO: 17993 - RNA, 32 nt, Homo Sapiens
caucuuuuuccccucugagagcaagaagagac

SEQ ID NO: 17994 - RNA, 32 nt, Homo Sapiens
uugaggaaggcacgauuucacucauaacaauc

SEQ ID NO: 17995 - RNA, 32 nt, Homo Sapiens
caguggugguggcggguaccgcacgggguaug

SEQ ID NO: 17996 - RNA, 32 nt, Homo Sapiens
ggucccaggucuucccucuccucagcgccuaa

SEQ ID NO: 17997 - RNA, 32 nt, Homo Sapiens
cuucuccuggcgugggagacgucuacagggaa

SEQ ID NO: 17998 - RNA, 32 nt, Homo Sapiens
acccccucgccuucccccggcgccgacggcca

SEQ ID NO: 17999 - RNA, 32 nt, Homo Sapiens
aaucguauuguguggcucuguauauucuguua

SEQ ID NO: 18000 - RNA, 32 nt, Homo Sapiens
uaacccagcaugccacuuccagcaggcaugca

SEQ ID NO: 18001 - RNA, 32 nt, Homo Sapiens
cucaugucacuuacgucacuacuucgccauca

SEQ ID NO: 18002 - RNA, 32 nt, Homo Sapiens
gacucucugcggccuuggaggggugcggagag

SEQ ID NO: 18003 - RNA, 28 nt, Homo Sapiens
ggacgguggcggccgccggcucuaugau

SEQ ID NO: 18004 - RNA, 32 nt, Homo Sapiens
cgugagacugccgcgccaggacgcucuggucc

SEQ ID NO: 18005 - RNA, 32 nt, Homo Sapiens
agugaccucuacgcugaugacagcuauccuua

SEQ ID NO: 18006 - RNA, 32 nt, Homo Sapiens
caggaccucacuggacugugccccacagggag

SEQ ID NO: 18007 - RNA, 32 nt, Homo Sapiens
gaaauuuggggauguuaaugaggguccucugg

SEQ ID NO: 18008 - RNA, 32 nt, Homo Sapiens
cacuggccucucucauggcacccaggcagucc

SEQ ID NO: 18009 - RNA, 32 nt, Homo Sapiens
uugcccugcauugccuggcccccgagguucca

SEQ ID NO: 18010 - RNA, 32 nt, Homo Sapiens
accagcagcccccugaaccaaccagccgccuu

SEQ ID NO: 18011 - RNA, 32 nt, Homo Sapiens
aggcaaaccauugcugugggaauagcagugac

SEQ ID NO: 18012 - RNA, 32 nt, Homo Sapiens
ucggagcagcagccgccgcggucgccgcuacc

SEQ ID NO: 18013 - RNA, 32 nt, Homo Sapiens
ugggcgggaggcauuaagcaccgacccugggu

SEQ ID NO: 18014 - RNA, 32 nt, Homo Sapiens
ggagcaggaaauuuaugagcagaguggggucc

SEQ ID NO: 18015 - RNA, 32 nt, Homo Sapiens
uauauuuuacuucuuuuguuuuggggcuccuc

SEQ ID NO: 18016 - RNA, 32 nt, Homo Sapiens
aucagugccuucuucagcucuaucugggacac

SEQ ID NO: 18017 - RNA, 32 nt, Homo Sapiens
ccaccgccccgcccugcccccuccaguccccc

SEQ ID NO: 18018 - RNA, 32 nt, Homo Sapiens
ccagggggucacuccucccaccccaccuaccu

SEQ ID NO: 18019 - RNA, 32 nt, Homo Sapiens
ugcacuugaacauuuuaauauuuguggugagu

SEQ ID NO: 18020 - RNA, 32 nt, Homo Sapiens
uucugagcuugguggccuguucccuccaucuc

SEQ ID NO: 18021 - RNA, 32 nt, Homo Sapiens
gaacaccuccaagaggcugccugccuugccag

SEQ ID NO: 18022 - RNA, 32 nt, Homo Sapiens
cagcauccuaccuggacugcggugcuacgagg

SEQ ID NO: 18023 - RNA, 32 nt, Homo Sapiens
ucguagcaucuguacugacauaauccgcacuu

SEQ ID NO: 18024 - RNA, 32 nt, Homo Sapiens
ugcuggguggccugugaucauuaaacucuuuc

SEQ ID NO: 18025 - RNA, 32 nt, Homo Sapiens
gauuauuguuauuaauaauuauuguuacucca

SEQ ID NO: 18026 - RNA, 32 nt, Homo Sapiens
acuggggaaagcagggaagcagugugaacucu

SEQ ID NO: 18027 - RNA, 32 nt, Homo Sapiens
aauggucuggcagcugguuuuggcauccccag

SEQ ID NO: 18028 - RNA, 32 nt, Homo Sapiens
uaaauccuuaaauguaauuaagaucauaaaaa

SEQ ID NO: 18029 - RNA, 32 nt, Homo Sapiens
caguguccacguuuuuggaaaauguauuuugc

SEQ ID NO: 18030 - RNA, 32 nt, Homo Sapiens
aauggccuccggucggugggcuccucuaggcc

SEQ ID NO: 18031 - RNA, 32 nt, Homo Sapiens
aacuuugccaaauauaaucucaccugcuuccu

SEQ ID NO: 18032 - RNA, 32 nt, Homo Sapiens
caccuagaaaauccuaauauggucaucuucau

SEQ ID NO: 18033 - RNA, 32 nt, Homo Sapiens
ugagcuccuacacgcauacacacacacacgug

SEQ ID NO: 18034 - RNA, 32 nt, Homo Sapiens
cugaaaugcaagagggaaggugauugguagug

SEQ ID NO: 18035 - RNA, 32 nt, Homo Sapiens
acgccuccugaggacacagccaucagcagcuu

SEQ ID NO: 18036 - RNA, 32 nt, Homo Sapiens
uguguagauucgcuggaagcagcuggaggcuc

SEQ ID NO: 18037 - RNA, 32 nt, Homo Sapiens
cuguuucugggucauccauguacgaaaauguc

SEQ ID NO: 18038 - RNA, 32 nt, Homo Sapiens
auguaucauucuaucaugauuuuauggugcuc

SEQ ID NO: 18039 - RNA, 32 nt, Homo Sapiens
ucucaccccacuuuccugcccaccuaaacccu

SEQ ID NO: 18040 - RNA, 32 nt, Homo Sapiens
aaaaaauaagugaguucugcuuuuaguuaguu

SEQ ID NO: 18041 - RNA, 32 nt, Homo Sapiens
uuauuuccaacacuagccgugguccugugcag

SEQ ID NO: 18042 - RNA, 32 nt, Homo Sapiens
auccuguggugggacagccaggauuggguccc

SEQ ID NO: 18043 - RNA, 32 nt, Homo Sapiens
ucgggcucggggggcggggggacgcggagcga

SEQ ID NO: 18044 - RNA, 32 nt, Homo Sapiens
gucugauuugaaauagaugauaugauaaaaca

SEQ ID NO: 18045 - RNA, 32 nt, Homo Sapiens
ugugggaaugacuggggugaggcagggucaag

SEQ ID NO: 18046 - RNA, 31 nt, Homo Sapiens
cgucgggugaucugccugccucggccuccca

SEQ ID NO: 18047 - RNA, 32 nt, Homo Sapiens
uguauugugguccuaaucuaagaucaggagaa

SEQ ID NO: 18048 - RNA, 32 nt, Homo Sapiens
guguagaggguggggaaggggugucucaccug

SEQ ID NO: 18049 - RNA, 32 nt, Homo Sapiens
cuugguugauucauauccucuuuccuuuaugg

SEQ ID NO: 18050 - RNA, 32 nt, Homo Sapiens
ccguggucccggcgccgggucccggagacaga

SEQ ID NO: 18051 - RNA, 32 nt, Homo Sapiens
caggggaagccacgcucccucuguggggccug

SEQ ID NO: 18052 - RNA, 32 nt, Homo Sapiens
ccugggcuuagccagcgagcuacgcgcucccg

SEQ ID NO: 18053 - RNA, 32 nt, Homo Sapiens
aauuccaacucagugauaaaccacugacauua

SEQ ID NO: 18054 - RNA, 32 nt, Homo Sapiens
aacaugaaagacuuguaaguuaagucucaucu

SEQ ID NO: 18055 - RNA, 32 nt, Homo Sapiens
agcaugaugaacaacaguaugaaugaaaauaa

SEQ ID NO: 18056 - RNA, 32 nt, Homo Sapiens
uaaaaucaucugggaagcuuugaaaacccacu

SEQ ID NO: 18057 - RNA, 32 nt, Homo Sapiens
uccuaaaaucauauauacuguaauauaugcuc

SEQ ID NO: 18058 - RNA, 32 nt, Homo Sapiens
gaaaauucuuuuccuuuugacuuagauucugc

SEQ ID NO: 18059 - RNA, 32 nt, Homo Sapiens
ggaaguacaccugugugcccagcaacagccug

SEQ ID NO: 18060 - RNA, 32 nt, Homo Sapiens
uccuguaaauuaaucuacagucaggcuaguau

SEQ ID NO: 18061 - RNA, 32 nt, Homo Sapiens
uacaguuuuuagcuguugaauuuuggaaauug

SEQ ID NO: 18062 - RNA, 32 nt, Homo Sapiens
uccuggaauuguacauggauaucuuuaucccu

SEQ ID NO: 18063 - RNA, 32 nt, Homo Sapiens
guuuacagcaauuccuggacucggggguauuu

SEQ ID NO: 18064 - RNA, 32 nt, Homo Sapiens
uaaaguaugugauuugcuuguuauguggcuaa

SEQ ID NO: 18065 - RNA, 32 nt, Homo Sapiens
cacacacacacacacacacacacacacagucc

SEQ ID NO: 18066 - RNA, 32 nt, Homo Sapiens
cgcauccuuucugcgcaggaaccauggcgcuu

SEQ ID NO: 18067 - RNA, 32 nt, Homo Sapiens
gaagggagagugaugcacgaugggcgaggacu

SEQ ID NO: 18068 - RNA, 32 nt, Homo Sapiens
aggggugcguuucagcccuguuuauguugcaa

SEQ ID NO: 18069 - RNA, 32 nt, Homo Sapiens
cugauugcaccccugagguaccucugcccaaa

SEQ ID NO: 18070 - RNA, 32 nt, Homo Sapiens
gcccuugcuuugcacgauuccugccucgacgu

SEQ ID NO: 18071 - RNA, 32 nt, Homo Sapiens
cuuuuccgucugcgucgggagcucccgggcac

SEQ ID NO: 18072 - RNA, 32 nt, Homo Sapiens
cagaagaugcuggaaggagagaaggaagcggg

SEQ ID NO: 18073 - RNA, 32 nt, Homo Sapiens
ucucuccaggacuugucagcuggugguucagc

SEQ ID NO: 18074 - RNA, 32 nt, Homo Sapiens
agguuugaacaagucuaucugauuccaaagcc

SEQ ID NO: 18075 - RNA, 32 nt, Homo Sapiens
acauaggcagagggcuggaaaacuaccaaaaa

SEQ ID NO: 18076 - RNA, 32 nt, Homo Sapiens
gcacaggccccgcccggcaccgccuucccuca

SEQ ID NO: 18077 - RNA, 32 nt, Homo Sapiens
cagagugggugaauguguguaaguggggucag

SEQ ID NO: 18078 - RNA, 32 nt, Homo Sapiens
aaauugcuuuucauauuucagaauugacauau

SEQ ID NO: 18079 - RNA, 32 nt, Homo Sapiens
aagaucagacuaguaaucaaggaggcguguug

SEQ ID NO: 18080 - RNA, 32 nt, Homo Sapiens
ucuccuagagacagaagcaggcuggagguaag

SEQ ID NO: 18081 - RNA, 32 nt, Homo Sapiens
aaauaauagaauuuaaaggugauaaaaauacu

SEQ ID NO: 18082 - RNA, 27 nt, Homo Sapiens
gccuccugcugcuucagccuaccucuc

SEQ ID NO: 18083 - RNA, 31 nt, Homo Sapiens
gugcagaggcacugcagcugcucgguugccc

SEQ ID NO: 18084 - RNA, 32 nt, Homo Sapiens
ggcaacgccccuuuauaaugccugcaggcaga

SEQ ID NO: 18085 - RNA, 32 nt, Homo Sapiens
cuauucaauuuaauucuuauuucuguguuacu

SEQ ID NO: 18086 - RNA, 32 nt, Homo Sapiens
cggcucgcgggccaggauccucucggugggau

SEQ ID NO: 18087 - RNA, 32 nt, Homo Sapiens
auugcugcagauuuuacuuuaugugagaaaau

SEQ ID NO: 18088 - RNA, 32 nt, Homo Sapiens
uccaaagucuauacacagggguggucucuuca

SEQ ID NO: 18089 - RNA, 32 nt, Homo Sapiens
gugcugauuuguuuaaauccaauaaauggaca

SEQ ID NO: 18090 - RNA, 32 nt, Homo Sapiens
ucucuggcgagggagcgccgcgccuggggagg

SEQ ID NO: 18091 - RNA, 32 nt, Homo Sapiens
uuauuuuuuaaucccaaaugugauaguagcuu

SEQ ID NO: 18092 - RNA, 31 nt, Homo Sapiens
agcacucuaagcagccaauuagaugcuggca

SEQ ID NO: 18093 - RNA, 32 nt, Homo Sapiens
ucguaacuucggggcugcgagcgcggagggcg

SEQ ID NO: 18094 - RNA, 32 nt, Homo Sapiens
agaggcgcuccucacuucccagauggggcggc

SEQ ID NO: 18095 - RNA, 32 nt, Homo Sapiens
gaagccgcuuuccgcuggcccgcagccgccgc

SEQ ID NO: 18096 - RNA, 32 nt, Homo Sapiens
cgaggagaagcucggcggcgucccggggccgg

SEQ ID NO: 18097 - RNA, 32 nt, Homo Sapiens
aauggggcagacugaggcuugugaggaagauc

SEQ ID NO: 18098 - RNA, 32 nt, Homo Sapiens
auccagcagacaccccccucuccccaccagcc

SEQ ID NO: 18099 - RNA, 29 nt, Homo Sapiens
uccuagaaauaaaaugaguuaacuucaaa

SEQ ID NO: 18100 - RNA, 29 nt, Homo Sapiens
cugcagcggggacaguggggacagcaggg

SEQ ID NO: 18101 - RNA, 32 nt, Homo Sapiens
ugcugcccuucuuuuuucuguggaucugucua

SEQ ID NO: 18102 - RNA, 32 nt, Homo Sapiens
uuuguauccacuuuuuagacuuaauagaaaca

SEQ ID NO: 18103 - RNA, 32 nt, Homo Sapiens
ucuguauuaguuuccuagaugugcuagaacaa

SEQ ID NO: 18104 - RNA, 32 nt, Homo Sapiens
cuguuccaugguguugacugcacuaauaauaa

SEQ ID NO: 18105 - RNA, 32 nt, Homo Sapiens
guagguaaauguuuagcaaugggcuuucuugg

SEQ ID NO: 18106 - RNA, 32 nt, Homo Sapiens
gacucgcuagagauugucauggccagagauca

SEQ ID NO: 18107 - RNA, 32 nt, Homo Sapiens
cuuccuguuuugcuguagucacugguguuccu

SEQ ID NO: 18108 - RNA, 32 nt, Homo Sapiens
gguuucaaucugguuuaagcuucugagagaau

SEQ ID NO: 18109 - RNA, 32 nt, Homo Sapiens
ugucgugucauuuggggacacgccacuggcac

SEQ ID NO: 18110 - RNA, 32 nt, Homo Sapiens
cuaaggcccuggguccgcgcgcgguuugacca

SEQ ID NO: 18111 - RNA, 32 nt, Homo Sapiens
uaucuagugucugcauagguuuccacuucuug

SEQ ID NO: 18112 - RNA, 31 nt, Homo Sapiens
ggauguaggcaccuccugccccagacguaac

SEQ ID NO: 18113 - RNA, 32 nt, Homo Sapiens
aagguaagaaacaaaaaacaaacaaacaaaca

SEQ ID NO: 18114 - RNA, 32 nt, Homo Sapiens
ugugggagagaauggggugggaggacccccau

SEQ ID NO: 18115 - RNA, 32 nt, Homo Sapiens
ccucucugcccccugccccccacaccacaccu

SEQ ID NO: 18116 - RNA, 32 nt, Homo Sapiens
aguacuauuuuuguuauaauucaaaauagaua

SEQ ID NO: 18117 - RNA, 32 nt, Homo Sapiens
acucauauauauacacaccuacacauggccaa

SEQ ID NO: 18118 - RNA, 32 nt, Homo Sapiens
uaguaccaggacugaggucauuucuacuggaa

SEQ ID NO: 18119 - RNA, 32 nt, Homo Sapiens
agaccccuggcagggagauagacccagcugug

SEQ ID NO: 18120 - RNA, 32 nt, Homo Sapiens
gaccccguacccuggcagcaucggagcaccgg

SEQ ID NO: 18121 - RNA, 32 nt, Homo Sapiens
ccugcaccuaggaugccugccuggaaaugucc

SEQ ID NO: 18122 - RNA, 32 nt, Homo Sapiens
aggccggcgggcgggccggagggcugcagucu

SEQ ID NO: 18123 - RNA, 32 nt, Homo Sapiens
uacccugugaagaucucucaccauccaaaaaa

SEQ ID NO: 18124 - RNA, 32 nt, Homo Sapiens
gugggagauauaauaaaacuagaaaauaauca

SEQ ID NO: 18125 - RNA, 32 nt, Homo Sapiens
ucuucccugccagcaggacugagugugcguac

SEQ ID NO: 18126 - RNA, 32 nt, Homo Sapiens
uugcucuuggguacaagagagacugucggucu

SEQ ID NO: 18127 - RNA, 32 nt, Homo Sapiens
gauuggcuuaaagugaaggaaguaaagguaaa

SEQ ID NO: 18128 - RNA, 32 nt, Homo Sapiens
aauuguuuuuaacugccauguaauauuuuaca

SEQ ID NO: 18129 - RNA, 32 nt, Homo Sapiens
cucuugcccucccugccucuuuggugcucuua

SEQ ID NO: 18130 - RNA, 31 nt, Homo Sapiens
acuacugugaagucagcugugcuguuuucca

SEQ ID NO: 18131 - RNA, 29 nt, Homo Sapiens
aguauaaagaauuuauauuugcacuguaa

SEQ ID NO: 18132 - RNA, 32 nt, Homo Sapiens
acaagucuggaaagucaucugccuuuaauaac

SEQ ID NO: 18133 - RNA, 32 nt, Homo Sapiens
ggucgcugagggaccccggccaggcgcggaga

SEQ ID NO: 18134 - RNA, 32 nt, Homo Sapiens
gagaaucugaucccaggugagggaggucacuu

SEQ ID NO: 18135 - RNA, 32 nt, Homo Sapiens
gauuauuugucuucaccgaagaauggcuuaaa

SEQ ID NO: 18136 - RNA, 32 nt, Homo Sapiens
ccacagcccucccucggcacacuuugacccuu

SEQ ID NO: 18137 - RNA, 32 nt, Homo Sapiens
uguauuauaaugaugauucugucaaaugaaag

SEQ ID NO: 18138 - RNA, 32 nt, Homo Sapiens
uauuuugguucaguuuuaacaucgugacaaug

SEQ ID NO: 18139 - RNA, 32 nt, Homo Sapiens
gugguguuuuuuuuuucuuuuuauacaauacc

SEQ ID NO: 18140 - RNA, 32 nt, Homo Sapiens
uggaguuuuaauccugugauauguacauugga

SEQ ID NO: 18141 - RNA, 32 nt, Homo Sapiens
uccuggaacuuaaaauaaaauaaaauuaaaaa

SEQ ID NO: 18142 - RNA, 32 nt, Homo Sapiens
auaccguuccuccguuuccccaccuugagugu

SEQ ID NO: 18143 - RNA, 32 nt, Homo Sapiens
ucauacaauuuaauugcucaaccaugcauuua

SEQ ID NO: 18144 - RNA, 32 nt, Homo Sapiens
caaggcgggcgcccggccuguuccccagcccu

SEQ ID NO: 18145 - RNA, 32 nt, Homo Sapiens
uggugcuaaggguggcaugcucuugcaggaaa

SEQ ID NO: 18146 - RNA, 32 nt, Homo Sapiens
accauugguuagucagaagagacuugggagac

SEQ ID NO: 18147 - RNA, 32 nt, Homo Sapiens
gaaaggaagauaaucuggaaaguuccacugca

SEQ ID NO: 18148 - RNA, 32 nt, Homo Sapiens
agaaaaaacaaaacuggauacaugugcagaac

SEQ ID NO: 18149 - RNA, 32 nt, Homo Sapiens
aaauaacuaauauauaugugcaugcagucugc

SEQ ID NO: 18150 - RNA, 32 nt, Homo Sapiens
gacguugacuuaaacgaagccauuccaaggac

SEQ ID NO: 18151 - RNA, 32 nt, Homo Sapiens
gcccacagcucucuuucggaccucugaaguca

SEQ ID NO: 18152 - RNA, 32 nt, Homo Sapiens
cucaggccugucaucccaucacuuugagaggc

SEQ ID NO: 18153 - RNA, 32 nt, Homo Sapiens
ucgccagcgccgggcgcaguccgccuuuuucc

SEQ ID NO: 18154 - RNA, 32 nt, Homo Sapiens
gggccgccgccggcugcagcaggagcuggacg

SEQ ID NO: 18155 - RNA, 32 nt, Homo Sapiens
gggcaggcucugccuccgccgcagagagcgcc

SEQ ID NO: 18156 - RNA, 32 nt, Homo Sapiens
gggcggcacgagggcugggcgguggggugcgg

SEQ ID NO: 18157 - RNA, 32 nt, Homo Sapiens
cgccaucgcuugucaucuccacuacacuaugc

SEQ ID NO: 18158 - RNA, 32 nt, Homo Sapiens
aguguuuuguugcaugagccaaauaaacuucu

SEQ ID NO: 18159 - RNA, 31 nt, Homo Sapiens
agcaacuuaaacugcuuaggaguccagccag

SEQ ID NO: 18160 - RNA, 32 nt, Homo Sapiens
ccagagagccaagacuagcuuuuacauuuaua

SEQ ID NO: 18161 - RNA, 32 nt, Homo Sapiens
cucuuccccaauccaaaccauagcugucuguc

SEQ ID NO: 18162 - RNA, 32 nt, Homo Sapiens
aaaugaaguuuaggaaaaauccagcuucggac

SEQ ID NO: 18163 - RNA, 32 nt, Homo Sapiens
gugggcgcucugugguccuccccuccugaccc

SEQ ID NO: 18164 - RNA, 32 nt, Homo Sapiens
gauaccauuuccugaccccguuuuccagcaug

SEQ ID NO: 18165 - RNA, 32 nt, Homo Sapiens
aaggaacuugcccugagcacuccuggugcagg

SEQ ID NO: 18166 - RNA, 30 nt, Homo Sapiens
gugcccggugugugcgcgccggcgagagca

SEQ ID NO: 18167 - RNA, 32 nt, Homo Sapiens
ggguacaaagauuuucuccuguguuuucuucu

SEQ ID NO: 18168 - RNA, 32 nt, Homo Sapiens
cccggcgugcgcggagcggggcagccagcagc

SEQ ID NO: 18169 - RNA, 32 nt, Homo Sapiens
guacuuucaacuugcgaaggaaacucuucuuu

SEQ ID NO: 18170 - RNA, 32 nt, Homo Sapiens
aauggagucucauucugucacccaggcuggag

SEQ ID NO: 18171 - RNA, 32 nt, Homo Sapiens
ugcauucuggcggaagagacaagcaagcaaug

SEQ ID NO: 18172 - RNA, 31 nt, Homo Sapiens
agcaagagagcgaaguccucgagccaucagu

SEQ ID NO: 18173 - RNA, 32 nt, Homo Sapiens
cggccgcccucccgguuuaccgcccccugugu

SEQ ID NO: 18174 - RNA, 32 nt, Homo Sapiens
uuuucaaaagguauuauacaugugauacauuu

SEQ ID NO: 18175 - RNA, 32 nt, Homo Sapiens
cucggcgcgugaggaagcacggcggcccgagu

SEQ ID NO: 18176 - RNA, 32 nt, Homo Sapiens
augucugggagacgacgcguguguguugcccc

SEQ ID NO: 18177 - RNA, 32 nt, Homo Sapiens
uaguguaaaaauuuauauuauugugagguuuu

SEQ ID NO: 18178 - RNA, 32 nt, Homo Sapiens
aggaugugguuuuauugacuugaaauaacaaa

SEQ ID NO: 18179 - RNA, 32 nt, Homo Sapiens
uaaaaaucuaucaaacaaaacucuggaccaga

SEQ ID NO: 18180 - RNA, 32 nt, Homo Sapiens
agcaugugucuuaaguuuuauaaacacuugug

SEQ ID NO: 18181 - RNA, 27 nt, Homo Sapiens
ccucacuccuucuucugacccuuaauc

SEQ ID NO: 18182 - RNA, 32 nt, Homo Sapiens
ggcaagggcagucguuugaggcagcuuggggu

SEQ ID NO: 18183 - RNA, 32 nt, Homo Sapiens
guccaguuugcaauucauuuguuuccuagaac

SEQ ID NO: 18184 - RNA, 32 nt, Homo Sapiens
ugccugcuuaggugcugaggucacaggggaga

SEQ ID NO: 18185 - RNA, 32 nt, Homo Sapiens
uccagcgucucccagacuucucguacaguuaa

SEQ ID NO: 18186 - RNA, 32 nt, Homo Sapiens
ugguugguugguuuuuguuugguuuuguuuaa

SEQ ID NO: 18187 - RNA, 32 nt, Homo Sapiens
accgccucaccuccaggggggaccgcggcggc

SEQ ID NO: 18188 - RNA, 32 nt, Homo Sapiens
uguuuaaagugauuugaaaaauacucauucug

SEQ ID NO: 18189 - RNA, 32 nt, Homo Sapiens
aggcaaauguuaucacuacacauggaaagcaa

SEQ ID NO: 18190 - RNA, 32 nt, Homo Sapiens
cugagaaaaaauauucagaaacaacuuuaaua

SEQ ID NO: 18191 - RNA, 32 nt, Homo Sapiens
ccugguguaaaaaaggcagagaguagugaaga

SEQ ID NO: 18192 - RNA, 32 nt, Homo Sapiens
gggauaaggggagggggugggcauauucugga

SEQ ID NO: 18193 - RNA, 32 nt, Homo Sapiens
ccacccgaccuggcugccccucaccuugggcu

SEQ ID NO: 18194 - RNA, 32 nt, Homo Sapiens
acacguggaguuguggagguagcaagcagagu

SEQ ID NO: 18195 - RNA, 32 nt, Homo Sapiens
ggugacauuucccacccugugcccguguuccc

SEQ ID NO: 18196 - RNA, 32 nt, Homo Sapiens
ccggcucccagugucugcccagcccucuccca

SEQ ID NO: 18197 - RNA, 32 nt, Homo Sapiens
gaaagccugccagcaccuauuccaccucccag

SEQ ID NO: 18198 - RNA, 32 nt, Homo Sapiens
cccgggagcuggcggagcacgagugccacggg

SEQ ID NO: 18199 - RNA, 32 nt, Homo Sapiens
acacauuuaugaaaaucuacuuguuuagacuu

SEQ ID NO: 18200 - RNA, 32 nt, Homo Sapiens
cuucuuugaggagaccaaaaccaacaaauaaa

SEQ ID NO: 18201 - RNA, 32 nt, Homo Sapiens
uauuagcauggacuuuuaaauaaagauuuaaa

SEQ ID NO: 18202 - RNA, 32 nt, Homo Sapiens
guggacuggauguguccccagaauccacaugc

SEQ ID NO: 18203 - RNA, 32 nt, Homo Sapiens
gcgugccaggcucugggcuggaugcuggggau

SEQ ID NO: 18204 - RNA, 32 nt, Homo Sapiens
uauuuuccaaauaguuaauuuaauuuggcuuu

SEQ ID NO: 18205 - RNA, 32 nt, Homo Sapiens
ccuaauuuguagacuuaagacuuuuuauuuuc

SEQ ID NO: 18206 - RNA, 32 nt, Homo Sapiens
cagugucacauaauauauauguuuccuauuua

SEQ ID NO: 18207 - RNA, 32 nt, Homo Sapiens
auguguuggccauuuucucuaacuaacaugug

SEQ ID NO: 18208 - RNA, 32 nt, Homo Sapiens
cgugauccacccaccucaggaagugcugggau

SEQ ID NO: 18209 - RNA, 32 nt, Homo Sapiens
ucaguuuuaacuuuauagguuuauugaguuuc

SEQ ID NO: 18210 - RNA, 32 nt, Homo Sapiens
ugggcagaagaaccuguccucccgcccggggc

SEQ ID NO: 18211 - RNA, 32 nt, Homo Sapiens
gcaaagccagcaugcaagcagaccccaccacc

SEQ ID NO: 18212 - RNA, 32 nt, Homo Sapiens
guugucgcgcacggcccggcgccacccguggc

SEQ ID NO: 18213 - RNA, 32 nt, Homo Sapiens
aucccacuucucaggccccuuccacuaggaca

SEQ ID NO: 18214 - RNA, 32 nt, Homo Sapiens
aaacguuucuguucagagaacuugcuuaaucu

SEQ ID NO: 18215 - RNA, 32 nt, Homo Sapiens
ccuuacgagaaacacccacagguguguagggg

SEQ ID NO: 18216 - RNA, 32 nt, Homo Sapiens
ccuggcugacuggcagaggaagauugcaguga

SEQ ID NO: 18217 - RNA, 32 nt, Homo Sapiens
ucugggagugugacguuguaaucuucauccgu

SEQ ID NO: 18218 - RNA, 32 nt, Homo Sapiens
gucauauugcaaagcaggcccacgccugggcu

SEQ ID NO: 18219 - RNA, 32 nt, Homo Sapiens
ccucuuugacccuuuacccacccugagaccag

SEQ ID NO: 18220 - RNA, 32 nt, Homo Sapiens
cgcagcgccccucccuggggagcuagccaaaa

SEQ ID NO: 18221 - RNA, 32 nt, Homo Sapiens
ccuccucaauuucaaaagcaauauaacguuug

SEQ ID NO: 18222 - RNA, 32 nt, Homo Sapiens
aaaaugacagagcuggagaguuuuuugaaaug

SEQ ID NO: 18223 - RNA, 32 nt, Homo Sapiens
uuacagcaagguggcucaggaauuacaguaca

SEQ ID NO: 18224 - RNA, 32 nt, Homo Sapiens
ggucuaugcggcagcguuggguggcagccaug

SEQ ID NO: 18225 - RNA, 32 nt, Homo Sapiens
auaaguuagagaaaacacccaaauuauacuug

SEQ ID NO: 18226 - RNA, 32 nt, Homo Sapiens
auccacgcaccucagccucccaaagugcuggg

SEQ ID NO: 18227 - RNA, 32 nt, Homo Sapiens
ccuagccaucgugagcaucccagcggcaccgc

SEQ ID NO: 18228 - RNA, 32 nt, Homo Sapiens
ugaaggucuggugauagcugggugcaggaaua

SEQ ID NO: 18229 - RNA, 32 nt, Homo Sapiens
guggggugaaaugggaguagggggguggacag

SEQ ID NO: 18230 - RNA, 32 nt, Homo Sapiens
cacccucucccucugugccauggaaaaagugc

SEQ ID NO: 18231 - RNA, 32 nt, Homo Sapiens
acuaauuagcuucaggauacgcugcucucaua

SEQ ID NO: 18232 - RNA, 32 nt, Homo Sapiens
uggaaguguuuuuaaauuuucauuuaaaauug

SEQ ID NO: 18233 - RNA, 32 nt, Homo Sapiens
ugcauaagggagaggauaguguguaccugccc

SEQ ID NO: 18234 - RNA, 32 nt, Homo Sapiens
ucaaaaguuggaguuucccagcugcgaacagc

SEQ ID NO: 18235 - RNA, 32 nt, Homo Sapiens
guuuguugucuccucacccccagcugccaagc

SEQ ID NO: 18236 - RNA, 32 nt, Homo Sapiens
ccgcggcagggccuggccugccucuccugugc

SEQ ID NO: 18237 - RNA, 32 nt, Homo Sapiens
cuuuuuuggugaucuaauugcauugguuaaaa

SEQ ID NO: 18238 - RNA, 32 nt, Homo Sapiens
gggaauccaucuuggccugaaagcagagguac

SEQ ID NO: 18239 - RNA, 31 nt, Homo Sapiens
aggagagacuggugcuugccccgcccggugg

SEQ ID NO: 18240 - RNA, 32 nt, Homo Sapiens
ucaucaugaaagauuaugguaguguggccagu

SEQ ID NO: 18241 - RNA, 32 nt, Homo Sapiens
guuuccuccaccuccacccccaccccuuaacu

SEQ ID NO: 18242 - RNA, 32 nt, Homo Sapiens
augauaacugcuguauuaaaauacaugucuca

SEQ ID NO: 18243 - RNA, 32 nt, Homo Sapiens
gucagccgcgccggaccgcgcaccaggaggcg

SEQ ID NO: 18244 - RNA, 32 nt, Homo Sapiens
ccauuuuuuuuuucuuuuuuuuuggccuaaaa

SEQ ID NO: 18245 - RNA, 32 nt, Homo Sapiens
gcgccugcccacacccuccuccccuccuucca

SEQ ID NO: 18246 - RNA, 32 nt, Homo Sapiens
agaaguggacuggagggaaaggguagcugagc

SEQ ID NO: 18247 - RNA, 32 nt, Homo Sapiens
gcgggcgggcggcaggaugggccucuccgcug

SEQ ID NO: 18248 - RNA, 32 nt, Homo Sapiens
cuaccucacaugcaggucuagggugaggauug

SEQ ID NO: 18249 - RNA, 32 nt, Homo Sapiens
aguguuuuggguauuuuuuuuauaugcaaagg

SEQ ID NO: 18250 - RNA, 32 nt, Homo Sapiens
gcaggcgcugaauaaacauuuuuaaagcaaaa

SEQ ID NO: 18251 - RNA, 32 nt, Homo Sapiens
cuggaggcuccuccccuucuuucucuuccuuc

SEQ ID NO: 18252 - RNA, 32 nt, Homo Sapiens
gacggacaugcgcgggagggcgccgcggggca

SEQ ID NO: 18253 - RNA, 32 nt, Homo Sapiens
ucuccaguauaaaggugaauguuaccaccuug

SEQ ID NO: 18254 - RNA, 31 nt, Homo Sapiens
ccucugcagcgcaugcugacaaggcaccuca

SEQ ID NO: 18255 - RNA, 32 nt, Homo Sapiens
gaggcgcagacaccaggcccguucugugcucu

SEQ ID NO: 18256 - RNA, 32 nt, Homo Sapiens
gacucagcaggcuccgugcagcccuugggaac

SEQ ID NO: 18257 - RNA, 32 nt, Homo Sapiens
gaagguggagcaagaaaugaaaaggaaccuga

SEQ ID NO: 18258 - RNA, 32 nt, Homo Sapiens
agcauauagcuacuuucaguugauuguauuuc

SEQ ID NO: 18259 - RNA, 32 nt, Homo Sapiens
cagccugaaugaugaauuuaugugaacacaaa

SEQ ID NO: 18260 - RNA, 27 nt, Homo Sapiens
aacuuugcuuucuucaguuaucacaug

SEQ ID NO: 18261 - RNA, 32 nt, Homo Sapiens
caccccacccuugcguucugcauuagguacuu

SEQ ID NO: 18262 - RNA, 32 nt, Homo Sapiens
cugguuuucauuuuuggagauuccuugccuuu

SEQ ID NO: 18263 - RNA, 32 nt, Homo Sapiens
uccucuccugccucuggauguuuccuuggagc

SEQ ID NO: 18264 - RNA, 32 nt, Homo Sapiens
ucgugguacagcauuagcugaaauuuacccuu

SEQ ID NO: 18265 - RNA, 32 nt, Homo Sapiens
cagcuuaaauuaacaauuguuaguauuagucu

SEQ ID NO: 18266 - RNA, 32 nt, Homo Sapiens
auaggguaauuuccuguguaacgcugcucugg

SEQ ID NO: 18267 - RNA, 32 nt, Homo Sapiens
uugaccuucuaagaucaaguaagggacacuug

SEQ ID NO: 18268 - RNA, 32 nt, Homo Sapiens
acgugcccauccccccucagauccagacaugc

SEQ ID NO: 18269 - RNA, 32 nt, Homo Sapiens
uucaagcagacaccuaagauuuuucaucauaa

SEQ ID NO: 18270 - RNA, 32 nt, Homo Sapiens
gauuauauuuuuguuuuauauaggucccaaau

SEQ ID NO: 18271 - RNA, 32 nt, Homo Sapiens
cccuggccgcggcagagcucccugccaccggc

SEQ ID NO: 18272 - RNA, 32 nt, Homo Sapiens
ccuaaacuaagcacagaagaguuggcgucauc

SEQ ID NO: 18273 - RNA, 32 nt, Homo Sapiens
uguagacugccuuguugaguccugcuguauuu

SEQ ID NO: 18274 - RNA, 32 nt, Homo Sapiens
cccaaauccgccaguguuucugaauguuugug

SEQ ID NO: 18275 - RNA, 32 nt, Homo Sapiens
acaaccaguugaaagcaauauuugaguucaua

SEQ ID NO: 18276 - RNA, 32 nt, Homo Sapiens
gcggcauucuuggagguccaagaggggcagcg

SEQ ID NO: 18277 - RNA, 32 nt, Homo Sapiens
cggaggagguuuucaguggcugauugaaacuc

SEQ ID NO: 18278 - RNA, 32 nt, Homo Sapiens
uuuaucuuuuuuaaauuccauuuuaugaaaag

SEQ ID NO: 18279 - RNA, 32 nt, Homo Sapiens
agacuuuugcagaggcgauggcagagagcagc

SEQ ID NO: 18280 - RNA, 32 nt, Homo Sapiens
ccggcucuccggcggcagcgagugccacgucc

SEQ ID NO: 18281 - RNA, 32 nt, Homo Sapiens
ugucgaagaaggccucuugccagaccaggauc

SEQ ID NO: 18282 - RNA, 32 nt, Homo Sapiens
agccacaccacccaaggccacacuugggccag

SEQ ID NO: 18283 - RNA, 32 nt, Homo Sapiens
cucacuggguaccccaccuccucucucauaug

SEQ ID NO: 18284 - RNA, 32 nt, Homo Sapiens
ucugcugaauucucuuguugaauucauagcuc

SEQ ID NO: 18285 - RNA, 32 nt, Homo Sapiens
uuaguagcaaauagagcagagauacagcagag

SEQ ID NO: 18286 - RNA, 32 nt, Homo Sapiens
cagaacaugcuguuauuuagguauuuuucuuu

SEQ ID NO: 18287 - RNA, 32 nt, Homo Sapiens
uaacauauggaucauuauuauuguauagucuc

SEQ ID NO: 18288 - RNA, 32 nt, Homo Sapiens
ggacacgguggguggggagcuaggcucaugca

SEQ ID NO: 18289 - RNA, 32 nt, Homo Sapiens
gcuggcugugcccuccccuggcacucugacug

SEQ ID NO: 18290 - RNA, 32 nt, Homo Sapiens
cugacuuguuuuuauauugaaaaaaguuccac

SEQ ID NO: 18291 - RNA, 32 nt, Homo Sapiens
accgugcagccacacccugcccugccccgccc

SEQ ID NO: 18292 - RNA, 32 nt, Homo Sapiens
ccucccuccagcagcuccuucucauggccccu

SEQ ID NO: 18293 - RNA, 31 nt, Homo Sapiens
aagcaacagccccagaucuaagggcaccgua

SEQ ID NO: 18294 - RNA, 32 nt, Homo Sapiens
cagcucuccagccccaggucuccugacauugu

SEQ ID NO: 18295 - RNA, 32 nt, Homo Sapiens
auccuuuuugaugccauauuuucaguguuaca

SEQ ID NO: 18296 - RNA, 32 nt, Homo Sapiens
agguuacaaggugguggagacauucugagcag

SEQ ID NO: 18297 - RNA, 32 nt, Homo Sapiens
gugggucaggugguccuaggacccaggggagg

SEQ ID NO: 18298 - RNA, 32 nt, Homo Sapiens
gacaguaucaccguaaaccugcguuaaaaugu

SEQ ID NO: 18299 - RNA, 32 nt, Homo Sapiens
uccggcugccuagcccuccccccagcucccug

SEQ ID NO: 18300 - RNA, 32 nt, Homo Sapiens
cugaggggccccuguucugugcuucuagguuc

SEQ ID NO: 18301 - RNA, 32 nt, Homo Sapiens
uguagcccaagcccuauucugcacuguucagu

SEQ ID NO: 18302 - RNA, 32 nt, Homo Sapiens
acccucuguacugacaucuccuccccugaaau

SEQ ID NO: 18303 - RNA, 32 nt, Homo Sapiens
aagagggcucuacuaucuccuuggaauccaca

SEQ ID NO: 18304 - RNA, 32 nt, Homo Sapiens
gccuggcccccacccccuuccucggucucccc

SEQ ID NO: 18305 - RNA, 32 nt, Homo Sapiens
ugugaccaaguauaaacuuuuaccacuugcug

SEQ ID NO: 18306 - RNA, 32 nt, Homo Sapiens
ugccuauauucccagcacuuugagaggucaaa

SEQ ID NO: 18307 - RNA, 32 nt, Homo Sapiens
uacaguuucuucaugcauuacuuacuguuaaa

SEQ ID NO: 18308 - RNA, 32 nt, Homo Sapiens
uggggcaggagugaagcagaggugauggggcu

SEQ ID NO: 18309 - RNA, 32 nt, Homo Sapiens
ccuccucccuccccaaaccccaaggaacucuc

SEQ ID NO: 18310 - RNA, 32 nt, Homo Sapiens
uaacuucccugagacugcauggcucaggcguu

SEQ ID NO: 18311 - RNA, 32 nt, Homo Sapiens
ccugguaaaucguccaguacaucucaaguugc

SEQ ID NO: 18312 - RNA, 32 nt, Homo Sapiens
aucauuuucaacuuauuuuuuaaaguagguuu

SEQ ID NO: 18313 - RNA, 32 nt, Homo Sapiens
aagcgacccgcggagucacugcagggaggaga

SEQ ID NO: 18314 - RNA, 32 nt, Homo Sapiens
cccgcccgacucuacccggcccggucccugcg

SEQ ID NO: 18315 - RNA, 32 nt, Homo Sapiens
gggggagguaacugaaucaugggggugggauu

SEQ ID NO: 18316 - RNA, 32 nt, Homo Sapiens
ggaacacccugccccagggccggacuuccagc

SEQ ID NO: 18317 - RNA, 32 nt, Homo Sapiens
agcacauuugaaagaaaguguuaaaacugaag

SEQ ID NO: 18318 - RNA, 32 nt, Homo Sapiens
ucuuccauccaucaaauacuuuacaggauggc

SEQ ID NO: 18319 - RNA, 32 nt, Homo Sapiens
ggaagagaagcugggaggaaaagagacccagc

SEQ ID NO: 18320 - RNA, 32 nt, Homo Sapiens
ucccgcucuggagauuugaagggagaguagaa

SEQ ID NO: 18321 - RNA, 32 nt, Homo Sapiens
aauaaggguaauucauuuuuuauuaaagucau

SEQ ID NO: 18322 - RNA, 32 nt, Homo Sapiens
cuuuccaaucuggccaauuugggcgaacauaa

SEQ ID NO: 18323 - RNA, 32 nt, Homo Sapiens
cgaugagaacagaggcacaggugccggcccug

SEQ ID NO: 18324 - RNA, 32 nt, Homo Sapiens
ucuugggcugcccccaucucucccaacaaggu

SEQ ID NO: 18325 - RNA, 32 nt, Homo Sapiens
gucuugggccuggcccgcgucuagcuuaguuu

SEQ ID NO: 18326 - RNA, 32 nt, Homo Sapiens
auaauagcugggugugguggcaugcgcaugua

SEQ ID NO: 18327 - RNA, 32 nt, Homo Sapiens
ucucuuaaauguuauaaaaaacaauuguauuu

SEQ ID NO: 18328 - RNA, 32 nt, Homo Sapiens
accugugaaguuguuaaggcacucucauuugc

SEQ ID NO: 18329 - RNA, 32 nt, Homo Sapiens
accccacccagcuguucuaacccugcuaucca

SEQ ID NO: 18330 - RNA, 32 nt, Homo Sapiens
gaggguggggguggagcggaugcaccaaagug

SEQ ID NO: 18331 - RNA, 32 nt, Homo Sapiens
gaauucauauuggacagaaauuuuauaaaugu

SEQ ID NO: 18332 - RNA, 32 nt, Homo Sapiens
guauugggcguuggaggcuuugaaaggcgagc

SEQ ID NO: 18333 - RNA, 30 nt, Homo Sapiens
cacgugagcagucagcaccaguucugcacc

SEQ ID NO: 18334 - RNA, 32 nt, Homo Sapiens
auaucuuauuuucaaggcauuuggaaaugaag

SEQ ID NO: 18335 - RNA, 32 nt, Homo Sapiens
cugccccucagaggcggugucuggggaggacu

SEQ ID NO: 18336 - RNA, 29 nt, Homo Sapiens
ccagugagauaggagugaaaguugucaga

SEQ ID NO: 18337 - RNA, 32 nt, Homo Sapiens
cagauuuuucauuugagcauggagugagaaua

SEQ ID NO: 18338 - RNA, 32 nt, Homo Sapiens
ucuacaaaaaauaagaaaauuagcccggugcc

SEQ ID NO: 18339 - RNA, 32 nt, Homo Sapiens
agggucucgcucuccuucccuuuuuccgcccg

SEQ ID NO: 18340 - RNA, 32 nt, Homo Sapiens
aauccagacacccccacccccacccucagauc

SEQ ID NO: 18341 - RNA, 32 nt, Homo Sapiens
gugcgccccagccccagcagggcgcacaacuu

SEQ ID NO: 18342 - RNA, 32 nt, Homo Sapiens
gcuuacggggccucggaccccggcgccgcggc

SEQ ID NO: 18343 - RNA, 32 nt, Homo Sapiens
guggccaaagauuuugggcaacaaguaccuac

SEQ ID NO: 18344 - RNA, 32 nt, Homo Sapiens
aguucaguuucuuucuucuuuaucucacccca

SEQ ID NO: 18345 - RNA, 29 nt, Homo Sapiens
aaaacgucaugugagugaagagaugucac

SEQ ID NO: 18346 - RNA, 32 nt, Homo Sapiens
gaguguaaaauauuuuaaaauaaacuuucuua

SEQ ID NO: 18347 - RNA, 32 nt, Homo Sapiens
ucuagaucggccugaggcugggacauuacaug

SEQ ID NO: 18348 - RNA, 32 nt, Homo Sapiens
guuggcuggcuuuauuucuaacuccuuauuga

SEQ ID NO: 18349 - RNA, 32 nt, Homo Sapiens
gaaauggcaugcuuuacccaucuuacuuagug

SEQ ID NO: 18350 - RNA, 32 nt, Homo Sapiens
agaagaaggacagggagcugcagaagcucgag

SEQ ID NO: 18351 - RNA, 32 nt, Homo Sapiens
uugggaccagacaaaaucagcuuucaucuaua

SEQ ID NO: 18352 - RNA, 32 nt, Homo Sapiens
cauacaaucaaaaaacaaaacacgaaacguuc

SEQ ID NO: 18353 - RNA, 32 nt, Homo Sapiens
gugugugugggaaggacaaagccacucucaca

SEQ ID NO: 18354 - RNA, 32 nt, Homo Sapiens
caaacuucuagcgcgucacuuccgcugggggc

SEQ ID NO: 18355 - RNA, 32 nt, Homo Sapiens
acgugaagcuugcugcaaggccugcagucaug

SEQ ID NO: 18356 - RNA, 32 nt, Homo Sapiens
gaaaauaucugggucuuuucgucaguuuggug

SEQ ID NO: 18357 - RNA, 32 nt, Homo Sapiens
auaaaaauaagucaccuucaccaagagaugcc

SEQ ID NO: 18358 - RNA, 32 nt, Homo Sapiens
ucuccauuccuccaauguaacucuuaaaauua

SEQ ID NO: 18359 - RNA, 32 nt, Homo Sapiens
uuuggucaugacagugugccugucccacuguu

SEQ ID NO: 18360 - RNA, 32 nt, Homo Sapiens
gugcuggccuuucuccuucgcaggaguccccc

SEQ ID NO: 18361 - RNA, 32 nt, Homo Sapiens
cagaccgugucugacuuaguguaaccuaggag

SEQ ID NO: 18362 - RNA, 32 nt, Homo Sapiens
acugucuaaagccccaggcuggguuagguggu

SEQ ID NO: 18363 - RNA, 32 nt, Homo Sapiens
gggccuggucugaucucauuuuagaggcaguu

SEQ ID NO: 18364 - RNA, 32 nt, Homo Sapiens
ggguggccugcgcuagcuucuuuugauacuga

SEQ ID NO: 18365 - RNA, 32 nt, Homo Sapiens
aaugacgaagcaaaccaagaacaaagaaguga

SEQ ID NO: 18366 - RNA, 32 nt, Homo Sapiens
uuagaacaugaccccacacaaugcugcuugac

SEQ ID NO: 18367 - RNA, 32 nt, Homo Sapiens
gaaagagggauucuaggguuucaucagggacc

SEQ ID NO: 18368 - RNA, 32 nt, Homo Sapiens
gaagcacgggcgacuggacagcagccgccggg

SEQ ID NO: 18369 - RNA, 30 nt, Homo Sapiens
agugggaccggcggacacgcagccucgcgu

SEQ ID NO: 18370 - RNA, 32 nt, Homo Sapiens
ugcuggucauauuuuuacuguuaugauuuagu

SEQ ID NO: 18371 - RNA, 32 nt, Homo Sapiens
ucuuucagcaccagcucuugccccuaugcugg

SEQ ID NO: 18372 - RNA, 32 nt, Homo Sapiens
aggcgugggaggaagcgcggcugcugucgccc

SEQ ID NO: 18373 - RNA, 32 nt, Homo Sapiens
ucuucugaaguaaacuauuuugaaaguucucu

SEQ ID NO: 18374 - RNA, 32 nt, Homo Sapiens
gagggaccagggugggagagcugauugcagaa

SEQ ID NO: 18375 - RNA, 32 nt, Homo Sapiens
uauguagcacuuaacacuguguagaaacuauu

SEQ ID NO: 18376 - RNA, 32 nt, Homo Sapiens
cuggcaaaggaauggaagaauauuuuagucau

SEQ ID NO: 18377 - RNA, 32 nt, Homo Sapiens
uuucugaccaggagcugaaagacccugacauu

SEQ ID NO: 18378 - RNA, 32 nt, Homo Sapiens
cagacagugggauggagaagugagugggggca

SEQ ID NO: 18379 - RNA, 32 nt, Homo Sapiens
gagguuuccgggcggcacaaucucuaggacuc

SEQ ID NO: 18380 - RNA, 32 nt, Homo Sapiens
gguaugcaaccacugcaaucaaugugucauau

SEQ ID NO: 18381 - RNA, 32 nt, Homo Sapiens
agccuguccgccucugcgggaccauggagugg

SEQ ID NO: 18382 - RNA, 32 nt, Homo Sapiens
gccugagaguaaaaagauuaugcugcaaagcu

SEQ ID NO: 18383 - RNA, 32 nt, Homo Sapiens
aguauuuuaaacaaauaaaaggucuuggggaa

SEQ ID NO: 18384 - RNA, 32 nt, Homo Sapiens
cuauaaucccuaaaaugcaauaaaaacuagua

SEQ ID NO: 18385 - RNA, 32 nt, Homo Sapiens
ccagaguggggugggccgugcugggguccugg

SEQ ID NO: 18386 - RNA, 32 nt, Homo Sapiens
acaaugugcagggcugaccugggagacuucuc

SEQ ID NO: 18387 - RNA, 32 nt, Homo Sapiens
gugaugcugggcaaggaguacgugggcaagac

SEQ ID NO: 18388 - RNA, 32 nt, Homo Sapiens
auacauacuuuacuguccaaaaacagaagaag

SEQ ID NO: 18389 - RNA, 32 nt, Homo Sapiens
gcugauguucuucucaucaagcucccgaaugu

SEQ ID NO: 18390 - RNA, 32 nt, Homo Sapiens
agcuugugaaagauuucugaacagugauuguc

SEQ ID NO: 18391 - RNA, 32 nt, Homo Sapiens
ggcuacagggaagaguuuggaacgggaagcuc

SEQ ID NO: 18392 - RNA, 32 nt, Homo Sapiens
ccuacccagcacuuagcaacaaugcacuauua

SEQ ID NO: 18393 - RNA, 32 nt, Homo Sapiens
auuugagcugaauuccacagccuuacuuuguu

SEQ ID NO: 18394 - RNA, 32 nt, Homo Sapiens
cagacaccggcuugcuuggcaggcugggccuc

SEQ ID NO: 18395 - RNA, 32 nt, Homo Sapiens
cagccucugcauuuggggaccucaccuuagga

SEQ ID NO: 18396 - RNA, 32 nt, Homo Sapiens
ggccugccuugcagcuggccccuucccugccu

SEQ ID NO: 18397 - RNA, 32 nt, Homo Sapiens
uuaaaggaaacacuaaggcugcuucaaagauu

SEQ ID NO: 18398 - RNA, 32 nt, Homo Sapiens
aguugauguuuccacguggcuauuuccaagcu

SEQ ID NO: 18399 - RNA, 32 nt, Homo Sapiens
aggcgggcagaucaccugaggucaggaguugg

SEQ ID NO: 18400 - RNA, 32 nt, Homo Sapiens
cagguucaauauuuaaugcuucagaagcaugu

SEQ ID NO: 18401 - RNA, 32 nt, Homo Sapiens
ugcaauucucuaaaagaaggugccaaagcuuu

SEQ ID NO: 18402 - RNA, 32 nt, Homo Sapiens
gaccacccccagucaggaggccccacaggagg

SEQ ID NO: 18403 - RNA, 32 nt, Homo Sapiens
ggcccugauguucuauacacguggggauaugu

SEQ ID NO: 18404 - RNA, 32 nt, Homo Sapiens
aggcgggugcaucaccugaggucgggaguuug

SEQ ID NO: 18405 - RNA, 32 nt, Homo Sapiens
gggagugguggaugaagugugcucauucucau

SEQ ID NO: 18406 - RNA, 32 nt, Homo Sapiens
gcgcacgaggccagcggcggggucgcugccgu

SEQ ID NO: 18407 - RNA, 32 nt, Homo Sapiens
ccccgacucgggcuuggcgcggcggccagagg

SEQ ID NO: 18408 - RNA, 32 nt, Homo Sapiens
ccugggguuugugaaacuguguuguguuauaa

SEQ ID NO: 18409 - RNA, 32 nt, Homo Sapiens
ggugcgaggcggauggagcggguggucgugag

SEQ ID NO: 18410 - RNA, 32 nt, Homo Sapiens
ucaggugauccucccgccugagccuccugagu

SEQ ID NO: 18411 - RNA, 32 nt, Homo Sapiens
cccggugccugcgagcucccccuccgcgccga

SEQ ID NO: 18412 - RNA, 30 nt, Homo Sapiens
gaccuaccacucgugccgccgccggcgcug

SEQ ID NO: 18413 - RNA, 32 nt, Homo Sapiens
ggguggcaggugaccuucugggaaauggcuug

SEQ ID NO: 18414 - RNA, 32 nt, Homo Sapiens
ucugcauaaauuacaggaauuuuuguauuaua

SEQ ID NO: 18415 - RNA, 32 nt, Homo Sapiens
cuagucugugguguagacuggucgccaucacg

SEQ ID NO: 18416 - RNA, 32 nt, Homo Sapiens
uagacuggucuggccugcuggccugggcguca

SEQ ID NO: 18417 - RNA, 32 nt, Homo Sapiens
gcuguagacugcugcgcaguccugggugcauu

SEQ ID NO: 18418 - RNA, 32 nt, Homo Sapiens
agugggggccgcgggcagccgcucuucagcuc

SEQ ID NO: 18419 - RNA, 32 nt, Homo Sapiens
agaucuggccgucagccgcgggccgcugggaa

SEQ ID NO: 18420 - RNA, 32 nt, Homo Sapiens
gcccaguggguucaucugggcuggaaccagag

SEQ ID NO: 18421 - RNA, 32 nt, Homo Sapiens
gggcgccugugcuugagguuggggguugcguc

SEQ ID NO: 18422 - RNA, 32 nt, Homo Sapiens
uuaaucauuacuucuuuuuuucuaguccauuu

SEQ ID NO: 18423 - RNA, 32 nt, Homo Sapiens
agaacgauuggaaauaaauuugaaauguaacc

SEQ ID NO: 18424 - RNA, 32 nt, Homo Sapiens
agguggaggagcuuaggggacuugcuuaguua

SEQ ID NO: 18425 - RNA, 32 nt, Homo Sapiens
ccaucacguuuugauguugggcaaauuaauua

SEQ ID NO: 18426 - RNA, 32 nt, Homo Sapiens
caggguccagcauggguuucagcacagcagac

SEQ ID NO: 18427 - RNA, 32 nt, Homo Sapiens
caagugugaugccuuacaaaagcaccacucag

SEQ ID NO: 18428 - RNA, 32 nt, Homo Sapiens
cacaggagaucaugcagcuguuuugugggaug

SEQ ID NO: 18429 - RNA, 32 nt, Homo Sapiens
ccauuuuuguuacucucuuccacauguuacug

SEQ ID NO: 18430 - RNA, 32 nt, Homo Sapiens
aauucugugauuguguguauguguguugaaac

SEQ ID NO: 18431 - RNA, 32 nt, Homo Sapiens
gaucguucauggaaacaaggaugacgacuggg

SEQ ID NO: 18432 - RNA, 32 nt, Homo Sapiens
uguuuuuauuuuuauuuuuucuuguuuguuuu

SEQ ID NO: 18433 - RNA, 32 nt, Homo Sapiens
gccgaccgcuccccggaaccgugauuggcccg

SEQ ID NO: 18434 - RNA, 32 nt, Homo Sapiens
uugguugaacaaauaauagcaccuacacauac

SEQ ID NO: 18435 - RNA, 32 nt, Homo Sapiens
acccccagaaaaggggugcuggaaggaggccc

SEQ ID NO: 18436 - RNA, 27 nt, Homo Sapiens
acggugaccuucuucuugcucccagug

SEQ ID NO: 18437 - RNA, 32 nt, Homo Sapiens
aaaaucugaaaauacucauauuuuauacauua

SEQ ID NO: 18438 - RNA, 32 nt, Homo Sapiens
gaguccgugaagcugggauggcccaugauccc

SEQ ID NO: 18439 - RNA, 32 nt, Homo Sapiens
aaggaaagggaagaaagacuuuauucucucuc

SEQ ID NO: 18440 - RNA, 32 nt, Homo Sapiens
guggccuccgcggcgaguccuggggucuccgc

SEQ ID NO: 18441 - RNA, 32 nt, Homo Sapiens
augucccaucugcuccucccauuccccuuaag

SEQ ID NO: 18442 - RNA, 32 nt, Homo Sapiens
gugcucccugucaccucacaacaaaaugcacu

SEQ ID NO: 18443 - RNA, 32 nt, Homo Sapiens
ggccacugccuucccagcugcccgcagggggu

SEQ ID NO: 18444 - RNA, 32 nt, Homo Sapiens
ugauuaaauaaauuauuguaaauucauacauu

SEQ ID NO: 18445 - RNA, 32 nt, Homo Sapiens
ucagccaucuugaaccagaagcccuuauuuua

SEQ ID NO: 18446 - RNA, 32 nt, Homo Sapiens
uaaugaaaauuugaggacacguggugauacag

SEQ ID NO: 18447 - RNA, 32 nt, Homo Sapiens
gaggcaugcuucccagccugcagaauggccac

SEQ ID NO: 18448 - RNA, 32 nt, Homo Sapiens
cagguucugguucagguaaaguugcgucaguc

SEQ ID NO: 18449 - RNA, 32 nt, Homo Sapiens
uaugaggaaaaagcgagagaaaaggaaaagcc

SEQ ID NO: 18450 - RNA, 32 nt, Homo Sapiens
uuuuuccaaguacauuuguaacuacagcaggc

SEQ ID NO: 18451 - RNA, 32 nt, Homo Sapiens
uaaggucuguaauugcaauacuuuuaaagaaa

SEQ ID NO: 18452 - RNA, 32 nt, Homo Sapiens
agcagagauggcagcugaaacucacucugugc

SEQ ID NO: 18453 - RNA, 32 nt, Homo Sapiens
uagauauauuuuauuuuuauuaaaauggcagu

SEQ ID NO: 18454 - RNA, 32 nt, Homo Sapiens
cacuggagcgccccaguccagcccuaucccag

SEQ ID NO: 18455 - RNA, 32 nt, Homo Sapiens
ugugacuucugaaacuauuuggcugccuaaag

SEQ ID NO: 18456 - RNA, 32 nt, Homo Sapiens
aaucacuuuauuuuuuaaagacuuccggccag

SEQ ID NO: 18457 - RNA, 32 nt, Homo Sapiens
uccuugauuuguucaaauaccuuuaugccauc

SEQ ID NO: 18458 - RNA, 32 nt, Homo Sapiens
uuccgccgccgcagccagcccgagggucggcc

SEQ ID NO: 18459 - RNA, 32 nt, Homo Sapiens
auuuuaucagcuugccuauuaaaggacuaugg

SEQ ID NO: 18460 - RNA, 32 nt, Homo Sapiens
cuuugaaaaauaauucacucuugaaguaauaa

SEQ ID NO: 18461 - RNA, 32 nt, Homo Sapiens
uaagccccgcaugcauuagcuauuuauccuga

SEQ ID NO: 18462 - RNA, 32 nt, Homo Sapiens
ugagauacuuguuuccucugcccauucucccu

SEQ ID NO: 18463 - RNA, 32 nt, Homo Sapiens
gacugugauuguaggggguugcuggguggccu

SEQ ID NO: 18464 - RNA, 32 nt, Homo Sapiens
ccucucugaccgugaggcuggcucucagccau

SEQ ID NO: 18465 - RNA, 32 nt, Homo Sapiens
uuaacuugaucccauuaugaacagccacauua

SEQ ID NO: 18466 - RNA, 32 nt, Homo Sapiens
guuauucuugucagcuaaggucacauugugcc

SEQ ID NO: 18467 - RNA, 32 nt, Homo Sapiens
cucaccuguucuccaggaccagcccugcuggg

SEQ ID NO: 18468 - RNA, 32 nt, Homo Sapiens
aaaugaaaaugaugugucauggccguaaaagu

SEQ ID NO: 18469 - RNA, 32 nt, Homo Sapiens
ucgccacucccaagcacugggcgaagugcuuu

SEQ ID NO: 18470 - RNA, 32 nt, Homo Sapiens
cuccaugguccucccucugaaacaccacaugc

SEQ ID NO: 18471 - RNA, 32 nt, Homo Sapiens
ccugacccaggccccaggaccuccaggaccug

SEQ ID NO: 18472 - RNA, 32 nt, Homo Sapiens
accgaguguuucaaugaguaaauauacagcuu

SEQ ID NO: 18473 - RNA, 32 nt, Homo Sapiens
aaucucagagaagaagaggaaguucuauggua

SEQ ID NO: 18474 - RNA, 32 nt, Homo Sapiens
agauagucgaacuuaaaaucauaccuacccug

SEQ ID NO: 18475 - RNA, 32 nt, Homo Sapiens
uugcaggauacaagguuaaaacacaagaucaa

SEQ ID NO: 18476 - RNA, 29 nt, Homo Sapiens
cgcgaugggagcugcgcggggauccccgg

SEQ ID NO: 18477 - RNA, 29 nt, Homo Sapiens
ccaggcccaguacggaggacgcuggggaa

SEQ ID NO: 18478 - RNA, 29 nt, Homo Sapiens
agaagggggcagcagcggacgccgcuaac

SEQ ID NO: 18479 - RNA, 32 nt, Homo Sapiens
cagcugcaucccauuugguacccaggcaagga

SEQ ID NO: 18480 - RNA, 32 nt, Homo Sapiens
uaggcagagauuaauaagcuguaaaauaucaa

SEQ ID NO: 18481 - RNA, 32 nt, Homo Sapiens
gggaggaggcaguaauaaaaagauugaaguau

SEQ ID NO: 18482 - RNA, 32 nt, Homo Sapiens
agggauacccucaagcuggacuguggguucca

SEQ ID NO: 18483 - RNA, 32 nt, Homo Sapiens
gcaaccuugaguuuuuugcaagacuucagauc

SEQ ID NO: 18484 - RNA, 32 nt, Homo Sapiens
ccagagcggggccagagcggcgggucuauguu

SEQ ID NO: 18485 - RNA, 32 nt, Homo Sapiens
cuuggguaaucugugauuguaccuguuucuuc

SEQ ID NO: 18486 - RNA, 32 nt, Homo Sapiens
acucuccaggccgccccagccugacccaguca

SEQ ID NO: 18487 - RNA, 32 nt, Homo Sapiens
aggucgccacuucuccuguuguccuucucagu

SEQ ID NO: 18488 - RNA, 32 nt, Homo Sapiens
caacauuagugucagauagcuuugaaguugug

SEQ ID NO: 18489 - RNA, 32 nt, Homo Sapiens
ccgaggcgugacucgcaggugcccacgcgugc

SEQ ID NO: 18490 - RNA, 32 nt, Homo Sapiens
cagcaagccuuaauauaaaguuuccuaaaguu

SEQ ID NO: 18491 - RNA, 32 nt, Homo Sapiens
gcagauugaguuuucuucugugauucggugga

SEQ ID NO: 18492 - RNA, 32 nt, Homo Sapiens
gggccgcgaugcaacagcagcagcaggagucg

SEQ ID NO: 18493 - RNA, 32 nt, Homo Sapiens
cagagaguuaauaggaguauuuuugggcuauu

SEQ ID NO: 18494 - RNA, 32 nt, Homo Sapiens
aagugugcggcccuuccugacaucaccacagu

SEQ ID NO: 18495 - RNA, 32 nt, Homo Sapiens
aguccuguggaaugaaaccaucuccuaaaauu

SEQ ID NO: 18496 - RNA, 32 nt, Homo Sapiens
ccgggggcuccuuuccgcaccagcggcggucg

SEQ ID NO: 18497 - RNA, 32 nt, Homo Sapiens
gcacccuuuuuuguugcuguucaguguuaauc

SEQ ID NO: 18498 - RNA, 29 nt, Homo Sapiens
guuaauuuuuguuucaggagugagauaua

SEQ ID NO: 18499 - RNA, 32 nt, Homo Sapiens
ugcacgguaagaauuccuuuuacagacauucu

SEQ ID NO: 18500 - RNA, 32 nt, Homo Sapiens
ggcuccaggcagugcuugcuccccucacugca

SEQ ID NO: 18501 - RNA, 32 nt, Homo Sapiens
ucccgcucccgcccuuucuccucaugcacccg

SEQ ID NO: 18502 - RNA, 32 nt, Homo Sapiens
gggcgcaggaugggcgggaacugggcggccuc

SEQ ID NO: 18503 - RNA, 32 nt, Homo Sapiens
gggacugggcacccacaagggcucagugggcc

SEQ ID NO: 18504 - RNA, 32 nt, Homo Sapiens
gcacaauaaaagacauccacaauggaaaaaaa

SEQ ID NO: 18505 - RNA, 32 nt, Homo Sapiens
gaucacccucccugcuuccccaggcugucaac

SEQ ID NO: 18506 - RNA, 32 nt, Homo Sapiens
ccucaggacacagcuuuggccuugggaauucu

SEQ ID NO: 18507 - RNA, 32 nt, Homo Sapiens
ucccgccccuccugggaucuguggggagcugg

SEQ ID NO: 18508 - RNA, 32 nt, Homo Sapiens
guccuccgcccccggcccuccccucucaggcg

SEQ ID NO: 18509 - RNA, 32 nt, Homo Sapiens
ccucucaaaauauuuuuagaagucuuuuugua

SEQ ID NO: 18510 - RNA, 32 nt, Homo Sapiens
gaugaaaaauuuagugcagaggagauauggug

SEQ ID NO: 18511 - RNA, 32 nt, Homo Sapiens
gggucugccugccugaaagauggugguugggg

SEQ ID NO: 18512 - RNA, 32 nt, Homo Sapiens
uucagcuuuuucugccucaaaaccagcccuaa

SEQ ID NO: 18513 - RNA, 32 nt, Homo Sapiens
cuuagaaucuacaggucucccucucugccaau

SEQ ID NO: 18514 - RNA, 32 nt, Homo Sapiens
uuuauugaaaauagcugcuuuucuaucaguca

SEQ ID NO: 18515 - RNA, 32 nt, Homo Sapiens
aguguccucaugugauaaacagagcacagucc

SEQ ID NO: 18516 - RNA, 32 nt, Homo Sapiens
acuggggucagaccaacagccaguguccucag

SEQ ID NO: 18517 - RNA, 32 nt, Homo Sapiens
guuguuguuguuguuguuguuuuaaucauucc

SEQ ID NO: 18518 - RNA, 32 nt, Homo Sapiens
uaaaguuggggguggaguggccgggagaugau

SEQ ID NO: 18519 - RNA, 32 nt, Homo Sapiens
cacugcacuccagcagucugggcgacagagug

SEQ ID NO: 18520 - RNA, 32 nt, Homo Sapiens
gggggguuggugucauggcagcugcggggagc

SEQ ID NO: 18521 - RNA, 30 nt, Homo Sapiens
cugcuggcgcccgauccgccacugcagaag

SEQ ID NO: 18522 - RNA, 32 nt, Homo Sapiens
cuuucuuuguuuuuucuucaguuuuuuguugu

SEQ ID NO: 18523 - RNA, 27 nt, Homo Sapiens
aagacagugcccgugcuccaggugaag

SEQ ID NO: 18524 - RNA, 32 nt, Homo Sapiens
uucuggggucgacugccacgacuuuugauuca

SEQ ID NO: 18525 - RNA, 31 nt, Homo Sapiens
ggagcagggcagcucuaccaggcaagguguu

SEQ ID NO: 18526 - RNA, 32 nt, Homo Sapiens
uaaguaaaacgaaugucaagacauuuucuguc

SEQ ID NO: 18527 - RNA, 29 nt, Homo Sapiens
cuuuaguagaguuuauagccuauuuuucu

SEQ ID NO: 18528 - RNA, 32 nt, Homo Sapiens
acacccaccagcccggccccucccggcgccug

SEQ ID NO: 18529 - RNA, 32 nt, Homo Sapiens
uuugcugccaaagaccacuuggggcuccuugu

SEQ ID NO: 18530 - RNA, 32 nt, Homo Sapiens
uggaccugcccggcuguuuccgcaugcggagc

SEQ ID NO: 18531 - RNA, 32 nt, Homo Sapiens
augguagcuaauuuuucuuuaccuauuuucua

SEQ ID NO: 18532 - RNA, 32 nt, Homo Sapiens
cccgccuuuucccccacccucccaugagacug

SEQ ID NO: 18533 - RNA, 32 nt, Homo Sapiens
aaugaugacgucaacaacgaaguaaauauguu

SEQ ID NO: 18534 - RNA, 32 nt, Homo Sapiens
ugcuuccccaaguuuaaaggcccugcagaaau

SEQ ID NO: 18535 - RNA, 32 nt, Homo Sapiens
augcugucccgcacucccccagccagcugaug

SEQ ID NO: 18536 - RNA, 32 nt, Homo Sapiens
aagauguaucauuuuucuuaaaaugcauguuu

SEQ ID NO: 18537 - RNA, 32 nt, Homo Sapiens
ucuucucugccuuguuagugcauauuuuuacu

SEQ ID NO: 18538 - RNA, 32 nt, Homo Sapiens
uaaagcauuggaaaaauauuuugccuguaaaa

SEQ ID NO: 18539 - RNA, 32 nt, Homo Sapiens
cugaguuuuuaaaaucacaaaguaauuagcaa

SEQ ID NO: 18540 - RNA, 32 nt, Homo Sapiens
guguaaacaguguuuuggaauaaaauauuuuu

SEQ ID NO: 18541 - RNA, 32 nt, Homo Sapiens
ucuuucuuuuucuguuuugaguuggugaguga

SEQ ID NO: 18542 - RNA, 32 nt, Homo Sapiens
auuugcuaccagcggcggccgcggcggagcca

SEQ ID NO: 18543 - RNA, 32 nt, Homo Sapiens
gaccaauggcauauugagaucuaugugacaug

SEQ ID NO: 18544 - RNA, 32 nt, Homo Sapiens
gcaucccggcgcccucccaggcgcuccaggag

SEQ ID NO: 18545 - RNA, 32 nt, Homo Sapiens
gcacuucugucaagccucccccgccccaauug

SEQ ID NO: 18546 - RNA, 32 nt, Homo Sapiens
ccuguccucagugccaggcagugucaggcuga

SEQ ID NO: 18547 - RNA, 32 nt, Homo Sapiens
gagaguggccauucuuuuuuucuuggcccccu

SEQ ID NO: 18548 - RNA, 31 nt, Homo Sapiens
aggcauccaugagaccucagagcuucagauc

SEQ ID NO: 18549 - RNA, 32 nt, Homo Sapiens
ucgcuugagccugggaggcggagguugcagug

SEQ ID NO: 18550 - RNA, 32 nt, Homo Sapiens
uccucucccaacucaagguucuagugggaagg

SEQ ID NO: 18551 - RNA, 32 nt, Homo Sapiens
gaugcagaaguaccuaccacaugggaaccguu

SEQ ID NO: 18552 - RNA, 32 nt, Homo Sapiens
augauacuuagucacauaauuaucuuugauaa

SEQ ID NO: 18553 - RNA, 32 nt, Homo Sapiens
acaguuuggcuguguccccaccaaauugaauu

SEQ ID NO: 18554 - RNA, 32 nt, Homo Sapiens
uuguacaguaggcaugggggcgugccugugug

SEQ ID NO: 18555 - RNA, 32 nt, Homo Sapiens
gccacuugggucuggguggaaucagaacgugc

SEQ ID NO: 18556 - RNA, 32 nt, Homo Sapiens
agaccggcgcuuggcacccuuguuggaaaggg

SEQ ID NO: 18557 - RNA, 32 nt, Homo Sapiens
acugugggaggguggacaggcaaugguucagu

SEQ ID NO: 18558 - RNA, 32 nt, Homo Sapiens
gguggcuuugccuuggauauuccucuuccucu

SEQ ID NO: 18559 - RNA, 32 nt, Homo Sapiens
gaaagacaggagaauuaggagagagugaguga

SEQ ID NO: 18560 - RNA, 32 nt, Homo Sapiens
gaaacccugucuacaaaaauuagccaggcaug

SEQ ID NO: 18561 - RNA, 32 nt, Homo Sapiens
gggagugcgcgcccugcagagccagugggugg

SEQ ID NO: 18562 - RNA, 32 nt, Homo Sapiens
cuccuuaggacacgcagcccccaauuuguccc

SEQ ID NO: 18563 - RNA, 32 nt, Homo Sapiens
acaagugaauucaguaaaguuucaagaaauaa

SEQ ID NO: 18564 - RNA, 32 nt, Homo Sapiens
gccaaaacuggaagacaaaaccaauauauaau

SEQ ID NO: 18565 - RNA, 32 nt, Homo Sapiens
ccaagcaggcucacucuguuuccaggguagag

SEQ ID NO: 18566 - RNA, 32 nt, Homo Sapiens
uuuguuuuucuuuuggcuccaaccaggccucu

SEQ ID NO: 18567 - RNA, 32 nt, Homo Sapiens
agugcugaagggcuguugugauguucugaggu

SEQ ID NO: 18568 - RNA, 32 nt, Homo Sapiens
agggccgcgcagccaccgccgccgccucuccu

SEQ ID NO: 18569 - RNA, 32 nt, Homo Sapiens
gccagauacuuaacagaaggaaaguaguuuau

SEQ ID NO: 18570 - RNA, 32 nt, Homo Sapiens
accgagacacggaugucggggacuacuugguc

SEQ ID NO: 18571 - RNA, 32 nt, Homo Sapiens
uacauggcgacaucuaggcagcuccgccuugc

SEQ ID NO: 18572 - RNA, 32 nt, Homo Sapiens
acgccuauaucccagcacuuugggaggccaag

SEQ ID NO: 18573 - RNA, 32 nt, Homo Sapiens
uuuaguaccugggagaagugaccucuuuauuu

SEQ ID NO: 18574 - RNA, 32 nt, Homo Sapiens
caaccuccacuacugcuugacccugccgggau

SEQ ID NO: 18575 - RNA, 32 nt, Homo Sapiens
gccccugggucucugcgccuuugcaugagacu

SEQ ID NO: 18576 - RNA, 32 nt, Homo Sapiens
cuccagcccucccaaugccaacccccaccccg

SEQ ID NO: 18577 - RNA, 32 nt, Homo Sapiens
gagcugaacuauuagagcugccugugccuuuu

SEQ ID NO: 18578 - RNA, 32 nt, Homo Sapiens
auuguuuaaggguaagccacaacaucuagaaa

SEQ ID NO: 18579 - RNA, 32 nt, Homo Sapiens
aagagguacaagcaggaccaaaguuuuggacu

SEQ ID NO: 18580 - RNA, 32 nt, Homo Sapiens
ccuggggacacggacuucugcugcugccaccu

SEQ ID NO: 18581 - RNA, 32 nt, Homo Sapiens
ugccugcggcugcugcucuccuccgacgcccg

SEQ ID NO: 18582 - RNA, 32 nt, Homo Sapiens
uucuuuauuaaagauuuuugaggccgggcaca

SEQ ID NO: 18583 - RNA, 32 nt, Homo Sapiens
gacuuacccugugucuggcccgggacuggacg

SEQ ID NO: 18584 - RNA, 32 nt, Homo Sapiens
ucagucccggcuaauagagauuuuagcacacu

SEQ ID NO: 18585 - RNA, 32 nt, Homo Sapiens
gagugcuggaucgcgugguaauucuauuauuu

SEQ ID NO: 18586 - RNA, 32 nt, Homo Sapiens
uucugcaggaggaagagcccgcugccgaaucc

SEQ ID NO: 18587 - RNA, 32 nt, Homo Sapiens
agaggcugugugugucccacgcgcuccuguuu

SEQ ID NO: 18588 - RNA, 28 nt, Homo Sapiens
gugccaguuacagcaggugauucagcua

SEQ ID NO: 18589 - RNA, 32 nt, Homo Sapiens
uacaggugugcaccaccacaccuggcuaauuc

SEQ ID NO: 18590 - RNA, 32 nt, Homo Sapiens
caaaagaacgguuuuguaauaaaauuauagcu

SEQ ID NO: 18591 - RNA, 30 nt, Homo Sapiens
uggagcuggcuaaugggagaacacguggug

SEQ ID NO: 18592 - RNA, 32 nt, Homo Sapiens
uugccaguuuauucuuuuguuucuuuuaucug

SEQ ID NO: 18593 - RNA, 32 nt, Homo Sapiens
gagugcgagccacaggccaggcacucuccuuc

SEQ ID NO: 18594 - RNA, 32 nt, Homo Sapiens
ugauaaggaagaugaagggucuucagagaaga

SEQ ID NO: 18595 - RNA, 32 nt, Homo Sapiens
uggaucaccugagccuaggaguucaagaucag

SEQ ID NO: 18596 - RNA, 32 nt, Homo Sapiens
aucguuagaaggaaaaguaagauuucagucau

SEQ ID NO: 18597 - RNA, 32 nt, Homo Sapiens
auuuuaucccucuggcagcccuggacagacau

SEQ ID NO: 18598 - RNA, 32 nt, Homo Sapiens
acuuggacaagaccccaagauucuucaaggau

SEQ ID NO: 18599 - RNA, 32 nt, Homo Sapiens
cgggcagggucuccugagcagcagguggcucg

SEQ ID NO: 18600 - RNA, 32 nt, Homo Sapiens
aaaauucccuugaauuuuuauccuuugcuugc

SEQ ID NO: 18601 - RNA, 32 nt, Homo Sapiens
gggcuccguggcgaugcgggguguugccugag

SEQ ID NO: 18602 - RNA, 32 nt, Homo Sapiens
ccuauggaaagauggcaucaaaaaagauagau

SEQ ID NO: 18603 - RNA, 32 nt, Homo Sapiens
guuuuuguuuuaacuggaaguggauucuuaag

SEQ ID NO: 18604 - RNA, 32 nt, Homo Sapiens
uccauuuaaaagacuuuuaugaauacaugguu

SEQ ID NO: 18605 - RNA, 32 nt, Homo Sapiens
augaggaggaagaucaacgaagucacagggcc

SEQ ID NO: 18606 - RNA, 32 nt, Homo Sapiens
agcuuccccggacagcguacuuugaggacucg

SEQ ID NO: 18607 - RNA, 32 nt, Homo Sapiens
cucagccaagcuuguuaucagcuuucagggcc

SEQ ID NO: 18608 - RNA, 32 nt, Homo Sapiens
cugaugugucucuuggauuucuuccaggugau

SEQ ID NO: 18609 - RNA, 32 nt, Homo Sapiens
aaaaauagaaaauuauuuguuaaauucagaga

SEQ ID NO: 18610 - RNA, 32 nt, Homo Sapiens
ucccagccccacuugccugcaggcuuaugaua

SEQ ID NO: 18611 - RNA, 32 nt, Homo Sapiens
caagcccaugaaugccaccccagucaucucug

SEQ ID NO: 18612 - RNA, 32 nt, Homo Sapiens
agacuaggucaucccugaaauucucgcugauc

SEQ ID NO: 18613 - RNA, 32 nt, Homo Sapiens
guuucaauugugcccuauuacaaaagaaaacg

SEQ ID NO: 18614 - RNA, 32 nt, Homo Sapiens
cucuuuagaaguugucugugggugauguuacu

SEQ ID NO: 18615 - RNA, 32 nt, Homo Sapiens
gcggaccuuaggaucuugggccuggaggcaag

SEQ ID NO: 18616 - RNA, 32 nt, Homo Sapiens
ccagccugccccagccucccagcuuucugugu

SEQ ID NO: 18617 - RNA, 32 nt, Homo Sapiens
cugcccugggagaggaagggaguccagauccc

SEQ ID NO: 18618 - RNA, 32 nt, Homo Sapiens
cccaguuugcccgugauuuggcgcuccaacag

SEQ ID NO: 18619 - RNA, 32 nt, Homo Sapiens
gccacagccuugcaugaagcuggcacuugugc

SEQ ID NO: 18620 - RNA, 32 nt, Homo Sapiens
gaaaaagagucuuguuuuauuaacaucagaca

SEQ ID NO: 18621 - RNA, 32 nt, Homo Sapiens
uuuugugguuaacuuaaaauauugagugaugu

SEQ ID NO: 18622 - RNA, 32 nt, Homo Sapiens
gucucaugucacguaucaauagaucaauuggu

SEQ ID NO: 18623 - RNA, 32 nt, Homo Sapiens
ggcggccguggcggccugagcgugaugcuccg

SEQ ID NO: 18624 - RNA, 32 nt, Homo Sapiens
ucuggccaggugccgggaggggcgcugugucg

SEQ ID NO: 18625 - RNA, 32 nt, Homo Sapiens
aacuuuguaaaaagcauguauguauuuauagu

SEQ ID NO: 18626 - RNA, 32 nt, Homo Sapiens
acuuugugcuaacagugccggagcuuugucag

SEQ ID NO: 18627 - RNA, 32 nt, Homo Sapiens
gccaguuuccccagccucagccccagccccag

SEQ ID NO: 18628 - RNA, 32 nt, Homo Sapiens
cgaggaggccccagcccuaacccgcgcugcgg

SEQ ID NO: 18629 - RNA, 32 nt, Homo Sapiens
ggggggucaggagaguuaaggagguugugggu

SEQ ID NO: 18630 - RNA, 32 nt, Homo Sapiens
caugguugccccgccuggcccggcgacgcccg

SEQ ID NO: 18631 - RNA, 32 nt, Homo Sapiens
gacuacaggcguccuccaccaugccuggcuaa

SEQ ID NO: 18632 - RNA, 32 nt, Homo Sapiens
gaaaagacucugacaaggacucuugaauacaa

SEQ ID NO: 18633 - RNA, 32 nt, Homo Sapiens
ccaacaccaucuuuuggaauuuucauacaaag

SEQ ID NO: 18634 - RNA, 32 nt, Homo Sapiens
gagguugcugagaaguacaugggguugugcag

SEQ ID NO: 18635 - RNA, 32 nt, Homo Sapiens
gaggggcccccaccugauggaccuccagaaaa

SEQ ID NO: 18636 - RNA, 32 nt, Homo Sapiens
uccuagucaaacaaaauuuacuugguuggucc

SEQ ID NO: 18637 - RNA, 32 nt, Homo Sapiens
gcagguccccuggggcagcugcccacccgugc

SEQ ID NO: 18638 - RNA, 32 nt, Homo Sapiens
uaaguuauuuugguuagcacaagcucaggggc

SEQ ID NO: 18639 - RNA, 32 nt, Homo Sapiens
cugcuuaaucuuuucuaaaaucgccuguauga

SEQ ID NO: 18640 - RNA, 32 nt, Homo Sapiens
agugaaauaaauguguuugaugcugaaccaua

SEQ ID NO: 18641 - RNA, 32 nt, Homo Sapiens
auuuuuaacauugugucuuuuaaaagaaaugu

SEQ ID NO: 18642 - RNA, 32 nt, Homo Sapiens
aucaauggcagagccuggaugcauaggaccuu

SEQ ID NO: 18643 - RNA, 32 nt, Homo Sapiens
caggaggggccucagacccagccccugcucca

SEQ ID NO: 18644 - RNA, 30 nt, Homo Sapiens
aaaguaugaugauaauugaucgcuuagaug

SEQ ID NO: 18645 - RNA, 32 nt, Homo Sapiens
accauccugggcaacauagugagacccugucu

SEQ ID NO: 18646 - RNA, 32 nt, Homo Sapiens
uaaaugaaauguucucuuuuucacuucacccu

SEQ ID NO: 18647 - RNA, 32 nt, Homo Sapiens
gcacuuuuauaaguacugguucuaguacuagc

SEQ ID NO: 18648 - RNA, 32 nt, Homo Sapiens
gcacuuucccaugguccucacuggccucaguc

SEQ ID NO: 18649 - RNA, 32 nt, Homo Sapiens
cacgcuugcuaagggcagguaguuggcugacu

SEQ ID NO: 18650 - RNA, 32 nt, Homo Sapiens
aaauguuguccacuucccuuuuccacaggccu

SEQ ID NO: 18651 - RNA, 32 nt, Homo Sapiens
aggaggaggaggaggaaggggcuuggagcgac

SEQ ID NO: 18652 - RNA, 32 nt, Homo Sapiens
acacagagaaguugcugcuugugaucucacac

SEQ ID NO: 18653 - RNA, 32 nt, Homo Sapiens
uggguacauaucucuucuugauucugcauuuc

SEQ ID NO: 18654 - RNA, 32 nt, Homo Sapiens
uccguauaggauuuuuuguuguuguaagaguu

SEQ ID NO: 18655 - RNA, 32 nt, Homo Sapiens
agcaggguggggucugggagggggugagaggc

SEQ ID NO: 18656 - RNA, 32 nt, Homo Sapiens
gccuggagcuuccuccgcggggcccccaggcc

SEQ ID NO: 18657 - RNA, 32 nt, Homo Sapiens
auuugguccccaguagagagccaggugaacuu

SEQ ID NO: 18658 - RNA, 32 nt, Homo Sapiens
ccaguguggucagcccaagccauccaccacca

SEQ ID NO: 18659 - RNA, 32 nt, Homo Sapiens
ucccauuggcugggcucuggccugaucacugg

SEQ ID NO: 18660 - RNA, 32 nt, Homo Sapiens
gguaauguucuucuuuugucuuauugaaacaa

SEQ ID NO: 18661 - RNA, 32 nt, Homo Sapiens
ucuacaaagaacuauuaaaacuucugaaauau

SEQ ID NO: 18662 - RNA, 32 nt, Homo Sapiens
guggggaggggaauggggaggggguuuggcaa

SEQ ID NO: 18663 - RNA, 32 nt, Homo Sapiens
agagucuugcucugugacccagguugcaguga

SEQ ID NO: 18664 - RNA, 32 nt, Homo Sapiens
guauaugguuuguguucuuuuacuguguccuc

SEQ ID NO: 18665 - RNA, 32 nt, Homo Sapiens
agguuucugggaagaacaggaaguucagggau

SEQ ID NO: 18666 - RNA, 32 nt, Homo Sapiens
gacucgcccuguacauugcuuagugcccucac

SEQ ID NO: 18667 - RNA, 32 nt, Homo Sapiens
uaucauucuccucuagugacgcagcagcuggu

SEQ ID NO: 18668 - RNA, 32 nt, Homo Sapiens
gugaguuccccucuacuuuuagccuuccaccc

SEQ ID NO: 18669 - RNA, 32 nt, Homo Sapiens
uuaauagggccccuuucagucucaaaaguguc

SEQ ID NO: 18670 - RNA, 32 nt, Homo Sapiens
ugugguuccagaagcugagaaaacuccacugg

SEQ ID NO: 18671 - RNA, 32 nt, Homo Sapiens
aauaucugaaaugugauaaguucuuaugccau

SEQ ID NO: 18672 - RNA, 32 nt, Homo Sapiens
ggcagaagauaacagcagcaucucgaccagcc

SEQ ID NO: 18673 - RNA, 32 nt, Homo Sapiens
uguuggcugcugccaccaaaucugucuagaau

SEQ ID NO: 18674 - RNA, 32 nt, Homo Sapiens
cgccgcugcgcaccccagcggagccaagcccc

SEQ ID NO: 18675 - RNA, 32 nt, Homo Sapiens
ugcacccuccaagccugcaccucuuaguccag

SEQ ID NO: 18676 - RNA, 31 nt, Homo Sapiens
guugcagcuugcuagagguccacuccagacc

SEQ ID NO: 18677 - RNA, 32 nt, Homo Sapiens
caaaacaaaaagacauaaaauagauaaaacag

SEQ ID NO: 18678 - RNA, 32 nt, Homo Sapiens
ugauuucuccagaauucagaaacuauuuguaa

SEQ ID NO: 18679 - RNA, 32 nt, Homo Sapiens
ggcgccaccgcugccucuuuccggcugugacc

SEQ ID NO: 18680 - RNA, 32 nt, Homo Sapiens
cugcaaacaagcucgccuaucugucaucaggc

SEQ ID NO: 18681 - RNA, 32 nt, Homo Sapiens
uccagccccgacccgggcgcgcggggccgacu

SEQ ID NO: 18682 - RNA, 32 nt, Homo Sapiens
ggaacaauaucuguuaccacucaguccgucuc

SEQ ID NO: 18683 - RNA, 32 nt, Homo Sapiens
gaaauuuucuagaauacuaauaaaauacauac

SEQ ID NO: 18684 - RNA, 32 nt, Homo Sapiens
cuccuggcccggugcagcugcccucagggaca

SEQ ID NO: 18685 - RNA, 32 nt, Homo Sapiens
aaccuaaauguaauaaggaagagaggagagcc

SEQ ID NO: 18686 - RNA, 32 nt, Homo Sapiens
cucguccgcgccauguuccaggcggccgagcg

SEQ ID NO: 18687 - RNA, 32 nt, Homo Sapiens
aauuucccucuuuuguagucugcacaagaucc

SEQ ID NO: 18688 - RNA, 32 nt, Homo Sapiens
uagcuaugggacugcuggcuccuaguccagga

SEQ ID NO: 18689 - RNA, 32 nt, Homo Sapiens
uuauuucauccaauacacauuuucucaguacc

SEQ ID NO: 18690 - RNA, 31 nt, Homo Sapiens
cgagccgagcgagaagagcggcagagccuua

SEQ ID NO: 18691 - RNA, 32 nt, Homo Sapiens
cacccaccaacccucagugaaacaaccuccuc

SEQ ID NO: 18692 - RNA, 32 nt, Homo Sapiens
cauuucuucccugcugguaaaauagaaacagg

SEQ ID NO: 18693 - RNA, 32 nt, Homo Sapiens
agacccugaaagcugagcugcccugaccccca

SEQ ID NO: 18694 - RNA, 32 nt, Homo Sapiens
guuucuucgcggcugcucaagaugaaccgacu

SEQ ID NO: 18695 - RNA, 32 nt, Homo Sapiens
auaaacuuacuggggacaggaugugugcuaaa

SEQ ID NO: 18696 - RNA, 32 nt, Homo Sapiens
uguucucacaccuggugcccagccugugcccu

SEQ ID NO: 18697 - RNA, 32 nt, Homo Sapiens
cauaccuguacagaaugguaacuaagggugcu

SEQ ID NO: 18698 - RNA, 32 nt, Homo Sapiens
aaucguuucuuuuguuugucugauuuaugguu

SEQ ID NO: 18699 - RNA, 32 nt, Homo Sapiens
cauucgauugcauuucccacuccccucuucca

SEQ ID NO: 18700 - RNA, 32 nt, Homo Sapiens
gggcaggagcuguguccuucuauucaucuucc

SEQ ID NO: 18701 - RNA, 32 nt, Homo Sapiens
cauccacccucugggguguggccaggaaaaga

SEQ ID NO: 18702 - RNA, 32 nt, Homo Sapiens
uauuuaggaaaugauauggcaucagguaagcc

SEQ ID NO: 18703 - RNA, 32 nt, Homo Sapiens
ucacccuaaaagaagaucugacaggaaagcug

SEQ ID NO: 18704 - RNA, 32 nt, Homo Sapiens
gauaauuuuguacaguuuuauauaaaacucug

SEQ ID NO: 18705 - RNA, 32 nt, Homo Sapiens
ggggcugcgggcugagggggaccgcuggcacc

SEQ ID NO: 18706 - RNA, 32 nt, Homo Sapiens
ccucaacaguggaggcccagccaggccucccu

SEQ ID NO: 18707 - RNA, 31 nt, Homo Sapiens
ggcacgagggcggagccagccccuccccuac

SEQ ID NO: 18708 - RNA, 32 nt, Homo Sapiens
ggaauuuucuuuucuuuuuuuuuuuuuuuuga

SEQ ID NO: 18709 - RNA, 32 nt, Homo Sapiens
uuccaggcagggccccucaguuaugccgggag

SEQ ID NO: 18710 - RNA, 32 nt, Homo Sapiens
gacgccaggacacccgggaagccgaggaaugg

SEQ ID NO: 18711 - RNA, 32 nt, Homo Sapiens
augacagaucacaauguauggggaauuugccc

SEQ ID NO: 18712 - RNA, 32 nt, Homo Sapiens
cugccuugcucaaguucucaccaccucuuucc

SEQ ID NO: 18713 - RNA, 32 nt, Homo Sapiens
ugugcugcggcgccgcgcggccugcagucccg

SEQ ID NO: 18714 - RNA, 32 nt, Homo Sapiens
uuguugaagaaaguagcagaaauuaaaucuua

SEQ ID NO: 18715 - RNA, 32 nt, Homo Sapiens
uuuccugguugaauuuucuacuguuucacgug

SEQ ID NO: 18716 - RNA, 32 nt, Homo Sapiens
agggcauccaacauggugaagccccgucucua

SEQ ID NO: 18717 - RNA, 32 nt, Homo Sapiens
aagugcucauucucccuuuugccucaggaaga

SEQ ID NO: 18718 - RNA, 32 nt, Homo Sapiens
ccugucuuccacggcucuccugucccaccuau

SEQ ID NO: 18719 - RNA, 32 nt, Homo Sapiens
uucgggcgcgaagcggccggccugggcgccga

SEQ ID NO: 18720 - RNA, 32 nt, Homo Sapiens
gauuuguaaaguguuaugcauauguauguuau

SEQ ID NO: 18721 - RNA, 32 nt, Homo Sapiens
ccugggcuggcugugguguagggcguugcagg

SEQ ID NO: 18722 - RNA, 32 nt, Homo Sapiens
gcaagaaaaaaguacagaacauauccucuacg

SEQ ID NO: 18723 - RNA, 32 nt, Homo Sapiens
gucuucaggaggaagagaugcccaugaagcag

SEQ ID NO: 18724 - RNA, 32 nt, Homo Sapiens
ucuguuguccuguguggugugucuacugugag

SEQ ID NO: 18725 - RNA, 32 nt, Homo Sapiens
cauggcucaccaaaaugugcucaauacuguga

SEQ ID NO: 18726 - RNA, 30 nt, Homo Sapiens
cucuguggcugcggcugggaaaccgcgcgg

SEQ ID NO: 18727 - RNA, 32 nt, Homo Sapiens
ucugccaaacauuaaaauuagcacuaauuuuu

SEQ ID NO: 18728 - RNA, 32 nt, Homo Sapiens
uuaugagaugaaacuuuuauaugacguguaua

SEQ ID NO: 18729 - RNA, 32 nt, Homo Sapiens
gauggggauggggucauaggucugcacagagc

SEQ ID NO: 18730 - RNA, 32 nt, Homo Sapiens
cucccccugcccgagcuccccccgucccagug

SEQ ID NO: 18731 - RNA, 32 nt, Homo Sapiens
ucaaacccagaauaguuuggggccugguaaac

SEQ ID NO: 18732 - RNA, 32 nt, Homo Sapiens
auauucuggucugcaccguaccagcgcaugag

SEQ ID NO: 18733 - RNA, 32 nt, Homo Sapiens
cgcugcugugaguuggggauaugauagucagc

SEQ ID NO: 18734 - RNA, 32 nt, Homo Sapiens
caagaugaaauuuaaagucaaccggagaaccc

SEQ ID NO: 18735 - RNA, 32 nt, Homo Sapiens
cacgugcacacauguacacacacacaccuacc

SEQ ID NO: 18736 - RNA, 32 nt, Homo Sapiens
uugugguacuuuggguuuuuaaacacuuuggg

SEQ ID NO: 18737 - RNA, 32 nt, Homo Sapiens
ccaguguggcccggaggaacggagcccgugcc

SEQ ID NO: 18738 - RNA, 32 nt, Homo Sapiens
ugggccggguccggggacagcgggcgaggggc

SEQ ID NO: 18739 - RNA, 32 nt, Homo Sapiens
accaccuaaggaucaaggcagcuccuguuuuc

SEQ ID NO: 18740 - RNA, 32 nt, Homo Sapiens
aucuccggcacaggguccccccugagucugag

SEQ ID NO: 18741 - RNA, 32 nt, Homo Sapiens
caguggcagaucugguggccuuggaguggcug

SEQ ID NO: 18742 - RNA, 32 nt, Homo Sapiens
gagagcagugauuguagacagacugucacuga

SEQ ID NO: 18743 - RNA, 32 nt, Homo Sapiens
ugacccucucuuugcacaauagauaaaagucu

SEQ ID NO: 18744 - RNA, 30 nt, Homo Sapiens
gauaaagccugaggcggcggcagcggcgga

SEQ ID NO: 18745 - RNA, 32 nt, Homo Sapiens
cagguuucugugccuuuauuucccucuucuga

SEQ ID NO: 18746 - RNA, 32 nt, Homo Sapiens
accuccgccucccggguucaugugauucuccu

SEQ ID NO: 18747 - RNA, 32 nt, Homo Sapiens
ugccgacccagagggacagcagcaccaugucc

SEQ ID NO: 18748 - RNA, 32 nt, Homo Sapiens
agagcaggaguaccuuucuccacaugaccacc

SEQ ID NO: 18749 - RNA, 32 nt, Homo Sapiens
guuuguuuaaacccaagugcugcacaaaagca

SEQ ID NO: 18750 - RNA, 32 nt, Homo Sapiens
acagagccuggggccuggacgccacggccucu

SEQ ID NO: 18751 - RNA, 32 nt, Homo Sapiens
cagugcccaaaacaggcagagcagccacacca

SEQ ID NO: 18752 - RNA, 32 nt, Homo Sapiens
aagcuuuccuuccuuagcaaaauugcauucaa

SEQ ID NO: 18753 - RNA, 32 nt, Homo Sapiens
uuacgacgugaucuaaaccaguccuuagcaag

SEQ ID NO: 18754 - RNA, 32 nt, Homo Sapiens
gaaaaggacaccuuuuaacucaccucucaagg

SEQ ID NO: 18755 - RNA, 32 nt, Homo Sapiens
gggacaaagaaauaaacuuuuggacaggacca

SEQ ID NO: 18756 - RNA, 32 nt, Homo Sapiens
gcuccaggcaaggcccuaugcuacacaguccc

SEQ ID NO: 18757 - RNA, 32 nt, Homo Sapiens
acagcuguucccacccaccaguuccucuaagc

SEQ ID NO: 18758 - RNA, 32 nt, Homo Sapiens
agcugugugcuuugcuccugcaucuuguugag

SEQ ID NO: 18759 - RNA, 32 nt, Homo Sapiens
cagaagaauuccucuaguuucauuucagacgc

SEQ ID NO: 18760 - RNA, 32 nt, Homo Sapiens
gccuggcucccucuccauugaguuuuccugcc

SEQ ID NO: 18761 - RNA, 32 nt, Homo Sapiens
uaauagucaaaauaaucuuugcaguuugugag

SEQ ID NO: 18762 - RNA, 32 nt, Homo Sapiens
ucacucgguuggaaucuugucucagagcaucc

SEQ ID NO: 18763 - RNA, 32 nt, Homo Sapiens
gggguuuuaucuccaguaugaauugucuuaua

SEQ ID NO: 18764 - RNA, 32 nt, Homo Sapiens
uaauugcauacuuuuauuggggguacaaacug

SEQ ID NO: 18765 - RNA, 32 nt, Homo Sapiens
ccaugucccgcaccaccauugccgccagcaau

SEQ ID NO: 18766 - RNA, 32 nt, Homo Sapiens
uaugucuguauauaaaucugugcagccacuag

SEQ ID NO: 18767 - RNA, 31 nt, Homo Sapiens
uguuuucauuugaaguuuugccauuuguguu

SEQ ID NO: 18768 - RNA, 32 nt, Homo Sapiens
agaaaagaucuugguuuuuccaaacuggacca

SEQ ID NO: 18769 - RNA, 32 nt, Homo Sapiens
aaaauuguucuuccuuggagugucuuggcuau

SEQ ID NO: 18770 - RNA, 32 nt, Homo Sapiens
agcgucuccgggccggccgcgcccugguccgc

SEQ ID NO: 18771 - RNA, 32 nt, Homo Sapiens
caggagccugcgcggcucgccuggaaacgugc

SEQ ID NO: 18772 - RNA, 32 nt, Homo Sapiens
aaaaacucagaacaucuaaagaucugaaagau

SEQ ID NO: 18773 - RNA, 32 nt, Homo Sapiens
gcucguuggagcuaucguuuccguggaaauuu

SEQ ID NO: 18774 - RNA, 30 nt, Homo Sapiens
gauuauucaaggaaaaaaaaaaaaaaaaaa

SEQ ID NO: 18775 - RNA, 30 nt, Homo Sapiens
ugcaggcccugcuugugguggcgcuccaca

SEQ ID NO: 18776 - RNA, 32 nt, Homo Sapiens
ccuguaacggauuuccucuacucccccuuccg

SEQ ID NO: 18777 - RNA, 32 nt, Homo Sapiens
agcugagcaucucccgaguccugggcagggaa

SEQ ID NO: 18778 - RNA, 32 nt, Homo Sapiens
agaauugaaacacuuuuuuggggguaaaaaau

SEQ ID NO: 18779 - RNA, 32 nt, Homo Sapiens
gcagcucccaggaggcauggagggauccagaa

SEQ ID NO: 18780 - RNA, 32 nt, Homo Sapiens
uuuauuuuuugcuuucugcuuuauugaucuuu

SEQ ID NO: 18781 - RNA, 32 nt, Homo Sapiens
uuguuuaacaagguaacuuuuuguuuaaccua

SEQ ID NO: 18782 - RNA, 32 nt, Homo Sapiens
gggugauccuucccuuugccuguggcguaaaa

SEQ ID NO: 18783 - RNA, 32 nt, Homo Sapiens
ggcgaccuccagcgggcgcccggggccgggau

SEQ ID NO: 18784 - RNA, 32 nt, Homo Sapiens
ccucguccaacagagucguggugcuggaugcu

SEQ ID NO: 18785 - RNA, 32 nt, Homo Sapiens
ccuggggccccggcccucacucuccuauagag

SEQ ID NO: 18786 - RNA, 32 nt, Homo Sapiens
cugaaggugcuggagaugccaagugagugugu

SEQ ID NO: 18787 - RNA, 32 nt, Homo Sapiens
uaaaaauguacaaagcauaauuagcuguggac

SEQ ID NO: 18788 - RNA, 32 nt, Homo Sapiens
ucucuccuguacauagugggcaguggugugug

SEQ ID NO: 18789 - RNA, 32 nt, Homo Sapiens
guacuaggagucauaauacuuuauaaucaauu

SEQ ID NO: 18790 - RNA, 32 nt, Homo Sapiens
ugaguauguacaaauguuauuuccuguaaaau

SEQ ID NO: 18791 - RNA, 32 nt, Homo Sapiens
gaguccuggguggggcagcggcugcagggcgc

SEQ ID NO: 18792 - RNA, 32 nt, Homo Sapiens
ugaucgccgagcgcgccgcguagaccuccgcu

SEQ ID NO: 18793 - RNA, 32 nt, Homo Sapiens
gcuuccccacccagcacagcagcagaggggcc

SEQ ID NO: 18794 - RNA, 32 nt, Homo Sapiens
cugcugcccaugguggccuuucuggggguggg

SEQ ID NO: 18795 - RNA, 32 nt, Homo Sapiens
uuucucccaggcagggcucugcagguccauau

SEQ ID NO: 18796 - RNA, 32 nt, Homo Sapiens
guuuugagccugacacccaaggcuggauguuu

SEQ ID NO: 18797 - RNA, 32 nt, Homo Sapiens
uaaaugaaucaucaaagcucacaccaaauuuu

SEQ ID NO: 18798 - RNA, 32 nt, Homo Sapiens
ucaagauuguagcaucucaguacucuagagcc

SEQ ID NO: 18799 - RNA, 32 nt, Homo Sapiens
aaagcaaaagauacggaucaaaaaagaaaaga

SEQ ID NO: 18800 - RNA, 32 nt, Homo Sapiens
auuuuuaucuucugucacuacuacuuaaaacu

SEQ ID NO: 18801 - RNA, 32 nt, Homo Sapiens
gaaagaccaaugacugcuucucagagacuccc

SEQ ID NO: 18802 - RNA, 32 nt, Homo Sapiens
guagacucgccuagaggggacgcacugugucc

SEQ ID NO: 18803 - RNA, 32 nt, Homo Sapiens
cauaacaaaaauacuacuaauauaacuacugu

SEQ ID NO: 18804 - RNA, 32 nt, Homo Sapiens
uguauguguaauauuuuuuucuuagugauuuu

SEQ ID NO: 18805 - RNA, 32 nt, Homo Sapiens
ccuguugccgugguuaguaaggcuuucuuagg

SEQ ID NO: 18806 - RNA, 29 nt, Homo Sapiens
cuuuauugagguuuauauuacacauucua

SEQ ID NO: 18807 - RNA, 32 nt, Homo Sapiens
ggacggccuccucuccuacuuugggacgccca

SEQ ID NO: 18808 - RNA, 32 nt, Homo Sapiens
cccggcccccacagcccucuggggagccucac

SEQ ID NO: 18809 - RNA, 32 nt, Homo Sapiens
aguggaucugcggugaagccaagccgcaaggu

SEQ ID NO: 18810 - RNA, 32 nt, Homo Sapiens
gaugucuugguguguguagacacacauugcag

SEQ ID NO: 18811 - RNA, 32 nt, Homo Sapiens
cuccagccgcgugcaggugugcagcauugagg

SEQ ID NO: 18812 - RNA, 32 nt, Homo Sapiens
aguauuuaaugagaaugaggguuuacuccugg

SEQ ID NO: 18813 - RNA, 32 nt, Homo Sapiens
uuaaaaauguuuuuuauuuucaccuuagauau

SEQ ID NO: 18814 - RNA, 32 nt, Homo Sapiens
agaaccauuauugaguuugcaagauaagaugu

SEQ ID NO: 18815 - RNA, 32 nt, Homo Sapiens
caggagguaauuuguugauauuacaauuuuua

SEQ ID NO: 18816 - RNA, 32 nt, Homo Sapiens
aguaauucugggucuuccgagcagcaggaccc

SEQ ID NO: 18817 - RNA, 32 nt, Homo Sapiens
gaagugcuuguaaaguucugugcuacgagauu

SEQ ID NO: 18818 - RNA, 32 nt, Homo Sapiens
uguccaguuuuccacagaaaaauuaugagaca

SEQ ID NO: 18819 - RNA, 32 nt, Homo Sapiens
gccugcucccagcccacucauccuuaugugcu

SEQ ID NO: 18820 - RNA, 32 nt, Homo Sapiens
caagcaugaguuaggacaaacucuaaaaauuc

SEQ ID NO: 18821 - RNA, 32 nt, Homo Sapiens
acugcuggaagaagggugcaucagugaauuaa

SEQ ID NO: 18822 - RNA, 32 nt, Homo Sapiens
gcaggcuuugagaagcgcucagaggcccaggg

SEQ ID NO: 18823 - RNA, 32 nt, Homo Sapiens
uaauagucuuauaaaaaguaaucaguuaaaug

SEQ ID NO: 18824 - RNA, 32 nt, Homo Sapiens
auugcuaugguuacuggaaaaaguaugcagac

SEQ ID NO: 18825 - RNA, 32 nt, Homo Sapiens
ucacauuucuacagguuaccaccaaucucgac

SEQ ID NO: 18826 - RNA, 32 nt, Homo Sapiens
agacagacauugcccucagaagggcagggagg

SEQ ID NO: 18827 - RNA, 32 nt, Homo Sapiens
uggucagauuuauaauguuaaugacuuaauau

SEQ ID NO: 18828 - RNA, 32 nt, Homo Sapiens
ucucaguuucuuucucugcaaacaaguugcca

SEQ ID NO: 18829 - RNA, 32 nt, Homo Sapiens
gcagucuccgaguuucggaggggcuuggagug

SEQ ID NO: 18830 - RNA, 32 nt, Homo Sapiens
gaugcuggagaacuaugggaaccuggccucac

SEQ ID NO: 18831 - RNA, 32 nt, Homo Sapiens
uccucuuguucuaaucuugucaaccagugcaa

SEQ ID NO: 18832 - RNA, 32 nt, Homo Sapiens
cucgcuagucgccgccgccgcuccgccauggg

SEQ ID NO: 18833 - RNA, 32 nt, Homo Sapiens
ugaaaacuccucucguccuugucauuuuacuu

SEQ ID NO: 18834 - RNA, 32 nt, Homo Sapiens
aaucucagcucacugcaagcuccgccucccag

SEQ ID NO: 18835 - RNA, 32 nt, Homo Sapiens
uuucccuggugcccuucccuggaggucucucc

SEQ ID NO: 18836 - RNA, 32 nt, Homo Sapiens
ggccacagagcuaaagugacuuuucccaaggu

SEQ ID NO: 18837 - RNA, 32 nt, Homo Sapiens
gccaccaccccuccccuuggggagguggggag

SEQ ID NO: 18838 - RNA, 32 nt, Homo Sapiens
uuggggaggaggcauuucaggaugcugagguu

SEQ ID NO: 18839 - RNA, 32 nt, Homo Sapiens
gaaagcgccuguucaacuuuguccucucucag

SEQ ID NO: 18840 - RNA, 32 nt, Homo Sapiens
accuccccaccuccccgcaagcuggucccauc

SEQ ID NO: 18841 - RNA, 32 nt, Homo Sapiens
guaauuauuaaacauauugcuucuauucuugg

SEQ ID NO: 18842 - RNA, 30 nt, Homo Sapiens
gaccugcgcgcgcuuuuugucgauaaagau

SEQ ID NO: 18843 - RNA, 32 nt, Homo Sapiens
cagacuggagaguugaggcaucggaggcgcga

SEQ ID NO: 18844 - RNA, 32 nt, Homo Sapiens
ccagcucucggccgcggacccgggccgcgugu

SEQ ID NO: 18845 - RNA, 25 nt, Homo Sapiens
augacaggcugcuggggugguccca

SEQ ID NO: 18846 - RNA, 32 nt, Homo Sapiens
uaucaugcaauaaauuugcaaaacaucaucua

SEQ ID NO: 18847 - RNA, 32 nt, Homo Sapiens
uaguccugggagaggacagggacuucgcagag

SEQ ID NO: 18848 - RNA, 32 nt, Homo Sapiens
aaacaagccaaggaggauuucuuuuguucugu

SEQ ID NO: 18849 - RNA, 32 nt, Homo Sapiens
gacuaaaauauguucauauauuaugaugugga

SEQ ID NO: 18850 - RNA, 32 nt, Homo Sapiens
gaaaaugcaucuauuucagagcugacaugaag

SEQ ID NO: 18851 - RNA, 32 nt, Homo Sapiens
aagauauucaagaucucuuuauuggggauggg

SEQ ID NO: 18852 - RNA, 32 nt, Homo Sapiens
uuaacaguacuuuagacauuggcacuuuauuu

SEQ ID NO: 18853 - RNA, 32 nt, Homo Sapiens
gauccaugcuggguggggugagguggggugcu

SEQ ID NO: 18854 - RNA, 32 nt, Homo Sapiens
gggauugagccucggagguccaggcgucuuac

SEQ ID NO: 18855 - RNA, 32 nt, Homo Sapiens
gguauauugugugaugcugagguuuuggcuuc

SEQ ID NO: 18856 - RNA, 32 nt, Homo Sapiens
uccuagcuugauaagcacuuggagggggacuu

SEQ ID NO: 18857 - RNA, 32 nt, Homo Sapiens
cgcccccuuuccgggcagcaguggcucuuccg

SEQ ID NO: 18858 - RNA, 32 nt, Homo Sapiens
guugugucccuccgccucccccauggcgcaac

SEQ ID NO: 18859 - RNA, 32 nt, Homo Sapiens
cccucgggggagagggcgccggagaggaggcg

SEQ ID NO: 18860 - RNA, 32 nt, Homo Sapiens
guugcuuucuuugccugguccucaguuugccc

SEQ ID NO: 18861 - RNA, 32 nt, Homo Sapiens
uccgaccggccugaagcugccggcgccccggc

SEQ ID NO: 18862 - RNA, 32 nt, Homo Sapiens
uuugaacuucugcccucaccggacucugggcu

SEQ ID NO: 18863 - RNA, 32 nt, Homo Sapiens
ggugagucauuacucagcaucauggaguccac

SEQ ID NO: 18864 - RNA, 32 nt, Homo Sapiens
uucugcugccuucuccuccauuucucugcuca

SEQ ID NO: 18865 - RNA, 32 nt, Homo Sapiens
cagacaccgaagucuuuuuuuuuuucucuccg

SEQ ID NO: 18866 - RNA, 32 nt, Homo Sapiens
aaagaaacagucguuauaugcugauguuucuu

SEQ ID NO: 18867 - RNA, 32 nt, Homo Sapiens
uacucaggccaugcuuuuuuuauucauucugc

SEQ ID NO: 18868 - RNA, 32 nt, Homo Sapiens
aaguuugggucuaacguguccacaaagacugu

SEQ ID NO: 18869 - RNA, 32 nt, Homo Sapiens
gcggacaggccauggggacccgggccgggcca

SEQ ID NO: 18870 - RNA, 32 nt, Homo Sapiens
uguuggugguggugcugugcaggagagagcgc

SEQ ID NO: 18871 - RNA, 32 nt, Homo Sapiens
cgagccgggcuggcugcagagaaaccgcaggg

SEQ ID NO: 18872 - RNA, 32 nt, Homo Sapiens
auuuccauggcuucuuuucauuugagcucugg

SEQ ID NO: 18873 - RNA, 32 nt, Homo Sapiens
uccacagcagguggaguaauguuccauugugu

SEQ ID NO: 18874 - RNA, 32 nt, Homo Sapiens
gcuguucaugcuccaagacuuuaguuaccgag

SEQ ID NO: 18875 - RNA, 32 nt, Homo Sapiens
uggccaaccaacauggugaaaccccgucucuc

SEQ ID NO: 18876 - RNA, 32 nt, Homo Sapiens
acccuggcaucggcuuucugugccgccuccca

SEQ ID NO: 18877 - RNA, 31 nt, Homo Sapiens
gaguccucacggaagauguauuauucccauu

SEQ ID NO: 18878 - RNA, 32 nt, Homo Sapiens
ucgagggcccucgcagggacagcucugcccag

SEQ ID NO: 18879 - RNA, 32 nt, Homo Sapiens
acagucuggguggaauggggcugaaaccaugu

SEQ ID NO: 18880 - RNA, 32 nt, Homo Sapiens
gaaauucuauagaaaucuauauauuggguugu

SEQ ID NO: 18881 - RNA, 32 nt, Homo Sapiens
acuuaaaaacuugaaauucacuuuuugggggg

SEQ ID NO: 18882 - RNA, 32 nt, Homo Sapiens
cuaagauuugaaacacuuuaaauggcccaugg

SEQ ID NO: 18883 - RNA, 32 nt, Homo Sapiens
ggacugggccccagggauacugggcccucuuc

SEQ ID NO: 18884 - RNA, 32 nt, Homo Sapiens
auuugagaaccacaacucuaaagucaagauau

SEQ ID NO: 18885 - RNA, 32 nt, Homo Sapiens
ccccugcucagggcugccccugucaguugggu

SEQ ID NO: 18886 - RNA, 32 nt, Homo Sapiens
acaaggugcagcgucgggacugagaggggaga

SEQ ID NO: 18887 - RNA, 32 nt, Homo Sapiens
uuuguaauugguuauuuauagucccuucccuu

SEQ ID NO: 18888 - RNA, 32 nt, Homo Sapiens
agcagagcgaagcuacugcggguucuguuaac

SEQ ID NO: 18889 - RNA, 32 nt, Homo Sapiens
ugucugacuuugggggcaccauggaccaaagu

SEQ ID NO: 18890 - RNA, 32 nt, Homo Sapiens
aggaagagggucaggguggagaggaagaucag

SEQ ID NO: 18891 - RNA, 32 nt, Homo Sapiens
ucaacuaucaagcaagcguggugucgaccuua

SEQ ID NO: 18892 - RNA, 32 nt, Homo Sapiens
gcuguuuaaucuuugaagcauuuugggcuuaa

SEQ ID NO: 18893 - RNA, 32 nt, Homo Sapiens
gacauuuguuaaaaauaaacucugcacuuauu

SEQ ID NO: 18894 - RNA, 32 nt, Homo Sapiens
cgcgcggcuucccccgcuccccggugcugagg

SEQ ID NO: 18895 - RNA, 32 nt, Homo Sapiens
gaguagugacgcgggcgcggggguccgggagu

SEQ ID NO: 18896 - RNA, 32 nt, Homo Sapiens
ucagccacaugccccaggcucucgcugcccug

SEQ ID NO: 18897 - RNA, 32 nt, Homo Sapiens
agcagccggcgcggccgccagcgcgguguagg

SEQ ID NO: 18898 - RNA, 32 nt, Homo Sapiens
auugaucuuuggacuuagcaaagcagagauua

SEQ ID NO: 18899 - RNA, 32 nt, Homo Sapiens
augaagucaggaguucgagaccagccugacca

SEQ ID NO: 18900 - RNA, 32 nt, Homo Sapiens
augaggucaggaguucgagaccagccuggcca

SEQ ID NO: 18901 - RNA, 32 nt, Homo Sapiens
cugaggucaggaguucgagaccagacuggcca

SEQ ID NO: 18902 - RNA, 32 nt, Homo Sapiens
acccagggauuaaugcugccacaggggggcaa

SEQ ID NO: 18903 - RNA, 31 nt, Homo Sapiens
agauuacaagaggcuuugauuuuuaauucug

SEQ ID NO: 18904 - RNA, 32 nt, Homo Sapiens
ucauauguugauaacaguacugaagaugcaua

SEQ ID NO: 18905 - RNA, 32 nt, Homo Sapiens
uuccuugaagcaaaagaguaacacggcccagc

SEQ ID NO: 18906 - RNA, 32 nt, Homo Sapiens
aauugugggauuaugagauuaauccuuaaacu

SEQ ID NO: 18907 - RNA, 32 nt, Homo Sapiens
gugauguaaguagauagcaaaauacuggauuu

SEQ ID NO: 18908 - RNA, 32 nt, Homo Sapiens
augguauuaucuaguaggucugcacacauaac

SEQ ID NO: 18909 - RNA, 32 nt, Homo Sapiens
agauuuguaaaaaauacauauuugaaguauuc

SEQ ID NO: 18910 - RNA, 32 nt, Homo Sapiens
accgcugcgaucgcggaggcggcggccaggcc

SEQ ID NO: 18911 - RNA, 32 nt, Homo Sapiens
acucuugugguaccuagucagaugguagacga

SEQ ID NO: 18912 - RNA, 32 nt, Homo Sapiens
uugucucagggugcaacgucuuucuuuucuga

SEQ ID NO: 18913 - RNA, 32 nt, Homo Sapiens
cuucaagauuugaugcuaauucuuuuggauuu

SEQ ID NO: 18914 - RNA, 32 nt, Homo Sapiens
uccuuucccuucccuagccagggcucagguac

SEQ ID NO: 18915 - RNA, 32 nt, Homo Sapiens
uuguacuacagugaggaauuuccuccuguagu

SEQ ID NO: 18916 - RNA, 32 nt, Homo Sapiens
aguagcuucagcgguuuuucacgcucagaaau

SEQ ID NO: 18917 - RNA, 32 nt, Homo Sapiens
uuuauccaaaagacagacaaucacaauugcuc

SEQ ID NO: 18918 - RNA, 32 nt, Homo Sapiens
agcgggccagggggcgggaguggucuggcugc

SEQ ID NO: 18919 - RNA, 32 nt, Homo Sapiens
agcagcacggccugggcggcgguggacugcgc

SEQ ID NO: 18920 - RNA, 32 nt, Homo Sapiens
uccagguuggcaggggacccucuucucccguc

SEQ ID NO: 18921 - RNA, 32 nt, Homo Sapiens
uagagaaagggagugacccaaggggccgcgag

SEQ ID NO: 18922 - RNA, 32 nt, Homo Sapiens
ccuucuuuguuugauggagcugugauuggcac

SEQ ID NO: 18923 - RNA, 32 nt, Homo Sapiens
aacccucaauaacuguuuuuuauuuggucuua

SEQ ID NO: 18924 - RNA, 32 nt, Homo Sapiens
uccaacaaacuccagcagaccugcagcagagg

SEQ ID NO: 18925 - RNA, 32 nt, Homo Sapiens
uuccacuguggaaauaaauguuuguaaauaag

SEQ ID NO: 18926 - RNA, 32 nt, Homo Sapiens
ggacaaggcuggaaggcccauuuggcuccugc

SEQ ID NO: 18927 - RNA, 32 nt, Homo Sapiens
augcucccuuccuccccagcuccugguuggac

SEQ ID NO: 18928 - RNA, 32 nt, Homo Sapiens
ggcgcagcacaccggcccaggugccggagaug

SEQ ID NO: 18929 - RNA, 32 nt, Homo Sapiens
acugucggccuugcaaggccaccuggaggccu

SEQ ID NO: 18930 - RNA, 32 nt, Homo Sapiens
gguaccugccccccuucacacagcaccucuca

SEQ ID NO: 18931 - RNA, 32 nt, Homo Sapiens
uauaaagcugaauuguuaaucuauucaguaag

SEQ ID NO: 18932 - RNA, 32 nt, Homo Sapiens
gcgagaagagcgccauggggguguggcaccac

SEQ ID NO: 18933 - RNA, 32 nt, Homo Sapiens
ccucaagccuccaggaucccaccuacuguacu

SEQ ID NO: 18934 - RNA, 32 nt, Homo Sapiens
caccccaaccucagcugauuguaguacaccug

SEQ ID NO: 18935 - RNA, 32 nt, Homo Sapiens
aaccuagucaaggggauucuccugcucuuaac

SEQ ID NO: 18936 - RNA, 32 nt, Homo Sapiens
gcuagauagcacccaaggauggcugcuaucaa

SEQ ID NO: 18937 - RNA, 32 nt, Homo Sapiens
ccuccgcccacuuuucccacaacgccuucccg

SEQ ID NO: 18938 - RNA, 32 nt, Homo Sapiens
ggggagaugaagagcuaggccuuucagaaagu

SEQ ID NO: 18939 - RNA, 32 nt, Homo Sapiens
aauguuaauguuuucguucucauuuaugccuu

SEQ ID NO: 18940 - RNA, 32 nt, Homo Sapiens
gcgcaaggcagacggucuccagccacgauacc

SEQ ID NO: 18941 - RNA, 32 nt, Homo Sapiens
gagaggcaccccgaguggaggcggccacacca

SEQ ID NO: 18942 - RNA, 32 nt, Homo Sapiens
cuugccaugaaguaugguggugucuagcacug

SEQ ID NO: 18943 - RNA, 32 nt, Homo Sapiens
ggggugaggguggggguggggguccuuaaaca

SEQ ID NO: 18944 - RNA, 32 nt, Homo Sapiens
cacacgcccucccugucucucgccuucgcuuc

SEQ ID NO: 18945 - RNA, 32 nt, Homo Sapiens
agguauccuuacaauuccaugauguucuuaga

SEQ ID NO: 18946 - RNA, 32 nt, Homo Sapiens
gucaaauucugaucaacuggaacuugaguuuc

SEQ ID NO: 18947 - RNA, 32 nt, Homo Sapiens
agcugcuguugcugccacuuggauggggaccu

SEQ ID NO: 18948 - RNA, 32 nt, Homo Sapiens
auauaggccguggagggaagggggcgggcaga

SEQ ID NO: 18949 - RNA, 32 nt, Homo Sapiens
aucucucuaaucuuugcccaucaccuccuguu

SEQ ID NO: 18950 - RNA, 31 nt, Homo Sapiens
ucguuaauguucggggccgccgggcgccaac

SEQ ID NO: 18951 - RNA, 32 nt, Homo Sapiens
cacucccgggggugggggguuaccccuuccca

SEQ ID NO: 18952 - RNA, 32 nt, Homo Sapiens
gcuggcgcgggaaggggagaaaggggcugcca

SEQ ID NO: 18953 - RNA, 32 nt, Homo Sapiens
gaggaaguggcugauuacugagcgguucuucc

SEQ ID NO: 18954 - RNA, 32 nt, Homo Sapiens
aaugaacuuuauuugcagcuauucuggauguc

SEQ ID NO: 18955 - RNA, 32 nt, Homo Sapiens
gugguuuuucuuuucuuggacacuuaauucug

SEQ ID NO: 18956 - RNA, 32 nt, Homo Sapiens
uaacagauuagcugagauauuaacuuacucac

SEQ ID NO: 18957 - RNA, 32 nt, Homo Sapiens
uggagacuuccacauucucaguuuauucacau

SEQ ID NO: 18958 - RNA, 32 nt, Homo Sapiens
aacacuguguucuggauaaaaaugugauuagg

SEQ ID NO: 18959 - RNA, 32 nt, Homo Sapiens
uuuuuuccuuuguuccaaauaaaagauuaaac

SEQ ID NO: 18960 - RNA, 32 nt, Homo Sapiens
gacgcggcggcagcggacucggagcccucggc

SEQ ID NO: 18961 - RNA, 32 nt, Homo Sapiens
aaucucuuccuuuaguuuuucugagguagugc

SEQ ID NO: 18962 - RNA, 32 nt, Homo Sapiens
acaggccugcuugaaaaccaacucagcguggg

SEQ ID NO: 18963 - RNA, 32 nt, Homo Sapiens
uccgguggggccaugaggaagaagaggagcug

SEQ ID NO: 18964 - RNA, 32 nt, Homo Sapiens
gagacauacaggugggggugguggcagauacc

SEQ ID NO: 18965 - RNA, 32 nt, Homo Sapiens
auacacuguuuccuggccccagagcucauuug

SEQ ID NO: 18966 - RNA, 31 nt, Homo Sapiens
aaggaguagcaaaagacaguauaucagcuaa

SEQ ID NO: 18967 - RNA, 32 nt, Homo Sapiens
cgcggucggccgcguccaggacugggggcaca

SEQ ID NO: 18968 - RNA, 32 nt, Homo Sapiens
ccagcugagugagaacaugaacuuuuugcacc

SEQ ID NO: 18969 - RNA, 32 nt, Homo Sapiens
agagcaaggcccggcuccacacggcagcuuug

SEQ ID NO: 18970 - RNA, 32 nt, Homo Sapiens
cuggcucucucgccgcggagccgccaagaugg

SEQ ID NO: 18971 - RNA, 32 nt, Homo Sapiens
cagaguggccccagguucuucaucugggccuc

SEQ ID NO: 18972 - RNA, 31 nt, Homo Sapiens
cccggggucugcagagcgccccgcgccgccu

SEQ ID NO: 18973 - RNA, 28 nt, Homo Sapiens
ugggaggggcggcaggccgcggguccug

SEQ ID NO: 18974 - RNA, 32 nt, Homo Sapiens
cagagcugccccagcagacgcuccgccccacc

SEQ ID NO: 18975 - RNA, 32 nt, Homo Sapiens
gugagagaacagauuucugcuguuuaaagcca

SEQ ID NO: 18976 - RNA, 32 nt, Homo Sapiens
caaaguuucugggaaacuauguucaagguuga

SEQ ID NO: 18977 - RNA, 32 nt, Homo Sapiens
caacuuuaauaguauacauuuaaaagaaaaaa

SEQ ID NO: 18978 - RNA, 32 nt, Homo Sapiens
uuucuguuauuuauagauguuuccuuaauguu

SEQ ID NO: 18979 - RNA, 32 nt, Homo Sapiens
uccaaaaauuuaaaacagaauaauaauggcua

SEQ ID NO: 18980 - RNA, 32 nt, Homo Sapiens
gcaggagcggcuggaccagggcggcgggucgc

SEQ ID NO: 18981 - RNA, 32 nt, Homo Sapiens
cucuuuguuuggccuagaauguuuauaaagug

SEQ ID NO: 18982 - RNA, 32 nt, Homo Sapiens
uguuauuuaauagcugugaucagugauuuuca

SEQ ID NO: 18983 - RNA, 32 nt, Homo Sapiens
cuuuccuggugccuucuuucuauuuuguuuua

SEQ ID NO: 18984 - RNA, 32 nt, Homo Sapiens
cggcugcgacuggauccgcugcaccgucugcc

SEQ ID NO: 18985 - RNA, 31 nt, Homo Sapiens
cacagaaaccaccagaaccagaugcuggaag

SEQ ID NO: 18986 - RNA, 32 nt, Homo Sapiens
ugugucuucagcuggcagcauuuauuuuaaau

SEQ ID NO: 18987 - RNA, 32 nt, Homo Sapiens
caagaccgcagucccacccuggccauugugga

SEQ ID NO: 18988 - RNA, 32 nt, Homo Sapiens
aaaguguugcuucagguguggaugccagccac

SEQ ID NO: 18989 - RNA, 32 nt, Homo Sapiens
gcaccaagcucaaagcguggacaggugugccg

SEQ ID NO: 18990 - RNA, 32 nt, Homo Sapiens
agcccugggguuugaagcugacuuuauagcug

SEQ ID NO: 18991 - RNA, 31 nt, Homo Sapiens
ucccagcugggccccauuccuggauuuaaga

SEQ ID NO: 18992 - RNA, 32 nt, Homo Sapiens
uuuucuuauuuuuuaauguaugggagaaaaau

SEQ ID NO: 18993 - RNA, 32 nt, Homo Sapiens
gccgucccagaaacaacccccauccaucccug

SEQ ID NO: 18994 - RNA, 32 nt, Homo Sapiens
ccuugaauccuggccuggaauuugggcagaua

SEQ ID NO: 18995 - RNA, 32 nt, Homo Sapiens
cugugaauggccggugauguaugucaggaggc

SEQ ID NO: 18996 - RNA, 32 nt, Homo Sapiens
ggacacuguacaggcccucccuccccuuggcc

SEQ ID NO: 18997 - RNA, 32 nt, Homo Sapiens
gauaucaagaaaccagacugugaugacuggga

SEQ ID NO: 18998 - RNA, 32 nt, Homo Sapiens
gcucauaauguuuaacauaacaacauuuauuu

SEQ ID NO: 18999 - RNA, 32 nt, Homo Sapiens
gggucgagagcgcccucauggugcuggugcug

SEQ ID NO: 19000 - RNA, 32 nt, Homo Sapiens
ccguucugcucucgggggcaccuuccgggguu

SEQ ID NO: 19001 - RNA, 32 nt, Homo Sapiens
uuucaagaggccacuaggcauucuucacugag

SEQ ID NO: 19002 - RNA, 32 nt, Homo Sapiens
cucccgugccccggcguccuccgcccgcucau

SEQ ID NO: 19003 - RNA, 27 nt, Homo Sapiens
aggccucccuucuucuccacccugcuc

SEQ ID NO: 19004 - RNA, 30 nt, Homo Sapiens
gaauggugagguggcaugggagaugucugu

SEQ ID NO: 19005 - RNA, 32 nt, Homo Sapiens
aaguacuguuuuuuuuaaccgacugaaaucac

SEQ ID NO: 19006 - RNA, 32 nt, Homo Sapiens
ccccgggcacugcacagccugucugggggcca

SEQ ID NO: 19007 - RNA, 32 nt, Homo Sapiens
ugggggaacuucugccuuccugguuuccuuga

SEQ ID NO: 19008 - RNA, 32 nt, Homo Sapiens
gccuccgcaggucgcugaucagggccaggcgg

SEQ ID NO: 19009 - RNA, 32 nt, Homo Sapiens
aguauaauguauaaauuaagcauagcaagaga

SEQ ID NO: 19010 - RNA, 32 nt, Homo Sapiens
cgaaggagaaaguggaaggaggggagcuucuc

SEQ ID NO: 19011 - RNA, 32 nt, Homo Sapiens
agacucaccuaauaaaaucaacauucauugua

SEQ ID NO: 19012 - RNA, 32 nt, Homo Sapiens
guccucggccccacgugaaccaggcucggcgg

SEQ ID NO: 19013 - RNA, 28 nt, Homo Sapiens
ugccacccaguggccaggaugacaaggc

SEQ ID NO: 19014 - RNA, 32 nt, Homo Sapiens
uaaacuaugacagcuuuuuuuucucuuuccau

SEQ ID NO: 19015 - RNA, 32 nt, Homo Sapiens
cacauuuauguaagaaaugaaacuauaaaaug

SEQ ID NO: 19016 - RNA, 32 nt, Homo Sapiens
cccaguccggugccuuccacccugcccuggcc

SEQ ID NO: 19017 - RNA, 32 nt, Homo Sapiens
cuccucguucccucccagccuccauggccgcc

SEQ ID NO: 19018 - RNA, 32 nt, Homo Sapiens
gaccaguagagguguggaggccaggcagagag

SEQ ID NO: 19019 - RNA, 32 nt, Homo Sapiens
gccuccugacuucaagcaauucuccugccuca

SEQ ID NO: 19020 - RNA, 32 nt, Homo Sapiens
guuuuacggcaacaaaauuuauugcauuuaaa

SEQ ID NO: 19021 - RNA, 32 nt, Homo Sapiens
gguauuuucaacaaaggacucuccaggaugga

SEQ ID NO: 19022 - RNA, 32 nt, Homo Sapiens
uauggauuugaaaaacagaaaauauacuuuau

SEQ ID NO: 19023 - RNA, 27 nt, Homo Sapiens
uucugagcuuucuucagcccauauucu

SEQ ID NO: 19024 - RNA, 32 nt, Homo Sapiens
gccuuggccagaagccuggagcuuugguuuga

SEQ ID NO: 19025 - RNA, 32 nt, Homo Sapiens
aauugcccaagcccuuggcuccccccggccuc

SEQ ID NO: 19026 - RNA, 32 nt, Homo Sapiens
auuuguaauuuuaguauuaacucuguaaaagu

SEQ ID NO: 19027 - RNA, 32 nt, Homo Sapiens
gagcaaugcagcacucuaggaagccugcuagg

SEQ ID NO: 19028 - RNA, 32 nt, Homo Sapiens
augccagaauagcuccguugucuguuagcuga

SEQ ID NO: 19029 - RNA, 32 nt, Homo Sapiens
augaaggcucugcagcccccgccgcccgauuu

SEQ ID NO: 19030 - RNA, 32 nt, Homo Sapiens
uuccccuacuguuaaccuuguuugucacacgg

SEQ ID NO: 19031 - RNA, 32 nt, Homo Sapiens
auccuuccaccuauuuuccccaucuucaugca

SEQ ID NO: 19032 - RNA, 32 nt, Homo Sapiens
ugauguaaacugagaauaauggcauuuuaggg

SEQ ID NO: 19033 - RNA, 32 nt, Homo Sapiens
augugaauuaaaauaaauauuuuuucauguga

SEQ ID NO: 19034 - RNA, 32 nt, Homo Sapiens
auuucaagaauaaaguacuaagauugugcuca

SEQ ID NO: 19035 - RNA, 32 nt, Homo Sapiens
acauagggauaguggaaugaguuuuaauagau

SEQ ID NO: 19036 - RNA, 32 nt, Homo Sapiens
aguaccauugcuugugucccaccuggaccagu

SEQ ID NO: 19037 - RNA, 32 nt, Homo Sapiens
cuagucgcucagcauccacuuugugucuccaa

SEQ ID NO: 19038 - RNA, 30 nt, Homo Sapiens
ucuucuuuuuggguuggggaaacgcagugg

SEQ ID NO: 19039 - RNA, 32 nt, Homo Sapiens
uaauuuuuacuuuaucucucacacguauuuua

SEQ ID NO: 19040 - RNA, 32 nt, Homo Sapiens
agugggagcugcugcaggcuccgcggcggcgg

SEQ ID NO: 19041 - RNA, 32 nt, Homo Sapiens
ucuacccaguuuucaauaaaccuuccaggcug

SEQ ID NO: 19042 - RNA, 32 nt, Homo Sapiens
acgggcaucauucguuaguggaacugagugcc

SEQ ID NO: 19043 - RNA, 32 nt, Homo Sapiens
uucucucaccuaaaaaaagagaauuagauuau

SEQ ID NO: 19044 - RNA, 32 nt, Homo Sapiens
acaccuaccugccccaguacggcggcuauggg

SEQ ID NO: 19045 - RNA, 32 nt, Homo Sapiens
acgaaaaccugcauuuauuugcuggcgggacg

SEQ ID NO: 19046 - RNA, 32 nt, Homo Sapiens
ggaacuguuucuuuucuuuuucuaggaguguu

SEQ ID NO: 19047 - RNA, 32 nt, Homo Sapiens
aaaacacaggcugacaguauuccucuuuggcu

SEQ ID NO: 19048 - RNA, 32 nt, Homo Sapiens
cgggcucgcucccugcgccccggagcaggcca

SEQ ID NO: 19049 - RNA, 32 nt, Homo Sapiens
agguaaauauuuuucuuuauuaagcuucucac

SEQ ID NO: 19050 - RNA, 32 nt, Homo Sapiens
cuuggagaagggagcacagaccaggucuuuga

SEQ ID NO: 19051 - RNA, 32 nt, Homo Sapiens
cuguggcagcggggagugucugucugcugagc

SEQ ID NO: 19052 - RNA, 32 nt, Homo Sapiens
accaggauauuguuggccauguggcaucauug

SEQ ID NO: 19053 - RNA, 32 nt, Homo Sapiens
ggggcaggaugccugccaggguguucuggggg

SEQ ID NO: 19054 - RNA, 32 nt, Homo Sapiens
aaacuguuuacuucaacuuuuacuucagacaa

SEQ ID NO: 19055 - RNA, 32 nt, Homo Sapiens
gacagaugauggauucuucaccaccauuuucc

SEQ ID NO: 19056 - RNA, 32 nt, Homo Sapiens
uaaagguuaugaaacauaucaugguaaugaca

SEQ ID NO: 19057 - RNA, 32 nt, Homo Sapiens
ccucgcgcccuugccgcccaccugcucaccca

SEQ ID NO: 19058 - RNA, 32 nt, Homo Sapiens
ucuggugagcagccucaccuguccuuuuccag

SEQ ID NO: 19059 - RNA, 32 nt, Homo Sapiens
aaaaaccaccaccagcagcucacauuucacgu

SEQ ID NO: 19060 - RNA, 32 nt, Homo Sapiens
ccugcccuccuucaccagccaagcccagccug

SEQ ID NO: 19061 - RNA, 32 nt, Homo Sapiens
aagcccaccaaaaccaaggcggccacgagagu

SEQ ID NO: 19062 - RNA, 32 nt, Homo Sapiens
cggcgaccuccagggcugggaagucaaccgag

SEQ ID NO: 19063 - RNA, 32 nt, Homo Sapiens
uguuuguguuuguuuuuuuuuaagggugagcc

SEQ ID NO: 19064 - RNA, 32 nt, Homo Sapiens
ucugccaagagacagagcuguccugagaaugc

SEQ ID NO: 19065 - RNA, 32 nt, Homo Sapiens
ggugccuccagauggcagguuugcaauccaag

SEQ ID NO: 19066 - RNA, 32 nt, Homo Sapiens
cuaaggcagaaauacuaaaaauaucugguuca

SEQ ID NO: 19067 - RNA, 32 nt, Homo Sapiens
uuugcaaagaaugaacaaguuaaugaacaaac

SEQ ID NO: 19068 - RNA, 32 nt, Homo Sapiens
caacauguaaaaaacuuuuuggcagggcacag

SEQ ID NO: 19069 - RNA, 32 nt, Homo Sapiens
uuuuuguuuuuucuucuggggaggucuagaac

SEQ ID NO: 19070 - RNA, 32 nt, Homo Sapiens
uaaguaaacaaauacguacccauguguaaauc

SEQ ID NO: 19071 - RNA, 32 nt, Homo Sapiens
ggcugcgacaccccaaccccagcccucuaauc

SEQ ID NO: 19072 - RNA, 32 nt, Homo Sapiens
cgccugcagcggggcccuccugaggccccaga

SEQ ID NO: 19073 - RNA, 32 nt, Homo Sapiens
ggggagggggcuucgcagauccccgagaugcc

SEQ ID NO: 19074 - RNA, 32 nt, Homo Sapiens
ccgggcccugcaaccgccggcgcgcaccggcg

SEQ ID NO: 19075 - RNA, 32 nt, Homo Sapiens
ucacuguuaaagauguguucugaugucuuaua

SEQ ID NO: 19076 - RNA, 32 nt, Homo Sapiens
auuuauaguuuagguaguauguuacauuugaa

SEQ ID NO: 19077 - RNA, 32 nt, Homo Sapiens
uaugccucucuuggagcaaaugaugaagacau

SEQ ID NO: 19078 - RNA, 32 nt, Homo Sapiens
aaggcccuauuuaaguuuuucuucguuacuuu

SEQ ID NO: 19079 - RNA, 32 nt, Homo Sapiens
ccucgccuucccuccucucaccugcaggcuga

SEQ ID NO: 19080 - RNA, 32 nt, Homo Sapiens
uuuacccacaaggcccuguagugcugacugga

SEQ ID NO: 19081 - RNA, 32 nt, Homo Sapiens
accacugucuguaaacccaacaaaauucacug

SEQ ID NO: 19082 - RNA, 32 nt, Homo Sapiens
aaaaccagguguacgaugucaagauggauucu

SEQ ID NO: 19083 - RNA, 32 nt, Homo Sapiens
accaggaggagcuccugagagccucugccaca

SEQ ID NO: 19084 - RNA, 30 nt, Homo Sapiens
uaucuggaucugaaguggauaugcucagag

SEQ ID NO: 19085 - RNA, 32 nt, Homo Sapiens
ccuguguucuuugucucaucagcugccaccag

SEQ ID NO: 19086 - RNA, 32 nt, Homo Sapiens
agagguccgugcuacaucuucacaguuccucu

SEQ ID NO: 19087 - RNA, 32 nt, Homo Sapiens
ggccagcccccuccccugcuggaggaggggag

SEQ ID NO: 19088 - RNA, 32 nt, Homo Sapiens
uguuguguuucuuuuccaguguaguguuuuug

SEQ ID NO: 19089 - RNA, 32 nt, Homo Sapiens
gacccaguaugucuuguagacacguuaguuau

SEQ ID NO: 19090 - RNA, 32 nt, Homo Sapiens
uucuuuacucagaauaacuucuuaauaguuga

SEQ ID NO: 19091 - RNA, 32 nt, Homo Sapiens
uuggguccucuguccaggguggcaccgaccuc

SEQ ID NO: 19092 - RNA, 32 nt, Homo Sapiens
uacccucucaaauggacaauaccagaagugaa

SEQ ID NO: 19093 - RNA, 31 nt, Homo Sapiens
gagugguuggggagucgcccaagggcacauc

SEQ ID NO: 19094 - RNA, 32 nt, Homo Sapiens
gcgaauccgcccccggccgcgaggggccugcc

SEQ ID NO: 19095 - RNA, 32 nt, Homo Sapiens
guggaaggucagaggagaugggggccggcuuu

SEQ ID NO: 19096 - RNA, 32 nt, Homo Sapiens
ccccuagcuccuagaagcaaccacugauguga

SEQ ID NO: 19097 - RNA, 32 nt, Homo Sapiens
guugugaaagaauuuuucuacauccugaacua

SEQ ID NO: 19098 - RNA, 32 nt, Homo Sapiens
uaaacaaagauuaugagcucuacuuauuccgu

SEQ ID NO: 19099 - RNA, 32 nt, Homo Sapiens
uaguuccgauuuuuucccauuauuuuuauuuu

SEQ ID NO: 19100 - RNA, 29 nt, Homo Sapiens
aauuauauauguauauacuaaagauccag

SEQ ID NO: 19101 - RNA, 32 nt, Homo Sapiens
gagucgaggaagaccugggugggaacccggcu

SEQ ID NO: 19102 - RNA, 32 nt, Homo Sapiens
cuguccaucugugcauaaggagaggaaaguuc

SEQ ID NO: 19103 - RNA, 32 nt, Homo Sapiens
uuuucuuuuuucuggcgaaaccccgucucuac

SEQ ID NO: 19104 - RNA, 32 nt, Homo Sapiens
gggcagcguggccccucccuccccuuuuccug

SEQ ID NO: 19105 - RNA, 32 nt, Homo Sapiens
ggcuucugggcaggcucacgcagacgccggcc

SEQ ID NO: 19106 - RNA, 32 nt, Homo Sapiens
acugcagaccucuaaacauaaguaggaaaaag

SEQ ID NO: 19107 - RNA, 32 nt, Homo Sapiens
ggagcccaggacugguguuggcuuucuguuaa

SEQ ID NO: 19108 - RNA, 32 nt, Homo Sapiens
cagaaaccaucaucgucuuuguacaucguaug

SEQ ID NO: 19109 - RNA, 32 nt, Homo Sapiens
gagccgcgccgcgcgcagugucugcagugccg

SEQ ID NO: 19110 - RNA, 32 nt, Homo Sapiens
uccaccuucacaggccacuuugaaggguggau

SEQ ID NO: 19111 - RNA, 32 nt, Homo Sapiens
cgguuuccagcuugcagauuuguuaaguuucu

SEQ ID NO: 19112 - RNA, 32 nt, Homo Sapiens
ggugaggagugggacccgcucgcggccauugg

SEQ ID NO: 19113 - RNA, 32 nt, Homo Sapiens
gaacugcgcuggccgcagcuucuugggaacag

SEQ ID NO: 19114 - RNA, 32 nt, Homo Sapiens
uuuugauuuuuccuacuuuaagaaaauaaaau

SEQ ID NO: 19115 - RNA, 32 nt, Homo Sapiens
uuucauuugucaaaaugcuucuuuuguugcca

SEQ ID NO: 19116 - RNA, 32 nt, Homo Sapiens
acgcccccacugauauuguuuuuaaugcagcg

SEQ ID NO: 19117 - RNA, 32 nt, Homo Sapiens
agccauuccguccugcuccccagcucacucuc

SEQ ID NO: 19118 - RNA, 32 nt, Homo Sapiens
uugguccuugaaagauuggucguuauggauca

SEQ ID NO: 19119 - RNA, 32 nt, Homo Sapiens
cagccccccacuuccuuccagugcugugcucu

SEQ ID NO: 19120 - RNA, 32 nt, Homo Sapiens
cacccucuccgguuuggguugggauaacagag

SEQ ID NO: 19121 - RNA, 32 nt, Homo Sapiens
ccgcauuuugcugcauaugccuuuaaaaucaa

SEQ ID NO: 19122 - RNA, 32 nt, Homo Sapiens
accccauagcugaggagaagagucacagugga

SEQ ID NO: 19123 - RNA, 32 nt, Homo Sapiens
gccuccuguucccaucccccagcccuggcucc

SEQ ID NO: 19124 - RNA, 32 nt, Homo Sapiens
cuggguccccugguugugcgccaggcaagaug

SEQ ID NO: 19125 - RNA, 32 nt, Homo Sapiens
ugcacacccgcucuccggcccgcgccccuguu

SEQ ID NO: 19126 - RNA, 32 nt, Homo Sapiens
gcggcaagauuucgggcgccccugcccugaac

SEQ ID NO: 19127 - RNA, 32 nt, Homo Sapiens
ccuaccuuuccacagcaccugaugaacauguc

SEQ ID NO: 19128 - RNA, 32 nt, Homo Sapiens
cuucugcucucucagcaaccacuccucaugua

SEQ ID NO: 19129 - RNA, 32 nt, Homo Sapiens
agcauuacuguguugucucugugccagaugug

SEQ ID NO: 19130 - RNA, 32 nt, Homo Sapiens
acaggcagcugcugcccuccacuuccugcucu

SEQ ID NO: 19131 - RNA, 32 nt, Homo Sapiens
caauuugggaauuuauacuucaguaugguuuc

SEQ ID NO: 19132 - RNA, 32 nt, Homo Sapiens
ugacauauguggccccaucuugaaagauauuu

SEQ ID NO: 19133 - RNA, 32 nt, Homo Sapiens
ugugucccaagcaguacccaggcuuugcagac

SEQ ID NO: 19134 - RNA, 32 nt, Homo Sapiens
agagaucugaccuaacuaucuaucuugccucg

SEQ ID NO: 19135 - RNA, 32 nt, Homo Sapiens
gcacuugcuguagacuccugggugcuggagga

SEQ ID NO: 19136 - RNA, 32 nt, Homo Sapiens
ucccacgccgugccggcucucaggcgccggaa

SEQ ID NO: 19137 - RNA, 32 nt, Homo Sapiens
gccacccucgcuccccgccggcagccggcagc

SEQ ID NO: 19138 - RNA, 32 nt, Homo Sapiens
cccucccccucccacacugccccccauuugag

SEQ ID NO: 19139 - RNA, 32 nt, Homo Sapiens
cggcggccugagggacgcucccugccccaucc

SEQ ID NO: 19140 - RNA, 32 nt, Homo Sapiens
aauuuucaggcaaagcuuuaauuuauacuaag

SEQ ID NO: 19141 - RNA, 30 nt, Homo Sapiens
ggucaggauaaaaaccaaaucugggugcca

SEQ ID NO: 19142 - RNA, 32 nt, Homo Sapiens
agaacucaguguaagagaaggcacauacauag

SEQ ID NO: 19143 - RNA, 32 nt, Homo Sapiens
cauaauuuuuaaaaacuagucuuuugaguuug

SEQ ID NO: 19144 - RNA, 32 nt, Homo Sapiens
aauaugauagagaacuauaugcagauuuuaaa

SEQ ID NO: 19145 - RNA, 32 nt, Homo Sapiens
agauaaaaauccagugaaaacacaucaaucuc

SEQ ID NO: 19146 - RNA, 32 nt, Homo Sapiens
cacuggcugucuuucugccaguuucuuaaaga

SEQ ID NO: 19147 - RNA, 32 nt, Homo Sapiens
aagaguuaugaguugaagucuugaaugcagga

SEQ ID NO: 19148 - RNA, 32 nt, Homo Sapiens
uggaacagauaaaggucauuaagugaaaucua

SEQ ID NO: 19149 - RNA, 32 nt, Homo Sapiens
agccaugccgucugccggacccggaggccgag

SEQ ID NO: 19150 - RNA, 32 nt, Homo Sapiens
ugugccugcuucuguguaccacuucugugggc

SEQ ID NO: 19151 - RNA, 32 nt, Homo Sapiens
accagaagaggaagcuuggggugugcuguggg

SEQ ID NO: 19152 - RNA, 32 nt, Homo Sapiens
aauuuuucuuuuucuuuuuuuguccuuucaga

SEQ ID NO: 19153 - RNA, 32 nt, Homo Sapiens
uccaggagcagcaggagcauggccgaggaucu

SEQ ID NO: 19154 - RNA, 32 nt, Homo Sapiens
uagaaaauuuaaaacauuacucugaaauugua

SEQ ID NO: 19155 - RNA, 32 nt, Homo Sapiens
cccuaacaaaguagauggggucgggggcuaaa

SEQ ID NO: 19156 - RNA, 32 nt, Homo Sapiens
ucuaccaaaaauacaaaaauuagccagacgug

SEQ ID NO: 19157 - RNA, 32 nt, Homo Sapiens
caacgcguuucccccgcggacccccuuuccug

SEQ ID NO: 19158 - RNA, 32 nt, Homo Sapiens
cagaggucggcgcgcgcacacccgcaccgccc

SEQ ID NO: 19159 - RNA, 32 nt, Homo Sapiens
cacacacacagacagacacacacacacacaac

SEQ ID NO: 19160 - RNA, 32 nt, Homo Sapiens
aguuuagccaagggcuuuguuccuggcaugga

SEQ ID NO: 19161 - RNA, 32 nt, Homo Sapiens
ugcuucugccgcugccgccgccggaucccagu

SEQ ID NO: 19162 - RNA, 32 nt, Homo Sapiens
caccuccggcagggcugcuaccuccucagagu

SEQ ID NO: 19163 - RNA, 32 nt, Homo Sapiens
guuuuguuuuuguuuuuuuuuacggaaaaggu

SEQ ID NO: 19164 - RNA, 32 nt, Homo Sapiens
uugcuuaauuuuccauaaaauuugaagcugug

SEQ ID NO: 19165 - RNA, 32 nt, Homo Sapiens
aaggaagcuaagaaccuugaaaaaagguuaga

SEQ ID NO: 19166 - RNA, 32 nt, Homo Sapiens
ggaaaguauacuuauguugguguguaagcaug

SEQ ID NO: 19167 - RNA, 32 nt, Homo Sapiens
uaaaggaaccucagccaguguccaagcaaaau

SEQ ID NO: 19168 - RNA, 32 nt, Homo Sapiens
ccuuugggggcugauggcaauaucuaaaacca

SEQ ID NO: 19169 - RNA, 32 nt, Homo Sapiens
ccuuauaaacucuuacucaaaugauuugaacu

SEQ ID NO: 19170 - RNA, 32 nt, Homo Sapiens
ugugaauggcccucagaaaaucaucuagugca

SEQ ID NO: 19171 - RNA, 32 nt, Homo Sapiens
cgcggagccuggcgcgggggcugcgagcacag

SEQ ID NO: 19172 - RNA, 32 nt, Homo Sapiens
gagcaucaaaccaccauggauuucauaaucaa

SEQ ID NO: 19173 - RNA, 32 nt, Homo Sapiens
accaguauauauagucuguucauauguaaaau

SEQ ID NO: 19174 - RNA, 32 nt, Homo Sapiens
aucagagaugcauacaaagaauuauauauaaa

SEQ ID NO: 19175 - RNA, 32 nt, Homo Sapiens
aaaggaguaggaacguacuuugaacuacauuu

SEQ ID NO: 19176 - RNA, 32 nt, Homo Sapiens
uggaggugaugaugaugacauuauagcagaca

SEQ ID NO: 19177 - RNA, 32 nt, Homo Sapiens
caauaacaagaaaaaaggcccacaauuagaaa

SEQ ID NO: 19178 - RNA, 32 nt, Homo Sapiens
gcgccgcaaacucgugugggaggcaccgcucc

SEQ ID NO: 19179 - RNA, 32 nt, Homo Sapiens
ugaagaaguugauguuaauugaagaauucacu

SEQ ID NO: 19180 - RNA, 32 nt, Homo Sapiens
uugaagugguuuuugugggugugaaacaaaug

SEQ ID NO: 19181 - RNA, 32 nt, Homo Sapiens
gaaauuaagaaccaucuucaagcaaaaauuaa

SEQ ID NO: 19182 - RNA, 32 nt, Homo Sapiens
agagguaauaauaauuagauuugagcuugaaa

SEQ ID NO: 19183 - RNA, 32 nt, Homo Sapiens
aaucagaaaugguguggguaguuuagaaaaug

SEQ ID NO: 19184 - RNA, 32 nt, Homo Sapiens
aagugggccgggccggccccaccugccucugc

SEQ ID NO: 19185 - RNA, 32 nt, Homo Sapiens
cccccagccccgcacccuccccguggcucagg

SEQ ID NO: 19186 - RNA, 32 nt, Homo Sapiens
uuacuugaagaaaaaagcacccguggagaaua

SEQ ID NO: 19187 - RNA, 32 nt, Homo Sapiens
ugcaagaacuuucuucucuagaauaaucagga

SEQ ID NO: 19188 - RNA, 32 nt, Homo Sapiens
caucgaggcuagcgccggggucgggggcggcu

SEQ ID NO: 19189 - RNA, 28 nt, Homo Sapiens
gacaugggaaagucucuuucucauuugc

SEQ ID NO: 19190 - RNA, 32 nt, Homo Sapiens
aacuccguuuucacaugcuuguccuauuugcu

SEQ ID NO: 19191 - RNA, 32 nt, Homo Sapiens
ggauauauguggcaauauuaaccugguacaug

SEQ ID NO: 19192 - RNA, 32 nt, Homo Sapiens
accacugaacuccagccugggcgacagaggga

SEQ ID NO: 19193 - RNA, 32 nt, Homo Sapiens
cucggugcugcuagugccagcaguaugagggu

SEQ ID NO: 19194 - RNA, 32 nt, Homo Sapiens
cugugaagaggaagaggcggcggcggcggcgg

SEQ ID NO: 19195 - RNA, 32 nt, Homo Sapiens
acuucauugaugcacccauuccagugguguaa

SEQ ID NO: 19196 - RNA, 32 nt, Homo Sapiens
gcgaagucaggagugggggaaaugaggugcac

SEQ ID NO: 19197 - RNA, 32 nt, Homo Sapiens
ugauccugcuggggcccgggggucuccaucug

SEQ ID NO: 19198 - RNA, 32 nt, Homo Sapiens
guuguuguucuuucuuuuuucacgugguuucg

SEQ ID NO: 19199 - RNA, 28 nt, Homo Sapiens
guccgacggcggccggacgcugaggugg

SEQ ID NO: 19200 - RNA, 32 nt, Homo Sapiens
acgacauccagcugcucaaaucagcucuagcu

SEQ ID NO: 19201 - RNA, 32 nt, Homo Sapiens
cugucauucuauuaugaagaaaacaguuuuau

SEQ ID NO: 19202 - RNA, 32 nt, Homo Sapiens
gaugcugagugggaucgagggcccggggcggc

SEQ ID NO: 19203 - RNA, 32 nt, Homo Sapiens
ccugagccugccugaggugcugccuccuccca

SEQ ID NO: 19204 - RNA, 32 nt, Homo Sapiens
aauuguaaaaauuguauagagauaugcagaag

SEQ ID NO: 19205 - RNA, 32 nt, Homo Sapiens
cucugcugaauucucuuguugaauucauagcu

SEQ ID NO: 19206 - RNA, 32 nt, Homo Sapiens
auuuugucuuucaaagauuacugcauuaccaa

SEQ ID NO: 19207 - RNA, 32 nt, Homo Sapiens
cucucucucccucucucuccuuuguccagagu

SEQ ID NO: 19208 - RNA, 32 nt, Homo Sapiens
ccacuauauuggacuaugcagguccaaaacac

SEQ ID NO: 19209 - RNA, 32 nt, Homo Sapiens
gaucaucgacccccaagggacccgcagacccu

SEQ ID NO: 19210 - RNA, 32 nt, Homo Sapiens
acaaacaaacaaacaaaaaaccagaaugcauu

SEQ ID NO: 19211 - RNA, 32 nt, Homo Sapiens
ggaccaagcaaagccaugauauuuccauggaa

SEQ ID NO: 19212 - RNA, 32 nt, Homo Sapiens
accuggagcccagggccacccggagcugcaag

SEQ ID NO: 19213 - RNA, 32 nt, Homo Sapiens
cuuuuuaaaaauacuucuacaugacugcuuga

SEQ ID NO: 19214 - RNA, 32 nt, Homo Sapiens
acagaguggacuguucccugaggugggagaug

SEQ ID NO: 19215 - RNA, 32 nt, Homo Sapiens
ugaaaguuucuuuuuuaagacaaauacauuau

SEQ ID NO: 19216 - RNA, 32 nt, Homo Sapiens
gacuuaccuggcggcagcggccccacaccucc

SEQ ID NO: 19217 - RNA, 32 nt, Homo Sapiens
agcuccacccucgagcacuuugccagcagcuu

SEQ ID NO: 19218 - RNA, 32 nt, Homo Sapiens
guagcugagcgcggagcccgugggggccggug

SEQ ID NO: 19219 - RNA, 32 nt, Homo Sapiens
caaaagccaucggaagaugcgaguuugugccu

SEQ ID NO: 19220 - RNA, 32 nt, Homo Sapiens
caggcaggcaaggggugcggggaccaggugag

SEQ ID NO: 19221 - RNA, 32 nt, Homo Sapiens
ccugggcucaggugauucuuccaccccagccu

SEQ ID NO: 19222 - RNA, 32 nt, Homo Sapiens
acugacgcucccgcccuugggcaaggacgcca

SEQ ID NO: 19223 - RNA, 32 nt, Homo Sapiens
auaucauuauaugaaaguccucugccaccgag

SEQ ID NO: 19224 - RNA, 32 nt, Homo Sapiens
aauacuaccuugaaaauaagaauagaaauaaa

SEQ ID NO: 19225 - RNA, 32 nt, Homo Sapiens
aaccgccugcggcugcucacagagcacguguu

SEQ ID NO: 19226 - RNA, 32 nt, Homo Sapiens
uuagagaauaagaaaacugaaagauuuuucaa

SEQ ID NO: 19227 - RNA, 32 nt, Homo Sapiens
uccugccaaauaaaugggcauaaaaaagaaau

SEQ ID NO: 19228 - RNA, 32 nt, Homo Sapiens
aauucugguguaggguguaugugcuaaucguu

SEQ ID NO: 19229 - RNA, 32 nt, Homo Sapiens
agcaucccugaucccggcgcucccugccaagc

SEQ ID NO: 19230 - RNA, 32 nt, Homo Sapiens
uauccuacuuuuuucuguugaaaauaugacuu

SEQ ID NO: 19231 - RNA, 32 nt, Homo Sapiens
agggucccuuccauuucccauccauugcuuca

SEQ ID NO: 19232 - RNA, 32 nt, Homo Sapiens
uucccgaucaacuaggaugaauuuaagacugu

SEQ ID NO: 19233 - RNA, 32 nt, Homo Sapiens
gcagaugaaaagcuaccaucacuuccucauca

SEQ ID NO: 19234 - RNA, 32 nt, Homo Sapiens
agacuauuuuguuuaacccuggauagaauagc

SEQ ID NO: 19235 - RNA, 32 nt, Homo Sapiens
uugauucuuguauauugauguugucuuuucuu

SEQ ID NO: 19236 - RNA, 32 nt, Homo Sapiens
cgugaaaacuggguuugcagauuuugaagaua

SEQ ID NO: 19237 - RNA, 32 nt, Homo Sapiens
uguggguccugccagggagacauccaguacuc

SEQ ID NO: 19238 - RNA, 32 nt, Homo Sapiens
uugagggaaugaugagaaauaauuauuggacg

SEQ ID NO: 19239 - RNA, 32 nt, Homo Sapiens
ugccacccacccaguugaauuggaauccuguu

SEQ ID NO: 19240 - RNA, 32 nt, Homo Sapiens
ucugccaccgacaaggacagugugggaagagg

SEQ ID NO: 19241 - RNA, 32 nt, Homo Sapiens
gccccagccaguggcagaacugggucucucag

SEQ ID NO: 19242 - RNA, 32 nt, Homo Sapiens
ccaugcacguguaucugucucuuuuaacacua

SEQ ID NO: 19243 - RNA, 30 nt, Homo Sapiens
uugggaugucgaagaacacagugucgucgg

SEQ ID NO: 19244 - RNA, 32 nt, Homo Sapiens
uuguccacuguggugugcucuccagcucuuca

SEQ ID NO: 19245 - RNA, 32 nt, Homo Sapiens
cucgaugccagggcgccgcgaggcccggggcu

SEQ ID NO: 19246 - RNA, 32 nt, Homo Sapiens
cacuuccugcugcccuggaccccgcaagccca

SEQ ID NO: 19247 - RNA, 32 nt, Homo Sapiens
ucacuggaaaggcuggaggagcagaaggcaga

SEQ ID NO: 19248 - RNA, 32 nt, Homo Sapiens
cauugaaugucucauuuggccgaggaacaacu

SEQ ID NO: 19249 - RNA, 32 nt, Homo Sapiens
ggggcgagaggguguacgucaacaucagucac

SEQ ID NO: 19250 - RNA, 32 nt, Homo Sapiens
aaucaucuaacuggauuuucccauuggucauu

SEQ ID NO: 19251 - RNA, 32 nt, Homo Sapiens
ggccuuaguugccuccaggucuucccagggug

SEQ ID NO: 19252 - RNA, 32 nt, Homo Sapiens
ggcagaaucuuacuccacagacuucagcagac

SEQ ID NO: 19253 - RNA, 32 nt, Homo Sapiens
uuuccgcgaugauguccuuuccguugcuaugg

SEQ ID NO: 19254 - RNA, 32 nt, Homo Sapiens
uacugugauuccauuucuuguuuagcugguga

SEQ ID NO: 19255 - RNA, 32 nt, Homo Sapiens
ccugaaaugcgcugcgcagugacgccugggaa

SEQ ID NO: 19256 - RNA, 32 nt, Homo Sapiens
aaaaaugguguuggaccaauugccauagcaac

SEQ ID NO: 19257 - RNA, 32 nt, Homo Sapiens
accgggcgaggccugcgccgcgauggcagaga

SEQ ID NO: 19258 - RNA, 32 nt, Homo Sapiens
uccugagcuguaagguuuuucuuccagugggg

SEQ ID NO: 19259 - RNA, 32 nt, Homo Sapiens
cucaguguggaaucaccuccgcgcccggccac

SEQ ID NO: 19260 - RNA, 32 nt, Homo Sapiens
aagccugugucuccugcccccagggcgcaccc

SEQ ID NO: 19261 - RNA, 32 nt, Homo Sapiens
acaugcacccucauggcaggauucuagccugc

SEQ ID NO: 19262 - RNA, 32 nt, Homo Sapiens
aagaagugggucugacaugucucuggcagccc

SEQ ID NO: 19263 - RNA, 32 nt, Homo Sapiens
ggaggccaugcgggugcucaccacccccaugc

SEQ ID NO: 19264 - RNA, 32 nt, Homo Sapiens
ugaggugcugaacagugccgacuugcaaacgg

SEQ ID NO: 19265 - RNA, 32 nt, Homo Sapiens
cuccagccaccacuuuccugugcauuuucacu

SEQ ID NO: 19266 - RNA, 32 nt, Homo Sapiens
ucuacuuuuaugaagcucuaugguguauuucu

SEQ ID NO: 19267 - RNA, 32 nt, Homo Sapiens
caaguuguuucauugacuaucaaacugaagcc

SEQ ID NO: 19268 - RNA, 32 nt, Homo Sapiens
aaaggaaggcaaucgacacaguuauuagcaca

SEQ ID NO: 19269 - RNA, 32 nt, Homo Sapiens
cacagccacuucccuuccccagcuuggcugcc

SEQ ID NO: 19270 - RNA, 32 nt, Homo Sapiens
uuauaaaauuuauuugauaguacacuuaaaga

SEQ ID NO: 19271 - RNA, 32 nt, Homo Sapiens
gggcagcugggcccuccugggugggguggugc

SEQ ID NO: 19272 - RNA, 32 nt, Homo Sapiens
gcaucacugaggccaggagcucugcccaugac

SEQ ID NO: 19273 - RNA, 28 nt, Homo Sapiens
gugagugaaaauaaucgaugguuaccgu

SEQ ID NO: 19274 - RNA, 32 nt, Homo Sapiens
ggaguacaaacagccuucaacaauggcaccau

SEQ ID NO: 19275 - RNA, 32 nt, Homo Sapiens
cccugauuuuguucucucuuugaaagaaaccc

SEQ ID NO: 19276 - RNA, 32 nt, Homo Sapiens
uuccuagaccugaagcacuuuucagguaagga

SEQ ID NO: 19277 - RNA, 32 nt, Homo Sapiens
auacugagcgaaaucuucccaaggcugcagac

SEQ ID NO: 19278 - RNA, 32 nt, Homo Sapiens
cauggagcccccucugccggucgggcagccag

SEQ ID NO: 19279 - RNA, 32 nt, Homo Sapiens
gucuaggaaggggaugggacuagauucuaaaa

SEQ ID NO: 19280 - RNA, 32 nt, Homo Sapiens
gguuucuugaagucagagucuaucuccucugu

SEQ ID NO: 19281 - RNA, 32 nt, Homo Sapiens
gccuguaaucccaacucuuggggaggcagagg

SEQ ID NO: 19282 - RNA, 30 nt, Homo Sapiens
gaaaugaagagcugcggcggcagcuggaga

SEQ ID NO: 19283 - RNA, 32 nt, Homo Sapiens
aaaacuuaaaagacgaacacagauggaaguuu

SEQ ID NO: 19284 - RNA, 32 nt, Homo Sapiens
gggccgcacgccugggccccagggccccuuug

SEQ ID NO: 19285 - RNA, 32 nt, Homo Sapiens
gagagagccacggagaggaaaagcagaugcag

SEQ ID NO: 19286 - RNA, 32 nt, Homo Sapiens
uuugcccuugucaaugcccccggaggccaguu

SEQ ID NO: 19287 - RNA, 32 nt, Homo Sapiens
aaucaagaugacuguggaaaaaauaggcuuga

SEQ ID NO: 19288 - RNA, 32 nt, Homo Sapiens
aucccaccagugcacucaaggcucaauucuac

SEQ ID NO: 19289 - RNA, 32 nt, Homo Sapiens
gauacacugauaucaauuuauuuauguaacua

SEQ ID NO: 19290 - RNA, 32 nt, Homo Sapiens
cagcgugggaggaggggauggaaaugagguug

SEQ ID NO: 19291 - RNA, 32 nt, Homo Sapiens
cuaaaauaaaagacuuauuuuuuaaacuuugc

SEQ ID NO: 19292 - RNA, 32 nt, Homo Sapiens
aguggauguuugaacuugcuccagguguaagc

SEQ ID NO: 19293 - RNA, 32 nt, Homo Sapiens
uugacuuugugaaugagcacaaugaaaugccg

SEQ ID NO: 19294 - RNA, 32 nt, Homo Sapiens
cgucucccauccccuacaccuucccccagcca

SEQ ID NO: 19295 - RNA, 32 nt, Homo Sapiens
caggcuacugguuuugcauagaucauucaucu

SEQ ID NO: 19296 - RNA, 32 nt, Homo Sapiens
ucccgcgucccggacgcggacggccgccccac

SEQ ID NO: 19297 - RNA, 32 nt, Homo Sapiens
ucaagccaaaacuacacuuugcugguuccugu

SEQ ID NO: 19298 - RNA, 32 nt, Homo Sapiens
uguuuggcaaaauaaaauaaagguaauuaaaa

SEQ ID NO: 19299 - RNA, 32 nt, Homo Sapiens
guacugaauagauuaauccaaaacacuuacug

SEQ ID NO: 19300 - RNA, 32 nt, Homo Sapiens
guucagcaauaucuaaagauaauguuacuaug

SEQ ID NO: 19301 - RNA, 32 nt, Homo Sapiens
aaaaggugucuuuccagccugaauuuuucaga

SEQ ID NO: 19302 - RNA, 32 nt, Homo Sapiens
uggaaccauggggacuuggggguggggcagag

SEQ ID NO: 19303 - RNA, 32 nt, Homo Sapiens
uuucgcuugggguggucucucucacucugccc

SEQ ID NO: 19304 - RNA, 32 nt, Homo Sapiens
agugccugacacauugcaaacacucaccaacu

SEQ ID NO: 19305 - RNA, 32 nt, Homo Sapiens
ggcacugggcucgugcggggccccgggcgucg

SEQ ID NO: 19306 - RNA, 32 nt, Homo Sapiens
gccucagagaauaacaguguuuuauggacagg

SEQ ID NO: 19307 - RNA, 32 nt, Homo Sapiens
uguaaaugccaauaaaauauucaccaggggca

SEQ ID NO: 19308 - RNA, 32 nt, Homo Sapiens
cagauccuguaugacuuuaaaauacauuuuaa

SEQ ID NO: 19309 - RNA, 32 nt, Homo Sapiens
auaaaauguauuuccuaucaccauacuuuucc

SEQ ID NO: 19310 - RNA, 32 nt, Homo Sapiens
gguuggcauguucuuccuauugcaauagucuu

SEQ ID NO: 19311 - RNA, 32 nt, Homo Sapiens
aacacuggggacgcucaggucuccuaagaccu

SEQ ID NO: 19312 - RNA, 32 nt, Homo Sapiens
aauccccuaaacaaaaagaacaauagaacugg

SEQ ID NO: 19313 - RNA, 32 nt, Homo Sapiens
cugugguccaccugcuccugcuccugacucac

SEQ ID NO: 19314 - RNA, 32 nt, Homo Sapiens
ugggagugggaccugagaucccugcccacucu

SEQ ID NO: 19315 - RNA, 32 nt, Homo Sapiens
cucacagcuauaaaagaggauguuagaaaugg

SEQ ID NO: 19316 - RNA, 32 nt, Homo Sapiens
uggcgccggggaggggggcgcgaugggccaag

SEQ ID NO: 19317 - RNA, 32 nt, Homo Sapiens
gaauuaugaaagauuuuccucaaaaaugacag

SEQ ID NO: 19318 - RNA, 32 nt, Homo Sapiens
ggaugcaugcgugggagaacucucugagaaau

SEQ ID NO: 19319 - RNA, 32 nt, Homo Sapiens
ugaauguccaguggucccagcuccccacccug

SEQ ID NO: 19320 - RNA, 32 nt, Homo Sapiens
ucauuggcagaucuugguagcacuuuauaugu

SEQ ID NO: 19321 - RNA, 32 nt, Homo Sapiens
cacggggaggccucuuggggggugugggggau

SEQ ID NO: 19322 - RNA, 32 nt, Homo Sapiens
aagugguggggcaacuauuggugcgcuccagc

SEQ ID NO: 19323 - RNA, 32 nt, Homo Sapiens
caaaaaaucuuuauuucagaguauugcuuuuc

SEQ ID NO: 19324 - RNA, 32 nt, Homo Sapiens
uuugaagaugcagagccuauuuucucaugcag

SEQ ID NO: 19325 - RNA, 32 nt, Homo Sapiens
aagaagguuuggcaggaccggcugggagauga

SEQ ID NO: 19326 - RNA, 32 nt, Homo Sapiens
gauccgcguggcccgcgaggcgcagcgccuga

SEQ ID NO: 19327 - RNA, 28 nt, Homo Sapiens
uaagaaauucgucauuugaaacauaugg

SEQ ID NO: 19328 - RNA, 32 nt, Homo Sapiens
uucuugagcaucuggucuggggggaccacuuu

SEQ ID NO: 19329 - RNA, 32 nt, Homo Sapiens
uccccacguugaccaggcuggucucgaacucc

SEQ ID NO: 19330 - RNA, 32 nt, Homo Sapiens
gccgccggucccaacccggcccaggagcaucu

SEQ ID NO: 19331 - RNA, 32 nt, Homo Sapiens
uuaaagaaggcacuuuuaaaauuaacacacac

SEQ ID NO: 19332 - RNA, 32 nt, Homo Sapiens
ugguucacaccuguaauugcagcacuuuggga

SEQ ID NO: 19333 - RNA, 32 nt, Homo Sapiens
agcacacauuuaauuugcuccuaguaacaccu

SEQ ID NO: 19334 - RNA, 32 nt, Homo Sapiens
uuuggaagggaagccggaaauccagauuuaau

SEQ ID NO: 19335 - RNA, 32 nt, Homo Sapiens
gaaccucggcgcuccggcggcgcgggcaccac

SEQ ID NO: 19336 - RNA, 32 nt, Homo Sapiens
ucacaguccaucucgagagaaagggagugguu

SEQ ID NO: 19337 - RNA, 32 nt, Homo Sapiens
ggcuuucccccucccaggccuccuggguguca

SEQ ID NO: 19338 - RNA, 32 nt, Homo Sapiens
gcccaugucaggcuuauauuggucugccacac

SEQ ID NO: 19339 - RNA, 32 nt, Homo Sapiens
uaaauggguucaauugaacucauuucuuauuu

SEQ ID NO: 19340 - RNA, 32 nt, Homo Sapiens
aguuuccaggcuuugcagaagaccuugucucc

SEQ ID NO: 19341 - RNA, 32 nt, Homo Sapiens
ggggcauggacuucaccuccugguccucucuu

SEQ ID NO: 19342 - RNA, 32 nt, Homo Sapiens
agccgcugagaaagcgcagagaaggcgggccc

SEQ ID NO: 19343 - RNA, 32 nt, Homo Sapiens
gagguuuuaaacaaauucugaugcccagguug

SEQ ID NO: 19344 - RNA, 32 nt, Homo Sapiens
aggguugacaacagggugauggaggccuggga

SEQ ID NO: 19345 - RNA, 32 nt, Homo Sapiens
ugccuguaaucccagcacuuugggaggccagg

SEQ ID NO: 19346 - RNA, 32 nt, Homo Sapiens
ccuucagugggaggaguggcaaaggcacgcag

SEQ ID NO: 19347 - RNA, 32 nt, Homo Sapiens
cguggccuuccacaacaguccccucgugugca

SEQ ID NO: 19348 - RNA, 32 nt, Homo Sapiens
ugaggguggcugccuccucugguccccaggcc

SEQ ID NO: 19349 - RNA, 32 nt, Homo Sapiens
auuuaucuuuucucuucgucugcaucagggug

SEQ ID NO: 19350 - RNA, 32 nt, Homo Sapiens
ugcuucuagagcaaugucuagugaaacuuauc

SEQ ID NO: 19351 - RNA, 32 nt, Homo Sapiens
ucucuguucauuuuuucugugaggauacuuaa

SEQ ID NO: 19352 - RNA, 32 nt, Homo Sapiens
gaucagggacgcugcgcggggccggccgcgca

SEQ ID NO: 19353 - RNA, 32 nt, Homo Sapiens
caggggcagccacuggcuccgcgggcacaggc

SEQ ID NO: 19354 - RNA, 32 nt, Homo Sapiens
agauucacuguuucaucauauuuauuguaaua

SEQ ID NO: 19355 - RNA, 32 nt, Homo Sapiens
aucccagccugcgcucuccccccucagucagc

SEQ ID NO: 19356 - RNA, 32 nt, Homo Sapiens
cuugcacuguucauuuucaguggggugagucu

SEQ ID NO: 19357 - RNA, 32 nt, Homo Sapiens
cugaggcuggucgguagcacuccuggcugguu

SEQ ID NO: 19358 - RNA, 29 nt, Homo Sapiens
cuguacauagagauauauuuuuuaagugu

SEQ ID NO: 19359 - RNA, 32 nt, Homo Sapiens
cuccauugcguuucucuuucuccuucucuuuc

SEQ ID NO: 19360 - RNA, 32 nt, Homo Sapiens
gagggccaggacagccggggcugggugcugca

SEQ ID NO: 19361 - RNA, 32 nt, Homo Sapiens
ccucccccaucccacucccguuucauuuuuaa

SEQ ID NO: 19362 - RNA, 32 nt, Homo Sapiens
uacuuuuuuuuuucuuuuugagucaggacuau

SEQ ID NO: 19363 - RNA, 32 nt, Homo Sapiens
gaagccaaauuauaaagucauuauuagggugg

SEQ ID NO: 19364 - RNA, 32 nt, Homo Sapiens
cuggcaucuggcacuugcaauuuuggauuuug

SEQ ID NO: 19365 - RNA, 32 nt, Homo Sapiens
caacccccugucaugagcucuuucuagcaaug

SEQ ID NO: 19366 - RNA, 32 nt, Homo Sapiens
ggacugggggcgggcgggagggagccggggac

SEQ ID NO: 19367 - RNA, 32 nt, Homo Sapiens
gaguuccuuaucuauuuugaagcuuaacccua

SEQ ID NO: 19368 - RNA, 32 nt, Homo Sapiens
aguuagcaaaugaggggguaaauauuccagug

SEQ ID NO: 19369 - RNA, 32 nt, Homo Sapiens
gaagcugguugcugcuggcccagggcuggggg

SEQ ID NO: 19370 - RNA, 32 nt, Homo Sapiens
aaugggagccgcggccuggccgccccgccccg

SEQ ID NO: 19371 - RNA, 32 nt, Homo Sapiens
aauuuggauuuggcuguaaaucugucuggucc

SEQ ID NO: 19372 - RNA, 32 nt, Homo Sapiens
auaggcagcaagaggucucaccaucacucuuc

SEQ ID NO: 19373 - RNA, 32 nt, Homo Sapiens
uguuaugacagagagaugaugaaaguaggcag

SEQ ID NO: 19374 - RNA, 32 nt, Homo Sapiens
cccacacauaucacuuuagcccuaacaagggc

SEQ ID NO: 19375 - RNA, 32 nt, Homo Sapiens
aacauuugacaucagaagcuuuauuuguaaac

SEQ ID NO: 19376 - RNA, 32 nt, Homo Sapiens
uggucccauuuuccccacuuugugaugggcuu

SEQ ID NO: 19377 - RNA, 32 nt, Homo Sapiens
gugggagagucuuaucaucugcuaacauuuca

SEQ ID NO: 19378 - RNA, 32 nt, Homo Sapiens
agacgggaaggugggucucgcaaccauggcug

SEQ ID NO: 19379 - RNA, 32 nt, Homo Sapiens
uauuccuuacacaaauccucaacuagagaaca

SEQ ID NO: 19380 - RNA, 32 nt, Homo Sapiens
cauuaacuuauuaauuuuauaaugcaguuuua

SEQ ID NO: 19381 - RNA, 32 nt, Homo Sapiens
gcccugcaguugcuggaucagccugcaccuga

SEQ ID NO: 19382 - RNA, 32 nt, Homo Sapiens
uauuaguuguuggacacuuuugccaugucaua

SEQ ID NO: 19383 - RNA, 32 nt, Homo Sapiens
ccacaugcaggggacggcgcgucgcggcggcc

SEQ ID NO: 19384 - RNA, 32 nt, Homo Sapiens
ugcccuuuucccuuucaaccucuccuccgcug

SEQ ID NO: 19385 - RNA, 32 nt, Homo Sapiens
uucaagaagaaccuuggcauaaacgauauuuc

SEQ ID NO: 19386 - RNA, 32 nt, Homo Sapiens
caugggcucccucuuuccuccugcacagcccu

SEQ ID NO: 19387 - RNA, 32 nt, Homo Sapiens
agagaggggggugaggguggagccagguagau

SEQ ID NO: 19388 - RNA, 32 nt, Homo Sapiens
ggguuagugugccugacaacacugaagaaaaa

SEQ ID NO: 19389 - RNA, 32 nt, Homo Sapiens
gccucaaagccugcaucaauaaaugaaaacgg

SEQ ID NO: 19390 - RNA, 32 nt, Homo Sapiens
aaaaaagaaacaaaacaaaacuugggagccuc

SEQ ID NO: 19391 - RNA, 32 nt, Homo Sapiens
agcguccccuccccccacccgucgggcuccuc

SEQ ID NO: 19392 - RNA, 32 nt, Homo Sapiens
uuggucagagugauauuuggugacggaaacuu

SEQ ID NO: 19393 - RNA, 32 nt, Homo Sapiens
aagcauaugugcuuucgcagcugauaauauaa

SEQ ID NO: 19394 - RNA, 32 nt, Homo Sapiens
agugcuccacuuuagagaguguaccuuaauua

SEQ ID NO: 19395 - RNA, 32 nt, Homo Sapiens
acgccgccgcgcgccgggagcugcugagccua

SEQ ID NO: 19396 - RNA, 32 nt, Homo Sapiens
gauuagggaacaacagaaggggaacagucaua

SEQ ID NO: 19397 - RNA, 32 nt, Homo Sapiens
uuguuauuuuaacuuuaaaaaguaauaugugc

SEQ ID NO: 19398 - RNA, 32 nt, Homo Sapiens
gaugggucacgagccauguuaagcacaaccgg

SEQ ID NO: 19399 - RNA, 32 nt, Homo Sapiens
cugcaguggggggcugguggcuccggggcugg

SEQ ID NO: 19400 - RNA, 32 nt, Homo Sapiens
uggccucuugucauccccguguuacuguguag

SEQ ID NO: 19401 - RNA, 32 nt, Homo Sapiens
cggagaaggcgccgcuggggccgcccggagga

SEQ ID NO: 19402 - RNA, 32 nt, Homo Sapiens
auuugcacuugaaccagauuauagauuuaaaa

SEQ ID NO: 19403 - RNA, 32 nt, Homo Sapiens
aagaaaguuuauaguauccuuucacaaaggag

SEQ ID NO: 19404 - RNA, 32 nt, Homo Sapiens
cgccaccuccccccggccugggcagcgcucgc

SEQ ID NO: 19405 - RNA, 32 nt, Homo Sapiens
uuuaaccuccuauccuuggagagcagcuggcu

SEQ ID NO: 19406 - RNA, 32 nt, Homo Sapiens
auaagacaauggacccuuuuuguuaugauggu

SEQ ID NO: 19407 - RNA, 32 nt, Homo Sapiens
cuaacugggggagcgagaagggagacgagcaa

SEQ ID NO: 19408 - RNA, 32 nt, Homo Sapiens
caugcuggccugcggcaugugcagggagcuga

SEQ ID NO: 19409 - RNA, 32 nt, Homo Sapiens
agccucucuggaugcuccaugggugggggucg

SEQ ID NO: 19410 - RNA, 32 nt, Homo Sapiens
gacaucuucgccgucccggcgccccggugccu

SEQ ID NO: 19411 - RNA, 32 nt, Homo Sapiens
cauugacuguccucuugauuuuucauauuaca

SEQ ID NO: 19412 - RNA, 32 nt, Homo Sapiens
gggcuccgacagaggcggcgauuguggcggcc

SEQ ID NO: 19413 - RNA, 32 nt, Homo Sapiens
ccaaugucagccugcuggcuuuggcugagcag

SEQ ID NO: 19414 - RNA, 28 nt, Homo Sapiens
aucaugcccaaguucaaacaacgaagac

SEQ ID NO: 19415 - RNA, 32 nt, Homo Sapiens
caagccggaggguggguccgcucucgcggccg

SEQ ID NO: 19416 - RNA, 32 nt, Homo Sapiens
ucugucggcccgagacauuuggaaguccuggg

SEQ ID NO: 19417 - RNA, 32 nt, Homo Sapiens
gggaggcugcagaggaggagcagggugggguu

SEQ ID NO: 19418 - RNA, 32 nt, Homo Sapiens
cuguccagcuggggccagaggcugggaguccc

SEQ ID NO: 19419 - RNA, 32 nt, Homo Sapiens
gauucugcccugaagaaauuguuccgaagguu

SEQ ID NO: 19420 - RNA, 32 nt, Homo Sapiens
ucgugagaacagaggacccaggcccucggagg

SEQ ID NO: 19421 - RNA, 25 nt, Homo Sapiens
auggccgugcugcugcugcugcucc

SEQ ID NO: 19422 - RNA, 32 nt, Homo Sapiens
ccugcuucaccaucuucucauaccaucacauu

SEQ ID NO: 19423 - RNA, 32 nt, Homo Sapiens
ugaacucauccuuuuuuauggcugcauaguau

SEQ ID NO: 19424 - RNA, 32 nt, Homo Sapiens
agccguccgcgcgcccgggcgcagguuugguu

SEQ ID NO: 19425 - RNA, 32 nt, Homo Sapiens
aacuguugacuucagccuguuggugaguuuag

SEQ ID NO: 19426 - RNA, 32 nt, Homo Sapiens
cgagaggugucuccuccaccggagccagggga

SEQ ID NO: 19427 - RNA, 32 nt, Homo Sapiens
uucaguccggggcuugccaucuugacucagcc

SEQ ID NO: 19428 - RNA, 32 nt, Homo Sapiens
cacaggcacacgaugcucugggacauaacugg

SEQ ID NO: 19429 - RNA, 32 nt, Homo Sapiens
auuguuuuuuguuaucuauuuauuuucaucaa

SEQ ID NO: 19430 - RNA, 32 nt, Homo Sapiens
cacaagagcugaugauuuuauaaaagguuucc

SEQ ID NO: 19431 - RNA, 32 nt, Homo Sapiens
auauauaaugaacacguggguauuuaauaaga

SEQ ID NO: 19432 - RNA, 32 nt, Homo Sapiens
aagauagcagagugaaagagcuuuugucuccu

SEQ ID NO: 19433 - RNA, 32 nt, Homo Sapiens
aauggagcuucaugacccacggucagccccca

SEQ ID NO: 19434 - RNA, 32 nt, Homo Sapiens
cuuuagggaauuuuuguuuugcaaacaggaga

SEQ ID NO: 19435 - RNA, 32 nt, Homo Sapiens
cagcugccacuuuucaccguuagaaguagagc

SEQ ID NO: 19436 - RNA, 32 nt, Homo Sapiens
uaaaugccaguaucucagucuuucugaagccc

SEQ ID NO: 19437 - RNA, 32 nt, Homo Sapiens
uuauuucugcuuaaacaauaaauacaccugag

SEQ ID NO: 19438 - RNA, 32 nt, Homo Sapiens
ggcggccaaguagccgcuucuccggagcccgg

SEQ ID NO: 19439 - RNA, 32 nt, Homo Sapiens
aucugcuguauaauucacuaacauuucugagc

SEQ ID NO: 19440 - RNA, 32 nt, Homo Sapiens
uguuaacgaugaugaugauaauagcuauacau

SEQ ID NO: 19441 - RNA, 32 nt, Homo Sapiens
ccaaaccgcugcagggcuggcugcagcaacuc

SEQ ID NO: 19442 - RNA, 32 nt, Homo Sapiens
ugggugacagaaggaggcucugccuuaaaaaa

SEQ ID NO: 19443 - RNA, 32 nt, Homo Sapiens
uguaaccaaaaauaaacauguauuuguguaau

SEQ ID NO: 19444 - RNA, 32 nt, Homo Sapiens
gccacccgagaaagagacccaggccccuggcg

SEQ ID NO: 19445 - RNA, 32 nt, Homo Sapiens
acgcugccuucccuggcucacaucucaccaac

SEQ ID NO: 19446 - RNA, 32 nt, Homo Sapiens
cagggcuuggacccccgucuccauggcagguc

SEQ ID NO: 19447 - RNA, 32 nt, Homo Sapiens
uggucuuguccuuuuuuauggcugcauaguau

SEQ ID NO: 19448 - RNA, 32 nt, Homo Sapiens
ucccugggguugcugcggggccugcuggggca

SEQ ID NO: 19449 - RNA, 32 nt, Homo Sapiens
uucucggcucugcccucugugaccuugcagcc

SEQ ID NO: 19450 - RNA, 32 nt, Homo Sapiens
uggcaagucugucccgcuuccaccaacaucca

SEQ ID NO: 19451 - RNA, 32 nt, Homo Sapiens
ugugaucgugcagcugugagcgcguggccgcc

SEQ ID NO: 19452 - RNA, 32 nt, Homo Sapiens
ccugggccugggucugucccugcccgaaaucc

SEQ ID NO: 19453 - RNA, 32 nt, Homo Sapiens
ugcgggcaucagugcccuuccucucuggcuau

SEQ ID NO: 19454 - RNA, 32 nt, Homo Sapiens
ugccgccaccgccugcuccucguccuccucgu

SEQ ID NO: 19455 - RNA, 32 nt, Homo Sapiens
ucauauguacauuuuuagcacauuguucuuuu

SEQ ID NO: 19456 - RNA, 32 nt, Homo Sapiens
gcaaguuuccagggacaaaaacaucaagcaau

SEQ ID NO: 19457 - RNA, 32 nt, Homo Sapiens
gucuuuaaguaaaaaugacacuauugaggaaa

SEQ ID NO: 19458 - RNA, 32 nt, Homo Sapiens
gauucuuuaaaccccaggaucgugccagcucu

SEQ ID NO: 19459 - RNA, 32 nt, Homo Sapiens
ucauuuuacuacaugaucuuccaauuagauag

SEQ ID NO: 19460 - RNA, 32 nt, Homo Sapiens
auggcaccugucaaaacagcggugguuccauu

SEQ ID NO: 19461 - RNA, 32 nt, Homo Sapiens
uugaugaauuguuugguaaccccuaucaagag

SEQ ID NO: 19462 - RNA, 32 nt, Homo Sapiens
guauuucuacuuuuuuuuuuuagcuauuuacu

SEQ ID NO: 19463 - RNA, 32 nt, Homo Sapiens
aggcauaguaucuauuauauuugcuuuuaaau

SEQ ID NO: 19464 - RNA, 32 nt, Homo Sapiens
ccccccaugcugucugcggacgaugcggagua

SEQ ID NO: 19465 - RNA, 28 nt, Homo Sapiens
auaaaauaaccaagugcuaaaucuugua

SEQ ID NO: 19466 - RNA, 32 nt, Homo Sapiens
aauccucccacccaccaggcuggggcacuuuc

SEQ ID NO: 19467 - RNA, 32 nt, Homo Sapiens
aggcccugcccccuacaccauacuuaucacca

SEQ ID NO: 19468 - RNA, 32 nt, Homo Sapiens
ugcuaugucaggcuuucaucuaaucuuaccag

SEQ ID NO: 19469 - RNA, 32 nt, Homo Sapiens
ccgcggcccucccccuccucggcguaauuauu

SEQ ID NO: 19470 - RNA, 32 nt, Homo Sapiens
ccccugacccccacccaaaccuguccuuccgc

SEQ ID NO: 19471 - RNA, 32 nt, Homo Sapiens
accacaaguccucugauggaaauguacagcag

SEQ ID NO: 19472 - RNA, 31 nt, Homo Sapiens
cucuggcucaaugaucuacauucugaaguug

SEQ ID NO: 19473 - RNA, 32 nt, Homo Sapiens
ucuccuggcuccuggggccccaccugagccua

SEQ ID NO: 19474 - RNA, 32 nt, Homo Sapiens
uggggggcucugcccagcugcugcucucccag

SEQ ID NO: 19475 - RNA, 32 nt, Homo Sapiens
aaaugcuguaaaagugugggugaaugugaggu

SEQ ID NO: 19476 - RNA, 32 nt, Homo Sapiens
ggaagaugagagauggucagauggaagagagg

SEQ ID NO: 19477 - RNA, 32 nt, Homo Sapiens
acaagugccucagcuuccccccggcccggguc

SEQ ID NO: 19478 - RNA, 32 nt, Homo Sapiens
uaggugagcggcucggacucggcggccgcacc

SEQ ID NO: 19479 - RNA, 32 nt, Homo Sapiens
uugaccucuuucucuguagaaaugaaaacuaa

SEQ ID NO: 19480 - RNA, 32 nt, Homo Sapiens
uuagguuccaaauauagugagaucguagagug

SEQ ID NO: 19481 - RNA, 32 nt, Homo Sapiens
agccaggacgcaacuugccggaggcggcgggg

SEQ ID NO: 19482 - RNA, 31 nt, Homo Sapiens
aacucacaauggagaaagucuccaugaaugg

SEQ ID NO: 19483 - RNA, 32 nt, Homo Sapiens
aucagcgagggauucacggcgaaaugagacug

SEQ ID NO: 19484 - RNA, 32 nt, Homo Sapiens
cugcccuugacaaugucguguaguugcugaaa

SEQ ID NO: 19485 - RNA, 32 nt, Homo Sapiens
ugaucauauuucugccaaggaugugccuucaa

SEQ ID NO: 19486 - RNA, 32 nt, Homo Sapiens
aagaaaagguaaaauucacuaucauauuuugu

SEQ ID NO: 19487 - RNA, 32 nt, Homo Sapiens
accucgcccuccccaggcgcuagccagcuacu

SEQ ID NO: 19488 - RNA, 32 nt, Homo Sapiens
aaggagcccccucccagacaggaaggagaaga

SEQ ID NO: 19489 - RNA, 32 nt, Homo Sapiens
uuuauuuuuuguagaaauaggaucucacuaug

SEQ ID NO: 19490 - RNA, 32 nt, Homo Sapiens
ggcuguuuuagugccaggcugcggugggcagc

SEQ ID NO: 19491 - RNA, 32 nt, Homo Sapiens
gaacaggaauugcugcugcugcuggagcccga

SEQ ID NO: 19492 - RNA, 32 nt, Homo Sapiens
aagcggaggaaguuccugcagaugaagcgcag

SEQ ID NO: 19493 - RNA, 32 nt, Homo Sapiens
gggagcagggguugggggaggggggugggguc

SEQ ID NO: 19494 - RNA, 32 nt, Homo Sapiens
agcccagcgcuggcagaauggauucugcuccu

SEQ ID NO: 19495 - RNA, 32 nt, Homo Sapiens
aauaaaauauaaauugguaaaucugguuguuu

SEQ ID NO: 19496 - RNA, 30 nt, Homo Sapiens
aguggagggcgaggcccgggucccgcgcuc

SEQ ID NO: 19497 - RNA, 32 nt, Homo Sapiens
uggacagagggaggaggccaggccagagccag

SEQ ID NO: 19498 - RNA, 31 nt, Homo Sapiens
ugugaagaugaaaaacagugauauuauacug

SEQ ID NO: 19499 - RNA, 32 nt, Homo Sapiens
uauugcaaauguucuuuguccugcuucucacu

SEQ ID NO: 19500 - RNA, 32 nt, Homo Sapiens
gggaaugcgggagagggcggcgccggggcgcu

SEQ ID NO: 19501 - RNA, 32 nt, Homo Sapiens
cagcacccuggcucccaccucccaguggcccc

SEQ ID NO: 19502 - RNA, 32 nt, Homo Sapiens
ucagggagcguagaagcagccagggccucucc

SEQ ID NO: 19503 - RNA, 32 nt, Homo Sapiens
aggugggcaaaucaccugaggucaggaguucg

SEQ ID NO: 19504 - RNA, 32 nt, Homo Sapiens
gucagagauugugaugcuuugguuauugcuau

SEQ ID NO: 19505 - RNA, 32 nt, Homo Sapiens
aggaacauccuuaucaucuucuacugagcagc

SEQ ID NO: 19506 - RNA, 32 nt, Homo Sapiens
uauuacaaagugaaaucaggggauauucauuu

SEQ ID NO: 19507 - RNA, 32 nt, Homo Sapiens
ucuaugcaauccucgaacucagugugcuuuuc

SEQ ID NO: 19508 - RNA, 31 nt, Homo Sapiens
aggcggccagaccgugcgccccgcgcuucuc

SEQ ID NO: 19509 - RNA, 32 nt, Homo Sapiens
uccgaaaacaaaagaaaagugauuuaaagaaa

SEQ ID NO: 19510 - RNA, 32 nt, Homo Sapiens
uugcuuugcuaaggagggaaggaaguuacaau

SEQ ID NO: 19511 - RNA, 32 nt, Homo Sapiens
ugucgcccguagcccgccuucuccguggcucu

SEQ ID NO: 19512 - RNA, 32 nt, Homo Sapiens
cuuaggucaggaguuugagaccagccuggcca

SEQ ID NO: 19513 - RNA, 32 nt, Homo Sapiens
uggaaagagucuuugccucccuuguuuaauuu

SEQ ID NO: 19514 - RNA, 32 nt, Homo Sapiens
uaauugauaauggaaauaauuuaguaauggac

SEQ ID NO: 19515 - RNA, 32 nt, Homo Sapiens
cgccuucaaacacaacugcuacaacauucuaa

SEQ ID NO: 19516 - RNA, 32 nt, Homo Sapiens
ccacuuuuuuaaaaaaugcacuacugugugcu

SEQ ID NO: 19517 - RNA, 32 nt, Homo Sapiens
auagguggucggucccugggcugugcaacaac

SEQ ID NO: 19518 - RNA, 32 nt, Homo Sapiens
gccaguuccggggcgcugcucccggccucccc

SEQ ID NO: 19519 - RNA, 32 nt, Homo Sapiens
cauuuuauuucuauuuugaaaugaguuaucua

SEQ ID NO: 19520 - RNA, 32 nt, Homo Sapiens
ccggaaaugcaaaacaggugaauuuucaagcg

SEQ ID NO: 19521 - RNA, 32 nt, Homo Sapiens
gaauguauauauauuuugaaauauggcugaga

SEQ ID NO: 19522 - RNA, 32 nt, Homo Sapiens
cugggguugcagaacacuuccugucucuggcu

SEQ ID NO: 19523 - RNA, 32 nt, Homo Sapiens
acccgggagacgggagguuguggugagcugag

SEQ ID NO: 19524 - RNA, 32 nt, Homo Sapiens
ugacuuaggugugaagacccagacaggacugc

SEQ ID NO: 19525 - RNA, 32 nt, Homo Sapiens
ucggggccccucagaucaggaauaccagauaa

SEQ ID NO: 19526 - RNA, 32 nt, Homo Sapiens
gcuuacauuuuucacuuuugcuaaaaagaaaa

SEQ ID NO: 19527 - RNA, 32 nt, Homo Sapiens
gggggaauaggggcaggcucucgauccccgcc

SEQ ID NO: 19528 - RNA, 32 nt, Homo Sapiens
aggcguacagaaucucgcccccugccuaauaa

SEQ ID NO: 19529 - RNA, 32 nt, Homo Sapiens
uuuuuauuauuaaaguauuuuauuuuuagggc

SEQ ID NO: 19530 - RNA, 32 nt, Homo Sapiens
augagacauacugacagaaucuguaagcuaau

SEQ ID NO: 19531 - RNA, 32 nt, Homo Sapiens
auacucaaucccagauuuacaaucggaagccu

SEQ ID NO: 19532 - RNA, 32 nt, Homo Sapiens
aauggcugcaaggggagguucucucucuguuc

SEQ ID NO: 19533 - RNA, 32 nt, Homo Sapiens
acgcaauuugagacuaagauauuguuaucauu

SEQ ID NO: 19534 - RNA, 32 nt, Homo Sapiens
ucuaauucuucaugguggggugucagacauaa

SEQ ID NO: 19535 - RNA, 32 nt, Homo Sapiens
aacuggaccaugagacccccuuccuaaacaau

SEQ ID NO: 19536 - RNA, 32 nt, Homo Sapiens
augaagggugugggguaaaagaugcauaaggc

SEQ ID NO: 19537 - RNA, 32 nt, Homo Sapiens
cacaugggcggggccuucuggaccuucaucag

SEQ ID NO: 19538 - RNA, 31 nt, Homo Sapiens
cccagggcagagguuuuugaagugagcuucc

SEQ ID NO: 19539 - RNA, 32 nt, Homo Sapiens
ccaaggaggcggcguggcgucaugcuccgggg

SEQ ID NO: 19540 - RNA, 32 nt, Homo Sapiens
cccucuacgcucuccuuccucgccagcacgcc

SEQ ID NO: 19541 - RNA, 32 nt, Homo Sapiens
auguuugugcgcguguguggacagucuuaucu

SEQ ID NO: 19542 - RNA, 32 nt, Homo Sapiens
ugcuaccaauuuuaagaauggggagcuguuuu

SEQ ID NO: 19543 - RNA, 32 nt, Homo Sapiens
ccagguucaaucgguuuuccugccucagccuc

SEQ ID NO: 19544 - RNA, 32 nt, Homo Sapiens
augccuggcugauguuuauauguuuuguagag

SEQ ID NO: 19545 - RNA, 32 nt, Homo Sapiens
uuucucccugucaucuuuguacucucucaugu

SEQ ID NO: 19546 - RNA, 32 nt, Homo Sapiens
gggcugugucucccugcagauuggggcucccu

SEQ ID NO: 19547 - RNA, 32 nt, Homo Sapiens
cuuuggacauaccccacgucgaccugucacag

SEQ ID NO: 19548 - RNA, 32 nt, Homo Sapiens
ucucaaacucugauucccacuccacucuucga

SEQ ID NO: 19549 - RNA, 32 nt, Homo Sapiens
agugagcuaucuaugauggcaccacugcacuu

SEQ ID NO: 19550 - RNA, 32 nt, Homo Sapiens
ucuuucagguccugcauacugaugaaacuacu

SEQ ID NO: 19551 - RNA, 32 nt, Homo Sapiens
cuuuguauagaaccucuuugucuacaccauua

SEQ ID NO: 19552 - RNA, 32 nt, Homo Sapiens
gggaucgagggcccggggcggcggcggaguac

SEQ ID NO: 19553 - RNA, 32 nt, Homo Sapiens
cucguugaaauuguuuuccauaaagaacagua

SEQ ID NO: 19554 - RNA, 32 nt, Homo Sapiens
gucuacccacccaagagaaaagacuguuaacu

SEQ ID NO: 19555 - RNA, 31 nt, Homo Sapiens
uggagccaagaggugagugauugauguaucu

SEQ ID NO: 19556 - RNA, 32 nt, Homo Sapiens
ggaucuagguaguuccucaaugccccacgcuc

SEQ ID NO: 19557 - RNA, 32 nt, Homo Sapiens
uuuucuuuuucuuuuucuuuuuuuuuuugaga

SEQ ID NO: 19558 - RNA, 32 nt, Homo Sapiens
gggagcuccuugcuccuccccugcaugauccc

SEQ ID NO: 19559 - RNA, 32 nt, Homo Sapiens
cggagggggcaguggacaaaaccaauccaaag

SEQ ID NO: 19560 - RNA, 32 nt, Homo Sapiens
agccgcgcggccggccggccgacuaggguuug

SEQ ID NO: 19561 - RNA, 32 nt, Homo Sapiens
cauauuuguaaaaacaauuuuugguaaaaugu

SEQ ID NO: 19562 - RNA, 32 nt, Homo Sapiens
uacuccaaggcacacuauuacuucugcaacuc

SEQ ID NO: 19563 - RNA, 32 nt, Homo Sapiens
ucuuggaugcugggcuuuguuaugcuguaauu

SEQ ID NO: 19564 - RNA, 32 nt, Homo Sapiens
uuuuguggugugggaggggaaugcuauggaag

SEQ ID NO: 19565 - RNA, 32 nt, Homo Sapiens
aguuugaaguuuuccuucaugcacuuggugau

SEQ ID NO: 19566 - RNA, 32 nt, Homo Sapiens
cuuuuaauggcaaaguuuuuuuaaaaaguauu

SEQ ID NO: 19567 - RNA, 32 nt, Homo Sapiens
uaggcucuguuccaugagccuguugcagguuu

SEQ ID NO: 19568 - RNA, 32 nt, Homo Sapiens
uuugagagaaaaacagaagggugauggcuaga

SEQ ID NO: 19569 - RNA, 32 nt, Homo Sapiens
ggccgggcacagccuuccugugugguuuuacc

SEQ ID NO: 19570 - RNA, 32 nt, Homo Sapiens
uucaguuguaaauuuuauacugcuucuguaua

SEQ ID NO: 19571 - RNA, 32 nt, Homo Sapiens
ggcagcugggggcaguggcgccaguucccuuc

SEQ ID NO: 19572 - RNA, 32 nt, Homo Sapiens
cacaacagaggagaguuggccacaaaaagaga

SEQ ID NO: 19573 - RNA, 32 nt, Homo Sapiens
acugugucuuaccaagcaggacagacacucgg

SEQ ID NO: 19574 - RNA, 32 nt, Homo Sapiens
gggaggcucccgccgcgcucacuuccugcggg

SEQ ID NO: 19575 - RNA, 32 nt, Homo Sapiens
acacagcgagcacuaaacaaacaucagugucu

SEQ ID NO: 19576 - RNA, 32 nt, Homo Sapiens
ucuccagccugccuggaaaugcugugggcuca

SEQ ID NO: 19577 - RNA, 32 nt, Homo Sapiens
ucugucaaaucuacuccccggaccucaaccau

SEQ ID NO: 19578 - RNA, 32 nt, Homo Sapiens
cgauggcaagguauauuuuuguggaaugaaaa

SEQ ID NO: 19579 - RNA, 32 nt, Homo Sapiens
agacaccagggagccagaccccugccgcuccc

SEQ ID NO: 19580 - RNA, 32 nt, Homo Sapiens
agagcgggggcggggauucagcgcguguaugu

SEQ ID NO: 19581 - RNA, 32 nt, Homo Sapiens
ggacaguugcuguuuucugaaguaaagccucu

SEQ ID NO: 19582 - RNA, 32 nt, Homo Sapiens
cuaagaucgugccguugcacuccagccugggc

SEQ ID NO: 19583 - RNA, 32 nt, Homo Sapiens
ccaagaucgcgccguugcacuccagccugggc

SEQ ID NO: 19584 - RNA, 32 nt, Homo Sapiens
gccugcaccacccaccuccagagugcagugcu

SEQ ID NO: 19585 - RNA, 32 nt, Homo Sapiens
ggucucaaacuccugaacucaagugauaacac

SEQ ID NO: 19586 - RNA, 32 nt, Homo Sapiens
gguaaaguuggaagaauaaaguuaaccaagca

SEQ ID NO: 19587 - RNA, 27 nt, Homo Sapiens
agaaaauaaaaugguuuuuaaagcaua

SEQ ID NO: 19588 - RNA, 32 nt, Homo Sapiens
cacccgagcgcgcgcagccaggugcgcuccuu

SEQ ID NO: 19589 - RNA, 32 nt, Homo Sapiens
uacagcucaaacuuagaacagcuguuguccag

SEQ ID NO: 19590 - RNA, 32 nt, Homo Sapiens
ucagaaacagagcaauaauucugacucauuaa

SEQ ID NO: 19591 - RNA, 32 nt, Homo Sapiens
uacucaucuaguuuuucucaauuuguaguuuu

SEQ ID NO: 19592 - RNA, 32 nt, Homo Sapiens
caaacauacaagcagucucaccucaggcaugu

SEQ ID NO: 19593 - RNA, 32 nt, Homo Sapiens
cuggauugucaguaguauuagaucugaucaag

SEQ ID NO: 19594 - RNA, 32 nt, Homo Sapiens
aaacccgggacuugggggcgcugagccgggcc

SEQ ID NO: 19595 - RNA, 32 nt, Homo Sapiens
cugggguguuugucgcagcggguuuuccucgg

SEQ ID NO: 19596 - RNA, 32 nt, Homo Sapiens
cgcagcgaacgagcagugaccgugcuccuacc

SEQ ID NO: 19597 - RNA, 32 nt, Homo Sapiens
cuauuguagaaaguguacagcauacugacuca

SEQ ID NO: 19598 - RNA, 32 nt, Homo Sapiens
aaugcagugggucugaagauggucaagucugu

SEQ ID NO: 19599 - RNA, 32 nt, Homo Sapiens
auaggcagggcgaauacuacuuuguaacuuuu

SEQ ID NO: 19600 - RNA, 32 nt, Homo Sapiens
aauuccucgcgugcagcaggcgcggaccgccc

SEQ ID NO: 19601 - RNA, 32 nt, Homo Sapiens
uauacugagucuuuuacuuuuguauagcuuga

SEQ ID NO: 19602 - RNA, 32 nt, Homo Sapiens
gaaugggccaaggggacagagacuucacucgg

SEQ ID NO: 19603 - RNA, 32 nt, Homo Sapiens
uauuuuuauaaauuauuuucucauugccauug

SEQ ID NO: 19604 - RNA, 32 nt, Homo Sapiens
gccgccuccugacaagcgggagggauccgcgg

SEQ ID NO: 19605 - RNA, 32 nt, Homo Sapiens
ucaggaagggggcugcagccaacgacgggaaa

SEQ ID NO: 19606 - RNA, 32 nt, Homo Sapiens
ucugaauaaucaauguaaauauuuucuuucaa

SEQ ID NO: 19607 - RNA, 32 nt, Homo Sapiens
aagggggaugauucaccuccauauuuccuaag

SEQ ID NO: 19608 - RNA, 32 nt, Homo Sapiens
cuuagugaagcagucauugggguaacaaugcu

SEQ ID NO: 19609 - RNA, 32 nt, Homo Sapiens
uaacagauucagaaaagugucucaaagcagag

SEQ ID NO: 19610 - RNA, 32 nt, Homo Sapiens
ccucuggagacggggcaucucccucugauuuc

SEQ ID NO: 19611 - RNA, 32 nt, Homo Sapiens
agcucagccuguugaggcauggagcagaguga

SEQ ID NO: 19612 - RNA, 32 nt, Homo Sapiens
gauaaauuuccacuuuacuugucauccccacu

SEQ ID NO: 19613 - RNA, 32 nt, Homo Sapiens
aucuuauaugaaguaaaaaauaaaucagaggu

SEQ ID NO: 19614 - RNA, 29 nt, Homo Sapiens
cagccugggcgacagagggagacucuguc

SEQ ID NO: 19615 - RNA, 29 nt, Homo Sapiens
cagccugggugacagagggagacuccguc

SEQ ID NO: 19616 - RNA, 32 nt, Homo Sapiens
caaaaucuuuugcugccauaacuauuucaguu

SEQ ID NO: 19617 - RNA, 32 nt, Homo Sapiens
gggccuccuguucucagggccuccccccuccc

SEQ ID NO: 19618 - RNA, 32 nt, Homo Sapiens
augcagcagcgggcccgggccaccucacguuu

SEQ ID NO: 19619 - RNA, 32 nt, Homo Sapiens
cucacuuugaggauauugcacuuuuuauauuu

SEQ ID NO: 19620 - RNA, 32 nt, Homo Sapiens
aauuggcuaggauucccguacaguguugaaua

SEQ ID NO: 19621 - RNA, 32 nt, Homo Sapiens
cacguuggaaaacagaagcuauuuucuauccc

SEQ ID NO: 19622 - RNA, 32 nt, Homo Sapiens
uuggugugagagcaggcauauuuggaggggau

SEQ ID NO: 19623 - RNA, 32 nt, Homo Sapiens
gccagcuuugaaaaggcaggaugaaauggaaa

SEQ ID NO: 19624 - RNA, 32 nt, Homo Sapiens
ucauggaaccucuggaaaggacagggaaguug

SEQ ID NO: 19625 - RNA, 32 nt, Homo Sapiens
cgucccuuuggaccauagacgcagcucugauu

SEQ ID NO: 19626 - RNA, 32 nt, Homo Sapiens
cuaucguugcuguugccaccgccuccccacug

SEQ ID NO: 19627 - RNA, 32 nt, Homo Sapiens
gaguucaccucuacucugcccuccucauaguc

SEQ ID NO: 19628 - RNA, 32 nt, Homo Sapiens
agcaaggacagaugaacaaauuccugagucag

SEQ ID NO: 19629 - RNA, 32 nt, Homo Sapiens
acacugauuuuuagcauugucuauuccuauuu

SEQ ID NO: 19630 - RNA, 32 nt, Homo Sapiens
cacccagugcugccgcucgugcucuccgccca

SEQ ID NO: 19631 - RNA, 32 nt, Homo Sapiens
ugaagugaccauauuuucaaggggugaaacca

SEQ ID NO: 19632 - RNA, 32 nt, Homo Sapiens
caagaaaugaauuggaggcaggaagaguccaa

SEQ ID NO: 19633 - RNA, 32 nt, Homo Sapiens
uuaggacuuaaugcuguccacaaauugaggac

SEQ ID NO: 19634 - RNA, 32 nt, Homo Sapiens
cugcaugaggcccucgucuucaguuucuguuu

SEQ ID NO: 19635 - RNA, 32 nt, Homo Sapiens
auaggcugacuucugaauaauugguaucuauu

SEQ ID NO: 19636 - RNA, 32 nt, Homo Sapiens
ugucucggggguaccccggguguaucggccac

SEQ ID NO: 19637 - RNA, 32 nt, Homo Sapiens
caagauggcuaauggaauuaacuuucuccccu

SEQ ID NO: 19638 - RNA, 32 nt, Homo Sapiens
acccccgcaucccacgcccccgccucgcucua

SEQ ID NO: 19639 - RNA, 32 nt, Homo Sapiens
caguguauuucugucauauuccagucccgagu

SEQ ID NO: 19640 - RNA, 32 nt, Homo Sapiens
cgcugcuaggacccgggcagggcuggagcugg

SEQ ID NO: 19641 - RNA, 32 nt, Homo Sapiens
ggagacuggucccaagguuacugcaccacagg

SEQ ID NO: 19642 - RNA, 32 nt, Homo Sapiens
uccucagccaucuuugugaguccuucaagagc

SEQ ID NO: 19643 - RNA, 32 nt, Homo Sapiens
uauaguuuuccacaaccaagccacccuucaca

SEQ ID NO: 19644 - RNA, 32 nt, Homo Sapiens
gagcuuacuuuuauuauuaaauguauugaggu

SEQ ID NO: 19645 - RNA, 32 nt, Homo Sapiens
acccagaccaguaggccggacggaguccaaug

SEQ ID NO: 19646 - RNA, 32 nt, Homo Sapiens
uguuguguaauauaucaucauugcuuuuguaa

SEQ ID NO: 19647 - RNA, 32 nt, Homo Sapiens
cacggucccccgcuucgcccgacuccggccau

SEQ ID NO: 19648 - RNA, 32 nt, Homo Sapiens
ggggaagagcggggaggccggcaccgggauuc

SEQ ID NO: 19649 - RNA, 32 nt, Homo Sapiens
cagccucaauuuuauuugauuuuuaaaauuau

SEQ ID NO: 19650 - RNA, 32 nt, Homo Sapiens
uugaucugacuucucagccucauuuggacuaa

SEQ ID NO: 19651 - RNA, 32 nt, Homo Sapiens
gaauauaaggggguagugggaacagugguacu

SEQ ID NO: 19652 - RNA, 32 nt, Homo Sapiens
ugaugguauuuguucaaugaugauacagaacc

SEQ ID NO: 19653 - RNA, 32 nt, Homo Sapiens
cccuccacccugccuccucgggcuccacucgu

SEQ ID NO: 19654 - RNA, 32 nt, Homo Sapiens
agcagccuguugagcugguucuccagggcugc

SEQ ID NO: 19655 - RNA, 31 nt, Homo Sapiens
ugaagagagcacugccucccugugugacugg

SEQ ID NO: 19656 - RNA, 31 nt, Homo Sapiens
gcgccugauuaggucucaggagucaauucgg

SEQ ID NO: 19657 - RNA, 32 nt, Homo Sapiens
guccaacuuugcugucuguucuuccaaauguu

SEQ ID NO: 19658 - RNA, 32 nt, Homo Sapiens
gaagcuccccucuuccucucuuccuccaggga

SEQ ID NO: 19659 - RNA, 32 nt, Homo Sapiens
aagagguggaggaggaggggccagggcagucg

SEQ ID NO: 19660 - RNA, 32 nt, Homo Sapiens
ucaaaacaaaauguauuuuuagaauuacggca

SEQ ID NO: 19661 - RNA, 32 nt, Homo Sapiens
auaccggacuugucacacggaccucgggcuag

SEQ ID NO: 19662 - RNA, 32 nt, Homo Sapiens
auuacuuaaaaauaaaaauaugaccaauuggu

SEQ ID NO: 19663 - RNA, 32 nt, Homo Sapiens
cccuggcagggccagcuaggccugugguuccc

SEQ ID NO: 19664 - RNA, 32 nt, Homo Sapiens
gcugagacccccagcccgcccccucgggcucc

SEQ ID NO: 19665 - RNA, 32 nt, Homo Sapiens
uggacucggccccucuguuccccaggccccac

SEQ ID NO: 19666 - RNA, 32 nt, Homo Sapiens
caaaaaaauuuuucuuuuuuuaacugcaauaa

SEQ ID NO: 19667 - RNA, 32 nt, Homo Sapiens
cuacagaggguaguuagaaaaaucauaacuua

SEQ ID NO: 19668 - RNA, 32 nt, Homo Sapiens
cuaaaaauguacaaagguuuuauauugucaua

SEQ ID NO: 19669 - RNA, 32 nt, Homo Sapiens
ggaggggacgggguggagacuggccaugucgg

SEQ ID NO: 19670 - RNA, 32 nt, Homo Sapiens
ccucucuuuucuuuccaaauaucccaggaagu

SEQ ID NO: 19671 - RNA, 32 nt, Homo Sapiens
ugugcuccggggauccugucuugaugacacuu

SEQ ID NO: 19672 - RNA, 32 nt, Homo Sapiens
accauaaacuuacagcucuaaaauucagaaag

SEQ ID NO: 19673 - RNA, 32 nt, Homo Sapiens
ggagugacuccugucccggccuggugugagug

SEQ ID NO: 19674 - RNA, 31 nt, Homo Sapiens
gccugccuuggcuaagcaugaguuaagcagc

SEQ ID NO: 19675 - RNA, 32 nt, Homo Sapiens
agccauaguguguguuuagaccacagcggaug

SEQ ID NO: 19676 - RNA, 32 nt, Homo Sapiens
cacagagucaaaggaacacuagaauccccacc

SEQ ID NO: 19677 - RNA, 32 nt, Homo Sapiens
uuugugauggugaugaugaugaaagcaguaau

SEQ ID NO: 19678 - RNA, 32 nt, Homo Sapiens
auccaaacccucacgaccugcaaggggccagc

SEQ ID NO: 19679 - RNA, 32 nt, Homo Sapiens
agcaggcccagcuggagauuuccugguggcug

SEQ ID NO: 19680 - RNA, 32 nt, Homo Sapiens
gccacccagcaagagcagcaugucagccugcc

SEQ ID NO: 19681 - RNA, 32 nt, Homo Sapiens
acuggcugccugcuccuucucgauaauagccg

SEQ ID NO: 19682 - RNA, 32 nt, Homo Sapiens
auuuguauauguuuuauuucuuucucuugccu

SEQ ID NO: 19683 - RNA, 32 nt, Homo Sapiens
uuguugucugguuuuuuuguuuguuuguuuau

SEQ ID NO: 19684 - RNA, 29 nt, Homo Sapiens
ccaggaaagugcugcugaggcaagucgac

SEQ ID NO: 19685 - RNA, 32 nt, Homo Sapiens
auaaaguaguucuuuuauaacaaaugaaaagu

SEQ ID NO: 19686 - RNA, 32 nt, Homo Sapiens
cagcauccuaugaacugaaagagcagccgccg

SEQ ID NO: 19687 - RNA, 32 nt, Homo Sapiens
agccacaggcccaccccuccccacucccugau

SEQ ID NO: 19688 - RNA, 32 nt, Homo Sapiens
cauucuuuuuucauaugaaaucuuugaaaucc

SEQ ID NO: 19689 - RNA, 32 nt, Homo Sapiens
uuucccagccaaaugucugugcucucuguguc

SEQ ID NO: 19690 - RNA, 32 nt, Homo Sapiens
uauuuaucuuugaucuucugaauggauugcug

SEQ ID NO: 19691 - RNA, 32 nt, Homo Sapiens
gaucuagaauuagaucuuuguauuuuuaaugc

SEQ ID NO: 19692 - RNA, 32 nt, Homo Sapiens
gucccaguccuggaugccuccuccuacuggug

SEQ ID NO: 19693 - RNA, 32 nt, Homo Sapiens
cggccggcgcucuccuccuccucgcagcaguc

SEQ ID NO: 19694 - RNA, 32 nt, Homo Sapiens
gaagaaaguauuucaaggagagugaugauucu

SEQ ID NO: 19695 - RNA, 32 nt, Homo Sapiens
gcuuccuccagaccucucggcgcgggugagcc

SEQ ID NO: 19696 - RNA, 32 nt, Homo Sapiens
acccauuucaacugccuauucagagcaugcag

SEQ ID NO: 19697 - RNA, 32 nt, Homo Sapiens
gcugccaagaaaacggcugugcuuguucuuaa

SEQ ID NO: 19698 - RNA, 32 nt, Homo Sapiens
auuuuuuuuuuuuuuuuuuuuaagaaaaacaa

SEQ ID NO: 19699 - RNA, 32 nt, Homo Sapiens
guuacccgcagcggccggggguccggggagug

SEQ ID NO: 19700 - RNA, 32 nt, Homo Sapiens
agccugggcaagcgccagcuccccucagggcu

SEQ ID NO: 19701 - RNA, 32 nt, Homo Sapiens
aaagauuaaauggaccaugauacucuucuuca

SEQ ID NO: 19702 - RNA, 32 nt, Homo Sapiens
uacauccuccugcuaacuaucacuucaguugg

SEQ ID NO: 19703 - RNA, 32 nt, Homo Sapiens
uugcugcucaugguucugucuguccgugcacc

SEQ ID NO: 19704 - RNA, 32 nt, Homo Sapiens
caccccgggaccuguaggaucccugaagccag

SEQ ID NO: 19705 - RNA, 32 nt, Homo Sapiens
ccccauguccuccgcuccgcccggcccccuag

SEQ ID NO: 19706 - RNA, 32 nt, Homo Sapiens
acgaagcaccuuccuuuccccaucucugucug

SEQ ID NO: 19707 - RNA, 32 nt, Homo Sapiens
uugcacccacuuucacuuccuauauccuuaac

SEQ ID NO: 19708 - RNA, 32 nt, Homo Sapiens
cugugauuucugcaacugaggaccuaauuaug

SEQ ID NO: 19709 - RNA, 32 nt, Homo Sapiens
cugauaguuuuuacaaaaagcuugguuuaagu

SEQ ID NO: 19710 - RNA, 32 nt, Homo Sapiens
uuuucuagugaacaggugguugauuugcugag

SEQ ID NO: 19711 - RNA, 32 nt, Homo Sapiens
uaguguaaaaauucccugagcuaagcuaaaac

SEQ ID NO: 19712 - RNA, 32 nt, Homo Sapiens
acgccccugcuccaggcccccggggggccgca

SEQ ID NO: 19713 - RNA, 32 nt, Homo Sapiens
ggcugcuggucucuucucuccucuuccauaag

SEQ ID NO: 19714 - RNA, 32 nt, Homo Sapiens
gggcccaccuagccuuucccugcugcccaacu

SEQ ID NO: 19715 - RNA, 32 nt, Homo Sapiens
agcuuaucuugggggaggauucgagggucaca

SEQ ID NO: 19716 - RNA, 32 nt, Homo Sapiens
uggcagggaaggaaaauagcuugaauguuggu

SEQ ID NO: 19717 - RNA, 32 nt, Homo Sapiens
cuuuagucuaaagaauugagacuaccguaauu

SEQ ID NO: 19718 - RNA, 32 nt, Homo Sapiens
uggauguuuuuaauuuuuuuuaaauaucagga

SEQ ID NO: 19719 - RNA, 29 nt, Homo Sapiens
gauggugugacuuuuucauugcuuggaag

SEQ ID NO: 19720 - RNA, 32 nt, Homo Sapiens
gugaaagucaguguugcugugcaugcgcugau

SEQ ID NO: 19721 - RNA, 32 nt, Homo Sapiens
uucuaauaauauugguaauauucucaugguua

SEQ ID NO: 19722 - RNA, 32 nt, Homo Sapiens
ccuugucucuaaaaacaaaacaaaacaaacaa

SEQ ID NO: 19723 - RNA, 32 nt, Homo Sapiens
guuuuuucuucuuaguucugcauuagaaaugg

SEQ ID NO: 19724 - RNA, 32 nt, Homo Sapiens
ggagcacccucgcuccucuccuggcuacuagc

SEQ ID NO: 19725 - RNA, 32 nt, Homo Sapiens
cucguauuucuggaaacagccagugcaggagu

SEQ ID NO: 19726 - RNA, 32 nt, Homo Sapiens
auuugugugagauuuauggaaauacacuaaau

SEQ ID NO: 19727 - RNA, 32 nt, Homo Sapiens
ucaugaaagauaccaugagccaauuaaaaucu

SEQ ID NO: 19728 - RNA, 32 nt, Homo Sapiens
uuuuuuuucuuuucuuuuuuguacauuuuuaa

SEQ ID NO: 19729 - RNA, 32 nt, Homo Sapiens
aaagugcaguggaugaacuaaaaggaauacug

SEQ ID NO: 19730 - RNA, 32 nt, Homo Sapiens
auauagugggucuguaauggaaaucugucaau

SEQ ID NO: 19731 - RNA, 32 nt, Homo Sapiens
uggcuccuggcugcgucagccucccccacccc

SEQ ID NO: 19732 - RNA, 32 nt, Homo Sapiens
ggcagaagcaaugguauugguuauagugucuu

SEQ ID NO: 19733 - RNA, 32 nt, Homo Sapiens
cuucccagccugggauccuucgugcuucaagg

SEQ ID NO: 19734 - RNA, 32 nt, Homo Sapiens
gguuuuuggaauccggaugcuguugaagggca

SEQ ID NO: 19735 - RNA, 32 nt, Homo Sapiens
cuagggcugugguggcccuccuccccaucgau

SEQ ID NO: 19736 - RNA, 32 nt, Homo Sapiens
ucuacaggccuuguaccucuccaggccgauuu

SEQ ID NO: 19737 - RNA, 31 nt, Homo Sapiens
gccauggcaaguccaucuggaguccaggaag

SEQ ID NO: 19738 - RNA, 32 nt, Homo Sapiens
uaauacugaccauuuuaguccccuagguuuga

SEQ ID NO: 19739 - RNA, 32 nt, Homo Sapiens
cuuauuuuguauccugaugaggcauuucuuac

SEQ ID NO: 19740 - RNA, 27 nt, Homo Sapiens
uucaguccuuucuucagcuaaugauua

SEQ ID NO: 19741 - RNA, 32 nt, Homo Sapiens
agacuuauuuauuugcaggaacaaauggugcc

SEQ ID NO: 19742 - RNA, 32 nt, Homo Sapiens
uuggagagugagaauuuuugcauuauguaaaa

SEQ ID NO: 19743 - RNA, 32 nt, Homo Sapiens
gagaugauucagaggucacuucauuuuuauua

SEQ ID NO: 19744 - RNA, 31 nt, Homo Sapiens
ucccagcagcgcacacaguggagggaugagg

SEQ ID NO: 19745 - RNA, 32 nt, Homo Sapiens
ugguggguaguccuggcucaccccccucaugg

SEQ ID NO: 19746 - RNA, 32 nt, Homo Sapiens
uccaggaggggaaugcugguauccccauaugu

SEQ ID NO: 19747 - RNA, 30 nt, Homo Sapiens
uccugguggggcgcauggcaucggaauccu

SEQ ID NO: 19748 - RNA, 32 nt, Homo Sapiens
gccuucuggccggcugcgugcagagcccacug

SEQ ID NO: 19749 - RNA, 32 nt, Homo Sapiens
aauuagccgggcguuguggcgggcaccuggag

SEQ ID NO: 19750 - RNA, 32 nt, Homo Sapiens
agaggcauuauguacaaauauguaaguaguuu

SEQ ID NO: 19751 - RNA, 29 nt, Homo Sapiens
ucauuuaaauacauuuuguuuugguaaau

SEQ ID NO: 19752 - RNA, 31 nt, Homo Sapiens
aaaaccaaacacaccaccuuccuugauccca

SEQ ID NO: 19753 - RNA, 32 nt, Homo Sapiens
cuuuuuaaaaauuuaacaugauugcuuuucuc

SEQ ID NO: 19754 - RNA, 32 nt, Homo Sapiens
agguugcauacuaacuuaagcauucaugucac

SEQ ID NO: 19755 - RNA, 32 nt, Homo Sapiens
uugcauguuguaaucaaacgaaugucaaaaca

SEQ ID NO: 19756 - RNA, 32 nt, Homo Sapiens
acagugaaaaauguuugcugacccuugacauu

SEQ ID NO: 19757 - RNA, 32 nt, Homo Sapiens
uugaguuuuucaucaaaauaaaauuccauugu

SEQ ID NO: 19758 - RNA, 32 nt, Homo Sapiens
cugagaauccuccaugugccaaguacuguuca

SEQ ID NO: 19759 - RNA, 32 nt, Homo Sapiens
acacagagcgccccgcagucuucgcggaaagc

SEQ ID NO: 19760 - RNA, 32 nt, Homo Sapiens
ugucuuaucuuccauugagcugcaucugauga

SEQ ID NO: 19761 - RNA, 32 nt, Homo Sapiens
agaaacugaaauaaagccuuugaaaaaaaaau

SEQ ID NO: 19762 - RNA, 32 nt, Homo Sapiens
aguacucggccacaccauggggcgcccacugc

SEQ ID NO: 19763 - RNA, 32 nt, Homo Sapiens
ccauaggcaaaauugcaacaugcuuagaauug

SEQ ID NO: 19764 - RNA, 32 nt, Homo Sapiens
uuugccuauaaacagugaacuuaauauguuuc

SEQ ID NO: 19765 - RNA, 32 nt, Homo Sapiens
ugcugcauuucucagcugggcaguaaucaauu

SEQ ID NO: 19766 - RNA, 32 nt, Homo Sapiens
uaagcugcuucugccgccgccggccgccuggg

SEQ ID NO: 19767 - RNA, 32 nt, Homo Sapiens
gacaguuaauacugagugucaacuugauuggg

SEQ ID NO: 19768 - RNA, 32 nt, Homo Sapiens
uauguggaaaagacauuuccacauaaaaauau

SEQ ID NO: 19769 - RNA, 32 nt, Homo Sapiens
cgugguggccccagcggccugggcguuggcug

SEQ ID NO: 19770 - RNA, 32 nt, Homo Sapiens
agaccaaaacacacuucuccagcaacacucca

SEQ ID NO: 19771 - RNA, 32 nt, Homo Sapiens
gaaauucuggcauugcuucucaucaccagaag

SEQ ID NO: 19772 - RNA, 32 nt, Homo Sapiens
ccaauaaaauaaaagcacuuauggaaaaaaaa

SEQ ID NO: 19773 - RNA, 32 nt, Homo Sapiens
aagauaaugaccagacaaauaggucgauuguc

SEQ ID NO: 19774 - RNA, 32 nt, Homo Sapiens
uuagaacucugaucagguacuacaucaaccaa

SEQ ID NO: 19775 - RNA, 32 nt, Homo Sapiens
cauauuucuuugauacuugaaauagagggagc

SEQ ID NO: 19776 - RNA, 32 nt, Homo Sapiens
agcggcggccuggcccuuccagagggccagag

SEQ ID NO: 19777 - RNA, 32 nt, Homo Sapiens
auuaucuaaaagaugcugcugaacagaaguuu

SEQ ID NO: 19778 - RNA, 32 nt, Homo Sapiens
acagaccuuccacuuucucuucagaauaagua

SEQ ID NO: 19779 - RNA, 32 nt, Homo Sapiens
gggcagggagagauccggggaggaguugcacu

SEQ ID NO: 19780 - RNA, 32 nt, Homo Sapiens
gaagacauggcccgguggggccccaccuugcu

SEQ ID NO: 19781 - RNA, 32 nt, Homo Sapiens
cccuugcugcaacacuguucucuucuucucua

SEQ ID NO: 19782 - RNA, 32 nt, Homo Sapiens
caguuagaggauguuccucuuggugaccucau

SEQ ID NO: 19783 - RNA, 32 nt, Homo Sapiens
cugaagacacaguggauauuuugggccagaug

SEQ ID NO: 19784 - RNA, 32 nt, Homo Sapiens
guucugaaugguucacugcagcuccugucaca

SEQ ID NO: 19785 - RNA, 32 nt, Homo Sapiens
cagaccugcccccaguucaguacuugaccaca

SEQ ID NO: 19786 - RNA, 30 nt, Homo Sapiens
ccugcucucuacccagcccaucuugccucc

SEQ ID NO: 19787 - RNA, 32 nt, Homo Sapiens
caaccguccccggccccugccccgcccccaag

SEQ ID NO: 19788 - RNA, 32 nt, Homo Sapiens
uaaaguaaaaggaaacaguacacuuggagcua

SEQ ID NO: 19789 - RNA, 29 nt, Homo Sapiens
ugaaucugguugaucagaggcaagugugg

SEQ ID NO: 19790 - RNA, 29 nt, Homo Sapiens
uguagcauggugaugucuagauucauacu

SEQ ID NO: 19791 - RNA, 32 nt, Homo Sapiens
uuguauuaugauuuuuaaucaaaaucaauaga

SEQ ID NO: 19792 - RNA, 32 nt, Homo Sapiens
agcucugcggcuacacgcggaccucggcugug

SEQ ID NO: 19793 - RNA, 32 nt, Homo Sapiens
agccaccggccgcucccggcaccaggggacgc

SEQ ID NO: 19794 - RNA, 32 nt, Homo Sapiens
agugauugauucccuuuguugcuugagggcca

SEQ ID NO: 19795 - RNA, 32 nt, Homo Sapiens
gguugggaccucuacagcuucauucuuucaca

SEQ ID NO: 19796 - RNA, 32 nt, Homo Sapiens
uccugccuuuaccccaccugggcccaguuccu

SEQ ID NO: 19797 - RNA, 32 nt, Homo Sapiens
uucaggagggacuagaaagagaagggggugau

SEQ ID NO: 19798 - RNA, 32 nt, Homo Sapiens
cgagggcgcgcccugacggacuggccgagccg

SEQ ID NO: 19799 - RNA, 32 nt, Homo Sapiens
gacuucaaaaauaugggaacacaguuaguuau

SEQ ID NO: 19800 - RNA, 32 nt, Homo Sapiens
uuggaagagaaaugcaggccauaugugcgcau

SEQ ID NO: 19801 - RNA, 32 nt, Homo Sapiens
ugcuucuaaugggaaagggcaccacucuccuc

SEQ ID NO: 19802 - RNA, 32 nt, Homo Sapiens
cggugggguuccagggcgccccgaggacaggg

SEQ ID NO: 19803 - RNA, 32 nt, Homo Sapiens
ccccuucccugccuguuucugggacuucagau

SEQ ID NO: 19804 - RNA, 32 nt, Homo Sapiens
gggaagaacaaggcccugagggguuggucuac

SEQ ID NO: 19805 - RNA, 32 nt, Homo Sapiens
ucaauuuagguaugccccacuaacuuaaacac

SEQ ID NO: 19806 - RNA, 32 nt, Homo Sapiens
aguuucuccaugaauugugaugcuuugcuaca

SEQ ID NO: 19807 - RNA, 30 nt, Homo Sapiens
ggaugguggguuguggcgccggcggcggcu

SEQ ID NO: 19808 - RNA, 30 nt, Homo Sapiens
ugauggggagguggccagcuccaggcccug

SEQ ID NO: 19809 - RNA, 32 nt, Homo Sapiens
gcuggccgccuucauggaggcaucauggcaga

SEQ ID NO: 19810 - RNA, 32 nt, Homo Sapiens
cccucaccagugcucaugcacugccuguuuuu

SEQ ID NO: 19811 - RNA, 32 nt, Homo Sapiens
aacauuggcaccucaaugauaaagaaauuuaa

SEQ ID NO: 19812 - RNA, 32 nt, Homo Sapiens
gacgcuucaaggaaaccaaugacaaagcagcg

SEQ ID NO: 19813 - RNA, 32 nt, Homo Sapiens
cgggcuugcgcggcgcggagagggaggcgccc

SEQ ID NO: 19814 - RNA, 32 nt, Homo Sapiens
ggcuccgcagugccgccgccgucgcccgggag

SEQ ID NO: 19815 - RNA, 32 nt, Homo Sapiens
cuugcauugccugccuggcccccuguccucuc

SEQ ID NO: 19816 - RNA, 32 nt, Homo Sapiens
ggccagaucuacauuaggaaaaguauaagccc

SEQ ID NO: 19817 - RNA, 32 nt, Homo Sapiens
gaaagaccaaaauaacuuuccaagaugaaaag

SEQ ID NO: 19818 - RNA, 32 nt, Homo Sapiens
gcccucccacacugcccucccugccccggccc

SEQ ID NO: 19819 - RNA, 32 nt, Homo Sapiens
cgaguggacaaagcaauuacuagaagaguugg

SEQ ID NO: 19820 - RNA, 32 nt, Homo Sapiens
cugcauaauguggaaacugaccucaagaugac

SEQ ID NO: 19821 - RNA, 32 nt, Homo Sapiens
cccuuuugugcuuuuaaaaaucuuauacacac

SEQ ID NO: 19822 - RNA, 32 nt, Homo Sapiens
cccaggaggagcugggccugcaauaguggggg

SEQ ID NO: 19823 - RNA, 32 nt, Homo Sapiens
ggcuuggcaggcagucugucgcugcucaugga

SEQ ID NO: 19824 - RNA, 32 nt, Homo Sapiens
gaaauuccagcaugcaagcucagaaccaacac

SEQ ID NO: 19825 - RNA, 32 nt, Homo Sapiens
gugauguuguuugggagagugcaguaguaauu

SEQ ID NO: 19826 - RNA, 32 nt, Homo Sapiens
uggaggguauagaugagugaacaucaacaaac

SEQ ID NO: 19827 - RNA, 32 nt, Homo Sapiens
cugccucccggccuccucuccgggcccagcuc

SEQ ID NO: 19828 - RNA, 32 nt, Homo Sapiens
gcggccgaagcguggggcgcgcgugcggagga

SEQ ID NO: 19829 - RNA, 32 nt, Homo Sapiens
gaauagagggaagagaaaucaaaggggcucuc

SEQ ID NO: 19830 - RNA, 32 nt, Homo Sapiens
uuccccuauguccaaugacuguagacgggcug

SEQ ID NO: 19831 - RNA, 32 nt, Homo Sapiens
caccaggauauuuggaaguaacuucacauaug

SEQ ID NO: 19832 - RNA, 32 nt, Homo Sapiens
uguugacugacgagccgagggguggccgcucc

SEQ ID NO: 19833 - RNA, 32 nt, Homo Sapiens
cuguccaugagcauacaacauugaauacaauu

SEQ ID NO: 19834 - RNA, 32 nt, Homo Sapiens
cuaccccucacagaagccaagggcauggagga

SEQ ID NO: 19835 - RNA, 32 nt, Homo Sapiens
ggcgugggucccggcgucucagccucgcgcuc

SEQ ID NO: 19836 - RNA, 32 nt, Homo Sapiens
gacacacacaucacagcuugacucacuaacug

SEQ ID NO: 19837 - RNA, 32 nt, Homo Sapiens
aacugugucucuucuuaguucaucuagguuuu

SEQ ID NO: 19838 - RNA, 32 nt, Homo Sapiens
uugagucuguacugaggaccagccuguacaug

SEQ ID NO: 19839 - RNA, 32 nt, Homo Sapiens
uugacuuucuucaucacugcaacauuucucug

SEQ ID NO: 19840 - RNA, 32 nt, Homo Sapiens
cagaacagaacaugugccaaugggcgaucuug

SEQ ID NO: 19841 - RNA, 32 nt, Homo Sapiens
aaacaauguuuccaacuuaaaaucaaucucau

SEQ ID NO: 19842 - RNA, 32 nt, Homo Sapiens
caccgcccgcgcugcgcgcccggaggagcgac

SEQ ID NO: 19843 - RNA, 32 nt, Homo Sapiens
ccgcccauuccuggcccucccgcugcaucuca

SEQ ID NO: 19844 - RNA, 30 nt, Homo Sapiens
uaaucuguaauuccugccuauuauucucag

SEQ ID NO: 19845 - RNA, 32 nt, Homo Sapiens
aagagccuaucaauguaucuuuuguacaauau

SEQ ID NO: 19846 - RNA, 32 nt, Homo Sapiens
aucuuuuguuuuauuaaaaauaauuagugaaa

SEQ ID NO: 19847 - RNA, 32 nt, Homo Sapiens
uuucuaaaucaucaauauuugcuugucuuugc

SEQ ID NO: 19848 - RNA, 32 nt, Homo Sapiens
aaacuuuuuuucugaacuucucgaaaguuugc

SEQ ID NO: 19849 - RNA, 27 nt, Homo Sapiens
uucauguccuucugcaguugcucugua

SEQ ID NO: 19850 - RNA, 32 nt, Homo Sapiens
cugugaccgggagcugcccccggacccgggca

SEQ ID NO: 19851 - RNA, 32 nt, Homo Sapiens
gcagagagggaugccuagggcggggugggcag

SEQ ID NO: 19852 - RNA, 32 nt, Homo Sapiens
gagcagaggagacccgugggcugggauuccac

SEQ ID NO: 19853 - RNA, 32 nt, Homo Sapiens
uguuuggucacaaauaaaaacaaaauucauuu

SEQ ID NO: 19854 - RNA, 32 nt, Homo Sapiens
ugcauuuauuuucuccggugcuaugacaucug

SEQ ID NO: 19855 - RNA, 32 nt, Homo Sapiens
ggggaucagggccagcccucauauucacccug

SEQ ID NO: 19856 - RNA, 32 nt, Homo Sapiens
aaccuugacuucugcccaaauccccucccugu

SEQ ID NO: 19857 - RNA, 32 nt, Homo Sapiens
guagaugaugagaagaaauguuaaagugcuuu

SEQ ID NO: 19858 - RNA, 32 nt, Homo Sapiens
aucgugcugguaaccuuguugucugcagaaga

SEQ ID NO: 19859 - RNA, 32 nt, Homo Sapiens
ugcaaugggagacaucagagacuuuaaaaaua

SEQ ID NO: 19860 - RNA, 31 nt, Homo Sapiens
cgauagcagcgcacugcaaccuggaccuccu

SEQ ID NO: 19861 - RNA, 32 nt, Homo Sapiens
acucagugcccucuggugaccacacauaccau

SEQ ID NO: 19862 - RNA, 32 nt, Homo Sapiens
uagcuuacaacuucaugggaacugccacugca

SEQ ID NO: 19863 - RNA, 32 nt, Homo Sapiens
agggggagccugggugcagcagagacagagga

SEQ ID NO: 19864 - RNA, 32 nt, Homo Sapiens
aauggagucucacucugucacccaggcuggag

SEQ ID NO: 19865 - RNA, 32 nt, Homo Sapiens
ucucgucuuccagcgugccgcucaguuccccg

SEQ ID NO: 19866 - RNA, 32 nt, Homo Sapiens
cucugaucuggggucugagucaucuccuccua

SEQ ID NO: 19867 - RNA, 32 nt, Homo Sapiens
uuuaggauucaaacagaaagaaaugacuaugg

SEQ ID NO: 19868 - RNA, 32 nt, Homo Sapiens
caccuccuaccccuuccuguccugccuccuca

SEQ ID NO: 19869 - RNA, 32 nt, Homo Sapiens
ucuuuccaacuuuucaugauuuuuaugagcac

SEQ ID NO: 19870 - RNA, 29 nt, Homo Sapiens
cuuacaguauguauguauguauguaugga

SEQ ID NO: 19871 - RNA, 32 nt, Homo Sapiens
gaagcaaauggcaaaaccaguagcuucccaaa

SEQ ID NO: 19872 - RNA, 32 nt, Homo Sapiens
cgucucaacacagauagaugaaaaauuaugcu

SEQ ID NO: 19873 - RNA, 32 nt, Homo Sapiens
auaaauauaccauauauagggauuguaaacua

SEQ ID NO: 19874 - RNA, 32 nt, Homo Sapiens
cucauucugaugcccagguuggggugcagugg

SEQ ID NO: 19875 - RNA, 32 nt, Homo Sapiens
uaaaaaugucugcagagcuuaguguucagcca

SEQ ID NO: 19876 - RNA, 32 nt, Homo Sapiens
uuccacagcuguggggcuucuagacaggacag

SEQ ID NO: 19877 - RNA, 32 nt, Homo Sapiens
augucauucagcgcacacgcggacgccaaggg

SEQ ID NO: 19878 - RNA, 32 nt, Homo Sapiens
ccuacaccggguuccggggacccggccgccag

SEQ ID NO: 19879 - RNA, 32 nt, Homo Sapiens
acuggacccccuccccagggggagggggugcc

SEQ ID NO: 19880 - RNA, 32 nt, Homo Sapiens
acuggugaagguauuaucaauuuauucuacuu

SEQ ID NO: 19881 - RNA, 32 nt, Homo Sapiens
cuccgggaaugaauuccucaugaaaaugacca

SEQ ID NO: 19882 - RNA, 32 nt, Homo Sapiens
gaacugacucaggaggcagagaagaugggcau

SEQ ID NO: 19883 - RNA, 32 nt, Homo Sapiens
gacucccaccuccccacccccauguacuucuu

SEQ ID NO: 19884 - RNA, 32 nt, Homo Sapiens
caugauggcacauggaaugacaaucagcuaca

SEQ ID NO: 19885 - RNA, 32 nt, Homo Sapiens
acagaggagaacaugcacgcagcagagaucau

SEQ ID NO: 19886 - RNA, 32 nt, Homo Sapiens
uaauauugcuucuuguguuuuacugucagauu

SEQ ID NO: 19887 - RNA, 32 nt, Homo Sapiens
aguguggggguucaggaauauguaucuaacaa

SEQ ID NO: 19888 - RNA, 32 nt, Homo Sapiens
cacuacuugcccuaccucuccucuccuguuac

SEQ ID NO: 19889 - RNA, 32 nt, Homo Sapiens
ugguggugauagugucccaguacaaaaaggcu

SEQ ID NO: 19890 - RNA, 32 nt, Homo Sapiens
gaagauagauaaaaaaugauguaauugcagcu

SEQ ID NO: 19891 - RNA, 32 nt, Homo Sapiens
cauugcacuccagccugggugacagugagacu

SEQ ID NO: 19892 - RNA, 32 nt, Homo Sapiens
cacucccgcguccaccucucccucccugcuuc

SEQ ID NO: 19893 - RNA, 32 nt, Homo Sapiens
cacuccggcccggcucccgccucggccccgau

SEQ ID NO: 19894 - RNA, 32 nt, Homo Sapiens
aaacaacaagguggugugaucuuaauauauuu

SEQ ID NO: 19895 - RNA, 32 nt, Homo Sapiens
aagauugccgggguaggcagggggaggagaac

SEQ ID NO: 19896 - RNA, 32 nt, Homo Sapiens
cacaugccaaugcacgcacacaucagugcaca

SEQ ID NO: 19897 - RNA, 32 nt, Homo Sapiens
gccaggaggagcugaggcugcagaccccagca

SEQ ID NO: 19898 - RNA, 32 nt, Homo Sapiens
caguauuaauucuuuuuuuuuaaaguaaauau

SEQ ID NO: 19899 - RNA, 32 nt, Homo Sapiens
uccauuuaauauuuuaaaauggaauugccaag

SEQ ID NO: 19900 - RNA, 32 nt, Homo Sapiens
agaaaguguagcuugaguuugcuggcagcaca

SEQ ID NO: 19901 - RNA, 32 nt, Homo Sapiens
cuuguauauggaccccugagaaugagcaauug

SEQ ID NO: 19902 - RNA, 32 nt, Homo Sapiens
aguguucaggacuuuuauaccuguuauacuuu

SEQ ID NO: 19903 - RNA, 32 nt, Homo Sapiens
acgauuuuuugaugaacuuacaaaagaaaagg

SEQ ID NO: 19904 - RNA, 32 nt, Homo Sapiens
gcaccugacaugagggcggggaccccgaaaug

SEQ ID NO: 19905 - RNA, 32 nt, Homo Sapiens
auauagugaugaugaugcacuuuaaaaugaua

SEQ ID NO: 19906 - RNA, 32 nt, Homo Sapiens
auauuuuaaaaagagagugcaaguacauuaag

SEQ ID NO: 19907 - RNA, 32 nt, Homo Sapiens
cgcccaagggguucaccuugccugcugccuag

SEQ ID NO: 19908 - RNA, 30 nt, Homo Sapiens
uugccaugggccgccgccccgccuguuguu

SEQ ID NO: 19909 - RNA, 32 nt, Homo Sapiens
acgcaucuuuaacuuuucacguccuauguuug

SEQ ID NO: 19910 - RNA, 32 nt, Homo Sapiens
auuaaaauuggggauuaauuuuagaguucuuc

SEQ ID NO: 19911 - RNA, 29 nt, Homo Sapiens
ucaugcucacuuuugugaaagcugcucug

SEQ ID NO: 19912 - RNA, 32 nt, Homo Sapiens
ccacuucugagcacccauguggcacccacugc

SEQ ID NO: 19913 - RNA, 32 nt, Homo Sapiens
cuucugcaccccggggugaggccuccugccug

SEQ ID NO: 19914 - RNA, 32 nt, Homo Sapiens
gaauaucuaaaaaacuacauuuaguuuauuuu

SEQ ID NO: 19915 - RNA, 32 nt, Homo Sapiens
cccgugggggccggugaguuugaguuccugag

SEQ ID NO: 19916 - RNA, 32 nt, Homo Sapiens
gagaugcuuauuaugacuauuaucauuucuga

SEQ ID NO: 19917 - RNA, 32 nt, Homo Sapiens
uucccucugcugugccacggcuguugcuucgg

SEQ ID NO: 19918 - RNA, 32 nt, Homo Sapiens
cuuuacauacccagaaucaucaguaugucacu

SEQ ID NO: 19919 - RNA, 32 nt, Homo Sapiens
aagugguguuuccucaccgauggagaauuacu

SEQ ID NO: 19920 - RNA, 31 nt, Homo Sapiens
ugccuguaaucccagaacuuugggaggccga

SEQ ID NO: 19921 - RNA, 32 nt, Homo Sapiens
aguuuggaggggcucacugccacuggguacuc

SEQ ID NO: 19922 - RNA, 32 nt, Homo Sapiens
guggggagaugaauuaaccuaauuaugcuaua

SEQ ID NO: 19923 - RNA, 32 nt, Homo Sapiens
ccaccuggacgaagagcaggccagcccggacc

SEQ ID NO: 19924 - RNA, 32 nt, Homo Sapiens
cagcaggcgaggaggaagauggcgggacggcu

SEQ ID NO: 19925 - RNA, 32 nt, Homo Sapiens
aguccccgucccggaacucccgggccuguccu

SEQ ID NO: 19926 - RNA, 32 nt, Homo Sapiens
ucgccgccaagcccaggcugcuggagccaggc

SEQ ID NO: 19927 - RNA, 32 nt, Homo Sapiens
guccucgggggguggggccccagccgagauca

SEQ ID NO: 19928 - RNA, 32 nt, Homo Sapiens
uugcuguaacaagcacacuauuuauaugcccu

SEQ ID NO: 19929 - RNA, 32 nt, Homo Sapiens
acguacggagcccgcaagucccggcccgaggu

SEQ ID NO: 19930 - RNA, 32 nt, Homo Sapiens
caauccaaaaacuacauauuuguaggaaaucu

SEQ ID NO: 19931 - RNA, 32 nt, Homo Sapiens
ccgaggacagagcuccaugcugauucuccauu

SEQ ID NO: 19932 - RNA, 32 nt, Homo Sapiens
agggagaggggcaacaggaggcugggaaaugg

SEQ ID NO: 19933 - RNA, 32 nt, Homo Sapiens
acugucacugcauugcagaucuguaagacuaa

SEQ ID NO: 19934 - RNA, 32 nt, Homo Sapiens
ucgcugagaagcugcugugacuccagcaaguu

SEQ ID NO: 19935 - RNA, 32 nt, Homo Sapiens
caaaagugaaguaaugcacagauggaaauuua

SEQ ID NO: 19936 - RNA, 32 nt, Homo Sapiens
uucaccauauuaugaucauacauauuuugaag

SEQ ID NO: 19937 - RNA, 32 nt, Homo Sapiens
cagugccuugugcaaugugaaugugcgcgucu

SEQ ID NO: 19938 - RNA, 32 nt, Homo Sapiens
ccgccuucccguuuccucccguuccgcagcgc

SEQ ID NO: 19939 - RNA, 32 nt, Homo Sapiens
cccgaacccgcacucccgccaaccgcgcuuuu

SEQ ID NO: 19940 - RNA, 31 nt, Homo Sapiens
agacggcagcgcagucacacucaggaagggg

SEQ ID NO: 19941 - RNA, 32 nt, Homo Sapiens
augacagccccgaggcccugagccaccucugc

SEQ ID NO: 19942 - RNA, 32 nt, Homo Sapiens
gugaaugcugucggccucaacuugcuugauga

SEQ ID NO: 19943 - RNA, 32 nt, Homo Sapiens
uaaauugugauuuuuguuuuacauguggguuu

SEQ ID NO: 19944 - RNA, 32 nt, Homo Sapiens
cccaccagccccaccaagaucauuucauccag

SEQ ID NO: 19945 - RNA, 32 nt, Homo Sapiens
gggcucgcggcacgcccgccgcugaucacucu

SEQ ID NO: 19946 - RNA, 32 nt, Homo Sapiens
uuaacccucacaggaagggccaggggaggaaa

SEQ ID NO: 19947 - RNA, 32 nt, Homo Sapiens
gaggacuucuccuuuuucucucccuccagagc

SEQ ID NO: 19948 - RNA, 32 nt, Homo Sapiens
ccccaggugggaggaggggcuguccuggcucu

SEQ ID NO: 19949 - RNA, 30 nt, Homo Sapiens
gacuacggguuggacgagauaugcaccuaa

SEQ ID NO: 19950 - RNA, 32 nt, Homo Sapiens
agcaaaccuaaggaugacaaacacuauccaca

SEQ ID NO: 19951 - RNA, 32 nt, Homo Sapiens
ugacagauggcuucucuguuucccuuugccca

SEQ ID NO: 19952 - RNA, 32 nt, Homo Sapiens
uggcucaguggagugauauuuauguauuauuu

SEQ ID NO: 19953 - RNA, 32 nt, Homo Sapiens
ccugucuccugccugccccugggaacugaaug

SEQ ID NO: 19954 - RNA, 32 nt, Homo Sapiens
ccgugacucgggggcggggcgaucgggucuca

SEQ ID NO: 19955 - RNA, 32 nt, Homo Sapiens
cccggccccggggccaccucacguucugcuuc

SEQ ID NO: 19956 - RNA, 32 nt, Homo Sapiens
auuugguaggagucccuuacuuuacgugugua

SEQ ID NO: 19957 - RNA, 32 nt, Homo Sapiens
ggaaaugcccucgggcaccuggaugaggccau

SEQ ID NO: 19958 - RNA, 29 nt, Homo Sapiens
uacaauggccacugcucagcuuucucacu

SEQ ID NO: 19959 - RNA, 32 nt, Homo Sapiens
gaaaacuuaaaugcagauacaaauggaauauc

SEQ ID NO: 19960 - RNA, 32 nt, Homo Sapiens
uggaugugaguuugaaacaagcacgguacagu

SEQ ID NO: 19961 - RNA, 32 nt, Homo Sapiens
uggaaggagaagcaauaaauuuuuguuuucaa

SEQ ID NO: 19962 - RNA, 32 nt, Homo Sapiens
uauaauggaagcauucaaauguuuguuuuaag

SEQ ID NO: 19963 - RNA, 32 nt, Homo Sapiens
uucccaguucccugggccucugggucaagcuu

SEQ ID NO: 19964 - RNA, 32 nt, Homo Sapiens
acgagugguggccgaagcagggggacagcaag

SEQ ID NO: 19965 - RNA, 32 nt, Homo Sapiens
gugggaauaaaacuacuuaauuccugugggca

SEQ ID NO: 19966 - RNA, 32 nt, Homo Sapiens
guucucugucuccgcagccgcgugucagcagg

SEQ ID NO: 19967 - RNA, 32 nt, Homo Sapiens
agcagggggaggagggccggaaaugcuccccg

SEQ ID NO: 19968 - RNA, 32 nt, Homo Sapiens
guugucccaucccucucuucacccauucauuc

SEQ ID NO: 19969 - RNA, 32 nt, Homo Sapiens
acugggaauuugaaauucuuguccucugugau

SEQ ID NO: 19970 - RNA, 32 nt, Homo Sapiens
guaguucucuaggaaaacaaauuuaagauaaa

SEQ ID NO: 19971 - RNA, 32 nt, Homo Sapiens
gauccucacuagacagaggagcuccaaaccug

SEQ ID NO: 19972 - RNA, 32 nt, Homo Sapiens
ccagagaggucuuuccauacaaugaaagcuau

SEQ ID NO: 19973 - RNA, 32 nt, Homo Sapiens
cgcguucaugcaacgccugguggccugggacc

SEQ ID NO: 19974 - RNA, 32 nt, Homo Sapiens
uacgaggaugcgaugguaacaugcucaucagc

SEQ ID NO: 19975 - RNA, 32 nt, Homo Sapiens
uccuuccccccucgcccucaugaauagcuggg

SEQ ID NO: 19976 - RNA, 32 nt, Homo Sapiens
agcaaguguugaacucuuucugcuuguuuuga

SEQ ID NO: 19977 - RNA, 32 nt, Homo Sapiens
aaaucaaauccuagcgcacaagggcaggaagc

SEQ ID NO: 19978 - RNA, 32 nt, Homo Sapiens
uuuuuuauuugcuuuuuuuuuauauaacacuu

SEQ ID NO: 19979 - RNA, 32 nt, Homo Sapiens
cuguuccuuucuauucuuuaaucuuucuuggu

SEQ ID NO: 19980 - RNA, 32 nt, Homo Sapiens
ucauggggcuguuuuucuuuucaucucacugg

SEQ ID NO: 19981 - RNA, 27 nt, Homo Sapiens
agaauuuccuucuuuuguuucuccaaa

SEQ ID NO: 19982 - RNA, 32 nt, Homo Sapiens
uggacugggcugccacugcuugggcagaguaa

SEQ ID NO: 19983 - RNA, 32 nt, Homo Sapiens
uucuccagaauguaagaaaacaaaaucuaaaa

SEQ ID NO: 19984 - RNA, 32 nt, Homo Sapiens
ccucuuguuguucucuccugcugcugagucuc

SEQ ID NO: 19985 - RNA, 32 nt, Homo Sapiens
uuguguuugugcuuugugcagaguuguuugag

SEQ ID NO: 19986 - RNA, 32 nt, Homo Sapiens
ggaaagucauucaguggaugugaucuuggcuc

SEQ ID NO: 19987 - RNA, 32 nt, Homo Sapiens
uguuuuucuggcuuuuucacccuuucgccucc

SEQ ID NO: 19988 - RNA, 32 nt, Homo Sapiens
caugaaccaaaggaauuuauguuuuguaacuu

SEQ ID NO: 19989 - RNA, 32 nt, Homo Sapiens
cuacaaagaacaaucaggaauugaaaauuuaa

SEQ ID NO: 19990 - RNA, 32 nt, Homo Sapiens
cuggggcccagugcccucuggguccugcuggc

SEQ ID NO: 19991 - RNA, 28 nt, Homo Sapiens
gaaauggcgccuccggcccccggcccgg

SEQ ID NO: 19992 - RNA, 32 nt, Homo Sapiens
ucuucaugggucugaggagagagaauggccag

SEQ ID NO: 19993 - RNA, 32 nt, Homo Sapiens
uucaugcuuauuuuaaauguauuauuagugac

SEQ ID NO: 19994 - RNA, 32 nt, Homo Sapiens
uuauuuauuuuuguuggcugaacauaaaccaa

SEQ ID NO: 19995 - RNA, 32 nt, Homo Sapiens
agacagagucucuuucugucguccaggcugga

SEQ ID NO: 19996 - RNA, 32 nt, Homo Sapiens
ucuucccgccccaccucccauuucuguugcug

SEQ ID NO: 19997 - RNA, 32 nt, Homo Sapiens
acguuguaagagaauaaauuuacauauuuuaa

SEQ ID NO: 19998 - RNA, 32 nt, Homo Sapiens
aaacuggguaauuuauaaaaaaaaaaaaaaaa

SEQ ID NO: 19999 - RNA, 32 nt, Homo Sapiens
aggggaagacaggaauguaaaacuacuagauc

SEQ ID NO: 20000 - RNA, 32 nt, Homo Sapiens
gauaauuuucuuuacuauuauguucaaauaau

SEQ ID NO: 20001 - RNA, 31 nt, Homo Sapiens
uguuuacaagccacucugucuugacuuuugu

SEQ ID NO: 20002 - RNA, 32 nt, Homo Sapiens
ggacucccaaacucuacuccagauggggaggu

SEQ ID NO: 20003 - RNA, 32 nt, Homo Sapiens
aauccugugcauuuggguugggguucacucuu

SEQ ID NO: 20004 - RNA, 32 nt, Homo Sapiens
uguacagcgggggcucacguccacuaaggaac

SEQ ID NO: 20005 - RNA, 32 nt, Homo Sapiens
caaucaaggugaauuggaugcuauggaauacc

SEQ ID NO: 20006 - RNA, 32 nt, Homo Sapiens
auuggauuaguaucuuguuuuuaugugugaau

SEQ ID NO: 20007 - RNA, 32 nt, Homo Sapiens
aaagaauccaacaaaucgguagguuuuuauau

SEQ ID NO: 20008 - RNA, 32 nt, Homo Sapiens
ucuccuugcccccagugccucaccuuccaaca

SEQ ID NO: 20009 - RNA, 32 nt, Homo Sapiens
uauuaaaaacauugcugccgccuacuucuucc

SEQ ID NO: 20010 - RNA, 32 nt, Homo Sapiens
ugugcccucucugaguucugugcugucucuug

SEQ ID NO: 20011 - RNA, 32 nt, Homo Sapiens
aaagucaggcaccccaccuuagaccucguaug

SEQ ID NO: 20012 - RNA, 32 nt, Homo Sapiens
gagaaauuugaaaacaccuauaaugcacugau

SEQ ID NO: 20013 - RNA, 32 nt, Homo Sapiens
gagcugucggccccggcccgacucuaucacaa

SEQ ID NO: 20014 - RNA, 32 nt, Homo Sapiens
guccuccccccgccccgccccccagcuccguu

SEQ ID NO: 20015 - RNA, 32 nt, Homo Sapiens
cugauaguuuguauuuaauccuuguauaaaua

SEQ ID NO: 20016 - RNA, 32 nt, Homo Sapiens
gguaugggccagcaguuuccugccagauauug

SEQ ID NO: 20017 - RNA, 29 nt, Homo Sapiens
cgucauggccuuggccggggccccugcgg

SEQ ID NO: 20018 - RNA, 31 nt, Homo Sapiens
cucacggaggcaggucugaccacugggccgg

SEQ ID NO: 20019 - RNA, 32 nt, Homo Sapiens
uacgucucugcuugucuucucauuuggacuug

SEQ ID NO: 20020 - RNA, 30 nt, Homo Sapiens
uccaaggccaccccuucuccuuuuagucau

SEQ ID NO: 20021 - RNA, 30 nt, Homo Sapiens
accucucagccucugccgccgggcaccccc

SEQ ID NO: 20022 - RNA, 32 nt, Homo Sapiens
cuugcgaggagggccuggcccaggagcagggg

SEQ ID NO: 20023 - RNA, 32 nt, Homo Sapiens
agaacaggcuacuuccguaauuuugcgggucc

SEQ ID NO: 20024 - RNA, 32 nt, Homo Sapiens
acuagcugucuccucugcagcaugagcagcug

SEQ ID NO: 20025 - RNA, 28 nt, Homo Sapiens
caguguuugcuaaugauguguuuuuaua

SEQ ID NO: 20026 - RNA, 32 nt, Homo Sapiens
cgccgcccgcggcucgggaccccugccuaccc

SEQ ID NO: 20027 - RNA, 32 nt, Homo Sapiens
aggcggcggggucuugguggguccagugguaa

SEQ ID NO: 20028 - RNA, 32 nt, Homo Sapiens
cugaggaaugcuuguucuagcugcugaaacug

SEQ ID NO: 20029 - RNA, 32 nt, Homo Sapiens
aucucugaggaguggacuuugcugguucucuc

SEQ ID NO: 20030 - RNA, 32 nt, Homo Sapiens
agaagugaggggcuauguuguguuuccuggac

SEQ ID NO: 20031 - RNA, 30 nt, Homo Sapiens
accugucuugcaauggggggagggggcguu

SEQ ID NO: 20032 - RNA, 32 nt, Homo Sapiens
auuugguguacuucucuagagauuaauccaag

SEQ ID NO: 20033 - RNA, 32 nt, Homo Sapiens
gggguccauuaggaagaccagguuugcugggc

SEQ ID NO: 20034 - RNA, 32 nt, Homo Sapiens
auuuguucaauuucuuuuuuuuuuuuuuuuuu

SEQ ID NO: 20035 - RNA, 32 nt, Homo Sapiens
ggggcgaggggggugguuuaugugucagcaaa

SEQ ID NO: 20036 - RNA, 32 nt, Homo Sapiens
ggaggcggggguacgacggggagcacuggguc

SEQ ID NO: 20037 - RNA, 32 nt, Homo Sapiens
aacuggauggcugagcuggcccggggcugccc

SEQ ID NO: 20038 - RNA, 32 nt, Homo Sapiens
agacacucuuuggauuugauucagaugaugaa

SEQ ID NO: 20039 - RNA, 32 nt, Homo Sapiens
cuuggguguucgggagccuguuuuuggcggag

SEQ ID NO: 20040 - RNA, 32 nt, Homo Sapiens
gggaacagaugaaacuuuuugcaucgcuugag

SEQ ID NO: 20041 - RNA, 32 nt, Homo Sapiens
ugaaagagggcuugguuuaccaaggcucucca

SEQ ID NO: 20042 - RNA, 32 nt, Homo Sapiens
gcuuccccacccaagccagucuacauugccca

SEQ ID NO: 20043 - RNA, 32 nt, Homo Sapiens
gccauuacaucccacaaacccaaauacaaagc

SEQ ID NO: 20044 - RNA, 29 nt, Homo Sapiens
agcuuguuguaaagauauuuucuuuuugu

SEQ ID NO: 20045 - RNA, 32 nt, Homo Sapiens
cuuccccgucuucuccagaacuugugucucca

SEQ ID NO: 20046 - RNA, 32 nt, Homo Sapiens
aaucagaacaauuuccuacaaaauuuuucugg

SEQ ID NO: 20047 - RNA, 32 nt, Homo Sapiens
ugcauauguccaauauaaaauagaaaauauau

SEQ ID NO: 20048 - RNA, 32 nt, Homo Sapiens
gcacaccccccucaccccagcccugcgcaugg

SEQ ID NO: 20049 - RNA, 32 nt, Homo Sapiens
gaggcugagacugcgggaugguccuggggcuc

SEQ ID NO: 20050 - RNA, 32 nt, Homo Sapiens
gaaaaguuugccguuaguuccccuccccuccc

SEQ ID NO: 20051 - RNA, 32 nt, Homo Sapiens
gaaaauccaacagauuccuauuaaagcacucu

SEQ ID NO: 20052 - RNA, 32 nt, Homo Sapiens
uaauagaugaggauaagaaaaaauccacaaaa

SEQ ID NO: 20053 - RNA, 32 nt, Homo Sapiens
gggaccggaaccucggcggacccggccccacc

SEQ ID NO: 20054 - RNA, 32 nt, Homo Sapiens
agcugggagcaggugccggagccccggccugc

SEQ ID NO: 20055 - RNA, 32 nt, Homo Sapiens
acuggagcuugauguuauauuagggacugugg

SEQ ID NO: 20056 - RNA, 32 nt, Homo Sapiens
uagucuuuauuacuuacauuuaaauuucuuau

SEQ ID NO: 20057 - RNA, 32 nt, Homo Sapiens
gagagggcauauaaauuccccauauuuguguu

SEQ ID NO: 20058 - RNA, 32 nt, Homo Sapiens
aaccccgggggagugacaagggggcgggauug

SEQ ID NO: 20059 - RNA, 32 nt, Homo Sapiens
gguuuucuagucugcaaacugaaacaguguaa

SEQ ID NO: 20060 - RNA, 32 nt, Homo Sapiens
uuacuucuuuccuuuuucuuaguuagaaucca

SEQ ID NO: 20061 - RNA, 32 nt, Homo Sapiens
ggcuccccucccucaugaccgccuggauccuc

SEQ ID NO: 20062 - RNA, 32 nt, Homo Sapiens
gccuucccaguccuguugugggugcugugauu

SEQ ID NO: 20063 - RNA, 32 nt, Homo Sapiens
uaaaagugguuuauuacuuguuuaaugacaua

SEQ ID NO: 20064 - RNA, 32 nt, Homo Sapiens
cccuguccaagugccuuggagaacucacagca

SEQ ID NO: 20065 - RNA, 32 nt, Homo Sapiens
ucuuuaacaaagugauuaagagcuuggucugu

SEQ ID NO: 20066 - RNA, 32 nt, Homo Sapiens
uaagaugaaaaacauggccgggcgggguggcu

SEQ ID NO: 20067 - RNA, 32 nt, Homo Sapiens
cacaccuggccgagccagcgcuucucaacucc

SEQ ID NO: 20068 - RNA, 32 nt, Homo Sapiens
agcacaaauuuauguguuacaacaguaguuua

SEQ ID NO: 20069 - RNA, 32 nt, Homo Sapiens
gagcggaggcuggaaggccacaaggugcuugc

SEQ ID NO: 20070 - RNA, 32 nt, Homo Sapiens
uuggaaauauauauuuaagaauuauauauaua

SEQ ID NO: 20071 - RNA, 32 nt, Homo Sapiens
caagguguggagaugacugcuguucccuucgc

SEQ ID NO: 20072 - RNA, 32 nt, Homo Sapiens
uccuucugacuucuuccucauuucuaucaaug

SEQ ID NO: 20073 - RNA, 32 nt, Homo Sapiens
acauuucaugucaggauugcaagcauuagcua

SEQ ID NO: 20074 - RNA, 32 nt, Homo Sapiens
cgugaagaggaugcccugcagacucacugccc

SEQ ID NO: 20075 - RNA, 32 nt, Homo Sapiens
uagcuucugaaggugcagaaaacaauuucuaa

SEQ ID NO: 20076 - RNA, 32 nt, Homo Sapiens
acaucaauauauuaauuguaaaguuuauugua

SEQ ID NO: 20077 - RNA, 32 nt, Homo Sapiens
ugugaagaaaaauaaaguacagugugagauac

SEQ ID NO: 20078 - RNA, 32 nt, Homo Sapiens
guguaugugcuugaaacuauuuuuguaaucca

SEQ ID NO: 20079 - RNA, 32 nt, Homo Sapiens
ggcaggaaaaagaagaggaagauuagaagauu

SEQ ID NO: 20080 - RNA, 32 nt, Homo Sapiens
uaugcuauuaauacauuauacuuuauaacuaa

SEQ ID NO: 20081 - RNA, 32 nt, Homo Sapiens
gccgcacaauggccggccgucgggaccccagc

SEQ ID NO: 20082 - RNA, 32 nt, Homo Sapiens
gccaagccucugcugggucccaaauacacacc

SEQ ID NO: 20083 - RNA, 32 nt, Homo Sapiens
uucccaacagcagggcuuuggccaagcccuug

SEQ ID NO: 20084 - RNA, 32 nt, Homo Sapiens
agcauguaucuggucuuaacucugauuguagc

SEQ ID NO: 20085 - RNA, 32 nt, Homo Sapiens
ccaucuggaauucacagcuguucccuggcagc

SEQ ID NO: 20086 - RNA, 32 nt, Homo Sapiens
cgaagcaugucuuugccaugggcuguguccuu

SEQ ID NO: 20087 - RNA, 32 nt, Homo Sapiens
gaaauauuugaaaugcaaaauugugugaaauc

SEQ ID NO: 20088 - RNA, 32 nt, Homo Sapiens
gacuggggcuccuggggaccccaagcugcucg

SEQ ID NO: 20089 - RNA, 32 nt, Homo Sapiens
guugcauccaaucagaugauacaggauuuuga

SEQ ID NO: 20090 - RNA, 32 nt, Homo Sapiens
ggugaaagccaucaaagaauugggugaucaag

SEQ ID NO: 20091 - RNA, 32 nt, Homo Sapiens
gcaggaggaccucacccacacccauggcaaag

SEQ ID NO: 20092 - RNA, 32 nt, Homo Sapiens
gugcccuccucgcgcuggcuucaggguuccac

SEQ ID NO: 20093 - RNA, 32 nt, Homo Sapiens
ugccgccccccgcccggccucgcacuccgcuu

SEQ ID NO: 20094 - RNA, 32 nt, Homo Sapiens
augggcacccucauaagucagugugggcaggg

SEQ ID NO: 20095 - RNA, 32 nt, Homo Sapiens
uuuccaucuucucuucaacuuucacaucaguc

SEQ ID NO: 20096 - RNA, 30 nt, Homo Sapiens
cccaggucaugccagccccaucuuacccau

SEQ ID NO: 20097 - RNA, 32 nt, Homo Sapiens
cgccucuucccgccccgccccaucccgcccac

SEQ ID NO: 20098 - RNA, 32 nt, Homo Sapiens
uugaacuugaguuuuuaauaaugauagcaaag

SEQ ID NO: 20099 - RNA, 32 nt, Homo Sapiens
aucagugcaaagaaaaucauuggcucagauug

SEQ ID NO: 20100 - RNA, 32 nt, Homo Sapiens
ugcacuuucuuccgaucuguaccugagagguu

SEQ ID NO: 20101 - RNA, 28 nt, Homo Sapiens
cuucacaauuccuccaggaugacagaua

SEQ ID NO: 20102 - RNA, 32 nt, Homo Sapiens
aaaagaagcaaaucauuugcacucuauaauuu

SEQ ID NO: 20103 - RNA, 32 nt, Homo Sapiens
auauguaauuuaaauuuuucuaguagcagcuu

SEQ ID NO: 20104 - RNA, 32 nt, Homo Sapiens
gagccaugucauaucacuuugcucuuaccauu

SEQ ID NO: 20105 - RNA, 32 nt, Homo Sapiens
aaaucauuuuuggaagcuuggaucucauuaaa

SEQ ID NO: 20106 - RNA, 32 nt, Homo Sapiens
gggauuauucacauuuaaauauuuucaguuac

SEQ ID NO: 20107 - RNA, 32 nt, Homo Sapiens
uaugugcgggggagaagauggcggcggcgggg

SEQ ID NO: 20108 - RNA, 32 nt, Homo Sapiens
auccuagcacuuugggagggugaggcaggagg

SEQ ID NO: 20109 - RNA, 27 nt, Homo Sapiens
ccaugucugggaacugccccugccuac

SEQ ID NO: 20110 - RNA, 32 nt, Homo Sapiens
cagagcuuuaucacauguuuaauuacaguguu

SEQ ID NO: 20111 - RNA, 32 nt, Homo Sapiens
accuucgcccucaggagaugugacgaaggaac

SEQ ID NO: 20112 - RNA, 32 nt, Homo Sapiens
gucuuccaccgccccccucauaacuaagacau

SEQ ID NO: 20113 - RNA, 32 nt, Homo Sapiens
gcgucucugcccggccgccccgucugagaagu

SEQ ID NO: 20114 - RNA, 32 nt, Homo Sapiens
uuaauagaaagaucuauguuuauaaaccagca

SEQ ID NO: 20115 - RNA, 31 nt, Homo Sapiens
gacacaauuggcugagcaggauaugugauac

SEQ ID NO: 20116 - RNA, 32 nt, Homo Sapiens
uaucuggaagcagaauaaaauauuuacauaga

SEQ ID NO: 20117 - RNA, 32 nt, Homo Sapiens
aagauaaaucgugcacuauuuuuacacauaaa

SEQ ID NO: 20118 - RNA, 32 nt, Homo Sapiens
aggggcccagacugugaauccugugcucugcc

SEQ ID NO: 20119 - RNA, 32 nt, Homo Sapiens
gguaaaggugaccccugccauuuaccagcagc

SEQ ID NO: 20120 - RNA, 32 nt, Homo Sapiens
aacauuacuuggaggguugcaguuucuaagug

SEQ ID NO: 20121 - RNA, 32 nt, Homo Sapiens
uauaugucuaaugugcagaaauauauaugugu

SEQ ID NO: 20122 - RNA, 32 nt, Homo Sapiens
cuuuuggaaugggaacaucuauccuaugccug

SEQ ID NO: 20123 - RNA, 32 nt, Homo Sapiens
ugguauaaaaauuuaucuuauuuaauaaaaau

SEQ ID NO: 20124 - RNA, 27 nt, Homo Sapiens
uaaucccauuuagucugguaucugguu

SEQ ID NO: 20125 - RNA, 32 nt, Homo Sapiens
uuccuuguauuauugccacuuaucuuuugcuu

SEQ ID NO: 20126 - RNA, 32 nt, Homo Sapiens
cacugcacuccagccugggccacagagugaga

SEQ ID NO: 20127 - RNA, 32 nt, Homo Sapiens
accuggcucugaccguucccaccaccaucugc

SEQ ID NO: 20128 - RNA, 32 nt, Homo Sapiens
cugccagaggggcccuggguucugccauauac

SEQ ID NO: 20129 - RNA, 32 nt, Homo Sapiens
ugcuacgcuccagccagccccuaacugguccc

SEQ ID NO: 20130 - RNA, 32 nt, Homo Sapiens
caguuccuccgcacugcaaacacauauaugug

SEQ ID NO: 20131 - RNA, 32 nt, Homo Sapiens
ggucuccuugcuccaggaucugcacaagcaga

SEQ ID NO: 20132 - RNA, 32 nt, Homo Sapiens
uuuugagaaagucuuauuuauucauauuuucu

SEQ ID NO: 20133 - RNA, 32 nt, Homo Sapiens
aaaauucauuuucucuagcagcuguuuuggcc

SEQ ID NO: 20134 - RNA, 32 nt, Homo Sapiens
cucuggggacgccugcuucauuuacaagccuc

SEQ ID NO: 20135 - RNA, 32 nt, Homo Sapiens
uccacccacccccuuugguuugacaauuuugu

SEQ ID NO: 20136 - RNA, 32 nt, Homo Sapiens
aggaaaaauuuauucaagaagcacuuauuaaa

SEQ ID NO: 20137 - RNA, 30 nt, Homo Sapiens
auaacaaucaucggcggcggcaggaucggc

SEQ ID NO: 20138 - RNA, 32 nt, Homo Sapiens
gccuuugagcuguaguucccguuuauuuacac

SEQ ID NO: 20139 - RNA, 32 nt, Homo Sapiens
cuacagcuguaacaucaacuuuucucagaguc

SEQ ID NO: 20140 - RNA, 32 nt, Homo Sapiens
aaccuuaagccauguagaugaaguuagugcau

SEQ ID NO: 20141 - RNA, 27 nt, Homo Sapiens
uuuauccauuaauuggguggaagauug

SEQ ID NO: 20142 - RNA, 32 nt, Homo Sapiens
guaagacuuaggauaauuugccuucaaaacag

SEQ ID NO: 20143 - RNA, 32 nt, Homo Sapiens
ugauauuucucuucuuucguucuuuuuuuuuu

SEQ ID NO: 20144 - RNA, 32 nt, Homo Sapiens
aaaggugacaccuggagaccaaacgcaggaug

SEQ ID NO: 20145 - RNA, 32 nt, Homo Sapiens
gaguguuugggguuguguauuaaauagccauu

SEQ ID NO: 20146 - RNA, 32 nt, Homo Sapiens
ccuaagccugacgccugcaccgggcccuccag

SEQ ID NO: 20147 - RNA, 32 nt, Homo Sapiens
aagcagggaaacagggagguguggacaagcca

SEQ ID NO: 20148 - RNA, 32 nt, Homo Sapiens
acaugauuugaaaacaguacucaaugagacug

SEQ ID NO: 20149 - RNA, 32 nt, Homo Sapiens
uucgauaugaccugccagcaucauacaaguuu

SEQ ID NO: 20150 - RNA, 32 nt, Homo Sapiens
uuuuuuuugcugucauccccacuuuagucacg

SEQ ID NO: 20151 - RNA, 32 nt, Homo Sapiens
ucuuugauauguagcuuuuucuuaaagacuuu

SEQ ID NO: 20152 - RNA, 32 nt, Homo Sapiens
ucgauagacacacagcagcagcagcgucucuc

SEQ ID NO: 20153 - RNA, 32 nt, Homo Sapiens
cugggcuuugaagauagcauaucagacgccuu

SEQ ID NO: 20154 - RNA, 32 nt, Homo Sapiens
guucagaauaauuucacugccuuaauguguuc

SEQ ID NO: 20155 - RNA, 32 nt, Homo Sapiens
cuuacaugagaagauggcaagaugaacuugca

SEQ ID NO: 20156 - RNA, 32 nt, Homo Sapiens
ugcccagaggggcugcagccagcggucugucg

SEQ ID NO: 20157 - RNA, 32 nt, Homo Sapiens
cccacuuugcacacccgcucuccggcccgcgc

SEQ ID NO: 20158 - RNA, 32 nt, Homo Sapiens
aaaaagaagcacuauaacgcgaccacaaaugg

SEQ ID NO: 20159 - RNA, 32 nt, Homo Sapiens
acgcaggcccuggugggaccacccagccuggu

SEQ ID NO: 20160 - RNA, 32 nt, Homo Sapiens
ggacagucucuccauaccccagccccucuaac

SEQ ID NO: 20161 - RNA, 32 nt, Homo Sapiens
ggcuguuccugggccuggcgggggaggcaggg

SEQ ID NO: 20162 - RNA, 32 nt, Homo Sapiens
uccuuaacccuccuccuucugcccuggauugu

SEQ ID NO: 20163 - RNA, 32 nt, Homo Sapiens
ucguagcagaaauggcggcugcggcggcucga

SEQ ID NO: 20164 - RNA, 32 nt, Homo Sapiens
ugaugagaauacugaguauguggaaggcagca

SEQ ID NO: 20165 - RNA, 32 nt, Homo Sapiens
caaaacaaaacaaaacaaaacacuguaucagc

SEQ ID NO: 20166 - RNA, 32 nt, Homo Sapiens
gucggcuaucccgugcuuccaguguuuggcuc

SEQ ID NO: 20167 - RNA, 32 nt, Homo Sapiens
auuuaagcaauaaccuuuuaaacauuuuagcu

SEQ ID NO: 20168 - RNA, 32 nt, Homo Sapiens
agauaaucgauauuuucaguauacaaauguaa

SEQ ID NO: 20169 - RNA, 32 nt, Homo Sapiens
cucuggcacucggagcggucucugccacuggc

SEQ ID NO: 20170 - RNA, 32 nt, Homo Sapiens
uuugauuguaaaaacaaaaagacagugugugu

SEQ ID NO: 20171 - RNA, 32 nt, Homo Sapiens
guauucagagacgcccaggagagacggaugga

SEQ ID NO: 20172 - RNA, 32 nt, Homo Sapiens
aaacuugguuguaucauuuuugauuggggcag

SEQ ID NO: 20173 - RNA, 32 nt, Homo Sapiens
uccuucuacauguaaugacacuucuuguguua

SEQ ID NO: 20174 - RNA, 32 nt, Homo Sapiens
uuagggacugaccagcagcuuuagaaucccag

SEQ ID NO: 20175 - RNA, 32 nt, Homo Sapiens
acaucggugggaucaagugaaaaggaggacca

SEQ ID NO: 20176 - RNA, 32 nt, Homo Sapiens
gacucacgcccuuggggugcccggucucgugg

SEQ ID NO: 20177 - RNA, 32 nt, Homo Sapiens
cagcggccccgccaugucccagccccggaccc

SEQ ID NO: 20178 - RNA, 32 nt, Homo Sapiens
agugagccgggcccagcuucucuccuagccgu

SEQ ID NO: 20179 - RNA, 32 nt, Homo Sapiens
ccuuguaacgucuugugucuguuaccucacgg

SEQ ID NO: 20180 - RNA, 32 nt, Homo Sapiens
cauauucugaucccuaaauguauuagagccac

SEQ ID NO: 20181 - RNA, 31 nt, Homo Sapiens
ccugggguuccccucacucccuuuuuuguca

SEQ ID NO: 20182 - RNA, 32 nt, Homo Sapiens
uacccagaucacacagcugauaagugguggag

SEQ ID NO: 20183 - RNA, 32 nt, Homo Sapiens
ccgguaaaguuccucucgccagccgcauccau

SEQ ID NO: 20184 - RNA, 32 nt, Homo Sapiens
ggucuccaccccagcccaacuccagggcccca

SEQ ID NO: 20185 - RNA, 32 nt, Homo Sapiens
ucagcccccagcggccucugggccccccagca

SEQ ID NO: 20186 - RNA, 32 nt, Homo Sapiens
cgucuguuucuagggcaacgccggcgucucuu

SEQ ID NO: 20187 - RNA, 32 nt, Homo Sapiens
augaaugacgcaagcacugaugcugaagaucc

SEQ ID NO: 20188 - RNA, 32 nt, Homo Sapiens
gcggagcggccacacguggagguucccacuuu

SEQ ID NO: 20189 - RNA, 32 nt, Homo Sapiens
aacuagagaaggaaacgggacuaaacuggcgg

SEQ ID NO: 20190 - RNA, 32 nt, Homo Sapiens
auggcggugguggccacggggaggccucuugg

SEQ ID NO: 20191 - RNA, 29 nt, Homo Sapiens
uaaauuuuuaaauauaucuaguuuccucu

SEQ ID NO: 20192 - RNA, 32 nt, Homo Sapiens
caugcuccucucgggccuccaguggcccaggg

SEQ ID NO: 20193 - RNA, 31 nt, Homo Sapiens
aauauccauuuaaaacagguauaucagugga

SEQ ID NO: 20194 - RNA, 32 nt, Homo Sapiens
ggugucuggaaguuuauucuuaagagacugcu

SEQ ID NO: 20195 - RNA, 32 nt, Homo Sapiens
cacagccauggacacaccccugcccagaccuc

SEQ ID NO: 20196 - RNA, 32 nt, Homo Sapiens
uuccccagagacuccaccaggaccucacauuc

SEQ ID NO: 20197 - RNA, 32 nt, Homo Sapiens
ucaauucuguaggcucagcagaugauacugcc

SEQ ID NO: 20198 - RNA, 32 nt, Homo Sapiens
gaguauaauuguuuuucuucuauuuaauguaa

SEQ ID NO: 20199 - RNA, 32 nt, Homo Sapiens
agggccagggcaggccggucugcagccggagg

SEQ ID NO: 20200 - RNA, 32 nt, Homo Sapiens
ggcuuuaauuuaauguagauucauacugcucu

SEQ ID NO: 20201 - RNA, 32 nt, Homo Sapiens
uccaggccguuucucauacuacaggauauuua

SEQ ID NO: 20202 - RNA, 32 nt, Homo Sapiens
uuugccuucauggcuuauucaguaacccauaa

SEQ ID NO: 20203 - RNA, 32 nt, Homo Sapiens
aaacaaaacauaccuguauacacacacauuca

SEQ ID NO: 20204 - RNA, 32 nt, Homo Sapiens
gccuuccucccucccacccccaauguccuguu

SEQ ID NO: 20205 - RNA, 32 nt, Homo Sapiens
gggcaccccguccucccgcagcuccacacggu

SEQ ID NO: 20206 - RNA, 32 nt, Homo Sapiens
gaagacagacugcugcuuuggaccuguuggua

SEQ ID NO: 20207 - RNA, 32 nt, Homo Sapiens
cuggguccaggaguguagaauaugcggcugcu

SEQ ID NO: 20208 - RNA, 32 nt, Homo Sapiens
ggucaugccuguacauaaagcauauuucaugu

SEQ ID NO: 20209 - RNA, 32 nt, Homo Sapiens
gagggaucugcaacaacccugaagacaacaag

SEQ ID NO: 20210 - RNA, 30 nt, Homo Sapiens
acgcugcgcgcgcgucccugcgcgacgaga

SEQ ID NO: 20211 - RNA, 32 nt, Homo Sapiens
ugggaaaguauuuuggaaugugucuuuugaag

SEQ ID NO: 20212 - RNA, 32 nt, Homo Sapiens
uuccuggagccgugcauuuccucccccuugua

SEQ ID NO: 20213 - RNA, 32 nt, Homo Sapiens
acccuggcuggcaggggugcugcuggcugcua

SEQ ID NO: 20214 - RNA, 32 nt, Homo Sapiens
aggcggggacauucacgugcaaugccaaguua

SEQ ID NO: 20215 - RNA, 32 nt, Homo Sapiens
uguucuuaauucucuguucucuaauguuuuuu

SEQ ID NO: 20216 - RNA, 32 nt, Homo Sapiens
uccuuuaucuucugucagcauuuaugggaugu

SEQ ID NO: 20217 - RNA, 32 nt, Homo Sapiens
gugcacugggccgcacucgaucaggcucaagc

SEQ ID NO: 20218 - RNA, 32 nt, Homo Sapiens
cuccugccucggccuucaggggugcugggauu

SEQ ID NO: 20219 - RNA, 32 nt, Homo Sapiens
gaaauacucugcaacuaagagcugaagaaugu

SEQ ID NO: 20220 - RNA, 32 nt, Homo Sapiens
cgguacgcggcaagcaacaaauccacagcccc

SEQ ID NO: 20221 - RNA, 32 nt, Homo Sapiens
cuggagugcaggggcacgaucucggcucacug

SEQ ID NO: 20222 - RNA, 32 nt, Homo Sapiens
agcaagcgaaaacauaacacacugccccagaa

SEQ ID NO: 20223 - RNA, 32 nt, Homo Sapiens
cuaaggucucaaccaagggucagcaaacuuua

SEQ ID NO: 20224 - RNA, 32 nt, Homo Sapiens
ccgccagcccgcccuccuuccuccucagcccg

SEQ ID NO: 20225 - RNA, 28 nt, Homo Sapiens
acccugaggggguccccgaggugccccu

SEQ ID NO: 20226 - RNA, 32 nt, Homo Sapiens
gcuaaccaugcugccgccgccgcggcccgcag

SEQ ID NO: 20227 - RNA, 32 nt, Homo Sapiens
agcugcguugguaaguuuuucauggaaccaag

SEQ ID NO: 20228 - RNA, 32 nt, Homo Sapiens
gccacgcgugucagcccuccaguucuccuuca

SEQ ID NO: 20229 - RNA, 32 nt, Homo Sapiens
aucuucaguuuucauaugaaaaacuuaagccc

SEQ ID NO: 20230 - RNA, 32 nt, Homo Sapiens
uggguaaugaauucuaucuaauaagucaagga

SEQ ID NO: 20231 - RNA, 32 nt, Homo Sapiens
uccucgcuggagaggagagggcaaaggcgagg

SEQ ID NO: 20232 - RNA, 32 nt, Homo Sapiens
uggcgccagcggggccucgacggucgcccucc

SEQ ID NO: 20233 - RNA, 29 nt, Homo Sapiens
cucuugugaaguuuauauuuugaguuaau

SEQ ID NO: 20234 - RNA, 32 nt, Homo Sapiens
gcuauucaaaucaacugccugaaugacauuuc

SEQ ID NO: 20235 - RNA, 32 nt, Homo Sapiens
ucguugagaaaguugaggaauuuccucuacca

SEQ ID NO: 20236 - RNA, 32 nt, Homo Sapiens
uuggcuggucacugaugguuauaaugacugug

SEQ ID NO: 20237 - RNA, 32 nt, Homo Sapiens
guugguuguucgcuagucucacggugauggaa

SEQ ID NO: 20238 - RNA, 32 nt, Homo Sapiens
gguuacuauggguuugccauuaauuucugagu

SEQ ID NO: 20239 - RNA, 32 nt, Homo Sapiens
gcauauuccuaugcauuucuagauaaaaguau

SEQ ID NO: 20240 - RNA, 32 nt, Homo Sapiens
acuguucggacaucgagaagugagccggggug

SEQ ID NO: 20241 - RNA, 32 nt, Homo Sapiens
gcggggaagggaggaggcugagaagaugcaga

SEQ ID NO: 20242 - RNA, 32 nt, Homo Sapiens
uggcucaauguaaguucucaauauguguaagc

SEQ ID NO: 20243 - RNA, 32 nt, Homo Sapiens
aacggugugccuaugaugcugguucuguugcc

SEQ ID NO: 20244 - RNA, 32 nt, Homo Sapiens
cgguuaccuuggccgugaggacacguggccug

SEQ ID NO: 20245 - RNA, 32 nt, Homo Sapiens
uuuccagggucaaagcagaucgugaggaggaa

SEQ ID NO: 20246 - RNA, 32 nt, Homo Sapiens
auuaaagcaaauuuggggcuguucuaagugug

SEQ ID NO: 20247 - RNA, 32 nt, Homo Sapiens
cgcagauucuuugcaaauucugagcuggcaga

SEQ ID NO: 20248 - RNA, 32 nt, Homo Sapiens
uaugggcucugcaaugagacagaccuggaggg

SEQ ID NO: 20249 - RNA, 32 nt, Homo Sapiens
agacaugaguauaaaaagagacuccaucaaag

SEQ ID NO: 20250 - RNA, 32 nt, Homo Sapiens
cuuagaacaaagggcuuccaugugacuucagu

SEQ ID NO: 20251 - RNA, 31 nt, Homo Sapiens
ccauaccuaaaacacuccugaguuaaguccc

SEQ ID NO: 20252 - RNA, 32 nt, Homo Sapiens
ggacauugccagcagauaacccagacugaggu

SEQ ID NO: 20253 - RNA, 32 nt, Homo Sapiens
uccccacagacacccgcccccucuccacgcag

SEQ ID NO: 20254 - RNA, 32 nt, Homo Sapiens
guguguguccagggcaccuuggaggaccgugc

SEQ ID NO: 20255 - RNA, 32 nt, Homo Sapiens
aaaagcugacauugacccagacauauuguacu

SEQ ID NO: 20256 - RNA, 32 nt, Homo Sapiens
uuuuuuaaaacauggaauuauaaagaaauuag

SEQ ID NO: 20257 - RNA, 32 nt, Homo Sapiens
ccgugucguaugaccuaguaaacuuuguacca

SEQ ID NO: 20258 - RNA, 32 nt, Homo Sapiens
aaguauucguguuuccucuguuuuccucaaga

SEQ ID NO: 20259 - RNA, 32 nt, Homo Sapiens
auggggcggcuggccgggaggggggcugaccc

SEQ ID NO: 20260 - RNA, 32 nt, Homo Sapiens
acagaacaguacuuuucuuuuaguguuucauu

SEQ ID NO: 20261 - RNA, 32 nt, Homo Sapiens
gcaauuuggauuucauguuucuuaauauucau

SEQ ID NO: 20262 - RNA, 32 nt, Homo Sapiens
acaucccccuugaaaaggucuucucugaguuc

SEQ ID NO: 20263 - RNA, 31 nt, Homo Sapiens
ggggccugugcuucucggggucugcacccca

SEQ ID NO: 20264 - RNA, 32 nt, Homo Sapiens
cuccuccucacagaggagauguguucgguucu

SEQ ID NO: 20265 - RNA, 32 nt, Homo Sapiens
ccagccaaacuccacugccagcucugcauuuc

SEQ ID NO: 20266 - RNA, 32 nt, Homo Sapiens
caagccuggaugggugcucagaggagcuaagg

SEQ ID NO: 20267 - RNA, 32 nt, Homo Sapiens
uuagcacuuuugugguucuuaagggaaaagaa

SEQ ID NO: 20268 - RNA, 32 nt, Homo Sapiens
agucugccaugggccgcggggcccgugucccc

SEQ ID NO: 20269 - RNA, 32 nt, Homo Sapiens
gccaauccugucaucacccuccuguggaugua

SEQ ID NO: 20270 - RNA, 32 nt, Homo Sapiens
ugcuaagaacagaagucacacguggccugacg

SEQ ID NO: 20271 - RNA, 32 nt, Homo Sapiens
uuuuugaugucauaugucucugauggggcugc

SEQ ID NO: 20272 - RNA, 31 nt, Homo Sapiens
uuccaugagccccagacaggauaaaccuaaa

SEQ ID NO: 20273 - RNA, 32 nt, Homo Sapiens
ucugggaagggagagggccucugccugggaca

SEQ ID NO: 20274 - RNA, 32 nt, Homo Sapiens
aaggcucuuuuguaagguuuuuguagugauuu

SEQ ID NO: 20275 - RNA, 32 nt, Homo Sapiens
agaauugggguuuuggggggcugggggauggg

SEQ ID NO: 20276 - RNA, 32 nt, Homo Sapiens
auggagcuguagaagaggcauguuuaacuggu

SEQ ID NO: 20277 - RNA, 32 nt, Homo Sapiens
gggaguaugagccugaugugggcagaauccag

SEQ ID NO: 20278 - RNA, 32 nt, Homo Sapiens
ccuugucccagauaaacuuugggcuuuggaca

SEQ ID NO: 20279 - RNA, 32 nt, Homo Sapiens
aauugcaaacgaucaggaugucuuaaaaacua

SEQ ID NO: 20280 - RNA, 32 nt, Homo Sapiens
cucuuaccggugcgagucaaagagccgcuccg

SEQ ID NO: 20281 - RNA, 32 nt, Homo Sapiens
cucaggaagcaugucuaaggcucagaaguuca

SEQ ID NO: 20282 - RNA, 32 nt, Homo Sapiens
uaaagaugcaggaaacacagucuguaaaugag

SEQ ID NO: 20283 - RNA, 32 nt, Homo Sapiens
aaggcaccagguggagagggcccggcacaggc

SEQ ID NO: 20284 - RNA, 32 nt, Homo Sapiens
ggcaugagccacugcgccugguugccugcccc

SEQ ID NO: 20285 - RNA, 32 nt, Homo Sapiens
ugcuucacauuuuucaucaucuuuaaggacuu

SEQ ID NO: 20286 - RNA, 32 nt, Homo Sapiens
ccuaaagaugucaagggugugcagcuuccaaa

SEQ ID NO: 20287 - RNA, 32 nt, Homo Sapiens
gccuuucugccagcacuuggcauuccagcuga

SEQ ID NO: 20288 - RNA, 32 nt, Homo Sapiens
ugcgcgcccucccggacccuccacuuuggggc

SEQ ID NO: 20289 - RNA, 32 nt, Homo Sapiens
cccucccggacggggcggcugaccgggcagag

SEQ ID NO: 20290 - RNA, 31 nt, Homo Sapiens
uuaugucauuugagacuguuucuaauaacug

SEQ ID NO: 20291 - RNA, 32 nt, Homo Sapiens
gccccggagagggggaaggcgccuggaaaacg

SEQ ID NO: 20292 - RNA, 32 nt, Homo Sapiens
cauaccauuuaagggucuuuuacaaauauguc

SEQ ID NO: 20293 - RNA, 32 nt, Homo Sapiens
uuggggcagcugucaccagcuaaagcaauguu

SEQ ID NO: 20294 - RNA, 32 nt, Homo Sapiens
cugauggccaucgcgccuccugcacccgucau

SEQ ID NO: 20295 - RNA, 32 nt, Homo Sapiens
aacuguaauguggaaagggcucugauggagcc

SEQ ID NO: 20296 - RNA, 32 nt, Homo Sapiens
aguuucaccauguuggccaggcugguuucaaa

SEQ ID NO: 20297 - RNA, 32 nt, Homo Sapiens
uccuuuuuacuuccuauuuucaccuuaucuug

SEQ ID NO: 20298 - RNA, 32 nt, Homo Sapiens
ugcugguguaauguggauuuaacaucaauaaa

SEQ ID NO: 20299 - RNA, 32 nt, Homo Sapiens
gccuucauuagcagcuuuuccuccucuucccu

SEQ ID NO: 20300 - RNA, 32 nt, Homo Sapiens
auggugcagaauccuuuuaguuugauguaauc

SEQ ID NO: 20301 - RNA, 32 nt, Homo Sapiens
cucucuccugcaaagucucuccugcuucccuc

SEQ ID NO: 20302 - RNA, 32 nt, Homo Sapiens
cggggcccaagccccuccccagcccccucucc

SEQ ID NO: 20303 - RNA, 32 nt, Homo Sapiens
uacaaguguuaccacaaucaauuaaaaaaugu

SEQ ID NO: 20304 - RNA, 32 nt, Homo Sapiens
uaaacuuugucaacaauuuuauuaggcaguga

SEQ ID NO: 20305 - RNA, 32 nt, Homo Sapiens
cugugguuuuuaaauuuuugucuagggguuuc

SEQ ID NO: 20306 - RNA, 32 nt, Homo Sapiens
gcuacggccgacggacggagcgccgcgcccgg

SEQ ID NO: 20307 - RNA, 32 nt, Homo Sapiens
caugugugugaucagaugugggccgggugugu

SEQ ID NO: 20308 - RNA, 32 nt, Homo Sapiens
cccguccggccgccggacaacauggaggcagc

SEQ ID NO: 20309 - RNA, 32 nt, Homo Sapiens
uaauacucaccgugagggcccgcggcuucauu

SEQ ID NO: 20310 - RNA, 32 nt, Homo Sapiens
cucugcuugccaucccucccuccaccucccug

SEQ ID NO: 20311 - RNA, 32 nt, Homo Sapiens
caagauuuaaauuuauacauauaacuaauuuc

SEQ ID NO: 20312 - RNA, 32 nt, Homo Sapiens
uauccagccaagaagaugaaaacuacagagaa

SEQ ID NO: 20313 - RNA, 32 nt, Homo Sapiens
uugucugagaggaaacaaaauuaaaauucauc

SEQ ID NO: 20314 - RNA, 32 nt, Homo Sapiens
caguccucuaguuuggaauaaaaauugcagag

SEQ ID NO: 20315 - RNA, 32 nt, Homo Sapiens
aggacccggcccccgaggugcggacgagggcu

SEQ ID NO: 20316 - RNA, 32 nt, Homo Sapiens
uaacccaccaaaaagucccuccaacagcaaua

SEQ ID NO: 20317 - RNA, 32 nt, Homo Sapiens
acucugaagugaagaacaauauguaggaaaau

SEQ ID NO: 20318 - RNA, 32 nt, Homo Sapiens
agccagugggaguggagacaagggagagguaa

SEQ ID NO: 20319 - RNA, 32 nt, Homo Sapiens
uacuuuauaccaguuguaacauuuucauuguu

SEQ ID NO: 20320 - RNA, 32 nt, Homo Sapiens
cucccuuucacuuuucaaagugagccacuaaa

SEQ ID NO: 20321 - RNA, 32 nt, Homo Sapiens
gccccacccuccccacagagcucuuccucauu

SEQ ID NO: 20322 - RNA, 32 nt, Homo Sapiens
uuuuggaagaaguuagaaguuaaugaaagcaa

SEQ ID NO: 20323 - RNA, 32 nt, Homo Sapiens
uaggagggcagccugccccaucuaggaaucug

SEQ ID NO: 20324 - RNA, 32 nt, Homo Sapiens
cgagcgcggaagcaagugggcggcgagaggcg

SEQ ID NO: 20325 - RNA, 32 nt, Homo Sapiens
caucguaaacaaaagcacaaacacuuguagca

SEQ ID NO: 20326 - RNA, 32 nt, Homo Sapiens
aggaaggaaacgcaggaggagggagcagcauc

SEQ ID NO: 20327 - RNA, 32 nt, Homo Sapiens
gaugugucuccauuaaaacgcccuucauugaa

SEQ ID NO: 20328 - RNA, 32 nt, Homo Sapiens
cagggccagcgucuugagcccucgaucagacg

SEQ ID NO: 20329 - RNA, 32 nt, Homo Sapiens
ggagcgucaggguuggugugcugagguguuag

SEQ ID NO: 20330 - RNA, 32 nt, Homo Sapiens
uccgaccccagcccgcccccagcccucccgcc

SEQ ID NO: 20331 - RNA, 32 nt, Homo Sapiens
ccuccucgcccggcggcgccuuccggacccgc

SEQ ID NO: 20332 - RNA, 32 nt, Homo Sapiens
guucucccaaauaccguugaugugaauuauuu

SEQ ID NO: 20333 - RNA, 32 nt, Homo Sapiens
cuuuguaugacaccagaaaacucuucaugcua

SEQ ID NO: 20334 - RNA, 32 nt, Homo Sapiens
gcaucccccagcugcucccaucuugcuggaau

SEQ ID NO: 20335 - RNA, 32 nt, Homo Sapiens
aaugcaggcaacacugagacaugggagaggcc

SEQ ID NO: 20336 - RNA, 32 nt, Homo Sapiens
gagcaccuuuuauauuugauaaguuuucauua

SEQ ID NO: 20337 - RNA, 32 nt, Homo Sapiens
ggaagaaggggccaucacaggaugccagcccc

SEQ ID NO: 20338 - RNA, 32 nt, Homo Sapiens
gcuugcccaggcuuccucucucucccuuccuc

SEQ ID NO: 20339 - RNA, 32 nt, Homo Sapiens
cugacuguuucugaacugucuucuuuugcaag

SEQ ID NO: 20340 - RNA, 32 nt, Homo Sapiens
gggagcugcaggaggcagagaaguaccacucu

SEQ ID NO: 20341 - RNA, 32 nt, Homo Sapiens
cguauucaucuuugaaaaauguaugaaggaau

SEQ ID NO: 20342 - RNA, 32 nt, Homo Sapiens
caauugcaacuccggcuggagccccggaccug

SEQ ID NO: 20343 - RNA, 32 nt, Homo Sapiens
cucauaacugaauugcuuaaguauaauuuaua

SEQ ID NO: 20344 - RNA, 32 nt, Homo Sapiens
gcaauggagagcccagcccccacgucuuacag

SEQ ID NO: 20345 - RNA, 32 nt, Homo Sapiens
accaugugccugcccaccuggcuccuuaggca

SEQ ID NO: 20346 - RNA, 32 nt, Homo Sapiens
uuagaaaaguauaaaaagauauuaaagucauu

SEQ ID NO: 20347 - RNA, 32 nt, Homo Sapiens
aacugauaagggaugcaaaaccaagagaauca

SEQ ID NO: 20348 - RNA, 32 nt, Homo Sapiens
gguggcucaggucuucaacggggccucuucca

SEQ ID NO: 20349 - RNA, 32 nt, Homo Sapiens
cagaauggcccuuggugcugcaggcgcggugg

SEQ ID NO: 20350 - RNA, 32 nt, Homo Sapiens
aagagagggguacauuucccugugcugacgga

SEQ ID NO: 20351 - RNA, 32 nt, Homo Sapiens
caaauguguacuuagccuucuguuauuccuua

SEQ ID NO: 20352 - RNA, 32 nt, Homo Sapiens
cuccccuccguagcacugaggacccccggaga

SEQ ID NO: 20353 - RNA, 32 nt, Homo Sapiens
ugcagaucuuaaggucugagacuugcugauuu

SEQ ID NO: 20354 - RNA, 32 nt, Homo Sapiens
cugccucuguuguguuucucacuggaggcugg

SEQ ID NO: 20355 - RNA, 32 nt, Homo Sapiens
gaaagcuggaacccggccggaguagcucugag

SEQ ID NO: 20356 - RNA, 32 nt, Homo Sapiens
gcauccuacuuccaaggcuaugccaaagccca

SEQ ID NO: 20357 - RNA, 32 nt, Homo Sapiens
auauagauucagaaauacauuuucauuaucca

SEQ ID NO: 20358 - RNA, 32 nt, Homo Sapiens
ucuuuuucuuuuucuuuuuuuuuuuuuacgau

SEQ ID NO: 20359 - RNA, 32 nt, Homo Sapiens
ucagacacauucagauacugcacugagaagga

SEQ ID NO: 20360 - RNA, 32 nt, Homo Sapiens
ccgggagccgacgcgccgcgcggguaccuagc

SEQ ID NO: 20361 - RNA, 32 nt, Homo Sapiens
uuaaucuaacugaguuuuguuaccaaugaccu

SEQ ID NO: 20362 - RNA, 32 nt, Homo Sapiens
cagucgggcuggaugcucuguggccuuucuug

SEQ ID NO: 20363 - RNA, 32 nt, Homo Sapiens
uaaccuacuuacuuuauuaaaugaccaacuac

SEQ ID NO: 20364 - RNA, 32 nt, Homo Sapiens
uuauaguuguuuucuaacccagcccuccacug

SEQ ID NO: 20365 - RNA, 32 nt, Homo Sapiens
ucagccccgagcuguccccguguugcaugaag

SEQ ID NO: 20366 - RNA, 30 nt, Homo Sapiens
ggcaaggcuccucccugcgcccugaugccg

SEQ ID NO: 20367 - RNA, 32 nt, Homo Sapiens
gaagaaaugguucagaaaauauuuucagccua

SEQ ID NO: 20368 - RNA, 32 nt, Homo Sapiens
aaaauacaaaaauuagcugugcauagugguug

SEQ ID NO: 20369 - RNA, 32 nt, Homo Sapiens
uagugauuaaggaaacaauguuuuaaaaaaag

SEQ ID NO: 20370 - RNA, 30 nt, Homo Sapiens
ccucugccugcucugccgccgaggcccggg

SEQ ID NO: 20371 - RNA, 32 nt, Homo Sapiens
gccgcgcggucgggaaaggguggccggaguga

SEQ ID NO: 20372 - RNA, 32 nt, Homo Sapiens
uagaaucaggguggagaaguucccugaaccuu

SEQ ID NO: 20373 - RNA, 32 nt, Homo Sapiens
gguuaagcuaccaaaaaugacaaccagggauu

SEQ ID NO: 20374 - RNA, 27 nt, Homo Sapiens
ugaugcaccugacucagccccccaagu

SEQ ID NO: 20375 - RNA, 32 nt, Homo Sapiens
acuucucugccccaagcuuggaacagcuaaag

SEQ ID NO: 20376 - RNA, 32 nt, Homo Sapiens
ggaucagaucauggaaaacuuuucucaguuua

SEQ ID NO: 20377 - RNA, 32 nt, Homo Sapiens
accuuuucaagccccaggcuggcugcuucaga

SEQ ID NO: 20378 - RNA, 32 nt, Homo Sapiens
ucugggccaggauccgggccccugcccuccuc

SEQ ID NO: 20379 - RNA, 32 nt, Homo Sapiens
ugcgaagucugcuuauaguuaauagaccagcu

SEQ ID NO: 20380 - RNA, 32 nt, Homo Sapiens
cuucacaagauaauaagauaucacaaggcaaa

SEQ ID NO: 20381 - RNA, 28 nt, Homo Sapiens
auuauuguauuuaaaauguguuucuuac

SEQ ID NO: 20382 - RNA, 32 nt, Homo Sapiens
uuuacaacauuuguuuaccauauuuugauaua

SEQ ID NO: 20383 - RNA, 32 nt, Homo Sapiens
uuuaucuuuaucauacuaaaaugcugagugag

SEQ ID NO: 20384 - RNA, 32 nt, Homo Sapiens
uuguaaagguuuuuaaugaaaacuaccauuag

SEQ ID NO: 20385 - RNA, 32 nt, Homo Sapiens
ucaagagagagucaaagccggaugucccaucu

SEQ ID NO: 20386 - RNA, 32 nt, Homo Sapiens
uguuuacuuuucuauuuggcauagcuaacuac

SEQ ID NO: 20387 - RNA, 32 nt, Homo Sapiens
acagcucuuuuucacagaaccaaaaaacuaaa

SEQ ID NO: 20388 - RNA, 32 nt, Homo Sapiens
gugccuuuuuauuuuuguuuuuaaugcuuuga

SEQ ID NO: 20389 - RNA, 32 nt, Homo Sapiens
aaacguuuuuugcugcuauggucuuagccugu

SEQ ID NO: 20390 - RNA, 32 nt, Homo Sapiens
ccuucuguucuucuugccgaccuugaagcaga

SEQ ID NO: 20391 - RNA, 30 nt, Homo Sapiens
guaaguagagguggcuucagaaauggaacc

SEQ ID NO: 20392 - RNA, 32 nt, Homo Sapiens
ugacacaaaauaagaauuuucuuaauaugagc

SEQ ID NO: 20393 - RNA, 32 nt, Homo Sapiens
uucucucugacucucaucugcacuguccucuc

SEQ ID NO: 20394 - RNA, 32 nt, Homo Sapiens
gaggaaaaugcucauuauuucugcucugugag

SEQ ID NO: 20395 - RNA, 32 nt, Homo Sapiens
acagaaaaaaauuuuauaaaauuaagcaaugu

SEQ ID NO: 20396 - RNA, 32 nt, Homo Sapiens
auuaauaaugaaauuggugcugacauguaaug

SEQ ID NO: 20397 - RNA, 32 nt, Homo Sapiens
ggccuguacugccugcuuggggggugaugagg

SEQ ID NO: 20398 - RNA, 32 nt, Homo Sapiens
acuaggagaaaacacaucccucagccguggga

SEQ ID NO: 20399 - RNA, 32 nt, Homo Sapiens
aguuuuaaaaauuuguauguacuugacaauuc

SEQ ID NO: 20400 - RNA, 32 nt, Homo Sapiens
uggaugugggucugugggagucugcagauaga

SEQ ID NO: 20401 - RNA, 27 nt, Homo Sapiens
uucuaggaguuucucagccccuuagga

SEQ ID NO: 20402 - RNA, 32 nt, Homo Sapiens
uagcauuccaaauagacuuugaauagcguucu

SEQ ID NO: 20403 - RNA, 32 nt, Homo Sapiens
gucaaaacuaccucccaaccaagcccccgaua

SEQ ID NO: 20404 - RNA, 32 nt, Homo Sapiens
gacauucacagcagcucuguggauaccaugua

SEQ ID NO: 20405 - RNA, 32 nt, Homo Sapiens
gugauggggaccagcccaggccgcuguuucca

SEQ ID NO: 20406 - RNA, 32 nt, Homo Sapiens
augacuaagauccuucacuucucugaaaguaa

SEQ ID NO: 20407 - RNA, 32 nt, Homo Sapiens
auacuccucuucugcuuuccagugacuccacc

SEQ ID NO: 20408 - RNA, 32 nt, Homo Sapiens
uaacuguauuccccuuuccccuauggcugcug

SEQ ID NO: 20409 - RNA, 29 nt, Homo Sapiens
uugcacauagugaaucuguaagagaauuu

SEQ ID NO: 20410 - RNA, 28 nt, Homo Sapiens
aggaugcugagccugcugcugcuggcgc

SEQ ID NO: 20411 - RNA, 32 nt, Homo Sapiens
auaucagcaaaagggucuaccuuuaaaauaag

SEQ ID NO: 20412 - RNA, 32 nt, Homo Sapiens
acgaggcucgcggaagcagcagccgccgccug

SEQ ID NO: 20413 - RNA, 28 nt, Homo Sapiens
aagcagcggauuuccaggaugauuuccu

SEQ ID NO: 20414 - RNA, 32 nt, Homo Sapiens
gaggaaaagggagggcgagaaugaccacacaa

SEQ ID NO: 20415 - RNA, 32 nt, Homo Sapiens
gggcagcgcgcuggcggcggcgcggggcugca

SEQ ID NO: 20416 - RNA, 28 nt, Homo Sapiens
ggcacuagggaaaccaggaugacugaga

SEQ ID NO: 20417 - RNA, 32 nt, Homo Sapiens
aaacuuagggacauuauuaaauuggauggaau

SEQ ID NO: 20418 - RNA, 32 nt, Homo Sapiens
guauugaacccugccucccaguuaaagaacuc

SEQ ID NO: 20419 - RNA, 32 nt, Homo Sapiens
acuuuuuaaaggcuuuguccuauacauuuaga

SEQ ID NO: 20420 - RNA, 32 nt, Homo Sapiens
gaugaagcugaagaggguaaaagaagggcuau

SEQ ID NO: 20421 - RNA, 32 nt, Homo Sapiens
cuaguaaaguaaauucacuguagcuaaugaug

SEQ ID NO: 20422 - RNA, 32 nt, Homo Sapiens
cacuggccaaacuugagccaaucugagagcaa

SEQ ID NO: 20423 - RNA, 32 nt, Homo Sapiens
ggguuuuuguuguuguuuuuugaggcagaguc

SEQ ID NO: 20424 - RNA, 32 nt, Homo Sapiens
gauucuugugucucagucuuccggguagcugg

SEQ ID NO: 20425 - RNA, 32 nt, Homo Sapiens
cguuucaggaccacguuuauagcuucaggacc

SEQ ID NO: 20426 - RNA, 32 nt, Homo Sapiens
ucccuuccaugccggaacccaggccagggacc

SEQ ID NO: 20427 - RNA, 32 nt, Homo Sapiens
gauguugaauuuuaguuuuucuuuaaguugug

SEQ ID NO: 20428 - RNA, 32 nt, Homo Sapiens
cuacaagauuuuacaaauauuuuuguauugug

SEQ ID NO: 20429 - RNA, 32 nt, Homo Sapiens
guuugggcccucucccauccagugucucacag

SEQ ID NO: 20430 - RNA, 32 nt, Homo Sapiens
aaagcuuccagaagccaaaaagcuucugauuu

SEQ ID NO: 20431 - RNA, 32 nt, Homo Sapiens
gcucauguguuugcagaccggcugggauagcc

SEQ ID NO: 20432 - RNA, 32 nt, Homo Sapiens
ccgcgcgguccugcgcgggaucagcgagggcc

SEQ ID NO: 20433 - RNA, 32 nt, Homo Sapiens
caggagugaugcggccggcuuccguaccuccu

SEQ ID NO: 20434 - RNA, 29 nt, Homo Sapiens
gaagaacgagguuuauauuuucauguggu

SEQ ID NO: 20435 - RNA, 32 nt, Homo Sapiens
cuuuaaaugaagaguuagaauauuuuauuggc

SEQ ID NO: 20436 - RNA, 32 nt, Homo Sapiens
agcgagaugccccaccaccuccuggcgagucc

SEQ ID NO: 20437 - RNA, 32 nt, Homo Sapiens
ccaagcucuuuccacagccacaucagucaggg

SEQ ID NO: 20438 - RNA, 32 nt, Homo Sapiens
caucccugccagcucuucugccggcccugggg

SEQ ID NO: 20439 - RNA, 32 nt, Homo Sapiens
ccuaauucugucaucuccguagcccucccagu

SEQ ID NO: 20440 - RNA, 32 nt, Homo Sapiens
cauuuagaauuugaaaggaaaaacagaacauu

SEQ ID NO: 20441 - RNA, 32 nt, Homo Sapiens
gcuacuauaaucauguucugguaaaaauggag

SEQ ID NO: 20442 - RNA, 32 nt, Homo Sapiens
cgggcucauggcggccccgguccgccugggcc

SEQ ID NO: 20443 - RNA, 32 nt, Homo Sapiens
caguagaauggccagcauuccugccuguaagu

SEQ ID NO: 20444 - RNA, 32 nt, Homo Sapiens
ggagaugggacuggggucgcgcggccuucucc

SEQ ID NO: 20445 - RNA, 32 nt, Homo Sapiens
aaagcaugaugucccaugagggagacgguggg

SEQ ID NO: 20446 - RNA, 32 nt, Homo Sapiens
cugauguauggacuugcacaugaugaacugug

SEQ ID NO: 20447 - RNA, 32 nt, Homo Sapiens
ugcaaagugaacugguuguaccugaugaucug

SEQ ID NO: 20448 - RNA, 32 nt, Homo Sapiens
ggcacugagaagccagcuguccuccuuacacu

SEQ ID NO: 20449 - RNA, 32 nt, Homo Sapiens
uauuuuuaaugcuuaggggaagaauauaagua

SEQ ID NO: 20450 - RNA, 32 nt, Homo Sapiens
aauucagguuuuauguuauuccucuguguuca

SEQ ID NO: 20451 - RNA, 32 nt, Homo Sapiens
auacacaauuauuugcaaaugucucuuauuga

SEQ ID NO: 20452 - RNA, 32 nt, Homo Sapiens
acacacagccccggaagugcugacugacaagg

SEQ ID NO: 20453 - RNA, 32 nt, Homo Sapiens
uccaggucaacaccaguagugguaagucgugc

SEQ ID NO: 20454 - RNA, 32 nt, Homo Sapiens
uuuugcuagaacuucuuacugauaaggacgcu

SEQ ID NO: 20455 - RNA, 32 nt, Homo Sapiens
aaugagucggcgaaggaaacaugaugacagcc

SEQ ID NO: 20456 - RNA, 32 nt, Homo Sapiens
acaggagguuuugacggcuggaugcugcaggg

SEQ ID NO: 20457 - RNA, 32 nt, Homo Sapiens
auuuuuuccuacuauaauaaugcugaaucuua

SEQ ID NO: 20458 - RNA, 32 nt, Homo Sapiens
cagcgugauuaccaacgccagcucccuucacu

SEQ ID NO: 20459 - RNA, 32 nt, Homo Sapiens
uuccugcuugccacgugcucacagaguaggcu

SEQ ID NO: 20460 - RNA, 32 nt, Homo Sapiens
aucccccucccuuggaucugaccuuacauuug

SEQ ID NO: 20461 - RNA, 32 nt, Homo Sapiens
uuccucgguacuguuugcccugucccagggcc

SEQ ID NO: 20462 - RNA, 32 nt, Homo Sapiens
accucacggcagucuccgcagaugagccuacu

SEQ ID NO: 20463 - RNA, 32 nt, Homo Sapiens
uuguauccuuggauugugaacauguuagucaa

SEQ ID NO: 20464 - RNA, 32 nt, Homo Sapiens
agaagcagaaccagcucuacgagagugagacu

SEQ ID NO: 20465 - RNA, 32 nt, Homo Sapiens
cuuuuuugagacggagucucgcucugccgccc

SEQ ID NO: 20466 - RNA, 32 nt, Homo Sapiens
aaaaguuacccaucacguuucaguguaaauga

SEQ ID NO: 20467 - RNA, 32 nt, Homo Sapiens
cuuuuuauuuugcugcacacaaucuagcagga

SEQ ID NO: 20468 - RNA, 32 nt, Homo Sapiens
ccacagcaucgggagcacccagagcacccccu

SEQ ID NO: 20469 - RNA, 32 nt, Homo Sapiens
cgcggaggccaacgaggcgccgagaguaagca

SEQ ID NO: 20470 - RNA, 32 nt, Homo Sapiens
accugcagguccgugcgucccgcggcuggcgc

SEQ ID NO: 20471 - RNA, 32 nt, Homo Sapiens
acugagcccucccuacacaagccguaacuacu

SEQ ID NO: 20472 - RNA, 32 nt, Homo Sapiens
acuuggguuguaaauuuauuuguggggagugc

SEQ ID NO: 20473 - RNA, 32 nt, Homo Sapiens
ggcaaccucaggugccuuccucgcccaggucu

SEQ ID NO: 20474 - RNA, 32 nt, Homo Sapiens
agucaaacgcagaaggacugccucacugagca

SEQ ID NO: 20475 - RNA, 32 nt, Homo Sapiens
ccaccccuucccugcaagcuccaggucaccga

SEQ ID NO: 20476 - RNA, 32 nt, Homo Sapiens
ucagggauuggauuucacuacuguaugauaga

SEQ ID NO: 20477 - RNA, 32 nt, Homo Sapiens
cacccccgucccugcuggccuccagccagugc

SEQ ID NO: 20478 - RNA, 32 nt, Homo Sapiens
ucccuauugucacuuuguuuugcaauguuuuu

SEQ ID NO: 20479 - RNA, 32 nt, Homo Sapiens
uaugccuugguguaucuaguagaguggaucuu

SEQ ID NO: 20480 - RNA, 32 nt, Homo Sapiens
gaagacccgggcggggcgggcgcuucccggac

SEQ ID NO: 20481 - RNA, 32 nt, Homo Sapiens
uguaggcugcuacgcuccugugcacgagggcg

SEQ ID NO: 20482 - RNA, 32 nt, Homo Sapiens
aucauuaaacaugaauuuaaugucuaggauaa

SEQ ID NO: 20483 - RNA, 32 nt, Homo Sapiens
cgggagccgaggaggagguuccggacgcugcu

SEQ ID NO: 20484 - RNA, 32 nt, Homo Sapiens
ccuucccgccuggcgccgcccgggagagcccg

SEQ ID NO: 20485 - RNA, 32 nt, Homo Sapiens
ucuuugugacuaucugcagugaaacuuugcuu

SEQ ID NO: 20486 - RNA, 32 nt, Homo Sapiens
cauacacauuaaaauuugauaauuucaacaac

SEQ ID NO: 20487 - RNA, 30 nt, Homo Sapiens
auaaaacacugugcugcugaguucaucuca

SEQ ID NO: 20488 - RNA, 32 nt, Homo Sapiens
uuuuacauauacauuuucuuguggagcaauag

SEQ ID NO: 20489 - RNA, 32 nt, Homo Sapiens
gggugggcaaugccucccggccuccagacgcu

SEQ ID NO: 20490 - RNA, 32 nt, Homo Sapiens
cacagaaaucaucagcuauacauuaguaaaaa

SEQ ID NO: 20491 - RNA, 32 nt, Homo Sapiens
cgagaaaccuauuucucagaccccuuuuucuc

SEQ ID NO: 20492 - RNA, 32 nt, Homo Sapiens
ggggcauuucccuuugggauauuugccacagc

SEQ ID NO: 20493 - RNA, 31 nt, Homo Sapiens
gcagcuugaaggagccaaccauggauuugag

SEQ ID NO: 20494 - RNA, 32 nt, Homo Sapiens
cagaccuuuuucuuucucgcguggggccugac

SEQ ID NO: 20495 - RNA, 32 nt, Homo Sapiens
ggacugcugaguuuuucuucauggggggucag

SEQ ID NO: 20496 - RNA, 32 nt, Homo Sapiens
accauauuaaauuuauaauaaaaaaugccccu

SEQ ID NO: 20497 - RNA, 32 nt, Homo Sapiens
aggaaaaucugaccuggcauuuucuugaggca

SEQ ID NO: 20498 - RNA, 32 nt, Homo Sapiens
gaugcagccuugagacacgcugugagcauccc

SEQ ID NO: 20499 - RNA, 32 nt, Homo Sapiens
guucacgccgggugcggaggacaggcccuggc

SEQ ID NO: 20500 - RNA, 32 nt, Homo Sapiens
cagaugcaaacaaguguccuccccugaauugu

SEQ ID NO: 20501 - RNA, 32 nt, Homo Sapiens
ugccucuuuuuaaaagaaauuuuuauggaaaa

SEQ ID NO: 20502 - RNA, 32 nt, Homo Sapiens
aggccgccgggcgggggcggggacgaccaacu

SEQ ID NO: 20503 - RNA, 32 nt, Homo Sapiens
aauccccugcccugugggccaagcacuuacag

SEQ ID NO: 20504 - RNA, 32 nt, Homo Sapiens
ccacugcagggccaggcucucagucaccccug

SEQ ID NO: 20505 - RNA, 32 nt, Homo Sapiens
uuucucauuucccuauuguuccuaauacagaa

SEQ ID NO: 20506 - RNA, 32 nt, Homo Sapiens
agggguccuacuuuuuuccccaccucugucgc

SEQ ID NO: 20507 - RNA, 32 nt, Homo Sapiens
gcugacucuccugacucuguguuuccuacaau

SEQ ID NO: 20508 - RNA, 32 nt, Homo Sapiens
cacaucagucccuguuuagaaaacauuuaaaa

SEQ ID NO: 20509 - RNA, 32 nt, Homo Sapiens
ggcgcucagacauuuuaaccggaacugaugua

SEQ ID NO: 20510 - RNA, 32 nt, Homo Sapiens
uauaggggaauauaaucuuauauuuuaacagg

SEQ ID NO: 20511 - RNA, 27 nt, Homo Sapiens
ggaugucgguguuccuggggccaggga

SEQ ID NO: 20512 - RNA, 32 nt, Homo Sapiens
accucagaccucuauuggaaggaaaucgaguu

SEQ ID NO: 20513 - RNA, 32 nt, Homo Sapiens
gagcccacccccagcacccccaucuguuaaua

SEQ ID NO: 20514 - RNA, 32 nt, Homo Sapiens
uuuacgcagaaaaaugcuguauuucuugggaa

SEQ ID NO: 20515 - RNA, 32 nt, Homo Sapiens
ucugaguucacgccauucuacugccucagccu

SEQ ID NO: 20516 - RNA, 32 nt, Homo Sapiens
accagccugcccaacauagugaaacuccgucu

SEQ ID NO: 20517 - RNA, 32 nt, Homo Sapiens
gcucugaggguggaaggcagggaggugccagc

SEQ ID NO: 20518 - RNA, 32 nt, Homo Sapiens
ccugcucuucuuccggcaggaccaggcccaca

SEQ ID NO: 20519 - RNA, 32 nt, Homo Sapiens
caccuggagcgcggccucuccuccucccuucc

SEQ ID NO: 20520 - RNA, 32 nt, Homo Sapiens
uucuggcucccucuucuuucagacuugccaug

SEQ ID NO: 20521 - RNA, 32 nt, Homo Sapiens
cuaacgccuguuugugaaauuagcuuaucagg

SEQ ID NO: 20522 - RNA, 32 nt, Homo Sapiens
cauacugcuuucaaaagucuuuucucaucagu

SEQ ID NO: 20523 - RNA, 32 nt, Homo Sapiens
aaguauucuucagagagcugccuucccaaggg

SEQ ID NO: 20524 - RNA, 32 nt, Homo Sapiens
ggucuguuauuuacaucuuacaguuuggcuac

SEQ ID NO: 20525 - RNA, 32 nt, Homo Sapiens
gacauuguauagaagaacauugugaaacuccc

SEQ ID NO: 20526 - RNA, 32 nt, Homo Sapiens
uaacugcauaugcugcccuuuaggcucacaaa

SEQ ID NO: 20527 - RNA, 32 nt, Homo Sapiens
ucuugggguauuuuaauuguacugucugaacc

SEQ ID NO: 20528 - RNA, 32 nt, Homo Sapiens
cggaggcgcggcgcaggcugcugcaggcccag

SEQ ID NO: 20529 - RNA, 32 nt, Homo Sapiens
gcagccuuucuaucagacaauuuugggacgau

SEQ ID NO: 20530 - RNA, 32 nt, Homo Sapiens
ugugguccuuggcaagugaugugugagucccg

SEQ ID NO: 20531 - RNA, 32 nt, Homo Sapiens
gaugaauuuccacuucaaaagucuuucauugg

SEQ ID NO: 20532 - RNA, 32 nt, Homo Sapiens
ucaaucuuaaugucucuucauaauacuuuuau

SEQ ID NO: 20533 - RNA, 32 nt, Homo Sapiens
ggcauugugucugaccugugcaucucccaugg

SEQ ID NO: 20534 - RNA, 32 nt, Homo Sapiens
gauguugugccccagaccugccugcaugguuc

SEQ ID NO: 20535 - RNA, 29 nt, Homo Sapiens
ugguuuucuauccacguucuaugccauau

SEQ ID NO: 20536 - RNA, 32 nt, Homo Sapiens
aaaauuauuuuaaaacaccuuuauugaaaaga

SEQ ID NO: 20537 - RNA, 32 nt, Homo Sapiens
cgaccgaccgcggcugccccaguugaugagcg

SEQ ID NO: 20538 - RNA, 32 nt, Homo Sapiens
cuaacuaaagagaagaaaaguuuuuaucguau

SEQ ID NO: 20539 - RNA, 32 nt, Homo Sapiens
auauguuucccccucaggaccuggacaacauc

SEQ ID NO: 20540 - RNA, 32 nt, Homo Sapiens
gcugauugugugguucuaucuguucguggcuu

SEQ ID NO: 20541 - RNA, 32 nt, Homo Sapiens
ugagagguaauuuuauucuccucuuccuuuua

SEQ ID NO: 20542 - RNA, 32 nt, Homo Sapiens
aaaaagacaaaaauaaaaauuccuuuuuauuc

SEQ ID NO: 20543 - RNA, 32 nt, Homo Sapiens
uuucaagcuggauguaaauuagagugggugga

SEQ ID NO: 20544 - RNA, 32 nt, Homo Sapiens
uucuucugugugcauugcuucuguaaaugcag

SEQ ID NO: 20545 - RNA, 32 nt, Homo Sapiens
ccgcgacggggaccggggcugggcgcuggagc

SEQ ID NO: 20546 - RNA, 32 nt, Homo Sapiens
ugcagggcucugcgcggcgugccgcggcggcc

SEQ ID NO: 20547 - RNA, 32 nt, Homo Sapiens
guguccucauccggagacacaaacaccugccu

SEQ ID NO: 20548 - RNA, 32 nt, Homo Sapiens
agaggaugcuguucuucagugcugaaauccac

SEQ ID NO: 20549 - RNA, 32 nt, Homo Sapiens
cugaacaacuaacuucauaaguaguauuaacu

SEQ ID NO: 20550 - RNA, 32 nt, Homo Sapiens
acuugucuaacagauuuuccaucaacaaauau

SEQ ID NO: 20551 - RNA, 32 nt, Homo Sapiens
aggcccgggucgucgucauauuccgaguguga

SEQ ID NO: 20552 - RNA, 32 nt, Homo Sapiens
acuaaaucagccaguuaaugugauucaguugu

SEQ ID NO: 20553 - RNA, 32 nt, Homo Sapiens
cauagcccuuuacccugagcaccacccaacag

SEQ ID NO: 20554 - RNA, 32 nt, Homo Sapiens
uacuguguggccggcccggggccagcgccgcc

SEQ ID NO: 20555 - RNA, 32 nt, Homo Sapiens
acuuuucaaaaauuugauuaaaugguuuuaua

SEQ ID NO: 20556 - RNA, 32 nt, Homo Sapiens
cccgccuguccaaccccaccccggggccaaag

SEQ ID NO: 20557 - RNA, 32 nt, Homo Sapiens
ucucuucaucuucugauugggauuguguccag

SEQ ID NO: 20558 - RNA, 32 nt, Homo Sapiens
ugugccaagaagaugugaaacuauucugcuag

SEQ ID NO: 20559 - RNA, 32 nt, Homo Sapiens
gggcauccagcaagccccuccacagcucuugc

SEQ ID NO: 20560 - RNA, 32 nt, Homo Sapiens
uuccaauuuuuaaagaaaauuuggcuagcugg

SEQ ID NO: 20561 - RNA, 32 nt, Homo Sapiens
cagcugcuggcucgcgguucugagagugccug

SEQ ID NO: 20562 - RNA, 32 nt, Homo Sapiens
ugguacccaagcccccuccccugaccugggug

SEQ ID NO: 20563 - RNA, 32 nt, Homo Sapiens
ccggcagcugucugcgcacgccgagcuccacg

SEQ ID NO: 20564 - RNA, 32 nt, Homo Sapiens
cggaaggguuuggggcgggccugguccugagg

SEQ ID NO: 20565 - RNA, 32 nt, Homo Sapiens
ccaagccuccucaacuaugaccucaaccggcc

SEQ ID NO: 20566 - RNA, 32 nt, Homo Sapiens
cagcagacugguuugcagugaauuuucauuuc

SEQ ID NO: 20567 - RNA, 32 nt, Homo Sapiens
caggcuagagccggcgcgcccgggcgcgcacc

SEQ ID NO: 20568 - RNA, 32 nt, Homo Sapiens
ggcuucugguagugccugaucacagcccauga

SEQ ID NO: 20569 - RNA, 32 nt, Homo Sapiens
gaaguccguugacucccaccgcugaagggagc

SEQ ID NO: 20570 - RNA, 32 nt, Homo Sapiens
auuuuuuagugaauuuuuuuuaaacuuacagc

SEQ ID NO: 20571 - RNA, 32 nt, Homo Sapiens
ggugauguagcagcaauuguguuggcaggguu

SEQ ID NO: 20572 - RNA, 32 nt, Homo Sapiens
cuccugccccccgugcgcccuaggcgccacca

SEQ ID NO: 20573 - RNA, 32 nt, Homo Sapiens
uuugagcaagccgagcucuccuuguuaccgug

SEQ ID NO: 20574 - RNA, 32 nt, Homo Sapiens
uuuaccucaaggauaaaugauuacugucaccu

SEQ ID NO: 20575 - RNA, 32 nt, Homo Sapiens
uuacaauucuguguaaaaauagagcaguaucu

SEQ ID NO: 20576 - RNA, 32 nt, Homo Sapiens
cucuaccugucccuuuuucucuaacaugucca

SEQ ID NO: 20577 - RNA, 32 nt, Homo Sapiens
uuuccuagguaguuguaacucuaacauaguuu

SEQ ID NO: 20578 - RNA, 32 nt, Homo Sapiens
agggcugugcuaaggagggaagccugugaaga

SEQ ID NO: 20579 - RNA, 32 nt, Homo Sapiens
gguguuggaagaugcauccauguaaucuauuc

SEQ ID NO: 20580 - RNA, 32 nt, Homo Sapiens
acacucauucauccuuuccccaggcccaugaa

SEQ ID NO: 20581 - RNA, 32 nt, Homo Sapiens
agggugaaggagaggacugaugagaagggcuu

SEQ ID NO: 20582 - RNA, 32 nt, Homo Sapiens
acuaauaagucuuuuacucuucaucuaaugaa

SEQ ID NO: 20583 - RNA, 32 nt, Homo Sapiens
guuuucaccauauuggucaggcuggucucgaa

SEQ ID NO: 20584 - RNA, 32 nt, Homo Sapiens
gcagagguagggggcugcuuugggcuuugcac

SEQ ID NO: 20585 - RNA, 32 nt, Homo Sapiens
uaauauccgaucucauggcccucuuaacauuu

SEQ ID NO: 20586 - RNA, 32 nt, Homo Sapiens
agucauuagacccagaauuagagcagccagca

SEQ ID NO: 20587 - RNA, 32 nt, Homo Sapiens
gaccgggcaugguguugggcgccgggcccgcc

SEQ ID NO: 20588 - RNA, 32 nt, Homo Sapiens
uggaaaugcaagaugaauacaagccuuggguc

SEQ ID NO: 20589 - RNA, 32 nt, Homo Sapiens
ugcccacgcggaggugcgucuaugcugagcug

SEQ ID NO: 20590 - RNA, 32 nt, Homo Sapiens
cuguagaagcacaauuuacugcucuugcggag

SEQ ID NO: 20591 - RNA, 32 nt, Homo Sapiens
cccaggagcagccuguuuacaucugccgcggc

SEQ ID NO: 20592 - RNA, 32 nt, Homo Sapiens
gaaaaugguaagucagcuuugcaggcagaugc

SEQ ID NO: 20593 - RNA, 32 nt, Homo Sapiens
uccccuguccccaaguuccaaaagcacagacu

SEQ ID NO: 20594 - RNA, 32 nt, Homo Sapiens
gcagugaguguuacaguucuuaaagauggugu

SEQ ID NO: 20595 - RNA, 32 nt, Homo Sapiens
ggggaggccgccucugagcgggacgccgggac

SEQ ID NO: 20596 - RNA, 32 nt, Homo Sapiens
uguugcacauucagagaauuuuauauauauau

SEQ ID NO: 20597 - RNA, 32 nt, Homo Sapiens
uuauugaagugcaaaauaaacagaacaauaug

SEQ ID NO: 20598 - RNA, 32 nt, Homo Sapiens
uuaguaauuuaaaugauauacuaaauuugugu

SEQ ID NO: 20599 - RNA, 32 nt, Homo Sapiens
agcuuuaauagaaacccccagccccuggaggg

SEQ ID NO: 20600 - RNA, 32 nt, Homo Sapiens
aagauucacugaucccacuuugaaauacaucu

SEQ ID NO: 20601 - RNA, 32 nt, Homo Sapiens
gauuugugugugcaccgcgucuccagcgaucc

SEQ ID NO: 20602 - RNA, 32 nt, Homo Sapiens
uaauuaugcgaauguuucccugucccugauuu

SEQ ID NO: 20603 - RNA, 32 nt, Homo Sapiens
guuauacugucuuaaucaggguuuuuuauaca

SEQ ID NO: 20604 - RNA, 32 nt, Homo Sapiens
aggacuuuccccuuuuuauauuuguauuaacu

SEQ ID NO: 20605 - RNA, 32 nt, Homo Sapiens
gggggcaguuuagaugcugugaaauuaaaccu

SEQ ID NO: 20606 - RNA, 32 nt, Homo Sapiens
auuucuuuggggggaaaaggcuuuuguuuugu

SEQ ID NO: 20607 - RNA, 32 nt, Homo Sapiens
gguucuuagugaccagauguuguaaugggcua

SEQ ID NO: 20608 - RNA, 32 nt, Homo Sapiens
uuggaggagcccaauuuguauucagucuaaau

SEQ ID NO: 20609 - RNA, 32 nt, Homo Sapiens
ggggccugucgagcugcaguuuauguucuaua

SEQ ID NO: 20610 - RNA, 32 nt, Homo Sapiens
acgugcuuuuauuauauccauuuuacagauga

SEQ ID NO: 20611 - RNA, 32 nt, Homo Sapiens
ugagcagaaugagacucaagggguugcucaga

SEQ ID NO: 20612 - RNA, 32 nt, Homo Sapiens
ccagaaaggugauuccaggaggaguuagccca

SEQ ID NO: 20613 - RNA, 32 nt, Homo Sapiens
cauacccugccagcugugacuuguuauccuac

SEQ ID NO: 20614 - RNA, 32 nt, Homo Sapiens
uaacuucccccgcuacguccccguucgcccgc

SEQ ID NO: 20615 - RNA, 32 nt, Homo Sapiens
guuucagagaugcacaaaguaggccugguaaa

SEQ ID NO: 20616 - RNA, 32 nt, Homo Sapiens
uucuuuucaaagugggauagcuauugcagcuu

SEQ ID NO: 20617 - RNA, 32 nt, Homo Sapiens
ggugcugaagagagcacugccucccuguguga

SEQ ID NO: 20618 - RNA, 32 nt, Homo Sapiens
caaccucccagauccaccccgccccgcagccc

SEQ ID NO: 20619 - RNA, 32 nt, Homo Sapiens
ccugugacacguguuuaccuauguagaaaccu

SEQ ID NO: 20620 - RNA, 32 nt, Homo Sapiens
ccucgcugccgcccgcgccgggagaggaggga

SEQ ID NO: 20621 - RNA, 32 nt, Homo Sapiens
ugaaagcaacaugaaaugaacuguaguaggug

SEQ ID NO: 20622 - RNA, 32 nt, Homo Sapiens
agguugggcuccucucugcugcuggacccaag

SEQ ID NO: 20623 - RNA, 31 nt, Homo Sapiens
cacagcagaagcagccaaaauggauccccag

SEQ ID NO: 20624 - RNA, 32 nt, Homo Sapiens
aggguuucugaaaaacagcaggauuaaguacu

SEQ ID NO: 20625 - RNA, 32 nt, Homo Sapiens
cccauugccuccucccucuccugucaaaaacc

SEQ ID NO: 20626 - RNA, 32 nt, Homo Sapiens
auuuggaaccguuggauaagaagugcucgggc

SEQ ID NO: 20627 - RNA, 32 nt, Homo Sapiens
cuacaaccaggcuagacuuugcuggcucuaaa

SEQ ID NO: 20628 - RNA, 32 nt, Homo Sapiens
gggaaagacagaggcgggaggauugagugagg

SEQ ID NO: 20629 - RNA, 32 nt, Homo Sapiens
gggaaggucgguggcgagugaucccucaugau

SEQ ID NO: 20630 - RNA, 32 nt, Homo Sapiens
ucauggaggugcgagagacuccauucaaacca

SEQ ID NO: 20631 - RNA, 32 nt, Homo Sapiens
uuuuccauuuaugauuuuaacaaagaaaggua

SEQ ID NO: 20632 - RNA, 32 nt, Homo Sapiens
gugcguucugccuuccuuguuaauuuuguaau

SEQ ID NO: 20633 - RNA, 32 nt, Homo Sapiens
ccuacagccgccaggccugggguccugaaagg

SEQ ID NO: 20634 - RNA, 32 nt, Homo Sapiens
gauaaacucauccuauuaaaauguaugcugug

SEQ ID NO: 20635 - RNA, 32 nt, Homo Sapiens
acaugccuguagcccuuucucacuccaucccc

SEQ ID NO: 20636 - RNA, 32 nt, Homo Sapiens
aagccuucggggugcuguaaucggcgggcaga

SEQ ID NO: 20637 - RNA, 32 nt, Homo Sapiens
agacuuuaaaaauacugucccagaaauguaau

SEQ ID NO: 20638 - RNA, 30 nt, Homo Sapiens
accccacagaagcuugcuggcuggccauuu

SEQ ID NO: 20639 - RNA, 32 nt, Homo Sapiens
aaacauuucagcuaggaauaccacugauuuag

SEQ ID NO: 20640 - RNA, 29 nt, Homo Sapiens
uucccaauguggcucagaggcaggagcuc

SEQ ID NO: 20641 - RNA, 32 nt, Homo Sapiens
cacuugcccacucuccuuccuggaguguugag

SEQ ID NO: 20642 - RNA, 32 nt, Homo Sapiens
cagcaggaagcagccagaugaucaacgacgcc

SEQ ID NO: 20643 - RNA, 32 nt, Homo Sapiens
ugccuggccccucccugguggggacagugaca

SEQ ID NO: 20644 - RNA, 32 nt, Homo Sapiens
ucccaaggauagaauugaaauaaaauguuuuc

SEQ ID NO: 20645 - RNA, 32 nt, Homo Sapiens
agcugaggugugagcagcugccgaagucaguu

SEQ ID NO: 20646 - RNA, 32 nt, Homo Sapiens
ccacugucuuguuaccaauuagacaucuggaa

SEQ ID NO: 20647 - RNA, 32 nt, Homo Sapiens
ucagagaaauuugaaaauuggcaggugcacuu

SEQ ID NO: 20648 - RNA, 32 nt, Homo Sapiens
uccucggccucagcccucuccuagcucucccc

SEQ ID NO: 20649 - RNA, 32 nt, Homo Sapiens
ugugcccagaaagccacgaucccggaauuucc

SEQ ID NO: 20650 - RNA, 32 nt, Homo Sapiens
accccugccugggggguggccuucaugcacua

SEQ ID NO: 20651 - RNA, 32 nt, Homo Sapiens
cauucagugauugauccaaaauuauuuacuga

SEQ ID NO: 20652 - RNA, 32 nt, Homo Sapiens
aaaugcaggauuugucccacucuguuuucucc

SEQ ID NO: 20653 - RNA, 32 nt, Homo Sapiens
uucacagaaacuaggcaaaaauuuaagaaaac

SEQ ID NO: 20654 - RNA, 32 nt, Homo Sapiens
ccaaaaaucaccuugucuaauuuuauggauau

SEQ ID NO: 20655 - RNA, 32 nt, Homo Sapiens
gauccaagugacuuuaaaucugcccguggcau

SEQ ID NO: 20656 - RNA, 32 nt, Homo Sapiens
ugucacagccuucugaaguuacucauuauaag

SEQ ID NO: 20657 - RNA, 32 nt, Homo Sapiens
aucauugaauaaaacggguguagaguacagga

SEQ ID NO: 20658 - RNA, 32 nt, Homo Sapiens
gagguggcggggguguuggggacgggugcugc

SEQ ID NO: 20659 - RNA, 32 nt, Homo Sapiens
guugcaacugggccuggcauguuucagugugg

SEQ ID NO: 20660 - RNA, 32 nt, Homo Sapiens
uucuggguguacggagcagcucuaagccggca

SEQ ID NO: 20661 - RNA, 32 nt, Homo Sapiens
gacagagucuugcucugucacccagguuggag

SEQ ID NO: 20662 - RNA, 32 nt, Homo Sapiens
gacagagucuugcucuguuacccaggcuggag

SEQ ID NO: 20663 - RNA, 32 nt, Homo Sapiens
guuuuauaaucagauaaaaauuuuuacaagga

SEQ ID NO: 20664 - RNA, 32 nt, Homo Sapiens
gacagagucucgcucugucacccaggcuggag

SEQ ID NO: 20665 - RNA, 32 nt, Homo Sapiens
gacggagucucacucugucacccaggcuggag

SEQ ID NO: 20666 - RNA, 32 nt, Homo Sapiens
gauggagucuuacucugucacccaggcuggag

SEQ ID NO: 20667 - RNA, 32 nt, Homo Sapiens
ugccaaaagacaauuucuagaguaguuuugaa

SEQ ID NO: 20668 - RNA, 32 nt, Homo Sapiens
ucuugcggcgcgcucgcgcccgcgggccaugc

SEQ ID NO: 20669 - RNA, 32 nt, Homo Sapiens
gcuugccgugcagccggaggcucggcucgcug

SEQ ID NO: 20670 - RNA, 31 nt, Homo Sapiens
ggugcccgcccggccucucaccugccuccuu

SEQ ID NO: 20671 - RNA, 32 nt, Homo Sapiens
caugcugaaaauaaauacaauucaagugacag

SEQ ID NO: 20672 - RNA, 32 nt, Homo Sapiens
aacuugcucauggaguugcaguucuugccuaa

SEQ ID NO: 20673 - RNA, 32 nt, Homo Sapiens
gguggcuccagaucuggagguguguccauggc

SEQ ID NO: 20674 - RNA, 32 nt, Homo Sapiens
aggagguggcucaguuauugaaccuuuuggga

SEQ ID NO: 20675 - RNA, 32 nt, Homo Sapiens
gaggaaacagcuuugaaguguggagcgggaaa

SEQ ID NO: 20676 - RNA, 32 nt, Homo Sapiens
acuugcacuuguuuuucuuuuuacaguuacuu

SEQ ID NO: 20677 - RNA, 32 nt, Homo Sapiens
aaguaaaacguauuuuaacgauguuagaauaa

SEQ ID NO: 20678 - RNA, 32 nt, Homo Sapiens
caccuccacccucccacccccuggaagaggaa

SEQ ID NO: 20679 - RNA, 32 nt, Homo Sapiens
gggcgcggggagagggcgcgggagcggcucgu

SEQ ID NO: 20680 - RNA, 32 nt, Homo Sapiens
gcgcuccagguucugugaggccccacgggagc

SEQ ID NO: 20681 - RNA, 32 nt, Homo Sapiens
cggcagccccuccuccccggcgcccucaggac

SEQ ID NO: 20682 - RNA, 32 nt, Homo Sapiens
uguuuuccugguuuuuuuugguuguuuuuuga

SEQ ID NO: 20683 - RNA, 32 nt, Homo Sapiens
auuccaaauacuucuuuuuuccccuggagucc

SEQ ID NO: 20684 - RNA, 32 nt, Homo Sapiens
caugccuaaaagacacuaccagucaccuuuga

SEQ ID NO: 20685 - RNA, 32 nt, Homo Sapiens
uauucugcauuaauccaauacuauuccaacaa

SEQ ID NO: 20686 - RNA, 32 nt, Homo Sapiens
ucugagagguccagcagcaagcagggcaguug

SEQ ID NO: 20687 - RNA, 32 nt, Homo Sapiens
uugaucacaaccaguuuguagauuucuuuguu

SEQ ID NO: 20688 - RNA, 31 nt, Homo Sapiens
ucccccaggcugcgccugcccgcccgccggu

SEQ ID NO: 20689 - RNA, 32 nt, Homo Sapiens
cuggaguugggucuugcccagcccugcaguuu

SEQ ID NO: 20690 - RNA, 32 nt, Homo Sapiens
cuuauuaauuuucuaugauauuuuuuccuucu

SEQ ID NO: 20691 - RNA, 30 nt, Homo Sapiens
aucucugagauucucucugagucugggaug

SEQ ID NO: 20692 - RNA, 32 nt, Homo Sapiens
cagaccgcuucacuuguaaaagaaauuaggcu

SEQ ID NO: 20693 - RNA, 32 nt, Homo Sapiens
uaguagugaccgugcuuuaucagagcuguuuu

SEQ ID NO: 20694 - RNA, 32 nt, Homo Sapiens
cgguuggggaggagguggccuggccggcucca

SEQ ID NO: 20695 - RNA, 29 nt, Homo Sapiens
ucugaaaugaagauggaggaggcaguggg

SEQ ID NO: 20696 - RNA, 32 nt, Homo Sapiens
aaucuacuuuuguuagaguuuuauaaauacag

SEQ ID NO: 20697 - RNA, 32 nt, Homo Sapiens
ugcuaagauuuucagauaucuauuguggaucu

SEQ ID NO: 20698 - RNA, 32 nt, Homo Sapiens
uggggaggugguuggacgagguccugcuugag

SEQ ID NO: 20699 - RNA, 32 nt, Homo Sapiens
ggaagucaccccucacucaaucucagagaacu

SEQ ID NO: 20700 - RNA, 32 nt, Homo Sapiens
cucgccaauccggcuccggcgccggcgcccgc

SEQ ID NO: 20701 - RNA, 31 nt, Homo Sapiens
aguuacaagaucucauuuaauccgccuaaca

SEQ ID NO: 20702 - RNA, 32 nt, Homo Sapiens
agggaggguggaggaguggauagaacuuggga

SEQ ID NO: 20703 - RNA, 32 nt, Homo Sapiens
aaccagcccacccagcagucaguacacaugcc

SEQ ID NO: 20704 - RNA, 32 nt, Homo Sapiens
caauauuuucuuuucccccauuaaucaguuca

SEQ ID NO: 20705 - RNA, 32 nt, Homo Sapiens
uggcauauugacccuauauaaaaaagugggca

SEQ ID NO: 20706 - RNA, 31 nt, Homo Sapiens
caauccuagguaauuaaaccauagacccaaa

SEQ ID NO: 20707 - RNA, 32 nt, Homo Sapiens
auauuucgugacuuauaucuugcacauaccag

SEQ ID NO: 20708 - RNA, 32 nt, Homo Sapiens
cauuuuuaguuccucagcauauuuuauugcug

SEQ ID NO: 20709 - RNA, 32 nt, Homo Sapiens
cacucuugggggauuugguacacucuaaugga

SEQ ID NO: 20710 - RNA, 32 nt, Homo Sapiens
uacuguuuguaucagggaaguggagaaucuaa

SEQ ID NO: 20711 - RNA, 32 nt, Homo Sapiens
cagcagucaccggagugccggagggggaagcg

SEQ ID NO: 20712 - RNA, 32 nt, Homo Sapiens
uggucccuccaaggccgacuccuaaggaauca

SEQ ID NO: 20713 - RNA, 32 nt, Homo Sapiens
auauggcacaugcuaucaguuuuuuggggcag

SEQ ID NO: 20714 - RNA, 32 nt, Homo Sapiens
cauggcuggcagauucguggccccacccaucu

SEQ ID NO: 20715 - RNA, 32 nt, Homo Sapiens
guuucuauuuauucuuuuuugccccccuagag

SEQ ID NO: 20716 - RNA, 32 nt, Homo Sapiens
uugaggcauuucacuauaaucaauaaaauaaa

SEQ ID NO: 20717 - RNA, 32 nt, Homo Sapiens
ccuuguauuuaguaagugcuuguuuuacauaa

SEQ ID NO: 20718 - RNA, 32 nt, Homo Sapiens
acuacaggcgugugccaccaguccuggcuaau

SEQ ID NO: 20719 - RNA, 32 nt, Homo Sapiens
aaaccagcagguggcagcaguaguuaagagaa

SEQ ID NO: 20720 - RNA, 32 nt, Homo Sapiens
gaaccuccaggucagccccgcggcccuccaug

SEQ ID NO: 20721 - RNA, 32 nt, Homo Sapiens
aucgcucuguguuuccugcuccagguuucgcg

SEQ ID NO: 20722 - RNA, 30 nt, Homo Sapiens
cggagcugcuucuuuggcggcagcggcggc

SEQ ID NO: 20723 - RNA, 32 nt, Homo Sapiens
gcccugugcgccccggcccccaucccucuggg

SEQ ID NO: 20724 - RNA, 32 nt, Homo Sapiens
uccagccgcgcgcguccuccgccuccgcugcc

SEQ ID NO: 20725 - RNA, 32 nt, Homo Sapiens
auuuuucuauagaugagccauuacagcaagga

SEQ ID NO: 20726 - RNA, 32 nt, Homo Sapiens
gaggacgaggcagggcgggcgggcgcucuaag

SEQ ID NO: 20727 - RNA, 32 nt, Homo Sapiens
gaggccaugguguucugccgggagcuggggug

SEQ ID NO: 20728 - RNA, 32 nt, Homo Sapiens
accgcuaacuggugcaccuuguccuuggcccu

SEQ ID NO: 20729 - RNA, 32 nt, Homo Sapiens
gaaagaggguggugagguuuugaaagacagau

SEQ ID NO: 20730 - RNA, 32 nt, Homo Sapiens
ucauucauuuuuccaacauuaaggaauaaacu

SEQ ID NO: 20731 - RNA, 32 nt, Homo Sapiens
uuagcuauccauuuaucuuuuacaugaacuug

SEQ ID NO: 20732 - RNA, 32 nt, Homo Sapiens
gaguggagaagcugcaagugcugaggcgcggu

SEQ ID NO: 20733 - RNA, 32 nt, Homo Sapiens
gaucuucccacuuugccacuggaugacuuugg

SEQ ID NO: 20734 - RNA, 31 nt, Homo Sapiens
acccacucacggagaugccucuugccccacg

SEQ ID NO: 20735 - RNA, 32 nt, Homo Sapiens
aagaugauuuaaaagggaagucuagaguuccu

SEQ ID NO: 20736 - RNA, 32 nt, Homo Sapiens
acaugggaauagggcuuccaccaagagucccg

SEQ ID NO: 20737 - RNA, 32 nt, Homo Sapiens
aguugacgucugugggcacuaagggacugagg

SEQ ID NO: 20738 - RNA, 32 nt, Homo Sapiens
ucagcaagugaacacacucuaugucaacucuc

SEQ ID NO: 20739 - RNA, 32 nt, Homo Sapiens
agugcaagaaggauaccaaauaccauguacau

SEQ ID NO: 20740 - RNA, 32 nt, Homo Sapiens
ucucaucguggcuuggucuuuaugaugaccag

SEQ ID NO: 20741 - RNA, 32 nt, Homo Sapiens
cauuucccauccccauuccccaccacauuaug

SEQ ID NO: 20742 - RNA, 32 nt, Homo Sapiens
aaauguggcagagcuugcaaauguccuugaga

SEQ ID NO: 20743 - RNA, 32 nt, Homo Sapiens
agauauaaacauuuugcuuuuuuucaguuuug

SEQ ID NO: 20744 - RNA, 32 nt, Homo Sapiens
uucuuuaaaaagacaagaauaaggucugguua

SEQ ID NO: 20745 - RNA, 32 nt, Homo Sapiens
augacuaccggggcuuccuggcugagaugaag

SEQ ID NO: 20746 - RNA, 32 nt, Homo Sapiens
aacaacagaaauuuuucuuaaauuaaaggaau

SEQ ID NO: 20747 - RNA, 32 nt, Homo Sapiens
ugaaggggcugccuauugggcugaugcuguga

SEQ ID NO: 20748 - RNA, 27 nt, Homo Sapiens
cuccgugguucucucagccccaccuca

SEQ ID NO: 20749 - RNA, 32 nt, Homo Sapiens
ggucccuaccuggagauccccggagccccccu

SEQ ID NO: 20750 - RNA, 32 nt, Homo Sapiens
acauuaagguaaagguuuuggcuggucagugu

SEQ ID NO: 20751 - RNA, 32 nt, Homo Sapiens
gaugggagggugggagcagagucggguuuggg

SEQ ID NO: 20752 - RNA, 32 nt, Homo Sapiens
guacagggauuguauauuugacaacuugguau

SEQ ID NO: 20753 - RNA, 32 nt, Homo Sapiens
ugcaguaauuguagaaaagcuuucagacagau

SEQ ID NO: 20754 - RNA, 31 nt, Homo Sapiens
cuagagggaagagaagaaacagaagcggcuc

SEQ ID NO: 20755 - RNA, 32 nt, Homo Sapiens
cugaacuccguccaaggugcccgcaggcuccc

SEQ ID NO: 20756 - RNA, 32 nt, Homo Sapiens
gguggaaggcucauauggauagaaggcccaaa

SEQ ID NO: 20757 - RNA, 32 nt, Homo Sapiens
cuaccugccucagccucccaaagugcugggau

SEQ ID NO: 20758 - RNA, 32 nt, Homo Sapiens
cuuccugcauuacccugggccgugguuccuac

SEQ ID NO: 20759 - RNA, 32 nt, Homo Sapiens
ugcggcgcgggccccucaccugguaccuggac

SEQ ID NO: 20760 - RNA, 32 nt, Homo Sapiens
aucccgcucaggugaugaggaaccccucgcgc

SEQ ID NO: 20761 - RNA, 32 nt, Homo Sapiens
guuucacacaauaccugcuaauggugugaugu

SEQ ID NO: 20762 - RNA, 32 nt, Homo Sapiens
uuguauuauccuucuuauauuauauuaacaaa

SEQ ID NO: 20763 - RNA, 32 nt, Homo Sapiens
gagaaagcuggcuguuguccaaugccuuccuu

SEQ ID NO: 20764 - RNA, 32 nt, Homo Sapiens
acaucacaagguguaccuuaugcuaagugccu

SEQ ID NO: 20765 - RNA, 32 nt, Homo Sapiens
gagaagcucccucugcuuacaggacaauaaug

SEQ ID NO: 20766 - RNA, 32 nt, Homo Sapiens
aaacugcucagacgucuagauggguucuuagc

SEQ ID NO: 20767 - RNA, 32 nt, Homo Sapiens
gaggucggcgguggcgggagcgggcuccggag

SEQ ID NO: 20768 - RNA, 32 nt, Homo Sapiens
cagccugggcgacagagccagacugucucaaa

SEQ ID NO: 20769 - RNA, 31 nt, Homo Sapiens
uaagaagcaagugucaccugaguuggccaug

SEQ ID NO: 20770 - RNA, 32 nt, Homo Sapiens
ggcuuggcugcagugcacuuugaaaugaagua

SEQ ID NO: 20771 - RNA, 32 nt, Homo Sapiens
ccugagggcuccuuggggccuuuaugggguaa

SEQ ID NO: 20772 - RNA, 32 nt, Homo Sapiens
aguguuuuaaacagaauaaagauuccaaacac

SEQ ID NO: 20773 - RNA, 32 nt, Homo Sapiens
uguccagagcccucccucccagccccaugauu

SEQ ID NO: 20774 - RNA, 32 nt, Homo Sapiens
aaaacaugcauucaguaaaacucgcgaugaaa

SEQ ID NO: 20775 - RNA, 32 nt, Homo Sapiens
ucagguggucacuucgcacacccaagagaaga

SEQ ID NO: 20776 - RNA, 32 nt, Homo Sapiens
gcaggucgggcgucuccccccgugccacuccu

SEQ ID NO: 20777 - RNA, 32 nt, Homo Sapiens
uuagagggcacaucaccaggcuccacaucacg

SEQ ID NO: 20778 - RNA, 32 nt, Homo Sapiens
uggcaguggaggugcuggcugcgcuccacaga

SEQ ID NO: 20779 - RNA, 32 nt, Homo Sapiens
cucuccucccaguacacccccuacuuggccag

SEQ ID NO: 20780 - RNA, 32 nt, Homo Sapiens
ccuguggucugcaggguaggcccgcaggaaau

SEQ ID NO: 20781 - RNA, 27 nt, Homo Sapiens
aaagauuuuuaauucugugauugugug

SEQ ID NO: 20782 - RNA, 32 nt, Homo Sapiens
aacuaaagggcaacauauagacuuuagauccu

SEQ ID NO: 20783 - RNA, 32 nt, Homo Sapiens
ccuucccagucuaucaucaaccuugaguauuc

SEQ ID NO: 20784 - RNA, 32 nt, Homo Sapiens
acacauaucuugaauggcuuuauuuuuauugu

SEQ ID NO: 20785 - RNA, 32 nt, Homo Sapiens
ugugaagaaugugacaaagcuuacaguuucag

SEQ ID NO: 20786 - RNA, 32 nt, Homo Sapiens
uuaaaaagaaacaaaaacaggcagcugguuug

SEQ ID NO: 20787 - RNA, 31 nt, Homo Sapiens
cugguuccuggcugccugccucuugcacaga

SEQ ID NO: 20788 - RNA, 32 nt, Homo Sapiens
agagauaaaauuaauaauaguucacuuguuau

SEQ ID NO: 20789 - RNA, 32 nt, Homo Sapiens
gagaaugucuuucuccucuccuaagucuuugc

SEQ ID NO: 20790 - RNA, 32 nt, Homo Sapiens
uaacagccagugcccuuucagcccuugcaucu

SEQ ID NO: 20791 - RNA, 32 nt, Homo Sapiens
gguugcaguugucgcgcacgccucugcccgcc

SEQ ID NO: 20792 - RNA, 32 nt, Homo Sapiens
ccaguucauggaggcaaaaaacaaguuucuug

SEQ ID NO: 20793 - RNA, 32 nt, Homo Sapiens
uuugcaaauggcaacugacuucuuuagaauuu

SEQ ID NO: 20794 - RNA, 32 nt, Homo Sapiens
uccagccacaggcaccucuccugcccccgccc

SEQ ID NO: 20795 - RNA, 32 nt, Homo Sapiens
uucuuuuuucccuuugcuuauaucuagcauua

SEQ ID NO: 20796 - RNA, 32 nt, Homo Sapiens
gagccggcgcccagcccagccuggcgacuggg

SEQ ID NO: 20797 - RNA, 32 nt, Homo Sapiens
uucacagagcuaaagaaaugaugucaaauuag

SEQ ID NO: 20798 - RNA, 32 nt, Homo Sapiens
ucggcagggccaccacgcauccccucacuggc

SEQ ID NO: 20799 - RNA, 32 nt, Homo Sapiens
ccugcgcccuccccggccagcugagcccauca

SEQ ID NO: 20800 - RNA, 32 nt, Homo Sapiens
cgugaaacccaccuugucccauccacaucagg

SEQ ID NO: 20801 - RNA, 32 nt, Homo Sapiens
ugagcugccagguugucuucaucucagaacuu

SEQ ID NO: 20802 - RNA, 32 nt, Homo Sapiens
gcugaggcagaauugcuugaacccaugaggcg

SEQ ID NO: 20803 - RNA, 32 nt, Homo Sapiens
uguccuucccucccuucuguccuuccaugugu

SEQ ID NO: 20804 - RNA, 32 nt, Homo Sapiens
cggcgcgggggcggggccuggcgggaguaguc

SEQ ID NO: 20805 - RNA, 32 nt, Homo Sapiens
cccucucuucccugcaggauccggcccucaaa

SEQ ID NO: 20806 - RNA, 32 nt, Homo Sapiens
auaaacgcaccucaccucggucaacccuugcu

SEQ ID NO: 20807 - RNA, 32 nt, Homo Sapiens
gauaguuucuucauguggaguucaucugcaug

SEQ ID NO: 20808 - RNA, 32 nt, Homo Sapiens
ggacgaucugccuuccucccccgccugccauu

SEQ ID NO: 20809 - RNA, 32 nt, Homo Sapiens
cuagaacaaaaauguacauuguaaacaagaua

SEQ ID NO: 20810 - RNA, 32 nt, Homo Sapiens
gcccuccuggaacagcucaugcuggccccaug

SEQ ID NO: 20811 - RNA, 32 nt, Homo Sapiens
aucuacuuauccaguuauaccuuugaauaaaa

SEQ ID NO: 20812 - RNA, 32 nt, Homo Sapiens
cuggucauguuccuuugguuugaauaacuccc

SEQ ID NO: 20813 - RNA, 32 nt, Homo Sapiens
ucugauggugccauuaugaagaugaacuguua

SEQ ID NO: 20814 - RNA, 32 nt, Homo Sapiens
agaguuuuauuuucaucagggauuacguugag

SEQ ID NO: 20815 - RNA, 32 nt, Homo Sapiens
agcaaccgugcagccacgaacacgcaugccuc

SEQ ID NO: 20816 - RNA, 32 nt, Homo Sapiens
ggcugccuuuugcuggccaaaccaacccccac

SEQ ID NO: 20817 - RNA, 32 nt, Homo Sapiens
aacggugcucagggggcgccugugguucugag

SEQ ID NO: 20818 - RNA, 32 nt, Homo Sapiens
gcaggacagugaccccagucccagcuaacucu

SEQ ID NO: 20819 - RNA, 32 nt, Homo Sapiens
acuucuuaggacauuuguaaaagcagguuaaa

SEQ ID NO: 20820 - RNA, 32 nt, Homo Sapiens
ggggccuggccuggcagcccccgggcugauag

SEQ ID NO: 20821 - RNA, 32 nt, Homo Sapiens
cauccacacgcugcgcuuugcugcggucacac

SEQ ID NO: 20822 - RNA, 32 nt, Homo Sapiens
uuucaaaauauaaaauguaacaugacaagaga

SEQ ID NO: 20823 - RNA, 32 nt, Homo Sapiens
cccgcgugggccgaugguggcggcaguggcua

SEQ ID NO: 20824 - RNA, 32 nt, Homo Sapiens
aaucaaaucaguaacuggucauggucaugcau

SEQ ID NO: 20825 - RNA, 32 nt, Homo Sapiens
ggcacgaggcgcgcgcaccuaccgaggcgcgg

SEQ ID NO: 20826 - RNA, 32 nt, Homo Sapiens
aacaauguauaaagauuguacuuagccaguuc

SEQ ID NO: 20827 - RNA, 32 nt, Homo Sapiens
ugcaaauuaaccacacaaaaaauguuuaauuu

SEQ ID NO: 20828 - RNA, 32 nt, Homo Sapiens
aacgcaggccccagggucuccgggaccucccu

SEQ ID NO: 20829 - RNA, 27 nt, Homo Sapiens
cacccuuucgucuucagccgccacguc

SEQ ID NO: 20830 - RNA, 32 nt, Homo Sapiens
gaaagcuggcccggcuaaagcggcucaguagu

SEQ ID NO: 20831 - RNA, 32 nt, Homo Sapiens
uauuguacuagauugccaaauucauaaaaugu

SEQ ID NO: 20832 - RNA, 29 nt, Homo Sapiens
accaauggaugcauucacgggcucggguc

SEQ ID NO: 20833 - RNA, 32 nt, Homo Sapiens
agaccagccugggaaacauagcaagauccugu

SEQ ID NO: 20834 - RNA, 32 nt, Homo Sapiens
ugcuccuuucccuuugaggacucccacccuuu

SEQ ID NO: 20835 - RNA, 32 nt, Homo Sapiens
auaaauuaaaaauuaaacuugaaaaaaaaaaa

SEQ ID NO: 20836 - RNA, 32 nt, Homo Sapiens
uugcuguuccauucuguguagcaccauucacc

SEQ ID NO: 20837 - RNA, 30 nt, Homo Sapiens
uguaccuucugugcuggaugcucuucaagu

SEQ ID NO: 20838 - RNA, 32 nt, Homo Sapiens
cccgcgcucaggugguugcagaagucagugcc

SEQ ID NO: 20839 - RNA, 32 nt, Homo Sapiens
aaaugagcugggugugguggcgcgugccugua

SEQ ID NO: 20840 - RNA, 25 nt, Homo Sapiens
uagaaauaaaaauuuuucaaaaggg

SEQ ID NO: 20841 - RNA, 32 nt, Homo Sapiens
auuggcgagugaguggagagccagcucugcgg

SEQ ID NO: 20842 - RNA, 32 nt, Homo Sapiens
ucaaucacacuucaaaaacuacauacggaaga

SEQ ID NO: 20843 - RNA, 32 nt, Homo Sapiens
ucuguuuguacuuuuggaaauuauuuaacugc

SEQ ID NO: 20844 - RNA, 32 nt, Homo Sapiens
acccuagucagagauuuuuucuuuuuccuuuu

SEQ ID NO: 20845 - RNA, 32 nt, Homo Sapiens
cccggccucggguccuugccuggcccagcaug

SEQ ID NO: 20846 - RNA, 32 nt, Homo Sapiens
ucucccgcgcagccugcccccuccuggacgug

SEQ ID NO: 20847 - RNA, 32 nt, Homo Sapiens
aggugggaacggcugauguggacugucuuuuu

SEQ ID NO: 20848 - RNA, 32 nt, Homo Sapiens
gggaggugguggcggaggcgaaggggcgacgg

SEQ ID NO: 20849 - RNA, 32 nt, Homo Sapiens
gcggaccgccgcggcccgcgcuguaaccgcgg

SEQ ID NO: 20850 - RNA, 32 nt, Homo Sapiens
ucaggguaacuuaauguuuucuuaaugaacag

SEQ ID NO: 20851 - RNA, 32 nt, Homo Sapiens
ucuccugugaacaucuuagugaaauguuaggu

SEQ ID NO: 20852 - RNA, 32 nt, Homo Sapiens
uuuuuagagaaaauucagacuuuguucguuuu

SEQ ID NO: 20853 - RNA, 32 nt, Homo Sapiens
aucaucugucuugcgugcuauuucagaguggg

SEQ ID NO: 20854 - RNA, 32 nt, Homo Sapiens
accccuuccccucucccuugggcucugaugaa

SEQ ID NO: 20855 - RNA, 32 nt, Homo Sapiens
ggcccagaaaucaguccaaauaccaguggcuc

SEQ ID NO: 20856 - RNA, 32 nt, Homo Sapiens
ccagcagggcaagggggcgcggcguccugguc

SEQ ID NO: 20857 - RNA, 32 nt, Homo Sapiens
uggcuguccuuuuccugcuccccucaaaagau

SEQ ID NO: 20858 - RNA, 32 nt, Homo Sapiens
gagacaguuguacuuucuuaauuuuuagcaga

SEQ ID NO: 20859 - RNA, 32 nt, Homo Sapiens
aauuuagcucuuuuagucaguccaagagauuu

SEQ ID NO: 20860 - RNA, 32 nt, Homo Sapiens
ccaguucgcccgcgaggcgcugcgggcgcugc

SEQ ID NO: 20861 - RNA, 32 nt, Homo Sapiens
uggggucuuauuauaaucuugugacacccuug

SEQ ID NO: 20862 - RNA, 32 nt, Homo Sapiens
acugccucccucuccuucuuccucccgcaaug

SEQ ID NO: 20863 - RNA, 32 nt, Homo Sapiens
ucuuaacagucuuuucuacccacuuuuaccca

SEQ ID NO: 20864 - RNA, 32 nt, Homo Sapiens
ccagccccucccagcacccccagccccacgac

SEQ ID NO: 20865 - RNA, 32 nt, Homo Sapiens
gguccucauggaguuuugguucaacuggaauc

SEQ ID NO: 20866 - RNA, 32 nt, Homo Sapiens
ucacccuguccccuccuccccagauucccaau

SEQ ID NO: 20867 - RNA, 32 nt, Homo Sapiens
cccguaggcccggcccgggccccucuggagca

SEQ ID NO: 20868 - RNA, 32 nt, Homo Sapiens
accauuaggaauucuuaaugggaugaaaaccu

SEQ ID NO: 20869 - RNA, 32 nt, Homo Sapiens
guuuucacucguuuuucucuucauugacccaa

SEQ ID NO: 20870 - RNA, 32 nt, Homo Sapiens
ucuguuucggagacauaacgauuuggauugcu

SEQ ID NO: 20871 - RNA, 32 nt, Homo Sapiens
ggcugcgcagacuggcgcgcgcggacggucau

SEQ ID NO: 20872 - RNA, 32 nt, Homo Sapiens
ugacaguauuauguaauuuuuuagcgugggua

SEQ ID NO: 20873 - RNA, 32 nt, Homo Sapiens
ugaugggguagcuggggugugggguuggggga

SEQ ID NO: 20874 - RNA, 32 nt, Homo Sapiens
guauuguaaaguaaguuuuacucauuuuagga

SEQ ID NO: 20875 - RNA, 32 nt, Homo Sapiens
uaucuuuccagaauugaaucuagagucuuccc

SEQ ID NO: 20876 - RNA, 32 nt, Homo Sapiens
cgauuuuguaagucuucagcugaaccacuaau

SEQ ID NO: 20877 - RNA, 32 nt, Homo Sapiens
aaaacaaaaacgcuguggggagaagccaacag

SEQ ID NO: 20878 - RNA, 32 nt, Homo Sapiens
uaaauaaauaaauaacucuacuucacagacua

SEQ ID NO: 20879 - RNA, 32 nt, Homo Sapiens
acucagacauuagaaagaaaaagccucacaga

SEQ ID NO: 20880 - RNA, 32 nt, Homo Sapiens
gccccucccagggccgccgcuccgugggaaaa

SEQ ID NO: 20881 - RNA, 32 nt, Homo Sapiens
aacugugaggggagagcagcauggccaggucc

SEQ ID NO: 20882 - RNA, 32 nt, Homo Sapiens
uugcuucuguuguccacugauuaaucagccua

SEQ ID NO: 20883 - RNA, 30 nt, Homo Sapiens
gcccccugggguggcaugcggacccuucag

SEQ ID NO: 20884 - RNA, 32 nt, Homo Sapiens
gagugcgguggugcaaucuuggcucacugcaa

SEQ ID NO: 20885 - RNA, 32 nt, Homo Sapiens
uguaauucuaaauuaaaacauaaauauauuuu

SEQ ID NO: 20886 - RNA, 32 nt, Homo Sapiens
ugcaugaaaaagauaaaaaguaguaaaauggc

SEQ ID NO: 20887 - RNA, 32 nt, Homo Sapiens
cgugcuguaaaauaagaacuagcugaagagac

SEQ ID NO: 20888 - RNA, 32 nt, Homo Sapiens
ugggugaggggagagacgguagggugacaugg

SEQ ID NO: 20889 - RNA, 32 nt, Homo Sapiens
aacaaguggggguggggggugcgggccgccac

SEQ ID NO: 20890 - RNA, 32 nt, Homo Sapiens
ccugaaagccccagguguacccaauuggcagc

SEQ ID NO: 20891 - RNA, 32 nt, Homo Sapiens
cguaucaucaaacaagaaauucauauucaccu

SEQ ID NO: 20892 - RNA, 32 nt, Homo Sapiens
ccauuuacguagcauuuacauugucuuaggua

SEQ ID NO: 20893 - RNA, 32 nt, Homo Sapiens
uucuuuguuucauagaacacaucacaaagcca

SEQ ID NO: 20894 - RNA, 32 nt, Homo Sapiens
agcggccuggagcagcagagccaggcuuugua

SEQ ID NO: 20895 - RNA, 32 nt, Homo Sapiens
cgccccgcgccgggcucuagcuguuucccuca

SEQ ID NO: 20896 - RNA, 32 nt, Homo Sapiens
caggaaaccuucgaaucuggaacuuccacacc

SEQ ID NO: 20897 - RNA, 32 nt, Homo Sapiens
cucugcuaacgcugguccugugcgugccugug

SEQ ID NO: 20898 - RNA, 32 nt, Homo Sapiens
acgguggcgggggguggggugugagguaaucc

SEQ ID NO: 20899 - RNA, 32 nt, Homo Sapiens
ugaaaagcugcagcugucaucaucaaaacaac

SEQ ID NO: 20900 - RNA, 32 nt, Homo Sapiens
ccugaccuccauaugcuguacaugacaucaaa

SEQ ID NO: 20901 - RNA, 32 nt, Homo Sapiens
gcugcgggccucuaggggacugagacggucuc

SEQ ID NO: 20902 - RNA, 32 nt, Homo Sapiens
gcuaggagagcgggcuucgggcacuugacaug

SEQ ID NO: 20903 - RNA, 32 nt, Homo Sapiens
guuuggaggauaauuucauucuauucaaagag

SEQ ID NO: 20904 - RNA, 32 nt, Homo Sapiens
auuucauuugaaauuacagcaugaugaauuuu

SEQ ID NO: 20905 - RNA, 32 nt, Homo Sapiens
gcagggccuggcauagaguagguacuccauaa

SEQ ID NO: 20906 - RNA, 32 nt, Homo Sapiens
ucuaauuuggguuaauaaagauuuuaaauauu

SEQ ID NO: 20907 - RNA, 32 nt, Homo Sapiens
uugagcccaagccccaucuuccuccuucaccc

SEQ ID NO: 20908 - RNA, 32 nt, Homo Sapiens
caggaucugcuuauacacaaauccaucuuucg

SEQ ID NO: 20909 - RNA, 32 nt, Homo Sapiens
ccaguuuucuucauuucugaauugaguuuucu

SEQ ID NO: 20910 - RNA, 24 nt, Homo Sapiens
aaagaauaaaguucuauuuauucu

SEQ ID NO: 20911 - RNA, 32 nt, Homo Sapiens
uggacuuggaaggagugcuguuguguacauac

SEQ ID NO: 20912 - RNA, 32 nt, Homo Sapiens
uucaauuggcagaccuaggauguaugguuaac

SEQ ID NO: 20913 - RNA, 32 nt, Homo Sapiens
auuagguuauuuauugauucaaucaguugaca

SEQ ID NO: 20914 - RNA, 32 nt, Homo Sapiens
acugauuuuuaaaaugcuguuuuucaguauua

SEQ ID NO: 20915 - RNA, 32 nt, Homo Sapiens
gggggcgaugucugcuggcccaggggaaggga

SEQ ID NO: 20916 - RNA, 32 nt, Homo Sapiens
uggaaggaaaucaauuuucuguaacugaugau

SEQ ID NO: 20917 - RNA, 31 nt, Homo Sapiens
uccuucccacccuuuuuucaaaggcaccaca

SEQ ID NO: 20918 - RNA, 32 nt, Homo Sapiens
ccaccccgcccggccgcccucgucuugugcgc

SEQ ID NO: 20919 - RNA, 32 nt, Homo Sapiens
ccugcgccgcguuaacaaugaagcagaguucg

SEQ ID NO: 20920 - RNA, 32 nt, Homo Sapiens
ggcuucaccauguuggccaggcuggucuggaa

SEQ ID NO: 20921 - RNA, 32 nt, Homo Sapiens
auagaaauagauauuucuuucgagguuuuacu

SEQ ID NO: 20922 - RNA, 32 nt, Homo Sapiens
aguaaugaguuuaaaaaucaacuuuuuauugc

SEQ ID NO: 20923 - RNA, 32 nt, Homo Sapiens
uaaggaagacaucagucccagcaagcaacauu

SEQ ID NO: 20924 - RNA, 32 nt, Homo Sapiens
uguucuccagagauuucuuuuguauaacucag

SEQ ID NO: 20925 - RNA, 32 nt, Homo Sapiens
cccaccucagccucugguguagcugggaccac

SEQ ID NO: 20926 - RNA, 32 nt, Homo Sapiens
ccuggggaacagagugaggcccugucucaaaa

SEQ ID NO: 20927 - RNA, 32 nt, Homo Sapiens
ggaggaggggagagcccguccgcgccugggcu

SEQ ID NO: 20928 - RNA, 32 nt, Homo Sapiens
aacaucaaagugaaacuggauguuguuuaacu

SEQ ID NO: 20929 - RNA, 31 nt, Homo Sapiens
uaaggggucgccugagucgugagacccacag

SEQ ID NO: 20930 - RNA, 32 nt, Homo Sapiens
ugacacugcaggguccaagagaauuaaagaaa

SEQ ID NO: 20931 - RNA, 32 nt, Homo Sapiens
uugagaggccccaagacccaguuccuuuacag

SEQ ID NO: 20932 - RNA, 32 nt, Homo Sapiens
acuguguauaaaauugcaaucuagugaaauaa

SEQ ID NO: 20933 - RNA, 32 nt, Homo Sapiens
ugcuugccugguaaauguucucuucuucuuua

SEQ ID NO: 20934 - RNA, 32 nt, Homo Sapiens
ccaggaagacuacagcgaguauaugaacaaca

SEQ ID NO: 20935 - RNA, 32 nt, Homo Sapiens
caggggaccccauggggacaggcagagcuggu

SEQ ID NO: 20936 - RNA, 32 nt, Homo Sapiens
guaugcauuuuaaugaaaugugagucauaugc

SEQ ID NO: 20937 - RNA, 32 nt, Homo Sapiens
agaauuguuauauaaaugucaucauacaguau

SEQ ID NO: 20938 - RNA, 32 nt, Homo Sapiens
uucaugccaccauggccagccaacuuuugcau

SEQ ID NO: 20939 - RNA, 32 nt, Homo Sapiens
auaaaaugaacugauuauauauuggaauuguu

SEQ ID NO: 20940 - RNA, 32 nt, Homo Sapiens
uuuaaaucuauuucauaaccuguuuugaucug

SEQ ID NO: 20941 - RNA, 32 nt, Homo Sapiens
aaggcucauuagaccugggggacccaaagggu

SEQ ID NO: 20942 - RNA, 32 nt, Homo Sapiens
uccaggcuggaacaauaaauguggcugugcag

SEQ ID NO: 20943 - RNA, 32 nt, Homo Sapiens
agccggugacugaguucuccugcugggaguug

SEQ ID NO: 20944 - RNA, 32 nt, Homo Sapiens
ccaaauuguaagacauaugaaagauauuagug

SEQ ID NO: 20945 - RNA, 32 nt, Homo Sapiens
uuugccucucuaggccggcagcgccucuccuc

SEQ ID NO: 20946 - RNA, 32 nt, Homo Sapiens
agcccaugucauuuaauugucaguuucuuuga

SEQ ID NO: 20947 - RNA, 32 nt, Homo Sapiens
uucaacaaauguuuaugagugcaugcuguaua

SEQ ID NO: 20948 - RNA, 32 nt, Homo Sapiens
cgcauacacacacgcacauacuccugcacaug

SEQ ID NO: 20949 - RNA, 32 nt, Homo Sapiens
ugucucaugccuuuuuguccuguccucagcuc

SEQ ID NO: 20950 - RNA, 32 nt, Homo Sapiens
guuaucgaaaacuacauggaauaauugaaguc

SEQ ID NO: 20951 - RNA, 32 nt, Homo Sapiens
guggagccuggugcuccaggauguggcuucuc

SEQ ID NO: 20952 - RNA, 32 nt, Homo Sapiens
acggauggaaaagcucagaacucaggugaaac

SEQ ID NO: 20953 - RNA, 32 nt, Homo Sapiens
accauccuggcuaacacagugaaaccccuccu

SEQ ID NO: 20954 - RNA, 32 nt, Homo Sapiens
accucgggaggcggguccuuccccucagugcg

SEQ ID NO: 20955 - RNA, 32 nt, Homo Sapiens
gcuauaacauauauuuuuuucugaaauguuuu

SEQ ID NO: 20956 - RNA, 32 nt, Homo Sapiens
ugguuggaggccugaggccucuuggaacucuu

SEQ ID NO: 20957 - RNA, 32 nt, Homo Sapiens
cuaugcugcuauggacgaccuccagcucucag

SEQ ID NO: 20958 - RNA, 32 nt, Homo Sapiens
ccaccagggccaugcucugugacuugggcuga

SEQ ID NO: 20959 - RNA, 32 nt, Homo Sapiens
ggugcagaugcacccugaaaacugaccccuca

SEQ ID NO: 20960 - RNA, 32 nt, Homo Sapiens
acuggaaggagagcuuccagaugggaagcaaa

SEQ ID NO: 20961 - RNA, 32 nt, Homo Sapiens
gugcucggcggccggagccggauccuguagcc

SEQ ID NO: 20962 - RNA, 32 nt, Homo Sapiens
gauuuccuccucugcaggguuuugcuaguaau

SEQ ID NO: 20963 - RNA, 32 nt, Homo Sapiens
agccuguccuugugcgccuucagacacuggcu

SEQ ID NO: 20964 - RNA, 32 nt, Homo Sapiens
uuaaugcauaaauauugaugauucacucuuga

SEQ ID NO: 20965 - RNA, 32 nt, Homo Sapiens
ccgcgcgcuggacuuuauugugccgcaaccag

SEQ ID NO: 20966 - RNA, 31 nt, Homo Sapiens
ccacccuggcacugcccggaucccgugcacc

SEQ ID NO: 20967 - RNA, 32 nt, Homo Sapiens
cgacagcgcuggggcccuguguagaagcucca

SEQ ID NO: 20968 - RNA, 32 nt, Homo Sapiens
gccauucgcccgcaggucggcgcgcucgccca

SEQ ID NO: 20969 - RNA, 32 nt, Homo Sapiens
caaggagaugacccagcugaacaaugcauuug

SEQ ID NO: 20970 - RNA, 32 nt, Homo Sapiens
gcgggcccauggggcggagcucguccgcaugg

SEQ ID NO: 20971 - RNA, 32 nt, Homo Sapiens
ugcaauccaaggcuggcaaggauuccugcacg

SEQ ID NO: 20972 - RNA, 32 nt, Homo Sapiens
ggcagcucaggaauggggggaacuugguuagu

SEQ ID NO: 20973 - RNA, 32 nt, Homo Sapiens
cugcccggugcuagggauuccauggugucauu

SEQ ID NO: 20974 - RNA, 32 nt, Homo Sapiens
uuguguuguguuguauuguucuucccuuggug

SEQ ID NO: 20975 - RNA, 32 nt, Homo Sapiens
caugagguggugcuucugggguguucuguuuc

SEQ ID NO: 20976 - RNA, 32 nt, Homo Sapiens
ggcaggguuugugaaaggcugcuggccuccaa

SEQ ID NO: 20977 - RNA, 30 nt, Homo Sapiens
cccgggucagcggcgcgggugcugcgccua

SEQ ID NO: 20978 - RNA, 32 nt, Homo Sapiens
cccggcacacagcaggcauauaauaagcaugu

SEQ ID NO: 20979 - RNA, 32 nt, Homo Sapiens
cugaagauuugaaaauauauccaugaacauuu

SEQ ID NO: 20980 - RNA, 32 nt, Homo Sapiens
acaagggggccggagucucagagccgaagugc

SEQ ID NO: 20981 - RNA, 32 nt, Homo Sapiens
aguaaacacuguuaaauugacuguauauauuu

SEQ ID NO: 20982 - RNA, 32 nt, Homo Sapiens
gaagaaaucuggccucggaacacgccauucuc

SEQ ID NO: 20983 - RNA, 32 nt, Homo Sapiens
cugcgcucggcgggcuggcauccggcccgggg

SEQ ID NO: 20984 - RNA, 32 nt, Homo Sapiens
cauuuugcaaggaaaagccacuuggggaaaga

SEQ ID NO: 20985 - RNA, 32 nt, Homo Sapiens
agagaagcugagguuaaaguuguggaagacag

SEQ ID NO: 20986 - RNA, 32 nt, Homo Sapiens
cagcucuguaucaggacccagaggaaggggcc

SEQ ID NO: 20987 - RNA, 30 nt, Homo Sapiens
aguacucugcauaagggggaaaagcuucca

SEQ ID NO: 20988 - RNA, 32 nt, Homo Sapiens
uucuccauguuggucagacuggucuugaacuc

SEQ ID NO: 20989 - RNA, 32 nt, Homo Sapiens
cggcagcagcagcagcagcagcagcagcaacc

SEQ ID NO: 20990 - RNA, 32 nt, Homo Sapiens
aucaguucccccuccacccauccccuucugua

SEQ ID NO: 20991 - RNA, 32 nt, Homo Sapiens
cuuaaguuauuuaugcaaaaguuuuucuugua

SEQ ID NO: 20992 - RNA, 30 nt, Homo Sapiens
uuuaaagaauaaaauaacacaugagggguc

SEQ ID NO: 20993 - RNA, 32 nt, Homo Sapiens
agaugggggaauuuggggggcucacaaaggga

SEQ ID NO: 20994 - RNA, 32 nt, Homo Sapiens
uuuaagcuguauauuucuuuaauucugcuuac

SEQ ID NO: 20995 - RNA, 32 nt, Homo Sapiens
uacuuuuuguuguuuuugccaccguggagagc

SEQ ID NO: 20996 - RNA, 32 nt, Homo Sapiens
uagaggggacgugagagaagggccaggccggc

SEQ ID NO: 20997 - RNA, 30 nt, Homo Sapiens
uagcggggucaacggcgcggcaggcgcagg

SEQ ID NO: 20998 - RNA, 32 nt, Homo Sapiens
aucuggagagaauacuuuuuaaggcuuuugaa

SEQ ID NO: 20999 - RNA, 32 nt, Homo Sapiens
aauuuuuuguguuuuuaguagagacgagguuu

SEQ ID NO: 21000 - RNA, 32 nt, Homo Sapiens
uauuucuauauuuagaaauuuuucucaaagaa

SEQ ID NO: 21001 - RNA, 32 nt, Homo Sapiens
aaguucuguauccaagauauacaauuaagugg

SEQ ID NO: 21002 - RNA, 32 nt, Homo Sapiens
cuuugagaaaucuauuuuacgauuguagaauu

SEQ ID NO: 21003 - RNA, 32 nt, Homo Sapiens
aagaugcugugccuaugggguucuagagagug

SEQ ID NO: 21004 - RNA, 30 nt, Homo Sapiens
cacgguuuaaaauaaaucucugugaaaacc

SEQ ID NO: 21005 - RNA, 32 nt, Homo Sapiens
aaaacaauucuauuucauagcacaucacaaua

SEQ ID NO: 21006 - RNA, 32 nt, Homo Sapiens
ccgggcggaggcugcgcggcgcagacccagac

SEQ ID NO: 21007 - RNA, 31 nt, Homo Sapiens
guuguggauccaagucucagagcacugaagu

SEQ ID NO: 21008 - RNA, 32 nt, Homo Sapiens
gccgcgcuggacgcgccggcggcgccuuugcc

SEQ ID NO: 21009 - RNA, 32 nt, Homo Sapiens
gucccucugggcggcccagcacuuccucagac

SEQ ID NO: 21010 - RNA, 32 nt, Homo Sapiens
gaucuaggccugccuccauguuacucccuuuc

SEQ ID NO: 21011 - RNA, 32 nt, Homo Sapiens
acugcuagagcagggaggggggagggcagggg

SEQ ID NO: 21012 - RNA, 32 nt, Homo Sapiens
ccuccauaaaaagcuuaaguugaguucauggg

SEQ ID NO: 21013 - RNA, 32 nt, Homo Sapiens
agugguuucuucauccacaucaucuaaagccu

SEQ ID NO: 21014 - RNA, 32 nt, Homo Sapiens
caucugugaugaugaaaguccuuacugucagc

SEQ ID NO: 21015 - RNA, 32 nt, Homo Sapiens
auuacuuauuaaggagaauuggaaauacauau

SEQ ID NO: 21016 - RNA, 32 nt, Homo Sapiens
gaaugaauggauuuuuuguuguuuuugcaugu

SEQ ID NO: 21017 - RNA, 32 nt, Homo Sapiens
guaacuuuuuaaaugucuauagcacugaaguu

SEQ ID NO: 21018 - RNA, 32 nt, Homo Sapiens
gcccagucaccaucaggccacucccucugcac

SEQ ID NO: 21019 - RNA, 32 nt, Homo Sapiens
cuuauuuugaacugccucaggaccccacugga

SEQ ID NO: 21020 - RNA, 32 nt, Homo Sapiens
ggcagcggcgaaaggaagcggcugaggcgcuu

SEQ ID NO: 21021 - RNA, 32 nt, Homo Sapiens
ugaggcaaggaccugaugugagauccuaaaag

SEQ ID NO: 21022 - RNA, 32 nt, Homo Sapiens
ccgcgcacuucccgggacccccacacacaucc

SEQ ID NO: 21023 - RNA, 32 nt, Homo Sapiens
uuauuguccauaucacuaucagcauuuugguc

SEQ ID NO: 21024 - RNA, 31 nt, Homo Sapiens
aagcuccaagccaccuuugaauucacugcca

SEQ ID NO: 21025 - RNA, 32 nt, Homo Sapiens
aucgccccgacccucacuccuggcgucugagu

SEQ ID NO: 21026 - RNA, 32 nt, Homo Sapiens
cagcaccacccucucccucugugccauggaaa

SEQ ID NO: 21027 - RNA, 32 nt, Homo Sapiens
cggcggccccgggcucugggugcggagaccca

SEQ ID NO: 21028 - RNA, 32 nt, Homo Sapiens
cuaggcgcccccagcccgcccucacaucccuc

SEQ ID NO: 21029 - RNA, 32 nt, Homo Sapiens
ccagggccgcucuuuccagcgcagucauccag

SEQ ID NO: 21030 - RNA, 32 nt, Homo Sapiens
uugaaagcuuuuuaauuuuucuuuacaguaaa

SEQ ID NO: 21031 - RNA, 32 nt, Homo Sapiens
cugcacaagcucucuuuuugccugcugccauc

SEQ ID NO: 21032 - RNA, 32 nt, Homo Sapiens
gggcggggacgcggcguggcgagggggcuuga

SEQ ID NO: 21033 - RNA, 32 nt, Homo Sapiens
cccuuuggaaugcaauaaaggcagcauugugu

SEQ ID NO: 21034 - RNA, 32 nt, Homo Sapiens
aauuuugcucaaagucaaaaaacaaguuggug

SEQ ID NO: 21035 - RNA, 31 nt, Homo Sapiens
ggcugggggcggccacagacggccucgaaac

SEQ ID NO: 21036 - RNA, 32 nt, Homo Sapiens
uuaacuuaaacacaacuuuuacauaucaagac

SEQ ID NO: 21037 - RNA, 32 nt, Homo Sapiens
aaaggaagaauaaggauauguuagaacuaucu

SEQ ID NO: 21038 - RNA, 32 nt, Homo Sapiens
uaccccacugaccccaccggacccaggcgcgg

SEQ ID NO: 21039 - RNA, 32 nt, Homo Sapiens
uaaaaaagaaaaacaccgcuucugccuuuuca

SEQ ID NO: 21040 - RNA, 32 nt, Homo Sapiens
aacucugagacgagaacugccuuggugaaggc

SEQ ID NO: 21041 - RNA, 32 nt, Homo Sapiens
guauguaaagauacauagguggaugcucuuac

SEQ ID NO: 21042 - RNA, 32 nt, Homo Sapiens
cuauacauaauaugcauagauaaaacauuuac

SEQ ID NO: 21043 - RNA, 32 nt, Homo Sapiens
ccgaccgcgccggacgcgguguccggggcagg

SEQ ID NO: 21044 - RNA, 32 nt, Homo Sapiens
cgggagccagguggccucggcgcgcccgccuc

SEQ ID NO: 21045 - RNA, 32 nt, Homo Sapiens
guacaaaauauguuuugucuauugaaaacaua

SEQ ID NO: 21046 - RNA, 32 nt, Homo Sapiens
cuuucaggcacuuuucaaauuuaauaaggaac

SEQ ID NO: 21047 - RNA, 32 nt, Homo Sapiens
gauuguccagcaugcuuguauguauauuucag

SEQ ID NO: 21048 - RNA, 32 nt, Homo Sapiens
gcgagagggcuguggaggagcucgcacggcgc

SEQ ID NO: 21049 - RNA, 32 nt, Homo Sapiens
uugaugugagguaguuuaaagauacaaggacu

SEQ ID NO: 21050 - RNA, 30 nt, Homo Sapiens
ggccccugcggcggcggcgggauguucgug

SEQ ID NO: 21051 - RNA, 30 nt, Homo Sapiens
gauguugggcgccgcgcggggcugggggcg

SEQ ID NO: 21052 - RNA, 32 nt, Homo Sapiens
gacuaaucuucagugauaauauuucaucuacu

SEQ ID NO: 21053 - RNA, 32 nt, Homo Sapiens
cgccgggguucgcucugagucgcguggcaggc

SEQ ID NO: 21054 - RNA, 32 nt, Homo Sapiens
aucccuacugauaguuccucuuucucauuuug

SEQ ID NO: 21055 - RNA, 32 nt, Homo Sapiens
aaagaccugacuguccccgagcccgacaccag

SEQ ID NO: 21056 - RNA, 32 nt, Homo Sapiens
uuguuugucaaauucuaagcauaugucuuaaa

SEQ ID NO: 21057 - RNA, 32 nt, Homo Sapiens
cccaaaaacaaaucgcagccagcuuuuccaga

SEQ ID NO: 21058 - RNA, 32 nt, Homo Sapiens
aagaguaauuuaauaagcauuaaagguaaaau

SEQ ID NO: 21059 - RNA, 32 nt, Homo Sapiens
cucacacacgcacuccuucuccucaaggccag

SEQ ID NO: 21060 - RNA, 32 nt, Homo Sapiens
ccgccuucccgcgccccgcagcgccccgcaga

SEQ ID NO: 21061 - RNA, 32 nt, Homo Sapiens
gaguuucccugggaggcccaaccuccugcccc

SEQ ID NO: 21062 - RNA, 32 nt, Homo Sapiens
auccccaggcccccuccacccagucggcuagc

SEQ ID NO: 21063 - RNA, 32 nt, Homo Sapiens
guggcuuccgcggagguuucggcaguggcauc

SEQ ID NO: 21064 - RNA, 32 nt, Homo Sapiens
ucuacaggggagaggcgggagccugccacccu

SEQ ID NO: 21065 - RNA, 32 nt, Homo Sapiens
uaugggucauuucaaagagggcuuaugaggcu

SEQ ID NO: 21066 - RNA, 32 nt, Homo Sapiens
acucccuucucaucagcacgugucuacaguug

SEQ ID NO: 21067 - RNA, 32 nt, Homo Sapiens
cgcccccgccccacucccggggccugcuaauc

SEQ ID NO: 21068 - RNA, 32 nt, Homo Sapiens
ucacggcggggccagcucugcuguccuggcaa

SEQ ID NO: 21069 - RNA, 32 nt, Homo Sapiens
ggaagaaaaaauacuuggaaacaaagaaaguc

SEQ ID NO: 21070 - RNA, 32 nt, Homo Sapiens
ccuuauugcuacuucaagcucuuuaaaucacc

SEQ ID NO: 21071 - RNA, 32 nt, Homo Sapiens
ggauacucuucuuuaaaaauguuuaaaaauua

SEQ ID NO: 21072 - RNA, 32 nt, Homo Sapiens
aauuuugugaaugcauuuuccugguguuugaa

SEQ ID NO: 21073 - RNA, 32 nt, Homo Sapiens
uagggauuuacuauuugugugagguggcaucu

SEQ ID NO: 21074 - RNA, 32 nt, Homo Sapiens
aagcgcuuccgggucgccgccggcagcagccu

SEQ ID NO: 21075 - RNA, 32 nt, Homo Sapiens
cccaagaguucgcguuccccgcgcggcggucg

SEQ ID NO: 21076 - RNA, 32 nt, Homo Sapiens
gguuaaaaauuauguaccuggcauggaugacg

SEQ ID NO: 21077 - RNA, 32 nt, Homo Sapiens
ugaagaaaugauuguuucugagaacuauagua

SEQ ID NO: 21078 - RNA, 32 nt, Homo Sapiens
cugcuguguuuaagaaaaauuacuuaacuugu

SEQ ID NO: 21079 - RNA, 32 nt, Homo Sapiens
acauuuugggacaaguggggagcccaagaaag

SEQ ID NO: 21080 - RNA, 32 nt, Homo Sapiens
gccaaggguggacacggcugcagacuucuggg

SEQ ID NO: 21081 - RNA, 32 nt, Homo Sapiens
acugcaagcucugccuccugggcucacaccau

SEQ ID NO: 21082 - RNA, 32 nt, Homo Sapiens
cgauuuauauauauuuuuuuguaauuauuaua

SEQ ID NO: 21083 - RNA, 30 nt, Homo Sapiens
caggaaggcaggcguguccugggccacaga

SEQ ID NO: 21084 - RNA, 32 nt, Homo Sapiens
uucuugccaacucugguuuccuccucacccug

SEQ ID NO: 21085 - RNA, 32 nt, Homo Sapiens
ucagaaacccucauuguguuucuaccggagag

SEQ ID NO: 21086 - RNA, 32 nt, Homo Sapiens
cgccgccaacgcgcaggugcuagcggccccuu

SEQ ID NO: 21087 - RNA, 32 nt, Homo Sapiens
ucuaacuugcccccgcgccggccgggcccaug

SEQ ID NO: 21088 - RNA, 32 nt, Homo Sapiens
caauuaaggaaaugcagaaagauccugauguu

SEQ ID NO: 21089 - RNA, 32 nt, Homo Sapiens
guauggcauuuucuuuauccugucugucauug

SEQ ID NO: 21090 - RNA, 32 nt, Homo Sapiens
acgcugcggacgccuauccucccccaggccgc

SEQ ID NO: 21091 - RNA, 32 nt, Homo Sapiens
ucuuucuuuccaacacuugcuacauugagagg

SEQ ID NO: 21092 - RNA, 32 nt, Homo Sapiens
guagcuugcauucuuguugucucugaugcaug

SEQ ID NO: 21093 - RNA, 32 nt, Homo Sapiens
uaagaguacucauguuuauuuauuuccaacug

SEQ ID NO: 21094 - RNA, 32 nt, Homo Sapiens
cggaauauacuucguucugacacagacguuuc

SEQ ID NO: 21095 - RNA, 32 nt, Homo Sapiens
uugguucggccuggcccggccggcggcuccua

SEQ ID NO: 21096 - RNA, 32 nt, Homo Sapiens
accuucacuauaaguggcccaguucugguuuu

SEQ ID NO: 21097 - RNA, 32 nt, Homo Sapiens
cugcagggaaggaaacacugccucccuucagc

SEQ ID NO: 21098 - RNA, 32 nt, Homo Sapiens
agggaacaccuggcauucugugguguuucgug

SEQ ID NO: 21099 - RNA, 32 nt, Homo Sapiens
ggcaguguaaaggaagccuagagagaaagagu

SEQ ID NO: 21100 - RNA, 32 nt, Homo Sapiens
uuguuuuugcuugauuuugucuuuucucuaca

SEQ ID NO: 21101 - RNA, 28 nt, Homo Sapiens
accauccuggcgaacauggugagaccca

SEQ ID NO: 21102 - RNA, 32 nt, Homo Sapiens
agccaagagggccagcacagcccuugcuccca

SEQ ID NO: 21103 - RNA, 32 nt, Homo Sapiens
aaguccauccaaaaggcaaaauguggaacuga

SEQ ID NO: 21104 - RNA, 32 nt, Homo Sapiens
caagguggcgcuugucuaauuauucacuuggg

SEQ ID NO: 21105 - RNA, 30 nt, Homo Sapiens
ggcgcgagguugcgcgcggcguucgcgggg

SEQ ID NO: 21106 - RNA, 32 nt, Homo Sapiens
ugcccccggggccccagggagcgccauggccc

SEQ ID NO: 21107 - RNA, 32 nt, Homo Sapiens
cacccgcacuucucccaaaaggcagaugacgg

SEQ ID NO: 21108 - RNA, 32 nt, Homo Sapiens
guagauucucacugugaaucccuugcuugcuc

SEQ ID NO: 21109 - RNA, 31 nt, Homo Sapiens
uuagaacaagaggaauaggucagauagaaga

SEQ ID NO: 21110 - RNA, 32 nt, Homo Sapiens
agccauggggcgagaagagcugauguaaggcu

SEQ ID NO: 21111 - RNA, 32 nt, Homo Sapiens
ggauccugcucuggaauaaaugucuugguggu

SEQ ID NO: 21112 - RNA, 32 nt, Homo Sapiens
auuauucuuggcagaugcugcagacaacaugg

SEQ ID NO: 21113 - RNA, 32 nt, Homo Sapiens
gggaaccgccgggugacaccugcguggaggcu

SEQ ID NO: 21114 - RNA, 32 nt, Homo Sapiens
cggaggcucccccuccucuccucuccccucug

SEQ ID NO: 21115 - RNA, 32 nt, Homo Sapiens
cugcaguuauucaguguaguguucuauaaaau

SEQ ID NO: 21116 - RNA, 32 nt, Homo Sapiens
ucucgcccgauggccggcaccuggccugugug

SEQ ID NO: 21117 - RNA, 32 nt, Homo Sapiens
cucagauggggauaucccugggggagccuggu

SEQ ID NO: 21118 - RNA, 32 nt, Homo Sapiens
cugaggugaagcaaacagaaaauuguggaggu

SEQ ID NO: 21119 - RNA, 32 nt, Homo Sapiens
cccaugcccucccccaacagucccucagcuuc

SEQ ID NO: 21120 - RNA, 32 nt, Homo Sapiens
uucauccugcaggcagcagagccucggguuaa

SEQ ID NO: 21121 - RNA, 32 nt, Homo Sapiens
cuuagcucgcgugugccuggagggugcgggaa

SEQ ID NO: 21122 - RNA, 32 nt, Homo Sapiens
uguaaaggacucaaaguuuaaguaaaaaguga

SEQ ID NO: 21123 - RNA, 32 nt, Homo Sapiens
gaaccuggcggaucgccuggcucccaggcagg

SEQ ID NO: 21124 - RNA, 32 nt, Homo Sapiens
uggauuggggacgggccaggcugggccagguc

SEQ ID NO: 21125 - RNA, 32 nt, Homo Sapiens
augucaaaaugaauguuuacuugugaacucga

SEQ ID NO: 21126 - RNA, 32 nt, Homo Sapiens
aguuaaacccucacauguuaauugaaccuuag

SEQ ID NO: 21127 - RNA, 31 nt, Homo Sapiens
uuuuuacaaaagguuuuuaaacagauuaggg

SEQ ID NO: 21128 - RNA, 32 nt, Homo Sapiens
acgaaccggaagaagaggaacugggccugaaa

SEQ ID NO: 21129 - RNA, 32 nt, Homo Sapiens
auuuuacuaugaaauuuaauaugcuggguuuu

SEQ ID NO: 21130 - RNA, 32 nt, Homo Sapiens
ccguccaccuccccccucaccauccuccgacc

SEQ ID NO: 21131 - RNA, 32 nt, Homo Sapiens
uucuucucuauaacccucuuuggacaugcaug

SEQ ID NO: 21132 - RNA, 32 nt, Homo Sapiens
cuucaauuuugagaauggcaucuguauuccga

SEQ ID NO: 21133 - RNA, 32 nt, Homo Sapiens
cgccugcgccggcggaccgugaccgaggaaac

SEQ ID NO: 21134 - RNA, 32 nt, Homo Sapiens
uucuggcccagcaaagaggucucggcagggga

SEQ ID NO: 21135 - RNA, 32 nt, Homo Sapiens
agcagaaaaaagucagaaaugugucuauaugc

SEQ ID NO: 21136 - RNA, 32 nt, Homo Sapiens
agauugugaaauuauuaaucauccucugugug

SEQ ID NO: 21137 - RNA, 31 nt, Homo Sapiens
acuccggugugccugcagccccgcgccuccu

SEQ ID NO: 21138 - RNA, 32 nt, Homo Sapiens
cugucauaggcauucuguuauugucuuggauu

SEQ ID NO: 21139 - RNA, 32 nt, Homo Sapiens
cauccaagauuuuggauccugggccucaguga

SEQ ID NO: 21140 - RNA, 32 nt, Homo Sapiens
uccaggguguagccuacagacauggaacagug

SEQ ID NO: 21141 - RNA, 32 nt, Homo Sapiens
aagaagagaaaguggaaauuuuucauccuuug

SEQ ID NO: 21142 - RNA, 32 nt, Homo Sapiens
gggaggagggcauuccaccuccuggcuccaag

SEQ ID NO: 21143 - RNA, 32 nt, Homo Sapiens
uuuguuguuguuaauuuuuguaaagcagacgc

SEQ ID NO: 21144 - RNA, 32 nt, Homo Sapiens
aggcccaggaggaaggggaggguucaccgacu

SEQ ID NO: 21145 - RNA, 32 nt, Homo Sapiens
uauguacaaaaauguaaaauuuuaugaaaaug

SEQ ID NO: 21146 - RNA, 31 nt, Homo Sapiens
uggcagcugccggcgcuuggcggugagggcg

SEQ ID NO: 21147 - RNA, 32 nt, Homo Sapiens
auagauuuauuuaaaauacugaaucuuucuuc

SEQ ID NO: 21148 - RNA, 32 nt, Homo Sapiens
auccggaggaggaagcugggacacccgggagu

SEQ ID NO: 21149 - RNA, 30 nt, Homo Sapiens
ugugugggugguaggaccuaggauucaaac

SEQ ID NO: 21150 - RNA, 32 nt, Homo Sapiens
cuuuccaguuccacuucagauaccaaaauagg

SEQ ID NO: 21151 - RNA, 32 nt, Homo Sapiens
cguggacugcggccacagcuucugccucaggu

SEQ ID NO: 21152 - RNA, 32 nt, Homo Sapiens
agugauuguccccgagcaagugccaggguugg

SEQ ID NO: 21153 - RNA, 32 nt, Homo Sapiens
aagcuucccagccccacuugccugcaggcuua

SEQ ID NO: 21154 - RNA, 32 nt, Homo Sapiens
cgguccgacgggagcaggcccagcggccaugg

SEQ ID NO: 21155 - RNA, 32 nt, Homo Sapiens
uucccucauaguccuguuggaagaugcucacu

SEQ ID NO: 21156 - RNA, 31 nt, Homo Sapiens
acuguuuuacaugccauucaauguuguuugu

SEQ ID NO: 21157 - RNA, 32 nt, Homo Sapiens
uacuguauauauauuauaguauaugucugaau

SEQ ID NO: 21158 - RNA, 32 nt, Homo Sapiens
agaguuuugaucuugucucucaggcuggguug

SEQ ID NO: 21159 - RNA, 32 nt, Homo Sapiens
aguuugaggagaauugauuuaauucuucagau

SEQ ID NO: 21160 - RNA, 32 nt, Homo Sapiens
uauuagccgggcgugguggcgggcgccuguaa

SEQ ID NO: 21161 - RNA, 30 nt, Homo Sapiens
agcggcgauggcggcggcggcgggagcugc

SEQ ID NO: 21162 - RNA, 32 nt, Homo Sapiens
cacagacaggagacauaaugcaaaggggcuca

SEQ ID NO: 21163 - RNA, 32 nt, Homo Sapiens
agcccguccccaugguaacugaucugccuuga

SEQ ID NO: 21164 - RNA, 32 nt, Homo Sapiens
aggcgcccgcgcugcgcugcccggaggagccg

SEQ ID NO: 21165 - RNA, 32 nt, Homo Sapiens
aaccucuuuucugcagaaaagcuccagcaggc

SEQ ID NO: 21166 - RNA, 32 nt, Homo Sapiens
ucccuggugcuguucgcugcaguuguucccca

SEQ ID NO: 21167 - RNA, 32 nt, Homo Sapiens
cgcagcccgcgcuccacggcaagccccgcccu

SEQ ID NO: 21168 - RNA, 32 nt, Homo Sapiens
cagaugcagaaucuggagcuuuguguugguug

SEQ ID NO: 21169 - RNA, 32 nt, Homo Sapiens
gcuuuaaaacaaugccuguagcguaauuaacc

SEQ ID NO: 21170 - RNA, 32 nt, Homo Sapiens
cagggaagaggcgagaagugcaaccugcauuu

SEQ ID NO: 21171 - RNA, 32 nt, Homo Sapiens
uuuggagagcagccccuugucaggauccaaaa

SEQ ID NO: 21172 - RNA, 32 nt, Homo Sapiens
ggcauggccccgagacacuggcagguuuguga

SEQ ID NO: 21173 - RNA, 32 nt, Homo Sapiens
ccgcgugcagcgcggcucucgggucgccuacg

SEQ ID NO: 21174 - RNA, 32 nt, Homo Sapiens
cugugggaaaggaaacaggugcugagcccaag

SEQ ID NO: 21175 - RNA, 32 nt, Homo Sapiens
uggauuuauuuuuucuuaacuauuuggauuaa

SEQ ID NO: 21176 - RNA, 32 nt, Homo Sapiens
auaugauguacuagaucccuuaaaaggccuuc

SEQ ID NO: 21177 - RNA, 32 nt, Homo Sapiens
ggugcuaauccaguggaaaucaggaaaggugu

SEQ ID NO: 21178 - RNA, 32 nt, Homo Sapiens
gaccugccgggacccuugcccgccgcgcaccc

SEQ ID NO: 21179 - RNA, 32 nt, Homo Sapiens
auuguggaugacccuuagaauccauucucugg

SEQ ID NO: 21180 - RNA, 32 nt, Homo Sapiens
uacuggggaggagauuugagguccugaaagug

SEQ ID NO: 21181 - RNA, 32 nt, Homo Sapiens
cacgguuaugggggcggggugggcggggaggc

SEQ ID NO: 21182 - RNA, 32 nt, Homo Sapiens
guggccaucuggagcuggugcuauaggugacc

SEQ ID NO: 21183 - RNA, 32 nt, Homo Sapiens
ggaaguugccauuuguuuuucuuaaaucuaua

SEQ ID NO: 21184 - RNA, 32 nt, Homo Sapiens
gguguguggacgccgcuuuguugccugaggug

SEQ ID NO: 21185 - RNA, 32 nt, Homo Sapiens
uaucugaagaauucaagaaaacaaaggcaucc

SEQ ID NO: 21186 - RNA, 32 nt, Homo Sapiens
uuccuugccagaugaucuuuuacagagaugug

SEQ ID NO: 21187 - RNA, 32 nt, Homo Sapiens
uagcagugccugggaccuccucaacaacagaa

SEQ ID NO: 21188 - RNA, 32 nt, Homo Sapiens
gaugucuccaacugugcugaggucugcccugg

SEQ ID NO: 21189 - RNA, 32 nt, Homo Sapiens
auacagcucacagagaaacgcaugugcuauug

SEQ ID NO: 21190 - RNA, 32 nt, Homo Sapiens
gagggcuguguaguaaaguaccccccauaccc

SEQ ID NO: 21191 - RNA, 32 nt, Homo Sapiens
ggguugcaaccacugcaacggcuuagacuucg

SEQ ID NO: 21192 - RNA, 32 nt, Homo Sapiens
uucucuuacucugcuuuuuucuaguaaaguac

SEQ ID NO: 21193 - RNA, 32 nt, Homo Sapiens
aggcccggugcagcugagguucccgacaccag

SEQ ID NO: 21194 - RNA, 31 nt, Homo Sapiens
cccuuuucucucuuacgucuaacugacuagg

SEQ ID NO: 21195 - RNA, 32 nt, Homo Sapiens
ucuguaagaaggaaaauucagccaguugauuu

SEQ ID NO: 21196 - RNA, 32 nt, Homo Sapiens
uuaauggaaaauuuuuaaaugcuaugguuucu

SEQ ID NO: 21197 - RNA, 32 nt, Homo Sapiens
ccugguucauguguucugggggguuuggggug

SEQ ID NO: 21198 - RNA, 32 nt, Homo Sapiens
gcagccggugggcagcgccgcgcagggagggg

SEQ ID NO: 21199 - RNA, 32 nt, Homo Sapiens
cauuuuaaaaucuauuuguuucuuuauuggug

SEQ ID NO: 21200 - RNA, 32 nt, Homo Sapiens
gcugcugaguacaaagcacuugggaugggaga

SEQ ID NO: 21201 - RNA, 32 nt, Homo Sapiens
ccacgugggagcugaggcucuggggcuuccgc

SEQ ID NO: 21202 - RNA, 32 nt, Homo Sapiens
cgggagcggcgggagcgguggcggcggcagag

SEQ ID NO: 21203 - RNA, 32 nt, Homo Sapiens
acucacuaaagacagaaugaauguagaaaagg

SEQ ID NO: 21204 - RNA, 28 nt, Homo Sapiens
ugaaauaaaaauuuuaucaguuaaaaaa

SEQ ID NO: 21205 - RNA, 32 nt, Homo Sapiens
agaguuugaaaugaaauguugucaggguguug

SEQ ID NO: 21206 - RNA, 32 nt, Homo Sapiens
gcaguccgggacuggggcugggcgcgcugccc

SEQ ID NO: 21207 - RNA, 32 nt, Homo Sapiens
uuuuuuguuuuaaaagugguuggggauccaca

SEQ ID NO: 21208 - RNA, 32 nt, Homo Sapiens
gggagggggcaagaggccuccuuggucagugu

SEQ ID NO: 21209 - RNA, 32 nt, Homo Sapiens
auaaaauaagaaaaaaguaaaccacaaggaga

SEQ ID NO: 21210 - RNA, 32 nt, Homo Sapiens
ugacaucuccaugcugguuucuccauagcaua

SEQ ID NO: 21211 - RNA, 32 nt, Homo Sapiens
cgaaagagaaaacggcgccugugguuuugcuu

SEQ ID NO: 21212 - RNA, 32 nt, Homo Sapiens
aaaaacaaacaaaaacaacuaaaaggacagua

SEQ ID NO: 21213 - RNA, 32 nt, Homo Sapiens
cgcuccccauucucuuacauucuguucccaac

SEQ ID NO: 21214 - RNA, 32 nt, Homo Sapiens
gucccuguuuuguccugaaauuuuagucuauu

SEQ ID NO: 21215 - RNA, 32 nt, Homo Sapiens
aagaacuaaaaauacauaaaugaauuaaguaa

SEQ ID NO: 21216 - RNA, 30 nt, Homo Sapiens
cugccgcgcgcgcagguacggggcagaagu

SEQ ID NO: 21217 - RNA, 32 nt, Homo Sapiens
gcucgccggcugucggguguggggguaugcca

SEQ ID NO: 21218 - RNA, 32 nt, Homo Sapiens
aacacugccugguacauaguaaaugcucaaua

SEQ ID NO: 21219 - RNA, 32 nt, Homo Sapiens
cggguggagacggacguguacccuggcgaggc

SEQ ID NO: 21220 - RNA, 32 nt, Homo Sapiens
ugccuggagggaaggaacaggcccaugggaag

SEQ ID NO: 21221 - RNA, 32 nt, Homo Sapiens
uuggccuaggguggcaggagccagggaggagu

SEQ ID NO: 21222 - RNA, 32 nt, Homo Sapiens
agaaaggauacauuauuaaaauacuuugccuu

SEQ ID NO: 21223 - RNA, 32 nt, Homo Sapiens
uuaaggaggcaaacagaacagucugcuacaaa

SEQ ID NO: 21224 - RNA, 32 nt, Homo Sapiens
cucccccgcccucaggguccacggccaccaug

SEQ ID NO: 21225 - RNA, 32 nt, Homo Sapiens
agcuuuauucauaauagcacaaaauuguaaac

SEQ ID NO: 21226 - RNA, 32 nt, Homo Sapiens
ugugcccuggggaccccugacccaucccaaaa

SEQ ID NO: 21227 - RNA, 32 nt, Homo Sapiens
cggcugagugcagcuacagcuagguccgcguc

SEQ ID NO: 21228 - RNA, 32 nt, Homo Sapiens
gccuccccacccaggaugaccccugggcaggu

SEQ ID NO: 21229 - RNA, 32 nt, Homo Sapiens
aagaggaggccgugcggggcgcggcgcccgcg

SEQ ID NO: 21230 - RNA, 32 nt, Homo Sapiens
cacacagauaaugccauucucaucaugucaua

SEQ ID NO: 21231 - RNA, 32 nt, Homo Sapiens
acaccguuccuguuuaucucaguguccgucau

SEQ ID NO: 21232 - RNA, 32 nt, Homo Sapiens
gcagccggcagggaggggccgcggcggagccu

SEQ ID NO: 21233 - RNA, 32 nt, Homo Sapiens
uuauuucuugcaugcauaugcugaauuuuuuu

SEQ ID NO: 21234 - RNA, 32 nt, Homo Sapiens
ggauccaagcaaacuacuuuaagcaaauauuu

SEQ ID NO: 21235 - RNA, 32 nt, Homo Sapiens
ggugggagggaaugcagaugggaguuggggga

SEQ ID NO: 21236 - RNA, 32 nt, Homo Sapiens
cuugggucccuuuuaaacuuucucugagccuu

SEQ ID NO: 21237 - RNA, 32 nt, Homo Sapiens
cugcagcgggccugggggcagcuaggcgcuga

SEQ ID NO: 21238 - RNA, 32 nt, Homo Sapiens
cgggcggcgccccgggauagggacccugcagc

SEQ ID NO: 21239 - RNA, 32 nt, Homo Sapiens
acuuggccugagaugccuggugagcauuacag

SEQ ID NO: 21240 - RNA, 32 nt, Homo Sapiens
ccacucccacucggaggcccccugcccucucc

SEQ ID NO: 21241 - RNA, 32 nt, Homo Sapiens
cauauaucaacacauucaauggcuguuguuaa

SEQ ID NO: 21242 - RNA, 32 nt, Homo Sapiens
ugcuccaauaaacuuuuuuaugcuuuaaaaaa

SEQ ID NO: 21243 - RNA, 32 nt, Homo Sapiens
aaaaagaaauucaguuucccccaaggaucucu

SEQ ID NO: 21244 - RNA, 32 nt, Homo Sapiens
agaagaaggaaccugauucggacuauuuucug

SEQ ID NO: 21245 - RNA, 32 nt, Homo Sapiens
ucuugacucccuuccaacacagaugcccaggc

SEQ ID NO: 21246 - RNA, 32 nt, Homo Sapiens
gcugcccugcgcccggcccuccagccagccuu

SEQ ID NO: 21247 - RNA, 30 nt, Homo Sapiens
caagauccucuugccacaucuugaaaaugc

SEQ ID NO: 21248 - RNA, 32 nt, Homo Sapiens
cccccacagagcagcucggacucagcucccgg

SEQ ID NO: 21249 - RNA, 32 nt, Homo Sapiens
gaaccuucaagaauauaaaacuaaaguauuac

SEQ ID NO: 21250 - RNA, 32 nt, Homo Sapiens
aagaucccaucccaucacaucagccuaccucc

SEQ ID NO: 21251 - RNA, 32 nt, Homo Sapiens
gcaaugauguauaaaaaaguggauucaccugu

SEQ ID NO: 21252 - RNA, 32 nt, Homo Sapiens
aaaguagucacuauacaacuccccucucccug

SEQ ID NO: 21253 - RNA, 32 nt, Homo Sapiens
ugaauucugugcuaauuuuguggccagaaugc

SEQ ID NO: 21254 - RNA, 32 nt, Homo Sapiens
ugauccuccuugagcauugaggaggcacaugg

SEQ ID NO: 21255 - RNA, 31 nt, Homo Sapiens
ggcggugcacggagagccccuucucgcgcgc

SEQ ID NO: 21256 - RNA, 32 nt, Homo Sapiens
cuaaugcaaagcuuuuggagacugcuaagugu

SEQ ID NO: 21257 - RNA, 32 nt, Homo Sapiens
uguaguggagaaccuccucccugggaccacug

SEQ ID NO: 21258 - RNA, 32 nt, Homo Sapiens
gcuucuugcccagcugaccacuggccccgggg

SEQ ID NO: 21259 - RNA, 32 nt, Homo Sapiens
cccacagaugacuggaggaaggaggggaaaug

SEQ ID NO: 21260 - RNA, 32 nt, Homo Sapiens
cgacaggcgaggggcagacaugcugaauucca

SEQ ID NO: 21261 - RNA, 32 nt, Homo Sapiens
uagauuuaaaagacacucaaaaacaaaaaacg

SEQ ID NO: 21262 - RNA, 32 nt, Homo Sapiens
caagcuccucagacuagucaacuuucuuaaua

SEQ ID NO: 21263 - RNA, 32 nt, Homo Sapiens
uauuuguuuucuucuuuuuguucuuuuugcuu

SEQ ID NO: 21264 - RNA, 32 nt, Homo Sapiens
uuaauauuuaauuauuugauuuauuuaauuuu

SEQ ID NO: 21265 - RNA, 32 nt, Homo Sapiens
uuacaggcgcccgccaccugggauuacgggcg

SEQ ID NO: 21266 - RNA, 27 nt, Homo Sapiens
gaugugaauaaaauaaaaacaaguuuc

SEQ ID NO: 21267 - RNA, 32 nt, Homo Sapiens
cgcugcgcggagccgcgccggcuggguuagcg

SEQ ID NO: 21268 - RNA, 32 nt, Homo Sapiens
acuuucauuguuaauguauauuauucagaaac

SEQ ID NO: 21269 - RNA, 32 nt, Homo Sapiens
uuugcccauccggagcagcaucuuguacagaa

SEQ ID NO: 21270 - RNA, 32 nt, Homo Sapiens
auguaaagcacuuuaauuuauagcuaugguua

SEQ ID NO: 21271 - RNA, 32 nt, Homo Sapiens
cuuuucccaagcauguaaacaagggggcccac

SEQ ID NO: 21272 - RNA, 32 nt, Homo Sapiens
uccucaggcagccccagcuugcugguccaggg

SEQ ID NO: 21273 - RNA, 32 nt, Homo Sapiens
ggaaggcagucaauuauggauauuuuaauguu

SEQ ID NO: 21274 - RNA, 32 nt, Homo Sapiens
gagcaaccagguucuaggacuuucucaauauu

SEQ ID NO: 21275 - RNA, 32 nt, Homo Sapiens
cgugggaggacaaggccacgccggcagcuucc

SEQ ID NO: 21276 - RNA, 32 nt, Homo Sapiens
gggaguguuucauccaacuaagcucccucagu

SEQ ID NO: 21277 - RNA, 32 nt, Homo Sapiens
agaauuaagaaccugaagaugaagauuuagag

SEQ ID NO: 21278 - RNA, 32 nt, Homo Sapiens
uucuaucacaaugaaacggcugguuugugugc

SEQ ID NO: 21279 - RNA, 32 nt, Homo Sapiens
guugaugugcuugggaaagcucccucccccuc

SEQ ID NO: 21280 - RNA, 32 nt, Homo Sapiens
cuccgucuuggauuagaguggaucucagaggg

SEQ ID NO: 21281 - RNA, 32 nt, Homo Sapiens
cuuaacugcuucuugguuguauuggguagcau

SEQ ID NO: 21282 - RNA, 32 nt, Homo Sapiens
gcccccgacccccgccaagaccccgggcgccu

SEQ ID NO: 21283 - RNA, 32 nt, Homo Sapiens
cuuagcuggggucagaccugggguccucacug

SEQ ID NO: 21284 - RNA, 32 nt, Homo Sapiens
agccaugauguaauauaaggcugucuuggugu

SEQ ID NO: 21285 - RNA, 31 nt, Homo Sapiens
aagcagcggcacuuuucucccuggaaggcua

SEQ ID NO: 21286 - RNA, 32 nt, Homo Sapiens
caugcucugagcucagacuuggggagggaggg

SEQ ID NO: 21287 - RNA, 32 nt, Homo Sapiens
aaauuucauuuucucugaaagucgagaauucc

SEQ ID NO: 21288 - RNA, 32 nt, Homo Sapiens
acagaggacacucgagccauggagcaggccau

SEQ ID NO: 21289 - RNA, 31 nt, Homo Sapiens
gcccuguugcacagugccgugagacuuagcu

SEQ ID NO: 21290 - RNA, 32 nt, Homo Sapiens
acacuaagguaacaugacauaaucauaccaua

SEQ ID NO: 21291 - RNA, 32 nt, Homo Sapiens
acaacugaaaaacgaggccuagagauacuauc

SEQ ID NO: 21292 - RNA, 32 nt, Homo Sapiens
agggaacaggcagggugggcaguugggguuca

SEQ ID NO: 21293 - RNA, 32 nt, Homo Sapiens
uacccucugugccccucccuuaggccugugug

SEQ ID NO: 21294 - RNA, 32 nt, Homo Sapiens
uccagcccguggugcuggccaacugccaucua

SEQ ID NO: 21295 - RNA, 32 nt, Homo Sapiens
auaaacccacccagggaaaagaggggaagcca

SEQ ID NO: 21296 - RNA, 32 nt, Homo Sapiens
cuuuaggaaugcugaguuuucuuuaucuugac

SEQ ID NO: 21297 - RNA, 32 nt, Homo Sapiens
ccucaccaugccggcugcgaggcggcccgugc

SEQ ID NO: 21298 - RNA, 32 nt, Homo Sapiens
uugccauaaaaauaaacuauggaguccuuuau

SEQ ID NO: 21299 - RNA, 32 nt, Homo Sapiens
gccccagaacgaggaaggagcggaguugggau

SEQ ID NO: 21300 - RNA, 32 nt, Homo Sapiens
cuggcagggggagaccacagguaugcaggugg

SEQ ID NO: 21301 - RNA, 30 nt, Homo Sapiens
cuccgucucggcggcggcgggcaguugcag

SEQ ID NO: 21302 - RNA, 32 nt, Homo Sapiens
gcacuccccacucugcugcagugucaccguga

SEQ ID NO: 21303 - RNA, 32 nt, Homo Sapiens
ggacacugggguuuccuucccucucuccguag

SEQ ID NO: 21304 - RNA, 32 nt, Homo Sapiens
ggcucaguuguggcagacaguuuuuugaaagu

SEQ ID NO: 21305 - RNA, 32 nt, Homo Sapiens
acaaagcugucauuuuugcagaaggcuguccc

SEQ ID NO: 21306 - RNA, 32 nt, Homo Sapiens
gcuuucgcuccuucuccaagacucaggccugu

SEQ ID NO: 21307 - RNA, 32 nt, Homo Sapiens
cugucucucaaaagaagaguaguuaucugcag

SEQ ID NO: 21308 - RNA, 28 nt, Homo Sapiens
gcagaauuuaucuaaauguguuucaagg

SEQ ID NO: 21309 - RNA, 32 nt, Homo Sapiens
cuagggacuuucuaagaagauaccuaccccca

SEQ ID NO: 21310 - RNA, 32 nt, Homo Sapiens
gguucccgcccggcccuccugggacuuguauu

SEQ ID NO: 21311 - RNA, 32 nt, Homo Sapiens
acccggcuaauuuuuucuuuauuuuuuuugua

SEQ ID NO: 21312 - RNA, 32 nt, Homo Sapiens
agaguucacuggucgcucuguugugccccaca

SEQ ID NO: 21313 - RNA, 29 nt, Homo Sapiens
cuuuuuaaaaaguuauauuuucuaaagca

SEQ ID NO: 21314 - RNA, 32 nt, Homo Sapiens
ggacuagcuuugcugaccugcagagcuccccu

SEQ ID NO: 21315 - RNA, 32 nt, Homo Sapiens
ucauguucagcaugcaauggaaucaugcuugu

SEQ ID NO: 21316 - RNA, 32 nt, Homo Sapiens
uuugucaaaauaucaaguaaauuuuuguuucu

SEQ ID NO: 21317 - RNA, 32 nt, Homo Sapiens
agguaaggagaagaggggucaagaguuaaacu

SEQ ID NO: 21318 - RNA, 32 nt, Homo Sapiens
uaacucuacacauaaacuuuuacuggaaguac

SEQ ID NO: 21319 - RNA, 32 nt, Homo Sapiens
aaaugugccacacuuuucaaguuuuauauaac

SEQ ID NO: 21320 - RNA, 32 nt, Homo Sapiens
gacaugggagaggaaacguguaggacccgcug

SEQ ID NO: 21321 - RNA, 32 nt, Homo Sapiens
uuauuauucugacauauuuuugaaagggacaa

SEQ ID NO: 21322 - RNA, 32 nt, Homo Sapiens
uuccugguccugaaacguggaaauugauuaua

SEQ ID NO: 21323 - RNA, 32 nt, Homo Sapiens
gaauucuaaaauugguuuauuuuagauguauu

SEQ ID NO: 21324 - RNA, 32 nt, Homo Sapiens
auguacauauuuucuguaaauauacaugcgcc

SEQ ID NO: 21325 - RNA, 32 nt, Homo Sapiens
cucuagauaaaacuuucuuuucugaucaugaa

SEQ ID NO: 21326 - RNA, 31 nt, Homo Sapiens
uugguuuauuugacuuacuguuaacucuugc

SEQ ID NO: 21327 - RNA, 32 nt, Homo Sapiens
uuaccugaauaaaugguaguaaucacaguugg

SEQ ID NO: 21328 - RNA, 32 nt, Homo Sapiens
acuuaaaggaugagaaaaugugguguagcuau

SEQ ID NO: 21329 - RNA, 32 nt, Homo Sapiens
guacagacagaaaaaacugagauguagccccu

SEQ ID NO: 21330 - RNA, 32 nt, Homo Sapiens
ccagggaccugccacgcaucuuuagggugaca

SEQ ID NO: 21331 - RNA, 32 nt, Homo Sapiens
ugugcuauauaguggauuauaauucugugaaa

SEQ ID NO: 21332 - RNA, 28 nt, Homo Sapiens
uucuuggugucuaccaggauguggccuu

SEQ ID NO: 21333 - RNA, 32 nt, Homo Sapiens
gccucgcuggggccuccuccccaggcagccaa

SEQ ID NO: 21334 - RNA, 32 nt, Homo Sapiens
uaaaccuuuuucuucccagucuuggguaugua

SEQ ID NO: 21335 - RNA, 31 nt, Homo Sapiens
uccccgcugccgggaacgaggggccgccuca

SEQ ID NO: 21336 - RNA, 30 nt, Homo Sapiens
cuuugugccuuguugggggaaaccggugac

SEQ ID NO: 21337 - RNA, 32 nt, Homo Sapiens
gcugcagaccucuggggacugccuacccaacc

SEQ ID NO: 21338 - RNA, 31 nt, Homo Sapiens
aaagugaaauaaagccuugaaccucaaaaaa

SEQ ID NO: 21339 - RNA, 32 nt, Homo Sapiens
cuucagcauaucuaauguauacucaauauguc

SEQ ID NO: 21340 - RNA, 32 nt, Homo Sapiens
uaaaagcuggagagaugagaaaaaagaaaacu

SEQ ID NO: 21341 - RNA, 32 nt, Homo Sapiens
auaacuuuccaagcuccaccacuuccuaaauc

SEQ ID NO: 21342 - RNA, 32 nt, Homo Sapiens
ucuuuaaauggggaccugagggcacucgcuuu

SEQ ID NO: 21343 - RNA, 32 nt, Homo Sapiens
cccagugagacagcaggugacaugacagcaag

SEQ ID NO: 21344 - RNA, 32 nt, Homo Sapiens
acgcguagauguggagggaggcgcgggcuccg

SEQ ID NO: 21345 - RNA, 32 nt, Homo Sapiens
caagauugacauggaaugaugaaaaucaucug

SEQ ID NO: 21346 - RNA, 32 nt, Homo Sapiens
cugagcccagcugcuggagccccgagcagcgg

SEQ ID NO: 21347 - RNA, 32 nt, Homo Sapiens
aucggaugaaugcacacgcagacagacccucu

SEQ ID NO: 21348 - RNA, 32 nt, Homo Sapiens
gcacccugcguuucuucuggggugcaggggga

SEQ ID NO: 21349 - RNA, 32 nt, Homo Sapiens
uccuugcaaguuuccuaguauaagguaugcgc

SEQ ID NO: 21350 - RNA, 32 nt, Homo Sapiens
uccacugggguagagguauucaccuuaaaaca

SEQ ID NO: 21351 - RNA, 28 nt, Homo Sapiens
aauuuaguguauaauauguguuuguaac

SEQ ID NO: 21352 - RNA, 32 nt, Homo Sapiens
auaggcuuuucuuuuuucagguuugauguaag

SEQ ID NO: 21353 - RNA, 32 nt, Homo Sapiens
gccgcaggcuucggggacccggaccccccauu

SEQ ID NO: 21354 - RNA, 32 nt, Homo Sapiens
aaguaaugaggcaggugggguuucuguuggga

SEQ ID NO: 21355 - RNA, 32 nt, Homo Sapiens
uuugggguuuuuugcuuuuuuauuccugaagc

SEQ ID NO: 21356 - RNA, 32 nt, Homo Sapiens
ugguucugaggcgucucucaacagccauaugg

SEQ ID NO: 21357 - RNA, 32 nt, Homo Sapiens
acuuaauauguuuuauucagcuucuauaagug

SEQ ID NO: 21358 - RNA, 32 nt, Homo Sapiens
gaguaaaauaauuuaauuaauagcucauauuu

SEQ ID NO: 21359 - RNA, 32 nt, Homo Sapiens
uauaaagaaagauuaaauucuccaaugauauu

SEQ ID NO: 21360 - RNA, 32 nt, Homo Sapiens
ccagcgacuggggcaagaaucuguguucugug

SEQ ID NO: 21361 - RNA, 32 nt, Homo Sapiens
auguuuuaucuuuaaaaagaaaacagcuccuu

SEQ ID NO: 21362 - RNA, 32 nt, Homo Sapiens
agguggcuuuccugggggagugccugguaauu

SEQ ID NO: 21363 - RNA, 32 nt, Homo Sapiens
cgcggagguggcacgcccgagcggccucgccu

SEQ ID NO: 21364 - RNA, 32 nt, Homo Sapiens
caagaccuaaaauaaaccucaacaggucuuuu

SEQ ID NO: 21365 - RNA, 31 nt, Homo Sapiens
aucaggagcuccaggaaccaggcagugaggc

SEQ ID NO: 21366 - RNA, 32 nt, Homo Sapiens
gcgccuuccccccggcccgacuccgcugguca

SEQ ID NO: 21367 - RNA, 32 nt, Homo Sapiens
acaggggauccccuccucccccucagccgugg

SEQ ID NO: 21368 - RNA, 32 nt, Homo Sapiens
guaggcuucuaaauaaaauuuuuaaaaagagc

SEQ ID NO: 21369 - RNA, 32 nt, Homo Sapiens
uggugcucuuugagaguuuacgcccaugacug

SEQ ID NO: 21370 - RNA, 32 nt, Homo Sapiens
uggcgcccgaccccgcgccccggcccgaagcu

SEQ ID NO: 21371 - RNA, 32 nt, Homo Sapiens
cuccacucggguggaguggaaguggccagacc

SEQ ID NO: 21372 - RNA, 32 nt, Homo Sapiens
ucuccuuguauauaauuaaacuugcuauuccu

SEQ ID NO: 21373 - RNA, 32 nt, Homo Sapiens
ggaacccuggggauggggcagacccucacagc

SEQ ID NO: 21374 - RNA, 30 nt, Homo Sapiens
agagggucgcggccggagggucccggccgg

SEQ ID NO: 21375 - RNA, 30 nt, Homo Sapiens
agaaaugcaauaaaaacuauauuucaacag

SEQ ID NO: 21376 - RNA, 32 nt, Homo Sapiens
ucccggccauucucccucuuguuuucacuuca

SEQ ID NO: 21377 - RNA, 31 nt, Homo Sapiens
gcugcauucggaggacugccccgugcccuga

SEQ ID NO: 21378 - RNA, 32 nt, Homo Sapiens
uugucuuaaauauauaggacaauacauuauau

SEQ ID NO: 21379 - RNA, 32 nt, Homo Sapiens
ggcugcagggcgugcaccgcgcggccuuccgc

SEQ ID NO: 21380 - RNA, 32 nt, Homo Sapiens
ccgcguuguaaaauauagcuguacaaauauaa

SEQ ID NO: 21381 - RNA, 32 nt, Homo Sapiens
ccaaaauguagauuauuuuauuucaagggaua

SEQ ID NO: 21382 - RNA, 32 nt, Homo Sapiens
aagcaacacaauaaaaaguaaaugauaaagug

SEQ ID NO: 21383 - RNA, 32 nt, Homo Sapiens
uucccuguguguucacucuccucccaaagcaa

SEQ ID NO: 21384 - RNA, 32 nt, Homo Sapiens
augggcaugacucuccuucgaggccaccacgu

SEQ ID NO: 21385 - RNA, 32 nt, Homo Sapiens
uacaacaaaguuucugccaucuagcuuuuuga

SEQ ID NO: 21386 - RNA, 32 nt, Homo Sapiens
guguggacuguuauaagaacuacucaguguuu

SEQ ID NO: 21387 - RNA, 32 nt, Homo Sapiens
auuacuccucaaugccguuuccccaguugcuc

SEQ ID NO: 21388 - RNA, 32 nt, Homo Sapiens
aaaauaaauuuuuauuugauauuucauauaua

SEQ ID NO: 21389 - RNA, 32 nt, Homo Sapiens
uugaggcagauuuguguguaucaucaaauucu

SEQ ID NO: 21390 - RNA, 32 nt, Homo Sapiens
cagaggagccccacgugcacuccccggccugc

SEQ ID NO: 21391 - RNA, 32 nt, Homo Sapiens
ccccaaacuacaaccucaggaaaaggggugga

SEQ ID NO: 21392 - RNA, 32 nt, Homo Sapiens
auaauuuuugccaggcuucuguacuucuagua

SEQ ID NO: 21393 - RNA, 32 nt, Homo Sapiens
uuacaaugagaaaauggcaugaaaauauuaaa

SEQ ID NO: 21394 - RNA, 32 nt, Homo Sapiens
uuuaaaaacuugaaaacagcuuugaaacacaa

SEQ ID NO: 21395 - RNA, 32 nt, Homo Sapiens
uccuguuuuguaucuguccagaucauuauuuc

SEQ ID NO: 21396 - RNA, 31 nt, Homo Sapiens
auuacuauugcuuauuagcaagauuguuauc

SEQ ID NO: 21397 - RNA, 32 nt, Homo Sapiens
aagauaccuugaugaagaccuggacuauugaa

SEQ ID NO: 21398 - RNA, 32 nt, Homo Sapiens
ucuuugggaauuugguggccacugcuucaguc

SEQ ID NO: 21399 - RNA, 32 nt, Homo Sapiens
ucgccugcugcccucuugcgcgcgggaagcag

SEQ ID NO: 21400 - RNA, 32 nt, Homo Sapiens
ugagugacaacagauaaugccaauugcccaga

SEQ ID NO: 21401 - RNA, 32 nt, Homo Sapiens
guccccgccggggaggucgggacgggcagggg

SEQ ID NO: 21402 - RNA, 32 nt, Homo Sapiens
gccacgaggagcuuccagugcauguugccaug

SEQ ID NO: 21403 - RNA, 32 nt, Homo Sapiens
agcgccuuuuucuguggccaauguguguuuuc

SEQ ID NO: 21404 - RNA, 29 nt, Homo Sapiens
acgaugcugaagauugguguggagcuuuc

SEQ ID NO: 21405 - RNA, 32 nt, Homo Sapiens
agaugagccagggcagugcgcuccacaaaccc

SEQ ID NO: 21406 - RNA, 32 nt, Homo Sapiens
agcagagcaaacugcgcagcaggcaccuccag

SEQ ID NO: 21407 - RNA, 32 nt, Homo Sapiens
gccacugccucccagguucaagugauucuccu

SEQ ID NO: 21408 - RNA, 32 nt, Homo Sapiens
uguuggccauuucuggagcaagagggucuucu

SEQ ID NO: 21409 - RNA, 32 nt, Homo Sapiens
gcaauacuuauagacugaaauaaaaugaaacu

SEQ ID NO: 21410 - RNA, 32 nt, Homo Sapiens
auaagguuaguacauucacuaggggcaaaugg

SEQ ID NO: 21411 - RNA, 32 nt, Homo Sapiens
gaggaaaaguauuuucucucauguuaguacac

SEQ ID NO: 21412 - RNA, 32 nt, Homo Sapiens
aaaagaaaaugaggaggaguugguuuuacucu

SEQ ID NO: 21413 - RNA, 32 nt, Homo Sapiens
cagugugugugaagugaaugugaaaugugugu

SEQ ID NO: 21414 - RNA, 32 nt, Homo Sapiens
agccccucauucuccuugggaaucugcagagg

SEQ ID NO: 21415 - RNA, 32 nt, Homo Sapiens
caccucccgagcuccuccuggagaccccuguc

SEQ ID NO: 21416 - RNA, 32 nt, Homo Sapiens
gagacagagggaaagggaaaaaacagaauugu

SEQ ID NO: 21417 - RNA, 32 nt, Homo Sapiens
gccugggauugacagaagcuucugcccaccua

SEQ ID NO: 21418 - RNA, 32 nt, Homo Sapiens
cuaaaagggguucccggcaccucgguuugugu

SEQ ID NO: 21419 - RNA, 32 nt, Homo Sapiens
ggggccggccucggcccggagcggaggaagga

SEQ ID NO: 21420 - RNA, 32 nt, Homo Sapiens
ucagcccggccgccgccaggcguuggcaucgc

SEQ ID NO: 21421 - RNA, 32 nt, Homo Sapiens
ggcacccaucucaaggaguggcugggagucuu

SEQ ID NO: 21422 - RNA, 32 nt, Homo Sapiens
gaucccuugagcucaggaguuugaggccaggc

SEQ ID NO: 21423 - RNA, 32 nt, Homo Sapiens
gcucagcgccgacugcgcgccucugcccgcga

SEQ ID NO: 21424 - RNA, 32 nt, Homo Sapiens
ugugcauuuuaauauucuuuuauaauuauuaa

SEQ ID NO: 21425 - RNA, 32 nt, Homo Sapiens
gaacaucugaagacaucagacugcacugcgua

SEQ ID NO: 21426 - RNA, 32 nt, Homo Sapiens
aaauuuauuagaaauuaaaaauuaaagggcau

SEQ ID NO: 21427 - RNA, 32 nt, Homo Sapiens
ccccggccggcagcauggagccgcccggacgc

SEQ ID NO: 21428 - RNA, 32 nt, Homo Sapiens
cgcucacaggacuuggaucugaagcacaguaa

SEQ ID NO: 21429 - RNA, 32 nt, Homo Sapiens
ucugcacucccucuccucuucaggggccagac

SEQ ID NO: 21430 - RNA, 32 nt, Homo Sapiens
ucauuucuuguacagcugugcaguuucuugua

SEQ ID NO: 21431 - RNA, 32 nt, Homo Sapiens
ggagaacugaaaucauuccauguugauauaaa

SEQ ID NO: 21432 - RNA, 32 nt, Homo Sapiens
cugccucccucaugcucgcagccacucugugc

SEQ ID NO: 21433 - RNA, 32 nt, Homo Sapiens
cagcucuugacuucuuuuuuguaaacauuacu

SEQ ID NO: 21434 - RNA, 32 nt, Homo Sapiens
ggcgggcuccaugcccagcaguagcgcacuug

SEQ ID NO: 21435 - RNA, 32 nt, Homo Sapiens
cuacuuguauuauuuucuuaauauuuaucuuu

SEQ ID NO: 21436 - RNA, 32 nt, Homo Sapiens
gaugggucaggagguggacaaguuggggccag

SEQ ID NO: 21437 - RNA, 32 nt, Homo Sapiens
ccaucuuuuucuuuuuaacccuaaucuuucac

SEQ ID NO: 21438 - RNA, 32 nt, Homo Sapiens
cuuguacugaauauauguacuuugaagauuua

SEQ ID NO: 21439 - RNA, 32 nt, Homo Sapiens
aaagaacaaauauaagaaugauaacacuggaa

SEQ ID NO: 21440 - RNA, 32 nt, Homo Sapiens
auuuugugcaguaccaaugacaaaaauauggu

SEQ ID NO: 21441 - RNA, 32 nt, Homo Sapiens
ggggagcuuucugcacccccaguggcaucucc

SEQ ID NO: 21442 - RNA, 29 nt, Homo Sapiens
ccauuuuuauguaugucaaagguaaaaaa

SEQ ID NO: 21443 - RNA, 32 nt, Homo Sapiens
augaucugacaguuggaggugucuggguguuu

SEQ ID NO: 21444 - RNA, 32 nt, Homo Sapiens
acacuccucccuccccagugagcagaaggcac

SEQ ID NO: 21445 - RNA, 29 nt, Homo Sapiens
ggacucggccccauggggacgccgccggc

SEQ ID NO: 21446 - RNA, 32 nt, Homo Sapiens
cuuuaagucugcuuaauuacuugaaaauugua

SEQ ID NO: 21447 - RNA, 32 nt, Homo Sapiens
ugugaucucagauuccugcuuuucucaccccg

SEQ ID NO: 21448 - RNA, 32 nt, Homo Sapiens
gcaggaggaucacuugaguccuggaguuugag

SEQ ID NO: 21449 - RNA, 32 nt, Homo Sapiens
auuccucugccucagcacuuugggaggccaag

SEQ ID NO: 21450 - RNA, 32 nt, Homo Sapiens
agcccgccuagcccggcccagcccagcucagg

SEQ ID NO: 21451 - RNA, 32 nt, Homo Sapiens
gaacaagcacaauaugaaaaacaauuagagca

SEQ ID NO: 21452 - RNA, 30 nt, Homo Sapiens
gcuggccuggacugccugugcucugggcuc

SEQ ID NO: 21453 - RNA, 27 nt, Homo Sapiens
auggggccuugcuucagcccaagaagc

SEQ ID NO: 21454 - RNA, 30 nt, Homo Sapiens
cucacaauacuugccacauuacuuggcaua

SEQ ID NO: 21455 - RNA, 32 nt, Homo Sapiens
guggagggagucauggcaggacaggcguuuag

SEQ ID NO: 21456 - RNA, 30 nt, Homo Sapiens
ugagggaggggcagacggauggcaggcaag

SEQ ID NO: 21457 - RNA, 32 nt, Homo Sapiens
aaauuggcaaagcggaaugcggcggccaaaau

SEQ ID NO: 21458 - RNA, 32 nt, Homo Sapiens
ugacaugaaaaggaugaacgauucacugauuc

SEQ ID NO: 21459 - RNA, 32 nt, Homo Sapiens
uucuugccucccuuccucccccaaaucugggu

SEQ ID NO: 21460 - RNA, 32 nt, Homo Sapiens
cuuggguuauauuugucauuuacuuuguucug

SEQ ID NO: 21461 - RNA, 32 nt, Homo Sapiens
ccgccucggcgccggcggugcacggagagccc

SEQ ID NO: 21462 - RNA, 32 nt, Homo Sapiens
uaggugaauuuaugugguuccugcuugaaaac

SEQ ID NO: 21463 - RNA, 32 nt, Homo Sapiens
caguggcuccugauguucugucugcuucccug

SEQ ID NO: 21464 - RNA, 32 nt, Homo Sapiens
ggucaacacuaugugagaagucagccagcagg

SEQ ID NO: 21465 - RNA, 32 nt, Homo Sapiens
uuuugagaugacuuauacuaauuuacauuguu

SEQ ID NO: 21466 - RNA, 32 nt, Homo Sapiens
ccucgccgcaccagcguccgcagcagccccau

SEQ ID NO: 21467 - RNA, 32 nt, Homo Sapiens
uaaacugauguaagcaggcugucauaagguac

SEQ ID NO: 21468 - RNA, 32 nt, Homo Sapiens
ugucaccgagccacccaaugggcugaaacuca

SEQ ID NO: 21469 - RNA, 32 nt, Homo Sapiens
cuggaagagaaggaaggcaggguggagcgggg

SEQ ID NO: 21470 - RNA, 32 nt, Homo Sapiens
caugugucuggacaccaaagauugagaagcug

SEQ ID NO: 21471 - RNA, 32 nt, Homo Sapiens
cccgggccgaacggcugcggacaccugggcgc

SEQ ID NO: 21472 - RNA, 32 nt, Homo Sapiens
gggcccugccagcaucucuggcucggcuuucu

SEQ ID NO: 21473 - RNA, 32 nt, Homo Sapiens
cgccugagaguaaugggcgcgagggggaaagc

SEQ ID NO: 21474 - RNA, 32 nt, Homo Sapiens
ggcgccuagaacccuugccccuccucauagac

SEQ ID NO: 21475 - RNA, 32 nt, Homo Sapiens
gagauaguuggauuaagaggcuagacgagaca

SEQ ID NO: 21476 - RNA, 32 nt, Homo Sapiens
uuguuuuguguuuuuccaaaacuugaacuugc

SEQ ID NO: 21477 - RNA, 32 nt, Homo Sapiens
aaagaaugaaagucuuuuuuuuuuuuuuuuuu

SEQ ID NO: 21478 - RNA, 32 nt, Homo Sapiens
gaagggucauauaaaaauaagguaacaccaca

SEQ ID NO: 21479 - RNA, 32 nt, Homo Sapiens
auugcuuggcucuuuaaacacaucagugcuuc

SEQ ID NO: 21480 - RNA, 32 nt, Homo Sapiens
uaugaaucauaucaaguaguuguuuacauuuc

SEQ ID NO: 21481 - RNA, 32 nt, Homo Sapiens
ucgacgcagcccgcgcuccccggagggcccag

SEQ ID NO: 21482 - RNA, 32 nt, Homo Sapiens
cuccccugccccaccagauugcugcaggggcg

SEQ ID NO: 21483 - RNA, 32 nt, Homo Sapiens
uaccagcuacucuggaggcugaggcaggagga

SEQ ID NO: 21484 - RNA, 32 nt, Homo Sapiens
acagagccccacgcuguugacaucagccugcu

SEQ ID NO: 21485 - RNA, 32 nt, Homo Sapiens
agaguaugguucucagcccaccagcuaguauc

SEQ ID NO: 21486 - RNA, 32 nt, Homo Sapiens
guaccuccugccccaugcugcccgcuucucac

SEQ ID NO: 21487 - RNA, 32 nt, Homo Sapiens
cccggccgcggcgcgccggcuuugucaugaug

SEQ ID NO: 21488 - RNA, 32 nt, Homo Sapiens
uugguaucuauuauuuucauucccauaagagg

SEQ ID NO: 21489 - RNA, 32 nt, Homo Sapiens
acugguuaucugccauggccucaacaauccau

SEQ ID NO: 21490 - RNA, 32 nt, Homo Sapiens
agaccccucccagcuuuguuugagauccugaa

SEQ ID NO: 21491 - RNA, 32 nt, Homo Sapiens
ccgcgaccggagcgccgcucuccgcuucucca

SEQ ID NO: 21492 - RNA, 32 nt, Homo Sapiens
ggaaaguggaaccuuaggccacaggggcagag

SEQ ID NO: 21493 - RNA, 32 nt, Homo Sapiens
aaaguggauaaagccuggucccugcccuuaag

SEQ ID NO: 21494 - RNA, 32 nt, Homo Sapiens
ugagguuuuuaaauauauauuuuguacuuugu

SEQ ID NO: 21495 - RNA, 32 nt, Homo Sapiens
gagcucauuacgauuauguuuagggagaccag

SEQ ID NO: 21496 - RNA, 32 nt, Homo Sapiens
cugcugcgcgcccaggggucccgcggguuuuc

SEQ ID NO: 21497 - RNA, 32 nt, Homo Sapiens
agaagugggagaggccggcagccugcaccgag

SEQ ID NO: 21498 - RNA, 32 nt, Homo Sapiens
agcugguaaacacaaaucaugucaauaaaggu

SEQ ID NO: 21499 - RNA, 32 nt, Homo Sapiens
uuugggaaaaggaaccaagcucauagcaauuu

SEQ ID NO: 21500 - RNA, 32 nt, Homo Sapiens
ggauauaaucauuggauuccuaucuugugcca

SEQ ID NO: 21501 - RNA, 32 nt, Homo Sapiens
caacaaaccuccagccagaaagccagcuauuu

SEQ ID NO: 21502 - RNA, 32 nt, Homo Sapiens
gauaagaaaaggaaacuuuugagcugcaccuu

SEQ ID NO: 21503 - RNA, 32 nt, Homo Sapiens
uauauauacuuuuuuucuuuuuucuuuuuuaa

SEQ ID NO: 21504 - RNA, 32 nt, Homo Sapiens
agcaccggccucagcccaggcggcucucuccc

SEQ ID NO: 21505 - RNA, 32 nt, Homo Sapiens
uacauaaccccucccccuccgccccgccccgc

SEQ ID NO: 21506 - RNA, 32 nt, Homo Sapiens
acuuggagaagcuggcugggcgcgguggcuca

SEQ ID NO: 21507 - RNA, 32 nt, Homo Sapiens
ugucagaggcuuuggaaguucauuaguucaau

SEQ ID NO: 21508 - RNA, 32 nt, Homo Sapiens
ccagugacugcccaguggcagcucagcugccc

SEQ ID NO: 21509 - RNA, 25 nt, Homo Sapiens
ugaaauuaaaguuuuuggcuuuucu

SEQ ID NO: 21510 - RNA, 32 nt, Homo Sapiens
gcuccuauuuuaugagacugguaaauuuucac

SEQ ID NO: 21511 - RNA, 31 nt, Homo Sapiens
cuguggcggcacugcgcccggcgcucgcguc

SEQ ID NO: 21512 - RNA, 32 nt, Homo Sapiens
auuguugggaaugauuuaaucuuguuguuguu

SEQ ID NO: 21513 - RNA, 32 nt, Homo Sapiens
uuaguuugaaaugcuuuuuuuuuuuuuuuuua

SEQ ID NO: 21514 - RNA, 32 nt, Homo Sapiens
aaagaugugcuaagaaaaugcagcuaguuaau

SEQ ID NO: 21515 - RNA, 32 nt, Homo Sapiens
auuauucuuggcagaugcugcagacaacgugg

SEQ ID NO: 21516 - RNA, 32 nt, Homo Sapiens
ggggaacgcccgagacccccaccucucacuuu

SEQ ID NO: 21517 - RNA, 32 nt, Homo Sapiens
ugauccucgcuaagcuccgacucugggcggca

SEQ ID NO: 21518 - RNA, 32 nt, Homo Sapiens
ccagcgcaggugugggacgggcggcggacuag

SEQ ID NO: 21519 - RNA, 32 nt, Homo Sapiens
guuaaaauauaaaguaugaucuuuaugauuuu

SEQ ID NO: 21520 - RNA, 32 nt, Homo Sapiens
guacagcuuuugauuauaacugcuuuagcauu

SEQ ID NO: 21521 - RNA, 32 nt, Homo Sapiens
gcgcggggaccgagccgcucggccagacccgc

SEQ ID NO: 21522 - RNA, 32 nt, Homo Sapiens
ccucaccucuggcuucagguccaugcaacaca

SEQ ID NO: 21523 - RNA, 32 nt, Homo Sapiens
gaagcggcugggccagcuccagccucugcccc

SEQ ID NO: 21524 - RNA, 32 nt, Homo Sapiens
uuacuaucacugccauccaucuccagaaagcu

SEQ ID NO: 21525 - RNA, 32 nt, Homo Sapiens
uuuuggcuuucuuuuuucccacagcaacugcc

SEQ ID NO: 21526 - RNA, 32 nt, Homo Sapiens
cuggaccccgcagcugcgugggcagccgacac

SEQ ID NO: 21527 - RNA, 32 nt, Homo Sapiens
agauucuauugguccuucucucauucuccgaa

SEQ ID NO: 21528 - RNA, 29 nt, Homo Sapiens
caggaucugguccgggaggucugggaucu

SEQ ID NO: 21529 - RNA, 32 nt, Homo Sapiens
ucucuuacuuuuuguaaaugcuguaaauauuu

SEQ ID NO: 21530 - RNA, 32 nt, Homo Sapiens
cuguucaguuuagcauuaaaauaauaaaauaa

SEQ ID NO: 21531 - RNA, 32 nt, Homo Sapiens
uaauuucuacaugcuuugaauuuugaauuuug

SEQ ID NO: 21532 - RNA, 32 nt, Homo Sapiens
cucuggagaaaagagagaaagggauaaucacc

SEQ ID NO: 21533 - RNA, 32 nt, Homo Sapiens
acuuuauuacacaagcaggagauaggcaaggg

SEQ ID NO: 21534 - RNA, 32 nt, Homo Sapiens
gccuagccccagacagccccagcccagucagc

SEQ ID NO: 21535 - RNA, 32 nt, Homo Sapiens
agcugcuggcagagggaggaaacaaguguuuu

SEQ ID NO: 21536 - RNA, 32 nt, Homo Sapiens
accauccuggcuaacacagugaaacccugucu

SEQ ID NO: 21537 - RNA, 32 nt, Homo Sapiens
uguaagggagguucuagaggcuagauguuuaa

SEQ ID NO: 21538 - RNA, 32 nt, Homo Sapiens
caguggcugaccgccuugcuggagcggagaug

SEQ ID NO: 21539 - RNA, 32 nt, Homo Sapiens
uuuuuuuaaauauauuugaugacauaauuuuu

SEQ ID NO: 21540 - RNA, 32 nt, Homo Sapiens
ggacggagucucccguugagccugcagaagga

SEQ ID NO: 21541 - RNA, 32 nt, Homo Sapiens
ugagaacacaagcagcagcaacaucaacaaug

SEQ ID NO: 21542 - RNA, 32 nt, Homo Sapiens
cuucgacgagccgagaacggucgugguacugu

SEQ ID NO: 21543 - RNA, 32 nt, Homo Sapiens
accauagcacggcagguguugccucgcagggc

SEQ ID NO: 21544 - RNA, 32 nt, Homo Sapiens
ugcggcagggaagaggggugcagaggcugugg

SEQ ID NO: 21545 - RNA, 32 nt, Homo Sapiens
gcgcgcacgaggaggacgcgggcgugcgcugc

SEQ ID NO: 21546 - RNA, 32 nt, Homo Sapiens
aucuugcugaccuuguccccagccccaccugg

SEQ ID NO: 21547 - RNA, 32 nt, Homo Sapiens
acggcucccuuccucaccccagcccuccccac

SEQ ID NO: 21548 - RNA, 32 nt, Homo Sapiens
cuuuucaguugagacucugcuuaagagaagau

SEQ ID NO: 21549 - RNA, 32 nt, Homo Sapiens
uuugcagaggcgcuugggagccaggcauccag

SEQ ID NO: 21550 - RNA, 32 nt, Homo Sapiens
cauucuuccucuuuuuuuuuuaauuggguagg

SEQ ID NO: 21551 - RNA, 32 nt, Homo Sapiens
cggauggcacaagcugccagccagaccucugu

SEQ ID NO: 21552 - RNA, 32 nt, Homo Sapiens
ucucccacagagcugcuuuucugcccgccuca

SEQ ID NO: 21553 - RNA, 32 nt, Homo Sapiens
caacaucugcagcaggaugcgggguuccaaga

SEQ ID NO: 21554 - RNA, 32 nt, Homo Sapiens
cggacuucucugccugguuuuguguguucugu

SEQ ID NO: 21555 - RNA, 32 nt, Homo Sapiens
ccccaaccaaacaaaacucuugacagaagcug

SEQ ID NO: 21556 - RNA, 32 nt, Homo Sapiens
auguuuuucugcaacagccaaaauagaaugga

SEQ ID NO: 21557 - RNA, 32 nt, Homo Sapiens
auucaagauuuuuugcugugucucucuuuguc

SEQ ID NO: 21558 - RNA, 32 nt, Homo Sapiens
auccugcagggccuuguuuuuguauuuggaga

SEQ ID NO: 21559 - RNA, 32 nt, Homo Sapiens
acuaacuaugucuuuugugaucuuacagguau

SEQ ID NO: 21560 - RNA, 32 nt, Homo Sapiens
uuauccccgcccuucuuucucacuuccacauc

SEQ ID NO: 21561 - RNA, 32 nt, Homo Sapiens
uaaauuugaaagacuauuugaucuuaaaacca

SEQ ID NO: 21562 - RNA, 32 nt, Homo Sapiens
uucccugcuaacaucgaggugugugcaguuac

SEQ ID NO: 21563 - RNA, 32 nt, Homo Sapiens
gagccaccacgaucagccucuaguguuuaaaa

SEQ ID NO: 21564 - RNA, 32 nt, Homo Sapiens
ggguugagggaggcaguaauaugaagugacug

SEQ ID NO: 21565 - RNA, 32 nt, Homo Sapiens
uggucgccaaaugguuuuucuaucuuuucuuc

SEQ ID NO: 21566 - RNA, 32 nt, Homo Sapiens
uccuggcauaaauuauuccuggugagacaugu

SEQ ID NO: 21567 - RNA, 32 nt, Homo Sapiens
ggaucacccgcacccaagugcgcgcuggaccc

SEQ ID NO: 21568 - RNA, 32 nt, Homo Sapiens
cauucagccagccccaggcauggucuacgauu

SEQ ID NO: 21569 - RNA, 32 nt, Homo Sapiens
cuuuauuccauccugcuucuugauuauaauag

SEQ ID NO: 21570 - RNA, 32 nt, Homo Sapiens
cugauauccaacaguuuuuucucuuuguuguu

SEQ ID NO: 21571 - RNA, 32 nt, Homo Sapiens
ggggaauuuuuauccuccucccuuccguaaag

SEQ ID NO: 21572 - RNA, 32 nt, Homo Sapiens
gugauacuguuaauuucauacuauguugaaac

SEQ ID NO: 21573 - RNA, 32 nt, Homo Sapiens
cacugcagaagccccauccuucccgccuccgg

SEQ ID NO: 21574 - RNA, 32 nt, Homo Sapiens
uccgcgcagguggucgcgccggucuccgcgga

SEQ ID NO: 21575 - RNA, 32 nt, Homo Sapiens
agugcugauggacuugcaguaaacuuuuuaag

SEQ ID NO: 21576 - RNA, 32 nt, Homo Sapiens
cagguuuguauauuuuaguaucaauaaagaau

SEQ ID NO: 21577 - RNA, 32 nt, Homo Sapiens
cuccagccuccgccggcggagcccacuaugcc

SEQ ID NO: 21578 - RNA, 32 nt, Homo Sapiens
uucaauagaggauacaacaucacagaaucuuu

SEQ ID NO: 21579 - RNA, 32 nt, Homo Sapiens
ugccugggaauaacuuuuuuaaccuuuaaaaa

SEQ ID NO: 21580 - RNA, 30 nt, Homo Sapiens
cagguggcgcccgcguugcccgcgccugcg

SEQ ID NO: 21581 - RNA, 32 nt, Homo Sapiens
uagauagauagauagauagauacauagauaga

SEQ ID NO: 21582 - RNA, 32 nt, Homo Sapiens
cacacacacacacagacacacacacacacaca

SEQ ID NO: 21583 - RNA, 32 nt, Homo Sapiens
cagacagacagacacacacacacacacacaca

SEQ ID NO: 21584 - RNA, 32 nt, Homo Sapiens
uccgcgccccgaggucuccgcggcccgagguc

SEQ ID NO: 21585 - RNA, 32 nt, Homo Sapiens
cacacacacacacacacacacacacacacaga

SEQ ID NO: 21586 - RNA, 32 nt, Homo Sapiens
uguuaaucaaauuuauuguacuaugacuaaau

SEQ ID NO: 21587 - RNA, 32 nt, Homo Sapiens
gauuccuucuaaacacagcuaucuagagagcc

SEQ ID NO: 21588 - RNA, 32 nt, Homo Sapiens
gaaauuuccuuccauagacagcugccucaaag

SEQ ID NO: 21589 - RNA, 32 nt, Homo Sapiens
acggcggccccggccccggguggcugcaggga

SEQ ID NO: 21590 - RNA, 32 nt, Homo Sapiens
gacugggacaccuuuaacacagaccccuaggg

SEQ ID NO: 21591 - RNA, 32 nt, Homo Sapiens
gggcuccuuagcacccgggcgccggggcccuc

SEQ ID NO: 21592 - RNA, 32 nt, Homo Sapiens
agcgaaguaaggagaccccaccugagcagaua

SEQ ID NO: 21593 - RNA, 32 nt, Homo Sapiens
ggacggcggugcugguggcggcggcggcggag

SEQ ID NO: 21594 - RNA, 32 nt, Homo Sapiens
ccagcacacacacguggcaucuuaggccaugg

SEQ ID NO: 21595 - RNA, 32 nt, Homo Sapiens
gaaaggauaaaaccuuuucuccaaugacagga

SEQ ID NO: 21596 - RNA, 32 nt, Homo Sapiens
uugcugcagguaacugaaacaaaccuagcauu

SEQ ID NO: 21597 - RNA, 32 nt, Homo Sapiens
gcuguuuugacaaggcgagaaaagcacacccc

SEQ ID NO: 21598 - RNA, 32 nt, Homo Sapiens
ucuuuguuucuuuuuaauuaaaauacaagaag

SEQ ID NO: 21599 - RNA, 32 nt, Homo Sapiens
uuuugaacaaaguauaacugagacuauuuuug

SEQ ID NO: 21600 - RNA, 32 nt, Homo Sapiens
gcccuggaagccggcggcccaagcccgacuug

SEQ ID NO: 21601 - RNA, 32 nt, Homo Sapiens
cuuaaaaucugaauggauggaacuuaaaacua

SEQ ID NO: 21602 - RNA, 32 nt, Homo Sapiens
ucucuuuuccuccgccuccgccggcgcgaugg

SEQ ID NO: 21603 - RNA, 32 nt, Homo Sapiens
uuguaaggauauaaaaaguacaguguuagaug

SEQ ID NO: 21604 - RNA, 31 nt, Homo Sapiens
gcgccgcugccggcuaacgcggaggggcgcc

SEQ ID NO: 21605 - RNA, 32 nt, Homo Sapiens
aaaaacuuuuuuuuuuuuuuuagcaaauauga

SEQ ID NO: 21606 - RNA, 32 nt, Homo Sapiens
uuccacagguagucagauccuuucugccuuag

SEQ ID NO: 21607 - RNA, 32 nt, Homo Sapiens
ccagcugcugcaggcaggacuccagcgucagg

SEQ ID NO: 21608 - RNA, 32 nt, Homo Sapiens
uaggggaaauaggucauuugcuauauuacaag

SEQ ID NO: 21609 - RNA, 32 nt, Homo Sapiens
cugguaccuuuaccuccuccucugggaguugg

SEQ ID NO: 21610 - RNA, 32 nt, Homo Sapiens
cagaacuguuuuuuuuuuuuuaucuuaaacac

SEQ ID NO: 21611 - RNA, 32 nt, Homo Sapiens
gguagaguaggcucgcuuugcuuuccugagaa

SEQ ID NO: 21612 - RNA, 32 nt, Homo Sapiens
cagagaaauaacaauuucuacugcuuacacug

SEQ ID NO: 21613 - RNA, 32 nt, Homo Sapiens
gccuguggaaaagaagagagacagagagacag

SEQ ID NO: 21614 - RNA, 32 nt, Homo Sapiens
gagagagccgcauuccguccacagcaccacgg

SEQ ID NO: 21615 - RNA, 32 nt, Homo Sapiens
ccgccagguagcuucuuaguugcugccccuag

SEQ ID NO: 21616 - RNA, 32 nt, Homo Sapiens
ugcacucccucaugcaugucacuuucucaggg

SEQ ID NO: 21617 - RNA, 32 nt, Homo Sapiens
acaccagacucugggggugcugguacaaguug

SEQ ID NO: 21618 - RNA, 32 nt, Homo Sapiens
uuuuguuuuuccucuucugucaauggucuacu

SEQ ID NO: 21619 - RNA, 32 nt, Homo Sapiens
aaugaagagguaauucacuugaacaacuuuca

SEQ ID NO: 21620 - RNA, 32 nt, Homo Sapiens
uacccgugcugcggcccguggcccuccauagg

SEQ ID NO: 21621 - RNA, 32 nt, Homo Sapiens
gggcaguggggcugcagaggcuggggugagcc

SEQ ID NO: 21622 - RNA, 32 nt, Homo Sapiens
cuguaacauaucucuuauauauuaaaaacguu

SEQ ID NO: 21623 - RNA, 32 nt, Homo Sapiens
uggacuaugcguauacacucucccagauaguu

SEQ ID NO: 21624 - RNA, 32 nt, Homo Sapiens
gcaucaaaacaucacuacuucuuauguaacuu

SEQ ID NO: 21625 - RNA, 32 nt, Homo Sapiens
ugcccgucuccaucggaccccagccccuaucu

SEQ ID NO: 21626 - RNA, 32 nt, Homo Sapiens
accauucaacugaauauauuuccauggccauc

SEQ ID NO: 21627 - RNA, 32 nt, Homo Sapiens
ggucgcucuccaaucuuaaccagguuugcucc

SEQ ID NO: 21628 - RNA, 32 nt, Homo Sapiens
aaccuguaauuuccuucuuaacauguguuuga

SEQ ID NO: 21629 - RNA, 32 nt, Homo Sapiens
gucgcucggugggccgggcgcugugcgaagcu

SEQ ID NO: 21630 - RNA, 32 nt, Homo Sapiens
uuuguauuuugugaaaaccuuaaugaaaugaa

SEQ ID NO: 21631 - RNA, 32 nt, Homo Sapiens
gguuuguugucuccucacccccagcugccaag

SEQ ID NO: 21632 - RNA, 30 nt, Homo Sapiens
ccucacugcuggagcggggaaaccgcagcu

SEQ ID NO: 21633 - RNA, 32 nt, Homo Sapiens
uauaauaauaauaaugcagaugauguuacaua

SEQ ID NO: 21634 - RNA, 32 nt, Homo Sapiens
uuagcgucacaugaagaaaaacaaaauuuaag

SEQ ID NO: 21635 - RNA, 32 nt, Homo Sapiens
uaccauaauguuucauuaaauuauaccccaga

SEQ ID NO: 21636 - RNA, 31 nt, Homo Sapiens
aaacaaguccagguuuuucauuccugaguua

SEQ ID NO: 21637 - RNA, 32 nt, Homo Sapiens
uuucucuucuugcugcaaaacugguuggcuug

SEQ ID NO: 21638 - RNA, 32 nt, Homo Sapiens
ugaugcuuacagcacuuggcucgugcauuugu

SEQ ID NO: 21639 - RNA, 32 nt, Homo Sapiens
aauauuguaaauguucaaguauuguuaaugaa

SEQ ID NO: 21640 - RNA, 32 nt, Homo Sapiens
ugaaagagaugauguagauuuuucggaugggu

SEQ ID NO: 21641 - RNA, 32 nt, Homo Sapiens
ugcugcucaggucaggaauucuuccaagaaga

SEQ ID NO: 21642 - RNA, 32 nt, Homo Sapiens
gcgauccuuucuguagcagugauucuaaagug

SEQ ID NO: 21643 - RNA, 32 nt, Homo Sapiens
guuuccauuaugacacagcagcuccuuuguaa

SEQ ID NO: 21644 - RNA, 32 nt, Homo Sapiens
gggagcaggaggaggcaggauucugguugcca

SEQ ID NO: 21645 - RNA, 32 nt, Homo Sapiens
acuuuucuuuuuucuuuuuuuuuuuugagaca

SEQ ID NO: 21646 - RNA, 32 nt, Homo Sapiens
cacuuccucucugcaccuccuggcaaguuucu

SEQ ID NO: 21647 - RNA, 32 nt, Homo Sapiens
cucuguggucccugcugccaccauggccacuc

SEQ ID NO: 21648 - RNA, 32 nt, Homo Sapiens
ggcugccccuucccugccucccagcuguuacc

SEQ ID NO: 21649 - RNA, 29 nt, Homo Sapiens
cuuagcauaaguuuauuuuucuaaauaag

SEQ ID NO: 21650 - RNA, 32 nt, Homo Sapiens
cgcaggugucaucauguuuaagccuaaaacuu

SEQ ID NO: 21651 - RNA, 28 nt, Homo Sapiens
aauuggaaagauuaaacauauugauuuu

SEQ ID NO: 21652 - RNA, 32 nt, Homo Sapiens
guauaauguucuguuuaaaauaauuucuagga

SEQ ID NO: 21653 - RNA, 32 nt, Homo Sapiens
guaccugaugcuaugucaggcuucauacucca

SEQ ID NO: 21654 - RNA, 32 nt, Homo Sapiens
ucccagcuacucuggaggcugaggcaggagaa

SEQ ID NO: 21655 - RNA, 32 nt, Homo Sapiens
ccaagcauauaaaauuuucccccuuagugaau

SEQ ID NO: 21656 - RNA, 32 nt, Homo Sapiens
gcaagcugacagcagagcucaguccccacuuc

SEQ ID NO: 21657 - RNA, 32 nt, Homo Sapiens
uuuguuuugguauauuuuuaaacuacaaauga

SEQ ID NO: 21658 - RNA, 28 nt, Homo Sapiens
ugcuggaggggauacaggaugauuuuga

SEQ ID NO: 21659 - RNA, 32 nt, Homo Sapiens
uucgacuccaguucuggcugcccgcgggccuc

SEQ ID NO: 21660 - RNA, 32 nt, Homo Sapiens
auguauaaaaauaccaauuauuuuccuacagc

SEQ ID NO: 21661 - RNA, 32 nt, Homo Sapiens
uugauuuuuggauuuucuuaauucaacauuug

SEQ ID NO: 21662 - RNA, 32 nt, Homo Sapiens
augcuguaugcuuuuuugccaccgugcaacuu

SEQ ID NO: 21663 - RNA, 32 nt, Homo Sapiens
ccgaagcuuuucccuguaaaucuuacaucuuu

SEQ ID NO: 21664 - RNA, 32 nt, Homo Sapiens
uuuaacuuccagaauagugauuuuaaaaguaa

SEQ ID NO: 21665 - RNA, 32 nt, Homo Sapiens
caaacggcguggccgccaucuugcuugugccc

SEQ ID NO: 21666 - RNA, 32 nt, Homo Sapiens
gauuuggggggccacuuuucuacgugggagga

SEQ ID NO: 21667 - RNA, 32 nt, Homo Sapiens
cuuuucuucuugauuauuuucuuauauuucua

SEQ ID NO: 21668 - RNA, 32 nt, Homo Sapiens
uacugugggauuuuugugaacagccugauguu

SEQ ID NO: 21669 - RNA, 32 nt, Homo Sapiens
accgcugcccgagagguuaagguggcuucugu

SEQ ID NO: 21670 - RNA, 30 nt, Homo Sapiens
gccuuagacuuuaccacccaucuccacccu

SEQ ID NO: 21671 - RNA, 32 nt, Homo Sapiens
cgcacaggcuucugcccuucucgguguccagg

SEQ ID NO: 21672 - RNA, 32 nt, Homo Sapiens
cagccggggccugacggucgccggcgguggug

SEQ ID NO: 21673 - RNA, 32 nt, Homo Sapiens
accgagccgggcgggcggaggggcgguuggga

SEQ ID NO: 21674 - RNA, 32 nt, Homo Sapiens
gcugagcgaccugaagcgggaccuagagggcc

SEQ ID NO: 21675 - RNA, 32 nt, Homo Sapiens
accucauauuccaugggagggcuguacagggc

SEQ ID NO: 21676 - RNA, 32 nt, Homo Sapiens
uuuccuagugauccugacauuuagacagcaca

SEQ ID NO: 21677 - RNA, 32 nt, Homo Sapiens
auacuauucuaaaauauuuuacucugccugau

SEQ ID NO: 21678 - RNA, 32 nt, Homo Sapiens
ugucuguaucccuuggaguaagaagguagugg

SEQ ID NO: 21679 - RNA, 32 nt, Homo Sapiens
gacagagauaucuauagauagcuaugguaaau

SEQ ID NO: 21680 - RNA, 32 nt, Homo Sapiens
uuuauuuuucuucccggcacuuucccuaccug

SEQ ID NO: 21681 - RNA, 32 nt, Homo Sapiens
uguuacccuaaaagugcugucucuucaaguca

SEQ ID NO: 21682 - RNA, 31 nt, Homo Sapiens
aaaauguugcaauaaaagaauauguuguaag

SEQ ID NO: 21683 - RNA, 32 nt, Homo Sapiens
gaccccucugggucuguauagacccacgcucc

SEQ ID NO: 21684 - RNA, 32 nt, Homo Sapiens
ggcccgcccacccacgccgaguccccucugcc

SEQ ID NO: 21685 - RNA, 32 nt, Homo Sapiens
ccugcugugcagcagccagcucucaacugcaa

SEQ ID NO: 21686 - RNA, 32 nt, Homo Sapiens
gucccagggugguggggguggcaggugguacc

SEQ ID NO: 21687 - RNA, 32 nt, Homo Sapiens
gaggggagggauuuuuuauguucuucuguguu

SEQ ID NO: 21688 - RNA, 32 nt, Homo Sapiens
ccccgucucuagcucagaggccccacuggacc

SEQ ID NO: 21689 - RNA, 32 nt, Homo Sapiens
cccaaguuuauuggcagacucccuuuugaccu

SEQ ID NO: 21690 - RNA, 32 nt, Homo Sapiens
uaaacccucaagauuaugucaauugguuagag

SEQ ID NO: 21691 - RNA, 32 nt, Homo Sapiens
gggugggugugguggcucacgccuguaacccc

SEQ ID NO: 21692 - RNA, 32 nt, Homo Sapiens
aaaaauaagcccauuccagccuuaagaguugu

SEQ ID NO: 21693 - RNA, 32 nt, Homo Sapiens
cggaagcaagugccgcauucuucaggaaggaa

SEQ ID NO: 21694 - RNA, 32 nt, Homo Sapiens
aagaaauaccgagugaaaaaacaggaagugua

SEQ ID NO: 21695 - RNA, 32 nt, Homo Sapiens
gggggccggcccgggcugcuguggcccagacg

SEQ ID NO: 21696 - RNA, 32 nt, Homo Sapiens
gucgcgcugccuguguucuccgagggccuuca

SEQ ID NO: 21697 - RNA, 32 nt, Homo Sapiens
aaugcagguggcuucuaggagcaaauaccagu

SEQ ID NO: 21698 - RNA, 32 nt, Homo Sapiens
gguccauauuucugcccugccucagucccuaa

SEQ ID NO: 21699 - RNA, 32 nt, Homo Sapiens
agacucuguugccuugaauauaacaguacaau

SEQ ID NO: 21700 - RNA, 32 nt, Homo Sapiens
gacgcggaggucgugugccgccagcugggcug

SEQ ID NO: 21701 - RNA, 32 nt, Homo Sapiens
ucagagugguggcucggaaugaaaucggugac

SEQ ID NO: 21702 - RNA, 32 nt, Homo Sapiens
uuucaaguacucaagacugacuuacagaccaa

SEQ ID NO: 21703 - RNA, 32 nt, Homo Sapiens
uuaacugucuugaauuauaucuguaaaauauu

SEQ ID NO: 21704 - RNA, 32 nt, Homo Sapiens
ggaugaaagcuacuauaucaguuugcacauuc

SEQ ID NO: 21705 - RNA, 32 nt, Homo Sapiens
uccgugcuuccucuccuccccuguacgugccc

SEQ ID NO: 21706 - RNA, 32 nt, Homo Sapiens
ucucccccacaggaacaaaacacugccuccag

SEQ ID NO: 21707 - RNA, 32 nt, Homo Sapiens
ccuuaauacuuugcugaauauuguagauugua

SEQ ID NO: 21708 - RNA, 32 nt, Homo Sapiens
uuuuuccuaaaacacgguugugagguacugau

SEQ ID NO: 21709 - RNA, 32 nt, Homo Sapiens
cucucugccagucagccacagagacccuccuc

SEQ ID NO: 21710 - RNA, 32 nt, Homo Sapiens
ccgggaaaauggaggcugugauugagaaggaa

SEQ ID NO: 21711 - RNA, 32 nt, Homo Sapiens
agccaggugugguggcucaugccuguaauagc

SEQ ID NO: 21712 - RNA, 32 nt, Homo Sapiens
agcuggggcgcggccgccugucugcacagaca

SEQ ID NO: 21713 - RNA, 32 nt, Homo Sapiens
ggcagcaagcgcguccuccagccccgggcggc

SEQ ID NO: 21714 - RNA, 32 nt, Homo Sapiens
auaccugcugcuaggggucuaguuauuguagu

SEQ ID NO: 21715 - RNA, 32 nt, Homo Sapiens
ugagaggcucugcgugugcgugugcgcgggug

SEQ ID NO: 21716 - RNA, 32 nt, Homo Sapiens
uuuauguaagcauucuauuuaacaugaauaua

SEQ ID NO: 21717 - RNA, 32 nt, Homo Sapiens
guucagaagagaauaaaccaguguuuuuaccu

SEQ ID NO: 21718 - RNA, 32 nt, Homo Sapiens
agcugagaugcaucccaggaggcaaauaucac

SEQ ID NO: 21719 - RNA, 32 nt, Homo Sapiens
ugcaaaauguauauuacuaacauaguuuggaa

SEQ ID NO: 21720 - RNA, 32 nt, Homo Sapiens
agcuggaagauaauuugaauugacccaacccc

SEQ ID NO: 21721 - RNA, 32 nt, Homo Sapiens
aguaaguucuucugaagugcugcuccauguuu

SEQ ID NO: 21722 - RNA, 32 nt, Homo Sapiens
ccaagaaugccaucugauaaaaaagaauagaa

SEQ ID NO: 21723 - RNA, 32 nt, Homo Sapiens
gccgauuuuuucugagcagucugggagccugg

SEQ ID NO: 21724 - RNA, 32 nt, Homo Sapiens
ggagacgcgcgcauccaccagccccggcugcu

SEQ ID NO: 21725 - RNA, 32 nt, Homo Sapiens
gguugucugagcaccaugggggcccccucacc

SEQ ID NO: 21726 - RNA, 31 nt, Homo Sapiens
augcccccacccuuccccuaagcacacaggg

SEQ ID NO: 21727 - RNA, 32 nt, Homo Sapiens
auuauauuauauauuuuuugcuuucuuauaac

SEQ ID NO: 21728 - RNA, 32 nt, Homo Sapiens
cacagacaaguuuauugggguccugaaggaac

SEQ ID NO: 21729 - RNA, 32 nt, Homo Sapiens
aagaaagugcuugauuuaaaggggaguuuguu

SEQ ID NO: 21730 - RNA, 32 nt, Homo Sapiens
cugcaagugccuuccuuggagcagagaggcag

SEQ ID NO: 21731 - RNA, 32 nt, Homo Sapiens
ucacauuucaacuagauucuuaggaaguaugg

SEQ ID NO: 21732 - RNA, 32 nt, Homo Sapiens
aguagcaauguguucuuaauuccuagcaucug

SEQ ID NO: 21733 - RNA, 32 nt, Homo Sapiens
ucuggugcauaaagucaggcuugguuguaggc

SEQ ID NO: 21734 - RNA, 32 nt, Homo Sapiens
ggagcaggcagagcugcagucagagacauuag

SEQ ID NO: 21735 - RNA, 32 nt, Homo Sapiens
aaucuauuuuaaaauuguuuucuuucuucaau

SEQ ID NO: 21736 - RNA, 32 nt, Homo Sapiens
gcuaaacaguacuuaaauagcgguuggaacua

SEQ ID NO: 21737 - RNA, 32 nt, Homo Sapiens
cuggucaauggagaacacuuugaacgagccau

SEQ ID NO: 21738 - RNA, 31 nt, Homo Sapiens
aggaccauggcguccccggcgcuggcggcgg

SEQ ID NO: 21739 - RNA, 32 nt, Homo Sapiens
aaaaugcugagguaauaauuauaguaugauuu

SEQ ID NO: 21740 - RNA, 32 nt, Homo Sapiens
uuuuuacuaaaauaaaacauaugugucuaugg

SEQ ID NO: 21741 - RNA, 32 nt, Homo Sapiens
guuuuaguuuuuuaagaaguacucaugcagau

SEQ ID NO: 21742 - RNA, 32 nt, Homo Sapiens
ucaaggccugaaggagcccaugugguuggaua

SEQ ID NO: 21743 - RNA, 32 nt, Homo Sapiens
ugcgcgguaggagcugggcgcgcacggcuacc

SEQ ID NO: 21744 - RNA, 32 nt, Homo Sapiens
auuuaaagucaggauguggccuuuuuauuuua

SEQ ID NO: 21745 - RNA, 32 nt, Homo Sapiens
gucauugaaccauaacuaggacuuuaucagaa

SEQ ID NO: 21746 - RNA, 32 nt, Homo Sapiens
uuccauggggacgcgccccgggacugaaucag

SEQ ID NO: 21747 - RNA, 32 nt, Homo Sapiens
agucccuuagugccucuuucuguuuguggcau

SEQ ID NO: 21748 - RNA, 32 nt, Homo Sapiens
aaaaauauuuaaauaugacagucuuuuugaua

SEQ ID NO: 21749 - RNA, 32 nt, Homo Sapiens
cccaaauguucccucccccgacauauaucaug

SEQ ID NO: 21750 - RNA, 32 nt, Homo Sapiens
uacucugaaggugagaauauuuugugggcagg

SEQ ID NO: 21751 - RNA, 30 nt, Homo Sapiens
cugugaugauuagcaagcucuugcuugcau

SEQ ID NO: 21752 - RNA, 32 nt, Homo Sapiens
cggauguaaauauuucuaaauuuuaaaugcua

SEQ ID NO: 21753 - RNA, 32 nt, Homo Sapiens
uuuuaugucauucucuuucucacgcuuuuaug

SEQ ID NO: 21754 - RNA, 32 nt, Homo Sapiens
ugagcgcgcuccagcugccgggacggaggggg

SEQ ID NO: 21755 - RNA, 32 nt, Homo Sapiens
ugaucccuaggggcaugagaaaagcacauaau

SEQ ID NO: 21756 - RNA, 32 nt, Homo Sapiens
cccggcgcgggcccauggagccauggccuaua

SEQ ID NO: 21757 - RNA, 32 nt, Homo Sapiens
gccacuuagugagaguggcaaguccugucuca

SEQ ID NO: 21758 - RNA, 32 nt, Homo Sapiens
cgcagcuagcgcagccagcccgagggccgccg

SEQ ID NO: 21759 - RNA, 32 nt, Homo Sapiens
gcgcucaauaggaccaggauccagccucacuu

SEQ ID NO: 21760 - RNA, 32 nt, Homo Sapiens
auagcaaaccaucaagcacaauugauguuaga

SEQ ID NO: 21761 - RNA, 32 nt, Homo Sapiens
ugcagaaauuugcaugaguaacaggagccaaa

SEQ ID NO: 21762 - RNA, 32 nt, Homo Sapiens
acucagcagaucugggaacugugagagcggca

SEQ ID NO: 21763 - RNA, 32 nt, Homo Sapiens
aaacaaaguccauuuuaucuguuuuauuaaag

SEQ ID NO: 21764 - RNA, 32 nt, Homo Sapiens
gcucucuucuggcccuccauggagucaugggc

SEQ ID NO: 21765 - RNA, 32 nt, Homo Sapiens
cucccugccccgcuccuggccucagugcgucu

SEQ ID NO: 21766 - RNA, 32 nt, Homo Sapiens
aaggacugggcaaagaugcugcucuuaguauu

SEQ ID NO: 21767 - RNA, 32 nt, Homo Sapiens
gcugccuugccaccagcuccaggugcucaaga

SEQ ID NO: 21768 - RNA, 32 nt, Homo Sapiens
aguuguaguguacuuuguuugcccuuguuggu

SEQ ID NO: 21769 - RNA, 32 nt, Homo Sapiens
ucagccucaugcaugggaccugcccggagacc

SEQ ID NO: 21770 - RNA, 32 nt, Homo Sapiens
agccaagccaaggaugucauucugucuguccg

SEQ ID NO: 21771 - RNA, 32 nt, Homo Sapiens
auguaaauacaaccucuuuuggagugcagaaa

SEQ ID NO: 21772 - RNA, 32 nt, Homo Sapiens
aguguucuauuugauggauuaaguauauuuag

SEQ ID NO: 21773 - RNA, 32 nt, Homo Sapiens
cagauaagauucugccugugcuuuuguuugac

SEQ ID NO: 21774 - RNA, 32 nt, Homo Sapiens
gugcccugaggccccaggcagcugcugccucc

SEQ ID NO: 21775 - RNA, 32 nt, Homo Sapiens
gguacgcgugucccuuguuuggguuucccaau

SEQ ID NO: 21776 - RNA, 32 nt, Homo Sapiens
ggccccaccgccauccuugcgccggcucaugu

SEQ ID NO: 21777 - RNA, 32 nt, Homo Sapiens
ucccuagugaauggcauagauguuguucagau

SEQ ID NO: 21778 - RNA, 32 nt, Homo Sapiens
acuguugggcuuugggaagauguuauuuauga

SEQ ID NO: 21779 - RNA, 32 nt, Homo Sapiens
uccagagcaaaguggucuuuccauccuuagca

SEQ ID NO: 21780 - RNA, 32 nt, Homo Sapiens
aaaucuuugcaaggcucaaaaugccacagaac

SEQ ID NO: 21781 - RNA, 32 nt, Homo Sapiens
ucagguauaacaguguuguuuaaaagagaauu

SEQ ID NO: 21782 - RNA, 32 nt, Homo Sapiens
acaacaauacuaguucuuaacguauguuuuac

SEQ ID NO: 21783 - RNA, 32 nt, Homo Sapiens
cuuuuggcuccagaguucccaacacagucaug

SEQ ID NO: 21784 - RNA, 32 nt, Homo Sapiens
gaaguagaucauacauacaccacauagauagu

SEQ ID NO: 21785 - RNA, 32 nt, Homo Sapiens
ccccagcagcagugaggccugggcucaucuga

SEQ ID NO: 21786 - RNA, 32 nt, Homo Sapiens
ccgggacaccaagaagcagggaaauggaccca

SEQ ID NO: 21787 - RNA, 32 nt, Homo Sapiens
uuccuguaaaauccauuuaaucaauauuuaag

SEQ ID NO: 21788 - RNA, 32 nt, Homo Sapiens
auuugucauuuacuuuguucuguuagauuuuu

SEQ ID NO: 21789 - RNA, 32 nt, Homo Sapiens
uuuucuuuauuuuuauuuuuuccuuugacaga

SEQ ID NO: 21790 - RNA, 32 nt, Homo Sapiens
aagaaagccugcaacagaagggagagaagcgg

SEQ ID NO: 21791 - RNA, 32 nt, Homo Sapiens
uuccuugguauuucuggugggguaaggggcag

SEQ ID NO: 21792 - RNA, 32 nt, Homo Sapiens
cagcccuccuuccuaaguacucaucaaauuca

SEQ ID NO: 21793 - RNA, 32 nt, Homo Sapiens
cagauacauuaauauuaucauaguuuguuuaa

SEQ ID NO: 21794 - RNA, 32 nt, Homo Sapiens
accguuuaaggucucuggagcccgcaaguuca

SEQ ID NO: 21795 - RNA, 32 nt, Homo Sapiens
acaaagcaaagugggcacauguagaaguugaa

SEQ ID NO: 21796 - RNA, 32 nt, Homo Sapiens
uauagaauuugacaccaaauuuuggaacuuaa

SEQ ID NO: 21797 - RNA, 32 nt, Homo Sapiens
ugcccgggucccgccucggggucgccaggccc

SEQ ID NO: 21798 - RNA, 32 nt, Homo Sapiens
aucugucaucauucauugcaaacuacaccucc

SEQ ID NO: 21799 - RNA, 32 nt, Homo Sapiens
auuucccaaaucccagaagaucuccuacccga

SEQ ID NO: 21800 - RNA, 32 nt, Homo Sapiens
ugcuagcagcagugacuuugacuucuggucuu

SEQ ID NO: 21801 - RNA, 32 nt, Homo Sapiens
cugggcaacccgcaaccacagcaagaacucca

SEQ ID NO: 21802 - RNA, 32 nt, Homo Sapiens
uaggacucagaauacaguggcaugagugauua

SEQ ID NO: 21803 - RNA, 32 nt, Homo Sapiens
guucuuuggugauuuucuuauguuuccagguu

SEQ ID NO: 21804 - RNA, 32 nt, Homo Sapiens
aaaugggcuggagagaaggagaaggauuagga

SEQ ID NO: 21805 - RNA, 32 nt, Homo Sapiens
aucuccaaccccuucaugccagauggggaaac

SEQ ID NO: 21806 - RNA, 32 nt, Homo Sapiens
gauuugaaauauuuaaaguggauacaaaauua

SEQ ID NO: 21807 - RNA, 32 nt, Homo Sapiens
cuacaugugauauaaauuaauauuuauauuca

SEQ ID NO: 21808 - RNA, 32 nt, Homo Sapiens
auggugucuucagaauuguagcgcauuucuga

SEQ ID NO: 21809 - RNA, 32 nt, Homo Sapiens
cgggaaggcaugccagccugggcgaugcugca

SEQ ID NO: 21810 - RNA, 32 nt, Homo Sapiens
uucuacaaggccagcugcaaagauguucuucc

SEQ ID NO: 21811 - RNA, 32 nt, Homo Sapiens
caccacgcccaacugauuuuuguauuuuuagu

SEQ ID NO: 21812 - RNA, 32 nt, Homo Sapiens
uacauaguguaauguagcguguuuacaugugu

SEQ ID NO: 21813 - RNA, 32 nt, Homo Sapiens
aguaccacauucuccucuaaaccuugccuacg

SEQ ID NO: 21814 - RNA, 32 nt, Homo Sapiens
aaucccucuuggcugcagaagucccuuucacc

SEQ ID NO: 21815 - RNA, 32 nt, Homo Sapiens
aaagagcccucccguggcccaggcaccucgcu

SEQ ID NO: 21816 - RNA, 32 nt, Homo Sapiens
ucuagcaguugugacgccaaaaucacgucucu

SEQ ID NO: 21817 - RNA, 32 nt, Homo Sapiens
uaucuccuaaaaggagcaugggcuuugugccu

SEQ ID NO: 21818 - RNA, 32 nt, Homo Sapiens
uagcgcauauauuugcaguaugaacuauugcc

SEQ ID NO: 21819 - RNA, 32 nt, Homo Sapiens
gacaggucaccaucaccuuucaucgauuacau

SEQ ID NO: 21820 - RNA, 32 nt, Homo Sapiens
uucucaaaaugcccauuauccaaaugcagaac

SEQ ID NO: 21821 - RNA, 32 nt, Homo Sapiens
cuucucauugucugauuucucauugucucuga

SEQ ID NO: 21822 - RNA, 32 nt, Homo Sapiens
ggugcugggcuuccugcccaccagccgugcca

SEQ ID NO: 21823 - RNA, 32 nt, Homo Sapiens
aguuauugcuaguauauagaaaugcauuagac

SEQ ID NO: 21824 - RNA, 32 nt, Homo Sapiens
ccucugucuuuaaauuuuauaugggcuuuguu

SEQ ID NO: 21825 - RNA, 32 nt, Homo Sapiens
ggugccugcgcagcugcgacggcugcugguuu

SEQ ID NO: 21826 - RNA, 32 nt, Homo Sapiens
uuggaaaaucauauugcuauaguguguacuuu

SEQ ID NO: 21827 - RNA, 31 nt, Homo Sapiens
gaccaugugcuguccgcaggccuggaugccc

SEQ ID NO: 21828 - RNA, 32 nt, Homo Sapiens
cuaucucggaagcgggccacaaugacccugca

SEQ ID NO: 21829 - RNA, 32 nt, Homo Sapiens
gacaguuugauccauugcuuuuagacaggacu

SEQ ID NO: 21830 - RNA, 32 nt, Homo Sapiens
ccucuucucugccacgcgggacccucugccac

SEQ ID NO: 21831 - RNA, 32 nt, Homo Sapiens
agucugugcugugaguggggucggccucacag

SEQ ID NO: 21832 - RNA, 32 nt, Homo Sapiens
uaagaauuuugcuuuagagaaugccacuuugg

SEQ ID NO: 21833 - RNA, 31 nt, Homo Sapiens
aaagccaguaccuagaaccagguguccuucc

SEQ ID NO: 21834 - RNA, 32 nt, Homo Sapiens
cuagugagagacaguaaaugugacaaaaguaa

SEQ ID NO: 21835 - RNA, 32 nt, Homo Sapiens
uuuuccuaaagguauuugauuugaucuguuag

SEQ ID NO: 21836 - RNA, 32 nt, Homo Sapiens
gaauuuguauccccuucuacagauggagaagc

SEQ ID NO: 21837 - RNA, 32 nt, Homo Sapiens
uccccuggcucccgcccucccucuccaggucg

SEQ ID NO: 21838 - RNA, 32 nt, Homo Sapiens
cuuucucaccauuuaucacuucccucacugcc

SEQ ID NO: 21839 - RNA, 32 nt, Homo Sapiens
cuucucuauccuguuucauucccucccucaaa

SEQ ID NO: 21840 - RNA, 32 nt, Homo Sapiens
cuugugcuugagauucuacaguuuuaugguaa

SEQ ID NO: 21841 - RNA, 32 nt, Homo Sapiens
ggagcugguggcggcgcuccgcaggggcucgg

SEQ ID NO: 21842 - RNA, 32 nt, Homo Sapiens
ggauauucacugcaacaaugucuuaaauguga

SEQ ID NO: 21843 - RNA, 32 nt, Homo Sapiens
uauuuguuaaaugggguauuuuucuguauuug

SEQ ID NO: 21844 - RNA, 32 nt, Homo Sapiens
acggggcucugcuuccucaucauuccagcuca

SEQ ID NO: 21845 - RNA, 29 nt, Homo Sapiens
acuuugaugaagauugaagggacuuuuuu

SEQ ID NO: 21846 - RNA, 32 nt, Homo Sapiens
ccccgcaccgguccgaguugcggccgcgugga

SEQ ID NO: 21847 - RNA, 32 nt, Homo Sapiens
gaugcucaguauuugcagaauacauucaaggu

SEQ ID NO: 21848 - RNA, 32 nt, Homo Sapiens
cugcagcggggccgugaggagcagccagcggg

SEQ ID NO: 21849 - RNA, 32 nt, Homo Sapiens
agggggagggagaggggaacuguuaucuccca

SEQ ID NO: 21850 - RNA, 32 nt, Homo Sapiens
gaauauuuacauucuucaguauaauuuuuuau

SEQ ID NO: 21851 - RNA, 32 nt, Homo Sapiens
ggcaucaaacuuaccaagaaauaucucuaccc

SEQ ID NO: 21852 - RNA, 32 nt, Homo Sapiens
agaguauuugugugggguuuuguuuguuuaca

SEQ ID NO: 21853 - RNA, 32 nt, Homo Sapiens
cccuaaaaaugaauacauaguaggacuauagc

SEQ ID NO: 21854 - RNA, 32 nt, Homo Sapiens
aggagugaugcauccagaaaagaagucagcuu

SEQ ID NO: 21855 - RNA, 32 nt, Homo Sapiens
cccuaaauuuaaaagacuguuaacaaaacgcc

SEQ ID NO: 21856 - RNA, 32 nt, Homo Sapiens
ugagccugcccgcccccugacucucaggccac

SEQ ID NO: 21857 - RNA, 32 nt, Homo Sapiens
acuauugaaauuuuggagaaaauguauuugug

SEQ ID NO: 21858 - RNA, 32 nt, Homo Sapiens
aaaaguuaaaacaaaacauggaugucuggguc

SEQ ID NO: 21859 - RNA, 31 nt, Homo Sapiens
caaagggagcccccaugcacaggaagccaca

SEQ ID NO: 21860 - RNA, 32 nt, Homo Sapiens
ucugccccugaaugauucugucuagaaaagcu

SEQ ID NO: 21861 - RNA, 32 nt, Homo Sapiens
uuuggaaggccccuugauauuccuuuuguacc

SEQ ID NO: 21862 - RNA, 32 nt, Homo Sapiens
acuguuacagcuuucugugcagagaugacugu

SEQ ID NO: 21863 - RNA, 32 nt, Homo Sapiens
aaauggacacaaauuuucaaguuuacacuuca

SEQ ID NO: 21864 - RNA, 32 nt, Homo Sapiens
ggccauuuuauucaaaugcuugcuauacaauc

SEQ ID NO: 21865 - RNA, 32 nt, Homo Sapiens
ccccuugacuccagcccucauucuucaugccu

SEQ ID NO: 21866 - RNA, 32 nt, Homo Sapiens
cuucauucaguaugcuucauucaccgaacuuu

SEQ ID NO: 21867 - RNA, 32 nt, Homo Sapiens
auauaaggacagacauaauaguauucuguacc

SEQ ID NO: 21868 - RNA, 32 nt, Homo Sapiens
aaaaauccgacagcugaacuagguugcucuuu

SEQ ID NO: 21869 - RNA, 32 nt, Homo Sapiens
cauccccauggugcuuuggccuccucaaagca

SEQ ID NO: 21870 - RNA, 32 nt, Homo Sapiens
cugggcugagccggagggaggcgggaggacgc

SEQ ID NO: 21871 - RNA, 32 nt, Homo Sapiens
accagccugggcaacauagugagacucuguua

SEQ ID NO: 21872 - RNA, 31 nt, Homo Sapiens
gcugaccucaaugcaaggcuggugaacccug

SEQ ID NO: 21873 - RNA, 32 nt, Homo Sapiens
aauuuuuuaacuguaagcuuguccuuuuaaag

SEQ ID NO: 21874 - RNA, 32 nt, Homo Sapiens
uguuacuggguuuagagggcugucuuggagga

SEQ ID NO: 21875 - RNA, 32 nt, Homo Sapiens
gugaaacugcccagcccuucucugccuaauug

SEQ ID NO: 21876 - RNA, 32 nt, Homo Sapiens
uccuuuucacacacaaaaaauucacugauuaa

SEQ ID NO: 21877 - RNA, 32 nt, Homo Sapiens
uuucgagaacugugugcugaagugccaucuuu

SEQ ID NO: 21878 - RNA, 32 nt, Homo Sapiens
accaagauggaaaccuagauccacaacgggaa

SEQ ID NO: 21879 - RNA, 32 nt, Homo Sapiens
ggggagcccucccggccauuucugucccagcu

SEQ ID NO: 21880 - RNA, 32 nt, Homo Sapiens
uuuacgggaaaacaaaucauguggucuucaga

SEQ ID NO: 21881 - RNA, 32 nt, Homo Sapiens
gacgcucuggacacucuagaaaucacuccuca

SEQ ID NO: 21882 - RNA, 32 nt, Homo Sapiens
ugauucuuuccauuuuaaggguuuuauugaua

SEQ ID NO: 21883 - RNA, 32 nt, Homo Sapiens
cuaacaagcccacguggaccagucugaauguc

SEQ ID NO: 21884 - RNA, 32 nt, Homo Sapiens
agcgguucucaaccucugccccgccccgccac

SEQ ID NO: 21885 - RNA, 30 nt, Homo Sapiens
cgcagggcugcgcgcucgccggcgcucucu

SEQ ID NO: 21886 - RNA, 32 nt, Homo Sapiens
gugaaauucucagaguguuuaauuguacucaa

SEQ ID NO: 21887 - RNA, 32 nt, Homo Sapiens
aaauaggcugggugcaguggcucacgccugua

SEQ ID NO: 21888 - RNA, 32 nt, Homo Sapiens
ucuaauucuaaaugccagucagugaugaucgc

SEQ ID NO: 21889 - RNA, 32 nt, Homo Sapiens
cucgugguaaauucagaaaaacaucagggagu

SEQ ID NO: 21890 - RNA, 32 nt, Homo Sapiens
gcuagaggggcguuuccagcaguguguccaag

SEQ ID NO: 21891 - RNA, 32 nt, Homo Sapiens
augauaaguacuacauaccucaucucuugggu

SEQ ID NO: 21892 - RNA, 32 nt, Homo Sapiens
uggggugugacagcugcaauuagaggcaggau

SEQ ID NO: 21893 - RNA, 32 nt, Homo Sapiens
aaugacucaugacuguggauaugaagaacuau

SEQ ID NO: 21894 - RNA, 32 nt, Homo Sapiens
gcagccgccucgcgcccggucccgcggucgca

SEQ ID NO: 21895 - RNA, 32 nt, Homo Sapiens
aguagugauauuaaaucacugauaaaaaaucu

SEQ ID NO: 21896 - RNA, 32 nt, Homo Sapiens
uugacaaagcaaacaaaacauaaaguggggaa

SEQ ID NO: 21897 - RNA, 32 nt, Homo Sapiens
gcagaguggaucuggaggggucaacggaagac

SEQ ID NO: 21898 - RNA, 32 nt, Homo Sapiens
aaucagaucagcccucaaagaauggggucugu

SEQ ID NO: 21899 - RNA, 32 nt, Homo Sapiens
ucuacuaaaaauucaaaagaaaaaaaaaaaaa

SEQ ID NO: 21900 - RNA, 32 nt, Homo Sapiens
guuauacgaacauuuuaacaauguuaauucuu

SEQ ID NO: 21901 - RNA, 32 nt, Homo Sapiens
aauuucugcauucuuaaucuccacuguuauuc

SEQ ID NO: 21902 - RNA, 32 nt, Homo Sapiens
aaguuuggaaaguuuagcaaaaucacaguggu

SEQ ID NO: 21903 - RNA, 28 nt, Homo Sapiens
ugugggugagcucucaggaugaugccca

SEQ ID NO: 21904 - RNA, 32 nt, Homo Sapiens
cugcccuccuuccccuccccaaccccaggccc

SEQ ID NO: 21905 - RNA, 32 nt, Homo Sapiens
gacacccccagaaugccuggcgcucugcagag

SEQ ID NO: 21906 - RNA, 32 nt, Homo Sapiens
aagcaggucacggcuuccugcaggaggcggga

SEQ ID NO: 21907 - RNA, 32 nt, Homo Sapiens
gaacccagggaagacaagaaggaaagauuuug

SEQ ID NO: 21908 - RNA, 31 nt, Homo Sapiens
accgccagccgcagccaggcugggcugagag

SEQ ID NO: 21909 - RNA, 32 nt, Homo Sapiens
gcgaacugucggggcgggaggagccgugagca

SEQ ID NO: 21910 - RNA, 32 nt, Homo Sapiens
ucuagaaacccauuuugaaaguggaaaauuau

SEQ ID NO: 21911 - RNA, 32 nt, Homo Sapiens
ggagauggcacauccuugcugcuggggacuug

SEQ ID NO: 21912 - RNA, 32 nt, Homo Sapiens
acaggccucuccagcccuccucuggccaccca

SEQ ID NO: 21913 - RNA, 32 nt, Homo Sapiens
ggagaacagacauggaggaagcgcaggccggc

SEQ ID NO: 21914 - RNA, 32 nt, Homo Sapiens
gaccccgaggcaaccggcugcagaugggagcc

SEQ ID NO: 21915 - RNA, 32 nt, Homo Sapiens
ggcggccaccgcccgcgccgggcauccucagg

SEQ ID NO: 21916 - RNA, 32 nt, Homo Sapiens
cucauggccagacgcuuccggugcaggaggcc

SEQ ID NO: 21917 - RNA, 31 nt, Homo Sapiens
agugaguggacagcgcugccccgcugcagag

SEQ ID NO: 21918 - RNA, 32 nt, Homo Sapiens
auggcugcggcuauguuccaauaaaaacuuau

SEQ ID NO: 21919 - RNA, 32 nt, Homo Sapiens
aaugauggugaggugggcacuucuuuguggug

SEQ ID NO: 21920 - RNA, 32 nt, Homo Sapiens
acuugggacuccuggcucggccccaacaggga

SEQ ID NO: 21921 - RNA, 32 nt, Homo Sapiens
uugaaaguaguaugucuauaagggcagagcau

SEQ ID NO: 21922 - RNA, 32 nt, Homo Sapiens
ucucuggcacauuuuuaacauuccaaaaagaa

SEQ ID NO: 21923 - RNA, 32 nt, Homo Sapiens
uuacuacauaaaacuugauucuguuucucuac

SEQ ID NO: 21924 - RNA, 32 nt, Homo Sapiens
uccucgaaaaagaaaaaggggcugcuuuccaa

SEQ ID NO: 21925 - RNA, 32 nt, Homo Sapiens
guccugcucccucuccauagccagcuccucag

SEQ ID NO: 21926 - RNA, 32 nt, Homo Sapiens
uccucccaggagccagaugcgauccucaggcu

SEQ ID NO: 21927 - RNA, 32 nt, Homo Sapiens
gcauagagcauaucuugugaaaacagaaauau

SEQ ID NO: 21928 - RNA, 32 nt, Homo Sapiens
ccuucucguaagaugguuuuagaguguuugcc

SEQ ID NO: 21929 - RNA, 32 nt, Homo Sapiens
gggcgauuugggggcucggggaggcagagaau

SEQ ID NO: 21930 - RNA, 32 nt, Homo Sapiens
gaaugacaaaaauaaacaguucaagugaagca

SEQ ID NO: 21931 - RNA, 32 nt, Homo Sapiens
gccaaggguggacacagcugcagacuuccggg

SEQ ID NO: 21932 - RNA, 32 nt, Homo Sapiens
uacccaaugcaccucccuccccagcucgagau

SEQ ID NO: 21933 - RNA, 32 nt, Homo Sapiens
gauggggaccccagccccuggccuguaccugu

SEQ ID NO: 21934 - RNA, 32 nt, Homo Sapiens
cugcccugcagccccagacaccuggaaaaucc

SEQ ID NO: 21935 - RNA, 32 nt, Homo Sapiens
aggacaaggugcugcugcuugcccaaauguuu

SEQ ID NO: 21936 - RNA, 32 nt, Homo Sapiens
aacuguuuuccacagcaguugaaccauuccac

SEQ ID NO: 21937 - RNA, 32 nt, Homo Sapiens
uguaccaucuugguccucuccccucccguuuu

SEQ ID NO: 21938 - RNA, 32 nt, Homo Sapiens
ugcugucugcaagggagggagccgagccccag

SEQ ID NO: 21939 - RNA, 32 nt, Homo Sapiens
cccucaauuuucccccuuucauuugaaggacc

SEQ ID NO: 21940 - RNA, 32 nt, Homo Sapiens
ccuccacagcccugggaccccuggaguucugc

SEQ ID NO: 21941 - RNA, 32 nt, Homo Sapiens
aggucaccaucagugaacgcaaugcaaucuca

SEQ ID NO: 21942 - RNA, 32 nt, Homo Sapiens
gacucacuuuuguaacuaaagaacauagcuua

SEQ ID NO: 21943 - RNA, 32 nt, Homo Sapiens
aaauuaaguauacacaauagauuuuccaucca

SEQ ID NO: 21944 - RNA, 32 nt, Homo Sapiens
uaauaauaaggaagaagaaauauuuuggacau

SEQ ID NO: 21945 - RNA, 32 nt, Homo Sapiens
cugaggaggaggagcugcacaaccaguuacug

SEQ ID NO: 21946 - RNA, 32 nt, Homo Sapiens
ccaucaagggaaggugaaagagccacgguucc

SEQ ID NO: 21947 - RNA, 32 nt, Homo Sapiens
gggccaugugaucacucacacuggccucuuua

SEQ ID NO: 21948 - RNA, 28 nt, Homo Sapiens
aaaaugagggagaaacauuugccugccu

SEQ ID NO: 21949 - RNA, 32 nt, Homo Sapiens
gcucaggccccaucucugggguguuugggggu

SEQ ID NO: 21950 - RNA, 32 nt, Homo Sapiens
uuuaauuuuuggagagcucgcgaucuuggaaa

SEQ ID NO: 21951 - RNA, 32 nt, Homo Sapiens
uuuuuucuguguaaaucauuaaguauaagagg

SEQ ID NO: 21952 - RNA, 32 nt, Homo Sapiens
cugugcgaauccgacccaccucccagagccug

SEQ ID NO: 21953 - RNA, 32 nt, Homo Sapiens
gaaguuuaagagacauaaauggcauuuuguua

SEQ ID NO: 21954 - RNA, 32 nt, Homo Sapiens
augaccuugggggucuucucuaucucugaucc

SEQ ID NO: 21955 - RNA, 32 nt, Homo Sapiens
aggagauccagaacuuuuuaccagauuuucaa

SEQ ID NO: 21956 - RNA, 32 nt, Homo Sapiens
ucuuauuuuuguuuuucuuaagucagcugguu

SEQ ID NO: 21957 - RNA, 32 nt, Homo Sapiens
ggugggcucggcagcaccuugccuguguuucu

SEQ ID NO: 21958 - RNA, 31 nt, Homo Sapiens
agcaccucaccugagaccuccacuccacauc

SEQ ID NO: 21959 - RNA, 32 nt, Homo Sapiens
auaagaggaaaugagagccggguuuucugacu

SEQ ID NO: 21960 - RNA, 32 nt, Homo Sapiens
aaagcuuguauaauucagauuuaucaauuucc

SEQ ID NO: 21961 - RNA, 32 nt, Homo Sapiens
ucucugaacaauacaagaacucuuuauguagc

SEQ ID NO: 21962 - RNA, 32 nt, Homo Sapiens
cgggaagugagccgccggccuccggccuccug

SEQ ID NO: 21963 - RNA, 32 nt, Homo Sapiens
cucuacaguggcugcugcaggugcuggcugga

SEQ ID NO: 21964 - RNA, 32 nt, Homo Sapiens
aaggauaagacuuuaaacaguugauucuuuuu

SEQ ID NO: 21965 - RNA, 32 nt, Homo Sapiens
gcacccucggacugccccagggcccccgccgc

SEQ ID NO: 21966 - RNA, 32 nt, Homo Sapiens
uuuuuggcauuaucucuuucucucuuuccauc

SEQ ID NO: 21967 - RNA, 32 nt, Homo Sapiens
acugacucugcauuuuuaauucuugaaacuug

SEQ ID NO: 21968 - RNA, 32 nt, Homo Sapiens
ucauugcucugcuuacacugaaaucuccugcu

SEQ ID NO: 21969 - RNA, 32 nt, Homo Sapiens
auguaaaaugacuaccuaauuuuuugauguaa

SEQ ID NO: 21970 - RNA, 32 nt, Homo Sapiens
cuuuuauaaccuuguucucugcuugacagacu

SEQ ID NO: 21971 - RNA, 32 nt, Homo Sapiens
acccugccgcccgcggccccagcuucaggaca

SEQ ID NO: 21972 - RNA, 30 nt, Homo Sapiens
gaagccagugguggccacgcagccuuauaa

SEQ ID NO: 21973 - RNA, 32 nt, Homo Sapiens
gaaucuauucccuaggaauucauggcauaaua

SEQ ID NO: 21974 - RNA, 32 nt, Homo Sapiens
ggaacacacacacacgcagacacacacacaca

SEQ ID NO: 21975 - RNA, 32 nt, Homo Sapiens
gagcuccuguuccucucucccucccccgaggc

SEQ ID NO: 21976 - RNA, 32 nt, Homo Sapiens
gaacucccagagcuaccucuugggggagcgug

SEQ ID NO: 21977 - RNA, 32 nt, Homo Sapiens
agggccacagaacccguguucaucucauccga

SEQ ID NO: 21978 - RNA, 32 nt, Homo Sapiens
ugguauuagcuugauugguugguccgcugguu

SEQ ID NO: 21979 - RNA, 32 nt, Homo Sapiens
gacaccacagaaagcaaauaaaacacuugaaa

SEQ ID NO: 21980 - RNA, 32 nt, Homo Sapiens
caaucagaggauguuuuaagaaacaaaacaua

SEQ ID NO: 21981 - RNA, 32 nt, Homo Sapiens
ucagcacuaggucuucccgucaccuccaccuc

SEQ ID NO: 21982 - RNA, 32 nt, Homo Sapiens
gacagccggaagcuuccgggguggccuccacc

SEQ ID NO: 21983 - RNA, 32 nt, Homo Sapiens
uguaagaugggcauuccucugcucuccucuau

SEQ ID NO: 21984 - RNA, 32 nt, Homo Sapiens
ccuggcugucuccuugacccgccuccuagauc

SEQ ID NO: 21985 - RNA, 32 nt, Homo Sapiens
agucucaccaacauggagaaaccccgucucca

SEQ ID NO: 21986 - RNA, 32 nt, Homo Sapiens
uucuuaaauaugugcuaaagauagaguugagu

SEQ ID NO: 21987 - RNA, 32 nt, Homo Sapiens
gagcggcgggcguugggcuggcggcuuucgcg

SEQ ID NO: 21988 - RNA, 32 nt, Homo Sapiens
agcggggggcuuggguggcaaccagaacuagg

SEQ ID NO: 21989 - RNA, 32 nt, Homo Sapiens
gacuaccauaacaaugcuuaugcuguuuccaa

SEQ ID NO: 21990 - RNA, 32 nt, Homo Sapiens
ugaccuuguggcucagcccucagggggcacuc

SEQ ID NO: 21991 - RNA, 32 nt, Homo Sapiens
gggagugguuuggggucgccggaucucgaggc

SEQ ID NO: 21992 - RNA, 32 nt, Homo Sapiens
gucacuuugucacucgaugucauuccaaaguu

SEQ ID NO: 21993 - RNA, 32 nt, Homo Sapiens
cuggcuuagaaaagucauguccugcuuacaaa

SEQ ID NO: 21994 - RNA, 32 nt, Homo Sapiens
uucucugccuuugcuauaugcagucagcagua

SEQ ID NO: 21995 - RNA, 32 nt, Homo Sapiens
aaagguggcuggguguggguccguugaagcga

SEQ ID NO: 21996 - RNA, 32 nt, Homo Sapiens
aauuacugccuugucagccucugacccucauc

SEQ ID NO: 21997 - RNA, 32 nt, Homo Sapiens
ccacugcccucccuggucuggcccccuccucc

SEQ ID NO: 21998 - RNA, 32 nt, Homo Sapiens
uaaauuuuuuuuauuuuuuuuauuuuuauuuc

SEQ ID NO: 21999 - RNA, 32 nt, Homo Sapiens
ggggcgagggagaggggcggccgcgcggauca

SEQ ID NO: 22000 - RNA, 32 nt, Homo Sapiens
auccagacggaguucugcccaggggugcugca

SEQ ID NO: 22001 - RNA, 32 nt, Homo Sapiens
cugugauguugggaccugaggacuggauggua

SEQ ID NO: 22002 - RNA, 32 nt, Homo Sapiens
aacauuguccucaaauaauguucuuuaaaggc

SEQ ID NO: 22003 - RNA, 32 nt, Homo Sapiens
uccugcacaucugaaucaccagcaaaagacaa

SEQ ID NO: 22004 - RNA, 32 nt, Homo Sapiens
cacccaguuagaagagaugaauccacagcugg

SEQ ID NO: 22005 - RNA, 32 nt, Homo Sapiens
uacccaucacugccucccugcucggccggucc

SEQ ID NO: 22006 - RNA, 32 nt, Homo Sapiens
caucgggaaugggagaugcugggguuccaacc

SEQ ID NO: 22007 - RNA, 30 nt, Homo Sapiens
cccccuagucucagcccagaagcuccuucu

SEQ ID NO: 22008 - RNA, 32 nt, Homo Sapiens
gaagcucucccugggcuucucucucuucuagu

SEQ ID NO: 22009 - RNA, 31 nt, Homo Sapiens
ccuggugcugcucagaaccaggggcucaagg

SEQ ID NO: 22010 - RNA, 32 nt, Homo Sapiens
ccuagccggggcagcccucccugccccgggag

SEQ ID NO: 22011 - RNA, 32 nt, Homo Sapiens
cugccagccugcauccucuccucaggccuccu

SEQ ID NO: 22012 - RNA, 32 nt, Homo Sapiens
ccagccauguggaacugacaacuugccuuuga

SEQ ID NO: 22013 - RNA, 32 nt, Homo Sapiens
gccagugugggaaugcggcaagaaggaauuga

SEQ ID NO: 22014 - RNA, 32 nt, Homo Sapiens
gauuaucuggccuaggggaggggaagggaggc

SEQ ID NO: 22015 - RNA, 32 nt, Homo Sapiens
gacgaucgcccacucuuccagcccuugcuugg

SEQ ID NO: 22016 - RNA, 32 nt, Homo Sapiens
acaaauaggcuuuucccucuccccucacccaa

SEQ ID NO: 22017 - RNA, 32 nt, Homo Sapiens
gagcccguggauguucugcgcgcggccuggga

SEQ ID NO: 22018 - RNA, 32 nt, Homo Sapiens
cucacggccucgcucucgccucaccccggcuc

SEQ ID NO: 22019 - RNA, 32 nt, Homo Sapiens
gcucccccaucccacacgcacugcacugccau

SEQ ID NO: 22020 - RNA, 32 nt, Homo Sapiens
cauaagagaugcucuccugggaccucaguacc

SEQ ID NO: 22021 - RNA, 32 nt, Homo Sapiens
aucacauguggacuuuuauuuccagugaaauc

SEQ ID NO: 22022 - RNA, 32 nt, Homo Sapiens
uucucuguguucauauuuuacucauugaguau

SEQ ID NO: 22023 - RNA, 32 nt, Homo Sapiens
gcgugguccucuagccucucuagacuuuuauu

SEQ ID NO: 22024 - RNA, 32 nt, Homo Sapiens
cuggcucaggcccacaccccuggccaggccca

SEQ ID NO: 22025 - RNA, 32 nt, Homo Sapiens
aagaucaggaauaauauuucuuugaaagcuga

SEQ ID NO: 22026 - RNA, 32 nt, Homo Sapiens
ucuguccggaccagccagcgcuccucaggagu

SEQ ID NO: 22027 - RNA, 32 nt, Homo Sapiens
gcucauacaaaauaaaugguuucugaaaaugu

SEQ ID NO: 22028 - RNA, 32 nt, Homo Sapiens
cuugggacugagccacggccgccgggcgcccc

SEQ ID NO: 22029 - RNA, 32 nt, Homo Sapiens
aacaguugcuguucuuacaucuguaaagaaaa

SEQ ID NO: 22030 - RNA, 32 nt, Homo Sapiens
uaagcuuuucccuuaugcuuuggcuuucaugc

SEQ ID NO: 22031 - RNA, 32 nt, Homo Sapiens
uuucagaacacugcucuuggggucugaauguu

SEQ ID NO: 22032 - RNA, 32 nt, Homo Sapiens
ucaaucagcuggauaugcuguuuaguuuuuac

SEQ ID NO: 22033 - RNA, 32 nt, Homo Sapiens
ugaaaucucuuagauguggaaauauuuuuucg

SEQ ID NO: 22034 - RNA, 32 nt, Homo Sapiens
gacacaaaaaucgcuucauuggaacgaaacau

SEQ ID NO: 22035 - RNA, 32 nt, Homo Sapiens
accguaaggcaucuuaaagccuugaaaaaugu

SEQ ID NO: 22036 - RNA, 32 nt, Homo Sapiens
ucuggagggucacgccgccuucuccucgagac

SEQ ID NO: 22037 - RNA, 32 nt, Homo Sapiens
aaguuuuucaacaugaguggccucggggacag

SEQ ID NO: 22038 - RNA, 32 nt, Homo Sapiens
cauaccucagaaugccgggucuaaguuguaga

SEQ ID NO: 22039 - RNA, 32 nt, Homo Sapiens
acugauauguaaaugacugcuagcccacggcu

SEQ ID NO: 22040 - RNA, 32 nt, Homo Sapiens
ucucaucugaugaguucuccaaagcauaugga

SEQ ID NO: 22041 - RNA, 32 nt, Homo Sapiens
gguuuggaauggagucaaaaaaugacauacuu

SEQ ID NO: 22042 - RNA, 32 nt, Homo Sapiens
gcugccccccucggugcucccggagccuccag

SEQ ID NO: 22043 - RNA, 32 nt, Homo Sapiens
ugccccucuggacgccgggcggcggcccugga

SEQ ID NO: 22044 - RNA, 32 nt, Homo Sapiens
uuccuugaggauuuuucccuugucguuugggg

SEQ ID NO: 22045 - RNA, 32 nt, Homo Sapiens
auccaaaugaauucaaugauaugugauaacua

SEQ ID NO: 22046 - RNA, 32 nt, Homo Sapiens
ucacgccacagcccaucagggauccugggacc

SEQ ID NO: 22047 - RNA, 32 nt, Homo Sapiens
ucccgaacucccugaggccuccccucccuuca

SEQ ID NO: 22048 - RNA, 32 nt, Homo Sapiens
ucccucuccuuacuuagcuuccaggucuuaac

SEQ ID NO: 22049 - RNA, 32 nt, Homo Sapiens
ucuaauacagucucucagacaagugucucuag

SEQ ID NO: 22050 - RNA, 32 nt, Homo Sapiens
cuuagcccuguccacaaacaagagggauggau

SEQ ID NO: 22051 - RNA, 32 nt, Homo Sapiens
cuuguccggcggccucugcugccgccuccgga

SEQ ID NO: 22052 - RNA, 32 nt, Homo Sapiens
cccgaggcuuugcgucugcgcggccggccgcu

SEQ ID NO: 22053 - RNA, 32 nt, Homo Sapiens
gagaaaauuuaaaauugaaaugucuuaucauu

SEQ ID NO: 22054 - RNA, 32 nt, Homo Sapiens
cauacgugucaaccaccauuucaacugcaccc

SEQ ID NO: 22055 - RNA, 32 nt, Homo Sapiens
uuagcaaggggcucagaacaccccgcucuggc

SEQ ID NO: 22056 - RNA, 32 nt, Homo Sapiens
acaagagauaaaauuguuacucacacuuaugu

SEQ ID NO: 22057 - RNA, 32 nt, Homo Sapiens
caugauaaaaauuuauuuuauaucguaccaua

SEQ ID NO: 22058 - RNA, 32 nt, Homo Sapiens
aucuuugugggccaaggugggcugggagggcu

SEQ ID NO: 22059 - RNA, 32 nt, Homo Sapiens
gcugugucaugagcugcagacaguucuccucg

SEQ ID NO: 22060 - RNA, 32 nt, Homo Sapiens
aguguuuguggccuucacagauuucacaggaa

SEQ ID NO: 22061 - RNA, 32 nt, Homo Sapiens
agaaaccagagauugagacaaaaaagacauuc

SEQ ID NO: 22062 - RNA, 32 nt, Homo Sapiens
cagaaaaagcaucuuugaagacaaagagggug

SEQ ID NO: 22063 - RNA, 32 nt, Homo Sapiens
auggauugcuauaaaaaaugucaauaagauug

SEQ ID NO: 22064 - RNA, 32 nt, Homo Sapiens
gaggacuuguuuucuuuuucuuuauuuuuaau

SEQ ID NO: 22065 - RNA, 32 nt, Homo Sapiens
gaacaaagcgaggccugcgggcggcggcuggg

SEQ ID NO: 22066 - RNA, 32 nt, Homo Sapiens
uuugcaauuacauguuacaauuagaauaauua

SEQ ID NO: 22067 - RNA, 32 nt, Homo Sapiens
guaucagggaaguggagaaucuaaguguaaaa

SEQ ID NO: 22068 - RNA, 32 nt, Homo Sapiens
gcuccguccucucggcggccucuccaggugca

SEQ ID NO: 22069 - RNA, 32 nt, Homo Sapiens
caugaccacucugcccuguccuggccauacgg

SEQ ID NO: 22070 - RNA, 32 nt, Homo Sapiens
cuucaucccucuucuuuucccuuuuuguccca

SEQ ID NO: 22071 - RNA, 32 nt, Homo Sapiens
acuccuaggaagcaggaaauggcuguucacag

SEQ ID NO: 22072 - RNA, 32 nt, Homo Sapiens
ggccacgggggcagugugaggaccucccuguc

SEQ ID NO: 22073 - RNA, 32 nt, Homo Sapiens
uggaauugacauucucuauuguaauuuuguuc

SEQ ID NO: 22074 - RNA, 32 nt, Homo Sapiens
aagugauggaacccucaggugcucuccgggag

SEQ ID NO: 22075 - RNA, 32 nt, Homo Sapiens
cccgucuucuagugugugagaauagggaccaa

SEQ ID NO: 22076 - RNA, 32 nt, Homo Sapiens
gcuccuguggcugugaugugggguuaagugag

SEQ ID NO: 22077 - RNA, 32 nt, Homo Sapiens
cggccccgcuccccgggagccgcaacagccgg

SEQ ID NO: 22078 - RNA, 32 nt, Homo Sapiens
cgcgacucggcugcacuccucacgcgccugua

SEQ ID NO: 22079 - RNA, 32 nt, Homo Sapiens
augagcauuucccaaacuagguuccccgaggc

SEQ ID NO: 22080 - RNA, 32 nt, Homo Sapiens
ugugcugauccugcuggcaggaccacauuucu

SEQ ID NO: 22081 - RNA, 32 nt, Homo Sapiens
uauucaggaaaaaauaauaaagucacuaucuu

SEQ ID NO: 22082 - RNA, 32 nt, Homo Sapiens
caucuggagaauaagacauuucuuuuugguua

SEQ ID NO: 22083 - RNA, 30 nt, Homo Sapiens
ugguggggaggugggauuuaugcacagccu

SEQ ID NO: 22084 - RNA, 32 nt, Homo Sapiens
uccccucguccaccgcugccgccuccuucuuc

SEQ ID NO: 22085 - RNA, 32 nt, Homo Sapiens
gcccuuucaauccuagcacccacuagauauuu

SEQ ID NO: 22086 - RNA, 32 nt, Homo Sapiens
aaucccagcuacucgggaggugaggcaggaga

SEQ ID NO: 22087 - RNA, 32 nt, Homo Sapiens
caucugcaggagugaguaggccugcuguauuu

SEQ ID NO: 22088 - RNA, 32 nt, Homo Sapiens
uggaaaagagggcaaggccaguccucacugcc

SEQ ID NO: 22089 - RNA, 32 nt, Homo Sapiens
ucgaagccucuuaaaauggcagaugauuugga

SEQ ID NO: 22090 - RNA, 32 nt, Homo Sapiens
uuuacugauuuuacuguuuuguguucaugaau

SEQ ID NO: 22091 - RNA, 32 nt, Homo Sapiens
aaaguguggaauggaagaaaugucgauccugu

SEQ ID NO: 22092 - RNA, 32 nt, Homo Sapiens
augagcgagaaaaggagagagcgcgugcagag

SEQ ID NO: 22093 - RNA, 32 nt, Homo Sapiens
ugacuaaacagaucauuauuauauauagguau

SEQ ID NO: 22094 - RNA, 32 nt, Homo Sapiens
ccuguuugaguugugauagauuuuagaauaaa

SEQ ID NO: 22095 - RNA, 32 nt, Homo Sapiens
cucuucauuacuguugcucuguuuugugacuu

SEQ ID NO: 22096 - RNA, 32 nt, Homo Sapiens
guaaaaagauaaagcaucaaagcaguauuucu

SEQ ID NO: 22097 - RNA, 32 nt, Homo Sapiens
cucaguccagcaugguuuugauguaaccaucc

SEQ ID NO: 22098 - RNA, 32 nt, Homo Sapiens
aggcucuuugccuggaggaaacgcugguuuau

SEQ ID NO: 22099 - RNA, 32 nt, Homo Sapiens
agcccuaugaugucugcccacuaucuaaggua

SEQ ID NO: 22100 - RNA, 32 nt, Homo Sapiens
aacaaauaaauauuuccuguguccucugaacu

SEQ ID NO: 22101 - RNA, 32 nt, Homo Sapiens
agucacuccaggagcaagggugucauuuacug

SEQ ID NO: 22102 - RNA, 32 nt, Homo Sapiens
ugugcaucccccagcccucagcuuugccuucu

SEQ ID NO: 22103 - RNA, 32 nt, Homo Sapiens
uucacaucaguggcuuuguaugcaaauaugcu

SEQ ID NO: 22104 - RNA, 32 nt, Homo Sapiens
uuacugucccuguuuuucaguuguuuaaagga

SEQ ID NO: 22105 - RNA, 32 nt, Homo Sapiens
cccugugucgcccccgcccgccugcagcgccc

SEQ ID NO: 22106 - RNA, 32 nt, Homo Sapiens
cugagcccaggccccaggacacuauccccggg

SEQ ID NO: 22107 - RNA, 32 nt, Homo Sapiens
agcugaacuaaauugcaaaacuugcuuuaaua

SEQ ID NO: 22108 - RNA, 30 nt, Homo Sapiens
augggguuucaccauguuagccaggcugau

SEQ ID NO: 22109 - RNA, 32 nt, Homo Sapiens
aggcuggaggaagaggcgacaaagugcuaggg

SEQ ID NO: 22110 - RNA, 32 nt, Homo Sapiens
cccugcccccuccccccgugccugcagacgcg

SEQ ID NO: 22111 - RNA, 32 nt, Homo Sapiens
aagauuguccggagaccuaaaugagauaauuc

SEQ ID NO: 22112 - RNA, 32 nt, Homo Sapiens
gcgcccgcaacagagccccaaccgggccuuug

SEQ ID NO: 22113 - RNA, 32 nt, Homo Sapiens
accacaaauacaguguaauaucaucaguccaa

SEQ ID NO: 22114 - RNA, 32 nt, Homo Sapiens
cgggcacacgggggcaauaaaccgagccaccc

SEQ ID NO: 22115 - RNA, 32 nt, Homo Sapiens
aaaauaauuguucagcuuccaauuaguauucu

SEQ ID NO: 22116 - RNA, 32 nt, Homo Sapiens
gccucuccagcaugagaagcauuuccagcacu

SEQ ID NO: 22117 - RNA, 32 nt, Homo Sapiens
agacaucaugaauuauuuugugucuugcuuau

SEQ ID NO: 22118 - RNA, 32 nt, Homo Sapiens
cuuuucucuuucuccuuagucuucucauagca

SEQ ID NO: 22119 - RNA, 32 nt, Homo Sapiens
uguccagccuagcaggccgccgaccccgcccc

SEQ ID NO: 22120 - RNA, 32 nt, Homo Sapiens
gggaaugaggugauaagcaaggaggguguaag

SEQ ID NO: 22121 - RNA, 32 nt, Homo Sapiens
guucuccuuuagccaaggcucccuuuuuccaa

SEQ ID NO: 22122 - RNA, 32 nt, Homo Sapiens
gaccaguagacgaaucaggaagguccuaggag

SEQ ID NO: 22123 - RNA, 32 nt, Homo Sapiens
auaaauauauuuuuuucuuagacuaaauauga

SEQ ID NO: 22124 - RNA, 32 nt, Homo Sapiens
ccugccggccugguggggagccaggcccugcc

SEQ ID NO: 22125 - RNA, 31 nt, Homo Sapiens
gaagggcugccggcuuccuucugggaucuag

SEQ ID NO: 22126 - RNA, 32 nt, Homo Sapiens
aggugggagggcagcggagaucagcguggaca

SEQ ID NO: 22127 - RNA, 32 nt, Homo Sapiens
aggcucuaucacuuacuaguuugcagugcugg

SEQ ID NO: 22128 - RNA, 31 nt, Homo Sapiens
cauuuguggaacacucugggauaauugggga

SEQ ID NO: 22129 - RNA, 32 nt, Homo Sapiens
agugccuuggauauuucugggguggcuagacu

SEQ ID NO: 22130 - RNA, 32 nt, Homo Sapiens
ucucuuuucuugcacggugaggaggcagagag

SEQ ID NO: 22131 - RNA, 32 nt, Homo Sapiens
cgagcgcugcgcagucggguggucgcgggcca

SEQ ID NO: 22132 - RNA, 27 nt, Homo Sapiens
uaucuucauuaauucauuuugguaagc

SEQ ID NO: 22133 - RNA, 32 nt, Homo Sapiens
agcaagcucaggugggauggccccagugcugg

SEQ ID NO: 22134 - RNA, 32 nt, Homo Sapiens
gagccuguagaagggaggcaugaaacuugugg

SEQ ID NO: 22135 - RNA, 32 nt, Homo Sapiens
ccucgguucuuugucauucagauugcauuuga

SEQ ID NO: 22136 - RNA, 32 nt, Homo Sapiens
ggcauucucauuuauuuuuucuuuguuucaua

SEQ ID NO: 22137 - RNA, 32 nt, Homo Sapiens
uuacuauuuccuucgauuuuuaucugcacaau

SEQ ID NO: 22138 - RNA, 32 nt, Homo Sapiens
uugccgguggccugcgccagcugcugggugag

SEQ ID NO: 22139 - RNA, 32 nt, Homo Sapiens
gcgauggcaacgcaaccccuccguuugcucug

SEQ ID NO: 22140 - RNA, 32 nt, Homo Sapiens
agagaagggcuuaguaacuguugugugggugg

SEQ ID NO: 22141 - RNA, 32 nt, Homo Sapiens
ccgggccccucagccuuaaaccccgccuuguc

SEQ ID NO: 22142 - RNA, 32 nt, Homo Sapiens
aacaccgcggagccccgggacuugccugucgu

SEQ ID NO: 22143 - RNA, 32 nt, Homo Sapiens
agaggcccaagcccgucccucccugccaggag

SEQ ID NO: 22144 - RNA, 32 nt, Homo Sapiens
ucaauguuccaguuagcuuuaaaagguauacg

SEQ ID NO: 22145 - RNA, 32 nt, Homo Sapiens
uagaaggacaggcuccuguuuccccagaacag

SEQ ID NO: 22146 - RNA, 32 nt, Homo Sapiens
uuugcguuuuuaaucagaaaacaaaauagagg

SEQ ID NO: 22147 - RNA, 32 nt, Homo Sapiens
aagugggauacucuguaauacucuguaaucaa

SEQ ID NO: 22148 - RNA, 32 nt, Homo Sapiens
cuggccugucuuccuccaaccucccccuuuuu

SEQ ID NO: 22149 - RNA, 32 nt, Homo Sapiens
uacaagaaauaaaucuauauuuuugugaaggg

SEQ ID NO: 22150 - RNA, 32 nt, Homo Sapiens
gugacugcaaaggcaaagaaaguaaaaaagga

SEQ ID NO: 22151 - RNA, 32 nt, Homo Sapiens
ggaccaggaaggcggcccgagcaggacgggug

SEQ ID NO: 22152 - RNA, 32 nt, Homo Sapiens
uuucuucccccgcuaauucauaccucccuccu

SEQ ID NO: 22153 - RNA, 32 nt, Homo Sapiens
ugcacuuuuuaaaauuguuacuuuuaaugcgu

SEQ ID NO: 22154 - RNA, 32 nt, Homo Sapiens
ugaugggcuuucuacagccugcuuaccacuaa

SEQ ID NO: 22155 - RNA, 32 nt, Homo Sapiens
gacccaucucaagucagcucccuagacucauc

SEQ ID NO: 22156 - RNA, 32 nt, Homo Sapiens
aacuuugaagcgccagaacucuauuucacugu

SEQ ID NO: 22157 - RNA, 32 nt, Homo Sapiens
ccuggccaagugcaggaaugggccaugccguc

SEQ ID NO: 22158 - RNA, 32 nt, Homo Sapiens
uauguagguuguggucugaggaccacuacaug

SEQ ID NO: 22159 - RNA, 32 nt, Homo Sapiens
uugaugcacaagcacuuguacuguagccgaga

SEQ ID NO: 22160 - RNA, 32 nt, Homo Sapiens
gaaccgagggaucucaggaguuggguccagau

SEQ ID NO: 22161 - RNA, 32 nt, Homo Sapiens
acuguggggggaggaguguguuacugaaggag

SEQ ID NO: 22162 - RNA, 32 nt, Homo Sapiens
ccucuccccguccauaccgcuccgcucagcug

SEQ ID NO: 22163 - RNA, 32 nt, Homo Sapiens
uuuccuaaaacucagaaagauauuuuuauauu

SEQ ID NO: 22164 - RNA, 32 nt, Homo Sapiens
aauuccucaggaccaguuuguuuuccaagugu

SEQ ID NO: 22165 - RNA, 32 nt, Homo Sapiens
guggauggggccagcuggccugcccugauccu

SEQ ID NO: 22166 - RNA, 32 nt, Homo Sapiens
gucccccucccagcacccccagccaucccccc

SEQ ID NO: 22167 - RNA, 32 nt, Homo Sapiens
caagguggcaguuguggaaccaucagagaggg

SEQ ID NO: 22168 - RNA, 32 nt, Homo Sapiens
ccuuacaaauauuuuuucauggucacauuuau

SEQ ID NO: 22169 - RNA, 32 nt, Homo Sapiens
gaccguguccgcgcgccugggagacgcugccu

SEQ ID NO: 22170 - RNA, 32 nt, Homo Sapiens
gcagccuuuccacagggcgcagcggcggccuu

SEQ ID NO: 22171 - RNA, 32 nt, Homo Sapiens
auccauuaaagccccaggagcuguuguuuuaa

SEQ ID NO: 22172 - RNA, 32 nt, Homo Sapiens
aagcugguggacuacgcgcgcagcgugcacga

SEQ ID NO: 22173 - RNA, 31 nt, Homo Sapiens
ccugcccucaccugcaaaugaguuaaagaag

SEQ ID NO: 22174 - RNA, 32 nt, Homo Sapiens
cggacuccccggcucucccccagccgcccgca

SEQ ID NO: 22175 - RNA, 30 nt, Homo Sapiens
uuugugcgcggcggcggcgggagaggcggc

SEQ ID NO: 22176 - RNA, 31 nt, Homo Sapiens
ccaguggccuguggccugccccguccacucc

SEQ ID NO: 22177 - RNA, 32 nt, Homo Sapiens
aaauaauuuguuuaaagggggcacucuuuuaa

SEQ ID NO: 22178 - RNA, 32 nt, Homo Sapiens
uggccuguaguuucuuuuuucuuuuuuuuugg

SEQ ID NO: 22179 - RNA, 32 nt, Homo Sapiens
gcuaaggguggggaagaaccccugccugaggg

SEQ ID NO: 22180 - RNA, 32 nt, Homo Sapiens
aggucugauaugauucaauuauagaaugcaau

SEQ ID NO: 22181 - RNA, 32 nt, Homo Sapiens
augggccgcggagcccgagcggcggcugcgca

SEQ ID NO: 22182 - RNA, 32 nt, Homo Sapiens
uaccuagcuggcucugugagggugcugacugg

SEQ ID NO: 22183 - RNA, 32 nt, Homo Sapiens
cgaucucggcucacuccaccuccaccucccag

SEQ ID NO: 22184 - RNA, 32 nt, Homo Sapiens
aaaaccaggcucuuuggggcuagacagacugg

SEQ ID NO: 22185 - RNA, 32 nt, Homo Sapiens
uggaguauuuaguuauacugaauuuuacaguu

SEQ ID NO: 22186 - RNA, 32 nt, Homo Sapiens
guuugcugucuccucaacucaaccuaguaaag

SEQ ID NO: 22187 - RNA, 32 nt, Homo Sapiens
cacuucacccucgcgagccgcuguucacuccu

SEQ ID NO: 22188 - RNA, 32 nt, Homo Sapiens
acauuuuuuuucugauuagguuucagaauuau

SEQ ID NO: 22189 - RNA, 32 nt, Homo Sapiens
ugugaaguuaccccauuucucaucuuaauuag

SEQ ID NO: 22190 - RNA, 32 nt, Homo Sapiens
ggcggcgugaagucacugcugcucuggguucg

SEQ ID NO: 22191 - RNA, 32 nt, Homo Sapiens
ggagcaugaagauaaauccaacucugacugua

SEQ ID NO: 22192 - RNA, 32 nt, Homo Sapiens
uguuauacaacacuaauuagugucuguaauuu

SEQ ID NO: 22193 - RNA, 32 nt, Homo Sapiens
gaugugaggggaggggugagaacaacuagcug

SEQ ID NO: 22194 - RNA, 32 nt, Homo Sapiens
gugugaggggagagaagggagagggugggccu

SEQ ID NO: 22195 - RNA, 32 nt, Homo Sapiens
uguaaacauuuucucucucaccauguuuuggc

SEQ ID NO: 22196 - RNA, 32 nt, Homo Sapiens
cuguauugccuuaaguugauugagguuuguag

SEQ ID NO: 22197 - RNA, 32 nt, Homo Sapiens
caugcaaaccauccaaaagacuaccaccugcc

SEQ ID NO: 22198 - RNA, 32 nt, Homo Sapiens
cagagugauggcugcaggcugcugcccuucac

SEQ ID NO: 22199 - RNA, 29 nt, Homo Sapiens
auugguucauaugaaauaauguuaacuuc

SEQ ID NO: 22200 - RNA, 32 nt, Homo Sapiens
ucccuggaauccaagaugcugaguggaagugg

SEQ ID NO: 22201 - RNA, 32 nt, Homo Sapiens
acaguucuagcaugcaacaaaccaucuacuau

SEQ ID NO: 22202 - RNA, 32 nt, Homo Sapiens
ggugcagcacaccagcauggcacaugaauaca

SEQ ID NO: 22203 - RNA, 32 nt, Homo Sapiens
aucguuucuuccugccuuugggccgucaggca

SEQ ID NO: 22204 - RNA, 32 nt, Homo Sapiens
uagaaccagauauauaugcuauuuucagugau

SEQ ID NO: 22205 - RNA, 32 nt, Homo Sapiens
ggaaacuugggcugaguaccgcggcgggcgcg

SEQ ID NO: 22206 - RNA, 32 nt, Homo Sapiens
guucuccgccgccgcuagccuagcugagucgc

SEQ ID NO: 22207 - RNA, 32 nt, Homo Sapiens
auuggucuagcuuuuccuacaaugaaccuauc

SEQ ID NO: 22208 - RNA, 32 nt, Homo Sapiens
gucaccaaaaauaccuaacuaugguuggaagc

SEQ ID NO: 22209 - RNA, 32 nt, Homo Sapiens
gauucgcacugacuucaaggaaggacgcgaac

SEQ ID NO: 22210 - RNA, 32 nt, Homo Sapiens
gcugggccgccggcccggguggcccauaacuu

SEQ ID NO: 22211 - RNA, 32 nt, Homo Sapiens
cuggucacccccacccccgggugccugugacc

SEQ ID NO: 22212 - RNA, 32 nt, Homo Sapiens
gcccaguccgcggugccccggcgggugaugcc

SEQ ID NO: 22213 - RNA, 32 nt, Homo Sapiens
uccaguugugaugcagugggugucuacacacu

SEQ ID NO: 22214 - RNA, 32 nt, Homo Sapiens
auacuuaaagaguagugagcaauauaagacgc

SEQ ID NO: 22215 - RNA, 32 nt, Homo Sapiens
uuaauguuaauacauauuacacuacaguuuac

SEQ ID NO: 22216 - RNA, 32 nt, Homo Sapiens
acaguguuuccagauggguccuaggcacccau

SEQ ID NO: 22217 - RNA, 32 nt, Homo Sapiens
aagugguaauaggaaacggaagagacuuggua

SEQ ID NO: 22218 - RNA, 32 nt, Homo Sapiens
uauuuuaaaaaacaaaguugugaaaacaugcc

SEQ ID NO: 22219 - RNA, 32 nt, Homo Sapiens
cccuaauagcagcccacggacuuuggggagga

SEQ ID NO: 22220 - RNA, 32 nt, Homo Sapiens
ggcagggaaggggacgggguucuuuccagucc

SEQ ID NO: 22221 - RNA, 32 nt, Homo Sapiens
ccaacagaacuaaauguucuaugguuaugaaa

SEQ ID NO: 22222 - RNA, 32 nt, Homo Sapiens
uauugugaaaacugggaaugugaauguaauau

SEQ ID NO: 22223 - RNA, 32 nt, Homo Sapiens
ucauuggugacaagcccccaccccgggacuuu

SEQ ID NO: 22224 - RNA, 32 nt, Homo Sapiens
agacugcggagugggagggacugccauggcgu

SEQ ID NO: 22225 - RNA, 32 nt, Homo Sapiens
ccucugcacuguucccuuccacuuccucaucc

SEQ ID NO: 22226 - RNA, 32 nt, Homo Sapiens
cugugguguaaauucucccagcagugucccau

SEQ ID NO: 22227 - RNA, 32 nt, Homo Sapiens
gggugugugaggaagaaagaggggggcuggau

SEQ ID NO: 22228 - RNA, 32 nt, Homo Sapiens
gacauggaccagccaugcacccgcccagucac

SEQ ID NO: 22229 - RNA, 31 nt, Homo Sapiens
ugaaggugaaacauuuucucccuggauuuuu

SEQ ID NO: 22230 - RNA, 32 nt, Homo Sapiens
ccccuccucugugcucccucggucaccugugc

SEQ ID NO: 22231 - RNA, 32 nt, Homo Sapiens
uuaauuuuuuaaaaugugcuucuccaucuaaa

SEQ ID NO: 22232 - RNA, 32 nt, Homo Sapiens
cucagaaucgacauucuuaaaaaguuauuuca

SEQ ID NO: 22233 - RNA, 32 nt, Homo Sapiens
gagggugcugcgagcugcugggcugcacacgc

SEQ ID NO: 22234 - RNA, 32 nt, Homo Sapiens
caguccccaagcauguggacagaugcauucua

SEQ ID NO: 22235 - RNA, 32 nt, Homo Sapiens
uagugggcacagggguggcuaguuggggccug

SEQ ID NO: 22236 - RNA, 32 nt, Homo Sapiens
caauauacuauaagagcauggggguuugugcc

SEQ ID NO: 22237 - RNA, 32 nt, Homo Sapiens
gugggggcugggugcaguggcucacaccugua

SEQ ID NO: 22238 - RNA, 32 nt, Homo Sapiens
ggccagcaacucccagcucaaugcaauggcuc

SEQ ID NO: 22239 - RNA, 30 nt, Homo Sapiens
cucccuugcaggcgccguuucccggcuucg

SEQ ID NO: 22240 - RNA, 32 nt, Homo Sapiens
gcacguuggauauucacacacccacaggaagc

SEQ ID NO: 22241 - RNA, 32 nt, Homo Sapiens
cuucgccucccuccccuccgccagagcugccu

SEQ ID NO: 22242 - RNA, 32 nt, Homo Sapiens
acacccuuaggaccucaggccaucuucuccua

SEQ ID NO: 22243 - RNA, 32 nt, Homo Sapiens
uuauuaaauuuauguuuugcaacuuagaaacc

SEQ ID NO: 22244 - RNA, 30 nt, Homo Sapiens
acgguugucguccucagcggcaggagccag

SEQ ID NO: 22245 - RNA, 32 nt, Homo Sapiens
cucggacgucccgucccaggagcaaaacucua

SEQ ID NO: 22246 - RNA, 32 nt, Homo Sapiens
uuuuguucacaguaaaaacacuuuuuugaguu

SEQ ID NO: 22247 - RNA, 32 nt, Homo Sapiens
agcuccugccuugccggccugcucuccauugc

SEQ ID NO: 22248 - RNA, 32 nt, Homo Sapiens
agccucccagaaugcauagagucauucacugu

SEQ ID NO: 22249 - RNA, 32 nt, Homo Sapiens
cuccccugcccccacgccuucccacccagcgu

SEQ ID NO: 22250 - RNA, 30 nt, Homo Sapiens
uagguaauggaguugggggaagcagcuucc

SEQ ID NO: 22251 - RNA, 32 nt, Homo Sapiens
caccagugaagcaaagaagaucaaggaaguuc

SEQ ID NO: 22252 - RNA, 32 nt, Homo Sapiens
uuuggauaauaaguaaauagcauauuauguug

SEQ ID NO: 22253 - RNA, 32 nt, Homo Sapiens
uggcagcacaaggggaagccugcuguccugga

SEQ ID NO: 22254 - RNA, 32 nt, Homo Sapiens
aaccaccaucgguuaaauuugaugcaaaaaua

SEQ ID NO: 22255 - RNA, 32 nt, Homo Sapiens
uuucaccuggccaggaccuucuauguagcucu

SEQ ID NO: 22256 - RNA, 32 nt, Homo Sapiens
gaugacauaaauaaguuuaaauaucaauuugg

SEQ ID NO: 22257 - RNA, 32 nt, Homo Sapiens
aaaucuggacgaagauuaccaaagagaagggu

SEQ ID NO: 22258 - RNA, 32 nt, Homo Sapiens
cacccccuccgcugauugccagauggggugag

SEQ ID NO: 22259 - RNA, 32 nt, Homo Sapiens
uaugccgaagagagccugagccugcugcgcac

SEQ ID NO: 22260 - RNA, 32 nt, Homo Sapiens
agccagagacccaagacagggcccgggcucug

SEQ ID NO: 22261 - RNA, 32 nt, Homo Sapiens
ccuguguuuccacuucugcuuccaaagauuuu

SEQ ID NO: 22262 - RNA, 32 nt, Homo Sapiens
guguccaagccucccccuggcucuucaguucu

SEQ ID NO: 22263 - RNA, 32 nt, Homo Sapiens
cucugagaagagguccuugguugggucaagga

SEQ ID NO: 22264 - RNA, 32 nt, Homo Sapiens
gccuggcccaagccaguacaagagggccuggg

SEQ ID NO: 22265 - RNA, 31 nt, Homo Sapiens
gaggacuuggugcccuagacggccucagucc

SEQ ID NO: 22266 - RNA, 32 nt, Homo Sapiens
ugcaaaguaagggugguaaaucuuggguaggu

SEQ ID NO: 22267 - RNA, 32 nt, Homo Sapiens
ugguaaaugaauugguucugugacccgggaag

SEQ ID NO: 22268 - RNA, 32 nt, Homo Sapiens
uuuuaauguauauaugucuugcucagauuauu

SEQ ID NO: 22269 - RNA, 32 nt, Homo Sapiens
ccagggcgcgucgggagcagcagggaucggug

SEQ ID NO: 22270 - RNA, 32 nt, Homo Sapiens
auuuuaagguaaacuuuuuauugaaacaucac

SEQ ID NO: 22271 - RNA, 32 nt, Homo Sapiens
ggggaggggggccuucggucucuccccagccu

SEQ ID NO: 22272 - RNA, 32 nt, Homo Sapiens
acaggacuggagaggaggaggggguccccuau

SEQ ID NO: 22273 - RNA, 32 nt, Homo Sapiens
cgcucucccguccagcccuaagccugcucugc

SEQ ID NO: 22274 - RNA, 32 nt, Homo Sapiens
cauucaguauauaaaauauguacauaauauug

SEQ ID NO: 22275 - RNA, 32 nt, Homo Sapiens
ccugaggagaguuuucuccauaucaaaacgag

SEQ ID NO: 22276 - RNA, 32 nt, Homo Sapiens
gagggagagcucggggcccagcccaugcccca

SEQ ID NO: 22277 - RNA, 32 nt, Homo Sapiens
guccccacgcacccucagucaggcgcaggcag

SEQ ID NO: 22278 - RNA, 32 nt, Homo Sapiens
uuucugaauaaauauaaugugucuauaaaaua

SEQ ID NO: 22279 - RNA, 32 nt, Homo Sapiens
acaaacagagugagagaccauauuuuagcccc

SEQ ID NO: 22280 - RNA, 32 nt, Homo Sapiens
ugugaucaaaccaaagauuccacaucggcagu

SEQ ID NO: 22281 - RNA, 32 nt, Homo Sapiens
guuauuguuuguuuuuaagaaaagcucaguuc

SEQ ID NO: 22282 - RNA, 31 nt, Homo Sapiens
gcggcagcccugaggacggugagacggccgc

SEQ ID NO: 22283 - RNA, 31 nt, Homo Sapiens
ugaucgugagucgcgggguccacuccccgcc

SEQ ID NO: 22284 - RNA, 32 nt, Homo Sapiens
uuaccuacuuuuucuuugauuuucgacguuug

SEQ ID NO: 22285 - RNA, 32 nt, Homo Sapiens
uuuauuuauuccagcccaguacuauaaagaac

SEQ ID NO: 22286 - RNA, 32 nt, Homo Sapiens
agcaaaguuguggccaagcccaggcgcuguua

SEQ ID NO: 22287 - RNA, 32 nt, Homo Sapiens
gcauacucagaauaagagugagauuggaaacc

SEQ ID NO: 22288 - RNA, 32 nt, Homo Sapiens
aaagagcgaaacaaaacuugagccagcaagga

SEQ ID NO: 22289 - RNA, 32 nt, Homo Sapiens
cucugaaaauuugaaaauguguaaccacccaa

SEQ ID NO: 22290 - RNA, 31 nt, Homo Sapiens
gagagcgcgcucugccugccgccugccugcc

SEQ ID NO: 22291 - RNA, 32 nt, Homo Sapiens
aucccucaggauuccuuggcauccgaaaccag

SEQ ID NO: 22292 - RNA, 32 nt, Homo Sapiens
cuggucuuaaaugacccucuuauuuuuaacuu

SEQ ID NO: 22293 - RNA, 32 nt, Homo Sapiens
aaacucuguaaaucauuauagcuuuuguauaa

SEQ ID NO: 22294 - RNA, 32 nt, Homo Sapiens
uuuuaugucuuuuuaaaacaguucuucucuau

SEQ ID NO: 22295 - RNA, 32 nt, Homo Sapiens
acccuccccccgcccacacagcccacuuguuu

SEQ ID NO: 22296 - RNA, 32 nt, Homo Sapiens
cccaugccugacgcuccagcgccuggaucugc

SEQ ID NO: 22297 - RNA, 32 nt, Homo Sapiens
guggaaaagggagagcagagaggaacugagau

SEQ ID NO: 22298 - RNA, 32 nt, Homo Sapiens
uguuucuauguacuuuuucauguuuauuuuuu

SEQ ID NO: 22299 - RNA, 32 nt, Homo Sapiens
cucuuccuucccacccaagcuuccggcagccu

SEQ ID NO: 22300 - RNA, 32 nt, Homo Sapiens
ggucuuaaacucccggccucaagcaguccucc

SEQ ID NO: 22301 - RNA, 32 nt, Homo Sapiens
ccaaccaaacucugucccacuucacgcacgga

SEQ ID NO: 22302 - RNA, 32 nt, Homo Sapiens
gucuguguaaaacuacaaaauaaaaacucuua

SEQ ID NO: 22303 - RNA, 32 nt, Homo Sapiens
ucauccuccacgguucacuagcuccuaccuga

SEQ ID NO: 22304 - RNA, 32 nt, Homo Sapiens
cagucccggcccggcagccgcugccccgggcu

SEQ ID NO: 22305 - RNA, 32 nt, Homo Sapiens
ugucuaaggcuaggaacuaucaggugucuaua

SEQ ID NO: 22306 - RNA, 32 nt, Homo Sapiens
gacuaguacaagcagcccaagaaacucugaac

SEQ ID NO: 22307 - RNA, 32 nt, Homo Sapiens
uugacuagucuuaaaacaaagaaagaacgaau

SEQ ID NO: 22308 - RNA, 32 nt, Homo Sapiens
gaauugaagauaacuauuguauuucuaucaua

SEQ ID NO: 22309 - RNA, 32 nt, Homo Sapiens
gcuacucuucuacaauaagccacauaccaggu

SEQ ID NO: 22310 - RNA, 32 nt, Homo Sapiens
guuuuggagagccucuaggaacuugaaaaaua

SEQ ID NO: 22311 - RNA, 32 nt, Homo Sapiens
gcacuggugugccugccaggcuggggcggagc

SEQ ID NO: 22312 - RNA, 32 nt, Homo Sapiens
uaaaauuuuuuaggaagagaaacuaacacaau

SEQ ID NO: 22313 - RNA, 32 nt, Homo Sapiens
acugcaccuggccaaagcuuuuguuugcuuaa

SEQ ID NO: 22314 - RNA, 32 nt, Homo Sapiens
aggagauuccaugucuuucucauauuucagag

SEQ ID NO: 22315 - RNA, 32 nt, Homo Sapiens
cuuauuguuguguuucugaaaagugaaauuua

SEQ ID NO: 22316 - RNA, 32 nt, Homo Sapiens
cugugaagaacaaauaccaacugugcaaauug

SEQ ID NO: 22317 - RNA, 32 nt, Homo Sapiens
acgagggacucggccucggaggcgacccagac

SEQ ID NO: 22318 - RNA, 32 nt, Homo Sapiens
ugaagcaccgacacaaacuggagaauggucug

SEQ ID NO: 22319 - RNA, 32 nt, Homo Sapiens
ucuauacauaucuuuauuaaucacuauuguuc

SEQ ID NO: 22320 - RNA, 32 nt, Homo Sapiens
uguuaaggggcuaugaaguaaauaugcugcag

SEQ ID NO: 22321 - RNA, 32 nt, Homo Sapiens
agcgggggauguguccggggaggcgcgggccg

SEQ ID NO: 22322 - RNA, 32 nt, Homo Sapiens
ccgucaucacagcccacccccaggucacaaau

SEQ ID NO: 22323 - RNA, 32 nt, Homo Sapiens
uguguggcuuggcaauggaguucugcaugaca

SEQ ID NO: 22324 - RNA, 29 nt, Homo Sapiens
auauuaguauguauguguaccuaagggag

SEQ ID NO: 22325 - RNA, 32 nt, Homo Sapiens
agcaggaaagacuguuagcucugcuaacaguc

SEQ ID NO: 22326 - RNA, 32 nt, Homo Sapiens
auuacaaaggguuuuucuugucuuucuuuaaa

SEQ ID NO: 22327 - RNA, 32 nt, Homo Sapiens
ucaugaugaugauaauuuauuaacuuuuugga

SEQ ID NO: 22328 - RNA, 31 nt, Homo Sapiens
acccaggagccccaguccccagcauccugau

SEQ ID NO: 22329 - RNA, 32 nt, Homo Sapiens
cauguacauuucugaaaugaccucaagauguc

SEQ ID NO: 22330 - RNA, 32 nt, Homo Sapiens
guggcauaaguacauuaacaauguugugcagc

SEQ ID NO: 22331 - RNA, 32 nt, Homo Sapiens
ucauuugagcauggagugagaauagaaagacc

SEQ ID NO: 22332 - RNA, 32 nt, Homo Sapiens
acccaagucaaucccaacccccuuguuaccuu

SEQ ID NO: 22333 - RNA, 32 nt, Homo Sapiens
cagcugggcagcucagcuggguccucaucaau

SEQ ID NO: 22334 - RNA, 32 nt, Homo Sapiens
cgcuguggucugaggguuccaguguugcuugg

SEQ ID NO: 22335 - RNA, 30 nt, Homo Sapiens
ccugcuuuggcugcugcagaagcaaacuug

SEQ ID NO: 22336 - RNA, 32 nt, Homo Sapiens
gggagucugaaugugaguccaaggcuggcagc

SEQ ID NO: 22337 - RNA, 32 nt, Homo Sapiens
aaaccaugcuaugaauugaaucaaauguguca

SEQ ID NO: 22338 - RNA, 32 nt, Homo Sapiens
accuugccugggcuugugggcugcuggucgcg

SEQ ID NO: 22339 - RNA, 32 nt, Homo Sapiens
uuuacuacaauuuuuuaaaaaucguauaugua

SEQ ID NO: 22340 - RNA, 32 nt, Homo Sapiens
gccuaaggugagaggucuuaagagacuagcuu

SEQ ID NO: 22341 - RNA, 32 nt, Homo Sapiens
aagaguagugauugcucugccagaagcagcuc

SEQ ID NO: 22342 - RNA, 32 nt, Homo Sapiens
gccacugcacuccagccugggcgacagagaga

SEQ ID NO: 22343 - RNA, 32 nt, Homo Sapiens
gccacagcacuccagccugggcgacagaguga

SEQ ID NO: 22344 - RNA, 32 nt, Homo Sapiens
ccagcuuucaaagcaggcuuugugaaaaugua

SEQ ID NO: 22345 - RNA, 27 nt, Homo Sapiens
acaggauccuucuuacagcucuccaug

SEQ ID NO: 22346 - RNA, 32 nt, Homo Sapiens
aagucaucguucaguguagaauuucugccucu

SEQ ID NO: 22347 - RNA, 32 nt, Homo Sapiens
gagcauuuuuauuuauacuaaauuaaugccau

SEQ ID NO: 22348 - RNA, 32 nt, Homo Sapiens
cccuaucgcuccccggcuucccugcucuuucc

SEQ ID NO: 22349 - RNA, 32 nt, Homo Sapiens
gaauguauauugccucugcuccuaucaggguu

SEQ ID NO: 22350 - RNA, 32 nt, Homo Sapiens
ugcagggacugaagaagggcgagggcgagcgg

SEQ ID NO: 22351 - RNA, 32 nt, Homo Sapiens
ggggugauggagaggaagggggccaccccagg

SEQ ID NO: 22352 - RNA, 32 nt, Homo Sapiens
uccccugugucuaucccugucugugugucucu

SEQ ID NO: 22353 - RNA, 32 nt, Homo Sapiens
ucuucuguauuuacagaguccauuggcuuaac

SEQ ID NO: 22354 - RNA, 32 nt, Homo Sapiens
ccagauugugaggucugugugcaugugugugu

SEQ ID NO: 22355 - RNA, 32 nt, Homo Sapiens
ccccacccacccacgguccucaccuggagcug

SEQ ID NO: 22356 - RNA, 32 nt, Homo Sapiens
cuccgcccggugguucucgggcgaagggaagc

SEQ ID NO: 22357 - RNA, 32 nt, Homo Sapiens
auggauaggaaauuauuuuaaauggacucaaa

SEQ ID NO: 22358 - RNA, 32 nt, Homo Sapiens
aacaaagcaguaagggcuuacuuuuuaccaac

SEQ ID NO: 22359 - RNA, 28 nt, Homo Sapiens
cgggcgugaagcggcccgaggugauacc

SEQ ID NO: 22360 - RNA, 32 nt, Homo Sapiens
cauccuuuucccuuucuuacaaguugauccaa

SEQ ID NO: 22361 - RNA, 32 nt, Homo Sapiens
ugacuagagggagccaagaggauggggugggg

SEQ ID NO: 22362 - RNA, 32 nt, Homo Sapiens
ggcgggaacgcgagaagggcaccagcagcauu

SEQ ID NO: 22363 - RNA, 31 nt, Homo Sapiens
uaggcuuuacccucaggugcuacacaguaua

SEQ ID NO: 22364 - RNA, 32 nt, Homo Sapiens
gacccugguguuaucaucucccaggauccaug

SEQ ID NO: 22365 - RNA, 32 nt, Homo Sapiens
uuaauccucagcuucuugggaguugcugggcu

SEQ ID NO: 22366 - RNA, 32 nt, Homo Sapiens
cagcagggcccacaugcccccaucuccaagcg

SEQ ID NO: 22367 - RNA, 32 nt, Homo Sapiens
caggugaacgcagggcuggagaguauuuggug

SEQ ID NO: 22368 - RNA, 32 nt, Homo Sapiens
aucauugaaaaauggagagugaagcuggaaga

SEQ ID NO: 22369 - RNA, 32 nt, Homo Sapiens
agcauuuguaaauggucuauuagccuucauuu

SEQ ID NO: 22370 - RNA, 32 nt, Homo Sapiens
aauggaaaaggucaauaaagauauauuucuuu

SEQ ID NO: 22371 - RNA, 32 nt, Homo Sapiens
cuaugaaaauugucuauuuuuaucuauauauu

SEQ ID NO: 22372 - RNA, 32 nt, Homo Sapiens
aagaggagacgccgggacccccugcccgaucg

SEQ ID NO: 22373 - RNA, 32 nt, Homo Sapiens
agaaaccagacccgguggaaucucuaagaggu

SEQ ID NO: 22374 - RNA, 32 nt, Homo Sapiens
uggaguguugguuuuucuugugauauuagcag

SEQ ID NO: 22375 - RNA, 32 nt, Homo Sapiens
uggaaaaaacaaaaacaaaaaacugcagugaa

SEQ ID NO: 22376 - RNA, 32 nt, Homo Sapiens
caggccuucucgcgcugccuggucgcugguga

SEQ ID NO: 22377 - RNA, 32 nt, Homo Sapiens
cauuaggauaguuggagagggauuggaguacc

SEQ ID NO: 22378 - RNA, 32 nt, Homo Sapiens
gagaaggagggcucagccuugcugagacacuu

SEQ ID NO: 22379 - RNA, 32 nt, Homo Sapiens
cauggauggguccucacgcagacacacccaca

SEQ ID NO: 22380 - RNA, 32 nt, Homo Sapiens
acucguuccccuccucuuccgagcugcuuugu

SEQ ID NO: 22381 - RNA, 32 nt, Homo Sapiens
aaggcacgggaggguggcugugcgagguacug

SEQ ID NO: 22382 - RNA, 32 nt, Homo Sapiens
aacuaaagaaagauuauaucaguuuuuucaua

SEQ ID NO: 22383 - RNA, 32 nt, Homo Sapiens
ggucuuggaggucacccccaccccgcggauca

SEQ ID NO: 22384 - RNA, 32 nt, Homo Sapiens
cuaaggugaaagggcugccgugcagccaggca

SEQ ID NO: 22385 - RNA, 32 nt, Homo Sapiens
uaacuacaaaaauaauggcauauacaugcaua

SEQ ID NO: 22386 - RNA, 32 nt, Homo Sapiens
agcagggagaauaaagauaauuguauuuuaug

SEQ ID NO: 22387 - RNA, 32 nt, Homo Sapiens
caagaagaaauuagccaagugugguggugcau

SEQ ID NO: 22388 - RNA, 32 nt, Homo Sapiens
guaaauagcucuuaauuuuagagaaaccuucc

SEQ ID NO: 22389 - RNA, 32 nt, Homo Sapiens
agcggauuuuugcuuuugagcuucaagguccu

SEQ ID NO: 22390 - RNA, 32 nt, Homo Sapiens
uggugggcgauacauuaucauuuugcuaauaa

SEQ ID NO: 22391 - RNA, 30 nt, Homo Sapiens
gaaucacuaggcgccggcgccuccgaggca

SEQ ID NO: 22392 - RNA, 32 nt, Homo Sapiens
gugguuucuguacaucgucuucgucuuccucc

SEQ ID NO: 22393 - RNA, 32 nt, Homo Sapiens
ggaaagaacuacuagcuacaaaaaauauuuug

SEQ ID NO: 22394 - RNA, 32 nt, Homo Sapiens
ugucuggagaagugacacaggauuuacugggg

SEQ ID NO: 22395 - RNA, 32 nt, Homo Sapiens
ccacguggcugagacuauaggugcuugccacu

SEQ ID NO: 22396 - RNA, 32 nt, Homo Sapiens
ggggcucagcacccucuucccugaagggcacu

SEQ ID NO: 22397 - RNA, 32 nt, Homo Sapiens
cgguagggaaaagaacugcugggugggggccu

SEQ ID NO: 22398 - RNA, 32 nt, Homo Sapiens
caagguggggcccucgacugucuuguauuggc

SEQ ID NO: 22399 - RNA, 32 nt, Homo Sapiens
gcuguggugccaucaugguucacugcagccuu

SEQ ID NO: 22400 - RNA, 32 nt, Homo Sapiens
uggcucagcucugcgugugaagagggaaaagg

SEQ ID NO: 22401 - RNA, 32 nt, Homo Sapiens
ggacuggggccuccccaccucccucucggcug

SEQ ID NO: 22402 - RNA, 32 nt, Homo Sapiens
uagaaaaugauuauaaugauuccucuuaaaua

SEQ ID NO: 22403 - RNA, 32 nt, Homo Sapiens
gucacagggagaaacaaguacuguagcagauc

SEQ ID NO: 22404 - RNA, 32 nt, Homo Sapiens
gaucuauaaaacaacuaaagguaauuuuuagu

SEQ ID NO: 22405 - RNA, 32 nt, Homo Sapiens
aaaauugugugagccaauucccauaacagaua

SEQ ID NO: 22406 - RNA, 32 nt, Homo Sapiens
uagccucccacccaccagacaaaggugcggga

SEQ ID NO: 22407 - RNA, 32 nt, Homo Sapiens
uaaggguacuguauguaaaacucuguauuaaa

SEQ ID NO: 22408 - RNA, 32 nt, Homo Sapiens
ggucaucgucuucggcuucaacacccgcucgg

SEQ ID NO: 22409 - RNA, 32 nt, Homo Sapiens
gugagcacggaauagcugggcggcggcugguc

SEQ ID NO: 22410 - RNA, 31 nt, Homo Sapiens
gcagcggcgccagucgcuccuggcaccaugg

SEQ ID NO: 22411 - RNA, 32 nt, Homo Sapiens
uuggccaugugugcuucaguguaaccaagauu

SEQ ID NO: 22412 - RNA, 32 nt, Homo Sapiens
ugaguaucuuuaaauauaaucccuuuacaucu

SEQ ID NO: 22413 - RNA, 32 nt, Homo Sapiens
cugcaauaaccacccaguggcuccucagcugu

SEQ ID NO: 22414 - RNA, 32 nt, Homo Sapiens
ggcuuaacccucaucacuucugaagcugaugg

SEQ ID NO: 22415 - RNA, 32 nt, Homo Sapiens
uuuggugcauuacuuggucaauucaggguuga

SEQ ID NO: 22416 - RNA, 32 nt, Homo Sapiens
cacauuacuugaugguaaccacuucaaaagga

SEQ ID NO: 22417 - RNA, 32 nt, Homo Sapiens
uuccucuggcccaggcgccgcgcggacccggc

SEQ ID NO: 22418 - RNA, 32 nt, Homo Sapiens
cgcccccggcucccccgcacgcaugcauccac

SEQ ID NO: 22419 - RNA, 32 nt, Homo Sapiens
cacuccagacugcaccggcauggcacugacug

SEQ ID NO: 22420 - RNA, 32 nt, Homo Sapiens
guaugaaguagcauuuugggggugggugggug

SEQ ID NO: 22421 - RNA, 32 nt, Homo Sapiens
ugcaggggcggggcuccugugcugcugcgcgc

SEQ ID NO: 22422 - RNA, 32 nt, Homo Sapiens
gccaagacugugacacccuuucuggggcucug

SEQ ID NO: 22423 - RNA, 32 nt, Homo Sapiens
cccagggcccaccagcagcugauguugccucc

SEQ ID NO: 22424 - RNA, 32 nt, Homo Sapiens
caaaauaaccucaggaggagcagcgaacacuu

SEQ ID NO: 22425 - RNA, 31 nt, Homo Sapiens
ucguccaaauaaaaugcaugguguaccagaa

SEQ ID NO: 22426 - RNA, 32 nt, Homo Sapiens
acguuccgcccggugccugggacgggcucagc

SEQ ID NO: 22427 - RNA, 32 nt, Homo Sapiens
uucuccaguccucuaguuuuugaaagugauuc

SEQ ID NO: 22428 - RNA, 32 nt, Homo Sapiens
uugagguauauuuuaaauguuuuaaggaugcu

SEQ ID NO: 22429 - RNA, 32 nt, Homo Sapiens
gcuggcaagaggagcugcuuguucccaccagg

SEQ ID NO: 22430 - RNA, 32 nt, Homo Sapiens
agccgagcugggggcgcagagcgcgggaggcg

SEQ ID NO: 22431 - RNA, 32 nt, Homo Sapiens
cagaccggucuucaaaggaaaagccuguccga

SEQ ID NO: 22432 - RNA, 32 nt, Homo Sapiens
agcaucaacaauaagauaaccuuuaaguaugg

SEQ ID NO: 22433 - RNA, 32 nt, Homo Sapiens
gacugaaaaaaauuauuauuauaaaucaccaa

SEQ ID NO: 22434 - RNA, 32 nt, Homo Sapiens
ggccuacgaagagggccuggcgcgccucaaga

SEQ ID NO: 22435 - RNA, 32 nt, Homo Sapiens
aauuccugggcucgagagagccacucaucccc

SEQ ID NO: 22436 - RNA, 32 nt, Homo Sapiens
cgcuuuccccacgaaugagaucuuugcaauga

SEQ ID NO: 22437 - RNA, 32 nt, Homo Sapiens
aaaagauuuagcaggcuagaccaucuaaguag

SEQ ID NO: 22438 - RNA, 32 nt, Homo Sapiens
aggcuucuggcaggauuugucagauaaucaag

SEQ ID NO: 22439 - RNA, 32 nt, Homo Sapiens
uguuugaaacaucuacauccaccauuuguuau

SEQ ID NO: 22440 - RNA, 32 nt, Homo Sapiens
uaaagaggaugugcggaaaugccuggaugccc

SEQ ID NO: 22441 - RNA, 32 nt, Homo Sapiens
auucuugugauuuuccuuccaaguguuucagu

SEQ ID NO: 22442 - RNA, 32 nt, Homo Sapiens
guuuuuaauagcuuguaaauguaaucucaagu

SEQ ID NO: 22443 - RNA, 32 nt, Homo Sapiens
ccgucgcugcgcggcccaccccggaugucagc

SEQ ID NO: 22444 - RNA, 32 nt, Homo Sapiens
uagaugauuuuguagaauaugcacggccagua

SEQ ID NO: 22445 - RNA, 32 nt, Homo Sapiens
gggccugcuucuccccagcagugcuuacaggg

SEQ ID NO: 22446 - RNA, 32 nt, Homo Sapiens
auucguggggagagggcgugauuguuuugagu

SEQ ID NO: 22447 - RNA, 32 nt, Homo Sapiens
ccagcccuggcgugggcccagcccggcccagg

SEQ ID NO: 22448 - RNA, 32 nt, Homo Sapiens
gaccuggaaaagacagagucaaagcuggguga

SEQ ID NO: 22449 - RNA, 32 nt, Homo Sapiens
gugauagaacaaaagaggauuaguagaaaaua

SEQ ID NO: 22450 - RNA, 32 nt, Homo Sapiens
ggugcacuuacccucuccucucuucuccuauc

SEQ ID NO: 22451 - RNA, 32 nt, Homo Sapiens
gugagcuguuuccauguuuucaaagcacagca

SEQ ID NO: 22452 - RNA, 32 nt, Homo Sapiens
uaaaaucuuucucucuagucuuucucacuugu

SEQ ID NO: 22453 - RNA, 32 nt, Homo Sapiens
gcagggugugcccuuccuccgcaugccccucc

SEQ ID NO: 22454 - RNA, 32 nt, Homo Sapiens
ucucauuugaaguucuuuuuuauuauguuaaa

SEQ ID NO: 22455 - RNA, 32 nt, Homo Sapiens
cagguccacuuccggcgccgcggcuguuccgg

SEQ ID NO: 22456 - RNA, 32 nt, Homo Sapiens
augacauguucccucuuacuugaaaguugugu

SEQ ID NO: 22457 - RNA, 32 nt, Homo Sapiens
ucaguguaaaaaacugaucucuggagacauuu

SEQ ID NO: 22458 - RNA, 32 nt, Homo Sapiens
aaaccuuugguggcugggauaugauggguuag

SEQ ID NO: 22459 - RNA, 32 nt, Homo Sapiens
gaagugagcuguuuuacuacaaugaauucguu

SEQ ID NO: 22460 - RNA, 32 nt, Homo Sapiens
cuauauggaauuuaggauaaagaauauuuaca

SEQ ID NO: 22461 - RNA, 32 nt, Homo Sapiens
uugaacuggaagcaaguugaccaaggacuuau

SEQ ID NO: 22462 - RNA, 32 nt, Homo Sapiens
ucaaggucugguguccugggggucuguggggc

SEQ ID NO: 22463 - RNA, 32 nt, Homo Sapiens
cuacguuuccaccuccucccccuccuucagcc

SEQ ID NO: 22464 - RNA, 32 nt, Homo Sapiens
aaccucccggccugggcuucugggcugggacg

SEQ ID NO: 22465 - RNA, 32 nt, Homo Sapiens
gucuggggccccaggcuuuccccugccucgcg

SEQ ID NO: 22466 - RNA, 32 nt, Homo Sapiens
auguuuauauaaaauccaucucugugugcuuu

SEQ ID NO: 22467 - RNA, 32 nt, Homo Sapiens
uuauauuucaaaguacacuaagaucguugaag

SEQ ID NO: 22468 - RNA, 32 nt, Homo Sapiens
ggccaggaggccgucgccgugggaaugcaguc

SEQ ID NO: 22469 - RNA, 32 nt, Homo Sapiens
uuauauagagcacggaaagauaaagaauugaa

SEQ ID NO: 22470 - RNA, 32 nt, Homo Sapiens
uuuguuugagguuuaaaacaauucaauuacaa

SEQ ID NO: 22471 - RNA, 32 nt, Homo Sapiens
agaucgcccuuugcccccuccccuccccugac

SEQ ID NO: 22472 - RNA, 32 nt, Homo Sapiens
cuacgcuagagggcuuccugugugccgggcac

SEQ ID NO: 22473 - RNA, 32 nt, Homo Sapiens
gacuucugccagcauaauacuugcuuuggaaa

SEQ ID NO: 22474 - RNA, 32 nt, Homo Sapiens
uaucaaggccccuccgcccccgaacccugggg

SEQ ID NO: 22475 - RNA, 32 nt, Homo Sapiens
uucauauuugauguuuuguuuauuuuuguccu

SEQ ID NO: 22476 - RNA, 32 nt, Homo Sapiens
gggcaucuuggguaucccacuccuucucccca

SEQ ID NO: 22477 - RNA, 32 nt, Homo Sapiens
ucaacucaaccuggacacucucuucucugcug

SEQ ID NO: 22478 - RNA, 32 nt, Homo Sapiens
aauguuugacuucguauugacccuuaucugua

SEQ ID NO: 22479 - RNA, 32 nt, Homo Sapiens
auuucucauguuuguucauucuaguuuauauu

SEQ ID NO: 22480 - RNA, 32 nt, Homo Sapiens
cccggccccuccccagccugagucuucuccuu

SEQ ID NO: 22481 - RNA, 32 nt, Homo Sapiens
auaaaaauacgggaauaaguuguggaaagcca

SEQ ID NO: 22482 - RNA, 31 nt, Homo Sapiens
aaguagaaccucaguuugcuaacugaagugu

SEQ ID NO: 22483 - RNA, 32 nt, Homo Sapiens
ccauacugguaauugggguacucuguauaugu

SEQ ID NO: 22484 - RNA, 32 nt, Homo Sapiens
ccugugccgagccuccucccgcuauggguacg

SEQ ID NO: 22485 - RNA, 32 nt, Homo Sapiens
ggcccagaucacagaucccaugugagaaagag

SEQ ID NO: 22486 - RNA, 32 nt, Homo Sapiens
ugcaucggccugccuguguuucccucuuaggu

SEQ ID NO: 22487 - RNA, 32 nt, Homo Sapiens
caaaacaaacaaaaacaaaaaagccgaaauaa

SEQ ID NO: 22488 - RNA, 32 nt, Homo Sapiens
ccaccaccaacacaacagcaauggcaacaccg

SEQ ID NO: 22489 - RNA, 32 nt, Homo Sapiens
ugccacugcccagguagccccuccccagcccu

SEQ ID NO: 22490 - RNA, 32 nt, Homo Sapiens
ugccucccaguggccuggcuugucggagcaag

SEQ ID NO: 22491 - RNA, 32 nt, Homo Sapiens
cacucugcaggagaccaagagaagggggaaau

SEQ ID NO: 22492 - RNA, 32 nt, Homo Sapiens
ucucacugugcugaugcccccgggaaggccuc

SEQ ID NO: 22493 - RNA, 32 nt, Homo Sapiens
uucacccuuguacagccaaaauaauguauaua

SEQ ID NO: 22494 - RNA, 32 nt, Homo Sapiens
cgcaugggggcggggagucagaggugacuggc

SEQ ID NO: 22495 - RNA, 32 nt, Homo Sapiens
ucugggaggacgggacggugucucuggccagc

SEQ ID NO: 22496 - RNA, 32 nt, Homo Sapiens
gugguggugagguuggaaccaguuggauuaug

SEQ ID NO: 22497 - RNA, 32 nt, Homo Sapiens
gacccagcaucgcucaucacaaugaagaacca

SEQ ID NO: 22498 - RNA, 32 nt, Homo Sapiens
guccuuuuaggggaaccaguuuuuagaagguu

SEQ ID NO: 22499 - RNA, 32 nt, Homo Sapiens
ccaaaucucaagguccucuggauggcagguga

SEQ ID NO: 22500 - RNA, 32 nt, Homo Sapiens
agaucgcccugacgccagcuccagguggaguu

SEQ ID NO: 22501 - RNA, 32 nt, Homo Sapiens
uguggcauguugguuuugucucucuuucuuuu

SEQ ID NO: 22502 - RNA, 32 nt, Homo Sapiens
ccucuccugguaucaggccuagaugguacuuc

SEQ ID NO: 22503 - RNA, 32 nt, Homo Sapiens
guaguuggaaagauuauuugaaaugacuaacu

SEQ ID NO: 22504 - RNA, 32 nt, Homo Sapiens
ggggagacgggccggaggagcagugggggccg

SEQ ID NO: 22505 - RNA, 32 nt, Homo Sapiens
aucugguccaccugcgggcgggggcgaaaggg

SEQ ID NO: 22506 - RNA, 32 nt, Homo Sapiens
gaguuauuuauauaaauguugagauuuugcac

SEQ ID NO: 22507 - RNA, 32 nt, Homo Sapiens
cccgucccagccuccccuccccaccccaugca

SEQ ID NO: 22508 - RNA, 32 nt, Homo Sapiens
gaauggggccggggcuggccuggccuccccug

SEQ ID NO: 22509 - RNA, 32 nt, Homo Sapiens
cuuccuaagaaacuucacaucaggugauggau

SEQ ID NO: 22510 - RNA, 32 nt, Homo Sapiens
gccccggacagcuccaggauccgugcaguggc

SEQ ID NO: 22511 - RNA, 32 nt, Homo Sapiens
ccagugagaagcugaggccuaugcagacaucu

SEQ ID NO: 22512 - RNA, 32 nt, Homo Sapiens
ucgggugggacucugcagcugcuucgcagcgc

SEQ ID NO: 22513 - RNA, 32 nt, Homo Sapiens
aaagcagcacugguuuugaguuuucuaagcuc

SEQ ID NO: 22514 - RNA, 32 nt, Homo Sapiens
ucaccugccugcccagcgccaggauggccacc

SEQ ID NO: 22515 - RNA, 32 nt, Homo Sapiens
gcacuccaaccugggcaacagagccagacccu

SEQ ID NO: 22516 - RNA, 32 nt, Homo Sapiens
ucagccgcuaccugcuggccuuccuggcagau

SEQ ID NO: 22517 - RNA, 32 nt, Homo Sapiens
cccuugggaggggacaccugaggcagccagcg

SEQ ID NO: 22518 - RNA, 32 nt, Homo Sapiens
cggcagcaaacgccugagugcugcugccuucg

SEQ ID NO: 22519 - RNA, 32 nt, Homo Sapiens
ugucuguauguggaggacauguucccauggau

SEQ ID NO: 22520 - RNA, 32 nt, Homo Sapiens
gucagagcccugggucaaaaccacucagccca

SEQ ID NO: 22521 - RNA, 32 nt, Homo Sapiens
ugcuacugggagcugauguggugcuucaccua

SEQ ID NO: 22522 - RNA, 32 nt, Homo Sapiens
auacagugaauacaauccuuugcauuguuaag

SEQ ID NO: 22523 - RNA, 32 nt, Homo Sapiens
ugaaacaggauggcagaauaggcucacaugcc

SEQ ID NO: 22524 - RNA, 32 nt, Homo Sapiens
uuugaagaaacaggccguugaccccaucuuug

SEQ ID NO: 22525 - RNA, 32 nt, Homo Sapiens
aaagauguaaaauuauauuaaguaauuauaau

SEQ ID NO: 22526 - RNA, 32 nt, Homo Sapiens
uuguauuuucccuucuguuuuagcucuggaaa

SEQ ID NO: 22527 - RNA, 32 nt, Homo Sapiens
ggucaccucgaaaguucucaccacuaaagaaa

SEQ ID NO: 22528 - RNA, 32 nt, Homo Sapiens
auuggaagauuaacauuauuuaccaagaagga

SEQ ID NO: 22529 - RNA, 32 nt, Homo Sapiens
aagauacacugacuuggugcaaggccaucugc

SEQ ID NO: 22530 - RNA, 32 nt, Homo Sapiens
acugauuucuucauucuccauuuagcaagguc

SEQ ID NO: 22531 - RNA, 32 nt, Homo Sapiens
ucacgcguccccaaggccuccugugacuggca

SEQ ID NO: 22532 - RNA, 32 nt, Homo Sapiens
cccagcccacccauugaagucuccuugggcca

SEQ ID NO: 22533 - RNA, 32 nt, Homo Sapiens
ucccaccucugagacuccagugacugcugccu

SEQ ID NO: 22534 - RNA, 32 nt, Homo Sapiens
cuuucuguggcgcccaccacucagcccuuccc

SEQ ID NO: 22535 - RNA, 32 nt, Homo Sapiens
aaaggcagcagaaacuucugcagacuuaaaug

SEQ ID NO: 22536 - RNA, 32 nt, Homo Sapiens
auuuuucauuuucuuucuuguuugacuguaug

SEQ ID NO: 22537 - RNA, 32 nt, Homo Sapiens
ggaaaagaaagaugaagcuuugauaucucgac

SEQ ID NO: 22538 - RNA, 31 nt, Homo Sapiens
uucacgugccaccugucuccaaggguuugca

SEQ ID NO: 22539 - RNA, 32 nt, Homo Sapiens
cuuuuccccagaaacugggaugaccuggaccc

SEQ ID NO: 22540 - RNA, 32 nt, Homo Sapiens
gccuguagucccagcuacucggcaggcugcag

SEQ ID NO: 22541 - RNA, 32 nt, Homo Sapiens
uuuuggugauucaaauggguuuuccacgcuag

SEQ ID NO: 22542 - RNA, 32 nt, Homo Sapiens
cgugagucgccauggcgacgccggcgggucug

SEQ ID NO: 22543 - RNA, 27 nt, Homo Sapiens
accugaaccuucuuccucuucccccag

SEQ ID NO: 22544 - RNA, 32 nt, Homo Sapiens
gcuuauuuuaucacuucuuugcaugccuggua

SEQ ID NO: 22545 - RNA, 32 nt, Homo Sapiens
aagacaaagauauuuagguugagcagcuauua

SEQ ID NO: 22546 - RNA, 28 nt, Homo Sapiens
aagaugaguaaaagcaaagaugaugcuc

SEQ ID NO: 22547 - RNA, 32 nt, Homo Sapiens
ggaaaaagcgucuuuacaaauguaagugaccu

SEQ ID NO: 22548 - RNA, 32 nt, Homo Sapiens
uuguguguuucauuugugugauuucguaccaa

SEQ ID NO: 22549 - RNA, 32 nt, Homo Sapiens
gaucaucaagacagauggcaaaggguggggcc

SEQ ID NO: 22550 - RNA, 32 nt, Homo Sapiens
cauccugagccagcugcugaggcggcggcugg

SEQ ID NO: 22551 - RNA, 32 nt, Homo Sapiens
cuggccucaaugccagcuccugagcauccuuu

SEQ ID NO: 22552 - RNA, 32 nt, Homo Sapiens
acacggcgacccgacauagugagacccugucu

SEQ ID NO: 22553 - RNA, 32 nt, Homo Sapiens
cagaacuuguguuuuucucaucuuuaaaauac

SEQ ID NO: 22554 - RNA, 32 nt, Homo Sapiens
uagaauuuuauaaacacauacaugauaccauc

SEQ ID NO: 22555 - RNA, 32 nt, Homo Sapiens
uccgagggaggaaaacugauggagagcacaau

SEQ ID NO: 22556 - RNA, 32 nt, Homo Sapiens
cacaggugcugcccuugcugcugcuggucggg

SEQ ID NO: 22557 - RNA, 32 nt, Homo Sapiens
acauagcacccucaucugggaauagggaaggc

SEQ ID NO: 22558 - RNA, 32 nt, Homo Sapiens
auggaagagcccccuccagaccacucuacagc

SEQ ID NO: 22559 - RNA, 32 nt, Homo Sapiens
cacgucagcuaagggggacagugaugucaugu

SEQ ID NO: 22560 - RNA, 32 nt, Homo Sapiens
gcugggauuacagacaggcaugugcuauuaca

SEQ ID NO: 22561 - RNA, 32 nt, Homo Sapiens
ccaucaccucacacuuuuuuuuuuuuuuucuu

SEQ ID NO: 22562 - RNA, 32 nt, Homo Sapiens
cggcgggcggcgagcggcgcgcacaauccucg

SEQ ID NO: 22563 - RNA, 32 nt, Homo Sapiens
accagccgcgcuucuguccgccugcagggcau

SEQ ID NO: 22564 - RNA, 32 nt, Homo Sapiens
accugaccccccucccuucccuccccccucag

SEQ ID NO: 22565 - RNA, 32 nt, Homo Sapiens
uuguccuucagauuaaucuggaugucuuuuau

SEQ ID NO: 22566 - RNA, 32 nt, Homo Sapiens
agaucauccuuaaauuuugaagcaagugagag

SEQ ID NO: 22567 - RNA, 32 nt, Homo Sapiens
ucagaguggccuuaucuugaccucaguucugg

SEQ ID NO: 22568 - RNA, 32 nt, Homo Sapiens
cuuggccacaacuauacuccugucccacccca

SEQ ID NO: 22569 - RNA, 32 nt, Homo Sapiens
uugucucccuaccgcgcgcggggccgauucuc

SEQ ID NO: 22570 - RNA, 32 nt, Homo Sapiens
uggcuggcuggccugcccugaauugagagaga

SEQ ID NO: 22571 - RNA, 28 nt, Homo Sapiens
aaggaggaggcuaccagggccagagaca

SEQ ID NO: 22572 - RNA, 32 nt, Homo Sapiens
ccugccauaagucauggaauaguuuuuauauu

SEQ ID NO: 22573 - RNA, 32 nt, Homo Sapiens
gguaucuccaccauuucuucugcacaaagaug

SEQ ID NO: 22574 - RNA, 32 nt, Homo Sapiens
cacacucucacuuccuuuauuagccuuauaca

SEQ ID NO: 22575 - RNA, 32 nt, Homo Sapiens
acggagcacaggucucugcugcugaugaagcu

SEQ ID NO: 22576 - RNA, 32 nt, Homo Sapiens
uuuucaaauguucugcuucaugugucugugaa

SEQ ID NO: 22577 - RNA, 32 nt, Homo Sapiens
caacauccugggauugggacccacuuucuggg

SEQ ID NO: 22578 - RNA, 32 nt, Homo Sapiens
ggccacagcuggagcgccaaucgugcugcccc

SEQ ID NO: 22579 - RNA, 32 nt, Homo Sapiens
accgcagcacgcuggagucccgcuuagguacc

SEQ ID NO: 22580 - RNA, 32 nt, Homo Sapiens
auuuuggguugccacaucaguuuauaaauuug

SEQ ID NO: 22581 - RNA, 30 nt, Homo Sapiens
cuaaucccccaaaggaccuauuugagcugu

SEQ ID NO: 22582 - RNA, 28 nt, Homo Sapiens
ggacagcgguggaggccgagguggugga

SEQ ID NO: 22583 - RNA, 32 nt, Homo Sapiens
uuuucagaugacccagccaucuacaagaucug

SEQ ID NO: 22584 - RNA, 32 nt, Homo Sapiens
uucuuccaagggacagcgaucccgggacgguc

SEQ ID NO: 22585 - RNA, 32 nt, Homo Sapiens
agauugcuguggcccauccugauuccacaaac

SEQ ID NO: 22586 - RNA, 32 nt, Homo Sapiens
ggcaacaggagagacaggauugggccaacaag

SEQ ID NO: 22587 - RNA, 32 nt, Homo Sapiens
cuccagccucacucgcccuccucccucaccug

SEQ ID NO: 22588 - RNA, 31 nt, Homo Sapiens
ccugccccacccuccucauuaaaaacaaaua

SEQ ID NO: 22589 - RNA, 32 nt, Homo Sapiens
ccagagccauuuccauccugcagaagaagccc

SEQ ID NO: 22590 - RNA, 32 nt, Homo Sapiens
ucuguaggcaaaaugcuacaguucauaucuuc

SEQ ID NO: 22591 - RNA, 32 nt, Homo Sapiens
acuuguauuaauaaaaauguuauuuguacaaa

SEQ ID NO: 22592 - RNA, 32 nt, Homo Sapiens
uuccaagcagugccccacuucauggauuuaua

SEQ ID NO: 22593 - RNA, 32 nt, Homo Sapiens
ggaguuacccuggccuccuagggucccuuuuu

SEQ ID NO: 22594 - RNA, 32 nt, Homo Sapiens
cagggacaagauacucaccaggaugaggaaga

SEQ ID NO: 22595 - RNA, 32 nt, Homo Sapiens
ccucugcccaaccagguugcaguagcagugga

SEQ ID NO: 22596 - RNA, 32 nt, Homo Sapiens
ggggaggcagggguuggugcccugacuccugu

SEQ ID NO: 22597 - RNA, 32 nt, Homo Sapiens
gugccccucagccccagagacgccgccgcggc

SEQ ID NO: 22598 - RNA, 32 nt, Homo Sapiens
ggcgagugaggccccggucuuccuccucgucc

SEQ ID NO: 22599 - RNA, 32 nt, Homo Sapiens
cauuuuaauuucauauauaucuguaaagaguc

SEQ ID NO: 22600 - RNA, 32 nt, Homo Sapiens
uugguggggucagggaggaaaggcagaagcug

SEQ ID NO: 22601 - RNA, 32 nt, Homo Sapiens
aagguuggccucuggauggugaacgggcugug

SEQ ID NO: 22602 - RNA, 32 nt, Homo Sapiens
ugggcagguuccuggggccgccugcccugccu

SEQ ID NO: 22603 - RNA, 32 nt, Homo Sapiens
gaacugcccucccccuuagcucacagugccug

SEQ ID NO: 22604 - RNA, 32 nt, Homo Sapiens
cuauuagaugacuaaggaaaacuagaaaaaga

SEQ ID NO: 22605 - RNA, 32 nt, Homo Sapiens
cucgcuccuucccgcccuccccgcagcgccgg

SEQ ID NO: 22606 - RNA, 32 nt, Homo Sapiens
ucuucuucuuccuccaccacagaugaggacuc

SEQ ID NO: 22607 - RNA, 32 nt, Homo Sapiens
gagaggagggcagugaggagcgaggagcgggc

SEQ ID NO: 22608 - RNA, 32 nt, Homo Sapiens
uaguggcccugacuuccggucggcuggccagc

SEQ ID NO: 22609 - RNA, 32 nt, Homo Sapiens
gucugaaauggcugccucccagugucucugcu

SEQ ID NO: 22610 - RNA, 32 nt, Homo Sapiens
gagcugagggaguuaagagggccaaccuuagg

SEQ ID NO: 22611 - RNA, 32 nt, Homo Sapiens
ugccuccaguuucucucuacugcuguuuaucu

SEQ ID NO: 22612 - RNA, 32 nt, Homo Sapiens
uaacccuugacaaggucaaagaaagcuuuaaa

SEQ ID NO: 22613 - RNA, 32 nt, Homo Sapiens
cgcgggggccgcgcgucggaguuucccccuuu

SEQ ID NO: 22614 - RNA, 32 nt, Homo Sapiens
cccuccgcuccugcuguugcugccgggcagug

SEQ ID NO: 22615 - RNA, 32 nt, Homo Sapiens
acuccccuuccugcgugccccggagccgccaa

SEQ ID NO: 22616 - RNA, 32 nt, Homo Sapiens
gauacgcuuuugaguggucccagucguccuga

SEQ ID NO: 22617 - RNA, 32 nt, Homo Sapiens
gacagaacagacaugcacaggaccuggcggga

SEQ ID NO: 22618 - RNA, 32 nt, Homo Sapiens
agauccgcgucccgccucagcggccggaggac

SEQ ID NO: 22619 - RNA, 32 nt, Homo Sapiens
ggccggcagcgguggcagcggcagcggaggag

SEQ ID NO: 22620 - RNA, 32 nt, Homo Sapiens
aaucugacauuuuuaucaucuaauggacuauc

SEQ ID NO: 22621 - RNA, 32 nt, Homo Sapiens
aacgccuccccggcuggucgccggaagccuug

SEQ ID NO: 22622 - RNA, 32 nt, Homo Sapiens
uuagaggucuuacugcaauaagaaguaaugcc

SEQ ID NO: 22623 - RNA, 32 nt, Homo Sapiens
ccuuuggauugugaaaacugcugagagagacu

SEQ ID NO: 22624 - RNA, 32 nt, Homo Sapiens
gccgcagcacgcucggacgggccaggggcggc

SEQ ID NO: 22625 - RNA, 32 nt, Homo Sapiens
cggcggaggguggcugggaggggcgaggucac

SEQ ID NO: 22626 - RNA, 32 nt, Homo Sapiens
aagcccagaagcuucuuccugcugcaccuccc

SEQ ID NO: 22627 - RNA, 32 nt, Homo Sapiens
cugggaguucccuggggacccugagucuggag

SEQ ID NO: 22628 - RNA, 32 nt, Homo Sapiens
guguggcccuccccucccaccucccuguguau

SEQ ID NO: 22629 - RNA, 29 nt, Homo Sapiens
uaagauuaaaguuuaaauguuuuccacua

SEQ ID NO: 22630 - RNA, 32 nt, Homo Sapiens
acagcacugcccaggagaaggacugggccaga

SEQ ID NO: 22631 - RNA, 32 nt, Homo Sapiens
acggcgggccccaaccggccggaccucagcaa

SEQ ID NO: 22632 - RNA, 32 nt, Homo Sapiens
cacuugguugaaaauuguacuugaauacauac

SEQ ID NO: 22633 - RNA, 32 nt, Homo Sapiens
gauauuaaugaaacacuucaaaacacugaugu

SEQ ID NO: 22634 - RNA, 32 nt, Homo Sapiens
aauauuuugucaaauguguaucaaccaaauua

SEQ ID NO: 22635 - RNA, 32 nt, Homo Sapiens
gcuaaauuuuuuccuuuuaguagagacauggu

SEQ ID NO: 22636 - RNA, 32 nt, Homo Sapiens
cagaaaauaaccucguacucacaagccagugg

SEQ ID NO: 22637 - RNA, 32 nt, Homo Sapiens
uuaucucauugcuggcuucuuuccaaguugag

SEQ ID NO: 22638 - RNA, 32 nt, Homo Sapiens
cagcagagaacuggcccagagcccuuggagug

SEQ ID NO: 22639 - RNA, 32 nt, Homo Sapiens
aaagggugcgggaccccuccucaccgugcggu

SEQ ID NO: 22640 - RNA, 32 nt, Homo Sapiens
ccgggagggcgcggcccggguucccguucccc

SEQ ID NO: 22641 - RNA, 32 nt, Homo Sapiens
uuucaggaauaauaaagagcaugauuccacag

SEQ ID NO: 22642 - RNA, 32 nt, Homo Sapiens
aauagcuugaccacagucucuauccugggggu

SEQ ID NO: 22643 - RNA, 32 nt, Homo Sapiens
uacacugggggauucugcccuggcccaugcac

SEQ ID NO: 22644 - RNA, 32 nt, Homo Sapiens
ggaaucagaggugauuuuuucuuaccuuggau

SEQ ID NO: 22645 - RNA, 32 nt, Homo Sapiens
uggagcuuuccuucuuuuuucauuucaacuga

SEQ ID NO: 22646 - RNA, 32 nt, Homo Sapiens
ggcuugaguuaugagagaugcuuauuuauuca

SEQ ID NO: 22647 - RNA, 32 nt, Homo Sapiens
caguuuagguaauaaacuuuauuaugaaaguu

SEQ ID NO: 22648 - RNA, 32 nt, Homo Sapiens
caacucucagaaacuccagcugcccgaaaacu

SEQ ID NO: 22649 - RNA, 32 nt, Homo Sapiens
caggcccgcaccccggccucagggcgcucaga

SEQ ID NO: 22650 - RNA, 32 nt, Homo Sapiens
guuugucaagugagucaagacuugcuuuuguc

SEQ ID NO: 22651 - RNA, 32 nt, Homo Sapiens
gagggcuggugccuucggagccucccacugcc

SEQ ID NO: 22652 - RNA, 32 nt, Homo Sapiens
augguuggugguuuuccugcauuguaucuuuu

SEQ ID NO: 22653 - RNA, 32 nt, Homo Sapiens
cgcugcccugucagucgccugugagcuccugc

SEQ ID NO: 22654 - RNA, 32 nt, Homo Sapiens
aagauggcuuaacuaaaauacucaauuuaaua

SEQ ID NO: 22655 - RNA, 32 nt, Homo Sapiens
accuuucacccucaugaaaacacacauacacg

SEQ ID NO: 22656 - RNA, 32 nt, Homo Sapiens
auaaaugaggccgggcgcaguggugccuguaa

SEQ ID NO: 22657 - RNA, 32 nt, Homo Sapiens
gucugagcaccuugaggccuccuguuggaaac

SEQ ID NO: 22658 - RNA, 32 nt, Homo Sapiens
gcguccgucggucuuuccgugcccacgccgga

SEQ ID NO: 22659 - RNA, 32 nt, Homo Sapiens
accucuuccggucggcucugcccgcuguucug

SEQ ID NO: 22660 - RNA, 32 nt, Homo Sapiens
cggggccguggugcccguggaccuccuaaaac

SEQ ID NO: 22661 - RNA, 32 nt, Homo Sapiens
ugugauucauuuucuuaauccaaauauauaua

SEQ ID NO: 22662 - RNA, 32 nt, Homo Sapiens
ggcggccagggcagccccggcggcggcagcca

SEQ ID NO: 22663 - RNA, 32 nt, Homo Sapiens
gucggcaguuuuuuuucuuuuaaugugucaaa

SEQ ID NO: 22664 - RNA, 32 nt, Homo Sapiens
gugggcggcggcagcggacgagcggccaggcu

SEQ ID NO: 22665 - RNA, 32 nt, Homo Sapiens
uauuuugaacaaacagaaaagaacacggaaac

SEQ ID NO: 22666 - RNA, 32 nt, Homo Sapiens
gccuggcccagguggcuguuucccugaggacc

SEQ ID NO: 22667 - RNA, 32 nt, Homo Sapiens
aggcuagaagagccaaccaacagagaagggaa

SEQ ID NO: 22668 - RNA, 32 nt, Homo Sapiens
cuuuugguuuguggguccaggagaugaggcug

SEQ ID NO: 22669 - RNA, 32 nt, Homo Sapiens
gagcccagguugugcucacugcucucccguau

SEQ ID NO: 22670 - RNA, 32 nt, Homo Sapiens
uggugugagagaaggacauugacacugauuaa

SEQ ID NO: 22671 - RNA, 32 nt, Homo Sapiens
cuuccuucagguucuagauucuugcuacuuag

SEQ ID NO: 22672 - RNA, 32 nt, Homo Sapiens
acaauauugauuuuuccaaaccaucaaugugg

SEQ ID NO: 22673 - RNA, 32 nt, Homo Sapiens
cacagcuacugucucaggaaauccaaagagaa

SEQ ID NO: 22674 - RNA, 32 nt, Homo Sapiens
guuaagcaggacccgggugagccagugggcuu

SEQ ID NO: 22675 - RNA, 32 nt, Homo Sapiens
gccaggcccagccccaggccagucagccgcag

SEQ ID NO: 22676 - RNA, 32 nt, Homo Sapiens
cucuugcauccugguuauuaugcguucuuuga

SEQ ID NO: 22677 - RNA, 28 nt, Homo Sapiens
gauuuaagguguggacauuugagaaggu

SEQ ID NO: 22678 - RNA, 32 nt, Homo Sapiens
gagguugcagugagccgagauagcggcacugc

SEQ ID NO: 22679 - RNA, 32 nt, Homo Sapiens
ugaucccagguagcaauaauagauaacagagu

SEQ ID NO: 22680 - RNA, 32 nt, Homo Sapiens
guuuucuccaugauaacauagacaaacaguug

SEQ ID NO: 22681 - RNA, 32 nt, Homo Sapiens
aaaagccaugucccggcccuugcucaucaccu

SEQ ID NO: 22682 - RNA, 32 nt, Homo Sapiens
auuuucugcuuggaccucuuugguucucuccc

SEQ ID NO: 22683 - RNA, 32 nt, Homo Sapiens
ugcaccagggaaucgccauauuugaccagcau

SEQ ID NO: 22684 - RNA, 32 nt, Homo Sapiens
cucucagcucugcggccaccccguucccuccc

SEQ ID NO: 22685 - RNA, 32 nt, Homo Sapiens
ggcgcggaggugcggcggggagugggagccgg

SEQ ID NO: 22686 - RNA, 32 nt, Homo Sapiens
ucacagggugcgucgcugguaacccaugcucc

SEQ ID NO: 22687 - RNA, 32 nt, Homo Sapiens
ggauuuuauuuaugucuauuuauauguaaaug

SEQ ID NO: 22688 - RNA, 32 nt, Homo Sapiens
uggccccuuguacaccccaggagagaaguucu

SEQ ID NO: 22689 - RNA, 32 nt, Homo Sapiens
cauggccauggagaccuggggggcugggcaaa

SEQ ID NO: 22690 - RNA, 32 nt, Homo Sapiens
uuuucauauaaucucaucuguuuaccuagaag

SEQ ID NO: 22691 - RNA, 32 nt, Homo Sapiens
gcuagagguacuguuauuaauguaucagcaac

SEQ ID NO: 22692 - RNA, 32 nt, Homo Sapiens
ccauuaccucaucaguaauauucaccacauuu

SEQ ID NO: 22693 - RNA, 32 nt, Homo Sapiens
aaagagcugagacuagccuugcuggccccggc

SEQ ID NO: 22694 - RNA, 32 nt, Homo Sapiens
cuuucuagacugccaucucaugccagagggug

SEQ ID NO: 22695 - RNA, 32 nt, Homo Sapiens
ucggccuccgcgggcccggcccgcgucagcag

SEQ ID NO: 22696 - RNA, 32 nt, Homo Sapiens
gaggguugggacuucaacacagcuuuuugggg

SEQ ID NO: 22697 - RNA, 32 nt, Homo Sapiens
acagcaucaaggagccuaaagcuucccuggac

SEQ ID NO: 22698 - RNA, 32 nt, Homo Sapiens
cgccugcccucccgcaccuuccuccuccccgc

SEQ ID NO: 22699 - RNA, 30 nt, Homo Sapiens
uuaaucuuuuucuggggggaaaaccuuagu

SEQ ID NO: 22700 - RNA, 32 nt, Homo Sapiens
ccacucccugcccaccaauacccaggugagga

SEQ ID NO: 22701 - RNA, 31 nt, Homo Sapiens
ugcugcagucuuaucuucagagccugcagag

SEQ ID NO: 22702 - RNA, 32 nt, Homo Sapiens
ucugugccucaguuuccucaucugcaaaaugg

SEQ ID NO: 22703 - RNA, 32 nt, Homo Sapiens
ccaaauucaaccacauggcuggagaaucauuu

SEQ ID NO: 22704 - RNA, 32 nt, Homo Sapiens
caggccuccgcggaggacacgugucagcacgu

SEQ ID NO: 22705 - RNA, 32 nt, Homo Sapiens
ggaaggcgucacugccccggcggggagacggg

SEQ ID NO: 22706 - RNA, 31 nt, Homo Sapiens
ucccagcagcgcaagcugacgacagcaggug

SEQ ID NO: 22707 - RNA, 32 nt, Homo Sapiens
agcuagagaagcugaugcgcgggcucgaggcc

SEQ ID NO: 22708 - RNA, 32 nt, Homo Sapiens
uuguuugcgcuuaaauaucuuuuagaauacag

SEQ ID NO: 22709 - RNA, 32 nt, Homo Sapiens
ccuccacccgccgucucggccgcggccagcag

SEQ ID NO: 22710 - RNA, 32 nt, Homo Sapiens
ccuuuuuggagucuuuccuccuucgucuccau

SEQ ID NO: 22711 - RNA, 32 nt, Homo Sapiens
aggguuugggggaugccugggacuuuccuccg

SEQ ID NO: 22712 - RNA, 32 nt, Homo Sapiens
gugcauuaaaauugucuuuuguacuguaaguu

SEQ ID NO: 22713 - RNA, 32 nt, Homo Sapiens
gaagaacaucaccuaaagucugcacacgagcc

SEQ ID NO: 22714 - RNA, 32 nt, Homo Sapiens
uuccucucucuaugaccaugccgugaucgugu

SEQ ID NO: 22715 - RNA, 32 nt, Homo Sapiens
gagaugaugaacagaaguguauguaaauacag

SEQ ID NO: 22716 - RNA, 32 nt, Homo Sapiens
ugauuacuuuagauuuguuuuauuuucccucc

SEQ ID NO: 22717 - RNA, 32 nt, Homo Sapiens
uuuuuaaaacaaaaguaggaauauauaguaag

SEQ ID NO: 22718 - RNA, 32 nt, Homo Sapiens
cucccugucugcuuccgcagaugaaauucucu

SEQ ID NO: 22719 - RNA, 32 nt, Homo Sapiens
agaccuugacagaugccuggaggucagaaauc

SEQ ID NO: 22720 - RNA, 32 nt, Homo Sapiens
gcagcuguggacucgagugccauccacuggug

SEQ ID NO: 22721 - RNA, 32 nt, Homo Sapiens
uuuggacuuucccccucccauucccaguguuc

SEQ ID NO: 22722 - RNA, 32 nt, Homo Sapiens
acccacgcugcugucaccugaggggaaucugc

SEQ ID NO: 22723 - RNA, 32 nt, Homo Sapiens
acuccauuccaccugacccuguguguacaauc

SEQ ID NO: 22724 - RNA, 32 nt, Homo Sapiens
auuaaaaaacaaauucagaugaaauaucagua

SEQ ID NO: 22725 - RNA, 32 nt, Homo Sapiens
gccugucggccacaccccagacuccaggcccc

SEQ ID NO: 22726 - RNA, 32 nt, Homo Sapiens
gugagaaggcagccuucgaaguccugggcauu

SEQ ID NO: 22727 - RNA, 29 nt, Homo Sapiens
ugaagauaaaguuuuucacuguuggaagu

SEQ ID NO: 22728 - RNA, 30 nt, Homo Sapiens
cccucgucgcccguggagccgcgucuugga

SEQ ID NO: 22729 - RNA, 30 nt, Homo Sapiens
cauguaggcaggccugcagaccuuggccuu

SEQ ID NO: 22730 - RNA, 32 nt, Homo Sapiens
uuucauuguucuauuaacaauguuaaaugaag

SEQ ID NO: 22731 - RNA, 32 nt, Homo Sapiens
uuccaguuucagaguucucauuauuacucaaa

SEQ ID NO: 22732 - RNA, 32 nt, Homo Sapiens
agggagagacgugggcacaaaggucgcgggag

SEQ ID NO: 22733 - RNA, 32 nt, Homo Sapiens
uaaacauaaaagacaaggcaaagcccgcauaa

SEQ ID NO: 22734 - RNA, 32 nt, Homo Sapiens
gcaggcugcacccaccuccuccccuuccuacc

SEQ ID NO: 22735 - RNA, 32 nt, Homo Sapiens
cacagggugggcagcaccuucucccggcuucc

SEQ ID NO: 22736 - RNA, 32 nt, Homo Sapiens
gagaugccacuaccccuugauuuuccaucuaa

SEQ ID NO: 22737 - RNA, 32 nt, Homo Sapiens
cccugaauuuaaaagugaaucucugcuagaag

SEQ ID NO: 22738 - RNA, 32 nt, Homo Sapiens
guagagcucgggccagcuguaguucauucgcc

SEQ ID NO: 22739 - RNA, 29 nt, Homo Sapiens
ccgcguccgguccgcguuccuccgcccca

SEQ ID NO: 22740 - RNA, 32 nt, Homo Sapiens
uccuccucagggcagcgcuaggggccuccccu

SEQ ID NO: 22741 - RNA, 32 nt, Homo Sapiens
agaaggacgaacaauugcccuccuuuggaagu

SEQ ID NO: 22742 - RNA, 32 nt, Homo Sapiens
aauugucugaccaagcggaggaaguuccugca

SEQ ID NO: 22743 - RNA, 32 nt, Homo Sapiens
auccauucauggauuaauggauuauuaugagu

SEQ ID NO: 22744 - RNA, 32 nt, Homo Sapiens
ucccauggacauuuggggaaagggcuccuugg

SEQ ID NO: 22745 - RNA, 32 nt, Homo Sapiens
cuuccuuccuuccuuccuggacaggucgucag

SEQ ID NO: 22746 - RNA, 32 nt, Homo Sapiens
uuuuguaacuaugacagaaaugugcuauuuuu

SEQ ID NO: 22747 - RNA, 32 nt, Homo Sapiens
uuucauugguaaaacuuuuaaauucaacaccu

SEQ ID NO: 22748 - RNA, 32 nt, Homo Sapiens
accucccccugccuuccaaccccuuuccacga

SEQ ID NO: 22749 - RNA, 32 nt, Homo Sapiens
ugacugcaaccucugcuucccaggcucaagug

SEQ ID NO: 22750 - RNA, 32 nt, Homo Sapiens
cgcaucacccugccggcccggcgcgggucggg

SEQ ID NO: 22751 - RNA, 32 nt, Homo Sapiens
ugagacuguccucauucccauauguaauagac

SEQ ID NO: 22752 - RNA, 32 nt, Homo Sapiens
agucccaacugcauggcuuugggcaacugacu

SEQ ID NO: 22753 - RNA, 31 nt, Homo Sapiens
acaucccagccccagagucacuguccagccc

SEQ ID NO: 22754 - RNA, 32 nt, Homo Sapiens
uaucuccugugcuugacacagaagagaauaua

SEQ ID NO: 22755 - RNA, 32 nt, Homo Sapiens
agcaauucauggcucugaaggagcgcauuggc

SEQ ID NO: 22756 - RNA, 32 nt, Homo Sapiens
aacuuuaugcauuuuuaaaauuccuuuggauu

SEQ ID NO: 22757 - RNA, 32 nt, Homo Sapiens
cuuuucucccccucuuuuuuguucuaaagaaa

SEQ ID NO: 22758 - RNA, 32 nt, Homo Sapiens
agcaagucuuaccaguaggaaaccggaacuug

SEQ ID NO: 22759 - RNA, 32 nt, Homo Sapiens
acagguaugucugacgggacgcagcaccgugg

SEQ ID NO: 22760 - RNA, 27 nt, Homo Sapiens
auucugaaaaagacauaaaacagaauu

SEQ ID NO: 22761 - RNA, 32 nt, Homo Sapiens
uguguguucaacaucugaaacuuaggccaagu

SEQ ID NO: 22762 - RNA, 32 nt, Homo Sapiens
uucccaauauccaugaccuugacugaugcagg

SEQ ID NO: 22763 - RNA, 32 nt, Homo Sapiens
cucuuggcaucaccccaccccacauucucccc

SEQ ID NO: 22764 - RNA, 32 nt, Homo Sapiens
gcuaugaauauuuggggauacccugcaauaau

SEQ ID NO: 22765 - RNA, 32 nt, Homo Sapiens
uagggggccugggggagcaggacuuccugagu

SEQ ID NO: 22766 - RNA, 32 nt, Homo Sapiens
gcgggggaggggcgccugggggugcaagaggc

SEQ ID NO: 22767 - RNA, 32 nt, Homo Sapiens
ggagggaccugcccacuccccucccccauucc

SEQ ID NO: 22768 - RNA, 32 nt, Homo Sapiens
auguguauguauauaaagauagauauauacau

SEQ ID NO: 22769 - RNA, 32 nt, Homo Sapiens
gaagucggggugucagggagaaugguuuguag

SEQ ID NO: 22770 - RNA, 32 nt, Homo Sapiens
cugucauuacaaucaagugcuugucacagcug

SEQ ID NO: 22771 - RNA, 32 nt, Homo Sapiens
gaccccgcgcggggcgccggcuccauggcgac

SEQ ID NO: 22772 - RNA, 32 nt, Homo Sapiens
auccccaccucugcccucccacuuccuccccg

SEQ ID NO: 22773 - RNA, 32 nt, Homo Sapiens
auuggcgggaggggggcgcggggggggcgcgg

SEQ ID NO: 22774 - RNA, 29 nt, Homo Sapiens
acacaucuaauaaaaucugccuauguuuu

SEQ ID NO: 22775 - RNA, 29 nt, Homo Sapiens
uguugcaugcaguuauauuuucuauuuag

SEQ ID NO: 22776 - RNA, 32 nt, Homo Sapiens
cauuucucauuugguaaugguguuguggccuc

SEQ ID NO: 22777 - RNA, 32 nt, Homo Sapiens
uguaugugcagggaguacuguuaggcacauuc

SEQ ID NO: 22778 - RNA, 32 nt, Homo Sapiens
gccaccugcaagaggcggacuuugaagaaaac

SEQ ID NO: 22779 - RNA, 32 nt, Homo Sapiens
uaggcuugaggguggagagccaggccuccuca

SEQ ID NO: 22780 - RNA, 32 nt, Homo Sapiens
gugcacggagaagccagagccugagcgguccc

SEQ ID NO: 22781 - RNA, 32 nt, Homo Sapiens
aaucuucuccccagccccucccucccucagcc

SEQ ID NO: 22782 - RNA, 32 nt, Homo Sapiens
cuuagggcccagggggcggggaaggggggccg

SEQ ID NO: 22783 - RNA, 32 nt, Homo Sapiens
augccugguuugggggaggaggagggacuggg

SEQ ID NO: 22784 - RNA, 32 nt, Homo Sapiens
gccgcggacauuuuggugccaagccgaaccga

SEQ ID NO: 22785 - RNA, 32 nt, Homo Sapiens
ucgacgcggccgcgcuccgcucccgugaguaa

SEQ ID NO: 22786 - RNA, 32 nt, Homo Sapiens
aaaucuauagaucuuaugauuuuuuaguuaac

SEQ ID NO: 22787 - RNA, 32 nt, Homo Sapiens
cgaaagucaguguguucuuguaaaaugaauau

SEQ ID NO: 22788 - RNA, 32 nt, Homo Sapiens
uggggccugccagcugugcugcaaaggugggg

SEQ ID NO: 22789 - RNA, 32 nt, Homo Sapiens
caggucuugaauaaaauaauuguaaugagugc

SEQ ID NO: 22790 - RNA, 32 nt, Homo Sapiens
cacuuguuuuaacauugacauauguaaggguc

SEQ ID NO: 22791 - RNA, 32 nt, Homo Sapiens
guucugguucccucucucccccaugaauaucc

SEQ ID NO: 22792 - RNA, 32 nt, Homo Sapiens
gaccuuauccacucgcccuuucugcuggagcc

SEQ ID NO: 22793 - RNA, 32 nt, Homo Sapiens
gcgaugcggcccggccugugagcggccggcga

SEQ ID NO: 22794 - RNA, 32 nt, Homo Sapiens
ggaaacaaagaaagcuuuuaaaauauuuuugc

SEQ ID NO: 22795 - RNA, 32 nt, Homo Sapiens
ucaagccagcguugcauguuugggaugguggc

SEQ ID NO: 22796 - RNA, 32 nt, Homo Sapiens
uuuguuaacaacaaacuggauuuuaaaaguuc

SEQ ID NO: 22797 - RNA, 32 nt, Homo Sapiens
uccacucccuugccuuucccuagguugucccc

SEQ ID NO: 22798 - RNA, 32 nt, Homo Sapiens
gcuuaguagagcuuuuugcauguaucuucuaa

SEQ ID NO: 22799 - RNA, 32 nt, Homo Sapiens
cguccaccucaucuuccuccuguuggcuccuc

SEQ ID NO: 22800 - RNA, 32 nt, Homo Sapiens
aaggagcucuacagggucagcuuuguuugauu

SEQ ID NO: 22801 - RNA, 32 nt, Homo Sapiens
cucucaccauggaaacaaacugucccuguccc

SEQ ID NO: 22802 - RNA, 32 nt, Homo Sapiens
acuugagcuacaguaaacuacaugacaguguu

SEQ ID NO: 22803 - RNA, 32 nt, Homo Sapiens
gcacaggguggcuggccccggaugcugagagc

SEQ ID NO: 22804 - RNA, 32 nt, Homo Sapiens
ugcagacauugguguuucugcugugucccuug

SEQ ID NO: 22805 - RNA, 32 nt, Homo Sapiens
ugcuguuuucccuuuuacccacuucucuguau

SEQ ID NO: 22806 - RNA, 32 nt, Homo Sapiens
acuuaggaaagcuucuuauaguugcugacauu

SEQ ID NO: 22807 - RNA, 32 nt, Homo Sapiens
auggagggggcacgcuucuacaacccuccugg

SEQ ID NO: 22808 - RNA, 32 nt, Homo Sapiens
uuuaucuuugauucugaauaaauauuuuuugu

SEQ ID NO: 22809 - RNA, 32 nt, Homo Sapiens
cgcuugaggcagaacgcuguuaccucacugga

SEQ ID NO: 22810 - RNA, 32 nt, Homo Sapiens
uguaagagaauaaauuuacauauuuuaaacug

SEQ ID NO: 22811 - RNA, 32 nt, Homo Sapiens
uccugaugcccuccccaccucaaccgccuucu

SEQ ID NO: 22812 - RNA, 32 nt, Homo Sapiens
uucaauguucauuguuauuuguugcuccuuug

SEQ ID NO: 22813 - RNA, 32 nt, Homo Sapiens
gagccaguacucaaggcugaggcagaaaaaac

SEQ ID NO: 22814 - RNA, 32 nt, Homo Sapiens
caggggaucccucucucccuagugccuuccac

SEQ ID NO: 22815 - RNA, 30 nt, Homo Sapiens
gaaguugggauaagacggaugaagauuaca

SEQ ID NO: 22816 - RNA, 32 nt, Homo Sapiens
gcucagcggaauuuauauagagaugugauguu

SEQ ID NO: 22817 - RNA, 32 nt, Homo Sapiens
ggcaucguuguaauaaaggaggaaagugcgac

SEQ ID NO: 22818 - RNA, 32 nt, Homo Sapiens
gacaaagcggcuuucuaauagagagauuagua

SEQ ID NO: 22819 - RNA, 32 nt, Homo Sapiens
ugagauuuucaucuugaaauccaaguaagaug

SEQ ID NO: 22820 - RNA, 32 nt, Homo Sapiens
aucaaagagaccucucuuggggucuggaucag

SEQ ID NO: 22821 - RNA, 32 nt, Homo Sapiens
uggaugcuggaaccucaggguauggagcucac

SEQ ID NO: 22822 - RNA, 32 nt, Homo Sapiens
cuucaaaugucuggagaaauguguguagugcu

SEQ ID NO: 22823 - RNA, 32 nt, Homo Sapiens
cuggacagagcacacagcaaagggcucccguc

SEQ ID NO: 22824 - RNA, 32 nt, Homo Sapiens
cccucuccuuaaacaucagaaaacacccucua

SEQ ID NO: 22825 - RNA, 32 nt, Homo Sapiens
ccugaaguuacugaagauccacagaagugaaa

SEQ ID NO: 22826 - RNA, 28 nt, Homo Sapiens
ugauggcggcggccgcggugaugggccc

SEQ ID NO: 22827 - RNA, 31 nt, Homo Sapiens
gaucuaugguggaaccugccccggcgucgcc

SEQ ID NO: 22828 - RNA, 31 nt, Homo Sapiens
acaaggcggcacuguugcgugugcaccggcg

SEQ ID NO: 22829 - RNA, 32 nt, Homo Sapiens
aagcuauuuuugguaagaauuuuaaaucuuuu

SEQ ID NO: 22830 - RNA, 32 nt, Homo Sapiens
auuuaaauucuaaauuugauaaauuauuucag

SEQ ID NO: 22831 - RNA, 32 nt, Homo Sapiens
ccucaccucugagacaccccccaaccccaccu

SEQ ID NO: 22832 - RNA, 32 nt, Homo Sapiens
uuuauaugaggcacuguaguauuuucacauag

SEQ ID NO: 22833 - RNA, 32 nt, Homo Sapiens
gguauaggacaagggguggaagggcaggagcu

SEQ ID NO: 22834 - RNA, 32 nt, Homo Sapiens
uacagccaggccggcugccucaucucagcucu

SEQ ID NO: 22835 - RNA, 29 nt, Homo Sapiens
uaucuuaagaaggggcuguuaccaucuuu

SEQ ID NO: 22836 - RNA, 32 nt, Homo Sapiens
uuuccucagaguuaaaauuauuucccucauac

SEQ ID NO: 22837 - RNA, 32 nt, Homo Sapiens
auuaaaauuggucguuacuaaaauaguauagu

SEQ ID NO: 22838 - RNA, 32 nt, Homo Sapiens
uaccccaucgccagucgucuucugccacaaug

SEQ ID NO: 22839 - RNA, 32 nt, Homo Sapiens
aaagcaucuuaccaauaaggauaaauaucaua

SEQ ID NO: 22840 - RNA, 32 nt, Homo Sapiens
aucucccccuccccugucuccucccauacaug

SEQ ID NO: 22841 - RNA, 32 nt, Homo Sapiens
cccgggaggaggagguugcacugagccgagau

SEQ ID NO: 22842 - RNA, 32 nt, Homo Sapiens
gacugaccugcccuggcuggcuccuccucccu

SEQ ID NO: 22843 - RNA, 32 nt, Homo Sapiens
augcguugcaccugcccggcccgguggcugcg

SEQ ID NO: 22844 - RNA, 32 nt, Homo Sapiens
uuuucuuuucuuuuuaagagaagguguauuuc

SEQ ID NO: 22845 - RNA, 32 nt, Homo Sapiens
uggugucugucgucuccgcgagcuguuacugg

SEQ ID NO: 22846 - RNA, 32 nt, Homo Sapiens
accucggcccuggccugaccccggcggcccug

SEQ ID NO: 22847 - RNA, 32 nt, Homo Sapiens
cuuucuacgcccaguacgccaacuggucugcc

SEQ ID NO: 22848 - RNA, 32 nt, Homo Sapiens
uacucuuuaaaucuccaaaucaaaugaguuuc

SEQ ID NO: 22849 - RNA, 32 nt, Homo Sapiens
ccucugaauuugguuuuaaguuuaccuaguga

SEQ ID NO: 22850 - RNA, 32 nt, Homo Sapiens
uuugaaaggaaaaauguauaacaaguacuauu

SEQ ID NO: 22851 - RNA, 32 nt, Homo Sapiens
ucacugggaaauuuaaguuugcagaucccaca

SEQ ID NO: 22852 - RNA, 32 nt, Homo Sapiens
augccugugaugagaaagaacacagaacuucc

SEQ ID NO: 22853 - RNA, 32 nt, Homo Sapiens
auaaaaucacgcauucaaaaccaugaugagcc

SEQ ID NO: 22854 - RNA, 32 nt, Homo Sapiens
aguacaccuguacaaggucugcucuguucuaa

SEQ ID NO: 22855 - RNA, 32 nt, Homo Sapiens
aaagagaaaaggaaacgaagaagcucccucuc

SEQ ID NO: 22856 - RNA, 32 nt, Homo Sapiens
ggucaagauaaaugcagaaaauguuuagagag

SEQ ID NO: 22857 - RNA, 32 nt, Homo Sapiens
gccgagucgagccuaagcugccgcccgaucuu

SEQ ID NO: 22858 - RNA, 32 nt, Homo Sapiens
caaaggcagaaucugucacuugaaugaaggaa

SEQ ID NO: 22859 - RNA, 32 nt, Homo Sapiens
caaauuagcuaaugcuuucuuguuuuuauauu

SEQ ID NO: 22860 - RNA, 32 nt, Homo Sapiens
aaggcuucgcagcuuccaccggacacacuuuc

SEQ ID NO: 22861 - RNA, 32 nt, Homo Sapiens
cuuuaaccaacccucuuccuccccgucauugu

SEQ ID NO: 22862 - RNA, 32 nt, Homo Sapiens
uugaauggggacgcaguccuucaacagagaag

SEQ ID NO: 22863 - RNA, 32 nt, Homo Sapiens
ggauuuugccugcuauuguguaaaacccuggg

SEQ ID NO: 22864 - RNA, 32 nt, Homo Sapiens
aacccggcuuguaggaccucacaggaacccaa

SEQ ID NO: 22865 - RNA, 32 nt, Homo Sapiens
gccgcccacagcacacguucuccggacaggag

SEQ ID NO: 22866 - RNA, 32 nt, Homo Sapiens
uauacauucuuacuguuugaacaacuauugcc

SEQ ID NO: 22867 - RNA, 32 nt, Homo Sapiens
auugcuggaucauaugguaauuuuauuuuuag

SEQ ID NO: 22868 - RNA, 32 nt, Homo Sapiens
cacucucugggacucuccuccuccccuccucu

SEQ ID NO: 22869 - RNA, 32 nt, Homo Sapiens
aagauggugugagccauacacacagcaggauu

SEQ ID NO: 22870 - RNA, 32 nt, Homo Sapiens
caauaggaggaaguaaaggaaauuuuaccuac

SEQ ID NO: 22871 - RNA, 32 nt, Homo Sapiens
cauauugcuuacucugaauauucaguacuuuu

SEQ ID NO: 22872 - RNA, 32 nt, Homo Sapiens
uuccaccccucuucuugcuaucuccuauacca

SEQ ID NO: 22873 - RNA, 32 nt, Homo Sapiens
gggccaggugucccgggcgcgccacgaugcgg

SEQ ID NO: 22874 - RNA, 32 nt, Homo Sapiens
guguacuguggaguugacucgguguucugucc

SEQ ID NO: 22875 - RNA, 32 nt, Homo Sapiens
cuccacugcuuuccagacacuaaccaaggcuu

SEQ ID NO: 22876 - RNA, 32 nt, Homo Sapiens
cuacaggaauauauuuuuuaaacgaagagaca

SEQ ID NO: 22877 - RNA, 32 nt, Homo Sapiens
gauagucuuuugcuuuuggcaaaacucuacuu

SEQ ID NO: 22878 - RNA, 32 nt, Homo Sapiens
aaaaccaaauguuuauuuucuacguuucuuua

SEQ ID NO: 22879 - RNA, 32 nt, Homo Sapiens
ccugccacaucuccaggcugcgcacggccucg

SEQ ID NO: 22880 - RNA, 32 nt, Homo Sapiens
ggcucaccuugaucguaaguugacagugcugg

SEQ ID NO: 22881 - RNA, 32 nt, Homo Sapiens
uguggggaagcuguccugggggcuggggcgac

SEQ ID NO: 22882 - RNA, 32 nt, Homo Sapiens
uucucauuuuuaauuuuucugaaucuuuggcu

SEQ ID NO: 22883 - RNA, 32 nt, Homo Sapiens
ccucccacucuccacacccacagcagagacaa

SEQ ID NO: 22884 - RNA, 32 nt, Homo Sapiens
agacggcagacacaccugucccccagugaugc

SEQ ID NO: 22885 - RNA, 32 nt, Homo Sapiens
uuuucuuuauguguaguguuuucaugcuaccu

SEQ ID NO: 22886 - RNA, 32 nt, Homo Sapiens
ugaaugaacacacacacacacacacacacaca

SEQ ID NO: 22887 - RNA, 32 nt, Homo Sapiens
gaaaggaaaaggaagccaguauauugaagagg

SEQ ID NO: 22888 - RNA, 30 nt, Homo Sapiens
uauggugcggcgugacacgcagcgcuugcg

SEQ ID NO: 22889 - RNA, 32 nt, Homo Sapiens
ucagcauccaaguuuaugaaugacagcaguca

SEQ ID NO: 22890 - RNA, 32 nt, Homo Sapiens
guaugaugaaaauaauuuuccaaguaaaguga

SEQ ID NO: 22891 - RNA, 32 nt, Homo Sapiens
acaucacaaccuguacugugaguccauucuag

SEQ ID NO: 22892 - RNA, 32 nt, Homo Sapiens
ccuguauaagcacugaaaaacaacaacacaau

SEQ ID NO: 22893 - RNA, 32 nt, Homo Sapiens
uuuuuucuugauaaaccuuuuacaauuaaaaa

SEQ ID NO: 22894 - RNA, 32 nt, Homo Sapiens
aagcauguguugcaggugcuguuugauuuuuc

SEQ ID NO: 22895 - RNA, 32 nt, Homo Sapiens
aagcagugcagggauggguuuuccuagggaca

SEQ ID NO: 22896 - RNA, 32 nt, Homo Sapiens
gggcuggcaccucagcucagaaaagguagcag

SEQ ID NO: 22897 - RNA, 27 nt, Homo Sapiens
aaggccgccuucuucggccugcugggc

SEQ ID NO: 22898 - RNA, 32 nt, Homo Sapiens
ggcuugaacacauuacagaacuauguuuugac

SEQ ID NO: 22899 - RNA, 32 nt, Homo Sapiens
gagccugucuaaacuuucggagggaguuuauu

SEQ ID NO: 22900 - RNA, 32 nt, Homo Sapiens
gcgcgcgcccgcugcucucuccaggucccgcc

SEQ ID NO: 22901 - RNA, 32 nt, Homo Sapiens
aguuuaagccuauaaucucagcccuuuuggag

SEQ ID NO: 22902 - RNA, 29 nt, Homo Sapiens
guaugcauauguauauguacauagggaag

SEQ ID NO: 22903 - RNA, 32 nt, Homo Sapiens
agaguagaaucuguucaguacaguaugcagag

SEQ ID NO: 22904 - RNA, 32 nt, Homo Sapiens
gcccuuggccuggccuccucucaguuuggguu

SEQ ID NO: 22905 - RNA, 32 nt, Homo Sapiens
ccuuuacgaugauccacuuccaucuaaugauu

SEQ ID NO: 22906 - RNA, 32 nt, Homo Sapiens
uggggacgguuuggccacucucugguuuucaa

SEQ ID NO: 22907 - RNA, 32 nt, Homo Sapiens
gaggcaaaaaaauuauuaaaaauacauuaaag

SEQ ID NO: 22908 - RNA, 32 nt, Homo Sapiens
acgagugggucgucuuuuucuuagguguaugu

SEQ ID NO: 22909 - RNA, 32 nt, Homo Sapiens
cacugcgcccccagccccgcgccggugccacc

SEQ ID NO: 22910 - RNA, 32 nt, Homo Sapiens
acugucccugucccuauuuauccaccauccaa

SEQ ID NO: 22911 - RNA, 32 nt, Homo Sapiens
cuuauaaaaguacaaguagacguauauugucc

SEQ ID NO: 22912 - RNA, 32 nt, Homo Sapiens
gccugcgcuggagggaagaaggcgcuggagga

SEQ ID NO: 22913 - RNA, 32 nt, Homo Sapiens
uuguacauagugaggagcuuugaaacgaggau

SEQ ID NO: 22914 - RNA, 32 nt, Homo Sapiens
gcuuugggguaacagcaggauccaucaguuag

SEQ ID NO: 22915 - RNA, 32 nt, Homo Sapiens
auugaugggcauuugggcugguucaaagucuu

SEQ ID NO: 22916 - RNA, 32 nt, Homo Sapiens
ugugugugcauggguguacagccacgugucua

SEQ ID NO: 22917 - RNA, 32 nt, Homo Sapiens
uuaucaaguguuucauauacauugguuaauuu

SEQ ID NO: 22918 - RNA, 32 nt, Homo Sapiens
ggagaagugacugaaauuguaggaggcccagg

SEQ ID NO: 22919 - RNA, 30 nt, Homo Sapiens
ggagucugccuaccugucgcccugaccgcu

SEQ ID NO: 22920 - RNA, 31 nt, Homo Sapiens
agaaggcugccggguggggggagggcacccc

SEQ ID NO: 22921 - RNA, 30 nt, Homo Sapiens
gucaacuaaaagagacggaucugcaccucc

SEQ ID NO: 22922 - RNA, 32 nt, Homo Sapiens
guccggguggggggcggguuugauggggcacu

SEQ ID NO: 22923 - RNA, 32 nt, Homo Sapiens
acucuacccaccccccaggagguggaaugaca

SEQ ID NO: 22924 - RNA, 32 nt, Homo Sapiens
auccgcaauguugguuucacugagagcugccu

SEQ ID NO: 22925 - RNA, 32 nt, Homo Sapiens
acugauaaaaaauuaucuaaggaaaaaaacag

SEQ ID NO: 22926 - RNA, 32 nt, Homo Sapiens
gugcuuaguuuuaagaucaaccaauagauaua

SEQ ID NO: 22927 - RNA, 30 nt, Homo Sapiens
agccggagcgcgcagggaccaugucggcgg

SEQ ID NO: 22928 - RNA, 32 nt, Homo Sapiens
uaaggacuccaagcuaacgaugaccugugugg

SEQ ID NO: 22929 - RNA, 32 nt, Homo Sapiens
aaauuccacagugucaugguauggaugaaaaa

SEQ ID NO: 22930 - RNA, 32 nt, Homo Sapiens
agcaaaguuuuugaaccucugaguccaaagca

SEQ ID NO: 22931 - RNA, 32 nt, Homo Sapiens
guggccugccccagcucucuucuggcuuucug

SEQ ID NO: 22932 - RNA, 32 nt, Homo Sapiens
aggaggcugaggcaggagaaaagugugaaccc

SEQ ID NO: 22933 - RNA, 32 nt, Homo Sapiens
uccaggaagcugccuccucugggcccucuccu

SEQ ID NO: 22934 - RNA, 32 nt, Homo Sapiens
agaacaaaagaaacagaaucaauauauaaauu

SEQ ID NO: 22935 - RNA, 32 nt, Homo Sapiens
uaaaauucaccauuuuaacaacucuaaauugu

SEQ ID NO: 22936 - RNA, 32 nt, Homo Sapiens
cauauauuucaagaguaggaaaugggaacugg

SEQ ID NO: 22937 - RNA, 32 nt, Homo Sapiens
cacccagcaacagcggccacuuggcagugggg

SEQ ID NO: 22938 - RNA, 32 nt, Homo Sapiens
uucaauccuaguauauaguaccuaguauuaua

SEQ ID NO: 22939 - RNA, 32 nt, Homo Sapiens
gcuggccgggaagguggcagcggcaccggagg

SEQ ID NO: 22940 - RNA, 32 nt, Homo Sapiens
ugaggcguccgcggccgggauccggccccucc

SEQ ID NO: 22941 - RNA, 32 nt, Homo Sapiens
cuggaagaggucggggagcggggggagaggca

SEQ ID NO: 22942 - RNA, 32 nt, Homo Sapiens
ccacccgcuggcuuccagucuccaccuucccg

SEQ ID NO: 22943 - RNA, 31 nt, Homo Sapiens
agaauuuuuaguaauuaaaguacaggaggcu

SEQ ID NO: 22944 - RNA, 32 nt, Homo Sapiens
cuccuuccuaacuggggcuuucuugacaugua

SEQ ID NO: 22945 - RNA, 32 nt, Homo Sapiens
uuuacuuguaaaauggaauuucuguauguuua

SEQ ID NO: 22946 - RNA, 32 nt, Homo Sapiens
ggaccaggaacucuacuauuaagggacgacug

SEQ ID NO: 22947 - RNA, 32 nt, Homo Sapiens
cauugaaguuuacauuuccaugugcuguugau

SEQ ID NO: 22948 - RNA, 32 nt, Homo Sapiens
gcagcccgggacugcgcagcgccccgcgugcc

SEQ ID NO: 22949 - RNA, 32 nt, Homo Sapiens
uuagaugugaauggcagaauauuaagaagggg

SEQ ID NO: 22950 - RNA, 32 nt, Homo Sapiens
aauuuguagaauuauuuuuacgauuuccaaac

SEQ ID NO: 22951 - RNA, 32 nt, Homo Sapiens
caccuauagaaagacuauauagagauaagaga

SEQ ID NO: 22952 - RNA, 32 nt, Homo Sapiens
caauaaggaguuaaaggaaaagaggcuaccuu

SEQ ID NO: 22953 - RNA, 32 nt, Homo Sapiens
acauuuuaacugaguuccagugauaugacagg

SEQ ID NO: 22954 - RNA, 32 nt, Homo Sapiens
uaaccccgucugcuccucccucccgcagagac

SEQ ID NO: 22955 - RNA, 32 nt, Homo Sapiens
uaugcaucuuaccaaugauguaacgguuuaau

SEQ ID NO: 22956 - RNA, 32 nt, Homo Sapiens
cugcccagugcaaaccacuucuccaugcugca

SEQ ID NO: 22957 - RNA, 32 nt, Homo Sapiens
aacaaacaugaggcaaaagaaaaaauacaugu

SEQ ID NO: 22958 - RNA, 32 nt, Homo Sapiens
uaaaaagcugacucacugugagugaccuuggg

SEQ ID NO: 22959 - RNA, 32 nt, Homo Sapiens
cccacugaagcauuauacaauucuuaauucca

SEQ ID NO: 22960 - RNA, 32 nt, Homo Sapiens
guuaugacaaaccccucagggauuauucacau

SEQ ID NO: 22961 - RNA, 32 nt, Homo Sapiens
auucagaaauugagaaaaaauauuuugagcuc

SEQ ID NO: 22962 - RNA, 31 nt, Homo Sapiens
cuuacagauuugagaaaguugauucucaaau

SEQ ID NO: 22963 - RNA, 32 nt, Homo Sapiens
guugaagauuauaaauaccucuggagagcaag

SEQ ID NO: 22964 - RNA, 32 nt, Homo Sapiens
gggcggggccacugcucugugcugacgggcuc

SEQ ID NO: 22965 - RNA, 32 nt, Homo Sapiens
agggcugggagagcaggcagggugggagugag

SEQ ID NO: 22966 - RNA, 32 nt, Homo Sapiens
ucuguuagcaaucaugguuauuuuaaaaaccc

SEQ ID NO: 22967 - RNA, 32 nt, Homo Sapiens
cuguuggcagagcugggagggucuucauuaac

SEQ ID NO: 22968 - RNA, 32 nt, Homo Sapiens
aaaaaucucuuugguuuugauuucuugcauau

SEQ ID NO: 22969 - RNA, 32 nt, Homo Sapiens
agggcugaggaugggaacagggacagagggcc

SEQ ID NO: 22970 - RNA, 32 nt, Homo Sapiens
aaauuuagcuggaaauccuggauuuuuuucug

SEQ ID NO: 22971 - RNA, 32 nt, Homo Sapiens
cuggaggcccccagcccuucuggcaucugcug

SEQ ID NO: 22972 - RNA, 32 nt, Homo Sapiens
aaagaaaaaguaccuucaaccaauaaauucuu

SEQ ID NO: 22973 - RNA, 32 nt, Homo Sapiens
gcagacagacugcucccggugccaugaacgga

SEQ ID NO: 22974 - RNA, 32 nt, Homo Sapiens
auuuugaucuucucuauucuguguuagucuag

SEQ ID NO: 22975 - RNA, 32 nt, Homo Sapiens
uauaaaaagaauuuauacacuuaccucacauc

SEQ ID NO: 22976 - RNA, 32 nt, Homo Sapiens
caaauaucuauccuguauucucuuugccaucu

SEQ ID NO: 22977 - RNA, 32 nt, Homo Sapiens
auauauaggcuaaagauguaacuaggccauuu

SEQ ID NO: 22978 - RNA, 32 nt, Homo Sapiens
gugguggaaauauuuuuauauaauuuucauuu

SEQ ID NO: 22979 - RNA, 32 nt, Homo Sapiens
ugucugcaaaggugcugagcuguguugaucaa

SEQ ID NO: 22980 - RNA, 32 nt, Homo Sapiens
uauagcaaaacuuuuaaacuacagguaguuaa

SEQ ID NO: 22981 - RNA, 27 nt, Homo Sapiens
gaggggcgccuuuucagcccuuugcuc

SEQ ID NO: 22982 - RNA, 32 nt, Homo Sapiens
agaauggccaaccuaaaauuaugugugucuug

SEQ ID NO: 22983 - RNA, 32 nt, Homo Sapiens
ccccaccuugucauauaccaucaauaaaguac

SEQ ID NO: 22984 - RNA, 32 nt, Homo Sapiens
gcuugaacccgcgacagggagguugugaugag

SEQ ID NO: 22985 - RNA, 32 nt, Homo Sapiens
ggauggcggagcaaugggagcuggacgaggaa

SEQ ID NO: 22986 - RNA, 32 nt, Homo Sapiens
gagagcaucauucaaagaaccaggagcuuuag

SEQ ID NO: 22987 - RNA, 32 nt, Homo Sapiens
guccagugaugaugaauuccuuuagcuuuugu

SEQ ID NO: 22988 - RNA, 32 nt, Homo Sapiens
caauaucaguuauuuuuugaauaauaacuuuu

SEQ ID NO: 22989 - RNA, 32 nt, Homo Sapiens
uguccccacccuuuuauauaaaagaaagauuu

SEQ ID NO: 22990 - RNA, 32 nt, Homo Sapiens
uaaacuuaaaauugauuacauugagccuauuc

SEQ ID NO: 22991 - RNA, 32 nt, Homo Sapiens
aacaaugugauacguaaauuauagaaaaagaa

SEQ ID NO: 22992 - RNA, 32 nt, Homo Sapiens
cucuuacauauaagagggcucuacuaucuccu

SEQ ID NO: 22993 - RNA, 32 nt, Homo Sapiens
ucuuugggccucgccaucuuggcaccgccccg

SEQ ID NO: 22994 - RNA, 32 nt, Homo Sapiens
aaaugcugcagucaggaugccuugugguuuga

SEQ ID NO: 22995 - RNA, 31 nt, Homo Sapiens
cagagcccacccuaccaccagacacagagcc

SEQ ID NO: 22996 - RNA, 32 nt, Homo Sapiens
guuacuaacuucuccaaggagcaugucacucc

SEQ ID NO: 22997 - RNA, 30 nt, Homo Sapiens
aaccaaaagucuucugcagaaucucccacc

SEQ ID NO: 22998 - RNA, 29 nt, Homo Sapiens
ucuuacaguggaguauauuuuuuaaagca

SEQ ID NO: 22999 - RNA, 32 nt, Homo Sapiens
uuuccacuccaauuauuuagaacuuuauuugu

SEQ ID NO: 23000 - RNA, 32 nt, Homo Sapiens
agauagcucagguuauugcuaauggguuaaug

SEQ ID NO: 23001 - RNA, 32 nt, Homo Sapiens
cuccugugggaggggggaauguucucaguguc

SEQ ID NO: 23002 - RNA, 32 nt, Homo Sapiens
uguggaaagcucauuggugaaaacaguucuca

SEQ ID NO: 23003 - RNA, 32 nt, Homo Sapiens
ugauguacagaagucugaagugaggagugagg

SEQ ID NO: 23004 - RNA, 32 nt, Homo Sapiens
aagcaagaugagaaggcccagcuuguuauuaa

SEQ ID NO: 23005 - RNA, 32 nt, Homo Sapiens
cugggaggggagaugcucacauuuguacaggc

SEQ ID NO: 23006 - RNA, 32 nt, Homo Sapiens
guucugcguccgcugggcucggucaccgccuc

SEQ ID NO: 23007 - RNA, 32 nt, Homo Sapiens
cuuccuccucauauuucuguuucucauuugug

SEQ ID NO: 23008 - RNA, 32 nt, Homo Sapiens
uccccaucccccugauuuuauaugaagaaaua

SEQ ID NO: 23009 - RNA, 32 nt, Homo Sapiens
gcugggccccgcaggacaggccgcagcgggug

SEQ ID NO: 23010 - RNA, 32 nt, Homo Sapiens
augugcagucuauuuccagagcuuacuuaguu

SEQ ID NO: 23011 - RNA, 32 nt, Homo Sapiens
ccuaaaggaguaggcuuggggguggggagaga

SEQ ID NO: 23012 - RNA, 32 nt, Homo Sapiens
gggagccaccccggugagggggugugccacuu

SEQ ID NO: 23013 - RNA, 32 nt, Homo Sapiens
ccagcuggccggaagcgccaaacugcgucccu

SEQ ID NO: 23014 - RNA, 32 nt, Homo Sapiens
cacagcugccuccugagcugccugagccuggu

SEQ ID NO: 23015 - RNA, 32 nt, Homo Sapiens
aauguguauuuauuguuaauucuuaaaauagu

SEQ ID NO: 23016 - RNA, 32 nt, Homo Sapiens
gugggguuaugaaucugccaaaggugguauga

SEQ ID NO: 23017 - RNA, 32 nt, Homo Sapiens
ccuggcuuucuggccugagguggaagcagagg

SEQ ID NO: 23018 - RNA, 32 nt, Homo Sapiens
agaccuccacccacuguggacuccaugccucc

SEQ ID NO: 23019 - RNA, 32 nt, Homo Sapiens
cccugugauauuauugguaauauccuaaagag

SEQ ID NO: 23020 - RNA, 32 nt, Homo Sapiens
aagaguaggugacacuauaguuuaaaacacau

SEQ ID NO: 23021 - RNA, 32 nt, Homo Sapiens
auagcuauauuuuuuguaauuucuuuaaucug

SEQ ID NO: 23022 - RNA, 32 nt, Homo Sapiens
caucagaaugaccccucacccuccccgcgcuu

SEQ ID NO: 23023 - RNA, 32 nt, Homo Sapiens
auauuaacuuuauguagcaguucuuucuauau

SEQ ID NO: 23024 - RNA, 32 nt, Homo Sapiens
cagcuucuccccugggggccugagagacccuc

SEQ ID NO: 23025 - RNA, 32 nt, Homo Sapiens
ugugaaaggcuucagcuacuuccacuacuggu

SEQ ID NO: 23026 - RNA, 32 nt, Homo Sapiens
cucauaaauggcaccucuguauccuuacgugg

SEQ ID NO: 23027 - RNA, 32 nt, Homo Sapiens
ucccuaacucccucacuuggacuugagacccu

SEQ ID NO: 23028 - RNA, 32 nt, Homo Sapiens
uucgcucccucccgaaggagccccgcugugcc

SEQ ID NO: 23029 - RNA, 32 nt, Homo Sapiens
auacagagggcuugguuugaaguuggggugag

SEQ ID NO: 23030 - RNA, 32 nt, Homo Sapiens
ugcgcguuugccacgugcugcccgugacagca

SEQ ID NO: 23031 - RNA, 32 nt, Homo Sapiens
uuaauaacagaaaagagaauaaagcauccaug

SEQ ID NO: 23032 - RNA, 32 nt, Homo Sapiens
aaggauuaauaaaauucugaaauguuaaguag

SEQ ID NO: 23033 - RNA, 32 nt, Homo Sapiens
uuucagguggucuggaggcagcuccacgucac

SEQ ID NO: 23034 - RNA, 32 nt, Homo Sapiens
ccuuaagauuguuuaucuggagcccacauagu

SEQ ID NO: 23035 - RNA, 32 nt, Homo Sapiens
ggcccaauuccauugugauguuuaccuuuaua

SEQ ID NO: 23036 - RNA, 32 nt, Homo Sapiens
ggcuuccucccucaccucccccaucuuagcag

SEQ ID NO: 23037 - RNA, 32 nt, Homo Sapiens
ugaggcaguggcggccaugucacggccaggcc

SEQ ID NO: 23038 - RNA, 32 nt, Homo Sapiens
guugugaaggcagaggaggggcuguuuuggaa

SEQ ID NO: 23039 - RNA, 32 nt, Homo Sapiens
acaaaccucccgcucccuucccccagcccugg

SEQ ID NO: 23040 - RNA, 32 nt, Homo Sapiens
agauuuucagguuuuauaaagcagccauggag

SEQ ID NO: 23041 - RNA, 32 nt, Homo Sapiens
ucagagugaugcaauugcuggaggaagagcca

SEQ ID NO: 23042 - RNA, 32 nt, Homo Sapiens
gaccugccgagcggcggccgaggcggcggugu

SEQ ID NO: 23043 - RNA, 32 nt, Homo Sapiens
cuuuauaauuuuguuugucagauaguauuuug

SEQ ID NO: 23044 - RNA, 27 nt, Homo Sapiens
uuugguucuuguuucagcccaauaugu

SEQ ID NO: 23045 - RNA, 32 nt, Homo Sapiens
ggauugcgcgcccgcccggaacccagaaccag

SEQ ID NO: 23046 - RNA, 32 nt, Homo Sapiens
cuccaucugugccucucuccucccaucuccac

SEQ ID NO: 23047 - RNA, 32 nt, Homo Sapiens
ggguuuuccuuccuuuuccacccuaagcugaa

SEQ ID NO: 23048 - RNA, 32 nt, Homo Sapiens
ucucuguuagugucaagggaaugaaccugacg

SEQ ID NO: 23049 - RNA, 32 nt, Homo Sapiens
acuaaagcaaauaucacucagaugaaacaaag

SEQ ID NO: 23050 - RNA, 32 nt, Homo Sapiens
cucgggaaucagcuccuauuaaggaaccaaaa

SEQ ID NO: 23051 - RNA, 32 nt, Homo Sapiens
guguccgaucccagccccccagagcugcccuc

SEQ ID NO: 23052 - RNA, 32 nt, Homo Sapiens
gacucauuuuucugcacacuuuuuugauguga

SEQ ID NO: 23053 - RNA, 32 nt, Homo Sapiens
ugcuaugauuguuauaugugagcauuauagau

SEQ ID NO: 23054 - RNA, 32 nt, Homo Sapiens
uguucacacgcaaggcuggcucugccuuccca

SEQ ID NO: 23055 - RNA, 32 nt, Homo Sapiens
ccgcacaggguuugcgggagguggugaccgcg

SEQ ID NO: 23056 - RNA, 32 nt, Homo Sapiens
guaacacaaaaaugaccuaauauagaaaacug

SEQ ID NO: 23057 - RNA, 32 nt, Homo Sapiens
cccuccgcggcgggcccugcccacaccuccug

SEQ ID NO: 23058 - RNA, 32 nt, Homo Sapiens
cuucacuucuuuguaaaguuaaguuguaaccu

SEQ ID NO: 23059 - RNA, 32 nt, Homo Sapiens
agaaccucucuggcgaagcaucaggaaaggcu

SEQ ID NO: 23060 - RNA, 32 nt, Homo Sapiens
agugucuucuaaaaugauguagccugacaaga

SEQ ID NO: 23061 - RNA, 32 nt, Homo Sapiens
aagcaaaacuaaacaaagaaaguaagaaaaag

SEQ ID NO: 23062 - RNA, 32 nt, Homo Sapiens
gcaguggcugcccuucccaccuggacaguggu

SEQ ID NO: 23063 - RNA, 32 nt, Homo Sapiens
uguaugauagcaaaugcaaaacuauuauaaug

SEQ ID NO: 23064 - RNA, 32 nt, Homo Sapiens
cuggugcucaucucacaugcuauacuguaaaa

SEQ ID NO: 23065 - RNA, 32 nt, Homo Sapiens
ccggaggauauuaaaaugcuagggugagguuu

SEQ ID NO: 23066 - RNA, 32 nt, Homo Sapiens
ggaccgcgcgacuggccggccgaucccugggc

SEQ ID NO: 23067 - RNA, 32 nt, Homo Sapiens
ucauacacagagcucccugucuaguuucuuuu

SEQ ID NO: 23068 - RNA, 32 nt, Homo Sapiens
uauaggcaguguagagcagccuguugcuagau

SEQ ID NO: 23069 - RNA, 32 nt, Homo Sapiens
cgcaggcugccgucacccuuccgggugacaua

SEQ ID NO: 23070 - RNA, 32 nt, Homo Sapiens
gcaucgcucccucuccugccuuugaccuccca

SEQ ID NO: 23071 - RNA, 32 nt, Homo Sapiens
uuuccaccaugcugccuaucucagagcaggaa

SEQ ID NO: 23072 - RNA, 32 nt, Homo Sapiens
caacgccuucccuccuccacucccaccggguc

SEQ ID NO: 23073 - RNA, 30 nt, Homo Sapiens
acugcugccuaaccacucaagaguacacag

SEQ ID NO: 23074 - RNA, 32 nt, Homo Sapiens
ggucacaaacuccagagcucaggcaauccgcc

SEQ ID NO: 23075 - RNA, 32 nt, Homo Sapiens
ugugucauuggacuggauuauaaacagcuguc

SEQ ID NO: 23076 - RNA, 32 nt, Homo Sapiens
auggcuuuuauuuuuuaaaaauccauaucccu

SEQ ID NO: 23077 - RNA, 32 nt, Homo Sapiens
aauaucauccccaaaugugucuuguauuauca

SEQ ID NO: 23078 - RNA, 31 nt, Homo Sapiens
uucuccccacccucagcuccucacuguucuc

SEQ ID NO: 23079 - RNA, 32 nt, Homo Sapiens
acacaaggcuauuugccagcauauauuaauau

SEQ ID NO: 23080 - RNA, 32 nt, Homo Sapiens
ucauggucugggggaugcaggcaggggaaggg

SEQ ID NO: 23081 - RNA, 32 nt, Homo Sapiens
guaugaaugguuuaaucaaggcuuuauuuugg

SEQ ID NO: 23082 - RNA, 32 nt, Homo Sapiens
cuuccagcuguuccugcuuccacucuugcucc

SEQ ID NO: 23083 - RNA, 32 nt, Homo Sapiens
cggcacggcccggcucuggagcaccgcggacg

SEQ ID NO: 23084 - RNA, 32 nt, Homo Sapiens
cagcaacuggagccgcuggugcucccaggcag

SEQ ID NO: 23085 - RNA, 32 nt, Homo Sapiens
ccucuacaagcugucuucuugcacacgcuguc

SEQ ID NO: 23086 - RNA, 32 nt, Homo Sapiens
auguuuguuuauuuuucuuuaaaaauaaagga

SEQ ID NO: 23087 - RNA, 32 nt, Homo Sapiens
cgcggccggcgcccauggcguucgcgcugcug

SEQ ID NO: 23088 - RNA, 32 nt, Homo Sapiens
gacacgagccugcuucuguuaccuccaagugg

SEQ ID NO: 23089 - RNA, 32 nt, Homo Sapiens
auccuccaccgccuggauuguucuuucuccaa

SEQ ID NO: 23090 - RNA, 32 nt, Homo Sapiens
aaugcaaaaauauucccguuaucuuugaccag

SEQ ID NO: 23091 - RNA, 32 nt, Homo Sapiens
aaaauaccaaaauaaaaguguauuuuuaaguu

SEQ ID NO: 23092 - RNA, 32 nt, Homo Sapiens
uccagccgggcuccuccaccggcccuugcagg

SEQ ID NO: 23093 - RNA, 32 nt, Homo Sapiens
cccuucauacuucuuugaucuuuggaagaaga

SEQ ID NO: 23094 - RNA, 32 nt, Homo Sapiens
ugggcccgugcaguuuugcagagcuggucuuc

SEQ ID NO: 23095 - RNA, 32 nt, Homo Sapiens
cacagcuccgccgaagggaggggguggaagag

SEQ ID NO: 23096 - RNA, 32 nt, Homo Sapiens
gugauucacagugugaaucuuggugucuacgu

SEQ ID NO: 23097 - RNA, 32 nt, Homo Sapiens
ugcgaggcggcccgugcaguccgugcucagga

SEQ ID NO: 23098 - RNA, 32 nt, Homo Sapiens
cugucacuuuggcgagggaguggauauagggc

SEQ ID NO: 23099 - RNA, 32 nt, Homo Sapiens
uuaugaaggcaggguuccuguguaagccagca

SEQ ID NO: 23100 - RNA, 32 nt, Homo Sapiens
cucccgggcccgcaguggucgcggcggcauga

SEQ ID NO: 23101 - RNA, 32 nt, Homo Sapiens
acaaauuuuuaaaguaaaauugaggucuagaa

SEQ ID NO: 23102 - RNA, 32 nt, Homo Sapiens
cccuagaauuuaauauuuguagaugcagguaa

SEQ ID NO: 23103 - RNA, 32 nt, Homo Sapiens
caaugcucccugaugagcacaaagcccgcucu

SEQ ID NO: 23104 - RNA, 32 nt, Homo Sapiens
acaguguaucuaaaggacaaacgaguccuaau

SEQ ID NO: 23105 - RNA, 32 nt, Homo Sapiens
auauacaauuuaagcuauuaaaauuuguacaa

SEQ ID NO: 23106 - RNA, 32 nt, Homo Sapiens
cuguuuugggaauaaacuucuauagaaaacaa

SEQ ID NO: 23107 - RNA, 32 nt, Homo Sapiens
uggggccugggauccuuggggcccgugagcca

SEQ ID NO: 23108 - RNA, 32 nt, Homo Sapiens
auuuuuuucuucauacuuuucuugguuucuaa

SEQ ID NO: 23109 - RNA, 32 nt, Homo Sapiens
ccccguccucccucacugccccauaugugucc

SEQ ID NO: 23110 - RNA, 32 nt, Homo Sapiens
ggggugagcaagggcugucugcagaaaccccc

SEQ ID NO: 23111 - RNA, 32 nt, Homo Sapiens
cgccugaaggcacagcuaaccacuucgcacac

SEQ ID NO: 23112 - RNA, 32 nt, Homo Sapiens
agacauuguucuuuuccugagucuuuugaaug

SEQ ID NO: 23113 - RNA, 32 nt, Homo Sapiens
cauuguuaucuaaacaggucagcauggcagac

SEQ ID NO: 23114 - RNA, 32 nt, Homo Sapiens
ugggucucaaggaaaucgagcuuaaugaauga

SEQ ID NO: 23115 - RNA, 32 nt, Homo Sapiens
ggguggggggagaggagggaugcaacucgccc

SEQ ID NO: 23116 - RNA, 32 nt, Homo Sapiens
cuucacagaucuuuuuaauguucuuucccaug

SEQ ID NO: 23117 - RNA, 32 nt, Homo Sapiens
cucccugccuggcgcgcuccgcaccuggaggu

SEQ ID NO: 23118 - RNA, 32 nt, Homo Sapiens
uuaaaaauauguuuagauuuuucuuucuugca

SEQ ID NO: 23119 - RNA, 32 nt, Homo Sapiens
gcugaggcggguggaucacuugaggccaggug

SEQ ID NO: 23120 - RNA, 32 nt, Homo Sapiens
ggugaggaacgagacuccauagcagagguaug

SEQ ID NO: 23121 - RNA, 30 nt, Homo Sapiens
uagcggaauauccuuccugguucuuuaaug

SEQ ID NO: 23122 - RNA, 32 nt, Homo Sapiens
aauuccccagcuuguugggagucuacgucacg

SEQ ID NO: 23123 - RNA, 32 nt, Homo Sapiens
gaagggggcugggcacgacauggcaucauacu

SEQ ID NO: 23124 - RNA, 32 nt, Homo Sapiens
auauauuugagcccauacaguguauuagguug

SEQ ID NO: 23125 - RNA, 32 nt, Homo Sapiens
uacacuugguucagcuaaugucugagaguccu

SEQ ID NO: 23126 - RNA, 32 nt, Homo Sapiens
uacuggauucggugcugaggcggcggcugcgg

SEQ ID NO: 23127 - RNA, 32 nt, Homo Sapiens
aggaaaaugugcacaugccucacgcacuaugu

SEQ ID NO: 23128 - RNA, 32 nt, Homo Sapiens
agcggaggugggaggaggagcucgccaagcgc

SEQ ID NO: 23129 - RNA, 32 nt, Homo Sapiens
cucacccacaagcaggcugugcagugccugaa

SEQ ID NO: 23130 - RNA, 32 nt, Homo Sapiens
cacauuacuuggaguugccuacuacauacucc

SEQ ID NO: 23131 - RNA, 32 nt, Homo Sapiens
uugaauaacucccuugacgaaaacagacuccu

SEQ ID NO: 23132 - RNA, 32 nt, Homo Sapiens
ggggucugcccccaucgggucacaggugaugc

SEQ ID NO: 23133 - RNA, 32 nt, Homo Sapiens
caggagcgcucccuggccccaacacaucgggg

SEQ ID NO: 23134 - RNA, 30 nt, Homo Sapiens
caccugggccggcgcgcgcgacucccggca

SEQ ID NO: 23135 - RNA, 32 nt, Homo Sapiens
uggacagcgugccagcgccgcgcagggccacc

SEQ ID NO: 23136 - RNA, 32 nt, Homo Sapiens
cuuggagucuaccuuucaguccugcuauuuuc

SEQ ID NO: 23137 - RNA, 32 nt, Homo Sapiens
ucccauugccaccgugaagccaaauucuagcc

SEQ ID NO: 23138 - RNA, 32 nt, Homo Sapiens
acacagaaagaaguccuuacaagugaaagaaa

SEQ ID NO: 23139 - RNA, 32 nt, Homo Sapiens
uggaaauguaaauugguauagcuauuauggaa

SEQ ID NO: 23140 - RNA, 32 nt, Homo Sapiens
cagcuggcccccagcccugggggauuccugag

SEQ ID NO: 23141 - RNA, 32 nt, Homo Sapiens
aucuuuaguucaugacccaucaucagcugccu

SEQ ID NO: 23142 - RNA, 32 nt, Homo Sapiens
uggggaagugaaggaacagauguaucaggaca

SEQ ID NO: 23143 - RNA, 32 nt, Homo Sapiens
acauggcgagcuugcuggacgucacgucgccu

SEQ ID NO: 23144 - RNA, 27 nt, Homo Sapiens
cuggauuccuucuuccccuuccuagcu

SEQ ID NO: 23145 - RNA, 32 nt, Homo Sapiens
ugguacggguccgacugagggguacucgccac

SEQ ID NO: 23146 - RNA, 32 nt, Homo Sapiens
uuauaaugaaaauuauaguaguuuguaguauu

SEQ ID NO: 23147 - RNA, 32 nt, Homo Sapiens
cuguuuuguaaaugcuaguaguuuacauuaaa

SEQ ID NO: 23148 - RNA, 32 nt, Homo Sapiens
aucaggggacgggugguggugucugucagaca

SEQ ID NO: 23149 - RNA, 32 nt, Homo Sapiens
uucaaucggcgucuaaaaccacguuccugccu

SEQ ID NO: 23150 - RNA, 32 nt, Homo Sapiens
caugcauauaaucaauucauuccccaagaaau

SEQ ID NO: 23151 - RNA, 32 nt, Homo Sapiens
aaaguacucacacagcacuuacuaugcuccaa

SEQ ID NO: 23152 - RNA, 32 nt, Homo Sapiens
acauuuauuuuagccacggauaauugaaccag

SEQ ID NO: 23153 - RNA, 32 nt, Homo Sapiens
cagccucccaaguagcugggacuacuggcacc

SEQ ID NO: 23154 - RNA, 32 nt, Homo Sapiens
ugcuauaagaguuuucugaaauuuauauuuua

SEQ ID NO: 23155 - RNA, 32 nt, Homo Sapiens
cccgagguggguggagggaggccucucacucu

SEQ ID NO: 23156 - RNA, 32 nt, Homo Sapiens
caagaugcaacgcacagcacucugucugaggc

SEQ ID NO: 23157 - RNA, 32 nt, Homo Sapiens
ugcacauauggacucugcacaugaaucccacc

SEQ ID NO: 23158 - RNA, 32 nt, Homo Sapiens
gucuaauuagcuugcuugaagauguggccuug

SEQ ID NO: 23159 - RNA, 32 nt, Homo Sapiens
ccaccuacucucuggcagcaucagcauccuac

SEQ ID NO: 23160 - RNA, 32 nt, Homo Sapiens
ggacccgggcggggaaaggcgcggcguggcuu

SEQ ID NO: 23161 - RNA, 32 nt, Homo Sapiens
ugaaauguauuauuuguagacauaaagacuug

SEQ ID NO: 23162 - RNA, 32 nt, Homo Sapiens
cuuucgcggugacacaaugguuagggaacggu

SEQ ID NO: 23163 - RNA, 32 nt, Homo Sapiens
ggaugaaaugucauuguguauggaaggcgggg

SEQ ID NO: 23164 - RNA, 32 nt, Homo Sapiens
gauguuguagcaagaagacucccuuuaaaagu

SEQ ID NO: 23165 - RNA, 32 nt, Homo Sapiens
uggggggagggcccgggaaaagggggaguugg

SEQ ID NO: 23166 - RNA, 32 nt, Homo Sapiens
uuugauuuccucaggaccuuagagggaaaaca

SEQ ID NO: 23167 - RNA, 32 nt, Homo Sapiens
acagauauuauuaaaguuucugguuuugaggu

SEQ ID NO: 23168 - RNA, 32 nt, Homo Sapiens
ccuccugccucccaguggccucuuucagccca

SEQ ID NO: 23169 - RNA, 32 nt, Homo Sapiens
gaggguggacauuuugcuccuguauuccuuug

SEQ ID NO: 23170 - RNA, 32 nt, Homo Sapiens
cuauacugacuucuguugaaaccauucaaagc

SEQ ID NO: 23171 - RNA, 32 nt, Homo Sapiens
gguucggagguaacacuggggaggcggccgcg

SEQ ID NO: 23172 - RNA, 32 nt, Homo Sapiens
guauguuugaguuuuuaguugaaggacuggcu

SEQ ID NO: 23173 - RNA, 32 nt, Homo Sapiens
ggaacccugggagggcugcugcugcuccugcc

SEQ ID NO: 23174 - RNA, 32 nt, Homo Sapiens
gggcagcagggggacugaaggcuggagcggag

SEQ ID NO: 23175 - RNA, 30 nt, Homo Sapiens
acggggcgcgcgcggccuuagaggcagcug

SEQ ID NO: 23176 - RNA, 32 nt, Homo Sapiens
ggccuaaaacaaagauagaauuugaugggggu

SEQ ID NO: 23177 - RNA, 32 nt, Homo Sapiens
agcccugcagggagccgcucaagucugggagg

SEQ ID NO: 23178 - RNA, 32 nt, Homo Sapiens
ccggacgcagcagcccucuggcuccagcaugg

SEQ ID NO: 23179 - RNA, 32 nt, Homo Sapiens
cugagcccaagccaagcaucgcauccccugug

SEQ ID NO: 23180 - RNA, 32 nt, Homo Sapiens
uugacccuugaauaauuaucugauuaauaggu

SEQ ID NO: 23181 - RNA, 30 nt, Homo Sapiens
gggggcgggcccgugccugcugugccccga

SEQ ID NO: 23182 - RNA, 32 nt, Homo Sapiens
gcauuaaaugcuuugauuguucauaucaagaa

SEQ ID NO: 23183 - RNA, 32 nt, Homo Sapiens
gacgccccacccgcucgguccuggacacacug

SEQ ID NO: 23184 - RNA, 32 nt, Homo Sapiens
ccgauuucucuccuuucaguugugugaaaaaa

SEQ ID NO: 23185 - RNA, 32 nt, Homo Sapiens
uuguggaugaugucacaguuucccuccucuga

SEQ ID NO: 23186 - RNA, 27 nt, Homo Sapiens
gcagcccuggucuucagccccucccau

SEQ ID NO: 23187 - RNA, 32 nt, Homo Sapiens
ccuuacauaaucuucuuuccuguuaguccagu

SEQ ID NO: 23188 - RNA, 32 nt, Homo Sapiens
guggccgagcgcgguggcucacgccuguaauc

SEQ ID NO: 23189 - RNA, 32 nt, Homo Sapiens
gccccaugcagccccaggggcuuccccccugc

SEQ ID NO: 23190 - RNA, 32 nt, Homo Sapiens
cugaccucagcuccucgcauucccuccacauc

SEQ ID NO: 23191 - RNA, 32 nt, Homo Sapiens
uugucccucccucuucuguguuucuaagcuag

SEQ ID NO: 23192 - RNA, 32 nt, Homo Sapiens
ucucacauuuuuccacuggacauaaugauuga

SEQ ID NO: 23193 - RNA, 32 nt, Homo Sapiens
gugccccucccgcuccagccaugcucuccgcc

SEQ ID NO: 23194 - RNA, 32 nt, Homo Sapiens
agcuaaccagaauuguucauagacuugugaua

SEQ ID NO: 23195 - RNA, 32 nt, Homo Sapiens
cgcccagccacugccaucaucuuuaggaagag

SEQ ID NO: 23196 - RNA, 32 nt, Homo Sapiens
gccuucgagacgguggccaucgaccgccugga

SEQ ID NO: 23197 - RNA, 32 nt, Homo Sapiens
ggagggcagacacgccgcuuuuuggaugccuc

SEQ ID NO: 23198 - RNA, 32 nt, Homo Sapiens
auagcuaccauuaucaguaucaucauauuaau

SEQ ID NO: 23199 - RNA, 32 nt, Homo Sapiens
uggccuuggggauggcuguggagggaacgugg

SEQ ID NO: 23200 - RNA, 32 nt, Homo Sapiens
auggguuugucaagggaaucguuaccguuuua

SEQ ID NO: 23201 - RNA, 32 nt, Homo Sapiens
ggaggagguagacaaugccuauggccauuaug

SEQ ID NO: 23202 - RNA, 32 nt, Homo Sapiens
uauuuucuagaaugcccuggaaggacagaaua

SEQ ID NO: 23203 - RNA, 32 nt, Homo Sapiens
uaacggagaaaguuuacgccgacacuggccug

SEQ ID NO: 23204 - RNA, 32 nt, Homo Sapiens
ccaggcagaagcugcucuaggaccugggccuc

SEQ ID NO: 23205 - RNA, 32 nt, Homo Sapiens
auuucuccucuguuuucuuuuuaauauacauu

SEQ ID NO: 23206 - RNA, 32 nt, Homo Sapiens
caacuccucagguguggacuaacgcguggcca

SEQ ID NO: 23207 - RNA, 32 nt, Homo Sapiens
gcauuugauugugaaaacauugcuguuaauau

SEQ ID NO: 23208 - RNA, 32 nt, Homo Sapiens
auuuauauaaugguuauaaaauuuacaguuug

SEQ ID NO: 23209 - RNA, 32 nt, Homo Sapiens
cagcacccugaagaagggaagagaggaaaacc

SEQ ID NO: 23210 - RNA, 27 nt, Homo Sapiens
agauggauguucuucaguuccuagaag

SEQ ID NO: 23211 - RNA, 32 nt, Homo Sapiens
ccucccgaagacagguccucuccggaaccuuc

SEQ ID NO: 23212 - RNA, 32 nt, Homo Sapiens
agucaguauggugugaguggcucaccaacgaa

SEQ ID NO: 23213 - RNA, 32 nt, Homo Sapiens
agcaagugcccuccccacaauggggcagaucu

SEQ ID NO: 23214 - RNA, 32 nt, Homo Sapiens
ccgcuggcgggggagcagcgcggucgaggaug

SEQ ID NO: 23215 - RNA, 32 nt, Homo Sapiens
gugccuagguguucuguuuaccuagugucuua

SEQ ID NO: 23216 - RNA, 32 nt, Homo Sapiens
gaacuucuuuaaaggaaaauuguaguagaggu

SEQ ID NO: 23217 - RNA, 32 nt, Homo Sapiens
agacauaagagaauuuacaaaagcuauucaga

SEQ ID NO: 23218 - RNA, 32 nt, Homo Sapiens
gcuccccucugcugcccagagccccaggaggc

SEQ ID NO: 23219 - RNA, 32 nt, Homo Sapiens
caagcccgugcacagcagcauccuuggccagg

SEQ ID NO: 23220 - RNA, 32 nt, Homo Sapiens
caagagccuguggucaggaaaucagguccagc

SEQ ID NO: 23221 - RNA, 32 nt, Homo Sapiens
uuacaggugugagccaccacgcccagccugug

SEQ ID NO: 23222 - RNA, 32 nt, Homo Sapiens
acgccccuccccagccaguccugagccucccg

SEQ ID NO: 23223 - RNA, 32 nt, Homo Sapiens
caggucacagcaugcagaagaacaguccaaca

SEQ ID NO: 23224 - RNA, 32 nt, Homo Sapiens
ugcaucauaacaaccacugaaaauaauauuuc

SEQ ID NO: 23225 - RNA, 32 nt, Homo Sapiens
acuguuaguuuauucucauacuuacgauguug

SEQ ID NO: 23226 - RNA, 32 nt, Homo Sapiens
ccggcggccgaccauggugcugccgcccccgg

SEQ ID NO: 23227 - RNA, 31 nt, Homo Sapiens
ucuucacuaguuaccaccugaaguaagaugu

SEQ ID NO: 23228 - RNA, 32 nt, Homo Sapiens
guaucagaggguggagaugucagucuguccac

SEQ ID NO: 23229 - RNA, 32 nt, Homo Sapiens
ucucugcaagauuggggugcuccggguggaug

SEQ ID NO: 23230 - RNA, 32 nt, Homo Sapiens
aaacuacuaacagcagugagauuuaaaagagc

SEQ ID NO: 23231 - RNA, 32 nt, Homo Sapiens
cugcugggucagggcugcccgugaccccagac

SEQ ID NO: 23232 - RNA, 32 nt, Homo Sapiens
ccucccacccccacccugccacuaugagcuag

SEQ ID NO: 23233 - RNA, 32 nt, Homo Sapiens
gucacugcuuugcauacgagaccauggggaca

SEQ ID NO: 23234 - RNA, 32 nt, Homo Sapiens
ccuaaggguuguaggaccuuggcagagggggc

SEQ ID NO: 23235 - RNA, 32 nt, Homo Sapiens
gcucacuaaaggauuacuuguaucaucaucaa

SEQ ID NO: 23236 - RNA, 32 nt, Homo Sapiens
gcgcacaggcccccacguggacagcauggacc

SEQ ID NO: 23237 - RNA, 32 nt, Homo Sapiens
ggauaaccaauauuugaugccacacacuaaac

SEQ ID NO: 23238 - RNA, 32 nt, Homo Sapiens
aaaccccccucccugcacccagcccucaacac

SEQ ID NO: 23239 - RNA, 32 nt, Homo Sapiens
gcccaggaacccugcuucuccucacagggccu

SEQ ID NO: 23240 - RNA, 32 nt, Homo Sapiens
augauaguauuuuuaugcacucuucucccaca

SEQ ID NO: 23241 - RNA, 32 nt, Homo Sapiens
gguggggacccagccgcgcgccgggagcgcuc

SEQ ID NO: 23242 - RNA, 32 nt, Homo Sapiens
agauuuuuguaaaagauugcuacauuauuuca

SEQ ID NO: 23243 - RNA, 32 nt, Homo Sapiens
cagcugcccgaccccaggagucgccauaccug

SEQ ID NO: 23244 - RNA, 30 nt, Homo Sapiens
auguaggccaggcgcgguggcucaugccug

SEQ ID NO: 23245 - RNA, 32 nt, Homo Sapiens
gggacauuacaauaugacuaacagcaacucca

SEQ ID NO: 23246 - RNA, 32 nt, Homo Sapiens
cuugacugcaccccaaagaggcuccaggauca

SEQ ID NO: 23247 - RNA, 32 nt, Homo Sapiens
aaacaagaucauacuguaaauguuuguaacuu

SEQ ID NO: 23248 - RNA, 32 nt, Homo Sapiens
aggacaagagccaaugccuaaaaaagaacagc

SEQ ID NO: 23249 - RNA, 27 nt, Homo Sapiens
caagcucuauuuuucagcccugggccc

SEQ ID NO: 23250 - RNA, 32 nt, Homo Sapiens
ggcccggcuggguaaggcgcugcucgagagga

SEQ ID NO: 23251 - RNA, 32 nt, Homo Sapiens
ucagcuauguucugccuuuugcuggagacucu

SEQ ID NO: 23252 - RNA, 32 nt, Homo Sapiens
ccacccccuucuuuuuuguuguuguggguuuu

SEQ ID NO: 23253 - RNA, 32 nt, Homo Sapiens
guuaagagguagauaguaaauauuuuaggccu

SEQ ID NO: 23254 - RNA, 32 nt, Homo Sapiens
gaagucaaaccucugagaagcugauuugaaaa

SEQ ID NO: 23255 - RNA, 32 nt, Homo Sapiens
gggcagccaguuuuaaccccagccugucaccg

SEQ ID NO: 23256 - RNA, 32 nt, Homo Sapiens
ggcuaguuuuuguauuuuuaguagaggcaagg

SEQ ID NO: 23257 - RNA, 32 nt, Homo Sapiens
ucguaucauuggccucuuagaugauauaagca

SEQ ID NO: 23258 - RNA, 32 nt, Homo Sapiens
aacuuuuuuauuauuauuuuuaucuccaacug

SEQ ID NO: 23259 - RNA, 32 nt, Homo Sapiens
gugcucagggccagcuggcuguguggggcgca

SEQ ID NO: 23260 - RNA, 32 nt, Homo Sapiens
ugguagcagggccagccagugacccagagucu

SEQ ID NO: 23261 - RNA, 32 nt, Homo Sapiens
uugugaucuauuaugccuuuuuacaaaaaaaa

SEQ ID NO: 23262 - RNA, 32 nt, Homo Sapiens
uuuuauauugcaugcuuuuguaaaaacaugcu

SEQ ID NO: 23263 - RNA, 32 nt, Homo Sapiens
aacaggcuuuaccauguggaugauguaaccag

SEQ ID NO: 23264 - RNA, 32 nt, Homo Sapiens
cguauuucuccccucuaguaccucugcauuug

SEQ ID NO: 23265 - RNA, 29 nt, Homo Sapiens
uuuucuugguaagucaguuuaauguuuau

SEQ ID NO: 23266 - RNA, 32 nt, Homo Sapiens
cugcaaaguauaacccagauaggaaaucauau

SEQ ID NO: 23267 - RNA, 32 nt, Homo Sapiens
acggaagccaagggggcugugccguggagcug

SEQ ID NO: 23268 - RNA, 32 nt, Homo Sapiens
gcuuaucaauuucugaagcuuagaacacuuuu

SEQ ID NO: 23269 - RNA, 32 nt, Homo Sapiens
uaccucaccugccuccuucuaugggucaagca

SEQ ID NO: 23270 - RNA, 32 nt, Homo Sapiens
ccagauugucuccucucuccuguugaaccccu

SEQ ID NO: 23271 - RNA, 32 nt, Homo Sapiens
guagggugugggcugcugagggggcaagaggg

SEQ ID NO: 23272 - RNA, 32 nt, Homo Sapiens
uuaaaucuauuauguaaugauuuuagaaugca

SEQ ID NO: 23273 - RNA, 32 nt, Homo Sapiens
guggugaaacuuucuuugcuguuuguuaccaa

SEQ ID NO: 23274 - RNA, 32 nt, Homo Sapiens
agaggguugugauuuugucugcuuaguaucuc

SEQ ID NO: 23275 - RNA, 32 nt, Homo Sapiens
aauuuccaggacuugaacugccauguccucug

SEQ ID NO: 23276 - RNA, 32 nt, Homo Sapiens
acauucauucuuucuuuuuuuuucuuuuccuc

SEQ ID NO: 23277 - RNA, 32 nt, Homo Sapiens
gcccucaaggccagcccuggccccuccacugc

SEQ ID NO: 23278 - RNA, 32 nt, Homo Sapiens
ccaaccccgccuuugagaugcccgccccgccu

SEQ ID NO: 23279 - RNA, 32 nt, Homo Sapiens
ucacauggggccugugcccaccccucuugagu

SEQ ID NO: 23280 - RNA, 32 nt, Homo Sapiens
uuaaucucacuuagcgaaagugacggaugagc

SEQ ID NO: 23281 - RNA, 32 nt, Homo Sapiens
agcagcgcggugugaaacugggauaaaaacgg

SEQ ID NO: 23282 - RNA, 32 nt, Homo Sapiens
ccguccgccuggcucgcccgagcucgcccgcu

SEQ ID NO: 23283 - RNA, 32 nt, Homo Sapiens
aggggagcgcgcugcgcgucgcaggaguaacc

SEQ ID NO: 23284 - RNA, 32 nt, Homo Sapiens
aaucagaaguaugggucagaucaugggacaua

SEQ ID NO: 23285 - RNA, 31 nt, Homo Sapiens
uauacagagaagaaaaacuauugggagauau

SEQ ID NO: 23286 - RNA, 32 nt, Homo Sapiens
gacgcucgucuucgcuacugcauccccgaacc

SEQ ID NO: 23287 - RNA, 32 nt, Homo Sapiens
acauaaaauaaguuuaaaucugagucaauaau

SEQ ID NO: 23288 - RNA, 32 nt, Homo Sapiens
uuugcauacagaaagcugauauuuucauguuu

SEQ ID NO: 23289 - RNA, 30 nt, Homo Sapiens
aucugugucugugguucauuuucuucaggu

SEQ ID NO: 23290 - RNA, 32 nt, Homo Sapiens
ugaggagcccgccccaggcccuggucccccgc

SEQ ID NO: 23291 - RNA, 32 nt, Homo Sapiens
aacauggcauauauauccuucuccggggaguc

SEQ ID NO: 23292 - RNA, 32 nt, Homo Sapiens
agauacguauauuuuuaacugcuucaaguguu

SEQ ID NO: 23293 - RNA, 32 nt, Homo Sapiens
uuccccuuccccuuuuuccagaauuccaaauu

SEQ ID NO: 23294 - RNA, 32 nt, Homo Sapiens
ggguccccuccccaccuucucuggagcugguc

SEQ ID NO: 23295 - RNA, 32 nt, Homo Sapiens
augaaucuuaauacacaguccuggaggaacug

SEQ ID NO: 23296 - RNA, 32 nt, Homo Sapiens
gcugaaauguaguacagaaaagaauguacauu

SEQ ID NO: 23297 - RNA, 32 nt, Homo Sapiens
cuccugucccugcugcuccucuaggccucacu

SEQ ID NO: 23298 - RNA, 32 nt, Homo Sapiens
gacucagcagugcccgccgccgucaccagcua

SEQ ID NO: 23299 - RNA, 32 nt, Homo Sapiens
aauuuaaacaacagugggguguagaccaacgc

SEQ ID NO: 23300 - RNA, 32 nt, Homo Sapiens
caggagcucuuuccuuuccccucuaguuuugg

SEQ ID NO: 23301 - RNA, 32 nt, Homo Sapiens
uugaaucuucauucagaggaaaauauucaaaa

SEQ ID NO: 23302 - RNA, 32 nt, Homo Sapiens
gucaaagaaaaaagauaaccccuauuugaauu

SEQ ID NO: 23303 - RNA, 32 nt, Homo Sapiens
ugaagccagcguccggccggcagagcggcguc

SEQ ID NO: 23304 - RNA, 32 nt, Homo Sapiens
ggaccugaguaacuggugguguguagcagggu

SEQ ID NO: 23305 - RNA, 32 nt, Homo Sapiens
cuuauccaaagagggaaagugauuagguuacu

SEQ ID NO: 23306 - RNA, 32 nt, Homo Sapiens
ugcuccagccucagccagggcagggaggggga

SEQ ID NO: 23307 - RNA, 32 nt, Homo Sapiens
caugaguccauauggagcuuuuccugauguuc

SEQ ID NO: 23308 - RNA, 32 nt, Homo Sapiens
uauguauauuugaauauagauagggaacaaau

SEQ ID NO: 23309 - RNA, 32 nt, Homo Sapiens
ucucugcgcuuuccuuuguaauuucagggcuu

SEQ ID NO: 23310 - RNA, 32 nt, Homo Sapiens
cuagaaagggugaugguacuggaccgguauuc

SEQ ID NO: 23311 - RNA, 32 nt, Homo Sapiens
uggcauucuggaagacacgaaagcaagcaagg

SEQ ID NO: 23312 - RNA, 32 nt, Homo Sapiens
caucacucaccauuuuaacacuggaagccacu

SEQ ID NO: 23313 - RNA, 32 nt, Homo Sapiens
augguggcgggugccuguagucccagcuacug

SEQ ID NO: 23314 - RNA, 32 nt, Homo Sapiens
cccagccgagaccucggcgagacuguaacuag

SEQ ID NO: 23315 - RNA, 32 nt, Homo Sapiens
uuauuacuuuaaaggaaaggauuuggagaauu

SEQ ID NO: 23316 - RNA, 32 nt, Homo Sapiens
cuggagaaacaaugaagaugggccaucucaau

SEQ ID NO: 23317 - RNA, 32 nt, Homo Sapiens
uuaaaagauugugcuaauuuauuagagcagaa

SEQ ID NO: 23318 - RNA, 32 nt, Homo Sapiens
cagggcugggaaggaaaggaaauaccaaaaua

SEQ ID NO: 23319 - RNA, 32 nt, Homo Sapiens
cguucuuggguuccaauaaaggagaaacaggg

SEQ ID NO: 23320 - RNA, 32 nt, Homo Sapiens
ugcacagcgucccccauucuucccguccugau

SEQ ID NO: 23321 - RNA, 32 nt, Homo Sapiens
aauagcaaaaaauaacacuguagacaugaaga

SEQ ID NO: 23322 - RNA, 32 nt, Homo Sapiens
agggaaacuugacuauguaaugauugucacaa

SEQ ID NO: 23323 - RNA, 32 nt, Homo Sapiens
uuucgugguuggcuggggagggggaccggggg

SEQ ID NO: 23324 - RNA, 32 nt, Homo Sapiens
cacaguauccuucuucccuccuccccugucuc

SEQ ID NO: 23325 - RNA, 32 nt, Homo Sapiens
ggccagcagacccaggacccagcccuuucucu

SEQ ID NO: 23326 - RNA, 32 nt, Homo Sapiens
ugugugaugugugucagcacaacacagcuggg

SEQ ID NO: 23327 - RNA, 32 nt, Homo Sapiens
uuuagaaccaaaaccaccaugacacaguuuuu

SEQ ID NO: 23328 - RNA, 32 nt, Homo Sapiens
ucauauacaccugaaaaacgaggccuggagcg

SEQ ID NO: 23329 - RNA, 32 nt, Homo Sapiens
gaccccugucugcccuucucccuccugcuucu

SEQ ID NO: 23330 - RNA, 32 nt, Homo Sapiens
gcugaguuuuaaagguaaacguuauggcugaa

SEQ ID NO: 23331 - RNA, 32 nt, Homo Sapiens
aucaaaaggagaauaauauuuuauagcaugug

SEQ ID NO: 23332 - RNA, 32 nt, Homo Sapiens
gaaacuagaaaagacaagaagggccuaaagca

SEQ ID NO: 23333 - RNA, 32 nt, Homo Sapiens
auauguaguuuaacagguguggucaauaucaa

SEQ ID NO: 23334 - RNA, 32 nt, Homo Sapiens
ggcaucucucccuccgccgcaggggcugaugc

SEQ ID NO: 23335 - RNA, 32 nt, Homo Sapiens
ugcggggcgaccucgucugcgcggcgggcgug

SEQ ID NO: 23336 - RNA, 32 nt, Homo Sapiens
aucccgggucgaccggccgcucgcgcugcccu

SEQ ID NO: 23337 - RNA, 32 nt, Homo Sapiens
uugaucagucccauccuggcugccugacauca

SEQ ID NO: 23338 - RNA, 32 nt, Homo Sapiens
ucuucucuguggcugguagacaccaagcugcu

SEQ ID NO: 23339 - RNA, 32 nt, Homo Sapiens
caacucuuaaauuauuuccugccuuuucuuca

SEQ ID NO: 23340 - RNA, 32 nt, Homo Sapiens
cccacagcugucuaaguccaaaggccucccca

SEQ ID NO: 23341 - RNA, 32 nt, Homo Sapiens
ugugcucuuuaaaggugugagauuggaauuua

SEQ ID NO: 23342 - RNA, 32 nt, Homo Sapiens
ugguggcucaugccuguaaucccagcacugug

SEQ ID NO: 23343 - RNA, 32 nt, Homo Sapiens
aaucauaagauauuuuucaugauuuugaaacc

SEQ ID NO: 23344 - RNA, 32 nt, Homo Sapiens
uagccccugcugcugcaggcaccaugcugcuu

SEQ ID NO: 23345 - RNA, 28 nt, Homo Sapiens
gcgaugaggaccuuggcuugccugcugc

SEQ ID NO: 23346 - RNA, 32 nt, Homo Sapiens
gggcggccgggcagaggcgccccucgccuccc

SEQ ID NO: 23347 - RNA, 32 nt, Homo Sapiens
gguacggcuggggguucuguccugcucaucca

SEQ ID NO: 23348 - RNA, 32 nt, Homo Sapiens
ggccuuccaaagugccgagauuacagcgaugu

SEQ ID NO: 23349 - RNA, 32 nt, Homo Sapiens
ggguggucaggagagaaggccugauaggagcc

SEQ ID NO: 23350 - RNA, 32 nt, Homo Sapiens
uugacauuuuuggccggaguguucuuuguggu

SEQ ID NO: 23351 - RNA, 32 nt, Homo Sapiens
uggugucagaucugguugccuugcaccccuga

SEQ ID NO: 23352 - RNA, 32 nt, Homo Sapiens
guaaagcuaaaauuauuuuaucugugaauuca

SEQ ID NO: 23353 - RNA, 32 nt, Homo Sapiens
ucccagagaacaaaauuaaagaagauuuccca

SEQ ID NO: 23354 - RNA, 32 nt, Homo Sapiens
ucucuccuggcauccaucuuuacccaugccug

SEQ ID NO: 23355 - RNA, 32 nt, Homo Sapiens
ucaugaaaauggucuaaacuuauugugguaau

SEQ ID NO: 23356 - RNA, 32 nt, Homo Sapiens
gauuuguuugugccuuuuauuaacugccauuu

SEQ ID NO: 23357 - RNA, 32 nt, Homo Sapiens
cugagaguaaauuuauuuugaguuuuaucccg

SEQ ID NO: 23358 - RNA, 32 nt, Homo Sapiens
uugccuggugccugagugaaggaggacugggu

SEQ ID NO: 23359 - RNA, 32 nt, Homo Sapiens
uuaaaagguucagaaauuuggcagguccuuug

SEQ ID NO: 23360 - RNA, 32 nt, Homo Sapiens
gucaggauuuggaaucuuacacugcuuggcua

SEQ ID NO: 23361 - RNA, 32 nt, Homo Sapiens
agcugcacuggucauugggaauuguguaaaca

SEQ ID NO: 23362 - RNA, 32 nt, Homo Sapiens
cauuuucuuuugcugcugccauguaagaagug

SEQ ID NO: 23363 - RNA, 32 nt, Homo Sapiens
ccaggaaaagcauuuuuguuucccaaguuauu

SEQ ID NO: 23364 - RNA, 32 nt, Homo Sapiens
gaccugggcaugguggugggcgccuguagucc

SEQ ID NO: 23365 - RNA, 32 nt, Homo Sapiens
gaaaugccaaaauacacgaugugaauaaaagu

SEQ ID NO: 23366 - RNA, 32 nt, Homo Sapiens
uuucacggacauuuggaaauaacauuggugau

SEQ ID NO: 23367 - RNA, 32 nt, Homo Sapiens
auauguuaaugauuagaugguuauauuacaau

SEQ ID NO: 23368 - RNA, 32 nt, Homo Sapiens
acagagcagggcaggcaguucuaugccuugga

SEQ ID NO: 23369 - RNA, 32 nt, Homo Sapiens
caccggggcuccuggaggggggcccugggucu

SEQ ID NO: 23370 - RNA, 32 nt, Homo Sapiens
agccccccugucaaaauccacuuggaacacaa

SEQ ID NO: 23371 - RNA, 32 nt, Homo Sapiens
aucccuaaacauucaccuugaccuuauuuaug

SEQ ID NO: 23372 - RNA, 32 nt, Homo Sapiens
cauaacaccaucacacucuuccuuccaagucu

SEQ ID NO: 23373 - RNA, 31 nt, Homo Sapiens
ucccgguguccccagaaaaggcccagcaguc

SEQ ID NO: 23374 - RNA, 32 nt, Homo Sapiens
ugugauauaaaauaaagcugaguauaaaauaa

SEQ ID NO: 23375 - RNA, 32 nt, Homo Sapiens
ugacaggcccagggugggaggggucggggccc

SEQ ID NO: 23376 - RNA, 32 nt, Homo Sapiens
acgugagggaugggugcugagcagaaccaaga

SEQ ID NO: 23377 - RNA, 32 nt, Homo Sapiens
aucuuaaguauuguaagcugcuauguauggau

SEQ ID NO: 23378 - RNA, 32 nt, Homo Sapiens
ccaacugugugacacccacaccuucuacucac

SEQ ID NO: 23379 - RNA, 32 nt, Homo Sapiens
ugcuugggcuccugggagcugcaguuggagcu

SEQ ID NO: 23380 - RNA, 32 nt, Homo Sapiens
cuuccuuccuuccuuccacaccaccaacgggu

SEQ ID NO: 23381 - RNA, 32 nt, Homo Sapiens
acucaggaggcugaagcagaagaacugcuuga

SEQ ID NO: 23382 - RNA, 32 nt, Homo Sapiens
uuuccuagcaugcacacaacauccucucuuug

SEQ ID NO: 23383 - RNA, 32 nt, Homo Sapiens
acuaacacagaaaaagaaaaccaaauacugca

SEQ ID NO: 23384 - RNA, 32 nt, Homo Sapiens
gaucccaauggcggccuggccuaaccaggggu

SEQ ID NO: 23385 - RNA, 32 nt, Homo Sapiens
cgugauaugacucuguuuuccuugcuuguuuu

SEQ ID NO: 23386 - RNA, 32 nt, Homo Sapiens
ggcugagucccagcccugggcccuggccgggu

SEQ ID NO: 23387 - RNA, 32 nt, Homo Sapiens
gaagaacugucaaauucuggaauccuuaaagc

SEQ ID NO: 23388 - RNA, 32 nt, Homo Sapiens
agccaucuuccugccuacuggaugcuuacagu

SEQ ID NO: 23389 - RNA, 32 nt, Homo Sapiens
gcccaggagggguccccagaccacccuggggc

SEQ ID NO: 23390 - RNA, 32 nt, Homo Sapiens
aaaaguuuaaaaaugcauaaaaaauaggauuu

SEQ ID NO: 23391 - RNA, 32 nt, Homo Sapiens
ugccucugccuggccggcgccgcagucggcgc

SEQ ID NO: 23392 - RNA, 32 nt, Homo Sapiens
uaaauauauggacaaauggacuauacauacua

SEQ ID NO: 23393 - RNA, 32 nt, Homo Sapiens
gggggugggggcgggggguugguacagaaacu

SEQ ID NO: 23394 - RNA, 32 nt, Homo Sapiens
cugaaaaauuaguccgauuuuguggugguaau

SEQ ID NO: 23395 - RNA, 32 nt, Homo Sapiens
cgccgucuccugcuccucuccuuauucauuaa

SEQ ID NO: 23396 - RNA, 32 nt, Homo Sapiens
ucuuuuuaauuguuuuaaauuuuucauagggg

SEQ ID NO: 23397 - RNA, 32 nt, Homo Sapiens
aaagggggugggacagggacucggggcugggg

SEQ ID NO: 23398 - RNA, 32 nt, Homo Sapiens
augacugcagcguggagugacgcacugcaugg

SEQ ID NO: 23399 - RNA, 32 nt, Homo Sapiens
auccugugauguugaaaugucaauugcaggau

SEQ ID NO: 23400 - RNA, 32 nt, Homo Sapiens
aaggcuuccugcugugccuuucuggcaggguu

SEQ ID NO: 23401 - RNA, 32 nt, Homo Sapiens
auugaugaaaauaaugaaugaaaaucaacaga

SEQ ID NO: 23402 - RNA, 32 nt, Homo Sapiens
caagugaggccauagcaauuccccuacaucaa

SEQ ID NO: 23403 - RNA, 32 nt, Homo Sapiens
ggcacgaggcgacggugcggggcgcgcgggcg

SEQ ID NO: 23404 - RNA, 30 nt, Homo Sapiens
ggguuaggcaagcuugaggguuuacugaau

SEQ ID NO: 23405 - RNA, 32 nt, Homo Sapiens
acucugucucaaaaaauaaauaaaauaaaaua

SEQ ID NO: 23406 - RNA, 32 nt, Homo Sapiens
uguuucucaguguguuguuauuuuggaaaaaa

SEQ ID NO: 23407 - RNA, 32 nt, Homo Sapiens
auacagauacuaugcuuuugggguggguacuc

SEQ ID NO: 23408 - RNA, 32 nt, Homo Sapiens
ugccugagcccuccccaugcaaggggcucauc

SEQ ID NO: 23409 - RNA, 30 nt, Homo Sapiens
agcuaaaagaagcuuguuguuugucugucu

SEQ ID NO: 23410 - RNA, 32 nt, Homo Sapiens
agccuuggcuccuggacuuucccuggcuccgc

SEQ ID NO: 23411 - RNA, 32 nt, Homo Sapiens
uuuccccccacuuuugagaaauaaaaaagccu

SEQ ID NO: 23412 - RNA, 32 nt, Homo Sapiens
agcagggcggcggcccggggugcucuuccgcg

SEQ ID NO: 23413 - RNA, 32 nt, Homo Sapiens
aaucucucuuguuuccucucacucugaauuau

SEQ ID NO: 23414 - RNA, 32 nt, Homo Sapiens
auuucccugacuguugccucacuuccuuggaa

SEQ ID NO: 23415 - RNA, 32 nt, Homo Sapiens
ugaggccugggguugaccacuaacuggcuccu

SEQ ID NO: 23416 - RNA, 32 nt, Homo Sapiens
aaucuucuugucauguaaaaugaagcuagucu

SEQ ID NO: 23417 - RNA, 32 nt, Homo Sapiens
ucuguguuuaagaagauaauuaaaggauguua

SEQ ID NO: 23418 - RNA, 32 nt, Homo Sapiens
uuuccccggguggggcgggcgcgguguagcgg

SEQ ID NO: 23419 - RNA, 32 nt, Homo Sapiens
gauaugugucauauuucuuucaauggauaauu

SEQ ID NO: 23420 - RNA, 32 nt, Homo Sapiens
cggaaccggcgccgcgcuugcugcugguaaca

SEQ ID NO: 23421 - RNA, 32 nt, Homo Sapiens
aaacucuaaaaagccauugaugagauguauag

SEQ ID NO: 23422 - RNA, 32 nt, Homo Sapiens
uccggagugagcaauggaguggcugccaugga

SEQ ID NO: 23423 - RNA, 32 nt, Homo Sapiens
gccguccggacucccagcucccggcccggcag

SEQ ID NO: 23424 - RNA, 32 nt, Homo Sapiens
guguuuuguguuuuuucuucuuucgguguuuu

SEQ ID NO: 23425 - RNA, 32 nt, Homo Sapiens
aucucuggauguaaguuuuucuguugaaacua

SEQ ID NO: 23426 - RNA, 32 nt, Homo Sapiens
ugagacgccagcuuaaauuggcucuugcagag

SEQ ID NO: 23427 - RNA, 32 nt, Homo Sapiens
ugggcugucggguuggccuggacauccucuga

SEQ ID NO: 23428 - RNA, 32 nt, Homo Sapiens
gccgagcucccuccauuccucucccuccgccg

SEQ ID NO: 23429 - RNA, 32 nt, Homo Sapiens
uguacaugggccgcaccauaaugagaugugag

SEQ ID NO: 23430 - RNA, 32 nt, Homo Sapiens
gcucccgcgggcccgcggacccagcugucagg

SEQ ID NO: 23431 - RNA, 32 nt, Homo Sapiens
gccucccaggcugucuucuccucaucacaggg

SEQ ID NO: 23432 - RNA, 32 nt, Homo Sapiens
gaucccaccucuucucgacccuggacgucuac

SEQ ID NO: 23433 - RNA, 32 nt, Homo Sapiens
uaaagaaacugguuguuuuaagaucaaaaaaa

SEQ ID NO: 23434 - RNA, 32 nt, Homo Sapiens
ccggaucaggagggccgggcccggggcugcuu

SEQ ID NO: 23435 - RNA, 32 nt, Homo Sapiens
ucucagcuuccacugccgucuccacaggaaac

SEQ ID NO: 23436 - RNA, 32 nt, Homo Sapiens
acaaauuugucuugccuuauuaaaguucugua

SEQ ID NO: 23437 - RNA, 32 nt, Homo Sapiens
ggaggcugccagcagcgcuguauuaacacucu

SEQ ID NO: 23438 - RNA, 32 nt, Homo Sapiens
aacccuacucuccucucucccuggaccucaga

SEQ ID NO: 23439 - RNA, 32 nt, Homo Sapiens
cccucuuuccuucucuucuccucacagcagug

SEQ ID NO: 23440 - RNA, 32 nt, Homo Sapiens
gccuguuuccuuuuccucucccaacccucugg

SEQ ID NO: 23441 - RNA, 32 nt, Homo Sapiens
uuuaacugugcuauggaguagaagcaggaggu

SEQ ID NO: 23442 - RNA, 32 nt, Homo Sapiens
caguccgcaguccagccugggcgacagagcga

SEQ ID NO: 23443 - RNA, 32 nt, Homo Sapiens
agaacagccugccugcuuugacaguuauccca

SEQ ID NO: 23444 - RNA, 32 nt, Homo Sapiens
ucuuuggaagcagcccccuguggcggccuucc

SEQ ID NO: 23445 - RNA, 32 nt, Homo Sapiens
uuccugugguguuaggucuuuauuuuuauuuu

SEQ ID NO: 23446 - RNA, 32 nt, Homo Sapiens
cuuuagaugcugaugauuuguuuuuguauuuu

SEQ ID NO: 23447 - RNA, 32 nt, Homo Sapiens
aaaacagauaccauuuucucaauggaaucagu

SEQ ID NO: 23448 - RNA, 32 nt, Homo Sapiens
aggcaguguuuggcaguucucuuugcacuuga

SEQ ID NO: 23449 - RNA, 32 nt, Homo Sapiens
ugcggcacgcgccggccgccugcccggaucgc

SEQ ID NO: 23450 - RNA, 32 nt, Homo Sapiens
gcuguauguacaauccugggcauugacucugu

SEQ ID NO: 23451 - RNA, 32 nt, Homo Sapiens
gcuccaagggcaauaaagcagcuccacucuca

SEQ ID NO: 23452 - RNA, 32 nt, Homo Sapiens
cagacgcagaugcccuggcuguccuuggcggg

SEQ ID NO: 23453 - RNA, 32 nt, Homo Sapiens
acucuccggccggccgccugcccgccgccucc

SEQ ID NO: 23454 - RNA, 32 nt, Homo Sapiens
ggccucaggaggagggagguggguguuggagc

SEQ ID NO: 23455 - RNA, 32 nt, Homo Sapiens
agaguagcugucuguuugacugcuucauccag

SEQ ID NO: 23456 - RNA, 32 nt, Homo Sapiens
gggauguugcuccucagcucccucccucagcc

SEQ ID NO: 23457 - RNA, 32 nt, Homo Sapiens
ucuagggcaagagcuggcccuggggugcggac

SEQ ID NO: 23458 - RNA, 32 nt, Homo Sapiens
aauuuuauauacaacuaaaaaaaaaaaaaaaa

SEQ ID NO: 23459 - RNA, 32 nt, Homo Sapiens
uccuaaaauaauacaugaccacuuccucauuu

SEQ ID NO: 23460 - RNA, 32 nt, Homo Sapiens
aguacauggccugcugcaaacacccaggacac

SEQ ID NO: 23461 - RNA, 32 nt, Homo Sapiens
gucagcuaacauuugguugagcucauauaauc

SEQ ID NO: 23462 - RNA, 32 nt, Homo Sapiens
uucaucuuugguuuuuuuuucuagacacuuuu

SEQ ID NO: 23463 - RNA, 32 nt, Homo Sapiens
aauugcucuuaauuuuuaaacucucaauacaa

SEQ ID NO: 23464 - RNA, 32 nt, Homo Sapiens
uugguguggaggugcuggcauucagucugcua

SEQ ID NO: 23465 - RNA, 32 nt, Homo Sapiens
auuccagaaaccggaauguacuucaacacaaa

SEQ ID NO: 23466 - RNA, 32 nt, Homo Sapiens
aaauggacucaguggcauuugaggauguggcu

SEQ ID NO: 23467 - RNA, 32 nt, Homo Sapiens
guccagggccagcucuugccucccggcggccu

SEQ ID NO: 23468 - RNA, 32 nt, Homo Sapiens
uggcggcagugguggcucucccggcuggguug

SEQ ID NO: 23469 - RNA, 31 nt, Homo Sapiens
agucuguaaagguccguagugcuaucuacau

SEQ ID NO: 23470 - RNA, 32 nt, Homo Sapiens
cuugauuuaucuucucaggacucauuguucca

SEQ ID NO: 23471 - RNA, 32 nt, Homo Sapiens
ucacuaaguuaaaagcgaagugagaguauuaa

SEQ ID NO: 23472 - RNA, 32 nt, Homo Sapiens
caguuuccuuccuuccuucucggcagcgcucc

SEQ ID NO: 23473 - RNA, 32 nt, Homo Sapiens
cgauuaauauuuuuucuuuggcgauauuucuu

SEQ ID NO: 23474 - RNA, 32 nt, Homo Sapiens
gagaacuucaauucgggcacccgagccuagag

SEQ ID NO: 23475 - RNA, 32 nt, Homo Sapiens
gccggauggcggaccccggcccagaucccgaa

SEQ ID NO: 23476 - RNA, 32 nt, Homo Sapiens
gggacgcggcgcucucccggcgcugcugccuc

SEQ ID NO: 23477 - RNA, 32 nt, Homo Sapiens
gguggcuaguggccauaugcagggaauggugc

SEQ ID NO: 23478 - RNA, 32 nt, Homo Sapiens
cuuuccugaguugugcagcucacgcauggagg

SEQ ID NO: 23479 - RNA, 32 nt, Homo Sapiens
aggagccgcgcgguagaugcggugcuuuuagg

SEQ ID NO: 23480 - RNA, 32 nt, Homo Sapiens
gggguaauuuuucugaggaaggagaacuagcc

SEQ ID NO: 23481 - RNA, 32 nt, Homo Sapiens
aaaauuacuagauuauauauuauucaguaugc

SEQ ID NO: 23482 - RNA, 32 nt, Homo Sapiens
agaguuucucccugagucgcuguugcuagcag

SEQ ID NO: 23483 - RNA, 32 nt, Homo Sapiens
aaaaaucuuguguaauuuaaaguaaaagacaa

SEQ ID NO: 23484 - RNA, 32 nt, Homo Sapiens
ccaugacuuuuggagcacuauuccauugucag

SEQ ID NO: 23485 - RNA, 32 nt, Homo Sapiens
auuccagcuuuuagaauggguguacaaugccc

SEQ ID NO: 23486 - RNA, 32 nt, Homo Sapiens
aagaggugauucaaguaccguugcuaagcugu

SEQ ID NO: 23487 - RNA, 32 nt, Homo Sapiens
ucuaugguuuuguaacaaauuguacacaugac

SEQ ID NO: 23488 - RNA, 32 nt, Homo Sapiens
caugggcucagcagaugcugucuuaauuugug

SEQ ID NO: 23489 - RNA, 32 nt, Homo Sapiens
auucccugccagcaccugcucuccccguuccu

SEQ ID NO: 23490 - RNA, 32 nt, Homo Sapiens
agcagacauguuuaagggucuaagucucaaga

SEQ ID NO: 23491 - RNA, 32 nt, Homo Sapiens
ggccagcacuguauucuaugcuacagggauuc

SEQ ID NO: 23492 - RNA, 32 nt, Homo Sapiens
uggccgccaccucggcgggaggggccgccucc

SEQ ID NO: 23493 - RNA, 32 nt, Homo Sapiens
ucucucgccucccucgcucgucucagcccagc

SEQ ID NO: 23494 - RNA, 32 nt, Homo Sapiens
aggggggcacggcccugcuugcugaccccccg

SEQ ID NO: 23495 - RNA, 32 nt, Homo Sapiens
uagcagauaaccuuaauaaaaauaaacguuug

SEQ ID NO: 23496 - RNA, 32 nt, Homo Sapiens
gacaugccgugacaucaccagcuccucuagga

SEQ ID NO: 23497 - RNA, 32 nt, Homo Sapiens
aaaauaaagcuacauuucuaagagcuuggugu

SEQ ID NO: 23498 - RNA, 32 nt, Homo Sapiens
gaucucagcucacugcaagcuccgccucccgg

SEQ ID NO: 23499 - RNA, 32 nt, Homo Sapiens
caggugauucacaggcacuuuguaguuugaga

SEQ ID NO: 23500 - RNA, 32 nt, Homo Sapiens
aaaaagcaaagauacuaauuuuuuaagccaaa

SEQ ID NO: 23501 - RNA, 29 nt, Homo Sapiens
augcagucauauggcagcagguuggugau

SEQ ID NO: 23502 - RNA, 32 nt, Homo Sapiens
agacuucaguuucuuugcaucauuucuguauu

SEQ ID NO: 23503 - RNA, 32 nt, Homo Sapiens
uguuccauagaucuggcuggagcccaaaguuc

SEQ ID NO: 23504 - RNA, 32 nt, Homo Sapiens
gaacacugguaauguguggaguaucuuggugu

SEQ ID NO: 23505 - RNA, 32 nt, Homo Sapiens
ucagccuggaugugccaacgcugcuggacgca

SEQ ID NO: 23506 - RNA, 32 nt, Homo Sapiens
ggaaugaccacccacuggcggagguagcuccg

SEQ ID NO: 23507 - RNA, 32 nt, Homo Sapiens
caggcuccgggcccggugccgaggacuggccg

SEQ ID NO: 23508 - RNA, 32 nt, Homo Sapiens
acuggugccuucccuguacccgcagcagccac

SEQ ID NO: 23509 - RNA, 29 nt, Homo Sapiens
caccaugaagccagcccuccugcccuggg

SEQ ID NO: 23510 - RNA, 32 nt, Homo Sapiens
ggagugcccagccucacccccaggcuuuacca

SEQ ID NO: 23511 - RNA, 31 nt, Homo Sapiens
uguaaucaugguaauuuagauuuuuaugagg

SEQ ID NO: 23512 - RNA, 32 nt, Homo Sapiens
guaggcccccugggcucugaccuuuucugaau

SEQ ID NO: 23513 - RNA, 32 nt, Homo Sapiens
ccaccugugcugcuaugcccacagcacaaagc

SEQ ID NO: 23514 - RNA, 32 nt, Homo Sapiens
acuugcagcaaccauugugauuuggguuguuc

SEQ ID NO: 23515 - RNA, 32 nt, Homo Sapiens
uguccguguacgucagcguguguguccaccuu

SEQ ID NO: 23516 - RNA, 32 nt, Homo Sapiens
aaguucacccucgaguacuccuggcaccccag

SEQ ID NO: 23517 - RNA, 27 nt, Homo Sapiens
ugacuuugcuucuucacucccaccugu

SEQ ID NO: 23518 - RNA, 32 nt, Homo Sapiens
aauaguugugcagggagggagcacgagauggg

SEQ ID NO: 23519 - RNA, 32 nt, Homo Sapiens
ugugccacacgaccagcugugcucccagcaga

SEQ ID NO: 23520 - RNA, 32 nt, Homo Sapiens
cgacuaaaacaaucuaagauaaugggcucuca

SEQ ID NO: 23521 - RNA, 32 nt, Homo Sapiens
uugguauucugcccuccacucugguacuauca

SEQ ID NO: 23522 - RNA, 32 nt, Homo Sapiens
aaaggugggugguggagacggcaccagaugua

SEQ ID NO: 23523 - RNA, 32 nt, Homo Sapiens
cacagaucuggacguucacgugcacucucuuc

SEQ ID NO: 23524 - RNA, 31 nt, Homo Sapiens
acuaccucacggagguuuugugcuggucccc

SEQ ID NO: 23525 - RNA, 32 nt, Homo Sapiens
gguuauaaauauuaugccuuuauuuuuggcua

SEQ ID NO: 23526 - RNA, 32 nt, Homo Sapiens
guauuuuagauauauucucuaauaaaauucag

SEQ ID NO: 23527 - RNA, 32 nt, Homo Sapiens
gaggaguuuuugcugggacaaauacuacucaa

SEQ ID NO: 23528 - RNA, 32 nt, Homo Sapiens
acucuccuguacccucaccagugaccugggac

SEQ ID NO: 23529 - RNA, 32 nt, Homo Sapiens
aaacuugaccaugcucugaaaaaagaaauuuc

SEQ ID NO: 23530 - RNA, 32 nt, Homo Sapiens
uagugcgauuucacagucuacugccuguuucc

SEQ ID NO: 23531 - RNA, 32 nt, Homo Sapiens
uuugcuuccuauauuucuucuggaaucauguu

SEQ ID NO: 23532 - RNA, 32 nt, Homo Sapiens
ugcuauaaaaauuugaaauauuagaauggccg

SEQ ID NO: 23533 - RNA, 32 nt, Homo Sapiens
uauacucaguuauauauauguacauuuaguua

SEQ ID NO: 23534 - RNA, 32 nt, Homo Sapiens
gccucggaaggggagcucucaucauggcgcgu

SEQ ID NO: 23535 - RNA, 32 nt, Homo Sapiens
aucaacauuucccccugcugcuggcccagcac

SEQ ID NO: 23536 - RNA, 32 nt, Homo Sapiens
acgcccccuucucggccgccagcccuccacac

SEQ ID NO: 23537 - RNA, 32 nt, Homo Sapiens
uugggaggcugaggcgggagaguggcgugaaa

SEQ ID NO: 23538 - RNA, 32 nt, Homo Sapiens
ugugucagguuaacauuuauauggaacauguu

SEQ ID NO: 23539 - RNA, 32 nt, Homo Sapiens
auuauccacaaaugacagcuccuuacuugagc

SEQ ID NO: 23540 - RNA, 32 nt, Homo Sapiens
ugugaaggcuucccugaccccugcccaggaag

SEQ ID NO: 23541 - RNA, 32 nt, Homo Sapiens
guuuccagcccggcugccccaggaugggugag

SEQ ID NO: 23542 - RNA, 32 nt, Homo Sapiens
ucuaacuuggucaacagcacaucacagggcaa

SEQ ID NO: 23543 - RNA, 32 nt, Homo Sapiens
cuccaagguuuuccuuucccauaguugcugug

SEQ ID NO: 23544 - RNA, 32 nt, Homo Sapiens
auacuccuuguaauagaacagcuaccccuucc

SEQ ID NO: 23545 - RNA, 32 nt, Homo Sapiens
agcuuucucauauugagagcucugcuaugcca

SEQ ID NO: 23546 - RNA, 32 nt, Homo Sapiens
aucgugaagaacucgggagaggguggagucca

SEQ ID NO: 23547 - RNA, 32 nt, Homo Sapiens
accagccccguccacagaacucuugagccugc

SEQ ID NO: 23548 - RNA, 32 nt, Homo Sapiens
ugugagcacacaaaccaccuccuuuggcccag

SEQ ID NO: 23549 - RNA, 32 nt, Homo Sapiens
guauauaaaauauaucuagaaaaccuuuguuu

SEQ ID NO: 23550 - RNA, 32 nt, Homo Sapiens
uauuuuaaaaauuuauuugaaaaguucauuau

SEQ ID NO: 23551 - RNA, 32 nt, Homo Sapiens
augcuauacuauuuacuaauuuuuauuaaggg

SEQ ID NO: 23552 - RNA, 32 nt, Homo Sapiens
uggucacaauuaauaagauauuuuauauaugg

SEQ ID NO: 23553 - RNA, 32 nt, Homo Sapiens
agagaaaauguuuccccauggguucuuaaaaa

SEQ ID NO: 23554 - RNA, 32 nt, Homo Sapiens
aauucagucuuuucaaaacaaaucacaaaagc

SEQ ID NO: 23555 - RNA, 32 nt, Homo Sapiens
cggcgcgggggugagagcgcgcggccggauuc

SEQ ID NO: 23556 - RNA, 32 nt, Homo Sapiens
accccugaagacugaggcccugcagcuaccag

SEQ ID NO: 23557 - RNA, 32 nt, Homo Sapiens
uccgugagauccugcccuuccaccucuuuccc

SEQ ID NO: 23558 - RNA, 32 nt, Homo Sapiens
aaggcccugggaagauucuaauauguugcuug

SEQ ID NO: 23559 - RNA, 32 nt, Homo Sapiens
ccaaaggagaauauauaucuugugaaaauaug

SEQ ID NO: 23560 - RNA, 32 nt, Homo Sapiens
uaugugggcugcagucugcgugcggaggugcc

SEQ ID NO: 23561 - RNA, 32 nt, Homo Sapiens
ccaggaaguccuccaauuuccuuuggucuuuc

SEQ ID NO: 23562 - RNA, 32 nt, Homo Sapiens
uaauaacauauucuauuuuucuuauuauagca

SEQ ID NO: 23563 - RNA, 32 nt, Homo Sapiens
aaaauaagugauaaugaaaaccacugaguuau

SEQ ID NO: 23564 - RNA, 32 nt, Homo Sapiens
ucuuauuucuuacuuuaauguacuucuaucac

SEQ ID NO: 23565 - RNA, 32 nt, Homo Sapiens
gugcggcggccacgggggcgcugcugagacgg

SEQ ID NO: 23566 - RNA, 32 nt, Homo Sapiens
cuaacuagcaaaugcugacauguguuuguucu

SEQ ID NO: 23567 - RNA, 32 nt, Homo Sapiens
aacaaaguugugaauagcacagucgaggaaaa

SEQ ID NO: 23568 - RNA, 32 nt, Homo Sapiens
ucuggagucgcggcccgggguucacgaugucc

SEQ ID NO: 23569 - RNA, 32 nt, Homo Sapiens
auaaaagaccaaacaguaaauauuuuagacuu

SEQ ID NO: 23570 - RNA, 32 nt, Homo Sapiens
ugguuaucuuaccuggggaaguucuuauguuu

SEQ ID NO: 23571 - RNA, 32 nt, Homo Sapiens
gacucgcucucuauucccccagccccacacug

SEQ ID NO: 23572 - RNA, 32 nt, Homo Sapiens
aggaguucugcgucucgggguggugacugggu

SEQ ID NO: 23573 - RNA, 32 nt, Homo Sapiens
guaaucaaaacauauuugauaggaggcuacgg

SEQ ID NO: 23574 - RNA, 29 nt, Homo Sapiens
agugugucauauggucaaaagccucuuug

SEQ ID NO: 23575 - RNA, 32 nt, Homo Sapiens
ucaaauuucacguguauauuaaggaacugaug

SEQ ID NO: 23576 - RNA, 32 nt, Homo Sapiens
cauuucaugaauaguuugaacccuugucaaug

SEQ ID NO: 23577 - RNA, 32 nt, Homo Sapiens
uuccuuguuucauaaaaaagacucacuuaaaa

SEQ ID NO: 23578 - RNA, 32 nt, Homo Sapiens
uugacagcauauagaauauauuaucagacaag

SEQ ID NO: 23579 - RNA, 32 nt, Homo Sapiens
uggagcacaggccccaggcuuccugccagggc

SEQ ID NO: 23580 - RNA, 32 nt, Homo Sapiens
ucaccgcaggcacuucugaguaccauuccaug

SEQ ID NO: 23581 - RNA, 32 nt, Homo Sapiens
aaaaagaucuagcuacgauaauagacauucuu

SEQ ID NO: 23582 - RNA, 32 nt, Homo Sapiens
cccucuguguuggcccaagcucuugugguaca

SEQ ID NO: 23583 - RNA, 32 nt, Homo Sapiens
gaaagaaagagauugacauuuuggguuugaua

SEQ ID NO: 23584 - RNA, 32 nt, Homo Sapiens
gaaguuuauaugccagcaggccuuuuuguuuu

SEQ ID NO: 23585 - RNA, 32 nt, Homo Sapiens
uugaggcuuuguguuguaauucuucaguuggu

SEQ ID NO: 23586 - RNA, 32 nt, Homo Sapiens
uuugcugaaugauugauuuaagaguaaaauua

SEQ ID NO: 23587 - RNA, 32 nt, Homo Sapiens
uguuuuuccuuccuccacaccugagggacgca

SEQ ID NO: 23588 - RNA, 29 nt, Homo Sapiens
caacaugggacggagaucuacaucaucca

SEQ ID NO: 23589 - RNA, 29 nt, Homo Sapiens
auagguacauguauguguguccaugugca

SEQ ID NO: 23590 - RNA, 32 nt, Homo Sapiens
cacacaccugucaucccagcuacucagguagu

SEQ ID NO: 23591 - RNA, 32 nt, Homo Sapiens
aaaauccugugcucccagaagcggagccucuc

SEQ ID NO: 23592 - RNA, 32 nt, Homo Sapiens
uuaauucaguuauauaauuauaaaaaugaugc

SEQ ID NO: 23593 - RNA, 32 nt, Homo Sapiens
ggaaguaaggaagggaaugcaagacuagugca

SEQ ID NO: 23594 - RNA, 32 nt, Homo Sapiens
caaaaaccugggagaaugaugugcuucuguag

SEQ ID NO: 23595 - RNA, 32 nt, Homo Sapiens
ccaccggcuucgggagaagagaucuuaaucca

SEQ ID NO: 23596 - RNA, 32 nt, Homo Sapiens
auuagggaaguguaaaucaaaacuacuaugag

SEQ ID NO: 23597 - RNA, 32 nt, Homo Sapiens
cucaugucagacuguacccauccagccgcugc

SEQ ID NO: 23598 - RNA, 32 nt, Homo Sapiens
gcggcgguucccucaucaguccagccacugcc

SEQ ID NO: 23599 - RNA, 32 nt, Homo Sapiens
gccaggacguucuagcaggucaucggugcuuu

SEQ ID NO: 23600 - RNA, 32 nt, Homo Sapiens
agucugcagagccgccgccgccgcccgaacca

SEQ ID NO: 23601 - RNA, 32 nt, Homo Sapiens
uaaaaguauaugaauaaaaauaugaguaacau

SEQ ID NO: 23602 - RNA, 32 nt, Homo Sapiens
cuacuaguccauuugugagcuggcugguaaau

SEQ ID NO: 23603 - RNA, 32 nt, Homo Sapiens
ggacucaaugaaaagggcaccuaaagaaaaua

SEQ ID NO: 23604 - RNA, 32 nt, Homo Sapiens
aucaaauauaugacauauaccuaggagcugug

SEQ ID NO: 23605 - RNA, 32 nt, Homo Sapiens
ucuuagacccuauguagauuauuaaugaacaa

SEQ ID NO: 23606 - RNA, 32 nt, Homo Sapiens
caccauggacuucaggcuguuaguggcaguac

SEQ ID NO: 23607 - RNA, 32 nt, Homo Sapiens
auuuuaugcuuuauuuccuguuugaaggcuua

SEQ ID NO: 23608 - RNA, 32 nt, Homo Sapiens
cacaacaagaugauucacucuggcugcacuuc

SEQ ID NO: 23609 - RNA, 32 nt, Homo Sapiens
gugagggucgcucguggguccccuggcaggga

SEQ ID NO: 23610 - RNA, 32 nt, Homo Sapiens
agcgcccucgguagccccagccaggcacuggu

SEQ ID NO: 23611 - RNA, 32 nt, Homo Sapiens
agcagauuggaaacaaauacuacuaccacuaa

SEQ ID NO: 23612 - RNA, 32 nt, Homo Sapiens
gguuugucagcugucacuguuguuuucuugua

SEQ ID NO: 23613 - RNA, 32 nt, Homo Sapiens
gugcaugagcuguauucuucacagcaacagag

SEQ ID NO: 23614 - RNA, 32 nt, Homo Sapiens
acuuuauuaagaagaugcuggcugcuuugugu

SEQ ID NO: 23615 - RNA, 32 nt, Homo Sapiens
uagaccagugauuggugcuuaccuugaacaaa

SEQ ID NO: 23616 - RNA, 32 nt, Homo Sapiens
cgccgagccuucggggcgauguguagugccuu

SEQ ID NO: 23617 - RNA, 32 nt, Homo Sapiens
cuugauaauuaugaauuuuuuauccauuacua

SEQ ID NO: 23618 - RNA, 32 nt, Homo Sapiens
cgggcauggccauggcguccccggccaucggg

SEQ ID NO: 23619 - RNA, 32 nt, Homo Sapiens
cugaggucaggaguucgagauuagucuggcca

SEQ ID NO: 23620 - RNA, 32 nt, Homo Sapiens
cucccagcacgcuggucagcuccucuugcucg

SEQ ID NO: 23621 - RNA, 32 nt, Homo Sapiens
guccaaguggucccgcggcagcuucuguugcu

SEQ ID NO: 23622 - RNA, 32 nt, Homo Sapiens
gcaaaauuugaaaaacagugaauacuucuaau

SEQ ID NO: 23623 - RNA, 32 nt, Homo Sapiens
ccagccaguccaauuggccauuucauacccaa

SEQ ID NO: 23624 - RNA, 32 nt, Homo Sapiens
gccgggacuugggcggggccugcccuacagug

SEQ ID NO: 23625 - RNA, 32 nt, Homo Sapiens
ggguccgugcuuugccucccccggcuccgagg

SEQ ID NO: 23626 - RNA, 32 nt, Homo Sapiens
aucuauuaaaagacaaaaauuagcugggcgug

SEQ ID NO: 23627 - RNA, 31 nt, Homo Sapiens
augauccccguacuccugccccugcucgugg

SEQ ID NO: 23628 - RNA, 32 nt, Homo Sapiens
aguauuuuuagucuuugauacucuguaaguac

SEQ ID NO: 23629 - RNA, 32 nt, Homo Sapiens
cuggaccaaagcagcugcagccgccuccucgu

SEQ ID NO: 23630 - RNA, 32 nt, Homo Sapiens
uuucuggcccuucuuucagugacuucuucccu

SEQ ID NO: 23631 - RNA, 32 nt, Homo Sapiens
ugagucucauauuuggcauucuuuuaguuaaa

SEQ ID NO: 23632 - RNA, 32 nt, Homo Sapiens
acagauacucaggcuaauaugaggauaugugg

SEQ ID NO: 23633 - RNA, 32 nt, Homo Sapiens
gagggauaaucggcggccggggcugaagggag

SEQ ID NO: 23634 - RNA, 32 nt, Homo Sapiens
gcagucaggucuucaguagccaaaaaacaaaa

SEQ ID NO: 23635 - RNA, 32 nt, Homo Sapiens
cuucgcgggcgacgcgucgccaugggcucucg

SEQ ID NO: 23636 - RNA, 32 nt, Homo Sapiens
ccacucaggaccagcguucggagcucccaccu

SEQ ID NO: 23637 - RNA, 32 nt, Homo Sapiens
uguacaccauuugaauaaaggcacauaucuua

SEQ ID NO: 23638 - RNA, 32 nt, Homo Sapiens
aauuccaggugucaagaagccuagggucugug

SEQ ID NO: 23639 - RNA, 29 nt, Homo Sapiens
guuucuuguguugaaugaggcaagaguaa

SEQ ID NO: 23640 - RNA, 32 nt, Homo Sapiens
gaaagaagagaauugaaaagccgagaagauuu

SEQ ID NO: 23641 - RNA, 32 nt, Homo Sapiens
ucaaaagauuuucucuccccagccauucagag

SEQ ID NO: 23642 - RNA, 32 nt, Homo Sapiens
guaccucggccgcggcgcacgcugcaucgcgg

SEQ ID NO: 23643 - RNA, 32 nt, Homo Sapiens
gguuugugcaggggggcgccuuggcuguggcc

SEQ ID NO: 23644 - RNA, 32 nt, Homo Sapiens
uauugguuuaaaauguaagauuuuaagauccu

SEQ ID NO: 23645 - RNA, 32 nt, Homo Sapiens
cgucaaaauacuuauggaagaaggugcccaaa

SEQ ID NO: 23646 - RNA, 32 nt, Homo Sapiens
agucucuuuccaccagacuuaacccgccugaa

SEQ ID NO: 23647 - RNA, 32 nt, Homo Sapiens
agagucaacccccaacugaggaccacugucua

SEQ ID NO: 23648 - RNA, 32 nt, Homo Sapiens
aagacgcacaccacuguaaauucuguggaaca

SEQ ID NO: 23649 - RNA, 32 nt, Homo Sapiens
ccagagacugguucgcuuguuuuuuccccuug

SEQ ID NO: 23650 - RNA, 32 nt, Homo Sapiens
cacugaaaacaguaaaacaggcugcuuagauu

SEQ ID NO: 23651 - RNA, 32 nt, Homo Sapiens
gccaagauuuauuuaaaguuggccaagauacc

SEQ ID NO: 23652 - RNA, 32 nt, Homo Sapiens
ccgagcaaagaucaaaauaaaaagugacacag

SEQ ID NO: 23653 - RNA, 32 nt, Homo Sapiens
cgcuucgcgggcccugucggucccgguaagcg

SEQ ID NO: 23654 - RNA, 32 nt, Homo Sapiens
ucaggagagggagagggggcugaggagguagu

SEQ ID NO: 23655 - RNA, 32 nt, Homo Sapiens
uuagaugugaaaauaaauguuauuuguugauc

SEQ ID NO: 23656 - RNA, 32 nt, Homo Sapiens
augugagaauaccacaagaagacuguccucag

SEQ ID NO: 23657 - RNA, 32 nt, Homo Sapiens
auaagaccauuuucccaaugagcagugucaua

SEQ ID NO: 23658 - RNA, 32 nt, Homo Sapiens
ccggggcuggcagcggccgccaugagcacggu

SEQ ID NO: 23659 - RNA, 32 nt, Homo Sapiens
uuuaugaagagcucgacucugacuccgaggac

SEQ ID NO: 23660 - RNA, 32 nt, Homo Sapiens
aggauggaagggggcuguggucgcgcguggga

SEQ ID NO: 23661 - RNA, 32 nt, Homo Sapiens
ugcccugggaauaauggacaaagggaaauacu

SEQ ID NO: 23662 - RNA, 32 nt, Homo Sapiens
guuggucuguugauuucccuagaugugagucu

SEQ ID NO: 23663 - RNA, 32 nt, Homo Sapiens
ccagcaccccgccccaggcgcacuggcuagga

SEQ ID NO: 23664 - RNA, 32 nt, Homo Sapiens
gcuuccaacacuuuggaacagauuaaaaaggg

SEQ ID NO: 23665 - RNA, 32 nt, Homo Sapiens
ucgcacgaggagucccggcugcugcagcugcu

SEQ ID NO: 23666 - RNA, 32 nt, Homo Sapiens
caacaccagaguuuauacuuauuaaaagcauu

SEQ ID NO: 23667 - RNA, 32 nt, Homo Sapiens
ggccgccgcgucuccugcccucuguccuucca

SEQ ID NO: 23668 - RNA, 32 nt, Homo Sapiens
uauuucugccccacccaccuaccccccaaaaa

SEQ ID NO: 23669 - RNA, 32 nt, Homo Sapiens
aagccaaaaugggaaaggaaaagacucauacc

SEQ ID NO: 23670 - RNA, 32 nt, Homo Sapiens
ugucuguggucugccaaauacuugcuuaaacu

SEQ ID NO: 23671 - RNA, 32 nt, Homo Sapiens
cucgcccgacagagcccggggcgcaggcgggc

SEQ ID NO: 23672 - RNA, 32 nt, Homo Sapiens
agccagaagucuuuuuuucuuuucuucuuuuu

SEQ ID NO: 23673 - RNA, 32 nt, Homo Sapiens
uaagagauuuaaaaagaaauucacugguucuu

SEQ ID NO: 23674 - RNA, 32 nt, Homo Sapiens
ucccagucaguuguggccccagccccucuccc

SEQ ID NO: 23675 - RNA, 29 nt, Homo Sapiens
ggugacuuuguggaucgaggcaaggauuc

SEQ ID NO: 23676 - RNA, 32 nt, Homo Sapiens
uguugcuagggagagggaagagggagaccaaa

SEQ ID NO: 23677 - RNA, 32 nt, Homo Sapiens
auguuaauacacaacuuucagguaauuuuaac

SEQ ID NO: 23678 - RNA, 32 nt, Homo Sapiens
uucuucauucuaucuaacugcauuuucauacc

SEQ ID NO: 23679 - RNA, 32 nt, Homo Sapiens
aucuggucaacacagcuccugaaaugcugauu

SEQ ID NO: 23680 - RNA, 32 nt, Homo Sapiens
agguaauauaugccuuuugagcugucuugacg

SEQ ID NO: 23681 - RNA, 32 nt, Homo Sapiens
gguuuuucuugacuacacugagcacuuguuuu

SEQ ID NO: 23682 - RNA, 32 nt, Homo Sapiens
acacgccaacuccgccuggguuuuacaaaguc

SEQ ID NO: 23683 - RNA, 32 nt, Homo Sapiens
gccgggcgugguggcgcacgccuuagucccag

SEQ ID NO: 23684 - RNA, 32 nt, Homo Sapiens
ccaggcuccaugacuaugaaguuggacccagu

SEQ ID NO: 23685 - RNA, 32 nt, Homo Sapiens
ggaggaaaaaauacacauaauacaaacauaca

SEQ ID NO: 23686 - RNA, 32 nt, Homo Sapiens
guagucaggaaaacagaaagggcuugaaauuu

SEQ ID NO: 23687 - RNA, 32 nt, Homo Sapiens
uuuucuuuguauauuucuaguauggcacauga

SEQ ID NO: 23688 - RNA, 32 nt, Homo Sapiens
ccaugccugcgcgcggggcgggacgcugaugg

SEQ ID NO: 23689 - RNA, 32 nt, Homo Sapiens
acuggugcuguguuuucuuccccucccuaaau

SEQ ID NO: 23690 - RNA, 32 nt, Homo Sapiens
acggggcgacggcgaaacaaaggguggugucc

SEQ ID NO: 23691 - RNA, 32 nt, Homo Sapiens
gucgugacugccggccgccgggacccgaagcg

SEQ ID NO: 23692 - RNA, 32 nt, Homo Sapiens
guacugagaggguggaaucaggcauuacaagc

SEQ ID NO: 23693 - RNA, 32 nt, Homo Sapiens
gaucuguucuucugccgcucugucuucucucu

SEQ ID NO: 23694 - RNA, 32 nt, Homo Sapiens
uuaacuuguaaaaaugugugaacacagagagu

SEQ ID NO: 23695 - RNA, 32 nt, Homo Sapiens
agaugcuggagauauuugauaaucucauuuaa

SEQ ID NO: 23696 - RNA, 32 nt, Homo Sapiens
cucuguuuuaaagacaaaauuuauugaauaua

SEQ ID NO: 23697 - RNA, 32 nt, Homo Sapiens
aaaggccgaccugguacccacugucagcagcc

SEQ ID NO: 23698 - RNA, 32 nt, Homo Sapiens
agauuuuuuuucaaguuuuuauaguugcuuua

SEQ ID NO: 23699 - RNA, 32 nt, Homo Sapiens
uugaaauugcugagauaaaauaaacuaaaaca

SEQ ID NO: 23700 - RNA, 32 nt, Homo Sapiens
gugauuccuuuggagagaauauauuuuuccca

SEQ ID NO: 23701 - RNA, 32 nt, Homo Sapiens
agcugcauccuggugucccacccaggucgagc

SEQ ID NO: 23702 - RNA, 32 nt, Homo Sapiens
uaauauuucuaaaaguuucuacauucagauua

SEQ ID NO: 23703 - RNA, 32 nt, Homo Sapiens
aaaaugacgcuuguccagcaguuugcuucuug

SEQ ID NO: 23704 - RNA, 32 nt, Homo Sapiens
gagaagugagagagggucgggggcgguggcuc

SEQ ID NO: 23705 - RNA, 32 nt, Homo Sapiens
guuaccucaucuucuuuuuuaaacuguaccca

SEQ ID NO: 23706 - RNA, 32 nt, Homo Sapiens
gccauugucauccaaauucaacucagcuccaa

SEQ ID NO: 23707 - RNA, 32 nt, Homo Sapiens
gcuaaugaggacgcuguauauggcaucgcuaa

SEQ ID NO: 23708 - RNA, 32 nt, Homo Sapiens
uagggccuaaagaugcugaggucuguauggaa

SEQ ID NO: 23709 - RNA, 32 nt, Homo Sapiens
ggggcugugccgugagauuugcuggcauaggu

SEQ ID NO: 23710 - RNA, 32 nt, Homo Sapiens
acacugcccaggccaagcaaaagcagagugug

SEQ ID NO: 23711 - RNA, 32 nt, Homo Sapiens
uggcccagcccgccggccccugagcuccggua

SEQ ID NO: 23712 - RNA, 32 nt, Homo Sapiens
ccucuccccuucgcuguccccucccccuggag

SEQ ID NO: 23713 - RNA, 32 nt, Homo Sapiens
ccccucuaccauuugcagaguccugcacaguu

SEQ ID NO: 23714 - RNA, 32 nt, Homo Sapiens
ggcacgagggcggggcgcgcggugacagcgcg

SEQ ID NO: 23715 - RNA, 32 nt, Homo Sapiens
gacacuucucuugcagaccaagagggacccug

SEQ ID NO: 23716 - RNA, 32 nt, Homo Sapiens
gucugucaaugagagcauaauuuaaaaauaua

SEQ ID NO: 23717 - RNA, 32 nt, Homo Sapiens
uaccuguguucccucaccaggccauccuguca

SEQ ID NO: 23718 - RNA, 32 nt, Homo Sapiens
gggaagggcacaggggcgcccggagcuaagau

SEQ ID NO: 23719 - RNA, 32 nt, Homo Sapiens
guagaaagcaaguauuuuaugauaaaaauguu

SEQ ID NO: 23720 - RNA, 32 nt, Homo Sapiens
ucuuggaucccgggcaggcagcguccacccag

SEQ ID NO: 23721 - RNA, 27 nt, Homo Sapiens
ggcaggucauguuucagcccuguuugu

SEQ ID NO: 23722 - RNA, 32 nt, Homo Sapiens
aaauacaauuuaaauuguacaaacacuuuaua

SEQ ID NO: 23723 - RNA, 32 nt, Homo Sapiens
augguaaaaauauacuguaaauuuuugguaau

SEQ ID NO: 23724 - RNA, 32 nt, Homo Sapiens
uagacaugguuagaaucucaccaugguuuagu

SEQ ID NO: 23725 - RNA, 32 nt, Homo Sapiens
uauauuaaauuugaauguguuaucaaaaugcu

SEQ ID NO: 23726 - RNA, 32 nt, Homo Sapiens
ggcggcggcgcgggcucagagcccggcaacgg

SEQ ID NO: 23727 - RNA, 32 nt, Homo Sapiens
augaguauaauaaacccacauguauacacaau

SEQ ID NO: 23728 - RNA, 32 nt, Homo Sapiens
ccaagcugggccccagcccacccuccugucuu

SEQ ID NO: 23729 - RNA, 32 nt, Homo Sapiens
ggcuucugggccgaccccgcuccggcgccucc

SEQ ID NO: 23730 - RNA, 32 nt, Homo Sapiens
ucuggauuguguauggguguuggugaacuugg

SEQ ID NO: 23731 - RNA, 32 nt, Homo Sapiens
aauucuugacauuuuucuuaaaauuaaaacga

SEQ ID NO: 23732 - RNA, 32 nt, Homo Sapiens
uuguacaguuuagagaagcgauuauuuauugu

SEQ ID NO: 23733 - RNA, 32 nt, Homo Sapiens
cuauuaguccccacccaaacuuuauugauuca

SEQ ID NO: 23734 - RNA, 32 nt, Homo Sapiens
uacucacacccacagcagcaagaaugaccucc

SEQ ID NO: 23735 - RNA, 32 nt, Homo Sapiens
ccccuggucuggauguuuuuuaaugcuagcuc

SEQ ID NO: 23736 - RNA, 32 nt, Homo Sapiens
accaaggcuuccaggccagggauugcccaaca

SEQ ID NO: 23737 - RNA, 32 nt, Homo Sapiens
gguguugccaucacuguucuggcaccggagaa

SEQ ID NO: 23738 - RNA, 32 nt, Homo Sapiens
cacacugcgcuuuaaucaaguuccuauucaac

SEQ ID NO: 23739 - RNA, 32 nt, Homo Sapiens
uucuucuuucccuguaccagcuguuacagugu

SEQ ID NO: 23740 - RNA, 32 nt, Homo Sapiens
uccuccuccccgcuccgucucuguccucgaau

SEQ ID NO: 23741 - RNA, 32 nt, Homo Sapiens
gcgcgcgaaggcugagcgcccaggcagccaga

SEQ ID NO: 23742 - RNA, 32 nt, Homo Sapiens
gaauuuuguuuuacuuuuuuuuuuaaagcuau

SEQ ID NO: 23743 - RNA, 31 nt, Homo Sapiens
gcacuggagccccguaagugugcaggaguga

SEQ ID NO: 23744 - RNA, 32 nt, Homo Sapiens
ggccucuucuccccggcacuuccgagauccac

SEQ ID NO: 23745 - RNA, 32 nt, Homo Sapiens
uccauguuugauuuucugaugagacuagagug

SEQ ID NO: 23746 - RNA, 32 nt, Homo Sapiens
cccgacuuccucaaaacaaacaagagauggca

SEQ ID NO: 23747 - RNA, 32 nt, Homo Sapiens
ggcuaguuuuuguauuuuuagcagugacaugg

SEQ ID NO: 23748 - RNA, 32 nt, Homo Sapiens
uuccuucacagcaugucucaccaucugcaacc

SEQ ID NO: 23749 - RNA, 32 nt, Homo Sapiens
ucguggaccccggccaggucuuagcagcaugg

SEQ ID NO: 23750 - RNA, 27 nt, Homo Sapiens
gcauggugcuagcagagcuguacgucu

SEQ ID NO: 23751 - RNA, 32 nt, Homo Sapiens
ggaagaucuguauuugauggaagaccuugaaa

SEQ ID NO: 23752 - RNA, 32 nt, Homo Sapiens
agcuuuccaaaauaugcguaugaguaaaauua

SEQ ID NO: 23753 - RNA, 32 nt, Homo Sapiens
ugaaaaaugcaaaauauagcaccccugccacu

SEQ ID NO: 23754 - RNA, 32 nt, Homo Sapiens
aaucucucucuggcuucucaccagcuugguuu

SEQ ID NO: 23755 - RNA, 32 nt, Homo Sapiens
ugcggacgagccccccaguccugggagccggc

SEQ ID NO: 23756 - RNA, 28 nt, Homo Sapiens
gaccaaguggauaccaggagccccguga

SEQ ID NO: 23757 - RNA, 32 nt, Homo Sapiens
aaacagaaggcacauggaucuggggcgacugu

SEQ ID NO: 23758 - RNA, 32 nt, Homo Sapiens
ugcagucacugucuucaaauucuuaauaauuu

SEQ ID NO: 23759 - RNA, 32 nt, Homo Sapiens
uaguguaaugaaauaaaaugugaucuagugua

SEQ ID NO: 23760 - RNA, 32 nt, Homo Sapiens
uugaagaaagagaaaccagguauucugcuaca

SEQ ID NO: 23761 - RNA, 32 nt, Homo Sapiens
ucacaaaauguugccauccaaggucuggguuu

SEQ ID NO: 23762 - RNA, 32 nt, Homo Sapiens
gguggcagccucaggauguauggggccggagg

SEQ ID NO: 23763 - RNA, 32 nt, Homo Sapiens
gaauuaaagaagaguaaaauggcuguugaagc

SEQ ID NO: 23764 - RNA, 32 nt, Homo Sapiens
ccggccaccccagccgcccuggcgccucucgc

SEQ ID NO: 23765 - RNA, 32 nt, Homo Sapiens
ugcugccaccgccgccgccaccucgucuccuc

SEQ ID NO: 23766 - RNA, 32 nt, Homo Sapiens
uuuuguucaaucucucaccacaacuggaagug

SEQ ID NO: 23767 - RNA, 32 nt, Homo Sapiens
gccccaggcugcuggggugaccgcggagagag

SEQ ID NO: 23768 - RNA, 32 nt, Homo Sapiens
acaaaaggaaaauaaaugaacauauguuugcu

SEQ ID NO: 23769 - RNA, 32 nt, Homo Sapiens
agcagaaucagaaaauacagcuacuucugccu

SEQ ID NO: 23770 - RNA, 32 nt, Homo Sapiens
ugcucuccuaagaccccgcgggccagcgccgc

SEQ ID NO: 23771 - RNA, 31 nt, Homo Sapiens
acaucaucacaguuauccugaguugaguuua

SEQ ID NO: 23772 - RNA, 32 nt, Homo Sapiens
uaugcugaauaauaauacagcgaauauuaugc

SEQ ID NO: 23773 - RNA, 32 nt, Homo Sapiens
agaagcagggacucaucugugcugucugucca

SEQ ID NO: 23774 - RNA, 32 nt, Homo Sapiens
ggguuuuaugcaaaagaaagugcuacaauucc

SEQ ID NO: 23775 - RNA, 32 nt, Homo Sapiens
cuggccuaaacuaauuuuuagauaguuccugg

SEQ ID NO: 23776 - RNA, 32 nt, Homo Sapiens
agggcacugacaggggcagcucugucacugua

SEQ ID NO: 23777 - RNA, 32 nt, Homo Sapiens
gaacccggugugcacagcagauccccgaaauu

SEQ ID NO: 23778 - RNA, 32 nt, Homo Sapiens
aauuccucugucuacaaguacaugauuuuaua

SEQ ID NO: 23779 - RNA, 32 nt, Homo Sapiens
auucuccccgcgggcucaggcucugcuucacu

SEQ ID NO: 23780 - RNA, 32 nt, Homo Sapiens
ggcgagcacuggggggccauggagcgggcaga

SEQ ID NO: 23781 - RNA, 32 nt, Homo Sapiens
agcgccgccgaggcccggggccccagacccug

SEQ ID NO: 23782 - RNA, 32 nt, Homo Sapiens
uacacaaaacuuuucaggaacuucuguguugu

SEQ ID NO: 23783 - RNA, 32 nt, Homo Sapiens
auucuagaaacaauuugauuaccucuuguuug

SEQ ID NO: 23784 - RNA, 32 nt, Homo Sapiens
caaggcugauaauaugacaaacaucauuguuu

SEQ ID NO: 23785 - RNA, 32 nt, Homo Sapiens
guuuucacuauaaggcaucaauggcagaaacu

SEQ ID NO: 23786 - RNA, 32 nt, Homo Sapiens
acagccgggggcgggggcauguguggacaucc

SEQ ID NO: 23787 - RNA, 32 nt, Homo Sapiens
ugaacaaauucgcaauugcuguuuggggcaug

SEQ ID NO: 23788 - RNA, 32 nt, Homo Sapiens
gagggaggcccuuugugggucuguggcuggga

SEQ ID NO: 23789 - RNA, 32 nt, Homo Sapiens
gagacuggcaauguuugcuaccaugggaaaau

SEQ ID NO: 23790 - RNA, 32 nt, Homo Sapiens
ggauaauuguauugggaugccuaugaucuuau

SEQ ID NO: 23791 - RNA, 30 nt, Homo Sapiens
uugauaugcugaaaaauagggagcuacuua

SEQ ID NO: 23792 - RNA, 32 nt, Homo Sapiens
aaggauaguuuauuuuaaauggcauauugaaa

SEQ ID NO: 23793 - RNA, 32 nt, Homo Sapiens
ugugauuacguguauguuucuucuuucuuuua

SEQ ID NO: 23794 - RNA, 32 nt, Homo Sapiens
auauaguaacaagccugucaaauaucugcaag

SEQ ID NO: 23795 - RNA, 32 nt, Homo Sapiens
ccggagcgcggucgggacacagcgccucuagg

SEQ ID NO: 23796 - RNA, 32 nt, Homo Sapiens
auuagcuuuggauuuuaacauguuuuucugaa

SEQ ID NO: 23797 - RNA, 32 nt, Homo Sapiens
aacaaugaaaaauuauuuguuguaucuaauac

SEQ ID NO: 23798 - RNA, 32 nt, Homo Sapiens
gagcaguggauaugucugguccuccuaguagc

SEQ ID NO: 23799 - RNA, 32 nt, Homo Sapiens
agaggaaucaccguaccaugagcauuaaucaa

SEQ ID NO: 23800 - RNA, 32 nt, Homo Sapiens
uuucuggaucucggcuucuccagcuguaaaau

SEQ ID NO: 23801 - RNA, 32 nt, Homo Sapiens
ucuucauagggaccuuuaaaaagcaggaaaua

SEQ ID NO: 23802 - RNA, 32 nt, Homo Sapiens
ggcuggagcgcaguggcacgaucgcggcucac

SEQ ID NO: 23803 - RNA, 32 nt, Homo Sapiens
caacuuuucccucucaagcucugcccuuccca

SEQ ID NO: 23804 - RNA, 32 nt, Homo Sapiens
cucagaaucacuuuucccaucuguaaaauuga

SEQ ID NO: 23805 - RNA, 32 nt, Homo Sapiens
auacagauggcuaguugcauaaaauuaaauuu

SEQ ID NO: 23806 - RNA, 32 nt, Homo Sapiens
acuugacaaucauuacacuaaaacagauuuga

SEQ ID NO: 23807 - RNA, 32 nt, Homo Sapiens
ccuuuuaaauuaucuucaguuuccaguucaag

SEQ ID NO: 23808 - RNA, 31 nt, Homo Sapiens
uccccagggacacacagccaggcaaggaggg

SEQ ID NO: 23809 - RNA, 32 nt, Homo Sapiens
aagcuuuucuucauuugaaauguacucccuug

SEQ ID NO: 23810 - RNA, 32 nt, Homo Sapiens
uuccaccugugcccucccugggauauguaugc

SEQ ID NO: 23811 - RNA, 32 nt, Homo Sapiens
gcacagggagggucagaagugccaagucacug

SEQ ID NO: 23812 - RNA, 32 nt, Homo Sapiens
aaccuugucucagggaccaaugagaugaaaug

SEQ ID NO: 23813 - RNA, 32 nt, Homo Sapiens
cagggccagggccagcaaagucccucccauau

SEQ ID NO: 23814 - RNA, 27 nt, Homo Sapiens
ugaggguccaccuucagcccuuuggcu

SEQ ID NO: 23815 - RNA, 32 nt, Homo Sapiens
agccugagccgggcagggccccugccucugcu

SEQ ID NO: 23816 - RNA, 32 nt, Homo Sapiens
cugggacugacacguggacuugggcggugcug

SEQ ID NO: 23817 - RNA, 32 nt, Homo Sapiens
uuugagcucccucccuuuuauuauguaaugaa

SEQ ID NO: 23818 - RNA, 32 nt, Homo Sapiens
uccgguccgagcucggggcgccccgcaggcga

SEQ ID NO: 23819 - RNA, 32 nt, Homo Sapiens
acaagcucucaggacuuccggucgccaugaug

SEQ ID NO: 23820 - RNA, 32 nt, Homo Sapiens
acgugggcgucgucaggaaguaccuggccugc

SEQ ID NO: 23821 - RNA, 32 nt, Homo Sapiens
ugccccuuguguuuggaauuauaaaauauagg

SEQ ID NO: 23822 - RNA, 32 nt, Homo Sapiens
accaacuguggaacugaaugggcuugcuauga

SEQ ID NO: 23823 - RNA, 32 nt, Homo Sapiens
gcaaugcugaggaugccaacuucacgcucaga

SEQ ID NO: 23824 - RNA, 32 nt, Homo Sapiens
ugccccaagcccaccuggggccccauuaaaga

SEQ ID NO: 23825 - RNA, 32 nt, Homo Sapiens
uagcaguagagcuaucuuaagauuuaauggaa

SEQ ID NO: 23826 - RNA, 32 nt, Homo Sapiens
cuggugccaaagguuccguugcagcuuuuuac

SEQ ID NO: 23827 - RNA, 32 nt, Homo Sapiens
aaaaugucaaaauaauguuuuaaguauaagag

SEQ ID NO: 23828 - RNA, 32 nt, Homo Sapiens
cugugguuucaccagcuuagcuugagcucugg

SEQ ID NO: 23829 - RNA, 32 nt, Homo Sapiens
aucagaucaauuacagaauaauuguguuguga

SEQ ID NO: 23830 - RNA, 32 nt, Homo Sapiens
aauagugaugaacaaagauccuuuuucauacu

SEQ ID NO: 23831 - RNA, 32 nt, Homo Sapiens
gugcugcaaagguaaagggucuuggaauaaag

SEQ ID NO: 23832 - RNA, 32 nt, Homo Sapiens
cgcggccugaucuaacccagccaggcaggcaa

SEQ ID NO: 23833 - RNA, 32 nt, Homo Sapiens
gccacugcacuccagccugggcgacagagcga

SEQ ID NO: 23834 - RNA, 32 nt, Homo Sapiens
gccacuacacuccagccugggcgacagagcaa

SEQ ID NO: 23835 - RNA, 32 nt, Homo Sapiens
aggauuauacuuccauguccccuuggauguag

SEQ ID NO: 23836 - RNA, 32 nt, Homo Sapiens
acacacauccccacccuguguacacacaaucu

SEQ ID NO: 23837 - RNA, 32 nt, Homo Sapiens
uuuuggugugcccauuccuucuuuuccugaac

SEQ ID NO: 23838 - RNA, 32 nt, Homo Sapiens
auaaugugccuuggagaagaccuuuuugaguu

SEQ ID NO: 23839 - RNA, 29 nt, Homo Sapiens
gggauaaagaguuucaguuuagcuccuuu

SEQ ID NO: 23840 - RNA, 32 nt, Homo Sapiens
uuggccuuugguucuugcaugagccuugacag

SEQ ID NO: 23841 - RNA, 32 nt, Homo Sapiens
cggcaccuccugcugcgagacccggcucucag

SEQ ID NO: 23842 - RNA, 32 nt, Homo Sapiens
cggauuguagaacuuggugcugauuuugacuu

SEQ ID NO: 23843 - RNA, 32 nt, Homo Sapiens
gcagagaggggaggugggaggacaguuagacc

SEQ ID NO: 23844 - RNA, 32 nt, Homo Sapiens
auuaauauagguuuucuuucuguauuauaaaa

SEQ ID NO: 23845 - RNA, 32 nt, Homo Sapiens
cucaggaggaccgagugagggcaccgaggcgg

SEQ ID NO: 23846 - RNA, 32 nt, Homo Sapiens
aggcacuucugcuguauuaacuccaugaggua

SEQ ID NO: 23847 - RNA, 31 nt, Homo Sapiens
auuguuacaaagaagaaaagauacagauuug

SEQ ID NO: 23848 - RNA, 32 nt, Homo Sapiens
cagugcagugacucacccccugcccccgcacc

SEQ ID NO: 23849 - RNA, 32 nt, Homo Sapiens
ugagugccaagucccccucugauauuuccugu

SEQ ID NO: 23850 - RNA, 32 nt, Homo Sapiens
gugggcagccuccugcccucucugggucucag

SEQ ID NO: 23851 - RNA, 30 nt, Homo Sapiens
ccgggaggcaggcuccaggccucagcaggu

SEQ ID NO: 23852 - RNA, 32 nt, Homo Sapiens
auggagucaggguuuccggagagaccgaacuc

SEQ ID NO: 23853 - RNA, 32 nt, Homo Sapiens
ccuggaugagcugaguggagccaggcuggccc

SEQ ID NO: 23854 - RNA, 32 nt, Homo Sapiens
cacgauucaauuaaguuuucauuuauaucgau

SEQ ID NO: 23855 - RNA, 32 nt, Homo Sapiens
uauuuuuccugccuguuguuggauuuggggaa

SEQ ID NO: 23856 - RNA, 32 nt, Homo Sapiens
gaguccuuuuucuuguagagguaaguaaaauc

SEQ ID NO: 23857 - RNA, 32 nt, Homo Sapiens
guuaauaaacauuguacuguucuuuugcuucu

SEQ ID NO: 23858 - RNA, 32 nt, Homo Sapiens
auugcuuuuuaaaguguguaguuuuaugcaug

SEQ ID NO: 23859 - RNA, 32 nt, Homo Sapiens
uccugagaacuaaaugucuuuuuuauucuuau

SEQ ID NO: 23860 - RNA, 32 nt, Homo Sapiens
cuucucuuuacuuuuccacucuaggccacgau

SEQ ID NO: 23861 - RNA, 32 nt, Homo Sapiens
cuaccaacaccgugagugcagcaugccaucgg

SEQ ID NO: 23862 - RNA, 32 nt, Homo Sapiens
ccgaaaagauggauugccucacuuuccacuuu

SEQ ID NO: 23863 - RNA, 32 nt, Homo Sapiens
uuauguacacaccacguucacacacacacaga

SEQ ID NO: 23864 - RNA, 32 nt, Homo Sapiens
ggacauuguuuuuauagggucauuuuaggccc

SEQ ID NO: 23865 - RNA, 32 nt, Homo Sapiens
ugcucaaacuaaaaguaggucaucacuuccca

SEQ ID NO: 23866 - RNA, 32 nt, Homo Sapiens
guugguaaguuuuuuauuacuaauucaacuuc

SEQ ID NO: 23867 - RNA, 32 nt, Homo Sapiens
ggagccgcugaccagcagcauggaggaccccg

SEQ ID NO: 23868 - RNA, 28 nt, Homo Sapiens
agcccggggcggcgggugggaagaggac

SEQ ID NO: 23869 - RNA, 32 nt, Homo Sapiens
agaaggaggaggaggagagaaaggcggcucuu

SEQ ID NO: 23870 - RNA, 32 nt, Homo Sapiens
uugguuuuauauuuagauuuauauaacugguu

SEQ ID NO: 23871 - RNA, 32 nt, Homo Sapiens
uagaggaggagcuggcgcugcuggcggccggg

SEQ ID NO: 23872 - RNA, 32 nt, Homo Sapiens
aaauuuuuaauuuuuguggguacauaguaggu

SEQ ID NO: 23873 - RNA, 32 nt, Homo Sapiens
agcccaggcagacgccgucgagaugcagggcc

SEQ ID NO: 23874 - RNA, 32 nt, Homo Sapiens
cucuggggauggguggggaggggggcggguga

SEQ ID NO: 23875 - RNA, 32 nt, Homo Sapiens
ccaucaaggguauacauauaugaaaagccaag

SEQ ID NO: 23876 - RNA, 32 nt, Homo Sapiens
ccucaaccccgggucugacacuugcagaucag

SEQ ID NO: 23877 - RNA, 32 nt, Homo Sapiens
ccccuccacgccaggguccccccgccccaccc

SEQ ID NO: 23878 - RNA, 32 nt, Homo Sapiens
gcuccaggaagcuggccaccucugagcagggc

SEQ ID NO: 23879 - RNA, 32 nt, Homo Sapiens
aauuacugagguuuuuaacauguauucuguuc

SEQ ID NO: 23880 - RNA, 32 nt, Homo Sapiens
uuccccuccccuucuaccuccuccucggccag

SEQ ID NO: 23881 - RNA, 32 nt, Homo Sapiens
ugcaaguaauuaccauuaaauucacacaugaa

SEQ ID NO: 23882 - RNA, 32 nt, Homo Sapiens
guuauaaaaacagccaucauggcuguaaaugc

SEQ ID NO: 23883 - RNA, 32 nt, Homo Sapiens
ugugaauucccucucccugggucuuccucauu

SEQ ID NO: 23884 - RNA, 32 nt, Homo Sapiens
caccuguaaucccagcacuuugggaggccgag

SEQ ID NO: 23885 - RNA, 32 nt, Homo Sapiens
caccuguaauccuagcacuuugggaggcugag

SEQ ID NO: 23886 - RNA, 32 nt, Homo Sapiens
caccuauaaucccagcacuuuaggaggccgag

SEQ ID NO: 23887 - RNA, 32 nt, Homo Sapiens
cgccuguaaucccagcacuuugggaagccgag

SEQ ID NO: 23888 - RNA, 32 nt, Homo Sapiens
caccuauaaucccagcacuuugggaggccaag

SEQ ID NO: 23889 - RNA, 32 nt, Homo Sapiens
uugucuccaccagcuacccagauggaaggcaa

SEQ ID NO: 23890 - RNA, 32 nt, Homo Sapiens
uuuuuggcagaaauaaaaccacagguagauuc

SEQ ID NO: 23891 - RNA, 32 nt, Homo Sapiens
ccggagucccgccgccgccgccgcccucaucu

SEQ ID NO: 23892 - RNA, 32 nt, Homo Sapiens
agugacugggcggugccggcgccggagacgau

SEQ ID NO: 23893 - RNA, 32 nt, Homo Sapiens
ugcuaccagggcacuccugugcucuugggagc

SEQ ID NO: 23894 - RNA, 32 nt, Homo Sapiens
guccagaaagaaugagauauaacugguagagc

SEQ ID NO: 23895 - RNA, 32 nt, Homo Sapiens
uuggcagccugccugccacugagggaaguccc

SEQ ID NO: 23896 - RNA, 32 nt, Homo Sapiens
gguccagaaggaaugaccauggagcggaaaga

SEQ ID NO: 23897 - RNA, 32 nt, Homo Sapiens
ccccgagcuucagcugcaggacaaugcugcca

SEQ ID NO: 23898 - RNA, 31 nt, Homo Sapiens
gaucucaugcuccuccccacagcccucuucu

SEQ ID NO: 23899 - RNA, 32 nt, Homo Sapiens
aagcuuugacuguucgacgugccugcucagcu

SEQ ID NO: 23900 - RNA, 28 nt, Homo Sapiens
aaaaaggggcggccgcucaagaugaaaa

SEQ ID NO: 23901 - RNA, 32 nt, Homo Sapiens
ccuggcugagguggcagcagggggcgggacgc

SEQ ID NO: 23902 - RNA, 32 nt, Homo Sapiens
uuaagcaagcaaaaacaaaaugggaugugaag

SEQ ID NO: 23903 - RNA, 32 nt, Homo Sapiens
gccuuugacccccaugcugcuuccugagaguc

SEQ ID NO: 23904 - RNA, 32 nt, Homo Sapiens
uucccgcccuccccgcagcgccggccgagccg

SEQ ID NO: 23905 - RNA, 32 nt, Homo Sapiens
uaaacacacucuccuccaccggcgccuccccc

SEQ ID NO: 23906 - RNA, 32 nt, Homo Sapiens
ugguuuugagccccuccucugcagggaaugcu

SEQ ID NO: 23907 - RNA, 32 nt, Homo Sapiens
ugaccaggccccagccggcaacuucuaccgag

SEQ ID NO: 23908 - RNA, 32 nt, Homo Sapiens
ugccccacgccaaugaguuccuggacgggccg

SEQ ID NO: 23909 - RNA, 32 nt, Homo Sapiens
agaggaaaccccuuccugggccugcugcccuc

SEQ ID NO: 23910 - RNA, 32 nt, Homo Sapiens
gugucgaaucugcggcggcgacccggcgccgc

SEQ ID NO: 23911 - RNA, 32 nt, Homo Sapiens
acaucucacuucugcuuccucaucucagccca

SEQ ID NO: 23912 - RNA, 32 nt, Homo Sapiens
cuacccuauagguucuaggcuagacagagucg

SEQ ID NO: 23913 - RNA, 32 nt, Homo Sapiens
gcuguuccucaauccuuacuaaacauucaugu

SEQ ID NO: 23914 - RNA, 32 nt, Homo Sapiens
uuggggaagacaucuuccuucucugccucggc

SEQ ID NO: 23915 - RNA, 32 nt, Homo Sapiens
cugcauccccagagcccucccagccuaagaag

SEQ ID NO: 23916 - RNA, 32 nt, Homo Sapiens
gcggaaaauggcggccccggcaggcggcggag

SEQ ID NO: 23917 - RNA, 32 nt, Homo Sapiens
aaagaaaucagaaacaauaaaaauugaaaaau

SEQ ID NO: 23918 - RNA, 32 nt, Homo Sapiens
agaagcccgcggccgcgaugccugacgagcug

SEQ ID NO: 23919 - RNA, 32 nt, Homo Sapiens
ggaagagaacggccgccucuucgcgccgccaa

SEQ ID NO: 23920 - RNA, 32 nt, Homo Sapiens
cuuugaacuaggcugaagcaucugagucuucu

SEQ ID NO: 23921 - RNA, 32 nt, Homo Sapiens
acaaauaugcgucccccucucuuccaauaucc

SEQ ID NO: 23922 - RNA, 32 nt, Homo Sapiens
cacaucccacuuuauuauuaauccuuguauau

SEQ ID NO: 23923 - RNA, 32 nt, Homo Sapiens
guuuuugguaaccuagcuuucauacacauaau

SEQ ID NO: 23924 - RNA, 32 nt, Homo Sapiens
auugacuccuuuccaauagaaagaaacuaaac

SEQ ID NO: 23925 - RNA, 32 nt, Homo Sapiens
caggauucaaagccauagaucauggccccggg

SEQ ID NO: 23926 - RNA, 32 nt, Homo Sapiens
ucugcuggaugugaguuuccacugcaugggcu

SEQ ID NO: 23927 - RNA, 32 nt, Homo Sapiens
cuggaaucuucagaugccuguuaggccuucuu

SEQ ID NO: 23928 - RNA, 32 nt, Homo Sapiens
gccgcaggcagggagugagcugggggugccug

SEQ ID NO: 23929 - RNA, 32 nt, Homo Sapiens
ugucgcuccuugugucccucgucccacaggag

SEQ ID NO: 23930 - RNA, 32 nt, Homo Sapiens
ccguuuugacagagcgcagaucggugcguuua

SEQ ID NO: 23931 - RNA, 32 nt, Homo Sapiens
ccgucacuuggguuaaaaccaccgcaaauucc

SEQ ID NO: 23932 - RNA, 32 nt, Homo Sapiens
uuacuuuauuuauagagacuuuccaaguaugu

SEQ ID NO: 23933 - RNA, 32 nt, Homo Sapiens
ccuaagggaaagggaagcacaugaucauggga

SEQ ID NO: 23934 - RNA, 32 nt, Homo Sapiens
ccaaauuccccgcaggauuuuaccaaacccuu

SEQ ID NO: 23935 - RNA, 32 nt, Homo Sapiens
gucaagcagaagcuuuucaaagugacaaagga

SEQ ID NO: 23936 - RNA, 32 nt, Homo Sapiens
uauagaagcgagcuaccaaaagacgucuccua

SEQ ID NO: 23937 - RNA, 32 nt, Homo Sapiens
agucacccaugauaggaccuccagguucuguc

SEQ ID NO: 23938 - RNA, 32 nt, Homo Sapiens
gagcugaaggcacagucugccccacccccacc

SEQ ID NO: 23939 - RNA, 32 nt, Homo Sapiens
ugggccaggcugaggcgcugcugcuggagcgg

SEQ ID NO: 23940 - RNA, 32 nt, Homo Sapiens
uuucauuguuuuacuuuugucuuccucacuag

SEQ ID NO: 23941 - RNA, 32 nt, Homo Sapiens
uuggguucugccaugccuggagcaugacccug

SEQ ID NO: 23942 - RNA, 31 nt, Homo Sapiens
caguugcugcagccaaguccagcuaugagga

SEQ ID NO: 23943 - RNA, 32 nt, Homo Sapiens
gugccucugccagcaaggaggggccggccagc

SEQ ID NO: 23944 - RNA, 32 nt, Homo Sapiens
ugaaucaucuugucuaaauagcuuacagcaua

SEQ ID NO: 23945 - RNA, 32 nt, Homo Sapiens
uggcuccugaccaagcccugucacugcugccc

SEQ ID NO: 23946 - RNA, 32 nt, Homo Sapiens
acccuagccagcucagccuccguccgcugaga

SEQ ID NO: 23947 - RNA, 31 nt, Homo Sapiens
acuugccacccccagaaccagcucaccuggc

SEQ ID NO: 23948 - RNA, 32 nt, Homo Sapiens
auuuuaccugaauaaacuaaugcucagagaua

SEQ ID NO: 23949 - RNA, 32 nt, Homo Sapiens
gauacugugcuugauuuuuggagaggggagag

SEQ ID NO: 23950 - RNA, 32 nt, Homo Sapiens
cacagugaagccacuuguaacugcacacuuuu

SEQ ID NO: 23951 - RNA, 32 nt, Homo Sapiens
cggccucugugcagccucaucuccuggaaucu

SEQ ID NO: 23952 - RNA, 32 nt, Homo Sapiens
uugcccaggcuggucugaagcugcugggcuca

SEQ ID NO: 23953 - RNA, 32 nt, Homo Sapiens
gaaagaaagagaaaaggacucuauaggcuacu

SEQ ID NO: 23954 - RNA, 32 nt, Homo Sapiens
ugagauggagugccgcccaccuccugcggaua

SEQ ID NO: 23955 - RNA, 32 nt, Homo Sapiens
ccgcaggcuuuccucuuccccaguggcccacu

SEQ ID NO: 23956 - RNA, 32 nt, Homo Sapiens
aaacaugagagcccagaaaacugucauuuagc

SEQ ID NO: 23957 - RNA, 32 nt, Homo Sapiens
gucuguuuucuuuuuauauaagugugucuuag

SEQ ID NO: 23958 - RNA, 32 nt, Homo Sapiens
gggggauggugugcucccagccugcagucuuu

SEQ ID NO: 23959 - RNA, 32 nt, Homo Sapiens
uucuuuacugagggagcuuagaaggacacuuu

SEQ ID NO: 23960 - RNA, 32 nt, Homo Sapiens
gggugugugauaagcuucucaaaccugcauag

SEQ ID NO: 23961 - RNA, 32 nt, Homo Sapiens
guccugcucccucacuccucgccccgcccccu

SEQ ID NO: 23962 - RNA, 32 nt, Homo Sapiens
guggccgugcacugcggacgucguccuccucc

SEQ ID NO: 23963 - RNA, 32 nt, Homo Sapiens
guagaccagaaaguaacuucaaauguguauua

SEQ ID NO: 23964 - RNA, 32 nt, Homo Sapiens
gaaggccuaaugcacuuguaaaacaggauuuu

SEQ ID NO: 23965 - RNA, 32 nt, Homo Sapiens
uuugcccuugggaauacuccugcacaaggucu

SEQ ID NO: 23966 - RNA, 32 nt, Homo Sapiens
augggcccaccgaugcugcaagagaucaguaa

SEQ ID NO: 23967 - RNA, 32 nt, Homo Sapiens
caggagauuggggguugggggaggcagcgggu

SEQ ID NO: 23968 - RNA, 32 nt, Homo Sapiens
gggacgagggcgcgugggugaggaaggucagg

SEQ ID NO: 23969 - RNA, 32 nt, Homo Sapiens
uauuuauugauuucuuuuuuuuauucaacuga

SEQ ID NO: 23970 - RNA, 32 nt, Homo Sapiens
ccaccaguaauuagcucuguggcccagucacc

SEQ ID NO: 23971 - RNA, 32 nt, Homo Sapiens
agccgcacugaugcuugcugggugcugagugc

SEQ ID NO: 23972 - RNA, 32 nt, Homo Sapiens
uaaaacccagcuugccugucuuugucucugug

SEQ ID NO: 23973 - RNA, 32 nt, Homo Sapiens
uggccccagaaaguuucgguucugcccggcgg

SEQ ID NO: 23974 - RNA, 32 nt, Homo Sapiens
cagcagaaggggcugggcaggggcgguggagg

SEQ ID NO: 23975 - RNA, 32 nt, Homo Sapiens
aacaaauuuuuccagcaagcugagaaccuggg

SEQ ID NO: 23976 - RNA, 32 nt, Homo Sapiens
augaaugaaugaaugaaagacuauuuucauuc

SEQ ID NO: 23977 - RNA, 32 nt, Homo Sapiens
uggaagguggccuuucucccaagcugguggau

SEQ ID NO: 23978 - RNA, 32 nt, Homo Sapiens
cucucggcuccauugggagagcagcugccaac

SEQ ID NO: 23979 - RNA, 32 nt, Homo Sapiens
cuguuccauuuuccguaucugcuucgggcuuc

SEQ ID NO: 23980 - RNA, 32 nt, Homo Sapiens
ggacccccuggccccucuuuugucuucuguga

SEQ ID NO: 23981 - RNA, 32 nt, Homo Sapiens
aucugggggagaggaguguggaaggguugggg

SEQ ID NO: 23982 - RNA, 30 nt, Homo Sapiens
cggcggcgaugucggccgccggugcccgag

SEQ ID NO: 23983 - RNA, 32 nt, Homo Sapiens
ugggauuugugcuucuuauguuacccagaugg

SEQ ID NO: 23984 - RNA, 32 nt, Homo Sapiens
ggacagaggaagaugggagggugcucaucacc

SEQ ID NO: 23985 - RNA, 32 nt, Homo Sapiens
accgcucgcaccccagccgcccggcccgcgac

SEQ ID NO: 23986 - RNA, 31 nt, Homo Sapiens
accucuaaaaagaaaauggauguuauaagua

SEQ ID NO: 23987 - RNA, 32 nt, Homo Sapiens
agcggucagcccagcccagccuccucugcguc

SEQ ID NO: 23988 - RNA, 32 nt, Homo Sapiens
agguggacaagggcccaugaaaaaauacaggu

SEQ ID NO: 23989 - RNA, 32 nt, Homo Sapiens
ucagcagagugcuuuaccaauugaaguaaaau

SEQ ID NO: 23990 - RNA, 32 nt, Homo Sapiens
gcgaggcuguggguggcgggaccgcugacucu

SEQ ID NO: 23991 - RNA, 32 nt, Homo Sapiens
aagcagguuacccaccauacuacgggugggcc

SEQ ID NO: 23992 - RNA, 32 nt, Homo Sapiens
gcccucuggucccagguguggagccuuugccu

SEQ ID NO: 23993 - RNA, 32 nt, Homo Sapiens
uuucaccaaagucuguuuauaucaacacacac

SEQ ID NO: 23994 - RNA, 32 nt, Homo Sapiens
cacaauuaacuccguuuccaaauacauuccag

SEQ ID NO: 23995 - RNA, 32 nt, Homo Sapiens
caggcucugccagcuacccgcgcucugagccc

SEQ ID NO: 23996 - RNA, 32 nt, Homo Sapiens
ccccgcugaccauggcaguauuucaugacgag

SEQ ID NO: 23997 - RNA, 32 nt, Homo Sapiens
uuugcugcuuaggucaucucaaggcugauacu

SEQ ID NO: 23998 - RNA, 32 nt, Homo Sapiens
aacuggcuuuucaaugggacaccuguggcucc

SEQ ID NO: 23999 - RNA, 32 nt, Homo Sapiens
ccgcgcgccccucuccuuucugugcuuaaugg

SEQ ID NO: 24000 - RNA, 32 nt, Homo Sapiens
ugggaagaaugggaagugacugcuuaauggau

SEQ ID NO: 24001 - RNA, 32 nt, Homo Sapiens
cccuguuuguuccugcuucucaugauuuuccu

SEQ ID NO: 24002 - RNA, 32 nt, Homo Sapiens
guuggaggacgggcggucgcgcggccuuuccc

SEQ ID NO: 24003 - RNA, 32 nt, Homo Sapiens
aaacauaccagguugggaaaaaucaguaagca

SEQ ID NO: 24004 - RNA, 32 nt, Homo Sapiens
ggacgauauaaaaauauauauuuuuuaaacaa

SEQ ID NO: 24005 - RNA, 32 nt, Homo Sapiens
ggcauguaagaaauagcgucaguguccuaaug

SEQ ID NO: 24006 - RNA, 32 nt, Homo Sapiens
agccuucuucagccuucuucagcccucuucua

SEQ ID NO: 24007 - RNA, 32 nt, Homo Sapiens
gcuuccggacccgcuccggcgccgcuuccgga

SEQ ID NO: 24008 - RNA, 32 nt, Homo Sapiens
ggccugaagcggcgguaccggugcuggcggcg

SEQ ID NO: 24009 - RNA, 32 nt, Homo Sapiens
uuucaggccuggggagggaggggagcccccga

SEQ ID NO: 24010 - RNA, 32 nt, Homo Sapiens
acucagugguggccacuacgcagaccagacuu

SEQ ID NO: 24011 - RNA, 32 nt, Homo Sapiens
auuccauaaaucucuuccugugugagccacca

SEQ ID NO: 24012 - RNA, 32 nt, Homo Sapiens
gaugauagaagauauuuaagauaucuagaugg

SEQ ID NO: 24013 - RNA, 32 nt, Homo Sapiens
gggggcaggaggagguggggaggggcacugcc

SEQ ID NO: 24014 - RNA, 32 nt, Homo Sapiens
auuagguuacuaaucuuaauuuuuuugaaaua

SEQ ID NO: 24015 - RNA, 32 nt, Homo Sapiens
uuaaucguagccggaucagggagugagucuuu

SEQ ID NO: 24016 - RNA, 32 nt, Homo Sapiens
ugacaguguucaguaaacaaaucaguuggcag

SEQ ID NO: 24017 - RNA, 32 nt, Homo Sapiens
cucagcuccacccaccuggagacgaauguagc

SEQ ID NO: 24018 - RNA, 32 nt, Homo Sapiens
ccuuugaggaugcccggggucucccacaggcc

SEQ ID NO: 24019 - RNA, 32 nt, Homo Sapiens
cgcuccucuaaagauaugugcuggcuucuuau

SEQ ID NO: 24020 - RNA, 32 nt, Homo Sapiens
aaauguaaugaaauucagucuaguucugcuga

SEQ ID NO: 24021 - RNA, 32 nt, Homo Sapiens
gcugacaucuugaauccuuccauuccacacag

SEQ ID NO: 24022 - RNA, 32 nt, Homo Sapiens
cccgcgcuccagccccgccgcgcgccugaccu

SEQ ID NO: 24023 - RNA, 32 nt, Homo Sapiens
cucuucacuccagcaugcacaugcccucuuuc

SEQ ID NO: 24024 - RNA, 32 nt, Homo Sapiens
uugaugcucuaaugggucugugcccuaugguc

SEQ ID NO: 24025 - RNA, 32 nt, Homo Sapiens
uugcagagcuaguggauguguuugucuacaag

SEQ ID NO: 24026 - RNA, 32 nt, Homo Sapiens
uaaauacgaauuuucaaaaacgcaacccaagu

SEQ ID NO: 24027 - RNA, 32 nt, Homo Sapiens
gcgggaggccgcgccuggcagguuucugaaac

SEQ ID NO: 24028 - RNA, 32 nt, Homo Sapiens
ggcgcuccagcacuggccgccggcguggggcg

SEQ ID NO: 24029 - RNA, 32 nt, Homo Sapiens
uuuguuucuuuaaaggaucuuauauuuuuccu

SEQ ID NO: 24030 - RNA, 32 nt, Homo Sapiens
agaggccuggggaauuauaauagcccugaggc

SEQ ID NO: 24031 - RNA, 32 nt, Homo Sapiens
aaugaagcuuugcaucgagaaacgaugggucu

SEQ ID NO: 24032 - RNA, 32 nt, Homo Sapiens
gaaggucaguagauaaacaagugaacaaaggu

SEQ ID NO: 24033 - RNA, 32 nt, Homo Sapiens
cguggagcggagcaaggccaggcggccccugc

SEQ ID NO: 24034 - RNA, 32 nt, Homo Sapiens
ccccuccgucuccaggccccaggccucuuugu

SEQ ID NO: 24035 - RNA, 32 nt, Homo Sapiens
gguagagaugacuauuaagaagaaauuagauc

SEQ ID NO: 24036 - RNA, 32 nt, Homo Sapiens
augaauuuuuuauucuguaaucaaaaagcaau

SEQ ID NO: 24037 - RNA, 32 nt, Homo Sapiens
guagcuggcggaaggagagaggcggccguccu

SEQ ID NO: 24038 - RNA, 32 nt, Homo Sapiens
cagacugucugauucagugaacuuuuuguagu

SEQ ID NO: 24039 - RNA, 32 nt, Homo Sapiens
guagcugggaagcuuuauguguguguauguca

SEQ ID NO: 24040 - RNA, 31 nt, Homo Sapiens
uuuuggaagucaagaaaguccauuuaggccg

SEQ ID NO: 24041 - RNA, 32 nt, Homo Sapiens
uuuauauuucuagcuuuuuuuaauaaaauaaa

SEQ ID NO: 24042 - RNA, 30 nt, Homo Sapiens
cacuuccuggacugguucgugccggucuac

SEQ ID NO: 24043 - RNA, 32 nt, Homo Sapiens
cgcgaguccuccccgggcaaauaggcuccgag

SEQ ID NO: 24044 - RNA, 32 nt, Homo Sapiens
ucacaggcauggccaccuccaguucggcauuc

SEQ ID NO: 24045 - RNA, 32 nt, Homo Sapiens
ccuuuucuuuucugccggguaauggcugcuuc

SEQ ID NO: 24046 - RNA, 32 nt, Homo Sapiens
uuuagaauggaggaagaacaacaaagacaugc

SEQ ID NO: 24047 - RNA, 32 nt, Homo Sapiens
ccacguuuucuuucuuuuccugguagauagga

SEQ ID NO: 24048 - RNA, 32 nt, Homo Sapiens
caguuguauaaaauaaauucuauuuaucgcua

SEQ ID NO: 24049 - RNA, 32 nt, Homo Sapiens
gccuggggaaagggcuuggacugugaaaagaa

SEQ ID NO: 24050 - RNA, 32 nt, Homo Sapiens
uaaauaucuuaccagccuauguaaggccgaau

SEQ ID NO: 24051 - RNA, 32 nt, Homo Sapiens
caggcgacccacuuucuguaccuaccagcugu

SEQ ID NO: 24052 - RNA, 32 nt, Homo Sapiens
cugcccauaaaacagggugugaaaggcaucuc

SEQ ID NO: 24053 - RNA, 32 nt, Homo Sapiens
uagagcagaaaagggagagaaguguuguauuc

SEQ ID NO: 24054 - RNA, 32 nt, Homo Sapiens
cuacauuccacgacuuuuccugcaaggccuac

SEQ ID NO: 24055 - RNA, 32 nt, Homo Sapiens
aaggggaaggagaauaaacagaauauuuauua

SEQ ID NO: 24056 - RNA, 29 nt, Homo Sapiens
uuuuucauauguauucugugccauacuau

SEQ ID NO: 24057 - RNA, 32 nt, Homo Sapiens
ugucuuuucuucacacugaguucucuauauuu

SEQ ID NO: 24058 - RNA, 32 nt, Homo Sapiens
aagaaugaaacacaaauggauuuguauguaac

SEQ ID NO: 24059 - RNA, 28 nt, Homo Sapiens
ggccuuaguguccacaggaugaaauguc

SEQ ID NO: 24060 - RNA, 32 nt, Homo Sapiens
gggagggauugggggaggaaaggggagguuuc

SEQ ID NO: 24061 - RNA, 32 nt, Homo Sapiens
uuuaaaaaaaauuuacaaagcuccuucauuuu

SEQ ID NO: 24062 - RNA, 32 nt, Homo Sapiens
uaaaaaggagauuauucuaaaauauaaacuua

SEQ ID NO: 24063 - RNA, 32 nt, Homo Sapiens
aggagaagcacccccagggcagcccucuugac

SEQ ID NO: 24064 - RNA, 32 nt, Homo Sapiens
ccagauggggguggaguggaggacacagggag

SEQ ID NO: 24065 - RNA, 32 nt, Homo Sapiens
ucuacuaaaaauacaaaaaauuagcugggcgu

SEQ ID NO: 24066 - RNA, 32 nt, Homo Sapiens
cagugaggugggggcgggugggcagggaaugg

SEQ ID NO: 24067 - RNA, 32 nt, Homo Sapiens
gcccucaaaaauacugucucaacagcuggaaa

SEQ ID NO: 24068 - RNA, 32 nt, Homo Sapiens
cugaugccugcagcugcauaaguaguguuuca

SEQ ID NO: 24069 - RNA, 32 nt, Homo Sapiens
ugggcugcuugguucugacauucuggacugca

SEQ ID NO: 24070 - RNA, 32 nt, Homo Sapiens
cacuaguguaaacaaaaauuucaaccagcauu

SEQ ID NO: 24071 - RNA, 32 nt, Homo Sapiens
ggagguagaguuacuugacauguaucauguaa

SEQ ID NO: 24072 - RNA, 32 nt, Homo Sapiens
gaccuuucccugguaguaguggucucauucac

SEQ ID NO: 24073 - RNA, 32 nt, Homo Sapiens
gaggucggcgcgcgcacacccgcaccgccccg

SEQ ID NO: 24074 - RNA, 32 nt, Homo Sapiens
uaggcugugggugucaggagcgguacuuggag

SEQ ID NO: 24075 - RNA, 32 nt, Homo Sapiens
aacaucacauacauucuuggaacuucccagug

SEQ ID NO: 24076 - RNA, 32 nt, Homo Sapiens
agggucuuuacagagguaauaaaggugacacg

SEQ ID NO: 24077 - RNA, 32 nt, Homo Sapiens
cgcuggaggaggagccggcccucacgcccgcc

SEQ ID NO: 24078 - RNA, 32 nt, Homo Sapiens
aggaggagcuggaagaggccgugggccgcauc

SEQ ID NO: 24079 - RNA, 32 nt, Homo Sapiens
cuuggggguccugacucccagcccucauccug

SEQ ID NO: 24080 - RNA, 32 nt, Homo Sapiens
uugcguuuuuaaucagaaaacaaaauagaggc

SEQ ID NO: 24081 - RNA, 32 nt, Homo Sapiens
acaaggucaggagaucgagaccauccuggcua

SEQ ID NO: 24082 - RNA, 32 nt, Homo Sapiens
gcuugcaugaaauguacagagaaauguguggu

SEQ ID NO: 24083 - RNA, 32 nt, Homo Sapiens
gaauagaguuuaauuacucauugcgucggaaa

SEQ ID NO: 24084 - RNA, 32 nt, Homo Sapiens
uucacuggacgaagugaagaauagggagcuug

SEQ ID NO: 24085 - RNA, 32 nt, Homo Sapiens
accucuggugaaagaaaagauguugucccggu

SEQ ID NO: 24086 - RNA, 32 nt, Homo Sapiens
cgaguccguggcaguccggacggccgccacuu

SEQ ID NO: 24087 - RNA, 32 nt, Homo Sapiens
agauaauuguacuuugaaaacaccagcuguau

SEQ ID NO: 24088 - RNA, 32 nt, Homo Sapiens
gaaguucugcccggcgcucuccgccggugccu

SEQ ID NO: 24089 - RNA, 32 nt, Homo Sapiens
caaacaaaaacaaaccugaaaacugcuuggca

SEQ ID NO: 24090 - RNA, 32 nt, Homo Sapiens
ccugccucaucccaccccaaugcuuccuuucu

SEQ ID NO: 24091 - RNA, 32 nt, Homo Sapiens
gagaggagcaagaggaagauggccgugcccug

SEQ ID NO: 24092 - RNA, 32 nt, Homo Sapiens
gggagcuggagcagccgcuggagcaccccgug

SEQ ID NO: 24093 - RNA, 32 nt, Homo Sapiens
accccacccuuucuccuccuccuuccucugag

SEQ ID NO: 24094 - RNA, 32 nt, Homo Sapiens
uuuaaauuuuagcuuucuuaauauuuaaguau

SEQ ID NO: 24095 - RNA, 32 nt, Homo Sapiens
auaagucgugagcaacacgggcgagggggugc

SEQ ID NO: 24096 - RNA, 31 nt, Homo Sapiens
uuuuagaaauaaauaauaggcuacucgggag

SEQ ID NO: 24097 - RNA, 32 nt, Homo Sapiens
cauauguuuuaguauuauuaacuuuuuucugu

SEQ ID NO: 24098 - RNA, 32 nt, Homo Sapiens
gucauggcccaauaugauaagagcaauaaagg

SEQ ID NO: 24099 - RNA, 32 nt, Homo Sapiens
aaaaugucaaggaacagcaaugucaacaggau

SEQ ID NO: 24100 - RNA, 32 nt, Homo Sapiens
agcacaaaaaaaucaucuucuucuaaccaaag

SEQ ID NO: 24101 - RNA, 32 nt, Homo Sapiens
ccuucuaaacacagcuaucuagagagccacau

SEQ ID NO: 24102 - RNA, 32 nt, Homo Sapiens
ugugucuucuuuaugaggauagaucaaauugg

SEQ ID NO: 24103 - RNA, 32 nt, Homo Sapiens
gucucccacgacugcccuccccgaccucuagc

SEQ ID NO: 24104 - RNA, 32 nt, Homo Sapiens
acaaguaaagacugaauggggcugagaugaag

SEQ ID NO: 24105 - RNA, 32 nt, Homo Sapiens
guugaaaacuaaauuuucuacuguauucccag

SEQ ID NO: 24106 - RNA, 32 nt, Homo Sapiens
uuaaacaucuggaaaauggaaaacacugaggg

SEQ ID NO: 24107 - RNA, 32 nt, Homo Sapiens
aaaagaaauugauaucuuucugaguaagguuu

SEQ ID NO: 24108 - RNA, 32 nt, Homo Sapiens
cggcggaggagaaacacugcugccugaugcuu

SEQ ID NO: 24109 - RNA, 32 nt, Homo Sapiens
ggugacuuugaacaugcuggugccgcuagcca

SEQ ID NO: 24110 - RNA, 32 nt, Homo Sapiens
gggugggcgacuuugggggaguuggugccccg

SEQ ID NO: 24111 - RNA, 32 nt, Homo Sapiens
uacuuuuacaugguuauaaucacuuuauauuu

SEQ ID NO: 24112 - RNA, 32 nt, Homo Sapiens
ccgggcgggcaugggccuucccggcccggagc

SEQ ID NO: 24113 - RNA, 32 nt, Homo Sapiens
gaauuccaccugccaaggaucccagcaggcug

SEQ ID NO: 24114 - RNA, 32 nt, Homo Sapiens
augcauugauaacauuuuuagagucuguuaca

SEQ ID NO: 24115 - RNA, 32 nt, Homo Sapiens
guacaaaguguuuauuuuacaaaagaguaggu

SEQ ID NO: 24116 - RNA, 32 nt, Homo Sapiens
uccucaccaucccacccugaaucucaucaucu

SEQ ID NO: 24117 - RNA, 32 nt, Homo Sapiens
gccccgagcccucggcgggcugcgagcgacuc

SEQ ID NO: 24118 - RNA, 32 nt, Homo Sapiens
cccagccauuccaggauuuuucuagagccugg

SEQ ID NO: 24119 - RNA, 32 nt, Homo Sapiens
ucccuguggugaagaagaagaaguugugagga

SEQ ID NO: 24120 - RNA, 32 nt, Homo Sapiens
ccugggguccccagccucucaccggccccagc

SEQ ID NO: 24121 - RNA, 32 nt, Homo Sapiens
cugcuauagcugauccuucucugaggcucagg

SEQ ID NO: 24122 - RNA, 32 nt, Homo Sapiens
ggccgacccucucuccacggccuuaaucacac

SEQ ID NO: 24123 - RNA, 32 nt, Homo Sapiens
ggccaaccagcccaaaauuauuucaucuugua

SEQ ID NO: 24124 - RNA, 32 nt, Homo Sapiens
gguggugacguguugaugaggcagauggagau

SEQ ID NO: 24125 - RNA, 32 nt, Homo Sapiens
accuucaggaccggccuguuucccgucugggu

SEQ ID NO: 24126 - RNA, 32 nt, Homo Sapiens
gugcgcgcuccuugguugcagccgcugagguu

SEQ ID NO: 24127 - RNA, 32 nt, Homo Sapiens
ugauucuuuuguuuuucuucuacuucaugucc

SEQ ID NO: 24128 - RNA, 32 nt, Homo Sapiens
ugagaauuccuccucaaauuaaccucauaccc

SEQ ID NO: 24129 - RNA, 32 nt, Homo Sapiens
ucccgaguccguuugaggaaguccccgaggcg

SEQ ID NO: 24130 - RNA, 32 nt, Homo Sapiens
ggaaucuuuggccugguaacaaaccuggaaga

SEQ ID NO: 24131 - RNA, 32 nt, Homo Sapiens
gaccccucugccuuccuccccaauccugacug

SEQ ID NO: 24132 - RNA, 32 nt, Homo Sapiens
agcccagauugugccaggucagcugucccuuc

SEQ ID NO: 24133 - RNA, 32 nt, Homo Sapiens
aaucugauuguuauuuaaauuugugguucagc

SEQ ID NO: 24134 - RNA, 32 nt, Homo Sapiens
uguauuuccaaauugcuaagacaauaaauuuc

SEQ ID NO: 24135 - RNA, 31 nt, Homo Sapiens
uggccuuauuugacuucaaagaauccacaug

SEQ ID NO: 24136 - RNA, 32 nt, Homo Sapiens
augauuuagaaauggaaaaauguuacaaauuu

SEQ ID NO: 24137 - RNA, 32 nt, Homo Sapiens
gaacuucugaaucagggagcucaugcucaacc

SEQ ID NO: 24138 - RNA, 32 nt, Homo Sapiens
agagcacguggcggcuucugggggccauguuu

SEQ ID NO: 24139 - RNA, 32 nt, Homo Sapiens
cacuaguuggcauggcgauuucagaggugagu

SEQ ID NO: 24140 - RNA, 32 nt, Homo Sapiens
acaaaacaaaacaaaaaccaugcugguucucg

SEQ ID NO: 24141 - RNA, 32 nt, Homo Sapiens
gguuugggaagcugcugcucuugaauggguuu

SEQ ID NO: 24142 - RNA, 32 nt, Homo Sapiens
aauguguaaugaucuauagaugcucaugaaga

SEQ ID NO: 24143 - RNA, 32 nt, Homo Sapiens
uugcuguaggugauuauccaaacaaguaaauu

SEQ ID NO: 24144 - RNA, 32 nt, Homo Sapiens
aauuguuguauuccuucugcagcccuccuucu

SEQ ID NO: 24145 - RNA, 32 nt, Homo Sapiens
auuaaaugucaucucaggauaucucuaaaagg

SEQ ID NO: 24146 - RNA, 32 nt, Homo Sapiens
uauaaauuguagaacauagaugcuacaguauu

SEQ ID NO: 24147 - RNA, 32 nt, Homo Sapiens
acaucuccaaauuuauaugaaagacaagcaaa

SEQ ID NO: 24148 - RNA, 32 nt, Homo Sapiens
aauaaacuaacuccagcaaaauguggguacgu

SEQ ID NO: 24149 - RNA, 32 nt, Homo Sapiens
acgacuucagcuggcagcaguggugaaagaaa

SEQ ID NO: 24150 - RNA, 29 nt, Homo Sapiens
guuuaacauaaagguuauuuucuccugau

SEQ ID NO: 24151 - RNA, 32 nt, Homo Sapiens
ggaaaagcuggguaacucaagcagcuauucuu

SEQ ID NO: 24152 - RNA, 32 nt, Homo Sapiens
cagagcaccagccugcauggaacuuccuuccu

SEQ ID NO: 24153 - RNA, 32 nt, Homo Sapiens
ccuguccugugcuuggauagucagucaauuau

SEQ ID NO: 24154 - RNA, 32 nt, Homo Sapiens
ugugucgauacaauaaucgacuugcagaacau

SEQ ID NO: 24155 - RNA, 32 nt, Homo Sapiens
guuagggggagggccccaggacaccccucacc

SEQ ID NO: 24156 - RNA, 32 nt, Homo Sapiens
auucaaauuuuccaucuuugucacuuugauuc

SEQ ID NO: 24157 - RNA, 32 nt, Homo Sapiens
ccugccccgucagacaggggccccaucccacu

SEQ ID NO: 24158 - RNA, 30 nt, Homo Sapiens
ccucggucgccgcugccgccgggcuuaaca

SEQ ID NO: 24159 - RNA, 32 nt, Homo Sapiens
ccugccugugcagcugcagcaaagccagugag

SEQ ID NO: 24160 - RNA, 32 nt, Homo Sapiens
caagggacuccgaguugugaaaauuagcuggg

SEQ ID NO: 24161 - RNA, 27 nt, Homo Sapiens
ggagaauaaaauguuugcugaaacuug

SEQ ID NO: 24162 - RNA, 32 nt, Homo Sapiens
uccuaggccggguccgggaggccugggagccg

SEQ ID NO: 24163 - RNA, 32 nt, Homo Sapiens
auccuacguuuaaauaucuuugaaaguuugua

SEQ ID NO: 24164 - RNA, 32 nt, Homo Sapiens
ugaggauggaguuugggggaggagcccagggc

SEQ ID NO: 24165 - RNA, 31 nt, Homo Sapiens
uucuggcgccccgagaaccaggcaucccucc

SEQ ID NO: 24166 - RNA, 32 nt, Homo Sapiens
gugguugaaggaucuacuggagguguuuguaa

SEQ ID NO: 24167 - RNA, 32 nt, Homo Sapiens
gcugcccgcucccuccuccccacauccccgcu

SEQ ID NO: 24168 - RNA, 32 nt, Homo Sapiens
uaaccaaaggacuguuuucucuacacaaaguc

SEQ ID NO: 24169 - RNA, 32 nt, Homo Sapiens
aucauaggagauaaauauucauuauauagcau

SEQ ID NO: 24170 - RNA, 32 nt, Homo Sapiens
agccaaggacuucaguagaccaucugggcagc

SEQ ID NO: 24171 - RNA, 32 nt, Homo Sapiens
augguuuugugauuuagcuggguaaacuaucu

SEQ ID NO: 24172 - RNA, 32 nt, Homo Sapiens
uccaggcugcgcacggccucgcuggcugucgu

SEQ ID NO: 24173 - RNA, 32 nt, Homo Sapiens
agauaaaugaacugguguagaauaucaguuug

SEQ ID NO: 24174 - RNA, 32 nt, Homo Sapiens
uccuucucucuaccugccaccaaaaagaaaga

SEQ ID NO: 24175 - RNA, 32 nt, Homo Sapiens
cagcccccgccggccuggccaggacugagugc

SEQ ID NO: 24176 - RNA, 32 nt, Homo Sapiens
agugguauagaguacugcagaauacaguaagc

SEQ ID NO: 24177 - RNA, 32 nt, Homo Sapiens
uuuuuaaagcauuggaaaaauauuuugccugu

SEQ ID NO: 24178 - RNA, 32 nt, Homo Sapiens
uuccaauccccucccugugaauguguggagaa

SEQ ID NO: 24179 - RNA, 31 nt, Homo Sapiens
ucuggcugcccucggccuccaaggaaccuga

SEQ ID NO: 24180 - RNA, 32 nt, Homo Sapiens
uuacauguuuggucuuuuuuuguuuugguuug

SEQ ID NO: 24181 - RNA, 32 nt, Homo Sapiens
cagccacagaggaugccucaccugcuauguca

SEQ ID NO: 24182 - RNA, 32 nt, Homo Sapiens
agaaugggacacugggucauggccuggaguug

SEQ ID NO: 24183 - RNA, 32 nt, Homo Sapiens
uuacgggugugagccaccacacccggcccaag

SEQ ID NO: 24184 - RNA, 32 nt, Homo Sapiens
caccaauucuacccugcuccucuuuuccuuuu

SEQ ID NO: 24185 - RNA, 32 nt, Homo Sapiens
auugggggaggggacaggaucuaacaauguca

SEQ ID NO: 24186 - RNA, 32 nt, Homo Sapiens
gggggucagcggggagagccugcccggagccg

SEQ ID NO: 24187 - RNA, 32 nt, Homo Sapiens
caagagugacgagugaugucacccugugacuc

SEQ ID NO: 24188 - RNA, 32 nt, Homo Sapiens
uucuuucugaacuuaucuaccugguuaugaua

SEQ ID NO: 24189 - RNA, 32 nt, Homo Sapiens
uguuugggaucaaauguuaggguaaauuaaaa

SEQ ID NO: 24190 - RNA, 32 nt, Homo Sapiens
agacaucccgucugacugucccuguggacucu

SEQ ID NO: 24191 - RNA, 32 nt, Homo Sapiens
gaagcagcaccgugaaugguucaagcacacug

SEQ ID NO: 24192 - RNA, 32 nt, Homo Sapiens
ggcaggcuuuggccagugaacaaauccuacuc

SEQ ID NO: 24193 - RNA, 31 nt, Homo Sapiens
agccugggggcggugggugacccuggcucug

SEQ ID NO: 24194 - RNA, 32 nt, Homo Sapiens
cggucgacauguuccaggucccggauagcgag

SEQ ID NO: 24195 - RNA, 32 nt, Homo Sapiens
gggcgcgagcgcgggcggugccgaccacugca

SEQ ID NO: 24196 - RNA, 32 nt, Homo Sapiens
gggcggcgggugccggugcgcacggagccgag

SEQ ID NO: 24197 - RNA, 32 nt, Homo Sapiens
aguuucugccucuggaaagggggcgggcccuu

SEQ ID NO: 24198 - RNA, 32 nt, Homo Sapiens
gcugcugaacaaaucagcucuggaggugauuc

SEQ ID NO: 24199 - RNA, 32 nt, Homo Sapiens
aaagcaaggaggagggcucgggccgagaccgu

SEQ ID NO: 24200 - RNA, 32 nt, Homo Sapiens
aacucagcacaaaacgacugaguuuaaaccuc

SEQ ID NO: 24201 - RNA, 32 nt, Homo Sapiens
cgagaggcaccacggccucacccaggcaucug

SEQ ID NO: 24202 - RNA, 32 nt, Homo Sapiens
auugguguuucaucagcucuuguuagcaacca

SEQ ID NO: 24203 - RNA, 32 nt, Homo Sapiens
ggcacugggaagcucaucagagaaaaugggug

SEQ ID NO: 24204 - RNA, 32 nt, Homo Sapiens
ucgcacggagggaucauucaccaccgugugua

SEQ ID NO: 24205 - RNA, 28 nt, Homo Sapiens
cucgauauuacaagaccaagcgaguccu

SEQ ID NO: 24206 - RNA, 32 nt, Homo Sapiens
gccauguauaaguugggcuauuagaguucaug

SEQ ID NO: 24207 - RNA, 32 nt, Homo Sapiens
ggaugcguuuuacccaacauaauagcagauac

SEQ ID NO: 24208 - RNA, 32 nt, Homo Sapiens
aauaaauguuugucaugagucagggguuugua

SEQ ID NO: 24209 - RNA, 32 nt, Homo Sapiens
gacugguucaaauguuguucucuucuuuaaag

SEQ ID NO: 24210 - RNA, 32 nt, Homo Sapiens
guuagaaggugaugaggaggcugggugaggug

SEQ ID NO: 24211 - RNA, 32 nt, Homo Sapiens
cucgcuccggcccggcccggcccccaccccag

SEQ ID NO: 24212 - RNA, 32 nt, Homo Sapiens
cuuuuuagaaauuuauuuuguugucccuaugg

SEQ ID NO: 24213 - RNA, 32 nt, Homo Sapiens
gcccacugcagccuccaccucccaggcucaag

SEQ ID NO: 24214 - RNA, 32 nt, Homo Sapiens
gggaagaggcgguggcgcugcccgcgguggcg

SEQ ID NO: 24215 - RNA, 32 nt, Homo Sapiens
gaugcucagauaaguacauuuauaucaguuca

SEQ ID NO: 24216 - RNA, 32 nt, Homo Sapiens
uaacauacacccaagcccacccggcccgucgu

SEQ ID NO: 24217 - RNA, 32 nt, Homo Sapiens
gguagagaaacccgggaccgggaucauggcag

SEQ ID NO: 24218 - RNA, 32 nt, Homo Sapiens
cccguaggcccggcccgggccccucgggagca

SEQ ID NO: 24219 - RNA, 32 nt, Homo Sapiens
gcugggucugcuaacaucacuccaguuuagau

SEQ ID NO: 24220 - RNA, 32 nt, Homo Sapiens
cccccuccucccaaaaagcagccaggagcacu

SEQ ID NO: 24221 - RNA, 32 nt, Homo Sapiens
uaaguacuuguuucuuuuucagguugugaugu

SEQ ID NO: 24222 - RNA, 32 nt, Homo Sapiens
cuggaaugguuuucuuuuccauuuucauuacc

SEQ ID NO: 24223 - RNA, 32 nt, Homo Sapiens
cagaccggggaggcccgggccagcagcuccca

SEQ ID NO: 24224 - RNA, 32 nt, Homo Sapiens
uuuucuuuuuaaauuauaucggggguggucau

SEQ ID NO: 24225 - RNA, 32 nt, Homo Sapiens
cuguauggaggcagguggggagggauccccug

SEQ ID NO: 24226 - RNA, 32 nt, Homo Sapiens
aacuggauuauuucuuucuccucuuacagaau

SEQ ID NO: 24227 - RNA, 32 nt, Homo Sapiens
uuugaaguucuggcugauccacagagucuuuu

SEQ ID NO: 24228 - RNA, 32 nt, Homo Sapiens
ccuguugggcugccuccagaggaugacuggcc

SEQ ID NO: 24229 - RNA, 32 nt, Homo Sapiens
ucagagacgcguauguaauaaaggacgcccuc

SEQ ID NO: 24230 - RNA, 32 nt, Homo Sapiens
uacuuaauucagaauaguauuucuuuuagagu

SEQ ID NO: 24231 - RNA, 32 nt, Homo Sapiens
ggagacucagccggccucagaaauagccugag

SEQ ID NO: 24232 - RNA, 32 nt, Homo Sapiens
augccucauuuuauucugucaaugaaaagcgg

SEQ ID NO: 24233 - RNA, 32 nt, Homo Sapiens
uccacagcucacggagccuggccgcggacccc

SEQ ID NO: 24234 - RNA, 32 nt, Homo Sapiens
acuuuccauuuucucuuucaccucauuuugcc

SEQ ID NO: 24235 - RNA, 32 nt, Homo Sapiens
uaaacaggaccacccuuuauucuuaaauuugu

SEQ ID NO: 24236 - RNA, 32 nt, Homo Sapiens
gcgggaaggacuccucucugccugcaguugua

SEQ ID NO: 24237 - RNA, 32 nt, Homo Sapiens
ucagccagggccuguguauaaagcagaagcag

SEQ ID NO: 24238 - RNA, 32 nt, Homo Sapiens
gcggguucgguugcgcguggcgcacggggugg

SEQ ID NO: 24239 - RNA, 32 nt, Homo Sapiens
aggacuuugacaaaagcaaggccccuuuucac

SEQ ID NO: 24240 - RNA, 32 nt, Homo Sapiens
ccaggaaaagccaugaguugcaaccaaaacgc

SEQ ID NO: 24241 - RNA, 32 nt, Homo Sapiens
ggguauauuucuggguucucaauucugucuca

SEQ ID NO: 24242 - RNA, 32 nt, Homo Sapiens
aauacauuuuuccagguugugagugaaaauag

SEQ ID NO: 24243 - RNA, 32 nt, Homo Sapiens
gaccaccgcccggccccaccuggcugucaucg

SEQ ID NO: 24244 - RNA, 32 nt, Homo Sapiens
cacaguuuuuauuagcagucuuucuugguuug

SEQ ID NO: 24245 - RNA, 32 nt, Homo Sapiens
cuggaagggcccaagagacccuucacccaccc

SEQ ID NO: 24246 - RNA, 32 nt, Homo Sapiens
ccugucuacauuguuauaugugugugacuuga

SEQ ID NO: 24247 - RNA, 32 nt, Homo Sapiens
ccaaccuuccccaccccguaucaguuugacca

SEQ ID NO: 24248 - RNA, 32 nt, Homo Sapiens
ucuggagccagacggggaagggagcaaauccc

SEQ ID NO: 24249 - RNA, 32 nt, Homo Sapiens
aauaagaaacgcaagccagaccacgaugauug

SEQ ID NO: 24250 - RNA, 32 nt, Homo Sapiens
gcucgccuggcaccaccacacggccacagcca

SEQ ID NO: 24251 - RNA, 32 nt, Homo Sapiens
agagcuuacaugccagugagugaagaucgaug

SEQ ID NO: 24252 - RNA, 32 nt, Homo Sapiens
accucugcccuuggcuugcccuccucagaguu

SEQ ID NO: 24253 - RNA, 32 nt, Homo Sapiens
ccuaucauggaguuccccaucccuaaucucug

SEQ ID NO: 24254 - RNA, 32 nt, Homo Sapiens
ccccucggcacccccggccccggagcugccug

SEQ ID NO: 24255 - RNA, 32 nt, Homo Sapiens
cccagcacccucggcccccacggcgguugguc

SEQ ID NO: 24256 - RNA, 32 nt, Homo Sapiens
cugagcagcuccgcaugcuugguucucccgga

SEQ ID NO: 24257 - RNA, 32 nt, Homo Sapiens
gucuggaacacuuuccucuucuaugaccccuc

SEQ ID NO: 24258 - RNA, 32 nt, Homo Sapiens
ggcagagcugggcggcauccacagccagagag

SEQ ID NO: 24259 - RNA, 32 nt, Homo Sapiens
ucaaauaguuuugcuauuuaauuuauaugauu

SEQ ID NO: 24260 - RNA, 32 nt, Homo Sapiens
ccgcuuuugcccccucccuccccucccucucg

SEQ ID NO: 24261 - RNA, 32 nt, Homo Sapiens
agcgggcggcgguggggcugggugccguguua

SEQ ID NO: 24262 - RNA, 32 nt, Homo Sapiens
guggugauaaugaaaagaaugauucagucuug

SEQ ID NO: 24263 - RNA, 32 nt, Homo Sapiens
ucucuagggcuuugggauuggcaggcacacug

SEQ ID NO: 24264 - RNA, 32 nt, Homo Sapiens
aggccaaaauggcggcucaggcggcggcagcg

SEQ ID NO: 24265 - RNA, 32 nt, Homo Sapiens
cugaucuaguuggauaguuguaccucaaaaaa

SEQ ID NO: 24266 - RNA, 32 nt, Homo Sapiens
caccuuagcuggaagcaggguggugagcugcu

SEQ ID NO: 24267 - RNA, 32 nt, Homo Sapiens
uggagcccucuguaggccuccucccuccuccc

SEQ ID NO: 24268 - RNA, 32 nt, Homo Sapiens
uaagaucuuuugcaaaaauguuaccccaggca

SEQ ID NO: 24269 - RNA, 31 nt, Homo Sapiens
ccaggggagccccgguggcagcggcggcguu

SEQ ID NO: 24270 - RNA, 32 nt, Homo Sapiens
guggcggcucgcgacccccggcaacccggaga

SEQ ID NO: 24271 - RNA, 32 nt, Homo Sapiens
acaugugaauauuuauacaugaaggccauugg

SEQ ID NO: 24272 - RNA, 32 nt, Homo Sapiens
uuauuuuacaaacaaccuauuccuuuucucgu

SEQ ID NO: 24273 - RNA, 32 nt, Homo Sapiens
aaagcgguuggcagcagcggcgcuuggaggaa

SEQ ID NO: 24274 - RNA, 32 nt, Homo Sapiens
auaggucuauuuuaagggaagagagagaaaaa

SEQ ID NO: 24275 - RNA, 32 nt, Homo Sapiens
ggaaaguauuaaaaaaucuauaucgcuaguaa

SEQ ID NO: 24276 - RNA, 32 nt, Homo Sapiens
ugcccgggcggcguccucuccugcauuccuga

SEQ ID NO: 24277 - RNA, 32 nt, Homo Sapiens
aaagcaguucaaagagcagagagguggggcca

SEQ ID NO: 24278 - RNA, 32 nt, Homo Sapiens
cauggaaagcaauaguugugcaagugaaaaaa

SEQ ID NO: 24279 - RNA, 32 nt, Homo Sapiens
uggcuaaucuacauuuaucaauaaaauguaaa

SEQ ID NO: 24280 - RNA, 32 nt, Homo Sapiens
cucagaaaaacaaacaaacaaacaguuuuucc

SEQ ID NO: 24281 - RNA, 32 nt, Homo Sapiens
uccagagaagagacuguaaauuccguuguuac

SEQ ID NO: 24282 - RNA, 32 nt, Homo Sapiens
agaaaggcgacggcggcggcgcggaggagggu

SEQ ID NO: 24283 - RNA, 32 nt, Homo Sapiens
guauuuugaaauguuuuuuucuuccugucacc

SEQ ID NO: 24284 - RNA, 32 nt, Homo Sapiens
acucccuuguggcagcuuucucuucaaauagg

SEQ ID NO: 24285 - RNA, 32 nt, Homo Sapiens
gcuucccaucaccagcagcugcucgacaaggg

SEQ ID NO: 24286 - RNA, 32 nt, Homo Sapiens
aguguccacccuccggcccccgucuuguaaaa

SEQ ID NO: 24287 - RNA, 32 nt, Homo Sapiens
gggccccacuccugagccuaccucugauccua

SEQ ID NO: 24288 - RNA, 32 nt, Homo Sapiens
ucuuuugucuuggaggucacucagcagguucc

SEQ ID NO: 24289 - RNA, 32 nt, Homo Sapiens
aaguguuuucuuuuucagauuuaugaauuucu

SEQ ID NO: 24290 - RNA, 32 nt, Homo Sapiens
acagucacuuuagaaagugaacaaagagaacu

SEQ ID NO: 24291 - RNA, 32 nt, Homo Sapiens
ugggcauggugcgucacaccuauaaucccagc

SEQ ID NO: 24292 - RNA, 32 nt, Homo Sapiens
ucgaguaguauuuuauacuuuagugaacgugg

SEQ ID NO: 24293 - RNA, 32 nt, Homo Sapiens
uugguuuugucaucuguaaauacuuaccuaca

SEQ ID NO: 24294 - RNA, 32 nt, Homo Sapiens
uuugggggcugcuuuccagcagcugcgucaga

SEQ ID NO: 24295 - RNA, 32 nt, Homo Sapiens
uuccccacccucggaacccagacgcaugccca

SEQ ID NO: 24296 - RNA, 32 nt, Homo Sapiens
ggccagaggagcucuccagcccugccuagugg

SEQ ID NO: 24297 - RNA, 32 nt, Homo Sapiens
aggggagcugagaggagcugaggugcuacccg

SEQ ID NO: 24298 - RNA, 32 nt, Homo Sapiens
uuuauaaacaauuuauuggaguguuuuuguuu

SEQ ID NO: 24299 - RNA, 32 nt, Homo Sapiens
cguaacauuaugucucagucugaucgucuuua

SEQ ID NO: 24300 - RNA, 32 nt, Homo Sapiens
uuuaacuguguucugcacacacagaauuacaa

SEQ ID NO: 24301 - RNA, 32 nt, Homo Sapiens
aagaucauagcugacuuuaaaaacaguuguaa

SEQ ID NO: 24302 - RNA, 32 nt, Homo Sapiens
cuaauaaaaauaucuuaagacuauaaauuuuc

SEQ ID NO: 24303 - RNA, 32 nt, Homo Sapiens
aaaagcaacuguauaaaugaauguagagugac

SEQ ID NO: 24304 - RNA, 32 nt, Homo Sapiens
ucugauuguuuccauuucccauguaauuuuaa

SEQ ID NO: 24305 - RNA, 32 nt, Homo Sapiens
aauaaaaaucauacugagcauuuuuauuccug

SEQ ID NO: 24306 - RNA, 32 nt, Homo Sapiens
ccuacccacccccaggaccccugaguaaaaaa

SEQ ID NO: 24307 - RNA, 32 nt, Homo Sapiens
aaaccaaaacaucucccugagaaguaacuccc

SEQ ID NO: 24308 - RNA, 31 nt, Homo Sapiens
gaggcuucacggaggaggugucauaggagcu

SEQ ID NO: 24309 - RNA, 32 nt, Homo Sapiens
agacaaaguauuuauguaauuauuugauaacu

SEQ ID NO: 24310 - RNA, 32 nt, Homo Sapiens
guuggggcugagugcuggcccucugcgucuuc

SEQ ID NO: 24311 - RNA, 32 nt, Homo Sapiens
cgcucccucccucugccuuucauucccagcug

SEQ ID NO: 24312 - RNA, 32 nt, Homo Sapiens
agagggggcaggggcugcugggacacugagca

SEQ ID NO: 24313 - RNA, 32 nt, Homo Sapiens
uagaguuuccacuaucccaaucaaagaauuac

SEQ ID NO: 24314 - RNA, 32 nt, Homo Sapiens
ugcagcuggugcccgagccucucagggccaga

SEQ ID NO: 24315 - RNA, 32 nt, Homo Sapiens
uuucuccuagcccuucuguucuuccuuggcca

SEQ ID NO: 24316 - RNA, 32 nt, Homo Sapiens
gaguccagacuggcggcagggcccgaggggcc

SEQ ID NO: 24317 - RNA, 32 nt, Homo Sapiens
uauaucacccagacauaaaggaaaagacacau

SEQ ID NO: 24318 - RNA, 32 nt, Homo Sapiens
cagaauaaggcacaaugucaauagcaggaguu

SEQ ID NO: 24319 - RNA, 32 nt, Homo Sapiens
cggugaaggaugcggcaggugcucuguggaug

SEQ ID NO: 24320 - RNA, 32 nt, Homo Sapiens
gcuccuccaagccccgccggcugcugugggag

SEQ ID NO: 24321 - RNA, 32 nt, Homo Sapiens
agagggagccgcugcgcgagucuuccccaccu

SEQ ID NO: 24322 - RNA, 32 nt, Homo Sapiens
aaggcacuugucuacaagugugucccaacaca

SEQ ID NO: 24323 - RNA, 32 nt, Homo Sapiens
aggaaccaccauaaaacaaaccuauggacuca

SEQ ID NO: 24324 - RNA, 32 nt, Homo Sapiens
uagagccccgcggaagagcagaacguuuggga

SEQ ID NO: 24325 - RNA, 32 nt, Homo Sapiens
gaggcuguagagagagccucagggcggugacc

SEQ ID NO: 24326 - RNA, 32 nt, Homo Sapiens
aaguuuguuucuuuucauuauaguuuauauga

SEQ ID NO: 24327 - RNA, 32 nt, Homo Sapiens
gguugggcgcgagguugcgcgcggcguucgcg

SEQ ID NO: 24328 - RNA, 32 nt, Homo Sapiens
acaugcucacugccagcuccuguccugaguac

SEQ ID NO: 24329 - RNA, 32 nt, Homo Sapiens
cacuggaacacgauccucuuucugggcauucc

SEQ ID NO: 24330 - RNA, 30 nt, Homo Sapiens
gcuccggcagcgcauucggguccccucccc

SEQ ID NO: 24331 - RNA, 32 nt, Homo Sapiens
gacaccgcccacuucccggcccggggccugca

SEQ ID NO: 24332 - RNA, 27 nt, Homo Sapiens
guggaccaaaaugucugguauacuauu

SEQ ID NO: 24333 - RNA, 30 nt, Homo Sapiens
gggacaugaccgcggcgccgggagggucag

SEQ ID NO: 24334 - RNA, 32 nt, Homo Sapiens
ggugcaggccgguggguccacuccaacucccc

SEQ ID NO: 24335 - RNA, 32 nt, Homo Sapiens
uuuacucacagcacuuguuuucaggacaacac

SEQ ID NO: 24336 - RNA, 32 nt, Homo Sapiens
gacaucuuugcacaggugauugaguuucucug

SEQ ID NO: 24337 - RNA, 32 nt, Homo Sapiens
gcggcggaagcagaagcuggcaucuccccagc

SEQ ID NO: 24338 - RNA, 32 nt, Homo Sapiens
caaggacucuuacugugggagcaacugcuggu

SEQ ID NO: 24339 - RNA, 32 nt, Homo Sapiens
ucaguuugucaaugaagugaugaaagcuuaga

SEQ ID NO: 24340 - RNA, 32 nt, Homo Sapiens
acgccuccugucccacgcucuccgguguccgu

SEQ ID NO: 24341 - RNA, 32 nt, Homo Sapiens
agggugauggggacgauucugcccaguguccu

SEQ ID NO: 24342 - RNA, 32 nt, Homo Sapiens
acaaaacaaaacaaaaucuggagaugcugaau

SEQ ID NO: 24343 - RNA, 32 nt, Homo Sapiens
gugcacacugcaugcuugggggugccaaggga

SEQ ID NO: 24344 - RNA, 32 nt, Homo Sapiens
gcauuugccaauucaagguaaaacagggucag

SEQ ID NO: 24345 - RNA, 32 nt, Homo Sapiens
aaaggggacaaugaaggugacuguggggagga

SEQ ID NO: 24346 - RNA, 32 nt, Homo Sapiens
ucugagguggacucccaccucccuucgugaag

SEQ ID NO: 24347 - RNA, 32 nt, Homo Sapiens
ggggacuaaaggaaagagcugagccaaggaaa

SEQ ID NO: 24348 - RNA, 32 nt, Homo Sapiens
cccaaccauggccccagguuugagcuuugugg

SEQ ID NO: 24349 - RNA, 32 nt, Homo Sapiens
ucuuaaagcucacuaucucuggccauucacua

SEQ ID NO: 24350 - RNA, 32 nt, Homo Sapiens
cacggggaauggagaccaaaaagggaaaagaa

SEQ ID NO: 24351 - RNA, 32 nt, Homo Sapiens
gauacauuuuuaauuacaaaaauagagcuuga

SEQ ID NO: 24352 - RNA, 32 nt, Homo Sapiens
ccugaagaaaucaaguugguauuuuugaugug

SEQ ID NO: 24353 - RNA, 32 nt, Homo Sapiens
ucuucccugcacaacuaacauccaguaauaau

SEQ ID NO: 24354 - RNA, 32 nt, Homo Sapiens
uaaagaaaaaauagugaaaauaccaaauacug

SEQ ID NO: 24355 - RNA, 32 nt, Homo Sapiens
gucugcauggggaguggaccgagagaagaagg

SEQ ID NO: 24356 - RNA, 32 nt, Homo Sapiens
uugaaacaaccauuuuuuuuuauuucaaaacu

SEQ ID NO: 24357 - RNA, 32 nt, Homo Sapiens
gacucagguugucuguagagaaugaaaggagc

SEQ ID NO: 24358 - RNA, 32 nt, Homo Sapiens
gauaaaauggaauuuuugcauuauuaaacuug

SEQ ID NO: 24359 - RNA, 32 nt, Homo Sapiens
cuucguggcccgcgacaguccggccaccuuca

SEQ ID NO: 24360 - RNA, 32 nt, Homo Sapiens
auccuguauacuuuuccaggcuggauuguauc

SEQ ID NO: 24361 - RNA, 32 nt, Homo Sapiens
cuuccuuccuucucagcccucgaggaugcaua

SEQ ID NO: 24362 - RNA, 32 nt, Homo Sapiens
cagguugcguuuucccugccaccacccugcaa

SEQ ID NO: 24363 - RNA, 32 nt, Homo Sapiens
accagccuugccaacauagugaaacccugucu

SEQ ID NO: 24364 - RNA, 32 nt, Homo Sapiens
caaggagcacccuuucugggggucugcagguc

SEQ ID NO: 24365 - RNA, 32 nt, Homo Sapiens
gcaggcuccggcgggggcgcaggaggucgccc

SEQ ID NO: 24366 - RNA, 32 nt, Homo Sapiens
uuaauauuaguuuucuuacaaauuaauguauu

SEQ ID NO: 24367 - RNA, 32 nt, Homo Sapiens
cuuucagcccuucugaguccccggcccuuggu

SEQ ID NO: 24368 - RNA, 31 nt, Homo Sapiens
acgcgccaccugggcgcuccaagaagaggcc

SEQ ID NO: 24369 - RNA, 32 nt, Homo Sapiens
uauccuccaagaucuagagaagucacuccuuu

SEQ ID NO: 24370 - RNA, 32 nt, Homo Sapiens
cagaugccugaggagcucccagucucaaagga

SEQ ID NO: 24371 - RNA, 32 nt, Homo Sapiens
auuuaaacuaaauucauccuguuguguuccug

SEQ ID NO: 24372 - RNA, 25 nt, Homo Sapiens
gaacaguaauaaauuuaucugaauu

SEQ ID NO: 24373 - RNA, 32 nt, Homo Sapiens
ugugacuucaggcaggcggcccggggcaggga

SEQ ID NO: 24374 - RNA, 32 nt, Homo Sapiens
auacccccaaaauaagauucuggugaagaaaa

SEQ ID NO: 24375 - RNA, 32 nt, Homo Sapiens
cccggcucccuagcucccgcccccugucugca

SEQ ID NO: 24376 - RNA, 32 nt, Homo Sapiens
ggacgggcacugggcgacugugccucgcugag

SEQ ID NO: 24377 - RNA, 32 nt, Homo Sapiens
uccauuaacuaguucauagauuuuaaaaguaa

SEQ ID NO: 24378 - RNA, 32 nt, Homo Sapiens
ucaauuucugacucacagcagugaacaaaccc

SEQ ID NO: 24379 - RNA, 32 nt, Homo Sapiens
ggucugagcaucccucaaguccugcuguggac

SEQ ID NO: 24380 - RNA, 32 nt, Homo Sapiens
gccagcuaacacuacaaaauagacuuaauuag

SEQ ID NO: 24381 - RNA, 32 nt, Homo Sapiens
ggaagccgcgacccgagccgcgcaggaagcug

SEQ ID NO: 24382 - RNA, 32 nt, Homo Sapiens
accagcacccucggaacccagaggcccgcgcu

SEQ ID NO: 24383 - RNA, 32 nt, Homo Sapiens
ccuccuuucucuuauugccacccaggcaagca

SEQ ID NO: 24384 - RNA, 32 nt, Homo Sapiens
agcugccaccgccuugucccucaacaagcuca

SEQ ID NO: 24385 - RNA, 30 nt, Homo Sapiens
cugugccaugcucuagaaccuugaccuuga

SEQ ID NO: 24386 - RNA, 32 nt, Homo Sapiens
gugggaucccacgcccccucccggccccuccc

SEQ ID NO: 24387 - RNA, 32 nt, Homo Sapiens
acaucuuaucaagaucgauaaauacuaguuuc

SEQ ID NO: 24388 - RNA, 32 nt, Homo Sapiens
uuagauuuuggaucccccguccccucaagcau

SEQ ID NO: 24389 - RNA, 32 nt, Homo Sapiens
gguugccagggucuaaauuuggauugauuuau

SEQ ID NO: 24390 - RNA, 32 nt, Homo Sapiens
gcggccgcgacuucggggaccugcucaucuac

SEQ ID NO: 24391 - RNA, 32 nt, Homo Sapiens
aagaaagaggagaagaauauuuuguguguucc

SEQ ID NO: 24392 - RNA, 32 nt, Homo Sapiens
gcacuuaagaaaugaaagcaacuuuugaaauu

SEQ ID NO: 24393 - RNA, 32 nt, Homo Sapiens
guucaagcaauucuccuucuucagccucccga

SEQ ID NO: 24394 - RNA, 32 nt, Homo Sapiens
caaaacauaaacugagaaaaaguucuauaggg

SEQ ID NO: 24395 - RNA, 32 nt, Homo Sapiens
aauguauaaugggaaauguuuggccaugcuug

SEQ ID NO: 24396 - RNA, 32 nt, Homo Sapiens
uccuagauuauuuuauuuuaaauugguagaau

SEQ ID NO: 24397 - RNA, 32 nt, Homo Sapiens
gcucucgcggcggcgacccauguggggguuca

SEQ ID NO: 24398 - RNA, 32 nt, Homo Sapiens
cuaguaucacugcuuuuuccuuagcuuaauga

SEQ ID NO: 24399 - RNA, 32 nt, Homo Sapiens
caugcuaguauaagaguucuguguuacugugg

SEQ ID NO: 24400 - RNA, 32 nt, Homo Sapiens
gacccuagaguccacacccugacccaaucaau

SEQ ID NO: 24401 - RNA, 32 nt, Homo Sapiens
acauuucugcucauuaaauaaauauuuuuacu

SEQ ID NO: 24402 - RNA, 32 nt, Homo Sapiens
aauuaauuccuucagcacuuuagaauaugccu

SEQ ID NO: 24403 - RNA, 32 nt, Homo Sapiens
uuugcuaaugugcuguuuuaaaguauaaagca

SEQ ID NO: 24404 - RNA, 32 nt, Homo Sapiens
auuuauuuugccuguuugugcagauaagaaca

SEQ ID NO: 24405 - RNA, 32 nt, Homo Sapiens
gucucucauccagucucuggcucuugggauuc

SEQ ID NO: 24406 - RNA, 31 nt, Homo Sapiens
cuuagggcauccacugcuggaguccaugucc

SEQ ID NO: 24407 - RNA, 32 nt, Homo Sapiens
ucagaagcuggagaggcaacaguggauugcug

SEQ ID NO: 24408 - RNA, 32 nt, Homo Sapiens
aaauucgaucacugcuuguugcuggagcugca

SEQ ID NO: 24409 - RNA, 32 nt, Homo Sapiens
ucuguuacaucucuauuuuuuauuuauuacaa

SEQ ID NO: 24410 - RNA, 32 nt, Homo Sapiens
ucugugcagacaccuccucacccaccacccca

SEQ ID NO: 24411 - RNA, 32 nt, Homo Sapiens
ucagcuucauuucccaguaaucagaaacagcc

SEQ ID NO: 24412 - RNA, 32 nt, Homo Sapiens
cacagguggagcccggccgauaggcaccugaa

SEQ ID NO: 24413 - RNA, 32 nt, Homo Sapiens
gugcugggacgccuccguaauacaugcagugu

SEQ ID NO: 24414 - RNA, 32 nt, Homo Sapiens
gaacuuggccccagcccugcugggcccagaac

SEQ ID NO: 24415 - RNA, 32 nt, Homo Sapiens
guuugugaaugugaagccccaggccgcagggg

SEQ ID NO: 24416 - RNA, 32 nt, Homo Sapiens
ccccacccacccaaggaauggugcugucaauu

SEQ ID NO: 24417 - RNA, 32 nt, Homo Sapiens
uggagcugacagcgcgcacuucacccgcaguu

SEQ ID NO: 24418 - RNA, 32 nt, Homo Sapiens
uauaguuuuccacagcacaaugagcaaaagac

SEQ ID NO: 24419 - RNA, 32 nt, Homo Sapiens
acuugaucaaggaagggcugucacuuuagagg

SEQ ID NO: 24420 - RNA, 32 nt, Homo Sapiens
uuuuaaguauuagaaaaugacacauaacacgg

SEQ ID NO: 24421 - RNA, 32 nt, Homo Sapiens
cugcuguaagacagaaagaaacugugaaaaau

SEQ ID NO: 24422 - RNA, 32 nt, Homo Sapiens
aagggaggggauaauuauggggugugaggugc

SEQ ID NO: 24423 - RNA, 32 nt, Homo Sapiens
agccgagauugugccacugcaccccagccuug

SEQ ID NO: 24424 - RNA, 32 nt, Homo Sapiens
uugggagagaaagcuuuauauuuguaagaaau

SEQ ID NO: 24425 - RNA, 32 nt, Homo Sapiens
gaggcacaugucagaugcugcagucgcaaaaa

SEQ ID NO: 24426 - RNA, 32 nt, Homo Sapiens
agcagcuaacaaugucugguuaguuaaaagcc

SEQ ID NO: 24427 - RNA, 32 nt, Homo Sapiens
aaacuaaaauuugaacaaaaagggaaauaaau

SEQ ID NO: 24428 - RNA, 32 nt, Homo Sapiens
gacaggggcaggcuguauuugcuggcugaagc

SEQ ID NO: 24429 - RNA, 32 nt, Homo Sapiens
cccagaggaaugccuggaauggccggaaugcc

SEQ ID NO: 24430 - RNA, 32 nt, Homo Sapiens
cuagugugugacucacaccuuguggcugccuu

SEQ ID NO: 24431 - RNA, 32 nt, Homo Sapiens
cagcugcccagccccaggccugcccucggccu

SEQ ID NO: 24432 - RNA, 32 nt, Homo Sapiens
uccugccauuuucuuccugccaagccugaauc

SEQ ID NO: 24433 - RNA, 32 nt, Homo Sapiens
gcugcccggugcgacacuuucuccggacccag

SEQ ID NO: 24434 - RNA, 32 nt, Homo Sapiens
uccaagcagccucgucucggcgcgcagugucu

SEQ ID NO: 24435 - RNA, 32 nt, Homo Sapiens
gaacuuugcaauuuucugggguuuuguuuuuu

SEQ ID NO: 24436 - RNA, 32 nt, Homo Sapiens
caccucgugucugcucauaggaugacgcugga

SEQ ID NO: 24437 - RNA, 28 nt, Homo Sapiens
gaaaugucugacaauucagaagcugaaa

SEQ ID NO: 24438 - RNA, 32 nt, Homo Sapiens
aacugaggaugauuguuagcuccacgagugca

SEQ ID NO: 24439 - RNA, 32 nt, Homo Sapiens
uucuauuaauuuuguuauguuacuguuuuaac

SEQ ID NO: 24440 - RNA, 32 nt, Homo Sapiens
auuaaaagguaaccaagugccucuaagucaug

SEQ ID NO: 24441 - RNA, 32 nt, Homo Sapiens
ggcagucugugguguggagagcagccaucugu

SEQ ID NO: 24442 - RNA, 32 nt, Homo Sapiens
ucacccaccaguuugugaagugcugucccucu

SEQ ID NO: 24443 - RNA, 32 nt, Homo Sapiens
agcaguguuucauaaaauuguuugccugacuc

SEQ ID NO: 24444 - RNA, 32 nt, Homo Sapiens
agucacagaucugagaaauagaaggaccaggu

SEQ ID NO: 24445 - RNA, 32 nt, Homo Sapiens
ugccugucugcacuauuccuuugcccggcauc

SEQ ID NO: 24446 - RNA, 32 nt, Homo Sapiens
cuguggccagggccccaccucccucucucaga

SEQ ID NO: 24447 - RNA, 32 nt, Homo Sapiens
auuagugaaaauuuaugcuuuauuaauauuug

SEQ ID NO: 24448 - RNA, 32 nt, Homo Sapiens
ccguuaguguaaauuucugaguaaauuuauug

SEQ ID NO: 24449 - RNA, 32 nt, Homo Sapiens
gacccgcuccgccuccucuccuucuuccccau

SEQ ID NO: 24450 - RNA, 32 nt, Homo Sapiens
agaacuaaaaacacacauuauuugaaagucuu

SEQ ID NO: 24451 - RNA, 32 nt, Homo Sapiens
uccuacuccagauaggugacacacuuccaaca

SEQ ID NO: 24452 - RNA, 32 nt, Homo Sapiens
aggacagccaagggccauuucuucucagcuug

SEQ ID NO: 24453 - RNA, 32 nt, Homo Sapiens
uccgugggccccagggccuugcagcgcccgcc

SEQ ID NO: 24454 - RNA, 32 nt, Homo Sapiens
gacacucaaacacuugaggugauaguuguuaa

SEQ ID NO: 24455 - RNA, 32 nt, Homo Sapiens
cguuugcugcagagccggacccaguggcuaca

SEQ ID NO: 24456 - RNA, 32 nt, Homo Sapiens
uugagaaaaugugcauaacauaauacauacau

SEQ ID NO: 24457 - RNA, 32 nt, Homo Sapiens
uccuaaaugaauuauaaaguauaagaguauua

SEQ ID NO: 24458 - RNA, 32 nt, Homo Sapiens
gggcccgugcacuuccuggagagaugcuacaa

SEQ ID NO: 24459 - RNA, 32 nt, Homo Sapiens
uuagcugcuugaucauuaagccauccaacuuc

SEQ ID NO: 24460 - RNA, 27 nt, Homo Sapiens
uuugcuuccuucuugccagcucuccca

SEQ ID NO: 24461 - RNA, 32 nt, Homo Sapiens
cagugucauaauaucacccuuccacugaguac

SEQ ID NO: 24462 - RNA, 32 nt, Homo Sapiens
aacucaccucuguagauggacaacacaacugu

SEQ ID NO: 24463 - RNA, 31 nt, Homo Sapiens
uuuuaguaaaaaguacagguauaucucggag

SEQ ID NO: 24464 - RNA, 32 nt, Homo Sapiens
uugcuuauuuauauuucuuuucuuuuuuucua

SEQ ID NO: 24465 - RNA, 32 nt, Homo Sapiens
gaaacagacaccuucccauccccagcguuugu

SEQ ID NO: 24466 - RNA, 32 nt, Homo Sapiens
auaugcugggcaggaugagacaucagugucug

SEQ ID NO: 24467 - RNA, 32 nt, Homo Sapiens
uuggaggacauuuccacugucuucccuggcag

SEQ ID NO: 24468 - RNA, 32 nt, Homo Sapiens
agcccagugugcggccgccgcgcugucugcac

SEQ ID NO: 24469 - RNA, 32 nt, Homo Sapiens
gcuaucacgcauucauuuuuacuaguaccuau

SEQ ID NO: 24470 - RNA, 32 nt, Homo Sapiens
uuaaaagcuuugcaucuuuuuaucuucugguu

SEQ ID NO: 24471 - RNA, 32 nt, Homo Sapiens
gagccguggggcagaggcugcagagccccagg

SEQ ID NO: 24472 - RNA, 32 nt, Homo Sapiens
aacaccucugugagucucaucaucagcugagc

SEQ ID NO: 24473 - RNA, 32 nt, Homo Sapiens
uaagcagaggccggaagcggugguuuuuagcg

SEQ ID NO: 24474 - RNA, 32 nt, Homo Sapiens
gcggggagcugugggcggcagcugcgucuccu

SEQ ID NO: 24475 - RNA, 32 nt, Homo Sapiens
auuuucuguuuaauugauuggugcugugagga

SEQ ID NO: 24476 - RNA, 32 nt, Homo Sapiens
guaaaaaugaaacucaaaaauaaaauaaaugu

SEQ ID NO: 24477 - RNA, 32 nt, Homo Sapiens
gcagcacguugaccauggcucacgacaugggg

SEQ ID NO: 24478 - RNA, 32 nt, Homo Sapiens
acgccgccccggcuccuccggacggggcgcuc

SEQ ID NO: 24479 - RNA, 32 nt, Homo Sapiens
gugacuugggauuuuuaaccuuauauaucuuu

SEQ ID NO: 24480 - RNA, 32 nt, Homo Sapiens
auaacuguuuuaacggguaucuuuuguuuguu

SEQ ID NO: 24481 - RNA, 32 nt, Homo Sapiens
agaaaguucacgggaaugaguugggagggggu

SEQ ID NO: 24482 - RNA, 32 nt, Homo Sapiens
cgggauuuuuauuuuugcucuuuuuauaguau

SEQ ID NO: 24483 - RNA, 32 nt, Homo Sapiens
ccgcggagccccgaugcuggcccggaggaagc

SEQ ID NO: 24484 - RNA, 32 nt, Homo Sapiens
cgaccuggcccagccuggcccguccccaaucc

SEQ ID NO: 24485 - RNA, 32 nt, Homo Sapiens
auguuuuaaugagguuuauuucaacagauauu

SEQ ID NO: 24486 - RNA, 32 nt, Homo Sapiens
guucuggaugagaaguugggacgcgugacgag

SEQ ID NO: 24487 - RNA, 31 nt, Homo Sapiens
uccggaaaugcaaaacaggugaauuuucaag

SEQ ID NO: 24488 - RNA, 32 nt, Homo Sapiens
gugaggcuaagagagggaaagugacuuacuca

SEQ ID NO: 24489 - RNA, 32 nt, Homo Sapiens
cucaaggcuguuuucccccugauucccacuuu

SEQ ID NO: 24490 - RNA, 32 nt, Homo Sapiens
aacuguaucuuaaagagucauuuuaaaauaau

SEQ ID NO: 24491 - RNA, 32 nt, Homo Sapiens
ggacauuauuucugcucauccacacagccagc

SEQ ID NO: 24492 - RNA, 32 nt, Homo Sapiens
uugauaacaauauauuauauacuugaaaauca

SEQ ID NO: 24493 - RNA, 32 nt, Homo Sapiens
uagguagacagagguaaacauucacaugauuu

SEQ ID NO: 24494 - RNA, 32 nt, Homo Sapiens
uggguucagaagcucaaggacaauggacucau

SEQ ID NO: 24495 - RNA, 30 nt, Homo Sapiens
cgucuuccgggaggcggcggggucuuuguc

SEQ ID NO: 24496 - RNA, 32 nt, Homo Sapiens
cuuccacuuaauuauuuuuuuaggauuuugcu

SEQ ID NO: 24497 - RNA, 32 nt, Homo Sapiens
gauuagggaaggaaaacuacucuagaggccau

SEQ ID NO: 24498 - RNA, 32 nt, Homo Sapiens
uugcuggaguugacgguauugcaguuuuauaa

SEQ ID NO: 24499 - RNA, 32 nt, Homo Sapiens
cucagccucccagauagcugggacuacaggca

SEQ ID NO: 24500 - RNA, 32 nt, Homo Sapiens
uugccuaccccaguuagucagcaagaagacug

SEQ ID NO: 24501 - RNA, 32 nt, Homo Sapiens
uaaauuguuauuuuuguguguacauuccaucu

SEQ ID NO: 24502 - RNA, 32 nt, Homo Sapiens
gucccugaauccugcaccuuccguuuuucugu

SEQ ID NO: 24503 - RNA, 32 nt, Homo Sapiens
guaggaacgacgggcuuuuccacugaagggug

SEQ ID NO: 24504 - RNA, 32 nt, Homo Sapiens
gggacaguguccacaaauaccgucgccacacu

SEQ ID NO: 24505 - RNA, 32 nt, Homo Sapiens
gguuuaaagcucuauuugacuuuuuuguuguu

SEQ ID NO: 24506 - RNA, 32 nt, Homo Sapiens
caccuuguccacucccaaaaaaguaaucgggu

SEQ ID NO: 24507 - RNA, 32 nt, Homo Sapiens
gagggagcucuuuggccagggguguucagaug

SEQ ID NO: 24508 - RNA, 32 nt, Homo Sapiens
aaaaaucaaugaguuuauguuuuaacuucuca

SEQ ID NO: 24509 - RNA, 32 nt, Homo Sapiens
gccccgggacuuccuccacccucaccaggaca

SEQ ID NO: 24510 - RNA, 32 nt, Homo Sapiens
caucuuugaagaagaggaauuagggcugugga

SEQ ID NO: 24511 - RNA, 32 nt, Homo Sapiens
acgccgcggggaggaugcugcuugccgcgccc

SEQ ID NO: 24512 - RNA, 32 nt, Homo Sapiens
aucaaaguaagcaauauuuaaaacuuuccaac

SEQ ID NO: 24513 - RNA, 32 nt, Homo Sapiens
guugggucacugggucucgguuggcagccaug

SEQ ID NO: 24514 - RNA, 32 nt, Homo Sapiens
ccugcgggcggcggcccgggcggagcguugga

SEQ ID NO: 24515 - RNA, 32 nt, Homo Sapiens
caccuugucaucaucacccacugcacuggccu

SEQ ID NO: 24516 - RNA, 32 nt, Homo Sapiens
cggagcccgcggccaaacggugccugcggugc

SEQ ID NO: 24517 - RNA, 32 nt, Homo Sapiens
auuuagaaggaaaaccuagaaaacauuuggca

SEQ ID NO: 24518 - RNA, 32 nt, Homo Sapiens
ugcgcccgcagcccugccuccacagcucgcca

SEQ ID NO: 24519 - RNA, 32 nt, Homo Sapiens
cgagcagccaaggcccuguccuuucuugaaug

SEQ ID NO: 24520 - RNA, 32 nt, Homo Sapiens
acugugcuguccugauuguugcugcugguguu

SEQ ID NO: 24521 - RNA, 32 nt, Homo Sapiens
gccuuucgaucccugggaccaaccgcauccuc

SEQ ID NO: 24522 - RNA, 32 nt, Homo Sapiens
uacauuuccaaauaugccauuugauaaauuac

SEQ ID NO: 24523 - RNA, 32 nt, Homo Sapiens
gagauucaguagcugggauguucccucuuucc

SEQ ID NO: 24524 - RNA, 32 nt, Homo Sapiens
ucccuccgcagccccagucccuggccacgccc

SEQ ID NO: 24525 - RNA, 32 nt, Homo Sapiens
guaauaugugcaaaaccgagggcuccaguaac

SEQ ID NO: 24526 - RNA, 32 nt, Homo Sapiens
agccccaugauaaccuuuuucuuuguaauuua

SEQ ID NO: 24527 - RNA, 32 nt, Homo Sapiens
cucaggggaaaggcucacgccccccaucuuag

SEQ ID NO: 24528 - RNA, 32 nt, Homo Sapiens
ggcggagcggcuuuuccaggagaaagggcccu

SEQ ID NO: 24529 - RNA, 32 nt, Homo Sapiens
cuuaauuuuuauuguguuuaauuucuucuuug

SEQ ID NO: 24530 - RNA, 32 nt, Homo Sapiens
acaccugcaccugcguccuccccuccccggcc

SEQ ID NO: 24531 - RNA, 32 nt, Homo Sapiens
uuuggccugugcuucugcuuauucaguccuuc

SEQ ID NO: 24532 - RNA, 32 nt, Homo Sapiens
aagaaauacccgcuccucaccuacucccucau

SEQ ID NO: 24533 - RNA, 32 nt, Homo Sapiens
aauuuaucaaaaaacaagucuuuaguguucaa

SEQ ID NO: 24534 - RNA, 32 nt, Homo Sapiens
aauuucaucccaugucuagagucuuuuaugua

SEQ ID NO: 24535 - RNA, 32 nt, Homo Sapiens
uacuuuuucuugacugauauuaucaugugauu

SEQ ID NO: 24536 - RNA, 28 nt, Homo Sapiens
ggcauggguuuccggaaguucucccccu

SEQ ID NO: 24537 - RNA, 32 nt, Homo Sapiens
gguaagggcucuuuuuaucacucacauuuuac

SEQ ID NO: 24538 - RNA, 32 nt, Homo Sapiens
uguaauauuuggccauuauucuauucaacagg

SEQ ID NO: 24539 - RNA, 32 nt, Homo Sapiens
gacagugauguucauguucuuaaaaugccaca

SEQ ID NO: 24540 - RNA, 32 nt, Homo Sapiens
uuuguagagaugacaacacugauaaaauccac

SEQ ID NO: 24541 - RNA, 32 nt, Homo Sapiens
agccugcuccucucgcucuccuccucgucugc

SEQ ID NO: 24542 - RNA, 32 nt, Homo Sapiens
gucacuauuuauucuuuguuccuuuuucuuuu

SEQ ID NO: 24543 - RNA, 31 nt, Homo Sapiens
ggcgccagggcgguggccugugguuuuuccu

SEQ ID NO: 24544 - RNA, 32 nt, Homo Sapiens
uuuucauaggaaauucacuggaauugugcgca

SEQ ID NO: 24545 - RNA, 32 nt, Homo Sapiens
uaacuuccaauggagggaaagagaggagagca

SEQ ID NO: 24546 - RNA, 32 nt, Homo Sapiens
gaggugaguaagggcugggggcgguagcucau

SEQ ID NO: 24547 - RNA, 32 nt, Homo Sapiens
ugggauggggggugguucgggaugggugggca

SEQ ID NO: 24548 - RNA, 32 nt, Homo Sapiens
uuccaaauauuaaaauucuuguccuauuuugc

SEQ ID NO: 24549 - RNA, 32 nt, Homo Sapiens
cucccuagcccagauggcaccuggacaccagg

SEQ ID NO: 24550 - RNA, 32 nt, Homo Sapiens
gccuuggauccucaggugggcucugcugugug

SEQ ID NO: 24551 - RNA, 32 nt, Homo Sapiens
agggaugcccuagcccucgaggggcggaggac

SEQ ID NO: 24552 - RNA, 32 nt, Homo Sapiens
gcugggccugcaguuccuccccggcaagacgg

SEQ ID NO: 24553 - RNA, 32 nt, Homo Sapiens
agcuacacaacacuacagagggcagccucccu

SEQ ID NO: 24554 - RNA, 32 nt, Homo Sapiens
ccuugucagcuuaguucucagcagcaaaucau

SEQ ID NO: 24555 - RNA, 32 nt, Homo Sapiens
gcccgagcccgagcaguagccggcgccauguc

SEQ ID NO: 24556 - RNA, 32 nt, Homo Sapiens
ugcccucccuccccagcuuacaccucaagccc

SEQ ID NO: 24557 - RNA, 32 nt, Homo Sapiens
aauuccggggguauuggcagcugaggagugga

SEQ ID NO: 24558 - RNA, 32 nt, Homo Sapiens
cucguggaggcuucagagagccagagaugcag

SEQ ID NO: 24559 - RNA, 32 nt, Homo Sapiens
aacugagaucgacagugacuagugaccccuug

SEQ ID NO: 24560 - RNA, 32 nt, Homo Sapiens
gcgugcuuuccacgacggugacacgcuucccu

SEQ ID NO: 24561 - RNA, 27 nt, Homo Sapiens
uuaccauuagcauucugguuuugacau

SEQ ID NO: 24562 - RNA, 32 nt, Homo Sapiens
uggcauuccagaaugaugucuaugaaugggcu

SEQ ID NO: 24563 - RNA, 32 nt, Homo Sapiens
ugguuugucucaaucugacccagcggcuggac

SEQ ID NO: 24564 - RNA, 32 nt, Homo Sapiens
gaggcagaagcguggaggaaggggcgagaggc

SEQ ID NO: 24565 - RNA, 32 nt, Homo Sapiens
acggucaauccacguggaccgucucccucgca

SEQ ID NO: 24566 - RNA, 32 nt, Homo Sapiens
ugcucucauguuuuaugggaauuuauauaaau

SEQ ID NO: 24567 - RNA, 32 nt, Homo Sapiens
cgacucaagggccccaggaccuauucaguggu

SEQ ID NO: 24568 - RNA, 32 nt, Homo Sapiens
uacuugaauauguuuaaguuuauaaguaacau

SEQ ID NO: 24569 - RNA, 32 nt, Homo Sapiens
cauaguggcugccuauagaacaaucuucaaac

SEQ ID NO: 24570 - RNA, 32 nt, Homo Sapiens
gaggaugacgacccuccccugaccacaucugg

SEQ ID NO: 24571 - RNA, 32 nt, Homo Sapiens
guaaaauuaagcaucaaguaaacaaguggaaa

SEQ ID NO: 24572 - RNA, 32 nt, Homo Sapiens
ggccguggcuccggcgucggcgggggcagcag

SEQ ID NO: 24573 - RNA, 32 nt, Homo Sapiens
ugcuuguccaacaaagcauccuaacagggucg

SEQ ID NO: 24574 - RNA, 32 nt, Homo Sapiens
gacccagcuugaggucucggcguccgcguccu

SEQ ID NO: 24575 - RNA, 27 nt, Homo Sapiens
cgauggcagcgcgcccgcugcccgugu

SEQ ID NO: 24576 - RNA, 32 nt, Homo Sapiens
uagcugauaauaaaguuguagauaagauguuu

SEQ ID NO: 24577 - RNA, 32 nt, Homo Sapiens
uauauuagcauuuuuauuuaaugacaaagcaa

SEQ ID NO: 24578 - RNA, 32 nt, Homo Sapiens
aagugggguuugcuuuuuuggaucuaagaauc

SEQ ID NO: 24579 - RNA, 32 nt, Homo Sapiens
cagaacaggaccagcuggugccuacaguccag

SEQ ID NO: 24580 - RNA, 32 nt, Homo Sapiens
guggcucacaccuuuaaucccagcacuuuggg

SEQ ID NO: 24581 - RNA, 32 nt, Homo Sapiens
gucuccacauaaacagcaacaagacaaguaau

SEQ ID NO: 24582 - RNA, 32 nt, Homo Sapiens
auuccacuccgggaaccucggcgaugcugagc

SEQ ID NO: 24583 - RNA, 32 nt, Homo Sapiens
ccacgugccaaggagcucagcggucuucaggc

SEQ ID NO: 24584 - RNA, 32 nt, Homo Sapiens
ugcaccgucaccacccaacaccuuccaugaca

SEQ ID NO: 24585 - RNA, 32 nt, Homo Sapiens
auucuuccagaugaccagcaguagacaaaugg

SEQ ID NO: 24586 - RNA, 32 nt, Homo Sapiens
uguucacucagcaaauuacccuuaagaucuau

SEQ ID NO: 24587 - RNA, 32 nt, Homo Sapiens
gaaucacugcaaaucuaucugcucuucagaca

SEQ ID NO: 24588 - RNA, 32 nt, Homo Sapiens
uuucaggauucaggaugacuuuucuuuuacaa

SEQ ID NO: 24589 - RNA, 32 nt, Homo Sapiens
auguaaaagauauuuuuggaaaauacuguugu

SEQ ID NO: 24590 - RNA, 32 nt, Homo Sapiens
gccagggacaugcgggcgcccgggacuccgcg

SEQ ID NO: 24591 - RNA, 32 nt, Homo Sapiens
gacacggcugacuuccagauaugaccauguau

SEQ ID NO: 24592 - RNA, 32 nt, Homo Sapiens
gaugcaaggcaucccggcgcccucccaggcgc

SEQ ID NO: 24593 - RNA, 32 nt, Homo Sapiens
uuuguguauguggcuagucuuauugucacuau

SEQ ID NO: 24594 - RNA, 32 nt, Homo Sapiens
uuucaaucuugcaauuugauaauuuugauuuu

SEQ ID NO: 24595 - RNA, 32 nt, Homo Sapiens
acugauaaauucaguaaaguugcaggauacaa

SEQ ID NO: 24596 - RNA, 32 nt, Homo Sapiens
ccggccgcgggaaggaccgaaggggauacagc

SEQ ID NO: 24597 - RNA, 32 nt, Homo Sapiens
ugagcggguccauggcgaguguaucgccaacu

SEQ ID NO: 24598 - RNA, 32 nt, Homo Sapiens
aaacauucucuugaauuucccuccucagaaac

SEQ ID NO: 24599 - RNA, 32 nt, Homo Sapiens
ggauaugggcagucaucaauggcugccaaaac

SEQ ID NO: 24600 - RNA, 32 nt, Homo Sapiens
ugugucuccagggaacccacggcuggagagaa

SEQ ID NO: 24601 - RNA, 32 nt, Homo Sapiens
acugcaauauaaaauagccauuauuguuuugu

SEQ ID NO: 24602 - RNA, 32 nt, Homo Sapiens
caugggaucugccugcaaaugcuguuuagggc

SEQ ID NO: 24603 - RNA, 32 nt, Homo Sapiens
cucagccugcgcgcgccgcgcccugugucucc

SEQ ID NO: 24604 - RNA, 32 nt, Homo Sapiens
guggauucugguucuuuuuuuucccauuaucc

SEQ ID NO: 24605 - RNA, 32 nt, Homo Sapiens
aaagaaagugggucaccugaccucugaagagc

SEQ ID NO: 24606 - RNA, 32 nt, Homo Sapiens
guuaaaauuuccgucuguuccuuuaaaacucu

SEQ ID NO: 24607 - RNA, 32 nt, Homo Sapiens
gcuacucaacagguuugaggccccacagcaac

SEQ ID NO: 24608 - RNA, 32 nt, Homo Sapiens
uagauucuuauuccuauauaacuaauagagaa

SEQ ID NO: 24609 - RNA, 32 nt, Homo Sapiens
uucuggagguucagcaaaguuauguuaaauua

SEQ ID NO: 24610 - RNA, 32 nt, Homo Sapiens
uugcuguuguuuuguuuuuuuauuuaaaucac

SEQ ID NO: 24611 - RNA, 32 nt, Homo Sapiens
aaagaucaguuauaggauaaaauggcaucucu

SEQ ID NO: 24612 - RNA, 32 nt, Homo Sapiens
gcuggaauugcagacacccaucaccacgccca

SEQ ID NO: 24613 - RNA, 32 nt, Homo Sapiens
cuauuuucaauccuugcugaacggagucaaga

SEQ ID NO: 24614 - RNA, 32 nt, Homo Sapiens
agagcugaggaugaaacacacccagaguggac

SEQ ID NO: 24615 - RNA, 32 nt, Homo Sapiens
caccccggggagagccgggagcugccucuuua

SEQ ID NO: 24616 - RNA, 32 nt, Homo Sapiens
aacguagcuaccguacacacacaucaaucacu

SEQ ID NO: 24617 - RNA, 32 nt, Homo Sapiens
cuggcucgacuggcagagagagcgcuggcaga

SEQ ID NO: 24618 - RNA, 32 nt, Homo Sapiens
uugugcuauacuuuucccccaacccuccaaua

SEQ ID NO: 24619 - RNA, 32 nt, Homo Sapiens
uuuccuaaugagauauaucuuuauacuuaaac

SEQ ID NO: 24620 - RNA, 32 nt, Homo Sapiens
ugggcagcugggugggccugagcuagggcagc

SEQ ID NO: 24621 - RNA, 32 nt, Homo Sapiens
ugcgacucagcaugcagaaguaaaugcaaaau

SEQ ID NO: 24622 - RNA, 32 nt, Homo Sapiens
aauagauaaccucaagcuuugucuuucuaugu

SEQ ID NO: 24623 - RNA, 32 nt, Homo Sapiens
cacggcgagucagaagggaggggccuuucccu

SEQ ID NO: 24624 - RNA, 32 nt, Homo Sapiens
cgggagcccacuuugagaacugcugaucuagg

SEQ ID NO: 24625 - RNA, 32 nt, Homo Sapiens
gccccagggcuuugggggcggcacuugggguu

SEQ ID NO: 24626 - RNA, 32 nt, Homo Sapiens
ggcuuuagagaaauguucuaaaacuucuaagu

SEQ ID NO: 24627 - RNA, 32 nt, Homo Sapiens
gcagacgacugucuguccuguuuaugacaaac

SEQ ID NO: 24628 - RNA, 32 nt, Homo Sapiens
aaagcguuucaaagcgucagcugugggagcag

SEQ ID NO: 24629 - RNA, 32 nt, Homo Sapiens
aaggaagucacauguccaaccccagacucuaa

SEQ ID NO: 24630 - RNA, 32 nt, Homo Sapiens
ugugcaucuauuaacuguucaugguguuagag

SEQ ID NO: 24631 - RNA, 32 nt, Homo Sapiens
gagcacgccgagcgaguccucacgcucuccag

SEQ ID NO: 24632 - RNA, 32 nt, Homo Sapiens
accacaugguacagcugcaggccguggucagg

SEQ ID NO: 24633 - RNA, 32 nt, Homo Sapiens
ccuccgcuguggccauagaaggaauggagaac

SEQ ID NO: 24634 - RNA, 32 nt, Homo Sapiens
agcucacaaaggaaaaguuguggccugugcuc

SEQ ID NO: 24635 - RNA, 32 nt, Homo Sapiens
aaguuaugucauuaauauaggcugguucauca

SEQ ID NO: 24636 - RNA, 32 nt, Homo Sapiens
uaucauuacuguacauuuaauuuuauauacuu

SEQ ID NO: 24637 - RNA, 32 nt, Homo Sapiens
gguuguugcacuaccgcuguaucuguacauaa

SEQ ID NO: 24638 - RNA, 32 nt, Homo Sapiens
auuauuagacucucuaguuuuaucuuaacacu

SEQ ID NO: 24639 - RNA, 32 nt, Homo Sapiens
cugcuuugucuccuuagcucgggucccuucug

SEQ ID NO: 24640 - RNA, 32 nt, Homo Sapiens
gacgcagacauggcagcgcagaaggaccagca

SEQ ID NO: 24641 - RNA, 32 nt, Homo Sapiens
guaaaggccacuuugcucaucaucaccaggcg

SEQ ID NO: 24642 - RNA, 32 nt, Homo Sapiens
gcuuugaacugggacuucaaagagaagccgag

SEQ ID NO: 24643 - RNA, 32 nt, Homo Sapiens
gcccuagucccugccugucucaucuaacgccc

SEQ ID NO: 24644 - RNA, 32 nt, Homo Sapiens
ccccauccacccaacugaacuggguauagguc

SEQ ID NO: 24645 - RNA, 32 nt, Homo Sapiens
uuacagugguuauauggaaaagaaauugauug

SEQ ID NO: 24646 - RNA, 32 nt, Homo Sapiens
aaauaacucagaagaggagugucgguagccaa

SEQ ID NO: 24647 - RNA, 32 nt, Homo Sapiens
acuaaguuucagaacuuuccuuaggacuuggg

SEQ ID NO: 24648 - RNA, 32 nt, Homo Sapiens
gugaggaagaucugcagacaccuguuccacgu

SEQ ID NO: 24649 - RNA, 32 nt, Homo Sapiens
aagguuuggagagcggcuggguucgcgggacc

SEQ ID NO: 24650 - RNA, 32 nt, Homo Sapiens
accuaccucacaggggguugugaggauuaaau

SEQ ID NO: 24651 - RNA, 32 nt, Homo Sapiens
ccgcuaagccccucgccccgcgcggaccucgg

SEQ ID NO: 24652 - RNA, 32 nt, Homo Sapiens
cauucgccgccugggggcgcugacgcuggagc

SEQ ID NO: 24653 - RNA, 28 nt, Homo Sapiens
cuuggagcauagguggggauccuccagc

SEQ ID NO: 24654 - RNA, 32 nt, Homo Sapiens
ucacccaaacaaaagaacaagguuugccagga

SEQ ID NO: 24655 - RNA, 31 nt, Homo Sapiens
cggauuccgguccgcaggagaccgaaggcac

SEQ ID NO: 24656 - RNA, 29 nt, Homo Sapiens
acuuccacauguauguacaaguuagguca

SEQ ID NO: 24657 - RNA, 32 nt, Homo Sapiens
acauucuuuauuccuuguuuuaauuugaaccc

SEQ ID NO: 24658 - RNA, 32 nt, Homo Sapiens
aggcggggagaagcggcggggagacgccggcu

SEQ ID NO: 24659 - RNA, 32 nt, Homo Sapiens
cuuuugaaauucugauacaugauuucaaaaaa

SEQ ID NO: 24660 - RNA, 32 nt, Homo Sapiens
gguucauaauacaauauaauaaaaauucuuua

SEQ ID NO: 24661 - RNA, 32 nt, Homo Sapiens
ucaaggggauguuuaauacugaaucaagcuuc

SEQ ID NO: 24662 - RNA, 32 nt, Homo Sapiens
caaagggaggggcucugccgcuuagcagagaa

SEQ ID NO: 24663 - RNA, 32 nt, Homo Sapiens
cccccugggcagguuccccaccccgccccacc

SEQ ID NO: 24664 - RNA, 29 nt, Homo Sapiens
aggacgaggagcagcgggacgaggaaggg

SEQ ID NO: 24665 - RNA, 32 nt, Homo Sapiens
uguuagucuguuuuguaauauucuuuucccuu

SEQ ID NO: 24666 - RNA, 32 nt, Homo Sapiens
uuuccaacugcauuuccuuuccaauugaauua

SEQ ID NO: 24667 - RNA, 32 nt, Homo Sapiens
uucuuuuggggaugaaaauggggaaggcguga

SEQ ID NO: 24668 - RNA, 32 nt, Homo Sapiens
aaagaagaagaauacagucauguaucucuugg

SEQ ID NO: 24669 - RNA, 32 nt, Homo Sapiens
gccuggaggggggucugugcgcggccggcugg

SEQ ID NO: 24670 - RNA, 32 nt, Homo Sapiens
ggacugaagauaauuuacagugccccaucuaa

SEQ ID NO: 24671 - RNA, 32 nt, Homo Sapiens
ugggcuggggagaggaacaggccuugggaauc

SEQ ID NO: 24672 - RNA, 32 nt, Homo Sapiens
aacugugaaugggaaagcucugccuucaacaa

SEQ ID NO: 24673 - RNA, 32 nt, Homo Sapiens
gccucaguguccuuccccuccccucgccuggc

SEQ ID NO: 24674 - RNA, 32 nt, Homo Sapiens
gacccuggccccagcguccccugccagcaucc

SEQ ID NO: 24675 - RNA, 32 nt, Homo Sapiens
ugauuuuucaaucccugcaaaacugcuucaau

SEQ ID NO: 24676 - RNA, 32 nt, Homo Sapiens
gagaaccuaaucuuaacuuguucacaggugua

SEQ ID NO: 24677 - RNA, 32 nt, Homo Sapiens
aggaauuuguaucuucacuuuaggauugagaa

SEQ ID NO: 24678 - RNA, 31 nt, Homo Sapiens
uguaauauugguaauuuggaugaaggaagcu

SEQ ID NO: 24679 - RNA, 32 nt, Homo Sapiens
ucgcccaauuuauuuuaacaaaagaagauuaa

SEQ ID NO: 24680 - RNA, 32 nt, Homo Sapiens
ccuuucagguuccuuccuuguaccucagcacu

SEQ ID NO: 24681 - RNA, 32 nt, Homo Sapiens
uuuacucagcuuucuuuauguuuuccaaagcu

SEQ ID NO: 24682 - RNA, 32 nt, Homo Sapiens
gaaguuucucaaaguacuccuuuauauauacu

SEQ ID NO: 24683 - RNA, 32 nt, Homo Sapiens
acucaaguggauaaaaaguguauuuuaacucu

SEQ ID NO: 24684 - RNA, 32 nt, Homo Sapiens
ggacaagcagugcaaugcuagauuacgucguc

SEQ ID NO: 24685 - RNA, 32 nt, Homo Sapiens
uacacaggagagaacagaacuauuuagggugu

SEQ ID NO: 24686 - RNA, 30 nt, Homo Sapiens
ccccacuuauucaugggggauacauuucaa

SEQ ID NO: 24687 - RNA, 31 nt, Homo Sapiens
cuggaccggccugcccccgcccagcgagccu

SEQ ID NO: 24688 - RNA, 32 nt, Homo Sapiens
aagaugcaccucauguuuguuuuaagguauag

SEQ ID NO: 24689 - RNA, 32 nt, Homo Sapiens
cggcuccggccgcuaggacccugccagguccc

SEQ ID NO: 24690 - RNA, 32 nt, Homo Sapiens
ucugggauagggauagagacuuugaacugcuc

SEQ ID NO: 24691 - RNA, 32 nt, Homo Sapiens
gccuccuggucuuugccuuugcugggccuucu

SEQ ID NO: 24692 - RNA, 32 nt, Homo Sapiens
uuguucuuccuuccucaggguuagugaugaaa

SEQ ID NO: 24693 - RNA, 32 nt, Homo Sapiens
ucuacgcagugcguuccaccggguccguaucc

SEQ ID NO: 24694 - RNA, 32 nt, Homo Sapiens
ucauccuacauaaaaucagggaugguuggcau

SEQ ID NO: 24695 - RNA, 32 nt, Homo Sapiens
auaaggcaaauuaaaggggaccccaagacuug

SEQ ID NO: 24696 - RNA, 32 nt, Homo Sapiens
uuuucauaccuauaaagucaaucuugaguuga

SEQ ID NO: 24697 - RNA, 32 nt, Homo Sapiens
ccgcccccagccucggccccagccucggccuu

SEQ ID NO: 24698 - RNA, 32 nt, Homo Sapiens
cuugugcccucccuguccuuagccuaggccua

SEQ ID NO: 24699 - RNA, 30 nt, Homo Sapiens
agaaaugucugugaucuagauaguucuaga

SEQ ID NO: 24700 - RNA, 32 nt, Homo Sapiens
uugcccuccccuuguccaacccaccuuuggcu

SEQ ID NO: 24701 - RNA, 32 nt, Homo Sapiens
uguuaaugaaauugauauuauuuugacuuccu

SEQ ID NO: 24702 - RNA, 32 nt, Homo Sapiens
ucgaagaacaccuggggcuuggggggugcggg

SEQ ID NO: 24703 - RNA, 32 nt, Homo Sapiens
uucaaugguacacuuaacuagucucuucugug

SEQ ID NO: 24704 - RNA, 32 nt, Homo Sapiens
uggauugucauucuuacaaaacauuuuuuugu

SEQ ID NO: 24705 - RNA, 32 nt, Homo Sapiens
cacaccugcccggcugcccacucugggacccc

SEQ ID NO: 24706 - RNA, 32 nt, Homo Sapiens
uccccaggaggccuuuggggcugggguggccc

SEQ ID NO: 24707 - RNA, 32 nt, Homo Sapiens
aauacuugaacauuuuaacaguaacgcaggug

SEQ ID NO: 24708 - RNA, 32 nt, Homo Sapiens
acucaugcacagagaaggaaaagggaacaucu

SEQ ID NO: 24709 - RNA, 32 nt, Homo Sapiens
cagcccgaccaggcacagacacagggggcucu

SEQ ID NO: 24710 - RNA, 32 nt, Homo Sapiens
uccuggcucuggcucccuggauguguggcucu

SEQ ID NO: 24711 - RNA, 32 nt, Homo Sapiens
ggccuggaaauauuuuguaacacuuuaaagga

SEQ ID NO: 24712 - RNA, 32 nt, Homo Sapiens
uguccgaguccuccgacuccugcccaagugaa

SEQ ID NO: 24713 - RNA, 32 nt, Homo Sapiens
guccuccgcgcgcgccugcccgcggcugggga

SEQ ID NO: 24714 - RNA, 32 nt, Homo Sapiens
uggccccacaucgccuuuuccuccccgacacc

SEQ ID NO: 24715 - RNA, 32 nt, Homo Sapiens
aauuaucaauuuaaucaucaccaccgguguuu

SEQ ID NO: 24716 - RNA, 32 nt, Homo Sapiens
aauaauauauccacaucuaagaaaauuuacug

SEQ ID NO: 24717 - RNA, 32 nt, Homo Sapiens
gagucuguccgaguuugcagggugcugagcug

SEQ ID NO: 24718 - RNA, 32 nt, Homo Sapiens
ugguaagcacaccugggggcucugucacuuua

SEQ ID NO: 24719 - RNA, 32 nt, Homo Sapiens
acuggauuuuugcugcagaaauguaucagugg

SEQ ID NO: 24720 - RNA, 32 nt, Homo Sapiens
gccccccugccaggcgaggcugacuccgcgug

SEQ ID NO: 24721 - RNA, 32 nt, Homo Sapiens
cauauuccauaauaaagugcuguguugugaau

SEQ ID NO: 24722 - RNA, 32 nt, Homo Sapiens
cucugcaaauaggcaucucagcuccucacacu

SEQ ID NO: 24723 - RNA, 32 nt, Homo Sapiens
agugcgugucuucaugguugccguggguuuua

SEQ ID NO: 24724 - RNA, 32 nt, Homo Sapiens
acacaacaggagauggcagggcugggauucaa

SEQ ID NO: 24725 - RNA, 32 nt, Homo Sapiens
aaggcugaauacugaucuuggguguugguguc

SEQ ID NO: 24726 - RNA, 32 nt, Homo Sapiens
ugcuuguaaucucagcacuuugggagucugag

SEQ ID NO: 24727 - RNA, 32 nt, Homo Sapiens
gacuagaguauuuuuucuuuccuuuugcccaa

SEQ ID NO: 24728 - RNA, 32 nt, Homo Sapiens
ucccuuccugcucuaacguccagugcuuccuu

SEQ ID NO: 24729 - RNA, 32 nt, Homo Sapiens
ugugccuugacaaccucucccuaugugagguu

SEQ ID NO: 24730 - RNA, 32 nt, Homo Sapiens
aauucccugcugucgucuuagcaagaaguaaa

SEQ ID NO: 24731 - RNA, 32 nt, Homo Sapiens
gaguggcaggucuguuccugguaaaauuuuaa

SEQ ID NO: 24732 - RNA, 32 nt, Homo Sapiens
gcuagcuugcaggcauaaucccagagccucuu

SEQ ID NO: 24733 - RNA, 32 nt, Homo Sapiens
ccaucucucccuccccugccauuuuggguuuu

SEQ ID NO: 24734 - RNA, 32 nt, Homo Sapiens
aucacucccaacaaauguugauucuuaauauu

SEQ ID NO: 24735 - RNA, 32 nt, Homo Sapiens
auccuauuuaucuucugggaaauauuuuaauu

SEQ ID NO: 24736 - RNA, 32 nt, Homo Sapiens
ucaaagagcugggauuacaggcaugagucacc

SEQ ID NO: 24737 - RNA, 32 nt, Homo Sapiens
acgucaagcucuucauuguuccuaucugccaa

SEQ ID NO: 24738 - RNA, 32 nt, Homo Sapiens
gaaacaggaacuuuuccaggugguguuaauaa

SEQ ID NO: 24739 - RNA, 32 nt, Homo Sapiens
ccauggcccucuucuuuguucucugcuggauc

SEQ ID NO: 24740 - RNA, 32 nt, Homo Sapiens
caacuguggccagcuguggcaucagcuuccug

SEQ ID NO: 24741 - RNA, 32 nt, Homo Sapiens
guugcuuggggcauccugugcucuccacugcc

SEQ ID NO: 24742 - RNA, 32 nt, Homo Sapiens
cauccacuaaguguacaauacuucuacaauaa

SEQ ID NO: 24743 - RNA, 32 nt, Homo Sapiens
ccacccaagggagacacuaacagauaggccaa

SEQ ID NO: 24744 - RNA, 32 nt, Homo Sapiens
acccccagacagagcccuggcggagaggcagg

SEQ ID NO: 24745 - RNA, 32 nt, Homo Sapiens
gagccugucucuucuuucuggagguucaaacu

SEQ ID NO: 24746 - RNA, 32 nt, Homo Sapiens
agugggcccggagaccccggcccgaggcgccc

SEQ ID NO: 24747 - RNA, 32 nt, Homo Sapiens
gaauguggaaaagcuuuucaccgauacucaau

SEQ ID NO: 24748 - RNA, 29 nt, Homo Sapiens
auccacauauguauguccaauuugauugg

SEQ ID NO: 24749 - RNA, 32 nt, Homo Sapiens
aaaaagaaaaggaaaaaauuuaaccaauuuuu

SEQ ID NO: 24750 - RNA, 32 nt, Homo Sapiens
gagucccgcggccccaguggcgccucagcucu

SEQ ID NO: 24751 - RNA, 32 nt, Homo Sapiens
uagaguuggaucacuuuuuuucuuuccgguga

SEQ ID NO: 24752 - RNA, 32 nt, Homo Sapiens
ggaagaccacacgcgugcgugguggggacuac

SEQ ID NO: 24753 - RNA, 32 nt, Homo Sapiens
gauccagugggauacauaaaauccaagaugau

SEQ ID NO: 24754 - RNA, 32 nt, Homo Sapiens
uugaaaaucucauggcguccugugcugugcug

SEQ ID NO: 24755 - RNA, 32 nt, Homo Sapiens
gauagcaaaugccaccugaccagaagucuuug

SEQ ID NO: 24756 - RNA, 32 nt, Homo Sapiens
uaagauauguggugguuuuguaauuugaugcu

SEQ ID NO: 24757 - RNA, 32 nt, Homo Sapiens
aacaaacaaaaauugucaaugaccaaacauuc

SEQ ID NO: 24758 - RNA, 32 nt, Homo Sapiens
uaaugaauuaguuguuugggguuacuucuuug

SEQ ID NO: 24759 - RNA, 32 nt, Homo Sapiens
uagaaagauggacuuuucugauaaaucuuggc

SEQ ID NO: 24760 - RNA, 32 nt, Homo Sapiens
ggaagggcgagcagcgggaggugcgggcucug

SEQ ID NO: 24761 - RNA, 32 nt, Homo Sapiens
gguuuuguuuucaacuuuucauuuggauguuu

SEQ ID NO: 24762 - RNA, 32 nt, Homo Sapiens
caggcccagcuggaggagcagcugcgggacaa

SEQ ID NO: 24763 - RNA, 32 nt, Homo Sapiens
ugcuaagcgcgcccuccaccccggcccccgaa

SEQ ID NO: 24764 - RNA, 32 nt, Homo Sapiens
ggcggcgcgcagcgcgucuccuuccgccggcg

SEQ ID NO: 24765 - RNA, 32 nt, Homo Sapiens
gaaaacagugggucugcagauagugcccacaa

SEQ ID NO: 24766 - RNA, 32 nt, Homo Sapiens
uaauauuaaaauuuaccauggaaaucacuguu

SEQ ID NO: 24767 - RNA, 32 nt, Homo Sapiens
ccagcuaauuuucauauuuuuaguagagacag

SEQ ID NO: 24768 - RNA, 31 nt, Homo Sapiens
cagugaagucuuaagaaccaggcauuccuag

SEQ ID NO: 24769 - RNA, 32 nt, Homo Sapiens
ccgcagcccccggccccucccccauggaggag

SEQ ID NO: 24770 - RNA, 32 nt, Homo Sapiens
gcugggaaggcacagaaucgcugaaaauugca

SEQ ID NO: 24771 - RNA, 32 nt, Homo Sapiens
cacauucucagaagcucuugaugucucuaaug

SEQ ID NO: 24772 - RNA, 32 nt, Homo Sapiens
gaauuguaacaagagagagaacucuggcugcc

SEQ ID NO: 24773 - RNA, 31 nt, Homo Sapiens
uguuuacagcagcccauucaguauugaaaaa

SEQ ID NO: 24774 - RNA, 31 nt, Homo Sapiens
ugaaccauuuuaaggaugccaaaugaaauau

SEQ ID NO: 24775 - RNA, 32 nt, Homo Sapiens
gagagagggcaguggggcugcagaggcugggg

SEQ ID NO: 24776 - RNA, 32 nt, Homo Sapiens
agguaggaggcggagguggggguggggguagu

SEQ ID NO: 24777 - RNA, 32 nt, Homo Sapiens
accucaucuauuuacuguuacucaguugguac

SEQ ID NO: 24778 - RNA, 32 nt, Homo Sapiens
agaguuguuucagugcuagaucuugccagcua

SEQ ID NO: 24779 - RNA, 32 nt, Homo Sapiens
cugcucacacauuuuccaaaagggcagugcac

SEQ ID NO: 24780 - RNA, 32 nt, Homo Sapiens
acaggaggcagacaaugaccccacggcuccuc

SEQ ID NO: 24781 - RNA, 32 nt, Homo Sapiens
uuuuuucugauccagacccucggcaccugcua

SEQ ID NO: 24782 - RNA, 32 nt, Homo Sapiens
ugguggcgcagaggcgggaggcggaggcggga

SEQ ID NO: 24783 - RNA, 32 nt, Homo Sapiens
agggcuugcaccccacccagcccugggaugaa

SEQ ID NO: 24784 - RNA, 32 nt, Homo Sapiens
gagaagggacuuugcugucagguccaagcccu

SEQ ID NO: 24785 - RNA, 32 nt, Homo Sapiens
ucuuuuuguaagugagugugcugcuguaagaa

SEQ ID NO: 24786 - RNA, 32 nt, Homo Sapiens
gcacagagccuggcgggcggagcuagggccuc

SEQ ID NO: 24787 - RNA, 32 nt, Homo Sapiens
ccuuacccacagauaagccuccccucaugaaa

SEQ ID NO: 24788 - RNA, 32 nt, Homo Sapiens
guuaacuaacaaaguuaaaguuguuuaacaua

SEQ ID NO: 24789 - RNA, 32 nt, Homo Sapiens
uggggagaaggaagaaaacugggccgggaacc

SEQ ID NO: 24790 - RNA, 32 nt, Homo Sapiens
gggaagggugcgggggcgcauggggugauccu

SEQ ID NO: 24791 - RNA, 32 nt, Homo Sapiens
guccucugcauaaacgauguauuuuggggucu

SEQ ID NO: 24792 - RNA, 32 nt, Homo Sapiens
aucuuaaaggauugaaguuccaaaaauacauc

SEQ ID NO: 24793 - RNA, 32 nt, Homo Sapiens
ccuuacagugaagauguuuacucauugccccc

SEQ ID NO: 24794 - RNA, 32 nt, Homo Sapiens
gccccuuccaaaaggcagaaauccauucaaac

SEQ ID NO: 24795 - RNA, 32 nt, Homo Sapiens
ugaaaaccaggguggggugacgcaggcucugg

SEQ ID NO: 24796 - RNA, 32 nt, Homo Sapiens
uggcuaucuuaggcguuccuuaucuuaggcgu

SEQ ID NO: 24797 - RNA, 32 nt, Homo Sapiens
ccgcgauacuaaaauccagugagcuuugggag

SEQ ID NO: 24798 - RNA, 32 nt, Homo Sapiens
augaucugcuuaggcccucagaauauuuucaa

SEQ ID NO: 24799 - RNA, 32 nt, Homo Sapiens
ucugaugccugccuggcugguucucaguaaga

SEQ ID NO: 24800 - RNA, 32 nt, Homo Sapiens
cgauggggcugauguuucuaugauugccucag

SEQ ID NO: 24801 - RNA, 32 nt, Homo Sapiens
agccccagcccgcucccccaccccgccauggg

SEQ ID NO: 24802 - RNA, 32 nt, Homo Sapiens
cccugguguggccugcccucccuuugacuugg

SEQ ID NO: 24803 - RNA, 32 nt, Homo Sapiens
ucuguuaggugggauaauaccauucacugugc

SEQ ID NO: 24804 - RNA, 32 nt, Homo Sapiens
cggggcagcuccgacgcccucccgcggggaag

SEQ ID NO: 24805 - RNA, 32 nt, Homo Sapiens
ugagauaaagaacuaaagaaauuaagagauag

SEQ ID NO: 24806 - RNA, 32 nt, Homo Sapiens
ucaggaggccccauuuccuacugcagcggggc

SEQ ID NO: 24807 - RNA, 32 nt, Homo Sapiens
gguuccuggauuaagaugacuuccucacauag

SEQ ID NO: 24808 - RNA, 32 nt, Homo Sapiens
cccggcagacugccucugucaucaggacccuc

SEQ ID NO: 24809 - RNA, 32 nt, Homo Sapiens
acgaaucuccuucaaggaaccacacauuuuua

SEQ ID NO: 24810 - RNA, 32 nt, Homo Sapiens
guccccuuuccacuuccccagcuucugcccca

SEQ ID NO: 24811 - RNA, 32 nt, Homo Sapiens
cagccugggcagcagagcaacacucugucuca

SEQ ID NO: 24812 - RNA, 32 nt, Homo Sapiens
uuuuucuugcucugcagcauggaccaaagaga

SEQ ID NO: 24813 - RNA, 32 nt, Homo Sapiens
uccuggcccccgcccuugccccggcccggacu

SEQ ID NO: 24814 - RNA, 32 nt, Homo Sapiens
cggaggcugagccccgcgaccggagcgccgcu

SEQ ID NO: 24815 - RNA, 32 nt, Homo Sapiens
ucuaauacaaacauuccuuauuugagaaaaaa

SEQ ID NO: 24816 - RNA, 32 nt, Homo Sapiens
ccuccugcuccccccaccccagcccuagcccu

SEQ ID NO: 24817 - RNA, 32 nt, Homo Sapiens
ggcuguggcagagccacugucacacagaaugc

SEQ ID NO: 24818 - RNA, 32 nt, Homo Sapiens
ccucagccacccaaaguguugggauuacaggu

SEQ ID NO: 24819 - RNA, 32 nt, Homo Sapiens
gagugaguuaugugacauccacagaaaaugaa

SEQ ID NO: 24820 - RNA, 32 nt, Homo Sapiens
cuggccgugcucugggucuucccuacucccaa

SEQ ID NO: 24821 - RNA, 32 nt, Homo Sapiens
uuugucuaaaacuacuuuuaaaaauuacaugu

SEQ ID NO: 24822 - RNA, 32 nt, Homo Sapiens
gucgggaucaccgucacggacaacuaugaagu

SEQ ID NO: 24823 - RNA, 32 nt, Homo Sapiens
agauggauggugagcaccacugcuacagagca

SEQ ID NO: 24824 - RNA, 32 nt, Homo Sapiens
uguuuucuugucaugaaaacuguuuuccauuu

SEQ ID NO: 24825 - RNA, 32 nt, Homo Sapiens
uucuugccuaauaaguuucuuuuaauccaauc

SEQ ID NO: 24826 - RNA, 32 nt, Homo Sapiens
acuaaggagacgggcacagacuugcgucaucu

SEQ ID NO: 24827 - RNA, 32 nt, Homo Sapiens
agcagagcccucacucccaggcagaguugucu

SEQ ID NO: 24828 - RNA, 32 nt, Homo Sapiens
auaagaaugagaaaggcucaaaaggaagcacu

SEQ ID NO: 24829 - RNA, 32 nt, Homo Sapiens
gcucggccuccaccgcuguuccgcugcagccc

SEQ ID NO: 24830 - RNA, 32 nt, Homo Sapiens
ugaacugagcccaaguguauucucuggccugg

SEQ ID NO: 24831 - RNA, 32 nt, Homo Sapiens
aaauauugaagaaauguagugugugcauguaa

SEQ ID NO: 24832 - RNA, 32 nt, Homo Sapiens
uuuuauauugcuucuuuuuuucugauccuugc

SEQ ID NO: 24833 - RNA, 32 nt, Homo Sapiens
uuuuacguaaaauaaacuguuguuuccaaugc

SEQ ID NO: 24834 - RNA, 32 nt, Homo Sapiens
aaauuagguggccuuauaaauauaagcagaug

SEQ ID NO: 24835 - RNA, 32 nt, Homo Sapiens
ugcgccaggccgcgagacccccggggcggcuu

SEQ ID NO: 24836 - RNA, 31 nt, Homo Sapiens
caauuuucuucaucuuugccauauggaggac

SEQ ID NO: 24837 - RNA, 30 nt, Homo Sapiens
gacgguggaucuagcggcggcgaggaggcg

SEQ ID NO: 24838 - RNA, 32 nt, Homo Sapiens
auugagauuucaagaaaugaugaugaaagcca

SEQ ID NO: 24839 - RNA, 32 nt, Homo Sapiens
agggucaggguccgcgaucucggacuaaggau

SEQ ID NO: 24840 - RNA, 32 nt, Homo Sapiens
acuccagcacaccuggcgaguaguagcuguca

SEQ ID NO: 24841 - RNA, 32 nt, Homo Sapiens
gugguaccgcauuuuauagaugagauagcuga

SEQ ID NO: 24842 - RNA, 32 nt, Homo Sapiens
ccucgccaucguuuccucgguccucggcccag

SEQ ID NO: 24843 - RNA, 32 nt, Homo Sapiens
acaacugucuggugacugaggaucuccucucu

SEQ ID NO: 24844 - RNA, 32 nt, Homo Sapiens
gaccugcagaaucuggguuucugcucuaugag

SEQ ID NO: 24845 - RNA, 32 nt, Homo Sapiens
cgcggcgcagagaggaggggcuugcgccccgu

SEQ ID NO: 24846 - RNA, 32 nt, Homo Sapiens
ccagcucagagcugaacauaauuuauaucuaa

SEQ ID NO: 24847 - RNA, 32 nt, Homo Sapiens
ugaauuauccaaauuguuuaaauucacaauug

SEQ ID NO: 24848 - RNA, 32 nt, Homo Sapiens
gcuccugggagcgcucgcuucuccguugugug

SEQ ID NO: 24849 - RNA, 32 nt, Homo Sapiens
ccgcgccgugucugaugugucagugcuccggc

SEQ ID NO: 24850 - RNA, 32 nt, Homo Sapiens
cucagaggaaauggcacaguuccacaaucucu

SEQ ID NO: 24851 - RNA, 32 nt, Homo Sapiens
ggucuccgcaugcugcagcugcucccgggugc

SEQ ID NO: 24852 - RNA, 29 nt, Homo Sapiens
accccucagauuuuauauuuucuauuucu

SEQ ID NO: 24853 - RNA, 32 nt, Homo Sapiens
auggaauggugagcagaauacacaucuuccuu

SEQ ID NO: 24854 - RNA, 32 nt, Homo Sapiens
caagccaagagacuagcagagaagguacguua

SEQ ID NO: 24855 - RNA, 32 nt, Homo Sapiens
acuuuuugaaauugauguacuuaguuucaaga

SEQ ID NO: 24856 - RNA, 32 nt, Homo Sapiens
gauucuuuuucaaacugccagaauagaaggga

SEQ ID NO: 24857 - RNA, 32 nt, Homo Sapiens
gacugcugccccuucagcugcccucgauuuug

SEQ ID NO: 24858 - RNA, 32 nt, Homo Sapiens
agagggcugcaauggacugaccucccccucac

SEQ ID NO: 24859 - RNA, 32 nt, Homo Sapiens
uggcuucccucgcgccccaccguccucuuccg

SEQ ID NO: 24860 - RNA, 32 nt, Homo Sapiens
ugucagaugcgugcccagcucuucacccccca

SEQ ID NO: 24861 - RNA, 32 nt, Homo Sapiens
aagcagaagguaacaaauuucaugcucucccc

SEQ ID NO: 24862 - RNA, 32 nt, Homo Sapiens
cuaaaggaauaguguugcuuuacuucuuuccu

SEQ ID NO: 24863 - RNA, 32 nt, Homo Sapiens
cacccagcgcuagacaguugcugcuggaggau

SEQ ID NO: 24864 - RNA, 32 nt, Homo Sapiens
aggcuggaauaauuaucugagguuagauuugu

SEQ ID NO: 24865 - RNA, 32 nt, Homo Sapiens
cuccagcacccuagcccuccugggcucccagu

SEQ ID NO: 24866 - RNA, 32 nt, Homo Sapiens
ccaucccggcccagcacccccagcauccccgu

SEQ ID NO: 24867 - RNA, 32 nt, Homo Sapiens
uccucccccguggaccccgguggaugaccugc

SEQ ID NO: 24868 - RNA, 32 nt, Homo Sapiens
uuacagaaucaucaauaucuuggaagaaaaag

SEQ ID NO: 24869 - RNA, 32 nt, Homo Sapiens
cauacccagugccugauguguaucaucucaau

SEQ ID NO: 24870 - RNA, 32 nt, Homo Sapiens
uccaagcucaggucgcccugcccccuacccac

SEQ ID NO: 24871 - RNA, 32 nt, Homo Sapiens
ugaugcccgggccccaggaggcugggggagaa

SEQ ID NO: 24872 - RNA, 32 nt, Homo Sapiens
acaggaauauccaauuuaaaaugauguaaaga

SEQ ID NO: 24873 - RNA, 32 nt, Homo Sapiens
gggauguaacuaucuuacauguuuacauaaga

SEQ ID NO: 24874 - RNA, 32 nt, Homo Sapiens
agugggaugggggucccgcggcagcggugaaa

SEQ ID NO: 24875 - RNA, 32 nt, Homo Sapiens
aucucaaacuggauguaaaauuuuaaauuauu

SEQ ID NO: 24876 - RNA, 32 nt, Homo Sapiens
gauggagagcaugccuguuuaagggauuacug

SEQ ID NO: 24877 - RNA, 32 nt, Homo Sapiens
uucacaaccuuuauuaaccccuggcaaaacuu

SEQ ID NO: 24878 - RNA, 30 nt, Homo Sapiens
gcucucuuccugaagaccuauaagcuggag

SEQ ID NO: 24879 - RNA, 32 nt, Homo Sapiens
aaguuuucaacacaugcuuuuuguagcauuca

SEQ ID NO: 24880 - RNA, 32 nt, Homo Sapiens
ccuaauaaauggagguggggccaggcauggug

SEQ ID NO: 24881 - RNA, 32 nt, Homo Sapiens
cccggaggcuugggggcuccgcccugggcugg

SEQ ID NO: 24882 - RNA, 30 nt, Homo Sapiens
gucccgcuccccgugccguggggcaggggc

SEQ ID NO: 24883 - RNA, 32 nt, Homo Sapiens
gcucggcuccuagagcugccacggccauggcc

SEQ ID NO: 24884 - RNA, 32 nt, Homo Sapiens
aucgcuguacacaaccccacauacaaucaaaa

SEQ ID NO: 24885 - RNA, 32 nt, Homo Sapiens
gugaaguuugggcuugcaacuuggaugaagag

SEQ ID NO: 24886 - RNA, 32 nt, Homo Sapiens
gauaucuacaauguaauaaauuuagagaguaa

SEQ ID NO: 24887 - RNA, 32 nt, Homo Sapiens
guuuuccugaacuuauuuuuucuuaauucaag

SEQ ID NO: 24888 - RNA, 32 nt, Homo Sapiens
ugagaaaaauacauuaacaaaguacucaagga

SEQ ID NO: 24889 - RNA, 32 nt, Homo Sapiens
ccucuagcuccuccagcaguucauccuggaua

SEQ ID NO: 24890 - RNA, 32 nt, Homo Sapiens
gaggccccagaggcggcggggagguggcccgc

SEQ ID NO: 24891 - RNA, 32 nt, Homo Sapiens
ugcccuugguuggggggcgcgggcauauaacc

SEQ ID NO: 24892 - RNA, 32 nt, Homo Sapiens
aaggucacaguggacuccauggagcaacugcc

SEQ ID NO: 24893 - RNA, 32 nt, Homo Sapiens
uccuauagacauuauauuggaucccagaacuu

SEQ ID NO: 24894 - RNA, 32 nt, Homo Sapiens
uugguuuaaaaauacauguucauggguuuacc

SEQ ID NO: 24895 - RNA, 32 nt, Homo Sapiens
gauaaaucuaucuucaaagacauauuagaagu

SEQ ID NO: 24896 - RNA, 32 nt, Homo Sapiens
aaacucccaggugacauagauggcaucaauuc

SEQ ID NO: 24897 - RNA, 32 nt, Homo Sapiens
cagcugaagguuggagaaaugccagcugcccu

SEQ ID NO: 24898 - RNA, 32 nt, Homo Sapiens
uaccucaaaugaauucuuuaaggagauggacu

SEQ ID NO: 24899 - RNA, 32 nt, Homo Sapiens
uucccucccgccgcagcgcgggcccaccggcc

SEQ ID NO: 24900 - RNA, 32 nt, Homo Sapiens
uguguuccugucauaguuugugucucccaggc

SEQ ID NO: 24901 - RNA, 32 nt, Homo Sapiens
ggaugaugauguugagaaacuugaacaaaaau

SEQ ID NO: 24902 - RNA, 32 nt, Homo Sapiens
augaccuuuuuugaaaaugggauuguuguuaa

SEQ ID NO: 24903 - RNA, 32 nt, Homo Sapiens
cgcggcggcgcaggaagaaguccccaaggaga

SEQ ID NO: 24904 - RNA, 32 nt, Homo Sapiens
gaccggcacccagacagguggcgaaggcagag

SEQ ID NO: 24905 - RNA, 32 nt, Homo Sapiens
aaaauuuucauaugcugauguuuucugccauu

SEQ ID NO: 24906 - RNA, 32 nt, Homo Sapiens
gucuuuggauauuacaaaauuaaaagaacaaa

SEQ ID NO: 24907 - RNA, 32 nt, Homo Sapiens
uugcucggaccucggccaccgccugggauccc

SEQ ID NO: 24908 - RNA, 32 nt, Homo Sapiens
uaauauguacacaacuuagaaaccaaauuaca

SEQ ID NO: 24909 - RNA, 32 nt, Homo Sapiens
agcaaagagaagucucaguggagcaugaggag

SEQ ID NO: 24910 - RNA, 32 nt, Homo Sapiens
aucaggagugaauucacagucuaccaugaauu

SEQ ID NO: 24911 - RNA, 32 nt, Homo Sapiens
auuuuaaaaaauauguuugaugcuauuuugua

SEQ ID NO: 24912 - RNA, 32 nt, Homo Sapiens
acugcuaccgggcgcaggcggcugggacaaug

SEQ ID NO: 24913 - RNA, 32 nt, Homo Sapiens
cagaacaaccaccuuauuucucaaugacagua

SEQ ID NO: 24914 - RNA, 31 nt, Homo Sapiens
uuuuuggauggcccaucucagaauugcaaau

SEQ ID NO: 24915 - RNA, 30 nt, Homo Sapiens
uuaucugccagaucuucccaucuuguggca

SEQ ID NO: 24916 - RNA, 32 nt, Homo Sapiens
uagcguugcucuucuuaucaucucagaauguu

SEQ ID NO: 24917 - RNA, 30 nt, Homo Sapiens
gcuccucuggacucugucugacuuuggggg

SEQ ID NO: 24918 - RNA, 29 nt, Homo Sapiens
ggaagagguggccauaccguugaccgcuc

SEQ ID NO: 24919 - RNA, 32 nt, Homo Sapiens
gggaaauggaauaaaacuucguuuuguaaagc

SEQ ID NO: 24920 - RNA, 32 nt, Homo Sapiens
guguuuugccagcaugagauacuguccccucu

SEQ ID NO: 24921 - RNA, 32 nt, Homo Sapiens
uuauauuuugagugagacccaguccagcugcu

SEQ ID NO: 24922 - RNA, 32 nt, Homo Sapiens
gcugucgcguacggcuacccaggccgccucgu

SEQ ID NO: 24923 - RNA, 32 nt, Homo Sapiens
guggcugaaacacauauggcuucaguguguca

SEQ ID NO: 24924 - RNA, 32 nt, Homo Sapiens
ggcuaggccagcaggggcugcccgagucuguu

SEQ ID NO: 24925 - RNA, 32 nt, Homo Sapiens
uuuggaggaaauggacauagauaaagaagaua

SEQ ID NO: 24926 - RNA, 32 nt, Homo Sapiens
cuccacagccccagcuucgcacaggcuccugg

SEQ ID NO: 24927 - RNA, 32 nt, Homo Sapiens
cuugagcauuuucuuucaguuacaugggugua

SEQ ID NO: 24928 - RNA, 32 nt, Homo Sapiens
acaugcguuuuaaauguggaucuuuucaacuu

SEQ ID NO: 24929 - RNA, 32 nt, Homo Sapiens
gcuguuuuaccagggauccagagacauagagg

SEQ ID NO: 24930 - RNA, 32 nt, Homo Sapiens
accaggagggcuucuucaaucugcugagccac

SEQ ID NO: 24931 - RNA, 32 nt, Homo Sapiens
cauaaaggccgccgcgcgcccacgcgccucgc

SEQ ID NO: 24932 - RNA, 32 nt, Homo Sapiens
ggggggcagggccagcucuacgguuacaugcc

SEQ ID NO: 24933 - RNA, 32 nt, Homo Sapiens
accagcagcagccucuaucaccggaugcugcc

SEQ ID NO: 24934 - RNA, 32 nt, Homo Sapiens
auuccaugcuuuuucuaucccauccucucucu

SEQ ID NO: 24935 - RNA, 32 nt, Homo Sapiens
acauuuaaucaguaaaucaguuucacaucaug

SEQ ID NO: 24936 - RNA, 32 nt, Homo Sapiens
cagagagcuaaagggccuggggugugagcuga

SEQ ID NO: 24937 - RNA, 32 nt, Homo Sapiens
uugcacccccagccuccaccccggcuccccug

SEQ ID NO: 24938 - RNA, 32 nt, Homo Sapiens
cacuaaaccaccugaaucuagcacuaaaccac

SEQ ID NO: 24939 - RNA, 31 nt, Homo Sapiens
aaguaaaacacuauuaaagugcuguuuuaug

SEQ ID NO: 24940 - RNA, 32 nt, Homo Sapiens
uaauacuggcauagaggcagauauaucgauca

SEQ ID NO: 24941 - RNA, 32 nt, Homo Sapiens
ugguaaacugugguuuccccaagcugcacagg

SEQ ID NO: 24942 - RNA, 32 nt, Homo Sapiens
augcugcugcuacuccaaggcacacuauuacu

SEQ ID NO: 24943 - RNA, 32 nt, Homo Sapiens
ccacuucacguccuuccugggaccucagaaug

SEQ ID NO: 24944 - RNA, 32 nt, Homo Sapiens
aaccuugugauuauaaaacgauccugggaagg

SEQ ID NO: 24945 - RNA, 32 nt, Homo Sapiens
ugaacguauuguccucuuccccucuucuugca

SEQ ID NO: 24946 - RNA, 32 nt, Homo Sapiens
cuuaacauuuauaauuacauagauaaaacacu

SEQ ID NO: 24947 - RNA, 32 nt, Homo Sapiens
aagaacaccugaugaauagauacagugaauuc

SEQ ID NO: 24948 - RNA, 32 nt, Homo Sapiens
ucuuuuauuuuuccuuugaaauaaagaaguga

SEQ ID NO: 24949 - RNA, 32 nt, Homo Sapiens
agaauaucaggaugccuuaaauuuauaguagu

SEQ ID NO: 24950 - RNA, 32 nt, Homo Sapiens
uuuaaaaaauccaauuggauuauucuuaauau

SEQ ID NO: 24951 - RNA, 32 nt, Homo Sapiens
cccaaucagcuguguccccacucuaagcagcu

SEQ ID NO: 24952 - RNA, 32 nt, Homo Sapiens
gaucccggagagccccggagugagcggaguag

SEQ ID NO: 24953 - RNA, 32 nt, Homo Sapiens
guuucuuccuuccccgaugggaccagcuggaa

SEQ ID NO: 24954 - RNA, 32 nt, Homo Sapiens
guucaauacugaaagaaaaauauuauaccucu

SEQ ID NO: 24955 - RNA, 32 nt, Homo Sapiens
agguggcaguugcagagccgugggcuguagaa

SEQ ID NO: 24956 - RNA, 32 nt, Homo Sapiens
ugcacgggcuccugagcccacccccuuggggc

SEQ ID NO: 24957 - RNA, 32 nt, Homo Sapiens
agcugcagcucuaacacagggauuuugagagg

SEQ ID NO: 24958 - RNA, 32 nt, Homo Sapiens
aacggcucagagcuaacgaauccauggucuuc

SEQ ID NO: 24959 - RNA, 32 nt, Homo Sapiens
guggaaccgggcgggcggcgggagucggcgcc

SEQ ID NO: 24960 - RNA, 32 nt, Homo Sapiens
aaugcuuuuuuagaauggcagaccuugauguu

SEQ ID NO: 24961 - RNA, 32 nt, Homo Sapiens
ccacuggcuuuccugcuucucuauccugcagu

SEQ ID NO: 24962 - RNA, 32 nt, Homo Sapiens
cauggggagccuaagagguucuccuuggcacc

SEQ ID NO: 24963 - RNA, 32 nt, Homo Sapiens
augggaggggucugaaaaucaggacccaaccc

SEQ ID NO: 24964 - RNA, 32 nt, Homo Sapiens
accugccucccuacguggccuacuucaccaga

SEQ ID NO: 24965 - RNA, 32 nt, Homo Sapiens
aucauucuauaagguacuauauuaugugugua

SEQ ID NO: 24966 - RNA, 32 nt, Homo Sapiens
aaaaaauuaaagauuagcugggcgugguugca

SEQ ID NO: 24967 - RNA, 32 nt, Homo Sapiens
gccggggcuguggucccuccaggccgucgagg

SEQ ID NO: 24968 - RNA, 32 nt, Homo Sapiens
ccuuuccucgacgaggccugaccccaucccca

SEQ ID NO: 24969 - RNA, 32 nt, Homo Sapiens
uggacugauugugacagugccuugucguccuc

SEQ ID NO: 24970 - RNA, 32 nt, Homo Sapiens
aguucuucucugaaauuauaugcaaagaguug

SEQ ID NO: 24971 - RNA, 32 nt, Homo Sapiens
ggagggucaccaugaaguucaaucccuucguu

SEQ ID NO: 24972 - RNA, 32 nt, Homo Sapiens
acagggacacaagcuuggauuuccgaccugua

SEQ ID NO: 24973 - RNA, 32 nt, Homo Sapiens
agaggaaagaggaauucuucaucugcccuauc

SEQ ID NO: 24974 - RNA, 32 nt, Homo Sapiens
uuuugagccaauggaaaaaucuuggauuauga

SEQ ID NO: 24975 - RNA, 32 nt, Homo Sapiens
cagccgugcacgguugucguccucagcggcag

SEQ ID NO: 24976 - RNA, 32 nt, Homo Sapiens
guuuuugcauuacugcuacaaaauccaauagu

SEQ ID NO: 24977 - RNA, 32 nt, Homo Sapiens
ugaaaaagagaaaaagaaugaaguacuuccug

SEQ ID NO: 24978 - RNA, 32 nt, Homo Sapiens
agggaucugccagcacccuguggggcccagac

SEQ ID NO: 24979 - RNA, 32 nt, Homo Sapiens
ggcacgaggcgcacgcucgcucguacggcggc

SEQ ID NO: 24980 - RNA, 32 nt, Homo Sapiens
auguuucuauagaauaauaacauacccacaca

SEQ ID NO: 24981 - RNA, 32 nt, Homo Sapiens
ccauggucuccaucguucugggcguaaauucc

SEQ ID NO: 24982 - RNA, 32 nt, Homo Sapiens
ucacuuugugauuauuucacuuuagaugcuga

SEQ ID NO: 24983 - RNA, 32 nt, Homo Sapiens
aacuugaaaaguuuucugagaggcaauacuua

SEQ ID NO: 24984 - RNA, 32 nt, Homo Sapiens
acucagaagauaagucucuccaaagcaaauuc

SEQ ID NO: 24985 - RNA, 32 nt, Homo Sapiens
aaagaacccuggccuggaaacacacaggaaga

SEQ ID NO: 24986 - RNA, 32 nt, Homo Sapiens
uagaaagcucuuuuauuuucaguucuggcugu

SEQ ID NO: 24987 - RNA, 32 nt, Homo Sapiens
aauuagccgggcguguuggugugcgccuguaa

SEQ ID NO: 24988 - RNA, 32 nt, Homo Sapiens
uggguggucaaggcaggaagauaccucgaggc

SEQ ID NO: 24989 - RNA, 32 nt, Homo Sapiens
gcaugggcugagucccugggcucagaccuagc

SEQ ID NO: 24990 - RNA, 32 nt, Homo Sapiens
cugguucuuuagaacaaauccacagacuuuua

SEQ ID NO: 24991 - RNA, 32 nt, Homo Sapiens
ccaagaugcaagaaggaggcuaugcucagggg

SEQ ID NO: 24992 - RNA, 32 nt, Homo Sapiens
uggauuaagcaauaaugaaagcacuaaguuug

SEQ ID NO: 24993 - RNA, 32 nt, Homo Sapiens
gaagcggccucccgcagcccccggccccuccc

SEQ ID NO: 24994 - RNA, 32 nt, Homo Sapiens
cagcgacaacagcaccagagccaggcagucac

SEQ ID NO: 24995 - RNA, 32 nt, Homo Sapiens
acucccugguauucuuuuuuugauugcauuca

SEQ ID NO: 24996 - RNA, 32 nt, Homo Sapiens
uuuggcgguguugcgucagccuggggcgucuu

SEQ ID NO: 24997 - RNA, 32 nt, Homo Sapiens
agaaauuugguuaaucguuaaucuuuaguugc

SEQ ID NO: 24998 - RNA, 32 nt, Homo Sapiens
ucuuugcugcgugggcuucucugugcucccac

SEQ ID NO: 24999 - RNA, 32 nt, Homo Sapiens
gcucuccccgagggcucugugcccuggaccgc

SEQ ID NO: 25000 - RNA, 32 nt, Homo Sapiens
ucaagugguuuguuguaucuguguguuuaucu

SEQ ID NO: 25001 - RNA, 32 nt, Homo Sapiens
uugagcugagaauugaagccuugaagaacuac

SEQ ID NO: 25002 - RNA, 32 nt, Homo Sapiens
guugagcuuuguuaguuuuucauguguaauau

SEQ ID NO: 25003 - RNA, 32 nt, Homo Sapiens
aguugaaggauagugaacuuuacuucuugggg

SEQ ID NO: 25004 - RNA, 32 nt, Homo Sapiens
aaaacuugaucuagaacgcucuugauuuugga

SEQ ID NO: 25005 - RNA, 32 nt, Homo Sapiens
uguagcugcuguccagucugcccgccagaccc

SEQ ID NO: 25006 - RNA, 32 nt, Homo Sapiens
gguuucaccauguugaccaggcuggucucgaa

SEQ ID NO: 25007 - RNA, 32 nt, Homo Sapiens
gguuucaccauguuggccaggcuggucucgag

SEQ ID NO: 25008 - RNA, 32 nt, Homo Sapiens
aggaagaaagcagagggaaauauuucagucau

SEQ ID NO: 25009 - RNA, 32 nt, Homo Sapiens
auaaauuacugauguaaucagcuugucaauua

SEQ ID NO: 25010 - RNA, 32 nt, Homo Sapiens
aggggacccggaggcucccacccccaccucuc

SEQ ID NO: 25011 - RNA, 32 nt, Homo Sapiens
cauuacauugccauccuguugcacugcagcuu

SEQ ID NO: 25012 - RNA, 32 nt, Homo Sapiens
gccucaugauacaauaaaaccacaaaaauuuu

SEQ ID NO: 25013 - RNA, 32 nt, Homo Sapiens
ucuggccuguccccggagccccggccucaucc

SEQ ID NO: 25014 - RNA, 32 nt, Homo Sapiens
aucaggaaaggcuguagaaggaaauauaccuu

SEQ ID NO: 25015 - RNA, 32 nt, Homo Sapiens
cuagacccgggagccaugcugcugugcuguug

SEQ ID NO: 25016 - RNA, 32 nt, Homo Sapiens
ucuugguguggccuuucucucugcauagcauc

SEQ ID NO: 25017 - RNA, 32 nt, Homo Sapiens
cagcacauuuuuccucaaagaaccaaacauac

SEQ ID NO: 25018 - RNA, 32 nt, Homo Sapiens
acuugauacgauuugcaccuuucuguuuuccu

SEQ ID NO: 25019 - RNA, 32 nt, Homo Sapiens
acacauaacaccuucuucugguaaagguaugu

SEQ ID NO: 25020 - RNA, 32 nt, Homo Sapiens
ugagaaaugggguggaauagggaacuguaaug

SEQ ID NO: 25021 - RNA, 32 nt, Homo Sapiens
aagucccaacuuugaauaaaacagaugauguc

SEQ ID NO: 25022 - RNA, 32 nt, Homo Sapiens
cggccgccucggccuaugugcggccgccaccg

SEQ ID NO: 25023 - RNA, 32 nt, Homo Sapiens
acucaccuacacaacucacaacucuuuauuga

SEQ ID NO: 25024 - RNA, 32 nt, Homo Sapiens
aggccugugcuggacuucugaccuccagaacu

SEQ ID NO: 25025 - RNA, 32 nt, Homo Sapiens
ugugauuugugauuacaccguacaacucaagu

SEQ ID NO: 25026 - RNA, 32 nt, Homo Sapiens
uugcuggucccuccuuuccccccgucccacga

SEQ ID NO: 25027 - RNA, 32 nt, Homo Sapiens
ccuugagaacucuauuuuuuuauuagaguuau

SEQ ID NO: 25028 - RNA, 32 nt, Homo Sapiens
guuguauauaaaauuagauuagaaagacuuuc

SEQ ID NO: 25029 - RNA, 32 nt, Homo Sapiens
acgaagcucgagccgccuccgccgcgcgaccc

SEQ ID NO: 25030 - RNA, 32 nt, Homo Sapiens
ccacuacgaggaguaccagggcagcuugccug

SEQ ID NO: 25031 - RNA, 32 nt, Homo Sapiens
auuggucucuucaaguuuuuuuuuucuuuugc

SEQ ID NO: 25032 - RNA, 32 nt, Homo Sapiens
uuuaaaaaaugcuuuuaaugcaucauacacua

SEQ ID NO: 25033 - RNA, 32 nt, Homo Sapiens
ugaagcuccaugaauuccccucccaaaucaua

SEQ ID NO: 25034 - RNA, 32 nt, Homo Sapiens
ugaguuaaaaauuacauacuaaaaguuuauug

SEQ ID NO: 25035 - RNA, 32 nt, Homo Sapiens
cagauaaaucauaauauagucuguauuaucug

SEQ ID NO: 25036 - RNA, 32 nt, Homo Sapiens
uuccuggucgcaggacaagaccuggagaccug

SEQ ID NO: 25037 - RNA, 32 nt, Homo Sapiens
agaauggcaauaacccccaaaaggucaaaugg

SEQ ID NO: 25038 - RNA, 32 nt, Homo Sapiens
aucuaggggaagacaucugauguuguuuuccu

SEQ ID NO: 25039 - RNA, 32 nt, Homo Sapiens
agacacuuauaaaggggacagggagaaaagcc

SEQ ID NO: 25040 - RNA, 32 nt, Homo Sapiens
accuucuugccagcuucucauccacccuucug

SEQ ID NO: 25041 - RNA, 32 nt, Homo Sapiens
cuuauuauguuaaccuauuuuauuuuucuaua

SEQ ID NO: 25042 - RNA, 32 nt, Homo Sapiens
aaaacucaguucuuaaauuaucugggaagggu

SEQ ID NO: 25043 - RNA, 32 nt, Homo Sapiens
cuuauagugucugaaacauaaacuguauugag

SEQ ID NO: 25044 - RNA, 32 nt, Homo Sapiens
ccagccaauauuuauuuaaauuucaucucaga

SEQ ID NO: 25045 - RNA, 32 nt, Homo Sapiens
agaggacacaggaaaacacacacacacacaca

SEQ ID NO: 25046 - RNA, 32 nt, Homo Sapiens
ggagggcucugccuaugggggguggccugugg

SEQ ID NO: 25047 - RNA, 32 nt, Homo Sapiens
guucuuuuggccgugauagaaaucgggauucu

SEQ ID NO: 25048 - RNA, 32 nt, Homo Sapiens
aaagauguguccuggggggcugaggagggagg

SEQ ID NO: 25049 - RNA, 32 nt, Homo Sapiens
caguaguacaggcuuugaaaacuacuucuauu

SEQ ID NO: 25050 - RNA, 32 nt, Homo Sapiens
ucuguuacacucugccuauucauugauauaug

SEQ ID NO: 25051 - RNA, 32 nt, Homo Sapiens
cuugcuaucuuuuagcuaaaauguagacacau

SEQ ID NO: 25052 - RNA, 32 nt, Homo Sapiens
ccacgcaggacccaacugaaacaaagugucgg

SEQ ID NO: 25053 - RNA, 32 nt, Homo Sapiens
uaaccucgaugauguaaauccacccaaagaua

SEQ ID NO: 25054 - RNA, 32 nt, Homo Sapiens
ggaccacaagcaggaacuuaauuuagaaugug

SEQ ID NO: 25055 - RNA, 32 nt, Homo Sapiens
uuggugagucuguguggccagcagccucugau

SEQ ID NO: 25056 - RNA, 32 nt, Homo Sapiens
cgcacccagagaaaauuaauuauauuucuaca

SEQ ID NO: 25057 - RNA, 32 nt, Homo Sapiens
ggcagcgugcgcgcucuuccuggcggcugcgc

SEQ ID NO: 25058 - RNA, 32 nt, Homo Sapiens
cuguagcacacacagaggcuuugggaccccgu

SEQ ID NO: 25059 - RNA, 32 nt, Homo Sapiens
gccaagcccuuaagucaggagcaguccccauc

SEQ ID NO: 25060 - RNA, 32 nt, Homo Sapiens
cauuguacacagcagccaguuuucaucgguga

SEQ ID NO: 25061 - RNA, 30 nt, Homo Sapiens
ucugagggucugggcggcgggcggcugggu

SEQ ID NO: 25062 - RNA, 32 nt, Homo Sapiens
ucccauuuuaucauccuuucaguuuuuauuaa

SEQ ID NO: 25063 - RNA, 32 nt, Homo Sapiens
gcagaggggguggcacagggcugggaccagca

SEQ ID NO: 25064 - RNA, 32 nt, Homo Sapiens
gggaugaggaugccucuggcagggcagcaagu

SEQ ID NO: 25065 - RNA, 32 nt, Homo Sapiens
agcaucucgauccaugagugauagaaaaagag

SEQ ID NO: 25066 - RNA, 32 nt, Homo Sapiens
cgguccuccugucuuagccucccuuugugcuu

SEQ ID NO: 25067 - RNA, 32 nt, Homo Sapiens
uaccagggccgcgggcggccagcugacgaaug

SEQ ID NO: 25068 - RNA, 32 nt, Homo Sapiens
ugaccuaauauuuggagcuaucagugcuuugu

SEQ ID NO: 25069 - RNA, 32 nt, Homo Sapiens
aagcaggaaggggccaccagugcauagcccau

SEQ ID NO: 25070 - RNA, 30 nt, Homo Sapiens
gcuggaggcaggccuucgugccuucgugcc

SEQ ID NO: 25071 - RNA, 32 nt, Homo Sapiens
accucccggacgggguggcuggccgggugggg

SEQ ID NO: 25072 - RNA, 32 nt, Homo Sapiens
gcccggccgcuccaccagcaucaccugccugu

SEQ ID NO: 25073 - RNA, 32 nt, Homo Sapiens
guguuucaggaccaugcugauucugugggacc

SEQ ID NO: 25074 - RNA, 32 nt, Homo Sapiens
ucccucaugccgcuccucagcucccucagcuc

SEQ ID NO: 25075 - RNA, 32 nt, Homo Sapiens
accugccccagcacucacacccuaacucaaaa

SEQ ID NO: 25076 - RNA, 32 nt, Homo Sapiens
ccgagucaugccccgcuauugcgcagcgauuu

SEQ ID NO: 25077 - RNA, 32 nt, Homo Sapiens
cacucaguccuggccuugcucugaggguaaaa

SEQ ID NO: 25078 - RNA, 32 nt, Homo Sapiens
ggugugcucuuuccaauguagaagggguuaug

SEQ ID NO: 25079 - RNA, 32 nt, Homo Sapiens
aaaaaacaaaacaaaacaaaacugugggccau

SEQ ID NO: 25080 - RNA, 32 nt, Homo Sapiens
gcauauuuauuaccaaugaauuugaaaccagg

SEQ ID NO: 25081 - RNA, 32 nt, Homo Sapiens
cacuaccgcucccccugggcccugcugauccg

SEQ ID NO: 25082 - RNA, 32 nt, Homo Sapiens
uauuucauaaacaacuaaugauuuccuccuaa

SEQ ID NO: 25083 - RNA, 32 nt, Homo Sapiens
gccugcagccuggcaucuuccuguucuaccuc

SEQ ID NO: 25084 - RNA, 32 nt, Homo Sapiens
guggguucuaaguacaggcauucaaggcuggg

SEQ ID NO: 25085 - RNA, 32 nt, Homo Sapiens
agugaucaccccccgcccccagcccugcauca

SEQ ID NO: 25086 - RNA, 32 nt, Homo Sapiens
ucggugcgcugagcuccgcggcuccgcgagcc

SEQ ID NO: 25087 - RNA, 32 nt, Homo Sapiens
aaggcacacacaaucccucacacuguggguuu

SEQ ID NO: 25088 - RNA, 32 nt, Homo Sapiens
gagcauuggccaucaaccccaucaaaccagcc

SEQ ID NO: 25089 - RNA, 32 nt, Homo Sapiens
gcuggaagggaaggagaggggccagggaggcc

SEQ ID NO: 25090 - RNA, 32 nt, Homo Sapiens
cucagcuguugucuccacuccucccccaucau

SEQ ID NO: 25091 - RNA, 32 nt, Homo Sapiens
caccuauuugaaaagauauugaggauuugcca

SEQ ID NO: 25092 - RNA, 30 nt, Homo Sapiens
uaaggcauccuaacuuacaagaguaacuuu

SEQ ID NO: 25093 - RNA, 32 nt, Homo Sapiens
caggagaaaugugugacaccuauauuauaaug

SEQ ID NO: 25094 - RNA, 32 nt, Homo Sapiens
ccacggcgggagaggacccucggagcccucug

SEQ ID NO: 25095 - RNA, 32 nt, Homo Sapiens
ccuguucuagaauuguaagauuguuaauuucc

SEQ ID NO: 25096 - RNA, 32 nt, Homo Sapiens
cagaggcuggaacugccacaggcuguaugaaa

SEQ ID NO: 25097 - RNA, 32 nt, Homo Sapiens
uuccuccaaacacuugguuuaucacauugcau

SEQ ID NO: 25098 - RNA, 32 nt, Homo Sapiens
uugcucugggcaacgcggucugcugguuccca

SEQ ID NO: 25099 - RNA, 32 nt, Homo Sapiens
aggcuggagggaacaagauauguaucuuucuu

SEQ ID NO: 25100 - RNA, 32 nt, Homo Sapiens
agcgggaggaggaggagcaccuccgccagauc

SEQ ID NO: 25101 - RNA, 32 nt, Homo Sapiens
agguggggccaagagugggguauggugggccu

SEQ ID NO: 25102 - RNA, 32 nt, Homo Sapiens
gacaggcggcgggucuuuuguuuuuuugaugu

SEQ ID NO: 25103 - RNA, 32 nt, Homo Sapiens
uuuuuguauaaaauagacaaauagaaaauggu

SEQ ID NO: 25104 - RNA, 32 nt, Homo Sapiens
uaccaaucaaggacucagaacugaaggcaauu

SEQ ID NO: 25105 - RNA, 32 nt, Homo Sapiens
cuagaucucuucauuggcuuuuggauuuguac

SEQ ID NO: 25106 - RNA, 32 nt, Homo Sapiens
agcccugcuccuguuuuucuuuaguuuggauc

SEQ ID NO: 25107 - RNA, 30 nt, Homo Sapiens
uacaaugggugggcgggggaaacuuuucca

SEQ ID NO: 25108 - RNA, 32 nt, Homo Sapiens
caccagccccgcuggggugcggccuggcugug

SEQ ID NO: 25109 - RNA, 32 nt, Homo Sapiens
uguuugauauaaaauauguugucuuuuguuua

SEQ ID NO: 25110 - RNA, 31 nt, Homo Sapiens
uaagcuggggacgguauucagaauucgagcg

SEQ ID NO: 25111 - RNA, 32 nt, Homo Sapiens
ggaguggacacaugcagacguggcgagaagcc

SEQ ID NO: 25112 - RNA, 32 nt, Homo Sapiens
gauaagucuguucuuuaaauuucugaaaugga

SEQ ID NO: 25113 - RNA, 32 nt, Homo Sapiens
uuguagauuaguauaagaaaaauauuuacccu

SEQ ID NO: 25114 - RNA, 32 nt, Homo Sapiens
uggggcuggaccacaacucagcccuucaccug

SEQ ID NO: 25115 - RNA, 32 nt, Homo Sapiens
gcccggcuggaacugggggugcucggcagugc

SEQ ID NO: 25116 - RNA, 32 nt, Homo Sapiens
gcccagggcaacacugaagacaugggcaagag

SEQ ID NO: 25117 - RNA, 32 nt, Homo Sapiens
cgggaccccuguuuccucuuugucuugccccu

SEQ ID NO: 25118 - RNA, 32 nt, Homo Sapiens
uucagcccaggagagagggguccugaucuuaa

SEQ ID NO: 25119 - RNA, 32 nt, Homo Sapiens
gcugggagaauuuuuucuuuguauuuauuuua

SEQ ID NO: 25120 - RNA, 32 nt, Homo Sapiens
uacccuuuuggcaccccuccccuuaugcccgu

SEQ ID NO: 25121 - RNA, 32 nt, Homo Sapiens
aguaaaaagcuacuauauauuguuguuuguua

SEQ ID NO: 25122 - RNA, 32 nt, Homo Sapiens
uuugcuccccuggcgacugccuggacagucag

SEQ ID NO: 25123 - RNA, 32 nt, Homo Sapiens
guucuuuggcacauuuugcccagcggaugcaa

SEQ ID NO: 25124 - RNA, 32 nt, Homo Sapiens
ccaucaucucuuuucccacucccuuugcguca

SEQ ID NO: 25125 - RNA, 32 nt, Homo Sapiens
uucccucuuugcggauucuagaacggaaccuu

SEQ ID NO: 25126 - RNA, 32 nt, Homo Sapiens
uaauuuuuguguuuugaacauguauccugcaa

SEQ ID NO: 25127 - RNA, 31 nt, Homo Sapiens
cuagagaaauaaauguguauugaaccuuuua

SEQ ID NO: 25128 - RNA, 32 nt, Homo Sapiens
uauuuaauaugaacauuaugauggugagaggg

SEQ ID NO: 25129 - RNA, 32 nt, Homo Sapiens
acuucaaacaaaugaaaucagugcccagaacc

SEQ ID NO: 25130 - RNA, 32 nt, Homo Sapiens
gaaaggaucucuggggcuuccgggggugagau

SEQ ID NO: 25131 - RNA, 32 nt, Homo Sapiens
uccuuuucaaggacauuaauaaccucaccaac

SEQ ID NO: 25132 - RNA, 32 nt, Homo Sapiens
accccguaggugcccauccgcugcuggcgcaa

SEQ ID NO: 25133 - RNA, 32 nt, Homo Sapiens
uguggaggaggguggggguggggggaaggcaa

SEQ ID NO: 25134 - RNA, 32 nt, Homo Sapiens
aauauauuagagaugccugcaucuuugacuau

SEQ ID NO: 25135 - RNA, 32 nt, Homo Sapiens
caucuuccuucucccgaggccuuauucccccu

SEQ ID NO: 25136 - RNA, 32 nt, Homo Sapiens
cagcggaucgggacuuccuucuaagagaagcg

SEQ ID NO: 25137 - RNA, 32 nt, Homo Sapiens
uuagccaaggcgugggggcggaaagguggcgu

SEQ ID NO: 25138 - RNA, 32 nt, Homo Sapiens
ugaacucaggaaggcucugugagcugcugguc

SEQ ID NO: 25139 - RNA, 32 nt, Homo Sapiens
gcugaguggagccugagaccugcacaacagcu

SEQ ID NO: 25140 - RNA, 32 nt, Homo Sapiens
agcauuuauuuuggggaggaaaacagugguga

SEQ ID NO: 25141 - RNA, 32 nt, Homo Sapiens
gaagagggcgacauccuguacaccauguacau

SEQ ID NO: 25142 - RNA, 32 nt, Homo Sapiens
cauagccagucaagcauagaauugcauccauu

SEQ ID NO: 25143 - RNA, 32 nt, Homo Sapiens
uuuuuccauuucccggcccccucuucuugagu

SEQ ID NO: 25144 - RNA, 32 nt, Homo Sapiens
acucacacccucacuggagaagucaggguaga

SEQ ID NO: 25145 - RNA, 32 nt, Homo Sapiens
uggagcccaagccagaacucgagcccuagccg

SEQ ID NO: 25146 - RNA, 32 nt, Homo Sapiens
cccgucgcggaagagcgaggguuaaugagcca

SEQ ID NO: 25147 - RNA, 32 nt, Homo Sapiens
gcuaugaaaaagacauuaaaauaugagaugua

SEQ ID NO: 25148 - RNA, 32 nt, Homo Sapiens
cacagacgugcacacacacacacacacacaca

SEQ ID NO: 25149 - RNA, 32 nt, Homo Sapiens
ucccagagcccgcuggcagagccgcggguuga

SEQ ID NO: 25150 - RNA, 32 nt, Homo Sapiens
augagcuccuuucuccucuccuucagccaauc

SEQ ID NO: 25151 - RNA, 32 nt, Homo Sapiens
cuuacagacaucucuguaaaacagauuuaaaa

SEQ ID NO: 25152 - RNA, 32 nt, Homo Sapiens
guccucacaucuuucacacuuccaccacccug

SEQ ID NO: 25153 - RNA, 32 nt, Homo Sapiens
ugaacucggggagcgcuugguggggcgccccc

SEQ ID NO: 25154 - RNA, 32 nt, Homo Sapiens
agcagcggccuagcgggaaaaguaaaagaugu

SEQ ID NO: 25155 - RNA, 32 nt, Homo Sapiens
ccucugcccagcugugguauccagcagguccu

SEQ ID NO: 25156 - RNA, 32 nt, Homo Sapiens
auagagcuuuuuaauagcacuaaccaaugccu

SEQ ID NO: 25157 - RNA, 32 nt, Homo Sapiens
gaaagaguuccuucaagaaguuccucugauag

SEQ ID NO: 25158 - RNA, 32 nt, Homo Sapiens
cuuccuccccagcucacgcugcuguauucugu

SEQ ID NO: 25159 - RNA, 32 nt, Homo Sapiens
auauuccauugcaucugacauagccuucugug

SEQ ID NO: 25160 - RNA, 32 nt, Homo Sapiens
uugcaucucuggauuugugaucugucuccugg

SEQ ID NO: 25161 - RNA, 32 nt, Homo Sapiens
gcccagcaccuuaggcacuucagacauuucau

SEQ ID NO: 25162 - RNA, 32 nt, Homo Sapiens
cgcuuucuugucagagaccucgcuguuacgga

SEQ ID NO: 25163 - RNA, 30 nt, Homo Sapiens
ccccggugcuccagagugccggcgcagggc

SEQ ID NO: 25164 - RNA, 32 nt, Homo Sapiens
guguggaggccauuuuuagagauacagaauug

SEQ ID NO: 25165 - RNA, 32 nt, Homo Sapiens
cauuacugaauuuuuaaaaugccgauuacacc

SEQ ID NO: 25166 - RNA, 32 nt, Homo Sapiens
ugugaguuggggauuguugcgucccauaucug

SEQ ID NO: 25167 - RNA, 32 nt, Homo Sapiens
gcacacgcacacacccgccgcgcgcacucgcg

SEQ ID NO: 25168 - RNA, 32 nt, Homo Sapiens
uagaccuuuccacagauugcuaaacuacuuua

SEQ ID NO: 25169 - RNA, 32 nt, Homo Sapiens
aaacugugcgguuugagugaugugcuacaaag

SEQ ID NO: 25170 - RNA, 32 nt, Homo Sapiens
ugcugcugacuucaacguucacuuuaugcacc

SEQ ID NO: 25171 - RNA, 32 nt, Homo Sapiens
uugcagcucucccagcagcccuggacgguggc

SEQ ID NO: 25172 - RNA, 32 nt, Homo Sapiens
ccaagauucuacauugcucaucugggcaucug

SEQ ID NO: 25173 - RNA, 32 nt, Homo Sapiens
aagcacaaccucaacccagccagaaaguacuu

SEQ ID NO: 25174 - RNA, 32 nt, Homo Sapiens
cacuaaaaacuagaaauaaacaucucaaacag

SEQ ID NO: 25175 - RNA, 32 nt, Homo Sapiens
ucaccuacggaggaagcggaaagcguuuucuu

SEQ ID NO: 25176 - RNA, 32 nt, Homo Sapiens
ugguaauucuauuuuuaauauuuuguuguguu

SEQ ID NO: 25177 - RNA, 32 nt, Homo Sapiens
aagcuggccaaguuuggacuacacaaauaaac

SEQ ID NO: 25178 - RNA, 32 nt, Homo Sapiens
gauguguuuuuuuuuucuuuuuuuauuuuaag

SEQ ID NO: 25179 - RNA, 32 nt, Homo Sapiens
agagaccuugguuuccacaaccccuuuauuuu

SEQ ID NO: 25180 - RNA, 32 nt, Homo Sapiens
uauggaaagaaaauuaaaaugugucaauaaau

SEQ ID NO: 25181 - RNA, 32 nt, Homo Sapiens
uuucgaaacuaaaacuauuggauuugaagauu

SEQ ID NO: 25182 - RNA, 32 nt, Homo Sapiens
gaccaccucagucaagacggaaguaaggcuca

SEQ ID NO: 25183 - RNA, 32 nt, Homo Sapiens
ugagauggaacgagagcacacauuaaagagag

SEQ ID NO: 25184 - RNA, 32 nt, Homo Sapiens
cuucacuuuacuacaguuacuuuugcaaacag

SEQ ID NO: 25185 - RNA, 32 nt, Homo Sapiens
agcgcuggccacccggcccugccuucccacca

SEQ ID NO: 25186 - RNA, 32 nt, Homo Sapiens
uuuuauucaaagcugagucaguggcucuugcg

SEQ ID NO: 25187 - RNA, 32 nt, Homo Sapiens
uuuaacuuuuacugcauagaauuaacacuagg

SEQ ID NO: 25188 - RNA, 32 nt, Homo Sapiens
ggaccucucucccucccccauccacacagaag

SEQ ID NO: 25189 - RNA, 32 nt, Homo Sapiens
ugacucugcugcggcggcugggcccgguggug

SEQ ID NO: 25190 - RNA, 32 nt, Homo Sapiens
gugguuaggagaaagacuuuggugguggaaga

SEQ ID NO: 25191 - RNA, 32 nt, Homo Sapiens
gcccaaaguuuuauuuuuuuuaaacaaugauu

SEQ ID NO: 25192 - RNA, 32 nt, Homo Sapiens
auuugcuuuuucugaccaagccuuguggcacc

SEQ ID NO: 25193 - RNA, 32 nt, Homo Sapiens
ccagugucucccuccagcccagcccugaccuc

SEQ ID NO: 25194 - RNA, 32 nt, Homo Sapiens
aagucauccagcccugggguccccuuaugccg

SEQ ID NO: 25195 - RNA, 32 nt, Homo Sapiens
caaagucacugguccuuucucagccucucucg

SEQ ID NO: 25196 - RNA, 32 nt, Homo Sapiens
ucuccauccuccccgucauuagugcucuuuca

SEQ ID NO: 25197 - RNA, 32 nt, Homo Sapiens
agggugggaaacuggggugaugugagcccaca

SEQ ID NO: 25198 - RNA, 32 nt, Homo Sapiens
cuguugucucuggauagacaagaaacaaaauu

SEQ ID NO: 25199 - RNA, 32 nt, Homo Sapiens
gaaaggggagaagagcaaagggcgcuuuuaaa

SEQ ID NO: 25200 - RNA, 32 nt, Homo Sapiens
caucucagccuggaagucagcuuuaagucauu

SEQ ID NO: 25201 - RNA, 32 nt, Homo Sapiens
gaucacaauaaugggauugacaauuaaggggc

SEQ ID NO: 25202 - RNA, 32 nt, Homo Sapiens
ugcccagcagagcuauauuuugggggagaagu

SEQ ID NO: 25203 - RNA, 32 nt, Homo Sapiens
cacucgucuuucccuuuaccacugugguuuug

SEQ ID NO: 25204 - RNA, 32 nt, Homo Sapiens
acacuuuaucuaacuuaaagugacggaguaga

SEQ ID NO: 25205 - RNA, 32 nt, Homo Sapiens
caacaauagugacaccaguaauuaugagaggc

SEQ ID NO: 25206 - RNA, 32 nt, Homo Sapiens
acguuaaauuuucaguccaguuaugaacagca

SEQ ID NO: 25207 - RNA, 32 nt, Homo Sapiens
acacauauaugauacaaaugcuuucaggcugc

SEQ ID NO: 25208 - RNA, 32 nt, Homo Sapiens
acucgccagaaagagcugcugcaggagcagcc

SEQ ID NO: 25209 - RNA, 32 nt, Homo Sapiens
ucaaauauaauuccauuuuuuauuuuuauuuu

SEQ ID NO: 25210 - RNA, 32 nt, Homo Sapiens
uauacuuagcuacauuuucagucaguaugaac

SEQ ID NO: 25211 - RNA, 32 nt, Homo Sapiens
guuguccaaaacaugacucaugagcuugggag

SEQ ID NO: 25212 - RNA, 32 nt, Homo Sapiens
cuacaggacugccugggaccgcccugccucac

SEQ ID NO: 25213 - RNA, 32 nt, Homo Sapiens
uuccacaaacuuauacugaaaagauacgagaa

SEQ ID NO: 25214 - RNA, 31 nt, Homo Sapiens
guggacuuaacuugaaaguccuuuucauaaa

SEQ ID NO: 25215 - RNA, 32 nt, Homo Sapiens
guagaaagcaaaguacagaagcuguacucauc

SEQ ID NO: 25216 - RNA, 32 nt, Homo Sapiens
ccccaccuggggacucuugcccccacauauuu

SEQ ID NO: 25217 - RNA, 25 nt, Homo Sapiens
augucggccgcccagggcugggaca

SEQ ID NO: 25218 - RNA, 32 nt, Homo Sapiens
accugcucugauccggugggcuccacggguag

SEQ ID NO: 25219 - RNA, 32 nt, Homo Sapiens
uguaauccauaaccaccaaaaauacuauggag

SEQ ID NO: 25220 - RNA, 32 nt, Homo Sapiens
gguuguagguccuuggcuggucgggccuccgg

SEQ ID NO: 25221 - RNA, 32 nt, Homo Sapiens
auuagaaaaaauuuauuacagaauucuaauuc

SEQ ID NO: 25222 - RNA, 32 nt, Homo Sapiens
aaguuccugugcucuugaaagaacaaguugau

SEQ ID NO: 25223 - RNA, 32 nt, Homo Sapiens
cugcuggcucagugcuggcugaacggggggca

SEQ ID NO: 25224 - RNA, 32 nt, Homo Sapiens
cacauagauauuaaagggauacuuggaacaac

SEQ ID NO: 25225 - RNA, 32 nt, Homo Sapiens
gugcacuuuaucuugggaccaaaacugccuac

SEQ ID NO: 25226 - RNA, 32 nt, Homo Sapiens
ucuccuuccuccccgggaccuccgcgcucucg

SEQ ID NO: 25227 - RNA, 32 nt, Homo Sapiens
aauauauguacaaagaacuaugcugucuuauu

SEQ ID NO: 25228 - RNA, 32 nt, Homo Sapiens
ccagagccagcccugcccucagcccucgugcc

SEQ ID NO: 25229 - RNA, 32 nt, Homo Sapiens
ccaaggcucagguggcuucugacaugcgucca

SEQ ID NO: 25230 - RNA, 32 nt, Homo Sapiens
guggcggagggagaggcgaugcugcaaagugu

SEQ ID NO: 25231 - RNA, 32 nt, Homo Sapiens
ugcagagaucaaggguuaagaucuaugggaag

SEQ ID NO: 25232 - RNA, 32 nt, Homo Sapiens
gggcggucuuccccggcucgccaacucggcug

SEQ ID NO: 25233 - RNA, 32 nt, Homo Sapiens
aacucaggggguggagguugcagugaguugag

SEQ ID NO: 25234 - RNA, 32 nt, Homo Sapiens
uauauuuaauuuccugucauccuuccaaguua

SEQ ID NO: 25235 - RNA, 32 nt, Homo Sapiens
uaaaggacaaaauaaacaguauuuuaugcagg

SEQ ID NO: 25236 - RNA, 27 nt, Homo Sapiens
aaaugauccuucuuuauucuucauggu

SEQ ID NO: 25237 - RNA, 32 nt, Homo Sapiens
aguauuuguuauugugaaagaaguuaauucac

SEQ ID NO: 25238 - RNA, 32 nt, Homo Sapiens
uugugacgugugcaaaugggaaaggagggguu

SEQ ID NO: 25239 - RNA, 32 nt, Homo Sapiens
cccagcucugguuuccuucucgguuuauucug

SEQ ID NO: 25240 - RNA, 32 nt, Homo Sapiens
gaaugagugaauggaaaaacugggagagucaa

SEQ ID NO: 25241 - RNA, 32 nt, Homo Sapiens
gugcggugcggugcagagcggaggcggaggcg

SEQ ID NO: 25242 - RNA, 32 nt, Homo Sapiens
ucuuaauuugaaaggcaguuaagaaauagaua

SEQ ID NO: 25243 - RNA, 32 nt, Homo Sapiens
ggcgaaacgacaaccucgauagugauuggagc

SEQ ID NO: 25244 - RNA, 32 nt, Homo Sapiens
ucaggaagacugccuccaccaccgcuacccag

SEQ ID NO: 25245 - RNA, 32 nt, Homo Sapiens
gaccugggcugggaacccgcgguggagcggga

SEQ ID NO: 25246 - RNA, 32 nt, Homo Sapiens
aaaaguaauuauuuauacuuauuauaaaaagu

SEQ ID NO: 25247 - RNA, 32 nt, Homo Sapiens
auguaguugagacucaauuguuagaaugaaug

SEQ ID NO: 25248 - RNA, 32 nt, Homo Sapiens
cccucagcccgggcugugccagcccucccagc

SEQ ID NO: 25249 - RNA, 32 nt, Homo Sapiens
ugccuguuucuucuccucuucuaauauaucag

SEQ ID NO: 25250 - RNA, 32 nt, Homo Sapiens
ucaagaaaaaggaaacaacaaaauaaaaccaa

SEQ ID NO: 25251 - RNA, 32 nt, Homo Sapiens
ggagcagcagugccucgcaccccagcacgccc

SEQ ID NO: 25252 - RNA, 32 nt, Homo Sapiens
aacgagaugaacugguuugaauacagacaagc

SEQ ID NO: 25253 - RNA, 32 nt, Homo Sapiens
ugcaacaugguucuuuguacauuuucauuaua

SEQ ID NO: 25254 - RNA, 32 nt, Homo Sapiens
uugcgugccucgggggaugccuaguucguggc

SEQ ID NO: 25255 - RNA, 32 nt, Homo Sapiens
ggggugccggcaggggcgggccccagcagcag

SEQ ID NO: 25256 - RNA, 32 nt, Homo Sapiens
agcagcuagugggagagcaccaguugggccua

SEQ ID NO: 25257 - RNA, 32 nt, Homo Sapiens
gaacugugugacucacuugaggcaggaccgag

SEQ ID NO: 25258 - RNA, 32 nt, Homo Sapiens
cuuuuucugaaaucuacaaugacaaaaccagc

SEQ ID NO: 25259 - RNA, 32 nt, Homo Sapiens
acacagaaaaagagaaauaugagauuacagag

SEQ ID NO: 25260 - RNA, 32 nt, Homo Sapiens
gggacccagaucuggagcuuugaugaggaagc

SEQ ID NO: 25261 - RNA, 31 nt, Homo Sapiens
gaagccuucgggagaaagugcuugucaaaau

SEQ ID NO: 25262 - RNA, 32 nt, Homo Sapiens
ugugggguggguggugagcugcugcauauuuu

SEQ ID NO: 25263 - RNA, 32 nt, Homo Sapiens
gggagacgcgcggcgaggagacgagcgagguc

SEQ ID NO: 25264 - RNA, 32 nt, Homo Sapiens
uccaccccucugcggacucugcagcuccgcgg

SEQ ID NO: 25265 - RNA, 28 nt, Homo Sapiens
gccauggcgcgccugggcgcugugcgcu

SEQ ID NO: 25266 - RNA, 32 nt, Homo Sapiens
ccuaaucuggcaagauuaaaagagauaaaugu

SEQ ID NO: 25267 - RNA, 32 nt, Homo Sapiens
cuuucugaauugagauacuuugaaauuccaag

SEQ ID NO: 25268 - RNA, 30 nt, Homo Sapiens
gacuuguaucaccacagaugaguuucacau

SEQ ID NO: 25269 - RNA, 32 nt, Homo Sapiens
uauaucuauauguguguauacauauauaauau

SEQ ID NO: 25270 - RNA, 32 nt, Homo Sapiens
cccauucuuccuuuacuaauaaaauuuuugag

SEQ ID NO: 25271 - RNA, 26 nt, Homo Sapiens
caugagcgccgcccggccccaguuca

SEQ ID NO: 25272 - RNA, 32 nt, Homo Sapiens
agaccuuaacuccacaggacggacauuuuaga

SEQ ID NO: 25273 - RNA, 32 nt, Homo Sapiens
aagccagguucaguuccucauugguugucaga

SEQ ID NO: 25274 - RNA, 32 nt, Homo Sapiens
ccauggccacgcugcuggccuggguuggcguc

SEQ ID NO: 25275 - RNA, 32 nt, Homo Sapiens
acaaggagucuggcuaauuaauccccaaagag

SEQ ID NO: 25276 - RNA, 32 nt, Homo Sapiens
ucgcagcgugagcagguggagccgcgguggga

SEQ ID NO: 25277 - RNA, 32 nt, Homo Sapiens
uccuggggccgcggcggccgggcgggggagau

SEQ ID NO: 25278 - RNA, 32 nt, Homo Sapiens
cggugcuccauucgcaccuccccuccucgugc

SEQ ID NO: 25279 - RNA, 32 nt, Homo Sapiens
cuuggacccccucccuggacacaggcaggugu

SEQ ID NO: 25280 - RNA, 32 nt, Homo Sapiens
cuucucagcaauaacuccaugggcucugggac

SEQ ID NO: 25281 - RNA, 32 nt, Homo Sapiens
acacggugugguuguucaacuauuugcaaagg

SEQ ID NO: 25282 - RNA, 32 nt, Homo Sapiens
agguccagugacaaagauucagucacuuuugc

SEQ ID NO: 25283 - RNA, 32 nt, Homo Sapiens
gcacaaucagaauugauaagcacuguuccucc

SEQ ID NO: 25284 - RNA, 32 nt, Homo Sapiens
auuuugcaaauauuuucuauaauuguauucau

SEQ ID NO: 25285 - RNA, 32 nt, Homo Sapiens
ggguagaggguggaccagaggcugaggacuga

SEQ ID NO: 25286 - RNA, 32 nt, Homo Sapiens
ucauccugugguuuuucuaauggacuuucagg

SEQ ID NO: 25287 - RNA, 32 nt, Homo Sapiens
auuccugaccuuucuugcguccuccgugcuag

SEQ ID NO: 25288 - RNA, 32 nt, Homo Sapiens
cuacauggcuuaauggaucagagcagccccag

SEQ ID NO: 25289 - RNA, 30 nt, Homo Sapiens
auugccugaaaauaaauucaugaugacaug

SEQ ID NO: 25290 - RNA, 30 nt, Homo Sapiens
gcaucucuggacucccaguccagugaucuu

SEQ ID NO: 25291 - RNA, 32 nt, Homo Sapiens
gugcugguacccacugcccacccuggcugccg

SEQ ID NO: 25292 - RNA, 32 nt, Homo Sapiens
cgcgaccgccggggacgagcuuggaggaaaag

SEQ ID NO: 25293 - RNA, 32 nt, Homo Sapiens
accccuugauucccauaacauaaaagugcuac

SEQ ID NO: 25294 - RNA, 32 nt, Homo Sapiens
cuucaaaggauuccucugccugcugugcuguu

SEQ ID NO: 25295 - RNA, 32 nt, Homo Sapiens
uccaaauaaaaaaaacaaaaagugugacacug

SEQ ID NO: 25296 - RNA, 32 nt, Homo Sapiens
cguccaggggcugaguucccacucaccugugu

SEQ ID NO: 25297 - RNA, 32 nt, Homo Sapiens
ggagcuggaaacaaaauggaguugguuggguc

SEQ ID NO: 25298 - RNA, 32 nt, Homo Sapiens
cacagaaggaagggcuggauugggccccuuug

SEQ ID NO: 25299 - RNA, 32 nt, Homo Sapiens
cccaugugauguccuccaaaauguguagggua

SEQ ID NO: 25300 - RNA, 32 nt, Homo Sapiens
gaacaauaaucauuuuaaggauaacaaguaaa

SEQ ID NO: 25301 - RNA, 32 nt, Homo Sapiens
uaauguacuagaucauugucacagaaaaacca

SEQ ID NO: 25302 - RNA, 32 nt, Homo Sapiens
cauucacuuaggaaguccuuacaugcaagcug

SEQ ID NO: 25303 - RNA, 32 nt, Homo Sapiens
cagggcgggggcccgcccgcccccucgggauu

SEQ ID NO: 25304 - RNA, 32 nt, Homo Sapiens
gaucuucucggguuuucuuucagauauuguuu

SEQ ID NO: 25305 - RNA, 32 nt, Homo Sapiens
augaccauuucccugaugcucugagcuuauga

SEQ ID NO: 25306 - RNA, 32 nt, Homo Sapiens
agggaauuacucuggcuaaaauguagcuccag

SEQ ID NO: 25307 - RNA, 32 nt, Homo Sapiens
gagucccagaaacaaaacuaugcugacaaaaa

SEQ ID NO: 25308 - RNA, 32 nt, Homo Sapiens
augcuggaauccaaugcagaguugguuuggga

SEQ ID NO: 25309 - RNA, 32 nt, Homo Sapiens
acccuugaaaagacaucaagcacagaaggagg

SEQ ID NO: 25310 - RNA, 32 nt, Homo Sapiens
gaggcucugauucuggggggaggccgacucca

SEQ ID NO: 25311 - RNA, 32 nt, Homo Sapiens
cgaguggcagugccugcugccgauggcgguuc

SEQ ID NO: 25312 - RNA, 32 nt, Homo Sapiens
gccagcacugcagggaucccaggcccagacuc

SEQ ID NO: 25313 - RNA, 32 nt, Homo Sapiens
caccuguagucccagcacuuugggaggcaaag

SEQ ID NO: 25314 - RNA, 32 nt, Homo Sapiens
uucuccccgagaccgcgucgcccgcggcccgg

SEQ ID NO: 25315 - RNA, 32 nt, Homo Sapiens
aaaucuauuauuucuagauuuuuguauaacau

SEQ ID NO: 25316 - RNA, 32 nt, Homo Sapiens
aguucuuuuuaaaaagugauuaauguauuuua

SEQ ID NO: 25317 - RNA, 32 nt, Homo Sapiens
uggauuagaaugccucugcugugggcuuuggg

SEQ ID NO: 25318 - RNA, 32 nt, Homo Sapiens
gagccaccaggcucagcccccuaagauuugaa

SEQ ID NO: 25319 - RNA, 32 nt, Homo Sapiens
uggggcccuccuccuucaccgcccccuucacc

SEQ ID NO: 25320 - RNA, 32 nt, Homo Sapiens
aggcccugcccuacugggauagauguuuuaau

SEQ ID NO: 25321 - RNA, 32 nt, Homo Sapiens
ugggaaguaauuuuaaucauauguaauugguc

SEQ ID NO: 25322 - RNA, 32 nt, Homo Sapiens
gcaggcugccagcccgccaagcuccacaccac

SEQ ID NO: 25323 - RNA, 32 nt, Homo Sapiens
augcugcuagaccucgagaggacccucaugcu

SEQ ID NO: 25324 - RNA, 32 nt, Homo Sapiens
uaagugaaagagauuacuuaaauaauuugggu

SEQ ID NO: 25325 - RNA, 32 nt, Homo Sapiens
aguugagagccccugccgccccugccaccccc

SEQ ID NO: 25326 - RNA, 32 nt, Homo Sapiens
gaggcaucucuuauauccuguagugaugagca

SEQ ID NO: 25327 - RNA, 32 nt, Homo Sapiens
acuguuccugcccuguccagggccccccagau

SEQ ID NO: 25328 - RNA, 32 nt, Homo Sapiens
cccucugcccggcagcgccgcgcaccaugggc

SEQ ID NO: 25329 - RNA, 32 nt, Homo Sapiens
acaccugggaucgcgcagggcccgcagggcac

SEQ ID NO: 25330 - RNA, 32 nt, Homo Sapiens
cguugugcccaugaaggcgccaucagcucuaa

SEQ ID NO: 25331 - RNA, 32 nt, Homo Sapiens
auaaaaguagaacaagccaagaaaccaucuuu

SEQ ID NO: 25332 - RNA, 32 nt, Homo Sapiens
ggagaucccuccuuguggaaaagcaguaguuc

SEQ ID NO: 25333 - RNA, 32 nt, Homo Sapiens
ugaagugguucacccuugaggaccaggagccu

SEQ ID NO: 25334 - RNA, 32 nt, Homo Sapiens
gagucgcgcgucgggagcuacguagggcagag

SEQ ID NO: 25335 - RNA, 32 nt, Homo Sapiens
ugugaaacuggauuaaacuuaaucuaaaugga

SEQ ID NO: 25336 - RNA, 32 nt, Homo Sapiens
caguagcccuagagacuauugcgacacagugu

SEQ ID NO: 25337 - RNA, 32 nt, Homo Sapiens
uuuuauuucgaaaaguuuuuuugguucuuuga

SEQ ID NO: 25338 - RNA, 32 nt, Homo Sapiens
gguuuggagcagcccugccccucgcugugaac

SEQ ID NO: 25339 - RNA, 32 nt, Homo Sapiens
cugaagaugaacuggguccaugaugaagugug

SEQ ID NO: 25340 - RNA, 32 nt, Homo Sapiens
ugcuggggacagcacuccgaggcuauggcucc

SEQ ID NO: 25341 - RNA, 32 nt, Homo Sapiens
ggcuuccagaaagacccugcggcagcgccccc

SEQ ID NO: 25342 - RNA, 32 nt, Homo Sapiens
ggaaaaacaguuuuuaaaaaacaaaagaaaaa

SEQ ID NO: 25343 - RNA, 32 nt, Homo Sapiens
gugaggccgggcccgcgccgccaugaaccuag

SEQ ID NO: 25344 - RNA, 29 nt, Homo Sapiens
augauguuuauugucuauuuucuaucucc

SEQ ID NO: 25345 - RNA, 32 nt, Homo Sapiens
ggaggcugcauccgacucggucacaaggaaaa

SEQ ID NO: 25346 - RNA, 32 nt, Homo Sapiens
cccgcgccucccggucgccgcggguucaccgc

SEQ ID NO: 25347 - RNA, 32 nt, Homo Sapiens
uguuauaucuggcaauucugugccuaaguaua

SEQ ID NO: 25348 - RNA, 32 nt, Homo Sapiens
ugcaucaguccacagcuguaugccccagucac

SEQ ID NO: 25349 - RNA, 32 nt, Homo Sapiens
aauguuuggaaacuuucuuuuacaaaagaaua

SEQ ID NO: 25350 - RNA, 32 nt, Homo Sapiens
acacacagccgccuaaggcccgcggcucaugu

SEQ ID NO: 25351 - RNA, 32 nt, Homo Sapiens
ccuuuccugagccccagucucugcucugcaca

SEQ ID NO: 25352 - RNA, 32 nt, Homo Sapiens
gccggagcuggagccggcgccagcggcuggag

SEQ ID NO: 25353 - RNA, 32 nt, Homo Sapiens
cugcguaucuucccucuucccuccucaaauuc

SEQ ID NO: 25354 - RNA, 32 nt, Homo Sapiens
cuuggagcugucuuaaucuguauucucuugac

SEQ ID NO: 25355 - RNA, 32 nt, Homo Sapiens
uugcucaacagcuauuccuguuuucuguaaga

SEQ ID NO: 25356 - RNA, 32 nt, Homo Sapiens
gggauagcacuuuacagccuacucuagcacca

SEQ ID NO: 25357 - RNA, 32 nt, Homo Sapiens
uuucaaaaaugugccaagaaagcaaaauucau

SEQ ID NO: 25358 - RNA, 32 nt, Homo Sapiens
aggggacccgcacucuuccauguccguaggga

SEQ ID NO: 25359 - RNA, 32 nt, Homo Sapiens
ucauagauauauauuuuugaauaaagauggug

SEQ ID NO: 25360 - RNA, 32 nt, Homo Sapiens
cacccgggggaagaggccguaggagacccagg

SEQ ID NO: 25361 - RNA, 32 nt, Homo Sapiens
gcggugaccccgcgccccggcgccguccgacc

SEQ ID NO: 25362 - RNA, 32 nt, Homo Sapiens
cccgguagcccguucgcuccgcgccggcggcc

SEQ ID NO: 25363 - RNA, 32 nt, Homo Sapiens
cccaucuugucgcuuuuaggaccucccacaac

SEQ ID NO: 25364 - RNA, 32 nt, Homo Sapiens
uauagauuaguuugcuuucuggaauaaaauuu

SEQ ID NO: 25365 - RNA, 32 nt, Homo Sapiens
aauugcuaccgagaacaaaaccaguuccccuc

SEQ ID NO: 25366 - RNA, 32 nt, Homo Sapiens
acugagggcccacugccugcccggcccugggc

SEQ ID NO: 25367 - RNA, 32 nt, Homo Sapiens
acaaggccagcauggacaaagcuagagcuggg

SEQ ID NO: 25368 - RNA, 32 nt, Homo Sapiens
ggagcuccagcaugcgacagcacccccucacu

SEQ ID NO: 25369 - RNA, 32 nt, Homo Sapiens
ugucacucggaacuucaggauggaggacccug

SEQ ID NO: 25370 - RNA, 32 nt, Homo Sapiens
agaaaagaaacgcagagaucauaggaaaacug

SEQ ID NO: 25371 - RNA, 32 nt, Homo Sapiens
cacaggggcuccuggaaagacagcaggcuucc

SEQ ID NO: 25372 - RNA, 32 nt, Homo Sapiens
aauuucucuuccuucuucuccugccucuagcc

SEQ ID NO: 25373 - RNA, 30 nt, Homo Sapiens
acauaaugucaaguggaaacuaucagcagu

SEQ ID NO: 25374 - RNA, 32 nt, Homo Sapiens
uuuuaagugugaaugcaagugauuaaugaaua

SEQ ID NO: 25375 - RNA, 32 nt, Homo Sapiens
uuucuucaauguaaaaaguaggcaucaaagau

SEQ ID NO: 25376 - RNA, 32 nt, Homo Sapiens
ggauuuucuuggccaccuccaggaaguccaaa

SEQ ID NO: 25377 - RNA, 32 nt, Homo Sapiens
acauguguauauguaacaaaacacauugcauc

SEQ ID NO: 25378 - RNA, 32 nt, Homo Sapiens
ggggagcacaucaccugaaggugccaaggagg

SEQ ID NO: 25379 - RNA, 32 nt, Homo Sapiens
gagcauucagggaacuacuacugcacagcuga

SEQ ID NO: 25380 - RNA, 32 nt, Homo Sapiens
caccgucacccagcaugcgccacgccguggcu

SEQ ID NO: 25381 - RNA, 32 nt, Homo Sapiens
cucgggugauccgcgccccgcggccuccggaa

SEQ ID NO: 25382 - RNA, 32 nt, Homo Sapiens
cuggcuaaggauuuuucuagaaacuguccuuu

SEQ ID NO: 25383 - RNA, 32 nt, Homo Sapiens
cucugggcuggucuguggggccccaggcaggc

SEQ ID NO: 25384 - RNA, 32 nt, Homo Sapiens
gggaccuccagccaggaggaaccgggagcacc

SEQ ID NO: 25385 - RNA, 32 nt, Homo Sapiens
ugccugacgcucucauuaaaaucuaugcagcc

SEQ ID NO: 25386 - RNA, 32 nt, Homo Sapiens
gcgaugguggccugggguuuuguuuccuaaga

SEQ ID NO: 25387 - RNA, 32 nt, Homo Sapiens
cuuucaguuaguagcuagcuuuaagucaggag

SEQ ID NO: 25388 - RNA, 32 nt, Homo Sapiens
caaaacagguaaaaaaucgcugcccccucaga

SEQ ID NO: 25389 - RNA, 32 nt, Homo Sapiens
caaaaugcaauaaauuuuuaaaauagcuuuga

SEQ ID NO: 25390 - RNA, 32 nt, Homo Sapiens
gacgccgggcgcggcggcgcgcggagaagugc

SEQ ID NO: 25391 - RNA, 32 nt, Homo Sapiens
acaguuagacauugaggggcuucacuguuacc

SEQ ID NO: 25392 - RNA, 32 nt, Homo Sapiens
ggcuugucaguucccauuuuucuugacaacaa

SEQ ID NO: 25393 - RNA, 32 nt, Homo Sapiens
accgcguuaaccugacaaaaccucagcagcag

SEQ ID NO: 25394 - RNA, 32 nt, Homo Sapiens
cucacugcaaccuccgccucccagguugacac

SEQ ID NO: 25395 - RNA, 32 nt, Homo Sapiens
auuaaagguaucagguggcaauuuagaauucc

SEQ ID NO: 25396 - RNA, 32 nt, Homo Sapiens
gguuccaagggcaaaucccacccccuuagagg

SEQ ID NO: 25397 - RNA, 32 nt, Homo Sapiens
gauguaccagaaacccaccucaccccggcuca

SEQ ID NO: 25398 - RNA, 28 nt, Homo Sapiens
guaggaagggagagccauuugaaaggca

SEQ ID NO: 25399 - RNA, 32 nt, Homo Sapiens
gugaccaggggucggcgggggcgcgggaguac

SEQ ID NO: 25400 - RNA, 32 nt, Homo Sapiens
auuauacuuuuguuguucauuagcaucuuugu

SEQ ID NO: 25401 - RNA, 32 nt, Homo Sapiens
ggugagcuggaacaugcccugucugugcuguc

SEQ ID NO: 25402 - RNA, 32 nt, Homo Sapiens
gggaucuagcaaagcgagagauacaugaagga

SEQ ID NO: 25403 - RNA, 32 nt, Homo Sapiens
uguugccugucugccuccuuaauagcgggccu

SEQ ID NO: 25404 - RNA, 32 nt, Homo Sapiens
aggaaacacggggaagccaggacuggccguca

SEQ ID NO: 25405 - RNA, 31 nt, Homo Sapiens
ggucugcagcgcagaccaccugggcgggccg

SEQ ID NO: 25406 - RNA, 32 nt, Homo Sapiens
cagcagcagcagcagcagcagcacaauucugu

SEQ ID NO: 25407 - RNA, 32 nt, Homo Sapiens
ucuugucucuggccagaggugugguauagaac

SEQ ID NO: 25408 - RNA, 32 nt, Homo Sapiens
auucuaggaauauguacucagauucuuucauu

SEQ ID NO: 25409 - RNA, 32 nt, Homo Sapiens
aaguucucugugcaucuguccauccucccuau

SEQ ID NO: 25410 - RNA, 32 nt, Homo Sapiens
uauuuuuuaaaagggaaagaugucaccuuuga

SEQ ID NO: 25411 - RNA, 32 nt, Homo Sapiens
uaaaugcauggcaacuguuaaugucauaacag

SEQ ID NO: 25412 - RNA, 32 nt, Homo Sapiens
cugcguguggguggaguacgcggacaggcugc

SEQ ID NO: 25413 - RNA, 32 nt, Homo Sapiens
uggccgacgugggacagucuggcuguggcagg

SEQ ID NO: 25414 - RNA, 32 nt, Homo Sapiens
uagcugggacuacaggagcgcgccaccacacc

SEQ ID NO: 25415 - RNA, 32 nt, Homo Sapiens
cccgggguugugccggccgccgcugccgccca

SEQ ID NO: 25416 - RNA, 32 nt, Homo Sapiens
gggucggaguguaggaaaauuuuaugucagug

SEQ ID NO: 25417 - RNA, 32 nt, Homo Sapiens
cauucagcucacguaacuaaugucagaugguc

SEQ ID NO: 25418 - RNA, 32 nt, Homo Sapiens
uagagggagccacgcacagaauguaacaggau

SEQ ID NO: 25419 - RNA, 32 nt, Homo Sapiens
gggagcgcagcucagcugggcuggaacugccc

SEQ ID NO: 25420 - RNA, 32 nt, Homo Sapiens
ugcugccugccagaggcguggcaccucaccuc

SEQ ID NO: 25421 - RNA, 32 nt, Homo Sapiens
aaagcucacagauugcagaaauuagcuuuuuu

SEQ ID NO: 25422 - RNA, 32 nt, Homo Sapiens
acacucugacuucuaagguccagacauaaaag

SEQ ID NO: 25423 - RNA, 32 nt, Homo Sapiens
ccucggugcugggcauguacgcggcggcgggg

SEQ ID NO: 25424 - RNA, 32 nt, Homo Sapiens
cuucuaucuugugaugccaccaucgcaagguu

SEQ ID NO: 25425 - RNA, 32 nt, Homo Sapiens
acuuuucuuccuuauggggcuacauuuguuca

SEQ ID NO: 25426 - RNA, 32 nt, Homo Sapiens
caucucccgucaccacaucuccccucacccuc

SEQ ID NO: 25427 - RNA, 32 nt, Homo Sapiens
caaucagagucuuuuaaccuaugauuuaaaaa

SEQ ID NO: 25428 - RNA, 32 nt, Homo Sapiens
agcagguggaaggugacgguuagaugguaagc

SEQ ID NO: 25429 - RNA, 32 nt, Homo Sapiens
ggccuccucacagcggaaacacagcuugugag

SEQ ID NO: 25430 - RNA, 32 nt, Homo Sapiens
agucuuccucaaugucaucacucaauauugcg

SEQ ID NO: 25431 - RNA, 32 nt, Homo Sapiens
gagaacagacaauacuugucuuucugggcauu

SEQ ID NO: 25432 - RNA, 32 nt, Homo Sapiens
ccucugcuccaagcugccccugcgcugggagg

SEQ ID NO: 25433 - RNA, 32 nt, Homo Sapiens
guuuacuuccucuggggaaggcagacugauaa

SEQ ID NO: 25434 - RNA, 32 nt, Homo Sapiens
cucagaacucaucaaaaagcccucaggaggcu

SEQ ID NO: 25435 - RNA, 32 nt, Homo Sapiens
uuccccugcucagcaccgacaccugccgaaga

SEQ ID NO: 25436 - RNA, 32 nt, Homo Sapiens
agacuuaagggucuuuuuaaccuagguaaguu

SEQ ID NO: 25437 - RNA, 32 nt, Homo Sapiens
ccuucaugcccuucugauuccccuccaccaaa

SEQ ID NO: 25438 - RNA, 32 nt, Homo Sapiens
gcauugcaaaaauuauaaaguaauuuauuauu

SEQ ID NO: 25439 - RNA, 32 nt, Homo Sapiens
aaagcuaagaguaaaaauuugcugguuacagg

SEQ ID NO: 25440 - RNA, 32 nt, Homo Sapiens
cugggccaguguucgagagcauggccccaaac

SEQ ID NO: 25441 - RNA, 32 nt, Homo Sapiens
ugagccagcccuggacugcccuggacuuguuc

SEQ ID NO: 25442 - RNA, 32 nt, Homo Sapiens
caucacagaaaagaugaaaagagaaaagagaa

SEQ ID NO: 25443 - RNA, 32 nt, Homo Sapiens
uugccugcuccuugcuugauguuuucuggaag

SEQ ID NO: 25444 - RNA, 32 nt, Homo Sapiens
ugccuuuuaaacaacuaggauucccuacuaac

SEQ ID NO: 25445 - RNA, 32 nt, Homo Sapiens
uccauuggcugcggcugcaggaggaagaugcc

SEQ ID NO: 25446 - RNA, 32 nt, Homo Sapiens
uaucuccuucccucaccuccucgacuuguucc

SEQ ID NO: 25447 - RNA, 32 nt, Homo Sapiens
cggagacgccgggagccaguggcgccuguggc

SEQ ID NO: 25448 - RNA, 32 nt, Homo Sapiens
cagggagggagccgcuggcugcugccggaggu

SEQ ID NO: 25449 - RNA, 32 nt, Homo Sapiens
agugccgcccgcggccccgagucggucucgag

SEQ ID NO: 25450 - RNA, 32 nt, Homo Sapiens
caagccuuccccaaccucccccucugugaggg

SEQ ID NO: 25451 - RNA, 32 nt, Homo Sapiens
caggcaggccuggcccagagucacgcuggcaa

SEQ ID NO: 25452 - RNA, 32 nt, Homo Sapiens
cugggcauaaauagugcagagccucguauguu

SEQ ID NO: 25453 - RNA, 32 nt, Homo Sapiens
cuaacaagaaugcugcuuaacgccuauaacca

SEQ ID NO: 25454 - RNA, 32 nt, Homo Sapiens
auggccgggccaggucauuggcugggaagucu

SEQ ID NO: 25455 - RNA, 32 nt, Homo Sapiens
caggagaagcugucacaucucaagcaugugag

SEQ ID NO: 25456 - RNA, 30 nt, Homo Sapiens
aggagauggaucgguaccugcugcugguga

SEQ ID NO: 25457 - RNA, 32 nt, Homo Sapiens
agaagccgccgggacgcgccgggcuggagugg

SEQ ID NO: 25458 - RNA, 32 nt, Homo Sapiens
ccaaacugugcagcugaggaaaaugagccgug

SEQ ID NO: 25459 - RNA, 32 nt, Homo Sapiens
cccacaagccuggucaucagccaggcagcccu

SEQ ID NO: 25460 - RNA, 32 nt, Homo Sapiens
ugagggcaaggcugcuggcagacgucuccauu

SEQ ID NO: 25461 - RNA, 32 nt, Homo Sapiens
ugagguggccuccugcccugaucagggacccu

SEQ ID NO: 25462 - RNA, 32 nt, Homo Sapiens
caggccugugucccaagcaguacccaggcuuu

SEQ ID NO: 25463 - RNA, 32 nt, Homo Sapiens
auuuuuucuaauucuguaaauucuauuacaag

SEQ ID NO: 25464 - RNA, 32 nt, Homo Sapiens
aucaacacuuguaucuggccucugugccccag

SEQ ID NO: 25465 - RNA, 32 nt, Homo Sapiens
cagaaggacaaaggaauucagaagauucaucu

SEQ ID NO: 25466 - RNA, 32 nt, Homo Sapiens
gauuguucuggauauuucccucauugcugaga

SEQ ID NO: 25467 - RNA, 32 nt, Homo Sapiens
aagggucacgccucccacccccgcccccuccc

SEQ ID NO: 25468 - RNA, 32 nt, Homo Sapiens
aucugccucccgcgcuggcccuggcccuggcc

SEQ ID NO: 25469 - RNA, 32 nt, Homo Sapiens
gaggaaagaaacgauuuuaaaucauuaaaaac

SEQ ID NO: 25470 - RNA, 32 nt, Homo Sapiens
cccaugaagcagguccagaacuagugggagug

SEQ ID NO: 25471 - RNA, 32 nt, Homo Sapiens
ugacuuuggaaagggaggcgcugggguuugaa

SEQ ID NO: 25472 - RNA, 32 nt, Homo Sapiens
gaaaaccaaauuuuaucuuuuacauggccccu

SEQ ID NO: 25473 - RNA, 32 nt, Homo Sapiens
cggccaccccagccuaguccucuucuuggugc

SEQ ID NO: 25474 - RNA, 32 nt, Homo Sapiens
agugcucucucugccuggaucccggcagaagc

SEQ ID NO: 25475 - RNA, 32 nt, Homo Sapiens
ugcuuuguuuguucgcucuuugcaauaaaucu

SEQ ID NO: 25476 - RNA, 32 nt, Homo Sapiens
gugauacuuucuuuuuauuuuuucuucuagaa

SEQ ID NO: 25477 - RNA, 32 nt, Homo Sapiens
cucuagcagcacugggcgucccuuucagcaag

SEQ ID NO: 25478 - RNA, 32 nt, Homo Sapiens
caauuuucucaggaauucaauucauuaaaugc

SEQ ID NO: 25479 - RNA, 32 nt, Homo Sapiens
ccggcaggaugaccagccccgcggccgcucaa

SEQ ID NO: 25480 - RNA, 32 nt, Homo Sapiens
cugggugacgcuccagagaacuacccugagug

SEQ ID NO: 25481 - RNA, 32 nt, Homo Sapiens
cagcacagccuggccaagaucgagcgcaaccu

SEQ ID NO: 25482 - RNA, 32 nt, Homo Sapiens
ugaaccuuucccugaaggauuuucaaaacugg

SEQ ID NO: 25483 - RNA, 32 nt, Homo Sapiens
aggccaagaacugcucuugggaagucgcauau

SEQ ID NO: 25484 - RNA, 32 nt, Homo Sapiens
aguuccuccccucccauauauaaaccccggug

SEQ ID NO: 25485 - RNA, 32 nt, Homo Sapiens
gagccaauauauuuucacuuauuuauuaucau

SEQ ID NO: 25486 - RNA, 32 nt, Homo Sapiens
auaauuagaacauuuuguuuucuuuuuucuuu

SEQ ID NO: 25487 - RNA, 32 nt, Homo Sapiens
gaaccaaaaauauucucucacagauuucauuc

SEQ ID NO: 25488 - RNA, 32 nt, Homo Sapiens
ccucggcagucugggcuccgggcccccgcucu

SEQ ID NO: 25489 - RNA, 32 nt, Homo Sapiens
acacacagagcuucauuuccugucuuaaaauc

SEQ ID NO: 25490 - RNA, 31 nt, Homo Sapiens
aggccugcaaggucaugugaacccagcauca

SEQ ID NO: 25491 - RNA, 32 nt, Homo Sapiens
agcuuuugaucuguaaugcuuuuauacaaaag

SEQ ID NO: 25492 - RNA, 32 nt, Homo Sapiens
accgaucucugcgccuuucugggggcgggcaa

SEQ ID NO: 25493 - RNA, 32 nt, Homo Sapiens
uuggaaaugggucccgagugggccgugcgagg

SEQ ID NO: 25494 - RNA, 32 nt, Homo Sapiens
aggcucuuugcuuggcuucucuuuccucuguu

SEQ ID NO: 25495 - RNA, 32 nt, Homo Sapiens
uuaauuuaaaagacagaggcuccaaaaugauu

SEQ ID NO: 25496 - RNA, 32 nt, Homo Sapiens
ugaggaaguauuucacauaacauguuuuauaa

SEQ ID NO: 25497 - RNA, 32 nt, Homo Sapiens
uuuguaaguugugugcaacaaacauacccuuu

SEQ ID NO: 25498 - RNA, 32 nt, Homo Sapiens
aauaggauacuagugaaguaagaaauuuugcu

SEQ ID NO: 25499 - RNA, 32 nt, Homo Sapiens
acuuauaucuguuugucuggaacauaacccau

SEQ ID NO: 25500 - RNA, 32 nt, Homo Sapiens
cugugcuccacggccuggcauggggguucagu

SEQ ID NO: 25501 - RNA, 32 nt, Homo Sapiens
uuuaacaaaaauaaacacugcuaaaaguuauu

SEQ ID NO: 25502 - RNA, 32 nt, Homo Sapiens
uauacuuguuuccagaauguuauuuuacauuu

SEQ ID NO: 25503 - RNA, 32 nt, Homo Sapiens
acuccuugggguccuuuccccggaguaccuau

SEQ ID NO: 25504 - RNA, 32 nt, Homo Sapiens
ccagggagcgccauggcccgcgcacgccagga

SEQ ID NO: 25505 - RNA, 32 nt, Homo Sapiens
gaguccaucccggcccagcacccccagcaucc

SEQ ID NO: 25506 - RNA, 32 nt, Homo Sapiens
cuagggaccccuccucccuuuuuccuuguccc

SEQ ID NO: 25507 - RNA, 31 nt, Homo Sapiens
acucuggagccccauugucagccccaggccc

SEQ ID NO: 25508 - RNA, 32 nt, Homo Sapiens
agaggacuggcuccuuucccaguguccuuaaa

SEQ ID NO: 25509 - RNA, 32 nt, Homo Sapiens
cggcgcuccuucccgcucccucacacaccgcc

SEQ ID NO: 25510 - RNA, 32 nt, Homo Sapiens
gccggcccaguuauggcagagaacgaugugga

SEQ ID NO: 25511 - RNA, 32 nt, Homo Sapiens
ugagaaggccccagguccugcucccuccucgg

SEQ ID NO: 25512 - RNA, 32 nt, Homo Sapiens
agugcuucaagagucuggcuccugcuacuuuu

SEQ ID NO: 25513 - RNA, 32 nt, Homo Sapiens
agcuagaggaagaugaggggggaugcgaguac

SEQ ID NO: 25514 - RNA, 32 nt, Homo Sapiens
ugugccugccuggcugccccuacccuggggcu

SEQ ID NO: 25515 - RNA, 32 nt, Homo Sapiens
uaaccuuuuaauuuucacaauugaugacaggg

SEQ ID NO: 25516 - RNA, 32 nt, Homo Sapiens
aaggauucagaauuagguaaacaucugaaggu

SEQ ID NO: 25517 - RNA, 31 nt, Homo Sapiens
aggccgugaaacauuuauagggcgccuguca

SEQ ID NO: 25518 - RNA, 32 nt, Homo Sapiens
uaagacauauauaugugugaaaauauaugcac

SEQ ID NO: 25519 - RNA, 32 nt, Homo Sapiens
gcgggggcgggaugcgcuccccggccccucua

SEQ ID NO: 25520 - RNA, 32 nt, Homo Sapiens
gaagcaguugggcccugaaagcucuuggcaga

SEQ ID NO: 25521 - RNA, 32 nt, Homo Sapiens
ucucuacuaaaaguacaaaaaauuagccaguc

SEQ ID NO: 25522 - RNA, 32 nt, Homo Sapiens
uuuuggugggagaggggagggaugccugggaa

SEQ ID NO: 25523 - RNA, 30 nt, Homo Sapiens
aaauguaucuuggcugucaagaguaucaaa

SEQ ID NO: 25524 - RNA, 31 nt, Homo Sapiens
uucucccaagccaucaucuugguagaaaaug

SEQ ID NO: 25525 - RNA, 32 nt, Homo Sapiens
caaacccugcaaacccaaagagaauauuaaua

SEQ ID NO: 25526 - RNA, 32 nt, Homo Sapiens
agacuggccaacauggagaaaccccgucucua

SEQ ID NO: 25527 - RNA, 32 nt, Homo Sapiens
ggugggcagcgggaaguagcuuugucaauaag

SEQ ID NO: 25528 - RNA, 32 nt, Homo Sapiens
agcgaggccugcgggcggcggcugggcuccgg

SEQ ID NO: 25529 - RNA, 32 nt, Homo Sapiens
agcuuagaauacugcaaaggauaagcuaauug

SEQ ID NO: 25530 - RNA, 32 nt, Homo Sapiens
ugucagaaaacugucaccaaaacaaaauuuga

SEQ ID NO: 25531 - RNA, 32 nt, Homo Sapiens
ggcucaggugccagcucuguucugauucacca

SEQ ID NO: 25532 - RNA, 32 nt, Homo Sapiens
uuugauauaaugguuaugcuagguuuaucucu

SEQ ID NO: 25533 - RNA, 32 nt, Homo Sapiens
agccagcgccugacucggcgggcccggagcac

SEQ ID NO: 25534 - RNA, 32 nt, Homo Sapiens
gcgugggcccgucuugcuuagaugcauucagu

SEQ ID NO: 25535 - RNA, 32 nt, Homo Sapiens
cccugcacuccuggacgugugcgcgccgacca

SEQ ID NO: 25536 - RNA, 32 nt, Homo Sapiens
gccaucuucucaccgaacuuugaagcaugcac

SEQ ID NO: 25537 - RNA, 32 nt, Homo Sapiens
gguuuggcgcuuugugaagcucugcuagccac

SEQ ID NO: 25538 - RNA, 32 nt, Homo Sapiens
gugagauggccagucuucauaauagcaacgua

SEQ ID NO: 25539 - RNA, 32 nt, Homo Sapiens
ccaucuagacauugugggcggcccgagauggg

SEQ ID NO: 25540 - RNA, 32 nt, Homo Sapiens
ccgaaaauccagcgugcaccccgccggaggaa

SEQ ID NO: 25541 - RNA, 32 nt, Homo Sapiens
auuuuuguauuaucucuuucuucuucuugugg

SEQ ID NO: 25542 - RNA, 32 nt, Homo Sapiens
caucuucagaauuauuuucaucuuauacaauu

SEQ ID NO: 25543 - RNA, 32 nt, Homo Sapiens
ccccucagaaaagaagaugcauagugugaccc

SEQ ID NO: 25544 - RNA, 32 nt, Homo Sapiens
aauuacaaggaccugcuuuuuaaaaggccaga

SEQ ID NO: 25545 - RNA, 32 nt, Homo Sapiens
ccccacuucccucuccuuccacuuucacagcu

SEQ ID NO: 25546 - RNA, 32 nt, Homo Sapiens
caggcuauacuuccuugcagggacuggugggc

SEQ ID NO: 25547 - RNA, 32 nt, Homo Sapiens
uuauguaugccaaauauuuaucugaagaguuu

SEQ ID NO: 25548 - RNA, 32 nt, Homo Sapiens
aggaaaugggcaagggucaaagagacucaugg

SEQ ID NO: 25549 - RNA, 32 nt, Homo Sapiens
ugaggcuucccugaagcaaggauuucagccag

SEQ ID NO: 25550 - RNA, 32 nt, Homo Sapiens
ggcugugggguugccagaagcugggguugcca

SEQ ID NO: 25551 - RNA, 32 nt, Homo Sapiens
agaacuacaaaacaauagcaguagggcagaaa

SEQ ID NO: 25552 - RNA, 32 nt, Homo Sapiens
uccguuuucuucaauuuauuucaguguaauga

SEQ ID NO: 25553 - RNA, 32 nt, Homo Sapiens
ggacuuugcgagcucugugacugucccacguc

SEQ ID NO: 25554 - RNA, 32 nt, Homo Sapiens
cgcccggcgggaugggcggggaggcugggugc

SEQ ID NO: 25555 - RNA, 32 nt, Homo Sapiens
cgcagggcauuuggcgucgggugggaggggaa

SEQ ID NO: 25556 - RNA, 32 nt, Homo Sapiens
cuguggaggcagcugagaagugguggccucag

SEQ ID NO: 25557 - RNA, 32 nt, Homo Sapiens
ggguggcucuggccgggagcggcggccgguga

SEQ ID NO: 25558 - RNA, 32 nt, Homo Sapiens
accacaccuccucccccuucauuuucagccua

SEQ ID NO: 25559 - RNA, 32 nt, Homo Sapiens
uacaacauuuuucaguuugcaaauagaacuaa

SEQ ID NO: 25560 - RNA, 32 nt, Homo Sapiens
auuugaauguuauaguugauaauaauaaaauc

SEQ ID NO: 25561 - RNA, 32 nt, Homo Sapiens
ucuaccacaaaacugcccugcuggagugguuc

SEQ ID NO: 25562 - RNA, 32 nt, Homo Sapiens
cacuuaagggaaguuuauaaagcuacuggccc

SEQ ID NO: 25563 - RNA, 32 nt, Homo Sapiens
gauaagaucuuugaauccaagaugcccagaug

SEQ ID NO: 25564 - RNA, 32 nt, Homo Sapiens
uuuggacagcuauaacugcuguguuuuuuaua

SEQ ID NO: 25565 - RNA, 32 nt, Homo Sapiens
gcaggcaaaguuugcagaacugucuuaaggac

SEQ ID NO: 25566 - RNA, 32 nt, Homo Sapiens
uguuugugguacaugugucuuuccaagagaga

SEQ ID NO: 25567 - RNA, 32 nt, Homo Sapiens
acccacgguuuuucuuuuuuucuuuuuuucuu

SEQ ID NO: 25568 - RNA, 32 nt, Homo Sapiens
cucugucugaggauggggaggggccagugagc

SEQ ID NO: 25569 - RNA, 32 nt, Homo Sapiens
accgccggcugcuguggagugccucgcugucu

SEQ ID NO: 25570 - RNA, 30 nt, Homo Sapiens
aagaggaucuucgguggucugggaguuuug

SEQ ID NO: 25571 - RNA, 32 nt, Homo Sapiens
ucuccauacuuugaacaaccaaaugugcauug

SEQ ID NO: 25572 - RNA, 32 nt, Homo Sapiens
ucauggagcccugcgaccucccugcccugccg

SEQ ID NO: 25573 - RNA, 32 nt, Homo Sapiens
cauggggaaaauugauguuccaguuacaguga

SEQ ID NO: 25574 - RNA, 32 nt, Homo Sapiens
ugacuaauacauucuagaaguaaguuguauga

SEQ ID NO: 25575 - RNA, 32 nt, Homo Sapiens
gccaugcuccugggcaacccagccccugccuc

SEQ ID NO: 25576 - RNA, 32 nt, Homo Sapiens
cugaaaggccgcggggcccgcauuucucugug

SEQ ID NO: 25577 - RNA, 32 nt, Homo Sapiens
auuauauauagaguuucuuuuuccacgguagu

SEQ ID NO: 25578 - RNA, 32 nt, Homo Sapiens
aagcccgcagccgcuggacgcgggaggacaug

SEQ ID NO: 25579 - RNA, 32 nt, Homo Sapiens
ccucucucugagcaccgucauccaccacaugg

SEQ ID NO: 25580 - RNA, 32 nt, Homo Sapiens
guucuuacuccagcucaacccauuggguguug

SEQ ID NO: 25581 - RNA, 32 nt, Homo Sapiens
uucacagaggauggugguuugucacacucaga

SEQ ID NO: 25582 - RNA, 32 nt, Homo Sapiens
cacccauugggucacacccccuuugcauguuu

SEQ ID NO: 25583 - RNA, 32 nt, Homo Sapiens
aauacauggaaauauuugucuucucaggccua

SEQ ID NO: 25584 - RNA, 32 nt, Homo Sapiens
cauucgggcagacaccgagcuagcuguaggag

SEQ ID NO: 25585 - RNA, 32 nt, Homo Sapiens
gcccagcgcagccccuuuuggcaccgagguuu

SEQ ID NO: 25586 - RNA, 32 nt, Homo Sapiens
gcugaaaacaaauggacgcuuaucccaaaugc

SEQ ID NO: 25587 - RNA, 32 nt, Homo Sapiens
uccagcagacuuaauuacauuuuaaggaacac

SEQ ID NO: 25588 - RNA, 32 nt, Homo Sapiens
cuucuuuagacuaugcuaguuguaugcgugua

SEQ ID NO: 25589 - RNA, 32 nt, Homo Sapiens
gagguccgagcgaugugaccaggccgccaucg

SEQ ID NO: 25590 - RNA, 32 nt, Homo Sapiens
ugggggccugaagggggcugggggaugaugug

SEQ ID NO: 25591 - RNA, 32 nt, Homo Sapiens
auauaaauacugacaauguauuuuggaagaca

SEQ ID NO: 25592 - RNA, 29 nt, Homo Sapiens
aaaaugcaauaaaauauauaucugguugu

SEQ ID NO: 25593 - RNA, 32 nt, Homo Sapiens
gaaauuauuaaaccuagcugaugcuugaaggu

SEQ ID NO: 25594 - RNA, 28 nt, Homo Sapiens
uggaugggccucagcgacucgguccgcu

SEQ ID NO: 25595 - RNA, 32 nt, Homo Sapiens
aauaugugccaucucugacagaaaggcccugc

SEQ ID NO: 25596 - RNA, 32 nt, Homo Sapiens
cugaagcggaccugaacagaccauguguccuu

SEQ ID NO: 25597 - RNA, 32 nt, Homo Sapiens
acaauaagaagcacgugguaaaacacuugcgg

SEQ ID NO: 25598 - RNA, 32 nt, Homo Sapiens
uuguuauaauauauuuucuaccauuccaauag

SEQ ID NO: 25599 - RNA, 32 nt, Homo Sapiens
gaggaguucugaugacccagggguuagggcug

SEQ ID NO: 25600 - RNA, 32 nt, Homo Sapiens
uacguacuuugaauguucaaguauaagucuaa

SEQ ID NO: 25601 - RNA, 32 nt, Homo Sapiens
uagagggggacaacauggaaacgugguaguag

SEQ ID NO: 25602 - RNA, 32 nt, Homo Sapiens
gaauguggaaaaucauucugugugaagucaaa

SEQ ID NO: 25603 - RNA, 32 nt, Homo Sapiens
uuaccagaaaauuuaaaguuacgccagucacu

SEQ ID NO: 25604 - RNA, 31 nt, Homo Sapiens
uucaggaagccccagaacacccacaggucuu

SEQ ID NO: 25605 - RNA, 32 nt, Homo Sapiens
guuugcagagaccacugcacuccagccugggc

SEQ ID NO: 25606 - RNA, 32 nt, Homo Sapiens
uccagaaaacaacagaaugaacaucaucauga

SEQ ID NO: 25607 - RNA, 32 nt, Homo Sapiens
uggauucuuaaaaauaauguaauguaacccuu

SEQ ID NO: 25608 - RNA, 32 nt, Homo Sapiens
uacuauuuacuuuugacuuaauggggcauaaa

SEQ ID NO: 25609 - RNA, 32 nt, Homo Sapiens
aguugcaaagauucauugaggggagcaaggaa

SEQ ID NO: 25610 - RNA, 32 nt, Homo Sapiens
cuccagcgagggcaccagugccugcagccuca

SEQ ID NO: 25611 - RNA, 32 nt, Homo Sapiens
cgggaugcggcgcgccgcgcguugaaccuccu

SEQ ID NO: 25612 - RNA, 32 nt, Homo Sapiens
gcucgacgauggaggagccgcagcgcgcccgc

SEQ ID NO: 25613 - RNA, 32 nt, Homo Sapiens
cuuaaauaaauuacaguuuauggcuguaugau

SEQ ID NO: 25614 - RNA, 32 nt, Homo Sapiens
caaauguagacugcgcaaccauccugaccaca

SEQ ID NO: 25615 - RNA, 32 nt, Homo Sapiens
cacaccaggcugugcucaaggccacggaauga

SEQ ID NO: 25616 - RNA, 32 nt, Homo Sapiens
guguuaggggagaggggaguccgcucuguccu

SEQ ID NO: 25617 - RNA, 32 nt, Homo Sapiens
uugaagaauucaggauacaacuucuuguguau

SEQ ID NO: 25618 - RNA, 32 nt, Homo Sapiens
cugaacccggggccggcccacccagccaccca

SEQ ID NO: 25619 - RNA, 32 nt, Homo Sapiens
aaaauauaugugcuuguuuuaagcaaauuuca

SEQ ID NO: 25620 - RNA, 32 nt, Homo Sapiens
cccaagaaugcauggaggaaggagagaggaag

SEQ ID NO: 25621 - RNA, 32 nt, Homo Sapiens
agccuguugacaaagcaagacucugucucaaa

SEQ ID NO: 25622 - RNA, 32 nt, Homo Sapiens
uccuggguggguggagcuggggagggcauggg

SEQ ID NO: 25623 - RNA, 32 nt, Homo Sapiens
agaaaagggagccccaaaugcaaccagccucu

SEQ ID NO: 25624 - RNA, 32 nt, Homo Sapiens
ggagccccuucaaacuuccaauaaagggauca

SEQ ID NO: 25625 - RNA, 32 nt, Homo Sapiens
agcuuugggacauggugccucaugcucucugg

SEQ ID NO: 25626 - RNA, 32 nt, Homo Sapiens
ugggaacaaugagagugaacucuaaauauagg

SEQ ID NO: 25627 - RNA, 32 nt, Homo Sapiens
guuuaaagaaauaccaugaaauuuauagguag

SEQ ID NO: 25628 - RNA, 32 nt, Homo Sapiens
ugcauaaugaauggagaaugagugaacuucca

SEQ ID NO: 25629 - RNA, 32 nt, Homo Sapiens
caagacuugauuaugaaagauaaagucuuggg

SEQ ID NO: 25630 - RNA, 32 nt, Homo Sapiens
ggcucgcgcuucgguuuccccagaccugcucg

SEQ ID NO: 25631 - RNA, 32 nt, Homo Sapiens
cagccuggccccagggacuucacggauccccu

SEQ ID NO: 25632 - RNA, 32 nt, Homo Sapiens
acguucucaccccuucuucuuccacugcaaac

SEQ ID NO: 25633 - RNA, 32 nt, Homo Sapiens
guauuuuguggaaucaagaacaaaauuauagu

SEQ ID NO: 25634 - RNA, 32 nt, Homo Sapiens
ugcggccuuggacccagaccccugcccacuga

SEQ ID NO: 25635 - RNA, 32 nt, Homo Sapiens
ucacucagugauugcaauuugcacaaguuuuu

SEQ ID NO: 25636 - RNA, 32 nt, Homo Sapiens
cucgcagcaccucgaagugcgccccucgcccu

SEQ ID NO: 25637 - RNA, 32 nt, Homo Sapiens
auauuuguuuaaaaauauucucuacuuuuagu

SEQ ID NO: 25638 - RNA, 32 nt, Homo Sapiens
ccucaguacccuuuaauacauguacauuucuu

SEQ ID NO: 25639 - RNA, 32 nt, Homo Sapiens
uacccagcccagccugggaccggagauccaga

SEQ ID NO: 25640 - RNA, 32 nt, Homo Sapiens
gccgcugaguggcaaugggugccugugcuccc

SEQ ID NO: 25641 - RNA, 32 nt, Homo Sapiens
uaugaugaugacggcagcugcugcugagcggg

SEQ ID NO: 25642 - RNA, 32 nt, Homo Sapiens
cauuccaacccuuaaagcuaaaacagcacaaa

SEQ ID NO: 25643 - RNA, 32 nt, Homo Sapiens
auuggucucuuuuugcuuugguugccugugug

SEQ ID NO: 25644 - RNA, 32 nt, Homo Sapiens
cuuggaaugaaagguugaaauaauuuaaacag

SEQ ID NO: 25645 - RNA, 32 nt, Homo Sapiens
ggcuguauggagaggagcugggguucaggcau

SEQ ID NO: 25646 - RNA, 32 nt, Homo Sapiens
aauauuuuggaacuuuuuuuuaaauuauagua

SEQ ID NO: 25647 - RNA, 32 nt, Homo Sapiens
caagacauaauauucaucucuugcugucagac

SEQ ID NO: 25648 - RNA, 32 nt, Homo Sapiens
uugguuccaagcccuggagccaacugcugcuu

SEQ ID NO: 25649 - RNA, 32 nt, Homo Sapiens
gauuacagaaaguuaaguguauacuacaaacu

SEQ ID NO: 25650 - RNA, 32 nt, Homo Sapiens
uauggccauuaauuuuaacauuaaaucguagg

SEQ ID NO: 25651 - RNA, 31 nt, Homo Sapiens
uuacaaaugaggaaacagaggcacggagcuu

SEQ ID NO: 25652 - RNA, 32 nt, Homo Sapiens
gagagaccccagagagggcugcugcagucugg

SEQ ID NO: 25653 - RNA, 30 nt, Homo Sapiens
uuuccuauuagugcuacccaucuccccuca

SEQ ID NO: 25654 - RNA, 32 nt, Homo Sapiens
gcugcccucugcgcccgagcgccuggcccugg

SEQ ID NO: 25655 - RNA, 32 nt, Homo Sapiens
auggccagcagcauccggccagugugcaggcg

SEQ ID NO: 25656 - RNA, 32 nt, Homo Sapiens
augcuaaaggcuugaaagcaucugaagacauc

SEQ ID NO: 25657 - RNA, 32 nt, Homo Sapiens
ccuaaguuaaggauuuucuaaaugguauuuaa

SEQ ID NO: 25658 - RNA, 32 nt, Homo Sapiens
ugggcugggaagcugcucuugcucuccucgug

SEQ ID NO: 25659 - RNA, 32 nt, Homo Sapiens
auauuuuggaacucuuuuuuuuuuuaaauuau

SEQ ID NO: 25660 - RNA, 30 nt, Homo Sapiens
gugaaguacuguguugcagaaguggcaaaa

SEQ ID NO: 25661 - RNA, 32 nt, Homo Sapiens
gguuaagacacacacggcaaugugcuaucuuu

SEQ ID NO: 25662 - RNA, 32 nt, Homo Sapiens
cccuagcagggcucuagagaccacgugaaguc

SEQ ID NO: 25663 - RNA, 32 nt, Homo Sapiens
ugauuuccugucauuuugaaucauuuaucacc

SEQ ID NO: 25664 - RNA, 32 nt, Homo Sapiens
ggcgcggaggaggagguucccggaagccacgc

SEQ ID NO: 25665 - RNA, 32 nt, Homo Sapiens
gccuguacucaccucagcaucuaucaagggcc

SEQ ID NO: 25666 - RNA, 32 nt, Homo Sapiens
uacacagguaguauuuucaaugugaauccaaa

SEQ ID NO: 25667 - RNA, 32 nt, Homo Sapiens
gaggcgagaaagggcugggcgccugaggggca

SEQ ID NO: 25668 - RNA, 32 nt, Homo Sapiens
gcacaguguuuguuuuccugucuugcacuuac

SEQ ID NO: 25669 - RNA, 32 nt, Homo Sapiens
aagcuuuagaugugucccauguggcaagaaag

SEQ ID NO: 25670 - RNA, 30 nt, Homo Sapiens
caggagcaggauggcggcggcggcggcugc

SEQ ID NO: 25671 - RNA, 32 nt, Homo Sapiens
ugaaguugccucaaauagagucuaaauauaag

SEQ ID NO: 25672 - RNA, 32 nt, Homo Sapiens
gaaggaugaugaugaugaggagauaggagguc

SEQ ID NO: 25673 - RNA, 31 nt, Homo Sapiens
gguaugccgcgcugccugcaccuagugugca

SEQ ID NO: 25674 - RNA, 32 nt, Homo Sapiens
ugauauuugaggagggucguguugacuccaua

SEQ ID NO: 25675 - RNA, 32 nt, Homo Sapiens
ugcugcuuucccuucuccuaaacauuuuaaaa

SEQ ID NO: 25676 - RNA, 32 nt, Homo Sapiens
uacuuuauuuuuguaaguugcugagauaucug

SEQ ID NO: 25677 - RNA, 32 nt, Homo Sapiens
caacugguacaaugcuucuacacaucagaccu

SEQ ID NO: 25678 - RNA, 32 nt, Homo Sapiens
agggagacagagcugcgauuccgugcuuucag

SEQ ID NO: 25679 - RNA, 32 nt, Homo Sapiens
caaagcuauuugaguucucgucugucccuagc

SEQ ID NO: 25680 - RNA, 32 nt, Homo Sapiens
uccaaagcaaaauaaauuuuauugugaagugu

SEQ ID NO: 25681 - RNA, 32 nt, Homo Sapiens
uucccugaaucacagccccagcuccuugaccc

SEQ ID NO: 25682 - RNA, 32 nt, Homo Sapiens
agucagagggugguaggaggugaagaggaaca

SEQ ID NO: 25683 - RNA, 32 nt, Homo Sapiens
aaacuccccccucccucuccuccagucgggcu

SEQ ID NO: 25684 - RNA, 32 nt, Homo Sapiens
ucagaguauauguuuuucauugagaagcaaaa

SEQ ID NO: 25685 - RNA, 32 nt, Homo Sapiens
ugugacacacuuugacaaaaauguagaaccua

SEQ ID NO: 25686 - RNA, 32 nt, Homo Sapiens
ugugcuuggggauaaaauggugagcaaaauac

SEQ ID NO: 25687 - RNA, 32 nt, Homo Sapiens
gcuccccccuccccaccuucagcuggcaccgc

SEQ ID NO: 25688 - RNA, 32 nt, Homo Sapiens
ccuggacccgucuguggggucauuacccucug

SEQ ID NO: 25689 - RNA, 32 nt, Homo Sapiens
aaagagagccaagcagaagaggaggcgagaag

SEQ ID NO: 25690 - RNA, 32 nt, Homo Sapiens
agauuucuuaauaccuggucuuccucaaagag

SEQ ID NO: 25691 - RNA, 32 nt, Homo Sapiens
cguauucucuucacacagaaaucuguagcacu

SEQ ID NO: 25692 - RNA, 32 nt, Homo Sapiens
uauuuguauuuauaguuuuuuauuuguauaga

SEQ ID NO: 25693 - RNA, 32 nt, Homo Sapiens
cgcacgcacacacacacacacacacacacaca

SEQ ID NO: 25694 - RNA, 32 nt, Homo Sapiens
uggugggcucugcccugacugcuuggagaccu

SEQ ID NO: 25695 - RNA, 32 nt, Homo Sapiens
ccaauucugcuucaugggccaugcagcaggca

SEQ ID NO: 25696 - RNA, 32 nt, Homo Sapiens
cacccucaccaacagaugcaccgcgaugaaga

SEQ ID NO: 25697 - RNA, 32 nt, Homo Sapiens
caguuccaucaagaguuacggccuggcgaccg

SEQ ID NO: 25698 - RNA, 32 nt, Homo Sapiens
aaggggaagaauucgggaaaagcaacgugggg

SEQ ID NO: 25699 - RNA, 32 nt, Homo Sapiens
ccagacuugaaggacuccaagaaggaccuuca

SEQ ID NO: 25700 - RNA, 32 nt, Homo Sapiens
ccggcccaagugggcccagcccggcccgcguc

SEQ ID NO: 25701 - RNA, 32 nt, Homo Sapiens
uccccugcucacagcccuccgcguggccucuc

SEQ ID NO: 25702 - RNA, 32 nt, Homo Sapiens
ucggggcuaccagaaaaauguuuccagauggu

SEQ ID NO: 25703 - RNA, 32 nt, Homo Sapiens
agcuuucucccucugugccuccugcuuccuuu

SEQ ID NO: 25704 - RNA, 32 nt, Homo Sapiens
ucucgcuacccggcggggagggggugggggga

SEQ ID NO: 25705 - RNA, 32 nt, Homo Sapiens
acauguauuugcacaaaaauucucaggcacau

SEQ ID NO: 25706 - RNA, 32 nt, Homo Sapiens
cacuuuauuuuuguuugguuuuugaugggagg

SEQ ID NO: 25707 - RNA, 32 nt, Homo Sapiens
gucuggccaaaggaaaucuauuuuuucccuuc

SEQ ID NO: 25708 - RNA, 32 nt, Homo Sapiens
uauucuuuuuguggcaguugugaaugggauua

SEQ ID NO: 25709 - RNA, 32 nt, Homo Sapiens
uucggcuccgccccugccccccagcccucgug

SEQ ID NO: 25710 - RNA, 32 nt, Homo Sapiens
ggcuaguucaguaacaacaaaauacacuguuu

SEQ ID NO: 25711 - RNA, 32 nt, Homo Sapiens
uccaauauuccagggccuucuuucucaucucu

SEQ ID NO: 25712 - RNA, 32 nt, Homo Sapiens
caucuuuccaggauuaaccuugaccaguaaaa

SEQ ID NO: 25713 - RNA, 32 nt, Homo Sapiens
accccgccuuguccccccgacaugcugcguga

SEQ ID NO: 25714 - RNA, 32 nt, Homo Sapiens
ccguguggaugaugaaagucuuccugaucagc

SEQ ID NO: 25715 - RNA, 32 nt, Homo Sapiens
uagggagggugggagcugcugcuggacuggcc

SEQ ID NO: 25716 - RNA, 32 nt, Homo Sapiens
guuucuuagguaugggacaaaaagcacacaua

SEQ ID NO: 25717 - RNA, 32 nt, Homo Sapiens
ugcugccagucagcagugcgggcccucgaguu

SEQ ID NO: 25718 - RNA, 32 nt, Homo Sapiens
cuucugggccagccagcuccaacugcagccaa

SEQ ID NO: 25719 - RNA, 32 nt, Homo Sapiens
uaaaauauuuaacuuuuuuuuauggcguuuuu

SEQ ID NO: 25720 - RNA, 32 nt, Homo Sapiens
uguuuuguaaaaaagguauauuuuugaguuac

SEQ ID NO: 25721 - RNA, 32 nt, Homo Sapiens
guggggaggugggggggaccgaaacggcgcug

SEQ ID NO: 25722 - RNA, 32 nt, Homo Sapiens
auucuuuugcauguggaaauucaggugucccc

SEQ ID NO: 25723 - RNA, 32 nt, Homo Sapiens
gauaccaaaauccucagaugcucaagucccug

SEQ ID NO: 25724 - RNA, 32 nt, Homo Sapiens
agggagggaggggacauaaagggaaugcauac

SEQ ID NO: 25725 - RNA, 32 nt, Homo Sapiens
caggggagggcggcccaagccccaugcuccuc

SEQ ID NO: 25726 - RNA, 32 nt, Homo Sapiens
gaaggcggcugccaggucuugccccaggcacc

SEQ ID NO: 25727 - RNA, 32 nt, Homo Sapiens
ccagcccugaccuggcuucuccaggguggccc

SEQ ID NO: 25728 - RNA, 32 nt, Homo Sapiens
guggacagaggggcagggggcugggagaaggc

SEQ ID NO: 25729 - RNA, 32 nt, Homo Sapiens
cagugauccggguacucuaccuaauauugggg

SEQ ID NO: 25730 - RNA, 32 nt, Homo Sapiens
aacuuuggucauaugagaagcaggugcgcaga

SEQ ID NO: 25731 - RNA, 32 nt, Homo Sapiens
gagguuccagugagccgagauggcgcuauugc

SEQ ID NO: 25732 - RNA, 32 nt, Homo Sapiens
aaucucagaagcuuacaaauagauuuccauga

SEQ ID NO: 25733 - RNA, 32 nt, Homo Sapiens
aauuuguugugauuuucagcaccuggaaguaa

SEQ ID NO: 25734 - RNA, 32 nt, Homo Sapiens
gggacccgggccgcgugggcgccgggauggag

SEQ ID NO: 25735 - RNA, 32 nt, Homo Sapiens
gucccaggcucucauuaguaugggaaacuuuc

SEQ ID NO: 25736 - RNA, 32 nt, Homo Sapiens
aaguuguucuaguaacaauacaugagaaagau

SEQ ID NO: 25737 - RNA, 32 nt, Homo Sapiens
uuuacuguacuauuucaaagcuucuaaauaaa

SEQ ID NO: 25738 - RNA, 32 nt, Homo Sapiens
ugcagccgccgccgcugcaguggucgucccug

SEQ ID NO: 25739 - RNA, 32 nt, Homo Sapiens
uucaaauaaaauacacauuuucaagagggagc

SEQ ID NO: 25740 - RNA, 32 nt, Homo Sapiens
uccagugaguuagccccauuuaaucuaguuaa

SEQ ID NO: 25741 - RNA, 32 nt, Homo Sapiens
cgcucaggcagcuggacggcagcugcgcccca

SEQ ID NO: 25742 - RNA, 32 nt, Homo Sapiens
agggguggggagagcuugcccucccucuuaag

SEQ ID NO: 25743 - RNA, 32 nt, Homo Sapiens
ccggcuugucccagccccucuuuugcuucuga

SEQ ID NO: 25744 - RNA, 32 nt, Homo Sapiens
uccuuuuauucccugggucucuaaugggaccu

SEQ ID NO: 25745 - RNA, 32 nt, Homo Sapiens
aauucaauuuggacuggugugcucucuuuaaa

SEQ ID NO: 25746 - RNA, 32 nt, Homo Sapiens
uuauaggaauccaacaaauacugcucuauugg

SEQ ID NO: 25747 - RNA, 32 nt, Homo Sapiens
auuuucugccccaccuuacuucuccucccuga

SEQ ID NO: 25748 - RNA, 32 nt, Homo Sapiens
gaagccaaccaugccucccgcuccacucgcuu

SEQ ID NO: 25749 - RNA, 32 nt, Homo Sapiens
cguaaccuuucugcagcauuagagccaucguu

SEQ ID NO: 25750 - RNA, 32 nt, Homo Sapiens
auugauugaaguuugugauauucaucaauaaa

SEQ ID NO: 25751 - RNA, 32 nt, Homo Sapiens
agaaagugaagauaacugcaagucagcuggaa

SEQ ID NO: 25752 - RNA, 30 nt, Homo Sapiens
guuggaggcgguggcggcggcggcgaggag

SEQ ID NO: 25753 - RNA, 32 nt, Homo Sapiens
gcucuccuugccagcuuucuccucagggucug

SEQ ID NO: 25754 - RNA, 32 nt, Homo Sapiens
gaagacaucugugccaagaguggcaugaagac

SEQ ID NO: 25755 - RNA, 32 nt, Homo Sapiens
cugggcggccuggccuguacggggcgggggag

SEQ ID NO: 25756 - RNA, 32 nt, Homo Sapiens
gaaauuaugcugucacugccaaacaguaaccu

SEQ ID NO: 25757 - RNA, 32 nt, Homo Sapiens
gaaauucugaauagaauugcacucagaacuua

SEQ ID NO: 25758 - RNA, 32 nt, Homo Sapiens
aaauugaguaauucagaaaaacucaagauuua

SEQ ID NO: 25759 - RNA, 32 nt, Homo Sapiens
aauuagccgggugugguggugcaugccuguaa

SEQ ID NO: 25760 - RNA, 32 nt, Homo Sapiens
aagggcgagcagggucuggggguggcucugag

SEQ ID NO: 25761 - RNA, 32 nt, Homo Sapiens
caacgggauugugagaaucaagucacucucau

SEQ ID NO: 25762 - RNA, 32 nt, Homo Sapiens
agcugcucuguccucuccaugccuggccggcc

SEQ ID NO: 25763 - RNA, 32 nt, Homo Sapiens
uuugacuucccucuccuugguuaauaaacaca

SEQ ID NO: 25764 - RNA, 32 nt, Homo Sapiens
aauuagccgggcgugguggugcaugcccguaa

SEQ ID NO: 25765 - RNA, 32 nt, Homo Sapiens
aggaguauuuccccucauucuaccucucuaag

SEQ ID NO: 25766 - RNA, 32 nt, Homo Sapiens
uagugccucccgaaggagcccgggcgcaggga

SEQ ID NO: 25767 - RNA, 32 nt, Homo Sapiens
auccucccgccuuaacugccugaguagcuggg

SEQ ID NO: 25768 - RNA, 32 nt, Homo Sapiens
uaaaauauuuuacaucgagguauaauaaauaa

SEQ ID NO: 25769 - RNA, 32 nt, Homo Sapiens
uaccuucagcacuuagaagagacauucaaaua

SEQ ID NO: 25770 - RNA, 32 nt, Homo Sapiens
uuacuucuugucacucugggauguuaucuuuc

SEQ ID NO: 25771 - RNA, 32 nt, Homo Sapiens
agccagagcuccuggaggaaaggcagucggga

SEQ ID NO: 25772 - RNA, 32 nt, Homo Sapiens
agaggccccggcggccugugcuccucaccacc

SEQ ID NO: 25773 - RNA, 30 nt, Homo Sapiens
cgcuagcgucugucugcagaacuuucagga

SEQ ID NO: 25774 - RNA, 32 nt, Homo Sapiens
uccuggagguggcacugggggcuggucacccu

SEQ ID NO: 25775 - RNA, 32 nt, Homo Sapiens
ggcguuugaaaacaagaaaucauucuucugug

SEQ ID NO: 25776 - RNA, 32 nt, Homo Sapiens
ucugccccacauuucccuuccacacugcccua

SEQ ID NO: 25777 - RNA, 32 nt, Homo Sapiens
cacaguacacccagcuaacaaaccugcccaug

SEQ ID NO: 25778 - RNA, 32 nt, Homo Sapiens
cauucuuuggcuguuucuuuuaaaauaugggu

SEQ ID NO: 25779 - RNA, 30 nt, Homo Sapiens
ggcuuggcugcucgcugggucuuggauguc

SEQ ID NO: 25780 - RNA, 32 nt, Homo Sapiens
uaaaacauuuuucccaacaguauauaaaucuu

SEQ ID NO: 25781 - RNA, 32 nt, Homo Sapiens
ugcccuguucuucccucagccucgccugcugu

SEQ ID NO: 25782 - RNA, 32 nt, Homo Sapiens
uauauuacuagauguuaauuuacauggcccgu

SEQ ID NO: 25783 - RNA, 32 nt, Homo Sapiens
uacgcuugcgcggcgcaacagggccgacugca

SEQ ID NO: 25784 - RNA, 32 nt, Homo Sapiens
acgggauggcgcccaaacuccggcguucacaa

SEQ ID NO: 25785 - RNA, 32 nt, Homo Sapiens
augggaaaaaggaagaguguccaaaugacauc

SEQ ID NO: 25786 - RNA, 32 nt, Homo Sapiens
ggcccggggaggccuuguggcuccuccccucg

SEQ ID NO: 25787 - RNA, 32 nt, Homo Sapiens
gacccgagcgagucccgaccccugcccccgca

SEQ ID NO: 25788 - RNA, 32 nt, Homo Sapiens
ugagcgcacgugggccgggcgguccgcaagcc

SEQ ID NO: 25789 - RNA, 32 nt, Homo Sapiens
cucauuuaguuugaaccuucacagcaacccaa

SEQ ID NO: 25790 - RNA, 32 nt, Homo Sapiens
ugaacgcaguaaaccuucauggaccaacagug

SEQ ID NO: 25791 - RNA, 32 nt, Homo Sapiens
gugagccuggcgggcugcccgcuaaccugucg

SEQ ID NO: 25792 - RNA, 32 nt, Homo Sapiens
cuuccauuucuucugcacaucuacuugcuuaa

SEQ ID NO: 25793 - RNA, 32 nt, Homo Sapiens
ucuuugccaucucugcuccaaccgggauggga

SEQ ID NO: 25794 - RNA, 32 nt, Homo Sapiens
agagggcuugcaucacgucacuccagugguuc

SEQ ID NO: 25795 - RNA, 32 nt, Homo Sapiens
uguauggagccugcagcacaccaagagacuug

SEQ ID NO: 25796 - RNA, 32 nt, Homo Sapiens
auucacugauagcugaaauagauacaagccua

SEQ ID NO: 25797 - RNA, 32 nt, Homo Sapiens
gugcgguggcucaugccuauaauccuaacacu

SEQ ID NO: 25798 - RNA, 32 nt, Homo Sapiens
agagccucugaccucccuuguuuaguuuugga

SEQ ID NO: 25799 - RNA, 32 nt, Homo Sapiens
cugccccaaucaccgucacaauaaaagaaacu

SEQ ID NO: 25800 - RNA, 32 nt, Homo Sapiens
gcccgggggcccaagcugcggcagcggcuccc

SEQ ID NO: 25801 - RNA, 32 nt, Homo Sapiens
cuaaguaguccuggaaagaacaucaguugcag

SEQ ID NO: 25802 - RNA, 32 nt, Homo Sapiens
uggaccucaauccccagcuuucccacuuucag

SEQ ID NO: 25803 - RNA, 29 nt, Homo Sapiens
ggggaacggaaacagaggagccuguugua

SEQ ID NO: 25804 - RNA, 32 nt, Homo Sapiens
uuucauuucaucagcuuuaaucucuaguaaaa

SEQ ID NO: 25805 - RNA, 32 nt, Homo Sapiens
cuguucccuccagcccggaccccccugaaaua

SEQ ID NO: 25806 - RNA, 32 nt, Homo Sapiens
ucucaggaauccacaugagcuacucucagggc

SEQ ID NO: 25807 - RNA, 32 nt, Homo Sapiens
uuacuuaaaaagauuaaaaggauacuaauguu

SEQ ID NO: 25808 - RNA, 32 nt, Homo Sapiens
aagggccaggugggaccugaaagcaaagacaa

SEQ ID NO: 25809 - RNA, 32 nt, Homo Sapiens
uuuuuguuguuguuaaaaacauccagcugguu

SEQ ID NO: 25810 - RNA, 32 nt, Homo Sapiens
auaucccuggaacuccuucucaggcugguggg

SEQ ID NO: 25811 - RNA, 32 nt, Homo Sapiens
uugcugcccuuccggaguccgccccgugagga

SEQ ID NO: 25812 - RNA, 32 nt, Homo Sapiens
guagugaccggcgucccgcugucucgccccgu

SEQ ID NO: 25813 - RNA, 32 nt, Homo Sapiens
ggacucuagguuuaacauuuuguacaaaaugg

SEQ ID NO: 25814 - RNA, 32 nt, Homo Sapiens
guucauggggacgugcacggggccgcccuccu

SEQ ID NO: 25815 - RNA, 32 nt, Homo Sapiens
uuuguaaagugcuauaaauguauuuuguuaag

SEQ ID NO: 25816 - RNA, 32 nt, Homo Sapiens
auucucagaaacuuauacauuucugcucuccu

SEQ ID NO: 25817 - RNA, 32 nt, Homo Sapiens
ccuaaauuccucccuuucucagucuaccuacu

SEQ ID NO: 25818 - RNA, 32 nt, Homo Sapiens
ugaacccaggaauccuuggggguggugggagg

SEQ ID NO: 25819 - RNA, 32 nt, Homo Sapiens
aucaucuccaacaaaacccagccccaacuuuc

SEQ ID NO: 25820 - RNA, 32 nt, Homo Sapiens
ccuugaauucuuuuccucucuuaaauucauau

SEQ ID NO: 25821 - RNA, 32 nt, Homo Sapiens
cagugcccacugggcaucugcacuugaauauc

SEQ ID NO: 25822 - RNA, 32 nt, Homo Sapiens
ggagcgugcugagcgggcaagcaauaaaacaa

SEQ ID NO: 25823 - RNA, 32 nt, Homo Sapiens
ggcuggcugcgagggagggggcguugggugcc

SEQ ID NO: 25824 - RNA, 32 nt, Homo Sapiens
gagccuguccccagcccuucggaagccccggc

SEQ ID NO: 25825 - RNA, 32 nt, Homo Sapiens
aacacagaguuugaacuauaauacuaaggccu

SEQ ID NO: 25826 - RNA, 32 nt, Homo Sapiens
uuugagaucuaaaacuucuguugcuuuugcca

SEQ ID NO: 25827 - RNA, 32 nt, Homo Sapiens
ucauccucaucccacccucgccacuugccuga

SEQ ID NO: 25828 - RNA, 31 nt, Homo Sapiens
ccuuaucaaugaccuuuacuaacugacucuu

SEQ ID NO: 25829 - RNA, 32 nt, Homo Sapiens
cuggaugaagacacagacuaaaaggaacguug

SEQ ID NO: 25830 - RNA, 32 nt, Homo Sapiens
guugagcaugcuccgcucuacugaacuaaaug

SEQ ID NO: 25831 - RNA, 32 nt, Homo Sapiens
gcugcggugugguugguggugagaugacgacc

SEQ ID NO: 25832 - RNA, 32 nt, Homo Sapiens
ccagccccaucccagcugcccucccucaccac

SEQ ID NO: 25833 - RNA, 32 nt, Homo Sapiens
cauaauuguucucaguuuuucuccuggcugcc

SEQ ID NO: 25834 - RNA, 32 nt, Homo Sapiens
auggccgcuagugagcaagcucugcuucagag

SEQ ID NO: 25835 - RNA, 32 nt, Homo Sapiens
aggguccgcgcgccauggcuggccgcucgcgc

SEQ ID NO: 25836 - RNA, 32 nt, Homo Sapiens
ugaccuuguuauuuaagaaguuaaauacaagg

SEQ ID NO: 25837 - RNA, 32 nt, Homo Sapiens
agagucgaaggccccagggccccgcugucacu

SEQ ID NO: 25838 - RNA, 32 nt, Homo Sapiens
ugcuuuguuacccaugcuggucuugaacuucu

SEQ ID NO: 25839 - RNA, 32 nt, Homo Sapiens
aaugcaggcuuugaucuguuucaccauggcuu

SEQ ID NO: 25840 - RNA, 32 nt, Homo Sapiens
acaaagcauugugcugagacacugcauuccug

SEQ ID NO: 25841 - RNA, 32 nt, Homo Sapiens
cacuaucuccuaucuccacuccaggucugcag

SEQ ID NO: 25842 - RNA, 32 nt, Homo Sapiens
cuuuuaaaaaauacucugcuauuucucuugcu

SEQ ID NO: 25843 - RNA, 32 nt, Homo Sapiens
auggugugcaggucugcuucuuaauucagugu

SEQ ID NO: 25844 - RNA, 32 nt, Homo Sapiens
gucauagcaagcuuuugcucaacagcauaugg

SEQ ID NO: 25845 - RNA, 32 nt, Homo Sapiens
caacgccccgccaucacccaaugucaccgcac

SEQ ID NO: 25846 - RNA, 32 nt, Homo Sapiens
ugucuuccgagaccaccuggggccauccagcc

SEQ ID NO: 25847 - RNA, 32 nt, Homo Sapiens
aacaggaagccccccagggucugugcagggcu

SEQ ID NO: 25848 - RNA, 32 nt, Homo Sapiens
ugcagucuaguuucuguguuccaauucuaaau

SEQ ID NO: 25849 - RNA, 32 nt, Homo Sapiens
acaaaaaucauauagucacuucaauugaugcu

SEQ ID NO: 25850 - RNA, 32 nt, Homo Sapiens
ccaggauggaaaugugaaggccggugaguauu

SEQ ID NO: 25851 - RNA, 32 nt, Homo Sapiens
ucuacuaaaaauacagaauuagucaggcgugg

SEQ ID NO: 25852 - RNA, 32 nt, Homo Sapiens
acccgcccggccgcgccgcuuugcccgcggca

SEQ ID NO: 25853 - RNA, 32 nt, Homo Sapiens
uagugguaagcauagcacaucagcauuaugcc

SEQ ID NO: 25854 - RNA, 32 nt, Homo Sapiens
cauucuugucaacucaauaccauagcacuuug

SEQ ID NO: 25855 - RNA, 32 nt, Homo Sapiens
guugugcacugaccuuugccgaccuccagcgg

SEQ ID NO: 25856 - RNA, 32 nt, Homo Sapiens
gcuauuaagcuuuacaccaaaaaauaaauucg

SEQ ID NO: 25857 - RNA, 31 nt, Homo Sapiens
ugauuuguuauaaaauugccaaauagaagug

SEQ ID NO: 25858 - RNA, 30 nt, Homo Sapiens
gguuaaaugauuucucuccaucuuagcuaa

SEQ ID NO: 25859 - RNA, 32 nt, Homo Sapiens
aucucagagacagguggccuagcaggcacagg

SEQ ID NO: 25860 - RNA, 32 nt, Homo Sapiens
agcaggaauggaugucccacugucccugcucc

SEQ ID NO: 25861 - RNA, 32 nt, Homo Sapiens
uuugccuuuugcagccuguccaggcccagaau

SEQ ID NO: 25862 - RNA, 32 nt, Homo Sapiens
ggcccagcgcgcccuguccccgugccagggaa

SEQ ID NO: 25863 - RNA, 32 nt, Homo Sapiens
aagccuuucuccaucaucccagccccacgaga

SEQ ID NO: 25864 - RNA, 32 nt, Homo Sapiens
ugccugccccgcugcgauggagguccuaagag

SEQ ID NO: 25865 - RNA, 32 nt, Homo Sapiens
uuuaagccuaaagauuuugaucucacauuuuu

SEQ ID NO: 25866 - RNA, 32 nt, Homo Sapiens
ggaaaggagcgggacuccggaccuccaggagg

SEQ ID NO: 25867 - RNA, 31 nt, Homo Sapiens
ggucuaggugguugaaggauguaguagaagg

SEQ ID NO: 25868 - RNA, 32 nt, Homo Sapiens
ccuuggagagggaaacaggaaauacguugcuc

SEQ ID NO: 25869 - RNA, 32 nt, Homo Sapiens
uucccuucaaggaguaugucauauaucacaaa

SEQ ID NO: 25870 - RNA, 32 nt, Homo Sapiens
ggacccaggcacccucacggcagggccucucu

SEQ ID NO: 25871 - RNA, 32 nt, Homo Sapiens
cgguggggacggggcggggcgcagccuugcga

SEQ ID NO: 25872 - RNA, 32 nt, Homo Sapiens
gggaaggagggaggaggggagggucgcggccg

SEQ ID NO: 25873 - RNA, 32 nt, Homo Sapiens
ggacagcgcagggccauggaggaggcggccgc

SEQ ID NO: 25874 - RNA, 32 nt, Homo Sapiens
uuuacucccacuuuuaccuccucuccaagaca

SEQ ID NO: 25875 - RNA, 32 nt, Homo Sapiens
uccauagaauacuguuuccuucuaauaaaggu

SEQ ID NO: 25876 - RNA, 32 nt, Homo Sapiens
gugggagcagggucgguggcuucugaggcucu

SEQ ID NO: 25877 - RNA, 32 nt, Homo Sapiens
augacucccuaaaauauauacacuuugcagaa

SEQ ID NO: 25878 - RNA, 29 nt, Homo Sapiens
uuaguucuguguuucagugacugauaaac

SEQ ID NO: 25879 - RNA, 32 nt, Homo Sapiens
cgcucgcucguacggcggccgcggcggcaggg

SEQ ID NO: 25880 - RNA, 32 nt, Homo Sapiens
gcugcagaacagaacacuuucucauguccagg

SEQ ID NO: 25881 - RNA, 32 nt, Homo Sapiens
uuugccccucacacuggcccagccccucacac

SEQ ID NO: 25882 - RNA, 32 nt, Homo Sapiens
cgccaguacccggcccgguccgcauuucgccu

SEQ ID NO: 25883 - RNA, 32 nt, Homo Sapiens
agauaagaaaacugaggcaaggggagauuaac

SEQ ID NO: 25884 - RNA, 32 nt, Homo Sapiens
cuccggcagcgggagcgggaggcagcugcgga

SEQ ID NO: 25885 - RNA, 32 nt, Homo Sapiens
auuuuuauuucugacauucauuuuauuugggu

SEQ ID NO: 25886 - RNA, 32 nt, Homo Sapiens
cuccucucccagagaccccuucugcgccugcc

SEQ ID NO: 25887 - RNA, 32 nt, Homo Sapiens
uaauuuguucuucuaaccaccuaaugcuguug

SEQ ID NO: 25888 - RNA, 32 nt, Homo Sapiens
ggaggcagcgaccgcggucggugggcuccggc

SEQ ID NO: 25889 - RNA, 32 nt, Homo Sapiens
uccuucccccuggccugaggguggguggggag

SEQ ID NO: 25890 - RNA, 32 nt, Homo Sapiens
gcaguguggaggaggaguggccggaugcccca

SEQ ID NO: 25891 - RNA, 32 nt, Homo Sapiens
gaacaugggugaagcuggaaaccaucauucuc

SEQ ID NO: 25892 - RNA, 32 nt, Homo Sapiens
aucuguacauaguuguaacucccauguggagu

SEQ ID NO: 25893 - RNA, 32 nt, Homo Sapiens
cuccaaguucccuucucuuugccagccaugug

SEQ ID NO: 25894 - RNA, 32 nt, Homo Sapiens
gugacacuguucccacauacaaggcugacuuc

SEQ ID NO: 25895 - RNA, 32 nt, Homo Sapiens
caguuaauuuuguuuuccuguuuaaugagcca

SEQ ID NO: 25896 - RNA, 32 nt, Homo Sapiens
uggaugacaaugaauugaauaucuaauaagga

SEQ ID NO: 25897 - RNA, 32 nt, Homo Sapiens
gggaaagacagaggugggaggauugagugagg

SEQ ID NO: 25898 - RNA, 32 nt, Homo Sapiens
uuuugaacaauuuuugcaaguuugcagcuguu

SEQ ID NO: 25899 - RNA, 32 nt, Homo Sapiens
uuccgggggcuuuggcaccuggcggacccucc

SEQ ID NO: 25900 - RNA, 32 nt, Homo Sapiens
aaggcacacauuugagaagaugagauuaaggu

SEQ ID NO: 25901 - RNA, 32 nt, Homo Sapiens
ggaaauggaaacaguagugggguucacaugug

SEQ ID NO: 25902 - RNA, 32 nt, Homo Sapiens
ucuaggaauguaaaagugauucuaaacuaaga

SEQ ID NO: 25903 - RNA, 32 nt, Homo Sapiens
uucuuuuaauuuuugaaagaugaacugcuucc

SEQ ID NO: 25904 - RNA, 32 nt, Homo Sapiens
cuggcaacacaagcaccagcugcggggacucc

SEQ ID NO: 25905 - RNA, 31 nt, Homo Sapiens
gugggccugccggucaggucgggcaccuacu

SEQ ID NO: 25906 - RNA, 32 nt, Homo Sapiens
gugcagcuccucuucggggaucuugcccugcc

SEQ ID NO: 25907 - RNA, 32 nt, Homo Sapiens
gcccucuggaauugugcuccucacaaaguuuc

SEQ ID NO: 25908 - RNA, 29 nt, Homo Sapiens
uuuauaaaaacaaacaaacaaacaaaaaa

SEQ ID NO: 25909 - RNA, 32 nt, Homo Sapiens
aaauaggacaaaucauuuaugugugaguuucu

SEQ ID NO: 25910 - RNA, 32 nt, Homo Sapiens
ucgcgcucgugggguuggccaagcucucggag

SEQ ID NO: 25911 - RNA, 32 nt, Homo Sapiens
cacuuggcuggcuuaugccucugagaucggug

SEQ ID NO: 25912 - RNA, 32 nt, Homo Sapiens
cccuccagccugggaucucacugcucugcaca

SEQ ID NO: 25913 - RNA, 32 nt, Homo Sapiens
caccugcgggugcccgcacgccuggaacaugg

SEQ ID NO: 25914 - RNA, 31 nt, Homo Sapiens
agcgcggugggugcggcugugagacggcagg

SEQ ID NO: 25915 - RNA, 32 nt, Homo Sapiens
cccaacaauggggacccugggguggcuccugg

SEQ ID NO: 25916 - RNA, 32 nt, Homo Sapiens
cacccaaagggagaggagcggaagaccuucug

SEQ ID NO: 25917 - RNA, 32 nt, Homo Sapiens
aaucucguaagcagugaacccccucagaucag

SEQ ID NO: 25918 - RNA, 32 nt, Homo Sapiens
cuuugcuuuuguaacgcagacaucagcuuuac

SEQ ID NO: 25919 - RNA, 32 nt, Homo Sapiens
guccaucugagcuggcugugggcugagauccu

SEQ ID NO: 25920 - RNA, 32 nt, Homo Sapiens
uggaaguaugcgagacuuaagagcucaaguga

SEQ ID NO: 25921 - RNA, 32 nt, Homo Sapiens
uguucaauuguauuaaaacaaacaagcuuuuc

SEQ ID NO: 25922 - RNA, 32 nt, Homo Sapiens
cccuccacuaaaucuacucucuauucaguauc

SEQ ID NO: 25923 - RNA, 32 nt, Homo Sapiens
gccaccagcuugcgguaguagcaagaugcuua

SEQ ID NO: 25924 - RNA, 32 nt, Homo Sapiens
aauuuuugccaggacuaacaaaacucaguccu

SEQ ID NO: 25925 - RNA, 32 nt, Homo Sapiens
cucgucgggccucagcugcggccacagcucca

SEQ ID NO: 25926 - RNA, 32 nt, Homo Sapiens
uuugagacuguaaaaacagaaacugcagcaag

SEQ ID NO: 25927 - RNA, 32 nt, Homo Sapiens
gacccagaacugagccugggagggauccgaca

SEQ ID NO: 25928 - RNA, 32 nt, Homo Sapiens
caccaccuucccuccucuccagcccucccagc

SEQ ID NO: 25929 - RNA, 32 nt, Homo Sapiens
ugggaucauuguguaugaaaagaaaaacuuua

SEQ ID NO: 25930 - RNA, 32 nt, Homo Sapiens
agaucaguugcuauauuuucugguguaggguc

SEQ ID NO: 25931 - RNA, 32 nt, Homo Sapiens
gugugacucugcagcuccuggccagcugauuc

SEQ ID NO: 25932 - RNA, 32 nt, Homo Sapiens
aacgagcgggcgcauuguuguccgcuugugug

SEQ ID NO: 25933 - RNA, 32 nt, Homo Sapiens
accauagaaaguagccaaaaaauacauaucau

SEQ ID NO: 25934 - RNA, 29 nt, Homo Sapiens
uuaguauuuuguauguauguacaggcugu

SEQ ID NO: 25935 - RNA, 32 nt, Homo Sapiens
cggggcuuggcugccagcuccgcggcccgggc

SEQ ID NO: 25936 - RNA, 32 nt, Homo Sapiens
gucucauacaaaaagauauuuuuuacacaguu

SEQ ID NO: 25937 - RNA, 32 nt, Homo Sapiens
gcagcuguaugaaauaaaugcugagugagccc

SEQ ID NO: 25938 - RNA, 32 nt, Homo Sapiens
gaagucuguacagauagaaucccuaccccugc

SEQ ID NO: 25939 - RNA, 32 nt, Homo Sapiens
acucugcauucccaugagggcaaaggcagcug

SEQ ID NO: 25940 - RNA, 32 nt, Homo Sapiens
aaggggaaggcuggagauaggagggggacugg

SEQ ID NO: 25941 - RNA, 32 nt, Homo Sapiens
cggcaccccucccccucgggcgccagccccac

SEQ ID NO: 25942 - RNA, 32 nt, Homo Sapiens
cugugggcacuagguguaaaaggugcuggcca

SEQ ID NO: 25943 - RNA, 32 nt, Homo Sapiens
agcaggauguuguaacgggaaaugucagaaau

SEQ ID NO: 25944 - RNA, 32 nt, Homo Sapiens
aagcaguuggguucgcccacacggugugccuc

SEQ ID NO: 25945 - RNA, 32 nt, Homo Sapiens
cuggacuucguuuuuacuuaaucuucaaugga

SEQ ID NO: 25946 - RNA, 28 nt, Homo Sapiens
accaugaggcgagggccccggagccugc

SEQ ID NO: 25947 - RNA, 32 nt, Homo Sapiens
ccacagggauuccacaucaaggugcuguucca

SEQ ID NO: 25948 - RNA, 32 nt, Homo Sapiens
uucuacaugaccauaaaaccucgaagaugggu

SEQ ID NO: 25949 - RNA, 32 nt, Homo Sapiens
agggccuuguggaggacacgggccgcaccaca

SEQ ID NO: 25950 - RNA, 32 nt, Homo Sapiens
uagagacaggguuuuaccauguuggucagguu

SEQ ID NO: 25951 - RNA, 32 nt, Homo Sapiens
gaagagaaggagacaaaugcugauugggaugg

SEQ ID NO: 25952 - RNA, 32 nt, Homo Sapiens
auuguguguguccuuuugauaauauucacagg

SEQ ID NO: 25953 - RNA, 32 nt, Homo Sapiens
cucagagucccgagacacagacaugaacacca

SEQ ID NO: 25954 - RNA, 32 nt, Homo Sapiens
caggucgcuguugguccacgccgcccgucgcg

SEQ ID NO: 25955 - RNA, 32 nt, Homo Sapiens
agcaauggaaauguuauauguuuuugacauuu

SEQ ID NO: 25956 - RNA, 32 nt, Homo Sapiens
cgccugcagucccagcacuuugggaggccaag

SEQ ID NO: 25957 - RNA, 32 nt, Homo Sapiens
uucaguccccagagcaggccguacccugcugu

SEQ ID NO: 25958 - RNA, 32 nt, Homo Sapiens
uaauugauccugaaaaacguguuccuacucaa

SEQ ID NO: 25959 - RNA, 30 nt, Homo Sapiens
guauuucauaucuauuuaaaaaaugaaaaa

SEQ ID NO: 25960 - RNA, 32 nt, Homo Sapiens
uuguagccgggaaugcugcugcugcugcugcu

SEQ ID NO: 25961 - RNA, 32 nt, Homo Sapiens
gcuacaugaaaauauuguuuucuuuuuugcuu

SEQ ID NO: 25962 - RNA, 31 nt, Homo Sapiens
agagugugguggcuucucagaguuuccaagc

SEQ ID NO: 25963 - RNA, 32 nt, Homo Sapiens
cgcacuguggagguggagugcagcauuugacc

SEQ ID NO: 25964 - RNA, 32 nt, Homo Sapiens
aguuucugguuuuuaagaugaacauaaaagug

SEQ ID NO: 25965 - RNA, 32 nt, Homo Sapiens
uuucugugcucucuccuuccugaagcgcaggc

SEQ ID NO: 25966 - RNA, 32 nt, Homo Sapiens
aaaugaguugauuugcagaugacucauaacua

SEQ ID NO: 25967 - RNA, 32 nt, Homo Sapiens
gagccauguggagagcucauggccugucuaaa

SEQ ID NO: 25968 - RNA, 32 nt, Homo Sapiens
ccucgguggccauuuccagcagcccucauccu

SEQ ID NO: 25969 - RNA, 29 nt, Homo Sapiens
ucuagcugcguacugacuauaaaauagau

SEQ ID NO: 25970 - RNA, 28 nt, Homo Sapiens
guaucauugcucuaaauguguuucugcu

SEQ ID NO: 25971 - RNA, 32 nt, Homo Sapiens
ucuggcugguucugcccuuaccccuccugccc

SEQ ID NO: 25972 - RNA, 32 nt, Homo Sapiens
guuuucaccauguuggcuaggcuggucuugaa

SEQ ID NO: 25973 - RNA, 32 nt, Homo Sapiens
uaaaaacacacacacacacacacacacacgga

SEQ ID NO: 25974 - RNA, 30 nt, Homo Sapiens
aucagagacccugccacccauuccaucucc

SEQ ID NO: 25975 - RNA, 32 nt, Homo Sapiens
ccaggaucccaggggcccaaggcggccccucc

SEQ ID NO: 25976 - RNA, 32 nt, Homo Sapiens
augauaaaaaugcaaauucugaaaauaagaug

SEQ ID NO: 25977 - RNA, 32 nt, Homo Sapiens
agagcaagggaagaggugaggaacuucaggug

SEQ ID NO: 25978 - RNA, 32 nt, Homo Sapiens
uuuaaccaaacugaaguacauaaagaccaugu

SEQ ID NO: 25979 - RNA, 32 nt, Homo Sapiens
gccugugucuucacacaacaaacaccaccuga

SEQ ID NO: 25980 - RNA, 32 nt, Homo Sapiens
aagaagaggaagacuccaggagggguauagau

SEQ ID NO: 25981 - RNA, 32 nt, Homo Sapiens
gacuucccugaacacaucuucauuaugauuca

SEQ ID NO: 25982 - RNA, 30 nt, Homo Sapiens
guugcauuuauaaggggggaaaugugguuu

SEQ ID NO: 25983 - RNA, 32 nt, Homo Sapiens
gccaaggaacaaugaaguagaauauaauguau

SEQ ID NO: 25984 - RNA, 32 nt, Homo Sapiens
gguggcaugcguguguagucgaagcuacucag

SEQ ID NO: 25985 - RNA, 32 nt, Homo Sapiens
caaagaaaaugugguuucugcuguccuuucuc

SEQ ID NO: 25986 - RNA, 32 nt, Homo Sapiens
gagaccagacuuggcagcacguggugaggcug

SEQ ID NO: 25987 - RNA, 32 nt, Homo Sapiens
uaguggccagcauccuccugcugcaggaagug

SEQ ID NO: 25988 - RNA, 32 nt, Homo Sapiens
ucuuaggaucaucaaaagaaaaagaggauuug

SEQ ID NO: 25989 - RNA, 32 nt, Homo Sapiens
gcagagacagagcucucccacucucagacccu

SEQ ID NO: 25990 - RNA, 32 nt, Homo Sapiens
cgggcgggcaggcuuuggagcggcaguuuuuu

SEQ ID NO: 25991 - RNA, 32 nt, Homo Sapiens
aucaacaggaaauaaaacuguguaugagccca

SEQ ID NO: 25992 - RNA, 32 nt, Homo Sapiens
uugaauguacaucuaccccagccccucaaaag

SEQ ID NO: 25993 - RNA, 32 nt, Homo Sapiens
aaucgaggaggugggacgggcugggcccugug

SEQ ID NO: 25994 - RNA, 32 nt, Homo Sapiens
aaggcgggcgcugggggcgcugcggccgcugc

SEQ ID NO: 25995 - RNA, 32 nt, Homo Sapiens
gagccgccagcauggaugacaucuacaaggcu

SEQ ID NO: 25996 - RNA, 32 nt, Homo Sapiens
gcucucccuggcccugaagccaucgccggggc

SEQ ID NO: 25997 - RNA, 32 nt, Homo Sapiens
cauguuuucuucugccguauccauaguucaaa

SEQ ID NO: 25998 - RNA, 31 nt, Homo Sapiens
aagaaaaaugaaguaaaacaucugaaaccuu

SEQ ID NO: 25999 - RNA, 31 nt, Homo Sapiens
uacgugcacaauuguaauuaaguauguugca

SEQ ID NO: 26000 - RNA, 32 nt, Homo Sapiens
auuuaucucugauggcacuuugagggaaaaga

SEQ ID NO: 26001 - RNA, 32 nt, Homo Sapiens
gauguaaaacaucuuacuuagauggcagaacc

SEQ ID NO: 26002 - RNA, 30 nt, Homo Sapiens
gagugcucuugagccacccauuuggaauuu

SEQ ID NO: 26003 - RNA, 32 nt, Homo Sapiens
ccaaauguuccauaugugggugucagucaggg

SEQ ID NO: 26004 - RNA, 32 nt, Homo Sapiens
gagauuuaccuaaaaacaaaggaaggaaaguc

SEQ ID NO: 26005 - RNA, 32 nt, Homo Sapiens
aauuagcuggguuugguggcgcaugcuuguaa

SEQ ID NO: 26006 - RNA, 32 nt, Homo Sapiens
augacaggcagacaauaauaguuacacacguu

SEQ ID NO: 26007 - RNA, 32 nt, Homo Sapiens
uaacacggugaaaccccauuuccacuaaaaau

SEQ ID NO: 26008 - RNA, 30 nt, Homo Sapiens
auuugcuguguaugugcagaaguauuauag

SEQ ID NO: 26009 - RNA, 32 nt, Homo Sapiens
aauucugcaaauuaaugacaacucaugccuua

SEQ ID NO: 26010 - RNA, 32 nt, Homo Sapiens
agaggacccccugcgaucuacucuguaaggau

SEQ ID NO: 26011 - RNA, 32 nt, Homo Sapiens
cuguaguuugguuuuuauauuuuuauucuuca

SEQ ID NO: 26012 - RNA, 32 nt, Homo Sapiens
ccccuggggcugggaggcuccauccgaccaau

SEQ ID NO: 26013 - RNA, 32 nt, Homo Sapiens
cuucuaaacacuucugaauuuuaaauugcuac

SEQ ID NO: 26014 - RNA, 32 nt, Homo Sapiens
aaagucacccucgcgggcugggccuuccacgc

SEQ ID NO: 26015 - RNA, 32 nt, Homo Sapiens
uuaaaauacuuauuuuacuuucuagaccuagg

SEQ ID NO: 26016 - RNA, 32 nt, Homo Sapiens
cauaccuuaugaaguuaaaauaaaauauaacg

SEQ ID NO: 26017 - RNA, 32 nt, Homo Sapiens
gagagagacagagaggaagugcaggucuaacc

SEQ ID NO: 26018 - RNA, 32 nt, Homo Sapiens
ccacaugccaacccucaccuccccgaggacug

SEQ ID NO: 26019 - RNA, 32 nt, Homo Sapiens
cugucagacaccuguccuuccuucuacagacc

SEQ ID NO: 26020 - RNA, 32 nt, Homo Sapiens
gacccgcgggagggagcgccucgccagaccca

SEQ ID NO: 26021 - RNA, 32 nt, Homo Sapiens
aaaccaaggggagaggagaacuguuacagaug

SEQ ID NO: 26022 - RNA, 28 nt, Homo Sapiens
acauagcaauaaaaacaugucauuuucc

SEQ ID NO: 26023 - RNA, 32 nt, Homo Sapiens
cggggaagguguagcucuguucucuucggaag

SEQ ID NO: 26024 - RNA, 32 nt, Homo Sapiens
caaauacaaaaauuuuuaauaaaauauuaaag

SEQ ID NO: 26025 - RNA, 32 nt, Homo Sapiens
ggaugagcugcagcugcagguguuccagugug

SEQ ID NO: 26026 - RNA, 32 nt, Homo Sapiens
uuaacauuucaaaaguuuuucguauuuuuuua

SEQ ID NO: 26027 - RNA, 32 nt, Homo Sapiens
uuccagaaaaauuucccuugaggaaaaauguc

SEQ ID NO: 26028 - RNA, 32 nt, Homo Sapiens
agacuauacugugucaauaucuguaaaaagag

SEQ ID NO: 26029 - RNA, 32 nt, Homo Sapiens
ucggaccugagcgccuucggcggcgcggcgcg

SEQ ID NO: 26030 - RNA, 32 nt, Homo Sapiens
cccggcugucuccagcuuccuuacucucuuuu

SEQ ID NO: 26031 - RNA, 32 nt, Homo Sapiens
auccacacauaaacggcaguguuaaaacauga

SEQ ID NO: 26032 - RNA, 32 nt, Homo Sapiens
gugaagugucauuggcaugucuggcaguaguc

SEQ ID NO: 26033 - RNA, 32 nt, Homo Sapiens
cugacuucgugcaacuuuuccuccccauccug

SEQ ID NO: 26034 - RNA, 32 nt, Homo Sapiens
uuccgacgcgccggagaucgcgcgacgaaucu

SEQ ID NO: 26035 - RNA, 32 nt, Homo Sapiens
cucaugccgccgccucccccagcccuggugga

SEQ ID NO: 26036 - RNA, 32 nt, Homo Sapiens
ugugucuuaagagcugccaucccggcuggccg

SEQ ID NO: 26037 - RNA, 32 nt, Homo Sapiens
ggcagucagggagggagggagugucccaccac

SEQ ID NO: 26038 - RNA, 32 nt, Homo Sapiens
uuaccacuguacacaaaucuaaucaauaaaaa

SEQ ID NO: 26039 - RNA, 32 nt, Homo Sapiens
agggguugggggugggggacagguuucugaaa

SEQ ID NO: 26040 - RNA, 32 nt, Homo Sapiens
guccagauaggaccagggggucucacuuuggc

SEQ ID NO: 26041 - RNA, 32 nt, Homo Sapiens
aaaagucuaugcauggaggaaauguucauuca

SEQ ID NO: 26042 - RNA, 32 nt, Homo Sapiens
ccgcacccgagaccucgcgcgccgccgcugcc

SEQ ID NO: 26043 - RNA, 32 nt, Homo Sapiens
gucacuuuugcuggcaggccgagauuagggca

SEQ ID NO: 26044 - RNA, 32 nt, Homo Sapiens
cagcgguuggucauugacgagaucucaauggu

SEQ ID NO: 26045 - RNA, 30 nt, Homo Sapiens
aaaaguuuauuaccaaacaagaguauuuuu

SEQ ID NO: 26046 - RNA, 32 nt, Homo Sapiens
cuccgagugcggggcgggaggggccugcgcgg

SEQ ID NO: 26047 - RNA, 32 nt, Homo Sapiens
acagcacuuccacucucacuucuccacucucu

SEQ ID NO: 26048 - RNA, 28 nt, Homo Sapiens
uuuacuuuguuagccauguguuuaugaa

SEQ ID NO: 26049 - RNA, 32 nt, Homo Sapiens
ucccugucugaagagggagaugagagagcucu

SEQ ID NO: 26050 - RNA, 32 nt, Homo Sapiens
uuucuucuuuugcucucagaguuaccuuguua

SEQ ID NO: 26051 - RNA, 32 nt, Homo Sapiens
uacauuauauauauuuuauaaagauacuaaac

SEQ ID NO: 26052 - RNA, 32 nt, Homo Sapiens
uuuucauuuggagcuagaaaucaauagucuau

SEQ ID NO: 26053 - RNA, 32 nt, Homo Sapiens
cuaggagggcuguuggccugcugcugugcugc

SEQ ID NO: 26054 - RNA, 32 nt, Homo Sapiens
cccgcgcucucgcaccuuccacagcacggcau

SEQ ID NO: 26055 - RNA, 32 nt, Homo Sapiens
cauugucuaccaacuuuuuacauauuggaaaa

SEQ ID NO: 26056 - RNA, 32 nt, Homo Sapiens
gaagcuuaccaaucuguaaauuguguagucca

SEQ ID NO: 26057 - RNA, 32 nt, Homo Sapiens
gcuaaagugucuacgaucaauucagauuugga

SEQ ID NO: 26058 - RNA, 32 nt, Homo Sapiens
cuaagacgccaggaaccccuggaagccuagaa

SEQ ID NO: 26059 - RNA, 32 nt, Homo Sapiens
cuggaaggagcggaauucacccugcccaagau

SEQ ID NO: 26060 - RNA, 32 nt, Homo Sapiens
uagccauuaggaccacaaauggacaugucagu

SEQ ID NO: 26061 - RNA, 32 nt, Homo Sapiens
acagggcuggaccucacgcagacuggcauggc

SEQ ID NO: 26062 - RNA, 32 nt, Homo Sapiens
ggagacuggaaguuuaaaaauguacaaguccu

SEQ ID NO: 26063 - RNA, 32 nt, Homo Sapiens
cagcgccgccgccugcggucucccaggccgua

SEQ ID NO: 26064 - RNA, 32 nt, Homo Sapiens
aaagcaaaaaugauaaugcugauaaaacagac

SEQ ID NO: 26065 - RNA, 32 nt, Homo Sapiens
acaggcgcccgccaccugggauuacgggcgcc

SEQ ID NO: 26066 - RNA, 32 nt, Homo Sapiens
ccgcucgucuucgcagcacagcagccggaaag

SEQ ID NO: 26067 - RNA, 32 nt, Homo Sapiens
cuuuguuucuuugccugcuuauacuggccaua

SEQ ID NO: 26068 - RNA, 32 nt, Homo Sapiens
guaaaaugcacccaucagcacucuguaaaacg

SEQ ID NO: 26069 - RNA, 32 nt, Homo Sapiens
gucuggcagaauccaggaccgggauuacccuu

SEQ ID NO: 26070 - RNA, 32 nt, Homo Sapiens
ucaagcgauccccccacccccagccccgucuc

SEQ ID NO: 26071 - RNA, 32 nt, Homo Sapiens
auuuaaaacaaauuuaaaggaucuguuaauuc

SEQ ID NO: 26072 - RNA, 32 nt, Homo Sapiens
ccgguggauccucaaacaacacuggugugacc

SEQ ID NO: 26073 - RNA, 32 nt, Homo Sapiens
aaccaaaagggagucucccaugauggggugga

SEQ ID NO: 26074 - RNA, 32 nt, Homo Sapiens
uuccucucacacgaaacccccaucagucccuu

SEQ ID NO: 26075 - RNA, 32 nt, Homo Sapiens
cgcgguaggcggugggcaaggcugcccugggc

SEQ ID NO: 26076 - RNA, 32 nt, Homo Sapiens
gagacuacaauuucuuucuccucggcucagcu

SEQ ID NO: 26077 - RNA, 31 nt, Homo Sapiens
cugcgggagcgcagcagccugacgcuagagg

SEQ ID NO: 26078 - RNA, 32 nt, Homo Sapiens
uuuuggauguaaagauuccugugucucauaau

SEQ ID NO: 26079 - RNA, 32 nt, Homo Sapiens
gaagguggagaagccagaguaugaguggaaug

SEQ ID NO: 26080 - RNA, 32 nt, Homo Sapiens
uaaugugugucugcaacaucgaacuuguucau

SEQ ID NO: 26081 - RNA, 32 nt, Homo Sapiens
uguugcacauucuauaguugcaaaacacauaa

SEQ ID NO: 26082 - RNA, 32 nt, Homo Sapiens
aaugugcauagaucaauuuguacuacuuuggu

SEQ ID NO: 26083 - RNA, 32 nt, Homo Sapiens
ucuuuuccuucauguuggaaaacuacacacau

SEQ ID NO: 26084 - RNA, 32 nt, Homo Sapiens
uuucuuuaauaaaaauggaacaaguuuucauu

SEQ ID NO: 26085 - RNA, 32 nt, Homo Sapiens
aaauacacagaugugccagacuucugagaagc

SEQ ID NO: 26086 - RNA, 32 nt, Homo Sapiens
agaaacuaucaugagcauccauacguggcagg

SEQ ID NO: 26087 - RNA, 32 nt, Homo Sapiens
cucagaacucaucaaaaaguccucaggaggcu

SEQ ID NO: 26088 - RNA, 32 nt, Homo Sapiens
cacuggaaucgaucuguacuguaauuuuguuu

SEQ ID NO: 26089 - RNA, 32 nt, Homo Sapiens
aguguccgucgcguccgccgcgccccgggcgg

SEQ ID NO: 26090 - RNA, 32 nt, Homo Sapiens
cggaguucuggagucucggacccgaagccgcc

SEQ ID NO: 26091 - RNA, 32 nt, Homo Sapiens
ccucuaucauguggaacagcucugacgccaac

SEQ ID NO: 26092 - RNA, 32 nt, Homo Sapiens
gcucuccagcaucuucuguuuccuggcaagug

SEQ ID NO: 26093 - RNA, 32 nt, Homo Sapiens
agagccgcgcgcuagagcgacccggcgaggga

SEQ ID NO: 26094 - RNA, 32 nt, Homo Sapiens
cuccggagcugccugcucuaugcccugagacc

SEQ ID NO: 26095 - RNA, 32 nt, Homo Sapiens
ucuguuaaaagugggccuucuaucuuggaugg

SEQ ID NO: 26096 - RNA, 32 nt, Homo Sapiens
ggaaaauccaaauaagauuucuacauuguauc

SEQ ID NO: 26097 - RNA, 32 nt, Homo Sapiens
uccagcaaagcuuccaggugugucucaggaau

SEQ ID NO: 26098 - RNA, 32 nt, Homo Sapiens
ugaugucccccggcccggguucuggggccccu

SEQ ID NO: 26099 - RNA, 32 nt, Homo Sapiens
aaaaauguauaaauaaggaacugaagguuaau

SEQ ID NO: 26100 - RNA, 32 nt, Homo Sapiens
guagauccacuggcagcuugcacucucagccu

SEQ ID NO: 26101 - RNA, 32 nt, Homo Sapiens
agaaaaggauaaauaaaucagagauuuuauua

SEQ ID NO: 26102 - RNA, 32 nt, Homo Sapiens
aauagaguucaaggacagucuuucucuggugu

SEQ ID NO: 26103 - RNA, 28 nt, Homo Sapiens
uguauaagguguuaacauugggggaggc

SEQ ID NO: 26104 - RNA, 32 nt, Homo Sapiens
gguuauccuaaaacaauaggguuuagguugug

SEQ ID NO: 26105 - RNA, 32 nt, Homo Sapiens
uacuuuucgccccgcgucuccuccgccugcuc

SEQ ID NO: 26106 - RNA, 32 nt, Homo Sapiens
cgugaggggaggaggccgaggaggacgcggcg

SEQ ID NO: 26107 - RNA, 32 nt, Homo Sapiens
cauccauccucccagacagugcugaagggcau

SEQ ID NO: 26108 - RNA, 32 nt, Homo Sapiens
uugcuuugaugaaagaaaaauguuuaaaaucc

SEQ ID NO: 26109 - RNA, 32 nt, Homo Sapiens
agccugaccaacguggagaaaccccgucucua

SEQ ID NO: 26110 - RNA, 32 nt, Homo Sapiens
aaagacagccugcagcccuuucugcauggggu

SEQ ID NO: 26111 - RNA, 32 nt, Homo Sapiens
caauuucccuucauauggauaugauuccaguc

SEQ ID NO: 26112 - RNA, 32 nt, Homo Sapiens
ggguccuaguuugcaccuagaauaugaggcaa

SEQ ID NO: 26113 - RNA, 32 nt, Homo Sapiens
cgccgccguugcgcagauccgggccgcggcug

SEQ ID NO: 26114 - RNA, 32 nt, Homo Sapiens
gguacugcuaaauuauuugauaugaacucaau

SEQ ID NO: 26115 - RNA, 32 nt, Homo Sapiens
cguccugcucgaugcccggcccugggcaucgg

SEQ ID NO: 26116 - RNA, 32 nt, Homo Sapiens
cccaguauguucuucuuuuuuauguaagggac

SEQ ID NO: 26117 - RNA, 32 nt, Homo Sapiens
ggcuggcgcugcugcccggccggagccagggg

SEQ ID NO: 26118 - RNA, 32 nt, Homo Sapiens
agggacugcacuuucuggggccccccgggaga

SEQ ID NO: 26119 - RNA, 32 nt, Homo Sapiens
guguucauucauuuaauucuuaccacaacccu

SEQ ID NO: 26120 - RNA, 32 nt, Homo Sapiens
auuucuaaacuuuaucuuaauaccugucacau

SEQ ID NO: 26121 - RNA, 32 nt, Homo Sapiens
cugguuguggucaagacuggaugauguaacug

SEQ ID NO: 26122 - RNA, 32 nt, Homo Sapiens
aggaagggcagcuuggcagagccucaggaugg

SEQ ID NO: 26123 - RNA, 32 nt, Homo Sapiens
aucaacuugacaaaggagugugguaucggacg

SEQ ID NO: 26124 - RNA, 32 nt, Homo Sapiens
acuccgcccggcugcccagagcccggcgagga

SEQ ID NO: 26125 - RNA, 32 nt, Homo Sapiens
aguuaacugacuauagauuguuuucuaugcca

SEQ ID NO: 26126 - RNA, 32 nt, Homo Sapiens
gcacaaccaaccccuagaagccguggagucag

SEQ ID NO: 26127 - RNA, 32 nt, Homo Sapiens
ugguaugaagccagaccuccccggcgggccuc

SEQ ID NO: 26128 - RNA, 32 nt, Homo Sapiens
ggggucugcagcggcagagcaauuccaggcug

SEQ ID NO: 26129 - RNA, 32 nt, Homo Sapiens
cugcuugugaauuuucugagacggauguaaca

SEQ ID NO: 26130 - RNA, 32 nt, Homo Sapiens
aguguccuauaaauaauguaagagcaggauuu

SEQ ID NO: 26131 - RNA, 32 nt, Homo Sapiens
agacuggauaagcgugaccagucaacaauucc

SEQ ID NO: 26132 - RNA, 32 nt, Homo Sapiens
agccuuccuugacuacccaucauauucagugu

SEQ ID NO: 26133 - RNA, 32 nt, Homo Sapiens
gccccccaaacugaugaguccgggagaauaua

SEQ ID NO: 26134 - RNA, 32 nt, Homo Sapiens
gcaucagugaucucagaaaauaaauugcuaau

SEQ ID NO: 26135 - RNA, 32 nt, Homo Sapiens
gugguaaggggagaccggggagucaguuucag

SEQ ID NO: 26136 - RNA, 30 nt, Homo Sapiens
gugacguuggcugcugcagaaggaguucac

SEQ ID NO: 26137 - RNA, 32 nt, Homo Sapiens
augaaugcuuugcauuaacuuaaacacaacuu

SEQ ID NO: 26138 - RNA, 32 nt, Homo Sapiens
gccugguuccugcagcacaucaucgucaggga

SEQ ID NO: 26139 - RNA, 32 nt, Homo Sapiens
ccaaugacaaaguggaagaauuuagagccuuc

SEQ ID NO: 26140 - RNA, 32 nt, Homo Sapiens
uuaaguagaaauggcaaaguugcuuuguuggg

SEQ ID NO: 26141 - RNA, 32 nt, Homo Sapiens
gaagaccuugguuugguuuaugugucaguuuc

SEQ ID NO: 26142 - RNA, 32 nt, Homo Sapiens
uacaugaacacgucuuguuuggagguaccgga

SEQ ID NO: 26143 - RNA, 29 nt, Homo Sapiens
caagucaucccucagugaaagcaccaguc

SEQ ID NO: 26144 - RNA, 32 nt, Homo Sapiens
cgcucuccacacuuagccggcgcugccucacg

SEQ ID NO: 26145 - RNA, 30 nt, Homo Sapiens
auguggguggguggcauggacuuuuuuuuu

SEQ ID NO: 26146 - RNA, 32 nt, Homo Sapiens
guacaucaaauuauaaaugcaaaacagguuca

SEQ ID NO: 26147 - RNA, 32 nt, Homo Sapiens
ggagaaaauuuauauucaaguagccuauuuua

SEQ ID NO: 26148 - RNA, 32 nt, Homo Sapiens
gaaugccaugucaccccugagcagaagcaguc

SEQ ID NO: 26149 - RNA, 32 nt, Homo Sapiens
acuuuucaguuauaaauugaugaauaucuuug

SEQ ID NO: 26150 - RNA, 32 nt, Homo Sapiens
aggcgggaggagggggcgcggcugggcugcug

SEQ ID NO: 26151 - RNA, 32 nt, Homo Sapiens
aagggagaggagaggauugauagaguguugca

SEQ ID NO: 26152 - RNA, 32 nt, Homo Sapiens
uuuguuaauguuugucuguuauacauagcacu

SEQ ID NO: 26153 - RNA, 32 nt, Homo Sapiens
cauaaagacaggauugugcaaucuaaguugau

SEQ ID NO: 26154 - RNA, 32 nt, Homo Sapiens
cauucagcaauaggacacgaaaggcauagaag

SEQ ID NO: 26155 - RNA, 32 nt, Homo Sapiens
aacuagguccuggguuucauguuuccugcugc

SEQ ID NO: 26156 - RNA, 32 nt, Homo Sapiens
uguuguaacaauaauccauuguuugaggugcu

SEQ ID NO: 26157 - RNA, 32 nt, Homo Sapiens
gauccuaucucacugcuuuugugaggauuaca

SEQ ID NO: 26158 - RNA, 31 nt, Homo Sapiens
auugagugaaacaaucuuuguacaaugacua

SEQ ID NO: 26159 - RNA, 32 nt, Homo Sapiens
ugcacgugucccuacaccuggaguccucugcu

SEQ ID NO: 26160 - RNA, 32 nt, Homo Sapiens
agguccagaguaugagugcaagcaaagcagaa

SEQ ID NO: 26161 - RNA, 32 nt, Homo Sapiens
gaccaagcacaccuuuucauccagucucagcg

SEQ ID NO: 26162 - RNA, 32 nt, Homo Sapiens
uguggcaaagcuuuuaaccaguccucaaacuu

SEQ ID NO: 26163 - RNA, 32 nt, Homo Sapiens
acuguuuaguaaaggggaucuauuuugugugu

SEQ ID NO: 26164 - RNA, 32 nt, Homo Sapiens
cagaaaaacauugauuuuuuuauaucuuucau

SEQ ID NO: 26165 - RNA, 32 nt, Homo Sapiens
gucagggugggaagaaagaaugcaagagugga

SEQ ID NO: 26166 - RNA, 32 nt, Homo Sapiens
uuuuaguagagacgggguuuugccauguuggc

SEQ ID NO: 26167 - RNA, 32 nt, Homo Sapiens
acaauguggccacugagcggcuccaucugaag

SEQ ID NO: 26168 - RNA, 31 nt, Homo Sapiens
cccccgcucccuuccacuccaaggagcgagg

SEQ ID NO: 26169 - RNA, 32 nt, Homo Sapiens
caccuccucccgccaggcgcuuucucggacgc

SEQ ID NO: 26170 - RNA, 32 nt, Homo Sapiens
cgaugugaugugcaggcccacuucuuacccca

SEQ ID NO: 26171 - RNA, 32 nt, Homo Sapiens
cacgggcagcgggcucuuucuggcgcccugug

SEQ ID NO: 26172 - RNA, 32 nt, Homo Sapiens
uuuguuugacauuccauguuaaacuacgguca

SEQ ID NO: 26173 - RNA, 32 nt, Homo Sapiens
cugccugaagccacaagcuagcagggagugga

SEQ ID NO: 26174 - RNA, 32 nt, Homo Sapiens
gauguuucugauaauacgagaauugaaaacuu

SEQ ID NO: 26175 - RNA, 32 nt, Homo Sapiens
gaggcgugcggccgagguucugcagccagagg

SEQ ID NO: 26176 - RNA, 32 nt, Homo Sapiens
ucuccuuacugggauagucagguaaacaguug

SEQ ID NO: 26177 - RNA, 32 nt, Homo Sapiens
gagagcuccuggaugcgccaggcgcugcaggc

SEQ ID NO: 26178 - RNA, 32 nt, Homo Sapiens
ucugcgggaggcggguuauggcggcggcggca

SEQ ID NO: 26179 - RNA, 32 nt, Homo Sapiens
guaacaaauccauuucccuccucccucccucc

SEQ ID NO: 26180 - RNA, 32 nt, Homo Sapiens
gaagcuauuuuugucucuggguuccaguuaca

SEQ ID NO: 26181 - RNA, 32 nt, Homo Sapiens
uuuaacaggggcugggcugccuuuuucuaccu

SEQ ID NO: 26182 - RNA, 32 nt, Homo Sapiens
cugccccaccccacccuugucccuggccauug

SEQ ID NO: 26183 - RNA, 32 nt, Homo Sapiens
cuuggcucauauuucuuuucuuucucaucuug

SEQ ID NO: 26184 - RNA, 31 nt, Homo Sapiens
cgccauccccccucagcuaaaacccaaucuc

SEQ ID NO: 26185 - RNA, 32 nt, Homo Sapiens
ugagaguucugauaaaauauuuuuguauuuug

SEQ ID NO: 26186 - RNA, 32 nt, Homo Sapiens
ucaagacugaaauaguaaauggcucuugauuu

SEQ ID NO: 26187 - RNA, 32 nt, Homo Sapiens
ugccagcgggagcuccagagccugcuggugga

SEQ ID NO: 26188 - RNA, 32 nt, Homo Sapiens
uuggcuuucuaaaaaucucuuuuuagauuauu

SEQ ID NO: 26189 - RNA, 32 nt, Homo Sapiens
ccugcuucagccuccgaaagugcugggauuac

SEQ ID NO: 26190 - RNA, 32 nt, Homo Sapiens
aacuuccuccuguuugaugcuacauugaaccc

SEQ ID NO: 26191 - RNA, 32 nt, Homo Sapiens
gagagagaugaccucggaagcauuuccacaga

SEQ ID NO: 26192 - RNA, 32 nt, Homo Sapiens
ccuuaccccagaagcagcugguggcgccugac

SEQ ID NO: 26193 - RNA, 32 nt, Homo Sapiens
ccgucaccugccuugucuguucuuuauucuuc

SEQ ID NO: 26194 - RNA, 32 nt, Homo Sapiens
uuuuguggaggauuugaaguugagaucuucau

SEQ ID NO: 26195 - RNA, 32 nt, Homo Sapiens
cggccuuauauuuugauguaaauauuaaaaga

SEQ ID NO: 26196 - RNA, 32 nt, Homo Sapiens
ugcacccuguuuccuuuggauauucaguucuc

SEQ ID NO: 26197 - RNA, 32 nt, Homo Sapiens
uguggacuaggauaucugggaccgaagucuug

SEQ ID NO: 26198 - RNA, 31 nt, Homo Sapiens
ggucacaaauaaaaacaaaauucauuucaaa

SEQ ID NO: 26199 - RNA, 32 nt, Homo Sapiens
gagccgcgggaacacguccggcgugcuggugg

SEQ ID NO: 26200 - RNA, 32 nt, Homo Sapiens
gccugggcucugcccugccucagccgccuccc

SEQ ID NO: 26201 - RNA, 32 nt, Homo Sapiens
ucugcagggagcuucguagaggugaggcuggu

SEQ ID NO: 26202 - RNA, 32 nt, Homo Sapiens
ugcucauuucccaagagaucuuuauuaagcac

SEQ ID NO: 26203 - RNA, 32 nt, Homo Sapiens
agaggagaaaacugaggcgauuugccaagggg

SEQ ID NO: 26204 - RNA, 32 nt, Homo Sapiens
gcccagccccgcauccuccccgaccgugcucg

SEQ ID NO: 26205 - RNA, 32 nt, Homo Sapiens
gggcgacgcgccccgcccgcuuugcagacuuc

SEQ ID NO: 26206 - RNA, 30 nt, Homo Sapiens
uucaagggaggugucagcaguauuaucucc

SEQ ID NO: 26207 - RNA, 32 nt, Homo Sapiens
uuuucuacuuugugucauguccuguauaaaca

SEQ ID NO: 26208 - RNA, 32 nt, Homo Sapiens
aguagucggauuccggggaaaagaacaaguau

SEQ ID NO: 26209 - RNA, 32 nt, Homo Sapiens
gagauucucguuaguuacucuucagauuacau

SEQ ID NO: 26210 - RNA, 32 nt, Homo Sapiens
gcuguguuauuuacaaaaugaugcugugguuc

SEQ ID NO: 26211 - RNA, 32 nt, Homo Sapiens
guucugcuggucucccucuccccucccuuccc

SEQ ID NO: 26212 - RNA, 32 nt, Homo Sapiens
uugguccccgggcgggggaggggccgugcgca

SEQ ID NO: 26213 - RNA, 32 nt, Homo Sapiens
cacuuauugccggccagugaaggccaagcacu

SEQ ID NO: 26214 - RNA, 32 nt, Homo Sapiens
caaauaaaccacuuucuaauuuuuuccuguuu

SEQ ID NO: 26215 - RNA, 32 nt, Homo Sapiens
guguucuuugaaaaaccaagugggaaaaagua

SEQ ID NO: 26216 - RNA, 32 nt, Homo Sapiens
aguucucucagccccagguucaaccuguccug

SEQ ID NO: 26217 - RNA, 32 nt, Homo Sapiens
cacuuccugcaccuccagucuucuguguagcg

SEQ ID NO: 26218 - RNA, 32 nt, Homo Sapiens
uccguaggaugaauuagaaauaaauugugaug

SEQ ID NO: 26219 - RNA, 32 nt, Homo Sapiens
agcagcuguuuguuauugauaauaaaauauua

SEQ ID NO: 26220 - RNA, 32 nt, Homo Sapiens
acacaugcaucagcacugcacacuggaaucau

SEQ ID NO: 26221 - RNA, 32 nt, Homo Sapiens
gcgagcggcaacucccgggcuggcgcggcucg

SEQ ID NO: 26222 - RNA, 32 nt, Homo Sapiens
gagcuuugggggugggguggggguuaacuacu

SEQ ID NO: 26223 - RNA, 32 nt, Homo Sapiens
guugcaaaguuccuaauguguauuuuuaaagc

SEQ ID NO: 26224 - RNA, 32 nt, Homo Sapiens
gauuaacaggaaacuuccaagauggaaacuuu

SEQ ID NO: 26225 - RNA, 32 nt, Homo Sapiens
ugaaaggcccuuuugauauccuugauuuuuca

SEQ ID NO: 26226 - RNA, 32 nt, Homo Sapiens
caagcauacugaugaagaguuccuuaaacaag

SEQ ID NO: 26227 - RNA, 32 nt, Homo Sapiens
auacuguauaacaaauuugaauuuagaaauaa

SEQ ID NO: 26228 - RNA, 32 nt, Homo Sapiens
gauugcauucuauuuucuauaugacccucuug

SEQ ID NO: 26229 - RNA, 32 nt, Homo Sapiens
acgcagcugucauuuggcugugcgugcugaca

SEQ ID NO: 26230 - RNA, 32 nt, Homo Sapiens
cuguauuucuuacuuuaucuucauuuuuggca

SEQ ID NO: 26231 - RNA, 32 nt, Homo Sapiens
cugccuuccucccagaggguguuuccuagaaa

SEQ ID NO: 26232 - RNA, 32 nt, Homo Sapiens
cgccuccgucuuagcacccccaggugccggcg

SEQ ID NO: 26233 - RNA, 32 nt, Homo Sapiens
uacgagcccgaaguacaauuaaggggccagag

SEQ ID NO: 26234 - RNA, 29 nt, Homo Sapiens
gacuggcauuuauggugaaagcuggcugu

SEQ ID NO: 26235 - RNA, 32 nt, Homo Sapiens
ugaucugcuauggcgagcugcgcaagaagauu

SEQ ID NO: 26236 - RNA, 32 nt, Homo Sapiens
aggccguuccggccgccacagccccuccgggg

SEQ ID NO: 26237 - RNA, 32 nt, Homo Sapiens
ggcaguggguaaaaugguggacaggcaccaaa

SEQ ID NO: 26238 - RNA, 32 nt, Homo Sapiens
aaauaguaagccugaaggaaucugaaacacuu

SEQ ID NO: 26239 - RNA, 32 nt, Homo Sapiens
ccucuuugcugugggacuggcccgccaggacc

SEQ ID NO: 26240 - RNA, 30 nt, Homo Sapiens
cugcgauuucuggagcagccggcgcaccuu

SEQ ID NO: 26241 - RNA, 32 nt, Homo Sapiens
uggcgggagcgcucaagggcagcggauuuguu

SEQ ID NO: 26242 - RNA, 32 nt, Homo Sapiens
ucaguauuccaagccugggaugaugcuagaau

SEQ ID NO: 26243 - RNA, 32 nt, Homo Sapiens
ggccaaaaguucaaguuuuaucacuaacaucu

SEQ ID NO: 26244 - RNA, 32 nt, Homo Sapiens
gaccagucggugggacaagaccugaagcccug

SEQ ID NO: 26245 - RNA, 32 nt, Homo Sapiens
uccaugguuucuccaugaaacucugugguuuc

SEQ ID NO: 26246 - RNA, 32 nt, Homo Sapiens
uuauacagaaaagagguuuaauuggcucacag

SEQ ID NO: 26247 - RNA, 32 nt, Homo Sapiens
uuuguggauuuguggauagcagagggaucggg

SEQ ID NO: 26248 - RNA, 32 nt, Homo Sapiens
uuuuuucauuuuuuguuuuucuuguuuuguuu

SEQ ID NO: 26249 - RNA, 32 nt, Homo Sapiens
ugugccuucugaagcaguaucuauucacaaug

SEQ ID NO: 26250 - RNA, 32 nt, Homo Sapiens
guuggccaagggcaucuuugaugguacaagca

SEQ ID NO: 26251 - RNA, 32 nt, Homo Sapiens
agccaccgucuuuugcagaacaauugugcagg

SEQ ID NO: 26252 - RNA, 32 nt, Homo Sapiens
gagccgggcugcaccggaggcggcgagauggu

SEQ ID NO: 26253 - RNA, 32 nt, Homo Sapiens
ugggccccuggacccggccgcgcagcuggugg

SEQ ID NO: 26254 - RNA, 32 nt, Homo Sapiens
augaccugcuuaacccaaauaagaacagugau

SEQ ID NO: 26255 - RNA, 32 nt, Homo Sapiens
cuuugaauuucuuuuuacugucaucuauuauu

SEQ ID NO: 26256 - RNA, 32 nt, Homo Sapiens
ugagggaagaaugaauaagagauacaaggucu

SEQ ID NO: 26257 - RNA, 32 nt, Homo Sapiens
acuccaucauugaagagaaaccacuaccacac

SEQ ID NO: 26258 - RNA, 32 nt, Homo Sapiens
cagugcugaagaggaugcuguagucaugccca

SEQ ID NO: 26259 - RNA, 32 nt, Homo Sapiens
uuuacagaugaccauucugaugucuccuuuca

SEQ ID NO: 26260 - RNA, 32 nt, Homo Sapiens
ucacugugcugauugauuuuuaucuaaaaaaa

SEQ ID NO: 26261 - RNA, 32 nt, Homo Sapiens
uauuauuguuguuauuguuauuauuaauuggc

SEQ ID NO: 26262 - RNA, 32 nt, Homo Sapiens
gaacugucccuucugagucucccuuuucuaca

SEQ ID NO: 26263 - RNA, 32 nt, Homo Sapiens
ccccaccuggcggagcucuccuccgccuugcu

SEQ ID NO: 26264 - RNA, 32 nt, Homo Sapiens
augcacugugggauguguucuucuuucucugu

SEQ ID NO: 26265 - RNA, 32 nt, Homo Sapiens
gcuuaccuaccuuucuacugcaucauauucau

SEQ ID NO: 26266 - RNA, 32 nt, Homo Sapiens
aaaaauaaguuuauuucuuucaagguuuacaa

SEQ ID NO: 26267 - RNA, 32 nt, Homo Sapiens
gcuuugcuuuuuuaguuuuucuuuuaaaaaua

SEQ ID NO: 26268 - RNA, 32 nt, Homo Sapiens
ucuaaccuccaagcugucuuuguucauuccug

SEQ ID NO: 26269 - RNA, 32 nt, Homo Sapiens
guggcugcucuguggccugaggucuuggccaa

SEQ ID NO: 26270 - RNA, 32 nt, Homo Sapiens
gcgguucugcugugcccggcccgcgaggucua

SEQ ID NO: 26271 - RNA, 32 nt, Homo Sapiens
uuucuuugcauuccagcugucacucugugccu

SEQ ID NO: 26272 - RNA, 32 nt, Homo Sapiens
ccugggcuuuccggcccucccuacuuuuccuc

SEQ ID NO: 26273 - RNA, 32 nt, Homo Sapiens
uuuuucaacuugcuuuauaaucuccugcaucu

SEQ ID NO: 26274 - RNA, 32 nt, Homo Sapiens
aguuagccaggcauaguggugcaugccuguaa

SEQ ID NO: 26275 - RNA, 32 nt, Homo Sapiens
aucauaauuuaaaaaauauaucuagaaugggc

SEQ ID NO: 26276 - RNA, 32 nt, Homo Sapiens
cucccgcugggcugugggguugccagaagcug

SEQ ID NO: 26277 - RNA, 32 nt, Homo Sapiens
cuccgagaacacacagauugugucucauucau

SEQ ID NO: 26278 - RNA, 32 nt, Homo Sapiens
cacuggagcccgagaccccucuuccuggccau

SEQ ID NO: 26279 - RNA, 30 nt, Homo Sapiens
gacggcaugcccgugcucugcuggcccgcc

SEQ ID NO: 26280 - RNA, 32 nt, Homo Sapiens
ccgcucauggccauccuggauuuucccagugg

SEQ ID NO: 26281 - RNA, 32 nt, Homo Sapiens
aaccuggcccacgcgugcugcagaugugggga

SEQ ID NO: 26282 - RNA, 30 nt, Homo Sapiens
ccuguagacaucccugccuguagcucuucu

SEQ ID NO: 26283 - RNA, 32 nt, Homo Sapiens
cagggccccuccuggggaugcucgccagggaa

SEQ ID NO: 26284 - RNA, 32 nt, Homo Sapiens
auugggaggaagauggccugagugugcacuuu

SEQ ID NO: 26285 - RNA, 32 nt, Homo Sapiens
uuggcauacacagaaucugcacugccgguucc

SEQ ID NO: 26286 - RNA, 32 nt, Homo Sapiens
gugcuccuaccuuugugccuucuugggccugg

SEQ ID NO: 26287 - RNA, 32 nt, Homo Sapiens
cccauggccccggcugaaagcuucggcccucc

SEQ ID NO: 26288 - RNA, 32 nt, Homo Sapiens
gccacugcacugcagccugggcgacaauuugu

SEQ ID NO: 26289 - RNA, 32 nt, Homo Sapiens
auuuaaaacucagccuucuccuccucccccuc

SEQ ID NO: 26290 - RNA, 32 nt, Homo Sapiens
cgggccccagccccggccgcuguggugacucc

SEQ ID NO: 26291 - RNA, 32 nt, Homo Sapiens
uuguguugugcugaaauggugcucuuauagua

SEQ ID NO: 26292 - RNA, 32 nt, Homo Sapiens
gcuagguucugccugccuaugggaagaggggg

SEQ ID NO: 26293 - RNA, 32 nt, Homo Sapiens
gauacaaacauagcaauuuagcuauacuaccg

SEQ ID NO: 26294 - RNA, 32 nt, Homo Sapiens
uguguucacuuuuauuuaaauaaacuugugug

SEQ ID NO: 26295 - RNA, 32 nt, Homo Sapiens
ccaccccccaucacccuccccccagucaccuc

SEQ ID NO: 26296 - RNA, 32 nt, Homo Sapiens
ccagucuauaagcuacuguccgccacugauuu

SEQ ID NO: 26297 - RNA, 32 nt, Homo Sapiens
caagagaagauaacuuugaacaguuucgaagg

SEQ ID NO: 26298 - RNA, 32 nt, Homo Sapiens
gggcuugagaggaacgcccacccacgaaggcc

SEQ ID NO: 26299 - RNA, 32 nt, Homo Sapiens
acccagcccuucugccucccaauucucucucc

SEQ ID NO: 26300 - RNA, 32 nt, Homo Sapiens
ggaggaggaggcgcccugggcggcgacggagc

SEQ ID NO: 26301 - RNA, 32 nt, Homo Sapiens
gaugacccaaauagcuucaaguagcucuccgc

SEQ ID NO: 26302 - RNA, 32 nt, Homo Sapiens
ucuuugaugguuacgccuucagcccucaacag

SEQ ID NO: 26303 - RNA, 32 nt, Homo Sapiens
uuuguuuuucccagcagaaugaugccauucuc

SEQ ID NO: 26304 - RNA, 32 nt, Homo Sapiens
ggugugcgcgcugcgcccgcgagcucccgggc

SEQ ID NO: 26305 - RNA, 32 nt, Homo Sapiens
aguguuggggccggaggcugcugugucugccc

SEQ ID NO: 26306 - RNA, 32 nt, Homo Sapiens
gucaaacucuucuguuucuccaaauauaagga

SEQ ID NO: 26307 - RNA, 32 nt, Homo Sapiens
uucagcaauauuuaaggagauguaagaggcuu

SEQ ID NO: 26308 - RNA, 32 nt, Homo Sapiens
accauuuagaaugggcaauguauuuuacgcug

SEQ ID NO: 26309 - RNA, 32 nt, Homo Sapiens
ccaucauaucugaggaaaaaacaacagaaaag

SEQ ID NO: 26310 - RNA, 32 nt, Homo Sapiens
aguagcuuggaaagauuccagcacugagccgu

SEQ ID NO: 26311 - RNA, 32 nt, Homo Sapiens
ucucaagugcaaugcccccuccccuccuuuac

SEQ ID NO: 26312 - RNA, 32 nt, Homo Sapiens
gcuugguguucgccugccagcccagagcccug

SEQ ID NO: 26313 - RNA, 32 nt, Homo Sapiens
aaauuuagcauaucaauuauacaggauauauc

SEQ ID NO: 26314 - RNA, 32 nt, Homo Sapiens
cacucgccugacuccccuuggaccucaguuag

SEQ ID NO: 26315 - RNA, 32 nt, Homo Sapiens
cagaggccaacuuaucuccuucugggaccaaa

SEQ ID NO: 26316 - RNA, 29 nt, Homo Sapiens
aggauacaagugaugugaauaaaauggaa

SEQ ID NO: 26317 - RNA, 32 nt, Homo Sapiens
gcuucccucugcggucucggcgcaagcgucug

SEQ ID NO: 26318 - RNA, 32 nt, Homo Sapiens
cuuuugcuguuuuauuuuuuuaaauuauguuc

SEQ ID NO: 26319 - RNA, 32 nt, Homo Sapiens
gaaaaagagugccagucuuuggucaucucuaa

SEQ ID NO: 26320 - RNA, 32 nt, Homo Sapiens
uucuuuucugcuuuuccagaggggaaaaaugu

SEQ ID NO: 26321 - RNA, 32 nt, Homo Sapiens
cagccucccaaguagcugggaguacagcgucu

SEQ ID NO: 26322 - RNA, 32 nt, Homo Sapiens
ugcuguuggucccaguucuguguagcuugccc

SEQ ID NO: 26323 - RNA, 32 nt, Homo Sapiens
gacaaaaugcagacuuuuuuuuuuuuuuuuuu

SEQ ID NO: 26324 - RNA, 31 nt, Homo Sapiens
gaggcgcugccgguuacguaaagaugagggg

SEQ ID NO: 26325 - RNA, 32 nt, Homo Sapiens
ucccaucuuucuagggccuggaucugcuuaua

SEQ ID NO: 26326 - RNA, 32 nt, Homo Sapiens
ucuugugcaccaagcagcuuguggcggcuugu

SEQ ID NO: 26327 - RNA, 32 nt, Homo Sapiens
gcagccccauucucuaguccuucuaguuaucu

SEQ ID NO: 26328 - RNA, 32 nt, Homo Sapiens
gauacgggcccgggaggcgccgcccuccgucc

SEQ ID NO: 26329 - RNA, 32 nt, Homo Sapiens
cauaagaaguuaucauacuaagagugacagua

SEQ ID NO: 26330 - RNA, 32 nt, Homo Sapiens
aauggguagugacguuaagagauauauaucag

SEQ ID NO: 26331 - RNA, 32 nt, Homo Sapiens
cuuggggguagcagccaccuccuucccccaac

SEQ ID NO: 26332 - RNA, 32 nt, Homo Sapiens
gcuuucgauguuguaacaaaauugggaucauc

SEQ ID NO: 26333 - RNA, 32 nt, Homo Sapiens
aagugcugugcaagguauuacacucuguaauu

SEQ ID NO: 26334 - RNA, 32 nt, Homo Sapiens
caugcauugguaguuaaauaacuuaaauugcu

SEQ ID NO: 26335 - RNA, 32 nt, Homo Sapiens
gcggagcagcuaguggcaccugcucggagaga

SEQ ID NO: 26336 - RNA, 32 nt, Homo Sapiens
aaccuccaacaccaccuggaagggccuggagg

SEQ ID NO: 26337 - RNA, 32 nt, Homo Sapiens
uuggcuuauuuuuguuuucucuuuuucaauga

SEQ ID NO: 26338 - RNA, 32 nt, Homo Sapiens
cggcucaggaggaccgagugagggcaccgagg

SEQ ID NO: 26339 - RNA, 32 nt, Homo Sapiens
ugcuuggcaucccccgagggauguauuucgga

SEQ ID NO: 26340 - RNA, 27 nt, Homo Sapiens
gcaugaugcaacuucugcaacuucugc

SEQ ID NO: 26341 - RNA, 32 nt, Homo Sapiens
cgaucuggagucagccaggcguuccuccuugu

SEQ ID NO: 26342 - RNA, 32 nt, Homo Sapiens
ugaauugggcccuguuguuuccugggaucuug

SEQ ID NO: 26343 - RNA, 32 nt, Homo Sapiens
cuaaaagccacaggugcuuuuacaaagcaaac

SEQ ID NO: 26344 - RNA, 32 nt, Homo Sapiens
aauguucagguggucaguguucuacucagaaa

SEQ ID NO: 26345 - RNA, 32 nt, Homo Sapiens
cuuccucugugccuccacucuggcccuaaaug

SEQ ID NO: 26346 - RNA, 32 nt, Homo Sapiens
guguagacacugggcccauuggacgugcuguu

SEQ ID NO: 26347 - RNA, 32 nt, Homo Sapiens
ugcucacaaaaauacagugugacguguacugu

SEQ ID NO: 26348 - RNA, 32 nt, Homo Sapiens
uccucccugucuggcccucccucuccagcaag

SEQ ID NO: 26349 - RNA, 32 nt, Homo Sapiens
uuaaaguggaaaagccagaauauugguuauuu

SEQ ID NO: 26350 - RNA, 32 nt, Homo Sapiens
gugucuggggagcggcugccggccgggcccgc

SEQ ID NO: 26351 - RNA, 32 nt, Homo Sapiens
agucuugcauuacuuuuuguuccuuuuuuaaa

SEQ ID NO: 26352 - RNA, 32 nt, Homo Sapiens
gggaggcggaggcgggaggaucaugaggucag

SEQ ID NO: 26353 - RNA, 32 nt, Homo Sapiens
auuguauggaaugguaguacuacauuuuauuu

SEQ ID NO: 26354 - RNA, 32 nt, Homo Sapiens
cccugcagcucaggaaggcugucagacaggcu

SEQ ID NO: 26355 - RNA, 32 nt, Homo Sapiens
ugcaggaauuuauggcuuuagaacuuaagaau

SEQ ID NO: 26356 - RNA, 32 nt, Homo Sapiens
ccuggccggagcaagauggcugagggcgagcg

SEQ ID NO: 26357 - RNA, 32 nt, Homo Sapiens
cuacaggauaaggaaguucacagccugcgggg

SEQ ID NO: 26358 - RNA, 32 nt, Homo Sapiens
uuuuaucugugggggagggagggagacgugaa

SEQ ID NO: 26359 - RNA, 32 nt, Homo Sapiens
aguccccaccgccucuucuuccucacuguccc

SEQ ID NO: 26360 - RNA, 32 nt, Homo Sapiens
cggguggguuuugcagaagcucccuuagugau

SEQ ID NO: 26361 - RNA, 32 nt, Homo Sapiens
gcuaugaaaugaucagaaaugcuaagugagau

SEQ ID NO: 26362 - RNA, 32 nt, Homo Sapiens
gcuggugagaggaggaguuagagcuggucguu

SEQ ID NO: 26363 - RNA, 30 nt, Homo Sapiens
gagcugccgcccgugaguccggccgagcca

SEQ ID NO: 26364 - RNA, 32 nt, Homo Sapiens
gugacacaguuuccucugaugcagcugcuucu

SEQ ID NO: 26365 - RNA, 32 nt, Homo Sapiens
ccagcauuggagauaauaaaauuucuuguucu

SEQ ID NO: 26366 - RNA, 32 nt, Homo Sapiens
acaggacccuggaccagggcggugcagggcgc

SEQ ID NO: 26367 - RNA, 32 nt, Homo Sapiens
guguuucuggguuggauuuuugaaauaguaug

SEQ ID NO: 26368 - RNA, 32 nt, Homo Sapiens
acacaaaggcucuucagcuccccucccugcuu

SEQ ID NO: 26369 - RNA, 32 nt, Homo Sapiens
acugggucaguucccccuuguuugcugccaga

SEQ ID NO: 26370 - RNA, 32 nt, Homo Sapiens
aucuccuccucaugcugcgucuggccaccuac

SEQ ID NO: 26371 - RNA, 32 nt, Homo Sapiens
cccuugccccaggccagguagcaagagagcag

SEQ ID NO: 26372 - RNA, 32 nt, Homo Sapiens
ccgagcuccucgggcucugggucccggcgccc

SEQ ID NO: 26373 - RNA, 32 nt, Homo Sapiens
guggcggauaagcucaccauaugaucaugcag

SEQ ID NO: 26374 - RNA, 32 nt, Homo Sapiens
accuccucccuaugucccaccuuacccgcaag

SEQ ID NO: 26375 - RNA, 32 nt, Homo Sapiens
gaaaauuuccuaaaccacauuagaucacuuuu

SEQ ID NO: 26376 - RNA, 32 nt, Homo Sapiens
ccuccaggaggggacagaagcccguggugccc

SEQ ID NO: 26377 - RNA, 32 nt, Homo Sapiens
gauccacucagcggagccccaggccccggggc

SEQ ID NO: 26378 - RNA, 32 nt, Homo Sapiens
guguuuauggauuuggaccagaauaaugcuaa

SEQ ID NO: 26379 - RNA, 32 nt, Homo Sapiens
uggaggacagcgcgucggcugcgguucucucu

SEQ ID NO: 26380 - RNA, 28 nt, Homo Sapiens
ggcaguggggccuacaggaugacugacu

SEQ ID NO: 26381 - RNA, 32 nt, Homo Sapiens
aaacagaucuuuuccaaguuuacuucuuaaau

SEQ ID NO: 26382 - RNA, 32 nt, Homo Sapiens
acuuauuucgcauuauauuguuuacuuaauaa

SEQ ID NO: 26383 - RNA, 32 nt, Homo Sapiens
cagggccuggccuuguccccagccccaccugg

SEQ ID NO: 26384 - RNA, 32 nt, Homo Sapiens
aagggaaaaagagagggaagaacuacacuaau

SEQ ID NO: 26385 - RNA, 32 nt, Homo Sapiens
aggcuucccguccagagucaccuccuccagcu

SEQ ID NO: 26386 - RNA, 32 nt, Homo Sapiens
ccauuccacagccccagccccagccccuggag

SEQ ID NO: 26387 - RNA, 32 nt, Homo Sapiens
uggugguggaagagggcaugcaaguucugccu

SEQ ID NO: 26388 - RNA, 32 nt, Homo Sapiens
gggcauggaggaaggugagcucucugggccug

SEQ ID NO: 26389 - RNA, 32 nt, Homo Sapiens
gggccuggccuuccucauucgugagcugaggc

SEQ ID NO: 26390 - RNA, 32 nt, Homo Sapiens
guugacaucaacauggcaauugcacucaugug

SEQ ID NO: 26391 - RNA, 32 nt, Homo Sapiens
uugaaguagaaagugcccuggcagagcauccu

SEQ ID NO: 26392 - RNA, 32 nt, Homo Sapiens
caacccuuccgcgcccgugacgcggggccuga

SEQ ID NO: 26393 - RNA, 32 nt, Homo Sapiens
cugcuacaaauauuuuuguacaagauuuuuug

SEQ ID NO: 26394 - RNA, 32 nt, Homo Sapiens
uccagccauggaaagcagggggcccccaagaa

SEQ ID NO: 26395 - RNA, 32 nt, Homo Sapiens
agcuggagaaccuagaacagguccugaagcau

SEQ ID NO: 26396 - RNA, 32 nt, Homo Sapiens
ccuguauaaucccagcacuuugggaggccgag

SEQ ID NO: 26397 - RNA, 32 nt, Homo Sapiens
cgcccuccccccgcugcccccucccccgagca

SEQ ID NO: 26398 - RNA, 32 nt, Homo Sapiens
acggggcugucaacagguguuccuuacucaua

SEQ ID NO: 26399 - RNA, 32 nt, Homo Sapiens
gaaaacugagguuggcacucaugaugagcccc

SEQ ID NO: 26400 - RNA, 32 nt, Homo Sapiens
aaaucucuagauuugaugggugugaagauuau

SEQ ID NO: 26401 - RNA, 32 nt, Homo Sapiens
uccccacuucaagaagcagcucugagaacaga

SEQ ID NO: 26402 - RNA, 32 nt, Homo Sapiens
ggacgggugcgguggcucacgucuguaauccc

SEQ ID NO: 26403 - RNA, 32 nt, Homo Sapiens
uuuggccauuuuuucagacaaauagaauuagc

SEQ ID NO: 26404 - RNA, 32 nt, Homo Sapiens
acacagccaagaguugcuuucugaauagggcu

SEQ ID NO: 26405 - RNA, 32 nt, Homo Sapiens
ugggggagagauggagggguguugacagucug

SEQ ID NO: 26406 - RNA, 32 nt, Homo Sapiens
aaauccccauuggagacugcauuagggaauua

SEQ ID NO: 26407 - RNA, 32 nt, Homo Sapiens
cccacauccuuuucuucagaccacucuccaca

SEQ ID NO: 26408 - RNA, 32 nt, Homo Sapiens
cacaccuuucacagauccuacccaggccacca

SEQ ID NO: 26409 - RNA, 32 nt, Homo Sapiens
gauggggucuuaggaaggaggugacagcacuu

SEQ ID NO: 26410 - RNA, 32 nt, Homo Sapiens
aaucagucaacucagugaaaacaucaauucac

SEQ ID NO: 26411 - RNA, 32 nt, Homo Sapiens
auaucagugucuauagcaucaaaaacuucugg

SEQ ID NO: 26412 - RNA, 32 nt, Homo Sapiens
uuguuaaacugcaggguguacucucaaagacc

SEQ ID NO: 26413 - RNA, 32 nt, Homo Sapiens
cccgggaggcggaguugcggugagccgagauc

SEQ ID NO: 26414 - RNA, 32 nt, Homo Sapiens
cuguguauuaaaccuuuccauuuuacguuuua

SEQ ID NO: 26415 - RNA, 32 nt, Homo Sapiens
ugaugaacgagugaggcgggcugggagugaau

SEQ ID NO: 26416 - RNA, 32 nt, Homo Sapiens
uagaaccacaaacacagaucacaggggccuua

SEQ ID NO: 26417 - RNA, 32 nt, Homo Sapiens
uuuacucacaugccaaggaaaauggcacggaa

SEQ ID NO: 26418 - RNA, 32 nt, Homo Sapiens
cgcugccgccggggaggagguggaaagcgggg

SEQ ID NO: 26419 - RNA, 32 nt, Homo Sapiens
ccacgacuggccccggcccucuccgcacaccu

SEQ ID NO: 26420 - RNA, 32 nt, Homo Sapiens
gggacaaaacgcagacauuuuuuaggggaaua

SEQ ID NO: 26421 - RNA, 32 nt, Homo Sapiens
agacaguuggcugccgagugaacccucugucc

SEQ ID NO: 26422 - RNA, 32 nt, Homo Sapiens
ugagggucuccagccucccccaucacagucgg

SEQ ID NO: 26423 - RNA, 32 nt, Homo Sapiens
cccgagcgccauccccaccuucgccuccugag

SEQ ID NO: 26424 - RNA, 32 nt, Homo Sapiens
uaaagccauuuauguauacacauguaacuugg

SEQ ID NO: 26425 - RNA, 32 nt, Homo Sapiens
cuugaccucaccuuuaccgaggaaucaugggg

SEQ ID NO: 26426 - RNA, 32 nt, Homo Sapiens
gcuggagguggcggccucugggggaguguggu

SEQ ID NO: 26427 - RNA, 32 nt, Homo Sapiens
aaaaugggcaauggguggauucggguccagau

SEQ ID NO: 26428 - RNA, 32 nt, Homo Sapiens
ucuugaguaccugugcaugcaagacacugucc

SEQ ID NO: 26429 - RNA, 32 nt, Homo Sapiens
uagaagguuuguaaguuuuagagacugcagcu

SEQ ID NO: 26430 - RNA, 32 nt, Homo Sapiens
gcagauggagaaaauaaauaauguaucaauga

SEQ ID NO: 26431 - RNA, 32 nt, Homo Sapiens
uuuuauuucguuuccgcgcgucucuuucuacu

SEQ ID NO: 26432 - RNA, 32 nt, Homo Sapiens
accagugagagaaggcuugauguguauaaaag

SEQ ID NO: 26433 - RNA, 32 nt, Homo Sapiens
accucuccucuggccugugggguuauaaguga

SEQ ID NO: 26434 - RNA, 30 nt, Homo Sapiens
cugagcccagcagccgcgggucccgggauc

SEQ ID NO: 26435 - RNA, 30 nt, Homo Sapiens
ugucugggugcuacuggggaaacuggccau

SEQ ID NO: 26436 - RNA, 32 nt, Homo Sapiens
ugugcguacuuugagauuugguuugggauguc

SEQ ID NO: 26437 - RNA, 32 nt, Homo Sapiens
uugcccgccucgccgccggccacagcccggga

SEQ ID NO: 26438 - RNA, 32 nt, Homo Sapiens
guuguaaggugcuaaggggaaugccagcuguu

SEQ ID NO: 26439 - RNA, 32 nt, Homo Sapiens
cacuaauccagaugccuauuguuggauauuga

SEQ ID NO: 26440 - RNA, 32 nt, Homo Sapiens
uuguguccccagcuccuccucucccgccugcc

SEQ ID NO: 26441 - RNA, 32 nt, Homo Sapiens
acaggggaauuccaggggugggacacagcugg

SEQ ID NO: 26442 - RNA, 32 nt, Homo Sapiens
aauuugcccagcuguccuguaaccugaaccag

SEQ ID NO: 26443 - RNA, 32 nt, Homo Sapiens
ggguauuuaauaggaauccuuucucaaggaau

SEQ ID NO: 26444 - RNA, 32 nt, Homo Sapiens
cccggcucuccucccagcaucacaccagccau

SEQ ID NO: 26445 - RNA, 32 nt, Homo Sapiens
uugugcacauccauuucuuguuucacaauguu

SEQ ID NO: 26446 - RNA, 32 nt, Homo Sapiens
uacuggaucaaugucaucaacauacaaauauu

SEQ ID NO: 26447 - RNA, 32 nt, Homo Sapiens
aucgucagugccagaagcugcuggggcggcag

SEQ ID NO: 26448 - RNA, 32 nt, Homo Sapiens
gaucccgccucccgggccgugacgccaggagc

SEQ ID NO: 26449 - RNA, 32 nt, Homo Sapiens
gcaggagggcugugggcgacagugugggcgcc

SEQ ID NO: 26450 - RNA, 32 nt, Homo Sapiens
ugaugcaggaugacaaccggggccuaggccaa

SEQ ID NO: 26451 - RNA, 32 nt, Homo Sapiens
cuggucucuaaacaaaccaacaaaaaauccac

SEQ ID NO: 26452 - RNA, 32 nt, Homo Sapiens
caagauggugccuggcauaugcuaaacacgaa

SEQ ID NO: 26453 - RNA, 32 nt, Homo Sapiens
aaggcagaacuaaaaagugugucauuuuauuu

SEQ ID NO: 26454 - RNA, 32 nt, Homo Sapiens
ggggucauugccauccucccuacucaugacuu

SEQ ID NO: 26455 - RNA, 32 nt, Homo Sapiens
ucacuaaucaaucccagcauuguuuccaauga

SEQ ID NO: 26456 - RNA, 32 nt, Homo Sapiens
caucuuuuauuaugaagacaauaaaaucuuga

SEQ ID NO: 26457 - RNA, 29 nt, Homo Sapiens
agguccucagcgcaggggacgccgucuuc

SEQ ID NO: 26458 - RNA, 32 nt, Homo Sapiens
agaaagaagaacucuaagcugggucugcuaac

SEQ ID NO: 26459 - RNA, 32 nt, Homo Sapiens
cuagauauaugauuaucucuacuuuuguguau

SEQ ID NO: 26460 - RNA, 32 nt, Homo Sapiens
auuauaaaaaaaacacauucugaugugcagaa

SEQ ID NO: 26461 - RNA, 32 nt, Homo Sapiens
ccugucccuggaucugaggccuuucccuugcc

SEQ ID NO: 26462 - RNA, 32 nt, Homo Sapiens
uauuuugucgccaaacugcaucugugucugaa

SEQ ID NO: 26463 - RNA, 32 nt, Homo Sapiens
uggggucccuuuuccaguccccggcuuggagu

SEQ ID NO: 26464 - RNA, 32 nt, Homo Sapiens
cuguuuuuugcaaggggagguaaagaguguuu

SEQ ID NO: 26465 - RNA, 32 nt, Homo Sapiens
guuuuaagaaguacuaagcaaacaagcaauaa

SEQ ID NO: 26466 - RNA, 32 nt, Homo Sapiens
aguuauguuuugucuuuuuuacuccauuuucc

SEQ ID NO: 26467 - RNA, 32 nt, Homo Sapiens
ccaaucgugcaggcucgggccuugagucgguu

SEQ ID NO: 26468 - RNA, 32 nt, Homo Sapiens
aaaccugauaauuauuuacauguuuauuacug

SEQ ID NO: 26469 - RNA, 32 nt, Homo Sapiens
uuuuugucagauccauggucuuaggacuugac

SEQ ID NO: 26470 - RNA, 32 nt, Homo Sapiens
auuuccuagagaggacacaaaaagcacuaacu

SEQ ID NO: 26471 - RNA, 32 nt, Homo Sapiens
guguuaaauauguuauuugugauuaagcauua

SEQ ID NO: 26472 - RNA, 32 nt, Homo Sapiens
cuuccugcugugcgccagcagcucuggugcug

SEQ ID NO: 26473 - RNA, 32 nt, Homo Sapiens
cuccuugagaaaaccaggguugugaaagacuc

SEQ ID NO: 26474 - RNA, 32 nt, Homo Sapiens
cuguuguacugguaauuuaacucuguaaugga

SEQ ID NO: 26475 - RNA, 32 nt, Homo Sapiens
aagauauuuuaaaauccaguaauuugacauaa

SEQ ID NO: 26476 - RNA, 32 nt, Homo Sapiens
ucauugacaagccugccccucugggucccccu

SEQ ID NO: 26477 - RNA, 32 nt, Homo Sapiens
uuuugcauuggaaaaaggaagcacuguguagc

SEQ ID NO: 26478 - RNA, 32 nt, Homo Sapiens
gaugagcccaccagccccagcacugaccucca

SEQ ID NO: 26479 - RNA, 32 nt, Homo Sapiens
aaggaugccucccaaagugagguuucugggga

SEQ ID NO: 26480 - RNA, 32 nt, Homo Sapiens
aaccucagacucugauucuccucuucagccuc

SEQ ID NO: 26481 - RNA, 32 nt, Homo Sapiens
uguacugggcaguaacuaaacacacaugcaaa

SEQ ID NO: 26482 - RNA, 32 nt, Homo Sapiens
ggugucuccgcggugcucucgcccugcccaug

SEQ ID NO: 26483 - RNA, 32 nt, Homo Sapiens
ugauacugucucucagaguuugcaaaccagau

SEQ ID NO: 26484 - RNA, 32 nt, Homo Sapiens
agggguuggggaaggacccaccccggucagca

SEQ ID NO: 26485 - RNA, 32 nt, Homo Sapiens
acagucaguagauguuuuauuuuuuagcuauu

SEQ ID NO: 26486 - RNA, 32 nt, Homo Sapiens
ggcaaaacacuagucacaauuggguagaugug

SEQ ID NO: 26487 - RNA, 32 nt, Homo Sapiens
aggauuguguguauauuugggauaucuauuga

SEQ ID NO: 26488 - RNA, 32 nt, Homo Sapiens
cugaccuugaguuaaucaaaauggagaugauc

SEQ ID NO: 26489 - RNA, 32 nt, Homo Sapiens
gagcagguguugcuucagggugaggaucgcuu

SEQ ID NO: 26490 - RNA, 32 nt, Homo Sapiens
agguggcggcgguggcgguggucguagcggug

SEQ ID NO: 26491 - RNA, 32 nt, Homo Sapiens
agaagccuuuuggcuggguuacagaagaguuu

SEQ ID NO: 26492 - RNA, 28 nt, Homo Sapiens
gcacagaacuuguaccauuugaaucugu

SEQ ID NO: 26493 - RNA, 32 nt, Homo Sapiens
agaauuaccaggagaagcuggucuuccaggau

SEQ ID NO: 26494 - RNA, 32 nt, Homo Sapiens
cgcuggcgccgcggucucguagcgcaugggcc

SEQ ID NO: 26495 - RNA, 32 nt, Homo Sapiens
uuccaacucucgucuugguugaaugacuucau

SEQ ID NO: 26496 - RNA, 32 nt, Homo Sapiens
uguaaagauaaaaaauguuuucuuuccccuug

SEQ ID NO: 26497 - RNA, 30 nt, Homo Sapiens
gagcccuagagcuggaugcaaaagagaacc

SEQ ID NO: 26498 - RNA, 32 nt, Homo Sapiens
cugacacugugucucccgggcuugucggcuuc

SEQ ID NO: 26499 - RNA, 32 nt, Homo Sapiens
aaaguuaauuuucccuccuuauuuuugaauug

SEQ ID NO: 26500 - RNA, 32 nt, Homo Sapiens
gugacagccaagggcaguccugugcuauccag

SEQ ID NO: 26501 - RNA, 32 nt, Homo Sapiens
gaugcucauggggagaaaauguuuacagacaa

SEQ ID NO: 26502 - RNA, 32 nt, Homo Sapiens
ccucccagcucuucugaguggggagucuucca

SEQ ID NO: 26503 - RNA, 32 nt, Homo Sapiens
gagaggccgccagcacugcccgggagacggcc

SEQ ID NO: 26504 - RNA, 32 nt, Homo Sapiens
auccuugcaaaggaggugucuugcuucaccuu

SEQ ID NO: 26505 - RNA, 30 nt, Homo Sapiens
cgcggcccggaggcgcggggucccgaugug

SEQ ID NO: 26506 - RNA, 32 nt, Homo Sapiens
gaucgcugcagccauguuuucccggccaugcc

SEQ ID NO: 26507 - RNA, 32 nt, Homo Sapiens
ccccauccucaagggagcuggugggaaggagg

SEQ ID NO: 26508 - RNA, 32 nt, Homo Sapiens
ugaaccuuuccacagccuuaaaagcccgcucu

SEQ ID NO: 26509 - RNA, 32 nt, Homo Sapiens
gugcaccuuucugagcuagauaacaggcaggu

SEQ ID NO: 26510 - RNA, 32 nt, Homo Sapiens
augaaagaucuucauugggggauugagcagca

SEQ ID NO: 26511 - RNA, 31 nt, Homo Sapiens
cugggccugcucugccugccacuggccgaga

SEQ ID NO: 26512 - RNA, 32 nt, Homo Sapiens
ucugaagcagcaaauuaauguugaaaacuuac

SEQ ID NO: 26513 - RNA, 32 nt, Homo Sapiens
cccucugccccucccaccugcacaugucacac

SEQ ID NO: 26514 - RNA, 31 nt, Homo Sapiens
gauucagugggucuguguagagccugagacu

SEQ ID NO: 26515 - RNA, 31 nt, Homo Sapiens
ugaacccgcaucugccugccgccccgcuaug

SEQ ID NO: 26516 - RNA, 32 nt, Homo Sapiens
ugguuuauaaauaacaaacauuucuuucuuac

SEQ ID NO: 26517 - RNA, 32 nt, Homo Sapiens
cguacaggaccugcgcagcaucguggagagcc

SEQ ID NO: 26518 - RNA, 32 nt, Homo Sapiens
agaacuuucuaaaagaccagcacugcucuucc

SEQ ID NO: 26519 - RNA, 32 nt, Homo Sapiens
gaaaugagcaaaguaagaagacaccaauugag

SEQ ID NO: 26520 - RNA, 32 nt, Homo Sapiens
auugguggugauuuuuaauucaugacauuuau

SEQ ID NO: 26521 - RNA, 32 nt, Homo Sapiens
ggcaccaagggagaggggcccaaggguaggga

SEQ ID NO: 26522 - RNA, 32 nt, Homo Sapiens
aucacugucccgauucaaauuauucuucaguc

SEQ ID NO: 26523 - RNA, 32 nt, Homo Sapiens
uuuuagaaaagcaauaaaaauauuuuauucau

SEQ ID NO: 26524 - RNA, 32 nt, Homo Sapiens
aagagguuucggggguuuuguuguguaaauau

SEQ ID NO: 26525 - RNA, 32 nt, Homo Sapiens
uauuauuggaaauuauuuaaacuaauuuagau

SEQ ID NO: 26526 - RNA, 32 nt, Homo Sapiens
gugcuuuggggauugaaauucagaccaggaaa

SEQ ID NO: 26527 - RNA, 32 nt, Homo Sapiens
agcguuggagaauggaaaugagacguuaugaa

SEQ ID NO: 26528 - RNA, 32 nt, Homo Sapiens
cuugguccacacuggacuggccgggaggugau

SEQ ID NO: 26529 - RNA, 32 nt, Homo Sapiens
augaaucaacgaaugaauggcuaugcauggac

SEQ ID NO: 26530 - RNA, 30 nt, Homo Sapiens
uccuggccacuugcuacucuagcuaggaag

SEQ ID NO: 26531 - RNA, 32 nt, Homo Sapiens
gcuggaucagggcagccggggagguggccagg

SEQ ID NO: 26532 - RNA, 32 nt, Homo Sapiens
guucugcagugagagauuuaauugugggugag

SEQ ID NO: 26533 - RNA, 32 nt, Homo Sapiens
cgccagcgccuacuccaggaucccguagccag

SEQ ID NO: 26534 - RNA, 32 nt, Homo Sapiens
uugguucagagguugguagcacuuggggagag

SEQ ID NO: 26535 - RNA, 32 nt, Homo Sapiens
gugugcaggaauguuuucaaaucccucaucag

SEQ ID NO: 26536 - RNA, 32 nt, Homo Sapiens
ccucuggccuucccuccaccgcuuugcuccau

SEQ ID NO: 26537 - RNA, 32 nt, Homo Sapiens
ugcagaaauauguaguauuuggugaggcuaaa

SEQ ID NO: 26538 - RNA, 32 nt, Homo Sapiens
cacuuagaaaagacaccuggaacccaugugca

SEQ ID NO: 26539 - RNA, 32 nt, Homo Sapiens
cccugaagcugaugaaggcuugaaggacggaa

SEQ ID NO: 26540 - RNA, 32 nt, Homo Sapiens
cacagacugggaccuccaccacaucuggcaga

SEQ ID NO: 26541 - RNA, 32 nt, Homo Sapiens
uccuggggcccuguuuuuccccaggagcgggg

SEQ ID NO: 26542 - RNA, 32 nt, Homo Sapiens
uggacuucuucccucgcuucucuucgguggug

SEQ ID NO: 26543 - RNA, 32 nt, Homo Sapiens
auuauaggcuuguuuucuuaauaugcuucuug

SEQ ID NO: 26544 - RNA, 32 nt, Homo Sapiens
gugcauggugcuuuuuaacuuucaucgaguca

SEQ ID NO: 26545 - RNA, 32 nt, Homo Sapiens
gaccacuugagcccaggagauugaggcugcag

SEQ ID NO: 26546 - RNA, 32 nt, Homo Sapiens
gggaacacauucacacgcccauugcaggagua

SEQ ID NO: 26547 - RNA, 32 nt, Homo Sapiens
uaaugagugauuuaauuuccucuguauuugua

SEQ ID NO: 26548 - RNA, 32 nt, Homo Sapiens
ccaccccucagcucagccugguauggaaagca

SEQ ID NO: 26549 - RNA, 32 nt, Homo Sapiens
ucuccaggcucgcucacccucccuuuagagau

SEQ ID NO: 26550 - RNA, 32 nt, Homo Sapiens
agcacaaucccggccccgcccucgcggcgggc

SEQ ID NO: 26551 - RNA, 32 nt, Homo Sapiens
cauaccacagagcuagauugcccaggucuggg

SEQ ID NO: 26552 - RNA, 32 nt, Homo Sapiens
gucaguuuuuauuccuuguuaggcuauuuucu

SEQ ID NO: 26553 - RNA, 32 nt, Homo Sapiens
cucucccgggguguccucucccuuaggggaag

SEQ ID NO: 26554 - RNA, 32 nt, Homo Sapiens
uaagaaaaacaaaguuuuaaacgaaauacugc

SEQ ID NO: 26555 - RNA, 32 nt, Homo Sapiens
ucauggcuggguguggggaggggguagaaauu

SEQ ID NO: 26556 - RNA, 32 nt, Homo Sapiens
ccaguuuaagggugggagucuggagccagaca

SEQ ID NO: 26557 - RNA, 32 nt, Homo Sapiens
gcaccucggagaccgaaagcaaccgcuccccc

SEQ ID NO: 26558 - RNA, 32 nt, Homo Sapiens
gucuagccaugaggggcuuaugcucccaacuc

SEQ ID NO: 26559 - RNA, 32 nt, Homo Sapiens
gggggaggggugcccuagcaucagaaggguuc

SEQ ID NO: 26560 - RNA, 32 nt, Homo Sapiens
cuuccagguucaagcaauucugccucagccuc

SEQ ID NO: 26561 - RNA, 32 nt, Homo Sapiens
cacaacuguuaggcagaaaugaggucauucaa

SEQ ID NO: 26562 - RNA, 32 nt, Homo Sapiens
agcauaggcagacuuaaaguuggauagaccug

SEQ ID NO: 26563 - RNA, 32 nt, Homo Sapiens
ccccuuggccuugauuuccccaccugcggaac

SEQ ID NO: 26564 - RNA, 32 nt, Homo Sapiens
cccugagaaaaguuuccaaaaauguaaauaua

SEQ ID NO: 26565 - RNA, 32 nt, Homo Sapiens
uaauuccuauuauaagagcauauuuuagguac

SEQ ID NO: 26566 - RNA, 32 nt, Homo Sapiens
gguugggggugagcaagggcugucugcagaaa

SEQ ID NO: 26567 - RNA, 32 nt, Homo Sapiens
gaggagcaaugggacaugagugucccuguauc

SEQ ID NO: 26568 - RNA, 27 nt, Homo Sapiens
uccaaagccuuuuacagcccccgcccc

SEQ ID NO: 26569 - RNA, 32 nt, Homo Sapiens
uuuucuacuuucauuucuuaagcuuuuaaaau

SEQ ID NO: 26570 - RNA, 32 nt, Homo Sapiens
ccuccuccgcaugccaacgcaguucauguaca

SEQ ID NO: 26571 - RNA, 32 nt, Homo Sapiens
ucucuuauuucugaggcccuucagucuccuuu

SEQ ID NO: 26572 - RNA, 32 nt, Homo Sapiens
gggaaaucaaugugauuuugcacuaaaagcuu

SEQ ID NO: 26573 - RNA, 32 nt, Homo Sapiens
ggcucaggggcagugcauguccugcugcccuc

SEQ ID NO: 26574 - RNA, 32 nt, Homo Sapiens
gcacaucuguuauaauuuaauauucaaaucug

SEQ ID NO: 26575 - RNA, 32 nt, Homo Sapiens
aguugguaaaacaacuuuuuaaacucuuauuc

SEQ ID NO: 26576 - RNA, 32 nt, Homo Sapiens
acacuaaaaucagauuucuucaaaauauaaau

SEQ ID NO: 26577 - RNA, 32 nt, Homo Sapiens
ggaauuuugucaaucaaaauuauucuguauug

SEQ ID NO: 26578 - RNA, 32 nt, Homo Sapiens
ugucaguggcggcggcagcgauggcaagcagg

SEQ ID NO: 26579 - RNA, 32 nt, Homo Sapiens
cagaaggccgaccacaugaggacccagggaga

SEQ ID NO: 26580 - RNA, 32 nt, Homo Sapiens
guggccagcccggcugguuuuguaagaugcug

SEQ ID NO: 26581 - RNA, 32 nt, Homo Sapiens
aauucauuaggguggacgagaaaagaacagug

SEQ ID NO: 26582 - RNA, 32 nt, Homo Sapiens
ggauaccagaaaggaaauggcaugcacacaca

SEQ ID NO: 26583 - RNA, 32 nt, Homo Sapiens
gucccacccugcugcugcuccucccucugacc

SEQ ID NO: 26584 - RNA, 32 nt, Homo Sapiens
cugacagguauccccugaaacugagcugagcc

SEQ ID NO: 26585 - RNA, 32 nt, Homo Sapiens
ugcugggaaaaauaaucaacaaugugggucuu

SEQ ID NO: 26586 - RNA, 32 nt, Homo Sapiens
uggucgccuaucuccuuccucugcucccuggu

SEQ ID NO: 26587 - RNA, 32 nt, Homo Sapiens
uagauaauauuuuuagauucuucugcucccua

SEQ ID NO: 26588 - RNA, 32 nt, Homo Sapiens
gcauaugccugagucgaucuuuuaugcuuuua

SEQ ID NO: 26589 - RNA, 32 nt, Homo Sapiens
cccugcccaagccuacugccucccgcugccgc

SEQ ID NO: 26590 - RNA, 32 nt, Homo Sapiens
guugccuccugccucuaaaacaucucucucua

SEQ ID NO: 26591 - RNA, 32 nt, Homo Sapiens
aagauggauuugggaaaggaccaaucucauuu

SEQ ID NO: 26592 - RNA, 32 nt, Homo Sapiens
aaaugcccuaaaauuauuaccacccaagagaa

SEQ ID NO: 26593 - RNA, 32 nt, Homo Sapiens
guggggaggagaagguuguaggcauggaagag

SEQ ID NO: 26594 - RNA, 32 nt, Homo Sapiens
ucauaaaaaaucagccugucugcucuccccac

SEQ ID NO: 26595 - RNA, 32 nt, Homo Sapiens
accacacuucuguggccaucucacgugaaaga

SEQ ID NO: 26596 - RNA, 32 nt, Homo Sapiens
ucccacuggggccggggagggaggcgggugua

SEQ ID NO: 26597 - RNA, 32 nt, Homo Sapiens
ugaguuggaaacaaaaacaugaaggacuccaa

SEQ ID NO: 26598 - RNA, 32 nt, Homo Sapiens
gcucccacccucaaagcccauguucugugagg

SEQ ID NO: 26599 - RNA, 32 nt, Homo Sapiens
agguuuaaauuacuaacuuacuauuuguuguu

SEQ ID NO: 26600 - RNA, 32 nt, Homo Sapiens
cuugacugggggugggggaggucuuguucauu

SEQ ID NO: 26601 - RNA, 32 nt, Homo Sapiens
ccccaaccccgccucccuccccgccccgcgau

SEQ ID NO: 26602 - RNA, 32 nt, Homo Sapiens
augugugugaauguacaugugagcggcacgug

SEQ ID NO: 26603 - RNA, 32 nt, Homo Sapiens
cuuauauuugauuccuugugcacaugugggag

SEQ ID NO: 26604 - RNA, 32 nt, Homo Sapiens
uuauuacuauuaugcagcuuuuccuacagaug

SEQ ID NO: 26605 - RNA, 32 nt, Homo Sapiens
aagucuaaauaaauuaaugauguuuauugggu

SEQ ID NO: 26606 - RNA, 32 nt, Homo Sapiens
ccaggggucugcuuuucuaugugagccuuuaa

SEQ ID NO: 26607 - RNA, 32 nt, Homo Sapiens
cugaucccgccagcaccccagccuaagugaaa

SEQ ID NO: 26608 - RNA, 32 nt, Homo Sapiens
uggauaccugacccuugaaacuaugaacuaau

SEQ ID NO: 26609 - RNA, 32 nt, Homo Sapiens
cauguuccuuggcuuuuuucucuucaaccuuu

SEQ ID NO: 26610 - RNA, 32 nt, Homo Sapiens
gggauggguuccagagguauuccucucuuaaa

SEQ ID NO: 26611 - RNA, 32 nt, Homo Sapiens
uugacucagagguguaggaauggagugauuug

SEQ ID NO: 26612 - RNA, 29 nt, Homo Sapiens
aaguauguauguauguaugaguuauagca

SEQ ID NO: 26613 - RNA, 32 nt, Homo Sapiens
cuccaaaggguugucuuccucgccaaaaggag

SEQ ID NO: 26614 - RNA, 29 nt, Homo Sapiens
agacauccugugaugucaugaaagcaccu

SEQ ID NO: 26615 - RNA, 32 nt, Homo Sapiens
gugaaguaaaauaguaugaacaauuaagaggc

SEQ ID NO: 26616 - RNA, 32 nt, Homo Sapiens
agauaauuugggggcuuuugucauuguaacug

SEQ ID NO: 26617 - RNA, 32 nt, Homo Sapiens
ucuucuaaggcauuuuucuccucaucuuaagc

SEQ ID NO: 26618 - RNA, 32 nt, Homo Sapiens
aucuguccgacagguuugggcggcggcgucug

SEQ ID NO: 26619 - RNA, 32 nt, Homo Sapiens
cccccuccaaaaauaagccauugcacacagac

SEQ ID NO: 26620 - RNA, 32 nt, Homo Sapiens
ccaaaaucaauaauuucaaacauauuaaggag

SEQ ID NO: 26621 - RNA, 32 nt, Homo Sapiens
aucagguuugguggaggcaaccugaccagaaa

SEQ ID NO: 26622 - RNA, 31 nt, Homo Sapiens
ccaaaacccaggagaucuuccacuccaagcg

SEQ ID NO: 26623 - RNA, 32 nt, Homo Sapiens
guauuuucaaaauaaaacuuuuucuuguuugu

SEQ ID NO: 26624 - RNA, 32 nt, Homo Sapiens
ggcccuguccaugugacuuuggcccuugguuu

SEQ ID NO: 26625 - RNA, 32 nt, Homo Sapiens
agcagcaucugguugaccagauggccaccaga

SEQ ID NO: 26626 - RNA, 32 nt, Homo Sapiens
aggcuguucuuguguugcuauaaagaaguacc

SEQ ID NO: 26627 - RNA, 32 nt, Homo Sapiens
uugaugccaaacuuagugcgggcacccggucg

SEQ ID NO: 26628 - RNA, 32 nt, Homo Sapiens
gugcuccggcgccugaucuagguucauggagc

SEQ ID NO: 26629 - RNA, 32 nt, Homo Sapiens
ugaaggaagcaacagagaaguggggaauccag

SEQ ID NO: 26630 - RNA, 32 nt, Homo Sapiens
agggggugggacagggacucggggcuggggga

SEQ ID NO: 26631 - RNA, 32 nt, Homo Sapiens
gucaaugugugcacuuuuuuucuauauuauug

SEQ ID NO: 26632 - RNA, 32 nt, Homo Sapiens
uaaaguuuuuaaaguguguauguggggggucu

SEQ ID NO: 26633 - RNA, 32 nt, Homo Sapiens
gguuauuuaaaauggaacuaaagauagaagga

SEQ ID NO: 26634 - RNA, 32 nt, Homo Sapiens
ugguguguugaaauuagguuuacuucuugucu

SEQ ID NO: 26635 - RNA, 32 nt, Homo Sapiens
uagaggguuuucuugguaaaucuaaaaagcaa

SEQ ID NO: 26636 - RNA, 32 nt, Homo Sapiens
uuaauaaaaaauuuucaaaucauguuagcugu

SEQ ID NO: 26637 - RNA, 32 nt, Homo Sapiens
cacugagguggaggaguccucggagacuaaag

SEQ ID NO: 26638 - RNA, 32 nt, Homo Sapiens
auuuugguucauuuggguggggaucaaagucc

SEQ ID NO: 26639 - RNA, 32 nt, Homo Sapiens
caucuuauauaaaauuuaacucaaaauguaua

SEQ ID NO: 26640 - RNA, 32 nt, Homo Sapiens
aacaucuguaaaauuugucucaucuuuuaauu

SEQ ID NO: 26641 - RNA, 32 nt, Homo Sapiens
uugaggggccuggcugggggcccccaggcucc

SEQ ID NO: 26642 - RNA, 32 nt, Homo Sapiens
ccuacagaggggcccauacggcguuguucugg

SEQ ID NO: 26643 - RNA, 32 nt, Homo Sapiens
cagcuuccugcccuccuucuuggagauaaguc

SEQ ID NO: 26644 - RNA, 32 nt, Homo Sapiens
cucguuauuuuuguccaaacgaagcagccgug

SEQ ID NO: 26645 - RNA, 32 nt, Homo Sapiens
caagagaguccuccaguuucuauccaggaaug

SEQ ID NO: 26646 - RNA, 32 nt, Homo Sapiens
cggugucccucgcggagcccucggugugucgc

SEQ ID NO: 26647 - RNA, 32 nt, Homo Sapiens
cucgcgcagcgguggcucugcggccgcuggag

SEQ ID NO: 26648 - RNA, 32 nt, Homo Sapiens
uagcgacggcccguccccugcgcacggacgcc

SEQ ID NO: 26649 - RNA, 32 nt, Homo Sapiens
cugcuugcuuucuuucccuccccuccaaugau

SEQ ID NO: 26650 - RNA, 32 nt, Homo Sapiens
guacauagauuuuauauccugauaaauagaau

SEQ ID NO: 26651 - RNA, 32 nt, Homo Sapiens
acagaggggaggaggaggacuaaaugaaaagu

SEQ ID NO: 26652 - RNA, 32 nt, Homo Sapiens
uuguuacccacccguacggacuuggggucuau

SEQ ID NO: 26653 - RNA, 32 nt, Homo Sapiens
acuuucuuucccucuguuuugaguccugccau

SEQ ID NO: 26654 - RNA, 32 nt, Homo Sapiens
gugaguuuggggauuguuguguccacuaaccg

SEQ ID NO: 26655 - RNA, 32 nt, Homo Sapiens
guggcugcuccgcaccggguuccuccuccucu

SEQ ID NO: 26656 - RNA, 32 nt, Homo Sapiens
uauucacaagagggugcuaaugagaugguuua

SEQ ID NO: 26657 - RNA, 32 nt, Homo Sapiens
aagcaaagauaagcaugaaaacuugacaauga

SEQ ID NO: 26658 - RNA, 32 nt, Homo Sapiens
ccccggcaacagccgccucccucgcguccccc

SEQ ID NO: 26659 - RNA, 32 nt, Homo Sapiens
ccguguggaggggacauagacacugcaugggc

SEQ ID NO: 26660 - RNA, 32 nt, Homo Sapiens
cauuggaaauaccugaggcaaucccaggcuaa

SEQ ID NO: 26661 - RNA, 32 nt, Homo Sapiens
cggaacggagagcggguugccagggcccgaag

SEQ ID NO: 26662 - RNA, 32 nt, Homo Sapiens
cauuaaaaucaucacacagucuacagucaccu

SEQ ID NO: 26663 - RNA, 32 nt, Homo Sapiens
gccuucaccagguacuacggacacccgggaua

SEQ ID NO: 26664 - RNA, 32 nt, Homo Sapiens
ucccagcagaggccuccacugugcccggacca

SEQ ID NO: 26665 - RNA, 32 nt, Homo Sapiens
aagcuuuaugaguacaggcaccucuucugucu

SEQ ID NO: 26666 - RNA, 32 nt, Homo Sapiens
cuaggcuagacaaugcugccggggacugacau

SEQ ID NO: 26667 - RNA, 32 nt, Homo Sapiens
gccccauguagccccagucauccugcccagcc

SEQ ID NO: 26668 - RNA, 32 nt, Homo Sapiens
aaaauugcaggugauuugauaauuaagcaccc

SEQ ID NO: 26669 - RNA, 32 nt, Homo Sapiens
uagaaauuuacuauguaaaugcuugauggaau

SEQ ID NO: 26670 - RNA, 32 nt, Homo Sapiens
acagaauucugguagcccgggaccacaggguc

SEQ ID NO: 26671 - RNA, 32 nt, Homo Sapiens
auuuacaaauguuggaguaauaaagaaggcag

SEQ ID NO: 26672 - RNA, 31 nt, Homo Sapiens
cuacacuagccccagaucaccagaugcaaca

SEQ ID NO: 26673 - RNA, 32 nt, Homo Sapiens
agccgagcggcugggcgggccuggccgggcca

SEQ ID NO: 26674 - RNA, 32 nt, Homo Sapiens
aguaagauuuaauuuuuuuuuauuuuaaaguc

SEQ ID NO: 26675 - RNA, 32 nt, Homo Sapiens
uucuaaaugugauuuuccuaggcuacugcagg

SEQ ID NO: 26676 - RNA, 32 nt, Homo Sapiens
gaagaugacaaaagcaauugcaaccaaagcaa

SEQ ID NO: 26677 - RNA, 32 nt, Homo Sapiens
auucagccaugaaaauaaguccuggcccuugu

SEQ ID NO: 26678 - RNA, 28 nt, Homo Sapiens
ucuuauuaauaaaguuaauguaacuucu

SEQ ID NO: 26679 - RNA, 32 nt, Homo Sapiens
cagguuugaggcccuggggggcccguucccca

SEQ ID NO: 26680 - RNA, 32 nt, Homo Sapiens
cuaggggcugaauucugacucagccauuuacu

SEQ ID NO: 26681 - RNA, 32 nt, Homo Sapiens
cugugucgguccccagugcugcacucccaccc

SEQ ID NO: 26682 - RNA, 32 nt, Homo Sapiens
gggacccggcugcgguggcugcgggacugacg

SEQ ID NO: 26683 - RNA, 32 nt, Homo Sapiens
aaugaaaacugcuuaugaagagguuacaacug

SEQ ID NO: 26684 - RNA, 32 nt, Homo Sapiens
augacugguugacccgacauggaccaagugac

SEQ ID NO: 26685 - RNA, 32 nt, Homo Sapiens
aaagauggaucuuuuuaaauacuagaaguuuu

SEQ ID NO: 26686 - RNA, 32 nt, Homo Sapiens
ugcauagcucugccuuugggucuuguucauag

SEQ ID NO: 26687 - RNA, 32 nt, Homo Sapiens
uuaguuuucagcuauagaaauguaauaacuuu

SEQ ID NO: 26688 - RNA, 32 nt, Homo Sapiens
cugggcuggugccuccuccgcuucaggguaug

SEQ ID NO: 26689 - RNA, 32 nt, Homo Sapiens
auugcagguguuagguauuuuuucugucaaca

SEQ ID NO: 26690 - RNA, 32 nt, Homo Sapiens
ggacucuucgaggguggcgugugugugccaca

SEQ ID NO: 26691 - RNA, 30 nt, Homo Sapiens
uccauuauggcugacaugcaaaaucuggua

SEQ ID NO: 26692 - RNA, 32 nt, Homo Sapiens
guggagggagaugccuggguccuguucuuccu

SEQ ID NO: 26693 - RNA, 32 nt, Homo Sapiens
gauuuaaguaguucagaguuaaagcuaaaaca

SEQ ID NO: 26694 - RNA, 32 nt, Homo Sapiens
aaugcagggacccuucuguuuucuccugcaaa

SEQ ID NO: 26695 - RNA, 32 nt, Homo Sapiens
gccuguggcagaugcuccugcccuggccucca

SEQ ID NO: 26696 - RNA, 32 nt, Homo Sapiens
cgaacugcggguggacuguguagugaccggcg

SEQ ID NO: 26697 - RNA, 32 nt, Homo Sapiens
gaggcggcagugggcagggggugcuggggccu

SEQ ID NO: 26698 - RNA, 32 nt, Homo Sapiens
uguauguugcuguuuauauuuucucaaacuug

SEQ ID NO: 26699 - RNA, 32 nt, Homo Sapiens
cuugauguucccaggaaaccaggaaagaggac

SEQ ID NO: 26700 - RNA, 32 nt, Homo Sapiens
cugaggagucucuuucaguuucauuuuuucuc

SEQ ID NO: 26701 - RNA, 32 nt, Homo Sapiens
accggcgcccgguggccgagcgcgcccaggac

SEQ ID NO: 26702 - RNA, 32 nt, Homo Sapiens
gagcugggucagccucugcagcugccucaguu

SEQ ID NO: 26703 - RNA, 32 nt, Homo Sapiens
caccuagagugucggugagcugaccucacgau

SEQ ID NO: 26704 - RNA, 32 nt, Homo Sapiens
ucugcgcggggcgggggcgcagcaagugcauc

SEQ ID NO: 26705 - RNA, 32 nt, Homo Sapiens
accuuccucgggcacugaccccugccccugcc

SEQ ID NO: 26706 - RNA, 32 nt, Homo Sapiens
caccuggccuggcguggcccacguucuacuca

SEQ ID NO: 26707 - RNA, 32 nt, Homo Sapiens
aauccuacaaaauaaaaguaaaauguugaacu

SEQ ID NO: 26708 - RNA, 32 nt, Homo Sapiens
gugauagguucaggauuguagcaaugacccaa

SEQ ID NO: 26709 - RNA, 32 nt, Homo Sapiens
agaagcaucaaacauuucuuuuuuaugaaaug

SEQ ID NO: 26710 - RNA, 32 nt, Homo Sapiens
gcaugguggcauauauccauaauccuagcugc

SEQ ID NO: 26711 - RNA, 32 nt, Homo Sapiens
aucuuuuguacauaguggcaguauuguagcug

SEQ ID NO: 26712 - RNA, 32 nt, Homo Sapiens
caucacccaauggcuagcacaaacaaggauca

SEQ ID NO: 26713 - RNA, 32 nt, Homo Sapiens
auuaauauugcguuacucuacuuuaaaaaugu

SEQ ID NO: 26714 - RNA, 32 nt, Homo Sapiens
gccgaauuccucgcgugcagcaggcgcggacc

SEQ ID NO: 26715 - RNA, 32 nt, Homo Sapiens
ccgcggcgccuggcccaggcccccaggccucu

SEQ ID NO: 26716 - RNA, 32 nt, Homo Sapiens
acagcaucgaagaggugucuuggagugugguu

SEQ ID NO: 26717 - RNA, 31 nt, Homo Sapiens
uaaagaaaucauacuuugccaaauagugaaa

SEQ ID NO: 26718 - RNA, 32 nt, Homo Sapiens
cuuuauuuauaauuuagaaauaaaugugcuaa

SEQ ID NO: 26719 - RNA, 32 nt, Homo Sapiens
agagacacuguucagaagaugaacuaaacuca

SEQ ID NO: 26720 - RNA, 32 nt, Homo Sapiens
cgccuccgcccgccagcggcgcuggggaaggg

SEQ ID NO: 26721 - RNA, 32 nt, Homo Sapiens
aauuugcauacuuaagcauuuaggaaugaagu

SEQ ID NO: 26722 - RNA, 32 nt, Homo Sapiens
ugccccguaggcccggcccgggccccucggga

SEQ ID NO: 26723 - RNA, 30 nt, Homo Sapiens
guuucaugaggauuuacacauggcauucag

SEQ ID NO: 26724 - RNA, 32 nt, Homo Sapiens
accugcaguacugagauagagaaggauuguug

SEQ ID NO: 26725 - RNA, 32 nt, Homo Sapiens
ucagaaguucuaauuaugaugauagaggcugg

SEQ ID NO: 26726 - RNA, 32 nt, Homo Sapiens
uuugaggaguuugaacgucagugucacuuacc

SEQ ID NO: 26727 - RNA, 32 nt, Homo Sapiens
ggacuucaaagcaagcugguauuuucauacaa

SEQ ID NO: 26728 - RNA, 32 nt, Homo Sapiens
ucacucugcuggaagcugcagggugcuaggcc

SEQ ID NO: 26729 - RNA, 32 nt, Homo Sapiens
uuaaaaaauuuccaucuuauuucauuucugua

SEQ ID NO: 26730 - RNA, 32 nt, Homo Sapiens
ggaagaaaaaggaaacaagcuuuggcuuuuuc

SEQ ID NO: 26731 - RNA, 32 nt, Homo Sapiens
gaccagccccaggcuccugugcugguugcacg

SEQ ID NO: 26732 - RNA, 32 nt, Homo Sapiens
ggcuugcuuugaggcagagcugagagagaaga

SEQ ID NO: 26733 - RNA, 32 nt, Homo Sapiens
cucauuucaauguuuuccugagguggagccuu

SEQ ID NO: 26734 - RNA, 30 nt, Homo Sapiens
ccuucucucccgggcugcggcagggcaggg

SEQ ID NO: 26735 - RNA, 32 nt, Homo Sapiens
ugugguggacaaggaggcucucgggcugggcc

SEQ ID NO: 26736 - RNA, 32 nt, Homo Sapiens
cccccaccuccucccuucccagccccaaagaa

SEQ ID NO: 26737 - RNA, 32 nt, Homo Sapiens
ucauccaacuuauguuuuuaaaugaggauuau

SEQ ID NO: 26738 - RNA, 32 nt, Homo Sapiens
uguccacagaccaggaggagcugucacgcugg

SEQ ID NO: 26739 - RNA, 32 nt, Homo Sapiens
uaccguauccugaggcuucuuuacuuuggggc

SEQ ID NO: 26740 - RNA, 32 nt, Homo Sapiens
acagagaagccucuucugccccugccagaugu

SEQ ID NO: 26741 - RNA, 32 nt, Homo Sapiens
ccccaccauuuauguguagaauuugaaauggu

SEQ ID NO: 26742 - RNA, 32 nt, Homo Sapiens
gacuggaaagacuuuauaaucaggagcuugac

SEQ ID NO: 26743 - RNA, 32 nt, Homo Sapiens
cuucaggaagcagggucaacagcagcaggccg

SEQ ID NO: 26744 - RNA, 32 nt, Homo Sapiens
cucccucccccucccccgccgguggaugggag

SEQ ID NO: 26745 - RNA, 32 nt, Homo Sapiens
ccugccggcuccgcgcugcugugccugugauc

SEQ ID NO: 26746 - RNA, 32 nt, Homo Sapiens
uuguuuggauuaacauauauacccucuucauu

SEQ ID NO: 26747 - RNA, 31 nt, Homo Sapiens
aacacugcaaggugaugggaagaccaagggg

SEQ ID NO: 26748 - RNA, 32 nt, Homo Sapiens
cucgggcugaccuacacacacacacacacaca

SEQ ID NO: 26749 - RNA, 32 nt, Homo Sapiens
gagggaagguggccaggcucgaagcagucucu

SEQ ID NO: 26750 - RNA, 32 nt, Homo Sapiens
ugaguuuguggacuuuauuaaguaaaaucccc

SEQ ID NO: 26751 - RNA, 32 nt, Homo Sapiens
uuuucugggauuucuuuuucucuucuuucugc

SEQ ID NO: 26752 - RNA, 32 nt, Homo Sapiens
uuaaagcuguauuuuucuuaauaaauaaagga

SEQ ID NO: 26753 - RNA, 32 nt, Homo Sapiens
gaaaccuuccaggauacuagcccgccagcugu

SEQ ID NO: 26754 - RNA, 32 nt, Homo Sapiens
agcuccuuccugcaaggcaaugcugaagaagc

SEQ ID NO: 26755 - RNA, 32 nt, Homo Sapiens
acuuucuuuucacaggugucaccaccccaaua

SEQ ID NO: 26756 - RNA, 32 nt, Homo Sapiens
uggguguguugucaaggggacccuccguggcc

SEQ ID NO: 26757 - RNA, 32 nt, Homo Sapiens
aaauagccgggcgugguggcaggcgccuguag

SEQ ID NO: 26758 - RNA, 32 nt, Homo Sapiens
uaaauguuaggaagcaaaguagcuuugaauuu

SEQ ID NO: 26759 - RNA, 32 nt, Homo Sapiens
cgagggcggagccagccccuccccuacccgga

SEQ ID NO: 26760 - RNA, 32 nt, Homo Sapiens
gcucuuguuucuuuucacauagcugucuagag

SEQ ID NO: 26761 - RNA, 32 nt, Homo Sapiens
auggacccauucugguaggucccucaaccucu

SEQ ID NO: 26762 - RNA, 31 nt, Homo Sapiens
aaggaaaugcaaaaagcacagacuuuggacu

SEQ ID NO: 26763 - RNA, 32 nt, Homo Sapiens
cagccuggggagaggucgcggcggcggguuug

SEQ ID NO: 26764 - RNA, 32 nt, Homo Sapiens
acagcccugccccacacccaccuccuguguuu

SEQ ID NO: 26765 - RNA, 31 nt, Homo Sapiens
ucguaggacccagccagucucauccagcagg

SEQ ID NO: 26766 - RNA, 32 nt, Homo Sapiens
cccgauccgacccugguacccggagcggcccu

SEQ ID NO: 26767 - RNA, 32 nt, Homo Sapiens
gaauccugccccucugguguggugcggccucu

SEQ ID NO: 26768 - RNA, 32 nt, Homo Sapiens
gggcuucaugggauugugagcugcacugcuug

SEQ ID NO: 26769 - RNA, 32 nt, Homo Sapiens
gcccccagcucaccccacucccuucugccccu

SEQ ID NO: 26770 - RNA, 32 nt, Homo Sapiens
uuucucccugaacaucugcuucuuagaucgaa

SEQ ID NO: 26771 - RNA, 32 nt, Homo Sapiens
aggaaugacuuccagaggagacgaacccagga

SEQ ID NO: 26772 - RNA, 32 nt, Homo Sapiens
uaggcuuuuggacuugggaauagaaaagcaac

SEQ ID NO: 26773 - RNA, 32 nt, Homo Sapiens
cgccugcugcuucuccaccuccccuccccacc

SEQ ID NO: 26774 - RNA, 32 nt, Homo Sapiens
uuuggcagggccugggccaucccugggacaaa

SEQ ID NO: 26775 - RNA, 32 nt, Homo Sapiens
uagacuacacucuauuugaguuuaauuuuguc

SEQ ID NO: 26776 - RNA, 32 nt, Homo Sapiens
gagcagcagcuggcccgggcugcccgcagcua

SEQ ID NO: 26777 - RNA, 32 nt, Homo Sapiens
uuuaaaaugcuguuuuucaguauuaacuaugu

SEQ ID NO: 26778 - RNA, 32 nt, Homo Sapiens
uccucuuuucuuuaacacagaucugcauaaag

SEQ ID NO: 26779 - RNA, 32 nt, Homo Sapiens
uagcagucuuucaugguggaagugacacaucu

SEQ ID NO: 26780 - RNA, 32 nt, Homo Sapiens
gucucccgugcuuuccucuugaccucuacagu

SEQ ID NO: 26781 - RNA, 32 nt, Homo Sapiens
ucuacccccaagcccuucuccucuucccaauu

SEQ ID NO: 26782 - RNA, 32 nt, Homo Sapiens
uuugaguaaaaugagaaaguuaauauguggcc

SEQ ID NO: 26783 - RNA, 32 nt, Homo Sapiens
ccccaagagaaaguacacagggcuauucugua

SEQ ID NO: 26784 - RNA, 32 nt, Homo Sapiens
ugcuuuaacagucagagaaguaccucagccag

SEQ ID NO: 26785 - RNA, 29 nt, Homo Sapiens
ucguucugagcaugauaccacagugugga

SEQ ID NO: 26786 - RNA, 32 nt, Homo Sapiens
guacccgacccggcgcccuggcccaucccaug

SEQ ID NO: 26787 - RNA, 32 nt, Homo Sapiens
ugcuccuccccuccccgccgcagguauuaauc

SEQ ID NO: 26788 - RNA, 32 nt, Homo Sapiens
ugcgagccgggaagacgcggggaagaggaggc

SEQ ID NO: 26789 - RNA, 32 nt, Homo Sapiens
gcuugaaaucauauauacaguuuguaugaauu

SEQ ID NO: 26790 - RNA, 32 nt, Homo Sapiens
ggaaaagagaaaccagagauggauggcagauc

SEQ ID NO: 26791 - RNA, 32 nt, Homo Sapiens
uaguuuaauuauucuguaaauuauuuaauuuu

SEQ ID NO: 26792 - RNA, 32 nt, Homo Sapiens
guucugaaucauaacccugacucuccuggcca

SEQ ID NO: 26793 - RNA, 32 nt, Homo Sapiens
cgguugagguugcuggugggccugcucuggug

SEQ ID NO: 26794 - RNA, 32 nt, Homo Sapiens
uaaaaagugugucaagacaaccccuuucugcu

SEQ ID NO: 26795 - RNA, 32 nt, Homo Sapiens
gccuaacccgcgguggcccucgcggaguccgg

SEQ ID NO: 26796 - RNA, 32 nt, Homo Sapiens
gacacuaucggucaucucuggugucaggccau

SEQ ID NO: 26797 - RNA, 32 nt, Homo Sapiens
guguggcuuucccucccugccucccccagcuc

SEQ ID NO: 26798 - RNA, 32 nt, Homo Sapiens
uuuggcuuagagauuaaagcuccuucuaucuu

SEQ ID NO: 26799 - RNA, 32 nt, Homo Sapiens
uccauauaaccaaaaagcaugguuuauucauu

SEQ ID NO: 26800 - RNA, 32 nt, Homo Sapiens
gugacacuaacaaaaagaagaaaugaaaggga

SEQ ID NO: 26801 - RNA, 32 nt, Homo Sapiens
ccacaaugugcuccugcccacccggguuccgc

SEQ ID NO: 26802 - RNA, 32 nt, Homo Sapiens
uaugccuuaugcagcgcugaucugucccugga

SEQ ID NO: 26803 - RNA, 32 nt, Homo Sapiens
auugaauacgauuugugcacaagucaucccau

SEQ ID NO: 26804 - RNA, 32 nt, Homo Sapiens
gagagcaggagcggaccgcgcgcccgggauug

SEQ ID NO: 26805 - RNA, 32 nt, Homo Sapiens
guggugacugcuuuguagugaacuuucauaua

SEQ ID NO: 26806 - RNA, 32 nt, Homo Sapiens
cuccacagcccugcccggggcuccccugugcu

SEQ ID NO: 26807 - RNA, 32 nt, Homo Sapiens
ugauugacauaguguauguuaauguaaguuuu

SEQ ID NO: 26808 - RNA, 32 nt, Homo Sapiens
cggcccaacugcggcgucaucccggcuauaag

SEQ ID NO: 26809 - RNA, 32 nt, Homo Sapiens
ugcucuacuguaaauaugaguauuuugaccug

SEQ ID NO: 26810 - RNA, 32 nt, Homo Sapiens
cgggcauccggcuggugacccugcugguggau

SEQ ID NO: 26811 - RNA, 32 nt, Homo Sapiens
agccacuugacacuaacaccaucgagggcaau

SEQ ID NO: 26812 - RNA, 32 nt, Homo Sapiens
cagcccuggggggaggcccacgccugcuggac

SEQ ID NO: 26813 - RNA, 32 nt, Homo Sapiens
uucauuucuguccacaccccuguggguggcgg

SEQ ID NO: 26814 - RNA, 32 nt, Homo Sapiens
cauugcuacuugagugugaacaguuaccugga

SEQ ID NO: 26815 - RNA, 32 nt, Homo Sapiens
agauuagacugagaaaaauggaugguauuuuc

SEQ ID NO: 26816 - RNA, 32 nt, Homo Sapiens
gcaccuccugggagcaggcacgucuuuuggcu

SEQ ID NO: 26817 - RNA, 32 nt, Homo Sapiens
cuccguuccgccucucugugggccucucucca

SEQ ID NO: 26818 - RNA, 32 nt, Homo Sapiens
caguaacccggugccuccuccuccccaggaag

SEQ ID NO: 26819 - RNA, 32 nt, Homo Sapiens
ugugaaaaccuggccguagcagguccuuuuuc

SEQ ID NO: 26820 - RNA, 32 nt, Homo Sapiens
accaggcgcgcccgaguccacaguucugaaac

SEQ ID NO: 26821 - RNA, 30 nt, Homo Sapiens
gaagcaaagaagcuuuaagucugcccuucu

SEQ ID NO: 26822 - RNA, 32 nt, Homo Sapiens
aaggaagagagaaaauauauaugauaaucauu

SEQ ID NO: 26823 - RNA, 32 nt, Homo Sapiens
acccagggaagagaaggaagccaggccuggag

SEQ ID NO: 26824 - RNA, 32 nt, Homo Sapiens
cuuucuugcauaaucaagguuacucaaguaga

SEQ ID NO: 26825 - RNA, 32 nt, Homo Sapiens
aagggguaauguuaauuaguacacuuuguucu

SEQ ID NO: 26826 - RNA, 32 nt, Homo Sapiens
uuauaugauauugugcaaauguuugccauagg

SEQ ID NO: 26827 - RNA, 32 nt, Homo Sapiens
uucucuucagugguuauguugcuggggaagag

SEQ ID NO: 26828 - RNA, 32 nt, Homo Sapiens
aacuuagauggcauagccuacugcauaccuag

SEQ ID NO: 26829 - RNA, 32 nt, Homo Sapiens
ucccugcccggcccggcccucccuggcaaucc

SEQ ID NO: 26830 - RNA, 32 nt, Homo Sapiens
cagggaccgcagcccugacgugucucgccucu

SEQ ID NO: 26831 - RNA, 32 nt, Homo Sapiens
aaaauuuuucuuugguuauaucgaaauaguua

SEQ ID NO: 26832 - RNA, 32 nt, Homo Sapiens
cacucuuguucccacaccccaacacuuccagc

SEQ ID NO: 26833 - RNA, 32 nt, Homo Sapiens
gugggucucacagaugcuggagcagguguagg

SEQ ID NO: 26834 - RNA, 32 nt, Homo Sapiens
cccagagcugaauucauugaguauuugugccu

SEQ ID NO: 26835 - RNA, 32 nt, Homo Sapiens
cugcuggcggggggcuuggccgcugacccacg

SEQ ID NO: 26836 - RNA, 32 nt, Homo Sapiens
ccaaccccggcggcccuuucuuccucaaaugu

SEQ ID NO: 26837 - RNA, 32 nt, Homo Sapiens
aacugacuuaggaggacagucuugcuacccca

SEQ ID NO: 26838 - RNA, 32 nt, Homo Sapiens
cacgccgggucucaacaacaucgugcgaggag

SEQ ID NO: 26839 - RNA, 32 nt, Homo Sapiens
cucugagguucuuuuccagugaaguguuuagu

SEQ ID NO: 26840 - RNA, 32 nt, Homo Sapiens
ccagaaggagaagagggcccuagaggagcugc

SEQ ID NO: 26841 - RNA, 32 nt, Homo Sapiens
gccccucccucccccuggccaagccuccuucc

SEQ ID NO: 26842 - RNA, 32 nt, Homo Sapiens
cgcggccggugcaugugcggcugcuggaugcg

SEQ ID NO: 26843 - RNA, 32 nt, Homo Sapiens
agggacucuccaggcuccuccucccccuggca

SEQ ID NO: 26844 - RNA, 32 nt, Homo Sapiens
cccucuuaucuaggagcuguuuguaagcacga

SEQ ID NO: 26845 - RNA, 32 nt, Homo Sapiens
auggaagauggcaacuuugagagccuuguguu

SEQ ID NO: 26846 - RNA, 32 nt, Homo Sapiens
gugguauugggauagugcugcagccaagaacu

SEQ ID NO: 26847 - RNA, 32 nt, Homo Sapiens
ugcucugggaucugguggauagaugccaagga

SEQ ID NO: 26848 - RNA, 32 nt, Homo Sapiens
agggccagccgggaaggaggcguggauaugga

SEQ ID NO: 26849 - RNA, 32 nt, Homo Sapiens
aaacauaguuuagguaaagccugauuaugcca

SEQ ID NO: 26850 - RNA, 32 nt, Homo Sapiens
guuaaaaauaccaaaacagaaagaggguuuaa

SEQ ID NO: 26851 - RNA, 32 nt, Homo Sapiens
uauauuucguaaacuaaggaaauacacaaaag

SEQ ID NO: 26852 - RNA, 32 nt, Homo Sapiens
agagggccccacuuggccuuguggggaucaua

SEQ ID NO: 26853 - RNA, 32 nt, Homo Sapiens
ccuacagagaauagaaacaaauccauguaaac

SEQ ID NO: 26854 - RNA, 32 nt, Homo Sapiens
cauaucuuccgacguggagauuugagaagcau

SEQ ID NO: 26855 - RNA, 32 nt, Homo Sapiens
uauauaagguaacucauuuucucauuauuuuc

SEQ ID NO: 26856 - RNA, 32 nt, Homo Sapiens
auacuggguggcuugguuuagagcuaauugua

SEQ ID NO: 26857 - RNA, 32 nt, Homo Sapiens
ugugccacucucuuuuggggucuggcuugagc

SEQ ID NO: 26858 - RNA, 32 nt, Homo Sapiens
uucaagacugaauaauauaaaagccaaacaaa

SEQ ID NO: 26859 - RNA, 32 nt, Homo Sapiens
gagccgccauguaaccggcgccgcccggagcc

SEQ ID NO: 26860 - RNA, 32 nt, Homo Sapiens
gauuugaagucauauuaggaaauauuuagaca

SEQ ID NO: 26861 - RNA, 32 nt, Homo Sapiens
aggaaaaauggcaaaagaaagcugucuagggu

SEQ ID NO: 26862 - RNA, 32 nt, Homo Sapiens
uugugagggguuaaggcugggaggcgggaggg

SEQ ID NO: 26863 - RNA, 32 nt, Homo Sapiens
uaucugcacuucaagaggccaccuucuucaga

SEQ ID NO: 26864 - RNA, 32 nt, Homo Sapiens
gcacacacgacggccguuugggaggcucacag

SEQ ID NO: 26865 - RNA, 32 nt, Homo Sapiens
gcgcggccauggcgcuccugcuuucggugcug

SEQ ID NO: 26866 - RNA, 32 nt, Homo Sapiens
caagcucagggugcucccuccucagucuuugg

SEQ ID NO: 26867 - RNA, 32 nt, Homo Sapiens
cuggagaccgcaccauggagccaggcggggcc

SEQ ID NO: 26868 - RNA, 32 nt, Homo Sapiens
cugucccggggccagcuucccucgaccugggg

SEQ ID NO: 26869 - RNA, 32 nt, Homo Sapiens
uaauaaaugcuacaauagcaucagcuucauuu

SEQ ID NO: 26870 - RNA, 32 nt, Homo Sapiens
ggaaauacuguuucuaauaauaugaggaaaga

SEQ ID NO: 26871 - RNA, 30 nt, Homo Sapiens
uuguacucauggucuuauucucggagugac

SEQ ID NO: 26872 - RNA, 32 nt, Homo Sapiens
gaaauaagcuaguaauguuguuuucugucaau

SEQ ID NO: 26873 - RNA, 32 nt, Homo Sapiens
cugaaugaugucaagaaauauaccuacugcua

SEQ ID NO: 26874 - RNA, 32 nt, Homo Sapiens
ggacacguguggauaugugugcguacacgucg

SEQ ID NO: 26875 - RNA, 32 nt, Homo Sapiens
augaaauauaaaaguggaaugcaagagaugac

SEQ ID NO: 26876 - RNA, 32 nt, Homo Sapiens
gggagggccccggguucggcggccagaggcag

SEQ ID NO: 26877 - RNA, 32 nt, Homo Sapiens
ucaugcccaguagauguaaacccugaacuaaa

SEQ ID NO: 26878 - RNA, 32 nt, Homo Sapiens
uuuuccucuggucauuucagacucucaucucu

SEQ ID NO: 26879 - RNA, 32 nt, Homo Sapiens
ggaacuaugcaggccucuggagcuaggaugac

SEQ ID NO: 26880 - RNA, 32 nt, Homo Sapiens
acuuucaaggaccuauguguacuguuagugaa

SEQ ID NO: 26881 - RNA, 31 nt, Homo Sapiens
guggccauggugcugcugcugcugguggcca

SEQ ID NO: 26882 - RNA, 32 nt, Homo Sapiens
cuagaucauuuauuuauuuacuguauguauuu

SEQ ID NO: 26883 - RNA, 32 nt, Homo Sapiens
cauagucaggauacacagaccugggagucaag

SEQ ID NO: 26884 - RNA, 32 nt, Homo Sapiens
aaaacccaagacauuaaaucugccaucucagg

SEQ ID NO: 26885 - RNA, 32 nt, Homo Sapiens
ccaguccgcagugccccuccccagccucggcc

SEQ ID NO: 26886 - RNA, 32 nt, Homo Sapiens
uuguauguaaauuuaaaugaaucaagagauga

SEQ ID NO: 26887 - RNA, 32 nt, Homo Sapiens
ccagggagaugcuggacccagccuugcugucu

SEQ ID NO: 26888 - RNA, 32 nt, Homo Sapiens
agcuugcugggagagcgggacgguccggagca

SEQ ID NO: 26889 - RNA, 32 nt, Homo Sapiens
ugaguguguuugucaccguuggggauugggga

SEQ ID NO: 26890 - RNA, 32 nt, Homo Sapiens
uguaaauucaaagaaaagcuaucacccauuua

SEQ ID NO: 26891 - RNA, 32 nt, Homo Sapiens
uuugucuuuucucagguuguaaacggaauugc

SEQ ID NO: 26892 - RNA, 32 nt, Homo Sapiens
gaaauaagauguagcagauuuuuuguagcaag

SEQ ID NO: 26893 - RNA, 32 nt, Homo Sapiens
aggcuuugacauucuggcacaucacaucaaau

SEQ ID NO: 26894 - RNA, 32 nt, Homo Sapiens
gcccaggucccggcccugggugcucagccagc

SEQ ID NO: 26895 - RNA, 32 nt, Homo Sapiens
gaggcgaggcgaggcgcggcgccgcugcacac

SEQ ID NO: 26896 - RNA, 32 nt, Homo Sapiens
aaaguuagugguauucagggacaguguagcaa

SEQ ID NO: 26897 - RNA, 32 nt, Homo Sapiens
cuacaaaaugcacauugcuauaccauagccug

SEQ ID NO: 26898 - RNA, 32 nt, Homo Sapiens
aaugugcccuuaaaauugugcuggggcugcag

SEQ ID NO: 26899 - RNA, 32 nt, Homo Sapiens
auguguaguuuucaaggucuuggccagaaccu

SEQ ID NO: 26900 - RNA, 32 nt, Homo Sapiens
cgaaagauauuguaagaauauucauagcagcu

SEQ ID NO: 26901 - RNA, 32 nt, Homo Sapiens
auaaugagagaauaaacuuauuuuauuuaacg

SEQ ID NO: 26902 - RNA, 32 nt, Homo Sapiens
ccaccucagccuucgugacuagugaggugcgc

SEQ ID NO: 26903 - RNA, 32 nt, Homo Sapiens
aguauuuaauuuccucuuaaacauguuaugag

SEQ ID NO: 26904 - RNA, 32 nt, Homo Sapiens
cugcucugcaaccucccugcuauuccaugaga

SEQ ID NO: 26905 - RNA, 32 nt, Homo Sapiens
gguuccccuggccgccuccucugugucauugu

SEQ ID NO: 26906 - RNA, 32 nt, Homo Sapiens
ccccacucacugcagagcugcugccugccaau

SEQ ID NO: 26907 - RNA, 32 nt, Homo Sapiens
augugugggucugucuuccuuaugccaaucag

SEQ ID NO: 26908 - RNA, 32 nt, Homo Sapiens
uugggguuuuauuuuuauauacauuucaguua

SEQ ID NO: 26909 - RNA, 32 nt, Homo Sapiens
uuucugaguuuuuagcaaaauguaaugaaaua

SEQ ID NO: 26910 - RNA, 32 nt, Homo Sapiens
ucucuuccugugugagccaccacacccagccu

SEQ ID NO: 26911 - RNA, 32 nt, Homo Sapiens
ggagggucggagcucugguggagagaguguug

SEQ ID NO: 26912 - RNA, 32 nt, Homo Sapiens
uuacuagauaaaauguauaaagcucucuguac

SEQ ID NO: 26913 - RNA, 32 nt, Homo Sapiens
aaagcuuuuuuuuuuuuuuuuagcauguguuu

SEQ ID NO: 26914 - RNA, 32 nt, Homo Sapiens
auugugccaacuauccaaaaacuuagaugagc

SEQ ID NO: 26915 - RNA, 32 nt, Homo Sapiens
gugugaaauggcaucuaccauuuccucuggau

SEQ ID NO: 26916 - RNA, 32 nt, Homo Sapiens
agauccugcagacugcguggaggccaugcuuu

SEQ ID NO: 26917 - RNA, 32 nt, Homo Sapiens
ugugcuccccagcccccucccccaugcagacg

SEQ ID NO: 26918 - RNA, 32 nt, Homo Sapiens
auagauuguucuaaucuuugaaaucaggguca

SEQ ID NO: 26919 - RNA, 32 nt, Homo Sapiens
cggccccgcgcgcucgcagucugucucccgcc

SEQ ID NO: 26920 - RNA, 32 nt, Homo Sapiens
auugguucuuauaguaacaaauaaaaagcugu

SEQ ID NO: 26921 - RNA, 29 nt, Homo Sapiens
caacauggucgcugcgcacgcugcccauu

SEQ ID NO: 26922 - RNA, 32 nt, Homo Sapiens
uccccucccccuccccaacucagaucuggccc

SEQ ID NO: 26923 - RNA, 32 nt, Homo Sapiens
auugcucggaggggcgggggcggggaggccua

SEQ ID NO: 26924 - RNA, 32 nt, Homo Sapiens
cacagccauggauugcaaagauagaccagcuu

SEQ ID NO: 26925 - RNA, 32 nt, Homo Sapiens
cugacagcgcgcuuucgccgugggcuggacaa

SEQ ID NO: 26926 - RNA, 32 nt, Homo Sapiens
uuggcaucaaggaugaacaggaauagagagag

SEQ ID NO: 26927 - RNA, 32 nt, Homo Sapiens
aucccuuucccucucugcugagcauuuaacca

SEQ ID NO: 26928 - RNA, 32 nt, Homo Sapiens
aaaauaaaauguuucauuaugcacuuuuagaa

SEQ ID NO: 26929 - RNA, 32 nt, Homo Sapiens
ggaaagcagcccggagcugggugcuggggaag

SEQ ID NO: 26930 - RNA, 32 nt, Homo Sapiens
aaccgaaagcuauauuguacuguguauuuuua

SEQ ID NO: 26931 - RNA, 32 nt, Homo Sapiens
ggugggggcuaggggagggauaacauuacaug

SEQ ID NO: 26932 - RNA, 32 nt, Homo Sapiens
cacuggcauugugcuugacauacaucaucaua

SEQ ID NO: 26933 - RNA, 32 nt, Homo Sapiens
guccgcauucaguauucaugugacacucaggc

SEQ ID NO: 26934 - RNA, 32 nt, Homo Sapiens
agaaaggaaugggagcccagacagccacucug

SEQ ID NO: 26935 - RNA, 32 nt, Homo Sapiens
guccugagggccgguuuaggccuuuugucuuc

SEQ ID NO: 26936 - RNA, 32 nt, Homo Sapiens
gggaggaaaagucccuccuucucaaggaugaa

SEQ ID NO: 26937 - RNA, 32 nt, Homo Sapiens
uucaaaauaaaauuauuuuuaaaagaagaaua

SEQ ID NO: 26938 - RNA, 32 nt, Homo Sapiens
gacccucuccccucacuccccccaugucgcag

SEQ ID NO: 26939 - RNA, 32 nt, Homo Sapiens
uguuggucuccauggccacuguggaccgggac

SEQ ID NO: 26940 - RNA, 32 nt, Homo Sapiens
cucucagaggccgguggagacgcugcuccauu

SEQ ID NO: 26941 - RNA, 32 nt, Homo Sapiens
aggcugugguggcugugaggacacugcggggg

SEQ ID NO: 26942 - RNA, 32 nt, Homo Sapiens
ccucccucagcccccucccccaucucaguccc

SEQ ID NO: 26943 - RNA, 32 nt, Homo Sapiens
augggaguguuauggcagcaucauaccaaggc

SEQ ID NO: 26944 - RNA, 32 nt, Homo Sapiens
uacacagccuugcccggccgccggggcacaua

SEQ ID NO: 26945 - RNA, 32 nt, Homo Sapiens
cucguuuccaucaagcauuccaguacccccac

SEQ ID NO: 26946 - RNA, 32 nt, Homo Sapiens
cuagucugccugcccgcccgcccgccacggag

SEQ ID NO: 26947 - RNA, 32 nt, Homo Sapiens
agagaagaccucugugaggaaagcacacaguc

SEQ ID NO: 26948 - RNA, 32 nt, Homo Sapiens
aguaauuucuuaccuggucauuauuuagucua

SEQ ID NO: 26949 - RNA, 32 nt, Homo Sapiens
cccucauaggcccagggcuaccaccuuggagc

SEQ ID NO: 26950 - RNA, 32 nt, Homo Sapiens
gccgccugcugcgaggccgccgggcucccggu

SEQ ID NO: 26951 - RNA, 32 nt, Homo Sapiens
agcagguagaggaggacugaugacacgagcug

SEQ ID NO: 26952 - RNA, 32 nt, Homo Sapiens
uaguugugaacauugcuuguguguguuuuucu

SEQ ID NO: 26953 - RNA, 32 nt, Homo Sapiens
gaggcggggcgcgggggcaguggucggcgagc

SEQ ID NO: 26954 - RNA, 32 nt, Homo Sapiens
accugcacauauaccccaagucuaaauaaaag

SEQ ID NO: 26955 - RNA, 32 nt, Homo Sapiens
gaauaacuauaaauaaaagaugaaguuaggaa

SEQ ID NO: 26956 - RNA, 32 nt, Homo Sapiens
agauucauuuacauuucuuuuuccucccuauc

SEQ ID NO: 26957 - RNA, 32 nt, Homo Sapiens
aaacuguuacacaaaauauaaaccuaacgugu

SEQ ID NO: 26958 - RNA, 32 nt, Homo Sapiens
cgucugggaccgaggagcugccguugugcugu

SEQ ID NO: 26959 - RNA, 32 nt, Homo Sapiens
aggcagccgccgccgugccgcuccucccuugc

SEQ ID NO: 26960 - RNA, 32 nt, Homo Sapiens
cuggggccaucugggaugucucggggguaucc

SEQ ID NO: 26961 - RNA, 32 nt, Homo Sapiens
gcccaaucucucauuacuccuggucuugggag

SEQ ID NO: 26962 - RNA, 32 nt, Homo Sapiens
gacccagauugugacaagacauuuguuuucuu

SEQ ID NO: 26963 - RNA, 32 nt, Homo Sapiens
acacugggggugggggcggggggaagaugcgg

SEQ ID NO: 26964 - RNA, 32 nt, Homo Sapiens
uguauuauuuagacuuuuaacauauagagcua

SEQ ID NO: 26965 - RNA, 32 nt, Homo Sapiens
agcaauuuucuguuccucuccuuccaccacuu

SEQ ID NO: 26966 - RNA, 32 nt, Homo Sapiens
ccagccgcucguccgaggcccgcgaggagcug

SEQ ID NO: 26967 - RNA, 32 nt, Homo Sapiens
guucuuggcugauguucuguaucuuaacauga

SEQ ID NO: 26968 - RNA, 32 nt, Homo Sapiens
uugugggcacgccuggaacacacgccacaucc

SEQ ID NO: 26969 - RNA, 32 nt, Homo Sapiens
uuaucauugcuaauacuuaggacaacgaaaua

SEQ ID NO: 26970 - RNA, 32 nt, Homo Sapiens
ugagcaucugcaguugcccagccccaauucuu

SEQ ID NO: 26971 - RNA, 32 nt, Homo Sapiens
aaccguauuucagugauuuucuuaauaccuua

SEQ ID NO: 26972 - RNA, 32 nt, Homo Sapiens
cagauuauggaugauuaaauuugaugacuuau

SEQ ID NO: 26973 - RNA, 32 nt, Homo Sapiens
cccacggcauggagcaggacacugccgcagug

SEQ ID NO: 26974 - RNA, 32 nt, Homo Sapiens
ugauagcugcguaaucauacugcggcaccguu

SEQ ID NO: 26975 - RNA, 32 nt, Homo Sapiens
ggguuucgcucuuguuguccaggcuggagugc

SEQ ID NO: 26976 - RNA, 32 nt, Homo Sapiens
ugggcagugccagccccuccucaccacucuuc

SEQ ID NO: 26977 - RNA, 32 nt, Homo Sapiens
uucucccggggcugagucccugcccggacucc

SEQ ID NO: 26978 - RNA, 32 nt, Homo Sapiens
gaaaaauaaaacaaaaaugguuagaaaacguu

SEQ ID NO: 26979 - RNA, 32 nt, Homo Sapiens
ugggggcgcuauugcuucagcugcugaaggga

SEQ ID NO: 26980 - RNA, 30 nt, Homo Sapiens
uugugugucuguguguugagugagcugguc

SEQ ID NO: 26981 - RNA, 32 nt, Homo Sapiens
cagggcugaggguaaggaaaagaagagacuag

SEQ ID NO: 26982 - RNA, 32 nt, Homo Sapiens
uacagcuuaaagagacacuuuuuuagaaaucu

SEQ ID NO: 26983 - RNA, 32 nt, Homo Sapiens
uaugccuccauuuuccucugcugcauggcccc

SEQ ID NO: 26984 - RNA, 31 nt, Homo Sapiens
ugcuccuuggccugccugcccgccagccacg

SEQ ID NO: 26985 - RNA, 32 nt, Homo Sapiens
ucaaauuauuaccaugaguauaauuuuaagaa

SEQ ID NO: 26986 - RNA, 32 nt, Homo Sapiens
ccugauggucccugucucaccccugaaaacau

SEQ ID NO: 26987 - RNA, 32 nt, Homo Sapiens
accucccggacggggcggcuggccaggcaggg

SEQ ID NO: 26988 - RNA, 32 nt, Homo Sapiens
caggcuuugucauggcggcugcugcugcacgc

SEQ ID NO: 26989 - RNA, 32 nt, Homo Sapiens
caucacuugaguuccuucuuaaacuuuucggc

SEQ ID NO: 26990 - RNA, 32 nt, Homo Sapiens
cugcuuucuuugcugcccuuccagggagcugc

SEQ ID NO: 26991 - RNA, 32 nt, Homo Sapiens
gcucaggcuguggacauagaaaccagaaagcc

SEQ ID NO: 26992 - RNA, 30 nt, Homo Sapiens
cuggcggaaugcgagccgccggccgggggc

SEQ ID NO: 26993 - RNA, 32 nt, Homo Sapiens
cgugguggguggcagcuguacaccuccagggu

SEQ ID NO: 26994 - RNA, 32 nt, Homo Sapiens
uccaggggccccagcuggccgugcucccccgg

SEQ ID NO: 26995 - RNA, 32 nt, Homo Sapiens
acauuaaaaguuaaauguugacugcuaauguu

SEQ ID NO: 26996 - RNA, 32 nt, Homo Sapiens
uugcugguuaguaguauauaaauucagaguca

SEQ ID NO: 26997 - RNA, 32 nt, Homo Sapiens
uuggcacuguaaauaaaccagcuugcaaaaaa

SEQ ID NO: 26998 - RNA, 32 nt, Homo Sapiens
aaccagaguuuuugaaaaggcuuauuuuauac

SEQ ID NO: 26999 - RNA, 32 nt, Homo Sapiens
aauccagcugaacaaagauacuguaacauuau

SEQ ID NO: 27000 - RNA, 32 nt, Homo Sapiens
gaccuggaaggggucaucgacuucucggcggc

SEQ ID NO: 27001 - RNA, 32 nt, Homo Sapiens
gucugaacaaagucucccaugaacccacggca

SEQ ID NO: 27002 - RNA, 32 nt, Homo Sapiens
uacugaccacgacucuggucuuuccuguuguu

SEQ ID NO: 27003 - RNA, 32 nt, Homo Sapiens
ccgccccaaacacuagaauagacuggccugaa

SEQ ID NO: 27004 - RNA, 32 nt, Homo Sapiens
uuacccuauucuuaccuagccucccccgacuu

SEQ ID NO: 27005 - RNA, 32 nt, Homo Sapiens
aaagcuuaucuaacaaauuauuaaaggaacua

SEQ ID NO: 27006 - RNA, 32 nt, Homo Sapiens
uuugaccaaaaauuuuacaguaaaaauuguua

SEQ ID NO: 27007 - RNA, 32 nt, Homo Sapiens
gggggcgguguuggccuggcuucuggaaugga

SEQ ID NO: 27008 - RNA, 32 nt, Homo Sapiens
ccuaagaaauaccacccuaccacuaacaaaau

SEQ ID NO: 27009 - RNA, 32 nt, Homo Sapiens
gggcucugggauccacgagacaaccagagagg

SEQ ID NO: 27010 - RNA, 32 nt, Homo Sapiens
ucuucaccugccaccacacacacacacacaca

SEQ ID NO: 27011 - RNA, 32 nt, Homo Sapiens
ccuagauuucuuauuucacauaucuguuuaug

SEQ ID NO: 27012 - RNA, 32 nt, Homo Sapiens
uucgugaaugucaaagugucaugaggaaagug

SEQ ID NO: 27013 - RNA, 32 nt, Homo Sapiens
gcccuggguagucuaccauuuacuucacccca

SEQ ID NO: 27014 - RNA, 32 nt, Homo Sapiens
aauuaagauauguuuggaccauaaagaaucca

SEQ ID NO: 27015 - RNA, 32 nt, Homo Sapiens
acaguauggcaguuaauuauaaaauuauuuug

SEQ ID NO: 27016 - RNA, 32 nt, Homo Sapiens
agcccggcgugccugcagcugccgucgcucgg

SEQ ID NO: 27017 - RNA, 32 nt, Homo Sapiens
aaagccaccagcucccaaaacaggaaguauac

SEQ ID NO: 27018 - RNA, 32 nt, Homo Sapiens
gcucuacaucuucugccuuagucucaguuugu

SEQ ID NO: 27019 - RNA, 32 nt, Homo Sapiens
ccugugaguaaagaaugucacuuuuuaacagu

SEQ ID NO: 27020 - RNA, 31 nt, Homo Sapiens
cucagggccgcgcaccugccccgcgcaccug

SEQ ID NO: 27021 - RNA, 32 nt, Homo Sapiens
ugcaggguguggaauugcccuuugggguccuu

SEQ ID NO: 27022 - RNA, 32 nt, Homo Sapiens
ucuaugguuacaaggggcugcugcugcugcug

SEQ ID NO: 27023 - RNA, 32 nt, Homo Sapiens
ggggaagggcuacucaccuuuuuuaugaaaca

SEQ ID NO: 27024 - RNA, 32 nt, Homo Sapiens
guagacguguguuucuagagccugcuggaucu

SEQ ID NO: 27025 - RNA, 32 nt, Homo Sapiens
gauaguauuacauuugaaauuguuauaagggu

SEQ ID NO: 27026 - RNA, 32 nt, Homo Sapiens
gcauaauacauuuuggaggcuaucaaguagaa

SEQ ID NO: 27027 - RNA, 32 nt, Homo Sapiens
aggugccagggcugugggaggggcaagcuacg

SEQ ID NO: 27028 - RNA, 31 nt, Homo Sapiens
ucuuuccagcgcagucauccagaaaggccca

SEQ ID NO: 27029 - RNA, 32 nt, Homo Sapiens
cugcuuauuuagugcuguauuuuuuaaacguu

SEQ ID NO: 27030 - RNA, 32 nt, Homo Sapiens
uagaguaaugcaacagaaggcuuuugaggaaa

SEQ ID NO: 27031 - RNA, 32 nt, Homo Sapiens
cagaacugaaaguguuuucagguaucuuugua

SEQ ID NO: 27032 - RNA, 32 nt, Homo Sapiens
uggcuggggagccccagggauagcggucggac

SEQ ID NO: 27033 - RNA, 32 nt, Homo Sapiens
cugacgggguggcagugcggcggguuacggcc

SEQ ID NO: 27034 - RNA, 32 nt, Homo Sapiens
uaccuuaacuguuuuuaacauggauccucugu

SEQ ID NO: 27035 - RNA, 32 nt, Homo Sapiens
guuaugggguuuaccuguuuuacuuuugggua

SEQ ID NO: 27036 - RNA, 32 nt, Homo Sapiens
aaguccugaacaugauuguggaaguguguugc

SEQ ID NO: 27037 - RNA, 32 nt, Homo Sapiens
gaaaccaagauuggcuagagauauaucuuaau

SEQ ID NO: 27038 - RNA, 32 nt, Homo Sapiens
cucccacugugggguuauuguuuacaucacag

SEQ ID NO: 27039 - RNA, 32 nt, Homo Sapiens
gagacgcacuucuggcggccaccagccaucug

SEQ ID NO: 27040 - RNA, 32 nt, Homo Sapiens
accuuggcagguggagaggaggauggggacca

SEQ ID NO: 27041 - RNA, 32 nt, Homo Sapiens
gcuccgcgcuucuggagcacuggccaaggcgg

SEQ ID NO: 27042 - RNA, 32 nt, Homo Sapiens
uguggcagaaaaguaaacaauggaagggccuu

SEQ ID NO: 27043 - RNA, 32 nt, Homo Sapiens
ccacucugugcaaguaagcaucuuacaacugg

SEQ ID NO: 27044 - RNA, 32 nt, Homo Sapiens
gcuuaauuucaaaagaaaaaugccuaauugaa

SEQ ID NO: 27045 - RNA, 32 nt, Homo Sapiens
gggaguucugaacauggcuggguucaugaagg

SEQ ID NO: 27046 - RNA, 32 nt, Homo Sapiens
gacuggagcggguggggccagggcgguggugg

SEQ ID NO: 27047 - RNA, 32 nt, Homo Sapiens
uguuuaauguaaucaguuuucauuuuaauauc

SEQ ID NO: 27048 - RNA, 32 nt, Homo Sapiens
caccccccgccgcagucgcgggccucucccgg

SEQ ID NO: 27049 - RNA, 32 nt, Homo Sapiens
ugagugggguugcugccuguauucccuguuuc

SEQ ID NO: 27050 - RNA, 32 nt, Homo Sapiens
gaaaguuuucugaaacaaagagacuuacuaau

SEQ ID NO: 27051 - RNA, 32 nt, Homo Sapiens
uccugcccgcccagcacccccaggcccugggg

SEQ ID NO: 27052 - RNA, 32 nt, Homo Sapiens
aaaaccucagaaugaugaaaaauaugaaugau

SEQ ID NO: 27053 - RNA, 32 nt, Homo Sapiens
acauaaagcucuauguuuuuugagguggagug

SEQ ID NO: 27054 - RNA, 32 nt, Homo Sapiens
uagaggguuugaguccgcaucgccacagcuga

SEQ ID NO: 27055 - RNA, 32 nt, Homo Sapiens
ugcauugugucugaaauauguaaaaguaguga

SEQ ID NO: 27056 - RNA, 32 nt, Homo Sapiens
agucagugaaacaaaauggagagcguauucug

SEQ ID NO: 27057 - RNA, 32 nt, Homo Sapiens
uguugggcaauuaguuuguaauuuguuuuagg

SEQ ID NO: 27058 - RNA, 32 nt, Homo Sapiens
cugggugccccggcggcgccacgcuuggcugg

SEQ ID NO: 27059 - RNA, 32 nt, Homo Sapiens
uacaauguuguagugaauaacuuuacacacug

SEQ ID NO: 27060 - RNA, 32 nt, Homo Sapiens
ucccaagagggucggagaaggaaaagccucug

SEQ ID NO: 27061 - RNA, 30 nt, Homo Sapiens
ggaauugucugugugugggcauucagaugg

SEQ ID NO: 27062 - RNA, 32 nt, Homo Sapiens
ugacauauauguauauuaaaauaauugccuau

SEQ ID NO: 27063 - RNA, 32 nt, Homo Sapiens
ccucugcuucuacuccuucuuccugggcaagg

SEQ ID NO: 27064 - RNA, 32 nt, Homo Sapiens
cuuuuaugugaugccuuuuuuauuuauucagg

SEQ ID NO: 27065 - RNA, 32 nt, Homo Sapiens
aauaguucgcagaguuuuuucuucuaaaagga

SEQ ID NO: 27066 - RNA, 32 nt, Homo Sapiens
ugguaugaaaacagucugugaacugcaagucu

SEQ ID NO: 27067 - RNA, 32 nt, Homo Sapiens
uaaaaacaaaaauaauguccuuguggccucuu

SEQ ID NO: 27068 - RNA, 32 nt, Homo Sapiens
agguaacaguuauaucaagcuuaauaugugcu

SEQ ID NO: 27069 - RNA, 32 nt, Homo Sapiens
uuugucauuaaaucauucuaugcugauuagcu

SEQ ID NO: 27070 - RNA, 32 nt, Homo Sapiens
agucaaggugugagaugcacaaugcgaaaccu

SEQ ID NO: 27071 - RNA, 32 nt, Homo Sapiens
gacuggagaugaugggagccaguuggauagcc

SEQ ID NO: 27072 - RNA, 32 nt, Homo Sapiens
ucacuagcacggcucagccuccugcuaucccc

SEQ ID NO: 27073 - RNA, 32 nt, Homo Sapiens
cuggacagccuggcuucuuacuggcauugucc

SEQ ID NO: 27074 - RNA, 32 nt, Homo Sapiens
acgccuggccaauuuuuuguauuuucaguuga

SEQ ID NO: 27075 - RNA, 32 nt, Homo Sapiens
ggcuggucucgaacuccugaccucaggggauc

SEQ ID NO: 27076 - RNA, 32 nt, Homo Sapiens
acggacagggggcgcugcgcgcggccuggggc

SEQ ID NO: 27077 - RNA, 28 nt, Homo Sapiens
augccaguuacagacuucagcgaagggu

SEQ ID NO: 27078 - RNA, 32 nt, Homo Sapiens
auucuccagugagugcacacacuaugcgagga

SEQ ID NO: 27079 - RNA, 32 nt, Homo Sapiens
aauucaugagaggaacucuaucuagucugaga

SEQ ID NO: 27080 - RNA, 32 nt, Homo Sapiens
ugugcgccucccauucuucucuacccagaacc

SEQ ID NO: 27081 - RNA, 32 nt, Homo Sapiens
ucagaggagaaggcaggcagggcccagugaga

SEQ ID NO: 27082 - RNA, 32 nt, Homo Sapiens
aaaauugcaaacaaaaucaucuuuaaugggcc

SEQ ID NO: 27083 - RNA, 32 nt, Homo Sapiens
gaucccaggauccugggugcugucugggcccg

SEQ ID NO: 27084 - RNA, 32 nt, Homo Sapiens
aauuugcuaaggaacuuuaacuucaaauacau

SEQ ID NO: 27085 - RNA, 32 nt, Homo Sapiens
caaaacccaugguuuaaaucuauaugguuugu

SEQ ID NO: 27086 - RNA, 32 nt, Homo Sapiens
gucuggacucggcuggccguucccuccagccc

SEQ ID NO: 27087 - RNA, 32 nt, Homo Sapiens
ggaggagguggaaagcggggcuguggcgggcc

SEQ ID NO: 27088 - RNA, 32 nt, Homo Sapiens
cuaacauggcuaaacccuucucuacugaaaau

SEQ ID NO: 27089 - RNA, 32 nt, Homo Sapiens
gagucgcugcugcagcucucgggaaagcugcc

SEQ ID NO: 27090 - RNA, 32 nt, Homo Sapiens
uuaggaaguauuuucaugacauguuuucagaa

SEQ ID NO: 27091 - RNA, 32 nt, Homo Sapiens
gucagcugguucauaacauaggccaaauucua

SEQ ID NO: 27092 - RNA, 32 nt, Homo Sapiens
cucauguggacucagaaaaacacacaccaccu

SEQ ID NO: 27093 - RNA, 31 nt, Homo Sapiens
ucuucugaauaaaaagaguauucacuauuua

SEQ ID NO: 27094 - RNA, 32 nt, Homo Sapiens
gaacaccagaaagaguguugguguguagguag

SEQ ID NO: 27095 - RNA, 32 nt, Homo Sapiens
uuccugaagcaucuccagggcuggaugccaug

SEQ ID NO: 27096 - RNA, 32 nt, Homo Sapiens
gcuggcgccucccagcuucuguacuccgcgaa

SEQ ID NO: 27097 - RNA, 32 nt, Homo Sapiens
gagguuagggacuuauccugugcuuguaaaua

SEQ ID NO: 27098 - RNA, 32 nt, Homo Sapiens
ucaccagcaaaguggaaaaagaagcguuucac

SEQ ID NO: 27099 - RNA, 32 nt, Homo Sapiens
accccgggccgcggccaacuucucuggacugg

SEQ ID NO: 27100 - RNA, 32 nt, Homo Sapiens
uuacuuaauucuaccagccuuuauugagccug

SEQ ID NO: 27101 - RNA, 32 nt, Homo Sapiens
accgcugacccgcagcgccgccggcucccguc

SEQ ID NO: 27102 - RNA, 32 nt, Homo Sapiens
aucuguuugugauuucugucauaagcauuuug

SEQ ID NO: 27103 - RNA, 31 nt, Homo Sapiens
cauaagaaccacuaaucccaggcaagcccag

SEQ ID NO: 27104 - RNA, 32 nt, Homo Sapiens
cgugcgcacacagaccggucggaggcgagaac

SEQ ID NO: 27105 - RNA, 32 nt, Homo Sapiens
ugauauuuuuauucguugcuuuuuacuuuuca

SEQ ID NO: 27106 - RNA, 32 nt, Homo Sapiens
uguaaaaaugucaggaaaaguaugaucaucua

SEQ ID NO: 27107 - RNA, 32 nt, Homo Sapiens
caggcuggaguucaggggcuauucccaggugu

SEQ ID NO: 27108 - RNA, 32 nt, Homo Sapiens
ugccagguuggacgcagcugcugcugcccuga

SEQ ID NO: 27109 - RNA, 32 nt, Homo Sapiens
ccaggcccgagccacgcggucuuccgggcccg

SEQ ID NO: 27110 - RNA, 32 nt, Homo Sapiens
uccccauguuagugugcccucuccagggagac

SEQ ID NO: 27111 - RNA, 32 nt, Homo Sapiens
aucuuaauuaaaaauaaaugcccaaaauguag

SEQ ID NO: 27112 - RNA, 29 nt, Homo Sapiens
acauuucuggcccaauacccaaaaggguu

SEQ ID NO: 27113 - RNA, 32 nt, Homo Sapiens
uacauuuggagaacccguacucuagggccaaa

SEQ ID NO: 27114 - RNA, 32 nt, Homo Sapiens
uuucuuuccaaagccuauucuuucucccacca

SEQ ID NO: 27115 - RNA, 32 nt, Homo Sapiens
guguuuagaauuugcuuggccuuuaaacacga

SEQ ID NO: 27116 - RNA, 32 nt, Homo Sapiens
agcucaacuccgagguagagggcucacuaggc

SEQ ID NO: 27117 - RNA, 32 nt, Homo Sapiens
ccaauaggcagacugugucuagagucaugcau

SEQ ID NO: 27118 - RNA, 32 nt, Homo Sapiens
auuucuaguucaugaagaaaucucucccaaua

SEQ ID NO: 27119 - RNA, 32 nt, Homo Sapiens
cgccgaaccuugaccucaccccugccccuacc

SEQ ID NO: 27120 - RNA, 32 nt, Homo Sapiens
uggaaauuuguaguuuuuguguguguaugcau

SEQ ID NO: 27121 - RNA, 32 nt, Homo Sapiens
uguguggcggguguagaaggagcuaaagagau

SEQ ID NO: 27122 - RNA, 32 nt, Homo Sapiens
uuauauacuguaucauauacaaaccuguuagg

SEQ ID NO: 27123 - RNA, 29 nt, Homo Sapiens
acucaugaaaauaaaauuuucaucuucuc

SEQ ID NO: 27124 - RNA, 32 nt, Homo Sapiens
aacaaaaaggacccgguuuaucuucagaaggg

SEQ ID NO: 27125 - RNA, 32 nt, Homo Sapiens
aguaauagcacuagaagaauuuuucuguugug

SEQ ID NO: 27126 - RNA, 32 nt, Homo Sapiens
gcaagggcuugagcuggaaaagaugaccagac

SEQ ID NO: 27127 - RNA, 32 nt, Homo Sapiens
gagcugauggcacuaacacuggguuuccaaga

SEQ ID NO: 27128 - RNA, 32 nt, Homo Sapiens
agaucgugcuggcgcuguuggggcugcucaug

SEQ ID NO: 27129 - RNA, 32 nt, Homo Sapiens
gggaacacauccugguguaucaccuuacuggc

SEQ ID NO: 27130 - RNA, 32 nt, Homo Sapiens
cuaaaacuacauugaaaauguaaauacauagc

SEQ ID NO: 27131 - RNA, 32 nt, Homo Sapiens
ggucuaggcuaagggggugugugcccaccucc

SEQ ID NO: 27132 - RNA, 32 nt, Homo Sapiens
agauccuccgcggaggccccugagggacgagc

SEQ ID NO: 27133 - RNA, 32 nt, Homo Sapiens
ccuguucucgccaaucucuaugccuuugcacu

SEQ ID NO: 27134 - RNA, 32 nt, Homo Sapiens
cuuaugugaggaccagugcuuucucucuuugc

SEQ ID NO: 27135 - RNA, 32 nt, Homo Sapiens
caguggcagcagccuccucauccucuccagac

SEQ ID NO: 27136 - RNA, 32 nt, Homo Sapiens
accuucucuguuguaucaguacuuugagugag

SEQ ID NO: 27137 - RNA, 32 nt, Homo Sapiens
ccucugguauacuguuauguucuggagaaaau

SEQ ID NO: 27138 - RNA, 32 nt, Homo Sapiens
gagcaccuacuaugugcccagcccuguucuag

SEQ ID NO: 27139 - RNA, 32 nt, Homo Sapiens
auacagagggaagaggcugggagcaaggccgg

SEQ ID NO: 27140 - RNA, 32 nt, Homo Sapiens
gaggacugccagcacgcugucaccucucacaa

SEQ ID NO: 27141 - RNA, 32 nt, Homo Sapiens
aaauucuguuacaacaaaucccuguaugacaa

SEQ ID NO: 27142 - RNA, 32 nt, Homo Sapiens
gaggccgcacaggagcguccccagcagguccc

SEQ ID NO: 27143 - RNA, 32 nt, Homo Sapiens
cuuagggagcagauaauuuaauucaugaugga

SEQ ID NO: 27144 - RNA, 32 nt, Homo Sapiens
ugggguuuugcucugucgcccaggcugcaacc

SEQ ID NO: 27145 - RNA, 32 nt, Homo Sapiens
aaaggaaaacaucaagcuaaaagacaagaaau

SEQ ID NO: 27146 - RNA, 30 nt, Homo Sapiens
aggugcccgugcgcccggccugcuaagcgc

SEQ ID NO: 27147 - RNA, 32 nt, Homo Sapiens
gguuaggggcaccaacacccccugcccugcac

SEQ ID NO: 27148 - RNA, 32 nt, Homo Sapiens
cuaaccaauauuuucaaaagaacuucaucauu

SEQ ID NO: 27149 - RNA, 32 nt, Homo Sapiens
gaccucacuccagggcacggcgugggaggggu

SEQ ID NO: 27150 - RNA, 32 nt, Homo Sapiens
uuuuggguuuuuuuuuuuuuuaauguuuccua

SEQ ID NO: 27151 - RNA, 32 nt, Homo Sapiens
uuuuggauucuccaccuccccccagucucugc

SEQ ID NO: 27152 - RNA, 32 nt, Homo Sapiens
aaauuagcugggugugguggugugcgccugua

SEQ ID NO: 27153 - RNA, 32 nt, Homo Sapiens
acgcccggccccacucccaccauccugugaac

SEQ ID NO: 27154 - RNA, 31 nt, Homo Sapiens
gggcucacucagccacccugaguugcuuuuc

SEQ ID NO: 27155 - RNA, 32 nt, Homo Sapiens
gacuuuauaacuuuuccaguguuugauuccca

SEQ ID NO: 27156 - RNA, 32 nt, Homo Sapiens
uuggcuguuccaacucaccacagccucugaaa

SEQ ID NO: 27157 - RNA, 32 nt, Homo Sapiens
caagguggcgagauaucuguaugggagcucug

SEQ ID NO: 27158 - RNA, 32 nt, Homo Sapiens
ucagcgggcgaguccccggcuccuccagcucc

SEQ ID NO: 27159 - RNA, 32 nt, Homo Sapiens
cagagcuaggccggagcgcgggccgcugacgc

SEQ ID NO: 27160 - RNA, 32 nt, Homo Sapiens
ucucagggucuucaguuuuucuauaaguuucc

SEQ ID NO: 27161 - RNA, 32 nt, Homo Sapiens
uuuuucgagaaaguacaaacagaacugcuuua

SEQ ID NO: 27162 - RNA, 32 nt, Homo Sapiens
acuuuuguauuaucacuauuuaaaagauccua

SEQ ID NO: 27163 - RNA, 27 nt, Homo Sapiens
cgauucuugugcuucagccuccugagu

SEQ ID NO: 27164 - RNA, 32 nt, Homo Sapiens
caaaaacagacuggggaaccaauauggaucug

SEQ ID NO: 27165 - RNA, 32 nt, Homo Sapiens
gcuggcccaggucuccucuccagucccccugc

SEQ ID NO: 27166 - RNA, 32 nt, Homo Sapiens
uagccuccccaccccaccuggagcuucaccaa

SEQ ID NO: 27167 - RNA, 32 nt, Homo Sapiens
gauggccccccgcccccacaacccaucagcag

SEQ ID NO: 27168 - RNA, 31 nt, Homo Sapiens
guggaucaccugaggucaggaguccaagacc

SEQ ID NO: 27169 - RNA, 31 nt, Homo Sapiens
gcggaucacuugaggucaggaguccaagacc

SEQ ID NO: 27170 - RNA, 32 nt, Homo Sapiens
auccucugcacaaaagaaaauuacuguagugg

SEQ ID NO: 27171 - RNA, 32 nt, Homo Sapiens
uguaugcagaugggagaagugauuuagaaacu

SEQ ID NO: 27172 - RNA, 32 nt, Homo Sapiens
uuuuugcuguaaacagaauaaaauugaacaaa

SEQ ID NO: 27173 - RNA, 32 nt, Homo Sapiens
accaccgcaucccaccuccugcccuccauacc

SEQ ID NO: 27174 - RNA, 32 nt, Homo Sapiens
uucgaguacagcaguuauaacuauaggggcuu

SEQ ID NO: 27175 - RNA, 32 nt, Homo Sapiens
auaaaugcucaauaauugucaucuguuauuau

SEQ ID NO: 27176 - RNA, 32 nt, Homo Sapiens
cacggccacccacccuucuccccugccccguc

SEQ ID NO: 27177 - RNA, 32 nt, Homo Sapiens
uuugucaauagcaugcaaaaaaugcuuuguuu

SEQ ID NO: 27178 - RNA, 32 nt, Homo Sapiens
aaaacggagggacuuugcuacuuguaaaaaua

SEQ ID NO: 27179 - RNA, 32 nt, Homo Sapiens
aaacuggaaaagacauuaaaucauguugaaau

SEQ ID NO: 27180 - RNA, 32 nt, Homo Sapiens
gaugauggugacucauuaucagugcuuuggua

SEQ ID NO: 27181 - RNA, 32 nt, Homo Sapiens
caaaucgcauggauuucuuuuucagugacguu

SEQ ID NO: 27182 - RNA, 32 nt, Homo Sapiens
cuuuuuguauauauuuuuagaaaauguuaaau

SEQ ID NO: 27183 - RNA, 32 nt, Homo Sapiens
ccggccagagacucggcgcccggagccagcgc

SEQ ID NO: 27184 - RNA, 32 nt, Homo Sapiens
aaagacauuuaaaagaauuguuuuucuaacug

SEQ ID NO: 27185 - RNA, 32 nt, Homo Sapiens
acgccuguaauccagcacuuugggaggcccag

SEQ ID NO: 27186 - RNA, 32 nt, Homo Sapiens
uaaaaaguaaaagauuucuuucaauuggucuu

SEQ ID NO: 27187 - RNA, 32 nt, Homo Sapiens
ucaccugaacugugucuaaagcaaguucccuc

SEQ ID NO: 27188 - RNA, 32 nt, Homo Sapiens
guuguuauggauuaaaauaagaauauugcaga

SEQ ID NO: 27189 - RNA, 32 nt, Homo Sapiens
caacaacacacaauugacccauguaacaaacc

SEQ ID NO: 27190 - RNA, 32 nt, Homo Sapiens
gaaagauauaauguauugauuuuuaaagcugu

SEQ ID NO: 27191 - RNA, 32 nt, Homo Sapiens
gccuugcagccacauggccccaucccaguugg

SEQ ID NO: 27192 - RNA, 32 nt, Homo Sapiens
ucagaucagaucuacuaaaucagauacucuag

SEQ ID NO: 27193 - RNA, 32 nt, Homo Sapiens
uucacuugggaucaucgucuucauuaagguuu

SEQ ID NO: 27194 - RNA, 32 nt, Homo Sapiens
ggaagcuaagccagggcccagcugcguccaac

SEQ ID NO: 27195 - RNA, 32 nt, Homo Sapiens
gucucggggcccuggggugagugcggggcgcg

SEQ ID NO: 27196 - RNA, 32 nt, Homo Sapiens
gucggacaagcaacuucuuuuccucugugagg

SEQ ID NO: 27197 - RNA, 32 nt, Homo Sapiens
uauuuuaaaaauugaaauguuuggaaccuuua

SEQ ID NO: 27198 - RNA, 29 nt, Homo Sapiens
cauuaauaaaguugcuuuuuuaggcuaca

SEQ ID NO: 27199 - RNA, 32 nt, Homo Sapiens
ugcgcugcuuuucuaacaaacuguugaucagc

SEQ ID NO: 27200 - RNA, 32 nt, Homo Sapiens
ccuggcuaccugcucaugagggacuugauuaa

SEQ ID NO: 27201 - RNA, 32 nt, Homo Sapiens
cagauggcugaauuggcaagucuguggugcug

SEQ ID NO: 27202 - RNA, 32 nt, Homo Sapiens
uugauuugaguuaaauauagguuuuuaaaacu

SEQ ID NO: 27203 - RNA, 32 nt, Homo Sapiens
agaguucucuuggaacgguuguuguaaauagg

SEQ ID NO: 27204 - RNA, 32 nt, Homo Sapiens
aggccuaguaauaacgauauuucucuuuaauu

SEQ ID NO: 27205 - RNA, 32 nt, Homo Sapiens
gccuccugucuccagcucucuccaggacaggc

SEQ ID NO: 27206 - RNA, 32 nt, Homo Sapiens
uccacacuuugguuuuccuucagacauuauua

SEQ ID NO: 27207 - RNA, 32 nt, Homo Sapiens
auauugguuucuuuuucuuaauauauauauuu

SEQ ID NO: 27208 - RNA, 32 nt, Homo Sapiens
cugugccugagcagcucugggugcucuccaug

SEQ ID NO: 27209 - RNA, 32 nt, Homo Sapiens
uauucguagucuuuuuuuccauccuaucuuuc

SEQ ID NO: 27210 - RNA, 32 nt, Homo Sapiens
auaauguuucuuuacuuuucaaugcacacaug

SEQ ID NO: 27211 - RNA, 32 nt, Homo Sapiens
ucucuggggccuucuccucccugcagugccaa

SEQ ID NO: 27212 - RNA, 31 nt, Homo Sapiens
ggcaggagggcggggucccaggaggucaucu

SEQ ID NO: 27213 - RNA, 32 nt, Homo Sapiens
gcagccgacccggcugcgccguagugggaggc

SEQ ID NO: 27214 - RNA, 32 nt, Homo Sapiens
aggguccagaguaagguggagaaggaucaacc

SEQ ID NO: 27215 - RNA, 32 nt, Homo Sapiens
caaacaaacagaaagcaccgucgagaaauggc

SEQ ID NO: 27216 - RNA, 32 nt, Homo Sapiens
uggggcuguugcugagcccaccccaauccaga

SEQ ID NO: 27217 - RNA, 32 nt, Homo Sapiens
gcucuugguggacgggcccagaggaauucaga

SEQ ID NO: 27218 - RNA, 32 nt, Homo Sapiens
ccuucugucugcuggugacugcaguguucccc

SEQ ID NO: 27219 - RNA, 32 nt, Homo Sapiens
cuuuagaggaccagcuauuguagcaccuugga

SEQ ID NO: 27220 - RNA, 32 nt, Homo Sapiens
cgacccccaagccacacugggugccgcugcug

SEQ ID NO: 27221 - RNA, 32 nt, Homo Sapiens
acuucagaguaaugaggccuauaucaaauguu

SEQ ID NO: 27222 - RNA, 32 nt, Homo Sapiens
gugucaagcuaaugagguucuauuauaaaggu

SEQ ID NO: 27223 - RNA, 32 nt, Homo Sapiens
gacucgcugcuugguaaaaaccuuccucuucc

SEQ ID NO: 27224 - RNA, 32 nt, Homo Sapiens
cccaucgauauauuuuugauaauuuuucaugu

SEQ ID NO: 27225 - RNA, 32 nt, Homo Sapiens
uuuagaucaucauuugucaucuaaacaauuau

SEQ ID NO: 27226 - RNA, 32 nt, Homo Sapiens
uguuaccaggauggucucaaucuccugaccuc

SEQ ID NO: 27227 - RNA, 32 nt, Homo Sapiens
ucggugcugaggcggcggcugcggcacgggaa

SEQ ID NO: 27228 - RNA, 32 nt, Homo Sapiens
cacagaaugugcucauuucccuguuccaggga

SEQ ID NO: 27229 - RNA, 32 nt, Homo Sapiens
gccaaggcggguggaucgcgagaucaggagcu

SEQ ID NO: 27230 - RNA, 31 nt, Homo Sapiens
uccuugcccaccugccugcccccgggcagca

SEQ ID NO: 27231 - RNA, 32 nt, Homo Sapiens
ucuggccucgcccuucacgccuuaacacuaag

SEQ ID NO: 27232 - RNA, 32 nt, Homo Sapiens
uagcuuuguuauuauucauauuaauuuaacaa

SEQ ID NO: 27233 - RNA, 32 nt, Homo Sapiens
ccuuuguugugaacacacugagacuaagaauu

SEQ ID NO: 27234 - RNA, 32 nt, Homo Sapiens
cauaaugugaaguguuaauacuaguugugacc

SEQ ID NO: 27235 - RNA, 32 nt, Homo Sapiens
guuuguaacaaggcuuuugggagugauucaca

SEQ ID NO: 27236 - RNA, 32 nt, Homo Sapiens
uacucagggcugucacaucuacaucuguguuu

SEQ ID NO: 27237 - RNA, 32 nt, Homo Sapiens
auauaagggagaaauacaugguuuuuguggaa

SEQ ID NO: 27238 - RNA, 32 nt, Homo Sapiens
ugccaagaugaccacugacccacaucuggucu

SEQ ID NO: 27239 - RNA, 32 nt, Homo Sapiens
gggcccugcuccaagccugcaggaccgagggc

SEQ ID NO: 27240 - RNA, 32 nt, Homo Sapiens
ggaaguggccccagccaucuccucuagaccaa

SEQ ID NO: 27241 - RNA, 32 nt, Homo Sapiens
aaagaaauccacucagagaggacuugggguga

SEQ ID NO: 27242 - RNA, 32 nt, Homo Sapiens
ccucugaaaaucuuggcccacaauggcuuggu

SEQ ID NO: 27243 - RNA, 32 nt, Homo Sapiens
caugaggacgacaguggcgucuacaccugcaa

SEQ ID NO: 27244 - RNA, 32 nt, Homo Sapiens
ggagggaccugacagugcccauucauucagcc

SEQ ID NO: 27245 - RNA, 32 nt, Homo Sapiens
caugaaaggcaucagucccccugugcauagua

SEQ ID NO: 27246 - RNA, 32 nt, Homo Sapiens
uacaggagccucagccaggcagcccaccccac

SEQ ID NO: 27247 - RNA, 32 nt, Homo Sapiens
gagcaguggucuucaaacuuugaaagcauauc

SEQ ID NO: 27248 - RNA, 32 nt, Homo Sapiens
aggaggaggaggaggaggcaaaguuagaguug

SEQ ID NO: 27249 - RNA, 32 nt, Homo Sapiens
caagugagaaacaguagauuggugaagacaga

SEQ ID NO: 27250 - RNA, 32 nt, Homo Sapiens
uaaaagaaaaagagaaacaagaauuucuagaa

SEQ ID NO: 27251 - RNA, 32 nt, Homo Sapiens
cuacuuuugucaaaucuuaacauuuugccacu

SEQ ID NO: 27252 - RNA, 32 nt, Homo Sapiens
aguccugccuucuugccacucgugucuuucga

SEQ ID NO: 27253 - RNA, 32 nt, Homo Sapiens
agaguccaguuccuuccauaaaacaggcugga

SEQ ID NO: 27254 - RNA, 32 nt, Homo Sapiens
ggggaggaggccggacucagcggguggcucag

SEQ ID NO: 27255 - RNA, 32 nt, Homo Sapiens
uugguguagaccugcuucuccuucuccuuuuu

SEQ ID NO: 27256 - RNA, 32 nt, Homo Sapiens
cgaggcaggugguucaucuaaggucuggaguu

SEQ ID NO: 27257 - RNA, 32 nt, Homo Sapiens
uuuacgccccuucguuuuucucuucugauucu

SEQ ID NO: 27258 - RNA, 32 nt, Homo Sapiens
aguggucucaccuggaggcaagagggagggua

SEQ ID NO: 27259 - RNA, 32 nt, Homo Sapiens
guagguuggggauggggcagaggucuggaucu

SEQ ID NO: 27260 - RNA, 32 nt, Homo Sapiens
aggccagugacacuuuuuugcugcuggccacc

SEQ ID NO: 27261 - RNA, 32 nt, Homo Sapiens
caggaugggugccgugaagggcagaugggcuu

SEQ ID NO: 27262 - RNA, 32 nt, Homo Sapiens
uagcggaaaaggacaagacggugcagucggcu

SEQ ID NO: 27263 - RNA, 32 nt, Homo Sapiens
accagggaucaccccacgugggacacagggcu

SEQ ID NO: 27264 - RNA, 32 nt, Homo Sapiens
aaggagagaaaacuaaguacuuuuauauaauu

SEQ ID NO: 27265 - RNA, 32 nt, Homo Sapiens
accacaucaccaucaguguuucccucggcggc

SEQ ID NO: 27266 - RNA, 32 nt, Homo Sapiens
gacccggaggucgcggagagcugggcaguguu

SEQ ID NO: 27267 - RNA, 32 nt, Homo Sapiens
aagucacccagcucuggaacugccugcuucac

SEQ ID NO: 27268 - RNA, 32 nt, Homo Sapiens
auugugggugguuuuuugucuucuguugucca

SEQ ID NO: 27269 - RNA, 32 nt, Homo Sapiens
cugugacucgaaauaauuaacuuugucaaaau

SEQ ID NO: 27270 - RNA, 32 nt, Homo Sapiens
ucucucuaugacaauaauacaaaccaauuuaa

SEQ ID NO: 27271 - RNA, 32 nt, Homo Sapiens
aagggaccuuugauggaaccgaggggagggcg

SEQ ID NO: 27272 - RNA, 32 nt, Homo Sapiens
gguguccuuggcugccacggagggauuugauc

SEQ ID NO: 27273 - RNA, 32 nt, Homo Sapiens
gaagcuacgacggagauccguccuggaaaagc

SEQ ID NO: 27274 - RNA, 32 nt, Homo Sapiens
gagcuuuguauaguaauuuaggaguguaaaac

SEQ ID NO: 27275 - RNA, 32 nt, Homo Sapiens
cucuauacauaaaugcccagcacaauucauug

SEQ ID NO: 27276 - RNA, 32 nt, Homo Sapiens
cccuuuguauucauuuuaagcaucuaaauaaa

SEQ ID NO: 27277 - RNA, 32 nt, Homo Sapiens
cacacuucuguuaacuucccaccaccaucaau

SEQ ID NO: 27278 - RNA, 32 nt, Homo Sapiens
aacuccaaguccccguuccgcuccagucuagg

SEQ ID NO: 27279 - RNA, 32 nt, Homo Sapiens
ucuuaaguguggaaugcaucuauccaacauaa

SEQ ID NO: 27280 - RNA, 32 nt, Homo Sapiens
ugauuugaaaacaguguggagaaaaacuaggc

SEQ ID NO: 27281 - RNA, 32 nt, Homo Sapiens
cauaaauaguagguuuuaauucuccugcuauu

SEQ ID NO: 27282 - RNA, 32 nt, Homo Sapiens
guuguggacagcccaucccagcccucagaggc

SEQ ID NO: 27283 - RNA, 32 nt, Homo Sapiens
ugugacuuuaccaggagcccuaucuuggaaua

SEQ ID NO: 27284 - RNA, 32 nt, Homo Sapiens
ccaggcuugcagccuuucuucggagaguggag

SEQ ID NO: 27285 - RNA, 32 nt, Homo Sapiens
ccgggacaccugaaugcccccggccccggcuc

SEQ ID NO: 27286 - RNA, 32 nt, Homo Sapiens
cacagccauugcugaggccugggcucgccugg

SEQ ID NO: 27287 - RNA, 28 nt, Homo Sapiens
caacagguggcaggaccaggacuauagc

SEQ ID NO: 27288 - RNA, 32 nt, Homo Sapiens
cggcccccaugcucccuucucugccaugggcc

SEQ ID NO: 27289 - RNA, 31 nt, Homo Sapiens
ccagccaugcucuccgcccucgcccggccug

SEQ ID NO: 27290 - RNA, 32 nt, Homo Sapiens
ugccggcccugcuucugccccuccucaaaccu

SEQ ID NO: 27291 - RNA, 32 nt, Homo Sapiens
auccaaagaauaguguuguaacuaugaaaaag

SEQ ID NO: 27292 - RNA, 32 nt, Homo Sapiens
cgcgacucggagcacccccaccccuccccugc

SEQ ID NO: 27293 - RNA, 29 nt, Homo Sapiens
cuuauuauauguauauauacacguaugua

SEQ ID NO: 27294 - RNA, 32 nt, Homo Sapiens
ugcacaacagucaugguuuucuuaagccucuu

SEQ ID NO: 27295 - RNA, 32 nt, Homo Sapiens
cauauuaauuuucuugguucuuucagcugaau

SEQ ID NO: 27296 - RNA, 32 nt, Homo Sapiens
uaauuuaaaaagacaaaacagaaauguacguu

SEQ ID NO: 27297 - RNA, 32 nt, Homo Sapiens
uccuuguguaauuauuaacucuuaggcucuuc

SEQ ID NO: 27298 - RNA, 32 nt, Homo Sapiens
uggaaaaaugacuagaaagcuaccuccaauuu

SEQ ID NO: 27299 - RNA, 32 nt, Homo Sapiens
uaggucuugcaaacagagagguagagagcuuu

SEQ ID NO: 27300 - RNA, 32 nt, Homo Sapiens
uccucaaaugacucuuuuuucuuuauauguua

SEQ ID NO: 27301 - RNA, 32 nt, Homo Sapiens
ugugguuuucuuuugccaugacaacuucuaau

SEQ ID NO: 27302 - RNA, 32 nt, Homo Sapiens
aacgugcgauuuccaauggccccaaaaaccag

SEQ ID NO: 27303 - RNA, 32 nt, Homo Sapiens
aacccaccccacacgccauggaccucagggca

SEQ ID NO: 27304 - RNA, 32 nt, Homo Sapiens
ucagggcggggcuggccccacccccaugacca

SEQ ID NO: 27305 - RNA, 32 nt, Homo Sapiens
gaaaauccuccauuuuuaugguaaauaguaau

SEQ ID NO: 27306 - RNA, 32 nt, Homo Sapiens
gcaggauggaagacuuccuauaaacagaaugg

SEQ ID NO: 27307 - RNA, 32 nt, Homo Sapiens
gagucucgcucuugucgcccaggcuggagugc

SEQ ID NO: 27308 - RNA, 31 nt, Homo Sapiens
aguuaccagcgcagcacuuaagacaggaucu

SEQ ID NO: 27309 - RNA, 32 nt, Homo Sapiens
cgcugcuuguuggagaugcccagcgguagggg

SEQ ID NO: 27310 - RNA, 32 nt, Homo Sapiens
aauuuuuuaaaaaacuacuauuugaaaauugg

SEQ ID NO: 27311 - RNA, 32 nt, Homo Sapiens
cccgagcccccggagguguccaggcgcggugc

SEQ ID NO: 27312 - RNA, 30 nt, Homo Sapiens
gacauagcauucugcugccaucuuagcugu

SEQ ID NO: 27313 - RNA, 32 nt, Homo Sapiens
gugagcgcggccccacccccagcccgcguccg

SEQ ID NO: 27314 - RNA, 32 nt, Homo Sapiens
uguuuggccaucucuugguugauccaguuuau

SEQ ID NO: 27315 - RNA, 32 nt, Homo Sapiens
ggcucaggggcaaugugagguguguugccaau

SEQ ID NO: 27316 - RNA, 32 nt, Homo Sapiens
gcccucccccacccauuaaauugugagcucuu

SEQ ID NO: 27317 - RNA, 32 nt, Homo Sapiens
aaaucucaucuugaauuguaauccccauaauc

SEQ ID NO: 27318 - RNA, 32 nt, Homo Sapiens
uugaagaaaaacagcaugugauaauauaaaaa

SEQ ID NO: 27319 - RNA, 32 nt, Homo Sapiens
gggguccucucuccugccccagcuuccacuca

SEQ ID NO: 27320 - RNA, 32 nt, Homo Sapiens
gaaggcagcuggagacccugguugaaaggcuu

SEQ ID NO: 27321 - RNA, 32 nt, Homo Sapiens
cgcggguggggcgggguuaggcggcgcuccgc

SEQ ID NO: 27322 - RNA, 32 nt, Homo Sapiens
gcagcguggccccucccuccccuuuuccugcc

SEQ ID NO: 27323 - RNA, 32 nt, Homo Sapiens
ugccuuccuucucugcccccagccuucugucc

SEQ ID NO: 27324 - RNA, 32 nt, Homo Sapiens
uuacauccagcaucuguucugauugucagcau

SEQ ID NO: 27325 - RNA, 32 nt, Homo Sapiens
agccaugcaugcgcccgaagcucgugcaguuu

SEQ ID NO: 27326 - RNA, 32 nt, Homo Sapiens
gucagucagucaccccacagucuccucucucu

SEQ ID NO: 27327 - RNA, 32 nt, Homo Sapiens
uguggggggucucagcaggagccuggggggcu

SEQ ID NO: 27328 - RNA, 32 nt, Homo Sapiens
gguggucggcuccagcgccuuccuccugugcc

SEQ ID NO: 27329 - RNA, 32 nt, Homo Sapiens
cacagauagaugaaaaauuaugcugagaaagu

SEQ ID NO: 27330 - RNA, 32 nt, Homo Sapiens
gacacugcacuccagccugggcgacagaguga

SEQ ID NO: 27331 - RNA, 32 nt, Homo Sapiens
guggaagauggcaaagagcagcuuggccaggu

SEQ ID NO: 27332 - RNA, 32 nt, Homo Sapiens
uuuaauauuucuguuuucauuuccuguuggaa

SEQ ID NO: 27333 - RNA, 32 nt, Homo Sapiens
acuggcuucauacacacaaacauauuuguuua

SEQ ID NO: 27334 - RNA, 32 nt, Homo Sapiens
cccucuuccgcacuacacagcucccuccacuc

SEQ ID NO: 27335 - RNA, 32 nt, Homo Sapiens
uguccuccaucccaccccucuuacuccagccu

SEQ ID NO: 27336 - RNA, 32 nt, Homo Sapiens
caggagauuuggauauaggagcucuggaucuc

SEQ ID NO: 27337 - RNA, 32 nt, Homo Sapiens
ggcauagccuacugcauaccuaggcuauaugg

SEQ ID NO: 27338 - RNA, 32 nt, Homo Sapiens
augcacugugaaggacccuuguuuacacauac

SEQ ID NO: 27339 - RNA, 32 nt, Homo Sapiens
uuuacuuauauuggguuuuucuucauuuuaau

SEQ ID NO: 27340 - RNA, 32 nt, Homo Sapiens
uacuuguaacaguagaaaauagaagucauucu

SEQ ID NO: 27341 - RNA, 32 nt, Homo Sapiens
uccccaggccccugaggcccagcuuggcuccc

SEQ ID NO: 27342 - RNA, 32 nt, Homo Sapiens
ugaaucguuguuaaauuguaucgacagucuuu

SEQ ID NO: 27343 - RNA, 32 nt, Homo Sapiens
ggcuuaauaguuauuucuuuuaucuugggcug

SEQ ID NO: 27344 - RNA, 32 nt, Homo Sapiens
acaucucugcaccuuccaggcucugaacuuug

SEQ ID NO: 27345 - RNA, 32 nt, Homo Sapiens
gaccccggccccaccuccggacccuuuuauca

SEQ ID NO: 27346 - RNA, 32 nt, Homo Sapiens
cacacacacacacacacacacacacacaaaua

SEQ ID NO: 27347 - RNA, 32 nt, Homo Sapiens
aauugcgugccauucagcacugcaccagagca

SEQ ID NO: 27348 - RNA, 32 nt, Homo Sapiens
gaaacgcggcgcggccggcugccggaaaacag

SEQ ID NO: 27349 - RNA, 32 nt, Homo Sapiens
cacagccccacaggcccucccuggcacugucc

SEQ ID NO: 27350 - RNA, 32 nt, Homo Sapiens
cagcguggcccuagcccuccccuccccgggau

SEQ ID NO: 27351 - RNA, 32 nt, Homo Sapiens
agcaccgggggagaugggacccggggcaggcg

SEQ ID NO: 27352 - RNA, 32 nt, Homo Sapiens
aaaguuaauuaauuuauagaucaacauuuauu

SEQ ID NO: 27353 - RNA, 32 nt, Homo Sapiens
cuggauucauuuccaauuaaauacuaaacauu

SEQ ID NO: 27354 - RNA, 32 nt, Homo Sapiens
aaaugagauugugacuggcaauuguuuauagu

SEQ ID NO: 27355 - RNA, 32 nt, Homo Sapiens
aacacuugauaaaugaaacuguaccguuaaau

SEQ ID NO: 27356 - RNA, 32 nt, Homo Sapiens
gcccagccccacuuccaggagacgaccacaaa

SEQ ID NO: 27357 - RNA, 32 nt, Homo Sapiens
uaaauagagaauaaauugaauucuuguuccua

SEQ ID NO: 27358 - RNA, 32 nt, Homo Sapiens
acucccacuuugcggugcucugguacguccac

SEQ ID NO: 27359 - RNA, 32 nt, Homo Sapiens
gcuugaaauuuauguuuagaaaaacuauugau

SEQ ID NO: 27360 - RNA, 32 nt, Homo Sapiens
gcucugcucagcugcgcccccuucuuugcagc

SEQ ID NO: 27361 - RNA, 31 nt, Homo Sapiens
uuugagaacauauugagccagaugcuuugag

SEQ ID NO: 27362 - RNA, 32 nt, Homo Sapiens
gcacugaccacaccccacacaaccucaaaggg

SEQ ID NO: 27363 - RNA, 32 nt, Homo Sapiens
agaguagggccucagcuggcaaguccacaagc

SEQ ID NO: 27364 - RNA, 32 nt, Homo Sapiens
gucacgaggacccuggcccacaguguugaggg

SEQ ID NO: 27365 - RNA, 32 nt, Homo Sapiens
uccaccacccucaggaugagguccaggugaca

SEQ ID NO: 27366 - RNA, 27 nt, Homo Sapiens
cgauguuugguuuucagagaaggggau

SEQ ID NO: 27367 - RNA, 32 nt, Homo Sapiens
ggugccccgggagcuucccgcucgcgaagacc

SEQ ID NO: 27368 - RNA, 32 nt, Homo Sapiens
accaugucuucuuuuucgcaucgccugcugca

SEQ ID NO: 27369 - RNA, 32 nt, Homo Sapiens
gccccagaggacaaggaagagaaggcauauug

SEQ ID NO: 27370 - RNA, 32 nt, Homo Sapiens
ugcuacgagaaccugccguggaaacuuccagu

SEQ ID NO: 27371 - RNA, 32 nt, Homo Sapiens
aauguauuucuuaaauguauuugauugauguc

SEQ ID NO: 27372 - RNA, 32 nt, Homo Sapiens
ggccgcgcggacccggcaaggcugggccggac

SEQ ID NO: 27373 - RNA, 32 nt, Homo Sapiens
augcagagaaccucaggagaugccuuccaauc

SEQ ID NO: 27374 - RNA, 32 nt, Homo Sapiens
guaauugccgugguuaagcagcuaagaguuau

SEQ ID NO: 27375 - RNA, 32 nt, Homo Sapiens
uccuuagccagaucauuccuuauucuuuguuu

SEQ ID NO: 27376 - RNA, 32 nt, Homo Sapiens
ggcagccccuccccgccggcagaaccgucuug

SEQ ID NO: 27377 - RNA, 32 nt, Homo Sapiens
aacuuacugaaaaauauuaacaauuaauugug

SEQ ID NO: 27378 - RNA, 32 nt, Homo Sapiens
caaaccugccagcaccuggcccuuggacuucc

SEQ ID NO: 27379 - RNA, 32 nt, Homo Sapiens
agugguauucuauuauagcagcaugaaauggu

SEQ ID NO: 27380 - RNA, 32 nt, Homo Sapiens
uccucaaauaaaauauaauuauuacugaaaua

SEQ ID NO: 27381 - RNA, 32 nt, Homo Sapiens
gucauccgccacugcgcagggcggcugggcag

SEQ ID NO: 27382 - RNA, 32 nt, Homo Sapiens
gaugaccugcccaacaggaugugugccgacgu

SEQ ID NO: 27383 - RNA, 32 nt, Homo Sapiens
cguggggaaggcggcgggaggaggagcgcacg

SEQ ID NO: 27384 - RNA, 32 nt, Homo Sapiens
aacaaccagccaggauuaaagguauuauaaau

SEQ ID NO: 27385 - RNA, 32 nt, Homo Sapiens
cuuauauuuauguaaacuuaugacucuucauu

SEQ ID NO: 27386 - RNA, 32 nt, Homo Sapiens
cccuguuuggaucaagucaguuccuggagccu

SEQ ID NO: 27387 - RNA, 32 nt, Homo Sapiens
gcccugccggucgcuagcuccgagggcgcgca

SEQ ID NO: 27388 - RNA, 32 nt, Homo Sapiens
cggacuaucucacaggugaucuggacuggagc

SEQ ID NO: 27389 - RNA, 29 nt, Homo Sapiens
auccuuuauucagaauaccacaaagaaag

SEQ ID NO: 27390 - RNA, 32 nt, Homo Sapiens
uuggaaaccuuuaaugaagguuuuacaaaaug

SEQ ID NO: 27391 - RNA, 32 nt, Homo Sapiens
ugcuccagcuccaagagguuuuucagcucuuu

SEQ ID NO: 27392 - RNA, 32 nt, Homo Sapiens
uaggaaagugacaugcacagguaaaccacauu

SEQ ID NO: 27393 - RNA, 32 nt, Homo Sapiens
cagaacagugccuggcgggccgagggcauccu

SEQ ID NO: 27394 - RNA, 32 nt, Homo Sapiens
aaccauucugccugagccaucagcuccuuaaa

SEQ ID NO: 27395 - RNA, 31 nt, Homo Sapiens
cacaauuaagaccacugaugaguuaauuugu

SEQ ID NO: 27396 - RNA, 32 nt, Homo Sapiens
ucuacuaauaauacaacaauuagccaggcgug

SEQ ID NO: 27397 - RNA, 32 nt, Homo Sapiens
ggcuuagaauccauaauuuguggaauucccgc

SEQ ID NO: 27398 - RNA, 32 nt, Homo Sapiens
acaugucccagauuucuguuucccaaggagca

SEQ ID NO: 27399 - RNA, 32 nt, Homo Sapiens
aaucugugauuaaaaguguaaacuauagacuc

SEQ ID NO: 27400 - RNA, 32 nt, Homo Sapiens
gauaugaggggacguggaccacagaggugagu

SEQ ID NO: 27401 - RNA, 32 nt, Homo Sapiens
uaaaauuagcaugcuuuagacauauauuuaaa

SEQ ID NO: 27402 - RNA, 32 nt, Homo Sapiens
ccuccgcgccuucuccgccgggaccucgagcg

SEQ ID NO: 27403 - RNA, 32 nt, Homo Sapiens
ggaaacaagaauaaacagaaugguauuuuuag

SEQ ID NO: 27404 - RNA, 32 nt, Homo Sapiens
ggaggaugucauuguuacccauagacuguaaa

SEQ ID NO: 27405 - RNA, 32 nt, Homo Sapiens
cuugauugauaaagggaauguugcauuuggga

SEQ ID NO: 27406 - RNA, 32 nt, Homo Sapiens
ugcaaauccugcugacuaacaaugaagccugg

SEQ ID NO: 27407 - RNA, 32 nt, Homo Sapiens
uuauaggaaaauuuauauauguagcucacgua

SEQ ID NO: 27408 - RNA, 32 nt, Homo Sapiens
cugaaaaagaagaaucagcaaauacuacugaa

SEQ ID NO: 27409 - RNA, 32 nt, Homo Sapiens
uuuaagcgguuaggcacugagaguagcagaaa

SEQ ID NO: 27410 - RNA, 32 nt, Homo Sapiens
uguccaggaaaugagcagagauucacaagaca

SEQ ID NO: 27411 - RNA, 32 nt, Homo Sapiens
agccuggucaacauagugagacacugucucua

SEQ ID NO: 27412 - RNA, 32 nt, Homo Sapiens
uuagaaugucccucucuugggacuugcuuaga

SEQ ID NO: 27413 - RNA, 32 nt, Homo Sapiens
ccuccacuccuacuccuucucuuacugugcca

SEQ ID NO: 27414 - RNA, 32 nt, Homo Sapiens
uccuuuggauacuuucaaggacauucaaaugu

SEQ ID NO: 27415 - RNA, 32 nt, Homo Sapiens
cagcccugccagcgucugucccuaagugaccu

SEQ ID NO: 27416 - RNA, 32 nt, Homo Sapiens
aaagguaugcauguagaacauaaaaaauauuu

SEQ ID NO: 27417 - RNA, 32 nt, Homo Sapiens
auugcucaaaaauguacaguuuuaagaauuuu

SEQ ID NO: 27418 - RNA, 32 nt, Homo Sapiens
ugugcugguucccccacuuucccaacucuuug

SEQ ID NO: 27419 - RNA, 32 nt, Homo Sapiens
guguuggaaaauguucuuucugcagggucuag

SEQ ID NO: 27420 - RNA, 32 nt, Homo Sapiens
uuuuuuuuauauuugcaaaggaaacauaucua

SEQ ID NO: 27421 - RNA, 32 nt, Homo Sapiens
gccccugcagggugggggucuguggcagagcc

SEQ ID NO: 27422 - RNA, 32 nt, Homo Sapiens
aguuugguagugccccaccucccgcccucacc

SEQ ID NO: 27423 - RNA, 32 nt, Homo Sapiens
gaauucggcacgaggccauugaaucccagucc

SEQ ID NO: 27424 - RNA, 32 nt, Homo Sapiens
uugaguauaaacuuuuuaaauuuaaauugguu

SEQ ID NO: 27425 - RNA, 32 nt, Homo Sapiens
uggagcuuguguuuuaggaucuccaugguggg

SEQ ID NO: 27426 - RNA, 32 nt, Homo Sapiens
ccuccacacauaaaucauuuugaaaguagaau

SEQ ID NO: 27427 - RNA, 32 nt, Homo Sapiens
aaugaaaaauuccaaaagugcugagcuuuggg

SEQ ID NO: 27428 - RNA, 32 nt, Homo Sapiens
uuuuucucuguugggagggaagcucuuuucua

SEQ ID NO: 27429 - RNA, 32 nt, Homo Sapiens
ccacaagaagaggcgaccagguccugggugac

SEQ ID NO: 27430 - RNA, 32 nt, Homo Sapiens
uacugccugggcuggaggaggagcuggaagag

SEQ ID NO: 27431 - RNA, 32 nt, Homo Sapiens
agagcuacauugaagacgagcucuucauucag

SEQ ID NO: 27432 - RNA, 32 nt, Homo Sapiens
auuuaggaaucaaaaacuaaaauaaguggaau

SEQ ID NO: 27433 - RNA, 32 nt, Homo Sapiens
auuuugauauaaaagaaaauaauucuuacauc

SEQ ID NO: 27434 - RNA, 32 nt, Homo Sapiens
gaggaccauuuuccauaccccuaugacugccu

SEQ ID NO: 27435 - RNA, 27 nt, Homo Sapiens
ccucuguccuucugaaauuuccauauu

SEQ ID NO: 27436 - RNA, 32 nt, Homo Sapiens
caugucacuucacgcccuuccccucccuuuag

SEQ ID NO: 27437 - RNA, 32 nt, Homo Sapiens
ucauguaugggcaggaggaaaggugggagggg

SEQ ID NO: 27438 - RNA, 32 nt, Homo Sapiens
ccgcuuuuuuuuucuuuuucauuuuuuuaaaa

SEQ ID NO: 27439 - RNA, 32 nt, Homo Sapiens
cuuucucauuuuuauuuuuaaauugacagacg

SEQ ID NO: 27440 - RNA, 32 nt, Homo Sapiens
uuguccuguguugaguguuuucuuauaucaaa

SEQ ID NO: 27441 - RNA, 32 nt, Homo Sapiens
cagagcuguggcggggggcgccguccaggccg

SEQ ID NO: 27442 - RNA, 32 nt, Homo Sapiens
agugguaagacuucccuucccagccgaugcca

SEQ ID NO: 27443 - RNA, 32 nt, Homo Sapiens
cauacgccccuccuccuucucucuuggcgagg

SEQ ID NO: 27444 - RNA, 32 nt, Homo Sapiens
agaugaugaugaugauccagaauauaauuucc

SEQ ID NO: 27445 - RNA, 32 nt, Homo Sapiens
uuucgcaggggcgggggccggccucugcccug

SEQ ID NO: 27446 - RNA, 32 nt, Homo Sapiens
aggcgugugucugcuguguguuuguguucggc

SEQ ID NO: 27447 - RNA, 32 nt, Homo Sapiens
ccacaccccuccccagucuucuccaagaccug

SEQ ID NO: 27448 - RNA, 30 nt, Homo Sapiens
auugcuccuguuggcggcggccggggaggg

SEQ ID NO: 27449 - RNA, 32 nt, Homo Sapiens
auggcaaaggauuugauaaauaaaaguucuuu

SEQ ID NO: 27450 - RNA, 32 nt, Homo Sapiens
gcuuaaacccucaaauaauguaaggcaguaua

SEQ ID NO: 27451 - RNA, 32 nt, Homo Sapiens
guauuugauguuucacuuucaaauacauuuuu

SEQ ID NO: 27452 - RNA, 32 nt, Homo Sapiens
aaugcccuccauggcccaguuuccaggcagag

SEQ ID NO: 27453 - RNA, 32 nt, Homo Sapiens
cuagcggaaguggcuacucgcugcuggagccc

SEQ ID NO: 27454 - RNA, 32 nt, Homo Sapiens
ccuaugguguguacuuuuuguaaguuguaacu

SEQ ID NO: 27455 - RNA, 32 nt, Homo Sapiens
gaagagaaaaagagagugcuaguuaaaaaauc

SEQ ID NO: 27456 - RNA, 32 nt, Homo Sapiens
acauuuuuugagagguagucugucugauacaa

SEQ ID NO: 27457 - RNA, 32 nt, Homo Sapiens
aaggaagaaaauaaaaaucaccuguaguccua

SEQ ID NO: 27458 - RNA, 32 nt, Homo Sapiens
ccuccuggcugcccuccucccuggcuguguaa

SEQ ID NO: 27459 - RNA, 32 nt, Homo Sapiens
auuugagacugaaauuuaguacacuauguucu

SEQ ID NO: 27460 - RNA, 32 nt, Homo Sapiens
ucaguccccucgcuguagucgcggagcugugu

SEQ ID NO: 27461 - RNA, 32 nt, Homo Sapiens
ugugugugagagacacacacaaacacauuuca

SEQ ID NO: 27462 - RNA, 32 nt, Homo Sapiens
cugccagcucaggauauuauguuucuuuuuuc

SEQ ID NO: 27463 - RNA, 32 nt, Homo Sapiens
gacacgcccucccaacugcagacauccucccu

SEQ ID NO: 27464 - RNA, 32 nt, Homo Sapiens
guguuuaaaacagauuguuucccaaauuaggg

SEQ ID NO: 27465 - RNA, 32 nt, Homo Sapiens
gccacauagaucugguuuuggccauugacugg

SEQ ID NO: 27466 - RNA, 32 nt, Homo Sapiens
gcaacaguagccagacccgcugguagacgggu

SEQ ID NO: 27467 - RNA, 31 nt, Homo Sapiens
cccaggauucccccaacacacguucuuuucu

SEQ ID NO: 27468 - RNA, 32 nt, Homo Sapiens
cccagcgcccuccucuucuccucaccgcauuc

SEQ ID NO: 27469 - RNA, 32 nt, Homo Sapiens
gugaccugguuagcggggaucucagcauuugg

SEQ ID NO: 27470 - RNA, 32 nt, Homo Sapiens
ucuaucugggccgcagguggcugcugaagaca

SEQ ID NO: 27471 - RNA, 32 nt, Homo Sapiens
ugacacacacaccagcagcagcuauaaugauc

SEQ ID NO: 27472 - RNA, 32 nt, Homo Sapiens
ucuggcuuucccuuucggacaugcgcgcucgg

SEQ ID NO: 27473 - RNA, 30 nt, Homo Sapiens
auccccuuugucaguggggaaaccaaggca

SEQ ID NO: 27474 - RNA, 32 nt, Homo Sapiens
ccauauuuccagugacucgguuuccuguguaa

SEQ ID NO: 27475 - RNA, 32 nt, Homo Sapiens
uuagcucuguuccuccaguaauaaaaaaguua

SEQ ID NO: 27476 - RNA, 32 nt, Homo Sapiens
ucugggcuuauauguacuuuuauuuuuuggug

SEQ ID NO: 27477 - RNA, 32 nt, Homo Sapiens
uugucuuaaugauucugugagauuguuccggc

SEQ ID NO: 27478 - RNA, 32 nt, Homo Sapiens
uauaggcgugcaccaccacaccuggcuaauuu

SEQ ID NO: 27479 - RNA, 30 nt, Homo Sapiens
ugcacgcccugcucuacgccgcgcuguucg

SEQ ID NO: 27480 - RNA, 32 nt, Homo Sapiens
ugaagugcaguugcuauauuaaaauuagggca

SEQ ID NO: 27481 - RNA, 32 nt, Homo Sapiens
agacuuaaacaaaauauacaaugcaaauguaa

SEQ ID NO: 27482 - RNA, 32 nt, Homo Sapiens
gccuucgcccaccccccaccccggcugaugga

SEQ ID NO: 27483 - RNA, 32 nt, Homo Sapiens
cucugacaucuggauuugacuccacccucauc

SEQ ID NO: 27484 - RNA, 32 nt, Homo Sapiens
ccccgcccaucccccuuccaugagcccagacc

SEQ ID NO: 27485 - RNA, 32 nt, Homo Sapiens
uaaaggggaacaaaacuugaaaaagcccuguu

SEQ ID NO: 27486 - RNA, 32 nt, Homo Sapiens
ccggggggaggccgcacaggagcguccccagc

SEQ ID NO: 27487 - RNA, 32 nt, Homo Sapiens
gguuuuuaaggguuaucuuagauguuucacac

SEQ ID NO: 27488 - RNA, 32 nt, Homo Sapiens
gagcuagggggccccuccccccugccccgugc

SEQ ID NO: 27489 - RNA, 32 nt, Homo Sapiens
caucucaguaaguuuuuagaacaucaaaaugu

SEQ ID NO: 27490 - RNA, 32 nt, Homo Sapiens
uucaucaaucccaucuuucugugugaguaaug

SEQ ID NO: 27491 - RNA, 32 nt, Homo Sapiens
uguguagugugucaagacccuaagaacaugua

SEQ ID NO: 27492 - RNA, 32 nt, Homo Sapiens
cuugcacgucaucauagacuucauaguggaga

SEQ ID NO: 27493 - RNA, 32 nt, Homo Sapiens
uguugggugaccagcugugccucucgggcagg

SEQ ID NO: 27494 - RNA, 32 nt, Homo Sapiens
ucaagcaaauacaucuguuguuuggacaguuu

SEQ ID NO: 27495 - RNA, 32 nt, Homo Sapiens
ccgccccggacguggggcccaagcccccguga

SEQ ID NO: 27496 - RNA, 32 nt, Homo Sapiens
uaccaggauugacugcaucccuuuaaagaagu

SEQ ID NO: 27497 - RNA, 32 nt, Homo Sapiens
acuggguucuccagucuccucccuuuacuuua

SEQ ID NO: 27498 - RNA, 32 nt, Homo Sapiens
gcgguaaauccgggcuugcggccgcuggcgua

SEQ ID NO: 27499 - RNA, 32 nt, Homo Sapiens
uggagccugccagcuccgucagcccugacucg

SEQ ID NO: 27500 - RNA, 32 nt, Homo Sapiens
uucucacgguguccuccaugccugcagggccc

SEQ ID NO: 27501 - RNA, 32 nt, Homo Sapiens
aggugggcguguuguggaagcacaggaaaguu

SEQ ID NO: 27502 - RNA, 32 nt, Homo Sapiens
aauuaugaagccggucgguuuggucagacucc

SEQ ID NO: 27503 - RNA, 32 nt, Homo Sapiens
auucuaggauagcucugaagccugcuggaaac

SEQ ID NO: 27504 - RNA, 32 nt, Homo Sapiens
uuauuuaacaauaggcacuggguuuguguuac

SEQ ID NO: 27505 - RNA, 32 nt, Homo Sapiens
ucacuuucaguaaagacaaacuaguugcucuu

SEQ ID NO: 27506 - RNA, 32 nt, Homo Sapiens
uccacuggaaaacugcuacuaucuguuuuuau

SEQ ID NO: 27507 - RNA, 32 nt, Homo Sapiens
aaauugugaagauaaaugaaaguuuuaauucu

SEQ ID NO: 27508 - RNA, 32 nt, Homo Sapiens
caacuagaugaaacuuuuaaaaaugauuuaau

SEQ ID NO: 27509 - RNA, 32 nt, Homo Sapiens
gcccuccgccggcuaccuuagcuuagcguguc

SEQ ID NO: 27510 - RNA, 31 nt, Homo Sapiens
ugguagacguguguuucuagagccugcugga

SEQ ID NO: 27511 - RNA, 32 nt, Homo Sapiens
uagcagauaaacagacccccuucugcuccgcu

SEQ ID NO: 27512 - RNA, 27 nt, Homo Sapiens
ucuucagccuucuucagcucagcccuc

SEQ ID NO: 27513 - RNA, 32 nt, Homo Sapiens
agccaguguaagcagccugagucugucuacag

SEQ ID NO: 27514 - RNA, 32 nt, Homo Sapiens
uuaacuauaaaaacagaagcuauuuacauauu

SEQ ID NO: 27515 - RNA, 32 nt, Homo Sapiens
aggaguaggaggagcccgagcaccaugagcuc

SEQ ID NO: 27516 - RNA, 32 nt, Homo Sapiens
acagaggagaguaggaacagggcggauaccug

SEQ ID NO: 27517 - RNA, 32 nt, Homo Sapiens
ccugccucuaaacuauuggcagcaaaagagcc

SEQ ID NO: 27518 - RNA, 32 nt, Homo Sapiens
ucuaccucaagccccggagaacucagcggcgc

SEQ ID NO: 27519 - RNA, 32 nt, Homo Sapiens
aaacaaccuugaucauugagccucgagccaug

SEQ ID NO: 27520 - RNA, 32 nt, Homo Sapiens
cgcguuuacgucagagcgcccgaguccacgga

SEQ ID NO: 27521 - RNA, 31 nt, Homo Sapiens
ggggagggggaagaagaacaggaagaaaaaa

SEQ ID NO: 27522 - RNA, 32 nt, Homo Sapiens
uguuaagaaaauauggaggaaaaaaugcagau

SEQ ID NO: 27523 - RNA, 32 nt, Homo Sapiens
acaggggcagaguaauucaggcacauguguuc

SEQ ID NO: 27524 - RNA, 32 nt, Homo Sapiens
ugucuuaaucauccuuaugaaaacagauguaa

SEQ ID NO: 27525 - RNA, 32 nt, Homo Sapiens
ggugauccuagccccagcuuagggccagugcu

SEQ ID NO: 27526 - RNA, 32 nt, Homo Sapiens
cauguacccaaaauaaacauuuugaguucauc

SEQ ID NO: 27527 - RNA, 32 nt, Homo Sapiens
aauauaaaaauauguacauuacauuuugcuua

SEQ ID NO: 27528 - RNA, 32 nt, Homo Sapiens
ccagcccuuuuggagaggcagcugcaaaaagg

SEQ ID NO: 27529 - RNA, 32 nt, Homo Sapiens
gcacagagggaagaggaggguggggcccugga

SEQ ID NO: 27530 - RNA, 32 nt, Homo Sapiens
ugauguacaccuguagcaagaagcuaauucau

SEQ ID NO: 27531 - RNA, 32 nt, Homo Sapiens
agcagcuuagacagcagggcucucuguaucag

SEQ ID NO: 27532 - RNA, 32 nt, Homo Sapiens
caucauaaauuugaauaacuucaaaauaugua

SEQ ID NO: 27533 - RNA, 32 nt, Homo Sapiens
aaguacaaagauuauugacuauacaaccuacc

SEQ ID NO: 27534 - RNA, 32 nt, Homo Sapiens
gggagaaggcugucggggacaagguguauugg

SEQ ID NO: 27535 - RNA, 32 nt, Homo Sapiens
cucagggaaaauuuguuccaaacuauaaccau

SEQ ID NO: 27536 - RNA, 32 nt, Homo Sapiens
agauuccuaggaaccaaauaccucugaggagc

SEQ ID NO: 27537 - RNA, 32 nt, Homo Sapiens
aaaauguucuuuguucuuuggcuccaaaaaga

SEQ ID NO: 27538 - RNA, 32 nt, Homo Sapiens
ucauggaauaucuauuugaauccuggauguau

SEQ ID NO: 27539 - RNA, 32 nt, Homo Sapiens
acccgcuugccuuggugcucagcccucccauu

SEQ ID NO: 27540 - RNA, 32 nt, Homo Sapiens
auggagaagagaauacucauuuuuguccagug

SEQ ID NO: 27541 - RNA, 32 nt, Homo Sapiens
cuagauuuucauuguucauugauaugcucagu

SEQ ID NO: 27542 - RNA, 32 nt, Homo Sapiens
aucccuccacuacuccaccucagaguagauug

SEQ ID NO: 27543 - RNA, 32 nt, Homo Sapiens
uugggguaguggggacagaguucgcccccaga

SEQ ID NO: 27544 - RNA, 32 nt, Homo Sapiens
caaguggcccuccauucguguguguauuuagg

SEQ ID NO: 27545 - RNA, 32 nt, Homo Sapiens
ucuuuacagccgagaagauuccuugagaauca

SEQ ID NO: 27546 - RNA, 32 nt, Homo Sapiens
agacagcagauuuugcagauaccuuguggcgc

SEQ ID NO: 27547 - RNA, 32 nt, Homo Sapiens
aaggccuauauuggaucuguggagcacaggca

SEQ ID NO: 27548 - RNA, 32 nt, Homo Sapiens
gauaguggaugaagaaagaaggacgaggaagc

SEQ ID NO: 27549 - RNA, 32 nt, Homo Sapiens
guggaugauuuuuuuucuuuugaguuuuggga

SEQ ID NO: 27550 - RNA, 32 nt, Homo Sapiens
acuugugaagcacacagcucugcagccugggc

SEQ ID NO: 27551 - RNA, 32 nt, Homo Sapiens
cacuggcccuuccuaugccaucgccucucccc

SEQ ID NO: 27552 - RNA, 32 nt, Homo Sapiens
aguguguagcuagccucugaugagaugguaaa

SEQ ID NO: 27553 - RNA, 32 nt, Homo Sapiens
gccaccuuuucuucuuucucagagaacucaaa

SEQ ID NO: 27554 - RNA, 32 nt, Homo Sapiens
ccccgcuaugggcuaccauggccagggacccu

SEQ ID NO: 27555 - RNA, 32 nt, Homo Sapiens
aggaaaaacuaaaaaguguaucuuguauuuuc

SEQ ID NO: 27556 - RNA, 32 nt, Homo Sapiens
accuuccauguaucuccauccuccccugcucc

SEQ ID NO: 27557 - RNA, 32 nt, Homo Sapiens
aagcuaaucauucacugacuuauuuuccuucc

SEQ ID NO: 27558 - RNA, 32 nt, Homo Sapiens
uuaauucagauugagcaguuaaaguuuuugcu

SEQ ID NO: 27559 - RNA, 32 nt, Homo Sapiens
aaauuaaaagugauauuuuacaauuguaucug

SEQ ID NO: 27560 - RNA, 32 nt, Homo Sapiens
ucaauuguauauaaaaucacaguagccugcua

SEQ ID NO: 27561 - RNA, 32 nt, Homo Sapiens
gauuugaguucuucuuuucauggcuuuuauuc

SEQ ID NO: 27562 - RNA, 32 nt, Homo Sapiens
cucaggauaaaccuugaaaacacuaugcuaag

SEQ ID NO: 27563 - RNA, 32 nt, Homo Sapiens
gugcaguggcgcugucucggcucacugcaacu

SEQ ID NO: 27564 - RNA, 32 nt, Homo Sapiens
ucucucaaguauauagacacuacuucauggug

SEQ ID NO: 27565 - RNA, 30 nt, Homo Sapiens
uucaggcugaucccugcuuaagcccucuca

SEQ ID NO: 27566 - RNA, 32 nt, Homo Sapiens
cagguggccccagcuuccucuccggagccugc

SEQ ID NO: 27567 - RNA, 32 nt, Homo Sapiens
aaaguauguaaguguuggacugcacaaauuaa

SEQ ID NO: 27568 - RNA, 32 nt, Homo Sapiens
gcuucaucucaacauuuugcacuguccaguau

SEQ ID NO: 27569 - RNA, 32 nt, Homo Sapiens
guuaaccauuccauguacuaagaugcuuauag

SEQ ID NO: 27570 - RNA, 32 nt, Homo Sapiens
gcacagcugaacgcuuccuguuuggauuuuac

SEQ ID NO: 27571 - RNA, 32 nt, Homo Sapiens
ccaucucuuuucuuuguacaaucccauuuccu

SEQ ID NO: 27572 - RNA, 32 nt, Homo Sapiens
auuuacuuuuaagaggcaaaaugugaguaaau

SEQ ID NO: 27573 - RNA, 32 nt, Homo Sapiens
uaagagucauguuuuucuuuaaaguuucaaca

SEQ ID NO: 27574 - RNA, 32 nt, Homo Sapiens
gcugcgcgcacgcgaccgcauccgggcuccuu

SEQ ID NO: 27575 - RNA, 32 nt, Homo Sapiens
aaaccccugucccaaugacgucaaguucgucc

SEQ ID NO: 27576 - RNA, 32 nt, Homo Sapiens
gaagaaaaaauauuuuauucaaacauuagauu

SEQ ID NO: 27577 - RNA, 32 nt, Homo Sapiens
gccucucaguacgcggagcgccggcggucacc

SEQ ID NO: 27578 - RNA, 32 nt, Homo Sapiens
caguuuugugcacuuuaagccauuugaaaaac

SEQ ID NO: 27579 - RNA, 32 nt, Homo Sapiens
uggauaucuguaacuucuaugaucauuacucc

SEQ ID NO: 27580 - RNA, 32 nt, Homo Sapiens
cuccugggcggccccagguccuggacaauaag

SEQ ID NO: 27581 - RNA, 32 nt, Homo Sapiens
guccgagggccaccgggcuggcauuuugugac

SEQ ID NO: 27582 - RNA, 32 nt, Homo Sapiens
gcugcugccggggacuguccuggguggacggc

SEQ ID NO: 27583 - RNA, 32 nt, Homo Sapiens
ugacacaucuucucaccuucguuuuuuauuuc

SEQ ID NO: 27584 - RNA, 32 nt, Homo Sapiens
cugcccccagccccggccccaggcgucccagc

SEQ ID NO: 27585 - RNA, 32 nt, Homo Sapiens
aaucuugaauauuauuugauguguuaaaaaua

SEQ ID NO: 27586 - RNA, 32 nt, Homo Sapiens
uuucugaaaaauuuauaauaauuuuguuggua

SEQ ID NO: 27587 - RNA, 32 nt, Homo Sapiens
cagugaggcucccagagacgcagcugucucag

SEQ ID NO: 27588 - RNA, 32 nt, Homo Sapiens
cauucguggcuguguccccaucugagggccug

SEQ ID NO: 27589 - RNA, 32 nt, Homo Sapiens
cauaacuucuauuaucuuucaauccagaaaaa

SEQ ID NO: 27590 - RNA, 32 nt, Homo Sapiens
gacugggcgugguggcucaugccugugauccu

SEQ ID NO: 27591 - RNA, 32 nt, Homo Sapiens
ugaacaaagccuccaagaagucugggauuaug

SEQ ID NO: 27592 - RNA, 32 nt, Homo Sapiens
cccacagacagaggaugcagggcuucauuuuu

SEQ ID NO: 27593 - RNA, 32 nt, Homo Sapiens
caaggcgccugugacacaaaauggagaaagag

SEQ ID NO: 27594 - RNA, 32 nt, Homo Sapiens
gccuccccggaggcacagcagugucauggggc

SEQ ID NO: 27595 - RNA, 32 nt, Homo Sapiens
auccuuccagcaugucucugcacuaauaaaca

SEQ ID NO: 27596 - RNA, 32 nt, Homo Sapiens
gauuucugaaaacacucagacuguggagaccc

SEQ ID NO: 27597 - RNA, 32 nt, Homo Sapiens
aauugcugacucuugggaccuuucuguguuug

SEQ ID NO: 27598 - RNA, 32 nt, Homo Sapiens
ccuacauuugcuuuugaucuaucuaguauaag

SEQ ID NO: 27599 - RNA, 32 nt, Homo Sapiens
augugggaagggggaccgaaucuucccuggga

SEQ ID NO: 27600 - RNA, 32 nt, Homo Sapiens
agcuggggaaagggaugcuuuugcccacuccc

SEQ ID NO: 27601 - RNA, 32 nt, Homo Sapiens
uaaaagucuaaagaauugagaauuugacuauc

SEQ ID NO: 27602 - RNA, 32 nt, Homo Sapiens
ugcagcuggcaccagcccucccggccccggcc

SEQ ID NO: 27603 - RNA, 32 nt, Homo Sapiens
gccugcucuuuccucccauggggccgcugagg

SEQ ID NO: 27604 - RNA, 32 nt, Homo Sapiens
aguguaaauuuucauggucuuggauuagguag

SEQ ID NO: 27605 - RNA, 32 nt, Homo Sapiens
accaccaaaauacauagcuucgacaagaugga

SEQ ID NO: 27606 - RNA, 32 nt, Homo Sapiens
uguggcuccugggacuggcuggagcgggaguu

SEQ ID NO: 27607 - RNA, 32 nt, Homo Sapiens
acaugagccaguaacccuuuaggaacucucua

SEQ ID NO: 27608 - RNA, 32 nt, Homo Sapiens
ggcgccggggcaaggagagagugcagggaggc

SEQ ID NO: 27609 - RNA, 32 nt, Homo Sapiens
uggagaauguuuuauauccacacauaaagacc

SEQ ID NO: 27610 - RNA, 32 nt, Homo Sapiens
uuugguuuacuuugauuuauuugauugaaccc

SEQ ID NO: 27611 - RNA, 32 nt, Homo Sapiens
uaccccagcucccuggcagccauccaaaauuu

SEQ ID NO: 27612 - RNA, 32 nt, Homo Sapiens
cauccaggaauacagucugcagugcagcaaca

SEQ ID NO: 27613 - RNA, 32 nt, Homo Sapiens
cuuauuuccaugaaguuuuucagaguuagaag

SEQ ID NO: 27614 - RNA, 32 nt, Homo Sapiens
aucccuuucucacuguugccuguccccuaacu

SEQ ID NO: 27615 - RNA, 32 nt, Homo Sapiens
gucacugcacuccagcgugggcgacagagcga

SEQ ID NO: 27616 - RNA, 32 nt, Homo Sapiens
ugguugccggggcaggggcggaggcggaggca

SEQ ID NO: 27617 - RNA, 32 nt, Homo Sapiens
aggggcaggaggagggggagcugauuaggagg

SEQ ID NO: 27618 - RNA, 32 nt, Homo Sapiens
cagaggaggguggggucagggccgccccuucu

SEQ ID NO: 27619 - RNA, 32 nt, Homo Sapiens
cggugcugugagggaggggaaaagcauuuuuc

SEQ ID NO: 27620 - RNA, 32 nt, Homo Sapiens
caguuucacucuuuauuuuuuauuuuuauuuu

SEQ ID NO: 27621 - RNA, 32 nt, Homo Sapiens
ggacccugagccccaggcgccacgacaggacu

SEQ ID NO: 27622 - RNA, 32 nt, Homo Sapiens
uccuuugauccuucgagucuccagcuccucuc

SEQ ID NO: 27623 - RNA, 32 nt, Homo Sapiens
cuaccagaggucggggagggcaagaagcagga

SEQ ID NO: 27624 - RNA, 32 nt, Homo Sapiens
caaguggauucugagacaggcaccaucuccuu

SEQ ID NO: 27625 - RNA, 32 nt, Homo Sapiens
agccaauuggaagaugccagggcuugcaagaa

SEQ ID NO: 27626 - RNA, 32 nt, Homo Sapiens
auggaauugaaucaaacugaaaaaguauuucu

SEQ ID NO: 27627 - RNA, 32 nt, Homo Sapiens
aagagaugcccccagcaccgcacacucguggu

SEQ ID NO: 27628 - RNA, 31 nt, Homo Sapiens
ggcgcacucgccugccugcccgcccgcucac

SEQ ID NO: 27629 - RNA, 32 nt, Homo Sapiens
aaaauuaguaggcagagaauuuuuguaauggu

SEQ ID NO: 27630 - RNA, 31 nt, Homo Sapiens
acggcggagccccagcggaggugaaaguauu

SEQ ID NO: 27631 - RNA, 29 nt, Homo Sapiens
accuggccaaguuuauuuuuucuguauac

SEQ ID NO: 27632 - RNA, 32 nt, Homo Sapiens
ggugggucacacucagaccuggggacagaggu

SEQ ID NO: 27633 - RNA, 32 nt, Homo Sapiens
cuauccgauuugaugcacuuugaauauugaga

SEQ ID NO: 27634 - RNA, 32 nt, Homo Sapiens
ccugcaccuccuguccucucccaguucauucc

SEQ ID NO: 27635 - RNA, 32 nt, Homo Sapiens
cacccucaggguggcccggccuccuccugcca

SEQ ID NO: 27636 - RNA, 32 nt, Homo Sapiens
gcgagagcuacagugcucggcccggcacaucc

SEQ ID NO: 27637 - RNA, 32 nt, Homo Sapiens
ccgcgcgaggagccaggaugguccugguccac

SEQ ID NO: 27638 - RNA, 32 nt, Homo Sapiens
cagaucauggaaaacuuuucucaguuuacuuc

SEQ ID NO: 27639 - RNA, 32 nt, Homo Sapiens
caggaaaacacgcuugccuuccuucccggcag

SEQ ID NO: 27640 - RNA, 32 nt, Homo Sapiens
ugaugucucuuuuucaucuuuggacuggggau

SEQ ID NO: 27641 - RNA, 32 nt, Homo Sapiens
gagccaccuccucuccucucccaccugcagau

SEQ ID NO: 27642 - RNA, 32 nt, Homo Sapiens
aggggucaggugguuuggguuuuguuuuuuaa

SEQ ID NO: 27643 - RNA, 32 nt, Homo Sapiens
gcggggagggguuccuagugggaaauaaaagg

SEQ ID NO: 27644 - RNA, 32 nt, Homo Sapiens
cagccucugccagcuccucuggcauccgcccu

SEQ ID NO: 27645 - RNA, 32 nt, Homo Sapiens
uccugcagaaacaguuucuccuccuccccuca

SEQ ID NO: 27646 - RNA, 32 nt, Homo Sapiens
guguauuuauuuacuauaauguuagcuuacaa

SEQ ID NO: 27647 - RNA, 32 nt, Homo Sapiens
aucaguuaaagcuauugaauauaauacuuagc

SEQ ID NO: 27648 - RNA, 32 nt, Homo Sapiens
uagucuccuccucggcgggagcccucgcgacg

SEQ ID NO: 27649 - RNA, 32 nt, Homo Sapiens
acgcggucggccugguccuuuugcugcugggg

SEQ ID NO: 27650 - RNA, 32 nt, Homo Sapiens
ggggugggggagagggagagagcgaacaccca

SEQ ID NO: 27651 - RNA, 32 nt, Homo Sapiens
uucaaagauacuuuaaaacaguagagcuagca

SEQ ID NO: 27652 - RNA, 32 nt, Homo Sapiens
ggcaaacuaugaauuaaaguguuguggauccc

SEQ ID NO: 27653 - RNA, 32 nt, Homo Sapiens
ggaaaaauauccaugcucauggauuggaagaa

SEQ ID NO: 27654 - RNA, 32 nt, Homo Sapiens
uaauuagggcuuugcucguaagcaaaacuguu

SEQ ID NO: 27655 - RNA, 32 nt, Homo Sapiens
aggauaccuccagccaggccucuguggccucu

SEQ ID NO: 27656 - RNA, 32 nt, Homo Sapiens
caaggcaaaagcauuuugcacaguguuuguuu

SEQ ID NO: 27657 - RNA, 32 nt, Homo Sapiens
agcuaauuuuuccucuuuuuaguagagauaca

SEQ ID NO: 27658 - RNA, 32 nt, Homo Sapiens
caugcuucuucuuuuaccuuuuugucuaccuc

SEQ ID NO: 27659 - RNA, 32 nt, Homo Sapiens
uugcggaagaaccugaccguggacgagggcac

SEQ ID NO: 27660 - RNA, 32 nt, Homo Sapiens
acgggaggggaggugacggcuggugacugaug

SEQ ID NO: 27661 - RNA, 32 nt, Homo Sapiens
uuaaaaauaaacaaaaauggucauaagaucau

SEQ ID NO: 27662 - RNA, 32 nt, Homo Sapiens
ccucccccauccccuugacucuccccucccag

SEQ ID NO: 27663 - RNA, 32 nt, Homo Sapiens
ucaaaaccaaaaugaccuaacccuccuggacc

SEQ ID NO: 27664 - RNA, 32 nt, Homo Sapiens
ugacuguucaacagaguuaaccugaauuaugu

SEQ ID NO: 27665 - RNA, 32 nt, Homo Sapiens
aaaacugaagguuuuucuuuuaagugcaacau

SEQ ID NO: 27666 - RNA, 32 nt, Homo Sapiens
cccggcaggggcugggguggugcugcugcuau

SEQ ID NO: 27667 - RNA, 32 nt, Homo Sapiens
auggcagauacccagugcugcccgccaccaug

SEQ ID NO: 27668 - RNA, 32 nt, Homo Sapiens
ccacagcucugggggcugcugcugccugggcu

SEQ ID NO: 27669 - RNA, 32 nt, Homo Sapiens
cuguuuccugcgaggagggaaguuacagaucu

SEQ ID NO: 27670 - RNA, 32 nt, Homo Sapiens
acauuguugaagacauaauuuauaccaaguua

SEQ ID NO: 27671 - RNA, 32 nt, Homo Sapiens
uacaauguauguaauuuguuuccccuagcuua

SEQ ID NO: 27672 - RNA, 32 nt, Homo Sapiens
ugugagagugguuuuuacuuuuuuuaaugauu

SEQ ID NO: 27673 - RNA, 32 nt, Homo Sapiens
cugcuuccagcaugcucugaccccauuucuca

SEQ ID NO: 27674 - RNA, 32 nt, Homo Sapiens
gaguauuaaauauaaaguuguagauucuuaug

SEQ ID NO: 27675 - RNA, 32 nt, Homo Sapiens
ccuagggcccgaccgcgccggacgcggugucc

SEQ ID NO: 27676 - RNA, 32 nt, Homo Sapiens
ucauguuaggcacaacuauuaccauguuauug

SEQ ID NO: 27677 - RNA, 31 nt, Homo Sapiens
gagacaauaaggguuuuuaguuuuaucuacu

SEQ ID NO: 27678 - RNA, 32 nt, Homo Sapiens
ggggagagggaagagugaccugagucaaauag

SEQ ID NO: 27679 - RNA, 32 nt, Homo Sapiens
aagggacccuugccucaccccucccccuggcc

SEQ ID NO: 27680 - RNA, 32 nt, Homo Sapiens
uucuaagacaccuuuuauaagccucccuauaa

SEQ ID NO: 27681 - RNA, 32 nt, Homo Sapiens
gcacccagaagcccccgggucuggagagggaa

SEQ ID NO: 27682 - RNA, 31 nt, Homo Sapiens
gugaagcugcugcggaggcgcuuccggcugc

SEQ ID NO: 27683 - RNA, 32 nt, Homo Sapiens
ggaggaaaaguacugaaauacaguuuaugaag

SEQ ID NO: 27684 - RNA, 32 nt, Homo Sapiens
acaauucauauuugaucccuggauccaggggu

SEQ ID NO: 27685 - RNA, 32 nt, Homo Sapiens
aucucaagaacaaaagacaacugaaagacguu

SEQ ID NO: 27686 - RNA, 32 nt, Homo Sapiens
gcagcgaccccucggcgccgaugucccugauc

SEQ ID NO: 27687 - RNA, 32 nt, Homo Sapiens
ccccgccgcgcgccugaccuuuccacgcgcgc

SEQ ID NO: 27688 - RNA, 32 nt, Homo Sapiens
ucgguggggaggcaagagggcggcgaggaggu

SEQ ID NO: 27689 - RNA, 32 nt, Homo Sapiens
aagaucacauaaaaaugaagcagcaggcuuug

SEQ ID NO: 27690 - RNA, 32 nt, Homo Sapiens
gcugaccccugagccacccccacucccacagg

SEQ ID NO: 27691 - RNA, 32 nt, Homo Sapiens
ccccgagccgggguucccuccucccggcccgc

SEQ ID NO: 27692 - RNA, 32 nt, Homo Sapiens
cguagcguucuccgcgccccggaugacgccga

SEQ ID NO: 27693 - RNA, 32 nt, Homo Sapiens
uccccugccugccugucucuaguuucucucac

SEQ ID NO: 27694 - RNA, 32 nt, Homo Sapiens
augaugugaaugggugugaacgauacuuggcu

SEQ ID NO: 27695 - RNA, 32 nt, Homo Sapiens
uugcaccccccucuccccauuccuggcuuuug

SEQ ID NO: 27696 - RNA, 32 nt, Homo Sapiens
uaucccuuuucucuguaugcaguuggacucgu

SEQ ID NO: 27697 - RNA, 32 nt, Homo Sapiens
ccggaacccaaguuauauguauguauacgugu

SEQ ID NO: 27698 - RNA, 32 nt, Homo Sapiens
gacuguaaaaauuacccagaacagcguccuca

SEQ ID NO: 27699 - RNA, 32 nt, Homo Sapiens
cugcccuaggacuuaccaagcuguagggccag

SEQ ID NO: 27700 - RNA, 32 nt, Homo Sapiens
uuauuaaauuuauugggccaauuuaaguaaac

SEQ ID NO: 27701 - RNA, 32 nt, Homo Sapiens
acucccaugcugucacccucaggaagcaucau

SEQ ID NO: 27702 - RNA, 32 nt, Homo Sapiens
agugcaaaagguuuaaauuuauaguugugaac

SEQ ID NO: 27703 - RNA, 32 nt, Homo Sapiens
cccuccuccuccgcccccuccccucccccgcc

SEQ ID NO: 27704 - RNA, 31 nt, Homo Sapiens
caucagauggggaaacaaggccagaagcccc

SEQ ID NO: 27705 - RNA, 32 nt, Homo Sapiens
uuguuuuaauugauuuuucuuaucuugauuuc

SEQ ID NO: 27706 - RNA, 32 nt, Homo Sapiens
aaaauuuucuuacuuuuucuaccauaucugua

SEQ ID NO: 27707 - RNA, 32 nt, Homo Sapiens
gugcugugggucugcuggguggcagaaauggu

SEQ ID NO: 27708 - RNA, 32 nt, Homo Sapiens
cccauguguucccacacauccacaucauggga

SEQ ID NO: 27709 - RNA, 32 nt, Homo Sapiens
ggugcauguuguaacauaucuaugauaaaagc

SEQ ID NO: 27710 - RNA, 32 nt, Homo Sapiens
augugguuguggucuuagauugacagcauuag

SEQ ID NO: 27711 - RNA, 30 nt, Homo Sapiens
agaugguaccaccacuaugcaaaacagugg

SEQ ID NO: 27712 - RNA, 29 nt, Homo Sapiens
ugaaucccauuaaguuauuuucuaauguu

SEQ ID NO: 27713 - RNA, 32 nt, Homo Sapiens
uuucucagauuuuaaaguacuauauuaaagaa

SEQ ID NO: 27714 - RNA, 32 nt, Homo Sapiens
uaauuauugcaguuaaauucuagacaucaguu

SEQ ID NO: 27715 - RNA, 32 nt, Homo Sapiens
ccuggcagggcuuucaacugcacauguuuuuu

SEQ ID NO: 27716 - RNA, 32 nt, Homo Sapiens
uaugguuagucuuuuuaauuuuaguuguuuua

SEQ ID NO: 27717 - RNA, 32 nt, Homo Sapiens
caaugccaaaaagauaguuucuacacaucacc

SEQ ID NO: 27718 - RNA, 32 nt, Homo Sapiens
acaaccacugcccagcagccucugggaccucg

SEQ ID NO: 27719 - RNA, 32 nt, Homo Sapiens
gcaggucagggagagggaaggcagggguggac

SEQ ID NO: 27720 - RNA, 32 nt, Homo Sapiens
ucuccuaugguuguggcagccauggugaugga

SEQ ID NO: 27721 - RNA, 32 nt, Homo Sapiens
uuugugaccaaggagcucaauuuuuguuuuga

SEQ ID NO: 27722 - RNA, 32 nt, Homo Sapiens
guguucaccuguauaauuuauuuuaaagauuc

SEQ ID NO: 27723 - RNA, 32 nt, Homo Sapiens
aaaaauacauuaaaaagauacaugacaccaau

SEQ ID NO: 27724 - RNA, 32 nt, Homo Sapiens
acagugaaacaaauugcggacuggccuugucc

SEQ ID NO: 27725 - RNA, 32 nt, Homo Sapiens
gugcuucugagcugggcauccgaaggcauccu

SEQ ID NO: 27726 - RNA, 32 nt, Homo Sapiens
auaaauggagaugcuuuucauuuuuguuugga

SEQ ID NO: 27727 - RNA, 32 nt, Homo Sapiens
cagaucugccugcagagcuaaaaucugugagg

SEQ ID NO: 27728 - RNA, 32 nt, Homo Sapiens
gugacucuggaccacaauaaacaugauuuuuu

SEQ ID NO: 27729 - RNA, 32 nt, Homo Sapiens
auuaacuuuaugucuucccaugacucaaguuu

SEQ ID NO: 27730 - RNA, 32 nt, Homo Sapiens
gggagggcgcgagggaggagcggcggcuccgg

SEQ ID NO: 27731 - RNA, 32 nt, Homo Sapiens
ugaagaaauaaauguuuuugacaauaaacuuc

SEQ ID NO: 27732 - RNA, 32 nt, Homo Sapiens
ccaugcccaagcagagcuggagagagauggcc

SEQ ID NO: 27733 - RNA, 32 nt, Homo Sapiens
cucugccgugcagccauaggacaccaagccuc

SEQ ID NO: 27734 - RNA, 32 nt, Homo Sapiens
caugggggcuccuguugcuuugggggcugcuu

SEQ ID NO: 27735 - RNA, 32 nt, Homo Sapiens
cagccuccaccccugacccccauccucuuuuc

SEQ ID NO: 27736 - RNA, 32 nt, Homo Sapiens
cuggcuagugucagcaauaauuuucagguauc

SEQ ID NO: 27737 - RNA, 32 nt, Homo Sapiens
uuugaagucaaucuuuucaucagaggcagcuu

SEQ ID NO: 27738 - RNA, 32 nt, Homo Sapiens
uuucucucaaauuuaugaaaagauuagaaaau

SEQ ID NO: 27739 - RNA, 32 nt, Homo Sapiens
acagaaagaacaaaaaauguuuuaaauuucuc

SEQ ID NO: 27740 - RNA, 32 nt, Homo Sapiens
ucugcauuuuuuuguuuuuuuauuucuauuga

SEQ ID NO: 27741 - RNA, 32 nt, Homo Sapiens
caucauccugcgggacgacgccgccaugaggg

SEQ ID NO: 27742 - RNA, 32 nt, Homo Sapiens
aaaggggucagacaauacaagaaaagccagua

SEQ ID NO: 27743 - RNA, 32 nt, Homo Sapiens
gguuacucucguucuuuuuucgcagaaaaacu

SEQ ID NO: 27744 - RNA, 32 nt, Homo Sapiens
ccugggguccccuggggugggguggucagggu

SEQ ID NO: 27745 - RNA, 32 nt, Homo Sapiens
agugcaauauaaauuucugaacuuuaccuagg

SEQ ID NO: 27746 - RNA, 29 nt, Homo Sapiens
ccauuauaaaguuuccuauucugugaaac

SEQ ID NO: 27747 - RNA, 32 nt, Homo Sapiens
cuaaaaugcacugcugccaucuagugauacac

SEQ ID NO: 27748 - RNA, 32 nt, Homo Sapiens
ggucuccccgucuggagggucacgccgccuuc

SEQ ID NO: 27749 - RNA, 32 nt, Homo Sapiens
gaucaccccuggaaguuccuguuaucacuggc

SEQ ID NO: 27750 - RNA, 32 nt, Homo Sapiens
ucuuuggauaccucagagguuaaaucucagca

SEQ ID NO: 27751 - RNA, 32 nt, Homo Sapiens
gagagcaucuucauugacauugcuuucaguau

SEQ ID NO: 27752 - RNA, 32 nt, Homo Sapiens
ucuucuccacacuguugggagguaaugcugcc

SEQ ID NO: 27753 - RNA, 32 nt, Homo Sapiens
ggccccuguccccaguccccagcccugggcuu

SEQ ID NO: 27754 - RNA, 32 nt, Homo Sapiens
auaaucaucauucaggaaaaauauaaguaguc

SEQ ID NO: 27755 - RNA, 32 nt, Homo Sapiens
cuucucccaaguggcagacuccagggaaaaga

SEQ ID NO: 27756 - RNA, 32 nt, Homo Sapiens
cuuuccccaaauagccucuccuuuguagucgu

SEQ ID NO: 27757 - RNA, 32 nt, Homo Sapiens
gcccgcuuguccuggcucucagagcacgggga

SEQ ID NO: 27758 - RNA, 32 nt, Homo Sapiens
cgagcucagggcccgcccggccgcaccaugag

SEQ ID NO: 27759 - RNA, 32 nt, Homo Sapiens
agagccgggaaggggaaggcguaggugugggc

SEQ ID NO: 27760 - RNA, 32 nt, Homo Sapiens
gagguguuucugaauuuugucuaccucacagg

SEQ ID NO: 27761 - RNA, 32 nt, Homo Sapiens
auuagaagaacaaguuuagaagguguggaacu

SEQ ID NO: 27762 - RNA, 32 nt, Homo Sapiens
cugcuggggccaagccaagggccuccccuacc

SEQ ID NO: 27763 - RNA, 32 nt, Homo Sapiens
ugcaugugaacugugugugaauguguguauau

SEQ ID NO: 27764 - RNA, 32 nt, Homo Sapiens
ggugcucguggcuggguuuucuuuuuaaccau

SEQ ID NO: 27765 - RNA, 32 nt, Homo Sapiens
accuuuguauaaaaaacaccagugcucuuucg

SEQ ID NO: 27766 - RNA, 32 nt, Homo Sapiens
uccaagucucagaucucgaccauugaaaaggu

SEQ ID NO: 27767 - RNA, 32 nt, Homo Sapiens
ucaacaagaucuuuaaaauuuuugugaauacu

SEQ ID NO: 27768 - RNA, 32 nt, Homo Sapiens
agaucagacucaucagggggagcccucaccuc

SEQ ID NO: 27769 - RNA, 32 nt, Homo Sapiens
agacacugccugggcugaccccgguggcggcc

SEQ ID NO: 27770 - RNA, 32 nt, Homo Sapiens
ggccgccagcggcuacacggaccugcgugaga

SEQ ID NO: 27771 - RNA, 32 nt, Homo Sapiens
cuggugucuuuagagcuuuacucuguugaagu

SEQ ID NO: 27772 - RNA, 32 nt, Homo Sapiens
aaguucuuaacauguuaugucccuaguggcuu

SEQ ID NO: 27773 - RNA, 32 nt, Homo Sapiens
uucacuguuaaauucucagaguauuauuugga

SEQ ID NO: 27774 - RNA, 32 nt, Homo Sapiens
cgaggcgcccgggcucccggcgcggcggcgga

SEQ ID NO: 27775 - RNA, 32 nt, Homo Sapiens
uugugucucagguguggucccugccugcuuga

SEQ ID NO: 27776 - RNA, 32 nt, Homo Sapiens
gccaggugaugggaugauaucaacaaugauaa

SEQ ID NO: 27777 - RNA, 32 nt, Homo Sapiens
guuaaggucaaguuuucuuuuauaagccuuua

SEQ ID NO: 27778 - RNA, 32 nt, Homo Sapiens
caguaucccaggcugacaagggcuugcccuuu

SEQ ID NO: 27779 - RNA, 32 nt, Homo Sapiens
agcacauaacuguggucaucucuguaguuuac

SEQ ID NO: 27780 - RNA, 32 nt, Homo Sapiens
cuuccuguuuuuguccucucaggguugggguc

SEQ ID NO: 27781 - RNA, 28 nt, Homo Sapiens
uugaugacguuacaugagccagcaaauu

SEQ ID NO: 27782 - RNA, 32 nt, Homo Sapiens
cacacacacacacacacacacacacacgcuuc

SEQ ID NO: 27783 - RNA, 32 nt, Homo Sapiens
aagugguuaugaagcaaaugcauuuaugguga

SEQ ID NO: 27784 - RNA, 30 nt, Homo Sapiens
uccagcccucccagcccucccgcagccuuu

SEQ ID NO: 27785 - RNA, 30 nt, Homo Sapiens
gaaaaugucugugcuacugaaaucuaacuu

SEQ ID NO: 27786 - RNA, 32 nt, Homo Sapiens
guuugggaaugggaaaggauaccggggcaaga

SEQ ID NO: 27787 - RNA, 32 nt, Homo Sapiens
gcaugucaguuggucaugaugcuuggccuggc

SEQ ID NO: 27788 - RNA, 32 nt, Homo Sapiens
guacuuuacaagcaugaaggauauuaggguaa

SEQ ID NO: 27789 - RNA, 32 nt, Homo Sapiens
ggggcuggacuggccuggucuggcugggaaag

SEQ ID NO: 27790 - RNA, 32 nt, Homo Sapiens
cgcuggaaggcacacgccugccaggcagggca

SEQ ID NO: 27791 - RNA, 31 nt, Homo Sapiens
ggugagaugcuguugccgcugcugcugcugc

SEQ ID NO: 27792 - RNA, 32 nt, Homo Sapiens
guucuuaaaauaauauacaugcauuuaauauu

SEQ ID NO: 27793 - RNA, 32 nt, Homo Sapiens
ccccagcucaccgcgccgcggaccucacaccu

SEQ ID NO: 27794 - RNA, 32 nt, Homo Sapiens
agauguaaaaauuguaauaaaaacagaagucc

SEQ ID NO: 27795 - RNA, 32 nt, Homo Sapiens
agugggccgggaucguacuacugcacuccagc

SEQ ID NO: 27796 - RNA, 32 nt, Homo Sapiens
ugaguccuuguuauggucaucauaagguaaug

SEQ ID NO: 27797 - RNA, 32 nt, Homo Sapiens
ccagcuaaggagucccugguucauugauggau

SEQ ID NO: 27798 - RNA, 32 nt, Homo Sapiens
ccaaaggcagguuuuucuuuuucauuuauuca

SEQ ID NO: 27799 - RNA, 32 nt, Homo Sapiens
accgauugagacgucuccaggaccuuaggggc

SEQ ID NO: 27800 - RNA, 30 nt, Homo Sapiens
cguuagcgcgcgccgucggugagucagucc

SEQ ID NO: 27801 - RNA, 31 nt, Homo Sapiens
gcggaacaagagguugugagaaucuaagaug

SEQ ID NO: 27802 - RNA, 32 nt, Homo Sapiens
ccaccacauaaacacauggacacacacccaag

SEQ ID NO: 27803 - RNA, 32 nt, Homo Sapiens
aauugacuucuaaaauguucaaauugucuagu

SEQ ID NO: 27804 - RNA, 29 nt, Homo Sapiens
gagaccauauguaugcuauuaaaauauau

SEQ ID NO: 27805 - RNA, 32 nt, Homo Sapiens
aaagaacuaauagagaaauaacaauaagcugg

SEQ ID NO: 27806 - RNA, 32 nt, Homo Sapiens
cguccagcccuacauuguccagcccuaccuag

SEQ ID NO: 27807 - RNA, 31 nt, Homo Sapiens
gcgugcccgggaacugcgccccgcggaggcc

SEQ ID NO: 27808 - RNA, 32 nt, Homo Sapiens
uggagagcagugccccccgacacauguauucu

SEQ ID NO: 27809 - RNA, 32 nt, Homo Sapiens
gagcuugcagugagccgagauggcgccacugc

SEQ ID NO: 27810 - RNA, 32 nt, Homo Sapiens
aaguggucauauuuuaauauuauguuugauuc

SEQ ID NO: 27811 - RNA, 32 nt, Homo Sapiens
gaauucaagaucugagaaagaacuugggcaac

SEQ ID NO: 27812 - RNA, 32 nt, Homo Sapiens
aaaguccuacugaguuucacacuacuguugug

SEQ ID NO: 27813 - RNA, 32 nt, Homo Sapiens
cuuucuuuauaucaguggaaauccagcgagau

SEQ ID NO: 27814 - RNA, 32 nt, Homo Sapiens
guguacuugggacugagccacggccgccgggc

SEQ ID NO: 27815 - RNA, 32 nt, Homo Sapiens
auaucuaaacacuacaaccacuucuacuacga

SEQ ID NO: 27816 - RNA, 32 nt, Homo Sapiens
caguuuuuacaaaauacacuuacacaccaucu

SEQ ID NO: 27817 - RNA, 32 nt, Homo Sapiens
uuacagugccggcccuguguugccagauuguc

SEQ ID NO: 27818 - RNA, 32 nt, Homo Sapiens
acgugucagaaucuuuaccucauccucaagcu

SEQ ID NO: 27819 - RNA, 32 nt, Homo Sapiens
ucccaguccaccugaggaacugucucgaacua

SEQ ID NO: 27820 - RNA, 32 nt, Homo Sapiens
gcuuucuuucccuuuuuucugcacugccauau

SEQ ID NO: 27821 - RNA, 32 nt, Homo Sapiens
uccgggacguucucggcucugugcguucaguc

SEQ ID NO: 27822 - RNA, 32 nt, Homo Sapiens
cgaggauggcgcugguacugcugcuugcuggu

SEQ ID NO: 27823 - RNA, 32 nt, Homo Sapiens
gagggggagaguacgucggcggugcucucggg

SEQ ID NO: 27824 - RNA, 32 nt, Homo Sapiens
gacuauuacacacaaaacaaauuaaaaacaaa

SEQ ID NO: 27825 - RNA, 32 nt, Homo Sapiens
uccagucguagcccggccgcccgcgccugucc

SEQ ID NO: 27826 - RNA, 32 nt, Homo Sapiens
ggggccagcaaggcccugaaugugacugugga

SEQ ID NO: 27827 - RNA, 32 nt, Homo Sapiens
ccuagcaaauuguguugguuaugugaguguug

SEQ ID NO: 27828 - RNA, 32 nt, Homo Sapiens
gcacucagacugcugcugcagccgccgccggg

SEQ ID NO: 27829 - RNA, 32 nt, Homo Sapiens
ggcggagcuggcuggaacacggaugccagagg

SEQ ID NO: 27830 - RNA, 32 nt, Homo Sapiens
cgaaggaucaggaaguuugugcucucugcgug

SEQ ID NO: 27831 - RNA, 32 nt, Homo Sapiens
cucuggagcuguccaggugcugccuggugauc

SEQ ID NO: 27832 - RNA, 32 nt, Homo Sapiens
uuggugugaugccaaggcaaaguggugaggag

SEQ ID NO: 27833 - RNA, 32 nt, Homo Sapiens
aagauugucugccuguuuuucuuuguaauuug

SEQ ID NO: 27834 - RNA, 32 nt, Homo Sapiens
ggcggcggccagagcccuccccgcgcugccag

SEQ ID NO: 27835 - RNA, 32 nt, Homo Sapiens
gaucccaggaggaaggauggggcaagagcaga

SEQ ID NO: 27836 - RNA, 32 nt, Homo Sapiens
aaucaagauucuuuuuauucuuucauuucacu

SEQ ID NO: 27837 - RNA, 32 nt, Homo Sapiens
uuucuuacccuuucuucuccccauuuucauac

SEQ ID NO: 27838 - RNA, 32 nt, Homo Sapiens
cugucugcugaugucucccuuuagucacgagg

SEQ ID NO: 27839 - RNA, 32 nt, Homo Sapiens
uuaguugacugguauuuuuuacugaggagcaa

SEQ ID NO: 27840 - RNA, 32 nt, Homo Sapiens
uuugaauaaaaugagaaaugcuuaagaaaaau

SEQ ID NO: 27841 - RNA, 32 nt, Homo Sapiens
agcagguuugguuuuuauuaaaaugauguguu

SEQ ID NO: 27842 - RNA, 32 nt, Homo Sapiens
ccauauuucaggagaauguuuccaugugccaa

SEQ ID NO: 27843 - RNA, 32 nt, Homo Sapiens
gguuucccgccucgcacccccaccucuggacu

SEQ ID NO: 27844 - RNA, 32 nt, Homo Sapiens
gagaagaggagccccagcgccccgguuugcaa

SEQ ID NO: 27845 - RNA, 32 nt, Homo Sapiens
guacauguagaaaaaagacuggaaggugauac

SEQ ID NO: 27846 - RNA, 32 nt, Homo Sapiens
cccuccccacuacuccuucuccuucuagaugg

SEQ ID NO: 27847 - RNA, 32 nt, Homo Sapiens
cucucucccagcacuuucuccucccuugucag

SEQ ID NO: 27848 - RNA, 32 nt, Homo Sapiens
caagagagaaacagagcgaaagagacuuuaga

SEQ ID NO: 27849 - RNA, 32 nt, Homo Sapiens
ccugggaccugcccucccuuggucccagguca

SEQ ID NO: 27850 - RNA, 32 nt, Homo Sapiens
acucuucugaagcagccagaacucucaaaggc

SEQ ID NO: 27851 - RNA, 32 nt, Homo Sapiens
acuuggagcugggacaccacguuuccagcuug

SEQ ID NO: 27852 - RNA, 32 nt, Homo Sapiens
caugggaggcggaggugacuggcuggcugucu

SEQ ID NO: 27853 - RNA, 32 nt, Homo Sapiens
gcuauguuucugucacagagacagcccuuuuc

SEQ ID NO: 27854 - RNA, 32 nt, Homo Sapiens
accucgcggcguugcaccggcucugugagcac

SEQ ID NO: 27855 - RNA, 32 nt, Homo Sapiens
ucuuuucugcuucucaguagacuuccaugcca

SEQ ID NO: 27856 - RNA, 32 nt, Homo Sapiens
uaaaaaugauauugugguggacugcuaaaaau

SEQ ID NO: 27857 - RNA, 32 nt, Homo Sapiens
cuuccacggcaauuuuaacagugguauucugu

SEQ ID NO: 27858 - RNA, 32 nt, Homo Sapiens
acacaucuuuguuugaaaggcuugucaauuuc

SEQ ID NO: 27859 - RNA, 32 nt, Homo Sapiens
ucauugguaauaagcauuucuaauauaagcaa

SEQ ID NO: 27860 - RNA, 32 nt, Homo Sapiens
uguuauuuucuaaaucuuuguauacuuguuug

SEQ ID NO: 27861 - RNA, 32 nt, Homo Sapiens
gcacaauccagaaguugagcugaaugauuaag

SEQ ID NO: 27862 - RNA, 32 nt, Homo Sapiens
ccagcccugggcuccgccccagcccucagccc

SEQ ID NO: 27863 - RNA, 32 nt, Homo Sapiens
ggaagggcccggggcggggcaggcggggacua

SEQ ID NO: 27864 - RNA, 32 nt, Homo Sapiens
ccagaggccaugcugcugcugcucacgcuugc

SEQ ID NO: 27865 - RNA, 32 nt, Homo Sapiens
caggcuccugcaggccagcugcaugcucucca

SEQ ID NO: 27866 - RNA, 32 nt, Homo Sapiens
ccagauugugccacugcccuccagccugggug

SEQ ID NO: 27867 - RNA, 32 nt, Homo Sapiens
ugugcgcauacuuaaaaguugaugcguggugc

SEQ ID NO: 27868 - RNA, 32 nt, Homo Sapiens
ccccgucuccagccccuguacuuuggcuugac

SEQ ID NO: 27869 - RNA, 32 nt, Homo Sapiens
gcaucagcucugagguucaucaucuucuuagc

SEQ ID NO: 27870 - RNA, 31 nt, Homo Sapiens
acuuugacaaauugaagauggauguuuguca

SEQ ID NO: 27871 - RNA, 32 nt, Homo Sapiens
guaacauacuaguuaguuaaugaauucuguga

SEQ ID NO: 27872 - RNA, 32 nt, Homo Sapiens
ucccccagcuccccccaccucccccacuccca

SEQ ID NO: 27873 - RNA, 32 nt, Homo Sapiens
aaugguuuggugagaacagauguuagaacuug

SEQ ID NO: 27874 - RNA, 32 nt, Homo Sapiens
ucugccccugguuuguuucccgcggcacuucu

SEQ ID NO: 27875 - RNA, 32 nt, Homo Sapiens
gcuggcccgggagggggcgcggggcacgguug

SEQ ID NO: 27876 - RNA, 32 nt, Homo Sapiens
ggcggagaccucaggcagcggcugcagagggg

SEQ ID NO: 27877 - RNA, 32 nt, Homo Sapiens
auaaggcauacauuugcgcagaugagcuagga

SEQ ID NO: 27878 - RNA, 32 nt, Homo Sapiens
uuuuuuguuuuuuuuuuuuuuaauuauuucuc

SEQ ID NO: 27879 - RNA, 32 nt, Homo Sapiens
uguacuucacucuuaguaaaauguauuuacua

SEQ ID NO: 27880 - RNA, 32 nt, Homo Sapiens
cugggggcugcaaccccaccggacgggugguc

SEQ ID NO: 27881 - RNA, 32 nt, Homo Sapiens
cuccgcuucgccgccgccgccggccgcagcca

SEQ ID NO: 27882 - RNA, 32 nt, Homo Sapiens
uggcagccgggcgcgugaggagcggcaggccu

SEQ ID NO: 27883 - RNA, 32 nt, Homo Sapiens
uguuagaccuuuucacucucucuuccauggcu

SEQ ID NO: 27884 - RNA, 32 nt, Homo Sapiens
agcucccacuucuuuccuuguuuuuuaaauua

SEQ ID NO: 27885 - RNA, 32 nt, Homo Sapiens
uauauuuaagagacuuuguaaaaaagaaaaau

SEQ ID NO: 27886 - RNA, 32 nt, Homo Sapiens
agagauuguaaaaguaaaaaacuguaaaugua

SEQ ID NO: 27887 - RNA, 32 nt, Homo Sapiens
agcaggaguuggaccuccauggagccacuagg

SEQ ID NO: 27888 - RNA, 32 nt, Homo Sapiens
cucugacauuuuauuacaagcugcauguccug

SEQ ID NO: 27889 - RNA, 32 nt, Homo Sapiens
gccggggaggccagagcguggagcgcugcgcg

SEQ ID NO: 27890 - RNA, 32 nt, Homo Sapiens
ucaugguuccuauguuuuuuuaucauaauuaa

SEQ ID NO: 27891 - RNA, 32 nt, Homo Sapiens
gucuucgcaccucgcccccucacccccuaacu

SEQ ID NO: 27892 - RNA, 32 nt, Homo Sapiens
aucuccucaaguugaccucucccggcccagcu

SEQ ID NO: 27893 - RNA, 32 nt, Homo Sapiens
cugugacgcgcgcgccggagcgggguccgaug

SEQ ID NO: 27894 - RNA, 32 nt, Homo Sapiens
cgcugcuguuucaguucucucuccaggguggc

SEQ ID NO: 27895 - RNA, 32 nt, Homo Sapiens
cugcugggaaggagagucugugccgacaagau

SEQ ID NO: 27896 - RNA, 32 nt, Homo Sapiens
acagaugauuuggaaaaucucuggagagacug

SEQ ID NO: 27897 - RNA, 32 nt, Homo Sapiens
ccagccaggacacggugccucaguccacagcc

SEQ ID NO: 27898 - RNA, 32 nt, Homo Sapiens
cccucaugcccggcugacugggacugcggguc

SEQ ID NO: 27899 - RNA, 32 nt, Homo Sapiens
acuucuuucacagaugucaaaccaccaguguu

SEQ ID NO: 27900 - RNA, 32 nt, Homo Sapiens
aauuuaaguuuuuuuuuuuuuaaaccuacuuu

SEQ ID NO: 27901 - RNA, 32 nt, Homo Sapiens
auugucauauucaaaacaaauguggauacagu

SEQ ID NO: 27902 - RNA, 32 nt, Homo Sapiens
guaggagauacacgguacuuggagcagucagc

SEQ ID NO: 27903 - RNA, 32 nt, Homo Sapiens
aggcagccaaggaaacacugauuuugcugcug

SEQ ID NO: 27904 - RNA, 32 nt, Homo Sapiens
uacacaugucauugaauuguagguuuccuuuu

SEQ ID NO: 27905 - RNA, 32 nt, Homo Sapiens
ccaucgugggacacgacacacccagaccgcgu

SEQ ID NO: 27906 - RNA, 32 nt, Homo Sapiens
agagcaaauagcuucuuagacugcugccuucu

SEQ ID NO: 27907 - RNA, 32 nt, Homo Sapiens
agaggcuccagaaggauuucuagaucgcuuca

SEQ ID NO: 27908 - RNA, 32 nt, Homo Sapiens
aaauguuaaacacaaaaacuacaugacugaag

SEQ ID NO: 27909 - RNA, 32 nt, Homo Sapiens
gggauuaauuuucagacccuuuaauaagugag

SEQ ID NO: 27910 - RNA, 31 nt, Homo Sapiens
gacugaagccacugccuaccuccugcccaca

SEQ ID NO: 27911 - RNA, 32 nt, Homo Sapiens
uaauggcagcuagugccuuuagaggguaccgu

SEQ ID NO: 27912 - RNA, 32 nt, Homo Sapiens
guaugcuggaggagggacuccuaaaguaggug

SEQ ID NO: 27913 - RNA, 32 nt, Homo Sapiens
gaucuucuuuuguaauguuuuucauguuacug

SEQ ID NO: 27914 - RNA, 32 nt, Homo Sapiens
aaauacaaaaauugguuuuucaaugcaucauu

SEQ ID NO: 27915 - RNA, 32 nt, Homo Sapiens
cuccgggcggguggaggaagcgacccgcggag

SEQ ID NO: 27916 - RNA, 32 nt, Homo Sapiens
gacuguuuggcacuugagacaaaccugccuuu

SEQ ID NO: 27917 - RNA, 32 nt, Homo Sapiens
guguggccgcgagcaccgcgcgcgcaaagcgg

SEQ ID NO: 27918 - RNA, 32 nt, Homo Sapiens
acaaauucaaccagugucacaucaucuacacc

SEQ ID NO: 27919 - RNA, 32 nt, Homo Sapiens
gaggccagaggugauccagugauuugggagcu

SEQ ID NO: 27920 - RNA, 32 nt, Homo Sapiens
agucaggugggucaccugaggucagcaguuug

SEQ ID NO: 27921 - RNA, 32 nt, Homo Sapiens
cacuguuuuuauuccuuccaucuagcagcugg

SEQ ID NO: 27922 - RNA, 32 nt, Homo Sapiens
uacuuaggaccuaaauuuaucuaugucuguca

SEQ ID NO: 27923 - RNA, 32 nt, Homo Sapiens
ucccuuuuccuuucuggccccagccuaggugg

SEQ ID NO: 27924 - RNA, 32 nt, Homo Sapiens
gaggcaagaugcauucaauuugaaagauauuu

SEQ ID NO: 27925 - RNA, 32 nt, Homo Sapiens
ccuggacacggaggcacagggugcugguguga

SEQ ID NO: 27926 - RNA, 32 nt, Homo Sapiens
aguguccagauccccagagccacacauacaua

SEQ ID NO: 27927 - RNA, 32 nt, Homo Sapiens
cgggcuacccucgggcuuccccugccgcccau

SEQ ID NO: 27928 - RNA, 32 nt, Homo Sapiens
uggagagaagcuguaguuuuuaccaaauugug

SEQ ID NO: 27929 - RNA, 32 nt, Homo Sapiens
ggcacgaggaaagaaacaacaacuggaaaaga

SEQ ID NO: 27930 - RNA, 32 nt, Homo Sapiens
acccagccugcaucucccaggaggaaguggag

SEQ ID NO: 27931 - RNA, 32 nt, Homo Sapiens
uucugcagaggccugagcaggaggaagaggag

SEQ ID NO: 27932 - RNA, 32 nt, Homo Sapiens
auucauuuuuaaaauucauucaaggauuuauu

SEQ ID NO: 27933 - RNA, 32 nt, Homo Sapiens
caagcacgcacgugcgcacacacacacacgca

SEQ ID NO: 27934 - RNA, 32 nt, Homo Sapiens
ugaagaaagcuacuaacuuagcuguauucuca

SEQ ID NO: 27935 - RNA, 32 nt, Homo Sapiens
gcacaggagcccauccuuggcucuaggauucc

SEQ ID NO: 27936 - RNA, 32 nt, Homo Sapiens
cucaccaucccauuaaagaccuggcugguuag

SEQ ID NO: 27937 - RNA, 32 nt, Homo Sapiens
cucagcugguaguuugaccuccguuggugcaa

SEQ ID NO: 27938 - RNA, 32 nt, Homo Sapiens
ggaaagugagguuuuuuuuuuauauacauaua

SEQ ID NO: 27939 - RNA, 32 nt, Homo Sapiens
uuucucuguguguuccaaauaaucuuaagcug

SEQ ID NO: 27940 - RNA, 32 nt, Homo Sapiens
gagauagacgaaggucaagugacagaucacga

SEQ ID NO: 27941 - RNA, 32 nt, Homo Sapiens
gcccgcgcagccccggccggagcccaccaugc

SEQ ID NO: 27942 - RNA, 32 nt, Homo Sapiens
aaggagccaugccagcuggacacacacuucuu

SEQ ID NO: 27943 - RNA, 32 nt, Homo Sapiens
ccugacccagcuggccucggcccggggcaccu

SEQ ID NO: 27944 - RNA, 32 nt, Homo Sapiens
ccuggcaccgagggugcccacccucucccugg

SEQ ID NO: 27945 - RNA, 32 nt, Homo Sapiens
gccccaaaauaaaaacagaaauuaugagauug

SEQ ID NO: 27946 - RNA, 32 nt, Homo Sapiens
ccggacgcagcccggcuccuccccuccuccgc

SEQ ID NO: 27947 - RNA, 32 nt, Homo Sapiens
ucaucuggguggcaugugacaggccugacucu

SEQ ID NO: 27948 - RNA, 32 nt, Homo Sapiens
cauaguuuguggaaacaaagaucuugaggaag

SEQ ID NO: 27949 - RNA, 32 nt, Homo Sapiens
gggacccagccauugggagccagagccaccau

SEQ ID NO: 27950 - RNA, 32 nt, Homo Sapiens
ucagggggauauaaaaauaacauucacacugg

SEQ ID NO: 27951 - RNA, 32 nt, Homo Sapiens
uucauugucuguccccaccccaucccagguca

SEQ ID NO: 27952 - RNA, 32 nt, Homo Sapiens
aaggcuauuucuggauguuggauuaucugauu

SEQ ID NO: 27953 - RNA, 32 nt, Homo Sapiens
gauaugaaauauauuuuacuuuuuuauaucuu

SEQ ID NO: 27954 - RNA, 32 nt, Homo Sapiens
uuuuccauauuuuugaaagauuuuucagaugu

SEQ ID NO: 27955 - RNA, 32 nt, Homo Sapiens
cugcacuuauuguaggaaauuuuaauauauuu

SEQ ID NO: 27956 - RNA, 32 nt, Homo Sapiens
uuuauguucuuacuuuguuuacuuauaaaaua

SEQ ID NO: 27957 - RNA, 32 nt, Homo Sapiens
accugcaggguguucacuuuguggcuccuucc

SEQ ID NO: 27958 - RNA, 32 nt, Homo Sapiens
cagauuagaaaacguacacaaguguuugcuuc

SEQ ID NO: 27959 - RNA, 32 nt, Homo Sapiens
ccuggaagaccccucagccuucuguuugcaga

SEQ ID NO: 27960 - RNA, 32 nt, Homo Sapiens
gcgcaggcugggcucccggacccggcggaccg

SEQ ID NO: 27961 - RNA, 32 nt, Homo Sapiens
gcuguuaaauuaauauuccuguuaaaggaaau

SEQ ID NO: 27962 - RNA, 32 nt, Homo Sapiens
cucugggagagaggagugucagacagcuguug

SEQ ID NO: 27963 - RNA, 32 nt, Homo Sapiens
gccuugucucagggagcgcccgccgagugcug

SEQ ID NO: 27964 - RNA, 32 nt, Homo Sapiens
cguccggccgcggcgcuggcuuaagccauggc

SEQ ID NO: 27965 - RNA, 32 nt, Homo Sapiens
ggggugcgggggugugcggugcccuaggacac

SEQ ID NO: 27966 - RNA, 32 nt, Homo Sapiens
caccuucuguccuuguccuggaccucagguuc

SEQ ID NO: 27967 - RNA, 32 nt, Homo Sapiens
agucauaaaauauuuugaaauuuagagaggaa

SEQ ID NO: 27968 - RNA, 32 nt, Homo Sapiens
gaugauuuuaagacaaaacaaacaaacaaaaa

SEQ ID NO: 27969 - RNA, 32 nt, Homo Sapiens
cgggggcugagucucuuccucaaccucccacc

SEQ ID NO: 27970 - RNA, 31 nt, Homo Sapiens
cagugucuacauugccaaccacaggccucuc

SEQ ID NO: 27971 - RNA, 32 nt, Homo Sapiens
uucuuuucucaguuuuauaaacacagaauaua

SEQ ID NO: 27972 - RNA, 32 nt, Homo Sapiens
uacuggauccagaacacaauuuuccccucaga

SEQ ID NO: 27973 - RNA, 32 nt, Homo Sapiens
ccgcccucgcccucacugcugacuccucuucc

SEQ ID NO: 27974 - RNA, 32 nt, Homo Sapiens
ucucucuuuuugaagaaaaaugcuaagggcag

SEQ ID NO: 27975 - RNA, 32 nt, Homo Sapiens
uauucuuuuaauguggaaauaaaacuuuguaa

SEQ ID NO: 27976 - RNA, 32 nt, Homo Sapiens
cugagggcgggggucuccacgguggucccagc

SEQ ID NO: 27977 - RNA, 32 nt, Homo Sapiens
uuaauuagaaaagaauuguuguugggcugggc

SEQ ID NO: 27978 - RNA, 32 nt, Homo Sapiens
uuuaugaggauuuaucaacagaguuauuuaag

SEQ ID NO: 27979 - RNA, 32 nt, Homo Sapiens
cagaagggaaagggcuuuauaaaccauaaagc

SEQ ID NO: 27980 - RNA, 32 nt, Homo Sapiens
agaaagaaaaagaaaugcugcauuuucaguuc

SEQ ID NO: 27981 - RNA, 32 nt, Homo Sapiens
uuccuugguauuuggcacccaagccccccauc

SEQ ID NO: 27982 - RNA, 32 nt, Homo Sapiens
acacacugcccgagggugccacggccaacggc

SEQ ID NO: 27983 - RNA, 32 nt, Homo Sapiens
gcugcugcaaaaaauaucauacggguugagcc

SEQ ID NO: 27984 - RNA, 32 nt, Homo Sapiens
cucugucuggagccccauccuguguuaucugu

SEQ ID NO: 27985 - RNA, 32 nt, Homo Sapiens
gcccugggggccugggcucugcugcccuggac

SEQ ID NO: 27986 - RNA, 32 nt, Homo Sapiens
ccgagccgccccacccacuccaucaucuccag

SEQ ID NO: 27987 - RNA, 32 nt, Homo Sapiens
gggucugcgcaccuucccggcccagccggcga

SEQ ID NO: 27988 - RNA, 32 nt, Homo Sapiens
ugacccuugaaccaauaaaggaacaaaugacu

SEQ ID NO: 27989 - RNA, 32 nt, Homo Sapiens
agagauuuucuuuggucauccauaauagagau

SEQ ID NO: 27990 - RNA, 32 nt, Homo Sapiens
cccuaagccugacuauuagcaauacgcauauc

SEQ ID NO: 27991 - RNA, 32 nt, Homo Sapiens
auucacuuucuuuaaaaaauccaaguaaaagu

SEQ ID NO: 27992 - RNA, 32 nt, Homo Sapiens
aagacaccagugccucagaaacugcucgguca

SEQ ID NO: 27993 - RNA, 32 nt, Homo Sapiens
ucuuuugucuucauuucaccucuguguuuaaa

SEQ ID NO: 27994 - RNA, 32 nt, Homo Sapiens
caucgcauguccuacaaucugcucuuagacac

SEQ ID NO: 27995 - RNA, 32 nt, Homo Sapiens
auaguauuaaggagaagaaaacauuuuuguca

SEQ ID NO: 27996 - RNA, 32 nt, Homo Sapiens
ucguaggguuaaacuuuuuugugugugauuua

SEQ ID NO: 27997 - RNA, 32 nt, Homo Sapiens
agcggcagcugagacucacggucaagcuacgg

SEQ ID NO: 27998 - RNA, 32 nt, Homo Sapiens
agugagacaccgucuuuacaaaaacuuuaagu

SEQ ID NO: 27999 - RNA, 32 nt, Homo Sapiens
cugacauaguggauugagccaaggcugugcug

SEQ ID NO: 28000 - RNA, 32 nt, Homo Sapiens
guuacugaauugaaugaagacaucucaguaca

SEQ ID NO: 28001 - RNA, 32 nt, Homo Sapiens
gacgaucgcugacagcuuccccugcccuuccc

SEQ ID NO: 28002 - RNA, 32 nt, Homo Sapiens
agcccuuccguaucuuuccccuccaucgcggc

SEQ ID NO: 28003 - RNA, 32 nt, Homo Sapiens
acauguuuuuugcugacuuucuccuuauuauu

SEQ ID NO: 28004 - RNA, 32 nt, Homo Sapiens
acagaggagcuguggguguuuccuccucugau

SEQ ID NO: 28005 - RNA, 32 nt, Homo Sapiens
cacccucucgcuccuuccugugugagggccgc

SEQ ID NO: 28006 - RNA, 32 nt, Homo Sapiens
agcugggcagccuggggucguggcggacugcc

SEQ ID NO: 28007 - RNA, 32 nt, Homo Sapiens
gccuggguccccucgucccauccagcuaccac

SEQ ID NO: 28008 - RNA, 32 nt, Homo Sapiens
guagcuuccuccucuggugguguuaaucauuu

SEQ ID NO: 28009 - RNA, 32 nt, Homo Sapiens
cuagagucaggagcagggacuuugacucuuag

SEQ ID NO: 28010 - RNA, 32 nt, Homo Sapiens
guauuauuaggcauggucaaccccaccguguu

SEQ ID NO: 28011 - RNA, 32 nt, Homo Sapiens
gccccaacccccagcccucacccccuagcccc

SEQ ID NO: 28012 - RNA, 32 nt, Homo Sapiens
caggaggaagaccacggaaaagagagaugacc

SEQ ID NO: 28013 - RNA, 32 nt, Homo Sapiens
cacagagaugagaauagaucauguggaacaua

SEQ ID NO: 28014 - RNA, 32 nt, Homo Sapiens
ggaguggugcuuuuaaacuuugaugagcagcu

SEQ ID NO: 28015 - RNA, 32 nt, Homo Sapiens
gcugucuccugccugccccugggaacugaaug

SEQ ID NO: 28016 - RNA, 32 nt, Homo Sapiens
ugcaggaguacgggcugcugcagaggcggcug

SEQ ID NO: 28017 - RNA, 32 nt, Homo Sapiens
gucccgcugucaaccaaacuugaauuuucuua

SEQ ID NO: 28018 - RNA, 32 nt, Homo Sapiens
uuagaagucaccaccgacccagccccucaaca

SEQ ID NO: 28019 - RNA, 32 nt, Homo Sapiens
uggccauaacaggguccauacacaucuucugg

SEQ ID NO: 28020 - RNA, 32 nt, Homo Sapiens
agagagucggagcuccaaccacaucugccugc

SEQ ID NO: 28021 - RNA, 32 nt, Homo Sapiens
agcauuuaccuucucuuaagaauaccagcuuu

SEQ ID NO: 28022 - RNA, 32 nt, Homo Sapiens
gguuauguaaaaauauagucuggcuuuagaau

SEQ ID NO: 28023 - RNA, 32 nt, Homo Sapiens
cgacgccgccuggcaggcccugcgcaccagga

SEQ ID NO: 28024 - RNA, 32 nt, Homo Sapiens
gcgcauucugggaauaugugucugacacaggg

SEQ ID NO: 28025 - RNA, 32 nt, Homo Sapiens
uggugggacuuccauaaauauguguugaaugg

SEQ ID NO: 28026 - RNA, 32 nt, Homo Sapiens
acuaagaguccauuggggugguuugcauugua

SEQ ID NO: 28027 - RNA, 32 nt, Homo Sapiens
aagcgauucuccugccucagucucucuaguag

SEQ ID NO: 28028 - RNA, 32 nt, Homo Sapiens
uccaugucccuacaaagaacaugaacucauca

SEQ ID NO: 28029 - RNA, 32 nt, Homo Sapiens
auccagccccuugcccucuccucacacguaga

SEQ ID NO: 28030 - RNA, 32 nt, Homo Sapiens
ccacacacccgauggccggcccgggguggacg

SEQ ID NO: 28031 - RNA, 32 nt, Homo Sapiens
gaucccagcuccggguuuaagaguccuggccc

SEQ ID NO: 28032 - RNA, 32 nt, Homo Sapiens
cucagggccaagggcuccugucuguccuuugc

SEQ ID NO: 28033 - RNA, 32 nt, Homo Sapiens
ccaggcacagacccugcugugcucuuuggcuc

SEQ ID NO: 28034 - RNA, 32 nt, Homo Sapiens
ucggauguggagaggagaauggaaaucgcaga

SEQ ID NO: 28035 - RNA, 32 nt, Homo Sapiens
uaaauugaucuguuauuuuccaaacuauucuc

SEQ ID NO: 28036 - RNA, 32 nt, Homo Sapiens
aagucacugaagaugucauuuaucuucauuca

SEQ ID NO: 28037 - RNA, 32 nt, Homo Sapiens
ugcccugccuucuucaaagguugugguugcua

SEQ ID NO: 28038 - RNA, 32 nt, Homo Sapiens
uuggcagcccccuguaguugacagguaagcug

SEQ ID NO: 28039 - RNA, 32 nt, Homo Sapiens
guucuagagugcugccagguugccagauuucu

SEQ ID NO: 28040 - RNA, 32 nt, Homo Sapiens
ccggcccgcucccggaagcugcagcagcuggu

SEQ ID NO: 28041 - RNA, 32 nt, Homo Sapiens
gaaaaggaagaaagccacaggacugcccauuc

SEQ ID NO: 28042 - RNA, 29 nt, Homo Sapiens
uuccauaugccuauguaccauaugacaga

SEQ ID NO: 28043 - RNA, 30 nt, Homo Sapiens
caaggagaggggaccaugcaaaggauaaac

SEQ ID NO: 28044 - RNA, 32 nt, Homo Sapiens
caccaagugucugcaaguaacaccuggaggug

SEQ ID NO: 28045 - RNA, 32 nt, Homo Sapiens
aauuguuggggaaauggaugacagcugaagcu

SEQ ID NO: 28046 - RNA, 32 nt, Homo Sapiens
ucccuucauuguaucuggguuuuucuaucuca

SEQ ID NO: 28047 - RNA, 32 nt, Homo Sapiens
ugugaaagggaaguauugagugaggacauucc

SEQ ID NO: 28048 - RNA, 32 nt, Homo Sapiens
gaggcgccgccgaugguccccggagcuccugc

SEQ ID NO: 28049 - RNA, 32 nt, Homo Sapiens
cagcuuugagguuuuuuuuuuaauuaagcaaa

SEQ ID NO: 28050 - RNA, 32 nt, Homo Sapiens
caguuuccauagcaacccauguuuccugggaa

SEQ ID NO: 28051 - RNA, 31 nt, Homo Sapiens
cucuggcucaggggaaaguccuguucauauu

SEQ ID NO: 28052 - RNA, 32 nt, Homo Sapiens
cuguagcagugugccuccauggccuagggcgg

SEQ ID NO: 28053 - RNA, 32 nt, Homo Sapiens
uguacggcuguuuggguccccgaucacucuca

SEQ ID NO: 28054 - RNA, 32 nt, Homo Sapiens
cuuuagucacaaaaauuaaaauuaaacuuuau

SEQ ID NO: 28055 - RNA, 32 nt, Homo Sapiens
uguuuucuuuuggaacuacaauuagaauaguu

SEQ ID NO: 28056 - RNA, 32 nt, Homo Sapiens
ugauagugcgggaacauggccuugcagcuggg

SEQ ID NO: 28057 - RNA, 32 nt, Homo Sapiens
caggcacugggcuguguccugauuccucagag

SEQ ID NO: 28058 - RNA, 32 nt, Homo Sapiens
acuuccauuaaugugaucuacagcuuuuaaaa

SEQ ID NO: 28059 - RNA, 32 nt, Homo Sapiens
uuccggcgcgggaggagaauguggccgccuug

SEQ ID NO: 28060 - RNA, 32 nt, Homo Sapiens
ccugcuccgagcuccccugcagauggaggagg

SEQ ID NO: 28061 - RNA, 32 nt, Homo Sapiens
ccuagcagucuuucuucagcucacuuggcucu

SEQ ID NO: 28062 - RNA, 32 nt, Homo Sapiens
cagggccucacagggaggcauucauggagcug

SEQ ID NO: 28063 - RNA, 32 nt, Homo Sapiens
cggcccccucggcuuugccagcgccgccugcg

SEQ ID NO: 28064 - RNA, 32 nt, Homo Sapiens
ugcuuggaguauuuaggaugacugcugugaaa

SEQ ID NO: 28065 - RNA, 32 nt, Homo Sapiens
cucauuuuggacuugauaaauaaacuuucauu

SEQ ID NO: 28066 - RNA, 32 nt, Homo Sapiens
gaaacuucugguuuuuguuaguaucauaauga

SEQ ID NO: 28067 - RNA, 32 nt, Homo Sapiens
gauuugggaguugaguuccuggauaggcauac

SEQ ID NO: 28068 - RNA, 32 nt, Homo Sapiens
auuauguuugaaagugaccuagcugaugaaga

SEQ ID NO: 28069 - RNA, 32 nt, Homo Sapiens
cuuaugucgucagucuggggaacucuccaugu

SEQ ID NO: 28070 - RNA, 32 nt, Homo Sapiens
ccagggccucgcagcccucuccgagcagggcu

SEQ ID NO: 28071 - RNA, 32 nt, Homo Sapiens
agagacaccucaaauucaaaauguccagaaau

SEQ ID NO: 28072 - RNA, 32 nt, Homo Sapiens
gccuuccauacuguuugcccauuuucauucuu

SEQ ID NO: 28073 - RNA, 32 nt, Homo Sapiens
uuuggacccgauugauuuuucagacacacgga

SEQ ID NO: 28074 - RNA, 32 nt, Homo Sapiens
cauuuacacaccagacacacaaacacacacac

SEQ ID NO: 28075 - RNA, 32 nt, Homo Sapiens
gggugggaacgaauuaaaauaugauagagaac

SEQ ID NO: 28076 - RNA, 30 nt, Homo Sapiens
cuccuccugcagcagcaccagcgaccgccg

SEQ ID NO: 28077 - RNA, 32 nt, Homo Sapiens
guguugggaggcguccuggggagggugaggau

SEQ ID NO: 28078 - RNA, 32 nt, Homo Sapiens
guaccacaggacuugacugaguguggcaggcc

SEQ ID NO: 28079 - RNA, 32 nt, Homo Sapiens
uucggcugcuggaugccuggacccuagaguga

SEQ ID NO: 28080 - RNA, 32 nt, Homo Sapiens
agucuguuuacuaugaaacaagagucauuuuu

SEQ ID NO: 28081 - RNA, 32 nt, Homo Sapiens
ccagauuuuaucacagugccauuugaagggaa

SEQ ID NO: 28082 - RNA, 32 nt, Homo Sapiens
ugacuuccuuggcgguuuugguacguucauug

SEQ ID NO: 28083 - RNA, 32 nt, Homo Sapiens
uuggcgccuccuaccuccuccucggauuggcu

SEQ ID NO: 28084 - RNA, 32 nt, Homo Sapiens
agacgccgcuccccggucccggaacccucccu

SEQ ID NO: 28085 - RNA, 32 nt, Homo Sapiens
caccuugcugucugucucauugucuuucucuc

SEQ ID NO: 28086 - RNA, 32 nt, Homo Sapiens
gcguccuggagcccuccucagugcugaagcug

SEQ ID NO: 28087 - RNA, 32 nt, Homo Sapiens
agccgagaacagggagauaaacaucaucaucu

SEQ ID NO: 28088 - RNA, 32 nt, Homo Sapiens
agcuuauguccuccccacaacuuccagcuuuc

SEQ ID NO: 28089 - RNA, 32 nt, Homo Sapiens
ugcugugaaacacuugacagcagagcuuucca

SEQ ID NO: 28090 - RNA, 32 nt, Homo Sapiens
ugcuagauaaacuuuucuuuuaucuucccuuu

SEQ ID NO: 28091 - RNA, 32 nt, Homo Sapiens
ggaccggaguggggagcgcggcguggaggugc

SEQ ID NO: 28092 - RNA, 32 nt, Homo Sapiens
cauuccuccagcccuagacucccaagccccag

SEQ ID NO: 28093 - RNA, 32 nt, Homo Sapiens
aguuggugguggcuuaaguuuugaagggaggu

SEQ ID NO: 28094 - RNA, 32 nt, Homo Sapiens
gccuaaaucuucggguccuccuccuuggagag

SEQ ID NO: 28095 - RNA, 32 nt, Homo Sapiens
gcgccggacccggcugcgcgcggaccguuagc

SEQ ID NO: 28096 - RNA, 32 nt, Homo Sapiens
ccauaaugaaaauaauucaugaccaauauuac

SEQ ID NO: 28097 - RNA, 32 nt, Homo Sapiens
cucccgagccggggagcggcggcggccgggaa

SEQ ID NO: 28098 - RNA, 32 nt, Homo Sapiens
gcuucuucacuuucuuuuccauccacugccgg

SEQ ID NO: 28099 - RNA, 32 nt, Homo Sapiens
ccgaggcagcagagacuaugauagaggcuaug

SEQ ID NO: 28100 - RNA, 32 nt, Homo Sapiens
gcugacggcggcggggggagcgcgccaugccc

SEQ ID NO: 28101 - RNA, 32 nt, Homo Sapiens
gaucauguuguuaaauuguaaauuuucaaaau

SEQ ID NO: 28102 - RNA, 32 nt, Homo Sapiens
uccgagcccguccaaaacccccagcuacugca

SEQ ID NO: 28103 - RNA, 32 nt, Homo Sapiens
uuguguacauauauauugcuuuucuuugcagc

SEQ ID NO: 28104 - RNA, 32 nt, Homo Sapiens
ccuucggugggggccucuggcucagauuuggg

SEQ ID NO: 28105 - RNA, 32 nt, Homo Sapiens
cggaaucuuuucugaaggcuacauggacccgc

SEQ ID NO: 28106 - RNA, 32 nt, Homo Sapiens
acugugcuucuuccaacuuucauuccacuugg

SEQ ID NO: 28107 - RNA, 32 nt, Homo Sapiens
gugcugauggagggcgggagauggagcugacc

SEQ ID NO: 28108 - RNA, 32 nt, Homo Sapiens
ugagcccugccauucugcaugagcugaucagc

SEQ ID NO: 28109 - RNA, 32 nt, Homo Sapiens
auuaaaaaaaauuuuuaaaagaccaggaccuc

SEQ ID NO: 28110 - RNA, 32 nt, Homo Sapiens
ugaccucauuuagucuuaauuacuuccuuccu

SEQ ID NO: 28111 - RNA, 32 nt, Homo Sapiens
cauuguacaucugauucuuuuauauuccauug

SEQ ID NO: 28112 - RNA, 32 nt, Homo Sapiens
ggcaguucagaggggccaggaugguggacaua

SEQ ID NO: 28113 - RNA, 28 nt, Homo Sapiens
agauggggaggcuuuccgaggugaagaa

SEQ ID NO: 28114 - RNA, 32 nt, Homo Sapiens
guuugugugaaugugaaugauacugaucuuau

SEQ ID NO: 28115 - RNA, 32 nt, Homo Sapiens
cgcacauauacacacacacacacacacacaca

SEQ ID NO: 28116 - RNA, 32 nt, Homo Sapiens
agaaacaagaaagaaauugacccugaugaaga

SEQ ID NO: 28117 - RNA, 32 nt, Homo Sapiens
ucucauccccccacccgacuucuuuugaaaug

SEQ ID NO: 28118 - RNA, 32 nt, Homo Sapiens
auguuuuuucuuuuauuuaaaucaugauggcc

SEQ ID NO: 28119 - RNA, 32 nt, Homo Sapiens
ccagccuggcugaagcggggccccccacggac

SEQ ID NO: 28120 - RNA, 32 nt, Homo Sapiens
cuuuuaaaacucccaccagcuuuuaacaggua

SEQ ID NO: 28121 - RNA, 32 nt, Homo Sapiens
gagccuccugcggcgccgcgggcuccagaagg

SEQ ID NO: 28122 - RNA, 32 nt, Homo Sapiens
uuugucaucuucuaccucugccauuuuccugc

SEQ ID NO: 28123 - RNA, 32 nt, Homo Sapiens
acuuagcugugggcuccucagcuacugacuuc

SEQ ID NO: 28124 - RNA, 32 nt, Homo Sapiens
uugaggucaggaguucaagaccaaucuggcca

SEQ ID NO: 28125 - RNA, 32 nt, Homo Sapiens
ggacaggccaagggguuugccugggcccugug

SEQ ID NO: 28126 - RNA, 32 nt, Homo Sapiens
guuccgcguccuggccccgccccucccggcag

SEQ ID NO: 28127 - RNA, 32 nt, Homo Sapiens
cugcuaaaaauauuuguaauccuuaauaauua

SEQ ID NO: 28128 - RNA, 32 nt, Homo Sapiens
caacuuugccagccuuaauaagaagcaugcua

SEQ ID NO: 28129 - RNA, 32 nt, Homo Sapiens
ccgacaccaucccaccccuaugccauccaaca

SEQ ID NO: 28130 - RNA, 32 nt, Homo Sapiens
caucugugcacugcccauggacaggcuggcuc

SEQ ID NO: 28131 - RNA, 32 nt, Homo Sapiens
gcuuauugauucagaaucugcauuuuaacaag

SEQ ID NO: 28132 - RNA, 32 nt, Homo Sapiens
cuuuuucacuuuaaaacaaaccucaagaauaa

SEQ ID NO: 28133 - RNA, 32 nt, Homo Sapiens
uaagaggccuuguguagaaguacaccagcauc

SEQ ID NO: 28134 - RNA, 32 nt, Homo Sapiens
ggccgcaagaggaggaggggagagcccguccg

SEQ ID NO: 28135 - RNA, 32 nt, Homo Sapiens
ccgaggaugauacauuuuaauauuguauuauu

SEQ ID NO: 28136 - RNA, 32 nt, Homo Sapiens
ucauuucuguguacauuugcaagaugugugua

SEQ ID NO: 28137 - RNA, 32 nt, Homo Sapiens
gcccacccggcccgucgugaccucugaucugu

SEQ ID NO: 28138 - RNA, 32 nt, Homo Sapiens
guugcagaagcagugaagccacuaacaugcug

SEQ ID NO: 28139 - RNA, 32 nt, Homo Sapiens
gugggcuacauauauagauguuuucaugaaga

SEQ ID NO: 28140 - RNA, 32 nt, Homo Sapiens
ggggaugugcuaaagcgugaaaucaguugucc

SEQ ID NO: 28141 - RNA, 32 nt, Homo Sapiens
agccuuuaucccagcacucaguuguuuuggau

SEQ ID NO: 28142 - RNA, 32 nt, Homo Sapiens
augaagaaaauagaaaugucaguagaacucau

SEQ ID NO: 28143 - RNA, 32 nt, Homo Sapiens
cuuuggugacauuguucuucuguguucccuuu

SEQ ID NO: 28144 - RNA, 32 nt, Homo Sapiens
aaaugcuuuccucuucuuguccugcuugagua

SEQ ID NO: 28145 - RNA, 32 nt, Homo Sapiens
uucugggauaugcacagggucugcgcccugcg

SEQ ID NO: 28146 - RNA, 32 nt, Homo Sapiens
ggaguccuggggccagcuggccucgauguacg

SEQ ID NO: 28147 - RNA, 32 nt, Homo Sapiens
gauugauuuuaaaauguacauguauuaaauua

SEQ ID NO: 28148 - RNA, 32 nt, Homo Sapiens
cuacacuccucgcgcgugcgccucccacaguc

SEQ ID NO: 28149 - RNA, 32 nt, Homo Sapiens
caagcaagacugggagaaccagcaggugaauc

SEQ ID NO: 28150 - RNA, 32 nt, Homo Sapiens
uaucaguuuguccuguagagguuuuguuguuu

SEQ ID NO: 28151 - RNA, 32 nt, Homo Sapiens
gaguuggcugcauuuucuuaucugaucacaau

SEQ ID NO: 28152 - RNA, 32 nt, Homo Sapiens
gccuccccccacugccuaaugugggaacccaa

SEQ ID NO: 28153 - RNA, 32 nt, Homo Sapiens
cuccuucagucuccagcuuccauccuccaguu

SEQ ID NO: 28154 - RNA, 32 nt, Homo Sapiens
aggccccugucuuguucauguagccgaggggc

SEQ ID NO: 28155 - RNA, 32 nt, Homo Sapiens
uggcuuccgucuccuccaguggagggagaggu

SEQ ID NO: 28156 - RNA, 31 nt, Homo Sapiens
ccgcguaagugccgccugcccugcguggguc

SEQ ID NO: 28157 - RNA, 32 nt, Homo Sapiens
agcuaauuuuuggugaagaaauggauucgguu

SEQ ID NO: 28158 - RNA, 32 nt, Homo Sapiens
uagaaaaaaacaaacaaacaaacagacauuug

SEQ ID NO: 28159 - RNA, 32 nt, Homo Sapiens
cuuaaagaauccaaggagacagauguuguauc

SEQ ID NO: 28160 - RNA, 32 nt, Homo Sapiens
auagaaaaugagcaaguuuauaccauaauuuu

SEQ ID NO: 28161 - RNA, 32 nt, Homo Sapiens
auaucuauuacguaucucauacauauuucugu

SEQ ID NO: 28162 - RNA, 32 nt, Homo Sapiens
aaccuuuggugccuuuucucucuucuuuaccu

SEQ ID NO: 28163 - RNA, 32 nt, Homo Sapiens
cugcaucuagguuuuaaaucaugugaacagau

SEQ ID NO: 28164 - RNA, 30 nt, Homo Sapiens
aguuuuguauaaauaaaguuucuuugucuc

SEQ ID NO: 28165 - RNA, 32 nt, Homo Sapiens
uuccacccuaaaacuagagugaucuuccuaaa

SEQ ID NO: 28166 - RNA, 32 nt, Homo Sapiens
gucuguaaauauauuuuaaaguuauauaauaa

SEQ ID NO: 28167 - RNA, 32 nt, Homo Sapiens
aaaaucauaaaccauggcuacucuugggaacc

SEQ ID NO: 28168 - RNA, 32 nt, Homo Sapiens
uuacaggugugagccaccgcgcccagcccguu

SEQ ID NO: 28169 - RNA, 32 nt, Homo Sapiens
cucucauuccaagggcaggaagaugugacuca

SEQ ID NO: 28170 - RNA, 32 nt, Homo Sapiens
aacccagacaaagaucauuccacucagccugg

SEQ ID NO: 28171 - RNA, 32 nt, Homo Sapiens
ugucuugguuuugguuucuucaucucuaagua

SEQ ID NO: 28172 - RNA, 32 nt, Homo Sapiens
gaagauaucugagaaaacuuuuaugaaauguc

SEQ ID NO: 28173 - RNA, 32 nt, Homo Sapiens
ccuggggggcccagcccucucccagccuugcc

SEQ ID NO: 28174 - RNA, 32 nt, Homo Sapiens
guuugggucaacuguauuguaauagcauuuua

SEQ ID NO: 28175 - RNA, 32 nt, Homo Sapiens
cccugccccguccacuuucccaucuccucggu

SEQ ID NO: 28176 - RNA, 32 nt, Homo Sapiens
ccuuccccggcgggggauggugcggugaccgg

SEQ ID NO: 28177 - RNA, 32 nt, Homo Sapiens
acuuuccuccaagugaggcccuuagcccugga

SEQ ID NO: 28178 - RNA, 32 nt, Homo Sapiens
accgcgcagcgcgggaggcagguuccgcacga

SEQ ID NO: 28179 - RNA, 32 nt, Homo Sapiens
ucucaggugaccggcacaggcggccgcggggu

SEQ ID NO: 28180 - RNA, 32 nt, Homo Sapiens
aaaaauaaaaauuaggcauauuaaaaaaaaaa

SEQ ID NO: 28181 - RNA, 32 nt, Homo Sapiens
uugaaaaacuaaaauuucagauuucugaggau

SEQ ID NO: 28182 - RNA, 32 nt, Homo Sapiens
ugaauauauuccauuuuaguuaaagaacaaau

SEQ ID NO: 28183 - RNA, 28 nt, Homo Sapiens
gccgcuuguggcuucaggaugaaaggug

SEQ ID NO: 28184 - RNA, 32 nt, Homo Sapiens
cccgagacccggcgcaagagagcgcagccuua

SEQ ID NO: 28185 - RNA, 32 nt, Homo Sapiens
uuccccagccccaccuuccccuccugaugccc

SEQ ID NO: 28186 - RNA, 32 nt, Homo Sapiens
ggugggaggcggaggaggagccgagaucgugc

SEQ ID NO: 28187 - RNA, 32 nt, Homo Sapiens
gaaagaaacuucccccugaggacugacucuuc

SEQ ID NO: 28188 - RNA, 32 nt, Homo Sapiens
auugguugauugguggggagggguggggggcc

SEQ ID NO: 28189 - RNA, 32 nt, Homo Sapiens
ccaguguccauauauccaaccccuaaucuggc

SEQ ID NO: 28190 - RNA, 32 nt, Homo Sapiens
uagcagguggcugcagccauggagaggcucug

SEQ ID NO: 28191 - RNA, 32 nt, Homo Sapiens
agugccaacgaggaccaggagauggaacuaga

SEQ ID NO: 28192 - RNA, 32 nt, Homo Sapiens
cuuguaaauauuaaaacgacuccccaauuauu

SEQ ID NO: 28193 - RNA, 32 nt, Homo Sapiens
gccuguaccugcaggcagguagaguaucaucc

SEQ ID NO: 28194 - RNA, 32 nt, Homo Sapiens
uucagaaacagagucuuauacugguguguucu

SEQ ID NO: 28195 - RNA, 32 nt, Homo Sapiens
gaccacgggagugagagcugguguggcgaggc

SEQ ID NO: 28196 - RNA, 32 nt, Homo Sapiens
cuugccugcuccaaggcacaggauacaguggg

SEQ ID NO: 28197 - RNA, 32 nt, Homo Sapiens
cgccuguaaucccagcacuuugggaggcugag

SEQ ID NO: 28198 - RNA, 32 nt, Homo Sapiens
caccuguaaucucagcacuuugggaaguugag

SEQ ID NO: 28199 - RNA, 32 nt, Homo Sapiens
cgccuguaauccuagcacuuugggaggccgag

SEQ ID NO: 28200 - RNA, 32 nt, Homo Sapiens
cagaacuugggguggcaacggguccugggaua

SEQ ID NO: 28201 - RNA, 32 nt, Homo Sapiens
gguugacaugcgucuguaacaucuuucuuacc

SEQ ID NO: 28202 - RNA, 32 nt, Homo Sapiens
auccccgaugccuggcagggccaggcagagag

SEQ ID NO: 28203 - RNA, 32 nt, Homo Sapiens
auauuuuauucaaaaaacagucuaauaucuua

SEQ ID NO: 28204 - RNA, 32 nt, Homo Sapiens
ccccgccagcccgggucuccgcgcucggagca

SEQ ID NO: 28205 - RNA, 32 nt, Homo Sapiens
gacaagaaacacagaugggcaauauaacacga

SEQ ID NO: 28206 - RNA, 32 nt, Homo Sapiens
cuuucuuaaaagacguuaaaauuuuaggacag

SEQ ID NO: 28207 - RNA, 32 nt, Homo Sapiens
acugagaggcucagaaucuuuaccaaggauau

SEQ ID NO: 28208 - RNA, 32 nt, Homo Sapiens
uccgugaaaccagccucagaucagggcccugc

SEQ ID NO: 28209 - RNA, 32 nt, Homo Sapiens
uuacaagugugagccaccgcgcccggcccagu

SEQ ID NO: 28210 - RNA, 32 nt, Homo Sapiens
uaauauaaacuuauuuacuuuccuuuuuauga

SEQ ID NO: 28211 - RNA, 32 nt, Homo Sapiens
cacuagaugaauggaagacaaugauuugaacu

SEQ ID NO: 28212 - RNA, 32 nt, Homo Sapiens
ugcaggcucuccccagggggccccaggcucgc

SEQ ID NO: 28213 - RNA, 32 nt, Homo Sapiens
cgccagaguucacaggaucuucaucauggaaa

SEQ ID NO: 28214 - RNA, 32 nt, Homo Sapiens
gucacaaauaaucauuaauuagcuauuuucag

SEQ ID NO: 28215 - RNA, 32 nt, Homo Sapiens
aagagaaaaugguggaauuuuuauugaaaaac

SEQ ID NO: 28216 - RNA, 32 nt, Homo Sapiens
ugauuuauaucuaauauagauacaaagucugu

SEQ ID NO: 28217 - RNA, 32 nt, Homo Sapiens
ggaccgcggcugagcuuuuuccgggacccgug

SEQ ID NO: 28218 - RNA, 32 nt, Homo Sapiens
ggccccgugaggagggcgggaguguggaggag

SEQ ID NO: 28219 - RNA, 32 nt, Homo Sapiens
aauuccuguucuaucccuucucuaucccaccc

SEQ ID NO: 28220 - RNA, 32 nt, Homo Sapiens
aaacuugaguuuuguguaauuuucauguguca

SEQ ID NO: 28221 - RNA, 32 nt, Homo Sapiens
uuguccccggcuucagggcugcggggccugga

SEQ ID NO: 28222 - RNA, 32 nt, Homo Sapiens
auaaauagauuagauccagagaagacucuaga

SEQ ID NO: 28223 - RNA, 32 nt, Homo Sapiens
uggagguuuuuuaauguauuuauuuucuguuc

SEQ ID NO: 28224 - RNA, 32 nt, Homo Sapiens
auguguagcaguuacauauuuaccaaauaaug

SEQ ID NO: 28225 - RNA, 32 nt, Homo Sapiens
uagagccggcgcgcccgggcgcgcaccugugu

SEQ ID NO: 28226 - RNA, 32 nt, Homo Sapiens
ucaggauaucuggaacaaaauauggaggugaa

SEQ ID NO: 28227 - RNA, 32 nt, Homo Sapiens
aaugaaggucauaaguuucugagaugggagag

SEQ ID NO: 28228 - RNA, 30 nt, Homo Sapiens
gucgcuggaguuggcaugcagagacuuugu

SEQ ID NO: 28229 - RNA, 32 nt, Homo Sapiens
uguccgggcugucucuguuccuucuauuuugc

SEQ ID NO: 28230 - RNA, 32 nt, Homo Sapiens
ccaucuccuucccccagucucacuaguugcca

SEQ ID NO: 28231 - RNA, 32 nt, Homo Sapiens
gugugugugggaagguggggaggcugcgggag

SEQ ID NO: 28232 - RNA, 32 nt, Homo Sapiens
auaagaaauuaacagaacauuguucgguucac

SEQ ID NO: 28233 - RNA, 32 nt, Homo Sapiens
acauaaugugugagcauuuuuuccuguuaacu

SEQ ID NO: 28234 - RNA, 32 nt, Homo Sapiens
auucaugagauuggucauuaaauacuauuugu

SEQ ID NO: 28235 - RNA, 32 nt, Homo Sapiens
aucauuuugaagucuguaaauuguguuaguca

SEQ ID NO: 28236 - RNA, 32 nt, Homo Sapiens
ucacaaguuaaaugugauacagaaaaauagau

SEQ ID NO: 28237 - RNA, 32 nt, Homo Sapiens
aagccucugaccaguuugcugcagcauuuaca

SEQ ID NO: 28238 - RNA, 32 nt, Homo Sapiens
cccucaaagcaucagacaugggaaaauugguu

SEQ ID NO: 28239 - RNA, 32 nt, Homo Sapiens
agcugcccucaauaaugugaauggauuagugc

SEQ ID NO: 28240 - RNA, 32 nt, Homo Sapiens
uuauuagccaagguggccuuccuucacaguca

SEQ ID NO: 28241 - RNA, 32 nt, Homo Sapiens
cacuucuaaaauucagccuuguucauucagaa

SEQ ID NO: 28242 - RNA, 32 nt, Homo Sapiens
uuuucauuugguucauuaauucuauaaggcca

SEQ ID NO: 28243 - RNA, 32 nt, Homo Sapiens
agcagggcaaauguaauuuuaagaauugcuaa

SEQ ID NO: 28244 - RNA, 32 nt, Homo Sapiens
caaaagacagagcuaacaacuagcuaccuugc

SEQ ID NO: 28245 - RNA, 32 nt, Homo Sapiens
cccccugccccgagucuggaagagggcaagga

SEQ ID NO: 28246 - RNA, 32 nt, Homo Sapiens
gugacucuccgggucuucugaguuuugcaugc

SEQ ID NO: 28247 - RNA, 32 nt, Homo Sapiens
gccguccaggcuagcggcggcccgcaggcggc

SEQ ID NO: 28248 - RNA, 32 nt, Homo Sapiens
uucuauauuuacuguuuauaauagguggagac

SEQ ID NO: 28249 - RNA, 32 nt, Homo Sapiens
gccagucuuuuuugcuucuccuacaaaacgua

SEQ ID NO: 28250 - RNA, 32 nt, Homo Sapiens
gagccgaagcccuuagacugccaggcacagag

SEQ ID NO: 28251 - RNA, 32 nt, Homo Sapiens
gggcagauagugaaacacauuguuaggggaga

SEQ ID NO: 28252 - RNA, 32 nt, Homo Sapiens
aucuugaguaauuuuaaaauguugacaccuua

SEQ ID NO: 28253 - RNA, 32 nt, Homo Sapiens
gccaagggugccggaggcaggguucgggugcg

SEQ ID NO: 28254 - RNA, 32 nt, Homo Sapiens
cagaagcacaaggggaaggugccgugucaagc

SEQ ID NO: 28255 - RNA, 32 nt, Homo Sapiens
aacuaccuucugacuuggguugaggcuggguu

SEQ ID NO: 28256 - RNA, 32 nt, Homo Sapiens
aggcccggagggggcggggagguggcccacag

SEQ ID NO: 28257 - RNA, 32 nt, Homo Sapiens
ucucagcugaagauauaaguauuauagucauu

SEQ ID NO: 28258 - RNA, 32 nt, Homo Sapiens
guaccccggccgcgacccuccgagccccugga

SEQ ID NO: 28259 - RNA, 32 nt, Homo Sapiens
aagaagcgggucuguuucuuuacuuccuccac

SEQ ID NO: 28260 - RNA, 32 nt, Homo Sapiens
agaugaaucaguaugaagacacugucaaugag

SEQ ID NO: 28261 - RNA, 32 nt, Homo Sapiens
gaucaaaugcaaacuucuggagaaaacagagu

SEQ ID NO: 28262 - RNA, 32 nt, Homo Sapiens
acccaggauguaucuuuaauucuugucaucca

SEQ ID NO: 28263 - RNA, 32 nt, Homo Sapiens
aaucuccaaucugggucugaugagaugaugca

SEQ ID NO: 28264 - RNA, 32 nt, Homo Sapiens
uguuaucuauugcugcauaauaaauugcccca

SEQ ID NO: 28265 - RNA, 32 nt, Homo Sapiens
uuagaaugagggaaacaaaauauuuauuuguu

SEQ ID NO: 28266 - RNA, 32 nt, Homo Sapiens
uuaaacacguuuccuuguuuucuuucucucuc

SEQ ID NO: 28267 - RNA, 32 nt, Homo Sapiens
gggaaaggaaacaaaaaagugaaggaaauauu

SEQ ID NO: 28268 - RNA, 32 nt, Homo Sapiens
gcgcagcgauggaggcgccggggcucgggcgg

SEQ ID NO: 28269 - RNA, 32 nt, Homo Sapiens
aguuuucaauuuguguuauuuucauuucuuua

SEQ ID NO: 28270 - RNA, 28 nt, Homo Sapiens
ugcuugaaagauucucaucucagaauac

SEQ ID NO: 28271 - RNA, 32 nt, Homo Sapiens
caccaguaaaagacauuaaugagaauuccuua

SEQ ID NO: 28272 - RNA, 32 nt, Homo Sapiens
ugaugaugaugaugaucuggguucaaacaagc

SEQ ID NO: 28273 - RNA, 32 nt, Homo Sapiens
ugaccacccuccccucagccauggacaugcuu

SEQ ID NO: 28274 - RNA, 32 nt, Homo Sapiens
uggcacgcugguggggcagcucuugucuugga

SEQ ID NO: 28275 - RNA, 32 nt, Homo Sapiens
gucucuuagcaaccgcgcgcggccuagguggg

SEQ ID NO: 28276 - RNA, 32 nt, Homo Sapiens
acccaccccgagcccccuccccuccccuccag

SEQ ID NO: 28277 - RNA, 32 nt, Homo Sapiens
acucccucugcuguccuccccucucacgagaa

SEQ ID NO: 28278 - RNA, 32 nt, Homo Sapiens
gaauucgggcgugggcgcgggggcgcggcgug

SEQ ID NO: 28279 - RNA, 32 nt, Homo Sapiens
uacauaaaaaaguaagacuaaguauugcugaa

SEQ ID NO: 28280 - RNA, 32 nt, Homo Sapiens
cacugacacccacuucuggguucucaggcugg

SEQ ID NO: 28281 - RNA, 31 nt, Homo Sapiens
gcaggcgaggcggucgcuucgagcgcgcuag

SEQ ID NO: 28282 - RNA, 32 nt, Homo Sapiens
aaacagacagagaugauaaauauuuuagcuau

SEQ ID NO: 28283 - RNA, 32 nt, Homo Sapiens
augggugaacaggcuguauuagggccaaaauc

SEQ ID NO: 28284 - RNA, 32 nt, Homo Sapiens
cuugcccucucggagccuccacuuccucaucu

SEQ ID NO: 28285 - RNA, 32 nt, Homo Sapiens
aaaauucacuaaaaggcaccaugaaaaggcug

SEQ ID NO: 28286 - RNA, 32 nt, Homo Sapiens
cccgguuauuuccucagcuauuuccaccaaau

SEQ ID NO: 28287 - RNA, 32 nt, Homo Sapiens
guugcuucuguugaauuagcucugccaccaau

SEQ ID NO: 28288 - RNA, 32 nt, Homo Sapiens
ccaccaugauugugaggccucgccagccaugu

SEQ ID NO: 28289 - RNA, 32 nt, Homo Sapiens
aaaaggguaugaugaugaaauucaaaaucuua

SEQ ID NO: 28290 - RNA, 32 nt, Homo Sapiens
aggaaauggcucucccucccccugucccccac

SEQ ID NO: 28291 - RNA, 32 nt, Homo Sapiens
aguggaacauucccaaagaacaacaaugcauu

SEQ ID NO: 28292 - RNA, 32 nt, Homo Sapiens
caggggccaaggcgccagaugcgacccaggac

SEQ ID NO: 28293 - RNA, 32 nt, Homo Sapiens
cucuuccuagaugcccaccuccuacaaucuca

SEQ ID NO: 28294 - RNA, 32 nt, Homo Sapiens
gacuccgcucuggcucgucgcugcuguuuccu

SEQ ID NO: 28295 - RNA, 32 nt, Homo Sapiens
uggcccucugguccagccccucacgccuccuc

SEQ ID NO: 28296 - RNA, 32 nt, Homo Sapiens
gugcgcuugauucuacuucaggaggcacaugg

SEQ ID NO: 28297 - RNA, 32 nt, Homo Sapiens
aaggagauuuaaaauauaaauguaucuauaaa

SEQ ID NO: 28298 - RNA, 32 nt, Homo Sapiens
gcccggaggagccgcccauugaucguguccug

SEQ ID NO: 28299 - RNA, 32 nt, Homo Sapiens
uagaaacacuaaaauaaugugauccuuuggau

SEQ ID NO: 28300 - RNA, 32 nt, Homo Sapiens
agggaugacguucggaaagggucaugggcuaa

SEQ ID NO: 28301 - RNA, 27 nt, Homo Sapiens
aggguguccuucugugcccuuguuaau

SEQ ID NO: 28302 - RNA, 32 nt, Homo Sapiens
gcaguuugacacagugauaaaauguacaagaa

SEQ ID NO: 28303 - RNA, 28 nt, Homo Sapiens
auuuuuaaagauuaacaacaggaaauaa

SEQ ID NO: 28304 - RNA, 32 nt, Homo Sapiens
uagagaccaacccugaggacucagugugcauc

SEQ ID NO: 28305 - RNA, 32 nt, Homo Sapiens
gccccuggauucagcucugcagccuccuccgc

SEQ ID NO: 28306 - RNA, 32 nt, Homo Sapiens
uuagguagcauauuuuaacaucuuauaaacca

SEQ ID NO: 28307 - RNA, 32 nt, Homo Sapiens
cuccaaacugguuuccuaguagucccccaucc

SEQ ID NO: 28308 - RNA, 32 nt, Homo Sapiens
ccuaaguuauuuauaaagagaaaucacuaaug

SEQ ID NO: 28309 - RNA, 32 nt, Homo Sapiens
ccguucggcgugugcuuggcccggggaaccgg

SEQ ID NO: 28310 - RNA, 32 nt, Homo Sapiens
cacccugacagcccaacaccaccuuccuccug

SEQ ID NO: 28311 - RNA, 32 nt, Homo Sapiens
gcacggucaggccccaggacuggcuugcgagc

SEQ ID NO: 28312 - RNA, 32 nt, Homo Sapiens
caagugggcggugggugaggggccccucaacg

SEQ ID NO: 28313 - RNA, 32 nt, Homo Sapiens
aagauuaauauguuguuaauuuuaacgauuuu

SEQ ID NO: 28314 - RNA, 32 nt, Homo Sapiens
aacauuucaaaauaaauugccuuuaaccaaua

SEQ ID NO: 28315 - RNA, 32 nt, Homo Sapiens
auggccccgcaggcuccuccacuucccgcucu

SEQ ID NO: 28316 - RNA, 32 nt, Homo Sapiens
aaauuugcaaaauaaaguacuguuuuggugug

SEQ ID NO: 28317 - RNA, 32 nt, Homo Sapiens
ggagcucggaauguucguggaacuuaauaacc

SEQ ID NO: 28318 - RNA, 32 nt, Homo Sapiens
ucucagagcuucacuguucucaucugaaaaau

SEQ ID NO: 28319 - RNA, 32 nt, Homo Sapiens
ucugggucuacgcagaaaagagacgcaaagug

SEQ ID NO: 28320 - RNA, 32 nt, Homo Sapiens
agauuuuguauaauguaacaaacaucagacaa

SEQ ID NO: 28321 - RNA, 32 nt, Homo Sapiens
uggagaccucggcuccuccugcuccugaacca

SEQ ID NO: 28322 - RNA, 28 nt, Homo Sapiens
caauugugaauaaaagaaguaauagcag

SEQ ID NO: 28323 - RNA, 32 nt, Homo Sapiens
acccccagcgguucuccccaugguguuguaaa

SEQ ID NO: 28324 - RNA, 31 nt, Homo Sapiens
acuuuuuuguugacuuucaaguaaagugauu

SEQ ID NO: 28325 - RNA, 27 nt, Homo Sapiens
ucagacccuuucuucagcucugaaaga

SEQ ID NO: 28326 - RNA, 32 nt, Homo Sapiens
gccuagcucucagaucucuauuucauuuugug

SEQ ID NO: 28327 - RNA, 32 nt, Homo Sapiens
augucauuguuuugguccaaucagguaccuuu

SEQ ID NO: 28328 - RNA, 32 nt, Homo Sapiens
uccgcgcgcgccugcccgcggcuggggaacca

SEQ ID NO: 28329 - RNA, 32 nt, Homo Sapiens
cuccuccucgcgcgucuuggacaugccaggaa

SEQ ID NO: 28330 - RNA, 32 nt, Homo Sapiens
augaaaguguaccccauuugguuucaccagga

SEQ ID NO: 28331 - RNA, 32 nt, Homo Sapiens
guaucauucuuacauacuucuguguuuaaauu

SEQ ID NO: 28332 - RNA, 32 nt, Homo Sapiens
aaaaugaauauuaaaaaagacuuaaggggaag

SEQ ID NO: 28333 - RNA, 32 nt, Homo Sapiens
gaucucaccuuacugcaaccaccacuuccugg

SEQ ID NO: 28334 - RNA, 32 nt, Homo Sapiens
acgagggaaaacaaaauaaaauuagggggcaa

SEQ ID NO: 28335 - RNA, 32 nt, Homo Sapiens
uaugggauucagaacaaugagaucauaauaau

SEQ ID NO: 28336 - RNA, 32 nt, Homo Sapiens
gggguucuuacgggaagaugaggaagcccgac

SEQ ID NO: 28337 - RNA, 32 nt, Homo Sapiens
gugggcguugccuggguucuugggagagaggg

SEQ ID NO: 28338 - RNA, 32 nt, Homo Sapiens
acucagaaacaucaguuacucugaagggcauc

SEQ ID NO: 28339 - RNA, 32 nt, Homo Sapiens
agccgccgcauuuuuuaacccuagaucucgaa

SEQ ID NO: 28340 - RNA, 30 nt, Homo Sapiens
uucauugucugugaagugagaccuuccuuu

SEQ ID NO: 28341 - RNA, 32 nt, Homo Sapiens
ugcuggcaccagcugggaggggccguccuucc

SEQ ID NO: 28342 - RNA, 32 nt, Homo Sapiens
auuugaggccguuaggaaaagcugauguugug

SEQ ID NO: 28343 - RNA, 32 nt, Homo Sapiens
cagccucccggcucagccugggaagaugcgcg

SEQ ID NO: 28344 - RNA, 32 nt, Homo Sapiens
cagcgaggacggcgaggcgcucaacggcgagc

SEQ ID NO: 28345 - RNA, 32 nt, Homo Sapiens
cuauaagguucagaaucagaauuuuaguaaca

SEQ ID NO: 28346 - RNA, 32 nt, Homo Sapiens
ucuaucgcgucacagugccgcuggaucuagau

SEQ ID NO: 28347 - RNA, 32 nt, Homo Sapiens
aaagaaaaacaguaucuuauaugauuaguuuu

SEQ ID NO: 28348 - RNA, 32 nt, Homo Sapiens
caggagcccagcuggcugggcccagcugccua

SEQ ID NO: 28349 - RNA, 32 nt, Homo Sapiens
ugcuuugacacugggcaagaauuuaagauugu

SEQ ID NO: 28350 - RNA, 32 nt, Homo Sapiens
uuucagacugaagaaaacuuugaaaagucagg

SEQ ID NO: 28351 - RNA, 32 nt, Homo Sapiens
ccggcaggguccugggggcgcaggcaagggga

SEQ ID NO: 28352 - RNA, 32 nt, Homo Sapiens
ucucuuaaugaaaccauucagcagguauaugc

SEQ ID NO: 28353 - RNA, 32 nt, Homo Sapiens
gcuccaagaaaaaucaucuacucuaugcagga

SEQ ID NO: 28354 - RNA, 32 nt, Homo Sapiens
auauagguuauuuaacuuguguucagccuuuu

SEQ ID NO: 28355 - RNA, 32 nt, Homo Sapiens
uuguuacauauugauuuuuuuauauuuauuuu

SEQ ID NO: 28356 - RNA, 32 nt, Homo Sapiens
uacauuagggugagaguuugauuauuuaggau

SEQ ID NO: 28357 - RNA, 32 nt, Homo Sapiens
cgagccggagaagauggcggugcggaagaagg

SEQ ID NO: 28358 - RNA, 32 nt, Homo Sapiens
guacuuugacagagccugggaaggagagacga

SEQ ID NO: 28359 - RNA, 32 nt, Homo Sapiens
cccaauuggcggccgaagagucuccucgcccc

SEQ ID NO: 28360 - RNA, 32 nt, Homo Sapiens
aagcgcucgcucccuuucccccauuagugcuc

SEQ ID NO: 28361 - RNA, 30 nt, Homo Sapiens
gcagaagccguuccgugucucuugcaggcu

SEQ ID NO: 28362 - RNA, 32 nt, Homo Sapiens
uuaaaaacugucagcaguuucauaugguucca

SEQ ID NO: 28363 - RNA, 32 nt, Homo Sapiens
uggacguccugagcgccacggcucacucccug

SEQ ID NO: 28364 - RNA, 32 nt, Homo Sapiens
gccauuuccagucucugcugagugucccagac

SEQ ID NO: 28365 - RNA, 32 nt, Homo Sapiens
ggaggagacagagggaggaccuguuguguucc

SEQ ID NO: 28366 - RNA, 32 nt, Homo Sapiens
aaaauuuuugggaaaaggaaaaacgaguaaaa

SEQ ID NO: 28367 - RNA, 32 nt, Homo Sapiens
cauguuauggcugucagucauccaccaggaac

SEQ ID NO: 28368 - RNA, 32 nt, Homo Sapiens
uaguuaaacuuuggauagauuguauaauauau

SEQ ID NO: 28369 - RNA, 32 nt, Homo Sapiens
ucccugagguaccaccuaacuccucacucccu

SEQ ID NO: 28370 - RNA, 32 nt, Homo Sapiens
caacucaaacucccaccgcgcucacacaaccg

SEQ ID NO: 28371 - RNA, 31 nt, Homo Sapiens
agccuccuggccugccugcccgcccacccug

SEQ ID NO: 28372 - RNA, 32 nt, Homo Sapiens
aacaggagaaugcacaguggguggagccaauc

SEQ ID NO: 28373 - RNA, 32 nt, Homo Sapiens
ugaaaaauauauuuguagcacauauuauagau

SEQ ID NO: 28374 - RNA, 32 nt, Homo Sapiens
gaggaauuuuuccacuuaagucagagccuucc

SEQ ID NO: 28375 - RNA, 32 nt, Homo Sapiens
aucugugaaagaaaacaaaacaaaacaaaaaa

SEQ ID NO: 28376 - RNA, 31 nt, Homo Sapiens
ugcaaugccaguccugcaggagugcuggcau

SEQ ID NO: 28377 - RNA, 32 nt, Homo Sapiens
gaccccuggugcccacugccacccucauccgg

SEQ ID NO: 28378 - RNA, 32 nt, Homo Sapiens
aaaaaauaaaagacuuggaggaaggguaaaaa

SEQ ID NO: 28379 - RNA, 32 nt, Homo Sapiens
aguuuuguucuguucauaauucuuauuucuca

SEQ ID NO: 28380 - RNA, 32 nt, Homo Sapiens
acugagaaauuuguauauuuuauauuaaauca

SEQ ID NO: 28381 - RNA, 32 nt, Homo Sapiens
ggcugccgcaccuguccagacacacauguucu

SEQ ID NO: 28382 - RNA, 32 nt, Homo Sapiens
cucucugggugaggcucccaaccuggcagucc

SEQ ID NO: 28383 - RNA, 32 nt, Homo Sapiens
cagaugggggcggcggcacaccccccaaugau

SEQ ID NO: 28384 - RNA, 32 nt, Homo Sapiens
uccggcaccguggccuggggccccagggcgcc

SEQ ID NO: 28385 - RNA, 32 nt, Homo Sapiens
auuggcuuguucuccuuuccccaucagcugaa

SEQ ID NO: 28386 - RNA, 32 nt, Homo Sapiens
cuucaucauauucuuucuuuuaauaagagcau

SEQ ID NO: 28387 - RNA, 32 nt, Homo Sapiens
gcuuauaaacacauugaaugcgcuuuauugcc

SEQ ID NO: 28388 - RNA, 31 nt, Homo Sapiens
ggcuggggccacugccuccucagcaugcagg

SEQ ID NO: 28389 - RNA, 32 nt, Homo Sapiens
agaacagcugucugcagggaacgccaccaugu

SEQ ID NO: 28390 - RNA, 32 nt, Homo Sapiens
cagugcaccuuguauucaguacucuauauuga

SEQ ID NO: 28391 - RNA, 32 nt, Homo Sapiens
auauaauuuuuccuuuaaucggagacccuauu

SEQ ID NO: 28392 - RNA, 32 nt, Homo Sapiens
uaaaacaaaugaaauuaagugauccaaagcug

SEQ ID NO: 28393 - RNA, 32 nt, Homo Sapiens
cuagacauuuuucuucucuuuguaaguagauu

SEQ ID NO: 28394 - RNA, 32 nt, Homo Sapiens
uauuguucacauuguucuuuuauauauauuua

SEQ ID NO: 28395 - RNA, 32 nt, Homo Sapiens
uauauaauauauauaagguacauaauaugcaa

SEQ ID NO: 28396 - RNA, 32 nt, Homo Sapiens
gacacugcuaggccgccugggguccccugccu

SEQ ID NO: 28397 - RNA, 32 nt, Homo Sapiens
agugcaacaguaacccaaaaaugucaaugaaa

SEQ ID NO: 28398 - RNA, 29 nt, Homo Sapiens
ucuaugucguguuuucaaggaagaaaacg

SEQ ID NO: 28399 - RNA, 32 nt, Homo Sapiens
aacccggguccugcaagaacugcuucugccug

SEQ ID NO: 28400 - RNA, 32 nt, Homo Sapiens
ugguggcuccuggaggggguccagucaccaga

SEQ ID NO: 28401 - RNA, 32 nt, Homo Sapiens
cuugccccaagcagaggcuagagaagaggcuc

SEQ ID NO: 28402 - RNA, 32 nt, Homo Sapiens
ccgccugcuacaccccaccccugccuuaggau

SEQ ID NO: 28403 - RNA, 32 nt, Homo Sapiens
cauguuucuaguuuguauauguuuccaucuuu

SEQ ID NO: 28404 - RNA, 32 nt, Homo Sapiens
ggagaaagggaagaggcugggauggucucugc

SEQ ID NO: 28405 - RNA, 32 nt, Homo Sapiens
uuuuuauccaaauauuuuguaucuuguaaaua

SEQ ID NO: 28406 - RNA, 32 nt, Homo Sapiens
aaaggugucugccacacccaaguucccaggcc

SEQ ID NO: 28407 - RNA, 25 nt, Homo Sapiens
uauuaauaaaguuaauguaacuucu

SEQ ID NO: 28408 - RNA, 32 nt, Homo Sapiens
uaggugggagagggccugggggcugggaggca

SEQ ID NO: 28409 - RNA, 32 nt, Homo Sapiens
uggaguugacauuuuggcaugugcucugagcu

SEQ ID NO: 28410 - RNA, 32 nt, Homo Sapiens
acaagagaacagaccaccaccauccauagccu

SEQ ID NO: 28411 - RNA, 32 nt, Homo Sapiens
gugagcagagcaggcaguggcucuggaggcug

SEQ ID NO: 28412 - RNA, 32 nt, Homo Sapiens
cagacucuccagcagacucuccagcccucuuc

SEQ ID NO: 28413 - RNA, 32 nt, Homo Sapiens
ccguccccggcggccccaugccccgaugcccc

SEQ ID NO: 28414 - RNA, 31 nt, Homo Sapiens
aggguggcccuccagaaccggagugacaaac

SEQ ID NO: 28415 - RNA, 32 nt, Homo Sapiens
aaaucauagaaaguuugcugaaagcaaagggc

SEQ ID NO: 28416 - RNA, 32 nt, Homo Sapiens
aauguugagauuacuuacgaaauaugucugag

SEQ ID NO: 28417 - RNA, 32 nt, Homo Sapiens
agaugaggaaacugaggccucaguaacuuugc

SEQ ID NO: 28418 - RNA, 32 nt, Homo Sapiens
ccccucaacauggcggcagcggugcucuaggc

SEQ ID NO: 28419 - RNA, 32 nt, Homo Sapiens
gugucacacggggccgagagcugagcaagaau

SEQ ID NO: 28420 - RNA, 32 nt, Homo Sapiens
aagcauacauaugugauuauggcuaaaucaaa

SEQ ID NO: 28421 - RNA, 32 nt, Homo Sapiens
aggccaccgagcucucugcguccugagacggc

SEQ ID NO: 28422 - RNA, 32 nt, Homo Sapiens
auucaaacaaagugaguaaucuaccgcaguuu

SEQ ID NO: 28423 - RNA, 32 nt, Homo Sapiens
gugcucugcuucucugugucgccccgcccagc

SEQ ID NO: 28424 - RNA, 32 nt, Homo Sapiens
cuugaucucugccucccugucacaacgcugcc

SEQ ID NO: 28425 - RNA, 32 nt, Homo Sapiens
ugaagcugacauuuuuaaaaaucaaaugaucc

SEQ ID NO: 28426 - RNA, 32 nt, Homo Sapiens
agaaccagacugcgagaaccgauggguacaga

SEQ ID NO: 28427 - RNA, 32 nt, Homo Sapiens
caacagccagguauaaacuauaucuccuagua

SEQ ID NO: 28428 - RNA, 32 nt, Homo Sapiens
ugccuguaaucccagcacuuugggaagcugag

SEQ ID NO: 28429 - RNA, 32 nt, Homo Sapiens
uacccguaaucccagcacuuugggaggccgag

SEQ ID NO: 28430 - RNA, 32 nt, Homo Sapiens
gguggucccuguuagaguuagaccucuagacu

SEQ ID NO: 28431 - RNA, 32 nt, Homo Sapiens
uggagcugcucaagaucacgcgggaagacagc

SEQ ID NO: 28432 - RNA, 32 nt, Homo Sapiens
caguggcccucccuggugcacuguccccgaaa

SEQ ID NO: 28433 - RNA, 32 nt, Homo Sapiens
agauaaaaucauauauacuaucuuguagugug

SEQ ID NO: 28434 - RNA, 32 nt, Homo Sapiens
gggcagcucggcaguccagcccggcccggguc

SEQ ID NO: 28435 - RNA, 32 nt, Homo Sapiens
uuuuaucuaaaguuauuuuaauaggugguaua

SEQ ID NO: 28436 - RNA, 32 nt, Homo Sapiens
gaagggcaaagcaguuucugcugugaaagagu

SEQ ID NO: 28437 - RNA, 32 nt, Homo Sapiens
cugagaugcuccucgggcuggcccaggugcug

SEQ ID NO: 28438 - RNA, 32 nt, Homo Sapiens
uuauacaucauguggacuuauuuuauauuaaa

SEQ ID NO: 28439 - RNA, 32 nt, Homo Sapiens
gcagggcagagccgcgcagcaccugggagcgg

SEQ ID NO: 28440 - RNA, 32 nt, Homo Sapiens
aaaacauaaaugucuguaacuuacaaacauga

SEQ ID NO: 28441 - RNA, 32 nt, Homo Sapiens
cuuccagaccaccugccagccaucacaagggg

SEQ ID NO: 28442 - RNA, 32 nt, Homo Sapiens
uuguuaacgucugccacccccacucucacccc

SEQ ID NO: 28443 - RNA, 32 nt, Homo Sapiens
gaccccagguuuccuuuacaugagaucccauu

SEQ ID NO: 28444 - RNA, 32 nt, Homo Sapiens
cuguccaguucaggccucuccucuuucccugg

SEQ ID NO: 28445 - RNA, 32 nt, Homo Sapiens
aguguguuaaaauuuucuuuuaaaauuguuua

SEQ ID NO: 28446 - RNA, 32 nt, Homo Sapiens
ugcaauuuuuauucacagcucuuccauguaga

SEQ ID NO: 28447 - RNA, 32 nt, Homo Sapiens
cuguggauauuuuacuggaaauuaagaacuug

SEQ ID NO: 28448 - RNA, 32 nt, Homo Sapiens
cagugccuuucuguaccccaagccagcacaag

SEQ ID NO: 28449 - RNA, 32 nt, Homo Sapiens
cugcagacggggaccaguggcucccauuuuca

SEQ ID NO: 28450 - RNA, 32 nt, Homo Sapiens
cauaggcuauauaaauuugucuccauuuucac

SEQ ID NO: 28451 - RNA, 32 nt, Homo Sapiens
ucuuaaugugggcuguuuuuuaugaucaaacu

SEQ ID NO: 28452 - RNA, 32 nt, Homo Sapiens
gcaugugacuucggcaagauggcugcccugac

SEQ ID NO: 28453 - RNA, 32 nt, Homo Sapiens
uucguacuuaggauucaauagaaacauguaca

SEQ ID NO: 28454 - RNA, 32 nt, Homo Sapiens
gcauuaucaaaauaaaguagcagaccucucaa

SEQ ID NO: 28455 - RNA, 32 nt, Homo Sapiens
uuggcuuuacacaaacacagacaaauuccacc

SEQ ID NO: 28456 - RNA, 32 nt, Homo Sapiens
ggugucauugccauccuggguugacaagcuga

SEQ ID NO: 28457 - RNA, 32 nt, Homo Sapiens
aaaagcugcuauugauaacucucuuuuauuuc

SEQ ID NO: 28458 - RNA, 32 nt, Homo Sapiens
acccaggcgaggcccaccugggcucuguccuc

SEQ ID NO: 28459 - RNA, 32 nt, Homo Sapiens
acaacaacaacaacaaaaaccccuguugggca

SEQ ID NO: 28460 - RNA, 32 nt, Homo Sapiens
acugugcauuggccauacccuuaggagugguu

SEQ ID NO: 28461 - RNA, 32 nt, Homo Sapiens
auuuucuuaguucugugaacaccugggaggga

SEQ ID NO: 28462 - RNA, 32 nt, Homo Sapiens
gaacugagggaagaaaagaacggaggccgcgu

SEQ ID NO: 28463 - RNA, 30 nt, Homo Sapiens
gcucggcggaggcgcgcuugggcucccggc

SEQ ID NO: 28464 - RNA, 32 nt, Homo Sapiens
gcugcuguguguucucucuauaguucuguguc

SEQ ID NO: 28465 - RNA, 32 nt, Homo Sapiens
acagggucgggcggggagggguguggagaaga

SEQ ID NO: 28466 - RNA, 32 nt, Homo Sapiens
agcauuucaucucaagaguuguagaaguuuau

SEQ ID NO: 28467 - RNA, 32 nt, Homo Sapiens
aacggccuccggucggugggcuccucuaggcc

SEQ ID NO: 28468 - RNA, 32 nt, Homo Sapiens
cccaugcagguggugucgggcccuucuugcug

SEQ ID NO: 28469 - RNA, 32 nt, Homo Sapiens
aacuggaagauuaugauguuucugauuccuuu

SEQ ID NO: 28470 - RNA, 30 nt, Homo Sapiens
agcaaugucugugcuagggaaacuccccgu

SEQ ID NO: 28471 - RNA, 32 nt, Homo Sapiens
gcggucgaggcgaagcggcugcagcggcggua

SEQ ID NO: 28472 - RNA, 32 nt, Homo Sapiens
gcucuaauucucaauuguaggcaaacugauuu

SEQ ID NO: 28473 - RNA, 32 nt, Homo Sapiens
uuuuuuucuuuuucuuuuucuuuuuucuuuuu

SEQ ID NO: 28474 - RNA, 32 nt, Homo Sapiens
cgcgccccgagccccgagagccaugcagaugu

SEQ ID NO: 28475 - RNA, 32 nt, Homo Sapiens
ggcugugagucaccucugccucaugugggugg

SEQ ID NO: 28476 - RNA, 32 nt, Homo Sapiens
gaaggcccccacaaauaaaggcgcugccacuc

SEQ ID NO: 28477 - RNA, 32 nt, Homo Sapiens
aaucucuacuuuucuuuuugugcagcugaguc

SEQ ID NO: 28478 - RNA, 32 nt, Homo Sapiens
caauauggcuccuguuuuccugguuggacucc

SEQ ID NO: 28479 - RNA, 32 nt, Homo Sapiens
gugagcccagaaagcugaaggucuggugauag

SEQ ID NO: 28480 - RNA, 32 nt, Homo Sapiens
uuucuaaggaaagaaugucuucauauuugacu

SEQ ID NO: 28481 - RNA, 32 nt, Homo Sapiens
ucaccgcgaaaacaccguccugggaaagcguc

SEQ ID NO: 28482 - RNA, 32 nt, Homo Sapiens
uaauguugaaagaugggauggauuggcaugga

SEQ ID NO: 28483 - RNA, 32 nt, Homo Sapiens
gggcccucucugugccucuccuccuaaguagg

SEQ ID NO: 28484 - RNA, 32 nt, Homo Sapiens
agccccaugagaaaaauaaaacaccuuguacu

SEQ ID NO: 28485 - RNA, 32 nt, Homo Sapiens
cccucacaagucuuaugggcaccacagggaac

SEQ ID NO: 28486 - RNA, 32 nt, Homo Sapiens
cugacccuccuguugcgcccagcccuggucuc

SEQ ID NO: 28487 - RNA, 32 nt, Homo Sapiens
cagcccuuuuucugccacuagcaaccagaaua

SEQ ID NO: 28488 - RNA, 32 nt, Homo Sapiens
cuuagcugucaagggaaacuuuuuacaaaucu

SEQ ID NO: 28489 - RNA, 32 nt, Homo Sapiens
cauauugaugaaaucguaauucaugguugagu

SEQ ID NO: 28490 - RNA, 32 nt, Homo Sapiens
ucaugaauaaaguuguuuuugaaaauaaaaaa

SEQ ID NO: 28491 - RNA, 32 nt, Homo Sapiens
uguuuccguccauuuucuuaauccugaaccug

SEQ ID NO: 28492 - RNA, 32 nt, Homo Sapiens
gggucuauguuccccaggauucagcuauucug

SEQ ID NO: 28493 - RNA, 32 nt, Homo Sapiens
ugaggggaaggggcuaugaauguuuguauacg

SEQ ID NO: 28494 - RNA, 32 nt, Homo Sapiens
uguuuguugcauuucaguaaaagcagaauaac

SEQ ID NO: 28495 - RNA, 32 nt, Homo Sapiens
uucauauauagagggacaaugggagacagcau

SEQ ID NO: 28496 - RNA, 32 nt, Homo Sapiens
cccgcgcgcuagcuccuucucucgcccggggu

SEQ ID NO: 28497 - RNA, 32 nt, Homo Sapiens
gugugggaaugggaugcucugugacccaggug

SEQ ID NO: 28498 - RNA, 32 nt, Homo Sapiens
aaauauaccucuugcccagcugccucuucuga

SEQ ID NO: 28499 - RNA, 32 nt, Homo Sapiens
cuucaacugggauacauuuggaaaugugguca

SEQ ID NO: 28500 - RNA, 32 nt, Homo Sapiens
cuucuguucauucuuacaucacagcaaucuag

SEQ ID NO: 28501 - RNA, 32 nt, Homo Sapiens
gcagcucaccaugcagcugaugccaaaguugu

SEQ ID NO: 28502 - RNA, 32 nt, Homo Sapiens
uugcugugggaacacaggaggcagcagccaga

SEQ ID NO: 28503 - RNA, 32 nt, Homo Sapiens
cacuagcuuucugcauuuaauagguuagaaug

SEQ ID NO: 28504 - RNA, 32 nt, Homo Sapiens
ugucuuaaaaauacguuuacaguauuggguac

SEQ ID NO: 28505 - RNA, 32 nt, Homo Sapiens
uucuauguuguaauaaacauucaugugaccuu

SEQ ID NO: 28506 - RNA, 32 nt, Homo Sapiens
cauugguuuuuaaauuuuuugucaguuuaugu

SEQ ID NO: 28507 - RNA, 32 nt, Homo Sapiens
aggcucucacaguuguuucucaucuucauaau

SEQ ID NO: 28508 - RNA, 32 nt, Homo Sapiens
augcauuuuuaaaaacuauucuuucugaacuu

SEQ ID NO: 28509 - RNA, 32 nt, Homo Sapiens
uggaauuggugauucugaauuguccuuuacua

SEQ ID NO: 28510 - RNA, 32 nt, Homo Sapiens
auuauaauguaaucuguaaauagugauaugau

SEQ ID NO: 28511 - RNA, 32 nt, Homo Sapiens
auucucugacuuguaugucauaaaaaaaaagc

SEQ ID NO: 28512 - RNA, 32 nt, Homo Sapiens
ucaggcuucauacuccacgcucccccagcgua

SEQ ID NO: 28513 - RNA, 32 nt, Homo Sapiens
ucucagcauguuucucuccuuggaccuugggu

SEQ ID NO: 28514 - RNA, 28 nt, Homo Sapiens
ugaccuuugucuaaaccuguguuguaag

SEQ ID NO: 28515 - RNA, 32 nt, Homo Sapiens
uauauuggcuuaaagcaugaggcugucuucag

SEQ ID NO: 28516 - RNA, 32 nt, Homo Sapiens
gaguuauuuuugggauaaauuuuacugguugc

SEQ ID NO: 28517 - RNA, 32 nt, Homo Sapiens
uauggguuauuuauauuuagucuaaguaacac

SEQ ID NO: 28518 - RNA, 32 nt, Homo Sapiens
ggagcaggguccuccgccguccggcggccccc

SEQ ID NO: 28519 - RNA, 32 nt, Homo Sapiens
uuuggcaaaggacggaggaaaagcucagcaac

SEQ ID NO: 28520 - RNA, 32 nt, Homo Sapiens
cacaucugcccuggccucuccugcuccagggc

SEQ ID NO: 28521 - RNA, 32 nt, Homo Sapiens
ugugauuuucuuuucuaaaugaaacuccaugu

SEQ ID NO: 28522 - RNA, 32 nt, Homo Sapiens
ugcaugugaacaggguuucuguuuaccauguc

SEQ ID NO: 28523 - RNA, 32 nt, Homo Sapiens
aucaaccaaccuggguaacauggccagacccc

SEQ ID NO: 28524 - RNA, 32 nt, Homo Sapiens
agcauacaaaaauuuaguguuaacuguaucau

SEQ ID NO: 28525 - RNA, 32 nt, Homo Sapiens
gaaaggguguuugggaaauuguuaaaucaguu

SEQ ID NO: 28526 - RNA, 32 nt, Homo Sapiens
uuccuguuuucugaauccaauuuaacuuauuc

SEQ ID NO: 28527 - RNA, 32 nt, Homo Sapiens
uccuucccccucaccuuuuggccauggggaga

SEQ ID NO: 28528 - RNA, 32 nt, Homo Sapiens
gugcugccauccuuccuggagagagggaggug

SEQ ID NO: 28529 - RNA, 32 nt, Homo Sapiens
gugcccaccacugcccucccccuugccagugu

SEQ ID NO: 28530 - RNA, 32 nt, Homo Sapiens
uaggaauguuuaaauccucggauacuucagug

SEQ ID NO: 28531 - RNA, 32 nt, Homo Sapiens
gacagcaggcuguaccuuccacagcuugcuug

SEQ ID NO: 28532 - RNA, 32 nt, Homo Sapiens
ggagcccgcgcgcggcgccaccaugcggcaga

SEQ ID NO: 28533 - RNA, 32 nt, Homo Sapiens
cugggauucaucccgucauuucuuucaauaaa

SEQ ID NO: 28534 - RNA, 32 nt, Homo Sapiens
ccauuuuuguaaaaauauauguuuccugauua

SEQ ID NO: 28535 - RNA, 32 nt, Homo Sapiens
aauguauaaauaaaaucuacuuugaggacuuu

SEQ ID NO: 28536 - RNA, 32 nt, Homo Sapiens
auacaucuugccucggccccaagacuccucca

SEQ ID NO: 28537 - RNA, 32 nt, Homo Sapiens
uuccauuucauuuauucauccauccauucaac

SEQ ID NO: 28538 - RNA, 32 nt, Homo Sapiens
cuuuuaauaaauuuauuuugauaaauaauauu

SEQ ID NO: 28539 - RNA, 32 nt, Homo Sapiens
aggcggcgucuugggcuuucccauuggauugu

SEQ ID NO: 28540 - RNA, 32 nt, Homo Sapiens
uagcuguccuuuuuccucuccacacagugcuc

SEQ ID NO: 28541 - RNA, 32 nt, Homo Sapiens
ccagcaugcacggggcgccggggcaguccgcc

SEQ ID NO: 28542 - RNA, 32 nt, Homo Sapiens
acaguuuuguaaaaauacaaaaauuaccuggg

SEQ ID NO: 28543 - RNA, 32 nt, Homo Sapiens
gucacugacauaaaguugaaaaaauaaaugca

SEQ ID NO: 28544 - RNA, 32 nt, Homo Sapiens
aaguauuuuccuucgcuuucugauauauuuug

SEQ ID NO: 28545 - RNA, 32 nt, Homo Sapiens
guauggcaccggaaccuguuuugaauucaguc

SEQ ID NO: 28546 - RNA, 32 nt, Homo Sapiens
aggaagaagcccaaacaaaaacgcuguccggc

SEQ ID NO: 28547 - RNA, 32 nt, Homo Sapiens
acauagugugcauggaccguguggaggagauc

SEQ ID NO: 28548 - RNA, 32 nt, Homo Sapiens
agacaccgcgcccuguccggccuguuauuaua

SEQ ID NO: 28549 - RNA, 32 nt, Homo Sapiens
aauuaaugacuguauuugaauauuuuguaaug

SEQ ID NO: 28550 - RNA, 32 nt, Homo Sapiens
cccuuuccccuuucuuuuuuuuuuuuucuuuu

SEQ ID NO: 28551 - RNA, 31 nt, Homo Sapiens
ccagagaaauaaagcagcaagguuaguggca

SEQ ID NO: 28552 - RNA, 32 nt, Homo Sapiens
agagcauucaguggguuaaaaaaaacagaucc

SEQ ID NO: 28553 - RNA, 32 nt, Homo Sapiens
ucugaugcaugaaucagaauuuuuauauaaua

SEQ ID NO: 28554 - RNA, 32 nt, Homo Sapiens
agauguugaaagaaggagucaagacuggcaau

SEQ ID NO: 28555 - RNA, 32 nt, Homo Sapiens
cugcaaaauacacuaguggaaaacacucugau

SEQ ID NO: 28556 - RNA, 32 nt, Homo Sapiens
uuguaccccagcugccacuccucuaguugaaa

SEQ ID NO: 28557 - RNA, 32 nt, Homo Sapiens
cccgccgcgggccggcgugcgcuggucacuga

SEQ ID NO: 28558 - RNA, 32 nt, Homo Sapiens
ugagagucuggguccaggccuggccauguggc

SEQ ID NO: 28559 - RNA, 32 nt, Homo Sapiens
ggcggcggcggcuuuggcggcuccacuauggc

SEQ ID NO: 28560 - RNA, 32 nt, Homo Sapiens
ggaagacacacacaccuacacacacacacaca

SEQ ID NO: 28561 - RNA, 32 nt, Homo Sapiens
guuugaagcuuuaagagagauguuuuugguaa

SEQ ID NO: 28562 - RNA, 32 nt, Homo Sapiens
augggagugggaagaauaaaaugcagugaaac

SEQ ID NO: 28563 - RNA, 32 nt, Homo Sapiens
ucugauauacaauuagagauauuuuuauauag

SEQ ID NO: 28564 - RNA, 32 nt, Homo Sapiens
cccagccaauuguuuguauuuucaguagagac

SEQ ID NO: 28565 - RNA, 32 nt, Homo Sapiens
acgccgcccgucuauguucccggacuuugucc

SEQ ID NO: 28566 - RNA, 32 nt, Homo Sapiens
guuucaaucaaucaccucgacuuguuuuuuag

SEQ ID NO: 28567 - RNA, 32 nt, Homo Sapiens
uggaugccuaaguguaugaugcuugaagccuc

SEQ ID NO: 28568 - RNA, 32 nt, Homo Sapiens
agccguacugucuauguugugauccuucaucg

SEQ ID NO: 28569 - RNA, 32 nt, Homo Sapiens
uggcugggaccugcgcgacgcugcuguagccu

SEQ ID NO: 28570 - RNA, 32 nt, Homo Sapiens
aggauccucacaggagcagacagagaaaugug

SEQ ID NO: 28571 - RNA, 32 nt, Homo Sapiens
gcuuacuuuccacaugagaugcuuuguaccgg

SEQ ID NO: 28572 - RNA, 32 nt, Homo Sapiens
gaaaccagucuccauguguagauuaagcuguc

SEQ ID NO: 28573 - RNA, 32 nt, Homo Sapiens
gcgcaggcgcucggcgcagaggccugcgggaa

SEQ ID NO: 28574 - RNA, 32 nt, Homo Sapiens
ucguguguguuaccauuauucuuuugucaaaa

SEQ ID NO: 28575 - RNA, 32 nt, Homo Sapiens
cacacaguaaacaucucagcucugccacacac

SEQ ID NO: 28576 - RNA, 32 nt, Homo Sapiens
cauccaguccuggaggacccgcugcuccugcu

SEQ ID NO: 28577 - RNA, 32 nt, Homo Sapiens
ggcugggucuauggucgcuccgcggccgcucc

SEQ ID NO: 28578 - RNA, 32 nt, Homo Sapiens
cccuggaucaccggcccggagagcccgccgcc

SEQ ID NO: 28579 - RNA, 32 nt, Homo Sapiens
auccucugccagcaggugucuguccccggccc

SEQ ID NO: 28580 - RNA, 32 nt, Homo Sapiens
aggcguggacucaaugaccuuuccaagcugug

SEQ ID NO: 28581 - RNA, 32 nt, Homo Sapiens
gauuugcuuccucauauaggguuccggaggcg

SEQ ID NO: 28582 - RNA, 32 nt, Homo Sapiens
uuaauucucaacaacgacaacaaaaaucacaa

SEQ ID NO: 28583 - RNA, 32 nt, Homo Sapiens
caguuggaacgauggcggcggcagcugccgcc

SEQ ID NO: 28584 - RNA, 32 nt, Homo Sapiens
cagccaaucuucauugcucaagugucugaagc

SEQ ID NO: 28585 - RNA, 32 nt, Homo Sapiens
gagcaacguggcggcccuugcccgccagcaau

SEQ ID NO: 28586 - RNA, 32 nt, Homo Sapiens
ccugccuagaaaauagguuguguauugguuuu

SEQ ID NO: 28587 - RNA, 32 nt, Homo Sapiens
gggcaagugcaauuuauuaaauuuauauucuu

SEQ ID NO: 28588 - RNA, 32 nt, Homo Sapiens
ccccucgguuccucuuacccucuucuuggacc

SEQ ID NO: 28589 - RNA, 32 nt, Homo Sapiens
ugcucuggucacuguauucagaauacagguuc

SEQ ID NO: 28590 - RNA, 32 nt, Homo Sapiens
cuggagugguggcuacagaagcuuggggccaa

SEQ ID NO: 28591 - RNA, 32 nt, Homo Sapiens
accgauggaaauaaaaggugggaaauauauuc

SEQ ID NO: 28592 - RNA, 32 nt, Homo Sapiens
agacaggcggccuggucucgaugggccucagu

SEQ ID NO: 28593 - RNA, 32 nt, Homo Sapiens
acuggacucugcagggcagccauccuggauga

SEQ ID NO: 28594 - RNA, 32 nt, Homo Sapiens
agguuuauaagaccucuuucagcagaucacau

SEQ ID NO: 28595 - RNA, 32 nt, Homo Sapiens
uacuuucccucauagaguuagaggguaguuua

SEQ ID NO: 28596 - RNA, 32 nt, Homo Sapiens
ccacugaaggccaaaacaccauguggggugga

SEQ ID NO: 28597 - RNA, 32 nt, Homo Sapiens
gccaggucguugagggucggcggcgggcgagg

SEQ ID NO: 28598 - RNA, 32 nt, Homo Sapiens
cagggccguggcgccguguggggcagcgucau

SEQ ID NO: 28599 - RNA, 32 nt, Homo Sapiens
gggcagaaaucaucacucucucuuuccucccc

SEQ ID NO: 28600 - RNA, 32 nt, Homo Sapiens
cucagcaccacauggcagcugcugggaguuga

SEQ ID NO: 28601 - RNA, 31 nt, Homo Sapiens
augcacuguagucacugcugaguuaauagcg

SEQ ID NO: 28602 - RNA, 32 nt, Homo Sapiens
gcucuguaguggugacuggagagagagcuggg

SEQ ID NO: 28603 - RNA, 32 nt, Homo Sapiens
gccuauugauaauaccuuagauauauucuugu

SEQ ID NO: 28604 - RNA, 32 nt, Homo Sapiens
caguaagccaaggucaugccacugcacucuag

SEQ ID NO: 28605 - RNA, 32 nt, Homo Sapiens
ucccucaguuugcccccggaggaggcagggcg

SEQ ID NO: 28606 - RNA, 32 nt, Homo Sapiens
accugccucugugccaguggcucucaaaucaa

SEQ ID NO: 28607 - RNA, 32 nt, Homo Sapiens
cuuuugaaaggcggcgggaggcggcgagcgcc

SEQ ID NO: 28608 - RNA, 30 nt, Homo Sapiens
gucugcuaagcugcaaauggcugaaguccc

SEQ ID NO: 28609 - RNA, 32 nt, Homo Sapiens
cuggggcucccucucugguuuccuauuugcag

SEQ ID NO: 28610 - RNA, 32 nt, Homo Sapiens
gaaaugcagucacuucuagaaagcauuuguaa

SEQ ID NO: 28611 - RNA, 32 nt, Homo Sapiens
acagaaggcagcauggcagagaaccagaagga

SEQ ID NO: 28612 - RNA, 32 nt, Homo Sapiens
aucuccguuguuguuguuguuguuguuuucua

SEQ ID NO: 28613 - RNA, 32 nt, Homo Sapiens
uccauucugaccauuucaggggucgucaccac

SEQ ID NO: 28614 - RNA, 32 nt, Homo Sapiens
gggcgcaucgccggcccggggcccuuggugcg

SEQ ID NO: 28615 - RNA, 32 nt, Homo Sapiens
ugucacccuggccauguguacugacuugagga

SEQ ID NO: 28616 - RNA, 32 nt, Homo Sapiens
cagcuugcucaggagagggaauaacgcagguc

SEQ ID NO: 28617 - RNA, 32 nt, Homo Sapiens
uguccgcguccuuuccucuccucucuggaagg

SEQ ID NO: 28618 - RNA, 32 nt, Homo Sapiens
auccaucaguuaguagggugcaugucagauga

SEQ ID NO: 28619 - RNA, 32 nt, Homo Sapiens
gaagggugacaaguaccuucugccuccuccau

SEQ ID NO: 28620 - RNA, 32 nt, Homo Sapiens
uuuauuccuucccucccuaaggaggcaaagag

SEQ ID NO: 28621 - RNA, 30 nt, Homo Sapiens
cccgugcgagguggcaaaugcaacaugcuc

SEQ ID NO: 28622 - RNA, 32 nt, Homo Sapiens
guuucucugaagaagagggucugcauuuuccu

SEQ ID NO: 28623 - RNA, 32 nt, Homo Sapiens
guccaagcccgccugcccuguguguuggggcu

SEQ ID NO: 28624 - RNA, 32 nt, Homo Sapiens
cucuguagugaugacuuccuguccucugcucu

SEQ ID NO: 28625 - RNA, 32 nt, Homo Sapiens
gggggaguugggggauggcggcagauguuagc

SEQ ID NO: 28626 - RNA, 32 nt, Homo Sapiens
gucagugcccuggagaucccagcucgcucucc

SEQ ID NO: 28627 - RNA, 32 nt, Homo Sapiens
ccucaucuuggcuaauccggacaggcuugcug

SEQ ID NO: 28628 - RNA, 32 nt, Homo Sapiens
gcagugcaugcugggagggaggaugugugcau

SEQ ID NO: 28629 - RNA, 32 nt, Homo Sapiens
acaguuucaccaucacccgcccauucuacuac

SEQ ID NO: 28630 - RNA, 32 nt, Homo Sapiens
gaaagggauguucaugacagcaucauauacga

SEQ ID NO: 28631 - RNA, 32 nt, Homo Sapiens
ccgacacaccccggggacccuaucgcgacucc

SEQ ID NO: 28632 - RNA, 32 nt, Homo Sapiens
uauauuuaugaguaaacuuuugagguuucugc

SEQ ID NO: 28633 - RNA, 32 nt, Homo Sapiens
uuaaaggagaaaaaauacaauuucucacuuug

SEQ ID NO: 28634 - RNA, 32 nt, Homo Sapiens
cuucugccuucccagaccuuaguuuuauaaag

SEQ ID NO: 28635 - RNA, 32 nt, Homo Sapiens
gaaguacuuucugcccuggauacagcaucugc

SEQ ID NO: 28636 - RNA, 32 nt, Homo Sapiens
agaugagagagaaaaauuaaagcuaaaauuag

SEQ ID NO: 28637 - RNA, 32 nt, Homo Sapiens
ccaucaccacuacuucugccacagccaucaca

SEQ ID NO: 28638 - RNA, 32 nt, Homo Sapiens
uggggaaggggaggguguucagaggcagcacc

SEQ ID NO: 28639 - RNA, 32 nt, Homo Sapiens
gaaauuucauuacaaugaagugccaaacucac

SEQ ID NO: 28640 - RNA, 32 nt, Homo Sapiens
aaggaagggaugcacaucaucacaccaucagc

SEQ ID NO: 28641 - RNA, 32 nt, Homo Sapiens
aagagccugucuuuuuauauccauuccuugau

SEQ ID NO: 28642 - RNA, 32 nt, Homo Sapiens
uuauccacauaaucaaagcuuaucuuuuuaag

SEQ ID NO: 28643 - RNA, 32 nt, Homo Sapiens
cuucugugcugggacagggacucugccucuug

SEQ ID NO: 28644 - RNA, 32 nt, Homo Sapiens
cucccccugcccgagcuccccccgucccaggg

SEQ ID NO: 28645 - RNA, 32 nt, Homo Sapiens
aucaccaaaaggaaaggacaaagccacacgca

SEQ ID NO: 28646 - RNA, 32 nt, Homo Sapiens
auuaaaagaacacaugccaaacaucauacuuc

SEQ ID NO: 28647 - RNA, 32 nt, Homo Sapiens
gauucuugcccccacuuucauaaaagaaacuu

SEQ ID NO: 28648 - RNA, 32 nt, Homo Sapiens
aagccaaugaacucauuaguuuuaaaaaccaa

SEQ ID NO: 28649 - RNA, 32 nt, Homo Sapiens
acuuugggaagacaaugugggagaauggcuug

SEQ ID NO: 28650 - RNA, 32 nt, Homo Sapiens
ggccgguccgcgacgacuccccggacggcguu

SEQ ID NO: 28651 - RNA, 32 nt, Homo Sapiens
gacauuguaagaggugguggggaccagcuaau

SEQ ID NO: 28652 - RNA, 32 nt, Homo Sapiens
uuaguccguggcggggagugccccggugcgca

SEQ ID NO: 28653 - RNA, 32 nt, Homo Sapiens
cuuaugagauaaugcaccuugaaggcgcagaa

SEQ ID NO: 28654 - RNA, 32 nt, Homo Sapiens
gggcgggcggagaggagagaguggcgcgcagu

SEQ ID NO: 28655 - RNA, 32 nt, Homo Sapiens
aaaaugugguuuuaauuggguugaugugcauu

SEQ ID NO: 28656 - RNA, 32 nt, Homo Sapiens
gauuauaucauuugaaaaaauugccuuccuug

SEQ ID NO: 28657 - RNA, 32 nt, Homo Sapiens
gacuuggaaaauuuggacagccauuugccauu

SEQ ID NO: 28658 - RNA, 32 nt, Homo Sapiens
cucaaugaaccaagaucagcuccaucacuggg

SEQ ID NO: 28659 - RNA, 32 nt, Homo Sapiens
caaaggcaaccuggggggugcaggcuggugca

SEQ ID NO: 28660 - RNA, 32 nt, Homo Sapiens
caaaauauuuauauuucaguuuuuuuauggua

SEQ ID NO: 28661 - RNA, 32 nt, Homo Sapiens
uggggaagggaaggaggcuuggaggaggugag

SEQ ID NO: 28662 - RNA, 32 nt, Homo Sapiens
aacuaacugccucaguaggaaugccaccuucc

SEQ ID NO: 28663 - RNA, 32 nt, Homo Sapiens
ucaaagaggucauaagaauuuauuuucuuuug

SEQ ID NO: 28664 - RNA, 32 nt, Homo Sapiens
uugugccaaugcaguaugacucacccuucacu

SEQ ID NO: 28665 - RNA, 32 nt, Homo Sapiens
ucuacuaaaaauacaaaauuaccugggcgugg

SEQ ID NO: 28666 - RNA, 32 nt, Homo Sapiens
uuaaaggaugggcaggggugcucgagaggucc

SEQ ID NO: 28667 - RNA, 32 nt, Homo Sapiens
cuugccgacgaugccuuccugugcagagcuug

SEQ ID NO: 28668 - RNA, 32 nt, Homo Sapiens
ccuguccuugaauuuaacagcaaccaacauau

SEQ ID NO: 28669 - RNA, 32 nt, Homo Sapiens
ccgccugggagccguccggcgcagcaguuucu

SEQ ID NO: 28670 - RNA, 32 nt, Homo Sapiens
gcuaaaacagagcccaggagccagggaggaaa

SEQ ID NO: 28671 - RNA, 32 nt, Homo Sapiens
uuuuugcacacuuuucccccaccuuaugcauu

SEQ ID NO: 28672 - RNA, 32 nt, Homo Sapiens
gaucauuuauauuugcagugccauccuuaagu

SEQ ID NO: 28673 - RNA, 32 nt, Homo Sapiens
ugugaggcuugacuugaucuggauuggggaug

SEQ ID NO: 28674 - RNA, 32 nt, Homo Sapiens
gagacagcaucucagauaccgaugcugaaaga

SEQ ID NO: 28675 - RNA, 32 nt, Homo Sapiens
ccaugucauuggccacauugaugacuacagug

SEQ ID NO: 28676 - RNA, 32 nt, Homo Sapiens
uucccacaccucugcaccuuguuaccugacuu

SEQ ID NO: 28677 - RNA, 32 nt, Homo Sapiens
ggccgcggcagagccuggagacgcgccucguu

SEQ ID NO: 28678 - RNA, 32 nt, Homo Sapiens
ugugcaauauuuuucuuuuuuauuucuccuuc

SEQ ID NO: 28679 - RNA, 32 nt, Homo Sapiens
acccagggggaccacacacacacacacacaca

SEQ ID NO: 28680 - RNA, 32 nt, Homo Sapiens
gcugaauaauaccucauuguauggauagacca

SEQ ID NO: 28681 - RNA, 32 nt, Homo Sapiens
auuugaaaauuugacaugaugcaaauagacug

SEQ ID NO: 28682 - RNA, 32 nt, Homo Sapiens
aacuugcuguguccagugcugcuugagugcua

SEQ ID NO: 28683 - RNA, 32 nt, Homo Sapiens
gugccauccucgucgcugcagcgacaccgcuc

SEQ ID NO: 28684 - RNA, 32 nt, Homo Sapiens
gaauucccuaucagcacagggaucucagcucu

SEQ ID NO: 28685 - RNA, 32 nt, Homo Sapiens
gauuuuaucccccaccaaaaacacagugaaag

SEQ ID NO: 28686 - RNA, 32 nt, Homo Sapiens
cgugcuugugcggcuuuccugcuggaguccau

SEQ ID NO: 28687 - RNA, 32 nt, Homo Sapiens
gaggggacaguuggucuuuuuaucuuuucuuu

SEQ ID NO: 28688 - RNA, 32 nt, Homo Sapiens
cuguugucaggagaagaagggggccugguauc

SEQ ID NO: 28689 - RNA, 32 nt, Homo Sapiens
aauaauauauauauuuauugaaggagagaauc

SEQ ID NO: 28690 - RNA, 32 nt, Homo Sapiens
uaagauuuuauuuggaaagguggcuggagaga

SEQ ID NO: 28691 - RNA, 32 nt, Homo Sapiens
ccaggggccaacuccuucuccucuuccugacc

SEQ ID NO: 28692 - RNA, 32 nt, Homo Sapiens
acaugcuguacgaaguacauguugacauguga

SEQ ID NO: 28693 - RNA, 32 nt, Homo Sapiens
aacccaggggagaggccaugcaggcucaggca

SEQ ID NO: 28694 - RNA, 30 nt, Homo Sapiens
uucucggccccccacccgccggcacgcacu

SEQ ID NO: 28695 - RNA, 32 nt, Homo Sapiens
aauguaugaagauagucacgaauguacugagu

SEQ ID NO: 28696 - RNA, 30 nt, Homo Sapiens
cuaguguggggcgaaucucacggaccugac

SEQ ID NO: 28697 - RNA, 32 nt, Homo Sapiens
ccugaggugugguggcucaugccuguaauccc

SEQ ID NO: 28698 - RNA, 32 nt, Homo Sapiens
guauuugccuucugaacuacguggauaauuuc

SEQ ID NO: 28699 - RNA, 32 nt, Homo Sapiens
augagcugcuuagggagggaauauauucaaag

SEQ ID NO: 28700 - RNA, 31 nt, Homo Sapiens
ccagagcuccacugccucccugcaccaugcc

SEQ ID NO: 28701 - RNA, 32 nt, Homo Sapiens
aaaucugggauuuaaaaucuuuagacaauauu

SEQ ID NO: 28702 - RNA, 32 nt, Homo Sapiens
guggggaggguggaggggcgacaauggaggga

SEQ ID NO: 28703 - RNA, 32 nt, Homo Sapiens
agcucccaaggcccgggcggcggggccguccc

SEQ ID NO: 28704 - RNA, 32 nt, Homo Sapiens
cgugcguaucacggccaccugagcucccugau

SEQ ID NO: 28705 - RNA, 32 nt, Homo Sapiens
gaggaggcugcccugaggggcuggggaggggg

SEQ ID NO: 28706 - RNA, 32 nt, Homo Sapiens
cccgcugaucucaggagaacaccugggcuagg

SEQ ID NO: 28707 - RNA, 32 nt, Homo Sapiens
aaaaauuuuuuggagaugcaucagcuaugaac

SEQ ID NO: 28708 - RNA, 32 nt, Homo Sapiens
ggcagcagucccagcucugguuuccuucucgg

SEQ ID NO: 28709 - RNA, 32 nt, Homo Sapiens
gugaagccccuccuuuugugaguauuuacugu

SEQ ID NO: 28710 - RNA, 32 nt, Homo Sapiens
uuuuaagugucuuuuuuuuuuuucuuggacca

SEQ ID NO: 28711 - RNA, 32 nt, Homo Sapiens
agaugaaagcuacuaaugaagaugcauuaaag

SEQ ID NO: 28712 - RNA, 32 nt, Homo Sapiens
aucuuggcccccagccccucgucgcggguuca

SEQ ID NO: 28713 - RNA, 32 nt, Homo Sapiens
ucuggagcugcugguuccuucugguggguucg

SEQ ID NO: 28714 - RNA, 32 nt, Homo Sapiens
uggacccuuuuuucuuuuucuuuuuuuuuuuu

SEQ ID NO: 28715 - RNA, 32 nt, Homo Sapiens
cucauaaaaccuaagcacuuggaaacacaaua

SEQ ID NO: 28716 - RNA, 32 nt, Homo Sapiens
cuuuccuggauuuuaaacuuuuguuaaauugu

SEQ ID NO: 28717 - RNA, 32 nt, Homo Sapiens
aggugaugaugaagguuauuauguauggguag

SEQ ID NO: 28718 - RNA, 32 nt, Homo Sapiens
cuccugucccaggacgucaucuccgggcccaa

SEQ ID NO: 28719 - RNA, 32 nt, Homo Sapiens
cagaagaggagaagcagaaagagugccaggac

SEQ ID NO: 28720 - RNA, 32 nt, Homo Sapiens
caccucuagcagcugcauguuccuguuucagc

SEQ ID NO: 28721 - RNA, 32 nt, Homo Sapiens
agaguuuggaggggcggguuuggggucggugu

SEQ ID NO: 28722 - RNA, 32 nt, Homo Sapiens
uuguuuuuaaugcuuugauauuucaauguuag

SEQ ID NO: 28723 - RNA, 32 nt, Homo Sapiens
gaguggggucugggauggagaauagaguacgu

SEQ ID NO: 28724 - RNA, 32 nt, Homo Sapiens
ccagccccuugugcuuccugggugaggcaaug

SEQ ID NO: 28725 - RNA, 32 nt, Homo Sapiens
gggggaucgcaauuaggagcaagcccccauuu

SEQ ID NO: 28726 - RNA, 32 nt, Homo Sapiens
aaaaugcaagcaagcauagaaaaaggugguuc

SEQ ID NO: 28727 - RNA, 32 nt, Homo Sapiens
aaaccuggguuuuguucauauuuucuccagac

SEQ ID NO: 28728 - RNA, 32 nt, Homo Sapiens
uuguucacaacacagaacaugagugcucuuuc

SEQ ID NO: 28729 - RNA, 32 nt, Homo Sapiens
uauuuugugccuucagacacugcaaauaauaa

SEQ ID NO: 28730 - RNA, 32 nt, Homo Sapiens
cgccuguaaccucagcacugugggaggccaag

SEQ ID NO: 28731 - RNA, 32 nt, Homo Sapiens
cagagcauuaaacaugggguauuguuaagaag

SEQ ID NO: 28732 - RNA, 32 nt, Homo Sapiens
ggggagaaauuuucaaagaaaaacgagggaaa

SEQ ID NO: 28733 - RNA, 32 nt, Homo Sapiens
uauugggaaugaauuccugggacaaacggagg

SEQ ID NO: 28734 - RNA, 32 nt, Homo Sapiens
acagauucacuacucuuacugauucuucacug

SEQ ID NO: 28735 - RNA, 32 nt, Homo Sapiens
aggggcugcuggagcaggcugggggcugcauu

SEQ ID NO: 28736 - RNA, 32 nt, Homo Sapiens
uucuuucuguuguuguuucccagcuacaacca

SEQ ID NO: 28737 - RNA, 32 nt, Homo Sapiens
ccuuugaagaucuguccauauucaggaaucug

SEQ ID NO: 28738 - RNA, 32 nt, Homo Sapiens
ccccaccucugagcaccccccucccccucccu

SEQ ID NO: 28739 - RNA, 29 nt, Homo Sapiens
cauauuguugauaaaugaaagcugaauug

SEQ ID NO: 28740 - RNA, 32 nt, Homo Sapiens
aggccuguucugaguagggagacgccagagga

SEQ ID NO: 28741 - RNA, 32 nt, Homo Sapiens
ccuaaaauaagacuuuuuugacuauucuaaau

SEQ ID NO: 28742 - RNA, 30 nt, Homo Sapiens
ggcucggagaagcuuuacagagugccaggg

SEQ ID NO: 28743 - RNA, 32 nt, Homo Sapiens
cucuugcaguuuccucucccagcgccucgggg

SEQ ID NO: 28744 - RNA, 30 nt, Homo Sapiens
gcaccgccacuugccuccacaccuuugucc

SEQ ID NO: 28745 - RNA, 32 nt, Homo Sapiens
gaauugauuccaauauaaaaccaaaugaaaua

SEQ ID NO: 28746 - RNA, 32 nt, Homo Sapiens
ucacuguggucuauuggagauuuuggaaacuu

SEQ ID NO: 28747 - RNA, 32 nt, Homo Sapiens
uuaauccaugcccuccucucucccucccugcu

SEQ ID NO: 28748 - RNA, 32 nt, Homo Sapiens
gagccgaggcgggugauuuauuuggcauaaaa

SEQ ID NO: 28749 - RNA, 32 nt, Homo Sapiens
uaccaaaauuuauuuaaagugcuuguuuagaa

SEQ ID NO: 28750 - RNA, 32 nt, Homo Sapiens
aagguuucugggaguaguuuugucuauauuua

SEQ ID NO: 28751 - RNA, 32 nt, Homo Sapiens
ggccucgcuggcucagacguggcuguggugcc

SEQ ID NO: 28752 - RNA, 32 nt, Homo Sapiens
gccugccugguggcugcccuggaguuguggug

SEQ ID NO: 28753 - RNA, 32 nt, Homo Sapiens
ggccagaagcagagacggcggcuggggaugaa

SEQ ID NO: 28754 - RNA, 32 nt, Homo Sapiens
ggacuaacggaccugaguucccggcccuaucu

SEQ ID NO: 28755 - RNA, 32 nt, Homo Sapiens
acucggggcuguccauagcggcugggaccccg

SEQ ID NO: 28756 - RNA, 32 nt, Homo Sapiens
ccugucagcccaagcagagugauucaggggcu

SEQ ID NO: 28757 - RNA, 32 nt, Homo Sapiens
uugaggucaagaguuugagaccagccugacca

SEQ ID NO: 28758 - RNA, 32 nt, Homo Sapiens
ccucuuucuccccagagcccccggcccaggcc

SEQ ID NO: 28759 - RNA, 32 nt, Homo Sapiens
uuauuuucauuggaucuguugcuggagaauua

SEQ ID NO: 28760 - RNA, 32 nt, Homo Sapiens
cuguauuugcaacuauggauuuguagggaacg

SEQ ID NO: 28761 - RNA, 32 nt, Homo Sapiens
cagauuuguaaaaauuguauuuguuaacacug

SEQ ID NO: 28762 - RNA, 32 nt, Homo Sapiens
cgagcccggcggcggagaugggggcgacgggg

SEQ ID NO: 28763 - RNA, 32 nt, Homo Sapiens
cugaacugcccccagcacuuccgagccccgac

SEQ ID NO: 28764 - RNA, 32 nt, Homo Sapiens
gggacccccacuuccuucucggaucucagggc

SEQ ID NO: 28765 - RNA, 32 nt, Homo Sapiens
guggcgcagggccggggcugagccucccguug

SEQ ID NO: 28766 - RNA, 32 nt, Homo Sapiens
gaugaggcgggugguggacggcugggcugucg

SEQ ID NO: 28767 - RNA, 32 nt, Homo Sapiens
cacacaguucccuagcacccugcaggugaaua

SEQ ID NO: 28768 - RNA, 30 nt, Homo Sapiens
cggcugugacccuccucgccggcgccgcuu

SEQ ID NO: 28769 - RNA, 27 nt, Homo Sapiens
uuccuuccuuccuccagcccccagcaa

SEQ ID NO: 28770 - RNA, 32 nt, Homo Sapiens
cucccacugaaaccaaggucuuuucaaaugug

SEQ ID NO: 28771 - RNA, 32 nt, Homo Sapiens
uauggucuauccuggagaauguuccauguguu

SEQ ID NO: 28772 - RNA, 32 nt, Homo Sapiens
auuggagacauuagccacuagguuuaacagug

SEQ ID NO: 28773 - RNA, 32 nt, Homo Sapiens
agcauuauuucuggacucucuguuauguucca

SEQ ID NO: 28774 - RNA, 32 nt, Homo Sapiens
gugccgcgcgccgaucggucguuaccgcgagg

SEQ ID NO: 28775 - RNA, 32 nt, Homo Sapiens
gggcagccaccgucuccagagcccugggcagc

SEQ ID NO: 28776 - RNA, 32 nt, Homo Sapiens
cauccgcgggugccggaucuggaccuaggugc

SEQ ID NO: 28777 - RNA, 32 nt, Homo Sapiens
cucccaacgccucugcucgaggagagcggcgg

SEQ ID NO: 28778 - RNA, 32 nt, Homo Sapiens
uguagucgccugggccgcccccggcccagccc

SEQ ID NO: 28779 - RNA, 32 nt, Homo Sapiens
acaaauaaacauuccuuuuccugcgugaagau

SEQ ID NO: 28780 - RNA, 32 nt, Homo Sapiens
cggccacuuccugguccccgacgcaaccaugg

SEQ ID NO: 28781 - RNA, 30 nt, Homo Sapiens
acggcuggaggugggauccacacagcucag

SEQ ID NO: 28782 - RNA, 32 nt, Homo Sapiens
gaagcagugccuuccauaauuaugacaguuau

SEQ ID NO: 28783 - RNA, 32 nt, Homo Sapiens
cgagcuguagcgggcauaggcgaagccgcggu

SEQ ID NO: 28784 - RNA, 32 nt, Homo Sapiens
auguggaggcggccagcgugugcauggggcag

SEQ ID NO: 28785 - RNA, 32 nt, Homo Sapiens
cauggucugugagugugugagaugaacccuuc

SEQ ID NO: 28786 - RNA, 32 nt, Homo Sapiens
cauggcagacagcgaggcgaagagggaaggaa

SEQ ID NO: 28787 - RNA, 32 nt, Homo Sapiens
cgcgcgcgcacagacacacacacacacacaca

SEQ ID NO: 28788 - RNA, 32 nt, Homo Sapiens
ccaguaguucauucuaaugccuagauucuuuu

SEQ ID NO: 28789 - RNA, 32 nt, Homo Sapiens
agcucagacuuggggagggagggguguggcuc

SEQ ID NO: 28790 - RNA, 32 nt, Homo Sapiens
gccaggccgacugcagcagcuccagcuuccag

SEQ ID NO: 28791 - RNA, 32 nt, Homo Sapiens
aauuuuaaaaauuuacuguguuuggcuuucug

SEQ ID NO: 28792 - RNA, 32 nt, Homo Sapiens
aacacauggaucucucuggcuuucucacccaa

SEQ ID NO: 28793 - RNA, 28 nt, Homo Sapiens
uuucgaguuguuaggauguguuuuguac

SEQ ID NO: 28794 - RNA, 32 nt, Homo Sapiens
auuggcacaguaauguaauuauagagcggauu

SEQ ID NO: 28795 - RNA, 32 nt, Homo Sapiens
guaugcugacuucagcagacaaagacuuuuga

SEQ ID NO: 28796 - RNA, 32 nt, Homo Sapiens
uugacucauuucuccuucgccagcucuuuccu

SEQ ID NO: 28797 - RNA, 32 nt, Homo Sapiens
cuuuugguggauuucccaggaugcgugagcac

SEQ ID NO: 28798 - RNA, 32 nt, Homo Sapiens
caagggcuccacgagggaguccugaguacugg

SEQ ID NO: 28799 - RNA, 32 nt, Homo Sapiens
uucuuguuauuaccaaacaggaggggaaaaaa

SEQ ID NO: 28800 - RNA, 32 nt, Homo Sapiens
acguuaauaaaauuauauuuguaauuaggaaa

SEQ ID NO: 28801 - RNA, 32 nt, Homo Sapiens
acugcaagcccuugccucuccucccuugccuu

SEQ ID NO: 28802 - RNA, 32 nt, Homo Sapiens
accacacagaaugucauuucugaugaaagcug

SEQ ID NO: 28803 - RNA, 32 nt, Homo Sapiens
aguagugcuuuccaguucagacucuaacuucu

SEQ ID NO: 28804 - RNA, 32 nt, Homo Sapiens
gccuggccagcauggugaaaaccuaucucuac

SEQ ID NO: 28805 - RNA, 32 nt, Homo Sapiens
guggaagcuccgugagaccagauauuuugcug

SEQ ID NO: 28806 - RNA, 32 nt, Homo Sapiens
aaacuuugccgcuccuuccgcggcgcucccga

SEQ ID NO: 28807 - RNA, 32 nt, Homo Sapiens
auuuuuuccccucuauucaucaaaccuuuaug

SEQ ID NO: 28808 - RNA, 32 nt, Homo Sapiens
agugggacaaguacaccauccgcuacacccgc

SEQ ID NO: 28809 - RNA, 32 nt, Homo Sapiens
caaggaauuuaucucaacauuauucuuucuau

SEQ ID NO: 28810 - RNA, 32 nt, Homo Sapiens
aauguacuuuugauuuucuugaguuuagauga

SEQ ID NO: 28811 - RNA, 32 nt, Homo Sapiens
auaacuguaauauauagauucagaaauacauu

SEQ ID NO: 28812 - RNA, 32 nt, Homo Sapiens
gccggggccaccccggcccaggacgggaugcg

SEQ ID NO: 28813 - RNA, 32 nt, Homo Sapiens
cugggcagagaaaaaauaaaguggaauauuaa

SEQ ID NO: 28814 - RNA, 32 nt, Homo Sapiens
aaccaugcagcuuuugaggaagaaagaaccau

SEQ ID NO: 28815 - RNA, 32 nt, Homo Sapiens
ucccccagacugcucgucuaucaccaggaucg

SEQ ID NO: 28816 - RNA, 32 nt, Homo Sapiens
ucaaugggaaguuuuucuuucuuuuagauauu

SEQ ID NO: 28817 - RNA, 32 nt, Homo Sapiens
acgggggcugcggggggcgacacuaaagccug

SEQ ID NO: 28818 - RNA, 32 nt, Homo Sapiens
cuaacaaauggcuaguuuucuaugauucuucu

SEQ ID NO: 28819 - RNA, 32 nt, Homo Sapiens
ugccugcugcagucggagcugguaaacuacga

SEQ ID NO: 28820 - RNA, 32 nt, Homo Sapiens
ccccaucuccucauccucccccagcccuugaa

SEQ ID NO: 28821 - RNA, 32 nt, Homo Sapiens
acaucuggaaaaccuccggcucucuguggugg

SEQ ID NO: 28822 - RNA, 32 nt, Homo Sapiens
uaaagcaugugauucuccuguuuuugcuggau

SEQ ID NO: 28823 - RNA, 32 nt, Homo Sapiens
aggccgcccgcuccccgcagguggacgcggcc

SEQ ID NO: 28824 - RNA, 32 nt, Homo Sapiens
ccaugccgggccccgggcggccugcagcgagc

SEQ ID NO: 28825 - RNA, 32 nt, Homo Sapiens
cgcucugcaucccucacccaugccuccuaacu

SEQ ID NO: 28826 - RNA, 32 nt, Homo Sapiens
uacauuauguggaaaacuuaugcugauuuauu

SEQ ID NO: 28827 - RNA, 32 nt, Homo Sapiens
cuggaugaaaauagaugucaacaaggagggaa

SEQ ID NO: 28828 - RNA, 32 nt, Homo Sapiens
uaguacugugccgcuucccccuccccccacac

SEQ ID NO: 28829 - RNA, 32 nt, Homo Sapiens
cuuaauguuucccccacuaucaugcuagccca

SEQ ID NO: 28830 - RNA, 32 nt, Homo Sapiens
auguuauuguauccuuugaauuucgaccuuua

SEQ ID NO: 28831 - RNA, 32 nt, Homo Sapiens
uucaccuggugucuugaguagggcgucuccug

SEQ ID NO: 28832 - RNA, 32 nt, Homo Sapiens
ggacugcgccgcccggacggccugcagagcgc

SEQ ID NO: 28833 - RNA, 32 nt, Homo Sapiens
cuccucagccccaccuccuccuccuccuuaua

SEQ ID NO: 28834 - RNA, 32 nt, Homo Sapiens
agaugccccucugagccuuccuccccccucag

SEQ ID NO: 28835 - RNA, 32 nt, Homo Sapiens
acuugucuccaauucauaagggcuugcagccc

SEQ ID NO: 28836 - RNA, 32 nt, Homo Sapiens
cucugguugucaguuucccuggagaaggcgcc

SEQ ID NO: 28837 - RNA, 28 nt, Homo Sapiens
gugugaguggcuaucguaauagauaaca

SEQ ID NO: 28838 - RNA, 32 nt, Homo Sapiens
caagggguuagaagcugacuguaaaaauggga

SEQ ID NO: 28839 - RNA, 32 nt, Homo Sapiens
ugccguccuugacucuuucccaucuucaguuc

SEQ ID NO: 28840 - RNA, 32 nt, Homo Sapiens
uuucuccuggggaauugugauccucucuagaa

SEQ ID NO: 28841 - RNA, 32 nt, Homo Sapiens
cagcugacggcaguaaauccacagugaguugg

SEQ ID NO: 28842 - RNA, 32 nt, Homo Sapiens
augcuguagucacuuaucaucuuuucaaaggg

SEQ ID NO: 28843 - RNA, 32 nt, Homo Sapiens
uaggaaggagaugcccagguucagguguaucg

SEQ ID NO: 28844 - RNA, 32 nt, Homo Sapiens
aguccgcuggguccuacgcgaccgcugacccg

SEQ ID NO: 28845 - RNA, 32 nt, Homo Sapiens
ggaggcacagaaaacuccugcugauggucuca

SEQ ID NO: 28846 - RNA, 32 nt, Homo Sapiens
gaaauguuacagcauauuuuaagcaacucuuu

SEQ ID NO: 28847 - RNA, 32 nt, Homo Sapiens
ccauauggccauguccagcaucagauggggaa

SEQ ID NO: 28848 - RNA, 32 nt, Homo Sapiens
cuagcgcaggccccacggggccccuucagggg

SEQ ID NO: 28849 - RNA, 32 nt, Homo Sapiens
aaaguuggagcuccuuuaaucuuuuuaaagga

SEQ ID NO: 28850 - RNA, 32 nt, Homo Sapiens
gaggacaggaggaaagugaggacagguggugu

SEQ ID NO: 28851 - RNA, 32 nt, Homo Sapiens
cacaggcuggguguucccagcagcccuggcuu

SEQ ID NO: 28852 - RNA, 32 nt, Homo Sapiens
uuagaaaauagugcaagguagaauuaauauau

SEQ ID NO: 28853 - RNA, 32 nt, Homo Sapiens
cccucgaguucuucucagucaagcugcaugua

SEQ ID NO: 28854 - RNA, 32 nt, Homo Sapiens
agcaaccugccagcuacaggagcccccugcgu

SEQ ID NO: 28855 - RNA, 32 nt, Homo Sapiens
ucagacuggcagaaauccaaagguuugauaac

SEQ ID NO: 28856 - RNA, 32 nt, Homo Sapiens
cuuucccacagacacagcacaaaugcuaggcc

SEQ ID NO: 28857 - RNA, 32 nt, Homo Sapiens
aaggcuucaaggaauuuaucucaacauuauuc

SEQ ID NO: 28858 - RNA, 32 nt, Homo Sapiens
gccggagcugaaacacgacgugaaggaaacuu

SEQ ID NO: 28859 - RNA, 32 nt, Homo Sapiens
cguuggaaggaaagauggaucuucuuacaugc

SEQ ID NO: 28860 - RNA, 32 nt, Homo Sapiens
uuuauucuaaucuauuguuaaguauugugcac

SEQ ID NO: 28861 - RNA, 32 nt, Homo Sapiens
uaagggccaucgauuguuucuuucucgccugu

SEQ ID NO: 28862 - RNA, 32 nt, Homo Sapiens
cccccagccaccagcccucauccucucuaccc

SEQ ID NO: 28863 - RNA, 32 nt, Homo Sapiens
auugagugaucuuuacauuugauuccagaggc

SEQ ID NO: 28864 - RNA, 32 nt, Homo Sapiens
ccagggagcugagcgcaccgcgcgcauccggc

SEQ ID NO: 28865 - RNA, 32 nt, Homo Sapiens
auguggcuuaauauuuuaauucuuagaaugug

SEQ ID NO: 28866 - RNA, 32 nt, Homo Sapiens
uaccuaauccccacccgacucuugcucugagu

SEQ ID NO: 28867 - RNA, 32 nt, Homo Sapiens
ccagccccggggccccgauguugugacuguga

SEQ ID NO: 28868 - RNA, 32 nt, Homo Sapiens
ugggcuuugcagagcaggccccgggggugaag

SEQ ID NO: 28869 - RNA, 29 nt, Homo Sapiens
cacuggugacauuucaguuuacacaucgc

SEQ ID NO: 28870 - RNA, 32 nt, Homo Sapiens
cccacuguuaggauggcaugaacauuuccuua

SEQ ID NO: 28871 - RNA, 32 nt, Homo Sapiens
cuucccucuaagcagcccaaacgugcagaaug

SEQ ID NO: 28872 - RNA, 32 nt, Homo Sapiens
ugcccacugcugucacuucaagccacuggcaa

SEQ ID NO: 28873 - RNA, 32 nt, Homo Sapiens
cuagggcagagccaaugcugagggagccucga

SEQ ID NO: 28874 - RNA, 32 nt, Homo Sapiens
agugacauggccucuggguggggucuggccgu

SEQ ID NO: 28875 - RNA, 32 nt, Homo Sapiens
uuccaaaaauaugaaaacuuguccuaugagau

SEQ ID NO: 28876 - RNA, 32 nt, Homo Sapiens
ugaggagccgcccugaccgcccggccccgcuc

SEQ ID NO: 28877 - RNA, 32 nt, Homo Sapiens
aagccucccagaaccagcccugucccaugggu

SEQ ID NO: 28878 - RNA, 32 nt, Homo Sapiens
uguaauccauucucuugcaccuucuucuucuu

SEQ ID NO: 28879 - RNA, 32 nt, Homo Sapiens
cccagcgcccaggcgugucgcccgagaggagc

SEQ ID NO: 28880 - RNA, 32 nt, Homo Sapiens
cuuagaaaaaaguaauaugaaguauucugaaa

SEQ ID NO: 28881 - RNA, 31 nt, Homo Sapiens
ggagagcugccgggaguuccccgggagcgcu

SEQ ID NO: 28882 - RNA, 32 nt, Homo Sapiens
cuucggcccggccgccgccgcacauaaacugc

SEQ ID NO: 28883 - RNA, 32 nt, Homo Sapiens
ccuucgcgcuccugagccgccggcgcgccggg

SEQ ID NO: 28884 - RNA, 32 nt, Homo Sapiens
auaaugagauugggaauuaugauucagccauu

SEQ ID NO: 28885 - RNA, 32 nt, Homo Sapiens
acaguaaguuaaauuucagcauaucaguuuua

SEQ ID NO: 28886 - RNA, 32 nt, Homo Sapiens
uuuauacacuacauuucuuuuuuauuauuaug

SEQ ID NO: 28887 - RNA, 32 nt, Homo Sapiens
agcaguagccaccuuagcacgaacauaggguu

SEQ ID NO: 28888 - RNA, 32 nt, Homo Sapiens
cggucugcgcggggcggccauuggcggcggag

SEQ ID NO: 28889 - RNA, 32 nt, Homo Sapiens
guccgggggacugaggcccaccagcgccuccg

SEQ ID NO: 28890 - RNA, 32 nt, Homo Sapiens
gaaagcaggauacaaaauuacaugacacauag

SEQ ID NO: 28891 - RNA, 32 nt, Homo Sapiens
uaaaggcucagggaccggcaguucuacucuag

SEQ ID NO: 28892 - RNA, 32 nt, Homo Sapiens
ugauguacaugaugaugaaagacaucuuuccc

SEQ ID NO: 28893 - RNA, 32 nt, Homo Sapiens
ggcaggauccaggcacagcuccccucacuugg

SEQ ID NO: 28894 - RNA, 32 nt, Homo Sapiens
acggggucaggagaucgagacuuuccuggcua

SEQ ID NO: 28895 - RNA, 32 nt, Homo Sapiens
guuagcauguuuaaagauauuccucuuccaaa

SEQ ID NO: 28896 - RNA, 32 nt, Homo Sapiens
ggggguggugccuucgugugccuaguguacaa

SEQ ID NO: 28897 - RNA, 32 nt, Homo Sapiens
ccaccucaccagccaauaacaagaaggaaguc

SEQ ID NO: 28898 - RNA, 32 nt, Homo Sapiens
ggccacacacuugcauggauagaaaaccaaug

SEQ ID NO: 28899 - RNA, 32 nt, Homo Sapiens
ggucagggugacugaggcauuuuguggccuua

SEQ ID NO: 28900 - RNA, 32 nt, Homo Sapiens
accuguacaggugccagcugcugcuuugauga

SEQ ID NO: 28901 - RNA, 29 nt, Homo Sapiens
agucaauaaaguuuaugccaguuuaaaaa

SEQ ID NO: 28902 - RNA, 32 nt, Homo Sapiens
uuccugaugaugucucuuccuuccaguuuuau

SEQ ID NO: 28903 - RNA, 32 nt, Homo Sapiens
acccgucugguuuuugaguuuggacaagcucc

SEQ ID NO: 28904 - RNA, 32 nt, Homo Sapiens
ccugcugggcauguuucaucuguccccuuuua

SEQ ID NO: 28905 - RNA, 32 nt, Homo Sapiens
ggaguuugcaacccucguguccugcuguccug

SEQ ID NO: 28906 - RNA, 32 nt, Homo Sapiens
aauuagccgggcgugguagcgggcgccuguag

SEQ ID NO: 28907 - RNA, 32 nt, Homo Sapiens
ucggccugcggaagaggcgagggcaagaagcc

SEQ ID NO: 28908 - RNA, 32 nt, Homo Sapiens
uuguuucucacaugcauacuacauugguuuug

SEQ ID NO: 28909 - RNA, 32 nt, Homo Sapiens
agaaguucucaaguucugauugaguucuaaaa

SEQ ID NO: 28910 - RNA, 32 nt, Homo Sapiens
augcuucuucccuuucagcccuuccacuccca

SEQ ID NO: 28911 - RNA, 32 nt, Homo Sapiens
ccuccccacugauaggaagguccuagcugccg

SEQ ID NO: 28912 - RNA, 32 nt, Homo Sapiens
cuuuccucacacuuuuguagucucucuuuaca

SEQ ID NO: 28913 - RNA, 32 nt, Homo Sapiens
ccuguugauggcaaaaucaggaccaagcuucu

SEQ ID NO: 28914 - RNA, 32 nt, Homo Sapiens
gucagcaucuguacaaaugcauuuuauuugcu

SEQ ID NO: 28915 - RNA, 32 nt, Homo Sapiens
ccaugacgacuggaagacagcaugguggucac

SEQ ID NO: 28916 - RNA, 32 nt, Homo Sapiens
guugccagcuucuauuugaagauugccuuugc

SEQ ID NO: 28917 - RNA, 32 nt, Homo Sapiens
uugggggaucauaauucaacccaugacagcca

SEQ ID NO: 28918 - RNA, 32 nt, Homo Sapiens
cccuuugccuccugcagaacuuugaaaagcug

SEQ ID NO: 28919 - RNA, 32 nt, Homo Sapiens
gaggauuucucucuccuuccuccuccuuucuu

SEQ ID NO: 28920 - RNA, 32 nt, Homo Sapiens
cuugaagguauaucuagguuuaugacaguaau

SEQ ID NO: 28921 - RNA, 32 nt, Homo Sapiens
uauauaaacaauuguaaauuucuuuuagccca

SEQ ID NO: 28922 - RNA, 32 nt, Homo Sapiens
caaguuccgcagccuggcauggcuucugggga

SEQ ID NO: 28923 - RNA, 32 nt, Homo Sapiens
agaggccucucucugcccuuugacuggaaagg

SEQ ID NO: 28924 - RNA, 32 nt, Homo Sapiens
gagcgucgcauucacccgcgugggucugcggg

SEQ ID NO: 28925 - RNA, 32 nt, Homo Sapiens
ccgcgaagccgccgcgcagagcucgccuggcg

SEQ ID NO: 28926 - RNA, 32 nt, Homo Sapiens
uaaaguacuguaacuuuaaaauaaauaacuac

SEQ ID NO: 28927 - RNA, 32 nt, Homo Sapiens
cccucgcugugcccggcccuccucaucuggcc

SEQ ID NO: 28928 - RNA, 32 nt, Homo Sapiens
agcugcguagcucccggccccgcggccaugcc

SEQ ID NO: 28929 - RNA, 32 nt, Homo Sapiens
uuaaauuuguauggcacuggaacuuuggcaaa

SEQ ID NO: 28930 - RNA, 32 nt, Homo Sapiens
ucagaucugccccacaccuucgaauccauggu

SEQ ID NO: 28931 - RNA, 32 nt, Homo Sapiens
cuguuuuugugauguuagcacucuggauacuc

SEQ ID NO: 28932 - RNA, 32 nt, Homo Sapiens
uuguauuucuaguagaguuagaguuucuccau

SEQ ID NO: 28933 - RNA, 32 nt, Homo Sapiens
gcugcgcgccgggaaccucgcggggcuggcgg

SEQ ID NO: 28934 - RNA, 32 nt, Homo Sapiens
uguuuacucuuauuuaauuauuacaauaaaca

SEQ ID NO: 28935 - RNA, 32 nt, Homo Sapiens
ccucugcagauuuuccugaacuucugcuaacu

SEQ ID NO: 28936 - RNA, 32 nt, Homo Sapiens
uauaugacauauaccuaggagcuguggaugua

SEQ ID NO: 28937 - RNA, 32 nt, Homo Sapiens
aaaaagaaaaagaaaacauuucuaauuacugc

SEQ ID NO: 28938 - RNA, 32 nt, Homo Sapiens
gcucacuaauguaucuguggugccuagaccag

SEQ ID NO: 28939 - RNA, 32 nt, Homo Sapiens
auuaauuuuuugcugacagauccuuucucucu

SEQ ID NO: 28940 - RNA, 32 nt, Homo Sapiens
gagggaaggggagaugugugcaacaccuucca

SEQ ID NO: 28941 - RNA, 32 nt, Homo Sapiens
cauagcagacuuucccaaauguauugauuaca

SEQ ID NO: 28942 - RNA, 32 nt, Homo Sapiens
uagggagacgcgcauaucauggcugcaagcuc

SEQ ID NO: 28943 - RNA, 32 nt, Homo Sapiens
ucaccuucccccuagguuuuuaagaaggaagc

SEQ ID NO: 28944 - RNA, 32 nt, Homo Sapiens
gguuuguuugcuugcuuguuuacuugcuuguu

SEQ ID NO: 28945 - RNA, 32 nt, Homo Sapiens
gggucguggcgcccaucccuccccuguucugc

SEQ ID NO: 28946 - RNA, 32 nt, Homo Sapiens
guaacgacaaugacaaugaugauuacuuauga

SEQ ID NO: 28947 - RNA, 32 nt, Homo Sapiens
aaguauagcuuuguaauuuaaauuggagcuuu

SEQ ID NO: 28948 - RNA, 32 nt, Homo Sapiens
uauucuguugggaucugggcuuccucacuucu

SEQ ID NO: 28949 - RNA, 32 nt, Homo Sapiens
ccauggugcccaucguguuacuccauugucag

SEQ ID NO: 28950 - RNA, 32 nt, Homo Sapiens
uuuuuauucuugggauagaaaaauaguaugug

SEQ ID NO: 28951 - RNA, 32 nt, Homo Sapiens
uugagaacuuaaaaagugaacauugaaacauc

SEQ ID NO: 28952 - RNA, 32 nt, Homo Sapiens
gcaggauucucagcaggcauggccgugggugc

SEQ ID NO: 28953 - RNA, 32 nt, Homo Sapiens
acuuaugauuguauaugaaccacagagaagcc

SEQ ID NO: 28954 - RNA, 32 nt, Homo Sapiens
agcucagaugauuguggaaacugagaagugca

SEQ ID NO: 28955 - RNA, 32 nt, Homo Sapiens
caggacagccagcaggucccaugcuaugcacu

SEQ ID NO: 28956 - RNA, 32 nt, Homo Sapiens
cauauuccaaaaagcagugguuuucaaauacu

SEQ ID NO: 28957 - RNA, 32 nt, Homo Sapiens
gccucuggacagagucagaaugagggaauaau

SEQ ID NO: 28958 - RNA, 32 nt, Homo Sapiens
auuuaugauucguagguuuucuuauaugauuu

SEQ ID NO: 28959 - RNA, 32 nt, Homo Sapiens
uuccucuacccggccucccaaacaccacccca

SEQ ID NO: 28960 - RNA, 32 nt, Homo Sapiens
uuaaugcagggacuguaaaaccaccuuuucug

SEQ ID NO: 28961 - RNA, 32 nt, Homo Sapiens
gagcgcccggcccgaccccggccauggggugc

SEQ ID NO: 28962 - RNA, 32 nt, Homo Sapiens
cagcagccugacgcacgcgugcugucggggga

SEQ ID NO: 28963 - RNA, 32 nt, Homo Sapiens
aauuuccuaacaaacaaacaaacaaacaaaca

SEQ ID NO: 28964 - RNA, 32 nt, Homo Sapiens
cuccgucuguuuucccucagggcccccuucuu

SEQ ID NO: 28965 - RNA, 32 nt, Homo Sapiens
cagucuuggaauacagaagagaaacuagaaau

SEQ ID NO: 28966 - RNA, 32 nt, Homo Sapiens
aaaucuauucuaacgcaaaaccacuaacugaa

SEQ ID NO: 28967 - RNA, 32 nt, Homo Sapiens
auuaaauuccucccgaguucauucugcuuccu

SEQ ID NO: 28968 - RNA, 32 nt, Homo Sapiens
agcgugccgcaucgccgagauccagcgcccag

SEQ ID NO: 28969 - RNA, 32 nt, Homo Sapiens
acugcagccaccuuuagugauacuuuuaaaaa

SEQ ID NO: 28970 - RNA, 32 nt, Homo Sapiens
aaggggugaaagauguaauuauugacagauua

SEQ ID NO: 28971 - RNA, 32 nt, Homo Sapiens
caggugugguggcucaugccugcaaucccagc

SEQ ID NO: 28972 - RNA, 32 nt, Homo Sapiens
ugggauucccuggccugcgccagcugcguaca

SEQ ID NO: 28973 - RNA, 32 nt, Homo Sapiens
uaaucauaaauacugcuguauaagguaauaaa

SEQ ID NO: 28974 - RNA, 32 nt, Homo Sapiens
acuugcugcucaggagguauugagaucaauga

SEQ ID NO: 28975 - RNA, 32 nt, Homo Sapiens
gguucuuuuuaaaaacuuuguuugguuugguu

SEQ ID NO: 28976 - RNA, 29 nt, Homo Sapiens
uaaauguaaaguuugaccuuuuuaaaacg

SEQ ID NO: 28977 - RNA, 32 nt, Homo Sapiens
cugggcccuccuucagcccccaucaugggaau

SEQ ID NO: 28978 - RNA, 32 nt, Homo Sapiens
gacauuuguuagucggagugaugcaucccuac

SEQ ID NO: 28979 - RNA, 32 nt, Homo Sapiens
ucccagguucaagcgauucuucugccucagcc

SEQ ID NO: 28980 - RNA, 32 nt, Homo Sapiens
ucucagguucaagcgauuuuucugccucagcc

SEQ ID NO: 28981 - RNA, 32 nt, Homo Sapiens
uucagccuuguacuguguauauauauuaaaaa

SEQ ID NO: 28982 - RNA, 32 nt, Homo Sapiens
ugcauaucaagaaaaucaggggcugcuccuug

SEQ ID NO: 28983 - RNA, 32 nt, Homo Sapiens
cugccauuucugauagggucuaccacaucugu

SEQ ID NO: 28984 - RNA, 32 nt, Homo Sapiens
agaagaugaugaugaugaauaguugguucuag

SEQ ID NO: 28985 - RNA, 32 nt, Homo Sapiens
agcagucagggugauuuaguugcuuuuuucau

SEQ ID NO: 28986 - RNA, 32 nt, Homo Sapiens
cuuucucuuggggugauuucugauguuuuuac

SEQ ID NO: 28987 - RNA, 32 nt, Homo Sapiens
cuaacagaacuaaaaucuaucagaaaggcaau

SEQ ID NO: 28988 - RNA, 32 nt, Homo Sapiens
gcaggcugcccccugccggccacaagggagca

SEQ ID NO: 28989 - RNA, 32 nt, Homo Sapiens
agcuuuuaaaagacacuaaauuguacucuaaa

SEQ ID NO: 28990 - RNA, 32 nt, Homo Sapiens
uacacccugugauaguauucuuacuauucuag

SEQ ID NO: 28991 - RNA, 32 nt, Homo Sapiens
acacauuuucuuuucacccuaaucuauuuaga

SEQ ID NO: 28992 - RNA, 32 nt, Homo Sapiens
ucccgugagucuccaggucuccagccagaucc

SEQ ID NO: 28993 - RNA, 32 nt, Homo Sapiens
uuugaugaugcuuuuucuugaugcuaagauca

SEQ ID NO: 28994 - RNA, 32 nt, Homo Sapiens
auuuagaaguuccaauugcccugcuaaggagg

SEQ ID NO: 28995 - RNA, 32 nt, Homo Sapiens
aauacucucccucagcuccaggguaccauaua

SEQ ID NO: 28996 - RNA, 32 nt, Homo Sapiens
ccucccgcuccagcccggcucauuccgcacau

SEQ ID NO: 28997 - RNA, 32 nt, Homo Sapiens
aggcugugcgucugcuucuggagcacgaggcu

SEQ ID NO: 28998 - RNA, 32 nt, Homo Sapiens
acauagcauguccuccuccccucagcuuugcu

SEQ ID NO: 28999 - RNA, 32 nt, Homo Sapiens
agaacuuucugcaguuuuugacuucauagauu

SEQ ID NO: 29000 - RNA, 32 nt, Homo Sapiens
gcuuuccgaggucaaagcacucccggggcuug

SEQ ID NO: 29001 - RNA, 32 nt, Homo Sapiens
uucccauggugucccccaaucacuuaggaauu

SEQ ID NO: 29002 - RNA, 32 nt, Homo Sapiens
cagaggggugcgcagagcugacccccugcugc

SEQ ID NO: 29003 - RNA, 32 nt, Homo Sapiens
uuaauagauaucuauuucuguuacauuuuauu

SEQ ID NO: 29004 - RNA, 32 nt, Homo Sapiens
gucagguggaggaucccuuucccucccgcccu

SEQ ID NO: 29005 - RNA, 32 nt, Homo Sapiens
uucauuguguguguacaccauguuucaugcau

SEQ ID NO: 29006 - RNA, 32 nt, Homo Sapiens
agccauauaugauaaauuauguucagugauaa

SEQ ID NO: 29007 - RNA, 32 nt, Homo Sapiens
aaggcaagggccgugcugcugcugggcggggc

SEQ ID NO: 29008 - RNA, 32 nt, Homo Sapiens
accgcccugcacccuccacccggccaggcccc

SEQ ID NO: 29009 - RNA, 32 nt, Homo Sapiens
cuucgggagaggaggaggaguaggccgccucg

SEQ ID NO: 29010 - RNA, 32 nt, Homo Sapiens
cuuuauuuuuucuguaaguaaguuugguuuca

SEQ ID NO: 29011 - RNA, 32 nt, Homo Sapiens
aaaacucauaugcuaugguuaacugguuccca

SEQ ID NO: 29012 - RNA, 32 nt, Homo Sapiens
gagcggagggcuugggcuggaggggugucaga

SEQ ID NO: 29013 - RNA, 32 nt, Homo Sapiens
cccccgcccccgcugagccuccccugcucuga

SEQ ID NO: 29014 - RNA, 32 nt, Homo Sapiens
acacagcggcgggcgggcgcggacgcggaacc

SEQ ID NO: 29015 - RNA, 32 nt, Homo Sapiens
gguugucauugguaaaaagacuucugugucag

SEQ ID NO: 29016 - RNA, 32 nt, Homo Sapiens
gugugcucugucaccugcuuugcaaucggcuu

SEQ ID NO: 29017 - RNA, 28 nt, Homo Sapiens
gccugcggggggacgccgaggagccuac

SEQ ID NO: 29018 - RNA, 32 nt, Homo Sapiens
ccuuugugcuccuggggcagagccuccggcac

SEQ ID NO: 29019 - RNA, 32 nt, Homo Sapiens
gagcuggcccuucccaucuccccucuccccuc

SEQ ID NO: 29020 - RNA, 32 nt, Homo Sapiens
gagcagggcgaccccucugcuggguuucuccu

SEQ ID NO: 29021 - RNA, 32 nt, Homo Sapiens
ugcucaggggccuggggcuccugggauuucug

SEQ ID NO: 29022 - RNA, 32 nt, Homo Sapiens
aagugaucgaguagaaaucuuuuaaacucuaa

SEQ ID NO: 29023 - RNA, 32 nt, Homo Sapiens
ucaauuuuucuuuuucuauguacuggauauuu

SEQ ID NO: 29024 - RNA, 32 nt, Homo Sapiens
guguguguuuuaaguaggaaucugagaaagcc

SEQ ID NO: 29025 - RNA, 32 nt, Homo Sapiens
uaauuggacuuuuuuucuuuuuuugacucguu

SEQ ID NO: 29026 - RNA, 32 nt, Homo Sapiens
cacugcacuccagccggggugacagagugaga

SEQ ID NO: 29027 - RNA, 32 nt, Homo Sapiens
guagggugcuggcaaugagggagucuggcuca

SEQ ID NO: 29028 - RNA, 32 nt, Homo Sapiens
acguagucaagagcugcgaggcaauaagagga

SEQ ID NO: 29029 - RNA, 32 nt, Homo Sapiens
uuaagaauuuaauaaauggacuauuuacaaaa

SEQ ID NO: 29030 - RNA, 32 nt, Homo Sapiens
uauacaaugauauccaauauuaaaagauuaua

SEQ ID NO: 29031 - RNA, 32 nt, Homo Sapiens
agcagagaaaaaauagcaaaauagauauuuug

SEQ ID NO: 29032 - RNA, 28 nt, Homo Sapiens
ugagggaaagauuaaaaucuguggaaua

SEQ ID NO: 29033 - RNA, 32 nt, Homo Sapiens
auuaaaaguauuucacaaaaugugcucguuuu

SEQ ID NO: 29034 - RNA, 32 nt, Homo Sapiens
gugaauaagaagaugagagugauucaaaugau

SEQ ID NO: 29035 - RNA, 32 nt, Homo Sapiens
gaucucaaucuggggucggugguuaaggagag

SEQ ID NO: 29036 - RNA, 32 nt, Homo Sapiens
guauaagcuuugcauggacgaauuaaauaagc

SEQ ID NO: 29037 - RNA, 32 nt, Homo Sapiens
auuaaaaaucuaaaggauauuauuguuugaau

SEQ ID NO: 29038 - RNA, 32 nt, Homo Sapiens
uuacuuggcuccagcccuccagcugcagcccc

SEQ ID NO: 29039 - RNA, 32 nt, Homo Sapiens
uuggacauauccuuaccccaaccucccauguc

SEQ ID NO: 29040 - RNA, 32 nt, Homo Sapiens
uucagguagaaagcccugguugaacaauaaac

SEQ ID NO: 29041 - RNA, 32 nt, Homo Sapiens
augggugcagcaugccaauauggcacauguau

SEQ ID NO: 29042 - RNA, 32 nt, Homo Sapiens
uucacugauguuucagauuucuacugaaguca

SEQ ID NO: 29043 - RNA, 32 nt, Homo Sapiens
uuuccucuaaauaagcacaacauauuagccac

SEQ ID NO: 29044 - RNA, 32 nt, Homo Sapiens
ggcugggagagcagcaagggggaccaggugcg

SEQ ID NO: 29045 - RNA, 32 nt, Homo Sapiens
gggaacucaucaaauaaucacaaaaucacaau

SEQ ID NO: 29046 - RNA, 32 nt, Homo Sapiens
gaaagagaaacaaaaaugaaauaaauaaguug

SEQ ID NO: 29047 - RNA, 32 nt, Homo Sapiens
cuuccucacugaaaaugugcauuaagugccuu

SEQ ID NO: 29048 - RNA, 32 nt, Homo Sapiens
uaccucugacccacccagccccugugguagcc

SEQ ID NO: 29049 - RNA, 32 nt, Homo Sapiens
accuaccucacagagugcauugugaggguuaa

SEQ ID NO: 29050 - RNA, 32 nt, Homo Sapiens
aguuccuucucauggacgagcaaagaagguga

SEQ ID NO: 29051 - RNA, 32 nt, Homo Sapiens
cacucuccagaaugcaggugcgggaaaaagag

SEQ ID NO: 29052 - RNA, 32 nt, Homo Sapiens
uacaagauuagaagcugaaaaccuaaguccuu

SEQ ID NO: 29053 - RNA, 32 nt, Homo Sapiens
cuguccccgccgccggccccgcugcaguccca

SEQ ID NO: 29054 - RNA, 32 nt, Homo Sapiens
gucacaugauccuaagaggaaaguucuguucu

SEQ ID NO: 29055 - RNA, 32 nt, Homo Sapiens
gugaacucgccgcccgggggccccgcgaagcc

SEQ ID NO: 29056 - RNA, 32 nt, Homo Sapiens
gcuguggcugcaacuccccgcccgccagaccu

SEQ ID NO: 29057 - RNA, 32 nt, Homo Sapiens
accaauugaagaaacugccauuacugugaugu

SEQ ID NO: 29058 - RNA, 32 nt, Homo Sapiens
uguggggggcugagcugggcacaugagugagg

SEQ ID NO: 29059 - RNA, 32 nt, Homo Sapiens
gagaggaauuauaucuaaguugugagacugag

SEQ ID NO: 29060 - RNA, 32 nt, Homo Sapiens
cuuagagagugucaaggucaguggaggcccac

SEQ ID NO: 29061 - RNA, 32 nt, Homo Sapiens
ucccggcgcccggcgcccggcgcggagcuguu

SEQ ID NO: 29062 - RNA, 32 nt, Homo Sapiens
ccaucaccacugaccaaggcacugucuuuuuc

SEQ ID NO: 29063 - RNA, 32 nt, Homo Sapiens
cccacacccaaguauuugcacaauauuugugc

SEQ ID NO: 29064 - RNA, 32 nt, Homo Sapiens
guugacauucuaucuguaaaccaugguuuuca

SEQ ID NO: 29065 - RNA, 32 nt, Homo Sapiens
agcugugagcacaccacuguccccucauccac

SEQ ID NO: 29066 - RNA, 32 nt, Homo Sapiens
uagcugcauuaccauagcuaaacuccucugaa

SEQ ID NO: 29067 - RNA, 32 nt, Homo Sapiens
cuaugugggcaaaauagauagaauuaaaugca

SEQ ID NO: 29068 - RNA, 32 nt, Homo Sapiens
auggaguuuggcucuugucacccaggcuggag

SEQ ID NO: 29069 - RNA, 32 nt, Homo Sapiens
acuuuccuggugacgcuuugcuuuucuucugc

SEQ ID NO: 29070 - RNA, 32 nt, Homo Sapiens
agguauguuuuaaagaagcuguuuuuucauua

SEQ ID NO: 29071 - RNA, 32 nt, Homo Sapiens
ugaaguaaaaauugucaguaagggaagagaug

SEQ ID NO: 29072 - RNA, 32 nt, Homo Sapiens
auauuauuuaauaugcaauucuuaaugacuau

SEQ ID NO: 29073 - RNA, 32 nt, Homo Sapiens
acacaacauuaauguuugauaaggaaagcauu

SEQ ID NO: 29074 - RNA, 32 nt, Homo Sapiens
gcacaaaaauacugaggagccaauuaauuucc

SEQ ID NO: 29075 - RNA, 32 nt, Homo Sapiens
aggaggaggacacggccgccgagagcaaggca

SEQ ID NO: 29076 - RNA, 32 nt, Homo Sapiens
ggaugucauagccccagguuguccucaggguc

SEQ ID NO: 29077 - RNA, 32 nt, Homo Sapiens
gcugaggaagauugucauucugauacugucag

SEQ ID NO: 29078 - RNA, 32 nt, Homo Sapiens
ggaaacuggucuccacccacccccggcccguc

SEQ ID NO: 29079 - RNA, 32 nt, Homo Sapiens
aacauacuuagaaaaugaaguguucauuuuua

SEQ ID NO: 29080 - RNA, 32 nt, Homo Sapiens
uuuuaaaguaaaguaauauacuguauggaaag

SEQ ID NO: 29081 - RNA, 32 nt, Homo Sapiens
cuggggcgcugggcacggccgggccccuccug

SEQ ID NO: 29082 - RNA, 32 nt, Homo Sapiens
cuuuuuacauauauuuguuucauuucugcaga

SEQ ID NO: 29083 - RNA, 32 nt, Homo Sapiens
gauguaagauaauuuugugaaauaauguacca

SEQ ID NO: 29084 - RNA, 31 nt, Homo Sapiens
ggcuuuauucccccacuaugcauaucuuauc

SEQ ID NO: 29085 - RNA, 32 nt, Homo Sapiens
ugacaauauuccaugagggugugcaagcacaa

SEQ ID NO: 29086 - RNA, 32 nt, Homo Sapiens
ugcaaggaagcagucucuuuggucaguaacaa

SEQ ID NO: 29087 - RNA, 32 nt, Homo Sapiens
aggacagcccucuggagccguggggccuggau

SEQ ID NO: 29088 - RNA, 32 nt, Homo Sapiens
gccaggacgacggaggaagguggaccguagag

SEQ ID NO: 29089 - RNA, 32 nt, Homo Sapiens
gggguagggaauguuggccaguuuuguuuagu

SEQ ID NO: 29090 - RNA, 32 nt, Homo Sapiens
gaaccaguucuuccacuuacugacuuguuacc

SEQ ID NO: 29091 - RNA, 32 nt, Homo Sapiens
gaaauaaaacaaucucccuccauaaugugagc

SEQ ID NO: 29092 - RNA, 32 nt, Homo Sapiens
aucaggagugagggauggaaaaggggauaaaa

SEQ ID NO: 29093 - RNA, 32 nt, Homo Sapiens
aaaggguugucucucuccuuucuguuggggga

SEQ ID NO: 29094 - RNA, 30 nt, Homo Sapiens
ggacaguucccugcugcagaguucuuucug

SEQ ID NO: 29095 - RNA, 32 nt, Homo Sapiens
ucugccccaucccaacugcaccagcacugccu

SEQ ID NO: 29096 - RNA, 32 nt, Homo Sapiens
gcgccccgcacugcgcgcgcccucccaggcuc

SEQ ID NO: 29097 - RNA, 32 nt, Homo Sapiens
ugaauuccuauacgggggagcgggaaaggugc

SEQ ID NO: 29098 - RNA, 28 nt, Homo Sapiens
cacauggaagauuaaugagggaaaucuu

SEQ ID NO: 29099 - RNA, 32 nt, Homo Sapiens
uucgugcgcgucugguggcggcggcgugaugu

SEQ ID NO: 29100 - RNA, 32 nt, Homo Sapiens
uguguggugauccauggggugcugcaggcaac

SEQ ID NO: 29101 - RNA, 31 nt, Homo Sapiens
gcuggucaaugauggacaggaguccagauua

SEQ ID NO: 29102 - RNA, 32 nt, Homo Sapiens
auauuuugugguucccaacacucuucaccuag

SEQ ID NO: 29103 - RNA, 32 nt, Homo Sapiens
cggcgcuagcccagcccgacccaggcccaccg

SEQ ID NO: 29104 - RNA, 32 nt, Homo Sapiens
ggucucggugcccagggcccaggccguguggu

SEQ ID NO: 29105 - RNA, 32 nt, Homo Sapiens
uccuaggugucugcugugaaccuccagugacc

SEQ ID NO: 29106 - RNA, 32 nt, Homo Sapiens
aguuaggugaccaugagaauugcuguuugagg

SEQ ID NO: 29107 - RNA, 32 nt, Homo Sapiens
uugggccggggaggggacacuccaguucucua

SEQ ID NO: 29108 - RNA, 32 nt, Homo Sapiens
caugaucuuucugcaggaaauagucacucauc

SEQ ID NO: 29109 - RNA, 32 nt, Homo Sapiens
uccacuuugguuuucuacuccuccucagccuc

SEQ ID NO: 29110 - RNA, 32 nt, Homo Sapiens
gguuuguuggccucaagaagaaugggagcugc

SEQ ID NO: 29111 - RNA, 32 nt, Homo Sapiens
guggacauuuuucccuacagaucuggaaagca

SEQ ID NO: 29112 - RNA, 28 nt, Homo Sapiens
ggcacaguugcugauauguguucaagau

SEQ ID NO: 29113 - RNA, 32 nt, Homo Sapiens
cugagccggccgcgggcgcgaccggaggcagu

SEQ ID NO: 29114 - RNA, 32 nt, Homo Sapiens
aauggaaaaaaauaaacuuucaaauugaaaug

SEQ ID NO: 29115 - RNA, 32 nt, Homo Sapiens
ucaggaaguccuccccuacaucuguuuucuuc

SEQ ID NO: 29116 - RNA, 32 nt, Homo Sapiens
agccuggaggucguucagagccgugcccgccc

SEQ ID NO: 29117 - RNA, 32 nt, Homo Sapiens
uugcguucuucgugguucccaggcccugggac

SEQ ID NO: 29118 - RNA, 32 nt, Homo Sapiens
aaaaccacgugagcugggcccaggcgcaggug

SEQ ID NO: 29119 - RNA, 32 nt, Homo Sapiens
ggaagcaggaccaguaagggaccuucgauuaa

SEQ ID NO: 29120 - RNA, 32 nt, Homo Sapiens
gcacugcuccgggugucggcuccggcgggacg

SEQ ID NO: 29121 - RNA, 32 nt, Homo Sapiens
agccgcucauuuccuucucaugaagucccauc

SEQ ID NO: 29122 - RNA, 32 nt, Homo Sapiens
aacucugcuucuuugggcucucccagaccuac

SEQ ID NO: 29123 - RNA, 32 nt, Homo Sapiens
ucgggcaccggggcuccggcccgggacccagg

SEQ ID NO: 29124 - RNA, 32 nt, Homo Sapiens
gugaugguuuuggcaugacaucuucaguauga

SEQ ID NO: 29125 - RNA, 32 nt, Homo Sapiens
uccgucugcggugguuccgccgacccucccgc

SEQ ID NO: 29126 - RNA, 32 nt, Homo Sapiens
cagagggagagccuguggacaacaguggggca

SEQ ID NO: 29127 - RNA, 32 nt, Homo Sapiens
agaggugggcugggcugcagguccuggcguug

SEQ ID NO: 29128 - RNA, 32 nt, Homo Sapiens
auucacagcagcccuagguuuuuucuuccccg

SEQ ID NO: 29129 - RNA, 32 nt, Homo Sapiens
uaguccugggguggaggucugggcacgccggg

SEQ ID NO: 29130 - RNA, 32 nt, Homo Sapiens
ccuucuacugucagcgccuccccaucccccac

SEQ ID NO: 29131 - RNA, 32 nt, Homo Sapiens
aacgggacagcuuuaaaccaaagaucauguuu

SEQ ID NO: 29132 - RNA, 32 nt, Homo Sapiens
caacagcccagcugcaugcuaccacuuugguu

SEQ ID NO: 29133 - RNA, 32 nt, Homo Sapiens
cuggacgugcgcgaugccuggggccgucugcc

SEQ ID NO: 29134 - RNA, 32 nt, Homo Sapiens
auccuucaagguggccugaggucccaucccuc

SEQ ID NO: 29135 - RNA, 32 nt, Homo Sapiens
aaaaacaaccaccagugaaauguguguguaua

SEQ ID NO: 29136 - RNA, 32 nt, Homo Sapiens
aggaaucguuuucucuuugagacuguuaugag

SEQ ID NO: 29137 - RNA, 32 nt, Homo Sapiens
uccccuuccacgguguggaagcuuuguucucu

SEQ ID NO: 29138 - RNA, 32 nt, Homo Sapiens
ugcagcccaagcagggccuggcauggggcagg

SEQ ID NO: 29139 - RNA, 32 nt, Homo Sapiens
uuaaguucaugacauucggaacagcaaagcca

SEQ ID NO: 29140 - RNA, 32 nt, Homo Sapiens
caaaaugaaaauauuuguauguauuucaauaa

SEQ ID NO: 29141 - RNA, 32 nt, Homo Sapiens
uaggagcaguuacuuccacuccccucaccugc

SEQ ID NO: 29142 - RNA, 32 nt, Homo Sapiens
ggguggacuuaccaugguuaauacugaguguc

SEQ ID NO: 29143 - RNA, 32 nt, Homo Sapiens
acugaaaauaccaaagaaaagaacugagcugc

SEQ ID NO: 29144 - RNA, 32 nt, Homo Sapiens
ucuacuaaaaauacaaaaacuaggucgggcgc

SEQ ID NO: 29145 - RNA, 32 nt, Homo Sapiens
cagaacugacuggcagcaggggcugcuccacg

SEQ ID NO: 29146 - RNA, 32 nt, Homo Sapiens
cacacccaccgcaaccucauccccucagcacu

SEQ ID NO: 29147 - RNA, 31 nt, Homo Sapiens
uuggcgcggcacugugcggugcagcggcggc

SEQ ID NO: 29148 - RNA, 32 nt, Homo Sapiens
gcaauacuuuugugaauuuuaauuaaucucag

SEQ ID NO: 29149 - RNA, 32 nt, Homo Sapiens
cagagugcuauguucaggaaguuucuuuaacc

SEQ ID NO: 29150 - RNA, 32 nt, Homo Sapiens
acauaucugcuuuaauggggauguaccagaaa

SEQ ID NO: 29151 - RNA, 32 nt, Homo Sapiens
acacccugccuugucugggcucaucaccucuc

SEQ ID NO: 29152 - RNA, 32 nt, Homo Sapiens
uuaacuuuugcugauguauaaaacagacuaug

SEQ ID NO: 29153 - RNA, 32 nt, Homo Sapiens
agggauccuuggcugcuucauugucuuccccc

SEQ ID NO: 29154 - RNA, 32 nt, Homo Sapiens
cccuggaggaggaggaucccugcugccugcac

SEQ ID NO: 29155 - RNA, 32 nt, Homo Sapiens
cagaugcccccaccccagucuccugagccuca

SEQ ID NO: 29156 - RNA, 32 nt, Homo Sapiens
cuuguguuuuaucuuaaccaccagaucauucc

SEQ ID NO: 29157 - RNA, 32 nt, Homo Sapiens
gucaucaccauagcacuguauuugagcuaucg

SEQ ID NO: 29158 - RNA, 32 nt, Homo Sapiens
cacaucugaaagaugcaauucaccauggagcu

SEQ ID NO: 29159 - RNA, 32 nt, Homo Sapiens
ucuccgcgccccagccgccggcugccagcuuu

SEQ ID NO: 29160 - RNA, 32 nt, Homo Sapiens
gauucuuaacuauugacucuuauuuagcaaau

SEQ ID NO: 29161 - RNA, 32 nt, Homo Sapiens
caggaauccaaauccagcauggcuuggaggag

SEQ ID NO: 29162 - RNA, 32 nt, Homo Sapiens
cccuucaggccugggaggaaauucucaggaga

SEQ ID NO: 29163 - RNA, 32 nt, Homo Sapiens
acaguuuuaaucuuguuugcaauuauuucgaa

SEQ ID NO: 29164 - RNA, 32 nt, Homo Sapiens
ccuggggcuucagauccuggggcuuuaccuga

SEQ ID NO: 29165 - RNA, 32 nt, Homo Sapiens
uuuccuuccugcgaccaucccggcgccccuag

SEQ ID NO: 29166 - RNA, 32 nt, Homo Sapiens
ccucagugugucccucaggcaccuggacacac

SEQ ID NO: 29167 - RNA, 32 nt, Homo Sapiens
cuggauaaguguuauuaggugauucagaaggg

SEQ ID NO: 29168 - RNA, 32 nt, Homo Sapiens
auuuuaugucauuuuccuuuauuuuauucaca

SEQ ID NO: 29169 - RNA, 32 nt, Homo Sapiens
aguguaaauuauauuuccuaugccuaguaauu

SEQ ID NO: 29170 - RNA, 32 nt, Homo Sapiens
cgacaggacaaaauaauugugcucugugaacg

SEQ ID NO: 29171 - RNA, 32 nt, Homo Sapiens
uuugacauagauauuuaccauugucugaugua

SEQ ID NO: 29172 - RNA, 32 nt, Homo Sapiens
guugccauuuucugcuguggguaacugcgugc

SEQ ID NO: 29173 - RNA, 32 nt, Homo Sapiens
ccugauuuaauguagacuuugacuuuuuuauu

SEQ ID NO: 29174 - RNA, 32 nt, Homo Sapiens
acugacaucugaauuuauauaccuguugaguu

SEQ ID NO: 29175 - RNA, 32 nt, Homo Sapiens
uaaucucugugggucuuacuugcuuguaucua

SEQ ID NO: 29176 - RNA, 32 nt, Homo Sapiens
ucucuuggagcaaaugaugaagacauccggaa

SEQ ID NO: 29177 - RNA, 32 nt, Homo Sapiens
gugugcaggcgccugcgggcgguauccucggc

SEQ ID NO: 29178 - RNA, 32 nt, Homo Sapiens
gggaagaugagguagaagacuauuaacuacug

SEQ ID NO: 29179 - RNA, 32 nt, Homo Sapiens
caacucuuccagucucccggugcuggggcgcc

SEQ ID NO: 29180 - RNA, 32 nt, Homo Sapiens
uuucuuaaugaaaucaagcauuuuaauucacu

SEQ ID NO: 29181 - RNA, 32 nt, Homo Sapiens
cugucuuaaaagaccucaaaucagaacauucu

SEQ ID NO: 29182 - RNA, 32 nt, Homo Sapiens
ccaucagguuguucaggugcugcucugucugg

SEQ ID NO: 29183 - RNA, 32 nt, Homo Sapiens
ggggagggggagagggaaggggggcucagcuu

SEQ ID NO: 29184 - RNA, 32 nt, Homo Sapiens
ucgcugaaccccguuugccuguccacaccccc

SEQ ID NO: 29185 - RNA, 32 nt, Homo Sapiens
aaacagcauauuucuuaguauuucaugaauau

SEQ ID NO: 29186 - RNA, 32 nt, Homo Sapiens
uauuuucggaguguucuuuguauaacuuuucc

SEQ ID NO: 29187 - RNA, 28 nt, Homo Sapiens
uggcuucugcuggccaggauggcuuaac

SEQ ID NO: 29188 - RNA, 32 nt, Homo Sapiens
ugcuauaggaaugucuaauguacaguacauua

SEQ ID NO: 29189 - RNA, 32 nt, Homo Sapiens
aagagauuuaucuguauauacacauaacugaa

SEQ ID NO: 29190 - RNA, 32 nt, Homo Sapiens
gccccucugccagcugaggcagcccacacacc

SEQ ID NO: 29191 - RNA, 32 nt, Homo Sapiens
uuuguugccuucuuuggccagaugugugauuc

SEQ ID NO: 29192 - RNA, 32 nt, Homo Sapiens
gauuuuaaugaaaccaggguagaauuguuugg

SEQ ID NO: 29193 - RNA, 32 nt, Homo Sapiens
uccuuauaccaaagaugcuggcacauagcaga

SEQ ID NO: 29194 - RNA, 32 nt, Homo Sapiens
caauguauuaaugaaaugaaaugauaauuugg

SEQ ID NO: 29195 - RNA, 32 nt, Homo Sapiens
aaacagauaacaccaaaccaaaccccguagcu

SEQ ID NO: 29196 - RNA, 32 nt, Homo Sapiens
cccgggccagcagggaugggguuggggagguu

SEQ ID NO: 29197 - RNA, 32 nt, Homo Sapiens
gagccccgagccagcccugucccuccccagug

SEQ ID NO: 29198 - RNA, 32 nt, Homo Sapiens
gcgagccuucgggugcguggagggcgcagcac

SEQ ID NO: 29199 - RNA, 32 nt, Homo Sapiens
gguaacagaacaguuggcuuuuggaagucuga

SEQ ID NO: 29200 - RNA, 32 nt, Homo Sapiens
gcaggguuuggcuagguguuuauuuaaacauu

SEQ ID NO: 29201 - RNA, 32 nt, Homo Sapiens
uuaccuaaggguuaaacaucagaacaucaaau

SEQ ID NO: 29202 - RNA, 32 nt, Homo Sapiens
uuaguuuauagcaauuacucuuuauuccaaua

SEQ ID NO: 29203 - RNA, 32 nt, Homo Sapiens
ccuaccccauccccaagcucacagaaaucaaa

SEQ ID NO: 29204 - RNA, 32 nt, Homo Sapiens
uugugaugacuucauacuaucauuaguuacua

SEQ ID NO: 29205 - RNA, 32 nt, Homo Sapiens
aggucgcuccagcccuaccacaggucugacug

SEQ ID NO: 29206 - RNA, 32 nt, Homo Sapiens
cauuuccauuccugccagcagugugagugauc

SEQ ID NO: 29207 - RNA, 31 nt, Homo Sapiens
accacccacccccagaacaggcagagacagg

SEQ ID NO: 29208 - RNA, 32 nt, Homo Sapiens
gagagccugugcuuaaguaagaaucaggccuu

SEQ ID NO: 29209 - RNA, 32 nt, Homo Sapiens
ugcugcaaacaacuacagucuuugaaauaugg

SEQ ID NO: 29210 - RNA, 32 nt, Homo Sapiens
accacauuccuguuuuucagcuuauuugaagu

SEQ ID NO: 29211 - RNA, 32 nt, Homo Sapiens
ccccagccugcccgcgccucccgcccccagcu

SEQ ID NO: 29212 - RNA, 32 nt, Homo Sapiens
uccuccacagaaagggaggauagugaacagaa

SEQ ID NO: 29213 - RNA, 32 nt, Homo Sapiens
gaccaucacccucccccgcgugaacugggaug

SEQ ID NO: 29214 - RNA, 32 nt, Homo Sapiens
ggcagucagcgaaggcaaauggucugacuucu

SEQ ID NO: 29215 - RNA, 32 nt, Homo Sapiens
uuacccaugcuggucuugaacuucuggcuuca

SEQ ID NO: 29216 - RNA, 32 nt, Homo Sapiens
gcaaccucagggcuaccagcgauccccugaga

SEQ ID NO: 29217 - RNA, 32 nt, Homo Sapiens
gaauuaagggauuuggggggaccauguaacuu

SEQ ID NO: 29218 - RNA, 32 nt, Homo Sapiens
guggaauuuuuauacuaaaaauguagaauaaa

SEQ ID NO: 29219 - RNA, 32 nt, Homo Sapiens
cagaucaucucccacacccuggaucucacucu

SEQ ID NO: 29220 - RNA, 32 nt, Homo Sapiens
ucaggccccagcagcccuccugcccccaaagc

SEQ ID NO: 29221 - RNA, 32 nt, Homo Sapiens
gccaagcucaggucccuucugagugcauagcc

SEQ ID NO: 29222 - RNA, 32 nt, Homo Sapiens
aagcgcaucgagggagcccgcucaagcugaag

SEQ ID NO: 29223 - RNA, 32 nt, Homo Sapiens
auagaagacauuaaacaccuuuacugaaauuc

SEQ ID NO: 29224 - RNA, 32 nt, Homo Sapiens
gcccagcccucccuuccuuccucugccggcaa

SEQ ID NO: 29225 - RNA, 32 nt, Homo Sapiens
uuguggagccccacacuggggugccgccugcc

SEQ ID NO: 29226 - RNA, 28 nt, Homo Sapiens
ugugaucauuaaacucuuucuuugcugc

SEQ ID NO: 29227 - RNA, 32 nt, Homo Sapiens
ccagguccugcagcugcuuguuagcuuuuuga

SEQ ID NO: 29228 - RNA, 32 nt, Homo Sapiens
ugcccaucugcggccuuucucaucuccuuuuc

SEQ ID NO: 29229 - RNA, 32 nt, Homo Sapiens
auugaaaaacaaaguguuagacugugugcgug

SEQ ID NO: 29230 - RNA, 32 nt, Homo Sapiens
accagcuuggccaacauagugaaaucccaucu

SEQ ID NO: 29231 - RNA, 30 nt, Homo Sapiens
gacccaggagguggaggucgcagugagccg

SEQ ID NO: 29232 - RNA, 32 nt, Homo Sapiens
uaauuaagaacaauugauucaauauuuuugcc

SEQ ID NO: 29233 - RNA, 32 nt, Homo Sapiens
acugguuucuggugaggucucuauucaucagu

SEQ ID NO: 29234 - RNA, 32 nt, Homo Sapiens
ggggguacucuugucaaaaggcacauuggugc

SEQ ID NO: 29235 - RNA, 32 nt, Homo Sapiens
agcugcaggcgcgcgccuaacggcuucgcggg

SEQ ID NO: 29236 - RNA, 28 nt, Homo Sapiens
acucaaggagggaccaggaugauacagu

SEQ ID NO: 29237 - RNA, 32 nt, Homo Sapiens
aggccaaacucugauaagcaaaacagagaaua

SEQ ID NO: 29238 - RNA, 32 nt, Homo Sapiens
ggcagaaguccucaauagaugugcuaguucca

SEQ ID NO: 29239 - RNA, 32 nt, Homo Sapiens
uccggguaccugagggacgcgcggccgcccgc

SEQ ID NO: 29240 - RNA, 32 nt, Homo Sapiens
gauucgcuauaaucagccuauuugagcugcug

SEQ ID NO: 29241 - RNA, 32 nt, Homo Sapiens
aguucgggaugcggaaacagaaaggaaagagu

SEQ ID NO: 29242 - RNA, 32 nt, Homo Sapiens
uucuucgaggcccuggccagccaucugcccag

SEQ ID NO: 29243 - RNA, 32 nt, Homo Sapiens
aucugugaugugugggacaggcacgaggggcc

SEQ ID NO: 29244 - RNA, 32 nt, Homo Sapiens
guuugugaauagauuuuagcaugaugaaacug

SEQ ID NO: 29245 - RNA, 32 nt, Homo Sapiens
auuauuuuuaaagauuuacacagauuugaaua

SEQ ID NO: 29246 - RNA, 32 nt, Homo Sapiens
gagauguggcuggaaaguacuuuggaaaauau

SEQ ID NO: 29247 - RNA, 32 nt, Homo Sapiens
acagccacuuuuucuuuuuaauuuaagaugag

SEQ ID NO: 29248 - RNA, 32 nt, Homo Sapiens
acuggacacacagcucugcuugacgaggccag

SEQ ID NO: 29249 - RNA, 32 nt, Homo Sapiens
cuguuguguuaagaaagcauucauuauguccg

SEQ ID NO: 29250 - RNA, 32 nt, Homo Sapiens
ccgcuugccggcccgcgucgccgucucucacc

SEQ ID NO: 29251 - RNA, 32 nt, Homo Sapiens
cccuggugugagcauuagaccagccacagugc

SEQ ID NO: 29252 - RNA, 32 nt, Homo Sapiens
aacacuaaguuuaauuuucagcuccucuguug

SEQ ID NO: 29253 - RNA, 32 nt, Homo Sapiens
aguuuugcucuuguugcccagacuggagugca

SEQ ID NO: 29254 - RNA, 32 nt, Homo Sapiens
gacuuuagggcuaaccaguucucuuuguaagg

SEQ ID NO: 29255 - RNA, 32 nt, Homo Sapiens
caucccaccuggauguaugcaugguuggucgg

SEQ ID NO: 29256 - RNA, 32 nt, Homo Sapiens
aggaagcagcacagagcuggacaggcuuugaa

SEQ ID NO: 29257 - RNA, 32 nt, Homo Sapiens
uagcaagggccgggaggcgccagggcgcugcg

SEQ ID NO: 29258 - RNA, 32 nt, Homo Sapiens
gugaugcauugucuuccaguugcaauaaaaau

SEQ ID NO: 29259 - RNA, 32 nt, Homo Sapiens
aguaaaugauuguaucaguuuauuucuaguau

SEQ ID NO: 29260 - RNA, 32 nt, Homo Sapiens
cuuggaaaauagggcuucaagauacaaauuuu

SEQ ID NO: 29261 - RNA, 32 nt, Homo Sapiens
uccuuuguguuucaaacaauccaauuauacug

SEQ ID NO: 29262 - RNA, 32 nt, Homo Sapiens
ugagcucugaggggcucugcucccggucuugg

SEQ ID NO: 29263 - RNA, 32 nt, Homo Sapiens
cguccaucccccuucuuccuccccucaacagu

SEQ ID NO: 29264 - RNA, 32 nt, Homo Sapiens
guuugggaggacaugaugggggugauggacug

SEQ ID NO: 29265 - RNA, 32 nt, Homo Sapiens
gucuuaaucguccugcugcugcugccguuccg

SEQ ID NO: 29266 - RNA, 32 nt, Homo Sapiens
acuucccggccgcgacgcagggaaccggcgcg

SEQ ID NO: 29267 - RNA, 32 nt, Homo Sapiens
ccaauaagauggaugcuuucauuuaugaugaa

SEQ ID NO: 29268 - RNA, 32 nt, Homo Sapiens
cucuuguagcuucuuacagaaaacagauuuag

SEQ ID NO: 29269 - RNA, 32 nt, Homo Sapiens
gauaauuuuuaaaaacacccuaguuguaauca

SEQ ID NO: 29270 - RNA, 32 nt, Homo Sapiens
guacaaaggggaguggugccuguggacacagg

SEQ ID NO: 29271 - RNA, 32 nt, Homo Sapiens
uccugcugcuucaccccuccccuagccugccg

SEQ ID NO: 29272 - RNA, 32 nt, Homo Sapiens
aauaauaaaaauuauaucgugcgauuauuuau

SEQ ID NO: 29273 - RNA, 32 nt, Homo Sapiens
gcgggccuugguccgcuuugaaggcgggcugc

SEQ ID NO: 29274 - RNA, 32 nt, Homo Sapiens
caccugaggaccagccccuccucccucagugc

SEQ ID NO: 29275 - RNA, 32 nt, Homo Sapiens
aaaacucugguugacuauucuucaggcuuaua

SEQ ID NO: 29276 - RNA, 32 nt, Homo Sapiens
uagucuaauuagugccuggggaugaccuaugc

SEQ ID NO: 29277 - RNA, 32 nt, Homo Sapiens
augucugagauaaccaaggugauucaggauuu

SEQ ID NO: 29278 - RNA, 32 nt, Homo Sapiens
aaacuaugaauguauggaauuuuuuaaaaaga

SEQ ID NO: 29279 - RNA, 32 nt, Homo Sapiens
auuugaauguacuauuugauccucauuguguu

SEQ ID NO: 29280 - RNA, 32 nt, Homo Sapiens
agauggaccuuuuuucggagaagcacuguuga

SEQ ID NO: 29281 - RNA, 32 nt, Homo Sapiens
gagagagaaaggagaagaaugacuauuuaaag

SEQ ID NO: 29282 - RNA, 32 nt, Homo Sapiens
cucucucggaagcucuagggugugaaucacau

SEQ ID NO: 29283 - RNA, 32 nt, Homo Sapiens
ccuccguccugacccagggcgccggagcgcca

SEQ ID NO: 29284 - RNA, 27 nt, Homo Sapiens
acaagaaucuucuucaucuuccuccuc

SEQ ID NO: 29285 - RNA, 31 nt, Homo Sapiens
aucaccgugaacaugaaauuggugcuccccg

SEQ ID NO: 29286 - RNA, 32 nt, Homo Sapiens
gaacgaacuuuuccuugaaacucucuggauuc

SEQ ID NO: 29287 - RNA, 32 nt, Homo Sapiens
caucucccccuugacuccagcccucauucuuc

SEQ ID NO: 29288 - RNA, 29 nt, Homo Sapiens
ugcuguaaagauauauauuuuugggucag

SEQ ID NO: 29289 - RNA, 32 nt, Homo Sapiens
ggacugggggccagaguccuuuccaaggcuuc

SEQ ID NO: 29290 - RNA, 32 nt, Homo Sapiens
agaagggaaaaagggauuauuauaucugagau

SEQ ID NO: 29291 - RNA, 27 nt, Homo Sapiens
gggucuuccuucuugcuccucccaucc

SEQ ID NO: 29292 - RNA, 32 nt, Homo Sapiens
uaccuguuuuucuccuucucuuauuccauuua

SEQ ID NO: 29293 - RNA, 32 nt, Homo Sapiens
uugacccggccgccggccgggagcugggagag

SEQ ID NO: 29294 - RNA, 32 nt, Homo Sapiens
gggaucagugagaggagugguguguaccccua

SEQ ID NO: 29295 - RNA, 32 nt, Homo Sapiens
ccuucccugggccucaggaucccacccuccau

SEQ ID NO: 29296 - RNA, 30 nt, Homo Sapiens
cagguguggugggaucacgccuguaauccc

SEQ ID NO: 29297 - RNA, 32 nt, Homo Sapiens
auuugucaaggauagaguacaguuguagggga

SEQ ID NO: 29298 - RNA, 32 nt, Homo Sapiens
gaaacgucucacggugcugguccaccuggcag

SEQ ID NO: 29299 - RNA, 32 nt, Homo Sapiens
guauguuuuacuuuucccaaugggaaaaaaaa

SEQ ID NO: 29300 - RNA, 32 nt, Homo Sapiens
cggcgcucaccucggcuccuaggguucgggac

SEQ ID NO: 29301 - RNA, 32 nt, Homo Sapiens
cuuuuaauaguguaauauccacagaugcauaa

SEQ ID NO: 29302 - RNA, 32 nt, Homo Sapiens
cuuuuuucacuuuaauucuguucugcacauuc

SEQ ID NO: 29303 - RNA, 32 nt, Homo Sapiens
ccacccucuguccacaccccgauccucccuca

SEQ ID NO: 29304 - RNA, 28 nt, Homo Sapiens
uuuucaauaaagaaacaaaugccauaaa

SEQ ID NO: 29305 - RNA, 32 nt, Homo Sapiens
uccugaccucaagugaucugcccgccucgacc

SEQ ID NO: 29306 - RNA, 32 nt, Homo Sapiens
ucaggagguggccgacugcugcuagcggccug

SEQ ID NO: 29307 - RNA, 32 nt, Homo Sapiens
gcuuuagagguaugaggcugcagaaccggaga

SEQ ID NO: 29308 - RNA, 32 nt, Homo Sapiens
gcgugagcaccaagccggagcccgaggacgau

SEQ ID NO: 29309 - RNA, 32 nt, Homo Sapiens
aggugaggccccagaggacuuaucucagcugu

SEQ ID NO: 29310 - RNA, 32 nt, Homo Sapiens
cguuauuuauuaugauccuaguugauggccua

SEQ ID NO: 29311 - RNA, 32 nt, Homo Sapiens
gaaauggcggccuugggcuaggcggggucccc

SEQ ID NO: 29312 - RNA, 32 nt, Homo Sapiens
gacaucuugucauuuuuuuucuuugaauaaau

SEQ ID NO: 29313 - RNA, 32 nt, Homo Sapiens
accacuacacuccagccugggcgacagaguga

SEQ ID NO: 29314 - RNA, 32 nt, Homo Sapiens
accacugcacuccagccugggcgacagaguaa

SEQ ID NO: 29315 - RNA, 32 nt, Homo Sapiens
uauuuuuucauaugcuucuucaucucuccugc

SEQ ID NO: 29316 - RNA, 32 nt, Homo Sapiens
agaggaagccccagguagcaggcuucagagag

SEQ ID NO: 29317 - RNA, 32 nt, Homo Sapiens
ccuuuaacacuggugaaagcuacgguacucuc

SEQ ID NO: 29318 - RNA, 32 nt, Homo Sapiens
cucgccgcgcguccagcguucccggccagcag

SEQ ID NO: 29319 - RNA, 32 nt, Homo Sapiens
gggaugagggggcaccugggggucagagaaca

SEQ ID NO: 29320 - RNA, 32 nt, Homo Sapiens
aaaaauguuucaucuugaaggcaaauuuuuaa

SEQ ID NO: 29321 - RNA, 32 nt, Homo Sapiens
ccgcuucgcuggcgccgccuuuuuagcuugga

SEQ ID NO: 29322 - RNA, 32 nt, Homo Sapiens
cguaggaggaggaaaaggcgaagcugaccuaa

SEQ ID NO: 29323 - RNA, 32 nt, Homo Sapiens
ccaccagcgcauccacacgggcgagaagccgc

SEQ ID NO: 29324 - RNA, 32 nt, Homo Sapiens
uuggaugcuuugcuguaaauacuuacccgguc

SEQ ID NO: 29325 - RNA, 32 nt, Homo Sapiens
agcucucaacuaacaaggaggcaggagagguc

SEQ ID NO: 29326 - RNA, 32 nt, Homo Sapiens
gugcccagccccaccaaugggccuccagagac

SEQ ID NO: 29327 - RNA, 32 nt, Homo Sapiens
gcaggaauuuauuucagaaaauguaguuuaca

SEQ ID NO: 29328 - RNA, 32 nt, Homo Sapiens
acuugggguuugaguuccagacuugcagaccc

SEQ ID NO: 29329 - RNA, 32 nt, Homo Sapiens
gaacaaaguauuucaaagcuuguuccaucaag

SEQ ID NO: 29330 - RNA, 32 nt, Homo Sapiens
auucuuuacgugcucgagguauugcuuuuaac

SEQ ID NO: 29331 - RNA, 31 nt, Homo Sapiens
ugugcgugaaacacaccaggcugugggccuc

SEQ ID NO: 29332 - RNA, 32 nt, Homo Sapiens
agacgaggcuggaagcaugggguggcagccua

SEQ ID NO: 29333 - RNA, 32 nt, Homo Sapiens
gguuugcggcugcagugagcugugauugcacc

SEQ ID NO: 29334 - RNA, 32 nt, Homo Sapiens
uguugggggaugcagugccgugccacauuucc

SEQ ID NO: 29335 - RNA, 32 nt, Homo Sapiens
ugauuagucaacaguggaaaaucugaagagau

SEQ ID NO: 29336 - RNA, 32 nt, Homo Sapiens
agaggacccguagcugcuaaagggcaggggug

SEQ ID NO: 29337 - RNA, 32 nt, Homo Sapiens
cgggauuuuaucauguuggccaggcuggucuc

SEQ ID NO: 29338 - RNA, 32 nt, Homo Sapiens
uuccuggagcuggccugagagggcucaaugga

SEQ ID NO: 29339 - RNA, 32 nt, Homo Sapiens
ucuucuuccugagaccucguugaaagaaacuc

SEQ ID NO: 29340 - RNA, 32 nt, Homo Sapiens
uuccuacccagcucaaucugcccuggccauag

SEQ ID NO: 29341 - RNA, 32 nt, Homo Sapiens
cugagucagauuauguuauuuauuuugauagu

SEQ ID NO: 29342 - RNA, 32 nt, Homo Sapiens
ggccuggcucccacccagaccuuggagccgac

SEQ ID NO: 29343 - RNA, 32 nt, Homo Sapiens
uguuuaaucuggaaaccaaagagacccugaag

SEQ ID NO: 29344 - RNA, 32 nt, Homo Sapiens
ucaggcagccccagcuugcugguccagggugg

SEQ ID NO: 29345 - RNA, 32 nt, Homo Sapiens
aauguucucuacaugaacugcucauuuggagg

SEQ ID NO: 29346 - RNA, 32 nt, Homo Sapiens
gcauuugcuguauagagcugccacccaacucu

SEQ ID NO: 29347 - RNA, 32 nt, Homo Sapiens
ccaauuaaaaauuuuuggauaaaugaacuuca

SEQ ID NO: 29348 - RNA, 32 nt, Homo Sapiens
uuuccuucuagugcauuaaaagaaacugagca

SEQ ID NO: 29349 - RNA, 32 nt, Homo Sapiens
ccaguuaaaaauacaaauguacuauauuguag

SEQ ID NO: 29350 - RNA, 32 nt, Homo Sapiens
aggccugagucaugggaaagagucacacuccu

SEQ ID NO: 29351 - RNA, 32 nt, Homo Sapiens
aucucagguuuggggaucccccagucccuaug

SEQ ID NO: 29352 - RNA, 32 nt, Homo Sapiens
cucucagaggccggccaucacugugcacccac

SEQ ID NO: 29353 - RNA, 32 nt, Homo Sapiens
cggaacuggcaggguggcauccugucuggggg

SEQ ID NO: 29354 - RNA, 32 nt, Homo Sapiens
uggaagaggaggaggaggagccgugaugggcu

SEQ ID NO: 29355 - RNA, 32 nt, Homo Sapiens
agaaaauaaaauugaggcugauuuuuaaaaau

SEQ ID NO: 29356 - RNA, 32 nt, Homo Sapiens
uagggacugacagaauacacuuaacacaaacc

SEQ ID NO: 29357 - RNA, 32 nt, Homo Sapiens
cuacuuuaauaaagaauuaacagagauugaac

SEQ ID NO: 29358 - RNA, 32 nt, Homo Sapiens
cagucggaaaacacacauuuugaaagugagaa

SEQ ID NO: 29359 - RNA, 32 nt, Homo Sapiens
auucauuuggcuccuugauacaucaguccuca

SEQ ID NO: 29360 - RNA, 32 nt, Homo Sapiens
agaggaaccaucgcaggaugacagcucccggg

SEQ ID NO: 29361 - RNA, 32 nt, Homo Sapiens
aggaaugcugagugaugggguggcugcugggg

SEQ ID NO: 29362 - RNA, 32 nt, Homo Sapiens
uugucacuguguacauuaaaauuuuggaagau

SEQ ID NO: 29363 - RNA, 32 nt, Homo Sapiens
ccaggcagcuccuggggcaguggauggauaaa

SEQ ID NO: 29364 - RNA, 32 nt, Homo Sapiens
gacccaggcuugacgauucaccggggaucucc

SEQ ID NO: 29365 - RNA, 32 nt, Homo Sapiens
ucauucucauauauuuucuucacacagcagcc

SEQ ID NO: 29366 - RNA, 32 nt, Homo Sapiens
caccaacuucucagcauguuucucuccuugga

SEQ ID NO: 29367 - RNA, 27 nt, Homo Sapiens
gcaucgucauucuucaggauugcccug

SEQ ID NO: 29368 - RNA, 32 nt, Homo Sapiens
gccgucuguccauucacccaucuguccaucug

SEQ ID NO: 29369 - RNA, 32 nt, Homo Sapiens
agaaacaggggggcccuuguaaugccacucau

SEQ ID NO: 29370 - RNA, 32 nt, Homo Sapiens
gcggccgccaggcuucccggcccgccacuccc

SEQ ID NO: 29371 - RNA, 32 nt, Homo Sapiens
cggacccuucccagcccucaucccacuuccuu

SEQ ID NO: 29372 - RNA, 32 nt, Homo Sapiens
cuugcgucugggccuggcagaagggaccggau

SEQ ID NO: 29373 - RNA, 32 nt, Homo Sapiens
ggcggcaguuuuauuacuaaaguuuuauaagu

SEQ ID NO: 29374 - RNA, 32 nt, Homo Sapiens
gggaaggaacaucucccuuccagcaucugcug

SEQ ID NO: 29375 - RNA, 32 nt, Homo Sapiens
aaauauucucaaccaggguuucuuuaguggcc

SEQ ID NO: 29376 - RNA, 32 nt, Homo Sapiens
cuccaaagccagcagggcuugcugcugccuag

SEQ ID NO: 29377 - RNA, 32 nt, Homo Sapiens
guguuuguuuuaaggaaugaaacuugguuaag

SEQ ID NO: 29378 - RNA, 32 nt, Homo Sapiens
uccagcagcuggagcucuggaagaucaucgca

SEQ ID NO: 29379 - RNA, 32 nt, Homo Sapiens
uacugggcgggggucuggggagcgcagcagcc

SEQ ID NO: 29380 - RNA, 32 nt, Homo Sapiens
gggcugugguggccgugccugagcugcagcuc

SEQ ID NO: 29381 - RNA, 32 nt, Homo Sapiens
ugcgguuuucuuucuuuuuuucuuuuuaauua

SEQ ID NO: 29382 - RNA, 32 nt, Homo Sapiens
cuguauggguggagaacccacccccugcccac

SEQ ID NO: 29383 - RNA, 32 nt, Homo Sapiens
auagugaaacccugucucuaauaaaaauacga

SEQ ID NO: 29384 - RNA, 32 nt, Homo Sapiens
gguauuuguaauuucuucuccuuauucuuuaa

SEQ ID NO: 29385 - RNA, 32 nt, Homo Sapiens
ggucacaggcaggcagucugcagaccagaucu

SEQ ID NO: 29386 - RNA, 32 nt, Homo Sapiens
aggaaauguuucccuuugucccguuucacacu

SEQ ID NO: 29387 - RNA, 32 nt, Homo Sapiens
ucuagauucccugauuuccccaggccugcagc

SEQ ID NO: 29388 - RNA, 32 nt, Homo Sapiens
cugugccugccagucggugccccucccgcucc

SEQ ID NO: 29389 - RNA, 32 nt, Homo Sapiens
caaaagucaaggaagaacuuuacuucuccaau

SEQ ID NO: 29390 - RNA, 32 nt, Homo Sapiens
agugguucacauuuguaaucccagcacuuugg

SEQ ID NO: 29391 - RNA, 32 nt, Homo Sapiens
uuggagccgcuggggucguccaggcgcauccg

SEQ ID NO: 29392 - RNA, 32 nt, Homo Sapiens
ucuuguuuaagugaugugaugucuccgaggag

SEQ ID NO: 29393 - RNA, 30 nt, Homo Sapiens
ccgagggucaggcugcagaagcccagaauc

SEQ ID NO: 29394 - RNA, 32 nt, Homo Sapiens
agacuaguuuuuaguuaccaucuucccaaauc

SEQ ID NO: 29395 - RNA, 32 nt, Homo Sapiens
ucuuuuggauuuucuuuuuguggucauuguga

SEQ ID NO: 29396 - RNA, 32 nt, Homo Sapiens
gucaacucccgguuucccggcgcacgccccuc

SEQ ID NO: 29397 - RNA, 32 nt, Homo Sapiens
aaagauuucaucucccaccccagccucaagua

SEQ ID NO: 29398 - RNA, 32 nt, Homo Sapiens
ccucccuaguagcugggauuacagccaugcac

SEQ ID NO: 29399 - RNA, 32 nt, Homo Sapiens
gaaagcucugccagcuacccaggcugaacagc

SEQ ID NO: 29400 - RNA, 32 nt, Homo Sapiens
ggaacaggggccaggcagagggcgcggggcug

SEQ ID NO: 29401 - RNA, 32 nt, Homo Sapiens
agcuacauauccuccaauggauuguggugguc

SEQ ID NO: 29402 - RNA, 32 nt, Homo Sapiens
caaacaguuuguuuuuaccucugccuccuggu

SEQ ID NO: 29403 - RNA, 32 nt, Homo Sapiens
ugugagggugaacaggaaaugccuuguggaaa

SEQ ID NO: 29404 - RNA, 32 nt, Homo Sapiens
uacgcacuccagaugccuggaacaccauugca

SEQ ID NO: 29405 - RNA, 32 nt, Homo Sapiens
uuauuaguauauuaugaccauuauaacauuuu

SEQ ID NO: 29406 - RNA, 32 nt, Homo Sapiens
agaugggcaggcguugaacugcggcuuuucuc

SEQ ID NO: 29407 - RNA, 29 nt, Homo Sapiens
aggaaguugguuuuuuauuuucuauuuuu

SEQ ID NO: 29408 - RNA, 29 nt, Homo Sapiens
gggguucggggaccggcugccggccuccc

SEQ ID NO: 29409 - RNA, 32 nt, Homo Sapiens
caagcaauaaaguggaagacuaaccaagauuu

SEQ ID NO: 29410 - RNA, 32 nt, Homo Sapiens
uuacagagaaauugagcauauuugagaguccu

SEQ ID NO: 29411 - RNA, 32 nt, Homo Sapiens
ugggauccacacugagagaguggagagugaca

SEQ ID NO: 29412 - RNA, 32 nt, Homo Sapiens
cuggggcagguggucugcuuuugugucucugu

SEQ ID NO: 29413 - RNA, 32 nt, Homo Sapiens
ggaaaucagaggugaugacaugauuuggcuug

SEQ ID NO: 29414 - RNA, 32 nt, Homo Sapiens
gcccgucccacucaccuccccccuguggaggg

SEQ ID NO: 29415 - RNA, 32 nt, Homo Sapiens
uaaggaguuuaguguuacuaagaaaaucugcu

SEQ ID NO: 29416 - RNA, 32 nt, Homo Sapiens
uuauccucagcaaacuaacaaaggaagagaaa

SEQ ID NO: 29417 - RNA, 32 nt, Homo Sapiens
ggcacgagcuggcucgcgcgugccuuuucccc

SEQ ID NO: 29418 - RNA, 32 nt, Homo Sapiens
ccuggaggcgagaggaggaggacauccugcgg

SEQ ID NO: 29419 - RNA, 32 nt, Homo Sapiens
cagcucgagagacauucagagauggaacacac

SEQ ID NO: 29420 - RNA, 32 nt, Homo Sapiens
ccagugggagaggagaggagggggaggucauu

SEQ ID NO: 29421 - RNA, 32 nt, Homo Sapiens
gaauagaucauuguuuuguacacacacacaau

SEQ ID NO: 29422 - RNA, 30 nt, Homo Sapiens
ugcgguggcaggcgugcuggccggcgugga

SEQ ID NO: 29423 - RNA, 32 nt, Homo Sapiens
guguaacgggcacuguguuacacucugaggug

SEQ ID NO: 29424 - RNA, 32 nt, Homo Sapiens
ugcugaaucaguagcaccaacauguguaccca

SEQ ID NO: 29425 - RNA, 32 nt, Homo Sapiens
aagcagcccccucuccuaucucaagccauccu

SEQ ID NO: 29426 - RNA, 32 nt, Homo Sapiens
ucagguguuuuaagacugaauguuuuauuuau

SEQ ID NO: 29427 - RNA, 32 nt, Homo Sapiens
cccuguaccugcucccacccagcccuuggugu

SEQ ID NO: 29428 - RNA, 32 nt, Homo Sapiens
cagaauaaaaggaaauauuuuaaaagccaaaa

SEQ ID NO: 29429 - RNA, 32 nt, Homo Sapiens
ggccuguuccccagcccugccuggaagccccg

SEQ ID NO: 29430 - RNA, 32 nt, Homo Sapiens
ggagccggagguguagcggcagagacauuguu

SEQ ID NO: 29431 - RNA, 32 nt, Homo Sapiens
uccuccauaucgaauaauaaugacacauaucg

SEQ ID NO: 29432 - RNA, 32 nt, Homo Sapiens
ucugccugucccuuuuuccccugggguuugac

SEQ ID NO: 29433 - RNA, 32 nt, Homo Sapiens
aaagaucaacacaggcuaaaacaaaaacaauu

SEQ ID NO: 29434 - RNA, 32 nt, Homo Sapiens
acugcccaggacugcggguugcuggcuuguac

SEQ ID NO: 29435 - RNA, 32 nt, Homo Sapiens
aguuggggacgccaggucggugggaggcuggu

SEQ ID NO: 29436 - RNA, 32 nt, Homo Sapiens
cuccagcccccggcgccugccgccucgcagcc

SEQ ID NO: 29437 - RNA, 32 nt, Homo Sapiens
cccuucuuuuacaguagcacaaacaaaguagg

SEQ ID NO: 29438 - RNA, 32 nt, Homo Sapiens
guucuucccuccccauccccaccccccaccca

SEQ ID NO: 29439 - RNA, 32 nt, Homo Sapiens
gcggcggcagaggcggcggcuccagcuucggc

SEQ ID NO: 29440 - RNA, 32 nt, Homo Sapiens
cuucccccaccccacacccuucacccucugug

SEQ ID NO: 29441 - RNA, 32 nt, Homo Sapiens
gggagagccaguugcgcagagcccugcaacca

SEQ ID NO: 29442 - RNA, 32 nt, Homo Sapiens
cgggccucauuucuuauccccgccaaggguuu

SEQ ID NO: 29443 - RNA, 32 nt, Homo Sapiens
ccucacucucugaugucauuaagggucuuggg

SEQ ID NO: 29444 - RNA, 32 nt, Homo Sapiens
ucgcugcccgcguuugcgcagccccgggccau

SEQ ID NO: 29445 - RNA, 32 nt, Homo Sapiens
ccgcggccggccuggcuucacuggcgcccuuu

SEQ ID NO: 29446 - RNA, 32 nt, Homo Sapiens
ggcccugucuccgggcagcugcagcauaacac

SEQ ID NO: 29447 - RNA, 32 nt, Homo Sapiens
gugagaguguagucccugggcuugcccugggu

SEQ ID NO: 29448 - RNA, 32 nt, Homo Sapiens
caggccccaagcccaggauuggggucuccaga

SEQ ID NO: 29449 - RNA, 32 nt, Homo Sapiens
gcucugacaaccuguggcaugcugcaggguca

SEQ ID NO: 29450 - RNA, 32 nt, Homo Sapiens
cacuuauacauccagauggccugaagcaacug

SEQ ID NO: 29451 - RNA, 32 nt, Homo Sapiens
aaagagaugacagagucaauauaggguugcca

SEQ ID NO: 29452 - RNA, 32 nt, Homo Sapiens
aauugcaucuucauuggcuugguauuuccuaa

SEQ ID NO: 29453 - RNA, 32 nt, Homo Sapiens
guucaaccaaaauugauucuuggaacuguaaa

SEQ ID NO: 29454 - RNA, 32 nt, Homo Sapiens
caauuaucaaggaaaaauaagaugcaaauagc

SEQ ID NO: 29455 - RNA, 32 nt, Homo Sapiens
aagguuugauucaaacagagccuuuucugucc

SEQ ID NO: 29456 - RNA, 32 nt, Homo Sapiens
cgugggcugugcuacauacaggcccccacagc

SEQ ID NO: 29457 - RNA, 32 nt, Homo Sapiens
caccagcgugggccaucuccaggggcucucaa

SEQ ID NO: 29458 - RNA, 32 nt, Homo Sapiens
ugaauacucuuauguuuauuaaggguugcgga

SEQ ID NO: 29459 - RNA, 32 nt, Homo Sapiens
acauggccacugugucagcugcaugccuuccc

SEQ ID NO: 29460 - RNA, 32 nt, Homo Sapiens
gugagagggugugcgcugguacggacauaaaa

SEQ ID NO: 29461 - RNA, 29 nt, Homo Sapiens
cugacucggggacuugggauguuccucuu

SEQ ID NO: 29462 - RNA, 32 nt, Homo Sapiens
uaguugugccuggcucaggagcucuaggacaa

SEQ ID NO: 29463 - RNA, 32 nt, Homo Sapiens
cccucuccugagccuccuuccaucuuuaauaa

SEQ ID NO: 29464 - RNA, 32 nt, Homo Sapiens
guaucagcaauguuuaccaugcucauaaucaa

SEQ ID NO: 29465 - RNA, 32 nt, Homo Sapiens
ugacaucucccucuccuugcuggcuccaucuu

SEQ ID NO: 29466 - RNA, 32 nt, Homo Sapiens
ccccacaaucccaugacugaguggagaccaac

SEQ ID NO: 29467 - RNA, 32 nt, Homo Sapiens
aguaccuaauuucucucuguccccugagaucu

SEQ ID NO: 29468 - RNA, 32 nt, Homo Sapiens
agaaacggguaauuaaaacagcagcuuuagaa

SEQ ID NO: 29469 - RNA, 32 nt, Homo Sapiens
cugaugguugcugcugguguuggcgaauuuga

SEQ ID NO: 29470 - RNA, 32 nt, Homo Sapiens
uuuaagagguggauguuugggauuguauuauu

SEQ ID NO: 29471 - RNA, 32 nt, Homo Sapiens
aauaaugcugcuaugaagaugaguguacaagu

SEQ ID NO: 29472 - RNA, 32 nt, Homo Sapiens
uggaggucgagggggucggggaggaugaggac

SEQ ID NO: 29473 - RNA, 32 nt, Homo Sapiens
agcucuccaagcccaggauucuggcaagagag

SEQ ID NO: 29474 - RNA, 32 nt, Homo Sapiens
aaccccagcaggccgccucccaacucccagug

SEQ ID NO: 29475 - RNA, 32 nt, Homo Sapiens
aucgugggcugagcagaguuaaaccaugggac

SEQ ID NO: 29476 - RNA, 32 nt, Homo Sapiens
gggugcucagaauaaggcaggcauugaggaag

SEQ ID NO: 29477 - RNA, 32 nt, Homo Sapiens
auuagcuggucgcgguggcuucugccugugau

SEQ ID NO: 29478 - RNA, 32 nt, Homo Sapiens
gcuuccccaucccggaguuccccugcucccca

SEQ ID NO: 29479 - RNA, 32 nt, Homo Sapiens
agacuaccaaaaucuaaguugguuuaauaguu

SEQ ID NO: 29480 - RNA, 32 nt, Homo Sapiens
uguuccuuuuccucuuuuuugucacuuuaaag

SEQ ID NO: 29481 - RNA, 32 nt, Homo Sapiens
ucugaccccuggaggagccacuguggaagcag

SEQ ID NO: 29482 - RNA, 32 nt, Homo Sapiens
gaaaucagugucuuuuacguuguuaugaugaa

SEQ ID NO: 29483 - RNA, 32 nt, Homo Sapiens
uugaaacauuuauauauagagagguacacauu

SEQ ID NO: 29484 - RNA, 32 nt, Homo Sapiens
cuccuaucgugggaacccuugucuguggcauc

SEQ ID NO: 29485 - RNA, 32 nt, Homo Sapiens
acugugcaguauuucugacauauacuauaaaa

SEQ ID NO: 29486 - RNA, 32 nt, Homo Sapiens
gcugggugucccuggcccacucccaguccccu

SEQ ID NO: 29487 - RNA, 32 nt, Homo Sapiens
cuccucgcagcaccgcgccgcgcggggcccag

SEQ ID NO: 29488 - RNA, 32 nt, Homo Sapiens
auaugcauuaugugcagguaugauauuuucuu

SEQ ID NO: 29489 - RNA, 32 nt, Homo Sapiens
aggaagccucuuucucuguuucccugggugag

SEQ ID NO: 29490 - RNA, 32 nt, Homo Sapiens
gggaacagccaggugccccaguccucugauuu

SEQ ID NO: 29491 - RNA, 32 nt, Homo Sapiens
gaagccuagaaagaagugacugcucacaggau

SEQ ID NO: 29492 - RNA, 32 nt, Homo Sapiens
ugaguccccucuguagugccucugccagacac

SEQ ID NO: 29493 - RNA, 32 nt, Homo Sapiens
uguauuuguaaaaugaaugaauggauccuaua

SEQ ID NO: 29494 - RNA, 32 nt, Homo Sapiens
cucugcauuuucugccaaaaucugugucagau

SEQ ID NO: 29495 - RNA, 32 nt, Homo Sapiens
uaaucucaaaaauuaagcaugucuuuggugaa

SEQ ID NO: 29496 - RNA, 32 nt, Homo Sapiens
uggggaauucugaggaggaaauaaauugcaga

SEQ ID NO: 29497 - RNA, 32 nt, Homo Sapiens
uacacacgcugcugacaugacucuucacugac

SEQ ID NO: 29498 - RNA, 32 nt, Homo Sapiens
gcagcuguuagucuccuuccuuuggcucuuga

SEQ ID NO: 29499 - RNA, 32 nt, Homo Sapiens
gaagaaauauauauuaacacuguggucaggua

SEQ ID NO: 29500 - RNA, 32 nt, Homo Sapiens
agcuuuuauguacagcucugauucuguaauac

SEQ ID NO: 29501 - RNA, 32 nt, Homo Sapiens
guggaaacagcuacacuauccaacagugggga

SEQ ID NO: 29502 - RNA, 32 nt, Homo Sapiens
gucuguugaaaauucuagugaagccauccuuu

SEQ ID NO: 29503 - RNA, 32 nt, Homo Sapiens
auguaaacacaucagcagcagggcuuaugugu

SEQ ID NO: 29504 - RNA, 32 nt, Homo Sapiens
gagacaguguaaaaaccucaaaguacaguagg

SEQ ID NO: 29505 - RNA, 32 nt, Homo Sapiens
cgccggcggggaaggaggagcgcuaggucggu

SEQ ID NO: 29506 - RNA, 32 nt, Homo Sapiens
aagucauguucaugcccugauuuuauauacuu

SEQ ID NO: 29507 - RNA, 32 nt, Homo Sapiens
gaagaaauccugggaauugaccuuguaaucga

SEQ ID NO: 29508 - RNA, 32 nt, Homo Sapiens
ugagugcaguggcgugaucuggacucacugua

SEQ ID NO: 29509 - RNA, 32 nt, Homo Sapiens
caaggagauccaccauuucuucugccacgugc

SEQ ID NO: 29510 - RNA, 32 nt, Homo Sapiens
ggcagcccggaacaucgcuucugcuccuaagu

SEQ ID NO: 29511 - RNA, 32 nt, Homo Sapiens
ucuccccccucccccgccugggcuucacuucc

SEQ ID NO: 29512 - RNA, 32 nt, Homo Sapiens
ugagcaggcuuugacucguucuccucccuggc

SEQ ID NO: 29513 - RNA, 32 nt, Homo Sapiens
ccagguucaagcgguucuccugccucagccuc

SEQ ID NO: 29514 - RNA, 32 nt, Homo Sapiens
aaugucuucuauauguaauaucuuacauguuu

SEQ ID NO: 29515 - RNA, 32 nt, Homo Sapiens
acauaaaauauguuucuauuuagaugaagugg

SEQ ID NO: 29516 - RNA, 32 nt, Homo Sapiens
ugagguguugugcauuuguucagcucccccag

SEQ ID NO: 29517 - RNA, 32 nt, Homo Sapiens
cuauguaucuguuauuuaaaacauggagaaac

SEQ ID NO: 29518 - RNA, 32 nt, Homo Sapiens
ggaaggauaaaaccuuugacauccccuugugu

SEQ ID NO: 29519 - RNA, 32 nt, Homo Sapiens
accacucaaauuaguugucaugcucuguguaa

SEQ ID NO: 29520 - RNA, 32 nt, Homo Sapiens
uaagcauauccuggacgccccuccccccucug

SEQ ID NO: 29521 - RNA, 32 nt, Homo Sapiens
aggaaccuagaguauugccuaguacagaguag

SEQ ID NO: 29522 - RNA, 32 nt, Homo Sapiens
uggguacuuucugcauugggaccaggcagccg

SEQ ID NO: 29523 - RNA, 32 nt, Homo Sapiens
cugcccaggacacagugcaggccagagcgggc

SEQ ID NO: 29524 - RNA, 32 nt, Homo Sapiens
gcauuauaucuaggaaccauauuauuuaaaau

SEQ ID NO: 29525 - RNA, 32 nt, Homo Sapiens
uuacaucccaggggccucaugccuaagauaga

SEQ ID NO: 29526 - RNA, 32 nt, Homo Sapiens
cuggagggaaaggguagcugagucugcuuagg

SEQ ID NO: 29527 - RNA, 32 nt, Homo Sapiens
gccucacucagcucacagggcgugccaggcgg

SEQ ID NO: 29528 - RNA, 32 nt, Homo Sapiens
gaaacauaaaaugcaaauaaacauaaaucuau

SEQ ID NO: 29529 - RNA, 32 nt, Homo Sapiens
gucacgucugcaguagccaaacaucaauaaga

SEQ ID NO: 29530 - RNA, 32 nt, Homo Sapiens
aaauaggaaucauucagaaauguugagucugu

SEQ ID NO: 29531 - RNA, 32 nt, Homo Sapiens
uaccugcagcagacaacucugaauuaaagcau

SEQ ID NO: 29532 - RNA, 32 nt, Homo Sapiens
gcgcccagcgguagcccuccuugcgccuccga

SEQ ID NO: 29533 - RNA, 30 nt, Homo Sapiens
cuggcgggguucggcggcgggcgagugacu

SEQ ID NO: 29534 - RNA, 32 nt, Homo Sapiens
ggccucuguaggcuguccuucuuccaguggga

SEQ ID NO: 29535 - RNA, 30 nt, Homo Sapiens
gugccagagcccgugcccccacgcaugggu

SEQ ID NO: 29536 - RNA, 32 nt, Homo Sapiens
guuaugcacacuuuacaaacaaggggauugag

SEQ ID NO: 29537 - RNA, 32 nt, Homo Sapiens
cggcagaggcggauggaggaugaacuggagcc

SEQ ID NO: 29538 - RNA, 30 nt, Homo Sapiens
ugggcugguugugcugcaggcucccccuga

SEQ ID NO: 29539 - RNA, 32 nt, Homo Sapiens
guggagaggagcuuccucccgagcugccccuc

SEQ ID NO: 29540 - RNA, 32 nt, Homo Sapiens
aaucaaguggaugaugagaccaauuacaggcc

SEQ ID NO: 29541 - RNA, 32 nt, Homo Sapiens
ugaaacuaaacacacacacaaacaaguacaag

SEQ ID NO: 29542 - RNA, 32 nt, Homo Sapiens
cugagcaagcacccccaccacccaggccucug

SEQ ID NO: 29543 - RNA, 32 nt, Homo Sapiens
ucaauaguacuugccgcaguacucuuaaaacu

SEQ ID NO: 29544 - RNA, 32 nt, Homo Sapiens
ccaccccuagucugcccuccccucucccccag

SEQ ID NO: 29545 - RNA, 32 nt, Homo Sapiens
guuuggugcaggugaauuuauuacugagccaa

SEQ ID NO: 29546 - RNA, 32 nt, Homo Sapiens
ugcagccuguccuucugagcugccggugcuca

SEQ ID NO: 29547 - RNA, 32 nt, Homo Sapiens
aguggguagcaggggccuccuccgccccugcc

SEQ ID NO: 29548 - RNA, 32 nt, Homo Sapiens
gauuugagcagcccuaucuuuaccgaacauac

SEQ ID NO: 29549 - RNA, 32 nt, Homo Sapiens
cgacaccccugccagccucccuggacaccacc

SEQ ID NO: 29550 - RNA, 31 nt, Homo Sapiens
cagcaggcugaaaguccaccaagggcugagg

SEQ ID NO: 29551 - RNA, 32 nt, Homo Sapiens
uccuucugagggccacugcagaugacucuccu

SEQ ID NO: 29552 - RNA, 32 nt, Homo Sapiens
cacacgagguaacacuuauuuuccacagggua

SEQ ID NO: 29553 - RNA, 32 nt, Homo Sapiens
uuuccuuugugccaguuccuuuuacacgacuu

SEQ ID NO: 29554 - RNA, 32 nt, Homo Sapiens
ccugcggcgcagagaggcugggcuugcaggcg

SEQ ID NO: 29555 - RNA, 32 nt, Homo Sapiens
aauggaauaaaguuuuaucaaaauauugcuaa

SEQ ID NO: 29556 - RNA, 32 nt, Homo Sapiens
gcaaagcucuaacugaacggaccuucuuauuc

SEQ ID NO: 29557 - RNA, 32 nt, Homo Sapiens
ggaaguuggcguacagagacccccgcuuugcu

SEQ ID NO: 29558 - RNA, 32 nt, Homo Sapiens
gggaauaaacugugucccaccuguuuacuugu

SEQ ID NO: 29559 - RNA, 32 nt, Homo Sapiens
ucuguuuuuaaaccaacaaacauguuacuauu

SEQ ID NO: 29560 - RNA, 27 nt, Homo Sapiens
cuaagaucuuccuucagcccaccucag

SEQ ID NO: 29561 - RNA, 32 nt, Homo Sapiens
acugggcgucgugccccuccccggagaggcag

SEQ ID NO: 29562 - RNA, 32 nt, Homo Sapiens
uggggucuguugugguccuuccacggugucag

SEQ ID NO: 29563 - RNA, 32 nt, Homo Sapiens
uagaauuaaaaauuauuuagaaaaaaaaaaaa

SEQ ID NO: 29564 - RNA, 32 nt, Homo Sapiens
agaguuagcaauaaaaaguucaaaugguucca

SEQ ID NO: 29565 - RNA, 32 nt, Homo Sapiens
aaggaugcacgaauggguucgaaugaaauugu

SEQ ID NO: 29566 - RNA, 32 nt, Homo Sapiens
ccucgaguugcaguaauugaaaaaaugcucaa

SEQ ID NO: 29567 - RNA, 29 nt, Homo Sapiens
uccuguauauguaucuacaugggagacag

SEQ ID NO: 29568 - RNA, 32 nt, Homo Sapiens
caggcggaaguacugagggcgagggucccgau

SEQ ID NO: 29569 - RNA, 32 nt, Homo Sapiens
gucacuuaaugauggggauguguucugagaaa

SEQ ID NO: 29570 - RNA, 32 nt, Homo Sapiens
ggugacauuuauagcgaugcuagacagagcuc

SEQ ID NO: 29571 - RNA, 32 nt, Homo Sapiens
gaauucccaugcauagagaauauguguaggga

SEQ ID NO: 29572 - RNA, 32 nt, Homo Sapiens
ggccaggcucacagaagcuggcuucugggacu

SEQ ID NO: 29573 - RNA, 32 nt, Homo Sapiens
gaucccugucccgcccuuggccacaggcaccu

SEQ ID NO: 29574 - RNA, 32 nt, Homo Sapiens
agucggagccacugguccugcugcuggcugcc

SEQ ID NO: 29575 - RNA, 32 nt, Homo Sapiens
gaaaguuaccguguguucccacuguaucugca

SEQ ID NO: 29576 - RNA, 32 nt, Homo Sapiens
gucaucauuuuucuuccuguggaauaaaaugc

SEQ ID NO: 29577 - RNA, 32 nt, Homo Sapiens
uaaauaaaggcauguguauggcuggucaaaaa

SEQ ID NO: 29578 - RNA, 32 nt, Homo Sapiens
uucccgaaauaagacaauaagaggcuuuucuc

SEQ ID NO: 29579 - RNA, 32 nt, Homo Sapiens
cugcuccacgacgugaccauggccgggcugca

SEQ ID NO: 29580 - RNA, 32 nt, Homo Sapiens
uugggcccucucccauccagugucucacagcc

SEQ ID NO: 29581 - RNA, 32 nt, Homo Sapiens
gcuuggacaaugaaacccugaccuugcugcau

SEQ ID NO: 29582 - RNA, 32 nt, Homo Sapiens
aucagccugggcaauauagugaaaccccaucu

SEQ ID NO: 29583 - RNA, 32 nt, Homo Sapiens
uccccugcagcacgaaauguccuccaugagcu

SEQ ID NO: 29584 - RNA, 32 nt, Homo Sapiens
cacagauuugcggaagaaccugaccguggacg

SEQ ID NO: 29585 - RNA, 32 nt, Homo Sapiens
gagcucaacgagcagcugggaaugcucaugga

SEQ ID NO: 29586 - RNA, 32 nt, Homo Sapiens
ucaucuccauuuauuucuuuuguucccgcuca

SEQ ID NO: 29587 - RNA, 32 nt, Homo Sapiens
caggccgccccaguguccuccuccuucuccgg

SEQ ID NO: 29588 - RNA, 32 nt, Homo Sapiens
auccuuggacccacaguggagcgcuggucugu

SEQ ID NO: 29589 - RNA, 32 nt, Homo Sapiens
caaaucgcgacugcucccacagaugggcccug

SEQ ID NO: 29590 - RNA, 32 nt, Homo Sapiens
ggaacauaauuucucauggcagcuuuuacuaa

SEQ ID NO: 29591 - RNA, 30 nt, Homo Sapiens
gggaaggggaagcuugggguucagagggga

SEQ ID NO: 29592 - RNA, 32 nt, Homo Sapiens
cauccucuuucugcuccucgacacacgcaagc

SEQ ID NO: 29593 - RNA, 24 nt, Homo Sapiens
uguccaguuacagaaucaagaagc

SEQ ID NO: 29594 - RNA, 32 nt, Homo Sapiens
ugaauucuaguuuagaguuagcagacuaccca

SEQ ID NO: 29595 - RNA, 32 nt, Homo Sapiens
gugaagguccuaaaucuccccaaacuaacugg

SEQ ID NO: 29596 - RNA, 30 nt, Homo Sapiens
ggcgcgcucugcaaaggggaaacugaggcc

SEQ ID NO: 29597 - RNA, 32 nt, Homo Sapiens
caacuggucuuguagaauuuaagcaacuccuu

SEQ ID NO: 29598 - RNA, 32 nt, Homo Sapiens
ugauuagaaguaccuaauaguuugaacagaua

SEQ ID NO: 29599 - RNA, 32 nt, Homo Sapiens
ggcucccauuuucugauguuccgccccacugu

SEQ ID NO: 29600 - RNA, 32 nt, Homo Sapiens
guagcucaggaacaucacugguguauuuguuu

SEQ ID NO: 29601 - RNA, 32 nt, Homo Sapiens
aaccauuaugaaacaguuagauaaucauaaaa

SEQ ID NO: 29602 - RNA, 32 nt, Homo Sapiens
cggcggugguggcccgcggagcggacaggggc

SEQ ID NO: 29603 - RNA, 32 nt, Homo Sapiens
uuucuaaguggaaguuaaauuuguuauacugc

SEQ ID NO: 29604 - RNA, 32 nt, Homo Sapiens
acugugauguugggaccugaggacuggauggu

SEQ ID NO: 29605 - RNA, 32 nt, Homo Sapiens
gcccagccucuccccacccccaccuuguucau

SEQ ID NO: 29606 - RNA, 32 nt, Homo Sapiens
uguccagcuuuuuaggaaauacauuucgccua

SEQ ID NO: 29607 - RNA, 32 nt, Homo Sapiens
ggccacacugcuacaauccagcacuaacuauc

SEQ ID NO: 29608 - RNA, 32 nt, Homo Sapiens
cucauuucucaaccuuuuccaagccacguaac

SEQ ID NO: 29609 - RNA, 32 nt, Homo Sapiens
gaggggcacgcagcccccacccugcccuggcu

SEQ ID NO: 29610 - RNA, 32 nt, Homo Sapiens
guccucgcccugcacucccgggacgccgcauc

SEQ ID NO: 29611 - RNA, 32 nt, Homo Sapiens
ugcucaccugaggauaacucaauauaacuaug

SEQ ID NO: 29612 - RNA, 32 nt, Homo Sapiens
ccucacuuagggccucauggccaggcaucagg

SEQ ID NO: 29613 - RNA, 32 nt, Homo Sapiens
gggugcgcuccagcccccaacccaggcacugg

SEQ ID NO: 29614 - RNA, 31 nt, Homo Sapiens
gggcaccggcacugcggggucuucguucuca

SEQ ID NO: 29615 - RNA, 32 nt, Homo Sapiens
acucucaguagauguuuguguuugucaagauu

SEQ ID NO: 29616 - RNA, 32 nt, Homo Sapiens
gcagggaaugcaucggggauagcugauggugc

SEQ ID NO: 29617 - RNA, 32 nt, Homo Sapiens
auauauaaaaauuaaauuacuggauuuaccug

SEQ ID NO: 29618 - RNA, 32 nt, Homo Sapiens
gcaguccccuccccgagaaccauccccuugcc

SEQ ID NO: 29619 - RNA, 32 nt, Homo Sapiens
ugcuaucccucccuccucccccuaccccacga

SEQ ID NO: 29620 - RNA, 32 nt, Homo Sapiens
ccgagccgagcugggggcgcagagcgcgggag

SEQ ID NO: 29621 - RNA, 32 nt, Homo Sapiens
uucugcuuccgcgaccccggcggugcagggcg

SEQ ID NO: 29622 - RNA, 32 nt, Homo Sapiens
acuauguaaaucuuuuuuuaaucuucuuccua

SEQ ID NO: 29623 - RNA, 30 nt, Homo Sapiens
aaguggcucccgaggaagccggcgccgggg

SEQ ID NO: 29624 - RNA, 32 nt, Homo Sapiens
guaauuagagucgggucccguuguguauaugc

SEQ ID NO: 29625 - RNA, 32 nt, Homo Sapiens
uugggaauccggaggcugggguuuuaguaaag

SEQ ID NO: 29626 - RNA, 32 nt, Homo Sapiens
ggcaggaccuguggagauagggaaggggccgg

SEQ ID NO: 29627 - RNA, 32 nt, Homo Sapiens
uguguuugccuugccuggugcuuccucccuca

SEQ ID NO: 29628 - RNA, 32 nt, Homo Sapiens
cagcaggugggaggggugggacagagguggag

SEQ ID NO: 29629 - RNA, 32 nt, Homo Sapiens
ggugaagaauacugggggaggguguggugggu

SEQ ID NO: 29630 - RNA, 32 nt, Homo Sapiens
uccuuacaaacccugggcccagcccucauugc

SEQ ID NO: 29631 - RNA, 32 nt, Homo Sapiens
caaggagaguccuuccucuccccuuuugaggc

SEQ ID NO: 29632 - RNA, 32 nt, Homo Sapiens
aguucaaguguaugcccacagcuccucaugcc

SEQ ID NO: 29633 - RNA, 32 nt, Homo Sapiens
uuccggugacucuggaggaagaggugggcccc

SEQ ID NO: 29634 - RNA, 32 nt, Homo Sapiens
auucccuuuagagucuacaaaaauguuuuuaa

SEQ ID NO: 29635 - RNA, 30 nt, Homo Sapiens
gagcaagucaccccuuuguacugaauuguc

SEQ ID NO: 29636 - RNA, 32 nt, Homo Sapiens
uuugaagguucaaugcuugcauguguuuauuu

SEQ ID NO: 29637 - RNA, 32 nt, Homo Sapiens
ucgguucugcccggcgguggacccacgagcgc

SEQ ID NO: 29638 - RNA, 32 nt, Homo Sapiens
acagcagaauacauuuuaccagcaaaccuaag

SEQ ID NO: 29639 - RNA, 32 nt, Homo Sapiens
gccaccccgucccuccucucccgcagucugaa

SEQ ID NO: 29640 - RNA, 32 nt, Homo Sapiens
auggguggcagagcuuuaucacauguuuaauu

SEQ ID NO: 29641 - RNA, 32 nt, Homo Sapiens
ggaggcugcaguacuccugugugucacuccca

SEQ ID NO: 29642 - RNA, 32 nt, Homo Sapiens
ccccgacccuuuuccccuccccgggccaccca

SEQ ID NO: 29643 - RNA, 32 nt, Homo Sapiens
ccuaaauauuuguaaguugguauaaauuguaa

SEQ ID NO: 29644 - RNA, 32 nt, Homo Sapiens
ugucagagggcgguuuugagcuuucuauaagc

SEQ ID NO: 29645 - RNA, 32 nt, Homo Sapiens
ugccacugcacuccagccugggcgauggagug

SEQ ID NO: 29646 - RNA, 32 nt, Homo Sapiens
uucuggccgcugucccggugcgcacggacgug

SEQ ID NO: 29647 - RNA, 32 nt, Homo Sapiens
agcucugccuuaccauuggguuccuaauuaac

SEQ ID NO: 29648 - RNA, 32 nt, Homo Sapiens
uccuggccaacauggugacaccccgucucuac

SEQ ID NO: 29649 - RNA, 32 nt, Homo Sapiens
gugcaguucccggccccugccacccagccuca

SEQ ID NO: 29650 - RNA, 32 nt, Homo Sapiens
cucugcaaguggggagaccacccccgcaagcc

SEQ ID NO: 29651 - RNA, 32 nt, Homo Sapiens
gcagaaguugcagagaagagugaggcacguuu

SEQ ID NO: 29652 - RNA, 32 nt, Homo Sapiens
ggagcaccgagaccagccuggggagccgguga

SEQ ID NO: 29653 - RNA, 32 nt, Homo Sapiens
accagaggggaaaaaaucauauucuaacuuau

SEQ ID NO: 29654 - RNA, 32 nt, Homo Sapiens
cagacauuugaaaacuaugacuuuaauguuaa

SEQ ID NO: 29655 - RNA, 32 nt, Homo Sapiens
uuucaagcucugcggaggugcagucacagcua

SEQ ID NO: 29656 - RNA, 32 nt, Homo Sapiens
cguguaaaaauaucuuuuuuucuuaaauaacu

SEQ ID NO: 29657 - RNA, 31 nt, Homo Sapiens
cuggcuuguaggggcuccagagccugcuucc

SEQ ID NO: 29658 - RNA, 32 nt, Homo Sapiens
gaauuaaugcuguagauuuaauuuauuuuuau

SEQ ID NO: 29659 - RNA, 32 nt, Homo Sapiens
gcucaccuggcacuaacacuuuucaaucuuca

SEQ ID NO: 29660 - RNA, 32 nt, Homo Sapiens
caggugggaggcgggcggaggugcuuguucca

SEQ ID NO: 29661 - RNA, 32 nt, Homo Sapiens
gugucuccuaagucucgucuccuguccccagc

SEQ ID NO: 29662 - RNA, 30 nt, Homo Sapiens
cgggagcccgagucgccgccggcgucggug

SEQ ID NO: 29663 - RNA, 32 nt, Homo Sapiens
gccuucccuuuacagcucuccuccagcccugg

SEQ ID NO: 29664 - RNA, 32 nt, Homo Sapiens
cccccaaauggcuauuacaaaggggcagccca

SEQ ID NO: 29665 - RNA, 32 nt, Homo Sapiens
gauuuuaguucuucuuuauaggucauugaucc

SEQ ID NO: 29666 - RNA, 32 nt, Homo Sapiens
aaaauguacuuugaaagaaccgguuaagugaa

SEQ ID NO: 29667 - RNA, 32 nt, Homo Sapiens
gccaacaggugacacggucaucgaagagcagc

SEQ ID NO: 29668 - RNA, 32 nt, Homo Sapiens
cuccagagaccgagagguugaugucacuccca

SEQ ID NO: 29669 - RNA, 32 nt, Homo Sapiens
cuagcucuggggguggcgggggcccccacacg

SEQ ID NO: 29670 - RNA, 32 nt, Homo Sapiens
guuucugacucuaaaccuguuuuaucagaaaa

SEQ ID NO: 29671 - RNA, 32 nt, Homo Sapiens
uccugucccggcgccuuccgcgcaccggccac

SEQ ID NO: 29672 - RNA, 32 nt, Homo Sapiens
cucuccaucagggaguggucuaucugggcagu

SEQ ID NO: 29673 - RNA, 32 nt, Homo Sapiens
gagcgagcgggaaggcgccgggcccgggacug

SEQ ID NO: 29674 - RNA, 32 nt, Homo Sapiens
gaugcgguagagaugggaggaaacccagcucc

SEQ ID NO: 29675 - RNA, 32 nt, Homo Sapiens
uccaagacaauuuuucuguuucaguuucaucu

SEQ ID NO: 29676 - RNA, 32 nt, Homo Sapiens
gccuuaauuggagucuaaacuccaccucccuc

SEQ ID NO: 29677 - RNA, 32 nt, Homo Sapiens
cguuuuacaaggaaacaaaacagcugcuuuca

SEQ ID NO: 29678 - RNA, 32 nt, Homo Sapiens
ccagcacucuggaagcuuugggaucccaggaa

SEQ ID NO: 29679 - RNA, 31 nt, Homo Sapiens
cccaggcagggucugucaccauagaaugucu

SEQ ID NO: 29680 - RNA, 32 nt, Homo Sapiens
ccccugaggacccaggcccacacccagcccuu

SEQ ID NO: 29681 - RNA, 32 nt, Homo Sapiens
uucuaucuuaaacaaaagucuuccucaauucu

SEQ ID NO: 29682 - RNA, 32 nt, Homo Sapiens
ggugcguggagguggagccugcggcuggagua

SEQ ID NO: 29683 - RNA, 32 nt, Homo Sapiens
uaauaccaaaggucaucaaacacauacaagga

SEQ ID NO: 29684 - RNA, 32 nt, Homo Sapiens
cuggggucgggggcccgggccuuacugaguug

SEQ ID NO: 29685 - RNA, 32 nt, Homo Sapiens
acuaaguugcuuucuuuuuuucaacacuguaa

SEQ ID NO: 29686 - RNA, 32 nt, Homo Sapiens
cugcuauccuuccccucaccccucagcccagg

SEQ ID NO: 29687 - RNA, 32 nt, Homo Sapiens
uggaggcggaggcagcuggggagguccgagcg

SEQ ID NO: 29688 - RNA, 32 nt, Homo Sapiens
cauguccagcauggacagagccagaguuaaga

SEQ ID NO: 29689 - RNA, 32 nt, Homo Sapiens
auauuuuuuguuaaaugauuucauucaauauc

SEQ ID NO: 29690 - RNA, 32 nt, Homo Sapiens
aauuuugcagaccgcuaaggcuauagacaaau

SEQ ID NO: 29691 - RNA, 32 nt, Homo Sapiens
auuuccugcauuguuuuuuaauaaaaagaagc

SEQ ID NO: 29692 - RNA, 32 nt, Homo Sapiens
gaagugguuuucuacagcuaugccaauuccug

SEQ ID NO: 29693 - RNA, 32 nt, Homo Sapiens
cacucaccuagagcugucugugccucucuggg

SEQ ID NO: 29694 - RNA, 32 nt, Homo Sapiens
uauuuuuuagcaugcauuguuucugugcccug

SEQ ID NO: 29695 - RNA, 32 nt, Homo Sapiens
agucugggcuuguuuguguuacugcauacugu

SEQ ID NO: 29696 - RNA, 32 nt, Homo Sapiens
ucugugagccuaguggggcugcugcgguucuc

SEQ ID NO: 29697 - RNA, 32 nt, Homo Sapiens
caccuaugccuauacuuuuuuaucucagaaaa

SEQ ID NO: 29698 - RNA, 32 nt, Homo Sapiens
uggaaucaauuucccagaagggaguugcucac

SEQ ID NO: 29699 - RNA, 32 nt, Homo Sapiens
cugauccucuuucuagaagcaccuggagggac

SEQ ID NO: 29700 - RNA, 30 nt, Homo Sapiens
uggguucucugugcugggcaggcucucgug

SEQ ID NO: 29701 - RNA, 32 nt, Homo Sapiens
agggaggguugaugggggaggcguggggaagg

SEQ ID NO: 29702 - RNA, 32 nt, Homo Sapiens
cgaggugaacaaaugaaucagagcugagauga

SEQ ID NO: 29703 - RNA, 30 nt, Homo Sapiens
ccacggggcuccugguggccggcgccuccu

SEQ ID NO: 29704 - RNA, 32 nt, Homo Sapiens
uuuaugccugauugaauacaccauagugagua

SEQ ID NO: 29705 - RNA, 30 nt, Homo Sapiens
gggacucuggugagcauccgucauuuuuag

SEQ ID NO: 29706 - RNA, 32 nt, Homo Sapiens
ugagaggaucuacuccacugucuaccacucau

SEQ ID NO: 29707 - RNA, 32 nt, Homo Sapiens
ccagccccugggauuggucaccucacucuucu

SEQ ID NO: 29708 - RNA, 32 nt, Homo Sapiens
uaguauggaaaacaauacggugauuccucaag

SEQ ID NO: 29709 - RNA, 32 nt, Homo Sapiens
aaaccagguacugcgaucacucaccugauuau

SEQ ID NO: 29710 - RNA, 32 nt, Homo Sapiens
cuugaacuugaaccucuuaccuugaagucugg

SEQ ID NO: 29711 - RNA, 32 nt, Homo Sapiens
acgaggucaggaguuugagaucagccuggcaa

SEQ ID NO: 29712 - RNA, 32 nt, Homo Sapiens
aacacuagaaaacacacuuccugcaccaacac

SEQ ID NO: 29713 - RNA, 32 nt, Homo Sapiens
cuuccugggcauccuggacaucgcgggcuuug

SEQ ID NO: 29714 - RNA, 32 nt, Homo Sapiens
ccuauuuccuuccccugcagcucagccaccuc

SEQ ID NO: 29715 - RNA, 32 nt, Homo Sapiens
aaagauuccuuccuuccuuacagcucauggau

SEQ ID NO: 29716 - RNA, 32 nt, Homo Sapiens
agauacauucaaagauuuucugauugacaauu

SEQ ID NO: 29717 - RNA, 32 nt, Homo Sapiens
gcauugaagauacauugccagguuguguuuuc

SEQ ID NO: 29718 - RNA, 32 nt, Homo Sapiens
agccaacuguggcucuuaauuuauugcauaau

SEQ ID NO: 29719 - RNA, 32 nt, Homo Sapiens
uggugacucaugccuuuuuuuaacgggaaaaa

SEQ ID NO: 29720 - RNA, 32 nt, Homo Sapiens
gauucguuaugaugagcagcugccagcugagc

SEQ ID NO: 29721 - RNA, 32 nt, Homo Sapiens
cagaaggaccuccugagcgaugacucaagugu

SEQ ID NO: 29722 - RNA, 32 nt, Homo Sapiens
agguccucaagugcucgugacacauaaucauu

SEQ ID NO: 29723 - RNA, 32 nt, Homo Sapiens
guacgugaauguuuaaugugcucucaaaacau

SEQ ID NO: 29724 - RNA, 32 nt, Homo Sapiens
uuuugguuuaugccuagagcuacuucaaggaa

SEQ ID NO: 29725 - RNA, 32 nt, Homo Sapiens
ccauucccugccgggggcggcccucgccgcgg

SEQ ID NO: 29726 - RNA, 32 nt, Homo Sapiens
ccugccaaccuccuccucccugcccagccucu

SEQ ID NO: 29727 - RNA, 32 nt, Homo Sapiens
ucugaccugcuccugcccuccugucucucucg

SEQ ID NO: 29728 - RNA, 32 nt, Homo Sapiens
gggagaagugggacaaaaaagaugcaguuuuc

SEQ ID NO: 29729 - RNA, 32 nt, Homo Sapiens
ccuuuugugcuaagguucuugcggugaaccag

SEQ ID NO: 29730 - RNA, 32 nt, Homo Sapiens
aaauauauucuauuuacauguaugucaacuca

SEQ ID NO: 29731 - RNA, 32 nt, Homo Sapiens
ccagugcgcgggucucgggaucacuucccagu

SEQ ID NO: 29732 - RNA, 32 nt, Homo Sapiens
aaaaaauuuuaacuuuacaguggauaaaucuu

SEQ ID NO: 29733 - RNA, 32 nt, Homo Sapiens
acacgcuuuacuaagccucggcuucuucaucu

SEQ ID NO: 29734 - RNA, 32 nt, Homo Sapiens
ccaggccugcccacuguucucaucgcaagcug

SEQ ID NO: 29735 - RNA, 32 nt, Homo Sapiens
uuaucuauuagaaaaugaaguaccuucugguu

SEQ ID NO: 29736 - RNA, 32 nt, Homo Sapiens
uguaaugugaauauuuaaaauaaaagaauuca

SEQ ID NO: 29737 - RNA, 32 nt, Homo Sapiens
cgagccaaguggggugucauggccgcgggggg

SEQ ID NO: 29738 - RNA, 32 nt, Homo Sapiens
cuggaagagcaguaucagcaucaucugggaac

SEQ ID NO: 29739 - RNA, 32 nt, Homo Sapiens
ggguaagcuagguggcucagggaguggcagaa

SEQ ID NO: 29740 - RNA, 32 nt, Homo Sapiens
gcggcugaggucagacagccggacccccgccu

SEQ ID NO: 29741 - RNA, 32 nt, Homo Sapiens
auuuuuaaaaauuguguuaagucuauguauaa

SEQ ID NO: 29742 - RNA, 32 nt, Homo Sapiens
ucugaagggcaucauuggaaaaauagcaguca

SEQ ID NO: 29743 - RNA, 32 nt, Homo Sapiens
ucuuuucuaaaauggagacaauaauuuccuac

SEQ ID NO: 29744 - RNA, 32 nt, Homo Sapiens
uuuauuuuacuuucuuuuggauugcacugauu

SEQ ID NO: 29745 - RNA, 32 nt, Homo Sapiens
ggagagggauggaggagaaggugguugaacug

SEQ ID NO: 29746 - RNA, 32 nt, Homo Sapiens
gaugauaagcuacaguuuuucuuagaaaguaa

SEQ ID NO: 29747 - RNA, 32 nt, Homo Sapiens
gggagcgcacgcgggaccagggaccaggcuga

SEQ ID NO: 29748 - RNA, 32 nt, Homo Sapiens
uauauuuuaauagaaauaaauuccuaaacucc

SEQ ID NO: 29749 - RNA, 32 nt, Homo Sapiens
gugggggguucgcuaugucggaugacgauucg

SEQ ID NO: 29750 - RNA, 32 nt, Homo Sapiens
ccucagaagaccagcgagauggcugccaacaa

SEQ ID NO: 29751 - RNA, 32 nt, Homo Sapiens
cuaccccaggacgcaugcagggcccccaugca

SEQ ID NO: 29752 - RNA, 32 nt, Homo Sapiens
uucauuugggcuugcuaucagaggaaguggag

SEQ ID NO: 29753 - RNA, 32 nt, Homo Sapiens
cuugucuagcuuaaugacucuaaaccccgucu

SEQ ID NO: 29754 - RNA, 32 nt, Homo Sapiens
gacuuuaaauaaauuucugaacuuuuuggaac

SEQ ID NO: 29755 - RNA, 32 nt, Homo Sapiens
cccuguuggcuaggguuggacugcacagucua

SEQ ID NO: 29756 - RNA, 32 nt, Homo Sapiens
agcaaacagaggaugaucuggaggaagagugu

SEQ ID NO: 29757 - RNA, 32 nt, Homo Sapiens
uauuaucuauaggugcuggggugcugggcgag

SEQ ID NO: 29758 - RNA, 32 nt, Homo Sapiens
acaacaaggacaagggcagcuccuagagcugg

SEQ ID NO: 29759 - RNA, 32 nt, Homo Sapiens
uuguaaaacugggaagaggcuggaagaagauu

SEQ ID NO: 29760 - RNA, 32 nt, Homo Sapiens
ucaccugguuggcucaucaaaccuggcaaccc

SEQ ID NO: 29761 - RNA, 32 nt, Homo Sapiens
caaucuacaggccagcaccuuucucuuggccg

SEQ ID NO: 29762 - RNA, 32 nt, Homo Sapiens
guagcaacgaguucuagaaaaauggagccuaa

SEQ ID NO: 29763 - RNA, 28 nt, Homo Sapiens
caagagggaggaucacauuugacuggac

SEQ ID NO: 29764 - RNA, 32 nt, Homo Sapiens
augccuuagugauaagcuuucauggcagagca

SEQ ID NO: 29765 - RNA, 32 nt, Homo Sapiens
acagcugcaauuuucucuguaccugggaugug

SEQ ID NO: 29766 - RNA, 32 nt, Homo Sapiens
aaaacucaggccacuucaucucuucucuuuca

SEQ ID NO: 29767 - RNA, 32 nt, Homo Sapiens
cauuaacugcgugccuggcccuaugagggcgg

SEQ ID NO: 29768 - RNA, 32 nt, Homo Sapiens
gucgccgcuaugccuccgcgcgcgccgccugc

SEQ ID NO: 29769 - RNA, 32 nt, Homo Sapiens
uucuucgugugguggucgcguccaucuucaag

SEQ ID NO: 29770 - RNA, 32 nt, Homo Sapiens
ugguuccuaggccuccucucccugcuggcaga

SEQ ID NO: 29771 - RNA, 32 nt, Homo Sapiens
cucgcggcccgaggcgggagggcucggcuucu

SEQ ID NO: 29772 - RNA, 32 nt, Homo Sapiens
agggaggaggggcucaugggacugcugagaag

SEQ ID NO: 29773 - RNA, 32 nt, Homo Sapiens
cccaaggaguaaguacaaauauuccuguuucu

SEQ ID NO: 29774 - RNA, 32 nt, Homo Sapiens
ggcugagagggcccgcggguaggcauggcggc

SEQ ID NO: 29775 - RNA, 32 nt, Homo Sapiens
ucccaugccucccuccuccccaccccacucca

SEQ ID NO: 29776 - RNA, 32 nt, Homo Sapiens
gguaugaugcuguucaaguucugucuugcgac

SEQ ID NO: 29777 - RNA, 32 nt, Homo Sapiens
gauuccacaaauuuauauugcaacacagagcu

SEQ ID NO: 29778 - RNA, 32 nt, Homo Sapiens
gaaaguuugcccgagggcuggugcaggcuugg

SEQ ID NO: 29779 - RNA, 32 nt, Homo Sapiens
uggggugccccucuccuucuuagcuaucauug

SEQ ID NO: 29780 - RNA, 32 nt, Homo Sapiens
cucagcugccaaaugggaagaauagaagaauu

SEQ ID NO: 29781 - RNA, 32 nt, Homo Sapiens
cucuguguuucuggggacaccagccaucaugu

SEQ ID NO: 29782 - RNA, 32 nt, Homo Sapiens
guuaggcaucuccuguauguaagacacaaggc

SEQ ID NO: 29783 - RNA, 32 nt, Homo Sapiens
ggccagaugugguggcucacgccugugauccu

SEQ ID NO: 29784 - RNA, 32 nt, Homo Sapiens
uuucucuuuuaaaauauccuguaacuacaaug

SEQ ID NO: 29785 - RNA, 32 nt, Homo Sapiens
ggucacuggaguaguugcuacucuucagaaua

SEQ ID NO: 29786 - RNA, 32 nt, Homo Sapiens
uuucagaaugauaaaaaauguuagaccaaaua

SEQ ID NO: 29787 - RNA, 32 nt, Homo Sapiens
acacuacgcacuggacagcaucagaaauccuc

SEQ ID NO: 29788 - RNA, 32 nt, Homo Sapiens
auuuauacuguaacauuguaauauugcugugc

SEQ ID NO: 29789 - RNA, 32 nt, Homo Sapiens
gccgagaguccaggccuugccucccccgaccg

SEQ ID NO: 29790 - RNA, 32 nt, Homo Sapiens
aucuuacaauuugaaaguaaaaauaaaccaga

SEQ ID NO: 29791 - RNA, 32 nt, Homo Sapiens
ucugucuucaggugccuggcuuucuggccuga

SEQ ID NO: 29792 - RNA, 32 nt, Homo Sapiens
ggaauucucuuuguagucggcuugucaggguu

SEQ ID NO: 29793 - RNA, 32 nt, Homo Sapiens
aaguuuagcuacuguguugcaagagaaaccag

SEQ ID NO: 29794 - RNA, 32 nt, Homo Sapiens
cgcaggccgcccagggcccccgggcugagacg

SEQ ID NO: 29795 - RNA, 32 nt, Homo Sapiens
ggagaauaaugggaaacuucacccauguuaac

SEQ ID NO: 29796 - RNA, 32 nt, Homo Sapiens
uggaagacugguuuugaucaguuuaagaagua

SEQ ID NO: 29797 - RNA, 32 nt, Homo Sapiens
cugagcagcugggauuaugaagggguggccug

SEQ ID NO: 29798 - RNA, 32 nt, Homo Sapiens
aggguuuucuuuucuuuuuuucuuuaauaaca

SEQ ID NO: 29799 - RNA, 32 nt, Homo Sapiens
cgcuuuggaaauaaauggcagugcuuuguuca

SEQ ID NO: 29800 - RNA, 32 nt, Homo Sapiens
guuucuuuuuguacuuucauucaguguagagg

SEQ ID NO: 29801 - RNA, 32 nt, Homo Sapiens
gccccugcccccacccugccagcccuucccag

SEQ ID NO: 29802 - RNA, 32 nt, Homo Sapiens
auguacugauaaaaacaaacaugguuguccuu

SEQ ID NO: 29803 - RNA, 32 nt, Homo Sapiens
cuccaaucuccgcuccuccacccaguucagga

SEQ ID NO: 29804 - RNA, 32 nt, Homo Sapiens
cacacgcacacaugcacgcacacacacauaug

SEQ ID NO: 29805 - RNA, 29 nt, Homo Sapiens
ccaaacuauuuauauugaaagcuauaugc

SEQ ID NO: 29806 - RNA, 32 nt, Homo Sapiens
ccaagcagcugagauuacaggugcaugccacc

SEQ ID NO: 29807 - RNA, 25 nt, Homo Sapiens
cagaugagaauauuuugaaacucug

SEQ ID NO: 29808 - RNA, 32 nt, Homo Sapiens
ggagcuggagggcaggcaggcaauggguggaa

SEQ ID NO: 29809 - RNA, 32 nt, Homo Sapiens
gaaagagaaaacaaaagcaugugaauaaacuu

SEQ ID NO: 29810 - RNA, 32 nt, Homo Sapiens
uuuggagcuauuaaagguuuuaugacauucua

SEQ ID NO: 29811 - RNA, 32 nt, Homo Sapiens
gcugaagauauaaguauuauagucauuagcaa

SEQ ID NO: 29812 - RNA, 32 nt, Homo Sapiens
cacgagggagggacggugggggugacccccuc

SEQ ID NO: 29813 - RNA, 32 nt, Homo Sapiens
gacgucucccaccugccccaauaagaucugcu

SEQ ID NO: 29814 - RNA, 32 nt, Homo Sapiens
gaggaaugaagauguuguaugacaagaaggaa

SEQ ID NO: 29815 - RNA, 32 nt, Homo Sapiens
cauccugccccaccccacccccacucccacgg

SEQ ID NO: 29816 - RNA, 32 nt, Homo Sapiens
cggcuaugugaacugccuauuuccuaugcugg

SEQ ID NO: 29817 - RNA, 32 nt, Homo Sapiens
gguucucccacuuuuccauaagcagaacaaga

SEQ ID NO: 29818 - RNA, 32 nt, Homo Sapiens
uaacauguuucauggggacccacuguacagcc

SEQ ID NO: 29819 - RNA, 32 nt, Homo Sapiens
gccggcggcuccgacaucaugcuccggcuccu

SEQ ID NO: 29820 - RNA, 32 nt, Homo Sapiens
uuuaaagacaagcagcgacagcucaucagcag

SEQ ID NO: 29821 - RNA, 28 nt, Homo Sapiens
ccgaugcacgcgcggcaagggccugcuc

SEQ ID NO: 29822 - RNA, 32 nt, Homo Sapiens
uuauacuaauuuacauuguuuaccaagcugua

SEQ ID NO: 29823 - RNA, 32 nt, Homo Sapiens
ggugcggaagcagggacaagaagccgcgggau

SEQ ID NO: 29824 - RNA, 32 nt, Homo Sapiens
cucgagccugacggacacuggguucaggcugg

SEQ ID NO: 29825 - RNA, 32 nt, Homo Sapiens
gagagacgcggccgccucggccucgacgccag

SEQ ID NO: 29826 - RNA, 32 nt, Homo Sapiens
ucuuugcagggccagugguuucugucagauuu

SEQ ID NO: 29827 - RNA, 32 nt, Homo Sapiens
gugugaacggcaugucuguggaugagaagccu

SEQ ID NO: 29828 - RNA, 32 nt, Homo Sapiens
cuuuuguuaugaauauggcugguaaccauugu

SEQ ID NO: 29829 - RNA, 32 nt, Homo Sapiens
gauuucugucucccuuccaucuuuucucccau

SEQ ID NO: 29830 - RNA, 32 nt, Homo Sapiens
ggccaggcggacugggcggggcuccgagcggg

SEQ ID NO: 29831 - RNA, 32 nt, Homo Sapiens
ucugccagcccugcaguaaucuccaggccugg

SEQ ID NO: 29832 - RNA, 32 nt, Homo Sapiens
cccuggcccucuggcuggccccaggagccuuu

SEQ ID NO: 29833 - RNA, 32 nt, Homo Sapiens
auucgaaaguuccuucuuugugggcuuauaag

SEQ ID NO: 29834 - RNA, 32 nt, Homo Sapiens
uugugauuguuauuuaaauacauauuaguuuu

SEQ ID NO: 29835 - RNA, 32 nt, Homo Sapiens
uggcuuacaccuguaaucccaacacuuggggg

SEQ ID NO: 29836 - RNA, 32 nt, Homo Sapiens
caccuagcauucaucacccauccccagcauug

SEQ ID NO: 29837 - RNA, 32 nt, Homo Sapiens
cucacuggggagagcagggguggcagauccug

SEQ ID NO: 29838 - RNA, 32 nt, Homo Sapiens
cagcguggaugaaccuugaggaccucacgcuc

SEQ ID NO: 29839 - RNA, 32 nt, Homo Sapiens
uagaccuuuucucauuguaaacuuggagcaaa

SEQ ID NO: 29840 - RNA, 32 nt, Homo Sapiens
guaaaaguuaguaguucuuuuuuaaaucauua

SEQ ID NO: 29841 - RNA, 32 nt, Homo Sapiens
ccuuccugucuccaccucucagucccccuaga

SEQ ID NO: 29842 - RNA, 32 nt, Homo Sapiens
uugcaugccuuaggaagaagcacauagguaaa

SEQ ID NO: 29843 - RNA, 32 nt, Homo Sapiens
cgugcgggcuccuuaaguagcggcugcguggc

SEQ ID NO: 29844 - RNA, 32 nt, Homo Sapiens
agccagagaacaaaccgguaagauggcagauc

SEQ ID NO: 29845 - RNA, 32 nt, Homo Sapiens
uggacauacuaaaaaauaccuaaaaggaagcu

SEQ ID NO: 29846 - RNA, 32 nt, Homo Sapiens
cgagcagcccccagcccuccccucccaucugu

SEQ ID NO: 29847 - RNA, 32 nt, Homo Sapiens
uugaggaggaucucaugguuaaugggguacau

SEQ ID NO: 29848 - RNA, 32 nt, Homo Sapiens
aauagagaaaaguauuaaagagaacagaaauc

SEQ ID NO: 29849 - RNA, 32 nt, Homo Sapiens
aucaaggaacuggaaaauuaugcugaaaacac

SEQ ID NO: 29850 - RNA, 27 nt, Homo Sapiens
guucagucgaauuucagcccucguaau

SEQ ID NO: 29851 - RNA, 32 nt, Homo Sapiens
ggcggccgguccccggccuccccccauggcca

SEQ ID NO: 29852 - RNA, 32 nt, Homo Sapiens
aggauauaaaaaguacaguguuagaugugcac

SEQ ID NO: 29853 - RNA, 32 nt, Homo Sapiens
uccuccccgggcccgccccgacagguuugucu

SEQ ID NO: 29854 - RNA, 32 nt, Homo Sapiens
aaagaauaauuuccauuaaguagaauuccagu

SEQ ID NO: 29855 - RNA, 30 nt, Homo Sapiens
accccaccaccggccacccaucugucaccc

SEQ ID NO: 29856 - RNA, 32 nt, Homo Sapiens
cacguggcuggcucaggcucagggcccugucc

SEQ ID NO: 29857 - RNA, 32 nt, Homo Sapiens
gcucccaggaccuguggugaccucaagcuaac

SEQ ID NO: 29858 - RNA, 32 nt, Homo Sapiens
aauuacacauauaguuuucaaaaucaugcacu

SEQ ID NO: 29859 - RNA, 32 nt, Homo Sapiens
auagucuuuuuggcaacuaugauagaugccca

SEQ ID NO: 29860 - RNA, 32 nt, Homo Sapiens
gggugucugcaaagguaaaaauccauuaaaac

SEQ ID NO: 29861 - RNA, 32 nt, Homo Sapiens
ccuaugaaucagaucaagcccaugcuguuguu

SEQ ID NO: 29862 - RNA, 32 nt, Homo Sapiens
cagcgaccucgcgagccuuccgcacucccgcc

SEQ ID NO: 29863 - RNA, 32 nt, Homo Sapiens
ccuuuaagugccucuuuuuucaccuagcuuuu

SEQ ID NO: 29864 - RNA, 32 nt, Homo Sapiens
agauggaaagguggccucggacaccuguguca

SEQ ID NO: 29865 - RNA, 32 nt, Homo Sapiens
cauccuggaagacagagugagauccugucuca

SEQ ID NO: 29866 - RNA, 32 nt, Homo Sapiens
aauuuccgcagggcuguggcucggccagcagc

SEQ ID NO: 29867 - RNA, 32 nt, Homo Sapiens
gucgaguaaaacuucgugaaaacugcucauaa

SEQ ID NO: 29868 - RNA, 32 nt, Homo Sapiens
aucagagacagagagaaaaauucaaagggcca

SEQ ID NO: 29869 - RNA, 32 nt, Homo Sapiens
aaggagaacaggaaaagaagagcuaguaagcg

SEQ ID NO: 29870 - RNA, 29 nt, Homo Sapiens
gaacucuggggacagagcgccccggccgc

SEQ ID NO: 29871 - RNA, 32 nt, Homo Sapiens
aucuggcugcaaucacugcugcugcugucacc

SEQ ID NO: 29872 - RNA, 32 nt, Homo Sapiens
ggauuccuguuuuuuccaauuaauguuguaaa

SEQ ID NO: 29873 - RNA, 32 nt, Homo Sapiens
gacagggucuugcuguguuacccaggcugguc

SEQ ID NO: 29874 - RNA, 32 nt, Homo Sapiens
gggaagcgcggggccgcggcggugcggguucu

SEQ ID NO: 29875 - RNA, 32 nt, Homo Sapiens
gcaauucugacuguccaggagcgaaucugacc

SEQ ID NO: 29876 - RNA, 32 nt, Homo Sapiens
uuuuaauuuauuucuuuuucuguugaggcuuc

SEQ ID NO: 29877 - RNA, 31 nt, Homo Sapiens
ucacauaccucguuuuucagaaacuuuccaa

SEQ ID NO: 29878 - RNA, 32 nt, Homo Sapiens
ucucccaucuucucauauccuggcucuucucu

SEQ ID NO: 29879 - RNA, 32 nt, Homo Sapiens
cccaggagggugguauuaggagguggggccuu

SEQ ID NO: 29880 - RNA, 32 nt, Homo Sapiens
gucugcacuccaggcuucuucccggccggugg

SEQ ID NO: 29881 - RNA, 32 nt, Homo Sapiens
ucaugugagaaagcuaaaaugguggucuucuc

SEQ ID NO: 29882 - RNA, 32 nt, Homo Sapiens
cugcagccuugaccuccuggguuccggugauu

SEQ ID NO: 29883 - RNA, 32 nt, Homo Sapiens
gugggugaggggcuccgcugcaucagcguugc

SEQ ID NO: 29884 - RNA, 32 nt, Homo Sapiens
ggcggaagccccacggcggugagguccauccu

SEQ ID NO: 29885 - RNA, 32 nt, Homo Sapiens
cugccccgcgcgcuccccgccgccccccauga

SEQ ID NO: 29886 - RNA, 31 nt, Homo Sapiens
ucuguccaagacacucucaggccuggaggca

SEQ ID NO: 29887 - RNA, 32 nt, Homo Sapiens
aaaucuauuccaguauuuuuuccacuacacaa

SEQ ID NO: 29888 - RNA, 32 nt, Homo Sapiens
gcaacaacaacuuugauaucaacaaugaagca

SEQ ID NO: 29889 - RNA, 32 nt, Homo Sapiens
cccgcagcgcgaggcugccucaucaacggcaa

SEQ ID NO: 29890 - RNA, 32 nt, Homo Sapiens
uuugauauucccuaaaaaacauuuggaauaua

SEQ ID NO: 29891 - RNA, 32 nt, Homo Sapiens
auccaucugcaugauuggcauuaguuaccaca

SEQ ID NO: 29892 - RNA, 32 nt, Homo Sapiens
cuuuccagaguugaucauuuccccucauggua

SEQ ID NO: 29893 - RNA, 32 nt, Homo Sapiens
uaagagagcaccuggugaucacguggucacgg

SEQ ID NO: 29894 - RNA, 32 nt, Homo Sapiens
uccaaacuccuggaccccauccaggucaucag

SEQ ID NO: 29895 - RNA, 32 nt, Homo Sapiens
ccugcuccaaacagaccccccacccaccucca

SEQ ID NO: 29896 - RNA, 32 nt, Homo Sapiens
ccuuccacccucggcuccugugcugggagaaa

SEQ ID NO: 29897 - RNA, 32 nt, Homo Sapiens
gaaaaucuaacaugguugacacuuccugguag

SEQ ID NO: 29898 - RNA, 32 nt, Homo Sapiens
ugccugagcccucacuccacagcccucccagg

SEQ ID NO: 29899 - RNA, 32 nt, Homo Sapiens
ucuaagaugauuucaggaaauaaugugaacau

SEQ ID NO: 29900 - RNA, 32 nt, Homo Sapiens
gcugucaguuuggcagauuuucccucguuacc

SEQ ID NO: 29901 - RNA, 32 nt, Homo Sapiens
uucucagacaccuuuaauaucuuuauggaaac

SEQ ID NO: 29902 - RNA, 32 nt, Homo Sapiens
ucuuccccaccuugccagcaggcucugugcuc

SEQ ID NO: 29903 - RNA, 32 nt, Homo Sapiens
gguuuguuugaaaacauuuugugaaagccugc

SEQ ID NO: 29904 - RNA, 32 nt, Homo Sapiens
uugacaaacuauaaaucaggguuuuaauuuuc

SEQ ID NO: 29905 - RNA, 32 nt, Homo Sapiens
uuguaauuaugaaaagaaauaaagggugucua

SEQ ID NO: 29906 - RNA, 32 nt, Homo Sapiens
guccccgcccuccgcccggcccggagcuuauc

SEQ ID NO: 29907 - RNA, 32 nt, Homo Sapiens
cccuggggcuccugcuuccccaucccggaguu

SEQ ID NO: 29908 - RNA, 32 nt, Homo Sapiens
agguaucagauaucuuuuuuuauaguucaguu

SEQ ID NO: 29909 - RNA, 32 nt, Homo Sapiens
cagcgcuggacccuagggccccugccugccuc

SEQ ID NO: 29910 - RNA, 32 nt, Homo Sapiens
aaaaguaaaauauccaccuuguccuuugggga

SEQ ID NO: 29911 - RNA, 31 nt, Homo Sapiens
auuuugaaauaaaaucaaaauuucaaccugu

SEQ ID NO: 29912 - RNA, 32 nt, Homo Sapiens
aagaaaauccugaaagagaugauggacugagu

SEQ ID NO: 29913 - RNA, 32 nt, Homo Sapiens
agugccuucuaaagguguugucccuucuaggg

SEQ ID NO: 29914 - RNA, 29 nt, Homo Sapiens
cucugucugggacagauacugcccagcac

SEQ ID NO: 29915 - RNA, 32 nt, Homo Sapiens
gagaacucgaagcccuuccagugguaccagcu

SEQ ID NO: 29916 - RNA, 32 nt, Homo Sapiens
ucuugggaguaucacaggaaaaucacaauuac

SEQ ID NO: 29917 - RNA, 32 nt, Homo Sapiens
aguagcugggauugcaggcgcccgccaccacg

SEQ ID NO: 29918 - RNA, 32 nt, Homo Sapiens
agcucugugucugagaaguucuacauugacca

SEQ ID NO: 29919 - RNA, 32 nt, Homo Sapiens
uggcacuggaaaguccagggggccuagagacc

SEQ ID NO: 29920 - RNA, 32 nt, Homo Sapiens
gagggcugcgggaaggaaagggggcggcgucc

SEQ ID NO: 29921 - RNA, 32 nt, Homo Sapiens
ucaggcugugcggcugcagacagcacagccug

SEQ ID NO: 29922 - RNA, 32 nt, Homo Sapiens
aagcucuaagcccccgggaggccuggacuguc

SEQ ID NO: 29923 - RNA, 32 nt, Homo Sapiens
uuauucuuucagguguuguuuaacucaguuuu

SEQ ID NO: 29924 - RNA, 32 nt, Homo Sapiens
uggagauguaguuuguuaagaugaggucacgc

SEQ ID NO: 29925 - RNA, 32 nt, Homo Sapiens
gaaggagucacuuaacucuacuguacugcagc

SEQ ID NO: 29926 - RNA, 32 nt, Homo Sapiens
ugcagcgcuccuuggccacugugcguuacagc

SEQ ID NO: 29927 - RNA, 32 nt, Homo Sapiens
uaggagcaaacaaggcuucauauucuuuuuaa

SEQ ID NO: 29928 - RNA, 32 nt, Homo Sapiens
agguuguaaaaauaaacuucgguaucagugca

SEQ ID NO: 29929 - RNA, 32 nt, Homo Sapiens
auuucucacaguguaaauuuguucauuccugg

SEQ ID NO: 29930 - RNA, 32 nt, Homo Sapiens
cuguuuaacaauaaaccaaggucaugagcauu

SEQ ID NO: 29931 - RNA, 32 nt, Homo Sapiens
ccagcgagggcggcugcuccugcuaugcagag

SEQ ID NO: 29932 - RNA, 32 nt, Homo Sapiens
aauaauaaaaacagaaggaaauugagauuaga

SEQ ID NO: 29933 - RNA, 32 nt, Homo Sapiens
gugaucuucccgccucggccucccagagugcu

SEQ ID NO: 29934 - RNA, 32 nt, Homo Sapiens
uacgcccggcgccuggccuccaggcccgucug

SEQ ID NO: 29935 - RNA, 32 nt, Homo Sapiens
gcccgaggccggagccgaggaggaaugugacc

SEQ ID NO: 29936 - RNA, 32 nt, Homo Sapiens
caucuggacacuguccuggcuacuucagggac

SEQ ID NO: 29937 - RNA, 32 nt, Homo Sapiens
aucuacuucagccccaggggacucccuggagc

SEQ ID NO: 29938 - RNA, 30 nt, Homo Sapiens
gaccacuggucuggggcagaagcccaccug

SEQ ID NO: 29939 - RNA, 32 nt, Homo Sapiens
agucuucuccucugguugauguaauaaaaucc

SEQ ID NO: 29940 - RNA, 32 nt, Homo Sapiens
auuacaagccccagccgccagccccgccuucu

SEQ ID NO: 29941 - RNA, 32 nt, Homo Sapiens
ggugcugaggagagccgaguuggacuggcuac

SEQ ID NO: 29942 - RNA, 32 nt, Homo Sapiens
aaugguuuuguuggccaggcccgggguccuca

SEQ ID NO: 29943 - RNA, 32 nt, Homo Sapiens
ggauuugcuucuuacccuguguuuucugcaaa

SEQ ID NO: 29944 - RNA, 32 nt, Homo Sapiens
gcccuggauaaugcuuuacuuucuguguugaa

SEQ ID NO: 29945 - RNA, 32 nt, Homo Sapiens
auauuaauacucaagacuacauuuuccccaaa

SEQ ID NO: 29946 - RNA, 32 nt, Homo Sapiens
caaucuguuaacuuuauuuacauauucacuuu

SEQ ID NO: 29947 - RNA, 32 nt, Homo Sapiens
uggagcccuggccagcucuucgccccucaccu

SEQ ID NO: 29948 - RNA, 30 nt, Homo Sapiens
aacccgggagguggagguugcagugagccg

SEQ ID NO: 29949 - RNA, 30 nt, Homo Sapiens
aaccugggagguggagguugcagugagcug

SEQ ID NO: 29950 - RNA, 30 nt, Homo Sapiens
aacccgggagguggagguuguagugagcug

SEQ ID NO: 29951 - RNA, 32 nt, Homo Sapiens
uuaccguacauuauuucuugcucaccaucccc

SEQ ID NO: 29952 - RNA, 32 nt, Homo Sapiens
caccaguugugccuuggugccuuguccgccuc

SEQ ID NO: 29953 - RNA, 32 nt, Homo Sapiens
ccgccgcccgcggaagucucaccgcgcagcag

SEQ ID NO: 29954 - RNA, 32 nt, Homo Sapiens
cuuuucugugaagcccuuugccuguagagcca

SEQ ID NO: 29955 - RNA, 32 nt, Homo Sapiens
ccucgcggcccccaagcuccacgcugcgcccg

SEQ ID NO: 29956 - RNA, 30 nt, Homo Sapiens
ccgcgggcgcccgaggggccgagcgagauu

SEQ ID NO: 29957 - RNA, 32 nt, Homo Sapiens
cgugucucagcccaggagagccagggguccag

SEQ ID NO: 29958 - RNA, 32 nt, Homo Sapiens
uacucagagcccuggccucccucccccuaccu

SEQ ID NO: 29959 - RNA, 32 nt, Homo Sapiens
caccuuggggacggaggcccaggacagucccc

SEQ ID NO: 29960 - RNA, 32 nt, Homo Sapiens
uggcuccacagugguggcugucagacccgaag

SEQ ID NO: 29961 - RNA, 32 nt, Homo Sapiens
uugcuuauuauuuuauacucaguaauaaugug

SEQ ID NO: 29962 - RNA, 32 nt, Homo Sapiens
cacaaugaaaucauuuuuuaccacuuuuacag

SEQ ID NO: 29963 - RNA, 31 nt, Homo Sapiens
ccuguggcucgccugcaucagaauugccugg

SEQ ID NO: 29964 - RNA, 32 nt, Homo Sapiens
ucgcggggccgagaacccgcugggacuggcaa

SEQ ID NO: 29965 - RNA, 32 nt, Homo Sapiens
gaucgugaauguuuaucuugggacugucuugc

SEQ ID NO: 29966 - RNA, 32 nt, Homo Sapiens
gauuguacaauuuuucuucuuuucuauauuac

SEQ ID NO: 29967 - RNA, 32 nt, Homo Sapiens
ugaguagcauauagaagaaaguuaauaggccg

SEQ ID NO: 29968 - RNA, 32 nt, Homo Sapiens
guauguuuggcaaaauaaaauaaagguaauua

SEQ ID NO: 29969 - RNA, 32 nt, Homo Sapiens
uauuaaaaaaucacaacuguaaacaugagaau

SEQ ID NO: 29970 - RNA, 32 nt, Homo Sapiens
cccugaaaacagugaaacugaguuagaaagga

SEQ ID NO: 29971 - RNA, 32 nt, Homo Sapiens
ccuagcuucucucuccuuccccucaagaccug

SEQ ID NO: 29972 - RNA, 32 nt, Homo Sapiens
aacaugcacacaugaagcugguuggguguaag

SEQ ID NO: 29973 - RNA, 32 nt, Homo Sapiens
gccuuaauauaaaguuugaagcuucauccacc

SEQ ID NO: 29974 - RNA, 32 nt, Homo Sapiens
ugggcacugcuugccuggccucgugcuuggau

SEQ ID NO: 29975 - RNA, 32 nt, Homo Sapiens
cgcggccgagacauggcuuggccacagcucuu

SEQ ID NO: 29976 - RNA, 32 nt, Homo Sapiens
cugcucaggacacaagaacuaaggggcaacaa

SEQ ID NO: 29977 - RNA, 32 nt, Homo Sapiens
cucugucaguucucagccccugugaugauagc

SEQ ID NO: 29978 - RNA, 32 nt, Homo Sapiens
cggcgggcgggugggaggugggaguggcugca

SEQ ID NO: 29979 - RNA, 32 nt, Homo Sapiens
gaccaggagaccuuaugcuaccuguaaaaaag

SEQ ID NO: 29980 - RNA, 32 nt, Homo Sapiens
ucccucaugcuguuccaccuccccucagacua

SEQ ID NO: 29981 - RNA, 32 nt, Homo Sapiens
agcacccaggcuccauggggaagugcucccca

SEQ ID NO: 29982 - RNA, 32 nt, Homo Sapiens
cuuaagucggggguggcaagggggcggggcgg

SEQ ID NO: 29983 - RNA, 32 nt, Homo Sapiens
uggacaaauuuuuuuuucuccccucccaaauu

SEQ ID NO: 29984 - RNA, 32 nt, Homo Sapiens
aguguaagaugcaauuaaaauagauggaagac

SEQ ID NO: 29985 - RNA, 32 nt, Homo Sapiens
ggugugcugucaacuuaaacacugacagguaa

SEQ ID NO: 29986 - RNA, 32 nt, Homo Sapiens
ggaccacgggaaaucauguuggaccaaggguu

SEQ ID NO: 29987 - RNA, 32 nt, Homo Sapiens
aggcucugccuggccugacccuguccugucag

SEQ ID NO: 29988 - RNA, 32 nt, Homo Sapiens
gcggagguugcagggagggagacugcaccacu

SEQ ID NO: 29989 - RNA, 32 nt, Homo Sapiens
uuugggcauguccucuggagccccacagaaga

SEQ ID NO: 29990 - RNA, 32 nt, Homo Sapiens
uuuuauuaacuggaggcgacggcggcugcggc

SEQ ID NO: 29991 - RNA, 32 nt, Homo Sapiens
acaacaacaacaacaacaaauucacggaaucu

SEQ ID NO: 29992 - RNA, 32 nt, Homo Sapiens
aguccauauuucacucuuuguacucuuaaagu

SEQ ID NO: 29993 - RNA, 32 nt, Homo Sapiens
cauuugccauggccacuggcuccagcuggggu

SEQ ID NO: 29994 - RNA, 32 nt, Homo Sapiens
uaaaaagcuccuccccauucuccaucuugggg

SEQ ID NO: 29995 - RNA, 32 nt, Homo Sapiens
uugcaaaauauuuggcacucuuguuugcuuuc

SEQ ID NO: 29996 - RNA, 32 nt, Homo Sapiens
cuccggccaagcauggggcuucccaggcuggu

SEQ ID NO: 29997 - RNA, 32 nt, Homo Sapiens
agaugggggcaagaggcccaggcagccaccag

SEQ ID NO: 29998 - RNA, 32 nt, Homo Sapiens
uaggauuauaaugcugccucauuuucacagca

SEQ ID NO: 29999 - RNA, 32 nt, Homo Sapiens
uguucucggggaugcauagauucaucauuuuc

SEQ ID NO: 30000 - RNA, 32 nt, Homo Sapiens
cuuggcucaauccuccugcuuuaaccuuuccu

SEQ ID NO: 30001 - RNA, 32 nt, Homo Sapiens
cgcgcccgcaacgcaggaccguggccucucgg

SEQ ID NO: 30002 - RNA, 32 nt, Homo Sapiens
cagccgagaaaagaaacaagcaggauagcaau

SEQ ID NO: 30003 - RNA, 32 nt, Homo Sapiens
uggaaauuggucuucacacauacugcaguuuu

SEQ ID NO: 30004 - RNA, 32 nt, Homo Sapiens
augguggugcacaccuguacucccagcuacuc

SEQ ID NO: 30005 - RNA, 32 nt, Homo Sapiens
ugggagcuccccagccguccccgcccccauau

SEQ ID NO: 30006 - RNA, 32 nt, Homo Sapiens
agguuaccaaacuuguggacaggagccucaua

SEQ ID NO: 30007 - RNA, 32 nt, Homo Sapiens
guuuucccacuuaauccaacccagauuucuau

SEQ ID NO: 30008 - RNA, 32 nt, Homo Sapiens
uaacaaaugcaaaaaaaaaaaaaaaaaaaaaa

SEQ ID NO: 30009 - RNA, 32 nt, Homo Sapiens
uggauguguagcuauuugaagaaggcaaggaa

SEQ ID NO: 30010 - RNA, 32 nt, Homo Sapiens
ugagucucagauucucuuucuggcuggcauuu

SEQ ID NO: 30011 - RNA, 32 nt, Homo Sapiens
uuucaucuugucguuuaagaaauguacugaaa

SEQ ID NO: 30012 - RNA, 32 nt, Homo Sapiens
uccaccuggagucccccuccccgggucugggu

SEQ ID NO: 30013 - RNA, 32 nt, Homo Sapiens
uuucugaggaauaaugguuuaauuauaauagg

SEQ ID NO: 30014 - RNA, 32 nt, Homo Sapiens
ccuuguggccaacucccuccccuucucacuga

SEQ ID NO: 30015 - RNA, 32 nt, Homo Sapiens
gacuucagaaaaccucccggucugagccagga

SEQ ID NO: 30016 - RNA, 32 nt, Homo Sapiens
uuauuucugaaucgagauguccauagucaaau

SEQ ID NO: 30017 - RNA, 32 nt, Homo Sapiens
gaggggcugggcggggagcacaggccgugucc

SEQ ID NO: 30018 - RNA, 32 nt, Homo Sapiens
ggcggcggccccagacucccuccggaguucuu

SEQ ID NO: 30019 - RNA, 32 nt, Homo Sapiens
uccguuggcugauuucaucaccacccauuccc

SEQ ID NO: 30020 - RNA, 32 nt, Homo Sapiens
ggcaugaaccccgagagguggaaacucucaga

SEQ ID NO: 30021 - RNA, 32 nt, Homo Sapiens
cugugcuagcauauuucuuuugcuagcuaucc

SEQ ID NO: 30022 - RNA, 32 nt, Homo Sapiens
uauuuaucuuuauuagcaagguuuaaaagagc

SEQ ID NO: 30023 - RNA, 32 nt, Homo Sapiens
uuaaguagguucaugaucuacauuggggccug

SEQ ID NO: 30024 - RNA, 32 nt, Homo Sapiens
aguaucuaauaaugaaguguuauuacauauag

SEQ ID NO: 30025 - RNA, 32 nt, Homo Sapiens
auuuguuucaaaagauuuuucauuuuaagaga

SEQ ID NO: 30026 - RNA, 32 nt, Homo Sapiens
cuaaagaaaacaaacaaacaaacaaaaacugu

SEQ ID NO: 30027 - RNA, 32 nt, Homo Sapiens
cuagaauaucccggagcccauccaccaaggcu

SEQ ID NO: 30028 - RNA, 32 nt, Homo Sapiens
gguuugugaugaugaugagcaugguggagcug

SEQ ID NO: 30029 - RNA, 32 nt, Homo Sapiens
aagccuuuuugagggaccucccugccccuauc

SEQ ID NO: 30030 - RNA, 32 nt, Homo Sapiens
ugaaugugaguccaaggcuggcagcuuuguau

SEQ ID NO: 30031 - RNA, 32 nt, Homo Sapiens
ccgcgcgcggcggcggcgacgacgacuuccuc

SEQ ID NO: 30032 - RNA, 32 nt, Homo Sapiens
gcagggccagcauguguagaauaucuuucaga

SEQ ID NO: 30033 - RNA, 32 nt, Homo Sapiens
auauuauuucuuugaaucaauucauuuucaga

SEQ ID NO: 30034 - RNA, 32 nt, Homo Sapiens
uugacaugcgucuguaacaucuuucuuaccaa

SEQ ID NO: 30035 - RNA, 32 nt, Homo Sapiens
aagacucuaaagcacugggguacucuaaggua

SEQ ID NO: 30036 - RNA, 32 nt, Homo Sapiens
ccuccaaaucuuaaaaugaagcaggaaaacga

SEQ ID NO: 30037 - RNA, 32 nt, Homo Sapiens
ccucccuacucuucuuuuuaaugauuuuugua

SEQ ID NO: 30038 - RNA, 32 nt, Homo Sapiens
aaacuuuuuuuuucuuuuuucuuucuuuuuuu

SEQ ID NO: 30039 - RNA, 32 nt, Homo Sapiens
gcugggaggcauaggcuaggacaggcccacgu

SEQ ID NO: 30040 - RNA, 32 nt, Homo Sapiens
aaacuuccucgagucagccucuccaggcccag

SEQ ID NO: 30041 - RNA, 32 nt, Homo Sapiens
ugaaauacaucauucuucauauauuucuccuu

SEQ ID NO: 30042 - RNA, 32 nt, Homo Sapiens
uccauguccuguagcugcugcugcuggcucca

SEQ ID NO: 30043 - RNA, 32 nt, Homo Sapiens
ugcaaauuuccacuucuucugauagacguuuu

SEQ ID NO: 30044 - RNA, 32 nt, Homo Sapiens
uacccucugccaaacugggaaccagcagugcu

SEQ ID NO: 30045 - RNA, 32 nt, Homo Sapiens
gccguagccucgggagcauugcuguggaggag

SEQ ID NO: 30046 - RNA, 30 nt, Homo Sapiens
auggagcgcgcgcuauaccaguccucgcau

SEQ ID NO: 30047 - RNA, 32 nt, Homo Sapiens
ggaugagcucccgcaagaagagguacuuauag

SEQ ID NO: 30048 - RNA, 32 nt, Homo Sapiens
guggcggcgcccuggacucccgggcccgcgca

SEQ ID NO: 30049 - RNA, 32 nt, Homo Sapiens
ucccucccacuuugcucauuuucuaaccuagg

SEQ ID NO: 30050 - RNA, 32 nt, Homo Sapiens
cuuucauuuuuccacacuucaaagacccaugu

SEQ ID NO: 30051 - RNA, 32 nt, Homo Sapiens
cuuauaggcccuaggccuggccaggcauuguc

SEQ ID NO: 30052 - RNA, 32 nt, Homo Sapiens
uuuagaaacuaaaggaaauaauagcuggaaaa

SEQ ID NO: 30053 - RNA, 32 nt, Homo Sapiens
gagaauccuugauggaauuauauauguguguu

SEQ ID NO: 30054 - RNA, 32 nt, Homo Sapiens
aguguaggauaaaggcauaucguacauggcaa

SEQ ID NO: 30055 - RNA, 32 nt, Homo Sapiens
uaguugggacuacaggcaugcgccaccacgcc

SEQ ID NO: 30056 - RNA, 32 nt, Homo Sapiens
agucucugcucaaugucacuucauuaaaggcg

SEQ ID NO: 30057 - RNA, 32 nt, Homo Sapiens
cggcgguggaccaaacacuggugcuggcuuug

SEQ ID NO: 30058 - RNA, 32 nt, Homo Sapiens
ucuccccggccgcacccgagaccucgcgcgcc

SEQ ID NO: 30059 - RNA, 32 nt, Homo Sapiens
agauugucaugaugaaucacguguaccgggag

SEQ ID NO: 30060 - RNA, 32 nt, Homo Sapiens
ucucccccugcaccccucccccagcuugagcc

SEQ ID NO: 30061 - RNA, 32 nt, Homo Sapiens
ucccugggcugcgucccacauccacccuccug

SEQ ID NO: 30062 - RNA, 32 nt, Homo Sapiens
ccuacuguaauuugugauacaaugcugugccc

SEQ ID NO: 30063 - RNA, 32 nt, Homo Sapiens
cccagcugcagccuccucccccugagcauuca

SEQ ID NO: 30064 - RNA, 32 nt, Homo Sapiens
guaggcaaccaccuucaccuucacacagauug

SEQ ID NO: 30065 - RNA, 32 nt, Homo Sapiens
auuauuugaagaaguauguaaauaacauaaaa

SEQ ID NO: 30066 - RNA, 32 nt, Homo Sapiens
cuuuauugucuucaaaucuuuuguuuucuucc

SEQ ID NO: 30067 - RNA, 32 nt, Homo Sapiens
auaugcucugugaaauguguccagaugugaca

SEQ ID NO: 30068 - RNA, 32 nt, Homo Sapiens
guuugaagacauugcaccagaugccauuacau

SEQ ID NO: 30069 - RNA, 32 nt, Homo Sapiens
uguacuaaugcuugauauguucaacuggagac

SEQ ID NO: 30070 - RNA, 32 nt, Homo Sapiens
agacagauuuaggucaugucugcacauucugg

SEQ ID NO: 30071 - RNA, 32 nt, Homo Sapiens
uagagaggaugagcagaaccacaggaccugcc

SEQ ID NO: 30072 - RNA, 32 nt, Homo Sapiens
uucuggcugucuuagggcuggccucagaaccc

SEQ ID NO: 30073 - RNA, 32 nt, Homo Sapiens
ggguuuucuuuuucuuuuuccuuuuuuuuuuu

SEQ ID NO: 30074 - RNA, 32 nt, Homo Sapiens
cucucauguuucccuacuaacaucccaauaaa

SEQ ID NO: 30075 - RNA, 32 nt, Homo Sapiens
agcuaugaugaaaugcggguggguuugugcug

SEQ ID NO: 30076 - RNA, 32 nt, Homo Sapiens
guaaugcaaaaauuuaguguaacaugaaugcu

SEQ ID NO: 30077 - RNA, 32 nt, Homo Sapiens
agagcaguuguaauaugugcaaagucauagug

SEQ ID NO: 30078 - RNA, 32 nt, Homo Sapiens
ucuagcucuucagaucuguacaugcaguauuu

SEQ ID NO: 30079 - RNA, 32 nt, Homo Sapiens
ucagaggauacaaaauaaaaauacaaacugga

SEQ ID NO: 30080 - RNA, 32 nt, Homo Sapiens
uuaaacaacucauuuuaagauucaaauuaagu

SEQ ID NO: 30081 - RNA, 32 nt, Homo Sapiens
ggcggggcgggaagacggcggccgggaguguu

SEQ ID NO: 30082 - RNA, 32 nt, Homo Sapiens
uuuuuuuuuuuuuuuuuuuuuaaauucaaucu

SEQ ID NO: 30083 - RNA, 32 nt, Homo Sapiens
uuuauaugaaagauuuguaucauuagagccag

SEQ ID NO: 30084 - RNA, 32 nt, Homo Sapiens
gauuugucaaucaaggaaaacaugacagaugg

SEQ ID NO: 30085 - RNA, 32 nt, Homo Sapiens
gggaucaggcugccuccuggguugggugucgg

SEQ ID NO: 30086 - RNA, 32 nt, Homo Sapiens
ugcuaccgcgucugcuggacgcgggagacgcc

SEQ ID NO: 30087 - RNA, 32 nt, Homo Sapiens
ugcaauuacuuucucgauuggugucaguaguu

SEQ ID NO: 30088 - RNA, 32 nt, Homo Sapiens
uggccuggugucagggcggggcaggggucccc

SEQ ID NO: 30089 - RNA, 32 nt, Homo Sapiens
aaauauuuucuuaaauucauggggagacagug

SEQ ID NO: 30090 - RNA, 32 nt, Homo Sapiens
aaggccaggaggaccaggggugcagacagaac

SEQ ID NO: 30091 - RNA, 32 nt, Homo Sapiens
cgcccgagucccaccuuccucaggcucugauu

SEQ ID NO: 30092 - RNA, 32 nt, Homo Sapiens
accccgggguccgugcuggacucagccuugac

SEQ ID NO: 30093 - RNA, 32 nt, Homo Sapiens
uaaggaucuucagaacuccucagcuucagaug

SEQ ID NO: 30094 - RNA, 32 nt, Homo Sapiens
agcaucagcucuuggugggccucugccuucuc

SEQ ID NO: 30095 - RNA, 32 nt, Homo Sapiens
uacauuuuaauuuaaaagaaagaucaauuaua

SEQ ID NO: 30096 - RNA, 32 nt, Homo Sapiens
caaacgccgggcgcuaggccccggccgcacug

SEQ ID NO: 30097 - RNA, 32 nt, Homo Sapiens
gaaagaaacaucaucuucagauaauaagaaac

SEQ ID NO: 30098 - RNA, 32 nt, Homo Sapiens
ugucuucauugcuccaggaucugguauacugu

SEQ ID NO: 30099 - RNA, 32 nt, Homo Sapiens
ggaaggcccaggugcugaccuaguggcggaga

SEQ ID NO: 30100 - RNA, 32 nt, Homo Sapiens
cccacaggugguguugggacaccugggcgaga

SEQ ID NO: 30101 - RNA, 32 nt, Homo Sapiens
gcgccaccucuccaggccccagaagcccuucu

SEQ ID NO: 30102 - RNA, 32 nt, Homo Sapiens
ggcgaccccgguuccucuguguccucuuuacu

SEQ ID NO: 30103 - RNA, 29 nt, Homo Sapiens
agcaauggcggaaggagaagaugugccgc

SEQ ID NO: 30104 - RNA, 32 nt, Homo Sapiens
aaauuuccacuuuacuugucauccccacuuua

SEQ ID NO: 30105 - RNA, 32 nt, Homo Sapiens
aucuuacaaguaugaauaugugccaaagccua

SEQ ID NO: 30106 - RNA, 32 nt, Homo Sapiens
cuccucuccagacuccaccuccccagugggua

SEQ ID NO: 30107 - RNA, 28 nt, Homo Sapiens
ugggccaggugcaccccgaggugccccc

SEQ ID NO: 30108 - RNA, 32 nt, Homo Sapiens
ucaacgccagguuuuucuucacugcuuauuuc

SEQ ID NO: 30109 - RNA, 30 nt, Homo Sapiens
ggaggugucuguggggcccgaggccugucc

SEQ ID NO: 30110 - RNA, 31 nt, Homo Sapiens
aauuaucauuugauauuuggcuuauaaagua

SEQ ID NO: 30111 - RNA, 32 nt, Homo Sapiens
gcagugaggugauugcugcugggaugguggug

SEQ ID NO: 30112 - RNA, 32 nt, Homo Sapiens
aaugcugagugaugggguggcugcugggggga

SEQ ID NO: 30113 - RNA, 32 nt, Homo Sapiens
aguuaaaaagugauuuuuauguuauuggucua

SEQ ID NO: 30114 - RNA, 32 nt, Homo Sapiens
aaaauuccugcacuuuaacccuuuggaaacua

SEQ ID NO: 30115 - RNA, 32 nt, Homo Sapiens
agcaguuuuuaaaaacuaguuguuaaauuuug

SEQ ID NO: 30116 - RNA, 32 nt, Homo Sapiens
gguacgugcaggagaugggagggccugucucu

SEQ ID NO: 30117 - RNA, 32 nt, Homo Sapiens
aauguauguuaagagaauuuuuucuauuacuu

SEQ ID NO: 30118 - RNA, 32 nt, Homo Sapiens
uaucauacuacugaaacagauuucauaccuca

SEQ ID NO: 30119 - RNA, 32 nt, Homo Sapiens
uauuauguaucuagcccauaguauuguacuua

SEQ ID NO: 30120 - RNA, 32 nt, Homo Sapiens
ggcacgaggcgcucgccgggaccuggaauccc

SEQ ID NO: 30121 - RNA, 32 nt, Homo Sapiens
auguagagcaguguaucuugcaugucaucgga

SEQ ID NO: 30122 - RNA, 32 nt, Homo Sapiens
cuggccacagaaagcuguuaaagaaaugaggg

SEQ ID NO: 30123 - RNA, 32 nt, Homo Sapiens
guccaucggcccgggggcgaggggcguagggg

SEQ ID NO: 30124 - RNA, 32 nt, Homo Sapiens
aauaugagauaaauaagaagaaacucuguaau

SEQ ID NO: 30125 - RNA, 32 nt, Homo Sapiens
uggcaauuugggaugccuccuggggaagguuu

SEQ ID NO: 30126 - RNA, 32 nt, Homo Sapiens
acucagaggggaggaaaggcugggccccgagu

SEQ ID NO: 30127 - RNA, 32 nt, Homo Sapiens
gagaacugggggcgcgggaggcuggugggugu

SEQ ID NO: 30128 - RNA, 32 nt, Homo Sapiens
aaccauauauucauuauccauguauuuauugc

SEQ ID NO: 30129 - RNA, 32 nt, Homo Sapiens
gggaacugcaagaugcacaggaccuuguguac

SEQ ID NO: 30130 - RNA, 32 nt, Homo Sapiens
cuguucacaaaagcaaagcaucugaaaugcag

SEQ ID NO: 30131 - RNA, 32 nt, Homo Sapiens
aaagcacuugcucuccucccagcucuggcuca

SEQ ID NO: 30132 - RNA, 32 nt, Homo Sapiens
agcaggcgcgcccuuccggccgcgagcugucc

SEQ ID NO: 30133 - RNA, 32 nt, Homo Sapiens
cgccggcggcagcggcuuuggacgagggcaga

SEQ ID NO: 30134 - RNA, 32 nt, Homo Sapiens
agccaagucaacaucaggcuacugaaguugag

SEQ ID NO: 30135 - RNA, 32 nt, Homo Sapiens
gugcaucugaggccuuugcccuugcuuugcgg

SEQ ID NO: 30136 - RNA, 32 nt, Homo Sapiens
ugccggggccccagcccacuccacccugccag

SEQ ID NO: 30137 - RNA, 32 nt, Homo Sapiens
uggaguggaggggucagcagggggguuggguu

SEQ ID NO: 30138 - RNA, 32 nt, Homo Sapiens
uauccccccacccaggaguauccucuugccaa

SEQ ID NO: 30139 - RNA, 32 nt, Homo Sapiens
gagccuggauuagagggcagggggaggauauu

SEQ ID NO: 30140 - RNA, 32 nt, Homo Sapiens
gucugauaaauauuuuaguacuuucaguagcc

SEQ ID NO: 30141 - RNA, 32 nt, Homo Sapiens
gcaugacuauaaauauguuucauugugauaaa

SEQ ID NO: 30142 - RNA, 32 nt, Homo Sapiens
acaugcagagacccauggaugaacuguguuuc

SEQ ID NO: 30143 - RNA, 32 nt, Homo Sapiens
cgggugggaccgggcgggagggauuccaaaga

SEQ ID NO: 30144 - RNA, 32 nt, Homo Sapiens
uaauauagcugagacuacaagugugugccacc

SEQ ID NO: 30145 - RNA, 32 nt, Homo Sapiens
acuacgggcagcugcgcagggagcgguggucc

SEQ ID NO: 30146 - RNA, 32 nt, Homo Sapiens
aguauaaauuuauuauccuaacuuuuugaaua

SEQ ID NO: 30147 - RNA, 32 nt, Homo Sapiens
uuaagagauaccaauuauguggcugccacugu

SEQ ID NO: 30148 - RNA, 32 nt, Homo Sapiens
augggguuugcuugcuuaggaguaguuguuuc

SEQ ID NO: 30149 - RNA, 32 nt, Homo Sapiens
gcugaagucccucuccugcagguggccgucug

SEQ ID NO: 30150 - RNA, 32 nt, Homo Sapiens
accucggcggggagauggagguccuggcggca

SEQ ID NO: 30151 - RNA, 32 nt, Homo Sapiens
cugcgacaauucuauuugaggaaaagauuugu

SEQ ID NO: 30152 - RNA, 32 nt, Homo Sapiens
gaccccgccucccaggacauguucgacaaugg

SEQ ID NO: 30153 - RNA, 32 nt, Homo Sapiens
uuggaaucuaguuggggguuggagggguaagg

SEQ ID NO: 30154 - RNA, 32 nt, Homo Sapiens
gugguggccgccaggggacuggaccgucaguc

SEQ ID NO: 30155 - RNA, 32 nt, Homo Sapiens
cgagugaugagugcuucuuaauccuaaaaaca

SEQ ID NO: 30156 - RNA, 32 nt, Homo Sapiens
cuacuugagagaaaacuuggaaauguaaucaa

SEQ ID NO: 30157 - RNA, 32 nt, Homo Sapiens
cagacuacuauuucuuuuuagguauuauucug

SEQ ID NO: 30158 - RNA, 32 nt, Homo Sapiens
ccggcaggugcccagcagugaucccauaugcu

SEQ ID NO: 30159 - RNA, 32 nt, Homo Sapiens
aagcugcccagcuguggucccggugagcuggg

SEQ ID NO: 30160 - RNA, 29 nt, Homo Sapiens
ggcacacggggacagaggcgcaaacacug

SEQ ID NO: 30161 - RNA, 32 nt, Homo Sapiens
caaaguuugcuuugcuuggguaugucugcugu

SEQ ID NO: 30162 - RNA, 32 nt, Homo Sapiens
ugcugccuacacacaagauauuugagaauaag

SEQ ID NO: 30163 - RNA, 32 nt, Homo Sapiens
cgagugcccuauaaggacugccaggcaauaau

SEQ ID NO: 30164 - RNA, 32 nt, Homo Sapiens
uuucaaauacucagacuuguggaauuuuauaa

SEQ ID NO: 30165 - RNA, 32 nt, Homo Sapiens
ccagugacaugugggacagcucuggccagggc

SEQ ID NO: 30166 - RNA, 32 nt, Homo Sapiens
ccaggagaacagaacacacuccuggucuggau

SEQ ID NO: 30167 - RNA, 32 nt, Homo Sapiens
cucuugguucccucuuucugcugccagcuccc

SEQ ID NO: 30168 - RNA, 32 nt, Homo Sapiens
ggaggacuugggagaagaauuuccacaaagca

SEQ ID NO: 30169 - RNA, 32 nt, Homo Sapiens
cacuagccucccugggguaucgcugaggcagc

SEQ ID NO: 30170 - RNA, 32 nt, Homo Sapiens
ggauuucuuagagauuaaaccaauuauaacuu

SEQ ID NO: 30171 - RNA, 32 nt, Homo Sapiens
acuuggccucagaugauguuuccaucuccaac

SEQ ID NO: 30172 - RNA, 32 nt, Homo Sapiens
uggaguuuugaggggugaggggaccagagcag

SEQ ID NO: 30173 - RNA, 32 nt, Homo Sapiens
ccuuuaugaaagacaucacauggcauccaggg

SEQ ID NO: 30174 - RNA, 32 nt, Homo Sapiens
gaaaaggagcagccucguauuuuucugugaaa

SEQ ID NO: 30175 - RNA, 30 nt, Homo Sapiens
agaacagagaagcauguuggugagaagggg

SEQ ID NO: 30176 - RNA, 32 nt, Homo Sapiens
auccacagcuaagacuccaggacccccuggaa

SEQ ID NO: 30177 - RNA, 32 nt, Homo Sapiens
agcucagcgcaccugcauagcugcuggugguc

SEQ ID NO: 30178 - RNA, 32 nt, Homo Sapiens
cuggauuauaaacucuauaucuguaauauaaa

SEQ ID NO: 30179 - RNA, 32 nt, Homo Sapiens
cuuguauuccucauauagaaucaauaauuacc

SEQ ID NO: 30180 - RNA, 32 nt, Homo Sapiens
uucuggucuuuggaaagagaugaugucuucua

SEQ ID NO: 30181 - RNA, 32 nt, Homo Sapiens
ccaucugugcugagccucuuugcaguccuccu

SEQ ID NO: 30182 - RNA, 32 nt, Homo Sapiens
uugugcacuauagucaaauguacuguaaagug

SEQ ID NO: 30183 - RNA, 32 nt, Homo Sapiens
ccaggccacugaguguuuuggccacuuggagg

SEQ ID NO: 30184 - RNA, 28 nt, Homo Sapiens
cucggagggcggccggaaguggcguugg

SEQ ID NO: 30185 - RNA, 32 nt, Homo Sapiens
gaauuauuuuuggagcugaaaucuuuguaaua

SEQ ID NO: 30186 - RNA, 32 nt, Homo Sapiens
ugacuccccagccccaggugggccuugugcac

SEQ ID NO: 30187 - RNA, 32 nt, Homo Sapiens
ugacacgugucucuccaacaauaaaagacuug

SEQ ID NO: 30188 - RNA, 32 nt, Homo Sapiens
uuaaugaacucauucagucaccauagcaacac

SEQ ID NO: 30189 - RNA, 32 nt, Homo Sapiens
uuugcagccuuuuugcuugauugcauguaaug

SEQ ID NO: 30190 - RNA, 32 nt, Homo Sapiens
uacucugugaaagaagagaaaagggagucaug

SEQ ID NO: 30191 - RNA, 32 nt, Homo Sapiens
guccagcgugcugguuccccagagcacagcuc

SEQ ID NO: 30192 - RNA, 32 nt, Homo Sapiens
uacacagcacaccagccgcugcagggcuccca

SEQ ID NO: 30193 - RNA, 32 nt, Homo Sapiens
cagggcucagccagguggccagcccucagcgu

SEQ ID NO: 30194 - RNA, 32 nt, Homo Sapiens
acaccucccagaccccacauccccucagaacg

SEQ ID NO: 30195 - RNA, 32 nt, Homo Sapiens
ggcauauuaugaauuucuuguuuucuaguugg

SEQ ID NO: 30196 - RNA, 32 nt, Homo Sapiens
caucaacaucuucuuguagaagucucucgugu

SEQ ID NO: 30197 - RNA, 32 nt, Homo Sapiens
uuuaggaaaggauuaugcgacacaauaaaaua

SEQ ID NO: 30198 - RNA, 32 nt, Homo Sapiens
uucugaguucugauguaggagcuuuccuguga

SEQ ID NO: 30199 - RNA, 32 nt, Homo Sapiens
gcagcuuuggcggcgccagcagcggagccaac

SEQ ID NO: 30200 - RNA, 32 nt, Homo Sapiens
caaagucugaucuggucuaguuaaccuagaag

SEQ ID NO: 30201 - RNA, 32 nt, Homo Sapiens
cccagagcugucugcagauaugcucucuaguu

SEQ ID NO: 30202 - RNA, 32 nt, Homo Sapiens
ggcuggcccacccucacccccacccccagggu

SEQ ID NO: 30203 - RNA, 32 nt, Homo Sapiens
caaugggagggagagggaggaggggaagaucu

SEQ ID NO: 30204 - RNA, 32 nt, Homo Sapiens
uagggcuucuaaaaacuucaucaucuugauaa

SEQ ID NO: 30205 - RNA, 32 nt, Homo Sapiens
cuagagucaaggaacaaauuuccuuaggauua

SEQ ID NO: 30206 - RNA, 32 nt, Homo Sapiens
ucacuggguuuuacuggcuggugcugggaaaa

SEQ ID NO: 30207 - RNA, 32 nt, Homo Sapiens
cagcaucagccuguagcuccccugcugaggca

SEQ ID NO: 30208 - RNA, 32 nt, Homo Sapiens
aacagacaaaaauugaguugugaauguucuuu

SEQ ID NO: 30209 - RNA, 32 nt, Homo Sapiens
ugugcuugcucagaaaaacaaacaaacaaaca

SEQ ID NO: 30210 - RNA, 32 nt, Homo Sapiens
agaacuaguggauuccagggcugggggaaaaa

SEQ ID NO: 30211 - RNA, 32 nt, Homo Sapiens
accuaaguccuuuauguggaaaacagaacauc

SEQ ID NO: 30212 - RNA, 32 nt, Homo Sapiens
aggcaacccagacuaccuuguuuuucuucugg

SEQ ID NO: 30213 - RNA, 32 nt, Homo Sapiens
ugccucuguuuccccaugugggccguggggaa

SEQ ID NO: 30214 - RNA, 32 nt, Homo Sapiens
aguuaucucccucucccugugaugccuugaga

SEQ ID NO: 30215 - RNA, 32 nt, Homo Sapiens
acugaucuaacccuaaauccaacucauuuaua

SEQ ID NO: 30216 - RNA, 32 nt, Homo Sapiens
gaucaaaggcuuuauuaaauuuguacuucagc

SEQ ID NO: 30217 - RNA, 32 nt, Homo Sapiens
caccgcugccacugccgcccugccggggccau

SEQ ID NO: 30218 - RNA, 32 nt, Homo Sapiens
guagaaaaggcacaauuccaauguaucauuua

SEQ ID NO: 30219 - RNA, 32 nt, Homo Sapiens
cagaaaagcugggucagcaucuggccaccgag

SEQ ID NO: 30220 - RNA, 32 nt, Homo Sapiens
uggguagaggcuuuaagcauuaagaggacuug

SEQ ID NO: 30221 - RNA, 32 nt, Homo Sapiens
uccgccauccuggcugcccccuacacgccacc

SEQ ID NO: 30222 - RNA, 32 nt, Homo Sapiens
cacuauguuagacaccauuuacauuggauguc

SEQ ID NO: 30223 - RNA, 32 nt, Homo Sapiens
augcuuccagcccuucccgugcucucccugcu

SEQ ID NO: 30224 - RNA, 32 nt, Homo Sapiens
gaaauacaaccuggucagcuaaaucgugcuga

SEQ ID NO: 30225 - RNA, 32 nt, Homo Sapiens
ugguuaguauaucucaguaguuucaugaaacg

SEQ ID NO: 30226 - RNA, 32 nt, Homo Sapiens
ugaucuggacaaagucgggacagcaccauccc

SEQ ID NO: 30227 - RNA, 32 nt, Homo Sapiens
cuggaggcuaugggugcggggcgugggccugc

SEQ ID NO: 30228 - RNA, 32 nt, Homo Sapiens
gugcucugcgcggccgaggccggagcaccaca

SEQ ID NO: 30229 - RNA, 29 nt, Homo Sapiens
uggcugguuugugcugguuuaacgacauc

SEQ ID NO: 30230 - RNA, 32 nt, Homo Sapiens
gcacucccagggcccgagcgcgugccuucccc

SEQ ID NO: 30231 - RNA, 32 nt, Homo Sapiens
cuuuguaauugaguuagcuuggcugccuuuuc

SEQ ID NO: 30232 - RNA, 32 nt, Homo Sapiens
aagguguucugcuuaucugucacugaaaacuu

SEQ ID NO: 30233 - RNA, 32 nt, Homo Sapiens
cauuuccggguccgccauuuuguugccucugu

SEQ ID NO: 30234 - RNA, 32 nt, Homo Sapiens
uugaugucccauauagagagguggcacagcca

SEQ ID NO: 30235 - RNA, 32 nt, Homo Sapiens
gcagugguaccauguuuuggaugugugauguu

SEQ ID NO: 30236 - RNA, 32 nt, Homo Sapiens
augcgcacccgcgucccgcugcuguuuagccg

SEQ ID NO: 30237 - RNA, 32 nt, Homo Sapiens
uccugcaagccaauggcaaggcaggaucugaa

SEQ ID NO: 30238 - RNA, 32 nt, Homo Sapiens
ggcgcguuccccucgcugccccgggagccgca

SEQ ID NO: 30239 - RNA, 32 nt, Homo Sapiens
ugguugauauuaccacaugaaauauugccaga

SEQ ID NO: 30240 - RNA, 32 nt, Homo Sapiens
ugccuguagucccggcacuuugggaggccgag

SEQ ID NO: 30241 - RNA, 32 nt, Homo Sapiens
gcccggcgcgcggcgucgccaggccagcuaug

SEQ ID NO: 30242 - RNA, 32 nt, Homo Sapiens
cccgggccauguccgacgcgucccuccgcagc

SEQ ID NO: 30243 - RNA, 32 nt, Homo Sapiens
ccauacugaaagaaucaaaaacaaaucaucca

SEQ ID NO: 30244 - RNA, 32 nt, Homo Sapiens
uguuuugccugccacuagucuggcagccucca

SEQ ID NO: 30245 - RNA, 32 nt, Homo Sapiens
agacccaggcugagcccaguccccucacccuu

SEQ ID NO: 30246 - RNA, 32 nt, Homo Sapiens
cggcggccguugcagcggcggcggcgagagcg

SEQ ID NO: 30247 - RNA, 32 nt, Homo Sapiens
guguuuggucgugcguauggcagugagcaggu

SEQ ID NO: 30248 - RNA, 32 nt, Homo Sapiens
agaaaucugacagauuugaccaagauuuggag

SEQ ID NO: 30249 - RNA, 32 nt, Homo Sapiens
gauuugggaaaggugaagcugugacuggaggg

SEQ ID NO: 30250 - RNA, 32 nt, Homo Sapiens
agaauaauuuccccucgauuccacaggaggga

SEQ ID NO: 30251 - RNA, 32 nt, Homo Sapiens
caaauagagacgggagaggccaaacagaauuc

SEQ ID NO: 30252 - RNA, 32 nt, Homo Sapiens
cacguuaaaaacaaaaauaauguccuuguggc

SEQ ID NO: 30253 - RNA, 32 nt, Homo Sapiens
auucacugaggucuaaauuugcaguuccacua

SEQ ID NO: 30254 - RNA, 32 nt, Homo Sapiens
uucccagcuguggcuuacuggaugccauaaga

SEQ ID NO: 30255 - RNA, 32 nt, Homo Sapiens
ggaagaauugguuugcagccaggcaguccucc

SEQ ID NO: 30256 - RNA, 32 nt, Homo Sapiens
gauaugcagaacuugggauguguguauauaua

SEQ ID NO: 30257 - RNA, 32 nt, Homo Sapiens
cuccuccacugcucacaggaggcccgugguaa

SEQ ID NO: 30258 - RNA, 32 nt, Homo Sapiens
cagaugugcagggagacuggugcugaauuacu

SEQ ID NO: 30259 - RNA, 32 nt, Homo Sapiens
auguuaccaaugauuuccuguggugggggcuu

SEQ ID NO: 30260 - RNA, 32 nt, Homo Sapiens
agggagagggagaggggacccgaggcugaggc

SEQ ID NO: 30261 - RNA, 32 nt, Homo Sapiens
acagagaagggaaaugacaaaggggcagcugg

SEQ ID NO: 30262 - RNA, 32 nt, Homo Sapiens
uaguagauugguuaaaagucuggacuucugug

SEQ ID NO: 30263 - RNA, 32 nt, Homo Sapiens
aggagccgcgcgcccccgugcccgcgucuguc

SEQ ID NO: 30264 - RNA, 32 nt, Homo Sapiens
ugcuagcggccaguggugucuguccgugcgca

SEQ ID NO: 30265 - RNA, 32 nt, Homo Sapiens
aaguuaauuaauuuauagaucaacauuuauug

SEQ ID NO: 30266 - RNA, 32 nt, Homo Sapiens
gggcgagcgcguggugcuggagguggaguaug

SEQ ID NO: 30267 - RNA, 32 nt, Homo Sapiens
caaaacaaaaggcagaauagaaugcugagauu

SEQ ID NO: 30268 - RNA, 32 nt, Homo Sapiens
ugaacuagcagaaaguaucugaagauauucag

SEQ ID NO: 30269 - RNA, 32 nt, Homo Sapiens
accuccaaucccucaccacucacucaaccagu

SEQ ID NO: 30270 - RNA, 32 nt, Homo Sapiens
acccucaguuuucaccaagauguuguaaggag

SEQ ID NO: 30271 - RNA, 32 nt, Homo Sapiens
gcaagagagggacguuuguggaccccggaggc

SEQ ID NO: 30272 - RNA, 32 nt, Homo Sapiens
cuauaugaaggaauggauggcuuuugugggcc

SEQ ID NO: 30273 - RNA, 32 nt, Homo Sapiens
cucugugucauucagguugugcacauuguuuu

SEQ ID NO: 30274 - RNA, 32 nt, Homo Sapiens
ugcaguugcccagccccaauucuuuauuugga

SEQ ID NO: 30275 - RNA, 32 nt, Homo Sapiens
gagaagguauaguggaaugagugugagcaucg

SEQ ID NO: 30276 - RNA, 32 nt, Homo Sapiens
agaggagcauauacugaaaagaaggcaguauc

SEQ ID NO: 30277 - RNA, 32 nt, Homo Sapiens
uuguucaguaccaugagaacaguauggggaaa

SEQ ID NO: 30278 - RNA, 32 nt, Homo Sapiens
ugccuuugaaucuggaggaaauaggcagaaac

SEQ ID NO: 30279 - RNA, 32 nt, Homo Sapiens
uguggaccucuccuccuucuccuugaccucuc

SEQ ID NO: 30280 - RNA, 32 nt, Homo Sapiens
uuuaggugaaagacaugaacagaaacuuguuc

SEQ ID NO: 30281 - RNA, 32 nt, Homo Sapiens
aacuuuucccccacggaccucccuuuaucacu

SEQ ID NO: 30282 - RNA, 32 nt, Homo Sapiens
cugaaccucagcugcgugucucauguauuaaa

SEQ ID NO: 30283 - RNA, 32 nt, Homo Sapiens
gauguguaacugugagucucacuauuuuugau

SEQ ID NO: 30284 - RNA, 32 nt, Homo Sapiens
caaguuccaugauauuaaauccaggucugcau

SEQ ID NO: 30285 - RNA, 32 nt, Homo Sapiens
uauacaaaaaauuuuuaaaaauuagcauggcg

SEQ ID NO: 30286 - RNA, 32 nt, Homo Sapiens
agauucccaccuguauguagcacgccaugcug

SEQ ID NO: 30287 - RNA, 32 nt, Homo Sapiens
ccucccccgugcccccagcugcucuugucacu

SEQ ID NO: 30288 - RNA, 32 nt, Homo Sapiens
caccacgcccagcuaauuuuuguuuuguuuug

SEQ ID NO: 30289 - RNA, 32 nt, Homo Sapiens
gggggugugaaauuaacaaauaaaaaguaugg

SEQ ID NO: 30290 - RNA, 32 nt, Homo Sapiens
guaucuucuagaucucuuuuuaucauauauga

SEQ ID NO: 30291 - RNA, 32 nt, Homo Sapiens
cugcuguuggguuuggaaugugauggaggcuu

SEQ ID NO: 30292 - RNA, 32 nt, Homo Sapiens
gcucuuaagaaacuaugaagaucugagauuuu

SEQ ID NO: 30293 - RNA, 32 nt, Homo Sapiens
cuucugacuuucuaaggaaaugaugcuuccca

SEQ ID NO: 30294 - RNA, 32 nt, Homo Sapiens
aagugccggaccaccaugccgcgcucauuucu

SEQ ID NO: 30295 - RNA, 32 nt, Homo Sapiens
aaaacagaaccuuuucuuaauccauguuggaa

SEQ ID NO: 30296 - RNA, 32 nt, Homo Sapiens
ccuugaguucuaguaauugagaggagcagcca

SEQ ID NO: 30297 - RNA, 32 nt, Homo Sapiens
uauuauaacuguuugcagaaagaaaagaauuu

SEQ ID NO: 30298 - RNA, 32 nt, Homo Sapiens
auuuguuccuuccuuacuuucuuauuguugga

SEQ ID NO: 30299 - RNA, 28 nt, Homo Sapiens
ugucuguacuugaacauuaugaagaugg

SEQ ID NO: 30300 - RNA, 32 nt, Homo Sapiens
auguugauugaucccuuuuuuauuuugugguu

SEQ ID NO: 30301 - RNA, 32 nt, Homo Sapiens
cuccggcccgcggcgcgucgcuggaggaaccc

SEQ ID NO: 30302 - RNA, 32 nt, Homo Sapiens
uucugucuuucauuuccaaccauuuuucaaga

SEQ ID NO: 30303 - RNA, 32 nt, Homo Sapiens
aauagagauucugccuucaaagguuggcuugc

SEQ ID NO: 30304 - RNA, 32 nt, Homo Sapiens
gccaacaagggaagccuuggggccucagaauu

SEQ ID NO: 30305 - RNA, 32 nt, Homo Sapiens
gcaucauugaggccaggagcucugcccgugac

SEQ ID NO: 30306 - RNA, 32 nt, Homo Sapiens
guaucuuaaguacuguagaaaagaugucacuu

SEQ ID NO: 30307 - RNA, 32 nt, Homo Sapiens
ccuggaggagggcucuggaagucacgucagga

SEQ ID NO: 30308 - RNA, 32 nt, Homo Sapiens
uuuggauuuagaaguaaaaauaaaguaucucu

SEQ ID NO: 30309 - RNA, 32 nt, Homo Sapiens
acaguucuauaaguccaggguuaauuauauua

SEQ ID NO: 30310 - RNA, 32 nt, Homo Sapiens
gggaaugcaucauauuuggucucaugcuuuuu

SEQ ID NO: 30311 - RNA, 32 nt, Homo Sapiens
uuaccaguaucuacaccucuuaaaaaacauug

SEQ ID NO: 30312 - RNA, 32 nt, Homo Sapiens
gucagaguuuaguuauuucuuaccguagcaag

SEQ ID NO: 30313 - RNA, 32 nt, Homo Sapiens
ugcaggaaaaagaggaauucgaagacuaauua

SEQ ID NO: 30314 - RNA, 32 nt, Homo Sapiens
aauauacugucaaucuaucagcauuuguguau

SEQ ID NO: 30315 - RNA, 32 nt, Homo Sapiens
aaauuagcugggugugguggugcgcaccugua

SEQ ID NO: 30316 - RNA, 32 nt, Homo Sapiens
gauugggaggggggcgggaaaacauggagaau

SEQ ID NO: 30317 - RNA, 32 nt, Homo Sapiens
gugucuucuaacuuuauucuuuguucuuuaug

SEQ ID NO: 30318 - RNA, 32 nt, Homo Sapiens
gauaguuuaaacaaacuaggaaguucagaagu

SEQ ID NO: 30319 - RNA, 32 nt, Homo Sapiens
ucaagggaauacugaagaugcugacugaaggg

SEQ ID NO: 30320 - RNA, 32 nt, Homo Sapiens
uucccugccucccagcucaguauuuaaacauc

SEQ ID NO: 30321 - RNA, 32 nt, Homo Sapiens
uccuccucggggugggaccccuguggcucccu

SEQ ID NO: 30322 - RNA, 32 nt, Homo Sapiens
uaaaaagucccucaugucugguaaaaaaaaaa

SEQ ID NO: 30323 - RNA, 32 nt, Homo Sapiens
ugaugccagggcggcccgcggggcagccucac

SEQ ID NO: 30324 - RNA, 32 nt, Homo Sapiens
ucuugucuuuaaugcauggauucauaaacuuc

SEQ ID NO: 30325 - RNA, 32 nt, Homo Sapiens
cagaauguuuuaaagugaauuguuguaaugaa

SEQ ID NO: 30326 - RNA, 32 nt, Homo Sapiens
gugcuugaggaggccgccacggcagcgcggga

SEQ ID NO: 30327 - RNA, 32 nt, Homo Sapiens
uacuuuuaauaaauauuugauuuuucuuucuc

SEQ ID NO: 30328 - RNA, 32 nt, Homo Sapiens
cauucuccccaccccacccccauuauauaagg

SEQ ID NO: 30329 - RNA, 32 nt, Homo Sapiens
gccuccucccccacccccagccgcggaggaug

SEQ ID NO: 30330 - RNA, 32 nt, Homo Sapiens
guuucuagauuagaagacauaaugcagcauuu

SEQ ID NO: 30331 - RNA, 32 nt, Homo Sapiens
agguguccuuccacccaacaaguccuaagggc

SEQ ID NO: 30332 - RNA, 32 nt, Homo Sapiens
acucuuucuuugcauguggcucuuuuuuagcu

SEQ ID NO: 30333 - RNA, 32 nt, Homo Sapiens
uaauguuacauuauuaucaacaauagugauug

SEQ ID NO: 30334 - RNA, 32 nt, Homo Sapiens
ggcgcugaggugccggggcagcaagugacaug

SEQ ID NO: 30335 - RNA, 32 nt, Homo Sapiens
aggugcggagaacugcucggcccgcaccgggc

SEQ ID NO: 30336 - RNA, 32 nt, Homo Sapiens
auccaaaacagagagaaaaaacagagugaaca

SEQ ID NO: 30337 - RNA, 32 nt, Homo Sapiens
uaaaggauguuuucuuuuuucacacaguaaaa

SEQ ID NO: 30338 - RNA, 32 nt, Homo Sapiens
gccuucagcccaaccuccccagccccacgggc

SEQ ID NO: 30339 - RNA, 32 nt, Homo Sapiens
cuggagcucuuccugcuucucuccccaucacc

SEQ ID NO: 30340 - RNA, 31 nt, Homo Sapiens
ugcauuuguuccugccugccucggcgguauc

SEQ ID NO: 30341 - RNA, 32 nt, Homo Sapiens
acgcgaccgcggcuucccgagcugcgccuggc

SEQ ID NO: 30342 - RNA, 32 nt, Homo Sapiens
gaccagcuggugcccaugcgcugcuggugguu

SEQ ID NO: 30343 - RNA, 32 nt, Homo Sapiens
caccaggugucugcauguguguguggguguga

SEQ ID NO: 30344 - RNA, 32 nt, Homo Sapiens
uaggaccuugaugugaggaaaagauaaaauuu

SEQ ID NO: 30345 - RNA, 32 nt, Homo Sapiens
acgcagcccuguugcgcuuccggcgccugcug

SEQ ID NO: 30346 - RNA, 32 nt, Homo Sapiens
ugccucuguccucauuuuguuuccuaugauca

SEQ ID NO: 30347 - RNA, 32 nt, Homo Sapiens
caugcgccgggucguacacggcggccgcgcgc

SEQ ID NO: 30348 - RNA, 32 nt, Homo Sapiens
ucucugcagccucuccugccacucggggcccc

SEQ ID NO: 30349 - RNA, 32 nt, Homo Sapiens
acuuucaauggggaggcccacccaguggccga

SEQ ID NO: 30350 - RNA, 32 nt, Homo Sapiens
agacaucaaguccagcacagccaggcaggaga

SEQ ID NO: 30351 - RNA, 32 nt, Homo Sapiens
ccccagcucuucccuugcugcagccgcaccug

SEQ ID NO: 30352 - RNA, 32 nt, Homo Sapiens
uggucauuaccaaaaacuaaauuaaaggccuu

SEQ ID NO: 30353 - RNA, 32 nt, Homo Sapiens
aagucuggauacugaggauuuggaauuaaaga

SEQ ID NO: 30354 - RNA, 32 nt, Homo Sapiens
gcugugugaacaggcuguguggauguucaggc

SEQ ID NO: 30355 - RNA, 32 nt, Homo Sapiens
cuggcagaauuucaaggcacacacugggcuga

SEQ ID NO: 30356 - RNA, 32 nt, Homo Sapiens
aacagcccauucuucgcuaauuuccucuucgc

SEQ ID NO: 30357 - RNA, 32 nt, Homo Sapiens
aucuguuuucuuuuucuaagucaugauaauau

SEQ ID NO: 30358 - RNA, 32 nt, Homo Sapiens
gugaugugggacaugaaugucugugcuaacuu

SEQ ID NO: 30359 - RNA, 32 nt, Homo Sapiens
agccuggcaucugucuucaucaucguggcauc

SEQ ID NO: 30360 - RNA, 32 nt, Homo Sapiens
cacugcugcugccagcagcagguuguggaggu

SEQ ID NO: 30361 - RNA, 32 nt, Homo Sapiens
aacaaaagaaaagaggaacccaguggauguaa

SEQ ID NO: 30362 - RNA, 32 nt, Homo Sapiens
uuuuuauacugaauauaaaaacauuuguaagg

SEQ ID NO: 30363 - RNA, 32 nt, Homo Sapiens
aaauugucccaauugcagaggcagaguuuuac

SEQ ID NO: 30364 - RNA, 32 nt, Homo Sapiens
ucaaaccacgagugucagcaguguguaagaca

SEQ ID NO: 30365 - RNA, 32 nt, Homo Sapiens
auauauccucgauaucuauauagauauagaca

SEQ ID NO: 30366 - RNA, 32 nt, Homo Sapiens
uugcccaugaaggagccccaucuuuugguugg

SEQ ID NO: 30367 - RNA, 32 nt, Homo Sapiens
aaaaggaucccggauugugagaccuacagaag

SEQ ID NO: 30368 - RNA, 27 nt, Homo Sapiens
caguucuccugccucagcccccugagu

SEQ ID NO: 30369 - RNA, 32 nt, Homo Sapiens
aaaacauaaacguggauagucaugucaucuca

SEQ ID NO: 30370 - RNA, 32 nt, Homo Sapiens
aauuugcuauaacagcucacaaacacuuauuu

SEQ ID NO: 30371 - RNA, 32 nt, Homo Sapiens
gcaaccuccgccucccggguucgggcaguucu

SEQ ID NO: 30372 - RNA, 32 nt, Homo Sapiens
cucggccuccccuucgggcgcucucgcgcuaa

SEQ ID NO: 30373 - RNA, 32 nt, Homo Sapiens
aaaucaaaaggagaauaauauuuuauagcaug

SEQ ID NO: 30374 - RNA, 29 nt, Homo Sapiens
ccuaucccauguuucagugggaaaugaac

SEQ ID NO: 30375 - RNA, 32 nt, Homo Sapiens
guuuccugaugaugaagugauuugcaauagua

SEQ ID NO: 30376 - RNA, 32 nt, Homo Sapiens
uggcccuucuuggagcucucuggcuugagccu

SEQ ID NO: 30377 - RNA, 32 nt, Homo Sapiens
cccuccccggugcuaccaccaccgcgcagauu

SEQ ID NO: 30378 - RNA, 32 nt, Homo Sapiens
aacaacauuuuucugaauccucaauagaaaau

SEQ ID NO: 30379 - RNA, 32 nt, Homo Sapiens
acuugggcugguuuucuuucuucccauccccc

SEQ ID NO: 30380 - RNA, 32 nt, Homo Sapiens
uuguauuuuguguuccucuuugcaugaucugu

SEQ ID NO: 30381 - RNA, 32 nt, Homo Sapiens
aaucugccauuaaacugcugugcgacuucagg

SEQ ID NO: 30382 - RNA, 32 nt, Homo Sapiens
uacccccuuggcccccuccccucccccagacc

SEQ ID NO: 30383 - RNA, 32 nt, Homo Sapiens
uugcuggccccggcggagcugagcgcccugga

SEQ ID NO: 30384 - RNA, 32 nt, Homo Sapiens
accagguccagccccaggcacaucuugcucca

SEQ ID NO: 30385 - RNA, 30 nt, Homo Sapiens
uugauaugccacugccuccaugccccuguc

SEQ ID NO: 30386 - RNA, 32 nt, Homo Sapiens
ucuaaaaguagcccucuuucuguuggaucuug

SEQ ID NO: 30387 - RNA, 32 nt, Homo Sapiens
cuaagaagauagaccaacuuuuuaugucgguu

SEQ ID NO: 30388 - RNA, 32 nt, Homo Sapiens
uuaagaaaauaguuucaagaaguucaacuaua

SEQ ID NO: 30389 - RNA, 32 nt, Homo Sapiens
ggugauuccagaugccugcaggugaucagaua

SEQ ID NO: 30390 - RNA, 32 nt, Homo Sapiens
gaaauuuugugauuaagaggacaugcuaauau

SEQ ID NO: 30391 - RNA, 32 nt, Homo Sapiens
aguucacuuccaccugucacugucaguuuuca

SEQ ID NO: 30392 - RNA, 32 nt, Homo Sapiens
agaagcaaaaauacuuuaacugcuguaaaccu

SEQ ID NO: 30393 - RNA, 32 nt, Homo Sapiens
agaaauaugaaugucgaggggcuuggaauucu

SEQ ID NO: 30394 - RNA, 32 nt, Homo Sapiens
guggcggcgagggcgguggggcugccuguccu

SEQ ID NO: 30395 - RNA, 32 nt, Homo Sapiens
ccaugaagugagguggaggccuuuagcauuuc

SEQ ID NO: 30396 - RNA, 32 nt, Homo Sapiens
ugggccuuucccuuuuccauucagauaaucaa

SEQ ID NO: 30397 - RNA, 32 nt, Homo Sapiens
acugucagccucuacagcaucccuccaacugc

SEQ ID NO: 30398 - RNA, 32 nt, Homo Sapiens
acaccuggugcccagauuuugguuuccaauaa

SEQ ID NO: 30399 - RNA, 32 nt, Homo Sapiens
aggagauccuucccccauccccaggagugcuc

SEQ ID NO: 30400 - RNA, 32 nt, Homo Sapiens
ugugaauaguguuucaaagguauguaguuaca

SEQ ID NO: 30401 - RNA, 29 nt, Homo Sapiens
ggggcuaugacuuucccucguaauacucc

SEQ ID NO: 30402 - RNA, 32 nt, Homo Sapiens
cuuuguauccguucaauaagcauuucauaaau

SEQ ID NO: 30403 - RNA, 32 nt, Homo Sapiens
uggaagauguaaaauauucaacuuuuuccucc

SEQ ID NO: 30404 - RNA, 32 nt, Homo Sapiens
gcuggggucggggggcuuuugcagcucuggug

SEQ ID NO: 30405 - RNA, 32 nt, Homo Sapiens
gacauauaaagucugaaaauaaaggaaugaca

SEQ ID NO: 30406 - RNA, 32 nt, Homo Sapiens
gauaauuuuuaaaaacacccuaguuguaauua

SEQ ID NO: 30407 - RNA, 32 nt, Homo Sapiens
cuucauucuugcugaguucaucuccuaugccu

SEQ ID NO: 30408 - RNA, 32 nt, Homo Sapiens
ggccuggaauauucaguuucccugccccuguu

SEQ ID NO: 30409 - RNA, 32 nt, Homo Sapiens
agucauggacuuuucugggaaaugacuuuucu

SEQ ID NO: 30410 - RNA, 32 nt, Homo Sapiens
agcuugauguuaaacgaagagaagcaaucuac

SEQ ID NO: 30411 - RNA, 32 nt, Homo Sapiens
uuuucagaugacauuaacauuuagauugguag

SEQ ID NO: 30412 - RNA, 32 nt, Homo Sapiens
gccucgccagccauguggaacuguaaguccau

SEQ ID NO: 30413 - RNA, 32 nt, Homo Sapiens
cauuggguaucuauuucuuucuaagacauaca

SEQ ID NO: 30414 - RNA, 32 nt, Homo Sapiens
gcacugggccuaucuuuuuguuuuccagccag

SEQ ID NO: 30415 - RNA, 32 nt, Homo Sapiens
ucuacauaggucuuuuuuuuuagauguuugau

SEQ ID NO: 30416 - RNA, 32 nt, Homo Sapiens
caacaucaucacagggacccugccuccuuccu

SEQ ID NO: 30417 - RNA, 31 nt, Homo Sapiens
ccaagggugggagagcugacggccugggcca

SEQ ID NO: 30418 - RNA, 32 nt, Homo Sapiens
guauaaacuguaaagugcaauagaaaacugug

SEQ ID NO: 30419 - RNA, 32 nt, Homo Sapiens
cacggcggcguaggcuguggcgggaaacgcug

SEQ ID NO: 30420 - RNA, 32 nt, Homo Sapiens
cuuugggaggccggugggcagaucaugagguc

SEQ ID NO: 30421 - RNA, 32 nt, Homo Sapiens
agcuccuuaaacuuauuauuauuguuaauauu

SEQ ID NO: 30422 - RNA, 32 nt, Homo Sapiens
gacagcagcaggagcgucauggccguggcgcu

SEQ ID NO: 30423 - RNA, 32 nt, Homo Sapiens
agcugugggugguggggggcggggggcaggac

SEQ ID NO: 30424 - RNA, 32 nt, Homo Sapiens
accugagaggggcugcuggcugaauuagguua

SEQ ID NO: 30425 - RNA, 32 nt, Homo Sapiens
ugcuggcucgggaaguucugugcaugcguggc

SEQ ID NO: 30426 - RNA, 32 nt, Homo Sapiens
gccuggccgccgguccggcgugcgccaaguuc

SEQ ID NO: 30427 - RNA, 32 nt, Homo Sapiens
ggaggcugcccccaggccuguauauuuaaccc

SEQ ID NO: 30428 - RNA, 32 nt, Homo Sapiens
guaagggcugagcuuucugugcuucuaggugg

SEQ ID NO: 30429 - RNA, 32 nt, Homo Sapiens
aucauuuuuuugucuuuuuuuuuuuuuugucc

SEQ ID NO: 30430 - RNA, 32 nt, Homo Sapiens
accaugguagccaggcuggucucaaacuccug

SEQ ID NO: 30431 - RNA, 32 nt, Homo Sapiens
ggagggcccagcuggggcaaccacgcucggga

SEQ ID NO: 30432 - RNA, 32 nt, Homo Sapiens
ugaagaggacugaguucucagcgauguuggcg

SEQ ID NO: 30433 - RNA, 32 nt, Homo Sapiens
augccuggggucgucugcccguggacuuggcc

SEQ ID NO: 30434 - RNA, 32 nt, Homo Sapiens
ugcagaaaagagugaaacuuuuaacugcuuag

SEQ ID NO: 30435 - RNA, 32 nt, Homo Sapiens
uuaaacaaauuuacaggaaaacaaacaauccc

SEQ ID NO: 30436 - RNA, 32 nt, Homo Sapiens
aguccagcuggguagucccaggcuccugucuu

SEQ ID NO: 30437 - RNA, 32 nt, Homo Sapiens
uuaaauaaaaauuuauugaauaauuaaugaua

SEQ ID NO: 30438 - RNA, 32 nt, Homo Sapiens
auggagaagugaauucaguuuuggcuuucuca

SEQ ID NO: 30439 - RNA, 32 nt, Homo Sapiens
aguucuccaagcucuagaaaucucugacacau

SEQ ID NO: 30440 - RNA, 30 nt, Homo Sapiens
cugcccgcagguggcauuuuaaaacuuggc

SEQ ID NO: 30441 - RNA, 32 nt, Homo Sapiens
aggguucagucggaagcagaagccgggagacu

SEQ ID NO: 30442 - RNA, 32 nt, Homo Sapiens
uugcaguuucuuuuugcguacaaaugaucuua

SEQ ID NO: 30443 - RNA, 32 nt, Homo Sapiens
auucaggaugacuuuucuuuuacaaugguuuc

SEQ ID NO: 30444 - RNA, 32 nt, Homo Sapiens
cuuccaggacaaugcagauugauguugauuaa

SEQ ID NO: 30445 - RNA, 32 nt, Homo Sapiens
aaguguuguaaauauuuauguaaacugcauua

SEQ ID NO: 30446 - RNA, 32 nt, Homo Sapiens
ucuccaggaaaaggaggaauguagccagcucc

SEQ ID NO: 30447 - RNA, 32 nt, Homo Sapiens
ggccagggccccacaacagcaggucugacuca

SEQ ID NO: 30448 - RNA, 32 nt, Homo Sapiens
agccucuuccggcggcagcgugcaccgggcgg

SEQ ID NO: 30449 - RNA, 31 nt, Homo Sapiens
gggugagcgcgggugucgaggucuguguguc

SEQ ID NO: 30450 - RNA, 32 nt, Homo Sapiens
gucugcugcuggaagcaggugcugaccccacu

SEQ ID NO: 30451 - RNA, 32 nt, Homo Sapiens
cuauaauuguaaauauuuugauacaaauguuu

SEQ ID NO: 30452 - RNA, 32 nt, Homo Sapiens
uguugcuugaaauaaugaugauauaaaggcug

SEQ ID NO: 30453 - RNA, 31 nt, Homo Sapiens
ggccgagggcacugcuccucggugcauugcu

SEQ ID NO: 30454 - RNA, 32 nt, Homo Sapiens
gccaagcuggauucuguguaccuaguacacag

SEQ ID NO: 30455 - RNA, 32 nt, Homo Sapiens
cccaccacagugaaaacuuauguuaggggagu

SEQ ID NO: 30456 - RNA, 32 nt, Homo Sapiens
agucagcaugucuggaaucccgaggguuauau

SEQ ID NO: 30457 - RNA, 32 nt, Homo Sapiens
gagauguacaaaucaauaauaauuacacuuuu

SEQ ID NO: 30458 - RNA, 32 nt, Homo Sapiens
aggcgagagccaggcuccccgcgcucacggga

SEQ ID NO: 30459 - RNA, 32 nt, Homo Sapiens
accucugaaaacugccggcaucugagguuucc

SEQ ID NO: 30460 - RNA, 30 nt, Homo Sapiens
acgcagccgcuccugccgccguggucgcug

SEQ ID NO: 30461 - RNA, 32 nt, Homo Sapiens
uccaaacuguaucguagccguccacaaagaug

SEQ ID NO: 30462 - RNA, 32 nt, Homo Sapiens
cccacgcguucccgucgcugacaaagccacca

SEQ ID NO: 30463 - RNA, 32 nt, Homo Sapiens
cauugccgucagcaugacagaccuccagcauc

SEQ ID NO: 30464 - RNA, 32 nt, Homo Sapiens
gucuccaagcugcggaucauggagcgccucag

SEQ ID NO: 30465 - RNA, 31 nt, Homo Sapiens
ucacuucucaaugacuggacuguguggguac

SEQ ID NO: 30466 - RNA, 32 nt, Homo Sapiens
guuacauagauaugaaaagauuggcagaggcc

SEQ ID NO: 30467 - RNA, 32 nt, Homo Sapiens
aggaggaccuggggguguggcagcgaggaagg

SEQ ID NO: 30468 - RNA, 32 nt, Homo Sapiens
ggcugcccccaggguuucugcacugguccccu

SEQ ID NO: 30469 - RNA, 32 nt, Homo Sapiens
auaccaaauaaaauaccuuuaaaaaugaaaua

SEQ ID NO: 30470 - RNA, 32 nt, Homo Sapiens
caauguggcaaaguuuuuaacuaauacaccuu

SEQ ID NO: 30471 - RNA, 32 nt, Homo Sapiens
agcagcgccagcccagcucuccccucugcacc

SEQ ID NO: 30472 - RNA, 32 nt, Homo Sapiens
acuccuugauaaaacuuaaaaguaucggcaug

SEQ ID NO: 30473 - RNA, 32 nt, Homo Sapiens
uagaggaaagagaaggguauuuguauacaaag

SEQ ID NO: 30474 - RNA, 32 nt, Homo Sapiens
ccccgccuaaaauccauauucaaagaagcaau

SEQ ID NO: 30475 - RNA, 32 nt, Homo Sapiens
ugagcuggggagagguggcagagggcaguaug

SEQ ID NO: 30476 - RNA, 32 nt, Homo Sapiens
auucuuuauagaaaugugaacacugaauuuau

SEQ ID NO: 30477 - RNA, 32 nt, Homo Sapiens
agccgugcacaccagccagggcguucgggagg

SEQ ID NO: 30478 - RNA, 32 nt, Homo Sapiens
cacagcagaugguguggaugugugucgccgga

SEQ ID NO: 30479 - RNA, 32 nt, Homo Sapiens
cucucugacaacacuaacgaccaaucuggaga

SEQ ID NO: 30480 - RNA, 32 nt, Homo Sapiens
uccuaaagaaagauuacguugaugaaaaagaa

SEQ ID NO: 30481 - RNA, 32 nt, Homo Sapiens
ccugggcaauaagaagaaaucugugaguggaa

SEQ ID NO: 30482 - RNA, 32 nt, Homo Sapiens
uuucuuucuccgguucccaguuuuccagaccu

SEQ ID NO: 30483 - RNA, 32 nt, Homo Sapiens
aagucaucuuuuguuuucccccuuaaggaacc

SEQ ID NO: 30484 - RNA, 32 nt, Homo Sapiens
auuguguauccucauuacuguaucauuugugg

SEQ ID NO: 30485 - RNA, 32 nt, Homo Sapiens
uaagggaaaucgucauucuaaccucaugacag

SEQ ID NO: 30486 - RNA, 31 nt, Homo Sapiens
cgagcgcugccggucccggcggugcgacacg

SEQ ID NO: 30487 - RNA, 32 nt, Homo Sapiens
gcccagcuaauuuuuguauuuucaguagagac

SEQ ID NO: 30488 - RNA, 32 nt, Homo Sapiens
ggaccgcagccuccgcuuccgcugcucguggc

SEQ ID NO: 30489 - RNA, 32 nt, Homo Sapiens
cgucgccgccggggcgacucggagucagagga

SEQ ID NO: 30490 - RNA, 32 nt, Homo Sapiens
agggccgagugagagcgugcuccagccuggcu

SEQ ID NO: 30491 - RNA, 32 nt, Homo Sapiens
gauggcccacuuuuguuuauauaaauaagagc

SEQ ID NO: 30492 - RNA, 32 nt, Homo Sapiens
ugccuucugcaccuuccucgugcuggccauca

SEQ ID NO: 30493 - RNA, 32 nt, Homo Sapiens
uuuuguuccgggacugguuugggugggacaaa

SEQ ID NO: 30494 - RNA, 32 nt, Homo Sapiens
aaauauuugaagauccuuaucuauauucauuc

SEQ ID NO: 30495 - RNA, 32 nt, Homo Sapiens
cugugucaguguucucgugggugucugcacgg

SEQ ID NO: 30496 - RNA, 32 nt, Homo Sapiens
gccgggggcggucggaaggcgcggcgcgaagc

SEQ ID NO: 30497 - RNA, 32 nt, Homo Sapiens
cacagccuuucugucccuuaaaacaccugcaa

SEQ ID NO: 30498 - RNA, 32 nt, Homo Sapiens
ggacuauuugugcgaagagaugcaguggcucu

SEQ ID NO: 30499 - RNA, 32 nt, Homo Sapiens
gggcauaucgagaugaucaggaugcugccuau

SEQ ID NO: 30500 - RNA, 31 nt, Homo Sapiens
ccuucacaagaggugucagauuaagauguga

SEQ ID NO: 30501 - RNA, 32 nt, Homo Sapiens
cgccuguaaugccagcacuuugggaggccgag

SEQ ID NO: 30502 - RNA, 32 nt, Homo Sapiens
caccuguaaucccagcacuuugggaacccgag

SEQ ID NO: 30503 - RNA, 31 nt, Homo Sapiens
aguggacagcgcagaccgccagcgcaugcag

SEQ ID NO: 30504 - RNA, 30 nt, Homo Sapiens
ccgccauggcccggcuguggggcgcgcuga

SEQ ID NO: 30505 - RNA, 32 nt, Homo Sapiens
ggauuuauagggggccugugucugcaaagucc

SEQ ID NO: 30506 - RNA, 32 nt, Homo Sapiens
ugggggcuguggcagggcaggggcggcuugga

SEQ ID NO: 30507 - RNA, 32 nt, Homo Sapiens
cccgcccccacuuccuuuacuauccuaacuuu

SEQ ID NO: 30508 - RNA, 32 nt, Homo Sapiens
guuucuuuuaaauuauuucagcuuuaaaaaua

SEQ ID NO: 30509 - RNA, 32 nt, Homo Sapiens
cugcacgggcccgcccugguggggcucggcga

SEQ ID NO: 30510 - RNA, 32 nt, Homo Sapiens
cccggggcccgcgucgcaaucgcgacagcuac

SEQ ID NO: 30511 - RNA, 32 nt, Homo Sapiens
auguaguuuucucauuuaguaaaaguugucua

SEQ ID NO: 30512 - RNA, 29 nt, Homo Sapiens
uuucaaaggagccacaguuuaaugggguu

SEQ ID NO: 30513 - RNA, 31 nt, Homo Sapiens
agccgccugccccgccugccccgccugccug

SEQ ID NO: 30514 - RNA, 32 nt, Homo Sapiens
auucaggguuauuugaggggaaaaaaccccau

SEQ ID NO: 30515 - RNA, 32 nt, Homo Sapiens
gacuggucuugaacuccugaccucaagcaauc

SEQ ID NO: 30516 - RNA, 32 nt, Homo Sapiens
cguuugccuguuccuauucagugucuuuucua

SEQ ID NO: 30517 - RNA, 32 nt, Homo Sapiens
ucuauuguuccauuuuauucuugcauuuuucu

SEQ ID NO: 30518 - RNA, 32 nt, Homo Sapiens
uccucuuccucuucuucuucuuccuccuccuc

SEQ ID NO: 30519 - RNA, 30 nt, Homo Sapiens
uggggauguuugauuugaaccuugaagaac

SEQ ID NO: 30520 - RNA, 32 nt, Homo Sapiens
cauuacuuauggaagauguagcaagaaguuca

SEQ ID NO: 30521 - RNA, 31 nt, Homo Sapiens
caaaugugaaacacuagggccaaucugagau

SEQ ID NO: 30522 - RNA, 32 nt, Homo Sapiens
cccagcuuucccuuuucaagagguaccccaga

SEQ ID NO: 30523 - RNA, 32 nt, Homo Sapiens
aaaguaauauuuuuguauugcauuuuucuauu

SEQ ID NO: 30524 - RNA, 32 nt, Homo Sapiens
ugcaucaccaguuuuucuuaccuucuguugac

SEQ ID NO: 30525 - RNA, 32 nt, Homo Sapiens
cucaugaucccgggcggguggcggcggcggca

SEQ ID NO: 30526 - RNA, 32 nt, Homo Sapiens
gccacuaauuauuaaaauccaucugcuuauuc

SEQ ID NO: 30527 - RNA, 32 nt, Homo Sapiens
aguuccagccgcgucccuggggccuggggcag

SEQ ID NO: 30528 - RNA, 32 nt, Homo Sapiens
aucccucucugcuggacguccagguggaggug

SEQ ID NO: 30529 - RNA, 32 nt, Homo Sapiens
ugcuggaaaaggaaugugggguugucauagaa

SEQ ID NO: 30530 - RNA, 32 nt, Homo Sapiens
cagugccuuuuggccacugcagcuaccguaga

SEQ ID NO: 30531 - RNA, 32 nt, Homo Sapiens
guacgaaccccuccccuccccccuguaaacac

SEQ ID NO: 30532 - RNA, 32 nt, Homo Sapiens
ugccuguuugcuaauuuaaaaauauuuauuuu

SEQ ID NO: 30533 - RNA, 32 nt, Homo Sapiens
agcccgaacugacuucagcagcuaccccaaac

SEQ ID NO: 30534 - RNA, 32 nt, Homo Sapiens
ggccagugcccuuccuccuccuccuccucugc

SEQ ID NO: 30535 - RNA, 32 nt, Homo Sapiens
aaaagggggcaucaccguuccuggguaacaga

SEQ ID NO: 30536 - RNA, 32 nt, Homo Sapiens
aguauuacaaauauauagcacaucaccuggga

SEQ ID NO: 30537 - RNA, 32 nt, Homo Sapiens
ggcucccugcccgugaggcccggugcaggacc

SEQ ID NO: 30538 - RNA, 32 nt, Homo Sapiens
ggugcugccuggcagagcuguguuaccgucuu

SEQ ID NO: 30539 - RNA, 32 nt, Homo Sapiens
uggauugaacugugucccccugaaacucuuau

SEQ ID NO: 30540 - RNA, 32 nt, Homo Sapiens
ugaaguaguuuauuauaguuuucaaauugauu

SEQ ID NO: 30541 - RNA, 30 nt, Homo Sapiens
cugcagccucccgugccguccucgggcccc

SEQ ID NO: 30542 - RNA, 32 nt, Homo Sapiens
agguggccauucuagagaaaucucagaggaga

SEQ ID NO: 30543 - RNA, 32 nt, Homo Sapiens
agacaaggggaaaauauuuuacgaagcucugu

SEQ ID NO: 30544 - RNA, 32 nt, Homo Sapiens
gaaggcugccuccugcugcugcuguacaugua

SEQ ID NO: 30545 - RNA, 32 nt, Homo Sapiens
guugcuucucaagucagaaaacuuuucaggaa

SEQ ID NO: 30546 - RNA, 32 nt, Homo Sapiens
ucuugugccaagggcuacuuucucucauuugu

SEQ ID NO: 30547 - RNA, 32 nt, Homo Sapiens
caacguuugugauauuuauuacaugcuuuuuu

SEQ ID NO: 30548 - RNA, 32 nt, Homo Sapiens
auugucacauuacugcuagauuuuaaacagcc

SEQ ID NO: 30549 - RNA, 32 nt, Homo Sapiens
ucccggagcgaccgcagggcagccccgggcgc

SEQ ID NO: 30550 - RNA, 32 nt, Homo Sapiens
uaaaucaccccagucuuaauuuuuaaaagacu

SEQ ID NO: 30551 - RNA, 32 nt, Homo Sapiens
gaaagaggagaugaacagugauaccucagugc

SEQ ID NO: 30552 - RNA, 32 nt, Homo Sapiens
caguggcucaugccuauaaucccggcacuuug

SEQ ID NO: 30553 - RNA, 32 nt, Homo Sapiens
cccaaugacuauguuugguaauaaucagcucu

SEQ ID NO: 30554 - RNA, 32 nt, Homo Sapiens
ucuccuucacucuaccuucuagguuccugaag

SEQ ID NO: 30555 - RNA, 32 nt, Homo Sapiens
acacuggccugucugccuguucugggagggcu

SEQ ID NO: 30556 - RNA, 32 nt, Homo Sapiens
uuaacuuuguuguuuuacuauccucaggcauc

SEQ ID NO: 30557 - RNA, 32 nt, Homo Sapiens
agcagauucccaaauuauaagagcagccucac

SEQ ID NO: 30558 - RNA, 32 nt, Homo Sapiens
ugucuccuauauauuucuauuauuaauugcaa

SEQ ID NO: 30559 - RNA, 32 nt, Homo Sapiens
auucuaggggauuucuggugggacaaugggug

SEQ ID NO: 30560 - RNA, 32 nt, Homo Sapiens
aagaaaccucgguucccacugauccuucuggg

SEQ ID NO: 30561 - RNA, 32 nt, Homo Sapiens
uuaguugacuauuaucaaagcuuguuuuuguc

SEQ ID NO: 30562 - RNA, 32 nt, Homo Sapiens
aggagcugacugccuccagggcuggaauccug

SEQ ID NO: 30563 - RNA, 32 nt, Homo Sapiens
gagggaaggggaggggcgcggcgcggcgacuc

SEQ ID NO: 30564 - RNA, 32 nt, Homo Sapiens
ucccaauuuaucuguuauguuuugucacuauu

SEQ ID NO: 30565 - RNA, 32 nt, Homo Sapiens
auagccugugaguccaaguaaaugaucacuuu

SEQ ID NO: 30566 - RNA, 32 nt, Homo Sapiens
agagcuaguuucaggaacagugaggcaagcua

SEQ ID NO: 30567 - RNA, 30 nt, Homo Sapiens
aaagcggccguucucggauuccggagcguu

SEQ ID NO: 30568 - RNA, 32 nt, Homo Sapiens
cacaguugcucuucgcaagagccccuggggau

SEQ ID NO: 30569 - RNA, 32 nt, Homo Sapiens
cugucuuccccucccuaccucauggggaaugu

SEQ ID NO: 30570 - RNA, 32 nt, Homo Sapiens
agcuucuagcuaacacaggagaccuauucuua

SEQ ID NO: 30571 - RNA, 32 nt, Homo Sapiens
uugccuucccccagccucccgaggcccagccc

SEQ ID NO: 30572 - RNA, 32 nt, Homo Sapiens
ccuguagaaaaacuaauuuuucugccuuuuac

SEQ ID NO: 30573 - RNA, 32 nt, Homo Sapiens
cauuggcccccaccccagagaccuccaccuca

SEQ ID NO: 30574 - RNA, 32 nt, Homo Sapiens
uuugaaaugggucucagacaugucuacaaaua

SEQ ID NO: 30575 - RNA, 32 nt, Homo Sapiens
uucuguuguguugggugaccuuugguugugaa

SEQ ID NO: 30576 - RNA, 32 nt, Homo Sapiens
ugaaaucaguuauaaauauggugaauuuuuuc

SEQ ID NO: 30577 - RNA, 32 nt, Homo Sapiens
gacccagucagcccuuggauagagagggaaac

SEQ ID NO: 30578 - RNA, 32 nt, Homo Sapiens
auuuccacuggcuccuauccagaugggguagg

SEQ ID NO: 30579 - RNA, 32 nt, Homo Sapiens
ucugaggcauggguuuucugcuccugugcagg

SEQ ID NO: 30580 - RNA, 32 nt, Homo Sapiens
ggcugcgccccggccggcccaugcguuuugug

SEQ ID NO: 30581 - RNA, 32 nt, Homo Sapiens
uucccuuccaguuaacuaccucuccaagggaa

SEQ ID NO: 30582 - RNA, 32 nt, Homo Sapiens
ggcggcagccccggagggcggcugggagcuga

SEQ ID NO: 30583 - RNA, 32 nt, Homo Sapiens
uucuuuaaaacacacacacacacacacacaca

SEQ ID NO: 30584 - RNA, 32 nt, Homo Sapiens
uuuuucaaacucuuaugcacucaugaaacaca

SEQ ID NO: 30585 - RNA, 32 nt, Homo Sapiens
uugguaacuacccaccaagagcacauggguag

SEQ ID NO: 30586 - RNA, 32 nt, Homo Sapiens
ggaagucaauaaguacaagguaacucugaaaa

SEQ ID NO: 30587 - RNA, 32 nt, Homo Sapiens
guguuuguuuuuucauuuauguuauuuauuaa

SEQ ID NO: 30588 - RNA, 32 nt, Homo Sapiens
ccuggcggguggcugcaagcccaccucggccc

SEQ ID NO: 30589 - RNA, 32 nt, Homo Sapiens
auaacuaauguaugauaauagaauaauuugca

SEQ ID NO: 30590 - RNA, 32 nt, Homo Sapiens
aacaaguuuuaguuuauugcuuuggagacuag

SEQ ID NO: 30591 - RNA, 32 nt, Homo Sapiens
uaucgccacuguauuuguguacuuuaacaauc

SEQ ID NO: 30592 - RNA, 32 nt, Homo Sapiens
acugaggcucagguugucauuugcucaaauca

SEQ ID NO: 30593 - RNA, 32 nt, Homo Sapiens
ggaauaggcagacauuucagcaaggcugcuga

SEQ ID NO: 30594 - RNA, 32 nt, Homo Sapiens
aucuaggugcagcuguguucugcagcaaaaca

SEQ ID NO: 30595 - RNA, 32 nt, Homo Sapiens
cauggaacaggaugggcagagaaaggguagug

SEQ ID NO: 30596 - RNA, 32 nt, Homo Sapiens
agcuaaaacaaaauagacacauauggcuuuua

SEQ ID NO: 30597 - RNA, 32 nt, Homo Sapiens
uuccccggccuugcccccgcccgccccgugcc

SEQ ID NO: 30598 - RNA, 32 nt, Homo Sapiens
cggcggcugcgggucucgugggggcggagcgg

SEQ ID NO: 30599 - RNA, 32 nt, Homo Sapiens
aguuucacuauguaggucaggcuggucucgaa

SEQ ID NO: 30600 - RNA, 32 nt, Homo Sapiens
ggcucugcguccucguccagccgccaacucgg

SEQ ID NO: 30601 - RNA, 32 nt, Homo Sapiens
cacucagauuuucugcccuucuuuguaauaag

SEQ ID NO: 30602 - RNA, 30 nt, Homo Sapiens
auaguagagaagcuuuuagucaaaagucag

SEQ ID NO: 30603 - RNA, 32 nt, Homo Sapiens
uggagguguugagagcaggaaaaggaggcugu

SEQ ID NO: 30604 - RNA, 31 nt, Homo Sapiens
aaguauugcugaagccaaccagagaucuuga

SEQ ID NO: 30605 - RNA, 32 nt, Homo Sapiens
gccccucgcgcgugugggucccggggcagccc

SEQ ID NO: 30606 - RNA, 32 nt, Homo Sapiens
cggcgguaccggugcuggcggcggcagcugag

SEQ ID NO: 30607 - RNA, 32 nt, Homo Sapiens
cuuugcccaacaggaaaaugugucucaugcag

SEQ ID NO: 30608 - RNA, 32 nt, Homo Sapiens
aacguguggcgguauuuguccagguccacauc

SEQ ID NO: 30609 - RNA, 32 nt, Homo Sapiens
ggacaucucucccacacuuuccccagugcuuu

SEQ ID NO: 30610 - RNA, 31 nt, Homo Sapiens
augaagaaauaaaaacacgaguucaucagua

SEQ ID NO: 30611 - RNA, 31 nt, Homo Sapiens
cgccgccgcuucucccugccccgcagcgcgc

SEQ ID NO: 30612 - RNA, 32 nt, Homo Sapiens
cuaccugcaaccaugugacauagaaaaacugg

SEQ ID NO: 30613 - RNA, 32 nt, Homo Sapiens
cagcccugcagugaaguagacucucagaggac

SEQ ID NO: 30614 - RNA, 32 nt, Homo Sapiens
ccucuggcccaggccccuccccaccagggcuu

SEQ ID NO: 30615 - RNA, 32 nt, Homo Sapiens
gccugcccaagcccaggccacccuaucgcccc

SEQ ID NO: 30616 - RNA, 32 nt, Homo Sapiens
gugcauuuucuuuuuagcuguuaaauguacua

SEQ ID NO: 30617 - RNA, 32 nt, Homo Sapiens
uccaccccuacucuccucccuugcucccagca

SEQ ID NO: 30618 - RNA, 32 nt, Homo Sapiens
cgcacuggggggcugugacagcagcugggcca

SEQ ID NO: 30619 - RNA, 32 nt, Homo Sapiens
cucacuuuuuaaaaucuuguuccaugccucca

SEQ ID NO: 30620 - RNA, 32 nt, Homo Sapiens
cacuuguuugaaaauaaaucuuuauuuugaac

SEQ ID NO: 30621 - RNA, 32 nt, Homo Sapiens
gggagacccgggccgccuucaggccgcucccc

SEQ ID NO: 30622 - RNA, 32 nt, Homo Sapiens
ccccgccgccccacaccucuccccuuugggcu

SEQ ID NO: 30623 - RNA, 32 nt, Homo Sapiens
uucgcguugaccaaguuccuuaaagaacuggc

SEQ ID NO: 30624 - RNA, 32 nt, Homo Sapiens
ccugaggcuucuuuacuuuggggcccugguua

SEQ ID NO: 30625 - RNA, 31 nt, Homo Sapiens
caggaaaugaguggggugcagcuccagcccc

SEQ ID NO: 30626 - RNA, 32 nt, Homo Sapiens
gaucgcugggagcgguugcgcgugcggggagc

SEQ ID NO: 30627 - RNA, 32 nt, Homo Sapiens
aacuuaucuuuauucucaaaauuaaauguaau

SEQ ID NO: 30628 - RNA, 32 nt, Homo Sapiens
uguacagagaacaaaacuauauuuucaguuuu

SEQ ID NO: 30629 - RNA, 32 nt, Homo Sapiens
aggagauaaacacgcacgcuccuccuuccucg

SEQ ID NO: 30630 - RNA, 32 nt, Homo Sapiens
ucuucugucucucuccucuccucaggcucaau

SEQ ID NO: 30631 - RNA, 32 nt, Homo Sapiens
aucugauaccacuacaaauauuuacgugagaa

SEQ ID NO: 30632 - RNA, 32 nt, Homo Sapiens
cuggccagcaggcucacgcaccuuggccuguu

SEQ ID NO: 30633 - RNA, 32 nt, Homo Sapiens
cccacaaccgugccggcugcugcccgugcugc

SEQ ID NO: 30634 - RNA, 32 nt, Homo Sapiens
gugggugaggauuucuuaggccugauagaaua

SEQ ID NO: 30635 - RNA, 32 nt, Homo Sapiens
uuguuugucugcuuguuugcgacagagcgaga

SEQ ID NO: 30636 - RNA, 32 nt, Homo Sapiens
uuuugacuuuuuguuuuuuucuuauuuaacau

SEQ ID NO: 30637 - RNA, 32 nt, Homo Sapiens
uuuuugcggcccccauugugcugcuggacccg

SEQ ID NO: 30638 - RNA, 32 nt, Homo Sapiens
guuuuaagauuucugaccagcagucucuuacc

SEQ ID NO: 30639 - RNA, 32 nt, Homo Sapiens
ugcuauauugauggguaaauguguacauccua

SEQ ID NO: 30640 - RNA, 32 nt, Homo Sapiens
cauagccccaaauauaguaagaucuauacuag

SEQ ID NO: 30641 - RNA, 32 nt, Homo Sapiens
cucauauauuuggaguuuuucugaaaaaugga

SEQ ID NO: 30642 - RNA, 32 nt, Homo Sapiens
uagaaaugacugcauuugauauuuuaggauau

SEQ ID NO: 30643 - RNA, 32 nt, Homo Sapiens
ggaauccaggacuguauuuucauggagaagaa

SEQ ID NO: 30644 - RNA, 32 nt, Homo Sapiens
uuccuguugagaugggggacugagagacagga

SEQ ID NO: 30645 - RNA, 32 nt, Homo Sapiens
cccguggugucacccucagccggcgccgggca

SEQ ID NO: 30646 - RNA, 32 nt, Homo Sapiens
ucuacuccggccgggccggguccgccacgucu

SEQ ID NO: 30647 - RNA, 32 nt, Homo Sapiens
ggggugccuggccucccugaacuguuagggcu

SEQ ID NO: 30648 - RNA, 32 nt, Homo Sapiens
ucuuuuuacgaaccuagcaugaugccaacaag

SEQ ID NO: 30649 - RNA, 27 nt, Homo Sapiens
uggagaugaugaugaugaugaugaugg

SEQ ID NO: 30650 - RNA, 32 nt, Homo Sapiens
uaguaccauuccaggagugucuaaagccgagc

SEQ ID NO: 30651 - RNA, 32 nt, Homo Sapiens
accagagggcagugcaggcuucugccugggcc

SEQ ID NO: 30652 - RNA, 32 nt, Homo Sapiens
aaaaauaaauuaacuuuucuguaauuagauug

SEQ ID NO: 30653 - RNA, 32 nt, Homo Sapiens
ccagaguccuccuccuggaucuuuagaggaac

SEQ ID NO: 30654 - RNA, 32 nt, Homo Sapiens
cacugaugaagauguggcaggagaaagaaaga

SEQ ID NO: 30655 - RNA, 32 nt, Homo Sapiens
cgggcagagcgcggucggcguuagcuuuccuu

SEQ ID NO: 30656 - RNA, 32 nt, Homo Sapiens
uuugaccuggcagcagauguccuggcagaaaa

SEQ ID NO: 30657 - RNA, 32 nt, Homo Sapiens
ccagcaggagaccuuucuuggaggaaggaguc

SEQ ID NO: 30658 - RNA, 32 nt, Homo Sapiens
cauuguucugggacuuccuacccuggcuccca

SEQ ID NO: 30659 - RNA, 30 nt, Homo Sapiens
gagcgguaagauggcggcggcggcgguggu

SEQ ID NO: 30660 - RNA, 32 nt, Homo Sapiens
uugauacuggaacuaugcuuugaaauacaccu

SEQ ID NO: 30661 - RNA, 32 nt, Homo Sapiens
acugaagucugucuguuuuuuauauuggcugu

SEQ ID NO: 30662 - RNA, 32 nt, Homo Sapiens
gcccccuuucccuuccuccuccuccagaugcc

SEQ ID NO: 30663 - RNA, 32 nt, Homo Sapiens
ggcccauuguccgcgggcccagcccccgcgcu

SEQ ID NO: 30664 - RNA, 27 nt, Homo Sapiens
caauggcggccgccacccugcugcgcg

SEQ ID NO: 30665 - RNA, 32 nt, Homo Sapiens
agggcggggagaggaggcucucaauaaauaau

SEQ ID NO: 30666 - RNA, 32 nt, Homo Sapiens
cuuguaaggcuuugauuaguuuucuuguugcu

SEQ ID NO: 30667 - RNA, 32 nt, Homo Sapiens
uggucucuugucagauagcaaaugcuucuucu

SEQ ID NO: 30668 - RNA, 32 nt, Homo Sapiens
ugcgggacacggugcugcugcugcacggccua

SEQ ID NO: 30669 - RNA, 32 nt, Homo Sapiens
uuuuagaagagaaaagaaucuugaauuguaua

SEQ ID NO: 30670 - RNA, 32 nt, Homo Sapiens
uuguauccaaaauauaaaauacacugacaacu

SEQ ID NO: 30671 - RNA, 32 nt, Homo Sapiens
cuuacagaugacccuauugaaugcaagcaccu

SEQ ID NO: 30672 - RNA, 32 nt, Homo Sapiens
cugguguuaugaggaagaauaaaggggauaaa

SEQ ID NO: 30673 - RNA, 32 nt, Homo Sapiens
uuuaauaauuuaauaagguuaucucuuccaag

SEQ ID NO: 30674 - RNA, 32 nt, Homo Sapiens
cguaguagccccccuacuccccggccaaguca

SEQ ID NO: 30675 - RNA, 32 nt, Homo Sapiens
gucugggcagcaggaaggaagggcgcagcguc

SEQ ID NO: 30676 - RNA, 32 nt, Homo Sapiens
gcuggcagccccagcagucagggccugcuuug

SEQ ID NO: 30677 - RNA, 32 nt, Homo Sapiens
aaugugaaagacugggugcuagacaagaagga

SEQ ID NO: 30678 - RNA, 31 nt, Homo Sapiens
caggggaauugcuugaaccagggagguggag

SEQ ID NO: 30679 - RNA, 32 nt, Homo Sapiens
cuguucuuucugggcuugcucaucucccccca

SEQ ID NO: 30680 - RNA, 32 nt, Homo Sapiens
guggccaaaugguaaacuauugguacuuguuu

SEQ ID NO: 30681 - RNA, 32 nt, Homo Sapiens
cuagggaaagguugguaugaaaaaaugucuuu

SEQ ID NO: 30682 - RNA, 32 nt, Homo Sapiens
gcguggacgcugcccggccacggugcggagcu

SEQ ID NO: 30683 - RNA, 32 nt, Homo Sapiens
cacaucagggcggccucccaggucccauaagg

SEQ ID NO: 30684 - RNA, 32 nt, Homo Sapiens
acggacgcgaugcacacaggcguccugaccga

SEQ ID NO: 30685 - RNA, 32 nt, Homo Sapiens
gcaucaaucuguguucagguccaggguuacau

SEQ ID NO: 30686 - RNA, 32 nt, Homo Sapiens
ccacacuguuaaucaagaaaauuaaaacugua

SEQ ID NO: 30687 - RNA, 32 nt, Homo Sapiens
uguaagaaauuuauuucuuuccaguuucauaa

SEQ ID NO: 30688 - RNA, 32 nt, Homo Sapiens
cuccgcuucgcccgagacccagcgcccaggcg

SEQ ID NO: 30689 - RNA, 29 nt, Homo Sapiens
aauaaaguugguguuuauuuucugguaaa

SEQ ID NO: 30690 - RNA, 32 nt, Homo Sapiens
agcagagaagcugaaauugacaaggcaaacgg

SEQ ID NO: 30691 - RNA, 32 nt, Homo Sapiens
cacuacccacccacgcauguaccgggaaaaaa

SEQ ID NO: 30692 - RNA, 32 nt, Homo Sapiens
cuaauuggccccagugccaucuugcccagcuu

SEQ ID NO: 30693 - RNA, 32 nt, Homo Sapiens
guugauucuacuguugaggaucaauaaacuau

SEQ ID NO: 30694 - RNA, 32 nt, Homo Sapiens
cccccugcuggcccgcggcggcgaggagcaga

SEQ ID NO: 30695 - RNA, 32 nt, Homo Sapiens
ccccggggagcgcagggaaaagggugcuucgg

SEQ ID NO: 30696 - RNA, 32 nt, Homo Sapiens
aagggcagggauuuuugccucuuuuguucagu

SEQ ID NO: 30697 - RNA, 32 nt, Homo Sapiens
gaaauucuccuccuucuucccuuuccagcaaa

SEQ ID NO: 30698 - RNA, 32 nt, Homo Sapiens
uucuagugaucuucuucagaacauuuuaucac

SEQ ID NO: 30699 - RNA, 32 nt, Homo Sapiens
ccgcuccccucccccgcauccgcgacccuccg

SEQ ID NO: 30700 - RNA, 32 nt, Homo Sapiens
gccuaugcagagguccacaacacacagauuug

SEQ ID NO: 30701 - RNA, 32 nt, Homo Sapiens
cccuccugugugucccugguggucuaguggcu

SEQ ID NO: 30702 - RNA, 32 nt, Homo Sapiens
agaggaaaaugaaaguguuccuggggugcugu

SEQ ID NO: 30703 - RNA, 32 nt, Homo Sapiens
gcaggcacagaggagacacuuacuauaugauc

SEQ ID NO: 30704 - RNA, 32 nt, Homo Sapiens
ccagacucucccacuccagaauguagaagccu

SEQ ID NO: 30705 - RNA, 32 nt, Homo Sapiens
ugccgcagcuucagccagagcccucgcugcuu

SEQ ID NO: 30706 - RNA, 32 nt, Homo Sapiens
cugguccccucuccuucccuccuuccagcugu

SEQ ID NO: 30707 - RNA, 32 nt, Homo Sapiens
uaugcaauauuaauguaagggcucuaaaacaa

SEQ ID NO: 30708 - RNA, 32 nt, Homo Sapiens
aaagcuuucuucaccuuauauauguucuucca

SEQ ID NO: 30709 - RNA, 32 nt, Homo Sapiens
uuaacauaaaagacaauaaaaaaacagaaaug

SEQ ID NO: 30710 - RNA, 32 nt, Homo Sapiens
gugaaugacaaaucaaaagucaggguugcaga

SEQ ID NO: 30711 - RNA, 32 nt, Homo Sapiens
aaacuguaugaaugucugugggcaggaaguga

SEQ ID NO: 30712 - RNA, 29 nt, Homo Sapiens
auuuaauauaauaaauacaagcauguuag

SEQ ID NO: 30713 - RNA, 32 nt, Homo Sapiens
auuuccauauagacuauauacugugcaacucc

SEQ ID NO: 30714 - RNA, 32 nt, Homo Sapiens
auccucagccccacaccagcucuauuucaggg

SEQ ID NO: 30715 - RNA, 32 nt, Homo Sapiens
gaaggcgcucgccucccuagcccgcaaaaaca

SEQ ID NO: 30716 - RNA, 32 nt, Homo Sapiens
ggauucaaggaccugcuguggcucagccuaga

SEQ ID NO: 30717 - RNA, 32 nt, Homo Sapiens
ucccuguccauauuagaugcaucuccuguuuu

SEQ ID NO: 30718 - RNA, 32 nt, Homo Sapiens
guaaguucuuguuuuucuuucuguagcauggc

SEQ ID NO: 30719 - RNA, 32 nt, Homo Sapiens
gcccagguaguggccucuggcugcucacaccc

SEQ ID NO: 30720 - RNA, 32 nt, Homo Sapiens
ccagguucgaucaaggggacuggaugcccaag

SEQ ID NO: 30721 - RNA, 32 nt, Homo Sapiens
auugcaaaaacaaaacaaaacucacucucuug

SEQ ID NO: 30722 - RNA, 32 nt, Homo Sapiens
ccuuggucaaggaaaaauaaagaggccugagc

SEQ ID NO: 30723 - RNA, 32 nt, Homo Sapiens
auaacagucagacuuuugauuaugauauugcu

SEQ ID NO: 30724 - RNA, 32 nt, Homo Sapiens
uuaaucacagucacuguuuguuuaccuugagc

SEQ ID NO: 30725 - RNA, 32 nt, Homo Sapiens
gaacugucugcuugcuuggaaggcccagcugg

SEQ ID NO: 30726 - RNA, 32 nt, Homo Sapiens
uucacucauucuuuacuuccugucucuucuag

SEQ ID NO: 30727 - RNA, 32 nt, Homo Sapiens
gcgggcacaccuggcugcugcaggccaaggcc

SEQ ID NO: 30728 - RNA, 32 nt, Homo Sapiens
ugguagaggauuuuuauauauuuuuuccauuu

SEQ ID NO: 30729 - RNA, 30 nt, Homo Sapiens
cgggaaggcaggcgcgcggguuagaacgcg

SEQ ID NO: 30730 - RNA, 32 nt, Homo Sapiens
acucuugguugcugaggcaaccauggaccugu

SEQ ID NO: 30731 - RNA, 32 nt, Homo Sapiens
ugauugagggcuuaagacuggauccugacagu

SEQ ID NO: 30732 - RNA, 32 nt, Homo Sapiens
cagccucccgaguagcugggauuacuggugcc

SEQ ID NO: 30733 - RNA, 32 nt, Homo Sapiens
gauggagaaaauuuguggccaaugaagucugg

SEQ ID NO: 30734 - RNA, 32 nt, Homo Sapiens
aggauuagguuccauccuuuacguguuuaaaa

SEQ ID NO: 30735 - RNA, 32 nt, Homo Sapiens
gagggccaguguuccuagugugggccaggaac

SEQ ID NO: 30736 - RNA, 32 nt, Homo Sapiens
auuuuuacauauauucccauguaauguguaca

SEQ ID NO: 30737 - RNA, 32 nt, Homo Sapiens
caugaaagaggggugagcuggaggaagucaug

SEQ ID NO: 30738 - RNA, 32 nt, Homo Sapiens
gcccaagucccauggcgagggcagcccgagug

SEQ ID NO: 30739 - RNA, 32 nt, Homo Sapiens
aaagccuuuuucugccccagcucugagacacu

SEQ ID NO: 30740 - RNA, 32 nt, Homo Sapiens
guccccuugucuguccucccccacuucuugaa

SEQ ID NO: 30741 - RNA, 32 nt, Homo Sapiens
agucuuuuaagauaaugaccaaaugaacauuu

SEQ ID NO: 30742 - RNA, 32 nt, Homo Sapiens
ccuccaaaacaugacauaaacaauauuuuuug

SEQ ID NO: 30743 - RNA, 30 nt, Homo Sapiens
gcgaaucgguggcgcgcggcgccugagcgc

SEQ ID NO: 30744 - RNA, 32 nt, Homo Sapiens
ucuggcugccugguggccacugcuacagcugg

SEQ ID NO: 30745 - RNA, 32 nt, Homo Sapiens
aaccccuagacaccccuuaucuccaacuucca

SEQ ID NO: 30746 - RNA, 32 nt, Homo Sapiens
ucaaguggagggcauuuggaaggagcagugaa

SEQ ID NO: 30747 - RNA, 32 nt, Homo Sapiens
uuuucagaggauguuaugucuuugucauucau

SEQ ID NO: 30748 - RNA, 32 nt, Homo Sapiens
ggcgcgggaucccuggcuccgcgagccucagc

SEQ ID NO: 30749 - RNA, 32 nt, Homo Sapiens
cuggauaacugggacagaaaagaacuuauuua

SEQ ID NO: 30750 - RNA, 32 nt, Homo Sapiens
guuaaaaugcuguuuguaaaugagauuggucu

SEQ ID NO: 30751 - RNA, 32 nt, Homo Sapiens
auccccaccuguuugacuacucuucuucaaau

SEQ ID NO: 30752 - RNA, 32 nt, Homo Sapiens
uuucuuguugguagcgccgucaauugcuuauu

SEQ ID NO: 30753 - RNA, 32 nt, Homo Sapiens
aaaugcauaaacgauuauacuacauuaauuuu

SEQ ID NO: 30754 - RNA, 32 nt, Homo Sapiens
cccuguaccccucccugugggauggcagggcu

SEQ ID NO: 30755 - RNA, 32 nt, Homo Sapiens
ucauuccagaauucauuccccagcuccauacu

SEQ ID NO: 30756 - RNA, 32 nt, Homo Sapiens
guggguuuggguuaguggcugcuggcguuuug

SEQ ID NO: 30757 - RNA, 32 nt, Homo Sapiens
gcacugcuucacacaggcccccugccuggggc

SEQ ID NO: 30758 - RNA, 32 nt, Homo Sapiens
ugcacuggcaugaucucggcucacugcaaccu

SEQ ID NO: 30759 - RNA, 32 nt, Homo Sapiens
ucuggugggaacagaugggaaccagcucaauu

SEQ ID NO: 30760 - RNA, 32 nt, Homo Sapiens
cgcgcgggcugguucgggaugagcgauggcau

SEQ ID NO: 30761 - RNA, 32 nt, Homo Sapiens
aggagucccuggagaaacuauuaccugguccc

SEQ ID NO: 30762 - RNA, 32 nt, Homo Sapiens
ucuaagacaggcuggaggaacaguggagacac

SEQ ID NO: 30763 - RNA, 32 nt, Homo Sapiens
gccgggcucagccccgucuccuccucuugcuc

SEQ ID NO: 30764 - RNA, 32 nt, Homo Sapiens
acagggucaggaguucgagaccacccuggaca

SEQ ID NO: 30765 - RNA, 32 nt, Homo Sapiens
caaugacccaccaugaaaagaguuaaaaagau

SEQ ID NO: 30766 - RNA, 32 nt, Homo Sapiens
cggcuucgcugagacgcgcucgcgugggcugc

SEQ ID NO: 30767 - RNA, 32 nt, Homo Sapiens
aggucccgagaccaggugcgugugcuaagcuc

SEQ ID NO: 30768 - RNA, 32 nt, Homo Sapiens
accucaguugugucacaugugagcaagcccag

SEQ ID NO: 30769 - RNA, 32 nt, Homo Sapiens
cccucugcgcgcugcgcccgaagcggcggucg

SEQ ID NO: 30770 - RNA, 32 nt, Homo Sapiens
gauuuggcaucugaggguauaaaggccugggg

SEQ ID NO: 30771 - RNA, 32 nt, Homo Sapiens
aucucugccacuuuucccuuccuaccucuuaa

SEQ ID NO: 30772 - RNA, 32 nt, Homo Sapiens
guucugcucccucagucaugcuagguccucac

SEQ ID NO: 30773 - RNA, 32 nt, Homo Sapiens
uccaagguggagcuguuggccuugcuggaugc

SEQ ID NO: 30774 - RNA, 32 nt, Homo Sapiens
ugcaaacaaaaaucauugaaaauacuaugccg

SEQ ID NO: 30775 - RNA, 32 nt, Homo Sapiens
cauccucagguggucaggcguagaucaccaga

SEQ ID NO: 30776 - RNA, 32 nt, Homo Sapiens
aaaccguuggcgggcgcuggcugagaggcaau

SEQ ID NO: 30777 - RNA, 32 nt, Homo Sapiens
cagagugccccggccccuccccagccugaguc

SEQ ID NO: 30778 - RNA, 25 nt, Homo Sapiens
augcaggcgcccggccgggggccac

SEQ ID NO: 30779 - RNA, 32 nt, Homo Sapiens
uaugaaucuauaggcucgguguguguaacaca

SEQ ID NO: 30780 - RNA, 32 nt, Homo Sapiens
augguagaaugcuuuuuuaugugcuagacuau

SEQ ID NO: 30781 - RNA, 32 nt, Homo Sapiens
uaugcuauaaaugucauuuguauuuuaaaaaa

SEQ ID NO: 30782 - RNA, 32 nt, Homo Sapiens
aacccuuuccccuuuuuccuaccccacagcuc

SEQ ID NO: 30783 - RNA, 32 nt, Homo Sapiens
uaugacuaaaauuuaacaaauaguauuuucuu

SEQ ID NO: 30784 - RNA, 32 nt, Homo Sapiens
ccauuuggccccaggggacgugggcccugcag

SEQ ID NO: 30785 - RNA, 31 nt, Homo Sapiens
uaauuuauaaagaaaagagauuuauuuggcu

SEQ ID NO: 30786 - RNA, 32 nt, Homo Sapiens
aggggagucggaugccagcugcaccccgccug

SEQ ID NO: 30787 - RNA, 32 nt, Homo Sapiens
ggucugccagcuuuguccuuucugagugauuc

SEQ ID NO: 30788 - RNA, 32 nt, Homo Sapiens
uggaacccaagccccuuccuccacagcugccu

SEQ ID NO: 30789 - RNA, 32 nt, Homo Sapiens
ugagucugcugagacucuugacagcaccucca

SEQ ID NO: 30790 - RNA, 32 nt, Homo Sapiens
cacucuuuuccacagcagcuguaucauuucac

SEQ ID NO: 30791 - RNA, 32 nt, Homo Sapiens
gacuggggugggggugggaggggggcugaggg

SEQ ID NO: 30792 - RNA, 32 nt, Homo Sapiens
ggacaucagcaaacaggaucaguuaacuauug

SEQ ID NO: 30793 - RNA, 32 nt, Homo Sapiens
uguaaucuauuuucuucauaaaacaggcacaa

SEQ ID NO: 30794 - RNA, 32 nt, Homo Sapiens
cccuaagcaaguuccuucuccucuuagggccu

SEQ ID NO: 30795 - RNA, 32 nt, Homo Sapiens
guggucuaucuccugcuucacccaggcccugg

SEQ ID NO: 30796 - RNA, 32 nt, Homo Sapiens
auccuucgccccacuccacucacuaaaggcca

SEQ ID NO: 30797 - RNA, 32 nt, Homo Sapiens
uuguguauauauacacacauacauaugccaac

SEQ ID NO: 30798 - RNA, 32 nt, Homo Sapiens
uuuaauuaagccaauaaugaugcaugccuguu

SEQ ID NO: 30799 - RNA, 32 nt, Homo Sapiens
agugacuccugcccacccccagcccuuuacua

SEQ ID NO: 30800 - RNA, 32 nt, Homo Sapiens
auuccucuguccaggaaacggguaaggggacc

SEQ ID NO: 30801 - RNA, 32 nt, Homo Sapiens
cggcaggcgagggcgagggcgugacccugcag

SEQ ID NO: 30802 - RNA, 32 nt, Homo Sapiens
ccucuuuuaauacuucauuuagcugauucaga

SEQ ID NO: 30803 - RNA, 32 nt, Homo Sapiens
ccagccugucacuaaugucucccuuugugucu

SEQ ID NO: 30804 - RNA, 32 nt, Homo Sapiens
ccgaagcugccaggaagaagaacagaacuuug

SEQ ID NO: 30805 - RNA, 32 nt, Homo Sapiens
uauuauuacucuuuggcaucucucuucuccaa

SEQ ID NO: 30806 - RNA, 32 nt, Homo Sapiens
uguccaccuggcggaaccaccggagcccggag

SEQ ID NO: 30807 - RNA, 32 nt, Homo Sapiens
cccggcacgcugauggagcccgggcgcggcgc

SEQ ID NO: 30808 - RNA, 32 nt, Homo Sapiens
auucagugcuuuugaguuacuuguuuuuauua

SEQ ID NO: 30809 - RNA, 29 nt, Homo Sapiens
cacccuucuauccagacugaacggcucuu

SEQ ID NO: 30810 - RNA, 32 nt, Homo Sapiens
ugauuucuaaagcagcagcaauaguguucuuu

SEQ ID NO: 30811 - RNA, 32 nt, Homo Sapiens
ggcagaacacugggcuaaagacacagacccag

SEQ ID NO: 30812 - RNA, 32 nt, Homo Sapiens
ggaggaggcggagaggcagagggaggagccuc

SEQ ID NO: 30813 - RNA, 32 nt, Homo Sapiens
auaaucucaaaggaguuaaauguauucuuggc

SEQ ID NO: 30814 - RNA, 32 nt, Homo Sapiens
uuacugaagaucuagcaauggccuuaauuagc

SEQ ID NO: 30815 - RNA, 32 nt, Homo Sapiens
guggaaagaagcauguagcaaaaaagacaacc

SEQ ID NO: 30816 - RNA, 29 nt, Homo Sapiens
ggugcugugcuucucagaggcaggaucca

SEQ ID NO: 30817 - RNA, 32 nt, Homo Sapiens
aggcugaagggagagccagccagccagggccc

SEQ ID NO: 30818 - RNA, 32 nt, Homo Sapiens
gcaacucuaaucucacuaacuuuaucuguguu

SEQ ID NO: 30819 - RNA, 29 nt, Homo Sapiens
gccaaaucaaaugagugacagguuaacua

SEQ ID NO: 30820 - RNA, 32 nt, Homo Sapiens
uuagcagacaaaagcaguuuuuauaagcucuu

SEQ ID NO: 30821 - RNA, 32 nt, Homo Sapiens
uggcaugugacccuaucuauccuucacugcuc

SEQ ID NO: 30822 - RNA, 32 nt, Homo Sapiens
aaacauuaauugcuaacaauuguuagcaaacu

SEQ ID NO: 30823 - RNA, 31 nt, Homo Sapiens
uccuaccccauccccaccugaagugaggcua

SEQ ID NO: 30824 - RNA, 32 nt, Homo Sapiens
gacgggcuggcccaggacccucuucuuugaga

SEQ ID NO: 30825 - RNA, 32 nt, Homo Sapiens
uugcauaggacuuccuaggagcucaguugauu

SEQ ID NO: 30826 - RNA, 32 nt, Homo Sapiens
ugaaaugcugucuacugaaaggguuucaggag

SEQ ID NO: 30827 - RNA, 32 nt, Homo Sapiens
cggcgagcuccguccaaaagaaaaugggguuu

SEQ ID NO: 30828 - RNA, 32 nt, Homo Sapiens
ucugagcagguacauuucugauucugauugcu

SEQ ID NO: 30829 - RNA, 32 nt, Homo Sapiens
aagaaacuaagggccacagaccaaaugacagg

SEQ ID NO: 30830 - RNA, 32 nt, Homo Sapiens
aagggaagggcuucucucuacugcccuggccc

SEQ ID NO: 30831 - RNA, 32 nt, Homo Sapiens
acuauaaauauguuucauugugauaaaaguuu

SEQ ID NO: 30832 - RNA, 32 nt, Homo Sapiens
agccaccgugccgggccuggacuuuguacuuu

SEQ ID NO: 30833 - RNA, 32 nt, Homo Sapiens
aaauauguucccucuagcuguuagguacuuug

SEQ ID NO: 30834 - RNA, 32 nt, Homo Sapiens
cugcggacgcuuuccugggcgccggcucgcgg

SEQ ID NO: 30835 - RNA, 32 nt, Homo Sapiens
cuguccugcauuccaucccagcuccucagcau

SEQ ID NO: 30836 - RNA, 32 nt, Homo Sapiens
uuucugcagaaguuuucccccuuggucggugg

SEQ ID NO: 30837 - RNA, 32 nt, Homo Sapiens
cauccaaguguuucaugguuuguugggaaggu

SEQ ID NO: 30838 - RNA, 32 nt, Homo Sapiens
gauuggucagcacgugccucggucggcgguac

SEQ ID NO: 30839 - RNA, 32 nt, Homo Sapiens
aaucugugggccgccccucuccccuggccgcu

SEQ ID NO: 30840 - RNA, 32 nt, Homo Sapiens
uggcugccuugcugggcccuucugggacugug

SEQ ID NO: 30841 - RNA, 32 nt, Homo Sapiens
ggauucugaggguggggagggagagagaggga

SEQ ID NO: 30842 - RNA, 32 nt, Homo Sapiens
  misc_feature (25)..(25): n is a, c, g, or u
gggguucugugucugcagaaauuunguuuccu

SEQ ID NO: 30843 - RNA, 32 nt, Homo Sapiens
auguggagaugucaaguuagauauaugaguuc

SEQ ID NO: 30844 - RNA, 31 nt, Homo Sapiens
ccaugggcucaaagaaagucuauuucuugac

SEQ ID NO: 30845 - RNA, 32 nt, Homo Sapiens
ugucccccuuccccggccuucugccagcuccc

SEQ ID NO: 30846 - RNA, 32 nt, Homo Sapiens
aagaaauugcuuaaucacaaauguucuacagu

SEQ ID NO: 30847 - RNA, 31 nt, Homo Sapiens
cuaaaugucauucuccaucucuuuguuuuag

SEQ ID NO: 30848 - RNA, 32 nt, Homo Sapiens
ugcagcaaauccauguccagccaggcaaccag

SEQ ID NO: 30849 - RNA, 32 nt, Homo Sapiens
cacagagcaaagggcugagagaagggagcugc

SEQ ID NO: 30850 - RNA, 32 nt, Homo Sapiens
ugcggggcuuggcccuggcccuggcccagauc

SEQ ID NO: 30851 - RNA, 32 nt, Homo Sapiens
uucuaagaauauauuucuugcucaguuguuuc

SEQ ID NO: 30852 - RNA, 32 nt, Homo Sapiens
gaaauuuaucuuuaguuuuucuuauucuguga

SEQ ID NO: 30853 - RNA, 32 nt, Homo Sapiens
auauuagugaaauuauuuuuuaaaguggggaa

SEQ ID NO: 30854 - RNA, 32 nt, Homo Sapiens
uccuagaugcuaaagagacuuggcaccagcuu

SEQ ID NO: 30855 - RNA, 32 nt, Homo Sapiens
uggaggccugaguugggcucgcggcggggguc

SEQ ID NO: 30856 - RNA, 32 nt, Homo Sapiens
gagcugguccauuccccauucauggcacagag

SEQ ID NO: 30857 - RNA, 32 nt, Homo Sapiens
gucucucgccccagcccuuccagcuggguccu

SEQ ID NO: 30858 - RNA, 31 nt, Homo Sapiens
cagucgcugcaguucgcuccacucugguggc

SEQ ID NO: 30859 - RNA, 31 nt, Homo Sapiens
aaaagcagcagcugccugcucuccagccucu

SEQ ID NO: 30860 - RNA, 32 nt, Homo Sapiens
ccacuuaaaggcauucuuaaaccacaaacaau

SEQ ID NO: 30861 - RNA, 32 nt, Homo Sapiens
cuggaacguuucacugcaaacacaccuuggag

SEQ ID NO: 30862 - RNA, 32 nt, Homo Sapiens
gccuugggauuaauaaacaugcacugagaagc

SEQ ID NO: 30863 - RNA, 32 nt, Homo Sapiens
gggcugaaagacuggacagaacaugccaauuc

SEQ ID NO: 30864 - RNA, 32 nt, Homo Sapiens
agggcccugcuugccuggccccagaagcuguu

SEQ ID NO: 30865 - RNA, 32 nt, Homo Sapiens
uuggugccucugucagcguccaggucacugcc

SEQ ID NO: 30866 - RNA, 32 nt, Homo Sapiens
auucacaccaaaaugucuguacuuagagcuaa

SEQ ID NO: 30867 - RNA, 32 nt, Homo Sapiens
aaaaucacccagguugaaaaccacugcucugu

SEQ ID NO: 30868 - RNA, 32 nt, Homo Sapiens
gggcagcucaucgacuccauggccaacuccuu

SEQ ID NO: 30869 - RNA, 32 nt, Homo Sapiens
aacgcucucccuccuagacaagauggagaagu

SEQ ID NO: 30870 - RNA, 32 nt, Homo Sapiens
uuacacucuuugccacugauuagcaguauuua

SEQ ID NO: 30871 - RNA, 32 nt, Homo Sapiens
ccacaaacauuuagguuuuuuauaucuuggca

SEQ ID NO: 30872 - RNA, 32 nt, Homo Sapiens
aguuuguuauuuauccuagugggccauuaaaa

SEQ ID NO: 30873 - RNA, 32 nt, Homo Sapiens
uuauuuacuguuuagguacugaagauuaucac

SEQ ID NO: 30874 - RNA, 32 nt, Homo Sapiens
ucucugcugguggccacaugggugcugguggc

SEQ ID NO: 30875 - RNA, 32 nt, Homo Sapiens
aagcaggggcccuccuggcagcuccucugagu

SEQ ID NO: 30876 - RNA, 32 nt, Homo Sapiens
ccacaagcuacauauccuccaauggauugugg

SEQ ID NO: 30877 - RNA, 32 nt, Homo Sapiens
aaccucgccuagcuuuuccucccuuugugaau

SEQ ID NO: 30878 - RNA, 32 nt, Homo Sapiens
aaccacgucccggcccccgaccgcgagcagca

SEQ ID NO: 30879 - RNA, 32 nt, Homo Sapiens
guuuucauguuucauucaugucgcauguauga

SEQ ID NO: 30880 - RNA, 32 nt, Homo Sapiens
gccagccuucccuccacccaggccagcagccg

SEQ ID NO: 30881 - RNA, 32 nt, Homo Sapiens
ucccaccuccaaguccuccucacugcagcccc

SEQ ID NO: 30882 - RNA, 32 nt, Homo Sapiens
guacuggccuguauguacaugggguccuucaa

SEQ ID NO: 30883 - RNA, 32 nt, Homo Sapiens
acuguuaaauaccaccaguccagcuuuggcaa

SEQ ID NO: 30884 - RNA, 32 nt, Homo Sapiens
gaccaggccagccccagugacuccaggcucca

SEQ ID NO: 30885 - RNA, 32 nt, Homo Sapiens
uuaacuuagcuaaaaauaaguauauuagauau

SEQ ID NO: 30886 - RNA, 32 nt, Homo Sapiens
agagaugacaaugaagauuagaugaaauugga

SEQ ID NO: 30887 - RNA, 32 nt, Homo Sapiens
cggcccccgcccagccccaggucuccccaggc

SEQ ID NO: 30888 - RNA, 32 nt, Homo Sapiens
uccuccacuauaagucuaauguucugacucuc

SEQ ID NO: 30889 - RNA, 32 nt, Homo Sapiens
gggugaccaucccugcccugcuggcugccagg

SEQ ID NO: 30890 - RNA, 32 nt, Homo Sapiens
cgagcacuucgggaagcugaggcgggcggauc

SEQ ID NO: 30891 - RNA, 32 nt, Homo Sapiens
aaaaguccaaaauagauuugagacuguaaaaa

SEQ ID NO: 30892 - RNA, 32 nt, Homo Sapiens
caguagaaugaaagagggcaugucuaauaaca

SEQ ID NO: 30893 - RNA, 32 nt, Homo Sapiens
uccugugcaggcucaugcugcaggcggccgag

SEQ ID NO: 30894 - RNA, 32 nt, Homo Sapiens
gggugcaggacacuggucgagagccaaagguc

SEQ ID NO: 30895 - RNA, 32 nt, Homo Sapiens
ggcugggcgcgguggcuuacaccuguaauucc

SEQ ID NO: 30896 - RNA, 32 nt, Homo Sapiens
cagcgugggggguugguggcacuauguggcgc

SEQ ID NO: 30897 - RNA, 32 nt, Homo Sapiens
ucucagcauaauguagugggaagucaggaggg

SEQ ID NO: 30898 - RNA, 32 nt, Homo Sapiens
ugcugucuaaaagaagaagagauggacuucuu

SEQ ID NO: 30899 - RNA, 32 nt, Homo Sapiens
aggggucauccggcccgaggcugcccuggcac

SEQ ID NO: 30900 - RNA, 32 nt, Homo Sapiens
cacugcacuccagccugggugacagugagucu

SEQ ID NO: 30901 - RNA, 32 nt, Homo Sapiens
aguuuccuuuugcugugacauacucauccauu

SEQ ID NO: 30902 - RNA, 32 nt, Homo Sapiens
gcuuccggaggagcgcagaucgcaggucccuu

SEQ ID NO: 30903 - RNA, 32 nt, Homo Sapiens
gcguagcccucccccaucgcagccagaccggc

SEQ ID NO: 30904 - RNA, 32 nt, Homo Sapiens
ccuuguccauucucucacccuugcugugcaug

SEQ ID NO: 30905 - RNA, 32 nt, Homo Sapiens
gguuuggggaggugggggcgggcccgggcggg

SEQ ID NO: 30906 - RNA, 27 nt, Homo Sapiens
gagugaggacucuucagcuccccucug

SEQ ID NO: 30907 - RNA, 32 nt, Homo Sapiens
uaacaaaauauguauucaguacugauugcaua

SEQ ID NO: 30908 - RNA, 32 nt, Homo Sapiens
aauuaugguucacugcagacuccaccucucca

SEQ ID NO: 30909 - RNA, 32 nt, Homo Sapiens
uuuugugucauugacaaaaggaucuuuuaagu

SEQ ID NO: 30910 - RNA, 32 nt, Homo Sapiens
gccugcuccagcccgccucccggagccagccu

SEQ ID NO: 30911 - RNA, 32 nt, Homo Sapiens
uuauauucuggucuucaaaggacacacagaac

SEQ ID NO: 30912 - RNA, 32 nt, Homo Sapiens
uucuucuucuucuuuugugguuucacauagca

SEQ ID NO: 30913 - RNA, 32 nt, Homo Sapiens
agguagagauuaauacauaacacgguauaacc

SEQ ID NO: 30914 - RNA, 32 nt, Homo Sapiens
ugucuuuuuguacuuuuuguuccagagcugcu

SEQ ID NO: 30915 - RNA, 28 nt, Homo Sapiens
uggagggggcggccguuuagucggcuga

SEQ ID NO: 30916 - RNA, 32 nt, Homo Sapiens
ccucugcuuugucaugccauuaagcucacaau

SEQ ID NO: 30917 - RNA, 32 nt, Homo Sapiens
acucgagggucuccgcagccacuuccuccuuu

SEQ ID NO: 30918 - RNA, 32 nt, Homo Sapiens
ucagcucugccagcucagaggaccagcuauau

SEQ ID NO: 30919 - RNA, 32 nt, Homo Sapiens
gggaggagccuguggcagcugcugccccagcc

SEQ ID NO: 30920 - RNA, 32 nt, Homo Sapiens
ccuugagccucugagggucaguaagugaagua

SEQ ID NO: 30921 - RNA, 32 nt, Homo Sapiens
cagcccggcgucgccccacgccgcgcucgcuc

SEQ ID NO: 30922 - RNA, 32 nt, Homo Sapiens
accuacacagucagcuugaaagggcagaaaua

SEQ ID NO: 30923 - RNA, 32 nt, Homo Sapiens
accggccccauggcagcccccggcgccccagc

SEQ ID NO: 30924 - RNA, 32 nt, Homo Sapiens
aucguccaccgcaaaugcuucuacacacucca

SEQ ID NO: 30925 - RNA, 32 nt, Homo Sapiens
ccuuccgcagccuucacuccagcccucugcuc

SEQ ID NO: 30926 - RNA, 32 nt, Homo Sapiens
gcacucucaauccuacaucaggugccaccacc

SEQ ID NO: 30927 - RNA, 32 nt, Homo Sapiens
gacugguguuuguuagacagccacaguccugu

SEQ ID NO: 30928 - RNA, 32 nt, Homo Sapiens
cucugaaagccuuuuuacuuuaaccaaaucua

SEQ ID NO: 30929 - RNA, 32 nt, Homo Sapiens
cccuuccugcgguccgaugagaugucccuguc

SEQ ID NO: 30930 - RNA, 32 nt, Homo Sapiens
cuguuuagcaguguuacacuguuugaucugcg

SEQ ID NO: 30931 - RNA, 32 nt, Homo Sapiens
gggguagguaacuugucuuuuuacugcauaac

SEQ ID NO: 30932 - RNA, 32 nt, Homo Sapiens
caaacagggucuggaguggaccucaagcaaaa

SEQ ID NO: 30933 - RNA, 32 nt, Homo Sapiens
aagaaaaaggcacaaugccuagugggccuauu

SEQ ID NO: 30934 - RNA, 32 nt, Homo Sapiens
cccauccccauccccaggauucccaccuccua

SEQ ID NO: 30935 - RNA, 32 nt, Homo Sapiens
ugcuucccaaaaaauuacaacaucaaaaccag

SEQ ID NO: 30936 - RNA, 32 nt, Homo Sapiens
uauuugauuuuugucucaaugaaaauaaaacu

SEQ ID NO: 30937 - RNA, 28 nt, Homo Sapiens
ccagcagaagauuaagagcugagggccu

SEQ ID NO: 30938 - RNA, 32 nt, Homo Sapiens
guggagagggagaggaaaggguucuguccaag

SEQ ID NO: 30939 - RNA, 32 nt, Homo Sapiens
agacccucauuucugcaggcaagaaaggaaag

SEQ ID NO: 30940 - RNA, 32 nt, Homo Sapiens
cacccccagagccccagcgcguccgcgggguc

SEQ ID NO: 30941 - RNA, 32 nt, Homo Sapiens
uccggcgucccagccgccuaccucgcugggac

SEQ ID NO: 30942 - RNA, 32 nt, Homo Sapiens
acacuggguaagauucauggaacuuagaaaaa

SEQ ID NO: 30943 - RNA, 32 nt, Homo Sapiens
ccagcccgcccgggagcugcgagccgcgagcu

SEQ ID NO: 30944 - RNA, 32 nt, Homo Sapiens
ggggugacuugcuugggaccgugcccacguga

SEQ ID NO: 30945 - RNA, 32 nt, Homo Sapiens
aggccagagauuagagauuucacugauauuuu

SEQ ID NO: 30946 - RNA, 32 nt, Homo Sapiens
cuggaccccucuaucaggaagaccuaccccag

SEQ ID NO: 30947 - RNA, 32 nt, Homo Sapiens
uaaguuuccugaggccuccccagccaugcuga

SEQ ID NO: 30948 - RNA, 32 nt, Homo Sapiens
cacaugcuccgucugacaagguggucaacaac

SEQ ID NO: 30949 - RNA, 32 nt, Homo Sapiens
caaugcuggaucauaaacuuggagcgcgcucu

SEQ ID NO: 30950 - RNA, 32 nt, Homo Sapiens
aagaggggggagaggagcuuguaccaagggac

SEQ ID NO: 30951 - RNA, 32 nt, Homo Sapiens
aagucaggagagagggugaagcggagcagccc

SEQ ID NO: 30952 - RNA, 32 nt, Homo Sapiens
guguccaagacacaugcugagguuuugaauaa

SEQ ID NO: 30953 - RNA, 32 nt, Homo Sapiens
aucuccacaccuuuugaggaggacagaaggga

SEQ ID NO: 30954 - RNA, 32 nt, Homo Sapiens
agucuacugacuuuucccauucagcugugagu

SEQ ID NO: 30955 - RNA, 32 nt, Homo Sapiens
ggccacagaguuggggggccauggccgagacu

SEQ ID NO: 30956 - RNA, 32 nt, Homo Sapiens
cagcaagaaaucagcugcccaugaaccgagaa

SEQ ID NO: 30957 - RNA, 32 nt, Homo Sapiens
agcggccgggcuagugggagggggcggcggcc

SEQ ID NO: 30958 - RNA, 32 nt, Homo Sapiens
gcggagaacacaaaaacuuggauaugaauguu

SEQ ID NO: 30959 - RNA, 32 nt, Homo Sapiens
ugcccccgccccacugacuuccuccaauaaag

SEQ ID NO: 30960 - RNA, 32 nt, Homo Sapiens
aggagcagaacaaaaauaaaaaauaauuagca

SEQ ID NO: 30961 - RNA, 32 nt, Homo Sapiens
auggcauccgcauuugguaucuuuuacacuuc

SEQ ID NO: 30962 - RNA, 32 nt, Homo Sapiens
ucucagaggcccgguggccagcuccucuccuc

SEQ ID NO: 30963 - RNA, 32 nt, Homo Sapiens
guguuacaaauauauuuauuuuguauagcuuc

SEQ ID NO: 30964 - RNA, 32 nt, Homo Sapiens
gagcguuucugacagcucccagcugggagaaa

SEQ ID NO: 30965 - RNA, 32 nt, Homo Sapiens
gcccuucccccuccccaagacuguggcagcag

SEQ ID NO: 30966 - RNA, 32 nt, Homo Sapiens
ucaugcccacuuuagcagauaguacuguuagc

SEQ ID NO: 30967 - RNA, 32 nt, Homo Sapiens
cguuguccggcgggcugggcugggaccccucu

SEQ ID NO: 30968 - RNA, 32 nt, Homo Sapiens
caaggacauuauaucacuuacuguauaauaaa

SEQ ID NO: 30969 - RNA, 32 nt, Homo Sapiens
acagcagaugagaaaagacuuggguuggagug

SEQ ID NO: 30970 - RNA, 32 nt, Homo Sapiens
auuugaaaaaaauuauuauugaaaaaaauuuc

SEQ ID NO: 30971 - RNA, 32 nt, Homo Sapiens
auaaaguuguuuuuauaaggcuuauuuguggc

SEQ ID NO: 30972 - RNA, 32 nt, Homo Sapiens
acagguacuacccuuaaaucauaaauaauauu

SEQ ID NO: 30973 - RNA, 32 nt, Homo Sapiens
ucgcugucaucucagcuggaucuccauucucu

SEQ ID NO: 30974 - RNA, 32 nt, Homo Sapiens
uaaaugaacgaguuacuugauacaucgugaac

SEQ ID NO: 30975 - RNA, 32 nt, Homo Sapiens
uaaaaguaaaauuuauauuuuccaagaguuua

SEQ ID NO: 30976 - RNA, 32 nt, Homo Sapiens
gucauccuaacuuuuccccuacucuugccaua

SEQ ID NO: 30977 - RNA, 32 nt, Homo Sapiens
agcugcaccuucugccucaacaucuuccgagu

SEQ ID NO: 30978 - RNA, 32 nt, Homo Sapiens
auuugaacacuggguugggucagcauaggaua

SEQ ID NO: 30979 - RNA, 32 nt, Homo Sapiens
uggagugcuguaauccaaaguuuuuaauugug

SEQ ID NO: 30980 - RNA, 32 nt, Homo Sapiens
aauagcugcauaagacauuuugaaauaaugua

SEQ ID NO: 30981 - RNA, 32 nt, Homo Sapiens
ucagauucaguggucuguuucuggagaaguuc

SEQ ID NO: 30982 - RNA, 32 nt, Homo Sapiens
acccccucugcccucccaacuuggguuguacu

SEQ ID NO: 30983 - RNA, 32 nt, Homo Sapiens
aacaccuuucccuucuaguuuuuagagacuuc

SEQ ID NO: 30984 - RNA, 28 nt, Homo Sapiens
auuugaaauaaauucuuuugacacugcc

SEQ ID NO: 30985 - RNA, 32 nt, Homo Sapiens
guugcccuccuucaccuaauagcuucuggacu

SEQ ID NO: 30986 - RNA, 32 nt, Homo Sapiens
uuuucuuuucuuuuuugagauagugucuugcu

SEQ ID NO: 30987 - RNA, 32 nt, Homo Sapiens
aucuguaacgcagcuucuguaagcaugugugg

SEQ ID NO: 30988 - RNA, 32 nt, Homo Sapiens
gccaaaugaggaaaucaaauuaaugaguugac

SEQ ID NO: 30989 - RNA, 32 nt, Homo Sapiens
ggugaccccagccucuguccacuuccuaaccc

SEQ ID NO: 30990 - RNA, 32 nt, Homo Sapiens
gauuagaagaggaaacagaaacagguaacaaa

SEQ ID NO: 30991 - RNA, 32 nt, Homo Sapiens
cugcucauugacuuauaaauaguuuucauacc

SEQ ID NO: 30992 - RNA, 29 nt, Homo Sapiens
auguacugaucuuuccuguugaagaaauc

SEQ ID NO: 30993 - RNA, 32 nt, Homo Sapiens
ggaauccccguccuugggcccccgcaaggucc

SEQ ID NO: 30994 - RNA, 32 nt, Homo Sapiens
cgccccugccaccucccugacccgucuaauau

SEQ ID NO: 30995 - RNA, 32 nt, Homo Sapiens
cccgaggcugcucggcccggccccaccuccgc

SEQ ID NO: 30996 - RNA, 30 nt, Homo Sapiens
uggccaugucauugucccacuuauaccggg

SEQ ID NO: 30997 - RNA, 32 nt, Homo Sapiens
aaacuucagugaggaagaaugaacaaauugaa

SEQ ID NO: 30998 - RNA, 32 nt, Homo Sapiens
gggcccccgggcgggcgacgggucguguggug

SEQ ID NO: 30999 - RNA, 32 nt, Homo Sapiens
gaugucaagacccaucggaagugucgcuggcc

SEQ ID NO: 31000 - RNA, 32 nt, Homo Sapiens
cccuaacccccuccucccaaaaagcagccagg

SEQ ID NO: 31001 - RNA, 32 nt, Homo Sapiens
uacccaugaggcaauacuuauccaccagguaa

SEQ ID NO: 31002 - RNA, 32 nt, Homo Sapiens
gacaggaagaagcgcacaggggugugcacaaa

SEQ ID NO: 31003 - RNA, 32 nt, Homo Sapiens
auuccagagugcugaggccagggcugaugguc

SEQ ID NO: 31004 - RNA, 32 nt, Homo Sapiens
aggugcgggcagcggacccuggcgggggcugg

SEQ ID NO: 31005 - RNA, 32 nt, Homo Sapiens
gggccagcgccaccucccgggacagaagugcg

SEQ ID NO: 31006 - RNA, 32 nt, Homo Sapiens
augaguuggaaauuaugcacuuugaaaaacau

SEQ ID NO: 31007 - RNA, 32 nt, Homo Sapiens
ugagagccccagcugacauggaaauacaguug

SEQ ID NO: 31008 - RNA, 32 nt, Homo Sapiens
aacauauaauuucuuaauaaauacuguuucuu

SEQ ID NO: 31009 - RNA, 32 nt, Homo Sapiens
gugugcagcugaguucggcagcucacacagca

SEQ ID NO: 31010 - RNA, 32 nt, Homo Sapiens
uugccugucaccuaguugauguuccauaaaau

SEQ ID NO: 31011 - RNA, 32 nt, Homo Sapiens
gcuuggauguggugcugggcugccggaguuuc

SEQ ID NO: 31012 - RNA, 32 nt, Homo Sapiens
gugggacccgcacuggcagcgggaggcagagg

SEQ ID NO: 31013 - RNA, 32 nt, Homo Sapiens
aaaugcuguuuuuauagaugugauaugaggca

SEQ ID NO: 31014 - RNA, 29 nt, Homo Sapiens
guucuagaaaauaaacuugugcacuuuga

SEQ ID NO: 31015 - RNA, 28 nt, Homo Sapiens
uacuggaaagauuacauacauuugagaa

SEQ ID NO: 31016 - RNA, 32 nt, Homo Sapiens
uuguggguacuuuaagguuuggagcacuuaca

SEQ ID NO: 31017 - RNA, 31 nt, Homo Sapiens
cugcugugaaacauuucaagauuuauugauu

SEQ ID NO: 31018 - RNA, 32 nt, Homo Sapiens
cuguccccuccccucucgcucccuuuuaaaau

SEQ ID NO: 31019 - RNA, 32 nt, Homo Sapiens
ccaugaaauauaauucuuaauaucauacagga

SEQ ID NO: 31020 - RNA, 32 nt, Homo Sapiens
uaaacaacuauuuauguacaaaaacucauaca

SEQ ID NO: 31021 - RNA, 32 nt, Homo Sapiens
uaguggcucucuuuuuaacuuucucugugaua

SEQ ID NO: 31022 - RNA, 32 nt, Homo Sapiens
cugaguuccagcggggguguugagaaaaagcu

SEQ ID NO: 31023 - RNA, 32 nt, Homo Sapiens
ucccuugcugaugccaggaucucggcgcauag

SEQ ID NO: 31024 - RNA, 32 nt, Homo Sapiens
ugucuaccugauagcauguaacaagauugaac

SEQ ID NO: 31025 - RNA, 32 nt, Homo Sapiens
ucuucugacuccaagcucugggguuuugccau

SEQ ID NO: 31026 - RNA, 32 nt, Homo Sapiens
caaaugggcuggaggacacaccgaccccaccc

SEQ ID NO: 31027 - RNA, 32 nt, Homo Sapiens
ugacccguugccuuucucugguacuggugucu

SEQ ID NO: 31028 - RNA, 32 nt, Homo Sapiens
uuggacauuuuucuguaggcaacagagcaggc

SEQ ID NO: 31029 - RNA, 32 nt, Homo Sapiens
aaauucuaaggagagcaugagagaaggcuggc

SEQ ID NO: 31030 - RNA, 32 nt, Homo Sapiens
ugucucagucguuggaguucucaaccaaaaaa

SEQ ID NO: 31031 - RNA, 32 nt, Homo Sapiens
uggcccccgccagcuugucccagccacucuag

SEQ ID NO: 31032 - RNA, 32 nt, Homo Sapiens
acggauucaacuaugagaagagaaguggcagc

SEQ ID NO: 31033 - RNA, 32 nt, Homo Sapiens
cauucccgugcagcucagcucgcgcagguuuu

SEQ ID NO: 31034 - RNA, 32 nt, Homo Sapiens
accaucguguucauacuggagagaaaccucau

SEQ ID NO: 31035 - RNA, 32 nt, Homo Sapiens
gcccccgaggcccuacugcugccccugugccc

SEQ ID NO: 31036 - RNA, 32 nt, Homo Sapiens
ggaggcacagagcucgccagcgucccuggagu

SEQ ID NO: 31037 - RNA, 32 nt, Homo Sapiens
cgagucuguccagcugcagggagggcgcugcc

SEQ ID NO: 31038 - RNA, 32 nt, Homo Sapiens
ugcugaggcagcuggaggagugggaguagcuc

SEQ ID NO: 31039 - RNA, 32 nt, Homo Sapiens
gcugcguuccucuggaggaggagaggcgcucu

SEQ ID NO: 31040 - RNA, 32 nt, Homo Sapiens
agcuacaugcuuaguggcaacuucugccuuuu

SEQ ID NO: 31041 - RNA, 32 nt, Homo Sapiens
gggugggggcaggcucucggcccccaaugccu

SEQ ID NO: 31042 - RNA, 32 nt, Homo Sapiens
gggccuggggacccaaacccccugcagcccag

SEQ ID NO: 31043 - RNA, 32 nt, Homo Sapiens
gcauagggcucugcccucccccugucagcaug

SEQ ID NO: 31044 - RNA, 32 nt, Homo Sapiens
acagguaugucagaggaccgugucucaaagaa

SEQ ID NO: 31045 - RNA, 32 nt, Homo Sapiens
cucugggcgggugccgaggagggucaucccug

SEQ ID NO: 31046 - RNA, 32 nt, Homo Sapiens
aauguauuuaaaacugaauucuguaaauaguu

SEQ ID NO: 31047 - RNA, 32 nt, Homo Sapiens
auuuugaauuuagucuacuuugaaaguauaug

SEQ ID NO: 31048 - RNA, 32 nt, Homo Sapiens
acuuuuuguaauaaguuuaauauccuaaaagg

SEQ ID NO: 31049 - RNA, 32 nt, Homo Sapiens
ggagcggggcugacuggaaacaacacgaauca

SEQ ID NO: 31050 - RNA, 32 nt, Homo Sapiens
accaguuaaaccagcuacucaaggcugcucac

SEQ ID NO: 31051 - RNA, 32 nt, Homo Sapiens
gaguccuaggacuuaaaauuagucuuuuguaa

SEQ ID NO: 31052 - RNA, 32 nt, Homo Sapiens
uggugguguaugccuguagucccagccacuca

SEQ ID NO: 31053 - RNA, 32 nt, Homo Sapiens
cucuucaaagugcacaaugcaagcugucaaug

SEQ ID NO: 31054 - RNA, 31 nt, Homo Sapiens
ugguagagggcggcaugccgaagggucuguc

SEQ ID NO: 31055 - RNA, 32 nt, Homo Sapiens
auccugcagauauauauuuauauuuauacaua

SEQ ID NO: 31056 - RNA, 32 nt, Homo Sapiens
auuuggugcuaaggagggauucuuuuaccauu

SEQ ID NO: 31057 - RNA, 32 nt, Homo Sapiens
ggggccgccggggccgccauggagcccgacuc

SEQ ID NO: 31058 - RNA, 32 nt, Homo Sapiens
cccuaggacaaaggggcaaauggugggcaugg

SEQ ID NO: 31059 - RNA, 32 nt, Homo Sapiens
uauuucuaauuguucaaggauuuuaaaauucu

SEQ ID NO: 31060 - RNA, 32 nt, Homo Sapiens
aaaaaaucaccacuuguggcugucccagagug

SEQ ID NO: 31061 - RNA, 32 nt, Homo Sapiens
gagauuagaggagaugggcaaguucuagugaa

SEQ ID NO: 31062 - RNA, 32 nt, Homo Sapiens
ucaccuaaacauuuacucuugacaccaacugu

SEQ ID NO: 31063 - RNA, 32 nt, Homo Sapiens
ccucuccucacuauggccccagugccuugagg

SEQ ID NO: 31064 - RNA, 32 nt, Homo Sapiens
agauuuuguaauaucauucuaaauagauuaag

SEQ ID NO: 31065 - RNA, 32 nt, Homo Sapiens
aggcgccaguacccggcccgguccgcauuucg

SEQ ID NO: 31066 - RNA, 32 nt, Homo Sapiens
ccauugcuagcuuuucuguguuggugucuaau

SEQ ID NO: 31067 - RNA, 32 nt, Homo Sapiens
cucagaaauugaaagcacuaugaauuugucca

SEQ ID NO: 31068 - RNA, 32 nt, Homo Sapiens
ugcauuugggacuccucaucauauacuuggua

SEQ ID NO: 31069 - RNA, 32 nt, Homo Sapiens
caccugcaacgccagcagcuucuacauggucu

SEQ ID NO: 31070 - RNA, 32 nt, Homo Sapiens
caucuaugaaaagccaauaggcugagacaucc

SEQ ID NO: 31071 - RNA, 32 nt, Homo Sapiens
uuuugagcacuuuuauucucuuuuucuuaauc

SEQ ID NO: 31072 - RNA, 32 nt, Homo Sapiens
gauuugacugguuuugcagaagauuacaguua

SEQ ID NO: 31073 - RNA, 32 nt, Homo Sapiens
guccaguuucagggcugaaaugccuggcgaac

SEQ ID NO: 31074 - RNA, 32 nt, Homo Sapiens
gcaguuggaagacccuggaggaugccugacaa

SEQ ID NO: 31075 - RNA, 32 nt, Homo Sapiens
gaggcggggccgggccggcgcagggagaguca

SEQ ID NO: 31076 - RNA, 32 nt, Homo Sapiens
uggccccucuggagugcucacuaacaagggug

SEQ ID NO: 31077 - RNA, 32 nt, Homo Sapiens
aaacacuaaaaauuauauuuuugcaaauuuuu

SEQ ID NO: 31078 - RNA, 32 nt, Homo Sapiens
ucagcucacagcaaccacucucuccuggguuc

SEQ ID NO: 31079 - RNA, 32 nt, Homo Sapiens
acuacagcugaacuuuucaucaucucauucac

SEQ ID NO: 31080 - RNA, 32 nt, Homo Sapiens
cagccucccaagcagcuaagacuacagacaug

SEQ ID NO: 31081 - RNA, 32 nt, Homo Sapiens
agcggggucgaagcggcuggguugggcgguaa

SEQ ID NO: 31082 - RNA, 32 nt, Homo Sapiens
aucaccuuaaaauuauuucacguacugaagac

SEQ ID NO: 31083 - RNA, 32 nt, Homo Sapiens
uuaagcuucuauuuacauaaacaaaagugcuu

SEQ ID NO: 31084 - RNA, 32 nt, Homo Sapiens
acgggaccgguggucacugucuucccccgggg

SEQ ID NO: 31085 - RNA, 32 nt, Homo Sapiens
ucaacugaaaauacuuaugucuguacauuuuc

SEQ ID NO: 31086 - RNA, 32 nt, Homo Sapiens
guucucaaccugugccccaguuuuccagagca

SEQ ID NO: 31087 - RNA, 32 nt, Homo Sapiens
ggccggagccgcggcggcggagcuguggaucc

SEQ ID NO: 31088 - RNA, 32 nt, Homo Sapiens
ccggcacacaaugaggagacugagagaaguaa

SEQ ID NO: 31089 - RNA, 32 nt, Homo Sapiens
ugauucucagguauccuuaggaccucaagaaa

SEQ ID NO: 31090 - RNA, 32 nt, Homo Sapiens
cugaaauguuuuauuuaccauaguuuuauauc

SEQ ID NO: 31091 - RNA, 32 nt, Homo Sapiens
aggaagggcggcguggaacgcugcugaugggu

SEQ ID NO: 31092 - RNA, 32 nt, Homo Sapiens
ugucagaaaaugaauggcauggccgggcgcgg

SEQ ID NO: 31093 - RNA, 32 nt, Homo Sapiens
ggucuguagggccaggguguucugcuuggcug

SEQ ID NO: 31094 - RNA, 32 nt, Homo Sapiens
cacgccgccugguggcaggccgggccauggug

SEQ ID NO: 31095 - RNA, 32 nt, Homo Sapiens
cacugcugcagcaucaagugugcuaugagagc

SEQ ID NO: 31096 - RNA, 32 nt, Homo Sapiens
auuuuguaaaaaugaaaaugugacucacauaa

SEQ ID NO: 31097 - RNA, 32 nt, Homo Sapiens
agcgaggaugagugauccguggaggcaguaac

SEQ ID NO: 31098 - RNA, 32 nt, Homo Sapiens
gcggcgcggagcccagguggcuccgcugccgg

SEQ ID NO: 31099 - RNA, 32 nt, Homo Sapiens
aagucuuggguauuuuaaccuguauacucuug

SEQ ID NO: 31100 - RNA, 32 nt, Homo Sapiens
uacaaaagauaaaagaugaaucuucaguggua

SEQ ID NO: 31101 - RNA, 32 nt, Homo Sapiens
cccauccagaaagcagcagcugccuuguuagu

SEQ ID NO: 31102 - RNA, 32 nt, Homo Sapiens
cagggccguccuguuccuccccgggacuccag

SEQ ID NO: 31103 - RNA, 30 nt, Homo Sapiens
ugcaguaacggggggaccuauacugaccuc

SEQ ID NO: 31104 - RNA, 32 nt, Homo Sapiens
accuacuuguauauuucuuuacucauuucaau

SEQ ID NO: 31105 - RNA, 32 nt, Homo Sapiens
aucaagguucauuugagaugcagaggaaugag

SEQ ID NO: 31106 - RNA, 32 nt, Homo Sapiens
uucagacccagcugucagucagucccugaaag

SEQ ID NO: 31107 - RNA, 32 nt, Homo Sapiens
ggugccggggucagcucuggauucauauccca

SEQ ID NO: 31108 - RNA, 31 nt, Homo Sapiens
gcgucgcggcacugugccgccacccgcggcc

SEQ ID NO: 31109 - RNA, 32 nt, Homo Sapiens
gcuccaagcacgugucccgugccuccccacuc

SEQ ID NO: 31110 - RNA, 32 nt, Homo Sapiens
aguacaucuuccggcucuaugaaucauuaugu

SEQ ID NO: 31111 - RNA, 32 nt, Homo Sapiens
agcuauaacaucaaaucagggaaaaaugagga

SEQ ID NO: 31112 - RNA, 32 nt, Homo Sapiens
auugaucugaaucuaggauucuauucuaguuu

SEQ ID NO: 31113 - RNA, 32 nt, Homo Sapiens
guaacuuguuuaucucagucuguacaaaaaca

SEQ ID NO: 31114 - RNA, 32 nt, Homo Sapiens
caaccaaacuguuugccuaaucugaaaucuga

SEQ ID NO: 31115 - RNA, 32 nt, Homo Sapiens
ccgcggccggcgccuggcugugagguggauuc

SEQ ID NO: 31116 - RNA, 32 nt, Homo Sapiens
guuuuucuguuggagaucuauagguccuuuuc

SEQ ID NO: 31117 - RNA, 32 nt, Homo Sapiens
agaaauggugaaaauaaaauaaagcagguuuu

SEQ ID NO: 31118 - RNA, 32 nt, Homo Sapiens
aacagacuauacaguaaauugguaaugguaua

SEQ ID NO: 31119 - RNA, 32 nt, Homo Sapiens
cggcuccgggaggccucggugauucagccaca

SEQ ID NO: 31120 - RNA, 32 nt, Homo Sapiens
acgguaacuguugugagguaaaaaugaguuaa

SEQ ID NO: 31121 - RNA, 32 nt, Homo Sapiens
accuggugccucaggaccuccugggagccaag

SEQ ID NO: 31122 - RNA, 32 nt, Homo Sapiens
caaaauuaugagugagcuguuaacucuaaaau

SEQ ID NO: 31123 - RNA, 32 nt, Homo Sapiens
accccucaccccuuuacccccauugccuucuc

SEQ ID NO: 31124 - RNA, 32 nt, Homo Sapiens
uuuuggacuaaggagcuuuccuuuuugaaguu

SEQ ID NO: 31125 - RNA, 32 nt, Homo Sapiens
gggggucagcucuggucugggccagugacuaa

SEQ ID NO: 31126 - RNA, 32 nt, Homo Sapiens
cgugugaauggcggccuccgcggcggcagccu

SEQ ID NO: 31127 - RNA, 32 nt, Homo Sapiens
ccaagagcacgcggcugugcugcuccaccggg

SEQ ID NO: 31128 - RNA, 32 nt, Homo Sapiens
ugcgcucagcuuccugcacgccugcagccccc

SEQ ID NO: 31129 - RNA, 30 nt, Homo Sapiens
gcagcugggaagcuugggacucucgucugc

SEQ ID NO: 31130 - RNA, 32 nt, Homo Sapiens
gaaaagccaagagcgucagguggcaaaagucc

SEQ ID NO: 31131 - RNA, 32 nt, Homo Sapiens
cggcgugccugccuggcggccgucggcguacu

SEQ ID NO: 31132 - RNA, 32 nt, Homo Sapiens
caaagaagaauuagccacaucuccccugcuuc

SEQ ID NO: 31133 - RNA, 32 nt, Homo Sapiens
aguacuuuuauggguuucauuuucauauugaa

SEQ ID NO: 31134 - RNA, 32 nt, Homo Sapiens
cucagcugcccacaccucuucccggccccuga

SEQ ID NO: 31135 - RNA, 32 nt, Homo Sapiens
gaguccaugauggaggcagagguaaacuugga

SEQ ID NO: 31136 - RNA, 32 nt, Homo Sapiens
aguggugagcugacacauccaggugugaccau

SEQ ID NO: 31137 - RNA, 32 nt, Homo Sapiens
gaagacacagcuuuuggugcgggcagacacca

SEQ ID NO: 31138 - RNA, 32 nt, Homo Sapiens
auuuuaaagaguucuuuuuauuucuuucauaa

SEQ ID NO: 31139 - RNA, 32 nt, Homo Sapiens
uccucaaacugacuuugcagccacggagaggc

SEQ ID NO: 31140 - RNA, 32 nt, Homo Sapiens
aaccugggagguggagauugcagugagcccag

SEQ ID NO: 31141 - RNA, 32 nt, Homo Sapiens
gcuuguuggugccccagcccgcgcggagggcc

SEQ ID NO: 31142 - RNA, 32 nt, Homo Sapiens
ucgccgcccucccuuggccgcccuacucccca

SEQ ID NO: 31143 - RNA, 32 nt, Homo Sapiens
uucaauauuucuuaacuggggugucuuauaac

SEQ ID NO: 31144 - RNA, 32 nt, Homo Sapiens
agugggcagagacaaguucuaauuguauuaca

SEQ ID NO: 31145 - RNA, 32 nt, Homo Sapiens
uaauauguuuuaaaugucuauuuaccuauuga

SEQ ID NO: 31146 - RNA, 32 nt, Homo Sapiens
uuguauuugugauauuucauuugcuuaacugu

SEQ ID NO: 31147 - RNA, 32 nt, Homo Sapiens
cuuucaauaggaguuuaacuagucuuugucau

SEQ ID NO: 31148 - RNA, 32 nt, Homo Sapiens
aucaaaacaacaacaauggaaauuuauguugg

SEQ ID NO: 31149 - RNA, 32 nt, Homo Sapiens
aauaaaagugguucugugugauugucauuuau

SEQ ID NO: 31150 - RNA, 32 nt, Homo Sapiens
aagugucaugcaagugcuggacagaaggcggc

SEQ ID NO: 31151 - RNA, 32 nt, Homo Sapiens
aaauagcauuuuacuugaauaauauguauguu

SEQ ID NO: 31152 - RNA, 32 nt, Homo Sapiens
auuccagaaagaugaggauauuugcugucuuu

SEQ ID NO: 31153 - RNA, 32 nt, Homo Sapiens
gauauuuucuauuuagagaaugcuuaagggau

SEQ ID NO: 31154 - RNA, 32 nt, Homo Sapiens
uuuagggugugcuugugccccuguggguuuuc

SEQ ID NO: 31155 - RNA, 32 nt, Homo Sapiens
agccuagaguccuggggagcuucuguccaccu

SEQ ID NO: 31156 - RNA, 32 nt, Homo Sapiens
gacugcaaaauauuuuguaaauacacuuuuuu

SEQ ID NO: 31157 - RNA, 32 nt, Homo Sapiens
ugcuuaaaacgaauaguaaaugauuucacagc

SEQ ID NO: 31158 - RNA, 29 nt, Homo Sapiens
uuaaugguauagauuucuauaaaagcaag

SEQ ID NO: 31159 - RNA, 32 nt, Homo Sapiens
ggcuguccggaggucagccugauuucaaccca

SEQ ID NO: 31160 - RNA, 32 nt, Homo Sapiens
cauuucaagauagaugcuucaggugacauugu

SEQ ID NO: 31161 - RNA, 32 nt, Homo Sapiens
uuaaaaacuaaaugaagggaaccacauuaggg

SEQ ID NO: 31162 - RNA, 32 nt, Homo Sapiens
cucaaugcagccagaccuauuccuccugggcc

SEQ ID NO: 31163 - RNA, 32 nt, Homo Sapiens
gacguuugccuuagggguaaaguaaaagaaca

SEQ ID NO: 31164 - RNA, 32 nt, Homo Sapiens
augaggaagacuucaaggguuuuacagggccc

SEQ ID NO: 31165 - RNA, 32 nt, Homo Sapiens
aacgccuuuguguguuguguaugugagccauc

SEQ ID NO: 31166 - RNA, 32 nt, Homo Sapiens
uuucuguuguuucagcuucucagucucuggug

SEQ ID NO: 31167 - RNA, 32 nt, Homo Sapiens
ugcguuacggggcccucugugccuuucccuag

SEQ ID NO: 31168 - RNA, 32 nt, Homo Sapiens
auuauucuuggcagaugcugcagauaacgugg

SEQ ID NO: 31169 - RNA, 32 nt, Homo Sapiens
cuuuaaacaaccccuuucaagaggccuugucc

SEQ ID NO: 31170 - RNA, 32 nt, Homo Sapiens
aaaaaucccuuuccucuguguuuaccaccacc

SEQ ID NO: 31171 - RNA, 32 nt, Homo Sapiens
aaaaccacaaaacccuuugaaaaaagauggaa

SEQ ID NO: 31172 - RNA, 32 nt, Homo Sapiens
gggcauauucugauguuucucauccuuugcca

SEQ ID NO: 31173 - RNA, 32 nt, Homo Sapiens
agagagaagaaccagauagacaaaauaaaaaa

SEQ ID NO: 31174 - RNA, 32 nt, Homo Sapiens
uugccccuccucuaguggcaggcaguaaugag

SEQ ID NO: 31175 - RNA, 32 nt, Homo Sapiens
aauaccagcaucagcaaguguacacgauuuaa

SEQ ID NO: 31176 - RNA, 32 nt, Homo Sapiens
agagucugugggcacauuacucagcgucucug

SEQ ID NO: 31177 - RNA, 32 nt, Homo Sapiens
cuuuggagggggugggguccguuggcaucaac

SEQ ID NO: 31178 - RNA, 32 nt, Homo Sapiens
ggcugcagacugccuuguacucccuggacacc

SEQ ID NO: 31179 - RNA, 32 nt, Homo Sapiens
aauugucaaaaaugcugggaaagguugggaga

SEQ ID NO: 31180 - RNA, 32 nt, Homo Sapiens
aggcagcagcuagaaaugaaagaguagaagaa

SEQ ID NO: 31181 - RNA, 32 nt, Homo Sapiens
uccagggaaggcggcgccucuuucucaggucc

SEQ ID NO: 31182 - RNA, 32 nt, Homo Sapiens
cggcagaaccgucuuggugucacggaguccag

SEQ ID NO: 31183 - RNA, 32 nt, Homo Sapiens
gcaggagcaucguguggagcugcggcccacca

SEQ ID NO: 31184 - RNA, 32 nt, Homo Sapiens
auguagacagcuuuucagaguggcaguaucau

SEQ ID NO: 31185 - RNA, 32 nt, Homo Sapiens
uuugauuaauaaauuauaucaaaaaacuuggg

SEQ ID NO: 31186 - RNA, 32 nt, Homo Sapiens
augaaaccaaaauuauauggaacauuuucugu

SEQ ID NO: 31187 - RNA, 32 nt, Homo Sapiens
uauuuuauaaaauuauuugaauauuguuuaau

SEQ ID NO: 31188 - RNA, 32 nt, Homo Sapiens
gagcagauuguaguugauccacagcaaagagc

SEQ ID NO: 31189 - RNA, 32 nt, Homo Sapiens
aguuuagguacauuuuaagugauucauuuuua

SEQ ID NO: 31190 - RNA, 32 nt, Homo Sapiens
auguauucauauuuguacuuucuguuaaaaug

SEQ ID NO: 31191 - RNA, 30 nt, Homo Sapiens
gggcucucaguuccgauuccccaggcugaa

SEQ ID NO: 31192 - RNA, 32 nt, Homo Sapiens
ugccagccuggagaaggugacaguccaagugu

SEQ ID NO: 31193 - RNA, 32 nt, Homo Sapiens
auaacuaaaauuucucaucuucguacuugaug

SEQ ID NO: 31194 - RNA, 32 nt, Homo Sapiens
aggaauuggggauugaguuguaaagaaaacuu

SEQ ID NO: 31195 - RNA, 32 nt, Homo Sapiens
uagauuacuagaugugcuguaucacggggaau

SEQ ID NO: 31196 - RNA, 32 nt, Homo Sapiens
gcuucaauauuuguaagugcugcuuuauucuu

SEQ ID NO: 31197 - RNA, 32 nt, Homo Sapiens
gaaaucacuuucuugcuucucuuaucaggaua

SEQ ID NO: 31198 - RNA, 32 nt, Homo Sapiens
gacgugcucccucccauccuccagcccugccc

SEQ ID NO: 31199 - RNA, 32 nt, Homo Sapiens
agcacuuuggaagauuuguuuuguuuucaugg

SEQ ID NO: 31200 - RNA, 32 nt, Homo Sapiens
uuaucuuguagaauuugaugagacccucccua

SEQ ID NO: 31201 - RNA, 32 nt, Homo Sapiens
uucuuucuuucugccuuuuuauggaugucuuu

SEQ ID NO: 31202 - RNA, 32 nt, Homo Sapiens
ucauggucacugcuccucuccccuccccacaa

SEQ ID NO: 31203 - RNA, 32 nt, Homo Sapiens
augagcuucuaaaaaucuuuucagguuguuca

SEQ ID NO: 31204 - RNA, 31 nt, Homo Sapiens
cgggcgaugcggggcugccagcuccucgggc

SEQ ID NO: 31205 - RNA, 32 nt, Homo Sapiens
gagcaugagacuuuuaguucagagcagagccu

SEQ ID NO: 31206 - RNA, 32 nt, Homo Sapiens
agagauuuuuacaagucagauuuuuuguuccc

SEQ ID NO: 31207 - RNA, 30 nt, Homo Sapiens
agccagcgcgcgcgggcgggcggacagauc

SEQ ID NO: 31208 - RNA, 32 nt, Homo Sapiens
gcacgccauggcccgccgcgggccauacgcug

SEQ ID NO: 31209 - RNA, 32 nt, Homo Sapiens
acuaguuguuuuaguuuucccagauaaaacca

SEQ ID NO: 31210 - RNA, 31 nt, Homo Sapiens
uugggugugcagagccugccccgccuucccc

SEQ ID NO: 31211 - RNA, 32 nt, Homo Sapiens
gguuggcccccagccacccucgcugggacagc

SEQ ID NO: 31212 - RNA, 32 nt, Homo Sapiens
uaauucuuuuggguuuucuugguuuuaaggca

SEQ ID NO: 31213 - RNA, 32 nt, Homo Sapiens
cucuggaggaagaggagagaacggggcucugc

SEQ ID NO: 31214 - RNA, 32 nt, Homo Sapiens
caguggcugaugcugcagaacugccaccuccu

SEQ ID NO: 31215 - RNA, 32 nt, Homo Sapiens
ugcggccgcugcgggggccgccgccugacuuc

SEQ ID NO: 31216 - RNA, 32 nt, Homo Sapiens
gggagggcuguacagggcuuuuuuaacgaggc

SEQ ID NO: 31217 - RNA, 32 nt, Homo Sapiens
aggacccccuccacggccuggaccucggcugc

SEQ ID NO: 31218 - RNA, 32 nt, Homo Sapiens
uacaucuuaauuaauuuuuucuuaaaaaaaaa

SEQ ID NO: 31219 - RNA, 32 nt, Homo Sapiens
ccacagccaaccccugcagcggccccaggcuc

SEQ ID NO: 31220 - RNA, 32 nt, Homo Sapiens
ccguaacugcccagcccugccccuugcccccg

SEQ ID NO: 31221 - RNA, 32 nt, Homo Sapiens
gaggcuuaugagugaauaccucugggacaaac

SEQ ID NO: 31222 - RNA, 32 nt, Homo Sapiens
cuuuguacuuuuuaauaagaugauacacucga

SEQ ID NO: 31223 - RNA, 32 nt, Homo Sapiens
ggggaacaucucuuuacccagacuagaccuag

SEQ ID NO: 31224 - RNA, 32 nt, Homo Sapiens
ggugcagucaagacaaaaguaaaaugguuuac

SEQ ID NO: 31225 - RNA, 32 nt, Homo Sapiens
guccccuaccuguguccccgggcugcaccccu

SEQ ID NO: 31226 - RNA, 32 nt, Homo Sapiens
agcuggguccucuggaggaggggcgagcugug

SEQ ID NO: 31227 - RNA, 32 nt, Homo Sapiens
aaagaagaugacucggauugagaccuucaaca

SEQ ID NO: 31228 - RNA, 32 nt, Homo Sapiens
cuuaguugcggcugcugucaccaugucccgcg

SEQ ID NO: 31229 - RNA, 32 nt, Homo Sapiens
uacuguccagcauguauuguuccaaauaugac

SEQ ID NO: 31230 - RNA, 32 nt, Homo Sapiens
cucugcugcccuugcuggcccugcccuuccca

SEQ ID NO: 31231 - RNA, 32 nt, Homo Sapiens
ugccaggcgggccugccccugggcucuggcca

SEQ ID NO: 31232 - RNA, 32 nt, Homo Sapiens
aagcaaagauuucaguagaauuuuaguccuga

SEQ ID NO: 31233 - RNA, 32 nt, Homo Sapiens
agagaccagaacuuacugacuugugcagacuu

SEQ ID NO: 31234 - RNA, 32 nt, Homo Sapiens
caagcagaaauagggagcauguuuacagccau

SEQ ID NO: 31235 - RNA, 32 nt, Homo Sapiens
ucugagcccgucucucugggcuguaucuccuc

SEQ ID NO: 31236 - RNA, 32 nt, Homo Sapiens
cauaccaauaauuuaaagauugauaugcuaaa

SEQ ID NO: 31237 - RNA, 32 nt, Homo Sapiens
agucucaauaaaugucacuugguugguuguau

SEQ ID NO: 31238 - RNA, 32 nt, Homo Sapiens
cugcagcgagcucugaucacuccacugcacuc

SEQ ID NO: 31239 - RNA, 32 nt, Homo Sapiens
ccuaaggacuuccaggucagccacccaccgcu

SEQ ID NO: 31240 - RNA, 32 nt, Homo Sapiens
aggguuuuuuauuugcaguuuaggaacuauua

SEQ ID NO: 31241 - RNA, 32 nt, Homo Sapiens
uaauaaaagacuucuuuaaacaucucaaaaaa

SEQ ID NO: 31242 - RNA, 32 nt, Homo Sapiens
ugaaugagggcuuuuuguggcuggggaugggu

SEQ ID NO: 31243 - RNA, 32 nt, Homo Sapiens
ucuuuuagaaaauuauuucauaauuuauucug

SEQ ID NO: 31244 - RNA, 32 nt, Homo Sapiens
cuggucuccacaguagccucccugcccggguc

SEQ ID NO: 31245 - RNA, 32 nt, Homo Sapiens
gacccugucccggcccaugcacccaccuggac

SEQ ID NO: 31246 - RNA, 30 nt, Homo Sapiens
uuugggccugucccugcccaggccucuggc

SEQ ID NO: 31247 - RNA, 32 nt, Homo Sapiens
uccugguuagcgcaacgcggcuccacgaccac

SEQ ID NO: 31248 - RNA, 32 nt, Homo Sapiens
cuaaaaauccugugauacuaagaucucaguca

SEQ ID NO: 31249 - RNA, 32 nt, Homo Sapiens
auaauaaauauuauuaaauaucaggaaagcua

SEQ ID NO: 31250 - RNA, 32 nt, Homo Sapiens
ugccaccgucccucugcagauacacugcucuc

SEQ ID NO: 31251 - RNA, 32 nt, Homo Sapiens
guauuauuuuuacuuuucucucagugucuuau

SEQ ID NO: 31252 - RNA, 32 nt, Homo Sapiens
acuggcuggauuagguuaaauaaagaauuuuu

SEQ ID NO: 31253 - RNA, 32 nt, Homo Sapiens
acgaguccccaccacacccacaccacagccgc

SEQ ID NO: 31254 - RNA, 32 nt, Homo Sapiens
gaggucgcagugagccgagaucgugccacugc

SEQ ID NO: 31255 - RNA, 32 nt, Homo Sapiens
cuggcggcucugcccucaguccgggcugcagc

SEQ ID NO: 31256 - RNA, 32 nt, Homo Sapiens
ugauugccugaagggguccaugaauaaaauuu

SEQ ID NO: 31257 - RNA, 32 nt, Homo Sapiens
ugcauuagcucuuuuuccugaugcucucccuc

SEQ ID NO: 31258 - RNA, 32 nt, Homo Sapiens
uacagggcuuugcaugaaccuaaaagucuuuu

SEQ ID NO: 31259 - RNA, 32 nt, Homo Sapiens
agaugggcuggaaggagggcgaggggcugggc

SEQ ID NO: 31260 - RNA, 32 nt, Homo Sapiens
acgccaucuccacggggcgugccuccauuccg

SEQ ID NO: 31261 - RNA, 32 nt, Homo Sapiens
uguuucuugcuuccugccucugacuuuuaaag

SEQ ID NO: 31262 - RNA, 29 nt, Homo Sapiens
ugugggaauaucugggcaugcacugaaga

SEQ ID NO: 31263 - RNA, 32 nt, Homo Sapiens
caccggcuucuucgcgcacgcugguuucugcu

SEQ ID NO: 31264 - RNA, 32 nt, Homo Sapiens
cccaagucggagcucggagggggcugccugca

SEQ ID NO: 31265 - RNA, 29 nt, Homo Sapiens
ccucagcgucaggcaaauuuaacaaaccu

SEQ ID NO: 31266 - RNA, 32 nt, Homo Sapiens
cucuaaggcucgucuguguaacccauaaaacc

SEQ ID NO: 31267 - RNA, 32 nt, Homo Sapiens
agaaaacaguuguucuguucacugcuuucauu

SEQ ID NO: 31268 - RNA, 32 nt, Homo Sapiens
uugauggaaaauaaacaucaguuucuuaaaaa

SEQ ID NO: 31269 - RNA, 32 nt, Homo Sapiens
ccuuuccaacuggcuguguaguugcuuaugag

SEQ ID NO: 31270 - RNA, 27 nt, Homo Sapiens
cgagcagccuucuucuuugggaccccu

SEQ ID NO: 31271 - RNA, 32 nt, Homo Sapiens
uccccgcaccgccgcaucuccucgcugccucc

SEQ ID NO: 31272 - RNA, 32 nt, Homo Sapiens
aguaaaugacaaaacuguuugcaacuuaauaa

SEQ ID NO: 31273 - RNA, 32 nt, Homo Sapiens
agcugccgggagaagaacuguccuagggccug

SEQ ID NO: 31274 - RNA, 32 nt, Homo Sapiens
acagggaucacuuuuccuuuagcauucagaau

SEQ ID NO: 31275 - RNA, 32 nt, Homo Sapiens
uuuucuggaauucaguauaauggcaucacugc

SEQ ID NO: 31276 - RNA, 30 nt, Homo Sapiens
uagcagccaagagguuaauugugcaacuau

SEQ ID NO: 31277 - RNA, 32 nt, Homo Sapiens
aggcccaagcuggcagaagagacuuagagaug

SEQ ID NO: 31278 - RNA, 32 nt, Homo Sapiens
ugugucauccucaaaauauccgugggucuuuu

SEQ ID NO: 31279 - RNA, 32 nt, Homo Sapiens
cugguuccuguguguuuggcccgggcacaauc

SEQ ID NO: 31280 - RNA, 32 nt, Homo Sapiens
ggagagggaaguauuuugccgaaauaugagaa

SEQ ID NO: 31281 - RNA, 32 nt, Homo Sapiens
aaaauccagcagaaacagaagaacuguggguu

SEQ ID NO: 31282 - RNA, 32 nt, Homo Sapiens
augcaguuauauuccuuuuuuauuuguuccuu

SEQ ID NO: 31283 - RNA, 32 nt, Homo Sapiens
agaaagcauucuuuggaaaaacaagcaaagga

SEQ ID NO: 31284 - RNA, 32 nt, Homo Sapiens
uuaaugauuucuggaacugccauuccaaagaa

SEQ ID NO: 31285 - RNA, 32 nt, Homo Sapiens
aacaguuucuauuguauuuuguggaacuguau

SEQ ID NO: 31286 - RNA, 32 nt, Homo Sapiens
cuguuuucuuguauauggauauccaauuguuu

SEQ ID NO: 31287 - RNA, 32 nt, Homo Sapiens
ccgagucacacgugcagaacuguugauacacc

SEQ ID NO: 31288 - RNA, 32 nt, Homo Sapiens
caacauuggaccaaauacaaugaaguauucuu

SEQ ID NO: 31289 - RNA, 32 nt, Homo Sapiens
cggauggcgcccagcccagcccuaacugccag

SEQ ID NO: 31290 - RNA, 32 nt, Homo Sapiens
aauuuguagagauaggaugaccaaggacaaca

SEQ ID NO: 31291 - RNA, 32 nt, Homo Sapiens
gcagccaggacaccaugcccgaggacggcgcu

SEQ ID NO: 31292 - RNA, 32 nt, Homo Sapiens
agacuuguggccugggagagcuggggaagcuu

SEQ ID NO: 31293 - RNA, 32 nt, Homo Sapiens
uuuuuccaauauuuuaaauauuucuguucuua

SEQ ID NO: 31294 - RNA, 32 nt, Homo Sapiens
aggucccuagucaggaccgagcaggggaguag

SEQ ID NO: 31295 - RNA, 32 nt, Homo Sapiens
ucagcgugaagucugaaauaugcaacagaaga

SEQ ID NO: 31296 - RNA, 32 nt, Homo Sapiens
gcuccggccccggacgaugcggcgcgcccagg

SEQ ID NO: 31297 - RNA, 32 nt, Homo Sapiens
aaccagcuacuggagcucuuugaccucuucag

SEQ ID NO: 31298 - RNA, 32 nt, Homo Sapiens
gaacucugccuugcccucgucccucguccuuc

SEQ ID NO: 31299 - RNA, 32 nt, Homo Sapiens
cuccggacagcagacagaccuccggagaaagu

SEQ ID NO: 31300 - RNA, 32 nt, Homo Sapiens
cuggaagagaucuaaauucuuauucuuaguga

SEQ ID NO: 31301 - RNA, 32 nt, Homo Sapiens
ugauuuauuaauaaacugcaucugaaauaauu

SEQ ID NO: 31302 - RNA, 32 nt, Homo Sapiens
cgugucccccacauccuccccugaguccggag

SEQ ID NO: 31303 - RNA, 32 nt, Homo Sapiens
acaaacaaacaaaaaaccaaaaugcaaacgug

SEQ ID NO: 31304 - RNA, 32 nt, Homo Sapiens
ggaaugaaaaagaaggaauacuacuuucuaag

SEQ ID NO: 31305 - RNA, 32 nt, Homo Sapiens
acuuauguuuuaagaaguugagaucuugugaa

SEQ ID NO: 31306 - RNA, 32 nt, Homo Sapiens
gaggcgggguauccagagcggcuucagcuuca

SEQ ID NO: 31307 - RNA, 32 nt, Homo Sapiens
acuaggagcugauguuugccucauuuaaagua

SEQ ID NO: 31308 - RNA, 32 nt, Homo Sapiens
uucuuaugauauggccguucuugcuucccauc

SEQ ID NO: 31309 - RNA, 32 nt, Homo Sapiens
uuuauuacuugggagucccauuuuggacacua

SEQ ID NO: 31310 - RNA, 32 nt, Homo Sapiens
gcuaccaucugguguucaguucugggaaagag

SEQ ID NO: 31311 - RNA, 32 nt, Homo Sapiens
cuccacccagacccccaccugccccauggccc

SEQ ID NO: 31312 - RNA, 32 nt, Homo Sapiens
cacaaauauaauguaacgaucuuuuagaaagu

SEQ ID NO: 31313 - RNA, 32 nt, Homo Sapiens
acuuuccugccagcacauguuucugggucuug

SEQ ID NO: 31314 - RNA, 32 nt, Homo Sapiens
acuuccacucgugcgugaggcgagaggagccg

SEQ ID NO: 31315 - RNA, 32 nt, Homo Sapiens
uucaggaaggcacaauauuguacaguauuggu

SEQ ID NO: 31316 - RNA, 32 nt, Homo Sapiens
uaucguccagaccggagcaccgccccaccgcu

SEQ ID NO: 31317 - RNA, 32 nt, Homo Sapiens
ggaaaacuguucccauuaggcuuguuaauguc

SEQ ID NO: 31318 - RNA, 32 nt, Homo Sapiens
ucugagugaagauagcagggaugcuguguuca

SEQ ID NO: 31319 - RNA, 32 nt, Homo Sapiens
gguugaaaguggaaagcacuugaaagagcucc

SEQ ID NO: 31320 - RNA, 32 nt, Homo Sapiens
gaggccgccgagagccggggccccgcuaugug

SEQ ID NO: 31321 - RNA, 32 nt, Homo Sapiens
aaacauuagaaauuugcagaauuuaagaaauu

SEQ ID NO: 31322 - RNA, 32 nt, Homo Sapiens
aaaaaacaacgcuguuuucuaguccugcagac

SEQ ID NO: 31323 - RNA, 32 nt, Homo Sapiens
ccagagguccucagcccuccugccugggcuau

SEQ ID NO: 31324 - RNA, 32 nt, Homo Sapiens
cuacuuaauaauaccuuuaguuaaauauuguu

SEQ ID NO: 31325 - RNA, 32 nt, Homo Sapiens
cccugcaggccagcugccccaagcgggguagc

SEQ ID NO: 31326 - RNA, 32 nt, Homo Sapiens
acagagaggagaugaugcuggguguggcccau

SEQ ID NO: 31327 - RNA, 32 nt, Homo Sapiens
caggaaugguccugccuauagaagagcuuuga

SEQ ID NO: 31328 - RNA, 32 nt, Homo Sapiens
guacugaaagcagagguggcgggaaggggaaa

SEQ ID NO: 31329 - RNA, 32 nt, Homo Sapiens
guccucccgcggguccgagggcgcuggaaacc

SEQ ID NO: 31330 - RNA, 32 nt, Homo Sapiens
acuacugagagaaugagaugaaaaacgauuaa

SEQ ID NO: 31331 - RNA, 32 nt, Homo Sapiens
uaucucaacuguaagggcauuuucaagcuucu

SEQ ID NO: 31332 - RNA, 32 nt, Homo Sapiens
ggaggcucagaccuugccagacugccugcuuu

SEQ ID NO: 31333 - RNA, 32 nt, Homo Sapiens
aacucuguauuuauuucccaauaaagaagggc

SEQ ID NO: 31334 - RNA, 32 nt, Homo Sapiens
uggcucaccugcuccucagacuugcagggugg

SEQ ID NO: 31335 - RNA, 32 nt, Homo Sapiens
acgcugggccgcggccucuggagcugggauuu

SEQ ID NO: 31336 - RNA, 32 nt, Homo Sapiens
agucgcagcccgcucaggcccgcgccuucccg

SEQ ID NO: 31337 - RNA, 32 nt, Homo Sapiens
cucucaucuauaaaaugagaaaacagugccag

SEQ ID NO: 31338 - RNA, 32 nt, Homo Sapiens
gccaauuuuucugcacugagcagagucuugcu

SEQ ID NO: 31339 - RNA, 32 nt, Homo Sapiens
auuauuuccuucccuucccugugcagcauuca

SEQ ID NO: 31340 - RNA, 32 nt, Homo Sapiens
uugauugcaaccuggugagagauccugagccu

SEQ ID NO: 31341 - RNA, 32 nt, Homo Sapiens
cguuggaugcuacuauuuccaaaaugucaaca

SEQ ID NO: 31342 - RNA, 32 nt, Homo Sapiens
caacaugaugcuucuugcauauuauccagauu

SEQ ID NO: 31343 - RNA, 32 nt, Homo Sapiens
gggucgcccucccgugccucgcccgcggacac

SEQ ID NO: 31344 - RNA, 32 nt, Homo Sapiens
gcuaugaacugggauucccaaagggaggcccc

SEQ ID NO: 31345 - RNA, 32 nt, Homo Sapiens
agaaaaauaccuauguuaacucacaaguauaa

SEQ ID NO: 31346 - RNA, 32 nt, Homo Sapiens
cccacacgcaguucuagcaggacgcugaggcu

SEQ ID NO: 31347 - RNA, 32 nt, Homo Sapiens
ggucuugugcccagcgcccccgggaaggcggg

SEQ ID NO: 31348 - RNA, 32 nt, Homo Sapiens
cugccccugagacacaaugcaagcuguagugc

SEQ ID NO: 31349 - RNA, 32 nt, Homo Sapiens
cacaggagggucaccaggccugcggugcugaa

SEQ ID NO: 31350 - RNA, 32 nt, Homo Sapiens
uucuuuaacuuuuuuauauaaacugaaauucu

SEQ ID NO: 31351 - RNA, 32 nt, Homo Sapiens
ucacuuauuaaacauguucaccaugggaugau

SEQ ID NO: 31352 - RNA, 32 nt, Homo Sapiens
uugacugugcccaguacuuccuggacaagauc

SEQ ID NO: 31353 - RNA, 32 nt, Homo Sapiens
ggggaugcggggggaugaggguaggagggacu

SEQ ID NO: 31354 - RNA, 32 nt, Homo Sapiens
uaaaaggagcugcuaugaaguaccuuucuuau

SEQ ID NO: 31355 - RNA, 32 nt, Homo Sapiens
gacccagaguccgcguggaaccgcgauaggga

SEQ ID NO: 31356 - RNA, 29 nt, Homo Sapiens
aggaagaugaagaggaggaagagggagaa

SEQ ID NO: 31357 - RNA, 32 nt, Homo Sapiens
acagcaaaugccagccgggcacgacgccugug

SEQ ID NO: 31358 - RNA, 32 nt, Homo Sapiens
gugggaacucaacccagaucccgccccuccug

SEQ ID NO: 31359 - RNA, 32 nt, Homo Sapiens
uugaggacaggaggaggcucuugcuguuaaua

SEQ ID NO: 31360 - RNA, 32 nt, Homo Sapiens
uguucaugcaagagccugaagaaauugugauc

SEQ ID NO: 31361 - RNA, 27 nt, Homo Sapiens
gguaggcccuucuucagucaccacagg

SEQ ID NO: 31362 - RNA, 32 nt, Homo Sapiens
acugaugccacugacuaacaacuagccacuug

SEQ ID NO: 31363 - RNA, 32 nt, Homo Sapiens
gccccgagggcggccagggacccaucuccauc

SEQ ID NO: 31364 - RNA, 32 nt, Homo Sapiens
ggaagaacaaaacaaaauaaaaacagagcccu

SEQ ID NO: 31365 - RNA, 32 nt, Homo Sapiens
ugucacugugucuauguagaaagggaagacau

SEQ ID NO: 31366 - RNA, 32 nt, Homo Sapiens
cucaggccauucucuuccccugugugccucag

SEQ ID NO: 31367 - RNA, 32 nt, Homo Sapiens
cuucuggcacgcggucaugaggguggggaaug

SEQ ID NO: 31368 - RNA, 32 nt, Homo Sapiens
ggacugcgccagccggccggcgccucaacaga

SEQ ID NO: 31369 - RNA, 32 nt, Homo Sapiens
uccaggcgcgccccgagugcuagugccuucuu

SEQ ID NO: 31370 - RNA, 32 nt, Homo Sapiens
ugagauuaagaaugccaggaauauugucaucc

SEQ ID NO: 31371 - RNA, 32 nt, Homo Sapiens
cagcuguugagcuucuucuugcuggagagcau

SEQ ID NO: 31372 - RNA, 32 nt, Homo Sapiens
uaaaacaucauucuuuaaaagaauaguuuaau

SEQ ID NO: 31373 - RNA, 32 nt, Homo Sapiens
cauagugaaaauacuaacauggauuguugauc

SEQ ID NO: 31374 - RNA, 32 nt, Homo Sapiens
uuacuuuuuuccuuccaaauaucaccuucuga

SEQ ID NO: 31375 - RNA, 32 nt, Homo Sapiens
guuucuuggugcccgcuugcuguggaguuuug

SEQ ID NO: 31376 - RNA, 32 nt, Homo Sapiens
ugguacagguguuauucaguacugggugguuc

SEQ ID NO: 31377 - RNA, 32 nt, Homo Sapiens
gacugaacagugugguucuuugaaagguuugg

SEQ ID NO: 31378 - RNA, 32 nt, Homo Sapiens
gccuucauugucugcuggcugcccuucuucuu

SEQ ID NO: 31379 - RNA, 32 nt, Homo Sapiens
cuaacauaggaaguuagaaaauacuaauaacu

SEQ ID NO: 31380 - RNA, 32 nt, Homo Sapiens
gcccgccuccuuccgcggcgccugcaguggca

SEQ ID NO: 31381 - RNA, 32 nt, Homo Sapiens
ggagcgccgccgccgccucgaugggguguuga

SEQ ID NO: 31382 - RNA, 32 nt, Homo Sapiens
agcgccggugugagccagcgcugcugccagug

SEQ ID NO: 31383 - RNA, 32 nt, Homo Sapiens
auaaaauugugauuuuuauaaccugugcuuau

SEQ ID NO: 31384 - RNA, 32 nt, Homo Sapiens
acacagagcaccagcucugaggaacucguccc

SEQ ID NO: 31385 - RNA, 31 nt, Homo Sapiens
gagaccacguggagaaaggggccgcuuuggc

SEQ ID NO: 31386 - RNA, 32 nt, Homo Sapiens
uggcccaucccaugaaacccaggcuguagaga

SEQ ID NO: 31387 - RNA, 30 nt, Homo Sapiens
gaacccggacaguugcugggucccggcaga

SEQ ID NO: 31388 - RNA, 32 nt, Homo Sapiens
gucauaaaauuaacaaggaauuuaacauacaa

SEQ ID NO: 31389 - RNA, 32 nt, Homo Sapiens
auuacacugucuuuuugccaucaaaaugaggc

SEQ ID NO: 31390 - RNA, 32 nt, Homo Sapiens
agaccagccucaucucggggaaccugcaccgc

SEQ ID NO: 31391 - RNA, 32 nt, Homo Sapiens
augcaagaacuucuacaaaacuucuauaccac

SEQ ID NO: 31392 - RNA, 32 nt, Homo Sapiens
acauucuguguauguaacaaaauaucacaugc

SEQ ID NO: 31393 - RNA, 32 nt, Homo Sapiens
acagggccacuuuuuucuuuuuuuuuuauugu

SEQ ID NO: 31394 - RNA, 32 nt, Homo Sapiens
aauuuaaacccauuuuugucauuuccaaauac

SEQ ID NO: 31395 - RNA, 32 nt, Homo Sapiens
ggggcgcgaggcgggggcgagcgcuugggacu

SEQ ID NO: 31396 - RNA, 32 nt, Homo Sapiens
gaggaaauucuguguugacauacucuuuaauu

SEQ ID NO: 31397 - RNA, 32 nt, Homo Sapiens
cuggucuccgcggaugacgaguggcuggauaa

SEQ ID NO: 31398 - RNA, 32 nt, Homo Sapiens
cccagagaacucucugaugugccagugggccu

SEQ ID NO: 31399 - RNA, 32 nt, Homo Sapiens
ccgccgccgucuccgcgggagcauggagugcg

SEQ ID NO: 31400 - RNA, 32 nt, Homo Sapiens
cucugguggcugccagcuugugagcuaucuau

SEQ ID NO: 31401 - RNA, 32 nt, Homo Sapiens
uucucuggugccuacuaauauucuagaaaugg

SEQ ID NO: 31402 - RNA, 32 nt, Homo Sapiens
cggugggugagaaucccggugcccugagaggc

SEQ ID NO: 31403 - RNA, 32 nt, Homo Sapiens
guucuuuuguuguuuuugccaguuuagggcag

SEQ ID NO: 31404 - RNA, 32 nt, Homo Sapiens
ucugugcagcaauuugagucucaguaauuuca

SEQ ID NO: 31405 - RNA, 32 nt, Homo Sapiens
ucuucccccuccccacucuggcuccgcccccg

SEQ ID NO: 31406 - RNA, 32 nt, Homo Sapiens
cuacuagagaaaaaccaacuggcaguuugcua

SEQ ID NO: 31407 - RNA, 32 nt, Homo Sapiens
accacagcagugccuucucgucgaagcgggcu

SEQ ID NO: 31408 - RNA, 32 nt, Homo Sapiens
uuuguaaaaaauuucuauauaaaaauauuuug

SEQ ID NO: 31409 - RNA, 32 nt, Homo Sapiens
uguguaacuguucuuugcagugaagaugugua

SEQ ID NO: 31410 - RNA, 32 nt, Homo Sapiens
uuugucaccacauaauugguguugauuggaaa

SEQ ID NO: 31411 - RNA, 32 nt, Homo Sapiens
cagcucagcaaccccugauuugacagucucac

SEQ ID NO: 31412 - RNA, 32 nt, Homo Sapiens
ccuuuccaugggccacuguuucccuuggggug

SEQ ID NO: 31413 - RNA, 32 nt, Homo Sapiens
gguauucuauaucuuaaccagcugagggagcu

SEQ ID NO: 31414 - RNA, 32 nt, Homo Sapiens
aauugaauguuccaucaauaccucucuaugag

SEQ ID NO: 31415 - RNA, 32 nt, Homo Sapiens
auggacuuauuucuucaaauccuuccaaaaau

SEQ ID NO: 31416 - RNA, 32 nt, Homo Sapiens
cguuaccauggaugauccugaacuugccgagg

SEQ ID NO: 31417 - RNA, 30 nt, Homo Sapiens
ccacaggagaagcuggugccucuaggcaac

SEQ ID NO: 31418 - RNA, 32 nt, Homo Sapiens
cagccaccucgcgcgcaccccgaggcgccgcg

SEQ ID NO: 31419 - RNA, 32 nt, Homo Sapiens
ucacaagcaucauacauugcugauugcacuua

SEQ ID NO: 31420 - RNA, 32 nt, Homo Sapiens
ccuccagaucgaccccuagaugccuacacaau

SEQ ID NO: 31421 - RNA, 32 nt, Homo Sapiens
gggcgggagggagaggggguguccgagggcca

SEQ ID NO: 31422 - RNA, 32 nt, Homo Sapiens
cucuggcucagcgcacgcccccugcccugaga

SEQ ID NO: 31423 - RNA, 32 nt, Homo Sapiens
cgcgccucaggauccaggcucauuugcuucca

SEQ ID NO: 31424 - RNA, 32 nt, Homo Sapiens
guccugccucugccuggcagcucugugggaaa

SEQ ID NO: 31425 - RNA, 32 nt, Homo Sapiens
ccuggcccacccaaggugccuggggcaggcgg

SEQ ID NO: 31426 - RNA, 32 nt, Homo Sapiens
agaggcauuuuucaauaaaacuacugaaaauu

SEQ ID NO: 31427 - RNA, 28 nt, Homo Sapiens
ugaacauaaaagugcucuaaaaacacuc

SEQ ID NO: 31428 - RNA, 32 nt, Homo Sapiens
ucagacccaagccugccgcacccagcggagcu

SEQ ID NO: 31429 - RNA, 32 nt, Homo Sapiens
auuuuuaaaaauugucauuuaaaaaaaaaaaa

SEQ ID NO: 31430 - RNA, 32 nt, Homo Sapiens
cucuguccagccaccugcugcccgccuugguc

SEQ ID NO: 31431 - RNA, 32 nt, Homo Sapiens
aacaaauguaaaauauuauuccuaauagaaga

SEQ ID NO: 31432 - RNA, 32 nt, Homo Sapiens
ccccucuucccuuguuaucuaagcuuuccuca

SEQ ID NO: 31433 - RNA, 32 nt, Homo Sapiens
uguucauuugaaauacaaaaaaguaagugaau

SEQ ID NO: 31434 - RNA, 32 nt, Homo Sapiens
aacaaggacccuguguggagccagguguucuc

SEQ ID NO: 31435 - RNA, 32 nt, Homo Sapiens
uggucuuuucccagaggcuggcaccuuucaug

SEQ ID NO: 31436 - RNA, 32 nt, Homo Sapiens
aaaaauaaauacuuuauauauaacucgugaaa

SEQ ID NO: 31437 - RNA, 32 nt, Homo Sapiens
cagccccacaggugcugugcuuugugcucuug

SEQ ID NO: 31438 - RNA, 32 nt, Homo Sapiens
ugcaaggcaguggcucagcagcaagaaugcug

SEQ ID NO: 31439 - RNA, 32 nt, Homo Sapiens
aaucaaaucuauauuucuuuggauuuaauuac

SEQ ID NO: 31440 - RNA, 32 nt, Homo Sapiens
aggaaggcgggggauuucaaguuuagggauug

SEQ ID NO: 31441 - RNA, 32 nt, Homo Sapiens
acccacaccccccgcuuuccuuuaucuccagg

SEQ ID NO: 31442 - RNA, 32 nt, Homo Sapiens
acuuccaguauuuuagcucugucauuauuaaa

SEQ ID NO: 31443 - RNA, 32 nt, Homo Sapiens
auuggauucccuuaaacaaaaguguuuaagau

SEQ ID NO: 31444 - RNA, 32 nt, Homo Sapiens
ucauuuccucaaaaguaauuuauuuuuacagc

SEQ ID NO: 31445 - RNA, 32 nt, Homo Sapiens
uggucacuuuauuuauaggaucuuuaaaacau

SEQ ID NO: 31446 - RNA, 32 nt, Homo Sapiens
acccggccuccaagccagcaucuuuaaucuua

SEQ ID NO: 31447 - RNA, 32 nt, Homo Sapiens
uuuagcuacucucaccugaggcuacugagcaa

SEQ ID NO: 31448 - RNA, 32 nt, Homo Sapiens
acaaauacaaaugauauuuaacaaagauagag

SEQ ID NO: 31449 - RNA, 32 nt, Homo Sapiens
ugauuuugccucccaacaccauuucuuuuuaa

SEQ ID NO: 31450 - RNA, 32 nt, Homo Sapiens
aggacaucgccaggcucuguggcuuuuucccg

SEQ ID NO: 31451 - RNA, 32 nt, Homo Sapiens
gcuggcugucucccaagccuguguuucucuac

SEQ ID NO: 31452 - RNA, 32 nt, Homo Sapiens
gaggucgggucgccguccagccugcagcauga

SEQ ID NO: 31453 - RNA, 32 nt, Homo Sapiens
acagaaccuucccuagagggaauaccagaguu

SEQ ID NO: 31454 - RNA, 32 nt, Homo Sapiens
ugccaaagcagccaggcuuaugcugaaaccgg

SEQ ID NO: 31455 - RNA, 32 nt, Homo Sapiens
cagaaugguaucuauuggauaaaauaguauuu

SEQ ID NO: 31456 - RNA, 32 nt, Homo Sapiens
ucucccacagaaaugaugaaagugaccagaaa

SEQ ID NO: 31457 - RNA, 32 nt, Homo Sapiens
auauaaaguaccuauuuuuaugcugaaauguu

SEQ ID NO: 31458 - RNA, 32 nt, Homo Sapiens
gguuccagccccagccaggccccuccgcugcc

SEQ ID NO: 31459 - RNA, 32 nt, Homo Sapiens
ugggagcaccucauuuguggaaaagccucuuu

SEQ ID NO: 31460 - RNA, 32 nt, Homo Sapiens
cccccagacaaggcccgggggcuccgccagca

SEQ ID NO: 31461 - RNA, 32 nt, Homo Sapiens
ucacagaauucguuucuuuaaaauagucaauu

SEQ ID NO: 31462 - RNA, 32 nt, Homo Sapiens
caacugaccugccagccgguucugcuagagca

SEQ ID NO: 31463 - RNA, 32 nt, Homo Sapiens
guguagagggcggcuucagagagacucacgcu

SEQ ID NO: 31464 - RNA, 32 nt, Homo Sapiens
uuuaauccaaagaaagauuaauuacucuaaca

SEQ ID NO: 31465 - RNA, 32 nt, Homo Sapiens
gagacuuuuaccuuuacccagaaaggaauaaa

SEQ ID NO: 31466 - RNA, 28 nt, Homo Sapiens
gauguaguuacagcugacuaauauuuuu

SEQ ID NO: 31467 - RNA, 32 nt, Homo Sapiens
agccauccagaccgaacagcgccccgccuggc

SEQ ID NO: 31468 - RNA, 32 nt, Homo Sapiens
aucucccagcaagaccucaucuguggagcugc

SEQ ID NO: 31469 - RNA, 32 nt, Homo Sapiens
ucgcaggcucgcugcgcaggacggcgcccgcc

SEQ ID NO: 31470 - RNA, 32 nt, Homo Sapiens
ggugcucucuacgugguggccgguagaauucu

SEQ ID NO: 31471 - RNA, 32 nt, Homo Sapiens
gggagcagcguuugauccccccugccuaucag

SEQ ID NO: 31472 - RNA, 32 nt, Homo Sapiens
cgcuggacagagcuacagaccuauggggccug

SEQ ID NO: 31473 - RNA, 32 nt, Homo Sapiens
ugucggugcagaucucuuguccaugugccagc

SEQ ID NO: 31474 - RNA, 32 nt, Homo Sapiens
uuuguuuucuaaaagcaaaaucuguagcugaa

SEQ ID NO: 31475 - RNA, 32 nt, Homo Sapiens
acaagccaaacacucuugcaugguaaccuugu

SEQ ID NO: 31476 - RNA, 32 nt, Homo Sapiens
agaugcugcaauguuuuuauguuuccuuuaug

SEQ ID NO: 31477 - RNA, 32 nt, Homo Sapiens
gaugucccaagccucaucgugacgaggcucuu

SEQ ID NO: 31478 - RNA, 32 nt, Homo Sapiens
cccacucccccggccucgggacggggcccgca

SEQ ID NO: 31479 - RNA, 32 nt, Homo Sapiens
gcuaacugagagggcgccgccggcguccugaa

SEQ ID NO: 31480 - RNA, 32 nt, Homo Sapiens
gaaccuguucuuccugugcugcacagcuugga

SEQ ID NO: 31481 - RNA, 32 nt, Homo Sapiens
cccgaccccccucuccucuucuagcccaugcc

SEQ ID NO: 31482 - RNA, 25 nt, Homo Sapiens
augauggaugcaucaaaagagcugc

SEQ ID NO: 31483 - RNA, 32 nt, Homo Sapiens
auaaaacaaaaauauaauggcuagaauacaaa

SEQ ID NO: 31484 - RNA, 32 nt, Homo Sapiens
guggcaaucugcaccguaaaccccgagcugcg

SEQ ID NO: 31485 - RNA, 32 nt, Homo Sapiens
guagauuacuuaucagaaaacauauaugucau

SEQ ID NO: 31486 - RNA, 32 nt, Homo Sapiens
auguuaaauuuaugcauaguaauuuugcacug

SEQ ID NO: 31487 - RNA, 32 nt, Homo Sapiens
gugauagaauccacccugccucugacagcauc

SEQ ID NO: 31488 - RNA, 32 nt, Homo Sapiens
uaguaaauguuaucuuauacuguacaauaaaa

SEQ ID NO: 31489 - RNA, 32 nt, Homo Sapiens
uuuauaaaauuaauguuuuucuuuguaacauu

SEQ ID NO: 31490 - RNA, 32 nt, Homo Sapiens
cggccccgagccucuuguugcuggacuaugac

SEQ ID NO: 31491 - RNA, 32 nt, Homo Sapiens
aggugggaggaucaccugagugagccugagga

SEQ ID NO: 31492 - RNA, 32 nt, Homo Sapiens
cgccuguaauuccagcacuuugggagacugag

SEQ ID NO: 31493 - RNA, 31 nt, Homo Sapiens
cugggccaagccaccaauccagagcucccuc

SEQ ID NO: 31494 - RNA, 32 nt, Homo Sapiens
caaauaugucauuuuaauuaccuagcuggaag

SEQ ID NO: 31495 - RNA, 32 nt, Homo Sapiens
agucauaugauagacauacuguguaaaauuaa

SEQ ID NO: 31496 - RNA, 32 nt, Homo Sapiens
auuugcauuucccccuccucagaugggaagcc

SEQ ID NO: 31497 - RNA, 32 nt, Homo Sapiens
aucgaugagaauuuauaauuuguagggcauga

SEQ ID NO: 31498 - RNA, 32 nt, Homo Sapiens
gcuggagguaguggagcaaacaagaucagcaa

SEQ ID NO: 31499 - RNA, 32 nt, Homo Sapiens
uuguagucauauuucuuaguucuuauaucagu

SEQ ID NO: 31500 - RNA, 32 nt, Homo Sapiens
uagaucagagcagcagugaaaacaagugcugg

SEQ ID NO: 31501 - RNA, 32 nt, Homo Sapiens
guuacuagaagaaaaugaauaauauagaucag

SEQ ID NO: 31502 - RNA, 32 nt, Homo Sapiens
uugucuuuaaaauuauuuuaucuuuugauuua

SEQ ID NO: 31503 - RNA, 32 nt, Homo Sapiens
cuguauuguaguguuugcuauuugauguggaa

SEQ ID NO: 31504 - RNA, 32 nt, Homo Sapiens
guauguacuuggaaauacagaauaacuuuauc

SEQ ID NO: 31505 - RNA, 32 nt, Homo Sapiens
gucuuguggucuuuuuacccccccuuuccccu

SEQ ID NO: 31506 - RNA, 32 nt, Homo Sapiens
gguguuguaaauugcauguuguaaucaaacga

SEQ ID NO: 31507 - RNA, 32 nt, Homo Sapiens
cuccuagucacuuucuuucucacucugucucu

SEQ ID NO: 31508 - RNA, 32 nt, Homo Sapiens
accgggccgggggagccgcgggcucucgggga

SEQ ID NO: 31509 - RNA, 32 nt, Homo Sapiens
gaacccgugaauuguguaaauaaaauucugcu

SEQ ID NO: 31510 - RNA, 32 nt, Homo Sapiens
ucuauuuauuaagagacaauguuucuauuuau

SEQ ID NO: 31511 - RNA, 32 nt, Homo Sapiens
ccugaccucaggugaucugccugccuuggcau

SEQ ID NO: 31512 - RNA, 32 nt, Homo Sapiens
aauuguucaaauguuucuuuuaaugggugguu

SEQ ID NO: 31513 - RNA, 32 nt, Homo Sapiens
uccaguuugcuaaucuccuuguuuccugucuc

SEQ ID NO: 31514 - RNA, 32 nt, Homo Sapiens
cgggagcugugaugagagucacagggguucca

SEQ ID NO: 31515 - RNA, 32 nt, Homo Sapiens
ucuuuauauuuuacugguuguuuuaaaaauuc

SEQ ID NO: 31516 - RNA, 32 nt, Homo Sapiens
cuaaaaugcaaguauauguauaagguaauagc

SEQ ID NO: 31517 - RNA, 32 nt, Homo Sapiens
aguuauugggacuuaaauuuaauaaaaguuuu

SEQ ID NO: 31518 - RNA, 32 nt, Homo Sapiens
aacggguguaucgguguuuucuuuccuggugg

SEQ ID NO: 31519 - RNA, 32 nt, Homo Sapiens
gagaguuugggucuuucuccucugugccugcu

SEQ ID NO: 31520 - RNA, 32 nt, Homo Sapiens
gagcagugacagagagucauggccguggugag

SEQ ID NO: 31521 - RNA, 32 nt, Homo Sapiens
acaugaguuccgaauuccugcguuucaagugg

SEQ ID NO: 31522 - RNA, 32 nt, Homo Sapiens
gcugcgucgcucggcucgcgacgcugcagagg

SEQ ID NO: 31523 - RNA, 32 nt, Homo Sapiens
ggaggagcggccugcgccgccgcgcgagagga

SEQ ID NO: 31524 - RNA, 32 nt, Homo Sapiens
aucaccucaacagcccugugagugaccucagu

SEQ ID NO: 31525 - RNA, 32 nt, Homo Sapiens
uggaaugaagggcagacagagaagacuaucag

SEQ ID NO: 31526 - RNA, 32 nt, Homo Sapiens
cccugugggagguccgacaaaccuggcgucua

SEQ ID NO: 31527 - RNA, 32 nt, Homo Sapiens
gcagacacacccggggccguguaggggguaca

SEQ ID NO: 31528 - RNA, 32 nt, Homo Sapiens
uagaugcggugcuuuuaggagcuccguccgac

SEQ ID NO: 31529 - RNA, 32 nt, Homo Sapiens
agcagccgccagccccucggaccuccaucucc

SEQ ID NO: 31530 - RNA, 32 nt, Homo Sapiens
accaugcucacagacacacccagcauaauguu

SEQ ID NO: 31531 - RNA, 32 nt, Homo Sapiens
gccccucgccugggguggggggugcgaagaga

SEQ ID NO: 31532 - RNA, 32 nt, Homo Sapiens
cuggggccgcagagccgaggccggguuaccuc

SEQ ID NO: 31533 - RNA, 32 nt, Homo Sapiens
ugcucucugcccgcucuccggccaacuguccu

SEQ ID NO: 31534 - RNA, 32 nt, Homo Sapiens
ucaaguagaaaaacuuuucuucccagcuuuuc

SEQ ID NO: 31535 - RNA, 32 nt, Homo Sapiens
gugcgggucuggaccgccuccuccguggugga

SEQ ID NO: 31536 - RNA, 32 nt, Homo Sapiens
acaucauauuaaauaaaauguagcagaaccau

SEQ ID NO: 31537 - RNA, 32 nt, Homo Sapiens
cucgcggcgcugagggcgggagcgcgcagagc

SEQ ID NO: 31538 - RNA, 32 nt, Homo Sapiens
ggagguagagagagggcagccggagcacccca

SEQ ID NO: 31539 - RNA, 32 nt, Homo Sapiens
ccccccacucagcucuucuccuccugugccag

SEQ ID NO: 31540 - RNA, 32 nt, Homo Sapiens
ugcugcgggcagccuuucucauggaaugacau

SEQ ID NO: 31541 - RNA, 32 nt, Homo Sapiens
gccucgccuccuucagccuccuccucccucau

SEQ ID NO: 31542 - RNA, 32 nt, Homo Sapiens
uaggggcagacggcccggguuuccgcuucccu

SEQ ID NO: 31543 - RNA, 32 nt, Homo Sapiens
ugccacagccugccuccaucagcuucuuauuu

SEQ ID NO: 31544 - RNA, 32 nt, Homo Sapiens
aaaaagugguggaacaaauaccaacauccauc

SEQ ID NO: 31545 - RNA, 32 nt, Homo Sapiens
ugcaccauugauuuugggggucgggggaauac

SEQ ID NO: 31546 - RNA, 32 nt, Homo Sapiens
ccauguaggagguaaaaccaauucuggaagug

SEQ ID NO: 31547 - RNA, 32 nt, Homo Sapiens
cguuucgggccucagagcgucuggugagaugc

SEQ ID NO: 31548 - RNA, 32 nt, Homo Sapiens
ccacugugggaacggcuuggcccagcggggcc

SEQ ID NO: 31549 - RNA, 32 nt, Homo Sapiens
uggcuuaaaaauacuuaauaaaucugccauuu

SEQ ID NO: 31550 - RNA, 32 nt, Homo Sapiens
cagcaaaggucaccaggcucuccgcagcuauc

SEQ ID NO: 31551 - RNA, 32 nt, Homo Sapiens
uauuuugugauagaaaaauguuaauauuauuc

SEQ ID NO: 31552 - RNA, 32 nt, Homo Sapiens
gguaccucgcggggcgggagggagcggcugag

SEQ ID NO: 31553 - RNA, 32 nt, Homo Sapiens
gaagggugggucuagacauacuauauucagag

SEQ ID NO: 31554 - RNA, 32 nt, Homo Sapiens
augggaggaugacagaagugucugcagauggc

SEQ ID NO: 31555 - RNA, 32 nt, Homo Sapiens
cauugccugguagcugcagauucaaacccacc

SEQ ID NO: 31556 - RNA, 32 nt, Homo Sapiens
cgccccccgaccccggaucgaauccccgcccu

SEQ ID NO: 31557 - RNA, 32 nt, Homo Sapiens
uccagaaacuuuggagcuuucagcagaggcca

SEQ ID NO: 31558 - RNA, 32 nt, Homo Sapiens
cgugcccggguuaugacgacuaaucccaaacc

SEQ ID NO: 31559 - RNA, 30 nt, Homo Sapiens
uaccauaaaugcugcuauucugagagccau

SEQ ID NO: 31560 - RNA, 32 nt, Homo Sapiens
cauccucuguuguuacuagauuuaguuuaaaa

SEQ ID NO: 31561 - RNA, 32 nt, Homo Sapiens
gauaagaauagguugauacauguaucauaauc

SEQ ID NO: 31562 - RNA, 32 nt, Homo Sapiens
gugggccuuggcuggugcuggugccauggacu

SEQ ID NO: 31563 - RNA, 32 nt, Homo Sapiens
caagggcacagaccugagguugcucagaggcu

SEQ ID NO: 31564 - RNA, 32 nt, Homo Sapiens
cgacaggcuccgcagagcugccggccgacacc

SEQ ID NO: 31565 - RNA, 32 nt, Homo Sapiens
aauaaagauggcaacacaauuuuuucuccauu

SEQ ID NO: 31566 - RNA, 32 nt, Homo Sapiens
ugcugcugcugcugcugcugcugcugggggga

SEQ ID NO: 31567 - RNA, 32 nt, Homo Sapiens
uugcaggggaggccuggcugcagagaggcgga

SEQ ID NO: 31568 - RNA, 32 nt, Homo Sapiens
cagcuuagaacagcccuuggugagguggucau

SEQ ID NO: 31569 - RNA, 31 nt, Homo Sapiens
guuucugcaaggucugguuguuaaaaagagc

SEQ ID NO: 31570 - RNA, 29 nt, Homo Sapiens
uauaauuaaaguuuuauuugcuguaguuc

SEQ ID NO: 31571 - RNA, 32 nt, Homo Sapiens
guuuccucaguggauagcacucaauuuauucc

SEQ ID NO: 31572 - RNA, 32 nt, Homo Sapiens
ccuccaaaggcaagcucugugcuuuccagugg

SEQ ID NO: 31573 - RNA, 32 nt, Homo Sapiens
uaacagcuucucuauuugauauuugaaauucu

SEQ ID NO: 31574 - RNA, 32 nt, Homo Sapiens
gaaggaccuaaauaaacugugagccaccuuuu

SEQ ID NO: 31575 - RNA, 32 nt, Homo Sapiens
ugagagcacagcgggcuacccuggacaaagua

SEQ ID NO: 31576 - RNA, 32 nt, Homo Sapiens
gacguugcgcuguccgaggagcuccaugcggc

SEQ ID NO: 31577 - RNA, 32 nt, Homo Sapiens
ucucuaggaugaguuuagaacuguagcagugc

SEQ ID NO: 31578 - RNA, 32 nt, Homo Sapiens
gcccucaagagucuuucaaauguaucagucuu

SEQ ID NO: 31579 - RNA, 32 nt, Homo Sapiens
gugguguuugguuugccuggagaugccacguu

SEQ ID NO: 31580 - RNA, 32 nt, Homo Sapiens
agggcaaacugggcugauguaaauguuuuacu

SEQ ID NO: 31581 - RNA, 32 nt, Homo Sapiens
ugcauuuugguauauuuacuuguauuucaaca

SEQ ID NO: 31582 - RNA, 32 nt, Homo Sapiens
uuauguuuguacacaugaagcugauaaaagaa

SEQ ID NO: 31583 - RNA, 32 nt, Homo Sapiens
cagaaaaggugcccuucuagggagcgacaccc

SEQ ID NO: 31584 - RNA, 31 nt, Homo Sapiens
caguguccaaagaaagauaaaauguuauucu

SEQ ID NO: 31585 - RNA, 32 nt, Homo Sapiens
gcugugaaccccguauccugggccccacugcc

SEQ ID NO: 31586 - RNA, 32 nt, Homo Sapiens
cccauggcgcagagacccugacccuguggcag

SEQ ID NO: 31587 - RNA, 32 nt, Homo Sapiens
gggggcugggcugggggaagggcgagggcgag

SEQ ID NO: 31588 - RNA, 32 nt, Homo Sapiens
cuuggguuaauucuuggaugacgucggcguug

SEQ ID NO: 31589 - RNA, 32 nt, Homo Sapiens
ccgcgcgguccaucgcccacuggacgccgccc

SEQ ID NO: 31590 - RNA, 32 nt, Homo Sapiens
gauuauaaacugugucucgaccuguguuauuu

SEQ ID NO: 31591 - RNA, 31 nt, Homo Sapiens
uggaagggcaucuguuugccccgcuagcaac

SEQ ID NO: 31592 - RNA, 32 nt, Homo Sapiens
agccagcaaguauauagcacagaacacugugu

SEQ ID NO: 31593 - RNA, 32 nt, Homo Sapiens
gugugugugcgcgcgcgacgcgcgagugugcu

SEQ ID NO: 31594 - RNA, 32 nt, Homo Sapiens
cugccaggccccagcuuuguucccuggucccc

SEQ ID NO: 31595 - RNA, 32 nt, Homo Sapiens
ccccgccucccuccagcacuggcaccgagggg

SEQ ID NO: 31596 - RNA, 32 nt, Homo Sapiens
acauggagugauuguacauugcacauaucucc

SEQ ID NO: 31597 - RNA, 32 nt, Homo Sapiens
gccagcugggguggaggaucagucacacugcu

SEQ ID NO: 31598 - RNA, 32 nt, Homo Sapiens
uugugcuuuccuaacccccuuggaccuacucu

SEQ ID NO: 31599 - RNA, 32 nt, Homo Sapiens
aacuaaguugucacccaauaucuuagacacuu

SEQ ID NO: 31600 - RNA, 32 nt, Homo Sapiens
acugcgcggacguuggcgucaggaugaccaca

SEQ ID NO: 31601 - RNA, 32 nt, Homo Sapiens
guuuguccuuuauaaauuuucuuaaagauuaa

SEQ ID NO: 31602 - RNA, 32 nt, Homo Sapiens
acccugcuuaggaugggggauguggccagggg

SEQ ID NO: 31603 - RNA, 32 nt, Homo Sapiens
aguaacaaaaauacuggaauuauuaaaacgua

SEQ ID NO: 31604 - RNA, 32 nt, Homo Sapiens
gggucagugcgcgcugcccgucgcgcugucgg

SEQ ID NO: 31605 - RNA, 32 nt, Homo Sapiens
ucuacacagacaccugaggagcccccacaugc

SEQ ID NO: 31606 - RNA, 32 nt, Homo Sapiens
uagccacggagccccaccuggacacucaccau

SEQ ID NO: 31607 - RNA, 32 nt, Homo Sapiens
aucucagugucugcguuucaacuaacuuggau

SEQ ID NO: 31608 - RNA, 32 nt, Homo Sapiens
ggacugggagacgcugcugcaucuccgggaca

SEQ ID NO: 31609 - RNA, 32 nt, Homo Sapiens
ucugcgucgcaggccggcccggcggccgugac

SEQ ID NO: 31610 - RNA, 32 nt, Homo Sapiens
ggagcgaggguggcuuuggggugggggcuugu

SEQ ID NO: 31611 - RNA, 32 nt, Homo Sapiens
ucacugccaucccagaacucuguacuuacugc

SEQ ID NO: 31612 - RNA, 32 nt, Homo Sapiens
cugucucugaaucaauaugaccucacuuaaaa

SEQ ID NO: 31613 - RNA, 32 nt, Homo Sapiens
ggacgcaacugacugccccuccccuccucacg

SEQ ID NO: 31614 - RNA, 32 nt, Homo Sapiens
gcgccgcagcggggaaucugcaguaggucugc

SEQ ID NO: 31615 - RNA, 32 nt, Homo Sapiens
auuguaaacaauugucuagaaauucuggcagg

SEQ ID NO: 31616 - RNA, 32 nt, Homo Sapiens
agaccgagucuucuuuuuuuuaaacaaaaaca

SEQ ID NO: 31617 - RNA, 32 nt, Homo Sapiens
cagggccucuaacucuaaagcacauguuuuuu

SEQ ID NO: 31618 - RNA, 32 nt, Homo Sapiens
aauucagauauuaaauuggugguguugaaauc

SEQ ID NO: 31619 - RNA, 32 nt, Homo Sapiens
ccgacuugaaggugggggugcugccuggcucg

SEQ ID NO: 31620 - RNA, 28 nt, Homo Sapiens
auaaagaaagauucggcuuuuggcaauc

SEQ ID NO: 31621 - RNA, 32 nt, Homo Sapiens
acuuuuguaaaaacacugguuaauuuguauaa

SEQ ID NO: 31622 - RNA, 32 nt, Homo Sapiens
guguggggugagguagugaaaagggcgguagu

SEQ ID NO: 31623 - RNA, 32 nt, Homo Sapiens
acacacacauauauguauguauauuuuucuca

SEQ ID NO: 31624 - RNA, 32 nt, Homo Sapiens
uuuuguguggagggggagguaggacugggcug

SEQ ID NO: 31625 - RNA, 32 nt, Homo Sapiens
uuucaggugcacccuccuccuccaggaggcag

SEQ ID NO: 31626 - RNA, 32 nt, Homo Sapiens
ccuuuacuccucggggaacccaaggccccacu

SEQ ID NO: 31627 - RNA, 32 nt, Homo Sapiens
ggaagagaagacuggaugggccugcuugggau

SEQ ID NO: 31628 - RNA, 32 nt, Homo Sapiens
cagcuuuccaaauuaucagaagacauacacac

SEQ ID NO: 31629 - RNA, 32 nt, Homo Sapiens
gcgaagcccagcugcgcgcgccuugggauuga

SEQ ID NO: 31630 - RNA, 32 nt, Homo Sapiens
cuugcucugaagauuucccgguggcugucaug

SEQ ID NO: 31631 - RNA, 32 nt, Homo Sapiens
gugggugcugagggagcgccagagugcgcuac

SEQ ID NO: 31632 - RNA, 32 nt, Homo Sapiens
auauguuaaaaauaaagagauguagaaaucua

SEQ ID NO: 31633 - RNA, 32 nt, Homo Sapiens
aggaauauuucuauaguaaauggaguuuuuaa

SEQ ID NO: 31634 - RNA, 32 nt, Homo Sapiens
caucccgcaucgcuauuggaccucugagacuu

SEQ ID NO: 31635 - RNA, 32 nt, Homo Sapiens
uggccgggcucaacgcgcugcugcugcugcuc

SEQ ID NO: 31636 - RNA, 32 nt, Homo Sapiens
cgaggcggaggcgcaggaagggggcggcgagu

SEQ ID NO: 31637 - RNA, 32 nt, Homo Sapiens
uuuuuaaggauagguuaaauuugugaaugauc

SEQ ID NO: 31638 - RNA, 32 nt, Homo Sapiens
gcagauuuauggagcucacacggaugcaacag

SEQ ID NO: 31639 - RNA, 32 nt, Homo Sapiens
aguuucacacugagagagaaauguagauaacc

SEQ ID NO: 31640 - RNA, 32 nt, Homo Sapiens
uucaucugcagcacguuucuuccuccugcagu

SEQ ID NO: 31641 - RNA, 32 nt, Homo Sapiens
gaguuuggaaguuuggggggucuuauguuugu

SEQ ID NO: 31642 - RNA, 32 nt, Homo Sapiens
caccucccaucucuccuuccaggcccaucccu

SEQ ID NO: 31643 - RNA, 32 nt, Homo Sapiens
uauaacagaaaagaggaagaggagaauggaug

SEQ ID NO: 31644 - RNA, 32 nt, Homo Sapiens
aaugucauuguggauguuaccuuuuucagauc

SEQ ID NO: 31645 - RNA, 32 nt, Homo Sapiens
aaucccaguccuaacagaaguacugcgaaucu

SEQ ID NO: 31646 - RNA, 32 nt, Homo Sapiens
gacuuuaucccauggaaccuucacgugucagg

SEQ ID NO: 31647 - RNA, 32 nt, Homo Sapiens
gaaaaaagaauaagaaugaaaacugcugacgu

SEQ ID NO: 31648 - RNA, 32 nt, Homo Sapiens
ucagauuuuaaaaucaguuuugaaagugguuc

SEQ ID NO: 31649 - RNA, 32 nt, Homo Sapiens
ccauguccuuucagcccucaacgcccccauuc

SEQ ID NO: 31650 - RNA, 32 nt, Homo Sapiens
acacaguucaacauaaagagcaauaaauguuu

SEQ ID NO: 31651 - RNA, 32 nt, Homo Sapiens
acagcuuggauuuugggggguguagcacauug

SEQ ID NO: 31652 - RNA, 32 nt, Homo Sapiens
uaaagaugaugaugauaacccauuccaguaca

SEQ ID NO: 31653 - RNA, 32 nt, Homo Sapiens
ccccucggccccacggcccauacucaccccuu

SEQ ID NO: 31654 - RNA, 32 nt, Homo Sapiens
ccucuggcucuuacauaacaaacaucaucauc

SEQ ID NO: 31655 - RNA, 32 nt, Homo Sapiens
ccgccaacgaugcaagugugacugcuggcguc

SEQ ID NO: 31656 - RNA, 32 nt, Homo Sapiens
gggagaaggaauguuacugaaaauauaggcca

SEQ ID NO: 31657 - RNA, 32 nt, Homo Sapiens
ccaccccuacccgaccccggcgcccgggcucc

SEQ ID NO: 31658 - RNA, 32 nt, Homo Sapiens
aguggggcagugccuccccgccgcgcuggcgu

SEQ ID NO: 31659 - RNA, 32 nt, Homo Sapiens
ggggguggggagaggcugggccgggggagggg

SEQ ID NO: 31660 - RNA, 32 nt, Homo Sapiens
cuucaggauguuucuucaggacuuccucagcu

SEQ ID NO: 31661 - RNA, 32 nt, Homo Sapiens
cugaggucaggaguuugagaccagacugacca

SEQ ID NO: 31662 - RNA, 32 nt, Homo Sapiens
augaggucaggaguuugagaccagccugacca

SEQ ID NO: 31663 - RNA, 32 nt, Homo Sapiens
gcaccugccaugugcagacuaguggaggcuuc

SEQ ID NO: 31664 - RNA, 32 nt, Homo Sapiens
cuauacauuucccugaagcuuuccagauaagc

SEQ ID NO: 31665 - RNA, 32 nt, Homo Sapiens
gcguccuuguagcagagcaguuucuugccgcu

SEQ ID NO: 31666 - RNA, 32 nt, Homo Sapiens
caggaugcugcuuaugagggcuccacagacag

SEQ ID NO: 31667 - RNA, 32 nt, Homo Sapiens
acacgaaccgguaaacucuccucaagcuccca

SEQ ID NO: 31668 - RNA, 32 nt, Homo Sapiens
gcgggaccugggcaggggcgcccggagcaggc

SEQ ID NO: 31669 - RNA, 31 nt, Homo Sapiens
gggcagggggcggugccacggccugccagcc

SEQ ID NO: 31670 - RNA, 32 nt, Homo Sapiens
uccccagucucaaggggaagccaggccaauga

SEQ ID NO: 31671 - RNA, 32 nt, Homo Sapiens
cgggacccggcaugcugcccggaccggcgcuc

SEQ ID NO: 31672 - RNA, 32 nt, Homo Sapiens
uggccuauuuuccuguggauagacuaagcaaa

SEQ ID NO: 31673 - RNA, 32 nt, Homo Sapiens
agaugccgauucugaaacaggucuggagugag

SEQ ID NO: 31674 - RNA, 32 nt, Homo Sapiens
gcaggugagggaggcggcggccagcgacgcgg

SEQ ID NO: 31675 - RNA, 32 nt, Homo Sapiens
aggaacacugaugaguugugggacauuauggu

SEQ ID NO: 31676 - RNA, 32 nt, Homo Sapiens
ucccccuccucucuggcagggaucucagauga

SEQ ID NO: 31677 - RNA, 32 nt, Homo Sapiens
ccagaagacuggaucaagggguucccacuggc

SEQ ID NO: 31678 - RNA, 32 nt, Homo Sapiens
aaggaacuugccuugucucagaugagacuuug

SEQ ID NO: 31679 - RNA, 32 nt, Homo Sapiens
gagaucuuuaggggcggguaggggaagagggu

SEQ ID NO: 31680 - RNA, 32 nt, Homo Sapiens
ucuucugagaugucuguaaggauuuuacccag

SEQ ID NO: 31681 - RNA, 32 nt, Homo Sapiens
ggaugcuggggucuggagugaacaucuccucc

SEQ ID NO: 31682 - RNA, 32 nt, Homo Sapiens
cuccccccaaccccugaacucaagccccagca

SEQ ID NO: 31683 - RNA, 32 nt, Homo Sapiens
cagggaagccccacauguccagcaccuugugc

SEQ ID NO: 31684 - RNA, 32 nt, Homo Sapiens
cugauuuuuccucccuucucccccaaccucca

SEQ ID NO: 31685 - RNA, 32 nt, Homo Sapiens
aucugaugcuauucucuuuuaguuuuucuucu

SEQ ID NO: 31686 - RNA, 32 nt, Homo Sapiens
ggugguugaaaaguuaaaauguaugugccaag

SEQ ID NO: 31687 - RNA, 32 nt, Homo Sapiens
auaauuuugauagugggaccacauacguaaaa

SEQ ID NO: 31688 - RNA, 32 nt, Homo Sapiens
ccgcccccgcggcuccuggccagaccaccccu

SEQ ID NO: 31689 - RNA, 32 nt, Homo Sapiens
ccuggcuccuggcaccuguaccucuggacucu

SEQ ID NO: 31690 - RNA, 32 nt, Homo Sapiens
gcuuauucuacaaucaaggcauaugaugaaau

SEQ ID NO: 31691 - RNA, 32 nt, Homo Sapiens
ccuuggucuuuuggccucuuuacccuguguuu

SEQ ID NO: 31692 - RNA, 32 nt, Homo Sapiens
gaaacgaggaggaggaugucucaccgggcggc

SEQ ID NO: 31693 - RNA, 32 nt, Homo Sapiens
aauuuuucuggugggguguugcuggagcagau

SEQ ID NO: 31694 - RNA, 32 nt, Homo Sapiens
agacagugggucugugagagaccgaauagagg

SEQ ID NO: 31695 - RNA, 32 nt, Homo Sapiens
ccugucccaagccuggggugcucuucuccacc

SEQ ID NO: 31696 - RNA, 32 nt, Homo Sapiens
agacccuggcuuggaaagugaacuugcagccu

SEQ ID NO: 31697 - RNA, 32 nt, Homo Sapiens
aucauaugaagauaacgccuucccuaagucac

SEQ ID NO: 31698 - RNA, 32 nt, Homo Sapiens
uuccuuuuccuuucuuuuuuuuuuucccuauu

SEQ ID NO: 31699 - RNA, 32 nt, Homo Sapiens
agacucgccgggggcccggcgaggguauguca

SEQ ID NO: 31700 - RNA, 32 nt, Homo Sapiens
uagugugaaaggaaacaaagaaugcaggaaaa

SEQ ID NO: 31701 - RNA, 32 nt, Homo Sapiens
augaggcucuccgcccggggccggcccgggga

SEQ ID NO: 31702 - RNA, 32 nt, Homo Sapiens
aucaauuauacccaccaacaccacugaaauca

SEQ ID NO: 31703 - RNA, 32 nt, Homo Sapiens
gucuauaaaaauugugugcuaccaaagaucug

SEQ ID NO: 31704 - RNA, 32 nt, Homo Sapiens
cgacaauaugucaggaaagaaaaaagauccca

SEQ ID NO: 31705 - RNA, 32 nt, Homo Sapiens
auaucuggacucucuuguauuauaggauuuuu

SEQ ID NO: 31706 - RNA, 32 nt, Homo Sapiens
gugaagggcacagucgaggucugugccagugc

SEQ ID NO: 31707 - RNA, 32 nt, Homo Sapiens
agcgguggacccaggcggccaugucccgcccu

SEQ ID NO: 31708 - RNA, 32 nt, Homo Sapiens
aggugaaaguccaauggaugacaaaagcaugg

SEQ ID NO: 31709 - RNA, 32 nt, Homo Sapiens
gcagagacagaugccucgguucuuugucauuc

SEQ ID NO: 31710 - RNA, 32 nt, Homo Sapiens
cuucccccgccuuucuucccuccgcgacccgg

SEQ ID NO: 31711 - RNA, 32 nt, Homo Sapiens
cauaagaaauaugggaugcuuaccacaguguu

SEQ ID NO: 31712 - RNA, 32 nt, Homo Sapiens
ggaagacuuccacugggccugcuuuuccugag

SEQ ID NO: 31713 - RNA, 32 nt, Homo Sapiens
gagacucgcccuuggcucggcccgcggccccg

SEQ ID NO: 31714 - RNA, 32 nt, Homo Sapiens
ggaaggauuuuguuuagaauuaauggaguggc

SEQ ID NO: 31715 - RNA, 32 nt, Homo Sapiens
gacacaaguucagagaagggcagagcuggcug

SEQ ID NO: 31716 - RNA, 32 nt, Homo Sapiens
ggaucuuccgcuggcccggggugcucccagcc

SEQ ID NO: 31717 - RNA, 32 nt, Homo Sapiens
accugugugggcgugaaagcugauuggcauug

SEQ ID NO: 31718 - RNA, 32 nt, Homo Sapiens
uguuuguugcugaaaugcuacuuuuuaaaauu

SEQ ID NO: 31719 - RNA, 32 nt, Homo Sapiens
ugcgcguggauccgagcgaccaugguggcccg

SEQ ID NO: 31720 - RNA, 32 nt, Homo Sapiens
ccucccacagccuccuucuguuugucgagcau

SEQ ID NO: 31721 - RNA, 25 nt, Homo Sapiens
auggccccgccgcuccugcugcugc

SEQ ID NO: 31722 - RNA, 32 nt, Homo Sapiens
ugccccuggagccccagcccugccuucaugcu

SEQ ID NO: 31723 - RNA, 32 nt, Homo Sapiens
cuacauaaugaaaaagaagaacagaccauuua

SEQ ID NO: 31724 - RNA, 32 nt, Homo Sapiens
gugaccuucagcaaguuuuaaaauagugacua

SEQ ID NO: 31725 - RNA, 32 nt, Homo Sapiens
uagcaggagaucugggguaugcagaggggcag

SEQ ID NO: 31726 - RNA, 32 nt, Homo Sapiens
uugaggaugguaguuuuuguggagcacaaucc

SEQ ID NO: 31727 - RNA, 32 nt, Homo Sapiens
gaauucuuauucaaauacaguuguauuaaaga

SEQ ID NO: 31728 - RNA, 32 nt, Homo Sapiens
gcuuuccuaccuucuucaggcugccuaagaca

SEQ ID NO: 31729 - RNA, 32 nt, Homo Sapiens
ugaacuguuaacuauuugaucuuuggauguaa

SEQ ID NO: 31730 - RNA, 32 nt, Homo Sapiens
aaauguguaucuaggcacuuuggaauuugacc

SEQ ID NO: 31731 - RNA, 32 nt, Homo Sapiens
aggcaauccacccacccaugaggggaaacgug

SEQ ID NO: 31732 - RNA, 32 nt, Homo Sapiens
cccucuccucagugcacuuuggcauuugcacg

SEQ ID NO: 31733 - RNA, 29 nt, Homo Sapiens
uaugaggcaaauuuauauuuuuuaauauc

SEQ ID NO: 31734 - RNA, 32 nt, Homo Sapiens
aaaaaaaaaaauuuauuuguguauaacuuuaa

SEQ ID NO: 31735 - RNA, 32 nt, Homo Sapiens
caccugugcuccugggggccccggccugccaa

SEQ ID NO: 31736 - RNA, 32 nt, Homo Sapiens
caaaugaggcgcuuuagccgucuccacggcca

SEQ ID NO: 31737 - RNA, 32 nt, Homo Sapiens
ccaggccuuccuaaguuuuuguuaguuguguc

SEQ ID NO: 31738 - RNA, 32 nt, Homo Sapiens
gugcacaccaccacaccuagccugcaggaugu

SEQ ID NO: 31739 - RNA, 32 nt, Homo Sapiens
cucgcacucccgcuccuccgcccgaccgcgcg

SEQ ID NO: 31740 - RNA, 32 nt, Homo Sapiens
gacucgaacuggcgccaggaaauauuaggaag

SEQ ID NO: 31741 - RNA, 32 nt, Homo Sapiens
cagcugccuccuccacucagcauuccauggac

SEQ ID NO: 31742 - RNA, 32 nt, Homo Sapiens
uagcugggaccucaggcgcgcgccaccacgcc

SEQ ID NO: 31743 - RNA, 32 nt, Homo Sapiens
cuagguaggaaggcccuauauugguccccagc

SEQ ID NO: 31744 - RNA, 32 nt, Homo Sapiens
gacggcgggcaugacggcuacaggaugggcgc

SEQ ID NO: 31745 - RNA, 32 nt, Homo Sapiens
aauaccaggaccaguuuauguuugugguuuug

SEQ ID NO: 31746 - RNA, 32 nt, Homo Sapiens
ccaggacggcuggugucccccgcggccugcga

SEQ ID NO: 31747 - RNA, 32 nt, Homo Sapiens
gguaucacagaaagacaacugggauauuggug

SEQ ID NO: 31748 - RNA, 32 nt, Homo Sapiens
uggcucugcuccagguggagaagggggaugau

SEQ ID NO: 31749 - RNA, 32 nt, Homo Sapiens
auaauaaaaaaauuagugaguauaaaaaaaaa

SEQ ID NO: 31750 - RNA, 32 nt, Homo Sapiens
accugccugccagugcaggcacuggucaguca

SEQ ID NO: 31751 - RNA, 32 nt, Homo Sapiens
cacggcccaccacccugccgcugcugauccca

SEQ ID NO: 31752 - RNA, 32 nt, Homo Sapiens
ucauguauuuacugguuuuucuuguaucuggu

SEQ ID NO: 31753 - RNA, 32 nt, Homo Sapiens
gcuuccacccucaugaacacagggauugggga

SEQ ID NO: 31754 - RNA, 32 nt, Homo Sapiens
auuuuaagcauuacucugguaagauuuugaaa

SEQ ID NO: 31755 - RNA, 30 nt, Homo Sapiens
ccccagcagcccgugccugcgccaucucca

SEQ ID NO: 31756 - RNA, 32 nt, Homo Sapiens
ucagcaauacuaauauucucauuuuuaaacau

SEQ ID NO: 31757 - RNA, 32 nt, Homo Sapiens
cgccugccugcccgccacugcccgcugagccu

SEQ ID NO: 31758 - RNA, 32 nt, Homo Sapiens
ccucauuaguccuuuucuucauccccuauggg

SEQ ID NO: 31759 - RNA, 32 nt, Homo Sapiens
gcgcacuuccaccucugccccaucccaacugc

SEQ ID NO: 31760 - RNA, 32 nt, Homo Sapiens
ggcuucagccccaagggcaucuccagccucag

SEQ ID NO: 31761 - RNA, 32 nt, Homo Sapiens
gaucauggagcuuaguuuuaauuuagauagca

SEQ ID NO: 31762 - RNA, 32 nt, Homo Sapiens
guacuuaauguuuaauaccuuauuugaauaau

SEQ ID NO: 31763 - RNA, 32 nt, Homo Sapiens
aauuugacaacgucauuaagaaggauacacuu

SEQ ID NO: 31764 - RNA, 32 nt, Homo Sapiens
aagaagguuaccgaggggaaggaacuaaaggu

SEQ ID NO: 31765 - RNA, 32 nt, Homo Sapiens
uuguuuagaaaguuggguggcuucauucagca

SEQ ID NO: 31766 - RNA, 32 nt, Homo Sapiens
uccuauuguuucugccacagggacuuccuugg

SEQ ID NO: 31767 - RNA, 32 nt, Homo Sapiens
uggggccucccauugacauccucccccuacac

SEQ ID NO: 31768 - RNA, 31 nt, Homo Sapiens
gcaacugcaaagaaaacagaauguugacugu

SEQ ID NO: 31769 - RNA, 32 nt, Homo Sapiens
aaccuaguuuuaucaccauauccaccagcagg

SEQ ID NO: 31770 - RNA, 32 nt, Homo Sapiens
gggagcccugccucuggugcuggcaagggauu

SEQ ID NO: 31771 - RNA, 32 nt, Homo Sapiens
ccuuaauggcauauaaaugaaacuacauagca

SEQ ID NO: 31772 - RNA, 32 nt, Homo Sapiens
caccgccagcccgggagagcugccgggaguuc

SEQ ID NO: 31773 - RNA, 32 nt, Homo Sapiens
acuggucuuguacagguugaaaaaugccuucc

SEQ ID NO: 31774 - RNA, 32 nt, Homo Sapiens
accucuauugguuuuuguaaugacuccaucaa

SEQ ID NO: 31775 - RNA, 32 nt, Homo Sapiens
uuggaauuuucugcauguaggagcguccuuug

SEQ ID NO: 31776 - RNA, 32 nt, Homo Sapiens
agucaguuaacagauugguauuucagcaggau

SEQ ID NO: 31777 - RNA, 32 nt, Homo Sapiens
gccaggcgcuggccguggugcugauucuguca

SEQ ID NO: 31778 - RNA, 32 nt, Homo Sapiens
acauuugaagcugcuguaaaucuuugucaaua

SEQ ID NO: 31779 - RNA, 32 nt, Homo Sapiens
cuucuucccugagcucacccagccccagcucc

SEQ ID NO: 31780 - RNA, 32 nt, Homo Sapiens
cgggcaaaguuuuugucugugcauguguaucu

SEQ ID NO: 31781 - RNA, 32 nt, Homo Sapiens
cucaggcccuccccucccaugcaggccgauga

SEQ ID NO: 31782 - RNA, 31 nt, Homo Sapiens
cgggaggccccgcuuguuccccgcgcccgcg

SEQ ID NO: 31783 - RNA, 32 nt, Homo Sapiens
cggggccggagcgggggcgggugggggcguaa

SEQ ID NO: 31784 - RNA, 32 nt, Homo Sapiens
acucuaucuucagauuauucagcuucuccacc

SEQ ID NO: 31785 - RNA, 32 nt, Homo Sapiens
auuauggagauggucuaucugaugcugaaaau

SEQ ID NO: 31786 - RNA, 32 nt, Homo Sapiens
agcaggagccugugggucuucugucuggagca

SEQ ID NO: 31787 - RNA, 32 nt, Homo Sapiens
ugauccccaccccacacccugccuccuacaag

SEQ ID NO: 31788 - RNA, 32 nt, Homo Sapiens
ugucccgugaagcugcuugacauccuguggag

SEQ ID NO: 31789 - RNA, 32 nt, Homo Sapiens
agcugcuucucugcuuuggggugucuggccuc

SEQ ID NO: 31790 - RNA, 32 nt, Homo Sapiens
auauuugcaauaaaaaagugagcuuuuauauu

SEQ ID NO: 31791 - RNA, 32 nt, Homo Sapiens
gugggcuuucugcggccgcugagggcgcgucu

SEQ ID NO: 31792 - RNA, 32 nt, Homo Sapiens
cguuaagacuauuuuuuuuuuaaagaaacaac

SEQ ID NO: 31793 - RNA, 32 nt, Homo Sapiens
caucaagggagcaaagaauaagugggaguuuu

SEQ ID NO: 31794 - RNA, 32 nt, Homo Sapiens
agccugcgcgcgccgcgcccugugucuccggg

SEQ ID NO: 31795 - RNA, 32 nt, Homo Sapiens
aaacaccuccccagcccccagcccuccccgca

SEQ ID NO: 31796 - RNA, 32 nt, Homo Sapiens
accucagucuauuauguaaaauuaaaaauaug

SEQ ID NO: 31797 - RNA, 32 nt, Homo Sapiens
uugugcauucugggggcucccggucagccugu

SEQ ID NO: 31798 - RNA, 32 nt, Homo Sapiens
ucacuccaaacacuacugauucagcauuguuu

SEQ ID NO: 31799 - RNA, 32 nt, Homo Sapiens
ggcaggggccagcaggcugcagcugcuggaug

SEQ ID NO: 31800 - RNA, 32 nt, Homo Sapiens
aaauauugcauucuuuguuuggauucugagaa

SEQ ID NO: 31801 - RNA, 32 nt, Homo Sapiens
uuagugggaugaagaaagaaaagcaggggugc

SEQ ID NO: 31802 - RNA, 32 nt, Homo Sapiens
ggcagcggcgagaucucggcucacugcaaccu

SEQ ID NO: 31803 - RNA, 32 nt, Homo Sapiens
agguugagaagcugaguggaagcaaaacuguc

SEQ ID NO: 31804 - RNA, 27 nt, Homo Sapiens
caauggcgucaccgcacggccuuuuug

SEQ ID NO: 31805 - RNA, 32 nt, Homo Sapiens
aauccaccaaggaaauggcacauguggagagc

SEQ ID NO: 31806 - RNA, 32 nt, Homo Sapiens
ggcuuuuucuucccuugggcaugagucagaua

SEQ ID NO: 31807 - RNA, 32 nt, Homo Sapiens
cuguaccaacagaggagggaucaugaguugcc

SEQ ID NO: 31808 - RNA, 32 nt, Homo Sapiens
ugucuugucaccccauuucucaucagaacaaa

SEQ ID NO: 31809 - RNA, 32 nt, Homo Sapiens
ggggaggaaaggaaaaggauggacaaccacaa

SEQ ID NO: 31810 - RNA, 32 nt, Homo Sapiens
gcuauacauaaauuauuaagaaauauggauuu

SEQ ID NO: 31811 - RNA, 32 nt, Homo Sapiens
uuugauuguuauuaggaccaucuagagauuuc

SEQ ID NO: 31812 - RNA, 32 nt, Homo Sapiens
guagucauuggggggaaaauguagccacauuu

SEQ ID NO: 31813 - RNA, 32 nt, Homo Sapiens
gacuggacgcauuuuuauacauaggguaagcg

SEQ ID NO: 31814 - RNA, 32 nt, Homo Sapiens
gucgggaggaggaggggcaaaggccgcgcucc

SEQ ID NO: 31815 - RNA, 32 nt, Homo Sapiens
agaggugcuagcucuuaccaaaacagauggua

SEQ ID NO: 31816 - RNA, 32 nt, Homo Sapiens
uuagcagcaaccgaauauaccaggcaaaacuc

SEQ ID NO: 31817 - RNA, 32 nt, Homo Sapiens
ucggccgagcgugcaacccggagccgccuugg

SEQ ID NO: 31818 - RNA, 32 nt, Homo Sapiens
gugccucccuccccugucaagccaguucuuuc

SEQ ID NO: 31819 - RNA, 31 nt, Homo Sapiens
acccagggauaaaaacagagaucauugucuu

SEQ ID NO: 31820 - RNA, 32 nt, Homo Sapiens
guuauagauuaagagaauagaggcauguuuca

SEQ ID NO: 31821 - RNA, 32 nt, Homo Sapiens
gcgcucaggaccacccucuucuccgccgccuu

SEQ ID NO: 31822 - RNA, 32 nt, Homo Sapiens
agcccaccguguauagagauauaaauagaggg

SEQ ID NO: 31823 - RNA, 32 nt, Homo Sapiens
guuuuggggaagcucaaggaagagguaccagg

SEQ ID NO: 31824 - RNA, 32 nt, Homo Sapiens
gugaauugggauuugcagagaugaaaaagacu

SEQ ID NO: 31825 - RNA, 32 nt, Homo Sapiens
accagggcaggcagaugggggcggcggcacac

SEQ ID NO: 31826 - RNA, 32 nt, Homo Sapiens
cccucuugauaaaaauguggauugagaucaag

SEQ ID NO: 31827 - RNA, 32 nt, Homo Sapiens
agauucaaacagagacucccagucccccucag

SEQ ID NO: 31828 - RNA, 32 nt, Homo Sapiens
ucugugagaaaacggacuuucuuuuggauuuu

SEQ ID NO: 31829 - RNA, 32 nt, Homo Sapiens
ccaauaauuuaaagauugauaugcuaaaaaca

SEQ ID NO: 31830 - RNA, 32 nt, Homo Sapiens
aagagacuguaauccgugucgucagccuggga

SEQ ID NO: 31831 - RNA, 32 nt, Homo Sapiens
gucuaagguggcugcuucuuccgcaaccauga

SEQ ID NO: 31832 - RNA, 32 nt, Homo Sapiens
ccuuguaaaaucgggccaaaccccaagacagc

SEQ ID NO: 31833 - RNA, 32 nt, Homo Sapiens
cugguaguaagacacgagagccuucuaaugcc

SEQ ID NO: 31834 - RNA, 32 nt, Homo Sapiens
uuugagacagaguuucacucuuguugcccagg

SEQ ID NO: 31835 - RNA, 32 nt, Homo Sapiens
guguaauaacguuaaacugaagaaauaaccau

SEQ ID NO: 31836 - RNA, 32 nt, Homo Sapiens
aacagaugcccauuuguuggcuguuuuucauu

SEQ ID NO: 31837 - RNA, 32 nt, Homo Sapiens
accuccccgcggcgcccgcagcgcggagucca

SEQ ID NO: 31838 - RNA, 32 nt, Homo Sapiens
ugcaucacuccccuccucucccuuccugugug

SEQ ID NO: 31839 - RNA, 32 nt, Homo Sapiens
aauggcauggaagagacagucuacagagagcu

SEQ ID NO: 31840 - RNA, 32 nt, Homo Sapiens
gguuccagguuuuacuggcugcaccacacccc

SEQ ID NO: 31841 - RNA, 32 nt, Homo Sapiens
aaaaggaagccuuuuaaauauucuuuuuaauu

SEQ ID NO: 31842 - RNA, 32 nt, Homo Sapiens
accauccccuucugcuguaaccucugagggag

SEQ ID NO: 31843 - RNA, 32 nt, Homo Sapiens
aaagaggaaggaagggaggucuguggucauac

SEQ ID NO: 31844 - RNA, 32 nt, Homo Sapiens
gauaccaauagagagguuuucuuaauuaacaa

SEQ ID NO: 31845 - RNA, 32 nt, Homo Sapiens
ggaaucuuuucugcaccaaagcugcuucuaaa

SEQ ID NO: 31846 - RNA, 32 nt, Homo Sapiens
aggccccuuccucccuucccccggccccccgg

SEQ ID NO: 31847 - RNA, 28 nt, Homo Sapiens
cucccacaccccugugcccccggaauuc

SEQ ID NO: 31848 - RNA, 32 nt, Homo Sapiens
cuuaugagugcggcuagugccagccacugugu

SEQ ID NO: 31849 - RNA, 32 nt, Homo Sapiens
ugagauuaauacuaaaacuuugaaacguuuua

SEQ ID NO: 31850 - RNA, 32 nt, Homo Sapiens
uaugcucugugcuaguaggguggauucaguaa

SEQ ID NO: 31851 - RNA, 32 nt, Homo Sapiens
cuggcccgcaugcugagagcgcagagauacca

SEQ ID NO: 31852 - RNA, 32 nt, Homo Sapiens
agaccucucucagauagccauaaaagacccuu

SEQ ID NO: 31853 - RNA, 32 nt, Homo Sapiens
gguggucguagcgucuccgagaccgcggacuc

SEQ ID NO: 31854 - RNA, 32 nt, Homo Sapiens
ggacccaggaacucagcuuccaaacaucugca

SEQ ID NO: 31855 - RNA, 32 nt, Homo Sapiens
cuaggagcugucuccaggauggugcaggaugg

SEQ ID NO: 31856 - RNA, 32 nt, Homo Sapiens
uggagcggcggcgggggcggguaugccgggcg

SEQ ID NO: 31857 - RNA, 32 nt, Homo Sapiens
agagaggccauggccugggaugcgggcccuuc

SEQ ID NO: 31858 - RNA, 32 nt, Homo Sapiens
uuguuauguaagcuuacccagcccggcgcaca

SEQ ID NO: 31859 - RNA, 32 nt, Homo Sapiens
uuuuuguguauaagcuuuuaaggucugacuga

SEQ ID NO: 31860 - RNA, 32 nt, Homo Sapiens
ggaaaaucuuuuucagaaaauucauaaaaguu

SEQ ID NO: 31861 - RNA, 32 nt, Homo Sapiens
ggcggggagcagccgggguuaugcugggcaag

SEQ ID NO: 31862 - RNA, 32 nt, Homo Sapiens
cacagccccuggagagggggccaggcacaccc

SEQ ID NO: 31863 - RNA, 32 nt, Homo Sapiens
ugcugcugaggguggagggaggccaagcugcc

SEQ ID NO: 31864 - RNA, 32 nt, Homo Sapiens
aagagaccaagagcuugauuuccagggcacag

SEQ ID NO: 31865 - RNA, 32 nt, Homo Sapiens
aggacuuucacagauagcuuugggcuuaaggu

SEQ ID NO: 31866 - RNA, 32 nt, Homo Sapiens
ugggguagagcacucuccguccugcugcuggc

SEQ ID NO: 31867 - RNA, 32 nt, Homo Sapiens
gagagcgggaugcuggccggccgcgccuggcu

SEQ ID NO: 31868 - RNA, 32 nt, Homo Sapiens
uccucaccaaccccagcuguggccauguggag

SEQ ID NO: 31869 - RNA, 32 nt, Homo Sapiens
uguauucuuuuaugaaacaucuguuccuaucc

SEQ ID NO: 31870 - RNA, 32 nt, Homo Sapiens
accgcgcccggcccuuuuccugccuccuaaac

SEQ ID NO: 31871 - RNA, 32 nt, Homo Sapiens
gcaacaaaacaucagcaggaugcggaaggucc

SEQ ID NO: 31872 - RNA, 29 nt, Homo Sapiens
caauauggcggcgaucggccgcggccgcu

SEQ ID NO: 31873 - RNA, 32 nt, Homo Sapiens
gccacagaaacagccucugugccuugggaaaa

SEQ ID NO: 31874 - RNA, 32 nt, Homo Sapiens
aggggccccccgccugccagcuccagacaggg

SEQ ID NO: 31875 - RNA, 32 nt, Homo Sapiens
uaccacuacaaagucaucauaaaccauacauc

SEQ ID NO: 31876 - RNA, 32 nt, Homo Sapiens
aagcugaggcaggggagggagccacagaaagc

SEQ ID NO: 31877 - RNA, 32 nt, Homo Sapiens
aaugugcacugaauuuguuuucuuuucaacua

SEQ ID NO: 31878 - RNA, 32 nt, Homo Sapiens
gaacaccgacccagggaaugggcuccugccac

SEQ ID NO: 31879 - RNA, 32 nt, Homo Sapiens
cuccguaaccucuccccuguaccugugccaag

SEQ ID NO: 31880 - RNA, 29 nt, Homo Sapiens
uggugcuggagguucaggacgccguccag

SEQ ID NO: 31881 - RNA, 32 nt, Homo Sapiens
aaagauguuguaaucacaucugcauguccuaa

SEQ ID NO: 31882 - RNA, 32 nt, Homo Sapiens
aggaauggaaccuggagcuagaauuaauugcc

SEQ ID NO: 31883 - RNA, 32 nt, Homo Sapiens
uucuuacacacacugccagagauacucuaggc

SEQ ID NO: 31884 - RNA, 32 nt, Homo Sapiens
gccaagagcgcuacccacauugaaagaaugaa

SEQ ID NO: 31885 - RNA, 32 nt, Homo Sapiens
gcccagcuguaaaauuccucucuuuguacuuu

SEQ ID NO: 31886 - RNA, 32 nt, Homo Sapiens
uucacuuuuggaggggacccuugaauguuagu

SEQ ID NO: 31887 - RNA, 32 nt, Homo Sapiens
caggagcugcugucaccuggaaaacacguggc

SEQ ID NO: 31888 - RNA, 28 nt, Homo Sapiens
guucacuugaguuuacauuugaaaugug

SEQ ID NO: 31889 - RNA, 32 nt, Homo Sapiens
cgggacacuagccugcccccucuguuugcgcc

SEQ ID NO: 31890 - RNA, 32 nt, Homo Sapiens
ggaccuguuggcagaagggaaugucacucccu

SEQ ID NO: 31891 - RNA, 32 nt, Homo Sapiens
ugucauuaaaauuguuaccacugguaacaugu

SEQ ID NO: 31892 - RNA, 32 nt, Homo Sapiens
ugcaacacuccagucccuuuuagugcuggugg

SEQ ID NO: 31893 - RNA, 32 nt, Homo Sapiens
cuaacauaguuuggaagaaaaauugaguagug

SEQ ID NO: 31894 - RNA, 32 nt, Homo Sapiens
gaggaggauggcacgagggcagugcgugccgc

SEQ ID NO: 31895 - RNA, 32 nt, Homo Sapiens
ccaugggugaugcuccugaggaccuguaccac

SEQ ID NO: 31896 - RNA, 32 nt, Homo Sapiens
acuuaaagaacaaaaaucaucugguaauucuu

SEQ ID NO: 31897 - RNA, 32 nt, Homo Sapiens
gccagaaagacauuucaagauagaugcuucag

SEQ ID NO: 31898 - RNA, 32 nt, Homo Sapiens
accggggaacagugguuacucacaaggcaaua

SEQ ID NO: 31899 - RNA, 32 nt, Homo Sapiens
ucgugcaggggaggacagcaucggagaucaca

SEQ ID NO: 31900 - RNA, 32 nt, Homo Sapiens
uggggccgccgcgcgcuccuaggcgcagcggg

SEQ ID NO: 31901 - RNA, 32 nt, Homo Sapiens
uucgcgaccaucacgcaccuccccuccgcuug

SEQ ID NO: 31902 - RNA, 32 nt, Homo Sapiens
auuuguacaggguuuaucuuuaucauacuaaa

SEQ ID NO: 31903 - RNA, 32 nt, Homo Sapiens
uuauuuuuuuuuauuuugagacggaguuuugc

SEQ ID NO: 31904 - RNA, 32 nt, Homo Sapiens
auguacucagaacuuuguguugugaaacgaug

SEQ ID NO: 31905 - RNA, 32 nt, Homo Sapiens
auucaaccauauauuuauuuggaaccuacugu

SEQ ID NO: 31906 - RNA, 32 nt, Homo Sapiens
gagcgcccgggcgcaccccggcuucccggagc

SEQ ID NO: 31907 - RNA, 32 nt, Homo Sapiens
cuaaacacuuuaaauuugauuugacauuuuca

SEQ ID NO: 31908 - RNA, 32 nt, Homo Sapiens
ggacagugccaagaguggggugugugauuuuu

SEQ ID NO: 31909 - RNA, 32 nt, Homo Sapiens
gagcaggggacaguccugggggcugcagguca

SEQ ID NO: 31910 - RNA, 32 nt, Homo Sapiens
caugcaauagacuugcucggagcccagcacuc

SEQ ID NO: 31911 - RNA, 32 nt, Homo Sapiens
uaucauauaugaugauguaacugaucuaauca

SEQ ID NO: 31912 - RNA, 32 nt, Homo Sapiens
gacaccaaccucagcuggcgugauguugagga

SEQ ID NO: 31913 - RNA, 30 nt, Homo Sapiens
ggcaaaugugcaauaccaacaugucuguac

SEQ ID NO: 31914 - RNA, 32 nt, Homo Sapiens
uggcagaagagggaaggcaggaggguggcagc

SEQ ID NO: 31915 - RNA, 32 nt, Homo Sapiens
guaugcagcacucuccacgguagcucccuggg

SEQ ID NO: 31916 - RNA, 32 nt, Homo Sapiens
agacgacagccccugggaauguuccaggguuc

SEQ ID NO: 31917 - RNA, 32 nt, Homo Sapiens
uaugaguaaguucuacagauguuuacacaagu

SEQ ID NO: 31918 - RNA, 32 nt, Homo Sapiens
gagggcugcccgggugggcugcagcuuccucu

SEQ ID NO: 31919 - RNA, 32 nt, Homo Sapiens
ugcuuuugaagaauggcacagguaggacagaa

SEQ ID NO: 31920 - RNA, 30 nt, Homo Sapiens
agguuuuacggcugcggcggcuggugcuca

SEQ ID NO: 31921 - RNA, 32 nt, Homo Sapiens
cuggucugccccagcugugccgacagcaccuc

SEQ ID NO: 31922 - RNA, 32 nt, Homo Sapiens
uuggaugcuguaaaucuguccgugugaaguua

SEQ ID NO: 31923 - RNA, 32 nt, Homo Sapiens
gaggcccugggcagaugcugcagcccgccccc

SEQ ID NO: 31924 - RNA, 32 nt, Homo Sapiens
ggccagaugaacuggcuccucgucaugggacu

SEQ ID NO: 31925 - RNA, 32 nt, Homo Sapiens
gccucccucucugcacccugcaauucccaccc

SEQ ID NO: 31926 - RNA, 32 nt, Homo Sapiens
cuaauggaaugaauuaguucuguagaugacaa

SEQ ID NO: 31927 - RNA, 32 nt, Homo Sapiens
gccuuccugccagccuggcagcucuggaagug

SEQ ID NO: 31928 - RNA, 32 nt, Homo Sapiens
ccggccgccccgccggcuccgcggaaaguuug

SEQ ID NO: 31929 - RNA, 32 nt, Homo Sapiens
ccggcagcgaccccuuccccagcccgacaggu

SEQ ID NO: 31930 - RNA, 32 nt, Homo Sapiens
gcugagaggaauacuugaaacaacagcagugu

SEQ ID NO: 31931 - RNA, 32 nt, Homo Sapiens
gaaggugagcgcggacgguaugcaaaguugug

SEQ ID NO: 31932 - RNA, 32 nt, Homo Sapiens
caagauucucaguucuccaaaauacuuaucau

SEQ ID NO: 31933 - RNA, 32 nt, Homo Sapiens
cgcagcccgcggcgccaccagcccagcaugca

SEQ ID NO: 31934 - RNA, 32 nt, Homo Sapiens
cuguugaucucaggguacuuucugggauugcu

SEQ ID NO: 31935 - RNA, 32 nt, Homo Sapiens
aacuaacaacuucuaccgaggaccccuggacu

SEQ ID NO: 31936 - RNA, 32 nt, Homo Sapiens
gguaacuugugcccagcccugugcuaggcgcu

SEQ ID NO: 31937 - RNA, 31 nt, Homo Sapiens
ggacucaaacaucagcccugaguucuugagu

SEQ ID NO: 31938 - RNA, 32 nt, Homo Sapiens
gcccagccugccccgcucagccgccagagaag

SEQ ID NO: 31939 - RNA, 32 nt, Homo Sapiens
caccugaaacucaguucagggauuggggcugg

SEQ ID NO: 31940 - RNA, 32 nt, Homo Sapiens
uuuugguucauuuucagauucaggcauuuucc

SEQ ID NO: 31941 - RNA, 30 nt, Homo Sapiens
cuggcauguuccugacugaggaucucauaa

SEQ ID NO: 31942 - RNA, 29 nt, Homo Sapiens
ggggagcaggaacagaggacaggccauga

SEQ ID NO: 31943 - RNA, 30 nt, Homo Sapiens
ugcucggcgcccggguccgccaugcgcucc

SEQ ID NO: 31944 - RNA, 32 nt, Homo Sapiens
ugauccucaaccaauaaaaucucaauuaugaa

SEQ ID NO: 31945 - RNA, 32 nt, Homo Sapiens
gagguucucuucauggccaccuggacaacugg

SEQ ID NO: 31946 - RNA, 32 nt, Homo Sapiens
cuguguaauuguaggagaagacacucagcagu

SEQ ID NO: 31947 - RNA, 32 nt, Homo Sapiens
ggcugggggcacggaggcagcagugccuggaa

SEQ ID NO: 31948 - RNA, 32 nt, Homo Sapiens
agauguggagggcguagggugggggcagugag

SEQ ID NO: 31949 - RNA, 32 nt, Homo Sapiens
agacaaugguaaauaucuauguucaaagucca

SEQ ID NO: 31950 - RNA, 32 nt, Homo Sapiens
cgacccucuccccuccucccugacuuuagagg

SEQ ID NO: 31951 - RNA, 32 nt, Homo Sapiens
gggccuaggagaugaaaucacuuuuuauuuuu

SEQ ID NO: 31952 - RNA, 32 nt, Homo Sapiens
caucuguugggucuuaggccuccuucccuccu

SEQ ID NO: 31953 - RNA, 32 nt, Homo Sapiens
cucggacccgccccaaacacccaagcgcccca

SEQ ID NO: 31954 - RNA, 32 nt, Homo Sapiens
cagccuaccagaagagagcaucugaaaacaug

SEQ ID NO: 31955 - RNA, 32 nt, Homo Sapiens
uccauuuggaaaacuuaaaagaauaaugaaca

SEQ ID NO: 31956 - RNA, 32 nt, Homo Sapiens
cgcuuguaaucccagcacuuugggaagcugag

SEQ ID NO: 31957 - RNA, 32 nt, Homo Sapiens
gaagauggaagaccguguucguggccgaccug

SEQ ID NO: 31958 - RNA, 32 nt, Homo Sapiens
caugagccaccgugcccggccgguccugcuuu

SEQ ID NO: 31959 - RNA, 32 nt, Homo Sapiens
acuuaaauuugugagaaggauaccuuguacug

SEQ ID NO: 31960 - RNA, 32 nt, Homo Sapiens
gcgugccagcaagagauuaaagaugcaguacg

SEQ ID NO: 31961 - RNA, 32 nt, Homo Sapiens
cccugcuuuuucccuucccugggaggcuagaa

SEQ ID NO: 31962 - RNA, 25 nt, Homo Sapiens
auggcggcggguggcagcgauccgc

SEQ ID NO: 31963 - RNA, 32 nt, Homo Sapiens
caaaaggagaauaaaaauaaagugguuuauuc

SEQ ID NO: 31964 - RNA, 32 nt, Homo Sapiens
gguuggaaaaaaacaaaacaaacaaacaaaca

SEQ ID NO: 31965 - RNA, 32 nt, Homo Sapiens
guguauuugaucaacuaacacaagucgugaaa

SEQ ID NO: 31966 - RNA, 32 nt, Homo Sapiens
accucucaggccccaaaccaggccugggcuag

SEQ ID NO: 31967 - RNA, 32 nt, Homo Sapiens
gugugaaaacuauuuaagauaauuauuacaga

SEQ ID NO: 31968 - RNA, 32 nt, Homo Sapiens
auuuacugauaaauguaauucaguauauuugg

SEQ ID NO: 31969 - RNA, 32 nt, Homo Sapiens
ccagcuccccgcgcccaccccggaguuggugg

SEQ ID NO: 31970 - RNA, 32 nt, Homo Sapiens
uauucuuuccugcuuuuuguagcuacuggugu

SEQ ID NO: 31971 - RNA, 32 nt, Homo Sapiens
aaaugauacugcuagcagcuuauuuaaaacuu

SEQ ID NO: 31972 - RNA, 32 nt, Homo Sapiens
ucuggcacucguggagauagugcaugggacua

SEQ ID NO: 31973 - RNA, 32 nt, Homo Sapiens
uaauuuuauuuaaaugugaagucaaaaggauc

SEQ ID NO: 31974 - RNA, 32 nt, Homo Sapiens
cacccuuuaaugugguugcagaucucagauga

SEQ ID NO: 31975 - RNA, 32 nt, Homo Sapiens
ugcguauugagcacauuaagcacucuaagagc

SEQ ID NO: 31976 - RNA, 32 nt, Homo Sapiens
uacaagcuacaguuguccagaucacugaauug

SEQ ID NO: 31977 - RNA, 32 nt, Homo Sapiens
cauaugagauuugggauauuuuuuguacaggu

SEQ ID NO: 31978 - RNA, 32 nt, Homo Sapiens
caaagaauauaaaaugucacaaucuguguacu

SEQ ID NO: 31979 - RNA, 32 nt, Homo Sapiens
aggguggccccggcgggggcggguccagcuuu

SEQ ID NO: 31980 - RNA, 32 nt, Homo Sapiens
uggcagacacaagcaguacggaugaagacucu

SEQ ID NO: 31981 - RNA, 32 nt, Homo Sapiens
guaaaagacagagguuuagaacaaaguuuaug

SEQ ID NO: 31982 - RNA, 32 nt, Homo Sapiens
acuaugaagaccgauaugacagacgggaugau

SEQ ID NO: 31983 - RNA, 32 nt, Homo Sapiens
cuucugggcuccuggcccuuugcgaaguacuu

SEQ ID NO: 31984 - RNA, 32 nt, Homo Sapiens
ucacauguucacuugcuuuuccuuccaucugu

SEQ ID NO: 31985 - RNA, 32 nt, Homo Sapiens
cacuauuuauuuacaaauguuuugcucaauag

SEQ ID NO: 31986 - RNA, 28 nt, Homo Sapiens
aagaugguggaccgcgagcaacuggugc

SEQ ID NO: 31987 - RNA, 32 nt, Homo Sapiens
agauggacacgcugcgcaaggccucgcucuug

SEQ ID NO: 31988 - RNA, 32 nt, Homo Sapiens
auuucuuuacuuugcucucuaagguagugauu

SEQ ID NO: 31989 - RNA, 32 nt, Homo Sapiens
cagccuaaagaugcuuuguaaagcuguauuuu

SEQ ID NO: 31990 - RNA, 32 nt, Homo Sapiens
ucacucaugcugguggcauuguuuacagcuag

SEQ ID NO: 31991 - RNA, 32 nt, Homo Sapiens
ccagcccgagucgucauccccggagucccuau

SEQ ID NO: 31992 - RNA, 32 nt, Homo Sapiens
ugaacuucccuuuuauuuuuuauuacuauaaa

SEQ ID NO: 31993 - RNA, 32 nt, Homo Sapiens
uaacacuaacuguacuguuuuuucuauucacg

SEQ ID NO: 31994 - RNA, 32 nt, Homo Sapiens
acggggcgggugggcuuugcugccgagcaggc

SEQ ID NO: 31995 - RNA, 32 nt, Homo Sapiens
ggccagcccucccuggcugugagcagccucca

SEQ ID NO: 31996 - RNA, 32 nt, Homo Sapiens
uccccacucccucucuggggucgaugaagagg

SEQ ID NO: 31997 - RNA, 32 nt, Homo Sapiens
acucagaggacacaggaaaacacacacacaca

SEQ ID NO: 31998 - RNA, 32 nt, Homo Sapiens
ugcaccuuaaugaaauacuuugaaacagaagu

SEQ ID NO: 31999 - RNA, 32 nt, Homo Sapiens
uucacugaaguuauacugaacaaaauuuuacc

SEQ ID NO: 32000 - RNA, 32 nt, Homo Sapiens
uaagaauuugaaacguuaugaugaccuggcaa

SEQ ID NO: 32001 - RNA, 32 nt, Homo Sapiens
cacaauuauauuuuuguaaauaguauaugcau

SEQ ID NO: 32002 - RNA, 32 nt, Homo Sapiens
agcagagccuggagaagccggagcuguacgug

SEQ ID NO: 32003 - RNA, 32 nt, Homo Sapiens
uuccgagcacgcuguaggguaugggaagaacc

SEQ ID NO: 32004 - RNA, 32 nt, Homo Sapiens
uuucucuuucuuuucuauuagugaauaaaauu

SEQ ID NO: 32005 - RNA, 32 nt, Homo Sapiens
ggcacuaaaaauaaaauacuaggucauuggag

SEQ ID NO: 32006 - RNA, 32 nt, Homo Sapiens
ucucagcagcaacuucggcagcaggugucgau

SEQ ID NO: 32007 - RNA, 32 nt, Homo Sapiens
ugaagauuugagaacuuuuuaacuauucauug

SEQ ID NO: 32008 - RNA, 32 nt, Homo Sapiens
ugguuuuuugaaaagaucaacaaaauugauag

SEQ ID NO: 32009 - RNA, 32 nt, Homo Sapiens
ggaccucccaccauagagagaagaaaccccgg

SEQ ID NO: 32010 - RNA, 32 nt, Homo Sapiens
caccccgcgucugucgcccaauaaaggcaucu

SEQ ID NO: 32011 - RNA, 32 nt, Homo Sapiens
ccccacccgcggccggcgcucuccuccuccuc

SEQ ID NO: 32012 - RNA, 32 nt, Homo Sapiens
gacagcggggaucauggccgcgcaggucgccc

SEQ ID NO: 32013 - RNA, 32 nt, Homo Sapiens
ggaggaguuccgucccagcccgcggucucccg

SEQ ID NO: 32014 - RNA, 32 nt, Homo Sapiens
gagccagucaacauaaguggauuagaagccca

SEQ ID NO: 32015 - RNA, 32 nt, Homo Sapiens
gcccuccccccgcugcccccucccccgagcau

SEQ ID NO: 32016 - RNA, 32 nt, Homo Sapiens
cgccgucgcccccgccucccccugccucagcg

SEQ ID NO: 32017 - RNA, 32 nt, Homo Sapiens
ccucccuugcauuggcccuaucuuuaaaaaug

SEQ ID NO: 32018 - RNA, 32 nt, Homo Sapiens
agcucucucuacccggcccagagaccccuucc

SEQ ID NO: 32019 - RNA, 32 nt, Homo Sapiens
aguccuucauacaccuucuggguagggaaaca

SEQ ID NO: 32020 - RNA, 32 nt, Homo Sapiens
aagucagugauccuaauuguaucacauuauaa

SEQ ID NO: 32021 - RNA, 32 nt, Homo Sapiens
cguaugugaauagaugauaacaauuaauauua

SEQ ID NO: 32022 - RNA, 29 nt, Homo Sapiens
ccggcgagagggucgaggacgccgcggcg

SEQ ID NO: 32023 - RNA, 32 nt, Homo Sapiens
aggaacaaacugcgggcagaaacuacacacau

SEQ ID NO: 32024 - RNA, 32 nt, Homo Sapiens
acaccucggggccagcauccucaccuucuuca

SEQ ID NO: 32025 - RNA, 32 nt, Homo Sapiens
ccuucccccuguagggccggccggcgaguccc

SEQ ID NO: 32026 - RNA, 32 nt, Homo Sapiens
uuuccaaaccaucaauauggguugugucucua

SEQ ID NO: 32027 - RNA, 32 nt, Homo Sapiens
guaugagugauuucagugaagaauuaaaaggg

SEQ ID NO: 32028 - RNA, 32 nt, Homo Sapiens
ugagacugaaaguuaagagaaggguuuucaag

SEQ ID NO: 32029 - RNA, 31 nt, Homo Sapiens
gaggaaauggagccggccguggcucugcugc

SEQ ID NO: 32030 - RNA, 32 nt, Homo Sapiens
cucucugccuucuaugugggaaugaggucuuc

SEQ ID NO: 32031 - RNA, 32 nt, Homo Sapiens
aaaugcacuaaaauaucaucgcugucaugaac

SEQ ID NO: 32032 - RNA, 32 nt, Homo Sapiens
aaggagggagaggaucagcaaaaagcacuaau

SEQ ID NO: 32033 - RNA, 32 nt, Homo Sapiens
uccagcagaguuggggcuggaacuuggcacug

SEQ ID NO: 32034 - RNA, 32 nt, Homo Sapiens
ugagggcaaugcggcuggaggcggaggcaacg

SEQ ID NO: 32035 - RNA, 32 nt, Homo Sapiens
guuuugucccccugcuggggggacaggagagg

SEQ ID NO: 32036 - RNA, 32 nt, Homo Sapiens
uaaccugaggccaggauuaaggugaggcaauc

SEQ ID NO: 32037 - RNA, 31 nt, Homo Sapiens
cucaggugaaacaucucggaaucacccccac

SEQ ID NO: 32038 - RNA, 32 nt, Homo Sapiens
uagguuuuuaguuaaaacaucuccugccuaaa

SEQ ID NO: 32039 - RNA, 32 nt, Homo Sapiens
ccugcuaggaccggccggggccguaccggagg

SEQ ID NO: 32040 - RNA, 32 nt, Homo Sapiens
cuggaaaucaguaucacaaauggguaaaucac

SEQ ID NO: 32041 - RNA, 32 nt, Homo Sapiens
uaaaagcucuaggucagaaguacuacacagug

SEQ ID NO: 32042 - RNA, 32 nt, Homo Sapiens
cugggcaauauuggcugcuugcuguggcucuc

SEQ ID NO: 32043 - RNA, 32 nt, Homo Sapiens
acugggcagagcuuucgcaccagcggccuccg

SEQ ID NO: 32044 - RNA, 32 nt, Homo Sapiens
ccagacacucccuccagugaguguccugcagc

SEQ ID NO: 32045 - RNA, 32 nt, Homo Sapiens
cguacuuuguuggucagcacugggcugacaaa

SEQ ID NO: 32046 - RNA, 28 nt, Homo Sapiens
augaguguggcgaacauuucagaacaca

SEQ ID NO: 32047 - RNA, 32 nt, Homo Sapiens
auagccccaagcagagaaaaggaggguagguc

SEQ ID NO: 32048 - RNA, 32 nt, Homo Sapiens
guagugcucucguugaugaagcacauguauga

SEQ ID NO: 32049 - RNA, 32 nt, Homo Sapiens
uuuaaaauauuuugcugcuucuguucuggguc

SEQ ID NO: 32050 - RNA, 32 nt, Homo Sapiens
ccgagagaggcugggaugggccugcuuccugu

SEQ ID NO: 32051 - RNA, 32 nt, Homo Sapiens
agcugcuucagaacguaugcucaaagauugug

SEQ ID NO: 32052 - RNA, 32 nt, Homo Sapiens
ucaugaggcgauuuaaauuugugccacaauga

SEQ ID NO: 32053 - RNA, 32 nt, Homo Sapiens
aguagcuggaacuacagccuccugccaccacg

SEQ ID NO: 32054 - RNA, 32 nt, Homo Sapiens
caagcaggcugcucucuggagcuccucugugg

SEQ ID NO: 32055 - RNA, 32 nt, Homo Sapiens
guucuuuguguccuuacuuucugcccuauacc

SEQ ID NO: 32056 - RNA, 30 nt, Homo Sapiens
cgccacacgcccgugcuucgcgcccaaacc

SEQ ID NO: 32057 - RNA, 32 nt, Homo Sapiens
auuuaguuguuaccuguuucucucuucuuuca

SEQ ID NO: 32058 - RNA, 32 nt, Homo Sapiens
cugcuccagcgcagugcaggcuugucugcuuu

SEQ ID NO: 32059 - RNA, 32 nt, Homo Sapiens
accccugcacagcggcggcgacuccucuagcu

SEQ ID NO: 32060 - RNA, 32 nt, Homo Sapiens
aauggccaguuuaaaacuuaugcuaucugcgg

SEQ ID NO: 32061 - RNA, 32 nt, Homo Sapiens
cggagcuugugcugugcucgagaucaggaguu

SEQ ID NO: 32062 - RNA, 32 nt, Homo Sapiens
ugaugucagaggcaucuguuuccuuuaccauc

SEQ ID NO: 32063 - RNA, 32 nt, Homo Sapiens
cugccaucuccaugccugagagccacugauuu

SEQ ID NO: 32064 - RNA, 32 nt, Homo Sapiens
gaauuaauauauuacuuguuauaugcuuuuga

SEQ ID NO: 32065 - RNA, 30 nt, Homo Sapiens
caaauaugcuaauuuggggaaaccuagaga

SEQ ID NO: 32066 - RNA, 32 nt, Homo Sapiens
ggguuucucugccaaugaccccugggagaggg

SEQ ID NO: 32067 - RNA, 32 nt, Homo Sapiens
agggcugggcagggaggcgccguggacucagc

SEQ ID NO: 32068 - RNA, 32 nt, Homo Sapiens
gucuagaauauuugauccuaagaucaagacau

SEQ ID NO: 32069 - RNA, 32 nt, Homo Sapiens
guggucuacuauaaauaaaaauguagacugga

SEQ ID NO: 32070 - RNA, 32 nt, Homo Sapiens
uccccgcggacuaagcuuggggccuggcuguu

SEQ ID NO: 32071 - RNA, 32 nt, Homo Sapiens
agaaaaaauaugauauacacacacauuauaua

SEQ ID NO: 32072 - RNA, 32 nt, Homo Sapiens
gguucaccaaguacuuuucuuucuagcuaacc

SEQ ID NO: 32073 - RNA, 32 nt, Homo Sapiens
aacuuccccuccccgugccagcacugccgcuu

SEQ ID NO: 32074 - RNA, 32 nt, Homo Sapiens
cuccaaaauuuaucauugccauuuuaaaaccg

SEQ ID NO: 32075 - RNA, 32 nt, Homo Sapiens
aaauccuaaaagaggcggcaagaagguaccuc

SEQ ID NO: 32076 - RNA, 32 nt, Homo Sapiens
caaaggagcgugccgccucccgcuuugcuccc

SEQ ID NO: 32077 - RNA, 32 nt, Homo Sapiens
agccuccugcaggaagacccucgcuggaccuu

SEQ ID NO: 32078 - RNA, 32 nt, Homo Sapiens
cauuucccauguaauuuuaaguuaagcuaaag

SEQ ID NO: 32079 - RNA, 32 nt, Homo Sapiens
uccuuggcuuguccuuccuucccgggaaggaa

SEQ ID NO: 32080 - RNA, 32 nt, Homo Sapiens
caaaccuaaguccuuccaccugccacccccuu

SEQ ID NO: 32081 - RNA, 32 nt, Homo Sapiens
cauauguauauuuauaccaauaaaaugauuuu

SEQ ID NO: 32082 - RNA, 32 nt, Homo Sapiens
gcaauuucaaauuguagugauaccuuaaauca

SEQ ID NO: 32083 - RNA, 32 nt, Homo Sapiens
agaucuggagggcgcuccuaugugucccacca

SEQ ID NO: 32084 - RNA, 32 nt, Homo Sapiens
ugauuuuuauccauuucuuuuacucuguguaa

SEQ ID NO: 32085 - RNA, 32 nt, Homo Sapiens
aagggagaaaauacccaaacuguauucaauac

SEQ ID NO: 32086 - RNA, 32 nt, Homo Sapiens
uguagaaucuguguuuuggagaaggugaaaga

SEQ ID NO: 32087 - RNA, 32 nt, Homo Sapiens
uucccucaaaaauccugaucugcaugaucuca

SEQ ID NO: 32088 - RNA, 32 nt, Homo Sapiens
ucuccgcggagcagaagcggcgcuucaacauc

SEQ ID NO: 32089 - RNA, 32 nt, Homo Sapiens
aaauuagcugggugugauggcgcaugccugua

SEQ ID NO: 32090 - RNA, 32 nt, Homo Sapiens
gaauuagcugggugugguggcgcaugccugua

SEQ ID NO: 32091 - RNA, 32 nt, Homo Sapiens
uggguucagaucuuuguuggccagucccuggc

SEQ ID NO: 32092 - RNA, 32 nt, Homo Sapiens
aguacagcuccggccgccgcgccgccuggcuu

SEQ ID NO: 32093 - RNA, 32 nt, Homo Sapiens
uccuucuacccaaauauauaaaacaggaauuu

SEQ ID NO: 32094 - RNA, 32 nt, Homo Sapiens
uccuuuacaucaugagagaucaaaaauccauu

SEQ ID NO: 32095 - RNA, 32 nt, Homo Sapiens
cgcuccugcagccccagcccagccccacuccu

SEQ ID NO: 32096 - RNA, 32 nt, Homo Sapiens
ggagagccugcagcugaguucagcagaaagga

SEQ ID NO: 32097 - RNA, 32 nt, Homo Sapiens
guugcagugucuaguuucucaaaacccuuaaa

SEQ ID NO: 32098 - RNA, 32 nt, Homo Sapiens
aacuuaguuuaauguagauuugccauuagcuu

SEQ ID NO: 32099 - RNA, 32 nt, Homo Sapiens
acuacuccaucccaugaccucgccacaccuac

SEQ ID NO: 32100 - RNA, 32 nt, Homo Sapiens
cuggcacacggggcagagcagagaagcucagc

SEQ ID NO: 32101 - RNA, 32 nt, Homo Sapiens
aggaggcucaggugcuuccaucuguggugacu

SEQ ID NO: 32102 - RNA, 32 nt, Homo Sapiens
ggcagggugggugcggagcggcucugggggcc

SEQ ID NO: 32103 - RNA, 32 nt, Homo Sapiens
accacagagaauccaaaccaauccaugauaau

SEQ ID NO: 32104 - RNA, 32 nt, Homo Sapiens
uacuauuuugaagauuccuuauguaaaugcaa

SEQ ID NO: 32105 - RNA, 32 nt, Homo Sapiens
gggaauggggagaaaacccucccgcugccugu

SEQ ID NO: 32106 - RNA, 32 nt, Homo Sapiens
uuaauauuccacugaaugggugugucaugauu

SEQ ID NO: 32107 - RNA, 32 nt, Homo Sapiens
agcagacggcugcugcccuucucugggcaugu

SEQ ID NO: 32108 - RNA, 32 nt, Homo Sapiens
ucaucagcuggguugauucugcggguuagaua

SEQ ID NO: 32109 - RNA, 32 nt, Homo Sapiens
cagccccccacacccacccccauccccccugg

SEQ ID NO: 32110 - RNA, 32 nt, Homo Sapiens
gacuacagcaaggggaagugccugaagacaua

SEQ ID NO: 32111 - RNA, 32 nt, Homo Sapiens
agcgcuugccgggaaccugcucugugcuggga

SEQ ID NO: 32112 - RNA, 32 nt, Homo Sapiens
ugaggcucugaaccuuccugugccacucaagg

SEQ ID NO: 32113 - RNA, 32 nt, Homo Sapiens
cugcuuuccuacucuccuuuuaucucacucua

SEQ ID NO: 32114 - RNA, 32 nt, Homo Sapiens
ucuauaaaaaggguguuaaaagagucagugua

SEQ ID NO: 32115 - RNA, 32 nt, Homo Sapiens
aguucacugaagauauugacacaauuuuaaaa

SEQ ID NO: 32116 - RNA, 32 nt, Homo Sapiens
gggcagcuaaauaguaaguacuuuuuaaaauu

SEQ ID NO: 32117 - RNA, 32 nt, Homo Sapiens
gcgagcacugaaaccuacuuagucuuucccau

SEQ ID NO: 32118 - RNA, 32 nt, Homo Sapiens
aucuggccuggagaggcccauccuauaccccu

SEQ ID NO: 32119 - RNA, 32 nt, Homo Sapiens
caggaaacaaaaaaggccuugcgacccagcug

SEQ ID NO: 32120 - RNA, 32 nt, Homo Sapiens
gagaauuuucaauuugccaauuuuuuccuuga

SEQ ID NO: 32121 - RNA, 32 nt, Homo Sapiens
gaaugucagaggugguuuauuauccagucugc

SEQ ID NO: 32122 - RNA, 32 nt, Homo Sapiens
ugaaauucauuaaaucacuggaggcaugcaua

SEQ ID NO: 32123 - RNA, 32 nt, Homo Sapiens
aauuuaccacuacuccuacccugcuuccugga

SEQ ID NO: 32124 - RNA, 32 nt, Homo Sapiens
ugcugaauucuaaauaaugaugcccugaauua

SEQ ID NO: 32125 - RNA, 32 nt, Homo Sapiens
ggggggccgagcaggggcugcccguuagacgg

SEQ ID NO: 32126 - RNA, 32 nt, Homo Sapiens
cccaucccuauuauaaaaaugucucagagcaa

SEQ ID NO: 32127 - RNA, 32 nt, Homo Sapiens
ccccuccuucacccccgcacaccugcaucccu

SEQ ID NO: 32128 - RNA, 32 nt, Homo Sapiens
gaucucagcucacugcaagcuccaccucccgg

SEQ ID NO: 32129 - RNA, 32 nt, Homo Sapiens
ucucauuugggagaucuggugaucucccaagc

SEQ ID NO: 32130 - RNA, 32 nt, Homo Sapiens
cgguggccgcggcugcugcugcugcuacugcc

SEQ ID NO: 32131 - RNA, 32 nt, Homo Sapiens
uuucccucuuugcuccuccauucuugaagaaa

SEQ ID NO: 32132 - RNA, 32 nt, Homo Sapiens
ucaauccuuuaccaacugucccaugaagagua

SEQ ID NO: 32133 - RNA, 32 nt, Homo Sapiens
gaggacuguauauagugaugugcuagaacuuu

SEQ ID NO: 32134 - RNA, 32 nt, Homo Sapiens
agaccuuacugaugggaucucugcaguuuauu

SEQ ID NO: 32135 - RNA, 32 nt, Homo Sapiens
aacuuuacaccuguaucuucagccccacagua

SEQ ID NO: 32136 - RNA, 32 nt, Homo Sapiens
gggaaaggggagagggggagaaaacuguacuc

SEQ ID NO: 32137 - RNA, 32 nt, Homo Sapiens
ugggagaauccaaauaguauuuuuguggggaa

SEQ ID NO: 32138 - RNA, 32 nt, Homo Sapiens
ggcuuauuccuccuugaauaaugugcuuuaaa

SEQ ID NO: 32139 - RNA, 31 nt, Homo Sapiens
acugcuucgacacugaaagugcuaguuaaau

SEQ ID NO: 32140 - RNA, 32 nt, Homo Sapiens
agggacuccgcggugcccagcucuccagccug

SEQ ID NO: 32141 - RNA, 32 nt, Homo Sapiens
ugaggcuguggcggcacugcgcccggcgcucg

SEQ ID NO: 32142 - RNA, 32 nt, Homo Sapiens
cugcccaccggcucccucccccgcaucccugc

SEQ ID NO: 32143 - RNA, 32 nt, Homo Sapiens
auauuacagcuauaauuuacuuguuucuucuu

SEQ ID NO: 32144 - RNA, 32 nt, Homo Sapiens
uuaucugugggggaagugguaguaauaauuga

SEQ ID NO: 32145 - RNA, 32 nt, Homo Sapiens
aacugugcuccuccucgggggcuggggaagga

SEQ ID NO: 32146 - RNA, 32 nt, Homo Sapiens
uuuuagcaacaaaguguggaagguuggaggaa

SEQ ID NO: 32147 - RNA, 32 nt, Homo Sapiens
uuauuauguuuugaagggaacuauugauucua

SEQ ID NO: 32148 - RNA, 32 nt, Homo Sapiens
ggaagaacccauugaagagugcagcuuaauaa

SEQ ID NO: 32149 - RNA, 32 nt, Homo Sapiens
guaucuuauucugcacuuaugcauuaguuaaa

SEQ ID NO: 32150 - RNA, 30 nt, Homo Sapiens
cagcgugucugugcucaaugagggccgcug

SEQ ID NO: 32151 - RNA, 32 nt, Homo Sapiens
acuccuuuucagaauagaaaucuccucucgcu

SEQ ID NO: 32152 - RNA, 32 nt, Homo Sapiens
agaaggggucuccagggaagagucacaggcug

SEQ ID NO: 32153 - RNA, 32 nt, Homo Sapiens
uuuuuuucuuuuucuuuuuuuuuuugagacag

SEQ ID NO: 32154 - RNA, 32 nt, Homo Sapiens
cuucuucuggaucugccuauguuuuccuuucu

SEQ ID NO: 32155 - RNA, 32 nt, Homo Sapiens
uuuucauggcugccuuugguuugguuuucuga

SEQ ID NO: 32156 - RNA, 32 nt, Homo Sapiens
aagcgcagcccucuguggcccgcagcccccug

SEQ ID NO: 32157 - RNA, 32 nt, Homo Sapiens
cugucuaccuucccacuggaaaagcacggaca

SEQ ID NO: 32158 - RNA, 32 nt, Homo Sapiens
ggcgaucggccgcggaggugcgugcagggccc

SEQ ID NO: 32159 - RNA, 29 nt, Homo Sapiens
guguguauguguauguacacauacauaua

SEQ ID NO: 32160 - RNA, 32 nt, Homo Sapiens
ggcgggcagggccagccucuccucugcugaga

SEQ ID NO: 32161 - RNA, 32 nt, Homo Sapiens
ccauucgacgcaaagaagugacacuuucuuaa

SEQ ID NO: 32162 - RNA, 32 nt, Homo Sapiens
cuuucccaauuugguagcugggauaauaguau

SEQ ID NO: 32163 - RNA, 32 nt, Homo Sapiens
acaaauacccucaagaauaauaaaucauggag

SEQ ID NO: 32164 - RNA, 32 nt, Homo Sapiens
cucugcuggaccugggguaggcugcaggggug

SEQ ID NO: 32165 - RNA, 30 nt, Homo Sapiens
augaaauguacuucccuccaucuuaaccua

SEQ ID NO: 32166 - RNA, 32 nt, Homo Sapiens
cugccaccucgcggaucaggagccagcguugu

SEQ ID NO: 32167 - RNA, 32 nt, Homo Sapiens
uugguuuuuuaaaaagcaacuguuuaauugcu

SEQ ID NO: 32168 - RNA, 32 nt, Homo Sapiens
ugagcggcugagauggagacgucugccucagc

SEQ ID NO: 32169 - RNA, 32 nt, Homo Sapiens
uuagcauauaauguauuuugaagagugaagua

SEQ ID NO: 32170 - RNA, 32 nt, Homo Sapiens
gagggguauacacagggaggccaggcagccug

SEQ ID NO: 32171 - RNA, 32 nt, Homo Sapiens
cuggagcccggacauuggggacacgcagcugg

SEQ ID NO: 32172 - RNA, 32 nt, Homo Sapiens
gauuugggcucgcauuaagugauuuugcaggc

SEQ ID NO: 32173 - RNA, 32 nt, Homo Sapiens
gaggcccugcccagcccugcucugcccagccc

SEQ ID NO: 32174 - RNA, 32 nt, Homo Sapiens
uccaccccauccccucuugucucugagaacca

SEQ ID NO: 32175 - RNA, 32 nt, Homo Sapiens
agcucccuccucucuaccuaccucugaccuuc

SEQ ID NO: 32176 - RNA, 32 nt, Homo Sapiens
uggguuuauacuuuaaaagauagacauggugc

SEQ ID NO: 32177 - RNA, 32 nt, Homo Sapiens
caucuuccuccccacaccuacccacccagugg

SEQ ID NO: 32178 - RNA, 32 nt, Homo Sapiens
gugauuaucacagauuguacuuauacaaaacu

SEQ ID NO: 32179 - RNA, 32 nt, Homo Sapiens
uguugaugacuucuuguggcauuucacacacu

SEQ ID NO: 32180 - RNA, 32 nt, Homo Sapiens
auuccccgcucccgggccaagcccagcugcgg

SEQ ID NO: 32181 - RNA, 32 nt, Homo Sapiens
cggggggcugagcgcaguggcucacgccuaua

SEQ ID NO: 32182 - RNA, 32 nt, Homo Sapiens
cagggcuugcagcagcagcaguguggccaucu

SEQ ID NO: 32183 - RNA, 32 nt, Homo Sapiens
ucuugagaaagaauucuuaugaauuguuaugc

SEQ ID NO: 32184 - RNA, 32 nt, Homo Sapiens
uagauuauuuuuguauucuuacuuuagguauu

SEQ ID NO: 32185 - RNA, 32 nt, Homo Sapiens
cucaccgcaaccuccgccucccagguucaaaa

SEQ ID NO: 32186 - RNA, 29 nt, Homo Sapiens
agaucuuaagguauauauuuucuggacac

SEQ ID NO: 32187 - RNA, 32 nt, Homo Sapiens
ccccggcugcggcgcgcacucccuguuucucc

SEQ ID NO: 32188 - RNA, 32 nt, Homo Sapiens
ggggccucagucuuuaccucagaugggaaacu

SEQ ID NO: 32189 - RNA, 32 nt, Homo Sapiens
agaaauaacgcagcaauagaauuacuggcuug

SEQ ID NO: 32190 - RNA, 32 nt, Homo Sapiens
cuguccccugucgucacccaucacucccugcu

SEQ ID NO: 32191 - RNA, 32 nt, Homo Sapiens
cagagaaaauguccccccacccgccaucugca

SEQ ID NO: 32192 - RNA, 30 nt, Homo Sapiens
ccccccgccgaucaugcgccggcgccccug

SEQ ID NO: 32193 - RNA, 32 nt, Homo Sapiens
aggaccugccccagaagaaucauagauauguu

SEQ ID NO: 32194 - RNA, 32 nt, Homo Sapiens
uaaguguaauuauuuuaacacucacagcuaca

SEQ ID NO: 32195 - RNA, 32 nt, Homo Sapiens
uauacuguuccuugguuuuagaguuggguauu

SEQ ID NO: 32196 - RNA, 32 nt, Homo Sapiens
ggcuuuaggaccagcugauuguuaugcuugca

SEQ ID NO: 32197 - RNA, 32 nt, Homo Sapiens
cggacaggcgcugcugccccgaguggcaggcc

SEQ ID NO: 32198 - RNA, 32 nt, Homo Sapiens
gggagcaggucaggcccucccuaggccuguuu

SEQ ID NO: 32199 - RNA, 32 nt, Homo Sapiens
uggacccuugcggggaggagggggugggugag

SEQ ID NO: 32200 - RNA, 32 nt, Homo Sapiens
acauguuaacugugugcccaggacagccgugg

SEQ ID NO: 32201 - RNA, 32 nt, Homo Sapiens
uccaucugggccgcaucuccaggacuccuggc

SEQ ID NO: 32202 - RNA, 32 nt, Homo Sapiens
ccguucuuuuugcugccaucuuccucaucaua

SEQ ID NO: 32203 - RNA, 32 nt, Homo Sapiens
cacggacggggcgggcggcgcggacaggccau

SEQ ID NO: 32204 - RNA, 32 nt, Homo Sapiens
aggccuggccagcccuguggcuccuuagagga

SEQ ID NO: 32205 - RNA, 32 nt, Homo Sapiens
cuucacaggacacuugagcacagucaagauuu

SEQ ID NO: 32206 - RNA, 30 nt, Homo Sapiens
gagagguaucaccucuucugggcucaagau

SEQ ID NO: 32207 - RNA, 32 nt, Homo Sapiens
uucaagaccauguuggccaggcuggucucgaa

SEQ ID NO: 32208 - RNA, 32 nt, Homo Sapiens
ugaaugaggagcaaaaucaugucuuacauggc

SEQ ID NO: 32209 - RNA, 32 nt, Homo Sapiens
gccugggguuuaggaagcuaagucccaggaaa

SEQ ID NO: 32210 - RNA, 32 nt, Homo Sapiens
ucuguaauauaaaguguuugaguuuuuaauug

SEQ ID NO: 32211 - RNA, 32 nt, Homo Sapiens
uucuuuggauacugucuagucacccagaaaaa

SEQ ID NO: 32212 - RNA, 32 nt, Homo Sapiens
cugagaaggaggaggggcucccugaggacgag

SEQ ID NO: 32213 - RNA, 32 nt, Homo Sapiens
cucugucagggugcacagccccucaugccugg

SEQ ID NO: 32214 - RNA, 32 nt, Homo Sapiens
gaugcggcugugguggcggcggcggcggccga

SEQ ID NO: 32215 - RNA, 32 nt, Homo Sapiens
gcuaccagccgcccccuguguacuggcggcgg

SEQ ID NO: 32216 - RNA, 32 nt, Homo Sapiens
gauuucauaaaggcuaauugcauaagaaagag

SEQ ID NO: 32217 - RNA, 32 nt, Homo Sapiens
ugaagaucucaacugcuucuguguuagaaugg

SEQ ID NO: 32218 - RNA, 32 nt, Homo Sapiens
uaucaaaauaggauuucuuaaauuuuucaacc

SEQ ID NO: 32219 - RNA, 32 nt, Homo Sapiens
uggcaggugaugaaucugcugauuauuuguuc

SEQ ID NO: 32220 - RNA, 32 nt, Homo Sapiens
auugagacuucuaguuaacaaacacaguauuu

SEQ ID NO: 32221 - RNA, 32 nt, Homo Sapiens
gaagagccccucaccuugaaaagcagacagau

SEQ ID NO: 32222 - RNA, 32 nt, Homo Sapiens
ucauuccucuugucaucucuccaggcccagcu

SEQ ID NO: 32223 - RNA, 32 nt, Homo Sapiens
auuuugggggguaaucagcauuauucuucaga

SEQ ID NO: 32224 - RNA, 32 nt, Homo Sapiens
cuuaaugagcagucaacacuuacucaccauca

SEQ ID NO: 32225 - RNA, 32 nt, Homo Sapiens
gacuccuggugcccaggcccugggccugcucc

SEQ ID NO: 32226 - RNA, 32 nt, Homo Sapiens
agaagaagagagaguaugagccaggcacagug

SEQ ID NO: 32227 - RNA, 32 nt, Homo Sapiens
caaccuauaugcccaucaauaguagacugaau

SEQ ID NO: 32228 - RNA, 32 nt, Homo Sapiens
caguccacaaaacggcucauauugaacaguaa

SEQ ID NO: 32229 - RNA, 32 nt, Homo Sapiens
auuuaauaugaauacuuuaaagaucaacauac

SEQ ID NO: 32230 - RNA, 32 nt, Homo Sapiens
caaacuggguggcaggaagaagcaagcucugu

SEQ ID NO: 32231 - RNA, 32 nt, Homo Sapiens
aggcuguacaagcauggccccagcauuugcuc

SEQ ID NO: 32232 - RNA, 32 nt, Homo Sapiens
auuuugacaaaguggaacaguggagcuguuuu

SEQ ID NO: 32233 - RNA, 32 nt, Homo Sapiens
ugcggcgggauccucauugccaugguacucaa

SEQ ID NO: 32234 - RNA, 32 nt, Homo Sapiens
uggaaaaacaacaccuagcaaaccucagaaua

SEQ ID NO: 32235 - RNA, 32 nt, Homo Sapiens
cuguguccggugcccgaggggcgggcggcggu

SEQ ID NO: 32236 - RNA, 32 nt, Homo Sapiens
auaaauuugggaauuauaauauugacauuucu

SEQ ID NO: 32237 - RNA, 32 nt, Homo Sapiens
agaccagcuugggcaacauagcaagacccugu

SEQ ID NO: 32238 - RNA, 31 nt, Homo Sapiens
gaaccugcaacuguaaaagugcuguuuggac

SEQ ID NO: 32239 - RNA, 31 nt, Homo Sapiens
ccgccgcugccggacgcgcagagcgaggggc

SEQ ID NO: 32240 - RNA, 32 nt, Homo Sapiens
gguuuauuuggcucaugguucugcagcaucug

SEQ ID NO: 32241 - RNA, 32 nt, Homo Sapiens
cuccaaaacaauauccacaacaaagucugacc

SEQ ID NO: 32242 - RNA, 32 nt, Homo Sapiens
cuuaaaauauaaaauuaccuugcaagguauug

SEQ ID NO: 32243 - RNA, 32 nt, Homo Sapiens
ucuguuuggcggagugggagggguggagcagg

SEQ ID NO: 32244 - RNA, 32 nt, Homo Sapiens
cgcgcaggccgcggggagcaccuggcuacaag

SEQ ID NO: 32245 - RNA, 32 nt, Homo Sapiens
gacaucagguugucauuuuuuauugugagauu

SEQ ID NO: 32246 - RNA, 27 nt, Homo Sapiens
agaugggcgcccggcuaucgcggcgac

SEQ ID NO: 32247 - RNA, 32 nt, Homo Sapiens
ccucuccucuccugccgagaguggaacacgcg

SEQ ID NO: 32248 - RNA, 32 nt, Homo Sapiens
guggcggcgcuggagcuccucccggggaccag

SEQ ID NO: 32249 - RNA, 32 nt, Homo Sapiens
accugaguuagaauuccuucuaauggcaucgu

SEQ ID NO: 32250 - RNA, 32 nt, Homo Sapiens
ccagagagaaugugcuauauuuuuguauauac

SEQ ID NO: 32251 - RNA, 32 nt, Homo Sapiens
agccugggugacaaagcaaggcccugucucaa

SEQ ID NO: 32252 - RNA, 32 nt, Homo Sapiens
gaaaaccaggcacaaucuucugagucuuguuu

SEQ ID NO: 32253 - RNA, 32 nt, Homo Sapiens
ccaugcagccaccuuauuucauagaugccauc

SEQ ID NO: 32254 - RNA, 32 nt, Homo Sapiens
uauuucauuuuuccacacugagcaaugaaugu

SEQ ID NO: 32255 - RNA, 32 nt, Homo Sapiens
gggcgacguugaugacucaggaucucaaaagg

SEQ ID NO: 32256 - RNA, 32 nt, Homo Sapiens
ucaaugauaaaaacagauguauuauggcaaau

SEQ ID NO: 32257 - RNA, 32 nt, Homo Sapiens
ccccauauuccgucuuggcaaaauaguggaga

SEQ ID NO: 32258 - RNA, 32 nt, Homo Sapiens
aggcagagguggaggcgcuuugaaagccguca

SEQ ID NO: 32259 - RNA, 32 nt, Homo Sapiens
caguggcgagcuggggggaggggggacucuua

SEQ ID NO: 32260 - RNA, 32 nt, Homo Sapiens
uuuaggccucaccucccugcuccugugucuua

SEQ ID NO: 32261 - RNA, 32 nt, Homo Sapiens
aaaaauucgcaggauugaaaacaaacaccuag

SEQ ID NO: 32262 - RNA, 32 nt, Homo Sapiens
cuauuuagggacaaagaagguauaaaguccag

SEQ ID NO: 32263 - RNA, 32 nt, Homo Sapiens
aguacuuagaaauggaauuuccaggucagcca

SEQ ID NO: 32264 - RNA, 32 nt, Homo Sapiens
ucccugagccucugcaggcaguucuuggagcc

SEQ ID NO: 32265 - RNA, 32 nt, Homo Sapiens
cuguauuauauugccuuauuuauuuuuaauca

SEQ ID NO: 32266 - RNA, 32 nt, Homo Sapiens
ugugaguacugcgacugaacggcggcaggcga

SEQ ID NO: 32267 - RNA, 32 nt, Homo Sapiens
uuggucuauaguuggccaacccuguuuagagc

SEQ ID NO: 32268 - RNA, 32 nt, Homo Sapiens
aacuacaaaguuucuauacuuacuauaagugg

SEQ ID NO: 32269 - RNA, 32 nt, Homo Sapiens
ugaauuuggcccucccucuccccucucuacuu

SEQ ID NO: 32270 - RNA, 32 nt, Homo Sapiens
caauugugaauucacauagaaaacauuaaauu

SEQ ID NO: 32271 - RNA, 32 nt, Homo Sapiens
cuuuaauuucugucugcauauuagcuuuuaau

SEQ ID NO: 32272 - RNA, 32 nt, Homo Sapiens
aucugcgccggggcccugagccgccugagccu

SEQ ID NO: 32273 - RNA, 32 nt, Homo Sapiens
aagagacuagaggagcaggagaaggagcaggu

SEQ ID NO: 32274 - RNA, 32 nt, Homo Sapiens
agcccgcgccccggugcgagggagcgguccuu

SEQ ID NO: 32275 - RNA, 32 nt, Homo Sapiens
ccagagccgcccacccggagccgcccgcaugc

SEQ ID NO: 32276 - RNA, 32 nt, Homo Sapiens
gauccccagcgcugcgggcucggagagcaguc

SEQ ID NO: 32277 - RNA, 32 nt, Homo Sapiens
uugaugugagcuugcuuggagacacacggugc

SEQ ID NO: 32278 - RNA, 32 nt, Homo Sapiens
gggcugaggggaggaccugaaggggggcggca

SEQ ID NO: 32279 - RNA, 32 nt, Homo Sapiens
aaaggugccaggggcuccgggcggccgggcgg

SEQ ID NO: 32280 - RNA, 32 nt, Homo Sapiens
ucugacuccagaucagaagguugcguguucaa

SEQ ID NO: 32281 - RNA, 32 nt, Homo Sapiens
agaaauugacuggccugcccgugccugcccag

SEQ ID NO: 32282 - RNA, 32 nt, Homo Sapiens
acuuuaucuucuugcaaaaauuucuacaaaaa

SEQ ID NO: 32283 - RNA, 32 nt, Homo Sapiens
uccucaggaaucuucugguacagguuaacauc

SEQ ID NO: 32284 - RNA, 32 nt, Homo Sapiens
aauuugcuugacucaccucagacuuuucauuc

SEQ ID NO: 32285 - RNA, 32 nt, Homo Sapiens
cucaaaaagauuuuauaagaaagcagagcuuu

SEQ ID NO: 32286 - RNA, 32 nt, Homo Sapiens
acaugauuccaaggagaggaugugaaugacag

SEQ ID NO: 32287 - RNA, 32 nt, Homo Sapiens
ggguuuuaccauguggccaggcuggucuagaa

SEQ ID NO: 32288 - RNA, 32 nt, Homo Sapiens
gaucccagccucagccugcccagacggagagg

SEQ ID NO: 32289 - RNA, 32 nt, Homo Sapiens
aaaauacauuuuauaaagguguuuuguauuuu

SEQ ID NO: 32290 - RNA, 32 nt, Homo Sapiens
cgucuuuccccuccccuggcauggacaccuug

SEQ ID NO: 32291 - RNA, 32 nt, Homo Sapiens
gccagaggacuuggggaaaaugagauggagga

SEQ ID NO: 32292 - RNA, 32 nt, Homo Sapiens
uugcaguaacaaacucuagaauauugacauuc

SEQ ID NO: 32293 - RNA, 32 nt, Homo Sapiens
uuuuuccaacugaguccaaacuuuucuaaugu

SEQ ID NO: 32294 - RNA, 32 nt, Homo Sapiens
uuugcgacucgcgggaccggcguccccggcgc

SEQ ID NO: 32295 - RNA, 32 nt, Homo Sapiens
ugugcggcaccucaagaacgggcucaucagca

SEQ ID NO: 32296 - RNA, 32 nt, Homo Sapiens
ugguuggcucugcggcccagggcgcacaaagg

SEQ ID NO: 32297 - RNA, 32 nt, Homo Sapiens
cagaauuuguuucaauugaaaauagacucagg

SEQ ID NO: 32298 - RNA, 32 nt, Homo Sapiens
ccaccacaggccccaaacugauccaaauaucc

SEQ ID NO: 32299 - RNA, 32 nt, Homo Sapiens
uuaacugggaaauaaaauauagaguggcacuu

SEQ ID NO: 32300 - RNA, 32 nt, Homo Sapiens
uaaaaaaucacuguuaacagaccuccagguga

SEQ ID NO: 32301 - RNA, 32 nt, Homo Sapiens
ccugcucugaaucaggcaucuuauuuaguucu

SEQ ID NO: 32302 - RNA, 32 nt, Homo Sapiens
acacaccugaugcauguaagaaugguagaggg

SEQ ID NO: 32303 - RNA, 32 nt, Homo Sapiens
guugcuggggcggcgcguaagaugccucuaau

SEQ ID NO: 32304 - RNA, 32 nt, Homo Sapiens
uuuuccucacuuucccugagucucaagagcuc

SEQ ID NO: 32305 - RNA, 32 nt, Homo Sapiens
agcaaaggcugagacugcccaugaccugaagg

SEQ ID NO: 32306 - RNA, 32 nt, Homo Sapiens
cucugggccuuagcuccucccugggcuuggua

SEQ ID NO: 32307 - RNA, 32 nt, Homo Sapiens
gacuggggccacuacauuugcuccauccuccu

SEQ ID NO: 32308 - RNA, 32 nt, Homo Sapiens
gguuggacgcagcugcugcugcccugacuuug

SEQ ID NO: 32309 - RNA, 32 nt, Homo Sapiens
uuucucuugcugggcuuuuggcaguagggggc

SEQ ID NO: 32310 - RNA, 32 nt, Homo Sapiens
uguucauaagauguccugugucauuacuuaaa

SEQ ID NO: 32311 - RNA, 32 nt, Homo Sapiens
gccgggacacggacacaggggacaauacacgg

SEQ ID NO: 32312 - RNA, 32 nt, Homo Sapiens
cugaggcuggugacuccucccugcuggggccc

SEQ ID NO: 32313 - RNA, 32 nt, Homo Sapiens
cuaaaaagagcugccaucauggcccagggagg

SEQ ID NO: 32314 - RNA, 32 nt, Homo Sapiens
uuuguauuucucuuauucucuuucuaaccucu

SEQ ID NO: 32315 - RNA, 32 nt, Homo Sapiens
ugauuaaacauuucuuuuuuuuagccauuauu

SEQ ID NO: 32316 - RNA, 32 nt, Homo Sapiens
caaauuuggggauggggcccaggaauaugcau

SEQ ID NO: 32317 - RNA, 32 nt, Homo Sapiens
ccugccuagaaaaaggaaguggagcgggagca

SEQ ID NO: 32318 - RNA, 32 nt, Homo Sapiens
acucccaccccugcgccggcccgcgggcuucg

SEQ ID NO: 32319 - RNA, 32 nt, Homo Sapiens
aaggauggcagaugagugacuccacauccaga

SEQ ID NO: 32320 - RNA, 32 nt, Homo Sapiens
cacccacccucccacaccucccugaacuucca

SEQ ID NO: 32321 - RNA, 32 nt, Homo Sapiens
cuggccaaggaccuucauugccuggcaagagc

SEQ ID NO: 32322 - RNA, 32 nt, Homo Sapiens
ccucuccucucuucuuguuugaacauggugcg

SEQ ID NO: 32323 - RNA, 32 nt, Homo Sapiens
uaacugauauaaaacuacaucuucuuuauaau

SEQ ID NO: 32324 - RNA, 32 nt, Homo Sapiens
gccuggaaagacugcagagcugccagcuacuc

SEQ ID NO: 32325 - RNA, 32 nt, Homo Sapiens
ucguaugagcugugugugaauguacguguauc

SEQ ID NO: 32326 - RNA, 32 nt, Homo Sapiens
uggagccugugcugcggggccugaagacagca

SEQ ID NO: 32327 - RNA, 32 nt, Homo Sapiens
agcaagcaagggugaccuccaguggcccacuc

SEQ ID NO: 32328 - RNA, 32 nt, Homo Sapiens
ccuaaccucgcucucgcggccuaccuuuaccc

SEQ ID NO: 32329 - RNA, 29 nt, Homo Sapiens
uaaggaauuaugacguggacgaggugacc

SEQ ID NO: 32330 - RNA, 32 nt, Homo Sapiens
acuuuuauuuuaucuuagaaaaugucaauaua

SEQ ID NO: 32331 - RNA, 31 nt, Homo Sapiens
auauugaaauaaagaauuauguaaaagccau

SEQ ID NO: 32332 - RNA, 32 nt, Homo Sapiens
uucaguuaggucauccccugcagacgugucau

SEQ ID NO: 32333 - RNA, 32 nt, Homo Sapiens
cccccuucccccacccagagacugggcagcug

SEQ ID NO: 32334 - RNA, 32 nt, Homo Sapiens
uucuuuauucuucaugguucugaacaauucca

SEQ ID NO: 32335 - RNA, 32 nt, Homo Sapiens
gacuggugcugcggcggggcgugcugcgggac

SEQ ID NO: 32336 - RNA, 32 nt, Homo Sapiens
ggcggagguggcccgcgccccgcggcaugagc

SEQ ID NO: 32337 - RNA, 32 nt, Homo Sapiens
ccauguguacuucuuuccacacagacacggca

SEQ ID NO: 32338 - RNA, 32 nt, Homo Sapiens
uucccuuugguagcggcuaccggagcgcugca

SEQ ID NO: 32339 - RNA, 32 nt, Homo Sapiens
cacaucuaucaugcgucacuucuagacacagc

SEQ ID NO: 32340 - RNA, 32 nt, Homo Sapiens
uugaagcucacuccgccuccucacucucacug

SEQ ID NO: 32341 - RNA, 32 nt, Homo Sapiens
ggcuugggugaccaggagcaucuuucaugaau

SEQ ID NO: 32342 - RNA, 32 nt, Homo Sapiens
gugagaagauggccaucugugaacuaauaagg

SEQ ID NO: 32343 - RNA, 32 nt, Homo Sapiens
cugcccacacgcaaggucauggccccagcggc

SEQ ID NO: 32344 - RNA, 32 nt, Homo Sapiens
agugugcgaaucaagccugaccaagaggcucc

SEQ ID NO: 32345 - RNA, 32 nt, Homo Sapiens
aagacuuucuggccugcugaggucgaaucuuc

SEQ ID NO: 32346 - RNA, 32 nt, Homo Sapiens
gccggccuucgggucccaccuugcgggugaug

SEQ ID NO: 32347 - RNA, 32 nt, Homo Sapiens
cuacucaggaggcugaggugggacaauugcuu

SEQ ID NO: 32348 - RNA, 32 nt, Homo Sapiens
uauguucccucauaccuuaaccacuacccuuu

SEQ ID NO: 32349 - RNA, 32 nt, Homo Sapiens
gucagagagaaagcggagugcgcaugcgggac

SEQ ID NO: 32350 - RNA, 32 nt, Homo Sapiens
gugaaccugauuuggcucuggcguggggauuu

SEQ ID NO: 32351 - RNA, 32 nt, Homo Sapiens
ggggccaugggcagcucgagccaggcaggcug

SEQ ID NO: 32352 - RNA, 32 nt, Homo Sapiens
uuuuuuguaaaaacuuuuuucuuugaaaugcu

SEQ ID NO: 32353 - RNA, 32 nt, Homo Sapiens
aaacuuucgcaauguccggagcgcuugauauc

SEQ ID NO: 32354 - RNA, 32 nt, Homo Sapiens
uuaaguaaaauggacuuuguaauuguacagca

SEQ ID NO: 32355 - RNA, 32 nt, Homo Sapiens
gaaggcccgcggcgccccgugcugcaguaagc

SEQ ID NO: 32356 - RNA, 32 nt, Homo Sapiens
ggguuaggcagacagguccccagaguccucac

SEQ ID NO: 32357 - RNA, 32 nt, Homo Sapiens
caggcuuccuuccuggucuccgcaggaggcug

SEQ ID NO: 32358 - RNA, 30 nt, Homo Sapiens
guggccgggcagguccugccggcgcaggga

SEQ ID NO: 32359 - RNA, 32 nt, Homo Sapiens
agucgcgcggacggagccggacaaaagcgggc

SEQ ID NO: 32360 - RNA, 32 nt, Homo Sapiens
ugcaugugcaccugucauguguagaagcuugu

SEQ ID NO: 32361 - RNA, 32 nt, Homo Sapiens
acgacucucgugcaauuacagaaugaacaccc

SEQ ID NO: 32362 - RNA, 32 nt, Homo Sapiens
uagaucaauuuuuauaaaguacuaaugcucau

SEQ ID NO: 32363 - RNA, 32 nt, Homo Sapiens
cuucuuuugaauggccucuuugugaccagcca

SEQ ID NO: 32364 - RNA, 32 nt, Homo Sapiens
ugugugggacaaaggcugggccgcucauugcu

SEQ ID NO: 32365 - RNA, 32 nt, Homo Sapiens
gucccgcgcccggcgauguucccgggcacucc

SEQ ID NO: 32366 - RNA, 32 nt, Homo Sapiens
uuuuuuagucuguaauacacuccacuugaagc

SEQ ID NO: 32367 - RNA, 32 nt, Homo Sapiens
ccccucaaucuggggucuagaguugugcaggg

SEQ ID NO: 32368 - RNA, 31 nt, Homo Sapiens
accuauccacugaugagucuaacuguuccaa

SEQ ID NO: 32369 - RNA, 32 nt, Homo Sapiens
aagcucuaagcucuagagucuagauccaguca

SEQ ID NO: 32370 - RNA, 32 nt, Homo Sapiens
cugaagauggcacagcucugugauucaucucc

SEQ ID NO: 32371 - RNA, 32 nt, Homo Sapiens
ugcuuaguccaucauguguguuucacaaauau

SEQ ID NO: 32372 - RNA, 32 nt, Homo Sapiens
uguugccuccccagcccugcacgcccuggcug

SEQ ID NO: 32373 - RNA, 32 nt, Homo Sapiens
ccagagcagccgcuccucuccucccucccuuc

SEQ ID NO: 32374 - RNA, 32 nt, Homo Sapiens
gcgccccggugcccaccugaggaggcggcggu

SEQ ID NO: 32375 - RNA, 32 nt, Homo Sapiens
guaauaagguuaaauuuuuuuaugacguauuu

SEQ ID NO: 32376 - RNA, 32 nt, Homo Sapiens
cucuuucugauccaggccccucaguccaagcu

SEQ ID NO: 32377 - RNA, 32 nt, Homo Sapiens
ggaagaggccgcgcgggagggacuucugacac

SEQ ID NO: 32378 - RNA, 32 nt, Homo Sapiens
ugcccgcggcgguggauggcaugauggugcgg

SEQ ID NO: 32379 - RNA, 32 nt, Homo Sapiens
gggagacuuggccugcccuaccugaggggaac

SEQ ID NO: 32380 - RNA, 32 nt, Homo Sapiens
ccaggaaugagcaccuugugccuggaggucuu

SEQ ID NO: 32381 - RNA, 32 nt, Homo Sapiens
uguaagacuuggugggcgggguggggugggga

SEQ ID NO: 32382 - RNA, 29 nt, Homo Sapiens
gaggaauaaaguucuguuuuuaauugugg

SEQ ID NO: 32383 - RNA, 32 nt, Homo Sapiens
acuaucugacuuccauuguguuuuauugcuuc

SEQ ID NO: 32384 - RNA, 32 nt, Homo Sapiens
uacuuucuguaucauguaaaaacuacacuuag

SEQ ID NO: 32385 - RNA, 32 nt, Homo Sapiens
cacuacuccuucuccuucuagaugguaaccac

SEQ ID NO: 32386 - RNA, 31 nt, Homo Sapiens
uuuuggaagaacucuuugccagauaaugagu

SEQ ID NO: 32387 - RNA, 32 nt, Homo Sapiens
aaauuuaaaaacaaugagcugggcauggaacu

SEQ ID NO: 32388 - RNA, 32 nt, Homo Sapiens
ccggccccgccccgggccccagcgcuuuugug

SEQ ID NO: 32389 - RNA, 32 nt, Homo Sapiens
cacugagcucacauugucaaaaacagacuugc

SEQ ID NO: 32390 - RNA, 32 nt, Homo Sapiens
cgcggccacagcggccggcgcuuugcccggcc

SEQ ID NO: 32391 - RNA, 32 nt, Homo Sapiens
agggccgucaggcugggcuuugggccauugag

SEQ ID NO: 32392 - RNA, 32 nt, Homo Sapiens
gauacagcaagggcaaaggccuugaggccugc

SEQ ID NO: 32393 - RNA, 32 nt, Homo Sapiens
gagccacggccccuguucugcuggagaaagcc

SEQ ID NO: 32394 - RNA, 32 nt, Homo Sapiens
aagccugcccuucugcccucuccccucccugc

SEQ ID NO: 32395 - RNA, 32 nt, Homo Sapiens
cuguggacacguauggaaagacuggaccccca

SEQ ID NO: 32396 - RNA, 32 nt, Homo Sapiens
aaacgugugucuauauuuucauaucuguauau

SEQ ID NO: 32397 - RNA, 32 nt, Homo Sapiens
ggaaacaagaccggaauugaccaagaacagga

SEQ ID NO: 32398 - RNA, 32 nt, Homo Sapiens
agcauucaggcacaagugcauucaacaaauac

SEQ ID NO: 32399 - RNA, 32 nt, Homo Sapiens
aacggcugcggccgggcaccccgggaguuaau

SEQ ID NO: 32400 - RNA, 32 nt, Homo Sapiens
aguuugggcccaggcuaugugcucuucuggug

SEQ ID NO: 32401 - RNA, 32 nt, Homo Sapiens
ugugacgcuauaagacagagcaggccacaugu

SEQ ID NO: 32402 - RNA, 32 nt, Homo Sapiens
auggcacacaaaguauauguauaauauugcaa

SEQ ID NO: 32403 - RNA, 32 nt, Homo Sapiens
cuaggggcuggaagaagugaaagggaagcauc

SEQ ID NO: 32404 - RNA, 32 nt, Homo Sapiens
aguuaauugguguuuucuuauugcacugaauu

SEQ ID NO: 32405 - RNA, 32 nt, Homo Sapiens
aacuuggcuggcauguugcuucugccucaguu

SEQ ID NO: 32406 - RNA, 32 nt, Homo Sapiens
gccgggcgcuuggggcuggaggaggcagcucg

SEQ ID NO: 32407 - RNA, 32 nt, Homo Sapiens
uuucuuguaaauguuucuuuucccuuaaauac

SEQ ID NO: 32408 - RNA, 32 nt, Homo Sapiens
aguccaagcaagcaauaauguuaucaacuuac

SEQ ID NO: 32409 - RNA, 32 nt, Homo Sapiens
aggagccaggccuccugugugcucuccauacc

SEQ ID NO: 32410 - RNA, 32 nt, Homo Sapiens
agucaguuguuuacaaacucccucuccugcac

SEQ ID NO: 32411 - RNA, 32 nt, Homo Sapiens
gccccagcucccagccccacacgcccacuccu

SEQ ID NO: 32412 - RNA, 32 nt, Homo Sapiens
ccuguuuauaugcguacagccugguaaccccc

SEQ ID NO: 32413 - RNA, 32 nt, Homo Sapiens
uuuuauggcugcggaggcuggugcucaguggg

SEQ ID NO: 32414 - RNA, 32 nt, Homo Sapiens
agaguugucauucccucggcuuccagguccca

SEQ ID NO: 32415 - RNA, 32 nt, Homo Sapiens
uccucugcaaguccaucuauguuguucuuagg

SEQ ID NO: 32416 - RNA, 32 nt, Homo Sapiens
cggguuugcgggggacuucggguguggggucc

SEQ ID NO: 32417 - RNA, 30 nt, Homo Sapiens
cuucacagugaccacuacagaguacuaaga

SEQ ID NO: 32418 - RNA, 32 nt, Homo Sapiens
cccaggaccccuuuuccacccugggccccaau

SEQ ID NO: 32419 - RNA, 32 nt, Homo Sapiens
uggcggccugacggagccgcggcgccggcgaa

SEQ ID NO: 32420 - RNA, 32 nt, Homo Sapiens
acgaggugacacacucaggagacacaggugug

SEQ ID NO: 32421 - RNA, 32 nt, Homo Sapiens
cgaagcuguguuuuaacaaacuccacuggaga

SEQ ID NO: 32422 - RNA, 32 nt, Homo Sapiens
cccccucccccgcucccgccccccaaggaaaa

SEQ ID NO: 32423 - RNA, 31 nt, Homo Sapiens
acgggagcaggagaagaagauacgggagcag

SEQ ID NO: 32424 - RNA, 32 nt, Homo Sapiens
auggcugaggcaggaguuugggaccagccugg

SEQ ID NO: 32425 - RNA, 32 nt, Homo Sapiens
uauuucucuuccugggauccaccacccucuac

SEQ ID NO: 32426 - RNA, 32 nt, Homo Sapiens
aauuaacaauaauuuuagguauggaauguuau

SEQ ID NO: 32427 - RNA, 32 nt, Homo Sapiens
ccagucucggcccuccccccagcccucucccu

SEQ ID NO: 32428 - RNA, 32 nt, Homo Sapiens
auuaucauaauuggguuacaauuuaagcuccc

SEQ ID NO: 32429 - RNA, 32 nt, Homo Sapiens
ccagagcugaugguaccaaauguuuccuaggc

SEQ ID NO: 32430 - RNA, 32 nt, Homo Sapiens
gggugguccgggcugaagagccaggcagccaa

SEQ ID NO: 32431 - RNA, 32 nt, Homo Sapiens
ucuuuuucuuuuucuuuuuuucuuuuugagau

SEQ ID NO: 32432 - RNA, 32 nt, Homo Sapiens
aauauuuggaugaaguuuuucuuuguuuugau

SEQ ID NO: 32433 - RNA, 32 nt, Homo Sapiens
gccccgugcggcugcuggcuucuguagaggcu

SEQ ID NO: 32434 - RNA, 32 nt, Homo Sapiens
ggccgacccuccccuccccaccucccccacug

SEQ ID NO: 32435 - RNA, 32 nt, Homo Sapiens
auauuggagucuuuaaaaauguugaagaauaa

SEQ ID NO: 32436 - RNA, 32 nt, Homo Sapiens
ccuuaccaauuucagaagcuucccugcaagua

SEQ ID NO: 32437 - RNA, 32 nt, Homo Sapiens
cuucccgaggccccuacaagccgguggccucu

SEQ ID NO: 32438 - RNA, 32 nt, Homo Sapiens
uuaacuggcucuuuugucauugugcuguuauu

SEQ ID NO: 32439 - RNA, 32 nt, Homo Sapiens
uuuguucauuguuuuucuccauucuuccccag

SEQ ID NO: 32440 - RNA, 32 nt, Homo Sapiens
guaaggaugugcgaggaggccucuugaagaac

SEQ ID NO: 32441 - RNA, 32 nt, Homo Sapiens
uuuaguuucccuuagacuuuaguaguuuguaa

SEQ ID NO: 32442 - RNA, 32 nt, Homo Sapiens
uaacaaauacauguaacuguagauaaaaccau

SEQ ID NO: 32443 - RNA, 32 nt, Homo Sapiens
gcccuggggacuccccacacuccggggcagau

SEQ ID NO: 32444 - RNA, 32 nt, Homo Sapiens
uguucggcgcgguucccacagcggucuccggc

SEQ ID NO: 32445 - RNA, 32 nt, Homo Sapiens
cucuugagugucagcgccucggucggucauuc

SEQ ID NO: 32446 - RNA, 32 nt, Homo Sapiens
gccgccggcgggagaggcgcgcgccauggcuu

SEQ ID NO: 32447 - RNA, 32 nt, Homo Sapiens
uaauuuucuuugaaacuugauagguauauaug

SEQ ID NO: 32448 - RNA, 32 nt, Homo Sapiens
agagaccaggcccaggaugccucgccuguucu

SEQ ID NO: 32449 - RNA, 32 nt, Homo Sapiens
auugcucucucuaaaaaucaguucuguaggaa

SEQ ID NO: 32450 - RNA, 32 nt, Homo Sapiens
guccccuguccccgguccccagccagcucagc

SEQ ID NO: 32451 - RNA, 32 nt, Homo Sapiens
ucucccuagggucaagaacaggcuaaggauac

SEQ ID NO: 32452 - RNA, 32 nt, Homo Sapiens
ccccuggaagcaggcagaggaagacaagggca

SEQ ID NO: 32453 - RNA, 32 nt, Homo Sapiens
gccuggugugcugaggguaguuggauuucaga

SEQ ID NO: 32454 - RNA, 32 nt, Homo Sapiens
acaauucagcaaauauuuccaauauaauuuga

SEQ ID NO: 32455 - RNA, 32 nt, Homo Sapiens
gagagcuuugacuuaaaugugccaugcauaga

SEQ ID NO: 32456 - RNA, 32 nt, Homo Sapiens
cugugucuauuccugcuuccuccaccucaccu

SEQ ID NO: 32457 - RNA, 32 nt, Homo Sapiens
ccggcaaaacaucagugucuguggguaguugg

SEQ ID NO: 32458 - RNA, 32 nt, Homo Sapiens
uauccgcucccaccgcgcccccggcccaccug

SEQ ID NO: 32459 - RNA, 32 nt, Homo Sapiens
acagauuugauucuuagauuugcuaucuacca

SEQ ID NO: 32460 - RNA, 32 nt, Homo Sapiens
ugauagugaggaacauuuuacaauuauuuaca

SEQ ID NO: 32461 - RNA, 32 nt, Homo Sapiens
gcacacccuugucccgggccugucugggacug

SEQ ID NO: 32462 - RNA, 32 nt, Homo Sapiens
gaaaggagugcggacgccgucaugcugcagca

SEQ ID NO: 32463 - RNA, 32 nt, Homo Sapiens
uggcucucccgcugaauggggccucagcaggu

SEQ ID NO: 32464 - RNA, 32 nt, Homo Sapiens
ccaguacugucuaugaguugucgugcuccugu

SEQ ID NO: 32465 - RNA, 32 nt, Homo Sapiens
cgguggaccgaauugggaccgcuggcuuauaa

SEQ ID NO: 32466 - RNA, 32 nt, Homo Sapiens
ucugcccugcggggacacggucugcacccugc

SEQ ID NO: 32467 - RNA, 32 nt, Homo Sapiens
aaguaugacacaguucuagaaaauacugacua

SEQ ID NO: 32468 - RNA, 32 nt, Homo Sapiens
auggucagcccuguagcagacaccucggggag

SEQ ID NO: 32469 - RNA, 32 nt, Homo Sapiens
ugugacucagcuuggcugggaagugcuccuca

SEQ ID NO: 32470 - RNA, 32 nt, Homo Sapiens
gagccucggccgcgggccgccuugguauaucu

SEQ ID NO: 32471 - RNA, 32 nt, Homo Sapiens
cuccacccacccccggcccguccucguccugg

SEQ ID NO: 32472 - RNA, 32 nt, Homo Sapiens
uguuuuguuuuuauuuugauaaauuaguggag

SEQ ID NO: 32473 - RNA, 32 nt, Homo Sapiens
auaucagcucuuucucuuuguauuucaucucu

SEQ ID NO: 32474 - RNA, 32 nt, Homo Sapiens
agagaaccaaaggugugugugcauggggggcu

SEQ ID NO: 32475 - RNA, 32 nt, Homo Sapiens
ccgaggucgcgccacugcacuccagccuggga

SEQ ID NO: 32476 - RNA, 32 nt, Homo Sapiens
uccagggagcagccaugccuuaccucuaccgg

SEQ ID NO: 32477 - RNA, 31 nt, Homo Sapiens
ggaaaaaugaccacauucaaggaggcaguga

SEQ ID NO: 32478 - RNA, 32 nt, Homo Sapiens
gccauaagccccacauauuaucccugaacaag

SEQ ID NO: 32479 - RNA, 32 nt, Homo Sapiens
augcaccucugccuccacgaaaagaacaagaa

SEQ ID NO: 32480 - RNA, 32 nt, Homo Sapiens
uuacuggcugucuacauggggcuacauuuuaa

SEQ ID NO: 32481 - RNA, 32 nt, Homo Sapiens
ugggcugggcuuuauuuaccacuacacauuau

SEQ ID NO: 32482 - RNA, 32 nt, Homo Sapiens
acgcuuggcugcggccgggugcgggcugaggc

SEQ ID NO: 32483 - RNA, 32 nt, Homo Sapiens
gauuugccaccgcacgcacgccggaucccggg

SEQ ID NO: 32484 - RNA, 32 nt, Homo Sapiens
cgccaucuuccuuuccgcacaggggccgccga

SEQ ID NO: 32485 - RNA, 32 nt, Homo Sapiens
auggaguuugguuuuuuuuuuguuguuuuuuu

SEQ ID NO: 32486 - RNA, 32 nt, Homo Sapiens
gugccaaacgggaggccccgggcccccgcccc

SEQ ID NO: 32487 - RNA, 32 nt, Homo Sapiens
uacugacaugaugaaccuggaacuucugugaa

SEQ ID NO: 32488 - RNA, 32 nt, Homo Sapiens
ggcccugucucuucuuuuuucuggaccucagu

SEQ ID NO: 32489 - RNA, 32 nt, Homo Sapiens
uucagucgcuacuuuuacuucugcccuuucua

SEQ ID NO: 32490 - RNA, 32 nt, Homo Sapiens
ggcccuuuugggggcggggggaggggaaaauu

SEQ ID NO: 32491 - RNA, 32 nt, Homo Sapiens
cccgcagccugcccgccugccccgcccaucug

SEQ ID NO: 32492 - RNA, 32 nt, Homo Sapiens
acccgagggucgccgcugguagggucgcucag

SEQ ID NO: 32493 - RNA, 32 nt, Homo Sapiens
cuguucgcgcugccguguuuccgggcggggac

SEQ ID NO: 32494 - RNA, 32 nt, Homo Sapiens
cccugugaauguaagcacuugguaaagccuua

SEQ ID NO: 32495 - RNA, 32 nt, Homo Sapiens
caagaggccgccucuggggagcuccgcggcgg

SEQ ID NO: 32496 - RNA, 32 nt, Homo Sapiens
cucuugguuaaggcuccucuuaccucccaagc

SEQ ID NO: 32497 - RNA, 32 nt, Homo Sapiens
cugcagugccagcauccugccccuccagcuau

SEQ ID NO: 32498 - RNA, 32 nt, Homo Sapiens
uaucaaguguauguaacuauuuuuuagaaaug

SEQ ID NO: 32499 - RNA, 32 nt, Homo Sapiens
cucgagauaguuuuuucuuuuuaaugaaaaaa

SEQ ID NO: 32500 - RNA, 32 nt, Homo Sapiens
cucccuacuuucuccuuuccaauaucccucug

SEQ ID NO: 32501 - RNA, 32 nt, Homo Sapiens
agagagacauuuuuggagccagcuggaggucu

SEQ ID NO: 32502 - RNA, 32 nt, Homo Sapiens
ccacuucugccuuccuacguggcaguggcuca

SEQ ID NO: 32503 - RNA, 32 nt, Homo Sapiens
cauccacacacacacacacacacacacacuca

SEQ ID NO: 32504 - RNA, 32 nt, Homo Sapiens
ccccagugaucccuggccuccugguguucaug

SEQ ID NO: 32505 - RNA, 32 nt, Homo Sapiens
accaugucuccuccaccagccaaaaaacuggc

SEQ ID NO: 32506 - RNA, 32 nt, Homo Sapiens
ugaauuuccagaaugcagguucuaaagaaauc

SEQ ID NO: 32507 - RNA, 32 nt, Homo Sapiens
ucgggagcuggcucggccgccugucagugcaa

SEQ ID NO: 32508 - RNA, 32 nt, Homo Sapiens
ccuuaacugggaauuuuuaucauugauuucaa

SEQ ID NO: 32509 - RNA, 32 nt, Homo Sapiens
cgagugggccccacccuggguucugaagaugc

SEQ ID NO: 32510 - RNA, 32 nt, Homo Sapiens
gauucaagaacaagcaaugaugacccacuaaa

SEQ ID NO: 32511 - RNA, 32 nt, Homo Sapiens
ggugagcuuccagcucuuccaggcugcauguc

SEQ ID NO: 32512 - RNA, 32 nt, Homo Sapiens
agucagaaauucugugcuagaaugggacuucu

SEQ ID NO: 32513 - RNA, 32 nt, Homo Sapiens
gaacaccaggcuuggauguggugcugggcugc

SEQ ID NO: 32514 - RNA, 32 nt, Homo Sapiens
cgagcaucaggagaacuggggcuggucucuug

SEQ ID NO: 32515 - RNA, 32 nt, Homo Sapiens
guggcggggcaggagaugaagaacgcagggcc

SEQ ID NO: 32516 - RNA, 32 nt, Homo Sapiens
cucucggccccggcgagcgaggagcggggcgc

SEQ ID NO: 32517 - RNA, 32 nt, Homo Sapiens
ugccuaccuuggcaagcuucugacuacagccu

SEQ ID NO: 32518 - RNA, 32 nt, Homo Sapiens
aacccaacuguacuuguaucuguccguggaaa

SEQ ID NO: 32519 - RNA, 32 nt, Homo Sapiens
gaaagauauuucauucuuauauacaaagucuc

SEQ ID NO: 32520 - RNA, 32 nt, Homo Sapiens
guggggacucugaccugggggcuucuggagga

SEQ ID NO: 32521 - RNA, 32 nt, Homo Sapiens
cucaucccacugacagaguuguucuuauugga

SEQ ID NO: 32522 - RNA, 32 nt, Homo Sapiens
acugagcaggcgaaagagcgcgcucggaccuc

SEQ ID NO: 32523 - RNA, 32 nt, Homo Sapiens
cucccaauauccaauuuuaaaaugaaaugcau

SEQ ID NO: 32524 - RNA, 32 nt, Homo Sapiens
cccugcuuuuugguagcaaggguccagagaug

SEQ ID NO: 32525 - RNA, 32 nt, Homo Sapiens
guuuccuuuacuaucuuuuccucuccccagag

SEQ ID NO: 32526 - RNA, 32 nt, Homo Sapiens
gccgccgcgcuugggaggccaagcuuuaaaca

SEQ ID NO: 32527 - RNA, 32 nt, Homo Sapiens
cucuaaauuugcuuguacauaaaggcuuaauu

SEQ ID NO: 32528 - RNA, 32 nt, Homo Sapiens
ggggcccucucugcaccggacagucggaaaag

SEQ ID NO: 32529 - RNA, 32 nt, Homo Sapiens
aauuugcucucccaccaagaaaauguaaaaga

SEQ ID NO: 32530 - RNA, 32 nt, Homo Sapiens
cuuccgguauguggccccgucuggcuaguccu

SEQ ID NO: 32531 - RNA, 31 nt, Homo Sapiens
gcccccaaggccgcacacugaguuaacagca

SEQ ID NO: 32532 - RNA, 32 nt, Homo Sapiens
ccaaccaucccauuuuagcauugagagcauug

SEQ ID NO: 32533 - RNA, 32 nt, Homo Sapiens
cccgcccucuccaguccaccccgguaaaagag

SEQ ID NO: 32534 - RNA, 32 nt, Homo Sapiens
uguccgucugggaauguuguaccggaaguuaa

SEQ ID NO: 32535 - RNA, 32 nt, Homo Sapiens
cacauuugacuuccuauuggcccuuugaaaaa

SEQ ID NO: 32536 - RNA, 30 nt, Homo Sapiens
uccgacugugcucgcugcucagcgccgcac

SEQ ID NO: 32537 - RNA, 32 nt, Homo Sapiens
ggaaccacuaaaugaauuggaauagaagguaa

SEQ ID NO: 32538 - RNA, 32 nt, Homo Sapiens
aaauguuuaaaaauaacauuucuuuuuggugu

SEQ ID NO: 32539 - RNA, 32 nt, Homo Sapiens
ccgcccccaccccacacccacauccucucuuu

SEQ ID NO: 32540 - RNA, 32 nt, Homo Sapiens
aaguguccuugucuuuuaauucuauuaucugu

SEQ ID NO: 32541 - RNA, 32 nt, Homo Sapiens
ugacuuuuuaaaacaaaacaaacacuggacag

SEQ ID NO: 32542 - RNA, 32 nt, Homo Sapiens
cuaauugcuaguauggagaaauuaagaugaug

SEQ ID NO: 32543 - RNA, 32 nt, Homo Sapiens
ugaaaggaacaguaauuuguguggauauuguu

SEQ ID NO: 32544 - RNA, 32 nt, Homo Sapiens
ccuucccucgacggagccgggcccagugcggg

SEQ ID NO: 32545 - RNA, 30 nt, Homo Sapiens
cgcgugcgcgcgcucugcuacgucaucagu

SEQ ID NO: 32546 - RNA, 32 nt, Homo Sapiens
gcaagcccucaauaaauaaauauugaaugaau

SEQ ID NO: 32547 - RNA, 32 nt, Homo Sapiens
uugggccgauggccucuuggaggcuuaaaguu

SEQ ID NO: 32548 - RNA, 32 nt, Homo Sapiens
ggugcaucucucgggcguccggcagcggcugu

SEQ ID NO: 32549 - RNA, 32 nt, Homo Sapiens
aacaaugucuuaaaugugaaaauggaaacaac

SEQ ID NO: 32550 - RNA, 32 nt, Homo Sapiens
ccguuccugucacauuuccccagccccaccuu

SEQ ID NO: 32551 - RNA, 32 nt, Homo Sapiens
uggccaggacacagcccucucucucacagcag

SEQ ID NO: 32552 - RNA, 32 nt, Homo Sapiens
cagagcucuggccacuucugcccacuucauua

SEQ ID NO: 32553 - RNA, 32 nt, Homo Sapiens
auuugccccguaggcccggcccgggccccucg

SEQ ID NO: 32554 - RNA, 32 nt, Homo Sapiens
cuuugaguaaagacagaagaauagcaaagucu

SEQ ID NO: 32555 - RNA, 32 nt, Homo Sapiens
cccaggaguucgagaucagccuggacaauacg

SEQ ID NO: 32556 - RNA, 32 nt, Homo Sapiens
ugaaaccucuauauuucuuucguucauaagag

SEQ ID NO: 32557 - RNA, 32 nt, Homo Sapiens
aagccaaggaggauuucuuuuguucuguuuuc

SEQ ID NO: 32558 - RNA, 32 nt, Homo Sapiens
augugggaaauaccaccaaggaaccucaucgu

SEQ ID NO: 32559 - RNA, 32 nt, Homo Sapiens
ccccgccuccaaggcaucaggccccgcccaac

SEQ ID NO: 32560 - RNA, 32 nt, Homo Sapiens
guuuauuuucugagacuccuacaggagccaaa

SEQ ID NO: 32561 - RNA, 32 nt, Homo Sapiens
gcugauauauaagguuacacauuuucauuuau

SEQ ID NO: 32562 - RNA, 32 nt, Homo Sapiens
auccaaggagcgcuugaggagcucuggguaca

SEQ ID NO: 32563 - RNA, 32 nt, Homo Sapiens
guauuggaggggcuacaggcagcuggagaaag

SEQ ID NO: 32564 - RNA, 32 nt, Homo Sapiens
gcagcacuggggagccaggcgaggggggcuug

SEQ ID NO: 32565 - RNA, 32 nt, Homo Sapiens
agcccugagggguggggaccagcuggccacau

SEQ ID NO: 32566 - RNA, 32 nt, Homo Sapiens
gcucuggccccggugcugccugcaugccaagc

SEQ ID NO: 32567 - RNA, 32 nt, Homo Sapiens
ggccgcugcgggcugagguagcgcaccggccu

SEQ ID NO: 32568 - RNA, 32 nt, Homo Sapiens
gggucagauuguguccaucgugucuuugggaa

SEQ ID NO: 32569 - RNA, 32 nt, Homo Sapiens
cagccuuccuuccugcucugcucucucagugc

SEQ ID NO: 32570 - RNA, 32 nt, Homo Sapiens
uggacugaggacuggugacuggucugugauag

SEQ ID NO: 32571 - RNA, 32 nt, Homo Sapiens
gguggaaaaguacucgguaaacaguaguaacc

SEQ ID NO: 32572 - RNA, 32 nt, Homo Sapiens
agaagugguggcggcgggcggcgggcggcaaa

SEQ ID NO: 32573 - RNA, 32 nt, Homo Sapiens
aagggaugcuuccgaugugcugugguagcaag

SEQ ID NO: 32574 - RNA, 32 nt, Homo Sapiens
cucagcaggaggaggagaccccacagcaccgg

SEQ ID NO: 32575 - RNA, 27 nt, Homo Sapiens
caccccagccuccucagcccccggccc

SEQ ID NO: 32576 - RNA, 32 nt, Homo Sapiens
uauugugcagaaauauuagaaaaccucauuga

SEQ ID NO: 32577 - RNA, 32 nt, Homo Sapiens
uucauuggucacuuuuuuuuuauuguaguaua

SEQ ID NO: 32578 - RNA, 32 nt, Homo Sapiens
gaagccaucagcaaauguguacgugcaugcug

SEQ ID NO: 32579 - RNA, 32 nt, Homo Sapiens
gcgggaggcggcggcgcagagcuuggggcuuc

SEQ ID NO: 32580 - RNA, 32 nt, Homo Sapiens
ggaaggacaggccugcccaugcaggagaccau

SEQ ID NO: 32581 - RNA, 32 nt, Homo Sapiens
cucugguaaaauguaggcugauuauuaaagau

SEQ ID NO: 32582 - RNA, 32 nt, Homo Sapiens
gacugaauucugcucacaacccuaaugagcac

SEQ ID NO: 32583 - RNA, 32 nt, Homo Sapiens
agaaaaugaugaugaugccuauuuaaacucac

SEQ ID NO: 32584 - RNA, 32 nt, Homo Sapiens
gaucguucucucuaccucucccccaaguccuc

SEQ ID NO: 32585 - RNA, 32 nt, Homo Sapiens
aauaccuccuuaugaaaauaauucugagagca

SEQ ID NO: 32586 - RNA, 32 nt, Homo Sapiens
aggggacgacugccugccaggcugggacaacu

SEQ ID NO: 32587 - RNA, 32 nt, Homo Sapiens
ucccugcccuccuacagcacuccaccuuggga

SEQ ID NO: 32588 - RNA, 32 nt, Homo Sapiens
guacucuucagaugaauauauagacacugugg

SEQ ID NO: 32589 - RNA, 32 nt, Homo Sapiens
gcagaacuuucgguuaaacuccuuccauaaaa

SEQ ID NO: 32590 - RNA, 32 nt, Homo Sapiens
agauaggaauaaugcgugaaaaaugauuugua

SEQ ID NO: 32591 - RNA, 32 nt, Homo Sapiens
caaccucccgggcaccguugcccgcccggggc

SEQ ID NO: 32592 - RNA, 32 nt, Homo Sapiens
cuccggaguuccuccgcccccaccucgccggg

SEQ ID NO: 32593 - RNA, 32 nt, Homo Sapiens
cugugaggauuccacagagccugaagccuuac

SEQ ID NO: 32594 - RNA, 32 nt, Homo Sapiens
cccugcagcagccccagagcccugcccgaggc

SEQ ID NO: 32595 - RNA, 32 nt, Homo Sapiens
caggacaaggacucaagggucugcugguccau

SEQ ID NO: 32596 - RNA, 32 nt, Homo Sapiens
augggcucguggggcgggaugggacagggcac

SEQ ID NO: 32597 - RNA, 32 nt, Homo Sapiens
aaguagugccccucccucccccuggccaagcc

SEQ ID NO: 32598 - RNA, 32 nt, Homo Sapiens
cagccaagguggccuguccaguccuggugcug

SEQ ID NO: 32599 - RNA, 32 nt, Homo Sapiens
uacuuuuuaguuugauacuaaguauuaaacau

SEQ ID NO: 32600 - RNA, 32 nt, Homo Sapiens
uccccagaucacugaggccaggccauguuugg

SEQ ID NO: 32601 - RNA, 32 nt, Homo Sapiens
ucuuuuagcuaaaauguagacacauaaauaaa

SEQ ID NO: 32602 - RNA, 32 nt, Homo Sapiens
gcgcagguggcuugcguggacgcggguagagg

SEQ ID NO: 32603 - RNA, 32 nt, Homo Sapiens
ggcagugggacuggguuugagcugggcuuauc

SEQ ID NO: 32604 - RNA, 32 nt, Homo Sapiens
guguauaaaaaauuauuucuaacaaacuacag

SEQ ID NO: 32605 - RNA, 32 nt, Homo Sapiens
acgcugcugcgcugacguggcucccggaagua

SEQ ID NO: 32606 - RNA, 32 nt, Homo Sapiens
auaccaugaagauuaaaguaggcuggguuuca

SEQ ID NO: 32607 - RNA, 32 nt, Homo Sapiens
uguaaaacaaagugaagaacaaauaaacaacu

SEQ ID NO: 32608 - RNA, 31 nt, Homo Sapiens
auuccugugcuugaauugccaaauaaacagu

SEQ ID NO: 32609 - RNA, 32 nt, Homo Sapiens
aaggucuuucuucaugauacaagcauuauaaa

SEQ ID NO: 32610 - RNA, 32 nt, Homo Sapiens
ggcgcggcgggaggaugccgaagccgacgcug

SEQ ID NO: 32611 - RNA, 32 nt, Homo Sapiens
uauuuugcauacuuuaaaaucaccuaacuugg

SEQ ID NO: 32612 - RNA, 32 nt, Homo Sapiens
acaggccccuguacagagaagugucucacguc

SEQ ID NO: 32613 - RNA, 32 nt, Homo Sapiens
ggggugcccuggccccacggacccgacucagc

SEQ ID NO: 32614 - RNA, 32 nt, Homo Sapiens
guccagcugcgccuggaaagcgagcucggacc

SEQ ID NO: 32615 - RNA, 32 nt, Homo Sapiens
ucgccaaagucuggaaggauuaugauagggac

SEQ ID NO: 32616 - RNA, 32 nt, Homo Sapiens
ggggccugaggucagagcugucuugugccauc

SEQ ID NO: 32617 - RNA, 32 nt, Homo Sapiens
auauaacugcuaaauuugcauuuauugauacu

SEQ ID NO: 32618 - RNA, 32 nt, Homo Sapiens
cagggaagagcagcuccagagcccuggccggg

SEQ ID NO: 32619 - RNA, 32 nt, Homo Sapiens
gguauguucacagauuaauuauagggccaucu

SEQ ID NO: 32620 - RNA, 32 nt, Homo Sapiens
ggugcggugcgugccugcacaccucuccuaaa

SEQ ID NO: 32621 - RNA, 32 nt, Homo Sapiens
ugaagcaaugacaagcacuuuacuuucacggu

SEQ ID NO: 32622 - RNA, 32 nt, Homo Sapiens
ggggcgauggcaccccggggacaggcagaccu

SEQ ID NO: 32623 - RNA, 32 nt, Homo Sapiens
uguuuuuccuuccacccggagcguguugcauu

SEQ ID NO: 32624 - RNA, 32 nt, Homo Sapiens
uacuggaaaaauacugaauagacuugcuaaau

SEQ ID NO: 32625 - RNA, 32 nt, Homo Sapiens
accgagaaucucuggaacugguucuucaguau

SEQ ID NO: 32626 - RNA, 32 nt, Homo Sapiens
aguaaagcugucuggaauuaaguuaccaaaaa

SEQ ID NO: 32627 - RNA, 32 nt, Homo Sapiens
auuuucaaagauuaaaacuauuauacauauac

SEQ ID NO: 32628 - RNA, 30 nt, Homo Sapiens
cuuuugaauauccuagaacucuuggaaaac

SEQ ID NO: 32629 - RNA, 32 nt, Homo Sapiens
gucuccacuuugauuucccuggagcagcuuug

SEQ ID NO: 32630 - RNA, 32 nt, Homo Sapiens
gauauuccaaauaguuuuuuacauuggaaaaa

SEQ ID NO: 32631 - RNA, 30 nt, Homo Sapiens
acaguggauaaaagacuuuucuguaaacaa

SEQ ID NO: 32632 - RNA, 32 nt, Homo Sapiens
guagaaguuguauguuacaguuacuacaggag

SEQ ID NO: 32633 - RNA, 32 nt, Homo Sapiens
uuuaugcuccugcugcagaacccccagugugg

SEQ ID NO: 32634 - RNA, 32 nt, Homo Sapiens
ugggagguggagguugcagugacccgagaucg

SEQ ID NO: 32635 - RNA, 32 nt, Homo Sapiens
ugggagguggagguugcagugagccgagaugg

SEQ ID NO: 32636 - RNA, 32 nt, Homo Sapiens
caggagagaacccagaauaaaccacugggaag

SEQ ID NO: 32637 - RNA, 32 nt, Homo Sapiens
cucuugccccacucccuggccaucucaacgcc

SEQ ID NO: 32638 - RNA, 32 nt, Homo Sapiens
uucuuaaaaucguuuagauuuuuuuugguuug

SEQ ID NO: 32639 - RNA, 32 nt, Homo Sapiens
cagggcgcgcgaggugcaggggcgcgcaggcc

SEQ ID NO: 32640 - RNA, 32 nt, Homo Sapiens
gguccgggccgcggcgguggcggcgccacuuc

SEQ ID NO: 32641 - RNA, 32 nt, Homo Sapiens
augaccagcuaauguuuguauuuuuaguagag

SEQ ID NO: 32642 - RNA, 32 nt, Homo Sapiens
cagugaugaugagcauuuuuucauguguuuuu

SEQ ID NO: 32643 - RNA, 32 nt, Homo Sapiens
aguuaccagaugaugaauuuuccuccuaugcu

SEQ ID NO: 32644 - RNA, 32 nt, Homo Sapiens
cccauaaguuuaucagcuauuuacaaccuuca

SEQ ID NO: 32645 - RNA, 32 nt, Homo Sapiens
aguuaagcuuuauaaauaaucuguagaaucaa

SEQ ID NO: 32646 - RNA, 32 nt, Homo Sapiens
ucccacgcuccuccugccccagcccucuggug

SEQ ID NO: 32647 - RNA, 32 nt, Homo Sapiens
acccaaggccugaccuaggcugcuauccuaau

SEQ ID NO: 32648 - RNA, 32 nt, Homo Sapiens
uuaaaaccaaaauaucuguguagaaauacaac

SEQ ID NO: 32649 - RNA, 32 nt, Homo Sapiens
cgggcacugggcgacucugugccucgcugaag

SEQ ID NO: 32650 - RNA, 32 nt, Homo Sapiens
cuaccucaaccuguaaauuauuuuaaauuaua

SEQ ID NO: 32651 - RNA, 32 nt, Homo Sapiens
gaggaggcaugcaagcgagacauugaguugcu

SEQ ID NO: 32652 - RNA, 32 nt, Homo Sapiens
ggaggcccugcuugaucaauguguguguccuc

SEQ ID NO: 32653 - RNA, 32 nt, Homo Sapiens
uaggaaccuaguuguguuaguuuaccugggug

SEQ ID NO: 32654 - RNA, 32 nt, Homo Sapiens
cguggcccgcguucucaguccgccaaaauccg

SEQ ID NO: 32655 - RNA, 32 nt, Homo Sapiens
augcuuuuuaucaguguccucgcuguccuucc

SEQ ID NO: 32656 - RNA, 32 nt, Homo Sapiens
cagccggaaguggcggcugcugcggagaauug

SEQ ID NO: 32657 - RNA, 32 nt, Homo Sapiens
uccaccuuccccgaccccgggcuggugccugc

SEQ ID NO: 32658 - RNA, 32 nt, Homo Sapiens
uagcuucuagaacaagauaaccacugcugcug

SEQ ID NO: 32659 - RNA, 32 nt, Homo Sapiens
cggucgcccgcccgcacgcccggagcggggaa

SEQ ID NO: 32660 - RNA, 32 nt, Homo Sapiens
cugccugagucccagcucccagcuggagaauc

SEQ ID NO: 32661 - RNA, 32 nt, Homo Sapiens
gcaguauaaaguuuuaaaugcauaaaauaaaa

SEQ ID NO: 32662 - RNA, 32 nt, Homo Sapiens
uuuauauuccgugaauguauauugucuuguaa

SEQ ID NO: 32663 - RNA, 32 nt, Homo Sapiens
ucuggucaugguccucuccaccagucaaggag

SEQ ID NO: 32664 - RNA, 32 nt, Homo Sapiens
aucuguucuaguuaaugauuugggagauuuuu

SEQ ID NO: 32665 - RNA, 32 nt, Homo Sapiens
gcagcucuggaugucgcccacccagcugccag

SEQ ID NO: 32666 - RNA, 32 nt, Homo Sapiens
cuguauauuaccuggugauaguugcuuuucac

SEQ ID NO: 32667 - RNA, 32 nt, Homo Sapiens
aacugcacauauauacauuacauaaaugaaau

SEQ ID NO: 32668 - RNA, 32 nt, Homo Sapiens
uccggccugcgcagcccggcccggccauggcg

SEQ ID NO: 32669 - RNA, 32 nt, Homo Sapiens
cggggucucuggguucugggccccacuguucc

SEQ ID NO: 32670 - RNA, 32 nt, Homo Sapiens
cuaccaccuuccuccuaccucuucccauauug

SEQ ID NO: 32671 - RNA, 32 nt, Homo Sapiens
uuuccuugauacucuauauaaauagaggauau

SEQ ID NO: 32672 - RNA, 32 nt, Homo Sapiens
gagaaauaauuuccuucuuuaaagcaaguaua

SEQ ID NO: 32673 - RNA, 32 nt, Homo Sapiens
acagaaacucaggagcacccccugccugagcu

SEQ ID NO: 32674 - RNA, 32 nt, Homo Sapiens
cggccgagcccagcucuccgagcaccgggucg

SEQ ID NO: 32675 - RNA, 32 nt, Homo Sapiens
cuggagguagccgaccugaggacauggcuucu

SEQ ID NO: 32676 - RNA, 32 nt, Homo Sapiens
auggugaaauccugucucuaauaaaaauacaa

SEQ ID NO: 32677 - RNA, 32 nt, Homo Sapiens
ugcccacuuaggacuuuucgaauagugcucau

SEQ ID NO: 32678 - RNA, 32 nt, Homo Sapiens
cacauccaacuuuaauaaaauaugguggucuu

SEQ ID NO: 32679 - RNA, 32 nt, Homo Sapiens
ccccaaauccgaaccuccucugugaagcauuc

SEQ ID NO: 32680 - RNA, 32 nt, Homo Sapiens
cccagucuagcauuggaaccacuucuaggaac

SEQ ID NO: 32681 - RNA, 32 nt, Homo Sapiens
uaucacaugaggaacuccaugaagagaaugug

SEQ ID NO: 32682 - RNA, 32 nt, Homo Sapiens
uuacuuuguaauuuauauuggauuuuuagcag

SEQ ID NO: 32683 - RNA, 32 nt, Homo Sapiens
caaagaaucuucaaccugaggaccaguuacau

SEQ ID NO: 32684 - RNA, 32 nt, Homo Sapiens
ugaaaucuuucccgcggcacaaacaggcgccc

SEQ ID NO: 32685 - RNA, 32 nt, Homo Sapiens
gaaguauuuguauccuuuuacaaaagaaaagc

SEQ ID NO: 32686 - RNA, 32 nt, Homo Sapiens
ccuggggaccggggcaggcacccacggggcuc

SEQ ID NO: 32687 - RNA, 32 nt, Homo Sapiens
auagagaacaaaaggaaaagauuguuaccacc

SEQ ID NO: 32688 - RNA, 32 nt, Homo Sapiens
auaaggaguauuuugguagaguauauacauac

SEQ ID NO: 32689 - RNA, 32 nt, Homo Sapiens
agccucaggaggagggugugggccgaggcgcg

SEQ ID NO: 32690 - RNA, 32 nt, Homo Sapiens
ugcccuuucccuccccuggugaugauggaaac

SEQ ID NO: 32691 - RNA, 32 nt, Homo Sapiens
cccggggcggccuaggcgccuugucggccggg

SEQ ID NO: 32692 - RNA, 32 nt, Homo Sapiens
guuuccugaauuuuuuauauggugauuuguau

SEQ ID NO: 32693 - RNA, 32 nt, Homo Sapiens
gucccgggaagccccagcacugccgcugccac

SEQ ID NO: 32694 - RNA, 32 nt, Homo Sapiens
cugaggcagaggaggcaagggcugguccagag

SEQ ID NO: 32695 - RNA, 32 nt, Homo Sapiens
uugggauguuuccuuaauuuauuuaaauaacu

SEQ ID NO: 32696 - RNA, 32 nt, Homo Sapiens
gucuggguaccccccauguaccucuggguccu

SEQ ID NO: 32697 - RNA, 32 nt, Homo Sapiens
guuaagcagaagaagucaguaguuauucuccc

SEQ ID NO: 32698 - RNA, 32 nt, Homo Sapiens
gcuaugcccacagcacaaagccaggcuucacu

SEQ ID NO: 32699 - RNA, 32 nt, Homo Sapiens
cccuacgcggagcggcuagacgccgaguccga

SEQ ID NO: 32700 - RNA, 32 nt, Homo Sapiens
auggcuuugcacugagcagcucagucuacugg

SEQ ID NO: 32701 - RNA, 32 nt, Homo Sapiens
auuacugaaaaccauguuaauuuuuagaacuc

SEQ ID NO: 32702 - RNA, 32 nt, Homo Sapiens
aaguguagaauucuuuaguuuauuuuguuccu

SEQ ID NO: 32703 - RNA, 32 nt, Homo Sapiens
ugcuuuccacacuugacagugguuggcuuuga

SEQ ID NO: 32704 - RNA, 32 nt, Homo Sapiens
guggcagcagggacagaaaacaacagagauac

SEQ ID NO: 32705 - RNA, 32 nt, Homo Sapiens
gcccaagaggagaggaaugggaagagugcccc

SEQ ID NO: 32706 - RNA, 30 nt, Homo Sapiens
ggccuagagaagcucaacaaguugccuaag

SEQ ID NO: 32707 - RNA, 32 nt, Homo Sapiens
gacauuuauauggguuuauuuucauucugcca

SEQ ID NO: 32708 - RNA, 32 nt, Homo Sapiens
uauggacuuccacugaaucccucucauccucc

SEQ ID NO: 32709 - RNA, 32 nt, Homo Sapiens
acacagcucuucucuccuucucucuucucuuc

SEQ ID NO: 32710 - RNA, 32 nt, Homo Sapiens
auacuagugaaguaagaaauuuugcuuguugu

SEQ ID NO: 32711 - RNA, 32 nt, Homo Sapiens
auagaaugcccaggagguugccccgcugauua

SEQ ID NO: 32712 - RNA, 32 nt, Homo Sapiens
ucggccugacccagcccccauggcuucagaag

SEQ ID NO: 32713 - RNA, 29 nt, Homo Sapiens
ucggaugaaccaagggaagagaaauaaug

SEQ ID NO: 32714 - RNA, 32 nt, Homo Sapiens
ugccucauucauccauuuuucuuaaaagcugg

SEQ ID NO: 32715 - RNA, 32 nt, Homo Sapiens
aaaaauucagcuuucauguuucugauuccaga

SEQ ID NO: 32716 - RNA, 32 nt, Homo Sapiens
ugcugucaggguggcaccacugcucucugaac

SEQ ID NO: 32717 - RNA, 32 nt, Homo Sapiens
uaggcggcagauuuuuaaggaaguauuauuuu

SEQ ID NO: 32718 - RNA, 32 nt, Homo Sapiens
ccugugcuggccuggccuugccugcuggcacc

SEQ ID NO: 32719 - RNA, 32 nt, Homo Sapiens
cgccgggugcgcggcuucgccgcccgaggucg

SEQ ID NO: 32720 - RNA, 32 nt, Homo Sapiens
uauuauccagcuaucuucuccuuuccacuggu

SEQ ID NO: 32721 - RNA, 32 nt, Homo Sapiens
caccugccaccacacacacacacacacacaca

SEQ ID NO: 32722 - RNA, 32 nt, Homo Sapiens
ucugcuagaucuaguucucaaucacugcuccc

SEQ ID NO: 32723 - RNA, 32 nt, Homo Sapiens
uaucacuccgagucucaauggucuggcugugu

SEQ ID NO: 32724 - RNA, 32 nt, Homo Sapiens
uuaucugaaugcugagaagaugauguuuugau

SEQ ID NO: 32725 - RNA, 32 nt, Homo Sapiens
uuacagcgugaucuaccacaccuggccaaucc

SEQ ID NO: 32726 - RNA, 31 nt, Homo Sapiens
gacuggaaauaaaugcauuuuguagcaaaaa

SEQ ID NO: 32727 - RNA, 32 nt, Homo Sapiens
ccccggaaguugcgugccaaguuugguuuuuu

SEQ ID NO: 32728 - RNA, 32 nt, Homo Sapiens
aagguguuacagcacaugaaggccgugcaggc

SEQ ID NO: 32729 - RNA, 31 nt, Homo Sapiens
gagacuuggucauacaccugaguuauauaaa

SEQ ID NO: 32730 - RNA, 32 nt, Homo Sapiens
caagcucaccccagccuuccuucccugacccu

SEQ ID NO: 32731 - RNA, 32 nt, Homo Sapiens
cgagcaauuuggaagaaaaaaccuaaggugcu

SEQ ID NO: 32732 - RNA, 32 nt, Homo Sapiens
uggcugccucccucuuugugccccacaggcuc

SEQ ID NO: 32733 - RNA, 32 nt, Homo Sapiens
agaaauuugugaucccuauauacaauauagga

SEQ ID NO: 32734 - RNA, 31 nt, Homo Sapiens
ucacuugguaacugccugucuugguuucccg

SEQ ID NO: 32735 - RNA, 32 nt, Homo Sapiens
gcugcugagggcaguucugugcuuuauuauga

SEQ ID NO: 32736 - RNA, 32 nt, Homo Sapiens
uuccuggcauucagguucugugcugaaaccac

SEQ ID NO: 32737 - RNA, 32 nt, Homo Sapiens
uugauggugacugaaauucugaaaauaugcag

SEQ ID NO: 32738 - RNA, 32 nt, Homo Sapiens
uauauuucauucauuaccccagugucuagugu

SEQ ID NO: 32739 - RNA, 32 nt, Homo Sapiens
ccaaacacaucugaacauuagaaggaacaaac

SEQ ID NO: 32740 - RNA, 32 nt, Homo Sapiens
augccuucuggaauuucaauagcaauucccuu

SEQ ID NO: 32741 - RNA, 32 nt, Homo Sapiens
gcuacucugacauuaugggagcuucaaaauug

SEQ ID NO: 32742 - RNA, 31 nt, Homo Sapiens
gggccgcacuccagccugcccuucgugaguu

SEQ ID NO: 32743 - RNA, 32 nt, Homo Sapiens
auuuugcaaacacauuuuccugacagauuuuu

SEQ ID NO: 32744 - RNA, 32 nt, Homo Sapiens
caaagccucaaucccuacccccuccaaggggc

SEQ ID NO: 32745 - RNA, 32 nt, Homo Sapiens
ggauggccacuggcagugauggggauggagua

SEQ ID NO: 32746 - RNA, 32 nt, Homo Sapiens
ccaagcaugcuucagggaaggccuggcagcag

SEQ ID NO: 32747 - RNA, 32 nt, Homo Sapiens
cuuuucuccucguccacauuuuccaaucugua

SEQ ID NO: 32748 - RNA, 32 nt, Homo Sapiens
agaaagguggacuggaaggggcccgugggagu

SEQ ID NO: 32749 - RNA, 32 nt, Homo Sapiens
uccacacacuaguccuuggaggaagguugaga

SEQ ID NO: 32750 - RNA, 29 nt, Homo Sapiens
gagucagaauauuuuugaaagcuacgcag

SEQ ID NO: 32751 - RNA, 32 nt, Homo Sapiens
guuuucaguuauaaguuuaguaaauauuaaua

SEQ ID NO: 32752 - RNA, 32 nt, Homo Sapiens
ccuccaagcccgcucccugcucaggagcagca

SEQ ID NO: 32753 - RNA, 32 nt, Homo Sapiens
uccaguuaaaagacguccaucuucaagaagug

SEQ ID NO: 32754 - RNA, 32 nt, Homo Sapiens
aaguugucaaggaaacaaagcccaaauguuuu

SEQ ID NO: 32755 - RNA, 32 nt, Homo Sapiens
ggcacccuggauggcccggccccggggcccgu

SEQ ID NO: 32756 - RNA, 32 nt, Homo Sapiens
ucuuauuuuacuucuuuuagcuguuuaacuuu

SEQ ID NO: 32757 - RNA, 32 nt, Homo Sapiens
gaauugcagaggcuguuggucuuccaaguauu

SEQ ID NO: 32758 - RNA, 32 nt, Homo Sapiens
uuuguugcuaucaucaucaucaucaucauccu

SEQ ID NO: 32759 - RNA, 32 nt, Homo Sapiens
caauuagauaaaaauguaugugaugacuguau

SEQ ID NO: 32760 - RNA, 32 nt, Homo Sapiens
guaccgaggcgaggaggaaaaagcaggggggc

SEQ ID NO: 32761 - RNA, 32 nt, Homo Sapiens
ggugggugcauuuuaauuuuuucauucccugg

SEQ ID NO: 32762 - RNA, 32 nt, Homo Sapiens
ugccccaggaugccuuggcagugucucccaca

SEQ ID NO: 32763 - RNA, 32 nt, Homo Sapiens
aaauauaaaaaauaauuuccauguaaguuacc

SEQ ID NO: 32764 - RNA, 32 nt, Homo Sapiens
agcaaccaggacgaaguugagaaggaaaacgc

SEQ ID NO: 32765 - RNA, 32 nt, Homo Sapiens
ugaugugcaauaaaccaaaaaggcuuuauuaa

SEQ ID NO: 32766 - RNA, 32 nt, Homo Sapiens
ccuuugcucagagaucauaaauuuauguguga

SEQ ID NO: 32767 - RNA, 32 nt, Homo Sapiens
agguaccgcacgagagggugcgggggcuuggg

SEQ ID NO: 32768 - RNA, 32 nt, Homo Sapiens
cuucggauauauuaacuuuauguagcaguucu

SEQ ID NO: 32769 - RNA, 32 nt, Homo Sapiens
gaaugaaugcaugagugaauccauuugugaga

SEQ ID NO: 32770 - RNA, 32 nt, Homo Sapiens
uggaaguggcaaggggcuucccuccugggggc

SEQ ID NO: 32771 - RNA, 32 nt, Homo Sapiens
uucccuuucagagccccagggaucucaucugg

SEQ ID NO: 32772 - RNA, 32 nt, Homo Sapiens
cagcacccaaccugacccccaucugccacagg

SEQ ID NO: 32773 - RNA, 32 nt, Homo Sapiens
agagguaaaaauuaaauuuggacuauaauguc

SEQ ID NO: 32774 - RNA, 32 nt, Homo Sapiens
aagagaauuuauuuccuucuccacucucucca

SEQ ID NO: 32775 - RNA, 32 nt, Homo Sapiens
agcucaggucuguuuguaaaucuuuaauaaau

SEQ ID NO: 32776 - RNA, 32 nt, Homo Sapiens
gcuugaacgucugugacccagcccucaccguc

SEQ ID NO: 32777 - RNA, 32 nt, Homo Sapiens
cgccgaccucaucugugcagcgcggugcagcc

SEQ ID NO: 32778 - RNA, 32 nt, Homo Sapiens
ugcguggcguccccgucuccguuggggccauu

SEQ ID NO: 32779 - RNA, 32 nt, Homo Sapiens
agcaaaacucgccuguuuuuguccucaauggc

SEQ ID NO: 32780 - RNA, 32 nt, Homo Sapiens
cuuuugcuuuaucuucaguguaccuccuuaau

SEQ ID NO: 32781 - RNA, 32 nt, Homo Sapiens
ugaccugaacuuuagaaucuuauuuauggaga

SEQ ID NO: 32782 - RNA, 32 nt, Homo Sapiens
cacggccccccuccugcccucgccagccggca

SEQ ID NO: 32783 - RNA, 32 nt, Homo Sapiens
gccagguucuauuuggaauuuauauacaaccu

SEQ ID NO: 32784 - RNA, 32 nt, Homo Sapiens
gagucuccaaauaaaaaggguuuuguucagau

SEQ ID NO: 32785 - RNA, 32 nt, Homo Sapiens
agggccagggcggugggcgcgcgcagagggaa

SEQ ID NO: 32786 - RNA, 30 nt, Homo Sapiens
agaaaggauaaaauaccagcaucaacuuac

SEQ ID NO: 32787 - RNA, 32 nt, Homo Sapiens
agcauggucauguucgugguguccuggcagug

SEQ ID NO: 32788 - RNA, 32 nt, Homo Sapiens
aagaacgccgccauccagccaccauuccaagg

SEQ ID NO: 32789 - RNA, 32 nt, Homo Sapiens
uuuagcaaaugcaacagacaagaauauccaac

SEQ ID NO: 32790 - RNA, 32 nt, Homo Sapiens
ugcuccaaggcuuuugagacacaagggaaucu

SEQ ID NO: 32791 - RNA, 32 nt, Homo Sapiens
aaauucauuauaagguaacugauaaaaacagg

SEQ ID NO: 32792 - RNA, 32 nt, Homo Sapiens
uccuuucuucagaacauaugacuuucauuucc

SEQ ID NO: 32793 - RNA, 32 nt, Homo Sapiens
accuggaaaggggacucuguuggccauuggaa

SEQ ID NO: 32794 - RNA, 32 nt, Homo Sapiens
ucauguuggagguuggggaagaaccugggcau

SEQ ID NO: 32795 - RNA, 32 nt, Homo Sapiens
uuauauguauaaauauuguaauucugcaauug

SEQ ID NO: 32796 - RNA, 32 nt, Homo Sapiens
auccauaaaugcaauaauaugcauguuaacaa

SEQ ID NO: 32797 - RNA, 32 nt, Homo Sapiens
cuucugugacuucuguguuagccaucuuauuu

SEQ ID NO: 32798 - RNA, 32 nt, Homo Sapiens
ccgagucauggucucgggccuguaggguggga

SEQ ID NO: 32799 - RNA, 32 nt, Homo Sapiens
uuaagaaaggcugguuaccaucggaguuuaca

SEQ ID NO: 32800 - RNA, 32 nt, Homo Sapiens
uggguguauaaguugcagaaauuuucucccca

SEQ ID NO: 32801 - RNA, 32 nt, Homo Sapiens
ugggaagcuggggacauugcuaugcaaaugug

SEQ ID NO: 32802 - RNA, 32 nt, Homo Sapiens
uucaaagccaaguuuauauacaauuauaucag

SEQ ID NO: 32803 - RNA, 32 nt, Homo Sapiens
aguuaaugugucaagaaaccaacucuauuaag

SEQ ID NO: 32804 - RNA, 32 nt, Homo Sapiens
gucccagcuccagugcuguggagcaugguuuc

SEQ ID NO: 32805 - RNA, 32 nt, Homo Sapiens
acgugucccagggcccaaaagucagaagggcc

SEQ ID NO: 32806 - RNA, 32 nt, Homo Sapiens
augggagaaaauaaugugacauuucaaaaaca

SEQ ID NO: 32807 - RNA, 32 nt, Homo Sapiens
aggggcagauucuagucgggagcccaugcccu

SEQ ID NO: 32808 - RNA, 32 nt, Homo Sapiens
cagugugugaagcaugaggagaaggagcacau

SEQ ID NO: 32809 - RNA, 32 nt, Homo Sapiens
ccacugaccacacuuuccccaaggcugggucu

SEQ ID NO: 32810 - RNA, 32 nt, Homo Sapiens
ccagaagucacuuagagcaucauuccauaacc

SEQ ID NO: 32811 - RNA, 32 nt, Homo Sapiens
aaaguccagucuuuuugacaugcguacauuuu

SEQ ID NO: 32812 - RNA, 32 nt, Homo Sapiens
uccggcuggaggaggagccgcagaggagugcc

SEQ ID NO: 32813 - RNA, 32 nt, Homo Sapiens
uaugcccgucacauaacagccgaggcaccgag

SEQ ID NO: 32814 - RNA, 32 nt, Homo Sapiens
auaacuccagcauucaguuguagaaauacugg

SEQ ID NO: 32815 - RNA, 32 nt, Homo Sapiens
aaugucuucuaaacaauguaaucuaaaaauaa

SEQ ID NO: 32816 - RNA, 32 nt, Homo Sapiens
ugugcagcuuugcauauacacacaugcauaca

SEQ ID NO: 32817 - RNA, 32 nt, Homo Sapiens
cuucagggagaggaagccggcggccucacugc

SEQ ID NO: 32818 - RNA, 28 nt, Homo Sapiens
accauggagaagcuguuguguuucuugg

SEQ ID NO: 32819 - RNA, 32 nt, Homo Sapiens
gccgucgccgacgacgcgcgggaggaggagga

SEQ ID NO: 32820 - RNA, 32 nt, Homo Sapiens
cgcggaccgcccggcguccggccggacugaga

SEQ ID NO: 32821 - RNA, 32 nt, Homo Sapiens
aagcauuauuucugcccuagaguuguucacag

SEQ ID NO: 32822 - RNA, 30 nt, Homo Sapiens
gcuuuuccuggggcuggugagucuguuggg

SEQ ID NO: 32823 - RNA, 27 nt, Homo Sapiens
ugauggguuuuguucagccccugccuu

SEQ ID NO: 32824 - RNA, 32 nt, Homo Sapiens
aggaugaguacuuuucuagaagucauuaauau

SEQ ID NO: 32825 - RNA, 32 nt, Homo Sapiens
ccagguaguggccucgggcaguccucaccagg

SEQ ID NO: 32826 - RNA, 32 nt, Homo Sapiens
ggaguugaaaauacaguaugauuguuuucuca

SEQ ID NO: 32827 - RNA, 32 nt, Homo Sapiens
ugagacaugcacccucauggcaggauucuagc

SEQ ID NO: 32828 - RNA, 32 nt, Homo Sapiens
gauuucauauuuugccucuaugaugaacggca

SEQ ID NO: 32829 - RNA, 32 nt, Homo Sapiens
gcaccagugagaccgacacgguugugccccau

SEQ ID NO: 32830 - RNA, 32 nt, Homo Sapiens
guuuaaagaccaaaaacugugcugagaaagua

SEQ ID NO: 32831 - RNA, 32 nt, Homo Sapiens
acaauacauuucuuauauaauuuuauaaguca

SEQ ID NO: 32832 - RNA, 32 nt, Homo Sapiens
cacacccugccaaugccuuagcacuggagagc

SEQ ID NO: 32833 - RNA, 32 nt, Homo Sapiens
cugguuuugcuuuuguuuaucuauaugucaaa

SEQ ID NO: 32834 - RNA, 32 nt, Homo Sapiens
uccaacuaucaugguaaggccagaaaucuucu

SEQ ID NO: 32835 - RNA, 32 nt, Homo Sapiens
uauccccagaaguggaauugcuaaaccauaug

SEQ ID NO: 32836 - RNA, 32 nt, Homo Sapiens
uugccacucacccacccacacugguaagggag

SEQ ID NO: 32837 - RNA, 32 nt, Homo Sapiens
gugcgugugcgucagggcucuccgggcggcaa

SEQ ID NO: 32838 - RNA, 32 nt, Homo Sapiens
cugcucccacugauuucuuucucuccauugag

SEQ ID NO: 32839 - RNA, 32 nt, Homo Sapiens
agcugugaaugaauucuccggguggacgaggg

SEQ ID NO: 32840 - RNA, 32 nt, Homo Sapiens
agguggguguauucuggucugcaccgcaccag

SEQ ID NO: 32841 - RNA, 32 nt, Homo Sapiens
cgcugcccggcggacucgacguccuccaccau

SEQ ID NO: 32842 - RNA, 32 nt, Homo Sapiens
ucaggauggaaaugauggcuugugaaacuaac

SEQ ID NO: 32843 - RNA, 32 nt, Homo Sapiens
aagaaaagcguuaaguccaucuuaauagaauc

SEQ ID NO: 32844 - RNA, 32 nt, Homo Sapiens
uaacuuacuuugauuuccuuguucaggucagg

SEQ ID NO: 32845 - RNA, 32 nt, Homo Sapiens
aucaacgggcgcaccaaggccaugguggcgug

SEQ ID NO: 32846 - RNA, 32 nt, Homo Sapiens
gccuucaaugucaaguuuauggggugguaggu

SEQ ID NO: 32847 - RNA, 32 nt, Homo Sapiens
ucucugccacuccugacccagcccugaacaaa

SEQ ID NO: 32848 - RNA, 32 nt, Homo Sapiens
cugagacagaguuaagaugcaagaggucaugg

SEQ ID NO: 32849 - RNA, 32 nt, Homo Sapiens
cgggcgccgcggcuucaauggcgccaucgccc

SEQ ID NO: 32850 - RNA, 32 nt, Homo Sapiens
ucaggucgccuggagcguggcacgcagagccc

SEQ ID NO: 32851 - RNA, 32 nt, Homo Sapiens
auuucuguauaauaaacuugaccugaaauuau

SEQ ID NO: 32852 - RNA, 32 nt, Homo Sapiens
ccaugaauucagugaacucuuuucucauucuc

SEQ ID NO: 32853 - RNA, 32 nt, Homo Sapiens
uugacauuuugcagugauacaacagcuccacu

SEQ ID NO: 32854 - RNA, 32 nt, Homo Sapiens
aaaaccaaggcucgagaacuacaggaagaaug

SEQ ID NO: 32855 - RNA, 32 nt, Homo Sapiens
ucaagcgccagauugaauacuacuucagcgug

SEQ ID NO: 32856 - RNA, 32 nt, Homo Sapiens
ugacuagggaagcucagaguagcucagcgucc

SEQ ID NO: 32857 - RNA, 32 nt, Homo Sapiens
ggucagcggggcagcggggcuggccaugaggg

SEQ ID NO: 32858 - RNA, 32 nt, Homo Sapiens
uccagauccauuccucaugucucccacggucc

SEQ ID NO: 32859 - RNA, 32 nt, Homo Sapiens
caaaauguauauauuuagugcugcaucuuaua

SEQ ID NO: 32860 - RNA, 32 nt, Homo Sapiens
cccaggagucugggccagcccaccgcaaagaa

SEQ ID NO: 32861 - RNA, 32 nt, Homo Sapiens
ggaaaugugggaaaauauaaacgagggaagaa

SEQ ID NO: 32862 - RNA, 32 nt, Homo Sapiens
ggcacgaggcgggggcggugcaugacgcgccu

SEQ ID NO: 32863 - RNA, 32 nt, Homo Sapiens
aaguuguguacuucguccuaaauuaaauugau

SEQ ID NO: 32864 - RNA, 30 nt, Homo Sapiens
uuugauuugucaauaaacgaaucaaacugg

SEQ ID NO: 32865 - RNA, 32 nt, Homo Sapiens
uaagcaaugcugaagcacuugcagcucaccua

SEQ ID NO: 32866 - RNA, 27 nt, Homo Sapiens
ccuccagccuccuccagcccccaggca

SEQ ID NO: 32867 - RNA, 32 nt, Homo Sapiens
uguagcacgccagugcuguuucccggccucca

SEQ ID NO: 32868 - RNA, 32 nt, Homo Sapiens
aguaauuggaaugugguucuaguuccagagga

SEQ ID NO: 32869 - RNA, 32 nt, Homo Sapiens
ugacuuuauaaauuauuuaauaaaaugaacua

SEQ ID NO: 32870 - RNA, 32 nt, Homo Sapiens
uuauauauauccauuuuuucugauuuauucaa

SEQ ID NO: 32871 - RNA, 32 nt, Homo Sapiens
guuauuugucuuuuuauuauugaguuguaaga

SEQ ID NO: 32872 - RNA, 32 nt, Homo Sapiens
aaaauguagcauaauuuuuuuaaauuauauau

SEQ ID NO: 32873 - RNA, 32 nt, Homo Sapiens
caugguuuucucuguuugugacagauuaguaa

SEQ ID NO: 32874 - RNA, 32 nt, Homo Sapiens
ccaagguggcugggaucuggccccacagaugg

SEQ ID NO: 32875 - RNA, 32 nt, Homo Sapiens
cauuagacaaaauuauuuaaagucaauaaauu

SEQ ID NO: 32876 - RNA, 32 nt, Homo Sapiens
gcugccugccuugccagcacccguguccugag

SEQ ID NO: 32877 - RNA, 32 nt, Homo Sapiens
gcugacggacauugaggcuggaugcugcgauc

SEQ ID NO: 32878 - RNA, 32 nt, Homo Sapiens
cgaugaguugaccagcagcuggaggccgugug

SEQ ID NO: 32879 - RNA, 31 nt, Homo Sapiens
augcaaggagaugcuaaguccacuuuggcug

SEQ ID NO: 32880 - RNA, 31 nt, Homo Sapiens
uucauacuacagagaaaguccacaaccaauc

SEQ ID NO: 32881 - RNA, 32 nt, Homo Sapiens
auuucuaaugaaauguuucacuauaacgcugc

SEQ ID NO: 32882 - RNA, 31 nt, Homo Sapiens
caugugugaaacauacucauagauguuaugc

SEQ ID NO: 32883 - RNA, 32 nt, Homo Sapiens
aauuauaacuaaaagaccaaauacugaaguua

SEQ ID NO: 32884 - RNA, 32 nt, Homo Sapiens
auaacauacaguuuugucacuuuucaaguacu

SEQ ID NO: 32885 - RNA, 32 nt, Homo Sapiens
guuaaauaccuagcugcagauugugccaucac

SEQ ID NO: 32886 - RNA, 32 nt, Homo Sapiens
ccccgcaauaugccgccgcggcccucuggcuc

SEQ ID NO: 32887 - RNA, 32 nt, Homo Sapiens
uccucuuggguucuugaacagccuguacgcug

SEQ ID NO: 32888 - RNA, 32 nt, Homo Sapiens
uaacgauggaggacagugaauuccuagcuuau

SEQ ID NO: 32889 - RNA, 32 nt, Homo Sapiens
cgccacugcacuccagccugggugacugaggg

SEQ ID NO: 32890 - RNA, 32 nt, Homo Sapiens
ggcagaauauugguuucuuuuacuugauguuu

SEQ ID NO: 32891 - RNA, 32 nt, Homo Sapiens
uuuuuaaaaaauacuuauuagaagcaaacugc

SEQ ID NO: 32892 - RNA, 32 nt, Homo Sapiens
cucaacagcaucuucauuguauggauggaccc

SEQ ID NO: 32893 - RNA, 32 nt, Homo Sapiens
ggggagcccugcgccugagcugcgaggcggga

SEQ ID NO: 32894 - RNA, 32 nt, Homo Sapiens
cuguaguagcugaguucuuuuccauguuaccg

SEQ ID NO: 32895 - RNA, 32 nt, Homo Sapiens
cuuuuauaagaaauaggaaauauuuuaauguu

SEQ ID NO: 32896 - RNA, 32 nt, Homo Sapiens
uuuaauaaccagcucauaaaucuccuaaauau

SEQ ID NO: 32897 - RNA, 32 nt, Homo Sapiens
gcuucacccuugcucuguucacagcaaagcac

SEQ ID NO: 32898 - RNA, 32 nt, Homo Sapiens
acugggcaaggugggguauuuauuccucacua

SEQ ID NO: 32899 - RNA, 32 nt, Homo Sapiens
ggaggaaaacagugaaauucauguuugauuga

SEQ ID NO: 32900 - RNA, 29 nt, Homo Sapiens
cagaaauuuuaugaguaccacaaagcuug

SEQ ID NO: 32901 - RNA, 32 nt, Homo Sapiens
caaagguccccggccucaguuucccugcagug

SEQ ID NO: 32902 - RNA, 32 nt, Homo Sapiens
aucagcacaaucccggccccgcccucgcggcg

SEQ ID NO: 32903 - RNA, 32 nt, Homo Sapiens
gcuacuguucuuugaauaagugaauguuucuu

SEQ ID NO: 32904 - RNA, 32 nt, Homo Sapiens
ucuucuuuucccuuuccaucuuucagcauaga

SEQ ID NO: 32905 - RNA, 32 nt, Homo Sapiens
gguguggcauuuggaaacgggaauaaacaaaa

SEQ ID NO: 32906 - RNA, 32 nt, Homo Sapiens
acguuggcugugcuccacggccuggcaugggg

SEQ ID NO: 32907 - RNA, 29 nt, Homo Sapiens
cccaaacaaaaauaaauuucucucccaaa

SEQ ID NO: 32908 - RNA, 32 nt, Homo Sapiens
cuuggccacugcagucugggccccaucauuaa

SEQ ID NO: 32909 - RNA, 31 nt, Homo Sapiens
gacaggguuucacuguguuagccaggguggu

SEQ ID NO: 32910 - RNA, 32 nt, Homo Sapiens
gaaaagccagaaaaauagagaagaaaggaacc

SEQ ID NO: 32911 - RNA, 32 nt, Homo Sapiens
cuucuucauuggcaaccacaaggcaccugagg

SEQ ID NO: 32912 - RNA, 32 nt, Homo Sapiens
aaauaggaaaaauuacuuuacagguuguuuua

SEQ ID NO: 32913 - RNA, 32 nt, Homo Sapiens
cugggggaucccccgauccccccgcgccgcuc

SEQ ID NO: 32914 - RNA, 32 nt, Homo Sapiens
cugggcuccgcggcugaggcaccuagggaguu

SEQ ID NO: 32915 - RNA, 32 nt, Homo Sapiens
cccccuuccucuagcccucccugcguuuagau

SEQ ID NO: 32916 - RNA, 32 nt, Homo Sapiens
gggacaaauccacauuggggucuagaaacauc

SEQ ID NO: 32917 - RNA, 32 nt, Homo Sapiens
gcaaagugugcagcuguaacugcucacgccaa

SEQ ID NO: 32918 - RNA, 32 nt, Homo Sapiens
gaauggagaaaguuucugugcuaccccuacaa

SEQ ID NO: 32919 - RNA, 32 nt, Homo Sapiens
augugauucuguaacuuuuuuauuuuuauuuu

SEQ ID NO: 32920 - RNA, 32 nt, Homo Sapiens
cccuacuaaggauacaaaaauuggccgggugc

SEQ ID NO: 32921 - RNA, 32 nt, Homo Sapiens
ccucgaucugagggccccggcgcugcggccac

SEQ ID NO: 32922 - RNA, 32 nt, Homo Sapiens
cuaauuguccuggucuuaaguucugcaaccca

SEQ ID NO: 32923 - RNA, 32 nt, Homo Sapiens
aagacuguuuuaaaagaaaucaauuuagggaa

SEQ ID NO: 32924 - RNA, 32 nt, Homo Sapiens
acccagcgccccacuaagccuugcugacacgc

SEQ ID NO: 32925 - RNA, 32 nt, Homo Sapiens
gagguggauccgcagagcugccucugggcgcc

SEQ ID NO: 32926 - RNA, 32 nt, Homo Sapiens
aaacgacugaccuuccuuaaaaacagaaugac

SEQ ID NO: 32927 - RNA, 32 nt, Homo Sapiens
gaccggcaggggcucucuggcuuccugaaagc

SEQ ID NO: 32928 - RNA, 32 nt, Homo Sapiens
caggcuggcuccuggggcgacgccacgccaga

SEQ ID NO: 32929 - RNA, 32 nt, Homo Sapiens
acccuuugcauuugauuucuaaacauuccuuc

SEQ ID NO: 32930 - RNA, 32 nt, Homo Sapiens
ugacuagcaauggccuuagcugucccacacaa

SEQ ID NO: 32931 - RNA, 30 nt, Homo Sapiens
acccgagaggcgcgguagccggcgcgggcg

SEQ ID NO: 32932 - RNA, 32 nt, Homo Sapiens
gcguccucccgcgcgcuaugacggccagcgca

SEQ ID NO: 32933 - RNA, 32 nt, Homo Sapiens
ucuuccugucuccuuugaaguagacucauucu

SEQ ID NO: 32934 - RNA, 32 nt, Homo Sapiens
aguacaugguaacagccaugucaucuuacaca

SEQ ID NO: 32935 - RNA, 32 nt, Homo Sapiens
gaaacaccagcuuuuggggugauagcacuuuc

SEQ ID NO: 32936 - RNA, 32 nt, Homo Sapiens
cagaccucacugucagggucuuucugaugacg

SEQ ID NO: 32937 - RNA, 32 nt, Homo Sapiens
cguccuacacaggcugcccuggcagcugucuu

SEQ ID NO: 32938 - RNA, 32 nt, Homo Sapiens
uuaaaaagacuugagaaauuugaaagggggug

SEQ ID NO: 32939 - RNA, 32 nt, Homo Sapiens
ugccaagugagcagaaaacagcuccuggucuc

SEQ ID NO: 32940 - RNA, 32 nt, Homo Sapiens
ucuccacucaugacaaaucaacugugacccuc

SEQ ID NO: 32941 - RNA, 32 nt, Homo Sapiens
agcucuuccuaagggaaaugucacauauuauu

SEQ ID NO: 32942 - RNA, 32 nt, Homo Sapiens
uuauguucuaguuuugggacaaggguaaucag

SEQ ID NO: 32943 - RNA, 32 nt, Homo Sapiens
aacauggacuuccacucaccaaggcugaccug

SEQ ID NO: 32944 - RNA, 32 nt, Homo Sapiens
ccaaaauccaacaagugaaaauuucuuaaagg

SEQ ID NO: 32945 - RNA, 32 nt, Homo Sapiens
gcccuggaccagcucucuccacaccgcaugcu

SEQ ID NO: 32946 - RNA, 32 nt, Homo Sapiens
uggggcgcugggcacggccgggccccuccugc

SEQ ID NO: 32947 - RNA, 32 nt, Homo Sapiens
aagccugugaaugguccacaaaccugaaugag

SEQ ID NO: 32948 - RNA, 32 nt, Homo Sapiens
gaaggagcaagccgugaauuuaagggacgcug

SEQ ID NO: 32949 - RNA, 32 nt, Homo Sapiens
cugguuuuucuuucuuuuugguagaacacaac

SEQ ID NO: 32950 - RNA, 32 nt, Homo Sapiens
gauaccaucuucucggcuucuuucuucucccc

SEQ ID NO: 32951 - RNA, 32 nt, Homo Sapiens
caucuaccucuuguccuccccccaacaccacc

SEQ ID NO: 32952 - RNA, 32 nt, Homo Sapiens
auaaucuuaucccacaagaccccauaccuagu

SEQ ID NO: 32953 - RNA, 32 nt, Homo Sapiens
auaguuuugugauguguaacaguguauaauua

SEQ ID NO: 32954 - RNA, 32 nt, Homo Sapiens
uaaauaaaaaaguuaauagaaugugaucaaga

SEQ ID NO: 32955 - RNA, 32 nt, Homo Sapiens
uggcucacaccuguaaucccaacacuuuggaa

SEQ ID NO: 32956 - RNA, 32 nt, Homo Sapiens
ggcucacacacaggucugucugucacaaaccc

SEQ ID NO: 32957 - RNA, 32 nt, Homo Sapiens
uuacaggcaaggaaacaggcuccaagaggcug

SEQ ID NO: 32958 - RNA, 32 nt, Homo Sapiens
cccguccugguccagggcuggggucuuuagag

SEQ ID NO: 32959 - RNA, 32 nt, Homo Sapiens
cgagagcccuggagauucugggcgaggcuagu

SEQ ID NO: 32960 - RNA, 32 nt, Homo Sapiens
aaauugauugguuuuuuuacugaagcuauugu

SEQ ID NO: 32961 - RNA, 32 nt, Homo Sapiens
uaccccuuuacuagaaguuuuacuagaaaaug

SEQ ID NO: 32962 - RNA, 32 nt, Homo Sapiens
gucacccugcacagcaggccacagacucuccu

SEQ ID NO: 32963 - RNA, 32 nt, Homo Sapiens
aagaagguccgggagcccacggcgguuaauuc

SEQ ID NO: 32964 - RNA, 32 nt, Homo Sapiens
ggauacucgaagccacaggaucaauguggugc

SEQ ID NO: 32965 - RNA, 32 nt, Homo Sapiens
caaccuagaguauuauuuuacacuaagacgac

SEQ ID NO: 32966 - RNA, 32 nt, Homo Sapiens
ggguguggcaacgugccccccgcagaggccac

SEQ ID NO: 32967 - RNA, 32 nt, Homo Sapiens
gagucuuugugaugcuuugugaugugcgugug

SEQ ID NO: 32968 - RNA, 32 nt, Homo Sapiens
gaauucugugcagcugauugcagagcuggacc

SEQ ID NO: 32969 - RNA, 32 nt, Homo Sapiens
aggaacaguucuuuuccaguguuuuucgaauu

SEQ ID NO: 32970 - RNA, 32 nt, Homo Sapiens
gccgugccgggcgggagaccgccauggcgacc

SEQ ID NO: 32971 - RNA, 32 nt, Homo Sapiens
aggugcggacgggugccagugcgcaggugccg

SEQ ID NO: 32972 - RNA, 32 nt, Homo Sapiens
aggcuucgcggcugcgcccccggcccgcgcag

SEQ ID NO: 32973 - RNA, 32 nt, Homo Sapiens
ugggcccugcccacaagcacacccucaggccg

SEQ ID NO: 32974 - RNA, 32 nt, Homo Sapiens
ggcucucuggaaagagugugcugccccucccc

SEQ ID NO: 32975 - RNA, 32 nt, Homo Sapiens
agaacaauauuuucaaugucacucuuuucuca

SEQ ID NO: 32976 - RNA, 32 nt, Homo Sapiens
aucaggcaaauuguacuaguuguaguuacgag

SEQ ID NO: 32977 - RNA, 32 nt, Homo Sapiens
ccagucacuaguugguuggcaugagguggugu

SEQ ID NO: 32978 - RNA, 32 nt, Homo Sapiens
aggacuuugaauaaugugauauuuuucuuaua

SEQ ID NO: 32979 - RNA, 32 nt, Homo Sapiens
guguaggaauccagcugggcucccacugucug

SEQ ID NO: 32980 - RNA, 32 nt, Homo Sapiens
ggaaggagucacacgguaaaugggcgaaaucc

SEQ ID NO: 32981 - RNA, 32 nt, Homo Sapiens
cugggugcgggaagggggcucuggauuucggu

SEQ ID NO: 32982 - RNA, 32 nt, Homo Sapiens
ggccccuuucagucucaaaagugucuucauuu

SEQ ID NO: 32983 - RNA, 32 nt, Homo Sapiens
uucaucaccauccugguccuagcugguuugca

SEQ ID NO: 32984 - RNA, 32 nt, Homo Sapiens
gaaggaaaauacugaacucugucugaguggga

SEQ ID NO: 32985 - RNA, 32 nt, Homo Sapiens
ccaggcagcuggacagcacccagcgccuccuc

SEQ ID NO: 32986 - RNA, 32 nt, Homo Sapiens
cgcugcagcuggagcugcaggucucgccuuca

SEQ ID NO: 32987 - RNA, 32 nt, Homo Sapiens
gcacgauguagggcaccuuggaccucucucuc

SEQ ID NO: 32988 - RNA, 32 nt, Homo Sapiens
agggaucguucuucgcuuuuccuccggugccu

SEQ ID NO: 32989 - RNA, 32 nt, Homo Sapiens
auguucaucucuacaaaaaauaagaaagauaa

SEQ ID NO: 32990 - RNA, 32 nt, Homo Sapiens
uuacccauugcuaguguccaauuguauucaca

SEQ ID NO: 32991 - RNA, 32 nt, Homo Sapiens
cuaauugugcuguguucgugucuugcacugga

SEQ ID NO: 32992 - RNA, 32 nt, Homo Sapiens
agccuggccaacacggugaaaccccgucucuc

SEQ ID NO: 32993 - RNA, 32 nt, Homo Sapiens
aaagccaaguuaaauuucauauuaaagcaagu

SEQ ID NO: 32994 - RNA, 32 nt, Homo Sapiens
gcgggggguauuggaaaggcugaucaauaagg

SEQ ID NO: 32995 - RNA, 32 nt, Homo Sapiens
gcccccuggguuguggggugagaggaugugag

SEQ ID NO: 32996 - RNA, 32 nt, Homo Sapiens
gcaaucaaguucagguaauuuauuuuuagaua

SEQ ID NO: 32997 - RNA, 32 nt, Homo Sapiens
aaauaaaacuguaucugacauuuuaagccugu

SEQ ID NO: 32998 - RNA, 32 nt, Homo Sapiens
ccgaggcggcggugugggcgcgucaggccgcg

SEQ ID NO: 32999 - RNA, 32 nt, Homo Sapiens
gaggggaaucuguugcccagguccugcaaagg

SEQ ID NO: 33000 - RNA, 32 nt, Homo Sapiens
uagcuuuauuuuuucuaaaaucaguuugcgug

SEQ ID NO: 33001 - RNA, 32 nt, Homo Sapiens
aucagaacacuggacuugcuuuuuucugggag

SEQ ID NO: 33002 - RNA, 32 nt, Homo Sapiens
uagggcuccggcgcgucacgggccucagcugg

SEQ ID NO: 33003 - RNA, 32 nt, Homo Sapiens
gaccaggccggcgaccaccaggggccugagga

SEQ ID NO: 33004 - RNA, 32 nt, Homo Sapiens
acuuagaccaaaacugcaggcaucuacauaag

SEQ ID NO: 33005 - RNA, 30 nt, Homo Sapiens
ccugggagucucccugccucacuccucuag

SEQ ID NO: 33006 - RNA, 32 nt, Homo Sapiens
ccccagucucugucagcacucccuucuucccu

SEQ ID NO: 33007 - RNA, 30 nt, Homo Sapiens
gcaucugcuggucauuucgcccugacaguc

SEQ ID NO: 33008 - RNA, 32 nt, Homo Sapiens
uuggaagaaaaaaccuaaggugcuuuucaaaa

SEQ ID NO: 33009 - RNA, 32 nt, Homo Sapiens
ggaggagggugggccucucacccaggcuuucu

SEQ ID NO: 33010 - RNA, 32 nt, Homo Sapiens
uagccuggaaaacuuuuguguauucucagcuu

SEQ ID NO: 33011 - RNA, 32 nt, Homo Sapiens
aaucucggcucauugcaagcuccgccucccag

SEQ ID NO: 33012 - RNA, 32 nt, Homo Sapiens
cuaaaagcugaauggauaauaaaauuggacug

SEQ ID NO: 33013 - RNA, 32 nt, Homo Sapiens
uggagugccguggugcgaucuuagcucacugc

SEQ ID NO: 33014 - RNA, 31 nt, Homo Sapiens
ggagcuccaguccugaaccaggcccaagcug

SEQ ID NO: 33015 - RNA, 32 nt, Homo Sapiens
augguacggcauaaaaaguaacccucaaguga

SEQ ID NO: 33016 - RNA, 32 nt, Homo Sapiens
cuuggucggccgcgcuucagcacccgccgagc

SEQ ID NO: 33017 - RNA, 32 nt, Homo Sapiens
uagggagcauauacuauagugauuuucagccu

SEQ ID NO: 33018 - RNA, 32 nt, Homo Sapiens
ccccacaggaccagcugggaggacugguugug

SEQ ID NO: 33019 - RNA, 32 nt, Homo Sapiens
gguaaguugagguuaucuugggauaaaggguc

SEQ ID NO: 33020 - RNA, 32 nt, Homo Sapiens
gguuguucuagcaugaauacaauucuggaaac

SEQ ID NO: 33021 - RNA, 32 nt, Homo Sapiens
caauuuggauauuuccucuccuccuguagcca

SEQ ID NO: 33022 - RNA, 32 nt, Homo Sapiens
accuaaggacuuccuuccuccuccccugggca

SEQ ID NO: 33023 - RNA, 32 nt, Homo Sapiens
uuuguuuuacuuuagcauuuauuauucaugga

SEQ ID NO: 33024 - RNA, 30 nt, Homo Sapiens
acauuucccugugcugacggaagccaacuu

SEQ ID NO: 33025 - RNA, 32 nt, Homo Sapiens
acugagacucuuaaguuuuguuuagcaaugug

SEQ ID NO: 33026 - RNA, 31 nt, Homo Sapiens
ccuggggagcccccgcuccagggcucgcucc

SEQ ID NO: 33027 - RNA, 29 nt, Homo Sapiens
aucaaaaagagucuuaauuuucuaaaaca

SEQ ID NO: 33028 - RNA, 32 nt, Homo Sapiens
cagagauuggugccaacguaauaaucagccuc

SEQ ID NO: 33029 - RNA, 32 nt, Homo Sapiens
cccauuuuuuauuuuuugcggcggacgugguu

SEQ ID NO: 33030 - RNA, 32 nt, Homo Sapiens
ugaucuccauucucugcuuugcugcaucuacc

SEQ ID NO: 33031 - RNA, 32 nt, Homo Sapiens
ucugguguauggguauuaaauaaaauucauuc

SEQ ID NO: 33032 - RNA, 32 nt, Homo Sapiens
ugagauuaauaaaaucugaaaauguuauauaa

SEQ ID NO: 33033 - RNA, 32 nt, Homo Sapiens
gcuuugcaaaguucuuccuguugggcucaugc

SEQ ID NO: 33034 - RNA, 32 nt, Homo Sapiens
aacugcuggaaguguuaaaacacacacacccc

SEQ ID NO: 33035 - RNA, 32 nt, Homo Sapiens
gcuuggccugcugugauuccacuacaccuggc

SEQ ID NO: 33036 - RNA, 32 nt, Homo Sapiens
uuccacugucuccuagcuuaaauugcuucuaa

SEQ ID NO: 33037 - RNA, 32 nt, Homo Sapiens
aaguuuucuuaaguuucugaagaucaaggccu

SEQ ID NO: 33038 - RNA, 32 nt, Homo Sapiens
gaagaagcugucuucccauuuuccaugcacug

SEQ ID NO: 33039 - RNA, 32 nt, Homo Sapiens
cuccucccaacguggacuccugcccggcgaag

SEQ ID NO: 33040 - RNA, 32 nt, Homo Sapiens
cuugccuucccugaggcucaucucagcacaua

SEQ ID NO: 33041 - RNA, 32 nt, Homo Sapiens
ucugguuugguucgguuaucuaauggaaaggu

SEQ ID NO: 33042 - RNA, 32 nt, Homo Sapiens
aauguuaaaaauuauuccuuauucaauguauu

SEQ ID NO: 33043 - RNA, 32 nt, Homo Sapiens
gagcuuguuuauauuucauacuuuuuauacuu

SEQ ID NO: 33044 - RNA, 32 nt, Homo Sapiens
uauuaacaguaaaauauuugcauaacuaaugg

SEQ ID NO: 33045 - RNA, 32 nt, Homo Sapiens
ugggcgugguggcacauaccuguaaugccagc

SEQ ID NO: 33046 - RNA, 32 nt, Homo Sapiens
aauaaaaaugaaauucuuaaccaugucaaaug

SEQ ID NO: 33047 - RNA, 32 nt, Homo Sapiens
acuggggguggcaaugaagacacucugucugu

SEQ ID NO: 33048 - RNA, 32 nt, Homo Sapiens
aggucauugcugggugcacaagagggagguga

SEQ ID NO: 33049 - RNA, 32 nt, Homo Sapiens
gagagcaccgacacgaugcuggucuuccacgc

SEQ ID NO: 33050 - RNA, 32 nt, Homo Sapiens
auggccaggccucagggaccaaggagaugggg

SEQ ID NO: 33051 - RNA, 32 nt, Homo Sapiens
auauauaucaauguuuuccaauaaaauacagu

SEQ ID NO: 33052 - RNA, 32 nt, Homo Sapiens
gaaaucuaaugggaaauggaucacacgauuuc

SEQ ID NO: 33053 - RNA, 32 nt, Homo Sapiens
gggcaggcgacggcggcguguggauggaggcc

SEQ ID NO: 33054 - RNA, 30 nt, Homo Sapiens
uggugccauuuccuuccccaucuucauguu

SEQ ID NO: 33055 - RNA, 32 nt, Homo Sapiens
uugauauucuaaaaacaucuauuuuaauguua

SEQ ID NO: 33056 - RNA, 32 nt, Homo Sapiens
gccugccucacagaguuuagacaugacuagcc

SEQ ID NO: 33057 - RNA, 32 nt, Homo Sapiens
uauuaacugcaaacagcaauaauugucauuac

SEQ ID NO: 33058 - RNA, 32 nt, Homo Sapiens
ccacaguacaagccuugaacaucguccugcuu

SEQ ID NO: 33059 - RNA, 32 nt, Homo Sapiens
uauccugugauuccuuuggagagaauauauuu

SEQ ID NO: 33060 - RNA, 32 nt, Homo Sapiens
caguuuaaugaaagcuuaaaugucccugcgaa

SEQ ID NO: 33061 - RNA, 32 nt, Homo Sapiens
cucuuuagaaggaaaaggugcuauguaaaucu

SEQ ID NO: 33062 - RNA, 32 nt, Homo Sapiens
ugcacccauagauucacugccugaaauggaaa

SEQ ID NO: 33063 - RNA, 32 nt, Homo Sapiens
uagaucucuugacuagucaaggacugggaacg

SEQ ID NO: 33064 - RNA, 32 nt, Homo Sapiens
cagagcgugacccggagcaggugcuggacaca

SEQ ID NO: 33065 - RNA, 32 nt, Homo Sapiens
ccccacuuuaccauagagaccagugccuuggu

SEQ ID NO: 33066 - RNA, 32 nt, Homo Sapiens
ugcuucccugcccuuucccccuccucagguuc

SEQ ID NO: 33067 - RNA, 32 nt, Homo Sapiens
gcaagacccccucucaaaaauaaauaaaauaa

SEQ ID NO: 33068 - RNA, 32 nt, Homo Sapiens
acgugcagcagcauuggaaggcuggggccggg

SEQ ID NO: 33069 - RNA, 30 nt, Homo Sapiens
guugcccuccucuguggcggcaggaccuuu

SEQ ID NO: 33070 - RNA, 32 nt, Homo Sapiens
ccaaagaacagccguuccugugcggcccuucg

SEQ ID NO: 33071 - RNA, 32 nt, Homo Sapiens
acgaagcuacagcuugccaugugacuggagau

SEQ ID NO: 33072 - RNA, 32 nt, Homo Sapiens
uuuuaguagagacaggguuuugccauguuaga

SEQ ID NO: 33073 - RNA, 32 nt, Homo Sapiens
uucuuacaaguuccgaauuccaaauacagaga

SEQ ID NO: 33074 - RNA, 32 nt, Homo Sapiens
aguuauuuuguacagcuuuguaaauucuuaac

SEQ ID NO: 33075 - RNA, 32 nt, Homo Sapiens
cuuaaaaaaugaugaugaugauaaaaaccacg

SEQ ID NO: 33076 - RNA, 32 nt, Homo Sapiens
aggcaaacugggugcaggcagcucccuuuuug

SEQ ID NO: 33077 - RNA, 32 nt, Homo Sapiens
ugggugaacuuuaugagugaguaucuugguga

SEQ ID NO: 33078 - RNA, 32 nt, Homo Sapiens
gggaguggaagaaggaucuaaagggaaaaacu

SEQ ID NO: 33079 - RNA, 32 nt, Homo Sapiens
ugauugauucuauuuauauuauaugauauugg

SEQ ID NO: 33080 - RNA, 32 nt, Homo Sapiens
uuuggacccuuggccuaggagccuaaggaccu

SEQ ID NO: 33081 - RNA, 32 nt, Homo Sapiens
aggacauacugaccuaccucacagggguguug

SEQ ID NO: 33082 - RNA, 32 nt, Homo Sapiens
ggagaaaggugauucugauucuagaagcaccc

SEQ ID NO: 33083 - RNA, 32 nt, Homo Sapiens
aguucaugguugcauucagggauugcaaggac

SEQ ID NO: 33084 - RNA, 32 nt, Homo Sapiens
acucucuggugauugggugguggauagaagag

SEQ ID NO: 33085 - RNA, 32 nt, Homo Sapiens
ggcccagccaacaaagguuaacccaggacacu

SEQ ID NO: 33086 - RNA, 32 nt, Homo Sapiens
gaaacuggccgccccaggaugccgccagaauc

SEQ ID NO: 33087 - RNA, 32 nt, Homo Sapiens
ccuuaaaugaauuuuaauccaauaaaaacauu

SEQ ID NO: 33088 - RNA, 32 nt, Homo Sapiens
ccuguccaagcucgcggacgccggcggcguuu

SEQ ID NO: 33089 - RNA, 32 nt, Homo Sapiens
uuuuuauuuuccugugacuguuuuuguuuugu

SEQ ID NO: 33090 - RNA, 32 nt, Homo Sapiens
cgcccuguucccuccaccuagacugccugcug

SEQ ID NO: 33091 - RNA, 30 nt, Homo Sapiens
ugagcggguucccuggauagaaggagucuu

SEQ ID NO: 33092 - RNA, 32 nt, Homo Sapiens
uuugguuccagauugugcaaucuuuaagaaaa

SEQ ID NO: 33093 - RNA, 32 nt, Homo Sapiens
aacaagugagcauugugaaaaggaaaaaauuu

SEQ ID NO: 33094 - RNA, 32 nt, Homo Sapiens
auguuguaccaccuuggugagucauaugccac

SEQ ID NO: 33095 - RNA, 32 nt, Homo Sapiens
caacugagcugcugguguguaccccuuagcag

SEQ ID NO: 33096 - RNA, 32 nt, Homo Sapiens
uuuagagcguguuuccuguuaaguaaaaucau

SEQ ID NO: 33097 - RNA, 32 nt, Homo Sapiens
augccucuuuucccacccacuggaaggcucac

SEQ ID NO: 33098 - RNA, 32 nt, Homo Sapiens
cuuuuuucacuuuucuucuccucaacaucuga

SEQ ID NO: 33099 - RNA, 32 nt, Homo Sapiens
aggacuccggacacugcccaucucuaagauaa

SEQ ID NO: 33100 - RNA, 32 nt, Homo Sapiens
uuacuagcgugugccuuuugccugcuucucuu

SEQ ID NO: 33101 - RNA, 32 nt, Homo Sapiens
uguacaccaauauucauagcagcuuauucaca

SEQ ID NO: 33102 - RNA, 32 nt, Homo Sapiens
gcgccggacuggcgcuuuuggccggcuuggca

SEQ ID NO: 33103 - RNA, 32 nt, Homo Sapiens
acugggcuuagcuguccagagcccugccggag

SEQ ID NO: 33104 - RNA, 32 nt, Homo Sapiens
cgcugugugggggcuuccaggggggugagggc

SEQ ID NO: 33105 - RNA, 32 nt, Homo Sapiens
gaggaguggcagaagaaagauagguuggagac

SEQ ID NO: 33106 - RNA, 32 nt, Homo Sapiens
caaggcccuaaaauaucacuguuauuuuugga

SEQ ID NO: 33107 - RNA, 32 nt, Homo Sapiens
ugccguccuauuuauuucuauauuuagaaauu

SEQ ID NO: 33108 - RNA, 32 nt, Homo Sapiens
aauuaccaaacacuaugugaccuggaguuugu

SEQ ID NO: 33109 - RNA, 32 nt, Homo Sapiens
ggcccuccugucccacuauugcuggaggcugg

SEQ ID NO: 33110 - RNA, 32 nt, Homo Sapiens
cccgcgcucacgggaccgggcgguugggagcg

SEQ ID NO: 33111 - RNA, 32 nt, Homo Sapiens
uuuagaaggugaggggaggggaggcuuuuucu

SEQ ID NO: 33112 - RNA, 32 nt, Homo Sapiens
ggccaaggggagaaaaggagccgcuucugccu

SEQ ID NO: 33113 - RNA, 32 nt, Homo Sapiens
ccagggcgcuggcagaccaugcuccgccucca

SEQ ID NO: 33114 - RNA, 29 nt, Homo Sapiens
ucuaguuuggcuuucagaguucaagagug

SEQ ID NO: 33115 - RNA, 32 nt, Homo Sapiens
cuucgggaaauauuucugcuuuuauuuuauaa

SEQ ID NO: 33116 - RNA, 32 nt, Homo Sapiens
auagcuuguaaaaucaggugaauuauuuaacc

SEQ ID NO: 33117 - RNA, 32 nt, Homo Sapiens
uuuuccuagucuguuuucccuccuuggagaca

SEQ ID NO: 33118 - RNA, 32 nt, Homo Sapiens
gacuucggggcccagggaccaaccugcaugga

SEQ ID NO: 33119 - RNA, 32 nt, Homo Sapiens
uguuugcucuuguuaauuaugaauuaauugau

SEQ ID NO: 33120 - RNA, 32 nt, Homo Sapiens
cugccguguucucccugcggcucggacacaua

SEQ ID NO: 33121 - RNA, 32 nt, Homo Sapiens
gucuggggaugugguaccggcugcuggcggcg

SEQ ID NO: 33122 - RNA, 32 nt, Homo Sapiens
caucagauguccaugaaagaaugacccuggug

SEQ ID NO: 33123 - RNA, 32 nt, Homo Sapiens
ggggcggaucauuugaggucaggaguuugaga

SEQ ID NO: 33124 - RNA, 32 nt, Homo Sapiens
ugaaggcugggguggcggcugucuuggaaccu

SEQ ID NO: 33125 - RNA, 32 nt, Homo Sapiens
acacuuagagaaaaaggaagguuuauucuugu

SEQ ID NO: 33126 - RNA, 32 nt, Homo Sapiens
gauauguuuuuccgcuacugagucuguguagu

SEQ ID NO: 33127 - RNA, 32 nt, Homo Sapiens
ucuccaucgguaaaguugggaagguggagaga

SEQ ID NO: 33128 - RNA, 32 nt, Homo Sapiens
agcggagcugggugaaggcugcggguuccggc

SEQ ID NO: 33129 - RNA, 32 nt, Homo Sapiens
gucaagcuguuuguuuacucuuucuuugaaaa

SEQ ID NO: 33130 - RNA, 32 nt, Homo Sapiens
cuauuuugcuauauuucuuguagauugaauau

SEQ ID NO: 33131 - RNA, 32 nt, Homo Sapiens
ugaacccugucuucuugacauccaccaagaua

SEQ ID NO: 33132 - RNA, 32 nt, Homo Sapiens
auccucgccgcgcuccagcaccucugaaguuu

SEQ ID NO: 33133 - RNA, 30 nt, Homo Sapiens
cuggccugccaugugggggaacccgcccgg

SEQ ID NO: 33134 - RNA, 32 nt, Homo Sapiens
cugcaccuggggagaguuaggaaccacuuaag

SEQ ID NO: 33135 - RNA, 32 nt, Homo Sapiens
gugcaaccauuaccaccauccaucuccauaac

SEQ ID NO: 33136 - RNA, 32 nt, Homo Sapiens
aaguggccuccagccucccucguggucugaga

SEQ ID NO: 33137 - RNA, 31 nt, Homo Sapiens
ugccugugaaacacagcccagaggaguucuc

SEQ ID NO: 33138 - RNA, 32 nt, Homo Sapiens
ugauuuuuuuuuuucuugauagauacuaauaa

SEQ ID NO: 33139 - RNA, 32 nt, Homo Sapiens
ugugggaggggcugacagcagcagccggcugu

SEQ ID NO: 33140 - RNA, 32 nt, Homo Sapiens
aaggaauuuagauuaaacuuuuaauauguugu

SEQ ID NO: 33141 - RNA, 32 nt, Homo Sapiens
guuuuuugucucuucauguucaauguuugaaa

SEQ ID NO: 33142 - RNA, 32 nt, Homo Sapiens
gccgcggucgucggggagccccggggcucacc

SEQ ID NO: 33143 - RNA, 32 nt, Homo Sapiens
cacuuauaaucccagcacuuugggaggccagg

SEQ ID NO: 33144 - RNA, 32 nt, Homo Sapiens
ccagcagggauggggcaucgguccuggcuggu

SEQ ID NO: 33145 - RNA, 32 nt, Homo Sapiens
ucucagaguuccaguuucaaccagaguuccaa

SEQ ID NO: 33146 - RNA, 32 nt, Homo Sapiens
caauucuuucccuguaucaaauuucccuuguc

SEQ ID NO: 33147 - RNA, 32 nt, Homo Sapiens
ugaggggcugcaggugaugcauugcacgggac

SEQ ID NO: 33148 - RNA, 32 nt, Homo Sapiens
gcagaacuuccacagcugucggccucgccucg

SEQ ID NO: 33149 - RNA, 31 nt, Homo Sapiens
gggagcugggucccuaguuacacagagaacc

SEQ ID NO: 33150 - RNA, 32 nt, Homo Sapiens
ggcccgaccuggagggcccccggggcacuggg

SEQ ID NO: 33151 - RNA, 32 nt, Homo Sapiens
aauccaaaaacacaaucccauaugacagaugg

SEQ ID NO: 33152 - RNA, 32 nt, Homo Sapiens
cugggacuuuaaagguuauauguccggucacc

SEQ ID NO: 33153 - RNA, 32 nt, Homo Sapiens
aggcgcgcaccaagccgccccgagguucucag

SEQ ID NO: 33154 - RNA, 32 nt, Homo Sapiens
aaauaaaaacaaaaacacaguagucucaugga

SEQ ID NO: 33155 - RNA, 32 nt, Homo Sapiens
gcagcgccgcgugcggcccacucacgggccgg

SEQ ID NO: 33156 - RNA, 32 nt, Homo Sapiens
aaugcacugugacaccagaauaaugagucugc

SEQ ID NO: 33157 - RNA, 31 nt, Homo Sapiens
ucagcugccgcggucgcuccgagcggcgggc

SEQ ID NO: 33158 - RNA, 32 nt, Homo Sapiens
uagcagucucagaauguucuccaggauucuga

SEQ ID NO: 33159 - RNA, 32 nt, Homo Sapiens
uuucuaaucaccgugauacgucgaucccuuaa

SEQ ID NO: 33160 - RNA, 32 nt, Homo Sapiens
aagauaaacccgcuccacccgacccgccgacc

SEQ ID NO: 33161 - RNA, 32 nt, Homo Sapiens
gcacaauuuauuucuacacauaaaguuuuuaa

SEQ ID NO: 33162 - RNA, 27 nt, Homo Sapiens
cugcauccuuuuuucagcccaacauuu

SEQ ID NO: 33163 - RNA, 32 nt, Homo Sapiens
gggccgagcuggugggggagcugaacggguac

SEQ ID NO: 33164 - RNA, 32 nt, Homo Sapiens
aaaugaagauuuauuucuuuuaauuuacuuaa

SEQ ID NO: 33165 - RNA, 32 nt, Homo Sapiens
ucucacguggguguacauguguguggcgugug

SEQ ID NO: 33166 - RNA, 32 nt, Homo Sapiens
acucugacauuaauggaagagaauauuuucca

SEQ ID NO: 33167 - RNA, 32 nt, Homo Sapiens
gaacaggccccaauauuuggggugcugugaua

SEQ ID NO: 33168 - RNA, 32 nt, Homo Sapiens
gccugggugcucaggcuuugcccaggugccag

SEQ ID NO: 33169 - RNA, 32 nt, Homo Sapiens
cggcggcggcggcggcagcaguagcagcaaua

SEQ ID NO: 33170 - RNA, 30 nt, Homo Sapiens
aucuguaagccaaggagggaaaccucagaa

SEQ ID NO: 33171 - RNA, 32 nt, Homo Sapiens
aaagaaucucaaaacuacuguuuuacauagau

SEQ ID NO: 33172 - RNA, 32 nt, Homo Sapiens
aacauuuuuguuagccugaucuguagguggga

SEQ ID NO: 33173 - RNA, 32 nt, Homo Sapiens
guuuguguuugggacuggaaaaggggaaaaau

SEQ ID NO: 33174 - RNA, 28 nt, Homo Sapiens
ccggggcggcggccgaauggagagaaag

SEQ ID NO: 33175 - RNA, 30 nt, Homo Sapiens
ccgcaggcgcccgacgcugccgaugucccg

SEQ ID NO: 33176 - RNA, 32 nt, Homo Sapiens
guuucggggaggaucucggacccagagacucg

SEQ ID NO: 33177 - RNA, 32 nt, Homo Sapiens
gugaacucaaccccaauuuccccgagacauuu

SEQ ID NO: 33178 - RNA, 32 nt, Homo Sapiens
ccaccccacuucagccucccccacucuugccg

SEQ ID NO: 33179 - RNA, 32 nt, Homo Sapiens
ucagcgagggguggggggaggggggagauuuu

SEQ ID NO: 33180 - RNA, 32 nt, Homo Sapiens
ccuaggagggggugggggcagguagggggaga

SEQ ID NO: 33181 - RNA, 32 nt, Homo Sapiens
cccgcuuuguagccccccggcggagaggcggc

SEQ ID NO: 33182 - RNA, 32 nt, Homo Sapiens
gucugcagcucugggcccccagccccacugug

SEQ ID NO: 33183 - RNA, 32 nt, Homo Sapiens
uaugaaaacauauauuugauaaaggucaauug

SEQ ID NO: 33184 - RNA, 32 nt, Homo Sapiens
caguaguauguggagaguacagacaaguauuu

SEQ ID NO: 33185 - RNA, 32 nt, Homo Sapiens
agaucugcguuucuaacauguucugagcugcu

SEQ ID NO: 33186 - RNA, 32 nt, Homo Sapiens
uaauauaaauuaagccauaacaguuucaugcu

SEQ ID NO: 33187 - RNA, 32 nt, Homo Sapiens
ggacugacuccagccucugcuccgggaggccc

SEQ ID NO: 33188 - RNA, 32 nt, Homo Sapiens
acgagccuggggcuccagcagcagccaggcgg

SEQ ID NO: 33189 - RNA, 32 nt, Homo Sapiens
cccgccucagggccaggcccaggccucaccac

SEQ ID NO: 33190 - RNA, 32 nt, Homo Sapiens
agcugagauugugccacugcacuucagccugg

SEQ ID NO: 33191 - RNA, 32 nt, Homo Sapiens
aguggcuggguggccuggcccugguagcaagg

SEQ ID NO: 33192 - RNA, 32 nt, Homo Sapiens
cauuagacaccuguguguaguggccucugauu

SEQ ID NO: 33193 - RNA, 32 nt, Homo Sapiens
gaguuaggcucgcgccggcgcagugucggcug

SEQ ID NO: 33194 - RNA, 32 nt, Homo Sapiens
acuugcccacgagcacacagccaggccuggca

SEQ ID NO: 33195 - RNA, 32 nt, Homo Sapiens
gacauuucucaaaguuuuuacaguguaucucg

SEQ ID NO: 33196 - RNA, 32 nt, Homo Sapiens
agcuccacccucaugaaugggauuaguguccu

SEQ ID NO: 33197 - RNA, 32 nt, Homo Sapiens
ucuaccaaaaauacaaaaaauuagcugggagu

SEQ ID NO: 33198 - RNA, 32 nt, Homo Sapiens
ucggugcucagcgguguuggaacuucguugcu

SEQ ID NO: 33199 - RNA, 32 nt, Homo Sapiens
caaugaaaauggaagcacuuuagugguaguau

SEQ ID NO: 33200 - RNA, 32 nt, Homo Sapiens
acuggugaucagggcccggcccacggcccuga

SEQ ID NO: 33201 - RNA, 30 nt, Homo Sapiens
uuggcggagacaggcuaugagucugacguu

SEQ ID NO: 33202 - RNA, 32 nt, Homo Sapiens
auauuagcagcaugcaauaauuacaucauaag

SEQ ID NO: 33203 - RNA, 32 nt, Homo Sapiens
caagaguuacaaucuggacuugguaccuaaau

SEQ ID NO: 33204 - RNA, 32 nt, Homo Sapiens
cgaaggcccgcggcgccccgugcugcaguaag

SEQ ID NO: 33205 - RNA, 32 nt, Homo Sapiens
acauucugcacacacacucacacacacacaca

SEQ ID NO: 33206 - RNA, 32 nt, Homo Sapiens
acguggaaauuugagugagaaagguggggaaa

SEQ ID NO: 33207 - RNA, 32 nt, Homo Sapiens
aggcgcggcuggcgcggagucugcgggugcag

SEQ ID NO: 33208 - RNA, 32 nt, Homo Sapiens
cucccugccucaggccucugugccgcaccauu

SEQ ID NO: 33209 - RNA, 32 nt, Homo Sapiens
aauaaaaaccacggaguucugcucuuguugcc

SEQ ID NO: 33210 - RNA, 32 nt, Homo Sapiens
uucaaagucuuagguuucgguguaucuaaccu

SEQ ID NO: 33211 - RNA, 32 nt, Homo Sapiens
gcgcggcggcccgaccggggccccugaauggc

SEQ ID NO: 33212 - RNA, 32 nt, Homo Sapiens
ggcacugguuuggccaaguguacaauaggucc

SEQ ID NO: 33213 - RNA, 32 nt, Homo Sapiens
aaguccacauagcucuccuguuuucuguauac

SEQ ID NO: 33214 - RNA, 32 nt, Homo Sapiens
gagcggcccgcacaccugagccgcccggagag

SEQ ID NO: 33215 - RNA, 32 nt, Homo Sapiens
gucucugccgccuccuccuccuccuacaccgc

SEQ ID NO: 33216 - RNA, 32 nt, Homo Sapiens
gucuccucuuucugccacuugugcgcugcuuc

SEQ ID NO: 33217 - RNA, 32 nt, Homo Sapiens
ugccaggcugggguguuuucgguaucugcugu

SEQ ID NO: 33218 - RNA, 32 nt, Homo Sapiens
uccuuucuacugacaaccaguccuccacauca

SEQ ID NO: 33219 - RNA, 32 nt, Homo Sapiens
uguuguguggauguggagaugacuccaucccu

SEQ ID NO: 33220 - RNA, 32 nt, Homo Sapiens
augggggacaaugauucuguucacauugggac

SEQ ID NO: 33221 - RNA, 32 nt, Homo Sapiens
cccuuuuuagucccuuuccaaagcugccccca

SEQ ID NO: 33222 - RNA, 32 nt, Homo Sapiens
auguucugcuuugcuuggcacaaaauaaaugu

SEQ ID NO: 33223 - RNA, 32 nt, Homo Sapiens
uugaugugguuuucauuucucauguuuauauu

SEQ ID NO: 33224 - RNA, 32 nt, Homo Sapiens
caguggguggccaucgaucuggaccguccccu

SEQ ID NO: 33225 - RNA, 32 nt, Homo Sapiens
agucggccugcgcuccucagccuggcgguucu

SEQ ID NO: 33226 - RNA, 32 nt, Homo Sapiens
uaagaacagccacuucugaccuggggccucga

SEQ ID NO: 33227 - RNA, 32 nt, Homo Sapiens
gggagccgagccgggcggggcgagggcagcuc

SEQ ID NO: 33228 - RNA, 32 nt, Homo Sapiens
aggagcggucccggcuucggaaagggcccacc

SEQ ID NO: 33229 - RNA, 32 nt, Homo Sapiens
caugcgcgcgccccugaagcgccugggggacg

SEQ ID NO: 33230 - RNA, 32 nt, Homo Sapiens
gcugccaaauauugcuuuuuuauuccucacag

SEQ ID NO: 33231 - RNA, 32 nt, Homo Sapiens
uuucucagcaacacaaacuauaucuguaaagg

SEQ ID NO: 33232 - RNA, 32 nt, Homo Sapiens
uuggcccuaaaauuuauaugaaaugaaaagga

SEQ ID NO: 33233 - RNA, 29 nt, Homo Sapiens
acucucuuuucccucuaccacaaaacugc

SEQ ID NO: 33234 - RNA, 32 nt, Homo Sapiens
gaccuagcuuuuaccuucguuaacucaaaccu

SEQ ID NO: 33235 - RNA, 32 nt, Homo Sapiens
agagacuagacaaauaacuacugcaaaaagua

SEQ ID NO: 33236 - RNA, 32 nt, Homo Sapiens
cuuaguaucuaauaaugaaguguuauuacaua

SEQ ID NO: 33237 - RNA, 32 nt, Homo Sapiens
ucccacaggacacgcuaagaagcacagggagc

SEQ ID NO: 33238 - RNA, 32 nt, Homo Sapiens
uugagggccaucucacaggcugcccaccacag

SEQ ID NO: 33239 - RNA, 32 nt, Homo Sapiens
ggcggugcugccgccccacgcugcgcgagagg

SEQ ID NO: 33240 - RNA, 30 nt, Homo Sapiens
aaacaugucuguguuggaauacgcgacaga

SEQ ID NO: 33241 - RNA, 32 nt, Homo Sapiens
auugagggugauguuaucagccaugacaucag

SEQ ID NO: 33242 - RNA, 32 nt, Homo Sapiens
caaagacuuuuuugaaaauaugcagaaauuug

SEQ ID NO: 33243 - RNA, 32 nt, Homo Sapiens
cugaagauuuauguuuuugucuaccuugugag

SEQ ID NO: 33244 - RNA, 32 nt, Homo Sapiens
gcagcauccagggcucugggccccacaggcca

SEQ ID NO: 33245 - RNA, 32 nt, Homo Sapiens
gguccgcgccgcugcgguugcugcugggcuaa

SEQ ID NO: 33246 - RNA, 32 nt, Homo Sapiens
gggcucucuugaaagaaaaguaguuucuguac

SEQ ID NO: 33247 - RNA, 32 nt, Homo Sapiens
gaaguggcugccccuugcuggaccugaauucu

SEQ ID NO: 33248 - RNA, 32 nt, Homo Sapiens
ggagaccagagcccagcuugccaggcacugag

SEQ ID NO: 33249 - RNA, 32 nt, Homo Sapiens
ggcgcggccccgaggcgugugcgcggccaugu

SEQ ID NO: 33250 - RNA, 32 nt, Homo Sapiens
cugaucaggggagguggggguacacaucaauu

SEQ ID NO: 33251 - RNA, 32 nt, Homo Sapiens
gcacccacgccucggcgaccaccaugucccag

SEQ ID NO: 33252 - RNA, 32 nt, Homo Sapiens
aaggggagaaagugaagugacuuccagcuugc

SEQ ID NO: 33253 - RNA, 32 nt, Homo Sapiens
aagcccuccugggaugucugugccaugugauu

SEQ ID NO: 33254 - RNA, 32 nt, Homo Sapiens
gagcccgguggcggcgguggccggggagccca

SEQ ID NO: 33255 - RNA, 32 nt, Homo Sapiens
agucccugucuccgaggccugcuugcuaggug

SEQ ID NO: 33256 - RNA, 32 nt, Homo Sapiens
aaaccucacuguuuccuccuuccagggacuga

SEQ ID NO: 33257 - RNA, 32 nt, Homo Sapiens
uaagacacaugagaauuuaacuuuauaaccgc

SEQ ID NO: 33258 - RNA, 32 nt, Homo Sapiens
acaaacacaaaacacgaauagugagagacaaa

SEQ ID NO: 33259 - RNA, 32 nt, Homo Sapiens
gcaugaccuuggcgucuguucugggagcacag

SEQ ID NO: 33260 - RNA, 32 nt, Homo Sapiens
uccggggguucgcccgcggaggccggggagca

SEQ ID NO: 33261 - RNA, 32 nt, Homo Sapiens
ggcuggcaggggcagugaccggcggccggccc

SEQ ID NO: 33262 - RNA, 32 nt, Homo Sapiens
ccucaagccagcugcuccuccuccguucauuu

SEQ ID NO: 33263 - RNA, 32 nt, Homo Sapiens
uguggggcccaccugugcccucaugggcagcu

SEQ ID NO: 33264 - RNA, 32 nt, Homo Sapiens
uuguauacagcgaaacuaagcaucauauuuga

SEQ ID NO: 33265 - RNA, 32 nt, Homo Sapiens
uugaccuccagaugcagauguuggacaaauuu

SEQ ID NO: 33266 - RNA, 27 nt, Homo Sapiens
ccaugaggccaccagaaccgcgaaagg

SEQ ID NO: 33267 - RNA, 32 nt, Homo Sapiens
uauugugaugaugaagaacuaauuauauuugu

SEQ ID NO: 33268 - RNA, 32 nt, Homo Sapiens
caggggucgccaaauguuuucuuaaagagccu

SEQ ID NO: 33269 - RNA, 32 nt, Homo Sapiens
aaaguagaaauuguauucuuuauuuuccaucu

SEQ ID NO: 33270 - RNA, 32 nt, Homo Sapiens
cacuaacccaggcuccuccucgccccggccuc

SEQ ID NO: 33271 - RNA, 32 nt, Homo Sapiens
cucuacucucacugacaccccugggauguauc

SEQ ID NO: 33272 - RNA, 32 nt, Homo Sapiens
gagaagcagaacagcccagagccccaggugcc

SEQ ID NO: 33273 - RNA, 32 nt, Homo Sapiens
caaaugucauaugggguaacacugaccuuuua

SEQ ID NO: 33274 - RNA, 32 nt, Homo Sapiens
uacaacaccaaaaugaauuuuggcaccauccu

SEQ ID NO: 33275 - RNA, 28 nt, Homo Sapiens
caaagguauuaaaagauuguuuaacagu

SEQ ID NO: 33276 - RNA, 32 nt, Homo Sapiens
uaaauauaugccguguaaaaaauguacuuaua

SEQ ID NO: 33277 - RNA, 32 nt, Homo Sapiens
guucuggcugugugugaaggaugugugugagc

SEQ ID NO: 33278 - RNA, 32 nt, Homo Sapiens
caaaugcuguccccggcagcuuuccuggggga

SEQ ID NO: 33279 - RNA, 32 nt, Homo Sapiens
aagcuccaggggcuuugagagagacgacccca

SEQ ID NO: 33280 - RNA, 32 nt, Homo Sapiens
ucaggaaaucuaguuugcuauuuuuucuccca

SEQ ID NO: 33281 - RNA, 32 nt, Homo Sapiens
aaaagacugggaagagagcuagagggacuagg

SEQ ID NO: 33282 - RNA, 32 nt, Homo Sapiens
agggauggggaguagcaacauaaaaagaagug

SEQ ID NO: 33283 - RNA, 32 nt, Homo Sapiens
ugaaagaugugucauaucaugugcccucuaug

SEQ ID NO: 33284 - RNA, 32 nt, Homo Sapiens
uuuuuuaaaaagacauuucauagccaacaaga

SEQ ID NO: 33285 - RNA, 32 nt, Homo Sapiens
acuacggcuuugauuuuccaagugguucagaa

SEQ ID NO: 33286 - RNA, 32 nt, Homo Sapiens
gccuccccacccaggccggcaaccuggccauc

SEQ ID NO: 33287 - RNA, 32 nt, Homo Sapiens
ccucagucaggugccaggauccugccuaggag

SEQ ID NO: 33288 - RNA, 32 nt, Homo Sapiens
cccuucugcaggucuuggcugguuucaggaaa

SEQ ID NO: 33289 - RNA, 32 nt, Homo Sapiens
uuccaucaugagugcagugucaucucagcggg

SEQ ID NO: 33290 - RNA, 32 nt, Homo Sapiens
guggacucacggcugcugggccccacgucaaa

SEQ ID NO: 33291 - RNA, 32 nt, Homo Sapiens
uccuuuauccagcacagcuuuaccaagcagcu

SEQ ID NO: 33292 - RNA, 32 nt, Homo Sapiens
ugggaaaagaauuuaauucuagaucuuucauu

SEQ ID NO: 33293 - RNA, 32 nt, Homo Sapiens
guggagccugaagauuaaacugaauugcugca

SEQ ID NO: 33294 - RNA, 32 nt, Homo Sapiens
cagcucggguggcgguggcgggagcgggacca

SEQ ID NO: 33295 - RNA, 32 nt, Homo Sapiens
aacugaccauuuaaguuuuuuaauaaguuuuu

SEQ ID NO: 33296 - RNA, 32 nt, Homo Sapiens
cucuuauuccucuguuuguuuagaagcggauc

SEQ ID NO: 33297 - RNA, 32 nt, Homo Sapiens
guuucaaaacgcagguguuucugguuuagaaa

SEQ ID NO: 33298 - RNA, 32 nt, Homo Sapiens
gacgugguucccuccagccuccccaaaaucaa

SEQ ID NO: 33299 - RNA, 32 nt, Homo Sapiens
aguugugagcauucuuuuuuuccuucucaaaa

SEQ ID NO: 33300 - RNA, 32 nt, Homo Sapiens
uggggcucgcuccagggcuuugcagacuggac

SEQ ID NO: 33301 - RNA, 32 nt, Homo Sapiens
uucugugccgggggucuuccugcugucaugaa

SEQ ID NO: 33302 - RNA, 32 nt, Homo Sapiens
gcaaaucccaccuuuaccccaccuuccuggga

SEQ ID NO: 33303 - RNA, 32 nt, Homo Sapiens
cagucccgcugcauucucggccgggcucuagg

SEQ ID NO: 33304 - RNA, 32 nt, Homo Sapiens
agaugguucacuacaguugacauccuggcuga

SEQ ID NO: 33305 - RNA, 32 nt, Homo Sapiens
agccagggccgcgguugugcagccguguggau

SEQ ID NO: 33306 - RNA, 32 nt, Homo Sapiens
aacgugcauuuuuacucaacuaccucagguau

SEQ ID NO: 33307 - RNA, 32 nt, Homo Sapiens
uccgggucugggucuggguccgcugcuucgca

SEQ ID NO: 33308 - RNA, 32 nt, Homo Sapiens
uugauucuauugauuucucaaauuaggaauua

SEQ ID NO: 33309 - RNA, 32 nt, Homo Sapiens
cuuuguauaacuuuuccaagcuuuuacauuaa

SEQ ID NO: 33310 - RNA, 32 nt, Homo Sapiens
gcggccaguccaggaauggguguggcagccca

SEQ ID NO: 33311 - RNA, 32 nt, Homo Sapiens
accgcuccggagcgggaggggaggcuucgcgg

SEQ ID NO: 33312 - RNA, 32 nt, Homo Sapiens
cuggccacgcccuugaagcccuggacacuggc

SEQ ID NO: 33313 - RNA, 32 nt, Homo Sapiens
ccaacagcagugccagccuccgacagcccucc

SEQ ID NO: 33314 - RNA, 32 nt, Homo Sapiens
guugccuucccucuccucgguuccugaugccu

SEQ ID NO: 33315 - RNA, 31 nt, Homo Sapiens
uucugcugugaaacauuucaagauuuauuga

SEQ ID NO: 33316 - RNA, 32 nt, Homo Sapiens
gaauacucauugaguauuuggcuguauauugu

SEQ ID NO: 33317 - RNA, 31 nt, Homo Sapiens
ggggcggugccggucggagggcuccuagugc

SEQ ID NO: 33318 - RNA, 32 nt, Homo Sapiens
aggcaccccaguugugggggagccuguauuuu

SEQ ID NO: 33319 - RNA, 32 nt, Homo Sapiens
uggggucgcagcccggcgugccugcagcugcc

SEQ ID NO: 33320 - RNA, 32 nt, Homo Sapiens
agcuguuguaaauuuggcgcccugugaauacu

SEQ ID NO: 33321 - RNA, 30 nt, Homo Sapiens
ccaccugucuguggcauggagagccucuuu

SEQ ID NO: 33322 - RNA, 31 nt, Homo Sapiens
uuggugccuucuccugcaggagucagagcag

SEQ ID NO: 33323 - RNA, 32 nt, Homo Sapiens
ccgccccguggccugcaggccugcaggggagg

SEQ ID NO: 33324 - RNA, 32 nt, Homo Sapiens
uaaagauagcagcugggaaacgugcacauauu

SEQ ID NO: 33325 - RNA, 32 nt, Homo Sapiens
caccaggcaugguggcucaugccugugguccc

SEQ ID NO: 33326 - RNA, 32 nt, Homo Sapiens
cuucuucacaaagcugcguuccuccuuucccc

SEQ ID NO: 33327 - RNA, 32 nt, Homo Sapiens
uuauuaaaaucuucuuuuuucacuaucguagc

SEQ ID NO: 33328 - RNA, 32 nt, Homo Sapiens
aauacuuaguggcaucaaauguuugcagcagu

SEQ ID NO: 33329 - RNA, 32 nt, Homo Sapiens
ggaaagugaacaugaguuccgaauuccugcgu

SEQ ID NO: 33330 - RNA, 32 nt, Homo Sapiens
uuccuuuagccuggucccuugcuacuaccuug

SEQ ID NO: 33331 - RNA, 32 nt, Homo Sapiens
ugcugggccuucgaccucggaccuccgucuuc

SEQ ID NO: 33332 - RNA, 32 nt, Homo Sapiens
agcagaucacugacaacagccauuggaagcuu

SEQ ID NO: 33333 - RNA, 32 nt, Homo Sapiens
ucauucuccccucccucccaccacauagaauc

SEQ ID NO: 33334 - RNA, 32 nt, Homo Sapiens
ggaacaaauacauacguuaauaugagagauca

SEQ ID NO: 33335 - RNA, 32 nt, Homo Sapiens
gcgggcaggacgccgccucggcggggggugua

SEQ ID NO: 33336 - RNA, 32 nt, Homo Sapiens
gggggcgcuggagcuuccaacccgaggcaaua

SEQ ID NO: 33337 - RNA, 32 nt, Homo Sapiens
ggcacugcuguuuacagccuguguacuccccu

SEQ ID NO: 33338 - RNA, 32 nt, Homo Sapiens
cuugaauguggucucaggauauccuuaucaga

SEQ ID NO: 33339 - RNA, 32 nt, Homo Sapiens
aaaacgccgccgggcgcuucuagucggacaaa

SEQ ID NO: 33340 - RNA, 32 nt, Homo Sapiens
gaggcacacaaagggaacaaaugaagaacaua

SEQ ID NO: 33341 - RNA, 32 nt, Homo Sapiens
uguuacagagaugacaucuuuugucaaaccau

SEQ ID NO: 33342 - RNA, 32 nt, Homo Sapiens
aggcgcgucuccccggcccaguccgcgcccgg

SEQ ID NO: 33343 - RNA, 32 nt, Homo Sapiens
cggguggagacgguuggccccuaaacucgcuc

SEQ ID NO: 33344 - RNA, 32 nt, Homo Sapiens
caggcuagagugcaguggcuauucacagaugc

SEQ ID NO: 33345 - RNA, 32 nt, Homo Sapiens
guaaaacacagaaaagugauuaaugaaugaua

SEQ ID NO: 33346 - RNA, 32 nt, Homo Sapiens
uuccuuuugaauuuauaccauucaucaauuuu

SEQ ID NO: 33347 - RNA, 32 nt, Homo Sapiens
ccacccccauaaaacaccccccuuggugucuu

SEQ ID NO: 33348 - RNA, 32 nt, Homo Sapiens
cguuauuuccuguagagcgggcacgaaauuaa

SEQ ID NO: 33349 - RNA, 32 nt, Homo Sapiens
aagccccacccuccccgccugggcuccccuug

SEQ ID NO: 33350 - RNA, 32 nt, Homo Sapiens
caaguuuccuuccucuguaccacucugcuucc

SEQ ID NO: 33351 - RNA, 32 nt, Homo Sapiens
acaugggagagaaacgcuauaagugugaugug

SEQ ID NO: 33352 - RNA, 32 nt, Homo Sapiens
accugauugcaaauggcuucagaggucaccaa

SEQ ID NO: 33353 - RNA, 32 nt, Homo Sapiens
gcucuuucuuuuuuauucuauccuaaaugaua

SEQ ID NO: 33354 - RNA, 32 nt, Homo Sapiens
agggugacaugaucucaauaaaaggaaugcuc

SEQ ID NO: 33355 - RNA, 32 nt, Homo Sapiens
agccggcugggcucccaccucccgccuuccgc

SEQ ID NO: 33356 - RNA, 32 nt, Homo Sapiens
accccagagaauaguguuaugaguguaauuca

SEQ ID NO: 33357 - RNA, 32 nt, Homo Sapiens
ccaccgcgccuggccugaugccugugugucau

SEQ ID NO: 33358 - RNA, 32 nt, Homo Sapiens
cugcacaauuuaauuaugugguuauucgagca

SEQ ID NO: 33359 - RNA, 32 nt, Homo Sapiens
caaaguuggaaaagaagaauuguaguggucau

SEQ ID NO: 33360 - RNA, 30 nt, Homo Sapiens
cagauuccugucagcggcggcggcgguggc

SEQ ID NO: 33361 - RNA, 32 nt, Homo Sapiens
aaacccacccuguccggaggcgggcgugagac

SEQ ID NO: 33362 - RNA, 32 nt, Homo Sapiens
aaaggacaggggaggaguuuguaagccuugca

SEQ ID NO: 33363 - RNA, 32 nt, Homo Sapiens
gguuucugugcagcuggauuuucucuguugca

SEQ ID NO: 33364 - RNA, 32 nt, Homo Sapiens
cgucgcgcuuccgcccucucggccaugggggu

SEQ ID NO: 33365 - RNA, 32 nt, Homo Sapiens
aauguaaaacaguuaagacuugaaauugaaaa

SEQ ID NO: 33366 - RNA, 32 nt, Homo Sapiens
uccccacuccgucucccuucuggcucccccau

SEQ ID NO: 33367 - RNA, 27 nt, Homo Sapiens
gcauggaccuucaggccgccggggccc

SEQ ID NO: 33368 - RNA, 32 nt, Homo Sapiens
ccuuaaacaaaguaguauguacaugaaauugc

SEQ ID NO: 33369 - RNA, 32 nt, Homo Sapiens
cuuaaugaaaauauguauagcaauuuaagucu

SEQ ID NO: 33370 - RNA, 32 nt, Homo Sapiens
gauuuuaauuuccuauggaaaguugcuuaaau

SEQ ID NO: 33371 - RNA, 32 nt, Homo Sapiens
aucuguagcccggccccgcuugugguccucag

SEQ ID NO: 33372 - RNA, 32 nt, Homo Sapiens
cuguuguggguguaagugacaugauguggcca

SEQ ID NO: 33373 - RNA, 32 nt, Homo Sapiens
uucaggugaacagcacaagaagaauaugaggu

SEQ ID NO: 33374 - RNA, 32 nt, Homo Sapiens
acuagagaauucugugcaaacauaucaucucu

SEQ ID NO: 33375 - RNA, 32 nt, Homo Sapiens
gccuccgucgaguugguggaguacuuggaauc

SEQ ID NO: 33376 - RNA, 32 nt, Homo Sapiens
uagcaagcucuuucgaccauaguugaugguag

SEQ ID NO: 33377 - RNA, 32 nt, Homo Sapiens
ccccugugccuggccccucugugggucucagg

SEQ ID NO: 33378 - RNA, 26 nt, Homo Sapiens
cauggccuccgucuccaagcucgccu

SEQ ID NO: 33379 - RNA, 32 nt, Homo Sapiens
auauuuucucccauucugccaauuaccuuuug

SEQ ID NO: 33380 - RNA, 31 nt, Homo Sapiens
gaaauggaagaaaaacaggucucagcccagg

SEQ ID NO: 33381 - RNA, 32 nt, Homo Sapiens
gugcccucuccgggcgcccgcguuagcggccg

SEQ ID NO: 33382 - RNA, 32 nt, Homo Sapiens
gcucgcuccccggccguggcgccuccgggcca

SEQ ID NO: 33383 - RNA, 32 nt, Homo Sapiens
aguguucaagacagaagaagacuggguaacau

SEQ ID NO: 33384 - RNA, 32 nt, Homo Sapiens
uuggccaggccgaucucgaacuucuggccucu

SEQ ID NO: 33385 - RNA, 32 nt, Homo Sapiens
ggaggguugagaccaggcccccugccaguuga

SEQ ID NO: 33386 - RNA, 32 nt, Homo Sapiens
gcgcgucugaagagcguuuugcggucaucaga

SEQ ID NO: 33387 - RNA, 32 nt, Homo Sapiens
ugcuucugcugcccugaugcgucuacccagac

SEQ ID NO: 33388 - RNA, 32 nt, Homo Sapiens
ugcaaucaacuaaaaauucgucuaucgaauua

SEQ ID NO: 33389 - RNA, 32 nt, Homo Sapiens
uuccaucuuggaugcuaaucuaccauguugac

SEQ ID NO: 33390 - RNA, 32 nt, Homo Sapiens
uuaguaaggcauuugggguuggggaagcuaga

SEQ ID NO: 33391 - RNA, 32 nt, Homo Sapiens
gcuggccuggagagggcccuggggugggaccc

SEQ ID NO: 33392 - RNA, 32 nt, Homo Sapiens
guacccaucaaaaagcacuucaaagaauguau

SEQ ID NO: 33393 - RNA, 32 nt, Homo Sapiens
uuguggccuuccucgcccacuccagugacacu

SEQ ID NO: 33394 - RNA, 32 nt, Homo Sapiens
uuuaaacuucuacaauaugguuuacaauaauu

SEQ ID NO: 33395 - RNA, 32 nt, Homo Sapiens
cucuguuuucuuuggcacgauauuaauauuuu

SEQ ID NO: 33396 - RNA, 32 nt, Homo Sapiens
cuguuaauucuuuuggccccagcccugucccu

SEQ ID NO: 33397 - RNA, 32 nt, Homo Sapiens
cuacaaugcaaccaacagcaacaucaaagagg

SEQ ID NO: 33398 - RNA, 32 nt, Homo Sapiens
aagaaugccacuuuuucuuuuauuucauacca

SEQ ID NO: 33399 - RNA, 32 nt, Homo Sapiens
uauuuguggcagaaggugaucagauaagcucc

SEQ ID NO: 33400 - RNA, 32 nt, Homo Sapiens
uaaagacaaaaauacaucaaggaguuaugcug

SEQ ID NO: 33401 - RNA, 32 nt, Homo Sapiens
gcccagugcagggcugccucagaccacacagg

SEQ ID NO: 33402 - RNA, 32 nt, Homo Sapiens
gaugaaucaaggaagcagggcccugucuuaug

SEQ ID NO: 33403 - RNA, 32 nt, Homo Sapiens
ucccagccuggagcugcagccgcgcaaggccc

SEQ ID NO: 33404 - RNA, 27 nt, Homo Sapiens
ccagauuacuucuucagugccucagga

SEQ ID NO: 33405 - RNA, 29 nt, Homo Sapiens
aaauaggaguguauguaucuuagguucuu

SEQ ID NO: 33406 - RNA, 32 nt, Homo Sapiens
cuggccaggaagauucugggaggcaaugggga

(The sequence listing continues in the following parts.)
